United States Patent Application Publication US 2025/0333448 A1 - sequence listing, part 3

SEQ ID NO: 48140 - protein, 10 aa, Artificial Sequence
  Description of Artificial Sequence: Synthetic peptide
  Seed: AEIIRMMESA
  misc_feature (2)..(2): Xaa can be Glu
  misc_feature (10)..(10): Xaa can be Ala, Ile, Leu, Met, Phe, Pro, or Val
AXIIRMMESX

SEQ ID NO: 48141 - protein, 9 aa, Artificial Sequence
  Description of Artificial Sequence: Synthetic peptide
  Seed: AEIIRVMES
  misc_feature (2)..(2): Xaa can be Glu, Asp, or Gln
  misc_feature (9)..(9): Xaa can be Ile, Leu, Met, Phe, Val, Ala, Cys, Gly, Pro, Ser, Thr, or Trp
AXIIRVMEX

SEQ ID NO: 48142 - protein, 10 aa, Artificial Sequence
  Description of Artificial Sequence: Synthetic peptide
  Seed: AEIIRVMESA
  misc_feature (2)..(2): Xaa can be Glu, Met, Leu, Gln, Ala, Arg, Asn, Asp, Cys, Gly, His, Ile, Lys, Phe, Pro, Ser, Thr, Trp, Tyr, or Val
  misc_feature (10)..(10): Xaa can be Ala, Ile, Leu, Val, Met, Thr, Phe, Pro, or Ser
AXIIRVMESX

SEQ ID NO: 48143 - protein, 9 aa, Artificial Sequence
  Description of Artificial Sequence: Synthetic peptide
  Seed: AEVEDLIFL
  misc_feature (2)..(2): Xaa can be Glu, Met, Gln, Leu, Ile, Val, Thr, Ala, Ser, Asp, Gly, Phe, Asn, Cys, Lys, Trp, or Tyr
  misc_feature (9)..(9): Xaa can be Val, Ile, Ala, Leu, Met, Thr, Cys, Phe, Ser, Trp, Tyr, Pro, or Gly
AXVEDLIFX

SEQ ID NO: 48144 - protein, 10 aa, Artificial Sequence
  Description of Artificial Sequence: Synthetic peptide
  Seed: AEVEDLIFLA
  misc_feature (2)..(2): Xaa can be Glu, Asp, or Gln
  misc_feature (10)..(10): Xaa can be Trp, Ala, Cys, Gly, Ile, Leu, Met, Phe, Pro, Ser, Thr, Tyr, or Val
AXVEDLIFLX

SEQ ID NO: 48145 - protein, 8 aa, Artificial Sequence
  Description of Artificial Sequence: Synthetic peptide
  Seed: AEYEDLIF
  misc_feature (2)..(2): Xaa can be Glu
  misc_feature (8)..(8): Xaa can be Ile, Leu, Met, Phe, or Val
AXYEDLIX

SEQ ID NO: 48146 - protein, 9 aa, Artificial Sequence
  Description of Artificial Sequence: Synthetic peptide
  Seed: AEYEDLIFL
  misc_feature (2)..(2): Xaa can be Gln, Glu, Met, Leu, Ile, Thr, Val, Ala, Ser, Gly, Phe, Asp, Cys, Trp, Asn, Arg, Lys, or Ty r
  misc_feature (9)..(9): Xaa can be Val, Ile, Leu, Ala, Cys, Met, Thr, Phe, Ser, Trp, Gly, Pro, Glu, or Tyr
AXYEDLIFX

SEQ ID NO: 48147 - protein, 10 aa, Artificial Sequence
  Description of Artificial Sequence: Synthetic peptide
  Seed: AEYEDLIFLA
  misc_feature (2)..(2): Xaa can be Glu, Asp, or Gln
  misc_feature (10)..(10): Xaa can be Trp, Leu, Ala, Cys, Gly, His, Ile, Met, Phe, Pro, Ser, Thr, Tyr, or Val
AXYEDLIFLX

SEQ ID NO: 48148 - protein, 9 aa, Artificial Sequence
  Description of Artificial Sequence: Synthetic peptide
  Seed: AFDERRNKY
  misc_feature (2)..(2): Xaa can be Phe, Tyr, or Trp
  misc_feature (9)..(9): Xaa can be Met, Phe, Leu, or Tyr
AXDERRNKX

SEQ ID NO: 48149 - protein, 9 aa, Artificial Sequence
  Description of Artificial Sequence: Synthetic peptide
  Seed: AFDERRNRY
  misc_feature (2)..(2): Xaa can be Phe, Tyr, or Trp
  misc_feature (9)..(9): Xaa can be Met, Phe, Leu, or Tyr
AXDERRNRX

SEQ ID NO: 48150 - protein, 10 aa, Artificial Sequence
  Description of Artificial Sequence: Synthetic peptide
  Seed: AFEDLRISGF
  misc_feature (2)..(2): Xaa can be Glu, Ala, Arg, Asn, Asp, Cys, Gln, Gly, His, Ile, Leu, Lys, Met, Phe, Pro, Ser, Thr, Trp, Tyr, or Val
  misc_feature (10)..(10): Xaa can be Phe, Trp, Ile, or Tyr
AXEDLRISGX

SEQ ID NO: 48151 - protein, 10 aa, Artificial Sequence
  Description of Artificial Sequence: Synthetic peptide
  Seed: AFEDLRLFSF
  misc_feature (2)..(2): Xaa can be Glu, Ala, Arg, Asn, Asp, Cys, Gln, Gly, His, Ile, Leu, Lys, Met, Phe, Pro, Ser, Thr, Trp, Tyr, or Val
  misc_feature (10)..(10): Xaa can be Ile, Leu, Met, Phe, Trp, Tyr, Val, or Ala
AXEDLRLFSX

SEQ ID NO: 48152 - protein, 10 aa, Artificial Sequence
  Description of Artificial Sequence: Synthetic peptide
  Seed: AFEDLRLLSF
  misc_feature (2)..(2): Xaa can be Ala, Arg, Asn, Asp, Cys, Gln, Glu, Gly, His, Ile, Leu, Lys, Met, Phe, Pro, Ser, Thr, Trp, Tyr, or Val
  misc_feature (10)..(10): Xaa can be Ile, Leu, Met, Phe, Trp, Tyr, or Val
AXEDLRLLSX

SEQ ID NO: 48153 - protein, 10 aa, Artificial Sequence
  Description of Artificial Sequence: Synthetic peptide
  Seed: AFEDLRLSSF
  misc_feature (2)..(2): Xaa can be Phe, Tyr, Ala, Arg, Asn, Asp, Cys, Gln, Glu, Gly, His, Ile, Leu, Lys, Met, Pro, Ser, Thr, Trp, or Val
  misc_feature (10)..(10): Xaa can be Ile, Leu, Met, Phe, Val, or Tyr
AXEDLRLSSX

SEQ ID NO: 48154 - protein, 10 aa, Artificial Sequence
  Description of Artificial Sequence: Synthetic peptide
  Seed: AFEDLRVLNF
  misc_feature (2)..(2): Xaa can be Glu, Tyr, Ala, Arg, Asn, Asp, Cys, Gln, Gly, His, Ile, Leu, Lys, Met, Phe, Pro, Ser, Thr, Trp, or Val
  misc_feature (10)..(10): Xaa can be Phe, Trp, Ile, Met, Tyr, or Leu
AXEDLRVLNX

SEQ ID NO: 48155 - protein, 10 aa, Artificial Sequence
  Description of Artificial Sequence: Synthetic peptide
  Seed: AFEDLRVLSF
  misc_feature (2)..(2): Xaa can be Ala, Arg, Asn, Asp, Cys, Gln, Glu, Gly, His, Ile, Leu, Lys, Met, Phe, Pro, Ser, Thr, Trp, Tyr, or Val
  misc_feature (10)..(10): Xaa can be Ile, Leu, Met, Phe, Trp, Tyr, or Val
AXEDLRVLSX

SEQ ID NO: 48156 - protein, 10 aa, Artificial Sequence
  Description of Artificial Sequence: Synthetic peptide
  Seed: AFEDLRVSGF
  misc_feature (2)..(2): Xaa can be Glu, Ala, Arg, Asn, Asp, Cys, Gln, Gly, His, Ile, Leu, Lys, Met, Phe, Pro, Ser, Thr, Trp, Tyr, or Val
  misc_feature (10)..(10): Xaa can be Phe, Trp, Ile, or Tyr
AXEDLRVSGX

SEQ ID NO: 48157 - protein, 10 aa, Artificial Sequence
  Description of Artificial Sequence: Synthetic peptide
  Seed: AFEDLRVSSF
  misc_feature (2)..(2): Xaa can be Arg, Gln, Glu, Met, Phe, Trp, Tyr, Ala, Asn, Asp, Cys, Gly, His, Ile, Leu, Lys, Pro, Ser, Thr, or Val
  misc_feature (10)..(10): Xaa can be Ile, Leu, Met, Phe, Trp, Tyr, or Val
AXEDLRVSSX

SEQ ID NO: 48158 - protein, 9 aa, Artificial Sequence
  Description of Artificial Sequence: Synthetic peptide
  Seed: AFEERRNKY
  misc_feature (2)..(2): Xaa can be Phe, Tyr, or Trp
  misc_feature (9)..(9): Xaa can be Met, Leu, Phe, or Tyr
AXEERRNKX

SEQ ID NO: 48159 - protein, 9 aa, Artificial Sequence
  Description of Artificial Sequence: Synthetic peptide
  Seed: AFEKEGYSL
  misc_feature (2)..(2): Xaa can be Phe or Tyr
  misc_feature (9)..(9): Xaa can be Leu, Met, Phe, or Tyr
AXEKEGYSX

SEQ ID NO: 48160 - protein, 10 aa, Artificial Sequence
  Description of Artificial Sequence: Synthetic peptide
  Seed: AFEKEGYSLV
  misc_feature (2)..(2): Xaa can be Ala, Arg, Asn, Asp, Cys, Gln, Glu, Gly, His, Ile, Leu, Lys, Met, Phe, Pro, Ser, Thr, Trp, Tyr, or Val
  misc_feature (10)..(10): Xaa can be Ile, Leu, Met, Phe, or Val
AXEKEGYSLX

SEQ ID NO: 48161 - protein, 9 aa, Artificial Sequence
  Description of Artificial Sequence: Synthetic peptide
  Seed: AFIGDNEGR
  misc_feature (2)..(2): Xaa can be Ile, Met, Phe, Ser, Thr, Tyr, or Val
  misc_feature (9)..(9): Xaa can be Arg
AXIGDNEGX

SEQ ID NO: 48162 - protein, 9 aa, Artificial Sequence
  Description of Artificial Sequence: Synthetic peptide
  Seed: AFIGNNEGR
  misc_feature (2)..(2): Xaa can be Ala, Gln, Ile, Leu, Met, Phe, Ser, Thr, Trp, Tyr, or Val
  misc_feature (9)..(9): Xaa can be Arg
AXIGNNEGX

SEQ ID NO: 48163 - protein, 9 aa, Artificial Sequence
  Description of Artificial Sequence: Synthetic peptide
  Seed: AFIGNTEGR
  misc_feature (2)..(2): Xaa can be Tyr, Ala, Asn, Gln, Gly, Ile, Leu, Met, Phe, Ser, Thr, Trp, or Val
  misc_feature (9)..(9): Xaa can be Arg or Lys
AXIGNTEGX

SEQ ID NO: 48164 - protein, 9 aa, Artificial Sequence
  Description of Artificial Sequence: Synthetic peptide
  Seed: AFKGNTEGR
  misc_feature (2)..(2): Xaa can be Met, Thr, Tyr, Ala, Gln, Gly, Ile, Leu, Phe, Ser, Trp, or Val
  misc_feature (9)..(9): Xaa can be Arg or Lys
AXKGNTEGX

SEQ ID NO: 48165 - protein, 9 aa, Artificial Sequence
  Description of Artificial Sequence: Synthetic peptide
  Seed: AFNGNTEGR
  misc_feature (2)..(2): Xaa can be Met, Ala, Gln, Gly, Ile, Leu, Phe, Ser, Thr, Trp, Tyr, or Val
  misc_feature (9)..(9): Xaa can be Arg or Lys
AXNGNTEGX

SEQ ID NO: 48166 - protein, 9 aa, Artificial Sequence
  Description of Artificial Sequence: Synthetic peptide
  Seed: AFSGNNEGR
  misc_feature (2)..(2): Xaa can be Ile, Leu, Met, Phe, Ser, Thr, Tyr, or Val
  misc_feature (9)..(9): Xaa can be Arg
AXSGNNEGX

SEQ ID NO: 48167 - protein, 9 aa, Artificial Sequence
  Description of Artificial Sequence: Synthetic peptide
  Seed: AFSGNTEGR
  misc_feature (2)..(2): Xaa can be Ala, Gln, Ile, Leu, Met, Phe, Ser, Thr, Tyr, or Val
  misc_feature (9)..(9): Xaa can be Arg
AXSGNTEGX

SEQ ID NO: 48168 - protein, 10 aa, Artificial Sequence
  Description of Artificial Sequence: Synthetic peptide
  Seed: AFSVQKNLPF
  misc_feature (2)..(2): Xaa can be Tyr, Gln, Met, Ala, Arg, Asn, Asp, Cys, Glu, Gly, His, Ile, Leu, Lys, Phe, Pro, Ser, Thr, Trp, or Val
  misc_feature (10)..(10): Xaa can be Met, Phe, Trp, Tyr, Leu, or Ile
AXSVQKNLPX

SEQ ID NO: 48169 - protein, 10 aa, Artificial Sequence
  Description of Artificial Sequence: Synthetic peptide
  Seed: AFSVQRNLPF
  misc_feature (2)..(2): Xaa can be Gln, Tyr, Met, Ser, Thr, Ala, Arg, Asn, Asp, Cys, Glu, Gly, His, Ile, Leu, Lys, Phe, Pro, Trp, or Val
  misc_feature (10)..(10): Xaa can be Met, Phe, Trp, Tyr, Leu, Ile, or His
AXSVQRNLPX

SEQ ID NO: 48170 - protein, 9 aa, Artificial Sequence
  Description of Artificial Sequence: Synthetic peptide
  Seed: AFTGNNEGR
  misc_feature (2)..(2): Xaa can be Met, Phe, Ser, Thr, Tyr, or Val
  misc_feature (9)..(9): Xaa can be Arg
AXTGNNEGX

SEQ ID NO: 48171 - protein, 9 aa, Artificial Sequence
  Description of Artificial Sequence: Synthetic peptide
  Seed: AFTGNTEGR
  misc_feature (2)..(2): Xaa can be Ile, Met, Phe, Ser, Thr, Tyr, or Val
  misc_feature (9)..(9): Xaa can be Arg
AXTGNTEGX

SEQ ID NO: 48172 - protein, 9 aa, Artificial Sequence
  Description of Artificial Sequence: Synthetic peptide
  Seed: AFTGNTERR
  misc_feature (2)..(2): Xaa can be Ile, Leu, Met, Phe, Ser, Thr, Tyr, or Val
  misc_feature (9)..(9): Xaa can be Arg
AXTGNTERX

SEQ ID NO: 48173 - protein, 9 aa, Artificial Sequence
  Description of Artificial Sequence: Synthetic peptide
  Seed: AFVGNNEGR
  misc_feature (2)..(2): Xaa can be Ile, Leu, Met, Phe, Ser, Thr, Tyr, or Val
  misc_feature (9)..(9): Xaa can be Arg
AXVGNNEGX

SEQ ID NO: 48174 - protein, 9 aa, Artificial Sequence
  Description of Artificial Sequence: Synthetic peptide
  Seed: AFVGNTEGR
  misc_feature (2)..(2): Xaa can be Ala, Gln, Ile, Leu, Met, Phe, Ser, Thr, Tyr, or Val
  misc_feature (9)..(9): Xaa can be Arg
AXVGNTEGX

SEQ ID NO: 48175 - protein, 10 aa, Artificial Sequence
  Description of Artificial Sequence: Synthetic peptide
  Seed: AGHISVQPTF
  misc_feature (2)..(2): Xaa can be Gln, Lys, Met, Ala, Arg, Glu, His, Leu, Ser, Asn, Asp, Cys, Gly, Ile, Phe, Pro, Thr, Trp, Tyr, or Val
  misc_feature (10)..(10): Xaa can be Phe, Tyr, Met, Leu, His, Ile, or Trp
AXHISVQPTX

SEQ ID NO: 48176 - protein, 9 aa, Artificial Sequence
  Description of Artificial Sequence: Synthetic peptide
  Seed: AGLTHIMIW
  misc_feature (2)..(2): Xaa can be Ser, Thr, Ala, Val, Gly, Ile, Met, Asn, Cys, Gln, or Leu
  misc_feature (9)..(9): Xaa can be Trp, Phe, Tyr, Ile, Leu, Met, or Val
AXLTHIMIX

SEQ ID NO: 48177 - protein, 9 aa, Artificial Sequence
  Description of Artificial Sequence: Synthetic peptide
  Seed: AGLTHLMIW
  misc_feature (2)..(2): Xaa can be Ser, Thr, Ala, Val, Gly, Ile, Met, Asn, Cys, Gln, or Leu
  misc_feature (9)..(9): Xaa can be Trp, Phe, Tyr, Leu, Met, Ile, or Val
AXLTHLMIX

SEQ ID NO: 48178 - protein, 9 aa, Artificial Sequence
  Description of Artificial Sequence: Synthetic peptide
  Seed: AGLTHMMIW
  misc_feature (2)..(2): Xaa can be Ser, Thr, Ala, Val, Gly, Ile, Met, Asn, Cys, Gln, or Leu
  misc_feature (9)..(9): Xaa can be Trp, Phe, Tyr, Ile, Leu, Met, or Val
AXLTHMMIX

SEQ ID NO: 48179 - protein, 10 aa, Artificial Sequence
  Description of Artificial Sequence: Synthetic peptide
  Seed: AGMDPRMCSL
  misc_feature (2)..(2): Xaa can be Leu, Met, Gln, Ile, Phe, Tyr, Val, Ala, Arg, Asn, Asp, Cys, Glu, Gly, His, Lys, Pro, Ser, Thr, or Trp
  misc_feature (10)..(10): Xaa can be Ala, Ile, Leu, Val, Met, Cys, Phe, Ser, or Thr
AXMDPRMCSX

SEQ ID NO: 48180 - protein, 10 aa, Artificial Sequence
  Description of Artificial Sequence: Synthetic peptide
  Seed: AGQISIQPTF
  misc_feature (2)..(2): Xaa can be Arg, Cys, Gln, Glu, Leu, Met, Phe, Trp, Tyr, Ala, Asn, Asp, Gly, His, Ile, Lys, Pro, Ser, Thr, or Val
  misc_feature (10)..(10): Xaa can be Leu, Met, Phe, Trp, Tyr, or Ile
AXQISIQPTX

SEQ ID NO: 48181 - protein, 10 aa, Artificial Sequence
  Description of Artificial Sequence: Synthetic peptide
  Seed: AGQISTQPTF
  misc_feature (2)..(2): Xaa can be Gln, Arg, Met, Ala, Asn, Asp, Cys, Glu, Gly, His, Ile, Leu, Lys, Phe, Pro, Ser, Thr, Trp, Tyr, or Val
  misc_feature (10)..(10): Xaa can be Leu, Met, Phe, Trp, Tyr, Ile, or His
AXQISTQPTX

SEQ ID NO: 48182 - protein, 10 aa, Artificial Sequence
  Description of Artificial Sequence: Synthetic peptide
  Seed: AGQISVQPAF
  misc_feature (2)..(2): Xaa can be Met, Arg, Gln, His, Lys, Tyr, Leu, Phe, Trp, Ala, Asn, Asp, Cys, Glu, Gly, Ile, Pro, Ser, Thr, or Val
  misc_feature (10)..(10): Xaa can be Leu, Met, Phe, Tyr, Trp, Ile, or His
AXQISVQPAX

SEQ ID NO: 48183 - protein, 10 aa, Artificial Sequence
  Description of Artificial Sequence: Synthetic peptide
  Seed: AGQVSVQPSF
  misc_feature (2)..(2): Xaa can be Ala, Arg, Asn, Asp, Cys, Gln, Glu, Gly, His, Ile, Leu, Lys, Met, Phe, Pro, Ser, Thr, Trp, Tyr, or Val
  misc_feature (10)..(10): Xaa can be Leu, Met, Phe, or Tyr
AXQVSVQPSX

SEQ ID NO: 48184 - protein, 10 aa, Artificial Sequence
  Description of Artificial Sequence: Synthetic peptide
  Seed: AGQVSVQPTF
  misc_feature (2)..(2): Xaa can be Arg, Gln, Lys, Met, Trp, Tyr, Ala, Asn, Asp, Cys, Glu, Gly, His, Ile, Leu, Phe, Pro, Ser, Thr, or Val
  misc_feature (10)..(10): Xaa can be Met, Phe, Tyr, or Leu
AXQVSVQPTX

SEQ ID NO: 48185 - protein, 11 aa, Artificial Sequence
  Description of Artificial Sequence: Synthetic peptide
  Seed: AHKSCLPACVY
  misc_feature (2)..(2): Xaa can be Gln, Met, His, Lys, or Arg
  misc_feature (11)..(11): Xaa can be Tyr, Phe, Met, or Leu
AXKSCLPACVX

SEQ ID NO: 48186 - protein, 11 aa, Artificial Sequence
  Description of Artificial Sequence: Synthetic peptide
  Seed: AHKSCLPTCVY
  misc_feature (2)..(2): Xaa can be Gln, Met, Arg, His, Leu, Lys, Tyr, or Ala
  misc_feature (11)..(11): Xaa can be Tyr, Phe, Met, or Leu
AXKSCLPTCVX

SEQ ID NO: 48187 - protein, 10 aa, Artificial Sequence
  Description of Artificial Sequence: Synthetic peptide
  Seed: AHVRTGMDPR
  misc_feature (2)..(2): Xaa can be Met, Phe, Ser, Thr, Trp, Tyr, Ala, Arg, Asn, Asp, Cys, Gln, Glu, Gly, His, Ile, Leu, Lys, Pro, or Val
  misc_feature (10)..(10): Xaa can be Arg or Lys
AXVRTGMDPX

SEQ ID NO: 48188 - protein, 9 aa, Artificial Sequence
  Description of Artificial Sequence: Synthetic peptide
  Seed: AIDSNTLEL
  misc_feature (2)..(2): Xaa can be Leu, Met, Ala, Gln, Tyr, Phe, Ser, Thr, Cys, Gly, Ile, Val, Trp, Asn, Lys, Arg, His, Pro, or Glu
  misc_feature (9)..(9): Xaa can be Phe, Met, Leu, Ile, Tyr, Val, Trp, Ala, Cys, or Thr
AXDSNTLEX

SEQ ID NO: 48189 - protein, 10 aa, Artificial Sequence
  Description of Artificial Sequence: Synthetic peptide
  Seed: AIDSNTLELR
  misc_feature (2)..(2): Xaa can be Val, Ile, Leu, Met, Phe, Ser, Thr, Tyr, Ala, Gln, Gly, or Trp
  misc_feature (10)..(10): Xaa can be Arg, Lys, or Tyr
AXDSNTLELX

SEQ ID NO: 48190 - protein, 9 aa, Artificial Sequence
  Description of Artificial Sequence: Synthetic peptide
  Seed: AIDSSTLEL
  misc_feature (2)..(2): Xaa can be Ala, Leu, Met, Ser, Thr, Asn, Cys, Gln, Gly, Ile, Val, Phe, or Pro
  misc_feature (9)..(9): Xaa can be Leu, Met, Phe, Val, Ile, Cys, Tyr, Ala, Thr, or Trp
AXDSSTLEX

SEQ ID NO: 48191 - protein, 10 aa, Artificial Sequence
  Description of Artificial Sequence: Synthetic peptide
  Seed: AIDSSTLELR
  misc_feature (2)..(2): Xaa can be Met, Thr, Val, Ala, Gln, Ile, Leu, Phe, Ser, Tyr, Gly, or Trp
  misc_feature (10)..(10): Xaa can be Arg, Lys, or Tyr
AXDSSTLELX

SEQ ID NO: 48192 - protein, 9 aa, Artificial Sequence
  Description of Artificial Sequence: Synthetic peptide
  Seed: AIKGVGTMV
  misc_feature (2)..(2): Xaa can be Leu, Met, Val, Gln, or Ile
  misc_feature (9)..(9): Xaa can be Val, Ile, Ala, Leu, or Met
AXKGVGTMX

SEQ ID NO: 48193 - protein, 10 aa, Artificial Sequence
  Description of Artificial Sequence: Synthetic peptide
  Seed: AIKGVGTMVM
  misc_feature (2)..(2): Xaa can be Gln, Met, Leu, Val, Ile, Ser, Thr, Ala, Glu, Gly, or Phe
  misc_feature (10)..(10): Xaa can be Tyr, Phe, Met, Leu, His, Ile, Trp, or Val
AXKGVGTMVX

SEQ ID NO: 48194 - protein, 10 aa, Artificial Sequence
  Description of Artificial Sequence: Synthetic peptide
  Seed: AIMDQVRESR
  misc_feature (2)..(2): Xaa can be Ala, Arg, Asn, Asp, Cys, Gln, Glu, Gly, His, Ile, Leu, Lys, Met, Phe, Pro, Ser, Thr, Trp, Tyr, or Val
  misc_feature (10)..(10): Xaa can be Arg or Lys
AXMDQVRESX

SEQ ID NO: 48195 - protein, 9 aa, Artificial Sequence
  Description of Artificial Sequence: Synthetic peptide
  Seed: AIVSSTLEL
  misc_feature (2)..(2): Xaa can be Gln, Met, Leu, Lys, Ala, His, Ile, Ser, Val, Thr, Arg, Glu, Gly, Asn, Phe, Tyr, Cys, Pro, or Trp
  misc_feature (9)..(9): Xaa can be Phe, Tyr, Met, Leu, Ile, Val, Trp, Ala, His, Cys, Thr, or Gly
AXVSSTLEX

SEQ ID NO: 48196 - protein, 10 aa, Artificial Sequence
  Description of Artificial Sequence: Synthetic peptide
  Seed: AIVSSTLELR
  misc_feature (2)..(2): Xaa can be Ala, Ile, Leu, Met, Ser, Thr, Val, Arg, Asn, Asp, Cys, Gln, Glu, Gly, His, Lys, Phe, Pro, Trp, or Tyr
  misc_feature (10)..(10): Xaa can be Arg, Lys, or Tyr
AXVSSTLELX

SEQ ID NO: 48197 - protein, 9 aa, Artificial Sequence
  Description of Artificial Sequence: Synthetic peptide
  Seed: ALILRGAVA
  misc_feature (2)..(2): Xaa can be Leu, Met, Ile, Gln, or Val
  misc_feature (9)..(9): Xaa can be Val, Ala, Ile, Leu, Met, or Thr
AXILRGAVX

SEQ ID NO: 48198 - protein, 11 aa, Artificial Sequence
  Description of Artificial Sequence: Synthetic peptide
  Seed: ALILRGAVAHK
  misc_feature (2)..(2): Xaa can be Ala, Arg, Asn, Asp, Cys, Gln, Glu, Gly, His, Ile, Leu, Lys, Met, Phe, Pro, Ser, Thr, Trp, Tyr, or Val
  misc_feature (11)..(11): Xaa can be Lys
AXILRGAVAHX

SEQ ID NO: 48199 - protein, 9 aa, Artificial Sequence
  Description of Artificial Sequence: Synthetic peptide
  Seed: ALILRGSVA
  misc_feature (2)..(2): Xaa can be Leu, Met, Ile, Gln, or Val
  misc_feature (9)..(9): Xaa can be Val, Ala, Ile, Leu, Met, or Thr
AXILRGSVX

SEQ ID NO: 48200 - protein, 11 aa, Artificial Sequence
  Description of Artificial Sequence: Synthetic peptide
  Seed: ALILRGSVAHK
  misc_feature (2)..(2): Xaa can be Thr, Ala, Arg, Asn, Asp, Cys, Gln, Glu, Gly, His, Ile, Leu, Lys, Met, Phe, Pro, Ser, Trp, Tyr, or Val
  misc_feature (11)..(11): Xaa can be Lys or Arg
AXILRGSVAHX

SEQ ID NO: 48201 - protein, 9 aa, Artificial Sequence
  Description of Artificial Sequence: Synthetic peptide
  Seed: ALQGTKRSY
  misc_feature (2)..(2): Xaa can be Gln, His, Leu, Lys, Met, Ala, Glu, Ile, Ser, Val, Arg, or Thr
  misc_feature (9)..(9): Xaa can be Tyr, Phe, Met, His, Leu, or Trp
AXQGTKRSX

SEQ ID NO: 48202 - protein, 9 aa, Artificial Sequence
  Description of Artificial Sequence: Synthetic peptide
  Seed: ALVLRGSVA
  misc_feature (2)..(2): Xaa can be Leu, Met, Gln, Ile, or Val
  misc_feature (9)..(9): Xaa can be Val, Ala, Ile, or Leu
AXVLRGSVX

SEQ ID NO: 48203 - protein, 11 aa, Artificial Sequence
  Description of Artificial Sequence: Synthetic peptide
  Seed: ALVLRGSVAHK
  misc_feature (2)..(2): Xaa can be Ala, Arg, Asn, Asp, Cys, Gln, Glu, Gly, His, Ile, Leu, Lys, Met, Phe, Pro, Ser, Thr, Trp, Tyr, or Val
  misc_feature (11)..(11): Xaa can be Lys
AXVLRGSVAHX

SEQ ID NO: 48204 - protein, 10 aa, Artificial Sequence
  Description of Artificial Sequence: Synthetic peptide
  Seed: ALVRAGMDPR
  misc_feature (2)..(2): Xaa can be Gln, Met, Phe, Ser, Thr, Trp, Tyr, Val, Ala, Arg, Asn, Asp, Cys, Glu, Gly, His, Ile, Leu, Lys, or Pro
  misc_feature (10)..(10): Xaa can be Arg or Lys
AXVRAGMDPX

SEQ ID NO: 48205 - protein, 9 aa, Artificial Sequence
  Description of Artificial Sequence: Synthetic peptide
  Seed: AMDSTTLEL
  misc_feature (2)..(2): Xaa can be Leu, Met, Ala, Gln, Ser, Thr, Val, Cys, Gly, Ile, Asn, Phe, Lys, Arg, Glu, His, or Pro
  misc_feature (9)..(9): Xaa can be Phe, Leu, Met, Ile, Tyr, Val, Trp, Ala, Cys, or Thr
AXDSTTLEX

SEQ ID NO: 48206 - protein, 10 aa, Artificial Sequence
  Description of Artificial Sequence: Synthetic peptide
  Seed: AMDSTTLELR
  misc_feature (2)..(2): Xaa can be Met, Thr, Val, Ala, Gln, Ile, Leu, Phe, Ser, Tyr, or Trp
  misc_feature (10)..(10): Xaa can be Arg, Lys, or Tyr
AXDSTTLELX

SEQ ID NO: 48207 - protein, 9 aa, Artificial Sequence
  Description of Artificial Sequence: Synthetic peptide
  Seed: AMELIGMIK
  misc_feature (2)..(2): Xaa can be Thr, Ala, Ile, Leu, Met, Ser, or Val
  misc_feature (9)..(9): Xaa can be Lys or Arg
AXELIGMIX

SEQ ID NO: 48208 - protein, 10 aa, Artificial Sequence
  Description of Artificial Sequence: Synthetic peptide
  Seed: AMELIGMIKR
  misc_feature (2)..(2): Xaa can be Ala, Gln, Ile, Leu, Met, Phe, Ser, Thr, Trp, Tyr, or Val
  misc_feature (10)..(10): Xaa can be Arg
AXELIGMIKX

SEQ ID NO: 48209 - protein, 9 aa, Artificial Sequence
  Description of Artificial Sequence: Synthetic peptide
  Seed: AMELIRMIK
  misc_feature (2)..(2): Xaa can be Ala, Gln, Ile, Leu, Met, Phe, Ser, Thr, Trp, Tyr, Val, or Gly
  misc_feature (9)..(9): Xaa can be Arg or Lys
AXELIRMIX

SEQ ID NO: 48210 - protein, 10 aa, Artificial Sequence
  Description of Artificial Sequence: Synthetic peptide
  Seed: AMELIRMIKR
  misc_feature (2)..(2): Xaa can be Met, Phe, Trp, Tyr, Ala, Gln, Gly, Ile, Leu, Ser, Thr, or Val
  misc_feature (10)..(10): Xaa can be Arg or Lys
AXELIRMIKX

SEQ ID NO: 48211 - protein, 9 aa, Artificial Sequence
  Description of Artificial Sequence: Synthetic peptide
  Seed: AMESSTLEL
  misc_feature (2)..(2): Xaa can be Gln, Leu, Met, Ala, Ser, Thr, Ile, Lys, Val, Arg, His, or Glu
  misc_feature (9)..(9): Xaa can be Phe, Tyr, Met, Leu, Ile, Val, Ala, His, or Trp
AXESSTLEX

SEQ ID NO: 48212 - protein, 10 aa, Artificial Sequence
  Description of Artificial Sequence: Synthetic peptide
  Seed: AMESSTLELR
  misc_feature (2)..(2): Xaa can be Gln, Ile, Leu, Met, Phe, Ser, Thr, Tyr, Val, Ala, Gly, or Trp
  misc_feature (10)..(10): Xaa can be Arg or Lys
AXESSTLELX

SEQ ID NO: 48213 - protein, 9 aa, Artificial Sequence
  Description of Artificial Sequence: Synthetic peptide
  Seed: AMMDQVREG
  misc_feature (2)..(2): Xaa can be Leu, Met, Gln, Ile, Val, Thr, Ala, Cys, Phe, or Ser
  misc_feature (9)..(9): Xaa can be Val, Ala, Ile, Leu, Met, Cys, Thr, Phe, Ser, Gly, or Pro
AXMDQVREX

SEQ ID NO: 48214 - protein, 10 aa, Artificial Sequence
  Description of Artificial Sequence: Synthetic peptide
  Seed: AMMDQVREGR
  misc_feature (2)..(2): Xaa can be Ala, Gln, Ile, Leu, Met, Phe, Ser, Thr, Trp, Tyr, Val, Arg, Asn, Asp, Cys, Glu, Gly, His, Lys, or Pro
  misc_feature (10)..(10): Xaa can be Arg or Lys
AXMDQVREGX

SEQ ID NO: 48215 - protein, 9 aa, Artificial Sequence
  Description of Artificial Sequence: Synthetic peptide
  Seed: AMVDQVRES
  misc_feature (2)..(2): Xaa can be Leu, Met, Gln, Ile, Val, Ala, Ser, or Thr
  misc_feature (9)..(9): Xaa can be Val, Ala, Ile, Leu, Cys, Met, Ser, or Thr
AXVDQVREX

SEQ ID NO: 48216 - protein, 10 aa, Artificial Sequence
  Description of Artificial Sequence: Synthetic peptide
  Seed: AMVDQVRESR
  misc_feature (2)..(2): Xaa can be Phe, Ser, Thr, Tyr, Val, Ala, Gln, Gly, Ile, Leu, Met, or Trp
  misc_feature (10)..(10): Xaa can be Arg or Lys
AXVDQVRESX

SEQ ID NO: 48217 - protein, 10 aa, Artificial Sequence
  Description of Artificial Sequence: Synthetic peptide
  Seed: ANDIRASVGR
  misc_feature (2)..(2): Xaa can be Met, Phe, Tyr, Ala, Asn, Gln, Gly, Ile, Leu, Ser, Thr, Trp, or Val
  misc_feature (10)..(10): Xaa can be Arg or Lys
AXDIRASVGX

SEQ ID NO: 48218 - protein, 10 aa, Artificial Sequence
  Description of Artificial Sequence: Synthetic peptide
  Seed: ANEIRASVGR
  misc_feature (2)..(2): Xaa can be Met, Phe, Thr, Tyr, Ala, Asn, Gln, Gly, Ile, Leu, Ser, Trp, or Val
  misc_feature (10)..(10): Xaa can be Arg or Lys
AXEIRASVGX

SEQ ID NO: 48219 - protein, 10 aa, Artificial Sequence
  Description of Artificial Sequence: Synthetic peptide
  Seed: ANPIVPSFDM
  misc_feature (2)..(2): Xaa can be Met, Ala, Arg, Asn, Asp, Cys, Gln, Glu, Gly, His, Ile, Leu, Lys, Phe, Pro, Ser, Thr, Trp, Tyr, or Val
  misc_feature (10)..(10): Xaa can be Leu, Met, or Phe
AXPIVPSFDX

SEQ ID NO: 48220 - protein, 8 aa, Artificial Sequence
  Description of Artificial Sequence: Synthetic peptide
  Seed: APAGLTHL
  misc_feature (2)..(2): Xaa can be Pro
  misc_feature (8)..(8): Xaa can be Ile, Leu, Met, Phe, or Val
AXAGLTHX

SEQ ID NO: 48221 - protein, 10 aa, Artificial Sequence
  Description of Artificial Sequence: Synthetic peptide
  Seed: APAGLTHLMI
  misc_feature (2)..(2): Xaa can be Pro or Thr
  misc_feature (10)..(10): Xaa can be Ile, Ala, Cys, Gly, His, Leu, Met, Phe, Ser, Thr, Trp, Tyr, or Val
AXAGLTHLMX

SEQ ID NO: 48222 - protein, 8 aa, Artificial Sequence
  Description of Artificial Sequence: Synthetic peptide
  Seed: APRGQLST
  misc_feature (2)..(2): Xaa can be Pro or Val
  misc_feature (8)..(8): Xaa can be Leu, Ala, Cys, Ile, Met, Phe, Pro, Thr, or Val
AXRGQLSX

SEQ ID NO: 48223 - protein, 11 aa, Artificial Sequence
  Description of Artificial Sequence: Synthetic peptide
  Seed: APRGQLSTRGV
  misc_feature (2)..(2): Xaa can be Pro
  misc_feature (11)..(11): Xaa can be Ala, Cys, Ile, Leu, Met, Phe, or Val
AXRGQLSTRGX

SEQ ID NO: 48224 - protein, 9 aa, Artificial Sequence
  Description of Artificial Sequence: Synthetic peptide
  Seed: AQKAMMDQV
  misc_feature (2)..(2): Xaa can be Leu, Met, Gln, Ile, Val, Thr, Ala, or Ser
  misc_feature (9)..(9): Xaa can be Val, Leu, Ile, Ala, Met, or Thr
AXKAMMDQX

SEQ ID NO: 48225 - protein, 10 aa, Artificial Sequence
  Description of Artificial Sequence: Synthetic peptide
  Seed: AQKAMMDQVR
  misc_feature (2)..(2): Xaa can be Met, Phe, Tyr, Ala, Gln, Ile, Leu, Ser, Thr, Trp, or Val
  misc_feature (10)..(10): Xaa can be Arg or Lys
AXKAMMDQVX

SEQ ID NO: 48226 - protein, 9 aa, Artificial Sequence
  Description of Artificial Sequence: Synthetic peptide
  Seed: AQRAIMDQV
  misc_feature (2)..(2): Xaa can be Thr, Ser, Met, Val, Ala, Tyr, Ile, Leu, Gln, Phe, Trp, Gly, Asn, or Cys
  misc_feature (9)..(9): Xaa can be Lys, Ala, Val, Ile, Leu, Met, Arg, Ser, Tyr, Gly, Thr, Cys, Phe, Asn, His, or Pro
AXRAIMDQX

SEQ ID NO: 48227 - protein, 10 aa, Artificial Sequence
  Description of Artificial Sequence: Synthetic peptide
  Seed: AQRAIMDQVR
  misc_feature (2)..(2): Xaa can be Met, Phe, Thr, Trp, Tyr, Ala, Gln, Gly, Ile, Leu, Ser, or Val
  misc_feature (10)..(10): Xaa can be Arg or Lys
AXRAIMDQVX

SEQ ID NO: 48228 - protein, 9 aa, Artificial Sequence
  Description of Artificial Sequence: Synthetic peptide
  Seed: AQRAMMDQV
  misc_feature (2)..(2): Xaa can be Thr, Ser, Val, Met, Leu, Tyr, Ala, Ile, Gln, Phe, Trp, Gly, Asn, or Cys
  misc_feature (9)..(9): Xaa can be Lys, Ala, Val, Ile, Leu, Met, Arg, Thr, Tyr, Gly, Ser, Cys, His, Phe, or Pro
AXRAMMDQX

SEQ ID NO: 48229 - protein, 10 aa, Artificial Sequence
  Description of Artificial Sequence: Synthetic peptide
  Seed: AQRAMMDQVR
  misc_feature (2)..(2): Xaa can be Met, Phe, Thr, Trp, Tyr, Ala, Gln, Ile, Leu, Ser, or Val
  misc_feature (10)..(10): Xaa can be Arg or Lys
AXRAMMDQVX

SEQ ID NO: 48230 - protein, 9 aa, Artificial Sequence
  Description of Artificial Sequence: Synthetic peptide
  Seed: AQRAMVDQV
  misc_feature (2)..(2): Xaa can be Met, Leu, Gln, Ile, Thr, or Val
  misc_feature (9)..(9): Xaa can be Val, Ile, Leu, Ala, Met, or Thr
AXRAMVDQX

SEQ ID NO: 48231 - protein, 10 aa, Artificial Sequence
  Description of Artificial Sequence: Synthetic peptide
  Seed: AQRAMVDQVR
  misc_feature (2)..(2): Xaa can be Met, Phe, Trp, Tyr, Ala, Gln, Ile, Leu, Ser, Thr, or Val
  misc_feature (10)..(10): Xaa can be Arg or Lys
AXRAMVDQVX

SEQ ID NO: 48232 - protein, 9 aa, Artificial Sequence
  Description of Artificial Sequence: Synthetic peptide
  Seed: ARSALILRG
  misc_feature (2)..(2): Xaa can be Arg
  misc_feature (9)..(9): Xaa can be Ala, Arg, Gly, His, Ile, Leu, Lys, Met, Phe, Ser, Thr, Trp, Tyr, or Val
AXSALILRX

SEQ ID NO: 48233 - protein, 10 aa, Artificial Sequence
  Description of Artificial Sequence: Synthetic peptide
  Seed: ARSALILRGA
  misc_feature (2)..(2): Xaa can be Arg
  misc_feature (10)..(10): Xaa can be Ala, Arg, His, Ile, Leu, Lys, Met, Phe, Trp, Tyr, or Val
AXSALILRGX

SEQ ID NO: 48234 - protein, 11 aa, Artificial Sequence
  Description of Artificial Sequence: Synthetic peptide
  Seed: ARSALILRGAV
  misc_feature (2)..(2): Xaa can be Arg
  misc_feature (11)..(11): Xaa can be Arg, Ile, Leu, Lys, Met, Phe, Tyr, or Val
AXSALILRGAX

SEQ ID NO: 48235 - protein, 11 aa, Artificial Sequence
  Description of Artificial Sequence: Synthetic peptide
  Seed: ARSALILRGSV
  misc_feature (2)..(2): Xaa can be Arg
  misc_feature (11)..(11): Xaa can be Arg, Ile, Leu, Lys, Met, Phe, Tyr, or Val
AXSALILRGSX

SEQ ID NO: 48236 - protein, 9 aa, Artificial Sequence
  Description of Artificial Sequence: Synthetic peptide
  Seed: ARSALVLRG
  misc_feature (2)..(2): Xaa can be Arg
  misc_feature (9)..(9): Xaa can be Ala, Arg, Gly, His, Ile, Leu, Lys, Met, Phe, Thr, Trp, Tyr, or Val
AXSALVLRX

SEQ ID NO: 48237 - protein, 11 aa, Artificial Sequence
  Description of Artificial Sequence: Synthetic peptide
  Seed: ARSALVLRGSV
  misc_feature (2)..(2): Xaa can be Arg
  misc_feature (11)..(11): Xaa can be Ile, Leu, Met, Phe, or Val
AXSALVLRGSX

SEQ ID NO: 48238 - protein, 9 aa, Artificial Sequence
  Description of Artificial Sequence: Synthetic peptide
  Seed: ARVLPRGQL
  misc_feature (2)..(2): Xaa can be Arg
  misc_feature (9)..(9): Xaa can be Ile, Leu, Lys, Met, Phe, or Val
AXVLPRGQX

SEQ ID NO: 48239 - protein, 9 aa, Artificial Sequence
  Description of Artificial Sequence: Synthetic peptide
  Seed: ARVVPRGQL
  misc_feature (2)..(2): Xaa can be Arg
  misc_feature (9)..(9): Xaa can be Ile, Leu, Met, or Phe
AXVVPRGQX

SEQ ID NO: 48240 - protein, 9 aa, Artificial Sequence
  Description of Artificial Sequence: Synthetic peptide
  Seed: ASFQGRGVF
  misc_feature (2)..(2): Xaa can be Gln, Met, Tyr, Ala, Lys, Phe, Glu, His, Leu, Ser, Thr, Val, Trp, Arg, Ile, Asn, Cys, Gly, Pro, or Asp
  misc_feature (9)..(9): Xaa can be Phe, Tyr, Met, Trp, Leu, His, Ile, Val, Ala, Cys, Thr, Gly, Ser, Asn, Gln, Glu, or Pro
AXFQGRGVX

SEQ ID NO: 48241 - protein, 11 aa, Artificial Sequence
  Description of Artificial Sequence: Synthetic peptide
  Seed: ASFQGRGVFEL
  misc_feature (2)..(2): Xaa can be Ser, Thr, Ala, or Val
  misc_feature (11)..(11): Xaa can be Trp, Tyr, Phe, Leu, or Met
AXFQGRGVFEX

SEQ ID NO: 48242 - protein, 9 aa, Artificial Sequence
  Description of Artificial Sequence: Synthetic peptide
  Seed: ASNENMDAI
  misc_feature (2)..(2): Xaa can be Gln, Met, Leu, Ile, Thr, Val, Ser, or Ala
  misc_feature (9)..(9): Xaa can be Ile, Leu, Val, Met, Ala, Phe, or Cys
AXNENMDAX

SEQ ID NO: 48243 - protein, 9 aa, Artificial Sequence
  Description of Artificial Sequence: Synthetic peptide
  Seed: ASNENMDTM
  misc_feature (2)..(2): Xaa can be Ala, Ser, Thr, Ile, Met, or Val
  misc_feature (9)..(9): Xaa can be Met, Phe, Trp, Tyr, Ile, Leu, or Val
AXNENMDTX

SEQ ID NO: 48244 - protein, 9 aa, Artificial Sequence
  Description of Artificial Sequence: Synthetic peptide
  Seed: ASNENMEAI
  misc_feature (2)..(2): Xaa can be Pro, Gln, Ala, Met, Ser, Thr, Lys, Val, Ile, Arg, Glu, His, Leu, Asn, Cys, Gly, Phe, or Ty r
  misc_feature (9)..(9): Xaa can be Phe, Tyr, Met, Leu, Trp, Ile, Val, His, or Ala
AXNENMEAX

SEQ ID NO: 48245 - protein, 9 aa, Artificial Sequence
  Description of Artificial Sequence: Synthetic peptide
  Seed: ASNENMETI
  misc_feature (2)..(2): Xaa can be Gln, Ala, Ser, Thr, Met, Ile, Lys, Arg, Glu, His, Leu, Val, Asn, or Gly
  misc_feature (9)..(9): Xaa can be Tyr, Phe, Met, Trp, Leu, Ile, Val, or His
AXNENMETX

SEQ ID NO: 48246 - protein, 9 aa, Artificial Sequence
  Description of Artificial Sequence: Synthetic peptide
  Seed: ASNENVEAM
  misc_feature (2)..(2): Xaa can be Pro, Gln, Ala, Met, Ser, Thr, Val, Lys, Arg, Glu, His, Ile, Leu, Asn, Gly, Phe, Cys, or Ty r
  misc_feature (9)..(9): Xaa can be Phe, Tyr, Met, Leu, Ile, Trp, Val, His, or Ala
AXNENVEAX

SEQ ID NO: 48247 - protein, 9 aa, Artificial Sequence
  Description of Artificial Sequence: Synthetic peptide
  Seed: ASNENVETM
  misc_feature (2)..(2): Xaa can be Gln, Ala, Met, Ser, Thr, Val, Ile, Lys, Arg, Glu, His, Leu, Asn, Gly, or Phe
  misc_feature (9)..(9): Xaa can be Phe, Tyr, Met, Leu, Trp, Ile, Val, or His
AXNENVETX

SEQ ID NO: 48248 - protein, 9 aa, Artificial Sequence
  Description of Artificial Sequence: Synthetic peptide
  Seed: ASQGTKRPY
  misc_feature (2)..(2): Xaa can be Ala, Gln, Ser, Thr, Met, Glu, His, Leu, Lys, Arg, Ile, Val, or Tyr
  misc_feature (9)..(9): Xaa can be Tyr, Phe, Met, Leu, Trp, Ile, Val, or His
AXQGTKRPX

SEQ ID NO: 48249 - protein, 9 aa, Artificial Sequence
  Description of Artificial Sequence: Synthetic peptide
  Seed: ASQGTTRSY
  misc_feature (2)..(2): Xaa can be Gln, Met, Ala, Ser, Thr, Lys, Val, His, Ile, Leu, Arg, Glu, Gly, Asn, Phe, Tyr, Cys, or Tr p
  misc_feature (9)..(9): Xaa can be Tyr, Phe, Met, Leu, Trp, Ile, Val, His, or Ala
AXQGTTRSX

SEQ ID NO: 48250 - protein, 11 aa, Artificial Sequence
  Description of Artificial Sequence: Synthetic peptide
  Seed: ASQRAMMDQVR
  misc_feature (2)..(2): Xaa can be Gln, Ile, Leu, Met, Phe, Ser, Thr, Tyr, or Val
  misc_feature (11)..(11): Xaa can be Arg
AXQRAMMDQVX

SEQ ID NO: 48251 - protein, 10 aa, Artificial Sequence
  Description of Artificial Sequence: Synthetic peptide
  Seed: ASVGRMVSGI
  misc_feature (2)..(2): Xaa can be Ser, Thr, Ala, Val, or Met
  misc_feature (10)..(10): Xaa can be Trp, Phe, Tyr, Leu, Met, or Ile
AXVGRMVSGX

SEQ ID NO: 48252 - protein, 9 aa, Artificial Sequence
  Description of Artificial Sequence: Synthetic peptide
  Seed: ATAGLTHIM
  misc_feature (2)..(2): Xaa can be Gln, Thr, Met, Val, Ile, Leu, Ala, Ser, Gly, Cys, or Phe
  misc_feature (9)..(9): Xaa can be Tyr, Met, Phe, Trp, Ile, Leu, Val, Ala, His, Arg, Thr, or Lys
AXAGLTHIX

SEQ ID NO: 48253 - protein, 10 aa, Artificial Sequence
  Description of Artificial Sequence: Synthetic peptide
  Seed: ATAGLTHIMI
  misc_feature (2)..(2): Xaa can be Thr, Val, Ala, Ile, or Ser
  misc_feature (10)..(10): Xaa can be Val, Ile, Ala, Leu, or Met
AXAGLTHIMX

SEQ ID NO: 48254 - protein, 11 aa, Artificial Sequence
  Description of Artificial Sequence: Synthetic peptide
  Seed: ATAGLTHIMIW
  misc_feature (2)..(2): Xaa can be Ser, Thr, Ala, Arg, Gly, Ile, Lys, Met, or Val
  misc_feature (11)..(11): Xaa can be Trp, Phe, Tyr, Met, or Leu
AXAGLTHIMIX

SEQ ID NO: 48255 - protein, 9 aa, Artificial Sequence
  Description of Artificial Sequence: Synthetic peptide
  Seed: ATAGLTHMM
  misc_feature (2)..(2): Xaa can be Met, Leu, Thr, Val, Ala, Gln, Ile, Ser, Phe, Asn, Gly, Tyr, Trp, Cys, or His
  misc_feature (9)..(9): Xaa can be Tyr, Phe, Val, Leu, Met, Ala, Ile, Trp, Arg, Thr, Cys, Gly, Ser, Lys, or Pro
AXAGLTHMX

SEQ ID NO: 48256 - protein, 10 aa, Artificial Sequence
  Description of Artificial Sequence: Synthetic peptide
  Seed: ATAGLTHMMI
  misc_feature (2)..(2): Xaa can be Gln, Leu, Met, Thr, Ile, Val, Ala, or Ser
  misc_feature (10)..(10): Xaa can be Val, Ile, Leu, Ala, or Met
AXAGLTHMMX

SEQ ID NO: 48257 - protein, 11 aa, Artificial Sequence
  Description of Artificial Sequence: Synthetic peptide
  Seed: ATAGLTHMMIW
  misc_feature (2)..(2): Xaa can be Ser, Thr, Ala, Arg, Gly, Ile, Lys, Met, or Val
  misc_feature (11)..(11): Xaa can be Trp, Phe, Tyr, Met, or Leu
AXAGLTHMMIX

SEQ ID NO: 48258 - protein, 10 aa, Artificial Sequence
  Description of Artificial Sequence: Synthetic peptide
  Seed: ATEIRSSVGR
  misc_feature (2)..(2): Xaa can be Thr, Val, Ala, Gln, Ile, Leu, Met, Phe, Ser, Tyr, Asn, Gly, or Trp
  misc_feature (10)..(10): Xaa can be Arg, Lys, or Tyr
AXEIRSSVGX

SEQ ID NO: 48259 - protein, 11 aa, Artificial Sequence
  Description of Artificial Sequence: Synthetic peptide
  Seed: ATIMAAFTGNA
  misc_feature (2)..(2): Xaa can be Ala, Arg, Asn, Asp, Cys, Gln, Glu, Gly, His, Ile, Leu, Lys, Met, Phe, Pro, Ser, Thr, Trp, Tyr, or Val
  misc_feature (11)..(11): Xaa can be Ala, Ile, Leu, or Val
AXIMAAFTGNX

SEQ ID NO: 48260 - protein, 9 aa, Artificial Sequence
  Description of Artificial Sequence: Synthetic peptide
  Seed: ATKGTKRSY
  misc_feature (2)..(2): Xaa can be Thr, Ser, Val, Ile, Met, Tyr, Ala, Gln, Gly, Leu, Phe, or Trp
  misc_feature (9)..(9): Xaa can be Lys, Ala, Val, Ile, Leu, Met, Ser, Gly, Thr, or Tyr
AXKGTKRSX

SEQ ID NO: 48261 - protein, 9 aa, Artificial Sequence
  Description of Artificial Sequence: Synthetic peptide
  Seed: ATNPVVPSF
  misc_feature (2)..(2): Xaa can be Gln, Ala, Lys, Met, Ile, Leu, Ser, Thr, Trp, Tyr, Val, Phe, Gly, His, Arg, Asn, Cys, or Gl u
  misc_feature (9)..(9): Xaa can be Met, Phe, Tyr, Leu, Trp, Ile, Val, His, Ala, or Gly
AXNPVVPSX

SEQ ID NO: 48262 - protein, 9 aa, Artificial Sequence
  Description of Artificial Sequence: Synthetic peptide
  Seed: ATRGLTHMM
  misc_feature (2)..(2): Xaa can be Ser, Thr, Val, Pro, Ala, Met, Ile, Phe, Tyr, Leu, Gln, Gly, Trp, Asn, Cys, His, or Lys
  misc_feature (9)..(9): Xaa can be Lys, Ala, Ile, Val, Met, Leu, Arg, Gly, Ser, Trp, Phe, Tyr, Cys, Pro, Thr, Glu, Asn, Gln, or His
AXRGLTHMX

SEQ ID NO: 48263 - protein, 10 aa, Artificial Sequence
  Description of Artificial Sequence: Synthetic peptide
  Seed: ATRGLTHMMI
  misc_feature (2)..(2): Xaa can be Thr, Ser, Val, Met, Ala, Ile, Tyr, Gln, Phe, Trp, Gly, Asn, Leu, Cys, or His
  misc_feature (10)..(10): Xaa can be Lys, Ala, Val, Ile, Leu, Met, Ser, Arg, Tyr, Gly, Phe, Thr, Cys, Gln, His, Pro, Asn, or Gl u
AXRGLTHMMX

SEQ ID NO: 48264 - protein, 11 aa, Artificial Sequence
  Description of Artificial Sequence: Synthetic peptide
  Seed: ATRGLTHMMIW
  misc_feature (2)..(2): Xaa can be Ser, Thr, Ala, or Val
  misc_feature (11)..(11): Xaa can be Trp, Phe, Tyr, or Met
AXRGLTHMMIX

SEQ ID NO: 48265 - protein, 9 aa, Artificial Sequence
  Description of Artificial Sequence: Synthetic peptide
  Seed: ATRGVQIAS
  misc_feature (2)..(2): Xaa can be Ser, Thr, Val, Ala, Met, Tyr, Ile, Gly, Phe, Gln, Trp, Leu, Asn, Arg, Cys, His, or Lys
  misc_feature (9)..(9): Xaa can be Lys, Ala, Ile, Val, Met, Leu, Arg, Gly, Ser, Tyr, Thr, Asn, Cys, Gln, Phe, Pro, Glu, or Hi s
AXRGVQIAX

SEQ ID NO: 48266 - protein, 11 aa, Artificial Sequence
  Description of Artificial Sequence: Synthetic peptide
  Seed: ATSPIVPSLDM
  misc_feature (2)..(2): Xaa can be Ser, Thr, Ala, Met, or Val
  misc_feature (11)..(11): Xaa can be Trp, Met, Phe, or Tyr
AXSPIVPSLDX

SEQ ID NO: 48267 - protein, 10 aa, Artificial Sequence
  Description of Artificial Sequence: Synthetic peptide
  Seed: ATVKGVGTMV
  misc_feature (2)..(2): Xaa can be Leu, Met, Ile, Gln, Thr, or Val
  misc_feature (10)..(10): Xaa can be Val, Ile, Ala, Leu, Met, or Thr
AXVKGVGTMX

SEQ ID NO: 48268 - protein, 11 aa, Artificial Sequence
  Description of Artificial Sequence: Synthetic peptide
  Seed: ATVKGVGTMVM
  misc_feature (2)..(2): Xaa can be Ser, Thr, or Ala
  misc_feature (11)..(11): Xaa can be Phe, Trp, Tyr, or Met
AXVKGVGTMVX

SEQ ID NO: 48269 - protein, 9 aa, Artificial Sequence
  Description of Artificial Sequence: Synthetic peptide
  Seed: ATYQRTRAH
  misc_feature (2)..(2): Xaa can be Thr, Tyr, Ser, Ala, Met, Val, Gln, Ile, Leu, Trp, Gly, Pro, Asn, Cys, Phe, Glu, His, or Ly s
  misc_feature (9)..(9): Xaa can be Tyr, Phe, Met, Lys, Leu, Ala, Ile, Val, His, Trp, Arg, Cys, Ser, Gly, Thr, Gln, Asn, Pro, or Glu
AXYQRTRAX

SEQ ID NO: 48270 - protein, 10 aa, Artificial Sequence
  Description of Artificial Sequence: Synthetic peptide
  Seed: ATYQRTRAHV
  misc_feature (2)..(2): Xaa can be Thr, Leu, Met, Ile, Ser, Val, Ala, Gln, Tyr, Arg, Asn, Cys, Gly, His, Lys, Phe, or Trp
  misc_feature (10)..(10): Xaa can be Lys, Ala, Val, Ile, Leu, Met, Ser, Thr, Arg, or Tyr
AXYQRTRAHX

SEQ ID NO: 48271 - protein, 11 aa, Artificial Sequence
  Description of Artificial Sequence: Synthetic peptide
  Seed: ATYQRTRAHVR
  misc_feature (2)..(2): Xaa can be Met, Phe, Tyr, Ala, Arg, Gln, Gly, Ile, Leu, Lys, Ser, Thr, Trp, or Val
  misc_feature (11)..(11): Xaa can be Arg or Lys
AXYQRTRAHVX

SEQ ID NO: 48272 - protein, 10 aa, Artificial Sequence
  Description of Artificial Sequence: Synthetic peptide
  Seed: ATYQRTRALV
  misc_feature (2)..(2): Xaa can be Thr, Leu, Met, Ser, Ile, Gln, Val, Ala, Tyr, Arg, Asn, Asp, Cys, Glu, Gly, His, Lys, Phe, Pro, or Trp
  misc_feature (10)..(10): Xaa can be Lys, Ala, Ile, Val, Leu, Met, Ser, Cys, Thr, Arg, Tyr, or Gly
AXYQRTRALX

SEQ ID NO: 48273 - protein, 11 aa, Artificial Sequence
  Description of Artificial Sequence: Synthetic peptide
  Seed: ATYQRTRALVR
  misc_feature (2)..(2): Xaa can be Thr, Ala, Gln, Ile, Leu, Met, Phe, Ser, Tyr, Val, Arg, Asn, Cys, Gly, His, Lys, or Trp
  misc_feature (11)..(11): Xaa can be Arg, Lys, or Tyr
AXYQRTRALVX

SEQ ID NO: 48274 - protein, 10 aa, Artificial Sequence
  Description of Artificial Sequence: Synthetic peptide
  Seed: AVAGGYDFER
  misc_feature (2)..(2): Xaa can be Ile, Met, Ser, Thr, Val, Ala, Gln, Gly, Leu, Phe, Trp, Tyr, Arg, Asn, Cys, or His
  misc_feature (10)..(10): Xaa can be Arg, Lys, or Tyr
AXAGGYDFEX

SEQ ID NO: 48275 - protein, 10 aa, Artificial Sequence
  Description of Artificial Sequence: Synthetic peptide
  Seed: AVAHKSCLPA
  misc_feature (2)..(2): Xaa can be Leu, Met, Ile, Val, Gln, Thr, Ala, or Ser
  misc_feature (10)..(10): Xaa can be Val, Ile, Ala, Leu, Met, or Thr
AXAHKSCLPX

SEQ ID NO: 48276 - protein, 10 aa, Artificial Sequence
  Description of Artificial Sequence: Synthetic peptide
  Seed: AVASGHDFER
  misc_feature (2)..(2): Xaa can be Ile, Met, Thr, Val, Ala, Asn, Gln, Gly, Leu, Phe, Ser, Trp, Tyr, Arg, Asp, Cys, Glu, His, Lys, or Pro
  misc_feature (10)..(10): Xaa can be Arg, Lys, or Tyr
AXASGHDFEX

SEQ ID NO: 48277 - protein, 8 aa, Artificial Sequence
  Description of Artificial Sequence: Synthetic peptide
  Seed: AVASGYAF
  misc_feature (2)..(2): Xaa can be Gln, Met, Ile, Leu, Val, Ala, Phe, or Tyr
  misc_feature (8)..(8): Xaa can be Tyr, Phe, or Met
AXASGYAX

SEQ ID NO: 48278 - protein, 10 aa, Artificial Sequence
  Description of Artificial Sequence: Synthetic peptide
  Seed: AVASGYAFEK
  misc_feature (2)..(2): Xaa can be Met, Ile, Leu, Ser, Thr, Val, Ala, Arg, Asn, Asp, Cys, Gln, Glu, Gly, His, Lys, Phe, Pro, Trp, or Tyr
  misc_feature (10)..(10): Xaa can be Arg, Lys, Tyr, or His
AXASGYAFEX

SEQ ID NO: 48279 - protein, 10 aa, Artificial Sequence
  Description of Artificial Sequence: Synthetic peptide
  Seed: AVASGYDFEK
  misc_feature (2)..(2): Xaa can be Ile, Leu, Met, Ser, Thr, Val, Ala, Arg, Asn, Asp, Cys, Gln, Glu, Gly, His, Lys, Phe, Pro, Trp, or Tyr
  misc_feature (10)..(10): Xaa can be Arg, Lys, or Tyr
AXASGYDFEX

SEQ ID NO: 48280 - protein, 10 aa, Artificial Sequence
  Description of Artificial Sequence: Synthetic peptide
  Seed: AVASGYEFEK
  misc_feature (2)..(2): Xaa can be Ile, Leu, Met, Ser, Thr, Val, Ala, Arg, Asn, Asp, Cys, Gln, Glu, Gly, His, Lys, Phe, Pro, Trp, or Tyr
  misc_feature (10)..(10): Xaa can be Arg, Lys, or Tyr
AXASGYEFEX

SEQ ID NO: 48281 - protein, 10 aa, Artificial Sequence
  Description of Artificial Sequence: Synthetic peptide
  Seed: AVASGYNFEK
  misc_feature (2)..(2): Xaa can be Ile, Leu, Met, Ser, Thr, Val, Ala, Arg, Asn, Asp, Cys, Gln, Glu, Gly, His, Lys, Phe, Pro, Trp, or Tyr
  misc_feature (10)..(10): Xaa can be Arg, Lys, or Tyr
AXASGYNFEX

SEQ ID NO: 48282 - protein, 9 aa, Artificial Sequence
  Description of Artificial Sequence: Synthetic peptide
  Seed: AVKGIGTMV
  misc_feature (2)..(2): Xaa can be Thr, Ser, Met, Leu, Val, Ile, Ala, Gln, Tyr, Asn, Cys, Gly, Phe, or Trp
  misc_feature (9)..(9): Xaa can be Lys, Ala, Val, Ile, Leu, Met, Gly, Ser, Thr, or Tyr
AXKGIGTMX

SEQ ID NO: 48283 - protein, 10 aa, Artificial Sequence
  Description of Artificial Sequence: Synthetic peptide
  Seed: AVKGIGTMVM
  misc_feature (2)..(2): Xaa can be Gln, Met, Ile, Leu, Ser, Thr, Val, Ala, Glu, or Gly
  misc_feature (10)..(10): Xaa can be Tyr, Phe, Met, Ile, Leu, Trp, His, or Val
AXKGIGTMVX

SEQ ID NO: 48284 - protein, 9 aa, Artificial Sequence
  Description of Artificial Sequence: Synthetic peptide
  Seed: AVKGVGTIA
  misc_feature (2)..(2): Xaa can be Thr, Ser, Val, Ala, Ile, Met, Tyr, Asn, Cys, Gln, Gly, Leu, Phe, or Trp
  misc_feature (9)..(9): Xaa can be Lys, Ala, Val, Ile, Arg, Gly, Leu, Met, Ser, Tyr, or Thr
AXKGVGTIX

SEQ ID NO: 48285 - protein, 10 aa, Artificial Sequence
  Description of Artificial Sequence: Synthetic peptide
  Seed: AVKGVGTIAM
  misc_feature (2)..(2): Xaa can be Pro, Gln, Met, Ala, Ile, Val, Leu, Ser, Thr, Gly, or Phe
  misc_feature (10)..(10): Xaa can be Tyr, Met, Phe, Leu, Ile, Trp, Val, His, Ala, Cys, Gly, Ser, or Thr
AXKGVGTIAX

SEQ ID NO: 48286 - protein, 10 aa, Artificial Sequence
  Description of Artificial Sequence: Synthetic peptide
  Seed: AVKGVGTIVM
  misc_feature (2)..(2): Xaa can be Gln, Met, Ile, Leu, Val, Ala, Ser, Thr, or Gly
  misc_feature (10)..(10): Xaa can be Tyr, Phe, Met, Leu, Trp, His, or Ile
AXKGVGTIVX

SEQ ID NO: 48287 - protein, 10 aa, Artificial Sequence
  Description of Artificial Sequence: Synthetic peptide
  Seed: AVKGVGTMNM
  misc_feature (2)..(2): Xaa can be Thr, Ser, Val, Ala, Ile, Met, Tyr, Phe, Asn, Gln, Gly, Leu, or Trp
  misc_feature (10)..(10): Xaa can be Lys, Ala, Val, Ile, Leu, Met, Ser, Tyr, Gly, or Thr
AXKGVGTMNX

SEQ ID NO: 48288 - protein, 9 aa, Artificial Sequence
  Description of Artificial Sequence: Synthetic peptide
  Seed: AVKGVGTVV
  misc_feature (2)..(2): Xaa can be Thr, Ser, Leu, Met, Val, Ala, Ile, Gln, Tyr, Asn, Cys, Gly, Phe, or Trp
  misc_feature (9)..(9): Xaa can be Lys, Ala, Val, Ile, Leu, Met, Arg, Gly, Ser, Tyr, or Thr
AXKGVGTVX

SEQ ID NO: 48289 - protein, 10 aa, Artificial Sequence
  Description of Artificial Sequence: Synthetic peptide
  Seed: AVKGVGTVVM
  misc_feature (2)..(2): Xaa can be Gln, Met, Ile, Leu, Val, Ala, Ser, Thr, or Gly
  misc_feature (10)..(10): Xaa can be Tyr, Phe, Met, Ile, Leu, Trp, His, or Val
AXKGVGTVVX

SEQ ID NO: 48290 - protein, 10 aa, Artificial Sequence
  Description of Artificial Sequence: Synthetic peptide
  Seed: AVSSGYDFEK
  misc_feature (2)..(2): Xaa can be Ile, Leu, Met, Ser, Thr, Val, Ala, Arg, Asn, Asp, Cys, Gln, Glu, Gly, His, Lys, Phe, Pro, Trp, or Tyr
  misc_feature (10)..(10): Xaa can be Arg, Lys, or Tyr
AXSSGYDFEX

SEQ ID NO: 48291 - protein, 10 aa, Artificial Sequence
  Description of Artificial Sequence: Synthetic peptide
  Seed: AVSSGYNFEK
  misc_feature (2)..(2): Xaa can be Ile, Leu, Met, Ser, Thr, Val, Ala, Arg, Asn, Asp, Cys, Gln, Glu, Gly, His, Lys, Phe, Pro, Trp, or Tyr
  misc_feature (10)..(10): Xaa can be Arg, Lys, or Tyr
AXSSGYNFEX

SEQ ID NO: 48292 - protein, 9 aa, Artificial Sequence
  Description of Artificial Sequence: Synthetic peptide
  Seed: AWMACHSAA
  misc_feature (2)..(2): Xaa can be Tyr, Phe, Trp, Ala, Met, His, Arg, Ser, Val, Gln, Gly, Ile, Leu, Lys, Pro, Thr, or Asn
  misc_feature (9)..(9): Xaa can be Met, Phe, Tyr, Leu, Ile, Val, Trp, Ala, His, Thr, Cys, Gln, Gly, or Ser
AXMACHSAX

SEQ ID NO: 48293 - protein, 10 aa, Artificial Sequence
  Description of Artificial Sequence: Synthetic peptide
  Seed: AWMACHSAAF
  misc_feature (2)..(2): Xaa can be Gln, Lys, Met, His, Ala, Arg, Glu, Ile, Leu, Phe, Ser, Thr, Tyr, Val, Trp, Asn, Asp, Cys, Gly, or Pro
  misc_feature (10)..(10): Xaa can be Leu, Met, Phe, Trp, Tyr, Ile, His, Val, Ala, Cys, Gly, or Ser
AXMACHSAAX

SEQ ID NO: 48294 - protein, 9 aa, Artificial Sequence
  Description of Artificial Sequence: Synthetic peptide
  Seed: AYERMCNIL
  misc_feature (2)..(2): Xaa can be Tyr, Phe, or Trp
  misc_feature (9)..(9): Xaa can be Phe, Trp, Met, Tyr, Ile, or Leu
AXERMCNIX

SEQ ID NO: 48295 - protein, 10 aa, Artificial Sequence
  Description of Artificial Sequence: Synthetic peptide
  Seed: AYERMCNILK
  misc_feature (2)..(2): Xaa can be Thr, Ser, Val, Ala, Ile, Met, Tyr, Gln, Gly, Phe, Asn, His, Leu, or Trp
  misc_feature (10)..(10): Xaa can be Arg, Lys, Ala, Ile, Val, Leu, Met, Ser, Thr, Tyr, or Gly
AXERMCNILX

SEQ ID NO: 48296 - protein, 9 aa, Artificial Sequence
  Description of Artificial Sequence: Synthetic peptide
  Seed: CHSAAFEDL
  misc_feature (2)..(2): Xaa can be His
  misc_feature (9)..(9): Xaa can be Ile, Leu, Met, or Phe
CXSAAFEDX

SEQ ID NO: 48297 - protein, 10 aa, Artificial Sequence
  Description of Artificial Sequence: Synthetic peptide
  Seed: CHSAAFEDLR
  misc_feature (2)..(2): Xaa can be Thr, Ala, Arg, Asn, Asp, Cys, Gln, Glu, Gly, His, Ile, Leu, Lys, Met, Phe, Pro, Ser, Trp, Tyr, or Val
  misc_feature (10)..(10): Xaa can be Arg, Lys, or Tyr
CXSAAFEDLX

SEQ ID NO: 48298 - protein, 9 aa, Artificial Sequence
  Description of Artificial Sequence: Synthetic peptide
  Seed: CHSPAFEDL
  misc_feature (2)..(2): Xaa can be His
  misc_feature (9)..(9): Xaa can be Ile, Leu, Met, or Phe
CXSPAFEDX

SEQ ID NO: 48299 - protein, 9 aa, Artificial Sequence
  Description of Artificial Sequence: Synthetic peptide
  Seed: CLPACVHGL
  misc_feature (2)..(2): Xaa can be Leu, Met, Gln, Ile, Val, Thr, Ala, or Ser
  misc_feature (9)..(9): Xaa can be Leu, Val, Ala, Ile, Met, Thr, or Cys
CXPACVHGX

SEQ ID NO: 48300 - protein, 10 aa, Artificial Sequence
  Description of Artificial Sequence: Synthetic peptide
  Seed: CLPACVHGLA
  misc_feature (2)..(2): Xaa can be Leu, Met, Gln, Ile, Phe, Tyr, Val, Ala, Arg, Asn, Asp, Cys, Glu, Gly, His, Lys, Pro, Ser, Thr, or Trp
  misc_feature (10)..(10): Xaa can be Ala, Val, Ile, Leu, or Met
CXPACVHGLX

SEQ ID NO: 48301 - protein, 11 aa, Artificial Sequence
  Description of Artificial Sequence: Synthetic peptide
  Seed: CLPACVHGLAV
  misc_feature (2)..(2): Xaa can be Leu or Met
  misc_feature (11)..(11): Xaa can be Val
CXPACVHGLAX

SEQ ID NO: 48302 - protein, 9 aa, Artificial Sequence
  Description of Artificial Sequence: Synthetic peptide
  Seed: CLPACVNGL
  misc_feature (2)..(2): Xaa can be Gln, Leu, Met, Ile, Val, Thr, Ala, or Ser
  misc_feature (9)..(9): Xaa can be Val, Ile, Leu, Ala, or Met
CXPACVNGX

SEQ ID NO: 48303 - protein, 10 aa, Artificial Sequence
  Description of Artificial Sequence: Synthetic peptide
  Seed: CLPACVNGLA
  misc_feature (2)..(2): Xaa can be Leu, Met, Ile, Gln, Phe, Val, Ala, Arg, Asn, Asp, Cys, Glu, Gly, His, Lys, Pro, Ser, Thr, Trp, or Tyr
  misc_feature (10)..(10): Xaa can be Ala, Val, Leu, Ile, or Met
CXPACVNGLX

SEQ ID NO: 48304 - protein, 11 aa, Artificial Sequence
  Description of Artificial Sequence: Synthetic peptide
  Seed: CLPACVNGLAV
  misc_feature (2)..(2): Xaa can be Leu
  misc_feature (11)..(11): Xaa can be Val
CXPACVNGLAX

SEQ ID NO: 48305 - protein, 9 aa, Artificial Sequence
  Description of Artificial Sequence: Synthetic peptide
  Seed: CLPACVYGL
  misc_feature (2)..(2): Xaa can be Leu, Met, Gln, Val, Ile, Thr, Ala, or Ser
  misc_feature (9)..(9): Xaa can be Val, Ala, Ile, Leu, Met, Thr, or Cys
CXPACVYGX

SEQ ID NO: 48306 - protein, 10 aa, Artificial Sequence
  Description of Artificial Sequence: Synthetic peptide
  Seed: CLPACVYGLA
  misc_feature (2)..(2): Xaa can be Leu, Met, Gln, Ile, Thr, or Val
  misc_feature (10)..(10): Xaa can be Val, Leu, Ala, Ile, or Met
CXPACVYGLX

SEQ ID NO: 48307 - protein, 11 aa, Artificial Sequence
  Description of Artificial Sequence: Synthetic peptide
  Seed: CLPACVYGLAV
  misc_feature (2)..(2): Xaa can be Leu or Met
  misc_feature (11)..(11): Xaa can be Val
CXPACVYGLAX

SEQ ID NO: 48308 - protein, 11 aa, Artificial Sequence
  Description of Artificial Sequence: Synthetic peptide
  Seed: CLPACVYGLIV
  misc_feature (2)..(2): Xaa can be Leu or Met
  misc_feature (11)..(11): Xaa can be Val
CXPACVYGLIX

SEQ ID NO: 48309 - protein, 11 aa, Artificial Sequence
  Description of Artificial Sequence: Synthetic peptide
  Seed: CLPACVYGLSV
  misc_feature (2)..(2): Xaa can be Leu or Met
  misc_feature (11)..(11): Xaa can be Val
CXPACVYGLSX

SEQ ID NO: 48310 - protein, 11 aa, Artificial Sequence
  Description of Artificial Sequence: Synthetic peptide
  Seed: CLPACVYGLTV
  misc_feature (2)..(2): Xaa can be Leu or Met
  misc_feature (11)..(11): Xaa can be Val
CXPACVYGLTX

SEQ ID NO: 48311 - protein, 11 aa, Artificial Sequence
  Description of Artificial Sequence: Synthetic peptide
  Seed: CLPACVYGLVV
  misc_feature (2)..(2): Xaa can be Leu or Met
  misc_feature (11)..(11): Xaa can be Val
CXPACVYGLVX

SEQ ID NO: 48312 - protein, 10 aa, Artificial Sequence
  Description of Artificial Sequence: Synthetic peptide
  Seed: CLPACVYGPA
  misc_feature (2)..(2): Xaa can be Leu, Met, Gln, Ile, Val, Phe, Thr, Ala, Arg, Asn, Asp, Cys, Glu, Gly, His, Lys, Pro, Ser, Trp, or Tyr
  misc_feature (10)..(10): Xaa can be Ala, Val, Ile, Leu, or Met
CXPACVYGPX

SEQ ID NO: 48313 - protein, 11 aa, Artificial Sequence
  Description of Artificial Sequence: Synthetic peptide
  Seed: CLPACVYGPAV
  misc_feature (2)..(2): Xaa can be Leu or Met
  misc_feature (11)..(11): Xaa can be Val or Ile
CXPACVYGPAX

SEQ ID NO: 48314 - protein, 9 aa, Artificial Sequence
  Description of Artificial Sequence: Synthetic peptide
  Seed: CLPTCVYGL
  misc_feature (2)..(2): Xaa can be Leu, Met, Gln, Ile, Val, Thr, Ala, or Ser
  misc_feature (9)..(9): Xaa can be Val, Ile, Leu, Ala, Met, or Thr
CXPTCVYGX

SEQ ID NO: 48315 - protein, 10 aa, Artificial Sequence
  Description of Artificial Sequence: Synthetic peptide
  Seed: CLPTCVYGLA
  misc_feature (2)..(2): Xaa can be Leu, Met, Ile, Ala, Arg, Asn, Asp, Cys, Gln, Glu, Gly, His, Lys, Phe, Pro, Ser, Thr, Trp, Tyr, or Val
  misc_feature (10)..(10): Xaa can be Ala, Val, Ile, or Leu
CXPTCVYGLX

SEQ ID NO: 48316 - protein, 11 aa, Artificial Sequence
  Description of Artificial Sequence: Synthetic peptide
  Seed: CLPTCVYGLAV
  misc_feature (2)..(2): Xaa can be Leu or Met
  misc_feature (11)..(11): Xaa can be Val
CXPTCVYGLAX

SEQ ID NO: 48317 - protein, 9 aa, Artificial Sequence
  Description of Artificial Sequence: Synthetic peptide
  Seed: CPRGKLSTR
  misc_feature (2)..(2): Xaa can be Ala, Asn, Gln, Gly, Ile, Leu, Met, Phe, Pro, Ser, Thr, Trp, Tyr, or Val
  misc_feature (9)..(9): Xaa can be Arg
CXRGKLSTX

SEQ ID NO: 48318 - protein, 11 aa, Artificial Sequence
  Description of Artificial Sequence: Synthetic peptide
  Seed: CPRGKLSTRGV
  misc_feature (2)..(2): Xaa can be Pro
  misc_feature (11)..(11): Xaa can be Ala, Ile, Leu, Met, Phe, or Val
CXRGKLSTRGX

SEQ ID NO: 48319 - protein, 9 aa, Artificial Sequence
  Description of Artificial Sequence: Synthetic peptide
  Seed: CSLMQGSTL
  misc_feature (2)..(2): Xaa can be Gln, Met, Lys, Ala, Ser, Thr, His, Ile, Leu, Val, Arg, Glu, Gly, Asn, Cys, Phe, Tyr, or Pr o
  misc_feature (9)..(9): Xaa can be Phe, Tyr, Met, Leu, Trp, Ile, Val, His, Ala, or Gly
CXLMQGSTX

SEQ ID NO: 48320 - protein, 11 aa, Artificial Sequence
  Description of Artificial Sequence: Synthetic peptide
  Seed: CSLMQGSTLPR
  misc_feature (2)..(2): Xaa can be Ala, Arg, Asn, Asp, Cys, Gln, Glu, Gly, His, Ile, Leu, Lys, Met, Phe, Pro, Ser, Thr, Trp, Tyr, or Val
  misc_feature (11)..(11): Xaa can be Arg or Lys
CXLMQGSTLPX

SEQ ID NO: 48321 - protein, 9 aa, Artificial Sequence
  Description of Artificial Sequence: Synthetic peptide
  Seed: CTEFKLSDY
  misc_feature (2)..(2): Xaa can be Ala, Asn, Gln, Leu, Met, Ser, Thr, or Val
  misc_feature (9)..(9): Xaa can be Tyr
CXEFKLSDX

SEQ ID NO: 48322 - protein, 9 aa, Artificial Sequence
  Description of Artificial Sequence: Synthetic peptide
  Seed: CTEIKLSDY
  misc_feature (2)..(2): Xaa can be Ala, Asn, Gln, Met, Ser, Thr, or Val
  misc_feature (9)..(9): Xaa can be Tyr
CXEIKLSDX

SEQ ID NO: 48323 - protein, 9 aa, Artificial Sequence
  Description of Artificial Sequence: Synthetic peptide
  Seed: CTELKLNDY
  misc_feature (2)..(2): Xaa can be Ala, Ser, or Thr
  misc_feature (9)..(9): Xaa can be Tyr
CXELKLNDX

SEQ ID NO: 48324 - protein, 9 aa, Artificial Sequence
  Description of Artificial Sequence: Synthetic peptide
  Seed: CTELKLSDY
  misc_feature (2)..(2): Xaa can be Ala, Asn, Ser, or Thr
  misc_feature (9)..(9): Xaa can be Tyr
CXELKLSDX

SEQ ID NO: 48325 - protein, 9 aa, Artificial Sequence
  Description of Artificial Sequence: Synthetic peptide
  Seed: CTELQLSDY
  misc_feature (2)..(2): Xaa can be Ala, Asn, Gln, Ile, Leu, Met, Phe, Ser, Thr, or Val
  misc_feature (9)..(9): Xaa can be Tyr
CXELQLSDX

SEQ ID NO: 48326 - protein, 9 aa, Artificial Sequence
  Description of Artificial Sequence: Synthetic peptide
  Seed: CTLELRSRY
  misc_feature (2)..(2): Xaa can be Ser, Thr, Ala, Ile, Met, Val, Leu, Gln, Gly, Asn, Phe, Trp, or Tyr
  misc_feature (9)..(9): Xaa can be Tyr, Phe, Lys, Trp, Arg, Met, Leu, or Ile
CXLELRSRX

SEQ ID NO: 48327 - protein, 10 aa, Artificial Sequence
  Description of Artificial Sequence: Synthetic peptide
  Seed: CTLELRSRYW
  misc_feature (2)..(2): Xaa can be Ser, Thr, Ala, Cys, Gly, Ile, Leu, Met, or Val
  misc_feature (10)..(10): Xaa can be Trp, Phe, Met, or Tyr
CXLELRSRYX

SEQ ID NO: 48328 - protein, 11 aa, Artificial Sequence
  Description of Artificial Sequence: Synthetic peptide
  Seed: CVYGLAVAGGY
  misc_feature (2)..(2): Xaa can be Ala, Arg, Gln, Met, Ser, Thr, or Val
  misc_feature (11)..(11): Xaa can be Tyr
CXYGLAVAGGX

SEQ ID NO: 48329 - protein, 11 aa, Artificial Sequence
  Description of Artificial Sequence: Synthetic peptide
  Seed: CVYGLSVASGY
  misc_feature (2)..(2): Xaa can be Gln, Met, Ala, Arg, Gly, Ile, Leu, Lys, Phe, Ser, Thr, Trp, Tyr, or Val
  misc_feature (11)..(11): Xaa can be Tyr, Met, or Phe
CXYGLSVASGX

SEQ ID NO: 48330 - protein, 11 aa, Artificial Sequence
  Description of Artificial Sequence: Synthetic peptide
  Seed: CVYGLTVASGY
  misc_feature (2)..(2): Xaa can be Gln, Met, Ala, Arg, Gly, Ile, Leu, Phe, Ser, Thr, Trp, Tyr, or Val
  misc_feature (11)..(11): Xaa can be Tyr, Met, or Phe
CXYGLTVASGX

SEQ ID NO: 48331 - protein, 11 aa, Artificial Sequence
  Description of Artificial Sequence: Synthetic peptide
  Seed: CVYGPAVASGY
  misc_feature (2)..(2): Xaa can be Gln, Met, Ala, Ile, Leu, Ser, Thr, Val, Gly, Phe, Trp, or Tyr
  misc_feature (11)..(11): Xaa can be Tyr, Phe, or Met
CXYGPAVASGX

SEQ ID NO: 48332 - protein, 11 aa, Artificial Sequence
  Description of Artificial Sequence: Synthetic peptide
  Seed: CVYGPAVSSGY
  misc_feature (2)..(2): Xaa can be Met, Ala, Ile, Leu, Ser, Thr, Val, Gln, Asn, Gly, Phe, Trp, or Tyr
  misc_feature (11)..(11): Xaa can be Tyr, Phe, Arg, Lys, or Met
CXYGPAVSSGX

SEQ ID NO: 48333 - protein, 11 aa, Artificial Sequence
  Description of Artificial Sequence: Synthetic peptide
  Seed: DAIDSSTLELR
  misc_feature (2)..(2): Xaa can be Ala, Ile, Leu, Met, Ser, Thr, or Val
  misc_feature (11)..(11): Xaa can be Arg or Lys
DXIDSSTLELX

SEQ ID NO: 48334 - protein, 11 aa, Artificial Sequence
  Description of Artificial Sequence: Synthetic peptide
  Seed: DAIVSSTLELR
  misc_feature (2)..(2): Xaa can be Ala, Arg, Asn, Asp, Cys, Gln, Glu, Gly, His, Ile, Leu, Lys, Met, Phe, Pro, Ser, Thr, Trp, Tyr, or Val
  misc_feature (11)..(11): Xaa can be Arg or Lys
DXIVSSTLELX

SEQ ID NO: 48335 - protein, 9 aa, Artificial Sequence
  Description of Artificial Sequence: Synthetic peptide
  Seed: DAKPEEVSF
  misc_feature (2)..(2): Xaa can be Ala or Pro
  misc_feature (9)..(9): Xaa can be Tyr, Met, or Phe
DXKPEEVSX

SEQ ID NO: 48336 - protein, 10 aa, Artificial Sequence
  Description of Artificial Sequence: Synthetic peptide
  Seed: DAKPEEVSFR
  misc_feature (2)..(2): Xaa can be Ala, Ile, Leu, Met, Ser, Thr, Val, Asn, Phe, Trp, or Tyr
  misc_feature (10)..(10): Xaa can be Arg or Lys
DXKPEEVSFX

SEQ ID NO: 48337 - protein, 11 aa, Artificial Sequence
  Description of Artificial Sequence: Synthetic peptide
  Seed: DAMESSTLELR
  misc_feature (2)..(2): Xaa can be Ala, Ile, Met, Ser, Thr, Val, Leu, Phe, Trp, or Tyr
  misc_feature (11)..(11): Xaa can be Arg or Lys
DXMESSTLELX

SEQ ID NO: 48338 - protein, 10 aa, Artificial Sequence
  Description of Artificial Sequence: Synthetic peptide
  Seed: DAPAGLTHLM
  misc_feature (2)..(2): Xaa can be Arg, Ala, His, Lys, Met, Ser, Tyr, Phe, or Trp
  misc_feature (10)..(10): Xaa can be Leu, Met, Ile, or Phe
DXPAGLTHLX

SEQ ID NO: 48339 - protein, 10 aa, Artificial Sequence
  Description of Artificial Sequence: Synthetic peptide
  Seed: DATAGLTHIM
  misc_feature (2)..(2): Xaa can be Ala, Arg, Asn, Asp, Cys, Gln, Glu, Gly, His, Ile, Leu, Lys, Met, Phe, Pro, Ser, Thr, Trp, Tyr, or Val
  misc_feature (10)..(10): Xaa can be Ala, Ile, Leu, Met, Phe, Tyr, or Val
DXTAGLTHIX

SEQ ID NO: 48340 - protein, 10 aa, Artificial Sequence
  Description of Artificial Sequence: Synthetic peptide
  Seed: DATAGLTHLM
  misc_feature (2)..(2): Xaa can be Ala, Arg, Asn, Asp, Cys, Gln, Glu, Gly, His, Ile, Leu, Lys, Met, Phe, Pro, Ser, Thr, Trp, Tyr, or Val
  misc_feature (10)..(10): Xaa can be Ala, Ile, Leu, Met, Phe, Thr, Tyr, or Val
DXTAGLTHLX

SEQ ID NO: 48341 - protein, 9 aa, Artificial Sequence
  Description of Artificial Sequence: Synthetic peptide
  Seed: DATAGLTHM
  misc_feature (2)..(2): Xaa can be Ile, Thr, Val, Ala, Leu, Met, or Ser
  misc_feature (9)..(9): Xaa can be Tyr, Met, or Phe
DXTAGLTHX

SEQ ID NO: 48342 - protein, 10 aa, Artificial Sequence
  Description of Artificial Sequence: Synthetic peptide
  Seed: DATAGLTHMM
  misc_feature (2)..(2): Xaa can be Met, Phe, Tyr, Ala, Arg, Asn, Asp, Cys, Gln, Glu, Gly, His, Ile, Leu, Lys, Pro, Ser, Thr, Trp, or Val
  misc_feature (10)..(10): Xaa can be Ala, Ile, Leu, Met, Phe, Tyr, Val, or Thr
DXTAGLTHMX

SEQ ID NO: 48343 - protein, 9 aa, Artificial Sequence
  Description of Artificial Sequence: Synthetic peptide
  Seed: DATEIRASV
  misc_feature (2)..(2): Xaa can be Thr, Ile, Ser, Val, Ala, Leu, or Met
  misc_feature (9)..(9): Xaa can be Ile, Val, Leu, Ala, Met, or Thr
DXTEIRASX

SEQ ID NO: 48344 - protein, 11 aa, Artificial Sequence
  Description of Artificial Sequence: Synthetic peptide
  Seed: DATEIRASVGR
  misc_feature (2)..(2): Xaa can be Ala, Ile, Met, Ser, Thr, Val, Asn, Asp, Glu, His, Leu, Phe, Trp, or Tyr
  misc_feature (11)..(11): Xaa can be Arg or Lys
DXTEIRASVGX

SEQ ID NO: 48345 - protein, 10 aa, Artificial Sequence
  Description of Artificial Sequence: Synthetic peptide
  Seed: DATYQRTRAL
  misc_feature (2)..(2): Xaa can be Met, Leu, Ala, Gln, Gly, Ile, Phe, Pro, Trp, Tyr, or Val
  misc_feature (10)..(10): Xaa can be Leu, Ile, Met, Phe, Ala, or Val
DXTYQRTRAX

SEQ ID NO: 48346 - protein, 9 aa, Artificial Sequence
  Description of Artificial Sequence: Synthetic peptide
  Seed: DEKAASPIV
  misc_feature (2)..(2): Xaa can be Glu
  misc_feature (9)..(9): Xaa can be Ile, Leu, Met, Phe, Trp, Tyr, or Val
DXKAASPIX

SEQ ID NO: 48347 - protein, 9 aa, Artificial Sequence
  Description of Artificial Sequence: Synthetic peptide
  Seed: DEKATNPVV
  misc_feature (2)..(2): Xaa can be Glu
  misc_feature (9)..(9): Xaa can be Ile, Leu, Met, Phe, Trp, Tyr, or Val
DXKATNPVX

SEQ ID NO: 48348 - protein, 9 aa, Artificial Sequence
  Description of Artificial Sequence: Synthetic peptide
  Seed: DEKATSPIV
  misc_feature (2)..(2): Xaa can be Glu
  misc_feature (9)..(9): Xaa can be Ile, Leu, Met, Phe, Trp, Tyr, or Val
DXKATSPIX

SEQ ID NO: 48349 - protein, 9 aa, Artificial Sequence
  Description of Artificial Sequence: Synthetic peptide
  Seed: DENATNPIV
  misc_feature (2)..(2): Xaa can be Glu
  misc_feature (9)..(9): Xaa can be Ile, Leu, Met, Phe, Trp, Tyr, or Val
DXNATNPIX

SEQ ID NO: 48350 - protein, 9 aa, Artificial Sequence
  Description of Artificial Sequence: Synthetic peptide
  Seed: DERAANPIV
  misc_feature (2)..(2): Xaa can be Glu
  misc_feature (9)..(9): Xaa can be Ile, Leu, Met, Phe, Tyr, or Val
DXRAANPIX

SEQ ID NO: 48351 - protein, 10 aa, Artificial Sequence
  Description of Artificial Sequence: Synthetic peptide
  Seed: DGKWMRKLVL
  misc_feature (2)..(2): Xaa can be Met, Ala, Ile, Leu, Pro, Gln, Arg, Asn, Gly, Phe, Ser, Trp, Val, Cys, His, Lys, Thr, or Ty r
  misc_feature (10)..(10): Xaa can be Leu, Met, Ile, Phe, Val, or Ala
DXKWMRKLVX

SEQ ID NO: 48352 - protein, 10 aa, Artificial Sequence
  Description of Artificial Sequence: Synthetic peptide
  Seed: DGRWMRELVL
  misc_feature (2)..(2): Xaa can be Arg, Met, Lys, Tyr, Ser, Trp, Ala, Gly, His, Leu, Phe, Gln, Cys, Ile, Thr, Val, Asn, Asp, Glu, or Pro
  misc_feature (10)..(10): Xaa can be Leu, Lys, Met, Phe, Tyr, Arg, Ile, Val, Ala, His, or Trp
DXRWMRELVX

SEQ ID NO: 48353 - protein, 11 aa, Artificial Sequence
  Description of Artificial Sequence: Synthetic peptide
  Seed: DGRWMRELVLY
  misc_feature (2)..(2): Xaa can be Arg, Lys, Gly, His, Met, Tyr, Ala, Ser, Trp, Gln, Leu, or Phe
  misc_feature (11)..(11): Xaa can be Lys, Leu, Met, Phe, Arg, Tyr, Ile, Ala, His, Ser, Thr, Trp, or Val
DXRWMRELVLX

SEQ ID NO: 48354 - protein, 9 aa, Artificial Sequence
  Description of Artificial Sequence: Synthetic peptide
  Seed: DKATIMAAF
  misc_feature (2)..(2): Xaa can be Glu, Asp, Gln, Met, Lys, Ala, Asn, His, or Pro
  misc_feature (9)..(9): Xaa can be Tyr, Phe, Met, Ala, Asn, Cys, Gly, His, Ile, Leu, Pro, Ser, Thr, Trp, or Val
DXATIMAAX

SEQ ID NO: 48355 - protein, 9 aa, Artificial Sequence
  Description of Artificial Sequence: Synthetic peptide
  Seed: DKSTIMAAF
  misc_feature (2)..(2): Xaa can be His, Arg, Met, or Lys
  misc_feature (9)..(9): Xaa can be Phe, Tyr, or Met
DXSTIMAAX

SEQ ID NO: 48356 - protein, 9 aa, Artificial Sequence
  Description of Artificial Sequence: Synthetic peptide
  Seed: DKSTVMAAF
  misc_feature (2)..(2): Xaa can be Gln, Met, or Lys
  misc_feature (9)..(9): Xaa can be Phe, Met, or Tyr
DXSTVMAAX

SEQ ID NO: 48357 - protein, 9 aa, Artificial Sequence
  Description of Artificial Sequence: Synthetic peptide
  Seed: DLRISGFIR
  misc_feature (2)..(2): Xaa can be Ala, Ile, Met, Phe, Ser, Thr, Tyr, Val, Asn, Gln, Gly, Leu, or Trp
  misc_feature (9)..(9): Xaa can be Arg or Lys
DXRISGFIX

SEQ ID NO: 48358 - protein, 9 aa, Artificial Sequence
  Description of Artificial Sequence: Synthetic peptide
  Seed: DLRLFSFIR
  misc_feature (2)..(2): Xaa can be Ala, Ile, Leu, Met, Phe, Ser, Thr, Trp, Tyr, Val, Asn, Cys, Gln, Gly, His, or Pro
  misc_feature (9)..(9): Xaa can be Arg or Lys
DXRLFSFIX

SEQ ID NO: 48359 - protein, 9 aa, Artificial Sequence
  Description of Artificial Sequence: Synthetic peptide
  Seed: DLRLLSFIR
  misc_feature (2)..(2): Xaa can be Ala, Ile, Met, Phe, Ser, Thr, Trp, Tyr, Val, Asn, Cys, Gln, Gly, His, or Leu
  misc_feature (9)..(9): Xaa can be Arg or Lys
DXRLLSFIX

SEQ ID NO: 48360 - protein, 9 aa, Artificial Sequence
  Description of Artificial Sequence: Synthetic peptide
  Seed: DLRLSSFIR
  misc_feature (2)..(2): Xaa can be Ala, Ile, Met, Phe, Ser, Thr, Tyr, Val, Asn, Cys, Gln, Gly, Leu, or Trp
  misc_feature (9)..(9): Xaa can be Arg or Lys
DXRLSSFIX

SEQ ID NO: 48361 - protein, 9 aa, Artificial Sequence
  Description of Artificial Sequence: Synthetic peptide
  Seed: DLRVLNFIR
  misc_feature (2)..(2): Xaa can be Ala, Ile, Leu, Met, Phe, Ser, Thr, Trp, Tyr, Val, Asn, Cys, Gln, Gly, or His
  misc_feature (9)..(9): Xaa can be Arg or Lys
DXRVLNFIX

SEQ ID NO: 48362 - protein, 9 aa, Artificial Sequence
  Description of Artificial Sequence: Synthetic peptide
  Seed: DLRVLSFIK
  misc_feature (2)..(2): Xaa can be Ala, Ile, Leu, Met, Phe, Ser, Thr, Val, Asn, Cys, Gln, Gly, His, or Trp
  misc_feature (9)..(9): Xaa can be Arg or Lys
DXRVLSFIX

SEQ ID NO: 48363 - protein, 9 aa, Artificial Sequence
  Description of Artificial Sequence: Synthetic peptide
  Seed: DLRVSGFIR
  misc_feature (2)..(2): Xaa can be Ala, Ile, Met, Phe, Ser, Thr, Tyr, Val, Asn, Gln, Gly, Leu, or Trp
  misc_feature (9)..(9): Xaa can be Arg or Lys
DXRVSGFIX

SEQ ID NO: 48364 - protein, 11 aa, Artificial Sequence
  Description of Artificial Sequence: Synthetic peptide
  Seed: DLRVSGFIRGK
  misc_feature (2)..(2): Xaa can be Ala, Arg, Asn, Asp, Cys, Gln, Glu, Gly, His, Ile, Leu, Lys, Met, Phe, Pro, Ser, Thr, Trp, Tyr, or Val
  misc_feature (11)..(11): Xaa can be Arg or Lys
DXRVSGFIRGX

SEQ ID NO: 48365 - protein, 9 aa, Artificial Sequence
  Description of Artificial Sequence: Synthetic peptide
  Seed: DLRVSNFIR
  misc_feature (2)..(2): Xaa can be Ala, Ile, Leu, Met, Phe, Ser, Thr, Tyr, Val, Asn, Cys, Gln, Gly, or Trp
  misc_feature (9)..(9): Xaa can be Arg or Lys
DXRVSNFIX

SEQ ID NO: 48366 - protein, 9 aa, Artificial Sequence
  Description of Artificial Sequence: Synthetic peptide
  Seed: DLRVSSFIR
  misc_feature (2)..(2): Xaa can be Ala, Ile, Leu, Met, Phe, Ser, Thr, Tyr, Val, Asn, Cys, Gln, Gly, or Trp
  misc_feature (9)..(9): Xaa can be Arg or Lys
DXRVSSFIX

SEQ ID NO: 48367 - protein, 11 aa, Artificial Sequence
  Description of Artificial Sequence: Synthetic peptide
  Seed: DLRVSSFIRGK
  misc_feature (2)..(2): Xaa can be Ala, Arg, Asn, Asp, Cys, Gln, Glu, Gly, His, Ile, Leu, Lys, Met, Phe, Pro, Ser, Thr, Trp, Tyr, or Val
  misc_feature (11)..(11): Xaa can be Arg or Lys
DXRVSSFIRGX

SEQ ID NO: 48368 - protein, 10 aa, Artificial Sequence
  Description of Artificial Sequence: Synthetic peptide
  Seed: DLSFQGRGVF
  misc_feature (2)..(2): Xaa can be Arg, Ile, Leu, Lys, Met, Phe, Ser, Tyr, Val, His, Trp, Ala, Cys, Gln, Gly, or Thr
  misc_feature (10)..(10): Xaa can be Trp, Phe, or Tyr
DXSFQGRGVX

SEQ ID NO: 48369 - protein, 10 aa, Artificial Sequence
  Description of Artificial Sequence: Synthetic peptide
  Seed: DLTFLARSAL
  misc_feature (2)..(2): Xaa can be Ala, Arg, Asn, Asp, Cys, Gln, Glu, Gly, His, Ile, Leu, Lys, Met, Phe, Pro, Ser, Thr, Trp, Tyr, or Val
  misc_feature (10)..(10): Xaa can be Ala, Ile, Leu, or Val
DXTFLARSAX

SEQ ID NO: 48370 - protein, 9 aa, Artificial Sequence
  Description of Artificial Sequence: Synthetic peptide
  Seed: DMNNEGSYF
  misc_feature (2)..(2): Xaa can be Gln, Met, or Leu
  misc_feature (9)..(9): Xaa can be Tyr or Phe
DXNNEGSYX

SEQ ID NO: 48371 - protein, 10 aa, Artificial Sequence
  Description of Artificial Sequence: Synthetic peptide
  Seed: DMRAEIIRLM
  misc_feature (2)..(2): Xaa can be Arg, Tyr, Lys, Met, Phe, Trp, Ala, Gly, or His
  misc_feature (10)..(10): Xaa can be Phe, Leu, Met, Lys, Ile, Tyr, Val, or Arg
DXRAEIIRLX

SEQ ID NO: 48372 - protein, 9 aa, Artificial Sequence
  Description of Artificial Sequence: Synthetic peptide
  Seed: DMSKEGSYF
  misc_feature (2)..(2): Xaa can be Met, Gln, or Leu
  misc_feature (9)..(9): Xaa can be Tyr or Phe
DXSKEGSYX

SEQ ID NO: 48373 - protein, 9 aa, Artificial Sequence
  Description of Artificial Sequence: Synthetic peptide
  Seed: DMSNEGSYF
  misc_feature (2)..(2): Xaa can be Met
  misc_feature (9)..(9): Xaa can be Phe or Tyr
DXSNEGSYX

SEQ ID NO: 48374 - protein, 10 aa, Artificial Sequence
  Description of Artificial Sequence: Synthetic peptide
  Seed: DMSNEGSYFF
  misc_feature (2)..(2): Xaa can be Arg, Lys, Met, Ala, Asn, Cys, Gln, Gly, His, Ile, Leu, Phe, Ser, Thr, Trp, Tyr, or Val
  misc_feature (10)..(10): Xaa can be Trp or Phe
DXSNEGSYFX

SEQ ID NO: 48375 - protein, 9 aa, Artificial Sequence
  Description of Artificial Sequence: Synthetic peptide
  Seed: DPKKTGGPI
  misc_feature (2)..(2): Xaa can be Pro
  misc_feature (9)..(9): Xaa can be Ile, Leu, Met, Phe, or Val
DXKKTGGPX

SEQ ID NO: 48376 - protein, 9 aa, Artificial Sequence
  Description of Artificial Sequence: Synthetic peptide
  Seed: DPKRTGGPI
  misc_feature (2)..(2): Xaa can be Pro
  misc_feature (9)..(9): Xaa can be Ile, Leu, Met, Phe, or Val
DXKRTGGPX

SEQ ID NO: 48377 - protein, 9 aa, Artificial Sequence
  Description of Artificial Sequence: Synthetic peptide
  Seed: DQISVQPTF
  misc_feature (2)..(2): Xaa can be Glu, Gln, Leu, Met, Ala, Asp, Ile, Val, Ser, or Thr
  misc_feature (9)..(9): Xaa can be Tyr, Phe, Met, Ala, Gln, His, Ile, Leu, Ser, Thr, Trp, or Val
DXISVQPTX

SEQ ID NO: 48378 - protein, 10 aa, Artificial Sequence
  Description of Artificial Sequence: Synthetic peptide
  Seed: DRKWMRELVL
  misc_feature (2)..(2): Xaa can be Arg or His
  misc_feature (10)..(10): Xaa can be Leu
DXKWMRELVX

SEQ ID NO: 48379 - protein, 11 aa, Artificial Sequence
  Description of Artificial Sequence: Synthetic peptide
  Seed: DRNFWRGDNGR
  misc_feature (2)..(2): Xaa can be Ala, Arg, Asn, Asp, Cys, Gln, Glu, Gly, His, Ile, Leu, Lys, Met, Phe, Pro, Ser, Thr, Trp, Tyr, or Val
  misc_feature (11)..(11): Xaa can be Arg
DXNFWRGDNGX

SEQ ID NO: 48380 - protein, 11 aa, Artificial Sequence
  Description of Artificial Sequence: Synthetic peptide
  Seed: DRNFWRGENER
  misc_feature (2)..(2): Xaa can be Ala, Arg, Asn, Asp, Cys, Gln, Glu, Gly, His, Ile, Leu, Lys, Met, Phe, Pro, Ser, Thr, Trp, Tyr, or Val
  misc_feature (11)..(11): Xaa can be Arg
DXNFWRGENEX

SEQ ID NO: 48381 - protein, 11 aa, Artificial Sequence
  Description of Artificial Sequence: Synthetic peptide
  Seed: DRNFWRGENGR
  misc_feature (2)..(2): Xaa can be Ala, Arg, Asn, Asp, Cys, Gln, Glu, Gly, His, Ile, Leu, Lys, Met, Phe, Pro, Ser, Thr, Trp, Tyr, or Val
  misc_feature (11)..(11): Xaa can be Arg
DXNFWRGENGX

SEQ ID NO: 48382 - protein, 10 aa, Artificial Sequence
  Description of Artificial Sequence: Synthetic peptide
  Seed: DSCTLELRSR
  misc_feature (2)..(2): Xaa can be Thr, Val, Ala, Ile, Leu, Met, Phe, Ser, Trp, or Tyr
  misc_feature (10)..(10): Xaa can be Arg or Lys
DXCTLELRSX

SEQ ID NO: 48383 - protein, 10 aa, Artificial Sequence
  Description of Artificial Sequence: Synthetic peptide
  Seed: DSITLELRSK
  misc_feature (2)..(2): Xaa can be Ala, Ile, Leu, Met, Ser, Thr, or Val
  misc_feature (10)..(10): Xaa can be Arg or Lys
DXITLELRSX

SEQ ID NO: 48384 - protein, 10 aa, Artificial Sequence
  Description of Artificial Sequence: Synthetic peptide
  Seed: DSNTLELRSR
  misc_feature (2)..(2): Xaa can be Thr, Val, Ala, Ile, Leu, Met, Phe, Ser, Trp, or Tyr
  misc_feature (10)..(10): Xaa can be Arg or Lys
DXNTLELRSX

SEQ ID NO: 48385 - protein, 10 aa, Artificial Sequence
  Description of Artificial Sequence: Synthetic peptide
  Seed: DSRTLELRSR
  misc_feature (2)..(2): Xaa can be Ala, Ile, Leu, Met, Phe, Ser, Thr, Trp, Tyr, or Val
  misc_feature (10)..(10): Xaa can be Arg
DXRTLELRSX

SEQ ID NO: 48386 - protein, 10 aa, Artificial Sequence
  Description of Artificial Sequence: Synthetic peptide
  Seed: DSSTLELRSK
  misc_feature (2)..(2): Xaa can be Ala, Ile, Ser, Thr, Val, Leu, Met, Phe, Trp, or Tyr
  misc_feature (10)..(10): Xaa can be Arg or Lys
DXSTLELRSX

SEQ ID NO: 48387 - protein, 10 aa, Artificial Sequence
  Description of Artificial Sequence: Synthetic peptide
  Seed: DSTTLELRSR
  misc_feature (2)..(2): Xaa can be Ala, Ile, Ser, Thr, Val, Arg, Asn, Asp, Cys, Gln, Glu, Gly, His, Leu, Lys, Met, Phe, Pro, Trp, or Tyr
  misc_feature (10)..(10): Xaa can be Arg or Lys
DXTTLELRSX

SEQ ID NO: 48388 - protein, 10 aa, Artificial Sequence
  Description of Artificial Sequence: Synthetic peptide
  Seed: DTMDSNTLEL
  misc_feature (2)..(2): Xaa can be Thr, Val, Ile, Ser, Ala, Leu, or Met
  misc_feature (10)..(10): Xaa can be Val, Ile, Ala, Leu, or Met
DXMDSNTLEX

SEQ ID NO: 48389 - protein, 11 aa, Artificial Sequence
  Description of Artificial Sequence: Synthetic peptide
  Seed: DTMDSNTLELR
  misc_feature (2)..(2): Xaa can be Ala, Ile, Met, Ser, Thr, Val, Leu, Phe, Trp, or Tyr
  misc_feature (11)..(11): Xaa can be Arg or Lys
DXMDSNTLELX

SEQ ID NO: 48390 - protein, 10 aa, Artificial Sequence
  Description of Artificial Sequence: Synthetic peptide
  Seed: DTMESSTLEL
  misc_feature (2)..(2): Xaa can be Thr, Val, Ile, Ser, Ala, Leu, or Met
  misc_feature (10)..(10): Xaa can be Val, Ile, Ala, Leu, or Met
DXMESSTLEX

SEQ ID NO: 48391 - protein, 10 aa, Artificial Sequence
  Description of Artificial Sequence: Synthetic peptide
  Seed: DTMGSSTLEL
  misc_feature (2)..(2): Xaa can be Thr, Val, Ala, Ile, Ser, Leu, or Met
  misc_feature (10)..(10): Xaa can be Val, Ile, Ala, Leu, or Met
DXMGSSTLEX

SEQ ID NO: 48392 - protein, 11 aa, Artificial Sequence
  Description of Artificial Sequence: Synthetic peptide
  Seed: DTMGSSTLELR
  misc_feature (2)..(2): Xaa can be Ala, Ile, Met, Ser, Thr, Val, Leu, Phe, Trp, or Tyr
  misc_feature (11)..(11): Xaa can be Arg or Lys
DXMGSSTLELX

SEQ ID NO: 48393 - protein, 10 aa, Artificial Sequence
  Description of Artificial Sequence: Synthetic peptide
  Seed: DTMVSSTLEL
  misc_feature (2)..(2): Xaa can be Met, Phe, Tyr, Thr, Ile, Leu, Ser, Trp, Val, Ala, Arg, Gln, Gly, His, Lys, Asn, or Cys
  misc_feature (10)..(10): Xaa can be Val, Leu, Ile, Ala, or Met
DXMVSSTLEX

SEQ ID NO: 48394 - protein, 11 aa, Artificial Sequence
  Description of Artificial Sequence: Synthetic peptide
  Seed: DTMVSSTLELR
  misc_feature (2)..(2): Xaa can be Ala, Arg, Asn, Asp, Cys, Gln, Glu, Gly, His, Ile, Leu, Lys, Met, Phe, Pro, Ser, Thr, Trp, Tyr, or Val
  misc_feature (11)..(11): Xaa can be Arg or Lys
DXMVSSTLELX

SEQ ID NO: 48395 - protein, 9 aa, Artificial Sequence
  Description of Artificial Sequence: Synthetic peptide
  Seed: DVSFQGRGV
  misc_feature (2)..(2): Xaa can be Thr or Val
  misc_feature (9)..(9): Xaa can be Val
DXSFQGRGX

SEQ ID NO: 48396 - protein, 10 aa, Artificial Sequence
  Description of Artificial Sequence: Synthetic peptide
  Seed: EAIDSNTLEL
  misc_feature (2)..(2): Xaa can be Thr, Val, Ala, Ile, Ser, Leu, Met, Asn, Cys, or Gly
  misc_feature (10)..(10): Xaa can be Val, Ile, Met, Phe, Tyr, Leu, Ala, Arg, Lys, Thr, or Trp
EXIDSNTLEX

SEQ ID NO: 48397 - protein, 11 aa, Artificial Sequence
  Description of Artificial Sequence: Synthetic peptide
  Seed: EAIDSNTLELR
  misc_feature (2)..(2): Xaa can be Ala, Ile, Leu, Met, Ser, Thr, Val, Gly, Phe, or Tyr
  misc_feature (11)..(11): Xaa can be Arg or Lys
EXIDSNTLELX

SEQ ID NO: 48398 - protein, 10 aa, Artificial Sequence
  Description of Artificial Sequence: Synthetic peptide
  Seed: EAMDSNTLEL
  misc_feature (2)..(2): Xaa can be Thr, Val, Ile, Ser, Ala, Leu, Met, Asn, Cys, or Gly
  misc_feature (10)..(10): Xaa can be Val, Ile, Leu, Tyr, Ala, Phe, Met, Thr, or Trp
EXMDSNTLEX

SEQ ID NO: 48399 - protein, 11 aa, Artificial Sequence
  Description of Artificial Sequence: Synthetic peptide
  Seed: EAMDSNTLELR
  misc_feature (2)..(2): Xaa can be Thr, Ala, Ile, Leu, Met, Ser, Val, Asn, Gly, Phe, Trp, or Tyr
  misc_feature (11)..(11): Xaa can be Arg, Lys, or Tyr
EXMDSNTLELX

SEQ ID NO: 48400 - protein, 10 aa, Artificial Sequence
  Description of Artificial Sequence: Synthetic peptide
  Seed: EAMDSSTLEL
  misc_feature (2)..(2): Xaa can be Thr, Val, Ile, Ser, Ala, Leu, Met, Asn, Cys, or Gly
  misc_feature (10)..(10): Xaa can be Val, Ile, Leu, Tyr, Ala, Phe, Met, Thr, or Trp
EXMDSSTLEX

SEQ ID NO: 48401 - protein, 11 aa, Artificial Sequence
  Description of Artificial Sequence: Synthetic peptide
  Seed: EAMDSSTLELR
  misc_feature (2)..(2): Xaa can be Thr, Ala, Ile, Leu, Met, Ser, Val, Arg, Asn, Gly, Lys, Phe, Trp, or Tyr
  misc_feature (11)..(11): Xaa can be Arg, Lys, or Tyr
EXMDSSTLELX

SEQ ID NO: 48402 - protein, 10 aa, Artificial Sequence
  Description of Artificial Sequence: Synthetic peptide
  Seed: EAMDSTTLEL
  misc_feature (2)..(2): Xaa can be Thr, Val, Ser, Ala, Ile, Leu, Met, Asn, Cys, Gln, Gly, or Phe
  misc_feature (10)..(10): Xaa can be Val, Ala, Arg, Ile, Leu, Lys, Met, Phe, Tyr, Thr, Trp, Cys, or Ser
EXMDSTTLEX

SEQ ID NO: 48403 - protein, 11 aa, Artificial Sequence
  Description of Artificial Sequence: Synthetic peptide
  Seed: EAMDSTTLELR
  misc_feature (2)..(2): Xaa can be Thr, Val, Ala, Ile, Leu, Met, Ser, Asn, Cys, Gln, Gly, Phe, Trp, or Tyr
  misc_feature (11)..(11): Xaa can be Arg, Lys, or Tyr
EXMDSTTLELX

SEQ ID NO: 48404 - protein, 10 aa, Artificial Sequence
  Description of Artificial Sequence: Synthetic peptide
  Seed: EAMESSTLEL
  misc_feature (2)..(2): Xaa can be Thr, Val, Ile, Ala, Ser, Leu, Met, Asn, or Gly
  misc_feature (10)..(10): Xaa can be Val, Ile, Leu, Tyr, Ala, Phe, Met, or Thr
EXMESSTLEX

SEQ ID NO: 48405 - protein, 11 aa, Artificial Sequence
  Description of Artificial Sequence: Synthetic peptide
  Seed: EAMESSTLELR
  misc_feature (2)..(2): Xaa can be Thr, Ala, Ile, Leu, Met, Ser, Val, Asn, Gly, Phe, Trp, or Tyr
  misc_feature (11)..(11): Xaa can be Arg, Lys, or Tyr
EXMESSTLELX

SEQ ID NO: 48406 - protein, 11 aa, Artificial Sequence
  Description of Artificial Sequence: Synthetic peptide
  Seed: EDATAGLTHLM
  misc_feature (2)..(2): Xaa can be Thr, Val, Ala, Arg, Asn, Asp, Cys, Gln, Glu, Gly, His, Ile, Leu, Lys, Met, Phe, Pro, Ser, Trp, or Tyr
  misc_feature (11)..(11): Xaa can be Ala, Ile, Leu, Met, Phe, Tyr, Val, or Thr
EXATAGLTHLX

SEQ ID NO: 48407 - protein, 11 aa, Artificial Sequence
  Description of Artificial Sequence: Synthetic peptide
  Seed: EDATAGLTHMM
  misc_feature (2)..(2): Xaa can be Ala, Arg, Asn, Asp, Cys, Gln, Glu, Gly, His, Ile, Leu, Lys, Met, Phe, Pro, Ser, Thr, Trp, Tyr, or Val
  misc_feature (11)..(11): Xaa can be Ala, Ile, Leu, Met, or Val
EXATAGLTHMX

SEQ ID NO: 48408 - protein, 10 aa, Artificial Sequence
  Description of Artificial Sequence: Synthetic peptide
  Seed: EDLRISGFIR
  misc_feature (2)..(2): Xaa can be Phe, Tyr, Ala, Arg, Asn, Asp, Cys, Gln, Glu, Gly, His, Ile, Leu, Lys, Met, Pro, Ser, Thr, Trp, or Val
  misc_feature (10)..(10): Xaa can be Arg or Lys
EXLRISGFIX

SEQ ID NO: 48409 - protein, 10 aa, Artificial Sequence
  Description of Artificial Sequence: Synthetic peptide
  Seed: EDLRLFSFIR
  misc_feature (2)..(2): Xaa can be Thr, Ala, Asn, Ile, Leu, Met, Phe, Ser, Trp, Tyr, Val, Arg, Asp, Cys, Gln, Glu, Gly, His, Lys, or Pro
  misc_feature (10)..(10): Xaa can be Arg, Lys, or Tyr
EXLRLFSFIX

SEQ ID NO: 48410 - protein, 10 aa, Artificial Sequence
  Description of Artificial Sequence: Synthetic peptide
  Seed: EDLRLLSFIR
  misc_feature (2)..(2): Xaa can be Phe, Tyr, Ala, Arg, Asn, Asp, Cys, Gln, Glu, Gly, His, Ile, Leu, Lys, Met, Pro, Ser, Thr, Trp, or Val
  misc_feature (10)..(10): Xaa can be Arg or Lys
EXLRLLSFIX

SEQ ID NO: 48411 - protein, 10 aa, Artificial Sequence
  Description of Artificial Sequence: Synthetic peptide
  Seed: EDLRLSSFIR
  misc_feature (2)..(2): Xaa can be Phe, Tyr, Ala, Arg, Asn, Asp, Cys, Gln, Glu, Gly, His, Ile, Leu, Lys, Met, Pro, Ser, Thr, Trp, or Val
  misc_feature (10)..(10): Xaa can be Arg or Lys
EXLRLSSFIX

SEQ ID NO: 48412 - protein, 10 aa, Artificial Sequence
  Description of Artificial Sequence: Synthetic peptide
  Seed: EDLRVLNFIR
  misc_feature (2)..(2): Xaa can be Phe, Tyr, Ala, Arg, Asn, Asp, Cys, Gln, Glu, Gly, His, Ile, Leu, Lys, Met, Pro, Ser, Thr, Trp, or Val
  misc_feature (10)..(10): Xaa can be Arg or Lys
EXLRVLNFIX

SEQ ID NO: 48413 - protein, 10 aa, Artificial Sequence
  Description of Artificial Sequence: Synthetic peptide
  Seed: EDLRVLSFIR
  misc_feature (2)..(2): Xaa can be Met, Phe, Thr, Tyr, Val, Ala, Arg, Asn, Asp, Cys, Gln, Glu, Gly, His, Ile, Leu, Lys, Pro, Ser, or Trp
  misc_feature (10)..(10): Xaa can be Arg or Lys
EXLRVLSFIX

SEQ ID NO: 48414 - protein, 10 aa, Artificial Sequence
  Description of Artificial Sequence: Synthetic peptide
  Seed: EDLRVSGFIR
  misc_feature (2)..(2): Xaa can be Phe, Tyr, Ala, Arg, Asn, Asp, Cys, Gln, Glu, Gly, His, Ile, Leu, Lys, Met, Pro, Ser, Thr, Trp, or Val
  misc_feature (10)..(10): Xaa can be Arg or Lys
EXLRVSGFIX

SEQ ID NO: 48415 - protein, 10 aa, Artificial Sequence
  Description of Artificial Sequence: Synthetic peptide
  Seed: EDLRVSNFIR
  misc_feature (2)..(2): Xaa can be Phe, Tyr, Ala, Arg, Asn, Asp, Cys, Gln, Glu, Gly, His, Ile, Leu, Lys, Met, Pro, Ser, Thr, Trp, or Val
  misc_feature (10)..(10): Xaa can be Arg or Lys
EXLRVSNFIX

SEQ ID NO: 48416 - protein, 10 aa, Artificial Sequence
  Description of Artificial Sequence: Synthetic peptide
  Seed: EDLRVSSFIR
  misc_feature (2)..(2): Xaa can be Phe, Tyr, Ala, Arg, Asn, Asp, Cys, Gln, Glu, Gly, His, Ile, Leu, Lys, Met, Pro, Ser, Thr, Trp, or Val
  misc_feature (10)..(10): Xaa can be Arg or Lys
EXLRVSSFIX

SEQ ID NO: 48417 - protein, 11 aa, Artificial Sequence
  Description of Artificial Sequence: Synthetic peptide
  Seed: EDLTFLARSAL
  misc_feature (2)..(2): Xaa can be Thr, Val, Ala, Arg, Asn, Asp, Cys, Gln, Glu, Gly, His, Ile, Leu, Lys, Met, Phe, Pro, Ser, Trp, or Tyr
  misc_feature (11)..(11): Xaa can be Ile, Leu, Val, or Ala
EXLTFLARSAX

SEQ ID NO: 48418 - protein, 11 aa, Artificial Sequence
  Description of Artificial Sequence: Synthetic peptide
  Seed: EDTTAGLTHMM
  misc_feature (2)..(2): Xaa can be Ala, Arg, Asn, Asp, Cys, Gln, Glu, Gly, His, Ile, Leu, Lys, Met, Phe, Pro, Ser, Thr, Trp, Tyr, or Val
  misc_feature (11)..(11): Xaa can be Ala, Ile, Leu, Met, or Val
EXTTAGLTHMX

SEQ ID NO: 48419 - protein, 10 aa, Artificial Sequence
  Description of Artificial Sequence: Synthetic peptide
  Seed: EEIMRIWRQA
  misc_feature (2)..(2): Xaa can be Glu
  misc_feature (10)..(10): Xaa can be Ala
EXIMRIWRQX

SEQ ID NO: 48420 - protein, 9 aa, Artificial Sequence
  Description of Artificial Sequence: Synthetic peptide
  Seed: EEIRRIWRH
  misc_feature (2)..(2): Xaa can be Glu or Gln
  misc_feature (9)..(9): Xaa can be Phe, Tyr, Ala, His, Ile, Leu, Met, or Val
EXIRRIWRX

SEQ ID NO: 48421 - protein, 10 aa, Artificial Sequence
  Description of Artificial Sequence: Synthetic peptide
  Seed: EEIRRIWRHA
  misc_feature (2)..(2): Xaa can be Glu
  misc_feature (10)..(10): Xaa can be Ala
EXIRRIWRHX

SEQ ID NO: 48422 - protein, 10 aa, Artificial Sequence
  Description of Artificial Sequence: Synthetic peptide
  Seed: EEIRRIWRQA
  misc_feature (2)..(2): Xaa can be Glu
  misc_feature (10)..(10): Xaa can be Ala or Arg
EXIRRIWRQX

SEQ ID NO: 48423 - protein, 10 aa, Artificial Sequence
  Description of Artificial Sequence: Synthetic peptide
  Seed: EEIRRTWRQA
  misc_feature (2)..(2): Xaa can be Glu
  misc_feature (10)..(10): Xaa can be Ala
EXIRRTWRQX

SEQ ID NO: 48424 - protein, 10 aa, Artificial Sequence
  Description of Artificial Sequence: Synthetic peptide
  Seed: EEIRRVWRQA
  misc_feature (2)..(2): Xaa can be Glu
  misc_feature (10)..(10): Xaa can be Ala
EXIRRVWRQX

SEQ ID NO: 48425 - protein, 10 aa, Artificial Sequence
  Description of Artificial Sequence: Synthetic peptide
  Seed: EEISRIWRQA
  misc_feature (2)..(2): Xaa can be Glu
  misc_feature (10)..(10): Xaa can be Ala
EXISRIWRQX

SEQ ID NO: 48426 - protein, 10 aa, Artificial Sequence
  Description of Artificial Sequence: Synthetic peptide
  Seed: EELRRIWRQA
  misc_feature (2)..(2): Xaa can be Glu
  misc_feature (10)..(10): Xaa can be Ala
EXLRRIWRQX

SEQ ID NO: 48427 - protein, 10 aa, Artificial Sequence
  Description of Artificial Sequence: Synthetic peptide
  Seed: EEMRRIWRQA
  misc_feature (2)..(2): Xaa can be Glu
  misc_feature (10)..(10): Xaa can be Ala, Ile, or Val
EXMRRIWRQX

SEQ ID NO: 48428 - protein, 10 aa, Artificial Sequence
  Description of Artificial Sequence: Synthetic peptide
  Seed: EEMSFQGRGV
  misc_feature (2)..(2): Xaa can be Glu, Asp, or Gln
  misc_feature (10)..(10): Xaa can be Trp, Ala, Gly, Ile, Leu, Met, Phe, Pro, Tyr, or Val
EXMSFQGRGX

SEQ ID NO: 48429 - protein, 11 aa, Artificial Sequence
  Description of Artificial Sequence: Synthetic peptide
  Seed: EEMSFQGRGVF
  misc_feature (2)..(2): Xaa can be Glu
  misc_feature (11)..(11): Xaa can be Ile, Phe, Trp, or Tyr
EXMSFQGRGVX

SEQ ID NO: 48430 - protein, 10 aa, Artificial Sequence
  Description of Artificial Sequence: Synthetic peptide
  Seed: EEMSFRGRGV
  misc_feature (2)..(2): Xaa can be Glu, Asp, or Gln
  misc_feature (10)..(10): Xaa can be Trp, Ala, Ile, Leu, Met, Phe, Pro, Tyr, or Val
EXMSFRGRGX

SEQ ID NO: 48431 - protein, 11 aa, Artificial Sequence
  Description of Artificial Sequence: Synthetic peptide
  Seed: EEMSFRGRGVF
  misc_feature (2)..(2): Xaa can be Glu
  misc_feature (11)..(11): Xaa can be Phe, Trp, or Tyr
EXMSFRGRGVX

SEQ ID NO: 48432 - protein, 10 aa, Artificial Sequence
  Description of Artificial Sequence: Synthetic peptide
  Seed: EEVRRIWRQA
  misc_feature (2)..(2): Xaa can be Glu
  misc_feature (10)..(10): Xaa can be Ala
EXVRRIWRQX

SEQ ID NO: 48433 - protein, 11 aa, Artificial Sequence
  Description of Artificial Sequence: Synthetic peptide
  Seed: EEVSFQGRGVF
  misc_feature (2)..(2): Xaa can be Glu
  misc_feature (11)..(11): Xaa can be Phe or Tyr
EXVSFQGRGVX

SEQ ID NO: 48434 - protein, 10 aa, Artificial Sequence
  Description of Artificial Sequence: Synthetic peptide
  Seed: EFEDLIFLAR
  misc_feature (2)..(2): Xaa can be Ala, Ile, Leu, Met, Phe, Ser, Thr, Trp, Tyr, or Val
  misc_feature (10)..(10): Xaa can be Arg
EXEDLIFLAX

SEQ ID NO: 48435 - protein, 10 aa, Artificial Sequence
  Description of Artificial Sequence: Synthetic peptide
  Seed: EFEDLTFLAR
  misc_feature (2)..(2): Xaa can be Ala, Ile, Leu, Met, Phe, Ser, Thr, Trp, Tyr, or Val
  misc_feature (10)..(10): Xaa can be Arg
EXEDLTFLAX

SEQ ID NO: 48436 - protein, 10 aa, Artificial Sequence
  Description of Artificial Sequence: Synthetic peptide
  Seed: EFKLSDYEGR
  misc_feature (2)..(2): Xaa can be Ala, Ile, Met, Ser, Thr, Val, Leu, Phe, Trp, or Tyr
  misc_feature (10)..(10): Xaa can be Arg or Lys
EXKLSDYEGX

SEQ ID NO: 48437 - protein, 11 aa, Artificial Sequence
  Description of Artificial Sequence: Synthetic peptide
  Seed: EGAKPEEMSFR
  misc_feature (2)..(2): Xaa can be Ala, Ile, Leu, Met, Ser, Thr, Val, Asn, Gln, Gly, or Phe
  misc_feature (11)..(11): Xaa can be Arg or Lys
EXAKPEEMSFX

SEQ ID NO: 48438 - protein, 11 aa, Artificial Sequence
  Description of Artificial Sequence: Synthetic peptide
  Seed: EGAKPEEVSFR
  misc_feature (2)..(2): Xaa can be Ala, Ile, Leu, Met, Ser, Thr, Val, Asn, Gln, Gly, or Phe
  misc_feature (11)..(11): Xaa can be Arg or Lys
EXAKPEEVSFX

SEQ ID NO: 48439 - protein, 11 aa, Artificial Sequence
  Description of Artificial Sequence: Synthetic peptide
  Seed: EGRTSDMRAEI
  misc_feature (2)..(2): Xaa can be Val, Ala, Arg, Asn, Asp, Cys, Gln, Glu, Gly, His, Ile, Leu, Lys, Met, Phe, Pro, Ser, Thr, Trp, or Tyr
  misc_feature (11)..(11): Xaa can be Ile, Val, or Leu
EXRTSDMRAEX

SEQ ID NO: 48440 - protein, 11 aa, Artificial Sequence
  Description of Artificial Sequence: Synthetic peptide
  Seed: EGRTSDMRTEV
  misc_feature (2)..(2): Xaa can be Ala, Arg, Asn, Asp, Cys, Gln, Glu, Gly, His, Ile, Leu, Lys, Met, Phe, Pro, Ser, Thr, Trp, Tyr, or Val
  misc_feature (11)..(11): Xaa can be Val
EXRTSDMRTEX

SEQ ID NO: 48441 - protein, 10 aa, Artificial Sequence
  Description of Artificial Sequence: Synthetic peptide
  Seed: EGSYFFGDNA
  misc_feature (2)..(2): Xaa can be Thr, Val, Ala, Ile, Arg, Asn, Asp, Cys, Gln, Glu, Gly, His, Leu, Lys, Met, Phe, Pro, Ser, Trp, or Tyr
  misc_feature (10)..(10): Xaa can be Ala, Ile, Leu, Val, Met, or Thr
EXSYFFGDNX

SEQ ID NO: 48442 - protein, 10 aa, Artificial Sequence
  Description of Artificial Sequence: Synthetic peptide
  Seed: EGSYFFGDSA
  misc_feature (2)..(2): Xaa can be Thr, Val, Ala, Ile, Ser, Arg, Asn, Asp, Cys, Gln, Glu, Gly, His, Leu, Lys, Met, Phe, Pro, Trp, or Tyr
  misc_feature (10)..(10): Xaa can be Ala, Ile, Leu, Val, Met, Thr, Cys, or Ser
EXSYFFGDSX

SEQ ID NO: 48443 - protein, 9 aa, Artificial Sequence
  Description of Artificial Sequence: Synthetic peptide
  Seed: EIEDLIFLA
  misc_feature (2)..(2): Xaa can be Thr, Val, Ile, Ala, Ser, Leu, or Met
  misc_feature (9)..(9): Xaa can be Ile, Leu, Val, Ala, Met, or Thr
EXEDLIFLX

SEQ ID NO: 48444 - protein, 10 aa, Artificial Sequence
  Description of Artificial Sequence: Synthetic peptide
  Seed: EIEDLIFLTR
  misc_feature (2)..(2): Xaa can be Ala, Ile, Met, Ser, Thr, Val, Leu, Phe, Trp, or Tyr
  misc_feature (10)..(10): Xaa can be Arg or Lys
EXEDLIFLTX

SEQ ID NO: 48445 - protein, 9 aa, Artificial Sequence
  Description of Artificial Sequence: Synthetic peptide
  Seed: EIEDLIFSA
  misc_feature (2)..(2): Xaa can be Thr, Ile, Val, Ala, Ser, Leu, or Met
  misc_feature (9)..(9): Xaa can be Ile, Leu, Val, Ala, Met, or Thr
EXEDLIFSX

SEQ ID NO: 48446 - protein, 10 aa, Artificial Sequence
  Description of Artificial Sequence: Synthetic peptide
  Seed: EIEDLIFSAR
  misc_feature (2)..(2): Xaa can be Ala, Ile, Leu, Met, Ser, Thr, Val, Phe, Trp, or Tyr
  misc_feature (10)..(10): Xaa can be Arg or Lys
EXEDLIFSAX

SEQ ID NO: 48447 - protein, 9 aa, Artificial Sequence
  Description of Artificial Sequence: Synthetic peptide
  Seed: EIEDLTFLA
  misc_feature (2)..(2): Xaa can be Thr, Ile, Val, Ala, Ser, Leu, or Met
  misc_feature (9)..(9): Xaa can be Ile, Leu, Val, Ala, Met, or Thr
EXEDLTFLX

SEQ ID NO: 48448 - protein, 9 aa, Artificial Sequence
  Description of Artificial Sequence: Synthetic peptide
  Seed: EIIKMMENA
  misc_feature (2)..(2): Xaa can be Thr, Val, Ala, Ile, Ser, Leu, Met, Asn, Cys, Gln, Gly, or Phe
  misc_feature (9)..(9): Xaa can be Val, Ala, Ile, Leu, Met, Thr, Cys, or Ser
EXIKMMENX

SEQ ID NO: 48449 - protein, 10 aa, Artificial Sequence
  Description of Artificial Sequence: Synthetic peptide
  Seed: EIIKMMENAR
  misc_feature (2)..(2): Xaa can be Thr, Val, Ile, Ala, Ser, Asn, Gly, Leu, Met, Phe, Arg, Asp, Cys, Gln, Glu, His, Lys, Pro, Trp, or Tyr
  misc_feature (10)..(10): Xaa can be Arg, Lys, Tyr, Met, Phe, or Leu
EXIKMMENAX

SEQ ID NO: 48450 - protein, 9 aa, Artificial Sequence
  Description of Artificial Sequence: Synthetic peptide
  Seed: EIIKMMESA
  misc_feature (2)..(2): Xaa can be Thr, Ile, Val, Ser, Ala, Leu, Met, Asn, Cys, Gln, Gly, or Phe
  misc_feature (9)..(9): Xaa can be Val, Ala, Arg, Ile, Leu, Lys, Met, Tyr, Thr, Phe, Cys, His, or Ser
EXIKMMESX

SEQ ID NO: 48451 - protein, 10 aa, Artificial Sequence
  Description of Artificial Sequence: Synthetic peptide
  Seed: EIIKMMESAR
  misc_feature (2)..(2): Xaa can be Thr, Val, Ile, Ala, Met, Ser, Leu, Asn, Gln, Gly, Phe, Tyr, Arg, Asp, Cys, Glu, His, Lys, Pro, or Trp
  misc_feature (10)..(10): Xaa can be Arg, Lys, Tyr, Met, Phe, Ala, His, Leu, or Val
EXIKMMESAX

SEQ ID NO: 48452 - protein, 9 aa, Artificial Sequence
  Description of Artificial Sequence: Synthetic peptide
  Seed: EIIRIMESA
  misc_feature (2)..(2): Xaa can be Thr, Val, Ile, Ser, Ala, Leu, Met, Gln, Asn, Cys, Gly, Phe, Pro, or Tyr
  misc_feature (9)..(9): Xaa can be Val, Ile, Leu, Ala, Arg, Met, Lys, Phe, Tyr, Thr, Ser, His, Cys, Gln, Gly, or Pro
EXIRIMESX

SEQ ID NO: 48453 - protein, 10 aa, Artificial Sequence
  Description of Artificial Sequence: Synthetic peptide
  Seed: EIIRIMESAR
  misc_feature (2)..(2): Xaa can be Thr, Val, Ile, Ala, Met, Ser, Leu, Asn, Cys, Gln, Gly, Phe, Tyr, Arg, Asp, Glu, His, Lys, Pro, or Trp
  misc_feature (10)..(10): Xaa can be Arg, Lys, Met, Tyr, Phe, Ala, Leu, Val, Gln, His, Ile, Ser, or Thr
EXIRIMESAX

SEQ ID NO: 48454 - protein, 9 aa, Artificial Sequence
  Description of Artificial Sequence: Synthetic peptide
  Seed: EIIRLMEGA
  misc_feature (2)..(2): Xaa can be Thr, Val, Ile, Ala, Ser, Leu, Met, Asn, Cys, Gln, Gly, Phe, or Pro
  misc_feature (9)..(9): Xaa can be Val, Ile, Ala, Arg, Leu, Lys, Met, Tyr, Thr, Phe, Cys, His, or Ser
EXIRLMEGX

SEQ ID NO: 48455 - protein, 10 aa, Artificial Sequence
  Description of Artificial Sequence: Synthetic peptide
  Seed: EIIRLMEGAK
  misc_feature (2)..(2): Xaa can be Thr, Val, Ile, Ala, Leu, Met, Ser, Phe, Asn, Gln, or Gly
  misc_feature (10)..(10): Xaa can be Arg, Lys, Tyr, Met, Phe, His, Leu, or Val
EXIRLMEGAX

SEQ ID NO: 48456 - protein, 9 aa, Artificial Sequence
  Description of Artificial Sequence: Synthetic peptide
  Seed: EIIRLMESA
  misc_feature (2)..(2): Xaa can be Thr, Val, Ile, Ala, Ser, Leu, Met, Asn, Cys, Gln, Gly, or Phe
  misc_feature (9)..(9): Xaa can be Val, Ile, Ala, Arg, Leu, Lys, Met, Tyr, Thr, Phe, His, Ser, or Cys
EXIRLMESX

SEQ ID NO: 48457 - protein, 10 aa, Artificial Sequence
  Description of Artificial Sequence: Synthetic peptide
  Seed: EIIRLMESAR
  misc_feature (2)..(2): Xaa can be Thr, Val, Ile, Ala, Leu, Met, Ser, Asn, Gln, Gly, Phe, Tyr, Arg, Asp, Cys, Glu, His, Lys, Pro, or Trp
  misc_feature (10)..(10): Xaa can be Arg, Lys, Met, Tyr, Phe, Ala, His, Leu, or Val
EXIRLMESAX

SEQ ID NO: 48458 - protein, 10 aa, Artificial Sequence
  Description of Artificial Sequence: Synthetic peptide
  Seed: EIIRMMEDAK
  misc_feature (2)..(2): Xaa can be Thr, Val, Ala, Ile, Leu, Met, Phe, Ser, Asn, Cys, Gln, Gly, Pro, or Tyr
  misc_feature (10)..(10): Xaa can be Arg, Lys, or Tyr
EXIRMMEDAX

SEQ ID NO: 48459 - protein, 9 aa, Artificial Sequence
  Description of Artificial Sequence: Synthetic peptide
  Seed: EIIRMMEGA
  misc_feature (2)..(2): Xaa can be Thr, Val, Ala, Ile, Ser, Leu, Met, Asn, Gly, Cys, Gln, or Phe
  misc_feature (9)..(9): Xaa can be Val, Ile, Ala, Leu, Met, Thr, Cys, Ser, or Phe
EXIRMMEGX

SEQ ID NO: 48460 - protein, 10 aa, Artificial Sequence
  Description of Artificial Sequence: Synthetic peptide
  Seed: EIIRMMEGAK
  misc_feature (2)..(2): Xaa can be Thr, Val, Ile, Ala, Leu, Met, Ser, Asn, Gln, Gly, or Phe
  misc_feature (10)..(10): Xaa can be Arg, Lys, Tyr, Met, Phe, His, or Leu
EXIRMMEGAX

SEQ ID NO: 48461 - protein, 9 aa, Artificial Sequence
  Description of Artificial Sequence: Synthetic peptide
  Seed: EIIRMMENA
  misc_feature (2)..(2): Xaa can be Thr, Val, Ala, Ile, Ser, Leu, Met, Asn, Cys, Gln, Gly, or Phe
  misc_feature (9)..(9): Xaa can be Val, Ala, Ile, Leu, Met, Thr, Cys, or Ser
EXIRMMENX

SEQ ID NO: 48462 - protein, 10 aa, Artificial Sequence
  Description of Artificial Sequence: Synthetic peptide
  Seed: EIIRMMENAK
  misc_feature (2)..(2): Xaa can be Thr, Val, Ile, Ala, Met, Ser, Asn, Leu, Phe, Arg, Asp, Cys, Gln, or Gly
  misc_feature (10)..(10): Xaa can be Arg, Lys, Tyr, Met, or Phe
EXIRMMENAX

SEQ ID NO: 48463 - protein, 10 aa, Artificial Sequence
  Description of Artificial Sequence: Synthetic peptide
  Seed: EIIRMMENSR
  misc_feature (2)..(2): Xaa can be Thr, Val, Ile, Ser, Ala, Leu, Met, Phe, Asn, Cys, Gln, Gly, His, Pro, Trp, or Tyr
  misc_feature (10)..(10): Xaa can be Arg, Lys, Tyr, Met, or Phe
EXIRMMENSX

SEQ ID NO: 48464 - protein, 9 aa, Artificial Sequence
  Description of Artificial Sequence: Synthetic peptide
  Seed: EIIRMMESA
  misc_feature (2)..(2): Xaa can be Thr, Val, Ile, Ser, Ala, Leu, Met, Asn, Cys, Gln, Gly, or Phe
  misc_feature (9)..(9): Xaa can be Val, Ala, Arg, Ile, Leu, Lys, Met, Tyr, Phe, Thr, His, Ser, or Cys
EXIRMMESX

SEQ ID NO: 48465 - protein, 10 aa, Artificial Sequence
  Description of Artificial Sequence: Synthetic peptide
  Seed: EIIRMMESAK
  misc_feature (2)..(2): Xaa can be Thr, Val, Ile, Met, Ala, Leu, Ser, Asn, Gln, Gly, Phe, Cys, or Tyr
  misc_feature (10)..(10): Xaa can be Arg, Lys, Tyr, Met, Phe, Ala, His, Leu, or Val
EXIRMMESAX

SEQ ID NO: 48466 - protein, 10 aa, Artificial Sequence
  Description of Artificial Sequence: Synthetic peptide
  Seed: EIIRMMESSR
  misc_feature (2)..(2): Xaa can be Thr, Val, Ile, Ala, Leu, Met, Ser, Gln, Phe, Arg, Asn, Asp, Cys, Glu, Gly, His, Lys, Pro, Trp, or Tyr
  misc_feature (10)..(10): Xaa can be Arg, Lys, Tyr, Met, Phe, Leu, Val, or His
EXIRMMESSX

SEQ ID NO: 48467 - protein, 9 aa, Artificial Sequence
  Description of Artificial Sequence: Synthetic peptide
  Seed: EIIRVMESA
  misc_feature (2)..(2): Xaa can be Thr, Val, Ile, Ser, Ala, Leu, Met, Gln, Asn, Cys, Gly, Phe, Pro, or Tyr
  misc_feature (9)..(9): Xaa can be Val, Ile, Leu, Ala, Arg, Met, Lys, Phe, Tyr, Thr, Ser, His, Cys, Gln, or Pro
EXIRVMESX

SEQ ID NO: 48468 - protein, 10 aa, Artificial Sequence
  Description of Artificial Sequence: Synthetic peptide
  Seed: EIIRVMESAK
  misc_feature (2)..(2): Xaa can be Thr, Val, Ile, Ala, Met, Ser, Leu, Asn, Cys, Gln, Gly, Phe, Tyr, or Pro
  misc_feature (10)..(10): Xaa can be Arg, Lys, Met, Tyr, Phe, Ala, Leu, Val, Gln, His, Ile, Ser, or Thr
EXIRVMESAX

SEQ ID NO: 48469 - protein, 9 aa, Artificial Sequence
  Description of Artificial Sequence: Synthetic peptide
  Seed: EIMRIWRQA
  misc_feature (2)..(2): Xaa can be Thr, Val, Ala, Ile, Ser, Leu, Met, or Asn
  misc_feature (9)..(9): Xaa can be Val, Ile, Leu, Ala, Met, Thr, Cys, or Ser
EXMRIWRQX

SEQ ID NO: 48470 - protein, 9 aa, Artificial Sequence
  Description of Artificial Sequence: Synthetic peptide
  Seed: EIRASVGGM
  misc_feature (2)..(2): Xaa can be Thr, Val, Ala, Ile, Leu, Ser, or Met
  misc_feature (9)..(9): Xaa can be Arg, Lys, Tyr, Met, Phe, His, Leu, or Val
EXRASVGGX

SEQ ID NO: 48471 - protein, 10 aa, Artificial Sequence
  Description of Artificial Sequence: Synthetic peptide
  Seed: EIRASVGGMV
  misc_feature (2)..(2): Xaa can be Thr, Ser, Val, Ala, Ile, Leu, or Met
  misc_feature (10)..(10): Xaa can be Val, Ile, Leu, Ala, or Met
EXRASVGGMX

SEQ ID NO: 48472 - protein, 9 aa, Artificial Sequence
  Description of Artificial Sequence: Synthetic peptide
  Seed: EIRASVGKM
  misc_feature (2)..(2): Xaa can be Ile, Thr, Val, Ser, Ala, Met, or Leu
  misc_feature (9)..(9): Xaa can be Arg, Tyr, Lys, Phe, or Met
EXRASVGKX

SEQ ID NO: 48473 - protein, 10 aa, Artificial Sequence
  Description of Artificial Sequence: Synthetic peptide
  Seed: EIRASVGKMV
  misc_feature (2)..(2): Xaa can be Thr, Ala, Ile, Ser, or Val
  misc_feature (10)..(10): Xaa can be Val, Ala, Ile, or Leu
EXRASVGKMX

SEQ ID NO: 48474 - protein, 9 aa, Artificial Sequence
  Description of Artificial Sequence: Synthetic peptide
  Seed: EIRASVGRM
  misc_feature (2)..(2): Xaa can be Ile, Thr, Val, Ala, Ser, Leu, or Met
  misc_feature (9)..(9): Xaa can be Arg, Tyr, Lys, Met, or Phe
EXRASVGRX

SEQ ID NO: 48475 - protein, 10 aa, Artificial Sequence
  Description of Artificial Sequence: Synthetic peptide
  Seed: EIRASVGRMV
  misc_feature (2)..(2): Xaa can be Thr, Val, Ala, Ile, or Ser
  misc_feature (10)..(10): Xaa can be Val, Ile, Leu, or Ala
EXRASVGRMX

SEQ ID NO: 48476 - protein, 9 aa, Artificial Sequence
  Description of Artificial Sequence: Synthetic peptide
  Seed: EIRRIWRQR
  misc_feature (2)..(2): Xaa can be Thr, Ile, Ser, Val, Ala, Gln, Gly, Leu, Met, Phe, Trp, or Tyr
  misc_feature (9)..(9): Xaa can be Lys, Ala, Arg, or Val
EXRRIWRQX

SEQ ID NO: 48477 - protein, 9 aa, Artificial Sequence
  Description of Artificial Sequence: Synthetic peptide
  Seed: EIRSSVGRM
  misc_feature (2)..(2): Xaa can be Ile, Thr, Val, Ala, Ser, Leu, or Met
  misc_feature (9)..(9): Xaa can be Arg, Tyr, Lys, Met, or Phe
EXRSSVGRX

SEQ ID NO: 48478 - protein, 9 aa, Artificial Sequence
  Description of Artificial Sequence: Synthetic peptide
  Seed: EISRIWRQA
  misc_feature (2)..(2): Xaa can be Thr, Val, Ile, Ser, Ala, Leu, or Met
  misc_feature (9)..(9): Xaa can be Val, Ile, Leu, Ala, Met, or Thr
EXSRIWRQX

SEQ ID NO: 48479 - protein, 9 aa, Artificial Sequence
  Description of Artificial Sequence: Synthetic peptide
  Seed: EKATIMAAF
  misc_feature (2)..(2): Xaa can be Arg, Gln, His, Lys, Met, Ala, Leu, or Ser
  misc_feature (9)..(9): Xaa can be Phe, Tyr, Met, Leu, Ile, or Val
EXATIMAAX

SEQ ID NO: 48480 - protein, 11 aa, Artificial Sequence
  Description of Artificial Sequence: Synthetic peptide
  Seed: EKATNPIVPSF
  misc_feature (2)..(2): Xaa can be Arg, Lys, Met, Ile, or Tyr
  misc_feature (11)..(11): Xaa can be Trp, Phe, or Tyr
EXATNPIVPSX

SEQ ID NO: 48481 - protein, 11 aa, Artificial Sequence
  Description of Artificial Sequence: Synthetic peptide
  Seed: EKATNPVVPSF
  misc_feature (2)..(2): Xaa can be Arg, Lys, Met, Ile, Leu, Phe, or Tyr
  misc_feature (11)..(11): Xaa can be Trp, Phe, or Tyr
EXATNPVVPSX

SEQ ID NO: 48482 - protein, 11 aa, Artificial Sequence
  Description of Artificial Sequence: Synthetic peptide
  Seed: EKATSPIVPSF
  misc_feature (2)..(2): Xaa can be Arg, Lys, Met, Ala, Cys, Gln, Gly, His, Ile, Leu, Phe, Ser, Thr, Trp, Tyr, or Val
  misc_feature (11)..(11): Xaa can be Trp, Phe, Tyr, or Leu
EXATSPIVPSX

SEQ ID NO: 48483 - protein, 11 aa, Artificial Sequence
  Description of Artificial Sequence: Synthetic peptide
  Seed: EKMVLSAFDER
  misc_feature (2)..(2): Xaa can be Thr, Ala, Arg, Asn, Asp, Cys, Gln, Glu, Gly, His, Ile, Leu, Lys, Met, Phe, Pro, Ser, Trp, Tyr, or Val
  misc_feature (11)..(11): Xaa can be Arg, Lys, or Tyr
EXMVLSAFDEX

SEQ ID NO: 48484 - protein, 9 aa, Artificial Sequence
  Description of Artificial Sequence: Synthetic peptide
  Seed: EKSTVMAAF
  misc_feature (2)..(2): Xaa can be Gln, Lys, Met, Ala, Arg, His, Leu, or Ser
  misc_feature (9)..(9): Xaa can be Phe, Tyr, Met, or Leu
EXSTVMAAX

SEQ ID NO: 48485 - protein, 10 aa, Artificial Sequence
  Description of Artificial Sequence: Synthetic peptide
  Seed: ELIGMIKRGI
  misc_feature (2)..(2): Xaa can be Leu or Met
  misc_feature (10)..(10): Xaa can be Ala, Ile, or Val
EXIGMIKRGX

SEQ ID NO: 48486 - protein, 10 aa, Artificial Sequence
  Description of Artificial Sequence: Synthetic peptide
  Seed: ELIRMIKRGV
  misc_feature (2)..(2): Xaa can be Leu or Met
  misc_feature (10)..(10): Xaa can be Val
EXIRMIKRGX

SEQ ID NO: 48487 - protein, 10 aa, Artificial Sequence
  Description of Artificial Sequence: Synthetic peptide
  Seed: ELKLGDHEGR
  misc_feature (2)..(2): Xaa can be Ala, Ile, Ser, Thr, Val, Leu, Met, Phe, or Tyr
  misc_feature (10)..(10): Xaa can be Arg or Lys
EXKLGDHEGX

SEQ ID NO: 48488 - protein, 10 aa, Artificial Sequence
  Description of Artificial Sequence: Synthetic peptide
  Seed: ELKLNDHEGR
  misc_feature (2)..(2): Xaa can be Ala, Ile, Ser, Thr, Val, Leu, Met, Phe, or Tyr
  misc_feature (10)..(10): Xaa can be Arg or Lys
EXKLNDHEGX

SEQ ID NO: 48489 - protein, 10 aa, Artificial Sequence
  Description of Artificial Sequence: Synthetic peptide
  Seed: ELKLNDYEGR
  misc_feature (2)..(2): Xaa can be Ala, Ile, Ser, Thr, Val, Leu, Met, Phe, or Tyr
  misc_feature (10)..(10): Xaa can be Arg or Lys
EXKLNDYEGX

SEQ ID NO: 48490 - protein, 10 aa, Artificial Sequence
  Description of Artificial Sequence: Synthetic peptide
  Seed: ELKLSDHEGR
  misc_feature (2)..(2): Xaa can be Ala, Ile, Ser, Thr, Val, Leu, Met, Phe, Trp, or Tyr
  misc_feature (10)..(10): Xaa can be Arg or Lys
EXKLSDHEGX

SEQ ID NO: 48491 - protein, 10 aa, Artificial Sequence
  Description of Artificial Sequence: Synthetic peptide
  Seed: ELKLSDNEGR
  misc_feature (2)..(2): Xaa can be Ala, Ile, Ser, Thr, Val, Leu, Met, Phe, or Tyr
  misc_feature (10)..(10): Xaa can be Arg or Lys
EXKLSDNEGX

SEQ ID NO: 48492 - protein, 10 aa, Artificial Sequence
  Description of Artificial Sequence: Synthetic peptide
  Seed: ELKLSDQEGR
  misc_feature (2)..(2): Xaa can be Ile, Thr, Val, Ala, Leu, Met, or Ser
  misc_feature (10)..(10): Xaa can be Arg or Lys
EXKLSDQEGX

SEQ ID NO: 48493 - protein, 10 aa, Artificial Sequence
  Description of Artificial Sequence: Synthetic peptide
  Seed: ELQLSDYEGR
  misc_feature (2)..(2): Xaa can be Ala, Ile, Ser, Thr, Val, Leu, Met, Phe, or Tyr
  misc_feature (10)..(10): Xaa can be Arg or Lys
EXQLSDYEGX

SEQ ID NO: 48494 - protein, 9 aa, Artificial Sequence
  Description of Artificial Sequence: Synthetic peptide
  Seed: ELRSKYWAI
  misc_feature (2)..(2): Xaa can be Met, Leu, Ala, Ile, Gln, Pro, Val, Asn, Gly, Ser, Thr, Arg, Lys, Phe, Cys, Trp, Glu, Tyr, His, or Asp
  misc_feature (9)..(9): Xaa can be Leu, Met, Ile, Val, Ala, Phe, Cys, Thr, Gly, Ser, Trp, Glu, or Pro
EXRSKYWAX

SEQ ID NO: 48495 - protein, 10 aa, Artificial Sequence
  Description of Artificial Sequence: Synthetic peptide
  Seed: ELRSKYWAIR
  misc_feature (2)..(2): Xaa can be Ala, Ile, Met, Phe, Ser, Thr, Tyr, Val, Asn, Cys, Gln, Gly, His, Leu, Pro, or Trp
  misc_feature (10)..(10): Xaa can be Arg or Lys
EXRSKYWAIX

SEQ ID NO: 48496 - protein, 9 aa, Artificial Sequence
  Description of Artificial Sequence: Synthetic peptide
  Seed: ELRSRYRAI
  misc_feature (2)..(2): Xaa can be Met, Leu, Ala, Gln, Ile, Pro, Val, Arg, Asn, Gly, Lys, Phe, Ser, Thr, Cys, Trp, Tyr, Glu, His, or Asp
  misc_feature (9)..(9): Xaa can be Leu, Met, Ile, Val, Phe, Ala, Cys, Thr, Gly, Ser, Trp, Glu, or Pro
EXRSRYRAX

SEQ ID NO: 48497 - protein, 10 aa, Artificial Sequence
  Description of Artificial Sequence: Synthetic peptide
  Seed: ELRSRYRAIR
  misc_feature (2)..(2): Xaa can be Ala, Ile, Ser, Thr, Val, Leu, Met, Phe, Trp, or Tyr
  misc_feature (10)..(10): Xaa can be Arg or Lys
EXRSRYRAIX

SEQ ID NO: 48498 - protein, 9 aa, Artificial Sequence
  Description of Artificial Sequence: Synthetic peptide
  Seed: ELRSRYWAI
  misc_feature (2)..(2): Xaa can be Leu, Met, Ala, Gln, Ile, Pro, Val, Asn, Gly, Ser, Arg, Lys, Phe, Thr, Cys, Trp, Tyr, Glu, His, or Asp
  misc_feature (9)..(9): Xaa can be Ile, Leu, Met, Val, Ala, Phe, Cys, Thr, Gly, Ser, Glu, Pro, Trp, or Tyr
EXRSRYWAX

SEQ ID NO: 48499 - protein, 10 aa, Artificial Sequence
  Description of Artificial Sequence: Synthetic peptide
  Seed: ELRSRYWAIK
  misc_feature (2)..(2): Xaa can be Leu, Met, Ala, Ile, Val, Gln, Pro, Ser, Thr, Gly, Trp, Arg, Asn, Lys, Phe, or Tyr
  misc_feature (10)..(10): Xaa can be Leu, Met, Lys, Ile, Phe, Val, Arg, Ala, Asn, Asp, Cys, Gln, Glu, Gly, His, Pro, Ser, Thr, Trp, or Tyr
EXRSRYWAIX

SEQ ID NO: 48500 - protein, 11 aa, Artificial Sequence
  Description of Artificial Sequence: Synthetic peptide
  Seed: ELSDEKATNPV
  misc_feature (2)..(2): Xaa can be Thr, Val, Ile, Ala, Leu, Met, or Ser
  misc_feature (11)..(11): Xaa can be Val, Ile, Leu, or Ala
EXSDEKATNPX

SEQ ID NO: 48501 - protein, 11 aa, Artificial Sequence
  Description of Artificial Sequence: Synthetic peptide
  Seed: ELVLYDKEELR
  misc_feature (2)..(2): Xaa can be Ala, Ile, Thr, Val, Glu, Leu, Met, Phe, Ser, or Tyr
  misc_feature (11)..(11): Xaa can be Arg or Lys
EXVLYDKEELX

SEQ ID NO: 48502 - protein, 10 aa, Artificial Sequence
  Description of Artificial Sequence: Synthetic peptide
  Seed: EMSFQGRGVF
  misc_feature (2)..(2): Xaa can be Gln, Met, Phe, Tyr, Ala, Arg, His, Ile, Leu, Lys, Ser, Trp, Val, Thr, Asn, Asp, Cys, Glu, Gly, or Pro
  misc_feature (10)..(10): Xaa can be Trp, Tyr, Phe, or Met
EXSFQGRGVX

SEQ ID NO: 48503 - protein, 10 aa, Artificial Sequence
  Description of Artificial Sequence: Synthetic peptide
  Seed: EMSFRGRGVF
  misc_feature (2)..(2): Xaa can be Gln, Arg, Ile, Leu, Lys, Met, Phe, Tyr, Val, His, Ser, Ala, Cys, Gly, Thr, or Trp
  misc_feature (10)..(10): Xaa can be Trp, Phe, Tyr, or Met
EXSFRGRGVX

SEQ ID NO: 48504 - protein, 10 aa, Artificial Sequence
  Description of Artificial Sequence: Synthetic peptide
  Seed: ENAAAGLTHL
  misc_feature (2)..(2): Xaa can be Thr, Ile, Val, Ala, Ser, Arg, Asn, Asp, Cys, Gln, Glu, Gly, His, Leu, Lys, Met, Phe, Pro, Trp, or Tyr
  misc_feature (10)..(10): Xaa can be Ile, Leu, Val, Ala, Met, or Thr
EXAAAGLTHX

SEQ ID NO: 48505 - protein, 9 aa, Artificial Sequence
  Description of Artificial Sequence: Synthetic peptide
  Seed: ENMETMDSI
  misc_feature (2)..(2): Xaa can be Thr, Val, Ala, Asn, Ile, Met, Ser, Cys, Gln, Gly, Leu, Phe, Tyr, Pro, or Trp
  misc_feature (9)..(9): Xaa can be Arg, Lys, Tyr, His, Ile, Gln, Met, Phe, or Val
EXMETMDSX

SEQ ID NO: 48506 - protein, 11 aa, Artificial Sequence
  Description of Artificial Sequence: Synthetic peptide
  Seed: ENSAHKSQLVW
  misc_feature (2)..(2): Xaa can be Met, Ala, Arg, Asn, Cys, Gln, Gly, His, Ile, Leu, Lys, Phe, Ser, Thr, Trp, Tyr, or Val
  misc_feature (11)..(11): Xaa can be Trp or Phe
EXSAHKSQLVX

SEQ ID NO: 48507 - protein, 9 aa, Artificial Sequence
  Description of Artificial Sequence: Synthetic peptide
  Seed: EQMETDGER
  misc_feature (2)..(2): Xaa can be Thr, Val, Ala, Ile, Leu, Met, Phe, Ser, Asn, Cys, Gln, or Gly
  misc_feature (9)..(9): Xaa can be Arg, Lys, or Tyr
EXMETDGEX

SEQ ID NO: 48508 - protein, 9 aa, Artificial Sequence
  Description of Artificial Sequence: Synthetic peptide
  Seed: EQMETGGER
  misc_feature (2)..(2): Xaa can be Ser, Thr, Val, Ala, Asn, Gly, Ile, Leu, Met, Cys, Gln, or Phe
  misc_feature (9)..(9): Xaa can be Arg, Lys, or Tyr
EXMETGGEX

SEQ ID NO: 48509 - protein, 11 aa, Artificial Sequence
  Description of Artificial Sequence: Synthetic peptide
  Seed: ERAANPIVPSF
  misc_feature (2)..(2): Xaa can be Arg or Met
  misc_feature (11)..(11): Xaa can be Trp or Phe
EXAANPIVPSX

SEQ ID NO: 48510 - protein, 8 aa, Artificial Sequence
  Description of Artificial Sequence: Synthetic peptide
  Seed: ERATIMAA
  misc_feature (2)..(2): Xaa can be Arg or His
  misc_feature (8)..(8): Xaa can be Ala
EXATIMAX

SEQ ID NO: 48511 - protein, 10 aa, Artificial Sequence
  Description of Artificial Sequence: Synthetic peptide
  Seed: ERATIMAAFI
  misc_feature (2)..(2): Xaa can be Thr, Val, Ser, Ala, Ile, Leu, Met, Asn, Cys, Gln, Gly, Phe, Pro, Tyr, Arg, Asp, His, Trp, Glu, or Lys
  misc_feature (10)..(10): Xaa can be Ile, Val, Leu, Ala, Met, Thr, Ser, Cys, Phe, Gly, or Pro
EXATIMAAFX

SEQ ID NO: 48512 - protein, 9 aa, Artificial Sequence
  Description of Artificial Sequence: Synthetic peptide
  Seed: ERATVMAAF
  misc_feature (2)..(2): Xaa can be Arg, Gln, His, Lys, Met, Ala, Leu, or Ser
  misc_feature (9)..(9): Xaa can be Phe, Tyr, Met, Leu, or Ile
EXATVMAAX

SEQ ID NO: 48513 - protein, 10 aa, Artificial Sequence
  Description of Artificial Sequence: Synthetic peptide
  Seed: ERATVMAAFI
  misc_feature (2)..(2): Xaa can be Thr, Val, Ala, Ser, Ile, Leu, Met, Asn, Cys, Gln, Gly, Phe, Tyr, Arg, Asp, Glu, His, Lys, Pro, or Trp
  misc_feature (10)..(10): Xaa can be Ile, Leu, Val, Ala, Met, Thr, Ser, Cys, Gly, Phe, or Pro
EXATVMAAFX

SEQ ID NO: 48514 - protein, 10 aa, Artificial Sequence
  Description of Artificial Sequence: Synthetic peptide
  Seed: ERMCNILKGK
  misc_feature (2)..(2): Xaa can be Arg
  misc_feature (10)..(10): Xaa can be Leu, Lys, Met, Phe, or Tyr
EXMCNILKGX

SEQ ID NO: 48515 - protein, 8 aa, Artificial Sequence
  Description of Artificial Sequence: Synthetic peptide
  Seed: ERMILSAF
  misc_feature (2)..(2): Xaa can be Glu, Met, Phe, Trp, Tyr, Arg, Asn, Gln, His, Ile, Leu, Ala, Lys, or Val
  misc_feature (8)..(8): Xaa can be Tyr, Phe, Met, Ala, His, Ile, Leu, Trp, or Val
EXMILSAX

SEQ ID NO: 48516 - protein, 11 aa, Artificial Sequence
  Description of Artificial Sequence: Synthetic peptide
  Seed: ERMILSAFDER
  misc_feature (2)..(2): Xaa can be Thr, Ala, Arg, Ile, Leu, Met, Phe, Ser, Val, Asn, Asp, Cys, Gln, Glu, Gly, His, Lys, Pro, Trp, or Tyr
  misc_feature (11)..(11): Xaa can be Arg, Lys, or Tyr
EXMILSAFDEX

SEQ ID NO: 48517 - protein, 8 aa, Artificial Sequence
  Description of Artificial Sequence: Synthetic peptide
  Seed: ERMVLSAF
  misc_feature (2)..(2): Xaa can be Glu, Met, Phe, Trp, Tyr, Arg, Asn, Gln, His, Ile, Leu, or Lys
  misc_feature (8)..(8): Xaa can be Tyr, Phe, Met, Ala, His, Ile, Leu, Trp, or Val
EXMVLSAX

SEQ ID NO: 48518 - protein, 11 aa, Artificial Sequence
  Description of Artificial Sequence: Synthetic peptide
  Seed: ERMVLSAFEER
  misc_feature (2)..(2): Xaa can be Thr, Ala, Arg, Asn, Asp, Cys, Gln, Glu, Gly, His, Ile, Leu, Lys, Met, Phe, Pro, Ser, Trp, Tyr, or Val
  misc_feature (11)..(11): Xaa can be Arg, Lys, or Tyr
EXMVLSAFEEX

SEQ ID NO: 48519 - protein, 10 aa, Artificial Sequence
  Description of Artificial Sequence: Synthetic peptide
  Seed: ERRTRIAYER
  misc_feature (2)..(2): Xaa can be Arg or Trp
  misc_feature (10)..(10): Xaa can be Leu, Arg, Lys, Met, Phe, or Tyr
EXRTRIAYEX

SEQ ID NO: 48520 - protein, 9 aa, Artificial Sequence
  Description of Artificial Sequence: Synthetic peptide
  Seed: ERSTIMAAF
  misc_feature (2)..(2): Xaa can be Arg, Gln, His, Lys, Met, Ala, Leu, or Ser
  misc_feature (9)..(9): Xaa can be Phe, Tyr, Met, Leu, or Ile
EXSTIMAAX

SEQ ID NO: 48521 - protein, 9 aa, Artificial Sequence
  Description of Artificial Sequence: Synthetic peptide
  Seed: ERVTIMAAF
  misc_feature (2)..(2): Xaa can be Arg, Gln, Lys, Met, Ala, His, Ser, or Leu
  misc_feature (9)..(9): Xaa can be Tyr, Phe, Met, Leu, Ile, or Val
EXVTIMAAX

SEQ ID NO: 48522 - protein, 10 aa, Artificial Sequence
  Description of Artificial Sequence: Synthetic peptide
  Seed: ERVTIMAAFK
  misc_feature (2)..(2): Xaa can be Thr, Val, Ser, Ala, Asn, Cys, Gln, Gly, Ile, Leu, Met, Phe, Pro, Tyr, Arg, Asp, Glu, His, Lys, or Trp
  misc_feature (10)..(10): Xaa can be Arg, Lys, Tyr, His, Gln, or Glu
EXVTIMAAFX

SEQ ID NO: 48523 - protein, 10 aa, Artificial Sequence
  Description of Artificial Sequence: Synthetic peptide
  Seed: ESRNPGNAEV
  misc_feature (2)..(2): Xaa can be Thr, Val, Ile, Ala, or Ser
  misc_feature (10)..(10): Xaa can be Val, Ile, Leu, Ala, or Met
EXRNPGNAEX

SEQ ID NO: 48524 - protein, 10 aa, Artificial Sequence
  Description of Artificial Sequence: Synthetic peptide
  Seed: ESRSPGNAEI
  misc_feature (2)..(2): Xaa can be Thr, Val, Ile, Ser, Ala, Leu, or Met
  misc_feature (10)..(10): Xaa can be Val, Ile, Leu, Ala, or Met
EXRSPGNAEX

SEQ ID NO: 48525 - protein, 10 aa, Artificial Sequence
  Description of Artificial Sequence: Synthetic peptide
  Seed: ESSTLELRSK
  misc_feature (2)..(2): Xaa can be Ala, Ile, Leu, Met, Ser, Thr, Val, Asn, Gln, Gly, Phe, Trp, or Tyr
  misc_feature (10)..(10): Xaa can be Arg or Lys
EXSTLELRSX

SEQ ID NO: 48526 - protein, 10 aa, Artificial Sequence
  Description of Artificial Sequence: Synthetic peptide
  Seed: ETIDSSTLEL
  misc_feature (2)..(2): Xaa can be Thr, Val, Ala, Ile, Ser, Leu, Met, Asn, Cys, or Gly
  misc_feature (10)..(10): Xaa can be Val, Ile, Met, Phe, Tyr, Leu, Ala, Arg, Lys, Thr, or Trp
EXIDSSTLEX

SEQ ID NO: 48527 - protein, 11 aa, Artificial Sequence
  Description of Artificial Sequence: Synthetic peptide
  Seed: ETIDSSTLELR
  misc_feature (2)..(2): Xaa can be Thr, Val, Ala, Ile, Leu, Met, Ser, Asn, Gly, Phe, or Tyr
  misc_feature (11)..(11): Xaa can be Arg, Lys, or Tyr
EXIDSSTLELX

SEQ ID NO: 48528 - protein, 10 aa, Artificial Sequence
  Description of Artificial Sequence: Synthetic peptide
  Seed: ETMDSCTLEL
  misc_feature (2)..(2): Xaa can be Thr, Val, Ala, Ile, Ser, Leu, Met, Asn, Cys, Gln, Gly, or Phe
  misc_feature (10)..(10): Xaa can be Val, Ile, Leu, Tyr, Ala, Met, Phe, Thr, Trp, or Ser
EXMDSCTLEX

SEQ ID NO: 48529 - protein, 11 aa, Artificial Sequence
  Description of Artificial Sequence: Synthetic peptide
  Seed: ETMDSCTLELR
  misc_feature (2)..(2): Xaa can be Thr, Ala, Ile, Leu, Met, Ser, Val, Arg, Lys, Phe, Trp, or Tyr
  misc_feature (11)..(11): Xaa can be Arg, Lys, or Tyr
EXMDSCTLELX

SEQ ID NO: 48530 - protein, 9 aa, Artificial Sequence
  Description of Artificial Sequence: Synthetic peptide
  Seed: ETMDSITLE
  misc_feature (2)..(2): Xaa can be Thr, Val, Ile, Ala, Ser, Met, Leu, Gln, Phe, Asn, Asp, Cys, Gly, Pro, Trp, Tyr, Glu, or Hi s
  misc_feature (9)..(9): Xaa can be Arg, Lys, Tyr, Ala, Leu, Met, Phe, Val, His, Ile, Gln, Ser, Thr, or Glu
EXMDSITLX

SEQ ID NO: 48531 - protein, 10 aa, Artificial Sequence
  Description of Artificial Sequence: Synthetic peptide
  Seed: ETMDSITLEL
  misc_feature (2)..(2): Xaa can be Thr, Val, Ile, Met, Ala, Leu, Ser, Phe, Tyr, Asn, Gln, Lys, Trp, Arg, Cys, Gly, His, Asp, Glu, or Pro
  misc_feature (10)..(10): Xaa can be Val, Ile, Leu, Met, Tyr, Ala, Arg, Lys, Phe, Thr, Trp, Cys, His, or Ser
EXMDSITLEX

SEQ ID NO: 48532 - protein, 11 aa, Artificial Sequence
  Description of Artificial Sequence: Synthetic peptide
  Seed: ETMDSITLELR
  misc_feature (2)..(2): Xaa can be Thr, Val, Ala, Ile, Leu, Met, Ser, Asn, Gln, Gly, Phe, Trp, or Tyr
  misc_feature (11)..(11): Xaa can be Arg, Lys, or Tyr
EXMDSITLELX

SEQ ID NO: 48533 - protein, 9 aa, Artificial Sequence
  Description of Artificial Sequence: Synthetic peptide
  Seed: ETMDSNTLE
  misc_feature (2)..(2): Xaa can be Thr, Val, Ala, Ile, Leu, Met, Ser, Asn, Cys, Gln, Gly, Phe, Pro, Tyr, Asp, or Trp
  misc_feature (9)..(9): Xaa can be Arg, Lys, Tyr, Gln, His, Glu, or Met
EXMDSNTLX

SEQ ID NO: 48534 - protein, 9 aa, Artificial Sequence
  Description of Artificial Sequence: Synthetic peptide
  Seed: ETMDSRTLE
  misc_feature (2)..(2): Xaa can be Thr, Val, Ala, Ile, Leu, Met, Ser, Asn, Cys, Gln, Gly, Phe, Pro, Tyr, or Asp
  misc_feature (9)..(9): Xaa can be Arg, Lys, Tyr, Gln, His, Glu, Met, or Phe
EXMDSRTLX

SEQ ID NO: 48535 - protein, 10 aa, Artificial Sequence
  Description of Artificial Sequence: Synthetic peptide
  Seed: ETMDSRTLEL
  misc_feature (2)..(2): Xaa can be Thr, Val, Ile, Ala, Ser, Leu, Met, or Asn
  misc_feature (10)..(10): Xaa can be Val, Ile, Tyr, Leu, Ala, Phe, Met, Thr, or Trp
EXMDSRTLEX

SEQ ID NO: 48536 - protein, 11 aa, Artificial Sequence
  Description of Artificial Sequence: Synthetic peptide
  Seed: ETMDSRTLELR
  misc_feature (2)..(2): Xaa can be Thr, Ala, Ile, Leu, Met, Phe, Ser, Val, Arg, Asn, Gly, Lys, Trp, or Tyr
  misc_feature (11)..(11): Xaa can be Arg, Lys, or Tyr
EXMDSRTLELX

SEQ ID NO: 48537 - protein, 9 aa, Artificial Sequence
  Description of Artificial Sequence: Synthetic peptide
  Seed: ETMDSSTLE
  misc_feature (2)..(2): Xaa can be Thr, Val, Ile, Ala, Leu, Met, Ser, Asn, Cys, Gln, Gly, Phe, Pro, Tyr, Asp, or His
  misc_feature (9)..(9): Xaa can be Arg, Lys, Tyr, His, Gln, Glu, Met, or Phe
EXMDSSTLX

SEQ ID NO: 48538 - protein, 9 aa, Artificial Sequence
  Description of Artificial Sequence: Synthetic peptide
  Seed: ETMDSTTLE
  misc_feature (2)..(2): Xaa can be Thr, Val, Ile, Ala, Leu, Met, Ser, Gln, Phe, Asn, Asp, Cys, Gly, Pro, Tyr, Glu, His, or Tr p
  misc_feature (9)..(9): Xaa can be Arg, Lys, Tyr, Leu, Met, Phe, Val, Ala, His, Gln, Ile, Glu, Ser, or Thr
EXMDSTTLX

SEQ ID NO: 48539 - protein, 9 aa, Artificial Sequence
  Description of Artificial Sequence: Synthetic peptide
  Seed: ETMESSTLE
  misc_feature (2)..(2): Xaa can be Thr, Val, Ala, Ile, Leu, Met, Ser, Asn, Cys, Gln, Gly, Phe, Tyr, Asp, or Pro
  misc_feature (9)..(9): Xaa can be Arg, Lys, Tyr, Gln, His, Glu, Met, or Phe
EXMESSTLX

SEQ ID NO: 48540 - protein, 9 aa, Artificial Sequence
  Description of Artificial Sequence: Synthetic peptide
  Seed: ETMGSSTLE
  misc_feature (2)..(2): Xaa can be Thr, Val, Ala, Ile, Leu, Met, Ser, Asn, Cys, Gln, Gly, Phe, Pro, Tyr, or Asp
  misc_feature (9)..(9): Xaa can be Arg, Lys, Tyr, Gln, His, Glu, Met, or Phe
EXMGSSTLX

SEQ ID NO: 48541 - protein, 10 aa, Artificial Sequence
  Description of Artificial Sequence: Synthetic peptide
  Seed: ETMGSSTLEL
  misc_feature (2)..(2): Xaa can be Thr, Val, Ser, Ala, Ile, Leu, Met, Asn, or Gly
  misc_feature (10)..(10): Xaa can be Val, Ile, Ala, Leu, Met, or Thr
EXMGSSTLEX

SEQ ID NO: 48542 - protein, 11 aa, Artificial Sequence
  Description of Artificial Sequence: Synthetic peptide
  Seed: ETMGSSTLELR
  misc_feature (2)..(2): Xaa can be Thr, Ala, Ile, Leu, Met, Ser, Val, Arg, Asn, Gln, Gly, His, Lys, Phe, Trp, or Tyr
  misc_feature (11)..(11): Xaa can be Arg, Lys, or Tyr
EXMGSSTLELX

SEQ ID NO: 48543 - protein, 9 aa, Artificial Sequence
  Description of Artificial Sequence: Synthetic peptide
  Seed: ETMNSSTLE
  misc_feature (2)..(2): Xaa can be Thr, Val, Ala, Ile, Leu, Met, Ser, Asn, Cys, Gln, Gly, Phe, Pro, Tyr, or Asp
  misc_feature (9)..(9): Xaa can be Arg, Lys, Tyr, Gln, His, Glu, or Met
EXMNSSTLX

SEQ ID NO: 48544 - protein, 10 aa, Artificial Sequence
  Description of Artificial Sequence: Synthetic peptide
  Seed: ETMNSSTLEL
  misc_feature (2)..(2): Xaa can be Thr, Met, Phe, Tyr, Val, Ala, Ile, Ser, Leu, Trp, Arg, Cys, Gln, Gly, His, Lys, or Asn
  misc_feature (10)..(10): Xaa can be Val, Leu, Ile, Ala, Met, or Thr
EXMNSSTLEX

SEQ ID NO: 48545 - protein, 11 aa, Artificial Sequence
  Description of Artificial Sequence: Synthetic peptide
  Seed: ETMNSSTLELR
  misc_feature (2)..(2): Xaa can be Thr, Ala, Arg, Ile, Leu, Lys, Met, Ser, Val, Cys, Gln, Gly, His, Phe, Trp, or Tyr
  misc_feature (11)..(11): Xaa can be Arg, Lys, or Tyr
EXMNSSTLELX

SEQ ID NO: 48546 - protein, 9 aa, Artificial Sequence
  Description of Artificial Sequence: Synthetic peptide
  Seed: ETMSSSTLE
  misc_feature (2)..(2): Xaa can be Thr, Val, Ala, Ile, Leu, Met, Ser, Asn, Cys, Gln, Gly, Phe, Pro, Tyr, Asp, or Glu
  misc_feature (9)..(9): Xaa can be Arg, Lys, Tyr, Gln, His, Glu, Met, or Phe
EXMSSSTLX

SEQ ID NO: 48547 - protein, 10 aa, Artificial Sequence
  Description of Artificial Sequence: Synthetic peptide
  Seed: ETMSSSTLEL
  misc_feature (2)..(2): Xaa can be Thr, Leu, Met, Phe, Tyr, Val, Ala, Ile, Ser, Trp, Arg, Gln, Gly, His, Lys, Asn, Cys, Asp, Glu, or Pro
  misc_feature (10)..(10): Xaa can be Val, Leu, Ile, Ala, Met, or Thr
EXMSSSTLEX

SEQ ID NO: 48548 - protein, 11 aa, Artificial Sequence
  Description of Artificial Sequence: Synthetic peptide
  Seed: ETMSSSTLELR
  misc_feature (2)..(2): Xaa can be Thr, Ala, Arg, Asn, Asp, Cys, Gln, Glu, Gly, His, Ile, Leu, Lys, Met, Phe, Pro, Ser, Trp, Tyr, or Val
  misc_feature (11)..(11): Xaa can be Arg, Lys, or Tyr
EXMSSSTLELX

SEQ ID NO: 48549 - protein, 9 aa, Artificial Sequence
  Description of Artificial Sequence: Synthetic peptide
  Seed: EVSFQGRGV
  misc_feature (2)..(2): Xaa can be Thr, Val, Ala, Ile, or Ser
  misc_feature (9)..(9): Xaa can be Val, Ile, Leu, or Ala
EXSFQGRGX

SEQ ID NO: 48550 - protein, 9 aa, Artificial Sequence
  Description of Artificial Sequence: Synthetic peptide
  Seed: EVSFRGRGV
  misc_feature (2)..(2): Xaa can be Thr or Val
  misc_feature (9)..(9): Xaa can be Val or Ile
EXSFRGRGX

SEQ ID NO: 48551 - protein, 10 aa, Artificial Sequence
  Description of Artificial Sequence: Synthetic peptide
  Seed: EYATAGLTHI
  misc_feature (2)..(2): Xaa can be Tyr or Trp
  misc_feature (10)..(10): Xaa can be Phe, Ile, Leu, or Trp
EXATAGLTHX

SEQ ID NO: 48552 - protein, 10 aa, Artificial Sequence
  Description of Artificial Sequence: Synthetic peptide
  Seed: FDKATIMAAF
  misc_feature (2)..(2): Xaa can be Glu, Gln, Met, Leu, Ala, Arg, Asn, Asp, Cys, Gly, His, Ile, Lys, Phe, Pro, Ser, Thr, Trp, Tyr, or Val
  misc_feature (10)..(10): Xaa can be Leu, Met, Phe, Tyr, Trp, Ala, Ile, Val, His, Cys, Pro, Ser, or Thr
FXKATIMAAX

SEQ ID NO: 48553 - protein, 10 aa, Artificial Sequence
  Description of Artificial Sequence: Synthetic peptide
  Seed: FDKPTIMAAF
  misc_feature (2)..(2): Xaa can be Gln, Met, Lys, Ala, Arg, Glu, His, Leu, Ser, Val, Asn, Asp, Cys, Gly, Ile, Phe, Pro, Thr, Trp, or Tyr
  misc_feature (10)..(10): Xaa can be Phe, Tyr, Met, Leu, His, Trp, Ala, Ile, or Val
FXKPTIMAAX

SEQ ID NO: 48554 - protein, 10 aa, Artificial Sequence
  Description of Artificial Sequence: Synthetic peptide
  Seed: FDKSTIMAAF
  misc_feature (2)..(2): Xaa can be Gln, Met, Ala, Arg, Glu, His, Ile, Leu, Lys, Phe, Ser, Tyr, Val, Asn, Asp, Cys, Gly, Pro, Thr, or Trp
  misc_feature (10)..(10): Xaa can be Met, Phe, Tyr, Leu, His, Ile, Trp, Ala, or Val
FXKSTIMAAX

SEQ ID NO: 48555 - protein, 10 aa, Artificial Sequence
  Description of Artificial Sequence: Synthetic peptide
  Seed: FDKSTVMAAF
  misc_feature (2)..(2): Xaa can be Gln, Met, Glu, Leu, Ala, Arg, Asn, Asp, Cys, Gly, His, Ile, Lys, Phe, Pro, Ser, Thr, Trp, Tyr, or Val
  misc_feature (10)..(10): Xaa can be Leu, Met, Phe, Tyr, Trp, Ala, Ile, Val, or His
FXKSTVMAAX

SEQ ID NO: 48556 - protein, 10 aa, Artificial Sequence
  Description of Artificial Sequence: Synthetic peptide
  Seed: FDKTTIMAAF
  misc_feature (2)..(2): Xaa can be Gln, Met, Lys, Ala, Arg, Asn, Asp, Cys, Glu, Gly, His, Ile, Leu, Phe, Pro, Ser, Thr, Trp, Tyr, or Val
  misc_feature (10)..(10): Xaa can be Met, Phe, Tyr, Leu, Trp, His, Ile, or Val
FXKTTIMAAX

SEQ ID NO: 48557 - protein, 10 aa, Artificial Sequence
  Description of Artificial Sequence: Synthetic peptide
  Seed: FDMNNEGSYF
  misc_feature (2)..(2): Xaa can be Ala, Gln, Met, Lys, Leu, Ser, His, Thr, Val, Arg, Glu, Ile, Tyr, Asn, Asp, Cys, Gly, Phe, Pro, or Trp
  misc_feature (10)..(10): Xaa can be Met, Phe, Trp, Tyr, Leu, Ile, Val, His, Ala, Arg, Asn, Cys, Gln, Glu, Gly, Lys, Pro, Ser, Thr, or Asp
FXMNNEGSYX

SEQ ID NO: 48558 - protein, 10 aa, Artificial Sequence
  Description of Artificial Sequence: Synthetic peptide
  Seed: FDMSKEGSYF
  misc_feature (2)..(2): Xaa can be Gln, Met, Lys, Leu, Ala, Arg, Glu, His, Ile, Ser, Thr, Val, Asn, Asp, Cys, Gly, Phe, Pro, Trp, or Tyr
  misc_feature (10)..(10): Xaa can be Met, Phe, Trp, Tyr, Leu, His, Ile, Ala, Val, Arg, Asn, Asp, Cys, Gln, Glu, Gly, Lys, Pro, Ser, or Thr
FXMSKEGSYX

SEQ ID NO: 48559 - protein, 10 aa, Artificial Sequence
  Description of Artificial Sequence: Synthetic peptide
  Seed: FDMSNEGSYF
  misc_feature (2)..(2): Xaa can be Ala, Gln, Leu, Lys, Met, Ser, Thr, Arg, Glu, His, Val, Ile, Asn, Asp, Cys, Gly, Phe, Pro, Trp, or Tyr
  misc_feature (10)..(10): Xaa can be Met, Phe, Trp, Tyr, Ile, Leu, His, Val, Ala, Cys, Arg, Asn, Asp, Gln, Glu, Gly, Lys, Pro, Ser, or Thr
FXMSNEGSYX

SEQ ID NO: 48560 - protein, 11 aa, Artificial Sequence
  Description of Artificial Sequence: Synthetic peptide
  Seed: FDMSNEGSYFF
  misc_feature (2)..(2): Xaa can be Ser, Thr, Ala, Arg, Asn, Asp, Cys, Gln, Glu, Gly, His, Ile, Leu, Lys, Met, Phe, Pro, Trp, Tyr, or Val
  misc_feature (11)..(11): Xaa can be Phe, Trp, Tyr, Ile, Leu, or Met
FXMSNEGSYFX

SEQ ID NO: 48561 - protein, 10 aa, Artificial Sequence
  Description of Artificial Sequence: Synthetic peptide
  Seed: FDRPTIMAAF
  misc_feature (2)..(2): Xaa can be Ala, Arg, Asn, Asp, Cys, Gln, Glu, Gly, His, Ile, Leu, Lys, Met, Phe, Pro, Ser, Thr, Trp, Tyr, or Val
  misc_feature (10)..(10): Xaa can be Leu, Met, Phe, or Tyr
FXRPTIMAAX

SEQ ID NO: 48562 - protein, 10 aa, Artificial Sequence
  Description of Artificial Sequence: Synthetic peptide
  Seed: FDRSTIMAAF
  misc_feature (2)..(2): Xaa can be Glu, Gln, Met, Leu, Arg, His, Lys, Ala, Asn, Asp, Cys, Gly, Ile, Phe, Pro, Ser, Thr, Trp, Tyr, or Val
  misc_feature (10)..(10): Xaa can be Arg, Ile, Leu, Lys, Met, Phe, Tyr, Val, Trp, His, Ala, Gly, Asn, Asp, Cys, Gln, Glu, Pro, Ser, or Thr
FXRSTIMAAX

SEQ ID NO: 48563 - protein, 10 aa, Artificial Sequence
  Description of Artificial Sequence: Synthetic peptide
  Seed: FDRTTIMAAF
  misc_feature (2)..(2): Xaa can be Glu, Gln, Met, Arg, Leu, Ala, Asn, Asp, Cys, Gly, His, Ile, Lys, Phe, Pro, Ser, Thr, Trp, Tyr, or Val
  misc_feature (10)..(10): Xaa can be Arg, Ile, Leu, Lys, Met, Phe, Tyr, Val, Trp, His, Ala, Asn, Asp, Cys, Gln, Glu, Gly, Pro, Ser, or Thr
FXRTTIMAAX

SEQ ID NO: 48564 - protein, 10 aa, Artificial Sequence
  Description of Artificial Sequence: Synthetic peptide
  Seed: FDRTTVMAAF
  misc_feature (2)..(2): Xaa can be Gln, Arg, Met, Lys, Ala, Asn, Asp, Cys, Glu, Gly, His, Ile, Leu, Phe, Pro, Ser, Thr, Trp, Tyr, or Val
  misc_feature (10)..(10): Xaa can be Arg, Ile, Leu, Lys, Met, Phe, Tyr, Trp, Val, His, or Ala
FXRTTVMAAX

SEQ ID NO: 48565 - protein, 8 aa, Artificial Sequence
  Description of Artificial Sequence: Synthetic peptide
  Seed: FEDLIFLA
  misc_feature (2)..(2): Xaa can be Glu
  misc_feature (8)..(8): Xaa can be Ala, Ile, or Val
FXDLIFLX

SEQ ID NO: 48566 - protein, 11 aa, Artificial Sequence
  Description of Artificial Sequence: Synthetic peptide
  Seed: FEDLIFLARSA
  misc_feature (2)..(2): Xaa can be Met, Ala, Arg, Asn, Asp, Cys, Gln, Glu, Gly, His, Ile, Leu, Lys, Phe, Pro, Ser, Thr, Trp, Tyr, or Val
  misc_feature (11)..(11): Xaa can be Ala, Ile, Val, or Leu
FXDLIFLARSX

SEQ ID NO: 48567 - protein, 9 aa, Artificial Sequence
  Description of Artificial Sequence: Synthetic peptide
  Seed: FEDLRISGF
  misc_feature (2)..(2): Xaa can be Glu
  misc_feature (9)..(9): Xaa can be Ile, Leu, Met, Phe, Tyr, or Val
FXDLRISGX

SEQ ID NO: 48568 - protein, 10 aa, Artificial Sequence
  Description of Artificial Sequence: Synthetic peptide
  Seed: FEDLRISGFI
  misc_feature (2)..(2): Xaa can be Glu
  misc_feature (10)..(10): Xaa can be Ile, Leu, Met, or Phe
FXDLRISGFX

SEQ ID NO: 48569 - protein, 9 aa, Artificial Sequence
  Description of Artificial Sequence: Synthetic peptide
  Seed: FEDLRLFSF
  misc_feature (2)..(2): Xaa can be Glu, Asp, Gln, Lys, Met, Ala, Arg, His, Leu, Ser, or Pro
  misc_feature (9)..(9): Xaa can be Phe, Tyr, Met, Leu, Ile, Ala, His, Thr, Trp, or Val
FXDLRLFSX

SEQ ID NO: 48570 - protein, 10 aa, Artificial Sequence
  Description of Artificial Sequence: Synthetic peptide
  Seed: FEDLRLFSFI
  misc_feature (2)..(2): Xaa can be Glu
  misc_feature (10)..(10): Xaa can be Ala, Ile, Leu, Met, Phe, Pro, or Val
FXDLRLFSFX

SEQ ID NO: 48571 - protein, 9 aa, Artificial Sequence
  Description of Artificial Sequence: Synthetic peptide
  Seed: FEDLRLLSF
  misc_feature (2)..(2): Xaa can be Gln, Glu, Lys, Met, Ala, Arg, His, Ser, Leu, Thr, Val, Asp, Gly, or Ile
  misc_feature (9)..(9): Xaa can be Tyr, Phe, Met, Leu, Ile, His, Trp, Ala, or Val
FXDLRLLSX

SEQ ID NO: 48572 - protein, 10 aa, Artificial Sequence
  Description of Artificial Sequence: Synthetic peptide
  Seed: FEDLRLLSFI
  misc_feature (2)..(2): Xaa can be Glu
  misc_feature (10)..(10): Xaa can be Ile, Leu, Met, Phe, or Val
FXDLRLLSFX

SEQ ID NO: 48573 - protein, 9 aa, Artificial Sequence
  Description of Artificial Sequence: Synthetic peptide
  Seed: FEDLRLSSF
  misc_feature (2)..(2): Xaa can be Gln, Glu, Met, Lys, Ala, Arg, His, Asp, Ile, Leu, Ser, Thr, Val, or Gly
  misc_feature (9)..(9): Xaa can be Tyr, Phe, Met, Leu, Ile, Trp, His, Ala, or Val
FXDLRLSSX

SEQ ID NO: 48574 - protein, 10 aa, Artificial Sequence
  Description of Artificial Sequence: Synthetic peptide
  Seed: FEDLRLSSFI
  misc_feature (2)..(2): Xaa can be Glu
  misc_feature (10)..(10): Xaa can be Ala, Ile, Leu, Met, Phe, Pro, or Val
FXDLRLSSFX

SEQ ID NO: 48575 - protein, 9 aa, Artificial Sequence
  Description of Artificial Sequence: Synthetic peptide
  Seed: FEDLRVLNF
  misc_feature (2)..(2): Xaa can be Glu
  misc_feature (9)..(9): Xaa can be Ile, Leu, Met, Phe, Tyr, or Val
FXDLRVLNX

SEQ ID NO: 48576 - protein, 10 aa, Artificial Sequence
  Description of Artificial Sequence: Synthetic peptide
  Seed: FEDLRVLNFI
  misc_feature (2)..(2): Xaa can be Glu
  misc_feature (10)..(10): Xaa can be Ile, Leu, Met, Phe, or Val
FXDLRVLNFX

SEQ ID NO: 48577 - protein, 9 aa, Artificial Sequence
  Description of Artificial Sequence: Synthetic peptide
  Seed: FEDLRVLSF
  misc_feature (2)..(2): Xaa can be Glu, Gln, Met, Lys, Ala, Arg, His, Leu, Ser, Asn, Ile, Thr, Val, Asp, or Gly
  misc_feature (9)..(9): Xaa can be Tyr, Phe, Met, Leu, His, Ile, Trp, Ala, or Val
FXDLRVLSX

SEQ ID NO: 48578 - protein, 10 aa, Artificial Sequence
  Description of Artificial Sequence: Synthetic peptide
  Seed: FEDLRVLSFI
  misc_feature (2)..(2): Xaa can be Glu
  misc_feature (10)..(10): Xaa can be Ile, Leu, Met, Phe, or Val
FXDLRVLSFX

SEQ ID NO: 48579 - protein, 9 aa, Artificial Sequence
  Description of Artificial Sequence: Synthetic peptide
  Seed: FEDLRVSGF
  misc_feature (2)..(2): Xaa can be Glu
  misc_feature (9)..(9): Xaa can be Ile, Leu, Met, Phe, Tyr, or Val
FXDLRVSGX

SEQ ID NO: 48580 - protein, 10 aa, Artificial Sequence
  Description of Artificial Sequence: Synthetic peptide
  Seed: FEDLRVSGFI
  misc_feature (2)..(2): Xaa can be Glu
  misc_feature (10)..(10): Xaa can be Ile, Leu, Met, or Phe
FXDLRVSGFX

SEQ ID NO: 48581 - protein, 9 aa, Artificial Sequence
  Description of Artificial Sequence: Synthetic peptide
  Seed: FEDLRVSNF
  misc_feature (2)..(2): Xaa can be Glu
  misc_feature (9)..(9): Xaa can be Ile, Leu, Met, Phe, Tyr, or Val
FXDLRVSNX

SEQ ID NO: 48582 - protein, 10 aa, Artificial Sequence
  Description of Artificial Sequence: Synthetic peptide
  Seed: FEDLRVSNFI
  misc_feature (2)..(2): Xaa can be Glu
  misc_feature (10)..(10): Xaa can be Ala, Ile, Leu, Met, Phe, Pro, or Val
FXDLRVSNFX

SEQ ID NO: 48583 - protein, 11 aa, Artificial Sequence
  Description of Artificial Sequence: Synthetic peptide
  Seed: FEDLRVSNFIR
  misc_feature (2)..(2): Xaa can be Phe, Tyr, Ala, Arg, Asn, Asp, Cys, Gln, Glu, Gly, His, Ile, Leu, Lys, Met, Pro, Ser, Thr, Trp, or Val
  misc_feature (11)..(11): Xaa can be Arg or Lys
FXDLRVSNFIX

SEQ ID NO: 48584 - protein, 9 aa, Artificial Sequence
  Description of Artificial Sequence: Synthetic peptide
  Seed: FEDLRVSSF
  misc_feature (2)..(2): Xaa can be Gln, Glu, Met, Lys, Ala, Arg, His, Leu, Ser, Asn, Ile, Thr, Val, Asp, Gly, or Phe
  misc_feature (9)..(9): Xaa can be Phe, Tyr, Met, Leu, Ile, Trp, His, Ala, or Val
FXDLRVSSX

SEQ ID NO: 48585 - protein, 10 aa, Artificial Sequence
  Description of Artificial Sequence: Synthetic peptide
  Seed: FEDLRVSSFI
  misc_feature (2)..(2): Xaa can be Glu
  misc_feature (10)..(10): Xaa can be Ala, Ile, Leu, Met, Phe, Pro, or Val
FXDLRVSSFX

SEQ ID NO: 48586 - protein, 11 aa, Artificial Sequence
  Description of Artificial Sequence: Synthetic peptide
  Seed: FEDLRVSSFIR
  misc_feature (2)..(2): Xaa can be Met, Phe, Ala, Arg, Asn, Asp, Cys, Gln, Glu, Gly, His, Ile, Leu, Lys, Pro, Ser, Thr, Trp, Tyr, or Val
  misc_feature (11)..(11): Xaa can be Arg or Lys
FXDLRVSSFIX

SEQ ID NO: 48587 - protein, 8 aa, Artificial Sequence
  Description of Artificial Sequence: Synthetic peptide
  Seed: FEDLTFLA
  misc_feature (2)..(2): Xaa can be Glu
  misc_feature (8)..(8): Xaa can be Ala, Ile, or Val
FXDLTFLX

SEQ ID NO: 48588 - protein, 11 aa, Artificial Sequence
  Description of Artificial Sequence: Synthetic peptide
  Seed: FEDLTFLARSA
  misc_feature (2)..(2): Xaa can be Glu
  misc_feature (11)..(11): Xaa can be Ala
FXDLTFLARSX

SEQ ID NO: 48589 - protein, 9 aa, Artificial Sequence
  Description of Artificial Sequence: Synthetic peptide
  Seed: FEERRNKYL
  misc_feature (2)..(2): Xaa can be Glu
  misc_feature (9)..(9): Xaa can be Ile, Leu, Met, or Phe
FXERRNKYX

SEQ ID NO: 48590 - protein, 9 aa, Artificial Sequence
  Description of Artificial Sequence: Synthetic peptide
  Seed: FEFSDERAA
  misc_feature (2)..(2): Xaa can be Glu
  misc_feature (9)..(9): Xaa can be Ala, Ile, Leu, Met, Phe, Pro, Thr, or Val
FXFSDERAX

SEQ ID NO: 48591 - protein, 8 aa, Artificial Sequence
  Description of Artificial Sequence: Synthetic peptide
  Seed: FEKATIMA
  misc_feature (2)..(2): Xaa can be Glu
  misc_feature (8)..(8): Xaa can be Ala
FXKATIMX

SEQ ID NO: 48592 - protein, 9 aa, Artificial Sequence
  Description of Artificial Sequence: Synthetic peptide
  Seed: FEKATIMAA
  misc_feature (2)..(2): Xaa can be Glu, Asp, Gln, or Pro
  misc_feature (9)..(9): Xaa can be Phe, Tyr, Leu, Met, Ile, Val, Ala, Cys, Gly, His, Pro, Ser, Thr, or Trp
FXKATIMAX

SEQ ID NO: 48593 - protein, 8 aa, Artificial Sequence
  Description of Artificial Sequence: Synthetic peptide
  Seed: FEKEGYSL
  misc_feature (2)..(2): Xaa can be Glu
  misc_feature (8)..(8): Xaa can be Ile, Leu, Met, Phe, Tyr, or Val
FXKEGYSX

SEQ ID NO: 48594 - protein, 9 aa, Artificial Sequence
  Description of Artificial Sequence: Synthetic peptide
  Seed: FEKEGYSLV
  misc_feature (2)..(2): Xaa can be Glu or Asp
  misc_feature (9)..(9): Xaa can be Leu, Ala, Ile, Met, Phe, Pro, Ser, Thr, or Val
FXKEGYSLX

SEQ ID NO: 48595 - protein, 8 aa, Artificial Sequence
  Description of Artificial Sequence: Synthetic peptide
  Seed: FEKSTVMA
  misc_feature (2)..(2): Xaa can be Glu
  misc_feature (8)..(8): Xaa can be Ala
FXKSTVMX

SEQ ID NO: 48596 - protein, 9 aa, Artificial Sequence
  Description of Artificial Sequence: Synthetic peptide
  Seed: FEKSTVMAA
  misc_feature (2)..(2): Xaa can be Glu, Asp, Gln, or Pro
  misc_feature (9)..(9): Xaa can be Phe, Tyr, Leu, Ile, Met, Ala, Cys, Gly, His, Pro, Ser, Thr, Trp, or Val
FXKSTVMAX

SEQ ID NO: 48597 - protein, 9 aa, Artificial Sequence
  Description of Artificial Sequence: Synthetic peptide
  Seed: FELSDEKAA
  misc_feature (2)..(2): Xaa can be Glu
  misc_feature (9)..(9): Xaa can be Ala, Ile, Pro, or Val
FXLSDEKAX

SEQ ID NO: 48598 - protein, 9 aa, Artificial Sequence
  Description of Artificial Sequence: Synthetic peptide
  Seed: FELSDERAA
  misc_feature (2)..(2): Xaa can be Glu
  misc_feature (9)..(9): Xaa can be Ala, Ile, Leu, Met, Phe, Pro, or Val
FXLSDERAX

SEQ ID NO: 48599 - protein, 8 aa, Artificial Sequence
  Description of Artificial Sequence: Synthetic peptide
  Seed: FERATIMA
  misc_feature (2)..(2): Xaa can be Glu
  misc_feature (8)..(8): Xaa can be Ala
FXRATIMX

SEQ ID NO: 48600 - protein, 9 aa, Artificial Sequence
  Description of Artificial Sequence: Synthetic peptide
  Seed: FERATIMAA
  misc_feature (2)..(2): Xaa can be Gln, Glu, Met, Lys, Ala, His, Leu, Ser, Arg, Asn, Ile, Thr, Val, Asp, Gly, Phe, Tyr, Cys, Pro, or Trp
  misc_feature (9)..(9): Xaa can be Met, Phe, Tyr, Leu, Ile, Trp, His, Val, Ala, Gly, Ser, Thr, Cys, Gln, Pro, Asn, or Glu
FXRATIMAX

SEQ ID NO: 48601 - protein, 10 aa, Artificial Sequence
  Description of Artificial Sequence: Synthetic peptide
  Seed: FERATIMAAF
  misc_feature (2)..(2): Xaa can be Glu, Gln, Met, His, Leu, Arg, Ile, Lys, Ala, Asn, Asp, Cys, Gly, Phe, Pro, Ser, Thr, Trp, Tyr, or Val
  misc_feature (10)..(10): Xaa can be Arg, Ile, Leu, Lys, Met, Phe, Tyr, Val, Trp, His, Ala, Gly, Asn, Asp, Cys, Gln, Glu, Pro, Ser, or Thr
FXRATIMAAX

SEQ ID NO: 48602 - protein, 11 aa, Artificial Sequence
  Description of Artificial Sequence: Synthetic peptide
  Seed: FERATIMAAFI
  misc_feature (2)..(2): Xaa can be Glu
  misc_feature (11)..(11): Xaa can be Ile, Leu, Met, or Phe
FXRATIMAAFX

SEQ ID NO: 48603 - protein, 8 aa, Artificial Sequence
  Description of Artificial Sequence: Synthetic peptide
  Seed: FERATVMA
  misc_feature (2)..(2): Xaa can be Glu
  misc_feature (8)..(8): Xaa can be Ala
FXRATVMX

SEQ ID NO: 48604 - protein, 9 aa, Artificial Sequence
  Description of Artificial Sequence: Synthetic peptide
  Seed: FERATVMAA
  misc_feature (2)..(2): Xaa can be Gln, Glu, Met, Lys, Ala, His, Leu, Ser, Arg, Asn, Ile, Thr, Val, Asp, Gly, Phe, Tyr, Cys, Pro, or Trp
  misc_feature (9)..(9): Xaa can be Met, Phe, Tyr, Leu, Trp, Ile, His, Val, Ala, Gly, Ser, Thr, Asn, Cys, Gln, Pro, or Glu
FXRATVMAX

SEQ ID NO: 48605 - protein, 10 aa, Artificial Sequence
  Description of Artificial Sequence: Synthetic peptide
  Seed: FERATVMAAF
  misc_feature (2)..(2): Xaa can be Glu, Gln, Met, His, Leu, Arg, Ile, Lys, Ala, Asn, Asp, Cys, Gly, Phe, Pro, Ser, Thr, Trp, Tyr, or Val
  misc_feature (10)..(10): Xaa can be Arg, Ile, Leu, Lys, Met, Phe, Tyr, Val, Trp, His, Ala, Gly, Asn, Asp, Cys, Gln, Glu, Pro, Ser, or Thr
FXRATVMAAX

SEQ ID NO: 48606 - protein, 11 aa, Artificial Sequence
  Description of Artificial Sequence: Synthetic peptide
  Seed: FERATVMAAFI
  misc_feature (2)..(2): Xaa can be Glu
  misc_feature (11)..(11): Xaa can be Ile, Leu, Met, or Phe
FXRATVMAAFX

SEQ ID NO: 48607 - protein, 8 aa, Artificial Sequence
  Description of Artificial Sequence: Synthetic peptide
  Seed: FEREGYSL
  misc_feature (2)..(2): Xaa can be Glu
  misc_feature (8)..(8): Xaa can be Ile, Leu, Met, Phe, Trp, Tyr, or Val
FXREGYSX

SEQ ID NO: 48608 - protein, 9 aa, Artificial Sequence
  Description of Artificial Sequence: Synthetic peptide
  Seed: FEREGYSLI
  misc_feature (2)..(2): Xaa can be Glu, Asp, or Gln
  misc_feature (9)..(9): Xaa can be Leu, Met, Phe, Ala, Cys, His, Ile, Pro, Ser, Thr, Trp, Tyr, or Val
FXREGYSLX

SEQ ID NO: 48609 - protein, 8 aa, Artificial Sequence
  Description of Artificial Sequence: Synthetic peptide
  Seed: FERSTIMA
  misc_feature (2)..(2): Xaa can be Glu
  misc_feature (8)..(8): Xaa can be Ala
FXRSTIMX

SEQ ID NO: 48610 - protein, 9 aa, Artificial Sequence
  Description of Artificial Sequence: Synthetic peptide
  Seed: FERSTIMAA
  misc_feature (2)..(2): Xaa can be Gln, Glu, Met, Lys, His, Ala, Leu, Ser, Arg, Ile, Val, Asn, Asp, Thr, Gly, Phe, Tyr, Cys, Pro, or Trp
  misc_feature (9)..(9): Xaa can be Met, Phe, Tyr, Leu, Trp, Ile, His, Val, Ala, Gly, Ser, Thr, Asn, Cys, Gln, Pro, or Glu
FXRSTIMAX

SEQ ID NO: 48611 - protein, 8 aa, Artificial Sequence
  Description of Artificial Sequence: Synthetic peptide
  Seed: FERTTIMA
  misc_feature (2)..(2): Xaa can be Glu
  misc_feature (8)..(8): Xaa can be Ala
FXRTTIMX

SEQ ID NO: 48612 - protein, 9 aa, Artificial Sequence
  Description of Artificial Sequence: Synthetic peptide
  Seed: FERTTIMAA
  misc_feature (2)..(2): Xaa can be Glu, Asp, Gln, or Pro
  misc_feature (9)..(9): Xaa can be Phe, Tyr, Leu, Met, Ile, Val, Ala, Cys, Gly, His, Pro, Ser, Thr, or Trp
FXRTTIMAX

SEQ ID NO: 48613 - protein, 8 aa, Artificial Sequence
  Description of Artificial Sequence: Synthetic peptide
  Seed: FERVTIMA
  misc_feature (2)..(2): Xaa can be Glu
  misc_feature (8)..(8): Xaa can be Ala
FXRVTIMX

SEQ ID NO: 48614 - protein, 9 aa, Artificial Sequence
  Description of Artificial Sequence: Synthetic peptide
  Seed: FERVTIMAA
  misc_feature (2)..(2): Xaa can be Glu, Asp, Gln, or Pro
  misc_feature (9)..(9): Xaa can be Phe, Tyr, Leu, Ile, Met, Val, Ala, Cys, Gly, His, Pro, Ser, Thr, or Trp
FXRVTIMAX

SEQ ID NO: 48615 - protein, 10 aa, Artificial Sequence
  Description of Artificial Sequence: Synthetic peptide
  Seed: FERVTIMAAF
  misc_feature (2)..(2): Xaa can be Gln, Glu, Met, Arg, Ala, Asn, Asp, Cys, Gly, His, Ile, Leu, Lys, Phe, Pro, Ser, Thr, Trp, Tyr, or Val
  misc_feature (10)..(10): Xaa can be Arg, Ile, Leu, Lys, Met, Phe, Tyr, Val, Trp, Ala, or His
FXRVTIMAAX

SEQ ID NO: 48616 - protein, 11 aa, Artificial Sequence
  Description of Artificial Sequence: Synthetic peptide
  Seed: FERVTIMAAFK
  misc_feature (2)..(2): Xaa can be Ala, Arg, Asn, Asp, Cys, Gln, Glu, Gly, His, Ile, Leu, Lys, Met, Phe, Pro, Ser, Thr, Trp, Tyr, or Val
  misc_feature (11)..(11): Xaa can be Arg or Lys
FXRVTIMAAFX

SEQ ID NO: 48617 - protein, 9 aa, Artificial Sequence
  Description of Artificial Sequence: Synthetic peptide
  Seed: FFGDNAEDY
  misc_feature (2)..(2): Xaa can be Phe, Tyr, Trp, Ile, Leu, Met, Thr, or Val
  misc_feature (9)..(9): Xaa can be Tyr, Met, Phe, or Leu
FXGDNAEDX

SEQ ID NO: 48618 - protein, 9 aa, Artificial Sequence
  Description of Artificial Sequence: Synthetic peptide
  Seed: FFGDNAEEF
  misc_feature (2)..(2): Xaa can be Pro, Phe, Tyr, Ala, Trp, Met, Ile, Leu, Ser, Thr, Val, Cys, Gln, or Gly
  misc_feature (9)..(9): Xaa can be Tyr, Met, Phe, Leu, Trp, Ile, Val, His, Ala, or Gln
FXGDNAEEX

SEQ ID NO: 48619 - protein, 9 aa, Artificial Sequence
  Description of Artificial Sequence: Synthetic peptide
  Seed: FFGDSAEEY
  misc_feature (2)..(2): Xaa can be Pro, Tyr, Ala, Phe, Trp, Ile, Leu, Met, Ser, Thr, Val, Cys, Gln, or Gly
  misc_feature (9)..(9): Xaa can be Tyr, Met, Phe, Leu, His, Trp, Ile, Val, Ala, or Gln
FXGDSAEEX

SEQ ID NO: 48620 - protein, 10 aa, Artificial Sequence
  Description of Artificial Sequence: Synthetic peptide
  Seed: FIKGTKVLPR
  misc_feature (2)..(2): Xaa can be Thr, Val, Ile, Ala, Leu, Met, Phe, Ser, Trp, Tyr, Asn, Gln, Gly, or Pro
  misc_feature (10)..(10): Xaa can be Arg, Lys, Tyr, or Met
FXKGTKVLPX

SEQ ID NO: 48621 - protein, 10 aa, Artificial Sequence
  Description of Artificial Sequence: Synthetic peptide
  Seed: FIKGTKVVPR
  misc_feature (2)..(2): Xaa can be Ile, Thr, Val, Ala, Leu, Met, Phe, Ser, Trp, Tyr, Asn, Cys, Gln, Gly, or Pro
  misc_feature (10)..(10): Xaa can be Arg, Lys, Met, or Tyr
FXKGTKVVPX

SEQ ID NO: 48622 - protein, 10 aa, Artificial Sequence
  Description of Artificial Sequence: Synthetic peptide
  Seed: FIRGAKVVPR
  misc_feature (2)..(2): Xaa can be Thr, Val, Ile, Ala, Gln, Leu, Met, Phe, Ser, Trp, Tyr, Asn, Gly, or Pro
  misc_feature (10)..(10): Xaa can be Arg, Lys, Tyr, or Met
FXRGAKVVPX

SEQ ID NO: 48623 - protein, 8 aa, Artificial Sequence
  Description of Artificial Sequence: Synthetic peptide
  Seed: FIRGARVL
  misc_feature (2)..(2): Xaa can be Pro, Ile, or Val
  misc_feature (8)..(8): Xaa can be Leu, Ala, Glu, Ile, Met, Phe, Pro, Ser, Thr, Tyr, or Val
FXRGARVX

SEQ ID NO: 48624 - protein, 10 aa, Artificial Sequence
  Description of Artificial Sequence: Synthetic peptide
  Seed: FIRGARVLPR
  misc_feature (2)..(2): Xaa can be Arg, Ala, Asn, Asp, Cys, Gln, Glu, Gly, His, Ile, Leu, Lys, Met, Phe, Pro, Ser, Thr, Trp, Tyr, or Val
  misc_feature (10)..(10): Xaa can be Arg, Leu, Lys, Met, Phe, Tyr, Ile, Trp, or Val
FXRGARVLPX

SEQ ID NO: 48625 - protein, 10 aa, Artificial Sequence
  Description of Artificial Sequence: Synthetic peptide
  Seed: FIRGARVVPR
  misc_feature (2)..(2): Xaa can be Val, Ile, Thr, Ala, Gln, Leu, Met, Phe, Ser, Trp, Tyr, Asn, Cys, Gly, or Pro
  misc_feature (10)..(10): Xaa can be Arg, Lys, Met, Tyr, or Phe
FXRGARVVPX

SEQ ID NO: 48626 - protein, 8 aa, Artificial Sequence
  Description of Artificial Sequence: Synthetic peptide
  Seed: FIRGKKVI
  misc_feature (2)..(2): Xaa can be Leu, Met, Ile, Pro, Val, Ala, Gln, Phe, Asn, Gly, Ser, or Thr
  misc_feature (8)..(8): Xaa can be Leu, Met, Ile, Phe, Val, or Ala
FXRGKKVX

SEQ ID NO: 48627 - protein, 10 aa, Artificial Sequence
  Description of Artificial Sequence: Synthetic peptide
  Seed: FIRGKKVIPR
  misc_feature (2)..(2): Xaa can be Met, Phe, Thr, Trp, Tyr, Ala, Asn, Gln, Gly, Ile, Leu, Ser, or Val
  misc_feature (10)..(10): Xaa can be Arg or Lys
FXRGKKVIPX

SEQ ID NO: 48628 - protein, 10 aa, Artificial Sequence
  Description of Artificial Sequence: Synthetic peptide
  Seed: FIRGKKVVPR
  misc_feature (2)..(2): Xaa can be Met, Phe, Ser, Thr, Trp, Tyr, Val, Ala, Asn, Gln, Gly, Ile, or Leu
  misc_feature (10)..(10): Xaa can be Arg or Lys
FXRGKKVVPX

SEQ ID NO: 48629 - protein, 8 aa, Artificial Sequence
  Description of Artificial Sequence: Synthetic peptide
  Seed: FIRGKRVV
  misc_feature (2)..(2): Xaa can be Met, Leu, Pro, Ala, Ile, Val, Gln, Phe, Asn, Gly, Ser, Thr, Arg, Lys, or Trp
  misc_feature (8)..(8): Xaa can be Leu, Met, Ile, Val, Phe, Ala, or Cys
FXRGKRVX

SEQ ID NO: 48630 - protein, 10 aa, Artificial Sequence
  Description of Artificial Sequence: Synthetic peptide
  Seed: FIRGKRVVPR
  misc_feature (2)..(2): Xaa can be Ala, Ile, Leu, Met, Phe, Ser, Thr, Trp, Tyr, Val, Asn, Gln, Gly, or Pro
  misc_feature (10)..(10): Xaa can be Arg or Lys
FXRGKRVVPX

SEQ ID NO: 48631 - protein, 10 aa, Artificial Sequence
  Description of Artificial Sequence: Synthetic peptide
  Seed: FIRGTKVCPR
  misc_feature (2)..(2): Xaa can be Thr, Val, Ile, Ala, Gln, Leu, Met, Phe, Ser, Trp, Tyr, Asn, or Gly
  misc_feature (10)..(10): Xaa can be Arg, Lys, Tyr, or Met
FXRGTKVCPX

SEQ ID NO: 48632 - protein, 10 aa, Artificial Sequence
  Description of Artificial Sequence: Synthetic peptide
  Seed: FIRGTKVFPR
  misc_feature (2)..(2): Xaa can be Arg, Ala, Asn, Asp, Cys, Gln, Glu, Gly, His, Ile, Leu, Lys, Met, Phe, Pro, Ser, Thr, Trp, Tyr, or Val
  misc_feature (10)..(10): Xaa can be Arg, Leu, Lys, Met, Phe, Tyr, Ala, His, Ile, Trp, or Val
FXRGTKVFPX

SEQ ID NO: 48633 - protein, 10 aa, Artificial Sequence
  Description of Artificial Sequence: Synthetic peptide
  Seed: FIRGTKVIPR
  misc_feature (2)..(2): Xaa can be Thr, Val, Ala, Ile, Leu, Met, Phe, Ser, Trp, Tyr, Asn, Gln, Gly, or Pro
  misc_feature (10)..(10): Xaa can be Arg, Lys, Met, or Tyr
FXRGTKVIPX

SEQ ID NO: 48634 - protein, 10 aa, Artificial Sequence
  Description of Artificial Sequence: Synthetic peptide
  Seed: FIRGTKVSPR
  misc_feature (2)..(2): Xaa can be Ile, Thr, Val, Ala, Met, Ser, Leu, Phe, Trp, Tyr, Asn, Gln, or Gly
  misc_feature (10)..(10): Xaa can be Arg, Lys, Tyr, Met, or Phe
FXRGTKVSPX

SEQ ID NO: 48635 - protein, 10 aa, Artificial Sequence
  Description of Artificial Sequence: Synthetic peptide
  Seed: FIRGTKVVPR
  misc_feature (2)..(2): Xaa can be Thr, Val, Ile, Ala, Leu, Met, Phe, Ser, Trp, Tyr, Asn, Gln, Gly, or Pro
  misc_feature (10)..(10): Xaa can be Arg, Lys, Tyr, or Met
FXRGTKVVPX

SEQ ID NO: 48636 - protein, 10 aa, Artificial Sequence
  Description of Artificial Sequence: Synthetic peptide
  Seed: FIRGTRIVPR
  misc_feature (2)..(2): Xaa can be Thr, Val, Ile, Ala, Gln, Leu, Met, Phe, Ser, Trp, Tyr, Asn, Cys, Gly, or Pro
  misc_feature (10)..(10): Xaa can be Arg, Lys, Tyr, Met, or Phe
FXRGTRIVPX

SEQ ID NO: 48637 - protein, 10 aa, Artificial Sequence
  Description of Artificial Sequence: Synthetic peptide
  Seed: FIRGTRLVPR
  misc_feature (2)..(2): Xaa can be Thr, Val, Ile, Ala, Gln, Gly, Leu, Met, Phe, Ser, Trp, Tyr, Asn, Cys, His, or Pro
  misc_feature (10)..(10): Xaa can be Arg, Lys, Tyr, Met, or Phe
FXRGTRLVPX

SEQ ID NO: 48638 - protein, 10 aa, Artificial Sequence
  Description of Artificial Sequence: Synthetic peptide
  Seed: FIRGTRMVPR
  misc_feature (2)..(2): Xaa can be Val, Thr, Ile, Ala, Ser, Gln, Gly, Leu, Met, Phe, Trp, Tyr, Asn, Cys, His, or Pro
  misc_feature (10)..(10): Xaa can be Arg, Lys, Tyr, Met, Phe, Leu, or Val
FXRGTRMVPX

SEQ ID NO: 48639 - protein, 10 aa, Artificial Sequence
  Description of Artificial Sequence: Synthetic peptide
  Seed: FIRGTRVAPR
  misc_feature (2)..(2): Xaa can be Val, Ile, Thr, Ala, Leu, Met, Ser, Gln, Phe, Trp, Tyr, Asn, Cys, Gly, or Pro
  misc_feature (10)..(10): Xaa can be Arg, Lys, Tyr, Met, Phe, Leu, or Val
FXRGTRVAPX

SEQ ID NO: 48640 - protein, 10 aa, Artificial Sequence
  Description of Artificial Sequence: Synthetic peptide
  Seed: FIRGTRVIPR
  misc_feature (2)..(2): Xaa can be Thr, Val, Ile, Ala, Gln, Leu, Met, Phe, Ser, Trp, Tyr, Asn, Gly, or Pro
  misc_feature (10)..(10): Xaa can be Arg, Lys, Tyr, or Met
FXRGTRVIPX

SEQ ID NO: 48641 - protein, 8 aa, Artificial Sequence
  Description of Artificial Sequence: Synthetic peptide
  Seed: FIRGTRVL
  misc_feature (2)..(2): Xaa can be Pro, Ile, or Val
  misc_feature (8)..(8): Xaa can be Leu, Ala, Cys, Glu, Ile, Met, Phe, Pro, Ser, Thr, Trp, Tyr, or Val
FXRGTRVX

SEQ ID NO: 48642 - protein, 10 aa, Artificial Sequence
  Description of Artificial Sequence: Synthetic peptide
  Seed: FIRGTRVLPR
  misc_feature (2)..(2): Xaa can be Val, Ile, Thr, Ala, Gln, Leu, Met, Phe, Ser, Trp, Tyr, Asn, Gly, or Pro
  misc_feature (10)..(10): Xaa can be Arg, Lys, Met, Tyr, or Phe
FXRGTRVLPX

SEQ ID NO: 48643 - protein, 10 aa, Artificial Sequence
  Description of Artificial Sequence: Synthetic peptide
  Seed: FIRGTRVVPR
  misc_feature (2)..(2): Xaa can be Val, Ile, Thr, Ala, Gln, Leu, Met, Phe, Ser, Trp, Tyr, Asn, Gly, or Pro
  misc_feature (10)..(10): Xaa can be Arg, Lys, Met, Tyr, or Phe
FXRGTRVVPX

SEQ ID NO: 48644 - protein, 10 aa, Artificial Sequence
  Description of Artificial Sequence: Synthetic peptide
  Seed: FKLLQNSHVY
  misc_feature (2)..(2): Xaa can be Pro, Gln, Ala, Lys, Met, Ser, Thr, Val, Arg, Asn, Asp, Cys, Glu, Gly, His, Ile, Leu, Phe, Trp, or Tyr
  misc_feature (10)..(10): Xaa can be Met, Phe, Tyr, Leu, Trp, Ile, Val, His, Ala, Gln, or Ser
FXLLQNSHVX

SEQ ID NO: 48645 - protein, 9 aa, Artificial Sequence
  Description of Artificial Sequence: Synthetic peptide
  Seed: FKLLQNSQI
  misc_feature (2)..(2): Xaa can be Arg, His, Tyr, Lys, Gln, or Pro
  misc_feature (9)..(9): Xaa can be Leu, Ile, Met, Phe, Val, Ala, Arg, Lys, or Tyr
FXLLQNSQX

SEQ ID NO: 48646 - protein, 10 aa, Artificial Sequence
  Description of Artificial Sequence: Synthetic peptide
  Seed: FKLLQNSQIF
  misc_feature (2)..(2): Xaa can be Arg, Gln, Met, Lys, Ala, Asn, Asp, Cys, Glu, Gly, His, Ile, Leu, Phe, Pro, Ser, Thr, Trp, Tyr, or Val
  misc_feature (10)..(10): Xaa can be Met, Phe, Tyr, Leu, Ile, Trp, Arg, Lys, Val, or His
FXLLQNSQIX

SEQ ID NO: 48647 - protein, 10 aa, Artificial Sequence
  Description of Artificial Sequence: Synthetic peptide
  Seed: FKLLQNSQVF
  misc_feature (2)..(2): Xaa can be Arg, Gln, Ala, Asn, Asp, Cys, Glu, Met, Gly, Lys, His, Ser, Thr, Tyr, Val, Ile, Leu, Phe, Pro, or Trp
  misc_feature (10)..(10): Xaa can be Met, Phe, Tyr, Leu, Ile, Ala, Val, Trp, His, Arg, or Lys
FXLLQNSQVX

SEQ ID NO: 48648 - protein, 10 aa, Artificial Sequence
  Description of Artificial Sequence: Synthetic peptide
  Seed: FKLLQTSQVY
  misc_feature (2)..(2): Xaa can be Pro, Gln, Ala, Met, Lys, Arg, Asn, Asp, Cys, Glu, Gly, His, Ile, Leu, Phe, Ser, Thr, Trp, Tyr, or Val
  misc_feature (10)..(10): Xaa can be Leu, Met, Phe, Tyr, Ile, Trp, Val, His, Ala, Ser, or Thr
FXLLQTSQVX

SEQ ID NO: 48649 - protein, 10 aa, Artificial Sequence
  Description of Artificial Sequence: Synthetic peptide
  Seed: FKLSDYEGRL
  misc_feature (2)..(2): Xaa can be Leu, Met, Ala, Arg, Asn, Asp, Cys, Gln, Glu, Gly, His, Ile, Lys, Phe, Pro, Ser, Thr, Trp, Tyr, or Val
  misc_feature (10)..(10): Xaa can be Ala, Ile, Leu, Met, Val, or Thr
FXLSDYEGRX

SEQ ID NO: 48650 - protein, 8 aa, Artificial Sequence
  Description of Artificial Sequence: Synthetic peptide
  Seed: FLARSALI
  misc_feature (2)..(2): Xaa can be Leu, Met, Ile, Ser, or Val
  misc_feature (8)..(8): Xaa can be Val, Ile, Ala, Leu, or Met
FXARSALX

SEQ ID NO: 48651 - protein, 9 aa, Artificial Sequence
  Description of Artificial Sequence: Synthetic peptide
  Seed: FLARSALIL
  misc_feature (2)..(2): Xaa can be Gln, Ala, Met, Pro, Leu, Lys, Ser, Val, His, Ile, Thr, Arg, Glu, Gly, Asn, Cys, Phe, Tyr, or Trp
  misc_feature (9)..(9): Xaa can be Phe, Tyr, Met, Leu, Ile, Trp, Val, His, Ala, Ser, Thr, Cys, Gly, Gln, or Asn
FXARSALIX

SEQ ID NO: 48652 - protein, 10 aa, Artificial Sequence
  Description of Artificial Sequence: Synthetic peptide
  Seed: FLARSALILR
  misc_feature (2)..(2): Xaa can be Leu, Met, Ile, Val, Gln, Thr, Ala, Ser, Phe, Arg, Asn, Asp, Cys, Glu, Gly, His, Lys, Pro, Trp, or Tyr
  misc_feature (10)..(10): Xaa can be Arg, Lys, Val, Leu, Ala, Ile, Met, Thr, Tyr, Asn, Asp, Cys, Gln, Glu, Gly, His, Phe, Pro, Ser, or Trp
FXARSALILX

SEQ ID NO: 48653 - protein, 9 aa, Artificial Sequence
  Description of Artificial Sequence: Synthetic peptide
  Seed: FLARSALVL
  misc_feature (2)..(2): Xaa can be Ala, Gln, Tyr, Pro, Met, His, Leu, Arg, Ser, Lys, Phe, Ile, Thr, Val, Glu, Trp, Gly, Asn, Cys, or Asp
  misc_feature (9)..(9): Xaa can be Phe, Tyr, Leu, Met, Ile, Trp, Val, His, Ala, Thr, Cys, Ser, Gly, Gln, Lys, Pro, Glu, or As n
FXARSALVX

SEQ ID NO: 48654 - protein, 10 aa, Artificial Sequence
  Description of Artificial Sequence: Synthetic peptide
  Seed: FLARSALVLR
  misc_feature (2)..(2): Xaa can be Leu, Met, Ile, Val, Gln, Thr, Ala, Ser, Phe, Arg, Asn, Asp, Cys, Glu, Gly, His, Lys, Pro, Trp, or Tyr
  misc_feature (10)..(10): Xaa can be Arg, Lys, Val, Leu, Ala, Ile, Tyr, Met, Thr, Asn, Asp, Cys, Gln, Glu, Gly, His, Phe, Pro, Ser, or Trp
FXARSALVLX

SEQ ID NO: 48655 - protein, 8 aa, Artificial Sequence
  Description of Artificial Sequence: Synthetic peptide
  Seed: FLTRSALI
  misc_feature (2)..(2): Xaa can be Leu or Met
  misc_feature (8)..(8): Xaa can be Ala, Ile, Leu, or Val
FXTRSALX

SEQ ID NO: 48656 - protein, 9 aa, Artificial Sequence
  Description of Artificial Sequence: Synthetic peptide
  Seed: FLTRSALIL
  misc_feature (2)..(2): Xaa can be Gln, Met, Ala, Ser, Leu, Lys, Thr, Val, Ile, His, Arg, Cys, Glu, Gly, Pro, Asn, Phe, Tyr, or Trp
  misc_feature (9)..(9): Xaa can be Phe, Met, Tyr, Leu, Ile, Val, Trp, His, Ala, Gly, or Thr
FXTRSALIX

SEQ ID NO: 48657 - protein, 10 aa, Artificial Sequence
  Description of Artificial Sequence: Synthetic peptide
  Seed: FLTRSALILR
  misc_feature (2)..(2): Xaa can be Ile, Met, Thr, Val, Ala, Arg, Asn, Asp, Cys, Gln, Glu, Gly, His, Leu, Lys, Phe, Pro, Ser, Trp, or Tyr
  misc_feature (10)..(10): Xaa can be Arg, Lys, or Tyr
FXTRSALILX

SEQ ID NO: 48658 - protein, 8 aa, Artificial Sequence
  Description of Artificial Sequence: Synthetic peptide
  Seed: FPRGKLST
  misc_feature (2)..(2): Xaa can be Pro, Ile, or Val
  misc_feature (8)..(8): Xaa can be Leu, Ala, Ile, Met, Phe, Pro, Ser, Thr, or Val
FXRGKLSX

SEQ ID NO: 48659 - protein, 9 aa, Artificial Sequence
  Description of Artificial Sequence: Synthetic peptide
  Seed: FPRGKLSTR
  misc_feature (2)..(2): Xaa can be Phe, Thr, Ala, Asn, Gln, Gly, Ile, Leu, Met, Pro, Ser, Trp, Tyr, or Val
  misc_feature (9)..(9): Xaa can be Arg or Lys
FXRGKLSTX

SEQ ID NO: 48660 - protein, 10 aa, Artificial Sequence
  Description of Artificial Sequence: Synthetic peptide
  Seed: FPRGKLSTRG
  misc_feature (2)..(2): Xaa can be Pro, Ala, Ile, or Val
  misc_feature (10)..(10): Xaa can be Leu, Ala, Cys, Gly, Ile, Met, Phe, Ser, Thr, Tyr, or Val
FXRGKLSTRX

SEQ ID NO: 48661 - protein, 11 aa, Artificial Sequence
  Description of Artificial Sequence: Synthetic peptide
  Seed: FPRGKLSTRGV
  misc_feature (2)..(2): Xaa can be Pro
  misc_feature (11)..(11): Xaa can be Ala, Ile, Leu, Met, Phe, or Val
FXRGKLSTRGX

SEQ ID NO: 48662 - protein, 9 aa, Artificial Sequence
  Description of Artificial Sequence: Synthetic peptide
  Seed: FQGRGVFEF
  misc_feature (2)..(2): Xaa can be Gln, Met, Leu, Ala, Arg, Ile, Val, Thr, Phe, Ser, Trp, Tyr, Glu, His, Lys, Pro, or Gly
  misc_feature (9)..(9): Xaa can be Tyr, Met, Phe, Leu, Val, Ile, Ala, Trp, Thr, Ser, Cys, His, or Gly
FXGRGVFEX

SEQ ID NO: 48663 - protein, 9 aa, Artificial Sequence
  Description of Artificial Sequence: Synthetic peptide
  Seed: FQIASNENM
  misc_feature (2)..(2): Xaa can be Met, Leu, Gln, Ala, Val, Ile, Ser, Thr, His, Lys, Phe, Arg, Gly, Cys, Glu, Pro, Asn, or Ty r
  misc_feature (9)..(9): Xaa can be Phe, Tyr, Met, Leu, Ile, Val, Ala, Trp, Thr, His, Cys, Gly, Ser, or Pro
FXIASNENX

SEQ ID NO: 48664 - protein, 11 aa, Artificial Sequence
  Description of Artificial Sequence: Synthetic peptide
  Seed: FQIASNENMEA
  misc_feature (2)..(2): Xaa can be Gln, Leu, Met, Ile, Thr, Val, Ala, or Ser
  misc_feature (11)..(11): Xaa can be Val, Ile, Leu, Ala, or Met
FXIASNENMEX

SEQ ID NO: 48665 - protein, 9 aa, Artificial Sequence
  Description of Artificial Sequence: Synthetic peptide
  Seed: FQTAAQKAM
  misc_feature (2)..(2): Xaa can be Tyr, Ala, Gln, Phe, His, Met, Ser, Thr, Trp, Val, Ile, Leu, Lys, Arg, Cys, Gly, Pro, Glu, or Asn
  misc_feature (9)..(9): Xaa can be Phe, Tyr, Met, Leu, Ile, Val, Trp, His, Ala, Cys, or Thr
FXTAAQKAX

SEQ ID NO: 48666 - protein, 10 aa, Artificial Sequence
  Description of Artificial Sequence: Synthetic peptide
  Seed: FQTAAQKAMM
  misc_feature (2)..(2): Xaa can be Gln, Leu, Met, Ile, Val, Ala, Thr, Lys, Ser, Arg, His, or Glu
  misc_feature (10)..(10): Xaa can be Tyr, Phe, Leu, Val, Ile, Met, Ala, or Trp
FXTAAQKAMX

SEQ ID NO: 48667 - protein, 9 aa, Artificial Sequence
  Description of Artificial Sequence: Synthetic peptide
  Seed: FQTAAQRAI
  misc_feature (2)..(2): Xaa can be Ala, Gln, Met, Leu, Ser, Thr, His, Ile, Lys, Val, Arg, Gly, Asn, Cys, Glu, Phe, Pro, Tyr, or Trp
  misc_feature (9)..(9): Xaa can be Phe, Leu, Met, Tyr, Ile, Val, Ala, Trp, His, Thr, Cys, or Gly
FXTAAQRAX

SEQ ID NO: 48668 - protein, 10 aa, Artificial Sequence
  Description of Artificial Sequence: Synthetic peptide
  Seed: FQTAAQRAIM
  misc_feature (2)..(2): Xaa can be Gln, Met, Leu, Ala, Ile, Ser, Thr, Val, Lys, Glu, His, Arg, Asn, Asp, Cys, Gly, Phe, Pro, Trp, or Tyr
  misc_feature (10)..(10): Xaa can be Phe, Tyr, Met, Leu, Val, Ile, Trp, His, or Ala
FXTAAQRAIX

SEQ ID NO: 48669 - protein, 10 aa, Artificial Sequence
  Description of Artificial Sequence: Synthetic peptide
  Seed: FQTAAQRAMM
  misc_feature (2)..(2): Xaa can be Gln, Leu, Met, Ala, Arg, Glu, His, Lys, Ser, Val, Asn, Asp, Cys, Gly, Ile, Phe, Pro, Thr, Trp, or Tyr
  misc_feature (10)..(10): Xaa can be Ala, Ile, Leu, Met, Val, Tyr, Phe, Thr, His, or Trp
FXTAAQRAMX

SEQ ID NO: 48670 - protein, 9 aa, Artificial Sequence
  Description of Artificial Sequence: Synthetic peptide
  Seed: FQTASQRAM
  misc_feature (2)..(2): Xaa can be Pro, Tyr, Ala, Phe, Gln, His, Met, Ser, Thr, Lys, Val, Ile, Leu, Trp, Arg, Gly, Asn, Cys, or Glu
  misc_feature (9)..(9): Xaa can be Leu, Met, Phe, Tyr, Ile, Val, Trp, His, Ala, Cys, Thr, Gly, Gln, Ser, Asn, or Glu
FXTASQRAX

SEQ ID NO: 48671 - protein, 10 aa, Artificial Sequence
  Description of Artificial Sequence: Synthetic peptide
  Seed: FQTASQRAMM
  misc_feature (2)..(2): Xaa can be Gln, Ala, Arg, Glu, His, Ile, Leu, Lys, Met, Ser, Thr, Val, Asn, Asp, Cys, Gly, Phe, Pro, Trp, or Tyr
  misc_feature (10)..(10): Xaa can be Ala, Ile, Leu, Met, Tyr, Val, Phe, His, or Trp
FXTASQRAMX

SEQ ID NO: 48672 - protein, 9 aa, Artificial Sequence
  Description of Artificial Sequence: Synthetic peptide
  Seed: FRMLQNSQV
  misc_feature (2)..(2): Xaa can be Arg, His, Gln, Tyr, Lys, Phe, Pro, Met, Ala, or Glu
  misc_feature (9)..(9): Xaa can be Leu, Met, Ala, Ile, Phe, Val, Tyr, Cys, Thr, Arg, His, Lys, Trp, or Ser
FXMLQNSQX

SEQ ID NO: 48673 - protein, 10 aa, Artificial Sequence
  Description of Artificial Sequence: Synthetic peptide
  Seed: FRMLQNSQVF
  misc_feature (2)..(2): Xaa can be Pro, Arg, Gln, Ala, His, Lys, Met, Tyr, Phe, Ser, Thr, Glu, Leu, Trp, Val, Asn, Asp, Cys, Gly, or Ile
  misc_feature (10)..(10): Xaa can be Ile, Leu, Met, Phe, Trp, Tyr, His, Val, Ala, Gly, Arg, Lys, Asn, Cys, Gln, Glu, Ser, or Th r
FXMLQNSQVX

SEQ ID NO: 48674 - protein, 10 aa, Artificial Sequence
  Description of Artificial Sequence: Synthetic peptide
  Seed: FSDERAANPI
  misc_feature (2)..(2): Xaa can be Ala, Ile, Leu, Met, Ser, Thr, Val, Gln, Gly, or Cys
  misc_feature (10)..(10): Xaa can be Leu, Met, Phe, Ile, or Val
FXDERAANPX

SEQ ID NO: 48675 - protein, 9 aa, Artificial Sequence
  Description of Artificial Sequence: Synthetic peptide
  Seed: FSFIRGTKV
  misc_feature (2)..(2): Xaa can be Met, Ala, Leu, Ser, Thr, Gln, Ile, Val, Arg, Gly, Lys, Tyr, Asn, Cys, Phe, or Pro
  misc_feature (9)..(9): Xaa can be Leu, Met, Phe, Tyr, Ile, Trp, Val, Ala, Cys, Thr, His, Ser, Gly, or Pro
FXFIRGTKX

SEQ ID NO: 48676 - protein, 9 aa, Artificial Sequence
  Description of Artificial Sequence: Synthetic peptide
  Seed: FSVQKNLPF
  misc_feature (2)..(2): Xaa can be Pro, Gln, Tyr, Ala, Phe, Ser, Met, Lys, Thr, Val, His, Ile, Leu, Trp, Arg, Glu, Gly, Cys, or Asn
  misc_feature (9)..(9): Xaa can be Leu, Met, Phe, Trp, Tyr, Ile, His, Val, Ala, Cys, Thr, Gly, Ser, Gln, Asn, Pro, Glu, Lys, or Asp
FXVQKNLPX

SEQ ID NO: 48677 - protein, 9 aa, Artificial Sequence
  Description of Artificial Sequence: Synthetic peptide
  Seed: FSVQRKLPF
  misc_feature (2)..(2): Xaa can be Pro, Tyr, Met, Ala, Gln, Leu, Ser, Phe, Ile, Thr, Gly, His, Lys, Val, Asn, Trp, Arg, Cys, Glu, or Asp
  misc_feature (9)..(9): Xaa can be Leu, Met, Phe, Tyr, Ile, Val, Trp, Ala, His, Thr, Cys, Ser, Gly, Gln, or Glu
FXVQRKLPX

SEQ ID NO: 48678 - protein, 11 aa, Artificial Sequence
  Description of Artificial Sequence: Synthetic peptide
  Seed: FSVQRKLPFER
  misc_feature (2)..(2): Xaa can be Met, Phe, Thr, Tyr, Val, Ala, Arg, Cys, Gln, Gly, His, Ile, Leu, Lys, Ser, or Trp
  misc_feature (11)..(11): Xaa can be Arg or Lys
FXVQRKLPFEX

SEQ ID NO: 48679 - protein, 9 aa, Artificial Sequence
  Description of Artificial Sequence: Synthetic peptide
  Seed: FSVQRNLPF
  misc_feature (2)..(2): Xaa can be Pro, Tyr, Ala, Gln, Phe, Met, Ser, Thr, Ile, Lys, Trp, Val, Glu, His, Leu, Arg, Asn, Cys, Gly, or Asp
  misc_feature (9)..(9): Xaa can be Phe, Tyr, Ile, Leu, Met, Trp, Val, His, Ala, Thr, Cys, Ser, Gly, Gln, Asn, Glu, Lys, Pro, Arg, or Asp
FXVQRNLPX

SEQ ID NO: 48680 - protein, 11 aa, Artificial Sequence
  Description of Artificial Sequence: Synthetic peptide
  Seed: FSVQRNLPFDR
  misc_feature (2)..(2): Xaa can be Thr, Ala, Arg, Ile, Leu, Lys, Met, Phe, Ser, Trp, Tyr, or Val
  misc_feature (11)..(11): Xaa can be Arg or Lys
FXVQRNLPFDX

SEQ ID NO: 48681 - protein, 11 aa, Artificial Sequence
  Description of Artificial Sequence: Synthetic peptide
  Seed: FSVQRNLPFEK
  misc_feature (2)..(2): Xaa can be Ala, Ile, Ser, Thr, Val, or Met
  misc_feature (11)..(11): Xaa can be Arg or Lys
FXVQRNLPFEX

SEQ ID NO: 48682 - protein, 9 aa, Artificial Sequence
  Description of Artificial Sequence: Synthetic peptide
  Seed: FWRGENGRL
  misc_feature (2)..(2): Xaa can be Tyr, Phe, or Trp
  misc_feature (9)..(9): Xaa can be Leu, Met, Phe, Tyr, Ile, or Val
FXRGENGRX

SEQ ID NO: 48683 - protein, 9 aa, Artificial Sequence
  Description of Artificial Sequence: Synthetic peptide
  Seed: FYIQMCTEF
  misc_feature (2)..(2): Xaa can be Tyr, Phe, Arg, Met, Trp, Gln, His, Ala, Ile, Leu, Ser, Thr, Val, Gly, Pro, Asn, or Lys
  misc_feature (9)..(9): Xaa can be Met, Tyr, Leu, Phe, Trp, Ile, Val, Ala, His, Gln, Ser, or Thr
FXIQMCTEX

SEQ ID NO: 48684 - protein, 10 aa, Artificial Sequence
  Description of Artificial Sequence: Synthetic peptide
  Seed: FYIQMCTEFK
  misc_feature (2)..(2): Xaa can be Tyr, Phe, Trp, Ala, His, Met, Ser, Thr, Val, Arg, Asn, Asp, Cys, Gln, Glu, Gly, Ile, Leu, Lys, or Pro
  misc_feature (10)..(10): Xaa can be Arg, Lys, Tyr, Phe, Ile, Leu, Met, Trp, Ala, Asn, Asp, Cys, Gln, Glu, Gly, His, Pro, Ser, Thr, or Val
FXIQMCTEFX

SEQ ID NO: 48685 - protein, 11 aa, Artificial Sequence
  Description of Artificial Sequence: Synthetic peptide
  Seed: FYIQMCTEFKL
  misc_feature (2)..(2): Xaa can be Tyr, Leu, Met, Phe, Trp, Ala, Arg, Asn, Asp, Cys, Gln, Glu, Gly, His, Ile, Lys, Pro, Ser, Thr, or Val
  misc_feature (11)..(11): Xaa can be Ala, Ile, Leu, Met, Phe, Val, Trp, Thr, or Tyr
FXIQMCTEFKX

SEQ ID NO: 48686 - protein, 10 aa, Artificial Sequence
  Description of Artificial Sequence: Synthetic peptide
  Seed: FYIQMCTEIK
  misc_feature (2)..(2): Xaa can be Met, Phe, Tyr, Ala, Arg, Asn, Gln, Gly, His, Ile, Leu, Lys, Ser, Thr, Trp, or Val
  misc_feature (10)..(10): Xaa can be Arg or Lys
FXIQMCTEIX

SEQ ID NO: 48687 - protein, 11 aa, Artificial Sequence
  Description of Artificial Sequence: Synthetic peptide
  Seed: FYIQMCTEIKL
  misc_feature (2)..(2): Xaa can be Tyr, Leu, Met, Phe, Trp, Gln, Ala, Arg, Asn, Asp, Cys, Glu, Gly, His, Ile, Lys, Pro, Ser, Thr, or Val
  misc_feature (11)..(11): Xaa can be Ile, Leu, Met, Val, Ala, Phe, Trp, Thr, or Tyr
FXIQMCTEIKX

SEQ ID NO: 48688 - protein, 10 aa, Artificial Sequence
  Description of Artificial Sequence: Synthetic peptide
  Seed: FYIQMCTELK
  misc_feature (2)..(2): Xaa can be Thr, Val, Ala, Arg, Asn, Asp, Cys, Gln, Glu, Gly, His, Ile, Leu, Lys, Met, Phe, Pro, Ser, Trp, or Tyr
  misc_feature (10)..(10): Xaa can be Arg, Lys, or Tyr
FXIQMCTELX

SEQ ID NO: 48689 - protein, 11 aa, Artificial Sequence
  Description of Artificial Sequence: Synthetic peptide
  Seed: FYIQMCTELKL
  misc_feature (2)..(2): Xaa can be Tyr, Leu, Met, Phe, Trp, Gln, Ala, Arg, Asn, Asp, Cys, Glu, Gly, His, Ile, Lys, Pro, Ser, Thr, or Val
  misc_feature (11)..(11): Xaa can be Ile, Leu, Met, Val, Ala, Phe, Trp, Thr, or Tyr
FXIQMCTELKX

SEQ ID NO: 48690 - protein, 11 aa, Artificial Sequence
  Description of Artificial Sequence: Synthetic peptide
  Seed: FYIQMCTELQL
  misc_feature (2)..(2): Xaa can be Leu, Met, Phe, Trp, Tyr, Ala, Arg, Asn, Asp, Cys, Gln, Glu, Gly, His, Ile, Lys, Pro, Ser, Thr, or Val
  misc_feature (11)..(11): Xaa can be Ala, Ile, Leu, Met, Phe, Tyr, Val, Trp, or Thr
FXIQMCTELQX

SEQ ID NO: 48691 - protein, 9 aa, Artificial Sequence
  Description of Artificial Sequence: Synthetic peptide
  Seed: FYVQMCTEL
  misc_feature (2)..(2): Xaa can be Tyr, Phe, Trp, Arg, Met, Ala, His, Ser, Thr, Val, Gln, Ile, or Leu
  misc_feature (9)..(9): Xaa can be Met, Phe, Tyr, Leu, Ile, Val, Trp, Ala, His, or Thr
FXVQMCTEX

SEQ ID NO: 48692 - protein, 10 aa, Artificial Sequence
  Description of Artificial Sequence: Synthetic peptide
  Seed: FYVQMCTELK
  misc_feature (2)..(2): Xaa can be Thr, Ala, Arg, Asn, Asp, Cys, Gln, Glu, Gly, His, Ile, Leu, Lys, Met, Phe, Pro, Ser, Trp, Tyr, or Val
  misc_feature (10)..(10): Xaa can be Arg, Lys, or Tyr
FXVQMCTELX

SEQ ID NO: 48693 - protein, 11 aa, Artificial Sequence
  Description of Artificial Sequence: Synthetic peptide
  Seed: FYVQMCTELKL
  misc_feature (2)..(2): Xaa can be Tyr, Leu, Phe, Trp, Met, Ala, Arg, Asn, Asp, Cys, Gln, Glu, Gly, His, Ile, Lys, Pro, Ser, Thr, or Val
  misc_feature (11)..(11): Xaa can be Ile, Leu, Met, Val, Phe, Trp, Ala, Thr, or Tyr
FXVQMCTELKX

SEQ ID NO: 48694 - protein, 10 aa, Artificial Sequence
  Description of Artificial Sequence: Synthetic peptide
  Seed: GAAGATVKGV
  misc_feature (2)..(2): Xaa can be Gln, Met, Leu, Thr, Val, Ile, Ala, or Ser
  misc_feature (10)..(10): Xaa can be Val, Leu, Ile, or Met
GXAGATVKGX

SEQ ID NO: 48695 - protein, 9 aa, Artificial Sequence
  Description of Artificial Sequence: Synthetic peptide
  Seed: GAKPEEMSF
  misc_feature (2)..(2): Xaa can be Gln, Ala, Met, Ser, Thr, Leu, Lys, Val, Arg, Glu, His, or Ile
  misc_feature (9)..(9): Xaa can be Phe, Tyr, Met, Trp, Leu, or Ile
GXKPEEMSX

SEQ ID NO: 48696 - protein, 10 aa, Artificial Sequence
  Description of Artificial Sequence: Synthetic peptide
  Seed: GAKPEEMSFR
  misc_feature (2)..(2): Xaa can be Met, Phe, Ser, Thr, Tyr, Val, Ala, Gln, Gly, Ile, Leu, or Trp
  misc_feature (10)..(10): Xaa can be Arg or Lys
GXKPEEMSFX

SEQ ID NO: 48697 - protein, 9 aa, Artificial Sequence
  Description of Artificial Sequence: Synthetic peptide
  Seed: GAKPEEVSF
  misc_feature (2)..(2): Xaa can be Gln, Lys, Met, Ala, His, Leu, Arg, or Ser
  misc_feature (9)..(9): Xaa can be Tyr, Phe, Met, or Leu
GXKPEEVSX

SEQ ID NO: 48698 - protein, 10 aa, Artificial Sequence
  Description of Artificial Sequence: Synthetic peptide
  Seed: GAKPEEVSFR
  misc_feature (2)..(2): Xaa can be Met, Phe, Thr, Tyr, Ala, Gln, Ile, Leu, Ser, Trp, or Val
  misc_feature (10)..(10): Xaa can be Arg or Lys
GXKPEEVSFX

SEQ ID NO: 48699 - protein, 9 aa, Artificial Sequence
  Description of Artificial Sequence: Synthetic peptide
  Seed: GAVAHKSCL
  misc_feature (2)..(2): Xaa can be Ala or Ser
  misc_feature (9)..(9): Xaa can be Met, Phe, Tyr, or Leu
GXVAHKSCX

SEQ ID NO: 48700 - protein, 9 aa, Artificial Sequence
  Description of Artificial Sequence: Synthetic peptide
  Seed: GAYERMCNI
  misc_feature (2)..(2): Xaa can be Met, Leu, Ile, Val, Thr, Ala, Gln, Ser, Gly, or Phe
  misc_feature (9)..(9): Xaa can be Val, Ala, Ile, Leu, Met, Phe, Trp, Tyr, Cys, Thr, Ser, Gly, or Pro
GXYERMCNX

SEQ ID NO: 48701 - protein, 11 aa, Artificial Sequence
  Description of Artificial Sequence: Synthetic peptide
  Seed: GAYERMCNILK
  misc_feature (2)..(2): Xaa can be Thr, Leu, Met, Ser, Ala, Arg, Gln, Ile, Tyr, or Val
  misc_feature (11)..(11): Xaa can be Lys, Tyr, or Arg
GXYERMCNILX

SEQ ID NO: 48702 - protein, 11 aa, Artificial Sequence
  Description of Artificial Sequence: Synthetic peptide
  Seed: GEDAPAGLTHL
  misc_feature (2)..(2): Xaa can be Glu
  misc_feature (11)..(11): Xaa can be Leu
GXDAPAGLTHX

SEQ ID NO: 48703 - protein, 11 aa, Artificial Sequence
  Description of Artificial Sequence: Synthetic peptide
  Seed: GEDATAGLTHL
  misc_feature (2)..(2): Xaa can be Glu
  misc_feature (11)..(11): Xaa can be Leu
GXDATAGLTHX

SEQ ID NO: 48704 - protein, 10 aa, Artificial Sequence
  Description of Artificial Sequence: Synthetic peptide
  Seed: GEIRRIWRQA
  misc_feature (2)..(2): Xaa can be Glu
  misc_feature (10)..(10): Xaa can be Ala, Ile, Leu, Met, Phe, or Val
GXIRRIWRQX

SEQ ID NO: 48705 - protein, 8 aa, Artificial Sequence
  Description of Artificial Sequence: Synthetic peptide
  Seed: GENAAAGL
  misc_feature (2)..(2): Xaa can be Glu
  misc_feature (8)..(8): Xaa can be Leu or Met
GXNAAAGX

SEQ ID NO: 48706 - protein, 9 aa, Artificial Sequence
  Description of Artificial Sequence: Synthetic peptide
  Seed: GENAAAGLT
  misc_feature (2)..(2): Xaa can be Glu
  misc_feature (9)..(9): Xaa can be Ala, Cys, Ile, Leu, Met, Pro, Thr, or Val
GXNAAAGLX

SEQ ID NO: 48707 - protein, 11 aa, Artificial Sequence
  Description of Artificial Sequence: Synthetic peptide
  Seed: GENAAAGLTHL
  misc_feature (2)..(2): Xaa can be Glu
  misc_feature (11)..(11): Xaa can be Leu
GXNAAAGLTHX

SEQ ID NO: 48708 - protein, 9 aa, Artificial Sequence
  Description of Artificial Sequence: Synthetic peptide
  Seed: GENERRTRI
  misc_feature (2)..(2): Xaa can be Glu
  misc_feature (9)..(9): Xaa can be Ile, Leu, Met, Phe, or Val
GXNERRTRX

SEQ ID NO: 48709 - protein, 10 aa, Artificial Sequence
  Description of Artificial Sequence: Synthetic peptide
  Seed: GENERRTRIA
  misc_feature (2)..(2): Xaa can be Glu
  misc_feature (10)..(10): Xaa can be Ala
GXNERRTRIX

SEQ ID NO: 48710 - protein, 9 aa, Artificial Sequence
  Description of Artificial Sequence: Synthetic peptide
  Seed: GENGRLTRI
  misc_feature (2)..(2): Xaa can be Glu
  misc_feature (9)..(9): Xaa can be Ile, Leu, Met, Phe, or Val
GXNGRLTRX

SEQ ID NO: 48711 - protein, 10 aa, Artificial Sequence
  Description of Artificial Sequence: Synthetic peptide
  Seed: GENGRLTRIA
  misc_feature (2)..(2): Xaa can be Glu
  misc_feature (10)..(10): Xaa can be Ala
GXNGRLTRIX

SEQ ID NO: 48712 - protein, 9 aa, Artificial Sequence
  Description of Artificial Sequence: Synthetic peptide
  Seed: GENGRRTKI
  misc_feature (2)..(2): Xaa can be Glu
  misc_feature (9)..(9): Xaa can be Ile, Leu, Met, Phe, or Val
GXNGRRTKX

SEQ ID NO: 48713 - protein, 9 aa, Artificial Sequence
  Description of Artificial Sequence: Synthetic peptide
  Seed: GENGRRTRI
  misc_feature (2)..(2): Xaa can be Glu
  misc_feature (9)..(9): Xaa can be Ile, Leu, Met, Phe, or Val
GXNGRRTRX

SEQ ID NO: 48714 - protein, 10 aa, Artificial Sequence
  Description of Artificial Sequence: Synthetic peptide
  Seed: GENGRRTRVA
  misc_feature (2)..(2): Xaa can be Glu
  misc_feature (10)..(10): Xaa can be Ala
GXNGRRTRVX

SEQ ID NO: 48715 - protein, 9 aa, Artificial Sequence
  Description of Artificial Sequence: Synthetic peptide
  Seed: GERPNATEI
  misc_feature (2)..(2): Xaa can be Glu or Asp
  misc_feature (9)..(9): Xaa can be Leu, Ala, Ile, Met, Phe, Pro, or Val
GXRPNATEX

SEQ ID NO: 48716 - protein, 9 aa, Artificial Sequence
  Description of Artificial Sequence: Synthetic peptide
  Seed: GERQDATEI
  misc_feature (2)..(2): Xaa can be Glu
  misc_feature (9)..(9): Xaa can be Ala, Ile, Leu, Met, Phe, Pro, or Val
GXRQDATEX

SEQ ID NO: 48717 - protein, 9 aa, Artificial Sequence
  Description of Artificial Sequence: Synthetic peptide
  Seed: GERQNANDI
  misc_feature (2)..(2): Xaa can be Glu
  misc_feature (9)..(9): Xaa can be Ile, Leu, Met, Phe, or Val
GXRQNANDX

SEQ ID NO: 48718 - protein, 9 aa, Artificial Sequence
  Description of Artificial Sequence: Synthetic peptide
  Seed: GERQNANEI
  misc_feature (2)..(2): Xaa can be Glu or Asp
  misc_feature (9)..(9): Xaa can be Leu, Ala, Ile, Met, Phe, Pro, or Val
GXRQNANEX

SEQ ID NO: 48719 - protein, 9 aa, Artificial Sequence
  Description of Artificial Sequence: Synthetic peptide
  Seed: GERQNATEI
  misc_feature (2)..(2): Xaa can be Glu or Asp
  misc_feature (9)..(9): Xaa can be Leu, Ala, Ile, Met, Phe, Pro, or Val
GXRQNATEX

SEQ ID NO: 48720 - protein, 9 aa, Artificial Sequence
  Description of Artificial Sequence: Synthetic peptide
  Seed: GERQNTTEI
  misc_feature (2)..(2): Xaa can be Glu, Asp, or Gln
  misc_feature (9)..(9): Xaa can be Leu, Ala, Ile, Met, Phe, Pro, or Val
GXRQNTTEX

SEQ ID NO: 48721 - protein, 8 aa, Artificial Sequence
  Description of Artificial Sequence: Synthetic peptide
  Seed: GEYATAGL
  misc_feature (2)..(2): Xaa can be Glu
  misc_feature (8)..(8): Xaa can be Ile, Leu, Met, or Phe
GXYATAGX

SEQ ID NO: 48722 - protein, 9 aa, Artificial Sequence
  Description of Artificial Sequence: Synthetic peptide
  Seed: GEYATAGLT
  misc_feature (2)..(2): Xaa can be Glu or Gln
  misc_feature (9)..(9): Xaa can be Ala, Cys, Ile, Leu, Met, Pro, Ser, Thr, or Val
GXYATAGLX

SEQ ID NO: 48723 - protein, 11 aa, Artificial Sequence
  Description of Artificial Sequence: Synthetic peptide
  Seed: GEYATAGLTHI
  misc_feature (2)..(2): Xaa can be Glu
  misc_feature (11)..(11): Xaa can be Ile, Leu, Met, Phe, or Val
GXYATAGLTHX

SEQ ID NO: 48724 - protein, 11 aa, Artificial Sequence
  Description of Artificial Sequence: Synthetic peptide
  Seed: GFIRGKKVIPR
  misc_feature (2)..(2): Xaa can be Ala, Arg, Gln, Ile, Leu, Met, Phe, Ser, Thr, Trp, Tyr, or Val
  misc_feature (11)..(11): Xaa can be Arg
GXIRGKKVIPX

SEQ ID NO: 48725 - protein, 11 aa, Artificial Sequence
  Description of Artificial Sequence: Synthetic peptide
  Seed: GFIRGKKVVPR
  misc_feature (2)..(2): Xaa can be Tyr, Ala, Arg, Gln, Ile, Leu, Met, Phe, Ser, Thr, Trp, or Val
  misc_feature (11)..(11): Xaa can be Arg or Lys
GXIRGKKVVPX

SEQ ID NO: 48726 - protein, 11 aa, Artificial Sequence
  Description of Artificial Sequence: Synthetic peptide
  Seed: GFIRGKRVVPR
  misc_feature (2)..(2): Xaa can be Phe, Tyr, Ala, Arg, Gln, Ile, Leu, Lys, Met, Ser, Thr, Trp, or Val
  misc_feature (11)..(11): Xaa can be Arg or Lys
GXIRGKRVVPX

SEQ ID NO: 48727 - protein, 10 aa, Artificial Sequence
  Description of Artificial Sequence: Synthetic peptide
  Seed: GFQIASNENM
  misc_feature (2)..(2): Xaa can be Arg, Gln, His, Ile, Leu, Lys, Met, Phe, Trp, Tyr, Val, Ala, Asn, Asp, Cys, Glu, Gly, Pro, Ser, or Thr
  misc_feature (10)..(10): Xaa can be Phe, Tyr, Met, or Val
GXQIASNENX

SEQ ID NO: 48728 - protein, 9 aa, Artificial Sequence
  Description of Artificial Sequence: Synthetic peptide
  Seed: GGMVGGIGR
  misc_feature (2)..(2): Xaa can be Arg or Gly
  misc_feature (9)..(9): Xaa can be Arg, Ala, His, Ile, Leu, Lys, Met, Phe, Trp, Tyr, or Val
GXMVGGIGX

SEQ ID NO: 48729 - protein, 10 aa, Artificial Sequence
  Description of Artificial Sequence: Synthetic peptide
  Seed: GGMVGGIGRF
  misc_feature (2)..(2): Xaa can be Arg, Gln, Lys, Met, Ala, Asn, Asp, Cys, Glu, Gly, His, Ile, Leu, Phe, Pro, Ser, Thr, Trp, Tyr, or Val
  misc_feature (10)..(10): Xaa can be Phe, Tyr, Met, Leu, Ala, Arg, His, Ile, Lys, Trp, or Val
GXMVGGIGRX

SEQ ID NO: 48730 - protein, 11 aa, Artificial Sequence
  Description of Artificial Sequence: Synthetic peptide
  Seed: GGPIYKRVGGK
  misc_feature (2)..(2): Xaa can be Ala, Arg, Asn, Asp, Cys, Gln, Glu, Gly, His, Ile, Leu, Lys, Met, Phe, Pro, Ser, Thr, Trp, Tyr, or Val
  misc_feature (11)..(11): Xaa can be Lys
GXPIYKRVGGX

SEQ ID NO: 48731 - protein, 11 aa, Artificial Sequence
  Description of Artificial Sequence: Synthetic peptide
  Seed: GGPIYKRVNGK
  misc_feature (2)..(2): Xaa can be Ala, Arg, Asn, Asp, Cys, Gln, Glu, Gly, His, Ile, Leu, Lys, Met, Phe, Pro, Ser, Thr, Trp, Tyr, or Val
  misc_feature (11)..(11): Xaa can be Lys
GXPIYKRVNGX

SEQ ID NO: 48732 - protein, 11 aa, Artificial Sequence
  Description of Artificial Sequence: Synthetic peptide
  Seed: GGPIYRRVGGK
  misc_feature (2)..(2): Xaa can be Ala, Arg, Asn, Asp, Cys, Gln, Glu, Gly, His, Ile, Leu, Lys, Met, Phe, Pro, Ser, Thr, Trp, Tyr, or Val
  misc_feature (11)..(11): Xaa can be Lys
GXPIYRRVGGX

SEQ ID NO: 48733 - protein, 11 aa, Artificial Sequence
  Description of Artificial Sequence: Synthetic peptide
  Seed: GGPIYRRVNGK
  misc_feature (2)..(2): Xaa can be Ala, Arg, Asn, Asp, Cys, Gln, Glu, Gly, His, Ile, Leu, Lys, Met, Phe, Pro, Ser, Thr, Trp, Tyr, or Val
  misc_feature (11)..(11): Xaa can be Lys
GXPIYRRVNGX

SEQ ID NO: 48734 - protein, 10 aa, Artificial Sequence
  Description of Artificial Sequence: Synthetic peptide
  Seed: GGRWMRELVL
  misc_feature (2)..(2): Xaa can be Arg, Ala, Asn, Asp, Cys, Gln, Glu, Gly, His, Ile, Leu, Lys, Met, Phe, Pro, Ser, Thr, Trp, Tyr, or Val
  misc_feature (10)..(10): Xaa can be Ala, Arg, His, Ile, Leu, Lys, Met, Phe, Trp, Tyr, Val, Cys, Gln, Gly, Ser, or Thr
GXRWMRELVX

SEQ ID NO: 48735 - protein, 11 aa, Artificial Sequence
  Description of Artificial Sequence: Synthetic peptide
  Seed: GGRWMRELVLY
  misc_feature (2)..(2): Xaa can be Arg, Lys, His, Met, Tyr, Ala, Gly, Ser, Trp, Phe, Gln, Asn, Cys, Ile, Leu, Thr, or Val
  misc_feature (11)..(11): Xaa can be Lys, Leu, Met, Phe, Arg, Tyr, Ile, Ala, Val, Cys, Gln, Glu, Gly, His, Pro, Ser, Thr, or Tr p
GXRWMRELVLX

SEQ ID NO: 48736 - protein, 10 aa, Artificial Sequence
  Description of Artificial Sequence: Synthetic peptide
  Seed: GGYDFEREGY
  misc_feature (2)..(2): Xaa can be Ala, Gln, Gly, Ile, Leu, Met, Phe, Ser, Thr, Trp, Tyr, or Val
  misc_feature (10)..(10): Xaa can be Tyr
GXYDFEREGX

SEQ ID NO: 48737 - protein, 9 aa, Artificial Sequence
  Description of Artificial Sequence: Synthetic peptide
  Seed: GHISVQPTF
  misc_feature (2)..(2): Xaa can be Gln, Arg, Met, Leu, Ile, Thr, Tyr, Val, Glu, Phe, Trp, Lys, Ala, Ser, His, Asn, Gly, or Cy s
  misc_feature (9)..(9): Xaa can be Phe, Tyr, Met, Val, Ile, Leu, Ala, Trp, Cys, Thr, or His
GXISVQPTX

SEQ ID NO: 48738 - protein, 9 aa, Artificial Sequence
  Description of Artificial Sequence: Synthetic peptide
  Seed: GIGTMVMEL
  misc_feature (2)..(2): Xaa can be Leu, Met, Ile, Gln, Val, Ala, or Thr
  misc_feature (9)..(9): Xaa can be Val, Ile, Leu, Ala, Cys, Met, or Thr
GXGTMVMEX

SEQ ID NO: 48739 - protein, 9 aa, Artificial Sequence
  Description of Artificial Sequence: Synthetic peptide
  Seed: GINDRNFWR
  misc_feature (2)..(2): Xaa can be Met, Thr, Val, Ala, Asn, Gln, Gly, Ile, Leu, Phe, Ser, Trp, Tyr, Cys, or His
  misc_feature (9)..(9): Xaa can be Arg, Lys, Tyr, or His
GXNDRNFWX

SEQ ID NO: 48740 - protein, 11 aa, Artificial Sequence
  Description of Artificial Sequence: Synthetic peptide
  Seed: GKDPKKTGGPI
  misc_feature (2)..(2): Xaa can be Ala, Arg, Asn, Asp, Cys, Gln, Glu, Gly, His, Ile, Leu, Lys, Met, Phe, Pro, Ser, Thr, Trp, Tyr, or Val
  misc_feature (11)..(11): Xaa can be Ile, Leu, Met, Phe, or Val
GXDPKKTGGPX

SEQ ID NO: 48741 - protein, 11 aa, Artificial Sequence
  Description of Artificial Sequence: Synthetic peptide
  Seed: GKDPKRTGGPI
  misc_feature (2)..(2): Xaa can be Pro, Ala, Arg, Asn, Asp, Cys, Gln, Glu, Gly, His, Ile, Leu, Lys, Met, Phe, Ser, Thr, Trp, Tyr, or Val
  misc_feature (11)..(11): Xaa can be Ile, Leu, Met, Phe, Val, or Ala
GXDPKRTGGPX

SEQ ID NO: 48742 - protein, 11 aa, Artificial Sequence
  Description of Artificial Sequence: Synthetic peptide
  Seed: GKFQTAAQKAM
  misc_feature (2)..(2): Xaa can be Gln, Lys, Met, Ala, Arg, Asn, Glu, Gly, His, Ile, Leu, Phe, Ser, Thr, Tyr, Val, Asp, Cys, Pro, or Trp
  misc_feature (11)..(11): Xaa can be Tyr, Phe, Met, or Leu
GXFQTAAQKAX

SEQ ID NO: 48743 - protein, 11 aa, Artificial Sequence
  Description of Artificial Sequence: Synthetic peptide
  Seed: GKFQTAAQRAM
  misc_feature (2)..(2): Xaa can be Gln, Glu, His, Lys, Met, Ala, Arg, Asn, Asp, Cys, Gly, Ile, Leu, Phe, Pro, Ser, Thr, Trp, Tyr, or Val
  misc_feature (11)..(11): Xaa can be Phe, Tyr, Met, or Leu
GXFQTAAQRAX

SEQ ID NO: 48744 - protein, 11 aa, Artificial Sequence
  Description of Artificial Sequence: Synthetic peptide
  Seed: GKFQTASQRAM
  misc_feature (2)..(2): Xaa can be Gln, Glu, His, Lys, Met, Ala, Arg, Asn, Asp, Cys, Gly, Ile, Leu, Phe, Pro, Ser, Thr, Trp, Tyr, or Val
  misc_feature (11)..(11): Xaa can be Phe, Tyr, Met, Ile, Leu, or Trp
GXFQTASQRAX

SEQ ID NO: 48745 - protein, 10 aa, Artificial Sequence
  Description of Artificial Sequence: Synthetic peptide
  Seed: GKMIDGIGRF
  misc_feature (2)..(2): Xaa can be Arg, Gln, Met, Ala, Asn, Asp, Cys, Glu, Gly, His, Ile, Leu, Lys, Phe, Pro, Ser, Thr, Trp, Tyr, or Val
  misc_feature (10)..(10): Xaa can be Phe, Tyr, Met, Arg, Ile, Leu, Lys, Trp, or Val
GXMIDGIGRX

SEQ ID NO: 48746 - protein, 11 aa, Artificial Sequence
  Description of Artificial Sequence: Synthetic peptide
  Seed: GKMIDGIGRFY
  misc_feature (2)..(2): Xaa can be Arg, Gln, Lys, Met, Ala, His, Ile, Leu, Phe, Ser, Thr, Tyr, or Val
  misc_feature (11)..(11): Xaa can be Tyr, Phe, Met, Ala, Arg, Ile, Leu, Lys, Trp, or Val
GXMIDGIGRFX

SEQ ID NO: 48747 - protein, 10 aa, Artificial Sequence
  Description of Artificial Sequence: Synthetic peptide
  Seed: GKMIGGIGRF
  misc_feature (2)..(2): Xaa can be Arg, Gln, Lys, Met, Ala, Asn, Asp, Cys, Glu, Gly, His, Ile, Leu, Phe, Pro, Ser, Thr, Trp, Tyr, or Val
  misc_feature (10)..(10): Xaa can be Phe, Tyr, Met, Leu, Ala, Arg, His, Ile, Lys, Trp, or Val
GXMIGGIGRX

SEQ ID NO: 48748 - protein, 11 aa, Artificial Sequence
  Description of Artificial Sequence: Synthetic peptide
  Seed: GKMIGGIGRFY
  misc_feature (2)..(2): Xaa can be Arg, Gln, Lys, Met, Ala, His, Ile, Leu, Phe, Ser, Thr, Tyr, or Val
  misc_feature (11)..(11): Xaa can be Tyr, Phe, Met, Ala, Arg, Ile, Leu, Lys, Trp, or Val
GXMIGGIGRFX

SEQ ID NO: 48749 - protein, 10 aa, Artificial Sequence
  Description of Artificial Sequence: Synthetic peptide
  Seed: GKMINGIGRF
  misc_feature (2)..(2): Xaa can be Gln, Lys, Met, Ala, Arg, Asn, Asp, Cys, Glu, Gly, His, Ile, Leu, Phe, Pro, Ser, Thr, Trp, Tyr, or Val
  misc_feature (10)..(10): Xaa can be Phe, Tyr, or Met
GXMINGIGRX

SEQ ID NO: 48750 - protein, 11 aa, Artificial Sequence
  Description of Artificial Sequence: Synthetic peptide
  Seed: GKMINGIGRFY
  misc_feature (2)..(2): Xaa can be Gln, Arg, Lys, Met, Tyr, Ala, Gly, His, Ile, Leu, Phe, Ser, Thr, or Val
  misc_feature (11)..(11): Xaa can be Tyr, Phe, or Met
GXMINGIGRFX

SEQ ID NO: 48751 - protein, 10 aa, Artificial Sequence
  Description of Artificial Sequence: Synthetic peptide
  Seed: GKMISGIGRF
  misc_feature (2)..(2): Xaa can be Gln, Leu, Lys, Met, Ala, Arg, Asn, Asp, Cys, Glu, Gly, His, Ile, Phe, Pro, Ser, Thr, Trp, Tyr, or Val
  misc_feature (10)..(10): Xaa can be Phe, Tyr, Met, or Leu
GXMISGIGRX

SEQ ID NO: 48752 - protein, 11 aa, Artificial Sequence
  Description of Artificial Sequence: Synthetic peptide
  Seed: GKMISGIGRFY
  misc_feature (2)..(2): Xaa can be Gln, Met, Arg, His, Leu, Lys, Ser, Tyr, Ala, Asn, Gly, Ile, Phe, Thr, Trp, or Val
  misc_feature (11)..(11): Xaa can be Tyr, Phe, or Met
GXMISGIGRFX

SEQ ID NO: 48753 - protein, 10 aa, Artificial Sequence
  Description of Artificial Sequence: Synthetic peptide
  Seed: GKMVDGIGRF
  misc_feature (2)..(2): Xaa can be Gln, Met, Ala, Arg, Asn, Asp, Cys, Glu, Gly, His, Ile, Leu, Lys, Phe, Pro, Ser, Thr, Trp, Tyr, or Val
  misc_feature (10)..(10): Xaa can be Phe, Tyr, or Met
GXMVDGIGRX

SEQ ID NO: 48754 - protein, 11 aa, Artificial Sequence
  Description of Artificial Sequence: Synthetic peptide
  Seed: GKMVDGIGRFY
  misc_feature (2)..(2): Xaa can be Gln, Lys, Met, Ala, Arg, Ser, Thr, Tyr, or Val
  misc_feature (11)..(11): Xaa can be Tyr, Phe, or Met
GXMVDGIGRFX

SEQ ID NO: 48755 - protein, 11 aa, Artificial Sequence
  Description of Artificial Sequence: Synthetic peptide
  Seed: GKMVGGIGRFY
  misc_feature (2)..(2): Xaa can be Arg, Gln, Met, Ala, Leu, Lys, Ser, Thr, Tyr, or Val
  misc_feature (11)..(11): Xaa can be Tyr, Phe, Met, Ala, Arg, Ile, Leu, Lys, Trp, or Val
GXMVGGIGRFX

SEQ ID NO: 48756 - protein, 9 aa, Artificial Sequence
  Description of Artificial Sequence: Synthetic peptide
  Seed: GKWIRELIL
  misc_feature (2)..(2): Xaa can be Arg, Gln, Lys, Met, Glu, His, Ala, Asn, Leu, Ser, Thr, or Val
  misc_feature (9)..(9): Xaa can be Phe, Tyr, Met, Leu, Ile, Trp, Ala, Cys, Gly, Ser, Thr, Val, or His
GXWIRELIX

SEQ ID NO: 48757 - protein, 10 aa, Artificial Sequence
  Description of Artificial Sequence: Synthetic peptide
  Seed: GKWIRELILY
  misc_feature (2)..(2): Xaa can be Gln, Lys, Met, Ala, Arg, Asn, Asp, Cys, Glu, Gly, His, Ile, Leu, Phe, Pro, Ser, Thr, Trp, Tyr, or Val
  misc_feature (10)..(10): Xaa can be Tyr, Phe, or Met
GXWIRELILX

SEQ ID NO: 48758 - protein, 9 aa, Artificial Sequence
  Description of Artificial Sequence: Synthetic peptide
  Seed: GKWIRELVL
  misc_feature (2)..(2): Xaa can be Arg, Gln, Met, Lys, His, Ala, Glu, Leu, Ser, Asn, Gly, Ile, Phe, Thr, Tyr, or Val
  misc_feature (9)..(9): Xaa can be Phe, Tyr, Met, Leu, Ile, Trp, Ala, Val, His, Cys, Gly, Ser, or Thr
GXWIRELVX

SEQ ID NO: 48759 - protein, 10 aa, Artificial Sequence
  Description of Artificial Sequence: Synthetic peptide
  Seed: GKWIRELVLY
  misc_feature (2)..(2): Xaa can be Gln, His, Lys, or Met
  misc_feature (10)..(10): Xaa can be Phe, Tyr, or Met
GXWIRELVLX

SEQ ID NO: 48760 - protein, 9 aa, Artificial Sequence
  Description of Artificial Sequence: Synthetic peptide
  Seed: GKWMRELIL
  misc_feature (2)..(2): Xaa can be Arg, Gln, Met, Lys, His, Ala, Glu, Leu, Ser, Asn, Gly, Ile, Thr, Tyr, Val, or Phe
  misc_feature (9)..(9): Xaa can be Phe, Tyr, Met, Leu, Ile, Trp, Ala, Val, His, Cys, Gly, Pro, Ser, or Thr
GXWMRELIX

SEQ ID NO: 48761 - protein, 10 aa, Artificial Sequence
  Description of Artificial Sequence: Synthetic peptide
  Seed: GKWMRELILY
  misc_feature (2)..(2): Xaa can be Gln, Lys, Glu, His, Met, Phe, Tyr, Ala, Arg, Asn, Asp, Cys, Gly, Ile, Leu, Pro, Ser, Thr, Trp, or Val
  misc_feature (10)..(10): Xaa can be Tyr, Phe, or Met
GXWMRELILX

SEQ ID NO: 48762 - protein, 9 aa, Artificial Sequence
  Description of Artificial Sequence: Synthetic peptide
  Seed: GKWMRELTL
  misc_feature (2)..(2): Xaa can be Arg, Gln, Lys, Met, His, Glu, Ala, Asn, Ile, Leu, Ser, Thr, Val, Gly, Phe, or Tyr
  misc_feature (9)..(9): Xaa can be Phe, Tyr, Met, Leu, Ile, Val, Trp, Ala, His, Gly, Cys, Lys, Pro, Ser, or Thr
GXWMRELTX

SEQ ID NO: 48763 - protein, 10 aa, Artificial Sequence
  Description of Artificial Sequence: Synthetic peptide
  Seed: GKWMRELTLY
  misc_feature (2)..(2): Xaa can be Gln, Lys, Met, Ala, Arg, Glu, His, Phe, Tyr, Asn, Asp, Cys, Gly, Ile, Leu, Pro, Ser, Thr, Trp, or Val
  misc_feature (10)..(10): Xaa can be Tyr, Phe, Met, or Leu
GXWMRELTLX

SEQ ID NO: 48764 - protein, 9 aa, Artificial Sequence
  Description of Artificial Sequence: Synthetic peptide
  Seed: GKWMRELVL
  misc_feature (2)..(2): Xaa can be Arg, Gln, Met, His, Lys, Ala, Glu, Asn, Ile, Leu, Ser, Thr, Tyr, Val, Gly, Phe, or Pro
  misc_feature (9)..(9): Xaa can be Tyr, Phe, Met, Leu, His, Ile, Val, Ala, Trp, Gly, Lys, Arg, Asn, Cys, Gln, Glu, Pro, Ser, or Thr
GXWMRELVX

SEQ ID NO: 48765 - protein, 10 aa, Artificial Sequence
  Description of Artificial Sequence: Synthetic peptide
  Seed: GKWMRELVLY
  misc_feature (2)..(2): Xaa can be Arg, Gln, Lys, Met, Ala, Glu, His, Phe, Tyr, Asn, Asp, Cys, Gly, Ile, Leu, Pro, Ser, Thr, Trp, or Val
  misc_feature (10)..(10): Xaa can be Tyr, Phe, Met, Leu, Ile, Ala, Arg, Asn, Asp, Cys, Gln, Glu, Gly, His, Lys, Pro, Ser, Thr, Trp, or Val
GXWMRELVLX

SEQ ID NO: 48766 - protein, 9 aa, Artificial Sequence
  Description of Artificial Sequence: Synthetic peptide
  Seed: GKWMRKLVL
  misc_feature (2)..(2): Xaa can be Arg, Gln, Met, Ala, His, Leu, Lys, Ile, Pro, Val, Asn, Glu, Gly, Phe, Ser, Thr, Tyr, or Tr p
  misc_feature (9)..(9): Xaa can be Leu, Phe, Met, Tyr, Ile, Val, Ala, Trp, Gly, His, Cys, Lys, Pro, Ser, or Thr
GXWMRKLVX

SEQ ID NO: 48767 - protein, 10 aa, Artificial Sequence
  Description of Artificial Sequence: Synthetic peptide
  Seed: GKWMRKLVLY
  misc_feature (2)..(2): Xaa can be Gln, Glu, His, Lys, Met, Ala, Arg, Asn, Gly, Ile, Leu, Phe, Ser, Thr, Trp, Tyr, or Val
  misc_feature (10)..(10): Xaa can be Tyr, Phe, Leu, or Met
GXWMRKLVLX

SEQ ID NO: 48768 - protein, 9 aa, Artificial Sequence
  Description of Artificial Sequence: Synthetic peptide
  Seed: GKWTRELIL
  misc_feature (2)..(2): Xaa can be Arg, Gln, Met, Lys, Ala, Glu, His, Leu, Ser, Asn, Gly, Ile, Thr, or Val
  misc_feature (9)..(9): Xaa can be Phe, Tyr, Met, Leu, Trp, Ala, Ile, Val, Cys, Gly, Ser, Thr, or His
GXWTRELIX

SEQ ID NO: 48769 - protein, 10 aa, Artificial Sequence
  Description of Artificial Sequence: Synthetic peptide
  Seed: GKWTRELILY
  misc_feature (2)..(2): Xaa can be Gln, Lys, Met, or His
  misc_feature (10)..(10): Xaa can be Tyr, Phe, or Met
GXWTRELILX

SEQ ID NO: 48770 - protein, 9 aa, Artificial Sequence
  Description of Artificial Sequence: Synthetic peptide
  Seed: GKWVRELIL
  misc_feature (2)..(2): Xaa can be Arg, Gln, Lys, Met, Ala, Glu, His, Asn, Ile, Leu, Ser, Thr, Val, or Gly
  misc_feature (9)..(9): Xaa can be Tyr, Phe, Met, Leu, Ile, Trp, Val, Ala, Cys, Gly, Ser, Thr, or His
GXWVRELIX

SEQ ID NO: 48771 - protein, 10 aa, Artificial Sequence
  Description of Artificial Sequence: Synthetic peptide
  Seed: GKWVRELILY
  misc_feature (2)..(2): Xaa can be Gln, Lys, Met, or His
  misc_feature (10)..(10): Xaa can be Tyr, Phe, or Met
GXWVRELILX

SEQ ID NO: 48772 - protein, 9 aa, Artificial Sequence
  Description of Artificial Sequence: Synthetic peptide
  Seed: GKWVRELTL
  misc_feature (2)..(2): Xaa can be Arg, Gln, Lys, Met, Ala, Glu, His, Leu, Ser, Asn, Gly, Ile, Phe, Thr, Val, or Tyr
  misc_feature (9)..(9): Xaa can be Tyr, Phe, Met, Leu, Ile, Val, Ala, Trp, Cys, Gly, Lys, Pro, Ser, Thr, or His
GXWVRELTX

SEQ ID NO: 48773 - protein, 10 aa, Artificial Sequence
  Description of Artificial Sequence: Synthetic peptide
  Seed: GKWVRELTLY
  misc_feature (2)..(2): Xaa can be Gln, His, Lys, or Met
  misc_feature (10)..(10): Xaa can be Phe, Tyr, or Met
GXWVRELTLX

SEQ ID NO: 48774 - protein, 9 aa, Artificial Sequence
  Description of Artificial Sequence: Synthetic peptide
  Seed: GKWVRELVL
  misc_feature (2)..(2): Xaa can be Arg, Gln, Met, Lys, His, Ala, Glu, Leu, Ser, Asn, Gly, Ile, Phe, Thr, Tyr, or Val
  misc_feature (9)..(9): Xaa can be Phe, Tyr, Met, Leu, Ile, Trp, Ala, Val, His, Cys, Gly, Ser, or Thr
GXWVRELVX

SEQ ID NO: 48775 - protein, 10 aa, Artificial Sequence
  Description of Artificial Sequence: Synthetic peptide
  Seed: GKWVRELVLY
  misc_feature (2)..(2): Xaa can be Gln, His, Lys, or Met
  misc_feature (10)..(10): Xaa can be Phe, Tyr, or Met
GXWVRELVLX

SEQ ID NO: 48776 - protein, 10 aa, Artificial Sequence
  Description of Artificial Sequence: Synthetic peptide
  Seed: GLAVAGGYDF
  misc_feature (2)..(2): Xaa can be Gln, Met, Leu, Val, Ala, or Ile
  misc_feature (10)..(10): Xaa can be Tyr, Phe, or Met
GXAVAGGYDX

SEQ ID NO: 48777 - protein, 10 aa, Artificial Sequence
  Description of Artificial Sequence: Synthetic peptide
  Seed: GLAVASGHDF
  misc_feature (2)..(2): Xaa can be Gln, Met, Ile, Leu, Val, Ala, Ser, or Thr
  misc_feature (10)..(10): Xaa can be Tyr, Phe, or Met
GXAVASGHDX

SEQ ID NO: 48778 - protein, 10 aa, Artificial Sequence
  Description of Artificial Sequence: Synthetic peptide
  Seed: GLAVASGYDF
  misc_feature (2)..(2): Xaa can be Gln, Met, Ile, Leu, Val, Ala, Pro, Ser, or Thr
  misc_feature (10)..(10): Xaa can be Tyr, Phe, or Met
GXAVASGYDX

SEQ ID NO: 48779 - protein, 10 aa, Artificial Sequence
  Description of Artificial Sequence: Synthetic peptide
  Seed: GLAVASGYEF
  misc_feature (2)..(2): Xaa can be Gln, Lys, Met, Ala, Arg, Glu, His, Ile, Leu, Phe, Pro, Ser, Thr, Trp, Tyr, Val, Asn, Asp, Cys, or Gly
  misc_feature (10)..(10): Xaa can be Tyr, Phe, Met, or Leu
GXAVASGYEX

SEQ ID NO: 48780 - protein, 10 aa, Artificial Sequence
  Description of Artificial Sequence: Synthetic peptide
  Seed: GLIVASGYDF
  misc_feature (2)..(2): Xaa can be Gln, Met, Ala, Ile, Leu, Ser, Thr, or Val
  misc_feature (10)..(10): Xaa can be Phe, Tyr, Met, or Leu
GXIVASGYDX

SEQ ID NO: 48781 - protein, 10 aa, Artificial Sequence
  Description of Artificial Sequence: Synthetic peptide
  Seed: GLSVASGYDF
  misc_feature (2)..(2): Xaa can be Gln, Met, Leu, Ile, or Val
  misc_feature (10)..(10): Xaa can be Tyr, Phe, or Met
GXSVASGYDX

SEQ ID NO: 48782 - protein, 10 aa, Artificial Sequence
  Description of Artificial Sequence: Synthetic peptide
  Seed: GLTVASGYDF
  misc_feature (2)..(2): Xaa can be Gln, Leu, or Met
  misc_feature (10)..(10): Xaa can be Phe or Tyr
GXTVASGYDX

SEQ ID NO: 48783 - protein, 10 aa, Artificial Sequence
  Description of Artificial Sequence: Synthetic peptide
  Seed: GLVVASGYDF
  misc_feature (2)..(2): Xaa can be Gln, Met, Leu, Ala, Ile, Ser, Thr, or Val
  misc_feature (10)..(10): Xaa can be Tyr, Phe, or Met
GXVVASGYDX

SEQ ID NO: 48784 - protein, 9 aa, Artificial Sequence
  Description of Artificial Sequence: Synthetic peptide
  Seed: GMDPRMCSL
  misc_feature (2)..(2): Xaa can be Leu, Met, Ala, Ser, Thr, Gln, Ile, or Val
  misc_feature (9)..(9): Xaa can be Ile, Leu, Val, Met, Phe, Ala, Cys, or Thr
GXDPRMCSX

SEQ ID NO: 48785 - protein, 10 aa, Artificial Sequence
  Description of Artificial Sequence: Synthetic peptide
  Seed: GMDPRMCSLM
  misc_feature (2)..(2): Xaa can be Leu, Met, or Ile
  misc_feature (10)..(10): Xaa can be Val, Ala, Ile, Leu, or Met
GXDPRMCSLX

SEQ ID NO: 48786 - protein, 10 aa, Artificial Sequence
  Description of Artificial Sequence: Synthetic peptide
  Seed: GMIKRGINDR
  misc_feature (2)..(2): Xaa can be Gln, Ile, Leu, Met, Phe, Ser, Thr, Trp, Tyr, or Val
  misc_feature (10)..(10): Xaa can be Arg
GXIKRGINDX

SEQ ID NO: 48787 - protein, 9 aa, Artificial Sequence
  Description of Artificial Sequence: Synthetic peptide
  Seed: GMVGGIGRF
  misc_feature (2)..(2): Xaa can be Gln, Lys, Met, Ala, Glu, His, Ile, Leu, Ser, Thr, or Val
  misc_feature (9)..(9): Xaa can be Phe, Tyr, Met, or Leu
GXVGGIGRX

SEQ ID NO: 48788 - protein, 10 aa, Artificial Sequence
  Description of Artificial Sequence: Synthetic peptide
  Seed: GMVGGIGRFY
  misc_feature (2)..(2): Xaa can be Gln, Met, Leu, Lys, Ala, Arg, Asn, Asp, Cys, Glu, Gly, His, Ile, Phe, Pro, Ser, Thr, Trp, Tyr, or Val
  misc_feature (10)..(10): Xaa can be Tyr, Phe, or Met
GXVGGIGRFX

SEQ ID NO: 48789 - protein, 11 aa, Artificial Sequence
  Description of Artificial Sequence: Synthetic peptide
  Seed: GMVGGIGRFYI
  misc_feature (2)..(2): Xaa can be Leu, Met, Gln, Thr, Val, Ile, Ala, Phe, Ser, or Tyr
  misc_feature (11)..(11): Xaa can be Val, Ile, Leu, Ala, Met, or Thr
GXVGGIGRFYX

SEQ ID NO: 48790 - protein, 11 aa, Artificial Sequence
  Description of Artificial Sequence: Synthetic peptide
  Seed: GNAEFEDLIFL
  misc_feature (2)..(2): Xaa can be Glu, Ala, Arg, Asn, Asp, Cys, Gln, Gly, His, Ile, Leu, Lys, Met, Phe, Pro, Ser, Thr, Trp, Tyr, or Val
  misc_feature (11)..(11): Xaa can be Leu, Met, Ile, or Phe
GXAEFEDLIFX

SEQ ID NO: 48791 - protein, 11 aa, Artificial Sequence
  Description of Artificial Sequence: Synthetic peptide
  Seed: GNAEFEDLTFL
  misc_feature (2)..(2): Xaa can be Glu, Ala, Arg, Asn, Asp, Cys, Gln, Gly, His, Ile, Leu, Lys, Met, Phe, Pro, Ser, Thr, Trp, Tyr, or Val
  misc_feature (11)..(11): Xaa can be Leu, Met, Ile, or Phe
GXAEFEDLTFX

SEQ ID NO: 48792 - protein, 11 aa, Artificial Sequence
  Description of Artificial Sequence: Synthetic peptide
  Seed: GNAEIEDLIFL
  misc_feature (2)..(2): Xaa can be Glu, Ala, Arg, Asn, Asp, Cys, Gln, Gly, His, Ile, Leu, Lys, Met, Phe, Pro, Ser, Thr, Trp, Tyr, or Val
  misc_feature (11)..(11): Xaa can be Leu, Met, or Phe
GXAEIEDLIFX

SEQ ID NO: 48793 - protein, 11 aa, Artificial Sequence
  Description of Artificial Sequence: Synthetic peptide
  Seed: GNAEIEDLTFL
  misc_feature (2)..(2): Xaa can be Glu, Ala, Arg, Asn, Asp, Cys, Gln, Gly, His, Ile, Leu, Lys, Met, Phe, Pro, Ser, Thr, Trp, Tyr, or Val
  misc_feature (11)..(11): Xaa can be Leu, Met, or Phe
GXAEIEDLTFX

SEQ ID NO: 48794 - protein, 11 aa, Artificial Sequence
  Description of Artificial Sequence: Synthetic peptide
  Seed: GNAEVEDLIFL
  misc_feature (2)..(2): Xaa can be Glu, Ala, Arg, Asn, Asp, Cys, Gln, Gly, His, Ile, Leu, Lys, Met, Phe, Pro, Ser, Thr, Trp, Tyr, or Val
  misc_feature (11)..(11): Xaa can be Leu, Met, or Phe
GXAEVEDLIFX

SEQ ID NO: 48795 - protein, 11 aa, Artificial Sequence
  Description of Artificial Sequence: Synthetic peptide
  Seed: GNAEYEDLIFL
  misc_feature (2)..(2): Xaa can be Glu, Ala, Arg, Asn, Asp, Cys, Gln, Gly, His, Ile, Leu, Lys, Met, Phe, Pro, Ser, Thr, Trp, Tyr, or Val
  misc_feature (11)..(11): Xaa can be Leu, Met, or Phe
GXAEYEDLIFX

SEQ ID NO: 48796 - protein, 10 aa, Artificial Sequence
  Description of Artificial Sequence: Synthetic peptide
  Seed: GNPEGRTSDM
  misc_feature (2)..(2): Xaa can be Pro, Ala, Arg, Asn, Asp, Cys, Gln, Glu, Gly, His, Ile, Leu, Lys, Met, Phe, Ser, Thr, Trp, Tyr, or Val
  misc_feature (10)..(10): Xaa can be Leu, Met, or Phe
GXPEGRTSDX

SEQ ID NO: 48797 - protein, 9 aa, Artificial Sequence
  Description of Artificial Sequence: Synthetic peptide
  Seed: GPAVASGYA
  misc_feature (2)..(2): Xaa can be Pro
  misc_feature (9)..(9): Xaa can be Ala, Ile, Leu, Met, Phe, or Val
GXAVASGYX

SEQ ID NO: 48798 - protein, 10 aa, Artificial Sequence
  Description of Artificial Sequence: Synthetic peptide
  Seed: GPAVASGYAF
  misc_feature (2)..(2): Xaa can be Pro, Gln, Met, Lys, Arg, Glu, His, Ile, Leu, Phe, Trp, Tyr, Val, Ala, Asn, Asp, Cys, Gly, Ser, or Thr
  misc_feature (10)..(10): Xaa can be Phe, Tyr, Met, Leu, Ile, Trp, Ala, or Val
GXAVASGYAX

SEQ ID NO: 48799 - protein, 10 aa, Artificial Sequence
  Description of Artificial Sequence: Synthetic peptide
  Seed: GPAVASGYNF
  misc_feature (2)..(2): Xaa can be Pro
  misc_feature (10)..(10): Xaa can be Ile, Leu, Met, or Phe
GXAVASGYNX

SEQ ID NO: 48800 - protein, 10 aa, Artificial Sequence
  Description of Artificial Sequence: Synthetic peptide
  Seed: GPAVSSGYDF
  misc_feature (2)..(2): Xaa can be Pro
  misc_feature (10)..(10): Xaa can be Leu, Met, or Phe
GXAVSSGYDX

SEQ ID NO: 48801 - protein, 10 aa, Artificial Sequence
  Description of Artificial Sequence: Synthetic peptide
  Seed: GPAVSSGYNF
  misc_feature (2)..(2): Xaa can be Pro
  misc_feature (10)..(10): Xaa can be Leu, Met, or Phe
GXAVSSGYNX

SEQ ID NO: 48802 - protein, 10 aa, Artificial Sequence
  Description of Artificial Sequence: Synthetic peptide
  Seed: GPIYKRIDGK
  misc_feature (2)..(2): Xaa can be Ala, Arg, Asn, Asp, Cys, Gln, Glu, Gly, His, Ile, Leu, Lys, Met, Phe, Pro, Ser, Thr, Trp, Tyr, or Val
  misc_feature (10)..(10): Xaa can be Lys
GXIYKRIDGX

SEQ ID NO: 48803 - protein, 10 aa, Artificial Sequence
  Description of Artificial Sequence: Synthetic peptide
  Seed: GPIYKRVDGK
  misc_feature (2)..(2): Xaa can be Ala, Arg, Asn, Asp, Cys, Gln, Glu, Gly, His, Ile, Leu, Lys, Met, Phe, Pro, Ser, Thr, Trp, Tyr, or Val
  misc_feature (10)..(10): Xaa can be Lys
GXIYKRVDGX

SEQ ID NO: 48804 - protein, 10 aa, Artificial Sequence
  Description of Artificial Sequence: Synthetic peptide
  Seed: GPIYKRVDRK
  misc_feature (2)..(2): Xaa can be Ala, Arg, Asn, Asp, Cys, Gln, Glu, Gly, His, Ile, Leu, Lys, Met, Phe, Pro, Ser, Thr, Trp, Tyr, or Val
  misc_feature (10)..(10): Xaa can be Lys
GXIYKRVDRX

SEQ ID NO: 48805 - protein, 10 aa, Artificial Sequence
  Description of Artificial Sequence: Synthetic peptide
  Seed: GPIYKRVGGK
  misc_feature (2)..(2): Xaa can be Ala, Arg, Asn, Asp, Cys, Gln, Glu, Gly, His, Ile, Leu, Lys, Met, Phe, Pro, Ser, Thr, Trp, Tyr, or Val
  misc_feature (10)..(10): Xaa can be Lys
GXIYKRVGGX

SEQ ID NO: 48806 - protein, 10 aa, Artificial Sequence
  Description of Artificial Sequence: Synthetic peptide
  Seed: GPIYKRVNGK
  misc_feature (2)..(2): Xaa can be Ala, Arg, Asn, Asp, Cys, Gln, Glu, Gly, His, Ile, Leu, Lys, Met, Phe, Pro, Ser, Thr, Trp, Tyr, or Val
  misc_feature (10)..(10): Xaa can be Lys
GXIYKRVNGX

SEQ ID NO: 48807 - protein, 10 aa, Artificial Sequence
  Description of Artificial Sequence: Synthetic peptide
  Seed: GPIYRKIDGK
  misc_feature (2)..(2): Xaa can be Ala, Arg, Asn, Asp, Cys, Gln, Glu, Gly, His, Ile, Leu, Lys, Met, Phe, Pro, Ser, Thr, Trp, Tyr, or Val
  misc_feature (10)..(10): Xaa can be Lys
GXIYRKIDGX

SEQ ID NO: 48808 - protein, 10 aa, Artificial Sequence
  Description of Artificial Sequence: Synthetic peptide
  Seed: GPIYRRIDGK
  misc_feature (2)..(2): Xaa can be Ala, Arg, Asn, Asp, Cys, Gln, Glu, Gly, His, Ile, Leu, Lys, Met, Phe, Pro, Ser, Thr, Trp, Tyr, or Val
  misc_feature (10)..(10): Xaa can be Lys
GXIYRRIDGX

SEQ ID NO: 48809 - protein, 10 aa, Artificial Sequence
  Description of Artificial Sequence: Synthetic peptide
  Seed: GPIYRRREGK
  misc_feature (2)..(2): Xaa can be Ala, Arg, Asn, Asp, Cys, Gln, Glu, Gly, His, Ile, Leu, Lys, Met, Phe, Pro, Ser, Thr, Trp, Tyr, or Val
  misc_feature (10)..(10): Xaa can be Lys
GXIYRRREGX

SEQ ID NO: 48810 - protein, 10 aa, Artificial Sequence
  Description of Artificial Sequence: Synthetic peptide
  Seed: GPIYRRRNGK
  misc_feature (2)..(2): Xaa can be Ala, Arg, Asn, Asp, Cys, Gln, Glu, Gly, His, Ile, Leu, Lys, Met, Phe, Pro, Ser, Thr, Trp, Tyr, or Val
  misc_feature (10)..(10): Xaa can be Lys
GXIYRRRNGX

SEQ ID NO: 48811 - protein, 10 aa, Artificial Sequence
  Description of Artificial Sequence: Synthetic peptide
  Seed: GPIYRRVDGK
  misc_feature (2)..(2): Xaa can be Ala, Arg, Asn, Asp, Cys, Gln, Glu, Gly, His, Ile, Leu, Lys, Met, Phe, Pro, Ser, Thr, Trp, Tyr, or Val
  misc_feature (10)..(10): Xaa can be Lys
GXIYRRVDGX

SEQ ID NO: 48812 - protein, 10 aa, Artificial Sequence
  Description of Artificial Sequence: Synthetic peptide
  Seed: GPIYRRVGGK
  misc_feature (2)..(2): Xaa can be Ala, Arg, Asn, Asp, Cys, Gln, Glu, Gly, His, Ile, Leu, Lys, Met, Phe, Pro, Ser, Thr, Trp, Tyr, or Val
  misc_feature (10)..(10): Xaa can be Lys
GXIYRRVGGX

SEQ ID NO: 48813 - protein, 10 aa, Artificial Sequence
  Description of Artificial Sequence: Synthetic peptide
  Seed: GPIYRRVNGK
  misc_feature (2)..(2): Xaa can be Met, Ala, Arg, Asn, Asp, Cys, Gln, Glu, Gly, His, Ile, Leu, Lys, Phe, Pro, Ser, Thr, Trp, Tyr, or Val
  misc_feature (10)..(10): Xaa can be Lys or Tyr
GXIYRRVNGX

SEQ ID NO: 48814 - protein, 9 aa, Artificial Sequence
  Description of Artificial Sequence: Synthetic peptide
  Seed: GQISIQPTF
  misc_feature (2)..(2): Xaa can be Arg, Gln, Met, Leu, Glu, Ile, Thr, Tyr, Val, Phe, Trp, Lys, Ala, Ser, His, Asn, Gly, or Cy s
  misc_feature (9)..(9): Xaa can be Phe, Tyr, Met, Val, Ile, Leu, Trp, Ala, Cys, Thr, His, Gly, or Ser
GXISIQPTX

SEQ ID NO: 48815 - protein, 10 aa, Artificial Sequence
  Description of Artificial Sequence: Synthetic peptide
  Seed: GQISIQPTFS
  misc_feature (2)..(2): Xaa can be Gln, Lys, Met, His, or Arg
  misc_feature (10)..(10): Xaa can be Tyr, Phe, Met, Ala, Arg, Asn, Asp, Cys, Gln, Glu, Gly, His, Ile, Leu, Lys, Pro, Ser, Thr, Trp, or Val
GXISIQPTFX

SEQ ID NO: 48816 - protein, 11 aa, Artificial Sequence
  Description of Artificial Sequence: Synthetic peptide
  Seed: GQISIQPTFSV
  misc_feature (2)..(2): Xaa can be Gln, Leu, Met, Ile, Ala, Phe, Ser, Thr, Tyr, or Val
  misc_feature (11)..(11): Xaa can be Val, Ile, Leu, Ala, or Met
GXISIQPTFSX

SEQ ID NO: 48817 - protein, 9 aa, Artificial Sequence
  Description of Artificial Sequence: Synthetic peptide
  Seed: GQISTQPTF
  misc_feature (2)..(2): Xaa can be Arg, Gln, Met, Leu, Lys, Val, Glu, Ile, Thr, Ala, Ser, His, Asn, Gly, Phe, Tyr, or Cys
  misc_feature (9)..(9): Xaa can be Tyr, Phe, Met, Val, Ile, Leu, Trp, Ala, His, or Cys
GXISTQPTX

SEQ ID NO: 48818 - protein, 10 aa, Artificial Sequence
  Description of Artificial Sequence: Synthetic peptide
  Seed: GQISTQPTFS
  misc_feature (2)..(2): Xaa can be Gln, Lys, Met, Arg, Glu, His, Ala, or Leu
  misc_feature (10)..(10): Xaa can be Tyr, Phe, Met, Ala, Arg, Asn, Asp, Cys, Gln, Glu, Gly, His, Ile, Leu, Lys, Pro, Ser, Thr, Trp, or Val
GXISTQPTFX

SEQ ID NO: 48819 - protein, 11 aa, Artificial Sequence
  Description of Artificial Sequence: Synthetic peptide
  Seed: GQISTQPTFSV
  misc_feature (2)..(2): Xaa can be Leu, Met, Gln, Ile, Phe, Thr, or Val
  misc_feature (11)..(11): Xaa can be Val, Ile, Leu, Met, or Ala
GXISTQPTFSX

SEQ ID NO: 48820 - protein, 9 aa, Artificial Sequence
  Description of Artificial Sequence: Synthetic peptide
  Seed: GQISVQPAF
  misc_feature (2)..(2): Xaa can be Gln, Arg, Met, Glu, Ile, Leu, Thr, Val, Lys, Ala, His, Ser, Asn, Gly, Phe, Tyr, Cys, or Pr o
  misc_feature (9)..(9): Xaa can be Tyr, Phe, Met, Val, Leu, Ile, Ala, Trp, Cys, Thr, or His
GXISVQPAX

SEQ ID NO: 48821 - protein, 10 aa, Artificial Sequence
  Description of Artificial Sequence: Synthetic peptide
  Seed: GQISVQPAFS
  misc_feature (2)..(2): Xaa can be Gln, Met, Leu, Lys, Ala, Arg, Glu, His, Ile, Ser, Thr, or Val
  misc_feature (10)..(10): Xaa can be Phe, Tyr, Met, Ala, Arg, Asn, Asp, Cys, Gln, Glu, Gly, His, Ile, Leu, Lys, Pro, Ser, Thr, Trp, or Val
GXISVQPAFX

SEQ ID NO: 48822 - protein, 11 aa, Artificial Sequence
  Description of Artificial Sequence: Synthetic peptide
  Seed: GQISVQPAFSV
  misc_feature (2)..(2): Xaa can be Leu, Met, Gln, Ile, Thr, or Val
  misc_feature (11)..(11): Xaa can be Val, Ile, Leu, Met, or Ala
GXISVQPAFSX

SEQ ID NO: 48823 - protein, 10 aa, Artificial Sequence
  Description of Artificial Sequence: Synthetic peptide
  Seed: GQISVQPTFS
  misc_feature (2)..(2): Xaa can be Gln, Lys, Met, His, Arg, or Glu
  misc_feature (10)..(10): Xaa can be Tyr, Phe, Met, Ala, Arg, Asn, Asp, Cys, Gln, Glu, Gly, His, Ile, Leu, Lys, Pro, Ser, Thr, Trp, or Val
GXISVQPTFX

SEQ ID NO: 48824 - protein, 11 aa, Artificial Sequence
  Description of Artificial Sequence: Synthetic peptide
  Seed: GQISVQPTFSV
  misc_feature (2)..(2): Xaa can be Gln, Leu, Met, Ile, Ala, Phe, Ser, Thr, or Val
  misc_feature (11)..(11): Xaa can be Val, Ile, Leu, Ala, or Met
GXISVQPTFSX

SEQ ID NO: 48825 - protein, 10 aa, Artificial Sequence
  Description of Artificial Sequence: Synthetic peptide
  Seed: GQLATRGVQI
  misc_feature (2)..(2): Xaa can be Leu, Met, Phe, Tyr, Ala, Arg, Asn, Asp, Cys, Gln, Glu, Gly, His, Ile, Lys, Pro, Ser, Thr, Trp, or Val
  misc_feature (10)..(10): Xaa can be Ile, Leu, Val, or Ala
GXLATRGVQX

SEQ ID NO: 48826 - protein, 8 aa, Artificial Sequence
  Description of Artificial Sequence: Synthetic peptide
  Seed: GQLSTRGF
  misc_feature (2)..(2): Xaa can be Gln
  misc_feature (8)..(8): Xaa can be Phe or Tyr
GXLSTRGX

SEQ ID NO: 48827 - protein, 10 aa, Artificial Sequence
  Description of Artificial Sequence: Synthetic peptide
  Seed: GQLSTRGFQI
  misc_feature (2)..(2): Xaa can be Arg, Gln, Met, Leu, Ile, Lys, Thr, or Val
  misc_feature (10)..(10): Xaa can be Val, Leu, Ile, Met, Phe, Ala, Cys, Thr, Trp, or Tyr
GXLSTRGFQX

SEQ ID NO: 48828 - protein, 10 aa, Artificial Sequence
  Description of Artificial Sequence: Synthetic peptide
  Seed: GQMSTRGVQI
  misc_feature (2)..(2): Xaa can be Gln, Met, Leu, Lys, Glu, His, Val, Ala, Arg, Asn, Asp, Cys, Gly, Ile, Phe, Pro, Ser, Thr, Trp, or Tyr
  misc_feature (10)..(10): Xaa can be Phe, Tyr, Met, Val, Leu, Trp, His, or Ile
GXMSTRGVQX

SEQ ID NO: 48829 - protein, 9 aa, Artificial Sequence
  Description of Artificial Sequence: Synthetic peptide
  Seed: GQVSVQPSF
  misc_feature (2)..(2): Xaa can be Arg, Gln, Met, Leu, Ile, Val, Thr, Ala, Glu, Lys, His, Ser, Asn, Phe, or Gly
  misc_feature (9)..(9): Xaa can be Tyr, Phe, Met, Val, Leu, Ile, Ala, Trp, Cys, or His
GXVSVQPSX

SEQ ID NO: 48830 - protein, 11 aa, Artificial Sequence
  Description of Artificial Sequence: Synthetic peptide
  Seed: GQVSVQPSFSV
  misc_feature (2)..(2): Xaa can be Gln, Ile, Leu, Met, Thr, or Val
  misc_feature (11)..(11): Xaa can be Val, Ile, or Leu
GXVSVQPSFSX

SEQ ID NO: 48831 - protein, 9 aa, Artificial Sequence
  Description of Artificial Sequence: Synthetic peptide
  Seed: GQVSVQPTF
  misc_feature (2)..(2): Xaa can be Arg, Gln, Met, Leu, Val, Glu, Ile, Ala, Lys, Thr, His, Ser, Asn, or Gly
  misc_feature (9)..(9): Xaa can be Tyr, Phe, Met, Val, Leu, Ile, Ala, Trp, Cys, Thr, or His
GXVSVQPTX

SEQ ID NO: 48832 - protein, 11 aa, Artificial Sequence
  Description of Artificial Sequence: Synthetic peptide
  Seed: GQVSVQPTFSV
  misc_feature (2)..(2): Xaa can be Leu, Met, Gln, Ile, Thr, or Val
  misc_feature (11)..(11): Xaa can be Val, Ile, Leu, Ala, or Met
GXVSVQPTFSX

SEQ ID NO: 48833 - protein, 9 aa, Artificial Sequence
  Description of Artificial Sequence: Synthetic peptide
  Seed: GRFYIQMCT
  misc_feature (2)..(2): Xaa can be Arg, Gln, or Lys
  misc_feature (9)..(9): Xaa can be Leu, Ile, Met, Phe, Val, Ala, Arg, Cys, Gln, Gly, His, Lys, Ser, Thr, Trp, or Tyr
GXFYIQMCX

SEQ ID NO: 48834 - protein, 11 aa, Artificial Sequence
  Description of Artificial Sequence: Synthetic peptide
  Seed: GRFYIQMCTEF
  misc_feature (2)..(2): Xaa can be Arg, Tyr, His, Ile, Leu, Lys, Met, Phe, Pro, Ser, Thr, Trp, or Val
  misc_feature (11)..(11): Xaa can be Phe, Trp, Ile, Leu, Ala, Arg, Lys, Met, Tyr, or Val
GXFYIQMCTEX

SEQ ID NO: 48835 - protein, 9 aa, Artificial Sequence
  Description of Artificial Sequence: Synthetic peptide
  Seed: GRFYVQMCT
  misc_feature (2)..(2): Xaa can be Arg, Gln, or Lys
  misc_feature (9)..(9): Xaa can be Leu, Ile, Met, Phe, Ala, Arg, Cys, Gly, His, Lys, Ser, Thr, Trp, Tyr, or Val
GXFYVQMCX

SEQ ID NO: 48836 - protein, 11 aa, Artificial Sequence
  Description of Artificial Sequence: Synthetic peptide
  Seed: GRFYVQMCTEL
  misc_feature (2)..(2): Xaa can be Arg
  misc_feature (11)..(11): Xaa can be Ala, Arg, Ile, Leu, Lys, Met, Phe, Tyr, or Val
GXFYVQMCTEX

SEQ ID NO: 48837 - protein, 11 aa, Artificial Sequence
  Description of Artificial Sequence: Synthetic peptide
  Seed: GRGVFEFSDER
  misc_feature (2)..(2): Xaa can be Met, Ala, Arg, Asn, Asp, Cys, Gln, Glu, Gly, His, Ile, Leu, Lys, Phe, Pro, Ser, Thr, Trp, Tyr, or Val
  misc_feature (11)..(11): Xaa can be Arg or Lys
GXGVFEFSDEX

SEQ ID NO: 48838 - protein, 10 aa, Artificial Sequence
  Description of Artificial Sequence: Synthetic peptide
  Seed: GRISDMRTEI
  misc_feature (2)..(2): Xaa can be Arg
  misc_feature (10)..(10): Xaa can be Arg, Ile, Leu, Lys, Met, Phe, Trp, Tyr, or Val
GXISDMRTEX

SEQ ID NO: 48839 - protein, 10 aa, Artificial Sequence
  Description of Artificial Sequence: Synthetic peptide
  Seed: GRKTRIAYER
  misc_feature (2)..(2): Xaa can be Arg
  misc_feature (10)..(10): Xaa can be Arg, Ile, Leu, Lys, Met, Phe, Tyr, or Val
GXKTRIAYEX

SEQ ID NO: 48840 - protein, 10 aa, Artificial Sequence
  Description of Artificial Sequence: Synthetic peptide
  Seed: GRLIQNSITI
  misc_feature (2)..(2): Xaa can be Arg, Tyr, Gln, Met, Phe, Pro, Ser, Thr, Trp, Val, Ala, Cys, His, Ile, Leu, Lys, Asn, Asp, Glu, or Gly
  misc_feature (10)..(10): Xaa can be Phe, Tyr, Met, Leu, Ile, Val, Ala, Arg, or Lys
GXLIQNSITX

SEQ ID NO: 48841 - protein, 8 aa, Artificial Sequence
  Description of Artificial Sequence: Synthetic peptide
  Seed: GRLIQNSL
  misc_feature (2)..(2): Xaa can be Arg
  misc_feature (8)..(8): Xaa can be Leu
GXLIQNSX

SEQ ID NO: 48842 - protein, 10 aa, Artificial Sequence
  Description of Artificial Sequence: Synthetic peptide
  Seed: GRLIQNSLTI
  misc_feature (2)..(2): Xaa can be Arg, Phe, Tyr, Ala, Asn, Asp, Cys, Gln, Glu, Gly, His, Ile, Leu, Lys, Met, Pro, Ser, Thr, Trp, or Val
  misc_feature (10)..(10): Xaa can be Ala, Ile, Leu, Val, Met, Arg, Lys, Phe, Trp, or Tyr
GXLIQNSLTX

SEQ ID NO: 48843 - protein, 10 aa, Artificial Sequence
  Description of Artificial Sequence: Synthetic peptide
  Seed: GRLIQNSMTI
  misc_feature (2)..(2): Xaa can be Arg, Phe, Leu, Met, Tyr, Ala, Asn, Asp, Cys, Gln, Glu, Gly, His, Ile, Lys, Pro, Ser, Thr, Trp, or Val
  misc_feature (10)..(10): Xaa can be Ala, Ile, Leu, Val, Met, Arg, Lys, Phe, Tyr, or Thr
GXLIQNSMTX

SEQ ID NO: 48844 - protein, 10 aa, Artificial Sequence
  Description of Artificial Sequence: Synthetic peptide
  Seed: GRLSTRGIQI
  misc_feature (2)..(2): Xaa can be Arg or Gln
  misc_feature (10)..(10): Xaa can be Leu, Ala, Arg, Ile, Lys, Met, Phe, Trp, Tyr, or Val
GXLSTRGIQX

SEQ ID NO: 48845 - protein, 10 aa, Artificial Sequence
  Description of Artificial Sequence: Synthetic peptide
  Seed: GRLSTRGVQI
  misc_feature (2)..(2): Xaa can be Arg
  misc_feature (10)..(10): Xaa can be Arg, Ile, Leu, Lys, Met, Phe, Trp, Tyr, or Val
GXLSTRGVQX

SEQ ID NO: 48846 - protein, 10 aa, Artificial Sequence
  Description of Artificial Sequence: Synthetic peptide
  Seed: GRLTRIAYER
  misc_feature (2)..(2): Xaa can be Arg, Ala, Asn, Gln, Gly, Ile, Leu, Met, Phe, Ser, Thr, Trp, Tyr, Val, Asp, Cys, Glu, His, Lys, or Pro
  misc_feature (10)..(10): Xaa can be Arg, Lys, Ala, His, Ile, Leu, Met, Phe, Trp, Tyr, or Val
GXLTRIAYEX

SEQ ID NO: 48847 - protein, 11 aa, Artificial Sequence
  Description of Artificial Sequence: Synthetic peptide
  Seed: GRLTRIAYERM
  misc_feature (2)..(2): Xaa can be Arg
  misc_feature (11)..(11): Xaa can be Arg, Ile, Leu, Lys, Met, Phe, or Tyr
GXLTRIAYERX

SEQ ID NO: 48848 - protein, 9 aa, Artificial Sequence
  Description of Artificial Sequence: Synthetic peptide
  Seed: GRMIDGIGR
  misc_feature (2)..(2): Xaa can be Arg
  misc_feature (9)..(9): Xaa can be Arg, His, Ile, Leu, Lys, Met, Phe, Trp, Tyr, or Val
GXMIDGIGX

SEQ ID NO: 48849 - protein, 9 aa, Artificial Sequence
  Description of Artificial Sequence: Synthetic peptide
  Seed: GRMIGGIGR
  misc_feature (2)..(2): Xaa can be Arg
  misc_feature (9)..(9): Xaa can be Ala, Arg, His, Ile, Leu, Lys, Met, Phe, Trp, Tyr, or Val
GXMIGGIGX

SEQ ID NO: 48850 - protein, 9 aa, Artificial Sequence
  Description of Artificial Sequence: Synthetic peptide
  Seed: GRMVSGIGR
  misc_feature (2)..(2): Xaa can be Arg
  misc_feature (9)..(9): Xaa can be Ala, Arg, Gly, His, Ile, Leu, Lys, Met, Phe, Trp, Tyr, or Val
GXMVSGIGX

SEQ ID NO: 48851 - protein, 10 aa, Artificial Sequence
  Description of Artificial Sequence: Synthetic peptide
  Seed: GRMVSGIGRF
  misc_feature (2)..(2): Xaa can be Arg, Gln, Lys, Met, Ala, Asn, Asp, Cys, Glu, Gly, His, Ile, Leu, Phe, Pro, Ser, Thr, Trp, Tyr, or Val
  misc_feature (10)..(10): Xaa can be Phe, Tyr, Met, Leu, Ala, Arg, Cys, Gln, Gly, His, Ile, Lys, Thr, Trp, or Val
GXMVSGIGRX

SEQ ID NO: 48852 - protein, 11 aa, Artificial Sequence
  Description of Artificial Sequence: Synthetic peptide
  Seed: GRMVSGIGRFY
  misc_feature (2)..(2): Xaa can be Arg, Gln, Met, Lys, Ala, Asn, His, Ile, Leu, Phe, Ser, Thr, Tyr, or Val
  misc_feature (11)..(11): Xaa can be Tyr, Phe, Met, Ala, Arg, His, Ile, Leu, Lys, Trp, or Val
GXMVSGIGRFX

SEQ ID NO: 48853 - protein, 9 aa, Artificial Sequence
  Description of Artificial Sequence: Synthetic peptide
  Seed: GRNPGNAEI
  misc_feature (2)..(2): Xaa can be Arg
  misc_feature (9)..(9): Xaa can be Ile, Leu, Met, Phe, or Val
GXNPGNAEX

SEQ ID NO: 48854 - protein, 10 aa, Artificial Sequence
  Description of Artificial Sequence: Synthetic peptide
  Seed: GRRTKIAYER
  misc_feature (2)..(2): Xaa can be Arg, Ala, Asn, Asp, Cys, Gln, Glu, Gly, His, Ile, Leu, Lys, Met, Phe, Pro, Ser, Thr, Trp, Tyr, or Val
  misc_feature (10)..(10): Xaa can be Arg, Leu, Lys, Met, Phe, Tyr, Ile, or Val
GXRTKIAYEX

SEQ ID NO: 48855 - protein, 10 aa, Artificial Sequence
  Description of Artificial Sequence: Synthetic peptide
  Seed: GRRTRIAYER
  misc_feature (2)..(2): Xaa can be Arg, Met, Ala, Asn, Asp, Cys, Gln, Glu, Gly, His, Ile, Leu, Lys, Phe, Pro, Ser, Thr, Trp, Tyr, or Val
  misc_feature (10)..(10): Xaa can be Arg, Ile, Leu, Lys, Met, Phe, Tyr, or Val
GXRTRIAYEX

SEQ ID NO: 48856 - protein, 10 aa, Artificial Sequence
  Description of Artificial Sequence: Synthetic peptide
  Seed: GRRTRTAYER
  misc_feature (2)..(2): Xaa can be Arg, Ala, Asn, Asp, Cys, Gln, Glu, Gly, His, Ile, Leu, Lys, Met, Phe, Pro, Ser, Thr, Trp, Tyr, or Val
  misc_feature (10)..(10): Xaa can be Arg, Leu, Lys, Met, Phe, Tyr, or Ile
GXRTRTAYEX

SEQ ID NO: 48857 - protein, 10 aa, Artificial Sequence
  Description of Artificial Sequence: Synthetic peptide
  Seed: GRRTRVAYER
  misc_feature (2)..(2): Xaa can be Arg, Ala, Asn, Asp, Cys, Gln, Glu, Gly, His, Ile, Leu, Lys, Met, Phe, Pro, Ser, Thr, Trp, Tyr, or Val
  misc_feature (10)..(10): Xaa can be Arg, Ile, Leu, Lys, Met, Phe, Tyr, or Val
GXRTRVAYEX

SEQ ID NO: 48858 - protein, 10 aa, Artificial Sequence
  Description of Artificial Sequence: Synthetic peptide
  Seed: GRTSDMRAEI
  misc_feature (2)..(2): Xaa can be Arg
  misc_feature (10)..(10): Xaa can be Ile, Leu, Met, or Phe
GXTSDMRAEX

SEQ ID NO: 48859 - protein, 10 aa, Artificial Sequence
  Description of Artificial Sequence: Synthetic peptide
  Seed: GRTSDMRIEI
  misc_feature (2)..(2): Xaa can be Arg
  misc_feature (10)..(10): Xaa can be Arg, Ile, Leu, Lys, Met, Phe, Tyr, or Val
GXTSDMRIEX

SEQ ID NO: 48860 - protein, 10 aa, Artificial Sequence
  Description of Artificial Sequence: Synthetic peptide
  Seed: GRTSDMRTEI
  misc_feature (2)..(2): Xaa can be Arg
  misc_feature (10)..(10): Xaa can be Ile, Leu, Met, or Phe
GXTSDMRTEX

SEQ ID NO: 48861 - protein, 8 aa, Artificial Sequence
  Description of Artificial Sequence: Synthetic peptide
  Seed: GRWMRELV
  misc_feature (2)..(2): Xaa can be Arg
  misc_feature (8)..(8): Xaa can be Arg, Ile, Leu, Lys, Met, Phe, Trp, Tyr, or Val
GXWMRELX

SEQ ID NO: 48862 - protein, 11 aa, Artificial Sequence
  Description of Artificial Sequence: Synthetic peptide
  Seed: GRWMRELVLYD
  misc_feature (2)..(2): Xaa can be Arg
  misc_feature (11)..(11): Xaa can be Ala, Arg, Asn, Asp, Cys, Gln, Glu, Gly, His, Ile, Leu, Lys, Met, Phe, Pro, Ser, Thr, Trp, Tyr, or Val
GXWMRELVLYX

SEQ ID NO: 48863 - protein, 10 aa, Artificial Sequence
  Description of Artificial Sequence: Synthetic peptide
  Seed: GSSTLELRSR
  misc_feature (2)..(2): Xaa can be Ala, Gln, Ile, Leu, Met, Phe, Ser, Thr, Trp, Tyr, or Val
  misc_feature (10)..(10): Xaa can be Arg
GXSTLELRSX

SEQ ID NO: 48864 - protein, 11 aa, Artificial Sequence
  Description of Artificial Sequence: Synthetic peptide
  Seed: GSSTLELRSRY
  misc_feature (2)..(2): Xaa can be Arg, Met, Ser, or Thr
  misc_feature (11)..(11): Xaa can be Tyr
GXSTLELRSRX

SEQ ID NO: 48865 - protein, 10 aa, Artificial Sequence
  Description of Artificial Sequence: Synthetic peptide
  Seed: GTIAMELIGM
  misc_feature (2)..(2): Xaa can be Gln, Ile, Leu, Met, Thr, Val, Ala, Phe, Ser, Tyr, Arg, Asn, Asp, Cys, Glu, Gly, His, Lys, Pro, or Trp
  misc_feature (10)..(10): Xaa can be Val, Ile, Leu, Ala, Met, Phe, or Thr
GXIAMELIGX

SEQ ID NO: 48866 - protein, 9 aa, Artificial Sequence
  Description of Artificial Sequence: Synthetic peptide
  Seed: GTIAMELIR
  misc_feature (2)..(2): Xaa can be Ser, Thr, Val, Ala, Gln, Ile, Leu, Met, Tyr, Gly, Phe, or Trp
  misc_feature (9)..(9): Xaa can be Arg, Lys, or Tyr
GXIAMELIX

SEQ ID NO: 48867 - protein, 10 aa, Artificial Sequence
  Description of Artificial Sequence: Synthetic peptide
  Seed: GTIAMELIRM
  misc_feature (2)..(2): Xaa can be Ser, Thr, or Ala
  misc_feature (10)..(10): Xaa can be Phe, Trp, Tyr, or Met
GXIAMELIRX

SEQ ID NO: 48868 - protein, 9 aa, Artificial Sequence
  Description of Artificial Sequence: Synthetic peptide
  Seed: GTIVMELIR
  misc_feature (2)..(2): Xaa can be Thr, Ile, Leu, Met, Ser, Val, Ala, Gln, Phe, Trp, or Tyr
  misc_feature (9)..(9): Xaa can be Arg, Lys, or Tyr
GXIVMELIX

SEQ ID NO: 48869 - protein, 9 aa, Artificial Sequence
  Description of Artificial Sequence: Synthetic peptide
  Seed: GTKRPYEQM
  misc_feature (2)..(2): Xaa can be Thr, Ser, Val, Ala, Met, Gln, Gly, Ile, Leu, Phe, Trp, or Tyr
  misc_feature (9)..(9): Xaa can be Lys, Ala, Ile, Val, Leu, Met, or Ser
GXKRPYEQX

SEQ ID NO: 48870 - protein, 9 aa, Artificial Sequence
  Description of Artificial Sequence: Synthetic peptide
  Seed: GTKRSYEQM
  misc_feature (2)..(2): Xaa can be Thr, Ser, Val, Ala, Ile, Met, Gln, Gly, Leu, Phe, Trp, or Tyr
  misc_feature (9)..(9): Xaa can be Lys, Ala, Ile, Val, Arg, Leu, Met, Ser, or Tyr
GXKRSYEQX

SEQ ID NO: 48871 - protein, 9 aa, Artificial Sequence
  Description of Artificial Sequence: Synthetic peptide
  Seed: GTKVCPRGK
  misc_feature (2)..(2): Xaa can be Thr, Ser, Val, Ala, Gln, Gly, Ile, Leu, Met, Phe, or Tyr
  misc_feature (9)..(9): Xaa can be Lys, Ala, Ile, Val, Leu, or Met
GXKVCPRGX

SEQ ID NO: 48872 - protein, 9 aa, Artificial Sequence
  Description of Artificial Sequence: Synthetic peptide
  Seed: GTKVFPRGK
  misc_feature (2)..(2): Xaa can be Thr, Ser, Val, Ala, Ile, Tyr, Gln, Gly, Leu, Met, Phe, or Trp
  misc_feature (9)..(9): Xaa can be Arg, Lys, Ala, Ile, Val, Leu, Met, Ser, Gly, Thr, or Tyr
GXKVFPRGX

SEQ ID NO: 48873 - protein, 9 aa, Artificial Sequence
  Description of Artificial Sequence: Synthetic peptide
  Seed: GTKVIPRGK
  misc_feature (2)..(2): Xaa can be Thr, Ser, Val, Ala, Gln, Gly, Ile, Leu, Met, Phe, or Tyr
  misc_feature (9)..(9): Xaa can be Lys, Ala, Val, Ile, Leu, Met, or Ser
GXKVIPRGX

SEQ ID NO: 48874 - protein, 9 aa, Artificial Sequence
  Description of Artificial Sequence: Synthetic peptide
  Seed: GTKVLPRGK
  misc_feature (2)..(2): Xaa can be Thr, Ser, Val, Ala, Gln, Ile, Met, Phe, or Tyr
  misc_feature (9)..(9): Xaa can be Lys, Ala, Val, Ile, Leu, or Met
GXKVLPRGX

SEQ ID NO: 48875 - protein, 9 aa, Artificial Sequence
  Description of Artificial Sequence: Synthetic peptide
  Seed: GTKVSPRGK
  misc_feature (2)..(2): Xaa can be Thr, Ser, Val, Ala, Ile, Gln, Gly, Leu, Met, Phe, or Tyr
  misc_feature (9)..(9): Xaa can be Lys, Ala, Ile, Val, Leu, Met, or Ser
GXKVSPRGX

SEQ ID NO: 48876 - protein, 9 aa, Artificial Sequence
  Description of Artificial Sequence: Synthetic peptide
  Seed: GTKVVPRGK
  misc_feature (2)..(2): Xaa can be Thr, Ser, Val, Ala, Gln, Gly, Ile, Leu, Met, Phe, or Tyr
  misc_feature (9)..(9): Xaa can be Arg, Lys, Ala, Val, Ile, Leu, Met, or Ser
GXKVVPRGX

SEQ ID NO: 48877 - protein, 9 aa, Artificial Sequence
  Description of Artificial Sequence: Synthetic peptide
  Seed: GTMIMELIR
  misc_feature (2)..(2): Xaa can be Ser, Thr, Val, Ala, Gln, Ile, Leu, Met, Phe, Trp, Tyr, Asn, or Gly
  misc_feature (9)..(9): Xaa can be Arg, Lys, or Tyr
GXMIMELIX

SEQ ID NO: 48878 - protein, 9 aa, Artificial Sequence
  Description of Artificial Sequence: Synthetic peptide
  Seed: GTMNMELIR
  misc_feature (2)..(2): Xaa can be Thr, Ile, Leu, Met, Ser, Val, Ala, Gln, Gly, Phe, Trp, Tyr, or Asn
  misc_feature (9)..(9): Xaa can be Arg, Lys, Tyr, or His
GXMNMELIX

SEQ ID NO: 48879 - protein, 10 aa, Artificial Sequence
  Description of Artificial Sequence: Synthetic peptide
  Seed: GTMNMELIRM
  misc_feature (2)..(2): Xaa can be Ser, Thr, Ala, or Val
  misc_feature (10)..(10): Xaa can be Trp, Phe, Tyr, or Met
GXMNMELIRX

SEQ ID NO: 48880 - protein, 9 aa, Artificial Sequence
  Description of Artificial Sequence: Synthetic peptide
  Seed: GTMVLELIR
  misc_feature (2)..(2): Xaa can be Ser, Thr, Val, Ala, Gln, Ile, Leu, Met, Phe, Trp, Tyr, Asn, or Gly
  misc_feature (9)..(9): Xaa can be Arg, Lys, or Tyr
GXMVLELIX

SEQ ID NO: 48881 - protein, 10 aa, Artificial Sequence
  Description of Artificial Sequence: Synthetic peptide
  Seed: GTMVLELIRI
  misc_feature (2)..(2): Xaa can be Leu, Met, Phe, Tyr, Ala, Arg, Asn, Asp, Cys, Gln, Glu, Gly, His, Ile, Lys, Pro, Ser, Thr, Trp, or Val
  misc_feature (10)..(10): Xaa can be Ala, Ile, Val, or Leu
GXMVLELIRX

SEQ ID NO: 48882 - protein, 10 aa, Artificial Sequence
  Description of Artificial Sequence: Synthetic peptide
  Seed: GTMVMELIQM
  misc_feature (2)..(2): Xaa can be Ser, Thr, or Ala
  misc_feature (10)..(10): Xaa can be Trp, Met, Phe, or Tyr
GXMVMELIQX

SEQ ID NO: 48883 - protein, 11 aa, Artificial Sequence
  Description of Artificial Sequence: Synthetic peptide
  Seed: GTMVMELIQMI
  misc_feature (2)..(2): Xaa can be Leu, Met, Arg, Lys, Phe, Tyr, Ala, Ile, Ser, Asn, Asp, Cys, Gln, Glu, Gly, His, Pro, Thr, Trp, or Val
  misc_feature (11)..(11): Xaa can be Ile, Leu, Val, Ala, Met, or Thr
GXMVMELIQMX

SEQ ID NO: 48884 - protein, 9 aa, Artificial Sequence
  Description of Artificial Sequence: Synthetic peptide
  Seed: GTMVMELIR
  misc_feature (2)..(2): Xaa can be Met, Ser, Thr, Val, Ala, Gln, Ile, Leu, Phe, Trp, Tyr, Asn, or Gly
  misc_feature (9)..(9): Xaa can be Arg, Lys, or Tyr
GXMVMELIX

SEQ ID NO: 48885 - protein, 11 aa, Artificial Sequence
  Description of Artificial Sequence: Synthetic peptide
  Seed: GTMVMELIRMV
  misc_feature (2)..(2): Xaa can be Leu, Met, Tyr, Phe, Arg, Lys, Ser, Ala, Ile, Trp, Asn, Asp, Cys, Gln, Glu, Gly, His, Pro, Thr, or Val
  misc_feature (11)..(11): Xaa can be Val, Leu, Ile, Ala, or Met
GXMVMELIRMX

SEQ ID NO: 48886 - protein, 9 aa, Artificial Sequence
  Description of Artificial Sequence: Synthetic peptide
  Seed: GTMVMELVR
  misc_feature (2)..(2): Xaa can be Met, Ser, Thr, Val, Ala, Gln, Ile, Leu, Phe, Tyr, Asn, Gly, or Trp
  misc_feature (9)..(9): Xaa can be Arg, Lys, or Tyr
GXMVMELVX

SEQ ID NO: 48887 - protein, 10 aa, Artificial Sequence
  Description of Artificial Sequence: Synthetic peptide
  Seed: GTMVMELVRM
  misc_feature (2)..(2): Xaa can be Ser, Thr, or Ala
  misc_feature (10)..(10): Xaa can be Trp, Tyr, Met, or Phe
GXMVMELVRX

SEQ ID NO: 48888 - protein, 10 aa, Artificial Sequence
  Description of Artificial Sequence: Synthetic peptide
  Seed: GTRIVPRGQL
  misc_feature (2)..(2): Xaa can be Ala, Arg, Asn, Asp, Cys, Gln, Glu, Gly, His, Ile, Leu, Lys, Met, Phe, Pro, Ser, Thr, Trp, Tyr, or Val
  misc_feature (10)..(10): Xaa can be Leu
GXRIVPRGQX

SEQ ID NO: 48889 - protein, 10 aa, Artificial Sequence
  Description of Artificial Sequence: Synthetic peptide
  Seed: GTRLVPRGQL
  misc_feature (2)..(2): Xaa can be Thr, Ser, Ala, Arg, Gln, Gly, Ile, Met, Phe, Tyr, Val, Asn, Asp, Cys, Glu, His, Leu, Lys, Pro, or Trp
  misc_feature (10)..(10): Xaa can be Leu, Lys, Ala, Val, Phe, Ile, or Met
GXRLVPRGQX

SEQ ID NO: 48890 - protein, 9 aa, Artificial Sequence
  Description of Artificial Sequence: Synthetic peptide
  Seed: GTRMVPRGK
  misc_feature (2)..(2): Xaa can be Thr, Ser, Val, Ala, Ile, Met, Tyr, Gly, Phe, Trp, Gln, Asn, Cys, or Leu
  misc_feature (9)..(9): Xaa can be Lys, Ala, Val, Ile, Leu, Gly, Met, Ser, Tyr, Arg, Cys, Phe, Thr, Asn, Gln, or Pro
GXRMVPRGX

SEQ ID NO: 48891 - protein, 10 aa, Artificial Sequence
  Description of Artificial Sequence: Synthetic peptide
  Seed: GTRMVPRGKL
  misc_feature (2)..(2): Xaa can be Thr, Ser, Arg, Ala, Asn, Asp, Cys, Gln, Glu, Gly, His, Ile, Leu, Lys, Met, Phe, Pro, Trp, Tyr, or Val
  misc_feature (10)..(10): Xaa can be Arg, Leu, Lys, Met, Phe, Tyr, Ile, Ala, or Val
GXRMVPRGKX

SEQ ID NO: 48892 - protein, 10 aa, Artificial Sequence
  Description of Artificial Sequence: Synthetic peptide
  Seed: GTRVAPRGQL
  misc_feature (2)..(2): Xaa can be Thr, Ser, Val, Ala, Gln, Gly, Ile, Leu, Met, Phe, or Tyr
  misc_feature (10)..(10): Xaa can be Lys, Ala, Val, Ile, Leu, Met, Ser, or Tyr
GXRVAPRGQX

SEQ ID NO: 48893 - protein, 9 aa, Artificial Sequence
  Description of Artificial Sequence: Synthetic peptide
  Seed: GTRVLPRGK
  misc_feature (2)..(2): Xaa can be Thr, Ser, Val, Ala, Ile, Met, Phe, Tyr, Gln, Gly, Leu, or Trp
  misc_feature (9)..(9): Xaa can be Lys, Ala, Ile, Leu, Met, Val, Arg, Ser, Tyr, Gly, Phe, or Thr
GXRVLPRGX

SEQ ID NO: 48894 - protein, 9 aa, Artificial Sequence
  Description of Artificial Sequence: Synthetic peptide
  Seed: GTRVVPRGK
  misc_feature (2)..(2): Xaa can be Thr, Ser, Val, Ile, Ala, Met, Tyr, Phe, Asn, Gln, Gly, Leu, or Trp
  misc_feature (9)..(9): Xaa can be Lys, Ala, Val, Ile, Leu, Met, Ser, Tyr, Arg, Gly, Thr, Cys, Phe, or Pro
GXRVVPRGX

SEQ ID NO: 48895 - protein, 9 aa, Artificial Sequence
  Description of Artificial Sequence: Synthetic peptide
  Seed: GTTRSYEQM
  misc_feature (2)..(2): Xaa can be Ser, Thr, Ala, or Val
  misc_feature (9)..(9): Xaa can be Trp, Phe, Tyr, or Met
GXTRSYEQX

SEQ ID NO: 48896 - protein, 9 aa, Artificial Sequence
  Description of Artificial Sequence: Synthetic peptide
  Seed: GTVVMELIR
  misc_feature (2)..(2): Xaa can be Met, Phe, Ser, Thr, or Tyr
  misc_feature (9)..(9): Xaa can be Arg
GXVVMELIX

SEQ ID NO: 48897 - protein, 9 aa, Artificial Sequence
  Description of Artificial Sequence: Synthetic peptide
  Seed: GVFEFSDER
  misc_feature (2)..(2): Xaa can be Ile, Thr, Val, Ala, Gln, Leu, Met, Phe, Ser, Trp, Tyr, Asn, or Gly
  misc_feature (9)..(9): Xaa can be Arg, Lys, or Tyr
GXFEFSDEX

SEQ ID NO: 48898 - protein, 10 aa, Artificial Sequence
  Description of Artificial Sequence: Synthetic peptide
  Seed: GVFEFSDERA
  misc_feature (2)..(2): Xaa can be Leu, Met, Val, Gln, Ile, Thr, Ala, or Ser
  misc_feature (10)..(10): Xaa can be Val, Ile, Leu, Met, or Ala
GXFEFSDERX

SEQ ID NO: 48899 - protein, 9 aa, Artificial Sequence
  Description of Artificial Sequence: Synthetic peptide
  Seed: GVFELSDEK
  misc_feature (2)..(2): Xaa can be Thr, Ala, Ile, Leu, Met, Ser, Val, or Gln
  misc_feature (9)..(9): Xaa can be Lys, Arg, or Tyr
GXFELSDEX

SEQ ID NO: 48900 - protein, 9 aa, Artificial Sequence
  Description of Artificial Sequence: Synthetic peptide
  Seed: GVGTIAMEL
  misc_feature (2)..(2): Xaa can be Leu, Met, Ile, Val, or Gln
  misc_feature (9)..(9): Xaa can be Val, Leu, Ile, Ala, Met, or Thr
GXGTIAMEX

SEQ ID NO: 48901 - protein, 9 aa, Artificial Sequence
  Description of Artificial Sequence: Synthetic peptide
  Seed: GVGTIVMEL
  misc_feature (2)..(2): Xaa can be Leu, Met, Ile, Val, Gln, Thr, Ala, or Ser
  misc_feature (9)..(9): Xaa can be Val, Ile, Leu, Ala, Met, Cys, Ser, or Thr
GXGTIVMEX

SEQ ID NO: 48902 - protein, 9 aa, Artificial Sequence
  Description of Artificial Sequence: Synthetic peptide
  Seed: GVGTMIMEL
  misc_feature (2)..(2): Xaa can be Leu, Met, Ile, Gln, Val, Ala, or Thr
  misc_feature (9)..(9): Xaa can be Val, Ile, Leu, Ala, Cys, Met, or Thr
GXGTMIMEX

SEQ ID NO: 48903 - protein, 11 aa, Artificial Sequence
  Description of Artificial Sequence: Synthetic peptide
  Seed: GVGTMNMELIR
  misc_feature (2)..(2): Xaa can be Ala, Arg, Asn, Asp, Cys, Gln, Glu, Gly, His, Ile, Leu, Lys, Met, Phe, Pro, Ser, Thr, Trp, Tyr, or Val
  misc_feature (11)..(11): Xaa can be Arg
GXGTMNMELIX

SEQ ID NO: 48904 - protein, 9 aa, Artificial Sequence
  Description of Artificial Sequence: Synthetic peptide
  Seed: GVGTMVLEL
  misc_feature (2)..(2): Xaa can be Leu, Met, Ile, Val, Gln, or Thr
  misc_feature (9)..(9): Xaa can be Val, Ile, Leu, Ala, Cys, Met, or Thr
GXGTMVLEX

SEQ ID NO: 48905 - protein, 11 aa, Artificial Sequence
  Description of Artificial Sequence: Synthetic peptide
  Seed: GVGTMVLELIR
  misc_feature (2)..(2): Xaa can be Arg, Gln, Leu, Lys, Met, Phe, Trp, Tyr, or Val
  misc_feature (11)..(11): Xaa can be Arg
GXGTMVLELIX

SEQ ID NO: 48906 - protein, 10 aa, Artificial Sequence
  Description of Artificial Sequence: Synthetic peptide
  Seed: GVGTMVMELV
  misc_feature (2)..(2): Xaa can be Leu, Met, Gln, Ile, or Val
  misc_feature (10)..(10): Xaa can be Val, Leu, Ala, Ile, Met, Thr, Arg, Asn, Asp, Cys, Gln, Glu, Gly, His, Lys, Phe, Pro, Ser, Trp, or Tyr
GXGTMVMELX

SEQ ID NO: 48907 - protein, 11 aa, Artificial Sequence
  Description of Artificial Sequence: Synthetic peptide
  Seed: GVGTMVMELVR
  misc_feature (2)..(2): Xaa can be Arg, Gln, Leu, Lys, Met, Phe, Trp, Tyr, or Val
  misc_feature (11)..(11): Xaa can be Arg
GXGTMVMELVX

SEQ ID NO: 48908 - protein, 9 aa, Artificial Sequence
  Description of Artificial Sequence: Synthetic peptide
  Seed: GVGTVVMEL
  misc_feature (2)..(2): Xaa can be Leu, Met, Ile, Gln, Val, Ala, or Thr
  misc_feature (9)..(9): Xaa can be Val, Ile, Leu, Ala, Met, Cys, Ser, or Thr
GXGTVVMEX

SEQ ID NO: 48909 - protein, 11 aa, Artificial Sequence
  Description of Artificial Sequence: Synthetic peptide
  Seed: GYAFEKEGYSL
  misc_feature (2)..(2): Xaa can be Tyr, Phe, or Trp
  misc_feature (11)..(11): Xaa can be Phe, Ile, Leu, or Trp
GXAFEKEGYSX

SEQ ID NO: 48910 - protein, 11 aa, Artificial Sequence
  Description of Artificial Sequence: Synthetic peptide
  Seed: GYEFEKEGYSL
  misc_feature (2)..(2): Xaa can be Arg, Ala, Glu, Gly, Lys, Met, Ser, Trp, or Tyr
  misc_feature (11)..(11): Xaa can be Leu, Ile, Met, or Val
GXEFEKEGYSX

SEQ ID NO: 48911 - protein, 11 aa, Artificial Sequence
  Description of Artificial Sequence: Synthetic peptide
  Seed: GYEFEREGYSL
  misc_feature (2)..(2): Xaa can be Arg, Ala, Glu, Gly, Lys, Met, Phe, Ser, Trp, or Tyr
  misc_feature (11)..(11): Xaa can be Leu, Ile, Met, Phe, or Val
GXEFEREGYSX

SEQ ID NO: 48912 - protein, 11 aa, Artificial Sequence
  Description of Artificial Sequence: Synthetic peptide
  Seed: GYNFEKEGYSL
  misc_feature (2)..(2): Xaa can be Tyr or Trp
  misc_feature (11)..(11): Xaa can be Phe, Ile, Leu, or Trp
GXNFEKEGYSX

SEQ ID NO: 48913 - protein, 10 aa, Artificial Sequence
  Description of Artificial Sequence: Synthetic peptide
  Seed: GYSLIGIDPF
  misc_feature (2)..(2): Xaa can be Tyr, Trp, or Phe
  misc_feature (10)..(10): Xaa can be Phe, Trp, Ile, Leu, or Met
GXSLIGIDPX

SEQ ID NO: 48914 - protein, 11 aa, Artificial Sequence
  Description of Artificial Sequence: Synthetic peptide
  Seed: GYSLIGIDPFK
  misc_feature (2)..(2): Xaa can be Met, Phe, Tyr, Ala, Arg, Asn, Cys, Gln, Glu, Gly, His, Ile, Leu, Lys, Ser, Thr, Trp, or Va l
  misc_feature (11)..(11): Xaa can be Arg or Lys
GXSLIGIDPFX

SEQ ID NO: 48915 - protein, 10 aa, Artificial Sequence
  Description of Artificial Sequence: Synthetic peptide
  Seed: GYSLVGIDPF
  misc_feature (2)..(2): Xaa can be Tyr, Trp, or Phe
  misc_feature (10)..(10): Xaa can be Phe, Trp, Ile, Leu, or Met
GXSLVGIDPX

SEQ ID NO: 48916 - protein, 11 aa, Artificial Sequence
  Description of Artificial Sequence: Synthetic peptide
  Seed: GYSLVGIDPFR
  misc_feature (2)..(2): Xaa can be Ala, Arg, Asn, Gln, Gly, Ile, Leu, Lys, Met, Phe, Ser, Thr, Trp, Tyr, or Val
  misc_feature (11)..(11): Xaa can be Arg
GXSLVGIDPFX

SEQ ID NO: 48917 - protein, 10 aa, Artificial Sequence
  Description of Artificial Sequence: Synthetic peptide
  Seed: GYSLVGIDSF
  misc_feature (2)..(2): Xaa can be Tyr, Trp, or Phe
  misc_feature (10)..(10): Xaa can be Phe, Trp, Ile, Leu, or Met
GXSLVGIDSX

SEQ ID NO: 48918 - protein, 11 aa, Artificial Sequence
  Description of Artificial Sequence: Synthetic peptide
  Seed: GYSLVGIDSFR
  misc_feature (2)..(2): Xaa can be Met, Phe, Thr, Tyr, Ala, Arg, Asn, Cys, Gln, Glu, Gly, His, Ile, Leu, Lys, Ser, Trp, or Va l
  misc_feature (11)..(11): Xaa can be Arg or Lys
GXSLVGIDSFX

SEQ ID NO: 48919 - protein, 10 aa, Artificial Sequence
  Description of Artificial Sequence: Synthetic peptide
  Seed: GYSLVGIEPF
  misc_feature (2)..(2): Xaa can be Tyr, Phe, or Trp
  misc_feature (10)..(10): Xaa can be Phe, Trp, Ile, Leu, or Met
GXSLVGIEPX

SEQ ID NO: 48920 - protein, 10 aa, Artificial Sequence
  Description of Artificial Sequence: Synthetic peptide
  Seed: GYSLVGVDPF
  misc_feature (2)..(2): Xaa can be Tyr, Trp, or Phe
  misc_feature (10)..(10): Xaa can be Phe, Trp, Ile, Leu, or Met
GXSLVGVDPX

SEQ ID NO: 48921 - protein, 11 aa, Artificial Sequence
  Description of Artificial Sequence: Synthetic peptide
  Seed: GYSLVGVDPFK
  misc_feature (2)..(2): Xaa can be Tyr, Ala, Arg, Asn, Gln, Gly, Ile, Leu, Lys, Met, Phe, Ser, Thr, Trp, or Val
  misc_feature (11)..(11): Xaa can be Arg or Lys
GXSLVGVDPFX

SEQ ID NO: 48922 - protein, 10 aa, Artificial Sequence
  Description of Artificial Sequence: Synthetic peptide
  Seed: HDFEREGYSL
  misc_feature (2)..(2): Xaa can be Glu or Asp
  misc_feature (10)..(10): Xaa can be Leu, Ala, Cys, Ile, Met, Phe, Thr, or Val
HXFEREGYSX

SEQ ID NO: 48923 - protein, 10 aa, Artificial Sequence
  Description of Artificial Sequence: Synthetic peptide
  Seed: HEGRLIQNSI
  misc_feature (2)..(2): Xaa can be Glu
  misc_feature (10)..(10): Xaa can be Ile, Leu, Met, Phe, or Val
HXGRLIQNSX

SEQ ID NO: 48924 - protein, 9 aa, Artificial Sequence
  Description of Artificial Sequence: Synthetic peptide
  Seed: HGLAVASGY
  misc_feature (2)..(2): Xaa can be Gln, Pro, Met, Lys, Ala, Arg, Glu, His, Ile, Leu, Ser, Thr, Val, Asn, Gly, Phe, Trp, Tyr, or Cys
  misc_feature (9)..(9): Xaa can be Tyr, Phe, Met, Leu, Trp, Ile, His, Ala, or Val
HXLAVASGX

SEQ ID NO: 48925 - protein, 9 aa, Artificial Sequence
  Description of Artificial Sequence: Synthetic peptide
  Seed: HIMIWHSNL
  misc_feature (2)..(2): Xaa can be Pro, Leu, Met, Thr, Gln, Ser, Val, Ile, Ala, Asn, Gly, Phe, or Tyr
  misc_feature (9)..(9): Xaa can be Trp, Val, Ile, Leu, Met, Phe, Ala, Tyr, Thr, Cys, Gly, or Ser
HXMIWHSNX

SEQ ID NO: 48926 - protein, 10 aa, Artificial Sequence
  Description of Artificial Sequence: Synthetic peptide
  Seed: HISVQPTFSV
  misc_feature (2)..(2): Xaa can be Thr, Leu, Met, Val, Gln, Ile, Ala, Arg, Asn, Asp, Cys, Glu, Gly, His, Lys, Phe, Pro, Ser, Trp, or Tyr
  misc_feature (10)..(10): Xaa can be Ile, Val, Leu, Ala, Met, or Thr
HXSVQPTFSX

SEQ ID NO: 48927 - protein, 10 aa, Artificial Sequence
  Description of Artificial Sequence: Synthetic peptide
  Seed: HKSCLPACVY
  misc_feature (2)..(2): Xaa can be Gln, Lys, Met, Arg, Glu, His, Leu, Val, Ala, Asn, Ile, Phe, Ser, Thr, Tyr, Asp, Cys, Gly, Pro, or Trp
  misc_feature (10)..(10): Xaa can be Tyr, Phe, Met, Leu, His, Ile, or Trp
HXSCLPACVX

SEQ ID NO: 48928 - protein, 10 aa, Artificial Sequence
  Description of Artificial Sequence: Synthetic peptide
  Seed: HKSCLPTCVY
  misc_feature (2)..(2): Xaa can be Gln, Lys, Met, Ser, Thr, Ala, Arg, Glu, His, Ile, Leu, Val, Asn, Asp, Cys, Gly, Phe, Pro, Trp, or Tyr
  misc_feature (10)..(10): Xaa can be Phe, Trp, Tyr, Met, Leu, His, or Ile
HXSCLPTCVX

SEQ ID NO: 48929 - protein, 9 aa, Artificial Sequence
  Description of Artificial Sequence: Synthetic peptide
  Seed: HKSQLAWMA
  misc_feature (2)..(2): Xaa can be Arg, His, Gln, or Lys
  misc_feature (9)..(9): Xaa can be Ala, Leu, or Val
HXSQLAWMX

SEQ ID NO: 48930 - protein, 9 aa, Artificial Sequence
  Description of Artificial Sequence: Synthetic peptide
  Seed: HKSQLVWMA
  misc_feature (2)..(2): Xaa can be His, Arg, Gln, or Lys
  misc_feature (9)..(9): Xaa can be Ala, Leu, Val, Ile, or Thr
HXSQLVWMX

SEQ ID NO: 48931 - protein, 10 aa, Artificial Sequence
  Description of Artificial Sequence: Synthetic peptide
  Seed: HRASAGQISV
  misc_feature (2)..(2): Xaa can be Arg
  misc_feature (10)..(10): Xaa can be Ile, Leu, Met, Phe, or Val
HXASAGQISX

SEQ ID NO: 48932 - protein, 9 aa, Artificial Sequence
  Description of Artificial Sequence: Synthetic peptide
  Seed: HSAAFEDLR
  misc_feature (2)..(2): Xaa can be Thr, Ala, Ile, Met, Ser, Val, Asn, Gln, Gly, Leu, Phe, Pro, Trp, Tyr, or Cys
  misc_feature (9)..(9): Xaa can be Arg, Lys, Tyr, or His
HXAAFEDLX

SEQ ID NO: 48933 - protein, 10 aa, Artificial Sequence
  Description of Artificial Sequence: Synthetic peptide
  Seed: HSAAFEDLRI
  misc_feature (2)..(2): Xaa can be Ser, Ala, Thr, Val, Arg, Asn, Asp, Cys, Gln, Glu, Gly, His, Ile, Leu, Lys, Met, Phe, Pro, Trp, or Tyr
  misc_feature (10)..(10): Xaa can be Trp, Phe, Tyr, Ile, Leu, Met, or Val
HXAAFEDLRX

SEQ ID NO: 48934 - protein, 11 aa, Artificial Sequence
  Description of Artificial Sequence: Synthetic peptide
  Seed: HSAAFEDLRLF
  misc_feature (2)..(2): Xaa can be Ser, Thr, Ala, Arg, Asn, Asp, Cys, Gln, Glu, Gly, His, Ile, Leu, Lys, Met, Phe, Pro, Trp, Tyr, or Val
  misc_feature (11)..(11): Xaa can be Phe, Trp, Tyr, Leu, or Met
HXAAFEDLRLX

SEQ ID NO: 48935 - protein, 11 aa, Artificial Sequence
  Description of Artificial Sequence: Synthetic peptide
  Seed: HSAAFEDLRVL
  misc_feature (2)..(2): Xaa can be Ser, Thr, Ala, Val, Met, Arg, Asn, Asp, Cys, Gln, Glu, Gly, His, Ile, Leu, Lys, Phe, Pro, Trp, or Tyr
  misc_feature (11)..(11): Xaa can be Trp, Phe, Tyr, Leu, or Met
HXAAFEDLRVX

SEQ ID NO: 48936 - protein, 9 aa, Artificial Sequence
  Description of Artificial Sequence: Synthetic peptide
  Seed: HSNLNDATY
  misc_feature (2)..(2): Xaa can be Pro, Gln, Ala, Met, Ser, Lys, Thr, Val, Cys, Gly, Ile, Leu, Phe, Arg, Asn, Glu, His, Tyr, or Trp
  misc_feature (9)..(9): Xaa can be Tyr, Phe, Met, Trp, Leu, Ile, Val, His, Ala, Cys, Gln, Glu, Ser, or Thr
HXNLNDATX

SEQ ID NO: 48937 - protein, 11 aa, Artificial Sequence
  Description of Artificial Sequence: Synthetic peptide
  Seed: HSNLNDATYQR
  misc_feature (2)..(2): Xaa can be Ala, Ile, Met, Phe, Thr, Tyr, Val, Arg, Asn, Asp, Cys, Gln, Glu, Gly, His, Leu, Lys, Pro, Ser, or Trp
  misc_feature (11)..(11): Xaa can be Arg or Lys
HXNLNDATYQX

SEQ ID NO: 48938 - protein, 9 aa, Artificial Sequence
  Description of Artificial Sequence: Synthetic peptide
  Seed: HSNLNDSTY
  misc_feature (2)..(2): Xaa can be Pro, Gln, Ala, Met, Ser, Lys, Thr, Val, Ile, Leu, Arg, Asn, Cys, Glu, Gly, His, Phe, or Ty r
  misc_feature (9)..(9): Xaa can be Phe, Tyr, Met, Trp, Leu, Ile, Val, His, Ala, Cys, Gln, or Thr
HXNLNDSTX

SEQ ID NO: 48939 - protein, 11 aa, Artificial Sequence
  Description of Artificial Sequence: Synthetic peptide
  Seed: HSNLNDSTYQR
  misc_feature (2)..(2): Xaa can be Ala, Ile, Met, Phe, Thr, Tyr, Val, Arg, Asn, Asp, Cys, Gln, Glu, Gly, His, Leu, Lys, Pro, Ser, or Trp
  misc_feature (11)..(11): Xaa can be Arg or Lys
HXNLNDSTYQX

SEQ ID NO: 48940 - protein, 9 aa, Artificial Sequence
  Description of Artificial Sequence: Synthetic peptide
  Seed: HSNLNDTTY
  misc_feature (2)..(2): Xaa can be Pro, Gln, Ala, Met, Ser, Lys, Thr, Val, Cys, Ile, Leu, Arg, Asn, Glu, Gly, His, Phe, or Ty r
  misc_feature (9)..(9): Xaa can be Phe, Tyr, Met, Trp, Leu, Ile, Val, His, Ala, Cys, Gln, Ser, or Thr
HXNLNDTTX

SEQ ID NO: 48941 - protein, 11 aa, Artificial Sequence
  Description of Artificial Sequence: Synthetic peptide
  Seed: HSNLNDTTYQR
  misc_feature (2)..(2): Xaa can be Ala, Met, Phe, Thr, Tyr, Val, Arg, Asn, Asp, Cys, Gln, Glu, Gly, His, Ile, Leu, Lys, Pro, Ser, or Trp
  misc_feature (11)..(11): Xaa can be Arg or Lys
HXNLNDTTYQX

SEQ ID NO: 48942 - protein, 9 aa, Artificial Sequence
  Description of Artificial Sequence: Synthetic peptide
  Seed: HSPAFEDLR
  misc_feature (2)..(2): Xaa can be Thr, Ala, Ile, Leu, Met, Phe, Ser, Tyr, or Val
  misc_feature (9)..(9): Xaa can be Arg, Lys, or Tyr
HXPAFEDLX

SEQ ID NO: 48943 - protein, 9 aa, Artificial Sequence
  Description of Artificial Sequence: Synthetic peptide
  Seed: HVRTGMDPR
  misc_feature (2)..(2): Xaa can be Thr, Ser, Val, Met, Ile, Ala, Gln, Leu, Phe, Tyr, Gly, Asn, Trp, Arg, Cys, His, or Pro
  misc_feature (9)..(9): Xaa can be Lys, Arg, Ala, Val, Ile, Leu, Met, Tyr, Gly, Phe, Ser, Thr, Cys, His, or Pro
HXRTGMDPX

SEQ ID NO: 48944 - protein, 8 aa, Artificial Sequence
  Description of Artificial Sequence: Synthetic peptide
  Seed: IAMELIGM
  misc_feature (2)..(2): Xaa can be Ala
  misc_feature (8)..(8): Xaa can be Met
IXMELIGX

SEQ ID NO: 48945 - protein, 9 aa, Artificial Sequence
  Description of Artificial Sequence: Synthetic peptide
  Seed: IAMELIGMI
  misc_feature (2)..(2): Xaa can be Leu, Met, Gln, Ile, Thr, Val, Ala, Ser, Gly, Phe, Pro, Cys, Asn, or Trp
  misc_feature (9)..(9): Xaa can be Val, Trp, Ile, Leu, Phe, Tyr, Ala, Met, Thr, Cys, Ser, Gly, or Pro
IXMELIGMX

SEQ ID NO: 48946 - protein, 10 aa, Artificial Sequence
  Description of Artificial Sequence: Synthetic peptide
  Seed: IAMELIGMIK
  misc_feature (2)..(2): Xaa can be Ile, Leu, Met, Ser, Thr, Val, Ala, Arg, Asn, Asp, Cys, Gln, Glu, Gly, His, Lys, Phe, Pro, Trp, or Tyr
  misc_feature (10)..(10): Xaa can be Arg, Lys, or Tyr
IXMELIGMIX

SEQ ID NO: 48947 - protein, 11 aa, Artificial Sequence
  Description of Artificial Sequence: Synthetic peptide
  Seed: IAMELIGMIKR
  misc_feature (2)..(2): Xaa can be Met, Tyr, Ala, Arg, Gln, Ile, Leu, Phe, Ser, Thr, Trp, or Val
  misc_feature (11)..(11): Xaa can be Arg or Lys
IXMELIGMIKX

SEQ ID NO: 48948 - protein, 8 aa, Artificial Sequence
  Description of Artificial Sequence: Synthetic peptide
  Seed: IAMELIRM
  misc_feature (2)..(2): Xaa can be Ala or Ser
  misc_feature (8)..(8): Xaa can be Met, Tyr, Leu, or Phe
IXMELIRX

SEQ ID NO: 48949 - protein, 9 aa, Artificial Sequence
  Description of Artificial Sequence: Synthetic peptide
  Seed: IAMELIRMI
  misc_feature (2)..(2): Xaa can be Leu, Met, Gln, Ala, Ile, Val, Ser, Thr, Arg, Gly, Pro, Lys, Phe, Tyr, Cys, Asn, His, or Tr p
  misc_feature (9)..(9): Xaa can be Val, Leu, Ile, Met, Trp, Phe, Tyr, Ala, Thr, Cys, Ser, Gly, Pro, or His
IXMELIRMX

SEQ ID NO: 48950 - protein, 10 aa, Artificial Sequence
  Description of Artificial Sequence: Synthetic peptide
  Seed: IAMELIRMIK
  misc_feature (2)..(2): Xaa can be Ser, Thr, Ile, Leu, Met, Val, Ala, Arg, Asn, Asp, Cys, Gln, Glu, Gly, His, Lys, Phe, Pro, Trp, or Tyr
  misc_feature (10)..(10): Xaa can be Arg, Lys, Tyr, or Ala
IXMELIRMIX

SEQ ID NO: 48951 - protein, 11 aa, Artificial Sequence
  Description of Artificial Sequence: Synthetic peptide
  Seed: IAMELIRMIKR
  misc_feature (2)..(2): Xaa can be Met, Phe, Trp, Tyr, Ala, Arg, Gln, Ile, Leu, Lys, Ser, Thr, or Val
  misc_feature (11)..(11): Xaa can be Arg or Lys
IXMELIRMIKX

SEQ ID NO: 48952 - protein, 10 aa, Artificial Sequence
  Description of Artificial Sequence: Synthetic peptide
  Seed: IASNENMDAM
  misc_feature (2)..(2): Xaa can be Ala, Pro, Ser, Met, or Val
  misc_feature (10)..(10): Xaa can be Tyr, Phe, Leu, or Met
IXSNENMDAX

SEQ ID NO: 48953 - protein, 10 aa, Artificial Sequence
  Description of Artificial Sequence: Synthetic peptide
  Seed: IASNENMDTM
  misc_feature (2)..(2): Xaa can be Ala
  misc_feature (10)..(10): Xaa can be Met, Phe, or Tyr
IXSNENMDTX

SEQ ID NO: 48954 - protein, 10 aa, Artificial Sequence
  Description of Artificial Sequence: Synthetic peptide
  Seed: IASNENMEAM
  misc_feature (2)..(2): Xaa can be Ala, Pro, Ser, Met, Phe, Thr, Tyr, Val, or Ile
  misc_feature (10)..(10): Xaa can be Tyr, Phe, Met, or Leu
IXSNENMEAX

SEQ ID NO: 48955 - protein, 10 aa, Artificial Sequence
  Description of Artificial Sequence: Synthetic peptide
  Seed: IASNENMETM
  misc_feature (2)..(2): Xaa can be Ser, Ala, Thr, Arg, Asn, Asp, Cys, Gln, Glu, Gly, His, Ile, Leu, Lys, Met, Phe, Pro, Trp, Tyr, or Val
  misc_feature (10)..(10): Xaa can be Phe, Trp, Tyr, Leu, Met, or Ile
IXSNENMETX

SEQ ID NO: 48956 - protein, 10 aa, Artificial Sequence
  Description of Artificial Sequence: Synthetic peptide
  Seed: IASNENVEAM
  misc_feature (2)..(2): Xaa can be Ala, Pro, Met, Phe, Tyr, Ile, Ser, Thr, or Val
  misc_feature (10)..(10): Xaa can be Tyr, Phe, Leu, or Met
IXSNENVEAX

SEQ ID NO: 48957 - protein, 10 aa, Artificial Sequence
  Description of Artificial Sequence: Synthetic peptide
  Seed: IASNENVETM
  misc_feature (2)..(2): Xaa can be Ala or Phe
  misc_feature (10)..(10): Xaa can be Tyr, Met, or Phe
IXSNENVETX

SEQ ID NO: 48958 - protein, 9 aa, Artificial Sequence
  Description of Artificial Sequence: Synthetic peptide
  Seed: IAYERMCNI
  misc_feature (2)..(2): Xaa can be Leu, Met, Ala, Gln, Ile, Thr, Val, Ser, Gly, Arg, Cys, Pro, Tyr, Asn, Phe, or Trp
  misc_feature (9)..(9): Xaa can be Val, Met, Tyr, Ile, Leu, Phe, Trp, Ala, Cys, Thr, Ser, Gly, Pro, or His
IXYERMCNX

SEQ ID NO: 48959 - protein, 10 aa, Artificial Sequence
  Description of Artificial Sequence: Synthetic peptide
  Seed: IAYERMCNIL
  misc_feature (2)..(2): Xaa can be Ala, Tyr, Ser, Thr, Ile, Met, Trp, Val, Arg, Asn, Asp, Cys, Gln, Glu, Gly, His, Leu, Lys, Phe, or Pro
  misc_feature (10)..(10): Xaa can be Ile, Leu, Phe, Trp, Tyr, Met, or Val
IXYERMCNIX

SEQ ID NO: 48960 - protein, 11 aa, Artificial Sequence
  Description of Artificial Sequence: Synthetic peptide
  Seed: IAYERMCNILK
  misc_feature (2)..(2): Xaa can be Thr, Leu, Met, Ser, Val, Ala, Arg, Gln, Ile, Phe, Trp, Tyr, Asn, Cys, Gly, His, or Lys
  misc_feature (11)..(11): Xaa can be Arg, Lys, Tyr, or Ala
IXYERMCNILX

SEQ ID NO: 48961 - protein, 8 aa, Artificial Sequence
  Description of Artificial Sequence: Synthetic peptide
  Seed: IEDLIFLA
  misc_feature (2)..(2): Xaa can be Glu
  misc_feature (8)..(8): Xaa can be Ala, Ile, or Val
IXDLIFLX

SEQ ID NO: 48962 - protein, 11 aa, Artificial Sequence
  Description of Artificial Sequence: Synthetic peptide
  Seed: IEDLIFLARSA
  misc_feature (2)..(2): Xaa can be Glu
  misc_feature (11)..(11): Xaa can be Ala
IXDLIFLARSX

SEQ ID NO: 48963 - protein, 11 aa, Artificial Sequence
  Description of Artificial Sequence: Synthetic peptide
  Seed: IEDLIFLTRSA
  misc_feature (2)..(2): Xaa can be Glu
  misc_feature (11)..(11): Xaa can be Ala
IXDLIFLTRSX

SEQ ID NO: 48964 - protein, 8 aa, Artificial Sequence
  Description of Artificial Sequence: Synthetic peptide
  Seed: IEDLIFSA
  misc_feature (2)..(2): Xaa can be Glu
  misc_feature (8)..(8): Xaa can be Ala, Ile, or Val
IXDLIFSX

SEQ ID NO: 48965 - protein, 11 aa, Artificial Sequence
  Description of Artificial Sequence: Synthetic peptide
  Seed: IEDLIFSARSA
  misc_feature (2)..(2): Xaa can be Glu
  misc_feature (11)..(11): Xaa can be Ala
IXDLIFSARSX

SEQ ID NO: 48966 - protein, 8 aa, Artificial Sequence
  Description of Artificial Sequence: Synthetic peptide
  Seed: IEDLTFLA
  misc_feature (2)..(2): Xaa can be Glu
  misc_feature (8)..(8): Xaa can be Ala or Val
IXDLTFLX

SEQ ID NO: 48967 - protein, 11 aa, Artificial Sequence
  Description of Artificial Sequence: Synthetic peptide
  Seed: IEDLTFLARSA
  misc_feature (2)..(2): Xaa can be Glu
  misc_feature (11)..(11): Xaa can be Ala
IXDLTFLARSX

SEQ ID NO: 48968 - protein, 10 aa, Artificial Sequence
  Description of Artificial Sequence: Synthetic peptide
  Seed: IEIIRMMESA
  misc_feature (2)..(2): Xaa can be Glu
  misc_feature (10)..(10): Xaa can be Ala
IXIIRMMESX

SEQ ID NO: 48969 - protein, 8 aa, Artificial Sequence
  Description of Artificial Sequence: Synthetic peptide
  Seed: IEKMVLSA
  misc_feature (2)..(2): Xaa can be Glu
  misc_feature (8)..(8): Xaa can be Ala
IXKMVLSX

SEQ ID NO: 48970 - protein, 9 aa, Artificial Sequence
  Description of Artificial Sequence: Synthetic peptide
  Seed: IEKMVLSAF
  misc_feature (2)..(2): Xaa can be Gln, Glu, Met, His, Lys, Leu, Ala, Asp, Ile, Ser, Thr, Val, Arg, Asn, Gly, Phe, Tyr, Cys, Pro, or Trp
  misc_feature (9)..(9): Xaa can be Phe, Tyr, Met, Leu, Trp, Ile, Val, His, Ala, Gly, Thr, Ser, or Cys
IXKMVLSAX

SEQ ID NO: 48971 - protein, 8 aa, Artificial Sequence
  Description of Artificial Sequence: Synthetic peptide
  Seed: IERMILSA
  misc_feature (2)..(2): Xaa can be Glu or Asp
  misc_feature (8)..(8): Xaa can be Leu, Ala, Ile, Met, Phe, or Val
IXRMILSX

SEQ ID NO: 48972 - protein, 9 aa, Artificial Sequence
  Description of Artificial Sequence: Synthetic peptide
  Seed: IERMILSAF
  misc_feature (2)..(2): Xaa can be Gln, Glu, Met, Lys, His, Leu, Ala, Asp, Arg, Asn, Ile, Ser, Thr, Val, Gly, Phe, Tyr, Cys, Pro, or Trp
  misc_feature (9)..(9): Xaa can be Phe, Tyr, Met, Leu, Ile, Trp, Val, His, Ala, Gly, Cys, Pro, Ser, Thr, Asn, or Gln
IXRMILSAX

SEQ ID NO: 48973 - protein, 8 aa, Artificial Sequence
  Description of Artificial Sequence: Synthetic peptide
  Seed: IERMVLSA
  misc_feature (2)..(2): Xaa can be Glu or Asp
  misc_feature (8)..(8): Xaa can be Leu, Ala, Ile, Met, Phe, or Val
IXRMVLSX

SEQ ID NO: 48974 - protein, 9 aa, Artificial Sequence
  Description of Artificial Sequence: Synthetic peptide
  Seed: IERMVLSAF
  misc_feature (2)..(2): Xaa can be Gln, Glu, Met, Lys, His, Leu, Ala, Asp, Ile, Ser, Val, Arg, Asn, Thr, Gly, Phe, Trp, Tyr, Cys, or Pro
  misc_feature (9)..(9): Xaa can be Phe, Tyr, Met, Leu, Ile, Trp, His, Val, Ala, Gly, Cys, Pro, Ser, Thr, Asn, or Gln
IXRMVLSAX

SEQ ID NO: 48975 - protein, 8 aa, Artificial Sequence
  Description of Artificial Sequence: Synthetic peptide
  Seed: IFLARSAL
  misc_feature (2)..(2): Xaa can be Phe, Tyr, Leu, Met, Pro, Trp, Ala, Ile, Gln, or Val
  misc_feature (8)..(8): Xaa can be Leu, Met, Phe, Ile, Val, or Tyr
IXLARSAX

SEQ ID NO: 48976 - protein, 9 aa, Artificial Sequence
  Description of Artificial Sequence: Synthetic peptide
  Seed: IFLARSALI
  misc_feature (2)..(2): Xaa can be Tyr, Phe, Trp, His, Met, Ala, Gln, Leu, Ser, Arg, Ile, Thr, or Val
  misc_feature (9)..(9): Xaa can be Phe, Met, Tyr, Trp, Leu, Ile, Val, Ala, or His
IXLARSALX

SEQ ID NO: 48977 - protein, 10 aa, Artificial Sequence
  Description of Artificial Sequence: Synthetic peptide
  Seed: IFLARSALIL
  misc_feature (2)..(2): Xaa can be Phe, Tyr, Met, Trp, Leu, Gln, Ala, Arg, Asn, Asp, Cys, Glu, Gly, His, Ile, Lys, Pro, Ser, Thr, or Val
  misc_feature (10)..(10): Xaa can be Ile, Leu, Val, Phe, Ala, Trp, Met, or Tyr
IXLARSALIX

SEQ ID NO: 48978 - protein, 11 aa, Artificial Sequence
  Description of Artificial Sequence: Synthetic peptide
  Seed: IFLARSALILR
  misc_feature (2)..(2): Xaa can be Arg, Gln, Ile, Leu, Met, Phe, Ser, Thr, Trp, Tyr, Val, Ala, Asn, Asp, Cys, Glu, Gly, His, Lys, or Pro
  misc_feature (11)..(11): Xaa can be Arg or Lys
IXLARSALILX

SEQ ID NO: 48979 - protein, 10 aa, Artificial Sequence
  Description of Artificial Sequence: Synthetic peptide
  Seed: IFLARSALVL
  misc_feature (2)..(2): Xaa can be Leu, Met, Phe, Trp, Tyr, Gln, Ala, Arg, Asn, Asp, Cys, Glu, Gly, His, Ile, Lys, Pro, Ser, Thr, or Val
  misc_feature (10)..(10): Xaa can be Ala, Ile, Leu, Val, Phe, Met, Trp, Tyr, Cys, Gly, Pro, Ser, Thr, Arg, Asn, Asp, Gln, Glu, His, or Lys
IXLARSALVX

SEQ ID NO: 48980 - protein, 11 aa, Artificial Sequence
  Description of Artificial Sequence: Synthetic peptide
  Seed: IFLARSALVLR
  misc_feature (2)..(2): Xaa can be Arg, Gln, Ile, Leu, Met, Phe, Ser, Thr, Trp, Tyr, Val, Ala, Asn, Asp, Cys, Glu, Gly, His, Lys, or Pro
  misc_feature (11)..(11): Xaa can be Arg or Lys
IXLARSALVLX

SEQ ID NO: 48981 - protein, 8 aa, Artificial Sequence
  Description of Artificial Sequence: Synthetic peptide
  Seed: IFLTRSAL
  misc_feature (2)..(2): Xaa can be Phe, Tyr, Leu, Met, Pro, Trp, Ala, Ile, Gln, or Val
  misc_feature (8)..(8): Xaa can be Leu, Met, Phe, Ile, Val, or Tyr
IXLTRSAX

SEQ ID NO: 48982 - protein, 9 aa, Artificial Sequence
  Description of Artificial Sequence: Synthetic peptide
  Seed: IFLTRSALI
  misc_feature (2)..(2): Xaa can be Tyr, Phe, Trp, Met, His, Ala, Gln, Leu, Ile, Ser, Thr, or Val
  misc_feature (9)..(9): Xaa can be Phe, Trp, Met, Tyr, Leu, Ile, Val, Ala, or His
IXLTRSALX

SEQ ID NO: 48983 - protein, 10 aa, Artificial Sequence
  Description of Artificial Sequence: Synthetic peptide
  Seed: IFLTRSALIL
  misc_feature (2)..(2): Xaa can be Tyr, Phe, or Trp
  misc_feature (10)..(10): Xaa can be Leu, Met, Phe, Trp, Tyr, Ile, or Val
IXLTRSALIX

SEQ ID NO: 48984 - protein, 11 aa, Artificial Sequence
  Description of Artificial Sequence: Synthetic peptide
  Seed: IFLTRSALILR
  misc_feature (2)..(2): Xaa can be Ala, Arg, Asn, Cys, Gln, Gly, His, Ile, Leu, Lys, Met, Phe, Ser, Thr, Trp, Tyr, Val, Asp, Glu, or Pro
  misc_feature (11)..(11): Xaa can be Arg or Lys
IXLTRSALILX

SEQ ID NO: 48985 - protein, 8 aa, Artificial Sequence
  Description of Artificial Sequence: Synthetic peptide
  Seed: IFSARSAL
  misc_feature (2)..(2): Xaa can be Phe, Tyr, Trp, or Met
  misc_feature (8)..(8): Xaa can be Met, Phe, Leu, Tyr, Ile, or Val
IXSARSAX

SEQ ID NO: 48986 - protein, 9 aa, Artificial Sequence
  Description of Artificial Sequence: Synthetic peptide
  Seed: IFSARSALI
  misc_feature (2)..(2): Xaa can be Tyr, Phe, Trp, Met, His, Ala, Leu, Val, Gln, Ser, or Thr
  misc_feature (9)..(9): Xaa can be Tyr, Phe, Met, Leu, Trp, Ile, Val, His, or Ala
IXSARSALX

SEQ ID NO: 48987 - protein, 10 aa, Artificial Sequence
  Description of Artificial Sequence: Synthetic peptide
  Seed: IFSARSALIL
  misc_feature (2)..(2): Xaa can be Ala, Arg, Asn, Asp, Cys, Gln, Glu, Gly, His, Ile, Leu, Lys, Met, Phe, Pro, Ser, Thr, Trp, Tyr, or Val
  misc_feature (10)..(10): Xaa can be Ile, Leu, Met, Phe, Trp, or Tyr
IXSARSALIX

SEQ ID NO: 48988 - protein, 11 aa, Artificial Sequence
  Description of Artificial Sequence: Synthetic peptide
  Seed: IFSARSALILR
  misc_feature (2)..(2): Xaa can be Gln, Ile, Leu, Met, Phe, Ser, Thr, Trp, Tyr, Val, Ala, Arg, Asn, Asp, Cys, Glu, Gly, His, Lys, or Pro
  misc_feature (11)..(11): Xaa can be Arg or Lys
IXSARSALILX

SEQ ID NO: 48989 - protein, 8 aa, Artificial Sequence
  Description of Artificial Sequence: Synthetic peptide
  Seed: IFSLIRPK
  misc_feature (2)..(2): Xaa can be Met, Phe, Gln, Ile, Leu, Ser, Thr, Trp, Tyr, or Val
  misc_feature (8)..(8): Xaa can be Arg or Lys
IXSLIRPX

SEQ ID NO: 48990 - protein, 10 aa, Artificial Sequence
  Description of Artificial Sequence: Synthetic peptide
  Seed: IGTMVMELIR
  misc_feature (2)..(2): Xaa can be Ala, Arg, Gln, Glu, Gly, Ile, Leu, Met, Phe, Ser, Thr, Trp, Tyr, Val, Asn, Asp, Cys, His, Lys, or Pro
  misc_feature (10)..(10): Xaa can be Arg or Lys
IXTMVMELIX

SEQ ID NO: 48991 - protein, 9 aa, Artificial Sequence
  Description of Artificial Sequence: Synthetic peptide
  Seed: IIKMMENAR
  misc_feature (2)..(2): Xaa can be Ile, Leu, Met, Phe, Ser, Thr, Trp, Tyr, Val, Ala, Asn, Gln, or Gly
  misc_feature (9)..(9): Xaa can be Arg or Lys
IXKMMENAX

SEQ ID NO: 48992 - protein, 9 aa, Artificial Sequence
  Description of Artificial Sequence: Synthetic peptide
  Seed: IIKMMESAR
  misc_feature (2)..(2): Xaa can be Ile, Leu, Met, Phe, Ser, Thr, Trp, Tyr, Val, Ala, Asn, Gln, or Gly
  misc_feature (9)..(9): Xaa can be Arg or Lys
IXKMMESAX

SEQ ID NO: 48993 - protein, 9 aa, Artificial Sequence
  Description of Artificial Sequence: Synthetic peptide
  Seed: IIKRGINDR
  misc_feature (2)..(2): Xaa can be Met, Phe, Ala, Gln, Ile, Leu, Ser, Thr, Trp, Tyr, or Val
  misc_feature (9)..(9): Xaa can be Arg or Lys
IXKRGINDX

SEQ ID NO: 48994 - protein, 9 aa, Artificial Sequence
  Description of Artificial Sequence: Synthetic peptide
  Seed: IIRIMESAR
  misc_feature (2)..(2): Xaa can be Ile, Leu, Met, Phe, Ser, Thr, Trp, Tyr, Val, Ala, Asn, Gln, or Gly
  misc_feature (9)..(9): Xaa can be Arg or Lys
IXRIMESAX

SEQ ID NO: 48995 - protein, 9 aa, Artificial Sequence
  Description of Artificial Sequence: Synthetic peptide
  Seed: IIRLMEGAK
  misc_feature (2)..(2): Xaa can be Ser, Thr, Ala, Gln, Gly, Ile, Leu, Met, Phe, Trp, Tyr, or Val
  misc_feature (9)..(9): Xaa can be Lys, Ala, or Val
IXRLMEGAX

SEQ ID NO: 48996 - protein, 9 aa, Artificial Sequence
  Description of Artificial Sequence: Synthetic peptide
  Seed: IIRLMESAR
  misc_feature (2)..(2): Xaa can be Met, Phe, Ser, Thr, Trp, Tyr, Val, Ala, Asn, Gln, Gly, Ile, or Leu
  misc_feature (9)..(9): Xaa can be Arg or Lys
IXRLMESAX

SEQ ID NO: 48997 - protein, 9 aa, Artificial Sequence
  Description of Artificial Sequence: Synthetic peptide
  Seed: IIRMMEDAK
  misc_feature (2)..(2): Xaa can be Ser, Thr, Ala, Gln, Ile, Met, Phe, Tyr, or Val
  misc_feature (9)..(9): Xaa can be Lys or Ala
IXRMMEDAX

SEQ ID NO: 48998 - protein, 9 aa, Artificial Sequence
  Description of Artificial Sequence: Synthetic peptide
  Seed: IIRMMEGAK
  misc_feature (2)..(2): Xaa can be Thr, Ser, Val, Ala, Asn, Gln, Gly, Ile, Leu, Met, Phe, Trp, or Tyr
  misc_feature (9)..(9): Xaa can be Lys, Ala, Val, Arg, Ile, Ser, or Tyr
IXRMMEGAX

SEQ ID NO: 48999 - protein, 9 aa, Artificial Sequence
  Description of Artificial Sequence: Synthetic peptide
  Seed: IIRMMENAK
  misc_feature (2)..(2): Xaa can be Thr, Ser, Val, Tyr, Ile, Leu, Met, Phe, Trp, Ala, Asn, Gln, or Gly
  misc_feature (9)..(9): Xaa can be Arg, Lys, Ala, Val, Ile, Ser, Tyr, Leu, or Met
IXRMMENAX

SEQ ID NO: 49000 - protein, 9 aa, Artificial Sequence
  Description of Artificial Sequence: Synthetic peptide
  Seed: IIRMMENSR
  misc_feature (2)..(2): Xaa can be Met, Phe, Ser, Thr, Trp, Tyr, Ala, Asn, Gln, Gly, Ile, Leu, or Val
  misc_feature (9)..(9): Xaa can be Arg or Lys
IXRMMENSX

SEQ ID NO: 49001 - protein, 9 aa, Artificial Sequence
  Description of Artificial Sequence: Synthetic peptide
  Seed: IIRMMESAK
  misc_feature (2)..(2): Xaa can be Ala, Asn, Gln, Ile, Leu, Met, Phe, Ser, Thr, Trp, Tyr, Val, or Gly
  misc_feature (9)..(9): Xaa can be Arg, Lys, or Ala
IXRMMESAX

SEQ ID NO: 49002 - protein, 9 aa, Artificial Sequence
  Description of Artificial Sequence: Synthetic peptide
  Seed: IIRMMESSR
  misc_feature (2)..(2): Xaa can be Met, Phe, Ser, Thr, Trp, Tyr, Ala, Asn, Gln, Gly, Ile, Leu, or Val
  misc_feature (9)..(9): Xaa can be Arg or Lys
IXRMMESSX

SEQ ID NO: 49003 - protein, 9 aa, Artificial Sequence
  Description of Artificial Sequence: Synthetic peptide
  Seed: IIRPNENPA
  misc_feature (2)..(2): Xaa can be Thr, Ser, Val, Met, Ala, Ile, Asn, Gln, Gly, Leu, Phe, Trp, or Tyr
  misc_feature (9)..(9): Xaa can be Lys, Ala, Val, Ile, Tyr, Arg, Leu, Met, Ser, Gly, or Thr
IXRPNENPX

SEQ ID NO: 49004 - protein, 9 aa, Artificial Sequence
  Description of Artificial Sequence: Synthetic peptide
  Seed: IIRVMESAK
  misc_feature (2)..(2): Xaa can be Thr, Ser, Val, Tyr, Ala, Asn, Gln, Gly, Ile, Leu, Met, Phe, or Trp
  misc_feature (9)..(9): Xaa can be Lys, Ala, Val, Arg, Ile, Tyr, Leu, Met, or Ser
IXRVMESAX

SEQ ID NO: 49005 - protein, 9 aa, Artificial Sequence
  Description of Artificial Sequence: Synthetic peptide
  Seed: IKGVGTMVM
  misc_feature (2)..(2): Xaa can be Gln, Met, Lys, Ala, Arg, Glu, His, Leu, Ser, Val, Asn, Gly, Ile, Phe, Thr, or Tyr
  misc_feature (9)..(9): Xaa can be Phe, Tyr, Met, Ile, Leu, Trp, His, Val, or Ala
IXGVGTMVX

SEQ ID NO: 49006 - protein, 10 aa, Artificial Sequence
  Description of Artificial Sequence: Synthetic peptide
  Seed: IKLSDYEGRL
  misc_feature (2)..(2): Xaa can be Ala, Arg, Asn, Asp, Cys, Gln, Glu, Gly, His, Ile, Leu, Lys, Met, Phe, Pro, Ser, Thr, Trp, Tyr, or Val
  misc_feature (10)..(10): Xaa can be Ile, Leu, or Val
IXLSDYEGRX

SEQ ID NO: 49007 - protein, 9 aa, Artificial Sequence
  Description of Artificial Sequence: Synthetic peptide
  Seed: ILCDKEEIR
  misc_feature (2)..(2): Xaa can be Leu, Met, or Phe
  misc_feature (9)..(9): Xaa can be Arg
IXCDKEEIX

SEQ ID NO: 49008 - protein, 9 aa, Artificial Sequence
  Description of Artificial Sequence: Synthetic peptide
  Seed: ILHDKEEIM
  misc_feature (2)..(2): Xaa can be Leu, Met, or Ile
  misc_feature (9)..(9): Xaa can be Val, Ala, Ile, Leu, Met, or Arg
IXHDKEEIX

SEQ ID NO: 49009 - protein, 10 aa, Artificial Sequence
  Description of Artificial Sequence: Synthetic peptide
  Seed: ILHDKEEIMR
  misc_feature (2)..(2): Xaa can be Ile, Leu, Met, Phe, Thr, Tyr, or Val
  misc_feature (10)..(10): Xaa can be Arg
IXHDKEEIMX

SEQ ID NO: 49010 - protein, 11 aa, Artificial Sequence
  Description of Artificial Sequence: Synthetic peptide
  Seed: ILHDKEEIMRI
  misc_feature (2)..(2): Xaa can be Leu, Met, or Ile
  misc_feature (11)..(11): Xaa can be Val, Ala, Ile, or Leu
IXHDKEEIMRX

SEQ ID NO: 49011 - protein, 10 aa, Artificial Sequence
  Description of Artificial Sequence: Synthetic peptide
  Seed: ILHDKEEIRR
  misc_feature (2)..(2): Xaa can be Ile, Leu, Met, Phe, Thr, Tyr, or Val
  misc_feature (10)..(10): Xaa can be Arg
IXHDKEEIRX

SEQ ID NO: 49012 - protein, 9 aa, Artificial Sequence
  Description of Artificial Sequence: Synthetic peptide
  Seed: ILKGKFQTA
  misc_feature (2)..(2): Xaa can be Met, Leu, Pro, Ile, Ala, Val, Asn, Gln, Gly, Phe, Ser, Thr, Arg, Cys, Lys, or Trp
  misc_feature (9)..(9): Xaa can be Leu, Met, Ile, Val, Ala, Phe, Cys, Thr, or Gly
IXKGKFQTX

SEQ ID NO: 49013 - protein, 10 aa, Artificial Sequence
  Description of Artificial Sequence: Synthetic peptide
  Seed: ILKGKFQTAA
  misc_feature (2)..(2): Xaa can be Leu, Met, Pro, Ile, Ala, Val, Gln, Asn, Gly, Phe, Ser, or Thr
  misc_feature (10)..(10): Xaa can be Leu, Met, Val, Ile, Phe, Ala, or Thr
IXKGKFQTAX

SEQ ID NO: 49014 - protein, 9 aa, Artificial Sequence
  Description of Artificial Sequence: Synthetic peptide
  Seed: ILRGAVAHK
  misc_feature (2)..(2): Xaa can be Thr, Ser, Val, Met, Ile, Tyr, Ala, Gln, Phe, Trp, Gly, Leu, Asn, Cys, or His
  misc_feature (9)..(9): Xaa can be Lys, Arg, Ala, Ile, Val, Ser, Gly, Leu, Met, Tyr, Thr, Cys, Phe, or Pro
IXRGAVAHX

SEQ ID NO: 49015 - protein, 9 aa, Artificial Sequence
  Description of Artificial Sequence: Synthetic peptide
  Seed: ILRGSVAHK
  misc_feature (2)..(2): Xaa can be Thr, Ser, Val, Met, Ile, Tyr, Ala, Gln, Trp, Gly, Phe, Leu, Asn, Cys, or His
  misc_feature (9)..(9): Xaa can be Lys, Arg, Ala, Val, Ile, Ser, Gly, Leu, Met, Tyr, Thr, Cys, Gln, His, Phe, or Pro
IXRGSVAHX

SEQ ID NO: 49016 - protein, 9 aa, Artificial Sequence
  Description of Artificial Sequence: Synthetic peptide
  Seed: ILSAFDERR
  misc_feature (2)..(2): Xaa can be Ala, Ile, Met, Phe, Ser, Thr, Trp, Tyr, Val, Gln, Gly, or Leu
  misc_feature (9)..(9): Xaa can be Arg or Lys
IXSAFDERX

SEQ ID NO: 49017 - protein, 11 aa, Artificial Sequence
  Description of Artificial Sequence: Synthetic peptide
  Seed: ILSAFDERRNK
  misc_feature (2)..(2): Xaa can be Leu or Met
  misc_feature (11)..(11): Xaa can be Lys
IXSAFDERRNX

SEQ ID NO: 49018 - protein, 9 aa, Artificial Sequence
  Description of Artificial Sequence: Synthetic peptide
  Seed: ILYDKDEIR
  misc_feature (2)..(2): Xaa can be Met, Phe, Gln, Ile, Leu, Ser, Thr, Trp, Tyr, or Val
  misc_feature (9)..(9): Xaa can be Arg or Lys
IXYDKDEIX

SEQ ID NO: 49019 - protein, 10 aa, Artificial Sequence
  Description of Artificial Sequence: Synthetic peptide
  Seed: ILYDKDEIRR
  misc_feature (2)..(2): Xaa can be Met, Phe, Tyr, Ala, Gln, Ile, Leu, Ser, Thr, Trp, or Val
  misc_feature (10)..(10): Xaa can be Arg or Lys
IXYDKDEIRX

SEQ ID NO: 49020 - protein, 11 aa, Artificial Sequence
  Description of Artificial Sequence: Synthetic peptide
  Seed: ILYDKDEIRRI
  misc_feature (2)..(2): Xaa can be Leu, Met, or Ile
  misc_feature (11)..(11): Xaa can be Val, Ala, Ile, or Leu
IXYDKDEIRRX

SEQ ID NO: 49021 - protein, 9 aa, Artificial Sequence
  Description of Artificial Sequence: Synthetic peptide
  Seed: ILYDKEEIM
  misc_feature (2)..(2): Xaa can be Met, Leu, Gln, Ile, Lys, Val, Ala, Glu, His, Ser, Thr, Arg, Asn, Phe, or Gly
  misc_feature (9)..(9): Xaa can be Tyr, Phe, Met, Leu, Val, Ile, His, Trp, Ala, Cys, Thr, or Arg
IXYDKEEIX

SEQ ID NO: 49022 - protein, 10 aa, Artificial Sequence
  Description of Artificial Sequence: Synthetic peptide
  Seed: ILYDKEEIMR
  misc_feature (2)..(2): Xaa can be Met, Phe, Tyr, Ala, Gln, Gly, Ile, Leu, Ser, Thr, Trp, or Val
  misc_feature (10)..(10): Xaa can be Arg or Lys
IXYDKEEIMX

SEQ ID NO: 49023 - protein, 11 aa, Artificial Sequence
  Description of Artificial Sequence: Synthetic peptide
  Seed: ILYDKEEIMRI
  misc_feature (2)..(2): Xaa can be Leu, Met, Ile, Gln, Val, or Thr
  misc_feature (11)..(11): Xaa can be Val, Leu, Ala, Ile, Cys, Met, or Thr
IXYDKEEIMRX

SEQ ID NO: 49024 - protein, 10 aa, Artificial Sequence
  Description of Artificial Sequence: Synthetic peptide
  Seed: ILYDKEEIRR
  misc_feature (2)..(2): Xaa can be Met, Phe, Ala, Gln, Ile, Leu, Ser, Thr, Trp, Tyr, or Val
  misc_feature (10)..(10): Xaa can be Arg or Lys
IXYDKEEIRX

SEQ ID NO: 49025 - protein, 11 aa, Artificial Sequence
  Description of Artificial Sequence: Synthetic peptide
  Seed: ILYDKEEIRRI
  misc_feature (2)..(2): Xaa can be Leu, Met, or Ile
  misc_feature (11)..(11): Xaa can be Val, Ala, Ile, or Leu
IXYDKEEIRRX

SEQ ID NO: 49026 - protein, 10 aa, Artificial Sequence
  Description of Artificial Sequence: Synthetic peptide
  Seed: ILYDKEEISR
  misc_feature (2)..(2): Xaa can be Met, Phe, Tyr, Ala, Gln, Ile, Leu, Ser, Thr, Trp, or Val
  misc_feature (10)..(10): Xaa can be Arg or Lys
IXYDKEEISX

SEQ ID NO: 49027 - protein, 11 aa, Artificial Sequence
  Description of Artificial Sequence: Synthetic peptide
  Seed: ILYDKEEISRI
  misc_feature (2)..(2): Xaa can be Leu, Met, Ile, Gln, or Val
  misc_feature (11)..(11): Xaa can be Val, Ala, Ile, Leu, Met, Cys, or Thr
IXYDKEEISRX

SEQ ID NO: 49028 - protein, 9 aa, Artificial Sequence
  Description of Artificial Sequence: Synthetic peptide
  Seed: ILYDKEEMR
  misc_feature (2)..(2): Xaa can be Ala, Ile, Leu, Met, Phe, Ser, Thr, Trp, Tyr, Val, Gln, or Gly
  misc_feature (9)..(9): Xaa can be Arg or Lys
IXYDKEEMX

SEQ ID NO: 49029 - protein, 10 aa, Artificial Sequence
  Description of Artificial Sequence: Synthetic peptide
  Seed: ILYDKEEMRR
  misc_feature (2)..(2): Xaa can be Ile, Leu, Met, Phe, Ser, Thr, Trp, Tyr, Val, Ala, Gln, or Gly
  misc_feature (10)..(10): Xaa can be Arg or Lys
IXYDKEEMRX

SEQ ID NO: 49030 - protein, 11 aa, Artificial Sequence
  Description of Artificial Sequence: Synthetic peptide
  Seed: ILYDKEEMRRI
  misc_feature (2)..(2): Xaa can be Leu, Met, or Ile
  misc_feature (11)..(11): Xaa can be Val, Ala, Ile, or Leu
IXYDKEEMRRX

SEQ ID NO: 49031 - protein, 8 aa, Artificial Sequence
  Description of Artificial Sequence: Synthetic peptide
  Seed: ILYDKEEV
  misc_feature (2)..(2): Xaa can be Leu or Met
  misc_feature (8)..(8): Xaa can be Val or Leu
IXYDKEEX

SEQ ID NO: 49032 - protein, 9 aa, Artificial Sequence
  Description of Artificial Sequence: Synthetic peptide
  Seed: ILYDKEEVR
  misc_feature (2)..(2): Xaa can be Met, Phe, Ala, Gln, Ile, Leu, Ser, Thr, Trp, Tyr, or Val
  misc_feature (9)..(9): Xaa can be Arg or Lys
IXYDKEEVX

SEQ ID NO: 49033 - protein, 10 aa, Artificial Sequence
  Description of Artificial Sequence: Synthetic peptide
  Seed: ILYDKEEVRR
  misc_feature (2)..(2): Xaa can be Met, Phe, Ala, Gln, Ile, Leu, Ser, Thr, Trp, Tyr, or Val
  misc_feature (10)..(10): Xaa can be Arg or Lys
IXYDKEEVRX

SEQ ID NO: 49034 - protein, 11 aa, Artificial Sequence
  Description of Artificial Sequence: Synthetic peptide
  Seed: ILYDKEEVRRI
  misc_feature (2)..(2): Xaa can be Leu, Met, or Ile
  misc_feature (11)..(11): Xaa can be Val, Ala, Ile, or Leu
IXYDKEEVRRX

SEQ ID NO: 49035 - protein, 9 aa, Artificial Sequence
  Description of Artificial Sequence: Synthetic peptide
  Seed: IMAAFIGNT
  misc_feature (2)..(2): Xaa can be Leu, Met, Gln, Ile, Val, Thr, Ala, Ser, Asn, Gly, or Phe
  misc_feature (9)..(9): Xaa can be Val, Ala, Ile, Leu, Met, Thr, Cys, Phe, Gly, Pro, or Ser
IXAAFIGNX

SEQ ID NO: 49036 - protein, 9 aa, Artificial Sequence
  Description of Artificial Sequence: Synthetic peptide
  Seed: IMAAFNGNT
  misc_feature (2)..(2): Xaa can be Leu, Met, Ile, Val, Gln, Thr, Ala, or Ser
  misc_feature (9)..(9): Xaa can be Val, Ile, Leu, Ala, Met, Phe, or Thr
IXAAFNGNX

SEQ ID NO: 49037 - protein, 9 aa, Artificial Sequence
  Description of Artificial Sequence: Synthetic peptide
  Seed: IMAAFTGNA
  misc_feature (2)..(2): Xaa can be Leu, Met, Gln, Ile, Val, Thr, Ala, or Ser
  misc_feature (9)..(9): Xaa can be Val, Ile, Ala, Leu, Met, Cys, Phe, Pro, Ser, Thr, or Gly
IXAAFTGNX

SEQ ID NO: 49038 - protein, 11 aa, Artificial Sequence
  Description of Artificial Sequence: Synthetic peptide
  Seed: IMAAFTGNTER
  misc_feature (2)..(2): Xaa can be Met, Phe, Thr, Tyr, Val, Ala, Arg, Asn, Gln, Glu, Gly, His, Ile, Leu, Pro, Ser, or Trp
  misc_feature (11)..(11): Xaa can be Arg or Lys
IXAAFTGNTEX

SEQ ID NO: 49039 - protein, 9 aa, Artificial Sequence
  Description of Artificial Sequence: Synthetic peptide
  Seed: IMDQVRESR
  misc_feature (2)..(2): Xaa can be Ile, Leu, Met, Phe, Thr, Trp, Tyr, or Val
  misc_feature (9)..(9): Xaa can be Arg
IXDQVRESX

SEQ ID NO: 49040 - protein, 9 aa, Artificial Sequence
  Description of Artificial Sequence: Synthetic peptide
  Seed: IMELIRMIK
  misc_feature (2)..(2): Xaa can be Ile, Leu, Met, Phe, Ser, Thr, Trp, Tyr, Val, Ala, Gln, or Gly
  misc_feature (9)..(9): Xaa can be Arg or Lys
IXELIRMIX

SEQ ID NO: 49041 - protein, 10 aa, Artificial Sequence
  Description of Artificial Sequence: Synthetic peptide
  Seed: IMELIRMIKR
  misc_feature (2)..(2): Xaa can be Met, Phe, Trp, Tyr, Ala, Gln, Gly, Ile, Leu, Ser, Thr, or Val
  misc_feature (10)..(10): Xaa can be Arg or Lys
IXELIRMIKX

SEQ ID NO: 49042 - protein, 11 aa, Artificial Sequence
  Description of Artificial Sequence: Synthetic peptide
  Seed: IMIWHSNLNDA
  misc_feature (2)..(2): Xaa can be Leu or Met
  misc_feature (11)..(11): Xaa can be Ala or Val
IXIWHSNLNDX

SEQ ID NO: 49043 - protein, 11 aa, Artificial Sequence
  Description of Artificial Sequence: Synthetic peptide
  Seed: IPRGKLSTRGV
  misc_feature (2)..(2): Xaa can be Pro
  misc_feature (11)..(11): Xaa can be Ala, Ile, Leu, Met, Phe, or Val
IXRGKLSTRGX

SEQ ID NO: 49044 - protein, 9 aa, Artificial Sequence
  Description of Artificial Sequence: Synthetic peptide
  Seed: IPRGQLATR
  misc_feature (2)..(2): Xaa can be Ala, Asn, Gly, Ile, Leu, Met, Phe, Pro, Ser, Thr, Trp, Tyr, or Val
  misc_feature (9)..(9): Xaa can be Arg
IXRGQLATX

SEQ ID NO: 49045 - protein, 11 aa, Artificial Sequence
  Description of Artificial Sequence: Synthetic peptide
  Seed: IPRGQLATRGV
  misc_feature (2)..(2): Xaa can be Pro
  misc_feature (11)..(11): Xaa can be Ala, Ile, Leu, Met, Phe, or Val
IXRGQLATRGX

SEQ ID NO: 49046 - protein, 11 aa, Artificial Sequence
  Description of Artificial Sequence: Synthetic peptide
  Seed: IPRGQLSTRGI
  misc_feature (2)..(2): Xaa can be Pro
  misc_feature (11)..(11): Xaa can be Ala, Ile, Leu, Met, Phe, or Val
IXRGQLSTRGX

SEQ ID NO: 49047 - protein, 9 aa, Artificial Sequence
  Description of Artificial Sequence: Synthetic peptide
  Seed: IQIASNENM
  misc_feature (2)..(2): Xaa can be Met, Gln, Leu, Ile, Val, Lys, Thr, Ala, Arg, Glu, His, Ser, Asn, Gly, Phe, or Tyr
  misc_feature (9)..(9): Xaa can be Phe, Tyr, Met, Leu, Ile, Val, His, Trp, or Ala
IXIASNENX

SEQ ID NO: 49048 - protein, 9 aa, Artificial Sequence
  Description of Artificial Sequence: Synthetic peptide
  Seed: IQMCTEFKL
  misc_feature (2)..(2): Xaa can be Met, Arg, Gln, Leu, Ile, Ala, Glu, His, Thr, Val, Ser, Lys, Phe, Gly, Asn, Asp, or Tyr
  misc_feature (9)..(9): Xaa can be Phe, Tyr, Ile, Leu, Val, Met, Ala, Thr, Trp, Cys, Ser, or His
IXMCTEFKX

SEQ ID NO: 49049 - protein, 9 aa, Artificial Sequence
  Description of Artificial Sequence: Synthetic peptide
  Seed: IQMCTEIKL
  misc_feature (2)..(2): Xaa can be Met, Gln, Leu, Ile, Val, Arg, Thr, His, Lys, Ala, Glu, Ser, Asn, Gly, Phe, or Tyr
  misc_feature (9)..(9): Xaa can be Phe, Tyr, Met, Ile, Val, Leu, Ala, His, Trp, Cys, or Thr
IXMCTEIKX

SEQ ID NO: 49050 - protein, 9 aa, Artificial Sequence
  Description of Artificial Sequence: Synthetic peptide
  Seed: IQMCTELKL
  misc_feature (2)..(2): Xaa can be Met, Gln, Leu, Arg, Ile, Glu, Lys, Thr, Val, Ala, His, Ser, Asn, Gly, Phe, Pro, Tyr, Cys, or Trp
  misc_feature (9)..(9): Xaa can be Phe, Tyr, Met, Leu, Ile, Val, Ala, Trp, His, Cys, or Thr
IXMCTELKX

SEQ ID NO: 49051 - protein, 9 aa, Artificial Sequence
  Description of Artificial Sequence: Synthetic peptide
  Seed: IQMCTELQL
  misc_feature (2)..(2): Xaa can be Met, Leu, Gln, Arg, Lys, Ala, Glu, His, Ile, Thr, Val, Ser, Phe, Asn, Gly, Tyr, Cys, Pro, or Trp
  misc_feature (9)..(9): Xaa can be Phe, Tyr, Met, Val, Ile, Leu, Trp, Ala, Cys, His, Ser, Thr, or Gly
IXMCTELQX

SEQ ID NO: 49052 - protein, 9 aa, Artificial Sequence
  Description of Artificial Sequence: Synthetic peptide
  Seed: IQNSITIEK
  misc_feature (2)..(2): Xaa can be Met, Thr, Ala, Ile, Leu, Ser, Val, Asn, Gln, Gly, Phe, Pro, Trp, Tyr, Cys, or His
  misc_feature (9)..(9): Xaa can be Arg, Lys, Tyr, or His
IXNSITIEX

SEQ ID NO: 49053 - protein, 10 aa, Artificial Sequence
  Description of Artificial Sequence: Synthetic peptide
  Seed: IQNSITIEKM
  misc_feature (2)..(2): Xaa can be Gln, Leu, Lys, Met, Ala, Arg, His, Ile, Ser, Thr, or Val
  misc_feature (10)..(10): Xaa can be Phe, Tyr, Met, or Leu
IXNSITIEKX

SEQ ID NO: 49054 - protein, 10 aa, Artificial Sequence
  Description of Artificial Sequence: Synthetic peptide
  Seed: IQNSITIERM
  misc_feature (2)..(2): Xaa can be Gln, Leu, Lys, Met, Ala, Arg, His, Ile, Ser, Thr, Val, or Glu
  misc_feature (10)..(10): Xaa can be Phe, Tyr, Met, or Leu
IXNSITIERX

SEQ ID NO: 49055 - protein, 9 aa, Artificial Sequence
  Description of Artificial Sequence: Synthetic peptide
  Seed: IQNSITMER
  misc_feature (2)..(2): Xaa can be Leu, Met, Thr, Val, Ala, Gln, Ile, Ser, Asn, Gly, Phe, Pro, Trp, Tyr, Cys, His, or Lys
  misc_feature (9)..(9): Xaa can be Arg, Lys, Tyr, or His
IXNSITMEX

SEQ ID NO: 49056 - protein, 10 aa, Artificial Sequence
  Description of Artificial Sequence: Synthetic peptide
  Seed: IQNSITMERM
  misc_feature (2)..(2): Xaa can be Gln, Lys, Met, His, Ile, Leu, Val, Ala, Arg, Glu, Ser, or Thr
  misc_feature (10)..(10): Xaa can be Phe, Tyr, Met, Leu, Ile, or Trp
IXNSITMERX

SEQ ID NO: 49057 - protein, 9 aa, Artificial Sequence
  Description of Artificial Sequence: Synthetic peptide
  Seed: IQNSLTIER
  misc_feature (2)..(2): Xaa can be Met, Ala, Gln, Gly, Ile, Leu, Phe, Ser, Thr, Trp, Tyr, Val, Asn, Cys, or His
  misc_feature (9)..(9): Xaa can be Arg, Lys, or His
IXNSLTIEX

SEQ ID NO: 49058 - protein, 10 aa, Artificial Sequence
  Description of Artificial Sequence: Synthetic peptide
  Seed: IQNSLTIERM
  misc_feature (2)..(2): Xaa can be Gln, Met, Leu, Lys, Ala, Arg, His, Ile, Ser, Thr, Val, or Glu
  misc_feature (10)..(10): Xaa can be Phe, Tyr, Met, or Leu
IXNSLTIERX

SEQ ID NO: 49059 - protein, 9 aa, Artificial Sequence
  Description of Artificial Sequence: Synthetic peptide
  Seed: IQNSLTVER
  misc_feature (2)..(2): Xaa can be Ala, Gln, Gly, Ile, Leu, Met, Phe, Ser, Thr, Trp, Tyr, Val, Asn, Cys, or His
  misc_feature (9)..(9): Xaa can be Arg or Lys
IXNSLTVEX

SEQ ID NO: 49060 - protein, 10 aa, Artificial Sequence
  Description of Artificial Sequence: Synthetic peptide
  Seed: IQNSLTVERM
  misc_feature (2)..(2): Xaa can be Gln, Met, Leu, Lys, Ala, Arg, His, Ile, Ser, Thr, Val, or Glu
  misc_feature (10)..(10): Xaa can be Phe, Tyr, Met, or Leu
IXNSLTVERX

SEQ ID NO: 49061 - protein, 9 aa, Artificial Sequence
  Description of Artificial Sequence: Synthetic peptide
  Seed: IQNSMTIER
  misc_feature (2)..(2): Xaa can be Ala, Gln, Gly, Ile, Leu, Met, Phe, Ser, Thr, Trp, Tyr, Val, Asn, Cys, or His
  misc_feature (9)..(9): Xaa can be Arg or Lys
IXNSMTIEX

SEQ ID NO: 49062 - protein, 10 aa, Artificial Sequence
  Description of Artificial Sequence: Synthetic peptide
  Seed: IQNSMTIERM
  misc_feature (2)..(2): Xaa can be Gln, Met, Leu, Lys, Ala, Arg, Glu, His, Ile, Ser, Thr, or Val
  misc_feature (10)..(10): Xaa can be Phe, Tyr, Met, or Leu
IXNSMTIERX

SEQ ID NO: 49063 - protein, 9 aa, Artificial Sequence
  Description of Artificial Sequence: Synthetic peptide
  Seed: IQPTFSVQR
  misc_feature (2)..(2): Xaa can be Ile, Leu, Met, Phe, Thr, Trp, Tyr, Val, Ala, Gln, Gly, or Ser
  misc_feature (9)..(9): Xaa can be Arg or Lys
IXPTFSVQX

SEQ ID NO: 49064 - protein, 9 aa, Artificial Sequence
  Description of Artificial Sequence: Synthetic peptide
  Seed: IRASVGGMV
  misc_feature (2)..(2): Xaa can be Arg
  misc_feature (9)..(9): Xaa can be Ile, Leu, Met, Phe, or Val
IXASVGGMX

SEQ ID NO: 49065 - protein, 9 aa, Artificial Sequence
  Description of Artificial Sequence: Synthetic peptide
  Seed: IRASVGKMI
  misc_feature (2)..(2): Xaa can be Arg
  misc_feature (9)..(9): Xaa can be Ile, Leu, Lys, Met, Phe, Tyr, or Val
IXASVGKMX

SEQ ID NO: 49066 - protein, 9 aa, Artificial Sequence
  Description of Artificial Sequence: Synthetic peptide
  Seed: IRASVGRMI
  misc_feature (2)..(2): Xaa can be Arg or Tyr
  misc_feature (9)..(9): Xaa can be Leu, Met, Phe, Tyr, Val, Arg, Ile, or Lys
IXASVGRMX

SEQ ID NO: 49067 - protein, 9 aa, Artificial Sequence
  Description of Artificial Sequence: Synthetic peptide
  Seed: IRGARVLPR
  misc_feature (2)..(2): Xaa can be Arg
  misc_feature (9)..(9): Xaa can be Arg, Ile, Leu, Lys, Met, Phe, or Tyr
IXGARVLPX

SEQ ID NO: 49068 - protein, 9 aa, Artificial Sequence
  Description of Artificial Sequence: Synthetic peptide
  Seed: IRGARVVPR
  misc_feature (2)..(2): Xaa can be Arg
  misc_feature (9)..(9): Xaa can be Arg, Leu, Lys, Met, or Phe
IXGARVVPX

SEQ ID NO: 49069 - protein, 9 aa, Artificial Sequence
  Description of Artificial Sequence: Synthetic peptide
  Seed: IRGKRVVPR
  misc_feature (2)..(2): Xaa can be Arg
  misc_feature (9)..(9): Xaa can be Arg or Lys
IXGKRVVPX

SEQ ID NO: 49070 - protein, 9 aa, Artificial Sequence
  Description of Artificial Sequence: Synthetic peptide
  Seed: IRGTKVFPR
  misc_feature (2)..(2): Xaa can be Arg, Met, Ala, Asn, Gln, Gly, Ile, Leu, Phe, Ser, Thr, Trp, Tyr, Val, Cys, His, or Lys
  misc_feature (9)..(9): Xaa can be Arg, Lys, Ile, Leu, Met, Phe, Tyr, Val, or His
IXGTKVFPX

SEQ ID NO: 49071 - protein, 9 aa, Artificial Sequence
  Description of Artificial Sequence: Synthetic peptide
  Seed: IRGTRIVPR
  misc_feature (2)..(2): Xaa can be Arg
  misc_feature (9)..(9): Xaa can be Arg or Lys
IXGTRIVPX

SEQ ID NO: 49072 - protein, 9 aa, Artificial Sequence
  Description of Artificial Sequence: Synthetic peptide
  Seed: IRGTRLVPR
  misc_feature (2)..(2): Xaa can be Arg
  misc_feature (9)..(9): Xaa can be Arg or Lys
IXGTRLVPX

SEQ ID NO: 49073 - protein, 11 aa, Artificial Sequence
  Description of Artificial Sequence: Synthetic peptide
  Seed: IRGTRMVPRGK
  misc_feature (2)..(2): Xaa can be Arg, Gln, Met, Phe, Ser, or Tyr
  misc_feature (11)..(11): Xaa can be Lys
IXGTRMVPRGX

SEQ ID NO: 49074 - protein, 9 aa, Artificial Sequence
  Description of Artificial Sequence: Synthetic peptide
  Seed: IRGTRVIPR
  misc_feature (2)..(2): Xaa can be Arg
  misc_feature (9)..(9): Xaa can be Arg or Lys
IXGTRVIPX

SEQ ID NO: 49075 - protein, 9 aa, Artificial Sequence
  Description of Artificial Sequence: Synthetic peptide
  Seed: IRGTRVLPR
  misc_feature (2)..(2): Xaa can be Arg
  misc_feature (9)..(9): Xaa can be Arg, Ile, Leu, Lys, Met, or Phe
IXGTRVLPX

SEQ ID NO: 49076 - protein, 9 aa, Artificial Sequence
  Description of Artificial Sequence: Synthetic peptide
  Seed: IRGTRVVPR
  misc_feature (2)..(2): Xaa can be Arg
  misc_feature (9)..(9): Xaa can be Arg or Lys
IXGTRVVPX

SEQ ID NO: 49077 - protein, 11 aa, Artificial Sequence
  Description of Artificial Sequence: Synthetic peptide
  Seed: IRMIKRGINDR
  misc_feature (2)..(2): Xaa can be Arg, Lys, Met, Phe, Ser, Thr, Tyr, or Val
  misc_feature (11)..(11): Xaa can be Arg
IXMIKRGINDX

SEQ ID NO: 49078 - protein, 11 aa, Artificial Sequence
  Description of Artificial Sequence: Synthetic peptide
  Seed: IRMIKRGVNDR
  misc_feature (2)..(2): Xaa can be Arg, Lys, Met, Phe, Ser, Thr, Tyr, or Val
  misc_feature (11)..(11): Xaa can be Arg
IXMIKRGVNDX

SEQ ID NO: 49079 - protein, 11 aa, Artificial Sequence
  Description of Artificial Sequence: Synthetic peptide
  Seed: IRMVKRGINDR
  misc_feature (2)..(2): Xaa can be Arg, Met, Phe, Thr, Tyr, or Val
  misc_feature (11)..(11): Xaa can be Arg
IXMVKRGINDX

SEQ ID NO: 49080 - protein, 9 aa, Artificial Sequence
  Description of Artificial Sequence: Synthetic peptide
  Seed: IRSSVGRMV
  misc_feature (2)..(2): Xaa can be Arg or Tyr
  misc_feature (9)..(9): Xaa can be Leu, Met, Phe, Tyr, Ile, or Val
IXSSVGRMX

SEQ ID NO: 49081 - protein, 11 aa, Artificial Sequence
  Description of Artificial Sequence: Synthetic peptide
  Seed: IRTRSGGNTNK
  misc_feature (2)..(2): Xaa can be Arg or Lys
  misc_feature (11)..(11): Xaa can be Ala, Lys, or Val
IXTRSGGNTNX

SEQ ID NO: 49082 - protein, 10 aa, Artificial Sequence
  Description of Artificial Sequence: Synthetic peptide
  Seed: IRTRSGGNTS
  misc_feature (2)..(2): Xaa can be Arg, Lys, Ala, His, Met, Phe, Ser, Trp, Tyr, Val, Asn, Asp, Cys, Gln, Glu, Gly, Ile, Leu, Pro, or Thr
  misc_feature (10)..(10): Xaa can be Ala, Lys, Val, Ile, Arg, Leu, Met, Ser, or Tyr
IXTRSGGNTX

SEQ ID NO: 49083 - protein, 8 aa, Artificial Sequence
  Description of Artificial Sequence: Synthetic peptide
  Seed: ISDMRTEI
  misc_feature (2)..(2): Xaa can be Ala, Ser, Thr, Val, Ile, Leu, or Met
  misc_feature (8)..(8): Xaa can be Leu, Met, Ile, Phe, or Val
IXDMRTEX

SEQ ID NO: 49084 - protein, 9 aa, Artificial Sequence
  Description of Artificial Sequence: Synthetic peptide
  Seed: ISDMRTEII
  misc_feature (2)..(2): Xaa can be Ala, Ile, Leu, Met, Ser, Thr, Val, Gln, Gly, or Cys
  misc_feature (9)..(9): Xaa can be Leu, Met, Phe, Ile, or Val
IXDMRTEIX

SEQ ID NO: 49085 - protein, 10 aa, Artificial Sequence
  Description of Artificial Sequence: Synthetic peptide
  Seed: ISDMRTEIIR
  misc_feature (2)..(2): Xaa can be Met, Phe, Tyr, Ala, Gln, Ile, Leu, Ser, Thr, Trp, or Val
  misc_feature (10)..(10): Xaa can be Arg or Lys
IXDMRTEIIX

SEQ ID NO: 49086 - protein, 9 aa, Artificial Sequence
  Description of Artificial Sequence: Synthetic peptide
  Seed: ISGFIRGKR
  misc_feature (2)..(2): Xaa can be Ile, Leu, Met, Phe, Ser, Thr, Trp, Tyr, Val, Ala, Asn, Gln, Gly, or Pro
  misc_feature (9)..(9): Xaa can be Arg or Lys
IXGFIRGKX

SEQ ID NO: 49087 - protein, 8 aa, Artificial Sequence
  Description of Artificial Sequence: Synthetic peptide
  Seed: ISGIGRFY
  misc_feature (2)..(2): Xaa can be Ser or Thr
  misc_feature (8)..(8): Xaa can be Tyr
IXGIGRFX

SEQ ID NO: 49088 - protein, 9 aa, Artificial Sequence
  Description of Artificial Sequence: Synthetic peptide
  Seed: ISGIGRFYI
  misc_feature (2)..(2): Xaa can be Ala, Ser, Thr, Val, Asn, Cys, Gln, Gly, Ile, Leu, or Met
  misc_feature (9)..(9): Xaa can be Trp, Phe, Tyr, Ile, Leu, Met, or Val
IXGIGRFYX

SEQ ID NO: 49089 - protein, 9 aa, Artificial Sequence
  Description of Artificial Sequence: Synthetic peptide
  Seed: ISIQPTFSV
  misc_feature (2)..(2): Xaa can be Ala, Gln, Leu, Met, Ser, Thr, Ile, Val, Gly, Cys, Pro, Asn, Phe, Tyr, Lys, or His
  misc_feature (9)..(9): Xaa can be Met, Trp, Tyr, Phe, Leu, Val, Ile, Ala, Thr, Cys, His, Ser, or Gly
IXIQPTFSX

SEQ ID NO: 49090 - protein, 11 aa, Artificial Sequence
  Description of Artificial Sequence: Synthetic peptide
  Seed: ISIQPTFSVQR
  misc_feature (2)..(2): Xaa can be Arg, Met, Phe, Thr, Trp, Tyr, Ala, Cys, Gln, Gly, His, Ile, Leu, Lys, Ser, or Val
  misc_feature (11)..(11): Xaa can be Arg or Lys
IXIQPTFSVQX

SEQ ID NO: 49091 - protein, 9 aa, Artificial Sequence
  Description of Artificial Sequence: Synthetic peptide
  Seed: ISTQPTFSV
  misc_feature (2)..(2): Xaa can be Leu, Met, Ala, Gln, Ile, Thr, Ser, Val, Gly, Cys, Asn, Phe, or Pro
  misc_feature (9)..(9): Xaa can be Trp, Met, Phe, Tyr, Leu, Ile, Val, Ala, Cys, Thr, or His
IXTQPTFSX

SEQ ID NO: 49092 - protein, 11 aa, Artificial Sequence
  Description of Artificial Sequence: Synthetic peptide
  Seed: ISTQPTFSVQR
  misc_feature (2)..(2): Xaa can be Arg, Met, Ala, Cys, Gln, Gly, His, Ile, Leu, Lys, Phe, Ser, Thr, Trp, Tyr, or Val
  misc_feature (11)..(11): Xaa can be Arg or Lys
IXTQPTFSVQX

SEQ ID NO: 49093 - protein, 9 aa, Artificial Sequence
  Description of Artificial Sequence: Synthetic peptide
  Seed: ISVQPAFSV
  misc_feature (2)..(2): Xaa can be Leu, Met, Ala, Gln, Ile, Thr, Val, Ser, Gly, Cys, Phe, Asn, or Pro
  misc_feature (9)..(9): Xaa can be Trp, Tyr, Met, Phe, Leu, Ile, Val, Ala, Cys, Thr, or His
IXVQPAFSX

SEQ ID NO: 49094 - protein, 11 aa, Artificial Sequence
  Description of Artificial Sequence: Synthetic peptide
  Seed: ISVQPAFSVQK
  misc_feature (2)..(2): Xaa can be Ser, Ala, Arg, Ile, Leu, Lys, Met, Thr, or Val
  misc_feature (11)..(11): Xaa can be Lys or Arg
IXVQPAFSVQX

SEQ ID NO: 49095 - protein, 9 aa, Artificial Sequence
  Description of Artificial Sequence: Synthetic peptide
  Seed: ISVQPTFSV
  misc_feature (2)..(2): Xaa can be Leu, Met, Ala, Gln, Ile, Ser, Thr, Val, Cys, Gly, Phe, Asn, Tyr, Lys, or Pro
  misc_feature (9)..(9): Xaa can be Trp, Met, Tyr, Phe, Leu, Val, Ile, Ala, Thr, His, Cys, or Ser
IXVQPTFSX

SEQ ID NO: 49096 - protein, 11 aa, Artificial Sequence
  Description of Artificial Sequence: Synthetic peptide
  Seed: ISVQPTFSVQR
  misc_feature (2)..(2): Xaa can be Arg, Met, Phe, Tyr, Ala, Cys, Gln, Glu, Gly, His, Ile, Leu, Lys, Ser, Thr, Trp, or Val
  misc_feature (11)..(11): Xaa can be Arg or Lys
IXVQPTFSVQX

SEQ ID NO: 49097 - protein, 8 aa, Artificial Sequence
  Description of Artificial Sequence: Synthetic peptide
  Seed: ITIEKMVL
  misc_feature (2)..(2): Xaa can be Ala, Ser, or Thr
  misc_feature (8)..(8): Xaa can be Leu, Met, Phe, Tyr, Ile, or Val
IXIEKMVX

SEQ ID NO: 49098 - protein, 10 aa, Artificial Sequence
  Description of Artificial Sequence: Synthetic peptide
  Seed: ITIEKMVLSA
  misc_feature (2)..(2): Xaa can be Leu, Met, Gln, Ile, Thr, Val, Ala, or Ser
  misc_feature (10)..(10): Xaa can be Val, Ala, Ile, Leu, Met, Thr, Cys, or Ser
IXIEKMVLSX

SEQ ID NO: 49099 - protein, 11 aa, Artificial Sequence
  Description of Artificial Sequence: Synthetic peptide
  Seed: ITIEKMVLSAF
  misc_feature (2)..(2): Xaa can be Ser, Thr, Gln, Met, Ala, Leu, Val, or Ile
  misc_feature (11)..(11): Xaa can be Phe, Tyr, Met, Trp, Leu, or Ile
IXIEKMVLSAX

SEQ ID NO: 49100 - protein, 8 aa, Artificial Sequence
  Description of Artificial Sequence: Synthetic peptide
  Seed: ITIERMIL
  misc_feature (2)..(2): Xaa can be Ala, Ser, or Thr
  misc_feature (8)..(8): Xaa can be Leu, Met, Phe, Tyr, Ile, or Val
IXIERMIX

SEQ ID NO: 49101 - protein, 10 aa, Artificial Sequence
  Description of Artificial Sequence: Synthetic peptide
  Seed: ITIERMILSA
  misc_feature (2)..(2): Xaa can be Gln, Leu, Met, Ile, Thr, Val, Ala, or Ser
  misc_feature (10)..(10): Xaa can be Val, Ala, Ile, Leu, Thr, Cys, Met, Ser, or Phe
IXIERMILSX

SEQ ID NO: 49102 - protein, 11 aa, Artificial Sequence
  Description of Artificial Sequence: Synthetic peptide
  Seed: ITIERMILSAF
  misc_feature (2)..(2): Xaa can be Ser, Met, Thr, Gln, Ala, His, Leu, Lys, Val, Arg, Asn, Glu, Gly, Ile, or Tyr
  misc_feature (11)..(11): Xaa can be Phe, Tyr, Met, Trp, Leu, or Ile
IXIERMILSAX

SEQ ID NO: 49103 - protein, 8 aa, Artificial Sequence
  Description of Artificial Sequence: Synthetic peptide
  Seed: ITIERMVL
  misc_feature (2)..(2): Xaa can be Ala, Ser, Thr, or Val
  misc_feature (8)..(8): Xaa can be Met, Leu, Phe, Tyr, Ile, or Val
IXIERMVX

SEQ ID NO: 49104 - protein, 10 aa, Artificial Sequence
  Description of Artificial Sequence: Synthetic peptide
  Seed: ITIERMVLSA
  misc_feature (2)..(2): Xaa can be Leu, Met, Gln, Ile, Thr, Val, Ala, or Ser
  misc_feature (10)..(10): Xaa can be Val, Ala, Ile, Leu, Thr, Met, Cys, Ser, or Phe
IXIERMVLSX

SEQ ID NO: 49105 - protein, 11 aa, Artificial Sequence
  Description of Artificial Sequence: Synthetic peptide
  Seed: ITIERMVLSAF
  misc_feature (2)..(2): Xaa can be Gln, Ser, Met, Thr, Ala, His, Ile, Leu, Lys, Val, Arg, Asn, Glu, Gly, Tyr, or Phe
  misc_feature (11)..(11): Xaa can be Phe, Tyr, Trp, Met, Leu, or Ile
IXIERMVLSAX

SEQ ID NO: 49106 - protein, 9 aa, Artificial Sequence
  Description of Artificial Sequence: Synthetic peptide
  Seed: ITLELRSKY
  misc_feature (2)..(2): Xaa can be Ala, Gln, Ser, Thr, Met, Leu, Lys, Val, His, Ile, Arg, Asn, Glu, Gly, Phe, Trp, or Tyr
  misc_feature (9)..(9): Xaa can be Tyr, Phe, Met, Trp, Leu, Ile, Val, or His
IXLELRSKX

SEQ ID NO: 49107 - protein, 10 aa, Artificial Sequence
  Description of Artificial Sequence: Synthetic peptide
  Seed: ITLELRSKYW
  misc_feature (2)..(2): Xaa can be Ser, Thr, Ala, Val, Cys, Gln, Gly, Ile, Leu, or Met
  misc_feature (10)..(10): Xaa can be Trp, Phe, Tyr, Leu, or Met
IXLELRSKYX

SEQ ID NO: 49108 - protein, 11 aa, Artificial Sequence
  Description of Artificial Sequence: Synthetic peptide
  Seed: ITLELRSKYWA
  misc_feature (2)..(2): Xaa can be Ser, Thr, Ala, Gly, Ile, Met, or Val
  misc_feature (11)..(11): Xaa can be Trp, Ala, Arg, Asn, Asp, Cys, Gln, Glu, Gly, His, Ile, Leu, Lys, Met, Phe, Pro, Ser, Thr, Tyr, or Val
IXLELRSKYWX

SEQ ID NO: 49109 - protein, 8 aa, Artificial Sequence
  Description of Artificial Sequence: Synthetic peptide
  Seed: ITMERMVL
  misc_feature (2)..(2): Xaa can be Ala, Met, Ser, Thr, Leu, Pro, Gly, Val, Ile, Asn, Gln, Arg, Lys, or Phe
  misc_feature (8)..(8): Xaa can be Leu, Met, Phe, Ile, Tyr, Val, Trp, or Ala
IXMERMVX

SEQ ID NO: 49110 - protein, 10 aa, Artificial Sequence
  Description of Artificial Sequence: Synthetic peptide
  Seed: ITMERMVLSA
  misc_feature (2)..(2): Xaa can be Met, Leu, Gln, Ile, Val, Thr, Ala, Ser, Phe, Tyr, Trp, Cys, Arg, Asn, Asp, Glu, Gly, His, Lys, or Pro
  misc_feature (10)..(10): Xaa can be Val, Leu, Ile, Lys, Ala, Met, Thr, Cys, Phe, Ser, Gly, or Pro
IXMERMVLSX

SEQ ID NO: 49111 - protein, 11 aa, Artificial Sequence
  Description of Artificial Sequence: Synthetic peptide
  Seed: ITMERMVLSAF
  misc_feature (2)..(2): Xaa can be Gln, Ser, Thr, Ala, Met, Ile, Lys, Val, Arg, Asn, Cys, Glu, Gly, His, Leu, Phe, Pro, Trp, or Tyr
  misc_feature (11)..(11): Xaa can be Phe, Tyr, Met, Trp, Leu, Ile, or His
IXMERMVLSAX

SEQ ID NO: 49112 - protein, 10 aa, Artificial Sequence
  Description of Artificial Sequence: Synthetic peptide
  Seed: IVASGYDFER
  misc_feature (2)..(2): Xaa can be Met, Thr, Val, Ala, Gln, Glu, Gly, Ile, Leu, Phe, Ser, Trp, Tyr, Arg, Asn, Asp, Cys, His, Lys, or Pro
  misc_feature (10)..(10): Xaa can be Arg, Lys, or Tyr
IXASGYDFEX

SEQ ID NO: 49113 - protein, 10 aa, Artificial Sequence
  Description of Artificial Sequence: Synthetic peptide
  Seed: IVPRGQLSTR
  misc_feature (2)..(2): Xaa can be Phe, Gln, Ile, Leu, Met, Ser, Thr, Trp, Tyr, or Val
  misc_feature (10)..(10): Xaa can be Arg or Lys
IXPRGQLSTX

SEQ ID NO: 49114 - protein, 9 aa, Artificial Sequence
  Description of Artificial Sequence: Synthetic peptide
  Seed: IVPSFDMSK
  misc_feature (2)..(2): Xaa can be Ala, Ile, Leu, Met, Ser, Thr, Val, or Phe
  misc_feature (9)..(9): Xaa can be Arg or Lys
IXPSFDMSX

SEQ ID NO: 49115 - protein, 9 aa, Artificial Sequence
  Description of Artificial Sequence: Synthetic peptide
  Seed: IVSSTLELR
  misc_feature (2)..(2): Xaa can be Thr, Ala, Gln, Ile, Leu, Met, Phe, Ser, Trp, Tyr, Val, Asn, Gly, or Pro
  misc_feature (9)..(9): Xaa can be Arg, Lys, or Tyr
IXSSTLELX

SEQ ID NO: 49116 - protein, 11 aa, Artificial Sequence
  Description of Artificial Sequence: Synthetic peptide
  Seed: IVSSTLELRSR
  misc_feature (2)..(2): Xaa can be Ile, Leu, Met, Phe, Ser, Thr, Tyr, or Val
  misc_feature (11)..(11): Xaa can be Arg
IXSSTLELRSX

SEQ ID NO: 49117 - protein, 11 aa, Artificial Sequence
  Description of Artificial Sequence: Synthetic peptide
  Seed: IWHSNLNDATY
  misc_feature (2)..(2): Xaa can be Ser, Thr, Ala, Gln, His, Ile, Leu, Met, Trp, Val, Arg, Asn, Asp, Cys, Glu, Gly, Lys, Phe, Pro, or Tyr
  misc_feature (11)..(11): Xaa can be Phe, Trp, Tyr, or Met
IXHSNLNDATX

SEQ ID NO: 49118 - protein, 10 aa, Artificial Sequence
  Description of Artificial Sequence: Synthetic peptide
  Seed: IWRQANNGEY
  misc_feature (2)..(2): Xaa can be Ala, Asn, Gln, Gly, Ile, Leu, Met, Phe, Ser, Thr, Trp, Tyr, or Val
  misc_feature (10)..(10): Xaa can be Tyr
IXRQANNGEX

SEQ ID NO: 49119 - protein, 11 aa, Artificial Sequence
  Description of Artificial Sequence: Synthetic peptide
  Seed: IYKKRDGKWMR
  misc_feature (2)..(2): Xaa can be Met, Phe, Gln, Ile, Leu, Ser, Thr, Tyr, or Val
  misc_feature (11)..(11): Xaa can be Arg or Lys
IXKKRDGKWMX

SEQ ID NO: 49120 - protein, 9 aa, Artificial Sequence
  Description of Artificial Sequence: Synthetic peptide
  Seed: IYKRIDGKW
  misc_feature (2)..(2): Xaa can be Tyr, Phe, or Trp
  misc_feature (9)..(9): Xaa can be Phe, Trp, Ile, Leu, or Met
IXKRIDGKX

SEQ ID NO: 49121 - protein, 11 aa, Artificial Sequence
  Description of Artificial Sequence: Synthetic peptide
  Seed: IYKRIDGKWMR
  misc_feature (2)..(2): Xaa can be Leu, Met, Phe, Trp, Tyr, Val, Ala, Gln, Ile, Ser, or Thr
  misc_feature (11)..(11): Xaa can be Arg or Lys
IXKRIDGKWMX

SEQ ID NO: 49122 - protein, 11 aa, Artificial Sequence
  Description of Artificial Sequence: Synthetic peptide
  Seed: IYKRRDGKWMR
  misc_feature (2)..(2): Xaa can be Met, Phe, Ala, Gln, Ile, Leu, Ser, Thr, Trp, Tyr, or Val
  misc_feature (11)..(11): Xaa can be Arg or Lys
IXKRRDGKWMX

SEQ ID NO: 49123 - protein, 11 aa, Artificial Sequence
  Description of Artificial Sequence: Synthetic peptide
  Seed: IYKRREGKWVR
  misc_feature (2)..(2): Xaa can be Gln, Ile, Leu, Met, Phe, Ser, Thr, Tyr, or Val
  misc_feature (11)..(11): Xaa can be Arg
IXKRREGKWVX

SEQ ID NO: 49124 - protein, 9 aa, Artificial Sequence
  Description of Artificial Sequence: Synthetic peptide
  Seed: IYKRVDGKW
  misc_feature (2)..(2): Xaa can be Tyr, Trp, or Phe
  misc_feature (9)..(9): Xaa can be Phe, Trp, Ile, Leu, or Met
IXKRVDGKX

SEQ ID NO: 49125 - protein, 11 aa, Artificial Sequence
  Description of Artificial Sequence: Synthetic peptide
  Seed: IYKRVDGKWMR
  misc_feature (2)..(2): Xaa can be Met, Phe, Tyr, Ala, Gln, Ile, Leu, Ser, Thr, Trp, or Val
  misc_feature (11)..(11): Xaa can be Arg or Lys
IXKRVDGKWMX

SEQ ID NO: 49126 - protein, 11 aa, Artificial Sequence
  Description of Artificial Sequence: Synthetic peptide
  Seed: IYKRVDGKWVR
  misc_feature (2)..(2): Xaa can be Met, Phe, Gln, Ile, Leu, Ser, Thr, Trp, Tyr, or Val
  misc_feature (11)..(11): Xaa can be Arg or Lys
IXKRVDGKWVX

SEQ ID NO: 49127 - protein, 9 aa, Artificial Sequence
  Description of Artificial Sequence: Synthetic peptide
  Seed: IYKRVDGRW
  misc_feature (2)..(2): Xaa can be Tyr, Trp, or Phe
  misc_feature (9)..(9): Xaa can be Phe, Trp, Ile, or Leu
IXKRVDGRX

SEQ ID NO: 49128 - protein, 11 aa, Artificial Sequence
  Description of Artificial Sequence: Synthetic peptide
  Seed: IYKRVDGRWMR
  misc_feature (2)..(2): Xaa can be Gln, Ile, Leu, Met, Phe, Thr, Trp, Tyr, Val, Ala, Gly, or Ser
  misc_feature (11)..(11): Xaa can be Arg or Lys
IXKRVDGRWMX

SEQ ID NO: 49129 - protein, 9 aa, Artificial Sequence
  Description of Artificial Sequence: Synthetic peptide
  Seed: IYKRVDRKW
  misc_feature (2)..(2): Xaa can be Tyr, Phe, or Trp
  misc_feature (9)..(9): Xaa can be Phe, Ile, Leu, Met, or Trp
IXKRVDRKX

SEQ ID NO: 49130 - protein, 11 aa, Artificial Sequence
  Description of Artificial Sequence: Synthetic peptide
  Seed: IYKRVDRKWMR
  misc_feature (2)..(2): Xaa can be Met, Phe, Tyr, Ala, Gln, Ile, Leu, Ser, Thr, Trp, or Val
  misc_feature (11)..(11): Xaa can be Arg or Lys
IXKRVDRKWMX

SEQ ID NO: 49131 - protein, 9 aa, Artificial Sequence
  Description of Artificial Sequence: Synthetic peptide
  Seed: IYKRVGGKW
  misc_feature (2)..(2): Xaa can be Tyr, Trp, or Phe
  misc_feature (9)..(9): Xaa can be Phe, Leu, Trp, Ile, or Met
IXKRVGGKX

SEQ ID NO: 49132 - protein, 11 aa, Artificial Sequence
  Description of Artificial Sequence: Synthetic peptide
  Seed: IYKRVGGKWMR
  misc_feature (2)..(2): Xaa can be Met, Phe, Trp, Tyr, Ala, Gln, Gly, Ile, Leu, Ser, Thr, or Val
  misc_feature (11)..(11): Xaa can be Arg or Lys
IXKRVGGKWMX

SEQ ID NO: 49133 - protein, 9 aa, Artificial Sequence
  Description of Artificial Sequence: Synthetic peptide
  Seed: IYKRVGGRW
  misc_feature (2)..(2): Xaa can be Tyr, Trp, or Phe
  misc_feature (9)..(9): Xaa can be Phe, Trp, Ile, Leu, or Met
IXKRVGGRX

SEQ ID NO: 49134 - protein, 10 aa, Artificial Sequence
  Description of Artificial Sequence: Synthetic peptide
  Seed: IYKRVGGRWM
  misc_feature (2)..(2): Xaa can be Tyr
  misc_feature (10)..(10): Xaa can be Met or Phe
IXKRVGGRWX

SEQ ID NO: 49135 - protein, 11 aa, Artificial Sequence
  Description of Artificial Sequence: Synthetic peptide
  Seed: IYKRVGGRWMR
  misc_feature (2)..(2): Xaa can be Gln, Ile, Leu, Met, Phe, Ser, Thr, Trp, Tyr, Val, Ala, or Gly
  misc_feature (11)..(11): Xaa can be Arg or Lys
IXKRVGGRWMX

SEQ ID NO: 49136 - protein, 9 aa, Artificial Sequence
  Description of Artificial Sequence: Synthetic peptide
  Seed: IYKRVNGKW
  misc_feature (2)..(2): Xaa can be Tyr, Trp, or Phe
  misc_feature (9)..(9): Xaa can be Phe, Trp, Ile, Leu, or Met
IXKRVNGKX

SEQ ID NO: 49137 - protein, 11 aa, Artificial Sequence
  Description of Artificial Sequence: Synthetic peptide
  Seed: IYKRVNGKWMR
  misc_feature (2)..(2): Xaa can be Leu, Met, Phe, Trp, Tyr, Ala, Gln, Gly, Ile, Ser, Thr, or Val
  misc_feature (11)..(11): Xaa can be Arg or Lys
IXKRVNGKWMX

SEQ ID NO: 49138 - protein, 9 aa, Artificial Sequence
  Description of Artificial Sequence: Synthetic peptide
  Seed: IYRKIDGKW
  misc_feature (2)..(2): Xaa can be Tyr, Trp, or Phe
  misc_feature (9)..(9): Xaa can be Phe, Trp, Ile, or Leu
IXRKIDGKX

SEQ ID NO: 49139 - protein, 11 aa, Artificial Sequence
  Description of Artificial Sequence: Synthetic peptide
  Seed: IYRKIDGKWMR
  misc_feature (2)..(2): Xaa can be Leu, Met, Phe, Thr, Trp, Tyr, Val, Ala, Gln, Ile, or Ser
  misc_feature (11)..(11): Xaa can be Arg or Lys
IXRKIDGKWMX

SEQ ID NO: 49140 - protein, 11 aa, Artificial Sequence
  Description of Artificial Sequence: Synthetic peptide
  Seed: IYRKREGKWIR
  misc_feature (2)..(2): Xaa can be Ile, Leu, Met, Phe, Ser, Thr, Tyr, or Val
  misc_feature (11)..(11): Xaa can be Arg
IXRKREGKWIX

SEQ ID NO: 49141 - protein, 9 aa, Artificial Sequence
  Description of Artificial Sequence: Synthetic peptide
  Seed: IYRRIDGKW
  misc_feature (2)..(2): Xaa can be Tyr, Trp, or Phe
  misc_feature (9)..(9): Xaa can be Phe, Trp, Ile, or Leu
IXRRIDGKX

SEQ ID NO: 49142 - protein, 11 aa, Artificial Sequence
  Description of Artificial Sequence: Synthetic peptide
  Seed: IYRRIDGKWIR
  misc_feature (2)..(2): Xaa can be Met, Phe, Tyr, Ala, Gln, Ile, Leu, Ser, Thr, Trp, or Val
  misc_feature (11)..(11): Xaa can be Arg or Lys
IXRRIDGKWIX

SEQ ID NO: 49143 - protein, 11 aa, Artificial Sequence
  Description of Artificial Sequence: Synthetic peptide
  Seed: IYRRIDGKWMR
  misc_feature (2)..(2): Xaa can be Leu, Met, Phe, Thr, Trp, Tyr, Val, Ala, Gln, Gly, Ile, or Ser
  misc_feature (11)..(11): Xaa can be Arg or Lys
IXRRIDGKWMX

SEQ ID NO: 49144 - protein, 11 aa, Artificial Sequence
  Description of Artificial Sequence: Synthetic peptide
  Seed: IYRRIDGKWTR
  misc_feature (2)..(2): Xaa can be Leu, Met, Phe, Thr, Trp, Tyr, Ala, Gln, Gly, Ile, Ser, or Val
  misc_feature (11)..(11): Xaa can be Arg or Lys
IXRRIDGKWTX

SEQ ID NO: 49145 - protein, 11 aa, Artificial Sequence
  Description of Artificial Sequence: Synthetic peptide
  Seed: IYRRKDGKWMR
  misc_feature (2)..(2): Xaa can be Met, Phe, Ala, Gln, Ile, Leu, Ser, Thr, Trp, Tyr, or Val
  misc_feature (11)..(11): Xaa can be Arg or Lys
IXRRKDGKWMX

SEQ ID NO: 49146 - protein, 11 aa, Artificial Sequence
  Description of Artificial Sequence: Synthetic peptide
  Seed: IYRRRDGKWIR
  misc_feature (2)..(2): Xaa can be Gln, Ile, Leu, Met, Phe, Ser, Thr, Tyr, or Val
  misc_feature (11)..(11): Xaa can be Arg
IXRRRDGKWIX

SEQ ID NO: 49147 - protein, 11 aa, Artificial Sequence
  Description of Artificial Sequence: Synthetic peptide
  Seed: IYRRRDGKWMR
  misc_feature (2)..(2): Xaa can be Met, Phe, Ala, Gln, Ile, Leu, Ser, Thr, Trp, Tyr, or Val
  misc_feature (11)..(11): Xaa can be Arg or Lys
IXRRRDGKWMX

SEQ ID NO: 49148 - protein, 11 aa, Artificial Sequence
  Description of Artificial Sequence: Synthetic peptide
  Seed: IYRRRDGKWVR
  misc_feature (2)..(2): Xaa can be Met, Gln, Ile, Leu, Phe, Ser, Thr, Tyr, or Val
  misc_feature (11)..(11): Xaa can be Arg or Lys
IXRRRDGKWVX

SEQ ID NO: 49149 - protein, 11 aa, Artificial Sequence
  Description of Artificial Sequence: Synthetic peptide
  Seed: IYRRREGKWVR
  misc_feature (2)..(2): Xaa can be Gln, Ile, Leu, Met, Phe, Ser, Thr, Tyr, or Val
  misc_feature (11)..(11): Xaa can be Arg
IXRRREGKWVX

SEQ ID NO: 49150 - protein, 11 aa, Artificial Sequence
  Description of Artificial Sequence: Synthetic peptide
  Seed: IYRRRNGKWVR
  misc_feature (2)..(2): Xaa can be Met, Phe, Gln, Ile, Leu, Ser, Thr, Trp, Tyr, or Val
  misc_feature (11)..(11): Xaa can be Arg or Lys
IXRRRNGKWVX

SEQ ID NO: 49151 - protein, 9 aa, Artificial Sequence
  Description of Artificial Sequence: Synthetic peptide
  Seed: IYRRVDGKW
  misc_feature (2)..(2): Xaa can be Tyr, Trp, or Phe
  misc_feature (9)..(9): Xaa can be Phe, Trp, Ile, or Leu
IXRRVDGKX

SEQ ID NO: 49152 - protein, 11 aa, Artificial Sequence
  Description of Artificial Sequence: Synthetic peptide
  Seed: IYRRVDGKWIR
  misc_feature (2)..(2): Xaa can be Met, Phe, Gln, Ile, Leu, Ser, Thr, Trp, Tyr, or Val
  misc_feature (11)..(11): Xaa can be Arg or Lys
IXRRVDGKWIX

SEQ ID NO: 49153 - protein, 11 aa, Artificial Sequence
  Description of Artificial Sequence: Synthetic peptide
  Seed: IYRRVDGKWMR
  misc_feature (2)..(2): Xaa can be Met, Phe, Trp, Tyr, Ala, Gln, Ile, Leu, Ser, Thr, or Val
  misc_feature (11)..(11): Xaa can be Arg or Lys
IXRRVDGKWMX

SEQ ID NO: 49154 - protein, 9 aa, Artificial Sequence
  Description of Artificial Sequence: Synthetic peptide
  Seed: IYRRVGGKW
  misc_feature (2)..(2): Xaa can be Tyr, Phe, or Trp
  misc_feature (9)..(9): Xaa can be Phe, Ile, Leu, or Trp
IXRRVGGKX

SEQ ID NO: 49155 - protein, 11 aa, Artificial Sequence
  Description of Artificial Sequence: Synthetic peptide
  Seed: IYRRVGGKWIR
  misc_feature (2)..(2): Xaa can be Met, Phe, Tyr, Ala, Gln, Ile, Leu, Ser, Thr, Trp, or Val
  misc_feature (11)..(11): Xaa can be Arg or Lys
IXRRVGGKWIX

SEQ ID NO: 49156 - protein, 9 aa, Artificial Sequence
  Description of Artificial Sequence: Synthetic peptide
  Seed: IYRRVNGKW
  misc_feature (2)..(2): Xaa can be Tyr, Trp, or Phe
  misc_feature (9)..(9): Xaa can be Phe, Trp, Ile, or Leu
IXRRVNGKX

SEQ ID NO: 49157 - protein, 11 aa, Artificial Sequence
  Description of Artificial Sequence: Synthetic peptide
  Seed: IYRRVNGKWMR
  misc_feature (2)..(2): Xaa can be Leu, Met, Phe, Thr, Trp, Tyr, Val, Ala, Gln, Gly, Ile, or Ser
  misc_feature (11)..(11): Xaa can be Arg or Lys
IXRRVNGKWMX

SEQ ID NO: 49158 - protein, 9 aa, Artificial Sequence
  Description of Artificial Sequence: Synthetic peptide
  Seed: KAANPIVPS
  misc_feature (2)..(2): Xaa can be Thr, Ser, Val, Ala, Ile, Met, Tyr, Gln, Phe, Trp, Gly, Asn, Leu, Cys, His, or Lys
  misc_feature (9)..(9): Xaa can be Lys, Ala, Val, Ile, Arg, Gly, Leu, Met, Ser, Tyr, Thr, Cys, His, Asn, Gln, Phe, or Pro
KXANPIVPX

SEQ ID NO: 49159 - protein, 10 aa, Artificial Sequence
  Description of Artificial Sequence: Synthetic peptide
  Seed: KAANPIVPSF
  misc_feature (2)..(2): Xaa can be Gln, Met, Ser, Thr, Ala, Ile, Leu, Lys, Phe, Trp, Tyr, Val, Arg, Asn, Asp, Cys, Glu, Gly, His, or Pro
  misc_feature (10)..(10): Xaa can be Ile, Met, Phe, Trp, Tyr, Leu, Val, or His
KXANPIVPSX

SEQ ID NO: 49160 - protein, 9 aa, Artificial Sequence
  Description of Artificial Sequence: Synthetic peptide
  Seed: KAASPIVPS
  misc_feature (2)..(2): Xaa can be Thr, Ser, Val, Ala, Ile, Met, Tyr, Phe, Gln, Gly, Leu, Trp, Asn, Arg, Cys, His, or Lys
  misc_feature (9)..(9): Xaa can be Lys, Ala, Ile, Val, Arg, Gly, Leu, Met, Ser, Tyr, His, Thr, Cys, Pro, Asn, Gln, Glu, or Ph e
KXASPIVPX

SEQ ID NO: 49161 - protein, 10 aa, Artificial Sequence
  Description of Artificial Sequence: Synthetic peptide
  Seed: KAASPIVPSF
  misc_feature (2)..(2): Xaa can be Gln, Met, Ser, Thr, Ala, Arg, Asn, Asp, Cys, Glu, Gly, His, Ile, Leu, Lys, Phe, Pro, Trp, Tyr, or Val
  misc_feature (10)..(10): Xaa can be Ile, Leu, Met, Phe, Trp, Tyr, Val, or His
KXASPIVPSX

SEQ ID NO: 49162 - protein, 11 aa, Artificial Sequence
  Description of Artificial Sequence: Synthetic peptide
  Seed: KAMMDQVRESR
  misc_feature (2)..(2): Xaa can be Arg, Gln, Ile, Leu, Met, Phe, Ser, Thr, Trp, Tyr, Val, Ala, Asn, Asp, Cys, Glu, Gly, His, Lys, or Pro
  misc_feature (11)..(11): Xaa can be Arg or Lys
KXMMDQVRESX

SEQ ID NO: 49163 - protein, 9 aa, Artificial Sequence
  Description of Artificial Sequence: Synthetic peptide
  Seed: KASADQISV
  misc_feature (2)..(2): Xaa can be Ala, Ser, or Thr
  misc_feature (9)..(9): Xaa can be Ile, Leu, Met, Phe, Tyr, or Val
KXSADQISX

SEQ ID NO: 49164 - protein, 9 aa, Artificial Sequence
  Description of Artificial Sequence: Synthetic peptide
  Seed: KASAGQISV
  misc_feature (2)..(2): Xaa can be Thr, Ala, Ser, Val, Met, Ile, Gly, Leu, Tyr, Cys, Gln, Phe, Asn, Pro, or Trp
  misc_feature (9)..(9): Xaa can be Trp, Lys, Phe, Tyr, Ala, Met, Ile, Val, Leu, or Ser
KXSAGQISX

SEQ ID NO: 49165 - protein, 8 aa, Artificial Sequence
  Description of Artificial Sequence: Synthetic peptide
  Seed: KATIMAAF
  misc_feature (2)..(2): Xaa can be Ser, Thr, Ala, Pro, or Val
  misc_feature (8)..(8): Xaa can be Phe, Trp, Met, or Tyr
KXTIMAAX

SEQ ID NO: 49166 - protein, 10 aa, Artificial Sequence
  Description of Artificial Sequence: Synthetic peptide
  Seed: KATIMAAFTG
  misc_feature (2)..(2): Xaa can be Ser, Ala, Thr, Arg, Asn, Asp, Cys, Gln, Glu, Gly, His, Ile, Leu, Lys, Met, Phe, Pro, Trp, Tyr, or Val
  misc_feature (10)..(10): Xaa can be Ile, Leu, Met, Phe, Trp, Tyr, Val, Gly, Ala, Asn, or Cys
KXTIMAAFTX

SEQ ID NO: 49167 - protein, 10 aa, Artificial Sequence
  Description of Artificial Sequence: Synthetic peptide
  Seed: KATNPIVPSF
  misc_feature (2)..(2): Xaa can be Ile, Ala, Arg, Asn, Asp, Cys, Gln, Glu, Gly, His, Leu, Ser, Lys, Met, Phe, Pro, Thr, Trp, Tyr, or Val
  misc_feature (10)..(10): Xaa can be Ile, Leu, Met, Phe, Trp, Tyr, Ala, Lys, Ser, Val, or Gly
KXTNPIVPSX

SEQ ID NO: 49168 - protein, 10 aa, Artificial Sequence
  Description of Artificial Sequence: Synthetic peptide
  Seed: KATNPVVPSF
  misc_feature (2)..(2): Xaa can be Gln, Ser, Ala, Arg, Asn, Asp, Cys, Glu, Gly, His, Ile, Leu, Lys, Met, Phe, Pro, Thr, Trp, Tyr, or Val
  misc_feature (10)..(10): Xaa can be Ile, Leu, Met, Phe, Trp, Tyr, His, or Val
KXTNPVVPSX

SEQ ID NO: 49169 - protein, 10 aa, Artificial Sequence
  Description of Artificial Sequence: Synthetic peptide
  Seed: KATSPIVPSF
  misc_feature (2)..(2): Xaa can be Gln, Ser, Ala, Arg, Asn, Asp, Cys, Glu, Gly, His, Ile, Leu, Lys, Met, Phe, Pro, Thr, Trp, Tyr, or Val
  misc_feature (10)..(10): Xaa can be Ile, Leu, Met, Phe, Trp, Tyr, His, or Val
KXTSPIVPSX

SEQ ID NO: 49170 - protein, 11 aa, Artificial Sequence
  Description of Artificial Sequence: Synthetic peptide
  Seed: KDEIRRIWRQA
  misc_feature (2)..(2): Xaa can be Thr, Ser, Val, Phe, Trp, Tyr, Met, Pro, Asp, Glu, Gly, Leu, Lys, Ala, Arg, Asn, Cys, Gln, His, or Ile
  misc_feature (11)..(11): Xaa can be Arg, Ala, Lys, Val, Met, Ile, Leu, Ser, Thr, or Tyr
KXEIRRIWRQX

SEQ ID NO: 49171 - protein, 10 aa, Artificial Sequence
  Description of Artificial Sequence: Synthetic peptide
  Seed: KDPKKTGGPI
  misc_feature (2)..(2): Xaa can be Ala, Arg, Asn, Asp, Cys, Gln, Glu, Gly, His, Ile, Leu, Lys, Met, Phe, Pro, Ser, Thr, Trp, Tyr, or Val
  misc_feature (10)..(10): Xaa can be Ala, Cys, Ile, Leu, Met, Phe, Thr, or Val
KXPKKTGGPX

SEQ ID NO: 49172 - protein, 10 aa, Artificial Sequence
  Description of Artificial Sequence: Synthetic peptide
  Seed: KDPKRTGGPI
  misc_feature (2)..(2): Xaa can be Pro, Ala, Arg, Asn, Asp, Cys, Gln, Glu, Gly, His, Ile, Leu, Lys, Met, Phe, Ser, Thr, Trp, Tyr, or Val
  misc_feature (10)..(10): Xaa can be Ala, Cys, Ile, Leu, Met, Phe, Thr, Val, or Tyr
KXPKRTGGPX

SEQ ID NO: 49173 - protein, 11 aa, Artificial Sequence
  Description of Artificial Sequence: Synthetic peptide
  Seed: KEEIRRIWRHA
  misc_feature (2)..(2): Xaa can be Thr, Ser, Val, Met, Phe, Trp, Tyr, Gln, Ala, Arg, Asn, Asp, Cys, Glu, Gly, His, Ile, Leu, Lys, or Pro
  misc_feature (11)..(11): Xaa can be Ala, Lys, Val, Met, Ile, Leu, Ser, or Tyr
KXEIRRIWRHX

SEQ ID NO: 49174 - protein, 11 aa, Artificial Sequence
  Description of Artificial Sequence: Synthetic peptide
  Seed: KEEIRRTWRQA
  misc_feature (2)..(2): Xaa can be Thr, Ser, Val, Ala, Met, Phe, Trp, Tyr, Gln, Arg, Asn, Asp, Cys, Glu, Gly, His, Ile, Leu, Lys, or Pro
  misc_feature (11)..(11): Xaa can be Ala, Lys, Val, Ile, Met, Leu, Ser, Thr, or Tyr
KXEIRRTWRQX

SEQ ID NO: 49175 - protein, 11 aa, Artificial Sequence
  Description of Artificial Sequence: Synthetic peptide
  Seed: KEEIRRVWRQA
  misc_feature (2)..(2): Xaa can be Thr, Ser, Tyr, Val, Phe, Trp, Gln, Met, Ala, Arg, Asn, Asp, Cys, Glu, Gly, His, Ile, Leu, Lys, or Pro
  misc_feature (11)..(11): Xaa can be Ala, Lys, Val, Met, Ile, Leu, Ser, Thr, or Tyr
KXEIRRVWRQX

SEQ ID NO: 49176 - protein, 11 aa, Artificial Sequence
  Description of Artificial Sequence: Synthetic peptide
  Seed: KEELRRIWRQA
  misc_feature (2)..(2): Xaa can be Thr, Ser, Val, Ala, Ile, Met, Phe, Trp, Tyr, Arg, Asn, Asp, Cys, Gln, Glu, Gly, His, Leu, Lys, or Pro
  misc_feature (11)..(11): Xaa can be Ala, Lys, Val, Ile, Leu, Met, Ser, Thr, or Tyr
KXELRRIWRQX

SEQ ID NO: 49177 - protein, 11 aa, Artificial Sequence
  Description of Artificial Sequence: Synthetic peptide
  Seed: KEEMRRIWRQA
  misc_feature (2)..(2): Xaa can be Thr, Ser, Val, Trp, Tyr, Ala, Ile, Phe, Arg, Asn, Asp, Cys, Gln, Glu, Gly, His, Leu, Lys, Met, or Pro
  misc_feature (11)..(11): Xaa can be Ala, Lys, Val, Met, Ile, Ser, Leu, Thr, or Tyr
KXEMRRIWRQX

SEQ ID NO: 49178 - protein, 11 aa, Artificial Sequence
  Description of Artificial Sequence: Synthetic peptide
  Seed: KEEVRRIWRQA
  misc_feature (2)..(2): Xaa can be Thr, Ala, Arg, Asn, Asp, Cys, Gln, Glu, Gly, His, Ile, Leu, Lys, Met, Phe, Pro, Ser, Trp, Tyr, or Val
  misc_feature (11)..(11): Xaa can be Ala, Ile, Leu, Lys, Met, Ser, Val, Thr, or Tyr
KXEVRRIWRQX

SEQ ID NO: 49179 - protein, 11 aa, Artificial Sequence
  Description of Artificial Sequence: Synthetic peptide
  Seed: KEGSYFFGDNA
  misc_feature (2)..(2): Xaa can be Glu
  misc_feature (11)..(11): Xaa can be Ala
KXGSYFFGDNX

SEQ ID NO: 49180 - protein, 9 aa, Artificial Sequence
  Description of Artificial Sequence: Synthetic peptide
  Seed: KEGYSLVGI
  misc_feature (2)..(2): Xaa can be Glu
  misc_feature (9)..(9): Xaa can be Ala, Ile, Leu, Met, Phe, Pro, or Val
KXGYSLVGX

SEQ ID NO: 49181 - protein, 10 aa, Artificial Sequence
  Description of Artificial Sequence: Synthetic peptide
  Seed: KENPAHKSQL
  misc_feature (2)..(2): Xaa can be Glu
  misc_feature (10)..(10): Xaa can be Ile, Leu, Met, Phe, or Val
KXNPAHKSQX

SEQ ID NO: 49182 - protein, 10 aa, Artificial Sequence
  Description of Artificial Sequence: Synthetic peptide
  Seed: KFQTAAQKAM
  misc_feature (2)..(2): Xaa can be Gln, Tyr, Lys, Met, Phe, Ala, Arg, Asn, Asp, Cys, Glu, Gly, His, Ile, Leu, Pro, Ser, Thr, Trp, or Val
  misc_feature (10)..(10): Xaa can be Met, Phe, Tyr, Leu, Trp, or Ile
KXQTAAQKAX

SEQ ID NO: 49183 - protein, 8 aa, Artificial Sequence
  Description of Artificial Sequence: Synthetic peptide
  Seed: KFQTAAQR
  misc_feature (2)..(2): Xaa can be Leu, Met, Phe, Thr, Tyr, or Val
  misc_feature (8)..(8): Xaa can be Arg
KXQTAAQX

SEQ ID NO: 49184 - protein, 10 aa, Artificial Sequence
  Description of Artificial Sequence: Synthetic peptide
  Seed: KFQTAAQRAM
  misc_feature (2)..(2): Xaa can be Gln, Tyr, Ala, Arg, Asn, Asp, Cys, Glu, Gly, His, Ile, Leu, Lys, Met, Phe, Pro, Ser, Thr, Trp, or Val
  misc_feature (10)..(10): Xaa can be Leu, Met, Phe, Tyr, Ile, Trp, or Val
KXQTAAQRAX

SEQ ID NO: 49185 - protein, 8 aa, Artificial Sequence
  Description of Artificial Sequence: Synthetic peptide
  Seed: KFQTASQR
  misc_feature (2)..(2): Xaa can be Leu, Met, Phe, Tyr, or Val
  misc_feature (8)..(8): Xaa can be Arg
KXQTASQX

SEQ ID NO: 49186 - protein, 10 aa, Artificial Sequence
  Description of Artificial Sequence: Synthetic peptide
  Seed: KFQTASQRAM
  misc_feature (2)..(2): Xaa can be Gln, Tyr, Met, Ala, Arg, Glu, His, Leu, Lys, Phe, Trp, Val, Asn, Asp, Cys, Gly, Ile, Pro, Ser, or Thr
  misc_feature (10)..(10): Xaa can be Met, Phe, Tyr, Leu, Ile, Trp, His, or Val
KXQTASQRAX

SEQ ID NO: 49187 - protein, 9 aa, Artificial Sequence
  Description of Artificial Sequence: Synthetic peptide
  Seed: KGEIRRIWR
  misc_feature (2)..(2): Xaa can be Ala, Gln, Ile, Leu, Met, Phe, Ser, Thr, Trp, Tyr, Val, Asn, or Gly
  misc_feature (9)..(9): Xaa can be Arg or Lys
KXEIRRIWX

SEQ ID NO: 49188 - protein, 10 aa, Artificial Sequence
  Description of Artificial Sequence: Synthetic peptide
  Seed: KGKFQTAAQK
  misc_feature (2)..(2): Xaa can be Thr, Ser, Val, Tyr, Trp, Phe, Ala, Gln, Gly, Ile, Leu, Met, Asn, or Cys
  misc_feature (10)..(10): Xaa can be Arg, Lys, Val, Ala, Ile, Leu, Met, Gly, Ser, Phe, Thr, Tyr, Cys, Pro, Asn, Gln, or His
KXKFQTAAQX

SEQ ID NO: 49189 - protein, 10 aa, Artificial Sequence
  Description of Artificial Sequence: Synthetic peptide
  Seed: KGKFQTASQR
  misc_feature (2)..(2): Xaa can be Gln, Ile, Leu, Met, Phe, Ser, Thr, Trp, Tyr, Val, Ala, Asn, Cys, or Gly
  misc_feature (10)..(10): Xaa can be Arg or Lys
KXKFQTASQX

SEQ ID NO: 49190 - protein, 10 aa, Artificial Sequence
  Description of Artificial Sequence: Synthetic peptide
  Seed: KGTKRSYEQM
  misc_feature (2)..(2): Xaa can be Met, Ala, Arg, Asn, Asp, Cys, Gln, Glu, Gly, His, Ile, Leu, Lys, Phe, Pro, Ser, Thr, Trp, Tyr, or Val
  misc_feature (10)..(10): Xaa can be Ala, Ile, Leu, Lys, Met, Ser, Val, or Tyr
KXTKRSYEQX

SEQ ID NO: 49191 - protein, 10 aa, Artificial Sequence
  Description of Artificial Sequence: Synthetic peptide
  Seed: KGTKVLPRGK
  misc_feature (2)..(2): Xaa can be Tyr, Ala, Arg, Asn, Asp, Cys, Gln, Glu, Gly, His, Ile, Leu, Lys, Met, Phe, Pro, Ser, Thr, Trp, or Val
  misc_feature (10)..(10): Xaa can be Ala, Ile, Leu, Lys, Met, Val, or Ser
KXTKVLPRGX

SEQ ID NO: 49192 - protein, 10 aa, Artificial Sequence
  Description of Artificial Sequence: Synthetic peptide
  Seed: KGTKVVPRGK
  misc_feature (2)..(2): Xaa can be Ala, Arg, Asn, Asp, Cys, Gln, Glu, Gly, His, Ile, Leu, Lys, Met, Phe, Pro, Ser, Thr, Trp, Tyr, or Val
  misc_feature (10)..(10): Xaa can be Ala, Ile, Leu, Lys, Met, Ser, or Val
KXTKVVPRGX

SEQ ID NO: 49193 - protein, 10 aa, Artificial Sequence
  Description of Artificial Sequence: Synthetic peptide
  Seed: KIAYERMCNI
  misc_feature (2)..(2): Xaa can be Leu, Met, Thr, Ser, Trp, Tyr, Val, Gln, Ile, Ala, Phe, Arg, Asn, Asp, Cys, Glu, Gly, His, Lys, or Pro
  misc_feature (10)..(10): Xaa can be Ala, Lys, Val, Ile, Leu, Met, Ser, Cys, Thr, Tyr, or Gly
KXAYERMCNX

SEQ ID NO: 49194 - protein, 8 aa, Artificial Sequence
  Description of Artificial Sequence: Synthetic peptide
  Seed: KIDGKWMR
  misc_feature (2)..(2): Xaa can be Met, Gln, Ile, Leu, Phe, Thr, Trp, Tyr, or Val
  misc_feature (8)..(8): Xaa can be Arg or Lys
KXDGKWMX

SEQ ID NO: 49195 - protein, 8 aa, Artificial Sequence
  Description of Artificial Sequence: Synthetic peptide
  Seed: KKTGGPIY
  misc_feature (2)..(2): Xaa can be Gln, Met, Lys, or Tyr
  misc_feature (8)..(8): Xaa can be Tyr, Phe, Leu, or Met
KXTGGPIX

SEQ ID NO: 49196 - protein, 10 aa, Artificial Sequence
  Description of Artificial Sequence: Synthetic peptide
  Seed: KKTGGPIYKK
  misc_feature (2)..(2): Xaa can be Thr, Ala, Asn, Gln, Gly, Ile, Leu, Lys, Met, Phe, Ser, Val, Arg, Asp, Cys, Glu, His, Pro, Trp, or Tyr
  misc_feature (10)..(10): Xaa can be Arg, Lys, or Tyr
KXTGGPIYKX

SEQ ID NO: 49197 - protein, 10 aa, Artificial Sequence
  Description of Artificial Sequence: Synthetic peptide
  Seed: KKTGGPIYRK
  misc_feature (2)..(2): Xaa can be Leu, Ile, Met, Ala, Asn, Gln, Gly, His, Lys, Ser, Thr, Val, Arg, Asp, Cys, Glu, Phe, Pro, Trp, or Tyr
  misc_feature (10)..(10): Xaa can be Arg, Lys, His, or Tyr
KXTGGPIYRX

SEQ ID NO: 49198 - protein, 9 aa, Artificial Sequence
  Description of Artificial Sequence: Synthetic peptide
  Seed: KLGDHEGRL
  misc_feature (2)..(2): Xaa can be Leu or Met
  misc_feature (9)..(9): Xaa can be Ile, Leu, or Val
KXGDHEGRX

SEQ ID NO: 49199 - protein, 9 aa, Artificial Sequence
  Description of Artificial Sequence: Synthetic peptide
  Seed: KLLQNSHVY
  misc_feature (2)..(2): Xaa can be Gln, Met, Leu, Lys, Ala, Ser, Thr, Val, His, Ile, Arg, Glu, Trp, Gly, Pro, Tyr, Asn, Cys, or Phe
  misc_feature (9)..(9): Xaa can be Phe, Tyr, Met, Leu, Trp, Ile, Val, His, Lys, Ala, Gly, Cys, Ser, or Thr
KXLQNSHVX

SEQ ID NO: 49200 - protein, 10 aa, Artificial Sequence
  Description of Artificial Sequence: Synthetic peptide
  Seed: KLLQNSHVYS
  misc_feature (2)..(2): Xaa can be Gln, Leu, Met, Ala, Ile, Ser, Thr, Val, Arg, Asn, Asp, Cys, Glu, Gly, His, Lys, Phe, Pro, Trp, or Tyr
  misc_feature (10)..(10): Xaa can be Phe, Tyr, Met, Ala, Arg, Asn, Asp, Cys, Gln, Glu, Gly, His, Ile, Leu, Lys, Pro, Ser, Thr, Trp, or Val
KXLQNSHVYX

SEQ ID NO: 49201 - protein, 11 aa, Artificial Sequence
  Description of Artificial Sequence: Synthetic peptide
  Seed: KLLQNSHVYSL
  misc_feature (2)..(2): Xaa can be Leu, Met, Arg, Gln, Ile, Phe, Tyr, Ala, Gly, Lys, Ser, Thr, Trp, Val, Asn, Asp, Cys, Glu, His, or Pro
  misc_feature (11)..(11): Xaa can be Leu, Met, Phe, Trp, Tyr, Val, Ile, Ala, Cys, Thr, or His
KXLQNSHVYSX

SEQ ID NO: 49202 - protein, 9 aa, Artificial Sequence
  Description of Artificial Sequence: Synthetic peptide
  Seed: KLLQNSQIF
  misc_feature (2)..(2): Xaa can be Gln, Met, Lys, Tyr, Ala, Phe, Ser, Thr, Trp, Leu, Val, Ile, Arg, Glu, Gly, His, Asn, or Cy s
  misc_feature (9)..(9): Xaa can be Phe, Tyr, Met, Leu, Trp, Ile, Val, His, Ala, Cys, Gly, or Thr
KXLQNSQIX

SEQ ID NO: 49203 - protein, 11 aa, Artificial Sequence
  Description of Artificial Sequence: Synthetic peptide
  Seed: KLLQNSQIFSL
  misc_feature (2)..(2): Xaa can be Arg, Leu, Met, Gln, Phe, Tyr, Ile, Ala, Gly, Lys, Ser, Thr, Trp, Val, Asn, Asp, Cys, Glu, His, or Pro
  misc_feature (11)..(11): Xaa can be Leu, Val, Ile, Ala, Met, Cys, Thr, or Phe
KXLQNSQIFSX

SEQ ID NO: 49204 - protein, 9 aa, Artificial Sequence
  Description of Artificial Sequence: Synthetic peptide
  Seed: KLLQNSQVF
  misc_feature (2)..(2): Xaa can be Gln, Met, Lys, Ala, His, Leu, Tyr, Phe, Ser, Thr, Trp, Arg, Glu, Ile, Val, Asn, Gly, Cys, or Pro
  misc_feature (9)..(9): Xaa can be Phe, Tyr, Met, Trp, Leu, Ile, Val, His, Ala, Cys, Gly, Asn, Ser, or Thr
KXLQNSQVX

SEQ ID NO: 49205 - protein, 11 aa, Artificial Sequence
  Description of Artificial Sequence: Synthetic peptide
  Seed: KLLQNSQVFSL
  misc_feature (2)..(2): Xaa can be Leu, Met, Phe, Tyr, Gln, Ala, Arg, Ile, Lys, Ser, Thr, Trp, Val, Asn, Asp, Cys, Glu, Gly, His, or Pro
  misc_feature (11)..(11): Xaa can be Val, Ile, Leu, Met, Ala, or Thr
KXLQNSQVFSX

SEQ ID NO: 49206 - protein, 10 aa, Artificial Sequence
  Description of Artificial Sequence: Synthetic peptide
  Seed: KLLQNSQVYS
  misc_feature (2)..(2): Xaa can be Gln, Leu, Met, Ala, Ile, Val, Arg, Asn, Asp, Cys, Glu, Gly, His, Lys, Phe, Pro, Ser, Thr, Trp, or Tyr
  misc_feature (10)..(10): Xaa can be Phe, Tyr, Met, Ala, Arg, Asn, Asp, Cys, Gln, Glu, Gly, His, Ile, Leu, Lys, Pro, Ser, Thr, Trp, or Val
KXLQNSQVYX

SEQ ID NO: 49207 - protein, 11 aa, Artificial Sequence
  Description of Artificial Sequence: Synthetic peptide
  Seed: KLLQNSQVYSL
  misc_feature (2)..(2): Xaa can be Leu, Met, Phe, Tyr, Gln, Ile, Trp, Val, Lys, Ser, Ala, Arg, Asn, Asp, Cys, Glu, Gly, His, or Thr
  misc_feature (11)..(11): Xaa can be Val, Ile, Leu, Ala, Met, or Thr
KXLQNSQVYSX

SEQ ID NO: 49208 - protein, 9 aa, Artificial Sequence
  Description of Artificial Sequence: Synthetic peptide
  Seed: KLLQTSQVY
  misc_feature (2)..(2): Xaa can be Gln, Met, Leu, Lys, Ser, Ala, Glu, His, Ile, Thr, Val, Arg, Asn, Cys, Gly, Phe, Tyr, Trp, or Pro
  misc_feature (9)..(9): Xaa can be Phe, Tyr, Met, Leu, Trp, Ile, Val, His, Lys, Ala, Cys, Gly, Ser, Thr, Asn, Gln, or Pro
KXLQTSQVX

SEQ ID NO: 49209 - protein, 10 aa, Artificial Sequence
  Description of Artificial Sequence: Synthetic peptide
  Seed: KLLQTSQVYS
  misc_feature (2)..(2): Xaa can be Gln, Ile, Leu, Met, Val, Ala, Ser, Thr, Arg, Asn, Asp, Cys, Glu, Gly, His, Lys, Phe, Pro, Trp, or Tyr
  misc_feature (10)..(10): Xaa can be Phe, Tyr, Met, Ala, Arg, Asn, Asp, Cys, Gln, Glu, Gly, His, Ile, Leu, Lys, Pro, Ser, Thr, Trp, or Val
KXLQTSQVYX

SEQ ID NO: 49210 - protein, 11 aa, Artificial Sequence
  Description of Artificial Sequence: Synthetic peptide
  Seed: KLLQTSQVYSL
  misc_feature (2)..(2): Xaa can be Met, Leu, Gln, Ile, Thr, Val, Phe, Tyr, Ser, Ala, Trp, Arg, Cys, Gly, or Lys
  misc_feature (11)..(11): Xaa can be Val, Leu, Trp, Ile, Phe, Ala, Met, Thr, or Tyr
KXLQTSQVYSX

SEQ ID NO: 49211 - protein, 9 aa, Artificial Sequence
  Description of Artificial Sequence: Synthetic peptide
  Seed: KLNDHEGRL
  misc_feature (2)..(2): Xaa can be Leu, Met, Gln, Ile, or Val
  misc_feature (9)..(9): Xaa can be Val, Ala, Ile, Leu, or Met
KXNDHEGRX

SEQ ID NO: 49212 - protein, 10 aa, Artificial Sequence
  Description of Artificial Sequence: Synthetic peptide
  Seed: KLNDHEGRLI
  misc_feature (2)..(2): Xaa can be Leu or Met
  misc_feature (10)..(10): Xaa can be Ala, Ile, Leu, or Val
KXNDHEGRLX

SEQ ID NO: 49213 - protein, 9 aa, Artificial Sequence
  Description of Artificial Sequence: Synthetic peptide
  Seed: KLNDYEGRL
  misc_feature (2)..(2): Xaa can be Leu, Met, Ile, Gln, or Val
  misc_feature (9)..(9): Xaa can be Val, Leu, Ala, Ile, or Met
KXNDYEGRX

SEQ ID NO: 49214 - protein, 10 aa, Artificial Sequence
  Description of Artificial Sequence: Synthetic peptide
  Seed: KLNDYEGRLI
  misc_feature (2)..(2): Xaa can be Leu, Met, or Ile
  misc_feature (10)..(10): Xaa can be Val, Ala, Ile, Leu, or Met
KXNDYEGRLX

SEQ ID NO: 49215 - protein, 9 aa, Artificial Sequence
  Description of Artificial Sequence: Synthetic peptide
  Seed: KLPFERATI
  misc_feature (2)..(2): Xaa can be Leu, Met, Ala, Ser, Thr, Ile, Val, Gly, Cys, or Phe
  misc_feature (9)..(9): Xaa can be Leu, Met, Ile, Val, Phe, or Ala
KXPFERATX

SEQ ID NO: 49216 - protein, 10 aa, Artificial Sequence
  Description of Artificial Sequence: Synthetic peptide
  Seed: KLPFERATIM
  misc_feature (2)..(2): Xaa can be Met, Gln, Leu, Ala, Arg, Asn, Glu, Gly, His, Ile, Lys, Phe, Ser, Thr, Tyr, Val, Asp, Cys, Pro, or Trp
  misc_feature (10)..(10): Xaa can be Ala, Ile, Leu, Met, Phe, Val, Tyr, His, Trp, or Thr
KXPFERATIX

SEQ ID NO: 49217 - protein, 9 aa, Artificial Sequence
  Description of Artificial Sequence: Synthetic peptide
  Seed: KLSDHEGRL
  misc_feature (2)..(2): Xaa can be Leu, Met, Gln, Ile, or Val
  misc_feature (9)..(9): Xaa can be Val, Ala, Ile, Leu, or Met
KXSDHEGRX

SEQ ID NO: 49218 - protein, 10 aa, Artificial Sequence
  Description of Artificial Sequence: Synthetic peptide
  Seed: KLSDHEGRLI
  misc_feature (2)..(2): Xaa can be Leu or Met
  misc_feature (10)..(10): Xaa can be Ala, Ile, Leu, Val, or Met
KXSDHEGRLX

SEQ ID NO: 49219 - protein, 9 aa, Artificial Sequence
  Description of Artificial Sequence: Synthetic peptide
  Seed: KLSDNEGRL
  misc_feature (2)..(2): Xaa can be Leu or Met
  misc_feature (9)..(9): Xaa can be Ile, Leu, Met, or Val
KXSDNEGRX

SEQ ID NO: 49220 - protein, 10 aa, Artificial Sequence
  Description of Artificial Sequence: Synthetic peptide
  Seed: KLSDNEGRLI
  misc_feature (2)..(2): Xaa can be Leu or Met
  misc_feature (10)..(10): Xaa can be Ile, Leu, or Val
KXSDNEGRLX

SEQ ID NO: 49221 - protein, 9 aa, Artificial Sequence
  Description of Artificial Sequence: Synthetic peptide
  Seed: KLSDQEGRL
  misc_feature (2)..(2): Xaa can be Leu or Met
  misc_feature (9)..(9): Xaa can be Ile, Leu, Met, or Val
KXSDQEGRX

SEQ ID NO: 49222 - protein, 10 aa, Artificial Sequence
  Description of Artificial Sequence: Synthetic peptide
  Seed: KLSDQEGRLI
  misc_feature (2)..(2): Xaa can be Leu or Met
  misc_feature (10)..(10): Xaa can be Leu, Val, or Ile
KXSDQEGRLX

SEQ ID NO: 49223 - protein, 9 aa, Artificial Sequence
  Description of Artificial Sequence: Synthetic peptide
  Seed: KLSDYEGRL
  misc_feature (2)..(2): Xaa can be Leu, Met, Gln, Ile, or Val
  misc_feature (9)..(9): Xaa can be Val, Leu, Ala, Ile, or Met
KXSDYEGRX

SEQ ID NO: 49224 - protein, 10 aa, Artificial Sequence
  Description of Artificial Sequence: Synthetic peptide
  Seed: KLSDYEGRLI
  misc_feature (2)..(2): Xaa can be Leu, Met, or Ile
  misc_feature (10)..(10): Xaa can be Val, Ala, Ile, Leu, or Met
KXSDYEGRLX

SEQ ID NO: 49225 - protein, 9 aa, Artificial Sequence
  Description of Artificial Sequence: Synthetic peptide
  Seed: KLSTRGVQI
  misc_feature (2)..(2): Xaa can be Leu, Met, Ile, Thr, Val, Gln, or Ser
  misc_feature (9)..(9): Xaa can be Trp, Ile, Phe, Val, Ala, Leu, or Met
KXSTRGVQX

SEQ ID NO: 49226 - protein, 10 aa, Artificial Sequence
  Description of Artificial Sequence: Synthetic peptide
  Seed: KLSTRGVQIA
  misc_feature (2)..(2): Xaa can be Leu or Met
  misc_feature (10)..(10): Xaa can be Ala, Ile, Leu, or Val
KXSTRGVQIX

SEQ ID NO: 49227 - protein, 11 aa, Artificial Sequence
  Description of Artificial Sequence: Synthetic peptide
  Seed: KLSTRGVQIAS
  misc_feature (2)..(2): Xaa can be Ala, Arg, Asn, Asp, Cys, Gln, Glu, Gly, His, Ile, Leu, Lys, Met, Phe, Pro, Ser, Thr, Trp, Tyr, or Val
  misc_feature (11)..(11): Xaa can be Ala, Gly, Ile, Leu, Lys, Met, Ser, Thr, Tyr, or Val
KXSTRGVQIAX

SEQ ID NO: 49228 - protein, 10 aa, Artificial Sequence
  Description of Artificial Sequence: Synthetic peptide
  Seed: KLVLYDKEEI
  misc_feature (2)..(2): Xaa can be Leu or Met
  misc_feature (10)..(10): Xaa can be Ile, Leu, or Val
KXVLYDKEEX

SEQ ID NO: 49229 - protein, 11 aa, Artificial Sequence
  Description of Artificial Sequence: Synthetic peptide
  Seed: KLVLYDKEEIR
  misc_feature (2)..(2): Xaa can be Ala, Arg, Asn, Asp, Cys, Gln, Glu, Gly, His, Ile, Leu, Lys, Met, Phe, Pro, Ser, Thr, Trp, Tyr, or Val
  misc_feature (11)..(11): Xaa can be Arg
KXVLYDKEEIX

SEQ ID NO: 49230 - protein, 8 aa, Artificial Sequence
  Description of Artificial Sequence: Synthetic peptide
  Seed: KMIDGIGR
  misc_feature (2)..(2): Xaa can be Met, Phe, Thr, Tyr, or Val
  misc_feature (8)..(8): Xaa can be Arg
KXIDGIGX

SEQ ID NO: 49231 - protein, 9 aa, Artificial Sequence
  Description of Artificial Sequence: Synthetic peptide
  Seed: KMIDGIGRF
  misc_feature (2)..(2): Xaa can be Met, Leu, Gln, Ile, Val, Ser, Thr, Ala, Phe, Trp, Tyr, Lys, Arg, Glu, Gly, His, Asn, Cys, or Asp
  misc_feature (9)..(9): Xaa can be Tyr, Phe, Met, Trp, Leu, Ile, Val, Ala, Cys, Thr, His, Gly, Pro, or Ser
KXIDGIGRX

SEQ ID NO: 49232 - protein, 10 aa, Artificial Sequence
  Description of Artificial Sequence: Synthetic peptide
  Seed: KMIDGIGRFY
  misc_feature (2)..(2): Xaa can be Gln, Ala, Met, Ser, Thr, Leu, Val, Ile, His, Lys, Tyr, Arg, Glu, Gly, Phe, Trp, Asn, Asp, Cys, or Pro
  misc_feature (10)..(10): Xaa can be Lys, Tyr, Phe, Met, Trp, Leu, Arg, Ile, Val, His, Ala, Asn, Asp, Cys, Gln, Glu, Gly, Pro, Ser, or Thr
KXIDGIGRFX

SEQ ID NO: 49233 - protein, 11 aa, Artificial Sequence
  Description of Artificial Sequence: Synthetic peptide
  Seed: KMIDGIGRFYI
  misc_feature (2)..(2): Xaa can be Met, Leu, Gln, Thr, Ile, Val, Ala, Ser, Phe, Tyr, Arg, Cys, Glu, Gly, Lys, Trp, Asn, or Hi s
  misc_feature (11)..(11): Xaa can be Tyr, Val, Ile, Leu, Ala, Met, Phe, Thr, Trp, Cys, Ser, Gly, Pro, His, Arg, Asn, Asp, Gln, Glu, or Lys
KXIDGIGRFYX

SEQ ID NO: 49234 - protein, 8 aa, Artificial Sequence
  Description of Artificial Sequence: Synthetic peptide
  Seed: KMIGGIGR
  misc_feature (2)..(2): Xaa can be Ile, Leu, Met, Phe, Ser, Thr, Trp, Tyr, or Val
  misc_feature (8)..(8): Xaa can be Arg
KXIGGIGX

SEQ ID NO: 49235 - protein, 9 aa, Artificial Sequence
  Description of Artificial Sequence: Synthetic peptide
  Seed: KMIGGIGRF
  misc_feature (2)..(2): Xaa can be Met, Leu, Gln, Ile, Thr, Val, Ser, Tyr, Ala, Trp, Phe, Lys, Arg, Asn, Cys, Glu, Gly, His, or Asp
  misc_feature (9)..(9): Xaa can be Tyr, Phe, Met, Trp, Leu, Ile, Val, Ala, His, Thr, Cys, Pro, or Ser
KXIGGIGRX

SEQ ID NO: 49236 - protein, 10 aa, Artificial Sequence
  Description of Artificial Sequence: Synthetic peptide
  Seed: KMIGGIGRFY
  misc_feature (2)..(2): Xaa can be Gln, Thr, Met, Ser, Ala, Val, Leu, Ile, His, Lys, Tyr, Arg, Glu, Gly, Phe, Trp, Asn, Asp, Cys, or Pro
  misc_feature (10)..(10): Xaa can be Lys, Tyr, Phe, Met, Trp, Leu, Arg, Ile, His, Val, Ala, Asn, Asp, Cys, Gln, Glu, Gly, Pro, Ser, or Thr
KXIGGIGRFX

SEQ ID NO: 49237 - protein, 11 aa, Artificial Sequence
  Description of Artificial Sequence: Synthetic peptide
  Seed: KMIGGIGRFYI
  misc_feature (2)..(2): Xaa can be Gln, Met, Ser, Thr, Leu, Ile, Val, Ala, Phe, Glu, Tyr, Arg, Asn, Cys, Gly, His, Lys, or Tr p
  misc_feature (11)..(11): Xaa can be Tyr, Val, Ile, Ala, Leu, Met, Phe, Thr, Trp, Cys, Ser, Arg, Asn, Asp, Gln, Glu, Gly, His, Lys, or Pro
KXIGGIGRFYX

SEQ ID NO: 49238 - protein, 8 aa, Artificial Sequence
  Description of Artificial Sequence: Synthetic peptide
  Seed: KMINGIGR
  misc_feature (2)..(2): Xaa can be Ile, Leu, Met, Phe, Ser, Thr, Trp, Tyr, or Val
  misc_feature (8)..(8): Xaa can be Arg
KXINGIGX

SEQ ID NO: 49239 - protein, 9 aa, Artificial Sequence
  Description of Artificial Sequence: Synthetic peptide
  Seed: KMINGIGRF
  misc_feature (2)..(2): Xaa can be Met, Leu, Gln, Ile, Ser, Thr, Tyr, Val, Ala, Trp, Phe, Lys, Arg, Glu, Gly, His, Asn, Cys, or Asp
  misc_feature (9)..(9): Xaa can be Tyr, Phe, Met, Trp, Leu, Ile, Val, His, Ala, Cys, or Thr
KXINGIGRX

SEQ ID NO: 49240 - protein, 10 aa, Artificial Sequence
  Description of Artificial Sequence: Synthetic peptide
  Seed: KMINGIGRFY
  misc_feature (2)..(2): Xaa can be Gln, Ser, Thr, Ala, Met, Leu, Val, Glu, His, Ile, Lys, Tyr, Arg, Gly, Phe, Trp, Asn, Asp, Cys, or Pro
  misc_feature (10)..(10): Xaa can be Arg, Lys, Tyr, Phe, Met, Trp, Leu, Ile, Val, His, Ala, Asn, Asp, Cys, Gln, Glu, Gly, Pro, Ser, or Thr
KXINGIGRFX

SEQ ID NO: 49241 - protein, 11 aa, Artificial Sequence
  Description of Artificial Sequence: Synthetic peptide
  Seed: KMINGIGRFYI
  misc_feature (2)..(2): Xaa can be Gln, Met, Ser, Thr, Val, Leu, Ile, Ala, Phe, Tyr, Lys, Arg, Asn, Cys, Glu, Gly, His, or Tr p
  misc_feature (11)..(11): Xaa can be Tyr, Val, Ile, Leu, Ala, Met, Phe, Trp, Cys, Ser, Thr, Arg, Asn, Asp, Gln, Glu, Gly, His, Lys, or Pro
KXINGIGRFYX

SEQ ID NO: 49242 - protein, 8 aa, Artificial Sequence
  Description of Artificial Sequence: Synthetic peptide
  Seed: KMISGIGR
  misc_feature (2)..(2): Xaa can be Gln, Ile, Leu, Met, Phe, Ser, Thr, Trp, Tyr, or Val
  misc_feature (8)..(8): Xaa can be Arg
KXISGIGX

SEQ ID NO: 49243 - protein, 9 aa, Artificial Sequence
  Description of Artificial Sequence: Synthetic peptide
  Seed: KMISGIGRF
  misc_feature (2)..(2): Xaa can be Met, Leu, Gln, Thr, Tyr, Val, Ile, Ser, Ala, Trp, Phe, Lys, Asn, Arg, Cys, Glu, Gly, His, or Asp
  misc_feature (9)..(9): Xaa can be Tyr, Phe, Met, Trp, Ile, Leu, Val, Ala, His, Cys, Ser, or Thr
KXISGIGRX

SEQ ID NO: 49244 - protein, 10 aa, Artificial Sequence
  Description of Artificial Sequence: Synthetic peptide
  Seed: KMISGIGRFY
  misc_feature (2)..(2): Xaa can be Gln, Thr, Met, Ser, Ala, Val, Leu, Ile, Glu, Gly, His, Lys, Tyr, Arg, Asn, Cys, Phe, Trp, Asp, or Pro
  misc_feature (10)..(10): Xaa can be Lys, Tyr, Phe, Met, Trp, Arg, Leu, Ile, His, Val, Ala, Asn, Asp, Cys, Gln, Glu, Gly, Pro, Ser, or Thr
KXISGIGRFX

SEQ ID NO: 49245 - protein, 11 aa, Artificial Sequence
  Description of Artificial Sequence: Synthetic peptide
  Seed: KMISGIGRFYI
  misc_feature (2)..(2): Xaa can be Gln, Met, Ser, Thr, Val, Leu, Ile, Ala, Phe, Tyr, Lys, Arg, Asn, Asp, Cys, Glu, Gly, His, Pro, or Trp
  misc_feature (11)..(11): Xaa can be Tyr, Val, Ile, Leu, Ala, Phe, Met, Trp, Cys, Ser, Thr, Arg, Asn, Asp, Gln, Glu, Gly, His, Lys, or Pro
KXISGIGRFYX

SEQ ID NO: 49246 - protein, 11 aa, Artificial Sequence
  Description of Artificial Sequence: Synthetic peptide
  Seed: KMMENARPEDV
  misc_feature (2)..(2): Xaa can be Leu, Met, Gln, Ile, or Val
  misc_feature (11)..(11): Xaa can be Val, Ala, Ile, Leu, or Met
KXMENARPEDX

SEQ ID NO: 49247 - protein, 11 aa, Artificial Sequence
  Description of Artificial Sequence: Synthetic peptide
  Seed: KMMESARPEEV
  misc_feature (2)..(2): Xaa can be Leu, Met, Gln, Ile, Thr, or Val
  misc_feature (11)..(11): Xaa can be Val, Ile, Leu, Ala, Met, or Cys
KXMESARPEEX

SEQ ID NO: 49248 - protein, 8 aa, Artificial Sequence
  Description of Artificial Sequence: Synthetic peptide
  Seed: KMVDGIGR
  misc_feature (2)..(2): Xaa can be Met
  misc_feature (8)..(8): Xaa can be Arg
KXVDGIGX

SEQ ID NO: 49249 - protein, 9 aa, Artificial Sequence
  Description of Artificial Sequence: Synthetic peptide
  Seed: KMVDGIGRF
  misc_feature (2)..(2): Xaa can be Leu, Met, Gln, Ile, Ser, Thr, Tyr, Val, Ala, Trp, Phe, Lys, Glu, Gly, His, Arg, Asn, or Cy s
  misc_feature (9)..(9): Xaa can be Tyr, Phe, Met, Trp, Leu, Ile, Val, Ala, Cys, Thr, or His
KXVDGIGRX

SEQ ID NO: 49250 - protein, 10 aa, Artificial Sequence
  Description of Artificial Sequence: Synthetic peptide
  Seed: KMVDGIGRFY
  misc_feature (2)..(2): Xaa can be Gln, Ser, Thr, Ala, Leu, Met, Val, Ile, Lys, Arg, Glu, Gly, His, Phe, Trp, Tyr, Asn, Asp, Cys, or Pro
  misc_feature (10)..(10): Xaa can be Lys, Tyr, Phe, Trp, Met, Leu, Ile, Arg, Ala, His, or Val
KXVDGIGRFX

SEQ ID NO: 49251 - protein, 11 aa, Artificial Sequence
  Description of Artificial Sequence: Synthetic peptide
  Seed: KMVDGIGRFYI
  misc_feature (2)..(2): Xaa can be Leu, Met, Gln, Ile, Thr, Val, Ala, Phe, Ser, or Tyr
  misc_feature (11)..(11): Xaa can be Ile, Val, Leu, Ala, Met, Cys, Phe, Thr, or Ser
KXVDGIGRFYX

SEQ ID NO: 49252 - protein, 8 aa, Artificial Sequence
  Description of Artificial Sequence: Synthetic peptide
  Seed: KMVGGIGR
  misc_feature (2)..(2): Xaa can be Met, Phe, Thr, or Tyr
  misc_feature (8)..(8): Xaa can be Arg
KXVGGIGX

SEQ ID NO: 49253 - protein, 9 aa, Artificial Sequence
  Description of Artificial Sequence: Synthetic peptide
  Seed: KMVGGIGRF
  misc_feature (2)..(2): Xaa can be Gln, Ser, Thr, Tyr, Ala, Met, Trp, Val, Phe, Ile, Leu, Lys, Glu, Gly, His, Arg, Asn, Cys, or Asp
  misc_feature (9)..(9): Xaa can be Tyr, Phe, Met, Trp, Leu, Ile, His, or Val
KXVGGIGRX

SEQ ID NO: 49254 - protein, 10 aa, Artificial Sequence
  Description of Artificial Sequence: Synthetic peptide
  Seed: KMVGGIGRFY
  misc_feature (2)..(2): Xaa can be Gln, Ser, Thr, Ala, Met, Leu, Val, Ile, Lys, Glu, Gly, His, Trp, Tyr, Arg, Asn, Asp, Cys, Phe, or Pro
  misc_feature (10)..(10): Xaa can be Lys, Tyr, Phe, Trp, Met, Leu, Ile, Arg, Ala, His, or Val
KXVGGIGRFX

SEQ ID NO: 49255 - protein, 11 aa, Artificial Sequence
  Description of Artificial Sequence: Synthetic peptide
  Seed: KMVGGIGRFYI
  misc_feature (2)..(2): Xaa can be Leu, Met, Gln, Ile, Thr, Val, Ala, Phe, Ser, or Tyr
  misc_feature (11)..(11): Xaa can be Val, Ile, Leu, Ala, Met, Thr, Cys, Ser, or Phe
KXVGGIGRFYX

SEQ ID NO: 49256 - protein, 10 aa, Artificial Sequence
  Description of Artificial Sequence: Synthetic peptide
  Seed: KMVLSAFDER
  misc_feature (2)..(2): Xaa can be Ala, Arg, Asn, Asp, Cys, Gln, Glu, Gly, His, Ile, Leu, Lys, Met, Phe, Pro, Ser, Thr, Trp, Tyr, or Val
  misc_feature (10)..(10): Xaa can be Arg or Lys
KXVLSAFDEX

SEQ ID NO: 49257 - protein, 11 aa, Artificial Sequence
  Description of Artificial Sequence: Synthetic peptide
  Seed: KMVLSAFDERR
  misc_feature (2)..(2): Xaa can be Met, Phe, Trp, Tyr, Ala, Arg, Asn, Asp, Cys, Gln, Glu, Gly, His, Ile, Leu, Lys, Pro, Ser, Thr, or Val
  misc_feature (11)..(11): Xaa can be Arg, Lys, Ala, Asn, Asp, Cys, Gln, Glu, Gly, His, Ile, Leu, Met, Phe, Pro, Ser, Thr, Trp, Tyr, or Val
KXVLSAFDERX

SEQ ID NO: 49258 - protein, 11 aa, Artificial Sequence
  Description of Artificial Sequence: Synthetic peptide
  Seed: KNLPFDKSTIM
  misc_feature (2)..(2): Xaa can be Pro, Ala, Arg, Asn, Asp, Cys, Gln, Glu, Gly, His, Ile, Leu, Lys, Met, Phe, Ser, Thr, Trp, Tyr, or Val
  misc_feature (11)..(11): Xaa can be Leu, Met, Ile, or Phe
KXLPFDKSTIX

SEQ ID NO: 49259 - protein, 9 aa, Artificial Sequence
  Description of Artificial Sequence: Synthetic peptide
  Seed: KQRASAGQI
  misc_feature (2)..(2): Xaa can be Thr, Val, Met, Ser, Ala, Ile, Phe, Tyr, Leu, Gln, Trp, Gly, Asn, Lys, Arg, Cys, Glu, or Hi s
  misc_feature (9)..(9): Xaa can be Lys, Met, Phe, Tyr, Leu, Ala, Ile, Val, Arg, Ser, Cys, Gly, Thr, Pro, Asn, Gln, His, Glu, Trp, or Asp
KXRASAGQX

SEQ ID NO: 49260 - protein, 11 aa, Artificial Sequence
  Description of Artificial Sequence: Synthetic peptide
  Seed: KQRASAGQISV
  misc_feature (2)..(2): Xaa can be Thr, Val, Ser, Tyr, Met, Phe, Ala, Ile, Leu, Trp, Gln, Asn, Gly, Cys, or His
  misc_feature (11)..(11): Xaa can be Lys, Ala, Val, Ile, Met, Leu, Ser, Tyr, Arg, Gly, Thr, Cys, Phe, Pro, Asn, Gln, Glu, or Hi s
KXRASAGQISX

SEQ ID NO: 49261 - protein, 10 aa, Artificial Sequence
  Description of Artificial Sequence: Synthetic peptide
  Seed: KRDGKWMREL
  misc_feature (2)..(2): Xaa can be Arg
  misc_feature (10)..(10): Xaa can be Ile, Leu, Lys, Met, or Phe
KXDGKWMREX

SEQ ID NO: 49262 - protein, 11 aa, Artificial Sequence
  Description of Artificial Sequence: Synthetic peptide
  Seed: KRDGKWMRELI
  misc_feature (2)..(2): Xaa can be Arg
  misc_feature (11)..(11): Xaa can be Ile, Leu, Met, or Phe
KXDGKWMRELX

SEQ ID NO: 49263 - protein, 10 aa, Artificial Sequence
  Description of Artificial Sequence: Synthetic peptide
  Seed: KREGKWIREL
  misc_feature (2)..(2): Xaa can be Arg
  misc_feature (10)..(10): Xaa can be Ile, Leu, Lys, Met, or Phe
KXEGKWIREX

SEQ ID NO: 49264 - protein, 10 aa, Artificial Sequence
  Description of Artificial Sequence: Synthetic peptide
  Seed: KRGINDRNFW
  misc_feature (2)..(2): Xaa can be Ser, Ala, Thr, Arg, Asn, Asp, Cys, Gln, Glu, Gly, His, Ile, Leu, Lys, Met, Phe, Pro, Trp, Tyr, or Val
  misc_feature (10)..(10): Xaa can be Trp, Phe, or Tyr
KXGINDRNFX

SEQ ID NO: 49265 - protein, 11 aa, Artificial Sequence
  Description of Artificial Sequence: Synthetic peptide
  Seed: KRGINDRNFWR
  misc_feature (2)..(2): Xaa can be Ala, Arg, Asn, Asp, Cys, Gln, Glu, Gly, His, Ile, Leu, Lys, Met, Phe, Pro, Ser, Thr, Trp, Tyr, or Val
  misc_feature (11)..(11): Xaa can be Arg or Lys
KXGINDRNFWX

SEQ ID NO: 49266 - protein, 10 aa, Artificial Sequence
  Description of Artificial Sequence: Synthetic peptide
  Seed: KRGVNDRNFW
  misc_feature (2)..(2): Xaa can be Ser, Thr, Ala, Arg, Asn, Asp, Cys, Gln, Glu, Gly, His, Ile, Leu, Lys, Met, Phe, Pro, Trp, Tyr, or Val
  misc_feature (10)..(10): Xaa can be Trp or Phe
KXGVNDRNFX

SEQ ID NO: 49267 - protein, 11 aa, Artificial Sequence
  Description of Artificial Sequence: Synthetic peptide
  Seed: KRGVNDRNFWR
  misc_feature (2)..(2): Xaa can be Ala, Arg, Asn, Asp, Cys, Gln, Glu, Gly, His, Ile, Leu, Lys, Met, Phe, Pro, Ser, Thr, Trp, Tyr, or Val
  misc_feature (11)..(11): Xaa can be Arg or Lys
KXGVNDRNFWX

SEQ ID NO: 49268 - protein, 9 aa, Artificial Sequence
  Description of Artificial Sequence: Synthetic peptide
  Seed: KRIDGKWMR
  misc_feature (2)..(2): Xaa can be Arg, Met, Ile, Leu, Phe, Thr, Val, Ala, Asn, Cys, Gln, Gly, His, Ser, Trp, Tyr, Glu, or Ly s
  misc_feature (9)..(9): Xaa can be Arg, Lys, His, Tyr, Ala, Ile, Leu, Met, Phe, or Val
KXIDGKWMX

SEQ ID NO: 49269 - protein, 11 aa, Artificial Sequence
  Description of Artificial Sequence: Synthetic peptide
  Seed: KRIDGKWMREL
  misc_feature (2)..(2): Xaa can be Arg or Gln
  misc_feature (11)..(11): Xaa can be Leu, Ala, Arg, Ile, Lys, Met, Phe, Tyr, or Val
KXIDGKWMREX

SEQ ID NO: 49270 - protein, 9 aa, Artificial Sequence
  Description of Artificial Sequence: Synthetic peptide
  Seed: KRRDGKWMR
  misc_feature (2)..(2): Xaa can be Arg
  misc_feature (9)..(9): Xaa can be Arg, Ile, Leu, Lys, Met, Phe, Tyr, or Val
KXRDGKWMX

SEQ ID NO: 49271 - protein, 11 aa, Artificial Sequence
  Description of Artificial Sequence: Synthetic peptide
  Seed: KRRDGKWMREL
  misc_feature (2)..(2): Xaa can be Arg
  misc_feature (11)..(11): Xaa can be Leu
KXRDGKWMREX

SEQ ID NO: 49272 - protein, 9 aa, Artificial Sequence
  Description of Artificial Sequence: Synthetic peptide
  Seed: KRREGKWVR
  misc_feature (2)..(2): Xaa can be Arg
  misc_feature (9)..(9): Xaa can be Arg, Ile, Leu, Lys, Met, Phe, or Tyr
KXREGKWVX

SEQ ID NO: 49273 - protein, 11 aa, Artificial Sequence
  Description of Artificial Sequence: Synthetic peptide
  Seed: KRREGKWVREL
  misc_feature (2)..(2): Xaa can be Arg
  misc_feature (11)..(11): Xaa can be Leu
KXREGKWVREX

SEQ ID NO: 49274 - protein, 9 aa, Artificial Sequence
  Description of Artificial Sequence: Synthetic peptide
  Seed: KRVDGKWMR
  misc_feature (2)..(2): Xaa can be Arg
  misc_feature (9)..(9): Xaa can be Arg, Ile, Leu, Lys, Met, Phe, Tyr, or Val
KXVDGKWMX

SEQ ID NO: 49275 - protein, 11 aa, Artificial Sequence
  Description of Artificial Sequence: Synthetic peptide
  Seed: KRVDGKWMREL
  misc_feature (2)..(2): Xaa can be Arg
  misc_feature (11)..(11): Xaa can be Ile, Leu, Lys, Met, Phe, or Val
KXVDGKWMREX

SEQ ID NO: 49276 - protein, 10 aa, Artificial Sequence
  Description of Artificial Sequence: Synthetic peptide
  Seed: KRVDGKWMRK
  misc_feature (2)..(2): Xaa can be Arg or Gln
  misc_feature (10)..(10): Xaa can be Leu, Ala, Arg, His, Ile, Lys, Met, Phe, Trp, Tyr, or Val
KXVDGKWMRX

SEQ ID NO: 49277 - protein, 11 aa, Artificial Sequence
  Description of Artificial Sequence: Synthetic peptide
  Seed: KRVDGKWMRKL
  misc_feature (2)..(2): Xaa can be Arg
  misc_feature (11)..(11): Xaa can be Ile, Leu, Lys, Met, Phe, or Val
KXVDGKWMRKX

SEQ ID NO: 49278 - protein, 9 aa, Artificial Sequence
  Description of Artificial Sequence: Synthetic peptide
  Seed: KRVDGKWVR
  misc_feature (2)..(2): Xaa can be Arg
  misc_feature (9)..(9): Xaa can be Arg, Ile, Leu, Lys, Met, Phe, Tyr, or Val
KXVDGKWVX

SEQ ID NO: 49279 - protein, 11 aa, Artificial Sequence
  Description of Artificial Sequence: Synthetic peptide
  Seed: KRVDGKWVREL
  misc_feature (2)..(2): Xaa can be Arg
  misc_feature (11)..(11): Xaa can be Ile, Leu, Lys, Met, Phe, or Val
KXVDGKWVREX

SEQ ID NO: 49280 - protein, 9 aa, Artificial Sequence
  Description of Artificial Sequence: Synthetic peptide
  Seed: KRVDGRWMR
  misc_feature (2)..(2): Xaa can be Arg, Met, Thr, Ile, Leu, Phe, Ser, Val, Ala, Asn, Cys, Gln, Gly, His, Trp, Tyr, Glu, or Ly s
  misc_feature (9)..(9): Xaa can be Arg, Lys, His, Tyr, Ala, Gly, Ile, Leu, Met, Phe, Trp, or Val
KXVDGRWMX

SEQ ID NO: 49281 - protein, 11 aa, Artificial Sequence
  Description of Artificial Sequence: Synthetic peptide
  Seed: KRVDGRWMREL
  misc_feature (2)..(2): Xaa can be Arg
  misc_feature (11)..(11): Xaa can be Arg, Ile, Leu, Lys, Met, Phe, Tyr, or Val
KXVDGRWMREX

SEQ ID NO: 49282 - protein, 9 aa, Artificial Sequence
  Description of Artificial Sequence: Synthetic peptide
  Seed: KRVDRKWMR
  misc_feature (2)..(2): Xaa can be Arg, Met, Leu, Phe, Thr, Tyr, Val, Ala, Asn, Cys, Gln, Gly, Ile, Ser, Trp, Glu, His, or Ly s
  misc_feature (9)..(9): Xaa can be Arg, Lys, His, Tyr, Ala, Gly, Ile, Leu, Met, Phe, Trp, or Val
KXVDRKWMX

SEQ ID NO: 49283 - protein, 11 aa, Artificial Sequence
  Description of Artificial Sequence: Synthetic peptide
  Seed: KRVDRKWMREL
  misc_feature (2)..(2): Xaa can be Arg
  misc_feature (11)..(11): Xaa can be Ile, Leu, Lys, Met, Phe, or Val
KXVDRKWMREX

SEQ ID NO: 49284 - protein, 9 aa, Artificial Sequence
  Description of Artificial Sequence: Synthetic peptide
  Seed: KRVGGKWMR
  misc_feature (2)..(2): Xaa can be Arg
  misc_feature (9)..(9): Xaa can be Ala, Arg, His, Ile, Leu, Lys, Met, Phe, Tyr, or Val
KXVGGKWMX

SEQ ID NO: 49285 - protein, 11 aa, Artificial Sequence
  Description of Artificial Sequence: Synthetic peptide
  Seed: KRVGGKWMREL
  misc_feature (2)..(2): Xaa can be Arg
  misc_feature (11)..(11): Xaa can be Ile, Leu, Lys, Met, Phe, Tyr, or Val
KXVGGKWMREX

SEQ ID NO: 49286 - protein, 9 aa, Artificial Sequence
  Description of Artificial Sequence: Synthetic peptide
  Seed: KRVGGRWMR
  misc_feature (2)..(2): Xaa can be Arg, Met, Thr, Ile, Leu, Phe, Ser, Trp, Tyr, Val, Ala, Asn, Cys, Gln, Gly, His, Asp, Glu, or Lys
  misc_feature (9)..(9): Xaa can be Arg, Lys, His, Tyr, Ala, Cys, Gln, Gly, Ile, Leu, Met, Phe, Ser, Thr, Trp, or Val
KXVGGRWMX

SEQ ID NO: 49287 - protein, 11 aa, Artificial Sequence
  Description of Artificial Sequence: Synthetic peptide
  Seed: KRVGGRWMREL
  misc_feature (2)..(2): Xaa can be Arg
  misc_feature (11)..(11): Xaa can be Arg, Ile, Leu, Lys, Met, Phe, Tyr, or Val
KXVGGRWMREX

SEQ ID NO: 49288 - protein, 9 aa, Artificial Sequence
  Description of Artificial Sequence: Synthetic peptide
  Seed: KRVNGKWMR
  misc_feature (2)..(2): Xaa can be Arg, Met, Leu, Thr, Ala, Asn, Gln, Gly, Ile, Phe, Ser, Trp, Tyr, Val, Cys, or His
  misc_feature (9)..(9): Xaa can be Arg, Lys, His, Tyr, Ala, Ile, Leu, Met, Phe, or Val
KXVNGKWMX

SEQ ID NO: 49289 - protein, 11 aa, Artificial Sequence
  Description of Artificial Sequence: Synthetic peptide
  Seed: KRVNGKWMREL
  misc_feature (2)..(2): Xaa can be Arg
  misc_feature (11)..(11): Xaa can be Arg, Ile, Leu, Lys, Met, Phe, Tyr, or Val
KXVNGKWMREX

SEQ ID NO: 49290 - protein, 9 aa, Artificial Sequence
  Description of Artificial Sequence: Synthetic peptide
  Seed: KRVVPRGKL
  misc_feature (2)..(2): Xaa can be Arg
  misc_feature (9)..(9): Xaa can be Arg, Ile, Leu, Lys, Met, or Phe
KXVVPRGKX

SEQ ID NO: 49291 - protein, 9 aa, Artificial Sequence
  Description of Artificial Sequence: Synthetic peptide
  Seed: KRVVPRGQL
  misc_feature (2)..(2): Xaa can be Arg
  misc_feature (9)..(9): Xaa can be Arg, Ile, Leu, Lys, Met, Phe, or Val
KXVVPRGQX

SEQ ID NO: 49292 - protein, 9 aa, Artificial Sequence
  Description of Artificial Sequence: Synthetic peptide
  Seed: KSCLPACVY
  misc_feature (2)..(2): Xaa can be Gln, Ala, Met, Ser, Thr, Lys, Asn, Ile, Leu, Val, Arg, Glu, Gly, His, Cys, Phe, Trp, or Ty r
  misc_feature (9)..(9): Xaa can be Tyr, Phe, Met, Trp, Ile, Leu, Val, His, or Ala
KXCLPACVX

SEQ ID NO: 49293 - protein, 11 aa, Artificial Sequence
  Description of Artificial Sequence: Synthetic peptide
  Seed: KSCLPACVYGL
  misc_feature (2)..(2): Xaa can be Met, Ala, Arg, Asn, Asp, Cys, Gln, Glu, Gly, His, Ile, Leu, Lys, Phe, Pro, Ser, Thr, Trp, Tyr, or Val
  misc_feature (11)..(11): Xaa can be Ile, Leu, Val, or Ala
KXCLPACVYGX

SEQ ID NO: 49294 - protein, 9 aa, Artificial Sequence
  Description of Artificial Sequence: Synthetic peptide
  Seed: KSCLPTCVY
  misc_feature (2)..(2): Xaa can be Gln, Met, Ala, Ser, Thr, Leu, Lys, Asn, Glu, Ile, Val, Arg, Gly, His, Phe, Tyr, Cys, or Tr p
  misc_feature (9)..(9): Xaa can be Tyr, Phe, Met, Trp, Leu, Ile, Val, His, or Ala
KXCLPTCVX

SEQ ID NO: 49295 - protein, 9 aa, Artificial Sequence
  Description of Artificial Sequence: Synthetic peptide
  Seed: KSQLAWMAC
  misc_feature (2)..(2): Xaa can be Ser, Thr, Val, Met, Ala, Ile, Tyr, Phe, Gln, Leu, Gly, Trp, Asn, Arg, Cys, His, or Lys
  misc_feature (9)..(9): Xaa can be Lys, Ala, Ile, Val, Arg, Leu, Met, Gly, Ser, Thr, Tyr, Asn, His, Pro, Gln, Phe, Cys, or Gl u
KXQLAWMAX

SEQ ID NO: 49296 - protein, 10 aa, Artificial Sequence
  Description of Artificial Sequence: Synthetic peptide
  Seed: KSQLAWMACH
  misc_feature (2)..(2): Xaa can be Met, Phe, Thr, Trp, Tyr, Ile, Leu, Ser, Val, Ala, Arg, Asn, Asp, Cys, Gln, Glu, Gly, His, Lys, or Pro
  misc_feature (10)..(10): Xaa can be Arg, Lys, His, or Tyr
KXQLAWMACX

SEQ ID NO: 49297 - protein, 8 aa, Artificial Sequence
  Description of Artificial Sequence: Synthetic peptide
  Seed: KSTVMAAF
  misc_feature (2)..(2): Xaa can be Gln, Met, Ser, Thr, Ala, Lys, His, Tyr, Glu, Gly, Ile, Leu, Phe, or Val
  misc_feature (8)..(8): Xaa can be Tyr, Phe, Trp, Met, or Leu
KXTVMAAX

SEQ ID NO: 49298 - protein, 10 aa, Artificial Sequence
  Description of Artificial Sequence: Synthetic peptide
  Seed: KSTVMAAFTG
  misc_feature (2)..(2): Xaa can be Ser, Ala, Thr, Arg, Asn, Asp, Cys, Gln, Glu, Gly, His, Ile, Leu, Lys, Met, Phe, Pro, Trp, Tyr, or Val
  misc_feature (10)..(10): Xaa can be Ile, Leu, Met, Phe, Trp, Tyr, Val, Gly, Ala, Asn, or Cys
KXTVMAAFTX

SEQ ID NO: 49299 - protein, 8 aa, Artificial Sequence
  Description of Artificial Sequence: Synthetic peptide
  Seed: KTGGPIYK
  misc_feature (2)..(2): Xaa can be Met, Phe, Thr, Trp, Tyr, Ala, Gln, Ile, Leu, Ser, or Val
  misc_feature (8)..(8): Xaa can be Arg or Lys
KXGGPIYX

SEQ ID NO: 49300 - protein, 9 aa, Artificial Sequence
  Description of Artificial Sequence: Synthetic peptide
  Seed: KTGGPIYKK
  misc_feature (2)..(2): Xaa can be Met, Thr, Val, Ala, Gln, Gly, Ile, Leu, Phe, Ser, Trp, Tyr, Asn, Cys, or His
  misc_feature (9)..(9): Xaa can be Arg, Lys, or Tyr
KXGGPIYKX

SEQ ID NO: 49301 - protein, 10 aa, Artificial Sequence
  Description of Artificial Sequence: Synthetic peptide
  Seed: KTGGPIYKKR
  misc_feature (2)..(2): Xaa can be Met, Phe, Trp, Tyr, Val, Ala, Gln, Gly, Ile, Leu, Ser, or Thr
  misc_feature (10)..(10): Xaa can be Arg or Lys
KXGGPIYKKX

SEQ ID NO: 49302 - protein, 10 aa, Artificial Sequence
  Description of Artificial Sequence: Synthetic peptide
  Seed: KTGGPIYKRR
  misc_feature (2)..(2): Xaa can be Met, Phe, Val, Ile, Leu, Thr, Trp, Tyr, Ala, Gln, Gly, or Ser
  misc_feature (10)..(10): Xaa can be Arg, Lys, His, Ala, Asn, Asp, Cys, Gln, Glu, Gly, Ile, Leu, Met, Phe, Pro, Ser, Thr, Trp, Tyr, or Val
KXGGPIYKRX

SEQ ID NO: 49303 - protein, 9 aa, Artificial Sequence
  Description of Artificial Sequence: Synthetic peptide
  Seed: KTGGPIYRK
  misc_feature (2)..(2): Xaa can be Met, Thr, Leu, Val, Ala, Asn, Gln, Gly, Ile, Phe, Ser, Trp, Tyr, Cys, or His
  misc_feature (9)..(9): Xaa can be Arg, Lys, Tyr, His, or Ala
KXGGPIYRX

SEQ ID NO: 49304 - protein, 10 aa, Artificial Sequence
  Description of Artificial Sequence: Synthetic peptide
  Seed: KTGGPIYRKR
  misc_feature (2)..(2): Xaa can be Ile, Leu, Met, Phe, Thr, Trp, Tyr, Val, Ala, Asn, Gln, Gly, or Ser
  misc_feature (10)..(10): Xaa can be Arg or Lys
KXGGPIYRKX

SEQ ID NO: 49305 - protein, 10 aa, Artificial Sequence
  Description of Artificial Sequence: Synthetic peptide
  Seed: KTGGPIYRRK
  misc_feature (2)..(2): Xaa can be Met, Phe, Val, Gln, Ile, Leu, Ser, Thr, Trp, Tyr, Ala, Asn, or Gly
  misc_feature (10)..(10): Xaa can be Arg, Lys, Ala, Asn, Asp, Cys, Gln, Glu, Gly, His, Ile, Leu, Met, Phe, Pro, Ser, Thr, Trp, Tyr, or Val
KXGGPIYRRX

SEQ ID NO: 49306 - protein, 8 aa, Artificial Sequence
  Description of Artificial Sequence: Synthetic peptide
  Seed: KTRGAYER
  misc_feature (2)..(2): Xaa can be Thr, Val, Ser, Ile, Met, Gln, Leu, Phe, Tyr, Ala, or Trp
  misc_feature (8)..(8): Xaa can be Lys, Arg, Ala, Ile, Leu, Met, Tyr, Val, Phe, Pro, Ser, or Thr
KXRGAYEX

SEQ ID NO: 49307 - protein, 9 aa, Artificial Sequence
  Description of Artificial Sequence: Synthetic peptide
  Seed: KTRGAYERM
  misc_feature (2)..(2): Xaa can be Ile, Met, Ser, Thr, Val, Ala, Leu, Phe, Tyr, Gln, Trp, Gly, Asn, Cys, Arg, His, or Lys
  misc_feature (9)..(9): Xaa can be Lys, Ala, Ile, Leu, Met, Tyr, Val, Arg, Ser, Gly, Phe, Thr, Cys, Gln, Pro, Asn, Trp, His, or Glu
KXRGAYERX

SEQ ID NO: 49308 - protein, 10 aa, Artificial Sequence
  Description of Artificial Sequence: Synthetic peptide
  Seed: KTRGAYERMC
  misc_feature (2)..(2): Xaa can be Thr, Ser, Val, Met, Ile, Ala, Phe, Tyr, Leu, Gln, Trp, Asn, Gly, Cys, or His
  misc_feature (10)..(10): Xaa can be Lys, Ala, Val, Ile, Leu, Met, Gly, Ser, Tyr, Arg, Thr, Pro, Phe, Gln, Cys, Glu, His, or As n
KXRGAYERMX

SEQ ID NO: 49309 - protein, 8 aa, Artificial Sequence
  Description of Artificial Sequence: Synthetic peptide
  Seed: KTRIAYER
  misc_feature (2)..(2): Xaa can be Thr, Ser, Val, Ile, Met, Tyr, Ala, Phe, Gln, Leu, Trp, Arg, Asn, Gly, or Lys
  misc_feature (8)..(8): Xaa can be Arg, Lys, Ala, Val, Ile, Tyr, Leu, Met, Phe, Ser, Gly, Pro, or Thr
KXRIAYEX

SEQ ID NO: 49310 - protein, 9 aa, Artificial Sequence
  Description of Artificial Sequence: Synthetic peptide
  Seed: KTRIAYERM
  misc_feature (2)..(2): Xaa can be Ala, Ile, Met, Ser, Thr, Val, Leu, Phe, Tyr, Gln, Trp, Gly, Asn, Cys, Arg, His, or Lys
  misc_feature (9)..(9): Xaa can be Lys, Ala, Ile, Leu, Met, Val, Arg, Ser, Tyr, Gly, Thr, Trp, Asn, Cys, Gln, Pro, Glu, Phe, or His
KXRIAYERX

SEQ ID NO: 49311 - protein, 10 aa, Artificial Sequence
  Description of Artificial Sequence: Synthetic peptide
  Seed: KTRIAYERMC
  misc_feature (2)..(2): Xaa can be Thr, Ser, Val, Ile, Met, Phe, Tyr, Ala, Gln, Leu, Trp, Asn, Gly, Cys, or His
  misc_feature (10)..(10): Xaa can be Lys, Ala, Val, Ile, Leu, Met, Ser, Tyr, Arg, Gly, Thr, Pro, Phe, Cys, Gln, Glu, His, or As n
KXRIAYERMX

SEQ ID NO: 49312 - protein, 8 aa, Artificial Sequence
  Description of Artificial Sequence: Synthetic peptide
  Seed: KTRNAYER
  misc_feature (2)..(2): Xaa can be Thr, Val, Ser, Ile, Met, Ala, Phe, Tyr, Gln, Leu, or Trp
  misc_feature (8)..(8): Xaa can be Arg, Lys, Ala, Ile, Tyr, Val, Leu, Met, Phe, Pro, Ser, Gly, or Thr
KXRNAYEX

SEQ ID NO: 49313 - protein, 9 aa, Artificial Sequence
  Description of Artificial Sequence: Synthetic peptide
  Seed: KTRNAYERM
  misc_feature (2)..(2): Xaa can be Ala, Ile, Leu, Met, Ser, Thr, Val, Phe, Tyr, Gln, Trp, Gly, Asn, Cys, Arg, His, or Lys
  misc_feature (9)..(9): Xaa can be Lys, Ala, Val, Ile, Leu, Met, Arg, Ser, Tyr, Gly, Thr, Asn, Cys, Gln, Glu, His, Phe, Pro, or Trp
KXRNAYERX

SEQ ID NO: 49314 - protein, 10 aa, Artificial Sequence
  Description of Artificial Sequence: Synthetic peptide
  Seed: KTRNAYERMC
  misc_feature (2)..(2): Xaa can be Ser, Thr, Val, Met, Ile, Leu, Ala, Phe, Tyr, Gln, Trp, Gly, Asn, Cys, or His
  misc_feature (10)..(10): Xaa can be Lys, Ala, Val, Ile, Met, Leu, Ser, Arg, Tyr, Gly, Thr, Pro, Phe, Cys, Gln, Asn, Glu, or Hi s
KXRNAYERMX

SEQ ID NO: 49315 - protein, 8 aa, Artificial Sequence
  Description of Artificial Sequence: Synthetic peptide
  Seed: KTRSAYER
  misc_feature (2)..(2): Xaa can be Thr, Val, Ser, Ile, Met, Ala, Phe, Tyr, Leu, Gln, Trp, or Gly
  misc_feature (8)..(8): Xaa can be Lys, Arg, Ala, Val, Ile, Leu, Met, Phe, Tyr, Pro, Ser, Gly, Thr, Asn, Cys, or Gln
KXRSAYEX

SEQ ID NO: 49316 - protein, 9 aa, Artificial Sequence
  Description of Artificial Sequence: Synthetic peptide
  Seed: KTRSAYERM
  misc_feature (2)..(2): Xaa can be Thr, Val, Ala, Ile, Leu, Met, Ser, Phe, Tyr, Gln, Trp, Gly, Asn, Cys, Arg, His, Lys, or Pr o
  misc_feature (9)..(9): Xaa can be Lys, Ala, Val, Arg, Ile, Leu, Met, Ser, Tyr, Thr, Cys, Gly, Phe, Pro, Trp, Asn, Gln, Glu, His, or Asp
KXRSAYERX

SEQ ID NO: 49317 - protein, 10 aa, Artificial Sequence
  Description of Artificial Sequence: Synthetic peptide
  Seed: KTRSAYERMC
  misc_feature (2)..(2): Xaa can be Thr, Met, Ser, Val, Ile, Tyr, Ala, Phe, Leu, Gln, Trp, Gly, Asn, Cys, His, or Lys
  misc_feature (10)..(10): Xaa can be Lys, Ala, Ile, Leu, Val, Met, Gly, Ser, Tyr, Arg, Phe, Pro, Thr, Cys, Gln, Glu, Asn, His, Asp, or Trp
KXRSAYERMX

SEQ ID NO: 49318 - protein, 9 aa, Artificial Sequence
  Description of Artificial Sequence: Synthetic peptide
  Seed: KTRSGGNTN
  misc_feature (2)..(2): Xaa can be Ser, Thr, Val, Ile, Met, Ala, Leu, Phe, Tyr, Gln, Gly, Trp, Asn, Cys, Arg, Glu, His, or Ly s
  misc_feature (9)..(9): Xaa can be Lys, Ala, Arg, Ile, Met, Tyr, Val, Gly, Leu, Ser, Thr, Phe, Asn, Cys, Gln, Glu, His, Pro, Trp, or Asp
KXRSGGNTX

SEQ ID NO: 49319 - protein, 10 aa, Artificial Sequence
  Description of Artificial Sequence: Synthetic peptide
  Seed: KTRSGGNTNQ
  misc_feature (2)..(2): Xaa can be Ser, Thr, Val, Met, Tyr, Ile, Phe, Ala, Leu, Gln, Trp, Asn, Gly, Cys, or His
  misc_feature (10)..(10): Xaa can be Lys, Ala, Ile, Val, Leu, Met, Tyr, Arg, Ser, Phe, Thr, Gly, Pro, Gln, Asn, Cys, Glu, or Hi s
KXRSGGNTNX

SEQ ID NO: 49320 - protein, 11 aa, Artificial Sequence
  Description of Artificial Sequence: Synthetic peptide
  Seed: KVCPRGKLSTR
  misc_feature (2)..(2): Xaa can be Met, Phe, Thr, Trp, Tyr, Val, Ala, Asn, Gln, Gly, Ile, Leu, or Ser
  misc_feature (11)..(11): Xaa can be Arg or Lys
KXCPRGKLSTX

SEQ ID NO: 49321 - protein, 9 aa, Artificial Sequence
  Description of Artificial Sequence: Synthetic peptide
  Seed: KVFPRGKLS
  misc_feature (2)..(2): Xaa can be Ser, Thr, Val, Met, Ile, Tyr, Ala, Phe, Leu, Trp, Gln, Gly, Asn, Cys, His, or Lys
  misc_feature (9)..(9): Xaa can be Lys, Ala, Val, Arg, Ile, Met, Ser, Tyr, Gly, Leu, Thr, Cys, Phe, Pro, Asn, Gln, Glu, or Hi s
KXFPRGKLX

SEQ ID NO: 49322 - protein, 10 aa, Artificial Sequence
  Description of Artificial Sequence: Synthetic peptide
  Seed: KVFPRGKLST
  misc_feature (2)..(2): Xaa can be Thr, Ser, Val, Tyr, Met, Phe, Ala, Ile, Trp, Leu, Gln, Gly, Asn, Cys, or His
  misc_feature (10)..(10): Xaa can be Lys, Ala, Val, Ile, Leu, Met, Tyr, Ser, Arg, Gly, Thr, Cys, Phe, His, Asn, Gln, or Pro
KXFPRGKLSX

SEQ ID NO: 49323 - protein, 11 aa, Artificial Sequence
  Description of Artificial Sequence: Synthetic peptide
  Seed: KVFPRGKLSTR
  misc_feature (2)..(2): Xaa can be Ile, Leu, Met, Val, Ala, Gln, Phe, Ser, Thr, Trp, Tyr, Arg, Asn, Cys, Gly, His, or Lys
  misc_feature (11)..(11): Xaa can be Arg, Lys, or Tyr
KXFPRGKLSTX

SEQ ID NO: 49324 - protein, 9 aa, Artificial Sequence
  Description of Artificial Sequence: Synthetic peptide
  Seed: KVIPRGKLS
  misc_feature (2)..(2): Xaa can be Thr, Ser, Met, Val, Ile, Tyr, Ala, Phe, Gln, Leu, Trp, Gly, Asn, or Cys
  misc_feature (9)..(9): Xaa can be Lys, Ala, Val, Ile, Leu, Tyr, Met, Ser, Gly, Arg, Thr, Asn, Cys, Gln, Phe, or Pro
KXIPRGKLX

SEQ ID NO: 49325 - protein, 11 aa, Artificial Sequence
  Description of Artificial Sequence: Synthetic peptide
  Seed: KVIPRGKLSTR
  misc_feature (2)..(2): Xaa can be Ile, Leu, Met, Phe, Ser, Thr, Trp, Tyr, Val, Ala, Asn, Cys, Gln, or Gly
  misc_feature (11)..(11): Xaa can be Arg or Lys
KXIPRGKLSTX

SEQ ID NO: 49326 - protein, 9 aa, Artificial Sequence
  Description of Artificial Sequence: Synthetic peptide
  Seed: KVIPRGQLA
  misc_feature (2)..(2): Xaa can be Thr, Ser, Val, Met, Ala, Ile, Tyr, Phe, Gln, Leu, Trp, Gly, Asn, Cys, or His
  misc_feature (9)..(9): Xaa can be Lys, Ala, Val, Ile, Met, Leu, Ser, Arg, Tyr, Gly, Phe, Thr, Cys, Asn, Gln, His, or Pro
KXIPRGQLX

SEQ ID NO: 49327 - protein, 11 aa, Artificial Sequence
  Description of Artificial Sequence: Synthetic peptide
  Seed: KVIPRGQLATR
  misc_feature (2)..(2): Xaa can be Gln, Ile, Leu, Met, Phe, Ser, Thr, Trp, Tyr, Val, Ala, Arg, Asn, Cys, or Gly
  misc_feature (11)..(11): Xaa can be Arg or Lys
KXIPRGQLATX

SEQ ID NO: 49328 - protein, 11 aa, Artificial Sequence
  Description of Artificial Sequence: Synthetic peptide
  Seed: KVIPRGQLSTR
  misc_feature (2)..(2): Xaa can be Gln, Ile, Leu, Met, Phe, Ser, Thr, Trp, Tyr, Val, Ala, Asn, Cys, or Gly
  misc_feature (11)..(11): Xaa can be Arg or Lys
KXIPRGQLSTX

SEQ ID NO: 49329 - protein, 9 aa, Artificial Sequence
  Description of Artificial Sequence: Synthetic peptide
  Seed: KVLPRGKLS
  misc_feature (2)..(2): Xaa can be Thr, Ser, Val, Met, Ile, Tyr, Ala, Phe, Gln, Leu, Trp, Gly, Asn, or Cys
  misc_feature (9)..(9): Xaa can be Lys, Ala, Val, Ile, Tyr, Met, Leu, Ser, Gly, Thr, Arg, Cys, Phe, or Pro
KXLPRGKLX

SEQ ID NO: 49330 - protein, 11 aa, Artificial Sequence
  Description of Artificial Sequence: Synthetic peptide
  Seed: KVLPRGKLSTR
  misc_feature (2)..(2): Xaa can be Gln, Ile, Leu, Met, Phe, Ser, Thr, Trp, Tyr, Val, Ala, Asn, or Gly
  misc_feature (11)..(11): Xaa can be Arg or Lys
KXLPRGKLSTX

SEQ ID NO: 49331 - protein, 9 aa, Artificial Sequence
  Description of Artificial Sequence: Synthetic peptide
  Seed: KVSPRGKLS
  misc_feature (2)..(2): Xaa can be Thr, Val, Ser, Met, Ile, Ala, Tyr, Gln, Leu, Phe, Trp, Asn, or Gly
  misc_feature (9)..(9): Xaa can be Lys, Ala, Val, Ile, Met, Tyr, Leu, Ser, Gly, Phe, or Thr
KXSPRGKLX

SEQ ID NO: 49332 - protein, 11 aa, Artificial Sequence
  Description of Artificial Sequence: Synthetic peptide
  Seed: KVSPRGKLSTR
  misc_feature (2)..(2): Xaa can be Met, Phe, Thr, Tyr, Val, Ala, Asn, Gln, Gly, Ile, Leu, Ser, or Trp
  misc_feature (11)..(11): Xaa can be Arg or Lys
KXSPRGKLSTX

SEQ ID NO: 49333 - protein, 9 aa, Artificial Sequence
  Description of Artificial Sequence: Synthetic peptide
  Seed: KVVPRGKLS
  misc_feature (2)..(2): Xaa can be Thr, Ser, Val, Ile, Met, Ala, Phe, Tyr, Asn, Gln, Gly, Leu, or Trp
  misc_feature (9)..(9): Xaa can be Lys, Ala, Val, Ile, Leu, Met, Ser, Tyr, Gly, or Thr
KXVPRGKLX

SEQ ID NO: 49334 - protein, 11 aa, Artificial Sequence
  Description of Artificial Sequence: Synthetic peptide
  Seed: KVVPRGKLSTR
  misc_feature (2)..(2): Xaa can be Met, Phe, Thr, Trp, Tyr, Val, Ala, Arg, Asn, Gln, Gly, Ile, Leu, or Ser
  misc_feature (11)..(11): Xaa can be Arg or Lys
KXVPRGKLSTX

SEQ ID NO: 49335 - protein, 9 aa, Artificial Sequence
  Description of Artificial Sequence: Synthetic peptide
  Seed: KVVPRGQLA
  misc_feature (2)..(2): Xaa can be Thr, Ser, Val, Met, Ala, Ile, Tyr, Leu, Phe, Asn, Cys, Gln, Gly, or Trp
  misc_feature (9)..(9): Xaa can be Lys, Ala, Val, Ile, Met, Tyr, Leu, Ser, Arg, Gly, or Thr
KXVPRGQLX

SEQ ID NO: 49336 - protein, 11 aa, Artificial Sequence
  Description of Artificial Sequence: Synthetic peptide
  Seed: KVVPRGQLATR
  misc_feature (2)..(2): Xaa can be Ile, Leu, Met, Phe, Ser, Thr, Trp, Tyr, Val, Ala, Arg, Asn, Gln, or Gly
  misc_feature (11)..(11): Xaa can be Arg or Lys
KXVPRGQLATX

SEQ ID NO: 49337 - protein, 11 aa, Artificial Sequence
  Description of Artificial Sequence: Synthetic peptide
  Seed: KVVPRGQLSTR
  misc_feature (2)..(2): Xaa can be Met, Phe, Thr, Trp, Tyr, Val, Ala, Arg, Asn, Gln, Gly, Ile, Leu, or Ser
  misc_feature (11)..(11): Xaa can be Arg or Lys
KXVPRGQLSTX

SEQ ID NO: 49338 - protein, 9 aa, Artificial Sequence
  Description of Artificial Sequence: Synthetic peptide
  Seed: KVVPRGRLS
  misc_feature (2)..(2): Xaa can be Thr, Ser, Val, Met, Ile, Ala, Tyr, Leu, Phe, Gln, Trp, Gly, Asn, or Cys
  misc_feature (9)..(9): Xaa can be Lys, Ala, Val, Ile, Met, Leu, Gly, Ser, Tyr, Arg, Thr, Phe, Asn, Cys, Gln, or Pro
KXVPRGRLX

SEQ ID NO: 49339 - protein, 11 aa, Artificial Sequence
  Description of Artificial Sequence: Synthetic peptide
  Seed: KVVPRGRLSTR
  misc_feature (2)..(2): Xaa can be Met, Phe, Thr, Trp, Tyr, Val, Ala, Arg, Asn, Gln, Gly, Ile, Leu, or Ser
  misc_feature (11)..(11): Xaa can be Arg or Lys
KXVPRGRLSTX

SEQ ID NO: 49340 - protein, 11 aa, Artificial Sequence
  Description of Artificial Sequence: Synthetic peptide
  Seed: KWIRELILCDK
  misc_feature (2)..(2): Xaa can be Met, Phe, Thr, Trp, Tyr, Val, Ala, Gln, Gly, Ile, Leu, or Ser
  misc_feature (11)..(11): Xaa can be Arg or Lys
KXIRELILCDX

SEQ ID NO: 49341 - protein, 9 aa, Artificial Sequence
  Description of Artificial Sequence: Synthetic peptide
  Seed: KWIRELILY
  misc_feature (2)..(2): Xaa can be Tyr, Phe, Trp, Met, Gln, Thr, His, Leu, Val, Ala, Gly, Ile, Ser, Asn, Cys, Glu, or Lys
  misc_feature (9)..(9): Xaa can be Tyr, Phe, Trp, Met, Ile, Leu, Val, His, Ala, Cys, or Gly
KXIRELILX

SEQ ID NO: 49342 - protein, 11 aa, Artificial Sequence
  Description of Artificial Sequence: Synthetic peptide
  Seed: KWIRELILYDK
  misc_feature (2)..(2): Xaa can be Met, Phe, Thr, Trp, Tyr, Val, Ala, Arg, Gln, Gly, His, Ile, Leu, Lys, or Ser
  misc_feature (11)..(11): Xaa can be Arg or Lys
KXIRELILYDX

SEQ ID NO: 49343 - protein, 9 aa, Artificial Sequence
  Description of Artificial Sequence: Synthetic peptide
  Seed: KWIRELVLY
  misc_feature (2)..(2): Xaa can be Tyr, Phe, Trp, Met, Gln, Thr, His, Leu, Val, Ala, Gly, Ile, Ser, Asn, Cys, Glu, or Lys
  misc_feature (9)..(9): Xaa can be Tyr, Phe, Trp, Met, Ile, Leu, Val, His, Ala, Cys, or Gly
KXIRELVLX

SEQ ID NO: 49344 - protein, 11 aa, Artificial Sequence
  Description of Artificial Sequence: Synthetic peptide
  Seed: KWIRELVLYDK
  misc_feature (2)..(2): Xaa can be Met, Phe, Thr, Trp, Tyr, Val, Ala, Arg, Gln, Gly, Ile, Leu, Lys, or Ser
  misc_feature (11)..(11): Xaa can be Arg or Lys
KXIRELVLYDX

SEQ ID NO: 49345 - protein, 8 aa, Artificial Sequence
  Description of Artificial Sequence: Synthetic peptide
  Seed: KWMRELIL
  misc_feature (2)..(2): Xaa can be Tyr, Trp, or Phe
  misc_feature (8)..(8): Xaa can be Phe, Trp, Ile, Leu, or Met
KXMRELIX

SEQ ID NO: 49346 - protein, 9 aa, Artificial Sequence
  Description of Artificial Sequence: Synthetic peptide
  Seed: KWMRELILH
  misc_feature (2)..(2): Xaa can be Gln, Met, Phe, Thr, Trp, Ser, Ile, Leu, Ala, His, Asn, Gly, Tyr, Val, Arg, Cys, Glu, Lys, or Asp
  misc_feature (9)..(9): Xaa can be Arg, Tyr, Lys, Phe, Trp, His, Ile, Met, Leu, Val, or Ala
KXMRELILX

SEQ ID NO: 49347 - protein, 11 aa, Artificial Sequence
  Description of Artificial Sequence: Synthetic peptide
  Seed: KWMRELILHDK
  misc_feature (2)..(2): Xaa can be Gln, Ile, Leu, Met, Phe, Ser, Thr, Trp, Tyr, Val, Ala, Arg, Asn, Gly, His, or Lys
  misc_feature (11)..(11): Xaa can be Arg or Lys
KXMRELILHDX

SEQ ID NO: 49348 - protein, 11 aa, Artificial Sequence
  Description of Artificial Sequence: Synthetic peptide
  Seed: KWMRELILYDK
  misc_feature (2)..(2): Xaa can be Ala, Arg, Gln, Ile, Leu, Lys, Met, Phe, Ser, Thr, Trp, Tyr, Val, Asn, Cys, Gly, or His
  misc_feature (11)..(11): Xaa can be Arg or Lys
KXMRELILYDX

SEQ ID NO: 49349 - protein, 8 aa, Artificial Sequence
  Description of Artificial Sequence: Synthetic peptide
  Seed: KWMRELTL
  misc_feature (2)..(2): Xaa can be Tyr, Trp, or Phe
  misc_feature (8)..(8): Xaa can be Ile, Leu, Phe, Trp, Met, or Val
KXMRELTX

SEQ ID NO: 49350 - protein, 9 aa, Artificial Sequence
  Description of Artificial Sequence: Synthetic peptide
  Seed: KWMRELTLY
  misc_feature (2)..(2): Xaa can be Tyr, Met, Thr, Gln, Phe, Trp, Ser, Val, His, Ala, Ile, Leu, Arg, Asn, Gly, Asp, Cys, Glu, or Lys
  misc_feature (9)..(9): Xaa can be Tyr, Phe, Trp, Met, Ile, His, Leu, Val, Ala, Cys, Gly, or Thr
KXMRELTLX

SEQ ID NO: 49351 - protein, 11 aa, Artificial Sequence
  Description of Artificial Sequence: Synthetic peptide
  Seed: KWMRELTLYDK
  misc_feature (2)..(2): Xaa can be Ala, Arg, Gln, Ile, Leu, Lys, Met, Phe, Ser, Thr, Trp, Tyr, Val, Asn, Cys, Gly, or His
  misc_feature (11)..(11): Xaa can be Arg or Lys
KXMRELTLYDX

SEQ ID NO: 49352 - protein, 8 aa, Artificial Sequence
  Description of Artificial Sequence: Synthetic peptide
  Seed: KWMRELVL
  misc_feature (2)..(2): Xaa can be Tyr, Trp, or Phe
  misc_feature (8)..(8): Xaa can be Phe, Trp, Ile, Leu, Met, or Val
KXMRELVX

SEQ ID NO: 49353 - protein, 9 aa, Artificial Sequence
  Description of Artificial Sequence: Synthetic peptide
  Seed: KWMRELVLY
  misc_feature (2)..(2): Xaa can be Tyr, Trp, Gln, Met, Phe, Thr, Val, Ser, Ile, Leu, Ala, His, Asn, Gly, Arg, Cys, Glu, Lys, or Asp
  misc_feature (9)..(9): Xaa can be Tyr, Arg, Phe, Lys, Trp, His, Ile, Met, Leu, Val, Cys, Ala, Gly, Ser, or Thr
KXMRELVLX

SEQ ID NO: 49354 - protein, 11 aa, Artificial Sequence
  Description of Artificial Sequence: Synthetic peptide
  Seed: KWMRELVLYDK
  misc_feature (2)..(2): Xaa can be Ala, Arg, Gln, Ile, Leu, Lys, Met, Phe, Ser, Thr, Trp, Tyr, Val, Asn, Cys, Gly, or His
  misc_feature (11)..(11): Xaa can be Arg or Lys
KXMRELVLYDX

SEQ ID NO: 49355 - protein, 9 aa, Artificial Sequence
  Description of Artificial Sequence: Synthetic peptide
  Seed: KWMRKLVLY
  misc_feature (2)..(2): Xaa can be Tyr, Met, Thr, Trp, Gln, Phe, Val, Ile, Leu, His, Ser, Ala, Arg, Asn, Gly, Cys, Glu, Lys, Asp, or Pro
  misc_feature (9)..(9): Xaa can be Arg, Tyr, Lys, Phe, Trp, His, Leu, Met, Val, Ile, Ala, Cys, Gln, Gly, or Thr
KXMRKLVLX

SEQ ID NO: 49356 - protein, 11 aa, Artificial Sequence
  Description of Artificial Sequence: Synthetic peptide
  Seed: KWMRKLVLYDK
  misc_feature (2)..(2): Xaa can be Ala, Arg, Gln, Ile, Leu, Lys, Met, Phe, Ser, Thr, Trp, Tyr, Val, Asn, Cys, Gly, or His
  misc_feature (11)..(11): Xaa can be Arg or Lys
KXMRKLVLYDX

SEQ ID NO: 49357 - protein, 9 aa, Artificial Sequence
  Description of Artificial Sequence: Synthetic peptide
  Seed: KWTRELILY
  misc_feature (2)..(2): Xaa can be Trp, Ala, Asn, Gln, Gly, Ile, Leu, Met, Phe, Ser, Thr, Tyr, or Val
  misc_feature (9)..(9): Xaa can be Tyr or Phe
KXTRELILX

SEQ ID NO: 49358 - protein, 9 aa, Artificial Sequence
  Description of Artificial Sequence: Synthetic peptide
  Seed: KWVRELILY
  misc_feature (2)..(2): Xaa can be Tyr, Phe, Trp, Met, Ala, Gln, His, Ile, Leu, Ser, Thr, Val, Asn, Cys, or Gly
  misc_feature (9)..(9): Xaa can be Tyr, Phe, Trp, Ile, Leu, Met, Val, or Cys
KXVRELILX

SEQ ID NO: 49359 - protein, 9 aa, Artificial Sequence
  Description of Artificial Sequence: Synthetic peptide
  Seed: KWVRELTLY
  misc_feature (2)..(2): Xaa can be Tyr, Phe, Trp, Met, Gln, His, Ile, Leu, Ser, Thr, Val, Ala, Asn, Cys, Glu, Gly, or Lys
  misc_feature (9)..(9): Xaa can be Tyr, Phe, Trp, Ile, Leu, Met, Val, or Cys
KXVRELTLX

SEQ ID NO: 49360 - protein, 9 aa, Artificial Sequence
  Description of Artificial Sequence: Synthetic peptide
  Seed: KWVRELVLY
  misc_feature (2)..(2): Xaa can be Tyr, Phe, Trp, Met, Ala, Gln, His, Ile, Leu, Ser, Thr, Val, Asn, Cys, or Gly
  misc_feature (9)..(9): Xaa can be Tyr, Phe, Trp, Ile, Leu, Met, Val, or Cys
KXVRELVLX

SEQ ID NO: 49361 - protein, 11 aa, Artificial Sequence
  Description of Artificial Sequence: Synthetic peptide
  Seed: KYLEEHPNAGK
  misc_feature (2)..(2): Xaa can be Met, Phe, Tyr, Ala, Gln, Gly, Ile, Leu, Ser, Thr, Trp, or Val
  misc_feature (11)..(11): Xaa can be Arg or Lys
KXLEEHPNAGX

SEQ ID NO: 49362 - protein, 11 aa, Artificial Sequence
  Description of Artificial Sequence: Synthetic peptide
  Seed: KYLEEHPNTGK
  misc_feature (2)..(2): Xaa can be Met, Phe, Tyr, Ala, Gln, Ile, Leu, Ser, Thr, Trp, or Val
  misc_feature (11)..(11): Xaa can be Arg or Lys
KXLEEHPNTGX

SEQ ID NO: 49363 - protein, 9 aa, Artificial Sequence
  Description of Artificial Sequence: Synthetic peptide
  Seed: KYLEEHPSA
  misc_feature (2)..(2): Xaa can be Thr, Tyr, Phe, Trp, Ser, Val, Met, Gln, Leu, His, or Ile
  misc_feature (9)..(9): Xaa can be Phe, Ile, Lys, Leu, Met, Val, Tyr, Ala, Trp, Arg, or Ser
KXLEEHPSX

SEQ ID NO: 49364 - protein, 11 aa, Artificial Sequence
  Description of Artificial Sequence: Synthetic peptide
  Seed: KYLEEHPSAGK
  misc_feature (2)..(2): Xaa can be Met, Phe, Tyr, Ala, Gln, Gly, Ile, Leu, Ser, Thr, Trp, or Val
  misc_feature (11)..(11): Xaa can be Arg or Lys
KXLEEHPSAGX

SEQ ID NO: 49365 - protein, 11 aa, Artificial Sequence
  Description of Artificial Sequence: Synthetic peptide
  Seed: KYLEEHPSTGR
  misc_feature (2)..(2): Xaa can be Met, Phe, Tyr, Ala, Gln, Gly, Ile, Leu, Ser, Thr, Trp, or Val
  misc_feature (11)..(11): Xaa can be Arg or Lys
KXLEEHPSTGX

SEQ ID NO: 49366 - protein, 11 aa, Artificial Sequence
  Description of Artificial Sequence: Synthetic peptide
  Seed: KYLEEHPSVGK
  misc_feature (2)..(2): Xaa can be Met, Phe, Thr, Tyr, Ala, Gln, Gly, Ile, Leu, Ser, Trp, or Val
  misc_feature (11)..(11): Xaa can be Arg or Lys
KXLEEHPSVGX

SEQ ID NO: 49367 - protein, 8 aa, Artificial Sequence
  Description of Artificial Sequence: Synthetic peptide
  Seed: KYWAIRTR
  misc_feature (2)..(2): Xaa can be Gln, Ile, Leu, Met, Phe, Ser, Thr, Trp, Tyr, Val, Ala, Asn, or Gly
  misc_feature (8)..(8): Xaa can be Arg or Lys
KXWAIRTX

SEQ ID NO: 49368 - protein, 9 aa, Artificial Sequence
  Description of Artificial Sequence: Synthetic peptide
  Seed: KYWAIRTRS
  misc_feature (2)..(2): Xaa can be Thr, Ser, Val, Ala, Met, Ile, Tyr, Phe, Trp, Gly, Leu, Asn, Gln, Cys, or His
  misc_feature (9)..(9): Xaa can be Lys, Ala, Val, Ile, Leu, Met, Gly, Ser, Arg, Tyr, Pro, Thr, Asn, Cys, Gln, His, Phe, or Gl u
KXWAIRTRX

SEQ ID NO: 49369 - protein, 10 aa, Artificial Sequence
  Description of Artificial Sequence: Synthetic peptide
  Seed: KYWAIRTRSG
  misc_feature (2)..(2): Xaa can be Thr, Ser, Tyr, Val, Phe, Ala, Met, Ile, Trp, Gln, Leu, Asn, Gly, Arg, Cys, His, or Lys
  misc_feature (10)..(10): Xaa can be Lys, Ala, Val, Ile, Leu, Met, Tyr, Gly, Ser, Thr, Arg, Cys, Phe, His, or Pro
KXWAIRTRSX

SEQ ID NO: 49370 - protein, 8 aa, Artificial Sequence
  Description of Artificial Sequence: Synthetic peptide
  Seed: LARSALIL
  misc_feature (2)..(2): Xaa can be Ala, Ser, or Thr
  misc_feature (8)..(8): Xaa can be Leu, Met, Phe, or Tyr
LXRSALIX

SEQ ID NO: 49371 - protein, 9 aa, Artificial Sequence
  Description of Artificial Sequence: Synthetic peptide
  Seed: LARSALILR
  misc_feature (2)..(2): Xaa can be Ser, Thr, Met, Val, Tyr, Ile, Ala, Gln, Gly, Leu, Phe, Trp, Asn, Cys, His, Arg, Lys, or Pr o
  misc_feature (9)..(9): Xaa can be Lys, Arg, Ala, Ile, Leu, Met, Ser, Val, Gly, Thr, Tyr, Asn, Pro, Gln, His, Phe, Cys, or Gl u
LXRSALILX

SEQ ID NO: 49372 - protein, 8 aa, Artificial Sequence
  Description of Artificial Sequence: Synthetic peptide
  Seed: LARSALVL
  misc_feature (2)..(2): Xaa can be Ala, Ser, or Thr
  misc_feature (8)..(8): Xaa can be Met, Leu, Phe, or Tyr
LXRSALVX

SEQ ID NO: 49373 - protein, 9 aa, Artificial Sequence
  Description of Artificial Sequence: Synthetic peptide
  Seed: LARSALVLR
  misc_feature (2)..(2): Xaa can be Ser, Thr, Val, Met, Tyr, Ile, Ala, Gln, Gly, Phe, Leu, Trp, Asn, Cys, His, Arg, Lys, or Pr o
  misc_feature (9)..(9): Xaa can be Lys, Arg, Ala, Ile, Leu, Val, Gly, Met, Ser, Tyr, Thr, Asn, Pro, Gln, His, Phe, Cys, or Gl u
LXRSALVLX

SEQ ID NO: 49374 - protein, 9 aa, Artificial Sequence
  Description of Artificial Sequence: Synthetic peptide
  Seed: LAVAGGYDF
  misc_feature (2)..(2): Xaa can be Pro, Gln, Ala, Lys, Met, Ser, Thr, Val, Ile, Leu, Arg, Asn, Glu, Gly, His, Phe, Cys, or Ty r
  misc_feature (9)..(9): Xaa can be Phe, Tyr, Met, Trp, Leu, Ile, Val, Ala, His, Ser, or Thr
LXVAGGYDX

SEQ ID NO: 49375 - protein, 11 aa, Artificial Sequence
  Description of Artificial Sequence: Synthetic peptide
  Seed: LAVAGGYDFER
  misc_feature (2)..(2): Xaa can be Glu, Met, Thr, Tyr, Ala, Arg, Asn, Gln, His, Ile, Leu, Lys, Phe, Ser, Trp, or Val
  misc_feature (11)..(11): Xaa can be Arg or Lys
LXVAGGYDFEX

SEQ ID NO: 49376 - protein, 9 aa, Artificial Sequence
  Description of Artificial Sequence: Synthetic peptide
  Seed: LAVASGHDF
  misc_feature (2)..(2): Xaa can be Gln, Pro, Met, Ala, Lys, Ser, Thr, Ile, Leu, Val, His, Arg, Glu, Gly, Asn, Phe, or Tyr
  misc_feature (9)..(9): Xaa can be Phe, Tyr, Met, Leu, Trp, Ile, Val, His, or Ala
LXVASGHDX

SEQ ID NO: 49377 - protein, 11 aa, Artificial Sequence
  Description of Artificial Sequence: Synthetic peptide
  Seed: LAVASGHDFER
  misc_feature (2)..(2): Xaa can be Glu, Met, Phe, Thr, Tyr, Val, Ala, Arg, Asn, Asp, Gln, Gly, His, Ile, Leu, Lys, Ser, or Tr p
  misc_feature (11)..(11): Xaa can be Arg or Lys
LXVASGHDFEX

SEQ ID NO: 49378 - protein, 9 aa, Artificial Sequence
  Description of Artificial Sequence: Synthetic peptide
  Seed: LAVASGYDF
  misc_feature (2)..(2): Xaa can be Gln, Pro, Met, Ala, Lys, Arg, His, Leu, Ser, Thr, Glu, Ile, Val, Asn, Gly, Phe, or Tyr
  misc_feature (9)..(9): Xaa can be Phe, Tyr, Met, Leu, Ile, Trp, Val, His, or Ala
LXVASGYDX

SEQ ID NO: 49379 - protein, 11 aa, Artificial Sequence
  Description of Artificial Sequence: Synthetic peptide
  Seed: LAVASGYDFEK
  misc_feature (2)..(2): Xaa can be Ala, Glu, Met, Phe, Thr, Tyr, Val, Arg, Asn, Asp, Gln, Gly, His, Ile, Leu, Lys, Ser, or Tr p
  misc_feature (11)..(11): Xaa can be Arg or Lys
LXVASGYDFEX

SEQ ID NO: 49380 - protein, 9 aa, Artificial Sequence
  Description of Artificial Sequence: Synthetic peptide
  Seed: LAVASGYEF
  misc_feature (2)..(2): Xaa can be Pro, Gln, Ala, Lys, Met, Tyr, His, Phe, Ser, Thr, Trp, Arg, Leu, Val, Gly, Ile, Asn, Cys, or Glu
  misc_feature (9)..(9): Xaa can be Met, Phe, Tyr, Trp, Leu, Ile, Val, His, Ala, Gly, Thr, Asn, Cys, Gln, Glu, or Ser
LXVASGYEX

SEQ ID NO: 49381 - protein, 11 aa, Artificial Sequence
  Description of Artificial Sequence: Synthetic peptide
  Seed: LAVASGYEFER
  misc_feature (2)..(2): Xaa can be Glu, Met, Phe, Thr, Tyr, Val, Ala, Arg, Asn, Asp, Gln, Gly, His, Ile, Leu, Lys, Ser, or Tr p
  misc_feature (11)..(11): Xaa can be Arg or Lys
LXVASGYEFEX

SEQ ID NO: 49382 - protein, 9 aa, Artificial Sequence
  Description of Artificial Sequence: Synthetic peptide
  Seed: LAWMACHSA
  misc_feature (2)..(2): Xaa can be Pro, Gln, Met, Leu, Ala, Ile, Ser, Thr, Val, or Gly
  misc_feature (9)..(9): Xaa can be Val, Ala, Ile, Leu, Met, Thr, Cys, Gly, Pro, or Ser
LXWMACHSX

SEQ ID NO: 49383 - protein, 10 aa, Artificial Sequence
  Description of Artificial Sequence: Synthetic peptide
  Seed: LAWMACHSAA
  misc_feature (2)..(2): Xaa can be Pro or Ala
  misc_feature (10)..(10): Xaa can be Ala, Arg, Asn, Asp, Cys, Gln, Glu, Gly, His, Ile, Leu, Lys, Met, Phe, Pro, Ser, Thr, Trp, Tyr, or Val
LXWMACHSAX

SEQ ID NO: 49384 - protein, 11 aa, Artificial Sequence
  Description of Artificial Sequence: Synthetic peptide
  Seed: LAWMACHSAAF
  misc_feature (2)..(2): Xaa can be Gln, Pro, Lys, Met, Ser, Ala, Arg, Glu, Gly, His, Ile, Thr, Val, Asn, Asp, Cys, Leu, Phe, Trp, or Tyr
  misc_feature (11)..(11): Xaa can be Leu, Met, Phe, Tyr, Trp, Ile, Ala, His, or Val
LXWMACHSAAX

SEQ ID NO: 49385 - protein, 10 aa, Artificial Sequence
  Description of Artificial Sequence: Synthetic peptide
  Seed: LDMSNEGSYF
  misc_feature (2)..(2): Xaa can be Gln, Met, Lys, Leu, Ala, Arg, Glu, His, Ile, Ser, Thr, Val, Asn, Asp, Cys, Gly, Phe, Pro, Trp, or Tyr
  misc_feature (10)..(10): Xaa can be Met, Phe, Trp, Tyr, Leu, His, Ile, Val, Ala, Arg, Asn, Asp, Cys, Gln, Glu, Gly, Lys, Pro, Ser, or Thr
LXMSNEGSYX

SEQ ID NO: 49386 - protein, 11 aa, Artificial Sequence
  Description of Artificial Sequence: Synthetic peptide
  Seed: LDMSNEGSYFF
  misc_feature (2)..(2): Xaa can be Ser, Thr, Ala, Arg, Asn, Asp, Cys, Gln, Glu, Gly, His, Ile, Leu, Lys, Met, Phe, Pro, Trp, Tyr, or Val
  misc_feature (11)..(11): Xaa can be Phe, Trp, Tyr, Met, Ile, or Leu
LXMSNEGSYFX

SEQ ID NO: 49387 - protein, 9 aa, Artificial Sequence
  Description of Artificial Sequence: Synthetic peptide
  Seed: LELRSKYWA
  misc_feature (2)..(2): Xaa can be Glu
  misc_feature (9)..(9): Xaa can be Ala, Ile, Leu, Met, Phe, Pro, or Val
LXLRSKYWX

SEQ ID NO: 49388 - protein, 10 aa, Artificial Sequence
  Description of Artificial Sequence: Synthetic peptide
  Seed: LELRSKYWAI
  misc_feature (2)..(2): Xaa can be Met, Pro, Ala, Phe, Trp, Tyr, Arg, Asn, Asp, Cys, Gln, Glu, Gly, His, Ile, Leu, Lys, Ser, Thr, or Val
  misc_feature (10)..(10): Xaa can be Ala, Ile, Leu, Met, Phe, Val, Cys, or Thr
LXLRSKYWAX

SEQ ID NO: 49389 - protein, 9 aa, Artificial Sequence
  Description of Artificial Sequence: Synthetic peptide
  Seed: LELRSRYRA
  misc_feature (2)..(2): Xaa can be Glu or Asp
  misc_feature (9)..(9): Xaa can be Ile, Leu, Ala, Met, Phe, Pro, or Val
LXLRSRYRX

SEQ ID NO: 49390 - protein, 10 aa, Artificial Sequence
  Description of Artificial Sequence: Synthetic peptide
  Seed: LELRSRYRAI
  misc_feature (2)..(2): Xaa can be Met, Pro, Ala, Arg, Asn, Asp, Cys, Gln, Glu, Gly, His, Ile, Leu, Lys, Phe, Ser, Thr, Trp, Tyr, or Val
  misc_feature (10)..(10): Xaa can be Ala, Ile, Leu, Met, Phe, Val, or Cys
LXLRSRYRAX

SEQ ID NO: 49391 - protein, 9 aa, Artificial Sequence
  Description of Artificial Sequence: Synthetic peptide
  Seed: LELRSRYWA
  misc_feature (2)..(2): Xaa can be Glu or Asp
  misc_feature (9)..(9): Xaa can be Leu, Ala, Ile, Met, Phe, Pro, or Val
LXLRSRYWX

SEQ ID NO: 49392 - protein, 10 aa, Artificial Sequence
  Description of Artificial Sequence: Synthetic peptide
  Seed: LELRSRYWAI
  misc_feature (2)..(2): Xaa can be Met, Pro, Glu, Ala, Arg, Asn, Asp, Gln, Gly, His, Ile, Leu, Phe, Ser, Thr, Trp, Tyr, Val, Cys, or Lys
  misc_feature (10)..(10): Xaa can be Ala, Cys, Ile, Leu, Met, Phe, Val, Thr, Gly, Ser, or Pro
LXLRSRYWAX

SEQ ID NO: 49393 - protein, 9 aa, Artificial Sequence
  Description of Artificial Sequence: Synthetic peptide
  Seed: LFSFIRGTK
  misc_feature (2)..(2): Xaa can be Ser, Thr, Ala, Ile, Met, Val, Asn, Gln, Gly, Leu, Phe, Pro, Trp, Tyr, Cys, or His
  misc_feature (9)..(9): Xaa can be Arg, Lys, Tyr, or Ala
LXSFIRGTX

SEQ ID NO: 49394 - protein, 9 aa, Artificial Sequence
  Description of Artificial Sequence: Synthetic peptide
  Seed: LIFLARSAL
  misc_feature (2)..(2): Xaa can be Gln, Pro, Met, Tyr, Lys, Leu, Ala, Phe, Glu, His, Ile, Ser, Val, Arg, Thr, Trp, Asn, Gly, Cys, or Asp
  misc_feature (9)..(9): Xaa can be Met, Phe, Tyr, Leu, Ile, Trp, Val, His, Ala, Thr, Gly, Ser, Cys, Gln, Asn, Lys, Pro, Glu, or Asp
LXFLARSAX

SEQ ID NO: 49395 - protein, 10 aa, Artificial Sequence
  Description of Artificial Sequence: Synthetic peptide
  Seed: LIFLARSALI
  misc_feature (2)..(2): Xaa can be Leu, Met, Thr, Gln, Ile, Val, Ala, or Ser
  misc_feature (10)..(10): Xaa can be Ile, Val, Ala, Leu, Met, Thr, Cys, Gly, Phe, Pro, Ser, or Glu
LXFLARSALX

SEQ ID NO: 49396 - protein, 9 aa, Artificial Sequence
  Description of Artificial Sequence: Synthetic peptide
  Seed: LIFLTRSAL
  misc_feature (2)..(2): Xaa can be Pro, Gln, Met, Tyr, Lys, Leu, Phe, Ala, Glu, His, Ile, Ser, Val, Arg, Thr, Trp, Asn, Gly, Cys, or Asp
  misc_feature (9)..(9): Xaa can be Met, Phe, Tyr, Leu, Ile, Trp, Val, His, Ala, Thr, Ser, Cys, Gly, Gln, Asn, Pro, Glu, or Ly s
LXFLTRSAX

SEQ ID NO: 49397 - protein, 10 aa, Artificial Sequence
  Description of Artificial Sequence: Synthetic peptide
  Seed: LIFLTRSALI
  misc_feature (2)..(2): Xaa can be Leu, Met, Gln, Ile, Val, Thr, Ala, or Ser
  misc_feature (10)..(10): Xaa can be Val, Ala, Ile, Leu, Cys, Gly, Met, Phe, Pro, Ser, Thr, Asn, Asp, Gln, Glu, Trp, or Tyr
LXFLTRSALX

SEQ ID NO: 49398 - protein, 9 aa, Artificial Sequence
  Description of Artificial Sequence: Synthetic peptide
  Seed: LIFSARSAL
  misc_feature (2)..(2): Xaa can be Gln, Pro, Met, Tyr, Lys, Leu, Ala, Phe, His, Glu, Ile, Ser, Thr, Trp, Val, Arg, Asn, Gly, Cys, or Asp
  misc_feature (9)..(9): Xaa can be Met, Phe, Tyr, Leu, His, Ile, Trp, Val, Ala, Thr, Cys, Gly, Ser, Gln, Glu, Asn, Lys, Pro, Asp, or Arg
LXFSARSAX

SEQ ID NO: 49399 - protein, 10 aa, Artificial Sequence
  Description of Artificial Sequence: Synthetic peptide
  Seed: LIFSARSALI
  misc_feature (2)..(2): Xaa can be Leu, Met, Thr, Gln, Ile, Val, Ala, or Ser
  misc_feature (10)..(10): Xaa can be Ala, Ile, Leu, Val, Met, Thr, Arg, Asn, Asp, Cys, Gln, Glu, Gly, His, Lys, Phe, Pro, Ser, Trp, or Tyr
LXFSARSALX

SEQ ID NO: 49400 - protein, 11 aa, Artificial Sequence
  Description of Artificial Sequence: Synthetic peptide
  Seed: LIFSARSALIL
  misc_feature (2)..(2): Xaa can be Ser, Ala, Thr, Arg, Asn, Asp, Cys, Gln, Glu, Gly, His, Ile, Leu, Lys, Met, Phe, Pro, Trp, Tyr, or Val
  misc_feature (11)..(11): Xaa can be Leu, Met, Phe, Trp, Tyr, Ile, or Val
LXFSARSALIX

SEQ ID NO: 49401 - protein, 10 aa, Artificial Sequence
  Description of Artificial Sequence: Synthetic peptide
  Seed: LILRGAVAHK
  misc_feature (2)..(2): Xaa can be Ser, Thr, Ala, Arg, Asn, Asp, Cys, Gln, Glu, Gly, His, Ile, Leu, Lys, Met, Phe, Pro, Trp, Tyr, or Val
  misc_feature (10)..(10): Xaa can be Arg, Lys, or Ala
LXLRGAVAHX

SEQ ID NO: 49402 - protein, 10 aa, Artificial Sequence
  Description of Artificial Sequence: Synthetic peptide
  Seed: LILRGSVAHK
  misc_feature (2)..(2): Xaa can be Ser, Thr, Ala, Arg, Asn, Asp, Cys, Gln, Glu, Gly, His, Ile, Leu, Lys, Met, Phe, Pro, Trp, Tyr, or Val
  misc_feature (10)..(10): Xaa can be Arg, Lys, or Ala
LXLRGSVAHX

SEQ ID NO: 49403 - protein, 10 aa, Artificial Sequence
  Description of Artificial Sequence: Synthetic peptide
  Seed: LILYDKDEIR
  misc_feature (2)..(2): Xaa can be Thr, Ile, or Val
  misc_feature (10)..(10): Xaa can be Arg or Lys
LXLYDKDEIX

SEQ ID NO: 49404 - protein, 10 aa, Artificial Sequence
  Description of Artificial Sequence: Synthetic peptide
  Seed: LILYDKEEIM
  misc_feature (2)..(2): Xaa can be Ala, Arg, Asn, Asp, Cys, Ile, Gln, Met, Phe, Ser, Thr, Trp, Tyr, or Val
  misc_feature (10)..(10): Xaa can be Arg, Ala, Met, Ile, Leu, or Val
LXLYDKEEIX

SEQ ID NO: 49405 - protein, 10 aa, Artificial Sequence
  Description of Artificial Sequence: Synthetic peptide
  Seed: LILYDKEEMR
  misc_feature (2)..(2): Xaa can be Thr, Val, Ala, Arg, Asn, Asp, Cys, Gln, Glu, Gly, His, Ile, Leu, Lys, Met, Phe, Pro, Ser, Trp, or Tyr
  misc_feature (10)..(10): Xaa can be Arg or Lys
LXLYDKEEMX

SEQ ID NO: 49406 - protein, 9 aa, Artificial Sequence
  Description of Artificial Sequence: Synthetic peptide
  Seed: LILYDKEEV
  misc_feature (2)..(2): Xaa can be Leu, Met, or Ile
  misc_feature (9)..(9): Xaa can be Val, Ala, Ile, Leu, or Met
LXLYDKEEX

SEQ ID NO: 49407 - protein, 10 aa, Artificial Sequence
  Description of Artificial Sequence: Synthetic peptide
  Seed: LILYDKEEVR
  misc_feature (2)..(2): Xaa can be Arg, Ile, Met, Phe, Ser, Thr, Trp, Tyr, or Val
  misc_feature (10)..(10): Xaa can be Arg
LXLYDKEEVX

SEQ ID NO: 49408 - protein, 10 aa, Artificial Sequence
  Description of Artificial Sequence: Synthetic peptide
  Seed: LIQNSITIEK
  misc_feature (2)..(2): Xaa can be Met, Thr, Ala, Arg, Asn, Asp, Cys, Gln, Glu, Gly, His, Ile, Leu, Lys, Phe, Pro, Ser, Trp, Tyr, or Val
  misc_feature (10)..(10): Xaa can be Arg, Lys, or Tyr
LXQNSITIEX

SEQ ID NO: 49409 - protein, 10 aa, Artificial Sequence
  Description of Artificial Sequence: Synthetic peptide
  Seed: LIQNSITMER
  misc_feature (2)..(2): Xaa can be Ile, Leu, Met, Thr, Val, Ala, Arg, Asn, Asp, Cys, Gln, Glu, Gly, His, Lys, Phe, Pro, Ser, Trp, or Tyr
  misc_feature (10)..(10): Xaa can be Arg, Lys, or Tyr
LXQNSITMEX

SEQ ID NO: 49410 - protein, 10 aa, Artificial Sequence
  Description of Artificial Sequence: Synthetic peptide
  Seed: LIQNSLTIER
  misc_feature (2)..(2): Xaa can be Ala, Ile, Leu, Met, Phe, Ser, Thr, Trp, Tyr, Val, Arg, Asn, Asp, Cys, Gln, Glu, Gly, His, Lys, or Pro
  misc_feature (10)..(10): Xaa can be Arg or Lys
LXQNSLTIEX

SEQ ID NO: 49411 - protein, 10 aa, Artificial Sequence
  Description of Artificial Sequence: Synthetic peptide
  Seed: LIQNSLTVER
  misc_feature (2)..(2): Xaa can be Ala, Ile, Leu, Met, Phe, Ser, Thr, Trp, Tyr, Val, Arg, Asn, Asp, Cys, Gln, Glu, Gly, His, Lys, or Pro
  misc_feature (10)..(10): Xaa can be Arg or Lys
LXQNSLTVEX

SEQ ID NO: 49412 - protein, 10 aa, Artificial Sequence
  Description of Artificial Sequence: Synthetic peptide
  Seed: LIQNSMTIER
  misc_feature (2)..(2): Xaa can be Ala, Ile, Leu, Met, Phe, Ser, Thr, Trp, Tyr, Val, Arg, Asn, Asp, Cys, Gln, Glu, Gly, His, Lys, or Pro
  misc_feature (10)..(10): Xaa can be Arg or Lys
LXQNSMTIEX

SEQ ID NO: 49413 - protein, 9 aa, Artificial Sequence
  Description of Artificial Sequence: Synthetic peptide
  Seed: LIRMIKRGV
  misc_feature (2)..(2): Xaa can be Thr, Ser, Val, Ile, Met, Tyr, Ala, Gln, Gly, Phe, Trp, Asn, or Leu
  misc_feature (9)..(9): Xaa can be Lys, Ala, Val, Ile, Leu, Met, Gly, Ser, Thr, Tyr, or Pro
LXRMIKRGX

SEQ ID NO: 49414 - protein, 9 aa, Artificial Sequence
  Description of Artificial Sequence: Synthetic peptide
  Seed: LIRPKENPA
  misc_feature (2)..(2): Xaa can be Thr, Met, Ser, Ala, Ile, Leu, Pro, Val, Phe, Asn, Gln, Gly, Tyr, Arg, or Trp
  misc_feature (9)..(9): Xaa can be Leu, Lys, Met, Ala, Ile, Val, Phe, Ser, Tyr, Cys, Gly, or Thr
LXRPKENPX

SEQ ID NO: 49415 - protein, 9 aa, Artificial Sequence
  Description of Artificial Sequence: Synthetic peptide
  Seed: LIRPNENPA
  misc_feature (2)..(2): Xaa can be Leu, Met, Val, or Ile
  misc_feature (9)..(9): Xaa can be Ala, Val, Ile, Leu, or Lys
LXRPNENPX

SEQ ID NO: 49416 - protein, 10 aa, Artificial Sequence
  Description of Artificial Sequence: Synthetic peptide
  Seed: LKLNDYEGRL
  misc_feature (2)..(2): Xaa can be Gln, Ile, Leu, Met, Phe, Tyr, Ala, Arg, Asn, Asp, Cys, Glu, Gly, His, Lys, Pro, Ser, Thr, Trp, or Val
  misc_feature (10)..(10): Xaa can be Leu, Val, or Ile
LXLNDYEGRX

SEQ ID NO: 49417 - protein, 10 aa, Artificial Sequence
  Description of Artificial Sequence: Synthetic peptide
  Seed: LKLSDHEGRL
  misc_feature (2)..(2): Xaa can be Leu, Met, Ala, Arg, Asn, Asp, Cys, Gln, Glu, Gly, His, Ile, Lys, Phe, Pro, Ser, Thr, Trp, Tyr, or Val
  misc_feature (10)..(10): Xaa can be Leu, Val, or Ile
LXLSDHEGRX

SEQ ID NO: 49418 - protein, 10 aa, Artificial Sequence
  Description of Artificial Sequence: Synthetic peptide
  Seed: LKLSDNEGRL
  misc_feature (2)..(2): Xaa can be Leu, Met, Ala, Arg, Asn, Asp, Cys, Gln, Glu, Gly, His, Ile, Lys, Phe, Pro, Ser, Thr, Trp, Tyr, or Val
  misc_feature (10)..(10): Xaa can be Leu, Val, or Ile
LXLSDNEGRX

SEQ ID NO: 49419 - protein, 10 aa, Artificial Sequence
  Description of Artificial Sequence: Synthetic peptide
  Seed: LKLSDYEGRL
  misc_feature (2)..(2): Xaa can be Leu, Met, Ala, Arg, Asn, Asp, Cys, Gln, Glu, Gly, His, Ile, Lys, Phe, Pro, Ser, Thr, Trp, Tyr, or Val
  misc_feature (10)..(10): Xaa can be Ile, Leu, Val, Ala, or Met
LXLSDYEGRX

SEQ ID NO: 49420 - protein, 8 aa, Artificial Sequence
  Description of Artificial Sequence: Synthetic peptide
  Seed: LLQNSHVY
  misc_feature (2)..(2): Xaa can be Gln, Lys, Met, Ala, Arg, His, Leu, Phe, Tyr, Ile, Ser, Trp, or Val
  misc_feature (8)..(8): Xaa can be Tyr, Phe, Met, or Leu
LXQNSHVX

SEQ ID NO: 49421 - protein, 10 aa, Artificial Sequence
  Description of Artificial Sequence: Synthetic peptide
  Seed: LLQNSHVYSL
  misc_feature (2)..(2): Xaa can be Met, Leu, Gln, Lys, Ala, Arg, Cys, His, Ile, Phe, Ser, Thr, Trp, Tyr, Val, Asn, Asp, Glu, Gly, or Pro
  misc_feature (10)..(10): Xaa can be Ile, Leu, Met, Phe, Trp, Tyr, Val, Ala, His, Cys, or Thr
LXQNSHVYSX

SEQ ID NO: 49422 - protein, 11 aa, Artificial Sequence
  Description of Artificial Sequence: Synthetic peptide
  Seed: LLQNSHVYSLI
  misc_feature (2)..(2): Xaa can be Leu, Met, Phe, Tyr, or Ile
  misc_feature (11)..(11): Xaa can be Val, Leu, Ala, Ile, Met, Cys, or Thr
LXQNSHVYSLX

SEQ ID NO: 49423 - protein, 10 aa, Artificial Sequence
  Description of Artificial Sequence: Synthetic peptide
  Seed: LLQNSQIFSL
  misc_feature (2)..(2): Xaa can be Leu, Met, Gln, Ile, Phe, Tyr, Val, Ala, Arg, Asn, Asp, Cys, Glu, Gly, His, Lys, Pro, Ser, Thr, or Trp
  misc_feature (10)..(10): Xaa can be Ile, Leu, Met, Phe, Tyr, Val, Ala, Cys, Thr, or Trp
LXQNSQIFSX

SEQ ID NO: 49424 - protein, 11 aa, Artificial Sequence
  Description of Artificial Sequence: Synthetic peptide
  Seed: LLQNSQIFSLI
  misc_feature (2)..(2): Xaa can be Leu, Met, Ile, Phe, or Tyr
  misc_feature (11)..(11): Xaa can be Val, Ala, Cys, Ile, Leu, Met, Phe, Pro, Ser, Thr, Arg, Asn, Asp, Gln, Glu, Gly, His, Lys, Trp, or Tyr
LXQNSQIFSLX

SEQ ID NO: 49425 - protein, 8 aa, Artificial Sequence
  Description of Artificial Sequence: Synthetic peptide
  Seed: LLQNSQVF
  misc_feature (2)..(2): Xaa can be Gln, Lys, Met, Ala, Arg, His, Leu, Phe, or Tyr
  misc_feature (8)..(8): Xaa can be Phe, Tyr, Met, or Leu
LXQNSQVX

SEQ ID NO: 49426 - protein, 10 aa, Artificial Sequence
  Description of Artificial Sequence: Synthetic peptide
  Seed: LLQNSQVFSI
  misc_feature (2)..(2): Xaa can be Met, Leu, Gln, Ala, Arg, Asn, Asp, Cys, Glu, Gly, His, Ile, Lys, Phe, Pro, Ser, Thr, Trp, Tyr, or Val
  misc_feature (10)..(10): Xaa can be Ile, Leu, Met, Phe, Tyr, Val, Ala, Trp, Cys, or Thr
LXQNSQVFSX

SEQ ID NO: 49427 - protein, 11 aa, Artificial Sequence
  Description of Artificial Sequence: Synthetic peptide
  Seed: LLQNSQVFSII
  misc_feature (2)..(2): Xaa can be Leu or Met
  misc_feature (11)..(11): Xaa can be Ala, Ile, Leu, Val, or Met
LXQNSQVFSIX

SEQ ID NO: 49428 - protein, 11 aa, Artificial Sequence
  Description of Artificial Sequence: Synthetic peptide
  Seed: LLQNSQVFSLI
  misc_feature (2)..(2): Xaa can be Leu, Met, Phe, or Tyr
  misc_feature (11)..(11): Xaa can be Val, Ala, Ile, Leu, Met, Arg, Asn, Asp, Cys, Gln, Glu, Gly, His, Lys, Phe, Pro, Ser, Thr, Trp, or Tyr
LXQNSQVFSLX

SEQ ID NO: 49429 - protein, 10 aa, Artificial Sequence
  Description of Artificial Sequence: Synthetic peptide
  Seed: LLQNSQVLSL
  misc_feature (2)..(2): Xaa can be Met, Gln, Leu, His, Lys, Ala, Arg, Asn, Asp, Cys, Glu, Gly, Ile, Phe, Pro, Ser, Thr, Trp, Tyr, or Val
  misc_feature (10)..(10): Xaa can be Ile, Leu, Met, Phe, Tyr, Val, Trp, His, Ala, or Thr
LXQNSQVLSX

SEQ ID NO: 49430 - protein, 11 aa, Artificial Sequence
  Description of Artificial Sequence: Synthetic peptide
  Seed: LLQNSQVLSLI
  misc_feature (2)..(2): Xaa can be Leu, Met, Gln, Ile, Phe, or Tyr
  misc_feature (11)..(11): Xaa can be Val, Ala, Ile, Leu, or Met
LXQNSQVLSLX

SEQ ID NO: 49431 - protein, 10 aa, Artificial Sequence
  Description of Artificial Sequence: Synthetic peptide
  Seed: LLQNSQVYSL
  misc_feature (2)..(2): Xaa can be Leu, Met, Gln, Ile, Phe, Trp, Tyr, Val, Ala, Arg, Asn, Asp, Cys, Glu, Gly, His, Lys, Pro, Ser, or Thr
  misc_feature (10)..(10): Xaa can be Leu, Met, Phe, Tyr, Val, Ile, Ala, Thr, Trp, or Cys
LXQNSQVYSX

SEQ ID NO: 49432 - protein, 11 aa, Artificial Sequence
  Description of Artificial Sequence: Synthetic peptide
  Seed: LLQNSQVYSLI
  misc_feature (2)..(2): Xaa can be Leu or Met
  misc_feature (11)..(11): Xaa can be Ala, Ile, Leu, Val, or Met
LXQNSQVYSLX

SEQ ID NO: 49433 - protein, 8 aa, Artificial Sequence
  Description of Artificial Sequence: Synthetic peptide
  Seed: LLQTSQVY
  misc_feature (2)..(2): Xaa can be Gln, Met, Lys, Ala, Arg, His, Ile, Leu, Phe, Tyr, Ser, Trp, or Val
  misc_feature (8)..(8): Xaa can be Tyr, Phe, Met, or Leu
LXQTSQVX

SEQ ID NO: 49434 - protein, 10 aa, Artificial Sequence
  Description of Artificial Sequence: Synthetic peptide
  Seed: LLQTSQVYSL
  misc_feature (2)..(2): Xaa can be Leu, Met, Ile, Phe, Tyr, Ala, Gln, Ser, Thr, Trp, Val, Arg, Asn, Asp, Cys, Glu, Gly, His, Lys, or Pro
  misc_feature (10)..(10): Xaa can be Val, Leu, Ile, Ala, Met, or Thr
LXQTSQVYSX

SEQ ID NO: 49435 - protein, 11 aa, Artificial Sequence
  Description of Artificial Sequence: Synthetic peptide
  Seed: LLQTSQVYSLI
  misc_feature (2)..(2): Xaa can be Leu or Met
  misc_feature (11)..(11): Xaa can be Ala, Ile, Leu, or Val
LXQTSQVYSLX

SEQ ID NO: 49436 - protein, 10 aa, Artificial Sequence
  Description of Artificial Sequence: Synthetic peptide
  Seed: LLSFIRGTKV
  misc_feature (2)..(2): Xaa can be Leu, Met, Ile, Gln, Ser, or Val
  misc_feature (10)..(10): Xaa can be Val, Leu, Ile, Ala, Met, or Thr
LXSFIRGTKX

SEQ ID NO: 49437 - protein, 11 aa, Artificial Sequence
  Description of Artificial Sequence: Synthetic peptide
  Seed: LLSFIRGTKVF
  misc_feature (2)..(2): Xaa can be Gln, Met, Leu, Ala, Ile, Ser, Thr, or Val
  misc_feature (11)..(11): Xaa can be Tyr, Phe, or Met
LXSFIRGTKVX

SEQ ID NO: 49438 - protein, 10 aa, Artificial Sequence
  Description of Artificial Sequence: Synthetic peptide
  Seed: LMEGAKPEEV
  misc_feature (2)..(2): Xaa can be Leu or Met
  misc_feature (10)..(10): Xaa can be Leu or Val
LXEGAKPEEX

SEQ ID NO: 49439 - protein, 11 aa, Artificial Sequence
  Description of Artificial Sequence: Synthetic peptide
  Seed: LMIWHSNLNDA
  misc_feature (2)..(2): Xaa can be Leu or Met
  misc_feature (11)..(11): Xaa can be Ala, Ile, Leu, or Val
LXIWHSNLNDX

SEQ ID NO: 49440 - protein, 9 aa, Artificial Sequence
  Description of Artificial Sequence: Synthetic peptide
  Seed: LMQGSTLPR
  misc_feature (2)..(2): Xaa can be Met, Ile, Leu, Ser, Thr, Val, Ala, Asn, Gln, Gly, Phe, Trp, Tyr, Cys, or His
  misc_feature (9)..(9): Xaa can be Arg, Lys, Tyr, or His
LXQGSTLPX

SEQ ID NO: 49441 - protein, 10 aa, Artificial Sequence
  Description of Artificial Sequence: Synthetic peptide
  Seed: LMQGSTLPRR
  misc_feature (2)..(2): Xaa can be Met, Phe, Thr, Val, Ala, Gln, Ile, Leu, Ser, Trp, Tyr, Arg, Asn, Cys, Gly, or His
  misc_feature (10)..(10): Xaa can be Arg, Lys, Tyr, Ala, Asn, Asp, Cys, Gln, Glu, Gly, His, Ile, Leu, Met, Phe, Pro, Ser, Thr, Trp, or Val
LXQGSTLPRX

SEQ ID NO: 49442 - protein, 8 aa, Artificial Sequence
  Description of Artificial Sequence: Synthetic peptide
  Seed: LPACVHGL
  misc_feature (2)..(2): Xaa can be Pro
  misc_feature (8)..(8): Xaa can be Ile, Leu, Met, Phe, or Val
LXACVHGX

SEQ ID NO: 49443 - protein, 9 aa, Artificial Sequence
  Description of Artificial Sequence: Synthetic peptide
  Seed: LPACVHGLA
  misc_feature (2)..(2): Xaa can be Pro, Ala, Met, Val, Ile, Leu, Ser, or Thr
  misc_feature (9)..(9): Xaa can be Tyr, Phe, Ala, Leu, Met, Cys, Gly, His, Ile, Pro, Ser, Thr, Trp, or Val
LXACVHGLX

SEQ ID NO: 49444 - protein, 10 aa, Artificial Sequence
  Description of Artificial Sequence: Synthetic peptide
  Seed: LPACVHGLAV
  misc_feature (2)..(2): Xaa can be Pro, Ala, Met, Val, Arg, Asn, Cys, Gln, Glu, Gly, His, Ile, Leu, Lys, Phe, Ser, Thr, Trp, or Tyr
  misc_feature (10)..(10): Xaa can be Tyr, Met, Phe, Ala, Leu, Cys, Gly, His, Ile, Pro, Ser, Thr, Trp, or Val
LXACVHGLAX

SEQ ID NO: 49445 - protein, 11 aa, Artificial Sequence
  Description of Artificial Sequence: Synthetic peptide
  Seed: LPACVHGLAVA
  misc_feature (2)..(2): Xaa can be Pro
  misc_feature (11)..(11): Xaa can be Ala, Ile, Leu, Met, Phe, or Val
LXACVHGLAVX

SEQ ID NO: 49446 - protein, 8 aa, Artificial Sequence
  Description of Artificial Sequence: Synthetic peptide
  Seed: LPACVNGL
  misc_feature (2)..(2): Xaa can be Pro
  misc_feature (8)..(8): Xaa can be Leu or Met
LXACVNGX

SEQ ID NO: 49447 - protein, 9 aa, Artificial Sequence
  Description of Artificial Sequence: Synthetic peptide
  Seed: LPACVNGLA
  misc_feature (2)..(2): Xaa can be Pro, Ala, Met, Val, Ile, Leu, Ser, or Thr
  misc_feature (9)..(9): Xaa can be Tyr, Phe, Ala, Met, Cys, His, Ile, Leu, Pro, Ser, Thr, Trp, or Val
LXACVNGLX

SEQ ID NO: 49448 - protein, 10 aa, Artificial Sequence
  Description of Artificial Sequence: Synthetic peptide
  Seed: LPACVNGLAV
  misc_feature (2)..(2): Xaa can be Pro, Ala, Met, Val, Ile, Phe, Ser, Thr, Tyr, Arg, Asn, Asp, Cys, Gln, Glu, Gly, His, Leu, Lys, or Trp
  misc_feature (10)..(10): Xaa can be Tyr, Phe, Met, Ala, Leu, Cys, Gly, His, Ile, Pro, Ser, Thr, Trp, or Val
LXACVNGLAX

SEQ ID NO: 49449 - protein, 11 aa, Artificial Sequence
  Description of Artificial Sequence: Synthetic peptide
  Seed: LPACVNGLAVA
  misc_feature (2)..(2): Xaa can be Pro
  misc_feature (11)..(11): Xaa can be Ala, Ile, Leu, Met, Phe, or Val
LXACVNGLAVX

SEQ ID NO: 49450 - protein, 8 aa, Artificial Sequence
  Description of Artificial Sequence: Synthetic peptide
  Seed: LPACVYGL
  misc_feature (2)..(2): Xaa can be Pro
  misc_feature (8)..(8): Xaa can be Leu or Met
LXACVYGX

SEQ ID NO: 49451 - protein, 9 aa, Artificial Sequence
  Description of Artificial Sequence: Synthetic peptide
  Seed: LPACVYGLA
  misc_feature (2)..(2): Xaa can be Pro, Ala, Thr, Val, Ile, Ser, Met, Asn, Gly, or Leu
  misc_feature (9)..(9): Xaa can be Val, Ile, Trp, Ala, Leu, Met, Thr, Phe, Cys, Gly, Pro, Ser, or Tyr
LXACVYGLX

SEQ ID NO: 49452 - protein, 10 aa, Artificial Sequence
  Description of Artificial Sequence: Synthetic peptide
  Seed: LPACVYGLAV
  misc_feature (2)..(2): Xaa can be Pro, Ala, Met, Cys, Gln, Gly, His, Ile, Leu, Phe, Ser, Thr, Tyr, or Val
  misc_feature (10)..(10): Xaa can be Tyr, Phe, Ala, Leu, Met, Cys, Gly, His, Ile, Pro, Ser, Thr, Trp, or Val
LXACVYGLAX

SEQ ID NO: 49453 - protein, 11 aa, Artificial Sequence
  Description of Artificial Sequence: Synthetic peptide
  Seed: LPACVYGLAVA
  misc_feature (2)..(2): Xaa can be Pro
  misc_feature (11)..(11): Xaa can be Ala, Ile, Leu, Met, Phe, or Val
LXACVYGLAVX

SEQ ID NO: 49454 - protein, 10 aa, Artificial Sequence
  Description of Artificial Sequence: Synthetic peptide
  Seed: LPACVYGLIV
  misc_feature (2)..(2): Xaa can be Pro
  misc_feature (10)..(10): Xaa can be Ala, Cys, Ile, Leu, Met, Phe, Ser, Thr, Tyr, or Val
LXACVYGLIX

SEQ ID NO: 49455 - protein, 11 aa, Artificial Sequence
  Description of Artificial Sequence: Synthetic peptide
  Seed: LPACVYGLIVA
  misc_feature (2)..(2): Xaa can be Pro
  misc_feature (11)..(11): Xaa can be Ala, Ile, Leu, Met, Phe, or Val
LXACVYGLIVX

SEQ ID NO: 49456 - protein, 10 aa, Artificial Sequence
  Description of Artificial Sequence: Synthetic peptide
  Seed: LPACVYGLSV
  misc_feature (2)..(2): Xaa can be Pro
  misc_feature (10)..(10): Xaa can be Ala, Cys, Ile, Leu, Met, Phe, Pro, Ser, Thr, Tyr, or Val
LXACVYGLSX

SEQ ID NO: 49457 - protein, 11 aa, Artificial Sequence
  Description of Artificial Sequence: Synthetic peptide
  Seed: LPACVYGLSVA
  misc_feature (2)..(2): Xaa can be Pro
  misc_feature (11)..(11): Xaa can be Ala, Ile, Leu, Met, Phe, or Val
LXACVYGLSVX

SEQ ID NO: 49458 - protein, 10 aa, Artificial Sequence
  Description of Artificial Sequence: Synthetic peptide
  Seed: LPACVYGLTV
  misc_feature (2)..(2): Xaa can be Pro, Ala, Ile, Met, Ser, Thr, or Val
  misc_feature (10)..(10): Xaa can be Trp, Ala, Cys, Ile, Leu, Met, Phe, Pro, Ser, Thr, Tyr, or Val
LXACVYGLTX

SEQ ID NO: 49459 - protein, 11 aa, Artificial Sequence
  Description of Artificial Sequence: Synthetic peptide
  Seed: LPACVYGLTVA
  misc_feature (2)..(2): Xaa can be Pro
  misc_feature (11)..(11): Xaa can be Ala, Ile, Leu, Met, Phe, or Val
LXACVYGLTVX

SEQ ID NO: 49460 - protein, 10 aa, Artificial Sequence
  Description of Artificial Sequence: Synthetic peptide
  Seed: LPACVYGLVV
  misc_feature (2)..(2): Xaa can be Pro
  misc_feature (10)..(10): Xaa can be Ala, Cys, Ile, Leu, Met, Phe, Pro, Ser, Thr, Tyr, or Val
LXACVYGLVX

SEQ ID NO: 49461 - protein, 11 aa, Artificial Sequence
  Description of Artificial Sequence: Synthetic peptide
  Seed: LPACVYGLVVA
  misc_feature (2)..(2): Xaa can be Pro
  misc_feature (11)..(11): Xaa can be Ala, Ile, Leu, Met, Phe, or Val
LXACVYGLVVX

SEQ ID NO: 49462 - protein, 9 aa, Artificial Sequence
  Description of Artificial Sequence: Synthetic peptide
  Seed: LPACVYGPA
  misc_feature (2)..(2): Xaa can be Pro, Ala, Met, Val, Ile, Ser, Thr, Leu, Cys, Gln, Gly, or Phe
  misc_feature (9)..(9): Xaa can be Tyr, Phe, Met, Leu, Ala, Trp, Val, Cys, Gln, Gly, His, Ile, Pro, Ser, or Thr
LXACVYGPX

SEQ ID NO: 49463 - protein, 10 aa, Artificial Sequence
  Description of Artificial Sequence: Synthetic peptide
  Seed: LPACVYGPAV
  misc_feature (2)..(2): Xaa can be Pro, Ala, Met, Val, Cys, Gln, Gly, Ile, Leu, Phe, Ser, Thr, or Tyr
  misc_feature (10)..(10): Xaa can be Tyr, Phe, Ala, Leu, Met, Cys, Gly, His, Ile, Pro, Ser, Thr, Trp, or Val
LXACVYGPAX

SEQ ID NO: 49464 - protein, 11 aa, Artificial Sequence
  Description of Artificial Sequence: Synthetic peptide
  Seed: LPACVYGPAVA
  misc_feature (2)..(2): Xaa can be Pro
  misc_feature (11)..(11): Xaa can be Ala, Ile, Leu, Met, Phe, or Val
LXACVYGPAVX

SEQ ID NO: 49465 - protein, 8 aa, Artificial Sequence
  Description of Artificial Sequence: Synthetic peptide
  Seed: LPFDKATI
  misc_feature (2)..(2): Xaa can be Pro
  misc_feature (8)..(8): Xaa can be Ile, Leu, Met, or Val
LXFDKATX

SEQ ID NO: 49466 - protein, 9 aa, Artificial Sequence
  Description of Artificial Sequence: Synthetic peptide
  Seed: LPFDKATIM
  misc_feature (2)..(2): Xaa can be Pro, Ala, Met, Ile, Ser, Thr, Val, Gln, Leu, Phe, Cys, or Gly
  misc_feature (9)..(9): Xaa can be Tyr, Phe, Met, Trp, Leu, Ile, Val, Ala, Cys, Gln, Gly, His, Ser, or Thr
LXFDKATIX

SEQ ID NO: 49467 - protein, 10 aa, Artificial Sequence
  Description of Artificial Sequence: Synthetic peptide
  Seed: LPFDKATIMA
  misc_feature (2)..(2): Xaa can be Pro
  misc_feature (10)..(10): Xaa can be Ala, Cys, Ile, Leu, Met, Phe, Pro, Ser, Thr, or Val
LXFDKATIMX

SEQ ID NO: 49468 - protein, 11 aa, Artificial Sequence
  Description of Artificial Sequence: Synthetic peptide
  Seed: LPFDKATIMAA
  misc_feature (2)..(2): Xaa can be Pro
  misc_feature (11)..(11): Xaa can be Ala, Cys, Ile, Leu, Met, Phe, Pro, Ser, Thr, or Val
LXFDKATIMAX

SEQ ID NO: 49469 - protein, 8 aa, Artificial Sequence
  Description of Artificial Sequence: Synthetic peptide
  Seed: LPFDKPTI
  misc_feature (2)..(2): Xaa can be Pro
  misc_feature (8)..(8): Xaa can be Ile, Leu, Met, or Val
LXFDKPTX

SEQ ID NO: 49470 - protein, 9 aa, Artificial Sequence
  Description of Artificial Sequence: Synthetic peptide
  Seed: LPFDKPTIM
  misc_feature (2)..(2): Xaa can be Pro, Ala, Ser, Ile, Met, Thr, Val, Gly, Cys, Gln, Leu, Phe, or Tyr
  misc_feature (9)..(9): Xaa can be Met, Tyr, Leu, Phe, Val, Ile, Trp, Ala, His, Cys, Gln, Ser, or Thr
LXFDKPTIX

SEQ ID NO: 49471 - protein, 10 aa, Artificial Sequence
  Description of Artificial Sequence: Synthetic peptide
  Seed: LPFDKPTIMA
  misc_feature (2)..(2): Xaa can be Pro
  misc_feature (10)..(10): Xaa can be Ala, Cys, Ile, Leu, Met, Phe, Ser, Thr, or Val
LXFDKPTIMX

SEQ ID NO: 49472 - protein, 11 aa, Artificial Sequence
  Description of Artificial Sequence: Synthetic peptide
  Seed: LPFDKPTIMAA
  misc_feature (2)..(2): Xaa can be Pro
  misc_feature (11)..(11): Xaa can be Ala, Cys, Ile, Leu, Met, Phe, Pro, Ser, Thr, or Val
LXFDKPTIMAX

SEQ ID NO: 49473 - protein, 8 aa, Artificial Sequence
  Description of Artificial Sequence: Synthetic peptide
  Seed: LPFDKSTI
  misc_feature (2)..(2): Xaa can be Pro
  misc_feature (8)..(8): Xaa can be Ile, Leu, Met, or Val
LXFDKSTX

SEQ ID NO: 49474 - protein, 9 aa, Artificial Sequence
  Description of Artificial Sequence: Synthetic peptide
  Seed: LPFDKSTIM
  misc_feature (2)..(2): Xaa can be Pro, Ala, Ser, Met, Thr, Val, Ile, Gly, Leu, Cys, Gln, Phe, Tyr, or Asn
  misc_feature (9)..(9): Xaa can be Phe, Tyr, Met, Leu, Trp, Ile, Val, His, Ala, Cys, Gln, Gly, Ser, or Thr
LXFDKSTIX

SEQ ID NO: 49475 - protein, 10 aa, Artificial Sequence
  Description of Artificial Sequence: Synthetic peptide
  Seed: LPFDKSTIMA
  misc_feature (2)..(2): Xaa can be Pro
  misc_feature (10)..(10): Xaa can be Ala, Cys, Ile, Leu, Met, Phe, Ser, Thr, or Val
LXFDKSTIMX

SEQ ID NO: 49476 - protein, 11 aa, Artificial Sequence
  Description of Artificial Sequence: Synthetic peptide
  Seed: LPFDKSTIMAA
  misc_feature (2)..(2): Xaa can be Pro
  misc_feature (11)..(11): Xaa can be Ala, Cys, Ile, Leu, Met, Phe, Pro, Ser, Thr, or Val
LXFDKSTIMAX

SEQ ID NO: 49477 - protein, 9 aa, Artificial Sequence
  Description of Artificial Sequence: Synthetic peptide
  Seed: LPFDKSTVM
  misc_feature (2)..(2): Xaa can be Gln, Met, Pro, Tyr, Ala, Phe, Lys, Ser, His, Leu, Thr, Arg, Glu, Ile, Val, Gly, Trp, Asn, Cys, or Asp
  misc_feature (9)..(9): Xaa can be Phe, Tyr, Leu, Met, Ile, Trp, Val, His, Ala, Cys, Thr, Gly, Gln, Ser, Asn, Glu, or Pro
LXFDKSTVX

SEQ ID NO: 49478 - protein, 10 aa, Artificial Sequence
  Description of Artificial Sequence: Synthetic peptide
  Seed: LPFDKSTVMA
  misc_feature (2)..(2): Xaa can be Pro, Ala, Met, Val, Ile, Leu, Ser, or Thr
  misc_feature (10)..(10): Xaa can be Tyr, Phe, Met, Ala, Arg, Asn, Asp, Cys, Gln, Glu, Gly, His, Ile, Leu, Lys, Pro, Ser, Thr, Trp, or Val
LXFDKSTVMX

SEQ ID NO: 49479 - protein, 11 aa, Artificial Sequence
  Description of Artificial Sequence: Synthetic peptide
  Seed: LPFDKSTVMAA
  misc_feature (2)..(2): Xaa can be Pro, Ala, Ile, Met, Ser, Thr, or Val
  misc_feature (11)..(11): Xaa can be Tyr, Met, Phe, Ala, Cys, His, Ile, Leu, Pro, Ser, Thr, Trp, or Val
LXFDKSTVMAX

SEQ ID NO: 49480 - protein, 8 aa, Artificial Sequence
  Description of Artificial Sequence: Synthetic peptide
  Seed: LPFDKTTI
  misc_feature (2)..(2): Xaa can be Pro
  misc_feature (8)..(8): Xaa can be Ile, Leu, Met, or Val
LXFDKTTX

SEQ ID NO: 49481 - protein, 9 aa, Artificial Sequence
  Description of Artificial Sequence: Synthetic peptide
  Seed: LPFDKTTIM
  misc_feature (2)..(2): Xaa can be Pro, Tyr, Ala, Phe, Ser, Met, Ile, Thr, Trp, Val, Gly, Leu, Arg, Cys, Gln, His, or Asn
  misc_feature (9)..(9): Xaa can be Met, Phe, Tyr, Leu, Ile, Trp, Val, His, Ala, Cys, Thr, Ser, Gln, Glu, or Gly
LXFDKTTIX

SEQ ID NO: 49482 - protein, 10 aa, Artificial Sequence
  Description of Artificial Sequence: Synthetic peptide
  Seed: LPFDKTTIMA
  misc_feature (2)..(2): Xaa can be Pro
  misc_feature (10)..(10): Xaa can be Ala, Cys, Ile, Leu, Met, Phe, Pro, Ser, Thr, Tyr, or Val
LXFDKTTIMX

SEQ ID NO: 49483 - protein, 11 aa, Artificial Sequence
  Description of Artificial Sequence: Synthetic peptide
  Seed: LPFDKTTIMAA
  misc_feature (2)..(2): Xaa can be Pro
  misc_feature (11)..(11): Xaa can be Ala, Cys, Ile, Leu, Met, Phe, Pro, Ser, Thr, or Val
LXFDKTTIMAX

SEQ ID NO: 49484 - protein, 8 aa, Artificial Sequence
  Description of Artificial Sequence: Synthetic peptide
  Seed: LPFDRPTI
  misc_feature (2)..(2): Xaa can be Pro or Ala
  misc_feature (8)..(8): Xaa can be Ile, Leu, Met, Phe, or Val
LXFDRPTX

SEQ ID NO: 49485 - protein, 9 aa, Artificial Sequence
  Description of Artificial Sequence: Synthetic peptide
  Seed: LPFDRPTIM
  misc_feature (2)..(2): Xaa can be Pro, Tyr, Ala, Ser, Phe, Met, Thr, Ile, Trp, Val, Gly, Leu, Arg, Cys, Gln, His, or Asn
  misc_feature (9)..(9): Xaa can be Met, Phe, Tyr, Leu, Ile, Val, Trp, Ala, His, Cys, Thr, Gln, or Ser
LXFDRPTIX

SEQ ID NO: 49486 - protein, 10 aa, Artificial Sequence
  Description of Artificial Sequence: Synthetic peptide
  Seed: LPFDRPTIMA
  misc_feature (2)..(2): Xaa can be Pro
  misc_feature (10)..(10): Xaa can be Ala, Cys, Ile, Leu, Met, Phe, Pro, Ser, Thr, Tyr, or Val
LXFDRPTIMX

SEQ ID NO: 49487 - protein, 11 aa, Artificial Sequence
  Description of Artificial Sequence: Synthetic peptide
  Seed: LPFDRPTIMAA
  misc_feature (2)..(2): Xaa can be Pro
  misc_feature (11)..(11): Xaa can be Ala, Cys, Ile, Leu, Met, Phe, Pro, Ser, Thr, or Val
LXFDRPTIMAX

SEQ ID NO: 49488 - protein, 8 aa, Artificial Sequence
  Description of Artificial Sequence: Synthetic peptide
  Seed: LPFDRSTI
  misc_feature (2)..(2): Xaa can be Pro
  misc_feature (8)..(8): Xaa can be Ile, Leu, Met, Phe, or Val
LXFDRSTX

SEQ ID NO: 49489 - protein, 9 aa, Artificial Sequence
  Description of Artificial Sequence: Synthetic peptide
  Seed: LPFDRSTIM
  misc_feature (2)..(2): Xaa can be Gln, Met, Pro, Tyr, Ala, Ser, Leu, Lys, Phe, His, Thr, Val, Arg, Glu, Gly, Ile, Trp, Asn, Cys, or Asp
  misc_feature (9)..(9): Xaa can be Phe, Tyr, Leu, Met, Ile, Trp, Val, His, Ala, Cys, Thr, Gln, Ser, Gly, Asn, Glu, or Pro
LXFDRSTIX

SEQ ID NO: 49490 - protein, 10 aa, Artificial Sequence
  Description of Artificial Sequence: Synthetic peptide
  Seed: LPFDRSTIMA
  misc_feature (2)..(2): Xaa can be Pro
  misc_feature (10)..(10): Xaa can be Ala, Cys, Ile, Leu, Met, Phe, Pro, Ser, Thr, Trp, Tyr, or Val
LXFDRSTIMX

SEQ ID NO: 49491 - protein, 11 aa, Artificial Sequence
  Description of Artificial Sequence: Synthetic peptide
  Seed: LPFDRSTIMAA
  misc_feature (2)..(2): Xaa can be Pro, Ala, Ile, Met, Ser, Thr, or Val
  misc_feature (11)..(11): Xaa can be Tyr, Met, Phe, Ala, Cys, His, Ile, Leu, Pro, Ser, Thr, Trp, or Val
LXFDRSTIMAX

SEQ ID NO: 49492 - protein, 8 aa, Artificial Sequence
  Description of Artificial Sequence: Synthetic peptide
  Seed: LPFDRTTI
  misc_feature (2)..(2): Xaa can be Pro
  misc_feature (8)..(8): Xaa can be Ile, Leu, Met, Phe, or Val
LXFDRTTX

SEQ ID NO: 49493 - protein, 9 aa, Artificial Sequence
  Description of Artificial Sequence: Synthetic peptide
  Seed: LPFDRTTIM
  misc_feature (2)..(2): Xaa can be Gln, Met, Pro, Tyr, Ala, Phe, Ser, Leu, Lys, Thr, His, Val, Arg, Glu, Gly, Ile, Trp, Asn, Cys, or Asp
  misc_feature (9)..(9): Xaa can be Phe, Tyr, Leu, Met, Ile, Trp, Val, His, Ala, Cys, Thr, Ser, Gly, Gln, Asn, Glu, or Pro
LXFDRTTIX

SEQ ID NO: 49494 - protein, 10 aa, Artificial Sequence
  Description of Artificial Sequence: Synthetic peptide
  Seed: LPFDRTTIMA
  misc_feature (2)..(2): Xaa can be Pro, Ala, Ile, Met, Ser, or Val
  misc_feature (10)..(10): Xaa can be Tyr, Met, Phe, Ala, Cys, Gly, His, Ile, Leu, Pro, Ser, Thr, Trp, or Val
LXFDRTTIMX

SEQ ID NO: 49495 - protein, 11 aa, Artificial Sequence
  Description of Artificial Sequence: Synthetic peptide
  Seed: LPFDRTTIMAA
  misc_feature (2)..(2): Xaa can be Pro
  misc_feature (11)..(11): Xaa can be Ala, Cys, Ile, Leu, Met, Phe, Pro, Ser, Thr, or Val
LXFDRTTIMAX

SEQ ID NO: 49496 - protein, 9 aa, Artificial Sequence
  Description of Artificial Sequence: Synthetic peptide
  Seed: LPFDRTTVM
  misc_feature (2)..(2): Xaa can be Gln, Pro, Tyr, Met, Ala, Lys, Phe, Ser, Thr, Leu, His, Ile, Trp, Val, Arg, Glu, Asn, Gly, Cys, or Asp
  misc_feature (9)..(9): Xaa can be Phe, Tyr, Ile, Leu, Met, Val, Trp, His, Ala, Cys, Thr, Ser, Gly, Gln, Lys, Asn, Glu, Pro, or Arg
LXFDRTTVX

SEQ ID NO: 49497 - protein, 10 aa, Artificial Sequence
  Description of Artificial Sequence: Synthetic peptide
  Seed: LPFDRTTVMA
  misc_feature (2)..(2): Xaa can be Pro, Ala, Met, Val, Ile, Leu, Ser, or Thr
  misc_feature (10)..(10): Xaa can be Tyr, Phe, Met, Ala, Arg, Asn, Asp, Cys, Gln, Glu, Gly, His, Ile, Leu, Lys, Pro, Ser, Thr, Trp, or Val
LXFDRTTVMX

SEQ ID NO: 49498 - protein, 11 aa, Artificial Sequence
  Description of Artificial Sequence: Synthetic peptide
  Seed: LPFDRTTVMAA
  misc_feature (2)..(2): Xaa can be Pro
  misc_feature (11)..(11): Xaa can be Ala, Cys, Ile, Leu, Met, Phe, Pro, Ser, Thr, or Val
LXFDRTTVMAX

SEQ ID NO: 49499 - protein, 8 aa, Artificial Sequence
  Description of Artificial Sequence: Synthetic peptide
  Seed: LPFEKATI
  misc_feature (2)..(2): Xaa can be Pro
  misc_feature (8)..(8): Xaa can be Ile, Leu, Met, or Val
LXFEKATX

SEQ ID NO: 49500 - protein, 9 aa, Artificial Sequence
  Description of Artificial Sequence: Synthetic peptide
  Seed: LPFEKATIM
  misc_feature (2)..(2): Xaa can be Pro, Ala, Met, Ile, Ser, Thr, Val, Gln, Leu, Phe, Cys, or Gly
  misc_feature (9)..(9): Xaa can be Tyr, Phe, Met, Trp, Leu, Ile, Val, Ala, Cys, Gln, Gly, His, Ser, or Thr
LXFEKATIX

SEQ ID NO: 49501 - protein, 10 aa, Artificial Sequence
  Description of Artificial Sequence: Synthetic peptide
  Seed: LPFEKATIMA
  misc_feature (2)..(2): Xaa can be Pro
  misc_feature (10)..(10): Xaa can be Ala, Cys, Ile, Leu, Met, Phe, Ser, Thr, or Val
LXFEKATIMX

SEQ ID NO: 49502 - protein, 11 aa, Artificial Sequence
  Description of Artificial Sequence: Synthetic peptide
  Seed: LPFEKATIMAA
  misc_feature (2)..(2): Xaa can be Pro
  misc_feature (11)..(11): Xaa can be Ala, Cys, Ile, Leu, Met, Phe, Pro, Ser, Thr, or Val
LXFEKATIMAX

SEQ ID NO: 49503 - protein, 8 aa, Artificial Sequence
  Description of Artificial Sequence: Synthetic peptide
  Seed: LPFEKSTV
  misc_feature (2)..(2): Xaa can be Pro
  misc_feature (8)..(8): Xaa can be Ile, Leu, Met, Phe, or Val
LXFEKSTX

SEQ ID NO: 49504 - protein, 9 aa, Artificial Sequence
  Description of Artificial Sequence: Synthetic peptide
  Seed: LPFEKSTVM
  misc_feature (2)..(2): Xaa can be Gln, Met, Pro, Tyr, Lys, Ala, Phe, His, Leu, Ser, Arg, Thr, Glu, Ile, Val, Gly, Trp, Asn, Cys, or Asp
  misc_feature (9)..(9): Xaa can be Phe, Tyr, Leu, Met, Ile, Trp, Val, His, Ala, Cys, Thr, Gly, Ser, Gln, Asn, Glu, Pro, or Ly s
LXFEKSTVX

SEQ ID NO: 49505 - protein, 10 aa, Artificial Sequence
  Description of Artificial Sequence: Synthetic peptide
  Seed: LPFEKSTVMA
  misc_feature (2)..(2): Xaa can be Pro, Ala, Ile, Leu, Met, Ser, Thr, or Val
  misc_feature (10)..(10): Xaa can be Tyr, Met, Phe, Ala, Arg, Asn, Asp, Cys, Gln, Glu, Gly, His, Ile, Leu, Lys, Pro, Ser, Thr, Trp, or Val
LXFEKSTVMX

SEQ ID NO: 49506 - protein, 11 aa, Artificial Sequence
  Description of Artificial Sequence: Synthetic peptide
  Seed: LPFEKSTVMAA
  misc_feature (2)..(2): Xaa can be Pro, Ala, Ile, Met, Ser, Thr, or Val
  misc_feature (11)..(11): Xaa can be Tyr, Met, Phe, Ala, Cys, His, Ile, Leu, Pro, Ser, Thr, Trp, or Val
LXFEKSTVMAX

SEQ ID NO: 49507 - protein, 8 aa, Artificial Sequence
  Description of Artificial Sequence: Synthetic peptide
  Seed: LPFERATI
  misc_feature (2)..(2): Xaa can be Pro or Ala
  misc_feature (8)..(8): Xaa can be Ile, Leu, Met, Phe, or Val
LXFERATX

SEQ ID NO: 49508 - protein, 9 aa, Artificial Sequence
  Description of Artificial Sequence: Synthetic peptide
  Seed: LPFERATIM
  misc_feature (2)..(2): Xaa can be Gln, Pro, Met, Ala, Tyr, Leu, Lys, Phe, Ser, His, Arg, Glu, Thr, Trp, Val, Gly, Ile, Asn, Cys, or Asp
  misc_feature (9)..(9): Xaa can be Phe, Tyr, Leu, Met, Ile, Trp, Val, His, Ala, Cys, Thr, Gly, Ser, Asn, Gln, Pro, or Glu
LXFERATIX

SEQ ID NO: 49509 - protein, 10 aa, Artificial Sequence
  Description of Artificial Sequence: Synthetic peptide
  Seed: LPFERATIMA
  misc_feature (2)..(2): Xaa can be Pro
  misc_feature (10)..(10): Xaa can be Ala, Cys, Ile, Leu, Met, Phe, Pro, Ser, Thr, or Val
LXFERATIMX

SEQ ID NO: 49510 - protein, 11 aa, Artificial Sequence
  Description of Artificial Sequence: Synthetic peptide
  Seed: LPFERATIMAA
  misc_feature (2)..(2): Xaa can be Pro
  misc_feature (11)..(11): Xaa can be Ala, Cys, Ile, Leu, Met, Phe, Pro, Ser, Thr, or Val
LXFERATIMAX

SEQ ID NO: 49511 - protein, 9 aa, Artificial Sequence
  Description of Artificial Sequence: Synthetic peptide
  Seed: LPFERATVM
  misc_feature (2)..(2): Xaa can be Gln, Pro, Met, Tyr, Lys, Ala, Phe, Ser, His, Leu, Thr, Arg, Ile, Val, Glu, Trp, Asn, Gly, Cys, or Asp
  misc_feature (9)..(9): Xaa can be Phe, Tyr, Leu, Met, Val, Ile, Trp, His, Ala, Cys, Thr, Ser, Gly, Gln, Asn, Pro, Glu, or Ly s
LXFERATVX

SEQ ID NO: 49512 - protein, 10 aa, Artificial Sequence
  Description of Artificial Sequence: Synthetic peptide
  Seed: LPFERATVMA
  misc_feature (2)..(2): Xaa can be Pro, Ala, Ile, Met, Ser, Thr, or Val
  misc_feature (10)..(10): Xaa can be Tyr, Met, Phe, Ala, Arg, Asn, Asp, Cys, Gln, Glu, Gly, His, Ile, Leu, Lys, Pro, Ser, Thr, Trp, or Val
LXFERATVMX

SEQ ID NO: 49513 - protein, 11 aa, Artificial Sequence
  Description of Artificial Sequence: Synthetic peptide
  Seed: LPFERATVMAA
  misc_feature (2)..(2): Xaa can be Pro, Ala, Ile, Met, Ser, Thr, or Val
  misc_feature (11)..(11): Xaa can be Tyr, Met, Phe, Ala, Cys, His, Ile, Leu, Pro, Ser, Thr, Trp, or Val
LXFERATVMAX

SEQ ID NO: 49514 - protein, 8 aa, Artificial Sequence
  Description of Artificial Sequence: Synthetic peptide
  Seed: LPFERSTI
  misc_feature (2)..(2): Xaa can be Pro or Ala
  misc_feature (8)..(8): Xaa can be Ile, Leu, Met, Phe, or Val
LXFERSTX

SEQ ID NO: 49515 - protein, 9 aa, Artificial Sequence
  Description of Artificial Sequence: Synthetic peptide
  Seed: LPFERSTIM
  misc_feature (2)..(2): Xaa can be Gln, Met, Pro, Tyr, Ala, Lys, Ser, His, Leu, Phe, Arg, Glu, Ile, Thr, Val, Gly, Trp, Asn, Cys, or Asp
  misc_feature (9)..(9): Xaa can be Phe, Tyr, Leu, Met, Ile, Trp, Val, His, Ala, Cys, Thr, Gln, Gly, Ser, Asn, Glu, or Pro
LXFERSTIX

SEQ ID NO: 49516 - protein, 10 aa, Artificial Sequence
  Description of Artificial Sequence: Synthetic peptide
  Seed: LPFERSTIMA
  misc_feature (2)..(2): Xaa can be Pro, Ala, Ile, Met, Ser, Thr, or Val
  misc_feature (10)..(10): Xaa can be Tyr, Met, Phe, Ala, Cys, His, Ile, Leu, Pro, Ser, Thr, Trp, or Val
LXFERSTIMX

SEQ ID NO: 49517 - protein, 11 aa, Artificial Sequence
  Description of Artificial Sequence: Synthetic peptide
  Seed: LPFERSTIMAA
  misc_feature (2)..(2): Xaa can be Pro, Ala, Ile, Met, Ser, Thr, or Val
  misc_feature (11)..(11): Xaa can be Tyr, Met, Phe, Ala, Cys, His, Ile, Leu, Pro, Ser, Thr, Trp, or Val
LXFERSTIMAX

SEQ ID NO: 49518 - protein, 8 aa, Artificial Sequence
  Description of Artificial Sequence: Synthetic peptide
  Seed: LPFERTTI
  misc_feature (2)..(2): Xaa can be Pro or Ala
  misc_feature (8)..(8): Xaa can be Ile, Leu, Met, Phe, or Val
LXFERTTX

SEQ ID NO: 49519 - protein, 9 aa, Artificial Sequence
  Description of Artificial Sequence: Synthetic peptide
  Seed: LPFERTTIM
  misc_feature (2)..(2): Xaa can be Gln, Pro, Met, Tyr, Ala, Lys, Ser, Leu, Phe, Thr, Glu, His, Val, Arg, Gly, Ile, Trp, Asn, Cys, or Asp
  misc_feature (9)..(9): Xaa can be Phe, Tyr, Leu, Met, Ile, Trp, Val, His, Ala, Cys, Thr, Gln, Gly, Ser, Asn, Pro, or Glu
LXFERTTIX

SEQ ID NO: 49520 - protein, 10 aa, Artificial Sequence
  Description of Artificial Sequence: Synthetic peptide
  Seed: LPFERTTIMA
  misc_feature (2)..(2): Xaa can be Pro, Ala, Ile, Met, Ser, or Val
  misc_feature (10)..(10): Xaa can be Tyr, Met, Phe, Ala, Cys, His, Ile, Leu, Pro, Ser, Thr, Trp, or Val
LXFERTTIMX

SEQ ID NO: 49521 - protein, 11 aa, Artificial Sequence
  Description of Artificial Sequence: Synthetic peptide
  Seed: LPFERTTIMAA
  misc_feature (2)..(2): Xaa can be Pro, Ala, Ile, Met, Ser, Thr, or Val
  misc_feature (11)..(11): Xaa can be Tyr, Met, Phe, Ala, Cys, His, Ile, Leu, Pro, Ser, Thr, Trp, or Val
LXFERTTIMAX

SEQ ID NO: 49522 - protein, 8 aa, Artificial Sequence
  Description of Artificial Sequence: Synthetic peptide
  Seed: LPFERVTI
  misc_feature (2)..(2): Xaa can be Pro or Ala
  misc_feature (8)..(8): Xaa can be Ile, Leu, Met, Phe, or Val
LXFERVTX

SEQ ID NO: 49523 - protein, 9 aa, Artificial Sequence
  Description of Artificial Sequence: Synthetic peptide
  Seed: LPFERVTIM
  misc_feature (2)..(2): Xaa can be Gln, Pro, Met, Ala, Tyr, Leu, Lys, Phe, Ser, His, Arg, Glu, Ile, Thr, Trp, Val, Gly, Asn, Cys, or Asp
  misc_feature (9)..(9): Xaa can be Tyr, Leu, Met, Phe, Ile, Trp, Val, His, Ala, Thr, Cys, Gly, Ser, Gln, Asn, Pro, or Glu
LXFERVTIX

SEQ ID NO: 49524 - protein, 10 aa, Artificial Sequence
  Description of Artificial Sequence: Synthetic peptide
  Seed: LPFERVTIMA
  misc_feature (2)..(2): Xaa can be Pro
  misc_feature (10)..(10): Xaa can be Ala, Cys, Ile, Leu, Met, Phe, Pro, Ser, Thr, Tyr, or Val
LXFERVTIMX

SEQ ID NO: 49525 - protein, 11 aa, Artificial Sequence
  Description of Artificial Sequence: Synthetic peptide
  Seed: LPFERVTIMAA
  misc_feature (2)..(2): Xaa can be Pro
  misc_feature (11)..(11): Xaa can be Ala, Cys, Ile, Leu, Met, Phe, Pro, Ser, Thr, or Val
LXFERVTIMAX

SEQ ID NO: 49526 - protein, 11 aa, Artificial Sequence
  Description of Artificial Sequence: Synthetic peptide
  Seed: LPRGKLSTRGV
  misc_feature (2)..(2): Xaa can be Pro
  misc_feature (11)..(11): Xaa can be Ala, Ile, Leu, Met, Phe, or Val
LXRGKLSTRGX

SEQ ID NO: 49527 - protein, 11 aa, Artificial Sequence
  Description of Artificial Sequence: Synthetic peptide
  Seed: LPRGQLSTRGV
  misc_feature (2)..(2): Xaa can be Pro
  misc_feature (11)..(11): Xaa can be Ala, Ile, Leu, Met, Phe, or Val
LXRGQLSTRGX

SEQ ID NO: 49528 - protein, 8 aa, Artificial Sequence
  Description of Artificial Sequence: Synthetic peptide
  Seed: LPRRSGAA
  misc_feature (2)..(2): Xaa can be Pro, Ile, Val, Ala, Leu, Met, or Thr
  misc_feature (8)..(8): Xaa can be Leu, Met, Ala, Cys, Ile, Phe, Pro, Ser, Thr, Trp, Tyr, or Val
LXRRSGAX

SEQ ID NO: 49529 - protein, 9 aa, Artificial Sequence
  Description of Artificial Sequence: Synthetic peptide
  Seed: LPRRSGAAG
  misc_feature (2)..(2): Xaa can be Pro, Ala, Ile, Val, Leu, Met, Ser, Thr, Gly, Gln, Phe, Asn, Cys, Tyr, Arg, Glu, Lys, or Tr p
  misc_feature (9)..(9): Xaa can be Leu, Met, Ile, Phe, Val, Ala, Cys, Thr, Arg, Asn, Asp, Gln, Glu, Gly, His, Lys, Pro, Ser, Trp, or Tyr
LXRRSGAAX

SEQ ID NO: 49530 - protein, 10 aa, Artificial Sequence
  Description of Artificial Sequence: Synthetic peptide
  Seed: LPRRSGAAGA
  misc_feature (2)..(2): Xaa can be Pro, Val, Ala, Ile, Leu, Met, Ser, or Thr
  misc_feature (10)..(10): Xaa can be Leu, Met, Phe, Ile, Ala, Cys, Gln, Glu, Gly, His, Pro, Ser, Thr, Trp, Tyr, or Val
LXRRSGAAGX

SEQ ID NO: 49531 - protein, 11 aa, Artificial Sequence
  Description of Artificial Sequence: Synthetic peptide
  Seed: LPRRSGAAGAA
  misc_feature (2)..(2): Xaa can be Pro, Ala, Ile, or Val
  misc_feature (11)..(11): Xaa can be Leu, Met, Ala, Cys, Gly, Ile, Phe, Pro, Ser, Thr, Trp, Tyr, or Val
LXRRSGAAGAX

SEQ ID NO: 49532 - protein, 8 aa, Artificial Sequence
  Description of Artificial Sequence: Synthetic peptide
  Seed: LPTCVYGL
  misc_feature (2)..(2): Xaa can be Pro
  misc_feature (8)..(8): Xaa can be Leu or Met
LXTCVYGX

SEQ ID NO: 49533 - protein, 9 aa, Artificial Sequence
  Description of Artificial Sequence: Synthetic peptide
  Seed: LPTCVYGLA
  misc_feature (2)..(2): Xaa can be Pro
  misc_feature (9)..(9): Xaa can be Ala, Cys, Ile, Leu, Met, Phe, Pro, Ser, Thr, Tyr, or Val
LXTCVYGLX

SEQ ID NO: 49534 - protein, 10 aa, Artificial Sequence
  Description of Artificial Sequence: Synthetic peptide
  Seed: LPTCVYGLAV
  misc_feature (2)..(2): Xaa can be Pro
  misc_feature (10)..(10): Xaa can be Ala, Cys, Ile, Leu, Met, Phe, Pro, Ser, Thr, Tyr, or Val
LXTCVYGLAX

SEQ ID NO: 49535 - protein, 11 aa, Artificial Sequence
  Description of Artificial Sequence: Synthetic peptide
  Seed: LPTCVYGLAVA
  misc_feature (2)..(2): Xaa can be Pro
  misc_feature (11)..(11): Xaa can be Ala or Val
LXTCVYGLAVX

SEQ ID NO: 49536 - protein, 8 aa, Artificial Sequence
  Description of Artificial Sequence: Synthetic peptide
  Seed: LQGTKRSY
  misc_feature (2)..(2): Xaa can be Gln
  misc_feature (8)..(8): Xaa can be Phe or Tyr
LXGTKRSX

SEQ ID NO: 49537 - protein, 9 aa, Artificial Sequence
  Description of Artificial Sequence: Synthetic peptide
  Seed: LQLSDYEGR
  misc_feature (2)..(2): Xaa can be Gln, Ile, Leu, Met, Phe, Ser, Thr, Trp, Tyr, or Val
  misc_feature (9)..(9): Xaa can be Arg
LXLSDYEGX

SEQ ID NO: 49538 - protein, 9 aa, Artificial Sequence
  Description of Artificial Sequence: Synthetic peptide
  Seed: LQNSHVYSL
  misc_feature (2)..(2): Xaa can be Leu, Met, Gln, Glu, Ala, His, Arg, Ile, Lys, Pro, Ser, Thr, Val, Phe, Tyr, Gly, Trp, Asp, Cys, or Asn
  misc_feature (9)..(9): Xaa can be Leu, Met, Phe, Tyr, Val, Ile, Trp, Ala, Cys, Thr, His, Gly, Ser, or Pro
LXNSHVYSX

SEQ ID NO: 49539 - protein, 10 aa, Artificial Sequence
  Description of Artificial Sequence: Synthetic peptide
  Seed: LQNSHVYSLI
  misc_feature (2)..(2): Xaa can be Leu, Met, Gln, Ile, Val, Ala, Thr, Ser, Glu, Lys, Arg, His, Gly, Asn, or Phe
  misc_feature (10)..(10): Xaa can be Phe, Tyr, Met, Leu, Trp, Val, Ile, Ala, His, Arg, Asn, Asp, Cys, Gln, Glu, Gly, Lys, Pro, Ser, or Thr
LXNSHVYSLX

SEQ ID NO: 49540 - protein, 11 aa, Artificial Sequence
  Description of Artificial Sequence: Synthetic peptide
  Seed: LQNSHVYSLIR
  misc_feature (2)..(2): Xaa can be Met, Phe, Trp, Tyr, Ala, Arg, Gln, Gly, Ile, Leu, Ser, Thr, or Val
  misc_feature (11)..(11): Xaa can be Arg or Lys
LXNSHVYSLIX

SEQ ID NO: 49541 - protein, 9 aa, Artificial Sequence
  Description of Artificial Sequence: Synthetic peptide
  Seed: LQNSQIFSL
  misc_feature (2)..(2): Xaa can be Met, Leu, Gln, Ile, Arg, His, Thr, Val, Ala, Lys, Ser, Glu, Asn, Phe, Tyr, Cys, Gly, or Pr o
  misc_feature (9)..(9): Xaa can be Phe, Tyr, Met, Val, Leu, Ile, Trp, Ala, Cys, Thr, His, Gly, or Ser
LXNSQIFSX

SEQ ID NO: 49542 - protein, 10 aa, Artificial Sequence
  Description of Artificial Sequence: Synthetic peptide
  Seed: LQNSQIFSLI
  misc_feature (2)..(2): Xaa can be Leu, Met, Gln, Ile, Thr, Val, Ala, Glu, Ser, Lys, Arg, His, Tyr, Gly, or Phe
  misc_feature (10)..(10): Xaa can be Phe, Tyr, Leu, Trp, Val, Met, Ile, Ala, His, Arg, Asn, Asp, Cys, Gln, Glu, Gly, Lys, Pro, Ser, or Thr
LXNSQIFSLX

SEQ ID NO: 49543 - protein, 11 aa, Artificial Sequence
  Description of Artificial Sequence: Synthetic peptide
  Seed: LQNSQIFSLIR
  misc_feature (2)..(2): Xaa can be Met, Phe, Trp, Tyr, Ala, Arg, Asn, Gln, Gly, His, Ile, Leu, Ser, Thr, or Val
  misc_feature (11)..(11): Xaa can be Arg or Lys
LXNSQIFSLIX

SEQ ID NO: 49544 - protein, 9 aa, Artificial Sequence
  Description of Artificial Sequence: Synthetic peptide
  Seed: LQNSQVFSI
  misc_feature (2)..(2): Xaa can be Met, Leu, Gln, Arg, His, Ile, Thr, Val, Ala, Lys, Ser, Glu, Phe, Asn, Tyr, Gly, Pro, Cys, or Trp
  misc_feature (9)..(9): Xaa can be Phe, Tyr, Met, Leu, Val, Ile, Trp, Ala, Thr, Cys, Gly, His, or Ser
LXNSQVFSX

SEQ ID NO: 49545 - protein, 10 aa, Artificial Sequence
  Description of Artificial Sequence: Synthetic peptide
  Seed: LQNSQVFSII
  misc_feature (2)..(2): Xaa can be Leu, Met, Gln, Ile, Val, Thr, Ala, Lys, Ser, Arg, Glu, His, Asn, Gly, Phe, Pro, Trp, Tyr, or Cys
  misc_feature (10)..(10): Xaa can be Tyr, Phe, Met, Trp, Leu, Val, Ala, Ile, His, Arg, Asn, Asp, Cys, Gln, Glu, Gly, Lys, Pro, Ser, or Thr
LXNSQVFSIX

SEQ ID NO: 49546 - protein, 11 aa, Artificial Sequence
  Description of Artificial Sequence: Synthetic peptide
  Seed: LQNSQVFSIIR
  misc_feature (2)..(2): Xaa can be Met, Phe, Trp, Tyr, Ala, Arg, Gln, Gly, Ile, Leu, Ser, Thr, or Val
  misc_feature (11)..(11): Xaa can be Arg or Lys
LXNSQVFSIIX

SEQ ID NO: 49547 - protein, 10 aa, Artificial Sequence
  Description of Artificial Sequence: Synthetic peptide
  Seed: LQNSQVFSLI
  misc_feature (2)..(2): Xaa can be Leu, Met, Gln, Ala, Ile, Glu, Thr, Val, Arg, Gly, Ser, or Asn
  misc_feature (10)..(10): Xaa can be Leu, Phe, Val, Tyr, Met, Ala, Ile, Trp, His, Arg, Asn, Asp, Cys, Gln, Glu, Gly, Lys, Pro, Ser, or Thr
LXNSQVFSLX

SEQ ID NO: 49548 - protein, 11 aa, Artificial Sequence
  Description of Artificial Sequence: Synthetic peptide
  Seed: LQNSQVFSLIR
  misc_feature (2)..(2): Xaa can be Met, Phe, Trp, Tyr, Ala, Arg, Asn, Gln, Gly, His, Ile, Leu, Ser, Thr, or Val
  misc_feature (11)..(11): Xaa can be Arg or Lys
LXNSQVFSLIX

SEQ ID NO: 49549 - protein, 11 aa, Artificial Sequence
  Description of Artificial Sequence: Synthetic peptide
  Seed: LQNSQVFSLVR
  misc_feature (2)..(2): Xaa can be Met, Phe, Trp, Tyr, Ala, Arg, Asn, Gln, Gly, His, Ile, Leu, Lys, Ser, Thr, or Val
  misc_feature (11)..(11): Xaa can be Arg or Lys
LXNSQVFSLVX

SEQ ID NO: 49550 - protein, 9 aa, Artificial Sequence
  Description of Artificial Sequence: Synthetic peptide
  Seed: LQNSQVLSL
  misc_feature (2)..(2): Xaa can be Gln, Met, Leu, Ala, His, Lys, Arg, Ile, Ser, Val, Thr, Glu, Gly, Asn, Cys, Phe, Pro, Tyr, or Trp
  misc_feature (9)..(9): Xaa can be Phe, Tyr, Met, Leu, Ile, Val, Ala, Trp, His, Cys, Ser, Thr, or Gly
LXNSQVLSX

SEQ ID NO: 49551 - protein, 10 aa, Artificial Sequence
  Description of Artificial Sequence: Synthetic peptide
  Seed: LQNSQVLSLI
  misc_feature (2)..(2): Xaa can be Leu, Met, Gln, Ile, Val, Thr, Ala, Ser, Lys, Arg, Glu, His, or Gly
  misc_feature (10)..(10): Xaa can be Tyr, Phe, Leu, Met, Trp, Val, Ile, Ala, His, Arg, Asn, Asp, Cys, Gln, Glu, Gly, Lys, Pro, Ser, or Thr
LXNSQVLSLX

SEQ ID NO: 49552 - protein, 11 aa, Artificial Sequence
  Description of Artificial Sequence: Synthetic peptide
  Seed: LQNSQVLSLIR
  misc_feature (2)..(2): Xaa can be Gln, Ile, Leu, Met, Phe, Ser, Thr, Trp, Tyr, or Val
  misc_feature (11)..(11): Xaa can be Arg
LXNSQVLSLIX

SEQ ID NO: 49553 - protein, 9 aa, Artificial Sequence
  Description of Artificial Sequence: Synthetic peptide
  Seed: LQNSQVYSL
  misc_feature (2)..(2): Xaa can be Met, Leu, Gln, Arg, Ile, Val, Ala, His, Lys, Ser, Thr, Glu, Asn, Phe, Gly, Pro, or Tyr
  misc_feature (9)..(9): Xaa can be Phe, Tyr, Leu, Met, Ile, Val, Trp, Ala, Cys, His, Ser, Thr, or Gly
LXNSQVYSX

SEQ ID NO: 49554 - protein, 10 aa, Artificial Sequence
  Description of Artificial Sequence: Synthetic peptide
  Seed: LQNSQVYSLI
  misc_feature (2)..(2): Xaa can be Leu, Met, Gln, Val, Ile, Ala, Lys, Ser, Thr, Glu, His, or Arg
  misc_feature (10)..(10): Xaa can be Phe, Tyr, Trp, Val, Leu, Met, Ala, Ile, His, Arg, Asn, Asp, Cys, Gln, Glu, Gly, Lys, Pro, Ser, or Thr
LXNSQVYSLX

SEQ ID NO: 49555 - protein, 11 aa, Artificial Sequence
  Description of Artificial Sequence: Synthetic peptide
  Seed: LQNSQVYSLIR
  misc_feature (2)..(2): Xaa can be Met, Phe, Tyr, Ala, Gln, Ile, Leu, Ser, Thr, Trp, or Val
  misc_feature (11)..(11): Xaa can be Arg or Lys
LXNSQVYSLIX

SEQ ID NO: 49556 - protein, 9 aa, Artificial Sequence
  Description of Artificial Sequence: Synthetic peptide
  Seed: LQTSQVYSL
  misc_feature (2)..(2): Xaa can be Met, Leu, Gln, Arg, His, Ile, Val, Lys, Thr, Ala, Glu, Ser, Asn, Gly, Phe, Pro, or Tyr
  misc_feature (9)..(9): Xaa can be Phe, Tyr, Met, Val, Ile, Leu, Ala, Trp, Cys, Ser, Thr, or His
LXTSQVYSX

SEQ ID NO: 49557 - protein, 10 aa, Artificial Sequence
  Description of Artificial Sequence: Synthetic peptide
  Seed: LQTSQVYSLI
  misc_feature (2)..(2): Xaa can be Leu, Met, Ala, Arg, Asn, Asp, Cys, Gln, Glu, Gly, His, Ile, Lys, Phe, Pro, Ser, Thr, Trp, Tyr, or Val
  misc_feature (10)..(10): Xaa can be Ala, Ile, Leu, Met, Phe, Trp, Tyr, Val, Arg, Asn, Asp, Cys, Gln, Glu, Gly, His, Lys, Pro, Ser, or Thr
LXTSQVYSLX

SEQ ID NO: 49558 - protein, 11 aa, Artificial Sequence
  Description of Artificial Sequence: Synthetic peptide
  Seed: LQTSQVYSLIR
  misc_feature (2)..(2): Xaa can be Ala, Arg, Gln, His, Ile, Leu, Lys, Met, Phe, Ser, Thr, Trp, Tyr, or Val
  misc_feature (11)..(11): Xaa can be Arg
LXTSQVYSLIX

SEQ ID NO: 49559 - protein, 10 aa, Artificial Sequence
  Description of Artificial Sequence: Synthetic peptide
  Seed: LRISGFIRGK
  misc_feature (2)..(2): Xaa can be Arg, Ile, Thr, Val, Ala, Leu, Met, Ser, Asn, Asp, Cys, Gln, Glu, Gly, His, Lys, Phe, Pro, Trp, or Tyr
  misc_feature (10)..(10): Xaa can be Lys, Arg, Tyr, Ala, His, Ile, Leu, Met, Phe, Trp, or Val
LXISGFIRGX

SEQ ID NO: 49560 - protein, 11 aa, Artificial Sequence
  Description of Artificial Sequence: Synthetic peptide
  Seed: LRISGFIRGKR
  misc_feature (2)..(2): Xaa can be Arg, Met, Phe, Tyr, Ala, Gln, Ile, Leu, Ser, Thr, Trp, or Val
  misc_feature (11)..(11): Xaa can be Arg, Lys, Ile, Leu, Met, Phe, or Tyr
LXISGFIRGKX

SEQ ID NO: 49561 - protein, 10 aa, Artificial Sequence
  Description of Artificial Sequence: Synthetic peptide
  Seed: LRLFSFIRGT
  misc_feature (2)..(2): Xaa can be Arg, Met, Ala, Asn, Asp, Cys, Gln, Glu, Gly, His, Ile, Leu, Lys, Phe, Pro, Ser, Thr, Trp, Tyr, or Val
  misc_feature (10)..(10): Xaa can be Ala, Ile, Leu, Met, Ser, Thr, Val, Arg, Gly, His, Lys, Phe, Trp, Tyr, or Cys
LXLFSFIRGX

SEQ ID NO: 49562 - protein, 11 aa, Artificial Sequence
  Description of Artificial Sequence: Synthetic peptide
  Seed: LRLFSFIRGTK
  misc_feature (2)..(2): Xaa can be Arg, Ala, Gln, His, Ile, Leu, Lys, Met, Phe, Ser, Thr, Trp, Tyr, Val, Asn, Asp, Cys, Glu, Gly, or Pro
  misc_feature (11)..(11): Xaa can be Arg, Lys, Leu, Met, or Phe
LXLFSFIRGTX

SEQ ID NO: 49563 - protein, 11 aa, Artificial Sequence
  Description of Artificial Sequence: Synthetic peptide
  Seed: LRLLSFIRGTK
  misc_feature (2)..(2): Xaa can be Arg, Ala, Gly, His, Ile, Leu, Lys, Met, Ser, Thr, or Val
  misc_feature (11)..(11): Xaa can be Lys, Arg, Leu, Met, or Phe
LXLLSFIRGTX

SEQ ID NO: 49564 - protein, 10 aa, Artificial Sequence
  Description of Artificial Sequence: Synthetic peptide
  Seed: LRLSSFIRGT
  misc_feature (2)..(2): Xaa can be Ala, Arg, Asn, Asp, Cys, Gln, Glu, Gly, His, Ile, Leu, Lys, Met, Phe, Pro, Ser, Thr, Trp, Tyr, or Val
  misc_feature (10)..(10): Xaa can be Ala, Ile, Leu, Met, Thr, or Val
LXLSSFIRGX

SEQ ID NO: 49565 - protein, 11 aa, Artificial Sequence
  Description of Artificial Sequence: Synthetic peptide
  Seed: LRLSSFIRGTK
  misc_feature (2)..(2): Xaa can be Arg, Ile, Leu, Lys, Met, Ser, Thr, or Val
  misc_feature (11)..(11): Xaa can be Lys, Arg, Ile, Leu, Met, Phe, or Tyr
LXLSSFIRGTX

SEQ ID NO: 49566 - protein, 8 aa, Artificial Sequence
  Description of Artificial Sequence: Synthetic peptide
  Seed: LRSKYWAI
  misc_feature (2)..(2): Xaa can be Met, Arg, Lys, Pro, Leu, Ala, Gln, His, Ile, Phe, Tyr, Asn, Gly, Ser, Trp, or Val
  misc_feature (8)..(8): Xaa can be Leu, Met, Ile, Phe, Val, or Ala
LXSKYWAX

SEQ ID NO: 49567 - protein, 9 aa, Artificial Sequence
  Description of Artificial Sequence: Synthetic peptide
  Seed: LRSKYWAIR
  misc_feature (2)..(2): Xaa can be Arg
  misc_feature (9)..(9): Xaa can be Arg, Ile, Leu, Lys, Met, Phe, Tyr, or Val
LXSKYWAIX

SEQ ID NO: 49568 - protein, 11 aa, Artificial Sequence
  Description of Artificial Sequence: Synthetic peptide
  Seed: LRSKYWAIRTR
  misc_feature (2)..(2): Xaa can be Arg, Met, Phe, Trp, Tyr, Ala, Gln, Gly, His, Ile, Leu, Lys, Ser, Thr, or Val
  misc_feature (11)..(11): Xaa can be Arg, Lys, Leu, Met, or Phe
LXSKYWAIRTX

SEQ ID NO: 49569 - protein, 8 aa, Artificial Sequence
  Description of Artificial Sequence: Synthetic peptide
  Seed: LRSRYRAI
  misc_feature (2)..(2): Xaa can be Met, Lys, Pro, Arg, Leu, Ala, Asn, Gln, His, Ile, Phe, Tyr, Val, Gly, Ser, or Trp
  misc_feature (8)..(8): Xaa can be Leu, Met, Ile, Phe, Val, or Ala
LXSRYRAX

SEQ ID NO: 49570 - protein, 9 aa, Artificial Sequence
  Description of Artificial Sequence: Synthetic peptide
  Seed: LRSRYRAIR
  misc_feature (2)..(2): Xaa can be Arg
  misc_feature (9)..(9): Xaa can be Arg, Ile, Leu, Lys, Met, Phe, Tyr, or Val
LXSRYRAIX

SEQ ID NO: 49571 - protein, 11 aa, Artificial Sequence
  Description of Artificial Sequence: Synthetic peptide
  Seed: LRSRYRAIRTR
  misc_feature (2)..(2): Xaa can be Arg, Ala, Asn, Asp, Cys, Gln, Glu, Gly, His, Ile, Leu, Lys, Met, Phe, Pro, Ser, Thr, Trp, Tyr, or Val
  misc_feature (11)..(11): Xaa can be Arg, Leu, Lys, Met, Phe, Ile, or Tyr
LXSRYRAIRTX

SEQ ID NO: 49572 - protein, 8 aa, Artificial Sequence
  Description of Artificial Sequence: Synthetic peptide
  Seed: LRSRYWAI
  misc_feature (2)..(2): Xaa can be Arg, Lys, Met, His, Leu, Pro, Ala, Ile, Phe, Tyr, Asn, Gln, Gly, Ser, Trp, Val, or Thr
  misc_feature (8)..(8): Xaa can be Leu, Met, Ile, Val, Phe, or Ala
LXSRYWAX

SEQ ID NO: 49573 - protein, 9 aa, Artificial Sequence
  Description of Artificial Sequence: Synthetic peptide
  Seed: LRSRYWAIK
  misc_feature (2)..(2): Xaa can be Arg
  misc_feature (9)..(9): Xaa can be Arg, His, Ile, Leu, Lys, Met, Phe, Trp, Tyr, or Val
LXSRYWAIX

SEQ ID NO: 49574 - protein, 11 aa, Artificial Sequence
  Description of Artificial Sequence: Synthetic peptide
  Seed: LRSRYWAIKTR
  misc_feature (2)..(2): Xaa can be Arg, Ala, Gln, Gly, Ile, Leu, Lys, Met, Phe, Ser, Thr, Trp, Tyr, Val, Asn, Asp, Cys, Glu, His, or Pro
  misc_feature (11)..(11): Xaa can be Lys, Arg, Leu, Met, or Phe
LXSRYWAIKTX

SEQ ID NO: 49575 - protein, 11 aa, Artificial Sequence
  Description of Artificial Sequence: Synthetic peptide
  Seed: LRSRYWAIRTK
  misc_feature (2)..(2): Xaa can be Arg, Ala, Asn, Asp, Cys, Gln, Glu, Gly, His, Ile, Leu, Lys, Met, Phe, Pro, Ser, Thr, Trp, Tyr, or Val
  misc_feature (11)..(11): Xaa can be Arg, Lys, Ala, Leu, Met, Phe, Tyr, or Val
LXSRYWAIRTX

SEQ ID NO: 49576 - protein, 11 aa, Artificial Sequence
  Description of Artificial Sequence: Synthetic peptide
  Seed: LRVLNFIRGTK
  misc_feature (2)..(2): Xaa can be Ala, Arg, Lys, Met, Ser, Tyr, Asn, Asp, Cys, Gln, Glu, Gly, His, Ile, Leu, Phe, Pro, Thr, Trp, or Val
  misc_feature (11)..(11): Xaa can be Arg or Lys
LXVLNFIRGTX

SEQ ID NO: 49577 - protein, 11 aa, Artificial Sequence
  Description of Artificial Sequence: Synthetic peptide
  Seed: LRVLSFIKGTK
  misc_feature (2)..(2): Xaa can be Arg, Lys, or Met
  misc_feature (11)..(11): Xaa can be Lys
LXVLSFIKGTX

SEQ ID NO: 49578 - protein, 11 aa, Artificial Sequence
  Description of Artificial Sequence: Synthetic peptide
  Seed: LRVLSFIRGTK
  misc_feature (2)..(2): Xaa can be Arg, Thr, Val, Ala, Asn, Cys, Gln, Gly, His, Ile, Leu, Lys, Met, Phe, Ser, Trp, or Tyr
  misc_feature (11)..(11): Xaa can be Arg or Lys
LXVLSFIRGTX

SEQ ID NO: 49579 - protein, 10 aa, Artificial Sequence
  Description of Artificial Sequence: Synthetic peptide
  Seed: LRVSGFIRGK
  misc_feature (2)..(2): Xaa can be Arg, Thr, Val, Ala, Asn, Asp, Cys, Gln, Glu, Gly, His, Ile, Leu, Lys, Met, Phe, Pro, Ser, Trp, or Tyr
  misc_feature (10)..(10): Xaa can be Arg, Lys, Tyr, Ile, Leu, Met, Phe, or Val
LXVSGFIRGX

SEQ ID NO: 49580 - protein, 11 aa, Artificial Sequence
  Description of Artificial Sequence: Synthetic peptide
  Seed: LRVSGFIRGKK
  misc_feature (2)..(2): Xaa can be Arg, Ile, Leu, Lys, Met, Phe, Ser, Thr, Trp, Tyr, or Val
  misc_feature (11)..(11): Xaa can be Arg, Lys, or Phe
LXVSGFIRGKX

SEQ ID NO: 49581 - protein, 11 aa, Artificial Sequence
  Description of Artificial Sequence: Synthetic peptide
  Seed: LRVSNFIRGTK
  misc_feature (2)..(2): Xaa can be Arg, Phe, Tyr, Gln, Glu, Gly, His, Ile, Leu, Lys, Met, Pro, Ser, Thr, Trp, or Val
  misc_feature (11)..(11): Xaa can be Arg or Lys
LXVSNFIRGTX

SEQ ID NO: 49582 - protein, 11 aa, Artificial Sequence
  Description of Artificial Sequence: Synthetic peptide
  Seed: LRVSSFIRGAK
  misc_feature (2)..(2): Xaa can be Arg, Met, Phe, Thr, Trp, Tyr, Val, Asn, Asp, Cys, Gln, Glu, Gly, His, Ile, Leu, Lys, Pro, or Ser
  misc_feature (11)..(11): Xaa can be Arg, Lys, Leu, or Phe
LXVSSFIRGAX

SEQ ID NO: 49583 - protein, 10 aa, Artificial Sequence
  Description of Artificial Sequence: Synthetic peptide
  Seed: LRVSSFIRGK
  misc_feature (2)..(2): Xaa can be Arg, Thr, Val, Ala, Asn, Asp, Cys, Gln, Glu, Gly, His, Ile, Leu, Lys, Met, Phe, Pro, Ser, Trp, or Tyr
  misc_feature (10)..(10): Xaa can be Arg, Lys, Tyr, Ile, Leu, Met, Phe, Trp, or Val
LXVSSFIRGX

SEQ ID NO: 49584 - protein, 11 aa, Artificial Sequence
  Description of Artificial Sequence: Synthetic peptide
  Seed: LRVSSFIRGKK
  misc_feature (2)..(2): Xaa can be Arg, Tyr, Phe, Ser, Thr, Trp, or Val
  misc_feature (11)..(11): Xaa can be Arg, Lys, Leu, or Phe
LXVSSFIRGKX

SEQ ID NO: 49585 - protein, 11 aa, Artificial Sequence
  Description of Artificial Sequence: Synthetic peptide
  Seed: LRVSSFIRGTK
  misc_feature (2)..(2): Xaa can be Arg, Ile, Leu, Met, or Val
  misc_feature (11)..(11): Xaa can be Lys, Arg, Leu, or Phe
LXVSSFIRGTX

SEQ ID NO: 49586 - protein, 10 aa, Artificial Sequence
  Description of Artificial Sequence: Synthetic peptide
  Seed: LSAFDERRNR
  misc_feature (2)..(2): Xaa can be Met, Phe, Thr, Val, Ala, Gln, Ile, Leu, Ser, Trp, or Tyr
  misc_feature (10)..(10): Xaa can be Arg or Lys
LXAFDERRNX

SEQ ID NO: 49587 - protein, 10 aa, Artificial Sequence
  Description of Artificial Sequence: Synthetic peptide
  Seed: LSDEKAASPI
  misc_feature (2)..(2): Xaa can be Ala, Ser, Thr, Met, Val, or Leu
  misc_feature (10)..(10): Xaa can be Leu, Phe, Met, or Ile
LXDEKAASPX

SEQ ID NO: 49588 - protein, 10 aa, Artificial Sequence
  Description of Artificial Sequence: Synthetic peptide
  Seed: LSDEKATNPI
  misc_feature (2)..(2): Xaa can be Ala, Ser, Thr, Val, Leu, Met, or Ile
  misc_feature (10)..(10): Xaa can be Leu, Phe, Met, Ile, or Val
LXDEKATNPX

SEQ ID NO: 49589 - protein, 10 aa, Artificial Sequence
  Description of Artificial Sequence: Synthetic peptide
  Seed: LSDEKATSPI
  misc_feature (2)..(2): Xaa can be Ala, Ser, Thr, Ile, Leu, Met, Val, Gln, or Gly
  misc_feature (10)..(10): Xaa can be Leu, Met, Phe, Ile, or Val
LXDEKATSPX

SEQ ID NO: 49590 - protein, 10 aa, Artificial Sequence
  Description of Artificial Sequence: Synthetic peptide
  Seed: LSDENATNPI
  misc_feature (2)..(2): Xaa can be Ala, Ser, Thr, Ile, Leu, Met, Val, Gln, or Gly
  misc_feature (10)..(10): Xaa can be Leu, Met, Phe, Ile, or Val
LXDENATNPX

SEQ ID NO: 49591 - protein, 10 aa, Artificial Sequence
  Description of Artificial Sequence: Synthetic peptide
  Seed: LSDERATNPI
  misc_feature (2)..(2): Xaa can be Ala, Ser, Thr, Val, Leu, Met, or Ile
  misc_feature (10)..(10): Xaa can be Leu, Phe, Met, or Ile
LXDERATNPX

SEQ ID NO: 49592 - protein, 8 aa, Artificial Sequence
  Description of Artificial Sequence: Synthetic peptide
  Seed: LSDHEGRL
  misc_feature (2)..(2): Xaa can be Ala, Ser, or Thr
  misc_feature (8)..(8): Xaa can be Leu
LXDHEGRX

SEQ ID NO: 49593 - protein, 9 aa, Artificial Sequence
  Description of Artificial Sequence: Synthetic peptide
  Seed: LSDHEGRLI
  misc_feature (2)..(2): Xaa can be Ala, Ile, Leu, Met, Ser, Thr, Val, Gln, or Gly
  misc_feature (9)..(9): Xaa can be Leu, Met, Phe, Ile, or Val
LXDHEGRLX

SEQ ID NO: 49594 - protein, 8 aa, Artificial Sequence
  Description of Artificial Sequence: Synthetic peptide
  Seed: LSDNEGRL
  misc_feature (2)..(2): Xaa can be Ala, Ser, or Thr
  misc_feature (8)..(8): Xaa can be Leu
LXDNEGRX

SEQ ID NO: 49595 - protein, 9 aa, Artificial Sequence
  Description of Artificial Sequence: Synthetic peptide
  Seed: LSDNEGRLI
  misc_feature (2)..(2): Xaa can be Ala, Ile, Leu, Met, Ser, Thr, Val, Gln, Gly, or Cys
  misc_feature (9)..(9): Xaa can be Leu, Met, Phe, Ile, or Val
LXDNEGRLX

SEQ ID NO: 49596 - protein, 9 aa, Artificial Sequence
  Description of Artificial Sequence: Synthetic peptide
  Seed: LSDQEGRLI
  misc_feature (2)..(2): Xaa can be Ala, Ile, Leu, Met, Ser, Thr, Val, Gln, Gly, or Cys
  misc_feature (9)..(9): Xaa can be Leu, Met, Phe, Ile, or Val
LXDQEGRLX

SEQ ID NO: 49597 - protein, 8 aa, Artificial Sequence
  Description of Artificial Sequence: Synthetic peptide
  Seed: LSDYEGRL
  misc_feature (2)..(2): Xaa can be Ala or Ser
  misc_feature (8)..(8): Xaa can be Leu
LXDYEGRX

SEQ ID NO: 49598 - protein, 9 aa, Artificial Sequence
  Description of Artificial Sequence: Synthetic peptide
  Seed: LSDYEGRLI
  misc_feature (2)..(2): Xaa can be Ala, Ile, Leu, Met, Ser, Thr, Val, Gln, Gly, or Cys
  misc_feature (9)..(9): Xaa can be Leu, Met, Phe, Ile, or Val
LXDYEGRLX

SEQ ID NO: 49599 - protein, 9 aa, Artificial Sequence
  Description of Artificial Sequence: Synthetic peptide
  Seed: LSFIKGTKV
  misc_feature (2)..(2): Xaa can be Ala, Ser, Thr, Val, Gly, Ile, Leu, Met, Asn, Cys, or Gln
  misc_feature (9)..(9): Xaa can be Trp, Phe, Tyr, Met, Ile, Leu, or Val
LXFIKGTKX

SEQ ID NO: 49600 - protein, 10 aa, Artificial Sequence
  Description of Artificial Sequence: Synthetic peptide
  Seed: LSFIKGTKVL
  misc_feature (2)..(2): Xaa can be Ser, Thr, Tyr, Ala, Gly, Ile, Met, Val, Arg, Asn, Cys, His, Leu, Lys, Phe, Pro, Trp, Gln, Asp, or Glu
  misc_feature (10)..(10): Xaa can be Met, Phe, Tyr, Leu, Trp, Ile, or Val
LXFIKGTKVX

SEQ ID NO: 49601 - protein, 9 aa, Artificial Sequence
  Description of Artificial Sequence: Synthetic peptide
  Seed: LSFIRGTKV
  misc_feature (2)..(2): Xaa can be Ala, Ser, Thr, Val, Gly, Met, Ile, Leu, Cys, Gln, Asn, Phe, or Tyr
  misc_feature (9)..(9): Xaa can be Lys, Trp, Phe, Tyr, Met, Leu, Ile, Val, or Ala
LXFIRGTKX

SEQ ID NO: 49602 - protein, 10 aa, Artificial Sequence
  Description of Artificial Sequence: Synthetic peptide
  Seed: LSFIRGTKVF
  misc_feature (2)..(2): Xaa can be Gln, Met, Tyr, Lys, Ser, Thr, Ala, Leu, Trp, Arg, Cys, Gly, His, Ile, Phe, Val, Asn, Asp, Glu, or Pro
  misc_feature (10)..(10): Xaa can be Met, Phe, Tyr, Trp, Leu, Ile, His, Val, or Ala
LXFIRGTKVX

SEQ ID NO: 49603 - protein, 9 aa, Artificial Sequence
  Description of Artificial Sequence: Synthetic peptide
  Seed: LSFIRGTRV
  misc_feature (2)..(2): Xaa can be Ala, Ser, Thr, Val, Gly, Ile, Met, Leu, Cys, Gln, Asn, Phe, or Tyr
  misc_feature (9)..(9): Xaa can be Lys, Trp, Phe, Tyr, Met, Leu, Ile, Val, or Ala
LXFIRGTRX

SEQ ID NO: 49604 - protein, 10 aa, Artificial Sequence
  Description of Artificial Sequence: Synthetic peptide
  Seed: LSFIRGTRVV
  misc_feature (2)..(2): Xaa can be Ser, Ala, Thr, Val, Ile, Met, Gln, Gly, or Leu
  misc_feature (10)..(10): Xaa can be Trp, Phe, Tyr, Met, Ile, Leu, or Val
LXFIRGTRVX

SEQ ID NO: 49605 - protein, 9 aa, Artificial Sequence
  Description of Artificial Sequence: Synthetic peptide
  Seed: LSFQGRGVF
  misc_feature (2)..(2): Xaa can be Gln, Met, Pro, Tyr, Ala, Leu, Lys, Phe, Ser, Glu, His, Ile, Thr, Val, Arg, Trp, Asn, Gly, Cys, or Asp
  misc_feature (9)..(9): Xaa can be Phe, Tyr, Met, Trp, Leu, Ile, His, Val, Ala, Cys, Thr, Gln, Ser, Asn, Gly, Pro, Glu, or Ly s
LXFQGRGVX

SEQ ID NO: 49606 - protein, 11 aa, Artificial Sequence
  Description of Artificial Sequence: Synthetic peptide
  Seed: LSFQGRGVFEL
  misc_feature (2)..(2): Xaa can be Ser, Thr, Ala, Val, Ile, or Met
  misc_feature (11)..(11): Xaa can be Trp, Phe, Tyr, Met, Ile, or Leu
LXFQGRGVFEX

SEQ ID NO: 49607 - protein, 11 aa, Artificial Sequence
  Description of Artificial Sequence: Synthetic peptide
  Seed: LTFLARSALIL
  misc_feature (2)..(2): Xaa can be Ser, Thr, Ala, Val, Ile, or Met
  misc_feature (11)..(11): Xaa can be Trp, Phe, Tyr, Leu, Met, or Ile
LXFLARSALIX

SEQ ID NO: 49608 - protein, 8 aa, Artificial Sequence
  Description of Artificial Sequence: Synthetic peptide
  Seed: LTIERMVL
  misc_feature (2)..(2): Xaa can be Ala, Ser, or Thr
  misc_feature (8)..(8): Xaa can be Leu, Met, Phe, Tyr, Ile, or Val
LXIERMVX

SEQ ID NO: 49609 - protein, 10 aa, Artificial Sequence
  Description of Artificial Sequence: Synthetic peptide
  Seed: LTIERMVLSA
  misc_feature (2)..(2): Xaa can be Met, Gln, Leu, Ile, Thr, Val, Ala, Phe, or Ser
  misc_feature (10)..(10): Xaa can be Val, Ala, Ile, Leu, Thr, Cys, Met, Ser, Gly, Phe, or Pro
LXIERMVLSX

SEQ ID NO: 49610 - protein, 11 aa, Artificial Sequence
  Description of Artificial Sequence: Synthetic peptide
  Seed: LTIERMVLSAF
  misc_feature (2)..(2): Xaa can be Gln, Ser, Met, Thr, Val, Ala, His, Leu, Lys, Arg, Asn, Glu, Gly, Ile, Tyr, Phe, or Pro
  misc_feature (11)..(11): Xaa can be Phe, Tyr, Met, Trp, Leu, or Ile
LXIERMVLSAX

SEQ ID NO: 49611 - protein, 8 aa, Artificial Sequence
  Description of Artificial Sequence: Synthetic peptide
  Seed: LTRIAYER
  misc_feature (2)..(2): Xaa can be Met, Phe, Gln, Ile, Leu, Ser, Thr, Trp, Tyr, or Val
  misc_feature (8)..(8): Xaa can be Arg or Lys
LXRIAYEX

SEQ ID NO: 49612 - protein, 9 aa, Artificial Sequence
  Description of Artificial Sequence: Synthetic peptide
  Seed: LTRIAYERM
  misc_feature (2)..(2): Xaa can be Thr, Ser, Val, Ala, Ile, Met, Leu, Gln, Gly, Phe, Tyr, Asn, His, or Trp
  misc_feature (9)..(9): Xaa can be Lys, Ala, Trp, Phe, Ile, Val, Tyr, Met, Leu, Ser, Arg, Thr, or Gly
LXRIAYERX

SEQ ID NO: 49613 - protein, 10 aa, Artificial Sequence
  Description of Artificial Sequence: Synthetic peptide
  Seed: LTRSALILRG
  misc_feature (2)..(2): Xaa can be Leu, Met, Phe, Thr, Tyr, Val, Ser, Ile, Trp, Ala, Gln, Gly, Asn, or His
  misc_feature (10)..(10): Xaa can be Arg, Lys, Ala, Val, Tyr, His, Ile, Leu, Met, Ser, Thr, Asn, Asp, Cys, Gln, Glu, Gly, Phe, Pro, or Trp
LXRSALILRX

SEQ ID NO: 49614 - protein, 8 aa, Artificial Sequence
  Description of Artificial Sequence: Synthetic peptide
  Seed: LTVERMVL
  misc_feature (2)..(2): Xaa can be Ala, Ser, or Thr
  misc_feature (8)..(8): Xaa can be Leu, Met, Phe, Tyr, Ile, or Val
LXVERMVX

SEQ ID NO: 49615 - protein, 10 aa, Artificial Sequence
  Description of Artificial Sequence: Synthetic peptide
  Seed: LTVERMVLSA
  misc_feature (2)..(2): Xaa can be Met, Leu, Gln, Ile, Thr, Val, Ala, or Ser
  misc_feature (10)..(10): Xaa can be Val, Ala, Ile, Leu, Met, Thr, Ser, or Cys
LXVERMVLSX

SEQ ID NO: 49616 - protein, 11 aa, Artificial Sequence
  Description of Artificial Sequence: Synthetic peptide
  Seed: LTVERMVLSAF
  misc_feature (2)..(2): Xaa can be Ser, Gln, Met, Thr, Ala, His, Leu, Lys, Val, Arg, Asn, Glu, Gly, Ile, Tyr, or Phe
  misc_feature (11)..(11): Xaa can be Phe, Tyr, Met, Trp, or Leu
LXVERMVLSAX

SEQ ID NO: 49617 - protein, 9 aa, Artificial Sequence
  Description of Artificial Sequence: Synthetic peptide
  Seed: LVLRGSVAH
  misc_feature (2)..(2): Xaa can be Met, Gln, Leu, Val, Ile, Ala, Ser, Thr, Glu, Gly, Phe, Asn, Cys, Lys, Pro, Trp, or Tyr
  misc_feature (9)..(9): Xaa can be Phe, Tyr, Met, Leu, Trp, Ile, His, Val, Ala, or Gly
LXLRGSVAX

SEQ ID NO: 49618 - protein, 10 aa, Artificial Sequence
  Description of Artificial Sequence: Synthetic peptide
  Seed: LVLYDKEELR
  misc_feature (2)..(2): Xaa can be Ala, Ile, Met, Phe, Ser, Thr, Tyr, Val, Arg, Asn, Asp, Cys, Gln, Glu, Gly, His, Leu, Lys, Pro, or Trp
  misc_feature (10)..(10): Xaa can be Arg or Lys
LXLYDKEELX

SEQ ID NO: 49619 - protein, 10 aa, Artificial Sequence
  Description of Artificial Sequence: Synthetic peptide
  Seed: LVLYDKGEIR
  misc_feature (2)..(2): Xaa can be Thr, Ala, Arg, Asn, Asp, Cys, Gln, Glu, Gly, His, Ile, Leu, Lys, Met, Phe, Pro, Ser, Trp, Tyr, or Val
  misc_feature (10)..(10): Xaa can be Arg or Lys
LXLYDKGEIX

SEQ ID NO: 49620 - protein, 10 aa, Artificial Sequence
  Description of Artificial Sequence: Synthetic peptide
  Seed: LVPRGQLSTR
  misc_feature (2)..(2): Xaa can be Ile, Leu, Met, Phe, Ser, Thr, Trp, Tyr, or Val
  misc_feature (10)..(10): Xaa can be Arg
LXPRGQLSTX

SEQ ID NO: 49621 - protein, 9 aa, Artificial Sequence
  Description of Artificial Sequence: Synthetic peptide
  Seed: LVRAGMDPR
  misc_feature (2)..(2): Xaa can be Thr, Val, Ala, Gln, Ile, Leu, Met, Phe, Ser, Trp, Tyr, Asn, or Gly
  misc_feature (9)..(9): Xaa can be Arg, Lys, Met, or Tyr
LXRAGMDPX

SEQ ID NO: 49622 - protein, 9 aa, Artificial Sequence
  Description of Artificial Sequence: Synthetic peptide
  Seed: LVRTGMDPR
  misc_feature (2)..(2): Xaa can be Gln, Ile, Leu, Met, Phe, Ser, Thr, Trp, Tyr, Val, Ala, Asn, or Gly
  misc_feature (9)..(9): Xaa can be Arg or Lys
LXRTGMDPX

SEQ ID NO: 49623 - protein, 10 aa, Artificial Sequence
  Description of Artificial Sequence: Synthetic peptide
  Seed: LVWMACHSPA
  misc_feature (2)..(2): Xaa can be Met, Leu, Gln, Ile, Thr, Val, Ser, or Ala
  misc_feature (10)..(10): Xaa can be Ile, Val, Ala, Leu, Met, Thr, or Cys
LXWMACHSPX

SEQ ID NO: 49624 - protein, 11 aa, Artificial Sequence
  Description of Artificial Sequence: Synthetic peptide
  Seed: LVWMACHSPAF
  misc_feature (2)..(2): Xaa can be Gln, Lys, Met, Ser, Thr, Tyr, Ala, Arg, Val, Glu, Gly, His, Ile, Leu, Phe, Trp, Asn, Asp, Cys, or Pro
  misc_feature (11)..(11): Xaa can be Met, Phe, Tyr, Trp, Leu, Ile, His, or Val
LXWMACHSPAX

SEQ ID NO: 49625 - protein, 9 aa, Artificial Sequence
  Description of Artificial Sequence: Synthetic peptide
  Seed: LVWMACNSA
  misc_feature (2)..(2): Xaa can be Gln, Met, Ile, Leu, Thr, Val, Ala, or Ser
  misc_feature (9)..(9): Xaa can be Ile, Val, Ala, Leu, Met, or Thr
LXWMACNSX

SEQ ID NO: 49626 - protein, 11 aa, Artificial Sequence
  Description of Artificial Sequence: Synthetic peptide
  Seed: LVWMACNSAAF
  misc_feature (2)..(2): Xaa can be Gln, Lys, Tyr, Arg, Met, Ala, Glu, His, Leu, Phe, Ser, Trp, Asn, Asp, Cys, Gly, Ile, Pro, Thr, or Val
  misc_feature (11)..(11): Xaa can be Met, Phe, Tyr, Leu, Trp, Ile, His, or Val
LXWMACNSAAX

SEQ ID NO: 49627 - protein, 10 aa, Artificial Sequence
  Description of Artificial Sequence: Synthetic peptide
  Seed: LYDKEEIMRI
  misc_feature (2)..(2): Xaa can be Tyr or Trp
  misc_feature (10)..(10): Xaa can be Phe, Ile, Leu, or Trp
LXDKEEIMRX

SEQ ID NO: 49628 - protein, 11 aa, Artificial Sequence
  Description of Artificial Sequence: Synthetic peptide
  Seed: LYDKEEIRRTW
  misc_feature (2)..(2): Xaa can be Tyr or Trp
  misc_feature (11)..(11): Xaa can be Phe or Trp
LXDKEEIRRTX

SEQ ID NO: 49629 - protein, 11 aa, Artificial Sequence
  Description of Artificial Sequence: Synthetic peptide
  Seed: MAAFIGDNEGR
  misc_feature (2)..(2): Xaa can be Thr, Val, Ala, Asn, Ile, Leu, Met, Phe, Pro, Ser, Tyr, Gln, Gly, His, or Trp
  misc_feature (11)..(11): Xaa can be Arg, Lys, or Tyr
MXAFIGDNEGX

SEQ ID NO: 49630 - protein, 11 aa, Artificial Sequence
  Description of Artificial Sequence: Synthetic peptide
  Seed: MAAFIGNNEGR
  misc_feature (2)..(2): Xaa can be Thr, Val, Ala, Asn, Ile, Leu, Met, Phe, Pro, Ser, Tyr, Arg, Asp, Cys, Gln, Glu, Gly, His, Lys, or Trp
  misc_feature (11)..(11): Xaa can be Arg, Lys, or Tyr
MXAFIGNNEGX

SEQ ID NO: 49631 - protein, 11 aa, Artificial Sequence
  Description of Artificial Sequence: Synthetic peptide
  Seed: MAAFIGNTEGR
  misc_feature (2)..(2): Xaa can be Thr, Val, Ala, Ile, Ser, Asn, Gly, Leu, Met, Phe, Pro, Tyr, Arg, Asp, Cys, Gln, Glu, His, Lys, or Trp
  misc_feature (11)..(11): Xaa can be Arg, Lys, Tyr, Met, or His
MXAFIGNTEGX

SEQ ID NO: 49632 - protein, 11 aa, Artificial Sequence
  Description of Artificial Sequence: Synthetic peptide
  Seed: MAAFKGNTEGR
  misc_feature (2)..(2): Xaa can be Ala, Ile, Met, Ser, Thr, Val, Arg, Asn, Asp, Cys, Gln, Glu, Gly, His, Leu, Lys, Phe, Pro, Trp, or Tyr
  misc_feature (11)..(11): Xaa can be Arg or Lys
MXAFKGNTEGX

SEQ ID NO: 49633 - protein, 11 aa, Artificial Sequence
  Description of Artificial Sequence: Synthetic peptide
  Seed: MAAFNGNTEGR
  misc_feature (2)..(2): Xaa can be Thr, Ala, Ile, Met, Ser, Val, Arg, Asn, Cys, Gln, Glu, Gly, His, Leu, Lys, Phe, Pro, Trp, or Tyr
  misc_feature (11)..(11): Xaa can be Arg, Lys, or Tyr
MXAFNGNTEGX

SEQ ID NO: 49634 - protein, 11 aa, Artificial Sequence
  Description of Artificial Sequence: Synthetic peptide
  Seed: MAAFSGNNEGR
  misc_feature (2)..(2): Xaa can be Ala, Ile, Met, Ser, Thr, Val, Arg, Asn, Gln, Glu, Gly, His, Leu, Phe, Pro, Trp, or Tyr
  misc_feature (11)..(11): Xaa can be Arg or Lys
MXAFSGNNEGX

SEQ ID NO: 49635 - protein, 11 aa, Artificial Sequence
  Description of Artificial Sequence: Synthetic peptide
  Seed: MAAFSGNTEGR
  misc_feature (2)..(2): Xaa can be Thr, Ala, Ile, Met, Phe, Ser, Val, Arg, Asn, Asp, Gln, Glu, Gly, His, Leu, Lys, Pro, Trp, or Tyr
  misc_feature (11)..(11): Xaa can be Arg, Lys, or Tyr
MXAFSGNTEGX

SEQ ID NO: 49636 - protein, 11 aa, Artificial Sequence
  Description of Artificial Sequence: Synthetic peptide
  Seed: MAAFTGNAEGR
  misc_feature (2)..(2): Xaa can be Thr, Ala, Ile, Met, Ser, Val, Arg, Asn, Gln, Glu, Gly, His, Leu, Phe, Pro, Trp, or Tyr
  misc_feature (11)..(11): Xaa can be Arg, Lys, or Tyr
MXAFTGNAEGX

SEQ ID NO: 49637 - protein, 11 aa, Artificial Sequence
  Description of Artificial Sequence: Synthetic peptide
  Seed: MAAFTGNNEGR
  misc_feature (2)..(2): Xaa can be Thr, Ala, Ile, Met, Ser, Val, Asn, Gln, Glu, Gly, Leu, Phe, Pro, Trp, or Tyr
  misc_feature (11)..(11): Xaa can be Arg, Lys, or Tyr
MXAFTGNNEGX

SEQ ID NO: 49638 - protein, 11 aa, Artificial Sequence
  Description of Artificial Sequence: Synthetic peptide
  Seed: MAAFTGNPEGR
  misc_feature (2)..(2): Xaa can be Thr, Ala, Ile, Leu, Met, Phe, Ser, Tyr, Val, Asn, Gln, Glu, Gly, Pro, or Trp
  misc_feature (11)..(11): Xaa can be Arg, Lys, or Tyr
MXAFTGNPEGX

SEQ ID NO: 49639 - protein, 11 aa, Artificial Sequence
  Description of Artificial Sequence: Synthetic peptide
  Seed: MAAFTGNTEGR
  misc_feature (2)..(2): Xaa can be Thr, Ala, Ile, Met, Phe, Ser, Val, Arg, Asn, Gln, Glu, Gly, His, Leu, Pro, Trp, or Tyr
  misc_feature (11)..(11): Xaa can be Arg, Lys, or Tyr
MXAFTGNTEGX

SEQ ID NO: 49640 - protein, 10 aa, Artificial Sequence
  Description of Artificial Sequence: Synthetic peptide
  Seed: MAAFTGNTER
  misc_feature (2)..(2): Xaa can be Thr, Val, Ile, Ala, Arg, Asn, Asp, Cys, Gln, Glu, Gly, His, Leu, Lys, Met, Phe, Pro, Ser, Trp, or Tyr
  misc_feature (10)..(10): Xaa can be Arg, Lys, Tyr, Met, Phe, or His
MXAFTGNTEX

SEQ ID NO: 49641 - protein, 11 aa, Artificial Sequence
  Description of Artificial Sequence: Synthetic peptide
  Seed: MAAFTGNTERR
  misc_feature (2)..(2): Xaa can be Ala, Ile, Met, Phe, Ser, Thr, Val, Asn, Leu, Pro, Tyr, Arg, Cys, Gln, Glu, Gly, His, or Tr p
  misc_feature (11)..(11): Xaa can be Arg, Lys, Ala, Asn, Asp, Cys, Gln, Glu, Gly, His, Ile, Leu, Met, Phe, Pro, Ser, Thr, Trp, Tyr, or Val
MXAFTGNTERX

SEQ ID NO: 49642 - protein, 11 aa, Artificial Sequence
  Description of Artificial Sequence: Synthetic peptide
  Seed: MAAFVGNNEGR
  misc_feature (2)..(2): Xaa can be Thr, Val, Ala, Asn, Ile, Leu, Met, Phe, Pro, Ser, Tyr, Arg, Cys, Gln, Glu, Gly, His, or Tr p
  misc_feature (11)..(11): Xaa can be Arg, Lys, or Tyr
MXAFVGNNEGX

SEQ ID NO: 49643 - protein, 11 aa, Artificial Sequence
  Description of Artificial Sequence: Synthetic peptide
  Seed: MAAFVGNTEGR
  misc_feature (2)..(2): Xaa can be Ala, Ser, Thr, Val, Asn, Gly, Ile, Leu, Met, Phe, Pro, Tyr, Arg, Asp, Cys, Gln, Glu, His, or Trp
  misc_feature (11)..(11): Xaa can be Arg, Lys, or Tyr
MXAFVGNTEGX

SEQ ID NO: 49644 - protein, 8 aa, Artificial Sequence
  Description of Artificial Sequence: Synthetic peptide
  Seed: MACHSAAF
  misc_feature (2)..(2): Xaa can be Gln, Ala, Met, Pro, Lys, Ser, Thr, Arg, Glu, His, Leu, Phe, Tyr, Asn, Gly, Ile, Trp, or Va l
  misc_feature (8)..(8): Xaa can be Phe, Tyr, Met, Leu, Trp, Ile, His, or Val
MXCHSAAX

SEQ ID NO: 49645 - protein, 8 aa, Artificial Sequence
  Description of Artificial Sequence: Synthetic peptide
  Seed: MACHSPAF
  misc_feature (2)..(2): Xaa can be Gln, Ala, Met, Lys, Pro, Ser, Thr, Arg, Glu, His, Leu, Phe, Tyr, Asn, Ile, Trp, or Val
  misc_feature (8)..(8): Xaa can be Phe, Tyr, Met, Leu, Ile, or Trp
MXCHSPAX

SEQ ID NO: 49646 - protein, 8 aa, Artificial Sequence
  Description of Artificial Sequence: Synthetic peptide
  Seed: MACNSAAF
  misc_feature (2)..(2): Xaa can be Gln, Met, Pro, Ala, Lys, Ser, Thr, Arg, Glu, His, Leu, Phe, Tyr, Asn, Ile, Trp, or Val
  misc_feature (8)..(8): Xaa can be Phe, Tyr, Met, Leu, Trp, Ile, or Val
MXCNSAAX

SEQ ID NO: 49647 - protein, 10 aa, Artificial Sequence
  Description of Artificial Sequence: Synthetic peptide
  Seed: MALQGTKRSY
  misc_feature (2)..(2): Xaa can be Gln, Met, Ser, Thr, Ala, Lys, Ile, Leu, Pro, Val, Arg, Glu, His, Asn, Asp, Cys, Gly, Phe, Trp, or Tyr
  misc_feature (10)..(10): Xaa can be Phe, Tyr, Met, Leu, Trp, Ile, His, Ala, or Val
MXLQGTKRSX

SEQ ID NO: 49648 - protein, 10 aa, Artificial Sequence
  Description of Artificial Sequence: Synthetic peptide
  Seed: MASQGTKRPY
  misc_feature (2)..(2): Xaa can be Gln, Ala, Met, Pro, Ser, Lys, Thr, Arg, Asn, Cys, Glu, Gly, His, Ile, Leu, Phe, Trp, Tyr, Val, or Asp
  misc_feature (10)..(10): Xaa can be Phe, Trp, Tyr, Met, Leu, Ile, Val, His, or Ala
MXSQGTKRPX

SEQ ID NO: 49649 - protein, 10 aa, Artificial Sequence
  Description of Artificial Sequence: Synthetic peptide
  Seed: MASQGTKRSY
  misc_feature (2)..(2): Xaa can be Gln, Ser, Ala, Lys, Met, Pro, Thr, Arg, Glu, His, Ile, Leu, Val, Asn, Asp, Cys, Gly, Phe, Trp, or Tyr
  misc_feature (10)..(10): Xaa can be Phe, Trp, Tyr, Met, Leu, Ile, or His
MXSQGTKRSX

SEQ ID NO: 49650 - protein, 10 aa, Artificial Sequence
  Description of Artificial Sequence: Synthetic peptide
  Seed: MASQGTTRSY
  misc_feature (2)..(2): Xaa can be Gln, Met, Pro, Ala, Lys, Ser, Thr, Arg, Asn, Asp, Cys, Glu, Gly, His, Ile, Leu, Phe, Trp, Tyr, or Val
  misc_feature (10)..(10): Xaa can be Leu, Met, Phe, Trp, Tyr, Ile, Val, His, or Ala
MXSQGTTRSX

SEQ ID NO: 49651 - protein, 10 aa, Artificial Sequence
  Description of Artificial Sequence: Synthetic peptide
  Seed: MATKGTKRSY
  misc_feature (2)..(2): Xaa can be Ala, Ser, Gln, Met, Thr, Ile, Leu, Lys, Pro, Val, Arg, Glu, or His
  misc_feature (10)..(10): Xaa can be Phe, Tyr, Met, Trp, or Leu
MXTKGTKRSX

SEQ ID NO: 49652 - protein, 10 aa, Artificial Sequence
  Description of Artificial Sequence: Synthetic peptide
  Seed: MATQGTKRSY
  misc_feature (2)..(2): Xaa can be Gln, Ala, Lys, Met, Pro, Ser, Thr, His, Leu, Arg, Asn, Asp, Cys, Glu, Gly, Ile, Phe, Trp, Tyr, or Val
  misc_feature (10)..(10): Xaa can be Phe, Trp, Tyr, Met, Leu, or Ile
MXTQGTKRSX

SEQ ID NO: 49653 - protein, 10 aa, Artificial Sequence
  Description of Artificial Sequence: Synthetic peptide
  Seed: MCSLMQGSTL
  misc_feature (2)..(2): Xaa can be Ala, Ser, Thr, Arg, Asn, Asp, Cys, Gln, Glu, Gly, His, Ile, Leu, Lys, Met, Phe, Pro, Trp, Tyr, or Val
  misc_feature (10)..(10): Xaa can be Ile, Leu, Met, Phe, Trp, Tyr, or Val
MXSLMQGSTX

SEQ ID NO: 49654 - protein, 10 aa, Artificial Sequence
  Description of Artificial Sequence: Synthetic peptide
  Seed: MCTEFKLSDY
  misc_feature (2)..(2): Xaa can be Ala, Arg, Asn, Asp, Cys, Gln, Glu, Gly, His, Ile, Leu, Lys, Met, Phe, Pro, Ser, Thr, Trp, Tyr, or Val
  misc_feature (10)..(10): Xaa can be Tyr
MXTEFKLSDX

SEQ ID NO: 49655 - protein, 10 aa, Artificial Sequence
  Description of Artificial Sequence: Synthetic peptide
  Seed: MCTEIKLSDY
  misc_feature (2)..(2): Xaa can be Ala, Arg, Asn, Asp, Cys, Gln, Glu, Gly, His, Ile, Leu, Lys, Met, Phe, Pro, Ser, Thr, Trp, Tyr, or Val
  misc_feature (10)..(10): Xaa can be Tyr
MXTEIKLSDX

SEQ ID NO: 49656 - protein, 10 aa, Artificial Sequence
  Description of Artificial Sequence: Synthetic peptide
  Seed: MCTELKLNDY
  misc_feature (2)..(2): Xaa can be Ala, Arg, Asn, Asp, Cys, Gln, Glu, Gly, His, Ile, Leu, Lys, Met, Phe, Pro, Ser, Thr, Trp, Tyr, or Val
  misc_feature (10)..(10): Xaa can be Tyr
MXTELKLNDX

SEQ ID NO: 49657 - protein, 10 aa, Artificial Sequence
  Description of Artificial Sequence: Synthetic peptide
  Seed: MCTELKLSDY
  misc_feature (2)..(2): Xaa can be Ala, Arg, Asn, Asp, Cys, Gln, Glu, Gly, His, Ile, Leu, Lys, Met, Phe, Pro, Ser, Thr, Trp, Tyr, or Val
  misc_feature (10)..(10): Xaa can be Tyr
MXTELKLSDX

SEQ ID NO: 49658 - protein, 10 aa, Artificial Sequence
  Description of Artificial Sequence: Synthetic peptide
  Seed: MCTELQLSDY
  misc_feature (2)..(2): Xaa can be Pro, Ala, Met, Val, Ile, Ser, Thr, Arg, Asn, Asp, Cys, Gln, Glu, Gly, His, Leu, Lys, Phe, Trp, or Tyr
  misc_feature (10)..(10): Xaa can be Tyr, Phe, Met, Ala, His, Ile, Leu, Trp, or Val
MXTELQLSDX

SEQ ID NO: 49659 - protein, 11 aa, Artificial Sequence
  Description of Artificial Sequence: Synthetic peptide
  Seed: MDAIDSSTLEL
  misc_feature (2)..(2): Xaa can be Ala, Ser, Thr, Gln, Leu, Met, Phe, Tyr, Val, Cys, Gly, Ile, Trp, Arg, Asn, Asp, Glu, His, Lys, or Pro
  misc_feature (11)..(11): Xaa can be Leu, Phe, Met, Ile, or Val
MXAIDSSTLEX

SEQ ID NO: 49660 - protein, 9 aa, Artificial Sequence
  Description of Artificial Sequence: Synthetic peptide
  Seed: MDAIVSSTL
  misc_feature (2)..(2): Xaa can be Glu, Asp, or Gln
  misc_feature (9)..(9): Xaa can be Ile, Leu, Met, Phe, Val, Ala, Cys, Gly, Pro, Ser, Thr, Trp, or Tyr
MXAIVSSTX

SEQ ID NO: 49661 - protein, 9 aa, Artificial Sequence
  Description of Artificial Sequence: Synthetic peptide
  Seed: MDAMESSTL
  misc_feature (2)..(2): Xaa can be Gln, Glu, Met, Lys, His, Arg, Leu, Ala, Ser, Ile, Pro, Val, Asn, Gly, Phe, Thr, Tyr, Asp, Cys, or Trp
  misc_feature (9)..(9): Xaa can be Met, Phe, Tyr, Leu, Ile, Trp, Val, His, Ala, Cys, Thr, Gly, Ser, Gln, Pro, or Asn
MXAMESSTX

SEQ ID NO: 49662 - protein, 9 aa, Artificial Sequence
  Description of Artificial Sequence: Synthetic peptide
  Seed: MDNMESSTL
  misc_feature (2)..(2): Xaa can be Glu, Asp, or Gln
  misc_feature (9)..(9): Xaa can be Leu, Ile, Met, Ala, Phe, or Val
MXNMESSTX

SEQ ID NO: 49663 - protein, 9 aa, Artificial Sequence
  Description of Artificial Sequence: Synthetic peptide
  Seed: MDSCTLELR
  misc_feature (2)..(2): Xaa can be Thr, Val, Ala, Ile, Met, Ser, Asn, Gln, Gly, Leu, Phe, Pro, Tyr, Asp, or Cys
  misc_feature (9)..(9): Xaa can be Arg, Lys, Tyr, His, Gln, or Met
MXSCTLELX

SEQ ID NO: 49664 - protein, 9 aa, Artificial Sequence
  Description of Artificial Sequence: Synthetic peptide
  Seed: MDSIVSSTL
  misc_feature (2)..(2): Xaa can be Glu, Asp, or Gln
  misc_feature (9)..(9): Xaa can be Leu, Met, Ile, Phe, Val, Ala, Cys, Gly, Pro, Ser, Thr, or Trp
MXSIVSSTX

SEQ ID NO: 49665 - protein, 9 aa, Artificial Sequence
  Description of Artificial Sequence: Synthetic peptide
  Seed: MDSNTLELR
  misc_feature (2)..(2): Xaa can be Thr, Val, Ala, Ile, Met, Ser, Asn, Gln, Gly, Leu, Phe, Pro, Tyr, Asp, or Cys
  misc_feature (9)..(9): Xaa can be Arg, Lys, Tyr, His, Gln, or Met
MXSNTLELX

SEQ ID NO: 49666 - protein, 9 aa, Artificial Sequence
  Description of Artificial Sequence: Synthetic peptide
  Seed: MDSRTLELR
  misc_feature (2)..(2): Xaa can be Thr, Ala, Ile, Ser, Val, Asn, Gln, Gly, Leu, Met, Phe, Pro, Tyr, Asp, or Cys
  misc_feature (9)..(9): Xaa can be Arg, Lys, Tyr, or His
MXSRTLELX

SEQ ID NO: 49667 - protein, 9 aa, Artificial Sequence
  Description of Artificial Sequence: Synthetic peptide
  Seed: MDSSTLELR
  misc_feature (2)..(2): Xaa can be Thr, Val, Ile, Ala, Leu, Met, Ser, Asn, Cys, Gln, Gly, Phe, Pro, Trp, Tyr, Arg, Asp, Glu, His, or Lys
  misc_feature (9)..(9): Xaa can be Arg, Lys, Tyr, Met, Gln, His, or Phe
MXSSTLELX

SEQ ID NO: 49668 - protein, 9 aa, Artificial Sequence
  Description of Artificial Sequence: Synthetic peptide
  Seed: MDSTTLELR
  misc_feature (2)..(2): Xaa can be Thr, Val, Ala, Ile, Met, Ser, Asn, Gln, Gly, Leu, Phe, Pro, Tyr, Asp, or Cys
  misc_feature (9)..(9): Xaa can be Arg, Lys, Tyr, His, or Gln
MXSTTLELX

SEQ ID NO: 49669 - protein, 11 aa, Artificial Sequence
  Description of Artificial Sequence: Synthetic peptide
  Seed: MDTMDSNTLEL
  misc_feature (2)..(2): Xaa can be Leu, Phe, Ala, Cys, Gln, Glu, Gly, Ile, Ser, Thr, Trp, Tyr, Val, Arg, Asn, Asp, His, Lys, Met, or Pro
  misc_feature (11)..(11): Xaa can be Ile, Leu, Met, Val, Phe, or Ala
MXTMDSNTLEX

SEQ ID NO: 49670 - protein, 9 aa, Artificial Sequence
  Description of Artificial Sequence: Synthetic peptide
  Seed: MDTMGSSTL
  misc_feature (2)..(2): Xaa can be Gln, Glu, Met, His, Lys, Ala, Arg, Leu, Ser, Ile, Pro, Val, Asp, Asn, Gly, Phe, Thr, Tyr, Cys, or Trp
  misc_feature (9)..(9): Xaa can be Met, Phe, Tyr, Leu, Ile, Trp, Val, His, Ala, Cys, Thr, Gly, Ser, Pro, Asn, or Gln
MXTMGSSTX

SEQ ID NO: 49671 - protein, 11 aa, Artificial Sequence
  Description of Artificial Sequence: Synthetic peptide
  Seed: MDTMGSSTLEL
  misc_feature (2)..(2): Xaa can be Glu, Ala, Arg, Asn, Asp, Cys, Gln, Gly, His, Ile, Leu, Lys, Met, Phe, Pro, Ser, Thr, Trp, Tyr, or Val
  misc_feature (11)..(11): Xaa can be Ile, Leu, Val, or Met
MXTMGSSTLEX

SEQ ID NO: 49672 - protein, 9 aa, Artificial Sequence
  Description of Artificial Sequence: Synthetic peptide
  Seed: MDTMVSSTL
  misc_feature (2)..(2): Xaa can be Glu, Asp, or Gln
  misc_feature (9)..(9): Xaa can be Leu, Met, Ile, Phe, Val, Ala, Cys, Gly, Pro, Ser, Thr, or Trp
MXTMVSSTX

SEQ ID NO: 49673 - protein, 11 aa, Artificial Sequence
  Description of Artificial Sequence: Synthetic peptide
  Seed: MDTMVSSTLEL
  misc_feature (2)..(2): Xaa can be Gln, Arg, Glu, His, Leu, Lys, Met, Phe, Ala, Asn, Asp, Cys, Gly, Ile, Pro, Ser, Thr, Trp, Tyr, or Val
  misc_feature (11)..(11): Xaa can be Ala, Ile, Leu, Met, Phe, Tyr, Val, Trp, or His
MXTMVSSTLEX

SEQ ID NO: 49674 - protein, 9 aa, Artificial Sequence
  Description of Artificial Sequence: Synthetic peptide
  Seed: MEAIDSNTL
  misc_feature (2)..(2): Xaa can be Glu, Gln, His, Lys, Met, Arg, Leu, Ala, Ile, Pro, Ser, Val, Asn, Gly, Phe, Thr, Tyr, Cys, or Trp
  misc_feature (9)..(9): Xaa can be Phe, Tyr, Met, Leu, Ile, Trp, Val, Ala, His, Cys, Gly, Pro, Ser, or Thr
MXAIDSNTX

SEQ ID NO: 49675 - protein, 11 aa, Artificial Sequence
  Description of Artificial Sequence: Synthetic peptide
  Seed: MEAIDSNTLEL
  misc_feature (2)..(2): Xaa can be Ala, Glu, Met, Ser, Thr, Gln, Leu, Phe, Tyr, Val, Arg, Asn, Asp, Cys, Gly, His, Ile, Lys, Pro, or Trp
  misc_feature (11)..(11): Xaa can be Leu, Phe, Met, Ile, or Val
MXAIDSNTLEX

SEQ ID NO: 49676 - protein, 9 aa, Artificial Sequence
  Description of Artificial Sequence: Synthetic peptide
  Seed: MEAMDSNTL
  misc_feature (2)..(2): Xaa can be Gln, Glu, His, Met, Arg, Lys, Ala, Leu, Ser, Pro, Asn, Ile, Phe, Thr, Tyr, Val, Cys, Gly, or Trp
  misc_feature (9)..(9): Xaa can be Met, Phe, Tyr, Leu, Ile, Trp, Val, His, Ala, Thr, Cys, Gly, Ser, or Pro
MXAMDSNTX

SEQ ID NO: 49677 - protein, 11 aa, Artificial Sequence
  Description of Artificial Sequence: Synthetic peptide
  Seed: MEAMDSNTLEL
  misc_feature (2)..(2): Xaa can be Leu, Met, Ala, Cys, Gln, Glu, Gly, Ile, Phe, Ser, Thr, Trp, Tyr, Val, Arg, Asn, Asp, His, Lys, or Pro
  misc_feature (11)..(11): Xaa can be Ile, Leu, Met, Val, Phe, or Ala
MXAMDSNTLEX

SEQ ID NO: 49678 - protein, 9 aa, Artificial Sequence
  Description of Artificial Sequence: Synthetic peptide
  Seed: MEAMDSSTL
  misc_feature (2)..(2): Xaa can be Gln, Glu, Met, His, Lys, Arg, Leu, Ala, Ser, Val, Ile, Pro, Phe, Asn, Gly, Thr, Tyr, Cys, Trp, or Asp
  misc_feature (9)..(9): Xaa can be Phe, Met, Tyr, Leu, Ile, Trp, His, Val, Ala, Cys, Gly, Thr, Ser, Gln, Pro, Asn, or Glu
MXAMDSSTX

SEQ ID NO: 49679 - protein, 11 aa, Artificial Sequence
  Description of Artificial Sequence: Synthetic peptide
  Seed: MEAMDSSTLEL
  misc_feature (2)..(2): Xaa can be Leu, Met, Ala, Arg, Asn, Asp, Cys, Gln, Glu, Gly, His, Ile, Lys, Phe, Pro, Ser, Thr, Trp, Tyr, or Val
  misc_feature (11)..(11): Xaa can be Ile, Leu, Met, Phe, Val, or Ala
MXAMDSSTLEX

SEQ ID NO: 49680 - protein, 11 aa, Artificial Sequence
  Description of Artificial Sequence: Synthetic peptide
  Seed: MEAMESSTLEL
  misc_feature (2)..(2): Xaa can be Glu
  misc_feature (11)..(11): Xaa can be Ile, Leu, Met, Phe, or Val
MXAMESSTLEX

SEQ ID NO: 49681 - protein, 9 aa, Artificial Sequence
  Description of Artificial Sequence: Synthetic peptide
  Seed: MEDAKPEEV
  misc_feature (2)..(2): Xaa can be Glu
  misc_feature (9)..(9): Xaa can be Ala, Ile, Leu, Met, Phe, or Val
MXDAKPEEX

SEQ ID NO: 49682 - protein, 9 aa, Artificial Sequence
  Description of Artificial Sequence: Synthetic peptide
  Seed: MEGAKPEEM
  misc_feature (2)..(2): Xaa can be Glu
  misc_feature (9)..(9): Xaa can be Leu or Met
MXGAKPEEX

SEQ ID NO: 49683 - protein, 11 aa, Artificial Sequence
  Description of Artificial Sequence: Synthetic peptide
  Seed: MENAKPDDVSF
  misc_feature (2)..(2): Xaa can be Gln, Lys, Met, Arg, His, Leu, or Glu
  misc_feature (11)..(11): Xaa can be Phe, Tyr, Met, or Leu
MXNAKPDDVSX

SEQ ID NO: 49684 - protein, 9 aa, Artificial Sequence
  Description of Artificial Sequence: Synthetic peptide
  Seed: MENAKPEEV
  misc_feature (2)..(2): Xaa can be Glu
  misc_feature (9)..(9): Xaa can be Ala, Ile, Leu, Met, Phe, Pro, or Val
MXNAKPEEX

SEQ ID NO: 49685 - protein, 9 aa, Artificial Sequence
  Description of Artificial Sequence: Synthetic peptide
  Seed: MENARPEDV
  misc_feature (2)..(2): Xaa can be Glu
  misc_feature (9)..(9): Xaa can be Ala or Val
MXNARPEDX

SEQ ID NO: 49686 - protein, 11 aa, Artificial Sequence
  Description of Artificial Sequence: Synthetic peptide
  Seed: MENARPEDVSF
  misc_feature (2)..(2): Xaa can be Gln, Lys, Met, Ala, Arg, Glu, His, Leu, or Ser
  misc_feature (11)..(11): Xaa can be Phe, Tyr, Met, or Leu
MXNARPEDVSX

SEQ ID NO: 49687 - protein, 9 aa, Artificial Sequence
  Description of Artificial Sequence: Synthetic peptide
  Seed: MENARPEEV
  misc_feature (2)..(2): Xaa can be Glu
  misc_feature (9)..(9): Xaa can be Ala, Cys, Ile, Leu, Met, Phe, Pro, or Val
MXNARPEEX

SEQ ID NO: 49688 - protein, 11 aa, Artificial Sequence
  Description of Artificial Sequence: Synthetic peptide
  Seed: MENARPEEVSF
  misc_feature (2)..(2): Xaa can be Gln, Lys, Met, Arg, Glu, His, Leu, or Ala
  misc_feature (11)..(11): Xaa can be Tyr, Phe, Met, or Leu
MXNARPEEVSX

SEQ ID NO: 49689 - protein, 9 aa, Artificial Sequence
  Description of Artificial Sequence: Synthetic peptide
  Seed: MENARSEDV
  misc_feature (2)..(2): Xaa can be Glu
  misc_feature (9)..(9): Xaa can be Ala, Ile, Leu, Met, Phe, Pro, or Val
MXNARSEDX

SEQ ID NO: 49690 - protein, 11 aa, Artificial Sequence
  Description of Artificial Sequence: Synthetic peptide
  Seed: MENARSEDVSF
  misc_feature (2)..(2): Xaa can be Gln, Glu, Met, Lys, Ala, Arg, His, Ile, Leu, Phe, Ser, Tyr, or Val
  misc_feature (11)..(11): Xaa can be Phe, Tyr, Met, Leu, Ile, Trp, or Val
MXNARSEDVSX

SEQ ID NO: 49691 - protein, 9 aa, Artificial Sequence
  Description of Artificial Sequence: Synthetic peptide
  Seed: MENASPEDV
  misc_feature (2)..(2): Xaa can be Glu
  misc_feature (9)..(9): Xaa can be Ala, Ile, Leu, Met, Phe, Pro, or Val
MXNASPEDX

SEQ ID NO: 49692 - protein, 11 aa, Artificial Sequence
  Description of Artificial Sequence: Synthetic peptide
  Seed: MENASPEDVSF
  misc_feature (2)..(2): Xaa can be Gln, Glu, Pro, Lys, Met, Ala, Arg, Ile, Leu, Phe, Ser, Thr, Val, Asn, Asp, Cys, Gly, His, Trp, or Tyr
  misc_feature (11)..(11): Xaa can be Phe, Tyr, Met, Leu, Trp, Ile, or His
MXNASPEDVSX

SEQ ID NO: 49693 - protein, 9 aa, Artificial Sequence
  Description of Artificial Sequence: Synthetic peptide
  Seed: MENSRPEDV
  misc_feature (2)..(2): Xaa can be Glu
  misc_feature (9)..(9): Xaa can be Ala or Val
MXNSRPEDX

SEQ ID NO: 49694 - protein, 11 aa, Artificial Sequence
  Description of Artificial Sequence: Synthetic peptide
  Seed: MENSRPEDVSF
  misc_feature (2)..(2): Xaa can be Gln, Lys, Met, Ser, Thr, Ala, Arg, Asn, Asp, Cys, Glu, Gly, His, Ile, Leu, Phe, Pro, Trp, Tyr, or Val
  misc_feature (11)..(11): Xaa can be Phe, Trp, Tyr, Met, or Leu
MXNSRPEDVSX

SEQ ID NO: 49695 - protein, 8 aa, Artificial Sequence
  Description of Artificial Sequence: Synthetic peptide
  Seed: MERMVLSA
  misc_feature (2)..(2): Xaa can be Glu, Asp, or Gln
  misc_feature (8)..(8): Xaa can be Leu, Ile, Met, Val, Phe, Tyr, Ala, His, Pro, Thr, or Trp
MXRMVLSX

SEQ ID NO: 49696 - protein, 9 aa, Artificial Sequence
  Description of Artificial Sequence: Synthetic peptide
  Seed: MERMVLSAF
  misc_feature (2)..(2): Xaa can be Gln, Glu, Met, Lys, Leu, Ala, His, Ile, Ser, Val, Arg, Asp, Thr, Asn, Pro, Gly, Phe, Tyr, Cys, or Trp
  misc_feature (9)..(9): Xaa can be Met, Phe, Tyr, Leu, Trp, His, Ile, Val, Ala, Gly, Ser, Thr, Asn, Cys, Gln, Pro, Glu, or Ly s
MXRMVLSAX

SEQ ID NO: 49697 - protein, 10 aa, Artificial Sequence
  Description of Artificial Sequence: Synthetic peptide
  Seed: MERMVLSAFD
  misc_feature (2)..(2): Xaa can be Gln, Glu, His, Lys, Met, Ala, Leu, Ser, Arg, Asn, Ile, Thr, Val, Tyr, Asp, Cys, Gly, Phe, Pro, or Trp
  misc_feature (10)..(10): Xaa can be Met, Phe, Tyr, Leu, Trp, His, Ile, Ala, Arg, Asn, Asp, Cys, Gln, Glu, Gly, Lys, Pro, Ser, Thr, or Val
MXRMVLSAFX

SEQ ID NO: 49698 - protein, 9 aa, Artificial Sequence
  Description of Artificial Sequence: Synthetic peptide
  Seed: MESAKPEDL
  misc_feature (2)..(2): Xaa can be Glu
  misc_feature (9)..(9): Xaa can be Leu
MXSAKPEDX

SEQ ID NO: 49699 - protein, 11 aa, Artificial Sequence
  Description of Artificial Sequence: Synthetic peptide
  Seed: MESAKPEDLSF
  misc_feature (2)..(2): Xaa can be Gln, Met, Lys, Ala, Arg, Glu, His, Leu, or Ser
  misc_feature (11)..(11): Xaa can be Phe, Tyr, Met, or Leu
MXSAKPEDLSX

SEQ ID NO: 49700 - protein, 9 aa, Artificial Sequence
  Description of Artificial Sequence: Synthetic peptide
  Seed: MESAKPEEV
  misc_feature (2)..(2): Xaa can be Glu
  misc_feature (9)..(9): Xaa can be Ala, Ile, Leu, Met, Phe, Pro, or Val
MXSAKPEEX

SEQ ID NO: 49701 - protein, 9 aa, Artificial Sequence
  Description of Artificial Sequence: Synthetic peptide
  Seed: MESARPEDA
  misc_feature (2)..(2): Xaa can be Glu
  misc_feature (9)..(9): Xaa can be Ala or Leu
MXSARPEDX

SEQ ID NO: 49702 - protein, 11 aa, Artificial Sequence
  Description of Artificial Sequence: Synthetic peptide
  Seed: MESARPEDASF
  misc_feature (2)..(2): Xaa can be Gln, Lys, Met, Ala, Arg, Glu, His, Ile, Leu, Ser, Tyr, Val, or Phe
  misc_feature (11)..(11): Xaa can be Tyr, Phe, Met, or Leu
MXSARPEDASX

SEQ ID NO: 49703 - protein, 11 aa, Artificial Sequence
  Description of Artificial Sequence: Synthetic peptide
  Seed: MESARPEDLSF
  misc_feature (2)..(2): Xaa can be Gln, Ser, Thr, Met, Arg, His, Lys, Ala, Asn, Asp, Cys, Glu, Gly, Ile, Leu, Phe, Pro, Trp, Tyr, or Val
  misc_feature (11)..(11): Xaa can be Phe, Trp, Tyr, Met, Leu, or Ile
MXSARPEDLSX

SEQ ID NO: 49704 - protein, 11 aa, Artificial Sequence
  Description of Artificial Sequence: Synthetic peptide
  Seed: MESARPEDVSF
  misc_feature (2)..(2): Xaa can be Gln, Lys, Met, Ala, Arg, Glu, His, or Leu
  misc_feature (11)..(11): Xaa can be Phe, Tyr, Met, or Leu
MXSARPEDVSX

SEQ ID NO: 49705 - protein, 9 aa, Artificial Sequence
  Description of Artificial Sequence: Synthetic peptide
  Seed: MESARPEEV
  misc_feature (2)..(2): Xaa can be Glu
  misc_feature (9)..(9): Xaa can be Ala, Ile, Leu, Met, Phe, Pro, or Val
MXSARPEEX

SEQ ID NO: 49706 - protein, 9 aa, Artificial Sequence
  Description of Artificial Sequence: Synthetic peptide
  Seed: MESARSEDV
  misc_feature (2)..(2): Xaa can be Glu
  misc_feature (9)..(9): Xaa can be Ala, Ile, Leu, Met, Phe, Pro, or Val
MXSARSEDX

SEQ ID NO: 49707 - protein, 11 aa, Artificial Sequence
  Description of Artificial Sequence: Synthetic peptide
  Seed: MESARSEDVSF
  misc_feature (2)..(2): Xaa can be Gln, Glu, Met, Lys, Ala, Arg, His, Ile, Leu, Phe, Ser, Tyr, or Val
  misc_feature (11)..(11): Xaa can be Phe, Tyr, Met, Leu, Trp, or Ile
MXSARSEDVSX

SEQ ID NO: 49708 - protein, 11 aa, Artificial Sequence
  Description of Artificial Sequence: Synthetic peptide
  Seed: MESSRPEDVSF
  misc_feature (2)..(2): Xaa can be Gln, Ser, Thr, Lys, Met, Ala, Arg, Asn, Asp, Cys, Glu, Gly, His, Ile, Leu, Phe, Pro, Trp, Tyr, or Val
  misc_feature (11)..(11): Xaa can be Phe, Trp, Tyr, Met, or Leu
MXSSRPEDVSX

SEQ ID NO: 49709 - protein, 8 aa, Artificial Sequence
  Description of Artificial Sequence: Synthetic peptide
  Seed: MESSTLEL
  misc_feature (2)..(2): Xaa can be Ala, Ser, Thr, Val, Glu, or Met
  misc_feature (8)..(8): Xaa can be Leu, Met, Phe, Tyr, Ile, or Val
MXSSTLEX

SEQ ID NO: 49710 - protein, 10 aa, Artificial Sequence
  Description of Artificial Sequence: Synthetic peptide
  Seed: METDGDRQNA
  misc_feature (2)..(2): Xaa can be Glu
  misc_feature (10)..(10): Xaa can be Ala
MXTDGDRQNX

SEQ ID NO: 49711 - protein, 10 aa, Artificial Sequence
  Description of Artificial Sequence: Synthetic peptide
  Seed: METDGERPNA
  misc_feature (2)..(2): Xaa can be Glu
  misc_feature (10)..(10): Xaa can be Ala
MXTDGERPNX

SEQ ID NO: 49712 - protein, 10 aa, Artificial Sequence
  Description of Artificial Sequence: Synthetic peptide
  Seed: METDGERQNA
  misc_feature (2)..(2): Xaa can be Glu
  misc_feature (10)..(10): Xaa can be Ala
MXTDGERQNX

SEQ ID NO: 49713 - protein, 9 aa, Artificial Sequence
  Description of Artificial Sequence: Synthetic peptide
  Seed: METIDSNTL
  misc_feature (2)..(2): Xaa can be Glu or Gln
  misc_feature (9)..(9): Xaa can be Met, Phe, Tyr, Ala, Ile, Leu, Pro, Thr, or Val
MXTIDSNTX

SEQ ID NO: 49714 - protein, 11 aa, Artificial Sequence
  Description of Artificial Sequence: Synthetic peptide
  Seed: METIDSNTLEL
  misc_feature (2)..(2): Xaa can be Ala, Met, Ser, Thr, Gln, Glu, Leu, Phe, Tyr, Val, Arg, Asn, Asp, Cys, Gly, His, Ile, Lys, Pro, or Trp
  misc_feature (11)..(11): Xaa can be Leu, Phe, Met, Ile, or Val
MXTIDSNTLEX

SEQ ID NO: 49715 - protein, 9 aa, Artificial Sequence
  Description of Artificial Sequence: Synthetic peptide
  Seed: METIDSSTL
  misc_feature (2)..(2): Xaa can be Gln, Glu, Met, Lys, Arg, Ala, His, Leu, Ser, Asn, Gly, Ile, Phe, Thr, Tyr, Val, Cys, Pro, or Trp
  misc_feature (9)..(9): Xaa can be Phe, Tyr, Met, Leu, Trp, Ile, Val, Ala, His, Gly, Pro, or Thr
MXTIDSSTX

SEQ ID NO: 49716 - protein, 11 aa, Artificial Sequence
  Description of Artificial Sequence: Synthetic peptide
  Seed: METIDSSTLEL
  misc_feature (2)..(2): Xaa can be Ala, Ser, Glu, Thr, Gln, Leu, Met, Phe, Tyr, Val, Gly, Arg, Asn, Asp, Cys, His, Ile, Lys, Pro, or Trp
  misc_feature (11)..(11): Xaa can be Leu, Phe, Met, Ile, or Val
MXTIDSSTLEX

SEQ ID NO: 49717 - protein, 9 aa, Artificial Sequence
  Description of Artificial Sequence: Synthetic peptide
  Seed: METMDSCTL
  misc_feature (2)..(2): Xaa can be Glu, Gln, Met, His, Lys, Arg, Leu, Ala, Ile, Ser, Val, Asn, Gly, Phe, Pro, Thr, Tyr, Cys, or Trp
  misc_feature (9)..(9): Xaa can be Phe, Tyr, Met, Leu, Ile, Trp, Val, Ala, His, Gly, Cys, Pro, or Thr
MXTMDSCTX

SEQ ID NO: 49718 - protein, 11 aa, Artificial Sequence
  Description of Artificial Sequence: Synthetic peptide
  Seed: METMDSCTLEL
  misc_feature (2)..(2): Xaa can be Leu, Met, Phe, Glu, Tyr, Ala, Arg, Asn, Asp, Cys, Gln, Gly, His, Ile, Lys, Pro, Ser, Thr, Trp, or Val
  misc_feature (11)..(11): Xaa can be Ile, Leu, Val, Met, or Ala
MXTMDSCTLEX

SEQ ID NO: 49719 - protein, 9 aa, Artificial Sequence
  Description of Artificial Sequence: Synthetic peptide
  Seed: METMDSITL
  misc_feature (2)..(2): Xaa can be Glu, Gln, His, Lys, Met, Arg, Leu, Pro, Ala, Ser, Ile, Thr, Val, Asn, Gly, Phe, Tyr, Cys, or Trp
  misc_feature (9)..(9): Xaa can be Phe, Tyr, Met, Leu, Ile, Trp, Val, Ala, His, Cys, Thr, Gly, Pro, or Ser
MXTMDSITX

SEQ ID NO: 49720 - protein, 11 aa, Artificial Sequence
  Description of Artificial Sequence: Synthetic peptide
  Seed: METMDSITLEL
  misc_feature (2)..(2): Xaa can be Ala, Glu, Ser, Thr, Arg, Asn, Asp, Cys, Gln, Gly, His, Ile, Leu, Lys, Met, Phe, Pro, Trp, Tyr, or Val
  misc_feature (11)..(11): Xaa can be Ala, Ile, Leu, Met, Val, or Phe
MXTMDSITLEX

SEQ ID NO: 49721 - protein, 9 aa, Artificial Sequence
  Description of Artificial Sequence: Synthetic peptide
  Seed: METMDSNTL
  misc_feature (2)..(2): Xaa can be Glu, Gln, Met, Lys, Arg, Ala, His, Leu, Ser, Val, Asn, Gly, Ile, Phe, Thr, Tyr, Cys, Pro, or Trp
  misc_feature (9)..(9): Xaa can be Phe, Tyr, Met, Leu, Ile, Val, Ala, His, Trp, Cys, Pro, or Thr
MXTMDSNTX

SEQ ID NO: 49722 - protein, 9 aa, Artificial Sequence
  Description of Artificial Sequence: Synthetic peptide
  Seed: METMDSRTL
  misc_feature (2)..(2): Xaa can be Gln, Glu, Met, Lys, His, Arg, Ala, Leu, Ser, Val, Asn, Gly, Ile, Phe, Thr, Tyr, Cys, Pro, or Trp
  misc_feature (9)..(9): Xaa can be Phe, Tyr, Met, Leu, Ile, His, Val, Ala, Trp, Cys, Thr, Gly, or Pro
MXTMDSRTX

SEQ ID NO: 49723 - protein, 11 aa, Artificial Sequence
  Description of Artificial Sequence: Synthetic peptide
  Seed: METMDSRTLEL
  misc_feature (2)..(2): Xaa can be Ala, Arg, Asn, Asp, Cys, Gln, Glu, Gly, His, Ile, Leu, Lys, Met, Phe, Pro, Ser, Thr, Trp, Tyr, or Val
  misc_feature (11)..(11): Xaa can be Ile, Leu, or Val
MXTMDSRTLEX

SEQ ID NO: 49724 - protein, 9 aa, Artificial Sequence
  Description of Artificial Sequence: Synthetic peptide
  Seed: METMDSSTL
  misc_feature (2)..(2): Xaa can be Gln, Glu, Met, Lys, His, Ala, Arg, Leu, Ser, Ile, Thr, Val, Asn, Gly, Phe, Pro, Tyr, Cys, or Trp
  misc_feature (9)..(9): Xaa can be Phe, Tyr, Met, Leu, Ile, Trp, His, Val, Ala, Cys, Gly, Thr, Ser, or Pro
MXTMDSSTX

SEQ ID NO: 49725 - protein, 11 aa, Artificial Sequence
  Description of Artificial Sequence: Synthetic peptide
  Seed: METMDSSTLEL
  misc_feature (2)..(2): Xaa can be Leu, Ala, Arg, Asn, Asp, Cys, Gln, Glu, Gly, His, Ile, Lys, Met, Phe, Pro, Ser, Thr, Trp, Tyr, or Val
  misc_feature (11)..(11): Xaa can be Ile, Leu, Met, Phe, Val, or Ala
MXTMDSSTLEX

SEQ ID NO: 49726 - protein, 9 aa, Artificial Sequence
  Description of Artificial Sequence: Synthetic peptide
  Seed: METMDSTTL
  misc_feature (2)..(2): Xaa can be Gln, Glu, His, Lys, Met, Arg, Ala, Leu, Ser, Ile, Pro, Thr, Val, Asn, Gly, Phe, Tyr, Cys, or Trp
  misc_feature (9)..(9): Xaa can be Phe, Tyr, Met, Leu, Ile, Trp, Val, Ala, His, Cys, Thr, Gly, Ser, or Pro
MXTMDSTTX

SEQ ID NO: 49727 - protein, 11 aa, Artificial Sequence
  Description of Artificial Sequence: Synthetic peptide
  Seed: METMDSTTLEL
  misc_feature (2)..(2): Xaa can be Leu, Met, Phe, Tyr, Ala, Arg, Asn, Asp, Cys, Gln, Glu, Gly, His, Ile, Lys, Pro, Ser, Thr, Trp, or Val
  misc_feature (11)..(11): Xaa can be Ile, Leu, Met, Phe, Val, or Ala
MXTMDSTTLEX

SEQ ID NO: 49728 - protein, 9 aa, Artificial Sequence
  Description of Artificial Sequence: Synthetic peptide
  Seed: METMESSTL
  misc_feature (2)..(2): Xaa can be Gln, Glu, Met, Lys, His, Ala, Arg, Leu, Ser, Asn, Ile, Thr, Val, Gly, Phe, Tyr, Cys, Pro, or Trp
  misc_feature (9)..(9): Xaa can be Phe, Tyr, Met, Leu, Ile, Trp, Val, Ala, His, Cys, Gly, Thr, Ser, or Pro
MXTMESSTX

SEQ ID NO: 49729 - protein, 11 aa, Artificial Sequence
  Description of Artificial Sequence: Synthetic peptide
  Seed: METMESSTLEL
  misc_feature (2)..(2): Xaa can be Glu
  misc_feature (11)..(11): Xaa can be Ile, Leu, or Met
MXTMESSTLEX

SEQ ID NO: 49730 - protein, 9 aa, Artificial Sequence
  Description of Artificial Sequence: Synthetic peptide
  Seed: METMNSSTL
  misc_feature (2)..(2): Xaa can be Gln, Glu, Met, His, Lys, Ala, Arg, Leu, Ser, Ile, Val, Phe, Thr, Asn, Asp, Gly, Pro, Tyr, Cys, or Trp
  misc_feature (9)..(9): Xaa can be Phe, Tyr, Met, Leu, Trp, Ile, His, Val, Ala, Cys, Gly, Thr, Pro, Ser, Asn, or Gln
MXTMNSSTX

SEQ ID NO: 49731 - protein, 11 aa, Artificial Sequence
  Description of Artificial Sequence: Synthetic peptide
  Seed: METMNSSTLEL
  misc_feature (2)..(2): Xaa can be Gln, Lys, Met, Ala, Arg, Asn, Asp, Cys, Glu, Gly, His, Ile, Leu, Phe, Pro, Ser, Thr, Trp, Tyr, or Val
  misc_feature (11)..(11): Xaa can be Ala, Ile, Leu, Met, Phe, Tyr, Val, Trp, or His
MXTMNSSTLEX

SEQ ID NO: 49732 - protein, 9 aa, Artificial Sequence
  Description of Artificial Sequence: Synthetic peptide
  Seed: METMSSSTL
  misc_feature (2)..(2): Xaa can be Gln, Glu, Met, Lys, His, Ala, Leu, Arg, Asp, Ser, Val, Asn, Ile, Pro, Thr, Phe, Tyr, Gly, Cys, or Trp
  misc_feature (9)..(9): Xaa can be Met, Phe, Tyr, Leu, Trp, Ile, Val, His, Ala, Cys, Thr, Gly, Ser, Pro, Asn, Gln, or Glu
MXTMSSSTX

SEQ ID NO: 49733 - protein, 11 aa, Artificial Sequence
  Description of Artificial Sequence: Synthetic peptide
  Seed: METMSSSTLEL
  misc_feature (2)..(2): Xaa can be Gln, Lys, Met, Ala, Arg, Asn, Asp, Cys, Glu, Gly, His, Ile, Leu, Phe, Pro, Ser, Thr, Trp, Tyr, or Val
  misc_feature (11)..(11): Xaa can be Ala, Ile, Leu, Met, Phe, Tyr, Val, Trp, or His
MXTMSSSTLEX

SEQ ID NO: 49734 - protein, 11 aa, Artificial Sequence
  Description of Artificial Sequence: Synthetic peptide
  Seed: MGSSTLELRSR
  misc_feature (2)..(2): Xaa can be Ala, Ile, Met, Ser, Thr, Val, Gly, or Leu
  misc_feature (11)..(11): Xaa can be Arg or Lys
MXSSTLELRSX

SEQ ID NO: 49735 - protein, 9 aa, Artificial Sequence
  Description of Artificial Sequence: Synthetic peptide
  Seed: MIDGIGRFY
  misc_feature (2)..(2): Xaa can be Ala, Pro, Ser, Thr, Val, Met, Ile, Leu, Gly, Phe, Gln, Trp, Tyr, Asn, Asp, Cys, or His
  misc_feature (9)..(9): Xaa can be Tyr, Phe, Met, Lys, Trp, Arg, Leu, Ile, Val, His, or Ala
MXDGIGRFX

SEQ ID NO: 49736 - protein, 10 aa, Artificial Sequence
  Description of Artificial Sequence: Synthetic peptide
  Seed: MIDGIGRFYI
  misc_feature (2)..(2): Xaa can be Leu, Met, Gln, Thr, Ala, Ile, Ser, Val, Phe, Pro, Asn, Cys, Gly, Trp, or Tyr
  misc_feature (10)..(10): Xaa can be Val, Ile, Leu, Ala, Met, Phe, Thr, Cys, Gly, Pro, or Ser
MXDGIGRFYX

SEQ ID NO: 49737 - protein, 9 aa, Artificial Sequence
  Description of Artificial Sequence: Synthetic peptide
  Seed: MIGGIGRFY
  misc_feature (2)..(2): Xaa can be Ala, Ser, Thr, Gln, Met, Ile, Leu, Pro, Val, Lys, Gly, His, Phe, Arg, Glu, Trp, Tyr, Asn, or Cys
  misc_feature (9)..(9): Xaa can be Tyr, Phe, Met, Trp, Arg, Leu, Lys, Ile, Val, or His
MXGGIGRFX

SEQ ID NO: 49738 - protein, 10 aa, Artificial Sequence
  Description of Artificial Sequence: Synthetic peptide
  Seed: MIGGIGRFYI
  misc_feature (2)..(2): Xaa can be Met, Leu, Thr, Val, Ala, Gln, Ile, Ser, Asn, Gly, Phe, or Pro
  misc_feature (10)..(10): Xaa can be Val, Ala, Ile, Leu, Met, Thr, Cys, Phe, Ser, or Pro
MXGGIGRFYX

SEQ ID NO: 49739 - protein, 9 aa, Artificial Sequence
  Description of Artificial Sequence: Synthetic peptide
  Seed: MIKRGINDR
  misc_feature (2)..(2): Xaa can be Ile, Met, Phe, Thr, Trp, Tyr, Val, Ala, Asn, Gln, Gly, Leu, or Ser
  misc_feature (9)..(9): Xaa can be Arg or Lys
MXKRGINDX

SEQ ID NO: 49740 - protein, 9 aa, Artificial Sequence
  Description of Artificial Sequence: Synthetic peptide
  Seed: MIKRGVNDR
  misc_feature (2)..(2): Xaa can be Met, Phe, Thr, Tyr, Val, Ala, Asn, Gln, Gly, Ile, Leu, Ser, or Trp
  misc_feature (9)..(9): Xaa can be Arg or Lys
MXKRGVNDX

SEQ ID NO: 49741 - protein, 9 aa, Artificial Sequence
  Description of Artificial Sequence: Synthetic peptide
  Seed: MILSAFDER
  misc_feature (2)..(2): Xaa can be Ile, Thr, Val, Ala, Asn, Gln, Gly, Leu, Met, Phe, Pro, Ser, Trp, Tyr, Cys, or His
  misc_feature (9)..(9): Xaa can be Arg, Lys, or Tyr
MXLSAFDEX

SEQ ID NO: 49742 - protein, 10 aa, Artificial Sequence
  Description of Artificial Sequence: Synthetic peptide
  Seed: MILSAFDERR
  misc_feature (2)..(2): Xaa can be Met, Thr, Val, Phe, Ala, Asn, Gln, Gly, Ile, Leu, Pro, Ser, Trp, Tyr, Arg, Asp, Cys, Glu, His, or Lys
  misc_feature (10)..(10): Xaa can be Arg, Lys, His, Leu, Met, Phe, Tyr, Ala, Asn, Asp, Cys, Gln, Glu, Gly, Ile, Pro, Ser, Thr, Trp, or Val
MXLSAFDERX

SEQ ID NO: 49743 - protein, 9 aa, Artificial Sequence
  Description of Artificial Sequence: Synthetic peptide
  Seed: MIMELIRMI
  misc_feature (2)..(2): Xaa can be Leu, Met, Gln, Thr, Val, Ala, Ile, Ser, Arg, Phe, Tyr, Asn, Gly, Lys, Pro, Cys, His, Glu, Trp, or Asp
  misc_feature (9)..(9): Xaa can be Val, Leu, Ile, Met, Phe, Tyr, Trp, Ala, Thr, Arg, Cys, Lys, Ser, His, Glu, Gly, Pro, or Gl n
MXMELIRMX

SEQ ID NO: 49744 - protein, 10 aa, Artificial Sequence
  Description of Artificial Sequence: Synthetic peptide
  Seed: MIMELIRMIK
  misc_feature (2)..(2): Xaa can be Thr, Ser, Val, Ile, Met, Ala, Phe, Trp, Tyr, Leu, Arg, Asn, Asp, Cys, Gln, Glu, Gly, His, Lys, or Pro
  misc_feature (10)..(10): Xaa can be Arg, Lys, Tyr, Met, His, Ala, Phe, Leu, Val, Ile, Ser, or Gln
MXMELIRMIX

SEQ ID NO: 49745 - protein, 11 aa, Artificial Sequence
  Description of Artificial Sequence: Synthetic peptide
  Seed: MIMELIRMIKR
  misc_feature (2)..(2): Xaa can be Thr, Val, Ala, Gln, Ile, Leu, Met, Phe, Ser, Trp, Tyr, Arg, Asn, Gly, His, Lys, or Pro
  misc_feature (11)..(11): Xaa can be Arg, Lys, or Tyr
MXMELIRMIKX

SEQ ID NO: 49746 - protein, 9 aa, Artificial Sequence
  Description of Artificial Sequence: Synthetic peptide
  Seed: MINGIGRFY
  misc_feature (2)..(2): Xaa can be Ala, Thr, Gln, Pro, Ser, Val, Met, Ile, Gly, Leu, Lys, Tyr, Asn, Phe, Cys, Glu, His, Arg, Trp, or Asp
  misc_feature (9)..(9): Xaa can be Phe, Tyr, Met, Arg, Leu, Lys, Trp, Val, Ile, His, Ala, Gly, Cys, Thr, Gln, or Glu
MXNGIGRFX

SEQ ID NO: 49747 - protein, 10 aa, Artificial Sequence
  Description of Artificial Sequence: Synthetic peptide
  Seed: MINGIGRFYI
  misc_feature (2)..(2): Xaa can be Leu, Met, Thr, Gln, Val, Ala, Ile, Ser, Asn, Phe, Pro, Gly, Cys, or Tyr
  misc_feature (10)..(10): Xaa can be Val, Ile, Leu, Ala, Met, Thr, Phe, Ser, Cys, Gly, or Pro
MXNGIGRFYX

SEQ ID NO: 49748 - protein, 9 aa, Artificial Sequence
  Description of Artificial Sequence: Synthetic peptide
  Seed: MISGIGRFY
  misc_feature (2)..(2): Xaa can be Thr, Tyr, Ala, Pro, Val, Gln, Ser, Met, Phe, Gly, Ile, Leu, Cys, Trp, Lys, Asn, Glu, His, Arg, or Asp
  misc_feature (9)..(9): Xaa can be Tyr, Met, Phe, Arg, Leu, Lys, Trp, Ile, Val, His, Ala, Thr, Gln, Gly, Glu, or Cys
MXSGIGRFX

SEQ ID NO: 49749 - protein, 10 aa, Artificial Sequence
  Description of Artificial Sequence: Synthetic peptide
  Seed: MISGIGRFYI
  misc_feature (2)..(2): Xaa can be Ser, Leu, Met, Thr, Ala, Val, Gln, Ile, Asn, Gly, Phe, Pro, Tyr, Cys, Arg, Asp, Glu, His, Lys, or Trp
  misc_feature (10)..(10): Xaa can be Lys, Phe, Trp, Tyr, Val, Ile, Ala, Leu, Met, Thr, Arg, Ser, Gly, Cys, Pro, Asn, or Asp
MXSGIGRFYX

SEQ ID NO: 49750 - protein, 10 aa, Artificial Sequence
  Description of Artificial Sequence: Synthetic peptide
  Seed: MIWHSNLNDA
  misc_feature (2)..(2): Xaa can be Leu, Met, Ile, Gln, Val, Thr, Ala, or Ser
  misc_feature (10)..(10): Xaa can be Val, Ile, Leu, Ala, Cys, Met, or Thr
MXWHSNLNDX

SEQ ID NO: 49751 - protein, 8 aa, Artificial Sequence
  Description of Artificial Sequence: Synthetic peptide
  Seed: MLQNSQVF
  misc_feature (2)..(2): Xaa can be Gln, Met, Lys, Arg, His, Leu, Phe, Tyr, Ala, Glu, Ile, Ser, Thr, Trp, Val, or Asn
  misc_feature (8)..(8): Xaa can be Phe, Tyr, Met, Leu, Trp, Ile, or Val
MXQNSQVX

SEQ ID NO: 49752 - protein, 9 aa, Artificial Sequence
  Description of Artificial Sequence: Synthetic peptide
  Seed: MLQNSQVFS
  misc_feature (2)..(2): Xaa can be Leu, Met, Ile, Gln, Val, Thr, Ala, Phe, or Ser
  misc_feature (9)..(9): Xaa can be Val, Ile, Leu, Ala, Met, Cys, Phe, Ser, or Thr
MXQNSQVFX

SEQ ID NO: 49753 - protein, 10 aa, Artificial Sequence
  Description of Artificial Sequence: Synthetic peptide
  Seed: MLQNSQVFSL
  misc_feature (2)..(2): Xaa can be Met, Leu, Arg, Gln, His, Lys, Ala, Glu, Phe, Ser, Trp, Tyr, Asn, Asp, Cys, Gly, Ile, Pro, Thr, or Val
  misc_feature (10)..(10): Xaa can be Ala, Ile, Leu, Met, Phe, Tyr, Val, Trp, His, Cys, Thr, or Ser
MXQNSQVFSX

SEQ ID NO: 49754 - protein, 11 aa, Artificial Sequence
  Description of Artificial Sequence: Synthetic peptide
  Seed: MLQNSQVFSLI
  misc_feature (2)..(2): Xaa can be Leu, Met, Gln, Ile, Val, Phe, or Tyr
  misc_feature (11)..(11): Xaa can be Val, Leu, Ala, Arg, Asn, Asp, Cys, Gln, Glu, Gly, His, Ile, Lys, Met, Phe, Pro, Ser, Thr, Trp, or Tyr
MXQNSQVFSLX

SEQ ID NO: 49755 - protein, 9 aa, Artificial Sequence
  Description of Artificial Sequence: Synthetic peptide
  Seed: MMDQVREGR
  misc_feature (2)..(2): Xaa can be Ala, Ile, Met, Phe, Ser, Thr, Trp, Tyr, Val, Asn, Gln, Gly, or Leu
  misc_feature (9)..(9): Xaa can be Arg or Lys
MXDQVREGX

SEQ ID NO: 49756 - protein, 9 aa, Artificial Sequence
  Description of Artificial Sequence: Synthetic peptide
  Seed: MMDQVRESR
  misc_feature (2)..(2): Xaa can be Ala, Ile, Met, Phe, Ser, Thr, Trp, Tyr, Val, Asn, Gln, Gly, or Leu
  misc_feature (9)..(9): Xaa can be Arg or Lys
MXDQVRESX

SEQ ID NO: 49757 - protein, 10 aa, Artificial Sequence
  Description of Artificial Sequence: Synthetic peptide
  Seed: MMEDAKPEEV
  misc_feature (2)..(2): Xaa can be Leu, Met, or Ile
  misc_feature (10)..(10): Xaa can be Val, Ile, Leu, or Met
MXEDAKPEEX

SEQ ID NO: 49758 - protein, 10 aa, Artificial Sequence
  Description of Artificial Sequence: Synthetic peptide
  Seed: MMEGAKPEEV
  misc_feature (2)..(2): Xaa can be Leu or Met
  misc_feature (10)..(10): Xaa can be Ile, Leu, or Val
MXEGAKPEEX

SEQ ID NO: 49759 - protein, 10 aa, Artificial Sequence
  Description of Artificial Sequence: Synthetic peptide
  Seed: MMENAKPEDV
  misc_feature (2)..(2): Xaa can be Leu or Met
  misc_feature (10)..(10): Xaa can be Leu or Val
MXENAKPEDX

SEQ ID NO: 49760 - protein, 10 aa, Artificial Sequence
  Description of Artificial Sequence: Synthetic peptide
  Seed: MMENAKPEEV
  misc_feature (2)..(2): Xaa can be Met, Leu, or Ile
  misc_feature (10)..(10): Xaa can be Val, Ile, Leu, Met, or Ala
MXENAKPEEX

SEQ ID NO: 49761 - protein, 10 aa, Artificial Sequence
  Description of Artificial Sequence: Synthetic peptide
  Seed: MMENARPEDV
  misc_feature (2)..(2): Xaa can be Leu or Met
  misc_feature (10)..(10): Xaa can be Leu or Val
MXENARPEDX

SEQ ID NO: 49762 - protein, 10 aa, Artificial Sequence
  Description of Artificial Sequence: Synthetic peptide
  Seed: MMENARPEEV
  misc_feature (2)..(2): Xaa can be Leu or Met
  misc_feature (10)..(10): Xaa can be Ala, Ile, Leu, or Val
MXENARPEEX

SEQ ID NO: 49763 - protein, 10 aa, Artificial Sequence
  Description of Artificial Sequence: Synthetic peptide
  Seed: MMENARSEDV
  misc_feature (2)..(2): Xaa can be Leu or Met
  misc_feature (10)..(10): Xaa can be Leu or Val
MXENARSEDX

SEQ ID NO: 49764 - protein, 10 aa, Artificial Sequence
  Description of Artificial Sequence: Synthetic peptide
  Seed: MMENASPEDV
  misc_feature (2)..(2): Xaa can be Leu or Met
  misc_feature (10)..(10): Xaa can be Ile, Leu, or Val
MXENASPEDX

SEQ ID NO: 49765 - protein, 10 aa, Artificial Sequence
  Description of Artificial Sequence: Synthetic peptide
  Seed: MMENSRPEDV
  misc_feature (2)..(2): Xaa can be Leu or Met
  misc_feature (10)..(10): Xaa can be Val
MXENSRPEDX

SEQ ID NO: 49766 - protein, 10 aa, Artificial Sequence
  Description of Artificial Sequence: Synthetic peptide
  Seed: MMESAKPEDL
  misc_feature (2)..(2): Xaa can be Leu or Met
  misc_feature (10)..(10): Xaa can be Leu or Val
MXESAKPEDX

SEQ ID NO: 49767 - protein, 10 aa, Artificial Sequence
  Description of Artificial Sequence: Synthetic peptide
  Seed: MMESAKPEEV
  misc_feature (2)..(2): Xaa can be Met, Leu, or Ile
  misc_feature (10)..(10): Xaa can be Val, Ile, Leu, Met, or Ala
MXESAKPEEX

SEQ ID NO: 49768 - protein, 10 aa, Artificial Sequence
  Description of Artificial Sequence: Synthetic peptide
  Seed: MMESARPEDL
  misc_feature (2)..(2): Xaa can be Leu or Met
  misc_feature (10)..(10): Xaa can be Leu or Val
MXESARPEDX

SEQ ID NO: 49769 - protein, 10 aa, Artificial Sequence
  Description of Artificial Sequence: Synthetic peptide
  Seed: MMESARPEEV
  misc_feature (2)..(2): Xaa can be Met or Leu
  misc_feature (10)..(10): Xaa can be Ile, Leu, Met, Val, or Ala
MXESARPEEX

SEQ ID NO: 49770 - protein, 10 aa, Artificial Sequence
  Description of Artificial Sequence: Synthetic peptide
  Seed: MMESARSEDV
  misc_feature (2)..(2): Xaa can be Met or Leu
  misc_feature (10)..(10): Xaa can be Leu, Val, or Ile
MXESARSEDX

SEQ ID NO: 49771 - protein, 10 aa, Artificial Sequence
  Description of Artificial Sequence: Synthetic peptide
  Seed: MMESSRPEDV
  misc_feature (2)..(2): Xaa can be Leu or Met
  misc_feature (10)..(10): Xaa can be Leu or Val
MXESSRPEDX

SEQ ID NO: 49772 - protein, 8 aa, Artificial Sequence
  Description of Artificial Sequence: Synthetic peptide
  Seed: MMIWHSNL
  misc_feature (2)..(2): Xaa can be Gln, Met, Leu, Lys, Glu, His, Ala, Arg, Ile, Ser, Thr, Val, or Pro
  misc_feature (8)..(8): Xaa can be Phe, Tyr, Leu, Met, Ala, Ile, Val, His, Pro, Ser, Thr, or Trp
MXIWHSNX

SEQ ID NO: 49773 - protein, 11 aa, Artificial Sequence
  Description of Artificial Sequence: Synthetic peptide
  Seed: MMIWHSNLNDA
  misc_feature (2)..(2): Xaa can be Leu, Met, Gln, Ile, Phe, Tyr, or Val
  misc_feature (11)..(11): Xaa can be Val, Ala, Ile, or Leu
MXIWHSNLNDX

SEQ ID NO: 49774 - protein, 9 aa, Artificial Sequence
  Description of Artificial Sequence: Synthetic peptide
  Seed: MNNEGSYFF
  misc_feature (2)..(2): Xaa can be Pro, Met, Ala, Gln, Leu, Tyr, Ile, Ser, Thr, Val, Lys, Phe, Arg, Asn, Glu, Gly, Trp, Cys, His, or Asp
  misc_feature (9)..(9): Xaa can be Trp, Tyr, Ile, Leu, Met, Phe, Val, His, Ala, Cys, Gly, Thr, Ser, Lys, Gln, Arg, Glu, Pro, Asn, or Asp
MXNEGSYFX

SEQ ID NO: 49775 - protein, 8 aa, Artificial Sequence
  Description of Artificial Sequence: Synthetic peptide
  Seed: MQGSTLPR
  misc_feature (2)..(2): Xaa can be Asn, Gln, Ile, Leu, Met, Phe, Ser, Thr, Trp, Tyr, or Val
  misc_feature (8)..(8): Xaa can be Arg
MXGSTLPX

SEQ ID NO: 49776 - protein, 9 aa, Artificial Sequence
  Description of Artificial Sequence: Synthetic peptide
  Seed: MQGSTLPRR
  misc_feature (2)..(2): Xaa can be Gln, Ile, Leu, Met, Phe, Ser, Thr, Trp, Tyr, Val, Ala, Asn, or Gly
  misc_feature (9)..(9): Xaa can be Arg or Lys
MXGSTLPRX

SEQ ID NO: 49777 - protein, 8 aa, Artificial Sequence
  Description of Artificial Sequence: Synthetic peptide
  Seed: MRAEIIKM
  misc_feature (2)..(2): Xaa can be Arg
  misc_feature (8)..(8): Xaa can be Leu or Met
MXAEIIKX

SEQ ID NO: 49778 - protein, 9 aa, Artificial Sequence
  Description of Artificial Sequence: Synthetic peptide
  Seed: MRAEIIKMM
  misc_feature (2)..(2): Xaa can be Arg, Gln, His, Met, Ala, Lys, Tyr, Phe, Ser, Glu, Leu, Asn, Gly, Ile, Thr, or Val
  misc_feature (9)..(9): Xaa can be Phe, Tyr, Met, Leu, Ile, Val, Ala, His, Trp, Arg, Cys, or Lys
MXAEIIKMX

SEQ ID NO: 49779 - protein, 8 aa, Artificial Sequence
  Description of Artificial Sequence: Synthetic peptide
  Seed: MRAEIIRL
  misc_feature (2)..(2): Xaa can be Arg or His
  misc_feature (8)..(8): Xaa can be Leu, Ile, Met, or Phe
MXAEIIRX

SEQ ID NO: 49780 - protein, 9 aa, Artificial Sequence
  Description of Artificial Sequence: Synthetic peptide
  Seed: MRAEIIRLM
  misc_feature (2)..(2): Xaa can be Arg, Ala, His, Ser, Gln, Tyr, Lys, Met, Thr, Phe, Val, Asn, Gly, Ile, Leu, Trp, Cys, Glu, or Pro
  misc_feature (9)..(9): Xaa can be Leu, Met, Phe, Tyr, Ile, Val, Ala, His, Trp, Thr, Cys, Ser, Gly, Arg, Gln, Lys, or Pro
MXAEIIRLX

SEQ ID NO: 49781 - protein, 10 aa, Artificial Sequence
  Description of Artificial Sequence: Synthetic peptide
  Seed: MRAEIIRLME
  misc_feature (2)..(2): Xaa can be Arg or Gln
  misc_feature (10)..(10): Xaa can be Leu, Ala, Arg, Asn, Asp, Cys, Gln, Glu, Gly, His, Ile, Lys, Met, Phe, Pro, Ser, Thr, Trp, Tyr, or Val
MXAEIIRLMX

SEQ ID NO: 49782 - protein, 9 aa, Artificial Sequence
  Description of Artificial Sequence: Synthetic peptide
  Seed: MRAEIIRMM
  misc_feature (2)..(2): Xaa can be Arg, Ala, Gln, Met, Ser, Tyr, His, Lys, Phe, Thr, Val, Gly, Ile, Leu, Trp, Asn, Glu, Cys, or Pro
  misc_feature (9)..(9): Xaa can be Tyr, Met, Leu, Phe, Val, Ile, Ala, His, Trp, Cys, Thr, Arg, or Lys
MXAEIIRMX

SEQ ID NO: 49783 - protein, 9 aa, Artificial Sequence
  Description of Artificial Sequence: Synthetic peptide
  Seed: MRAEIIRVM
  misc_feature (2)..(2): Xaa can be Gln, Arg, His, Ala, Tyr, Ser, Met, Thr, Val, Lys, Phe, Ile, Leu, Glu, Pro, Trp, Asn, Cys, or Gly
  misc_feature (9)..(9): Xaa can be Ile, Leu, Met, Phe, Tyr, Val, Trp, Ala, His, Thr, Cys, Ser, Gly, Pro, Gln, Arg, Lys, or As n
MXAEIIRVX

SEQ ID NO: 49784 - protein, 9 aa, Artificial Sequence
  Description of Artificial Sequence: Synthetic peptide
  Seed: MRELILHDK
  misc_feature (2)..(2): Xaa can be Arg
  misc_feature (9)..(9): Xaa can be Lys
MXELILHDX

SEQ ID NO: 49785 - protein, 9 aa, Artificial Sequence
  Description of Artificial Sequence: Synthetic peptide
  Seed: MRELILYDK
  misc_feature (2)..(2): Xaa can be Arg
  misc_feature (9)..(9): Xaa can be Arg, Leu, or Lys
MXELILYDX

SEQ ID NO: 49786 - protein, 9 aa, Artificial Sequence
  Description of Artificial Sequence: Synthetic peptide
  Seed: MRELTLYDK
  misc_feature (2)..(2): Xaa can be Arg
  misc_feature (9)..(9): Xaa can be Lys
MXELTLYDX

SEQ ID NO: 49787 - protein, 9 aa, Artificial Sequence
  Description of Artificial Sequence: Synthetic peptide
  Seed: MRELVLYDK
  misc_feature (2)..(2): Xaa can be Arg
  misc_feature (9)..(9): Xaa can be Lys
MXELVLYDX

SEQ ID NO: 49788 - protein, 8 aa, Artificial Sequence
  Description of Artificial Sequence: Synthetic peptide
  Seed: MRIEIIRM
  misc_feature (2)..(2): Xaa can be Arg
  misc_feature (8)..(8): Xaa can be Ile, Leu, Lys, Met, Phe, or Val
MXIEIIRX

SEQ ID NO: 49789 - protein, 9 aa, Artificial Sequence
  Description of Artificial Sequence: Synthetic peptide
  Seed: MRIEIIRMM
  misc_feature (2)..(2): Xaa can be Arg, Ala, Gln, Ser, Met, Tyr, His, Lys, Thr, Val, Asn, Gly, Ile, Leu, Phe, Trp, Glu, Pro, or Cys
  misc_feature (9)..(9): Xaa can be Tyr, Met, Phe, Leu, Ile, Val, Ala, His, Trp, Thr, Cys, Gly, Arg, Gln, Lys, or Ser
MXIEIIRMX

SEQ ID NO: 49790 - protein, 10 aa, Artificial Sequence
  Description of Artificial Sequence: Synthetic peptide
  Seed: MRIEIIRMME
  misc_feature (2)..(2): Xaa can be Arg, Gln, or Lys
  misc_feature (10)..(10): Xaa can be Leu, Ala, Arg, Asn, Asp, Cys, Gln, Glu, Gly, His, Ile, Lys, Met, Phe, Pro, Ser, Thr, Trp, Tyr, or Val
MXIEIIRMMX

SEQ ID NO: 49791 - protein, 9 aa, Artificial Sequence
  Description of Artificial Sequence: Synthetic peptide
  Seed: MRKLVLYDK
  misc_feature (2)..(2): Xaa can be Arg
  misc_feature (9)..(9): Xaa can be Arg, Ile, Leu, Lys, Met, Phe, Tyr, or Val
MXKLVLYDX

SEQ ID NO: 49792 - protein, 9 aa, Artificial Sequence
  Description of Artificial Sequence: Synthetic peptide
  Seed: MRTEIIKMM
  misc_feature (2)..(2): Xaa can be Arg, Tyr, His, Gln, or Lys
  misc_feature (9)..(9): Xaa can be Leu, Ile, Met, Val, Phe, Tyr, Ala, Arg, or Lys
MXTEIIKMX

SEQ ID NO: 49793 - protein, 9 aa, Artificial Sequence
  Description of Artificial Sequence: Synthetic peptide
  Seed: MRTEIIRIM
  misc_feature (2)..(2): Xaa can be Ala, Arg, Gln, Tyr, His, Lys, Met, Phe, Ser, Thr, Gly, Ile, Leu, Trp, Val, Asn, Glu, Cys, or Pro
  misc_feature (9)..(9): Xaa can be Tyr, Leu, Met, Phe, Ile, Val, His, Ala, Trp, Cys, Thr, Arg, or Lys
MXTEIIRIX

SEQ ID NO: 49794 - protein, 8 aa, Artificial Sequence
  Description of Artificial Sequence: Synthetic peptide
  Seed: MRTEIIRL
  misc_feature (2)..(2): Xaa can be Arg
  misc_feature (8)..(8): Xaa can be Leu
MXTEIIRX

SEQ ID NO: 49795 - protein, 9 aa, Artificial Sequence
  Description of Artificial Sequence: Synthetic peptide
  Seed: MRTEIIRLM
  misc_feature (2)..(2): Xaa can be Arg, Ala, Gln, Tyr, Met, His, Ser, Thr, Gly, Ile, Leu, Lys, Phe, Val, Trp, Asn, or Glu
  misc_feature (9)..(9): Xaa can be Met, Phe, Tyr, Ile, Leu, Val, Ala, His, Trp, Cys, Thr, Arg, Gln, Gly, Lys, or Ser
MXTEIIRLX

SEQ ID NO: 49796 - protein, 10 aa, Artificial Sequence
  Description of Artificial Sequence: Synthetic peptide
  Seed: MRTEIIRLME
  misc_feature (2)..(2): Xaa can be Arg
  misc_feature (10)..(10): Xaa can be Ala, Arg, Asn, Cys, Gln, Glu, Gly, His, Ile, Leu, Lys, Met, Phe, Pro, Ser, Thr, Trp, Tyr, or Val
MXTEIIRLMX

SEQ ID NO: 49797 - protein, 9 aa, Artificial Sequence
  Description of Artificial Sequence: Synthetic peptide
  Seed: MRTEIIRMM
  misc_feature (2)..(2): Xaa can be Arg, Gln, Met, His, Ala, Lys, Ser, Tyr, Phe, Thr, Glu, Leu, Asn, Ile, Val, or Gly
  misc_feature (9)..(9): Xaa can be Tyr, Phe, Met, Leu, Val, Ile, Ala, His, Trp, Arg, Cys, or Lys
MXTEIIRMX

SEQ ID NO: 49798 - protein, 9 aa, Artificial Sequence
  Description of Artificial Sequence: Synthetic peptide
  Seed: MRTEVIRMM
  misc_feature (2)..(2): Xaa can be Arg, Gln, Met, Ala, His, Lys, Ser, Tyr, Phe, Thr, Glu, Leu, Asn, Gly, Ile, or Val
  misc_feature (9)..(9): Xaa can be Phe, Tyr, Met, Leu, Val, Ile, His, Trp, Ala, Arg, or Lys
MXTEVIRMX

SEQ ID NO: 49799 - protein, 9 aa, Artificial Sequence
  Description of Artificial Sequence: Synthetic peptide
  Seed: MSFQGRGVF
  misc_feature (2)..(2): Xaa can be Pro, Gln, Met, Tyr, Lys, Ala, Phe, His, Leu, Ser, Glu, Ile, Thr, Trp, Val, Arg, Asn, Gly, Cys, or Asp
  misc_feature (9)..(9): Xaa can be Met, Phe, Tyr, Leu, Trp, His, Ile, Val, Ala, Cys, Thr, Ser, Gly, Gln, Lys, Asn, Glu, Pro, Asp, or Arg
MXFQGRGVX

SEQ ID NO: 49800 - protein, 10 aa, Artificial Sequence
  Description of Artificial Sequence: Synthetic peptide
  Seed: MSFQGRGVFE
  misc_feature (2)..(2): Xaa can be Ala, Gln, Glu, His, Leu, Lys, Met, Ser, Thr, Arg, Val, Ile, Asn, Gly, Cys, Phe, Tyr, Pro, or Trp
  misc_feature (10)..(10): Xaa can be Phe, Tyr, Met, Trp, Leu, His, Ile, Ala, Arg, Asn, Asp, Cys, Gln, Glu, Gly, Lys, Pro, Ser, Thr, or Val
MXFQGRGVFX

SEQ ID NO: 49801 - protein, 11 aa, Artificial Sequence
  Description of Artificial Sequence: Synthetic peptide
  Seed: MSFQGRGVFEL
  misc_feature (2)..(2): Xaa can be Ser, Ala, Thr, Met, Val, Ile, Asn, Cys, Gln, Gly, His, Leu, Phe, Pro, Trp, or Tyr
  misc_feature (11)..(11): Xaa can be Trp, Tyr, Phe, Ile, Leu, Met, or Val
MXFQGRGVFEX

SEQ ID NO: 49802 - protein, 9 aa, Artificial Sequence
  Description of Artificial Sequence: Synthetic peptide
  Seed: MSFRGRGVF
  misc_feature (2)..(2): Xaa can be Gln, Met, Pro, Ala, Tyr, Glu, His, Leu, Lys, Phe, Ser, Thr, Gly, Ile, Val, Arg, Asn, Trp, Cys, or Asp
  misc_feature (9)..(9): Xaa can be Met, Phe, Tyr, Leu, Trp, Ile, His, Val, Ala, Cys, Thr, Gln, Gly, Ser, Asn, Glu, Pro, Asp, or Lys
MXFRGRGVX

SEQ ID NO: 49803 - protein, 10 aa, Artificial Sequence
  Description of Artificial Sequence: Synthetic peptide
  Seed: MSFRGRGVFE
  misc_feature (2)..(2): Xaa can be Ser, Thr, Ala, Val, Met, Gly, Ile, Leu, Gln, Asn, or Cys
  misc_feature (10)..(10): Xaa can be Trp, Tyr, Phe, Met, Leu, Ile, Ala, Arg, Asn, Asp, Cys, Gln, Glu, Gly, His, Lys, Pro, Ser, Thr, or Val
MXFRGRGVFX

SEQ ID NO: 49804 - protein, 11 aa, Artificial Sequence
  Description of Artificial Sequence: Synthetic peptide
  Seed: MSFRGRGVFEL
  misc_feature (2)..(2): Xaa can be Arg, Ala, Gln, Ser, Thr, Ile, Met, Val, Asn, Cys, Glu, Gly, His, Leu, Lys, Pro, Asp, Phe, Trp, or Tyr
  misc_feature (11)..(11): Xaa can be Leu, Met, Phe, Trp, Ile, Tyr, Val, Ala, Cys, or Thr
MXFRGRGVFEX

SEQ ID NO: 49805 - protein, 8 aa, Artificial Sequence
  Description of Artificial Sequence: Synthetic peptide
  Seed: MSKEGSYF
  misc_feature (2)..(2): Xaa can be Ala, Gln, Ser, Met, Thr, Lys, His, Leu, Phe, Tyr, Val, or Ile
  misc_feature (8)..(8): Xaa can be Phe, Tyr, Met, Leu, Trp, or Ile
MXKEGSYX

SEQ ID NO: 49806 - protein, 9 aa, Artificial Sequence
  Description of Artificial Sequence: Synthetic peptide
  Seed: MSKEGSYFF
  misc_feature (2)..(2): Xaa can be Pro, Thr, Ser, Tyr, Met, Phe, Ala, Gln, Val, Ile, Gly, Leu, Lys, Trp, Asn, His, Arg, Cys, Glu, or Asp
  misc_feature (9)..(9): Xaa can be Tyr, Met, Phe, Leu, Lys, Trp, Ala, Ile, Val, His, Ser, Gly, Arg, Cys, Thr, Asn, Gln, Glu, or Pro
MXKEGSYFX

SEQ ID NO: 49807 - protein, 10 aa, Artificial Sequence
  Description of Artificial Sequence: Synthetic peptide
  Seed: MSKEGSYFFG
  misc_feature (2)..(2): Xaa can be Thr, Ser, Met, Val, Ala, Tyr, Ile, Gln, Phe, Gly, Asn, Leu, Trp, Arg, Cys, His, or Lys
  misc_feature (10)..(10): Xaa can be Lys, Ala, Val, Ile, Leu, Met, Ser, Arg, Tyr, Gly, His, Thr, Phe, or Pro
MXKEGSYFFX

SEQ ID NO: 49808 - protein, 8 aa, Artificial Sequence
  Description of Artificial Sequence: Synthetic peptide
  Seed: MSNEGSYF
  misc_feature (2)..(2): Xaa can be Ala, Gln, Ser, Thr, Met, Val, Lys, Arg, His, Leu, Phe, Tyr, Glu, or Ile
  misc_feature (8)..(8): Xaa can be Phe, Tyr, Met, Leu, Trp, Ile, or Val
MXNEGSYX

SEQ ID NO: 49809 - protein, 10 aa, Artificial Sequence
  Description of Artificial Sequence: Synthetic peptide
  Seed: MSNEGSYFFG
  misc_feature (2)..(2): Xaa can be Ser, Ala, Thr, Met, Gly, Ile, Val, Arg, Asn, Asp, Cys, Gln, Glu, His, Leu, Lys, Phe, Pro, Trp, or Tyr
  misc_feature (10)..(10): Xaa can be Trp, Phe, Tyr, Gly, Ile, Leu, Met, Val, Ala, Arg, Asn, Asp, Cys, Gln, Glu, His, Lys, Pro, Ser, or Thr
MXNEGSYFFX

SEQ ID NO: 49810 - protein, 10 aa, Artificial Sequence
  Description of Artificial Sequence: Synthetic peptide
  Seed: MSSSTLELRS
  misc_feature (2)..(2): Xaa can be Ala, Ile, Ser, Thr, Val, Met, Arg, Asn, Asp, Cys, Gln, Glu, Gly, His, Leu, Lys, Phe, Pro, Trp, or Tyr
  misc_feature (10)..(10): Xaa can be Arg, Lys, Ala, Tyr, Asn, Asp, Cys, Gln, Glu, Gly, His, Ile, Leu, Met, Phe, Pro, Ser, Thr, Trp, or Val
MXSSTLELRX

SEQ ID NO: 49811 - protein, 10 aa, Artificial Sequence
  Description of Artificial Sequence: Synthetic peptide
  Seed: MSTRGVQIAS
  misc_feature (2)..(2): Xaa can be Arg, Lys, Tyr, Ser, Ala, Asn, Asp, Cys, Gln, Glu, Gly, His, Ile, Leu, Met, Phe, Pro, Thr, Trp, or Val
  misc_feature (10)..(10): Xaa can be Ala, Gly, Ile, Leu, Lys, Met, Ser, Tyr, Val, Thr, Arg, Phe, or Pro
MXTRGVQIAX

SEQ ID NO: 49812 - protein, 8 aa, Artificial Sequence
  Description of Artificial Sequence: Synthetic peptide
  Seed: MTIERMVL
  misc_feature (2)..(2): Xaa can be Met, Ala, Ile, Ser, Thr, Leu, Pro, Val, Gly, Arg, Asn, Gln, Phe, Lys, or Trp
  misc_feature (8)..(8): Xaa can be Leu, Met, Phe, Ile, Tyr, Val, Trp, or Ala
MXIERMVX

SEQ ID NO: 49813 - protein, 9 aa, Artificial Sequence
  Description of Artificial Sequence: Synthetic peptide
  Seed: MTIERMVLS
  misc_feature (2)..(2): Xaa can be Thr, Val, Gln, Ile, Leu, Met, Ala, Ser, Asn, Pro, Gly, Cys, Glu, Phe, Trp, Asp, Tyr, His, or Lys
  misc_feature (9)..(9): Xaa can be Arg, Lys, Val, Ile, Ala, Leu, Met, Tyr, Cys, Phe, Ser, Thr, His, Gly, Pro, Glu, Gln, or Tr p
MXIERMVLX

SEQ ID NO: 49814 - protein, 10 aa, Artificial Sequence
  Description of Artificial Sequence: Synthetic peptide
  Seed: MTIERMVLSA
  misc_feature (2)..(2): Xaa can be Leu, Met, Thr, Ile, Val, Ala, Gln, Ser, Asn, Cys, Glu, Gly, Phe, Pro, Trp, or Tyr
  misc_feature (10)..(10): Xaa can be Val, Ala, Ile, Leu, Met, Arg, Lys, Phe, Tyr, Thr, Ser, Cys, Gly, Pro, or His
MXIERMVLSX

SEQ ID NO: 49815 - protein, 11 aa, Artificial Sequence
  Description of Artificial Sequence: Synthetic peptide
  Seed: MTIERMVLSAF
  misc_feature (2)..(2): Xaa can be Pro, Thr, Gln, Met, Ser, Val, Ala, Ile, Glu, Lys, Asn, Cys, Gly, His, Arg, Asp, Leu, Phe, Trp, or Tyr
  misc_feature (11)..(11): Xaa can be Met, Phe, Tyr, Trp, Leu, Arg, Ile, Lys, His, Val, Ala, Ser, or Thr
MXIERMVLSAX

SEQ ID NO: 49816 - protein, 9 aa, Artificial Sequence
  Description of Artificial Sequence: Synthetic peptide
  Seed: MVLELIRII
  misc_feature (2)..(2): Xaa can be Gln, Leu, Met, Ala, Ile, Ser, Thr, Val, Gly, or Phe
  misc_feature (9)..(9): Xaa can be Phe, Trp, Tyr, Val, Ala, Ile, Leu, Met, Cys, Ser, or Thr
MXLELIRIX

SEQ ID NO: 49817 - protein, 10 aa, Artificial Sequence
  Description of Artificial Sequence: Synthetic peptide
  Seed: MVLELIRIIK
  misc_feature (2)..(2): Xaa can be Thr, Ala, Arg, Asn, Asp, Cys, Gln, Glu, Gly, His, Ile, Leu, Lys, Met, Phe, Pro, Ser, Trp, Tyr, or Val
  misc_feature (10)..(10): Xaa can be Arg, Lys, or Tyr
MXLELIRIIX

SEQ ID NO: 49818 - protein, 11 aa, Artificial Sequence
  Description of Artificial Sequence: Synthetic peptide
  Seed: MVLELIRIIKR
  misc_feature (2)..(2): Xaa can be Tyr, Ala, Gln, Ile, Leu, Met, Phe, Ser, Thr, Trp, or Val
  misc_feature (11)..(11): Xaa can be Arg or Lys
MXLELIRIIKX

SEQ ID NO: 49819 - protein, 9 aa, Artificial Sequence
  Description of Artificial Sequence: Synthetic peptide
  Seed: MVLELIRMI
  misc_feature (2)..(2): Xaa can be Leu, Met, Gln, Ile, Thr, Val, Ala, Ser, Gly, Phe, Cys, or Trp
  misc_feature (9)..(9): Xaa can be Val, Trp, Ile, Leu, Phe, Tyr, Ala, Met, Thr, Cys, Ser, Gly, or Pro
MXLELIRMX

SEQ ID NO: 49820 - protein, 10 aa, Artificial Sequence
  Description of Artificial Sequence: Synthetic peptide
  Seed: MVLELIRMIK
  misc_feature (2)..(2): Xaa can be Ser, Thr, Ile, Leu, Met, Val, Ala, Arg, Asn, Asp, Cys, Gln, Glu, Gly, His, Lys, Phe, Pro, Trp, or Tyr
  misc_feature (10)..(10): Xaa can be Arg, Lys, Tyr, or Ala
MXLELIRMIX

SEQ ID NO: 49821 - protein, 11 aa, Artificial Sequence
  Description of Artificial Sequence: Synthetic peptide
  Seed: MVLELIRMIKR
  misc_feature (2)..(2): Xaa can be Met, Phe, Thr, Trp, Tyr, Ala, Arg, Gln, Ile, Leu, Ser, or Val
  misc_feature (11)..(11): Xaa can be Arg or Lys
MXLELIRMIKX

SEQ ID NO: 49822 - protein, 9 aa, Artificial Sequence
  Description of Artificial Sequence: Synthetic peptide
  Seed: MVLSAFEER
  misc_feature (2)..(2): Xaa can be Met, Thr, Val, Ala, Ile, Asn, Gln, Gly, Leu, Phe, Pro, Ser, Trp, Tyr, Arg, Cys, or His
  misc_feature (9)..(9): Xaa can be Arg, Lys, Tyr, Met, or His
MXLSAFEEX

SEQ ID NO: 49823 - protein, 10 aa, Artificial Sequence
  Description of Artificial Sequence: Synthetic peptide
  Seed: MVLSAFEERR
  misc_feature (2)..(2): Xaa can be Met, Phe, Thr, Tyr, Val, Ala, Asn, Gln, Gly, Ile, Leu, Pro, Ser, Trp, Arg, Asp, Cys, Glu, His, or Lys
  misc_feature (10)..(10): Xaa can be Arg, Lys, Tyr, Ala, Asn, Asp, Cys, Gln, Glu, Gly, His, Ile, Leu, Met, Phe, Pro, Ser, Thr, Trp, or Val
MXLSAFEERX

SEQ ID NO: 49824 - protein, 9 aa, Artificial Sequence
  Description of Artificial Sequence: Synthetic peptide
  Seed: MVMELIQMI
  misc_feature (2)..(2): Xaa can be Leu, Met, Ser, Thr, Gln, Val, Ala, Ile, Pro, Asn, Gly, Phe, Trp, Tyr, Cys, Glu, Lys, Arg, Asp, or His
  misc_feature (9)..(9): Xaa can be Trp, Leu, Tyr, Val, Ile, Met, Phe, Ala, Cys, Thr, Ser, Gly, Arg, His, Lys, Pro, Asn, Glu, Asp, or Gln
MXMELIQMX

SEQ ID NO: 49825 - protein, 10 aa, Artificial Sequence
  Description of Artificial Sequence: Synthetic peptide
  Seed: MVMELIQMIK
  misc_feature (2)..(2): Xaa can be Gln, Ile, Leu, Met, Val, Thr, Ala, Ser, Phe, Arg, Asn, Asp, Cys, Glu, Gly, His, Lys, Pro, Trp, or Tyr
  misc_feature (10)..(10): Xaa can be Arg, Ile, Leu, Lys, Val, Ala, Met, Thr, Tyr, Asp, Cys, Gln, Glu, Gly, His, Phe, Pro, Ser, Trp, or Asn
MXMELIQMIX

SEQ ID NO: 49826 - protein, 11 aa, Artificial Sequence
  Description of Artificial Sequence: Synthetic peptide
  Seed: MVMELIQMIKR
  misc_feature (2)..(2): Xaa can be Thr, Ala, Ile, Leu, Met, Phe, Ser, Trp, Tyr, Val, Arg, Asn, Gln, or Gly
  misc_feature (11)..(11): Xaa can be Arg, Lys, or Tyr
MXMELIQMIKX

SEQ ID NO: 49827 - protein, 10 aa, Artificial Sequence
  Description of Artificial Sequence: Synthetic peptide
  Seed: MVMELIRMVK
  misc_feature (2)..(2): Xaa can be Gln, Ile, Leu, Met, Thr, Val, Ala, Ser, Phe, Trp, Tyr, Cys, Asn, Gly, Arg, Asp, Glu, His, Lys, or Pro
  misc_feature (10)..(10): Xaa can be Arg, Leu, Lys, Val, Ala, Ile, Tyr, His, Met, Thr, Phe, Ser, Asn, Asp, Cys, Gln, Glu, Gly, Pro, or Trp
MXMELIRMVX

SEQ ID NO: 49828 - protein, 11 aa, Artificial Sequence
  Description of Artificial Sequence: Synthetic peptide
  Seed: MVMELIRMVKR
  misc_feature (2)..(2): Xaa can be Thr, Val, Ala, Gln, Ile, Leu, Met, Phe, Ser, Trp, Tyr, Arg, Asn, Gly, His, Lys, or Pro
  misc_feature (11)..(11): Xaa can be Arg, Lys, Tyr, or His
MXMELIRMVKX

SEQ ID NO: 49829 - protein, 9 aa, Artificial Sequence
  Description of Artificial Sequence: Synthetic peptide
  Seed: MVMELVRMI
  misc_feature (2)..(2): Xaa can be Leu, Met, Thr, Val, Ala, Gln, Ile, Ser, Arg, Phe, Asn, Gly, Tyr, Cys, Glu, Lys, Pro, His, Trp, or Asp
  misc_feature (9)..(9): Xaa can be Leu, Ile, Val, Met, Phe, Tyr, Trp, Ala, Thr, Arg, Cys, Lys, Ser, His, Gly, Pro, Gln, or Gl u
MXMELVRMX

SEQ ID NO: 49830 - protein, 10 aa, Artificial Sequence
  Description of Artificial Sequence: Synthetic peptide
  Seed: MVMELVRMIK
  misc_feature (2)..(2): Xaa can be Thr, Val, Ser, Ile, Met, Ala, Tyr, Leu, Phe, Trp, Arg, Asn, Asp, Cys, Gln, Glu, Gly, His, Lys, or Pro
  misc_feature (10)..(10): Xaa can be Arg, Lys, Tyr, His, Met, Ala, Phe, Leu, Val, Ile, Ser, or Gln
MXMELVRMIX

SEQ ID NO: 49831 - protein, 11 aa, Artificial Sequence
  Description of Artificial Sequence: Synthetic peptide
  Seed: MVMELVRMIKR
  misc_feature (2)..(2): Xaa can be Thr, Val, Ala, Gln, Ile, Leu, Met, Phe, Ser, Trp, Tyr, Arg, Asn, Gly, His, or Lys
  misc_feature (11)..(11): Xaa can be Arg, Lys, or Tyr
MXMELVRMIKX

SEQ ID NO: 49832 - protein, 10 aa, Artificial Sequence
  Description of Artificial Sequence: Synthetic peptide
  Seed: MVPRGKLSTR
  misc_feature (2)..(2): Xaa can be Ile, Thr, Val, Ala, Leu, Met, Phe, Ser, Trp, Tyr, Asn, Cys, Gln, Gly, or His
  misc_feature (10)..(10): Xaa can be Arg, Lys, or Tyr
MXPRGKLSTX

SEQ ID NO: 49833 - protein, 9 aa, Artificial Sequence
  Description of Artificial Sequence: Synthetic peptide
  Seed: NAAAGLTHL
  misc_feature (2)..(2): Xaa can be Met, Thr, Ala, Ile, Ser, Val, Gln, Leu, or Asn
  misc_feature (9)..(9): Xaa can be Val, Ala, Ile, Leu, Met, Phe, Tyr, or Thr
NXAAGLTHX

SEQ ID NO: 49834 - protein, 10 aa, Artificial Sequence
  Description of Artificial Sequence: Synthetic peptide
  Seed: NAAAGLTHLM
  misc_feature (2)..(2): Xaa can be Thr, Ala, Arg, Asn, Asp, Cys, Gln, Glu, Gly, His, Ile, Leu, Lys, Met, Phe, Pro, Ser, Trp, Tyr, or Val
  misc_feature (10)..(10): Xaa can be Ala, Ile, Leu, Met, Val, or Thr
NXAAGLTHLX

SEQ ID NO: 49835 - protein, 9 aa, Artificial Sequence
  Description of Artificial Sequence: Synthetic peptide
  Seed: NAEFEDLIF
  misc_feature (2)..(2): Xaa can be Pro, Ala, Met, or Val
  misc_feature (9)..(9): Xaa can be Tyr, Met, Phe, or Leu
NXEFEDLIX

SEQ ID NO: 49836 - protein, 10 aa, Artificial Sequence
  Description of Artificial Sequence: Synthetic peptide
  Seed: NAEFEDLIFL
  misc_feature (2)..(2): Xaa can be Thr, Ala, Ile, Ser, Val, Leu, Met, Arg, Asn, Asp, Cys, Gln, Glu, Gly, His, Lys, Phe, Pro, Trp, or Tyr
  misc_feature (10)..(10): Xaa can be Ile, Leu, Met, Phe, Val, Ala, or Thr
NXEFEDLIFX

SEQ ID NO: 49837 - protein, 9 aa, Artificial Sequence
  Description of Artificial Sequence: Synthetic peptide
  Seed: NAEFEDLTF
  misc_feature (2)..(2): Xaa can be Pro, Ala, Val, Met, Ile, Ser, or Thr
  misc_feature (9)..(9): Xaa can be Tyr, Phe, Met, or Leu
NXEFEDLTX

SEQ ID NO: 49838 - protein, 10 aa, Artificial Sequence
  Description of Artificial Sequence: Synthetic peptide
  Seed: NAEFEDLTFL
  misc_feature (2)..(2): Xaa can be Ala, Arg, Lys, Met, Phe, Ser, Trp, Tyr, Asn, Asp, Cys, Gln, Glu, Gly, His, Ile, Leu, Pro, Thr, or Val
  misc_feature (10)..(10): Xaa can be Leu, Met, or Ile
NXEFEDLTFX

SEQ ID NO: 49839 - protein, 9 aa, Artificial Sequence
  Description of Artificial Sequence: Synthetic peptide
  Seed: NAEIEDLIF
  misc_feature (2)..(2): Xaa can be Ala or Pro
  misc_feature (9)..(9): Xaa can be Met, Phe, or Tyr
NXEIEDLIX

SEQ ID NO: 49840 - protein, 10 aa, Artificial Sequence
  Description of Artificial Sequence: Synthetic peptide
  Seed: NAEIEDLIFL
  misc_feature (2)..(2): Xaa can be Ala, Arg, Asn, Asp, Cys, Gln, Glu, Gly, His, Ile, Leu, Lys, Met, Phe, Pro, Ser, Thr, Trp, Tyr, or Val
  misc_feature (10)..(10): Xaa can be Leu or Met
NXEIEDLIFX

SEQ ID NO: 49841 - protein, 9 aa, Artificial Sequence
  Description of Artificial Sequence: Synthetic peptide
  Seed: NAEIEDLTF
  misc_feature (2)..(2): Xaa can be Ala, Pro, Val, Ile, Met, Ser, or Thr
  misc_feature (9)..(9): Xaa can be Tyr, Phe, or Met
NXEIEDLTX

SEQ ID NO: 49842 - protein, 10 aa, Artificial Sequence
  Description of Artificial Sequence: Synthetic peptide
  Seed: NAEIEDLTFL
  misc_feature (2)..(2): Xaa can be Arg, Ala, Asn, Asp, Cys, Gln, Glu, Gly, His, Ile, Leu, Lys, Met, Phe, Pro, Ser, Thr, Trp, Tyr, or Val
  misc_feature (10)..(10): Xaa can be Leu or Met
NXEIEDLTFX

SEQ ID NO: 49843 - protein, 9 aa, Artificial Sequence
  Description of Artificial Sequence: Synthetic peptide
  Seed: NAEVEDLIF
  misc_feature (2)..(2): Xaa can be Ala, Pro, or Val
  misc_feature (9)..(9): Xaa can be Tyr, Met, or Phe
NXEVEDLIX

SEQ ID NO: 49844 - protein, 10 aa, Artificial Sequence
  Description of Artificial Sequence: Synthetic peptide
  Seed: NAEVEDLIFL
  misc_feature (2)..(2): Xaa can be Ala, Arg, Asn, Asp, Cys, Gln, Glu, Gly, His, Ile, Leu, Lys, Met, Phe, Pro, Ser, Thr, Trp, Tyr, or Val
  misc_feature (10)..(10): Xaa can be Leu
NXEVEDLIFX

SEQ ID NO: 49845 - protein, 9 aa, Artificial Sequence
  Description of Artificial Sequence: Synthetic peptide
  Seed: NAEYEDLIF
  misc_feature (2)..(2): Xaa can be Ala, Pro, Met, or Val
  misc_feature (9)..(9): Xaa can be Tyr, Met, or Phe
NXEYEDLIX

SEQ ID NO: 49846 - protein, 10 aa, Artificial Sequence
  Description of Artificial Sequence: Synthetic peptide
  Seed: NAEYEDLIFL
  misc_feature (2)..(2): Xaa can be Ala, Arg, Asn, Asp, Cys, Gln, Glu, Gly, His, Ile, Leu, Lys, Met, Phe, Pro, Ser, Thr, Trp, Tyr, or Val
  misc_feature (10)..(10): Xaa can be Leu or Met
NXEYEDLIFX

SEQ ID NO: 49847 - protein, 9 aa, Artificial Sequence
  Description of Artificial Sequence: Synthetic peptide
  Seed: NAKPDDVSF
  misc_feature (2)..(2): Xaa can be Ala, Gln, Met, Pro, Ile, Leu, Ser, Thr, Val, Lys, Arg, Cys, Gly, or His
  misc_feature (9)..(9): Xaa can be Tyr, Phe, Met, Leu, or Val
NXKPDDVSX

SEQ ID NO: 49848 - protein, 9 aa, Artificial Sequence
  Description of Artificial Sequence: Synthetic peptide
  Seed: NAKPEDVSF
  misc_feature (2)..(2): Xaa can be Ala, Gln, Pro, Ser, Ile, Met, Val, Leu, Lys, Thr, Arg, Cys, or His
  misc_feature (9)..(9): Xaa can be Tyr, Phe, Met, Leu, or Val
NXKPEDVSX

SEQ ID NO: 49849 - protein, 9 aa, Artificial Sequence
  Description of Artificial Sequence: Synthetic peptide
  Seed: NAKPEEVSF
  misc_feature (2)..(2): Xaa can be Ala, Ser, Pro, Thr, Val, Ile, or Met
  misc_feature (9)..(9): Xaa can be Tyr, Met, Phe, Leu, or Val
NXKPEEVSX

SEQ ID NO: 49850 - protein, 10 aa, Artificial Sequence
  Description of Artificial Sequence: Synthetic peptide
  Seed: NAKPEEVSFR
  misc_feature (2)..(2): Xaa can be Ala, Ile, Met, Ser, Thr, Val, Asn, Leu, Phe, Trp, or Tyr
  misc_feature (10)..(10): Xaa can be Arg or Lys
NXKPEEVSFX

SEQ ID NO: 49851 - protein, 9 aa, Artificial Sequence
  Description of Artificial Sequence: Synthetic peptide
  Seed: NANDIRASV
  misc_feature (2)..(2): Xaa can be Thr, Ala, Ile, Ser, Val, Met, Gly, Gln, Leu, or Asn
  misc_feature (9)..(9): Xaa can be Val, Met, Phe, Tyr, Ile, Leu, Ala, Trp, Cys, Ser, or Thr
NXNDIRASX

SEQ ID NO: 49852 - protein, 11 aa, Artificial Sequence
  Description of Artificial Sequence: Synthetic peptide
  Seed: NANDIRASVGR
  misc_feature (2)..(2): Xaa can be Ala, Ile, Ser, Thr, Val, Asn, Leu, Met, Phe, Trp, or Tyr
  misc_feature (11)..(11): Xaa can be Arg or Lys
NXNDIRASVGX

SEQ ID NO: 49853 - protein, 9 aa, Artificial Sequence
  Description of Artificial Sequence: Synthetic peptide
  Seed: NANEIRASV
  misc_feature (2)..(2): Xaa can be Thr, Ala, Ser, Val, Ile, Met, Gly, Leu, Gln, or Asn
  misc_feature (9)..(9): Xaa can be Val, Met, Ile, Leu, Phe, Tyr, Ala, Trp, Cys, Ser, or Thr
NXNEIRASX

SEQ ID NO: 49854 - protein, 11 aa, Artificial Sequence
  Description of Artificial Sequence: Synthetic peptide
  Seed: NANEIRASVGK
  misc_feature (2)..(2): Xaa can be Ala, Ile, Ser, Thr, Val, Leu, Met, Phe, Trp, or Tyr
  misc_feature (11)..(11): Xaa can be Arg or Lys
NXNEIRASVGX

SEQ ID NO: 49855 - protein, 9 aa, Artificial Sequence
  Description of Artificial Sequence: Synthetic peptide
  Seed: NARPEDVSF
  misc_feature (2)..(2): Xaa can be Gln, Ala, Pro, Met, Ser, Thr, Ile, Leu, Lys, Val, Arg, His, Cys, Glu, Gly, or Phe
  misc_feature (9)..(9): Xaa can be Tyr, Phe, Met, Leu, Ile, Trp, Val, or His
NXRPEDVSX

SEQ ID NO: 49856 - protein, 9 aa, Artificial Sequence
  Description of Artificial Sequence: Synthetic peptide
  Seed: NARPEEVSF
  misc_feature (2)..(2): Xaa can be Ala, Gln, Met, Pro, Ser, Thr, Leu, Lys, Val, Arg, His, or Ile
  misc_feature (9)..(9): Xaa can be Phe, Tyr, Met, Leu, Ile, or Val
NXRPEEVSX

SEQ ID NO: 49857 - protein, 9 aa, Artificial Sequence
  Description of Artificial Sequence: Synthetic peptide
  Seed: NARSEDVSF
  misc_feature (2)..(2): Xaa can be Gln, Met, Pro, Ala, Ser, Ile, Leu, Lys, Thr, Val, Arg, Glu, His, Cys, or Phe
  misc_feature (9)..(9): Xaa can be Tyr, Phe, Met, Leu, Trp, His, or Ile
NXRSEDVSX

SEQ ID NO: 49858 - protein, 9 aa, Artificial Sequence
  Description of Artificial Sequence: Synthetic peptide
  Seed: NASPEDVSF
  misc_feature (2)..(2): Xaa can be Pro, Ala, Ser, Ile, Leu, Met, Thr, Val, Phe, Cys, Gln, or Gly
  misc_feature (9)..(9): Xaa can be Tyr, Phe, Met, Trp, Leu, His, Ala, Ile, or Val
NXSPEDVSX

SEQ ID NO: 49859 - protein, 9 aa, Artificial Sequence
  Description of Artificial Sequence: Synthetic peptide
  Seed: NATEIRASV
  misc_feature (2)..(2): Xaa can be Thr, Val, Ala, Ser, Ile, Met, Gly, Leu, or Asn
  misc_feature (9)..(9): Xaa can be Val, Ile, Met, Leu, Phe, Tyr, Ala, Thr, Cys, or Ser
NXTEIRASX

SEQ ID NO: 49860 - protein, 11 aa, Artificial Sequence
  Description of Artificial Sequence: Synthetic peptide
  Seed: NATEIRASVGK
  misc_feature (2)..(2): Xaa can be Ala, Ile, Met, Ser, Thr, Val, Asn, Asp, Glu, His, Leu, Phe, Trp, or Tyr
  misc_feature (11)..(11): Xaa can be Arg or Lys
NXTEIRASVGX

SEQ ID NO: 49861 - protein, 9 aa, Artificial Sequence
  Description of Artificial Sequence: Synthetic peptide
  Seed: NATEIRSSV
  misc_feature (2)..(2): Xaa can be Thr, Ser, Val, Ala, Met, Gly, Ile, Asn, or Leu
  misc_feature (9)..(9): Xaa can be Val, Met, Phe, Tyr, Ile, Leu, Ala, or Thr
NXTEIRSSX

SEQ ID NO: 49862 - protein, 11 aa, Artificial Sequence
  Description of Artificial Sequence: Synthetic peptide
  Seed: NATEIRSSVGR
  misc_feature (2)..(2): Xaa can be Ala, Ile, Ser, Thr, Val, Asn, Asp, Glu, His, Leu, Met, Phe, Trp, or Tyr
  misc_feature (11)..(11): Xaa can be Arg or Lys
NXTEIRSSVGX

SEQ ID NO: 49863 - protein, 10 aa, Artificial Sequence
  Description of Artificial Sequence: Synthetic peptide
  Seed: NATNPIVPSF
  misc_feature (2)..(2): Xaa can be Ala, Arg, Pro, Ile, Leu, Lys, Met, Phe, Ser, Tyr, Val, Cys, Gln, Gly, His, Thr, Trp, Asn, Asp, or Glu
  misc_feature (10)..(10): Xaa can be Trp, Phe, Tyr, or Met
NXTNPIVPSX

SEQ ID NO: 49864 - protein, 9 aa, Artificial Sequence
  Description of Artificial Sequence: Synthetic peptide
  Seed: NAYERMCNI
  misc_feature (2)..(2): Xaa can be Leu, Met, Ile, Thr, Ala, Val, Ser, Gln, Pro, Gly, or Asn
  misc_feature (9)..(9): Xaa can be Leu, Met, Val, Ile, Phe, Ala, Tyr, Thr, Cys, Ser, Trp, or Gly
NXYERMCNX

SEQ ID NO: 49865 - protein, 10 aa, Artificial Sequence
  Description of Artificial Sequence: Synthetic peptide
  Seed: NAYERMCNIL
  misc_feature (2)..(2): Xaa can be Ala or Ser
  misc_feature (10)..(10): Xaa can be Met, Phe, Tyr, or Leu
NXYERMCNIX

SEQ ID NO: 49866 - protein, 11 aa, Artificial Sequence
  Description of Artificial Sequence: Synthetic peptide
  Seed: NAYERMCNILK
  misc_feature (2)..(2): Xaa can be Ile, Thr, Val, Ala, Leu, Met, or Ser
  misc_feature (11)..(11): Xaa can be Arg, Lys, or Tyr
NXYERMCNILX

SEQ ID NO: 49867 - protein, 10 aa, Artificial Sequence
  Description of Artificial Sequence: Synthetic peptide
  Seed: NEGRLIQNSI
  misc_feature (2)..(2): Xaa can be Glu
  misc_feature (10)..(10): Xaa can be Ile, Leu, or Met
NXGRLIQNSX

SEQ ID NO: 49868 - protein, 11 aa, Artificial Sequence
  Description of Artificial Sequence: Synthetic peptide
  Seed: NEGSYFFGDSA
  misc_feature (2)..(2): Xaa can be Glu
  misc_feature (11)..(11): Xaa can be Ala
NXGSYFFGDSX

SEQ ID NO: 49869 - protein, 10 aa, Artificial Sequence
  Description of Artificial Sequence: Synthetic peptide
  Seed: NEIRASVGKM
  misc_feature (2)..(2): Xaa can be Glu
  misc_feature (10)..(10): Xaa can be Ile, Leu, or Met
NXIRASVGKX

SEQ ID NO: 49870 - protein, 10 aa, Artificial Sequence
  Description of Artificial Sequence: Synthetic peptide
  Seed: NEIRASVGRM
  misc_feature (2)..(2): Xaa can be Glu
  misc_feature (10)..(10): Xaa can be Leu or Met
NXIRASVGRX

SEQ ID NO: 49871 - protein, 9 aa, Artificial Sequence
  Description of Artificial Sequence: Synthetic peptide
  Seed: NENMDAIVS
  misc_feature (2)..(2): Xaa can be Glu
  misc_feature (9)..(9): Xaa can be Ala, Ile, Pro, Ser, Thr, or Val
NXNMDAIVX

SEQ ID NO: 49872 - protein, 10 aa, Artificial Sequence
  Description of Artificial Sequence: Synthetic peptide
  Seed: NENMDAIVSS
  misc_feature (2)..(2): Xaa can be Glu
  misc_feature (10)..(10): Xaa can be Ala, Ile, Pro, Ser, Thr, or Val
NXNMDAIVSX

SEQ ID NO: 49873 - protein, 9 aa, Artificial Sequence
  Description of Artificial Sequence: Synthetic peptide
  Seed: NENMDSIVS
  misc_feature (2)..(2): Xaa can be Glu
  misc_feature (9)..(9): Xaa can be Ala, Ile, Pro, Ser, Thr, or Val
NXNMDSIVX

SEQ ID NO: 49874 - protein, 10 aa, Artificial Sequence
  Description of Artificial Sequence: Synthetic peptide
  Seed: NENMDSIVSS
  misc_feature (2)..(2): Xaa can be Glu
  misc_feature (10)..(10): Xaa can be Ala, Ile, Pro, Ser, Thr, or Val
NXNMDSIVSX

SEQ ID NO: 49875 - protein, 9 aa, Artificial Sequence
  Description of Artificial Sequence: Synthetic peptide
  Seed: NENMDTMVS
  misc_feature (2)..(2): Xaa can be Glu
  misc_feature (9)..(9): Xaa can be Ala, Ile, Pro, Ser, Thr, or Val
NXNMDTMVX

SEQ ID NO: 49876 - protein, 10 aa, Artificial Sequence
  Description of Artificial Sequence: Synthetic peptide
  Seed: NENMETMDSI
  misc_feature (2)..(2): Xaa can be Glu
  misc_feature (10)..(10): Xaa can be Ala, Ile, Leu, Met, Phe, Trp, Tyr, or Val
NXNMETMDSX

SEQ ID NO: 49877 - protein, 10 aa, Artificial Sequence
  Description of Artificial Sequence: Synthetic peptide
  Seed: NENPAHKSQL
  misc_feature (2)..(2): Xaa can be Glu
  misc_feature (10)..(10): Xaa can be Leu
NXNPAHKSQX

SEQ ID NO: 49878 - protein, 11 aa, Artificial Sequence
  Description of Artificial Sequence: Synthetic peptide
  Seed: NENPAHKSQLA
  misc_feature (2)..(2): Xaa can be Glu
  misc_feature (11)..(11): Xaa can be Ala
NXNPAHKSQLX

SEQ ID NO: 49879 - protein, 10 aa, Artificial Sequence
  Description of Artificial Sequence: Synthetic peptide
  Seed: NENPVHKSQL
  misc_feature (2)..(2): Xaa can be Glu
  misc_feature (10)..(10): Xaa can be Leu
NXNPVHKSQX

SEQ ID NO: 49880 - protein, 10 aa, Artificial Sequence
  Description of Artificial Sequence: Synthetic peptide
  Seed: NENSAHKSQL
  misc_feature (2)..(2): Xaa can be Glu
  misc_feature (10)..(10): Xaa can be Leu
NXNSAHKSQX

SEQ ID NO: 49881 - protein, 9 aa, Artificial Sequence
  Description of Artificial Sequence: Synthetic peptide
  Seed: NERRTRIAY
  misc_feature (2)..(2): Xaa can be Gln, Glu, Met, His, Leu, Lys, Ala, Arg, Ile, Ser, Thr, Val, or Asn
  misc_feature (9)..(9): Xaa can be Tyr, Phe, Met, Leu, Trp, Ile, Val, or His
NXRRTRIAX

SEQ ID NO: 49882 - protein, 9 aa, Artificial Sequence
  Description of Artificial Sequence: Synthetic peptide
  Seed: NFEKEGYSL
  misc_feature (2)..(2): Xaa can be Phe or Tyr
  misc_feature (9)..(9): Xaa can be Leu, Met, Phe, or Tyr
NXEKEGYSX

SEQ ID NO: 49883 - protein, 9 aa, Artificial Sequence
  Description of Artificial Sequence: Synthetic peptide
  Seed: NFIRGTKVI
  misc_feature (2)..(2): Xaa can be Tyr, Phe, Trp, Met, Ala, His, Leu, or Val
  misc_feature (9)..(9): Xaa can be Met, Phe, Tyr, Leu, Ile, Val, Trp, Ala, or His
NXIRGTKVX

SEQ ID NO: 49884 - protein, 11 aa, Artificial Sequence
  Description of Artificial Sequence: Synthetic peptide
  Seed: NFIRGTKVIPR
  misc_feature (2)..(2): Xaa can be Ala, Arg, Gln, Ile, Leu, Lys, Met, Phe, Ser, Thr, Tyr, or Val
  misc_feature (11)..(11): Xaa can be Arg
NXIRGTKVIPX

SEQ ID NO: 49885 - protein, 11 aa, Artificial Sequence
  Description of Artificial Sequence: Synthetic peptide
  Seed: NFIRGTKVVPR
  misc_feature (2)..(2): Xaa can be Ala, Arg, Asn, Gln, Ile, Leu, Lys, Met, Phe, Ser, Thr, Trp, Tyr, or Val
  misc_feature (11)..(11): Xaa can be Arg
NXIRGTKVVPX

SEQ ID NO: 49886 - protein, 9 aa, Artificial Sequence
  Description of Artificial Sequence: Synthetic peptide
  Seed: NFIRGTRVV
  misc_feature (2)..(2): Xaa can be Tyr, Phe, Trp, Ala, His, Ile, Leu, Met, Val, Ser, Thr, Arg, or Gln
  misc_feature (9)..(9): Xaa can be Met, Phe, Tyr, Leu, Ile, Trp, Val, Ala, His, Cys, or Thr
NXIRGTRVX

SEQ ID NO: 49887 - protein, 11 aa, Artificial Sequence
  Description of Artificial Sequence: Synthetic peptide
  Seed: NFIRGTRVVPR
  misc_feature (2)..(2): Xaa can be Tyr, Ala, Arg, Asn, Gln, Ile, Leu, Lys, Met, Phe, Ser, Thr, Trp, or Val
  misc_feature (11)..(11): Xaa can be Arg or Lys
NXIRGTRVVPX

SEQ ID NO: 49888 - protein, 9 aa, Artificial Sequence
  Description of Artificial Sequence: Synthetic peptide
  Seed: NFWRGDNGR
  misc_feature (2)..(2): Xaa can be Phe, Tyr, Ala, Asn, Gln, Ile, Leu, Met, Ser, Thr, Trp, or Val
  misc_feature (9)..(9): Xaa can be Arg or Lys
NXWRGDNGX

SEQ ID NO: 49889 - protein, 9 aa, Artificial Sequence
  Description of Artificial Sequence: Synthetic peptide
  Seed: NFWRGENER
  misc_feature (2)..(2): Xaa can be Met, Phe, Thr, Tyr, Ala, Asn, Gln, Gly, Ile, Leu, Ser, Trp, or Val
  misc_feature (9)..(9): Xaa can be Arg or Lys
NXWRGENEX

SEQ ID NO: 49890 - protein, 10 aa, Artificial Sequence
  Description of Artificial Sequence: Synthetic peptide
  Seed: NFWRGENERR
  misc_feature (2)..(2): Xaa can be Ala, Ile, Leu, Met, Phe, Ser, Thr, Tyr, or Val
  misc_feature (10)..(10): Xaa can be Arg
NXWRGENERX

SEQ ID NO: 49891 - protein, 9 aa, Artificial Sequence
  Description of Artificial Sequence: Synthetic peptide
  Seed: NFWRGENGR
  misc_feature (2)..(2): Xaa can be Met, Phe, Tyr, Ala, Asn, Gln, Ile, Leu, Ser, Thr, Trp, or Val
  misc_feature (9)..(9): Xaa can be Arg or Lys
NXWRGENGX

SEQ ID NO: 49892 - protein, 10 aa, Artificial Sequence
  Description of Artificial Sequence: Synthetic peptide
  Seed: NFWRGENGRR
  misc_feature (2)..(2): Xaa can be Ala, Ile, Leu, Met, Phe, Ser, Thr, Tyr, or Val
  misc_feature (10)..(10): Xaa can be Arg
NXWRGENGRX

SEQ ID NO: 49893 - protein, 9 aa, Artificial Sequence
  Description of Artificial Sequence: Synthetic peptide
  Seed: NGDDATAGL
  misc_feature (2)..(2): Xaa can be Ala, Ile, Leu, Met, Ser, Thr, Val, Gln, Gly, or Cys
  misc_feature (9)..(9): Xaa can be Leu, Phe, Met, Ile, or Val
NXDDATAGX

SEQ ID NO: 49894 - protein, 10 aa, Artificial Sequence
  Description of Artificial Sequence: Synthetic peptide
  Seed: NGKWMRELIL
  misc_feature (2)..(2): Xaa can be Met, Leu, Pro, Ala, Ile, Gln, Gly, Phe, or Val
  misc_feature (10)..(10): Xaa can be Leu, Met, Ile, Phe, Ala, or Val
NXKWMRELIX

SEQ ID NO: 49895 - protein, 10 aa, Artificial Sequence
  Description of Artificial Sequence: Synthetic peptide
  Seed: NGKWMRELVL
  misc_feature (2)..(2): Xaa can be Leu, Met, Ala, Ile, Pro, Arg, Gln, Gly, Phe, Ser, Val, Asn, Cys, Lys, Thr, Trp, or Tyr
  misc_feature (10)..(10): Xaa can be Leu, Met, Ile, Phe, Val, or Ala
NXKWMRELVX

SEQ ID NO: 49896 - protein, 9 aa, Artificial Sequence
  Description of Artificial Sequence: Synthetic peptide
  Seed: NGLAVASGY
  misc_feature (2)..(2): Xaa can be Ala, Asn, Gln, Gly, Ile, Leu, Met, Phe, Ser, Thr, Tyr, or Val
  misc_feature (9)..(9): Xaa can be Tyr
NXLAVASGX

SEQ ID NO: 49897 - protein, 9 aa, Artificial Sequence
  Description of Artificial Sequence: Synthetic peptide
  Seed: NGRLTRIAY
  misc_feature (2)..(2): Xaa can be Gln, Met, Lys, Ala, Glu, His, Leu, Ser, Arg, Asn, Gly, Ile, Thr, or Val
  misc_feature (9)..(9): Xaa can be Phe, Tyr, Met, Leu, Trp, His, Ile, or Val
NXRLTRIAX

SEQ ID NO: 49898 - protein, 11 aa, Artificial Sequence
  Description of Artificial Sequence: Synthetic peptide
  Seed: NGRLTRIAYER
  misc_feature (2)..(2): Xaa can be Phe, Tyr, Ala, Arg, Asn, Asp, Cys, Gln, Glu, Gly, His, Ile, Leu, Lys, Met, Pro, Ser, Thr, Trp, or Val
  misc_feature (11)..(11): Xaa can be Arg or Lys
NXRLTRIAYEX

SEQ ID NO: 49899 - protein, 9 aa, Artificial Sequence
  Description of Artificial Sequence: Synthetic peptide
  Seed: NGRRTRVAY
  misc_feature (2)..(2): Xaa can be Gln, Met, Glu, His, Leu, Lys, Ala, Arg, Ile, Ser, Thr, Val, Asn, or Gly
  misc_feature (9)..(9): Xaa can be Tyr, Phe, Met, Leu, Trp, His, Ile, or Val
NXRRTRVAX

SEQ ID NO: 49900 - protein, 10 aa, Artificial Sequence
  Description of Artificial Sequence: Synthetic peptide
  Seed: NILKGKFQTA
  misc_feature (2)..(2): Xaa can be Met, Ala, Ile, Leu, Phe, Pro, Trp, Tyr, Arg, Asn, Asp, Cys, Gln, Glu, Gly, His, Lys, Ser, Thr, or Val
  misc_feature (10)..(10): Xaa can be Ile, Leu, Met, Phe, Val, Ala, or Cys
NXLKGKFQTX

SEQ ID NO: 49901 - protein, 9 aa, Artificial Sequence
  Description of Artificial Sequence: Synthetic peptide
  Seed: NLNDATYQR
  misc_feature (2)..(2): Xaa can be Ala, Ile, Ser, Thr, Val, Asn, Gly, Leu, Met, Phe, Trp, Tyr, Cys, Gln, or Pro
  misc_feature (9)..(9): Xaa can be Arg, Lys, or Tyr
NXNDATYQX

SEQ ID NO: 49902 - protein, 11 aa, Artificial Sequence
  Description of Artificial Sequence: Synthetic peptide
  Seed: NLNDATYQRTR
  misc_feature (2)..(2): Xaa can be Ala, Ile, Leu, Met, Phe, Ser, Thr, Tyr, or Val
  misc_feature (11)..(11): Xaa can be Arg
NXNDATYQRTX

SEQ ID NO: 49903 - protein, 9 aa, Artificial Sequence
  Description of Artificial Sequence: Synthetic peptide
  Seed: NLNDSTYQR
  misc_feature (2)..(2): Xaa can be Ala, Ile, Ser, Thr, Val, Asn, Gly, Leu, Met, Phe, Trp, Tyr, Cys, Gln, or Pro
  misc_feature (9)..(9): Xaa can be Arg, Lys, or Tyr
NXNDSTYQX

SEQ ID NO: 49904 - protein, 11 aa, Artificial Sequence
  Description of Artificial Sequence: Synthetic peptide
  Seed: NLNDSTYQRTR
  misc_feature (2)..(2): Xaa can be Ala, Ile, Leu, Met, Phe, Thr, Tyr, or Val
  misc_feature (11)..(11): Xaa can be Arg
NXNDSTYQRTX

SEQ ID NO: 49905 - protein, 9 aa, Artificial Sequence
  Description of Artificial Sequence: Synthetic peptide
  Seed: NLNDTTYQR
  misc_feature (2)..(2): Xaa can be Ala, Ile, Ser, Thr, Val, Asn, Gly, Leu, Met, Phe, Trp, Tyr, Cys, Gln, or Pro
  misc_feature (9)..(9): Xaa can be Arg, Lys, or Tyr
NXNDTTYQX

SEQ ID NO: 49906 - protein, 11 aa, Artificial Sequence
  Description of Artificial Sequence: Synthetic peptide
  Seed: NLNDTTYQRTR
  misc_feature (2)..(2): Xaa can be Ala, Ile, Leu, Met, Phe, Ser, Thr, Tyr, or Val
  misc_feature (11)..(11): Xaa can be Arg
NXNDTTYQRTX

SEQ ID NO: 49907 - protein, 10 aa, Artificial Sequence
  Description of Artificial Sequence: Synthetic peptide
  Seed: NLPFDKATIM
  misc_feature (2)..(2): Xaa can be Ala, Cys, His, Leu, Met, Phe, Trp, Tyr, Arg, Gln, Ile, Pro, Ser, Val, Asn, Asp, Glu, Gly, Lys, or Thr
  misc_feature (10)..(10): Xaa can be Phe, Tyr, Leu, or Met
NXPFDKATIX

SEQ ID NO: 49908 - protein, 9 aa, Artificial Sequence
  Description of Artificial Sequence: Synthetic peptide
  Seed: NLPFDKPTI
  misc_feature (2)..(2): Xaa can be Leu or Met
  misc_feature (9)..(9): Xaa can be Val, Ile, or Leu
NXPFDKPTX

SEQ ID NO: 49909 - protein, 10 aa, Artificial Sequence
  Description of Artificial Sequence: Synthetic peptide
  Seed: NLPFDKSTIM
  misc_feature (2)..(2): Xaa can be Met, Arg, Phe, Ala, Asn, Asp, Cys, Gln, Glu, Gly, His, Ile, Leu, Lys, Pro, Ser, Thr, Trp, Tyr, or Val
  misc_feature (10)..(10): Xaa can be Leu, Met, Phe, Tyr, Ile, or Val
NXPFDKSTIX

SEQ ID NO: 49910 - protein, 9 aa, Artificial Sequence
  Description of Artificial Sequence: Synthetic peptide
  Seed: NLPFDKSTV
  misc_feature (2)..(2): Xaa can be Leu or Met
  misc_feature (9)..(9): Xaa can be Val
NXPFDKSTX

SEQ ID NO: 49911 - protein, 10 aa, Artificial Sequence
  Description of Artificial Sequence: Synthetic peptide
  Seed: NLPFDKSTVM
  misc_feature (2)..(2): Xaa can be Met, Phe, Tyr, Ala, Arg, His, Ile, Leu, Lys, Pro, Ser, Trp, Val, Asn, Asp, Cys, Gln, Glu, Gly, or Thr
  misc_feature (10)..(10): Xaa can be Ile, Leu, Met, Phe, Tyr, Val, Ala, or Trp
NXPFDKSTVX

SEQ ID NO: 49912 - protein, 10 aa, Artificial Sequence
  Description of Artificial Sequence: Synthetic peptide
  Seed: NLPFDKTTIM
  misc_feature (2)..(2): Xaa can be Met, Arg, Tyr, Ala, Asn, Asp, Cys, Gln, Glu, Gly, His, Ile, Leu, Lys, Phe, Pro, Ser, Thr, Trp, or Val
  misc_feature (10)..(10): Xaa can be Leu, Met, Phe, Tyr, Ile, or Val
NXPFDKTTIX

SEQ ID NO: 49913 - protein, 9 aa, Artificial Sequence
  Description of Artificial Sequence: Synthetic peptide
  Seed: NLPFDRPTI
  misc_feature (2)..(2): Xaa can be Leu or Met
  misc_feature (9)..(9): Xaa can be Val, Ile, or Leu
NXPFDRPTX

SEQ ID NO: 49914 - protein, 10 aa, Artificial Sequence
  Description of Artificial Sequence: Synthetic peptide
  Seed: NLPFDRPTIM
  misc_feature (2)..(2): Xaa can be Arg, Met, Phe, Pro, Trp, Tyr, Ala, Asn, Asp, Cys, Gln, Glu, Gly, His, Ile, Leu, Lys, Ser, Thr, or Val
  misc_feature (10)..(10): Xaa can be Leu, Met, Phe, or Ile
NXPFDRPTIX

SEQ ID NO: 49915 - protein, 10 aa, Artificial Sequence
  Description of Artificial Sequence: Synthetic peptide
  Seed: NLPFDRSTIM
  misc_feature (2)..(2): Xaa can be Met, Arg, Phe, Pro, Trp, Tyr, Ala, Asn, Asp, Cys, Gln, Glu, Gly, His, Ile, Leu, Lys, Ser, Thr, or Val
  misc_feature (10)..(10): Xaa can be Ile, Leu, Met, Phe, Tyr, Val, or Trp
NXPFDRSTIX

SEQ ID NO: 49916 - protein, 10 aa, Artificial Sequence
  Description of Artificial Sequence: Synthetic peptide
  Seed: NLPFDRTTIM
  misc_feature (2)..(2): Xaa can be Met, Arg, His, Lys, Phe, Pro, Ser, Trp, Tyr, Ala, Asn, Asp, Cys, Gln, Glu, Gly, Ile, Leu, Thr, or Val
  misc_feature (10)..(10): Xaa can be Ile, Leu, Met, Phe, Tyr, Val, or Ala
NXPFDRTTIX

SEQ ID NO: 49917 - protein, 9 aa, Artificial Sequence
  Description of Artificial Sequence: Synthetic peptide
  Seed: NLPFDRTTV
  misc_feature (2)..(2): Xaa can be Leu or Met
  misc_feature (9)..(9): Xaa can be Val
NXPFDRTTX

SEQ ID NO: 49918 - protein, 10 aa, Artificial Sequence
  Description of Artificial Sequence: Synthetic peptide
  Seed: NLPFDRTTVM
  misc_feature (2)..(2): Xaa can be Leu, Met, Phe, Tyr, Arg, Trp, Ala, Asn, Asp, Cys, Gln, Glu, Gly, His, Ile, Lys, Pro, Ser, Thr, or Val
  misc_feature (10)..(10): Xaa can be Ile, Leu, Met, Phe, Tyr, Val, Ala, Trp, or Thr
NXPFDRTTVX

SEQ ID NO: 49919 - protein, 11 aa, Artificial Sequence
  Description of Artificial Sequence: Synthetic peptide
  Seed: NLPFDRTTVMA
  misc_feature (2)..(2): Xaa can be Met, Leu, Phe, Trp, or Tyr
  misc_feature (11)..(11): Xaa can be Ala or Val
NXPFDRTTVMX

SEQ ID NO: 49920 - protein, 10 aa, Artificial Sequence
  Description of Artificial Sequence: Synthetic peptide
  Seed: NLPFEKATIM
  misc_feature (2)..(2): Xaa can be Arg, His, Ile, Leu, Met, Phe, Trp, Tyr, Ala, Asn, Asp, Cys, Gln, Glu, Gly, Lys, Pro, Ser, Thr, or Val
  misc_feature (10)..(10): Xaa can be Met, Phe, Tyr, or Leu
NXPFEKATIX

SEQ ID NO: 49921 - protein, 9 aa, Artificial Sequence
  Description of Artificial Sequence: Synthetic peptide
  Seed: NLPFEKSTV
  misc_feature (2)..(2): Xaa can be Leu or Met
  misc_feature (9)..(9): Xaa can be Val
NXPFEKSTX

SEQ ID NO: 49922 - protein, 10 aa, Artificial Sequence
  Description of Artificial Sequence: Synthetic peptide
  Seed: NLPFEKSTVM
  misc_feature (2)..(2): Xaa can be Met, Phe, Tyr, Ala, Arg, Asn, Asp, Cys, Gln, Glu, Gly, His, Ile, Leu, Lys, Pro, Ser, Thr, Trp, or Val
  misc_feature (10)..(10): Xaa can be Ile, Leu, Met, Phe, Tyr, Val, Ala, or Trp
NXPFEKSTVX

SEQ ID NO: 49923 - protein, 10 aa, Artificial Sequence
  Description of Artificial Sequence: Synthetic peptide
  Seed: NLPFERATIM
  misc_feature (2)..(2): Xaa can be Arg, Met, Pro, Trp, Tyr, Ala, Asn, Asp, Cys, Gln, Glu, Gly, His, Ile, Leu, Lys, Phe, Ser, Thr, or Val
  misc_feature (10)..(10): Xaa can be Leu, Met, Phe, Tyr, Ile, or Val
NXPFERATIX

SEQ ID NO: 49924 - protein, 9 aa, Artificial Sequence
  Description of Artificial Sequence: Synthetic peptide
  Seed: NLPFERATV
  misc_feature (2)..(2): Xaa can be Thr, Val, Ala, Ile, Leu, Met, or Ser
  misc_feature (9)..(9): Xaa can be Val, Ile, Ala, or Leu
NXPFERATX

SEQ ID NO: 49925 - protein, 10 aa, Artificial Sequence
  Description of Artificial Sequence: Synthetic peptide
  Seed: NLPFERATVM
  misc_feature (2)..(2): Xaa can be Met, Arg, Phe, Ala, Asn, Asp, Cys, Gln, Glu, Gly, His, Ile, Leu, Lys, Pro, Ser, Thr, Trp, Tyr, or Val
  misc_feature (10)..(10): Xaa can be Ile, Leu, Met, Phe, Tyr, Val, Ala, or Trp
NXPFERATVX

SEQ ID NO: 49926 - protein, 9 aa, Artificial Sequence
  Description of Artificial Sequence: Synthetic peptide
  Seed: NLPFERSTI
  misc_feature (2)..(2): Xaa can be Ala, Ser, Leu, Met, Thr, Ile, Val, or Gly
  misc_feature (9)..(9): Xaa can be Leu, Met, Ile, or Val
NXPFERSTX

SEQ ID NO: 49927 - protein, 10 aa, Artificial Sequence
  Description of Artificial Sequence: Synthetic peptide
  Seed: NLPFERSTIM
  misc_feature (2)..(2): Xaa can be Met, Arg, Lys, Phe, Pro, Ser, Trp, Tyr, Ala, Asn, Asp, Cys, Gln, Glu, Gly, His, Ile, Leu, Thr, or Val
  misc_feature (10)..(10): Xaa can be Ile, Leu, Met, Phe, Tyr, Val, or Trp
NXPFERSTIX

SEQ ID NO: 49928 - protein, 9 aa, Artificial Sequence
  Description of Artificial Sequence: Synthetic peptide
  Seed: NLPFERTTI
  misc_feature (2)..(2): Xaa can be Ala, Ser, Leu, Met, Thr, Ile, Val, or Gly
  misc_feature (9)..(9): Xaa can be Leu, Met, Ile, or Val
NXPFERTTX

SEQ ID NO: 49929 - protein, 10 aa, Artificial Sequence
  Description of Artificial Sequence: Synthetic peptide
  Seed: NLPFERTTIM
  misc_feature (2)..(2): Xaa can be Arg, Met, Ala, Asn, Asp, Cys, Gln, Glu, Gly, His, Ile, Leu, Lys, Phe, Pro, Ser, Thr, Trp, Tyr, or Val
  misc_feature (10)..(10): Xaa can be Ile, Leu, Met, Phe, Tyr, Val, or Ala
NXPFERTTIX

SEQ ID NO: 49930 - protein, 9 aa, Artificial Sequence
  Description of Artificial Sequence: Synthetic peptide
  Seed: NLPFERVTI
  misc_feature (2)..(2): Xaa can be Ala, Leu, Met, Ser, Ile, Thr, Val, or Gly
  misc_feature (9)..(9): Xaa can be Leu, Met, Ile, or Val
NXPFERVTX

SEQ ID NO: 49931 - protein, 10 aa, Artificial Sequence
  Description of Artificial Sequence: Synthetic peptide
  Seed: NLPFERVTIM
  misc_feature (2)..(2): Xaa can be Arg, Met, Tyr, Ala, Asn, Asp, Cys, Gln, Glu, Gly, His, Ile, Leu, Lys, Phe, Pro, Ser, Thr, Trp, or Val
  misc_feature (10)..(10): Xaa can be Leu, Met, Phe, Tyr, Ile, or Val
NXPFERVTIX

SEQ ID NO: 49932 - protein, 11 aa, Artificial Sequence
  Description of Artificial Sequence: Synthetic peptide
  Seed: NLPFERVTIMA
  misc_feature (2)..(2): Xaa can be Leu, Met, Phe, or Tyr
  misc_feature (11)..(11): Xaa can be Ala
NXPFERVTIMX

SEQ ID NO: 49933 - protein, 10 aa, Artificial Sequence
  Description of Artificial Sequence: Synthetic peptide
  Seed: NMDAIDSSTL
  misc_feature (2)..(2): Xaa can be Leu, Met, or Ile
  misc_feature (10)..(10): Xaa can be Val, Ile, or Leu
NXDAIDSSTX

SEQ ID NO: 49934 - protein, 9 aa, Artificial Sequence
  Description of Artificial Sequence: Synthetic peptide
  Seed: NMDAIVSST
  misc_feature (2)..(2): Xaa can be Leu, Met, Ile, Gln, Thr, Val, Ala, Phe, or Ser
  misc_feature (9)..(9): Xaa can be Val, Ile, Leu, Met, Ala, Cys, Phe, or Thr
NXDAIVSSX

SEQ ID NO: 49935 - protein, 10 aa, Artificial Sequence
  Description of Artificial Sequence: Synthetic peptide
  Seed: NMDAIVSSTL
  misc_feature (2)..(2): Xaa can be Leu, Met, Ile, Gln, or Val
  misc_feature (10)..(10): Xaa can be Val, Leu, Ala, Ile, or Met
NXDAIVSSTX

SEQ ID NO: 49936 - protein, 10 aa, Artificial Sequence
  Description of Artificial Sequence: Synthetic peptide
  Seed: NMDAMESSTL
  misc_feature (2)..(2): Xaa can be Leu, Met, or Ile
  misc_feature (10)..(10): Xaa can be Val, Ile, or Leu
NXDAMESSTX

SEQ ID NO: 49937 - protein, 10 aa, Artificial Sequence
  Description of Artificial Sequence: Synthetic peptide
  Seed: NMDNMESSTL
  misc_feature (2)..(2): Xaa can be Leu or Met
  misc_feature (10)..(10): Xaa can be Leu or Val
NXDNMESSTX

SEQ ID NO: 49938 - protein, 9 aa, Artificial Sequence
  Description of Artificial Sequence: Synthetic peptide
  Seed: NMDSIVSST
  misc_feature (2)..(2): Xaa can be Met, Leu, Ile, Gln, Thr, Val, Ala, Phe, or Ser
  misc_feature (9)..(9): Xaa can be Val, Ile, Leu, Met, Ala, Cys, Thr, or Phe
NXDSIVSSX

SEQ ID NO: 49939 - protein, 10 aa, Artificial Sequence
  Description of Artificial Sequence: Synthetic peptide
  Seed: NMDSIVSSTL
  misc_feature (2)..(2): Xaa can be Leu, Met, Ile, or Val
  misc_feature (10)..(10): Xaa can be Val, Ala, Ile, Leu, or Met
NXDSIVSSTX

SEQ ID NO: 49940 - protein, 10 aa, Artificial Sequence
  Description of Artificial Sequence: Synthetic peptide
  Seed: NMDTMDSNTL
  misc_feature (2)..(2): Xaa can be Leu or Met
  misc_feature (10)..(10): Xaa can be Leu or Val
NXDTMDSNTX

SEQ ID NO: 49941 - protein, 10 aa, Artificial Sequence
  Description of Artificial Sequence: Synthetic peptide
  Seed: NMDTMGSSTL
  misc_feature (2)..(2): Xaa can be Ala, Ser, Thr, Leu, Met, or Val
  misc_feature (10)..(10): Xaa can be Leu, Met, Phe, or Val
NXDTMGSSTX

SEQ ID NO: 49942 - protein, 10 aa, Artificial Sequence
  Description of Artificial Sequence: Synthetic peptide
  Seed: NMDTMVSSTL
  misc_feature (2)..(2): Xaa can be Leu, Met, or Ile
  misc_feature (10)..(10): Xaa can be Val, Ala, Ile, or Leu
NXDTMVSSTX

SEQ ID NO: 49943 - protein, 10 aa, Artificial Sequence
  Description of Artificial Sequence: Synthetic peptide
  Seed: NMEAIDSNTL
  misc_feature (2)..(2): Xaa can be Glu, Leu, Met, Arg, Phe, Trp, or Tyr
  misc_feature (10)..(10): Xaa can be Leu, Val, or Met
NXEAIDSNTX

SEQ ID NO: 49944 - protein, 10 aa, Artificial Sequence
  Description of Artificial Sequence: Synthetic peptide
  Seed: NMEAMDSNTL
  misc_feature (2)..(2): Xaa can be Glu, Ala, Arg, Asn, Asp, Cys, Gln, Gly, His, Ile, Leu, Lys, Met, Phe, Pro, Ser, Thr, Trp, Tyr, or Val
  misc_feature (10)..(10): Xaa can be Leu or Met
NXEAMDSNTX

SEQ ID NO: 49945 - protein, 10 aa, Artificial Sequence
  Description of Artificial Sequence: Synthetic peptide
  Seed: NMEAMDSSTL
  misc_feature (2)..(2): Xaa can be Ala, Arg, Asn, Asp, Cys, Gln, Glu, Gly, His, Ile, Leu, Lys, Met, Phe, Pro, Ser, Thr, Trp, Tyr, or Val
  misc_feature (10)..(10): Xaa can be Leu
NXEAMDSSTX

SEQ ID NO: 49946 - protein, 10 aa, Artificial Sequence
  Description of Artificial Sequence: Synthetic peptide
  Seed: NMEAMESSTL
  misc_feature (2)..(2): Xaa can be Leu, Met, Ala, Arg, Asn, Asp, Cys, Gln, Glu, Gly, His, Ile, Lys, Phe, Pro, Ser, Thr, Trp, Tyr, or Val
  misc_feature (10)..(10): Xaa can be Leu or Val
NXEAMESSTX

SEQ ID NO: 49947 - protein, 9 aa, Artificial Sequence
  Description of Artificial Sequence: Synthetic peptide
  Seed: NMELIRMIK
  misc_feature (2)..(2): Xaa can be Ala, Ile, Leu, Met, Phe, Ser, Thr, Tyr, Val, Gln, or Trp
  misc_feature (9)..(9): Xaa can be Arg or Lys
NXELIRMIX

SEQ ID NO: 49948 - protein, 10 aa, Artificial Sequence
  Description of Artificial Sequence: Synthetic peptide
  Seed: NMELIRMIKR
  misc_feature (2)..(2): Xaa can be Ala, Ile, Leu, Met, Phe, Ser, Thr, Trp, Tyr, or Val
  misc_feature (10)..(10): Xaa can be Arg
NXELIRMIKX

SEQ ID NO: 49949 - protein, 9 aa, Artificial Sequence
  Description of Artificial Sequence: Synthetic peptide
  Seed: NMESSTLEL
  misc_feature (2)..(2): Xaa can be Tyr, Phe, His, Met, Arg, Trp, Leu, Gln, or Lys
  misc_feature (9)..(9): Xaa can be Leu, Met, Ile, Val, Phe, Tyr, or Trp
NXESSTLEX

SEQ ID NO: 49950 - protein, 10 aa, Artificial Sequence
  Description of Artificial Sequence: Synthetic peptide
  Seed: NMESSTLELR
  misc_feature (2)..(2): Xaa can be Ala, Ile, Met, Ser, Thr, Val, Leu, Phe, or Tyr
  misc_feature (10)..(10): Xaa can be Arg or Lys
NXESSTLELX

SEQ ID NO: 49951 - protein, 10 aa, Artificial Sequence
  Description of Artificial Sequence: Synthetic peptide
  Seed: NMETMDSITL
  misc_feature (2)..(2): Xaa can be Glu, Leu, Met, Ala, Arg, Asn, Asp, Cys, Gln, Gly, His, Ile, Lys, Phe, Pro, Ser, Thr, Trp, Tyr, or Val
  misc_feature (10)..(10): Xaa can be Leu, Val, or Met
NXETMDSITX

SEQ ID NO: 49952 - protein, 10 aa, Artificial Sequence
  Description of Artificial Sequence: Synthetic peptide
  Seed: NMETMGSSTL
  misc_feature (2)..(2): Xaa can be Arg, Ala, Asn, Asp, Cys, Gln, Glu, Gly, His, Ile, Leu, Lys, Met, Phe, Pro, Ser, Thr, Trp, Tyr, or Val
  misc_feature (10)..(10): Xaa can be Leu, Ile, or Met
NXETMGSSTX

SEQ ID NO: 49953 - protein, 10 aa, Artificial Sequence
  Description of Artificial Sequence: Synthetic peptide
  Seed: NMETMSSSTL
  misc_feature (2)..(2): Xaa can be Arg, Ala, Asn, Asp, Cys, Gln, Glu, Gly, His, Ile, Leu, Lys, Met, Phe, Pro, Ser, Thr, Trp, Tyr, or Val
  misc_feature (10)..(10): Xaa can be Leu, Ile, Met, or Phe
NXETMSSSTX

SEQ ID NO: 49954 - protein, 8 aa, Artificial Sequence
  Description of Artificial Sequence: Synthetic peptide
  Seed: NPAHKSQL
  misc_feature (2)..(2): Xaa can be Pro
  misc_feature (8)..(8): Xaa can be Leu
NXAHKSQX

SEQ ID NO: 49955 - protein, 9 aa, Artificial Sequence
  Description of Artificial Sequence: Synthetic peptide
  Seed: NPAHKSQLA
  misc_feature (2)..(2): Xaa can be Thr, Ser, Val, Pro, or Ile
  misc_feature (9)..(9): Xaa can be Val, Ile, Leu, Ala, Met, Phe, or Tyr
NXAHKSQLX

SEQ ID NO: 49956 - protein, 10 aa, Artificial Sequence
  Description of Artificial Sequence: Synthetic peptide
  Seed: NPAHKSQLAW
  misc_feature (2)..(2): Xaa can be Ala, Arg, Asn, Asp, Cys, Gln, Glu, Gly, His, Ile, Leu, Lys, Met, Phe, Pro, Ser, Thr, Trp, Tyr, or Val
  misc_feature (10)..(10): Xaa can be Trp
NXAHKSQLAX

SEQ ID NO: 49957 - protein, 10 aa, Artificial Sequence
  Description of Artificial Sequence: Synthetic peptide
  Seed: NPAHKSQLVW
  misc_feature (2)..(2): Xaa can be Ser, Thr, Arg, Met, Tyr, Ala, Asn, Asp, Cys, Gln, Glu, Gly, His, Ile, Leu, Lys, Phe, Pro, Trp, or Val
  misc_feature (10)..(10): Xaa can be Trp, Phe, or Tyr
NXAHKSQLVX

SEQ ID NO: 49958 - protein, 9 aa, Artificial Sequence
  Description of Artificial Sequence: Synthetic peptide
  Seed: NPEGRTSDM
  misc_feature (2)..(2): Xaa can be Pro
  misc_feature (9)..(9): Xaa can be Ile, Leu, Met, or Phe
NXEGRTSDX

SEQ ID NO: 49959 - protein, 9 aa, Artificial Sequence
  Description of Artificial Sequence: Synthetic peptide
  Seed: NPIVPSFDM
  misc_feature (2)..(2): Xaa can be Pro, Ala, Val, Ile, Met, Ser, Cys, Gly, Leu, or Thr
  misc_feature (9)..(9): Xaa can be Tyr, Phe, Met, Ala, Ile, Leu, Trp, or Val
NXIVPSFDX

SEQ ID NO: 49960 - protein, 11 aa, Artificial Sequence
  Description of Artificial Sequence: Synthetic peptide
  Seed: NPIVPSFDMSK
  misc_feature (2)..(2): Xaa can be Ala, Arg, Asn, Asp, Cys, Gln, Glu, Gly, His, Ile, Leu, Lys, Met, Phe, Pro, Ser, Thr, Trp, Tyr, or Val
  misc_feature (11)..(11): Xaa can be Arg or Lys
NXIVPSFDMSX

SEQ ID NO: 49961 - protein, 9 aa, Artificial Sequence
  Description of Artificial Sequence: Synthetic peptide
  Seed: NPIVPSLDM
  misc_feature (2)..(2): Xaa can be Pro, Ala, Val, Ile, Met, Ser, Cys, Gly, Leu, or Thr
  misc_feature (9)..(9): Xaa can be Tyr, Phe, Met, Ala, Ile, Leu, Trp, or Val
NXIVPSLDX

SEQ ID NO: 49962 - protein, 9 aa, Artificial Sequence
  Description of Artificial Sequence: Synthetic peptide
  Seed: NPVHKSQLV
  misc_feature (2)..(2): Xaa can be Pro
  misc_feature (9)..(9): Xaa can be Ile, Leu, Met, Phe, or Val
NXVHKSQLX

SEQ ID NO: 49963 - protein, 10 aa, Artificial Sequence
  Description of Artificial Sequence: Synthetic peptide
  Seed: NPVHKSQLVW
  misc_feature (2)..(2): Xaa can be Pro or Ala
  misc_feature (10)..(10): Xaa can be Trp or Phe
NXVHKSQLVX

SEQ ID NO: 49964 - protein, 9 aa, Artificial Sequence
  Description of Artificial Sequence: Synthetic peptide
  Seed: NPVVPSFDM
  misc_feature (2)..(2): Xaa can be Pro, Ala, Val, Ile, Leu, Met, Ser, or Thr
  misc_feature (9)..(9): Xaa can be Tyr, Phe, Met, Ala, Ile, Leu, Trp, or Val
NXVVPSFDX

SEQ ID NO: 49965 - protein, 9 aa, Artificial Sequence
  Description of Artificial Sequence: Synthetic peptide
  Seed: NRYLEEHPS
  misc_feature (2)..(2): Xaa can be Arg, His, Gln, or Lys
  misc_feature (9)..(9): Xaa can be Ala, Val, Cys, Ile, Leu, Pro, Ser, Thr, or Met
NXYLEEHPX

SEQ ID NO: 49966 - protein, 10 aa, Artificial Sequence
  Description of Artificial Sequence: Synthetic peptide
  Seed: NRYLEEHPSA
  misc_feature (2)..(2): Xaa can be His or Arg
  misc_feature (10)..(10): Xaa can be Ala or Val
NXYLEEHPSX

SEQ ID NO: 49967 - protein, 10 aa, Artificial Sequence
  Description of Artificial Sequence: Synthetic peptide
  Seed: NRYLEENPSA
  misc_feature (2)..(2): Xaa can be Arg or His
  misc_feature (10)..(10): Xaa can be Ala
NXYLEENPSX

SEQ ID NO: 49968 - protein, 9 aa, Artificial Sequence
  Description of Artificial Sequence: Synthetic peptide
  Seed: NRYLEGHPS
  misc_feature (2)..(2): Xaa can be Arg, His, Gln, Lys, Ala, Asn, Met, or Pro
  misc_feature (9)..(9): Xaa can be Ala, Ile, Leu, Val, Cys, Met, Pro, Ser, Thr, or Gly
NXYLEGHPX

SEQ ID NO: 49969 - protein, 10 aa, Artificial Sequence
  Description of Artificial Sequence: Synthetic peptide
  Seed: NRYLEGHPSA
  misc_feature (2)..(2): Xaa can be Arg, His, Gln, or Lys
  misc_feature (10)..(10): Xaa can be Ala, Leu, Thr, Val, Pro, Ser, Cys, or Ile
NXYLEGHPSX

SEQ ID NO: 49970 - protein, 9 aa, Artificial Sequence
  Description of Artificial Sequence: Synthetic peptide
  Seed: NSAAFEDLR
  misc_feature (2)..(2): Xaa can be Thr, Ala, Ile, Ser, Val, Asn, Gln, Gly, Leu, Met, Phe, Pro, Tyr, Cys, or Trp
  misc_feature (9)..(9): Xaa can be Arg, Lys, Tyr, or His
NXAAFEDLX

SEQ ID NO: 49971 - protein, 10 aa, Artificial Sequence
  Description of Artificial Sequence: Synthetic peptide
  Seed: NSAAFEDLRV
  misc_feature (2)..(2): Xaa can be Thr, Val, Ile, Ala, or Ser
  misc_feature (10)..(10): Xaa can be Val, Ile, Leu, Ala, or Met
NXAAFEDLRX

SEQ ID NO: 49972 - protein, 9 aa, Artificial Sequence
  Description of Artificial Sequence: Synthetic peptide
  Seed: NSHVYSLIR
  misc_feature (2)..(2): Xaa can be Ile, Met, Ser, Thr, Val, Ala, Leu, Phe, Tyr, Gln, or Trp
  misc_feature (9)..(9): Xaa can be Arg, Lys, or Tyr
NXHVYSLIX

SEQ ID NO: 49973 - protein, 9 aa, Artificial Sequence
  Description of Artificial Sequence: Synthetic peptide
  Seed: NSITIEKMV
  misc_feature (2)..(2): Xaa can be Thr, Val, Ala, Ile, or Ser
  misc_feature (9)..(9): Xaa can be Val, Ile, Ala, or Leu
NXITIEKMX

SEQ ID NO: 49974 - protein, 9 aa, Artificial Sequence
  Description of Artificial Sequence: Synthetic peptide
  Seed: NSITIERMV
  misc_feature (2)..(2): Xaa can be Thr, Val, Ala, Ile, or Ser
  misc_feature (9)..(9): Xaa can be Val, Ile, Ala, Leu, or Met
NXITIERMX

SEQ ID NO: 49975 - protein, 9 aa, Artificial Sequence
  Description of Artificial Sequence: Synthetic peptide
  Seed: NSITMERMV
  misc_feature (2)..(2): Xaa can be Thr, Ser, or Val
  misc_feature (9)..(9): Xaa can be Val, Ala, Ile, or Leu
NXITMERMX

SEQ ID NO: 49976 - protein, 9 aa, Artificial Sequence
  Description of Artificial Sequence: Synthetic peptide
  Seed: NSMTIERMV
  misc_feature (2)..(2): Xaa can be Thr, Ala, Ser, Val, or Ile
  misc_feature (9)..(9): Xaa can be Val, Ile, Leu, Met, Phe, Tyr, or Ala
NXMTIERMX

SEQ ID NO: 49977 - protein, 10 aa, Artificial Sequence
  Description of Artificial Sequence: Synthetic peptide
  Seed: NSMTIERMVL
  misc_feature (2)..(2): Xaa can be Ala, Ser, or Thr
  misc_feature (10)..(10): Xaa can be Met, Phe, Tyr, or Leu
NXMTIERMVX

SEQ ID NO: 49978 - protein, 9 aa, Artificial Sequence
  Description of Artificial Sequence: Synthetic peptide
  Seed: NSQIFSLIR
  misc_feature (2)..(2): Xaa can be Thr, Ala, Ile, Leu, Met, Phe, Ser, Trp, Tyr, Val, Asn, Gln, or Gly
  misc_feature (9)..(9): Xaa can be Arg, Lys, or Tyr
NXQIFSLIX

SEQ ID NO: 49979 - protein, 11 aa, Artificial Sequence
  Description of Artificial Sequence: Synthetic peptide
  Seed: NSQIFSLIRPK
  misc_feature (2)..(2): Xaa can be Ala, Arg, Asn, Asp, Cys, Gln, Glu, Gly, His, Ile, Leu, Lys, Met, Phe, Pro, Ser, Thr, Trp, Tyr, or Val
  misc_feature (11)..(11): Xaa can be Arg or Lys
NXQIFSLIRPX

SEQ ID NO: 49980 - protein, 9 aa, Artificial Sequence
  Description of Artificial Sequence: Synthetic peptide
  Seed: NSQVFSIIR
  misc_feature (2)..(2): Xaa can be Ala, Ile, Met, Phe, Ser, Thr, Trp, Tyr, Val, Asn, Gln, Gly, or Leu
  misc_feature (9)..(9): Xaa can be Arg or Lys
NXQVFSIIX

SEQ ID NO: 49981 - protein, 9 aa, Artificial Sequence
  Description of Artificial Sequence: Synthetic peptide
  Seed: NSQVFSLIR
  misc_feature (2)..(2): Xaa can be Thr, Val, Ala, Ile, Leu, Met, Phe, Ser, Trp, Tyr, Asn, Gln, or Gly
  misc_feature (9)..(9): Xaa can be Arg, Lys, or Tyr
NXQVFSLIX

SEQ ID NO: 49982 - protein, 11 aa, Artificial Sequence
  Description of Artificial Sequence: Synthetic peptide
  Seed: NSQVFSLIRPK
  misc_feature (2)..(2): Xaa can be Ala, Arg, Asn, Asp, Cys, Gln, Glu, Gly, His, Ile, Leu, Lys, Met, Phe, Pro, Ser, Thr, Trp, Tyr, or Val
  misc_feature (11)..(11): Xaa can be Arg or Lys
NXQVFSLIRPX

SEQ ID NO: 49983 - protein, 9 aa, Artificial Sequence
  Description of Artificial Sequence: Synthetic peptide
  Seed: NSQVFSLVR
  misc_feature (2)..(2): Xaa can be Thr, Val, Ala, Ile, Leu, Met, Phe, Ser, Trp, Tyr, Asn, Gln, or Gly
  misc_feature (9)..(9): Xaa can be Arg, Lys, or Tyr
NXQVFSLVX

SEQ ID NO: 49984 - protein, 9 aa, Artificial Sequence
  Description of Artificial Sequence: Synthetic peptide
  Seed: NSQVLSLIR
  misc_feature (2)..(2): Xaa can be Met, Phe, Thr, Tyr, Val, Ala, Gln, Ile, Leu, Ser, or Trp
  misc_feature (9)..(9): Xaa can be Arg or Lys
NXQVLSLIX

SEQ ID NO: 49985 - protein, 9 aa, Artificial Sequence
  Description of Artificial Sequence: Synthetic peptide
  Seed: NSQVYSLIR
  misc_feature (2)..(2): Xaa can be Met, Phe, Thr, Tyr, Val, Ala, Gln, Ile, Leu, Ser, or Trp
  misc_feature (9)..(9): Xaa can be Arg or Lys
NXQVYSLIX

SEQ ID NO: 49986 - protein, 10 aa, Artificial Sequence
  Description of Artificial Sequence: Synthetic peptide
  Seed: NSSTLELRSK
  misc_feature (2)..(2): Xaa can be Ala, Ile, Ser, Thr, Val, or Met
  misc_feature (10)..(10): Xaa can be Arg or Lys
NXSTLELRSX

SEQ ID NO: 49987 - protein, 10 aa, Artificial Sequence
  Description of Artificial Sequence: Synthetic peptide
  Seed: NTEGRISDMR
  misc_feature (2)..(2): Xaa can be Thr, Val, Ala, Ile, Met, Phe, Ser, or Tyr
  misc_feature (10)..(10): Xaa can be Arg or Lys
NXEGRISDMX

SEQ ID NO: 49988 - protein, 10 aa, Artificial Sequence
  Description of Artificial Sequence: Synthetic peptide
  Seed: NTEGRTSDMR
  misc_feature (2)..(2): Xaa can be Thr or Val
  misc_feature (10)..(10): Xaa can be Arg
NXEGRTSDMX

SEQ ID NO: 49989 - protein, 10 aa, Artificial Sequence
  Description of Artificial Sequence: Synthetic peptide
  Seed: NTERRTSDMR
  misc_feature (2)..(2): Xaa can be Met, Phe, Thr, Tyr, or Val
  misc_feature (10)..(10): Xaa can be Arg
NXERRTSDMX

SEQ ID NO: 49990 - protein, 9 aa, Artificial Sequence
  Description of Artificial Sequence: Synthetic peptide
  Seed: NTLELRSKY
  misc_feature (2)..(2): Xaa can be Ser, Thr, Val, Ala, Ile, Leu, Met, Phe, Trp, or Tyr
  misc_feature (9)..(9): Xaa can be Tyr, Arg, Lys, Trp, or Phe
NXLELRSKX

SEQ ID NO: 49991 - protein, 10 aa, Artificial Sequence
  Description of Artificial Sequence: Synthetic peptide
  Seed: NTLELRSKYW
  misc_feature (2)..(2): Xaa can be Ala, Ser, or Thr
  misc_feature (10)..(10): Xaa can be Trp
NXLELRSKYX

SEQ ID NO: 49992 - protein, 8 aa, Artificial Sequence
  Description of Artificial Sequence: Synthetic peptide
  Seed: NTLELRSR
  misc_feature (2)..(2): Xaa can be Phe, Thr, or Tyr
  misc_feature (8)..(8): Xaa can be Arg
NXLELRSX

SEQ ID NO: 49993 - protein, 9 aa, Artificial Sequence
  Description of Artificial Sequence: Synthetic peptide
  Seed: NTLELRSRY
  misc_feature (2)..(2): Xaa can be Ser, Thr, Val, Ala, Ile, Leu, Met, Asn, Gln, Phe, Trp, or Tyr
  misc_feature (9)..(9): Xaa can be Tyr, Arg, Lys, Trp, or Phe
NXLELRSRX

SEQ ID NO: 49994 - protein, 10 aa, Artificial Sequence
  Description of Artificial Sequence: Synthetic peptide
  Seed: NTLELRSRYW
  misc_feature (2)..(2): Xaa can be Ser, Thr, Ala, Met, or Val
  misc_feature (10)..(10): Xaa can be Trp or Phe
NXLELRSRYX

SEQ ID NO: 49995 - protein, 9 aa, Artificial Sequence
  Description of Artificial Sequence: Synthetic peptide
  Seed: NTNQHRASA
  misc_feature (2)..(2): Xaa can be Ser, Thr, Ala, Gln, Ile, Leu, Met, Tyr, or Val
  misc_feature (9)..(9): Xaa can be Lys or Ala
NXNQHRASX

SEQ ID NO: 49996 - protein, 10 aa, Artificial Sequence
  Description of Artificial Sequence: Synthetic peptide
  Seed: NTTEIRASVG
  misc_feature (2)..(2): Xaa can be Thr, Val, Ser, Ala, or Ile
  misc_feature (10)..(10): Xaa can be Val, Ile, Leu, Ala, Arg, Asn, Asp, Cys, Gln, Glu, Gly, His, Lys, Met, Phe, Pro, Ser, Thr, Trp, or Tyr
NXTEIRASVX

SEQ ID NO: 49997 - protein, 10 aa, Artificial Sequence
  Description of Artificial Sequence: Synthetic peptide
  Seed: NVEAMDSTTL
  misc_feature (2)..(2): Xaa can be Glu, Ala, Arg, Asn, Asp, Cys, Gln, Gly, His, Ile, Leu, Lys, Met, Phe, Pro, Ser, Thr, Trp, Tyr, or Val
  misc_feature (10)..(10): Xaa can be Leu or Met
NXEAMDSTTX

SEQ ID NO: 49998 - protein, 10 aa, Artificial Sequence
  Description of Artificial Sequence: Synthetic peptide
  Seed: PAGLTHLMIW
  misc_feature (2)..(2): Xaa can be Ala, Met, Ser, or Thr
  misc_feature (10)..(10): Xaa can be Trp
PXGLTHLMIX

SEQ ID NO: 49999 - protein, 9 aa, Artificial Sequence
  Description of Artificial Sequence: Synthetic peptide
  Seed: PAHKSQLAW
  misc_feature (2)..(2): Xaa can be Ala, Ser, or Thr
  misc_feature (9)..(9): Xaa can be Trp
PXHKSQLAX

SEQ ID NO: 50000 - protein, 9 aa, Artificial Sequence
  Description of Artificial Sequence: Synthetic peptide
  Seed: PAHKSQLVW
  misc_feature (2)..(2): Xaa can be Ala, Ser, Thr, or Val
  misc_feature (9)..(9): Xaa can be Trp
PXHKSQLVX

SEQ ID NO: 50001 - protein, 9 aa, Artificial Sequence
  Description of Artificial Sequence: Synthetic peptide
  Seed: PAVASGYAF
  misc_feature (2)..(2): Xaa can be Gln, Ala, Lys, Met, or Pro
  misc_feature (9)..(9): Xaa can be Met, Phe, Tyr, or Leu
PXVASGYAX

SEQ ID NO: 50002 - protein, 11 aa, Artificial Sequence
  Description of Artificial Sequence: Synthetic peptide
  Seed: PAVASGYAFEK
  misc_feature (2)..(2): Xaa can be Ala, Arg, Lys, Met, Ser, Thr, or Val
  misc_feature (11)..(11): Xaa can be Lys
PXVASGYAFEX

SEQ ID NO: 50003 - protein, 11 aa, Artificial Sequence
  Description of Artificial Sequence: Synthetic peptide
  Seed: PAVASGYDFEK
  misc_feature (2)..(2): Xaa can be Ala, Arg, or Ser
  misc_feature (11)..(11): Xaa can be Lys or Arg
PXVASGYDFEX

SEQ ID NO: 50004 - protein, 11 aa, Artificial Sequence
  Description of Artificial Sequence: Synthetic peptide
  Seed: PAVASGYEFEK
  misc_feature (2)..(2): Xaa can be Ala, Arg, or Ser
  misc_feature (11)..(11): Xaa can be Lys
PXVASGYEFEX

SEQ ID NO: 50005 - protein, 11 aa, Artificial Sequence
  Description of Artificial Sequence: Synthetic peptide
  Seed: PAVASGYNFEK
  misc_feature (2)..(2): Xaa can be Ala, Arg, Lys, Met, Ser, or Thr
  misc_feature (11)..(11): Xaa can be Lys
PXVASGYNFEX

SEQ ID NO: 50006 - protein, 11 aa, Artificial Sequence
  Description of Artificial Sequence: Synthetic peptide
  Seed: PAVSSGYNFEK
  misc_feature (2)..(2): Xaa can be Ala, Arg, or Ser
  misc_feature (11)..(11): Xaa can be Lys
PXVSSGYNFEX

SEQ ID NO: 50007 - protein, 10 aa, Artificial Sequence
  Description of Artificial Sequence: Synthetic peptide
  Seed: PFEKATIMAA
  misc_feature (2)..(2): Xaa can be Arg, Met, Phe, or Tyr
  misc_feature (10)..(10): Xaa can be Ala
PXEKATIMAX

SEQ ID NO: 50008 - protein, 10 aa, Artificial Sequence
  Description of Artificial Sequence: Synthetic peptide
  Seed: PFERATIMAA
  misc_feature (2)..(2): Xaa can be Ala, Arg, Met, Phe, Ser, Trp, or Tyr
  misc_feature (10)..(10): Xaa can be Ala
PXERATIMAX

SEQ ID NO: 50009 - protein, 10 aa, Artificial Sequence
  Description of Artificial Sequence: Synthetic peptide
  Seed: PFERATVMAA
  misc_feature (2)..(2): Xaa can be Ala, Arg, Met, Phe, Ser, Trp, or Tyr
  misc_feature (10)..(10): Xaa can be Ala
PXERATVMAX

SEQ ID NO: 50010 - protein, 10 aa, Artificial Sequence
  Description of Artificial Sequence: Synthetic peptide
  Seed: PFERSTIMAA
  misc_feature (2)..(2): Xaa can be Ala, Arg, Met, Phe, Ser, Trp, or Tyr
  misc_feature (10)..(10): Xaa can be Ala
PXERSTIMAX

SEQ ID NO: 50011 - protein, 10 aa, Artificial Sequence
  Description of Artificial Sequence: Synthetic peptide
  Seed: PFERTTIMAA
  misc_feature (2)..(2): Xaa can be Arg, Met, Phe, Trp, or Tyr
  misc_feature (10)..(10): Xaa can be Ala
PXERTTIMAX

SEQ ID NO: 50012 - protein, 11 aa, Artificial Sequence
  Description of Artificial Sequence: Synthetic peptide
  Seed: PFKLLQTSQVY
  misc_feature (2)..(2): Xaa can be Arg, Met, Tyr, Leu, Phe, or Trp
  misc_feature (11)..(11): Xaa can be Tyr or Phe
PXKLLQTSQVX

SEQ ID NO: 50013 - protein, 10 aa, Artificial Sequence
  Description of Artificial Sequence: Synthetic peptide
  Seed: PIVPSFDMSK
  misc_feature (2)..(2): Xaa can be Ile, Met, Ser, Thr, or Val
  misc_feature (10)..(10): Xaa can be Lys
PXVPSFDMSX

SEQ ID NO: 50014 - protein, 9 aa, Artificial Sequence
  Description of Artificial Sequence: Synthetic peptide
  Seed: PIYKRVGGK
  misc_feature (2)..(2): Xaa can be Thr, Val, Ile, Leu, or Met
  misc_feature (9)..(9): Xaa can be Lys or Arg
PXYKRVGGX

SEQ ID NO: 50015 - protein, 9 aa, Artificial Sequence
  Description of Artificial Sequence: Synthetic peptide
  Seed: PIYKRVNGK
  misc_feature (2)..(2): Xaa can be Thr, Val, Ile, Leu, or Met
  misc_feature (9)..(9): Xaa can be Lys or Arg
PXYKRVNGX

SEQ ID NO: 50016 - protein, 9 aa, Artificial Sequence
  Description of Artificial Sequence: Synthetic peptide
  Seed: PIYRRVNGK
  misc_feature (2)..(2): Xaa can be Ile, Thr, Val, Leu, or Met
  misc_feature (9)..(9): Xaa can be Lys or Arg
PXYRRVNGX

SEQ ID NO: 50017 - protein, 10 aa, Artificial Sequence
  Description of Artificial Sequence: Synthetic peptide
  Seed: QANNGDDATR
  misc_feature (2)..(2): Xaa can be Thr, Ala, Ile, Ser, or Val
  misc_feature (10)..(10): Xaa can be Arg or Lys
QXNNGDDATX

SEQ ID NO: 50018 - protein, 10 aa, Artificial Sequence
  Description of Artificial Sequence: Synthetic peptide
  Seed: QDATEIRASV
  misc_feature (2)..(2): Xaa can be Thr, Val, Ser, Ala, Ile, Met, Arg, Asn, Asp, Cys, Gln, Glu, Gly, His, Leu, Lys, Phe, Pro, Trp, or Tyr
  misc_feature (10)..(10): Xaa can be Val, Ile, Leu, Ala, Met, or Thr
QXATEIRASX

SEQ ID NO: 50019 - protein, 10 aa, Artificial Sequence
  Description of Artificial Sequence: Synthetic peptide
  Seed: QEGRLIQNSI
  misc_feature (2)..(2): Xaa can be Glu
  misc_feature (10)..(10): Xaa can be Ile, Leu, Met, Phe, or Val
QXGRLIQNSX

SEQ ID NO: 50020 - protein, 9 aa, Artificial Sequence
  Description of Artificial Sequence: Synthetic peptide
  Seed: QIFSLIRPK
  misc_feature (2)..(2): Xaa can be Thr, Val, Ile, Ser, Ala, Leu, Met, Tyr, Asn, Gln, Gly, Phe, Trp, Cys, His, or Pro
  misc_feature (9)..(9): Xaa can be Arg, Lys, Tyr, Met, Val, Ala, Leu, Phe, Ile, or His
QXFSLIRPX

SEQ ID NO: 50021 - protein, 10 aa, Artificial Sequence
  Description of Artificial Sequence: Synthetic peptide
  Seed: QISIQPTFSV
  misc_feature (2)..(2): Xaa can be Leu, Met, Thr, Val, Gln, Ala, Asn, Asp, Glu, Ile, Phe, Tyr, Arg, Cys, Gly, His, Lys, Pro, Ser, or Trp
  misc_feature (10)..(10): Xaa can be Val, Ile, Leu, Ala, or Met
QXSIQPTFSX

SEQ ID NO: 50022 - protein, 8 aa, Artificial Sequence
  Description of Artificial Sequence: Synthetic peptide
  Seed: QISTQPTF
  misc_feature (2)..(2): Xaa can be Met, Phe, Tyr, Gln, His, Ile, Trp, Ala, Arg, Leu, Lys, or Val
  misc_feature (8)..(8): Xaa can be Tyr, Phe, or Met
QXSTQPTX

SEQ ID NO: 50023 - protein, 10 aa, Artificial Sequence
  Description of Artificial Sequence: Synthetic peptide
  Seed: QISTQPTFSV
  misc_feature (2)..(2): Xaa can be Leu, Met, Thr, Val, Ala, Gln, Glu, Ile, Phe, Ser, or Tyr
  misc_feature (10)..(10): Xaa can be Val, Ile, Ala, Leu, or Met
QXSTQPTFSX

SEQ ID NO: 50024 - protein, 8 aa, Artificial Sequence
  Description of Artificial Sequence: Synthetic peptide
  Seed: QISVQPAF
  misc_feature (2)..(2): Xaa can be Gln, Met, Phe, Tyr, Ala, Arg, His, Ile, Trp, Asn, Leu, Lys, Ser, or Val
  misc_feature (8)..(8): Xaa can be Tyr, Phe, or Met
QXSVQPAX

SEQ ID NO: 50025 - protein, 10 aa, Artificial Sequence
  Description of Artificial Sequence: Synthetic peptide
  Seed: QISVQPAFSV
  misc_feature (2)..(2): Xaa can be Thr, Ala, Arg, Asn, Asp, Cys, Gln, Glu, Gly, His, Ile, Leu, Lys, Met, Phe, Pro, Ser, Trp, Tyr, or Val
  misc_feature (10)..(10): Xaa can be Val, Ile, or Leu
QXSVQPAFSX

SEQ ID NO: 50026 - protein, 10 aa, Artificial Sequence
  Description of Artificial Sequence: Synthetic peptide
  Seed: QISVQPTFSV
  misc_feature (2)..(2): Xaa can be Leu, Met, Thr, Val, Gln, Ile, Ala, Arg, Asn, Asp, Cys, Glu, Gly, His, Lys, Phe, Pro, Ser, Trp, or Tyr
  misc_feature (10)..(10): Xaa can be Val, Ile, Leu, Ala, or Met
QXSVQPTFSX

SEQ ID NO: 50027 - protein, 9 aa, Artificial Sequence
  Description of Artificial Sequence: Synthetic peptide
  Seed: QLATRGVQI
  misc_feature (2)..(2): Xaa can be Leu, Met, or Ile
  misc_feature (9)..(9): Xaa can be Val, Ala, Ile, or Leu
QXATRGVQX

SEQ ID NO: 50028 - protein, 10 aa, Artificial Sequence
  Description of Artificial Sequence: Synthetic peptide
  Seed: QLAWMACHSA
  misc_feature (2)..(2): Xaa can be Leu, Met, Gln, Ile, Val, or Thr
  misc_feature (10)..(10): Xaa can be Val, Leu, Ile, Ala, Met, or Thr
QXAWMACHSX

SEQ ID NO: 50029 - protein, 9 aa, Artificial Sequence
  Description of Artificial Sequence: Synthetic peptide
  Seed: QLSDYEGRL
  misc_feature (2)..(2): Xaa can be Leu or Met
  misc_feature (9)..(9): Xaa can be Ile, Leu, Met, or Val
QXSDYEGRX

SEQ ID NO: 50030 - protein, 10 aa, Artificial Sequence
  Description of Artificial Sequence: Synthetic peptide
  Seed: QLSDYEGRLI
  misc_feature (2)..(2): Xaa can be Leu or Met
  misc_feature (10)..(10): Xaa can be Ile, Leu, or Val
QXSDYEGRLX

SEQ ID NO: 50031 - protein, 9 aa, Artificial Sequence
  Description of Artificial Sequence: Synthetic peptide
  Seed: QLSTRGFQI
  misc_feature (2)..(2): Xaa can be Leu or Met
  misc_feature (9)..(9): Xaa can be Ala, Ile, Leu, or Val
QXSTRGFQX

SEQ ID NO: 50032 - protein, 10 aa, Artificial Sequence
  Description of Artificial Sequence: Synthetic peptide
  Seed: QLVWMACHSA
  misc_feature (2)..(2): Xaa can be Leu, Met, Ala, Arg, Asn, Gln, Gly, His, Ile, Lys, Phe, Ser, Thr, Trp, Tyr, or Val
  misc_feature (10)..(10): Xaa can be Val, Ala, Ile, Leu, or Met
QXVWMACHSX

SEQ ID NO: 50033 - protein, 10 aa, Artificial Sequence
  Description of Artificial Sequence: Synthetic peptide
  Seed: QLVWMACNSA
  misc_feature (2)..(2): Xaa can be Leu, Met, Gln, Ile, Phe, Tyr, or Val
  misc_feature (10)..(10): Xaa can be Val, Ala, Ile, or Leu
QXVWMACNSX

SEQ ID NO: 50034 - protein, 10 aa, Artificial Sequence
  Description of Artificial Sequence: Synthetic peptide
  Seed: QMIKRGINDR
  misc_feature (2)..(2): Xaa can be Gln, Ile, Leu, Met, Phe, Ser, Thr, Trp, Tyr, or Val
  misc_feature (10)..(10): Xaa can be Arg
QXIKRGINDX

SEQ ID NO: 50035 - protein, 10 aa, Artificial Sequence
  Description of Artificial Sequence: Synthetic peptide
  Seed: QNANDIRASV
  misc_feature (2)..(2): Xaa can be Thr, Val, Ser, Ala, Ile, Met, Arg, Asn, Asp, Cys, Gln, Glu, Gly, His, Leu, Lys, Phe, Pro, Trp, or Tyr
  misc_feature (10)..(10): Xaa can be Val, Ile, Leu, Ala, Met, or Thr
QXANDIRASX

SEQ ID NO: 50036 - protein, 10 aa, Artificial Sequence
  Description of Artificial Sequence: Synthetic peptide
  Seed: QNANEIRASV
  misc_feature (2)..(2): Xaa can be Thr, Val, Ser, Ala, Ile, Met, Arg, Asn, Asp, Cys, Gln, Glu, Gly, His, Leu, Lys, Phe, Pro, Trp, or Tyr
  misc_feature (10)..(10): Xaa can be Val, Ile, Leu, Ala, Met, or Thr
QXANEIRASX

SEQ ID NO: 50037 - protein, 10 aa, Artificial Sequence
  Description of Artificial Sequence: Synthetic peptide
  Seed: QNATEIRSSV
  misc_feature (2)..(2): Xaa can be Thr, Val, Ala, Ile, Ser, Asn, Leu, Met, or Phe
  misc_feature (10)..(10): Xaa can be Val, Ile, Leu, Ala, or Met
QXATEIRSSX

SEQ ID NO: 50038 - protein, 9 aa, Artificial Sequence
  Description of Artificial Sequence: Synthetic peptide
  Seed: QNSHVYSLI
  misc_feature (2)..(2): Xaa can be Thr, Val, Ala, Ile, Ser, Met, Leu, Asn, Cys, Gln, Gly, Phe, or Pro
  misc_feature (9)..(9): Xaa can be Val, Ile, Leu, Ala, Met, Thr, Cys, or Ser
QXSHVYSLX

SEQ ID NO: 50039 - protein, 10 aa, Artificial Sequence
  Description of Artificial Sequence: Synthetic peptide
  Seed: QNSHVYSLIR
  misc_feature (2)..(2): Xaa can be Thr, Val, Ala, Gln, Ile, Leu, Met, Phe, Ser, Trp, Tyr, Arg, Asn, Asp, Cys, Glu, Gly, His, Lys, or Pro
  misc_feature (10)..(10): Xaa can be Arg, Lys, or Tyr
QXSHVYSLIX

SEQ ID NO: 50040 - protein, 9 aa, Artificial Sequence
  Description of Artificial Sequence: Synthetic peptide
  Seed: QNSQIFSLI
  misc_feature (2)..(2): Xaa can be Thr, Ala, Ser, Val, Ile, Leu, Met, Asn, Cys, Gln, Gly, Phe, or Pro
  misc_feature (9)..(9): Xaa can be Val, Ile, Ala, Leu, Met, Thr, Cys, Phe, or Ser
QXSQIFSLX

SEQ ID NO: 50041 - protein, 10 aa, Artificial Sequence
  Description of Artificial Sequence: Synthetic peptide
  Seed: QNSQIFSLIR
  misc_feature (2)..(2): Xaa can be Thr, Val, Ala, Gln, Ile, Leu, Met, Phe, Ser, Trp, Tyr, Arg, Asn, Asp, Cys, Glu, Gly, His, Lys, or Pro
  misc_feature (10)..(10): Xaa can be Arg, Lys, or Tyr
QXSQIFSLIX

SEQ ID NO: 50042 - protein, 10 aa, Artificial Sequence
  Description of Artificial Sequence: Synthetic peptide
  Seed: QNSQVFSIIR
  misc_feature (2)..(2): Xaa can be Ala, Ile, Met, Phe, Ser, Thr, Trp, Tyr, Val, Arg, Asn, Asp, Cys, Gln, Glu, Gly, His, Leu, Lys, or Pro
  misc_feature (10)..(10): Xaa can be Arg or Lys
QXSQVFSIIX

SEQ ID NO: 50043 - protein, 9 aa, Artificial Sequence
  Description of Artificial Sequence: Synthetic peptide
  Seed: QNSQVFSLI
  misc_feature (2)..(2): Xaa can be Thr, Val, Ala, Ile, Ser, Met, Leu, Asn, Gly, or Pro
  misc_feature (9)..(9): Xaa can be Val, Ile, Leu, Ala, Met, Thr, Cys, or Ser
QXSQVFSLX

SEQ ID NO: 50044 - protein, 10 aa, Artificial Sequence
  Description of Artificial Sequence: Synthetic peptide
  Seed: QNSQVFSLIR
  misc_feature (2)..(2): Xaa can be Thr, Val, Ala, Gln, Ile, Leu, Met, Phe, Ser, Trp, Tyr, Arg, Asn, Asp, Cys, Glu, Gly, His, Lys, or Pro
  misc_feature (10)..(10): Xaa can be Arg, Lys, or Tyr
QXSQVFSLIX

SEQ ID NO: 50045 - protein, 10 aa, Artificial Sequence
  Description of Artificial Sequence: Synthetic peptide
  Seed: QNSQVFSLVR
  misc_feature (2)..(2): Xaa can be Thr, Val, Ala, Gln, Ile, Leu, Met, Phe, Ser, Trp, Tyr, Arg, Asn, Asp, Cys, Glu, Gly, His, Lys, or Pro
  misc_feature (10)..(10): Xaa can be Arg, Lys, or Tyr
QXSQVFSLVX

SEQ ID NO: 50046 - protein, 10 aa, Artificial Sequence
  Description of Artificial Sequence: Synthetic peptide
  Seed: QNSQVLSLIR
  misc_feature (2)..(2): Xaa can be Ala, Ile, Met, Phe, Ser, Thr, Trp, Tyr, Val, Arg, Asn, Cys, Gln, Gly, His, Leu, or Lys
  misc_feature (10)..(10): Xaa can be Arg or Lys
QXSQVLSLIX

SEQ ID NO: 50047 - protein, 10 aa, Artificial Sequence
  Description of Artificial Sequence: Synthetic peptide
  Seed: QNSQVYSLIR
  misc_feature (2)..(2): Xaa can be Thr, Val, Ala, Ile, Leu, Met, Phe, Ser, Trp, Tyr, Arg, Asn, Asp, Cys, Gln, Glu, Gly, His, Lys, or Pro
  misc_feature (10)..(10): Xaa can be Arg, Lys, or Tyr
QXSQVYSLIX

SEQ ID NO: 50048 - protein, 10 aa, Artificial Sequence
  Description of Artificial Sequence: Synthetic peptide
  Seed: QNTTEIRASV
  misc_feature (2)..(2): Xaa can be Ala, Arg, Asn, Asp, Cys, Gln, Glu, Gly, His, Ile, Leu, Lys, Met, Phe, Pro, Ser, Thr, Trp, Tyr, or Val
  misc_feature (10)..(10): Xaa can be Ala, Ile, Leu, Met, or Val
QXTTEIRASX

SEQ ID NO: 50049 - protein, 10 aa, Artificial Sequence
  Description of Artificial Sequence: Synthetic peptide
  Seed: QPAFSVQKNL
  misc_feature (2)..(2): Xaa can be Pro
  misc_feature (10)..(10): Xaa can be Leu or Met
QXAFSVQKNX

SEQ ID NO: 50050 - protein, 10 aa, Artificial Sequence
  Description of Artificial Sequence: Synthetic peptide
  Seed: QPAFSVQRNL
  misc_feature (2)..(2): Xaa can be Pro
  misc_feature (10)..(10): Xaa can be Leu or Met
QXAFSVQRNX

SEQ ID NO: 50051 - protein, 10 aa, Artificial Sequence
  Description of Artificial Sequence: Synthetic peptide
  Seed: QPSFSVQRNL
  misc_feature (2)..(2): Xaa can be Pro
  misc_feature (10)..(10): Xaa can be Leu or Met
QXSFSVQRNX

SEQ ID NO: 50052 - protein, 10 aa, Artificial Sequence
  Description of Artificial Sequence: Synthetic peptide
  Seed: QPTFSVQRKL
  misc_feature (2)..(2): Xaa can be Pro
  misc_feature (10)..(10): Xaa can be Leu
QXTFSVQRKX

SEQ ID NO: 50053 - protein, 10 aa, Artificial Sequence
  Description of Artificial Sequence: Synthetic peptide
  Seed: QPTFSVQRNL
  misc_feature (2)..(2): Xaa can be Pro
  misc_feature (10)..(10): Xaa can be Leu
QXTFSVQRNX

SEQ ID NO: 50054 - protein, 9 aa, Artificial Sequence
  Description of Artificial Sequence: Synthetic peptide
  Seed: QQRASAGHI
  misc_feature (2)..(2): Xaa can be Gln, Met, Lys, Glu, His, Leu, Ala, Arg, Asn, Ile, Ser, Thr, or Val
  misc_feature (9)..(9): Xaa can be Phe, Tyr, Met, Leu, Trp, His, Ile, or Val
QXRASAGHX

SEQ ID NO: 50055 - protein, 9 aa, Artificial Sequence
  Description of Artificial Sequence: Synthetic peptide
  Seed: QQRASAGQI
  misc_feature (2)..(2): Xaa can be Gln, Met, Glu, His, Leu, Lys, Ala, Arg, Ile, Ser, Val, Asn, or Thr
  misc_feature (9)..(9): Xaa can be Phe, Tyr, Met, Leu, Trp, His, Ile, or Val
QXRASAGQX

SEQ ID NO: 50056 - protein, 9 aa, Artificial Sequence
  Description of Artificial Sequence: Synthetic peptide
  Seed: QQRASSGQI
  misc_feature (2)..(2): Xaa can be Gln, Met, Lys, Ala, Arg, Glu, His, Leu, Asn, Gly, Ile, Ser, Thr, Val, Phe, or Tyr
  misc_feature (9)..(9): Xaa can be Phe, Tyr, Met, Leu, Trp, His, Ile, or Val
QXRASSGQX

SEQ ID NO: 50057 - protein, 10 aa, Artificial Sequence
  Description of Artificial Sequence: Synthetic peptide
  Seed: QRASAGHISV
  misc_feature (2)..(2): Xaa can be Arg
  misc_feature (10)..(10): Xaa can be Ile, Leu, Met, Phe, or Val
QXASAGHISX

SEQ ID NO: 50058 - protein, 10 aa, Artificial Sequence
  Description of Artificial Sequence: Synthetic peptide
  Seed: QRASAGQISI
  misc_feature (2)..(2): Xaa can be Arg
  misc_feature (10)..(10): Xaa can be Ile, Leu, Met, Phe, or Val
QXASAGQISX

SEQ ID NO: 50059 - protein, 10 aa, Artificial Sequence
  Description of Artificial Sequence: Synthetic peptide
  Seed: QRASAGQVSV
  misc_feature (2)..(2): Xaa can be Arg
  misc_feature (10)..(10): Xaa can be Ile, Leu, Met, Phe, or Val
QXASAGQVSX

SEQ ID NO: 50060 - protein, 10 aa, Artificial Sequence
  Description of Artificial Sequence: Synthetic peptide
  Seed: QRASSGQISI
  misc_feature (2)..(2): Xaa can be Arg
  misc_feature (10)..(10): Xaa can be Ile, Leu, Met, Phe, or Val
QXASSGQISX

SEQ ID NO: 50061 - protein, 9 aa, Artificial Sequence
  Description of Artificial Sequence: Synthetic peptide
  Seed: QRNLPFERV
  misc_feature (2)..(2): Xaa can be Arg
  misc_feature (9)..(9): Xaa can be Ile, Leu, Met, Phe, or Val
QXNLPFERX

SEQ ID NO: 50062 - protein, 10 aa, Artificial Sequence
  Description of Artificial Sequence: Synthetic peptide
  Seed: QRTRAHVRTG
  misc_feature (2)..(2): Xaa can be Arg, Lys, Ser, Tyr, Ala, Asn, Asp, Cys, Gln, Glu, Gly, His, Ile, Leu, Met, Phe, Pro, Thr, Trp, or Val
  misc_feature (10)..(10): Xaa can be Ala, Ile, Leu, Lys, Met, Ser, Tyr, Val, Arg, Thr, Cys, Gly, Phe, Pro, Gln, or Glu
QXTRAHVRTX

SEQ ID NO: 50063 - protein, 11 aa, Artificial Sequence
  Description of Artificial Sequence: Synthetic peptide
  Seed: QRTRAHVRTGM
  misc_feature (2)..(2): Xaa can be Arg, Lys, Ala, His, Met, or Ser
  misc_feature (11)..(11): Xaa can be Lys, Ala, Ile, Leu, Met, Val, Ser, or Tyr
QXTRAHVRTGX

SEQ ID NO: 50064 - protein, 10 aa, Artificial Sequence
  Description of Artificial Sequence: Synthetic peptide
  Seed: QRTRALVRAG
  misc_feature (2)..(2): Xaa can be Arg, Lys, Ser, Ala, His, Met, Trp, Tyr, Asn, Asp, Cys, Gln, Glu, Gly, Ile, Leu, Phe, Pro, Thr, or Val
  misc_feature (10)..(10): Xaa can be Ala, Ile, Lys, Val, Leu, Met, Phe, Ser, Tyr, Arg, Gly, or Thr
QXTRALVRAX

SEQ ID NO: 50065 - protein, 11 aa, Artificial Sequence
  Description of Artificial Sequence: Synthetic peptide
  Seed: QRTRALVRAGM
  misc_feature (2)..(2): Xaa can be Arg, Lys, Ser, Ala, Asn, Asp, Cys, Gln, Glu, Gly, His, Ile, Leu, Met, Phe, Pro, Thr, Trp, Tyr, or Val
  misc_feature (11)..(11): Xaa can be Leu, Lys, Ala, Val, Ile, or Met
QXTRALVRAGX

SEQ ID NO: 50066 - protein, 10 aa, Artificial Sequence
  Description of Artificial Sequence: Synthetic peptide
  Seed: QRTRALVRTG
  misc_feature (2)..(2): Xaa can be Arg, Lys, Ser, Ala, Met, Tyr, His, Trp, Asn, Asp, Cys, Gln, Glu, Gly, Ile, Leu, Phe, Pro, Thr, or Val
  misc_feature (10)..(10): Xaa can be Ala, Ile, Lys, Val, Leu, Met, Ser, Phe, Thr, Tyr, Arg, or Gly
QXTRALVRTX

SEQ ID NO: 50067 - protein, 11 aa, Artificial Sequence
  Description of Artificial Sequence: Synthetic peptide
  Seed: QRTRALVRTGM
  misc_feature (2)..(2): Xaa can be Arg, Lys, Met, Ser, Ala, Asn, Asp, Cys, Gln, Glu, Gly, His, Ile, Leu, Phe, Pro, Thr, Trp, Tyr, or Val
  misc_feature (11)..(11): Xaa can be Leu, Lys, Ala, Val, Ile, Met, or Phe
QXTRALVRTGX

SEQ ID NO: 50068 - protein, 9 aa, Artificial Sequence
  Description of Artificial Sequence: Synthetic peptide
  Seed: QTAAQKAMM
  misc_feature (2)..(2): Xaa can be Thr, Ser, Ala, Val, Ile, or Met
  misc_feature (9)..(9): Xaa can be Trp, Val, Phe, Tyr, Met, Ile, Leu, or Ala
QXAAQKAMX

SEQ ID NO: 50069 - protein, 9 aa, Artificial Sequence
  Description of Artificial Sequence: Synthetic peptide
  Seed: QTAAQRAIM
  misc_feature (2)..(2): Xaa can be Thr, Ala, Ser, Val, Ile, or Met
  misc_feature (9)..(9): Xaa can be Trp, Val, Ile, Phe, Tyr, Leu, Met, or Ala
QXAAQRAIX

SEQ ID NO: 50070 - protein, 9 aa, Artificial Sequence
  Description of Artificial Sequence: Synthetic peptide
  Seed: QTAAQRAMM
  misc_feature (2)..(2): Xaa can be Thr, Val, Ser, Ala, Ile, or Met
  misc_feature (9)..(9): Xaa can be Trp, Ile, Tyr, Val, Phe, Leu, Met, Ala, Arg, or Lys
QXAAQRAMX

SEQ ID NO: 50071 - protein, 9 aa, Artificial Sequence
  Description of Artificial Sequence: Synthetic peptide
  Seed: QTASQRAMM
  misc_feature (2)..(2): Xaa can be Thr, Val, Ser, Ala, Ile, or Met
  misc_feature (9)..(9): Xaa can be Trp, Ile, Tyr, Val, Phe, Leu, Met, Arg, Lys, or Ala
QXASQRAMX

SEQ ID NO: 50072 - protein, 9 aa, Artificial Sequence
  Description of Artificial Sequence: Synthetic peptide
  Seed: QTSQVYSLI
  misc_feature (2)..(2): Xaa can be Thr, Val, Ala, Ile, Met, Ser, Gln, Leu, Gly, Asn, Cys, Phe, or Pro
  misc_feature (9)..(9): Xaa can be Trp, Val, Ala, Ile, Leu, Met, Phe, Tyr, or Thr
QXSQVYSLX

SEQ ID NO: 50073 - protein, 10 aa, Artificial Sequence
  Description of Artificial Sequence: Synthetic peptide
  Seed: QVFSLIRPKE
  misc_feature (2)..(2): Xaa can be Thr, Val, Ile, Ala, Leu, Met, or Ser
  misc_feature (10)..(10): Xaa can be Arg, Lys, Tyr, Ala, Asn, Asp, Cys, Gln, Glu, Gly, His, Ile, Leu, Met, Phe, Pro, Ser, Thr, Trp, or Val
QXFSLIRPKX

SEQ ID NO: 50074 - protein, 9 aa, Artificial Sequence
  Description of Artificial Sequence: Synthetic peptide
  Seed: QVREGRNPG
  misc_feature (2)..(2): Xaa can be Thr, Ser, Val, Met, Ile, Tyr, Ala, Gln, Leu, Phe, Gly, Trp, Asn, Cys, or His
  misc_feature (9)..(9): Xaa can be Lys, Ala, Ile, Val, Met, Leu, Tyr, Arg, Gly, Ser, Phe, Thr, Asn, Cys, His, or Pro
QXREGRNPX

SEQ ID NO: 50075 - protein, 9 aa, Artificial Sequence
  Description of Artificial Sequence: Synthetic peptide
  Seed: QVRESRNPG
  misc_feature (2)..(2): Xaa can be Thr, Ser, Val, Met, Ile, Ala, Phe, Tyr, Leu, Gln, Gly, Trp, Asn, Arg, Cys, His, or Lys
  misc_feature (9)..(9): Xaa can be Lys, Ala, Val, Ile, Met, Arg, Leu, Ser, Tyr, Gly, Phe, Pro, Cys, Thr, Asn, Gln, His, or Gl u
QXRESRNPX

SEQ ID NO: 50076 - protein, 9 aa, Artificial Sequence
  Description of Artificial Sequence: Synthetic peptide
  Seed: QVRESRSPG
  misc_feature (2)..(2): Xaa can be Ser, Thr, Val, Met, Ile, Tyr, Ala, Phe, Gln, Leu, Asn, Gly, Trp, Arg, Cys, His, or Lys
  misc_feature (9)..(9): Xaa can be Lys, Ala, Ile, Val, Leu, Met, Arg, Tyr, Ser, Gly, Phe, Pro, Asn, Cys, Thr, Gln, Glu, or Hi s
QXRESRSPX

SEQ ID NO: 50077 - protein, 10 aa, Artificial Sequence
  Description of Artificial Sequence: Synthetic peptide
  Seed: QVSVQPSFSV
  misc_feature (2)..(2): Xaa can be Thr, Val, Ala, Arg, Asn, Asp, Cys, Gln, Glu, Gly, His, Ile, Leu, Lys, Met, Phe, Pro, Ser, Trp, or Tyr
  misc_feature (10)..(10): Xaa can be Val, Ile, Ala, or Leu
QXSVQPSFSX

SEQ ID NO: 50078 - protein, 9 aa, Artificial Sequence
  Description of Artificial Sequence: Synthetic peptide
  Seed: RAANPIVPS
  misc_feature (2)..(2): Xaa can be Thr, Ser, Val, Met, Ala, Ile, Phe, Tyr, Trp, Gln, Gly, Leu, Asn, Arg, Cys, His, or Lys
  misc_feature (9)..(9): Xaa can be Lys, Ala, Val, Ile, Arg, Gly, Leu, Met, Ser, Tyr, His, Asn, Pro, Thr, Cys, Phe, Gln, or Gl u
RXANPIVPX

SEQ ID NO: 50079 - protein, 10 aa, Artificial Sequence
  Description of Artificial Sequence: Synthetic peptide
  Seed: RAANPIVPSF
  misc_feature (2)..(2): Xaa can be Gln, Leu, Met, Ala, Phe, Ser, Thr, Tyr, Val, Arg, Asn, Asp, Cys, Glu, Gly, His, Ile, Lys, Pro, or Trp
  misc_feature (10)..(10): Xaa can be Ile, Leu, Met, Phe, Trp, Tyr, Val, His, or Ala
RXANPIVPSX

SEQ ID NO: 50080 - protein, 8 aa, Artificial Sequence
  Description of Artificial Sequence: Synthetic peptide
  Seed: RAEIIRLM
  misc_feature (2)..(2): Xaa can be Thr, Ser, or Ala
  misc_feature (8)..(8): Xaa can be Tyr, Met, Phe, or Trp
RXEIIRLX

SEQ ID NO: 50081 - protein, 8 aa, Artificial Sequence
  Description of Artificial Sequence: Synthetic peptide
  Seed: RAEIIRMM
  misc_feature (2)..(2): Xaa can be Ala
  misc_feature (8)..(8): Xaa can be Met
RXEIIRMX

SEQ ID NO: 50082 - protein, 8 aa, Artificial Sequence
  Description of Artificial Sequence: Synthetic peptide
  Seed: RAEIIRVM
  misc_feature (2)..(2): Xaa can be Ala, Ser, or Thr
  misc_feature (8)..(8): Xaa can be Met, Tyr, Leu, or Phe
RXEIIRVX

SEQ ID NO: 50083 - protein, 8 aa, Artificial Sequence
  Description of Artificial Sequence: Synthetic peptide
  Seed: RAHVRTGM
  misc_feature (2)..(2): Xaa can be Ala
  misc_feature (8)..(8): Xaa can be Leu, Met, Phe, or Tyr
RXHVRTGX

SEQ ID NO: 50084 - protein, 11 aa, Artificial Sequence
  Description of Artificial Sequence: Synthetic peptide
  Seed: RAHVRTGMDPR
  misc_feature (2)..(2): Xaa can be Gln, Met, Phe, Thr, Trp, Tyr, Ala, Arg, Asn, Asp, Cys, Glu, Gly, His, Ile, Leu, Lys, Pro, Ser, or Val
  misc_feature (11)..(11): Xaa can be Arg or Lys
RXHVRTGMDPX

SEQ ID NO: 50085 - protein, 11 aa, Artificial Sequence
  Description of Artificial Sequence: Synthetic peptide
  Seed: RAIMDQVRESR
  misc_feature (2)..(2): Xaa can be Met, Phe, Thr, Trp, Tyr, Val, Ala, Arg, Asn, Asp, Cys, Gln, Glu, Gly, His, Ile, Leu, Lys, Pro, or Ser
  misc_feature (11)..(11): Xaa can be Arg or Lys
RXIMDQVRESX

SEQ ID NO: 50086 - protein, 9 aa, Artificial Sequence
  Description of Artificial Sequence: Synthetic peptide
  Seed: RAIRTRSGG
  misc_feature (2)..(2): Xaa can be Ser, Thr, Val, Ala, Ile, Met, Tyr, Phe, Leu, Trp, Gln, Gly, Asn, Cys, or His
  misc_feature (9)..(9): Xaa can be Lys, Ala, Val, Ile, Arg, Leu, Met, Gly, Ser, Tyr, Thr, Phe, Asn, Cys, Gln, Pro, Glu, or Hi s
RXIRTRSGX

SEQ ID NO: 50087 - protein, 11 aa, Artificial Sequence
  Description of Artificial Sequence: Synthetic peptide
  Seed: RALVRAGMDPR
  misc_feature (2)..(2): Xaa can be Gln, Ile, Leu, Met, Phe, Ser, Thr, Trp, Tyr, Val, Ala, Arg, Asn, Asp, Cys, Glu, Gly, His, Lys, or Pro
  misc_feature (11)..(11): Xaa can be Arg or Lys
RXLVRAGMDPX

SEQ ID NO: 50088 - protein, 8 aa, Artificial Sequence
  Description of Artificial Sequence: Synthetic peptide
  Seed: RALVRTGM
  misc_feature (2)..(2): Xaa can be Ala
  misc_feature (8)..(8): Xaa can be Met
RXLVRTGX

SEQ ID NO: 50089 - protein, 11 aa, Artificial Sequence
  Description of Artificial Sequence: Synthetic peptide
  Seed: RALVRTGMDPR
  misc_feature (2)..(2): Xaa can be Gln, Ile, Leu, Met, Phe, Ser, Thr, Trp, Tyr, Val, Ala, Arg, Asn, Asp, Cys, Glu, Gly, His, Lys, or Pro
  misc_feature (11)..(11): Xaa can be Arg or Lys
RXLVRTGMDPX

SEQ ID NO: 50090 - protein, 11 aa, Artificial Sequence
  Description of Artificial Sequence: Synthetic peptide
  Seed: RAMMDQVREGR
  misc_feature (2)..(2): Xaa can be Ala, Arg, Gln, Ile, Leu, Met, Phe, Ser, Thr, Trp, Tyr, Val, Asn, Asp, Cys, Glu, Gly, His, Lys, or Pro
  misc_feature (11)..(11): Xaa can be Arg or Lys
RXMMDQVREGX

SEQ ID NO: 50091 - protein, 11 aa, Artificial Sequence
  Description of Artificial Sequence: Synthetic peptide
  Seed: RAMMDQVRESR
  misc_feature (2)..(2): Xaa can be Ala, Arg, Gln, Ile, Leu, Lys, Met, Phe, Ser, Thr, Trp, Tyr, Val, Asn, Asp, Cys, Glu, Gly, His, or Pro
  misc_feature (11)..(11): Xaa can be Arg or Lys
RXMMDQVRESX

SEQ ID NO: 50092 - protein, 11 aa, Artificial Sequence
  Description of Artificial Sequence: Synthetic peptide
  Seed: RAMVDQVRESR
  misc_feature (2)..(2): Xaa can be Gln, Ile, Leu, Met, Phe, Ser, Thr, Trp, Tyr, Val, Ala, Arg, Asn, Cys, Gly, His, or Lys
  misc_feature (11)..(11): Xaa can be Arg or Lys
RXMVDQVRESX

SEQ ID NO: 50093 - protein, 9 aa, Artificial Sequence
  Description of Artificial Sequence: Synthetic peptide
  Seed: RASAGHISV
  misc_feature (2)..(2): Xaa can be Pro, Thr, Gln, Met, Ser, Val, Ala, Ile, Leu, Lys, Tyr, Phe, Glu, Gly, His, Trp, Arg, Asn, Cys, or Asp
  misc_feature (9)..(9): Xaa can be Tyr, Met, Phe, Leu, Ile, Lys, Trp, Val, Ala, His, Ser, Arg, Gly, Thr, Cys, Asn, Gln, Pro, or Glu
RXSAGHISX

SEQ ID NO: 50094 - protein, 9 aa, Artificial Sequence
  Description of Artificial Sequence: Synthetic peptide
  Seed: RASAGQISI
  misc_feature (2)..(2): Xaa can be Ala, Leu, Met, Ser, Thr, Val, Ile, Gln, Gly, Cys, Asn, Phe, Pro, or Tyr
  misc_feature (9)..(9): Xaa can be Trp, Phe, Ile, Leu, Met, Tyr, or Val
RXSAGQISX

SEQ ID NO: 50095 - protein, 9 aa, Artificial Sequence
  Description of Artificial Sequence: Synthetic peptide
  Seed: RASAGQVSV
  misc_feature (2)..(2): Xaa can be Thr, Ala, Met, Ser, Val, Ile, Gly, Leu, Tyr, Gln, Phe, Asn, Cys, or Trp
  misc_feature (9)..(9): Xaa can be Lys, Trp, Ala, Phe, Tyr, Met, Val, Ile, Leu, Arg, Gly, or Ser
RXSAGQVSX

SEQ ID NO: 50096 - protein, 9 aa, Artificial Sequence
  Description of Artificial Sequence: Synthetic peptide
  Seed: RASSGQISI
  misc_feature (2)..(2): Xaa can be Ala, Ser, Thr, Val, Ile, Met, Gly, Leu, Cys, Gln, Asn, Phe, or Pro
  misc_feature (9)..(9): Xaa can be Trp, Phe, Tyr, Met, Leu, Val, or Ile
RXSSGQISX

SEQ ID NO: 50097 - protein, 9 aa, Artificial Sequence
  Description of Artificial Sequence: Synthetic peptide
  Seed: RASVGRMIG
  misc_feature (2)..(2): Xaa can be Thr, Met, Ser, Val, Ile, Ala, Phe, Tyr, Leu, Gln, Trp, Asn, Gly, Cys, His, or Lys
  misc_feature (9)..(9): Xaa can be Lys, Ala, Val, Ile, Leu, Met, Tyr, Arg, Gly, Ser, Thr, Phe, Asn, Gln, His, Pro, Cys, or Gl u
RXSVGRMIX

SEQ ID NO: 50098 - protein, 9 aa, Artificial Sequence
  Description of Artificial Sequence: Synthetic peptide
  Seed: RASVGRMVG
  misc_feature (2)..(2): Xaa can be Thr, Ser, Met, Val, Ile, Ala, Tyr, Phe, Leu, Gln, Trp, Asn, Gly, Cys, His, or Lys
  misc_feature (9)..(9): Xaa can be Lys, Ala, Val, Ile, Leu, Met, Tyr, Arg, Gly, Ser, Thr, Asn, Phe, Gln, His, Pro, Cys, or Gl u
RXSVGRMVX

SEQ ID NO: 50099 - protein, 8 aa, Artificial Sequence
  Description of Artificial Sequence: Synthetic peptide
  Seed: RATIMAAF
  misc_feature (2)..(2): Xaa can be Gln, Ala, Ser, Thr, Lys, Met, Val, Glu, His, Leu, Phe, Tyr, Arg, Ile, or Pro
  misc_feature (8)..(8): Xaa can be Tyr, Phe, Met, Trp, Leu, or Ile
RXTIMAAX

SEQ ID NO: 50100 - protein, 9 aa, Artificial Sequence
  Description of Artificial Sequence: Synthetic peptide
  Seed: RATIMAAFI
  misc_feature (2)..(2): Xaa can be Thr, Ser, Val, Ala, Ile, Met, Gly, Cys, Leu, Pro, Asn, Gln, His, Phe, or Tyr
  misc_feature (9)..(9): Xaa can be Trp, Phe, Tyr, Met, Ile, Leu, Val, Thr, Gly, or Lys
RXTIMAAFX

SEQ ID NO: 50101 - protein, 10 aa, Artificial Sequence
  Description of Artificial Sequence: Synthetic peptide
  Seed: RATIMAAFTG
  misc_feature (2)..(2): Xaa can be Ser, Ala, Arg, Asn, Asp, Cys, Gln, Glu, Gly, His, Ile, Leu, Lys, Met, Phe, Pro, Thr, Trp, Tyr, or Val
  misc_feature (10)..(10): Xaa can be Gly, Ile, Leu, Met, Phe, Trp, Tyr, Val, Asn, Ala, or Cys
RXTIMAAFTX

SEQ ID NO: 50102 - protein, 10 aa, Artificial Sequence
  Description of Artificial Sequence: Synthetic peptide
  Seed: RATNPIVPSF
  misc_feature (2)..(2): Xaa can be Gln, Met, Ala, Ser, Thr, Arg, Asn, Asp, Cys, Glu, Gly, His, Ile, Leu, Lys, Phe, Pro, Trp, Tyr, or Val
  misc_feature (10)..(10): Xaa can be Ile, Leu, Met, Phe, Trp, Tyr, Val, His, or Ala
RXTNPIVPSX

SEQ ID NO: 50103 - protein, 8 aa, Artificial Sequence
  Description of Artificial Sequence: Synthetic peptide
  Seed: RATVMAAF
  misc_feature (2)..(2): Xaa can be Gln, Ala, Ser, Thr, Met, Lys, Val, Glu, His, Ile, Leu, Phe, Tyr, or Arg
  misc_feature (8)..(8): Xaa can be Tyr, Phe, Met, Leu, Trp, Ile, or Val
RXTVMAAX

SEQ ID NO: 50104 - protein, 9 aa, Artificial Sequence
  Description of Artificial Sequence: Synthetic peptide
  Seed: RATVMAAFI
  misc_feature (2)..(2): Xaa can be Thr, Ser, Val, Met, Ala, Gln, Ile, Leu, Tyr, Cys, Gly, Phe, Asn, Trp, His, or Pro
  misc_feature (9)..(9): Xaa can be Trp, Lys, Ala, Val, Ile, Leu, Phe, Met, Tyr, Arg, Gly, Ser, or Thr
RXTVMAAFX

SEQ ID NO: 50105 - protein, 10 aa, Artificial Sequence
  Description of Artificial Sequence: Synthetic peptide
  Seed: RATVMAAFTG
  misc_feature (2)..(2): Xaa can be Ser, Ala, Thr, Arg, Asn, Asp, Cys, Gln, Glu, Gly, His, Ile, Leu, Lys, Met, Phe, Pro, Trp, Tyr, or Val
  misc_feature (10)..(10): Xaa can be Ile, Leu, Met, Phe, Trp, Tyr, Val, Gly, Ala, Asn, or Cys
RXTVMAAFTX

SEQ ID NO: 50106 - protein, 11 aa, Artificial Sequence
  Description of Artificial Sequence: Synthetic peptide
  Seed: RDGKWMRELTL
  misc_feature (2)..(2): Xaa can be Arg, Gln, Ala, Asn, Asp, Cys, Glu, Gly, His, Ile, Leu, Lys, Met, Phe, Pro, Ser, Thr, Trp, Tyr, or Val
  misc_feature (11)..(11): Xaa can be Leu, Ile, Met, Phe, Val, Ala, Cys, or Thr
RXGKWMRELTX

SEQ ID NO: 50107 - protein, 10 aa, Artificial Sequence
  Description of Artificial Sequence: Synthetic peptide
  Seed: RDPKKTGGPI
  misc_feature (2)..(2): Xaa can be Pro, Ala, Arg, Asn, Asp, Cys, Gln, Glu, Gly, His, Ile, Leu, Lys, Met, Phe, Ser, Thr, Trp, Tyr, or Val
  misc_feature (10)..(10): Xaa can be Ala, Cys, Gly, Ile, Leu, Met, Phe, Ser, Thr, Trp, Tyr, Val, or Pro
RXPKKTGGPX

SEQ ID NO: 50108 - protein, 11 aa, Artificial Sequence
  Description of Artificial Sequence: Synthetic peptide
  Seed: RDPKKTGGPIY
  misc_feature (2)..(2): Xaa can be Gln, Met, Ala, Glu, His, Leu, Arg, Asn, Asp, Cys, Gly, Ile, Lys, Phe, Pro, Ser, Thr, Trp, Tyr, or Val
  misc_feature (11)..(11): Xaa can be Tyr, Phe, or Met
RXPKKTGGPIX

SEQ ID NO: 50109 - protein, 9 aa, Artificial Sequence
  Description of Artificial Sequence: Synthetic peptide
  Seed: REGKWIREL
  misc_feature (2)..(2): Xaa can be Glu
  misc_feature (9)..(9): Xaa can be Ala, Cys, Ile, Leu, Met, Phe, Thr, Tyr, or Val
RXGKWIREX

SEQ ID NO: 50110 - protein, 10 aa, Artificial Sequence
  Description of Artificial Sequence: Synthetic peptide
  Seed: REGKWIRELI
  misc_feature (2)..(2): Xaa can be Glu
  misc_feature (10)..(10): Xaa can be Ala, Ile, Leu, Met, Phe, or Val
RXGKWIRELX

SEQ ID NO: 50111 - protein, 11 aa, Artificial Sequence
  Description of Artificial Sequence: Synthetic peptide
  Seed: REGKWIRELIL
  misc_feature (2)..(2): Xaa can be Glu
  misc_feature (11)..(11): Xaa can be Ile, Leu, Met, Phe, or Val
RXGKWIRELIX

SEQ ID NO: 50112 - protein, 9 aa, Artificial Sequence
  Description of Artificial Sequence: Synthetic peptide
  Seed: REGKWVREL
  misc_feature (2)..(2): Xaa can be Glu
  misc_feature (9)..(9): Xaa can be Ala, Cys, Ile, Leu, Met, Phe, Thr, or Val
RXGKWVREX

SEQ ID NO: 50113 - protein, 10 aa, Artificial Sequence
  Description of Artificial Sequence: Synthetic peptide
  Seed: REGKWVRELI
  misc_feature (2)..(2): Xaa can be Glu
  misc_feature (10)..(10): Xaa can be Ala, Ile, Leu, Met, Phe, or Val
RXGKWVRELX

SEQ ID NO: 50114 - protein, 11 aa, Artificial Sequence
  Description of Artificial Sequence: Synthetic peptide
  Seed: REGKWVRELIL
  misc_feature (2)..(2): Xaa can be Glu
  misc_feature (11)..(11): Xaa can be Ile, Leu, Met, Phe, or Val
RXGKWVRELIX

SEQ ID NO: 50115 - protein, 11 aa, Artificial Sequence
  Description of Artificial Sequence: Synthetic peptide
  Seed: REGKWVRELVL
  misc_feature (2)..(2): Xaa can be Glu
  misc_feature (11)..(11): Xaa can be Ala, Ile, Leu, Met, Phe, or Val
RXGKWVRELVX

SEQ ID NO: 50116 - protein, 9 aa, Artificial Sequence
  Description of Artificial Sequence: Synthetic peptide
  Seed: REGYSLIGI
  misc_feature (2)..(2): Xaa can be Glu or Gln
  misc_feature (9)..(9): Xaa can be Phe, Tyr, Ala, Ile, Leu, Met, Pro, Thr, or Val
RXGYSLIGX

SEQ ID NO: 50117 - protein, 9 aa, Artificial Sequence
  Description of Artificial Sequence: Synthetic peptide
  Seed: REGYSLVGI
  misc_feature (2)..(2): Xaa can be Glu or Gln
  misc_feature (9)..(9): Xaa can be Phe, Tyr, Ala, Ile, Leu, Met, Pro, Thr, or Val
RXGYSLVGX

SEQ ID NO: 50118 - protein, 11 aa, Artificial Sequence
  Description of Artificial Sequence: Synthetic peptide
  Seed: RELILCDKEEI
  misc_feature (2)..(2): Xaa can be Glu
  misc_feature (11)..(11): Xaa can be Ile, Leu, or Met
RXLILCDKEEX

SEQ ID NO: 50119 - protein, 11 aa, Artificial Sequence
  Description of Artificial Sequence: Synthetic peptide
  Seed: RELILHDKEEI
  misc_feature (2)..(2): Xaa can be Glu
  misc_feature (11)..(11): Xaa can be Ile, Leu, or Met
RXLILHDKEEX

SEQ ID NO: 50120 - protein, 11 aa, Artificial Sequence
  Description of Artificial Sequence: Synthetic peptide
  Seed: RELILYDKEEI
  misc_feature (2)..(2): Xaa can be Glu
  misc_feature (11)..(11): Xaa can be Ile, Leu, or Met
RXLILYDKEEX

SEQ ID NO: 50121 - protein, 11 aa, Artificial Sequence
  Description of Artificial Sequence: Synthetic peptide
  Seed: RELTLYDKEEI
  misc_feature (2)..(2): Xaa can be Glu
  misc_feature (11)..(11): Xaa can be Ile, Leu, or Met
RXLTLYDKEEX

SEQ ID NO: 50122 - protein, 11 aa, Artificial Sequence
  Description of Artificial Sequence: Synthetic peptide
  Seed: RELVLYDKEEI
  misc_feature (2)..(2): Xaa can be Glu
  misc_feature (11)..(11): Xaa can be Ile, Leu, or Met
RXLVLYDKEEX

SEQ ID NO: 50123 - protein, 11 aa, Artificial Sequence
  Description of Artificial Sequence: Synthetic peptide
  Seed: RELVLYDKGEI
  misc_feature (2)..(2): Xaa can be Glu
  misc_feature (11)..(11): Xaa can be Ile, Leu, or Met
RXLVLYDKGEX

SEQ ID NO: 50124 - protein, 9 aa, Artificial Sequence
  Description of Artificial Sequence: Synthetic peptide
  Seed: RESRNPGNA
  misc_feature (2)..(2): Xaa can be Glu
  misc_feature (9)..(9): Xaa can be Ala
RXSRNPGNX

SEQ ID NO: 50125 - protein, 10 aa, Artificial Sequence
  Description of Artificial Sequence: Synthetic peptide
  Seed: RESRNPGNAE
  misc_feature (2)..(2): Xaa can be Ala, Ile, Leu, Met, Phe, Ser, Thr, Trp, Tyr, Val, Arg, Asn, Asp, Cys, Gln, Glu, Gly, His, Lys, or Pro
  misc_feature (10)..(10): Xaa can be Ala, Arg, Asn, Cys, Gln, Glu, Gly, Ile, Leu, Lys, Met, Phe, Pro, Ser, Thr, Tyr, Val, or Hi s
RXSRNPGNAX

SEQ ID NO: 50126 - protein, 11 aa, Artificial Sequence
  Description of Artificial Sequence: Synthetic peptide
  Seed: RESRNPGNAEF
  misc_feature (2)..(2): Xaa can be Ala, Arg, Gln, Glu, His, Asn, Asp, Cys, Gly, Lys, Met, Leu, Ser, Ile, Phe, Tyr, or Val
  misc_feature (11)..(11): Xaa can be Phe, Tyr, Met, or Leu
RXSRNPGNAEX

SEQ ID NO: 50127 - protein, 9 aa, Artificial Sequence
  Description of Artificial Sequence: Synthetic peptide
  Seed: RESRSPGNA
  misc_feature (2)..(2): Xaa can be Glu
  misc_feature (9)..(9): Xaa can be Ala or Val
RXSRSPGNX

SEQ ID NO: 50128 - protein, 10 aa, Artificial Sequence
  Description of Artificial Sequence: Synthetic peptide
  Seed: RESRSPGNAE
  misc_feature (2)..(2): Xaa can be Ala, Arg, Asn, Asp, Cys, Gln, Glu, Gly, His, Ile, Leu, Lys, Met, Phe, Pro, Ser, Thr, Trp, Tyr, or Val
  misc_feature (10)..(10): Xaa can be Ala, Arg, Asn, Cys, Gln, Glu, Gly, His, Ile, Leu, Lys, Met, Phe, Pro, Ser, Thr, Tyr, or Va l
RXSRSPGNAX

SEQ ID NO: 50129 - protein, 10 aa, Artificial Sequence
  Description of Artificial Sequence: Synthetic peptide
  Seed: RFYIQMCTEF
  misc_feature (2)..(2): Xaa can be Gln, Met, Ala, Arg, Asn, Asp, Cys, Glu, Gly, His, Ile, Leu, Lys, Phe, Pro, Ser, Thr, Trp, Tyr, or Val
  misc_feature (10)..(10): Xaa can be Ile, Leu, Met, Phe, Trp, Tyr, Val, His, or Ala
RXYIQMCTEX

SEQ ID NO: 50130 - protein, 11 aa, Artificial Sequence
  Description of Artificial Sequence: Synthetic peptide
  Seed: RFYIQMCTEFK
  misc_feature (2)..(2): Xaa can be Ala, Arg, Asn, Asp, Cys, Gln, Glu, Gly, His, Ile, Leu, Lys, Met, Phe, Pro, Ser, Thr, Trp, Tyr, or Val
  misc_feature (11)..(11): Xaa can be Ala, Arg, Asn, Asp, Cys, Gln, Glu, Gly, His, Ile, Leu, Lys, Met, Phe, Pro, Ser, Thr, Trp, Tyr, or Val
RXYIQMCTEFX

SEQ ID NO: 50131 - protein, 11 aa, Artificial Sequence
  Description of Artificial Sequence: Synthetic peptide
  Seed: RFYIQMCTEIK
  misc_feature (2)..(2): Xaa can be Thr, Ala, Gln, Ile, Leu, Met, Phe, Ser, Trp, Tyr, Val, Arg, Asn, Asp, Cys, Glu, Gly, His, Lys, or Pro
  misc_feature (11)..(11): Xaa can be Arg, Lys, or Ala
RXYIQMCTEIX

SEQ ID NO: 50132 - protein, 11 aa, Artificial Sequence
  Description of Artificial Sequence: Synthetic peptide
  Seed: RFYIQMCTELK
  misc_feature (2)..(2): Xaa can be Met, Ile, Leu, Ser, Thr, Val, Ala, Arg, Asn, Asp, Cys, Gln, Glu, Gly, His, Lys, Phe, Pro, Trp, or Tyr
  misc_feature (11)..(11): Xaa can be Arg, Lys, Tyr, Ala, or His
RXYIQMCTELX

SEQ ID NO: 50133 - protein, 10 aa, Artificial Sequence
  Description of Artificial Sequence: Synthetic peptide
  Seed: RFYVQMCTEL
  misc_feature (2)..(2): Xaa can be Ala, Arg, Asn, Asp, Cys, Gln, Glu, Gly, His, Ile, Leu, Lys, Met, Phe, Pro, Ser, Thr, Trp, Tyr, or Val
  misc_feature (10)..(10): Xaa can be Ile, Leu, Met, Phe, Trp, Tyr, or Val
RXYVQMCTEX

SEQ ID NO: 50134 - protein, 11 aa, Artificial Sequence
  Description of Artificial Sequence: Synthetic peptide
  Seed: RFYVQMCTELK
  misc_feature (2)..(2): Xaa can be Met, Thr, Ile, Leu, Ser, Val, Ala, Arg, Asn, Asp, Cys, Gln, Glu, Gly, His, Lys, Phe, Pro, Trp, or Tyr
  misc_feature (11)..(11): Xaa can be Arg, Lys, Tyr, Ala, or His
RXYVQMCTELX

SEQ ID NO: 50135 - protein, 8 aa, Artificial Sequence
  Description of Artificial Sequence: Synthetic peptide
  Seed: RGAKVVPR
  misc_feature (2)..(2): Xaa can be Ile, Leu, Met, Phe, Thr, Trp, Tyr, Val, Ala, Arg, Asn, Cys, Gln, Gly, His, Lys, or Ser
  misc_feature (8)..(8): Xaa can be Arg or Lys
RXAKVVPX

SEQ ID NO: 50136 - protein, 8 aa, Artificial Sequence
  Description of Artificial Sequence: Synthetic peptide
  Seed: RGARVLPR
  misc_feature (2)..(2): Xaa can be Gln, Ile, Leu, Met, Phe, Ser, Thr, Trp, Tyr, Val, Ala, Arg, Asn, Cys, Gly, His, or Lys
  misc_feature (8)..(8): Xaa can be Arg or Lys
RXARVLPX

SEQ ID NO: 50137 - protein, 11 aa, Artificial Sequence
  Description of Artificial Sequence: Synthetic peptide
  Seed: RGARVLPRGQL
  misc_feature (2)..(2): Xaa can be Arg, Gln, Ala, Asn, Asp, Cys, Glu, Gly, His, Ile, Leu, Lys, Met, Phe, Pro, Ser, Thr, Trp, Tyr, or Val
  misc_feature (11)..(11): Xaa can be Leu, Ile, Met, Phe, Ala, or Val
RXARVLPRGQX

SEQ ID NO: 50138 - protein, 8 aa, Artificial Sequence
  Description of Artificial Sequence: Synthetic peptide
  Seed: RGARVVPR
  misc_feature (2)..(2): Xaa can be Gln, Ile, Leu, Met, Phe, Ser, Thr, Trp, Tyr, Val, Ala, Arg, Asn, Cys, Gly, His, or Lys
  misc_feature (8)..(8): Xaa can be Arg or Lys
RXARVVPX

SEQ ID NO: 50139 - protein, 10 aa, Artificial Sequence
  Description of Artificial Sequence: Synthetic peptide
  Seed: RGAYERMCNI
  misc_feature (2)..(2): Xaa can be Thr, Ser, Tyr, Val, Ala, Arg, Asn, Asp, Cys, Gln, Glu, Gly, His, Ile, Leu, Lys, Met, Phe, Pro, or Trp
  misc_feature (10)..(10): Xaa can be Ala, Ile, Leu, Lys, Met, Phe, Trp, Tyr, Val, Ser, Gly, Thr, Arg, or Cys
RXAYERMCNX

SEQ ID NO: 50140 - protein, 9 aa, Artificial Sequence
  Description of Artificial Sequence: Synthetic peptide
  Seed: RGENGRLTR
  misc_feature (2)..(2): Xaa can be Ile, Leu, Met, Phe, Thr, Trp, Tyr, Val, Ala, Gln, Gly, or Ser
  misc_feature (9)..(9): Xaa can be Arg or Lys
RXENGRLTX

SEQ ID NO: 50141 - protein, 10 aa, Artificial Sequence
  Description of Artificial Sequence: Synthetic peptide
  Seed: RGENGRLTRI
  misc_feature (2)..(2): Xaa can be Glu, Ala, Arg, Asn, Asp, Cys, Gln, Gly, His, Ile, Leu, Lys, Met, Phe, Pro, Ser, Thr, Trp, Tyr, or Val
  misc_feature (10)..(10): Xaa can be Ile, Leu, Met, Phe, or Val
RXENGRLTRX

SEQ ID NO: 50142 - protein, 11 aa, Artificial Sequence
  Description of Artificial Sequence: Synthetic peptide
  Seed: RGFQIASNENM
  misc_feature (2)..(2): Xaa can be Gln, Met, Ala, Arg, Asn, Asp, Cys, Glu, Gly, His, Ile, Leu, Lys, Phe, Pro, Ser, Thr, Trp, Tyr, or Val
  misc_feature (11)..(11): Xaa can be Met, Phe, Tyr, or Leu
RXFQIASNENX

SEQ ID NO: 50143 - protein, 9 aa, Artificial Sequence
  Description of Artificial Sequence: Synthetic peptide
  Seed: RGINDRNFW
  misc_feature (2)..(2): Xaa can be Ser, Thr, Ala, Val, Ile, Met, Leu, Asn, Cys, Gln, Gly, or Phe
  misc_feature (9)..(9): Xaa can be Trp, Tyr, Phe, Met, Ile, Leu, or Val
RXINDRNFX

SEQ ID NO: 50144 - protein, 10 aa, Artificial Sequence
  Description of Artificial Sequence: Synthetic peptide
  Seed: RGINDRNFWR
  misc_feature (2)..(2): Xaa can be Ile, Leu, Met, Phe, Thr, Trp, Tyr, Val, Ala, Gln, Ser, Arg, Asn, Asp, Cys, Glu, Gly, His, Lys, or Pro
  misc_feature (10)..(10): Xaa can be Arg, Lys, His, or Tyr
RXINDRNFWX

SEQ ID NO: 50145 - protein, 11 aa, Artificial Sequence
  Description of Artificial Sequence: Synthetic peptide
  Seed: RGINDRNFWRG
  misc_feature (2)..(2): Xaa can be Ala, Arg, Asn, Asp, Cys, Gln, Glu, Gly, His, Ile, Leu, Lys, Met, Phe, Pro, Ser, Thr, Trp, Tyr, or Val
  misc_feature (11)..(11): Xaa can be Ala, Arg, Asn, Asp, Cys, Gln, Glu, Gly, His, Ile, Leu, Lys, Met, Phe, Pro, Ser, Thr, Trp, Tyr, or Val
RXINDRNFWRX

SEQ ID NO: 50146 - protein, 11 aa, Artificial Sequence
  Description of Artificial Sequence: Synthetic peptide
  Seed: RGIQIASNENM
  misc_feature (2)..(2): Xaa can be Gln, Ala, Arg, Asn, Asp, Cys, Glu, Gly, His, Ile, Leu, Lys, Met, Phe, Pro, Ser, Thr, Trp, Tyr, or Val
  misc_feature (11)..(11): Xaa can be Met, Phe, Tyr, or Leu
RXIQIASNENX

SEQ ID NO: 50147 - protein, 8 aa, Artificial Sequence
  Description of Artificial Sequence: Synthetic peptide
  Seed: RGKKVIPR
  misc_feature (2)..(2): Xaa can be Ile, Leu, Met, Phe, Thr, Trp, Tyr, Val, Ala, Arg, Asn, Cys, Gln, Gly, His, Lys, or Ser
  misc_feature (8)..(8): Xaa can be Arg or Lys
RXKKVIPX

SEQ ID NO: 50148 - protein, 9 aa, Artificial Sequence
  Description of Artificial Sequence: Synthetic peptide
  Seed: RGKKVIPRG
  misc_feature (2)..(2): Xaa can be Thr, Ile, Met, Phe, Ser, Tyr, Val, Ala, Leu, Trp, Gln, Gly, Asn, Cys, Arg, His, Lys, or Pr o
  misc_feature (9)..(9): Xaa can be Lys, Ala, Ile, Leu, Met, Ser, Val, Arg, Cys, Gly, Thr, Tyr, Gln, Glu, Asn, Phe, Pro, His, Asp, or Trp
RXKKVIPRX

SEQ ID NO: 50149 - protein, 10 aa, Artificial Sequence
  Description of Artificial Sequence: Synthetic peptide
  Seed: RGKKVIPRGK
  misc_feature (2)..(2): Xaa can be Thr, Ser, Tyr, Val, Ala, Ile, Met, Phe, Trp, Leu, Gln, Gly, Asn, Cys, or His
  misc_feature (10)..(10): Xaa can be Lys, Ala, Val, Ile, Met, Leu, Ser, Arg, Thr, Tyr, Gly, Cys, Pro, Gln, Glu, Phe, Asn, or Hi s
RXKKVIPRGX

SEQ ID NO: 50150 - protein, 8 aa, Artificial Sequence
  Description of Artificial Sequence: Synthetic peptide
  Seed: RGKKVVPR
  misc_feature (2)..(2): Xaa can be Ile, Leu, Met, Phe, Thr, Trp, Tyr, Val, Ala, Arg, Asn, Cys, Gln, Gly, His, Lys, or Ser
  misc_feature (8)..(8): Xaa can be Arg or Lys
RXKKVVPX

SEQ ID NO: 50151 - protein, 9 aa, Artificial Sequence
  Description of Artificial Sequence: Synthetic peptide
  Seed: RGKKVVPRG
  misc_feature (2)..(2): Xaa can be Thr, Ile, Met, Ser, Val, Ala, Phe, Tyr, Leu, Trp, Gln, Gly, Asn, Cys, Arg, His, Lys, or Pr o
  misc_feature (9)..(9): Xaa can be Lys, Ala, Ile, Leu, Met, Ser, Val, Arg, Cys, Gly, Thr, Tyr, Gln, Asn, Glu, Phe, Pro, His, Asp, or Trp
RXKKVVPRX

SEQ ID NO: 50152 - protein, 10 aa, Artificial Sequence
  Description of Artificial Sequence: Synthetic peptide
  Seed: RGKKVVPRGK
  misc_feature (2)..(2): Xaa can be Ala, Gly, Gln, Asn, Ile, Leu, Met, Phe, Ser, Thr, Trp, Tyr, Val, or Cys
  misc_feature (10)..(10): Xaa can be Lys, Arg, Ala, Val, Ile, Leu, Met, Ser, Thr, or Tyr
RXKKVVPRGX

SEQ ID NO: 50153 - protein, 9 aa, Artificial Sequence
  Description of Artificial Sequence: Synthetic peptide
  Seed: RGKLSTRGV
  misc_feature (2)..(2): Xaa can be Thr, Val, Ile, Met, Ser, Ala, Leu, Phe, Tyr, Gln, Gly, Trp, Asn, Cys, Arg, His, Lys, or Pr o
  misc_feature (9)..(9): Xaa can be Lys, Ala, Ile, Leu, Met, Val, Arg, Gly, Ser, Thr, Tyr, Cys, Phe, Pro, Gln, Asn, Glu, His, Asp, or Trp
RXKLSTRGX

SEQ ID NO: 50154 - protein, 8 aa, Artificial Sequence
  Description of Artificial Sequence: Synthetic peptide
  Seed: RGKRVVPR
  misc_feature (2)..(2): Xaa can be Gln, Ile, Leu, Met, Phe, Ser, Thr, Trp, Tyr, Val, Ala, Arg, Asn, Cys, Gly, His, or Lys
  misc_feature (8)..(8): Xaa can be Arg or Lys
RXKRVVPX

SEQ ID NO: 50155 - protein, 9 aa, Artificial Sequence
  Description of Artificial Sequence: Synthetic peptide
  Seed: RGKRVVPRG
  misc_feature (2)..(2): Xaa can be Thr, Val, Ile, Met, Phe, Ser, Ala, Leu, Tyr, Gln, Gly, Trp, Asn, Cys, His, Arg, Glu, Lys, or Pro
  misc_feature (9)..(9): Xaa can be Lys, Ala, Arg, Ile, Leu, Met, Ser, Tyr, Val, Cys, Gly, Thr, Gln, Glu, Phe, Pro, Asn, His, Asp, or Trp
RXKRVVPRX

SEQ ID NO: 50156 - protein, 10 aa, Artificial Sequence
  Description of Artificial Sequence: Synthetic peptide
  Seed: RGKRVVPRGK
  misc_feature (2)..(2): Xaa can be Ser, Thr, Val, Tyr, Met, Ala, Ile, Phe, Leu, Trp, Gln, Gly, Asn, Cys, or His
  misc_feature (10)..(10): Xaa can be Lys, Ala, Val, Ile, Leu, Met, Ser, Gly, Tyr, Cys, Thr, Arg, Pro, Phe, Gln, Glu, Asn, or Hi s
RXKRVVPRGX

SEQ ID NO: 50157 - protein, 9 aa, Artificial Sequence
  Description of Artificial Sequence: Synthetic peptide
  Seed: RGLTHMMIW
  misc_feature (2)..(2): Xaa can be Ser, Thr, Ala, Gln, Ile, Leu, Met, Val, Gly, Asn, Cys, Tyr, Phe, or Pro
  misc_feature (9)..(9): Xaa can be Trp, Phe, Tyr, Met, Leu, Ile, Val, Ala, Gly, or His
RXLTHMMIX

SEQ ID NO: 50158 - protein, 9 aa, Artificial Sequence
  Description of Artificial Sequence: Synthetic peptide
  Seed: RGQLATRGV
  misc_feature (2)..(2): Xaa can be Thr, Val, Ser, Ile, Met, Ala, Phe, Tyr, Trp, Leu, Gln, Gly, Asn, Cys, or His
  misc_feature (9)..(9): Xaa can be Lys, Ala, Val, Ile, Leu, Met, Ser, Arg, Tyr, Gly, Cys, Phe, Pro, Thr, Asn, Gln, Glu, or Hi s
RXQLATRGX

SEQ ID NO: 50159 - protein, 9 aa, Artificial Sequence
  Description of Artificial Sequence: Synthetic peptide
  Seed: RGQLSTRGF
  misc_feature (2)..(2): Xaa can be Gln, Met, Lys, Ala, Arg, Glu, Gly, His, Leu, Ser, Val, Asn, Ile, Thr, Phe, or Tyr
  misc_feature (9)..(9): Xaa can be Phe, Tyr, Met, Leu, His, Ile, Trp, Val, or Ala
RXQLSTRGX

SEQ ID NO: 50160 - protein, 9 aa, Artificial Sequence
  Description of Artificial Sequence: Synthetic peptide
  Seed: RGQMSTRGV
  misc_feature (2)..(2): Xaa can be Thr, Val, Ser, Ile, Met, Ala, Tyr, Phe, Leu, Gln, Trp, Asn, Gly, Cys, or His
  misc_feature (9)..(9): Xaa can be Lys, Ala, Val, Ile, Met, Leu, Arg, Gly, Ser, Thr, Tyr, Phe, Pro, Cys, Gln, Glu, His, or As n
RXQMSTRGX

SEQ ID NO: 50161 - protein, 9 aa, Artificial Sequence
  Description of Artificial Sequence: Synthetic peptide
  Seed: RGRGVFELS
  misc_feature (2)..(2): Xaa can be Ile, Met, Ser, Thr, Val, Phe, Tyr, Ala, Gln, Gly, Leu, Trp, Asn, Cys, His, Lys, Arg, Glu, or Pro
  misc_feature (9)..(9): Xaa can be Lys, Ala, Arg, Ile, Leu, Met, Ser, Tyr, Val, Cys, Gly, Thr, Asn, Gln, Glu, His, Phe, Pro, Asp, or Trp
RXRGVFELX

SEQ ID NO: 50162 - protein, 9 aa, Artificial Sequence
  Description of Artificial Sequence: Synthetic peptide
  Seed: RGRLSTRGI
  misc_feature (2)..(2): Xaa can be Ala, Ile, Leu, Met, Ser, Thr, Val, Phe, Tyr, Gln, Gly, Trp, Asn, Cys, His, Lys, Arg, Glu, or Pro
  misc_feature (9)..(9): Xaa can be Lys, Ala, Val, Arg, Ile, Leu, Met, Phe, Ser, Tyr, Cys, Glu, Gly, Pro, Thr, Asn, Gln, His, Asp, or Trp
RXRLSTRGX

SEQ ID NO: 50163 - protein, 10 aa, Artificial Sequence
  Description of Artificial Sequence: Synthetic peptide
  Seed: RGTKVCPRGK
  misc_feature (2)..(2): Xaa can be Met, Phe, Ser, Tyr, Val, Ala, Arg, Asn, Asp, Cys, Gln, Glu, Gly, His, Ile, Leu, Lys, Pro, Thr, or Trp
  misc_feature (10)..(10): Xaa can be Ala, Arg, Ile, Leu, Lys, Met, Ser, Val, or Thr
RXTKVCPRGX

SEQ ID NO: 50164 - protein, 8 aa, Artificial Sequence
  Description of Artificial Sequence: Synthetic peptide
  Seed: RGTKVFPR
  misc_feature (2)..(2): Xaa can be Ala, Gln, Ile, Leu, Met, Phe, Ser, Thr, Trp, Tyr, Val, Arg, Asn, Cys, Gly, His, or Lys
  misc_feature (8)..(8): Xaa can be Arg or Lys
RXTKVFPX

SEQ ID NO: 50165 - protein, 10 aa, Artificial Sequence
  Description of Artificial Sequence: Synthetic peptide
  Seed: RGTKVFPRGK
  misc_feature (2)..(2): Xaa can be Ala, Arg, Asn, Asp, Cys, Gln, Glu, Gly, His, Ile, Leu, Lys, Met, Phe, Pro, Ser, Thr, Trp, Tyr, or Val
  misc_feature (10)..(10): Xaa can be Ala, Arg, Cys, Gly, Ile, Leu, Lys, Met, Phe, Pro, Ser, Thr, Tyr, or Val
RXTKVFPRGX

SEQ ID NO: 50166 - protein, 8 aa, Artificial Sequence
  Description of Artificial Sequence: Synthetic peptide
  Seed: RGTKVIPR
  misc_feature (2)..(2): Xaa can be Met, Phe, Thr, Trp, Tyr, Ala, Asn, Cys, Gln, Gly, His, Ile, Leu, Ser, or Val
  misc_feature (8)..(8): Xaa can be Arg or Lys
RXTKVIPX

SEQ ID NO: 50167 - protein, 10 aa, Artificial Sequence
  Description of Artificial Sequence: Synthetic peptide
  Seed: RGTKVIPRGK
  misc_feature (2)..(2): Xaa can be Tyr, Phe, Trp, Val, Ile, Leu, Met, Ser, Thr, Ala, Arg, Asn, Asp, Cys, Gln, Glu, Gly, His, Lys, or Pro
  misc_feature (10)..(10): Xaa can be Ala, Ile, Leu, Lys, Met, Ser, Thr, Tyr, Val, Gly, Cys, or Arg
RXTKVIPRGX

SEQ ID NO: 50168 - protein, 10 aa, Artificial Sequence
  Description of Artificial Sequence: Synthetic peptide
  Seed: RGTKVSPRGK
  misc_feature (2)..(2): Xaa can be Met, Tyr, Ile, Phe, Thr, Trp, Val, Ala, Arg, Cys, His, Leu, Lys, Ser, Asn, Asp, Gln, Glu, Gly, or Pro
  misc_feature (10)..(10): Xaa can be Ala, Cys, Ile, Leu, Lys, Met, Ser, Thr, Tyr, Val, Phe, Gly, or Arg
RXTKVSPRGX

SEQ ID NO: 50169 - protein, 8 aa, Artificial Sequence
  Description of Artificial Sequence: Synthetic peptide
  Seed: RGTKVVPR
  misc_feature (2)..(2): Xaa can be Met, Phe, Thr, Trp, Tyr, Ala, Asn, Cys, Gln, Gly, His, Ile, Leu, Ser, or Val
  misc_feature (8)..(8): Xaa can be Arg or Lys
RXTKVVPX

SEQ ID NO: 50170 - protein, 10 aa, Artificial Sequence
  Description of Artificial Sequence: Synthetic peptide
  Seed: RGTKVVPRGK
  misc_feature (2)..(2): Xaa can be Phe, Trp, Tyr, Val, Gly, Ile, Leu, Met, Ser, Thr, His, Lys, Pro, Glu, Gln, Ala, Arg, Asn, Asp, or Cys
  misc_feature (10)..(10): Xaa can be Lys, Ser, Thr, Tyr, Val, Ala, Ile, Leu, Met, Gly, Arg, or Cys
RXTKVVPRGX

SEQ ID NO: 50171 - protein, 8 aa, Artificial Sequence
  Description of Artificial Sequence: Synthetic peptide
  Seed: RGTRIVPR
  misc_feature (2)..(2): Xaa can be Gln, Ile, Leu, Met, Phe, Thr, Trp, Tyr, Val, Ala, Arg, Asn, Cys, Gly, His, Lys, or Ser
  misc_feature (8)..(8): Xaa can be Arg or Lys
RXTRIVPX

SEQ ID NO: 50172 - protein, 10 aa, Artificial Sequence
  Description of Artificial Sequence: Synthetic peptide
  Seed: RGTRIVPRGQ
  misc_feature (2)..(2): Xaa can be Met, Phe, Trp, Tyr, Val, Ala, Arg, Asn, Asp, Cys, Gln, Glu, Gly, His, Ile, Leu, Lys, Pro, Ser, or Thr
  misc_feature (10)..(10): Xaa can be Ala, Arg, Cys, Gln, Glu, Gly, Ile, Leu, Lys, Met, Phe, Pro, Ser, Thr, Tyr, Val, or Asn
RXTRIVPRGX

SEQ ID NO: 50173 - protein, 11 aa, Artificial Sequence
  Description of Artificial Sequence: Synthetic peptide
  Seed: RGTRIVPRGQL
  misc_feature (2)..(2): Xaa can be Arg, Gln, Lys, Met, Ala, Asn, Asp, Cys, Glu, Gly, His, Ile, Leu, Phe, Pro, Ser, Thr, Trp, Tyr, or Val
  misc_feature (11)..(11): Xaa can be Leu, Lys, Phe, Met, Ile, Ala, Arg, Tyr, or Val
RXTRIVPRGQX

SEQ ID NO: 50174 - protein, 8 aa, Artificial Sequence
  Description of Artificial Sequence: Synthetic peptide
  Seed: RGTRLVPR
  misc_feature (2)..(2): Xaa can be Gln, Ile, Leu, Met, Phe, Thr, Trp, Tyr, Val, Ala, Arg, Asn, Cys, Gly, His, Lys, or Ser
  misc_feature (8)..(8): Xaa can be Arg or Lys
RXTRLVPX

SEQ ID NO: 50175 - protein, 10 aa, Artificial Sequence
  Description of Artificial Sequence: Synthetic peptide
  Seed: RGTRLVPRGQ
  misc_feature (2)..(2): Xaa can be Ala, Arg, Asn, Asp, Cys, Gln, Glu, Gly, His, Ile, Leu, Lys, Met, Phe, Pro, Ser, Thr, Trp, Tyr, or Val
  misc_feature (10)..(10): Xaa can be Ala, Arg, Asn, Cys, Gln, Glu, Gly, Ile, Leu, Lys, Met, Phe, Pro, Ser, Thr, Tyr, or Val
RXTRLVPRGX

SEQ ID NO: 50176 - protein, 11 aa, Artificial Sequence
  Description of Artificial Sequence: Synthetic peptide
  Seed: RGTRLVPRGQL
  misc_feature (2)..(2): Xaa can be Arg, Gln, Ala, Asn, Asp, Cys, Glu, Gly, His, Ile, Leu, Lys, Met, Phe, Pro, Ser, Thr, Trp, Tyr, or Val
  misc_feature (11)..(11): Xaa can be Arg, Leu, Lys, Met, Phe, Ile, Ala, Trp, Tyr, or Val
RXTRLVPRGQX

SEQ ID NO: 50177 - protein, 8 aa, Artificial Sequence
  Description of Artificial Sequence: Synthetic peptide
  Seed: RGTRMVPR
  misc_feature (2)..(2): Xaa can be Gln, Ile, Leu, Met, Phe, Thr, Trp, Tyr, Val, Ala, Arg, Asn, Cys, Gly, His, or Ser
  misc_feature (8)..(8): Xaa can be Arg or Lys
RXTRMVPX

SEQ ID NO: 50178 - protein, 10 aa, Artificial Sequence
  Description of Artificial Sequence: Synthetic peptide
  Seed: RGTRMVPRGK
  misc_feature (2)..(2): Xaa can be Phe, Tyr, Ala, Arg, Asn, Asp, Cys, Gln, Glu, Gly, His, Ile, Leu, Lys, Met, Pro, Ser, Thr, Trp, or Val
  misc_feature (10)..(10): Xaa can be Ala, Arg, Asn, Cys, Gln, Glu, Gly, Ile, Leu, Lys, Met, Phe, Pro, Ser, Thr, Tyr, Val, or Hi s
RXTRMVPRGX

SEQ ID NO: 50179 - protein, 11 aa, Artificial Sequence
  Description of Artificial Sequence: Synthetic peptide
  Seed: RGTRMVPRGKL
  misc_feature (2)..(2): Xaa can be Arg, Gln, Ala, Asn, Asp, Cys, Glu, Gly, His, Ile, Leu, Lys, Met, Phe, Pro, Ser, Thr, Trp, Tyr, or Val
  misc_feature (11)..(11): Xaa can be Arg, Ile, Leu, Lys, Met, Phe, Tyr, Val, Ala, Cys, Gly, His, or Trp
RXTRMVPRGKX

SEQ ID NO: 50180 - protein, 8 aa, Artificial Sequence
  Description of Artificial Sequence: Synthetic peptide
  Seed: RGTRVAPR
  misc_feature (2)..(2): Xaa can be Leu, Met, Phe, Thr, Trp, Tyr, Val, Ala, Asn, Cys, Gln, Gly, Ile, or Ser
  misc_feature (8)..(8): Xaa can be Arg or Lys
RXTRVAPX

SEQ ID NO: 50181 - protein, 10 aa, Artificial Sequence
  Description of Artificial Sequence: Synthetic peptide
  Seed: RGTRVAPRGQ
  misc_feature (2)..(2): Xaa can be Phe, Tyr, Ile, Met, Trp, Val, Ala, Arg, Asn, Asp, Cys, Gln, Glu, Gly, His, Leu, Lys, Pro, Ser, or Thr
  misc_feature (10)..(10): Xaa can be Ala, Arg, Cys, Gln, Glu, Gly, Ile, Leu, Lys, Met, Phe, Pro, Ser, Thr, Tyr, Val, Asn, or Hi s
RXTRVAPRGX

SEQ ID NO: 50182 - protein, 11 aa, Artificial Sequence
  Description of Artificial Sequence: Synthetic peptide
  Seed: RGTRVAPRGQL
  misc_feature (2)..(2): Xaa can be Arg, Gln, Ala, Asn, Asp, Cys, Glu, Gly, His, Ile, Leu, Lys, Met, Phe, Pro, Ser, Thr, Trp, Tyr, or Val
  misc_feature (11)..(11): Xaa can be Leu, Phe, Ile, Met, or Val
RXTRVAPRGQX

SEQ ID NO: 50183 - protein, 8 aa, Artificial Sequence
  Description of Artificial Sequence: Synthetic peptide
  Seed: RGTRVIPR
  misc_feature (2)..(2): Xaa can be Gln, Ile, Leu, Met, Phe, Thr, Trp, Tyr, Val, Ala, Arg, Asn, Cys, Gly, His, Lys, or Ser
  misc_feature (8)..(8): Xaa can be Arg or Lys
RXTRVIPX

SEQ ID NO: 50184 - protein, 10 aa, Artificial Sequence
  Description of Artificial Sequence: Synthetic peptide
  Seed: RGTRVIPRGQ
  misc_feature (2)..(2): Xaa can be Met, Phe, Trp, Tyr, Val, Ala, Arg, Asn, Asp, Cys, Gln, Glu, Gly, His, Ile, Leu, Lys, Pro, Ser, or Thr
  misc_feature (10)..(10): Xaa can be Ala, Arg, Cys, Gln, Glu, Gly, Ile, Leu, Lys, Met, Phe, Pro, Ser, Thr, Tyr, Val, or Asn
RXTRVIPRGX

SEQ ID NO: 50185 - protein, 8 aa, Artificial Sequence
  Description of Artificial Sequence: Synthetic peptide
  Seed: RGTRVLPR
  misc_feature (2)..(2): Xaa can be Ile, Leu, Met, Phe, Thr, Trp, Tyr, Val, Ala, Asn, Cys, Gln, Gly, His, or Ser
  misc_feature (8)..(8): Xaa can be Arg or Lys
RXTRVLPX

SEQ ID NO: 50186 - protein, 10 aa, Artificial Sequence
  Description of Artificial Sequence: Synthetic peptide
  Seed: RGTRVLPRGK
  misc_feature (2)..(2): Xaa can be Tyr, Ala, Arg, Asn, Asp, Cys, Gln, Glu, Gly, His, Ile, Leu, Lys, Met, Phe, Pro, Ser, Thr, Trp, or Val
  misc_feature (10)..(10): Xaa can be Ala, Arg, Cys, Gly, Ile, Leu, Lys, Met, Phe, Pro, Ser, Thr, Tyr, Val, Gln, or Glu
RXTRVLPRGX

SEQ ID NO: 50187 - protein, 11 aa, Artificial Sequence
  Description of Artificial Sequence: Synthetic peptide
  Seed: RGTRVLPRGQL
  misc_feature (2)..(2): Xaa can be Arg, Ala, Asn, Asp, Cys, Gln, Glu, Gly, His, Ile, Leu, Lys, Met, Phe, Pro, Ser, Thr, Trp, Tyr, or Val
  misc_feature (11)..(11): Xaa can be Leu, Ile, Met, Phe, or Val
RXTRVLPRGQX

SEQ ID NO: 50188 - protein, 8 aa, Artificial Sequence
  Description of Artificial Sequence: Synthetic peptide
  Seed: RGTRVVPR
  misc_feature (2)..(2): Xaa can be Gln, Ile, Leu, Met, Phe, Thr, Trp, Tyr, Val, Ala, Arg, Asn, Cys, Gly, His, Lys, or Ser
  misc_feature (8)..(8): Xaa can be Arg or Lys
RXTRVVPX

SEQ ID NO: 50189 - protein, 10 aa, Artificial Sequence
  Description of Artificial Sequence: Synthetic peptide
  Seed: RGTRVVPRGK
  misc_feature (2)..(2): Xaa can be Met, Phe, Trp, Tyr, Val, Ala, Arg, Asn, Asp, Cys, Gln, Glu, Gly, His, Ile, Leu, Lys, Pro, Ser, or Thr
  misc_feature (10)..(10): Xaa can be Ala, Arg, Cys, Gln, Glu, Gly, Ile, Leu, Lys, Met, Phe, Pro, Ser, Thr, Tyr, Val, or Asn
RXTRVVPRGX

SEQ ID NO: 50190 - protein, 10 aa, Artificial Sequence
  Description of Artificial Sequence: Synthetic peptide
  Seed: RGVFEFSDER
  misc_feature (2)..(2): Xaa can be Ala, Arg, Asn, Asp, Cys, Gln, Glu, Gly, His, Ile, Leu, Lys, Met, Phe, Pro, Ser, Thr, Trp, Tyr, or Val
  misc_feature (10)..(10): Xaa can be Arg, Lys, or Tyr
RXVFEFSDEX

SEQ ID NO: 50191 - protein, 10 aa, Artificial Sequence
  Description of Artificial Sequence: Synthetic peptide
  Seed: RGVFELSDEK
  misc_feature (2)..(2): Xaa can be Asn, Asp, Cys, Gln, Glu, Gly, His, Leu, Met, Phe, Ser, Thr, Trp, Val, Ala, Arg, Ile, Lys, Pro, or Tyr
  misc_feature (10)..(10): Xaa can be Arg or Lys
RXVFELSDEX

SEQ ID NO: 50192 - protein, 9 aa, Artificial Sequence
  Description of Artificial Sequence: Synthetic peptide
  Seed: RGVNDRNFW
  misc_feature (2)..(2): Xaa can be Ala, Ser, Thr, Val, Ile, Met, Asn, Cys, Gln, Gly, or Leu
  misc_feature (9)..(9): Xaa can be Trp, Phe, Tyr, Met, Ile, or Leu
RXVNDRNFX

SEQ ID NO: 50193 - protein, 10 aa, Artificial Sequence
  Description of Artificial Sequence: Synthetic peptide
  Seed: RGVNDRNFWR
  misc_feature (2)..(2): Xaa can be Leu, Met, Phe, Trp, Gln, Ile, Ser, Thr, Tyr, Val, Ala, Arg, Asn, Asp, Cys, Glu, Gly, His, Lys, or Pro
  misc_feature (10)..(10): Xaa can be Arg, Lys, His, or Tyr
RXVNDRNFWX

SEQ ID NO: 50194 - protein, 11 aa, Artificial Sequence
  Description of Artificial Sequence: Synthetic peptide
  Seed: RGVNDRNFWRG
  misc_feature (2)..(2): Xaa can be Ala, Arg, Asn, Asp, Cys, Gln, Glu, Gly, His, Ile, Leu, Lys, Met, Phe, Pro, Ser, Thr, Trp, Tyr, or Val
  misc_feature (11)..(11): Xaa can be Ala, Arg, Asn, Asp, Cys, Gln, Glu, Gly, His, Ile, Leu, Lys, Met, Phe, Pro, Ser, Thr, Trp, Tyr, or Val
RXVNDRNFWRX

SEQ ID NO: 50195 - protein, 11 aa, Artificial Sequence
  Description of Artificial Sequence: Synthetic peptide
  Seed: RGVQIASNENM
  misc_feature (2)..(2): Xaa can be Ala, Arg, Asn, Asp, Cys, Gln, Glu, Gly, His, Ile, Leu, Lys, Met, Phe, Pro, Ser, Thr, Trp, Tyr, or Val
  misc_feature (11)..(11): Xaa can be Met, Phe, or Tyr
RXVQIASNENX

SEQ ID NO: 50196 - protein, 8 aa, Artificial Sequence
  Description of Artificial Sequence: Synthetic peptide
  Seed: RIDGKWIR
  misc_feature (2)..(2): Xaa can be Met, Ile, Leu, Phe, Thr, Trp, Tyr, or Val
  misc_feature (8)..(8): Xaa can be Arg or Lys
RXDGKWIX

SEQ ID NO: 50197 - protein, 8 aa, Artificial Sequence
  Description of Artificial Sequence: Synthetic peptide
  Seed: RIDGKWMR
  misc_feature (2)..(2): Xaa can be Met, Phe, Gln, Ile, Leu, Ser, Thr, Trp, Tyr, or Val
  misc_feature (8)..(8): Xaa can be Arg or Lys
RXDGKWMX

SEQ ID NO: 50198 - protein, 8 aa, Artificial Sequence
  Description of Artificial Sequence: Synthetic peptide
  Seed: RIDGKWTR
  misc_feature (2)..(2): Xaa can be Met, Gln, Ile, Leu, Phe, Thr, Trp, Tyr, or Val
  misc_feature (8)..(8): Xaa can be Arg or Lys
RXDGKWTX

SEQ ID NO: 50199 - protein, 10 aa, Artificial Sequence
  Description of Artificial Sequence: Synthetic peptide
  Seed: RIIKRGINDR
  misc_feature (2)..(2): Xaa can be Gln, Ile, Leu, Met, Phe, Ser, Thr, Trp, Tyr, Val, Ala, Arg, Asn, Asp, Cys, Glu, Gly, His, Lys, or Pro
  misc_feature (10)..(10): Xaa can be Arg or Lys
RXIKRGINDX

SEQ ID NO: 50200 - protein, 11 aa, Artificial Sequence
  Description of Artificial Sequence: Synthetic peptide
  Seed: RIMESARPEDV
  misc_feature (2)..(2): Xaa can be Leu, Met, Gln, Ile, or Val
  misc_feature (11)..(11): Xaa can be Val, Ile, Leu, Ala, or Met
RXMESARPEDX

SEQ ID NO: 50201 - protein, 9 aa, Artificial Sequence
  Description of Artificial Sequence: Synthetic peptide
  Seed: RISDMRTEI
  misc_feature (2)..(2): Xaa can be Pro, Thr, Met, Leu, Ala, Ile, Ser, Val, Gln, Gly, Phe, Tyr, Asn, Cys, or Trp
  misc_feature (9)..(9): Xaa can be Lys, Ala, Leu, Met, Ile, Phe, Trp, Val, Tyr, Cys, Arg, Gly, Ser, Asn, Gln, Glu, His, Pro, or Thr
RXSDMRTEX

SEQ ID NO: 50202 - protein, 11 aa, Artificial Sequence
  Description of Artificial Sequence: Synthetic peptide
  Seed: RISDMRTEIIR
  misc_feature (2)..(2): Xaa can be Ile, Leu, Met, Phe, Thr, Trp, Tyr, Val, Ala, Gln, Gly, or Ser
  misc_feature (11)..(11): Xaa can be Arg or Lys
RXSDMRTEIIX

SEQ ID NO: 50203 - protein, 9 aa, Artificial Sequence
  Description of Artificial Sequence: Synthetic peptide
  Seed: RISGFIRGK
  misc_feature (2)..(2): Xaa can be Thr, Ser, Val, Met, Ile, Ala, Trp, Tyr, Leu, Phe, Gln, Gly, Asn, Cys, Glu, or His
  misc_feature (9)..(9): Xaa can be Arg, Lys, Ala, Val, Ile, Met, Leu, Tyr, His, Gly, Ser, Thr, Cys, Phe, or Pro
RXSGFIRGX

SEQ ID NO: 50204 - protein, 10 aa, Artificial Sequence
  Description of Artificial Sequence: Synthetic peptide
  Seed: RISGFIRGKR
  misc_feature (2)..(2): Xaa can be Leu, Met, Ile, Val, Ala, Asn, Gln, Gly, Phe, Ser, Thr, Trp, Tyr, Arg, Asp, Cys, Glu, His, Lys, or Pro
  misc_feature (10)..(10): Xaa can be Arg, Lys, Tyr, His, Ala, Asn, Asp, Cys, Gln, Glu, Gly, Ile, Leu, Met, Phe, Pro, Ser, Thr, Trp, or Val
RXSGFIRGKX

SEQ ID NO: 50205 - protein, 11 aa, Artificial Sequence
  Description of Artificial Sequence: Synthetic peptide
  Seed: RISGFIRGKRV
  misc_feature (2)..(2): Xaa can be Leu, Met, Ile, or Val
  misc_feature (11)..(11): Xaa can be Val, Ala, Ile, or Leu
RXSGFIRGKRX

SEQ ID NO: 50206 - protein, 9 aa, Artificial Sequence
  Description of Artificial Sequence: Synthetic peptide
  Seed: RIVPRGQLS
  misc_feature (2)..(2): Xaa can be Thr, Ser, Val, Met, Ile, Tyr, Ala, Phe, Leu, Trp, Gln, Gly, Asn, or Cys
  misc_feature (9)..(9): Xaa can be Lys, Ala, Val, Ile, Leu, Met, Ser, Gly, Tyr, Arg, Thr, Cys, or Phe
RXVPRGQLX

SEQ ID NO: 50207 - protein, 11 aa, Artificial Sequence
  Description of Artificial Sequence: Synthetic peptide
  Seed: RIVPRGQLSTR
  misc_feature (2)..(2): Xaa can be Gln, Ile, Leu, Met, Phe, Ser, Thr, Trp, Tyr, Val, Ala, Arg, Asn, or Gly
  misc_feature (11)..(11): Xaa can be Arg or Lys
RXVPRGQLSTX

SEQ ID NO: 50208 - protein, 9 aa, Artificial Sequence
  Description of Artificial Sequence: Synthetic peptide
  Seed: RIWRHANNG
  misc_feature (2)..(2): Xaa can be Thr, Ser, Val, Ile, Met, Ala, Phe, Tyr, Trp, Gln, Leu, Gly, Asn, Cys, His, or Lys
  misc_feature (9)..(9): Xaa can be Lys, Ala, Val, Ile, Arg, Met, Leu, Ser, Gly, Tyr, Cys, His, Phe, Pro, Thr, Asn, Gln, or Gl u
RXWRHANNX

SEQ ID NO: 50209 - protein, 11 aa, Artificial Sequence
  Description of Artificial Sequence: Synthetic peptide
  Seed: RIWRQANNGEY
  misc_feature (2)..(2): Xaa can be Gln, Met, Ile, Leu, Trp, Tyr, Val, Ala, Asn, Cys, Gly, Phe, Ser, or Thr
  misc_feature (11)..(11): Xaa can be Tyr, Phe, or Met
RXWRQANNGEX

SEQ ID NO: 50210 - protein, 9 aa, Artificial Sequence
  Description of Artificial Sequence: Synthetic peptide
  Seed: RIWRQRNNG
  misc_feature (2)..(2): Xaa can be Thr, Val, Ser, Met, Ile, Ala, Phe, Tyr, Leu, Trp, Gln, Asn, Gly, Cys, or His
  misc_feature (9)..(9): Xaa can be Lys, Ala, Val, Ile, Leu, Met, Arg, Ser, Gly, Thr, Tyr, Pro, Cys, Gln, Phe, Asn, Glu, or Hi s
RXWRQRNNX

SEQ ID NO: 50211 - protein, 9 aa, Artificial Sequence
  Description of Artificial Sequence: Synthetic peptide
  Seed: RKIDGKWMR
  misc_feature (2)..(2): Xaa can be Met, Ile, Leu, Phe, Ser, Thr, Trp, Tyr, Val, Ala, Asn, Cys, Gln, Gly, His, Arg, Asp, Glu, or Lys
  misc_feature (9)..(9): Xaa can be Arg, Lys, His, Leu, Met, Tyr, or Val
RXIDGKWMX

SEQ ID NO: 50212 - protein, 10 aa, Artificial Sequence
  Description of Artificial Sequence: Synthetic peptide
  Seed: RKLPFERATI
  misc_feature (2)..(2): Xaa can be Arg, Gln, Lys, or Asn
  misc_feature (10)..(10): Xaa can be Ile, Leu, Met, Phe, Val, Ala, Cys, Gly, Lys, Ser, Thr, Trp, or Tyr
RXLPFERATX

SEQ ID NO: 50213 - protein, 11 aa, Artificial Sequence
  Description of Artificial Sequence: Synthetic peptide
  Seed: RKLPFERATIM
  misc_feature (2)..(2): Xaa can be Gln, Met, Ala, Arg, Asn, Glu, Gly, His, Ile, Leu, Lys, Phe, Pro, Ser, Thr, Tyr, Val, Asp, Cys, or Trp
  misc_feature (11)..(11): Xaa can be Ala, Ile, Leu, Met, Phe, Val, Tyr, His, Trp, or Cys
RXLPFERATIX

SEQ ID NO: 50214 - protein, 10 aa, Artificial Sequence
  Description of Artificial Sequence: Synthetic peptide
  Seed: RKTRGAYERM
  misc_feature (2)..(2): Xaa can be Met, Tyr, Val, Phe, Ser, Trp, Ala, Arg, Asn, Asp, Cys, Gln, Glu, Gly, His, Ile, Leu, Lys, Pro, or Thr
  misc_feature (10)..(10): Xaa can be Ala, Arg, Gly, Ile, Leu, Lys, Met, Phe, Ser, Thr, Trp, Tyr, Val, Cys, or Pro
RXTRGAYERX

SEQ ID NO: 50215 - protein, 9 aa, Artificial Sequence
  Description of Artificial Sequence: Synthetic peptide
  Seed: RKTRIAYER
  misc_feature (2)..(2): Xaa can be Met, Trp, Ile, Leu, Phe, Thr, Tyr, Val, Ala, Asn, Gln, Gly, Ser, Arg, Cys, Glu, His, or Ly s
  misc_feature (9)..(9): Xaa can be Arg, Lys, His, or Tyr
RXTRIAYEX

SEQ ID NO: 50216 - protein, 10 aa, Artificial Sequence
  Description of Artificial Sequence: Synthetic peptide
  Seed: RKTRIAYERM
  misc_feature (2)..(2): Xaa can be Met, Phe, Tyr, Val, Ala, Arg, Asn, Asp, Cys, Gln, Glu, Gly, His, Ile, Leu, Lys, Pro, Ser, Thr, or Trp
  misc_feature (10)..(10): Xaa can be Ala, Arg, Gly, Ile, Leu, Lys, Met, Phe, Ser, Thr, Tyr, Val, Cys, or Pro
RXTRIAYERX

SEQ ID NO: 50217 - protein, 10 aa, Artificial Sequence
  Description of Artificial Sequence: Synthetic peptide
  Seed: RKTRNAYERM
  misc_feature (2)..(2): Xaa can be Met, Phe, Tyr, Val, Ala, Arg, Gln, Gly, Ile, Leu, Ser, Trp, Asn, Asp, Cys, Glu, His, Lys, Pro, or Thr
  misc_feature (10)..(10): Xaa can be Ala, Arg, Cys, Gly, Ile, Leu, Lys, Met, Phe, Ser, Thr, Trp, Tyr, Val, Pro, Gln, or His
RXTRNAYERX

SEQ ID NO: 50218 - protein, 10 aa, Artificial Sequence
  Description of Artificial Sequence: Synthetic peptide
  Seed: RKTRSAYERM
  misc_feature (2)..(2): Xaa can be Met, Val, Phe, Ser, Tyr, Ala, Arg, Asn, Asp, Cys, Gln, Glu, Gly, His, Ile, Leu, Lys, Pro, Thr, or Trp
  misc_feature (10)..(10): Xaa can be Ala, Arg, Cys, Gln, Gly, His, Ile, Leu, Lys, Met, Phe, Pro, Ser, Thr, Trp, Tyr, Val, Glu, or Asn
RXTRSAYERX

SEQ ID NO: 50219 - protein, 9 aa, Artificial Sequence
  Description of Artificial Sequence: Synthetic peptide
  Seed: RKWMRELIL
  misc_feature (2)..(2): Xaa can be Arg, Gln, Met, Lys, His, Ala, Glu, Leu, Ser, Asn, Ile, Thr, Tyr, Val, Gly, Phe, Pro, Trp, or Cys
  misc_feature (9)..(9): Xaa can be Phe, Tyr, Met, Leu, His, Ile, Trp, Val, Ala, Lys, Arg, Gly, Ser, Asn, Cys, Gln, Pro, Thr, Asp, or Glu
RXWMRELIX

SEQ ID NO: 50220 - protein, 10 aa, Artificial Sequence
  Description of Artificial Sequence: Synthetic peptide
  Seed: RKWMRELILY
  misc_feature (2)..(2): Xaa can be Arg, Gln, Tyr, His, Lys, Met, Ala, Asn, Asp, Cys, Glu, Gly, Ile, Leu, Phe, Pro, Ser, Thr, Trp, or Val
  misc_feature (10)..(10): Xaa can be Ile, Leu, Met, Phe, Trp, Tyr, Val, Lys, Arg, His, Ala, Cys, Gly, Asn, Asp, Gln, Glu, Pro, Ser, or Thr
RXWMRELILX

SEQ ID NO: 50221 - protein, 9 aa, Artificial Sequence
  Description of Artificial Sequence: Synthetic peptide
  Seed: RKWMRELVL
  misc_feature (2)..(2): Xaa can be Arg, Gln, Met, Lys, Ala, Glu, His, Leu, Ser, Ile, Val, Pro, Thr, Tyr, Asn, Gly, Phe, Trp, Cys, or Asp
  misc_feature (9)..(9): Xaa can be Phe, Tyr, Met, Leu, Ile, Val, His, Trp, Ala, Gly, Lys, Arg, Asn, Cys, Gln, Pro, Ser, Thr, Glu, or Asp
RXWMRELVX

SEQ ID NO: 50222 - protein, 10 aa, Artificial Sequence
  Description of Artificial Sequence: Synthetic peptide
  Seed: RKWMRELVLY
  misc_feature (2)..(2): Xaa can be Arg, Gln, Tyr, His, Lys, Met, Ala, Asn, Asp, Cys, Glu, Gly, Ile, Leu, Phe, Pro, Ser, Thr, Trp, or Val
  misc_feature (10)..(10): Xaa can be Ile, Leu, Met, Phe, Trp, Tyr, Val, Lys, Arg, His, Ala, Cys, Gly, Asn, Asp, Gln, Glu, Pro, Ser, or Thr
RXWMRELVLX

SEQ ID NO: 50223 - protein, 9 aa, Artificial Sequence
  Description of Artificial Sequence: Synthetic peptide
  Seed: RLFSFIRGT
  misc_feature (2)..(2): Xaa can be Leu, Met, Gln, Ile, Thr, Val, Ala, Ser, Cys, Glu, Gly, Phe, or Trp
  misc_feature (9)..(9): Xaa can be Val, Ala, Ile, Leu, Cys, Met, Thr, Phe, Ser, Gly, or Pro
RXFSFIRGX

SEQ ID NO: 50224 - protein, 10 aa, Artificial Sequence
  Description of Artificial Sequence: Synthetic peptide
  Seed: RLFSFIRGTK
  misc_feature (2)..(2): Xaa can be Ser, Thr, Val, Tyr, Ile, Met, Ala, Leu, Phe, Trp, Gln, Gly, Asn, Arg, Cys, His, Lys, Asp, Glu, or Pro
  misc_feature (10)..(10): Xaa can be Arg, Lys, Ala, Ile, Val, Met, Ser, Tyr, Gly, Leu, His, Thr, Gln, Asn, Cys, Phe, Pro, or Gl u
RXFSFIRGTX

SEQ ID NO: 50225 - protein, 11 aa, Artificial Sequence
  Description of Artificial Sequence: Synthetic peptide
  Seed: RLFSFIRGTKV
  misc_feature (2)..(2): Xaa can be Ile, Leu, Met, Ser, Thr, Val, Tyr, Ala, Phe, Gln, Trp, Asn, Gly, Arg, Asp, Cys, Glu, His, Lys, or Pro
  misc_feature (11)..(11): Xaa can be Lys, Ala, Val, Ile, Leu, Arg, Met, Ser, Cys, Thr, Tyr, Gly, His, Phe, Pro, Asn, Asp, Gln, Glu, or Trp
RXFSFIRGTKX

SEQ ID NO: 50226 - protein, 9 aa, Artificial Sequence
  Description of Artificial Sequence: Synthetic peptide
  Seed: RLIQNSITI
  misc_feature (2)..(2): Xaa can be Gln, Met, Lys, Leu, Thr, Ala, Ser, Glu, His, Ile, Val, Arg, Asn, Gly, Phe, Tyr, Cys, Trp, Pro, or Asp
  misc_feature (9)..(9): Xaa can be Phe, Tyr, Met, Trp, Leu, Ile, His, Val, Ala, Cys, Gly, Thr, Ser, Asn, Gln, Pro, or Glu
RXIQNSITX

SEQ ID NO: 50227 - protein, 11 aa, Artificial Sequence
  Description of Artificial Sequence: Synthetic peptide
  Seed: RLIQNSITIEK
  misc_feature (2)..(2): Xaa can be Met, Thr, Val, Ala, Arg, Gln, Gly, Ile, Leu, Lys, Phe, Pro, Ser, Trp, Tyr, Asn, Asp, Cys, Glu, or His
  misc_feature (11)..(11): Xaa can be Arg, Lys, or Tyr
RXIQNSITIEX

SEQ ID NO: 50228 - protein, 11 aa, Artificial Sequence
  Description of Artificial Sequence: Synthetic peptide
  Seed: RLIQNSITMER
  misc_feature (2)..(2): Xaa can be Ile, Leu, Met, Val, Ala, Arg, Asn, Asp, Cys, Gln, Glu, Gly, His, Lys, Phe, Pro, Ser, Thr, Trp, or Tyr
  misc_feature (11)..(11): Xaa can be Arg, Lys, or Tyr
RXIQNSITMEX

SEQ ID NO: 50229 - protein, 9 aa, Artificial Sequence
  Description of Artificial Sequence: Synthetic peptide
  Seed: RLIQNSLTI
  misc_feature (2)..(2): Xaa can be Gln, Met, Lys, Leu, Ala, Arg, Glu, His, Ile, Ser, Thr, Val, Asn, Tyr, Gly, Phe, Cys, Trp, Asp, or Pro
  misc_feature (9)..(9): Xaa can be Phe, Tyr, Met, Leu, Trp, Ile, His, Val, Ala, Cys, Gly, Thr, Asn, Ser, Gln, Glu, Pro, Asp, or Lys
RXIQNSLTX

SEQ ID NO: 50230 - protein, 11 aa, Artificial Sequence
  Description of Artificial Sequence: Synthetic peptide
  Seed: RLIQNSLTIER
  misc_feature (2)..(2): Xaa can be Ala, Arg, Gln, Ile, Leu, Met, Phe, Ser, Thr, Trp, Tyr, Val, Asn, Asp, Cys, Glu, Gly, His, Lys, or Pro
  misc_feature (11)..(11): Xaa can be Arg or Lys
RXIQNSLTIEX

SEQ ID NO: 50231 - protein, 10 aa, Artificial Sequence
  Description of Artificial Sequence: Synthetic peptide
  Seed: RLIQNSLTVE
  misc_feature (2)..(2): Xaa can be Leu, Met, Ile, Val, Gln, Phe, Ala, Arg, Asn, Asp, Cys, Glu, Gly, His, Lys, Pro, Ser, Thr, Trp, or Tyr
  misc_feature (10)..(10): Xaa can be Val, Ile, Ala, Leu, Arg, Asn, Asp, Cys, Gln, Glu, Gly, His, Lys, Met, Phe, Pro, Ser, Thr, Trp, or Tyr
RXIQNSLTVX

SEQ ID NO: 50232 - protein, 11 aa, Artificial Sequence
  Description of Artificial Sequence: Synthetic peptide
  Seed: RLIQNSLTVER
  misc_feature (2)..(2): Xaa can be Ala, Arg, Gln, Ile, Leu, Met, Phe, Ser, Thr, Trp, Tyr, Val, Asn, Asp, Cys, Glu, Gly, His, Lys, or Pro
  misc_feature (11)..(11): Xaa can be Arg or Lys
RXIQNSLTVEX

SEQ ID NO: 50233 - protein, 9 aa, Artificial Sequence
  Description of Artificial Sequence: Synthetic peptide
  Seed: RLIQNSMTI
  misc_feature (2)..(2): Xaa can be Gln, Met, Tyr, Lys, Leu, Thr, Ser, Ala, Arg, Glu, His, Ile, Trp, Val, Asn, Phe, Gly, Cys, Pro, or Asp
  misc_feature (9)..(9): Xaa can be Phe, Tyr, Ile, Met, Trp, Leu, His, Val, Ala, Cys, Gly, Thr, Asn, Ser, Gln, Glu, Lys, Pro, or Asp
RXIQNSMTX

SEQ ID NO: 50234 - protein, 11 aa, Artificial Sequence
  Description of Artificial Sequence: Synthetic peptide
  Seed: RLIQNSMTIER
  misc_feature (2)..(2): Xaa can be Ala, Arg, Gln, Ile, Leu, Lys, Met, Phe, Ser, Thr, Trp, Tyr, Val, Asn, Asp, Cys, Glu, Gly, His, or Pro
  misc_feature (11)..(11): Xaa can be Arg or Lys
RXIQNSMTIEX

SEQ ID NO: 50235 - protein, 9 aa, Artificial Sequence
  Description of Artificial Sequence: Synthetic peptide
  Seed: RLLQNSQIF
  misc_feature (2)..(2): Xaa can be Gln, Met, Lys, Tyr, Ala, His, Leu, Ser, Glu, Phe, Thr, Trp, Arg, Ile, Val, Asn, Gly, Cys, or Pro
  misc_feature (9)..(9): Xaa can be Phe, Tyr, Trp, Met, Leu, Ile, Val, His, Ala, Cys, Gly, Thr, Asn, Gln, or Ser
RXLQNSQIX

SEQ ID NO: 50236 - protein, 11 aa, Artificial Sequence
  Description of Artificial Sequence: Synthetic peptide
  Seed: RLLQNSQIFSL
  misc_feature (2)..(2): Xaa can be Arg, Met, Gln, Leu, Ile, Phe, Tyr, Ala, Asn, Cys, Gly, His, Lys, Ser, Thr, Trp, Val, Asp, Glu, or Pro
  misc_feature (11)..(11): Xaa can be Ile, Leu, Met, Phe, Tyr, Val, Trp, Ala, Thr, Cys, Gly, Pro, Ser, or His
RXLQNSQIFSX

SEQ ID NO: 50237 - protein, 9 aa, Artificial Sequence
  Description of Artificial Sequence: Synthetic peptide
  Seed: RLLQNSQVF
  misc_feature (2)..(2): Xaa can be Gln, Met, Ala, Leu, Lys, Arg, Glu, His, Ser, Thr, Val, Ile, Asn, Gly, Phe, Tyr, Cys, Pro, or Trp
  misc_feature (9)..(9): Xaa can be Met, Phe, Tyr, Leu, Trp, His, Ile, Val, Ala, Cys, Gly, Ser, Thr, Asn, Gln, Glu, or Pro
RXLQNSQVX

SEQ ID NO: 50238 - protein, 10 aa, Artificial Sequence
  Description of Artificial Sequence: Synthetic peptide
  Seed: RLLQNSQVFS
  misc_feature (2)..(2): Xaa can be Gln, Leu, Met, Ala, Ile, Ser, Thr, Val, Arg, Asn, Asp, Cys, Glu, Gly, His, Lys, Phe, Pro, Trp, or Tyr
  misc_feature (10)..(10): Xaa can be Phe, Tyr, Met, Ala, Arg, Asn, Asp, Cys, Gln, Glu, Gly, His, Ile, Leu, Lys, Pro, Ser, Thr, Trp, or Val
RXLQNSQVFX

SEQ ID NO: 50239 - protein, 11 aa, Artificial Sequence
  Description of Artificial Sequence: Synthetic peptide
  Seed: RLLQNSQVFSI
  misc_feature (2)..(2): Xaa can be Arg, Met, Leu, Phe, Tyr, His, Ile, Lys, Ser, Thr, Trp, Val, Ala, Gln, Gly, Pro, Asn, Cys, Glu, or Asp
  misc_feature (11)..(11): Xaa can be Ile, Leu, Met, Val, Trp, Phe, Tyr, Ala, Thr, Cys, Gly, Pro, Ser, or His
RXLQNSQVFSX

SEQ ID NO: 50240 - protein, 11 aa, Artificial Sequence
  Description of Artificial Sequence: Synthetic peptide
  Seed: RLLQNSQVLSL
  misc_feature (2)..(2): Xaa can be Arg, Gln, Met, Leu, Lys, Phe, Tyr, Ala, Ile, Ser, Thr, Trp, Val, Asn, Asp, Cys, Glu, Gly, His, or Pro
  misc_feature (11)..(11): Xaa can be Leu, Met, Phe, Tyr, Val, Ile, Ala, His, Trp, Cys, or Thr
RXLQNSQVLSX

SEQ ID NO: 50241 - protein, 10 aa, Artificial Sequence
  Description of Artificial Sequence: Synthetic peptide
  Seed: RLLQNSQVYS
  misc_feature (2)..(2): Xaa can be Ala, Gln, Ile, Leu, Lys, Met, Val, His, Arg, Glu, Ser, Asn, Thr, Tyr, Asp, Cys, Gly, Phe, Pro, or Trp
  misc_feature (10)..(10): Xaa can be Phe, Tyr, Met, Leu, His, Ile, Trp, Val, Ala, Arg, Asn, Asp, Cys, Gln, Glu, Gly, Lys, Pro, Ser, or Thr
RXLQNSQVYX

SEQ ID NO: 50242 - protein, 11 aa, Artificial Sequence
  Description of Artificial Sequence: Synthetic peptide
  Seed: RLLQNSQVYSL
  misc_feature (2)..(2): Xaa can be Gln, Arg, Met, Leu, Phe, Tyr, His, Ile, Lys, Ser, Thr, Trp, Val, Ala, Asn, Cys, Glu, Gly, Asp, or Pro
  misc_feature (11)..(11): Xaa can be Leu, Met, Phe, Trp, Tyr, Val, Ile, Ala, Thr, Cys, His, Arg, Asn, Asp, Gln, Glu, Gly, Lys, Pro, or Ser
RXLQNSQVYSX

SEQ ID NO: 50243 - protein, 9 aa, Artificial Sequence
  Description of Artificial Sequence: Synthetic peptide
  Seed: RLLSFIRGT
  misc_feature (2)..(2): Xaa can be Met, Gln, Leu, Ile, Val, Thr, Ala, Ser, Gly, or Phe
  misc_feature (9)..(9): Xaa can be Val, Ala, Ile, Leu, Met, Cys, Thr, Phe, Ser, or Pro
RXLSFIRGX

SEQ ID NO: 50244 - protein, 10 aa, Artificial Sequence
  Description of Artificial Sequence: Synthetic peptide
  Seed: RLLSFIRGTK
  misc_feature (2)..(2): Xaa can be Thr, Val, Ser, Tyr, Phe, Ala, Met, Trp, Ile, Gly, Leu, Asn, Gln, Arg, Asp, Cys, Glu, His, Lys, or Pro
  misc_feature (10)..(10): Xaa can be Arg, Lys, Tyr, Ala, Val, Ile, Leu, Met, His, Ser, Gly, Thr, Cys, Gln, Phe, or Pro
RXLSFIRGTX

SEQ ID NO: 50245 - protein, 11 aa, Artificial Sequence
  Description of Artificial Sequence: Synthetic peptide
  Seed: RLLSFIRGTKV
  misc_feature (2)..(2): Xaa can be Leu, Met, Ile, Gln, Thr, Val, Phe, Tyr, Ala, Arg, Asn, Asp, Cys, Glu, Gly, His, Lys, Pro, Ser, or Trp
  misc_feature (11)..(11): Xaa can be Lys, Val, Leu, Arg, Tyr, Ile, Ala, Asn, Asp, Cys, Gln, Glu, Gly, His, Met, Phe, Pro, Ser, Thr, or Trp
RXLSFIRGTKX

SEQ ID NO: 50246 - protein, 11 aa, Artificial Sequence
  Description of Artificial Sequence: Synthetic peptide
  Seed: RLMEGAKPEEV
  misc_feature (2)..(2): Xaa can be Gln, Leu, Met, Ile, Glu, His, Ala, Arg, Thr, or Val
  misc_feature (11)..(11): Xaa can be Phe, Val, Tyr, Met, Ile, Leu, Ala, His, or Trp
RXMEGAKPEEX

SEQ ID NO: 50247 - protein, 9 aa, Artificial Sequence
  Description of Artificial Sequence: Synthetic peptide
  Seed: RLSSFIRGT
  misc_feature (2)..(2): Xaa can be Leu, Met, Val, Ile, Gln, Thr, Ala, or Ser
  misc_feature (9)..(9): Xaa can be Val, Ile, Ala, Leu, Met, Thr, Cys, Ser, or Lys
RXSSFIRGX

SEQ ID NO: 50248 - protein, 10 aa, Artificial Sequence
  Description of Artificial Sequence: Synthetic peptide
  Seed: RLSSFIRGTK
  misc_feature (2)..(2): Xaa can be Thr, Met, Ser, Val, Ile, Ala, Leu, Tyr, Gln, Phe, Trp, Gly, Arg, Asn, Cys, His, Asp, Glu, Lys, or Pro
  misc_feature (10)..(10): Xaa can be Ala, Arg, Lys, Val, Ile, Leu, Met, Ser, Tyr, Gly, Thr, His, Cys, or Phe
RXSSFIRGTX

SEQ ID NO: 50249 - protein, 11 aa, Artificial Sequence
  Description of Artificial Sequence: Synthetic peptide
  Seed: RLSSFIRGTKV
  misc_feature (2)..(2): Xaa can be Leu, Met, Ile, Val, Ala, Arg, Asn, Asp, Cys, Gln, Glu, Gly, His, Lys, Phe, Pro, Ser, Thr, Trp, or Tyr
  misc_feature (11)..(11): Xaa can be Lys, Val, Arg, Ala, Asn, Asp, Cys, Gln, Glu, Gly, His, Ile, Leu, Met, Phe, Pro, Ser, Thr, Trp, or Tyr
RXSSFIRGTKX

SEQ ID NO: 50250 - protein, 9 aa, Artificial Sequence
  Description of Artificial Sequence: Synthetic peptide
  Seed: RLSTRGIQI
  misc_feature (2)..(2): Xaa can be Thr, Ser, Val, Met, Ile, Ala, Leu, Tyr, Gln, Phe, Trp, Gly, Asn, or Cys
  misc_feature (9)..(9): Xaa can be Lys, Ala, Val, Ile, Leu, Trp, Met, Phe, Ser, Tyr, Arg, Gly, Thr, Cys, His, or Pro
RXSTRGIQX

SEQ ID NO: 50251 - protein, 10 aa, Artificial Sequence
  Description of Artificial Sequence: Synthetic peptide
  Seed: RLSTRGIQIA
  misc_feature (2)..(2): Xaa can be Leu, Met, or Ile
  misc_feature (10)..(10): Xaa can be Val, Ala, Ile, or Leu
RXSTRGIQIX

SEQ ID NO: 50252 - protein, 11 aa, Artificial Sequence
  Description of Artificial Sequence: Synthetic peptide
  Seed: RLSTRGIQIAS
  misc_feature (2)..(2): Xaa can be Tyr, Met, Phe, Trp, Val, Ala, Arg, Asn, Asp, Cys, Gln, Glu, Gly, His, Ile, Leu, Lys, Pro, Ser, or Thr
  misc_feature (11)..(11): Xaa can be Ala, Arg, Gly, Ile, Leu, Lys, Met, Ser, Thr, Tyr, Val, Pro, or Phe
RXSTRGIQIAX

SEQ ID NO: 50253 - protein, 9 aa, Artificial Sequence
  Description of Artificial Sequence: Synthetic peptide
  Seed: RLSTRGVQI
  misc_feature (2)..(2): Xaa can be Met, Leu, Ile, Thr, Val, Gln, Ser, or Ala
  misc_feature (9)..(9): Xaa can be Trp, Phe, Ile, Val, Leu, Ala, Met, or Tyr
RXSTRGVQX

SEQ ID NO: 50254 - protein, 10 aa, Artificial Sequence
  Description of Artificial Sequence: Synthetic peptide
  Seed: RLSTRGVQIA
  misc_feature (2)..(2): Xaa can be Leu or Met
  misc_feature (10)..(10): Xaa can be Ala, Ile, Leu, or Val
RXSTRGVQIX

SEQ ID NO: 50255 - protein, 11 aa, Artificial Sequence
  Description of Artificial Sequence: Synthetic peptide
  Seed: RLSTRGVQIAS
  misc_feature (2)..(2): Xaa can be Met, Phe, Trp, Tyr, Val, Ala, Asn, Cys, Gln, Gly, His, Ile, Leu, Lys, Ser, Thr, Arg, Asp, Glu, or Pro
  misc_feature (11)..(11): Xaa can be Ala, Gly, Ile, Leu, Lys, Met, Ser, Thr, Tyr, Val, Arg, or Pro
RXSTRGVQIAX

SEQ ID NO: 50256 - protein, 9 aa, Artificial Sequence
  Description of Artificial Sequence: Synthetic peptide
  Seed: RMCNILKGK
  misc_feature (2)..(2): Xaa can be Thr, Met, Ser, Val, Ala, Asn, Gln, Gly, Ile, Leu, Phe, Trp, Tyr, or Cys
  misc_feature (9)..(9): Xaa can be Arg, Lys, Ala, Tyr, Ile, or Val
RXCNILKGX

SEQ ID NO: 50257 - protein, 10 aa, Artificial Sequence
  Description of Artificial Sequence: Synthetic peptide
  Seed: RMCNILKGKF
  misc_feature (2)..(2): Xaa can be Gln, Leu, or Met
  misc_feature (10)..(10): Xaa can be Phe, Tyr, or Met
RXCNILKGKX

SEQ ID NO: 50258 - protein, 11 aa, Artificial Sequence
  Description of Artificial Sequence: Synthetic peptide
  Seed: RMCSLMQGSTL
  misc_feature (2)..(2): Xaa can be Gln, Leu, Met, Ala, Arg, Asn, Asp, Cys, Glu, Gly, His, Ile, Lys, Phe, Pro, Ser, Thr, Trp, Tyr, or Val
  misc_feature (11)..(11): Xaa can be Ile, Leu, Met, Phe, Trp, Tyr, Val, or His
RXCSLMQGSTX

SEQ ID NO: 50259 - protein, 8 aa, Artificial Sequence
  Description of Artificial Sequence: Synthetic peptide
  Seed: RMIDGIGR
  misc_feature (2)..(2): Xaa can be Ile, Leu, Met, Phe, Ser, Thr, Trp, Tyr, or Val
  misc_feature (8)..(8): Xaa can be Arg
RXIDGIGX

SEQ ID NO: 50260 - protein, 9 aa, Artificial Sequence
  Description of Artificial Sequence: Synthetic peptide
  Seed: RMIDGIGRF
  misc_feature (2)..(2): Xaa can be Met, Leu, Gln, Val, Ile, Tyr, Thr, Ala, Ser, Lys, Phe, Trp, Glu, Arg, Asn, Cys, Gly, His, Asp, or Pro
  misc_feature (9)..(9): Xaa can be Tyr, Phe, Met, Trp, Ile, Leu, Val, Ala, His, Cys, Thr, Gly, Pro, or Ser
RXIDGIGRX

SEQ ID NO: 50261 - protein, 10 aa, Artificial Sequence
  Description of Artificial Sequence: Synthetic peptide
  Seed: RMIDGIGRFY
  misc_feature (2)..(2): Xaa can be Gln, Met, Thr, Ser, Ala, Val, Ile, Leu, Tyr, Lys, Glu, Gly, His, Trp, Arg, Asn, Cys, Phe, Asp, or Pro
  misc_feature (10)..(10): Xaa can be Lys, Tyr, Phe, Met, Trp, Leu, Arg, Val, Ile, His, Ala, Asn, Asp, Cys, Gln, Glu, Gly, Pro, Ser, or Thr
RXIDGIGRFX

SEQ ID NO: 50262 - protein, 11 aa, Artificial Sequence
  Description of Artificial Sequence: Synthetic peptide
  Seed: RMIDGIGRFYI
  misc_feature (2)..(2): Xaa can be Gln, Met, Ser, Thr, Val, Leu, Ile, Ala, Tyr, Phe, Glu, Arg, Cys, Gly, Lys, Trp, Asn, or Hi s
  misc_feature (11)..(11): Xaa can be Tyr, Val, Ile, Leu, Ala, Met, Phe, Thr, Trp, Cys, Gly, His, Ser, Arg, Asn, Asp, Gln, Glu, Lys, or Pro
RXIDGIGRFYX

SEQ ID NO: 50263 - protein, 8 aa, Artificial Sequence
  Description of Artificial Sequence: Synthetic peptide
  Seed: RMIGGIGR
  misc_feature (2)..(2): Xaa can be Gln, Ile, Leu, Met, Phe, Ser, Thr, Trp, Tyr, or Val
  misc_feature (8)..(8): Xaa can be Arg
RXIGGIGX

SEQ ID NO: 50264 - protein, 9 aa, Artificial Sequence
  Description of Artificial Sequence: Synthetic peptide
  Seed: RMIGGIGRF
  misc_feature (2)..(2): Xaa can be Met, Leu, Gln, Ile, Thr, Tyr, Val, Ala, Ser, Lys, Phe, Trp, Glu, Asn, Gly, Arg, Cys, His, Asp, or Pro
  misc_feature (9)..(9): Xaa can be Tyr, Phe, Met, Trp, Ile, Leu, Val, His, Ala, Cys, Thr, Pro, or Ser
RXIGGIGRX

SEQ ID NO: 50265 - protein, 10 aa, Artificial Sequence
  Description of Artificial Sequence: Synthetic peptide
  Seed: RMIGGIGRFY
  misc_feature (2)..(2): Xaa can be Gln, Met, Ser, Thr, Ala, Val, Ile, Leu, Lys, Tyr, Glu, Gly, His, Trp, Arg, Asn, Phe, Asp, Cys, or Pro
  misc_feature (10)..(10): Xaa can be Lys, Tyr, Phe, Met, Trp, Leu, Arg, Ile, His, Ala, Asn, Asp, Cys, Gln, Glu, Gly, Pro, Ser, Thr, or Val
RXIGGIGRFX

SEQ ID NO: 50266 - protein, 11 aa, Artificial Sequence
  Description of Artificial Sequence: Synthetic peptide
  Seed: RMIGGIGRFYI
  misc_feature (2)..(2): Xaa can be Gln, Met, Ser, Thr, Val, Leu, Ile, Ala, Glu, Tyr, Phe, Arg, Asn, Asp, Cys, Gly, His, Lys, or Trp
  misc_feature (11)..(11): Xaa can be Tyr, Val, Ile, Leu, Ala, Phe, Met, Thr, Trp, Cys, His, Ser, Arg, Asn, Asp, Gln, Glu, Gly, Lys, or Pro
RXIGGIGRFYX

SEQ ID NO: 50267 - protein, 11 aa, Artificial Sequence
  Description of Artificial Sequence: Synthetic peptide
  Seed: RMIKRGINDRN
  misc_feature (2)..(2): Xaa can be Met, Phe, Ile, Leu, Thr, Trp, Tyr, Val, Ala, Gln, Gly, or Ser
  misc_feature (11)..(11): Xaa can be Arg, Lys, Ala, Asn, Asp, Cys, Gln, Glu, Gly, His, Ile, Leu, Met, Phe, Pro, Ser, Thr, Trp, Tyr, or Val
RXIKRGINDRX

SEQ ID NO: 50268 - protein, 10 aa, Artificial Sequence
  Description of Artificial Sequence: Synthetic peptide
  Seed: RMIKRGVNDR
  misc_feature (2)..(2): Xaa can be Leu, Met, Ala, Gln, Ile, Phe, Ser, Thr, Trp, Tyr, Val, Arg, Asn, Asp, Cys, Glu, Gly, His, Lys, or Pro
  misc_feature (10)..(10): Xaa can be Arg, Lys, or Tyr
RXIKRGVNDX

SEQ ID NO: 50269 - protein, 11 aa, Artificial Sequence
  Description of Artificial Sequence: Synthetic peptide
  Seed: RMIKRGVNDRN
  misc_feature (2)..(2): Xaa can be Met, Phe, Ile, Leu, Thr, Trp, Tyr, Val, Ala, Gln, Gly, or Ser
  misc_feature (11)..(11): Xaa can be Arg, Lys, Ala, Asn, Asp, Cys, Gln, Glu, Gly, His, Ile, Leu, Met, Phe, Pro, Ser, Thr, Trp, Tyr, or Val
RXIKRGVNDRX

SEQ ID NO: 50270 - protein, 10 aa, Artificial Sequence
  Description of Artificial Sequence: Synthetic peptide
  Seed: RMILSAFDER
  misc_feature (2)..(2): Xaa can be Met, Ile, Ser, Thr, Val, Ala, Arg, Asn, Asp, Cys, Gln, Glu, Gly, His, Leu, Lys, Phe, Pro, Trp, or Tyr
  misc_feature (10)..(10): Xaa can be Arg, Lys, Tyr, or His
RXILSAFDEX

SEQ ID NO: 50271 - protein, 11 aa, Artificial Sequence
  Description of Artificial Sequence: Synthetic peptide
  Seed: RMILSAFDERR
  misc_feature (2)..(2): Xaa can be Leu, Met, Phe, Thr, Tyr, Val, Ile, Trp, Gln, Ser, Ala, Arg, Asn, Asp, Cys, Glu, Gly, His, Lys, or Pro
  misc_feature (11)..(11): Xaa can be Arg, Lys, His, Tyr, Ala, Asn, Asp, Cys, Gln, Glu, Gly, Ile, Leu, Met, Phe, Pro, Ser, Thr, Trp, or Val
RXILSAFDERX

SEQ ID NO: 50272 - protein, 11 aa, Artificial Sequence
  Description of Artificial Sequence: Synthetic peptide
  Seed: RMMEDAKPEEV
  misc_feature (2)..(2): Xaa can be Leu, Met, Gln, Ile, or Val
  misc_feature (11)..(11): Xaa can be Val, Leu, Ala, Ile, or Met
RXMEDAKPEEX

SEQ ID NO: 50273 - protein, 11 aa, Artificial Sequence
  Description of Artificial Sequence: Synthetic peptide
  Seed: RMMENAKPDDV
  misc_feature (2)..(2): Xaa can be Leu, Met, or Ile
  misc_feature (11)..(11): Xaa can be Val, Ala, Ile, Leu, or Met
RXMENAKPDDX

SEQ ID NO: 50274 - protein, 11 aa, Artificial Sequence
  Description of Artificial Sequence: Synthetic peptide
  Seed: RMMENAKPEDV
  misc_feature (2)..(2): Xaa can be Leu, Met, or Ile
  misc_feature (11)..(11): Xaa can be Val, Ala, Ile, Leu, or Met
RXMENAKPEDX

SEQ ID NO: 50275 - protein, 11 aa, Artificial Sequence
  Description of Artificial Sequence: Synthetic peptide
  Seed: RMMENAKPEEV
  misc_feature (2)..(2): Xaa can be Leu, Met, Gln, Ile, or Val
  misc_feature (11)..(11): Xaa can be Val, Leu, Ala, Ile, or Met
RXMENAKPEEX

SEQ ID NO: 50276 - protein, 9 aa, Artificial Sequence
  Description of Artificial Sequence: Synthetic peptide
  Seed: RMMENARPE
  misc_feature (2)..(2): Xaa can be Gln, Met, Lys, Leu, Ala, Arg, Glu, His, Ile, Ser, Thr, Val, Asn, Tyr, Phe, Gly, Cys, Trp, Asp, or Pro
  misc_feature (9)..(9): Xaa can be Met, Phe, Tyr, Leu, Ile, Trp, His, Val, Ala, Gly, Cys, Ser, Thr, Asn, Gln, Glu, Pro, Asp, or Lys
RXMENARPX

SEQ ID NO: 50277 - protein, 11 aa, Artificial Sequence
  Description of Artificial Sequence: Synthetic peptide
  Seed: RMMENARPEDV
  misc_feature (2)..(2): Xaa can be Leu, Met, Gln, Ile, or Val
  misc_feature (11)..(11): Xaa can be Val, Ala, Ile, Leu, or Met
RXMENARPEDX

SEQ ID NO: 50278 - protein, 11 aa, Artificial Sequence
  Description of Artificial Sequence: Synthetic peptide
  Seed: RMMENARPEEV
  misc_feature (2)..(2): Xaa can be Leu, Met, Gln, Ile, Thr, or Val
  misc_feature (11)..(11): Xaa can be Val, Ile, Leu, Ala, or Met
RXMENARPEEX

SEQ ID NO: 50279 - protein, 11 aa, Artificial Sequence
  Description of Artificial Sequence: Synthetic peptide
  Seed: RMMENARSEDV
  misc_feature (2)..(2): Xaa can be Leu, Met, or Ile
  misc_feature (11)..(11): Xaa can be Val, Ile, or Leu
RXMENARSEDX

SEQ ID NO: 50280 - protein, 9 aa, Artificial Sequence
  Description of Artificial Sequence: Synthetic peptide
  Seed: RMMENASPE
  misc_feature (2)..(2): Xaa can be Gln, Met, Leu, Lys, Ala, Glu, Ile, Ser, Val, Arg, Thr, His, Asn, Gly, Phe, Tyr, Trp, Cys, Pro, or Asp
  misc_feature (9)..(9): Xaa can be Met, Phe, Tyr, Leu, Trp, Val, Ile, His, Ala, Cys, Gly, Thr, Pro, Ser, Asn, Gln, Glu, Lys, Arg, or Asp
RXMENASPX

SEQ ID NO: 50281 - protein, 11 aa, Artificial Sequence
  Description of Artificial Sequence: Synthetic peptide
  Seed: RMMENASPEDV
  misc_feature (2)..(2): Xaa can be Leu, Met, Gln, Ile, Val, or Thr
  misc_feature (11)..(11): Xaa can be Val, Ile, Leu, Met, or Ala
RXMENASPEDX

SEQ ID NO: 50282 - protein, 9 aa, Artificial Sequence
  Description of Artificial Sequence: Synthetic peptide
  Seed: RMMENSRPE
  misc_feature (2)..(2): Xaa can be Gln, Met, Lys, Leu, Ala, Glu, Arg, His, Ile, Ser, Thr, Val, Asn, Phe, Tyr, Gly, Cys, Pro, Trp, or Asp
  misc_feature (9)..(9): Xaa can be Met, Phe, Tyr, Leu, Trp, His, Ile, Val, Ala, Gly, Cys, Gln, Ser, Thr, Asn, Glu, Pro, Asp, or Lys
RXMENSRPX

SEQ ID NO: 50283 - protein, 11 aa, Artificial Sequence
  Description of Artificial Sequence: Synthetic peptide
  Seed: RMMENSRPEDV
  misc_feature (2)..(2): Xaa can be Leu, Met, Gln, Ile, or Val
  misc_feature (11)..(11): Xaa can be Val, Ala, Ile, Leu, or Met
RXMENSRPEDX

SEQ ID NO: 50284 - protein, 11 aa, Artificial Sequence
  Description of Artificial Sequence: Synthetic peptide
  Seed: RMMESAKPEDL
  misc_feature (2)..(2): Xaa can be Leu, Met, Ala, Arg, Asn, Gln, or Ile
  misc_feature (11)..(11): Xaa can be Val, Phe, Tyr, Ala, Ile, Leu, or Met
RXMESAKPEDX

SEQ ID NO: 50285 - protein, 11 aa, Artificial Sequence
  Description of Artificial Sequence: Synthetic peptide
  Seed: RMMESAKPEEV
  misc_feature (2)..(2): Xaa can be Leu, Met, Gln, Ile, or Val
  misc_feature (11)..(11): Xaa can be Val, Ile, Leu, Ala, or Met
RXMESAKPEEX

SEQ ID NO: 50286 - protein, 9 aa, Artificial Sequence
  Description of Artificial Sequence: Synthetic peptide
  Seed: RMMESARPE
  misc_feature (2)..(2): Xaa can be Gln, Met, Lys, Glu, Leu, Ala, Arg, His, Ile, Ser, Thr, Val, Asn, Tyr, Gly, Phe, Cys, Trp, Asp, or Pro
  misc_feature (9)..(9): Xaa can be Met, Phe, Tyr, Leu, His, Ile, Trp, Val, Ala, Gly, Cys, Asn, Gln, Pro, Ser, Thr, Glu, Asp, or Lys
RXMESARPX

SEQ ID NO: 50287 - protein, 11 aa, Artificial Sequence
  Description of Artificial Sequence: Synthetic peptide
  Seed: RMMESARPEEV
  misc_feature (2)..(2): Xaa can be Leu, Met, Gln, Ile, Thr, or Val
  misc_feature (11)..(11): Xaa can be Val, Ile, Leu, Ala, or Met
RXMESARPEEX

SEQ ID NO: 50288 - protein, 9 aa, Artificial Sequence
  Description of Artificial Sequence: Synthetic peptide
  Seed: RMMESARSE
  misc_feature (2)..(2): Xaa can be Gln, Met, Lys, Ala, Glu, His, Leu, Ser, Val, Arg, Asn, Ile, Thr, Phe, Tyr, Gly, Trp, Asp, Cys, or Pro
  misc_feature (9)..(9): Xaa can be Met, Phe, Tyr, Leu, His, Ile, Trp, Val, Ala, Cys, Gly, Ser, Thr, Asn, Gln, Glu, Pro, Asp, or Lys
RXMESARSX

SEQ ID NO: 50289 - protein, 11 aa, Artificial Sequence
  Description of Artificial Sequence: Synthetic peptide
  Seed: RMMESARSEDV
  misc_feature (2)..(2): Xaa can be Leu, Met, or Ile
  misc_feature (11)..(11): Xaa can be Val, Ala, Ile, or Leu
RXMESARSEDX

SEQ ID NO: 50290 - protein, 9 aa, Artificial Sequence
  Description of Artificial Sequence: Synthetic peptide
  Seed: RMMESSRPE
  misc_feature (2)..(2): Xaa can be Gln, Met, Lys, Leu, Ala, Glu, His, Arg, Ile, Ser, Thr, Val, Asn, Gly, Phe, Tyr, Trp, Pro, Cys, or Asp
  misc_feature (9)..(9): Xaa can be Met, Phe, Tyr, Leu, Trp, Ile, His, Val, Ala, Gly, Cys, Thr, Ser, Asn, Gln, Pro, Glu, Lys, or Asp
RXMESSRPX

SEQ ID NO: 50291 - protein, 11 aa, Artificial Sequence
  Description of Artificial Sequence: Synthetic peptide
  Seed: RMMESSRPEDV
  misc_feature (2)..(2): Xaa can be Met, Gln, Leu, Ile, Val, Ala, Ser, Thr, Gly, or Phe
  misc_feature (11)..(11): Xaa can be Tyr, Met, Phe, Val, Ile, Leu, Trp, Ala, or His
RXMESSRPEDX

SEQ ID NO: 50292 - protein, 8 aa, Artificial Sequence
  Description of Artificial Sequence: Synthetic peptide
  Seed: RMVGGIGR
  misc_feature (2)..(2): Xaa can be Leu, Met, Phe, Thr, Trp, Tyr, or Val
  misc_feature (8)..(8): Xaa can be Arg
RXVGGIGX

SEQ ID NO: 50293 - protein, 9 aa, Artificial Sequence
  Description of Artificial Sequence: Synthetic peptide
  Seed: RMVGGIGRF
  misc_feature (2)..(2): Xaa can be Gln, Ser, Thr, Met, Trp, Tyr, Ala, Phe, Val, Ile, Leu, Lys, Arg, Cys, Glu, Gly, His, Asn, or Asp
  misc_feature (9)..(9): Xaa can be Tyr, Phe, Met, Trp, Leu, Ile, Val, His, or Ala
RXVGGIGRX

SEQ ID NO: 50294 - protein, 10 aa, Artificial Sequence
  Description of Artificial Sequence: Synthetic peptide
  Seed: RMVGGIGRFY
  misc_feature (2)..(2): Xaa can be Gln, Met, Ser, Thr, Ala, Leu, Val, Glu, Gly, His, Ile, Lys, Arg, Asn, Cys, Phe, Trp, Tyr, Asp, or Pro
  misc_feature (10)..(10): Xaa can be Lys, Tyr, Phe, Trp, Met, Leu, Ile, Arg, Val, His, Ala, Asn, Asp, Cys, Gln, Glu, Gly, Pro, Ser, or Thr
RXVGGIGRFX

SEQ ID NO: 50295 - protein, 11 aa, Artificial Sequence
  Description of Artificial Sequence: Synthetic peptide
  Seed: RMVGGIGRFYI
  misc_feature (2)..(2): Xaa can be Met, Thr, Gln, Val, Leu, Ile, Ser, Ala, Phe, Tyr, Arg, Asn, Cys, Glu, Gly, His, Lys, or Tr p
  misc_feature (11)..(11): Xaa can be Tyr, Val, Ile, Leu, Ala, Met, Phe, Trp, Thr, His, Arg, Asn, Asp, Cys, Gln, Glu, Gly, Lys, Pro, or Ser
RXVGGIGRFYX

SEQ ID NO: 50296 - protein, 10 aa, Artificial Sequence
  Description of Artificial Sequence: Synthetic peptide
  Seed: RMVKRGINDR
  misc_feature (2)..(2): Xaa can be Leu, Met, Ala, Gln, Ile, Phe, Ser, Thr, Trp, Tyr, Val, Arg, Asn, Asp, Cys, Glu, Gly, His, Lys, or Pro
  misc_feature (10)..(10): Xaa can be Arg, Lys, or Tyr
RXVKRGINDX

SEQ ID NO: 50297 - protein, 10 aa, Artificial Sequence
  Description of Artificial Sequence: Synthetic peptide
  Seed: RMVLSAFDER
  misc_feature (2)..(2): Xaa can be Thr, Val, Ala, Arg, Asn, Asp, Cys, Gln, Glu, Gly, His, Ile, Leu, Lys, Met, Phe, Pro, Ser, Trp, or Tyr
  misc_feature (10)..(10): Xaa can be Arg, Lys, or Tyr
RXVLSAFDEX

SEQ ID NO: 50298 - protein, 11 aa, Artificial Sequence
  Description of Artificial Sequence: Synthetic peptide
  Seed: RMVLSAFDERR
  misc_feature (2)..(2): Xaa can be Met, Phe, Tyr, Ile, Leu, Ser, Thr, Trp, Val, Ala, Arg, Asn, Asp, Cys, Gln, Glu, Gly, His, Lys, or Pro
  misc_feature (11)..(11): Xaa can be Arg, Lys, Ala, Asn, Asp, Cys, Gln, Glu, Gly, His, Ile, Leu, Met, Phe, Pro, Ser, Thr, Trp, Tyr, or Val
RXVLSAFDERX

SEQ ID NO: 50299 - protein, 10 aa, Artificial Sequence
  Description of Artificial Sequence: Synthetic peptide
  Seed: RMVLSAFEER
  misc_feature (2)..(2): Xaa can be Ala, Arg, Asn, Asp, Cys, Gln, Glu, Gly, His, Ile, Leu, Lys, Met, Phe, Pro, Ser, Thr, Trp, Tyr, or Val
  misc_feature (10)..(10): Xaa can be Arg or Lys
RXVLSAFEEX

SEQ ID NO: 50300 - protein, 11 aa, Artificial Sequence
  Description of Artificial Sequence: Synthetic peptide
  Seed: RMVLSAFEERR
  misc_feature (2)..(2): Xaa can be Leu, Met, Phe, Thr, Tyr, Trp, Val, Ala, Gln, Ile, Ser, Arg, Asn, Asp, Cys, Glu, Gly, His, Lys, or Pro
  misc_feature (11)..(11): Xaa can be Arg, Lys, His, Tyr, Ile, Leu, Met, Phe, Val, Ala, Asn, Asp, Cys, Gln, Glu, Gly, Pro, Ser, Thr, or Trp
RXVLSAFEERX

SEQ ID NO: 50301 - protein, 9 aa, Artificial Sequence
  Description of Artificial Sequence: Synthetic peptide
  Seed: RMVPRGKLS
  misc_feature (2)..(2): Xaa can be Thr, Ser, Val, Met, Ile, Ala, Phe, Tyr, Leu, Trp, Asn, Cys, Gln, or Gly
  misc_feature (9)..(9): Xaa can be Lys, Ala, Val, Ile, Met, Leu, Ser, Tyr, Arg, Thr, Gly, Cys, or Phe
RXVPRGKLX

SEQ ID NO: 50302 - protein, 11 aa, Artificial Sequence
  Description of Artificial Sequence: Synthetic peptide
  Seed: RMVPRGKLSTR
  misc_feature (2)..(2): Xaa can be Ile, Leu, Met, Phe, Ser, Thr, Trp, Tyr, Val, Ala, Arg, Asn, Gln, or Gly
  misc_feature (11)..(11): Xaa can be Arg or Lys
RXVPRGKLSTX

SEQ ID NO: 50303 - protein, 8 aa, Artificial Sequence
  Description of Artificial Sequence: Synthetic peptide
  Seed: RMVSGIGR
  misc_feature (2)..(2): Xaa can be Gln, Ile, Leu, Met, Phe, Ser, Thr, Trp, Tyr, or Val
  misc_feature (8)..(8): Xaa can be Arg
RXVSGIGX

SEQ ID NO: 50304 - protein, 9 aa, Artificial Sequence
  Description of Artificial Sequence: Synthetic peptide
  Seed: RMVSGIGRF
  misc_feature (2)..(2): Xaa can be Gln, Met, Ser, Thr, Trp, Tyr, Ala, Phe, Val, Ile, Leu, Lys, Asn, Arg, Cys, Glu, Gly, His, or Asp
  misc_feature (9)..(9): Xaa can be Tyr, Phe, Met, Trp, Leu, Ile, Val, His, or Ala
RXVSGIGRX

SEQ ID NO: 50305 - protein, 10 aa, Artificial Sequence
  Description of Artificial Sequence: Synthetic peptide
  Seed: RMVSGIGRFY
  misc_feature (2)..(2): Xaa can be Gln, Thr, Met, Ala, Ser, Val, Ile, Leu, Lys, Glu, His, Tyr, Arg, Asn, Asp, Cys, Gly, Phe, Pro, or Trp
  misc_feature (10)..(10): Xaa can be Lys, Phe, Trp, Tyr, Met, Leu, Arg, Ile, Val, His, Ala, Asn, Asp, Cys, Gln, Glu, Gly, Pro, Ser, or Thr
RXVSGIGRFX

SEQ ID NO: 50306 - protein, 11 aa, Artificial Sequence
  Description of Artificial Sequence: Synthetic peptide
  Seed: RMVSGIGRFYI
  misc_feature (2)..(2): Xaa can be Gln, Met, Ser, Thr, Leu, Val, Ile, Ala, Glu, Phe, Tyr, Arg, Asn, Asp, Cys, Gly, His, Lys, Pro, or Trp
  misc_feature (11)..(11): Xaa can be Tyr, Val, Leu, Phe, Ile, Ala, Trp, Met, His, Thr, Arg, Asn, Asp, Cys, Gln, Glu, Gly, Lys, Pro, or Ser
RXVSGIGRFYX

SEQ ID NO: 50307 - protein, 10 aa, Artificial Sequence
  Description of Artificial Sequence: Synthetic peptide
  Seed: RNFWRGDNGR
  misc_feature (2)..(2): Xaa can be Met, Phe, Thr, Trp, Tyr, Ala, Arg, Asn, Asp, Cys, Gln, Glu, Gly, His, Ile, Leu, Lys, Pro, Ser, or Val
  misc_feature (10)..(10): Xaa can be Arg, Lys, His, or Tyr
RXFWRGDNGX

SEQ ID NO: 50308 - protein, 10 aa, Artificial Sequence
  Description of Artificial Sequence: Synthetic peptide
  Seed: RNFWRGENER
  misc_feature (2)..(2): Xaa can be Met, Phe, Trp, Ala, Arg, Asn, Asp, Cys, Gln, Glu, Gly, His, Ile, Leu, Lys, Pro, Ser, Thr, Tyr, or Val
  misc_feature (10)..(10): Xaa can be Arg, Lys, His, or Tyr
RXFWRGENEX

SEQ ID NO: 50309 - protein, 11 aa, Artificial Sequence
  Description of Artificial Sequence: Synthetic peptide
  Seed: RNFWRGENERR
  misc_feature (2)..(2): Xaa can be Ala, Gln, Ile, Leu, Met, Phe, Ser, Thr, Trp, Tyr, Val, Gly, Arg, Asn, Cys, Glu, His, Lys, or Pro
  misc_feature (11)..(11): Xaa can be Arg, Lys, Ala, Asn, Asp, Cys, Gln, Glu, Gly, His, Ile, Leu, Met, Phe, Pro, Ser, Thr, Trp, Tyr, or Val
RXFWRGENERX

SEQ ID NO: 50310 - protein, 10 aa, Artificial Sequence
  Description of Artificial Sequence: Synthetic peptide
  Seed: RNFWRGENGR
  misc_feature (2)..(2): Xaa can be Met, Trp, Phe, Thr, Tyr, Ala, Arg, Asn, Asp, Cys, Gln, Glu, Gly, His, Ile, Leu, Lys, Pro, Ser, or Val
  misc_feature (10)..(10): Xaa can be Arg, Lys, His, or Tyr
RXFWRGENGX

SEQ ID NO: 50311 - protein, 11 aa, Artificial Sequence
  Description of Artificial Sequence: Synthetic peptide
  Seed: RNFWRGENGRR
  misc_feature (2)..(2): Xaa can be Ala, Gln, Ile, Leu, Met, Phe, Ser, Thr, Trp, Tyr, Val, Gly, Arg, Asn, Cys, His, or Lys
  misc_feature (11)..(11): Xaa can be Arg, Lys, Ala, Asn, Asp, Cys, Gln, Glu, Gly, His, Ile, Leu, Met, Phe, Pro, Ser, Thr, Trp, Tyr, or Val
RXFWRGENGRX

SEQ ID NO: 50312 - protein, 11 aa, Artificial Sequence
  Description of Artificial Sequence: Synthetic peptide
  Seed: RNKYLEEHPSV
  misc_feature (2)..(2): Xaa can be Ala, Arg, Asn, Asp, Cys, Gln, Glu, Gly, His, Ile, Leu, Lys, Met, Phe, Pro, Ser, Thr, Trp, Tyr, or Val
  misc_feature (11)..(11): Xaa can be Ile, Leu, Met, Phe, Trp, or Val
RXKYLEEHPSX

SEQ ID NO: 50313 - protein, 11 aa, Artificial Sequence
  Description of Artificial Sequence: Synthetic peptide
  Seed: RNLPFDKATIM
  misc_feature (2)..(2): Xaa can be Pro, Ala, Arg, Asn, Asp, Cys, Gln, Glu, Gly, His, Ile, Leu, Lys, Met, Phe, Ser, Thr, Trp, Tyr, or Val
  misc_feature (11)..(11): Xaa can be Ile, Leu, Met, Phe, Ala, or Val
RXLPFDKATIX

SEQ ID NO: 50314 - protein, 11 aa, Artificial Sequence
  Description of Artificial Sequence: Synthetic peptide
  Seed: RNLPFDKPTIM
  misc_feature (2)..(2): Xaa can be Pro, Ala, Arg, Asn, Asp, Cys, Gln, Glu, Gly, His, Ile, Leu, Lys, Met, Phe, Ser, Thr, Trp, Tyr, or Val
  misc_feature (11)..(11): Xaa can be Leu, Met, Ile, Phe, or Val
RXLPFDKPTIX

SEQ ID NO: 50315 - protein, 11 aa, Artificial Sequence
  Description of Artificial Sequence: Synthetic peptide
  Seed: RNLPFDKSTIM
  misc_feature (2)..(2): Xaa can be Pro, Ala, Arg, Asn, Asp, Cys, Gln, Glu, Gly, His, Ile, Leu, Lys, Met, Phe, Ser, Thr, Trp, Tyr, or Val
  misc_feature (11)..(11): Xaa can be Ile, Leu, Met, Phe, Val, or Ala
RXLPFDKSTIX

SEQ ID NO: 50316 - protein, 11 aa, Artificial Sequence
  Description of Artificial Sequence: Synthetic peptide
  Seed: RNLPFDKSTVM
  misc_feature (2)..(2): Xaa can be Ala, Arg, Asn, Asp, Cys, Gln, Glu, Gly, His, Ile, Leu, Lys, Met, Phe, Pro, Ser, Thr, Trp, Tyr, or Val
  misc_feature (11)..(11): Xaa can be Ala, Ile, Leu, Met, Phe, or Val
RXLPFDKSTVX

SEQ ID NO: 50317 - protein, 11 aa, Artificial Sequence
  Description of Artificial Sequence: Synthetic peptide
  Seed: RNLPFDKTTIM
  misc_feature (2)..(2): Xaa can be Pro, Ala, Arg, Asn, Asp, Cys, Gln, Glu, Gly, His, Ile, Leu, Lys, Met, Phe, Ser, Thr, Trp, Tyr, or Val
  misc_feature (11)..(11): Xaa can be Ile, Leu, Met, Phe, Val, or Ala
RXLPFDKTTIX

SEQ ID NO: 50318 - protein, 11 aa, Artificial Sequence
  Description of Artificial Sequence: Synthetic peptide
  Seed: RNLPFDRPTIM
  misc_feature (2)..(2): Xaa can be Pro, Ala, Arg, Asn, Asp, Cys, Gln, Glu, Gly, His, Ile, Leu, Lys, Met, Phe, Ser, Thr, Trp, Tyr, or Val
  misc_feature (11)..(11): Xaa can be Ile, Leu, Met, Phe, Val, or Ala
RXLPFDRPTIX

SEQ ID NO: 50319 - protein, 11 aa, Artificial Sequence
  Description of Artificial Sequence: Synthetic peptide
  Seed: RNLPFDRSTIM
  misc_feature (2)..(2): Xaa can be Pro, Ala, Arg, Asn, Asp, Cys, Gln, Glu, Gly, His, Ile, Leu, Lys, Met, Phe, Ser, Thr, Trp, Tyr, or Val
  misc_feature (11)..(11): Xaa can be Ala, Ile, Leu, Met, Phe, Val, Arg, Asn, Asp, Cys, Gln, Glu, Gly, His, Lys, Pro, Ser, Thr, Trp, or Tyr
RXLPFDRSTIX

SEQ ID NO: 50320 - protein, 11 aa, Artificial Sequence
  Description of Artificial Sequence: Synthetic peptide
  Seed: RNLPFDRTTIM
  misc_feature (2)..(2): Xaa can be Pro, Ala, Arg, Asn, Asp, Cys, Gln, Glu, Gly, His, Ile, Leu, Lys, Met, Phe, Ser, Thr, Trp, Tyr, or Val
  misc_feature (11)..(11): Xaa can be Ala, Ile, Leu, Met, Phe, Val, Cys, Gly, Ser, Thr, Trp, or Tyr
RXLPFDRTTIX

SEQ ID NO: 50321 - protein, 10 aa, Artificial Sequence
  Description of Artificial Sequence: Synthetic peptide
  Seed: RNLPFDRTTV
  misc_feature (2)..(2): Xaa can be Leu, Met, Ala, Arg, Asn, Asp, Cys, Gln, Glu, Gly, His, Ile, Lys, Phe, Pro, Ser, Thr, Trp, Tyr, or Val
  misc_feature (10)..(10): Xaa can be Val, Ala, Ile, or Leu
RXLPFDRTTX

SEQ ID NO: 50322 - protein, 11 aa, Artificial Sequence
  Description of Artificial Sequence: Synthetic peptide
  Seed: RNLPFDRTTVM
  misc_feature (2)..(2): Xaa can be Pro, Ala, Arg, Asn, Asp, Cys, Gln, Glu, Gly, His, Ile, Leu, Lys, Met, Phe, Ser, Thr, Trp, Tyr, or Val
  misc_feature (11)..(11): Xaa can be Ala, Cys, Ile, Leu, Met, Phe, Thr, Val, Gly, Ser, Trp, or Tyr
RXLPFDRTTVX

SEQ ID NO: 50323 - protein, 11 aa, Artificial Sequence
  Description of Artificial Sequence: Synthetic peptide
  Seed: RNLPFEKATIM
  misc_feature (2)..(2): Xaa can be Pro, Ala, Arg, Asn, Asp, Cys, Gln, Glu, Gly, His, Ile, Leu, Lys, Met, Phe, Ser, Thr, Trp, Tyr, or Val
  misc_feature (11)..(11): Xaa can be Ile, Leu, Met, Phe, Ala, or Val
RXLPFEKATIX

SEQ ID NO: 50324 - protein, 11 aa, Artificial Sequence
  Description of Artificial Sequence: Synthetic peptide
  Seed: RNLPFEKSTVM
  misc_feature (2)..(2): Xaa can be Ala, Arg, Asn, Asp, Cys, Gln, Glu, Gly, His, Ile, Leu, Lys, Met, Phe, Pro, Ser, Thr, Trp, Tyr, or Val
  misc_feature (11)..(11): Xaa can be Ala, Ile, Leu, Met, Phe, or Val
RXLPFEKSTVX

SEQ ID NO: 50325 - protein, 11 aa, Artificial Sequence
  Description of Artificial Sequence: Synthetic peptide
  Seed: RNLPFERATVM
  misc_feature (2)..(2): Xaa can be Pro, Ala, Arg, Asn, Asp, Cys, Gln, Glu, Gly, His, Ile, Leu, Lys, Met, Phe, Ser, Thr, Trp, Tyr, or Val
  misc_feature (11)..(11): Xaa can be Ala, Ile, Leu, Met, Phe, Val, Cys, Gly, Ser, Thr, Trp, or Tyr
RXLPFERATVX

SEQ ID NO: 50326 - protein, 11 aa, Artificial Sequence
  Description of Artificial Sequence: Synthetic peptide
  Seed: RNLPFERSTIM
  misc_feature (2)..(2): Xaa can be Pro, Ala, Arg, Asn, Asp, Cys, Gln, Glu, Gly, His, Ile, Leu, Lys, Met, Phe, Ser, Thr, Trp, Tyr, or Val
  misc_feature (11)..(11): Xaa can be Ala, Ile, Leu, Met, Phe, Val, Arg, Asn, Asp, Cys, Gln, Glu, Gly, His, Lys, Pro, Ser, Thr, Trp, or Tyr
RXLPFERSTIX

SEQ ID NO: 50327 - protein, 11 aa, Artificial Sequence
  Description of Artificial Sequence: Synthetic peptide
  Seed: RNLPFERTTIM
  misc_feature (2)..(2): Xaa can be Pro, Ala, Arg, Asn, Asp, Cys, Gln, Glu, Gly, His, Ile, Leu, Lys, Met, Phe, Ser, Thr, Trp, Tyr, or Val
  misc_feature (11)..(11): Xaa can be Ala, Ile, Leu, Met, Phe, Val, Cys, Gly, Ser, Thr, Trp, or Tyr
RXLPFERTTIX

SEQ ID NO: 50328 - protein, 11 aa, Artificial Sequence
  Description of Artificial Sequence: Synthetic peptide
  Seed: RNLPFERVTIM
  misc_feature (2)..(2): Xaa can be Pro, Ala, Arg, Asn, Asp, Cys, Gln, Glu, Gly, His, Ile, Leu, Lys, Met, Phe, Ser, Thr, Trp, Tyr, or Val
  misc_feature (11)..(11): Xaa can be Ile, Leu, Met, Phe, Val, or Ala
RXLPFERVTIX

SEQ ID NO: 50329 - protein, 11 aa, Artificial Sequence
  Description of Artificial Sequence: Synthetic peptide
  Seed: RNRYLEEHPSA
  misc_feature (2)..(2): Xaa can be Thr, Ser, Val, Ile, Met, Phe, Tyr, Ala, Leu, Trp, Gln, Asn, Gly, Cys, His, or Lys
  misc_feature (11)..(11): Xaa can be Lys, Ala, Val, Ile, Met, Leu, Tyr, Arg, Ser, Gly, Thr, Cys, Phe, Pro, Asn, Gln, Glu, or Hi s
RXRYLEEHPSX

SEQ ID NO: 50330 - protein, 11 aa, Artificial Sequence
  Description of Artificial Sequence: Synthetic peptide
  Seed: RNRYLEENPSA
  misc_feature (2)..(2): Xaa can be Thr, Val, Ser, Tyr, Phe, Met, Ala, Ile, Trp, Leu, Gln, Gly, Asn, Cys, or His
  misc_feature (11)..(11): Xaa can be Lys, Ala, Val, Ile, Met, Leu, Tyr, Arg, Ser, Gly, Thr, Phe, Cys, or Pro
RXRYLEENPSX

SEQ ID NO: 50331 - protein, 11 aa, Artificial Sequence
  Description of Artificial Sequence: Synthetic peptide
  Seed: RNRYLEGHPSA
  misc_feature (2)..(2): Xaa can be Ser, Thr, Val, Met, Phe, Tyr, Ile, Ala, Leu, Gln, Gly, Trp, Asn, Arg, Asp, Cys, Glu, His, Lys, or Pro
  misc_feature (11)..(11): Xaa can be Lys, Ala, Ile, Val, Arg, Leu, Met, Tyr, Ser, Thr, Gly, Pro, Phe, Gln, Glu, Asn, Cys, or Hi s
RXRYLEGHPSX

SEQ ID NO: 50332 - protein, 9 aa, Artificial Sequence
  Description of Artificial Sequence: Synthetic peptide
  Seed: RPNATEIRA
  misc_feature (2)..(2): Xaa can be Pro
  misc_feature (9)..(9): Xaa can be Ala, Ile, Leu, Met, Phe, or Val
RXNATEIRX

SEQ ID NO: 50333 - protein, 10 aa, Artificial Sequence
  Description of Artificial Sequence: Synthetic peptide
  Seed: RPNATEIRAS
  misc_feature (2)..(2): Xaa can be Pro, Ala, Val, or Ile
  misc_feature (10)..(10): Xaa can be Leu, Met, Ala, Cys, Ile, Phe, Ser, Thr, Tyr, or Val
RXNATEIRAX

SEQ ID NO: 50334 - protein, 11 aa, Artificial Sequence
  Description of Artificial Sequence: Synthetic peptide
  Seed: RPNATEIRASV
  misc_feature (2)..(2): Xaa can be Pro, Ala, Ile, or Val
  misc_feature (11)..(11): Xaa can be Leu, Met, Ala, Cys, Gly, Ile, Phe, Ser, Thr, Trp, Tyr, or Val
RXNATEIRASX

SEQ ID NO: 50335 - protein, 9 aa, Artificial Sequence
  Description of Artificial Sequence: Synthetic peptide
  Seed: RQANNGENA
  misc_feature (2)..(2): Xaa can be Gln, Met, Lys, Ala, Arg, Glu, His, Ile, Leu, Ser, Thr, Val, Asn, Gly, Phe, or Tyr
  misc_feature (9)..(9): Xaa can be Phe, Tyr, Met, Ile, Leu, His, Trp, Val, or Ala
RXANNGENX

SEQ ID NO: 50336 - protein, 8 aa, Artificial Sequence
  Description of Artificial Sequence: Synthetic peptide
  Seed: RQANNGEY
  misc_feature (2)..(2): Xaa can be Gln, Met, Leu, Lys, Ala, Ile, Phe, Ser, Thr, Trp, Tyr, or Val
  misc_feature (8)..(8): Xaa can be Tyr, Phe, Met, or Leu
RXANNGEX

SEQ ID NO: 50337 - protein, 9 aa, Artificial Sequence
  Description of Artificial Sequence: Synthetic peptide
  Seed: RQANNGEYA
  misc_feature (2)..(2): Xaa can be Gln, Met, Leu, Lys, Val, Ile, Thr, Ala, Ser, Arg, Asn, Glu, His, Gly, Phe, Tyr, Cys, or Tr p
  misc_feature (9)..(9): Xaa can be Phe, Tyr, Met, Leu, Val, Ile, Ala, His, or Trp
RXANNGEYX

SEQ ID NO: 50338 - protein, 9 aa, Artificial Sequence
  Description of Artificial Sequence: Synthetic peptide
  Seed: RQNANDIRA
  misc_feature (2)..(2): Xaa can be Gln, Met, Lys, Ala, Arg, Glu, His, Ile, Leu, Ser, Val, Asn, Gly, Phe, Thr, or Tyr
  misc_feature (9)..(9): Xaa can be Phe, Tyr, Met, Leu, His, Ile, Trp, Val, or Ala
RXNANDIRX

SEQ ID NO: 50339 - protein, 10 aa, Artificial Sequence
  Description of Artificial Sequence: Synthetic peptide
  Seed: RRDGKWIREL
  misc_feature (2)..(2): Xaa can be Arg or Gln
  misc_feature (10)..(10): Xaa can be Leu, Arg, Ile, Lys, Met, Phe, Tyr, or Val
RXDGKWIREX

SEQ ID NO: 50340 - protein, 11 aa, Artificial Sequence
  Description of Artificial Sequence: Synthetic peptide
  Seed: RRDGKWIRELI
  misc_feature (2)..(2): Xaa can be Arg
  misc_feature (11)..(11): Xaa can be Arg, Ile, Leu, Lys, Met, Phe, Tyr, or Val
RXDGKWIRELX

SEQ ID NO: 50341 - protein, 10 aa, Artificial Sequence
  Description of Artificial Sequence: Synthetic peptide
  Seed: RRDGKWMREL
  misc_feature (2)..(2): Xaa can be Arg
  misc_feature (10)..(10): Xaa can be Arg, Ile, Leu, Lys, Met, Phe, Tyr, or Val
RXDGKWMREX

SEQ ID NO: 50342 - protein, 11 aa, Artificial Sequence
  Description of Artificial Sequence: Synthetic peptide
  Seed: RRDGKWMRELI
  misc_feature (2)..(2): Xaa can be Arg
  misc_feature (11)..(11): Xaa can be Arg, Ile, Leu, Lys, Met, Phe, Tyr, or Val
RXDGKWMRELX

SEQ ID NO: 50343 - protein, 10 aa, Artificial Sequence
  Description of Artificial Sequence: Synthetic peptide
  Seed: RRDGKWVREL
  misc_feature (2)..(2): Xaa can be Arg or Gln
  misc_feature (10)..(10): Xaa can be Leu, Arg, Ile, Lys, Met, Phe, Tyr, or Val
RXDGKWVREX

SEQ ID NO: 50344 - protein, 11 aa, Artificial Sequence
  Description of Artificial Sequence: Synthetic peptide
  Seed: RRDGKWVRELI
  misc_feature (2)..(2): Xaa can be Arg
  misc_feature (11)..(11): Xaa can be Ile, Leu, Met, Phe, or Val
RXDGKWVRELX

SEQ ID NO: 50345 - protein, 10 aa, Artificial Sequence
  Description of Artificial Sequence: Synthetic peptide
  Seed: RREGKWVREL
  misc_feature (2)..(2): Xaa can be Arg, Glu, Ala, Asn, Asp, Cys, Gln, Gly, His, Ile, Leu, Lys, Met, Phe, Pro, Ser, Thr, Trp, Tyr, or Val
  misc_feature (10)..(10): Xaa can be Leu, Ile, Met, Phe, Val, Arg, Lys, or Tyr
RXEGKWVREX

SEQ ID NO: 50346 - protein, 11 aa, Artificial Sequence
  Description of Artificial Sequence: Synthetic peptide
  Seed: RREGKWVRELI
  misc_feature (2)..(2): Xaa can be Arg
  misc_feature (11)..(11): Xaa can be Arg, Ile, Leu, Lys, Met, Phe, Tyr, or Val
RXEGKWVRELX

SEQ ID NO: 50347 - protein, 8 aa, Artificial Sequence
  Description of Artificial Sequence: Synthetic peptide
  Seed: RRIDGKWI
  misc_feature (2)..(2): Xaa can be Arg
  misc_feature (8)..(8): Xaa can be Ile, Leu, Met, Phe, or Val
RXIDGKWX

SEQ ID NO: 50348 - protein, 9 aa, Artificial Sequence
  Description of Artificial Sequence: Synthetic peptide
  Seed: RRIDGKWIR
  misc_feature (2)..(2): Xaa can be Arg, Met, Leu, Phe, Thr, Val, Ala, Asn, Gln, Gly, Ile, Ser, Trp, Tyr, Cys, Glu, or His
  misc_feature (9)..(9): Xaa can be Arg, Lys, His, Tyr, Ala, Asn, Cys, Gln, Gly, Ile, Leu, Met, Phe, Ser, Thr, Trp, or Val
RXIDGKWIX

SEQ ID NO: 50349 - protein, 10 aa, Artificial Sequence
  Description of Artificial Sequence: Synthetic peptide
  Seed: RRIDGKWIRE
  misc_feature (2)..(2): Xaa can be Arg or Gln
  misc_feature (10)..(10): Xaa can be Leu, Lys, Met, Phe, Ala, Arg, Asn, Asp, Cys, Gln, Glu, Gly, His, Ile, Pro, Ser, Thr, Trp, Tyr, or Val
RXIDGKWIRX

SEQ ID NO: 50350 - protein, 11 aa, Artificial Sequence
  Description of Artificial Sequence: Synthetic peptide
  Seed: RRIDGKWIREL
  misc_feature (2)..(2): Xaa can be Arg, Gln, or Lys
  misc_feature (11)..(11): Xaa can be Leu, Ile, Met, Phe, Val, Ala, Arg, Cys, His, Lys, Trp, or Tyr
RXIDGKWIREX

SEQ ID NO: 50351 - protein, 10 aa, Artificial Sequence
  Description of Artificial Sequence: Synthetic peptide
  Seed: RRIDGKWMRE
  misc_feature (2)..(2): Xaa can be Arg or Gln
  misc_feature (10)..(10): Xaa can be Arg, Ile, Leu, Lys, Met, Phe, Tyr, Ala, Asn, Asp, Cys, Gln, Glu, Gly, His, Pro, Ser, Thr, Trp, or Val
RXIDGKWMRX

SEQ ID NO: 50352 - protein, 11 aa, Artificial Sequence
  Description of Artificial Sequence: Synthetic peptide
  Seed: RRIDGKWMREL
  misc_feature (2)..(2): Xaa can be Arg or Gln
  misc_feature (11)..(11): Xaa can be Ile, Leu, Met, Phe, Val, Ala, Arg, Cys, His, Lys, Thr, Trp, or Tyr
RXIDGKWMREX

SEQ ID NO: 50353 - protein, 9 aa, Artificial Sequence
  Description of Artificial Sequence: Synthetic peptide
  Seed: RRIDGKWTR
  misc_feature (2)..(2): Xaa can be Arg, Met, Ile, Leu, Phe, Thr, Trp, Val, Ala, Asn, Cys, Gln, Gly, His, Ser, Tyr, Asp, Glu, or Lys
  misc_feature (9)..(9): Xaa can be Arg, Lys, His, Tyr, Ala, Asn, Gln, Gly, Ile, Leu, Met, Phe, Ser, Thr, Trp, or Val
RXIDGKWTX

SEQ ID NO: 50354 - protein, 10 aa, Artificial Sequence
  Description of Artificial Sequence: Synthetic peptide
  Seed: RRIDGKWTRE
  misc_feature (2)..(2): Xaa can be Arg or Gln
  misc_feature (10)..(10): Xaa can be Leu, Lys, Phe, Ala, Arg, Asn, Asp, Cys, Gln, Glu, Gly, His, Ile, Met, Pro, Ser, Thr, Trp, Tyr, or Val
RXIDGKWTRX

SEQ ID NO: 50355 - protein, 11 aa, Artificial Sequence
  Description of Artificial Sequence: Synthetic peptide
  Seed: RRIDGKWTREL
  misc_feature (2)..(2): Xaa can be Arg, Gln, or Lys
  misc_feature (11)..(11): Xaa can be Leu, Ile, Met, Phe, Val, Ala, Arg, Cys, Lys, Thr, Trp, or Tyr
RXIDGKWTREX

SEQ ID NO: 50356 - protein, 9 aa, Artificial Sequence
  Description of Artificial Sequence: Synthetic peptide
  Seed: RRIWRHANN
  misc_feature (2)..(2): Xaa can be Arg or Gln
  misc_feature (9)..(9): Xaa can be Arg, Leu, Lys, Ala, Asn, Cys, Gln, Glu, Gly, His, Ile, Met, Phe, Ser, Thr, Trp, Tyr, or Va l
RXIWRHANX

SEQ ID NO: 50357 - protein, 10 aa, Artificial Sequence
  Description of Artificial Sequence: Synthetic peptide
  Seed: RRIWRHANNG
  misc_feature (2)..(2): Xaa can be Arg or Gln
  misc_feature (10)..(10): Xaa can be Arg, Leu, Lys, Met, Phe, Ala, Asn, Cys, Gln, Glu, Gly, His, Ile, Pro, Ser, Thr, Trp, Tyr, or Val
RXIWRHANNX

SEQ ID NO: 50358 - protein, 9 aa, Artificial Sequence
  Description of Artificial Sequence: Synthetic peptide
  Seed: RRIWRQANN
  misc_feature (2)..(2): Xaa can be Arg or Gln
  misc_feature (9)..(9): Xaa can be Arg, Lys, Ala, Asn, Cys, Gln, Gly, His, Ile, Leu, Met, Phe, Ser, Thr, Trp, Tyr, or Val
RXIWRQANX

SEQ ID NO: 50359 - protein, 10 aa, Artificial Sequence
  Description of Artificial Sequence: Synthetic peptide
  Seed: RRIWRQANNG
  misc_feature (2)..(2): Xaa can be Arg or Gln
  misc_feature (10)..(10): Xaa can be Lys, Ala, Arg, Cys, Gln, Glu, Gly, His, Ile, Leu, Met, Phe, Ser, Thr, Trp, Tyr, or Val
RXIWRQANNX

SEQ ID NO: 50360 - protein, 10 aa, Artificial Sequence
  Description of Artificial Sequence: Synthetic peptide
  Seed: RRIWRQRNNG
  misc_feature (2)..(2): Xaa can be Arg or Gln
  misc_feature (10)..(10): Xaa can be Leu, Lys, Phe, Ala, Arg, Cys, Gln, Glu, Gly, His, Ile, Met, Ser, Thr, Trp, Tyr, or Val
RXIWRQRNNX

SEQ ID NO: 50361 - protein, 9 aa, Artificial Sequence
  Description of Artificial Sequence: Synthetic peptide
  Seed: RRKDGKWMR
  misc_feature (2)..(2): Xaa can be Arg
  misc_feature (9)..(9): Xaa can be Ala, Arg, Ile, Leu, Lys, Met, Phe, Tyr, or Val
RXKDGKWMX

SEQ ID NO: 50362 - protein, 11 aa, Artificial Sequence
  Description of Artificial Sequence: Synthetic peptide
  Seed: RRKDGKWMREL
  misc_feature (2)..(2): Xaa can be Arg
  misc_feature (11)..(11): Xaa can be Ile, Leu, Lys, Met, or Phe
RXKDGKWMREX

SEQ ID NO: 50363 - protein, 8 aa, Artificial Sequence
  Description of Artificial Sequence: Synthetic peptide
  Seed: RRNGKWVR
  misc_feature (2)..(2): Xaa can be Arg
  misc_feature (8)..(8): Xaa can be Arg, Ile, Leu, Lys, Met, or Phe
RXNGKWVX

SEQ ID NO: 50364 - protein, 10 aa, Artificial Sequence
  Description of Artificial Sequence: Synthetic peptide
  Seed: RRNGKWVREL
  misc_feature (2)..(2): Xaa can be Arg or Gln
  misc_feature (10)..(10): Xaa can be Leu, Ala, Arg, His, Ile, Lys, Met, Phe, Trp, Tyr, or Val
RXNGKWVREX

SEQ ID NO: 50365 - protein, 11 aa, Artificial Sequence
  Description of Artificial Sequence: Synthetic peptide
  Seed: RRNGKWVRELI
  misc_feature (2)..(2): Xaa can be Arg or Gln
  misc_feature (11)..(11): Xaa can be Leu, Ala, Arg, Cys, Gln, Gly, His, Ile, Lys, Met, Phe, Ser, Thr, Trp, Tyr, or Val
RXNGKWVRELX

SEQ ID NO: 50366 - protein, 9 aa, Artificial Sequence
  Description of Artificial Sequence: Synthetic peptide
  Seed: RRNKYLEEH
  misc_feature (2)..(2): Xaa can be Arg
  misc_feature (9)..(9): Xaa can be Ala, Arg, His, Ile, Leu, Lys, Met, Phe, Tyr, or Val
RXNKYLEEX

SEQ ID NO: 50367 - protein, 9 aa, Artificial Sequence
  Description of Artificial Sequence: Synthetic peptide
  Seed: RRNRYLEEH
  misc_feature (2)..(2): Xaa can be Arg or Gln
  misc_feature (9)..(9): Xaa can be Lys, Ala, Arg, His, Ile, Leu, Met, Phe, Trp, Tyr, or Val
RXNRYLEEX

SEQ ID NO: 50368 - protein, 9 aa, Artificial Sequence
  Description of Artificial Sequence: Synthetic peptide
  Seed: RRNRYLEGH
  misc_feature (2)..(2): Xaa can be Arg or Gln
  misc_feature (9)..(9): Xaa can be Arg, Leu, Lys, Met, Phe, Ala, Cys, Gln, Gly, His, Ile, Ser, Thr, Trp, Tyr, or Val
RXNRYLEGX

SEQ ID NO: 50369 - protein, 9 aa, Artificial Sequence
  Description of Artificial Sequence: Synthetic peptide
  Seed: RRRDGKWIR
  misc_feature (2)..(2): Xaa can be Arg
  misc_feature (9)..(9): Xaa can be Ala, Arg, His, Ile, Leu, Lys, Met, Phe, Tyr, or Val
RXRDGKWIX

SEQ ID NO: 50370 - protein, 11 aa, Artificial Sequence
  Description of Artificial Sequence: Synthetic peptide
  Seed: RRRDGKWIREL
  misc_feature (2)..(2): Xaa can be Arg
  misc_feature (11)..(11): Xaa can be Arg, Ile, Leu, Lys, Met, Phe, Tyr, or Val
RXRDGKWIREX

SEQ ID NO: 50371 - protein, 9 aa, Artificial Sequence
  Description of Artificial Sequence: Synthetic peptide
  Seed: RRRDGKWMR
  misc_feature (2)..(2): Xaa can be Arg or Gln
  misc_feature (9)..(9): Xaa can be Lys, Ala, Arg, Gly, His, Ile, Leu, Met, Phe, Trp, Tyr, or Val
RXRDGKWMX

SEQ ID NO: 50372 - protein, 11 aa, Artificial Sequence
  Description of Artificial Sequence: Synthetic peptide
  Seed: RRRDGKWMREL
  misc_feature (2)..(2): Xaa can be Arg
  misc_feature (11)..(11): Xaa can be Arg, Ile, Leu, Lys, Met, Phe, Tyr, or Val
RXRDGKWMREX

SEQ ID NO: 50373 - protein, 9 aa, Artificial Sequence
  Description of Artificial Sequence: Synthetic peptide
  Seed: RRRDGKWVR
  misc_feature (2)..(2): Xaa can be Arg
  misc_feature (9)..(9): Xaa can be Ala, Arg, Ile, Leu, Lys, Met, Phe, Tyr, or Val
RXRDGKWVX

SEQ ID NO: 50374 - protein, 11 aa, Artificial Sequence
  Description of Artificial Sequence: Synthetic peptide
  Seed: RRRDGKWVREL
  misc_feature (2)..(2): Xaa can be Arg
  misc_feature (11)..(11): Xaa can be Arg, Ile, Leu, Lys, Met, Phe, or Tyr
RXRDGKWVREX

SEQ ID NO: 50375 - protein, 9 aa, Artificial Sequence
  Description of Artificial Sequence: Synthetic peptide
  Seed: RRREGKWVR
  misc_feature (2)..(2): Xaa can be Arg or Gln
  misc_feature (9)..(9): Xaa can be Lys, Ala, Arg, His, Ile, Leu, Met, Phe, Trp, Tyr, or Val
RXREGKWVX

SEQ ID NO: 50376 - protein, 11 aa, Artificial Sequence
  Description of Artificial Sequence: Synthetic peptide
  Seed: RRREGKWVREL
  misc_feature (2)..(2): Xaa can be Arg
  misc_feature (11)..(11): Xaa can be Arg, Ile, Leu, Lys, Met, Phe, Tyr, or Val
RXREGKWVREX

SEQ ID NO: 50377 - protein, 9 aa, Artificial Sequence
  Description of Artificial Sequence: Synthetic peptide
  Seed: RRRNGKWVR
  misc_feature (2)..(2): Xaa can be Arg or Gln
  misc_feature (9)..(9): Xaa can be Arg, Lys, Ala, Gly, His, Ile, Leu, Met, Phe, Ser, Thr, Trp, Tyr, or Val
RXRNGKWVX

SEQ ID NO: 50378 - protein, 11 aa, Artificial Sequence
  Description of Artificial Sequence: Synthetic peptide
  Seed: RRRNGKWVREL
  misc_feature (2)..(2): Xaa can be Arg
  misc_feature (11)..(11): Xaa can be Arg, Ile, Leu, Lys, Met, Phe, Tyr, or Val
RXRNGKWVREX

SEQ ID NO: 50379 - protein, 10 aa, Artificial Sequence
  Description of Artificial Sequence: Synthetic peptide
  Seed: RRSGAAGAAI
  misc_feature (2)..(2): Xaa can be Arg
  misc_feature (10)..(10): Xaa can be Arg, Ile, Leu, Lys, Met, Phe, Trp, Tyr, or Val
RXSGAAGAAX

SEQ ID NO: 50380 - protein, 11 aa, Artificial Sequence
  Description of Artificial Sequence: Synthetic peptide
  Seed: RRSGAAGAAIK
  misc_feature (2)..(2): Xaa can be Arg
  misc_feature (11)..(11): Xaa can be Arg, Lys, or Phe
RXSGAAGAAIX

SEQ ID NO: 50381 - protein, 11 aa, Artificial Sequence
  Description of Artificial Sequence: Synthetic peptide
  Seed: RRSGAAGAAVK
  misc_feature (2)..(2): Xaa can be Arg
  misc_feature (11)..(11): Xaa can be Arg, Lys, or Phe
RXSGAAGAAVX

SEQ ID NO: 50382 - protein, 10 aa, Artificial Sequence
  Description of Artificial Sequence: Synthetic peptide
  Seed: RRSGAAGATV
  misc_feature (2)..(2): Xaa can be Arg
  misc_feature (10)..(10): Xaa can be Arg, Ile, Leu, Lys, Met, Phe, Tyr, or Val
RXSGAAGATX

SEQ ID NO: 50383 - protein, 11 aa, Artificial Sequence
  Description of Artificial Sequence: Synthetic peptide
  Seed: RRSGAAGATVK
  misc_feature (2)..(2): Xaa can be Arg
  misc_feature (11)..(11): Xaa can be Lys or Phe
RXSGAAGATVX

SEQ ID NO: 50384 - protein, 9 aa, Artificial Sequence
  Description of Artificial Sequence: Synthetic peptide
  Seed: RRTKIAYER
  misc_feature (2)..(2): Xaa can be Arg or Gln
  misc_feature (9)..(9): Xaa can be Lys, Ala, Arg, Cys, Gln, Gly, His, Ile, Leu, Met, Phe, Ser, Thr, Trp, Tyr, or Val
RXTKIAYEX

SEQ ID NO: 50385 - protein, 10 aa, Artificial Sequence
  Description of Artificial Sequence: Synthetic peptide
  Seed: RRTKIAYERM
  misc_feature (2)..(2): Xaa can be Arg, Tyr, Ala, Asn, Asp, Cys, Gln, Glu, Gly, His, Ile, Leu, Lys, Met, Phe, Pro, Ser, Thr, Trp, or Val
  misc_feature (10)..(10): Xaa can be Ala, Ile, Leu, Lys, Met, Ser, Val, Arg, Asn, Asp, Cys, Gln, Glu, Gly, His, Phe, Pro, Thr, Trp, or Tyr
RXTKIAYERX

SEQ ID NO: 50386 - protein, 11 aa, Artificial Sequence
  Description of Artificial Sequence: Synthetic peptide
  Seed: RRTRIAYERMC
  misc_feature (2)..(2): Xaa can be Arg, Ala, Asn, Asp, Cys, Gln, Glu, Gly, His, Ile, Leu, Lys, Met, Phe, Pro, Ser, Thr, Trp, Tyr, or Val
  misc_feature (11)..(11): Xaa can be Arg, Ile, Leu, Lys, Met, Phe, Tyr, Val, Ala, Asn, Cys, Gln, Glu, Gly, His, Pro, Ser, Thr, or Trp
RXTRIAYERMX

SEQ ID NO: 50387 - protein, 9 aa, Artificial Sequence
  Description of Artificial Sequence: Synthetic peptide
  Seed: RRTRTAYER
  misc_feature (2)..(2): Xaa can be Arg
  misc_feature (9)..(9): Xaa can be Ala, Arg, Gly, His, Ile, Leu, Lys, Met, Phe, Thr, Trp, Tyr, or Val
RXTRTAYEX

SEQ ID NO: 50388 - protein, 10 aa, Artificial Sequence
  Description of Artificial Sequence: Synthetic peptide
  Seed: RRTRTAYERM
  misc_feature (2)..(2): Xaa can be Arg, Met, Tyr, Phe, Gln, Ile, Leu, Ser, Trp, Val, Ala, Asn, Asp, Cys, Glu, Gly, His, Lys, Pro, or Thr
  misc_feature (10)..(10): Xaa can be Ala, Arg, Cys, Gly, Ile, Leu, Lys, Met, Phe, Ser, Thr, Trp, Tyr, Val, Pro, His, Gln, Asn, or Glu
RXTRTAYERX

SEQ ID NO: 50389 - protein, 9 aa, Artificial Sequence
  Description of Artificial Sequence: Synthetic peptide
  Seed: RRTRVAYER
  misc_feature (2)..(2): Xaa can be Arg or Gln
  misc_feature (9)..(9): Xaa can be Arg, Leu, Lys, Ala, Asn, Cys, Gln, Gly, His, Ile, Met, Phe, Ser, Thr, Trp, Tyr, or Val
RXTRVAYEX

SEQ ID NO: 50390 - protein, 10 aa, Artificial Sequence
  Description of Artificial Sequence: Synthetic peptide
  Seed: RRTRVAYERM
  misc_feature (2)..(2): Xaa can be Arg, Met, Tyr, Val, Ala, Asn, Asp, Cys, Gln, Glu, Gly, His, Ile, Leu, Lys, Phe, Pro, Ser, Thr, or Trp
  misc_feature (10)..(10): Xaa can be Ala, Arg, Gly, Ile, Leu, Lys, Met, Phe, Ser, Thr, Trp, Tyr, Val, Cys, Pro, Asn, Asp, Gln, Glu, or His
RXTRVAYERX

SEQ ID NO: 50391 - protein, 11 aa, Artificial Sequence
  Description of Artificial Sequence: Synthetic peptide
  Seed: RRTRVAYERMC
  misc_feature (2)..(2): Xaa can be Arg, Ala, Asn, Asp, Cys, Gln, Glu, Gly, His, Ile, Leu, Lys, Met, Phe, Pro, Ser, Thr, Trp, Tyr, or Val
  misc_feature (11)..(11): Xaa can be Arg, Leu, Lys, Met, Phe, Tyr, Ala, Cys, Gln, Gly, His, Ile, Ser, Thr, Trp, or Val
RXTRVAYERMX

SEQ ID NO: 50392 - protein, 10 aa, Artificial Sequence
  Description of Artificial Sequence: Synthetic peptide
  Seed: RRTSDMRTEI
  misc_feature (2)..(2): Xaa can be Arg or Gln
  misc_feature (10)..(10): Xaa can be Leu, Arg, Ile, Lys, Met, Phe, Trp, Tyr, or Val
RXTSDMRTEX

SEQ ID NO: 50393 - protein, 10 aa, Artificial Sequence
  Description of Artificial Sequence: Synthetic peptide
  Seed: RRTWRQANNG
  misc_feature (2)..(2): Xaa can be Arg
  misc_feature (10)..(10): Xaa can be Ala, Arg, Cys, Gln, Gly, His, Ile, Leu, Lys, Met, Phe, Ser, Thr, Trp, Tyr, or Val
RXTWRQANNX

SEQ ID NO: 50394 - protein, 9 aa, Artificial Sequence
  Description of Artificial Sequence: Synthetic peptide
  Seed: RRVDGKWIR
  misc_feature (2)..(2): Xaa can be Arg
  misc_feature (9)..(9): Xaa can be Ala, Arg, Gly, His, Ile, Leu, Lys, Met, Phe, Trp, Tyr, or Val
RXVDGKWIX

SEQ ID NO: 50395 - protein, 10 aa, Artificial Sequence
  Description of Artificial Sequence: Synthetic peptide
  Seed: RRVDGKWIRE
  misc_feature (2)..(2): Xaa can be Arg
  misc_feature (10)..(10): Xaa can be Ala, Arg, Asn, Cys, Gln, Glu, Gly, His, Ile, Leu, Lys, Met, Phe, Ser, Thr, Trp, Tyr, or Va l
RXVDGKWIRX

SEQ ID NO: 50396 - protein, 11 aa, Artificial Sequence
  Description of Artificial Sequence: Synthetic peptide
  Seed: RRVDGKWIREL
  misc_feature (2)..(2): Xaa can be Arg or Gln
  misc_feature (11)..(11): Xaa can be Leu, Ala, Arg, Ile, Lys, Met, Phe, Tyr, or Val
RXVDGKWIREX

SEQ ID NO: 50397 - protein, 9 aa, Artificial Sequence
  Description of Artificial Sequence: Synthetic peptide
  Seed: RRVDGKWMR
  misc_feature (2)..(2): Xaa can be Arg, Met, Leu, Thr, Ala, Asn, Gln, Gly, Ile, Phe, Ser, Trp, Tyr, Val, Cys, or His
  misc_feature (9)..(9): Xaa can be Arg, Lys, His, Tyr, Ala, Gly, Ile, Leu, Met, Phe, Ser, Thr, Trp, or Val
RXVDGKWMX

SEQ ID NO: 50398 - protein, 10 aa, Artificial Sequence
  Description of Artificial Sequence: Synthetic peptide
  Seed: RRVDGKWMRE
  misc_feature (2)..(2): Xaa can be Arg or Gln
  misc_feature (10)..(10): Xaa can be Leu, Lys, Phe, Ala, Arg, Asn, Cys, Gln, Glu, Gly, His, Ile, Met, Pro, Ser, Thr, Trp, Tyr, or Val
RXVDGKWMRX

SEQ ID NO: 50399 - protein, 11 aa, Artificial Sequence
  Description of Artificial Sequence: Synthetic peptide
  Seed: RRVDGKWMREL
  misc_feature (2)..(2): Xaa can be Arg or Gln
  misc_feature (11)..(11): Xaa can be Leu, Ala, Arg, Ile, Lys, Met, Phe, Tyr, or Val
RXVDGKWMREX

SEQ ID NO: 50400 - protein, 9 aa, Artificial Sequence
  Description of Artificial Sequence: Synthetic peptide
  Seed: RRVGGKWIR
  misc_feature (2)..(2): Xaa can be Arg or Gln
  misc_feature (9)..(9): Xaa can be Lys, Ala, Arg, Gln, Gly, His, Ile, Leu, Met, Phe, Ser, Thr, Trp, Tyr, or Val
RXVGGKWIX

SEQ ID NO: 50401 - protein, 10 aa, Artificial Sequence
  Description of Artificial Sequence: Synthetic peptide
  Seed: RRVGGKWIRE
  misc_feature (2)..(2): Xaa can be Arg
  misc_feature (10)..(10): Xaa can be Ala, Arg, Asn, Cys, Gln, Glu, Gly, His, Ile, Leu, Lys, Met, Phe, Pro, Ser, Thr, Trp, Tyr, or Val
RXVGGKWIRX

SEQ ID NO: 50402 - protein, 11 aa, Artificial Sequence
  Description of Artificial Sequence: Synthetic peptide
  Seed: RRVGGKWIREL
  misc_feature (2)..(2): Xaa can be Arg or Gln
  misc_feature (11)..(11): Xaa can be Leu, Ala, Arg, Ile, Lys, Met, Phe, Trp, Tyr, or Val
RXVGGKWIREX

SEQ ID NO: 50403 - protein, 8 aa, Artificial Sequence
  Description of Artificial Sequence: Synthetic peptide
  Seed: RRVNGKWM
  misc_feature (2)..(2): Xaa can be Arg
  misc_feature (8)..(8): Xaa can be Ile, Leu, Lys, Met, or Phe
RXVNGKWX

SEQ ID NO: 50404 - protein, 9 aa, Artificial Sequence
  Description of Artificial Sequence: Synthetic peptide
  Seed: RRVNGKWMR
  misc_feature (2)..(2): Xaa can be Arg, Gln, Met, Ile, Leu, Phe, Thr, Val, Ala, Asn, Cys, Gly, Ser, Trp, Tyr, Glu, His, or Ly s
  misc_feature (9)..(9): Xaa can be Arg, Lys, His, Ile, Leu, Met, Phe, Tyr, Ala, Asn, Cys, Gln, Glu, Gly, Ser, Thr, Trp, or Va l
RXVNGKWMX

SEQ ID NO: 50405 - protein, 10 aa, Artificial Sequence
  Description of Artificial Sequence: Synthetic peptide
  Seed: RRVNGKWMRE
  misc_feature (2)..(2): Xaa can be Arg or Gln
  misc_feature (10)..(10): Xaa can be Arg, Leu, Lys, Met, Phe, Ala, Asn, Asp, Cys, Gln, Glu, Gly, His, Ile, Pro, Ser, Thr, Trp, Tyr, or Val
RXVNGKWMRX

SEQ ID NO: 50406 - protein, 11 aa, Artificial Sequence
  Description of Artificial Sequence: Synthetic peptide
  Seed: RRVNGKWMREL
  misc_feature (2)..(2): Xaa can be Arg or Gln
  misc_feature (11)..(11): Xaa can be Leu, Ala, Arg, Ile, Lys, Met, Phe, Tyr, or Val
RXVNGKWMREX

SEQ ID NO: 50407 - protein, 10 aa, Artificial Sequence
  Description of Artificial Sequence: Synthetic peptide
  Seed: RRVWRQANNG
  misc_feature (2)..(2): Xaa can be Arg
  misc_feature (10)..(10): Xaa can be Ala, Arg, Cys, Gln, Glu, Gly, His, Ile, Leu, Lys, Met, Phe, Ser, Thr, Trp, Tyr, or Val
RXVWRQANNX

SEQ ID NO: 50408 - protein, 9 aa, Artificial Sequence
  Description of Artificial Sequence: Synthetic peptide
  Seed: RSALILRGA
  misc_feature (2)..(2): Xaa can be Thr, Ser, Val, Met, Tyr, Ala, Ile, Trp, Gly, Phe, Gln, Leu, Asn, or Cys
  misc_feature (9)..(9): Xaa can be Lys, Ala, Val, Ile, Leu, Met, Ser, Gly, Arg, Thr, Tyr, Cys, Asn, His, Phe, or Pro
RXALILRGX

SEQ ID NO: 50409 - protein, 10 aa, Artificial Sequence
  Description of Artificial Sequence: Synthetic peptide
  Seed: RSALILRGAV
  misc_feature (2)..(2): Xaa can be Met, Leu, Thr, Ser, Gln, Ile, Val, Ala, Tyr, Phe, Trp, Arg, Asn, Asp, Cys, Glu, Gly, His, Lys, or Pro
  misc_feature (10)..(10): Xaa can be Lys, Ala, Val, Ile, Leu, Met, Ser, Gly, Thr, Tyr, Asp, Cys, Phe, Pro, Arg, Glu, or Trp
RXALILRGAX

SEQ ID NO: 50410 - protein, 10 aa, Artificial Sequence
  Description of Artificial Sequence: Synthetic peptide
  Seed: RSALILRGSV
  misc_feature (2)..(2): Xaa can be Thr, Ser, Leu, Met, Gln, Val, Ile, Tyr, Trp, Ala, Phe, Arg, Asn, Asp, Cys, Glu, Gly, His, Lys, or Pro
  misc_feature (10)..(10): Xaa can be Lys, Ala, Val, Ile, Leu, Met, Ser, Thr, Arg, Tyr, or Gly
RXALILRGSX

SEQ ID NO: 50411 - protein, 11 aa, Artificial Sequence
  Description of Artificial Sequence: Synthetic peptide
  Seed: RSALILRGSVA
  misc_feature (2)..(2): Xaa can be Ser, Thr, Ala, Gln, Ile, Met, Phe, Tyr, or Val
  misc_feature (11)..(11): Xaa can be Lys or Ala
RXALILRGSVX

SEQ ID NO: 50412 - protein, 9 aa, Artificial Sequence
  Description of Artificial Sequence: Synthetic peptide
  Seed: RSALVLRGS
  misc_feature (2)..(2): Xaa can be Thr, Ser, Val, Met, Tyr, Ala, Ile, Trp, Gly, Phe, Gln, Leu, Asn, or Cys
  misc_feature (9)..(9): Xaa can be Lys, Ala, Val, Ile, Leu, Met, Ser, Gly, Arg, Thr, Tyr, Cys, Asn, His, Phe, or Pro
RXALVLRGX

SEQ ID NO: 50413 - protein, 10 aa, Artificial Sequence
  Description of Artificial Sequence: Synthetic peptide
  Seed: RSALVLRGSV
  misc_feature (2)..(2): Xaa can be Thr, Ser, Leu, Met, Gln, Val, Ile, Tyr, Trp, Ala, Phe, Arg, Asn, Asp, Cys, Glu, Gly, His, Lys, or Pro
  misc_feature (10)..(10): Xaa can be Lys, Ala, Val, Ile, Leu, Met, Ser, Thr, Arg, Tyr, or Gly
RXALVLRGSX

SEQ ID NO: 50414 - protein, 10 aa, Artificial Sequence
  Description of Artificial Sequence: Synthetic peptide
  Seed: RSEDVSFQGR
  misc_feature (2)..(2): Xaa can be Ile, Leu, Met, Phe, Thr, Trp, Tyr, Val, Ala, Gln, Gly, or Ser
  misc_feature (10)..(10): Xaa can be Arg or Lys
RXEDVSFQGX

SEQ ID NO: 50415 - protein, 9 aa, Artificial Sequence
  Description of Artificial Sequence: Synthetic peptide
  Seed: RSGAAGAAI
  misc_feature (2)..(2): Xaa can be Thr, Ala, Ser, Val, Ile, Met, Tyr, Asn, Gln, Gly, Leu, Phe, or Trp
  misc_feature (9)..(9): Xaa can be Lys, Ala, Ile, Met, Val, Leu, Phe, Tyr, Arg, or Ser
RXGAAGAAX

SEQ ID NO: 50416 - protein, 10 aa, Artificial Sequence
  Description of Artificial Sequence: Synthetic peptide
  Seed: RSGAAGAAIK
  misc_feature (2)..(2): Xaa can be Leu, Met, Thr, Ala, Gln, Ile, Phe, Ser, Trp, Tyr, Val, Arg, Asn, Asp, Cys, Glu, Gly, His, Lys, or Pro
  misc_feature (10)..(10): Xaa can be Arg, Lys, Tyr, or Ala
RXGAAGAAIX

SEQ ID NO: 50417 - protein, 10 aa, Artificial Sequence
  Description of Artificial Sequence: Synthetic peptide
  Seed: RSGAAGAAVK
  misc_feature (2)..(2): Xaa can be Leu, Met, Thr, Ala, Gln, Ile, Phe, Ser, Trp, Tyr, Val, Arg, Asn, Asp, Cys, Glu, Gly, His, Lys, or Pro
  misc_feature (10)..(10): Xaa can be Arg, Lys, Tyr, or Ala
RXGAAGAAVX

SEQ ID NO: 50418 - protein, 9 aa, Artificial Sequence
  Description of Artificial Sequence: Synthetic peptide
  Seed: RSGAAGATV
  misc_feature (2)..(2): Xaa can be Thr, Ser, Val, Ala, Ile, Met, Gly, Leu, Gln, Phe, Tyr, Asn, Cys, or Trp
  misc_feature (9)..(9): Xaa can be Lys, Trp, Ala, Phe, Tyr, Met, Ile, Leu, Val, Arg, or Ser
RXGAAGATX

SEQ ID NO: 50419 - protein, 10 aa, Artificial Sequence
  Description of Artificial Sequence: Synthetic peptide
  Seed: RSGAAGATVK
  misc_feature (2)..(2): Xaa can be Leu, Met, Thr, Ala, Gln, Ile, Phe, Ser, Tyr, or Val
  misc_feature (10)..(10): Xaa can be Lys, Arg, Tyr, or Ala
RXGAAGATVX

SEQ ID NO: 50420 - protein, 10 aa, Artificial Sequence
  Description of Artificial Sequence: Synthetic peptide
  Seed: RSGGNTNQHR
  misc_feature (2)..(2): Xaa can be Met, Gln, Ile, Leu, Phe, Ser, Thr, Trp, Tyr, or Val
  misc_feature (10)..(10): Xaa can be Arg or Lys
RXGGNTNQHX

SEQ ID NO: 50421 - protein, 10 aa, Artificial Sequence
  Description of Artificial Sequence: Synthetic peptide
  Seed: RSGGNTNQQR
  misc_feature (2)..(2): Xaa can be Ile, Leu, Met, Phe, Ser, Thr, Trp, Tyr, or Val
  misc_feature (10)..(10): Xaa can be Arg
RXGGNTNQQX

SEQ ID NO: 50422 - protein, 10 aa, Artificial Sequence
  Description of Artificial Sequence: Synthetic peptide
  Seed: RSGGNTSQQR
  misc_feature (2)..(2): Xaa can be Ile, Leu, Met, Phe, Ser, Thr, Trp, Tyr, or Val
  misc_feature (10)..(10): Xaa can be Arg
RXGGNTSQQX

SEQ ID NO: 50423 - protein, 10 aa, Artificial Sequence
  Description of Artificial Sequence: Synthetic peptide
  Seed: RSGGNTTQQR
  misc_feature (2)..(2): Xaa can be Gln, Ile, Leu, Met, Phe, Ser, Thr, Trp, Tyr, or Val
  misc_feature (10)..(10): Xaa can be Arg
RXGGNTTQQX

SEQ ID NO: 50424 - protein, 8 aa, Artificial Sequence
  Description of Artificial Sequence: Synthetic peptide
  Seed: RSKYWAIR
  misc_feature (2)..(2): Xaa can be Thr, Ser, Val, Ala, Ile, Met, Arg, Gln, Gly, Leu, Lys, Phe, Trp, Tyr, or Asn
  misc_feature (8)..(8): Xaa can be Arg, Lys, Ala, Ile, Leu, Met, Phe, Ser, Tyr, Val, Pro, Gly, or Thr
RXKYWAIX

SEQ ID NO: 50425 - protein, 9 aa, Artificial Sequence
  Description of Artificial Sequence: Synthetic peptide
  Seed: RSKYWAIRT
  misc_feature (2)..(2): Xaa can be Thr, Ala, Met, Ser, Tyr, Val, Ile, Phe, Gln, Gly, Leu, Trp, Asn, Cys, Arg, His, or Lys
  misc_feature (9)..(9): Xaa can be Lys, Ala, Ile, Leu, Met, Ser, Val, Arg, Gly, Thr, Tyr, Asn, Cys, Gln, Pro, Phe, Glu, His, or Asp
RXKYWAIRX

SEQ ID NO: 50426 - protein, 10 aa, Artificial Sequence
  Description of Artificial Sequence: Synthetic peptide
  Seed: RSKYWAIRTR
  misc_feature (2)..(2): Xaa can be Met, Ser, Thr, Tyr, Val, Phe, Ile, Ala, Leu, Trp, Gln, Gly, Asn, Cys, His, Pro, Arg, Asp, Glu, or Lys
  misc_feature (10)..(10): Xaa can be Arg, Lys, Ala, Ile, Val, Leu, Met, Ser, Gly, Thr, Tyr, Cys, His, Phe, Asn, Gln, Pro, or Gl u
RXKYWAIRTX

SEQ ID NO: 50427 - protein, 11 aa, Artificial Sequence
  Description of Artificial Sequence: Synthetic peptide
  Seed: RSKYWAIRTRS
  misc_feature (2)..(2): Xaa can be Gln, Ile, Leu, Met, Phe, Ser, Thr, Trp, Tyr, Val, Ala, Gly, Asn, Arg, Asp, Cys, Glu, His, Lys, or Pro
  misc_feature (11)..(11): Xaa can be Arg, Lys, His, Ala, Leu, Met, Tyr, Val, Asn, Asp, Cys, Gln, Glu, Gly, Ile, Phe, Pro, Ser, Thr, or Trp
RXKYWAIRTRX

SEQ ID NO: 50428 - protein, 9 aa, Artificial Sequence
  Description of Artificial Sequence: Synthetic peptide
  Seed: RSNENPAHK
  misc_feature (2)..(2): Xaa can be Thr, Val, Leu, Met, Ser, Ala, Gln, Gly, Ile, Phe, Trp, Tyr, Asn, or Cys
  misc_feature (9)..(9): Xaa can be Arg, Lys, Ala, Tyr, Val, Ile, or Leu
RXNENPAHX

SEQ ID NO: 50429 - protein, 8 aa, Artificial Sequence
  Description of Artificial Sequence: Synthetic peptide
  Seed: RSRYRAIR
  misc_feature (2)..(2): Xaa can be Ser, Thr, Val, Met, Tyr, Ile, Ala, Phe, Gln, Leu, Trp, Arg, Asn, Gly, or His
  misc_feature (8)..(8): Xaa can be Lys, Arg, Tyr, Ala, Leu, Phe, Val, Ile, Met, Pro, Ser, Asn, Gln, Glu, Gly, His, Thr, Trp, or Cys
RXRYRAIX

SEQ ID NO: 50430 - protein, 9 aa, Artificial Sequence
  Description of Artificial Sequence: Synthetic peptide
  Seed: RSRYRAIRT
  misc_feature (2)..(2): Xaa can be Ile, Met, Ser, Thr, Val, Ala, Phe, Tyr, Gln, Gly, Leu, Trp, Asn, Cys, His, Lys, Arg, Asp, Glu, or Pro
  misc_feature (9)..(9): Xaa can be Lys, Ala, Val, Arg, Ile, Leu, Met, Phe, Ser, Tyr, Cys, Gly, Pro, Thr, Asn, Gln, Glu, His, Asp, or Trp
RXRYRAIRX

SEQ ID NO: 50431 - protein, 10 aa, Artificial Sequence
  Description of Artificial Sequence: Synthetic peptide
  Seed: RSRYRAIRTR
  misc_feature (2)..(2): Xaa can be Ser, Thr, Val, Ala, Gln, Ile, Leu, Met, Phe, Trp, Tyr, Arg, Asn, Asp, Cys, Glu, Gly, His, Lys, or Pro
  misc_feature (10)..(10): Xaa can be Ala, Arg, Asn, Cys, Gln, Glu, Gly, His, Ile, Leu, Lys, Met, Phe, Ser, Thr, Trp, Tyr, Val, Pro, or Asp
RXRYRAIRTX

SEQ ID NO: 50432 - protein, 11 aa, Artificial Sequence
  Description of Artificial Sequence: Synthetic peptide
  Seed: RSRYRAIRTRS
  misc_feature (2)..(2): Xaa can be Ala, Arg, Asn, Asp, Cys, Gln, Glu, Gly, His, Ile, Leu, Lys, Met, Phe, Pro, Ser, Thr, Trp, Tyr, or Val
  misc_feature (11)..(11): Xaa can be Ala, Arg, Asn, Asp, Cys, Gln, Glu, Gly, His, Ile, Leu, Lys, Met, Phe, Pro, Ser, Thr, Trp, Tyr, or Val
RXRYRAIRTRX

SEQ ID NO: 50433 - protein, 8 aa, Artificial Sequence
  Description of Artificial Sequence: Synthetic peptide
  Seed: RSRYWAIK
  misc_feature (2)..(2): Xaa can be Thr, Ser, Val, Met, Tyr, Ala, Ile, Phe, Leu, Trp, Asn, Gln, Gly, Arg, His, or Lys
  misc_feature (8)..(8): Xaa can be Lys, Arg, Ala, Leu, Met, Tyr, Val, Ile, Phe, Ser, Pro, Asn, Gly, Thr, Gln, His, Cys, Glu, or Trp
RXRYWAIX

SEQ ID NO: 50434 - protein, 9 aa, Artificial Sequence
  Description of Artificial Sequence: Synthetic peptide
  Seed: RSRYWAIKT
  misc_feature (2)..(2): Xaa can be Thr, Met, Ser, Val, Ala, Gln, Ile, Phe, Trp, Tyr, Gly, Leu, Asn, Cys, Arg, Glu, His, Lys, or Pro
  misc_feature (9)..(9): Xaa can be Lys, Ala, Ile, Leu, Met, Val, Arg, Gly, Phe, Ser, Thr, Tyr, Cys, Gln, His, Pro, Asn, Glu, Asp, or Trp
RXRYWAIKX

SEQ ID NO: 50435 - protein, 10 aa, Artificial Sequence
  Description of Artificial Sequence: Synthetic peptide
  Seed: RSRYWAIKTR
  misc_feature (2)..(2): Xaa can be Thr, Ile, Met, Phe, Ser, Tyr, Val, Ala, Arg, Trp, Leu, Asn, Asp, Cys, Gln, Glu, Gly, His, Lys, or Pro
  misc_feature (10)..(10): Xaa can be Ala, Arg, Gln, Gly, His, Ile, Leu, Lys, Met, Phe, Ser, Thr, Trp, Tyr, Val, Cys, Pro, Glu, Asn, or Asp
RXRYWAIKTX

SEQ ID NO: 50436 - protein, 11 aa, Artificial Sequence
  Description of Artificial Sequence: Synthetic peptide
  Seed: RSRYWAIKTRS
  misc_feature (2)..(2): Xaa can be Met, Phe, Ser, Thr, Tyr, Val, Ile, Ala, Gln, Leu, Trp, Gly, Arg, Asn, Asp, Cys, Glu, His, Lys, or Pro
  misc_feature (11)..(11): Xaa can be Arg, Lys, Ala, His, Val, Tyr, Ile, Asn, Asp, Cys, Gln, Glu, Gly, Leu, Met, Phe, Pro, Ser, Thr, or Trp
RXRYWAIKTRX

SEQ ID NO: 50437 - protein, 9 aa, Artificial Sequence
  Description of Artificial Sequence: Synthetic peptide
  Seed: RSRYWAIRT
  misc_feature (2)..(2): Xaa can be Ser, Thr, Met, Val, Ala, Gln, Gly, Ile, Leu, Phe, Trp, Tyr, Asn, Cys, His, Arg, Glu, Lys, or Pro
  misc_feature (9)..(9): Xaa can be Lys, Ala, Arg, Ile, Leu, Met, Val, Cys, Gly, Phe, Pro, Ser, Thr, Tyr, Asn, Gln, Glu, His, Asp, or Trp
RXRYWAIRX

SEQ ID NO: 50438 - protein, 10 aa, Artificial Sequence
  Description of Artificial Sequence: Synthetic peptide
  Seed: RSRYWAIRTK
  misc_feature (2)..(2): Xaa can be Thr, Val, Ala, Arg, Gln, Ile, Leu, Met, Phe, Ser, Trp, Tyr, Asn, Asp, Cys, Glu, Gly, His, Lys, or Pro
  misc_feature (10)..(10): Xaa can be Ala, Arg, Asn, Cys, Gln, Glu, Gly, His, Ile, Leu, Lys, Met, Phe, Ser, Thr, Trp, Tyr, Val, Pro, or Asp
RXRYWAIRTX

SEQ ID NO: 50439 - protein, 11 aa, Artificial Sequence
  Description of Artificial Sequence: Synthetic peptide
  Seed: RSRYWAIRTKS
  misc_feature (2)..(2): Xaa can be Ala, Arg, Asn, Asp, Cys, Gln, Glu, Gly, His, Ile, Leu, Lys, Met, Phe, Pro, Ser, Thr, Trp, Tyr, or Val
  misc_feature (11)..(11): Xaa can be Ala, Arg, Asn, Asp, Cys, Gln, Glu, Gly, His, Ile, Leu, Lys, Met, Phe, Pro, Ser, Thr, Trp, Tyr, or Val
RXRYWAIRTKX

SEQ ID NO: 50440 - protein, 11 aa, Artificial Sequence
  Description of Artificial Sequence: Synthetic peptide
  Seed: RSRYWAIRTRS
  misc_feature (2)..(2): Xaa can be Ala, Arg, Asn, Asp, Cys, Gln, Glu, Gly, His, Ile, Leu, Lys, Met, Phe, Pro, Ser, Thr, Trp, Tyr, or Val
  misc_feature (11)..(11): Xaa can be Ala, Arg, Asn, Asp, Cys, Gln, Glu, Gly, His, Ile, Leu, Lys, Met, Phe, Pro, Ser, Thr, Trp, Tyr, or Val
RXRYWAIRTRX

SEQ ID NO: 50441 - protein, 9 aa, Artificial Sequence
  Description of Artificial Sequence: Synthetic peptide
  Seed: RSYEQMETG
  misc_feature (2)..(2): Xaa can be Ser, Ala, Thr, Val, Gly, Met, Cys, Ile, Leu, Asn, Gln, Phe, Pro, Trp, or Tyr
  misc_feature (9)..(9): Xaa can be Trp, Phe, Tyr, Ile, Leu, Met, Val, Cys, or Gly
RXYEQMETX

SEQ ID NO: 50442 - protein, 10 aa, Artificial Sequence
  Description of Artificial Sequence: Synthetic peptide
  Seed: RTEIIRIMES
  misc_feature (2)..(2): Xaa can be Thr, Ser, Tyr, Val, Ala, Ile, Met, Phe, Gln, Gly, Leu, or Trp
  misc_feature (10)..(10): Xaa can be Lys, Ala, Val, Ile, Leu, Met, or Ser
RXEIIRIMEX

SEQ ID NO: 50443 - protein, 10 aa, Artificial Sequence
  Description of Artificial Sequence: Synthetic peptide
  Seed: RTEIIRLMES
  misc_feature (2)..(2): Xaa can be Thr, Ser, Val, Ala, Tyr, Ile, Met, Phe, Gln, Gly, Leu, or Trp
  misc_feature (10)..(10): Xaa can be Lys, Ala, Val, Ile, Leu, Met, Ser, or Tyr
RXEIIRLMEX

SEQ ID NO: 50444 - protein, 10 aa, Artificial Sequence
  Description of Artificial Sequence: Synthetic peptide
  Seed: RTEIIRMMEG
  misc_feature (2)..(2): Xaa can be Thr, Ser, Val, Tyr, Ala, Met, Ile, Phe, Gln, Gly, Leu, or Trp
  misc_feature (10)..(10): Xaa can be Lys, Ala, Val, Ile, Leu, Met, Gly, Ser, or Tyr
RXEIIRMMEX

SEQ ID NO: 50445 - protein, 8 aa, Artificial Sequence
  Description of Artificial Sequence: Synthetic peptide
  Seed: RTGGPIYR
  misc_feature (2)..(2): Xaa can be Met, Phe, Trp, Tyr, Ala, Asn, Gln, Ile, Leu, Ser, Thr, or Val
  misc_feature (8)..(8): Xaa can be Arg or Lys
RXGGPIYX

SEQ ID NO: 50446 - protein, 9 aa, Artificial Sequence
  Description of Artificial Sequence: Synthetic peptide
  Seed: RTGGPIYRR
  misc_feature (2)..(2): Xaa can be Met, Leu, Thr, Val, Ala, Asn, Gln, Gly, Ile, Phe, Ser, Trp, Tyr, Cys, or His
  misc_feature (9)..(9): Xaa can be Arg, Lys, Tyr, or His
RXGGPIYRX

SEQ ID NO: 50447 - protein, 10 aa, Artificial Sequence
  Description of Artificial Sequence: Synthetic peptide
  Seed: RTGGPIYRRI
  misc_feature (2)..(2): Xaa can be Ile, Leu, Met, Phe, Thr, Tyr, Val, Ala, Gln, Ser, Trp, Asn, Cys, Gly, or His
  misc_feature (10)..(10): Xaa can be Arg, Lys, Ala, Asn, Asp, Cys, Gln, Glu, Gly, His, Ile, Leu, Met, Phe, Pro, Ser, Thr, Trp, Tyr, or Val
RXGGPIYRRX

SEQ ID NO: 50448 - protein, 10 aa, Artificial Sequence
  Description of Artificial Sequence: Synthetic peptide
  Seed: RTGMDPRMCS
  misc_feature (2)..(2): Xaa can be Thr, Ser, Val, Met, Ile, Tyr, Ala, Phe, Gln, Leu, Trp, Arg, Asn, Asp, Cys, Glu, Gly, His, Lys, or Pro
  misc_feature (10)..(10): Xaa can be Lys, Ala, Val, Ile, Leu, Met, Tyr, Arg, Ser, or Gly
RXGMDPRMCX

SEQ ID NO: 50449 - protein, 8 aa, Artificial Sequence
  Description of Artificial Sequence: Synthetic peptide
  Seed: RTKIAYER
  misc_feature (2)..(2): Xaa can be Ile, Leu, Met, Phe, Thr, Trp, Tyr, Val, Ala, Arg, Asn, Gln, Lys, or Ser
  misc_feature (8)..(8): Xaa can be Arg or Lys
RXKIAYEX

SEQ ID NO: 50450 - protein, 9 aa, Artificial Sequence
  Description of Artificial Sequence: Synthetic peptide
  Seed: RTKIAYERM
  misc_feature (2)..(2): Xaa can be Met, Ser, Thr, Val, Ile, Ala, Leu, Phe, Tyr, Gln, Trp, Gly, Asn, Cys, or His
  misc_feature (9)..(9): Xaa can be Lys, Ala, Tyr, Val, Ile, Arg, Leu, Met, Phe, Ser, Gly, Thr, Trp, Asn, Cys, Gln, Pro, Glu, or His
RXKIAYERX

SEQ ID NO: 50451 - protein, 10 aa, Artificial Sequence
  Description of Artificial Sequence: Synthetic peptide
  Seed: RTKIAYERMC
  misc_feature (2)..(2): Xaa can be Thr, Val, Ser, Met, Ile, Ala, Tyr, Leu, Phe, Trp, Gln, Gly, Asn, Cys, or His
  misc_feature (10)..(10): Xaa can be Lys, Ala, Val, Ile, Leu, Met, Ser, Arg, Thr, Tyr, Gly, Pro, Cys, Phe, Gln, Asn, Glu, or Hi s
RXKIAYERMX

SEQ ID NO: 50452 - protein, 9 aa, Artificial Sequence
  Description of Artificial Sequence: Synthetic peptide
  Seed: RTKSGGNTN
  misc_feature (2)..(2): Xaa can be Thr, Ala, Ile, Met, Ser, Val, Phe, Tyr, Leu, Gln, Gly, Trp, Asn, Cys, Arg, His, or Lys
  misc_feature (9)..(9): Xaa can be Lys, Ala, Val, Ile, Leu, Met, Arg, Ser, Tyr, Gly, Asn, Gln, Thr, Cys, Phe, Pro, Glu, His, Asp, or Trp
RXKSGGNTX

SEQ ID NO: 50453 - protein, 10 aa, Artificial Sequence
  Description of Artificial Sequence: Synthetic peptide
  Seed: RTKSGGNTNQ
  misc_feature (2)..(2): Xaa can be Thr, Ser, Val, Met, Ala, Ile, Phe, Tyr, Leu, Trp, Gln, Gly, Asn, or Cys
  misc_feature (10)..(10): Xaa can be Lys, Ala, Val, Ile, Leu, Met, Ser, Arg, Tyr, Gly, Cys, Phe, Thr, Asn, Gln, Glu, His, or Pr o
RXKSGGNTNX

SEQ ID NO: 50454 - protein, 10 aa, Artificial Sequence
  Description of Artificial Sequence: Synthetic peptide
  Seed: RTKSGGNTSQ
  misc_feature (2)..(2): Xaa can be Thr, Val, Ser, Tyr, Met, Ala, Ile, Phe, Leu, Trp, Gln, Gly, Asn, Cys, or His
  misc_feature (10)..(10): Xaa can be Lys, Ala, Val, Ile, Leu, Met, Ser, Arg, Tyr, Gly, Thr, Cys, Phe, Asn, Gln, Glu, His, or Pr o
RXKSGGNTSX

SEQ ID NO: 50455 - protein, 8 aa, Artificial Sequence
  Description of Artificial Sequence: Synthetic peptide
  Seed: RTLELRSR
  misc_feature (2)..(2): Xaa can be Met, Phe, Gln, Ile, Leu, Ser, Thr, Trp, Tyr, or Val
  misc_feature (8)..(8): Xaa can be Arg or Lys
RXLELRSX

SEQ ID NO: 50456 - protein, 9 aa, Artificial Sequence
  Description of Artificial Sequence: Synthetic peptide
  Seed: RTLELRSRY
  misc_feature (2)..(2): Xaa can be Thr, Ser, Val, Gln, Met, Tyr, Ala, Ile, Leu, Trp, Phe, Asn, Gly, Lys, Arg, Cys, Glu, or Hi s
  misc_feature (9)..(9): Xaa can be Tyr, Phe, Lys, Met, Trp, Ala, Leu, Val, Ile, Arg, Gly, Ser, His, Thr, or Cys
RXLELRSRX

SEQ ID NO: 50457 - protein, 10 aa, Artificial Sequence
  Description of Artificial Sequence: Synthetic peptide
  Seed: RTLELRSRYW
  misc_feature (2)..(2): Xaa can be Met, Ser, Thr, Val, Gln, Ala, Leu, Ile, Asn, Cys, Gly, Trp, Tyr, Arg, Asp, Glu, His, Lys, Phe, or Pro
  misc_feature (10)..(10): Xaa can be Tyr, Trp, Phe, Ile, Met, His, Leu, Ala, Lys, Arg, Asn, Asp, Cys, Gln, Glu, Gly, Pro, Ser, Thr, or Val
RXLELRSRYX

SEQ ID NO: 50458 - protein, 11 aa, Artificial Sequence
  Description of Artificial Sequence: Synthetic peptide
  Seed: RTLELRSRYWA
  misc_feature (2)..(2): Xaa can be Ala, Ser, Thr, Ile, Met, Val, Cys, Gly, Leu, Phe, or Tyr
  misc_feature (11)..(11): Xaa can be Trp, Lys, Ala, Arg, Asn, Asp, Cys, Gln, Glu, Gly, His, Ile, Leu, Met, Phe, Pro, Ser, Thr, Tyr, or Val
RXLELRSRYWX

SEQ ID NO: 50459 - protein, 8 aa, Artificial Sequence
  Description of Artificial Sequence: Synthetic peptide
  Seed: RTRAHVRT
  misc_feature (2)..(2): Xaa can be Ser, Thr, Val, Ile, Met, Ala, Phe, Tyr, Leu, Trp, Gln, Arg, Asn, Gly, His, or Lys
  misc_feature (8)..(8): Xaa can be Lys, Ala, Ile, Leu, Tyr, Val, Met, Phe, Arg, Pro, Ser, Asn, Gly, Thr, Cys, Gln, Glu, His, or Trp
RXRAHVRX

SEQ ID NO: 50460 - protein, 9 aa, Artificial Sequence
  Description of Artificial Sequence: Synthetic peptide
  Seed: RTRAHVRTG
  misc_feature (2)..(2): Xaa can be Ala, Gln, Ile, Leu, Met, Phe, Ser, Thr, Trp, Tyr, Val, Asn, Gly, Cys, His, Lys, Arg, Asp, Glu, or Pro
  misc_feature (9)..(9): Xaa can be Lys, Ala, Val, Arg, Ile, Leu, Met, Tyr, Gln, Gly, Phe, Ser, Thr, Asn, Cys, Glu, His, Pro, Asp, or Trp
RXRAHVRTX

SEQ ID NO: 50461 - protein, 10 aa, Artificial Sequence
  Description of Artificial Sequence: Synthetic peptide
  Seed: RTRAHVRTGM
  misc_feature (2)..(2): Xaa can be Ser, Thr, Val, Ala, Ile, Met, Phe, Tyr, Leu, Pro, Trp, Gln, Gly, Asn, Arg, Asp, Cys, Glu, His, or Lys
  misc_feature (10)..(10): Xaa can be Ala, Arg, Ile, Leu, Lys, Met, Phe, Trp, Tyr, Val, Gly, Ser, Thr, Cys, Pro, Gln, Glu, Asn, His, or Asp
RXRAHVRTGX

SEQ ID NO: 50462 - protein, 11 aa, Artificial Sequence
  Description of Artificial Sequence: Synthetic peptide
  Seed: RTRAHVRTGMD
  misc_feature (2)..(2): Xaa can be Thr, Ser, Val, Tyr, Ile, Phe, Met, Ala, Leu, Trp, Gln, Asn, Gly, Arg, Asp, Cys, Glu, His, Lys, or Pro
  misc_feature (11)..(11): Xaa can be Lys, Ala, Val, Ile, Met, Arg, Leu, Tyr, Ser, Gly, Pro, Thr, Phe, Gln, Glu, Asn, Cys, His, Asp, or Trp
RXRAHVRTGMX

SEQ ID NO: 50463 - protein, 8 aa, Artificial Sequence
  Description of Artificial Sequence: Synthetic peptide
  Seed: RTRALVRA
  misc_feature (2)..(2): Xaa can be Thr, Val, Ser, Met, Ile, Tyr, Phe, Ala, Trp, Leu, Arg, Gln, or Gly
  misc_feature (8)..(8): Xaa can be Lys, Ala, Val, Leu, Tyr, Ile, Met, Phe, Pro, Ser, Arg, Asn, Gln, Gly, Thr, Cys, Glu, His, or Trp
RXRALVRX

SEQ ID NO: 50464 - protein, 9 aa, Artificial Sequence
  Description of Artificial Sequence: Synthetic peptide
  Seed: RTRALVRAG
  misc_feature (2)..(2): Xaa can be Ala, Ile, Leu, Met, Ser, Thr, Tyr, Val, Phe, Gln, Gly, Trp, Asn, Cys, His, Arg, Asp, Glu, Lys, or Pro
  misc_feature (9)..(9): Xaa can be Lys, Arg, Ala, Ile, Leu, Met, Ser, Tyr, Val, Cys, Gly, Phe, Pro, Thr, Asn, Gln, Glu, His, Asp, or Trp
RXRALVRAX

SEQ ID NO: 50465 - protein, 10 aa, Artificial Sequence
  Description of Artificial Sequence: Synthetic peptide
  Seed: RTRALVRAGM
  misc_feature (2)..(2): Xaa can be Thr, Ala, Ile, Met, Phe, Ser, Tyr, Val, Pro, Arg, Trp, Leu, Gln, Gly, Asn, Asp, Cys, Glu, His, or Lys
  misc_feature (10)..(10): Xaa can be Ala, Arg, His, Ile, Leu, Lys, Met, Phe, Trp, Tyr, Val, Ser, Gly, Thr, Cys, Pro, Gln, Glu, Asn, or Asp
RXRALVRAGX

SEQ ID NO: 50466 - protein, 9 aa, Artificial Sequence
  Description of Artificial Sequence: Synthetic peptide
  Seed: RTRALVRTG
  misc_feature (2)..(2): Xaa can be Ala, Ile, Leu, Met, Ser, Thr, Val, Phe, Trp, Tyr, Gln, Gly, Asn, Cys, His, Arg, Asp, Glu, Lys, or Pro
  misc_feature (9)..(9): Xaa can be Lys, Ala, Arg, Ile, Leu, Met, Ser, Tyr, Val, Cys, Gln, Glu, Gly, Phe, Pro, Thr, Asn, His, Asp, or Trp
RXRALVRTX

SEQ ID NO: 50467 - protein, 10 aa, Artificial Sequence
  Description of Artificial Sequence: Synthetic peptide
  Seed: RTRALVRTGM
  misc_feature (2)..(2): Xaa can be Thr, Val, Ala, Ile, Met, Phe, Ser, Tyr, Pro, Arg, Leu, Trp, Gln, Gly, Asn, Asp, Cys, Glu, His, or Lys
  misc_feature (10)..(10): Xaa can be Ala, Arg, His, Ile, Leu, Lys, Met, Phe, Trp, Tyr, Val, Ser, Thr, Gly, Cys, Gln, Pro, Glu, Asn, or Asp
RXRALVRTGX

SEQ ID NO: 50468 - protein, 8 aa, Artificial Sequence
  Description of Artificial Sequence: Synthetic peptide
  Seed: RTRIAYER
  misc_feature (2)..(2): Xaa can be Thr, Ser, Val, Met, Ile, Tyr, Phe, Ala, Leu, Trp, Arg, Gln, Gly, Asn, Cys, His, or Lys
  misc_feature (8)..(8): Xaa can be Arg, Lys, Ala, Val, Ile, Leu, Met, Phe, Tyr, Ser, Gly, Pro, Thr, Asn, Cys, Gln, Glu, or Hi s
RXRIAYEX

SEQ ID NO: 50469 - protein, 9 aa, Artificial Sequence
  Description of Artificial Sequence: Synthetic peptide
  Seed: RTRIAYERM
  misc_feature (2)..(2): Xaa can be Thr, Val, Ala, Ile, Leu, Met, Ser, Phe, Tyr, Gln, Trp, Gly, Asn, Cys, Arg, His, Lys, or Pr o
  misc_feature (9)..(9): Xaa can be Lys, Ala, Val, Arg, Ile, Leu, Met, Ser, Tyr, Thr, Cys, Gly, Phe, Gln, Pro, Asn, Glu, His, Trp, or Asp
RXRIAYERX

SEQ ID NO: 50470 - protein, 10 aa, Artificial Sequence
  Description of Artificial Sequence: Synthetic peptide
  Seed: RTRIAYERMC
  misc_feature (2)..(2): Xaa can be Thr, Met, Ser, Val, Ile, Phe, Tyr, Ala, Leu, Gln, Trp, Gly, Asn, Cys, or His
  misc_feature (10)..(10): Xaa can be Lys, Ala, Ile, Val, Arg, Leu, Met, Ser, Tyr, Gly, Phe, Pro, Thr, Gln, Cys, Glu, Asn, His, Asp, or Trp
RXRIAYERMX

SEQ ID NO: 50471 - protein, 9 aa, Artificial Sequence
  Description of Artificial Sequence: Synthetic peptide
  Seed: RTRSGGNNN
  misc_feature (2)..(2): Xaa can be Ile, Met, Ser, Thr, Val, Ala, Leu, Phe, Tyr, Gln, Trp, Gly, Asn, Cys, Arg, Glu, His, Lys, or Pro
  misc_feature (9)..(9): Xaa can be Lys, Ala, Arg, Ile, Leu, Met, Tyr, Val, Gly, Phe, Ser, Thr, Cys, Gln, Pro, Asn, Glu, His, Trp, or Asp
RXRSGGNNX

SEQ ID NO: 50472 - protein, 10 aa, Artificial Sequence
  Description of Artificial Sequence: Synthetic peptide
  Seed: RTRSGGNNNQ
  misc_feature (2)..(2): Xaa can be Thr, Val, Met, Ser, Ile, Phe, Tyr, Ala, Leu, Gln, Trp, Gly, Asn, Cys, or His
  misc_feature (10)..(10): Xaa can be Lys, Ala, Ile, Val, Met, Leu, Arg, Tyr, Gly, Phe, Ser, Thr, Pro, Cys, Gln, His, Asn, or Gl u
RXRSGGNNNX

SEQ ID NO: 50473 - protein, 8 aa, Artificial Sequence
  Description of Artificial Sequence: Synthetic peptide
  Seed: RTRSGGNT
  misc_feature (2)..(2): Xaa can be Thr, Val, Ser, Ile, Met, Ala, Gln, Leu, Phe, Trp, or Tyr
  misc_feature (8)..(8): Xaa can be Lys, Ala, Val, Tyr, Ile, Leu, Met, Phe, Pro, Arg, Ser, or Thr
RXRSGGNX

SEQ ID NO: 50474 - protein, 9 aa, Artificial Sequence
  Description of Artificial Sequence: Synthetic peptide
  Seed: RTRSGGNTN
  misc_feature (2)..(2): Xaa can be Ile, Met, Ser, Thr, Val, Ala, Leu, Phe, Tyr, Gln, Trp, Gly, Asn, Cys, His, Arg, Glu, Lys, or Pro
  misc_feature (9)..(9): Xaa can be Lys, Arg, Ala, Ile, Leu, Met, Tyr, Val, Gly, Phe, Ser, Thr, Gln, Asn, Cys, Glu, Pro, His, Trp, or Asp
RXRSGGNTX

SEQ ID NO: 50475 - protein, 10 aa, Artificial Sequence
  Description of Artificial Sequence: Synthetic peptide
  Seed: RTRSGGNTNK
  misc_feature (2)..(2): Xaa can be Met, Ser, Thr, Val, Tyr, Ile, Phe, Ala, Leu, Gln, Gly, Trp, Asn, Cys, His, or Lys
  misc_feature (10)..(10): Xaa can be Lys, Ala, Ile, Met, Val, Leu, Arg, Tyr, Gly, Phe, Ser, Thr, Asn, Cys, Gln, Pro, Glu, or Hi s
RXRSGGNTNX

SEQ ID NO: 50476 - protein, 11 aa, Artificial Sequence
  Description of Artificial Sequence: Synthetic peptide
  Seed: RTRSGGNTNKQ
  misc_feature (2)..(2): Xaa can be Ala, Met, Ser, Thr, Val, Tyr, Ile, Phe, Leu, Gln, Trp, Asn, Cys, or Gly
  misc_feature (11)..(11): Xaa can be Lys, Ala, Ile, Leu, Met, Tyr, Val, Arg, Gly, Phe, Pro, Ser, Thr, Cys, Glu, Asn, Asp, Gln, His, or Trp
RXRSGGNTNKX

SEQ ID NO: 50477 - protein, 10 aa, Artificial Sequence
  Description of Artificial Sequence: Synthetic peptide
  Seed: RTRSGGNTSQ
  misc_feature (2)..(2): Xaa can be Thr, Val, Met, Ser, Tyr, Phe, Ile, Ala, Leu, Trp, Gln, Gly, Asn, Cys, His, or Lys
  misc_feature (10)..(10): Xaa can be Lys, Ala, Ile, Leu, Met, Val, Arg, Tyr, Gly, Ser, Phe, Thr, Asn, Cys, Gln, Pro, Glu, His, or Trp
RXRSGGNTSX

SEQ ID NO: 50478 - protein, 11 aa, Artificial Sequence
  Description of Artificial Sequence: Synthetic peptide
  Seed: RTRSGGNTSQQ
  misc_feature (2)..(2): Xaa can be Thr, Ser, Val, Met, Ile, Ala, Phe, Tyr, Leu, Trp, Gln, Asn, Cys, Gly, or His
  misc_feature (11)..(11): Xaa can be Lys, Ala, Ile, Val, Met, Arg, Leu, Ser, Tyr, Gly, Phe, Thr, Cys, Gln, Glu, His, or Pro
RXRSGGNTSQX

SEQ ID NO: 50479 - protein, 10 aa, Artificial Sequence
  Description of Artificial Sequence: Synthetic peptide
  Seed: RTRSGGNTTQ
  misc_feature (2)..(2): Xaa can be Thr, Met, Ser, Tyr, Val, Ile, Phe, Ala, Leu, Gln, Trp, Gly, Asn, Cys, His, or Lys
  misc_feature (10)..(10): Xaa can be Lys, Ala, Ile, Met, Val, Arg, Leu, Tyr, Gly, Ser, Phe, Thr, Asn, Gln, Pro, Cys, Glu, His, or Trp
RXRSGGNTTX

SEQ ID NO: 50480 - protein, 11 aa, Artificial Sequence
  Description of Artificial Sequence: Synthetic peptide
  Seed: RTRSGGNTTQQ
  misc_feature (2)..(2): Xaa can be Thr, Val, Ser, Met, Ala, Ile, Tyr, Phe, Leu, Trp, Asn, Cys, Gln, Gly, or His
  misc_feature (11)..(11): Xaa can be Lys, Ala, Val, Ile, Met, Leu, Ser, Arg, Tyr, Gly, Phe, Thr, Cys, Gln, His, or Pro
RXRSGGNTTQX

SEQ ID NO: 50481 - protein, 8 aa, Artificial Sequence
  Description of Artificial Sequence: Synthetic peptide
  Seed: RTRSGGST
  misc_feature (2)..(2): Xaa can be Thr, Ser, Val, Met, Tyr, Ala, Gln, Gly, Ile, Leu, Phe, or Trp
  misc_feature (8)..(8): Xaa can be Lys, Tyr, Ala, Ile, Leu, Met, Phe, Val, Arg, Gly, Pro, Ser, or Thr
RXRSGGSX

SEQ ID NO: 50482 - protein, 9 aa, Artificial Sequence
  Description of Artificial Sequence: Synthetic peptide
  Seed: RTRSGGSTN
  misc_feature (2)..(2): Xaa can be Ile, Met, Ser, Thr, Val, Ala, Leu, Phe, Tyr, Gly, Gln, Trp, Asn, Cys, His, Arg, Glu, Lys, or Pro
  misc_feature (9)..(9): Xaa can be Lys, Arg, Ala, Ile, Leu, Met, Ser, Tyr, Val, Cys, Gly, Phe, Thr, Asn, Gln, Glu, Pro, His, Trp, or Asp
RXRSGGSTX

SEQ ID NO: 50483 - protein, 10 aa, Artificial Sequence
  Description of Artificial Sequence: Synthetic peptide
  Seed: RTRSGGSTNQ
  misc_feature (2)..(2): Xaa can be Met, Ser, Thr, Val, Phe, Tyr, Ile, Ala, Leu, Gln, Gly, Trp, Asn, Cys, His, or Lys
  misc_feature (10)..(10): Xaa can be Lys, Ala, Ile, Leu, Met, Val, Arg, Tyr, Gly, Phe, Ser, Gln, Thr, Asn, Cys, Pro, Glu, or Hi s
RXRSGGSTNX

SEQ ID NO: 50484 - protein, 11 aa, Artificial Sequence
  Description of Artificial Sequence: Synthetic peptide
  Seed: RTRSGGSTNQQ
  misc_feature (2)..(2): Xaa can be Thr, Val, Ser, Ile, Met, Ala, Phe, Tyr, Leu, Trp, Gln, Gly, Asn, Cys, or His
  misc_feature (11)..(11): Xaa can be Lys, Ala, Val, Ile, Leu, Met, Arg, Ser, Tyr, Gly, Phe, Thr, Cys, Gln, Pro, Asn, Glu, or Hi s
RXRSGGSTNQX

SEQ ID NO: 50485 - protein, 8 aa, Artificial Sequence
  Description of Artificial Sequence: Synthetic peptide
  Seed: RTRTAYER
  misc_feature (2)..(2): Xaa can be Thr, Val, Ser, Ile, Met, Tyr, Phe, Ala, Leu, Gln, Trp, Arg, or Gly
  misc_feature (8)..(8): Xaa can be Lys, Arg, Ala, Val, Ile, Leu, Met, Phe, Tyr, Pro, Ser, Thr, Gly, Asn, Cys, Gln, or His
RXRTAYEX

SEQ ID NO: 50486 - protein, 9 aa, Artificial Sequence
  Description of Artificial Sequence: Synthetic peptide
  Seed: RTRTAYERM
  misc_feature (2)..(2): Xaa can be Thr, Val, Ala, Ile, Leu, Met, Ser, Phe, Tyr, Gln, Trp, Gly, Asn, Cys, Arg, His, Lys, or Pr o
  misc_feature (9)..(9): Xaa can be Lys, Ala, Val, Arg, Ile, Leu, Met, Ser, Tyr, Thr, Cys, Gly, Phe, Asn, Gln, Pro, Glu, His, Trp, or Asp
RXRTAYERX

SEQ ID NO: 50487 - protein, 10 aa, Artificial Sequence
  Description of Artificial Sequence: Synthetic peptide
  Seed: RTRTAYERMC
  misc_feature (2)..(2): Xaa can be Thr, Val, Met, Ser, Ile, Phe, Tyr, Ala, Leu, Gln, Trp, Gly, Asn, Cys, or His
  misc_feature (10)..(10): Xaa can be Lys, Ala, Ile, Val, Arg, Leu, Met, Gly, Ser, Tyr, Gln, Phe, Pro, Thr, Cys, Glu, Asn, His, Asp, or Trp
RXRTAYERMX

SEQ ID NO: 50488 - protein, 8 aa, Artificial Sequence
  Description of Artificial Sequence: Synthetic peptide
  Seed: RTRVAYER
  misc_feature (2)..(2): Xaa can be Thr, Val, Ser, Ile, Met, Tyr, Phe, Ala, Leu, Trp, Arg, Gln, Gly, Asn, Cys, or Lys
  misc_feature (8)..(8): Xaa can be Arg, Lys, Ala, Val, Ile, Leu, Met, Phe, Tyr, Pro, Ser, Thr, Gly, Asn, Cys, Gln, Glu, or Hi s
RXRVAYEX

SEQ ID NO: 50489 - protein, 9 aa, Artificial Sequence
  Description of Artificial Sequence: Synthetic peptide
  Seed: RTRVAYERM
  misc_feature (2)..(2): Xaa can be Thr, Val, Ala, Ile, Leu, Met, Ser, Phe, Tyr, Gln, Trp, Gly, Asn, Cys, Arg, His, Lys, or Pr o
  misc_feature (9)..(9): Xaa can be Lys, Ala, Val, Arg, Ile, Leu, Met, Ser, Tyr, Thr, Cys, Gly, Phe, Gln, Pro, Asn, Glu, His, Trp, or Asp
RXRVAYERX

SEQ ID NO: 50490 - protein, 10 aa, Artificial Sequence
  Description of Artificial Sequence: Synthetic peptide
  Seed: RTRVAYERMC
  misc_feature (2)..(2): Xaa can be Thr, Met, Ser, Val, Ile, Phe, Tyr, Ala, Leu, Gln, Trp, Gly, Asn, Cys, or His
  misc_feature (10)..(10): Xaa can be Lys, Ala, Val, Arg, Ile, Leu, Met, Ser, Tyr, Gly, Phe, Pro, Thr, Gln, Cys, Glu, Asn, His, Asp, or Trp
RXRVAYERMX

SEQ ID NO: 50491 - protein, 9 aa, Artificial Sequence
  Description of Artificial Sequence: Synthetic peptide
  Seed: RTSDMRAEI
  misc_feature (2)..(2): Xaa can be Thr, Ala, Met, Ser, Val, Gln, Ile, Leu, Gly, Cys, Phe, Tyr, Asn, or Trp
  misc_feature (9)..(9): Xaa can be Lys, Ala, Met, Phe, Trp, Tyr, Leu, Ile, Val, Arg, His, Gly, or Ser
RXSDMRAEX

SEQ ID NO: 50492 - protein, 11 aa, Artificial Sequence
  Description of Artificial Sequence: Synthetic peptide
  Seed: RTSDMRAEIIK
  misc_feature (2)..(2): Xaa can be Ala, Ile, Leu, Met, Phe, Ser, Thr, Trp, Tyr, Val, Gln, or Gly
  misc_feature (11)..(11): Xaa can be Arg or Lys
RXSDMRAEIIX

SEQ ID NO: 50493 - protein, 9 aa, Artificial Sequence
  Description of Artificial Sequence: Synthetic peptide
  Seed: RTSDMRIEI
  misc_feature (2)..(2): Xaa can be Thr, Val, Ser, Ala, Met, Ile, Leu, Gln, Cys, Gly, Tyr, Phe, Asn, Trp, or Pro
  misc_feature (9)..(9): Xaa can be Lys, Trp, Met, Ala, Leu, Phe, Tyr, Ile, Val, Arg, Ser, Gly, His, or Thr
RXSDMRIEX

SEQ ID NO: 50494 - protein, 10 aa, Artificial Sequence
  Description of Artificial Sequence: Synthetic peptide
  Seed: RTSDMRIEII
  misc_feature (2)..(2): Xaa can be Ser, Thr, Ala, Val, Met, Arg, Asn, Asp, Cys, Gln, Glu, Gly, His, Ile, Leu, Lys, Phe, Pro, Trp, or Tyr
  misc_feature (10)..(10): Xaa can be Trp, Phe, Tyr, Ile, Met, or Leu
RXSDMRIEIX

SEQ ID NO: 50495 - protein, 11 aa, Artificial Sequence
  Description of Artificial Sequence: Synthetic peptide
  Seed: RTSDMRIEIIR
  misc_feature (2)..(2): Xaa can be Gln, Ile, Leu, Met, Phe, Thr, Trp, Tyr, Val, Ala, Asn, Gly, or Ser
  misc_feature (11)..(11): Xaa can be Arg or Lys
RXSDMRIEIIX

SEQ ID NO: 50496 - protein, 10 aa, Artificial Sequence
  Description of Artificial Sequence: Synthetic peptide
  Seed: RTSDMRTEII
  misc_feature (2)..(2): Xaa can be Ser, Thr, Ala, Val, Arg, Asn, Asp, Cys, Gln, Glu, Gly, His, Ile, Leu, Lys, Met, Phe, Pro, Trp, or Tyr
  misc_feature (10)..(10): Xaa can be Trp, Phe, Tyr, Met, Ile, or Leu
RXSDMRTEIX

SEQ ID NO: 50497 - protein, 10 aa, Artificial Sequence
  Description of Artificial Sequence: Synthetic peptide
  Seed: RTSDMRTEVI
  misc_feature (2)..(2): Xaa can be Ser, Thr, Ala, Ile, Met, Val, Arg, Asn, Asp, Cys, Gln, Glu, Gly, His, Leu, Lys, Phe, Pro, Trp, or Tyr
  misc_feature (10)..(10): Xaa can be Trp, Phe, Tyr, Met, Ile, or Leu
RXSDMRTEVX

SEQ ID NO: 50498 - protein, 11 aa, Artificial Sequence
  Description of Artificial Sequence: Synthetic peptide
  Seed: RTSDMRTEVIR
  misc_feature (2)..(2): Xaa can be Ile, Leu, Met, Phe, Thr, Trp, Tyr, Val, Ala, Gln, Gly, or Ser
  misc_feature (11)..(11): Xaa can be Arg or Lys
RXSDMRTEVIX

SEQ ID NO: 50499 - protein, 9 aa, Artificial Sequence
  Description of Artificial Sequence: Synthetic peptide
  Seed: RTWRQANNG
  misc_feature (2)..(2): Xaa can be Thr, Ser, Val, Ala, Ile, Met, Tyr, Phe, Asn, Gln, Gly, Leu, or Trp
  misc_feature (9)..(9): Xaa can be Lys, Ala, Val, Ile, Leu, Met, Arg, Ser, Gly, Thr, or Tyr
RXWRQANNX

SEQ ID NO: 50500 - protein, 10 aa, Artificial Sequence
  Description of Artificial Sequence: Synthetic peptide
  Seed: RTWRQANNGE
  misc_feature (2)..(2): Xaa can be Thr, Ser, Val, Ile, Met, Tyr, Ala, Phe, Leu, Gln, Arg, Asn, Asp, Cys, Glu, Gly, His, Lys, Pro, or Trp
  misc_feature (10)..(10): Xaa can be Ala, Ile, Leu, Lys, Met, Val, Arg, Ser, Tyr, Thr, Gly, Phe, Pro, Cys, Asn, Gln, Glu, or Hi s
RXWRQANNGX

SEQ ID NO: 50501 - protein, 8 aa, Artificial Sequence
  Description of Artificial Sequence: Synthetic peptide
  Seed: RVAPRGQL
  misc_feature (2)..(2): Xaa can be Pro, Ala, Val, or Ile
  misc_feature (8)..(8): Xaa can be Leu, Met, Ala, Cys, Glu, Ile, Phe, Pro, Ser, Thr, Trp, Tyr, or Val
RXAPRGQX

SEQ ID NO: 50502 - protein, 9 aa, Artificial Sequence
  Description of Artificial Sequence: Synthetic peptide
  Seed: RVAPRGQLS
  misc_feature (2)..(2): Xaa can be Thr, Ser, Val, Met, Ala, Ile, Tyr, Phe, Gln, Leu, Trp, Gly, Asn, Cys, or His
  misc_feature (9)..(9): Xaa can be Lys, Ala, Val, Ile, Leu, Met, Ser, Gly, Arg, Tyr, Phe, Cys, Pro, Thr, His, Asn, or Gln
RXAPRGQLX

SEQ ID NO: 50503 - protein, 11 aa, Artificial Sequence
  Description of Artificial Sequence: Synthetic peptide
  Seed: RVAPRGQLSTR
  misc_feature (2)..(2): Xaa can be Gln, Ile, Leu, Met, Phe, Ser, Thr, Trp, Tyr, Val, Ala, Asn, Cys, or Gly
  misc_feature (11)..(11): Xaa can be Arg or Lys
RXAPRGQLSTX

SEQ ID NO: 50504 - protein, 9 aa, Artificial Sequence
  Description of Artificial Sequence: Synthetic peptide
  Seed: RVDGKWMRK
  misc_feature (2)..(2): Xaa can be Leu, Met, Thr, Ala, Gln, Ile, Phe, Ser, Trp, Tyr, Val, Asn, Cys, or Gly
  misc_feature (9)..(9): Xaa can be Arg, Lys, His, Tyr, or Ala
RXDGKWMRX

SEQ ID NO: 50505 - protein, 8 aa, Artificial Sequence
  Description of Artificial Sequence: Synthetic peptide
  Seed: RVDGKWVR
  misc_feature (2)..(2): Xaa can be Met, Ile, Leu, Phe, Thr, Trp, Tyr, or Val
  misc_feature (8)..(8): Xaa can be Arg or Lys
RXDGKWVX

SEQ ID NO: 50506 - protein, 8 aa, Artificial Sequence
  Description of Artificial Sequence: Synthetic peptide
  Seed: RVDGRWMR
  misc_feature (2)..(2): Xaa can be Ile, Leu, Met, Phe, Thr, Trp, Tyr, Val, Ala, Arg, Asn, Gln, His, Lys, or Ser
  misc_feature (8)..(8): Xaa can be Arg or Lys
RXDGRWMX

SEQ ID NO: 50507 - protein, 11 aa, Artificial Sequence
  Description of Artificial Sequence: Synthetic peptide
  Seed: RVDGRWMRELV
  misc_feature (2)..(2): Xaa can be Thr, Ser, Val, Ile, Met, Phe, Tyr, Ala, Arg, Asn, Asp, Cys, Gln, Glu, Gly, His, Leu, Lys, Pro, or Trp
  misc_feature (11)..(11): Xaa can be Lys, Ala, Val, Ile, Leu, Met, Ser, or Tyr
RXDGRWMRELX

SEQ ID NO: 50508 - protein, 8 aa, Artificial Sequence
  Description of Artificial Sequence: Synthetic peptide
  Seed: RVDRKWMR
  misc_feature (2)..(2): Xaa can be Leu, Met, Phe, Trp, Tyr, Ala, Gln, Ile, Ser, Thr, or Val
  misc_feature (8)..(8): Xaa can be Arg or Lys
RXDRKWMX

SEQ ID NO: 50509 - protein, 10 aa, Artificial Sequence
  Description of Artificial Sequence: Synthetic peptide
  Seed: RVDRKWMREL
  misc_feature (2)..(2): Xaa can be Thr, Val, Ser, Met, Pro, Tyr, Phe, Ala, Ile, Trp, Gln, Leu, Gly, or Asn
  misc_feature (10)..(10): Xaa can be Ala, Lys, Val, Ile, Leu, Met, Ser, Gly, Tyr, Thr, Phe, Arg, Cys, Pro, or Glu
RXDRKWMREX

SEQ ID NO: 50510 - protein, 8 aa, Artificial Sequence
  Description of Artificial Sequence: Synthetic peptide
  Seed: RVGGKWIR
  misc_feature (2)..(2): Xaa can be Met, Gln, Ile, Leu, Phe, Ser, Thr, Trp, Tyr, or Val
  misc_feature (8)..(8): Xaa can be Arg or Lys
RXGGKWIX

SEQ ID NO: 50511 - protein, 8 aa, Artificial Sequence
  Description of Artificial Sequence: Synthetic peptide
  Seed: RVGGKWMR
  misc_feature (2)..(2): Xaa can be Leu, Met, Phe, Trp, Tyr, Ala, Gln, Ile, Ser, Thr, or Val
  misc_feature (8)..(8): Xaa can be Arg or Lys
RXGGKWMX

SEQ ID NO: 50512 - protein, 8 aa, Artificial Sequence
  Description of Artificial Sequence: Synthetic peptide
  Seed: RVGGRWMR
  misc_feature (2)..(2): Xaa can be Gln, Ile, Leu, Met, Phe, Ser, Thr, Trp, Tyr, Val, Ala, Arg, Asn, Cys, Gly, His, or Lys
  misc_feature (8)..(8): Xaa can be Arg or Lys
RXGGRWMX

SEQ ID NO: 50513 - protein, 11 aa, Artificial Sequence
  Description of Artificial Sequence: Synthetic peptide
  Seed: RVGGRWMRELV
  misc_feature (2)..(2): Xaa can be Thr, Val, Ser, Ala, Ile, Met, Phe, Tyr, Arg, Asn, Asp, Cys, Gln, Glu, Gly, His, Leu, Lys, Pro, or Trp
  misc_feature (11)..(11): Xaa can be Lys, Ala, Val, Ile, Met, Leu, Ser, or Tyr
RXGGRWMRELX

SEQ ID NO: 50514 - protein, 9 aa, Artificial Sequence
  Description of Artificial Sequence: Synthetic peptide
  Seed: RVIPRGQLS
  misc_feature (2)..(2): Xaa can be Thr, Ser, Val, Met, Ile, Ala, Tyr, Phe, Leu, Trp, Gln, Gly, Asn, Cys, or His
  misc_feature (9)..(9): Xaa can be Lys, Ala, Val, Ile, Met, Gly, Leu, Arg, Ser, Tyr, Thr, Asn, Cys, Gln, Phe, Pro, His, or Gl u
RXIPRGQLX

SEQ ID NO: 50515 - protein, 11 aa, Artificial Sequence
  Description of Artificial Sequence: Synthetic peptide
  Seed: RVIPRGQLSTR
  misc_feature (2)..(2): Xaa can be Ala, Gln, Ile, Leu, Met, Phe, Ser, Thr, Trp, Tyr, Val, Asn, Cys, or Gly
  misc_feature (11)..(11): Xaa can be Arg or Lys
RXIPRGQLSTX

SEQ ID NO: 50516 - protein, 9 aa, Artificial Sequence
  Description of Artificial Sequence: Synthetic peptide
  Seed: RVLNFIRGT
  misc_feature (2)..(2): Xaa can be Thr, Ser, Val, Met, Ile, Tyr, Ala, Gln, Phe, Leu, Trp, Asn, Gly, Cys, or His
  misc_feature (9)..(9): Xaa can be Lys, Ala, Val, Ile, Leu, Met, Arg, Gly, Ser, Thr, Tyr, Cys, Phe, Pro, Gln, His, Asn, or Gl u
RXLNFIRGX

SEQ ID NO: 50517 - protein, 10 aa, Artificial Sequence
  Description of Artificial Sequence: Synthetic peptide
  Seed: RVLNFIRGTK
  misc_feature (2)..(2): Xaa can be Thr, Val, Met, Ser, Tyr, Phe, Ala, Ile, Trp, Leu, Gln, Gly, Asn, Arg, Asp, Cys, Glu, His, Lys, or Pro
  misc_feature (10)..(10): Xaa can be Arg, Lys, Tyr, Ala, Val, Ile, Leu, Met, His, Ser, Gly, Thr, Cys, Gln, Phe, or Pro
RXLNFIRGTX

SEQ ID NO: 50518 - protein, 11 aa, Artificial Sequence
  Description of Artificial Sequence: Synthetic peptide
  Seed: RVLNFIRGTKV
  misc_feature (2)..(2): Xaa can be Thr, Met, Leu, Ile, Ser, Gln, Val, Phe, Tyr, or Ala
  misc_feature (11)..(11): Xaa can be Lys, Val, Ile, Ala, Leu, Met, Arg, Cys, Gly, Ser, Thr, or Tyr
RXLNFIRGTKX

SEQ ID NO: 50519 - protein, 9 aa, Artificial Sequence
  Description of Artificial Sequence: Synthetic peptide
  Seed: RVLPRGKLS
  misc_feature (2)..(2): Xaa can be Thr, Ser, Val, Met, Ala, Ile, Tyr, Phe, Leu, Trp, Gln, Gly, Asn, Cys, or His
  misc_feature (9)..(9): Xaa can be Lys, Ala, Val, Ile, Leu, Met, Ser, Arg, Tyr, Gly, Phe, Thr, Cys, Pro, Asn, Gln, Glu, or Hi s
RXLPRGKLX

SEQ ID NO: 50520 - protein, 11 aa, Artificial Sequence
  Description of Artificial Sequence: Synthetic peptide
  Seed: RVLPRGKLSTR
  misc_feature (2)..(2): Xaa can be Ala, Gln, Ile, Leu, Met, Phe, Ser, Thr, Trp, Tyr, Val, Asn, Cys, or Gly
  misc_feature (11)..(11): Xaa can be Arg or Lys
RXLPRGKLSTX

SEQ ID NO: 50521 - protein, 9 aa, Artificial Sequence
  Description of Artificial Sequence: Synthetic peptide
  Seed: RVLPRGQLS
  misc_feature (2)..(2): Xaa can be Thr, Val, Ser, Met, Ile, Tyr, Phe, Ala, Leu, Trp, Gln, Gly, Asn, Cys, or His
  misc_feature (9)..(9): Xaa can be Lys, Ala, Val, Ile, Met, Leu, Tyr, Arg, Ser, Gly, Thr, Phe, Cys, Gln, His, Pro, Asn, or Gl u
RXLPRGQLX

SEQ ID NO: 50522 - protein, 11 aa, Artificial Sequence
  Description of Artificial Sequence: Synthetic peptide
  Seed: RVLPRGQLSTR
  misc_feature (2)..(2): Xaa can be Ala, Gln, Ile, Leu, Met, Phe, Ser, Thr, Trp, Tyr, Val, Asn, Cys, or Gly
  misc_feature (11)..(11): Xaa can be Arg or Lys
RXLPRGQLSTX

SEQ ID NO: 50523 - protein, 10 aa, Artificial Sequence
  Description of Artificial Sequence: Synthetic peptide
  Seed: RVLSFIKGTK
  misc_feature (2)..(2): Xaa can be Thr, Ser, Val, Met, Tyr, Ala, Ile, Phe, Trp, Leu, Arg, Asn, Asp, Cys, Gln, Glu, Gly, His, Lys, or Pro
  misc_feature (10)..(10): Xaa can be Arg, Lys, Ala, Tyr, Val, His, Ile, Leu, Met, or Ser
RXLSFIKGTX

SEQ ID NO: 50524 - protein, 11 aa, Artificial Sequence
  Description of Artificial Sequence: Synthetic peptide
  Seed: RVLSFIKGTKV
  misc_feature (2)..(2): Xaa can be Leu, Met, Gln, Ile, Phe, Thr, or Val
  misc_feature (11)..(11): Xaa can be Val, Ile, Leu, Ala, or Met
RXLSFIKGTKX

SEQ ID NO: 50525 - protein, 11 aa, Artificial Sequence
  Description of Artificial Sequence: Synthetic peptide
  Seed: RVLSFIRGTRV
  misc_feature (2)..(2): Xaa can be Ala, Gln, Ile, Leu, Met, Phe, Ser, Thr, Trp, Tyr, Val, Arg, Asn, Asp, Cys, Glu, Gly, His, Lys, or Pro
  misc_feature (11)..(11): Xaa can be Arg, Lys, Ala, Asn, Asp, Cys, Gln, Glu, Gly, His, Ile, Leu, Met, Phe, Pro, Ser, Thr, Trp, Tyr, or Val
RXLSFIRGTRX

SEQ ID NO: 50526 - protein, 8 aa, Artificial Sequence
  Description of Artificial Sequence: Synthetic peptide
  Seed: RVNGKWMR
  misc_feature (2)..(2): Xaa can be Gln, Ile, Leu, Met, Phe, Ser, Thr, Trp, Tyr, Val, Ala, Asn, or Gly
  misc_feature (8)..(8): Xaa can be Arg or Lys
RXNGKWMX

SEQ ID NO: 50527 - protein, 9 aa, Artificial Sequence
  Description of Artificial Sequence: Synthetic peptide
  Seed: RVNGKWMRE
  misc_feature (2)..(2): Xaa can be Met, Ser, Thr, Val, Ala, Ile, Phe, Tyr, Leu, Gln, Gly, Trp, Asn, Cys, His, or Lys
  misc_feature (9)..(9): Xaa can be Lys, Ala, Ile, Val, Leu, Met, Ser, Arg, Gly, Thr, Tyr, Cys, Phe, Pro, Gln, His, Asn, or Gl u
RXNGKWMRX

SEQ ID NO: 50528 - protein, 10 aa, Artificial Sequence
  Description of Artificial Sequence: Synthetic peptide
  Seed: RVNGKWMREL
  misc_feature (2)..(2): Xaa can be Thr, Val, Ser, Met, Ala, Ile, Tyr, Gln, Leu, Phe, Trp, or Gly
  misc_feature (10)..(10): Xaa can be Lys, Ala, Val, Ile, Leu, Met, Ser, Gly, Thr, or Tyr
RXNGKWMREX

SEQ ID NO: 50529 - protein, 11 aa, Artificial Sequence
  Description of Artificial Sequence: Synthetic peptide
  Seed: RVNGKWMRELI
  misc_feature (2)..(2): Xaa can be Thr, Val, Met, Ser, Ala, Ile, Phe, Tyr, Gln, Gly, Leu, or Trp
  misc_feature (11)..(11): Xaa can be Lys, Ala, Val, Ile, Leu, Met, or Ser
RXNGKWMRELX

SEQ ID NO: 50530 - protein, 9 aa, Artificial Sequence
  Description of Artificial Sequence: Synthetic peptide
  Seed: RVSNFIRGT
  misc_feature (2)..(2): Xaa can be Thr, Ser, Val, Ile, Met, Ala, Tyr, Phe, Trp, Gln, Leu, Gly, Asn, or Cys
  misc_feature (9)..(9): Xaa can be Lys, Ala, Val, Ile, Leu, Met, Arg, Ser, Tyr, Gly, Cys, Phe, Thr, His, Pro, Asn, or Gln
RXSNFIRGX

SEQ ID NO: 50531 - protein, 10 aa, Artificial Sequence
  Description of Artificial Sequence: Synthetic peptide
  Seed: RVSNFIRGTK
  misc_feature (2)..(2): Xaa can be Thr, Met, Ala, Ile, Phe, Ser, Trp, Tyr, Val, Leu, Arg, Asn, Asp, Cys, Gln, Glu, Gly, His, Lys, or Pro
  misc_feature (10)..(10): Xaa can be Ala, Arg, Ile, Leu, Lys, Met, Ser, Tyr, Val, Gly, Thr, His, Cys, Phe, or Pro
RXSNFIRGTX

SEQ ID NO: 50532 - protein, 11 aa, Artificial Sequence
  Description of Artificial Sequence: Synthetic peptide
  Seed: RVSNFIRGTKV
  misc_feature (2)..(2): Xaa can be Thr, Ser, Val, Tyr, Ala, Gln, Ile, Leu, Met, or Phe
  misc_feature (11)..(11): Xaa can be Lys, Ala, Val, Ile, Leu, or Met
RXSNFIRGTKX

SEQ ID NO: 50533 - protein, 11 aa, Artificial Sequence
  Description of Artificial Sequence: Synthetic peptide
  Seed: RVSNFIRGTRV
  misc_feature (2)..(2): Xaa can be Gln, Ile, Leu, Met, Phe, Ser, Thr, Trp, Tyr, Val, Ala, Gly, Arg, Asn, Asp, Cys, Glu, His, Lys, or Pro
  misc_feature (11)..(11): Xaa can be Arg, Lys, Ala, Asn, Asp, Cys, Gln, Glu, Gly, His, Ile, Leu, Met, Phe, Pro, Ser, Thr, Trp, Tyr, or Val
RXSNFIRGTRX

SEQ ID NO: 50534 - protein, 10 aa, Artificial Sequence
  Description of Artificial Sequence: Synthetic peptide
  Seed: RVSSFIRGAK
  misc_feature (2)..(2): Xaa can be Thr, Met, Ser, Val, Ile, Trp, Tyr, Ala, Phe, Leu, Asn, Gln, Gly, Arg, Asp, Cys, Glu, His, Lys, or Pro
  misc_feature (10)..(10): Xaa can be Ala, Arg, Ile, Lys, Val, Leu, Met, Ser, Tyr, Gly, His, Thr, Cys, Phe, or Pro
RXSSFIRGAX

SEQ ID NO: 50535 - protein, 11 aa, Artificial Sequence
  Description of Artificial Sequence: Synthetic peptide
  Seed: RVSSFIRGAKV
  misc_feature (2)..(2): Xaa can be Leu, Met, Thr, Val, Ile, Ser, Tyr, Ala, Arg, Asn, Asp, Cys, Gln, Glu, Gly, His, Lys, Phe, Pro, or Trp
  misc_feature (11)..(11): Xaa can be Ala, Lys, Val, Ile, Leu, or Met
RXSSFIRGAKX

SEQ ID NO: 50536 - protein, 11 aa, Artificial Sequence
  Description of Artificial Sequence: Synthetic peptide
  Seed: RVSSFIRGARV
  misc_feature (2)..(2): Xaa can be Gln, Ile, Leu, Met, Phe, Ser, Thr, Trp, Tyr, Val, Ala, Arg, Asn, Asp, Cys, Glu, Gly, His, Lys, or Pro
  misc_feature (11)..(11): Xaa can be Arg, Lys, Ala, Asn, Asp, Cys, Gln, Glu, Gly, His, Ile, Leu, Met, Phe, Pro, Ser, Thr, Trp, Tyr, or Val
RXSSFIRGARX

SEQ ID NO: 50537 - protein, 10 aa, Artificial Sequence
  Description of Artificial Sequence: Synthetic peptide
  Seed: RVSSFIRGKK
  misc_feature (2)..(2): Xaa can be Ile, Leu, Met, Val, Thr, Ser, Phe, Tyr, Ala, Trp, Gln, Gly, Arg, Asn, Asp, Cys, Glu, His, Lys, or Pro
  misc_feature (10)..(10): Xaa can be Ala, Arg, Lys, Val, Ile, Leu, Met, His, Ser, Gly, Thr, Tyr, Cys, Phe, Pro, Asn, Asp, Gln, Glu, or Trp
RXSSFIRGKX

SEQ ID NO: 50538 - protein, 11 aa, Artificial Sequence
  Description of Artificial Sequence: Synthetic peptide
  Seed: RVSSFIRGKRV
  misc_feature (2)..(2): Xaa can be Ile, Leu, Met, Phe, Thr, Val, Tyr, Gln, Ser, Trp, Ala, Arg, Asn, Asp, Cys, Glu, Gly, His, Lys, or Pro
  misc_feature (11)..(11): Xaa can be Arg, Lys, His, Ala, Asn, Asp, Cys, Gln, Glu, Gly, Ile, Leu, Met, Phe, Pro, Ser, Thr, Trp, Tyr, or Val
RXSSFIRGKRX

SEQ ID NO: 50539 - protein, 11 aa, Artificial Sequence
  Description of Artificial Sequence: Synthetic peptide
  Seed: RVSSFIRGTRI
  misc_feature (2)..(2): Xaa can be Gln, Ile, Leu, Met, Phe, Ser, Thr, Trp, Tyr, Val, Ala, Arg, Asn, Asp, Cys, Glu, Gly, His, Lys, or Pro
  misc_feature (11)..(11): Xaa can be Arg, Lys, Ala, Asn, Asp, Cys, Gln, Glu, Gly, His, Ile, Leu, Met, Phe, Pro, Ser, Thr, Trp, Tyr, or Val
RXSSFIRGTRX

SEQ ID NO: 50540 - protein, 9 aa, Artificial Sequence
  Description of Artificial Sequence: Synthetic peptide
  Seed: RVVPRGQMS
  misc_feature (2)..(2): Xaa can be Thr, Val, Ser, Ile, Met, Ala, Tyr, Phe, Asn, Cys, Gln, Gly, Leu, or Trp
  misc_feature (9)..(9): Xaa can be Lys, Ala, Val, Ile, Leu, Met, Ser, Tyr, Gly, Arg, or Thr
RXVPRGQMX

SEQ ID NO: 50541 - protein, 11 aa, Artificial Sequence
  Description of Artificial Sequence: Synthetic peptide
  Seed: RVVPRGQMSTR
  misc_feature (2)..(2): Xaa can be Ile, Leu, Met, Phe, Ser, Thr, Trp, Tyr, Val, Ala, Asn, Gln, or Gly
  misc_feature (11)..(11): Xaa can be Arg or Lys
RXVPRGQMSTX

SEQ ID NO: 50542 - protein, 8 aa, Artificial Sequence
  Description of Artificial Sequence: Synthetic peptide
  Seed: RWMRELVL
  misc_feature (2)..(2): Xaa can be Tyr, Trp, or Phe
  misc_feature (8)..(8): Xaa can be Phe, Trp, Ile, Leu, Met, or Val
RXMRELVX

SEQ ID NO: 50543 - protein, 9 aa, Artificial Sequence
  Description of Artificial Sequence: Synthetic peptide
  Seed: RWMRELVLY
  misc_feature (2)..(2): Xaa can be Tyr, Gln, Trp, Met, Lys, Phe, Thr, Val, Ala, His, Leu, Ser, Ile, Glu, Gly, Arg, Asn, Cys, Pro, or Asp
  misc_feature (9)..(9): Xaa can be Arg, Tyr, Phe, Met, Leu, Lys, His, Trp, Ile, Val, Ala, Cys, Gly, Ser, Thr, Asn, or Pro
RXMRELVLX

SEQ ID NO: 50544 - protein, 11 aa, Artificial Sequence
  Description of Artificial Sequence: Synthetic peptide
  Seed: RWMRELVLYDK
  misc_feature (2)..(2): Xaa can be Ala, Arg, Gln, Gly, Ile, Leu, Lys, Met, Phe, Ser, Thr, Trp, Tyr, Val, Asn, Cys, or His
  misc_feature (11)..(11): Xaa can be Arg or Lys
RXMRELVLYDX

SEQ ID NO: 50545 - protein, 9 aa, Artificial Sequence
  Description of Artificial Sequence: Synthetic peptide
  Seed: RYLEEHPSA
  misc_feature (2)..(2): Xaa can be Thr, Tyr, Met, Phe, Val, Ser, Trp, Ile, Ala, Leu, Gln, His, Asn, Cys, or Gly
  misc_feature (9)..(9): Xaa can be Lys, Phe, Trp, Met, Ala, Ile, Val, Leu, Arg, Tyr, Gly, Ser, Thr, Cys, or His
RXLEEHPSX

SEQ ID NO: 50546 - protein, 11 aa, Artificial Sequence
  Description of Artificial Sequence: Synthetic peptide
  Seed: RYLEEHPSAGK
  misc_feature (2)..(2): Xaa can be Met, Phe, Thr, Trp, Tyr, Val, Ala, Asn, Gln, Gly, Ile, Leu, or Ser
  misc_feature (11)..(11): Xaa can be Arg or Lys
RXLEEHPSAGX

SEQ ID NO: 50547 - protein, 11 aa, Artificial Sequence
  Description of Artificial Sequence: Synthetic peptide
  Seed: RYLEENPSAGK
  misc_feature (2)..(2): Xaa can be Met, Phe, Thr, Trp, Tyr, Val, Ala, Gln, Gly, Ile, Leu, or Ser
  misc_feature (11)..(11): Xaa can be Arg or Lys
RXLEENPSAGX

SEQ ID NO: 50548 - protein, 9 aa, Artificial Sequence
  Description of Artificial Sequence: Synthetic peptide
  Seed: RYLEGHPSA
  misc_feature (2)..(2): Xaa can be Thr, Tyr, Phe, Ser, Val, Ile, Met, Ala, Leu, Trp, Gln, His, Arg, Gly, Asn, or Cys
  misc_feature (9)..(9): Xaa can be Lys, Phe, Leu, Met, Ala, Trp, Tyr, Arg, Ile, Val, Gly, Ser, His, Thr, Cys, Asn, Gln, Glu, or Pro
RXLEGHPSX

SEQ ID NO: 50549 - protein, 11 aa, Artificial Sequence
  Description of Artificial Sequence: Synthetic peptide
  Seed: RYLEGHPSAGK
  misc_feature (2)..(2): Xaa can be Thr, Ala, Gln, Ile, Leu, Met, Phe, Ser, Trp, Tyr, Val, Asn, or Gly
  misc_feature (11)..(11): Xaa can be Arg, Lys, or Ala
RXLEGHPSAGX

SEQ ID NO: 50550 - protein, 8 aa, Artificial Sequence
  Description of Artificial Sequence: Synthetic peptide
  Seed: RYRAIRTR
  misc_feature (2)..(2): Xaa can be Ser, Thr, Val, Met, Ile, Tyr, Phe, Ala, Leu, Trp, Gln, Arg, Asn, Gly, His, or Lys
  misc_feature (8)..(8): Xaa can be Lys, Arg, Ala, Ile, Leu, Met, Val, Phe, Tyr, Gly, Pro, Ser, Thr, Asn, Gln, Cys, Glu, His, or Trp
RXRAIRTX

SEQ ID NO: 50551 - protein, 9 aa, Artificial Sequence
  Description of Artificial Sequence: Synthetic peptide
  Seed: RYRAIRTRS
  misc_feature (2)..(2): Xaa can be Ala, Ile, Leu, Met, Phe, Ser, Thr, Tyr, Val, Gln, Trp, Gly, Asn, Cys, His, Lys, Arg, Asp, Glu, or Pro
  misc_feature (9)..(9): Xaa can be Lys, Ala, Arg, Val, Gly, Ile, Leu, Met, Phe, Ser, Tyr, Cys, Gln, Glu, Pro, Thr, Asn, His, Trp, or Asp
RXRAIRTRX

SEQ ID NO: 50552 - protein, 10 aa, Artificial Sequence
  Description of Artificial Sequence: Synthetic peptide
  Seed: RYRAIRTRSG
  misc_feature (2)..(2): Xaa can be Met, Ser, Thr, Val, Ile, Phe, Tyr, Ala, Gln, Leu, Trp, Gly, Asn, Cys, Arg, His, or Lys
  misc_feature (10)..(10): Xaa can be Lys, Ala, Met, Tyr, Val, Arg, Gly, Ile, Leu, Phe, Ser, Thr, Pro, Asn, Cys, Gln, Glu, His, Asp, or Trp
RXRAIRTRSX

SEQ ID NO: 50553 - protein, 8 aa, Artificial Sequence
  Description of Artificial Sequence: Synthetic peptide
  Seed: RYWAIKTR
  misc_feature (2)..(2): Xaa can be Gln, Ile, Leu, Met, Phe, Ser, Thr, Trp, Tyr, Val, Ala, or Gly
  misc_feature (8)..(8): Xaa can be Arg or Lys
RXWAIKTX

SEQ ID NO: 50554 - protein, 10 aa, Artificial Sequence
  Description of Artificial Sequence: Synthetic peptide
  Seed: RYWAIKTRSG
  misc_feature (2)..(2): Xaa can be Thr, Ser, Tyr, Val, Phe, Ile, Met, Ala, Trp, Asn, Gln, Gly, Leu, Cys, His, or Lys
  misc_feature (10)..(10): Xaa can be Lys, Ala, Ile, Val, Leu, Met, Ser, Gly, Thr, Arg, Tyr, Cys, Phe, or Pro
RXWAIKTRSX

SEQ ID NO: 50555 - protein, 8 aa, Artificial Sequence
  Description of Artificial Sequence: Synthetic peptide
  Seed: RYWAIRTK
  misc_feature (2)..(2): Xaa can be Thr, Ala, Gln, Ile, Leu, Met, Phe, Ser, Trp, Tyr, Val, Arg, Asn, Gly, or Lys
  misc_feature (8)..(8): Xaa can be Arg, Lys, or Ala
RXWAIRTX

SEQ ID NO: 50556 - protein, 9 aa, Artificial Sequence
  Description of Artificial Sequence: Synthetic peptide
  Seed: RYWAIRTKS
  misc_feature (2)..(2): Xaa can be Ser, Thr, Val, Ala, Met, Tyr, Ile, Phe, Trp, Leu, Asn, Gln, Gly, Cys, or His
  misc_feature (9)..(9): Xaa can be Lys, Ala, Val, Ile, Gly, Leu, Met, Ser, Arg, Thr, Tyr, Asn, Cys, Gln, Pro, Glu, His, or Ph e
RXWAIRTKX

SEQ ID NO: 50557 - protein, 10 aa, Artificial Sequence
  Description of Artificial Sequence: Synthetic peptide
  Seed: RYWAIRTKSG
  misc_feature (2)..(2): Xaa can be Thr, Ser, Tyr, Val, Met, Ala, Ile, Phe, Trp, Asn, Gln, Gly, Leu, Cys, His, or Lys
  misc_feature (10)..(10): Xaa can be Lys, Ala, Ile, Val, Leu, Met, Tyr, Gly, Ser, Arg, Thr, Cys, Gln, His, Phe, or Pro
RXWAIRTKSX

SEQ ID NO: 50558 - protein, 9 aa, Artificial Sequence
  Description of Artificial Sequence: Synthetic peptide
  Seed: RYWAIRTRS
  misc_feature (2)..(2): Xaa can be Ser, Thr, Val, Met, Tyr, Ala, Ile, Phe, Trp, Leu, Gln, Gly, Asn, Cys, or His
  misc_feature (9)..(9): Xaa can be Lys, Ala, Val, Ile, Arg, Gly, Leu, Met, Ser, Tyr, Thr, Pro, Gln, Asn, Cys, Phe, Glu, or Hi s
RXWAIRTRX

SEQ ID NO: 50559 - protein, 10 aa, Artificial Sequence
  Description of Artificial Sequence: Synthetic peptide
  Seed: RYWAIRTRSG
  misc_feature (2)..(2): Xaa can be Thr, Ser, Val, Tyr, Met, Phe, Ala, Ile, Trp, Leu, Gln, Gly, Asn, Cys, His, Arg, Asp, Glu, Lys, or Pro
  misc_feature (10)..(10): Xaa can be Lys, Ala, Ile, Val, Met, Leu, Ser, Tyr, Gly, Arg, Pro, Thr, Cys, Phe, Gln, His, Asn, or Gl u
RXWAIRTRSX

SEQ ID NO: 50560 - protein, 9 aa, Artificial Sequence
  Description of Artificial Sequence: Synthetic peptide
  Seed: SAAFEDLRL
  misc_feature (2)..(2): Xaa can be Ala or Pro
  misc_feature (9)..(9): Xaa can be Leu, Met, Phe, Tyr, or Val
SXAFEDLRX

SEQ ID NO: 50561 - protein, 10 aa, Artificial Sequence
  Description of Artificial Sequence: Synthetic peptide
  Seed: SAAFEDLRLF
  misc_feature (2)..(2): Xaa can be Ser, Gln, Thr, Ala, Arg, Lys, Met, Phe, Tyr, Val, Asn, Asp, Cys, Glu, Gly, His, Ile, Leu, Pro, or Trp
  misc_feature (10)..(10): Xaa can be Phe, Trp, Tyr, Met, Leu, or Ile
SXAFEDLRLX

SEQ ID NO: 50562 - protein, 10 aa, Artificial Sequence
  Description of Artificial Sequence: Synthetic peptide
  Seed: SAAFEDLRVL
  misc_feature (2)..(2): Xaa can be Ala, Arg, Asn, Asp, Cys, Gln, Glu, Gly, His, Ile, Leu, Lys, Met, Phe, Pro, Ser, Thr, Trp, Tyr, or Val
  misc_feature (10)..(10): Xaa can be Ile, Leu, Met, Phe, Tyr, or Val
SXAFEDLRVX

SEQ ID NO: 50563 - protein, 11 aa, Artificial Sequence
  Description of Artificial Sequence: Synthetic peptide
  Seed: SADQISVQPTF
  misc_feature (2)..(2): Xaa can be Ser, Thr, Ala, Val, Arg, Asn, Asp, Cys, Gln, Glu, Gly, His, Ile, Leu, Lys, Met, Phe, Pro, Trp, or Tyr
  misc_feature (11)..(11): Xaa can be Met, Phe, Tyr, Trp, or Leu
SXDQISVQPTX

SEQ ID NO: 50564 - protein, 9 aa, Artificial Sequence
  Description of Artificial Sequence: Synthetic peptide
  Seed: SAFDERRNK
  misc_feature (2)..(2): Xaa can be Ile, Thr, Val, Ala, Gln, Leu, Met, Phe, Ser, Trp, Tyr, Asn, or Gly
  misc_feature (9)..(9): Xaa can be Arg, Lys, or Tyr
SXFDERRNX

SEQ ID NO: 50565 - protein, 10 aa, Artificial Sequence
  Description of Artificial Sequence: Synthetic peptide
  Seed: SAFDERRNKY
  misc_feature (2)..(2): Xaa can be Ala, Gln, Met, His, Leu, Lys, Ser, Ile, Phe, Thr, Trp, Tyr, or Val
  misc_feature (10)..(10): Xaa can be Tyr, Phe, Met, or Leu
SXFDERRNKX

SEQ ID NO: 50566 - protein, 10 aa, Artificial Sequence
  Description of Artificial Sequence: Synthetic peptide
  Seed: SAFDERRNRY
  misc_feature (2)..(2): Xaa can be Ala, Gln, Met, His, Leu, Lys, Ser, Thr, Gly, Ile, Phe, Trp, Tyr, or Val
  misc_feature (10)..(10): Xaa can be Tyr, Phe, Met, or Leu
SXFDERRNRX

SEQ ID NO: 50567 - protein, 11 aa, Artificial Sequence
  Description of Artificial Sequence: Synthetic peptide
  Seed: SAFDERRNRYL
  misc_feature (2)..(2): Xaa can be Ala or Ser
  misc_feature (11)..(11): Xaa can be Tyr, Leu, Met, or Phe
SXFDERRNRYX

SEQ ID NO: 50568 - protein, 9 aa, Artificial Sequence
  Description of Artificial Sequence: Synthetic peptide
  Seed: SAFEERRNK
  misc_feature (2)..(2): Xaa can be Thr, Val, Ile, Ser, Ala, Leu, Met, Gln, Gly, Phe, Trp, or Tyr
  misc_feature (9)..(9): Xaa can be Lys, Arg, Tyr, Ala, or Val
SXFEERRNX

SEQ ID NO: 50569 - protein, 10 aa, Artificial Sequence
  Description of Artificial Sequence: Synthetic peptide
  Seed: SAFEERRNKY
  misc_feature (2)..(2): Xaa can be Ala, Gln, Met, His, Leu, Lys, Ile, Ser, Thr, or Val
  misc_feature (10)..(10): Xaa can be Tyr, Phe, Met, or Leu
SXFEERRNKX

SEQ ID NO: 50570 - protein, 11 aa, Artificial Sequence
  Description of Artificial Sequence: Synthetic peptide
  Seed: SAGHISVQPTF
  misc_feature (2)..(2): Xaa can be Ser, Thr, Ala, or Val
  misc_feature (11)..(11): Xaa can be Trp, Phe, Tyr, Leu, or Met
SXGHISVQPTX

SEQ ID NO: 50571 - protein, 11 aa, Artificial Sequence
  Description of Artificial Sequence: Synthetic peptide
  Seed: SAGQISIQPTF
  misc_feature (2)..(2): Xaa can be Ala, Ser, Thr, Val, Arg, Asn, Asp, Cys, Gln, Glu, Gly, His, Ile, Leu, Lys, Met, Phe, Pro, Trp, or Tyr
  misc_feature (11)..(11): Xaa can be Met, Phe, Tyr, or Trp
SXGQISIQPTX

SEQ ID NO: 50572 - protein, 11 aa, Artificial Sequence
  Description of Artificial Sequence: Synthetic peptide
  Seed: SAGQISTQPTF
  misc_feature (2)..(2): Xaa can be Ser, Thr, Ala, Ile, Met, Val, Arg, Asn, Asp, Cys, Gln, Glu, Gly, His, Leu, Lys, Phe, Pro, Trp, or Tyr
  misc_feature (11)..(11): Xaa can be Met, Phe, Tyr, Trp, or Leu
SXGQISTQPTX

SEQ ID NO: 50573 - protein, 11 aa, Artificial Sequence
  Description of Artificial Sequence: Synthetic peptide
  Seed: SAGQISVQPAF
  misc_feature (2)..(2): Xaa can be Ala, Arg, Asn, Asp, Cys, Gln, Glu, Gly, His, Ile, Leu, Lys, Met, Phe, Pro, Ser, Thr, Trp, Tyr, or Val
  misc_feature (11)..(11): Xaa can be Met, Phe, or Tyr
SXGQISVQPAX

SEQ ID NO: 50574 - protein, 11 aa, Artificial Sequence
  Description of Artificial Sequence: Synthetic peptide
  Seed: SAGQISVQPTF
  misc_feature (2)..(2): Xaa can be Ser, Thr, Ala, Val, Arg, Asn, Asp, Cys, Gln, Glu, Gly, His, Ile, Leu, Lys, Met, Phe, Pro, Trp, or Tyr
  misc_feature (11)..(11): Xaa can be Met, Phe, Tyr, Trp, or Leu
SXGQISVQPTX

SEQ ID NO: 50575 - protein, 11 aa, Artificial Sequence
  Description of Artificial Sequence: Synthetic peptide
  Seed: SAGQVSVQPSF
  misc_feature (2)..(2): Xaa can be Ala, Ser, Thr, Val, Arg, Asn, Asp, Cys, Gln, Glu, Gly, His, Ile, Leu, Lys, Met, Phe, Pro, Trp, or Tyr
  misc_feature (11)..(11): Xaa can be Met, Phe, Tyr, or Trp
SXGQVSVQPSX

SEQ ID NO: 50576 - protein, 11 aa, Artificial Sequence
  Description of Artificial Sequence: Synthetic peptide
  Seed: SAGQVSVQPTF
  misc_feature (2)..(2): Xaa can be Ala, Ser, Thr, Val, Arg, Asn, Asp, Cys, Gln, Glu, Gly, His, Ile, Leu, Lys, Met, Phe, Pro, Trp, or Tyr
  misc_feature (11)..(11): Xaa can be Met, Phe, Tyr, or Trp
SXGQVSVQPTX

SEQ ID NO: 50577 - protein, 9 aa, Artificial Sequence
  Description of Artificial Sequence: Synthetic peptide
  Seed: SAHKSQLVW
  misc_feature (2)..(2): Xaa can be Gln, Met, Ala, Lys, His, Ser, Thr, Val, Leu, Glu, Gly, Ile, Arg, Asn, Cys, Phe, Pro, Tyr, or Trp
  misc_feature (9)..(9): Xaa can be Phe, Tyr, Met, Trp, Leu, Ile, His, Val, Ala, Gly, Asn, Cys, Gln, Ser, or Thr
SXHKSQLVX

SEQ ID NO: 50578 - protein, 10 aa, Artificial Sequence
  Description of Artificial Sequence: Synthetic peptide
  Seed: SAHKSQLVWM
  misc_feature (2)..(2): Xaa can be Ala
  misc_feature (10)..(10): Xaa can be Met, Phe, or Tyr
SXHKSQLVWX

SEQ ID NO: 50579 - protein, 9 aa, Artificial Sequence
  Description of Artificial Sequence: Synthetic peptide
  Seed: SAKPEDLSF
  misc_feature (2)..(2): Xaa can be Gln, Met, Ala, Ser, Thr, Leu, Lys, Val, Ile, Pro, Arg, Glu, His, Asn, Gly, Phe, Tyr, or Cy s
  misc_feature (9)..(9): Xaa can be Tyr, Phe, Met, Leu, Trp, Ile, Val, His, or Ala
SXKPEDLSX

SEQ ID NO: 50580 - protein, 9 aa, Artificial Sequence
  Description of Artificial Sequence: Synthetic peptide
  Seed: SAKPEDVSF
  misc_feature (2)..(2): Xaa can be Gln, Ala, Met, Ser, Thr, Ile, Leu, Lys, Pro, Val, Arg, His, Asn, Glu, Phe, Gly, or Tyr
  misc_feature (9)..(9): Xaa can be Phe, Tyr, Met, Leu, Trp, Ile, Val, His, or Ala
SXKPEDVSX

SEQ ID NO: 50581 - protein, 9 aa, Artificial Sequence
  Description of Artificial Sequence: Synthetic peptide
  Seed: SAKPEEVSF
  misc_feature (2)..(2): Xaa can be Gln, Ala, Ser, Met, Thr, Ile, Lys, Val, Arg, His, Leu, Pro, Glu, or Phe
  misc_feature (9)..(9): Xaa can be Phe, Tyr, Met, Trp, Leu, Val, Ile, or His
SXKPEEVSX

SEQ ID NO: 50582 - protein, 9 aa, Artificial Sequence
  Description of Artificial Sequence: Synthetic peptide
  Seed: SALILRGAV
  misc_feature (2)..(2): Xaa can be Pro, Ala, Ser, Thr, Val, Ile, Leu, or Met
  misc_feature (9)..(9): Xaa can be Leu, Met, Ile, Phe, Tyr, Val, Ala, Cys, Gln, Glu, Gly, His, Pro, Ser, Thr, or Trp
SXLILRGAX

SEQ ID NO: 50583 - protein, 10 aa, Artificial Sequence
  Description of Artificial Sequence: Synthetic peptide
  Seed: SALILRGAVA
  misc_feature (2)..(2): Xaa can be Ala, Arg, Asn, Asp, Cys, Gln, Glu, Gly, His, Ile, Leu, Lys, Met, Phe, Pro, Ser, Thr, Trp, Tyr, or Val
  misc_feature (10)..(10): Xaa can be Ala, Ile, Leu, or Val
SXLILRGAVX

SEQ ID NO: 50584 - protein, 9 aa, Artificial Sequence
  Description of Artificial Sequence: Synthetic peptide
  Seed: SALILRGSV
  misc_feature (2)..(2): Xaa can be Pro, Ala, Ser, Thr, Ile, Val, Leu, or Met
  misc_feature (9)..(9): Xaa can be Leu, Met, Phe, Tyr, Ile, Val, Ala, Cys, Gly, Ser, Thr, or Trp
SXLILRGSX

SEQ ID NO: 50585 - protein, 10 aa, Artificial Sequence
  Description of Artificial Sequence: Synthetic peptide
  Seed: SALILRGSVA
  misc_feature (2)..(2): Xaa can be Ala, Arg, Asn, Asp, Cys, Gln, Glu, Gly, His, Ile, Leu, Lys, Met, Phe, Pro, Ser, Thr, Trp, Tyr, or Val
  misc_feature (10)..(10): Xaa can be Ala, Ile, Leu, or Val
SXLILRGSVX

SEQ ID NO: 50586 - protein, 9 aa, Artificial Sequence
  Description of Artificial Sequence: Synthetic peptide
  Seed: SALVLRGSV
  misc_feature (2)..(2): Xaa can be Pro, Ala, Ser, Thr, Ile, Val, Leu, or Met
  misc_feature (9)..(9): Xaa can be Leu, Met, Phe, Tyr, Ile, Val, Ala, Cys, Gly, Ser, Thr, or Trp
SXLVLRGSX

SEQ ID NO: 50587 - protein, 10 aa, Artificial Sequence
  Description of Artificial Sequence: Synthetic peptide
  Seed: SALVLRGSVA
  misc_feature (2)..(2): Xaa can be Leu, Met, Phe, Ala, Arg, Asn, Asp, Cys, Gln, Glu, Gly, His, Ile, Lys, Pro, Ser, Thr, Trp, Tyr, or Val
  misc_feature (10)..(10): Xaa can be Ala, Val, Ile, or Leu
SXLVLRGSVX

SEQ ID NO: 50588 - protein, 9 aa, Artificial Sequence
  Description of Artificial Sequence: Synthetic peptide
  Seed: SARPEDASF
  misc_feature (2)..(2): Xaa can be Gln, Met, Ala, Leu, Lys, Ser, Thr, Ile, Pro, Val, His, Arg, Glu, Gly, Phe, Tyr, Asn, Cys, or Trp
  misc_feature (9)..(9): Xaa can be Phe, Tyr, Met, Leu, Trp, Ile, Val, His, or Ala
SXRPEDASX

SEQ ID NO: 50589 - protein, 9 aa, Artificial Sequence
  Description of Artificial Sequence: Synthetic peptide
  Seed: SARPEDLSF
  misc_feature (2)..(2): Xaa can be Gln, Met, Lys, Ala, Leu, Ser, Thr, Val, His, Ile, Pro, Arg, Glu, Asn, Cys, Gly, Phe, Tyr, or Trp
  misc_feature (9)..(9): Xaa can be Phe, Tyr, Met, Leu, Trp, Ile, Val, His, Ala, Cys, Gly, or Thr
SXRPEDLSX

SEQ ID NO: 50590 - protein, 9 aa, Artificial Sequence
  Description of Artificial Sequence: Synthetic peptide
  Seed: SARPEDVSF
  misc_feature (2)..(2): Xaa can be Gln, Met, Ala, Ser, Leu, Lys, Thr, Pro, Val, Arg, His, Ile, Glu, Gly, Phe, Tyr, Asn, Cys, or Trp
  misc_feature (9)..(9): Xaa can be Phe, Tyr, Met, Trp, Leu, Ile, Val, His, or Ala
SXRPEDVSX

SEQ ID NO: 50591 - protein, 9 aa, Artificial Sequence
  Description of Artificial Sequence: Synthetic peptide
  Seed: SARPEEVSF
  misc_feature (2)..(2): Xaa can be Gln, Ala, Met, Ser, Thr, Leu, Lys, Val, Ile, Pro, Arg, Glu, Gly, His, Asn, Phe, or Tyr
  misc_feature (9)..(9): Xaa can be Phe, Tyr, Met, Leu, Trp, Ile, Val, His, or Ala
SXRPEEVSX

SEQ ID NO: 50592 - protein, 8 aa, Artificial Sequence
  Description of Artificial Sequence: Synthetic peptide
  Seed: SARSALIL
  misc_feature (2)..(2): Xaa can be Ala or Ser
  misc_feature (8)..(8): Xaa can be Leu, Met, Phe, or Tyr
SXRSALIX

SEQ ID NO: 50593 - protein, 9 aa, Artificial Sequence
  Description of Artificial Sequence: Synthetic peptide
  Seed: SARSALILR
  misc_feature (2)..(2): Xaa can be Met, Ser, Thr, Val, Ala, Gln, Ile, Phe, Tyr, Gly, Leu, Trp, Asn, Cys, Lys, His, Arg, Pro, or Glu
  misc_feature (9)..(9): Xaa can be Lys, Ala, Arg, Val, Ile, Leu, Met, Ser, Tyr, Gly, Thr, Asn, Cys, Gln, His, Phe, Pro, Glu, Asp, or Trp
SXRSALILX

SEQ ID NO: 50594 - protein, 10 aa, Artificial Sequence
  Description of Artificial Sequence: Synthetic peptide
  Seed: SARSALILRG
  misc_feature (2)..(2): Xaa can be Ser, Thr, Val, Met, Ala, Tyr, Gln, Ile, Phe, Leu, Trp, Gly, Asn, Arg, Cys, His, or Lys
  misc_feature (10)..(10): Xaa can be Lys, Ala, Val, Ile, Leu, Met, Gly, Ser, Thr, Tyr, Arg, Phe, Pro, Asn, Cys, Gln, Glu, or Hi s
SXRSALILRX

SEQ ID NO: 50595 - protein, 9 aa, Artificial Sequence
  Description of Artificial Sequence: Synthetic peptide
  Seed: SARSEDVSF
  misc_feature (2)..(2): Xaa can be Gln, Met, Ala, Lys, Ser, Thr, Leu, Pro, Arg, His, Ile, Val, Glu, Gly, Tyr, Asn, Phe, Cys, or Trp
  misc_feature (9)..(9): Xaa can be Phe, Tyr, Met, Trp, Leu, Ile, Val, His, or Ala
SXRSEDVSX

SEQ ID NO: 50596 - protein, 9 aa, Artificial Sequence
  Description of Artificial Sequence: Synthetic peptide
  Seed: SAYERMCNI
  misc_feature (2)..(2): Xaa can be Leu, Met, Ala, Gln, Ile, Val, Thr, Ser, Gly, Arg, Cys, Pro, Asn, Phe, Tyr, Lys, Glu, His, or Trp
  misc_feature (9)..(9): Xaa can be Val, Ile, Met, Leu, Phe, Tyr, Trp, Ala, Cys, Thr, Ser, Gly, Pro, or His
SXYERMCNX

SEQ ID NO: 50597 - protein, 10 aa, Artificial Sequence
  Description of Artificial Sequence: Synthetic peptide
  Seed: SAYERMCNIL
  misc_feature (2)..(2): Xaa can be Ala, Tyr, Ser, Thr, Trp, Arg, Asn, Asp, Cys, Gln, Glu, Gly, His, Ile, Leu, Lys, Met, Phe, Pro, or Val
  misc_feature (10)..(10): Xaa can be Ile, Leu, Phe, Trp, Met, Tyr, or Val
SXYERMCNIX

SEQ ID NO: 50598 - protein, 11 aa, Artificial Sequence
  Description of Artificial Sequence: Synthetic peptide
  Seed: SAYERMCNILK
  misc_feature (2)..(2): Xaa can be Thr, Ser, Ala, Val, Ile, Leu, Met, Tyr, Arg, Gln, Gly, Phe, Trp, Asn, Cys, His, or Lys
  misc_feature (11)..(11): Xaa can be Arg, Lys, Tyr, Ala, Val, Ile, or Leu
SXYERMCNILX

SEQ ID NO: 50599 - protein, 10 aa, Artificial Sequence
  Description of Artificial Sequence: Synthetic peptide
  Seed: SCLPACVHGL
  misc_feature (2)..(2): Xaa can be Leu, Met, Ala, Arg, Asn, Asp, Cys, Gln, Glu, Gly, His, Ile, Lys, Phe, Pro, Ser, Thr, Trp, Tyr, or Val
  misc_feature (10)..(10): Xaa can be Ala, Ile, Leu, Met, Val, Cys, or Thr
SXLPACVHGX

SEQ ID NO: 50600 - protein, 10 aa, Artificial Sequence
  Description of Artificial Sequence: Synthetic peptide
  Seed: SCLPACVNGL
  misc_feature (2)..(2): Xaa can be Leu, Met, Ala, Arg, Asn, Asp, Cys, Gln, Glu, Gly, His, Ile, Lys, Phe, Pro, Ser, Thr, Trp, Tyr, or Val
  misc_feature (10)..(10): Xaa can be Ala, Ile, Leu, Met, Val, Cys, or Thr
SXLPACVNGX

SEQ ID NO: 50601 - protein, 10 aa, Artificial Sequence
  Description of Artificial Sequence: Synthetic peptide
  Seed: SCLPACVYGL
  misc_feature (2)..(2): Xaa can be Leu, Met, Ala, Arg, Asn, Asp, Cys, Gln, Glu, Gly, His, Ile, Lys, Phe, Pro, Ser, Thr, Trp, Tyr, or Val
  misc_feature (10)..(10): Xaa can be Ala, Ile, Leu, Met, Val, Cys, Phe, Ser, or Thr
SXLPACVYGX

SEQ ID NO: 50602 - protein, 11 aa, Artificial Sequence
  Description of Artificial Sequence: Synthetic peptide
  Seed: SCLPACVYGPA
  misc_feature (2)..(2): Xaa can be Ala, Arg, Asn, Asp, Cys, Gln, Glu, Gly, His, Ile, Leu, Lys, Met, Phe, Pro, Ser, Thr, Trp, Tyr, or Val
  misc_feature (11)..(11): Xaa can be Ala
SXLPACVYGPX

SEQ ID NO: 50603 - protein, 10 aa, Artificial Sequence
  Description of Artificial Sequence: Synthetic peptide
  Seed: SCLPTCVYGL
  misc_feature (2)..(2): Xaa can be Leu, Met, Ala, Arg, Asn, Asp, Cys, Gln, Glu, Gly, His, Ile, Lys, Phe, Pro, Ser, Thr, Trp, Tyr, or Val
  misc_feature (10)..(10): Xaa can be Ala, Ile, Leu, Met, Val, Cys, Phe, Ser, or Thr
SXLPTCVYGX

SEQ ID NO: 50604 - protein, 10 aa, Artificial Sequence
  Description of Artificial Sequence: Synthetic peptide
  Seed: SCTLELRSRY
  misc_feature (2)..(2): Xaa can be Ser, Ala, Arg, Asn, Asp, Cys, Gln, Glu, Gly, His, Ile, Leu, Lys, Met, Phe, Pro, Thr, Trp, Tyr, or Val
  misc_feature (10)..(10): Xaa can be Phe, Trp, Tyr, or Met
SXTLELRSRX

SEQ ID NO: 50605 - protein, 11 aa, Artificial Sequence
  Description of Artificial Sequence: Synthetic peptide
  Seed: SCTLELRSRYW
  misc_feature (2)..(2): Xaa can be Ser, Ala, Arg, Cys, Gln, Gly, His, Ile, Leu, Lys, Met, Phe, Thr, Trp, Tyr, or Val
  misc_feature (11)..(11): Xaa can be Trp or Arg
SXTLELRSRYX

SEQ ID NO: 50606 - protein, 9 aa, Artificial Sequence
  Description of Artificial Sequence: Synthetic peptide
  Seed: SDEKAASPI
  misc_feature (2)..(2): Xaa can be Glu, Gln, or Asp
  misc_feature (9)..(9): Xaa can be Ile, Leu, Met, Phe, Val, Ala, or Cys
SXEKAASPX

SEQ ID NO: 50607 - protein, 10 aa, Artificial Sequence
  Description of Artificial Sequence: Synthetic peptide
  Seed: SDEKAASPIV
  misc_feature (2)..(2): Xaa can be Glu, Ala, Arg, Asn, Asp, Cys, Gln, Gly, His, Ile, Leu, Lys, Met, Phe, Pro, Ser, Thr, Trp, Tyr, or Val
  misc_feature (10)..(10): Xaa can be Ala, Ile, Leu, Met, Phe, Val, or Pro
SXEKAASPIX

SEQ ID NO: 50608 - protein, 9 aa, Artificial Sequence
  Description of Artificial Sequence: Synthetic peptide
  Seed: SDEKATNPI
  misc_feature (2)..(2): Xaa can be Glu, Gln, or Asp
  misc_feature (9)..(9): Xaa can be Ile, Leu, Met, Phe, Val, or Ala
SXEKATNPX

SEQ ID NO: 50609 - protein, 9 aa, Artificial Sequence
  Description of Artificial Sequence: Synthetic peptide
  Seed: SDEKATSPI
  misc_feature (2)..(2): Xaa can be Glu, Gln, or Asp
  misc_feature (9)..(9): Xaa can be Ile, Leu, Met, Phe, Val, Ala, or Cys
SXEKATSPX

SEQ ID NO: 50610 - protein, 10 aa, Artificial Sequence
  Description of Artificial Sequence: Synthetic peptide
  Seed: SDENATNPIV
  misc_feature (2)..(2): Xaa can be Glu, Ala, Arg, Asn, Asp, Cys, Gln, Gly, His, Ile, Leu, Lys, Met, Phe, Pro, Ser, Thr, Trp, Tyr, or Val
  misc_feature (10)..(10): Xaa can be Ala, Ile, Pro, Val, or Leu
SXENATNPIX

SEQ ID NO: 50611 - protein, 10 aa, Artificial Sequence
  Description of Artificial Sequence: Synthetic peptide
  Seed: SDMRAEIIKM
  misc_feature (2)..(2): Xaa can be Gln, Met, Ala, Arg, Asn, Asp, Cys, Glu, Gly, His, Ile, Leu, Lys, Phe, Pro, Ser, Thr, Trp, Tyr, or Val
  misc_feature (10)..(10): Xaa can be Met, Phe, Tyr, or Leu
SXMRAEIIKX

SEQ ID NO: 50612 - protein, 10 aa, Artificial Sequence
  Description of Artificial Sequence: Synthetic peptide
  Seed: SDMRAEIIRL
  misc_feature (2)..(2): Xaa can be Leu, Met, Asp, Ala, Arg, Asn, Cys, Gln, Glu, Gly, His, Ile, Lys, Phe, Pro, Ser, Thr, Trp, Tyr, or Val
  misc_feature (10)..(10): Xaa can be Ala, Ile, Leu, Val, Met, or Thr
SXMRAEIIRX

SEQ ID NO: 50613 - protein, 11 aa, Artificial Sequence
  Description of Artificial Sequence: Synthetic peptide
  Seed: SDMRAEIIRLM
  misc_feature (2)..(2): Xaa can be Arg, Gln, Ala, Asn, Asp, Cys, Glu, Gly, His, Ile, Leu, Lys, Met, Phe, Pro, Ser, Thr, Trp, Tyr, or Val
  misc_feature (11)..(11): Xaa can be Ile, Leu, Met, Phe, Val, Ala, Arg, Asn, Asp, Cys, Gln, Glu, Gly, His, Lys, Pro, Ser, Thr, Trp, or Tyr
SXMRAEIIRLX

SEQ ID NO: 50614 - protein, 8 aa, Artificial Sequence
  Description of Artificial Sequence: Synthetic peptide
  Seed: SDMRIEII
  misc_feature (2)..(2): Xaa can be Asp or Glu
  misc_feature (8)..(8): Xaa can be Ile or Leu
SXMRIEIX

SEQ ID NO: 50615 - protein, 11 aa, Artificial Sequence
  Description of Artificial Sequence: Synthetic peptide
  Seed: SDMRIEIIRMM
  misc_feature (2)..(2): Xaa can be Arg, Ala, Asn, Asp, Cys, Gln, Glu, Gly, His, Ile, Leu, Lys, Met, Phe, Pro, Ser, Thr, Trp, Tyr, or Val
  misc_feature (11)..(11): Xaa can be Ile, Leu, Met, Phe, Ala, Arg, Cys, Gly, Lys, Pro, Ser, Thr, Trp, Tyr, or Val
SXMRIEIIRMX

SEQ ID NO: 50616 - protein, 10 aa, Artificial Sequence
  Description of Artificial Sequence: Synthetic peptide
  Seed: SDMRTEIIRI
  misc_feature (2)..(2): Xaa can be Leu, Met, Ala, Arg, Asn, Asp, Cys, Gln, Glu, Gly, His, Ile, Lys, Phe, Pro, Ser, Thr, Trp, Tyr, or Val
  misc_feature (10)..(10): Xaa can be Ala, Ile, Leu, Val, Met, or Thr
SXMRTEIIRX

SEQ ID NO: 50617 - protein, 11 aa, Artificial Sequence
  Description of Artificial Sequence: Synthetic peptide
  Seed: SDMRTEIIRLM
  misc_feature (2)..(2): Xaa can be Arg, Gln, Ala, Asn, Asp, Cys, Glu, Gly, His, Ile, Leu, Lys, Met, Phe, Pro, Ser, Thr, Trp, Tyr, or Val
  misc_feature (11)..(11): Xaa can be Leu, Met, Phe, Ile, Ala, Arg, Asn, Asp, Cys, Gln, Glu, Gly, His, Lys, Pro, Ser, Thr, Trp, Tyr, or Val
SXMRTEIIRLX

SEQ ID NO: 50618 - protein, 10 aa, Artificial Sequence
  Description of Artificial Sequence: Synthetic peptide
  Seed: SFDMNNEGSY
  misc_feature (2)..(2): Xaa can be Phe, Tyr, Ala, Asn, Gln, Gly, Ile, Leu, Met, Ser, Thr, Trp, or Val
  misc_feature (10)..(10): Xaa can be Tyr, Leu, Met, or Phe
SXDMNNEGSX

SEQ ID NO: 50619 - protein, 11 aa, Artificial Sequence
  Description of Artificial Sequence: Synthetic peptide
  Seed: SFDMNNEGSYF
  misc_feature (2)..(2): Xaa can be Gln, Tyr, Ala, Arg, Asn, Asp, Cys, Glu, Gly, His, Ile, Leu, Lys, Met, Phe, Pro, Ser, Thr, Trp, or Val
  misc_feature (11)..(11): Xaa can be Phe, Tyr, Met, or Trp
SXDMNNEGSYX

SEQ ID NO: 50620 - protein, 10 aa, Artificial Sequence
  Description of Artificial Sequence: Synthetic peptide
  Seed: SFDMSKEGSY
  misc_feature (2)..(2): Xaa can be Tyr, Phe, Ala, Asn, Gln, Gly, Ile, Leu, Met, Ser, Thr, Trp, or Val
  misc_feature (10)..(10): Xaa can be Tyr, Met, Phe, or Leu
SXDMSKEGSX

SEQ ID NO: 50621 - protein, 11 aa, Artificial Sequence
  Description of Artificial Sequence: Synthetic peptide
  Seed: SFDMSKEGSYF
  misc_feature (2)..(2): Xaa can be Ala, Arg, Asn, Asp, Cys, Gln, Glu, Gly, His, Ile, Leu, Lys, Met, Phe, Pro, Ser, Thr, Trp, Tyr, or Val
  misc_feature (11)..(11): Xaa can be Phe or Tyr
SXDMSKEGSYX

SEQ ID NO: 50622 - protein, 10 aa, Artificial Sequence
  Description of Artificial Sequence: Synthetic peptide
  Seed: SFDMSNEGSY
  misc_feature (2)..(2): Xaa can be Phe, Tyr, Trp, Ala, Asn, Gln, Gly, His, Ile, Leu, Met, Ser, Thr, or Val
  misc_feature (10)..(10): Xaa can be Tyr, Phe, Leu, or Met
SXDMSNEGSX

SEQ ID NO: 50623 - protein, 11 aa, Artificial Sequence
  Description of Artificial Sequence: Synthetic peptide
  Seed: SFDMSNEGSYF
  misc_feature (2)..(2): Xaa can be Gln, Ala, Arg, Asn, Asp, Cys, Glu, Gly, His, Ile, Leu, Lys, Met, Phe, Pro, Ser, Thr, Trp, Tyr, or Val
  misc_feature (11)..(11): Xaa can be Phe, Tyr, or Met
SXDMSNEGSYX

SEQ ID NO: 50624 - protein, 9 aa, Artificial Sequence
  Description of Artificial Sequence: Synthetic peptide
  Seed: SFIKGTKVL
  misc_feature (2)..(2): Xaa can be Tyr, Phe, Trp, Ala, Arg, His, Leu, Met, Thr, Val, Ile, or Ser
  misc_feature (9)..(9): Xaa can be Met, Phe, Tyr, Leu, Ile, Trp, Val, Ala, His, Cys, or Thr
SXIKGTKVX

SEQ ID NO: 50625 - protein, 11 aa, Artificial Sequence
  Description of Artificial Sequence: Synthetic peptide
  Seed: SFIKGTKVLPR
  misc_feature (2)..(2): Xaa can be Met, Phe, Thr, Trp, Tyr, Ala, Arg, Asn, Gln, Gly, Ile, Leu, Lys, Ser, or Val
  misc_feature (11)..(11): Xaa can be Arg or Lys
SXIKGTKVLPX

SEQ ID NO: 50626 - protein, 11 aa, Artificial Sequence
  Description of Artificial Sequence: Synthetic peptide
  Seed: SFIKGTKVVPR
  misc_feature (2)..(2): Xaa can be Met, Phe, Thr, Trp, Tyr, Ala, Arg, Asn, Gln, Gly, Ile, Leu, Lys, Ser, or Val
  misc_feature (11)..(11): Xaa can be Arg or Lys
SXIKGTKVVPX

SEQ ID NO: 50627 - protein, 9 aa, Artificial Sequence
  Description of Artificial Sequence: Synthetic peptide
  Seed: SFIRGAKVV
  misc_feature (2)..(2): Xaa can be Tyr, Phe, Trp, His, Met, Ala, Arg, Leu, or Val
  misc_feature (9)..(9): Xaa can be Met, Phe, Tyr, Leu, Ile, Val, His, Trp, Ala, or Cys
SXIRGAKVX

SEQ ID NO: 50628 - protein, 11 aa, Artificial Sequence
  Description of Artificial Sequence: Synthetic peptide
  Seed: SFIRGAKVVPR
  misc_feature (2)..(2): Xaa can be Met, Phe, Thr, Trp, Tyr, Val, Ala, Arg, Asn, Gln, Gly, His, Ile, Leu, Lys, or Ser
  misc_feature (11)..(11): Xaa can be Arg or Lys
SXIRGAKVVPX

SEQ ID NO: 50629 - protein, 9 aa, Artificial Sequence
  Description of Artificial Sequence: Synthetic peptide
  Seed: SFIRGARVL
  misc_feature (2)..(2): Xaa can be Tyr, Phe, Trp, Ala, Arg, His, Leu, Met, Val, Ile, Ser, Thr, or Gln
  misc_feature (9)..(9): Xaa can be Met, Phe, Tyr, Leu, Ile, Trp, Val, Ala, His, Cys, or Thr
SXIRGARVX

SEQ ID NO: 50630 - protein, 10 aa, Artificial Sequence
  Description of Artificial Sequence: Synthetic peptide
  Seed: SFIRGARVLP
  misc_feature (2)..(2): Xaa can be Thr, Ser, Tyr, Val, Arg, Met, Ala, Lys, Phe, Asn, Asp, Cys, Gln, Glu, Gly, His, Ile, Leu, Pro, or Trp
  misc_feature (10)..(10): Xaa can be Ala, Gly, Ile, Leu, Lys, Met, Ser, Tyr, Val, Pro, Arg, Phe, Thr, Gln, Asn, Cys, Glu, or Hi s
SXIRGARVLX

SEQ ID NO: 50631 - protein, 11 aa, Artificial Sequence
  Description of Artificial Sequence: Synthetic peptide
  Seed: SFIRGARVLPR
  misc_feature (2)..(2): Xaa can be Gln, Met, Phe, Ser, Thr, Trp, Tyr, Val, Ala, Arg, Asn, Gly, His, Ile, Leu, or Lys
  misc_feature (11)..(11): Xaa can be Arg or Lys
SXIRGARVLPX

SEQ ID NO: 50632 - protein, 11 aa, Artificial Sequence
  Description of Artificial Sequence: Synthetic peptide
  Seed: SFIRGARVVPR
  misc_feature (2)..(2): Xaa can be Gln, Met, Phe, Ser, Thr, Trp, Tyr, Val, Ala, Arg, Asn, Cys, Gly, His, Ile, Leu, or Lys
  misc_feature (11)..(11): Xaa can be Arg or Lys
SXIRGARVVPX

SEQ ID NO: 50633 - protein, 9 aa, Artificial Sequence
  Description of Artificial Sequence: Synthetic peptide
  Seed: SFIRGKKVV
  misc_feature (2)..(2): Xaa can be Tyr, Phe, Trp, or Met
  misc_feature (9)..(9): Xaa can be Met, Phe, Tyr, Leu, Ile, Val, or Trp
SXIRGKKVX

SEQ ID NO: 50634 - protein, 11 aa, Artificial Sequence
  Description of Artificial Sequence: Synthetic peptide
  Seed: SFIRGKKVVPR
  misc_feature (2)..(2): Xaa can be Met, Phe, Thr, Trp, Tyr, Ala, Arg, Asn, Gln, Gly, Ile, Leu, Ser, or Val
  misc_feature (11)..(11): Xaa can be Arg or Lys
SXIRGKKVVPX

SEQ ID NO: 50635 - protein, 9 aa, Artificial Sequence
  Description of Artificial Sequence: Synthetic peptide
  Seed: SFIRGKRVV
  misc_feature (2)..(2): Xaa can be Tyr, Phe, Trp, Met, His, Ala, or Leu
  misc_feature (9)..(9): Xaa can be Met, Phe, Leu, Tyr, Ile, Val, Trp, Ala, or His
SXIRGKRVX

SEQ ID NO: 50636 - protein, 11 aa, Artificial Sequence
  Description of Artificial Sequence: Synthetic peptide
  Seed: SFIRGKRVVPR
  misc_feature (2)..(2): Xaa can be Met, Phe, Thr, Trp, Tyr, Val, Ala, Arg, Asn, Gln, Gly, His, Ile, Leu, Lys, or Ser
  misc_feature (11)..(11): Xaa can be Arg or Lys
SXIRGKRVVPX

SEQ ID NO: 50637 - protein, 11 aa, Artificial Sequence
  Description of Artificial Sequence: Synthetic peptide
  Seed: SFIRGTKVCPR
  misc_feature (2)..(2): Xaa can be Met, Phe, Ser, Thr, Trp, Tyr, Val, Ala, Arg, Asn, Gln, Gly, Ile, Leu, or Lys
  misc_feature (11)..(11): Xaa can be Arg or Lys
SXIRGTKVCPX

SEQ ID NO: 50638 - protein, 9 aa, Artificial Sequence
  Description of Artificial Sequence: Synthetic peptide
  Seed: SFIRGTKVF
  misc_feature (2)..(2): Xaa can be Tyr, Phe, Trp, Ala, His, Met, Arg, Leu, Thr, Val, Ile, or Ser
  misc_feature (9)..(9): Xaa can be Met, Phe, Tyr, Leu, Ile, Trp, Val, Ala, His, Cys, or Thr
SXIRGTKVX

SEQ ID NO: 50639 - protein, 11 aa, Artificial Sequence
  Description of Artificial Sequence: Synthetic peptide
  Seed: SFIRGTKVFPR
  misc_feature (2)..(2): Xaa can be Ala, Arg, Gln, Ile, Leu, Met, Phe, Ser, Thr, Trp, Tyr, Val, Asn, Cys, Glu, Gly, His, or Ly s
  misc_feature (11)..(11): Xaa can be Arg or Lys
SXIRGTKVFPX

SEQ ID NO: 50640 - protein, 11 aa, Artificial Sequence
  Description of Artificial Sequence: Synthetic peptide
  Seed: SFIRGTKVIPR
  misc_feature (2)..(2): Xaa can be Met, Phe, Thr, Trp, Tyr, Ala, Arg, Asn, Gln, Gly, His, Ile, Leu, Lys, Ser, or Val
  misc_feature (11)..(11): Xaa can be Arg or Lys
SXIRGTKVIPX

SEQ ID NO: 50641 - protein, 11 aa, Artificial Sequence
  Description of Artificial Sequence: Synthetic peptide
  Seed: SFIRGTKVSPR
  misc_feature (2)..(2): Xaa can be Met, Phe, Thr, Trp, Tyr, Ala, Arg, Asn, Gln, Gly, Ile, Leu, Ser, or Val
  misc_feature (11)..(11): Xaa can be Arg or Lys
SXIRGTKVSPX

SEQ ID NO: 50642 - protein, 11 aa, Artificial Sequence
  Description of Artificial Sequence: Synthetic peptide
  Seed: SFIRGTKVVPR
  misc_feature (2)..(2): Xaa can be Met, Phe, Thr, Trp, Tyr, Val, Ala, Arg, Asn, Gln, Gly, His, Ile, Leu, Lys, or Ser
  misc_feature (11)..(11): Xaa can be Arg or Lys
SXIRGTKVVPX

SEQ ID NO: 50643 - protein, 9 aa, Artificial Sequence
  Description of Artificial Sequence: Synthetic peptide
  Seed: SFIRGTRIV
  misc_feature (2)..(2): Xaa can be Tyr, Phe, Trp, Ala, Arg, His, Leu, Met, Val, Ile, Ser, Thr, or Gln
  misc_feature (9)..(9): Xaa can be Met, Phe, Tyr, Leu, Ile, Trp, Val, Ala, His, Cys, or Thr
SXIRGTRIX

SEQ ID NO: 50644 - protein, 11 aa, Artificial Sequence
  Description of Artificial Sequence: Synthetic peptide
  Seed: SFIRGTRIVPR
  misc_feature (2)..(2): Xaa can be Gln, Ile, Leu, Met, Phe, Ser, Thr, Trp, Tyr, Val, Ala, Arg, Asn, Cys, Gly, His, or Lys
  misc_feature (11)..(11): Xaa can be Arg or Lys
SXIRGTRIVPX

SEQ ID NO: 50645 - protein, 8 aa, Artificial Sequence
  Description of Artificial Sequence: Synthetic peptide
  Seed: SFIRGTRL
  misc_feature (2)..(2): Xaa can be Tyr, Phe, or Trp
  misc_feature (8)..(8): Xaa can be Met, Phe, Leu, Tyr, Ile, or Val
SXIRGTRX

SEQ ID NO: 50646 - protein, 9 aa, Artificial Sequence
  Description of Artificial Sequence: Synthetic peptide
  Seed: SFIRGTRLV
  misc_feature (2)..(2): Xaa can be Tyr, Phe, Trp, Met, Ala, His, Arg, Ile, Leu, Ser, Thr, Val, or Gln
  misc_feature (9)..(9): Xaa can be Phe, Met, Tyr, Leu, Trp, Ile, Val, Ala, His, Cys, or Thr
SXIRGTRLX

SEQ ID NO: 50647 - protein, 11 aa, Artificial Sequence
  Description of Artificial Sequence: Synthetic peptide
  Seed: SFIRGTRLVPR
  misc_feature (2)..(2): Xaa can be Gln, Ile, Leu, Met, Phe, Ser, Thr, Trp, Tyr, Val, Ala, Arg, Asn, Cys, Gly, His, or Lys
  misc_feature (11)..(11): Xaa can be Arg or Lys
SXIRGTRLVPX

SEQ ID NO: 50648 - protein, 9 aa, Artificial Sequence
  Description of Artificial Sequence: Synthetic peptide
  Seed: SFIRGTRMV
  misc_feature (2)..(2): Xaa can be Tyr, Phe, Trp, His, Met, Ala, Val, Arg, or Leu
  misc_feature (9)..(9): Xaa can be Met, Phe, Tyr, Leu, Ile, Val, Ala, His, Trp, Cys, or Thr
SXIRGTRMX

SEQ ID NO: 50649 - protein, 11 aa, Artificial Sequence
  Description of Artificial Sequence: Synthetic peptide
  Seed: SFIRGTRMVPR
  misc_feature (2)..(2): Xaa can be Gln, Ile, Leu, Met, Phe, Ser, Thr, Trp, Tyr, Val, Ala, Arg, Asn, Cys, Gly, His, or Lys
  misc_feature (11)..(11): Xaa can be Arg or Lys
SXIRGTRMVPX

SEQ ID NO: 50650 - protein, 9 aa, Artificial Sequence
  Description of Artificial Sequence: Synthetic peptide
  Seed: SFIRGTRVA
  misc_feature (2)..(2): Xaa can be Tyr, Phe, Trp, Met, Ala, Arg, Gln, His, Ile, Leu, Ser, Thr, Val, or Pro
  misc_feature (9)..(9): Xaa can be Met, Phe, Tyr, Leu, Ile, Val, Trp, Ala, Cys, His, Thr, Gln, or Ser
SXIRGTRVX

SEQ ID NO: 50651 - protein, 11 aa, Artificial Sequence
  Description of Artificial Sequence: Synthetic peptide
  Seed: SFIRGTRVAPR
  misc_feature (2)..(2): Xaa can be Gln, Met, Phe, Ser, Thr, Trp, Tyr, Val, Ala, Arg, Asn, Gly, His, Ile, Leu, or Lys
  misc_feature (11)..(11): Xaa can be Arg or Lys
SXIRGTRVAPX

SEQ ID NO: 50652 - protein, 11 aa, Artificial Sequence
  Description of Artificial Sequence: Synthetic peptide
  Seed: SFIRGTRVIPR
  misc_feature (2)..(2): Xaa can be Gln, Met, Phe, Ser, Thr, Trp, Tyr, Val, Ala, Arg, Asn, Cys, Gly, His, Ile, Leu, or Lys
  misc_feature (11)..(11): Xaa can be Arg or Lys
SXIRGTRVIPX

SEQ ID NO: 50653 - protein, 11 aa, Artificial Sequence
  Description of Artificial Sequence: Synthetic peptide
  Seed: SFIRGTRVLPR
  misc_feature (2)..(2): Xaa can be Met, Phe, Thr, Trp, Tyr, Val, Ala, Arg, Asn, Gln, Gly, His, Ile, Leu, Lys, or Ser
  misc_feature (11)..(11): Xaa can be Arg or Lys
SXIRGTRVLPX

SEQ ID NO: 50654 - protein, 11 aa, Artificial Sequence
  Description of Artificial Sequence: Synthetic peptide
  Seed: SFIRGTRVVPR
  misc_feature (2)..(2): Xaa can be Gln, Met, Phe, Ser, Thr, Trp, Tyr, Val, Ala, Arg, Asn, Cys, Gly, His, Ile, Leu, or Lys
  misc_feature (11)..(11): Xaa can be Arg or Lys
SXIRGTRVVPX

SEQ ID NO: 50655 - protein, 8 aa, Artificial Sequence
  Description of Artificial Sequence: Synthetic peptide
  Seed: SFQGRGVF
  misc_feature (2)..(2): Xaa can be Tyr, Phe, or Trp
  misc_feature (8)..(8): Xaa can be Met, Phe, Leu, Tyr, Ile, or Val
SXQGRGVX

SEQ ID NO: 50656 - protein, 10 aa, Artificial Sequence
  Description of Artificial Sequence: Synthetic peptide
  Seed: SFQGRGVFEF
  misc_feature (2)..(2): Xaa can be Tyr, Phe, Trp, Met, Pro, Ser, Thr, Val, His, or Lys
  misc_feature (10)..(10): Xaa can be Phe, Tyr, Met, Trp, Ile, Leu, or Val
SXQGRGVFEX

SEQ ID NO: 50657 - protein, 8 aa, Artificial Sequence
  Description of Artificial Sequence: Synthetic peptide
  Seed: SFRGRGVF
  misc_feature (2)..(2): Xaa can be Phe, Tyr, or Trp
  misc_feature (8)..(8): Xaa can be Met, Phe, Leu, or Tyr
SXRGRGVX

SEQ ID NO: 50658 - protein, 9 aa, Artificial Sequence
  Description of Artificial Sequence: Synthetic peptide
  Seed: SFRGRGVFE
  misc_feature (2)..(2): Xaa can be Thr, Met, Ser, Val, Ala, Gln, Phe, Tyr, Ile, Leu, Gly, Trp, Asn, Cys, Arg, Glu, His, or Ly s
  misc_feature (9)..(9): Xaa can be Lys, Ala, Val, Arg, Gly, Ile, Leu, Met, Ser, Tyr, Phe, Pro, Thr, Asn, Gln, His, Cys, Glu, Trp, or Asp
SXRGRGVFX

SEQ ID NO: 50659 - protein, 10 aa, Artificial Sequence
  Description of Artificial Sequence: Synthetic peptide
  Seed: SFRGRGVFEL
  misc_feature (2)..(2): Xaa can be Thr, Ser, Tyr, Val, Met, Phe, Ala, Ile, Trp, Gln, Gly, Leu, Asn, Arg, Cys, His, Lys, Asp, Glu, or Pro
  misc_feature (10)..(10): Xaa can be Ile, Leu, Met, Phe, Lys, Ala, Val, Tyr, Ser, Gly, Arg, Thr, Trp, Pro, Cys, Asn, Gln, or Hi s
SXRGRGVFEX

SEQ ID NO: 50660 - protein, 10 aa, Artificial Sequence
  Description of Artificial Sequence: Synthetic peptide
  Seed: SFRMLQNSQV
  misc_feature (2)..(2): Xaa can be Thr, Ser, Val, Tyr, Ala, Arg, Gln, Gly, Ile, Met, Phe, Trp, Asn, Asp, Cys, Glu, His, Leu, Lys, or Pro
  misc_feature (10)..(10): Xaa can be Arg, Ile, Leu, Lys, Met, Phe, Tyr, Val, Ala, Ser, Thr, Gly, or Trp
SXRMLQNSQX

SEQ ID NO: 50661 - protein, 11 aa, Artificial Sequence
  Description of Artificial Sequence: Synthetic peptide
  Seed: SFRMLQNSQVF
  misc_feature (2)..(2): Xaa can be Tyr, Gln, Phe, Met, Trp, Ala, Arg, Asn, Asp, Cys, Glu, Gly, His, Ile, Leu, Lys, Pro, Ser, Thr, or Val
  misc_feature (11)..(11): Xaa can be Met, Phe, Tyr, Leu, Trp, Ile, or Val
SXRMLQNSQVX

SEQ ID NO: 50662 - protein, 8 aa, Artificial Sequence
  Description of Artificial Sequence: Synthetic peptide
  Seed: SFSVQRNL
  misc_feature (2)..(2): Xaa can be Tyr or Phe
  misc_feature (8)..(8): Xaa can be Leu, Met, Phe, or Tyr
SXSVQRNX

SEQ ID NO: 50663 - protein, 10 aa, Artificial Sequence
  Description of Artificial Sequence: Synthetic peptide
  Seed: SFSVQRNLPF
  misc_feature (2)..(2): Xaa can be Gln, Tyr, Ala, Arg, Asn, Asp, Cys, Glu, Gly, His, Ile, Leu, Lys, Met, Phe, Pro, Ser, Thr, Trp, or Val
  misc_feature (10)..(10): Xaa can be Leu, Met, Phe, Trp, Tyr, Ile, His, or Val
SXSVQRNLPX

SEQ ID NO: 50664 - protein, 9 aa, Artificial Sequence
  Description of Artificial Sequence: Synthetic peptide
  Seed: SGAAGAAIK
  misc_feature (2)..(2): Xaa can be Thr, Val, Ile, Ser, Ala, Gln, Gly, Leu, or Met
  misc_feature (9)..(9): Xaa can be Lys, Arg, or Tyr
SXAAGAAIX

SEQ ID NO: 50665 - protein, 10 aa, Artificial Sequence
  Description of Artificial Sequence: Synthetic peptide
  Seed: SGQISIQPTF
  misc_feature (2)..(2): Xaa can be Ala, Arg, Asn, Asp, Cys, Gln, Glu, Gly, His, Ile, Leu, Lys, Met, Phe, Pro, Ser, Thr, Trp, Tyr, or Val
  misc_feature (10)..(10): Xaa can be Ile, Leu, Met, Phe, Trp, or Tyr
SXQISIQPTX

SEQ ID NO: 50666 - protein, 10 aa, Artificial Sequence
  Description of Artificial Sequence: Synthetic peptide
  Seed: SGYAFEKEGY
  misc_feature (2)..(2): Xaa can be Ala, Gln, Gly, Ile, Leu, Met, Phe, Ser, Thr, Trp, Tyr, or Val
  misc_feature (10)..(10): Xaa can be Tyr
SXYAFEKEGX

SEQ ID NO: 50667 - protein, 10 aa, Artificial Sequence
  Description of Artificial Sequence: Synthetic peptide
  Seed: SGYDFEREGY
  misc_feature (2)..(2): Xaa can be Ala, Asn, Gln, Gly, Ile, Leu, Met, Phe, Ser, Thr, Trp, Tyr, or Val
  misc_feature (10)..(10): Xaa can be Tyr
SXYDFEREGX

SEQ ID NO: 50668 - protein, 10 aa, Artificial Sequence
  Description of Artificial Sequence: Synthetic peptide
  Seed: SGYEFEREGY
  misc_feature (2)..(2): Xaa can be Ala, Gln, Gly, Ile, Leu, Met, Phe, Ser, Thr, Trp, Tyr, or Val
  misc_feature (10)..(10): Xaa can be Tyr
SXYEFEREGX

SEQ ID NO: 50669 - protein, 10 aa, Artificial Sequence
  Description of Artificial Sequence: Synthetic peptide
  Seed: SGYNFEKEGY
  misc_feature (2)..(2): Xaa can be Ala, Gln, Gly, Ile, Leu, Met, Phe, Ser, Thr, Trp, Tyr, or Val
  misc_feature (10)..(10): Xaa can be Tyr
SXYNFEKEGX

SEQ ID NO: 50670 - protein, 10 aa, Artificial Sequence
  Description of Artificial Sequence: Synthetic peptide
  Seed: SIQPTFSVQR
  misc_feature (2)..(2): Xaa can be Ile, Met, Thr, Val, Ala, Arg, Asn, Asp, Cys, Gln, Glu, Gly, His, Leu, Lys, Phe, Pro, Ser, Trp, or Tyr
  misc_feature (10)..(10): Xaa can be Arg, Lys, or Tyr
SXQPTFSVQX

SEQ ID NO: 50671 - protein, 9 aa, Artificial Sequence
  Description of Artificial Sequence: Synthetic peptide
  Seed: SITLELRSK
  misc_feature (2)..(2): Xaa can be Ile, Ser, Thr, Ala, Gln, Leu, Met, Phe, Tyr, or Val
  misc_feature (9)..(9): Xaa can be Arg or Lys
SXTLELRSX

SEQ ID NO: 50672 - protein, 10 aa, Artificial Sequence
  Description of Artificial Sequence: Synthetic peptide
  Seed: SITLELRSKY
  misc_feature (2)..(2): Xaa can be Ser, Ala, Arg, Asn, Asp, Cys, Gln, Glu, Gly, His, Ile, Leu, Lys, Met, Phe, Pro, Thr, Trp, Tyr, or Val
  misc_feature (10)..(10): Xaa can be Phe, Trp, Tyr, or Met
SXTLELRSKX

SEQ ID NO: 50673 - protein, 11 aa, Artificial Sequence
  Description of Artificial Sequence: Synthetic peptide
  Seed: SITLELRSKYW
  misc_feature (2)..(2): Xaa can be Ser, Thr, Ala, Arg, Cys, Gln, Gly, His, Ile, Leu, Lys, Met, Phe, Trp, Tyr, or Val
  misc_feature (11)..(11): Xaa can be Trp or Phe
SXTLELRSKYX

SEQ ID NO: 50674 - protein, 9 aa, Artificial Sequence
  Description of Artificial Sequence: Synthetic peptide
  Seed: SITMERMVL
  misc_feature (2)..(2): Xaa can be Pro, Ala, Ser, Thr, Val, Gly, Ile, Met, Cys, Gln, or Leu
  misc_feature (9)..(9): Xaa can be Met, Leu, Phe, Tyr, Ile, Val, Trp, Ala, Cys, Gly, Ser, or Thr
SXTMERMVX

SEQ ID NO: 50675 - protein, 9 aa, Artificial Sequence
  Description of Artificial Sequence: Synthetic peptide
  Seed: SIVSSTLEL
  misc_feature (2)..(2): Xaa can be Gln, Met, Tyr, Leu, Ala, Phe, Lys, His, Ser, Val, Ile, Thr, Trp, Arg, Glu, Asn, Cys, Gly, or Pro
  misc_feature (9)..(9): Xaa can be Met, Phe, Tyr, Leu, Ile, Val, Trp, Ala, His, Cys, Thr, Ser, or Gly
SXVSSTLEX

SEQ ID NO: 50676 - protein, 10 aa, Artificial Sequence
  Description of Artificial Sequence: Synthetic peptide
  Seed: SIVSSTLELR
  misc_feature (2)..(2): Xaa can be Ala, Gln, Ile, Leu, Met, Ser, Thr, Val, Arg, Asn, Asp, Cys, Glu, Gly, His, Lys, Phe, Pro, Trp, or Tyr
  misc_feature (10)..(10): Xaa can be Arg, Lys, or Tyr
SXVSSTLELX

SEQ ID NO: 50677 - protein, 8 aa, Artificial Sequence
  Description of Artificial Sequence: Synthetic peptide
  Seed: SLIGIDPF
  misc_feature (2)..(2): Xaa can be Gln, Lys, Met, Ala, His, Leu, Ile, or Val
  misc_feature (8)..(8): Xaa can be Tyr, Phe, Met, or Leu
SXIGIDPX

SEQ ID NO: 50678 - protein, 9 aa, Artificial Sequence
  Description of Artificial Sequence: Synthetic peptide
  Seed: SLIGIDPFK
  misc_feature (2)..(2): Xaa can be Thr, Ala, Ile, Met, Ser, Val, Asn, Gln, Gly, Leu, Phe, Pro, Trp, Tyr, Asp, Cys, or His
  misc_feature (9)..(9): Xaa can be Arg, Lys, Tyr, Gln, or His
SXIGIDPFX

SEQ ID NO: 50679 - protein, 10 aa, Artificial Sequence
  Description of Artificial Sequence: Synthetic peptide
  Seed: SLIGIDPFKL
  misc_feature (2)..(2): Xaa can be Leu, Met, Gln, Val, Ile, Thr, Ala, Phe, or Ser
  misc_feature (10)..(10): Xaa can be Val, Ile, Leu, Ala, Met, Cys, Thr, or Phe
SXIGIDPFKX

SEQ ID NO: 50680 - protein, 11 aa, Artificial Sequence
  Description of Artificial Sequence: Synthetic peptide
  Seed: SLIGIDPFKLL
  misc_feature (2)..(2): Xaa can be Leu, Met, Gln, Ile, Thr, or Val
  misc_feature (11)..(11): Xaa can be Val, Ala, Ile, Leu, Arg, Asn, Asp, Cys, Gln, Glu, Gly, His, Lys, Met, Phe, Pro, Ser, Thr, Trp, or Tyr
SXIGIDPFKLX

SEQ ID NO: 50681 - protein, 10 aa, Artificial Sequence
  Description of Artificial Sequence: Synthetic peptide
  Seed: SLIRPKENPA
  misc_feature (2)..(2): Xaa can be Leu, Met, Ile, or Val
  misc_feature (10)..(10): Xaa can be Val, Ala, Ile, or Leu
SXIRPKENPX

SEQ ID NO: 50682 - protein, 10 aa, Artificial Sequence
  Description of Artificial Sequence: Synthetic peptide
  Seed: SLIRPNENPA
  misc_feature (2)..(2): Xaa can be Leu, Met, Gln, Ile, or Val
  misc_feature (10)..(10): Xaa can be Val, Ile, Leu, Ala, or Met
SXIRPNENPX

SEQ ID NO: 50683 - protein, 10 aa, Artificial Sequence
  Description of Artificial Sequence: Synthetic peptide
  Seed: SLIRPNENSA
  misc_feature (2)..(2): Xaa can be Leu, Met, or Ile
  misc_feature (10)..(10): Xaa can be Val, Ala, Ile, or Leu
SXIRPNENSX

SEQ ID NO: 50684 - protein, 10 aa, Artificial Sequence
  Description of Artificial Sequence: Synthetic peptide
  Seed: SLIRSNENPA
  misc_feature (2)..(2): Xaa can be Leu, Met, Gln, Ile, or Val
  misc_feature (10)..(10): Xaa can be Val, Ala, Ile, Leu, or Met
SXIRSNENPX

SEQ ID NO: 50685 - protein, 10 aa, Artificial Sequence
  Description of Artificial Sequence: Synthetic peptide
  Seed: SLMQGSTLPR
  misc_feature (2)..(2): Xaa can be Leu, Met, Ser, Thr, Val, Ala, Arg, Asn, Asp, Cys, Gln, Glu, Gly, His, Ile, Lys, Phe, Pro, Trp, or Tyr
  misc_feature (10)..(10): Xaa can be Arg, Lys, Tyr, or His
SXMQGSTLPX

SEQ ID NO: 50686 - protein, 11 aa, Artificial Sequence
  Description of Artificial Sequence: Synthetic peptide
  Seed: SLMQGSTLPRR
  misc_feature (2)..(2): Xaa can be Ala, Gln, Ile, Leu, Met, Phe, Ser, Thr, Trp, Tyr, Val, Arg, Asn, Gly, His, Lys, Asp, Cys, Glu, or Pro
  misc_feature (11)..(11): Xaa can be Arg, Lys, Ala, Asn, Asp, Cys, Gln, Glu, Gly, His, Ile, Leu, Met, Phe, Pro, Ser, Thr, Trp, Tyr, or Val
SXMQGSTLPRX

SEQ ID NO: 50687 - protein, 9 aa, Artificial Sequence
  Description of Artificial Sequence: Synthetic peptide
  Seed: SLTIERMVL
  misc_feature (2)..(2): Xaa can be Gln, Tyr, Ala, Met, Phe, Ser, Thr, Leu, Lys, Trp, Gly, Val, Arg, Glu, His, Ile, Asn, or Cy s
  misc_feature (9)..(9): Xaa can be Tyr, Phe, Met, Leu, Ile, Val, Trp, Ala, or His
SXTIERMVX

SEQ ID NO: 50688 - protein, 10 aa, Artificial Sequence
  Description of Artificial Sequence: Synthetic peptide
  Seed: SLTIERMVLS
  misc_feature (2)..(2): Xaa can be Met, Leu, Gln, Ile, Val, Phe, Tyr, Ala, Arg, Asn, Asp, Cys, Glu, Gly, His, Lys, Pro, Ser, Thr, or Trp
  misc_feature (10)..(10): Xaa can be Ala, Val, Ile, Leu, Met, Ser, Thr, or Cys
SXTIERMVLX

SEQ ID NO: 50689 - protein, 9 aa, Artificial Sequence
  Description of Artificial Sequence: Synthetic peptide
  Seed: SLTVERMVL
  misc_feature (2)..(2): Xaa can be Leu or Met
  misc_feature (9)..(9): Xaa can be Leu or Val
SXTVERMVX

SEQ ID NO: 50690 - protein, 10 aa, Artificial Sequence
  Description of Artificial Sequence: Synthetic peptide
  Seed: SLTVERMVLS
  misc_feature (2)..(2): Xaa can be Leu, Met, Gln, Ile, Val, Phe, Ala, Arg, Asn, Asp, Cys, Glu, Gly, His, Lys, Pro, Ser, Thr, Trp, or Tyr
  misc_feature (10)..(10): Xaa can be Val, Ala, Ile, Leu, Met, Ser, or Thr
SXTVERMVLX

SEQ ID NO: 50691 - protein, 8 aa, Artificial Sequence
  Description of Artificial Sequence: Synthetic peptide
  Seed: SLVGIDPF
  misc_feature (2)..(2): Xaa can be Met, Gln, or Leu
  misc_feature (8)..(8): Xaa can be Phe, Tyr, or Met
SXVGIDPX

SEQ ID NO: 50692 - protein, 9 aa, Artificial Sequence
  Description of Artificial Sequence: Synthetic peptide
  Seed: SLVGIDPFK
  misc_feature (2)..(2): Xaa can be Thr, Ile, Ser, Val, Ala, Asn, Gln, Gly, Leu, Met, Phe, Pro, Trp, Tyr, or Cys
  misc_feature (9)..(9): Xaa can be Arg, Lys, Tyr, or His
SXVGIDPFX

SEQ ID NO: 50693 - protein, 10 aa, Artificial Sequence
  Description of Artificial Sequence: Synthetic peptide
  Seed: SLVGIDPFKL
  misc_feature (2)..(2): Xaa can be Leu, Met, Gln, Ile, Val, Thr, or Ala
  misc_feature (10)..(10): Xaa can be Val, Leu, Ile, Ala, Met, or Thr
SXVGIDPFKX

SEQ ID NO: 50694 - protein, 11 aa, Artificial Sequence
  Description of Artificial Sequence: Synthetic peptide
  Seed: SLVGIDPFKLL
  misc_feature (2)..(2): Xaa can be Leu, Met, or Ile
  misc_feature (11)..(11): Xaa can be Val, Ala, Ile, Leu, or Met
SXVGIDPFKLX

SEQ ID NO: 50695 - protein, 10 aa, Artificial Sequence
  Description of Artificial Sequence: Synthetic peptide
  Seed: SLVGIDPFRL
  misc_feature (2)..(2): Xaa can be Leu, Met, Gln, Ile, Val, Thr, or Ala
  misc_feature (10)..(10): Xaa can be Val, Leu, Ile, Ala, Met, or Thr
SXVGIDPFRX

SEQ ID NO: 50696 - protein, 11 aa, Artificial Sequence
  Description of Artificial Sequence: Synthetic peptide
  Seed: SLVGIDPFRLL
  misc_feature (2)..(2): Xaa can be Leu, Met, or Ile
  misc_feature (11)..(11): Xaa can be Val, Ala, Ile, Leu, or Met
SXVGIDPFRLX

SEQ ID NO: 50697 - protein, 9 aa, Artificial Sequence
  Description of Artificial Sequence: Synthetic peptide
  Seed: SLVGIDSFR
  misc_feature (2)..(2): Xaa can be Thr, Val, Ile, Ala, Met, Leu, Ser, Asn, Cys, Gln, Gly, Phe, Pro, Trp, Tyr, Asp, or His
  misc_feature (9)..(9): Xaa can be Arg, Lys, Tyr, Met, Phe, Val, Ala, His, Leu, Gln, or Ile
SXVGIDSFX

SEQ ID NO: 50698 - protein, 10 aa, Artificial Sequence
  Description of Artificial Sequence: Synthetic peptide
  Seed: SLVGIDSFRM
  misc_feature (2)..(2): Xaa can be Leu, Met, Gln, Ile, Val, or Thr
  misc_feature (10)..(10): Xaa can be Val, Ile, Leu, Ala, Met, or Thr
SXVGIDSFRX

SEQ ID NO: 50699 - protein, 11 aa, Artificial Sequence
  Description of Artificial Sequence: Synthetic peptide
  Seed: SLVGIDSFRML
  misc_feature (2)..(2): Xaa can be Leu, Met, Ile, or Val
  misc_feature (11)..(11): Xaa can be Val, Ala, Ile, or Leu
SXVGIDSFRMX

SEQ ID NO: 50700 - protein, 8 aa, Artificial Sequence
  Description of Artificial Sequence: Synthetic peptide
  Seed: SLVGIEPF
  misc_feature (2)..(2): Xaa can be Gln, Met, or Leu
  misc_feature (8)..(8): Xaa can be Phe, Tyr, or Met
SXVGIEPX

SEQ ID NO: 50701 - protein, 9 aa, Artificial Sequence
  Description of Artificial Sequence: Synthetic peptide
  Seed: SLVGIEPFK
  misc_feature (2)..(2): Xaa can be Thr, Ile, Ser, Val, Ala, Asn, Gln, Gly, Leu, Met, Phe, Pro, Trp, Tyr, Cys, or His
  misc_feature (9)..(9): Xaa can be Arg, Lys, Tyr, or His
SXVGIEPFX

SEQ ID NO: 50702 - protein, 10 aa, Artificial Sequence
  Description of Artificial Sequence: Synthetic peptide
  Seed: SLVGIEPFKL
  misc_feature (2)..(2): Xaa can be Gln, Leu, Met, Ile, Val, Ala, or Thr
  misc_feature (10)..(10): Xaa can be Val, Leu, Ile, Ala, or Met
SXVGIEPFKX

SEQ ID NO: 50703 - protein, 11 aa, Artificial Sequence
  Description of Artificial Sequence: Synthetic peptide
  Seed: SLVGIEPFKLL
  misc_feature (2)..(2): Xaa can be Leu, Met, or Ile
  misc_feature (11)..(11): Xaa can be Val, Ala, Ile, Leu, or Met
SXVGIEPFKLX

SEQ ID NO: 50704 - protein, 8 aa, Artificial Sequence
  Description of Artificial Sequence: Synthetic peptide
  Seed: SLVGVDPF
  misc_feature (2)..(2): Xaa can be Met, Gln, or Leu
  misc_feature (8)..(8): Xaa can be Phe, Tyr, or Met
SXVGVDPX

SEQ ID NO: 50705 - protein, 9 aa, Artificial Sequence
  Description of Artificial Sequence: Synthetic peptide
  Seed: SLVGVDPFK
  misc_feature (2)..(2): Xaa can be Ile, Thr, Val, Ala, Asn, Gln, Leu, Met, Phe, Ser, Trp, Tyr, Cys, Gly, or Pro
  misc_feature (9)..(9): Xaa can be Arg, Lys, or Tyr
SXVGVDPFX

SEQ ID NO: 50706 - protein, 10 aa, Artificial Sequence
  Description of Artificial Sequence: Synthetic peptide
  Seed: SLVGVDPFKL
  misc_feature (2)..(2): Xaa can be Gln, Leu, Met, Ile, Val, or Thr
  misc_feature (10)..(10): Xaa can be Val, Ile, Leu, Ala, or Met
SXVGVDPFKX

SEQ ID NO: 50707 - protein, 11 aa, Artificial Sequence
  Description of Artificial Sequence: Synthetic peptide
  Seed: SLVGVDPFKLL
  misc_feature (2)..(2): Xaa can be Leu, Met, or Ile
  misc_feature (11)..(11): Xaa can be Val, Ile, or Leu
SXVGVDPFKLX

SEQ ID NO: 50708 - protein, 10 aa, Artificial Sequence
  Description of Artificial Sequence: Synthetic peptide
  Seed: SLVRPNENPA
  misc_feature (2)..(2): Xaa can be Leu, Met, Thr, Arg, Ile, Ser, Ala, Asn, Asp, Cys, Gln, Glu, Gly, His, Lys, Phe, Pro, Trp, Tyr, or Val
  misc_feature (10)..(10): Xaa can be Ala, Lys, Val, Ile, or Leu
SXVRPNENPX

SEQ ID NO: 50709 - protein, 10 aa, Artificial Sequence
  Description of Artificial Sequence: Synthetic peptide
  Seed: SNLNDATYQR
  misc_feature (2)..(2): Xaa can be Ala, Arg, Asn, Asp, Cys, Gln, Glu, Gly, His, Ile, Leu, Lys, Met, Phe, Pro, Ser, Thr, Trp, Tyr, or Val
  misc_feature (10)..(10): Xaa can be Arg or Lys
SXLNDATYQX

SEQ ID NO: 50710 - protein, 10 aa, Artificial Sequence
  Description of Artificial Sequence: Synthetic peptide
  Seed: SNLNDSTYQR
  misc_feature (2)..(2): Xaa can be Met, Ala, Arg, Asn, Asp, Cys, Gln, Glu, Gly, His, Ile, Leu, Lys, Phe, Pro, Ser, Thr, Trp, Tyr, or Val
  misc_feature (10)..(10): Xaa can be Arg, Lys, or Tyr
SXLNDSTYQX

SEQ ID NO: 50711 - protein, 10 aa, Artificial Sequence
  Description of Artificial Sequence: Synthetic peptide
  Seed: SNLNDTTYQR
  misc_feature (2)..(2): Xaa can be Ala, Arg, Asn, Gln, Gly, His, Ile, Leu, Lys, Met, Phe, Ser, Thr, Trp, Tyr, Val, Asp, Cys, Glu, or Pro
  misc_feature (10)..(10): Xaa can be Arg or Lys
SXLNDTTYQX

SEQ ID NO: 50712 - protein, 9 aa, Artificial Sequence
  Description of Artificial Sequence: Synthetic peptide
  Seed: SPIVPSFDM
  misc_feature (2)..(2): Xaa can be Pro, Ala, Val, Ile, Met, Ser, or Thr
  misc_feature (9)..(9): Xaa can be Tyr, Phe, Met, Ala, Ile, Leu, or Val
SXIVPSFDX

SEQ ID NO: 50713 - protein, 9 aa, Artificial Sequence
  Description of Artificial Sequence: Synthetic peptide
  Seed: SPIVPSLDM
  misc_feature (2)..(2): Xaa can be Pro, Ala, Ile, Met, Ser, Thr, or Val
  misc_feature (9)..(9): Xaa can be Tyr, Met, Phe, Ala, Ile, Leu, or Val
SXIVPSLDX

SEQ ID NO: 50714 - protein, 8 aa, Artificial Sequence
  Description of Artificial Sequence: Synthetic peptide
  Seed: SPRGKLST
  misc_feature (2)..(2): Xaa can be Pro, Ala, Ile, or Val
  misc_feature (8)..(8): Xaa can be Leu, Ala, Cys, Ile, Met, Phe, Pro, Ser, Thr, or Val
SXRGKLSX

SEQ ID NO: 50715 - protein, 9 aa, Artificial Sequence
  Description of Artificial Sequence: Synthetic peptide
  Seed: SPRGKLSTR
  misc_feature (2)..(2): Xaa can be Ala, Asn, Gly, Ile, Leu, Met, Phe, Pro, Ser, Thr, Trp, Tyr, or Val
  misc_feature (9)..(9): Xaa can be Arg
SXRGKLSTX

SEQ ID NO: 50716 - protein, 10 aa, Artificial Sequence
  Description of Artificial Sequence: Synthetic peptide
  Seed: SPRGKLSTRG
  misc_feature (2)..(2): Xaa can be Pro, Ala, Ile, or Val
  misc_feature (10)..(10): Xaa can be Leu, Met, Ala, Cys, Gly, Ile, Phe, Ser, Thr, Tyr, or Val
SXRGKLSTRX

SEQ ID NO: 50717 - protein, 11 aa, Artificial Sequence
  Description of Artificial Sequence: Synthetic peptide
  Seed: SPRGKLSTRGV
  misc_feature (2)..(2): Xaa can be Pro
  misc_feature (11)..(11): Xaa can be Ala, Cys, Ile, Leu, Met, Phe, Thr, or Val
SXRGKLSTRGX

SEQ ID NO: 50718 - protein, 8 aa, Artificial Sequence
  Description of Artificial Sequence: Synthetic peptide
  Seed: SQGTKRPY
  misc_feature (2)..(2): Xaa can be Gln
  misc_feature (8)..(8): Xaa can be Phe or Tyr
SXGTKRPX

SEQ ID NO: 50719 - protein, 8 aa, Artificial Sequence
  Description of Artificial Sequence: Synthetic peptide
  Seed: SQGTKRSY
  misc_feature (2)..(2): Xaa can be Gln
  misc_feature (8)..(8): Xaa can be Phe or Tyr
SXGTKRSX

SEQ ID NO: 50720 - protein, 8 aa, Artificial Sequence
  Description of Artificial Sequence: Synthetic peptide
  Seed: SQGTTRSY
  misc_feature (2)..(2): Xaa can be Gln, Met, or Lys
  misc_feature (8)..(8): Xaa can be Tyr, Phe, or Met
SXGTTRSX

SEQ ID NO: 50721 - protein, 8 aa, Artificial Sequence
  Description of Artificial Sequence: Synthetic peptide
  Seed: SQIFSLIR
  misc_feature (2)..(2): Xaa can be Gln, Ile, Leu, Met, Phe, Ser, Thr, Trp, Tyr, or Val
  misc_feature (8)..(8): Xaa can be Arg
SXIFSLIX

SEQ ID NO: 50722 - protein, 10 aa, Artificial Sequence
  Description of Artificial Sequence: Synthetic peptide
  Seed: SQIFSLIRPK
  misc_feature (2)..(2): Xaa can be Thr, Ser, Trp, Tyr, Val, Ala, Arg, Asn, Asp, Cys, Gln, Glu, Gly, His, Ile, Leu, Lys, Met, Phe, or Pro
  misc_feature (10)..(10): Xaa can be Arg, Lys, Tyr, Ala, Ile, Val, or His
SXIFSLIRPX

SEQ ID NO: 50723 - protein, 9 aa, Artificial Sequence
  Description of Artificial Sequence: Synthetic peptide
  Seed: SQLAWMACH
  misc_feature (2)..(2): Xaa can be Gln, Met, Lys, Glu, His, Ala, Arg, Ile, Leu, Ser, Thr, Val, Asn, Gly, or Tyr
  misc_feature (9)..(9): Xaa can be Phe, Tyr, Met, Leu, Ile, Trp, His, Ala, or Val
SXLAWMACX

SEQ ID NO: 50724 - protein, 11 aa, Artificial Sequence
  Description of Artificial Sequence: Synthetic peptide
  Seed: SQLAWMACHSA
  misc_feature (2)..(2): Xaa can be Gln, Leu, Met, Val, Thr, Ile, Ala, Phe, or Ser
  misc_feature (11)..(11): Xaa can be Val, Ile, Leu, Ala, or Met
SXLAWMACHSX

SEQ ID NO: 50725 - protein, 9 aa, Artificial Sequence
  Description of Artificial Sequence: Synthetic peptide
  Seed: SQLVWMACH
  misc_feature (2)..(2): Xaa can be Gln, Lys, Arg, Glu, His, Met, Ala, or Ser
  misc_feature (9)..(9): Xaa can be Phe, Tyr, Met, Leu, His, Ile, Trp, or Val
SXLVWMACX

SEQ ID NO: 50726 - protein, 11 aa, Artificial Sequence
  Description of Artificial Sequence: Synthetic peptide
  Seed: SQLVWMACHSA
  misc_feature (2)..(2): Xaa can be Gln, Ala, Ile, Leu, Met, Ser, Thr, or Val
  misc_feature (11)..(11): Xaa can be Val, Ala, Ile, or Leu
SXLVWMACHSX

SEQ ID NO: 50727 - protein, 11 aa, Artificial Sequence
  Description of Artificial Sequence: Synthetic peptide
  Seed: SQLVWMACNSA
  misc_feature (2)..(2): Xaa can be Gln, Ile, Leu, Met, Thr, or Val
  misc_feature (11)..(11): Xaa can be Val, Ala, Ile, or Leu
SXLVWMACNSX

SEQ ID NO: 50728 - protein, 9 aa, Artificial Sequence
  Description of Artificial Sequence: Synthetic peptide
  Seed: SQRAMMDQV
  misc_feature (2)..(2): Xaa can be Thr, Ser, Met, Val, Gln, Ile, Leu, Ala, Tyr, Phe, His, Lys, Trp, Glu, Gly, Arg, Asn, or Cy s
  misc_feature (9)..(9): Xaa can be Lys, Ala, Phe, Tyr, Val, Met, Ile, Leu, Arg, Gly, Thr, Ser, His, Cys, Trp, or Pro
SXRAMMDQX

SEQ ID NO: 50729 - protein, 10 aa, Artificial Sequence
  Description of Artificial Sequence: Synthetic peptide
  Seed: SQRAMMDQVR
  misc_feature (2)..(2): Xaa can be Met, Phe, Thr, Trp, Tyr, Ala, Gln, Gly, Ile, Leu, Ser, or Val
  misc_feature (10)..(10): Xaa can be Arg or Lys
SXRAMMDQVX

SEQ ID NO: 50730 - protein, 10 aa, Artificial Sequence
  Description of Artificial Sequence: Synthetic peptide
  Seed: SQVFSLIRPK
  misc_feature (2)..(2): Xaa can be Thr, Arg, Val, Lys, Ser, Ile, Phe, Trp, Tyr, Ala, Asn, Asp, Cys, Gln, Glu, Gly, His, Leu, Met, or Pro
  misc_feature (10)..(10): Xaa can be Arg, Lys, Met, Tyr, Ala, Val, Phe, Ile, or Leu
SXVFSLIRPX

SEQ ID NO: 50731 - protein, 9 aa, Artificial Sequence
  Description of Artificial Sequence: Synthetic peptide
  Seed: SRNPGNAEF
  misc_feature (2)..(2): Xaa can be Gln, Arg, His, Ala, Glu, Tyr, Asn, Gly, or Ile
  misc_feature (9)..(9): Xaa can be Phe, Met, Tyr, Leu, Ile, Val, Ala, His, or Trp
SXNPGNAEX

SEQ ID NO: 50732 - protein, 9 aa, Artificial Sequence
  Description of Artificial Sequence: Synthetic peptide
  Seed: SRSPGNAEI
  misc_feature (2)..(2): Xaa can be Arg, His, Gln, Tyr, or Lys
  misc_feature (9)..(9): Xaa can be Leu, Met, Phe, Ile, Val, or Tyr
SXSPGNAEX

SEQ ID NO: 50733 - protein, 9 aa, Artificial Sequence
  Description of Artificial Sequence: Synthetic peptide
  Seed: SRYRAIRTR
  misc_feature (2)..(2): Xaa can be Arg
  misc_feature (9)..(9): Xaa can be Ala, Arg, Cys, Gly, His, Ile, Leu, Lys, Met, Phe, Ser, Thr, Trp, Tyr, or Val
SXYRAIRTX

SEQ ID NO: 50734 - protein, 10 aa, Artificial Sequence
  Description of Artificial Sequence: Synthetic peptide
  Seed: SRYRAIRTRS
  misc_feature (2)..(2): Xaa can be Arg
  misc_feature (10)..(10): Xaa can be Ala, Arg, Asn, Asp, Cys, Gln, Glu, Gly, His, Ile, Leu, Lys, Met, Phe, Pro, Ser, Thr, Trp, Tyr, or Val
SXYRAIRTRX

SEQ ID NO: 50735 - protein, 9 aa, Artificial Sequence
  Description of Artificial Sequence: Synthetic peptide
  Seed: SRYWAIKTR
  misc_feature (2)..(2): Xaa can be Arg
  misc_feature (9)..(9): Xaa can be Ala, Arg, His, Ile, Leu, Lys, Met, Phe, Tyr, or Val
SXYWAIKTX

SEQ ID NO: 50736 - protein, 10 aa, Artificial Sequence
  Description of Artificial Sequence: Synthetic peptide
  Seed: SRYWAIKTRS
  misc_feature (2)..(2): Xaa can be Arg
  misc_feature (10)..(10): Xaa can be Ala, Arg, Cys, Gln, Gly, His, Ile, Leu, Lys, Met, Phe, Ser, Thr, Trp, Tyr, or Val
SXYWAIKTRX

SEQ ID NO: 50737 - protein, 9 aa, Artificial Sequence
  Description of Artificial Sequence: Synthetic peptide
  Seed: SRYWAIRTK
  misc_feature (2)..(2): Xaa can be Arg
  misc_feature (9)..(9): Xaa can be Ala, Arg, Gly, His, Ile, Leu, Lys, Met, Phe, Ser, Thr, Trp, Tyr, or Val
SXYWAIRTX

SEQ ID NO: 50738 - protein, 10 aa, Artificial Sequence
  Description of Artificial Sequence: Synthetic peptide
  Seed: SRYWAIRTKS
  misc_feature (2)..(2): Xaa can be Arg
  misc_feature (10)..(10): Xaa can be Ala, Arg, Asn, Asp, Cys, Gln, Glu, Gly, His, Ile, Leu, Lys, Met, Phe, Pro, Ser, Thr, Trp, Tyr, or Val
SXYWAIRTKX

SEQ ID NO: 50739 - protein, 10 aa, Artificial Sequence
  Description of Artificial Sequence: Synthetic peptide
  Seed: SRYWAIRTRS
  misc_feature (2)..(2): Xaa can be Arg
  misc_feature (10)..(10): Xaa can be Ala, Arg, Asn, Asp, Cys, Gln, Glu, Gly, His, Ile, Leu, Lys, Met, Phe, Pro, Ser, Thr, Trp, Tyr, or Val
SXYWAIRTRX

SEQ ID NO: 50740 - protein, 8 aa, Artificial Sequence
  Description of Artificial Sequence: Synthetic peptide
  Seed: SSFIRGAK
  misc_feature (2)..(2): Xaa can be Phe, Ser, Ala, Gln, Ile, Leu, Met, Thr, Trp, Tyr, or Val
  misc_feature (8)..(8): Xaa can be Arg or Lys
SXFIRGAX

SEQ ID NO: 50741 - protein, 9 aa, Artificial Sequence
  Description of Artificial Sequence: Synthetic peptide
  Seed: SSFIRGAKV
  misc_feature (2)..(2): Xaa can be Thr, Ala, Ser, Val, Gly, Met, Ile, Leu, Asn, Gln, Tyr, Cys, Phe, or Trp
  misc_feature (9)..(9): Xaa can be Lys, Trp, Phe, Tyr, Ala, Met, Leu, Ile, Val, or Ser
SXFIRGAKX

SEQ ID NO: 50742 - protein, 9 aa, Artificial Sequence
  Description of Artificial Sequence: Synthetic peptide
  Seed: SSFIRGARV
  misc_feature (2)..(2): Xaa can be Thr, Ser, Ala, Val, Ile, Gly, Met, Leu, Asn, Gln, Tyr, Cys, Phe, or Trp
  misc_feature (9)..(9): Xaa can be Lys, Trp, Phe, Tyr, Ala, Met, Val, Ile, Leu, Arg, Ser, or Gly
SXFIRGARX

SEQ ID NO: 50743 - protein, 10 aa, Artificial Sequence
  Description of Artificial Sequence: Synthetic peptide
  Seed: SSFIRGARVL
  misc_feature (2)..(2): Xaa can be Ala, Ser, Tyr, Phe, Thr, Gly, Ile, Leu, Met, Val, Arg, Asn, Asp, Cys, Gln, Glu, His, Lys, Pro, or Trp
  misc_feature (10)..(10): Xaa can be Leu, Met, Phe, Tyr, Trp, Ile, or Val
SXFIRGARVX

SEQ ID NO: 50744 - protein, 9 aa, Artificial Sequence
  Description of Artificial Sequence: Synthetic peptide
  Seed: SSFIRGKKV
  misc_feature (2)..(2): Xaa can be Ser, Thr, Ala, Val, Gln, Gly, Ile, Leu, Met, Phe, or Tyr
  misc_feature (9)..(9): Xaa can be Lys, Met, Tyr, Ile, Leu, Phe, Val, or Ala
SXFIRGKKX

SEQ ID NO: 50745 - protein, 9 aa, Artificial Sequence
  Description of Artificial Sequence: Synthetic peptide
  Seed: SSFIRGKRV
  misc_feature (2)..(2): Xaa can be Thr, Ala, Ser, Val, Tyr, Gln, Gly, Ile, Leu, Met, Phe, or Trp
  misc_feature (9)..(9): Xaa can be Lys, Phe, Tyr, Val, Ala, Leu, Met, or Ile
SXFIRGKRX

SEQ ID NO: 50746 - protein, 8 aa, Artificial Sequence
  Description of Artificial Sequence: Synthetic peptide
  Seed: SSFIRGTK
  misc_feature (2)..(2): Xaa can be Ser, Thr, or Tyr
  misc_feature (8)..(8): Xaa can be Lys or Arg
SXFIRGTX

SEQ ID NO: 50747 - protein, 9 aa, Artificial Sequence
  Description of Artificial Sequence: Synthetic peptide
  Seed: SSFIRGTKV
  misc_feature (2)..(2): Xaa can be Thr, Ala, Ser, Val, Met, Gly, Ile, Leu, Cys, Gln, Tyr, Asn, Phe, or Trp
  misc_feature (9)..(9): Xaa can be Lys, Trp, Tyr, Phe, Met, Ala, Leu, Ile, Val, or Ser
SXFIRGTKX

SEQ ID NO: 50748 - protein, 10 aa, Artificial Sequence
  Description of Artificial Sequence: Synthetic peptide
  Seed: SSFIRGTKVI
  misc_feature (2)..(2): Xaa can be Ser, Thr, Ala, Val, Ile, Met, Gly, or Leu
  misc_feature (10)..(10): Xaa can be Trp, Phe, Tyr, Met, Ile, or Leu
SXFIRGTKVX

SEQ ID NO: 50749 - protein, 9 aa, Artificial Sequence
  Description of Artificial Sequence: Synthetic peptide
  Seed: SSFIRGTRI
  misc_feature (2)..(2): Xaa can be Thr, Ser, Ala, Val, Gly, Met, Ile, Leu, Asn, Gln, Tyr, Cys, His, Phe, or Trp
  misc_feature (9)..(9): Xaa can be Lys, Trp, Tyr, Phe, Ala, Met, Leu, Ile, Val, Arg, Gly, or Ser
SXFIRGTRX

SEQ ID NO: 50750 - protein, 10 aa, Artificial Sequence
  Description of Artificial Sequence: Synthetic peptide
  Seed: SSFIRGTRIV
  misc_feature (2)..(2): Xaa can be Thr, Ser, Tyr, Val, Ala, Asn, Gln, Gly, Ile, Leu, Met, Phe, or Trp
  misc_feature (10)..(10): Xaa can be Lys, Ala, Val, or Ile
SXFIRGTRIX

SEQ ID NO: 50751 - protein, 10 aa, Artificial Sequence
  Description of Artificial Sequence: Synthetic peptide
  Seed: SSFIRGTRLV
  misc_feature (2)..(2): Xaa can be Thr, Ser, Val, Ala, Ile, Met, Phe, Tyr, Arg, Asn, Cys, Gln, Gly, His, Leu, Lys, or Trp
  misc_feature (10)..(10): Xaa can be Lys, Ala, Ile, Val, Leu, Met, or Ser
SXFIRGTRLX

SEQ ID NO: 50752 - protein, 10 aa, Artificial Sequence
  Description of Artificial Sequence: Synthetic peptide
  Seed: SSFIRGTRMV
  misc_feature (2)..(2): Xaa can be Thr, Ser, Tyr, Val, Ala, Gln, Gly, Ile, Leu, Met, Phe, or Trp
  misc_feature (10)..(10): Xaa can be Lys, Ala, Val, or Ile
SXFIRGTRMX

SEQ ID NO: 50753 - protein, 10 aa, Artificial Sequence
  Description of Artificial Sequence: Synthetic peptide
  Seed: SSFIRGTRVA
  misc_feature (2)..(2): Xaa can be Ser, Thr, Val, Tyr, Ala, Arg, Asn, Gln, Gly, His, Ile, Leu, Met, Phe, or Trp
  misc_feature (10)..(10): Xaa can be Lys, Ala, Val, Ile, or Leu
SXFIRGTRVX

SEQ ID NO: 50754 - protein, 10 aa, Artificial Sequence
  Description of Artificial Sequence: Synthetic peptide
  Seed: SSSTLELRSK
  misc_feature (2)..(2): Xaa can be Met, Thr, Val, Leu, Ala, Gln, Ile, or Ser
  misc_feature (10)..(10): Xaa can be Lys, Arg, or Tyr
SXSTLELRSX

SEQ ID NO: 50755 - protein, 11 aa, Artificial Sequence
  Description of Artificial Sequence: Synthetic peptide
  Seed: SSSTLELRSKY
  misc_feature (2)..(2): Xaa can be Gln, Leu, Met, Ser, Thr, Val, Ala, Arg, Asn, Asp, Cys, Glu, Gly, His, Ile, Lys, Phe, Pro, Trp, or Tyr
  misc_feature (11)..(11): Xaa can be Phe, Trp, or Tyr
SXSTLELRSKX

SEQ ID NO: 50756 - protein, 10 aa, Artificial Sequence
  Description of Artificial Sequence: Synthetic peptide
  Seed: SSVGRMVGGI
  misc_feature (2)..(2): Xaa can be Thr, Val, Ser, Ala, or Ile
  misc_feature (10)..(10): Xaa can be Val, Ile, Leu, Ala, or Met
SXVGRMVGGX

SEQ ID NO: 50757 - protein, 9 aa, Artificial Sequence
  Description of Artificial Sequence: Synthetic peptide
  Seed: STLELRSKY
  misc_feature (2)..(2): Xaa can be Ala, Gln, Ser, Thr, Met, Leu, Ile, Val, His, Lys, Arg, Glu, Gly, Phe, Trp, or Tyr
  misc_feature (9)..(9): Xaa can be Tyr, Phe, Trp, Lys, Met, Arg, Leu, Ile, Val, or His
SXLELRSKX

SEQ ID NO: 50758 - protein, 10 aa, Artificial Sequence
  Description of Artificial Sequence: Synthetic peptide
  Seed: STLELRSKYW
  misc_feature (2)..(2): Xaa can be Ser, Thr, Ala, Val, Cys, Gly, Ile, Leu, or Met
  misc_feature (10)..(10): Xaa can be Trp, Phe, Tyr, or Met
SXLELRSKYX

SEQ ID NO: 50759 - protein, 8 aa, Artificial Sequence
  Description of Artificial Sequence: Synthetic peptide
  Seed: STLELRSR
  misc_feature (2)..(2): Xaa can be Met, Phe, Thr, or Tyr
  misc_feature (8)..(8): Xaa can be Arg
SXLELRSX

SEQ ID NO: 50760 - protein, 9 aa, Artificial Sequence
  Description of Artificial Sequence: Synthetic peptide
  Seed: STLELRSRY
  misc_feature (2)..(2): Xaa can be Ala, Gln, Ser, Thr, Met, Leu, Ile, Val, Lys, Glu, His, Arg, Gly, Phe, Trp, Asn, or Tyr
  misc_feature (9)..(9): Xaa can be Tyr, Phe, Met, Trp, Lys, Arg, Leu, Ile, Val, or His
SXLELRSRX

SEQ ID NO: 50761 - protein, 10 aa, Artificial Sequence
  Description of Artificial Sequence: Synthetic peptide
  Seed: STLELRSRYR
  misc_feature (2)..(2): Xaa can be Thr, Ala, Ser, Val, Trp, Tyr, Cys, Gly, Ile, Leu, or Met
  misc_feature (10)..(10): Xaa can be Trp, Arg, Lys, Tyr, Phe, Leu, or Met
SXLELRSRYX

SEQ ID NO: 50762 - protein, 11 aa, Artificial Sequence
  Description of Artificial Sequence: Synthetic peptide
  Seed: STLELRSRYRA
  misc_feature (2)..(2): Xaa can be Met, Phe, Thr, Tyr, Val, Gln, Ile, Leu, Ser, Trp, Ala, Arg, Asn, Gly, His, or Lys
  misc_feature (11)..(11): Xaa can be Arg, Lys, Ala, Asn, Asp, Cys, Gln, Glu, Gly, His, Ile, Leu, Met, Phe, Pro, Ser, Thr, Trp, Tyr, or Val
SXLELRSRYRX

SEQ ID NO: 50763 - protein, 9 aa, Artificial Sequence
  Description of Artificial Sequence: Synthetic peptide
  Seed: STLPRRSGA
  misc_feature (2)..(2): Xaa can be Thr, Ser, Met, Val, Tyr, Ala, Ile, Phe, Asn, Gln, Gly, Leu, or Trp
  misc_feature (9)..(9): Xaa can be Lys, Ala, Val, Ile, Arg, Leu, Met, Ser, Tyr, or Gly
SXLPRRSGX

SEQ ID NO: 50764 - protein, 10 aa, Artificial Sequence
  Description of Artificial Sequence: Synthetic peptide
  Seed: STLPRRSGAA
  misc_feature (2)..(2): Xaa can be Thr, Ser, Ala, Gln, Ile, Leu, Met, Phe, Tyr, or Val
  misc_feature (10)..(10): Xaa can be Lys, Ala, or Val
SXLPRRSGAX

SEQ ID NO: 50765 - protein, 11 aa, Artificial Sequence
  Description of Artificial Sequence: Synthetic peptide
  Seed: STLPRRSGAAG
  misc_feature (2)..(2): Xaa can be Pro, Ala, Arg, Asn, Asp, Cys, Gln, Glu, Gly, His, Ile, Leu, Lys, Met, Phe, Ser, Thr, Trp, Tyr, or Val
  misc_feature (11)..(11): Xaa can be Ala, Cys, Gly, Ile, Leu, Met, Phe, Pro, Ser, Thr, Trp, Tyr, Val, Gln, Glu, or His
SXLPRRSGAAX

SEQ ID NO: 50766 - protein, 9 aa, Artificial Sequence
  Description of Artificial Sequence: Synthetic peptide
  Seed: STNQQKSSA
  misc_feature (2)..(2): Xaa can be Thr, Ala, Gln, Ile, Met, Ser, Tyr, or Val
  misc_feature (9)..(9): Xaa can be Lys or Ala
SXNQQKSSX

SEQ ID NO: 50767 - protein, 8 aa, Artificial Sequence
  Description of Artificial Sequence: Synthetic peptide
  Seed: STRGFQIA
  misc_feature (2)..(2): Xaa can be Thr, Ser, Ala, Gln, Ile, Leu, Met, Phe, Tyr, or Val
  misc_feature (8)..(8): Xaa can be Lys, Ala, or Val
SXRGFQIX

SEQ ID NO: 50768 - protein, 9 aa, Artificial Sequence
  Description of Artificial Sequence: Synthetic peptide
  Seed: STRGFQIAS
  misc_feature (2)..(2): Xaa can be Ser, Thr, Val, Met, Ile, Tyr, Ala, Phe, Gln, Leu, Gly, Trp, Asn, Cys, Arg, His, or Lys
  misc_feature (9)..(9): Xaa can be Lys, Ala, Ile, Val, Arg, Leu, Met, Ser, Gly, Tyr, Thr, Pro, Asn, His, Phe, Gln, Cys, or Gl u
SXRGFQIAX

SEQ ID NO: 50769 - protein, 10 aa, Artificial Sequence
  Description of Artificial Sequence: Synthetic peptide
  Seed: STRGFQIASN
  misc_feature (2)..(2): Xaa can be Thr, Ser, Tyr, Val, Met, Ala, Phe, Ile, Gln, Trp, Gly, Leu, Asn, Arg, Cys, or His
  misc_feature (10)..(10): Xaa can be Lys, Ala, Ile, Val, Met, Leu, Arg, Ser, Gly, Tyr, Thr, Cys, His, Phe, Pro, Asn, or Gln
SXRGFQIASX

SEQ ID NO: 50770 - protein, 8 aa, Artificial Sequence
  Description of Artificial Sequence: Synthetic peptide
  Seed: STRGIQIA
  misc_feature (2)..(2): Xaa can be Thr, Met, Phe, Ser, Tyr, or Val
  misc_feature (8)..(8): Xaa can be Lys or Ala
SXRGIQIX

SEQ ID NO: 50771 - protein, 9 aa, Artificial Sequence
  Description of Artificial Sequence: Synthetic peptide
  Seed: STRGIQIAS
  misc_feature (2)..(2): Xaa can be Ser, Thr, Val, Met, Tyr, Ala, Ile, Gln, Gly, Leu, Phe, Trp, Asn, Arg, Cys, His, or Lys
  misc_feature (9)..(9): Xaa can be Lys, Ala, Ile, Val, Leu, Met, Ser, Gly, Arg, Tyr, Thr, Asn, Pro, Phe, Cys, Gln, His, or Gl u
SXRGIQIAX

SEQ ID NO: 50772 - protein, 9 aa, Artificial Sequence
  Description of Artificial Sequence: Synthetic peptide
  Seed: STRGVQIAS
  misc_feature (2)..(2): Xaa can be Ser, Thr, Val, Met, Tyr, Ala, Ile, Gln, Gly, Leu, Phe, Trp, Asn, Arg, Cys, His, or Lys
  misc_feature (9)..(9): Xaa can be Lys, Ala, Ile, Val, Leu, Met, Ser, Gly, Arg, Tyr, Thr, Asn, Pro, Phe, Cys, Gln, Glu, or Hi s
SXRGVQIAX

SEQ ID NO: 50773 - protein, 9 aa, Artificial Sequence
  Description of Artificial Sequence: Synthetic peptide
  Seed: STYQRTRAL
  misc_feature (2)..(2): Xaa can be Pro, Tyr, Gln, Met, Ala, Phe, Thr, Ser, Leu, Val, Ile, His, Trp, Arg, Glu, Gly, Lys, Asn, Cys, or Asp
  misc_feature (9)..(9): Xaa can be Leu, Phe, Tyr, Ile, Met, Val, Ala, Trp, His, Lys, Cys, Thr, Gly, Ser, Arg, Gln, Glu, Pro, Asn, or Asp
SXYQRTRAX

SEQ ID NO: 50774 - protein, 10 aa, Artificial Sequence
  Description of Artificial Sequence: Synthetic peptide
  Seed: STYQRTRALV
  misc_feature (2)..(2): Xaa can be Leu, Thr, Met, Ser, Gln, Ile, Val, Ala, Gly, Phe, Trp, Tyr, Arg, Asn, Asp, Cys, Glu, His, Lys, or Pro
  misc_feature (10)..(10): Xaa can be Lys, Ala, Ile, Val, Leu, Met, Ser, Cys, Gly, Thr, Arg, Tyr, or Pro
SXYQRTRALX

SEQ ID NO: 50775 - protein, 11 aa, Artificial Sequence
  Description of Artificial Sequence: Synthetic peptide
  Seed: STYQRTRALVR
  misc_feature (2)..(2): Xaa can be Ile, Thr, Val, Ala, Gln, Leu, Met, Phe, Ser, Trp, Tyr, Arg, Asn, Cys, Gly, His, or Lys
  misc_feature (11)..(11): Xaa can be Arg, Lys, or Tyr
SXYQRTRALVX

SEQ ID NO: 50776 - protein, 10 aa, Artificial Sequence
  Description of Artificial Sequence: Synthetic peptide
  Seed: SVAHKSCLPA
  misc_feature (2)..(2): Xaa can be Leu, Met, Gln, Ile, Thr, Val, Ser, Ala, Tyr, Arg, Asn, Asp, Cys, Glu, Gly, His, Lys, Phe, Pro, or Trp
  misc_feature (10)..(10): Xaa can be Lys, Val, Ala, Ile, Leu, Met, Ser, or Thr
SXAHKSCLPX

SEQ ID NO: 50777 - protein, 10 aa, Artificial Sequence
  Description of Artificial Sequence: Synthetic peptide
  Seed: SVASGYDFER
  misc_feature (2)..(2): Xaa can be Ile, Leu, Met, Ser, Thr, Val, Ala, Arg, Asn, Asp, Cys, Gln, Glu, Gly, His, Lys, Phe, Pro, Trp, or Tyr
  misc_feature (10)..(10): Xaa can be Arg, Lys, or Tyr
SXASGYDFEX

SEQ ID NO: 50778 - protein, 9 aa, Artificial Sequence
  Description of Artificial Sequence: Synthetic peptide
  Seed: SVGGMVGGI
  misc_feature (2)..(2): Xaa can be Leu, Met, Ile, Gln, Val, or Thr
  misc_feature (9)..(9): Xaa can be Val, Ile, Ala, Leu, Met, or Thr
SXGGMVGGX

SEQ ID NO: 50779 - protein, 11 aa, Artificial Sequence
  Description of Artificial Sequence: Synthetic peptide
  Seed: SVGGMVGGIGR
  misc_feature (2)..(2): Xaa can be Ala, Gln, Ile, Leu, Met, Phe, Ser, Thr, Trp, Tyr, or Val
  misc_feature (11)..(11): Xaa can be Arg
SXGGMVGGIGX

SEQ ID NO: 50780 - protein, 9 aa, Artificial Sequence
  Description of Artificial Sequence: Synthetic peptide
  Seed: SVGKMIDGI
  misc_feature (2)..(2): Xaa can be Gln, Leu, Met, Val, Ile, or Thr
  misc_feature (9)..(9): Xaa can be Val, Leu, or Ile
SXGKMIDGX

SEQ ID NO: 50781 - protein, 11 aa, Artificial Sequence
  Description of Artificial Sequence: Synthetic peptide
  Seed: SVGKMIDGIGR
  misc_feature (2)..(2): Xaa can be Met, Phe, Thr, Tyr, or Val
  misc_feature (11)..(11): Xaa can be Arg
SXGKMIDGIGX

SEQ ID NO: 50782 - protein, 9 aa, Artificial Sequence
  Description of Artificial Sequence: Synthetic peptide
  Seed: SVGKMIGGI
  misc_feature (2)..(2): Xaa can be Leu, Met, Ile, Val, Gln, or Thr
  misc_feature (9)..(9): Xaa can be Val, Ile, Ala, Leu, Met, or Thr
SXGKMIGGX

SEQ ID NO: 50783 - protein, 11 aa, Artificial Sequence
  Description of Artificial Sequence: Synthetic peptide
  Seed: SVGKMIGGIGR
  misc_feature (2)..(2): Xaa can be Gln, Ile, Leu, Met, Phe, Ser, Thr, Tyr, or Val
  misc_feature (11)..(11): Xaa can be Arg
SXGKMIGGIGX

SEQ ID NO: 50784 - protein, 9 aa, Artificial Sequence
  Description of Artificial Sequence: Synthetic peptide
  Seed: SVGKMINGI
  misc_feature (2)..(2): Xaa can be Leu, Met, Gln, Ile, Val, Ala, or Thr
  misc_feature (9)..(9): Xaa can be Val, Ile, Leu, Ala, Cys, Met, or Thr
SXGKMINGX

SEQ ID NO: 50785 - protein, 11 aa, Artificial Sequence
  Description of Artificial Sequence: Synthetic peptide
  Seed: SVGKMINGIGR
  misc_feature (2)..(2): Xaa can be Gln, Ile, Leu, Met, Phe, Ser, Thr, Tyr, or Val
  misc_feature (11)..(11): Xaa can be Arg
SXGKMINGIGX

SEQ ID NO: 50786 - protein, 9 aa, Artificial Sequence
  Description of Artificial Sequence: Synthetic peptide
  Seed: SVGKMISGI
  misc_feature (2)..(2): Xaa can be Met, Leu, Gln, Ile, Val, Ala, Ser, or Thr
  misc_feature (9)..(9): Xaa can be Val, Ala, Ile, Leu, Cys, Met, Thr, or Ser
SXGKMISGX

SEQ ID NO: 50787 - protein, 11 aa, Artificial Sequence
  Description of Artificial Sequence: Synthetic peptide
  Seed: SVGKMISGIGR
  misc_feature (2)..(2): Xaa can be Met, Phe, Tyr, Ala, Gln, Ile, Leu, Ser, Thr, Trp, or Val
  misc_feature (11)..(11): Xaa can be Arg or Lys
SXGKMISGIGX

SEQ ID NO: 50788 - protein, 11 aa, Artificial Sequence
  Description of Artificial Sequence: Synthetic peptide
  Seed: SVGKMVDGIGR
  misc_feature (2)..(2): Xaa can be Met, Phe, Thr, Tyr, or Val
  misc_feature (11)..(11): Xaa can be Arg
SXGKMVDGIGX

SEQ ID NO: 50789 - protein, 11 aa, Artificial Sequence
  Description of Artificial Sequence: Synthetic peptide
  Seed: SVGKMVGGIGR
  misc_feature (2)..(2): Xaa can be Gln, Ile, Leu, Met, Phe, Ser, Thr, Tyr, or Val
  misc_feature (11)..(11): Xaa can be Arg
SXGKMVGGIGX

SEQ ID NO: 50790 - protein, 11 aa, Artificial Sequence
  Description of Artificial Sequence: Synthetic peptide
  Seed: SVGRMIDGIGR
  misc_feature (2)..(2): Xaa can be Ile, Leu, Met, Phe, Thr, Tyr, or Val
  misc_feature (11)..(11): Xaa can be Arg
SXGRMIDGIGX

SEQ ID NO: 50791 - protein, 11 aa, Artificial Sequence
  Description of Artificial Sequence: Synthetic peptide
  Seed: SVGRMIGGIGR
  misc_feature (2)..(2): Xaa can be Ala, Gln, Ile, Leu, Met, Phe, Ser, Thr, Trp, Tyr, or Val
  misc_feature (11)..(11): Xaa can be Arg
SXGRMIGGIGX

SEQ ID NO: 50792 - protein, 11 aa, Artificial Sequence
  Description of Artificial Sequence: Synthetic peptide
  Seed: SVGRMVGGIGR
  misc_feature (2)..(2): Xaa can be Gln, Ile, Leu, Met, Phe, Ser, Thr, Trp, Tyr, or Val
  misc_feature (11)..(11): Xaa can be Arg
SXGRMVGGIGX

SEQ ID NO: 50793 - protein, 9 aa, Artificial Sequence
  Description of Artificial Sequence: Synthetic peptide
  Seed: SVGRMVSGI
  misc_feature (2)..(2): Xaa can be Leu, Met, Ile, Gln, Val, Ala, or Thr
  misc_feature (9)..(9): Xaa can be Val, Ile, Leu, Ala, Met, or Thr
SXGRMVSGX

SEQ ID NO: 50794 - protein, 11 aa, Artificial Sequence
  Description of Artificial Sequence: Synthetic peptide
  Seed: SVGRMVSGIGR
  misc_feature (2)..(2): Xaa can be Arg, Met, Ala, Asn, Asp, Cys, Gln, Glu, Gly, His, Ile, Leu, Lys, Phe, Pro, Ser, Thr, Trp, Tyr, or Val
  misc_feature (11)..(11): Xaa can be Arg, Ile, Leu, Lys, Met, Phe, or Tyr
SXGRMVSGIGX

SEQ ID NO: 50795 - protein, 10 aa, Artificial Sequence
  Description of Artificial Sequence: Synthetic peptide
  Seed: SVQKNLPFDK
  misc_feature (2)..(2): Xaa can be Thr, Ala, Gln, Ile, Leu, Met, Phe, Ser, Trp, Tyr, Val, Arg, Asn, Asp, Cys, Glu, Gly, His, Lys, or Pro
  misc_feature (10)..(10): Xaa can be Arg, Lys, or Ala
SXQKNLPFDX

SEQ ID NO: 50796 - protein, 10 aa, Artificial Sequence
  Description of Artificial Sequence: Synthetic peptide
  Seed: SVQPAFSVQK
  misc_feature (2)..(2): Xaa can be Ser, Thr, Ile, Met, Val, Ala, Arg, Asn, Asp, Cys, Gln, Glu, Gly, His, Leu, Lys, Phe, Pro, Trp, or Tyr
  misc_feature (10)..(10): Xaa can be Arg, Lys, Tyr, or Ala
SXQPAFSVQX

SEQ ID NO: 50797 - protein, 11 aa, Artificial Sequence
  Description of Artificial Sequence: Synthetic peptide
  Seed: SVQPAFSVQKN
  misc_feature (2)..(2): Xaa can be Thr, Val, Ala, Gln, Ile, Leu, Met, or Ser
  misc_feature (11)..(11): Xaa can be Lys, Ala, Arg, Asn, Asp, Cys, Gln, Glu, Gly, His, Ile, Leu, Met, Phe, Pro, Ser, Thr, Trp, Tyr, or Val
SXQPAFSVQKX

SEQ ID NO: 50798 - protein, 11 aa, Artificial Sequence
  Description of Artificial Sequence: Synthetic peptide
  Seed: SVQPAFSVQRN
  misc_feature (2)..(2): Xaa can be Met, Phe, Val, Ile, Leu, Thr, Trp, Tyr, Ala, Gln, or Ser
  misc_feature (11)..(11): Xaa can be Arg, Lys, Ala, Asn, Asp, Cys, Gln, Glu, Gly, His, Ile, Leu, Met, Phe, Pro, Ser, Thr, Trp, Tyr, or Val
SXQPAFSVQRX

SEQ ID NO: 50799 - protein, 10 aa, Artificial Sequence
  Description of Artificial Sequence: Synthetic peptide
  Seed: SVQPSFSVQR
  misc_feature (2)..(2): Xaa can be Ile, Met, Ser, Thr, Val, Ala, Arg, Asn, Asp, Cys, Gln, Glu, Gly, His, Leu, Lys, Phe, Pro, Trp, or Tyr
  misc_feature (10)..(10): Xaa can be Arg, Lys, or Tyr
SXQPSFSVQX

SEQ ID NO: 50800 - protein, 11 aa, Artificial Sequence
  Description of Artificial Sequence: Synthetic peptide
  Seed: SVQPSFSVQRN
  misc_feature (2)..(2): Xaa can be Leu, Met, Phe, Thr, Val, Ile, Trp, Tyr, Ala, Gln, Gly, or Ser
  misc_feature (11)..(11): Xaa can be Arg, Lys, Ala, Asn, Asp, Cys, Gln, Glu, Gly, His, Ile, Leu, Met, Phe, Pro, Ser, Thr, Trp, Tyr, or Val
SXQPSFSVQRX

SEQ ID NO: 50801 - protein, 11 aa, Artificial Sequence
  Description of Artificial Sequence: Synthetic peptide
  Seed: SVQPTFSVQRK
  misc_feature (2)..(2): Xaa can be Met, Phe, Val, Ala, Ile, Leu, Thr, Trp, Tyr, Gln, Gly, or Ser
  misc_feature (11)..(11): Xaa can be Arg, Lys, Ala, Asn, Asp, Cys, Gln, Glu, Gly, His, Ile, Leu, Met, Phe, Pro, Ser, Thr, Trp, Tyr, or Val
SXQPTFSVQRX

SEQ ID NO: 50802 - protein, 10 aa, Artificial Sequence
  Description of Artificial Sequence: Synthetic peptide
  Seed: SVQRKLPFER
  misc_feature (2)..(2): Xaa can be Thr, Val, Ala, Arg, Asn, Cys, Gln, Gly, His, Ile, Leu, Met, Phe, Ser, Trp, Tyr, Asp, Glu, Lys, or Pro
  misc_feature (10)..(10): Xaa can be Arg, Lys, or Tyr
SXQRKLPFEX

SEQ ID NO: 50803 - protein, 10 aa, Artificial Sequence
  Description of Artificial Sequence: Synthetic peptide
  Seed: SVQRNLPFDK
  misc_feature (2)..(2): Xaa can be Thr, Ala, Asn, Gln, Gly, Ile, Leu, Met, Phe, Ser, Trp, Tyr, Val, Arg, Asp, Cys, Glu, His, Lys, or Pro
  misc_feature (10)..(10): Xaa can be Arg, Lys, or Tyr
SXQRNLPFDX

SEQ ID NO: 50804 - protein, 10 aa, Artificial Sequence
  Description of Artificial Sequence: Synthetic peptide
  Seed: SVQRNLPFEK
  misc_feature (2)..(2): Xaa can be Thr, Val, Ser, Ile, Met, Tyr, Ala, Phe, Arg, Asn, Asp, Cys, Gln, Glu, Gly, His, Leu, Lys, Pro, or Trp
  misc_feature (10)..(10): Xaa can be Arg, Lys, Ala, Tyr, Val, Ile, Leu, Met, or Ser
SXQRNLPFEX

SEQ ID NO: 50805 - protein, 11 aa, Artificial Sequence
  Description of Artificial Sequence: Synthetic peptide
  Seed: SYEQMETGGER
  misc_feature (2)..(2): Xaa can be Met, Phe, Thr, or Tyr
  misc_feature (11)..(11): Xaa can be Arg
SXEQMETGGEX

SEQ ID NO: 50806 - protein, 11 aa, Artificial Sequence
  Description of Artificial Sequence: Synthetic peptide
  Seed: SYFFGDNAEDY
  misc_feature (2)..(2): Xaa can be Phe, Tyr, Ala, Gln, Ile, Leu, Met, Ser, Thr, Trp, or Val
  misc_feature (11)..(11): Xaa can be Tyr, Leu, Met, or Phe
SXFFGDNAEDX

SEQ ID NO: 50807 - protein, 11 aa, Artificial Sequence
  Description of Artificial Sequence: Synthetic peptide
  Seed: SYFFGDNAEEF
  misc_feature (2)..(2): Xaa can be Tyr, Phe, Trp, Arg, His, Ile, Lys, Met, Ser, Thr, or Val
  misc_feature (11)..(11): Xaa can be Phe, Leu, Met, Trp, Tyr, Ile, or Val
SXFFGDNAEEX

SEQ ID NO: 50808 - protein, 11 aa, Artificial Sequence
  Description of Artificial Sequence: Synthetic peptide
  Seed: SYFFGDSAEEY
  misc_feature (2)..(2): Xaa can be Tyr, Phe, Trp, Ala, Arg, Asn, Gln, Gly, His, Ile, Leu, Met, Ser, Thr, or Val
  misc_feature (11)..(11): Xaa can be Tyr, Met, Phe, Leu, Ile, or Val
SXFFGDSAEEX

SEQ ID NO: 50809 - protein, 8 aa, Artificial Sequence
  Description of Artificial Sequence: Synthetic peptide
  Seed: TAAQRAIM
  misc_feature (2)..(2): Xaa can be Ala or Ser
  misc_feature (8)..(8): Xaa can be Leu, Met, Phe, or Tyr
TXAQRAIX

SEQ ID NO: 50810 - protein, 11 aa, Artificial Sequence
  Description of Artificial Sequence: Synthetic peptide
  Seed: TAAQRAIMDQV
  misc_feature (2)..(2): Xaa can be Thr, Ala, Ile, or Val
  misc_feature (11)..(11): Xaa can be Val or Ile
TXAQRAIMDQX

SEQ ID NO: 50811 - protein, 8 aa, Artificial Sequence
  Description of Artificial Sequence: Synthetic peptide
  Seed: TAAQRAMM
  misc_feature (2)..(2): Xaa can be Ala or Ser
  misc_feature (8)..(8): Xaa can be Met, Leu, Phe, or Tyr
TXAQRAMX

SEQ ID NO: 50812 - protein, 10 aa, Artificial Sequence
  Description of Artificial Sequence: Synthetic peptide
  Seed: TAGLTHIMIW
  misc_feature (2)..(2): Xaa can be Ser, Thr, Ala, Arg, Asn, Asp, Cys, Gln, Glu, Gly, His, Ile, Leu, Lys, Met, Phe, Pro, Trp, Tyr, or Val
  misc_feature (10)..(10): Xaa can be Trp, Phe, Tyr, Leu, or Met
TXGLTHIMIX

SEQ ID NO: 50813 - protein, 10 aa, Artificial Sequence
  Description of Artificial Sequence: Synthetic peptide
  Seed: TAGLTHLMIW
  misc_feature (2)..(2): Xaa can be Ser, Thr, Ala, Arg, Asn, Asp, Cys, Gln, Glu, Gly, His, Ile, Leu, Lys, Met, Phe, Pro, Trp, Tyr, or Val
  misc_feature (10)..(10): Xaa can be Trp, Phe, Tyr, Leu, or Met
TXGLTHLMIX

SEQ ID NO: 50814 - protein, 10 aa, Artificial Sequence
  Description of Artificial Sequence: Synthetic peptide
  Seed: TAGLTHMMIW
  misc_feature (2)..(2): Xaa can be Ser, Ala, Arg, Asn, Asp, Cys, Gln, Glu, Gly, His, Ile, Leu, Lys, Met, Phe, Pro, Thr, Trp, Tyr, or Val
  misc_feature (10)..(10): Xaa can be Trp or Phe
TXGLTHMMIX

SEQ ID NO: 50815 - protein, 8 aa, Artificial Sequence
  Description of Artificial Sequence: Synthetic peptide
  Seed: TASQRAMM
  misc_feature (2)..(2): Xaa can be Ala
  misc_feature (8)..(8): Xaa can be Leu, Met, Phe, or Tyr
TXSQRAMX

SEQ ID NO: 50816 - protein, 9 aa, Artificial Sequence
  Description of Artificial Sequence: Synthetic peptide
  Seed: TAYERMCNI
  misc_feature (2)..(2): Xaa can be Leu, Met, Ala, Ile, Gln, Thr, Val, Ser, Arg, Gly, Tyr, Asn, or Phe
  misc_feature (9)..(9): Xaa can be Val, Leu, Met, Ile, Phe, Tyr, Trp, Ala, Cys, Thr, Ser, Gly, Pro, or His
TXYERMCNX

SEQ ID NO: 50817 - protein, 10 aa, Artificial Sequence
  Description of Artificial Sequence: Synthetic peptide
  Seed: TAYERMCNIL
  misc_feature (2)..(2): Xaa can be Ala or Ser
  misc_feature (10)..(10): Xaa can be Met, Phe, Tyr, Ile, Leu, or Val
TXYERMCNIX

SEQ ID NO: 50818 - protein, 11 aa, Artificial Sequence
  Description of Artificial Sequence: Synthetic peptide
  Seed: TAYERMCNILK
  misc_feature (2)..(2): Xaa can be Thr, Ile, Met, Val, Ala, Leu, Ser, Arg, Gln, Phe, or Tyr
  misc_feature (11)..(11): Xaa can be Lys, Arg, Tyr, or Ala
TXYERMCNILX

SEQ ID NO: 50819 - protein, 8 aa, Artificial Sequence
  Description of Artificial Sequence: Synthetic peptide
  Seed: TEFKLSDY
  misc_feature (2)..(2): Xaa can be Glu
  misc_feature (8)..(8): Xaa can be Phe or Tyr
TXFKLSDX

SEQ ID NO: 50820 - protein, 10 aa, Artificial Sequence
  Description of Artificial Sequence: Synthetic peptide
  Seed: TEIIKMMENA
  misc_feature (2)..(2): Xaa can be Glu
  misc_feature (10)..(10): Xaa can be Ala
TXIIKMMENX

SEQ ID NO: 50821 - protein, 9 aa, Artificial Sequence
  Description of Artificial Sequence: Synthetic peptide
  Seed: TEIIRIMES
  misc_feature (2)..(2): Xaa can be Glu
  misc_feature (9)..(9): Xaa can be Ala, Ile, Pro, Ser, Thr, or Val
TXIIRIMEX

SEQ ID NO: 50822 - protein, 10 aa, Artificial Sequence
  Description of Artificial Sequence: Synthetic peptide
  Seed: TEIIRIMESA
  misc_feature (2)..(2): Xaa can be Glu
  misc_feature (10)..(10): Xaa can be Ala, Ile, Leu, Met, Phe, or Val
TXIIRIMESX

SEQ ID NO: 50823 - protein, 9 aa, Artificial Sequence
  Description of Artificial Sequence: Synthetic peptide
  Seed: TEIIRLMES
  misc_feature (2)..(2): Xaa can be Glu
  misc_feature (9)..(9): Xaa can be Ala, Ile, Pro, Ser, Thr, or Val
TXIIRLMEX

SEQ ID NO: 50824 - protein, 10 aa, Artificial Sequence
  Description of Artificial Sequence: Synthetic peptide
  Seed: TEIIRLMESA
  misc_feature (2)..(2): Xaa can be Glu
  misc_feature (10)..(10): Xaa can be Ala, Ile, Leu, Met, Phe, or Val
TXIIRLMESX

SEQ ID NO: 50825 - protein, 10 aa, Artificial Sequence
  Description of Artificial Sequence: Synthetic peptide
  Seed: TEIIRMMEGA
  misc_feature (2)..(2): Xaa can be Glu
  misc_feature (10)..(10): Xaa can be Ala
TXIIRMMEGX

SEQ ID NO: 50826 - protein, 10 aa, Artificial Sequence
  Description of Artificial Sequence: Synthetic peptide
  Seed: TEIIRMMENA
  misc_feature (2)..(2): Xaa can be Glu
  misc_feature (10)..(10): Xaa can be Ala
TXIIRMMENX

SEQ ID NO: 50827 - protein, 10 aa, Artificial Sequence
  Description of Artificial Sequence: Synthetic peptide
  Seed: TEIIRMMESA
  misc_feature (2)..(2): Xaa can be Glu
  misc_feature (10)..(10): Xaa can be Ala
TXIIRMMESX

SEQ ID NO: 50828 - protein, 8 aa, Artificial Sequence
  Description of Artificial Sequence: Synthetic peptide
  Seed: TEIKLSDY
  misc_feature (2)..(2): Xaa can be Glu
  misc_feature (8)..(8): Xaa can be Tyr
TXIKLSDX

SEQ ID NO: 50829 - protein, 10 aa, Artificial Sequence
  Description of Artificial Sequence: Synthetic peptide
  Seed: TEIRASVGGM
  misc_feature (2)..(2): Xaa can be Glu
  misc_feature (10)..(10): Xaa can be Ile, Leu, Met, or Phe
TXIRASVGGX

SEQ ID NO: 50830 - protein, 10 aa, Artificial Sequence
  Description of Artificial Sequence: Synthetic peptide
  Seed: TEIRASVGKM
  misc_feature (2)..(2): Xaa can be Glu
  misc_feature (10)..(10): Xaa can be Ile, Leu, Met, Phe, or Val
TXIRASVGKX

SEQ ID NO: 50831 - protein, 10 aa, Artificial Sequence
  Description of Artificial Sequence: Synthetic peptide
  Seed: TEIRASVGRM
  misc_feature (2)..(2): Xaa can be Glu
  misc_feature (10)..(10): Xaa can be Ile, Leu, Met, Phe, or Val
TXIRASVGRX

SEQ ID NO: 50832 - protein, 10 aa, Artificial Sequence
  Description of Artificial Sequence: Synthetic peptide
  Seed: TEIRSSVGRM
  misc_feature (2)..(2): Xaa can be Glu
  misc_feature (10)..(10): Xaa can be Ile, Leu, Met, or Phe
TXIRSSVGRX

SEQ ID NO: 50833 - protein, 8 aa, Artificial Sequence
  Description of Artificial Sequence: Synthetic peptide
  Seed: TELQLSDY
  misc_feature (2)..(2): Xaa can be Glu
  misc_feature (8)..(8): Xaa can be Tyr
TXLQLSDX

SEQ ID NO: 50834 - protein, 10 aa, Artificial Sequence
  Description of Artificial Sequence: Synthetic peptide
  Seed: TEVIRMMESA
  misc_feature (2)..(2): Xaa can be Glu
  misc_feature (10)..(10): Xaa can be Ala
TXVIRMMESX

SEQ ID NO: 50835 - protein, 8 aa, Artificial Sequence
  Description of Artificial Sequence: Synthetic peptide
  Seed: TFLARSAL
  misc_feature (2)..(2): Xaa can be Met, Phe, Tyr, Leu, Pro, Trp, Ala, Gln, Ile, Arg, Asn, Gly, Ser, or Val
  misc_feature (8)..(8): Xaa can be Leu, Met, Phe, Ile, Val, Tyr, or Ala
TXLARSAX

SEQ ID NO: 50836 - protein, 9 aa, Artificial Sequence
  Description of Artificial Sequence: Synthetic peptide
  Seed: TFLARSALI
  misc_feature (2)..(2): Xaa can be Tyr, Phe, Trp, Met, Ala, His, Gln, Leu, or Thr
  misc_feature (9)..(9): Xaa can be Phe, Met, Tyr, Leu, Trp, Ile, Val, Ala, or His
TXLARSALX

SEQ ID NO: 50837 - protein, 10 aa, Artificial Sequence
  Description of Artificial Sequence: Synthetic peptide
  Seed: TFLARSALIL
  misc_feature (2)..(2): Xaa can be Phe, Tyr, Leu, Met, Trp, Ala, Arg, Asn, Asp, Cys, Gln, Glu, Gly, His, Ile, Lys, Pro, Ser, Thr, or Val
  misc_feature (10)..(10): Xaa can be Val, Leu, Ile, Ala, Met, Phe, or Tyr
TXLARSALIX

SEQ ID NO: 50838 - protein, 11 aa, Artificial Sequence
  Description of Artificial Sequence: Synthetic peptide
  Seed: TFLARSALILR
  misc_feature (2)..(2): Xaa can be Arg, Gln, Ile, Leu, Met, Phe, Ser, Thr, Trp, Tyr, Val, Ala, Asn, Asp, Cys, Glu, Gly, His, Lys, or Pro
  misc_feature (11)..(11): Xaa can be Arg or Lys
TXLARSALILX

SEQ ID NO: 50839 - protein, 10 aa, Artificial Sequence
  Description of Artificial Sequence: Synthetic peptide
  Seed: TFSVQRKLPF
  misc_feature (2)..(2): Xaa can be Phe, Tyr, Arg, Met, Ser, Thr, Ala, Asn, Asp, Cys, Gln, Glu, Gly, His, Ile, Leu, Lys, Pro, Trp, or Val
  misc_feature (10)..(10): Xaa can be Phe, Trp, Tyr, Leu, or Met
TXSVQRKLPX

SEQ ID NO: 50840 - protein, 10 aa, Artificial Sequence
  Description of Artificial Sequence: Synthetic peptide
  Seed: TFSVQRNLPF
  misc_feature (2)..(2): Xaa can be Tyr, Ala, Gln, Met, Phe, Arg, Leu, Lys, Ser, Thr, Asn, Asp, Cys, Glu, Gly, His, Ile, Pro, Trp, or Val
  misc_feature (10)..(10): Xaa can be Phe, Trp, Tyr, Met, Leu, or Ile
TXSVQRNLPX

SEQ ID NO: 50841 - protein, 10 aa, Artificial Sequence
  Description of Artificial Sequence: Synthetic peptide
  Seed: TGMDPRMCSL
  misc_feature (2)..(2): Xaa can be Leu, Met, Gln, Ile, Phe, Pro, Val, Ala, Arg, Tyr, Asn, Asp, Cys, Glu, Gly, His, Lys, Ser, Thr, or Trp
  misc_feature (10)..(10): Xaa can be Ile, Leu, Val, Met, Ala, Phe, Cys, Ser, or Thr
TXMDPRMCSX

SEQ ID NO: 50842 - protein, 10 aa, Artificial Sequence
  Description of Artificial Sequence: Synthetic peptide
  Seed: THIMIWHSNL
  misc_feature (2)..(2): Xaa can be His or Arg
  misc_feature (10)..(10): Xaa can be Leu, Met, Ile, or Val
TXIMIWHSNX

SEQ ID NO: 50843 - protein, 10 aa, Artificial Sequence
  Description of Artificial Sequence: Synthetic peptide
  Seed: THLMIWHSNL
  misc_feature (2)..(2): Xaa can be His, Leu, Met, Phe, Ala, Arg, Asn, Asp, Cys, Gln, Glu, Gly, Ile, Lys, Pro, Ser, Thr, Trp, Tyr, or Val
  misc_feature (10)..(10): Xaa can be Ala, Ile, Leu, Val, or Met
TXLMIWHSNX

SEQ ID NO: 50844 - protein, 10 aa, Artificial Sequence
  Description of Artificial Sequence: Synthetic peptide
  Seed: THMMIWHSNL
  misc_feature (2)..(2): Xaa can be His, Leu, Met, Arg, Ala, Asn, Asp, Cys, Gln, Glu, Gly, Ile, Lys, Phe, Pro, Ser, Thr, Trp, Tyr, or Val
  misc_feature (10)..(10): Xaa can be Ala, Ile, Leu, Val, Met, Thr, or Phe
TXMMIWHSNX

SEQ ID NO: 50845 - protein, 9 aa, Artificial Sequence
  Description of Artificial Sequence: Synthetic peptide
  Seed: TIAMELIGM
  misc_feature (2)..(2): Xaa can be Gln, Leu, Met, Ile, Thr, Val, Ala, Ser, or Gly
  misc_feature (9)..(9): Xaa can be Val, Ile, Leu, Ala, Met, or Thr
TXAMELIGX

SEQ ID NO: 50846 - protein, 10 aa, Artificial Sequence
  Description of Artificial Sequence: Synthetic peptide
  Seed: TIAMELIGMI
  misc_feature (2)..(2): Xaa can be Met, Leu, Thr, Gln, Val, Ala, Ile, Ser, Arg, Asn, Asp, Cys, Glu, Gly, His, Lys, Phe, Pro, Trp, or Tyr
  misc_feature (10)..(10): Xaa can be Ile, Val, Ala, Leu, Met, Thr, Ser, or Cys
TXAMELIGMX

SEQ ID NO: 50847 - protein, 11 aa, Artificial Sequence
  Description of Artificial Sequence: Synthetic peptide
  Seed: TIAMELIGMIK
  misc_feature (2)..(2): Xaa can be Ile, Met, Ser, Thr, or Val
  misc_feature (11)..(11): Xaa can be Lys
TXAMELIGMIX

SEQ ID NO: 50848 - protein, 10 aa, Artificial Sequence
  Description of Artificial Sequence: Synthetic peptide
  Seed: TIAMELIRMI
  misc_feature (2)..(2): Xaa can be Leu, Met, Ile, Gln, Val, Phe, Thr, or Tyr
  misc_feature (10)..(10): Xaa can be Val, Ala, Ile, Leu, Met, Thr, or Cys
TXAMELIRMX

SEQ ID NO: 50849 - protein, 11 aa, Artificial Sequence
  Description of Artificial Sequence: Synthetic peptide
  Seed: TIAMELIRMIK
  misc_feature (2)..(2): Xaa can be Ile, Met, Ser, Thr, or Val
  misc_feature (11)..(11): Xaa can be Lys
TXAMELIRMIX

SEQ ID NO: 50850 - protein, 9 aa, Artificial Sequence
  Description of Artificial Sequence: Synthetic peptide
  Seed: TIDSNTLEL
  misc_feature (2)..(2): Xaa can be Leu, Ala, Met, Thr, Arg, Gln, His, Ile, Ser, Cys, Gly, Phe, Val, Asn, or Pro
  misc_feature (9)..(9): Xaa can be Leu, Met, Phe, Ile, Val, Tyr, Cys, Trp, Ala, or Thr
TXDSNTLEX

SEQ ID NO: 50851 - protein, 10 aa, Artificial Sequence
  Description of Artificial Sequence: Synthetic peptide
  Seed: TIDSNTLELR
  misc_feature (2)..(2): Xaa can be Ala, Ile, Leu, Met, Phe, Ser, Thr, Val, Gln, Trp, or Tyr
  misc_feature (10)..(10): Xaa can be Arg or Lys
TXDSNTLELX

SEQ ID NO: 50852 - protein, 9 aa, Artificial Sequence
  Description of Artificial Sequence: Synthetic peptide
  Seed: TIDSSTLEL
  misc_feature (2)..(2): Xaa can be Ala, Leu, Met, Ser, Thr, Cys, Gln, Gly, Ile, Phe, Val, Asn, or Pro
  misc_feature (9)..(9): Xaa can be Leu, Ile, Met, Phe, Val, Cys, Tyr, Ala, or Trp
TXDSSTLEX

SEQ ID NO: 50853 - protein, 10 aa, Artificial Sequence
  Description of Artificial Sequence: Synthetic peptide
  Seed: TIDSSTLELR
  misc_feature (2)..(2): Xaa can be Ala, Gln, Ile, Leu, Met, Phe, Ser, Thr, Tyr, Val, or Trp
  misc_feature (10)..(10): Xaa can be Arg or Lys
TXDSSTLELX

SEQ ID NO: 50854 - protein, 10 aa, Artificial Sequence
  Description of Artificial Sequence: Synthetic peptide
  Seed: TIEKMVLSAF
  misc_feature (2)..(2): Xaa can be Arg, Glu, Met, Trp, Tyr, Ala, Asn, Asp, Cys, Gln, Gly, His, Ile, Leu, Lys, Phe, Pro, Ser, Thr, or Val
  misc_feature (10)..(10): Xaa can be Ile, Leu, Met, Phe, Tyr, Val, or Ala
TXEKMVLSAX

SEQ ID NO: 50855 - protein, 10 aa, Artificial Sequence
  Description of Artificial Sequence: Synthetic peptide
  Seed: TIERMILSAF
  misc_feature (2)..(2): Xaa can be Gln, Ala, Arg, Asn, Asp, Cys, Glu, Gly, His, Ile, Leu, Lys, Met, Phe, Pro, Ser, Thr, Trp, Tyr, or Val
  misc_feature (10)..(10): Xaa can be Ala, Ile, Leu, Met, Phe, Tyr, Val, or Trp
TXERMILSAX

SEQ ID NO: 50856 - protein, 10 aa, Artificial Sequence
  Description of Artificial Sequence: Synthetic peptide
  Seed: TIERMVLSAF
  misc_feature (2)..(2): Xaa can be Gln, Leu, Met, Ala, Arg, Asn, Asp, Cys, Glu, Gly, His, Ile, Lys, Phe, Pro, Ser, Thr, Trp, Tyr, or Val
  misc_feature (10)..(10): Xaa can be Ala, Ile, Leu, Met, Phe, Tyr, Val, or Trp
TXERMVLSAX

SEQ ID NO: 50857 - protein, 10 aa, Artificial Sequence
  Description of Artificial Sequence: Synthetic peptide
  Seed: TIMAAFIGNT
  misc_feature (2)..(2): Xaa can be Gln, Leu, Met, Phe, Ala, Arg, Asn, Asp, Cys, Glu, Gly, His, Ile, Lys, Pro, Ser, Thr, Trp, Tyr, or Val
  misc_feature (10)..(10): Xaa can be Ala, Ile, Leu, Met, Thr, Val, Ser, Cys, Pro, or Phe
TXMAAFIGNX

SEQ ID NO: 50858 - protein, 10 aa, Artificial Sequence
  Description of Artificial Sequence: Synthetic peptide
  Seed: TIMAAFTGNA
  misc_feature (2)..(2): Xaa can be Leu, Met, Gln, Ile, Phe, Tyr, Val, Ala, Arg, Asn, Asp, Cys, Glu, Gly, His, Lys, Pro, Ser, Thr, or Trp
  misc_feature (10)..(10): Xaa can be Ala, Ile, Leu, Met, Val, Thr, Cys, Pro, Ser, or Phe
TXMAAFTGNX

SEQ ID NO: 50859 - protein, 10 aa, Artificial Sequence
  Description of Artificial Sequence: Synthetic peptide
  Seed: TIVMELIRMI
  misc_feature (2)..(2): Xaa can be Leu, Met, Gln, Ala, Ile, Phe, Ser, Thr, Tyr, Val, Arg, Cys, Glu, Gly, Lys, Trp, Asn, Asp, His, or Pro
  misc_feature (10)..(10): Xaa can be Ile, Val, Ala, Leu, Met, Thr, or Cys
TXVMELIRMX

SEQ ID NO: 50860 - protein, 11 aa, Artificial Sequence
  Description of Artificial Sequence: Synthetic peptide
  Seed: TIVMELIRMIK
  misc_feature (2)..(2): Xaa can be Ala, Arg, Ile, Lys, Met, Ser, Thr, or Val
  misc_feature (11)..(11): Xaa can be Lys
TXVMELIRMIX

SEQ ID NO: 50861 - protein, 11 aa, Artificial Sequence
  Description of Artificial Sequence: Synthetic peptide
  Seed: TLELRSKYWAI
  misc_feature (2)..(2): Xaa can be Met, Phe, Pro, Trp, Tyr, Ala, Arg, Asn, Asp, Cys, Gln, Glu, Gly, His, Ile, Leu, Lys, Ser, Thr, or Val
  misc_feature (11)..(11): Xaa can be Ile, Leu, Met, Val, Phe, or Ala
TXELRSKYWAX

SEQ ID NO: 50862 - protein, 9 aa, Artificial Sequence
  Description of Artificial Sequence: Synthetic peptide
  Seed: TLELRSRYR
  misc_feature (2)..(2): Xaa can be Met, Phe, Tyr, Ala, Gln, Ile, Leu, Ser, Thr, Trp, or Val
  misc_feature (9)..(9): Xaa can be Arg or Lys
TXELRSRYX

SEQ ID NO: 50863 - protein, 11 aa, Artificial Sequence
  Description of Artificial Sequence: Synthetic peptide
  Seed: TLELRSRYWAI
  misc_feature (2)..(2): Xaa can be Ala, Arg, Asn, Cys, Gln, Gly, His, Ile, Lys, Met, Phe, Pro, Ser, Thr, Trp, Tyr, Val, Asp, Glu, or Leu
  misc_feature (11)..(11): Xaa can be Ile, Leu, Met, Phe, Val, or Ala
TXELRSRYWAX

SEQ ID NO: 50864 - protein, 10 aa, Artificial Sequence
  Description of Artificial Sequence: Synthetic peptide
  Seed: TLPRRSGAAG
  misc_feature (2)..(2): Xaa can be Arg, Met, Phe, Trp, Tyr, Ala, Asn, Asp, Cys, Gln, Glu, Gly, His, Ile, Leu, Lys, Pro, Ser, Thr, or Val
  misc_feature (10)..(10): Xaa can be Ala, Cys, Gly, Ile, Leu, Met, Phe, Pro, Ser, Thr, Trp, Tyr, Val, or His
TXPRRSGAAX

SEQ ID NO: 50865 - protein, 9 aa, Artificial Sequence
  Description of Artificial Sequence: Synthetic peptide
  Seed: TLYDKEEIR
  misc_feature (2)..(2): Xaa can be Thr, Ala, Ile, Leu, Met, Phe, Ser, Val, Gln, Trp, or Tyr
  misc_feature (9)..(9): Xaa can be Arg, Lys, or Tyr
TXYDKEEIX

SEQ ID NO: 50866 - protein, 10 aa, Artificial Sequence
  Description of Artificial Sequence: Synthetic peptide
  Seed: TLYDKEEIRR
  misc_feature (2)..(2): Xaa can be Ala, Ile, Met, Ser, Thr, Val, Leu, Phe, Trp, or Tyr
  misc_feature (10)..(10): Xaa can be Arg or Lys
TXYDKEEIRX

SEQ ID NO: 50867 - protein, 11 aa, Artificial Sequence
  Description of Artificial Sequence: Synthetic peptide
  Seed: TLYDKEEIRRI
  misc_feature (2)..(2): Xaa can be Leu or Met
  misc_feature (11)..(11): Xaa can be Ala, Val, Ile, or Leu
TXYDKEEIRRX

SEQ ID NO: 50868 - protein, 9 aa, Artificial Sequence
  Description of Artificial Sequence: Synthetic peptide
  Seed: TMDSCTLEL
  misc_feature (2)..(2): Xaa can be Met, Ala, Gln, Leu, Gly, Ile, Ser, Thr, Val, Cys, Lys, Phe, Arg, His, or Asn
  misc_feature (9)..(9): Xaa can be Phe, Leu, Met, Ile, Val, Tyr, or Ala
TXDSCTLEX

SEQ ID NO: 50869 - protein, 10 aa, Artificial Sequence
  Description of Artificial Sequence: Synthetic peptide
  Seed: TMDSCTLELR
  misc_feature (2)..(2): Xaa can be Ala, Gln, Ile, Leu, Met, Phe, Ser, Thr, Tyr, Val, or Trp
  misc_feature (10)..(10): Xaa can be Arg or Lys
TXDSCTLELX

SEQ ID NO: 50870 - protein, 9 aa, Artificial Sequence
  Description of Artificial Sequence: Synthetic peptide
  Seed: TMDSITLEL
  misc_feature (2)..(2): Xaa can be Met, Leu, Tyr, Ala, Pro, His, Ile, Phe, Ser, Thr, Cys, Gln, Gly, Val, Arg, Trp, Asn, or Ly s
  misc_feature (9)..(9): Xaa can be Leu, Met, Phe, Ile, Val, Tyr, Ala, Cys, Trp, Thr, or His
TXDSITLEX

SEQ ID NO: 50871 - protein, 10 aa, Artificial Sequence
  Description of Artificial Sequence: Synthetic peptide
  Seed: TMDSITLELR
  misc_feature (2)..(2): Xaa can be Met, Leu, Val, Ile, Ala, Gln, Phe, Ser, Thr, Tyr, or Trp
  misc_feature (10)..(10): Xaa can be Arg, Lys, Val, Ala, Cys, Ile, Leu, Met, Phe, Ser, Thr, Tyr, Asn, Asp, Gln, Glu, Gly, His, Pro, or Trp
TXDSITLELX

SEQ ID NO: 50872 - protein, 9 aa, Artificial Sequence
  Description of Artificial Sequence: Synthetic peptide
  Seed: TMDSRTLEL
  misc_feature (2)..(2): Xaa can be Tyr, Met, Phe, Ala, Leu, Pro, His, Ser, Thr, Trp, Val, Cys, Gln, Gly, Ile, Arg, Asn, or Ly s
  misc_feature (9)..(9): Xaa can be Leu, Ile, Met, Phe, Val, Tyr, Ala, Trp, Cys, or His
TXDSRTLEX

SEQ ID NO: 50873 - protein, 10 aa, Artificial Sequence
  Description of Artificial Sequence: Synthetic peptide
  Seed: TMDSRTLELR
  misc_feature (2)..(2): Xaa can be Ala, Gln, Ile, Leu, Met, Phe, Ser, Thr, Tyr, Val, or Trp
  misc_feature (10)..(10): Xaa can be Arg or Lys
TXDSRTLELX

SEQ ID NO: 50874 - protein, 9 aa, Artificial Sequence
  Description of Artificial Sequence: Synthetic peptide
  Seed: TMDSTTLEL
  misc_feature (2)..(2): Xaa can be Leu, Met, Tyr, Ala, His, Arg, Gln, Phe, Pro, Ser, Cys, Gly, Ile, Thr, Val, Lys, Trp, or As n
  misc_feature (9)..(9): Xaa can be Leu, Met, Phe, Ile, Val, Tyr, Ala, Trp, Cys, Thr, or His
TXDSTTLEX

SEQ ID NO: 50875 - protein, 10 aa, Artificial Sequence
  Description of Artificial Sequence: Synthetic peptide
  Seed: TMDSTTLELR
  misc_feature (2)..(2): Xaa can be Ala, Ile, Leu, Met, Phe, Ser, Thr, Tyr, Val, Gln, or Trp
  misc_feature (10)..(10): Xaa can be Arg or Lys
TXDSTTLELX

SEQ ID NO: 50876 - protein, 9 aa, Artificial Sequence
  Description of Artificial Sequence: Synthetic peptide
  Seed: TMERMVLSA
  misc_feature (2)..(2): Xaa can be Met, Leu, or Ile
  misc_feature (9)..(9): Xaa can be Val, Ile, Leu, or Ala
TXERMVLSX

SEQ ID NO: 50877 - protein, 9 aa, Artificial Sequence
  Description of Artificial Sequence: Synthetic peptide
  Seed: TMESSTLEL
  misc_feature (2)..(2): Xaa can be Tyr, Ala, Met, Phe, Ser, Leu, Thr, Gln, Trp, Lys, Val, Arg, His, Ile, or Glu
  misc_feature (9)..(9): Xaa can be Phe, Leu, Tyr, Met, Ile, Val, His, or Trp
TXESSTLEX

SEQ ID NO: 50878 - protein, 10 aa, Artificial Sequence
  Description of Artificial Sequence: Synthetic peptide
  Seed: TMESSTLELR
  misc_feature (2)..(2): Xaa can be Ala, Ile, Leu, Met, Phe, Ser, Thr, Tyr, Val, Gln, or Trp
  misc_feature (10)..(10): Xaa can be Arg or Lys
TXESSTLELX

SEQ ID NO: 50879 - protein, 9 aa, Artificial Sequence
  Description of Artificial Sequence: Synthetic peptide
  Seed: TMGSSTLEL
  misc_feature (2)..(2): Xaa can be Tyr, Gln, Leu, Met, Phe, Trp, Lys, Arg, His, Ile, Val, Ala, Glu, Ser, or Thr
  misc_feature (9)..(9): Xaa can be Phe, Tyr, Met, Leu, Val, Ile, Trp, Ala, or His
TXGSSTLEX

SEQ ID NO: 50880 - protein, 10 aa, Artificial Sequence
  Description of Artificial Sequence: Synthetic peptide
  Seed: TMGSSTLELR
  misc_feature (2)..(2): Xaa can be Ala, Ile, Leu, Met, Phe, Ser, Thr, Tyr, Val, Asn, Gln, Pro, or Trp
  misc_feature (10)..(10): Xaa can be Arg or Lys
TXGSSTLELX

SEQ ID NO: 50881 - protein, 9 aa, Artificial Sequence
  Description of Artificial Sequence: Synthetic peptide
  Seed: TMIMELIRM
  misc_feature (2)..(2): Xaa can be Leu, Met, Gln, Ile, Thr, Val, Lys, Ala, His, Ser, Arg, or Pro
  misc_feature (9)..(9): Xaa can be Tyr, Phe, Val, Leu, Ala, Ile, Met, Thr, or Cys
TXIMELIRX

SEQ ID NO: 50882 - protein, 10 aa, Artificial Sequence
  Description of Artificial Sequence: Synthetic peptide
  Seed: TMIMELIRMI
  misc_feature (2)..(2): Xaa can be Leu, Met, Gln, Ala, Arg, Asn, Asp, Cys, Glu, Gly, His, Ile, Lys, Phe, Pro, Ser, Thr, Trp, Tyr, or Val
  misc_feature (10)..(10): Xaa can be Ala, Ile, Leu, Val, Met, Thr, or Cys
TXIMELIRMX

SEQ ID NO: 50883 - protein, 11 aa, Artificial Sequence
  Description of Artificial Sequence: Synthetic peptide
  Seed: TMIMELIRMIK
  misc_feature (2)..(2): Xaa can be Arg, Ile, Lys, Met, Phe, Ser, Thr, Tyr, Val, Ala, Asn, Cys, Gln, Gly, His, Leu, or Trp
  misc_feature (11)..(11): Xaa can be Arg or Lys
TXIMELIRMIX

SEQ ID NO: 50884 - protein, 9 aa, Artificial Sequence
  Description of Artificial Sequence: Synthetic peptide
  Seed: TMNMELIRM
  misc_feature (2)..(2): Xaa can be Leu, Met, Gln, Lys, Ala, His, Ile, Val, or Arg
  misc_feature (9)..(9): Xaa can be Tyr, Phe, Val, Met, Leu, Ala, or Ile
TXNMELIRX

SEQ ID NO: 50885 - protein, 10 aa, Artificial Sequence
  Description of Artificial Sequence: Synthetic peptide
  Seed: TMNMELIRMI
  misc_feature (2)..(2): Xaa can be Leu, Met, Gln, Ile, Thr, or Val
  misc_feature (10)..(10): Xaa can be Val, Ala, Ile, Leu, Met, Thr, or Cys
TXNMELIRMX

SEQ ID NO: 50886 - protein, 11 aa, Artificial Sequence
  Description of Artificial Sequence: Synthetic peptide
  Seed: TMNMELIRMIK
  misc_feature (2)..(2): Xaa can be Ile, Leu, Met, Phe, Ser, Thr, Tyr, Val, Ala, Arg, Cys, Gln, Gly, His, Lys, or Trp
  misc_feature (11)..(11): Xaa can be Arg or Lys
TXNMELIRMIX

SEQ ID NO: 50887 - protein, 9 aa, Artificial Sequence
  Description of Artificial Sequence: Synthetic peptide
  Seed: TMNSSTLEL
  misc_feature (2)..(2): Xaa can be Met, Tyr, Ala, Gln, Leu, Phe, His, Lys, Ser, Trp, Arg, Ile, Thr, Val, Cys, Glu, Gly, Pro, or Asn
  misc_feature (9)..(9): Xaa can be Met, Phe, Tyr, Leu, Ile, Val, Trp, Ala, His, Cys, or Thr
TXNSSTLEX

SEQ ID NO: 50888 - protein, 10 aa, Artificial Sequence
  Description of Artificial Sequence: Synthetic peptide
  Seed: TMNSSTLELR
  misc_feature (2)..(2): Xaa can be Ile, Leu, Met, Ser, Thr, Val, Ala, Gln, Gly, Phe, Trp, Tyr, Asn, Cys, His, or Pro
  misc_feature (10)..(10): Xaa can be Arg, Lys, or Tyr
TXNSSTLELX

SEQ ID NO: 50889 - protein, 9 aa, Artificial Sequence
  Description of Artificial Sequence: Synthetic peptide
  Seed: TMSSSTLEL
  misc_feature (2)..(2): Xaa can be Met, Tyr, Ala, Gln, Leu, Phe, His, Ser, Trp, Arg, Ile, Lys, Thr, Val, Cys, Gly, Glu, Asn, or Pro
  misc_feature (9)..(9): Xaa can be Phe, Tyr, Met, Leu, Ile, Val, Trp, Ala, His, Thr, or Cys
TXSSSTLEX

SEQ ID NO: 50890 - protein, 10 aa, Artificial Sequence
  Description of Artificial Sequence: Synthetic peptide
  Seed: TMSSSTLELR
  misc_feature (2)..(2): Xaa can be Leu, Met, Ile, Gln, Val, Ser, Thr, Ala, Arg, Asn, Asp, Cys, Glu, Gly, His, Lys, Phe, Pro, Trp, or Tyr
  misc_feature (10)..(10): Xaa can be Arg, Lys, Tyr, Val, Leu, Ile, Ala, Asn, Asp, Cys, Gln, Glu, Gly, His, Met, Phe, Pro, Ser, Thr, or Trp
TXSSSTLELX

SEQ ID NO: 50891 - protein, 9 aa, Artificial Sequence
  Description of Artificial Sequence: Synthetic peptide
  Seed: TMVLELIRI
  misc_feature (2)..(2): Xaa can be Met, Gln, Leu, Ile, Ala, or Val
  misc_feature (9)..(9): Xaa can be Val, Ala, Ile, Leu, Tyr, Met, or Phe
TXVLELIRX

SEQ ID NO: 50892 - protein, 10 aa, Artificial Sequence
  Description of Artificial Sequence: Synthetic peptide
  Seed: TMVLELIRII
  misc_feature (2)..(2): Xaa can be Leu, Met, or Ile
  misc_feature (10)..(10): Xaa can be Val, Ala, Ile, or Leu
TXVLELIRIX

SEQ ID NO: 50893 - protein, 10 aa, Artificial Sequence
  Description of Artificial Sequence: Synthetic peptide
  Seed: TMVLELIRMI
  misc_feature (2)..(2): Xaa can be Leu, Met, Arg, Gln, Ile, Lys, Phe, Trp, Tyr, or Val
  misc_feature (10)..(10): Xaa can be Val, Ala, Ile, Leu, or Met
TXVLELIRMX

SEQ ID NO: 50894 - protein, 9 aa, Artificial Sequence
  Description of Artificial Sequence: Synthetic peptide
  Seed: TMVMELIQM
  misc_feature (2)..(2): Xaa can be Leu, Met, Gln, Ile, Val, Thr, Lys, Ala, His, Ser, Arg, or Pro
  misc_feature (9)..(9): Xaa can be Tyr, Phe, Val, Ala, Ile, Leu, Met, or Thr
TXVMELIQX

SEQ ID NO: 50895 - protein, 10 aa, Artificial Sequence
  Description of Artificial Sequence: Synthetic peptide
  Seed: TMVMELIQMI
  misc_feature (2)..(2): Xaa can be Leu, Met, Gln, Phe, Thr, Tyr, Ala, Arg, Asn, Asp, Cys, Glu, Gly, His, Ile, Lys, Pro, Ser, Trp, or Val
  misc_feature (10)..(10): Xaa can be Ala, Ile, Leu, Val, Met, Cys, or Thr
TXVMELIQMX

SEQ ID NO: 50896 - protein, 11 aa, Artificial Sequence
  Description of Artificial Sequence: Synthetic peptide
  Seed: TMVMELIQMIK
  misc_feature (2)..(2): Xaa can be Ala, Ile, Met, Ser, Thr, Val, Arg, Asn, Asp, Glu, His, Lys, Phe, or Tyr
  misc_feature (11)..(11): Xaa can be Arg or Lys
TXVMELIQMIX

SEQ ID NO: 50897 - protein, 9 aa, Artificial Sequence
  Description of Artificial Sequence: Synthetic peptide
  Seed: TMVMELIRM
  misc_feature (2)..(2): Xaa can be Leu, Met, Gln, Ile, Lys, Val, Ala, Arg, His, Ser, or Thr
  misc_feature (9)..(9): Xaa can be Tyr, Phe, Val, Met, Leu, Ala, or Ile
TXVMELIRX

SEQ ID NO: 50898 - protein, 11 aa, Artificial Sequence
  Description of Artificial Sequence: Synthetic peptide
  Seed: TMVMELIRMVK
  misc_feature (2)..(2): Xaa can be Leu, Met, Tyr, Ser, Ala, Arg, Ile, Lys, Phe, Thr, Val, Asn, Glu, or His
  misc_feature (11)..(11): Xaa can be Arg, Lys, Val, Ile, Leu, Ala, Asn, Asp, Cys, Gln, Glu, Gly, His, Met, Phe, Pro, Ser, Thr, Trp, or Tyr
TXVMELIRMVX

SEQ ID NO: 50899 - protein, 9 aa, Artificial Sequence
  Description of Artificial Sequence: Synthetic peptide
  Seed: TMVMELVRM
  misc_feature (2)..(2): Xaa can be Leu, Met, Gln, Ile, Lys, Val, Ala, Arg, His, Ser, or Thr
  misc_feature (9)..(9): Xaa can be Tyr, Phe, Val, Met, Leu, Ala, or Ile
TXVMELVRX

SEQ ID NO: 50900 - protein, 10 aa, Artificial Sequence
  Description of Artificial Sequence: Synthetic peptide
  Seed: TMVMELVRMI
  misc_feature (2)..(2): Xaa can be Leu, Met, Gln, Phe, Thr, Tyr, Ile, Ala, Arg, Asn, Asp, Cys, Glu, Gly, His, Lys, Pro, Ser, Trp, or Val
  misc_feature (10)..(10): Xaa can be Ile, Val, Ala, Leu, Met, or Thr
TXVMELVRMX

SEQ ID NO: 50901 - protein, 11 aa, Artificial Sequence
  Description of Artificial Sequence: Synthetic peptide
  Seed: TMVMELVRMIK
  misc_feature (2)..(2): Xaa can be Ala, Arg, Lys, Met, Ser, Thr, or Val
  misc_feature (11)..(11): Xaa can be Lys
TXVMELVRMIX

SEQ ID NO: 50902 - protein, 9 aa, Artificial Sequence
  Description of Artificial Sequence: Synthetic peptide
  Seed: TMVSSTLEL
  misc_feature (2)..(2): Xaa can be Tyr, Gln, Met, Ala, Leu, Phe, Lys, His, Ile, Ser, Trp, Arg, Thr, Val, Cys, Glu, Gly, Pro, or Asn
  misc_feature (9)..(9): Xaa can be Met, Phe, Tyr, Leu, Ile, Val, Trp, Ala, His, Thr, Gly, or Cys
TXVSSTLEX

SEQ ID NO: 50903 - protein, 10 aa, Artificial Sequence
  Description of Artificial Sequence: Synthetic peptide
  Seed: TMVSSTLELR
  misc_feature (2)..(2): Xaa can be Ala, Ile, Leu, Met, Ser, Thr, Val, Arg, Asn, Asp, Cys, Gln, Glu, Gly, His, Lys, Phe, Pro, Trp, or Tyr
  misc_feature (10)..(10): Xaa can be Arg, Lys, or Tyr
TXVSSTLELX

SEQ ID NO: 50904 - protein, 10 aa, Artificial Sequence
  Description of Artificial Sequence: Synthetic peptide
  Seed: TNPIVPSFDM
  misc_feature (2)..(2): Xaa can be Met, Ala, Arg, Asn, Asp, Cys, Gln, Glu, Gly, His, Ile, Leu, Lys, Phe, Pro, Ser, Thr, Trp, Tyr, or Val
  misc_feature (10)..(10): Xaa can be Leu, Met, or Phe
TXPIVPSFDX

SEQ ID NO: 50905 - protein, 10 aa, Artificial Sequence
  Description of Artificial Sequence: Synthetic peptide
  Seed: TNPIVPSLDM
  misc_feature (2)..(2): Xaa can be Met, Ala, Arg, Asn, Asp, Cys, Gln, Glu, Gly, His, Ile, Leu, Lys, Phe, Pro, Ser, Thr, Trp, Tyr, or Val
  misc_feature (10)..(10): Xaa can be Leu, Met, or Phe
TXPIVPSLDX

SEQ ID NO: 50906 - protein, 10 aa, Artificial Sequence
  Description of Artificial Sequence: Synthetic peptide
  Seed: TNPVVPSFDM
  misc_feature (2)..(2): Xaa can be Ala, Arg, Asn, Asp, Cys, Gln, Glu, Gly, His, Ile, Leu, Lys, Met, Phe, Pro, Ser, Thr, Trp, Tyr, or Val
  misc_feature (10)..(10): Xaa can be Leu or Met
TXPVVPSFDX

SEQ ID NO: 50907 - protein, 9 aa, Artificial Sequence
  Description of Artificial Sequence: Synthetic peptide
  Seed: TQPTFSVQR
  misc_feature (2)..(2): Xaa can be Ala, Ile, Leu, Met, Phe, Ser, Thr, Trp, Tyr, Val, Asn, Gln, Gly, or Pro
  misc_feature (9)..(9): Xaa can be Arg or Lys
TXPTFSVQX

SEQ ID NO: 50908 - protein, 9 aa, Artificial Sequence
  Description of Artificial Sequence: Synthetic peptide
  Seed: TRAHVRTGM
  misc_feature (2)..(2): Xaa can be Arg
  misc_feature (9)..(9): Xaa can be Ile, Leu, Lys, Met, Phe, Tyr, or Val
TXAHVRTGX

SEQ ID NO: 50909 - protein, 9 aa, Artificial Sequence
  Description of Artificial Sequence: Synthetic peptide
  Seed: TRALVRAGM
  misc_feature (2)..(2): Xaa can be Arg, His, Gln, or Lys
  misc_feature (9)..(9): Xaa can be Leu, Ile, Met, Phe, Val, Arg, Lys, Tyr, or Ala
TXALVRAGX

SEQ ID NO: 50910 - protein, 9 aa, Artificial Sequence
  Description of Artificial Sequence: Synthetic peptide
  Seed: TRALVRTGM
  misc_feature (2)..(2): Xaa can be Arg, His, Gln, or Lys
  misc_feature (9)..(9): Xaa can be Leu, Ile, Met, Phe, Val, Arg, Lys, Tyr, or Ala
TXALVRTGX

SEQ ID NO: 50911 - protein, 9 aa, Artificial Sequence
  Description of Artificial Sequence: Synthetic peptide
  Seed: TRGLTHMMI
  misc_feature (2)..(2): Xaa can be Arg
  misc_feature (9)..(9): Xaa can be Ile, Leu, Met, Phe, or Val
TXGLTHMMX

SEQ ID NO: 50912 - protein, 9 aa, Artificial Sequence
  Description of Artificial Sequence: Synthetic peptide
  Seed: TRIVPRGQL
  misc_feature (2)..(2): Xaa can be Arg
  misc_feature (9)..(9): Xaa can be Ile, Leu, Met, or Phe
TXIVPRGQX

SEQ ID NO: 50913 - protein, 9 aa, Artificial Sequence
  Description of Artificial Sequence: Synthetic peptide
  Seed: TRLVPRGQL
  misc_feature (2)..(2): Xaa can be Arg
  misc_feature (9)..(9): Xaa can be Ile, Leu, Met, Phe, or Val
TXLVPRGQX

SEQ ID NO: 50914 - protein, 9 aa, Artificial Sequence
  Description of Artificial Sequence: Synthetic peptide
  Seed: TRMVPRGKL
  misc_feature (2)..(2): Xaa can be Arg or His
  misc_feature (9)..(9): Xaa can be Leu, Arg, Ile, Lys, Met, Phe, Tyr, or Val
TXMVPRGKX

SEQ ID NO: 50915 - protein, 11 aa, Artificial Sequence
  Description of Artificial Sequence: Synthetic peptide
  Seed: TRSALILRGSV
  misc_feature (2)..(2): Xaa can be Arg
  misc_feature (11)..(11): Xaa can be Ile, Leu, Met, Phe, or Val
TXSALILRGSX

SEQ ID NO: 50916 - protein, 9 aa, Artificial Sequence
  Description of Artificial Sequence: Synthetic peptide
  Seed: TRVAPRGQL
  misc_feature (2)..(2): Xaa can be Arg
  misc_feature (9)..(9): Xaa can be Leu, Met, or Phe
TXVAPRGQX

SEQ ID NO: 50917 - protein, 9 aa, Artificial Sequence
  Description of Artificial Sequence: Synthetic peptide
  Seed: TRVIPRGQL
  misc_feature (2)..(2): Xaa can be Arg
  misc_feature (9)..(9): Xaa can be Leu
TXVIPRGQX

SEQ ID NO: 50918 - protein, 9 aa, Artificial Sequence
  Description of Artificial Sequence: Synthetic peptide
  Seed: TRVLPRGKL
  misc_feature (2)..(2): Xaa can be Arg
  misc_feature (9)..(9): Xaa can be Leu
TXVLPRGKX

SEQ ID NO: 50919 - protein, 9 aa, Artificial Sequence
  Description of Artificial Sequence: Synthetic peptide
  Seed: TRVLPRGQL
  misc_feature (2)..(2): Xaa can be Arg
  misc_feature (9)..(9): Xaa can be Leu or Met
TXVLPRGQX

SEQ ID NO: 50920 - protein, 9 aa, Artificial Sequence
  Description of Artificial Sequence: Synthetic peptide
  Seed: TRVVPRGQL
  misc_feature (2)..(2): Xaa can be Arg
  misc_feature (9)..(9): Xaa can be Leu
TXVVPRGQX

SEQ ID NO: 50921 - protein, 9 aa, Artificial Sequence
  Description of Artificial Sequence: Synthetic peptide
  Seed: TSDMRAEII
  misc_feature (2)..(2): Xaa can be Ala, Ser, Thr, Ile, Leu, Met, or Val
  misc_feature (9)..(9): Xaa can be Leu, Met, Phe, Ile, or Val
TXDMRAEIX

SEQ ID NO: 50922 - protein, 10 aa, Artificial Sequence
  Description of Artificial Sequence: Synthetic peptide
  Seed: TSDMRAEIIK
  misc_feature (2)..(2): Xaa can be Ser, Ala, Gln, Ile, Leu, Met, Thr, or Val
  misc_feature (10)..(10): Xaa can be Lys or Arg
TXDMRAEIIX

SEQ ID NO: 50923 - protein, 10 aa, Artificial Sequence
  Description of Artificial Sequence: Synthetic peptide
  Seed: TSDMRIEIIR
  misc_feature (2)..(2): Xaa can be Ala, Ile, Met, Phe, Ser, Thr, Trp, Tyr, Val, Gln, or Leu
  misc_feature (10)..(10): Xaa can be Arg or Lys
TXDMRIEIIX

SEQ ID NO: 50924 - protein, 9 aa, Artificial Sequence
  Description of Artificial Sequence: Synthetic peptide
  Seed: TSDMRTEII
  misc_feature (2)..(2): Xaa can be Ala, Ser, Thr, Met, Ile, Leu, Val, or Gln
  misc_feature (9)..(9): Xaa can be Phe, Leu, Met, Ile, or Val
TXDMRTEIX

SEQ ID NO: 50925 - protein, 10 aa, Artificial Sequence
  Description of Artificial Sequence: Synthetic peptide
  Seed: TSDMRTEIIK
  misc_feature (2)..(2): Xaa can be Ser, Thr, Ala, Gln, Ile, Leu, Met, or Val
  misc_feature (10)..(10): Xaa can be Lys or Arg
TXDMRTEIIX

SEQ ID NO: 50926 - protein, 9 aa, Artificial Sequence
  Description of Artificial Sequence: Synthetic peptide
  Seed: TSDMRTEVI
  misc_feature (2)..(2): Xaa can be Ala, Ile, Leu, Met, Ser, Thr, Val, Gln, Gly, or Cys
  misc_feature (9)..(9): Xaa can be Leu, Met, Phe, Ile, or Val
TXDMRTEVX

SEQ ID NO: 50927 - protein, 10 aa, Artificial Sequence
  Description of Artificial Sequence: Synthetic peptide
  Seed: TSDMRTEVIR
  misc_feature (2)..(2): Xaa can be Met, Thr, Val, Ala, Gln, Ile, Leu, Phe, Ser, Trp, or Tyr
  misc_feature (10)..(10): Xaa can be Arg or Lys
TXDMRTEVIX

SEQ ID NO: 50928 - protein, 8 aa, Artificial Sequence
  Description of Artificial Sequence: Synthetic peptide
  Seed: TSPIVPSL
  misc_feature (2)..(2): Xaa can be Ala, Leu, Met, or Ser
  misc_feature (8)..(8): Xaa can be Leu
TXPIVPSX

SEQ ID NO: 50929 - protein, 9 aa, Artificial Sequence
  Description of Artificial Sequence: Synthetic peptide
  Seed: TSQVYSLIR
  misc_feature (2)..(2): Xaa can be Ile, Met, Thr, Val, Ala, Gln, Leu, Phe, Ser, Trp, Tyr, or Gly
  misc_feature (9)..(9): Xaa can be Arg, Lys, or Tyr
TXQVYSLIX

SEQ ID NO: 50930 - protein, 9 aa, Artificial Sequence
  Description of Artificial Sequence: Synthetic peptide
  Seed: TTAGLTHMM
  misc_feature (2)..(2): Xaa can be Thr, Val, Ala, Ile, Met, Ser, Leu, Gln, Gly, Asn, Cys, Phe, Pro, Tyr, Asp, Glu, or His
  misc_feature (9)..(9): Xaa can be Arg, Lys, Val, Ile, Tyr, Leu, Ala, Met, Phe, Trp, Thr, Cys, Gln, His, Ser, or Glu
TXAGLTHMX

SEQ ID NO: 50931 - protein, 10 aa, Artificial Sequence
  Description of Artificial Sequence: Synthetic peptide
  Seed: TTAGLTHMMI
  misc_feature (2)..(2): Xaa can be Thr, Val, Ala, Ile, Ser, Met, Leu, or Asn
  misc_feature (10)..(10): Xaa can be Val, Ile, Leu, Ala, Met, or Thr
TXAGLTHMMX

SEQ ID NO: 50932 - protein, 11 aa, Artificial Sequence
  Description of Artificial Sequence: Synthetic peptide
  Seed: TTAGLTHMMIW
  misc_feature (2)..(2): Xaa can be Ser, Thr, Ala, Arg, Cys, Gly, Ile, Leu, Lys, Met, or Val
  misc_feature (11)..(11): Xaa can be Trp, Phe, Tyr, or Met
TXAGLTHMMIX

SEQ ID NO: 50933 - protein, 10 aa, Artificial Sequence
  Description of Artificial Sequence: Synthetic peptide
  Seed: TTEIRASVGR
  misc_feature (2)..(2): Xaa can be Ile, Thr, Val, Ala, Gln, Leu, Met, Phe, Ser, Tyr, Asn, Gly, Pro, or Trp
  misc_feature (10)..(10): Xaa can be Arg, Lys, or Tyr
TXEIRASVGX

SEQ ID NO: 50934 - protein, 11 aa, Artificial Sequence
  Description of Artificial Sequence: Synthetic peptide
  Seed: TTIMAAFTGNA
  misc_feature (2)..(2): Xaa can be Ala, Arg, Asn, Asp, Cys, Gln, Glu, Gly, His, Ile, Leu, Lys, Met, Phe, Pro, Ser, Thr, Trp, Tyr, or Val
  misc_feature (11)..(11): Xaa can be Ala, Ile, Leu, or Val
TXIMAAFTGNX

SEQ ID NO: 50935 - protein, 8 aa, Artificial Sequence
  Description of Artificial Sequence: Synthetic peptide
  Seed: TTLELRSR
  misc_feature (2)..(2): Xaa can be Phe or Thr
  misc_feature (8)..(8): Xaa can be Arg
TXLELRSX

SEQ ID NO: 50936 - protein, 9 aa, Artificial Sequence
  Description of Artificial Sequence: Synthetic peptide
  Seed: TTLELRSRY
  misc_feature (2)..(2): Xaa can be Ser, Thr, Ala, Met, Ile, Leu, Val, Gln, Phe, Gly, Trp, or Tyr
  misc_feature (9)..(9): Xaa can be Tyr, Phe, Arg, Lys, Trp, Met, Leu, or Ile
TXLELRSRX

SEQ ID NO: 50937 - protein, 10 aa, Artificial Sequence
  Description of Artificial Sequence: Synthetic peptide
  Seed: TTLELRSRYW
  misc_feature (2)..(2): Xaa can be Ser, Thr, Ala, Cys, Gly, Ile, Leu, Met, or Val
  misc_feature (10)..(10): Xaa can be Trp, Phe, Met, or Tyr
TXLELRSRYX

SEQ ID NO: 50938 - protein, 9 aa, Artificial Sequence
  Description of Artificial Sequence: Synthetic peptide
  Seed: TTYQRTRAL
  misc_feature (2)..(2): Xaa can be Gln, Tyr, Met, Pro, Ala, Leu, Phe, Thr, Ile, Ser, Val, His, Trp, Arg, Gly, Lys, Asn, Cys, Glu, or Asp
  misc_feature (9)..(9): Xaa can be Tyr, Ile, Leu, Met, Phe, Trp, Val, Ala, His, Cys, Lys, Thr, Arg, Ser, Gly, Gln, Glu, Pro, or Asn
TXYQRTRAX

SEQ ID NO: 50939 - protein, 10 aa, Artificial Sequence
  Description of Artificial Sequence: Synthetic peptide
  Seed: TTYQRTRALV
  misc_feature (2)..(2): Xaa can be Thr, Ala, Ile, Ser, or Val
  misc_feature (10)..(10): Xaa can be Val, Ala, Ile, or Leu
TXYQRTRALX

SEQ ID NO: 50940 - protein, 11 aa, Artificial Sequence
  Description of Artificial Sequence: Synthetic peptide
  Seed: TTYQRTRALVR
  misc_feature (2)..(2): Xaa can be Ile, Thr, Val, Ala, Leu, Met, Phe, Ser, Arg, Gln, Lys, Trp, or Tyr
  misc_feature (11)..(11): Xaa can be Arg, Lys, or Tyr
TXYQRTRALVX

SEQ ID NO: 50941 - protein, 10 aa, Artificial Sequence
  Description of Artificial Sequence: Synthetic peptide
  Seed: TVASGYDFER
  misc_feature (2)..(2): Xaa can be Ile, Thr, Val, Ala, Arg, Asn, Asp, Cys, Gln, Glu, Gly, His, Leu, Lys, Met, Phe, Pro, Ser, Trp, or Tyr
  misc_feature (10)..(10): Xaa can be Arg, Lys, or Tyr
TXASGYDFEX

SEQ ID NO: 50942 - protein, 9 aa, Artificial Sequence
  Description of Artificial Sequence: Synthetic peptide
  Seed: TVKGVGTMV
  misc_feature (2)..(2): Xaa can be Thr or Val
  misc_feature (9)..(9): Xaa can be Val or Ile
TXKGVGTMX

SEQ ID NO: 50943 - protein, 10 aa, Artificial Sequence
  Description of Artificial Sequence: Synthetic peptide
  Seed: TVKGVGTMVM
  misc_feature (2)..(2): Xaa can be Gln, Met, Ile, Leu, Val, Ala, Ser, or Thr
  misc_feature (10)..(10): Xaa can be Phe, Tyr, Met, Leu, Trp, or Ile
TXKGVGTMVX

SEQ ID NO: 50944 - protein, 10 aa, Artificial Sequence
  Description of Artificial Sequence: Synthetic peptide
  Seed: TVMAAFSGNT
  misc_feature (2)..(2): Xaa can be Thr, Val, Ala, Ile, Ser, Leu, Met, Asn, Arg, Asp, Cys, Gln, Glu, Gly, His, Lys, Phe, Pro, Trp, or Tyr
  misc_feature (10)..(10): Xaa can be Val, Ile, Leu, Ala, Met, or Thr
TXMAAFSGNX

SEQ ID NO: 50945 - protein, 10 aa, Artificial Sequence
  Description of Artificial Sequence: Synthetic peptide
  Seed: TVMAAFVGNT
  misc_feature (2)..(2): Xaa can be Gln, Met, Leu, Phe, Thr, Ala, Arg, Asn, Asp, Cys, Glu, Gly, His, Ile, Lys, Pro, Ser, Trp, Tyr, or Val
  misc_feature (10)..(10): Xaa can be Ala, Ile, Leu, Met, Thr, Val, Ser, Cys, Pro, or Phe
TXMAAFVGNX

SEQ ID NO: 50946 - protein, 9 aa, Artificial Sequence
  Description of Artificial Sequence: Synthetic peptide
  Seed: TYQRTRAHV
  misc_feature (2)..(2): Xaa can be Phe, Tyr, Trp, or Met
  misc_feature (9)..(9): Xaa can be Met, Phe, Ile, Leu, Trp, Tyr, or Val
TXQRTRAHX

SEQ ID NO: 50947 - protein, 10 aa, Artificial Sequence
  Description of Artificial Sequence: Synthetic peptide
  Seed: TYQRTRAHVR
  misc_feature (2)..(2): Xaa can be Leu, Met, Phe, Trp, Tyr, Ala, Arg, Asn, Gln, Gly, Ile, Ser, Thr, or Val
  misc_feature (10)..(10): Xaa can be Arg or Lys
TXQRTRAHVX

SEQ ID NO: 50948 - protein, 8 aa, Artificial Sequence
  Description of Artificial Sequence: Synthetic peptide
  Seed: TYQRTRAL
  misc_feature (2)..(2): Xaa can be Tyr, Phe, or Trp
  misc_feature (8)..(8): Xaa can be Leu, Met, Phe, Tyr, Ile, or Val
TXQRTRAX

SEQ ID NO: 50949 - protein, 9 aa, Artificial Sequence
  Description of Artificial Sequence: Synthetic peptide
  Seed: TYQRTRALV
  misc_feature (2)..(2): Xaa can be Tyr, Phe, Trp, or Met
  misc_feature (9)..(9): Xaa can be Met, Phe, Trp, Tyr, Ile, Leu, Val, or His
TXQRTRALX

SEQ ID NO: 50950 - protein, 10 aa, Artificial Sequence
  Description of Artificial Sequence: Synthetic peptide
  Seed: TYQRTRALVR
  misc_feature (2)..(2): Xaa can be Ile, Leu, Met, Phe, Thr, Trp, Tyr, Val, Ala, Arg, Asn, Cys, Gln, Gly, Lys, or Ser
  misc_feature (10)..(10): Xaa can be Arg or Lys
TXQRTRALVX

SEQ ID NO: 50951 - protein, 9 aa, Artificial Sequence
  Description of Artificial Sequence: Synthetic peptide
  Seed: VAGGYDFER
  misc_feature (2)..(2): Xaa can be Ile, Leu, Met, Phe, Thr, Trp, Tyr, Val, Ala, Gln, Gly, or Ser
  misc_feature (9)..(9): Xaa can be Arg or Lys
VXGGYDFEX

SEQ ID NO: 50952 - protein, 9 aa, Artificial Sequence
  Description of Artificial Sequence: Synthetic peptide
  Seed: VAHKSCLPA
  misc_feature (2)..(2): Xaa can be Thr, Ser, Ala, Val, Met, Gly, Ile, Tyr, Asn, Gln, Leu, Phe, or Trp
  misc_feature (9)..(9): Xaa can be Lys, Ala, Met, Phe, Tyr, Leu, Ile, Val, Ser, Trp, Arg, Gly, or Thr
VXHKSCLPX

SEQ ID NO: 50953 - protein, 9 aa, Artificial Sequence
  Description of Artificial Sequence: Synthetic peptide
  Seed: VASGHDFER
  misc_feature (2)..(2): Xaa can be Ala, Gln, Ile, Leu, Met, Phe, Ser, Thr, Trp, Tyr, Val, Asn, or Gly
  misc_feature (9)..(9): Xaa can be Arg or Lys
VXSGHDFEX

SEQ ID NO: 50954 - protein, 9 aa, Artificial Sequence
  Description of Artificial Sequence: Synthetic peptide
  Seed: VASGYAFEK
  misc_feature (2)..(2): Xaa can be Met, Thr, Ile, Leu, Ser, Val, Ala, Asn, Gln, Gly, Phe, Trp, Tyr, Arg, Cys, His, Lys, or Pr o
  misc_feature (9)..(9): Xaa can be Arg, Lys, Tyr, or His
VXSGYAFEX

SEQ ID NO: 50955 - protein, 9 aa, Artificial Sequence
  Description of Artificial Sequence: Synthetic peptide
  Seed: VASGYDFEK
  misc_feature (2)..(2): Xaa can be Met, Thr, Val, Ala, Gln, Ile, Leu, Phe, Ser, Asn, Gly, or Pro
  misc_feature (9)..(9): Xaa can be Arg, Lys, or Tyr
VXSGYDFEX

SEQ ID NO: 50956 - protein, 9 aa, Artificial Sequence
  Description of Artificial Sequence: Synthetic peptide
  Seed: VASGYEFEK
  misc_feature (2)..(2): Xaa can be Ile, Leu, Met, Thr, Val, Ala, Gln, Gly, Phe, Ser, Trp, Tyr, Asn, or Pro
  misc_feature (9)..(9): Xaa can be Arg, Lys, or Tyr
VXSGYEFEX

SEQ ID NO: 50957 - protein, 9 aa, Artificial Sequence
  Description of Artificial Sequence: Synthetic peptide
  Seed: VASGYNFEK
  misc_feature (2)..(2): Xaa can be Met, Ile, Leu, Ser, Thr, Val, Ala, Asn, Gln, Gly, Phe, Trp, Tyr, Arg, Cys, His, Lys, or Pr o
  misc_feature (9)..(9): Xaa can be Arg, Lys, Tyr, or His
VXSGYNFEX

SEQ ID NO: 50958 - protein, 9 aa, Artificial Sequence
  Description of Artificial Sequence: Synthetic peptide
  Seed: VAYERMCNI
  misc_feature (2)..(2): Xaa can be Leu, Met, Ala, Ile, Gln, Val, Ser, Thr, Arg, Gly, Tyr, Cys, Asn, or Phe
  misc_feature (9)..(9): Xaa can be Tyr, Val, Leu, Met, Phe, Trp, Ile, Ala, Cys, Thr, Ser, Gly, Pro, or His
VXYERMCNX

SEQ ID NO: 50959 - protein, 10 aa, Artificial Sequence
  Description of Artificial Sequence: Synthetic peptide
  Seed: VAYERMCNIL
  misc_feature (2)..(2): Xaa can be Ala, Tyr, Ser, Trp, Phe, Thr, Arg, Asn, Asp, Cys, Gln, Glu, Gly, His, Ile, Leu, Lys, Met, Pro, or Val
  misc_feature (10)..(10): Xaa can be Leu, Phe, Trp, Ile, Met, Tyr, or Val
VXYERMCNIX

SEQ ID NO: 50960 - protein, 11 aa, Artificial Sequence
  Description of Artificial Sequence: Synthetic peptide
  Seed: VAYERMCNILK
  misc_feature (2)..(2): Xaa can be Thr, Met, Val, Ile, Leu, Ser, Ala, Arg, Gln, Phe, or Tyr
  misc_feature (11)..(11): Xaa can be Lys, Arg, Tyr, or Ala
VXYERMCNILX

SEQ ID NO: 50961 - protein, 11 aa, Artificial Sequence
  Description of Artificial Sequence: Synthetic peptide
  Seed: VDGRWMRELVL
  misc_feature (2)..(2): Xaa can be Arg, Ala, Asn, Asp, Cys, Gln, Glu, Gly, His, Ile, Leu, Lys, Met, Phe, Pro, Ser, Thr, Trp, Tyr, or Val
  misc_feature (11)..(11): Xaa can be Arg, Ile, Leu, Lys, Met, Phe, Tyr, or Val
VXGRWMRELVX

SEQ ID NO: 50962 - protein, 9 aa, Artificial Sequence
  Description of Artificial Sequence: Synthetic peptide
  Seed: VEAMDSNTL
  misc_feature (2)..(2): Xaa can be Glu
  misc_feature (9)..(9): Xaa can be Ala, Ile, Leu, Met, Phe, Pro, Thr, or Val
VXAMDSNTX

SEQ ID NO: 50963 - protein, 11 aa, Artificial Sequence
  Description of Artificial Sequence: Synthetic peptide
  Seed: VEAMDSNTLEL
  misc_feature (2)..(2): Xaa can be Leu, Met, Phe, Tyr, Ala, Arg, Asn, Asp, Cys, Gln, Glu, Gly, His, Ile, Lys, Pro, Ser, Thr, Trp, or Val
  misc_feature (11)..(11): Xaa can be Leu, Val, or Ile
VXAMDSNTLEX

SEQ ID NO: 50964 - protein, 9 aa, Artificial Sequence
  Description of Artificial Sequence: Synthetic peptide
  Seed: VEAMDSSTL
  misc_feature (2)..(2): Xaa can be Gln, Glu, Lys, Met, His, Arg, Leu, Ala, Ser, Val, Asn, Gly, Ile, Phe, Thr, Tyr, Cys, Pro, or Trp
  misc_feature (9)..(9): Xaa can be Phe, Tyr, Met, Leu, Ile, Trp, Ala, His, Val, Thr, Gly, Cys, or Pro
VXAMDSSTX

SEQ ID NO: 50965 - protein, 11 aa, Artificial Sequence
  Description of Artificial Sequence: Synthetic peptide
  Seed: VEAMDSSTLEL
  misc_feature (2)..(2): Xaa can be Ala, Leu, Phe, Tyr, Ile, Ser, Thr, Val, Glu, Met, Arg, Asn, Asp, Cys, Gln, Gly, His, Lys, Pro, or Trp
  misc_feature (11)..(11): Xaa can be Leu, Val, Met, Phe, or Ile
VXAMDSSTLEX

SEQ ID NO: 50966 - protein, 9 aa, Artificial Sequence
  Description of Artificial Sequence: Synthetic peptide
  Seed: VEAMDSTTL
  misc_feature (2)..(2): Xaa can be Gln, Glu, Lys, Met, His, Arg, Leu, Ala, Ser, Asn, Gly, Ile, Phe, Thr, Tyr, Val, Cys, Pro, or Trp
  misc_feature (9)..(9): Xaa can be Phe, Tyr, Met, Leu, Ile, Trp, Ala, His, Val, Thr, Gly, Cys, or Pro
VXAMDSTTX

SEQ ID NO: 50967 - protein, 11 aa, Artificial Sequence
  Description of Artificial Sequence: Synthetic peptide
  Seed: VEAMDSTTLEL
  misc_feature (2)..(2): Xaa can be Glu, Leu, Met, Phe, Trp, Tyr, Ala, Arg, Asn, Asp, Cys, Gln, Gly, His, Ile, Lys, Pro, Ser, Thr, or Val
  misc_feature (11)..(11): Xaa can be Leu, Val, Ile, or Met
VXAMDSTTLEX

SEQ ID NO: 50968 - protein, 8 aa, Artificial Sequence
  Description of Artificial Sequence: Synthetic peptide
  Seed: VEDLIFLA
  misc_feature (2)..(2): Xaa can be Glu
  misc_feature (8)..(8): Xaa can be Ala or Val
VXDLIFLX

SEQ ID NO: 50969 - protein, 11 aa, Artificial Sequence
  Description of Artificial Sequence: Synthetic peptide
  Seed: VEDLIFLARSA
  misc_feature (2)..(2): Xaa can be Glu
  misc_feature (11)..(11): Xaa can be Ala
VXDLIFLARSX

SEQ ID NO: 50970 - protein, 8 aa, Artificial Sequence
  Description of Artificial Sequence: Synthetic peptide
  Seed: VERMVLSA
  misc_feature (2)..(2): Xaa can be Glu or Asp
  misc_feature (8)..(8): Xaa can be Leu, Ala, Ile, Met, Phe, or Val
VXRMVLSX

SEQ ID NO: 50971 - protein, 9 aa, Artificial Sequence
  Description of Artificial Sequence: Synthetic peptide
  Seed: VERMVLSAF
  misc_feature (2)..(2): Xaa can be Gln, Glu, Met, Lys, His, Leu, Ala, Asp, Arg, Asn, Ile, Ser, Thr, Val, Gly, Phe, Trp, Tyr, Cys, or Pro
  misc_feature (9)..(9): Xaa can be Phe, Tyr, Met, Leu, Trp, Ile, Val, His, Ala, Gly, Cys, Pro, Ser, Thr, Asn, or Gln
VXRMVLSAX

SEQ ID NO: 50972 - protein, 9 aa, Artificial Sequence
  Description of Artificial Sequence: Synthetic peptide
  Seed: VETMDSSTL
  misc_feature (2)..(2): Xaa can be Glu
  misc_feature (9)..(9): Xaa can be Ile, Leu, Met, Phe, or Val
VXTMDSSTX

SEQ ID NO: 50973 - protein, 11 aa, Artificial Sequence
  Description of Artificial Sequence: Synthetic peptide
  Seed: VETMDSSTLEL
  misc_feature (2)..(2): Xaa can be Ala, Phe, Tyr, Leu, Ser, Thr, Val, Ile, Met, Arg, Asn, Asp, Cys, Gln, Glu, Gly, His, Lys, Pro, or Trp
  misc_feature (11)..(11): Xaa can be Leu, Val, Phe, Met, or Ile
VXTMDSSTLEX

SEQ ID NO: 50974 - protein, 10 aa, Artificial Sequence
  Description of Artificial Sequence: Synthetic peptide
  Seed: VFEFSDERAA
  misc_feature (2)..(2): Xaa can be Ala, Arg, Asn, Asp, Cys, Gln, Glu, Gly, His, Ile, Leu, Lys, Met, Phe, Pro, Ser, Thr, Trp, Tyr, or Val
  misc_feature (10)..(10): Xaa can be Ala
VXEFSDERAX

SEQ ID NO: 50975 - protein, 10 aa, Artificial Sequence
  Description of Artificial Sequence: Synthetic peptide
  Seed: VFPRGKLSTR
  misc_feature (2)..(2): Xaa can be Phe, Ala, Gln, Ile, Leu, Met, Ser, Thr, Trp, Tyr, or Val
  misc_feature (10)..(10): Xaa can be Arg or Lys
VXPRGKLSTX

SEQ ID NO: 50976 - protein, 10 aa, Artificial Sequence
  Description of Artificial Sequence: Synthetic peptide
  Seed: VGGMVGGIGR
  misc_feature (2)..(2): Xaa can be Met, Phe, Tyr, Ala, Arg, Asn, Asp, Cys, Gln, Glu, Gly, His, Ile, Leu, Lys, Pro, Ser, Thr, Trp, or Val
  misc_feature (10)..(10): Xaa can be Arg or Lys
VXGMVGGIGX

SEQ ID NO: 50977 - protein, 9 aa, Artificial Sequence
  Description of Artificial Sequence: Synthetic peptide
  Seed: VGIDPFRLL
  misc_feature (2)..(2): Xaa can be Ala, Ser, Thr, Val, Gly, Ile, Met, Gln, Leu, or Cys
  misc_feature (9)..(9): Xaa can be Leu, Met, Tyr, Phe, Ile, Val, Ala, His, or Trp
VXIDPFRLX

SEQ ID NO: 50978 - protein, 9 aa, Artificial Sequence
  Description of Artificial Sequence: Synthetic peptide
  Seed: VGIDSFRML
  misc_feature (2)..(2): Xaa can be Ala, Ser, Thr, Val, Gln, Gly, Ile, Leu, or Met
  misc_feature (9)..(9): Xaa can be Leu, Met, Phe, Ile, or Val
VXIDSFRMX

SEQ ID NO: 50979 - protein, 10 aa, Artificial Sequence
  Description of Artificial Sequence: Synthetic peptide
  Seed: VGKMIDGIGR
  misc_feature (2)..(2): Xaa can be Met, Phe, Trp, Tyr, Ala, Gln, Gly, Ile, Leu, Ser, Thr, or Val
  misc_feature (10)..(10): Xaa can be Arg or Lys
VXKMIDGIGX

SEQ ID NO: 50980 - protein, 11 aa, Artificial Sequence
  Description of Artificial Sequence: Synthetic peptide
  Seed: VGKMIDGIGRF
  misc_feature (2)..(2): Xaa can be Ala, Arg, Asn, Asp, Cys, Gln, Glu, Gly, His, Ile, Leu, Lys, Met, Phe, Pro, Ser, Thr, Trp, Tyr, or Val
  misc_feature (11)..(11): Xaa can be Phe or Tyr
VXKMIDGIGRX

SEQ ID NO: 50981 - protein, 10 aa, Artificial Sequence
  Description of Artificial Sequence: Synthetic peptide
  Seed: VGKMIGGIGR
  misc_feature (2)..(2): Xaa can be Met, Phe, Thr, Trp, Tyr, Ala, Asn, Gln, Gly, Ile, Leu, Ser, or Val
  misc_feature (10)..(10): Xaa can be Arg or Lys
VXKMIGGIGX

SEQ ID NO: 50982 - protein, 11 aa, Artificial Sequence
  Description of Artificial Sequence: Synthetic peptide
  Seed: VGKMIGGIGRF
  misc_feature (2)..(2): Xaa can be Ala, Arg, Asn, Asp, Cys, Gln, Glu, Gly, His, Ile, Leu, Lys, Met, Phe, Pro, Ser, Thr, Trp, Tyr, or Val
  misc_feature (11)..(11): Xaa can be Phe or Tyr
VXKMIGGIGRX

SEQ ID NO: 50983 - protein, 10 aa, Artificial Sequence
  Description of Artificial Sequence: Synthetic peptide
  Seed: VGKMINGIGR
  misc_feature (2)..(2): Xaa can be Met, Phe, Thr, Trp, Tyr, Val, Ala, Asn, Gln, Gly, Ile, Leu, or Ser
  misc_feature (10)..(10): Xaa can be Arg or Lys
VXKMINGIGX

SEQ ID NO: 50984 - protein, 11 aa, Artificial Sequence
  Description of Artificial Sequence: Synthetic peptide
  Seed: VGKMINGIGRF
  misc_feature (2)..(2): Xaa can be Ala, Arg, Asn, Asp, Cys, Gln, Glu, Gly, His, Ile, Leu, Lys, Met, Phe, Pro, Ser, Thr, Trp, Tyr, or Val
  misc_feature (11)..(11): Xaa can be Phe or Tyr
VXKMINGIGRX

SEQ ID NO: 50985 - protein, 10 aa, Artificial Sequence
  Description of Artificial Sequence: Synthetic peptide
  Seed: VGKMISGIGR
  misc_feature (2)..(2): Xaa can be Met, Phe, Ser, Thr, Trp, Tyr, Val, Ala, Asn, Gln, Gly, Ile, or Leu
  misc_feature (10)..(10): Xaa can be Arg or Lys
VXKMISGIGX

SEQ ID NO: 50986 - protein, 11 aa, Artificial Sequence
  Description of Artificial Sequence: Synthetic peptide
  Seed: VGKMISGIGRF
  misc_feature (2)..(2): Xaa can be Ala, Arg, Asn, Asp, Cys, Gln, Glu, Gly, His, Ile, Leu, Lys, Met, Phe, Pro, Ser, Thr, Trp, Tyr, or Val
  misc_feature (11)..(11): Xaa can be Phe or Tyr
VXKMISGIGRX

SEQ ID NO: 50987 - protein, 10 aa, Artificial Sequence
  Description of Artificial Sequence: Synthetic peptide
  Seed: VGKMVDGIGR
  misc_feature (2)..(2): Xaa can be Met, Phe, Trp, Tyr, Ala, Gln, Gly, Ile, Leu, Ser, Thr, or Val
  misc_feature (10)..(10): Xaa can be Arg or Lys
VXKMVDGIGX

SEQ ID NO: 50988 - protein, 10 aa, Artificial Sequence
  Description of Artificial Sequence: Synthetic peptide
  Seed: VGKMVGGIGR
  misc_feature (2)..(2): Xaa can be Met, Phe, Thr, Trp, Tyr, Ala, Asn, Gln, Gly, Ile, Leu, Ser, or Val
  misc_feature (10)..(10): Xaa can be Arg or Lys
VXKMVGGIGX

SEQ ID NO: 50989 - protein, 10 aa, Artificial Sequence
  Description of Artificial Sequence: Synthetic peptide
  Seed: VGRMIDGIGR
  misc_feature (2)..(2): Xaa can be Met, Phe, Trp, Tyr, Ala, Gln, Gly, Ile, Leu, Ser, Thr, or Val
  misc_feature (10)..(10): Xaa can be Arg or Lys
VXRMIDGIGX

SEQ ID NO: 50990 - protein, 11 aa, Artificial Sequence
  Description of Artificial Sequence: Synthetic peptide
  Seed: VGRMIDGIGRF
  misc_feature (2)..(2): Xaa can be Ala, Arg, Asn, Asp, Cys, Gln, Glu, Gly, His, Ile, Leu, Lys, Met, Phe, Pro, Ser, Thr, Trp, Tyr, or Val
  misc_feature (11)..(11): Xaa can be Phe or Tyr
VXRMIDGIGRX

SEQ ID NO: 50991 - protein, 10 aa, Artificial Sequence
  Description of Artificial Sequence: Synthetic peptide
  Seed: VGRMIGGIGR
  misc_feature (2)..(2): Xaa can be Arg, Ala, Asn, Asp, Cys, Gln, Glu, Gly, His, Ile, Leu, Lys, Met, Phe, Pro, Ser, Thr, Trp, Tyr, or Val
  misc_feature (10)..(10): Xaa can be Arg, Ile, Leu, Lys, Met, Phe, Tyr, Val, or Trp
VXRMIGGIGX

SEQ ID NO: 50992 - protein, 11 aa, Artificial Sequence
  Description of Artificial Sequence: Synthetic peptide
  Seed: VGRMIGGIGRF
  misc_feature (2)..(2): Xaa can be Ala, Arg, Asn, Asp, Cys, Gln, Glu, Gly, His, Ile, Leu, Lys, Met, Phe, Pro, Ser, Thr, Trp, Tyr, or Val
  misc_feature (11)..(11): Xaa can be Phe or Tyr
VXRMIGGIGRX

SEQ ID NO: 50993 - protein, 10 aa, Artificial Sequence
  Description of Artificial Sequence: Synthetic peptide
  Seed: VGRMVGGIGR
  misc_feature (2)..(2): Xaa can be Arg, Ala, Asn, Asp, Cys, Gln, Glu, Gly, His, Ile, Leu, Lys, Met, Phe, Pro, Ser, Thr, Trp, Tyr, or Val
  misc_feature (10)..(10): Xaa can be Arg, Ile, Leu, Lys, Met, Phe, Tyr, Val, or Trp
VXRMVGGIGX

SEQ ID NO: 50994 - protein, 10 aa, Artificial Sequence
  Description of Artificial Sequence: Synthetic peptide
  Seed: VGRMVSGIGR
  misc_feature (2)..(2): Xaa can be Arg, Ala, Asn, Asp, Cys, Gln, Glu, Gly, His, Ile, Leu, Lys, Met, Phe, Pro, Ser, Thr, Trp, Tyr, or Val
  misc_feature (10)..(10): Xaa can be Arg, Ile, Leu, Lys, Met, Phe, Tyr, Val, or Trp
VXRMVSGIGX

SEQ ID NO: 50995 - protein, 11 aa, Artificial Sequence
  Description of Artificial Sequence: Synthetic peptide
  Seed: VGRMVSGIGRF
  misc_feature (2)..(2): Xaa can be Ala, Arg, Gln, Gly, Ile, Leu, Met, Phe, Ser, Thr, Trp, Val, Asn, Asp, Cys, Glu, His, Lys, Pro, or Tyr
  misc_feature (11)..(11): Xaa can be Tyr or Phe
VXRMVSGIGRX

SEQ ID NO: 50996 - protein, 10 aa, Artificial Sequence
  Description of Artificial Sequence: Synthetic peptide
  Seed: VGTIAMELIR
  misc_feature (2)..(2): Xaa can be Asn, Asp, Glu, His, Ile, Met, Phe, Thr, Trp, Tyr, Val, Ala, Arg, Cys, Gln, Gly, Leu, Lys, Pro, or Ser
  misc_feature (10)..(10): Xaa can be Arg or Lys
VXTIAMELIX

SEQ ID NO: 50997 - protein, 10 aa, Artificial Sequence
  Description of Artificial Sequence: Synthetic peptide
  Seed: VGTIVMELIR
  misc_feature (2)..(2): Xaa can be Ala, Ile, Met, Phe, Thr, Trp, Tyr, Val, Arg, Asn, Asp, Cys, Gln, Glu, Gly, His, Leu, Lys, Pro, or Ser
  misc_feature (10)..(10): Xaa can be Arg or Lys
VXTIVMELIX

SEQ ID NO: 50998 - protein, 10 aa, Artificial Sequence
  Description of Artificial Sequence: Synthetic peptide
  Seed: VGTMIMELIR
  misc_feature (2)..(2): Xaa can be Ala, Arg, Gln, Glu, Ile, Leu, Met, Phe, Ser, Thr, Trp, Tyr, Val, Asn, Asp, Cys, Gly, His, Lys, or Pro
  misc_feature (10)..(10): Xaa can be Arg or Lys
VXTMIMELIX

SEQ ID NO: 50999 - protein, 10 aa, Artificial Sequence
  Description of Artificial Sequence: Synthetic peptide
  Seed: VGTMNMELIR
  misc_feature (2)..(2): Xaa can be Ala, Arg, Asn, Asp, Cys, Gln, Glu, Gly, His, Ile, Leu, Lys, Met, Phe, Pro, Ser, Thr, Trp, Tyr, or Val
  misc_feature (10)..(10): Xaa can be Arg, Lys, or Tyr
VXTMNMELIX

SEQ ID NO: 51000 - protein, 10 aa, Artificial Sequence
  Description of Artificial Sequence: Synthetic peptide
  Seed: VGTMVLELIR
  misc_feature (2)..(2): Xaa can be Ala, Arg, Gln, Glu, Ile, Leu, Met, Phe, Ser, Thr, Trp, Tyr, Val, Asn, Asp, Cys, Gly, His, Lys, or Pro
  misc_feature (10)..(10): Xaa can be Arg or Lys
VXTMVLELIX

SEQ ID NO: 51001 - protein, 10 aa, Artificial Sequence
  Description of Artificial Sequence: Synthetic peptide
  Seed: VGTMVMELIR
  misc_feature (2)..(2): Xaa can be Ala, Arg, Gln, Glu, Ile, Leu, Met, Phe, Ser, Thr, Trp, Tyr, Val, Asn, Asp, Cys, Gly, His, Lys, or Pro
  misc_feature (10)..(10): Xaa can be Arg or Lys
VXTMVMELIX

SEQ ID NO: 51002 - protein, 10 aa, Artificial Sequence
  Description of Artificial Sequence: Synthetic peptide
  Seed: VGTMVMELVR
  misc_feature (2)..(2): Xaa can be Ala, Arg, Gln, Glu, Ile, Leu, Met, Phe, Ser, Thr, Trp, Tyr, Val, Asn, Asp, Cys, Gly, His, Lys, or Pro
  misc_feature (10)..(10): Xaa can be Arg or Lys
VXTMVMELVX

SEQ ID NO: 51003 - protein, 10 aa, Artificial Sequence
  Description of Artificial Sequence: Synthetic peptide
  Seed: VGTVVMELIR
  misc_feature (2)..(2): Xaa can be Met, Phe, Tyr, Ala, Arg, Gln, Gly, Ile, Leu, Ser, Thr, Trp, or Val
  misc_feature (10)..(10): Xaa can be Arg or Lys
VXTVVMELIX

SEQ ID NO: 51004 - protein, 10 aa, Artificial Sequence
  Description of Artificial Sequence: Synthetic peptide
  Seed: VHGLAVASGY
  misc_feature (2)..(2): Xaa can be Gln, Lys, Met, Arg, His, Ala, Asn, Asp, Cys, Glu, Gly, Ile, Leu, Phe, Pro, Ser, Thr, Trp, Tyr, or Val
  misc_feature (10)..(10): Xaa can be Tyr, Phe, or Met
VXGLAVASGX

SEQ ID NO: 51005 - protein, 10 aa, Artificial Sequence
  Description of Artificial Sequence: Synthetic peptide
  Seed: VIPRGQLATR
  misc_feature (2)..(2): Xaa can be Met, Phe, Trp, Tyr, Ala, Gln, Ile, Leu, Ser, Thr, or Val
  misc_feature (10)..(10): Xaa can be Arg or Lys
VXPRGQLATX

SEQ ID NO: 51006 - protein, 10 aa, Artificial Sequence
  Description of Artificial Sequence: Synthetic peptide
  Seed: VIPRGQLSTR
  misc_feature (2)..(2): Xaa can be Phe, Tyr, Gln, Ile, Leu, Met, Ser, Thr, Trp, or Val
  misc_feature (10)..(10): Xaa can be Arg or Lys
VXPRGQLSTX

SEQ ID NO: 51007 - protein, 9 aa, Artificial Sequence
  Description of Artificial Sequence: Synthetic peptide
  Seed: VIRMMESAK
  misc_feature (2)..(2): Xaa can be Thr, Ser, Val, Ala, Ile, Met, Tyr, Asn, Gln, Gly, Leu, Phe, or Trp
  misc_feature (9)..(9): Xaa can be Arg, Lys, Ala, Ile, Tyr, Val, Leu, Met, Ser, Gly, or Thr
VXRMMESAX

SEQ ID NO: 51008 - protein, 9 aa, Artificial Sequence
  Description of Artificial Sequence: Synthetic peptide
  Seed: VKGIGTMVM
  misc_feature (2)..(2): Xaa can be Gln, Met, Lys, Ala, Arg, Glu, His, Leu, Ser, Asn, Gly, Ile, Thr, Val, Phe, or Tyr
  misc_feature (9)..(9): Xaa can be Phe, Tyr, Met, Ile, Leu, His, Trp, Ala, or Val
VXGIGTMVX

SEQ ID NO: 51009 - protein, 9 aa, Artificial Sequence
  Description of Artificial Sequence: Synthetic peptide
  Seed: VKGVGTIAM
  misc_feature (2)..(2): Xaa can be Gln, Met, Lys, Ala, Arg, Glu, His, Leu, Ser, Asn, Ile, Thr, Val, or Gly
  misc_feature (9)..(9): Xaa can be Tyr, Phe, Met, Ile, Leu, Trp, His, or Val
VXGVGTIAX

SEQ ID NO: 51010 - protein, 9 aa, Artificial Sequence
  Description of Artificial Sequence: Synthetic peptide
  Seed: VKGVGTIVM
  misc_feature (2)..(2): Xaa can be Gln, Met, Lys, Ala, Arg, Glu, His, Leu, Ile, Ser, Thr, Val, or Asn
  misc_feature (9)..(9): Xaa can be Tyr, Phe, Met, Leu, Trp, His, Ile, or Val
VXGVGTIVX

SEQ ID NO: 51011 - protein, 9 aa, Artificial Sequence
  Description of Artificial Sequence: Synthetic peptide
  Seed: VKGVGTMIM
  misc_feature (2)..(2): Xaa can be Gln, Lys, Met, Ala, Arg, Glu, His, Leu, Ile, Ser, Val, or Thr
  misc_feature (9)..(9): Xaa can be Phe, Tyr, Met, Leu, His, Ile, or Trp
VXGVGTMIX

SEQ ID NO: 51012 - protein, 9 aa, Artificial Sequence
  Description of Artificial Sequence: Synthetic peptide
  Seed: VKGVGTMNM
  misc_feature (2)..(2): Xaa can be Gln, Lys, Met, Ala, Arg, Glu, His, Leu, or Ser
  misc_feature (9)..(9): Xaa can be Phe, Tyr, Met, or Leu
VXGVGTMNX

SEQ ID NO: 51013 - protein, 9 aa, Artificial Sequence
  Description of Artificial Sequence: Synthetic peptide
  Seed: VKGVGTMVL
  misc_feature (2)..(2): Xaa can be Gln, Met, Lys, Ala, Arg, Glu, His, Leu, Ser, Asn, Gly, Ile, Thr, Val, Phe, or Tyr
  misc_feature (9)..(9): Xaa can be Phe, Tyr, Met, Ile, Leu, Trp, His, Ala, or Val
VXGVGTMVX

SEQ ID NO: 51014 - protein, 9 aa, Artificial Sequence
  Description of Artificial Sequence: Synthetic peptide
  Seed: VKGVGTVVM
  misc_feature (2)..(2): Xaa can be Gln, Met, Lys, Ala, Arg, Glu, His, Leu, Asn, Ile, Ser, Thr, or Val
  misc_feature (9)..(9): Xaa can be Phe, Tyr, Met, Leu, His, Ile, Trp, or Val
VXGVGTVVX

SEQ ID NO: 51015 - protein, 9 aa, Artificial Sequence
  Description of Artificial Sequence: Synthetic peptide
  Seed: VLELIRIIK
  misc_feature (2)..(2): Xaa can be Ile, Leu, Met, Ser, Thr, or Val
  misc_feature (9)..(9): Xaa can be Lys
VXELIRIIX

SEQ ID NO: 51016 - protein, 10 aa, Artificial Sequence
  Description of Artificial Sequence: Synthetic peptide
  Seed: VLELIRIIKR
  misc_feature (2)..(2): Xaa can be Met, Phe, Tyr, Gln, Ile, Leu, Ser, Thr, Trp, or Val
  misc_feature (10)..(10): Xaa can be Arg or Lys
VXELIRIIKX

SEQ ID NO: 51017 - protein, 9 aa, Artificial Sequence
  Description of Artificial Sequence: Synthetic peptide
  Seed: VLELIRMIK
  misc_feature (2)..(2): Xaa can be Ala, Gln, Ile, Leu, Met, Phe, Ser, Thr, Trp, Tyr, Val, or Gly
  misc_feature (9)..(9): Xaa can be Arg or Lys
VXELIRMIX

SEQ ID NO: 51018 - protein, 10 aa, Artificial Sequence
  Description of Artificial Sequence: Synthetic peptide
  Seed: VLELIRMIKR
  misc_feature (2)..(2): Xaa can be Met, Phe, Trp, Tyr, Ala, Gln, Ile, Leu, Ser, Thr, or Val
  misc_feature (10)..(10): Xaa can be Arg or Lys
VXELIRMIKX

SEQ ID NO: 51019 - protein, 9 aa, Artificial Sequence
  Description of Artificial Sequence: Synthetic peptide
  Seed: VLNFIRGTK
  misc_feature (2)..(2): Xaa can be Thr, Ser, Val, Met, Ile, Leu, Tyr, Ala, Asn, Gln, Gly, Phe, Trp, Cys, His, or Pro
  misc_feature (9)..(9): Xaa can be Arg, Lys, Tyr, Ala, Val, Ile, Leu, or Ser
VXNFIRGTX

SEQ ID NO: 51020 - protein, 10 aa, Artificial Sequence
  Description of Artificial Sequence: Synthetic peptide
  Seed: VLNFIRGTKV
  misc_feature (2)..(2): Xaa can be Leu, Met, or Ile
  misc_feature (10)..(10): Xaa can be Val, Ala, Ile, or Leu
VXNFIRGTKX

SEQ ID NO: 51021 - protein, 9 aa, Artificial Sequence
  Description of Artificial Sequence: Synthetic peptide
  Seed: VLRGSVAHK
  misc_feature (2)..(2): Xaa can be Thr, Ser, Val, Met, Ile, Ala, Leu, Tyr, Gln, Phe, Trp, Gly, Asn, Cys, or His
  misc_feature (9)..(9): Xaa can be Lys, Arg, Ala, Val, Ile, Leu, Ser, Gly, Met, Tyr, Thr, Cys, Phe, Asn, Gln, His, or Pro
VXRGSVAHX

SEQ ID NO: 51022 - protein, 9 aa, Artificial Sequence
  Description of Artificial Sequence: Synthetic peptide
  Seed: VLSAFDERR
  misc_feature (2)..(2): Xaa can be Ala, Ile, Met, Phe, Ser, Thr, Trp, Tyr, Val, Gln, Gly, or Leu
  misc_feature (9)..(9): Xaa can be Arg or Lys
VXSAFDERX

SEQ ID NO: 51023 - protein, 11 aa, Artificial Sequence
  Description of Artificial Sequence: Synthetic peptide
  Seed: VLSAFDERRNK
  misc_feature (2)..(2): Xaa can be Leu, Met, Phe, Ser, Thr, Trp, Tyr, or Val
  misc_feature (11)..(11): Xaa can be Arg or Lys
VXSAFDERRNX

SEQ ID NO: 51024 - protein, 9 aa, Artificial Sequence
  Description of Artificial Sequence: Synthetic peptide
  Seed: VLSAFEERR
  misc_feature (2)..(2): Xaa can be Ala, Ile, Leu, Met, Phe, Ser, Thr, Trp, Tyr, Val, Asn, Gln, or Gly
  misc_feature (9)..(9): Xaa can be Arg or Lys
VXSAFEERX

SEQ ID NO: 51025 - protein, 11 aa, Artificial Sequence
  Description of Artificial Sequence: Synthetic peptide
  Seed: VLSAFEERRNK
  misc_feature (2)..(2): Xaa can be Leu or Met
  misc_feature (11)..(11): Xaa can be Lys
VXSAFEERRNX

SEQ ID NO: 51026 - protein, 9 aa, Artificial Sequence
  Description of Artificial Sequence: Synthetic peptide
  Seed: VLSFIKGTK
  misc_feature (2)..(2): Xaa can be Thr, Ala, Gln, Ile, Leu, Met, Phe, Ser, Trp, Tyr, Val, Asn, Gly, or Pro
  misc_feature (9)..(9): Xaa can be Arg, Lys, or Tyr
VXSFIKGTX

SEQ ID NO: 51027 - protein, 10 aa, Artificial Sequence
  Description of Artificial Sequence: Synthetic peptide
  Seed: VLSFIKGTKV
  misc_feature (2)..(2): Xaa can be Leu, Met, Ile, or Val
  misc_feature (10)..(10): Xaa can be Val, Ala, Ile, or Leu
VXSFIKGTKX

SEQ ID NO: 51028 - protein, 11 aa, Artificial Sequence
  Description of Artificial Sequence: Synthetic peptide
  Seed: VLSFIKGTKVV
  misc_feature (2)..(2): Xaa can be Leu or Met
  misc_feature (11)..(11): Xaa can be Val
VXSFIKGTKVX

SEQ ID NO: 51029 - protein, 9 aa, Artificial Sequence
  Description of Artificial Sequence: Synthetic peptide
  Seed: VLSFIRGTK
  misc_feature (2)..(2): Xaa can be Ile, Thr, Val, Ala, Asn, Gln, Gly, Leu, Met, Phe, Pro, Ser, Trp, Tyr, Cys, or His
  misc_feature (9)..(9): Xaa can be Arg, Lys, or Tyr
VXSFIRGTX

SEQ ID NO: 51030 - protein, 10 aa, Artificial Sequence
  Description of Artificial Sequence: Synthetic peptide
  Seed: VLSFIRGTKV
  misc_feature (2)..(2): Xaa can be Leu, Met, Gln, Ile, or Val
  misc_feature (10)..(10): Xaa can be Val, Ala, Ile, or Leu
VXSFIRGTKX

SEQ ID NO: 51031 - protein, 10 aa, Artificial Sequence
  Description of Artificial Sequence: Synthetic peptide
  Seed: VLSFIRGTRV
  misc_feature (2)..(2): Xaa can be Leu, Met, Ser, Gln, Ile, or Val
  misc_feature (10)..(10): Xaa can be Val, Ile, Leu, Met, or Ala
VXSFIRGTRX

SEQ ID NO: 51032 - protein, 11 aa, Artificial Sequence
  Description of Artificial Sequence: Synthetic peptide
  Seed: VLSFIRGTRVV
  misc_feature (2)..(2): Xaa can be Leu, Met, or Ser
  misc_feature (11)..(11): Xaa can be Val or Leu
VXSFIRGTRVX

SEQ ID NO: 51033 - protein, 9 aa, Artificial Sequence
  Description of Artificial Sequence: Synthetic peptide
  Seed: VLYDKEEIR
  misc_feature (2)..(2): Xaa can be Met, Phe, Ala, Gln, Ile, Leu, Ser, Thr, Trp, Tyr, or Val
  misc_feature (9)..(9): Xaa can be Arg or Lys
VXYDKEEIX

SEQ ID NO: 51034 - protein, 10 aa, Artificial Sequence
  Description of Artificial Sequence: Synthetic peptide
  Seed: VLYDKEEIRR
  misc_feature (2)..(2): Xaa can be Met, Phe, Ala, Gln, Ile, Leu, Ser, Thr, Trp, Tyr, or Val
  misc_feature (10)..(10): Xaa can be Arg or Lys
VXYDKEEIRX

SEQ ID NO: 51035 - protein, 11 aa, Artificial Sequence
  Description of Artificial Sequence: Synthetic peptide
  Seed: VLYDKEEIRRI
  misc_feature (2)..(2): Xaa can be Leu or Met
  misc_feature (11)..(11): Xaa can be Ala, Leu, Val, or Ile
VXYDKEEIRRX

SEQ ID NO: 51036 - protein, 9 aa, Artificial Sequence
  Description of Artificial Sequence: Synthetic peptide
  Seed: VLYDKEELR
  misc_feature (2)..(2): Xaa can be Met, Thr, Ala, Gln, Ile, Leu, Phe, Ser, Trp, Tyr, Val, Asn, or Gly
  misc_feature (9)..(9): Xaa can be Arg, Lys, or Tyr
VXYDKEELX

SEQ ID NO: 51037 - protein, 10 aa, Artificial Sequence
  Description of Artificial Sequence: Synthetic peptide
  Seed: VLYDKEELRR
  misc_feature (2)..(2): Xaa can be Ile, Leu, Met, Phe, Ser, Thr, Tyr, Val, Ala, Gln, or Trp
  misc_feature (10)..(10): Xaa can be Arg or Lys
VXYDKEELRX

SEQ ID NO: 51038 - protein, 11 aa, Artificial Sequence
  Description of Artificial Sequence: Synthetic peptide
  Seed: VLYDKEELRRI
  misc_feature (2)..(2): Xaa can be Leu, Met, or Ile
  misc_feature (11)..(11): Xaa can be Val, Ala, Ile, or Leu
VXYDKEELRRX

SEQ ID NO: 51039 - protein, 9 aa, Artificial Sequence
  Description of Artificial Sequence: Synthetic peptide
  Seed: VLYDKEEMR
  misc_feature (2)..(2): Xaa can be Ala, Ile, Leu, Met, Phe, Ser, Thr, Trp, Tyr, Val, Gln, or Gly
  misc_feature (9)..(9): Xaa can be Arg or Lys
VXYDKEEMX

SEQ ID NO: 51040 - protein, 10 aa, Artificial Sequence
  Description of Artificial Sequence: Synthetic peptide
  Seed: VLYDKEEMRR
  misc_feature (2)..(2): Xaa can be Ile, Leu, Met, Phe, Ser, Thr, Tyr, Val, Ala, Gln, Gly, or Trp
  misc_feature (10)..(10): Xaa can be Arg or Lys
VXYDKEEMRX

SEQ ID NO: 51041 - protein, 11 aa, Artificial Sequence
  Description of Artificial Sequence: Synthetic peptide
  Seed: VLYDKEEMRRI
  misc_feature (2)..(2): Xaa can be Leu or Met
  misc_feature (11)..(11): Xaa can be Ala, Val, Ile, or Leu
VXYDKEEMRRX

SEQ ID NO: 51042 - protein, 9 aa, Artificial Sequence
  Description of Artificial Sequence: Synthetic peptide
  Seed: VLYDKGEIR
  misc_feature (2)..(2): Xaa can be Leu, Met, Phe, Thr, Trp, Tyr, Val, Ala, Gln, Gly, Ile, or Ser
  misc_feature (9)..(9): Xaa can be Arg or Lys
VXYDKGEIX

SEQ ID NO: 51043 - protein, 10 aa, Artificial Sequence
  Description of Artificial Sequence: Synthetic peptide
  Seed: VLYDKGEIRR
  misc_feature (2)..(2): Xaa can be Ile, Leu, Met, Thr, Val, Ala, Gln, Phe, Ser, Trp, Tyr, Asn, or Gly
  misc_feature (10)..(10): Xaa can be Arg, Lys, or Tyr
VXYDKGEIRX

SEQ ID NO: 51044 - protein, 11 aa, Artificial Sequence
  Description of Artificial Sequence: Synthetic peptide
  Seed: VLYDKGEIRRI
  misc_feature (2)..(2): Xaa can be Leu or Met
  misc_feature (11)..(11): Xaa can be Ala, Leu, Val, or Ile
VXYDKGEIRRX

SEQ ID NO: 51045 - protein, 9 aa, Artificial Sequence
  Description of Artificial Sequence: Synthetic peptide
  Seed: VMAAFIGNT
  misc_feature (2)..(2): Xaa can be Met, Leu, Gln, Ile, Thr, Val, Ala, Ser, or Gly
  misc_feature (9)..(9): Xaa can be Val, Ala, Ile, Leu, Met, Thr, Phe, Cys, Gly, Pro, or Ser
VXAAFIGNX

SEQ ID NO: 51046 - protein, 9 aa, Artificial Sequence
  Description of Artificial Sequence: Synthetic peptide
  Seed: VMAAFSGNT
  misc_feature (2)..(2): Xaa can be Leu, Met, Ile, Gln, Val, Thr, Ala, or Ser
  misc_feature (9)..(9): Xaa can be Val, Ile, Leu, Ala, Met, Phe, Ser, or Thr
VXAAFSGNX

SEQ ID NO: 51047 - protein, 9 aa, Artificial Sequence
  Description of Artificial Sequence: Synthetic peptide
  Seed: VMAAFTGNT
  misc_feature (2)..(2): Xaa can be Met, Leu, Ile, Gln, Val, Thr, Ala, or Ser
  misc_feature (9)..(9): Xaa can be Val, Ile, Leu, Ala, Met, Cys, Phe, Ser, Thr, or Pro
VXAAFTGNX

SEQ ID NO: 51048 - protein, 9 aa, Artificial Sequence
  Description of Artificial Sequence: Synthetic peptide
  Seed: VMAAFVGNT
  misc_feature (2)..(2): Xaa can be Met, Leu, Gln, Ile, Thr, Val, Ala, Ser, or Gly
  misc_feature (9)..(9): Xaa can be Val, Ala, Ile, Leu, Met, Thr, Phe, Cys, Pro, Ser, or Gly
VXAAFVGNX

SEQ ID NO: 51049 - protein, 9 aa, Artificial Sequence
  Description of Artificial Sequence: Synthetic peptide
  Seed: VMELIQMIK
  misc_feature (2)..(2): Xaa can be Gln, Ile, Leu, Met, Phe, Ser, Thr, Val, Ala, Trp, or Tyr
  misc_feature (9)..(9): Xaa can be Arg or Lys
VXELIQMIX

SEQ ID NO: 51050 - protein, 10 aa, Artificial Sequence
  Description of Artificial Sequence: Synthetic peptide
  Seed: VMELIQMIKR
  misc_feature (2)..(2): Xaa can be Phe, Tyr, Gln, Ile, Leu, Met, Ser, Thr, Trp, or Val
  misc_feature (10)..(10): Xaa can be Arg or Lys
VXELIQMIKX

SEQ ID NO: 51051 - protein, 9 aa, Artificial Sequence
  Description of Artificial Sequence: Synthetic peptide
  Seed: VMELIRMVK
  misc_feature (2)..(2): Xaa can be Gln, Ile, Leu, Met, Phe, Ser, Thr, Trp, Tyr, Val, Ala, or Gly
  misc_feature (9)..(9): Xaa can be Arg or Lys
VXELIRMVX

SEQ ID NO: 51052 - protein, 10 aa, Artificial Sequence
  Description of Artificial Sequence: Synthetic peptide
  Seed: VMELIRMVKR
  misc_feature (2)..(2): Xaa can be Met, Phe, Trp, Tyr, Ala, Gln, Gly, Ile, Leu, Ser, Thr, or Val
  misc_feature (10)..(10): Xaa can be Arg or Lys
VXELIRMVKX

SEQ ID NO: 51053 - protein, 9 aa, Artificial Sequence
  Description of Artificial Sequence: Synthetic peptide
  Seed: VMELVRMIK
  misc_feature (2)..(2): Xaa can be Ile, Leu, Met, Phe, Ser, Thr, Trp, Tyr, Val, Ala, Gln, or Gly
  misc_feature (9)..(9): Xaa can be Arg or Lys
VXELVRMIX

SEQ ID NO: 51054 - protein, 10 aa, Artificial Sequence
  Description of Artificial Sequence: Synthetic peptide
  Seed: VMELVRMIKR
  misc_feature (2)..(2): Xaa can be Met, Phe, Trp, Tyr, Ala, Gln, Ile, Leu, Ser, Thr, or Val
  misc_feature (10)..(10): Xaa can be Arg or Lys
VXELVRMIKX

SEQ ID NO: 51055 - protein, 10 aa, Artificial Sequence
  Description of Artificial Sequence: Synthetic peptide
  Seed: VMESAKPEEV
  misc_feature (2)..(2): Xaa can be Leu or Met
  misc_feature (10)..(10): Xaa can be Leu or Val
VXESAKPEEX

SEQ ID NO: 51056 - protein, 11 aa, Artificial Sequence
  Description of Artificial Sequence: Synthetic peptide
  Seed: VPRGKLSTRGV
  misc_feature (2)..(2): Xaa can be Pro
  misc_feature (11)..(11): Xaa can be Ala, Ile, Leu, Met, Phe, or Val
VXRGKLSTRGX

SEQ ID NO: 51057 - protein, 9 aa, Artificial Sequence
  Description of Artificial Sequence: Synthetic peptide
  Seed: VPRGQLATR
  misc_feature (2)..(2): Xaa can be Ala, Asn, Gly, Ile, Leu, Met, Phe, Pro, Ser, Thr, Trp, Tyr, or Val
  misc_feature (9)..(9): Xaa can be Arg
VXRGQLATX

SEQ ID NO: 51058 - protein, 11 aa, Artificial Sequence
  Description of Artificial Sequence: Synthetic peptide
  Seed: VPRGQLATRGV
  misc_feature (2)..(2): Xaa can be Pro
  misc_feature (11)..(11): Xaa can be Ala, Ile, Leu, Met, Phe, or Val
VXRGQLATRGX

SEQ ID NO: 51059 - protein, 11 aa, Artificial Sequence
  Description of Artificial Sequence: Synthetic peptide
  Seed: VPRGQLSTRGF
  misc_feature (2)..(2): Xaa can be Pro
  misc_feature (11)..(11): Xaa can be Ala, Ile, Leu, Met, Phe, or Val
VXRGQLSTRGX

SEQ ID NO: 51060 - protein, 11 aa, Artificial Sequence
  Description of Artificial Sequence: Synthetic peptide
  Seed: VPRGQMSTRGV
  misc_feature (2)..(2): Xaa can be Pro
  misc_feature (11)..(11): Xaa can be Ala, Ile, Leu, Met, Phe, or Val
VXRGQMSTRGX

SEQ ID NO: 51061 - protein, 8 aa, Artificial Sequence
  Description of Artificial Sequence: Synthetic peptide
  Seed: VPRGRLST
  misc_feature (2)..(2): Xaa can be Pro, Ala, Ile, Met, or Val
  misc_feature (8)..(8): Xaa can be Leu, Ala, Cys, Ile, Met, Phe, Pro, Thr, Tyr, or Val
VXRGRLSX

SEQ ID NO: 51062 - protein, 11 aa, Artificial Sequence
  Description of Artificial Sequence: Synthetic peptide
  Seed: VPRGRLSTRGI
  misc_feature (2)..(2): Xaa can be Pro
  misc_feature (11)..(11): Xaa can be Ala, Ile, Leu, Met, Phe, or Val
VXRGRLSTRGX

SEQ ID NO: 51063 - protein, 9 aa, Artificial Sequence
  Description of Artificial Sequence: Synthetic peptide
  Seed: VQIASNENM
  misc_feature (2)..(2): Xaa can be Gln, Met, Val, Lys, Thr, Ala, Arg, His, Ile, Leu, Ser, Asn, Glu, Gly, Phe, or Tyr
  misc_feature (9)..(9): Xaa can be Phe, Tyr, Met, Leu, Val, Ile, Trp, His, or Ala
VXIASNENX

SEQ ID NO: 51064 - protein, 9 aa, Artificial Sequence
  Description of Artificial Sequence: Synthetic peptide
  Seed: VQKNLPFDK
  misc_feature (2)..(2): Xaa can be Gln, Ile, Leu, Met, Phe, Ser, Thr, Trp, Tyr, Val, Ala, or Gly
  misc_feature (9)..(9): Xaa can be Arg or Lys
VXKNLPFDX

SEQ ID NO: 51065 - protein, 9 aa, Artificial Sequence
  Description of Artificial Sequence: Synthetic peptide
  Seed: VQMCTELKL
  misc_feature (2)..(2): Xaa can be Met, Gln, Leu, Arg, Glu, Ile, Lys, Thr, Val, Ala, His, Ser, Asn, Gly, Phe, or Tyr
  misc_feature (9)..(9): Xaa can be Phe, Tyr, Met, Leu, Ile, Val, Ala, Trp, His, Cys, or Thr
VXMCTELKX

SEQ ID NO: 51066 - protein, 9 aa, Artificial Sequence
  Description of Artificial Sequence: Synthetic peptide
  Seed: VQPAFSVQK
  misc_feature (2)..(2): Xaa can be Gln, Ile, Leu, Met, Phe, Thr, Trp, Tyr, Val, Ala, Gly, or Ser
  misc_feature (9)..(9): Xaa can be Arg or Lys
VXPAFSVQX

SEQ ID NO: 51067 - protein, 9 aa, Artificial Sequence
  Description of Artificial Sequence: Synthetic peptide
  Seed: VQPSFSVQR
  misc_feature (2)..(2): Xaa can be Ile, Leu, Met, Phe, Thr, Trp, Tyr, Val, Ala, Gln, Gly, or Ser
  misc_feature (9)..(9): Xaa can be Arg or Lys
VXPSFSVQX

SEQ ID NO: 51068 - protein, 9 aa, Artificial Sequence
  Description of Artificial Sequence: Synthetic peptide
  Seed: VQPTFSVQR
  misc_feature (2)..(2): Xaa can be Ile, Leu, Met, Phe, Thr, Trp, Tyr, Val, Ala, Gln, Gly, or Ser
  misc_feature (9)..(9): Xaa can be Arg or Lys
VXPTFSVQX

SEQ ID NO: 51069 - protein, 10 aa, Artificial Sequence
  Description of Artificial Sequence: Synthetic peptide
  Seed: VQPTFSVQRK
  misc_feature (2)..(2): Xaa can be Ala, Gln, Ile, Leu, Met, Ser, Thr, or Val
  misc_feature (10)..(10): Xaa can be Lys
VXPTFSVQRX

SEQ ID NO: 51070 - protein, 9 aa, Artificial Sequence
  Description of Artificial Sequence: Synthetic peptide
  Seed: VQRKLPFER
  misc_feature (2)..(2): Xaa can be Ala, Gln, Gly, Ile, Leu, Met, Phe, Ser, Thr, Trp, Tyr, Val, Asn, or Cys
  misc_feature (9)..(9): Xaa can be Arg or Lys
VXRKLPFEX

SEQ ID NO: 51071 - protein, 9 aa, Artificial Sequence
  Description of Artificial Sequence: Synthetic peptide
  Seed: VQRNLPFDK
  misc_feature (2)..(2): Xaa can be Thr, Val, Ser, Ile, Met, Tyr, Ala, Phe, Gln, Gly, Leu, Trp, or Asn
  misc_feature (9)..(9): Xaa can be Arg, Lys, Ala, Val, Ile, Leu, Met, Ser, or Tyr
VXRNLPFDX

SEQ ID NO: 51072 - protein, 9 aa, Artificial Sequence
  Description of Artificial Sequence: Synthetic peptide
  Seed: VQRNLPFEK
  misc_feature (2)..(2): Xaa can be Thr, Met, Ser, Val, Ile, Tyr, Phe, Leu, Trp, Ala, Asn, Gln, Gly, Cys, or His
  misc_feature (9)..(9): Xaa can be Arg, Lys, Ala, Ile, Val, Met, Ser, Leu, Tyr, Gly, Thr, His, Cys, or Phe
VXRNLPFEX

SEQ ID NO: 51073 - protein, 9 aa, Artificial Sequence
  Description of Artificial Sequence: Synthetic peptide
  Seed: VRAGMDPRM
  misc_feature (2)..(2): Xaa can be Arg
  misc_feature (9)..(9): Xaa can be Ile, Leu, Met, Phe, or Val
VXAGMDPRX

SEQ ID NO: 51074 - protein, 11 aa, Artificial Sequence
  Description of Artificial Sequence: Synthetic peptide
  Seed: VRMIKRGINDR
  misc_feature (2)..(2): Xaa can be Arg, Lys, Met, Phe, Ser, Thr, Tyr, or Val
  misc_feature (11)..(11): Xaa can be Arg
VXMIKRGINDX

SEQ ID NO: 51075 - protein, 9 aa, Artificial Sequence
  Description of Artificial Sequence: Synthetic peptide
  Seed: VRTGMDPRM
  misc_feature (2)..(2): Xaa can be Arg
  misc_feature (9)..(9): Xaa can be Ile, Leu, Met, or Phe
VXTGMDPRX

SEQ ID NO: 51076 - protein, 9 aa, Artificial Sequence
  Description of Artificial Sequence: Synthetic peptide
  Seed: VSFQGRGVF
  misc_feature (2)..(2): Xaa can be Gln, Met, Tyr, Phe, Ala, Leu, Lys, Ser, Glu, His, Ile, Thr, Trp, Val, Arg, Asn, Gly, Cys, Pro, or Asp
  misc_feature (9)..(9): Xaa can be Phe, Tyr, Met, Trp, Leu, Ile, Val, His, Ala, Cys, Thr, Gln, Gly, Ser, Asn, Glu, or Pro
VXFQGRGVX

SEQ ID NO: 51077 - protein, 11 aa, Artificial Sequence
  Description of Artificial Sequence: Synthetic peptide
  Seed: VSFQGRGVFEF
  misc_feature (2)..(2): Xaa can be Gln, Ser, Thr, Met, Ala, Leu, Ile, Lys, Val, Arg, Glu, Gly, His, Asn, or Cys
  misc_feature (11)..(11): Xaa can be Tyr, Phe, Trp, Met, Leu, Ile, Ala, Arg, Asn, Asp, Cys, Gln, Glu, Gly, His, Lys, Pro, Ser, Thr, or Val
VXFQGRGVFEX

SEQ ID NO: 51078 - protein, 9 aa, Artificial Sequence
  Description of Artificial Sequence: Synthetic peptide
  Seed: VSFRGRGVF
  misc_feature (2)..(2): Xaa can be Gln, Met, Tyr, Ala, Phe, Lys, Ser, Glu, His, Leu, Thr, Trp, Val, Asn, Gly, Ile, Arg, Cys, Asp, or Pro
  misc_feature (9)..(9): Xaa can be Phe, Tyr, Leu, Met, Trp, Ile, His, Val, Ala, Cys, Gly, Asn, Gln, Pro, Ser, or Thr
VXFRGRGVX

SEQ ID NO: 51079 - protein, 11 aa, Artificial Sequence
  Description of Artificial Sequence: Synthetic peptide
  Seed: VSFRGRGVFEL
  misc_feature (2)..(2): Xaa can be Ser, Thr, Ala, Val, Ile, or Met
  misc_feature (11)..(11): Xaa can be Trp, Phe, Tyr, Leu, Met, or Ile
VXFRGRGVFEX

SEQ ID NO: 51080 - protein, 9 aa, Artificial Sequence
  Description of Artificial Sequence: Synthetic peptide
  Seed: VSGFIRGKK
  misc_feature (2)..(2): Xaa can be Ile, Leu, Met, Phe, Ser, Thr, Trp, Tyr, Val, or Gly
  misc_feature (9)..(9): Xaa can be Arg or Lys
VXGFIRGKX

SEQ ID NO: 51081 - protein, 9 aa, Artificial Sequence
  Description of Artificial Sequence: Synthetic peptide
  Seed: VSGIGRFYI
  misc_feature (2)..(2): Xaa can be Ser or Thr
  misc_feature (9)..(9): Xaa can be Val or Ile
VXGIGRFYX

SEQ ID NO: 51082 - protein, 9 aa, Artificial Sequence
  Description of Artificial Sequence: Synthetic peptide
  Seed: VSSFIRGAK
  misc_feature (2)..(2): Xaa can be Ile, Met, Thr, Val, Ala, Asn, Gln, Gly, Leu, Phe, Pro, Ser, Trp, Tyr, Cys, or His
  misc_feature (9)..(9): Xaa can be Arg, Lys, or Tyr
VXSFIRGAX

SEQ ID NO: 51083 - protein, 10 aa, Artificial Sequence
  Description of Artificial Sequence: Synthetic peptide
  Seed: VSSFIRGAKV
  misc_feature (2)..(2): Xaa can be Thr, Val, Ala, Ile, or Ser
  misc_feature (10)..(10): Xaa can be Val, Ile, Ala, or Leu
VXSFIRGAKX

SEQ ID NO: 51084 - protein, 10 aa, Artificial Sequence
  Description of Artificial Sequence: Synthetic peptide
  Seed: VSSFIRGARV
  misc_feature (2)..(2): Xaa can be Thr, Val, Ala, Ile, or Ser
  misc_feature (10)..(10): Xaa can be Val, Ile, Ala, or Leu
VXSFIRGARX

SEQ ID NO: 51085 - protein, 9 aa, Artificial Sequence
  Description of Artificial Sequence: Synthetic peptide
  Seed: VSSFIRGKK
  misc_feature (2)..(2): Xaa can be Thr, Ile, Ser, Val, Ala, Gln, Gly, Leu, Met, Phe, Trp, Tyr, Asn, Cys, or Pro
  misc_feature (9)..(9): Xaa can be Arg, Lys, Tyr, or Ala
VXSFIRGKX

SEQ ID NO: 51086 - protein, 10 aa, Artificial Sequence
  Description of Artificial Sequence: Synthetic peptide
  Seed: VSSTLELRSR
  misc_feature (2)..(2): Xaa can be Met, Phe, Trp, Tyr, Ala, Gln, Ile, Leu, Ser, Thr, or Val
  misc_feature (10)..(10): Xaa can be Arg or Lys
VXSTLELRSX

SEQ ID NO: 51087 - protein, 11 aa, Artificial Sequence
  Description of Artificial Sequence: Synthetic peptide
  Seed: VSSTLELRSRY
  misc_feature (2)..(2): Xaa can be Ala, Arg, Asn, Asp, Cys, Gln, Glu, Gly, His, Ile, Leu, Lys, Met, Phe, Pro, Ser, Thr, Trp, Tyr, or Val
  misc_feature (11)..(11): Xaa can be Phe, Trp, or Tyr
VXSTLELRSRX

SEQ ID NO: 51088 - protein, 9 aa, Artificial Sequence
  Description of Artificial Sequence: Synthetic peptide
  Seed: VSVQPSFSV
  misc_feature (2)..(2): Xaa can be Ala, Gln, Ile, Leu, Met, Thr, Val, Ser, Cys, Gly, Phe, or Asn
  misc_feature (9)..(9): Xaa can be Tyr, Met, Phe, Trp, Leu, Ile, Val, Ala, or His
VXVQPSFSX

SEQ ID NO: 51089 - protein, 11 aa, Artificial Sequence
  Description of Artificial Sequence: Synthetic peptide
  Seed: VSVQPSFSVQR
  misc_feature (2)..(2): Xaa can be Arg, Met, Phe, Thr, Tyr, Ala, Asn, Cys, Gln, Glu, Gly, His, Ile, Leu, Lys, Ser, Trp, or Va l
  misc_feature (11)..(11): Xaa can be Arg or Lys
VXVQPSFSVQX

SEQ ID NO: 51090 - protein, 9 aa, Artificial Sequence
  Description of Artificial Sequence: Synthetic peptide
  Seed: VSVQPTFSV
  misc_feature (2)..(2): Xaa can be Leu, Met, Ala, Gln, Ile, Thr, Val, Ser, Cys, Gly, Phe, Asn, or Pro
  misc_feature (9)..(9): Xaa can be Trp, Tyr, Met, Phe, Leu, Ile, Val, Ala, Thr, Cys, or His
VXVQPTFSX

SEQ ID NO: 51091 - protein, 11 aa, Artificial Sequence
  Description of Artificial Sequence: Synthetic peptide
  Seed: VSVQPTFSVQR
  misc_feature (2)..(2): Xaa can be Arg, Met, Tyr, Ala, Cys, Gln, Glu, Gly, His, Ile, Leu, Lys, Phe, Ser, Thr, Trp, or Val
  misc_feature (11)..(11): Xaa can be Arg or Lys
VXVQPTFSVQX

SEQ ID NO: 51092 - protein, 8 aa, Artificial Sequence
  Description of Artificial Sequence: Synthetic peptide
  Seed: VTIMAAFK
  misc_feature (2)..(2): Xaa can be Thr or Val
  misc_feature (8)..(8): Xaa can be Lys
VXIMAAFX

SEQ ID NO: 51093 - protein, 10 aa, Artificial Sequence
  Description of Artificial Sequence: Synthetic peptide
  Seed: VVASGYDFER
  misc_feature (2)..(2): Xaa can be Thr, Val, Ala, Gln, Glu, Gly, Ile, Leu, Met, Phe, Ser, Trp, Tyr, Arg, Asn, Asp, Cys, His, Lys, or Pro
  misc_feature (10)..(10): Xaa can be Arg, Lys, or Tyr
VXASGYDFEX

SEQ ID NO: 51094 - protein, 9 aa, Artificial Sequence
  Description of Artificial Sequence: Synthetic peptide
  Seed: VVMELIRMI
  misc_feature (2)..(2): Xaa can be Leu, Met, Gln, Ile, Val, Ala, Ser, Thr, Gly, Phe, or Trp
  misc_feature (9)..(9): Xaa can be Val, Ile, Phe, Trp, Tyr, Ala, Leu, Met, Thr, Cys, Ser, Gly, or Pro
VXMELIRMX

SEQ ID NO: 51095 - protein, 10 aa, Artificial Sequence
  Description of Artificial Sequence: Synthetic peptide
  Seed: VVMELIRMIK
  misc_feature (2)..(2): Xaa can be Ser, Thr, Ile, Leu, Met, Val, Ala, Arg, Asn, Asp, Cys, Gln, Glu, Gly, His, Lys, Phe, Pro, Trp, or Tyr
  misc_feature (10)..(10): Xaa can be Arg, Lys, Tyr, or Ala
VXMELIRMIX

SEQ ID NO: 51096 - protein, 11 aa, Artificial Sequence
  Description of Artificial Sequence: Synthetic peptide
  Seed: VVMELIRMIKR
  misc_feature (2)..(2): Xaa can be Met, Phe, Trp, Tyr, Ala, Arg, Gln, Ile, Leu, Lys, Ser, Thr, or Val
  misc_feature (11)..(11): Xaa can be Arg or Lys
VXMELIRMIKX

SEQ ID NO: 51097 - protein, 10 aa, Artificial Sequence
  Description of Artificial Sequence: Synthetic peptide
  Seed: VVPRGQMSTR
  misc_feature (2)..(2): Xaa can be Ile, Leu, Met, Thr, Val, Gln, Phe, Ser, Trp, or Tyr
  misc_feature (10)..(10): Xaa can be Arg or Lys
VXPRGQMSTX

SEQ ID NO: 51098 - protein, 10 aa, Artificial Sequence
  Description of Artificial Sequence: Synthetic peptide
  Seed: VVPRGRLSTR
  misc_feature (2)..(2): Xaa can be Met, Phe, Tyr, Ala, Gln, Ile, Leu, Ser, Thr, Trp, or Val
  misc_feature (10)..(10): Xaa can be Arg or Lys
VXPRGRLSTX

SEQ ID NO: 51099 - protein, 9 aa, Artificial Sequence
  Description of Artificial Sequence: Synthetic peptide
  Seed: VWMACHSAA
  misc_feature (2)..(2): Xaa can be Tyr, Phe, Trp, Met, Ala, His, Ser, Thr, Val, Arg, Gln, Ile, Leu, Pro, Asn, Gly, Lys, or Cy s
  misc_feature (9)..(9): Xaa can be Met, Tyr, Leu, Phe, Ile, Val, Trp, His, Ala, Cys, Gln, Gly, Ser, Thr, Arg, Asn, Glu, or Ly s
VXMACHSAX

SEQ ID NO: 51100 - protein, 10 aa, Artificial Sequence
  Description of Artificial Sequence: Synthetic peptide
  Seed: VWMACHSAAF
  misc_feature (2)..(2): Xaa can be Gln, Lys, Met, Tyr, His, Ala, Arg, Glu, Ile, Leu, Phe, Ser, Thr, Val, Trp, Asn, Asp, Cys, Gly, or Pro
  misc_feature (10)..(10): Xaa can be Leu, Met, Phe, Trp, Tyr, Ile, His, Val, Ala, Cys, Gly, Ser, or Thr
VXMACHSAAX

SEQ ID NO: 51101 - protein, 9 aa, Artificial Sequence
  Description of Artificial Sequence: Synthetic peptide
  Seed: VWMACHSPA
  misc_feature (2)..(2): Xaa can be Tyr, Phe, Met, Trp, Ala, His, Ile, Leu, Ser, Thr, Val, Arg, Gln, Pro, Asn, Gly, Lys, or Cy s
  misc_feature (9)..(9): Xaa can be Met, Phe, Tyr, Leu, Ile, Val, Trp, Ala, His, Cys, Gln, Gly, Ser, Thr, Arg, Glu, or Lys
VXMACHSPX

SEQ ID NO: 51102 - protein, 10 aa, Artificial Sequence
  Description of Artificial Sequence: Synthetic peptide
  Seed: VWMACHSPAF
  misc_feature (2)..(2): Xaa can be Gln, Lys, Met, Tyr, His, Ala, Arg, Glu, Leu, Phe, Trp, Val, Asn, Asp, Cys, Gly, Ile, Pro, Ser, or Thr
  misc_feature (10)..(10): Xaa can be Leu, Met, Phe, Trp, Tyr, Ile, His, Val, Ala, Cys, Gly, Ser, or Thr
VXMACHSPAX

SEQ ID NO: 51103 - protein, 9 aa, Artificial Sequence
  Description of Artificial Sequence: Synthetic peptide
  Seed: VWMACNSAA
  misc_feature (2)..(2): Xaa can be Tyr, Phe, Trp, Ala, Met, His, Arg, Val, Gln, Gly, Ile, Leu, Pro, Ser, Thr, Lys, or Asn
  misc_feature (9)..(9): Xaa can be Met, Phe, Leu, Tyr, Ile, Val, Trp, Ala, Cys, His, Thr, Gln, Gly, Lys, or Ser
VXMACNSAX

SEQ ID NO: 51104 - protein, 10 aa, Artificial Sequence
  Description of Artificial Sequence: Synthetic peptide
  Seed: VWMACNSAAF
  misc_feature (2)..(2): Xaa can be Gln, Met, Tyr, Lys, Arg, His, Leu, Phe, Pro, Ala, Glu, Trp, Asn, Asp, Cys, Gly, Ile, Ser, Thr, or Val
  misc_feature (10)..(10): Xaa can be Leu, Met, Phe, Trp, Tyr, Ile, His, Val, Ala, or Gly
VXMACNSAAX

SEQ ID NO: 51105 - protein, 10 aa, Artificial Sequence
  Description of Artificial Sequence: Synthetic peptide
  Seed: VYGLAVAGGY
  misc_feature (2)..(2): Xaa can be Ala, Arg, Asn, Asp, Cys, Gln, Glu, Gly, His, Ile, Leu, Lys, Met, Phe, Pro, Ser, Thr, Trp, Tyr, or Val
  misc_feature (10)..(10): Xaa can be Tyr
VXGLAVAGGX

SEQ ID NO: 51106 - protein, 10 aa, Artificial Sequence
  Description of Artificial Sequence: Synthetic peptide
  Seed: VYGLIVASGY
  misc_feature (2)..(2): Xaa can be Ala, Arg, Asn, Asp, Cys, Gln, Glu, Gly, His, Ile, Leu, Lys, Met, Phe, Pro, Ser, Thr, Trp, Tyr, or Val
  misc_feature (10)..(10): Xaa can be Tyr
VXGLIVASGX

SEQ ID NO: 51107 - protein, 10 aa, Artificial Sequence
  Description of Artificial Sequence: Synthetic peptide
  Seed: VYGLSVASGY
  misc_feature (2)..(2): Xaa can be Tyr, Phe, Ala, Arg, Asn, Asp, Cys, Gln, Glu, Gly, His, Ile, Leu, Lys, Met, Pro, Ser, Thr, Trp, or Val
  misc_feature (10)..(10): Xaa can be Tyr, Met, Phe, or Leu
VXGLSVASGX

SEQ ID NO: 51108 - protein, 10 aa, Artificial Sequence
  Description of Artificial Sequence: Synthetic peptide
  Seed: VYGLTVASGY
  misc_feature (2)..(2): Xaa can be Tyr, Phe, Ala, Arg, Asn, Asp, Cys, Gln, Glu, Gly, His, Ile, Leu, Lys, Met, Pro, Ser, Thr, Trp, or Val
  misc_feature (10)..(10): Xaa can be Tyr, Met, Leu, or Phe
VXGLTVASGX

SEQ ID NO: 51109 - protein, 10 aa, Artificial Sequence
  Description of Artificial Sequence: Synthetic peptide
  Seed: VYGLVVASGY
  misc_feature (2)..(2): Xaa can be Tyr, Ala, Arg, Asn, Asp, Cys, Gln, Glu, Gly, His, Ile, Leu, Lys, Met, Phe, Pro, Ser, Thr, Trp, or Val
  misc_feature (10)..(10): Xaa can be Tyr or Met
VXGLVVASGX

SEQ ID NO: 51110 - protein, 10 aa, Artificial Sequence
  Description of Artificial Sequence: Synthetic peptide
  Seed: VYGPAVASGY
  misc_feature (2)..(2): Xaa can be Tyr, Phe, Trp, Met, Ala, Asn, Gln, Gly, His, Ile, Leu, Ser, Thr, or Val
  misc_feature (10)..(10): Xaa can be Tyr, Phe, Ile, Leu, Met, Trp, or Val
VXGPAVASGX

SEQ ID NO: 51111 - protein, 10 aa, Artificial Sequence
  Description of Artificial Sequence: Synthetic peptide
  Seed: VYGPAVSSGY
  misc_feature (2)..(2): Xaa can be Phe, Tyr, Trp, Ala, Asn, Gln, Gly, His, Ile, Leu, Met, Ser, Thr, or Val
  misc_feature (10)..(10): Xaa can be Tyr, Met, Phe, or Leu
VXGPAVSSGX

SEQ ID NO: 51112 - protein, 9 aa, Artificial Sequence
  Description of Artificial Sequence: Synthetic peptide
  Seed: WHSNLNDAT
  misc_feature (2)..(2): Xaa can be His, Arg, Gln, Lys, Pro, Met, Ala, Asn, Glu, Leu, Tyr, or Val
  misc_feature (9)..(9): Xaa can be Leu, Ile, Met, Val, Phe, Ala, Cys, or Thr
WXSNLNDAX

SEQ ID NO: 51113 - protein, 10 aa, Artificial Sequence
  Description of Artificial Sequence: Synthetic peptide
  Seed: WHSNLNDATY
  misc_feature (2)..(2): Xaa can be Gln, Pro, Met, Lys, Ser, Thr, Ala, Arg, Glu, His, Leu, Val, Asn, Asp, Cys, Gly, Ile, Phe, Trp, or Tyr
  misc_feature (10)..(10): Xaa can be Phe, Trp, Tyr, Met, Leu, His, Ile, or Ala
WXSNLNDATX

SEQ ID NO: 51114 - protein, 10 aa, Artificial Sequence
  Description of Artificial Sequence: Synthetic peptide
  Seed: WHSNLNDSTY
  misc_feature (2)..(2): Xaa can be Gln, Pro, Lys, Met, Ser, Thr, Ala, Arg, Glu, His, Leu, Asn, Asp, Cys, Gly, Ile, Phe, Trp, Tyr, or Val
  misc_feature (10)..(10): Xaa can be Phe, Trp, Tyr, Met, Leu, His, or Ile
WXSNLNDSTX

SEQ ID NO: 51115 - protein, 10 aa, Artificial Sequence
  Description of Artificial Sequence: Synthetic peptide
  Seed: WHSNLNDTTY
  misc_feature (2)..(2): Xaa can be Gln, Pro, Lys, Met, Ser, Ala, Arg, Glu, His, Leu, Thr, Asn, Asp, Cys, Gly, Ile, Phe, Trp, Tyr, or Val
  misc_feature (10)..(10): Xaa can be Phe, Trp, Tyr, Met, Leu, His, or Ile
WXSNLNDTTX

SEQ ID NO: 51116 - protein, 10 aa, Artificial Sequence
  Description of Artificial Sequence: Synthetic peptide
  Seed: WIRELILYDK
  misc_feature (2)..(2): Xaa can be Ala, Gln, Ile, Leu, Met, Phe, Ser, Thr, Trp, Tyr, Val, Asn, or Gly
  misc_feature (10)..(10): Xaa can be Arg or Lys
WXRELILYDX

SEQ ID NO: 51117 - protein, 10 aa, Artificial Sequence
  Description of Artificial Sequence: Synthetic peptide
  Seed: WIRELVLYDK
  misc_feature (2)..(2): Xaa can be Ile, Thr, Val, Ala, Leu, Met, or Ser
  misc_feature (10)..(10): Xaa can be Lys or Arg
WXRELVLYDX

SEQ ID NO: 51118 - protein, 9 aa, Artificial Sequence
  Description of Artificial Sequence: Synthetic peptide
  Seed: WMACHSAAF
  misc_feature (2)..(2): Xaa can be Pro, Gln, Leu, Met, His, Thr, Val, Ile, Ala, Arg, Ser, Tyr, Lys, Phe, Glu, Trp, Asn, Gly, Cys, or Asp
  misc_feature (9)..(9): Xaa can be Phe, Tyr, Leu, Met, Val, Trp, Ile, His, Ala, Thr, Arg, Lys, Cys, Gly, Pro, Ser, Gln, Asn, Asp, or Glu
WXACHSAAX

SEQ ID NO: 51119 - protein, 10 aa, Artificial Sequence
  Description of Artificial Sequence: Synthetic peptide
  Seed: WMACHSAAFE
  misc_feature (2)..(2): Xaa can be Gln, Lys, Met, Leu, His, Ala, Arg, Glu, Ile, Pro, Ser, Thr, Val, Asn, Gly, Phe, Trp, Tyr, Asp, or Cys
  misc_feature (10)..(10): Xaa can be Tyr, Phe, Met, Leu, Trp, His, Ala, Arg, Asn, Asp, Cys, Gln, Glu, Gly, Ile, Lys, Pro, Ser, Thr, or Val
WXACHSAAFX

SEQ ID NO: 51120 - protein, 9 aa, Artificial Sequence
  Description of Artificial Sequence: Synthetic peptide
  Seed: WMACHSPAF
  misc_feature (2)..(2): Xaa can be Pro, Gln, His, Met, Leu, Arg, Tyr, Ala, Ile, Lys, Phe, Ser, Thr, Val, Glu, Gly, Trp, Cys, Asn, or Asp
  misc_feature (9)..(9): Xaa can be Tyr, Leu, Met, Phe, Trp, Ile, Val, His, Ala, Cys, Thr, Ser, Gly, Pro, Asn, Gln, Asp, Glu, or Lys
WXACHSPAX

SEQ ID NO: 51121 - protein, 10 aa, Artificial Sequence
  Description of Artificial Sequence: Synthetic peptide
  Seed: WMACHSPAFE
  misc_feature (2)..(2): Xaa can be Gln, Met, Lys, His, Leu, Ala, Arg, Glu, Ile, Ser, Val, Asn, Gly, Phe, Thr, Tyr, Cys, Pro, or Trp
  misc_feature (10)..(10): Xaa can be Tyr, Phe, Met, Leu, Trp, Ala, His, Ile, Val, Arg, Asn, Asp, Cys, Gln, Glu, Gly, Lys, Pro, Ser, or Thr
WXACHSPAFX

SEQ ID NO: 51122 - protein, 9 aa, Artificial Sequence
  Description of Artificial Sequence: Synthetic peptide
  Seed: WMACNSAAF
  misc_feature (2)..(2): Xaa can be Pro, Leu, Ala, Met, His, Gln, Ile, Ser, Thr, Tyr, Val, Arg, Lys, Phe, Glu, Trp, Asn, Cys, or Gly
  misc_feature (9)..(9): Xaa can be Leu, Met, Phe, Tyr, Val, Trp, Ile, His, Ala, Arg, Lys, Thr, Cys, Ser, Gly, Gln, Asn, Glu, or Pro
WXACNSAAX

SEQ ID NO: 51123 - protein, 10 aa, Artificial Sequence
  Description of Artificial Sequence: Synthetic peptide
  Seed: WMACNSAAFE
  misc_feature (2)..(2): Xaa can be Gln, Met, Lys, Leu, Ala, Arg, Glu, His, Ile, Ser, Val, Asn, Gly, Phe, Pro, Thr, Trp, Tyr, Asp, or Cys
  misc_feature (10)..(10): Xaa can be Tyr, Phe, Met, Trp, His, Ile, Leu, Val, Ala, Arg, Asn, Asp, Cys, Gln, Glu, Gly, Lys, Pro, Ser, or Thr
WXACNSAAFX

SEQ ID NO: 51124 - protein, 10 aa, Artificial Sequence
  Description of Artificial Sequence: Synthetic peptide
  Seed: WMRELILHDK
  misc_feature (2)..(2): Xaa can be Leu, Met, Phe, Tyr, Gln, Ile, Ser, Thr, Trp, or Val
  misc_feature (10)..(10): Xaa can be Arg or Lys
WXRELILHDX

SEQ ID NO: 51125 - protein, 8 aa, Artificial Sequence
  Description of Artificial Sequence: Synthetic peptide
  Seed: WMRELILY
  misc_feature (2)..(2): Xaa can be Gln, Met, Leu, or Lys
  misc_feature (8)..(8): Xaa can be Phe, Tyr, Leu, or Met
WXRELILX

SEQ ID NO: 51126 - protein, 8 aa, Artificial Sequence
  Description of Artificial Sequence: Synthetic peptide
  Seed: WMRELTLY
  misc_feature (2)..(2): Xaa can be Gln, Met, Leu, or Lys
  misc_feature (8)..(8): Xaa can be Phe, Tyr, Met, or Leu
WXRELTLX

SEQ ID NO: 51127 - protein, 10 aa, Artificial Sequence
  Description of Artificial Sequence: Synthetic peptide
  Seed: WMRELTLYDK
  misc_feature (2)..(2): Xaa can be Thr, Ala, Gln, Ile, Leu, Met, Phe, Ser, Trp, Tyr, Val, Asn, or Gly
  misc_feature (10)..(10): Xaa can be Arg, Lys, or Ala
WXRELTLYDX

SEQ ID NO: 51128 - protein, 8 aa, Artificial Sequence
  Description of Artificial Sequence: Synthetic peptide
  Seed: WMRELVLY
  misc_feature (2)..(2): Xaa can be Gln, Met, Lys, or Leu
  misc_feature (8)..(8): Xaa can be Tyr, Phe, Met, or Leu
WXRELVLX

SEQ ID NO: 51129 - protein, 8 aa, Artificial Sequence
  Description of Artificial Sequence: Synthetic peptide
  Seed: WMRKLVLY
  misc_feature (2)..(2): Xaa can be Gln, Met, or Leu
  misc_feature (8)..(8): Xaa can be Tyr, Phe, Leu, or Met
WXRKLVLX

SEQ ID NO: 51130 - protein, 10 aa, Artificial Sequence
  Description of Artificial Sequence: Synthetic peptide
  Seed: WMRKLVLYDK
  misc_feature (2)..(2): Xaa can be Arg, Gln, Met, Ser, Thr, Tyr, Ala, Asn, Gly, His, Ile, Leu, Lys, Phe, Trp, Val, Asp, Cys, Glu, or Pro
  misc_feature (10)..(10): Xaa can be Lys, Arg, Leu, Ala, His, Ile, Met, Phe, Tyr, or Val
WXRKLVLYDX

SEQ ID NO: 51131 - protein, 10 aa, Artificial Sequence
  Description of Artificial Sequence: Synthetic peptide
  Seed: WRGENGRLTR
  misc_feature (2)..(2): Xaa can be Arg
  misc_feature (10)..(10): Xaa can be Arg, Ile, Leu, Lys, Met, Phe, or Tyr
WXGENGRLTX

SEQ ID NO: 51132 - protein, 9 aa, Artificial Sequence
  Description of Artificial Sequence: Synthetic peptide
  Seed: WRQANNGEY
  misc_feature (2)..(2): Xaa can be Gln, Met, His, Lys, Tyr, Ala, Arg, Glu, Leu, Ser, Asn, Ile, Phe, Thr, Val, or Gly
  misc_feature (9)..(9): Xaa can be Tyr, Phe, Met, Leu, His, Ile, Trp, or Val
WXQANNGEX

SEQ ID NO: 51133 - protein, 8 aa, Artificial Sequence
  Description of Artificial Sequence: Synthetic peptide
  Seed: YAFEKEGY
  misc_feature (2)..(2): Xaa can be Glu or Ala
  misc_feature (8)..(8): Xaa can be Tyr or Phe
YXFEKEGX

SEQ ID NO: 51134 - protein, 10 aa, Artificial Sequence
  Description of Artificial Sequence: Synthetic peptide
  Seed: YAFEKEGYSL
  misc_feature (2)..(2): Xaa can be Glu, Gln, Met, Asp, Leu, Pro, or Ala
  misc_feature (10)..(10): Xaa can be Leu, Ile, Phe, Tyr, Met, Trp, Val, Ala, Cys, Gly, His, Pro, Ser, or Thr
YXFEKEGYSX

SEQ ID NO: 51135 - protein, 11 aa, Artificial Sequence
  Description of Artificial Sequence: Synthetic peptide
  Seed: YAFEKEGYSLV
  misc_feature (2)..(2): Xaa can be Glu, Ala, Arg, Asn, Asp, Cys, Gln, Gly, His, Ile, Leu, Lys, Met, Phe, Pro, Ser, Thr, Trp, Tyr, or Val
  misc_feature (11)..(11): Xaa can be Leu, Val, Ala, Arg, Asn, Asp, Cys, Gln, Glu, Gly, His, Ile, Lys, Met, Phe, Pro, Ser, Thr, Trp, or Tyr
YXFEKEGYSLX

SEQ ID NO: 51136 - protein, 9 aa, Artificial Sequence
  Description of Artificial Sequence: Synthetic peptide
  Seed: YATAGLTHI
  misc_feature (2)..(2): Xaa can be Leu, Met, Gln, Ala, Ile, Ser, Thr, Val, Gly, Cys, Phe, Pro, or Asn
  misc_feature (9)..(9): Xaa can be Met, Phe, Tyr, Val, Leu, Trp, Ala, Ile, Thr, Cys, His, Gly, Pro, or Ser
YXTAGLTHX

SEQ ID NO: 51137 - protein, 10 aa, Artificial Sequence
  Description of Artificial Sequence: Synthetic peptide
  Seed: YATAGLTHIM
  misc_feature (2)..(2): Xaa can be Met, Leu, Ala, Gln, Ile, Pro, Val, Arg, Asn, Asp, Cys, Glu, Gly, His, Lys, Phe, Ser, Thr, Trp, or Tyr
  misc_feature (10)..(10): Xaa can be Ala, Arg, Ile, Leu, Met, Phe, Thr, Trp, Tyr, Val, Lys, His, Gly, or Ser
YXTAGLTHIX

SEQ ID NO: 51138 - protein, 10 aa, Artificial Sequence
  Description of Artificial Sequence: Synthetic peptide
  Seed: YDFEREGYSL
  misc_feature (2)..(2): Xaa can be Glu, Asp, or Gln
  misc_feature (10)..(10): Xaa can be Leu, Phe, Ile, Met, Ala, Cys, Gly, Pro, Ser, Thr, Trp, or Val
YXFEREGYSX

SEQ ID NO: 51139 - protein, 11 aa, Artificial Sequence
  Description of Artificial Sequence: Synthetic peptide
  Seed: YDFEREGYSLI
  misc_feature (2)..(2): Xaa can be Glu, Asp, Ala, Arg, Asn, Cys, Gln, Gly, His, Ile, Leu, Lys, Met, Phe, Pro, Ser, Thr, Trp, Tyr, or Val
  misc_feature (11)..(11): Xaa can be Leu, Met, Ile, Phe, Ala, Arg, Asn, Asp, Cys, Gln, Glu, Gly, His, Lys, Pro, Ser, Thr, Trp, Tyr, or Val
YXFEREGYSLX

SEQ ID NO: 51140 - protein, 8 aa, Artificial Sequence
  Description of Artificial Sequence: Synthetic peptide
  Seed: YEDLIFLA
  misc_feature (2)..(2): Xaa can be Glu
  misc_feature (8)..(8): Xaa can be Ala, Ile, Leu, Pro, or Val
YXDLIFLX

SEQ ID NO: 51141 - protein, 11 aa, Artificial Sequence
  Description of Artificial Sequence: Synthetic peptide
  Seed: YEDLIFLARSA
  misc_feature (2)..(2): Xaa can be Glu, Met, Ala, Arg, Asn, Asp, Cys, Gln, Gly, His, Ile, Leu, Lys, Phe, Pro, Ser, Thr, Trp, Tyr, or Val
  misc_feature (11)..(11): Xaa can be Ala, Ile, Val, Leu, Met, Phe, or Pro
YXDLIFLARSX

SEQ ID NO: 51142 - protein, 8 aa, Artificial Sequence
  Description of Artificial Sequence: Synthetic peptide
  Seed: YEFEREGY
  misc_feature (2)..(2): Xaa can be Glu
  misc_feature (8)..(8): Xaa can be Met, Phe, or Tyr
YXFEREGX

SEQ ID NO: 51143 - protein, 10 aa, Artificial Sequence
  Description of Artificial Sequence: Synthetic peptide
  Seed: YEGRLIQNSI
  misc_feature (2)..(2): Xaa can be Glu
  misc_feature (10)..(10): Xaa can be Ala, Ile, Leu, Met, Phe, or Val
YXGRLIQNSX

SEQ ID NO: 51144 - protein, 8 aa, Artificial Sequence
  Description of Artificial Sequence: Synthetic peptide
  Seed: YERMCNIL
  misc_feature (2)..(2): Xaa can be Glu
  misc_feature (8)..(8): Xaa can be Ala, Ile, Leu, Met, Phe, Tyr, or Val
YXRMCNIX

SEQ ID NO: 51145 - protein, 10 aa, Artificial Sequence
  Description of Artificial Sequence: Synthetic peptide
  Seed: YFFGDNAEDY
  misc_feature (2)..(2): Xaa can be Pro, Gln, Met, Tyr, Ala, Phe, Lys, Trp, Glu, His, Ile, Leu, Ser, Val, Arg, Thr, Asn, Asp, Cys, or Gly
  misc_feature (10)..(10): Xaa can be Tyr, Phe, Met, Leu, Ile, Trp, His, Val, or Ala
YXFGDNAEDX

SEQ ID NO: 51146 - protein, 11 aa, Artificial Sequence
  Description of Artificial Sequence: Synthetic peptide
  Seed: YFFGDNAEDYD
  misc_feature (2)..(2): Xaa can be Phe, Met, Trp, Tyr, Ala, Asn, Gln, Gly, His, Ile, Leu, Ser, Thr, or Val
  misc_feature (11)..(11): Xaa can be Tyr, Phe, Ala, Arg, Asn, Asp, Cys, Gln, Glu, Gly, His, Ile, Leu, Lys, Met, Pro, Ser, Thr, Trp, or Val
YXFGDNAEDYX

SEQ ID NO: 51147 - protein, 10 aa, Artificial Sequence
  Description of Artificial Sequence: Synthetic peptide
  Seed: YFFGDNAEEF
  misc_feature (2)..(2): Xaa can be Pro, Ala, Gln, Tyr, Met, Phe, Trp, Ser, Thr, Val, Ile, Lys, Arg, Glu, His, Leu, Asn, Gly, Asp, or Cys
  misc_feature (10)..(10): Xaa can be Tyr, Phe, Met, Leu, Trp, Ile, His, Val, Ala, Gln, or Ser
YXFGDNAEEX

SEQ ID NO: 51148 - protein, 11 aa, Artificial Sequence
  Description of Artificial Sequence: Synthetic peptide
  Seed: YFFGDNAEEYD
  misc_feature (2)..(2): Xaa can be Phe, Met, Tyr, Trp, Ala, Asn, Gln, Gly, His, Ile, Leu, Ser, Thr, or Val
  misc_feature (11)..(11): Xaa can be Tyr, Phe, Met, Ala, Arg, Asn, Asp, Cys, Gln, Glu, Gly, His, Ile, Leu, Lys, Pro, Ser, Thr, Trp, or Val
YXFGDNAEEYX

SEQ ID NO: 51149 - protein, 10 aa, Artificial Sequence
  Description of Artificial Sequence: Synthetic peptide
  Seed: YFFGDSAEEY
  misc_feature (2)..(2): Xaa can be Pro, Gln, Ala, Met, Tyr, Lys, Phe, Ile, Leu, Ser, Thr, Trp, Val, Arg, Glu, Gly, His, Asn, Cys, or Asp
  misc_feature (10)..(10): Xaa can be Tyr, Phe, Met, Leu, Ile, Trp, Val, His, Ala, Cys, Gln, Gly, Ser, or Thr
YXFGDSAEEX

SEQ ID NO: 51150 - protein, 11 aa, Artificial Sequence
  Description of Artificial Sequence: Synthetic peptide
  Seed: YFFGDSAEEYD
  misc_feature (2)..(2): Xaa can be Met, Phe, Tyr, Trp, Ala, Asn, Gln, Gly, His, Ile, Leu, Pro, Ser, Thr, or Val
  misc_feature (11)..(11): Xaa can be Tyr, Phe, Ala, Arg, Asn, Asp, Cys, Gln, Glu, Gly, His, Ile, Leu, Lys, Met, Pro, Ser, Thr, Trp, or Val
YXFGDSAEEYX

SEQ ID NO: 51151 - protein, 9 aa, Artificial Sequence
  Description of Artificial Sequence: Synthetic peptide
  Seed: YGLAVAGGY
  misc_feature (2)..(2): Xaa can be Gln, Pro, Ala, Met, Ser, Lys, Thr, Val, His, Ile, Leu, Arg, Asn, Glu, Gly, Phe, Cys, Trp, Tyr, or Asp
  misc_feature (9)..(9): Xaa can be Tyr, Phe, Met, Trp, Leu, Ile, Val, His, or Ala
YXLAVAGGX

SEQ ID NO: 51152 - protein, 11 aa, Artificial Sequence
  Description of Artificial Sequence: Synthetic peptide
  Seed: YGLAVASGHDF
  misc_feature (2)..(2): Xaa can be Ala, Arg, Asn, Asp, Cys, Gln, Glu, Gly, His, Ile, Leu, Lys, Met, Phe, Pro, Ser, Thr, Trp, Tyr, or Val
  misc_feature (11)..(11): Xaa can be Met, Phe, or Tyr
YXLAVASGHDX

SEQ ID NO: 51153 - protein, 9 aa, Artificial Sequence
  Description of Artificial Sequence: Synthetic peptide
  Seed: YGLAVASGY
  misc_feature (2)..(2): Xaa can be Pro, Gln, Ala, Met, Lys, Ser, Thr, His, Ile, Leu, Val, Arg, Asn, Cys, Glu, Gly, Phe, Trp, Tyr, or Asp
  misc_feature (9)..(9): Xaa can be Tyr, Met, Phe, Trp, Leu, Ile, Val, His, Ala, Gly, Cys, Gln, Ser, or Thr
YXLAVASGX

SEQ ID NO: 51154 - protein, 11 aa, Artificial Sequence
  Description of Artificial Sequence: Synthetic peptide
  Seed: YGLAVASGYDF
  misc_feature (2)..(2): Xaa can be Ala, Arg, Asn, Asp, Cys, Gln, Glu, Gly, His, Ile, Leu, Lys, Met, Phe, Pro, Ser, Thr, Trp, Tyr, or Val
  misc_feature (11)..(11): Xaa can be Phe, Tyr, or Met
YXLAVASGYDX

SEQ ID NO: 51155 - protein, 11 aa, Artificial Sequence
  Description of Artificial Sequence: Synthetic peptide
  Seed: YGLAVASGYEF
  misc_feature (2)..(2): Xaa can be Gln, Pro, Ser, Ala, Arg, Asn, Asp, Cys, Glu, Gly, His, Ile, Leu, Lys, Met, Phe, Thr, Trp, Tyr, or Val
  misc_feature (11)..(11): Xaa can be Leu, Met, Phe, Trp, Tyr, His, Ile, or Ala
YXLAVASGYEX

SEQ ID NO: 51156 - protein, 9 aa, Artificial Sequence
  Description of Artificial Sequence: Synthetic peptide
  Seed: YGLIVASGY
  misc_feature (2)..(2): Xaa can be Pro, Gln, Ala, Met, Lys, Ser, His, Thr, Val, Arg, Glu, Gly, Ile, Leu, Phe, Asn, Trp, Tyr, or Cys
  misc_feature (9)..(9): Xaa can be Tyr, Phe, Met, Leu, Ile, Trp, Val, His, Ala, or Ser
YXLIVASGX

SEQ ID NO: 51157 - protein, 9 aa, Artificial Sequence
  Description of Artificial Sequence: Synthetic peptide
  Seed: YGLSVASGY
  misc_feature (2)..(2): Xaa can be Pro, Gln, Ala, Met, Lys, Ser, Thr, His, Ile, Leu, Val, Arg, Asn, Cys, Glu, Gly, Phe, Trp, Tyr, or Asp
  misc_feature (9)..(9): Xaa can be Tyr, Met, Phe, Trp, Leu, Ile, Val, His, Ala, Gly, Cys, Gln, Ser, or Thr
YXLSVASGX

SEQ ID NO: 51158 - protein, 11 aa, Artificial Sequence
  Description of Artificial Sequence: Synthetic peptide
  Seed: YGLSVASGYDF
  misc_feature (2)..(2): Xaa can be Ser, Thr, Ala, Val, Arg, Asn, Asp, Cys, Gln, Glu, Gly, His, Ile, Leu, Lys, Met, Phe, Pro, Trp, or Tyr
  misc_feature (11)..(11): Xaa can be Phe, Trp, Tyr, or Met
YXLSVASGYDX

SEQ ID NO: 51159 - protein, 9 aa, Artificial Sequence
  Description of Artificial Sequence: Synthetic peptide
  Seed: YGLTVASGY
  misc_feature (2)..(2): Xaa can be Pro, Gln, Met, Ala, Lys, Ser, Thr, Ile, Leu, Val, Asn, Gly, His, Arg, Cys, Glu, Phe, Tyr, Trp, or Asp
  misc_feature (9)..(9): Xaa can be Tyr, Phe, Met, Trp, Leu, Ile, Val, His, Ala, Gly, or Ser
YXLTVASGX

SEQ ID NO: 51160 - protein, 9 aa, Artificial Sequence
  Description of Artificial Sequence: Synthetic peptide
  Seed: YGLVVASGY
  misc_feature (2)..(2): Xaa can be Pro, Gln, Ala, Met, Ser, Thr, Lys, Val, Asn, Gly, His, Ile, Arg, Glu, Leu, Phe, Tyr, Trp, or Cys
  misc_feature (9)..(9): Xaa can be Tyr, Phe, Met, Trp, Leu, Ile, Val, His, Ala, Gly, Ser, or Thr
YXLVVASGX

SEQ ID NO: 51161 - protein, 9 aa, Artificial Sequence
  Description of Artificial Sequence: Synthetic peptide
  Seed: YGPAVASGY
  misc_feature (2)..(2): Xaa can be Tyr, Phe, Ala, Met, Trp, Ser, Thr, Val, Gln, Arg, His, Ile, Leu, Gly, Lys, Pro, or Glu
  misc_feature (9)..(9): Xaa can be Met, Phe, Tyr, Leu, Ile, Val, Trp, Ala, His, Cys, or Thr
YXPAVASGX

SEQ ID NO: 51162 - protein, 10 aa, Artificial Sequence
  Description of Artificial Sequence: Synthetic peptide
  Seed: YGPAVASGYA
  misc_feature (2)..(2): Xaa can be Ala, Arg, Asn, Asp, Cys, Gln, Glu, Gly, His, Ile, Leu, Lys, Met, Phe, Pro, Ser, Thr, Trp, Tyr, or Val
  misc_feature (10)..(10): Xaa can be Ala, Ile, Leu, Met, Phe, or Val
YXPAVASGYX

SEQ ID NO: 51163 - protein, 11 aa, Artificial Sequence
  Description of Artificial Sequence: Synthetic peptide
  Seed: YGPAVASGYAF
  misc_feature (2)..(2): Xaa can be Pro, Gln, Met, Ala, Arg, Asn, Asp, Cys, Glu, Gly, His, Ile, Leu, Lys, Phe, Ser, Thr, Trp, Tyr, or Val
  misc_feature (11)..(11): Xaa can be Leu, Met, Phe, Tyr, Trp, Ile, Ala, His, or Val
YXPAVASGYAX

SEQ ID NO: 51164 - protein, 11 aa, Artificial Sequence
  Description of Artificial Sequence: Synthetic peptide
  Seed: YGPAVASGYDF
  misc_feature (2)..(2): Xaa can be Ala, Arg, Asn, Asp, Cys, Gln, Glu, Gly, His, Ile, Leu, Lys, Met, Phe, Pro, Ser, Thr, Trp, Tyr, or Val
  misc_feature (11)..(11): Xaa can be Phe or Tyr
YXPAVASGYDX

SEQ ID NO: 51165 - protein, 11 aa, Artificial Sequence
  Description of Artificial Sequence: Synthetic peptide
  Seed: YGPAVASGYEF
  misc_feature (2)..(2): Xaa can be Ala, Arg, Asn, Asp, Cys, Gln, Glu, Gly, His, Ile, Leu, Lys, Met, Phe, Pro, Ser, Thr, Trp, Tyr, or Val
  misc_feature (11)..(11): Xaa can be Leu, Met, Phe, Trp, or Tyr
YXPAVASGYEX

SEQ ID NO: 51166 - protein, 11 aa, Artificial Sequence
  Description of Artificial Sequence: Synthetic peptide
  Seed: YGPAVASGYNF
  misc_feature (2)..(2): Xaa can be Ala, Arg, Asn, Asp, Cys, Gln, Glu, Gly, His, Ile, Leu, Lys, Met, Phe, Pro, Ser, Thr, Trp, Tyr, or Val
  misc_feature (11)..(11): Xaa can be Met, Phe, Trp, or Tyr
YXPAVASGYNX

SEQ ID NO: 51167 - protein, 9 aa, Artificial Sequence
  Description of Artificial Sequence: Synthetic peptide
  Seed: YGPAVSSGY
  misc_feature (2)..(2): Xaa can be Tyr, Phe, Ala, Met, Trp, Ser, Thr, Val, Gln, His, Arg, Gly, Ile, Leu, Lys, Pro, Cys, or Gl u
  misc_feature (9)..(9): Xaa can be Tyr, Met, Phe, Leu, Ile, Val, Trp, Ala, His, Thr, Cys, or Gln
YXPAVSSGX

SEQ ID NO: 51168 - protein, 11 aa, Artificial Sequence
  Description of Artificial Sequence: Synthetic peptide
  Seed: YGPAVSSGYDF
  misc_feature (2)..(2): Xaa can be Ala, Arg, Asn, Asp, Cys, Gln, Glu, Gly, His, Ile, Leu, Lys, Met, Phe, Pro, Ser, Thr, Trp, Tyr, or Val
  misc_feature (11)..(11): Xaa can be Phe, Tyr, or Met
YXPAVSSGYDX

SEQ ID NO: 51169 - protein, 11 aa, Artificial Sequence
  Description of Artificial Sequence: Synthetic peptide
  Seed: YGPAVSSGYNF
  misc_feature (2)..(2): Xaa can be Ala, Arg, Asn, Asp, Cys, Gln, Glu, Gly, His, Ile, Leu, Lys, Met, Phe, Pro, Ser, Thr, Trp, Tyr, or Val
  misc_feature (11)..(11): Xaa can be Met, Phe, Trp, or Tyr
YXPAVSSGYNX

SEQ ID NO: 51170 - protein, 8 aa, Artificial Sequence
  Description of Artificial Sequence: Synthetic peptide
  Seed: YIQMCTEF
  misc_feature (2)..(2): Xaa can be Tyr, Trp, Met, Phe, Ala, Gln, His, Ile, Leu, or Pro
  misc_feature (8)..(8): Xaa can be Phe, Trp, Ile, Leu, or Met
YXQMCTEX

SEQ ID NO: 51171 - protein, 9 aa, Artificial Sequence
  Description of Artificial Sequence: Synthetic peptide
  Seed: YIQMCTEFK
  misc_feature (2)..(2): Xaa can be Thr, Val, Ala, Asn, Gln, Gly, Ile, Leu, Met, Phe, Pro, Ser, Trp, Tyr, Cys, His, or Lys
  misc_feature (9)..(9): Xaa can be Arg, Lys, or Tyr
YXQMCTEFX

SEQ ID NO: 51172 - protein, 10 aa, Artificial Sequence
  Description of Artificial Sequence: Synthetic peptide
  Seed: YIQMCTEFKL
  misc_feature (2)..(2): Xaa can be Leu, Met, Arg, Ala, Asn, Asp, Cys, Gln, Glu, Gly, His, Ile, Lys, Phe, Pro, Ser, Thr, Trp, Tyr, or Val
  misc_feature (10)..(10): Xaa can be Ala, Ile, Leu, Met, Phe, Thr, Trp, Tyr, Val, Cys, or Ser
YXQMCTEFKX

SEQ ID NO: 51173 - protein, 9 aa, Artificial Sequence
  Description of Artificial Sequence: Synthetic peptide
  Seed: YIQMCTEIK
  misc_feature (2)..(2): Xaa can be Ala, Ile, Leu, Met, Ser, Thr, or Val
  misc_feature (9)..(9): Xaa can be Arg or Lys
YXQMCTEIX

SEQ ID NO: 51174 - protein, 10 aa, Artificial Sequence
  Description of Artificial Sequence: Synthetic peptide
  Seed: YIQMCTEIKL
  misc_feature (2)..(2): Xaa can be Leu, Met, Ala, Arg, Asn, Asp, Cys, Gln, Glu, Gly, His, Ile, Lys, Phe, Pro, Ser, Thr, Trp, Tyr, or Val
  misc_feature (10)..(10): Xaa can be Ala, Ile, Leu, Met, Phe, Trp, Tyr, Val, or Thr
YXQMCTEIKX

SEQ ID NO: 51175 - protein, 9 aa, Artificial Sequence
  Description of Artificial Sequence: Synthetic peptide
  Seed: YIQMCTELK
  misc_feature (2)..(2): Xaa can be Thr, Ala, Gln, Gly, Ile, Leu, Met, Phe, Ser, Trp, Tyr, Val, Asn, His, or Pro
  misc_feature (9)..(9): Xaa can be Arg, Lys, or Tyr
YXQMCTELX

SEQ ID NO: 51176 - protein, 10 aa, Artificial Sequence
  Description of Artificial Sequence: Synthetic peptide
  Seed: YIQMCTELKL
  misc_feature (2)..(2): Xaa can be Met, Leu, Gln, Ala, Arg, Asn, Asp, Cys, Glu, Gly, His, Ile, Lys, Phe, Pro, Ser, Thr, Trp, Tyr, or Val
  misc_feature (10)..(10): Xaa can be Ala, Ile, Leu, Met, Phe, Trp, Tyr, Val, His, Cys, or Thr
YXQMCTELKX

SEQ ID NO: 51177 - protein, 10 aa, Artificial Sequence
  Description of Artificial Sequence: Synthetic peptide
  Seed: YIQMCTELQL
  misc_feature (2)..(2): Xaa can be Leu, Met, Arg, Ala, Asn, Asp, Cys, Gln, Glu, Gly, His, Ile, Lys, Phe, Pro, Ser, Thr, Trp, Tyr, or Val
  misc_feature (10)..(10): Xaa can be Ala, His, Ile, Leu, Met, Phe, Trp, Tyr, Val, Cys, Ser, or Thr
YXQMCTELQX

SEQ ID NO: 51178 - protein, 9 aa, Artificial Sequence
  Description of Artificial Sequence: Synthetic peptide
  Seed: YKRIDGKWM
  misc_feature (2)..(2): Xaa can be Gln, Lys, Met, Ala, Arg, His, Leu, Ser, Glu, or Val
  misc_feature (9)..(9): Xaa can be Tyr, Phe, Met, His, or Leu
YXRIDGKWX

SEQ ID NO: 51179 - protein, 10 aa, Artificial Sequence
  Description of Artificial Sequence: Synthetic peptide
  Seed: YKRIDGKWMR
  misc_feature (2)..(2): Xaa can be Ala, Arg, Asn, Asp, Cys, Gln, Glu, Gly, His, Ile, Leu, Lys, Met, Phe, Pro, Ser, Thr, Trp, Tyr, or Val
  misc_feature (10)..(10): Xaa can be Arg, Ile, Leu, Lys, Met, Phe, Tyr, or Val
YXRIDGKWMX

SEQ ID NO: 51180 - protein, 9 aa, Artificial Sequence
  Description of Artificial Sequence: Synthetic peptide
  Seed: YKRRDGKWM
  misc_feature (2)..(2): Xaa can be Arg, Lys, or Tyr
  misc_feature (9)..(9): Xaa can be Met, Leu, or Phe
YXRRDGKWX

SEQ ID NO: 51181 - protein, 9 aa, Artificial Sequence
  Description of Artificial Sequence: Synthetic peptide
  Seed: YKRVDGKWM
  misc_feature (2)..(2): Xaa can be Arg, Tyr, or Lys
  misc_feature (9)..(9): Xaa can be Met, Leu, or Phe
YXRVDGKWX

SEQ ID NO: 51182 - protein, 9 aa, Artificial Sequence
  Description of Artificial Sequence: Synthetic peptide
  Seed: YKRVDGRWM
  misc_feature (2)..(2): Xaa can be Gln, Lys, Met, Glu, His, Leu, Ala, Arg, Ile, Ser, Val, or Thr
  misc_feature (9)..(9): Xaa can be Tyr, Phe, Met, Leu, His, Ile, or Trp
YXRVDGRWX

SEQ ID NO: 51183 - protein, 10 aa, Artificial Sequence
  Description of Artificial Sequence: Synthetic peptide
  Seed: YKRVDGRWMR
  misc_feature (2)..(2): Xaa can be Arg, Ala, Asn, Asp, Cys, Gln, Glu, Gly, His, Ile, Leu, Lys, Met, Phe, Pro, Ser, Thr, Trp, Tyr, or Val
  misc_feature (10)..(10): Xaa can be Arg, Ile, Leu, Lys, Met, Phe, Tyr, Val, Ala, or Trp
YXRVDGRWMX

SEQ ID NO: 51184 - protein, 9 aa, Artificial Sequence
  Description of Artificial Sequence: Synthetic peptide
  Seed: YKRVGGKWM
  misc_feature (2)..(2): Xaa can be Arg, Tyr, or Lys
  misc_feature (9)..(9): Xaa can be Met, Leu, Phe, Tyr, Ile, or Val
YXRVGGKWX

SEQ ID NO: 51185 - protein, 10 aa, Artificial Sequence
  Description of Artificial Sequence: Synthetic peptide
  Seed: YKRVGGKWMR
  misc_feature (2)..(2): Xaa can be Ala, Arg, Asn, Asp, Cys, Gln, Glu, Gly, His, Ile, Leu, Lys, Met, Phe, Pro, Ser, Thr, Trp, Tyr, or Val
  misc_feature (10)..(10): Xaa can be Arg, Ile, Leu, Lys, Met, Phe, Tyr, or Val
YXRVGGKWMX

SEQ ID NO: 51186 - protein, 9 aa, Artificial Sequence
  Description of Artificial Sequence: Synthetic peptide
  Seed: YKRVGGRWM
  misc_feature (2)..(2): Xaa can be Gln, Met, Lys, Ala, Glu, His, Leu, Arg, Ile, Ser, Thr, Val, Asn, or Gly
  misc_feature (9)..(9): Xaa can be Tyr, Phe, Met, Leu, His, Trp, Ala, Ile, or Val
YXRVGGRWX

SEQ ID NO: 51187 - protein, 10 aa, Artificial Sequence
  Description of Artificial Sequence: Synthetic peptide
  Seed: YKRVGGRWMR
  misc_feature (2)..(2): Xaa can be Arg, Ala, Asn, Asp, Cys, Gln, Glu, Gly, His, Ile, Leu, Lys, Met, Phe, Pro, Ser, Thr, Trp, Tyr, or Val
  misc_feature (10)..(10): Xaa can be Arg, Ile, Leu, Lys, Met, Phe, Tyr, Val, Ala, His, or Trp
YXRVGGRWMX

SEQ ID NO: 51188 - protein, 9 aa, Artificial Sequence
  Description of Artificial Sequence: Synthetic peptide
  Seed: YKRVNGKWM
  misc_feature (2)..(2): Xaa can be Arg, Tyr, Phe, or Lys
  misc_feature (9)..(9): Xaa can be Met, Leu, Phe, Tyr, Ile, or Val
YXRVNGKWX

SEQ ID NO: 51189 - protein, 10 aa, Artificial Sequence
  Description of Artificial Sequence: Synthetic peptide
  Seed: YKRVNGKWMR
  misc_feature (2)..(2): Xaa can be Ala, Arg, Asn, Asp, Cys, Gln, Glu, Gly, His, Ile, Leu, Lys, Met, Phe, Pro, Ser, Thr, Trp, Tyr, or Val
  misc_feature (10)..(10): Xaa can be Arg, Ile, Leu, Lys, Met, Phe, Tyr, or Val
YXRVNGKWMX

SEQ ID NO: 51190 - protein, 8 aa, Artificial Sequence
  Description of Artificial Sequence: Synthetic peptide
  Seed: YLEEHPSV
  misc_feature (2)..(2): Xaa can be Leu or Met
  misc_feature (8)..(8): Xaa can be Ile, Leu, or Val
YXEEHPSX

SEQ ID NO: 51191 - protein, 8 aa, Artificial Sequence
  Description of Artificial Sequence: Synthetic peptide
  Seed: YLEGHPSA
  misc_feature (2)..(2): Xaa can be Leu, Met, or Ile
  misc_feature (8)..(8): Xaa can be Val, Ala, Ile, Leu, or Met
YXEGHPSX

SEQ ID NO: 51192 - protein, 10 aa, Artificial Sequence
  Description of Artificial Sequence: Synthetic peptide
  Seed: YLEGHPSAGK
  misc_feature (2)..(2): Xaa can be Leu or Met
  misc_feature (10)..(10): Xaa can be Lys
YXEGHPSAGX

SEQ ID NO: 51193 - protein, 8 aa, Artificial Sequence
  Description of Artificial Sequence: Synthetic peptide
  Seed: YQRTRAHV
  misc_feature (2)..(2): Xaa can be Leu, Met, Ala, Gln, Ile, Pro, Val, Gly, Phe, Asn, Ser, Thr, Arg, Lys, Cys, Trp, or Tyr
  misc_feature (8)..(8): Xaa can be Leu, Met, Ile, Val, Phe, Ala, Cys, Pro, Ser, or Thr
YXRTRAHX

SEQ ID NO: 51194 - protein, 9 aa, Artificial Sequence
  Description of Artificial Sequence: Synthetic peptide
  Seed: YQRTRAHVR
  misc_feature (2)..(2): Xaa can be Gln, Ile, Leu, Met, Phe, Ser, Thr, Trp, Tyr, Val, Ala, Asn, or Gly
  misc_feature (9)..(9): Xaa can be Arg or Lys
YXRTRAHVX

SEQ ID NO: 51195 - protein, 8 aa, Artificial Sequence
  Description of Artificial Sequence: Synthetic peptide
  Seed: YQRTRALV
  misc_feature (2)..(2): Xaa can be Met, Leu, Ala, Ile, Pro, Gln, Val, Asn, Phe, Gly, Ser, Arg, Lys, Thr, Trp, Cys, or Tyr
  misc_feature (8)..(8): Xaa can be Leu, Met, Ile, Val, Phe, Ala, Cys, Pro, Ser, or Thr
YXRTRALX

SEQ ID NO: 51196 - protein, 9 aa, Artificial Sequence
  Description of Artificial Sequence: Synthetic peptide
  Seed: YQRTRALVR
  misc_feature (2)..(2): Xaa can be Thr, Ser, Val, Met, Tyr, Ala, Gln, Ile, Gly, Phe, Asn, Leu, Trp, Cys, His, or Lys
  misc_feature (9)..(9): Xaa can be Lys, Ala, Arg, Val, Ile, Tyr, Met, Ser, Gly, Leu, Gln, His, Phe, Pro, Thr, Asn, or Cys
YXRTRALVX

SEQ ID NO: 51197 - protein, 10 aa, Artificial Sequence
  Description of Artificial Sequence: Synthetic peptide
  Seed: YQRTRALVRA
  misc_feature (2)..(2): Xaa can be Met, Ala, Gln, Ile, Leu, Pro, Val, Phe, Asn, Arg, Gly, Lys, Ser, Thr, Trp, Cys, or Tyr
  misc_feature (10)..(10): Xaa can be Leu, Met, Ile, Val, Phe, Ala, Cys, or Thr
YXRTRALVRX

SEQ ID NO: 51198 - protein, 9 aa, Artificial Sequence
  Description of Artificial Sequence: Synthetic peptide
  Seed: YRKIDGKWM
  misc_feature (2)..(2): Xaa can be Arg
  misc_feature (9)..(9): Xaa can be Leu, Met, or Phe
YXKIDGKWX

SEQ ID NO: 51199 - protein, 10 aa, Artificial Sequence
  Description of Artificial Sequence: Synthetic peptide
  Seed: YRKIDGKWMR
  misc_feature (2)..(2): Xaa can be Arg
  misc_feature (10)..(10): Xaa can be Arg, Ile, Leu, Lys, Met, Phe, Tyr, or Val
YXKIDGKWMX

SEQ ID NO: 51200 - protein, 9 aa, Artificial Sequence
  Description of Artificial Sequence: Synthetic peptide
  Seed: YRKREGKWI
  misc_feature (2)..(2): Xaa can be Arg
  misc_feature (9)..(9): Xaa can be Ile, Leu, Met, or Val
YXKREGKWX

SEQ ID NO: 51201 - protein, 10 aa, Artificial Sequence
  Description of Artificial Sequence: Synthetic peptide
  Seed: YRKREGKWIR
  misc_feature (2)..(2): Xaa can be Arg
  misc_feature (10)..(10): Xaa can be Arg, Ile, Leu, Lys, Met, Phe, or Tyr
YXKREGKWIX

SEQ ID NO: 51202 - protein, 10 aa, Artificial Sequence
  Description of Artificial Sequence: Synthetic peptide
  Seed: YRRIDGKWIR
  misc_feature (2)..(2): Xaa can be Ala, Arg, Asn, Asp, Cys, Gln, Glu, Gly, His, Ile, Leu, Lys, Met, Phe, Pro, Ser, Thr, Trp, Tyr, or Val
  misc_feature (10)..(10): Xaa can be Arg, Ile, Leu, Lys, Met, Phe, Tyr, or Val
YXRIDGKWIX

SEQ ID NO: 51203 - protein, 10 aa, Artificial Sequence
  Description of Artificial Sequence: Synthetic peptide
  Seed: YRRIDGKWTR
  misc_feature (2)..(2): Xaa can be Ala, Arg, Asn, Asp, Cys, Gln, Glu, Gly, His, Ile, Leu, Lys, Met, Phe, Pro, Ser, Thr, Trp, Tyr, or Val
  misc_feature (10)..(10): Xaa can be Arg, Ile, Leu, Lys, Met, Phe, Tyr, or Val
YXRIDGKWTX

SEQ ID NO: 51204 - protein, 9 aa, Artificial Sequence
  Description of Artificial Sequence: Synthetic peptide
  Seed: YRRKDGKWM
  misc_feature (2)..(2): Xaa can be Arg or Tyr
  misc_feature (9)..(9): Xaa can be Leu, Met, or Phe
YXRKDGKWX

SEQ ID NO: 51205 - protein, 10 aa, Artificial Sequence
  Description of Artificial Sequence: Synthetic peptide
  Seed: YRRRDGKWIR
  misc_feature (2)..(2): Xaa can be Arg, Ala, Asn, Asp, Cys, Gln, Glu, Gly, His, Ile, Leu, Lys, Met, Phe, Pro, Ser, Thr, Trp, Tyr, or Val
  misc_feature (10)..(10): Xaa can be Lys, Arg, Ile, Leu, Met, Phe, or Tyr
YXRRDGKWIX

SEQ ID NO: 51206 - protein, 10 aa, Artificial Sequence
  Description of Artificial Sequence: Synthetic peptide
  Seed: YRRRDGKWMR
  misc_feature (2)..(2): Xaa can be Arg, Ala, Asn, Asp, Cys, Gln, Glu, Gly, His, Ile, Leu, Lys, Met, Phe, Pro, Ser, Thr, Trp, Tyr, or Val
  misc_feature (10)..(10): Xaa can be Leu, Lys, Met, Phe, Arg, Ile, Tyr, or Val
YXRRDGKWMX

SEQ ID NO: 51207 - protein, 10 aa, Artificial Sequence
  Description of Artificial Sequence: Synthetic peptide
  Seed: YRRRDGKWVR
  misc_feature (2)..(2): Xaa can be Arg, Ala, Asn, Asp, Cys, Gln, Glu, Gly, His, Ile, Leu, Lys, Met, Phe, Pro, Ser, Thr, Trp, Tyr, or Val
  misc_feature (10)..(10): Xaa can be Lys, Arg, Ile, Leu, Met, Phe, Tyr, or Val
YXRRDGKWVX

SEQ ID NO: 51208 - protein, 10 aa, Artificial Sequence
  Description of Artificial Sequence: Synthetic peptide
  Seed: YRRREGKWVR
  misc_feature (2)..(2): Xaa can be Arg, Ala, Asn, Asp, Cys, Gln, Glu, Gly, His, Ile, Leu, Lys, Met, Phe, Pro, Ser, Thr, Trp, Tyr, or Val
  misc_feature (10)..(10): Xaa can be Leu, Lys, Met, Phe, Arg, Ile, Tyr, or Val
YXRREGKWVX

SEQ ID NO: 51209 - protein, 9 aa, Artificial Sequence
  Description of Artificial Sequence: Synthetic peptide
  Seed: YRRRNGKWV
  misc_feature (2)..(2): Xaa can be Arg
  misc_feature (9)..(9): Xaa can be Ile, Leu, Met, Phe, or Val
YXRRNGKWX

SEQ ID NO: 51210 - protein, 10 aa, Artificial Sequence
  Description of Artificial Sequence: Synthetic peptide
  Seed: YRRRNGKWVR
  misc_feature (2)..(2): Xaa can be Arg, Ala, Asn, Asp, Cys, Gln, Glu, Gly, His, Ile, Leu, Lys, Met, Phe, Pro, Ser, Thr, Trp, Tyr, or Val
  misc_feature (10)..(10): Xaa can be Leu, Lys, Met, Phe, Arg, Ile, Tyr, or Val
YXRRNGKWVX

SEQ ID NO: 51211 - protein, 10 aa, Artificial Sequence
  Description of Artificial Sequence: Synthetic peptide
  Seed: YRRVDGKWIR
  misc_feature (2)..(2): Xaa can be Arg, Ala, Asn, Asp, Cys, Gln, Glu, Gly, His, Ile, Leu, Lys, Met, Phe, Pro, Ser, Thr, Trp, Tyr, or Val
  misc_feature (10)..(10): Xaa can be Leu, Lys, Met, Phe, Tyr, Arg, Ile, or Val
YXRVDGKWIX

SEQ ID NO: 51212 - protein, 10 aa, Artificial Sequence
  Description of Artificial Sequence: Synthetic peptide
  Seed: YRRVDGKWMR
  misc_feature (2)..(2): Xaa can be Arg, Ala, Asn, Asp, Cys, Gln, Glu, Gly, His, Ile, Leu, Lys, Met, Phe, Pro, Ser, Thr, Trp, Tyr, or Val
  misc_feature (10)..(10): Xaa can be Ile, Leu, Lys, Met, Phe, Tyr, Arg, or Val
YXRVDGKWMX

SEQ ID NO: 51213 - protein, 10 aa, Artificial Sequence
  Description of Artificial Sequence: Synthetic peptide
  Seed: YRRVGGKWIR
  misc_feature (2)..(2): Xaa can be Arg, Ala, Asn, Asp, Cys, Gln, Glu, Gly, His, Ile, Leu, Lys, Met, Phe, Pro, Ser, Thr, Trp, Tyr, or Val
  misc_feature (10)..(10): Xaa can be Arg, Ile, Leu, Lys, Met, Phe, Tyr, or Val
YXRVGGKWIX

SEQ ID NO: 51214 - protein, 9 aa, Artificial Sequence
  Description of Artificial Sequence: Synthetic peptide
  Seed: YSLIGIDPF
  misc_feature (2)..(2): Xaa can be Pro, Ala, Gln, Met, Tyr, Lys, Phe, Ser, Thr, Trp, Val, Gly, His, Ile, Leu, Arg, Asn, Cys, or Glu
  misc_feature (9)..(9): Xaa can be Met, Phe, Tyr, Leu, Trp, Ile, Val, His, Ala, Asn, Cys, Gln, Glu, Gly, Pro, Ser, or Thr
YXLIGIDPX

SEQ ID NO: 51215 - protein, 10 aa, Artificial Sequence
  Description of Artificial Sequence: Synthetic peptide
  Seed: YSLIGIDPFK
  misc_feature (2)..(2): Xaa can be Thr, Val, Ala, Arg, Asn, Asp, Cys, Gln, Glu, Gly, His, Ile, Leu, Lys, Met, Phe, Pro, Ser, Trp, or Tyr
  misc_feature (10)..(10): Xaa can be Arg, Lys, or Tyr
YXLIGIDPFX

SEQ ID NO: 51216 - protein, 11 aa, Artificial Sequence
  Description of Artificial Sequence: Synthetic peptide
  Seed: YSLIGIDPFKL
  misc_feature (2)..(2): Xaa can be Leu, Met, Phe, Tyr, Ala, Arg, Gln, Ile, Lys, Ser, Trp, Val, Thr, Asn, Cys, Gly, or His
  misc_feature (11)..(11): Xaa can be Val, Ile, Leu, Ala, Met, or Thr
YXLIGIDPFKX

SEQ ID NO: 51217 - protein, 9 aa, Artificial Sequence
  Description of Artificial Sequence: Synthetic peptide
  Seed: YSLVGIDPF
  misc_feature (2)..(2): Xaa can be Pro, Ala, Gln, Met, Tyr, Lys, Phe, Ser, Thr, Trp, Val, Leu, Arg, Gly, His, Ile, Asn, Cys, or Glu
  misc_feature (9)..(9): Xaa can be Met, Phe, Tyr, Leu, Trp, Ile, Val, His, Ala, Asn, Cys, Gln, Glu, Gly, Pro, Ser, or Thr
YXLVGIDPX

SEQ ID NO: 51218 - protein, 10 aa, Artificial Sequence
  Description of Artificial Sequence: Synthetic peptide
  Seed: YSLVGIDPFK
  misc_feature (2)..(2): Xaa can be Thr, Ala, Arg, Asn, Asp, Cys, Gln, Glu, Gly, His, Ile, Leu, Lys, Met, Phe, Pro, Ser, Trp, Tyr, or Val
  misc_feature (10)..(10): Xaa can be Arg, Lys, or Tyr
YXLVGIDPFX

SEQ ID NO: 51219 - protein, 9 aa, Artificial Sequence
  Description of Artificial Sequence: Synthetic peptide
  Seed: YSLVGIDSF
  misc_feature (2)..(2): Xaa can be Pro, Gln, Ala, Met, Lys, Phe, Ser, Thr, Trp, Tyr, Val, Gly, Ile, Leu, Arg, Asn, Cys, His, or Glu
  misc_feature (9)..(9): Xaa can be Met, Phe, Tyr, Trp, Leu, Ile, Val, His, Ala, Asn, Cys, Gln, Glu, Gly, Ser, or Thr
YXLVGIDSX

SEQ ID NO: 51220 - protein, 10 aa, Artificial Sequence
  Description of Artificial Sequence: Synthetic peptide
  Seed: YSLVGIDSFR
  misc_feature (2)..(2): Xaa can be Thr, Val, Ala, Ile, Met, Ser, Arg, Asn, Asp, Cys, Gln, Glu, Gly, His, Leu, Lys, Phe, Pro, Trp, or Tyr
  misc_feature (10)..(10): Xaa can be Arg, Lys, Tyr, Met, or His
YXLVGIDSFX

SEQ ID NO: 51221 - protein, 11 aa, Artificial Sequence
  Description of Artificial Sequence: Synthetic peptide
  Seed: YSLVGIDSFRM
  misc_feature (2)..(2): Xaa can be Ser, Thr, or Ala
  misc_feature (11)..(11): Xaa can be Trp, Phe, Tyr, or Met
YXLVGIDSFRX

SEQ ID NO: 51222 - protein, 9 aa, Artificial Sequence
  Description of Artificial Sequence: Synthetic peptide
  Seed: YSLVGIEPF
  misc_feature (2)..(2): Xaa can be Pro, Met, Gln, Leu, Ile, Thr, Tyr, Val, Ala, Ser, Phe, Gly, Lys, Trp, Arg, Asn, Cys, Glu, or His
  misc_feature (9)..(9): Xaa can be Ile, Met, Phe, Tyr, Trp, Leu, Val, Ala, Thr, His, Cys, Ser, Gly, Pro, Glu, Asn, or Gln
YXLVGIEPX

SEQ ID NO: 51223 - protein, 10 aa, Artificial Sequence
  Description of Artificial Sequence: Synthetic peptide
  Seed: YSLVGIEPFK
  misc_feature (2)..(2): Xaa can be Thr, Ala, Arg, Asn, Asp, Cys, Gln, Glu, Gly, His, Ile, Leu, Lys, Met, Phe, Pro, Ser, Trp, Tyr, or Val
  misc_feature (10)..(10): Xaa can be Arg, Lys, or Tyr
YXLVGIEPFX

SEQ ID NO: 51224 - protein, 9 aa, Artificial Sequence
  Description of Artificial Sequence: Synthetic peptide
  Seed: YSLVGVDPF
  misc_feature (2)..(2): Xaa can be Pro, Tyr, Ala, Gln, Met, Phe, Lys, Ser, Thr, Trp, Val, Arg, Leu, Gly, His, Ile, Asn, Cys, or Glu
  misc_feature (9)..(9): Xaa can be Met, Phe, Tyr, Trp, Leu, Ile, Val, His, Ala, Thr, Asn, Cys, Gln, Glu, Gly, Pro, or Ser
YXLVGVDPX

SEQ ID NO: 51225 - protein, 10 aa, Artificial Sequence
  Description of Artificial Sequence: Synthetic peptide
  Seed: YSLVGVDPFK
  misc_feature (2)..(2): Xaa can be Thr, Ala, Arg, Asn, Asp, Cys, Gln, Glu, Gly, His, Ile, Leu, Lys, Met, Phe, Pro, Ser, Trp, Tyr, or Val
  misc_feature (10)..(10): Xaa can be Arg, Lys, or Tyr
YXLVGVDPFX

SEQ ID NO: 51226 - protein, 14 aa, Influenza A virus
AHKSQLVWMACHSA

SEQ ID NO: 51227 - protein, 15 aa, Influenza A virus
AHKSQLVWMACHSAA

SEQ ID NO: 51228 - protein, 16 aa, Influenza A virus
AHKSQLVWMACHSAAF

SEQ ID NO: 51229 - protein, 17 aa, Influenza A virus
AHKSQLVWMACHSAAFE

SEQ ID NO: 51230 - protein, 18 aa, Influenza A virus
AHKSQLVWMACHSAAFED

SEQ ID NO: 51231 - protein, 19 aa, Influenza A virus
AHKSQLVWMACHSAAFEDL

SEQ ID NO: 51232 - protein, 20 aa, Influenza A virus
AHKSQLVWMACHSAAFEDLR

SEQ ID NO: 51233 - protein, 13 aa, Influenza A virus
ALILRGSVAHKSC

SEQ ID NO: 51234 - protein, 14 aa, Influenza A virus
ALILRGSVAHKSCL

SEQ ID NO: 51235 - protein, 15 aa, Influenza A virus
ALILRGSVAHKSCLP

SEQ ID NO: 51236 - protein, 16 aa, Influenza A virus
ALILRGSVAHKSCLPA

SEQ ID NO: 51237 - protein, 17 aa, Influenza A virus
ALILRGSVAHKSCLPAC

SEQ ID NO: 51238 - protein, 18 aa, Influenza A virus
ALILRGSVAHKSCLPACV

SEQ ID NO: 51239 - protein, 19 aa, Influenza A virus
ALILRGSVAHKSCLPACVY

SEQ ID NO: 51240 - protein, 20 aa, Influenza A virus
ALILRGSVAHKSCLPACVYG

SEQ ID NO: 51241 - protein, 15 aa, Influenza A virus
ALVRTGMDPRMCSLM

SEQ ID NO: 51242 - protein, 16 aa, Influenza A virus
ALVRTGMDPRMCSLMQ

SEQ ID NO: 51243 - protein, 17 aa, Influenza A virus
ALVRTGMDPRMCSLMQG

SEQ ID NO: 51244 - protein, 19 aa, Influenza A virus
ALVRTGMDPRMCSLMQGST

SEQ ID NO: 51245 - protein, 20 aa, Influenza A virus
ALVRTGMDPRMCSLMQGSTL

SEQ ID NO: 51246 - protein, 21 aa, Influenza A virus
ALVRTGMDPRMCSLMQGSTLP

SEQ ID NO: 51247 - protein, 22 aa, Influenza A virus
ALVRTGMDPRMCSLMQGSTLPR

SEQ ID NO: 51248 - protein, 23 aa, Influenza A virus
ALVRTGMDPRMCSLMQGSTLPRR

SEQ ID NO: 51249 - protein, 24 aa, Influenza A virus
ALVRTGMDPRMCSLMQGSTLPRRS

SEQ ID NO: 51250 - protein, 25 aa, Influenza A virus
ALVRTGMDPRMCSLMQGSTLPRRSG

SEQ ID NO: 51251 - protein, 13 aa, Influenza A virus
ARSALILRGSVAH

SEQ ID NO: 51252 - protein, 14 aa, Influenza A virus
ARSALILRGSVAHK

SEQ ID NO: 51253 - protein, 15 aa, Influenza A virus
ARSALILRGSVAHKS

SEQ ID NO: 51254 - protein, 16 aa, Influenza A virus
ARSALILRGSVAHKSC

SEQ ID NO: 51255 - protein, 17 aa, Influenza A virus
ARSALILRGSVAHKSCL

SEQ ID NO: 51256 - protein, 18 aa, Influenza A virus
ARSALILRGSVAHKSCLP

SEQ ID NO: 51257 - protein, 19 aa, Influenza A virus
ARSALILRGSVAHKSCLPA

SEQ ID NO: 51258 - protein, 20 aa, Influenza A virus
ARSALILRGSVAHKSCLPAC

SEQ ID NO: 51259 - protein, 21 aa, Influenza A virus
ARSALILRGSVAHKSCLPACV

SEQ ID NO: 51260 - protein, 22 aa, Influenza A virus
ARSALILRGSVAHKSCLPACVY

SEQ ID NO: 51261 - protein, 23 aa, Influenza A virus
ARSALILRGSVAHKSCLPACVYG

SEQ ID NO: 51262 - protein, 14 aa, Influenza A virus
AYERMCNILKGKFQ

SEQ ID NO: 51263 - protein, 15 aa, Influenza A virus
AYERMCNILKGKFQT

SEQ ID NO: 51264 - protein, 16 aa, Influenza A virus
AYERMCNILKGKFQTA

SEQ ID NO: 51265 - protein, 17 aa, Influenza A virus
AYERMCNILKGKFQTAA

SEQ ID NO: 51266 - protein, 19 aa, Influenza A virus
AYERMCNILKGKFQTAAQR

SEQ ID NO: 51267 - protein, 20 aa, Influenza A virus
AYERMCNILKGKFQTAAQRA

SEQ ID NO: 51268 - protein, 21 aa, Influenza A virus
AYERMCNILKGKFQTAAQRAM

SEQ ID NO: 51269 - protein, 22 aa, Influenza A virus
AYERMCNILKGKFQTAAQRAMM

SEQ ID NO: 51270 - protein, 23 aa, Influenza A virus
AYERMCNILKGKFQTAAQRAMMD

SEQ ID NO: 51271 - protein, 24 aa, Influenza A virus
AYERMCNILKGKFQTAAQRAMMDQ

SEQ ID NO: 51272 - protein, 25 aa, Influenza A virus
AYERMCNILKGKFQTAAQRAMMDQV

SEQ ID NO: 51273 - protein, 14 aa, Influenza A virus
CNILKGKFQTAAQR

SEQ ID NO: 51274 - protein, 15 aa, Influenza A virus
CNILKGKFQTAAQRA

SEQ ID NO: 51275 - protein, 16 aa, Influenza A virus
CNILKGKFQTAAQRAM

SEQ ID NO: 51276 - protein, 17 aa, Influenza A virus
CNILKGKFQTAAQRAMM

SEQ ID NO: 51277 - protein, 18 aa, Influenza A virus
CNILKGKFQTAAQRAMMD

SEQ ID NO: 51278 - protein, 19 aa, Influenza A virus
CNILKGKFQTAAQRAMMDQ

SEQ ID NO: 51279 - protein, 20 aa, Influenza A virus
CNILKGKFQTAAQRAMMDQV

SEQ ID NO: 51280 - protein, 21 aa, Influenza A virus
CNILKGKFQTAAQRAMMDQVR

SEQ ID NO: 51281 - protein, 22 aa, Influenza A virus
CNILKGKFQTAAQRAMMDQVRE

SEQ ID NO: 51282 - protein, 23 aa, Influenza A virus
CNILKGKFQTAAQRAMMDQVRES

SEQ ID NO: 51283 - protein, 24 aa, Influenza A virus
CNILKGKFQTAAQRAMMDQVRESR

SEQ ID NO: 51284 - protein, 25 aa, Influenza A virus
CNILKGKFQTAAQRAMMDQVRESRN

SEQ ID NO: 51285 - protein, 14 aa, Influenza A virus
CSLMQGSTLPRRSG

SEQ ID NO: 51286 - protein, 15 aa, Influenza A virus
CSLMQGSTLPRRSGA

SEQ ID NO: 51287 - protein, 16 aa, Influenza A virus
CSLMQGSTLPRRSGAA

SEQ ID NO: 51288 - protein, 17 aa, Influenza A virus
CSLMQGSTLPRRSGAAG

SEQ ID NO: 51289 - protein, 18 aa, Influenza A virus
CSLMQGSTLPRRSGAAGA

SEQ ID NO: 51290 - protein, 19 aa, Influenza A virus
CSLMQGSTLPRRSGAAGAA

SEQ ID NO: 51291 - protein, 20 aa, Influenza A virus
CSLMQGSTLPRRSGAAGAAV

SEQ ID NO: 51292 - protein, 21 aa, Influenza A virus
CSLMQGSTLPRRSGAAGAAVK

SEQ ID NO: 51293 - protein, 22 aa, Influenza A virus
CSLMQGSTLPRRSGAAGAAVKG

SEQ ID NO: 51294 - protein, 23 aa, Influenza A virus
CSLMQGSTLPRRSGAAGAAVKGV

SEQ ID NO: 51295 - protein, 24 aa, Influenza A virus
CSLMQGSTLPRRSGAAGAAVKGVG

SEQ ID NO: 51296 - protein, 25 aa, Influenza A virus
CSLMQGSTLPRRSGAAGAAVKGVGT

SEQ ID NO: 51297 - protein, 15 aa, Influenza A virus
CTELKLSDYEGRLIQ

SEQ ID NO: 51298 - protein, 16 aa, Influenza A virus
CTELKLSDYEGRLIQN

SEQ ID NO: 51299 - protein, 17 aa, Influenza A virus
CTELKLSDYEGRLIQNS

SEQ ID NO: 51300 - protein, 13 aa, Influenza A virus
DKEEIRRIWRQAN

SEQ ID NO: 51301 - protein, 14 aa, Influenza A virus
DKEEIRRIWRQANN

SEQ ID NO: 51302 - protein, 15 aa, Influenza A virus
DKEEIRRIWRQANNG

SEQ ID NO: 51303 - protein, 14 aa, Influenza A virus
DPRMCSLMQGSTLP

SEQ ID NO: 51304 - protein, 15 aa, Influenza A virus
DPRMCSLMQGSTLPR

SEQ ID NO: 51305 - protein, 16 aa, Influenza A virus
DPRMCSLMQGSTLPRR

SEQ ID NO: 51306 - protein, 17 aa, Influenza A virus
DPRMCSLMQGSTLPRRS

SEQ ID NO: 51307 - protein, 18 aa, Influenza A virus
DPRMCSLMQGSTLPRRSG

SEQ ID NO: 51308 - protein, 19 aa, Influenza A virus
DPRMCSLMQGSTLPRRSGA

SEQ ID NO: 51309 - protein, 20 aa, Influenza A virus
DPRMCSLMQGSTLPRRSGAA

SEQ ID NO: 51310 - protein, 21 aa, Influenza A virus
DPRMCSLMQGSTLPRRSGAAG

SEQ ID NO: 51311 - protein, 22 aa, Influenza A virus
DPRMCSLMQGSTLPRRSGAAGA

SEQ ID NO: 51312 - protein, 23 aa, Influenza A virus
DPRMCSLMQGSTLPRRSGAAGAA

SEQ ID NO: 51313 - protein, 24 aa, Influenza A virus
DPRMCSLMQGSTLPRRSGAAGAAV

SEQ ID NO: 51314 - protein, 25 aa, Influenza A virus
DPRMCSLMQGSTLPRRSGAAGAAVK

SEQ ID NO: 51315 - protein, 13 aa, Influenza A virus
EEIRRIWRQANNG

SEQ ID NO: 51316 - protein, 13 aa, Influenza A virus
EGSYFFGDNAEEY

SEQ ID NO: 51317 - protein, 14 aa, Influenza A virus
EGSYFFGDNAEEYD

SEQ ID NO: 51318 - protein, 15 aa, Influenza A virus
EGSYFFGDNAEEYDN

SEQ ID NO: 51319 - protein, 13 aa, Influenza A virus
ELIRMIKRGINDR

SEQ ID NO: 51320 - protein, 14 aa, Influenza A virus
ELIRMIKRGINDRN

SEQ ID NO: 51321 - protein, 15 aa, Influenza A virus
ELIRMIKRGINDRNF

SEQ ID NO: 51322 - protein, 16 aa, Influenza A virus
ELIRMIKRGINDRNFW

SEQ ID NO: 51323 - protein, 17 aa, Influenza A virus
ELIRMIKRGINDRNFWR

SEQ ID NO: 51324 - protein, 18 aa, Influenza A virus
ELIRMIKRGINDRNFWRG

SEQ ID NO: 51325 - protein, 19 aa, Influenza A virus
ELIRMIKRGINDRNFWRGE

SEQ ID NO: 51326 - protein, 20 aa, Influenza A virus
ELIRMIKRGINDRNFWRGEN

SEQ ID NO: 51327 - protein, 21 aa, Influenza A virus
ELIRMIKRGINDRNFWRGENG

SEQ ID NO: 51328 - protein, 22 aa, Influenza A virus
ELIRMIKRGINDRNFWRGENGR

SEQ ID NO: 51329 - protein, 14 aa, Influenza A virus
ELKLSDYEGRLIQN

SEQ ID NO: 51330 - protein, 15 aa, Influenza A virus
ELKLSDYEGRLIQNS

SEQ ID NO: 51331 - protein, 14 aa, Influenza A virus
ELRSRYWAIRTRSG

SEQ ID NO: 51332 - protein, 15 aa, Influenza A virus
ELRSRYWAIRTRSGG

SEQ ID NO: 51333 - protein, 16 aa, Influenza A virus
ELRSRYWAIRTRSGGN

SEQ ID NO: 51334 - protein, 17 aa, Influenza A virus
ELRSRYWAIRTRSGGNT

SEQ ID NO: 51335 - protein, 18 aa, Influenza A virus
ELRSRYWAIRTRSGGNTN

SEQ ID NO: 51336 - protein, 19 aa, Influenza A virus
ELRSRYWAIRTRSGGNTNQ

SEQ ID NO: 51337 - protein, 20 aa, Influenza A virus
ELRSRYWAIRTRSGGNTNQQ

SEQ ID NO: 51338 - protein, 15 aa, Influenza A virus
ENPAHKSQLVWMACH

SEQ ID NO: 51339 - protein, 16 aa, Influenza A virus
ENPAHKSQLVWMACHS

SEQ ID NO: 51340 - protein, 17 aa, Influenza A virus
ENPAHKSQLVWMACHSA

SEQ ID NO: 51341 - protein, 18 aa, Influenza A virus
ENPAHKSQLVWMACHSAA

SEQ ID NO: 51342 - protein, 19 aa, Influenza A virus
ENPAHKSQLVWMACHSAAF

SEQ ID NO: 51343 - protein, 20 aa, Influenza A virus
ENPAHKSQLVWMACHSAAFE

SEQ ID NO: 51344 - protein, 21 aa, Influenza A virus
ENPAHKSQLVWMACHSAAFED

SEQ ID NO: 51345 - protein, 22 aa, Influenza A virus
ENPAHKSQLVWMACHSAAFEDL

SEQ ID NO: 51346 - protein, 23 aa, Influenza A virus
ENPAHKSQLVWMACHSAAFEDLR

SEQ ID NO: 51347 - protein, 14 aa, Influenza A virus
ERMCNILKGKFQTA

SEQ ID NO: 51348 - protein, 15 aa, Influenza A virus
ERMCNILKGKFQTAA

SEQ ID NO: 51349 - protein, 16 aa, Influenza A virus
ERMCNILKGKFQTAAQ

SEQ ID NO: 51350 - protein, 17 aa, Influenza A virus
ERMCNILKGKFQTAAQR

SEQ ID NO: 51351 - protein, 19 aa, Influenza A virus
ERMCNILKGKFQTAAQRAM

SEQ ID NO: 51352 - protein, 20 aa, Influenza A virus
ERMCNILKGKFQTAAQRAMM

SEQ ID NO: 51353 - protein, 21 aa, Influenza A virus
ERMCNILKGKFQTAAQRAMMD

SEQ ID NO: 51354 - protein, 22 aa, Influenza A virus
ERMCNILKGKFQTAAQRAMMDQ

SEQ ID NO: 51355 - protein, 23 aa, Influenza A virus
ERMCNILKGKFQTAAQRAMMDQV

SEQ ID NO: 51356 - protein, 24 aa, Influenza A virus
ERMCNILKGKFQTAAQRAMMDQVR

SEQ ID NO: 51357 - protein, 25 aa, Influenza A virus
ERMCNILKGKFQTAAQRAMMDQVRE

SEQ ID NO: 51358 - protein, 13 aa, Influenza A virus
ERMVLSAFDERRN

SEQ ID NO: 51359 - protein, 13 aa, Influenza A virus
ERQNATEIRASVG

SEQ ID NO: 51360 - protein, 15 aa, Influenza A virus
FQTAAQRAMMDQVRE

SEQ ID NO: 51361 - protein, 16 aa, Influenza A virus
FQTAAQRAMMDQVRES

SEQ ID NO: 51362 - protein, 17 aa, Influenza A virus
FQTAAQRAMMDQVRESR

SEQ ID NO: 51363 - protein, 20 aa, Influenza A virus
FQTAAQRAMMDQVRESRNPG

SEQ ID NO: 51364 - protein, 13 aa, Influenza A virus
FYIQMCTELKLSD

SEQ ID NO: 51365 - protein, 14 aa, Influenza A virus
FYIQMCTELKLSDY

SEQ ID NO: 51366 - protein, 15 aa, Influenza A virus
FYIQMCTELKLSDYE

SEQ ID NO: 51367 - protein, 16 aa, Influenza A virus
FYIQMCTELKLSDYEG

SEQ ID NO: 51368 - protein, 17 aa, Influenza A virus
FYIQMCTELKLSDYEGR

SEQ ID NO: 51369 - protein, 18 aa, Influenza A virus
FYIQMCTELKLSDYEGRL

SEQ ID NO: 51370 - protein, 19 aa, Influenza A virus
FYIQMCTELKLSDYEGRLI

SEQ ID NO: 51371 - protein, 20 aa, Influenza A virus
FYIQMCTELKLSDYEGRLIQ

SEQ ID NO: 51372 - protein, 21 aa, Influenza A virus
FYIQMCTELKLSDYEGRLIQN

SEQ ID NO: 51373 - protein, 22 aa, Influenza A virus
FYIQMCTELKLSDYEGRLIQNS

SEQ ID NO: 51374 - protein, 13 aa, Influenza A virus
GERQNATEIRASV

SEQ ID NO: 51375 - protein, 14 aa, Influenza A virus
GERQNATEIRASVG

SEQ ID NO: 51376 - protein, 15 aa, Influenza A virus
GGNTNQQRASAGQIS

SEQ ID NO: 51377 - protein, 13 aa, Influenza A virus
GIGRFYIQMCTEL

SEQ ID NO: 51378 - protein, 14 aa, Influenza A virus
GIGRFYIQMCTELK

SEQ ID NO: 51379 - protein, 15 aa, Influenza A virus
GIGRFYIQMCTELKL

SEQ ID NO: 51380 - protein, 16 aa, Influenza A virus
GIGRFYIQMCTELKLS

SEQ ID NO: 51381 - protein, 17 aa, Influenza A virus
GIGRFYIQMCTELKLSD

SEQ ID NO: 51382 - protein, 18 aa, Influenza A virus
GIGRFYIQMCTELKLSDY

SEQ ID NO: 51383 - protein, 19 aa, Influenza A virus
GIGRFYIQMCTELKLSDYE

SEQ ID NO: 51384 - protein, 20 aa, Influenza A virus
GIGRFYIQMCTELKLSDYEG

SEQ ID NO: 51385 - protein, 21 aa, Influenza A virus
GIGRFYIQMCTELKLSDYEGR

SEQ ID NO: 51386 - protein, 22 aa, Influenza A virus
GIGRFYIQMCTELKLSDYEGRL

SEQ ID NO: 51387 - protein, 23 aa, Influenza A virus
GIGRFYIQMCTELKLSDYEGRLI

SEQ ID NO: 51388 - protein, 24 aa, Influenza A virus
GIGRFYIQMCTELKLSDYEGRLIQ

SEQ ID NO: 51389 - protein, 25 aa, Influenza A virus
GIGRFYIQMCTELKLSDYEGRLIQN

SEQ ID NO: 51390 - protein, 14 aa, Influenza A virus
GKFQTAAQRAMMDQ

SEQ ID NO: 51391 - protein, 15 aa, Influenza A virus
GKFQTAAQRAMMDQV

SEQ ID NO: 51392 - protein, 16 aa, Influenza A virus
GKFQTAAQRAMMDQVR

SEQ ID NO: 51393 - protein, 17 aa, Influenza A virus
GKFQTAAQRAMMDQVRE

SEQ ID NO: 51394 - protein, 18 aa, Influenza A virus
GKFQTAAQRAMMDQVRES

SEQ ID NO: 51395 - protein, 19 aa, Influenza A virus
GKFQTAAQRAMMDQVRESR

SEQ ID NO: 51396 - protein, 20 aa, Influenza A virus
GKFQTAAQRAMMDQVRESRN

SEQ ID NO: 51397 - protein, 21 aa, Influenza A virus
GKFQTAAQRAMMDQVRESRNP

SEQ ID NO: 51398 - protein, 22 aa, Influenza A virus
GKFQTAAQRAMMDQVRESRNPG

SEQ ID NO: 51399 - protein, 23 aa, Influenza A virus
GKFQTAAQRAMMDQVRESRNPGN

SEQ ID NO: 51400 - protein, 24 aa, Influenza A virus
GKFQTAAQRAMMDQVRESRNPGNA

SEQ ID NO: 51401 - protein, 25 aa, Influenza A virus
GKFQTAAQRAMMDQVRESRNPGNAE

SEQ ID NO: 51402 - protein, 15 aa, Influenza A virus
GMDPRMCSLMQGSTL

SEQ ID NO: 51403 - protein, 16 aa, Influenza A virus
GMDPRMCSLMQGSTLP

SEQ ID NO: 51404 - protein, 17 aa, Influenza A virus
GMDPRMCSLMQGSTLPR

SEQ ID NO: 51405 - protein, 18 aa, Influenza A virus
GMDPRMCSLMQGSTLPRR

SEQ ID NO: 51406 - protein, 19 aa, Influenza A virus
GMDPRMCSLMQGSTLPRRS

SEQ ID NO: 51407 - protein, 20 aa, Influenza A virus
GMDPRMCSLMQGSTLPRRSG

SEQ ID NO: 51408 - protein, 21 aa, Influenza A virus
GMDPRMCSLMQGSTLPRRSGA

SEQ ID NO: 51409 - protein, 22 aa, Influenza A virus
GMDPRMCSLMQGSTLPRRSGAA

SEQ ID NO: 51410 - protein, 23 aa, Influenza A virus
GMDPRMCSLMQGSTLPRRSGAAG

SEQ ID NO: 51411 - protein, 24 aa, Influenza A virus
GMDPRMCSLMQGSTLPRRSGAAGA

SEQ ID NO: 51412 - protein, 25 aa, Influenza A virus
GMDPRMCSLMQGSTLPRRSGAAGAA

SEQ ID NO: 51413 - protein, 14 aa, Influenza A virus
GNTNQQRASAGQIS

SEQ ID NO: 51414 - protein, 13 aa, Influenza A virus
GRFYIQMCTELKL

SEQ ID NO: 51415 - protein, 14 aa, Influenza A virus
GRFYIQMCTELKLS

SEQ ID NO: 51416 - protein, 15 aa, Influenza A virus
GRFYIQMCTELKLSD

SEQ ID NO: 51417 - protein, 16 aa, Influenza A virus
GRFYIQMCTELKLSDY

SEQ ID NO: 51418 - protein, 17 aa, Influenza A virus
GRFYIQMCTELKLSDYE

SEQ ID NO: 51419 - protein, 18 aa, Influenza A virus
GRFYIQMCTELKLSDYEG

SEQ ID NO: 51420 - protein, 19 aa, Influenza A virus
GRFYIQMCTELKLSDYEGR

SEQ ID NO: 51421 - protein, 20 aa, Influenza A virus
GRFYIQMCTELKLSDYEGRL

SEQ ID NO: 51422 - protein, 21 aa, Influenza A virus
GRFYIQMCTELKLSDYEGRLI

SEQ ID NO: 51423 - protein, 22 aa, Influenza A virus
GRFYIQMCTELKLSDYEGRLIQ

SEQ ID NO: 51424 - protein, 23 aa, Influenza A virus
GRFYIQMCTELKLSDYEGRLIQN

SEQ ID NO: 51425 - protein, 24 aa, Influenza A virus
GRFYIQMCTELKLSDYEGRLIQNS

SEQ ID NO: 51426 - protein, 13 aa, Influenza A virus
GSTLPRRSGAAGA

SEQ ID NO: 51427 - protein, 14 aa, Influenza A virus
GSTLPRRSGAAGAA

SEQ ID NO: 51428 - protein, 15 aa, Influenza A virus
GSTLPRRSGAAGAAV

SEQ ID NO: 51429 - protein, 16 aa, Influenza A virus
GSTLPRRSGAAGAAVK

SEQ ID NO: 51430 - protein, 17 aa, Influenza A virus
GSTLPRRSGAAGAAVKG

SEQ ID NO: 51431 - protein, 18 aa, Influenza A virus
GSTLPRRSGAAGAAVKGV

SEQ ID NO: 51432 - protein, 19 aa, Influenza A virus
GSTLPRRSGAAGAAVKGVG

SEQ ID NO: 51433 - protein, 20 aa, Influenza A virus
GSTLPRRSGAAGAAVKGVGT

SEQ ID NO: 51434 - protein, 15 aa, Influenza A virus
GSVAHKSCLPACVYG

SEQ ID NO: 51435 - protein, 13 aa, Influenza A virus
GSYFFGDNAEEYD

SEQ ID NO: 51436 - protein, 14 aa, Influenza A virus
GSYFFGDNAEEYDN

SEQ ID NO: 51437 - protein, 13 aa, Influenza A virus
HKSQLVWMACHSA

SEQ ID NO: 51438 - protein, 14 aa, Influenza A virus
HKSQLVWMACHSAA

SEQ ID NO: 51439 - protein, 15 aa, Influenza A virus
HKSQLVWMACHSAAF

SEQ ID NO: 51440 - protein, 16 aa, Influenza A virus
HKSQLVWMACHSAAFE

SEQ ID NO: 51441 - protein, 17 aa, Influenza A virus
HKSQLVWMACHSAAFED

SEQ ID NO: 51442 - protein, 18 aa, Influenza A virus
HKSQLVWMACHSAAFEDL

SEQ ID NO: 51443 - protein, 19 aa, Influenza A virus
HKSQLVWMACHSAAFEDLR

SEQ ID NO: 51444 - protein, 13 aa, Influenza A virus
IERMVLSAFDERR

SEQ ID NO: 51445 - protein, 14 aa, Influenza A virus
IERMVLSAFDERRN

SEQ ID NO: 51446 - protein, 13 aa, Influenza A virus
IGRFYIQMCTELK

SEQ ID NO: 51447 - protein, 14 aa, Influenza A virus
IGRFYIQMCTELKL

SEQ ID NO: 51448 - protein, 15 aa, Influenza A virus
IGRFYIQMCTELKLS

SEQ ID NO: 51449 - protein, 16 aa, Influenza A virus
IGRFYIQMCTELKLSD

SEQ ID NO: 51450 - protein, 17 aa, Influenza A virus
IGRFYIQMCTELKLSDY

SEQ ID NO: 51451 - protein, 18 aa, Influenza A virus
IGRFYIQMCTELKLSDYE

SEQ ID NO: 51452 - protein, 19 aa, Influenza A virus
IGRFYIQMCTELKLSDYEG

SEQ ID NO: 51453 - protein, 20 aa, Influenza A virus
IGRFYIQMCTELKLSDYEGR

SEQ ID NO: 51454 - protein, 21 aa, Influenza A virus
IGRFYIQMCTELKLSDYEGRL

SEQ ID NO: 51455 - protein, 22 aa, Influenza A virus
IGRFYIQMCTELKLSDYEGRLI

SEQ ID NO: 51456 - protein, 23 aa, Influenza A virus
IGRFYIQMCTELKLSDYEGRLIQ

SEQ ID NO: 51457 - protein, 24 aa, Influenza A virus
IGRFYIQMCTELKLSDYEGRLIQN

SEQ ID NO: 51458 - protein, 25 aa, Influenza A virus
IGRFYIQMCTELKLSDYEGRLIQNS

SEQ ID NO: 51459 - protein, 15 aa, Influenza A virus
IKRGINDRNFWRGEN

SEQ ID NO: 51460 - protein, 14 aa, Influenza A virus
ILKGKFQTAAQRAM

SEQ ID NO: 51461 - protein, 15 aa, Influenza A virus
ILKGKFQTAAQRAMM

SEQ ID NO: 51462 - protein, 16 aa, Influenza A virus
ILKGKFQTAAQRAMMD

SEQ ID NO: 51463 - protein, 17 aa, Influenza A virus
ILKGKFQTAAQRAMMDQ

SEQ ID NO: 51464 - protein, 18 aa, Influenza A virus
ILKGKFQTAAQRAMMDQV

SEQ ID NO: 51465 - protein, 19 aa, Influenza A virus
ILKGKFQTAAQRAMMDQVR

SEQ ID NO: 51466 - protein, 20 aa, Influenza A virus
ILKGKFQTAAQRAMMDQVRE

SEQ ID NO: 51467 - protein, 21 aa, Influenza A virus
ILKGKFQTAAQRAMMDQVRES

SEQ ID NO: 51468 - protein, 22 aa, Influenza A virus
ILKGKFQTAAQRAMMDQVRESR

SEQ ID NO: 51469 - protein, 23 aa, Influenza A virus
ILKGKFQTAAQRAMMDQVRESRN

SEQ ID NO: 51470 - protein, 24 aa, Influenza A virus
ILKGKFQTAAQRAMMDQVRESRNP

SEQ ID NO: 51471 - protein, 25 aa, Influenza A virus
ILKGKFQTAAQRAMMDQVRESRNPG

SEQ ID NO: 51472 - protein, 13 aa, Influenza A virus
ILRGSVAHKSCLP

SEQ ID NO: 51473 - protein, 14 aa, Influenza A virus
ILRGSVAHKSCLPA

SEQ ID NO: 51474 - protein, 15 aa, Influenza A virus
ILRGSVAHKSCLPAC

SEQ ID NO: 51475 - protein, 16 aa, Influenza A virus
ILRGSVAHKSCLPACV

SEQ ID NO: 51476 - protein, 17 aa, Influenza A virus
ILRGSVAHKSCLPACVY

SEQ ID NO: 51477 - protein, 18 aa, Influenza A virus
ILRGSVAHKSCLPACVYG

SEQ ID NO: 51478 - protein, 15 aa, Influenza A virus
IQMCTELKLSDYEGR

SEQ ID NO: 51479 - protein, 17 aa, Influenza A virus
IQMCTELKLSDYEGRLI

SEQ ID NO: 51480 - protein, 18 aa, Influenza A virus
IQMCTELKLSDYEGRLIQ

SEQ ID NO: 51481 - protein, 19 aa, Influenza A virus
IQMCTELKLSDYEGRLIQN

SEQ ID NO: 51482 - protein, 20 aa, Influenza A virus
IQMCTELKLSDYEGRLIQNS

SEQ ID NO: 51483 - protein, 13 aa, Influenza A virus
IRMIKRGINDRNF

SEQ ID NO: 51484 - protein, 14 aa, Influenza A virus
IRMIKRGINDRNFW

SEQ ID NO: 51485 - protein, 15 aa, Influenza A virus
IRMIKRGINDRNFWR

SEQ ID NO: 51486 - protein, 16 aa, Influenza A virus
IRMIKRGINDRNFWRG

SEQ ID NO: 51487 - protein, 17 aa, Influenza A virus
IRMIKRGINDRNFWRGE

SEQ ID NO: 51488 - protein, 18 aa, Influenza A virus
IRMIKRGINDRNFWRGEN

SEQ ID NO: 51489 - protein, 19 aa, Influenza A virus
IRMIKRGINDRNFWRGENG

SEQ ID NO: 51490 - protein, 20 aa, Influenza A virus
IRMIKRGINDRNFWRGENGR

SEQ ID NO: 51491 - protein, 15 aa, Influenza A virus
IVPSFDMSNEGSYFF

SEQ ID NO: 51492 - protein, 16 aa, Influenza A virus
IVPSFDMSNEGSYFFG

SEQ ID NO: 51493 - protein, 13 aa, Influenza A virus
KEEIRRIWRQANN

SEQ ID NO: 51494 - protein, 14 aa, Influenza A virus
KEEIRRIWRQANNG

SEQ ID NO: 51495 - protein, 14 aa, Influenza A virus
KFQTAAQRAMMDQV

SEQ ID NO: 51496 - protein, 15 aa, Influenza A virus
KFQTAAQRAMMDQVR

SEQ ID NO: 51497 - protein, 16 aa, Influenza A virus
KFQTAAQRAMMDQVRE

SEQ ID NO: 51498 - protein, 17 aa, Influenza A virus
KFQTAAQRAMMDQVRES

SEQ ID NO: 51499 - protein, 19 aa, Influenza A virus
KFQTAAQRAMMDQVRESRN

SEQ ID NO: 51500 - protein, 20 aa, Influenza A virus
KFQTAAQRAMMDQVRESRNP

SEQ ID NO: 51501 - protein, 21 aa, Influenza A virus
KFQTAAQRAMMDQVRESRNPG

SEQ ID NO: 51502 - protein, 22 aa, Influenza A virus
KFQTAAQRAMMDQVRESRNPGN

SEQ ID NO: 51503 - protein, 23 aa, Influenza A virus
KFQTAAQRAMMDQVRESRNPGNA

SEQ ID NO: 51504 - protein, 24 aa, Influenza A virus
KFQTAAQRAMMDQVRESRNPGNAE

SEQ ID NO: 51505 - protein, 25 aa, Influenza A virus
KFQTAAQRAMMDQVRESRNPGNAEI

SEQ ID NO: 51506 - protein, 13 aa, Influenza A virus
KGKFQTAAQRAMM

SEQ ID NO: 51507 - protein, 14 aa, Influenza A virus
KGKFQTAAQRAMMD

SEQ ID NO: 51508 - protein, 15 aa, Influenza A virus
KGKFQTAAQRAMMDQ

SEQ ID NO: 51509 - protein, 16 aa, Influenza A virus
KGKFQTAAQRAMMDQV

SEQ ID NO: 51510 - protein, 17 aa, Influenza A virus
KGKFQTAAQRAMMDQVR

SEQ ID NO: 51511 - protein, 18 aa, Influenza A virus
KGKFQTAAQRAMMDQVRE

SEQ ID NO: 51512 - protein, 19 aa, Influenza A virus
KGKFQTAAQRAMMDQVRES

SEQ ID NO: 51513 - protein, 20 aa, Influenza A virus
KGKFQTAAQRAMMDQVRESR

SEQ ID NO: 51514 - protein, 21 aa, Influenza A virus
KGKFQTAAQRAMMDQVRESRN

SEQ ID NO: 51515 - protein, 22 aa, Influenza A virus
KGKFQTAAQRAMMDQVRESRNP

SEQ ID NO: 51516 - protein, 23 aa, Influenza A virus
KGKFQTAAQRAMMDQVRESRNPG

SEQ ID NO: 51517 - protein, 24 aa, Influenza A virus
KGKFQTAAQRAMMDQVRESRNPGN

SEQ ID NO: 51518 - protein, 25 aa, Influenza A virus
KGKFQTAAQRAMMDQVRESRNPGNA

SEQ ID NO: 51519 - protein, 13 aa, Influenza A virus
KSQLVWMACHSAA

SEQ ID NO: 51520 - protein, 14 aa, Influenza A virus
KSQLVWMACHSAAF

SEQ ID NO: 51521 - protein, 15 aa, Influenza A virus
KSQLVWMACHSAAFE

SEQ ID NO: 51522 - protein, 16 aa, Influenza A virus
KSQLVWMACHSAAFED

SEQ ID NO: 51523 - protein, 17 aa, Influenza A virus
KSQLVWMACHSAAFEDL

SEQ ID NO: 51524 - protein, 18 aa, Influenza A virus
KSQLVWMACHSAAFEDLR

SEQ ID NO: 51525 - protein, 14 aa, Influenza A virus
LELRSRYWAIRTRS

SEQ ID NO: 51526 - protein, 15 aa, Influenza A virus
LELRSRYWAIRTRSG

SEQ ID NO: 51527 - protein, 16 aa, Influenza A virus
LELRSRYWAIRTRSGG

SEQ ID NO: 51528 - protein, 17 aa, Influenza A virus
LELRSRYWAIRTRSGGN

SEQ ID NO: 51529 - protein, 18 aa, Influenza A virus
LELRSRYWAIRTRSGGNT

SEQ ID NO: 51530 - protein, 19 aa, Influenza A virus
LELRSRYWAIRTRSGGNTN

SEQ ID NO: 51531 - protein, 20 aa, Influenza A virus
LELRSRYWAIRTRSGGNTNQ

SEQ ID NO: 51532 - protein, 21 aa, Influenza A virus
LELRSRYWAIRTRSGGNTNQQ

SEQ ID NO: 51533 - protein, 13 aa, Influenza A virus
LILRGSVAHKSCL

SEQ ID NO: 51534 - protein, 14 aa, Influenza A virus
LILRGSVAHKSCLP

SEQ ID NO: 51535 - protein, 15 aa, Influenza A virus
LILRGSVAHKSCLPA

SEQ ID NO: 51536 - protein, 16 aa, Influenza A virus
LILRGSVAHKSCLPAC

SEQ ID NO: 51537 - protein, 17 aa, Influenza A virus
LILRGSVAHKSCLPACV

SEQ ID NO: 51538 - protein, 18 aa, Influenza A virus
LILRGSVAHKSCLPACVY

SEQ ID NO: 51539 - protein, 19 aa, Influenza A virus
LILRGSVAHKSCLPACVYG

SEQ ID NO: 51540 - protein, 13 aa, Influenza A virus
LIRMIKRGINDRN

SEQ ID NO: 51541 - protein, 14 aa, Influenza A virus
LIRMIKRGINDRNF

SEQ ID NO: 51542 - protein, 15 aa, Influenza A virus
LIRMIKRGINDRNFW

SEQ ID NO: 51543 - protein, 16 aa, Influenza A virus
LIRMIKRGINDRNFWR

SEQ ID NO: 51544 - protein, 17 aa, Influenza A virus
LIRMIKRGINDRNFWRG

SEQ ID NO: 51545 - protein, 18 aa, Influenza A virus
LIRMIKRGINDRNFWRGE

SEQ ID NO: 51546 - protein, 19 aa, Influenza A virus
LIRMIKRGINDRNFWRGEN

SEQ ID NO: 51547 - protein, 20 aa, Influenza A virus
LIRMIKRGINDRNFWRGENG

SEQ ID NO: 51548 - protein, 21 aa, Influenza A virus
LIRMIKRGINDRNFWRGENGR

SEQ ID NO: 51549 - protein, 15 aa, Influenza A virus
LIRPNENPAHKSQLV

SEQ ID NO: 51550 - protein, 14 aa, Influenza A virus
LKGKFQTAAQRAMM

SEQ ID NO: 51551 - protein, 15 aa, Influenza A virus
LKGKFQTAAQRAMMD

SEQ ID NO: 51552 - protein, 16 aa, Influenza A virus
LKGKFQTAAQRAMMDQ

SEQ ID NO: 51553 - protein, 17 aa, Influenza A virus
LKGKFQTAAQRAMMDQV

SEQ ID NO: 51554 - protein, 18 aa, Influenza A virus
LKGKFQTAAQRAMMDQVR

SEQ ID NO: 51555 - protein, 19 aa, Influenza A virus
LKGKFQTAAQRAMMDQVRE

SEQ ID NO: 51556 - protein, 20 aa, Influenza A virus
LKGKFQTAAQRAMMDQVRES

SEQ ID NO: 51557 - protein, 21 aa, Influenza A virus
LKGKFQTAAQRAMMDQVRESR

SEQ ID NO: 51558 - protein, 22 aa, Influenza A virus
LKGKFQTAAQRAMMDQVRESRN

SEQ ID NO: 51559 - protein, 23 aa, Influenza A virus
LKGKFQTAAQRAMMDQVRESRNP

SEQ ID NO: 51560 - protein, 24 aa, Influenza A virus
LKGKFQTAAQRAMMDQVRESRNPG

SEQ ID NO: 51561 - protein, 25 aa, Influenza A virus
LKGKFQTAAQRAMMDQVRESRNPGN

SEQ ID NO: 51562 - protein, 14 aa, Influenza A virus
LKLSDYEGRLIQNS

SEQ ID NO: 51563 - protein, 14 aa, Influenza A virus
LMQGSTLPRRSGAA

SEQ ID NO: 51564 - protein, 15 aa, Influenza A virus
LMQGSTLPRRSGAAG

SEQ ID NO: 51565 - protein, 16 aa, Influenza A virus
LMQGSTLPRRSGAAGA

SEQ ID NO: 51566 - protein, 17 aa, Influenza A virus
LMQGSTLPRRSGAAGAA

SEQ ID NO: 51567 - protein, 18 aa, Influenza A virus
LMQGSTLPRRSGAAGAAV

SEQ ID NO: 51568 - protein, 19 aa, Influenza A virus
LMQGSTLPRRSGAAGAAVK

SEQ ID NO: 51569 - protein, 20 aa, Influenza A virus
LMQGSTLPRRSGAAGAAVKG

SEQ ID NO: 51570 - protein, 21 aa, Influenza A virus
LMQGSTLPRRSGAAGAAVKGV

SEQ ID NO: 51571 - protein, 22 aa, Influenza A virus
LMQGSTLPRRSGAAGAAVKGVG

SEQ ID NO: 51572 - protein, 23 aa, Influenza A virus
LMQGSTLPRRSGAAGAAVKGVGT

SEQ ID NO: 51573 - protein, 13 aa, Influenza A virus
LPRRSGAAGAAVK

SEQ ID NO: 51574 - protein, 14 aa, Influenza A virus
LPRRSGAAGAAVKG

SEQ ID NO: 51575 - protein, 15 aa, Influenza A virus
LPRRSGAAGAAVKGV

SEQ ID NO: 51576 - protein, 16 aa, Influenza A virus
LPRRSGAAGAAVKGVG

SEQ ID NO: 51577 - protein, 17 aa, Influenza A virus
LPRRSGAAGAAVKGVGT

SEQ ID NO: 51578 - protein, 13 aa, Influenza A virus
LRGSVAHKSCLPA

SEQ ID NO: 51579 - protein, 14 aa, Influenza A virus
LRGSVAHKSCLPAC

SEQ ID NO: 51580 - protein, 15 aa, Influenza A virus
LRGSVAHKSCLPACV

SEQ ID NO: 51581 - protein, 16 aa, Influenza A virus
LRGSVAHKSCLPACVY

SEQ ID NO: 51582 - protein, 17 aa, Influenza A virus
LRGSVAHKSCLPACVYG

SEQ ID NO: 51583 - protein, 13 aa, Influenza A virus
LRSRYWAIRTRSG

SEQ ID NO: 51584 - protein, 14 aa, Influenza A virus
LRSRYWAIRTRSGG

SEQ ID NO: 51585 - protein, 15 aa, Influenza A virus
LRSRYWAIRTRSGGN

SEQ ID NO: 51586 - protein, 16 aa, Influenza A virus
LRSRYWAIRTRSGGNT

SEQ ID NO: 51587 - protein, 17 aa, Influenza A virus
LRSRYWAIRTRSGGNTN

SEQ ID NO: 51588 - protein, 18 aa, Influenza A virus
LRSRYWAIRTRSGGNTNQ

SEQ ID NO: 51589 - protein, 19 aa, Influenza A virus
LRSRYWAIRTRSGGNTNQQ

SEQ ID NO: 51590 - protein, 14 aa, Influenza A virus
LSTRGVQIASNENM

SEQ ID NO: 51591 - protein, 19 aa, Influenza A virus
LVRTGMDPRMCSLMQGSTL

SEQ ID NO: 51592 - protein, 20 aa, Influenza A virus
LVRTGMDPRMCSLMQGSTLP

SEQ ID NO: 51593 - protein, 21 aa, Influenza A virus
LVRTGMDPRMCSLMQGSTLPR

SEQ ID NO: 51594 - protein, 22 aa, Influenza A virus
LVRTGMDPRMCSLMQGSTLPRR

SEQ ID NO: 51595 - protein, 23 aa, Influenza A virus
LVRTGMDPRMCSLMQGSTLPRRS

SEQ ID NO: 51596 - protein, 24 aa, Influenza A virus
LVRTGMDPRMCSLMQGSTLPRRSG

SEQ ID NO: 51597 - protein, 25 aa, Influenza A virus
LVRTGMDPRMCSLMQGSTLPRRSGA

SEQ ID NO: 51598 - protein, 13 aa, Influenza A virus
LVWMACHSAAFED

SEQ ID NO: 51599 - protein, 14 aa, Influenza A virus
LVWMACHSAAFEDL

SEQ ID NO: 51600 - protein, 15 aa, Influenza A virus
LVWMACHSAAFEDLR

SEQ ID NO: 51601 - protein, 15 aa, Influenza A virus
LYDKEEIRRIWRQAN

SEQ ID NO: 51602 - protein, 16 aa, Influenza A virus
LYDKEEIRRIWRQANN

SEQ ID NO: 51603 - protein, 17 aa, Influenza A virus
LYDKEEIRRIWRQANNG

SEQ ID NO: 51604 - protein, 14 aa, Influenza A virus
MCNILKGKFQTAAQ

SEQ ID NO: 51605 - protein, 15 aa, Influenza A virus
MCNILKGKFQTAAQR

SEQ ID NO: 51606 - protein, 16 aa, Influenza A virus
MCNILKGKFQTAAQRA

SEQ ID NO: 51607 - protein, 17 aa, Influenza A virus
MCNILKGKFQTAAQRAM

SEQ ID NO: 51608 - protein, 18 aa, Influenza A virus
MCNILKGKFQTAAQRAMM

SEQ ID NO: 51609 - protein, 19 aa, Influenza A virus
MCNILKGKFQTAAQRAMMD

SEQ ID NO: 51610 - protein, 20 aa, Influenza A virus
MCNILKGKFQTAAQRAMMDQ

SEQ ID NO: 51611 - protein, 21 aa, Influenza A virus
MCNILKGKFQTAAQRAMMDQV

SEQ ID NO: 51612 - protein, 22 aa, Influenza A virus
MCNILKGKFQTAAQRAMMDQVR

SEQ ID NO: 51613 - protein, 23 aa, Influenza A virus
MCNILKGKFQTAAQRAMMDQVRE

SEQ ID NO: 51614 - protein, 24 aa, Influenza A virus
MCNILKGKFQTAAQRAMMDQVRES

SEQ ID NO: 51615 - protein, 25 aa, Influenza A virus
MCNILKGKFQTAAQRAMMDQVRESR

SEQ ID NO: 51616 - protein, 13 aa, Influenza A virus
MCSLMQGSTLPRR

SEQ ID NO: 51617 - protein, 14 aa, Influenza A virus
MCSLMQGSTLPRRS

SEQ ID NO: 51618 - protein, 15 aa, Influenza A virus
MCSLMQGSTLPRRSG

SEQ ID NO: 51619 - protein, 16 aa, Influenza A virus
MCSLMQGSTLPRRSGA

SEQ ID NO: 51620 - protein, 17 aa, Influenza A virus
MCSLMQGSTLPRRSGAA

SEQ ID NO: 51621 - protein, 18 aa, Influenza A virus
MCSLMQGSTLPRRSGAAG

SEQ ID NO: 51622 - protein, 19 aa, Influenza A virus
MCSLMQGSTLPRRSGAAGA

SEQ ID NO: 51623 - protein, 20 aa, Influenza A virus
MCSLMQGSTLPRRSGAAGAA

SEQ ID NO: 51624 - protein, 21 aa, Influenza A virus
MCSLMQGSTLPRRSGAAGAAV

SEQ ID NO: 51625 - protein, 22 aa, Influenza A virus
MCSLMQGSTLPRRSGAAGAAVK

SEQ ID NO: 51626 - protein, 23 aa, Influenza A virus
MCSLMQGSTLPRRSGAAGAAVKG

SEQ ID NO: 51627 - protein, 24 aa, Influenza A virus
MCSLMQGSTLPRRSGAAGAAVKGV

SEQ ID NO: 51628 - protein, 25 aa, Influenza A virus
MCSLMQGSTLPRRSGAAGAAVKGVG

SEQ ID NO: 51629 - protein, 15 aa, Influenza A virus
MCTELKLSDYEGRLI

SEQ ID NO: 51630 - protein, 16 aa, Influenza A virus
MCTELKLSDYEGRLIQ

SEQ ID NO: 51631 - protein, 17 aa, Influenza A virus
MCTELKLSDYEGRLIQN

SEQ ID NO: 51632 - protein, 14 aa, Influenza A virus
MDPRMCSLMQGSTL

SEQ ID NO: 51633 - protein, 15 aa, Influenza A virus
MDPRMCSLMQGSTLP

SEQ ID NO: 51634 - protein, 16 aa, Influenza A virus
MDPRMCSLMQGSTLPR

SEQ ID NO: 51635 - protein, 17 aa, Influenza A virus
MDPRMCSLMQGSTLPRR

SEQ ID NO: 51636 - protein, 18 aa, Influenza A virus
MDPRMCSLMQGSTLPRRS

SEQ ID NO: 51637 - protein, 19 aa, Influenza A virus
MDPRMCSLMQGSTLPRRSG

SEQ ID NO: 51638 - protein, 20 aa, Influenza A virus
MDPRMCSLMQGSTLPRRSGA

SEQ ID NO: 51639 - protein, 21 aa, Influenza A virus
MDPRMCSLMQGSTLPRRSGAA

SEQ ID NO: 51640 - protein, 22 aa, Influenza A virus
MDPRMCSLMQGSTLPRRSGAAG

SEQ ID NO: 51641 - protein, 23 aa, Influenza A virus
MDPRMCSLMQGSTLPRRSGAAGA

SEQ ID NO: 51642 - protein, 24 aa, Influenza A virus
MDPRMCSLMQGSTLPRRSGAAGAA

SEQ ID NO: 51643 - protein, 25 aa, Influenza A virus
MDPRMCSLMQGSTLPRRSGAAGAAV

SEQ ID NO: 51644 - protein, 13 aa, Influenza A virus
MELIRMIKRGIND

SEQ ID NO: 51645 - protein, 14 aa, Influenza A virus
MELIRMIKRGINDR

SEQ ID NO: 51646 - protein, 15 aa, Influenza A virus
MELIRMIKRGINDRN

SEQ ID NO: 51647 - protein, 16 aa, Influenza A virus
MELIRMIKRGINDRNF

SEQ ID NO: 51648 - protein, 17 aa, Influenza A virus
MELIRMIKRGINDRNFW

SEQ ID NO: 51649 - protein, 18 aa, Influenza A virus
MELIRMIKRGINDRNFWR

SEQ ID NO: 51650 - protein, 19 aa, Influenza A virus
MELIRMIKRGINDRNFWRG

SEQ ID NO: 51651 - protein, 20 aa, Influenza A virus
MELIRMIKRGINDRNFWRGE

SEQ ID NO: 51652 - protein, 21 aa, Influenza A virus
MELIRMIKRGINDRNFWRGEN

SEQ ID NO: 51653 - protein, 22 aa, Influenza A virus
MELIRMIKRGINDRNFWRGENG

SEQ ID NO: 51654 - protein, 23 aa, Influenza A virus
MELIRMIKRGINDRNFWRGENGR

SEQ ID NO: 51655 - protein, 15 aa, Influenza A virus
MIKRGINDRNFWRGE

SEQ ID NO: 51656 - protein, 15 aa, Influenza A virus
MQGSTLPRRSGAAGA

SEQ ID NO: 51657 - protein, 16 aa, Influenza A virus
MQGSTLPRRSGAAGAA

SEQ ID NO: 51658 - protein, 17 aa, Influenza A virus
MQGSTLPRRSGAAGAAV

SEQ ID NO: 51659 - protein, 18 aa, Influenza A virus
MQGSTLPRRSGAAGAAVK

SEQ ID NO: 51660 - protein, 19 aa, Influenza A virus
MQGSTLPRRSGAAGAAVKG

SEQ ID NO: 51661 - protein, 20 aa, Influenza A virus
MQGSTLPRRSGAAGAAVKGV

SEQ ID NO: 51662 - protein, 21 aa, Influenza A virus
MQGSTLPRRSGAAGAAVKGVG

SEQ ID NO: 51663 - protein, 22 aa, Influenza A virus
MQGSTLPRRSGAAGAAVKGVGT

SEQ ID NO: 51664 - protein, 14 aa, Influenza A virus
NEGSYFFGDNAEEY

SEQ ID NO: 51665 - protein, 15 aa, Influenza A virus
NEGSYFFGDNAEEYD

SEQ ID NO: 51666 - protein, 16 aa, Influenza A virus
NEGSYFFGDNAEEYDN

SEQ ID NO: 51667 - protein, 15 aa, Influenza A virus
NENPAHKSQLVWMAC

SEQ ID NO: 51668 - protein, 14 aa, Influenza A virus
NILKGKFQTAAQRA

SEQ ID NO: 51669 - protein, 15 aa, Influenza A virus
NILKGKFQTAAQRAM

SEQ ID NO: 51670 - protein, 16 aa, Influenza A virus
NILKGKFQTAAQRAMM

SEQ ID NO: 51671 - protein, 17 aa, Influenza A virus
NILKGKFQTAAQRAMMD

SEQ ID NO: 51672 - protein, 18 aa, Influenza A virus
NILKGKFQTAAQRAMMDQ

SEQ ID NO: 51673 - protein, 19 aa, Influenza A virus
NILKGKFQTAAQRAMMDQV

SEQ ID NO: 51674 - protein, 20 aa, Influenza A virus
NILKGKFQTAAQRAMMDQVR

SEQ ID NO: 51675 - protein, 21 aa, Influenza A virus
NILKGKFQTAAQRAMMDQVRE

SEQ ID NO: 51676 - protein, 22 aa, Influenza A virus
NILKGKFQTAAQRAMMDQVRES

SEQ ID NO: 51677 - protein, 23 aa, Influenza A virus
NILKGKFQTAAQRAMMDQVRESR

SEQ ID NO: 51678 - protein, 24 aa, Influenza A virus
NILKGKFQTAAQRAMMDQVRESRN

SEQ ID NO: 51679 - protein, 25 aa, Influenza A virus
NILKGKFQTAAQRAMMDQVRESRNP

SEQ ID NO: 51680 - protein, 14 aa, Influenza A virus
NPAHKSQLVWMACH

SEQ ID NO: 51681 - protein, 15 aa, Influenza A virus
NPAHKSQLVWMACHS

SEQ ID NO: 51682 - protein, 16 aa, Influenza A virus
NPAHKSQLVWMACHSA

SEQ ID NO: 51683 - protein, 17 aa, Influenza A virus
NPAHKSQLVWMACHSAA

SEQ ID NO: 51684 - protein, 18 aa, Influenza A virus
NPAHKSQLVWMACHSAAF

SEQ ID NO: 51685 - protein, 19 aa, Influenza A virus
NPAHKSQLVWMACHSAAFE

SEQ ID NO: 51686 - protein, 20 aa, Influenza A virus
NPAHKSQLVWMACHSAAFED

SEQ ID NO: 51687 - protein, 21 aa, Influenza A virus
NPAHKSQLVWMACHSAAFEDL

SEQ ID NO: 51688 - protein, 22 aa, Influenza A virus
NPAHKSQLVWMACHSAAFEDLR

SEQ ID NO: 51689 - protein, 14 aa, Influenza A virus
PAHKSQLVWMACHS

SEQ ID NO: 51690 - protein, 15 aa, Influenza A virus
PAHKSQLVWMACHSA

SEQ ID NO: 51691 - protein, 16 aa, Influenza A virus
PAHKSQLVWMACHSAA

SEQ ID NO: 51692 - protein, 17 aa, Influenza A virus
PAHKSQLVWMACHSAAF

SEQ ID NO: 51693 - protein, 18 aa, Influenza A virus
PAHKSQLVWMACHSAAFE

SEQ ID NO: 51694 - protein, 19 aa, Influenza A virus
PAHKSQLVWMACHSAAFED

SEQ ID NO: 51695 - protein, 20 aa, Influenza A virus
PAHKSQLVWMACHSAAFEDL

SEQ ID NO: 51696 - protein, 21 aa, Influenza A virus
PAHKSQLVWMACHSAAFEDLR

SEQ ID NO: 51697 - protein, 15 aa, Influenza A virus
PIVPSFDMSNEGSYF

SEQ ID NO: 51698 - protein, 16 aa, Influenza A virus
PIVPSFDMSNEGSYFF

SEQ ID NO: 51699 - protein, 17 aa, Influenza A virus
PIVPSFDMSNEGSYFFG

SEQ ID NO: 51700 - protein, 15 aa, Influenza A virus
PNENPAHKSQLVWMA

SEQ ID NO: 51701 - protein, 16 aa, Influenza A virus
PNENPAHKSQLVWMAC

SEQ ID NO: 51702 - protein, 13 aa, Influenza A virus
PRMCSLMQGSTLP

SEQ ID NO: 51703 - protein, 14 aa, Influenza A virus
PRMCSLMQGSTLPR

SEQ ID NO: 51704 - protein, 15 aa, Influenza A virus
PRMCSLMQGSTLPRR

SEQ ID NO: 51705 - protein, 16 aa, Influenza A virus
PRMCSLMQGSTLPRRS

SEQ ID NO: 51706 - protein, 17 aa, Influenza A virus
PRMCSLMQGSTLPRRSG

SEQ ID NO: 51707 - protein, 18 aa, Influenza A virus
PRMCSLMQGSTLPRRSGA

SEQ ID NO: 51708 - protein, 19 aa, Influenza A virus
PRMCSLMQGSTLPRRSGAA

SEQ ID NO: 51709 - protein, 20 aa, Influenza A virus
PRMCSLMQGSTLPRRSGAAG

SEQ ID NO: 51710 - protein, 21 aa, Influenza A virus
PRMCSLMQGSTLPRRSGAAGA

SEQ ID NO: 51711 - protein, 22 aa, Influenza A virus
PRMCSLMQGSTLPRRSGAAGAA

SEQ ID NO: 51712 - protein, 23 aa, Influenza A virus
PRMCSLMQGSTLPRRSGAAGAAV

SEQ ID NO: 51713 - protein, 24 aa, Influenza A virus
PRMCSLMQGSTLPRRSGAAGAAVK

SEQ ID NO: 51714 - protein, 25 aa, Influenza A virus
PRMCSLMQGSTLPRRSGAAGAAVKG

SEQ ID NO: 51715 - protein, 13 aa, Influenza A virus
PRRSGAAGAAVKG

SEQ ID NO: 51716 - protein, 14 aa, Influenza A virus
PRRSGAAGAAVKGV

SEQ ID NO: 51717 - protein, 15 aa, Influenza A virus
PRRSGAAGAAVKGVG

SEQ ID NO: 51718 - protein, 16 aa, Influenza A virus
PRRSGAAGAAVKGVGT

SEQ ID NO: 51719 - protein, 14 aa, Influenza A virus
QGSTLPRRSGAAGA

SEQ ID NO: 51720 - protein, 15 aa, Influenza A virus
QGSTLPRRSGAAGAA

SEQ ID NO: 51721 - protein, 16 aa, Influenza A virus
QGSTLPRRSGAAGAAV

SEQ ID NO: 51722 - protein, 17 aa, Influenza A virus
QGSTLPRRSGAAGAAVK

SEQ ID NO: 51723 - protein, 18 aa, Influenza A virus
QGSTLPRRSGAAGAAVKG

SEQ ID NO: 51724 - protein, 19 aa, Influenza A virus
QGSTLPRRSGAAGAAVKGV

SEQ ID NO: 51725 - protein, 20 aa, Influenza A virus
QGSTLPRRSGAAGAAVKGVG

SEQ ID NO: 51726 - protein, 21 aa, Influenza A virus
QGSTLPRRSGAAGAAVKGVGT

SEQ ID NO: 51727 - protein, 13 aa, Influenza A virus
QLVWMACHSAAFE

SEQ ID NO: 51728 - protein, 14 aa, Influenza A virus
QLVWMACHSAAFED

SEQ ID NO: 51729 - protein, 15 aa, Influenza A virus
QLVWMACHSAAFEDL

SEQ ID NO: 51730 - protein, 16 aa, Influenza A virus
QLVWMACHSAAFEDLR

SEQ ID NO: 51731 - protein, 16 aa, Influenza A virus
QMCTELKLSDYEGRLI

SEQ ID NO: 51732 - protein, 17 aa, Influenza A virus
QMCTELKLSDYEGRLIQ

SEQ ID NO: 51733 - protein, 19 aa, Influenza A virus
QMCTELKLSDYEGRLIQNS

SEQ ID NO: 51734 - protein, 15 aa, Influenza A virus
QRTRALVRTGMDPRM

SEQ ID NO: 51735 - protein, 16 aa, Influenza A virus
QRTRALVRTGMDPRMC

SEQ ID NO: 51736 - protein, 17 aa, Influenza A virus
QRTRALVRTGMDPRMCS

SEQ ID NO: 51737 - protein, 19 aa, Influenza A virus
QRTRALVRTGMDPRMCSLM

SEQ ID NO: 51738 - protein, 20 aa, Influenza A virus
QRTRALVRTGMDPRMCSLMQ

SEQ ID NO: 51739 - protein, 21 aa, Influenza A virus
QRTRALVRTGMDPRMCSLMQG

SEQ ID NO: 51740 - protein, 22 aa, Influenza A virus
QRTRALVRTGMDPRMCSLMQGS

SEQ ID NO: 51741 - protein, 23 aa, Influenza A virus
QRTRALVRTGMDPRMCSLMQGST

SEQ ID NO: 51742 - protein, 24 aa, Influenza A virus
QRTRALVRTGMDPRMCSLMQGSTL

SEQ ID NO: 51743 - protein, 25 aa, Influenza A virus
QRTRALVRTGMDPRMCSLMQGSTLP

SEQ ID NO: 51744 - protein, 20 aa, Influenza A virus
QTAAQRAMMDQVRESRNPGN

SEQ ID NO: 51745 - protein, 15 aa, Influenza A virus
RALVRTGMDPRMCSL

SEQ ID NO: 51746 - protein, 16 aa, Influenza A virus
RALVRTGMDPRMCSLM

SEQ ID NO: 51747 - protein, 17 aa, Influenza A virus
RALVRTGMDPRMCSLMQ

SEQ ID NO: 51748 - protein, 19 aa, Influenza A virus
RALVRTGMDPRMCSLMQGS

SEQ ID NO: 51749 - protein, 20 aa, Influenza A virus
RALVRTGMDPRMCSLMQGST

SEQ ID NO: 51750 - protein, 21 aa, Influenza A virus
RALVRTGMDPRMCSLMQGSTL

SEQ ID NO: 51751 - protein, 22 aa, Influenza A virus
RALVRTGMDPRMCSLMQGSTLP

SEQ ID NO: 51752 - protein, 23 aa, Influenza A virus
RALVRTGMDPRMCSLMQGSTLPR

SEQ ID NO: 51753 - protein, 24 aa, Influenza A virus
RALVRTGMDPRMCSLMQGSTLPRR

SEQ ID NO: 51754 - protein, 25 aa, Influenza A virus
RALVRTGMDPRMCSLMQGSTLPRRS

SEQ ID NO: 51755 - protein, 13 aa, Influenza A virus
RFYIQMCTELKLS

SEQ ID NO: 51756 - protein, 14 aa, Influenza A virus
RFYIQMCTELKLSD

SEQ ID NO: 51757 - protein, 15 aa, Influenza A virus
RFYIQMCTELKLSDY

SEQ ID NO: 51758 - protein, 16 aa, Influenza A virus
RFYIQMCTELKLSDYE

SEQ ID NO: 51759 - protein, 17 aa, Influenza A virus
RFYIQMCTELKLSDYEG

SEQ ID NO: 51760 - protein, 18 aa, Influenza A virus
RFYIQMCTELKLSDYEGR

SEQ ID NO: 51761 - protein, 19 aa, Influenza A virus
RFYIQMCTELKLSDYEGRL

SEQ ID NO: 51762 - protein, 20 aa, Influenza A virus
RFYIQMCTELKLSDYEGRLI

SEQ ID NO: 51763 - protein, 21 aa, Influenza A virus
RFYIQMCTELKLSDYEGRLIQ

SEQ ID NO: 51764 - protein, 22 aa, Influenza A virus
RFYIQMCTELKLSDYEGRLIQN

SEQ ID NO: 51765 - protein, 23 aa, Influenza A virus
RFYIQMCTELKLSDYEGRLIQNS

SEQ ID NO: 51766 - protein, 15 aa, Influenza A virus
RGSVAHKSCLPACVY

SEQ ID NO: 51767 - protein, 16 aa, Influenza A virus
RGSVAHKSCLPACVYG

SEQ ID NO: 51768 - protein, 14 aa, Influenza A virus
RMCNILKGKFQTAA

SEQ ID NO: 51769 - protein, 15 aa, Influenza A virus
RMCNILKGKFQTAAQ

SEQ ID NO: 51770 - protein, 16 aa, Influenza A virus
RMCNILKGKFQTAAQR

SEQ ID NO: 51771 - protein, 17 aa, Influenza A virus
RMCNILKGKFQTAAQRA

SEQ ID NO: 51772 - protein, 18 aa, Influenza A virus
RMCNILKGKFQTAAQRAM

SEQ ID NO: 51773 - protein, 19 aa, Influenza A virus
RMCNILKGKFQTAAQRAMM

SEQ ID NO: 51774 - protein, 20 aa, Influenza A virus
RMCNILKGKFQTAAQRAMMD

SEQ ID NO: 51775 - protein, 21 aa, Influenza A virus
RMCNILKGKFQTAAQRAMMDQ

SEQ ID NO: 51776 - protein, 22 aa, Influenza A virus
RMCNILKGKFQTAAQRAMMDQV

SEQ ID NO: 51777 - protein, 23 aa, Influenza A virus
RMCNILKGKFQTAAQRAMMDQVR

SEQ ID NO: 51778 - protein, 24 aa, Influenza A virus
RMCNILKGKFQTAAQRAMMDQVRE

SEQ ID NO: 51779 - protein, 25 aa, Influenza A virus
RMCNILKGKFQTAAQRAMMDQVRES

SEQ ID NO: 51780 - protein, 13 aa, Influenza A virus
RMCSLMQGSTLPR

SEQ ID NO: 51781 - protein, 14 aa, Influenza A virus
RMCSLMQGSTLPRR

SEQ ID NO: 51782 - protein, 15 aa, Influenza A virus
RMCSLMQGSTLPRRS

SEQ ID NO: 51783 - protein, 16 aa, Influenza A virus
RMCSLMQGSTLPRRSG

SEQ ID NO: 51784 - protein, 17 aa, Influenza A virus
RMCSLMQGSTLPRRSGA

SEQ ID NO: 51785 - protein, 18 aa, Influenza A virus
RMCSLMQGSTLPRRSGAA

SEQ ID NO: 51786 - protein, 19 aa, Influenza A virus
RMCSLMQGSTLPRRSGAAG

SEQ ID NO: 51787 - protein, 20 aa, Influenza A virus
RMCSLMQGSTLPRRSGAAGA

SEQ ID NO: 51788 - protein, 21 aa, Influenza A virus
RMCSLMQGSTLPRRSGAAGAA

SEQ ID NO: 51789 - protein, 22 aa, Influenza A virus
RMCSLMQGSTLPRRSGAAGAAV

SEQ ID NO: 51790 - protein, 23 aa, Influenza A virus
RMCSLMQGSTLPRRSGAAGAAVK

SEQ ID NO: 51791 - protein, 24 aa, Influenza A virus
RMCSLMQGSTLPRRSGAAGAAVKG

SEQ ID NO: 51792 - protein, 25 aa, Influenza A virus
RMCSLMQGSTLPRRSGAAGAAVKGV

SEQ ID NO: 51793 - protein, 15 aa, Influenza A virus
RMIKRGINDRNFWRG

SEQ ID NO: 51794 - protein, 16 aa, Influenza A virus
RPNENPAHKSQLVWMA

SEQ ID NO: 51795 - protein, 17 aa, Influenza A virus
RPNENPAHKSQLVWMAC

SEQ ID NO: 51796 - protein, 13 aa, Influenza A virus
RRSGAAGAAVKGV

SEQ ID NO: 51797 - protein, 14 aa, Influenza A virus
RRSGAAGAAVKGVG

SEQ ID NO: 51798 - protein, 15 aa, Influenza A virus
RRSGAAGAAVKGVGT

SEQ ID NO: 51799 - protein, 13 aa, Influenza A virus
RSALILRGSVAHK

SEQ ID NO: 51800 - protein, 14 aa, Influenza A virus
RSALILRGSVAHKS

SEQ ID NO: 51801 - protein, 15 aa, Influenza A virus
RSALILRGSVAHKSC

SEQ ID NO: 51802 - protein, 16 aa, Influenza A virus
RSALILRGSVAHKSCL

SEQ ID NO: 51803 - protein, 17 aa, Influenza A virus
RSALILRGSVAHKSCLP

SEQ ID NO: 51804 - protein, 18 aa, Influenza A virus
RSALILRGSVAHKSCLPA

SEQ ID NO: 51805 - protein, 19 aa, Influenza A virus
RSALILRGSVAHKSCLPAC

SEQ ID NO: 51806 - protein, 20 aa, Influenza A virus
RSALILRGSVAHKSCLPACV

SEQ ID NO: 51807 - protein, 21 aa, Influenza A virus
RSALILRGSVAHKSCLPACVY

SEQ ID NO: 51808 - protein, 22 aa, Influenza A virus
RSALILRGSVAHKSCLPACVYG

SEQ ID NO: 51809 - protein, 13 aa, Influenza A virus
RSGAAGAAVKGVG

SEQ ID NO: 51810 - protein, 14 aa, Influenza A virus
RSGAAGAAVKGVGT

SEQ ID NO: 51811 - protein, 13 aa, Influenza A virus
RSRYWAIRTRSGG

SEQ ID NO: 51812 - protein, 14 aa, Influenza A virus
RSRYWAIRTRSGGN

SEQ ID NO: 51813 - protein, 15 aa, Influenza A virus
RSRYWAIRTRSGGNT

SEQ ID NO: 51814 - protein, 16 aa, Influenza A virus
RSRYWAIRTRSGGNTN

SEQ ID NO: 51815 - protein, 17 aa, Influenza A virus
RSRYWAIRTRSGGNTNQ

SEQ ID NO: 51816 - protein, 18 aa, Influenza A virus
RSRYWAIRTRSGGNTNQQ

SEQ ID NO: 51817 - protein, 17 aa, Influenza A virus
RTGMDPRMCSLMQGSTL

SEQ ID NO: 51818 - protein, 19 aa, Influenza A virus
RTGMDPRMCSLMQGSTLPR

SEQ ID NO: 51819 - protein, 20 aa, Influenza A virus
RTGMDPRMCSLMQGSTLPRR

SEQ ID NO: 51820 - protein, 21 aa, Influenza A virus
RTGMDPRMCSLMQGSTLPRRS

SEQ ID NO: 51821 - protein, 22 aa, Influenza A virus
RTGMDPRMCSLMQGSTLPRRSG

SEQ ID NO: 51822 - protein, 23 aa, Influenza A virus
RTGMDPRMCSLMQGSTLPRRSGA

SEQ ID NO: 51823 - protein, 24 aa, Influenza A virus
RTGMDPRMCSLMQGSTLPRRSGAA

SEQ ID NO: 51824 - protein, 25 aa, Influenza A virus
RTGMDPRMCSLMQGSTLPRRSGAAG

SEQ ID NO: 51825 - protein, 15 aa, Influenza A virus
RTRALVRTGMDPRMC

SEQ ID NO: 51826 - protein, 16 aa, Influenza A virus
RTRALVRTGMDPRMCS

SEQ ID NO: 51827 - protein, 17 aa, Influenza A virus
RTRALVRTGMDPRMCSL

SEQ ID NO: 51828 - protein, 19 aa, Influenza A virus
RTRALVRTGMDPRMCSLMQ

SEQ ID NO: 51829 - protein, 20 aa, Influenza A virus
RTRALVRTGMDPRMCSLMQG

SEQ ID NO: 51830 - protein, 21 aa, Influenza A virus
RTRALVRTGMDPRMCSLMQGS

SEQ ID NO: 51831 - protein, 22 aa, Influenza A virus
RTRALVRTGMDPRMCSLMQGST

SEQ ID NO: 51832 - protein, 23 aa, Influenza A virus
RTRALVRTGMDPRMCSLMQGSTL

SEQ ID NO: 51833 - protein, 24 aa, Influenza A virus
RTRALVRTGMDPRMCSLMQGSTLP

SEQ ID NO: 51834 - protein, 25 aa, Influenza A virus
RTRALVRTGMDPRMCSLMQGSTLPR

SEQ ID NO: 51835 - protein, 13 aa, Influenza A virus
RYWAIRTRSGGNT

SEQ ID NO: 51836 - protein, 14 aa, Influenza A virus
RYWAIRTRSGGNTN

SEQ ID NO: 51837 - protein, 15 aa, Influenza A virus
RYWAIRTRSGGNTNQ

SEQ ID NO: 51838 - protein, 16 aa, Influenza A virus
RYWAIRTRSGGNTNQQ

SEQ ID NO: 51839 - protein, 13 aa, Influenza A virus
SALILRGSVAHKS

SEQ ID NO: 51840 - protein, 14 aa, Influenza A virus
SALILRGSVAHKSC

SEQ ID NO: 51841 - protein, 15 aa, Influenza A virus
SALILRGSVAHKSCL

SEQ ID NO: 51842 - protein, 16 aa, Influenza A virus
SALILRGSVAHKSCLP

SEQ ID NO: 51843 - protein, 17 aa, Influenza A virus
SALILRGSVAHKSCLPA

SEQ ID NO: 51844 - protein, 18 aa, Influenza A virus
SALILRGSVAHKSCLPAC

SEQ ID NO: 51845 - protein, 19 aa, Influenza A virus
SALILRGSVAHKSCLPACV

SEQ ID NO: 51846 - protein, 20 aa, Influenza A virus
SALILRGSVAHKSCLPACVY

SEQ ID NO: 51847 - protein, 21 aa, Influenza A virus
SALILRGSVAHKSCLPACVYG

SEQ ID NO: 51848 - protein, 13 aa, Influenza A virus
SGAAGAAVKGVGT

SEQ ID NO: 51849 - protein, 16 aa, Influenza A virus
SGGNTNQQRASAGQIS

SEQ ID NO: 51850 - protein, 14 aa, Influenza A virus
SLIRPNENPAHKSQ

SEQ ID NO: 51851 - protein, 15 aa, Influenza A virus
SLIRPNENPAHKSQL

SEQ ID NO: 51852 - protein, 16 aa, Influenza A virus
SLIRPNENPAHKSQLV

SEQ ID NO: 51853 - protein, 17 aa, Influenza A virus
SLIRPNENPAHKSQLVW

SEQ ID NO: 51854 - protein, 20 aa, Influenza A virus
SLIRPNENPAHKSQLVWMAC

SEQ ID NO: 51855 - protein, 14 aa, Influenza A virus
SLMQGSTLPRRSGA

SEQ ID NO: 51856 - protein, 15 aa, Influenza A virus
SLMQGSTLPRRSGAA

SEQ ID NO: 51857 - protein, 16 aa, Influenza A virus
SLMQGSTLPRRSGAAG

SEQ ID NO: 51858 - protein, 17 aa, Influenza A virus
SLMQGSTLPRRSGAAGA

SEQ ID NO: 51859 - protein, 18 aa, Influenza A virus
SLMQGSTLPRRSGAAGAA

SEQ ID NO: 51860 - protein, 19 aa, Influenza A virus
SLMQGSTLPRRSGAAGAAV

SEQ ID NO: 51861 - protein, 20 aa, Influenza A virus
SLMQGSTLPRRSGAAGAAVK

SEQ ID NO: 51862 - protein, 21 aa, Influenza A virus
SLMQGSTLPRRSGAAGAAVKG

SEQ ID NO: 51863 - protein, 22 aa, Influenza A virus
SLMQGSTLPRRSGAAGAAVKGV

SEQ ID NO: 51864 - protein, 23 aa, Influenza A virus
SLMQGSTLPRRSGAAGAAVKGVG

SEQ ID NO: 51865 - protein, 24 aa, Influenza A virus
SLMQGSTLPRRSGAAGAAVKGVGT

SEQ ID NO: 51866 - protein, 13 aa, Influenza A virus
SQLVWMACHSAAF

SEQ ID NO: 51867 - protein, 14 aa, Influenza A virus
SQLVWMACHSAAFE

SEQ ID NO: 51868 - protein, 15 aa, Influenza A virus
SQLVWMACHSAAFED

SEQ ID NO: 51869 - protein, 16 aa, Influenza A virus
SQLVWMACHSAAFEDL

SEQ ID NO: 51870 - protein, 17 aa, Influenza A virus
SQLVWMACHSAAFEDLR

SEQ ID NO: 51871 - protein, 13 aa, Influenza A virus
SRYWAIRTRSGGN

SEQ ID NO: 51872 - protein, 14 aa, Influenza A virus
SRYWAIRTRSGGNT

SEQ ID NO: 51873 - protein, 15 aa, Influenza A virus
SRYWAIRTRSGGNTN

SEQ ID NO: 51874 - protein, 16 aa, Influenza A virus
SRYWAIRTRSGGNTNQ

SEQ ID NO: 51875 - protein, 17 aa, Influenza A virus
SRYWAIRTRSGGNTNQQ

SEQ ID NO: 51876 - protein, 13 aa, Influenza A virus
STLPRRSGAAGAA

SEQ ID NO: 51877 - protein, 14 aa, Influenza A virus
STLPRRSGAAGAAV

SEQ ID NO: 51878 - protein, 15 aa, Influenza A virus
STLPRRSGAAGAAVK

SEQ ID NO: 51879 - protein, 16 aa, Influenza A virus
STLPRRSGAAGAAVKG

SEQ ID NO: 51880 - protein, 17 aa, Influenza A virus
STLPRRSGAAGAAVKGV

SEQ ID NO: 51881 - protein, 18 aa, Influenza A virus
STLPRRSGAAGAAVKGVG

SEQ ID NO: 51882 - protein, 19 aa, Influenza A virus
STLPRRSGAAGAAVKGVGT

SEQ ID NO: 51883 - protein, 13 aa, Influenza A virus
SYFFGDNAEEYDN

SEQ ID NO: 51884 - protein, 14 aa, Influenza A virus
TELKLSDYEGRLIQ

SEQ ID NO: 51885 - protein, 15 aa, Influenza A virus
TELKLSDYEGRLIQN

SEQ ID NO: 51886 - protein, 16 aa, Influenza A virus
TELKLSDYEGRLIQNS

SEQ ID NO: 51887 - protein, 16 aa, Influenza A virus
TGMDPRMCSLMQGSTL

SEQ ID NO: 51888 - protein, 17 aa, Influenza A virus
TGMDPRMCSLMQGSTLP

SEQ ID NO: 51889 - protein, 18 aa, Influenza A virus
TGMDPRMCSLMQGSTLPR

SEQ ID NO: 51890 - protein, 19 aa, Influenza A virus
TGMDPRMCSLMQGSTLPRR

SEQ ID NO: 51891 - protein, 20 aa, Influenza A virus
TGMDPRMCSLMQGSTLPRRS

SEQ ID NO: 51892 - protein, 21 aa, Influenza A virus
TGMDPRMCSLMQGSTLPRRSG

SEQ ID NO: 51893 - protein, 22 aa, Influenza A virus
TGMDPRMCSLMQGSTLPRRSGA

SEQ ID NO: 51894 - protein, 23 aa, Influenza A virus
TGMDPRMCSLMQGSTLPRRSGAA

SEQ ID NO: 51895 - protein, 24 aa, Influenza A virus
TGMDPRMCSLMQGSTLPRRSGAAG

SEQ ID NO: 51896 - protein, 25 aa, Influenza A virus
TGMDPRMCSLMQGSTLPRRSGAAGA

SEQ ID NO: 51897 - protein, 13 aa, Influenza A virus
TIERMVLSAFDER

SEQ ID NO: 51898 - protein, 14 aa, Influenza A virus
TIERMVLSAFDERR

SEQ ID NO: 51899 - protein, 15 aa, Influenza A virus
TIERMVLSAFDERRN

SEQ ID NO: 51900 - protein, 13 aa, Influenza A virus
TLELRSRYWAIRT

SEQ ID NO: 51901 - protein, 14 aa, Influenza A virus
TLELRSRYWAIRTR

SEQ ID NO: 51902 - protein, 15 aa, Influenza A virus
TLELRSRYWAIRTRS

SEQ ID NO: 51903 - protein, 16 aa, Influenza A virus
TLELRSRYWAIRTRSG

SEQ ID NO: 51904 - protein, 17 aa, Influenza A virus
TLELRSRYWAIRTRSGG

SEQ ID NO: 51905 - protein, 18 aa, Influenza A virus
TLELRSRYWAIRTRSGGN

SEQ ID NO: 51906 - protein, 19 aa, Influenza A virus
TLELRSRYWAIRTRSGGNT

SEQ ID NO: 51907 - protein, 20 aa, Influenza A virus
TLELRSRYWAIRTRSGGNTN

SEQ ID NO: 51908 - protein, 21 aa, Influenza A virus
TLELRSRYWAIRTRSGGNTNQ

SEQ ID NO: 51909 - protein, 22 aa, Influenza A virus
TLELRSRYWAIRTRSGGNTNQQ

SEQ ID NO: 51910 - protein, 13 aa, Influenza A virus
TLPRRSGAAGAAV

SEQ ID NO: 51911 - protein, 14 aa, Influenza A virus
TLPRRSGAAGAAVK

SEQ ID NO: 51912 - protein, 15 aa, Influenza A virus
TLPRRSGAAGAAVKG

SEQ ID NO: 51913 - protein, 16 aa, Influenza A virus
TLPRRSGAAGAAVKGV

SEQ ID NO: 51914 - protein, 17 aa, Influenza A virus
TLPRRSGAAGAAVKGVG

SEQ ID NO: 51915 - protein, 18 aa, Influenza A virus
TLPRRSGAAGAAVKGVGT

SEQ ID NO: 51916 - protein, 15 aa, Influenza A virus
TRALVRTGMDPRMCS

SEQ ID NO: 51917 - protein, 16 aa, Influenza A virus
TRALVRTGMDPRMCSL

SEQ ID NO: 51918 - protein, 17 aa, Influenza A virus
TRALVRTGMDPRMCSLM

SEQ ID NO: 51919 - protein, 19 aa, Influenza A virus
TRALVRTGMDPRMCSLMQG

SEQ ID NO: 51920 - protein, 20 aa, Influenza A virus
TRALVRTGMDPRMCSLMQGS

SEQ ID NO: 51921 - protein, 21 aa, Influenza A virus
TRALVRTGMDPRMCSLMQGST

SEQ ID NO: 51922 - protein, 22 aa, Influenza A virus
TRALVRTGMDPRMCSLMQGSTL

SEQ ID NO: 51923 - protein, 23 aa, Influenza A virus
TRALVRTGMDPRMCSLMQGSTLP

SEQ ID NO: 51924 - protein, 24 aa, Influenza A virus
TRALVRTGMDPRMCSLMQGSTLPR

SEQ ID NO: 51925 - protein, 25 aa, Influenza A virus
TRALVRTGMDPRMCSLMQGSTLPRR

SEQ ID NO: 51926 - protein, 14 aa, Influenza A virus
TYQRTRALVRTGMD

SEQ ID NO: 51927 - protein, 15 aa, Influenza A virus
TYQRTRALVRTGMDP

SEQ ID NO: 51928 - protein, 16 aa, Influenza A virus
TYQRTRALVRTGMDPR

SEQ ID NO: 51929 - protein, 17 aa, Influenza A virus
TYQRTRALVRTGMDPRM

SEQ ID NO: 51930 - protein, 19 aa, Influenza A virus
TYQRTRALVRTGMDPRMCS

SEQ ID NO: 51931 - protein, 20 aa, Influenza A virus
TYQRTRALVRTGMDPRMCSL

SEQ ID NO: 51932 - protein, 21 aa, Influenza A virus
TYQRTRALVRTGMDPRMCSLM

SEQ ID NO: 51933 - protein, 22 aa, Influenza A virus
TYQRTRALVRTGMDPRMCSLMQ

SEQ ID NO: 51934 - protein, 23 aa, Influenza A virus
TYQRTRALVRTGMDPRMCSLMQG

SEQ ID NO: 51935 - protein, 24 aa, Influenza A virus
TYQRTRALVRTGMDPRMCSLMQGS

SEQ ID NO: 51936 - protein, 25 aa, Influenza A virus
TYQRTRALVRTGMDPRMCSLMQGST

SEQ ID NO: 51937 - protein, 20 aa, Influenza A virus
VPSFDMSNEGSYFFGDNAEE

SEQ ID NO: 51938 - protein, 19 aa, Influenza A virus
VRTGMDPRMCSLMQGSTLP

SEQ ID NO: 51939 - protein, 20 aa, Influenza A virus
VRTGMDPRMCSLMQGSTLPR

SEQ ID NO: 51940 - protein, 21 aa, Influenza A virus
VRTGMDPRMCSLMQGSTLPRR

SEQ ID NO: 51941 - protein, 22 aa, Influenza A virus
VRTGMDPRMCSLMQGSTLPRRS

SEQ ID NO: 51942 - protein, 23 aa, Influenza A virus
VRTGMDPRMCSLMQGSTLPRRSG

SEQ ID NO: 51943 - protein, 24 aa, Influenza A virus
VRTGMDPRMCSLMQGSTLPRRSGA

SEQ ID NO: 51944 - protein, 25 aa, Influenza A virus
VRTGMDPRMCSLMQGSTLPRRSGAA

SEQ ID NO: 51945 - protein, 13 aa, Influenza A virus
VWMACHSAAFEDL

SEQ ID NO: 51946 - protein, 14 aa, Influenza A virus
VWMACHSAAFEDLR

SEQ ID NO: 51947 - protein, 13 aa, Influenza A virus
WMACHSAAFEDLR

SEQ ID NO: 51948 - protein, 14 aa, Influenza A virus
YDKEEIRRIWRQAN

SEQ ID NO: 51949 - protein, 15 aa, Influenza A virus
YDKEEIRRIWRQANN

SEQ ID NO: 51950 - protein, 16 aa, Influenza A virus
YDKEEIRRIWRQANNG

SEQ ID NO: 51951 - protein, 14 aa, Influenza A virus
YERMCNILKGKFQT

SEQ ID NO: 51952 - protein, 15 aa, Influenza A virus
YERMCNILKGKFQTA

SEQ ID NO: 51953 - protein, 16 aa, Influenza A virus
YERMCNILKGKFQTAA

SEQ ID NO: 51954 - protein, 17 aa, Influenza A virus
YERMCNILKGKFQTAAQ

SEQ ID NO: 51955 - protein, 19 aa, Influenza A virus
YERMCNILKGKFQTAAQRA

SEQ ID NO: 51956 - protein, 20 aa, Influenza A virus
YERMCNILKGKFQTAAQRAM

SEQ ID NO: 51957 - protein, 21 aa, Influenza A virus
YERMCNILKGKFQTAAQRAMM

SEQ ID NO: 51958 - protein, 22 aa, Influenza A virus
YERMCNILKGKFQTAAQRAMMD

SEQ ID NO: 51959 - protein, 23 aa, Influenza A virus
YERMCNILKGKFQTAAQRAMMDQ

SEQ ID NO: 51960 - protein, 24 aa, Influenza A virus
YERMCNILKGKFQTAAQRAMMDQV

SEQ ID NO: 51961 - protein, 25 aa, Influenza A virus
YERMCNILKGKFQTAAQRAMMDQVR

SEQ ID NO: 51962 - protein, 13 aa, Influenza A virus
YIQMCTELKLSDY

SEQ ID NO: 51963 - protein, 14 aa, Influenza A virus
YIQMCTELKLSDYE

SEQ ID NO: 51964 - protein, 15 aa, Influenza A virus
YIQMCTELKLSDYEG

SEQ ID NO: 51965 - protein, 16 aa, Influenza A virus
YIQMCTELKLSDYEGR

SEQ ID NO: 51966 - protein, 17 aa, Influenza A virus
YIQMCTELKLSDYEGRL

SEQ ID NO: 51967 - protein, 18 aa, Influenza A virus
YIQMCTELKLSDYEGRLI

SEQ ID NO: 51968 - protein, 19 aa, Influenza A virus
YIQMCTELKLSDYEGRLIQ

SEQ ID NO: 51969 - protein, 20 aa, Influenza A virus
YIQMCTELKLSDYEGRLIQN

SEQ ID NO: 51970 - protein, 21 aa, Influenza A virus
YIQMCTELKLSDYEGRLIQNS

SEQ ID NO: 51971 - protein, 15 aa, Influenza A virus
YQRTRALVRTGMDPR

SEQ ID NO: 51972 - protein, 16 aa, Influenza A virus
YQRTRALVRTGMDPRM

SEQ ID NO: 51973 - protein, 17 aa, Influenza A virus
YQRTRALVRTGMDPRMC

SEQ ID NO: 51974 - protein, 19 aa, Influenza A virus
YQRTRALVRTGMDPRMCSL

SEQ ID NO: 51975 - protein, 20 aa, Influenza A virus
YQRTRALVRTGMDPRMCSLM

SEQ ID NO: 51976 - protein, 21 aa, Influenza A virus
YQRTRALVRTGMDPRMCSLMQ

SEQ ID NO: 51977 - protein, 22 aa, Influenza A virus
YQRTRALVRTGMDPRMCSLMQG

SEQ ID NO: 51978 - protein, 23 aa, Influenza A virus
YQRTRALVRTGMDPRMCSLMQGS

SEQ ID NO: 51979 - protein, 24 aa, Influenza A virus
YQRTRALVRTGMDPRMCSLMQGST

SEQ ID NO: 51980 - protein, 25 aa, Influenza A virus
YQRTRALVRTGMDPRMCSLMQGSTL

SEQ ID NO: 51981 - protein, 15 aa, Influenza A virus
YWAIRTRSGGNTNQQ

SEQ ID NO: 51982 - protein, 14 aa, Artificial Sequence
  Description of Artificial Sequence: Synthetic peptide
  Seed: AYERMCNILKGKFQ
AYERICNMLRGKAQ

SEQ ID NO: 51983 - protein, 14 aa, Artificial Sequence
  Description of Artificial Sequence: Synthetic peptide
  Seed: AYERMCNILKGKFQ
AFERACAILAGKFQ

SEQ ID NO: 51984 - protein, 14 aa, Artificial Sequence
  Description of Artificial Sequence: Synthetic peptide
  Seed: AYERMCNILKGKFQ
AFERACAILVGKFQ

SEQ ID NO: 51985 - protein, 14 aa, Artificial Sequence
  Description of Artificial Sequence: Synthetic peptide
  Seed: AYERMCNILKGKFQ
AFERLCAILAGKFQ

SEQ ID NO: 51986 - protein, 14 aa, Artificial Sequence
  Description of Artificial Sequence: Synthetic peptide
  Seed: AYERMCNILKGKFQ
AFERLCGILAGKFQ

SEQ ID NO: 51987 - protein, 14 aa, Artificial Sequence
  Description of Artificial Sequence: Synthetic peptide
  Seed: AYERMCNILKGKFQ
AFERLCPILAGKFQ

SEQ ID NO: 51988 - protein, 14 aa, Artificial Sequence
  Description of Artificial Sequence: Synthetic peptide
  Seed: AYERMCNILKGKFQ
AFERLCPILVGKFQ

SEQ ID NO: 51989 - protein, 14 aa, Artificial Sequence
  Description of Artificial Sequence: Synthetic peptide
  Seed: AYERMCNILKGKFQ
AFERMCAILAGKFQ

SEQ ID NO: 51990 - protein, 14 aa, Artificial Sequence
  Description of Artificial Sequence: Synthetic peptide
  Seed: AYERMCNILKGKFQ
AFERMCGILAGKFQ

SEQ ID NO: 51991 - protein, 14 aa, Artificial Sequence
  Description of Artificial Sequence: Synthetic peptide
  Seed: AYERMCNILKGKFQ
AFERMCGILVGKFQ

SEQ ID NO: 51992 - protein, 14 aa, Artificial Sequence
  Description of Artificial Sequence: Synthetic peptide
  Seed: AYERMCNILKGKFQ
AFERMCPILAGKFQ

SEQ ID NO: 51993 - protein, 14 aa, Artificial Sequence
  Description of Artificial Sequence: Synthetic peptide
  Seed: AYERMCNILKGKFQ
AFERMCPILVGKFQ

SEQ ID NO: 51994 - protein, 14 aa, Artificial Sequence
  Description of Artificial Sequence: Synthetic peptide
  Seed: AYERMCNILKGKFQ
AYERACAILAGKFQ

SEQ ID NO: 51995 - protein, 14 aa, Artificial Sequence
  Description of Artificial Sequence: Synthetic peptide
  Seed: AYERMCNILKGKFQ
AYERACAILVGKFQ

SEQ ID NO: 51996 - protein, 14 aa, Artificial Sequence
  Description of Artificial Sequence: Synthetic peptide
  Seed: AYERMCNILKGKFQ
AYERLCAILAGKFQ

SEQ ID NO: 51997 - protein, 14 aa, Artificial Sequence
  Description of Artificial Sequence: Synthetic peptide
  Seed: AYERMCNILKGKFQ
AYERLCGILAGKFQ

SEQ ID NO: 51998 - protein, 14 aa, Artificial Sequence
  Description of Artificial Sequence: Synthetic peptide
  Seed: AYERMCNILKGKFQ
AYERLCPILVGKFQ

SEQ ID NO: 51999 - protein, 14 aa, Artificial Sequence
  Description of Artificial Sequence: Synthetic peptide
  Seed: AYERMCNILKGKFQ
AYERMCAILAGKFQ

SEQ ID NO: 52000 - protein, 14 aa, Artificial Sequence
  Description of Artificial Sequence: Synthetic peptide
  Seed: AYERMCNILKGKFQ
AYERMCGILAGKFQ

SEQ ID NO: 52001 - protein, 14 aa, Artificial Sequence
  Description of Artificial Sequence: Synthetic peptide
  Seed: AYERMCNILKGKFQ
AYERMCGILVGKFQ

SEQ ID NO: 52002 - protein, 14 aa, Artificial Sequence
  Description of Artificial Sequence: Synthetic peptide
  Seed: AYERMCNILKGKFQ
AYERMCPILVGKFQ

SEQ ID NO: 52003 - protein, 15 aa, Artificial Sequence
  Description of Artificial Sequence: Synthetic peptide
  Seed: AYERMCNILKGKFQT
AYERMFNILKAKFAT

SEQ ID NO: 52004 - protein, 15 aa, Artificial Sequence
  Description of Artificial Sequence: Synthetic peptide
  Seed: AYERMCNILKGKFQT
AYERMFNILKAKFLT

SEQ ID NO: 52005 - protein, 15 aa, Artificial Sequence
  Description of Artificial Sequence: Synthetic peptide
  Seed: AYERMCNILKGKFQT
AYERMFNILKAKFVT

SEQ ID NO: 52006 - protein, 15 aa, Artificial Sequence
  Description of Artificial Sequence: Synthetic peptide
  Seed: AYERMCNILKGKFQT
AYERMFNILKSKFVT

SEQ ID NO: 52007 - protein, 15 aa, Artificial Sequence
  Description of Artificial Sequence: Synthetic peptide
  Seed: AYERMCNILKGKFQT
AYERMFNIMKAKFAT

SEQ ID NO: 52008 - protein, 15 aa, Artificial Sequence
  Description of Artificial Sequence: Synthetic peptide
  Seed: AYERMCNILKGKFQT
AYERMFNIMKAKFIT

SEQ ID NO: 52009 - protein, 15 aa, Artificial Sequence
  Description of Artificial Sequence: Synthetic peptide
  Seed: AYERMCNILKGKFQT
AYERMFNIMKAKFLT

SEQ ID NO: 52010 - protein, 15 aa, Artificial Sequence
  Description of Artificial Sequence: Synthetic peptide
  Seed: AYERMCNILKGKFQT
AYERMFNIMKAKFVT

SEQ ID NO: 52011 - protein, 15 aa, Artificial Sequence
  Description of Artificial Sequence: Synthetic peptide
  Seed: AYERMCNILKGKFQT
AYERMFNIMKGKFLT

SEQ ID NO: 52012 - protein, 15 aa, Artificial Sequence
  Description of Artificial Sequence: Synthetic peptide
  Seed: AYERMCNILKGKFQT
AYERMFNIMKSKFLT

SEQ ID NO: 52013 - protein, 15 aa, Artificial Sequence
  Description of Artificial Sequence: Synthetic peptide
  Seed: AYERMCNILKGKFQT
AYERMFNIMKSKFVT

SEQ ID NO: 52014 - protein, 15 aa, Artificial Sequence
  Description of Artificial Sequence: Synthetic peptide
  Seed: AYERMCNILKGKFQT
AYERMINIAKAKFLT

SEQ ID NO: 52015 - protein, 15 aa, Artificial Sequence
  Description of Artificial Sequence: Synthetic peptide
  Seed: AYERMCNILKGKFQT
AYERMINIAKAKFVT

SEQ ID NO: 52016 - protein, 15 aa, Artificial Sequence
  Description of Artificial Sequence: Synthetic peptide
  Seed: AYERMCNILKGKFQT
AYERMINILKAKFAT

SEQ ID NO: 52017 - protein, 15 aa, Artificial Sequence
  Description of Artificial Sequence: Synthetic peptide
  Seed: AYERMCNILKGKFQT
AYERMINILKAKFIT

SEQ ID NO: 52018 - protein, 15 aa, Artificial Sequence
  Description of Artificial Sequence: Synthetic peptide
  Seed: AYERMCNILKGKFQT
AYERMINILKAKFLT

SEQ ID NO: 52019 - protein, 15 aa, Artificial Sequence
  Description of Artificial Sequence: Synthetic peptide
  Seed: AYERMCNILKGKFQT
AYERMINILKAKFTT

SEQ ID NO: 52020 - protein, 15 aa, Artificial Sequence
  Description of Artificial Sequence: Synthetic peptide
  Seed: AYERMCNILKGKFQT
AYERMINILKAKFVT

SEQ ID NO: 52021 - protein, 15 aa, Artificial Sequence
  Description of Artificial Sequence: Synthetic peptide
  Seed: AYERMCNILKGKFQT
AYERMINILKGKFAT

SEQ ID NO: 52022 - protein, 15 aa, Artificial Sequence
  Description of Artificial Sequence: Synthetic peptide
  Seed: AYERMCNILKGKFQT
AYERMINILKGKFIT

SEQ ID NO: 52023 - protein, 15 aa, Artificial Sequence
  Description of Artificial Sequence: Synthetic peptide
  Seed: AYERMCNILKGKFQT
AYERMINILKGKFLT

SEQ ID NO: 52024 - protein, 15 aa, Artificial Sequence
  Description of Artificial Sequence: Synthetic peptide
  Seed: AYERMCNILKGKFQT
AYERMINILKGKFVT

SEQ ID NO: 52025 - protein, 15 aa, Artificial Sequence
  Description of Artificial Sequence: Synthetic peptide
  Seed: AYERMCNILKGKFQT
AYERMINILKPKFAT

SEQ ID NO: 52026 - protein, 15 aa, Artificial Sequence
  Description of Artificial Sequence: Synthetic peptide
  Seed: AYERMCNILKGKFQT
AYERMINILKPKFLT

SEQ ID NO: 52027 - protein, 15 aa, Artificial Sequence
  Description of Artificial Sequence: Synthetic peptide
  Seed: AYERMCNILKGKFQT
AYERMINILKPKFVT

SEQ ID NO: 52028 - protein, 15 aa, Artificial Sequence
  Description of Artificial Sequence: Synthetic peptide
  Seed: AYERMCNILKGKFQT
AYERMINILKSKFAT

SEQ ID NO: 52029 - protein, 15 aa, Artificial Sequence
  Description of Artificial Sequence: Synthetic peptide
  Seed: AYERMCNILKGKFQT
AYERMINILKSKFVT

SEQ ID NO: 52030 - protein, 15 aa, Artificial Sequence
  Description of Artificial Sequence: Synthetic peptide
  Seed: AYERMCNILKGKFQT
AYERMINIMKAKFAT

SEQ ID NO: 52031 - protein, 15 aa, Artificial Sequence
  Description of Artificial Sequence: Synthetic peptide
  Seed: AYERMCNILKGKFQT
AYERMINIMKAKFIT

SEQ ID NO: 52032 - protein, 15 aa, Artificial Sequence
  Description of Artificial Sequence: Synthetic peptide
  Seed: AYERMCNILKGKFQT
AYERMINIMKAKFLT

SEQ ID NO: 52033 - protein, 15 aa, Artificial Sequence
  Description of Artificial Sequence: Synthetic peptide
  Seed: AYERMCNILKGKFQT
AYERMINIMKAKFMT

SEQ ID NO: 52034 - protein, 15 aa, Artificial Sequence
  Description of Artificial Sequence: Synthetic peptide
  Seed: AYERMCNILKGKFQT
AYERMINIMKAKFTT

SEQ ID NO: 52035 - protein, 15 aa, Artificial Sequence
  Description of Artificial Sequence: Synthetic peptide
  Seed: AYERMCNILKGKFQT
AYERMINIMKAKFVT

SEQ ID NO: 52036 - protein, 15 aa, Artificial Sequence
  Description of Artificial Sequence: Synthetic peptide
  Seed: AYERMCNILKGKFQT
AYERMINIMKGKFAT

SEQ ID NO: 52037 - protein, 15 aa, Artificial Sequence
  Description of Artificial Sequence: Synthetic peptide
  Seed: AYERMCNILKGKFQT
AYERMINIMKGKFIT

SEQ ID NO: 52038 - protein, 15 aa, Artificial Sequence
  Description of Artificial Sequence: Synthetic peptide
  Seed: AYERMCNILKGKFQT
AYERMINIMKGKFLT

SEQ ID NO: 52039 - protein, 15 aa, Artificial Sequence
  Description of Artificial Sequence: Synthetic peptide
  Seed: AYERMCNILKGKFQT
AYERMINIMKGKFVT

SEQ ID NO: 52040 - protein, 15 aa, Artificial Sequence
  Description of Artificial Sequence: Synthetic peptide
  Seed: AYERMCNILKGKFQT
AYERMINIMKPKFLT

SEQ ID NO: 52041 - protein, 15 aa, Artificial Sequence
  Description of Artificial Sequence: Synthetic peptide
  Seed: AYERMCNILKGKFQT
AYERMINIMKPKFVT

SEQ ID NO: 52042 - protein, 15 aa, Artificial Sequence
  Description of Artificial Sequence: Synthetic peptide
  Seed: AYERMCNILKGKFQT
AYERMINIMKSKFLT

SEQ ID NO: 52043 - protein, 15 aa, Artificial Sequence
  Description of Artificial Sequence: Synthetic peptide
  Seed: AYERMCNILKGKFQT
AYERMINIMKSKFVT

SEQ ID NO: 52044 - protein, 15 aa, Artificial Sequence
  Description of Artificial Sequence: Synthetic peptide
  Seed: AYERMCNILKGKFQT
AYERMLNILKAKFAT

SEQ ID NO: 52045 - protein, 15 aa, Artificial Sequence
  Description of Artificial Sequence: Synthetic peptide
  Seed: AYERMCNILKGKFQT
AYERMLNILKAKFIT

SEQ ID NO: 52046 - protein, 15 aa, Artificial Sequence
  Description of Artificial Sequence: Synthetic peptide
  Seed: AYERMCNILKGKFQT
AYERMLNILKAKFLT

SEQ ID NO: 52047 - protein, 15 aa, Artificial Sequence
  Description of Artificial Sequence: Synthetic peptide
  Seed: AYERMCNILKGKFQT
AYERMLNILKAKFVT

SEQ ID NO: 52048 - protein, 15 aa, Artificial Sequence
  Description of Artificial Sequence: Synthetic peptide
  Seed: AYERMCNILKGKFQT
AYERMLNILKGKFLT

SEQ ID NO: 52049 - protein, 15 aa, Artificial Sequence
  Description of Artificial Sequence: Synthetic peptide
  Seed: AYERMCNILKGKFQT
AYERMLNILKGKFVT

SEQ ID NO: 52050 - protein, 15 aa, Artificial Sequence
  Description of Artificial Sequence: Synthetic peptide
  Seed: AYERMCNILKGKFQT
AYERMLNIMKAKFAT

SEQ ID NO: 52051 - protein, 15 aa, Artificial Sequence
  Description of Artificial Sequence: Synthetic peptide
  Seed: AYERMCNILKGKFQT
AYERMLNIMKAKFIT

SEQ ID NO: 52052 - protein, 15 aa, Artificial Sequence
  Description of Artificial Sequence: Synthetic peptide
  Seed: AYERMCNILKGKFQT
AYERMLNIMKAKFLT

SEQ ID NO: 52053 - protein, 15 aa, Artificial Sequence
  Description of Artificial Sequence: Synthetic peptide
  Seed: AYERMCNILKGKFQT
AYERMLNIMKAKFVT

SEQ ID NO: 52054 - protein, 15 aa, Artificial Sequence
  Description of Artificial Sequence: Synthetic peptide
  Seed: AYERMCNILKGKFQT
AYERMLNIMKGKFLT

SEQ ID NO: 52055 - protein, 15 aa, Artificial Sequence
  Description of Artificial Sequence: Synthetic peptide
  Seed: AYERMCNILKGKFQT
AYERMLNIMKGKFVT

SEQ ID NO: 52056 - protein, 15 aa, Artificial Sequence
  Description of Artificial Sequence: Synthetic peptide
  Seed: AYERMCNILKGKFQT
AYERMLNIMKSKFVT

SEQ ID NO: 52057 - protein, 15 aa, Artificial Sequence
  Description of Artificial Sequence: Synthetic peptide
  Seed: AYERMCNILKGKFQT
AYERMVNIMKAKFLT

SEQ ID NO: 52058 - protein, 15 aa, Artificial Sequence
  Description of Artificial Sequence: Synthetic peptide
  Seed: AYERMCNILKGKFQT
AYERFCNILRGKAQT

SEQ ID NO: 52059 - protein, 15 aa, Artificial Sequence
  Description of Artificial Sequence: Synthetic peptide
  Seed: AYERMCNILKGKFQT
AYERFCNILRGKSQT

SEQ ID NO: 52060 - protein, 15 aa, Artificial Sequence
  Description of Artificial Sequence: Synthetic peptide
  Seed: AYERMCNILKGKFQT
AYERFCNLLRGKAQT

SEQ ID NO: 52061 - protein, 15 aa, Artificial Sequence
  Description of Artificial Sequence: Synthetic peptide
  Seed: AYERMCNILKGKFQT
AYERFCNLLRGKSQT

SEQ ID NO: 52062 - protein, 15 aa, Artificial Sequence
  Description of Artificial Sequence: Synthetic peptide
  Seed: AYERMCNILKGKFQT
AYERFCNMLRGKAQT

SEQ ID NO: 52063 - protein, 15 aa, Artificial Sequence
  Description of Artificial Sequence: Synthetic peptide
  Seed: AYERMCNILKGKFQT
AYERFCNMLRGKSQT

SEQ ID NO: 52064 - protein, 15 aa, Artificial Sequence
  Description of Artificial Sequence: Synthetic peptide
  Seed: AYERMCNILKGKFQT
AYERICNALRGKAQT

SEQ ID NO: 52065 - protein, 15 aa, Artificial Sequence
  Description of Artificial Sequence: Synthetic peptide
  Seed: AYERMCNILKGKFQT
AYERICNALRGKSQT

SEQ ID NO: 52066 - protein, 15 aa, Artificial Sequence
  Description of Artificial Sequence: Synthetic peptide
  Seed: AYERMCNILKGKFQT
AYERICNFLRGKAQT

SEQ ID NO: 52067 - protein, 15 aa, Artificial Sequence
  Description of Artificial Sequence: Synthetic peptide
  Seed: AYERMCNILKGKFQT
AYERICNFLRGKSQT

SEQ ID NO: 52068 - protein, 15 aa, Artificial Sequence
  Description of Artificial Sequence: Synthetic peptide
  Seed: AYERMCNILKGKFQT
AYERICNILKGKAQT

SEQ ID NO: 52069 - protein, 15 aa, Artificial Sequence
  Description of Artificial Sequence: Synthetic peptide
  Seed: AYERMCNILKGKFQT
AYERICNILKGKGQT

SEQ ID NO: 52070 - protein, 15 aa, Artificial Sequence
  Description of Artificial Sequence: Synthetic peptide
  Seed: AYERMCNILKGKFQT
AYERICNILKGKQQT

SEQ ID NO: 52071 - protein, 15 aa, Artificial Sequence
  Description of Artificial Sequence: Synthetic peptide
  Seed: AYERMCNILKGKFQT
AYERICNILKGKSQT

SEQ ID NO: 52072 - protein, 15 aa, Artificial Sequence
  Description of Artificial Sequence: Synthetic peptide
  Seed: AYERMCNILKGKFQT
AYERICNILKGKTQT

SEQ ID NO: 52073 - protein, 15 aa, Artificial Sequence
  Description of Artificial Sequence: Synthetic peptide
  Seed: AYERMCNILKGKFQT
AYERICNILRGKAQT

SEQ ID NO: 52074 - protein, 15 aa, Artificial Sequence
  Description of Artificial Sequence: Synthetic peptide
  Seed: AYERMCNILKGKFQT
AYERICNILRGKGQT

SEQ ID NO: 52075 - protein, 15 aa, Artificial Sequence
  Description of Artificial Sequence: Synthetic peptide
  Seed: AYERMCNILKGKFQT
AYERICNILRGKHQT

SEQ ID NO: 52076 - protein, 15 aa, Artificial Sequence
  Description of Artificial Sequence: Synthetic peptide
  Seed: AYERMCNILKGKFQT
AYERICNILRGKMQT

SEQ ID NO: 52077 - protein, 15 aa, Artificial Sequence
  Description of Artificial Sequence: Synthetic peptide
  Seed: AYERMCNILKGKFQT
AYERICNILRGKQQT

SEQ ID NO: 52078 - protein, 15 aa, Artificial Sequence
  Description of Artificial Sequence: Synthetic peptide
  Seed: AYERMCNILKGKFQT
AYERICNILRGKSQT

SEQ ID NO: 52079 - protein, 15 aa, Artificial Sequence
  Description of Artificial Sequence: Synthetic peptide
  Seed: AYERMCNILKGKFQT
AYERICNILRGKTQT

SEQ ID NO: 52080 - protein, 15 aa, Artificial Sequence
  Description of Artificial Sequence: Synthetic peptide
  Seed: AYERMCNILKGKFQT
AYERICNILRGKVQT

SEQ ID NO: 52081 - protein, 15 aa, Artificial Sequence
  Description of Artificial Sequence: Synthetic peptide
  Seed: AYERMCNILKGKFQT
AYERICNLLKGKAQT

SEQ ID NO: 52082 - protein, 15 aa, Artificial Sequence
  Description of Artificial Sequence: Synthetic peptide
  Seed: AYERMCNILKGKFQT
AYERICNLLKGKGQT

SEQ ID NO: 52083 - protein, 15 aa, Artificial Sequence
  Description of Artificial Sequence: Synthetic peptide
  Seed: AYERMCNILKGKFQT
AYERICNLLKGKQQT

SEQ ID NO: 52084 - protein, 15 aa, Artificial Sequence
  Description of Artificial Sequence: Synthetic peptide
  Seed: AYERMCNILKGKFQT
AYERICNLLKGKSQT

SEQ ID NO: 52085 - protein, 15 aa, Artificial Sequence
  Description of Artificial Sequence: Synthetic peptide
  Seed: AYERMCNILKGKFQT
AYERICNLLKGKTQT

SEQ ID NO: 52086 - protein, 15 aa, Artificial Sequence
  Description of Artificial Sequence: Synthetic peptide
  Seed: AYERMCNILKGKFQT
AYERICNLLRGKAQT

SEQ ID NO: 52087 - protein, 15 aa, Artificial Sequence
  Description of Artificial Sequence: Synthetic peptide
  Seed: AYERMCNILKGKFQT
AYERICNLLRGKGQT

SEQ ID NO: 52088 - protein, 15 aa, Artificial Sequence
  Description of Artificial Sequence: Synthetic peptide
  Seed: AYERMCNILKGKFQT
AYERICNLLRGKHQT

SEQ ID NO: 52089 - protein, 15 aa, Artificial Sequence
  Description of Artificial Sequence: Synthetic peptide
  Seed: AYERMCNILKGKFQT
AYERICNLLRGKIQT

SEQ ID NO: 52090 - protein, 15 aa, Artificial Sequence
  Description of Artificial Sequence: Synthetic peptide
  Seed: AYERMCNILKGKFQT
AYERICNLLRGKMQT

SEQ ID NO: 52091 - protein, 15 aa, Artificial Sequence
  Description of Artificial Sequence: Synthetic peptide
  Seed: AYERMCNILKGKFQT
AYERICNLLRGKQQT

SEQ ID NO: 52092 - protein, 15 aa, Artificial Sequence
  Description of Artificial Sequence: Synthetic peptide
  Seed: AYERMCNILKGKFQT
AYERICNLLRGKSQT

SEQ ID NO: 52093 - protein, 15 aa, Artificial Sequence
  Description of Artificial Sequence: Synthetic peptide
  Seed: AYERMCNILKGKFQT
AYERICNLLRGKTQT

SEQ ID NO: 52094 - protein, 15 aa, Artificial Sequence
  Description of Artificial Sequence: Synthetic peptide
  Seed: AYERMCNILKGKFQT
AYERICNLLRGKVQT

SEQ ID NO: 52095 - protein, 15 aa, Artificial Sequence
  Description of Artificial Sequence: Synthetic peptide
  Seed: AYERMCNILKGKFQT
AYERICNMLKGKAQT

SEQ ID NO: 52096 - protein, 15 aa, Artificial Sequence
  Description of Artificial Sequence: Synthetic peptide
  Seed: AYERMCNILKGKFQT
AYERICNMLKGKGQT

SEQ ID NO: 52097 - protein, 15 aa, Artificial Sequence
  Description of Artificial Sequence: Synthetic peptide
  Seed: AYERMCNILKGKFQT
AYERICNMLKGKMQT

SEQ ID NO: 52098 - protein, 15 aa, Artificial Sequence
  Description of Artificial Sequence: Synthetic peptide
  Seed: AYERMCNILKGKFQT
AYERICNMLKGKQQT

SEQ ID NO: 52099 - protein, 15 aa, Artificial Sequence
  Description of Artificial Sequence: Synthetic peptide
  Seed: AYERMCNILKGKFQT
AYERICNMLKGKSQT

SEQ ID NO: 52100 - protein, 15 aa, Artificial Sequence
  Description of Artificial Sequence: Synthetic peptide
  Seed: AYERMCNILKGKFQT
AYERICNMLKGKTQT

SEQ ID NO: 52101 - protein, 15 aa, Artificial Sequence
  Description of Artificial Sequence: Synthetic peptide
  Seed: AYERMCNILKGKFQT
AYERICNMLKGKVQT

SEQ ID NO: 52102 - protein, 15 aa, Artificial Sequence
  Description of Artificial Sequence: Synthetic peptide
  Seed: AYERMCNILKGKFQT
AYERICNMLRGKAQT

SEQ ID NO: 52103 - protein, 15 aa, Artificial Sequence
  Description of Artificial Sequence: Synthetic peptide
  Seed: AYERMCNILKGKFQT
AYERICNMLRGKGQT

SEQ ID NO: 52104 - protein, 15 aa, Artificial Sequence
  Description of Artificial Sequence: Synthetic peptide
  Seed: AYERMCNILKGKFQT
AYERICNMLRGKHQT

SEQ ID NO: 52105 - protein, 15 aa, Artificial Sequence
  Description of Artificial Sequence: Synthetic peptide
  Seed: AYERMCNILKGKFQT
AYERICNMLRGKIQT

SEQ ID NO: 52106 - protein, 15 aa, Artificial Sequence
  Description of Artificial Sequence: Synthetic peptide
  Seed: AYERMCNILKGKFQT
AYERICNMLRGKLQT

SEQ ID NO: 52107 - protein, 15 aa, Artificial Sequence
  Description of Artificial Sequence: Synthetic peptide
  Seed: AYERMCNILKGKFQT
AYERICNMLRGKMQT

SEQ ID NO: 52108 - protein, 15 aa, Artificial Sequence
  Description of Artificial Sequence: Synthetic peptide
  Seed: AYERMCNILKGKFQT
AYERICNMLRGKQQT

SEQ ID NO: 52109 - protein, 15 aa, Artificial Sequence
  Description of Artificial Sequence: Synthetic peptide
  Seed: AYERMCNILKGKFQT
AYERICNMLRGKRQT

SEQ ID NO: 52110 - protein, 15 aa, Artificial Sequence
  Description of Artificial Sequence: Synthetic peptide
  Seed: AYERMCNILKGKFQT
AYERICNMLRGKSQT

SEQ ID NO: 52111 - protein, 15 aa, Artificial Sequence
  Description of Artificial Sequence: Synthetic peptide
  Seed: AYERMCNILKGKFQT
AYERICNMLRGKTQT

SEQ ID NO: 52112 - protein, 15 aa, Artificial Sequence
  Description of Artificial Sequence: Synthetic peptide
  Seed: AYERMCNILKGKFQT
AYERICNMLRGKVQT

SEQ ID NO: 52113 - protein, 15 aa, Artificial Sequence
  Description of Artificial Sequence: Synthetic peptide
  Seed: AYERMCNILKGKFQT
AYERICNVLKGKAQT

SEQ ID NO: 52114 - protein, 15 aa, Artificial Sequence
  Description of Artificial Sequence: Synthetic peptide
  Seed: AYERMCNILKGKFQT
AYERICNVLKGKSQT

SEQ ID NO: 52115 - protein, 15 aa, Artificial Sequence
  Description of Artificial Sequence: Synthetic peptide
  Seed: AYERMCNILKGKFQT
AYERICNVLRGKAQT

SEQ ID NO: 52116 - protein, 15 aa, Artificial Sequence
  Description of Artificial Sequence: Synthetic peptide
  Seed: AYERMCNILKGKFQT
AYERICNVLRGKGQT

SEQ ID NO: 52117 - protein, 15 aa, Artificial Sequence
  Description of Artificial Sequence: Synthetic peptide
  Seed: AYERMCNILKGKFQT
AYERICNVLRGKQQT

SEQ ID NO: 52118 - protein, 15 aa, Artificial Sequence
  Description of Artificial Sequence: Synthetic peptide
  Seed: AYERMCNILKGKFQT
AYERICNVLRGKSQT

SEQ ID NO: 52119 - protein, 15 aa, Artificial Sequence
  Description of Artificial Sequence: Synthetic peptide
  Seed: AYERMCNILKGKFQT
AYERICNVLRGKTQT

SEQ ID NO: 52120 - protein, 15 aa, Artificial Sequence
  Description of Artificial Sequence: Synthetic peptide
  Seed: AYERMCNILKGKFQT
AYERLCNILAGKFQT

SEQ ID NO: 52121 - protein, 15 aa, Artificial Sequence
  Description of Artificial Sequence: Synthetic peptide
  Seed: AYERMCNILKGKFQT
AYERLCNILKGKAQT

SEQ ID NO: 52122 - protein, 15 aa, Artificial Sequence
  Description of Artificial Sequence: Synthetic peptide
  Seed: AYERMCNILKGKFQT
AYERLCNILKGKSQT

SEQ ID NO: 52123 - protein, 15 aa, Artificial Sequence
  Description of Artificial Sequence: Synthetic peptide
  Seed: AYERMCNILKGKFQT
AYERLCNILRGKAQT

SEQ ID NO: 52124 - protein, 15 aa, Artificial Sequence
  Description of Artificial Sequence: Synthetic peptide
  Seed: AYERMCNILKGKFQT
AYERLCNILRGKGQT

SEQ ID NO: 52125 - protein, 15 aa, Artificial Sequence
  Description of Artificial Sequence: Synthetic peptide
  Seed: AYERMCNILKGKFQT
AYERLCNILRGKQQT

SEQ ID NO: 52126 - protein, 15 aa, Artificial Sequence
  Description of Artificial Sequence: Synthetic peptide
  Seed: AYERMCNILKGKFQT
AYERLCNILRGKSQT

SEQ ID NO: 52127 - protein, 15 aa, Artificial Sequence
  Description of Artificial Sequence: Synthetic peptide
  Seed: AYERMCNILKGKFQT
AYERLCNILRGKTQT

SEQ ID NO: 52128 - protein, 15 aa, Artificial Sequence
  Description of Artificial Sequence: Synthetic peptide
  Seed: AYERMCNILKGKFQT
AYERLCNILVGKFQT

SEQ ID NO: 52129 - protein, 15 aa, Artificial Sequence
  Description of Artificial Sequence: Synthetic peptide
  Seed: AYERMCNILKGKFQT
AYERLCNLLKGKAQT

SEQ ID NO: 52130 - protein, 15 aa, Artificial Sequence
  Description of Artificial Sequence: Synthetic peptide
  Seed: AYERMCNILKGKFQT
AYERLCNLLKGKSQT

SEQ ID NO: 52131 - protein, 15 aa, Artificial Sequence
  Description of Artificial Sequence: Synthetic peptide
  Seed: AYERMCNILKGKFQT
AYERLCNLLRGKAQT

SEQ ID NO: 52132 - protein, 15 aa, Artificial Sequence
  Description of Artificial Sequence: Synthetic peptide
  Seed: AYERMCNILKGKFQT
AYERLCNLLRGKGQT

SEQ ID NO: 52133 - protein, 15 aa, Artificial Sequence
  Description of Artificial Sequence: Synthetic peptide
  Seed: AYERMCNILKGKFQT
AYERLCNLLRGKQQT

SEQ ID NO: 52134 - protein, 15 aa, Artificial Sequence
  Description of Artificial Sequence: Synthetic peptide
  Seed: AYERMCNILKGKFQT
AYERLCNLLRGKSQT

SEQ ID NO: 52135 - protein, 15 aa, Artificial Sequence
  Description of Artificial Sequence: Synthetic peptide
  Seed: AYERMCNILKGKFQT
AYERLCNLLRGKTQT

SEQ ID NO: 52136 - protein, 15 aa, Artificial Sequence
  Description of Artificial Sequence: Synthetic peptide
  Seed: AYERMCNILKGKFQT
AYERLCNMLKGKAQT

SEQ ID NO: 52137 - protein, 15 aa, Artificial Sequence
  Description of Artificial Sequence: Synthetic peptide
  Seed: AYERMCNILKGKFQT
AYERLCNMLKGKSQT

SEQ ID NO: 52138 - protein, 15 aa, Artificial Sequence
  Description of Artificial Sequence: Synthetic peptide
  Seed: AYERMCNILKGKFQT
AYERLCNMLRGKAQT

SEQ ID NO: 52139 - protein, 15 aa, Artificial Sequence
  Description of Artificial Sequence: Synthetic peptide
  Seed: AYERMCNILKGKFQT
AYERLCNMLRGKGQT

SEQ ID NO: 52140 - protein, 15 aa, Artificial Sequence
  Description of Artificial Sequence: Synthetic peptide
  Seed: AYERMCNILKGKFQT
AYERLCNMLRGKMQT

SEQ ID NO: 52141 - protein, 15 aa, Artificial Sequence
  Description of Artificial Sequence: Synthetic peptide
  Seed: AYERMCNILKGKFQT
AYERLCNMLRGKQQT

SEQ ID NO: 52142 - protein, 15 aa, Artificial Sequence
  Description of Artificial Sequence: Synthetic peptide
  Seed: AYERMCNILKGKFQT
AYERLCNMLRGKSQT

SEQ ID NO: 52143 - protein, 15 aa, Artificial Sequence
  Description of Artificial Sequence: Synthetic peptide
  Seed: AYERMCNILKGKFQT
AYERLCNMLRGKTQT

SEQ ID NO: 52144 - protein, 15 aa, Artificial Sequence
  Description of Artificial Sequence: Synthetic peptide
  Seed: AYERMCNILKGKFQT
AYERLCNMLRGKVQT

SEQ ID NO: 52145 - protein, 15 aa, Artificial Sequence
  Description of Artificial Sequence: Synthetic peptide
  Seed: AYERMCNILKGKFQT
AYERLCNVLKGKAQT

SEQ ID NO: 52146 - protein, 15 aa, Artificial Sequence
  Description of Artificial Sequence: Synthetic peptide
  Seed: AYERMCNILKGKFQT
AYERLCNVLRGKAQT

SEQ ID NO: 52147 - protein, 15 aa, Artificial Sequence
  Description of Artificial Sequence: Synthetic peptide
  Seed: AYERMCNILKGKFQT
AYERLCNVLRGKGQT

SEQ ID NO: 52148 - protein, 15 aa, Artificial Sequence
  Description of Artificial Sequence: Synthetic peptide
  Seed: AYERMCNILKGKFQT
AYERLCNVLRGKSQT

SEQ ID NO: 52149 - protein, 15 aa, Artificial Sequence
  Description of Artificial Sequence: Synthetic peptide
  Seed: AYERMCNILKGKFQT
AYERMCNILAGKFQT

SEQ ID NO: 52150 - protein, 15 aa, Artificial Sequence
  Description of Artificial Sequence: Synthetic peptide
  Seed: AYERMCNILKGKFQT
AYERMCNILLGKFQT

SEQ ID NO: 52151 - protein, 15 aa, Artificial Sequence
  Description of Artificial Sequence: Synthetic peptide
  Seed: AYERMCNILKGKFQT
AYERMCNILRGKAQT

SEQ ID NO: 52152 - protein, 15 aa, Artificial Sequence
  Description of Artificial Sequence: Synthetic peptide
  Seed: AYERMCNILKGKFQT
AYERMCNILRGKSQT

SEQ ID NO: 52153 - protein, 15 aa, Artificial Sequence
  Description of Artificial Sequence: Synthetic peptide
  Seed: AYERMCNILKGKFQT
AYERMCNILVGKFQT

SEQ ID NO: 52154 - protein, 15 aa, Artificial Sequence
  Description of Artificial Sequence: Synthetic peptide
  Seed: AYERMCNILKGKFQT
AYERMCNLLRGKAQT

SEQ ID NO: 52155 - protein, 15 aa, Artificial Sequence
  Description of Artificial Sequence: Synthetic peptide
  Seed: AYERMCNILKGKFQT
AYERMCNLLRGKSQT

SEQ ID NO: 52156 - protein, 15 aa, Artificial Sequence
  Description of Artificial Sequence: Synthetic peptide
  Seed: AYERMCNILKGKFQT
AYERMCNMLRGKAQT

SEQ ID NO: 52157 - protein, 15 aa, Artificial Sequence
  Description of Artificial Sequence: Synthetic peptide
  Seed: AYERMCNILKGKFQT
AYERMCNMLRGKSQT

SEQ ID NO: 52158 - protein, 15 aa, Artificial Sequence
  Description of Artificial Sequence: Synthetic peptide
  Seed: AYERMCNILKGKFQT
AYERVCNILKGKAQT

SEQ ID NO: 52159 - protein, 15 aa, Artificial Sequence
  Description of Artificial Sequence: Synthetic peptide
  Seed: AYERMCNILKGKFQT
AYERVCNILRGKAQT

SEQ ID NO: 52160 - protein, 15 aa, Artificial Sequence
  Description of Artificial Sequence: Synthetic peptide
  Seed: AYERMCNILKGKFQT
AYERVCNILRGKSQT

SEQ ID NO: 52161 - protein, 15 aa, Artificial Sequence
  Description of Artificial Sequence: Synthetic peptide
  Seed: AYERMCNILKGKFQT
AYERVCNLLKGKAQT

SEQ ID NO: 52162 - protein, 15 aa, Artificial Sequence
  Description of Artificial Sequence: Synthetic peptide
  Seed: AYERMCNILKGKFQT
AYERVCNLLRGKAQT

SEQ ID NO: 52163 - protein, 15 aa, Artificial Sequence
  Description of Artificial Sequence: Synthetic peptide
  Seed: AYERMCNILKGKFQT
AYERVCNLLRGKSQT

SEQ ID NO: 52164 - protein, 15 aa, Artificial Sequence
  Description of Artificial Sequence: Synthetic peptide
  Seed: AYERMCNILKGKFQT
AYERVCNMLKGKAQT

SEQ ID NO: 52165 - protein, 15 aa, Artificial Sequence
  Description of Artificial Sequence: Synthetic peptide
  Seed: AYERMCNILKGKFQT
AYERVCNMLRGKAQT

SEQ ID NO: 52166 - protein, 15 aa, Artificial Sequence
  Description of Artificial Sequence: Synthetic peptide
  Seed: AYERMCNILKGKFQT
AYERVCNMLRGKSQT

SEQ ID NO: 52167 - protein, 15 aa, Artificial Sequence
  Description of Artificial Sequence: Synthetic peptide
  Seed: AYERMCNILKGKFQT
AYERVCNVLRGKAQT

SEQ ID NO: 52168 - protein, 15 aa, Artificial Sequence
  Description of Artificial Sequence: Synthetic peptide
  Seed: AYERMCNILKGKFQT
AFERACAILAGKFQT

SEQ ID NO: 52169 - protein, 15 aa, Artificial Sequence
  Description of Artificial Sequence: Synthetic peptide
  Seed: AYERMCNILKGKFQT
AFERACAILGGKFQT

SEQ ID NO: 52170 - protein, 15 aa, Artificial Sequence
  Description of Artificial Sequence: Synthetic peptide
  Seed: AYERMCNILKGKFQT
AFERACAILIGKFQT

SEQ ID NO: 52171 - protein, 15 aa, Artificial Sequence
  Description of Artificial Sequence: Synthetic peptide
  Seed: AYERMCNILKGKFQT
AFERACAILLGKFQT

SEQ ID NO: 52172 - protein, 15 aa, Artificial Sequence
  Description of Artificial Sequence: Synthetic peptide
  Seed: AYERMCNILKGKFQT
AFERACAILMGKFQT

SEQ ID NO: 52173 - protein, 15 aa, Artificial Sequence
  Description of Artificial Sequence: Synthetic peptide
  Seed: AYERMCNILKGKFQT
AFERACAILNGKFQT

SEQ ID NO: 52174 - protein, 15 aa, Artificial Sequence
  Description of Artificial Sequence: Synthetic peptide
  Seed: AYERMCNILKGKFQT
AFERACAILSGKFQT

SEQ ID NO: 52175 - protein, 15 aa, Artificial Sequence
  Description of Artificial Sequence: Synthetic peptide
  Seed: AYERMCNILKGKFQT
AFERACAILTGKFQT

SEQ ID NO: 52176 - protein, 15 aa, Artificial Sequence
  Description of Artificial Sequence: Synthetic peptide
  Seed: AYERMCNILKGKFQT
AFERACAILVGKFQT

SEQ ID NO: 52177 - protein, 15 aa, Artificial Sequence
  Description of Artificial Sequence: Synthetic peptide
  Seed: AYERMCNILKGKFQT
AFERACGILAGKFQT

SEQ ID NO: 52178 - protein, 15 aa, Artificial Sequence
  Description of Artificial Sequence: Synthetic peptide
  Seed: AYERMCNILKGKFQT
AFERACGILIGKFQT

SEQ ID NO: 52179 - protein, 15 aa, Artificial Sequence
  Description of Artificial Sequence: Synthetic peptide
  Seed: AYERMCNILKGKFQT
AFERACGILLGKFQT

SEQ ID NO: 52180 - protein, 15 aa, Artificial Sequence
  Description of Artificial Sequence: Synthetic peptide
  Seed: AYERMCNILKGKFQT
AFERACGILMGKFQT

SEQ ID NO: 52181 - protein, 15 aa, Artificial Sequence
  Description of Artificial Sequence: Synthetic peptide
  Seed: AYERMCNILKGKFQT
AFERACGILSGKFQT

SEQ ID NO: 52182 - protein, 15 aa, Artificial Sequence
  Description of Artificial Sequence: Synthetic peptide
  Seed: AYERMCNILKGKFQT
AFERACGILVGKFQT

SEQ ID NO: 52183 - protein, 15 aa, Artificial Sequence
  Description of Artificial Sequence: Synthetic peptide
  Seed: AYERMCNILKGKFQT
AFERACPILAGKFQT

SEQ ID NO: 52184 - protein, 15 aa, Artificial Sequence
  Description of Artificial Sequence: Synthetic peptide
  Seed: AYERMCNILKGKFQT
AFERACPILIGKFQT

SEQ ID NO: 52185 - protein, 15 aa, Artificial Sequence
  Description of Artificial Sequence: Synthetic peptide
  Seed: AYERMCNILKGKFQT
AFERACPILLGKFQT

SEQ ID NO: 52186 - protein, 15 aa, Artificial Sequence
  Description of Artificial Sequence: Synthetic peptide
  Seed: AYERMCNILKGKFQT
AFERACPILMGKFQT

SEQ ID NO: 52187 - protein, 15 aa, Artificial Sequence
  Description of Artificial Sequence: Synthetic peptide
  Seed: AYERMCNILKGKFQT
AFERACPILVGKFQT

SEQ ID NO: 52188 - protein, 15 aa, Artificial Sequence
  Description of Artificial Sequence: Synthetic peptide
  Seed: AYERMCNILKGKFQT
AFERACSILAGKFQT

SEQ ID NO: 52189 - protein, 15 aa, Artificial Sequence
  Description of Artificial Sequence: Synthetic peptide
  Seed: AYERMCNILKGKFQT
AFERACSILIGKFQT

SEQ ID NO: 52190 - protein, 15 aa, Artificial Sequence
  Description of Artificial Sequence: Synthetic peptide
  Seed: AYERMCNILKGKFQT
AFERACSILLGKFQT

SEQ ID NO: 52191 - protein, 15 aa, Artificial Sequence
  Description of Artificial Sequence: Synthetic peptide
  Seed: AYERMCNILKGKFQT
AFERACSILVGKFQT

SEQ ID NO: 52192 - protein, 15 aa, Artificial Sequence
  Description of Artificial Sequence: Synthetic peptide
  Seed: AYERMCNILKGKFQT
AFERECAILAGKFQT

SEQ ID NO: 52193 - protein, 15 aa, Artificial Sequence
  Description of Artificial Sequence: Synthetic peptide
  Seed: AYERMCNILKGKFQT
AFERECAILVGKFQT

SEQ ID NO: 52194 - protein, 15 aa, Artificial Sequence
  Description of Artificial Sequence: Synthetic peptide
  Seed: AYERMCNILKGKFQT
AFERGCAILAGKFQT

SEQ ID NO: 52195 - protein, 15 aa, Artificial Sequence
  Description of Artificial Sequence: Synthetic peptide
  Seed: AYERMCNILKGKFQT
AFERGCAILIGKFQT

SEQ ID NO: 52196 - protein, 15 aa, Artificial Sequence
  Description of Artificial Sequence: Synthetic peptide
  Seed: AYERMCNILKGKFQT
AFERGCAILLGKFQT

SEQ ID NO: 52197 - protein, 15 aa, Artificial Sequence
  Description of Artificial Sequence: Synthetic peptide
  Seed: AYERMCNILKGKFQT
AFERGCAILVGKFQT

SEQ ID NO: 52198 - protein, 15 aa, Artificial Sequence
  Description of Artificial Sequence: Synthetic peptide
  Seed: AYERMCNILKGKFQT
AFERICAILAGKFQT

SEQ ID NO: 52199 - protein, 15 aa, Artificial Sequence
  Description of Artificial Sequence: Synthetic peptide
  Seed: AYERMCNILKGKFQT
AFERICAILIGKFQT

SEQ ID NO: 52200 - protein, 15 aa, Artificial Sequence
  Description of Artificial Sequence: Synthetic peptide
  Seed: AYERMCNILKGKFQT
AFERICAILLGKFQT

SEQ ID NO: 52201 - protein, 15 aa, Artificial Sequence
  Description of Artificial Sequence: Synthetic peptide
  Seed: AYERMCNILKGKFQT
AFERICAILSGKFQT

SEQ ID NO: 52202 - protein, 15 aa, Artificial Sequence
  Description of Artificial Sequence: Synthetic peptide
  Seed: AYERMCNILKGKFQT
AFERICAILTGKFQT

SEQ ID NO: 52203 - protein, 15 aa, Artificial Sequence
  Description of Artificial Sequence: Synthetic peptide
  Seed: AYERMCNILKGKFQT
AFERICAILVGKFQT

SEQ ID NO: 52204 - protein, 15 aa, Artificial Sequence
  Description of Artificial Sequence: Synthetic peptide
  Seed: AYERMCNILKGKFQT
AFERICGILAGKFQT

SEQ ID NO: 52205 - protein, 15 aa, Artificial Sequence
  Description of Artificial Sequence: Synthetic peptide
  Seed: AYERMCNILKGKFQT
AFERICGILLGKFQT

SEQ ID NO: 52206 - protein, 15 aa, Artificial Sequence
  Description of Artificial Sequence: Synthetic peptide
  Seed: AYERMCNILKGKFQT
AFERICGILVGKFQT

SEQ ID NO: 52207 - protein, 15 aa, Artificial Sequence
  Description of Artificial Sequence: Synthetic peptide
  Seed: AYERMCNILKGKFQT
AFERICPILAGKFQT

SEQ ID NO: 52208 - protein, 15 aa, Artificial Sequence
  Description of Artificial Sequence: Synthetic peptide
  Seed: AYERMCNILKGKFQT
AFERICPILIGKFQT

SEQ ID NO: 52209 - protein, 15 aa, Artificial Sequence
  Description of Artificial Sequence: Synthetic peptide
  Seed: AYERMCNILKGKFQT
AFERICPILLGKFQT

SEQ ID NO: 52210 - protein, 15 aa, Artificial Sequence
  Description of Artificial Sequence: Synthetic peptide
  Seed: AYERMCNILKGKFQT
AFERICPILNGKFQT

SEQ ID NO: 52211 - protein, 15 aa, Artificial Sequence
  Description of Artificial Sequence: Synthetic peptide
  Seed: AYERMCNILKGKFQT
AFERICPILVGKFQT

SEQ ID NO: 52212 - protein, 15 aa, Artificial Sequence
  Description of Artificial Sequence: Synthetic peptide
  Seed: AYERMCNILKGKFQT
AFERICSILAGKFQT

SEQ ID NO: 52213 - protein, 15 aa, Artificial Sequence
  Description of Artificial Sequence: Synthetic peptide
  Seed: AYERMCNILKGKFQT
AFERLCAILAGKFQT

SEQ ID NO: 52214 - protein, 15 aa, Artificial Sequence
  Description of Artificial Sequence: Synthetic peptide
  Seed: AYERMCNILKGKFQT
AFERLCAILGGKFQT

SEQ ID NO: 52215 - protein, 15 aa, Artificial Sequence
  Description of Artificial Sequence: Synthetic peptide
  Seed: AYERMCNILKGKFQT
AFERLCAILIGKFQT

SEQ ID NO: 52216 - protein, 15 aa, Artificial Sequence
  Description of Artificial Sequence: Synthetic peptide
  Seed: AYERMCNILKGKFQT
AFERLCAILLGKFQT

SEQ ID NO: 52217 - protein, 15 aa, Artificial Sequence
  Description of Artificial Sequence: Synthetic peptide
  Seed: AYERMCNILKGKFQT
AFERLCAILMGKFQT

SEQ ID NO: 52218 - protein, 15 aa, Artificial Sequence
  Description of Artificial Sequence: Synthetic peptide
  Seed: AYERMCNILKGKFQT
AFERLCAILNGKFQT

SEQ ID NO: 52219 - protein, 15 aa, Artificial Sequence
  Description of Artificial Sequence: Synthetic peptide
  Seed: AYERMCNILKGKFQT
AFERLCAILSGKFQT

SEQ ID NO: 52220 - protein, 15 aa, Artificial Sequence
  Description of Artificial Sequence: Synthetic peptide
  Seed: AYERMCNILKGKFQT
AFERLCAILTGKFQT

SEQ ID NO: 52221 - protein, 15 aa, Artificial Sequence
  Description of Artificial Sequence: Synthetic peptide
  Seed: AYERMCNILKGKFQT
AFERLCAILVGKFQT

SEQ ID NO: 52222 - protein, 15 aa, Artificial Sequence
  Description of Artificial Sequence: Synthetic peptide
  Seed: AYERMCNILKGKFQT
AFERLCGILAGKFQT

SEQ ID NO: 52223 - protein, 15 aa, Artificial Sequence
  Description of Artificial Sequence: Synthetic peptide
  Seed: AYERMCNILKGKFQT
AFERLCGILGGKFQT

SEQ ID NO: 52224 - protein, 15 aa, Artificial Sequence
  Description of Artificial Sequence: Synthetic peptide
  Seed: AYERMCNILKGKFQT
AFERLCGILIGKFQT

SEQ ID NO: 52225 - protein, 15 aa, Artificial Sequence
  Description of Artificial Sequence: Synthetic peptide
  Seed: AYERMCNILKGKFQT
AFERLCGILLGKFQT

SEQ ID NO: 52226 - protein, 15 aa, Artificial Sequence
  Description of Artificial Sequence: Synthetic peptide
  Seed: AYERMCNILKGKFQT
AFERLCGILMGKFQT

SEQ ID NO: 52227 - protein, 15 aa, Artificial Sequence
  Description of Artificial Sequence: Synthetic peptide
  Seed: AYERMCNILKGKFQT
AFERLCGILSGKFQT

SEQ ID NO: 52228 - protein, 15 aa, Artificial Sequence
  Description of Artificial Sequence: Synthetic peptide
  Seed: AYERMCNILKGKFQT
AFERLCGILTGKFQT

SEQ ID NO: 52229 - protein, 15 aa, Artificial Sequence
  Description of Artificial Sequence: Synthetic peptide
  Seed: AYERMCNILKGKFQT
AFERLCGILVGKFQT

SEQ ID NO: 52230 - protein, 15 aa, Artificial Sequence
  Description of Artificial Sequence: Synthetic peptide
  Seed: AYERMCNILKGKFQT
AFERLCNILAGKFQT

SEQ ID NO: 52231 - protein, 15 aa, Artificial Sequence
  Description of Artificial Sequence: Synthetic peptide
  Seed: AYERMCNILKGKFQT
AFERLCNILVGKFQT

SEQ ID NO: 52232 - protein, 15 aa, Artificial Sequence
  Description of Artificial Sequence: Synthetic peptide
  Seed: AYERMCNILKGKFQT
AFERLCPILAGKFQT

SEQ ID NO: 52233 - protein, 15 aa, Artificial Sequence
  Description of Artificial Sequence: Synthetic peptide
  Seed: AYERMCNILKGKFQT
AFERLCPILGGKFQT

SEQ ID NO: 52234 - protein, 15 aa, Artificial Sequence
  Description of Artificial Sequence: Synthetic peptide
  Seed: AYERMCNILKGKFQT
AFERLCPILIGKFQT

SEQ ID NO: 52235 - protein, 15 aa, Artificial Sequence
  Description of Artificial Sequence: Synthetic peptide
  Seed: AYERMCNILKGKFQT
AFERLCPILLGKFQT

SEQ ID NO: 52236 - protein, 15 aa, Artificial Sequence
  Description of Artificial Sequence: Synthetic peptide
  Seed: AYERMCNILKGKFQT
AFERLCPILMGKFQT

SEQ ID NO: 52237 - protein, 15 aa, Artificial Sequence
  Description of Artificial Sequence: Synthetic peptide
  Seed: AYERMCNILKGKFQT
AFERLCPILNGKFQT

SEQ ID NO: 52238 - protein, 15 aa, Artificial Sequence
  Description of Artificial Sequence: Synthetic peptide
  Seed: AYERMCNILKGKFQT
AFERLCPILSGKFQT

SEQ ID NO: 52239 - protein, 15 aa, Artificial Sequence
  Description of Artificial Sequence: Synthetic peptide
  Seed: AYERMCNILKGKFQT
AFERLCPILTGKFQT

SEQ ID NO: 52240 - protein, 15 aa, Artificial Sequence
  Description of Artificial Sequence: Synthetic peptide
  Seed: AYERMCNILKGKFQT
AFERLCPILVGKFQT

SEQ ID NO: 52241 - protein, 15 aa, Artificial Sequence
  Description of Artificial Sequence: Synthetic peptide
  Seed: AYERMCNILKGKFQT
AFERLCSILAGKFQT

SEQ ID NO: 52242 - protein, 15 aa, Artificial Sequence
  Description of Artificial Sequence: Synthetic peptide
  Seed: AYERMCNILKGKFQT
AFERLCSILGGKFQT

SEQ ID NO: 52243 - protein, 15 aa, Artificial Sequence
  Description of Artificial Sequence: Synthetic peptide
  Seed: AYERMCNILKGKFQT
AFERLCSILIGKFQT

SEQ ID NO: 52244 - protein, 15 aa, Artificial Sequence
  Description of Artificial Sequence: Synthetic peptide
  Seed: AYERMCNILKGKFQT
AFERLCSILLGKFQT

SEQ ID NO: 52245 - protein, 15 aa, Artificial Sequence
  Description of Artificial Sequence: Synthetic peptide
  Seed: AYERMCNILKGKFQT
AFERLCSILNGKFQT

SEQ ID NO: 52246 - protein, 15 aa, Artificial Sequence
  Description of Artificial Sequence: Synthetic peptide
  Seed: AYERMCNILKGKFQT
AFERLCSILSGKFQT

SEQ ID NO: 52247 - protein, 15 aa, Artificial Sequence
  Description of Artificial Sequence: Synthetic peptide
  Seed: AYERMCNILKGKFQT
AFERLCSILTGKFQT

SEQ ID NO: 52248 - protein, 15 aa, Artificial Sequence
  Description of Artificial Sequence: Synthetic peptide
  Seed: AYERMCNILKGKFQT
AFERLCSILVGKFQT

SEQ ID NO: 52249 - protein, 15 aa, Artificial Sequence
  Description of Artificial Sequence: Synthetic peptide
  Seed: AYERMCNILKGKFQT
AFERLCTILAGKFQT

SEQ ID NO: 52250 - protein, 15 aa, Artificial Sequence
  Description of Artificial Sequence: Synthetic peptide
  Seed: AYERMCNILKGKFQT
AFERLCTILNGKFQT

SEQ ID NO: 52251 - protein, 15 aa, Artificial Sequence
  Description of Artificial Sequence: Synthetic peptide
  Seed: AYERMCNILKGKFQT
AFERLCTILVGKFQT

SEQ ID NO: 52252 - protein, 15 aa, Artificial Sequence
  Description of Artificial Sequence: Synthetic peptide
  Seed: AYERMCNILKGKFQT
AFERMCAILAGKFQT

SEQ ID NO: 52253 - protein, 15 aa, Artificial Sequence
  Description of Artificial Sequence: Synthetic peptide
  Seed: AYERMCNILKGKFQT
AFERMCAILGGKFQT

SEQ ID NO: 52254 - protein, 15 aa, Artificial Sequence
  Description of Artificial Sequence: Synthetic peptide
  Seed: AYERMCNILKGKFQT
AFERMCAILIGKFQT

SEQ ID NO: 52255 - protein, 15 aa, Artificial Sequence
  Description of Artificial Sequence: Synthetic peptide
  Seed: AYERMCNILKGKFQT
AFERMCAILLGKFQT

SEQ ID NO: 52256 - protein, 15 aa, Artificial Sequence
  Description of Artificial Sequence: Synthetic peptide
  Seed: AYERMCNILKGKFQT
AFERMCAILMGKFQT

SEQ ID NO: 52257 - protein, 15 aa, Artificial Sequence
  Description of Artificial Sequence: Synthetic peptide
  Seed: AYERMCNILKGKFQT
AFERMCAILNGKFQT

SEQ ID NO: 52258 - protein, 15 aa, Artificial Sequence
  Description of Artificial Sequence: Synthetic peptide
  Seed: AYERMCNILKGKFQT
AFERMCAILSGKFQT

SEQ ID NO: 52259 - protein, 15 aa, Artificial Sequence
  Description of Artificial Sequence: Synthetic peptide
  Seed: AYERMCNILKGKFQT
AFERMCAILTGKFQT

SEQ ID NO: 52260 - protein, 15 aa, Artificial Sequence
  Description of Artificial Sequence: Synthetic peptide
  Seed: AYERMCNILKGKFQT
AFERMCAILVGKFQT

SEQ ID NO: 52261 - protein, 15 aa, Artificial Sequence
  Description of Artificial Sequence: Synthetic peptide
  Seed: AYERMCNILKGKFQT
AFERMCGILAGKFQT

SEQ ID NO: 52262 - protein, 15 aa, Artificial Sequence
  Description of Artificial Sequence: Synthetic peptide
  Seed: AYERMCNILKGKFQT
AFERMCGILGGKFQT

SEQ ID NO: 52263 - protein, 15 aa, Artificial Sequence
  Description of Artificial Sequence: Synthetic peptide
  Seed: AYERMCNILKGKFQT
AFERMCGILIGKFQT

SEQ ID NO: 52264 - protein, 15 aa, Artificial Sequence
  Description of Artificial Sequence: Synthetic peptide
  Seed: AYERMCNILKGKFQT
AFERMCGILLGKFQT

SEQ ID NO: 52265 - protein, 15 aa, Artificial Sequence
  Description of Artificial Sequence: Synthetic peptide
  Seed: AYERMCNILKGKFQT
AFERMCGILMGKFQT

SEQ ID NO: 52266 - protein, 15 aa, Artificial Sequence
  Description of Artificial Sequence: Synthetic peptide
  Seed: AYERMCNILKGKFQT
AFERMCGILSGKFQT

SEQ ID NO: 52267 - protein, 15 aa, Artificial Sequence
  Description of Artificial Sequence: Synthetic peptide
  Seed: AYERMCNILKGKFQT
AFERMCGILTGKFQT

SEQ ID NO: 52268 - protein, 15 aa, Artificial Sequence
  Description of Artificial Sequence: Synthetic peptide
  Seed: AYERMCNILKGKFQT
AFERMCGILVGKFQT

SEQ ID NO: 52269 - protein, 15 aa, Artificial Sequence
  Description of Artificial Sequence: Synthetic peptide
  Seed: AYERMCNILKGKFQT
AFERMCNILAGKFQT

SEQ ID NO: 52270 - protein, 15 aa, Artificial Sequence
  Description of Artificial Sequence: Synthetic peptide
  Seed: AYERMCNILKGKFQT
AFERMCNILLGKFQT

SEQ ID NO: 52271 - protein, 15 aa, Artificial Sequence
  Description of Artificial Sequence: Synthetic peptide
  Seed: AYERMCNILKGKFQT
AFERMCNILVGKFQT

SEQ ID NO: 52272 - protein, 15 aa, Artificial Sequence
  Description of Artificial Sequence: Synthetic peptide
  Seed: AYERMCNILKGKFQT
AFERMCPILAGKFQT

SEQ ID NO: 52273 - protein, 15 aa, Artificial Sequence
  Description of Artificial Sequence: Synthetic peptide
  Seed: AYERMCNILKGKFQT
AFERMCPILIGKFQT

SEQ ID NO: 52274 - protein, 15 aa, Artificial Sequence
  Description of Artificial Sequence: Synthetic peptide
  Seed: AYERMCNILKGKFQT
AFERMCPILLGKFQT

SEQ ID NO: 52275 - protein, 15 aa, Artificial Sequence
  Description of Artificial Sequence: Synthetic peptide
  Seed: AYERMCNILKGKFQT
AFERMCPILMGKFQT

SEQ ID NO: 52276 - protein, 15 aa, Artificial Sequence
  Description of Artificial Sequence: Synthetic peptide
  Seed: AYERMCNILKGKFQT
AFERMCPILNGKFQT

SEQ ID NO: 52277 - protein, 15 aa, Artificial Sequence
  Description of Artificial Sequence: Synthetic peptide
  Seed: AYERMCNILKGKFQT
AFERMCPILSGKFQT

SEQ ID NO: 52278 - protein, 15 aa, Artificial Sequence
  Description of Artificial Sequence: Synthetic peptide
  Seed: AYERMCNILKGKFQT
AFERMCPILTGKFQT

SEQ ID NO: 52279 - protein, 15 aa, Artificial Sequence
  Description of Artificial Sequence: Synthetic peptide
  Seed: AYERMCNILKGKFQT
AFERMCPILVGKFQT

SEQ ID NO: 52280 - protein, 15 aa, Artificial Sequence
  Description of Artificial Sequence: Synthetic peptide
  Seed: AYERMCNILKGKFQT
AFERMCSILAGKFQT

SEQ ID NO: 52281 - protein, 15 aa, Artificial Sequence
  Description of Artificial Sequence: Synthetic peptide
  Seed: AYERMCNILKGKFQT
AFERMCSILIGKFQT

SEQ ID NO: 52282 - protein, 15 aa, Artificial Sequence
  Description of Artificial Sequence: Synthetic peptide
  Seed: AYERMCNILKGKFQT
AFERMCSILLGKFQT

SEQ ID NO: 52283 - protein, 15 aa, Artificial Sequence
  Description of Artificial Sequence: Synthetic peptide
  Seed: AYERMCNILKGKFQT
AFERMCSILMGKFQT

SEQ ID NO: 52284 - protein, 15 aa, Artificial Sequence
  Description of Artificial Sequence: Synthetic peptide
  Seed: AYERMCNILKGKFQT
AFERMCSILNGKFQT

SEQ ID NO: 52285 - protein, 15 aa, Artificial Sequence
  Description of Artificial Sequence: Synthetic peptide
  Seed: AYERMCNILKGKFQT
AFERMCSILSGKFQT

SEQ ID NO: 52286 - protein, 15 aa, Artificial Sequence
  Description of Artificial Sequence: Synthetic peptide
  Seed: AYERMCNILKGKFQT
AFERMCSILTGKFQT

SEQ ID NO: 52287 - protein, 15 aa, Artificial Sequence
  Description of Artificial Sequence: Synthetic peptide
  Seed: AYERMCNILKGKFQT
AFERMCSILVGKFQT

SEQ ID NO: 52288 - protein, 15 aa, Artificial Sequence
  Description of Artificial Sequence: Synthetic peptide
  Seed: AYERMCNILKGKFQT
AFERMCTILAGKFQT

SEQ ID NO: 52289 - protein, 15 aa, Artificial Sequence
  Description of Artificial Sequence: Synthetic peptide
  Seed: AYERMCNILKGKFQT
AFERMCTILNGKFQT

SEQ ID NO: 52290 - protein, 15 aa, Artificial Sequence
  Description of Artificial Sequence: Synthetic peptide
  Seed: AYERMCNILKGKFQT
AFERMCTILVGKFQT

SEQ ID NO: 52291 - protein, 15 aa, Artificial Sequence
  Description of Artificial Sequence: Synthetic peptide
  Seed: AYERMCNILKGKFQT
AFERQCAILAGKFQT

SEQ ID NO: 52292 - protein, 15 aa, Artificial Sequence
  Description of Artificial Sequence: Synthetic peptide
  Seed: AYERMCNILKGKFQT
AFERQCAILIGKFQT

SEQ ID NO: 52293 - protein, 15 aa, Artificial Sequence
  Description of Artificial Sequence: Synthetic peptide
  Seed: AYERMCNILKGKFQT
AFERQCAILLGKFQT

SEQ ID NO: 52294 - protein, 15 aa, Artificial Sequence
  Description of Artificial Sequence: Synthetic peptide
  Seed: AYERMCNILKGKFQT
AFERQCAILVGKFQT

SEQ ID NO: 52295 - protein, 15 aa, Artificial Sequence
  Description of Artificial Sequence: Synthetic peptide
  Seed: AYERMCNILKGKFQT
AFERQCGILAGKFQT

SEQ ID NO: 52296 - protein, 15 aa, Artificial Sequence
  Description of Artificial Sequence: Synthetic peptide
  Seed: AYERMCNILKGKFQT
AFERQCGILIGKFQT

SEQ ID NO: 52297 - protein, 15 aa, Artificial Sequence
  Description of Artificial Sequence: Synthetic peptide
  Seed: AYERMCNILKGKFQT
AFERQCGILLGKFQT

SEQ ID NO: 52298 - protein, 15 aa, Artificial Sequence
  Description of Artificial Sequence: Synthetic peptide
  Seed: AYERMCNILKGKFQT
AFERQCGILVGKFQT

SEQ ID NO: 52299 - protein, 15 aa, Artificial Sequence
  Description of Artificial Sequence: Synthetic peptide
  Seed: AYERMCNILKGKFQT
AFERQCSILAGKFQT

SEQ ID NO: 52300 - protein, 15 aa, Artificial Sequence
  Description of Artificial Sequence: Synthetic peptide
  Seed: AYERMCNILKGKFQT
AFERQCSILVGKFQT

SEQ ID NO: 52301 - protein, 15 aa, Artificial Sequence
  Description of Artificial Sequence: Synthetic peptide
  Seed: AYERMCNILKGKFQT
AFERSCAILAGKFQT

SEQ ID NO: 52302 - protein, 15 aa, Artificial Sequence
  Description of Artificial Sequence: Synthetic peptide
  Seed: AYERMCNILKGKFQT
AFERSCAILIGKFQT

SEQ ID NO: 52303 - protein, 15 aa, Artificial Sequence
  Description of Artificial Sequence: Synthetic peptide
  Seed: AYERMCNILKGKFQT
AFERSCAILLGKFQT

SEQ ID NO: 52304 - protein, 15 aa, Artificial Sequence
  Description of Artificial Sequence: Synthetic peptide
  Seed: AYERMCNILKGKFQT
AFERSCAILVGKFQT

SEQ ID NO: 52305 - protein, 15 aa, Artificial Sequence
  Description of Artificial Sequence: Synthetic peptide
  Seed: AYERMCNILKGKFQT
AFERVCAILAGKFQT

SEQ ID NO: 52306 - protein, 15 aa, Artificial Sequence
  Description of Artificial Sequence: Synthetic peptide
  Seed: AYERMCNILKGKFQT
AWERLCAILAGKFQT

SEQ ID NO: 52307 - protein, 15 aa, Artificial Sequence
  Description of Artificial Sequence: Synthetic peptide
  Seed: AYERMCNILKGKFQT
AWERMCAILAGKFQT

SEQ ID NO: 52308 - protein, 15 aa, Artificial Sequence
  Description of Artificial Sequence: Synthetic peptide
  Seed: AYERMCNILKGKFQT
AWERMCGILAGKFQT

SEQ ID NO: 52309 - protein, 15 aa, Artificial Sequence
  Description of Artificial Sequence: Synthetic peptide
  Seed: AYERMCNILKGKFQT
AYERACAILAGKFQT

SEQ ID NO: 52310 - protein, 15 aa, Artificial Sequence
  Description of Artificial Sequence: Synthetic peptide
  Seed: AYERMCNILKGKFQT
AYERACAILGGKFQT

SEQ ID NO: 52311 - protein, 15 aa, Artificial Sequence
  Description of Artificial Sequence: Synthetic peptide
  Seed: AYERMCNILKGKFQT
AYERACAILIGKFQT

SEQ ID NO: 52312 - protein, 15 aa, Artificial Sequence
  Description of Artificial Sequence: Synthetic peptide
  Seed: AYERMCNILKGKFQT
AYERACAILLGKFQT

SEQ ID NO: 52313 - protein, 15 aa, Artificial Sequence
  Description of Artificial Sequence: Synthetic peptide
  Seed: AYERMCNILKGKFQT
AYERACAILMGKFQT

SEQ ID NO: 52314 - protein, 15 aa, Artificial Sequence
  Description of Artificial Sequence: Synthetic peptide
  Seed: AYERMCNILKGKFQT
AYERACAILSGKFQT

SEQ ID NO: 52315 - protein, 15 aa, Artificial Sequence
  Description of Artificial Sequence: Synthetic peptide
  Seed: AYERMCNILKGKFQT
AYERACAILTGKFQT

SEQ ID NO: 52316 - protein, 15 aa, Artificial Sequence
  Description of Artificial Sequence: Synthetic peptide
  Seed: AYERMCNILKGKFQT
AYERACAILVGKFQT

SEQ ID NO: 52317 - protein, 15 aa, Artificial Sequence
  Description of Artificial Sequence: Synthetic peptide
  Seed: AYERMCNILKGKFQT
AYERACGILAGKFQT

SEQ ID NO: 52318 - protein, 15 aa, Artificial Sequence
  Description of Artificial Sequence: Synthetic peptide
  Seed: AYERMCNILKGKFQT
AYERACGILIGKFQT

SEQ ID NO: 52319 - protein, 15 aa, Artificial Sequence
  Description of Artificial Sequence: Synthetic peptide
  Seed: AYERMCNILKGKFQT
AYERACGILLGKFQT

SEQ ID NO: 52320 - protein, 15 aa, Artificial Sequence
  Description of Artificial Sequence: Synthetic peptide
  Seed: AYERMCNILKGKFQT
AYERACGILMGKFQT

SEQ ID NO: 52321 - protein, 15 aa, Artificial Sequence
  Description of Artificial Sequence: Synthetic peptide
  Seed: AYERMCNILKGKFQT
AYERACGILVGKFQT

SEQ ID NO: 52322 - protein, 15 aa, Artificial Sequence
  Description of Artificial Sequence: Synthetic peptide
  Seed: AYERMCNILKGKFQT
AYERACPILAGKFQT

SEQ ID NO: 52323 - protein, 15 aa, Artificial Sequence
  Description of Artificial Sequence: Synthetic peptide
  Seed: AYERMCNILKGKFQT
AYERACPILIGKFQT

SEQ ID NO: 52324 - protein, 15 aa, Artificial Sequence
  Description of Artificial Sequence: Synthetic peptide
  Seed: AYERMCNILKGKFQT
AYERACPILLGKFQT

SEQ ID NO: 52325 - protein, 15 aa, Artificial Sequence
  Description of Artificial Sequence: Synthetic peptide
  Seed: AYERMCNILKGKFQT
AYERACPILMGKFQT

SEQ ID NO: 52326 - protein, 15 aa, Artificial Sequence
  Description of Artificial Sequence: Synthetic peptide
  Seed: AYERMCNILKGKFQT
AYERACPILVGKFQT

SEQ ID NO: 52327 - protein, 15 aa, Artificial Sequence
  Description of Artificial Sequence: Synthetic peptide
  Seed: AYERMCNILKGKFQT
AYERACSILAGKFQT

SEQ ID NO: 52328 - protein, 15 aa, Artificial Sequence
  Description of Artificial Sequence: Synthetic peptide
  Seed: AYERMCNILKGKFQT
AYERACSILIGKFQT

SEQ ID NO: 52329 - protein, 15 aa, Artificial Sequence
  Description of Artificial Sequence: Synthetic peptide
  Seed: AYERMCNILKGKFQT
AYERACSILLGKFQT

SEQ ID NO: 52330 - protein, 15 aa, Artificial Sequence
  Description of Artificial Sequence: Synthetic peptide
  Seed: AYERMCNILKGKFQT
AYERACSILSGKFQT

SEQ ID NO: 52331 - protein, 15 aa, Artificial Sequence
  Description of Artificial Sequence: Synthetic peptide
  Seed: AYERMCNILKGKFQT
AYERACSILVGKFQT

SEQ ID NO: 52332 - protein, 15 aa, Artificial Sequence
  Description of Artificial Sequence: Synthetic peptide
  Seed: AYERMCNILKGKFQT
AYERECAILVGKFQT

SEQ ID NO: 52333 - protein, 15 aa, Artificial Sequence
  Description of Artificial Sequence: Synthetic peptide
  Seed: AYERMCNILKGKFQT
AYERGCAILIGKFQT

SEQ ID NO: 52334 - protein, 15 aa, Artificial Sequence
  Description of Artificial Sequence: Synthetic peptide
  Seed: AYERMCNILKGKFQT
AYERGCAILLGKFQT

SEQ ID NO: 52335 - protein, 15 aa, Artificial Sequence
  Description of Artificial Sequence: Synthetic peptide
  Seed: AYERMCNILKGKFQT
AYERGCAILVGKFQT

SEQ ID NO: 52336 - protein, 15 aa, Artificial Sequence
  Description of Artificial Sequence: Synthetic peptide
  Seed: AYERMCNILKGKFQT
AYERICAILAGKFQT

SEQ ID NO: 52337 - protein, 15 aa, Artificial Sequence
  Description of Artificial Sequence: Synthetic peptide
  Seed: AYERMCNILKGKFQT
AYERICAILIGKFQT

SEQ ID NO: 52338 - protein, 15 aa, Artificial Sequence
  Description of Artificial Sequence: Synthetic peptide
  Seed: AYERMCNILKGKFQT
AYERICAILLGKFQT

SEQ ID NO: 52339 - protein, 15 aa, Artificial Sequence
  Description of Artificial Sequence: Synthetic peptide
  Seed: AYERMCNILKGKFQT
AYERICAILSGKFQT

SEQ ID NO: 52340 - protein, 15 aa, Artificial Sequence
  Description of Artificial Sequence: Synthetic peptide
  Seed: AYERMCNILKGKFQT
AYERICAILTGKFQT

SEQ ID NO: 52341 - protein, 15 aa, Artificial Sequence
  Description of Artificial Sequence: Synthetic peptide
  Seed: AYERMCNILKGKFQT
AYERICAILVGKFQT

SEQ ID NO: 52342 - protein, 15 aa, Artificial Sequence
  Description of Artificial Sequence: Synthetic peptide
  Seed: AYERMCNILKGKFQT
AYERICGILAGKFQT

SEQ ID NO: 52343 - protein, 15 aa, Artificial Sequence
  Description of Artificial Sequence: Synthetic peptide
  Seed: AYERMCNILKGKFQT
AYERICGILIGKFQT

SEQ ID NO: 52344 - protein, 15 aa, Artificial Sequence
  Description of Artificial Sequence: Synthetic peptide
  Seed: AYERMCNILKGKFQT
AYERICGILLGKFQT

SEQ ID NO: 52345 - protein, 15 aa, Artificial Sequence
  Description of Artificial Sequence: Synthetic peptide
  Seed: AYERMCNILKGKFQT
AYERICGILVGKFQT

SEQ ID NO: 52346 - protein, 15 aa, Artificial Sequence
  Description of Artificial Sequence: Synthetic peptide
  Seed: AYERMCNILKGKFQT
AYERICPILAGKFQT

SEQ ID NO: 52347 - protein, 15 aa, Artificial Sequence
  Description of Artificial Sequence: Synthetic peptide
  Seed: AYERMCNILKGKFQT
AYERICPILIGKFQT

SEQ ID NO: 52348 - protein, 15 aa, Artificial Sequence
  Description of Artificial Sequence: Synthetic peptide
  Seed: AYERMCNILKGKFQT
AYERICPILLGKFQT

SEQ ID NO: 52349 - protein, 15 aa, Artificial Sequence
  Description of Artificial Sequence: Synthetic peptide
  Seed: AYERMCNILKGKFQT
AYERICPILSGKFQT

SEQ ID NO: 52350 - protein, 15 aa, Artificial Sequence
  Description of Artificial Sequence: Synthetic peptide
  Seed: AYERMCNILKGKFQT
AYERICPILVGKFQT

SEQ ID NO: 52351 - protein, 15 aa, Artificial Sequence
  Description of Artificial Sequence: Synthetic peptide
  Seed: AYERMCNILKGKFQT
AYERICSILAGKFQT

SEQ ID NO: 52352 - protein, 15 aa, Artificial Sequence
  Description of Artificial Sequence: Synthetic peptide
  Seed: AYERMCNILKGKFQT
AYERICSILVGKFQT

SEQ ID NO: 52353 - protein, 15 aa, Artificial Sequence
  Description of Artificial Sequence: Synthetic peptide
  Seed: AYERMCNILKGKFQT
AYERLCAILAGKFQT

SEQ ID NO: 52354 - protein, 15 aa, Artificial Sequence
  Description of Artificial Sequence: Synthetic peptide
  Seed: AYERMCNILKGKFQT
AYERLCAILGGKFQT

SEQ ID NO: 52355 - protein, 15 aa, Artificial Sequence
  Description of Artificial Sequence: Synthetic peptide
  Seed: AYERMCNILKGKFQT
AYERLCAILIGKFQT

SEQ ID NO: 52356 - protein, 15 aa, Artificial Sequence
  Description of Artificial Sequence: Synthetic peptide
  Seed: AYERMCNILKGKFQT
AYERLCAILLGKFQT

SEQ ID NO: 52357 - protein, 15 aa, Artificial Sequence
  Description of Artificial Sequence: Synthetic peptide
  Seed: AYERMCNILKGKFQT
AYERLCAILMGKFQT

SEQ ID NO: 52358 - protein, 15 aa, Artificial Sequence
  Description of Artificial Sequence: Synthetic peptide
  Seed: AYERMCNILKGKFQT
AYERLCAILNGKFQT

SEQ ID NO: 52359 - protein, 15 aa, Artificial Sequence
  Description of Artificial Sequence: Synthetic peptide
  Seed: AYERMCNILKGKFQT
AYERLCAILSGKFQT

SEQ ID NO: 52360 - protein, 15 aa, Artificial Sequence
  Description of Artificial Sequence: Synthetic peptide
  Seed: AYERMCNILKGKFQT
AYERLCAILTGKFQT

SEQ ID NO: 52361 - protein, 15 aa, Artificial Sequence
  Description of Artificial Sequence: Synthetic peptide
  Seed: AYERMCNILKGKFQT
AYERLCAILVGKFQT

SEQ ID NO: 52362 - protein, 15 aa, Artificial Sequence
  Description of Artificial Sequence: Synthetic peptide
  Seed: AYERMCNILKGKFQT
AYERLCGILAGKFQT

SEQ ID NO: 52363 - protein, 15 aa, Artificial Sequence
  Description of Artificial Sequence: Synthetic peptide
  Seed: AYERMCNILKGKFQT
AYERLCGILIGKFQT

SEQ ID NO: 52364 - protein, 15 aa, Artificial Sequence
  Description of Artificial Sequence: Synthetic peptide
  Seed: AYERMCNILKGKFQT
AYERLCGILLGKFQT

SEQ ID NO: 52365 - protein, 15 aa, Artificial Sequence
  Description of Artificial Sequence: Synthetic peptide
  Seed: AYERMCNILKGKFQT
AYERLCGILMGKFQT

SEQ ID NO: 52366 - protein, 15 aa, Artificial Sequence
  Description of Artificial Sequence: Synthetic peptide
  Seed: AYERMCNILKGKFQT
AYERLCGILSGKFQT

SEQ ID NO: 52367 - protein, 15 aa, Artificial Sequence
  Description of Artificial Sequence: Synthetic peptide
  Seed: AYERMCNILKGKFQT
AYERLCGILTGKFQT

SEQ ID NO: 52368 - protein, 15 aa, Artificial Sequence
  Description of Artificial Sequence: Synthetic peptide
  Seed: AYERMCNILKGKFQT
AYERLCGILVGKFQT

SEQ ID NO: 52369 - protein, 15 aa, Artificial Sequence
  Description of Artificial Sequence: Synthetic peptide
  Seed: AYERMCNILKGKFQT
AYERLCPILAGKFQT

SEQ ID NO: 52370 - protein, 15 aa, Artificial Sequence
  Description of Artificial Sequence: Synthetic peptide
  Seed: AYERMCNILKGKFQT
AYERLCPILIGKFQT

SEQ ID NO: 52371 - protein, 15 aa, Artificial Sequence
  Description of Artificial Sequence: Synthetic peptide
  Seed: AYERMCNILKGKFQT
AYERLCPILLGKFQT

SEQ ID NO: 52372 - protein, 15 aa, Artificial Sequence
  Description of Artificial Sequence: Synthetic peptide
  Seed: AYERMCNILKGKFQT
AYERLCPILMGKFQT

SEQ ID NO: 52373 - protein, 15 aa, Artificial Sequence
  Description of Artificial Sequence: Synthetic peptide
  Seed: AYERMCNILKGKFQT
AYERLCPILNGKFQT

SEQ ID NO: 52374 - protein, 15 aa, Artificial Sequence
  Description of Artificial Sequence: Synthetic peptide
  Seed: AYERMCNILKGKFQT
AYERLCPILSGKFQT

SEQ ID NO: 52375 - protein, 15 aa, Artificial Sequence
  Description of Artificial Sequence: Synthetic peptide
  Seed: AYERMCNILKGKFQT
AYERLCPILTGKFQT

SEQ ID NO: 52376 - protein, 15 aa, Artificial Sequence
  Description of Artificial Sequence: Synthetic peptide
  Seed: AYERMCNILKGKFQT
AYERLCPILVGKFQT

SEQ ID NO: 52377 - protein, 15 aa, Artificial Sequence
  Description of Artificial Sequence: Synthetic peptide
  Seed: AYERMCNILKGKFQT
AYERLCSILAGKFQT

SEQ ID NO: 52378 - protein, 15 aa, Artificial Sequence
  Description of Artificial Sequence: Synthetic peptide
  Seed: AYERMCNILKGKFQT
AYERLCSILIGKFQT

SEQ ID NO: 52379 - protein, 15 aa, Artificial Sequence
  Description of Artificial Sequence: Synthetic peptide
  Seed: AYERMCNILKGKFQT
AYERLCSILLGKFQT

SEQ ID NO: 52380 - protein, 15 aa, Artificial Sequence
  Description of Artificial Sequence: Synthetic peptide
  Seed: AYERMCNILKGKFQT
AYERLCSILMGKFQT

SEQ ID NO: 52381 - protein, 15 aa, Artificial Sequence
  Description of Artificial Sequence: Synthetic peptide
  Seed: AYERMCNILKGKFQT
AYERLCSILSGKFQT

SEQ ID NO: 52382 - protein, 15 aa, Artificial Sequence
  Description of Artificial Sequence: Synthetic peptide
  Seed: AYERMCNILKGKFQT
AYERLCSILTGKFQT

SEQ ID NO: 52383 - protein, 15 aa, Artificial Sequence
  Description of Artificial Sequence: Synthetic peptide
  Seed: AYERMCNILKGKFQT
AYERLCSILVGKFQT

SEQ ID NO: 52384 - protein, 15 aa, Artificial Sequence
  Description of Artificial Sequence: Synthetic peptide
  Seed: AYERMCNILKGKFQT
AYERLCTILAGKFQT

SEQ ID NO: 52385 - protein, 15 aa, Artificial Sequence
  Description of Artificial Sequence: Synthetic peptide
  Seed: AYERMCNILKGKFQT
AYERLCTILNGKFQT

SEQ ID NO: 52386 - protein, 15 aa, Artificial Sequence
  Description of Artificial Sequence: Synthetic peptide
  Seed: AYERMCNILKGKFQT
AYERLCTILVGKFQT

SEQ ID NO: 52387 - protein, 15 aa, Artificial Sequence
  Description of Artificial Sequence: Synthetic peptide
  Seed: AYERMCNILKGKFQT
AYERMCAILAGKFQT

SEQ ID NO: 52388 - protein, 15 aa, Artificial Sequence
  Description of Artificial Sequence: Synthetic peptide
  Seed: AYERMCNILKGKFQT
AYERMCAILGGKFQT

SEQ ID NO: 52389 - protein, 15 aa, Artificial Sequence
  Description of Artificial Sequence: Synthetic peptide
  Seed: AYERMCNILKGKFQT
AYERMCAILIGKFQT

SEQ ID NO: 52390 - protein, 15 aa, Artificial Sequence
  Description of Artificial Sequence: Synthetic peptide
  Seed: AYERMCNILKGKFQT
AYERMCAILLGKFQT

SEQ ID NO: 52391 - protein, 15 aa, Artificial Sequence
  Description of Artificial Sequence: Synthetic peptide
  Seed: AYERMCNILKGKFQT
AYERMCAILMGKFQT

SEQ ID NO: 52392 - protein, 15 aa, Artificial Sequence
  Description of Artificial Sequence: Synthetic peptide
  Seed: AYERMCNILKGKFQT
AYERMCAILNGKFQT

SEQ ID NO: 52393 - protein, 15 aa, Artificial Sequence
  Description of Artificial Sequence: Synthetic peptide
  Seed: AYERMCNILKGKFQT
AYERMCAILSGKFQT

SEQ ID NO: 52394 - protein, 15 aa, Artificial Sequence
  Description of Artificial Sequence: Synthetic peptide
  Seed: AYERMCNILKGKFQT
AYERMCAILTGKFQT

SEQ ID NO: 52395 - protein, 15 aa, Artificial Sequence
  Description of Artificial Sequence: Synthetic peptide
  Seed: AYERMCNILKGKFQT
AYERMCAILVGKFQT

SEQ ID NO: 52396 - protein, 15 aa, Artificial Sequence
  Description of Artificial Sequence: Synthetic peptide
  Seed: AYERMCNILKGKFQT
AYERMCGILAGKFQT

SEQ ID NO: 52397 - protein, 15 aa, Artificial Sequence
  Description of Artificial Sequence: Synthetic peptide
  Seed: AYERMCNILKGKFQT
AYERMCGILIGKFQT

SEQ ID NO: 52398 - protein, 15 aa, Artificial Sequence
  Description of Artificial Sequence: Synthetic peptide
  Seed: AYERMCNILKGKFQT
AYERMCGILLGKFQT

SEQ ID NO: 52399 - protein, 15 aa, Artificial Sequence
  Description of Artificial Sequence: Synthetic peptide
  Seed: AYERMCNILKGKFQT
AYERMCGILMGKFQT

SEQ ID NO: 52400 - protein, 15 aa, Artificial Sequence
  Description of Artificial Sequence: Synthetic peptide
  Seed: AYERMCNILKGKFQT
AYERMCGILSGKFQT

SEQ ID NO: 52401 - protein, 15 aa, Artificial Sequence
  Description of Artificial Sequence: Synthetic peptide
  Seed: AYERMCNILKGKFQT
AYERMCGILTGKFQT

SEQ ID NO: 52402 - protein, 15 aa, Artificial Sequence
  Description of Artificial Sequence: Synthetic peptide
  Seed: AYERMCNILKGKFQT
AYERMCGILVGKFQT

SEQ ID NO: 52403 - protein, 15 aa, Artificial Sequence
  Description of Artificial Sequence: Synthetic peptide
  Seed: AYERMCNILKGKFQT
AYERMCPILAGKFQT

SEQ ID NO: 52404 - protein, 15 aa, Artificial Sequence
  Description of Artificial Sequence: Synthetic peptide
  Seed: AYERMCNILKGKFQT
AYERMCPILIGKFQT

SEQ ID NO: 52405 - protein, 15 aa, Artificial Sequence
  Description of Artificial Sequence: Synthetic peptide
  Seed: AYERMCNILKGKFQT
AYERMCPILLGKFQT

SEQ ID NO: 52406 - protein, 15 aa, Artificial Sequence
  Description of Artificial Sequence: Synthetic peptide
  Seed: AYERMCNILKGKFQT
AYERMCPILMGKFQT

SEQ ID NO: 52407 - protein, 15 aa, Artificial Sequence
  Description of Artificial Sequence: Synthetic peptide
  Seed: AYERMCNILKGKFQT
AYERMCPILNGKFQT

SEQ ID NO: 52408 - protein, 15 aa, Artificial Sequence
  Description of Artificial Sequence: Synthetic peptide
  Seed: AYERMCNILKGKFQT
AYERMCPILSGKFQT

SEQ ID NO: 52409 - protein, 15 aa, Artificial Sequence
  Description of Artificial Sequence: Synthetic peptide
  Seed: AYERMCNILKGKFQT
AYERMCPILTGKFQT

SEQ ID NO: 52410 - protein, 15 aa, Artificial Sequence
  Description of Artificial Sequence: Synthetic peptide
  Seed: AYERMCNILKGKFQT
AYERMCPILVGKFQT

SEQ ID NO: 52411 - protein, 15 aa, Artificial Sequence
  Description of Artificial Sequence: Synthetic peptide
  Seed: AYERMCNILKGKFQT
AYERMCSILAGKFQT

SEQ ID NO: 52412 - protein, 15 aa, Artificial Sequence
  Description of Artificial Sequence: Synthetic peptide
  Seed: AYERMCNILKGKFQT
AYERMCSILIGKFQT

SEQ ID NO: 52413 - protein, 15 aa, Artificial Sequence
  Description of Artificial Sequence: Synthetic peptide
  Seed: AYERMCNILKGKFQT
AYERMCSILLGKFQT

SEQ ID NO: 52414 - protein, 15 aa, Artificial Sequence
  Description of Artificial Sequence: Synthetic peptide
  Seed: AYERMCNILKGKFQT
AYERMCSILMGKFQT

SEQ ID NO: 52415 - protein, 15 aa, Artificial Sequence
  Description of Artificial Sequence: Synthetic peptide
  Seed: AYERMCNILKGKFQT
AYERMCSILSGKFQT

SEQ ID NO: 52416 - protein, 15 aa, Artificial Sequence
  Description of Artificial Sequence: Synthetic peptide
  Seed: AYERMCNILKGKFQT
AYERMCSILTGKFQT

SEQ ID NO: 52417 - protein, 15 aa, Artificial Sequence
  Description of Artificial Sequence: Synthetic peptide
  Seed: AYERMCNILKGKFQT
AYERMCSILVGKFQT

SEQ ID NO: 52418 - protein, 15 aa, Artificial Sequence
  Description of Artificial Sequence: Synthetic peptide
  Seed: AYERMCNILKGKFQT
AYERMCTILAGKFQT

SEQ ID NO: 52419 - protein, 15 aa, Artificial Sequence
  Description of Artificial Sequence: Synthetic peptide
  Seed: AYERMCNILKGKFQT
AYERMCTILLGKFQT

SEQ ID NO: 52420 - protein, 15 aa, Artificial Sequence
  Description of Artificial Sequence: Synthetic peptide
  Seed: AYERMCNILKGKFQT
AYERMCTILNGKFQT

SEQ ID NO: 52421 - protein, 15 aa, Artificial Sequence
  Description of Artificial Sequence: Synthetic peptide
  Seed: AYERMCNILKGKFQT
AYERMCTILVGKFQT

SEQ ID NO: 52422 - protein, 15 aa, Artificial Sequence
  Description of Artificial Sequence: Synthetic peptide
  Seed: AYERMCNILKGKFQT
AYERQCAILAGKFQT

SEQ ID NO: 52423 - protein, 15 aa, Artificial Sequence
  Description of Artificial Sequence: Synthetic peptide
  Seed: AYERMCNILKGKFQT
AYERQCAILIGKFQT

SEQ ID NO: 52424 - protein, 15 aa, Artificial Sequence
  Description of Artificial Sequence: Synthetic peptide
  Seed: AYERMCNILKGKFQT
AYERQCAILLGKFQT

SEQ ID NO: 52425 - protein, 15 aa, Artificial Sequence
  Description of Artificial Sequence: Synthetic peptide
  Seed: AYERMCNILKGKFQT
AYERQCAILVGKFQT

SEQ ID NO: 52426 - protein, 15 aa, Artificial Sequence
  Description of Artificial Sequence: Synthetic peptide
  Seed: AYERMCNILKGKFQT
AYERQCGILAGKFQT

SEQ ID NO: 52427 - protein, 15 aa, Artificial Sequence
  Description of Artificial Sequence: Synthetic peptide
  Seed: AYERMCNILKGKFQT
AYERQCGILIGKFQT

SEQ ID NO: 52428 - protein, 15 aa, Artificial Sequence
  Description of Artificial Sequence: Synthetic peptide
  Seed: AYERMCNILKGKFQT
AYERQCGILLGKFQT

SEQ ID NO: 52429 - protein, 15 aa, Artificial Sequence
  Description of Artificial Sequence: Synthetic peptide
  Seed: AYERMCNILKGKFQT
AYERQCGILVGKFQT

SEQ ID NO: 52430 - protein, 15 aa, Artificial Sequence
  Description of Artificial Sequence: Synthetic peptide
  Seed: AYERMCNILKGKFQT
AYERQCSILVGKFQT

SEQ ID NO: 52431 - protein, 15 aa, Artificial Sequence
  Description of Artificial Sequence: Synthetic peptide
  Seed: AYERMCNILKGKFQT
AYERSCAILAGKFQT

SEQ ID NO: 52432 - protein, 15 aa, Artificial Sequence
  Description of Artificial Sequence: Synthetic peptide
  Seed: AYERMCNILKGKFQT
AYERSCAILIGKFQT

SEQ ID NO: 52433 - protein, 15 aa, Artificial Sequence
  Description of Artificial Sequence: Synthetic peptide
  Seed: AYERMCNILKGKFQT
AYERSCAILLGKFQT

SEQ ID NO: 52434 - protein, 15 aa, Artificial Sequence
  Description of Artificial Sequence: Synthetic peptide
  Seed: AYERMCNILKGKFQT
AYERSCAILVGKFQT

SEQ ID NO: 52435 - protein, 15 aa, Artificial Sequence
  Description of Artificial Sequence: Synthetic peptide
  Seed: AYERMCNILKGKFQT
AYERVCAILAGKFQT

SEQ ID NO: 52436 - protein, 15 aa, Artificial Sequence
  Description of Artificial Sequence: Synthetic peptide
  Seed: AYERMCNILKGKFQT
AYERVCAILVGKFQT

SEQ ID NO: 52437 - protein, 15 aa, Artificial Sequence
  Description of Artificial Sequence: Synthetic peptide
  Seed: AYERMCNILKGKFQT
AYERVCPILVGKFQT

SEQ ID NO: 52438 - protein, 16 aa, Artificial Sequence
  Description of Artificial Sequence: Synthetic peptide
  Seed: AYERMCNILKGKFQTA
AYERMFNIAKAKFATA

SEQ ID NO: 52439 - protein, 16 aa, Artificial Sequence
  Description of Artificial Sequence: Synthetic peptide
  Seed: AYERMCNILKGKFQTA
AYERMFNIAKAKFCTA

SEQ ID NO: 52440 - protein, 16 aa, Artificial Sequence
  Description of Artificial Sequence: Synthetic peptide
  Seed: AYERMCNILKGKFQTA
AYERMFNIAKAKFFTA

SEQ ID NO: 52441 - protein, 16 aa, Artificial Sequence
  Description of Artificial Sequence: Synthetic peptide
  Seed: AYERMCNILKGKFQTA
AYERMFNIAKAKFGTA

SEQ ID NO: 52442 - protein, 16 aa, Artificial Sequence
  Description of Artificial Sequence: Synthetic peptide
  Seed: AYERMCNILKGKFQTA
AYERMFNIAKAKFITA

SEQ ID NO: 52443 - protein, 16 aa, Artificial Sequence
  Description of Artificial Sequence: Synthetic peptide
  Seed: AYERMCNILKGKFQTA
AYERMFNIAKAKFLTA

SEQ ID NO: 52444 - protein, 16 aa, Artificial Sequence
  Description of Artificial Sequence: Synthetic peptide
  Seed: AYERMCNILKGKFQTA
AYERMFNIAKAKFMTA

SEQ ID NO: 52445 - protein, 16 aa, Artificial Sequence
  Description of Artificial Sequence: Synthetic peptide
  Seed: AYERMCNILKGKFQTA
AYERMFNIAKAKFSTA

SEQ ID NO: 52446 - protein, 16 aa, Artificial Sequence
  Description of Artificial Sequence: Synthetic peptide
  Seed: AYERMCNILKGKFQTA
AYERMFNIAKAKFTTA

SEQ ID NO: 52447 - protein, 16 aa, Artificial Sequence
  Description of Artificial Sequence: Synthetic peptide
  Seed: AYERMCNILKGKFQTA
AYERMFNIAKAKFVTA

SEQ ID NO: 52448 - protein, 16 aa, Artificial Sequence
  Description of Artificial Sequence: Synthetic peptide
  Seed: AYERMCNILKGKFQTA
AYERMFNIAKGKFATA

SEQ ID NO: 52449 - protein, 16 aa, Artificial Sequence
  Description of Artificial Sequence: Synthetic peptide
  Seed: AYERMCNILKGKFQTA
AYERMFNIAKGKFITA

SEQ ID NO: 52450 - protein, 16 aa, Artificial Sequence
  Description of Artificial Sequence: Synthetic peptide
  Seed: AYERMCNILKGKFQTA
AYERMFNIAKGKFLTA

SEQ ID NO: 52451 - protein, 16 aa, Artificial Sequence
  Description of Artificial Sequence: Synthetic peptide
  Seed: AYERMCNILKGKFQTA
AYERMFNIAKGKFMTA

SEQ ID NO: 52452 - protein, 16 aa, Artificial Sequence
  Description of Artificial Sequence: Synthetic peptide
  Seed: AYERMCNILKGKFQTA
AYERMFNIAKGKFSTA

SEQ ID NO: 52453 - protein, 16 aa, Artificial Sequence
  Description of Artificial Sequence: Synthetic peptide
  Seed: AYERMCNILKGKFQTA
AYERMFNIAKGKFTTA

SEQ ID NO: 52454 - protein, 16 aa, Artificial Sequence
  Description of Artificial Sequence: Synthetic peptide
  Seed: AYERMCNILKGKFQTA
AYERMFNIAKGKFVTA

SEQ ID NO: 52455 - protein, 16 aa, Artificial Sequence
  Description of Artificial Sequence: Synthetic peptide
  Seed: AYERMCNILKGKFQTA
AYERMFNIAKNKFATA

SEQ ID NO: 52456 - protein, 16 aa, Artificial Sequence
  Description of Artificial Sequence: Synthetic peptide
  Seed: AYERMCNILKGKFQTA
AYERMFNIAKNKFITA

SEQ ID NO: 52457 - protein, 16 aa, Artificial Sequence
  Description of Artificial Sequence: Synthetic peptide
  Seed: AYERMCNILKGKFQTA
AYERMFNIAKNKFLTA

SEQ ID NO: 52458 - protein, 16 aa, Artificial Sequence
  Description of Artificial Sequence: Synthetic peptide
  Seed: AYERMCNILKGKFQTA
AYERMFNIAKNKFMTA

SEQ ID NO: 52459 - protein, 16 aa, Artificial Sequence
  Description of Artificial Sequence: Synthetic peptide
  Seed: AYERMCNILKGKFQTA
AYERMFNIAKNKFTTA

SEQ ID NO: 52460 - protein, 16 aa, Artificial Sequence
  Description of Artificial Sequence: Synthetic peptide
  Seed: AYERMCNILKGKFQTA
AYERMFNIAKNKFVTA

SEQ ID NO: 52461 - protein, 16 aa, Artificial Sequence
  Description of Artificial Sequence: Synthetic peptide
  Seed: AYERMCNILKGKFQTA
AYERMFNIAKPKFATA

SEQ ID NO: 52462 - protein, 16 aa, Artificial Sequence
  Description of Artificial Sequence: Synthetic peptide
  Seed: AYERMCNILKGKFQTA
AYERMFNIAKPKFITA

SEQ ID NO: 52463 - protein, 16 aa, Artificial Sequence
  Description of Artificial Sequence: Synthetic peptide
  Seed: AYERMCNILKGKFQTA
AYERMFNIAKPKFLTA

SEQ ID NO: 52464 - protein, 16 aa, Artificial Sequence
  Description of Artificial Sequence: Synthetic peptide
  Seed: AYERMCNILKGKFQTA
AYERMFNIAKPKFMTA

SEQ ID NO: 52465 - protein, 16 aa, Artificial Sequence
  Description of Artificial Sequence: Synthetic peptide
  Seed: AYERMCNILKGKFQTA
AYERMFNIAKPKFTTA

SEQ ID NO: 52466 - protein, 16 aa, Artificial Sequence
  Description of Artificial Sequence: Synthetic peptide
  Seed: AYERMCNILKGKFQTA
AYERMFNIAKPKFVTA

SEQ ID NO: 52467 - protein, 16 aa, Artificial Sequence
  Description of Artificial Sequence: Synthetic peptide
  Seed: AYERMCNILKGKFQTA
AYERMFNIAKSKFATA

SEQ ID NO: 52468 - protein, 16 aa, Artificial Sequence
  Description of Artificial Sequence: Synthetic peptide
  Seed: AYERMCNILKGKFQTA
AYERMFNIAKSKFITA

SEQ ID NO: 52469 - protein, 16 aa, Artificial Sequence
  Description of Artificial Sequence: Synthetic peptide
  Seed: AYERMCNILKGKFQTA
AYERMFNIAKSKFLTA

SEQ ID NO: 52470 - protein, 16 aa, Artificial Sequence
  Description of Artificial Sequence: Synthetic peptide
  Seed: AYERMCNILKGKFQTA
AYERMFNIAKSKFMTA

SEQ ID NO: 52471 - protein, 16 aa, Artificial Sequence
  Description of Artificial Sequence: Synthetic peptide
  Seed: AYERMCNILKGKFQTA
AYERMFNIAKSKFSTA

SEQ ID NO: 52472 - protein, 16 aa, Artificial Sequence
  Description of Artificial Sequence: Synthetic peptide
  Seed: AYERMCNILKGKFQTA
AYERMFNIAKSKFTTA

SEQ ID NO: 52473 - protein, 16 aa, Artificial Sequence
  Description of Artificial Sequence: Synthetic peptide
  Seed: AYERMCNILKGKFQTA
AYERMFNIAKSKFVTA

SEQ ID NO: 52474 - protein, 16 aa, Artificial Sequence
  Description of Artificial Sequence: Synthetic peptide
  Seed: AYERMCNILKGKFQTA
AYERMFNIAKTKFATA

SEQ ID NO: 52475 - protein, 16 aa, Artificial Sequence
  Description of Artificial Sequence: Synthetic peptide
  Seed: AYERMCNILKGKFQTA
AYERMFNIAKTKFITA

SEQ ID NO: 52476 - protein, 16 aa, Artificial Sequence
  Description of Artificial Sequence: Synthetic peptide
  Seed: AYERMCNILKGKFQTA
AYERMFNIAKTKFLTA

SEQ ID NO: 52477 - protein, 16 aa, Artificial Sequence
  Description of Artificial Sequence: Synthetic peptide
  Seed: AYERMCNILKGKFQTA
AYERMFNIAKTKFMTA

SEQ ID NO: 52478 - protein, 16 aa, Artificial Sequence
  Description of Artificial Sequence: Synthetic peptide
  Seed: AYERMCNILKGKFQTA
AYERMFNIAKTKFTTA

SEQ ID NO: 52479 - protein, 16 aa, Artificial Sequence
  Description of Artificial Sequence: Synthetic peptide
  Seed: AYERMCNILKGKFQTA
AYERMFNIAKTKFVTA

SEQ ID NO: 52480 - protein, 16 aa, Artificial Sequence
  Description of Artificial Sequence: Synthetic peptide
  Seed: AYERMCNILKGKFQTA
AYERMFNIAKVKFATA

SEQ ID NO: 52481 - protein, 16 aa, Artificial Sequence
  Description of Artificial Sequence: Synthetic peptide
  Seed: AYERMCNILKGKFQTA
AYERMFNIAKVKFITA

SEQ ID NO: 52482 - protein, 16 aa, Artificial Sequence
  Description of Artificial Sequence: Synthetic peptide
  Seed: AYERMCNILKGKFQTA
AYERMFNIAKVKFLTA

SEQ ID NO: 52483 - protein, 16 aa, Artificial Sequence
  Description of Artificial Sequence: Synthetic peptide
  Seed: AYERMCNILKGKFQTA
AYERMFNIAKVKFVTA

SEQ ID NO: 52484 - protein, 16 aa, Artificial Sequence
  Description of Artificial Sequence: Synthetic peptide
  Seed: AYERMCNILKGKFQTA
AYERMFNICKAKFITA

SEQ ID NO: 52485 - protein, 16 aa, Artificial Sequence
  Description of Artificial Sequence: Synthetic peptide
  Seed: AYERMCNILKGKFQTA
AYERMFNICKAKFLTA

SEQ ID NO: 52486 - protein, 16 aa, Artificial Sequence
  Description of Artificial Sequence: Synthetic peptide
  Seed: AYERMCNILKGKFQTA
AYERMFNICKAKFVTA

SEQ ID NO: 52487 - protein, 16 aa, Artificial Sequence
  Description of Artificial Sequence: Synthetic peptide
  Seed: AYERMCNILKGKFQTA
AYERMFNIEKAKFATA

SEQ ID NO: 52488 - protein, 16 aa, Artificial Sequence
  Description of Artificial Sequence: Synthetic peptide
  Seed: AYERMCNILKGKFQTA
AYERMFNIEKAKFITA

SEQ ID NO: 52489 - protein, 16 aa, Artificial Sequence
  Description of Artificial Sequence: Synthetic peptide
  Seed: AYERMCNILKGKFQTA
AYERMFNIEKAKFLTA

SEQ ID NO: 52490 - protein, 16 aa, Artificial Sequence
  Description of Artificial Sequence: Synthetic peptide
  Seed: AYERMCNILKGKFQTA
AYERMFNIEKAKFVTA

SEQ ID NO: 52491 - protein, 16 aa, Artificial Sequence
  Description of Artificial Sequence: Synthetic peptide
  Seed: AYERMCNILKGKFQTA
AYERMFNIEKGKFATA

SEQ ID NO: 52492 - protein, 16 aa, Artificial Sequence
  Description of Artificial Sequence: Synthetic peptide
  Seed: AYERMCNILKGKFQTA
AYERMFNIEKGKFITA

SEQ ID NO: 52493 - protein, 16 aa, Artificial Sequence
  Description of Artificial Sequence: Synthetic peptide
  Seed: AYERMCNILKGKFQTA
AYERMFNIEKGKFLTA

SEQ ID NO: 52494 - protein, 16 aa, Artificial Sequence
  Description of Artificial Sequence: Synthetic peptide
  Seed: AYERMCNILKGKFQTA
AYERMFNIEKGKFVTA

SEQ ID NO: 52495 - protein, 16 aa, Artificial Sequence
  Description of Artificial Sequence: Synthetic peptide
  Seed: AYERMCNILKGKFQTA
AYERMFNIEKSKFATA

SEQ ID NO: 52496 - protein, 16 aa, Artificial Sequence
  Description of Artificial Sequence: Synthetic peptide
  Seed: AYERMCNILKGKFQTA
AYERMFNIEKSKFLTA

SEQ ID NO: 52497 - protein, 16 aa, Artificial Sequence
  Description of Artificial Sequence: Synthetic peptide
  Seed: AYERMCNILKGKFQTA
AYERMFNIEKSKFVTA

SEQ ID NO: 52498 - protein, 16 aa, Artificial Sequence
  Description of Artificial Sequence: Synthetic peptide
  Seed: AYERMCNILKGKFQTA
AYERMFNIFKAKFVTA

SEQ ID NO: 52499 - protein, 16 aa, Artificial Sequence
  Description of Artificial Sequence: Synthetic peptide
  Seed: AYERMCNILKGKFQTA
AYERMFNIGKAKFATA

SEQ ID NO: 52500 - protein, 16 aa, Artificial Sequence
  Description of Artificial Sequence: Synthetic peptide
  Seed: AYERMCNILKGKFQTA
AYERMFNIGKAKFITA

SEQ ID NO: 52501 - protein, 16 aa, Artificial Sequence
  Description of Artificial Sequence: Synthetic peptide
  Seed: AYERMCNILKGKFQTA
AYERMFNIGKAKFLTA

SEQ ID NO: 52502 - protein, 16 aa, Artificial Sequence
  Description of Artificial Sequence: Synthetic peptide
  Seed: AYERMCNILKGKFQTA
AYERMFNIGKAKFMTA

SEQ ID NO: 52503 - protein, 16 aa, Artificial Sequence
  Description of Artificial Sequence: Synthetic peptide
  Seed: AYERMCNILKGKFQTA
AYERMFNIGKAKFVTA

SEQ ID NO: 52504 - protein, 16 aa, Artificial Sequence
  Description of Artificial Sequence: Synthetic peptide
  Seed: AYERMCNILKGKFQTA
AYERMFNIGKGKFITA

SEQ ID NO: 52505 - protein, 16 aa, Artificial Sequence
  Description of Artificial Sequence: Synthetic peptide
  Seed: AYERMCNILKGKFQTA
AYERMFNIGKGKFLTA

SEQ ID NO: 52506 - protein, 16 aa, Artificial Sequence
  Description of Artificial Sequence: Synthetic peptide
  Seed: AYERMCNILKGKFQTA
AYERMFNIGKGKFVTA

SEQ ID NO: 52507 - protein, 16 aa, Artificial Sequence
  Description of Artificial Sequence: Synthetic peptide
  Seed: AYERMCNILKGKFQTA
AYERMFNIGKPKFLTA

SEQ ID NO: 52508 - protein, 16 aa, Artificial Sequence
  Description of Artificial Sequence: Synthetic peptide
  Seed: AYERMCNILKGKFQTA
AYERMFNIGKSKFITA

SEQ ID NO: 52509 - protein, 16 aa, Artificial Sequence
  Description of Artificial Sequence: Synthetic peptide
  Seed: AYERMCNILKGKFQTA
AYERMFNIGKSKFLTA

SEQ ID NO: 52510 - protein, 16 aa, Artificial Sequence
  Description of Artificial Sequence: Synthetic peptide
  Seed: AYERMCNILKGKFQTA
AYERMFNIGKSKFVTA

SEQ ID NO: 52511 - protein, 16 aa, Artificial Sequence
  Description of Artificial Sequence: Synthetic peptide
  Seed: AYERMCNILKGKFQTA
AYERMFNIIKAKFATA

SEQ ID NO: 52512 - protein, 16 aa, Artificial Sequence
  Description of Artificial Sequence: Synthetic peptide
  Seed: AYERMCNILKGKFQTA
AYERMFNIIKAKFCTA

SEQ ID NO: 52513 - protein, 16 aa, Artificial Sequence
  Description of Artificial Sequence: Synthetic peptide
  Seed: AYERMCNILKGKFQTA
AYERMFNIIKAKFGTA

SEQ ID NO: 52514 - protein, 16 aa, Artificial Sequence
  Description of Artificial Sequence: Synthetic peptide
  Seed: AYERMCNILKGKFQTA
AYERMFNIIKAKFITA

SEQ ID NO: 52515 - protein, 16 aa, Artificial Sequence
  Description of Artificial Sequence: Synthetic peptide
  Seed: AYERMCNILKGKFQTA
AYERMFNIIKAKFLTA

SEQ ID NO: 52516 - protein, 16 aa, Artificial Sequence
  Description of Artificial Sequence: Synthetic peptide
  Seed: AYERMCNILKGKFQTA
AYERMFNIIKAKFMTA

SEQ ID NO: 52517 - protein, 16 aa, Artificial Sequence
  Description of Artificial Sequence: Synthetic peptide
  Seed: AYERMCNILKGKFQTA
AYERMFNIIKAKFNTA

SEQ ID NO: 52518 - protein, 16 aa, Artificial Sequence
  Description of Artificial Sequence: Synthetic peptide
  Seed: AYERMCNILKGKFQTA
AYERMFNIIKAKFSTA

SEQ ID NO: 52519 - protein, 16 aa, Artificial Sequence
  Description of Artificial Sequence: Synthetic peptide
  Seed: AYERMCNILKGKFQTA
AYERMFNIIKAKFTTA

SEQ ID NO: 52520 - protein, 16 aa, Artificial Sequence
  Description of Artificial Sequence: Synthetic peptide
  Seed: AYERMCNILKGKFQTA
AYERMFNIIKAKFVTA

SEQ ID NO: 52521 - protein, 16 aa, Artificial Sequence
  Description of Artificial Sequence: Synthetic peptide
  Seed: AYERMCNILKGKFQTA
AYERMFNIIKGKFATA

SEQ ID NO: 52522 - protein, 16 aa, Artificial Sequence
  Description of Artificial Sequence: Synthetic peptide
  Seed: AYERMCNILKGKFQTA
AYERMFNIIKGKFGTA

SEQ ID NO: 52523 - protein, 16 aa, Artificial Sequence
  Description of Artificial Sequence: Synthetic peptide
  Seed: AYERMCNILKGKFQTA
AYERMFNIIKGKFITA

SEQ ID NO: 52524 - protein, 16 aa, Artificial Sequence
  Description of Artificial Sequence: Synthetic peptide
  Seed: AYERMCNILKGKFQTA
AYERMFNIIKGKFLTA

SEQ ID NO: 52525 - protein, 16 aa, Artificial Sequence
  Description of Artificial Sequence: Synthetic peptide
  Seed: AYERMCNILKGKFQTA
AYERMFNIIKGKFMTA

SEQ ID NO: 52526 - protein, 16 aa, Artificial Sequence
  Description of Artificial Sequence: Synthetic peptide
  Seed: AYERMCNILKGKFQTA
AYERMFNIIKGKFSTA

SEQ ID NO: 52527 - protein, 16 aa, Artificial Sequence
  Description of Artificial Sequence: Synthetic peptide
  Seed: AYERMCNILKGKFQTA
AYERMFNIIKGKFTTA

SEQ ID NO: 52528 - protein, 16 aa, Artificial Sequence
  Description of Artificial Sequence: Synthetic peptide
  Seed: AYERMCNILKGKFQTA
AYERMFNIIKGKFVTA

SEQ ID NO: 52529 - protein, 16 aa, Artificial Sequence
  Description of Artificial Sequence: Synthetic peptide
  Seed: AYERMCNILKGKFQTA
AYERMFNIIKNKFATA

SEQ ID NO: 52530 - protein, 16 aa, Artificial Sequence
  Description of Artificial Sequence: Synthetic peptide
  Seed: AYERMCNILKGKFQTA
AYERMFNIIKNKFITA

SEQ ID NO: 52531 - protein, 16 aa, Artificial Sequence
  Description of Artificial Sequence: Synthetic peptide
  Seed: AYERMCNILKGKFQTA
AYERMFNIIKNKFLTA

SEQ ID NO: 52532 - protein, 16 aa, Artificial Sequence
  Description of Artificial Sequence: Synthetic peptide
  Seed: AYERMCNILKGKFQTA
AYERMFNIIKNKFMTA

SEQ ID NO: 52533 - protein, 16 aa, Artificial Sequence
  Description of Artificial Sequence: Synthetic peptide
  Seed: AYERMCNILKGKFQTA
AYERMFNIIKNKFSTA

SEQ ID NO: 52534 - protein, 16 aa, Artificial Sequence
  Description of Artificial Sequence: Synthetic peptide
  Seed: AYERMCNILKGKFQTA
AYERMFNIIKNKFTTA

SEQ ID NO: 52535 - protein, 16 aa, Artificial Sequence
  Description of Artificial Sequence: Synthetic peptide
  Seed: AYERMCNILKGKFQTA
AYERMFNIIKNKFVTA

SEQ ID NO: 52536 - protein, 16 aa, Artificial Sequence
  Description of Artificial Sequence: Synthetic peptide
  Seed: AYERMCNILKGKFQTA
AYERMFNIIKPKFATA

SEQ ID NO: 52537 - protein, 16 aa, Artificial Sequence
  Description of Artificial Sequence: Synthetic peptide
  Seed: AYERMCNILKGKFQTA
AYERMFNIIKPKFITA

SEQ ID NO: 52538 - protein, 16 aa, Artificial Sequence
  Description of Artificial Sequence: Synthetic peptide
  Seed: AYERMCNILKGKFQTA
AYERMFNIIKPKFLTA

SEQ ID NO: 52539 - protein, 16 aa, Artificial Sequence
  Description of Artificial Sequence: Synthetic peptide
  Seed: AYERMCNILKGKFQTA
AYERMFNIIKPKFMTA

SEQ ID NO: 52540 - protein, 16 aa, Artificial Sequence
  Description of Artificial Sequence: Synthetic peptide
  Seed: AYERMCNILKGKFQTA
AYERMFNIIKPKFSTA

SEQ ID NO: 52541 - protein, 16 aa, Artificial Sequence
  Description of Artificial Sequence: Synthetic peptide
  Seed: AYERMCNILKGKFQTA
AYERMFNIIKPKFTTA

SEQ ID NO: 52542 - protein, 16 aa, Artificial Sequence
  Description of Artificial Sequence: Synthetic peptide
  Seed: AYERMCNILKGKFQTA
AYERMFNIIKPKFVTA

SEQ ID NO: 52543 - protein, 16 aa, Artificial Sequence
  Description of Artificial Sequence: Synthetic peptide
  Seed: AYERMCNILKGKFQTA
AYERMFNIIKSKFATA

SEQ ID NO: 52544 - protein, 16 aa, Artificial Sequence
  Description of Artificial Sequence: Synthetic peptide
  Seed: AYERMCNILKGKFQTA
AYERMFNIIKSKFGTA

SEQ ID NO: 52545 - protein, 16 aa, Artificial Sequence
  Description of Artificial Sequence: Synthetic peptide
  Seed: AYERMCNILKGKFQTA
AYERMFNIIKSKFITA

SEQ ID NO: 52546 - protein, 16 aa, Artificial Sequence
  Description of Artificial Sequence: Synthetic peptide
  Seed: AYERMCNILKGKFQTA
AYERMFNIIKSKFLTA

SEQ ID NO: 52547 - protein, 16 aa, Artificial Sequence
  Description of Artificial Sequence: Synthetic peptide
  Seed: AYERMCNILKGKFQTA
AYERMFNIIKSKFMTA

SEQ ID NO: 52548 - protein, 16 aa, Artificial Sequence
  Description of Artificial Sequence: Synthetic peptide
  Seed: AYERMCNILKGKFQTA
AYERMFNIIKSKFSTA

SEQ ID NO: 52549 - protein, 16 aa, Artificial Sequence
  Description of Artificial Sequence: Synthetic peptide
  Seed: AYERMCNILKGKFQTA
AYERMFNIIKSKFTTA

SEQ ID NO: 52550 - protein, 16 aa, Artificial Sequence
  Description of Artificial Sequence: Synthetic peptide
  Seed: AYERMCNILKGKFQTA
AYERMFNIIKSKFVTA

SEQ ID NO: 52551 - protein, 16 aa, Artificial Sequence
  Description of Artificial Sequence: Synthetic peptide
  Seed: AYERMCNILKGKFQTA
AYERMFNIIKTKFATA

SEQ ID NO: 52552 - protein, 16 aa, Artificial Sequence
  Description of Artificial Sequence: Synthetic peptide
  Seed: AYERMCNILKGKFQTA
AYERMFNIIKTKFITA

SEQ ID NO: 52553 - protein, 16 aa, Artificial Sequence
  Description of Artificial Sequence: Synthetic peptide
  Seed: AYERMCNILKGKFQTA
AYERMFNIIKTKFLTA

SEQ ID NO: 52554 - protein, 16 aa, Artificial Sequence
  Description of Artificial Sequence: Synthetic peptide
  Seed: AYERMCNILKGKFQTA
AYERMFNIIKTKFMTA

SEQ ID NO: 52555 - protein, 16 aa, Artificial Sequence
  Description of Artificial Sequence: Synthetic peptide
  Seed: AYERMCNILKGKFQTA
AYERMFNIIKTKFSTA

SEQ ID NO: 52556 - protein, 16 aa, Artificial Sequence
  Description of Artificial Sequence: Synthetic peptide
  Seed: AYERMCNILKGKFQTA
AYERMFNIIKTKFTTA

SEQ ID NO: 52557 - protein, 16 aa, Artificial Sequence
  Description of Artificial Sequence: Synthetic peptide
  Seed: AYERMCNILKGKFQTA
AYERMFNIIKTKFVTA

SEQ ID NO: 52558 - protein, 16 aa, Artificial Sequence
  Description of Artificial Sequence: Synthetic peptide
  Seed: AYERMCNILKGKFQTA
AYERMFNIIKVKFATA

SEQ ID NO: 52559 - protein, 16 aa, Artificial Sequence
  Description of Artificial Sequence: Synthetic peptide
  Seed: AYERMCNILKGKFQTA
AYERMFNIIKVKFVTA

SEQ ID NO: 52560 - protein, 16 aa, Artificial Sequence
  Description of Artificial Sequence: Synthetic peptide
  Seed: AYERMCNILKGKFQTA
AYERMFNILKAKFATA

SEQ ID NO: 52561 - protein, 16 aa, Artificial Sequence
  Description of Artificial Sequence: Synthetic peptide
  Seed: AYERMCNILKGKFQTA
AYERMFNILKAKFCTA

SEQ ID NO: 52562 - protein, 16 aa, Artificial Sequence
  Description of Artificial Sequence: Synthetic peptide
  Seed: AYERMCNILKGKFQTA
AYERMFNILKAKFFTA

SEQ ID NO: 52563 - protein, 16 aa, Artificial Sequence
  Description of Artificial Sequence: Synthetic peptide
  Seed: AYERMCNILKGKFQTA
AYERMFNILKAKFGTA

SEQ ID NO: 52564 - protein, 16 aa, Artificial Sequence
  Description of Artificial Sequence: Synthetic peptide
  Seed: AYERMCNILKGKFQTA
AYERMFNILKAKFHTA

SEQ ID NO: 52565 - protein, 16 aa, Artificial Sequence
  Description of Artificial Sequence: Synthetic peptide
  Seed: AYERMCNILKGKFQTA
AYERMFNILKAKFITA

SEQ ID NO: 52566 - protein, 16 aa, Artificial Sequence
  Description of Artificial Sequence: Synthetic peptide
  Seed: AYERMCNILKGKFQTA
AYERMFNILKAKFLTA

SEQ ID NO: 52567 - protein, 16 aa, Artificial Sequence
  Description of Artificial Sequence: Synthetic peptide
  Seed: AYERMCNILKGKFQTA
AYERMFNILKAKFMTA

SEQ ID NO: 52568 - protein, 16 aa, Artificial Sequence
  Description of Artificial Sequence: Synthetic peptide
  Seed: AYERMCNILKGKFQTA
AYERMFNILKAKFNTA

SEQ ID NO: 52569 - protein, 16 aa, Artificial Sequence
  Description of Artificial Sequence: Synthetic peptide
  Seed: AYERMCNILKGKFQTA
AYERMFNILKAKFPTA

SEQ ID NO: 52570 - protein, 16 aa, Artificial Sequence
  Description of Artificial Sequence: Synthetic peptide
  Seed: AYERMCNILKGKFQTA
AYERMFNILKAKFSTA

SEQ ID NO: 52571 - protein, 16 aa, Artificial Sequence
  Description of Artificial Sequence: Synthetic peptide
  Seed: AYERMCNILKGKFQTA
AYERMFNILKAKFTTA

SEQ ID NO: 52572 - protein, 16 aa, Artificial Sequence
  Description of Artificial Sequence: Synthetic peptide
  Seed: AYERMCNILKGKFQTA
AYERMFNILKAKFVTA

SEQ ID NO: 52573 - protein, 16 aa, Artificial Sequence
  Description of Artificial Sequence: Synthetic peptide
  Seed: AYERMCNILKGKFQTA
AYERMFNILKGKFATA

SEQ ID NO: 52574 - protein, 16 aa, Artificial Sequence
  Description of Artificial Sequence: Synthetic peptide
  Seed: AYERMCNILKGKFQTA
AYERMFNILKGKFCTA

SEQ ID NO: 52575 - protein, 16 aa, Artificial Sequence
  Description of Artificial Sequence: Synthetic peptide
  Seed: AYERMCNILKGKFQTA
AYERMFNILKGKFFTA

SEQ ID NO: 52576 - protein, 16 aa, Artificial Sequence
  Description of Artificial Sequence: Synthetic peptide
  Seed: AYERMCNILKGKFQTA
AYERMFNILKGKFGTA

SEQ ID NO: 52577 - protein, 16 aa, Artificial Sequence
  Description of Artificial Sequence: Synthetic peptide
  Seed: AYERMCNILKGKFQTA
AYERMFNILKGKFITA

SEQ ID NO: 52578 - protein, 16 aa, Artificial Sequence
  Description of Artificial Sequence: Synthetic peptide
  Seed: AYERMCNILKGKFQTA
AYERMFNILKGKFLTA

SEQ ID NO: 52579 - protein, 16 aa, Artificial Sequence
  Description of Artificial Sequence: Synthetic peptide
  Seed: AYERMCNILKGKFQTA
AYERMFNILKGKFMTA

SEQ ID NO: 52580 - protein, 16 aa, Artificial Sequence
  Description of Artificial Sequence: Synthetic peptide
  Seed: AYERMCNILKGKFQTA
AYERMFNILKGKFNTA

SEQ ID NO: 52581 - protein, 16 aa, Artificial Sequence
  Description of Artificial Sequence: Synthetic peptide
  Seed: AYERMCNILKGKFQTA
AYERMFNILKGKFPTA

SEQ ID NO: 52582 - protein, 16 aa, Artificial Sequence
  Description of Artificial Sequence: Synthetic peptide
  Seed: AYERMCNILKGKFQTA
AYERMFNILKGKFSTA

SEQ ID NO: 52583 - protein, 16 aa, Artificial Sequence
  Description of Artificial Sequence: Synthetic peptide
  Seed: AYERMCNILKGKFQTA
AYERMFNILKGKFTTA

SEQ ID NO: 52584 - protein, 16 aa, Artificial Sequence
  Description of Artificial Sequence: Synthetic peptide
  Seed: AYERMCNILKGKFQTA
AYERMFNILKGKFVTA

SEQ ID NO: 52585 - protein, 16 aa, Artificial Sequence
  Description of Artificial Sequence: Synthetic peptide
  Seed: AYERMCNILKGKFQTA
AYERMFNILKIKFATA

SEQ ID NO: 52586 - protein, 16 aa, Artificial Sequence
  Description of Artificial Sequence: Synthetic peptide
  Seed: AYERMCNILKGKFQTA
AYERMFNILKIKFVTA

SEQ ID NO: 52587 - protein, 16 aa, Artificial Sequence
  Description of Artificial Sequence: Synthetic peptide
  Seed: AYERMCNILKGKFQTA
AYERMFNILKNKFATA

SEQ ID NO: 52588 - protein, 16 aa, Artificial Sequence
  Description of Artificial Sequence: Synthetic peptide
  Seed: AYERMCNILKGKFQTA
AYERMFNILKNKFGTA

SEQ ID NO: 52589 - protein, 16 aa, Artificial Sequence
  Description of Artificial Sequence: Synthetic peptide
  Seed: AYERMCNILKGKFQTA
AYERMFNILKNKFITA

SEQ ID NO: 52590 - protein, 16 aa, Artificial Sequence
  Description of Artificial Sequence: Synthetic peptide
  Seed: AYERMCNILKGKFQTA
AYERMFNILKNKFLTA

SEQ ID NO: 52591 - protein, 16 aa, Artificial Sequence
  Description of Artificial Sequence: Synthetic peptide
  Seed: AYERMCNILKGKFQTA
AYERMFNILKNKFMTA

SEQ ID NO: 52592 - protein, 16 aa, Artificial Sequence
  Description of Artificial Sequence: Synthetic peptide
  Seed: AYERMCNILKGKFQTA
AYERMFNILKNKFSTA

SEQ ID NO: 52593 - protein, 16 aa, Artificial Sequence
  Description of Artificial Sequence: Synthetic peptide
  Seed: AYERMCNILKGKFQTA
AYERMFNILKNKFTTA

SEQ ID NO: 52594 - protein, 16 aa, Artificial Sequence
  Description of Artificial Sequence: Synthetic peptide
  Seed: AYERMCNILKGKFQTA
AYERMFNILKNKFVTA

SEQ ID NO: 52595 - protein, 16 aa, Artificial Sequence
  Description of Artificial Sequence: Synthetic peptide
  Seed: AYERMCNILKGKFQTA
AYERMFNILKPKFATA

SEQ ID NO: 52596 - protein, 16 aa, Artificial Sequence
  Description of Artificial Sequence: Synthetic peptide
  Seed: AYERMCNILKGKFQTA
AYERMFNILKPKFGTA

SEQ ID NO: 52597 - protein, 16 aa, Artificial Sequence
  Description of Artificial Sequence: Synthetic peptide
  Seed: AYERMCNILKGKFQTA
AYERMFNILKPKFITA

SEQ ID NO: 52598 - protein, 16 aa, Artificial Sequence
  Description of Artificial Sequence: Synthetic peptide
  Seed: AYERMCNILKGKFQTA
AYERMFNILKPKFLTA

SEQ ID NO: 52599 - protein, 16 aa, Artificial Sequence
  Description of Artificial Sequence: Synthetic peptide
  Seed: AYERMCNILKGKFQTA
AYERMFNILKPKFMTA

SEQ ID NO: 52600 - protein, 16 aa, Artificial Sequence
  Description of Artificial Sequence: Synthetic peptide
  Seed: AYERMCNILKGKFQTA
AYERMFNILKPKFSTA

SEQ ID NO: 52601 - protein, 16 aa, Artificial Sequence
  Description of Artificial Sequence: Synthetic peptide
  Seed: AYERMCNILKGKFQTA
AYERMFNILKPKFTTA

SEQ ID NO: 52602 - protein, 16 aa, Artificial Sequence
  Description of Artificial Sequence: Synthetic peptide
  Seed: AYERMCNILKGKFQTA
AYERMFNILKPKFVTA

SEQ ID NO: 52603 - protein, 16 aa, Artificial Sequence
  Description of Artificial Sequence: Synthetic peptide
  Seed: AYERMCNILKGKFQTA
AYERMFNILKSKFATA

SEQ ID NO: 52604 - protein, 16 aa, Artificial Sequence
  Description of Artificial Sequence: Synthetic peptide
  Seed: AYERMCNILKGKFQTA
AYERMFNILKSKFCTA

SEQ ID NO: 52605 - protein, 16 aa, Artificial Sequence
  Description of Artificial Sequence: Synthetic peptide
  Seed: AYERMCNILKGKFQTA
AYERMFNILKSKFFTA

SEQ ID NO: 52606 - protein, 16 aa, Artificial Sequence
  Description of Artificial Sequence: Synthetic peptide
  Seed: AYERMCNILKGKFQTA
AYERMFNILKSKFGTA

SEQ ID NO: 52607 - protein, 16 aa, Artificial Sequence
  Description of Artificial Sequence: Synthetic peptide
  Seed: AYERMCNILKGKFQTA
AYERMFNILKSKFITA

SEQ ID NO: 52608 - protein, 16 aa, Artificial Sequence
  Description of Artificial Sequence: Synthetic peptide
  Seed: AYERMCNILKGKFQTA
AYERMFNILKSKFLTA

SEQ ID NO: 52609 - protein, 16 aa, Artificial Sequence
  Description of Artificial Sequence: Synthetic peptide
  Seed: AYERMCNILKGKFQTA
AYERMFNILKSKFMTA

SEQ ID NO: 52610 - protein, 16 aa, Artificial Sequence
  Description of Artificial Sequence: Synthetic peptide
  Seed: AYERMCNILKGKFQTA
AYERMFNILKSKFNTA

SEQ ID NO: 52611 - protein, 16 aa, Artificial Sequence
  Description of Artificial Sequence: Synthetic peptide
  Seed: AYERMCNILKGKFQTA
AYERMFNILKSKFPTA

SEQ ID NO: 52612 - protein, 16 aa, Artificial Sequence
  Description of Artificial Sequence: Synthetic peptide
  Seed: AYERMCNILKGKFQTA
AYERMFNILKSKFSTA

SEQ ID NO: 52613 - protein, 16 aa, Artificial Sequence
  Description of Artificial Sequence: Synthetic peptide
  Seed: AYERMCNILKGKFQTA
AYERMFNILKSKFTTA

SEQ ID NO: 52614 - protein, 16 aa, Artificial Sequence
  Description of Artificial Sequence: Synthetic peptide
  Seed: AYERMCNILKGKFQTA
AYERMFNILKSKFVTA

SEQ ID NO: 52615 - protein, 16 aa, Artificial Sequence
  Description of Artificial Sequence: Synthetic peptide
  Seed: AYERMCNILKGKFQTA
AYERMFNILKTKFATA

SEQ ID NO: 52616 - protein, 16 aa, Artificial Sequence
  Description of Artificial Sequence: Synthetic peptide
  Seed: AYERMCNILKGKFQTA
AYERMFNILKTKFGTA

SEQ ID NO: 52617 - protein, 16 aa, Artificial Sequence
  Description of Artificial Sequence: Synthetic peptide
  Seed: AYERMCNILKGKFQTA
AYERMFNILKTKFITA

SEQ ID NO: 52618 - protein, 16 aa, Artificial Sequence
  Description of Artificial Sequence: Synthetic peptide
  Seed: AYERMCNILKGKFQTA
AYERMFNILKTKFLTA

SEQ ID NO: 52619 - protein, 16 aa, Artificial Sequence
  Description of Artificial Sequence: Synthetic peptide
  Seed: AYERMCNILKGKFQTA
AYERMFNILKTKFMTA

SEQ ID NO: 52620 - protein, 16 aa, Artificial Sequence
  Description of Artificial Sequence: Synthetic peptide
  Seed: AYERMCNILKGKFQTA
AYERMFNILKTKFSTA

SEQ ID NO: 52621 - protein, 16 aa, Artificial Sequence
  Description of Artificial Sequence: Synthetic peptide
  Seed: AYERMCNILKGKFQTA
AYERMFNILKTKFTTA

SEQ ID NO: 52622 - protein, 16 aa, Artificial Sequence
  Description of Artificial Sequence: Synthetic peptide
  Seed: AYERMCNILKGKFQTA
AYERMFNILKTKFVTA

SEQ ID NO: 52623 - protein, 16 aa, Artificial Sequence
  Description of Artificial Sequence: Synthetic peptide
  Seed: AYERMCNILKGKFQTA
AYERMFNILKVKFATA

SEQ ID NO: 52624 - protein, 16 aa, Artificial Sequence
  Description of Artificial Sequence: Synthetic peptide
  Seed: AYERMCNILKGKFQTA
AYERMFNILKVKFITA

SEQ ID NO: 52625 - protein, 16 aa, Artificial Sequence
  Description of Artificial Sequence: Synthetic peptide
  Seed: AYERMCNILKGKFQTA
AYERMFNILKVKFLTA

SEQ ID NO: 52626 - protein, 16 aa, Artificial Sequence
  Description of Artificial Sequence: Synthetic peptide
  Seed: AYERMCNILKGKFQTA
AYERMFNILKVKFMTA

SEQ ID NO: 52627 - protein, 16 aa, Artificial Sequence
  Description of Artificial Sequence: Synthetic peptide
  Seed: AYERMCNILKGKFQTA
AYERMFNILKVKFSTA

SEQ ID NO: 52628 - protein, 16 aa, Artificial Sequence
  Description of Artificial Sequence: Synthetic peptide
  Seed: AYERMCNILKGKFQTA
AYERMFNILKVKFTTA

SEQ ID NO: 52629 - protein, 16 aa, Artificial Sequence
  Description of Artificial Sequence: Synthetic peptide
  Seed: AYERMCNILKGKFQTA
AYERMFNILKVKFVTA

SEQ ID NO: 52630 - protein, 16 aa, Artificial Sequence
  Description of Artificial Sequence: Synthetic peptide
  Seed: AYERMCNILKGKFQTA
AYERMFNIMKAKFATA

SEQ ID NO: 52631 - protein, 16 aa, Artificial Sequence
  Description of Artificial Sequence: Synthetic peptide
  Seed: AYERMCNILKGKFQTA
AYERMFNIMKAKFCTA

SEQ ID NO: 52632 - protein, 16 aa, Artificial Sequence
  Description of Artificial Sequence: Synthetic peptide
  Seed: AYERMCNILKGKFQTA
AYERMFNIMKAKFFTA

SEQ ID NO: 52633 - protein, 16 aa, Artificial Sequence
  Description of Artificial Sequence: Synthetic peptide
  Seed: AYERMCNILKGKFQTA
AYERMFNIMKAKFGTA

SEQ ID NO: 52634 - protein, 16 aa, Artificial Sequence
  Description of Artificial Sequence: Synthetic peptide
  Seed: AYERMCNILKGKFQTA
AYERMFNIMKAKFHTA

SEQ ID NO: 52635 - protein, 16 aa, Artificial Sequence
  Description of Artificial Sequence: Synthetic peptide
  Seed: AYERMCNILKGKFQTA
AYERMFNIMKAKFITA

SEQ ID NO: 52636 - protein, 16 aa, Artificial Sequence
  Description of Artificial Sequence: Synthetic peptide
  Seed: AYERMCNILKGKFQTA
AYERMFNIMKAKFLTA

SEQ ID NO: 52637 - protein, 16 aa, Artificial Sequence
  Description of Artificial Sequence: Synthetic peptide
  Seed: AYERMCNILKGKFQTA
AYERMFNIMKAKFMTA

SEQ ID NO: 52638 - protein, 16 aa, Artificial Sequence
  Description of Artificial Sequence: Synthetic peptide
  Seed: AYERMCNILKGKFQTA
AYERMFNIMKAKFNTA

SEQ ID NO: 52639 - protein, 16 aa, Artificial Sequence
  Description of Artificial Sequence: Synthetic peptide
  Seed: AYERMCNILKGKFQTA
AYERMFNIMKAKFPTA

SEQ ID NO: 52640 - protein, 16 aa, Artificial Sequence
  Description of Artificial Sequence: Synthetic peptide
  Seed: AYERMCNILKGKFQTA
AYERMFNIMKAKFSTA

SEQ ID NO: 52641 - protein, 16 aa, Artificial Sequence
  Description of Artificial Sequence: Synthetic peptide
  Seed: AYERMCNILKGKFQTA
AYERMFNIMKAKFTTA

SEQ ID NO: 52642 - protein, 16 aa, Artificial Sequence
  Description of Artificial Sequence: Synthetic peptide
  Seed: AYERMCNILKGKFQTA
AYERMFNIMKAKFVTA

SEQ ID NO: 52643 - protein, 16 aa, Artificial Sequence
  Description of Artificial Sequence: Synthetic peptide
  Seed: AYERMCNILKGKFQTA
AYERMFNIMKGKFATA

SEQ ID NO: 52644 - protein, 16 aa, Artificial Sequence
  Description of Artificial Sequence: Synthetic peptide
  Seed: AYERMCNILKGKFQTA
AYERMFNIMKGKFCTA

SEQ ID NO: 52645 - protein, 16 aa, Artificial Sequence
  Description of Artificial Sequence: Synthetic peptide
  Seed: AYERMCNILKGKFQTA
AYERMFNIMKGKFFTA

SEQ ID NO: 52646 - protein, 16 aa, Artificial Sequence
  Description of Artificial Sequence: Synthetic peptide
  Seed: AYERMCNILKGKFQTA
AYERMFNIMKGKFGTA

SEQ ID NO: 52647 - protein, 16 aa, Artificial Sequence
  Description of Artificial Sequence: Synthetic peptide
  Seed: AYERMCNILKGKFQTA
AYERMFNIMKGKFITA

SEQ ID NO: 52648 - protein, 16 aa, Artificial Sequence
  Description of Artificial Sequence: Synthetic peptide
  Seed: AYERMCNILKGKFQTA
AYERMFNIMKGKFLTA

SEQ ID NO: 52649 - protein, 16 aa, Artificial Sequence
  Description of Artificial Sequence: Synthetic peptide
  Seed: AYERMCNILKGKFQTA
AYERMFNIMKGKFMTA

SEQ ID NO: 52650 - protein, 16 aa, Artificial Sequence
  Description of Artificial Sequence: Synthetic peptide
  Seed: AYERMCNILKGKFQTA
AYERMFNIMKGKFNTA

SEQ ID NO: 52651 - protein, 16 aa, Artificial Sequence
  Description of Artificial Sequence: Synthetic peptide
  Seed: AYERMCNILKGKFQTA
AYERMFNIMKGKFPTA

SEQ ID NO: 52652 - protein, 16 aa, Artificial Sequence
  Description of Artificial Sequence: Synthetic peptide
  Seed: AYERMCNILKGKFQTA
AYERMFNIMKGKFSTA

SEQ ID NO: 52653 - protein, 16 aa, Artificial Sequence
  Description of Artificial Sequence: Synthetic peptide
  Seed: AYERMCNILKGKFQTA
AYERMFNIMKGKFTTA

SEQ ID NO: 52654 - protein, 16 aa, Artificial Sequence
  Description of Artificial Sequence: Synthetic peptide
  Seed: AYERMCNILKGKFQTA
AYERMFNIMKGKFVTA

SEQ ID NO: 52655 - protein, 16 aa, Artificial Sequence
  Description of Artificial Sequence: Synthetic peptide
  Seed: AYERMCNILKGKFQTA
AYERMFNIMKIKFATA

SEQ ID NO: 52656 - protein, 16 aa, Artificial Sequence
  Description of Artificial Sequence: Synthetic peptide
  Seed: AYERMCNILKGKFQTA
AYERMFNIMKIKFITA

SEQ ID NO: 52657 - protein, 16 aa, Artificial Sequence
  Description of Artificial Sequence: Synthetic peptide
  Seed: AYERMCNILKGKFQTA
AYERMFNIMKIKFLTA

SEQ ID NO: 52658 - protein, 16 aa, Artificial Sequence
  Description of Artificial Sequence: Synthetic peptide
  Seed: AYERMCNILKGKFQTA
AYERMFNIMKIKFVTA

SEQ ID NO: 52659 - protein, 16 aa, Artificial Sequence
  Description of Artificial Sequence: Synthetic peptide
  Seed: AYERMCNILKGKFQTA
AYERMFNIMKNKFATA

SEQ ID NO: 52660 - protein, 16 aa, Artificial Sequence
  Description of Artificial Sequence: Synthetic peptide
  Seed: AYERMCNILKGKFQTA
AYERMFNIMKNKFGTA

SEQ ID NO: 52661 - protein, 16 aa, Artificial Sequence
  Description of Artificial Sequence: Synthetic peptide
  Seed: AYERMCNILKGKFQTA
AYERMFNIMKNKFITA

SEQ ID NO: 52662 - protein, 16 aa, Artificial Sequence
  Description of Artificial Sequence: Synthetic peptide
  Seed: AYERMCNILKGKFQTA
AYERMFNIMKNKFLTA

SEQ ID NO: 52663 - protein, 16 aa, Artificial Sequence
  Description of Artificial Sequence: Synthetic peptide
  Seed: AYERMCNILKGKFQTA
AYERMFNIMKNKFMTA

SEQ ID NO: 52664 - protein, 16 aa, Artificial Sequence
  Description of Artificial Sequence: Synthetic peptide
  Seed: AYERMCNILKGKFQTA
AYERMFNIMKNKFSTA

SEQ ID NO: 52665 - protein, 16 aa, Artificial Sequence
  Description of Artificial Sequence: Synthetic peptide
  Seed: AYERMCNILKGKFQTA
AYERMFNIMKNKFTTA

SEQ ID NO: 52666 - protein, 16 aa, Artificial Sequence
  Description of Artificial Sequence: Synthetic peptide
  Seed: AYERMCNILKGKFQTA
AYERMFNIMKNKFVTA

SEQ ID NO: 52667 - protein, 16 aa, Artificial Sequence
  Description of Artificial Sequence: Synthetic peptide
  Seed: AYERMCNILKGKFQTA
AYERMFNIMKPKFATA

SEQ ID NO: 52668 - protein, 16 aa, Artificial Sequence
  Description of Artificial Sequence: Synthetic peptide
  Seed: AYERMCNILKGKFQTA
AYERMFNIMKPKFGTA

SEQ ID NO: 52669 - protein, 16 aa, Artificial Sequence
  Description of Artificial Sequence: Synthetic peptide
  Seed: AYERMCNILKGKFQTA
AYERMFNIMKPKFITA

SEQ ID NO: 52670 - protein, 16 aa, Artificial Sequence
  Description of Artificial Sequence: Synthetic peptide
  Seed: AYERMCNILKGKFQTA
AYERMFNIMKPKFLTA

SEQ ID NO: 52671 - protein, 16 aa, Artificial Sequence
  Description of Artificial Sequence: Synthetic peptide
  Seed: AYERMCNILKGKFQTA
AYERMFNIMKPKFMTA

SEQ ID NO: 52672 - protein, 16 aa, Artificial Sequence
  Description of Artificial Sequence: Synthetic peptide
  Seed: AYERMCNILKGKFQTA
AYERMFNIMKPKFSTA

SEQ ID NO: 52673 - protein, 16 aa, Artificial Sequence
  Description of Artificial Sequence: Synthetic peptide
  Seed: AYERMCNILKGKFQTA
AYERMFNIMKPKFTTA

SEQ ID NO: 52674 - protein, 16 aa, Artificial Sequence
  Description of Artificial Sequence: Synthetic peptide
  Seed: AYERMCNILKGKFQTA
AYERMFNIMKPKFVTA

SEQ ID NO: 52675 - protein, 16 aa, Artificial Sequence
  Description of Artificial Sequence: Synthetic peptide
  Seed: AYERMCNILKGKFQTA
AYERMFNIMKSKFATA

SEQ ID NO: 52676 - protein, 16 aa, Artificial Sequence
  Description of Artificial Sequence: Synthetic peptide
  Seed: AYERMCNILKGKFQTA
AYERMFNIMKSKFCTA

SEQ ID NO: 52677 - protein, 16 aa, Artificial Sequence
  Description of Artificial Sequence: Synthetic peptide
  Seed: AYERMCNILKGKFQTA
AYERMFNIMKSKFFTA

SEQ ID NO: 52678 - protein, 16 aa, Artificial Sequence
  Description of Artificial Sequence: Synthetic peptide
  Seed: AYERMCNILKGKFQTA
AYERMFNIMKSKFGTA

SEQ ID NO: 52679 - protein, 16 aa, Artificial Sequence
  Description of Artificial Sequence: Synthetic peptide
  Seed: AYERMCNILKGKFQTA
AYERMFNIMKSKFITA

SEQ ID NO: 52680 - protein, 16 aa, Artificial Sequence
  Description of Artificial Sequence: Synthetic peptide
  Seed: AYERMCNILKGKFQTA
AYERMFNIMKSKFLTA

SEQ ID NO: 52681 - protein, 16 aa, Artificial Sequence
  Description of Artificial Sequence: Synthetic peptide
  Seed: AYERMCNILKGKFQTA
AYERMFNIMKSKFMTA

SEQ ID NO: 52682 - protein, 16 aa, Artificial Sequence
  Description of Artificial Sequence: Synthetic peptide
  Seed: AYERMCNILKGKFQTA
AYERMFNIMKSKFNTA

SEQ ID NO: 52683 - protein, 16 aa, Artificial Sequence
  Description of Artificial Sequence: Synthetic peptide
  Seed: AYERMCNILKGKFQTA
AYERMFNIMKSKFSTA

SEQ ID NO: 52684 - protein, 16 aa, Artificial Sequence
  Description of Artificial Sequence: Synthetic peptide
  Seed: AYERMCNILKGKFQTA
AYERMFNIMKSKFTTA

SEQ ID NO: 52685 - protein, 16 aa, Artificial Sequence
  Description of Artificial Sequence: Synthetic peptide
  Seed: AYERMCNILKGKFQTA
AYERMFNIMKSKFVTA

SEQ ID NO: 52686 - protein, 16 aa, Artificial Sequence
  Description of Artificial Sequence: Synthetic peptide
  Seed: AYERMCNILKGKFQTA
AYERMFNIMKTKFATA

SEQ ID NO: 52687 - protein, 16 aa, Artificial Sequence
  Description of Artificial Sequence: Synthetic peptide
  Seed: AYERMCNILKGKFQTA
AYERMFNIMKTKFITA

SEQ ID NO: 52688 - protein, 16 aa, Artificial Sequence
  Description of Artificial Sequence: Synthetic peptide
  Seed: AYERMCNILKGKFQTA
AYERMFNIMKTKFLTA

SEQ ID NO: 52689 - protein, 16 aa, Artificial Sequence
  Description of Artificial Sequence: Synthetic peptide
  Seed: AYERMCNILKGKFQTA
AYERMFNIMKTKFMTA

SEQ ID NO: 52690 - protein, 16 aa, Artificial Sequence
  Description of Artificial Sequence: Synthetic peptide
  Seed: AYERMCNILKGKFQTA
AYERMFNIMKTKFSTA

SEQ ID NO: 52691 - protein, 16 aa, Artificial Sequence
  Description of Artificial Sequence: Synthetic peptide
  Seed: AYERMCNILKGKFQTA
AYERMFNIMKTKFTTA

SEQ ID NO: 52692 - protein, 16 aa, Artificial Sequence
  Description of Artificial Sequence: Synthetic peptide
  Seed: AYERMCNILKGKFQTA
AYERMFNIMKTKFVTA

SEQ ID NO: 52693 - protein, 16 aa, Artificial Sequence
  Description of Artificial Sequence: Synthetic peptide
  Seed: AYERMCNILKGKFQTA
AYERMFNIMKVKFATA

SEQ ID NO: 52694 - protein, 16 aa, Artificial Sequence
  Description of Artificial Sequence: Synthetic peptide
  Seed: AYERMCNILKGKFQTA
AYERMFNIMKVKFITA

SEQ ID NO: 52695 - protein, 16 aa, Artificial Sequence
  Description of Artificial Sequence: Synthetic peptide
  Seed: AYERMCNILKGKFQTA
AYERMFNIMKVKFLTA

SEQ ID NO: 52696 - protein, 16 aa, Artificial Sequence
  Description of Artificial Sequence: Synthetic peptide
  Seed: AYERMCNILKGKFQTA
AYERMFNIMKVKFMTA

SEQ ID NO: 52697 - protein, 16 aa, Artificial Sequence
  Description of Artificial Sequence: Synthetic peptide
  Seed: AYERMCNILKGKFQTA
AYERMFNIMKVKFSTA

SEQ ID NO: 52698 - protein, 16 aa, Artificial Sequence
  Description of Artificial Sequence: Synthetic peptide
  Seed: AYERMCNILKGKFQTA
AYERMFNIMKVKFTTA

SEQ ID NO: 52699 - protein, 16 aa, Artificial Sequence
  Description of Artificial Sequence: Synthetic peptide
  Seed: AYERMCNILKGKFQTA
AYERMFNIMKVKFVTA

SEQ ID NO: 52700 - protein, 16 aa, Artificial Sequence
  Description of Artificial Sequence: Synthetic peptide
  Seed: AYERMCNILKGKFQTA
AYERMFNINKAKFITA

SEQ ID NO: 52701 - protein, 16 aa, Artificial Sequence
  Description of Artificial Sequence: Synthetic peptide
  Seed: AYERMCNILKGKFQTA
AYERMFNINKAKFLTA

SEQ ID NO: 52702 - protein, 16 aa, Artificial Sequence
  Description of Artificial Sequence: Synthetic peptide
  Seed: AYERMCNILKGKFQTA
AYERMFNINKAKFVTA

SEQ ID NO: 52703 - protein, 16 aa, Artificial Sequence
  Description of Artificial Sequence: Synthetic peptide
  Seed: AYERMCNILKGKFQTA
AYERMFNIQKAKFATA

SEQ ID NO: 52704 - protein, 16 aa, Artificial Sequence
  Description of Artificial Sequence: Synthetic peptide
  Seed: AYERMCNILKGKFQTA
AYERMFNIQKAKFITA

SEQ ID NO: 52705 - protein, 16 aa, Artificial Sequence
  Description of Artificial Sequence: Synthetic peptide
  Seed: AYERMCNILKGKFQTA
AYERMFNIQKAKFLTA

SEQ ID NO: 52706 - protein, 16 aa, Artificial Sequence
  Description of Artificial Sequence: Synthetic peptide
  Seed: AYERMCNILKGKFQTA
AYERMFNIQKAKFMTA

SEQ ID NO: 52707 - protein, 16 aa, Artificial Sequence
  Description of Artificial Sequence: Synthetic peptide
  Seed: AYERMCNILKGKFQTA
AYERMFNIQKAKFSTA

SEQ ID NO: 52708 - protein, 16 aa, Artificial Sequence
  Description of Artificial Sequence: Synthetic peptide
  Seed: AYERMCNILKGKFQTA
AYERMFNIQKAKFTTA

SEQ ID NO: 52709 - protein, 16 aa, Artificial Sequence
  Description of Artificial Sequence: Synthetic peptide
  Seed: AYERMCNILKGKFQTA
AYERMFNIQKAKFVTA

SEQ ID NO: 52710 - protein, 16 aa, Artificial Sequence
  Description of Artificial Sequence: Synthetic peptide
  Seed: AYERMCNILKGKFQTA
AYERMFNIQKGKFATA

SEQ ID NO: 52711 - protein, 16 aa, Artificial Sequence
  Description of Artificial Sequence: Synthetic peptide
  Seed: AYERMCNILKGKFQTA
AYERMFNIQKGKFITA

SEQ ID NO: 52712 - protein, 16 aa, Artificial Sequence
  Description of Artificial Sequence: Synthetic peptide
  Seed: AYERMCNILKGKFQTA
AYERMFNIQKGKFLTA

SEQ ID NO: 52713 - protein, 16 aa, Artificial Sequence
  Description of Artificial Sequence: Synthetic peptide
  Seed: AYERMCNILKGKFQTA
AYERMFNIQKGKFMTA

SEQ ID NO: 52714 - protein, 16 aa, Artificial Sequence
  Description of Artificial Sequence: Synthetic peptide
  Seed: AYERMCNILKGKFQTA
AYERMFNIQKGKFTTA

SEQ ID NO: 52715 - protein, 16 aa, Artificial Sequence
  Description of Artificial Sequence: Synthetic peptide
  Seed: AYERMCNILKGKFQTA
AYERMFNIQKGKFVTA

SEQ ID NO: 52716 - protein, 16 aa, Artificial Sequence
  Description of Artificial Sequence: Synthetic peptide
  Seed: AYERMCNILKGKFQTA
AYERMFNIQKNKFATA

SEQ ID NO: 52717 - protein, 16 aa, Artificial Sequence
  Description of Artificial Sequence: Synthetic peptide
  Seed: AYERMCNILKGKFQTA
AYERMFNIQKNKFITA

SEQ ID NO: 52718 - protein, 16 aa, Artificial Sequence
  Description of Artificial Sequence: Synthetic peptide
  Seed: AYERMCNILKGKFQTA
AYERMFNIQKNKFLTA

SEQ ID NO: 52719 - protein, 16 aa, Artificial Sequence
  Description of Artificial Sequence: Synthetic peptide
  Seed: AYERMCNILKGKFQTA
AYERMFNIQKNKFVTA

SEQ ID NO: 52720 - protein, 16 aa, Artificial Sequence
  Description of Artificial Sequence: Synthetic peptide
  Seed: AYERMCNILKGKFQTA
AYERMFNIQKPKFATA

SEQ ID NO: 52721 - protein, 16 aa, Artificial Sequence
  Description of Artificial Sequence: Synthetic peptide
  Seed: AYERMCNILKGKFQTA
AYERMFNIQKPKFITA

SEQ ID NO: 52722 - protein, 16 aa, Artificial Sequence
  Description of Artificial Sequence: Synthetic peptide
  Seed: AYERMCNILKGKFQTA
AYERMFNIQKPKFLTA

SEQ ID NO: 52723 - protein, 16 aa, Artificial Sequence
  Description of Artificial Sequence: Synthetic peptide
  Seed: AYERMCNILKGKFQTA
AYERMFNIQKPKFVTA

SEQ ID NO: 52724 - protein, 16 aa, Artificial Sequence
  Description of Artificial Sequence: Synthetic peptide
  Seed: AYERMCNILKGKFQTA
AYERMFNIQKSKFATA

SEQ ID NO: 52725 - protein, 16 aa, Artificial Sequence
  Description of Artificial Sequence: Synthetic peptide
  Seed: AYERMCNILKGKFQTA
AYERMFNIQKSKFITA

SEQ ID NO: 52726 - protein, 16 aa, Artificial Sequence
  Description of Artificial Sequence: Synthetic peptide
  Seed: AYERMCNILKGKFQTA
AYERMFNIQKSKFLTA

SEQ ID NO: 52727 - protein, 16 aa, Artificial Sequence
  Description of Artificial Sequence: Synthetic peptide
  Seed: AYERMCNILKGKFQTA
AYERMFNIQKSKFMTA

SEQ ID NO: 52728 - protein, 16 aa, Artificial Sequence
  Description of Artificial Sequence: Synthetic peptide
  Seed: AYERMCNILKGKFQTA
AYERMFNIQKSKFTTA

SEQ ID NO: 52729 - protein, 16 aa, Artificial Sequence
  Description of Artificial Sequence: Synthetic peptide
  Seed: AYERMCNILKGKFQTA
AYERMFNIQKSKFVTA

SEQ ID NO: 52730 - protein, 16 aa, Artificial Sequence
  Description of Artificial Sequence: Synthetic peptide
  Seed: AYERMCNILKGKFQTA
AYERMFNIQKTKFATA

SEQ ID NO: 52731 - protein, 16 aa, Artificial Sequence
  Description of Artificial Sequence: Synthetic peptide
  Seed: AYERMCNILKGKFQTA
AYERMFNIQKTKFITA

SEQ ID NO: 52732 - protein, 16 aa, Artificial Sequence
  Description of Artificial Sequence: Synthetic peptide
  Seed: AYERMCNILKGKFQTA
AYERMFNIQKTKFLTA

SEQ ID NO: 52733 - protein, 16 aa, Artificial Sequence
  Description of Artificial Sequence: Synthetic peptide
  Seed: AYERMCNILKGKFQTA
AYERMFNIQKTKFVTA

SEQ ID NO: 52734 - protein, 16 aa, Artificial Sequence
  Description of Artificial Sequence: Synthetic peptide
  Seed: AYERMCNILKGKFQTA
AYERMFNISKAKFATA

SEQ ID NO: 52735 - protein, 16 aa, Artificial Sequence
  Description of Artificial Sequence: Synthetic peptide
  Seed: AYERMCNILKGKFQTA
AYERMFNISKAKFITA

SEQ ID NO: 52736 - protein, 16 aa, Artificial Sequence
  Description of Artificial Sequence: Synthetic peptide
  Seed: AYERMCNILKGKFQTA
AYERMFNISKAKFLTA

SEQ ID NO: 52737 - protein, 16 aa, Artificial Sequence
  Description of Artificial Sequence: Synthetic peptide
  Seed: AYERMCNILKGKFQTA
AYERMFNISKAKFMTA

SEQ ID NO: 52738 - protein, 16 aa, Artificial Sequence
  Description of Artificial Sequence: Synthetic peptide
  Seed: AYERMCNILKGKFQTA
AYERMFNISKAKFTTA

SEQ ID NO: 52739 - protein, 16 aa, Artificial Sequence
  Description of Artificial Sequence: Synthetic peptide
  Seed: AYERMCNILKGKFQTA
AYERMFNISKAKFVTA

SEQ ID NO: 52740 - protein, 16 aa, Artificial Sequence
  Description of Artificial Sequence: Synthetic peptide
  Seed: AYERMCNILKGKFQTA
AYERMFNISKGKFATA

SEQ ID NO: 52741 - protein, 16 aa, Artificial Sequence
  Description of Artificial Sequence: Synthetic peptide
  Seed: AYERMCNILKGKFQTA
AYERMFNISKGKFITA

SEQ ID NO: 52742 - protein, 16 aa, Artificial Sequence
  Description of Artificial Sequence: Synthetic peptide
  Seed: AYERMCNILKGKFQTA
AYERMFNISKGKFLTA

SEQ ID NO: 52743 - protein, 16 aa, Artificial Sequence
  Description of Artificial Sequence: Synthetic peptide
  Seed: AYERMCNILKGKFQTA
AYERMFNISKGKFVTA

SEQ ID NO: 52744 - protein, 16 aa, Artificial Sequence
  Description of Artificial Sequence: Synthetic peptide
  Seed: AYERMCNILKGKFQTA
AYERMFNISKPKFITA

SEQ ID NO: 52745 - protein, 16 aa, Artificial Sequence
  Description of Artificial Sequence: Synthetic peptide
  Seed: AYERMCNILKGKFQTA
AYERMFNISKPKFLTA

SEQ ID NO: 52746 - protein, 16 aa, Artificial Sequence
  Description of Artificial Sequence: Synthetic peptide
  Seed: AYERMCNILKGKFQTA
AYERMFNISKPKFVTA

SEQ ID NO: 52747 - protein, 16 aa, Artificial Sequence
  Description of Artificial Sequence: Synthetic peptide
  Seed: AYERMCNILKGKFQTA
AYERMFNISKSKFATA

SEQ ID NO: 52748 - protein, 16 aa, Artificial Sequence
  Description of Artificial Sequence: Synthetic peptide
  Seed: AYERMCNILKGKFQTA
AYERMFNISKSKFITA

SEQ ID NO: 52749 - protein, 16 aa, Artificial Sequence
  Description of Artificial Sequence: Synthetic peptide
  Seed: AYERMCNILKGKFQTA
AYERMFNISKSKFLTA

SEQ ID NO: 52750 - protein, 16 aa, Artificial Sequence
  Description of Artificial Sequence: Synthetic peptide
  Seed: AYERMCNILKGKFQTA
AYERMFNISKSKFVTA

SEQ ID NO: 52751 - protein, 16 aa, Artificial Sequence
  Description of Artificial Sequence: Synthetic peptide
  Seed: AYERMCNILKGKFQTA
AYERMFNITKAKFATA

SEQ ID NO: 52752 - protein, 16 aa, Artificial Sequence
  Description of Artificial Sequence: Synthetic peptide
  Seed: AYERMCNILKGKFQTA
AYERMFNITKAKFITA

SEQ ID NO: 52753 - protein, 16 aa, Artificial Sequence
  Description of Artificial Sequence: Synthetic peptide
  Seed: AYERMCNILKGKFQTA
AYERMFNITKAKFLTA

SEQ ID NO: 52754 - protein, 16 aa, Artificial Sequence
  Description of Artificial Sequence: Synthetic peptide
  Seed: AYERMCNILKGKFQTA
AYERMFNITKAKFVTA

SEQ ID NO: 52755 - protein, 16 aa, Artificial Sequence
  Description of Artificial Sequence: Synthetic peptide
  Seed: AYERMCNILKGKFQTA
AYERMFNIVKAKFATA

SEQ ID NO: 52756 - protein, 16 aa, Artificial Sequence
  Description of Artificial Sequence: Synthetic peptide
  Seed: AYERMCNILKGKFQTA
AYERMFNIVKAKFITA

SEQ ID NO: 52757 - protein, 16 aa, Artificial Sequence
  Description of Artificial Sequence: Synthetic peptide
  Seed: AYERMCNILKGKFQTA
AYERMFNIVKAKFLTA

SEQ ID NO: 52758 - protein, 16 aa, Artificial Sequence
  Description of Artificial Sequence: Synthetic peptide
  Seed: AYERMCNILKGKFQTA
AYERMFNIVKAKFMTA

SEQ ID NO: 52759 - protein, 16 aa, Artificial Sequence
  Description of Artificial Sequence: Synthetic peptide
  Seed: AYERMCNILKGKFQTA
AYERMFNIVKAKFSTA

SEQ ID NO: 52760 - protein, 16 aa, Artificial Sequence
  Description of Artificial Sequence: Synthetic peptide
  Seed: AYERMCNILKGKFQTA
AYERMFNIVKAKFTTA

SEQ ID NO: 52761 - protein, 16 aa, Artificial Sequence
  Description of Artificial Sequence: Synthetic peptide
  Seed: AYERMCNILKGKFQTA
AYERMFNIVKAKFVTA

SEQ ID NO: 52762 - protein, 16 aa, Artificial Sequence
  Description of Artificial Sequence: Synthetic peptide
  Seed: AYERMCNILKGKFQTA
AYERMFNIVKGKFATA

SEQ ID NO: 52763 - protein, 16 aa, Artificial Sequence
  Description of Artificial Sequence: Synthetic peptide
  Seed: AYERMCNILKGKFQTA
AYERMFNIVKGKFITA

SEQ ID NO: 52764 - protein, 16 aa, Artificial Sequence
  Description of Artificial Sequence: Synthetic peptide
  Seed: AYERMCNILKGKFQTA
AYERMFNIVKGKFLTA

SEQ ID NO: 52765 - protein, 16 aa, Artificial Sequence
  Description of Artificial Sequence: Synthetic peptide
  Seed: AYERMCNILKGKFQTA
AYERMFNIVKGKFMTA

SEQ ID NO: 52766 - protein, 16 aa, Artificial Sequence
  Description of Artificial Sequence: Synthetic peptide
  Seed: AYERMCNILKGKFQTA
AYERMFNIVKGKFSTA

SEQ ID NO: 52767 - protein, 16 aa, Artificial Sequence
  Description of Artificial Sequence: Synthetic peptide
  Seed: AYERMCNILKGKFQTA
AYERMFNIVKGKFTTA

SEQ ID NO: 52768 - protein, 16 aa, Artificial Sequence
  Description of Artificial Sequence: Synthetic peptide
  Seed: AYERMCNILKGKFQTA
AYERMFNIVKGKFVTA

SEQ ID NO: 52769 - protein, 16 aa, Artificial Sequence
  Description of Artificial Sequence: Synthetic peptide
  Seed: AYERMCNILKGKFQTA
AYERMFNIVKNKFATA

SEQ ID NO: 52770 - protein, 16 aa, Artificial Sequence
  Description of Artificial Sequence: Synthetic peptide
  Seed: AYERMCNILKGKFQTA
AYERMFNIVKNKFITA

SEQ ID NO: 52771 - protein, 16 aa, Artificial Sequence
  Description of Artificial Sequence: Synthetic peptide
  Seed: AYERMCNILKGKFQTA
AYERMFNIVKNKFLTA

SEQ ID NO: 52772 - protein, 16 aa, Artificial Sequence
  Description of Artificial Sequence: Synthetic peptide
  Seed: AYERMCNILKGKFQTA
AYERMFNIVKNKFVTA

SEQ ID NO: 52773 - protein, 16 aa, Artificial Sequence
  Description of Artificial Sequence: Synthetic peptide
  Seed: AYERMCNILKGKFQTA
AYERMFNIVKPKFATA

SEQ ID NO: 52774 - protein, 16 aa, Artificial Sequence
  Description of Artificial Sequence: Synthetic peptide
  Seed: AYERMCNILKGKFQTA
AYERMFNIVKPKFITA

SEQ ID NO: 52775 - protein, 16 aa, Artificial Sequence
  Description of Artificial Sequence: Synthetic peptide
  Seed: AYERMCNILKGKFQTA
AYERMFNIVKPKFLTA

SEQ ID NO: 52776 - protein, 16 aa, Artificial Sequence
  Description of Artificial Sequence: Synthetic peptide
  Seed: AYERMCNILKGKFQTA
AYERMFNIVKPKFVTA

SEQ ID NO: 52777 - protein, 16 aa, Artificial Sequence
  Description of Artificial Sequence: Synthetic peptide
  Seed: AYERMCNILKGKFQTA
AYERMFNIVKSKFATA

SEQ ID NO: 52778 - protein, 16 aa, Artificial Sequence
  Description of Artificial Sequence: Synthetic peptide
  Seed: AYERMCNILKGKFQTA
AYERMFNIVKSKFITA

SEQ ID NO: 52779 - protein, 16 aa, Artificial Sequence
  Description of Artificial Sequence: Synthetic peptide
  Seed: AYERMCNILKGKFQTA
AYERMFNIVKSKFLTA

SEQ ID NO: 52780 - protein, 16 aa, Artificial Sequence
  Description of Artificial Sequence: Synthetic peptide
  Seed: AYERMCNILKGKFQTA
AYERMFNIVKSKFMTA

SEQ ID NO: 52781 - protein, 16 aa, Artificial Sequence
  Description of Artificial Sequence: Synthetic peptide
  Seed: AYERMCNILKGKFQTA
AYERMFNIVKSKFSTA

SEQ ID NO: 52782 - protein, 16 aa, Artificial Sequence
  Description of Artificial Sequence: Synthetic peptide
  Seed: AYERMCNILKGKFQTA
AYERMFNIVKSKFTTA

SEQ ID NO: 52783 - protein, 16 aa, Artificial Sequence
  Description of Artificial Sequence: Synthetic peptide
  Seed: AYERMCNILKGKFQTA
AYERMFNIVKSKFVTA

SEQ ID NO: 52784 - protein, 16 aa, Artificial Sequence
  Description of Artificial Sequence: Synthetic peptide
  Seed: AYERMCNILKGKFQTA
AYERMFNIVKTKFATA

SEQ ID NO: 52785 - protein, 16 aa, Artificial Sequence
  Description of Artificial Sequence: Synthetic peptide
  Seed: AYERMCNILKGKFQTA
AYERMFNIVKTKFITA

SEQ ID NO: 52786 - protein, 16 aa, Artificial Sequence
  Description of Artificial Sequence: Synthetic peptide
  Seed: AYERMCNILKGKFQTA
AYERMFNIVKTKFLTA

SEQ ID NO: 52787 - protein, 16 aa, Artificial Sequence
  Description of Artificial Sequence: Synthetic peptide
  Seed: AYERMCNILKGKFQTA
AYERMFNIVKTKFVTA

SEQ ID NO: 52788 - protein, 16 aa, Artificial Sequence
  Description of Artificial Sequence: Synthetic peptide
  Seed: AYERMCNILKGKFQTA
AYERMINIAKAKFATA

SEQ ID NO: 52789 - protein, 16 aa, Artificial Sequence
  Description of Artificial Sequence: Synthetic peptide
  Seed: AYERMCNILKGKFQTA
AYERMINIAKAKFITA

SEQ ID NO: 52790 - protein, 16 aa, Artificial Sequence
  Description of Artificial Sequence: Synthetic peptide
  Seed: AYERMCNILKGKFQTA
AYERMINIAKAKFLTA

SEQ ID NO: 52791 - protein, 16 aa, Artificial Sequence
  Description of Artificial Sequence: Synthetic peptide
  Seed: AYERMCNILKGKFQTA
AYERMINIAKAKFVTA

SEQ ID NO: 52792 - protein, 16 aa, Artificial Sequence
  Description of Artificial Sequence: Synthetic peptide
  Seed: AYERMCNILKGKFQTA
AYERMINIAKGKFATA

SEQ ID NO: 52793 - protein, 16 aa, Artificial Sequence
  Description of Artificial Sequence: Synthetic peptide
  Seed: AYERMCNILKGKFQTA
AYERMINIAKGKFITA

SEQ ID NO: 52794 - protein, 16 aa, Artificial Sequence
  Description of Artificial Sequence: Synthetic peptide
  Seed: AYERMCNILKGKFQTA
AYERMINIAKGKFLTA

SEQ ID NO: 52795 - protein, 16 aa, Artificial Sequence
  Description of Artificial Sequence: Synthetic peptide
  Seed: AYERMCNILKGKFQTA
AYERMINIAKGKFVTA

SEQ ID NO: 52796 - protein, 16 aa, Artificial Sequence
  Description of Artificial Sequence: Synthetic peptide
  Seed: AYERMCNILKGKFQTA
AYERMINIAKSKFITA

SEQ ID NO: 52797 - protein, 16 aa, Artificial Sequence
  Description of Artificial Sequence: Synthetic peptide
  Seed: AYERMCNILKGKFQTA
AYERMINIAKSKFLTA

SEQ ID NO: 52798 - protein, 16 aa, Artificial Sequence
  Description of Artificial Sequence: Synthetic peptide
  Seed: AYERMCNILKGKFQTA
AYERMINIAKSKFVTA

SEQ ID NO: 52799 - protein, 16 aa, Artificial Sequence
  Description of Artificial Sequence: Synthetic peptide
  Seed: AYERMCNILKGKFQTA
AYERMINIIKAKFATA

SEQ ID NO: 52800 - protein, 16 aa, Artificial Sequence
  Description of Artificial Sequence: Synthetic peptide
  Seed: AYERMCNILKGKFQTA
AYERMINIIKAKFITA

SEQ ID NO: 52801 - protein, 16 aa, Artificial Sequence
  Description of Artificial Sequence: Synthetic peptide
  Seed: AYERMCNILKGKFQTA
AYERMINIIKAKFLTA

SEQ ID NO: 52802 - protein, 16 aa, Artificial Sequence
  Description of Artificial Sequence: Synthetic peptide
  Seed: AYERMCNILKGKFQTA
AYERMINIIKAKFVTA

SEQ ID NO: 52803 - protein, 16 aa, Artificial Sequence
  Description of Artificial Sequence: Synthetic peptide
  Seed: AYERMCNILKGKFQTA
AYERMINIIKGKFATA

SEQ ID NO: 52804 - protein, 16 aa, Artificial Sequence
  Description of Artificial Sequence: Synthetic peptide
  Seed: AYERMCNILKGKFQTA
AYERMINIIKGKFITA

SEQ ID NO: 52805 - protein, 16 aa, Artificial Sequence
  Description of Artificial Sequence: Synthetic peptide
  Seed: AYERMCNILKGKFQTA
AYERMINIIKGKFLTA

SEQ ID NO: 52806 - protein, 16 aa, Artificial Sequence
  Description of Artificial Sequence: Synthetic peptide
  Seed: AYERMCNILKGKFQTA
AYERMINIIKGKFVTA

SEQ ID NO: 52807 - protein, 16 aa, Artificial Sequence
  Description of Artificial Sequence: Synthetic peptide
  Seed: AYERMCNILKGKFQTA
AYERMINIIKSKFLTA

SEQ ID NO: 52808 - protein, 16 aa, Artificial Sequence
  Description of Artificial Sequence: Synthetic peptide
  Seed: AYERMCNILKGKFQTA
AYERMINIIKSKFVTA

SEQ ID NO: 52809 - protein, 16 aa, Artificial Sequence
  Description of Artificial Sequence: Synthetic peptide
  Seed: AYERMCNILKGKFQTA
AYERMINILKAKFATA

SEQ ID NO: 52810 - protein, 16 aa, Artificial Sequence
  Description of Artificial Sequence: Synthetic peptide
  Seed: AYERMCNILKGKFQTA
AYERMINILKAKFITA

SEQ ID NO: 52811 - protein, 16 aa, Artificial Sequence
  Description of Artificial Sequence: Synthetic peptide
  Seed: AYERMCNILKGKFQTA
AYERMINILKAKFLTA

SEQ ID NO: 52812 - protein, 16 aa, Artificial Sequence
  Description of Artificial Sequence: Synthetic peptide
  Seed: AYERMCNILKGKFQTA
AYERMINILKAKFMTA

SEQ ID NO: 52813 - protein, 16 aa, Artificial Sequence
  Description of Artificial Sequence: Synthetic peptide
  Seed: AYERMCNILKGKFQTA
AYERMINILKAKFSTA

SEQ ID NO: 52814 - protein, 16 aa, Artificial Sequence
  Description of Artificial Sequence: Synthetic peptide
  Seed: AYERMCNILKGKFQTA
AYERMINILKAKFTTA

SEQ ID NO: 52815 - protein, 16 aa, Artificial Sequence
  Description of Artificial Sequence: Synthetic peptide
  Seed: AYERMCNILKGKFQTA
AYERMINILKAKFVTA

SEQ ID NO: 52816 - protein, 16 aa, Artificial Sequence
  Description of Artificial Sequence: Synthetic peptide
  Seed: AYERMCNILKGKFQTA
AYERMINILKGKFATA

SEQ ID NO: 52817 - protein, 16 aa, Artificial Sequence
  Description of Artificial Sequence: Synthetic peptide
  Seed: AYERMCNILKGKFQTA
AYERMINILKGKFITA

SEQ ID NO: 52818 - protein, 16 aa, Artificial Sequence
  Description of Artificial Sequence: Synthetic peptide
  Seed: AYERMCNILKGKFQTA
AYERMINILKGKFLTA

SEQ ID NO: 52819 - protein, 16 aa, Artificial Sequence
  Description of Artificial Sequence: Synthetic peptide
  Seed: AYERMCNILKGKFQTA
AYERMINILKGKFMTA

SEQ ID NO: 52820 - protein, 16 aa, Artificial Sequence
  Description of Artificial Sequence: Synthetic peptide
  Seed: AYERMCNILKGKFQTA
AYERMINILKGKFSTA

SEQ ID NO: 52821 - protein, 16 aa, Artificial Sequence
  Description of Artificial Sequence: Synthetic peptide
  Seed: AYERMCNILKGKFQTA
AYERMINILKGKFTTA

SEQ ID NO: 52822 - protein, 16 aa, Artificial Sequence
  Description of Artificial Sequence: Synthetic peptide
  Seed: AYERMCNILKGKFQTA
AYERMINILKGKFVTA

SEQ ID NO: 52823 - protein, 16 aa, Artificial Sequence
  Description of Artificial Sequence: Synthetic peptide
  Seed: AYERMCNILKGKFQTA
AYERMINILKPKFATA

SEQ ID NO: 52824 - protein, 16 aa, Artificial Sequence
  Description of Artificial Sequence: Synthetic peptide
  Seed: AYERMCNILKGKFQTA
AYERMINILKPKFITA

SEQ ID NO: 52825 - protein, 16 aa, Artificial Sequence
  Description of Artificial Sequence: Synthetic peptide
  Seed: AYERMCNILKGKFQTA
AYERMINILKPKFLTA

SEQ ID NO: 52826 - protein, 16 aa, Artificial Sequence
  Description of Artificial Sequence: Synthetic peptide
  Seed: AYERMCNILKGKFQTA
AYERMINILKPKFVTA

SEQ ID NO: 52827 - protein, 16 aa, Artificial Sequence
  Description of Artificial Sequence: Synthetic peptide
  Seed: AYERMCNILKGKFQTA
AYERMINILKSKFATA

SEQ ID NO: 52828 - protein, 16 aa, Artificial Sequence
  Description of Artificial Sequence: Synthetic peptide
  Seed: AYERMCNILKGKFQTA
AYERMINILKSKFITA

SEQ ID NO: 52829 - protein, 16 aa, Artificial Sequence
  Description of Artificial Sequence: Synthetic peptide
  Seed: AYERMCNILKGKFQTA
AYERMINILKSKFLTA

SEQ ID NO: 52830 - protein, 16 aa, Artificial Sequence
  Description of Artificial Sequence: Synthetic peptide
  Seed: AYERMCNILKGKFQTA
AYERMINILKSKFMTA

SEQ ID NO: 52831 - protein, 16 aa, Artificial Sequence
  Description of Artificial Sequence: Synthetic peptide
  Seed: AYERMCNILKGKFQTA
AYERMINILKSKFSTA

SEQ ID NO: 52832 - protein, 16 aa, Artificial Sequence
  Description of Artificial Sequence: Synthetic peptide
  Seed: AYERMCNILKGKFQTA
AYERMINILKSKFTTA

SEQ ID NO: 52833 - protein, 16 aa, Artificial Sequence
  Description of Artificial Sequence: Synthetic peptide
  Seed: AYERMCNILKGKFQTA
AYERMINILKSKFVTA

SEQ ID NO: 52834 - protein, 16 aa, Artificial Sequence
  Description of Artificial Sequence: Synthetic peptide
  Seed: AYERMCNILKGKFQTA
AYERMINILKTKFITA

SEQ ID NO: 52835 - protein, 16 aa, Artificial Sequence
  Description of Artificial Sequence: Synthetic peptide
  Seed: AYERMCNILKGKFQTA
AYERMINILKTKFLTA

SEQ ID NO: 52836 - protein, 16 aa, Artificial Sequence
  Description of Artificial Sequence: Synthetic peptide
  Seed: AYERMCNILKGKFQTA
AYERMINILKTKFVTA

SEQ ID NO: 52837 - protein, 16 aa, Artificial Sequence
  Description of Artificial Sequence: Synthetic peptide
  Seed: AYERMCNILKGKFQTA
AYERMINIMKAKFATA

SEQ ID NO: 52838 - protein, 16 aa, Artificial Sequence
  Description of Artificial Sequence: Synthetic peptide
  Seed: AYERMCNILKGKFQTA
AYERMINIMKAKFITA

SEQ ID NO: 52839 - protein, 16 aa, Artificial Sequence
  Description of Artificial Sequence: Synthetic peptide
  Seed: AYERMCNILKGKFQTA
AYERMINIMKAKFLTA

SEQ ID NO: 52840 - protein, 16 aa, Artificial Sequence
  Description of Artificial Sequence: Synthetic peptide
  Seed: AYERMCNILKGKFQTA
AYERMINIMKAKFMTA

SEQ ID NO: 52841 - protein, 16 aa, Artificial Sequence
  Description of Artificial Sequence: Synthetic peptide
  Seed: AYERMCNILKGKFQTA
AYERMINIMKAKFSTA

SEQ ID NO: 52842 - protein, 16 aa, Artificial Sequence
  Description of Artificial Sequence: Synthetic peptide
  Seed: AYERMCNILKGKFQTA
AYERMINIMKAKFTTA

SEQ ID NO: 52843 - protein, 16 aa, Artificial Sequence
  Description of Artificial Sequence: Synthetic peptide
  Seed: AYERMCNILKGKFQTA
AYERMINIMKAKFVTA

SEQ ID NO: 52844 - protein, 16 aa, Artificial Sequence
  Description of Artificial Sequence: Synthetic peptide
  Seed: AYERMCNILKGKFQTA
AYERMINIMKGKFATA

SEQ ID NO: 52845 - protein, 16 aa, Artificial Sequence
  Description of Artificial Sequence: Synthetic peptide
  Seed: AYERMCNILKGKFQTA
AYERMINIMKGKFITA

SEQ ID NO: 52846 - protein, 16 aa, Artificial Sequence
  Description of Artificial Sequence: Synthetic peptide
  Seed: AYERMCNILKGKFQTA
AYERMINIMKGKFLTA

SEQ ID NO: 52847 - protein, 16 aa, Artificial Sequence
  Description of Artificial Sequence: Synthetic peptide
  Seed: AYERMCNILKGKFQTA
AYERMINIMKGKFMTA

SEQ ID NO: 52848 - protein, 16 aa, Artificial Sequence
  Description of Artificial Sequence: Synthetic peptide
  Seed: AYERMCNILKGKFQTA
AYERMINIMKGKFSTA

SEQ ID NO: 52849 - protein, 16 aa, Artificial Sequence
  Description of Artificial Sequence: Synthetic peptide
  Seed: AYERMCNILKGKFQTA
AYERMINIMKGKFTTA

SEQ ID NO: 52850 - protein, 16 aa, Artificial Sequence
  Description of Artificial Sequence: Synthetic peptide
  Seed: AYERMCNILKGKFQTA
AYERMINIMKGKFVTA

SEQ ID NO: 52851 - protein, 16 aa, Artificial Sequence
  Description of Artificial Sequence: Synthetic peptide
  Seed: AYERMCNILKGKFQTA
AYERMINIMKPKFATA

SEQ ID NO: 52852 - protein, 16 aa, Artificial Sequence
  Description of Artificial Sequence: Synthetic peptide
  Seed: AYERMCNILKGKFQTA
AYERMINIMKPKFITA

SEQ ID NO: 52853 - protein, 16 aa, Artificial Sequence
  Description of Artificial Sequence: Synthetic peptide
  Seed: AYERMCNILKGKFQTA
AYERMINIMKPKFLTA

SEQ ID NO: 52854 - protein, 16 aa, Artificial Sequence
  Description of Artificial Sequence: Synthetic peptide
  Seed: AYERMCNILKGKFQTA
AYERMINIMKPKFVTA

SEQ ID NO: 52855 - protein, 16 aa, Artificial Sequence
  Description of Artificial Sequence: Synthetic peptide
  Seed: AYERMCNILKGKFQTA
AYERMINIMKSKFATA

SEQ ID NO: 52856 - protein, 16 aa, Artificial Sequence
  Description of Artificial Sequence: Synthetic peptide
  Seed: AYERMCNILKGKFQTA
AYERMINIMKSKFITA

SEQ ID NO: 52857 - protein, 16 aa, Artificial Sequence
  Description of Artificial Sequence: Synthetic peptide
  Seed: AYERMCNILKGKFQTA
AYERMINIMKSKFLTA

SEQ ID NO: 52858 - protein, 16 aa, Artificial Sequence
  Description of Artificial Sequence: Synthetic peptide
  Seed: AYERMCNILKGKFQTA
AYERMINIMKSKFMTA

SEQ ID NO: 52859 - protein, 16 aa, Artificial Sequence
  Description of Artificial Sequence: Synthetic peptide
  Seed: AYERMCNILKGKFQTA
AYERMINIMKSKFTTA

SEQ ID NO: 52860 - protein, 16 aa, Artificial Sequence
  Description of Artificial Sequence: Synthetic peptide
  Seed: AYERMCNILKGKFQTA
AYERMINIMKSKFVTA

SEQ ID NO: 52861 - protein, 16 aa, Artificial Sequence
  Description of Artificial Sequence: Synthetic peptide
  Seed: AYERMCNILKGKFQTA
AYERMINIMKTKFITA

SEQ ID NO: 52862 - protein, 16 aa, Artificial Sequence
  Description of Artificial Sequence: Synthetic peptide
  Seed: AYERMCNILKGKFQTA
AYERMINIMKTKFLTA

SEQ ID NO: 52863 - protein, 16 aa, Artificial Sequence
  Description of Artificial Sequence: Synthetic peptide
  Seed: AYERMCNILKGKFQTA
AYERMINIMKTKFVTA

SEQ ID NO: 52864 - protein, 16 aa, Artificial Sequence
  Description of Artificial Sequence: Synthetic peptide
  Seed: AYERMCNILKGKFQTA
AYERMINIQKAKFLTA

SEQ ID NO: 52865 - protein, 16 aa, Artificial Sequence
  Description of Artificial Sequence: Synthetic peptide
  Seed: AYERMCNILKGKFQTA
AYERMINIQKAKFVTA

SEQ ID NO: 52866 - protein, 16 aa, Artificial Sequence
  Description of Artificial Sequence: Synthetic peptide
  Seed: AYERMCNILKGKFQTA
AYERMLNIAKAKFATA

SEQ ID NO: 52867 - protein, 16 aa, Artificial Sequence
  Description of Artificial Sequence: Synthetic peptide
  Seed: AYERMCNILKGKFQTA
AYERMLNIAKAKFITA

SEQ ID NO: 52868 - protein, 16 aa, Artificial Sequence
  Description of Artificial Sequence: Synthetic peptide
  Seed: AYERMCNILKGKFQTA
AYERMLNIAKAKFLTA

SEQ ID NO: 52869 - protein, 16 aa, Artificial Sequence
  Description of Artificial Sequence: Synthetic peptide
  Seed: AYERMCNILKGKFQTA
AYERMLNIAKAKFVTA

SEQ ID NO: 52870 - protein, 16 aa, Artificial Sequence
  Description of Artificial Sequence: Synthetic peptide
  Seed: AYERMCNILKGKFQTA
AYERMLNIAKGKFITA

SEQ ID NO: 52871 - protein, 16 aa, Artificial Sequence
  Description of Artificial Sequence: Synthetic peptide
  Seed: AYERMCNILKGKFQTA
AYERMLNIAKGKFLTA

SEQ ID NO: 52872 - protein, 16 aa, Artificial Sequence
  Description of Artificial Sequence: Synthetic peptide
  Seed: AYERMCNILKGKFQTA
AYERMLNIAKGKFVTA

SEQ ID NO: 52873 - protein, 16 aa, Artificial Sequence
  Description of Artificial Sequence: Synthetic peptide
  Seed: AYERMCNILKGKFQTA
AYERMLNIAKSKFLTA

SEQ ID NO: 52874 - protein, 16 aa, Artificial Sequence
  Description of Artificial Sequence: Synthetic peptide
  Seed: AYERMCNILKGKFQTA
AYERMLNIAKSKFVTA

SEQ ID NO: 52875 - protein, 16 aa, Artificial Sequence
  Description of Artificial Sequence: Synthetic peptide
  Seed: AYERMCNILKGKFQTA
AYERMLNIIKAKFATA

SEQ ID NO: 52876 - protein, 16 aa, Artificial Sequence
  Description of Artificial Sequence: Synthetic peptide
  Seed: AYERMCNILKGKFQTA
AYERMLNIIKAKFITA

SEQ ID NO: 52877 - protein, 16 aa, Artificial Sequence
  Description of Artificial Sequence: Synthetic peptide
  Seed: AYERMCNILKGKFQTA
AYERMLNIIKAKFLTA

SEQ ID NO: 52878 - protein, 16 aa, Artificial Sequence
  Description of Artificial Sequence: Synthetic peptide
  Seed: AYERMCNILKGKFQTA
AYERMLNIIKAKFVTA

SEQ ID NO: 52879 - protein, 16 aa, Artificial Sequence
  Description of Artificial Sequence: Synthetic peptide
  Seed: AYERMCNILKGKFQTA
AYERMLNIIKGKFATA

SEQ ID NO: 52880 - protein, 16 aa, Artificial Sequence
  Description of Artificial Sequence: Synthetic peptide
  Seed: AYERMCNILKGKFQTA
AYERMLNIIKGKFITA

SEQ ID NO: 52881 - protein, 16 aa, Artificial Sequence
  Description of Artificial Sequence: Synthetic peptide
  Seed: AYERMCNILKGKFQTA
AYERMLNIIKGKFLTA

SEQ ID NO: 52882 - protein, 16 aa, Artificial Sequence
  Description of Artificial Sequence: Synthetic peptide
  Seed: AYERMCNILKGKFQTA
AYERMLNIIKGKFVTA

SEQ ID NO: 52883 - protein, 16 aa, Artificial Sequence
  Description of Artificial Sequence: Synthetic peptide
  Seed: AYERMCNILKGKFQTA
AYERMLNIIKSKFLTA

SEQ ID NO: 52884 - protein, 16 aa, Artificial Sequence
  Description of Artificial Sequence: Synthetic peptide
  Seed: AYERMCNILKGKFQTA
AYERMLNIIKSKFVTA

SEQ ID NO: 52885 - protein, 16 aa, Artificial Sequence
  Description of Artificial Sequence: Synthetic peptide
  Seed: AYERMCNILKGKFQTA
AYERMLNILKAKFATA

SEQ ID NO: 52886 - protein, 16 aa, Artificial Sequence
  Description of Artificial Sequence: Synthetic peptide
  Seed: AYERMCNILKGKFQTA
AYERMLNILKAKFITA

SEQ ID NO: 52887 - protein, 16 aa, Artificial Sequence
  Description of Artificial Sequence: Synthetic peptide
  Seed: AYERMCNILKGKFQTA
AYERMLNILKAKFLTA

SEQ ID NO: 52888 - protein, 16 aa, Artificial Sequence
  Description of Artificial Sequence: Synthetic peptide
  Seed: AYERMCNILKGKFQTA
AYERMLNILKAKFMTA

SEQ ID NO: 52889 - protein, 16 aa, Artificial Sequence
  Description of Artificial Sequence: Synthetic peptide
  Seed: AYERMCNILKGKFQTA
AYERMLNILKAKFSTA

SEQ ID NO: 52890 - protein, 16 aa, Artificial Sequence
  Description of Artificial Sequence: Synthetic peptide
  Seed: AYERMCNILKGKFQTA
AYERMLNILKAKFTTA

SEQ ID NO: 52891 - protein, 16 aa, Artificial Sequence
  Description of Artificial Sequence: Synthetic peptide
  Seed: AYERMCNILKGKFQTA
AYERMLNILKAKFVTA

SEQ ID NO: 52892 - protein, 16 aa, Artificial Sequence
  Description of Artificial Sequence: Synthetic peptide
  Seed: AYERMCNILKGKFQTA
AYERMLNILKGKFATA

SEQ ID NO: 52893 - protein, 16 aa, Artificial Sequence
  Description of Artificial Sequence: Synthetic peptide
  Seed: AYERMCNILKGKFQTA
AYERMLNILKGKFITA

SEQ ID NO: 52894 - protein, 16 aa, Artificial Sequence
  Description of Artificial Sequence: Synthetic peptide
  Seed: AYERMCNILKGKFQTA
AYERMLNILKGKFLTA

SEQ ID NO: 52895 - protein, 16 aa, Artificial Sequence
  Description of Artificial Sequence: Synthetic peptide
  Seed: AYERMCNILKGKFQTA
AYERMLNILKGKFMTA

SEQ ID NO: 52896 - protein, 16 aa, Artificial Sequence
  Description of Artificial Sequence: Synthetic peptide
  Seed: AYERMCNILKGKFQTA
AYERMLNILKGKFSTA

SEQ ID NO: 52897 - protein, 16 aa, Artificial Sequence
  Description of Artificial Sequence: Synthetic peptide
  Seed: AYERMCNILKGKFQTA
AYERMLNILKGKFTTA

SEQ ID NO: 52898 - protein, 16 aa, Artificial Sequence
  Description of Artificial Sequence: Synthetic peptide
  Seed: AYERMCNILKGKFQTA
AYERMLNILKGKFVTA

SEQ ID NO: 52899 - protein, 16 aa, Artificial Sequence
  Description of Artificial Sequence: Synthetic peptide
  Seed: AYERMCNILKGKFQTA
AYERMLNILKPKFATA

SEQ ID NO: 52900 - protein, 16 aa, Artificial Sequence
  Description of Artificial Sequence: Synthetic peptide
  Seed: AYERMCNILKGKFQTA
AYERMLNILKPKFITA

SEQ ID NO: 52901 - protein, 16 aa, Artificial Sequence
  Description of Artificial Sequence: Synthetic peptide
  Seed: AYERMCNILKGKFQTA
AYERMLNILKPKFLTA

SEQ ID NO: 52902 - protein, 16 aa, Artificial Sequence
  Description of Artificial Sequence: Synthetic peptide
  Seed: AYERMCNILKGKFQTA
AYERMLNILKPKFVTA

SEQ ID NO: 52903 - protein, 16 aa, Artificial Sequence
  Description of Artificial Sequence: Synthetic peptide
  Seed: AYERMCNILKGKFQTA
AYERMLNILKSKFATA

SEQ ID NO: 52904 - protein, 16 aa, Artificial Sequence
  Description of Artificial Sequence: Synthetic peptide
  Seed: AYERMCNILKGKFQTA
AYERMLNILKSKFITA

SEQ ID NO: 52905 - protein, 16 aa, Artificial Sequence
  Description of Artificial Sequence: Synthetic peptide
  Seed: AYERMCNILKGKFQTA
AYERMLNILKSKFLTA

SEQ ID NO: 52906 - protein, 16 aa, Artificial Sequence
  Description of Artificial Sequence: Synthetic peptide
  Seed: AYERMCNILKGKFQTA
AYERMLNILKSKFMTA

SEQ ID NO: 52907 - protein, 16 aa, Artificial Sequence
  Description of Artificial Sequence: Synthetic peptide
  Seed: AYERMCNILKGKFQTA
AYERMLNILKSKFTTA

SEQ ID NO: 52908 - protein, 16 aa, Artificial Sequence
  Description of Artificial Sequence: Synthetic peptide
  Seed: AYERMCNILKGKFQTA
AYERMLNILKSKFVTA

SEQ ID NO: 52909 - protein, 16 aa, Artificial Sequence
  Description of Artificial Sequence: Synthetic peptide
  Seed: AYERMCNILKGKFQTA
AYERMLNILKTKFITA

SEQ ID NO: 52910 - protein, 16 aa, Artificial Sequence
  Description of Artificial Sequence: Synthetic peptide
  Seed: AYERMCNILKGKFQTA
AYERMLNILKTKFLTA

SEQ ID NO: 52911 - protein, 16 aa, Artificial Sequence
  Description of Artificial Sequence: Synthetic peptide
  Seed: AYERMCNILKGKFQTA
AYERMLNILKTKFVTA

SEQ ID NO: 52912 - protein, 16 aa, Artificial Sequence
  Description of Artificial Sequence: Synthetic peptide
  Seed: AYERMCNILKGKFQTA
AYERMLNIMKAKFATA

SEQ ID NO: 52913 - protein, 16 aa, Artificial Sequence
  Description of Artificial Sequence: Synthetic peptide
  Seed: AYERMCNILKGKFQTA
AYERMLNIMKAKFITA

SEQ ID NO: 52914 - protein, 16 aa, Artificial Sequence
  Description of Artificial Sequence: Synthetic peptide
  Seed: AYERMCNILKGKFQTA
AYERMLNIMKAKFLTA

SEQ ID NO: 52915 - protein, 16 aa, Artificial Sequence
  Description of Artificial Sequence: Synthetic peptide
  Seed: AYERMCNILKGKFQTA
AYERMLNIMKAKFMTA

SEQ ID NO: 52916 - protein, 16 aa, Artificial Sequence
  Description of Artificial Sequence: Synthetic peptide
  Seed: AYERMCNILKGKFQTA
AYERMLNIMKAKFSTA

SEQ ID NO: 52917 - protein, 16 aa, Artificial Sequence
  Description of Artificial Sequence: Synthetic peptide
  Seed: AYERMCNILKGKFQTA
AYERMLNIMKAKFTTA

SEQ ID NO: 52918 - protein, 16 aa, Artificial Sequence
  Description of Artificial Sequence: Synthetic peptide
  Seed: AYERMCNILKGKFQTA
AYERMLNIMKAKFVTA

SEQ ID NO: 52919 - protein, 16 aa, Artificial Sequence
  Description of Artificial Sequence: Synthetic peptide
  Seed: AYERMCNILKGKFQTA
AYERMLNIMKGKFATA

SEQ ID NO: 52920 - protein, 16 aa, Artificial Sequence
  Description of Artificial Sequence: Synthetic peptide
  Seed: AYERMCNILKGKFQTA
AYERMLNIMKGKFITA

SEQ ID NO: 52921 - protein, 16 aa, Artificial Sequence
  Description of Artificial Sequence: Synthetic peptide
  Seed: AYERMCNILKGKFQTA
AYERMLNIMKGKFLTA

SEQ ID NO: 52922 - protein, 16 aa, Artificial Sequence
  Description of Artificial Sequence: Synthetic peptide
  Seed: AYERMCNILKGKFQTA
AYERMLNIMKGKFMTA

SEQ ID NO: 52923 - protein, 16 aa, Artificial Sequence
  Description of Artificial Sequence: Synthetic peptide
  Seed: AYERMCNILKGKFQTA
AYERMLNIMKGKFSTA

SEQ ID NO: 52924 - protein, 16 aa, Artificial Sequence
  Description of Artificial Sequence: Synthetic peptide
  Seed: AYERMCNILKGKFQTA
AYERMLNIMKGKFTTA

SEQ ID NO: 52925 - protein, 16 aa, Artificial Sequence
  Description of Artificial Sequence: Synthetic peptide
  Seed: AYERMCNILKGKFQTA
AYERMLNIMKGKFVTA

SEQ ID NO: 52926 - protein, 16 aa, Artificial Sequence
  Description of Artificial Sequence: Synthetic peptide
  Seed: AYERMCNILKGKFQTA
AYERMLNIMKPKFATA

SEQ ID NO: 52927 - protein, 16 aa, Artificial Sequence
  Description of Artificial Sequence: Synthetic peptide
  Seed: AYERMCNILKGKFQTA
AYERMLNIMKPKFITA

SEQ ID NO: 52928 - protein, 16 aa, Artificial Sequence
  Description of Artificial Sequence: Synthetic peptide
  Seed: AYERMCNILKGKFQTA
AYERMLNIMKPKFLTA

SEQ ID NO: 52929 - protein, 16 aa, Artificial Sequence
  Description of Artificial Sequence: Synthetic peptide
  Seed: AYERMCNILKGKFQTA
AYERMLNIMKPKFVTA

SEQ ID NO: 52930 - protein, 16 aa, Artificial Sequence
  Description of Artificial Sequence: Synthetic peptide
  Seed: AYERMCNILKGKFQTA
AYERMLNIMKSKFATA

SEQ ID NO: 52931 - protein, 16 aa, Artificial Sequence
  Description of Artificial Sequence: Synthetic peptide
  Seed: AYERMCNILKGKFQTA
AYERMLNIMKSKFITA

SEQ ID NO: 52932 - protein, 16 aa, Artificial Sequence
  Description of Artificial Sequence: Synthetic peptide
  Seed: AYERMCNILKGKFQTA
AYERMLNIMKSKFLTA

SEQ ID NO: 52933 - protein, 16 aa, Artificial Sequence
  Description of Artificial Sequence: Synthetic peptide
  Seed: AYERMCNILKGKFQTA
AYERMLNIMKSKFMTA

SEQ ID NO: 52934 - protein, 16 aa, Artificial Sequence
  Description of Artificial Sequence: Synthetic peptide
  Seed: AYERMCNILKGKFQTA
AYERMLNIMKSKFTTA

SEQ ID NO: 52935 - protein, 16 aa, Artificial Sequence
  Description of Artificial Sequence: Synthetic peptide
  Seed: AYERMCNILKGKFQTA
AYERMLNIMKSKFVTA

SEQ ID NO: 52936 - protein, 16 aa, Artificial Sequence
  Description of Artificial Sequence: Synthetic peptide
  Seed: AYERMCNILKGKFQTA
AYERMLNIMKTKFITA

SEQ ID NO: 52937 - protein, 16 aa, Artificial Sequence
  Description of Artificial Sequence: Synthetic peptide
  Seed: AYERMCNILKGKFQTA
AYERMLNIMKTKFLTA

SEQ ID NO: 52938 - protein, 16 aa, Artificial Sequence
  Description of Artificial Sequence: Synthetic peptide
  Seed: AYERMCNILKGKFQTA
AYERMLNIMKTKFVTA

SEQ ID NO: 52939 - protein, 16 aa, Artificial Sequence
  Description of Artificial Sequence: Synthetic peptide
  Seed: AYERMCNILKGKFQTA
AYERMMNIAKAKFLTA

SEQ ID NO: 52940 - protein, 16 aa, Artificial Sequence
  Description of Artificial Sequence: Synthetic peptide
  Seed: AYERMCNILKGKFQTA
AYERMMNIIKAKFVTA

SEQ ID NO: 52941 - protein, 16 aa, Artificial Sequence
  Description of Artificial Sequence: Synthetic peptide
  Seed: AYERMCNILKGKFQTA
AYERMMNILKAKFATA

SEQ ID NO: 52942 - protein, 16 aa, Artificial Sequence
  Description of Artificial Sequence: Synthetic peptide
  Seed: AYERMCNILKGKFQTA
AYERMMNILKAKFITA

SEQ ID NO: 52943 - protein, 16 aa, Artificial Sequence
  Description of Artificial Sequence: Synthetic peptide
  Seed: AYERMCNILKGKFQTA
AYERMMNILKAKFLTA

SEQ ID NO: 52944 - protein, 16 aa, Artificial Sequence
  Description of Artificial Sequence: Synthetic peptide
  Seed: AYERMCNILKGKFQTA
AYERMMNILKAKFTTA

SEQ ID NO: 52945 - protein, 16 aa, Artificial Sequence
  Description of Artificial Sequence: Synthetic peptide
  Seed: AYERMCNILKGKFQTA
AYERMMNILKAKFVTA

SEQ ID NO: 52946 - protein, 16 aa, Artificial Sequence
  Description of Artificial Sequence: Synthetic peptide
  Seed: AYERMCNILKGKFQTA
AYERMMNILKGKFATA

SEQ ID NO: 52947 - protein, 16 aa, Artificial Sequence
  Description of Artificial Sequence: Synthetic peptide
  Seed: AYERMCNILKGKFQTA
AYERMMNILKGKFITA

SEQ ID NO: 52948 - protein, 16 aa, Artificial Sequence
  Description of Artificial Sequence: Synthetic peptide
  Seed: AYERMCNILKGKFQTA
AYERMMNILKGKFLTA

SEQ ID NO: 52949 - protein, 16 aa, Artificial Sequence
  Description of Artificial Sequence: Synthetic peptide
  Seed: AYERMCNILKGKFQTA
AYERMMNILKGKFVTA

SEQ ID NO: 52950 - protein, 16 aa, Artificial Sequence
  Description of Artificial Sequence: Synthetic peptide
  Seed: AYERMCNILKGKFQTA
AYERMMNILKPKFVTA

SEQ ID NO: 52951 - protein, 16 aa, Artificial Sequence
  Description of Artificial Sequence: Synthetic peptide
  Seed: AYERMCNILKGKFQTA
AYERMMNILKSKFATA

SEQ ID NO: 52952 - protein, 16 aa, Artificial Sequence
  Description of Artificial Sequence: Synthetic peptide
  Seed: AYERMCNILKGKFQTA
AYERMMNILKSKFITA

SEQ ID NO: 52953 - protein, 16 aa, Artificial Sequence
  Description of Artificial Sequence: Synthetic peptide
  Seed: AYERMCNILKGKFQTA
AYERMMNILKSKFLTA

SEQ ID NO: 52954 - protein, 16 aa, Artificial Sequence
  Description of Artificial Sequence: Synthetic peptide
  Seed: AYERMCNILKGKFQTA
AYERMMNILKSKFVTA

SEQ ID NO: 52955 - protein, 16 aa, Artificial Sequence
  Description of Artificial Sequence: Synthetic peptide
  Seed: AYERMCNILKGKFQTA
AYERMMNIMKAKFATA

SEQ ID NO: 52956 - protein, 16 aa, Artificial Sequence
  Description of Artificial Sequence: Synthetic peptide
  Seed: AYERMCNILKGKFQTA
AYERMMNIMKAKFITA

SEQ ID NO: 52957 - protein, 16 aa, Artificial Sequence
  Description of Artificial Sequence: Synthetic peptide
  Seed: AYERMCNILKGKFQTA
AYERMMNIMKAKFLTA

SEQ ID NO: 52958 - protein, 16 aa, Artificial Sequence
  Description of Artificial Sequence: Synthetic peptide
  Seed: AYERMCNILKGKFQTA
AYERMMNIMKAKFMTA

SEQ ID NO: 52959 - protein, 16 aa, Artificial Sequence
  Description of Artificial Sequence: Synthetic peptide
  Seed: AYERMCNILKGKFQTA
AYERMMNIMKAKFTTA

SEQ ID NO: 52960 - protein, 16 aa, Artificial Sequence
  Description of Artificial Sequence: Synthetic peptide
  Seed: AYERMCNILKGKFQTA
AYERMMNIMKAKFVTA

SEQ ID NO: 52961 - protein, 16 aa, Artificial Sequence
  Description of Artificial Sequence: Synthetic peptide
  Seed: AYERMCNILKGKFQTA
AYERMMNIMKGKFATA

SEQ ID NO: 52962 - protein, 16 aa, Artificial Sequence
  Description of Artificial Sequence: Synthetic peptide
  Seed: AYERMCNILKGKFQTA
AYERMMNIMKGKFITA

SEQ ID NO: 52963 - protein, 16 aa, Artificial Sequence
  Description of Artificial Sequence: Synthetic peptide
  Seed: AYERMCNILKGKFQTA
AYERMMNIMKGKFLTA

SEQ ID NO: 52964 - protein, 16 aa, Artificial Sequence
  Description of Artificial Sequence: Synthetic peptide
  Seed: AYERMCNILKGKFQTA
AYERMMNIMKGKFVTA

SEQ ID NO: 52965 - protein, 16 aa, Artificial Sequence
  Description of Artificial Sequence: Synthetic peptide
  Seed: AYERMCNILKGKFQTA
AYERMMNIMKPKFVTA

SEQ ID NO: 52966 - protein, 16 aa, Artificial Sequence
  Description of Artificial Sequence: Synthetic peptide
  Seed: AYERMCNILKGKFQTA
AYERMMNIMKSKFATA

SEQ ID NO: 52967 - protein, 16 aa, Artificial Sequence
  Description of Artificial Sequence: Synthetic peptide
  Seed: AYERMCNILKGKFQTA
AYERMMNIMKSKFITA

SEQ ID NO: 52968 - protein, 16 aa, Artificial Sequence
  Description of Artificial Sequence: Synthetic peptide
  Seed: AYERMCNILKGKFQTA
AYERMMNIMKSKFLTA

SEQ ID NO: 52969 - protein, 16 aa, Artificial Sequence
  Description of Artificial Sequence: Synthetic peptide
  Seed: AYERMCNILKGKFQTA
AYERMMNIMKSKFVTA

SEQ ID NO: 52970 - protein, 16 aa, Artificial Sequence
  Description of Artificial Sequence: Synthetic peptide
  Seed: AYERMCNILKGKFQTA
AYERMVNILKAKFATA

SEQ ID NO: 52971 - protein, 16 aa, Artificial Sequence
  Description of Artificial Sequence: Synthetic peptide
  Seed: AYERMCNILKGKFQTA
AYERMVNILKAKFITA

SEQ ID NO: 52972 - protein, 16 aa, Artificial Sequence
  Description of Artificial Sequence: Synthetic peptide
  Seed: AYERMCNILKGKFQTA
AYERMVNILKAKFLTA

SEQ ID NO: 52973 - protein, 16 aa, Artificial Sequence
  Description of Artificial Sequence: Synthetic peptide
  Seed: AYERMCNILKGKFQTA
AYERMVNILKAKFVTA

SEQ ID NO: 52974 - protein, 16 aa, Artificial Sequence
  Description of Artificial Sequence: Synthetic peptide
  Seed: AYERMCNILKGKFQTA
AYERMVNILKGKFATA

SEQ ID NO: 52975 - protein, 16 aa, Artificial Sequence
  Description of Artificial Sequence: Synthetic peptide
  Seed: AYERMCNILKGKFQTA
AYERMVNILKGKFITA

SEQ ID NO: 52976 - protein, 16 aa, Artificial Sequence
  Description of Artificial Sequence: Synthetic peptide
  Seed: AYERMCNILKGKFQTA
AYERMVNILKGKFLTA

SEQ ID NO: 52977 - protein, 16 aa, Artificial Sequence
  Description of Artificial Sequence: Synthetic peptide
  Seed: AYERMCNILKGKFQTA
AYERMVNILKGKFVTA

SEQ ID NO: 52978 - protein, 16 aa, Artificial Sequence
  Description of Artificial Sequence: Synthetic peptide
  Seed: AYERMCNILKGKFQTA
AYERMVNILKSKFLTA

SEQ ID NO: 52979 - protein, 16 aa, Artificial Sequence
  Description of Artificial Sequence: Synthetic peptide
  Seed: AYERMCNILKGKFQTA
AYERMVNILKSKFVTA

SEQ ID NO: 52980 - protein, 16 aa, Artificial Sequence
  Description of Artificial Sequence: Synthetic peptide
  Seed: AYERMCNILKGKFQTA
AYERMVNIMKAKFATA

SEQ ID NO: 52981 - protein, 16 aa, Artificial Sequence
  Description of Artificial Sequence: Synthetic peptide
  Seed: AYERMCNILKGKFQTA
AYERMVNIMKAKFITA

SEQ ID NO: 52982 - protein, 16 aa, Artificial Sequence
  Description of Artificial Sequence: Synthetic peptide
  Seed: AYERMCNILKGKFQTA
AYERMVNIMKAKFLTA

SEQ ID NO: 52983 - protein, 16 aa, Artificial Sequence
  Description of Artificial Sequence: Synthetic peptide
  Seed: AYERMCNILKGKFQTA
AYERMVNIMKAKFVTA

SEQ ID NO: 52984 - protein, 16 aa, Artificial Sequence
  Description of Artificial Sequence: Synthetic peptide
  Seed: AYERMCNILKGKFQTA
AYERMVNIMKGKFATA

SEQ ID NO: 52985 - protein, 16 aa, Artificial Sequence
  Description of Artificial Sequence: Synthetic peptide
  Seed: AYERMCNILKGKFQTA
AYERMVNIMKGKFITA

SEQ ID NO: 52986 - protein, 16 aa, Artificial Sequence
  Description of Artificial Sequence: Synthetic peptide
  Seed: AYERMCNILKGKFQTA
AYERMVNIMKGKFLTA

SEQ ID NO: 52987 - protein, 16 aa, Artificial Sequence
  Description of Artificial Sequence: Synthetic peptide
  Seed: AYERMCNILKGKFQTA
AYERMVNIMKGKFVTA

SEQ ID NO: 52988 - protein, 16 aa, Artificial Sequence
  Description of Artificial Sequence: Synthetic peptide
  Seed: AYERMCNILKGKFQTA
AYERMVNIMKSKFITA

SEQ ID NO: 52989 - protein, 16 aa, Artificial Sequence
  Description of Artificial Sequence: Synthetic peptide
  Seed: AYERMCNILKGKFQTA
AYERMVNIMKSKFLTA

SEQ ID NO: 52990 - protein, 16 aa, Artificial Sequence
  Description of Artificial Sequence: Synthetic peptide
  Seed: AYERMCNILKGKFQTA
AYERMVNIMKSKFVTA

SEQ ID NO: 52991 - protein, 16 aa, Artificial Sequence
  Description of Artificial Sequence: Synthetic peptide
  Seed: AYERMCNILKGKFQTA
AYERMWNIAKAKFATA

SEQ ID NO: 52992 - protein, 16 aa, Artificial Sequence
  Description of Artificial Sequence: Synthetic peptide
  Seed: AYERMCNILKGKFQTA
AYERMWNIAKAKFITA

SEQ ID NO: 52993 - protein, 16 aa, Artificial Sequence
  Description of Artificial Sequence: Synthetic peptide
  Seed: AYERMCNILKGKFQTA
AYERMWNIAKAKFLTA

SEQ ID NO: 52994 - protein, 16 aa, Artificial Sequence
  Description of Artificial Sequence: Synthetic peptide
  Seed: AYERMCNILKGKFQTA
AYERMWNIAKAKFMTA

SEQ ID NO: 52995 - protein, 16 aa, Artificial Sequence
  Description of Artificial Sequence: Synthetic peptide
  Seed: AYERMCNILKGKFQTA
AYERMWNIAKAKFTTA

SEQ ID NO: 52996 - protein, 16 aa, Artificial Sequence
  Description of Artificial Sequence: Synthetic peptide
  Seed: AYERMCNILKGKFQTA
AYERMWNIAKAKFVTA

SEQ ID NO: 52997 - protein, 16 aa, Artificial Sequence
  Description of Artificial Sequence: Synthetic peptide
  Seed: AYERMCNILKGKFQTA
AYERMWNIAKGKFATA

SEQ ID NO: 52998 - protein, 16 aa, Artificial Sequence
  Description of Artificial Sequence: Synthetic peptide
  Seed: AYERMCNILKGKFQTA
AYERMWNIAKGKFITA

SEQ ID NO: 52999 - protein, 16 aa, Artificial Sequence
  Description of Artificial Sequence: Synthetic peptide
  Seed: AYERMCNILKGKFQTA
AYERMWNIAKGKFLTA

SEQ ID NO: 53000 - protein, 16 aa, Artificial Sequence
  Description of Artificial Sequence: Synthetic peptide
  Seed: AYERMCNILKGKFQTA
AYERMWNIAKGKFVTA

SEQ ID NO: 53001 - protein, 16 aa, Artificial Sequence
  Description of Artificial Sequence: Synthetic peptide
  Seed: AYERMCNILKGKFQTA
AYERMWNIAKPKFVTA

SEQ ID NO: 53002 - protein, 16 aa, Artificial Sequence
  Description of Artificial Sequence: Synthetic peptide
  Seed: AYERMCNILKGKFQTA
AYERMWNIAKSKFATA

SEQ ID NO: 53003 - protein, 16 aa, Artificial Sequence
  Description of Artificial Sequence: Synthetic peptide
  Seed: AYERMCNILKGKFQTA
AYERMWNIAKSKFITA

SEQ ID NO: 53004 - protein, 16 aa, Artificial Sequence
  Description of Artificial Sequence: Synthetic peptide
  Seed: AYERMCNILKGKFQTA
AYERMWNIAKSKFLTA

SEQ ID NO: 53005 - protein, 16 aa, Artificial Sequence
  Description of Artificial Sequence: Synthetic peptide
  Seed: AYERMCNILKGKFQTA
AYERMWNIAKSKFVTA

SEQ ID NO: 53006 - protein, 16 aa, Artificial Sequence
  Description of Artificial Sequence: Synthetic peptide
  Seed: AYERMCNILKGKFQTA
AYERMWNIIKAKFATA

SEQ ID NO: 53007 - protein, 16 aa, Artificial Sequence
  Description of Artificial Sequence: Synthetic peptide
  Seed: AYERMCNILKGKFQTA
AYERMWNIIKAKFITA

SEQ ID NO: 53008 - protein, 16 aa, Artificial Sequence
  Description of Artificial Sequence: Synthetic peptide
  Seed: AYERMCNILKGKFQTA
AYERMWNIIKAKFLTA

SEQ ID NO: 53009 - protein, 16 aa, Artificial Sequence
  Description of Artificial Sequence: Synthetic peptide
  Seed: AYERMCNILKGKFQTA
AYERMWNIIKAKFMTA

SEQ ID NO: 53010 - protein, 16 aa, Artificial Sequence
  Description of Artificial Sequence: Synthetic peptide
  Seed: AYERMCNILKGKFQTA
AYERMWNIIKAKFTTA

SEQ ID NO: 53011 - protein, 16 aa, Artificial Sequence
  Description of Artificial Sequence: Synthetic peptide
  Seed: AYERMCNILKGKFQTA
AYERMWNIIKAKFVTA

SEQ ID NO: 53012 - protein, 16 aa, Artificial Sequence
  Description of Artificial Sequence: Synthetic peptide
  Seed: AYERMCNILKGKFQTA
AYERMWNIIKGKFATA

SEQ ID NO: 53013 - protein, 16 aa, Artificial Sequence
  Description of Artificial Sequence: Synthetic peptide
  Seed: AYERMCNILKGKFQTA
AYERMWNIIKGKFITA

SEQ ID NO: 53014 - protein, 16 aa, Artificial Sequence
  Description of Artificial Sequence: Synthetic peptide
  Seed: AYERMCNILKGKFQTA
AYERMWNIIKGKFLTA

SEQ ID NO: 53015 - protein, 16 aa, Artificial Sequence
  Description of Artificial Sequence: Synthetic peptide
  Seed: AYERMCNILKGKFQTA
AYERMWNIIKGKFVTA

SEQ ID NO: 53016 - protein, 16 aa, Artificial Sequence
  Description of Artificial Sequence: Synthetic peptide
  Seed: AYERMCNILKGKFQTA
AYERMWNIIKPKFLTA

SEQ ID NO: 53017 - protein, 16 aa, Artificial Sequence
  Description of Artificial Sequence: Synthetic peptide
  Seed: AYERMCNILKGKFQTA
AYERMWNIIKPKFVTA

SEQ ID NO: 53018 - protein, 16 aa, Artificial Sequence
  Description of Artificial Sequence: Synthetic peptide
  Seed: AYERMCNILKGKFQTA
AYERMWNIIKSKFATA

SEQ ID NO: 53019 - protein, 16 aa, Artificial Sequence
  Description of Artificial Sequence: Synthetic peptide
  Seed: AYERMCNILKGKFQTA
AYERMWNIIKSKFITA

SEQ ID NO: 53020 - protein, 16 aa, Artificial Sequence
  Description of Artificial Sequence: Synthetic peptide
  Seed: AYERMCNILKGKFQTA
AYERMWNIIKSKFLTA

SEQ ID NO: 53021 - protein, 16 aa, Artificial Sequence
  Description of Artificial Sequence: Synthetic peptide
  Seed: AYERMCNILKGKFQTA
AYERMWNIIKSKFVTA

SEQ ID NO: 53022 - protein, 16 aa, Artificial Sequence
  Description of Artificial Sequence: Synthetic peptide
  Seed: AYERMCNILKGKFQTA
AYERMWNILKAKFATA

SEQ ID NO: 53023 - protein, 16 aa, Artificial Sequence
  Description of Artificial Sequence: Synthetic peptide
  Seed: AYERMCNILKGKFQTA
AYERMWNILKAKFITA

SEQ ID NO: 53024 - protein, 16 aa, Artificial Sequence
  Description of Artificial Sequence: Synthetic peptide
  Seed: AYERMCNILKGKFQTA
AYERMWNILKAKFLTA

SEQ ID NO: 53025 - protein, 16 aa, Artificial Sequence
  Description of Artificial Sequence: Synthetic peptide
  Seed: AYERMCNILKGKFQTA
AYERMWNILKAKFMTA

SEQ ID NO: 53026 - protein, 16 aa, Artificial Sequence
  Description of Artificial Sequence: Synthetic peptide
  Seed: AYERMCNILKGKFQTA
AYERMWNILKAKFSTA

SEQ ID NO: 53027 - protein, 16 aa, Artificial Sequence
  Description of Artificial Sequence: Synthetic peptide
  Seed: AYERMCNILKGKFQTA
AYERMWNILKAKFTTA

SEQ ID NO: 53028 - protein, 16 aa, Artificial Sequence
  Description of Artificial Sequence: Synthetic peptide
  Seed: AYERMCNILKGKFQTA
AYERMWNILKAKFVTA

SEQ ID NO: 53029 - protein, 16 aa, Artificial Sequence
  Description of Artificial Sequence: Synthetic peptide
  Seed: AYERMCNILKGKFQTA
AYERMWNILKGKFATA

SEQ ID NO: 53030 - protein, 16 aa, Artificial Sequence
  Description of Artificial Sequence: Synthetic peptide
  Seed: AYERMCNILKGKFQTA
AYERMWNILKGKFITA

SEQ ID NO: 53031 - protein, 16 aa, Artificial Sequence
  Description of Artificial Sequence: Synthetic peptide
  Seed: AYERMCNILKGKFQTA
AYERMWNILKGKFLTA

SEQ ID NO: 53032 - protein, 16 aa, Artificial Sequence
  Description of Artificial Sequence: Synthetic peptide
  Seed: AYERMCNILKGKFQTA
AYERMWNILKGKFMTA

SEQ ID NO: 53033 - protein, 16 aa, Artificial Sequence
  Description of Artificial Sequence: Synthetic peptide
  Seed: AYERMCNILKGKFQTA
AYERMWNILKGKFSTA

SEQ ID NO: 53034 - protein, 16 aa, Artificial Sequence
  Description of Artificial Sequence: Synthetic peptide
  Seed: AYERMCNILKGKFQTA
AYERMWNILKGKFTTA

SEQ ID NO: 53035 - protein, 16 aa, Artificial Sequence
  Description of Artificial Sequence: Synthetic peptide
  Seed: AYERMCNILKGKFQTA
AYERMWNILKGKFVTA

SEQ ID NO: 53036 - protein, 16 aa, Artificial Sequence
  Description of Artificial Sequence: Synthetic peptide
  Seed: AYERMCNILKGKFQTA
AYERMWNILKNKFATA

SEQ ID NO: 53037 - protein, 16 aa, Artificial Sequence
  Description of Artificial Sequence: Synthetic peptide
  Seed: AYERMCNILKGKFQTA
AYERMWNILKNKFITA

SEQ ID NO: 53038 - protein, 16 aa, Artificial Sequence
  Description of Artificial Sequence: Synthetic peptide
  Seed: AYERMCNILKGKFQTA
AYERMWNILKNKFLTA

SEQ ID NO: 53039 - protein, 16 aa, Artificial Sequence
  Description of Artificial Sequence: Synthetic peptide
  Seed: AYERMCNILKGKFQTA
AYERMWNILKNKFVTA

SEQ ID NO: 53040 - protein, 16 aa, Artificial Sequence
  Description of Artificial Sequence: Synthetic peptide
  Seed: AYERMCNILKGKFQTA
AYERMWNILKPKFATA

SEQ ID NO: 53041 - protein, 16 aa, Artificial Sequence
  Description of Artificial Sequence: Synthetic peptide
  Seed: AYERMCNILKGKFQTA
AYERMWNILKPKFITA

SEQ ID NO: 53042 - protein, 16 aa, Artificial Sequence
  Description of Artificial Sequence: Synthetic peptide
  Seed: AYERMCNILKGKFQTA
AYERMWNILKPKFLTA

SEQ ID NO: 53043 - protein, 16 aa, Artificial Sequence
  Description of Artificial Sequence: Synthetic peptide
  Seed: AYERMCNILKGKFQTA
AYERMWNILKPKFVTA

SEQ ID NO: 53044 - protein, 16 aa, Artificial Sequence
  Description of Artificial Sequence: Synthetic peptide
  Seed: AYERMCNILKGKFQTA
AYERMWNILKSKFATA

SEQ ID NO: 53045 - protein, 16 aa, Artificial Sequence
  Description of Artificial Sequence: Synthetic peptide
  Seed: AYERMCNILKGKFQTA
AYERMWNILKSKFITA

SEQ ID NO: 53046 - protein, 16 aa, Artificial Sequence
  Description of Artificial Sequence: Synthetic peptide
  Seed: AYERMCNILKGKFQTA
AYERMWNILKSKFLTA

SEQ ID NO: 53047 - protein, 16 aa, Artificial Sequence
  Description of Artificial Sequence: Synthetic peptide
  Seed: AYERMCNILKGKFQTA
AYERMWNILKSKFMTA

SEQ ID NO: 53048 - protein, 16 aa, Artificial Sequence
  Description of Artificial Sequence: Synthetic peptide
  Seed: AYERMCNILKGKFQTA
AYERMWNILKSKFSTA

SEQ ID NO: 53049 - protein, 16 aa, Artificial Sequence
  Description of Artificial Sequence: Synthetic peptide
  Seed: AYERMCNILKGKFQTA
AYERMWNILKSKFTTA

SEQ ID NO: 53050 - protein, 16 aa, Artificial Sequence
  Description of Artificial Sequence: Synthetic peptide
  Seed: AYERMCNILKGKFQTA
AYERMWNILKSKFVTA

SEQ ID NO: 53051 - protein, 16 aa, Artificial Sequence
  Description of Artificial Sequence: Synthetic peptide
  Seed: AYERMCNILKGKFQTA
AYERMWNILKTKFATA

SEQ ID NO: 53052 - protein, 16 aa, Artificial Sequence
  Description of Artificial Sequence: Synthetic peptide
  Seed: AYERMCNILKGKFQTA
AYERMWNILKTKFITA

SEQ ID NO: 53053 - protein, 16 aa, Artificial Sequence
  Description of Artificial Sequence: Synthetic peptide
  Seed: AYERMCNILKGKFQTA
AYERMWNILKTKFLTA

SEQ ID NO: 53054 - protein, 16 aa, Artificial Sequence
  Description of Artificial Sequence: Synthetic peptide
  Seed: AYERMCNILKGKFQTA
AYERMWNILKTKFVTA

SEQ ID NO: 53055 - protein, 16 aa, Artificial Sequence
  Description of Artificial Sequence: Synthetic peptide
  Seed: AYERMCNILKGKFQTA
AYERMWNIMKAKFATA

SEQ ID NO: 53056 - protein, 16 aa, Artificial Sequence
  Description of Artificial Sequence: Synthetic peptide
  Seed: AYERMCNILKGKFQTA
AYERMWNIMKAKFITA

SEQ ID NO: 53057 - protein, 16 aa, Artificial Sequence
  Description of Artificial Sequence: Synthetic peptide
  Seed: AYERMCNILKGKFQTA
AYERMWNIMKAKFLTA

SEQ ID NO: 53058 - protein, 16 aa, Artificial Sequence
  Description of Artificial Sequence: Synthetic peptide
  Seed: AYERMCNILKGKFQTA
AYERMWNIMKAKFMTA

SEQ ID NO: 53059 - protein, 16 aa, Artificial Sequence
  Description of Artificial Sequence: Synthetic peptide
  Seed: AYERMCNILKGKFQTA
AYERMWNIMKAKFSTA

SEQ ID NO: 53060 - protein, 16 aa, Artificial Sequence
  Description of Artificial Sequence: Synthetic peptide
  Seed: AYERMCNILKGKFQTA
AYERMWNIMKAKFTTA

SEQ ID NO: 53061 - protein, 16 aa, Artificial Sequence
  Description of Artificial Sequence: Synthetic peptide
  Seed: AYERMCNILKGKFQTA
AYERMWNIMKAKFVTA

SEQ ID NO: 53062 - protein, 16 aa, Artificial Sequence
  Description of Artificial Sequence: Synthetic peptide
  Seed: AYERMCNILKGKFQTA
AYERMWNIMKGKFATA

SEQ ID NO: 53063 - protein, 16 aa, Artificial Sequence
  Description of Artificial Sequence: Synthetic peptide
  Seed: AYERMCNILKGKFQTA
AYERMWNIMKGKFITA

SEQ ID NO: 53064 - protein, 16 aa, Artificial Sequence
  Description of Artificial Sequence: Synthetic peptide
  Seed: AYERMCNILKGKFQTA
AYERMWNIMKGKFLTA

SEQ ID NO: 53065 - protein, 16 aa, Artificial Sequence
  Description of Artificial Sequence: Synthetic peptide
  Seed: AYERMCNILKGKFQTA
AYERMWNIMKGKFMTA

SEQ ID NO: 53066 - protein, 16 aa, Artificial Sequence
  Description of Artificial Sequence: Synthetic peptide
  Seed: AYERMCNILKGKFQTA
AYERMWNIMKGKFSTA

SEQ ID NO: 53067 - protein, 16 aa, Artificial Sequence
  Description of Artificial Sequence: Synthetic peptide
  Seed: AYERMCNILKGKFQTA
AYERMWNIMKGKFTTA

SEQ ID NO: 53068 - protein, 16 aa, Artificial Sequence
  Description of Artificial Sequence: Synthetic peptide
  Seed: AYERMCNILKGKFQTA
AYERMWNIMKGKFVTA

SEQ ID NO: 53069 - protein, 16 aa, Artificial Sequence
  Description of Artificial Sequence: Synthetic peptide
  Seed: AYERMCNILKGKFQTA
AYERMWNIMKNKFATA

SEQ ID NO: 53070 - protein, 16 aa, Artificial Sequence
  Description of Artificial Sequence: Synthetic peptide
  Seed: AYERMCNILKGKFQTA
AYERMWNIMKNKFITA

SEQ ID NO: 53071 - protein, 16 aa, Artificial Sequence
  Description of Artificial Sequence: Synthetic peptide
  Seed: AYERMCNILKGKFQTA
AYERMWNIMKNKFLTA

SEQ ID NO: 53072 - protein, 16 aa, Artificial Sequence
  Description of Artificial Sequence: Synthetic peptide
  Seed: AYERMCNILKGKFQTA
AYERMWNIMKNKFVTA

SEQ ID NO: 53073 - protein, 16 aa, Artificial Sequence
  Description of Artificial Sequence: Synthetic peptide
  Seed: AYERMCNILKGKFQTA
AYERMWNIMKPKFATA

SEQ ID NO: 53074 - protein, 16 aa, Artificial Sequence
  Description of Artificial Sequence: Synthetic peptide
  Seed: AYERMCNILKGKFQTA
AYERMWNIMKPKFITA

SEQ ID NO: 53075 - protein, 16 aa, Artificial Sequence
  Description of Artificial Sequence: Synthetic peptide
  Seed: AYERMCNILKGKFQTA
AYERMWNIMKPKFLTA

SEQ ID NO: 53076 - protein, 16 aa, Artificial Sequence
  Description of Artificial Sequence: Synthetic peptide
  Seed: AYERMCNILKGKFQTA
AYERMWNIMKPKFMTA

SEQ ID NO: 53077 - protein, 16 aa, Artificial Sequence
  Description of Artificial Sequence: Synthetic peptide
  Seed: AYERMCNILKGKFQTA
AYERMWNIMKPKFVTA

SEQ ID NO: 53078 - protein, 16 aa, Artificial Sequence
  Description of Artificial Sequence: Synthetic peptide
  Seed: AYERMCNILKGKFQTA
AYERMWNIMKSKFATA

SEQ ID NO: 53079 - protein, 16 aa, Artificial Sequence
  Description of Artificial Sequence: Synthetic peptide
  Seed: AYERMCNILKGKFQTA
AYERMWNIMKSKFITA

SEQ ID NO: 53080 - protein, 16 aa, Artificial Sequence
  Description of Artificial Sequence: Synthetic peptide
  Seed: AYERMCNILKGKFQTA
AYERMWNIMKSKFLTA

SEQ ID NO: 53081 - protein, 16 aa, Artificial Sequence
  Description of Artificial Sequence: Synthetic peptide
  Seed: AYERMCNILKGKFQTA
AYERMWNIMKSKFMTA

SEQ ID NO: 53082 - protein, 16 aa, Artificial Sequence
  Description of Artificial Sequence: Synthetic peptide
  Seed: AYERMCNILKGKFQTA
AYERMWNIMKSKFSTA

SEQ ID NO: 53083 - protein, 16 aa, Artificial Sequence
  Description of Artificial Sequence: Synthetic peptide
  Seed: AYERMCNILKGKFQTA
AYERMWNIMKSKFTTA

SEQ ID NO: 53084 - protein, 16 aa, Artificial Sequence
  Description of Artificial Sequence: Synthetic peptide
  Seed: AYERMCNILKGKFQTA
AYERMWNIMKSKFVTA

SEQ ID NO: 53085 - protein, 16 aa, Artificial Sequence
  Description of Artificial Sequence: Synthetic peptide
  Seed: AYERMCNILKGKFQTA
AYERMWNIMKTKFATA

SEQ ID NO: 53086 - protein, 16 aa, Artificial Sequence
  Description of Artificial Sequence: Synthetic peptide
  Seed: AYERMCNILKGKFQTA
AYERMWNIMKTKFITA

SEQ ID NO: 53087 - protein, 16 aa, Artificial Sequence
  Description of Artificial Sequence: Synthetic peptide
  Seed: AYERMCNILKGKFQTA
AYERMWNIMKTKFLTA

SEQ ID NO: 53088 - protein, 16 aa, Artificial Sequence
  Description of Artificial Sequence: Synthetic peptide
  Seed: AYERMCNILKGKFQTA
AYERMWNIMKTKFVTA

SEQ ID NO: 53089 - protein, 16 aa, Artificial Sequence
  Description of Artificial Sequence: Synthetic peptide
  Seed: AYERMCNILKGKFQTA
AYERMWNIQKAKFATA

SEQ ID NO: 53090 - protein, 16 aa, Artificial Sequence
  Description of Artificial Sequence: Synthetic peptide
  Seed: AYERMCNILKGKFQTA
AYERMWNIQKAKFITA

SEQ ID NO: 53091 - protein, 16 aa, Artificial Sequence
  Description of Artificial Sequence: Synthetic peptide
  Seed: AYERMCNILKGKFQTA
AYERMWNIQKAKFLTA

SEQ ID NO: 53092 - protein, 16 aa, Artificial Sequence
  Description of Artificial Sequence: Synthetic peptide
  Seed: AYERMCNILKGKFQTA
AYERMWNIQKAKFVTA

SEQ ID NO: 53093 - protein, 16 aa, Artificial Sequence
  Description of Artificial Sequence: Synthetic peptide
  Seed: AYERMCNILKGKFQTA
AYERMWNIQKGKFLTA

SEQ ID NO: 53094 - protein, 16 aa, Artificial Sequence
  Description of Artificial Sequence: Synthetic peptide
  Seed: AYERMCNILKGKFQTA
AYERMWNIVKAKFLTA

SEQ ID NO: 53095 - protein, 16 aa, Artificial Sequence
  Description of Artificial Sequence: Synthetic peptide
  Seed: AYERMCNILKGKFQTA
AYERMWNIVKAKFVTA

SEQ ID NO: 53096 - protein, 16 aa, Artificial Sequence
  Description of Artificial Sequence: Synthetic peptide
  Seed: AYERMCNILKGKFQTA
AYERMWNIVKGKFVTA

SEQ ID NO: 53097 - protein, 16 aa, Artificial Sequence
  Description of Artificial Sequence: Synthetic peptide
  Seed: AYERMCNILKGKFQTA
AYERMYNIAKAKFATA

SEQ ID NO: 53098 - protein, 16 aa, Artificial Sequence
  Description of Artificial Sequence: Synthetic peptide
  Seed: AYERMCNILKGKFQTA
AYERMYNIAKAKFITA

SEQ ID NO: 53099 - protein, 16 aa, Artificial Sequence
  Description of Artificial Sequence: Synthetic peptide
  Seed: AYERMCNILKGKFQTA
AYERMYNIAKAKFLTA

SEQ ID NO: 53100 - protein, 16 aa, Artificial Sequence
  Description of Artificial Sequence: Synthetic peptide
  Seed: AYERMCNILKGKFQTA
AYERMYNIAKAKFMTA

SEQ ID NO: 53101 - protein, 16 aa, Artificial Sequence
  Description of Artificial Sequence: Synthetic peptide
  Seed: AYERMCNILKGKFQTA
AYERMYNIAKAKFSTA

SEQ ID NO: 53102 - protein, 16 aa, Artificial Sequence
  Description of Artificial Sequence: Synthetic peptide
  Seed: AYERMCNILKGKFQTA
AYERMYNIAKAKFTTA

SEQ ID NO: 53103 - protein, 16 aa, Artificial Sequence
  Description of Artificial Sequence: Synthetic peptide
  Seed: AYERMCNILKGKFQTA
AYERMYNIAKAKFVTA

SEQ ID NO: 53104 - protein, 16 aa, Artificial Sequence
  Description of Artificial Sequence: Synthetic peptide
  Seed: AYERMCNILKGKFQTA
AYERMYNIAKGKFATA

SEQ ID NO: 53105 - protein, 16 aa, Artificial Sequence
  Description of Artificial Sequence: Synthetic peptide
  Seed: AYERMCNILKGKFQTA
AYERMYNIAKGKFITA

SEQ ID NO: 53106 - protein, 16 aa, Artificial Sequence
  Description of Artificial Sequence: Synthetic peptide
  Seed: AYERMCNILKGKFQTA
AYERMYNIAKGKFLTA

SEQ ID NO: 53107 - protein, 16 aa, Artificial Sequence
  Description of Artificial Sequence: Synthetic peptide
  Seed: AYERMCNILKGKFQTA
AYERMYNIAKGKFMTA

SEQ ID NO: 53108 - protein, 16 aa, Artificial Sequence
  Description of Artificial Sequence: Synthetic peptide
  Seed: AYERMCNILKGKFQTA
AYERMYNIAKGKFTTA

SEQ ID NO: 53109 - protein, 16 aa, Artificial Sequence
  Description of Artificial Sequence: Synthetic peptide
  Seed: AYERMCNILKGKFQTA
AYERMYNIAKGKFVTA

SEQ ID NO: 53110 - protein, 16 aa, Artificial Sequence
  Description of Artificial Sequence: Synthetic peptide
  Seed: AYERMCNILKGKFQTA
AYERMYNIAKNKFATA

SEQ ID NO: 53111 - protein, 16 aa, Artificial Sequence
  Description of Artificial Sequence: Synthetic peptide
  Seed: AYERMCNILKGKFQTA
AYERMYNIAKNKFITA

SEQ ID NO: 53112 - protein, 16 aa, Artificial Sequence
  Description of Artificial Sequence: Synthetic peptide
  Seed: AYERMCNILKGKFQTA
AYERMYNIAKNKFLTA

SEQ ID NO: 53113 - protein, 16 aa, Artificial Sequence
  Description of Artificial Sequence: Synthetic peptide
  Seed: AYERMCNILKGKFQTA
AYERMYNIAKNKFVTA

SEQ ID NO: 53114 - protein, 16 aa, Artificial Sequence
  Description of Artificial Sequence: Synthetic peptide
  Seed: AYERMCNILKGKFQTA
AYERMYNIAKPKFATA

SEQ ID NO: 53115 - protein, 16 aa, Artificial Sequence
  Description of Artificial Sequence: Synthetic peptide
  Seed: AYERMCNILKGKFQTA
AYERMYNIAKPKFITA

SEQ ID NO: 53116 - protein, 16 aa, Artificial Sequence
  Description of Artificial Sequence: Synthetic peptide
  Seed: AYERMCNILKGKFQTA
AYERMYNIAKPKFLTA

SEQ ID NO: 53117 - protein, 16 aa, Artificial Sequence
  Description of Artificial Sequence: Synthetic peptide
  Seed: AYERMCNILKGKFQTA
AYERMYNIAKPKFMTA

SEQ ID NO: 53118 - protein, 16 aa, Artificial Sequence
  Description of Artificial Sequence: Synthetic peptide
  Seed: AYERMCNILKGKFQTA
AYERMYNIAKPKFVTA

SEQ ID NO: 53119 - protein, 16 aa, Artificial Sequence
  Description of Artificial Sequence: Synthetic peptide
  Seed: AYERMCNILKGKFQTA
AYERMYNIAKSKFATA

SEQ ID NO: 53120 - protein, 16 aa, Artificial Sequence
  Description of Artificial Sequence: Synthetic peptide
  Seed: AYERMCNILKGKFQTA
AYERMYNIAKSKFITA

SEQ ID NO: 53121 - protein, 16 aa, Artificial Sequence
  Description of Artificial Sequence: Synthetic peptide
  Seed: AYERMCNILKGKFQTA
AYERMYNIAKSKFLTA

SEQ ID NO: 53122 - protein, 16 aa, Artificial Sequence
  Description of Artificial Sequence: Synthetic peptide
  Seed: AYERMCNILKGKFQTA
AYERMYNIAKSKFMTA

SEQ ID NO: 53123 - protein, 16 aa, Artificial Sequence
  Description of Artificial Sequence: Synthetic peptide
  Seed: AYERMCNILKGKFQTA
AYERMYNIAKSKFSTA

SEQ ID NO: 53124 - protein, 16 aa, Artificial Sequence
  Description of Artificial Sequence: Synthetic peptide
  Seed: AYERMCNILKGKFQTA
AYERMYNIAKSKFTTA

SEQ ID NO: 53125 - protein, 16 aa, Artificial Sequence
  Description of Artificial Sequence: Synthetic peptide
  Seed: AYERMCNILKGKFQTA
AYERMYNIAKSKFVTA

SEQ ID NO: 53126 - protein, 16 aa, Artificial Sequence
  Description of Artificial Sequence: Synthetic peptide
  Seed: AYERMCNILKGKFQTA
AYERMYNIAKTKFATA

SEQ ID NO: 53127 - protein, 16 aa, Artificial Sequence
  Description of Artificial Sequence: Synthetic peptide
  Seed: AYERMCNILKGKFQTA
AYERMYNIAKTKFITA

SEQ ID NO: 53128 - protein, 16 aa, Artificial Sequence
  Description of Artificial Sequence: Synthetic peptide
  Seed: AYERMCNILKGKFQTA
AYERMYNIAKTKFLTA

SEQ ID NO: 53129 - protein, 16 aa, Artificial Sequence
  Description of Artificial Sequence: Synthetic peptide
  Seed: AYERMCNILKGKFQTA
AYERMYNIAKTKFVTA

SEQ ID NO: 53130 - protein, 16 aa, Artificial Sequence
  Description of Artificial Sequence: Synthetic peptide
  Seed: AYERMCNILKGKFQTA
AYERMYNIAKVKFITA

SEQ ID NO: 53131 - protein, 16 aa, Artificial Sequence
  Description of Artificial Sequence: Synthetic peptide
  Seed: AYERMCNILKGKFQTA
AYERMYNIAKVKFLTA

SEQ ID NO: 53132 - protein, 16 aa, Artificial Sequence
  Description of Artificial Sequence: Synthetic peptide
  Seed: AYERMCNILKGKFQTA
AYERMYNIAKVKFVTA

SEQ ID NO: 53133 - protein, 16 aa, Artificial Sequence
  Description of Artificial Sequence: Synthetic peptide
  Seed: AYERMCNILKGKFQTA
AYERMYNIEKAKFATA

SEQ ID NO: 53134 - protein, 16 aa, Artificial Sequence
  Description of Artificial Sequence: Synthetic peptide
  Seed: AYERMCNILKGKFQTA
AYERMYNIEKAKFLTA

SEQ ID NO: 53135 - protein, 16 aa, Artificial Sequence
  Description of Artificial Sequence: Synthetic peptide
  Seed: AYERMCNILKGKFQTA
AYERMYNIEKAKFVTA

SEQ ID NO: 53136 - protein, 16 aa, Artificial Sequence
  Description of Artificial Sequence: Synthetic peptide
  Seed: AYERMCNILKGKFQTA
AYERMYNIGKAKFITA

SEQ ID NO: 53137 - protein, 16 aa, Artificial Sequence
  Description of Artificial Sequence: Synthetic peptide
  Seed: AYERMCNILKGKFQTA
AYERMYNIGKAKFLTA

SEQ ID NO: 53138 - protein, 16 aa, Artificial Sequence
  Description of Artificial Sequence: Synthetic peptide
  Seed: AYERMCNILKGKFQTA
AYERMYNIGKAKFVTA

SEQ ID NO: 53139 - protein, 16 aa, Artificial Sequence
  Description of Artificial Sequence: Synthetic peptide
  Seed: AYERMCNILKGKFQTA
AYERMYNIGKSKFLTA

SEQ ID NO: 53140 - protein, 16 aa, Artificial Sequence
  Description of Artificial Sequence: Synthetic peptide
  Seed: AYERMCNILKGKFQTA
AYERMYNIGKSKFVTA

SEQ ID NO: 53141 - protein, 16 aa, Artificial Sequence
  Description of Artificial Sequence: Synthetic peptide
  Seed: AYERMCNILKGKFQTA
AYERMYNIIKAKFATA

SEQ ID NO: 53142 - protein, 16 aa, Artificial Sequence
  Description of Artificial Sequence: Synthetic peptide
  Seed: AYERMCNILKGKFQTA
AYERMYNIIKAKFGTA

SEQ ID NO: 53143 - protein, 16 aa, Artificial Sequence
  Description of Artificial Sequence: Synthetic peptide
  Seed: AYERMCNILKGKFQTA
AYERMYNIIKAKFITA

SEQ ID NO: 53144 - protein, 16 aa, Artificial Sequence
  Description of Artificial Sequence: Synthetic peptide
  Seed: AYERMCNILKGKFQTA
AYERMYNIIKAKFLTA

SEQ ID NO: 53145 - protein, 16 aa, Artificial Sequence
  Description of Artificial Sequence: Synthetic peptide
  Seed: AYERMCNILKGKFQTA
AYERMYNIIKAKFMTA

SEQ ID NO: 53146 - protein, 16 aa, Artificial Sequence
  Description of Artificial Sequence: Synthetic peptide
  Seed: AYERMCNILKGKFQTA
AYERMYNIIKAKFSTA

SEQ ID NO: 53147 - protein, 16 aa, Artificial Sequence
  Description of Artificial Sequence: Synthetic peptide
  Seed: AYERMCNILKGKFQTA
AYERMYNIIKAKFTTA

SEQ ID NO: 53148 - protein, 16 aa, Artificial Sequence
  Description of Artificial Sequence: Synthetic peptide
  Seed: AYERMCNILKGKFQTA
AYERMYNIIKAKFVTA

SEQ ID NO: 53149 - protein, 16 aa, Artificial Sequence
  Description of Artificial Sequence: Synthetic peptide
  Seed: AYERMCNILKGKFQTA
AYERMYNIIKGKFATA

SEQ ID NO: 53150 - protein, 16 aa, Artificial Sequence
  Description of Artificial Sequence: Synthetic peptide
  Seed: AYERMCNILKGKFQTA
AYERMYNIIKGKFITA

SEQ ID NO: 53151 - protein, 16 aa, Artificial Sequence
  Description of Artificial Sequence: Synthetic peptide
  Seed: AYERMCNILKGKFQTA
AYERMYNIIKGKFLTA

SEQ ID NO: 53152 - protein, 16 aa, Artificial Sequence
  Description of Artificial Sequence: Synthetic peptide
  Seed: AYERMCNILKGKFQTA
AYERMYNIIKGKFMTA

SEQ ID NO: 53153 - protein, 16 aa, Artificial Sequence
  Description of Artificial Sequence: Synthetic peptide
  Seed: AYERMCNILKGKFQTA
AYERMYNIIKGKFSTA

SEQ ID NO: 53154 - protein, 16 aa, Artificial Sequence
  Description of Artificial Sequence: Synthetic peptide
  Seed: AYERMCNILKGKFQTA
AYERMYNIIKGKFTTA

SEQ ID NO: 53155 - protein, 16 aa, Artificial Sequence
  Description of Artificial Sequence: Synthetic peptide
  Seed: AYERMCNILKGKFQTA
AYERMYNIIKGKFVTA

SEQ ID NO: 53156 - protein, 16 aa, Artificial Sequence
  Description of Artificial Sequence: Synthetic peptide
  Seed: AYERMCNILKGKFQTA
AYERMYNIIKNKFATA

SEQ ID NO: 53157 - protein, 16 aa, Artificial Sequence
  Description of Artificial Sequence: Synthetic peptide
  Seed: AYERMCNILKGKFQTA
AYERMYNIIKNKFITA

SEQ ID NO: 53158 - protein, 16 aa, Artificial Sequence
  Description of Artificial Sequence: Synthetic peptide
  Seed: AYERMCNILKGKFQTA
AYERMYNIIKNKFLTA

SEQ ID NO: 53159 - protein, 16 aa, Artificial Sequence
  Description of Artificial Sequence: Synthetic peptide
  Seed: AYERMCNILKGKFQTA
AYERMYNIIKNKFVTA

SEQ ID NO: 53160 - protein, 16 aa, Artificial Sequence
  Description of Artificial Sequence: Synthetic peptide
  Seed: AYERMCNILKGKFQTA
AYERMYNIIKPKFATA

SEQ ID NO: 53161 - protein, 16 aa, Artificial Sequence
  Description of Artificial Sequence: Synthetic peptide
  Seed: AYERMCNILKGKFQTA
AYERMYNIIKPKFITA

SEQ ID NO: 53162 - protein, 16 aa, Artificial Sequence
  Description of Artificial Sequence: Synthetic peptide
  Seed: AYERMCNILKGKFQTA
AYERMYNIIKPKFLTA

SEQ ID NO: 53163 - protein, 16 aa, Artificial Sequence
  Description of Artificial Sequence: Synthetic peptide
  Seed: AYERMCNILKGKFQTA
AYERMYNIIKPKFMTA

SEQ ID NO: 53164 - protein, 16 aa, Artificial Sequence
  Description of Artificial Sequence: Synthetic peptide
  Seed: AYERMCNILKGKFQTA
AYERMYNIIKPKFTTA

SEQ ID NO: 53165 - protein, 16 aa, Artificial Sequence
  Description of Artificial Sequence: Synthetic peptide
  Seed: AYERMCNILKGKFQTA
AYERMYNIIKPKFVTA

SEQ ID NO: 53166 - protein, 16 aa, Artificial Sequence
  Description of Artificial Sequence: Synthetic peptide
  Seed: AYERMCNILKGKFQTA
AYERMYNIIKSKFATA

SEQ ID NO: 53167 - protein, 16 aa, Artificial Sequence
  Description of Artificial Sequence: Synthetic peptide
  Seed: AYERMCNILKGKFQTA
AYERMYNIIKSKFITA

SEQ ID NO: 53168 - protein, 16 aa, Artificial Sequence
  Description of Artificial Sequence: Synthetic peptide
  Seed: AYERMCNILKGKFQTA
AYERMYNIIKSKFLTA

SEQ ID NO: 53169 - protein, 16 aa, Artificial Sequence
  Description of Artificial Sequence: Synthetic peptide
  Seed: AYERMCNILKGKFQTA
AYERMYNIIKSKFMTA

SEQ ID NO: 53170 - protein, 16 aa, Artificial Sequence
  Description of Artificial Sequence: Synthetic peptide
  Seed: AYERMCNILKGKFQTA
AYERMYNIIKSKFSTA

SEQ ID NO: 53171 - protein, 16 aa, Artificial Sequence
  Description of Artificial Sequence: Synthetic peptide
  Seed: AYERMCNILKGKFQTA
AYERMYNIIKSKFTTA

SEQ ID NO: 53172 - protein, 16 aa, Artificial Sequence
  Description of Artificial Sequence: Synthetic peptide
  Seed: AYERMCNILKGKFQTA
AYERMYNIIKSKFVTA

SEQ ID NO: 53173 - protein, 16 aa, Artificial Sequence
  Description of Artificial Sequence: Synthetic peptide
  Seed: AYERMCNILKGKFQTA
AYERMYNIIKTKFATA

SEQ ID NO: 53174 - protein, 16 aa, Artificial Sequence
  Description of Artificial Sequence: Synthetic peptide
  Seed: AYERMCNILKGKFQTA
AYERMYNIIKTKFITA

SEQ ID NO: 53175 - protein, 16 aa, Artificial Sequence
  Description of Artificial Sequence: Synthetic peptide
  Seed: AYERMCNILKGKFQTA
AYERMYNIIKTKFLTA

SEQ ID NO: 53176 - protein, 16 aa, Artificial Sequence
  Description of Artificial Sequence: Synthetic peptide
  Seed: AYERMCNILKGKFQTA
AYERMYNIIKTKFVTA

SEQ ID NO: 53177 - protein, 16 aa, Artificial Sequence
  Description of Artificial Sequence: Synthetic peptide
  Seed: AYERMCNILKGKFQTA
AYERMYNIIKVKFVTA

SEQ ID NO: 53178 - protein, 16 aa, Artificial Sequence
  Description of Artificial Sequence: Synthetic peptide
  Seed: AYERMCNILKGKFQTA
AYERMYNILKAKFATA

SEQ ID NO: 53179 - protein, 16 aa, Artificial Sequence
  Description of Artificial Sequence: Synthetic peptide
  Seed: AYERMCNILKGKFQTA
AYERMYNILKAKFFTA

SEQ ID NO: 53180 - protein, 16 aa, Artificial Sequence
  Description of Artificial Sequence: Synthetic peptide
  Seed: AYERMCNILKGKFQTA
AYERMYNILKAKFGTA

SEQ ID NO: 53181 - protein, 16 aa, Artificial Sequence
  Description of Artificial Sequence: Synthetic peptide
  Seed: AYERMCNILKGKFQTA
AYERMYNILKAKFITA

SEQ ID NO: 53182 - protein, 16 aa, Artificial Sequence
  Description of Artificial Sequence: Synthetic peptide
  Seed: AYERMCNILKGKFQTA
AYERMYNILKAKFLTA

SEQ ID NO: 53183 - protein, 16 aa, Artificial Sequence
  Description of Artificial Sequence: Synthetic peptide
  Seed: AYERMCNILKGKFQTA
AYERMYNILKAKFMTA

SEQ ID NO: 53184 - protein, 16 aa, Artificial Sequence
  Description of Artificial Sequence: Synthetic peptide
  Seed: AYERMCNILKGKFQTA
AYERMYNILKAKFNTA

SEQ ID NO: 53185 - protein, 16 aa, Artificial Sequence
  Description of Artificial Sequence: Synthetic peptide
  Seed: AYERMCNILKGKFQTA
AYERMYNILKAKFSTA

SEQ ID NO: 53186 - protein, 16 aa, Artificial Sequence
  Description of Artificial Sequence: Synthetic peptide
  Seed: AYERMCNILKGKFQTA
AYERMYNILKAKFTTA

SEQ ID NO: 53187 - protein, 16 aa, Artificial Sequence
  Description of Artificial Sequence: Synthetic peptide
  Seed: AYERMCNILKGKFQTA
AYERMYNILKAKFVTA

SEQ ID NO: 53188 - protein, 16 aa, Artificial Sequence
  Description of Artificial Sequence: Synthetic peptide
  Seed: AYERMCNILKGKFQTA
AYERMYNILKGKFATA

SEQ ID NO: 53189 - protein, 16 aa, Artificial Sequence
  Description of Artificial Sequence: Synthetic peptide
  Seed: AYERMCNILKGKFQTA
AYERMYNILKGKFGTA

SEQ ID NO: 53190 - protein, 16 aa, Artificial Sequence
  Description of Artificial Sequence: Synthetic peptide
  Seed: AYERMCNILKGKFQTA
AYERMYNILKGKFITA

SEQ ID NO: 53191 - protein, 16 aa, Artificial Sequence
  Description of Artificial Sequence: Synthetic peptide
  Seed: AYERMCNILKGKFQTA
AYERMYNILKGKFLTA

SEQ ID NO: 53192 - protein, 16 aa, Artificial Sequence
  Description of Artificial Sequence: Synthetic peptide
  Seed: AYERMCNILKGKFQTA
AYERMYNILKGKFMTA

SEQ ID NO: 53193 - protein, 16 aa, Artificial Sequence
  Description of Artificial Sequence: Synthetic peptide
  Seed: AYERMCNILKGKFQTA
AYERMYNILKGKFSTA

SEQ ID NO: 53194 - protein, 16 aa, Artificial Sequence
  Description of Artificial Sequence: Synthetic peptide
  Seed: AYERMCNILKGKFQTA
AYERMYNILKGKFTTA

SEQ ID NO: 53195 - protein, 16 aa, Artificial Sequence
  Description of Artificial Sequence: Synthetic peptide
  Seed: AYERMCNILKGKFQTA
AYERMYNILKGKFVTA

SEQ ID NO: 53196 - protein, 16 aa, Artificial Sequence
  Description of Artificial Sequence: Synthetic peptide
  Seed: AYERMCNILKGKFQTA
AYERMYNILKNKFATA

SEQ ID NO: 53197 - protein, 16 aa, Artificial Sequence
  Description of Artificial Sequence: Synthetic peptide
  Seed: AYERMCNILKGKFQTA
AYERMYNILKNKFITA

SEQ ID NO: 53198 - protein, 16 aa, Artificial Sequence
  Description of Artificial Sequence: Synthetic peptide
  Seed: AYERMCNILKGKFQTA
AYERMYNILKNKFLTA

SEQ ID NO: 53199 - protein, 16 aa, Artificial Sequence
  Description of Artificial Sequence: Synthetic peptide
  Seed: AYERMCNILKGKFQTA
AYERMYNILKNKFMTA

SEQ ID NO: 53200 - protein, 16 aa, Artificial Sequence
  Description of Artificial Sequence: Synthetic peptide
  Seed: AYERMCNILKGKFQTA
AYERMYNILKNKFSTA

SEQ ID NO: 53201 - protein, 16 aa, Artificial Sequence
  Description of Artificial Sequence: Synthetic peptide
  Seed: AYERMCNILKGKFQTA
AYERMYNILKNKFTTA

SEQ ID NO: 53202 - protein, 16 aa, Artificial Sequence
  Description of Artificial Sequence: Synthetic peptide
  Seed: AYERMCNILKGKFQTA
AYERMYNILKNKFVTA

SEQ ID NO: 53203 - protein, 16 aa, Artificial Sequence
  Description of Artificial Sequence: Synthetic peptide
  Seed: AYERMCNILKGKFQTA
AYERMYNILKPKFATA

SEQ ID NO: 53204 - protein, 16 aa, Artificial Sequence
  Description of Artificial Sequence: Synthetic peptide
  Seed: AYERMCNILKGKFQTA
AYERMYNILKPKFITA

SEQ ID NO: 53205 - protein, 16 aa, Artificial Sequence
  Description of Artificial Sequence: Synthetic peptide
  Seed: AYERMCNILKGKFQTA
AYERMYNILKPKFLTA

SEQ ID NO: 53206 - protein, 16 aa, Artificial Sequence
  Description of Artificial Sequence: Synthetic peptide
  Seed: AYERMCNILKGKFQTA
AYERMYNILKPKFMTA

SEQ ID NO: 53207 - protein, 16 aa, Artificial Sequence
  Description of Artificial Sequence: Synthetic peptide
  Seed: AYERMCNILKGKFQTA
AYERMYNILKPKFSTA

SEQ ID NO: 53208 - protein, 16 aa, Artificial Sequence
  Description of Artificial Sequence: Synthetic peptide
  Seed: AYERMCNILKGKFQTA
AYERMYNILKPKFTTA

SEQ ID NO: 53209 - protein, 16 aa, Artificial Sequence
  Description of Artificial Sequence: Synthetic peptide
  Seed: AYERMCNILKGKFQTA
AYERMYNILKPKFVTA

SEQ ID NO: 53210 - protein, 16 aa, Artificial Sequence
  Description of Artificial Sequence: Synthetic peptide
  Seed: AYERMCNILKGKFQTA
AYERMYNILKSKFATA

SEQ ID NO: 53211 - protein, 16 aa, Artificial Sequence
  Description of Artificial Sequence: Synthetic peptide
  Seed: AYERMCNILKGKFQTA
AYERMYNILKSKFGTA

SEQ ID NO: 53212 - protein, 16 aa, Artificial Sequence
  Description of Artificial Sequence: Synthetic peptide
  Seed: AYERMCNILKGKFQTA
AYERMYNILKSKFITA

SEQ ID NO: 53213 - protein, 16 aa, Artificial Sequence
  Description of Artificial Sequence: Synthetic peptide
  Seed: AYERMCNILKGKFQTA
AYERMYNILKSKFLTA

SEQ ID NO: 53214 - protein, 16 aa, Artificial Sequence
  Description of Artificial Sequence: Synthetic peptide
  Seed: AYERMCNILKGKFQTA
AYERMYNILKSKFMTA

SEQ ID NO: 53215 - protein, 16 aa, Artificial Sequence
  Description of Artificial Sequence: Synthetic peptide
  Seed: AYERMCNILKGKFQTA
AYERMYNILKSKFSTA

SEQ ID NO: 53216 - protein, 16 aa, Artificial Sequence
  Description of Artificial Sequence: Synthetic peptide
  Seed: AYERMCNILKGKFQTA
AYERMYNILKSKFTTA

SEQ ID NO: 53217 - protein, 16 aa, Artificial Sequence
  Description of Artificial Sequence: Synthetic peptide
  Seed: AYERMCNILKGKFQTA
AYERMYNILKSKFVTA

SEQ ID NO: 53218 - protein, 16 aa, Artificial Sequence
  Description of Artificial Sequence: Synthetic peptide
  Seed: AYERMCNILKGKFQTA
AYERMYNILKTKFATA

SEQ ID NO: 53219 - protein, 16 aa, Artificial Sequence
  Description of Artificial Sequence: Synthetic peptide
  Seed: AYERMCNILKGKFQTA
AYERMYNILKTKFITA

SEQ ID NO: 53220 - protein, 16 aa, Artificial Sequence
  Description of Artificial Sequence: Synthetic peptide
  Seed: AYERMCNILKGKFQTA
AYERMYNILKTKFLTA

SEQ ID NO: 53221 - protein, 16 aa, Artificial Sequence
  Description of Artificial Sequence: Synthetic peptide
  Seed: AYERMCNILKGKFQTA
AYERMYNILKTKFMTA

SEQ ID NO: 53222 - protein, 16 aa, Artificial Sequence
  Description of Artificial Sequence: Synthetic peptide
  Seed: AYERMCNILKGKFQTA
AYERMYNILKTKFSTA

SEQ ID NO: 53223 - protein, 16 aa, Artificial Sequence
  Description of Artificial Sequence: Synthetic peptide
  Seed: AYERMCNILKGKFQTA
AYERMYNILKTKFTTA

SEQ ID NO: 53224 - protein, 16 aa, Artificial Sequence
  Description of Artificial Sequence: Synthetic peptide
  Seed: AYERMCNILKGKFQTA
AYERMYNILKTKFVTA

SEQ ID NO: 53225 - protein, 16 aa, Artificial Sequence
  Description of Artificial Sequence: Synthetic peptide
  Seed: AYERMCNILKGKFQTA
AYERMYNILKVKFATA

SEQ ID NO: 53226 - protein, 16 aa, Artificial Sequence
  Description of Artificial Sequence: Synthetic peptide
  Seed: AYERMCNILKGKFQTA
AYERMYNILKVKFITA

SEQ ID NO: 53227 - protein, 16 aa, Artificial Sequence
  Description of Artificial Sequence: Synthetic peptide
  Seed: AYERMCNILKGKFQTA
AYERMYNILKVKFLTA

SEQ ID NO: 53228 - protein, 16 aa, Artificial Sequence
  Description of Artificial Sequence: Synthetic peptide
  Seed: AYERMCNILKGKFQTA
AYERMYNILKVKFMTA

SEQ ID NO: 53229 - protein, 16 aa, Artificial Sequence
  Description of Artificial Sequence: Synthetic peptide
  Seed: AYERMCNILKGKFQTA
AYERMYNILKVKFTTA

SEQ ID NO: 53230 - protein, 16 aa, Artificial Sequence
  Description of Artificial Sequence: Synthetic peptide
  Seed: AYERMCNILKGKFQTA
AYERMYNILKVKFVTA

SEQ ID NO: 53231 - protein, 16 aa, Artificial Sequence
  Description of Artificial Sequence: Synthetic peptide
  Seed: AYERMCNILKGKFQTA
AYERMYNIMKAKFATA

SEQ ID NO: 53232 - protein, 16 aa, Artificial Sequence
  Description of Artificial Sequence: Synthetic peptide
  Seed: AYERMCNILKGKFQTA
AYERMYNIMKAKFFTA

SEQ ID NO: 53233 - protein, 16 aa, Artificial Sequence
  Description of Artificial Sequence: Synthetic peptide
  Seed: AYERMCNILKGKFQTA
AYERMYNIMKAKFGTA

SEQ ID NO: 53234 - protein, 16 aa, Artificial Sequence
  Description of Artificial Sequence: Synthetic peptide
  Seed: AYERMCNILKGKFQTA
AYERMYNIMKAKFITA

SEQ ID NO: 53235 - protein, 16 aa, Artificial Sequence
  Description of Artificial Sequence: Synthetic peptide
  Seed: AYERMCNILKGKFQTA
AYERMYNIMKAKFLTA

SEQ ID NO: 53236 - protein, 16 aa, Artificial Sequence
  Description of Artificial Sequence: Synthetic peptide
  Seed: AYERMCNILKGKFQTA
AYERMYNIMKAKFMTA

SEQ ID NO: 53237 - protein, 16 aa, Artificial Sequence
  Description of Artificial Sequence: Synthetic peptide
  Seed: AYERMCNILKGKFQTA
AYERMYNIMKAKFNTA

SEQ ID NO: 53238 - protein, 16 aa, Artificial Sequence
  Description of Artificial Sequence: Synthetic peptide
  Seed: AYERMCNILKGKFQTA
AYERMYNIMKAKFSTA

SEQ ID NO: 53239 - protein, 16 aa, Artificial Sequence
  Description of Artificial Sequence: Synthetic peptide
  Seed: AYERMCNILKGKFQTA
AYERMYNIMKAKFTTA

SEQ ID NO: 53240 - protein, 16 aa, Artificial Sequence
  Description of Artificial Sequence: Synthetic peptide
  Seed: AYERMCNILKGKFQTA
AYERMYNIMKAKFVTA

SEQ ID NO: 53241 - protein, 16 aa, Artificial Sequence
  Description of Artificial Sequence: Synthetic peptide
  Seed: AYERMCNILKGKFQTA
AYERMYNIMKGKFATA

SEQ ID NO: 53242 - protein, 16 aa, Artificial Sequence
  Description of Artificial Sequence: Synthetic peptide
  Seed: AYERMCNILKGKFQTA
AYERMYNIMKGKFGTA

SEQ ID NO: 53243 - protein, 16 aa, Artificial Sequence
  Description of Artificial Sequence: Synthetic peptide
  Seed: AYERMCNILKGKFQTA
AYERMYNIMKGKFITA

SEQ ID NO: 53244 - protein, 16 aa, Artificial Sequence
  Description of Artificial Sequence: Synthetic peptide
  Seed: AYERMCNILKGKFQTA
AYERMYNIMKGKFLTA

SEQ ID NO: 53245 - protein, 16 aa, Artificial Sequence
  Description of Artificial Sequence: Synthetic peptide
  Seed: AYERMCNILKGKFQTA
AYERMYNIMKGKFMTA

SEQ ID NO: 53246 - protein, 16 aa, Artificial Sequence
  Description of Artificial Sequence: Synthetic peptide
  Seed: AYERMCNILKGKFQTA
AYERMYNIMKGKFSTA

SEQ ID NO: 53247 - protein, 16 aa, Artificial Sequence
  Description of Artificial Sequence: Synthetic peptide
  Seed: AYERMCNILKGKFQTA
AYERMYNIMKGKFTTA

SEQ ID NO: 53248 - protein, 16 aa, Artificial Sequence
  Description of Artificial Sequence: Synthetic peptide
  Seed: AYERMCNILKGKFQTA
AYERMYNIMKGKFVTA

SEQ ID NO: 53249 - protein, 16 aa, Artificial Sequence
  Description of Artificial Sequence: Synthetic peptide
  Seed: AYERMCNILKGKFQTA
AYERMYNIMKIKFVTA

SEQ ID NO: 53250 - protein, 16 aa, Artificial Sequence
  Description of Artificial Sequence: Synthetic peptide
  Seed: AYERMCNILKGKFQTA
AYERMYNIMKNKFATA

SEQ ID NO: 53251 - protein, 16 aa, Artificial Sequence
  Description of Artificial Sequence: Synthetic peptide
  Seed: AYERMCNILKGKFQTA
AYERMYNIMKNKFITA

SEQ ID NO: 53252 - protein, 16 aa, Artificial Sequence
  Description of Artificial Sequence: Synthetic peptide
  Seed: AYERMCNILKGKFQTA
AYERMYNIMKNKFLTA

SEQ ID NO: 53253 - protein, 16 aa, Artificial Sequence
  Description of Artificial Sequence: Synthetic peptide
  Seed: AYERMCNILKGKFQTA
AYERMYNIMKNKFMTA

SEQ ID NO: 53254 - protein, 16 aa, Artificial Sequence
  Description of Artificial Sequence: Synthetic peptide
  Seed: AYERMCNILKGKFQTA
AYERMYNIMKNKFSTA

SEQ ID NO: 53255 - protein, 16 aa, Artificial Sequence
  Description of Artificial Sequence: Synthetic peptide
  Seed: AYERMCNILKGKFQTA
AYERMYNIMKNKFTTA

SEQ ID NO: 53256 - protein, 16 aa, Artificial Sequence
  Description of Artificial Sequence: Synthetic peptide
  Seed: AYERMCNILKGKFQTA
AYERMYNIMKNKFVTA

SEQ ID NO: 53257 - protein, 16 aa, Artificial Sequence
  Description of Artificial Sequence: Synthetic peptide
  Seed: AYERMCNILKGKFQTA
AYERMYNIMKPKFATA

SEQ ID NO: 53258 - protein, 16 aa, Artificial Sequence
  Description of Artificial Sequence: Synthetic peptide
  Seed: AYERMCNILKGKFQTA
AYERMYNIMKPKFITA

SEQ ID NO: 53259 - protein, 16 aa, Artificial Sequence
  Description of Artificial Sequence: Synthetic peptide
  Seed: AYERMCNILKGKFQTA
AYERMYNIMKPKFLTA

SEQ ID NO: 53260 - protein, 16 aa, Artificial Sequence
  Description of Artificial Sequence: Synthetic peptide
  Seed: AYERMCNILKGKFQTA
AYERMYNIMKPKFMTA

SEQ ID NO: 53261 - protein, 16 aa, Artificial Sequence
  Description of Artificial Sequence: Synthetic peptide
  Seed: AYERMCNILKGKFQTA
AYERMYNIMKPKFSTA

SEQ ID NO: 53262 - protein, 16 aa, Artificial Sequence
  Description of Artificial Sequence: Synthetic peptide
  Seed: AYERMCNILKGKFQTA
AYERMYNIMKPKFTTA

SEQ ID NO: 53263 - protein, 16 aa, Artificial Sequence
  Description of Artificial Sequence: Synthetic peptide
  Seed: AYERMCNILKGKFQTA
AYERMYNIMKPKFVTA

SEQ ID NO: 53264 - protein, 16 aa, Artificial Sequence
  Description of Artificial Sequence: Synthetic peptide
  Seed: AYERMCNILKGKFQTA
AYERMYNIMKSKFATA

SEQ ID NO: 53265 - protein, 16 aa, Artificial Sequence
  Description of Artificial Sequence: Synthetic peptide
  Seed: AYERMCNILKGKFQTA
AYERMYNIMKSKFGTA

SEQ ID NO: 53266 - protein, 16 aa, Artificial Sequence
  Description of Artificial Sequence: Synthetic peptide
  Seed: AYERMCNILKGKFQTA
AYERMYNIMKSKFITA

SEQ ID NO: 53267 - protein, 16 aa, Artificial Sequence
  Description of Artificial Sequence: Synthetic peptide
  Seed: AYERMCNILKGKFQTA
AYERMYNIMKSKFLTA

SEQ ID NO: 53268 - protein, 16 aa, Artificial Sequence
  Description of Artificial Sequence: Synthetic peptide
  Seed: AYERMCNILKGKFQTA
AYERMYNIMKSKFMTA

SEQ ID NO: 53269 - protein, 16 aa, Artificial Sequence
  Description of Artificial Sequence: Synthetic peptide
  Seed: AYERMCNILKGKFQTA
AYERMYNIMKSKFSTA

SEQ ID NO: 53270 - protein, 16 aa, Artificial Sequence
  Description of Artificial Sequence: Synthetic peptide
  Seed: AYERMCNILKGKFQTA
AYERMYNIMKSKFTTA

SEQ ID NO: 53271 - protein, 16 aa, Artificial Sequence
  Description of Artificial Sequence: Synthetic peptide
  Seed: AYERMCNILKGKFQTA
AYERMYNIMKSKFVTA

SEQ ID NO: 53272 - protein, 16 aa, Artificial Sequence
  Description of Artificial Sequence: Synthetic peptide
  Seed: AYERMCNILKGKFQTA
AYERMYNIMKTKFATA

SEQ ID NO: 53273 - protein, 16 aa, Artificial Sequence
  Description of Artificial Sequence: Synthetic peptide
  Seed: AYERMCNILKGKFQTA
AYERMYNIMKTKFITA

SEQ ID NO: 53274 - protein, 16 aa, Artificial Sequence
  Description of Artificial Sequence: Synthetic peptide
  Seed: AYERMCNILKGKFQTA
AYERMYNIMKTKFLTA

SEQ ID NO: 53275 - protein, 16 aa, Artificial Sequence
  Description of Artificial Sequence: Synthetic peptide
  Seed: AYERMCNILKGKFQTA
AYERMYNIMKTKFMTA

SEQ ID NO: 53276 - protein, 16 aa, Artificial Sequence
  Description of Artificial Sequence: Synthetic peptide
  Seed: AYERMCNILKGKFQTA
AYERMYNIMKTKFSTA

SEQ ID NO: 53277 - protein, 16 aa, Artificial Sequence
  Description of Artificial Sequence: Synthetic peptide
  Seed: AYERMCNILKGKFQTA
AYERMYNIMKTKFTTA

SEQ ID NO: 53278 - protein, 16 aa, Artificial Sequence
  Description of Artificial Sequence: Synthetic peptide
  Seed: AYERMCNILKGKFQTA
AYERMYNIMKTKFVTA

SEQ ID NO: 53279 - protein, 16 aa, Artificial Sequence
  Description of Artificial Sequence: Synthetic peptide
  Seed: AYERMCNILKGKFQTA
AYERMYNIMKVKFATA

SEQ ID NO: 53280 - protein, 16 aa, Artificial Sequence
  Description of Artificial Sequence: Synthetic peptide
  Seed: AYERMCNILKGKFQTA
AYERMYNIMKVKFITA

SEQ ID NO: 53281 - protein, 16 aa, Artificial Sequence
  Description of Artificial Sequence: Synthetic peptide
  Seed: AYERMCNILKGKFQTA
AYERMYNIMKVKFLTA

SEQ ID NO: 53282 - protein, 16 aa, Artificial Sequence
  Description of Artificial Sequence: Synthetic peptide
  Seed: AYERMCNILKGKFQTA
AYERMYNIMKVKFMTA

SEQ ID NO: 53283 - protein, 16 aa, Artificial Sequence
  Description of Artificial Sequence: Synthetic peptide
  Seed: AYERMCNILKGKFQTA
AYERMYNIMKVKFTTA

SEQ ID NO: 53284 - protein, 16 aa, Artificial Sequence
  Description of Artificial Sequence: Synthetic peptide
  Seed: AYERMCNILKGKFQTA
AYERMYNIMKVKFVTA

SEQ ID NO: 53285 - protein, 16 aa, Artificial Sequence
  Description of Artificial Sequence: Synthetic peptide
  Seed: AYERMCNILKGKFQTA
AYERMYNIQKAKFATA

SEQ ID NO: 53286 - protein, 16 aa, Artificial Sequence
  Description of Artificial Sequence: Synthetic peptide
  Seed: AYERMCNILKGKFQTA
AYERMYNIQKAKFITA

SEQ ID NO: 53287 - protein, 16 aa, Artificial Sequence
  Description of Artificial Sequence: Synthetic peptide
  Seed: AYERMCNILKGKFQTA
AYERMYNIQKAKFLTA

SEQ ID NO: 53288 - protein, 16 aa, Artificial Sequence
  Description of Artificial Sequence: Synthetic peptide
  Seed: AYERMCNILKGKFQTA
AYERMYNIQKAKFMTA

SEQ ID NO: 53289 - protein, 16 aa, Artificial Sequence
  Description of Artificial Sequence: Synthetic peptide
  Seed: AYERMCNILKGKFQTA
AYERMYNIQKAKFTTA

SEQ ID NO: 53290 - protein, 16 aa, Artificial Sequence
  Description of Artificial Sequence: Synthetic peptide
  Seed: AYERMCNILKGKFQTA
AYERMYNIQKAKFVTA

SEQ ID NO: 53291 - protein, 16 aa, Artificial Sequence
  Description of Artificial Sequence: Synthetic peptide
  Seed: AYERMCNILKGKFQTA
AYERMYNIQKGKFATA

SEQ ID NO: 53292 - protein, 16 aa, Artificial Sequence
  Description of Artificial Sequence: Synthetic peptide
  Seed: AYERMCNILKGKFQTA
AYERMYNIQKGKFITA

SEQ ID NO: 53293 - protein, 16 aa, Artificial Sequence
  Description of Artificial Sequence: Synthetic peptide
  Seed: AYERMCNILKGKFQTA
AYERMYNIQKGKFLTA

SEQ ID NO: 53294 - protein, 16 aa, Artificial Sequence
  Description of Artificial Sequence: Synthetic peptide
  Seed: AYERMCNILKGKFQTA
AYERMYNIQKGKFMTA

SEQ ID NO: 53295 - protein, 16 aa, Artificial Sequence
  Description of Artificial Sequence: Synthetic peptide
  Seed: AYERMCNILKGKFQTA
AYERMYNIQKGKFVTA

SEQ ID NO: 53296 - protein, 16 aa, Artificial Sequence
  Description of Artificial Sequence: Synthetic peptide
  Seed: AYERMCNILKGKFQTA
AYERMYNIQKNKFLTA

SEQ ID NO: 53297 - protein, 16 aa, Artificial Sequence
  Description of Artificial Sequence: Synthetic peptide
  Seed: AYERMCNILKGKFQTA
AYERMYNIQKPKFLTA

SEQ ID NO: 53298 - protein, 16 aa, Artificial Sequence
  Description of Artificial Sequence: Synthetic peptide
  Seed: AYERMCNILKGKFQTA
AYERMYNIQKPKFVTA

SEQ ID NO: 53299 - protein, 16 aa, Artificial Sequence
  Description of Artificial Sequence: Synthetic peptide
  Seed: AYERMCNILKGKFQTA
AYERMYNIQKSKFATA

SEQ ID NO: 53300 - protein, 16 aa, Artificial Sequence
  Description of Artificial Sequence: Synthetic peptide
  Seed: AYERMCNILKGKFQTA
AYERMYNIQKSKFITA

SEQ ID NO: 53301 - protein, 16 aa, Artificial Sequence
  Description of Artificial Sequence: Synthetic peptide
  Seed: AYERMCNILKGKFQTA
AYERMYNIQKSKFLTA

SEQ ID NO: 53302 - protein, 16 aa, Artificial Sequence
  Description of Artificial Sequence: Synthetic peptide
  Seed: AYERMCNILKGKFQTA
AYERMYNIQKSKFMTA

SEQ ID NO: 53303 - protein, 16 aa, Artificial Sequence
  Description of Artificial Sequence: Synthetic peptide
  Seed: AYERMCNILKGKFQTA
AYERMYNIQKSKFVTA

SEQ ID NO: 53304 - protein, 16 aa, Artificial Sequence
  Description of Artificial Sequence: Synthetic peptide
  Seed: AYERMCNILKGKFQTA
AYERMYNIQKTKFLTA

SEQ ID NO: 53305 - protein, 16 aa, Artificial Sequence
  Description of Artificial Sequence: Synthetic peptide
  Seed: AYERMCNILKGKFQTA
AYERMYNIQKTKFVTA

SEQ ID NO: 53306 - protein, 16 aa, Artificial Sequence
  Description of Artificial Sequence: Synthetic peptide
  Seed: AYERMCNILKGKFQTA
AYERMYNISKAKFATA

SEQ ID NO: 53307 - protein, 16 aa, Artificial Sequence
  Description of Artificial Sequence: Synthetic peptide
  Seed: AYERMCNILKGKFQTA
AYERMYNISKAKFITA

SEQ ID NO: 53308 - protein, 16 aa, Artificial Sequence
  Description of Artificial Sequence: Synthetic peptide
  Seed: AYERMCNILKGKFQTA
AYERMYNISKAKFLTA

SEQ ID NO: 53309 - protein, 16 aa, Artificial Sequence
  Description of Artificial Sequence: Synthetic peptide
  Seed: AYERMCNILKGKFQTA
AYERMYNISKAKFMTA

SEQ ID NO: 53310 - protein, 16 aa, Artificial Sequence
  Description of Artificial Sequence: Synthetic peptide
  Seed: AYERMCNILKGKFQTA
AYERMYNISKAKFVTA

SEQ ID NO: 53311 - protein, 16 aa, Artificial Sequence
  Description of Artificial Sequence: Synthetic peptide
  Seed: AYERMCNILKGKFQTA
AYERMYNISKGKFITA

SEQ ID NO: 53312 - protein, 16 aa, Artificial Sequence
  Description of Artificial Sequence: Synthetic peptide
  Seed: AYERMCNILKGKFQTA
AYERMYNISKGKFLTA

SEQ ID NO: 53313 - protein, 16 aa, Artificial Sequence
  Description of Artificial Sequence: Synthetic peptide
  Seed: AYERMCNILKGKFQTA
AYERMYNISKGKFVTA

SEQ ID NO: 53314 - protein, 16 aa, Artificial Sequence
  Description of Artificial Sequence: Synthetic peptide
  Seed: AYERMCNILKGKFQTA
AYERMYNISKSKFLTA

SEQ ID NO: 53315 - protein, 16 aa, Artificial Sequence
  Description of Artificial Sequence: Synthetic peptide
  Seed: AYERMCNILKGKFQTA
AYERMYNISKSKFVTA

SEQ ID NO: 53316 - protein, 16 aa, Artificial Sequence
  Description of Artificial Sequence: Synthetic peptide
  Seed: AYERMCNILKGKFQTA
AYERMYNIVKAKFATA

SEQ ID NO: 53317 - protein, 16 aa, Artificial Sequence
  Description of Artificial Sequence: Synthetic peptide
  Seed: AYERMCNILKGKFQTA
AYERMYNIVKAKFITA

SEQ ID NO: 53318 - protein, 16 aa, Artificial Sequence
  Description of Artificial Sequence: Synthetic peptide
  Seed: AYERMCNILKGKFQTA
AYERMYNIVKAKFLTA

SEQ ID NO: 53319 - protein, 16 aa, Artificial Sequence
  Description of Artificial Sequence: Synthetic peptide
  Seed: AYERMCNILKGKFQTA
AYERMYNIVKAKFMTA

SEQ ID NO: 53320 - protein, 16 aa, Artificial Sequence
  Description of Artificial Sequence: Synthetic peptide
  Seed: AYERMCNILKGKFQTA
AYERMYNIVKAKFTTA

SEQ ID NO: 53321 - protein, 16 aa, Artificial Sequence
  Description of Artificial Sequence: Synthetic peptide
  Seed: AYERMCNILKGKFQTA
AYERMYNIVKAKFVTA

SEQ ID NO: 53322 - protein, 16 aa, Artificial Sequence
  Description of Artificial Sequence: Synthetic peptide
  Seed: AYERMCNILKGKFQTA
AYERMYNIVKGKFATA

SEQ ID NO: 53323 - protein, 16 aa, Artificial Sequence
  Description of Artificial Sequence: Synthetic peptide
  Seed: AYERMCNILKGKFQTA
AYERMYNIVKGKFITA

SEQ ID NO: 53324 - protein, 16 aa, Artificial Sequence
  Description of Artificial Sequence: Synthetic peptide
  Seed: AYERMCNILKGKFQTA
AYERMYNIVKGKFLTA

SEQ ID NO: 53325 - protein, 16 aa, Artificial Sequence
  Description of Artificial Sequence: Synthetic peptide
  Seed: AYERMCNILKGKFQTA
AYERMYNIVKGKFMTA

SEQ ID NO: 53326 - protein, 16 aa, Artificial Sequence
  Description of Artificial Sequence: Synthetic peptide
  Seed: AYERMCNILKGKFQTA
AYERMYNIVKGKFTTA

SEQ ID NO: 53327 - protein, 16 aa, Artificial Sequence
  Description of Artificial Sequence: Synthetic peptide
  Seed: AYERMCNILKGKFQTA
AYERMYNIVKGKFVTA

SEQ ID NO: 53328 - protein, 16 aa, Artificial Sequence
  Description of Artificial Sequence: Synthetic peptide
  Seed: AYERMCNILKGKFQTA
AYERMYNIVKPKFATA

SEQ ID NO: 53329 - protein, 16 aa, Artificial Sequence
  Description of Artificial Sequence: Synthetic peptide
  Seed: AYERMCNILKGKFQTA
AYERMYNIVKPKFITA

SEQ ID NO: 53330 - protein, 16 aa, Artificial Sequence
  Description of Artificial Sequence: Synthetic peptide
  Seed: AYERMCNILKGKFQTA
AYERMYNIVKPKFLTA

SEQ ID NO: 53331 - protein, 16 aa, Artificial Sequence
  Description of Artificial Sequence: Synthetic peptide
  Seed: AYERMCNILKGKFQTA
AYERMYNIVKPKFVTA

SEQ ID NO: 53332 - protein, 16 aa, Artificial Sequence
  Description of Artificial Sequence: Synthetic peptide
  Seed: AYERMCNILKGKFQTA
AYERMYNIVKSKFATA

SEQ ID NO: 53333 - protein, 16 aa, Artificial Sequence
  Description of Artificial Sequence: Synthetic peptide
  Seed: AYERMCNILKGKFQTA
AYERMYNIVKSKFITA

SEQ ID NO: 53334 - protein, 16 aa, Artificial Sequence
  Description of Artificial Sequence: Synthetic peptide
  Seed: AYERMCNILKGKFQTA
AYERMYNIVKSKFLTA

SEQ ID NO: 53335 - protein, 16 aa, Artificial Sequence
  Description of Artificial Sequence: Synthetic peptide
  Seed: AYERMCNILKGKFQTA
AYERMYNIVKSKFTTA

SEQ ID NO: 53336 - protein, 16 aa, Artificial Sequence
  Description of Artificial Sequence: Synthetic peptide
  Seed: AYERMCNILKGKFQTA
AYERMYNIVKSKFVTA

SEQ ID NO: 53337 - protein, 16 aa, Artificial Sequence
  Description of Artificial Sequence: Synthetic peptide
  Seed: AYERMCNILKGKFQTA
AYERMYNIVKTKFLTA

SEQ ID NO: 53338 - protein, 16 aa, Artificial Sequence
  Description of Artificial Sequence: Synthetic peptide
  Seed: AYERMCNILKGKFQTA
AYERMYNIVKTKFVTA

SEQ ID NO: 53339 - protein, 16 aa, Artificial Sequence
  Description of Artificial Sequence: Synthetic peptide
  Seed: AYERMCNILKGKFQTA
AYERMCNFLKAKFQTI

SEQ ID NO: 53340 - protein, 16 aa, Artificial Sequence
  Description of Artificial Sequence: Synthetic peptide
  Seed: AYERMCNILKGKFQTA
AYERMCNFLKAKFQTL

SEQ ID NO: 53341 - protein, 16 aa, Artificial Sequence
  Description of Artificial Sequence: Synthetic peptide
  Seed: AYERMCNILKGKFQTA
AYERMCNFLKAKFQTV

SEQ ID NO: 53342 - protein, 16 aa, Artificial Sequence
  Description of Artificial Sequence: Synthetic peptide
  Seed: AYERMCNILKGKFQTA
AYERMCNFLKEKFQTI

SEQ ID NO: 53343 - protein, 16 aa, Artificial Sequence
  Description of Artificial Sequence: Synthetic peptide
  Seed: AYERMCNILKGKFQTA
AYERMCNFLKEKFQTL

SEQ ID NO: 53344 - protein, 16 aa, Artificial Sequence
  Description of Artificial Sequence: Synthetic peptide
  Seed: AYERMCNILKGKFQTA
AYERMCNFLKEKFQTV

SEQ ID NO: 53345 - protein, 16 aa, Artificial Sequence
  Description of Artificial Sequence: Synthetic peptide
  Seed: AYERMCNILKGKFQTA
AYERMCNFLKFKFQTI

SEQ ID NO: 53346 - protein, 16 aa, Artificial Sequence
  Description of Artificial Sequence: Synthetic peptide
  Seed: AYERMCNILKGKFQTA
AYERMCNFLKFKFQTL

SEQ ID NO: 53347 - protein, 16 aa, Artificial Sequence
  Description of Artificial Sequence: Synthetic peptide
  Seed: AYERMCNILKGKFQTA
AYERMCNFLKFKFQTV

SEQ ID NO: 53348 - protein, 16 aa, Artificial Sequence
  Description of Artificial Sequence: Synthetic peptide
  Seed: AYERMCNILKGKFQTA
AYERMCNFLKHKFQTI

SEQ ID NO: 53349 - protein, 16 aa, Artificial Sequence
  Description of Artificial Sequence: Synthetic peptide
  Seed: AYERMCNILKGKFQTA
AYERMCNFLKHKFQTL

SEQ ID NO: 53350 - protein, 16 aa, Artificial Sequence
  Description of Artificial Sequence: Synthetic peptide
  Seed: AYERMCNILKGKFQTA
AYERMCNFLKHKFQTV

SEQ ID NO: 53351 - protein, 16 aa, Artificial Sequence
  Description of Artificial Sequence: Synthetic peptide
  Seed: AYERMCNILKGKFQTA
AYERMCNFLKIKFQTF

SEQ ID NO: 53352 - protein, 16 aa, Artificial Sequence
  Description of Artificial Sequence: Synthetic peptide
  Seed: AYERMCNILKGKFQTA
AYERMCNFLKIKFQTI

SEQ ID NO: 53353 - protein, 16 aa, Artificial Sequence
  Description of Artificial Sequence: Synthetic peptide
  Seed: AYERMCNILKGKFQTA
AYERMCNFLKIKFQTL

SEQ ID NO: 53354 - protein, 16 aa, Artificial Sequence
  Description of Artificial Sequence: Synthetic peptide
  Seed: AYERMCNILKGKFQTA
AYERMCNFLKIKFQTM

SEQ ID NO: 53355 - protein, 16 aa, Artificial Sequence
  Description of Artificial Sequence: Synthetic peptide
  Seed: AYERMCNILKGKFQTA
AYERMCNFLKIKFQTV

SEQ ID NO: 53356 - protein, 16 aa, Artificial Sequence
  Description of Artificial Sequence: Synthetic peptide
  Seed: AYERMCNILKGKFQTA
AYERMCNFLKLKFQTI

SEQ ID NO: 53357 - protein, 16 aa, Artificial Sequence
  Description of Artificial Sequence: Synthetic peptide
  Seed: AYERMCNILKGKFQTA
AYERMCNFLKLKFQTL

SEQ ID NO: 53358 - protein, 16 aa, Artificial Sequence
  Description of Artificial Sequence: Synthetic peptide
  Seed: AYERMCNILKGKFQTA
AYERMCNFLKLKFQTV

SEQ ID NO: 53359 - protein, 16 aa, Artificial Sequence
  Description of Artificial Sequence: Synthetic peptide
  Seed: AYERMCNILKGKFQTA
AYERMCNFLKMKFQTI

SEQ ID NO: 53360 - protein, 16 aa, Artificial Sequence
  Description of Artificial Sequence: Synthetic peptide
  Seed: AYERMCNILKGKFQTA
AYERMCNFLKMKFQTL

SEQ ID NO: 53361 - protein, 16 aa, Artificial Sequence
  Description of Artificial Sequence: Synthetic peptide
  Seed: AYERMCNILKGKFQTA
AYERMCNFLKMKFQTV

SEQ ID NO: 53362 - protein, 16 aa, Artificial Sequence
  Description of Artificial Sequence: Synthetic peptide
  Seed: AYERMCNILKGKFQTA
AYERMCNFLKSKFQTI

SEQ ID NO: 53363 - protein, 16 aa, Artificial Sequence
  Description of Artificial Sequence: Synthetic peptide
  Seed: AYERMCNILKGKFQTA
AYERMCNFLKSKFQTL

SEQ ID NO: 53364 - protein, 16 aa, Artificial Sequence
  Description of Artificial Sequence: Synthetic peptide
  Seed: AYERMCNILKGKFQTA
AYERMCNFLKSKFQTV

SEQ ID NO: 53365 - protein, 16 aa, Artificial Sequence
  Description of Artificial Sequence: Synthetic peptide
  Seed: AYERMCNILKGKFQTA
AYERMCNFLKTKFQTI

SEQ ID NO: 53366 - protein, 16 aa, Artificial Sequence
  Description of Artificial Sequence: Synthetic peptide
  Seed: AYERMCNILKGKFQTA
AYERMCNFLKTKFQTM

SEQ ID NO: 53367 - protein, 16 aa, Artificial Sequence
  Description of Artificial Sequence: Synthetic peptide
  Seed: AYERMCNILKGKFQTA
AYERMCNFLKTKFQTV

SEQ ID NO: 53368 - protein, 16 aa, Artificial Sequence
  Description of Artificial Sequence: Synthetic peptide
  Seed: AYERMCNILKGKFQTA
AYERMCNFLKVKFQTI

SEQ ID NO: 53369 - protein, 16 aa, Artificial Sequence
  Description of Artificial Sequence: Synthetic peptide
  Seed: AYERMCNILKGKFQTA
AYERMCNFLKVKFQTL

SEQ ID NO: 53370 - protein, 16 aa, Artificial Sequence
  Description of Artificial Sequence: Synthetic peptide
  Seed: AYERMCNILKGKFQTA
AYERMCNFLKVKFQTM

SEQ ID NO: 53371 - protein, 16 aa, Artificial Sequence
  Description of Artificial Sequence: Synthetic peptide
  Seed: AYERMCNILKGKFQTA
AYERMCNFLKVKFQTV

SEQ ID NO: 53372 - protein, 16 aa, Artificial Sequence
  Description of Artificial Sequence: Synthetic peptide
  Seed: AYERMCNILKGKFQTA
AYERFCNILKGKAQTA

SEQ ID NO: 53373 - protein, 16 aa, Artificial Sequence
  Description of Artificial Sequence: Synthetic peptide
  Seed: AYERMCNILKGKFQTA
AYERFCNILKGKSQTA

SEQ ID NO: 53374 - protein, 16 aa, Artificial Sequence
  Description of Artificial Sequence: Synthetic peptide
  Seed: AYERMCNILKGKFQTA
AYERFCNILRGKAQTA

SEQ ID NO: 53375 - protein, 16 aa, Artificial Sequence
  Description of Artificial Sequence: Synthetic peptide
  Seed: AYERMCNILKGKFQTA
AYERFCNILRGKSQTA

SEQ ID NO: 53376 - protein, 16 aa, Artificial Sequence
  Description of Artificial Sequence: Synthetic peptide
  Seed: AYERMCNILKGKFQTA
AYERFCNLLKGKAQTA

SEQ ID NO: 53377 - protein, 16 aa, Artificial Sequence
  Description of Artificial Sequence: Synthetic peptide
  Seed: AYERMCNILKGKFQTA
AYERFCNLLRGKAQTA

SEQ ID NO: 53378 - protein, 16 aa, Artificial Sequence
  Description of Artificial Sequence: Synthetic peptide
  Seed: AYERMCNILKGKFQTA
AYERFCNLLRGKSQTA

SEQ ID NO: 53379 - protein, 16 aa, Artificial Sequence
  Description of Artificial Sequence: Synthetic peptide
  Seed: AYERMCNILKGKFQTA
AYERFCNMLKGKAQTA

SEQ ID NO: 53380 - protein, 16 aa, Artificial Sequence
  Description of Artificial Sequence: Synthetic peptide
  Seed: AYERMCNILKGKFQTA
AYERFCNMLRGKAQTA

SEQ ID NO: 53381 - protein, 16 aa, Artificial Sequence
  Description of Artificial Sequence: Synthetic peptide
  Seed: AYERMCNILKGKFQTA
AYERFCNMLRGKSQTA

SEQ ID NO: 53382 - protein, 16 aa, Artificial Sequence
  Description of Artificial Sequence: Synthetic peptide
  Seed: AYERMCNILKGKFQTA
AYERFCNVLRGKAQTA

SEQ ID NO: 53383 - protein, 16 aa, Artificial Sequence
  Description of Artificial Sequence: Synthetic peptide
  Seed: AYERMCNILKGKFQTA
AYERICNILKGKAQTA

SEQ ID NO: 53384 - protein, 16 aa, Artificial Sequence
  Description of Artificial Sequence: Synthetic peptide
  Seed: AYERMCNILKGKFQTA
AYERICNILKGKSQTA

SEQ ID NO: 53385 - protein, 16 aa, Artificial Sequence
  Description of Artificial Sequence: Synthetic peptide
  Seed: AYERMCNILKGKFQTA
AYERICNILRGKAQTA

SEQ ID NO: 53386 - protein, 16 aa, Artificial Sequence
  Description of Artificial Sequence: Synthetic peptide
  Seed: AYERMCNILKGKFQTA
AYERICNILRGKSQTA

SEQ ID NO: 53387 - protein, 16 aa, Artificial Sequence
  Description of Artificial Sequence: Synthetic peptide
  Seed: AYERMCNILKGKFQTA
AYERICNLLKGKAQTA

SEQ ID NO: 53388 - protein, 16 aa, Artificial Sequence
  Description of Artificial Sequence: Synthetic peptide
  Seed: AYERMCNILKGKFQTA
AYERICNLLRGKAQTA

SEQ ID NO: 53389 - protein, 16 aa, Artificial Sequence
  Description of Artificial Sequence: Synthetic peptide
  Seed: AYERMCNILKGKFQTA
AYERICNLLRGKSQTA

SEQ ID NO: 53390 - protein, 16 aa, Artificial Sequence
  Description of Artificial Sequence: Synthetic peptide
  Seed: AYERMCNILKGKFQTA
AYERICNMLKGKAQTA

SEQ ID NO: 53391 - protein, 16 aa, Artificial Sequence
  Description of Artificial Sequence: Synthetic peptide
  Seed: AYERMCNILKGKFQTA
AYERICNMLKGKSQTA

SEQ ID NO: 53392 - protein, 16 aa, Artificial Sequence
  Description of Artificial Sequence: Synthetic peptide
  Seed: AYERMCNILKGKFQTA
AYERICNMLRGKAQTA

SEQ ID NO: 53393 - protein, 16 aa, Artificial Sequence
  Description of Artificial Sequence: Synthetic peptide
  Seed: AYERMCNILKGKFQTA
AYERICNMLRGKSQTA

SEQ ID NO: 53394 - protein, 16 aa, Artificial Sequence
  Description of Artificial Sequence: Synthetic peptide
  Seed: AYERMCNILKGKFQTA
AYERICNMLRGKTQTA

SEQ ID NO: 53395 - protein, 16 aa, Artificial Sequence
  Description of Artificial Sequence: Synthetic peptide
  Seed: AYERMCNILKGKFQTA
AYERICNVLRGKAQTA

SEQ ID NO: 53396 - protein, 16 aa, Artificial Sequence
  Description of Artificial Sequence: Synthetic peptide
  Seed: AYERMCNILKGKFQTA
AYERICNVLRGKSQTA

SEQ ID NO: 53397 - protein, 16 aa, Artificial Sequence
  Description of Artificial Sequence: Synthetic peptide
  Seed: AYERMCNILKGKFQTA
AYERLCNILRGKAQTA

SEQ ID NO: 53398 - protein, 16 aa, Artificial Sequence
  Description of Artificial Sequence: Synthetic peptide
  Seed: AYERMCNILKGKFQTA
AYERLCNLLRGKAQTA

SEQ ID NO: 53399 - protein, 16 aa, Artificial Sequence
  Description of Artificial Sequence: Synthetic peptide
  Seed: AYERMCNILKGKFQTA
AYERLCNMLRGKAQTA

SEQ ID NO: 53400 - protein, 16 aa, Artificial Sequence
  Description of Artificial Sequence: Synthetic peptide
  Seed: AYERMCNILKGKFQTA
AYERLCNMLRGKSQTA

SEQ ID NO: 53401 - protein, 15 aa, Artificial Sequence
  Description of Artificial Sequence: Synthetic peptide
  Seed: CSLMQGSTLPRRSGA
CSLMQFSTAPRRSAA

SEQ ID NO: 53402 - protein, 15 aa, Artificial Sequence
  Description of Artificial Sequence: Synthetic peptide
  Seed: CSLMQGSTLPRRSGA
CSLMQFSTFPRRSAA

SEQ ID NO: 53403 - protein, 15 aa, Artificial Sequence
  Description of Artificial Sequence: Synthetic peptide
  Seed: CSLMQGSTLPRRSGA
CSLMQFSTFPRRSSA

SEQ ID NO: 53404 - protein, 15 aa, Artificial Sequence
  Description of Artificial Sequence: Synthetic peptide
  Seed: CSLMQGSTLPRRSGA
CSLMQFSTIPKRSAA

SEQ ID NO: 53405 - protein, 15 aa, Artificial Sequence
  Description of Artificial Sequence: Synthetic peptide
  Seed: CSLMQGSTLPRRSGA
CSLMQFSTIPKRSSA

SEQ ID NO: 53406 - protein, 15 aa, Artificial Sequence
  Description of Artificial Sequence: Synthetic peptide
  Seed: CSLMQGSTLPRRSGA
CSLMQFSTIPRRSAA

SEQ ID NO: 53407 - protein, 15 aa, Artificial Sequence
  Description of Artificial Sequence: Synthetic peptide
  Seed: CSLMQGSTLPRRSGA
CSLMQFSTIPRRSGA

SEQ ID NO: 53408 - protein, 15 aa, Artificial Sequence
  Description of Artificial Sequence: Synthetic peptide
  Seed: CSLMQGSTLPRRSGA
CSLMQFSTIPRRSHA

SEQ ID NO: 53409 - protein, 15 aa, Artificial Sequence
  Description of Artificial Sequence: Synthetic peptide
  Seed: CSLMQGSTLPRRSGA
CSLMQFSTIPRRSQA

SEQ ID NO: 53410 - protein, 15 aa, Artificial Sequence
  Description of Artificial Sequence: Synthetic peptide
  Seed: CSLMQGSTLPRRSGA
CSLMQFSTIPRRSRA

SEQ ID NO: 53411 - protein, 15 aa, Artificial Sequence
  Description of Artificial Sequence: Synthetic peptide
  Seed: CSLMQGSTLPRRSGA
CSLMQFSTIPRRSSA

SEQ ID NO: 53412 - protein, 15 aa, Artificial Sequence
  Description of Artificial Sequence: Synthetic peptide
  Seed: CSLMQGSTLPRRSGA
CSLMQFSTIPRRSTA

SEQ ID NO: 53413 - protein, 15 aa, Artificial Sequence
  Description of Artificial Sequence: Synthetic peptide
  Seed: CSLMQGSTLPRRSGA
CSLMQFSTIPRRSVA

SEQ ID NO: 53414 - protein, 15 aa, Artificial Sequence
  Description of Artificial Sequence: Synthetic peptide
  Seed: CSLMQGSTLPRRSGA
CSLMQFSTIPRRSYA

SEQ ID NO: 53415 - protein, 15 aa, Artificial Sequence
  Description of Artificial Sequence: Synthetic peptide
  Seed: CSLMQGSTLPRRSGA
CSLMQFSTLPKRSAA

SEQ ID NO: 53416 - protein, 15 aa, Artificial Sequence
  Description of Artificial Sequence: Synthetic peptide
  Seed: CSLMQGSTLPRRSGA
CSLMQFSTLPKRSSA

SEQ ID NO: 53417 - protein, 15 aa, Artificial Sequence
  Description of Artificial Sequence: Synthetic peptide
  Seed: CSLMQGSTLPRRSGA
CSLMQFSTLPRRSAA

SEQ ID NO: 53418 - protein, 15 aa, Artificial Sequence
  Description of Artificial Sequence: Synthetic peptide
  Seed: CSLMQGSTLPRRSGA
CSLMQFSTLPRRSGA

SEQ ID NO: 53419 - protein, 15 aa, Artificial Sequence
  Description of Artificial Sequence: Synthetic peptide
  Seed: CSLMQGSTLPRRSGA
CSLMQFSTLPRRSHA

SEQ ID NO: 53420 - protein, 15 aa, Artificial Sequence
  Description of Artificial Sequence: Synthetic peptide
  Seed: CSLMQGSTLPRRSGA
CSLMQFSTLPRRSIA

SEQ ID NO: 53421 - protein, 15 aa, Artificial Sequence
  Description of Artificial Sequence: Synthetic peptide
  Seed: CSLMQGSTLPRRSGA
CSLMQFSTLPRRSKA

SEQ ID NO: 53422 - protein, 15 aa, Artificial Sequence
  Description of Artificial Sequence: Synthetic peptide
  Seed: CSLMQGSTLPRRSGA
CSLMQFSTLPRRSMA

SEQ ID NO: 53423 - protein, 15 aa, Artificial Sequence
  Description of Artificial Sequence: Synthetic peptide
  Seed: CSLMQGSTLPRRSGA
CSLMQFSTLPRRSQA

SEQ ID NO: 53424 - protein, 15 aa, Artificial Sequence
  Description of Artificial Sequence: Synthetic peptide
  Seed: CSLMQGSTLPRRSGA
CSLMQFSTLPRRSRA

SEQ ID NO: 53425 - protein, 15 aa, Artificial Sequence
  Description of Artificial Sequence: Synthetic peptide
  Seed: CSLMQGSTLPRRSGA
CSLMQFSTLPRRSSA

SEQ ID NO: 53426 - protein, 15 aa, Artificial Sequence
  Description of Artificial Sequence: Synthetic peptide
  Seed: CSLMQGSTLPRRSGA
CSLMQFSTLPRRSTA

SEQ ID NO: 53427 - protein, 15 aa, Artificial Sequence
  Description of Artificial Sequence: Synthetic peptide
  Seed: CSLMQGSTLPRRSGA
CSLMQFSTLPRRSVA

SEQ ID NO: 53428 - protein, 15 aa, Artificial Sequence
  Description of Artificial Sequence: Synthetic peptide
  Seed: CSLMQGSTLPRRSGA
CSLMQFSTLPRRSYA

SEQ ID NO: 53429 - protein, 15 aa, Artificial Sequence
  Description of Artificial Sequence: Synthetic peptide
  Seed: CSLMQGSTLPRRSGA
CSLMQFSTMPKRSAA

SEQ ID NO: 53430 - protein, 15 aa, Artificial Sequence
  Description of Artificial Sequence: Synthetic peptide
  Seed: CSLMQGSTLPRRSGA
CSLMQFSTMPKRSSA

SEQ ID NO: 53431 - protein, 15 aa, Artificial Sequence
  Description of Artificial Sequence: Synthetic peptide
  Seed: CSLMQGSTLPRRSGA
CSLMQFSTMPRRSAA

SEQ ID NO: 53432 - protein, 15 aa, Artificial Sequence
  Description of Artificial Sequence: Synthetic peptide
  Seed: CSLMQGSTLPRRSGA
CSLMQFSTMPRRSGA

SEQ ID NO: 53433 - protein, 15 aa, Artificial Sequence
  Description of Artificial Sequence: Synthetic peptide
  Seed: CSLMQGSTLPRRSGA
CSLMQFSTMPRRSHA

SEQ ID NO: 53434 - protein, 15 aa, Artificial Sequence
  Description of Artificial Sequence: Synthetic peptide
  Seed: CSLMQGSTLPRRSGA
CSLMQFSTMPRRSIA

SEQ ID NO: 53435 - protein, 15 aa, Artificial Sequence
  Description of Artificial Sequence: Synthetic peptide
  Seed: CSLMQGSTLPRRSGA
CSLMQFSTMPRRSKA

SEQ ID NO: 53436 - protein, 15 aa, Artificial Sequence
  Description of Artificial Sequence: Synthetic peptide
  Seed: CSLMQGSTLPRRSGA
CSLMQFSTMPRRSLA

SEQ ID NO: 53437 - protein, 15 aa, Artificial Sequence
  Description of Artificial Sequence: Synthetic peptide
  Seed: CSLMQGSTLPRRSGA
CSLMQFSTMPRRSMA

SEQ ID NO: 53438 - protein, 15 aa, Artificial Sequence
  Description of Artificial Sequence: Synthetic peptide
  Seed: CSLMQGSTLPRRSGA
CSLMQFSTMPRRSQA

SEQ ID NO: 53439 - protein, 15 aa, Artificial Sequence
  Description of Artificial Sequence: Synthetic peptide
  Seed: CSLMQGSTLPRRSGA
CSLMQFSTMPRRSRA

SEQ ID NO: 53440 - protein, 15 aa, Artificial Sequence
  Description of Artificial Sequence: Synthetic peptide
  Seed: CSLMQGSTLPRRSGA
CSLMQFSTMPRRSSA

SEQ ID NO: 53441 - protein, 15 aa, Artificial Sequence
  Description of Artificial Sequence: Synthetic peptide
  Seed: CSLMQGSTLPRRSGA
CSLMQFSTMPRRSTA

SEQ ID NO: 53442 - protein, 15 aa, Artificial Sequence
  Description of Artificial Sequence: Synthetic peptide
  Seed: CSLMQGSTLPRRSGA
CSLMQFSTMPRRSVA

SEQ ID NO: 53443 - protein, 15 aa, Artificial Sequence
  Description of Artificial Sequence: Synthetic peptide
  Seed: CSLMQGSTLPRRSGA
CSLMQFSTMPRRSYA

SEQ ID NO: 53444 - protein, 15 aa, Artificial Sequence
  Description of Artificial Sequence: Synthetic peptide
  Seed: CSLMQGSTLPRRSGA
CSLMQFSTVPRRSAA

SEQ ID NO: 53445 - protein, 15 aa, Artificial Sequence
  Description of Artificial Sequence: Synthetic peptide
  Seed: CSLMQGSTLPRRSGA
CSLMQFSTVPRRSSA

SEQ ID NO: 53446 - protein, 15 aa, Artificial Sequence
  Description of Artificial Sequence: Synthetic peptide
  Seed: CSLMQGSTLPRRSGA
CSLMQISTAPRRSAA

SEQ ID NO: 53447 - protein, 15 aa, Artificial Sequence
  Description of Artificial Sequence: Synthetic peptide
  Seed: CSLMQGSTLPRRSGA
CSLMQISTAPRRSQA

SEQ ID NO: 53448 - protein, 15 aa, Artificial Sequence
  Description of Artificial Sequence: Synthetic peptide
  Seed: CSLMQGSTLPRRSGA
CSLMQISTAPRRSSA

SEQ ID NO: 53449 - protein, 15 aa, Artificial Sequence
  Description of Artificial Sequence: Synthetic peptide
  Seed: CSLMQGSTLPRRSGA
CSLMQISTFPKRSAA

SEQ ID NO: 53450 - protein, 15 aa, Artificial Sequence
  Description of Artificial Sequence: Synthetic peptide
  Seed: CSLMQGSTLPRRSGA
CSLMQISTFPKRSSA

SEQ ID NO: 53451 - protein, 15 aa, Artificial Sequence
  Description of Artificial Sequence: Synthetic peptide
  Seed: CSLMQGSTLPRRSGA
CSLMQISTFPRRSAA

SEQ ID NO: 53452 - protein, 15 aa, Artificial Sequence
  Description of Artificial Sequence: Synthetic peptide
  Seed: CSLMQGSTLPRRSGA
CSLMQISTFPRRSGA

SEQ ID NO: 53453 - protein, 15 aa, Artificial Sequence
  Description of Artificial Sequence: Synthetic peptide
  Seed: CSLMQGSTLPRRSGA
CSLMQISTFPRRSHA

SEQ ID NO: 53454 - protein, 15 aa, Artificial Sequence
  Description of Artificial Sequence: Synthetic peptide
  Seed: CSLMQGSTLPRRSGA
CSLMQISTFPRRSQA

SEQ ID NO: 53455 - protein, 15 aa, Artificial Sequence
  Description of Artificial Sequence: Synthetic peptide
  Seed: CSLMQGSTLPRRSGA
CSLMQISTFPRRSRA

SEQ ID NO: 53456 - protein, 15 aa, Artificial Sequence
  Description of Artificial Sequence: Synthetic peptide
  Seed: CSLMQGSTLPRRSGA
CSLMQISTFPRRSSA

SEQ ID NO: 53457 - protein, 15 aa, Artificial Sequence
  Description of Artificial Sequence: Synthetic peptide
  Seed: CSLMQGSTLPRRSGA
CSLMQISTIPKRSAA

SEQ ID NO: 53458 - protein, 15 aa, Artificial Sequence
  Description of Artificial Sequence: Synthetic peptide
  Seed: CSLMQGSTLPRRSGA
CSLMQISTIPKRSGA

SEQ ID NO: 53459 - protein, 15 aa, Artificial Sequence
  Description of Artificial Sequence: Synthetic peptide
  Seed: CSLMQGSTLPRRSGA
CSLMQISTIPKRSQA

SEQ ID NO: 53460 - protein, 15 aa, Artificial Sequence
  Description of Artificial Sequence: Synthetic peptide
  Seed: CSLMQGSTLPRRSGA
CSLMQISTIPKRSSA

SEQ ID NO: 53461 - protein, 15 aa, Artificial Sequence
  Description of Artificial Sequence: Synthetic peptide
  Seed: CSLMQGSTLPRRSGA
CSLMQISTIPKRSTA

SEQ ID NO: 53462 - protein, 15 aa, Artificial Sequence
  Description of Artificial Sequence: Synthetic peptide
  Seed: CSLMQGSTLPRRSGA
CSLMQISTIPKRSVA

SEQ ID NO: 53463 - protein, 15 aa, Artificial Sequence
  Description of Artificial Sequence: Synthetic peptide
  Seed: CSLMQGSTLPRRSGA
CSLMQISTIPRRSAA

SEQ ID NO: 53464 - protein, 15 aa, Artificial Sequence
  Description of Artificial Sequence: Synthetic peptide
  Seed: CSLMQGSTLPRRSGA
CSLMQISTIPRRSGA

SEQ ID NO: 53465 - protein, 15 aa, Artificial Sequence
  Description of Artificial Sequence: Synthetic peptide
  Seed: CSLMQGSTLPRRSGA
CSLMQISTIPRRSHA

SEQ ID NO: 53466 - protein, 15 aa, Artificial Sequence
  Description of Artificial Sequence: Synthetic peptide
  Seed: CSLMQGSTLPRRSGA
CSLMQISTIPRRSIA

SEQ ID NO: 53467 - protein, 15 aa, Artificial Sequence
  Description of Artificial Sequence: Synthetic peptide
  Seed: CSLMQGSTLPRRSGA
CSLMQISTIPRRSKA

SEQ ID NO: 53468 - protein, 15 aa, Artificial Sequence
  Description of Artificial Sequence: Synthetic peptide
  Seed: CSLMQGSTLPRRSGA
CSLMQISTIPRRSLA

SEQ ID NO: 53469 - protein, 15 aa, Artificial Sequence
  Description of Artificial Sequence: Synthetic peptide
  Seed: CSLMQGSTLPRRSGA
CSLMQISTIPRRSMA

SEQ ID NO: 53470 - protein, 15 aa, Artificial Sequence
  Description of Artificial Sequence: Synthetic peptide
  Seed: CSLMQGSTLPRRSGA
CSLMQISTIPRRSNA

SEQ ID NO: 53471 - protein, 15 aa, Artificial Sequence
  Description of Artificial Sequence: Synthetic peptide
  Seed: CSLMQGSTLPRRSGA
CSLMQISTIPRRSQA

SEQ ID NO: 53472 - protein, 15 aa, Artificial Sequence
  Description of Artificial Sequence: Synthetic peptide
  Seed: CSLMQGSTLPRRSGA
CSLMQISTIPRRSRA

SEQ ID NO: 53473 - protein, 15 aa, Artificial Sequence
  Description of Artificial Sequence: Synthetic peptide
  Seed: CSLMQGSTLPRRSGA
CSLMQISTIPRRSSA

SEQ ID NO: 53474 - protein, 15 aa, Artificial Sequence
  Description of Artificial Sequence: Synthetic peptide
  Seed: CSLMQGSTLPRRSGA
CSLMQISTIPRRSTA

SEQ ID NO: 53475 - protein, 15 aa, Artificial Sequence
  Description of Artificial Sequence: Synthetic peptide
  Seed: CSLMQGSTLPRRSGA
CSLMQISTIPRRSVA

SEQ ID NO: 53476 - protein, 15 aa, Artificial Sequence
  Description of Artificial Sequence: Synthetic peptide
  Seed: CSLMQGSTLPRRSGA
CSLMQISTIPRRSYA

SEQ ID NO: 53477 - protein, 15 aa, Artificial Sequence
  Description of Artificial Sequence: Synthetic peptide
  Seed: CSLMQGSTLPRRSGA
CSLMQISTKPRRSAA

SEQ ID NO: 53478 - protein, 15 aa, Artificial Sequence
  Description of Artificial Sequence: Synthetic peptide
  Seed: CSLMQGSTLPRRSGA
CSLMQISTLPKRSAA

SEQ ID NO: 53479 - protein, 15 aa, Artificial Sequence
  Description of Artificial Sequence: Synthetic peptide
  Seed: CSLMQGSTLPRRSGA
CSLMQISTLPKRSGA

SEQ ID NO: 53480 - protein, 15 aa, Artificial Sequence
  Description of Artificial Sequence: Synthetic peptide
  Seed: CSLMQGSTLPRRSGA
CSLMQISTLPKRSHA

SEQ ID NO: 53481 - protein, 15 aa, Artificial Sequence
  Description of Artificial Sequence: Synthetic peptide
  Seed: CSLMQGSTLPRRSGA
CSLMQISTLPKRSIA

SEQ ID NO: 53482 - protein, 15 aa, Artificial Sequence
  Description of Artificial Sequence: Synthetic peptide
  Seed: CSLMQGSTLPRRSGA
CSLMQISTLPKRSKA

SEQ ID NO: 53483 - protein, 15 aa, Artificial Sequence
  Description of Artificial Sequence: Synthetic peptide
  Seed: CSLMQGSTLPRRSGA
CSLMQISTLPKRSLA

SEQ ID NO: 53484 - protein, 15 aa, Artificial Sequence
  Description of Artificial Sequence: Synthetic peptide
  Seed: CSLMQGSTLPRRSGA
CSLMQISTLPKRSMA

SEQ ID NO: 53485 - protein, 15 aa, Artificial Sequence
  Description of Artificial Sequence: Synthetic peptide
  Seed: CSLMQGSTLPRRSGA
CSLMQISTLPKRSQA

SEQ ID NO: 53486 - protein, 15 aa, Artificial Sequence
  Description of Artificial Sequence: Synthetic peptide
  Seed: CSLMQGSTLPRRSGA
CSLMQISTLPKRSRA

SEQ ID NO: 53487 - protein, 15 aa, Artificial Sequence
  Description of Artificial Sequence: Synthetic peptide
  Seed: CSLMQGSTLPRRSGA
CSLMQISTLPKRSSA

SEQ ID NO: 53488 - protein, 15 aa, Artificial Sequence
  Description of Artificial Sequence: Synthetic peptide
  Seed: CSLMQGSTLPRRSGA
CSLMQISTLPKRSTA

SEQ ID NO: 53489 - protein, 15 aa, Artificial Sequence
  Description of Artificial Sequence: Synthetic peptide
  Seed: CSLMQGSTLPRRSGA
CSLMQISTLPKRSVA

SEQ ID NO: 53490 - protein, 15 aa, Artificial Sequence
  Description of Artificial Sequence: Synthetic peptide
  Seed: CSLMQGSTLPRRSGA
CSLMQISTLPRRSAA

SEQ ID NO: 53491 - protein, 15 aa, Artificial Sequence
  Description of Artificial Sequence: Synthetic peptide
  Seed: CSLMQGSTLPRRSGA
CSLMQISTLPRRSFA

SEQ ID NO: 53492 - protein, 15 aa, Artificial Sequence
  Description of Artificial Sequence: Synthetic peptide
  Seed: CSLMQGSTLPRRSGA
CSLMQISTLPRRSGA

SEQ ID NO: 53493 - protein, 15 aa, Artificial Sequence
  Description of Artificial Sequence: Synthetic peptide
  Seed: CSLMQGSTLPRRSGA
CSLMQISTLPRRSHA

SEQ ID NO: 53494 - protein, 15 aa, Artificial Sequence
  Description of Artificial Sequence: Synthetic peptide
  Seed: CSLMQGSTLPRRSGA
CSLMQISTLPRRSIA

SEQ ID NO: 53495 - protein, 15 aa, Artificial Sequence
  Description of Artificial Sequence: Synthetic peptide
  Seed: CSLMQGSTLPRRSGA
CSLMQISTLPRRSKA

SEQ ID NO: 53496 - protein, 15 aa, Artificial Sequence
  Description of Artificial Sequence: Synthetic peptide
  Seed: CSLMQGSTLPRRSGA
CSLMQISTLPRRSLA

SEQ ID NO: 53497 - protein, 15 aa, Artificial Sequence
  Description of Artificial Sequence: Synthetic peptide
  Seed: CSLMQGSTLPRRSGA
CSLMQISTLPRRSMA

SEQ ID NO: 53498 - protein, 15 aa, Artificial Sequence
  Description of Artificial Sequence: Synthetic peptide
  Seed: CSLMQGSTLPRRSGA
CSLMQISTLPRRSNA

SEQ ID NO: 53499 - protein, 15 aa, Artificial Sequence
  Description of Artificial Sequence: Synthetic peptide
  Seed: CSLMQGSTLPRRSGA
CSLMQISTLPRRSPA

SEQ ID NO: 53500 - protein, 15 aa, Artificial Sequence
  Description of Artificial Sequence: Synthetic peptide
  Seed: CSLMQGSTLPRRSGA
CSLMQISTLPRRSQA

SEQ ID NO: 53501 - protein, 15 aa, Artificial Sequence
  Description of Artificial Sequence: Synthetic peptide
  Seed: CSLMQGSTLPRRSGA
CSLMQISTLPRRSRA

SEQ ID NO: 53502 - protein, 15 aa, Artificial Sequence
  Description of Artificial Sequence: Synthetic peptide
  Seed: CSLMQGSTLPRRSGA
CSLMQISTLPRRSSA

SEQ ID NO: 53503 - protein, 15 aa, Artificial Sequence
  Description of Artificial Sequence: Synthetic peptide
  Seed: CSLMQGSTLPRRSGA
CSLMQISTLPRRSTA

SEQ ID NO: 53504 - protein, 15 aa, Artificial Sequence
  Description of Artificial Sequence: Synthetic peptide
  Seed: CSLMQGSTLPRRSGA
CSLMQISTLPRRSVA

SEQ ID NO: 53505 - protein, 15 aa, Artificial Sequence
  Description of Artificial Sequence: Synthetic peptide
  Seed: CSLMQGSTLPRRSGA
CSLMQISTLPRRSWA

SEQ ID NO: 53506 - protein, 15 aa, Artificial Sequence
  Description of Artificial Sequence: Synthetic peptide
  Seed: CSLMQGSTLPRRSGA
CSLMQISTLPRRSYA

SEQ ID NO: 53507 - protein, 15 aa, Artificial Sequence
  Description of Artificial Sequence: Synthetic peptide
  Seed: CSLMQGSTLPRRSGA
CSLMQISTMPKRSAA

SEQ ID NO: 53508 - protein, 15 aa, Artificial Sequence
  Description of Artificial Sequence: Synthetic peptide
  Seed: CSLMQGSTLPRRSGA
CSLMQISTMPKRSGA

SEQ ID NO: 53509 - protein, 15 aa, Artificial Sequence
  Description of Artificial Sequence: Synthetic peptide
  Seed: CSLMQGSTLPRRSGA
CSLMQISTMPKRSHA

SEQ ID NO: 53510 - protein, 15 aa, Artificial Sequence
  Description of Artificial Sequence: Synthetic peptide
  Seed: CSLMQGSTLPRRSGA
CSLMQISTMPKRSIA

SEQ ID NO: 53511 - protein, 15 aa, Artificial Sequence
  Description of Artificial Sequence: Synthetic peptide
  Seed: CSLMQGSTLPRRSGA
CSLMQISTMPKRSKA

SEQ ID NO: 53512 - protein, 15 aa, Artificial Sequence
  Description of Artificial Sequence: Synthetic peptide
  Seed: CSLMQGSTLPRRSGA
CSLMQISTMPKRSLA

SEQ ID NO: 53513 - protein, 15 aa, Artificial Sequence
  Description of Artificial Sequence: Synthetic peptide
  Seed: CSLMQGSTLPRRSGA
CSLMQISTMPKRSMA

SEQ ID NO: 53514 - protein, 15 aa, Artificial Sequence
  Description of Artificial Sequence: Synthetic peptide
  Seed: CSLMQGSTLPRRSGA
CSLMQISTMPKRSQA

SEQ ID NO: 53515 - protein, 15 aa, Artificial Sequence
  Description of Artificial Sequence: Synthetic peptide
  Seed: CSLMQGSTLPRRSGA
CSLMQISTMPKRSRA

SEQ ID NO: 53516 - protein, 15 aa, Artificial Sequence
  Description of Artificial Sequence: Synthetic peptide
  Seed: CSLMQGSTLPRRSGA
CSLMQISTMPKRSSA

SEQ ID NO: 53517 - protein, 15 aa, Artificial Sequence
  Description of Artificial Sequence: Synthetic peptide
  Seed: CSLMQGSTLPRRSGA
CSLMQISTMPKRSTA

SEQ ID NO: 53518 - protein, 15 aa, Artificial Sequence
  Description of Artificial Sequence: Synthetic peptide
  Seed: CSLMQGSTLPRRSGA
CSLMQISTMPKRSVA

SEQ ID NO: 53519 - protein, 15 aa, Artificial Sequence
  Description of Artificial Sequence: Synthetic peptide
  Seed: CSLMQGSTLPRRSGA
CSLMQISTMPKRSYA

SEQ ID NO: 53520 - protein, 15 aa, Artificial Sequence
  Description of Artificial Sequence: Synthetic peptide
  Seed: CSLMQGSTLPRRSGA
CSLMQISTMPRRSAA

SEQ ID NO: 53521 - protein, 15 aa, Artificial Sequence
  Description of Artificial Sequence: Synthetic peptide
  Seed: CSLMQGSTLPRRSGA
CSLMQISTMPRRSFA

SEQ ID NO: 53522 - protein, 15 aa, Artificial Sequence
  Description of Artificial Sequence: Synthetic peptide
  Seed: CSLMQGSTLPRRSGA
CSLMQISTMPRRSGA

SEQ ID NO: 53523 - protein, 15 aa, Artificial Sequence
  Description of Artificial Sequence: Synthetic peptide
  Seed: CSLMQGSTLPRRSGA
CSLMQISTMPRRSHA

SEQ ID NO: 53524 - protein, 15 aa, Artificial Sequence
  Description of Artificial Sequence: Synthetic peptide
  Seed: CSLMQGSTLPRRSGA
CSLMQISTMPRRSIA

SEQ ID NO: 53525 - protein, 15 aa, Artificial Sequence
  Description of Artificial Sequence: Synthetic peptide
  Seed: CSLMQGSTLPRRSGA
CSLMQISTMPRRSKA

SEQ ID NO: 53526 - protein, 15 aa, Artificial Sequence
  Description of Artificial Sequence: Synthetic peptide
  Seed: CSLMQGSTLPRRSGA
CSLMQISTMPRRSLA

SEQ ID NO: 53527 - protein, 15 aa, Artificial Sequence
  Description of Artificial Sequence: Synthetic peptide
  Seed: CSLMQGSTLPRRSGA
CSLMQISTMPRRSMA

SEQ ID NO: 53528 - protein, 15 aa, Artificial Sequence
  Description of Artificial Sequence: Synthetic peptide
  Seed: CSLMQGSTLPRRSGA
CSLMQISTMPRRSNA

SEQ ID NO: 53529 - protein, 15 aa, Artificial Sequence
  Description of Artificial Sequence: Synthetic peptide
  Seed: CSLMQGSTLPRRSGA
CSLMQISTMPRRSPA

SEQ ID NO: 53530 - protein, 15 aa, Artificial Sequence
  Description of Artificial Sequence: Synthetic peptide
  Seed: CSLMQGSTLPRRSGA
CSLMQISTMPRRSQA

SEQ ID NO: 53531 - protein, 15 aa, Artificial Sequence
  Description of Artificial Sequence: Synthetic peptide
  Seed: CSLMQGSTLPRRSGA
CSLMQISTMPRRSRA

SEQ ID NO: 53532 - protein, 15 aa, Artificial Sequence
  Description of Artificial Sequence: Synthetic peptide
  Seed: CSLMQGSTLPRRSGA
CSLMQISTMPRRSSA

SEQ ID NO: 53533 - protein, 15 aa, Artificial Sequence
  Description of Artificial Sequence: Synthetic peptide
  Seed: CSLMQGSTLPRRSGA
CSLMQISTMPRRSTA

SEQ ID NO: 53534 - protein, 15 aa, Artificial Sequence
  Description of Artificial Sequence: Synthetic peptide
  Seed: CSLMQGSTLPRRSGA
CSLMQISTMPRRSVA

SEQ ID NO: 53535 - protein, 15 aa, Artificial Sequence
  Description of Artificial Sequence: Synthetic peptide
  Seed: CSLMQGSTLPRRSGA
CSLMQISTMPRRSWA

SEQ ID NO: 53536 - protein, 15 aa, Artificial Sequence
  Description of Artificial Sequence: Synthetic peptide
  Seed: CSLMQGSTLPRRSGA
CSLMQISTMPRRSYA

SEQ ID NO: 53537 - protein, 15 aa, Artificial Sequence
  Description of Artificial Sequence: Synthetic peptide
  Seed: CSLMQGSTLPRRSGA
CSLMQISTVPKRSAA

SEQ ID NO: 53538 - protein, 15 aa, Artificial Sequence
  Description of Artificial Sequence: Synthetic peptide
  Seed: CSLMQGSTLPRRSGA
CSLMQISTVPKRSSA

SEQ ID NO: 53539 - protein, 15 aa, Artificial Sequence
  Description of Artificial Sequence: Synthetic peptide
  Seed: CSLMQGSTLPRRSGA
CSLMQISTVPRRSAA

SEQ ID NO: 53540 - protein, 15 aa, Artificial Sequence
  Description of Artificial Sequence: Synthetic peptide
  Seed: CSLMQGSTLPRRSGA
CSLMQISTVPRRSGA

SEQ ID NO: 53541 - protein, 15 aa, Artificial Sequence
  Description of Artificial Sequence: Synthetic peptide
  Seed: CSLMQGSTLPRRSGA
CSLMQISTVPRRSHA

SEQ ID NO: 53542 - protein, 15 aa, Artificial Sequence
  Description of Artificial Sequence: Synthetic peptide
  Seed: CSLMQGSTLPRRSGA
CSLMQISTVPRRSIA

SEQ ID NO: 53543 - protein, 15 aa, Artificial Sequence
  Description of Artificial Sequence: Synthetic peptide
  Seed: CSLMQGSTLPRRSGA
CSLMQISTVPRRSKA

SEQ ID NO: 53544 - protein, 15 aa, Artificial Sequence
  Description of Artificial Sequence: Synthetic peptide
  Seed: CSLMQGSTLPRRSGA
CSLMQISTVPRRSLA

SEQ ID NO: 53545 - protein, 15 aa, Artificial Sequence
  Description of Artificial Sequence: Synthetic peptide
  Seed: CSLMQGSTLPRRSGA
CSLMQISTVPRRSMA

SEQ ID NO: 53546 - protein, 15 aa, Artificial Sequence
  Description of Artificial Sequence: Synthetic peptide
  Seed: CSLMQGSTLPRRSGA
CSLMQISTVPRRSQA

SEQ ID NO: 53547 - protein, 15 aa, Artificial Sequence
  Description of Artificial Sequence: Synthetic peptide
  Seed: CSLMQGSTLPRRSGA
CSLMQISTVPRRSSA

SEQ ID NO: 53548 - protein, 15 aa, Artificial Sequence
  Description of Artificial Sequence: Synthetic peptide
  Seed: CSLMQGSTLPRRSGA
CSLMQISTVPRRSTA

SEQ ID NO: 53549 - protein, 15 aa, Artificial Sequence
  Description of Artificial Sequence: Synthetic peptide
  Seed: CSLMQGSTLPRRSGA
CSLMQISTVPRRSVA

SEQ ID NO: 53550 - protein, 15 aa, Artificial Sequence
  Description of Artificial Sequence: Synthetic peptide
  Seed: CSLMQGSTLPRRSGA
CSLMQLSTAPRRSAA

SEQ ID NO: 53551 - protein, 15 aa, Artificial Sequence
  Description of Artificial Sequence: Synthetic peptide
  Seed: CSLMQGSTLPRRSGA
CSLMQLSTAPRRSSA

SEQ ID NO: 53552 - protein, 15 aa, Artificial Sequence
  Description of Artificial Sequence: Synthetic peptide
  Seed: CSLMQGSTLPRRSGA
CSLMQLSTFPRRSAA

SEQ ID NO: 53553 - protein, 15 aa, Artificial Sequence
  Description of Artificial Sequence: Synthetic peptide
  Seed: CSLMQGSTLPRRSGA
CSLMQLSTFPRRSSA

SEQ ID NO: 53554 - protein, 15 aa, Artificial Sequence
  Description of Artificial Sequence: Synthetic peptide
  Seed: CSLMQGSTLPRRSGA
CSLMQLSTIPKRSAA

SEQ ID NO: 53555 - protein, 15 aa, Artificial Sequence
  Description of Artificial Sequence: Synthetic peptide
  Seed: CSLMQGSTLPRRSGA
CSLMQLSTIPKRSGA

SEQ ID NO: 53556 - protein, 15 aa, Artificial Sequence
  Description of Artificial Sequence: Synthetic peptide
  Seed: CSLMQGSTLPRRSGA
CSLMQLSTIPKRSQA

SEQ ID NO: 53557 - protein, 15 aa, Artificial Sequence
  Description of Artificial Sequence: Synthetic peptide
  Seed: CSLMQGSTLPRRSGA
CSLMQLSTIPKRSSA

SEQ ID NO: 53558 - protein, 15 aa, Artificial Sequence
  Description of Artificial Sequence: Synthetic peptide
  Seed: CSLMQGSTLPRRSGA
CSLMQLSTIPRRSAA

SEQ ID NO: 53559 - protein, 15 aa, Artificial Sequence
  Description of Artificial Sequence: Synthetic peptide
  Seed: CSLMQGSTLPRRSGA
CSLMQLSTIPRRSGA

SEQ ID NO: 53560 - protein, 15 aa, Artificial Sequence
  Description of Artificial Sequence: Synthetic peptide
  Seed: CSLMQGSTLPRRSGA
CSLMQLSTIPRRSHA

SEQ ID NO: 53561 - protein, 15 aa, Artificial Sequence
  Description of Artificial Sequence: Synthetic peptide
  Seed: CSLMQGSTLPRRSGA
CSLMQLSTIPRRSIA

SEQ ID NO: 53562 - protein, 15 aa, Artificial Sequence
  Description of Artificial Sequence: Synthetic peptide
  Seed: CSLMQGSTLPRRSGA
CSLMQLSTIPRRSKA

SEQ ID NO: 53563 - protein, 15 aa, Artificial Sequence
  Description of Artificial Sequence: Synthetic peptide
  Seed: CSLMQGSTLPRRSGA
CSLMQLSTIPRRSLA

SEQ ID NO: 53564 - protein, 15 aa, Artificial Sequence
  Description of Artificial Sequence: Synthetic peptide
  Seed: CSLMQGSTLPRRSGA
CSLMQLSTIPRRSMA

SEQ ID NO: 53565 - protein, 15 aa, Artificial Sequence
  Description of Artificial Sequence: Synthetic peptide
  Seed: CSLMQGSTLPRRSGA
CSLMQLSTIPRRSQA

SEQ ID NO: 53566 - protein, 15 aa, Artificial Sequence
  Description of Artificial Sequence: Synthetic peptide
  Seed: CSLMQGSTLPRRSGA
CSLMQLSTIPRRSRA

SEQ ID NO: 53567 - protein, 15 aa, Artificial Sequence
  Description of Artificial Sequence: Synthetic peptide
  Seed: CSLMQGSTLPRRSGA
CSLMQLSTIPRRSSA

SEQ ID NO: 53568 - protein, 15 aa, Artificial Sequence
  Description of Artificial Sequence: Synthetic peptide
  Seed: CSLMQGSTLPRRSGA
CSLMQLSTIPRRSTA

SEQ ID NO: 53569 - protein, 15 aa, Artificial Sequence
  Description of Artificial Sequence: Synthetic peptide
  Seed: CSLMQGSTLPRRSGA
CSLMQLSTIPRRSVA

SEQ ID NO: 53570 - protein, 15 aa, Artificial Sequence
  Description of Artificial Sequence: Synthetic peptide
  Seed: CSLMQGSTLPRRSGA
CSLMQLSTIPRRSYA

SEQ ID NO: 53571 - protein, 15 aa, Artificial Sequence
  Description of Artificial Sequence: Synthetic peptide
  Seed: CSLMQGSTLPRRSGA
CSLMQLSTLPKRSAA

SEQ ID NO: 53572 - protein, 15 aa, Artificial Sequence
  Description of Artificial Sequence: Synthetic peptide
  Seed: CSLMQGSTLPRRSGA
CSLMQLSTLPKRSGA

SEQ ID NO: 53573 - protein, 15 aa, Artificial Sequence
  Description of Artificial Sequence: Synthetic peptide
  Seed: CSLMQGSTLPRRSGA
CSLMQLSTLPKRSQA

SEQ ID NO: 53574 - protein, 15 aa, Artificial Sequence
  Description of Artificial Sequence: Synthetic peptide
  Seed: CSLMQGSTLPRRSGA
CSLMQLSTLPKRSSA

SEQ ID NO: 53575 - protein, 15 aa, Artificial Sequence
  Description of Artificial Sequence: Synthetic peptide
  Seed: CSLMQGSTLPRRSGA
CSLMQLSTLPKRSTA

SEQ ID NO: 53576 - protein, 15 aa, Artificial Sequence
  Description of Artificial Sequence: Synthetic peptide
  Seed: CSLMQGSTLPRRSGA
CSLMQLSTLPRRSAA

SEQ ID NO: 53577 - protein, 15 aa, Artificial Sequence
  Description of Artificial Sequence: Synthetic peptide
  Seed: CSLMQGSTLPRRSGA
CSLMQLSTLPRRSGA

SEQ ID NO: 53578 - protein, 15 aa, Artificial Sequence
  Description of Artificial Sequence: Synthetic peptide
  Seed: CSLMQGSTLPRRSGA
CSLMQLSTLPRRSHA

SEQ ID NO: 53579 - protein, 15 aa, Artificial Sequence
  Description of Artificial Sequence: Synthetic peptide
  Seed: CSLMQGSTLPRRSGA
CSLMQLSTLPRRSIA

SEQ ID NO: 53580 - protein, 15 aa, Artificial Sequence
  Description of Artificial Sequence: Synthetic peptide
  Seed: CSLMQGSTLPRRSGA
CSLMQLSTLPRRSKA

SEQ ID NO: 53581 - protein, 15 aa, Artificial Sequence
  Description of Artificial Sequence: Synthetic peptide
  Seed: CSLMQGSTLPRRSGA
CSLMQLSTLPRRSLA

SEQ ID NO: 53582 - protein, 15 aa, Artificial Sequence
  Description of Artificial Sequence: Synthetic peptide
  Seed: CSLMQGSTLPRRSGA
CSLMQLSTLPRRSMA

SEQ ID NO: 53583 - protein, 15 aa, Artificial Sequence
  Description of Artificial Sequence: Synthetic peptide
  Seed: CSLMQGSTLPRRSGA
CSLMQLSTLPRRSQA

SEQ ID NO: 53584 - protein, 15 aa, Artificial Sequence
  Description of Artificial Sequence: Synthetic peptide
  Seed: CSLMQGSTLPRRSGA
CSLMQLSTLPRRSRA

SEQ ID NO: 53585 - protein, 15 aa, Artificial Sequence
  Description of Artificial Sequence: Synthetic peptide
  Seed: CSLMQGSTLPRRSGA
CSLMQLSTLPRRSSA

SEQ ID NO: 53586 - protein, 15 aa, Artificial Sequence
  Description of Artificial Sequence: Synthetic peptide
  Seed: CSLMQGSTLPRRSGA
CSLMQLSTLPRRSTA

SEQ ID NO: 53587 - protein, 15 aa, Artificial Sequence
  Description of Artificial Sequence: Synthetic peptide
  Seed: CSLMQGSTLPRRSGA
CSLMQLSTLPRRSVA

SEQ ID NO: 53588 - protein, 15 aa, Artificial Sequence
  Description of Artificial Sequence: Synthetic peptide
  Seed: CSLMQGSTLPRRSGA
CSLMQLSTLPRRSYA

SEQ ID NO: 53589 - protein, 15 aa, Artificial Sequence
  Description of Artificial Sequence: Synthetic peptide
  Seed: CSLMQGSTLPRRSGA
CSLMQLSTMPKRSAA

SEQ ID NO: 53590 - protein, 15 aa, Artificial Sequence
  Description of Artificial Sequence: Synthetic peptide
  Seed: CSLMQGSTLPRRSGA
CSLMQLSTMPKRSGA

SEQ ID NO: 53591 - protein, 15 aa, Artificial Sequence
  Description of Artificial Sequence: Synthetic peptide
  Seed: CSLMQGSTLPRRSGA
CSLMQLSTMPKRSKA

SEQ ID NO: 53592 - protein, 15 aa, Artificial Sequence
  Description of Artificial Sequence: Synthetic peptide
  Seed: CSLMQGSTLPRRSGA
CSLMQLSTMPKRSQA

SEQ ID NO: 53593 - protein, 15 aa, Artificial Sequence
  Description of Artificial Sequence: Synthetic peptide
  Seed: CSLMQGSTLPRRSGA
CSLMQLSTMPKRSSA

SEQ ID NO: 53594 - protein, 15 aa, Artificial Sequence
  Description of Artificial Sequence: Synthetic peptide
  Seed: CSLMQGSTLPRRSGA
CSLMQLSTMPKRSTA

SEQ ID NO: 53595 - protein, 15 aa, Artificial Sequence
  Description of Artificial Sequence: Synthetic peptide
  Seed: CSLMQGSTLPRRSGA
CSLMQLSTMPKRSVA

SEQ ID NO: 53596 - protein, 15 aa, Artificial Sequence
  Description of Artificial Sequence: Synthetic peptide
  Seed: CSLMQGSTLPRRSGA
CSLMQLSTMPRRSAA

SEQ ID NO: 53597 - protein, 15 aa, Artificial Sequence
  Description of Artificial Sequence: Synthetic peptide
  Seed: CSLMQGSTLPRRSGA
CSLMQLSTMPRRSGA

SEQ ID NO: 53598 - protein, 15 aa, Artificial Sequence
  Description of Artificial Sequence: Synthetic peptide
  Seed: CSLMQGSTLPRRSGA
CSLMQLSTMPRRSHA

SEQ ID NO: 53599 - protein, 15 aa, Artificial Sequence
  Description of Artificial Sequence: Synthetic peptide
  Seed: CSLMQGSTLPRRSGA
CSLMQLSTMPRRSIA

SEQ ID NO: 53600 - protein, 15 aa, Artificial Sequence
  Description of Artificial Sequence: Synthetic peptide
  Seed: CSLMQGSTLPRRSGA
CSLMQLSTMPRRSKA

SEQ ID NO: 53601 - protein, 15 aa, Artificial Sequence
  Description of Artificial Sequence: Synthetic peptide
  Seed: CSLMQGSTLPRRSGA
CSLMQLSTMPRRSLA

SEQ ID NO: 53602 - protein, 15 aa, Artificial Sequence
  Description of Artificial Sequence: Synthetic peptide
  Seed: CSLMQGSTLPRRSGA
CSLMQLSTMPRRSMA

SEQ ID NO: 53603 - protein, 15 aa, Artificial Sequence
  Description of Artificial Sequence: Synthetic peptide
  Seed: CSLMQGSTLPRRSGA
CSLMQLSTMPRRSQA

SEQ ID NO: 53604 - protein, 15 aa, Artificial Sequence
  Description of Artificial Sequence: Synthetic peptide
  Seed: CSLMQGSTLPRRSGA
CSLMQLSTMPRRSRA

SEQ ID NO: 53605 - protein, 15 aa, Artificial Sequence
  Description of Artificial Sequence: Synthetic peptide
  Seed: CSLMQGSTLPRRSGA
CSLMQLSTMPRRSSA

SEQ ID NO: 53606 - protein, 15 aa, Artificial Sequence
  Description of Artificial Sequence: Synthetic peptide
  Seed: CSLMQGSTLPRRSGA
CSLMQLSTMPRRSTA

SEQ ID NO: 53607 - protein, 15 aa, Artificial Sequence
  Description of Artificial Sequence: Synthetic peptide
  Seed: CSLMQGSTLPRRSGA
CSLMQLSTMPRRSVA

SEQ ID NO: 53608 - protein, 15 aa, Artificial Sequence
  Description of Artificial Sequence: Synthetic peptide
  Seed: CSLMQGSTLPRRSGA
CSLMQLSTMPRRSYA

SEQ ID NO: 53609 - protein, 15 aa, Artificial Sequence
  Description of Artificial Sequence: Synthetic peptide
  Seed: CSLMQGSTLPRRSGA
CSLMQLSTVPKRSAA

SEQ ID NO: 53610 - protein, 15 aa, Artificial Sequence
  Description of Artificial Sequence: Synthetic peptide
  Seed: CSLMQGSTLPRRSGA
CSLMQLSTVPKRSSA

SEQ ID NO: 53611 - protein, 15 aa, Artificial Sequence
  Description of Artificial Sequence: Synthetic peptide
  Seed: CSLMQGSTLPRRSGA
CSLMQLSTVPRRSAA

SEQ ID NO: 53612 - protein, 15 aa, Artificial Sequence
  Description of Artificial Sequence: Synthetic peptide
  Seed: CSLMQGSTLPRRSGA
CSLMQLSTVPRRSGA

SEQ ID NO: 53613 - protein, 15 aa, Artificial Sequence
  Description of Artificial Sequence: Synthetic peptide
  Seed: CSLMQGSTLPRRSGA
CSLMQLSTVPRRSQA

SEQ ID NO: 53614 - protein, 15 aa, Artificial Sequence
  Description of Artificial Sequence: Synthetic peptide
  Seed: CSLMQGSTLPRRSGA
CSLMQLSTVPRRSSA

SEQ ID NO: 53615 - protein, 15 aa, Artificial Sequence
  Description of Artificial Sequence: Synthetic peptide
  Seed: CSLMQGSTLPRRSGA
CSLMQMSTIPKRSAA

SEQ ID NO: 53616 - protein, 15 aa, Artificial Sequence
  Description of Artificial Sequence: Synthetic peptide
  Seed: CSLMQGSTLPRRSGA
CSLMQMSTIPRRSAA

SEQ ID NO: 53617 - protein, 15 aa, Artificial Sequence
  Description of Artificial Sequence: Synthetic peptide
  Seed: CSLMQGSTLPRRSGA
CSLMQMSTIPRRSQA

SEQ ID NO: 53618 - protein, 15 aa, Artificial Sequence
  Description of Artificial Sequence: Synthetic peptide
  Seed: CSLMQGSTLPRRSGA
CSLMQMSTIPRRSSA

SEQ ID NO: 53619 - protein, 15 aa, Artificial Sequence
  Description of Artificial Sequence: Synthetic peptide
  Seed: CSLMQGSTLPRRSGA
CSLMQMSTLPKRSAA

SEQ ID NO: 53620 - protein, 15 aa, Artificial Sequence
  Description of Artificial Sequence: Synthetic peptide
  Seed: CSLMQGSTLPRRSGA
CSLMQMSTLPKRSSA

SEQ ID NO: 53621 - protein, 15 aa, Artificial Sequence
  Description of Artificial Sequence: Synthetic peptide
  Seed: CSLMQGSTLPRRSGA
CSLMQMSTLPRRSAA

SEQ ID NO: 53622 - protein, 15 aa, Artificial Sequence
  Description of Artificial Sequence: Synthetic peptide
  Seed: CSLMQGSTLPRRSGA
CSLMQMSTLPRRSGA

SEQ ID NO: 53623 - protein, 15 aa, Artificial Sequence
  Description of Artificial Sequence: Synthetic peptide
  Seed: CSLMQGSTLPRRSGA
CSLMQMSTLPRRSIA

SEQ ID NO: 53624 - protein, 15 aa, Artificial Sequence
  Description of Artificial Sequence: Synthetic peptide
  Seed: CSLMQGSTLPRRSGA
CSLMQMSTLPRRSKA

SEQ ID NO: 53625 - protein, 15 aa, Artificial Sequence
  Description of Artificial Sequence: Synthetic peptide
  Seed: CSLMQGSTLPRRSGA
CSLMQMSTLPRRSQA

SEQ ID NO: 53626 - protein, 15 aa, Artificial Sequence
  Description of Artificial Sequence: Synthetic peptide
  Seed: CSLMQGSTLPRRSGA
CSLMQMSTLPRRSRA

SEQ ID NO: 53627 - protein, 15 aa, Artificial Sequence
  Description of Artificial Sequence: Synthetic peptide
  Seed: CSLMQGSTLPRRSGA
CSLMQMSTLPRRSSA

SEQ ID NO: 53628 - protein, 15 aa, Artificial Sequence
  Description of Artificial Sequence: Synthetic peptide
  Seed: CSLMQGSTLPRRSGA
CSLMQMSTLPRRSTA

SEQ ID NO: 53629 - protein, 15 aa, Artificial Sequence
  Description of Artificial Sequence: Synthetic peptide
  Seed: CSLMQGSTLPRRSGA
CSLMQMSTLPRRSVA

SEQ ID NO: 53630 - protein, 15 aa, Artificial Sequence
  Description of Artificial Sequence: Synthetic peptide
  Seed: CSLMQGSTLPRRSGA
CSLMQMSTMPKRSAA

SEQ ID NO: 53631 - protein, 15 aa, Artificial Sequence
  Description of Artificial Sequence: Synthetic peptide
  Seed: CSLMQGSTLPRRSGA
CSLMQMSTMPKRSSA

SEQ ID NO: 53632 - protein, 15 aa, Artificial Sequence
  Description of Artificial Sequence: Synthetic peptide
  Seed: CSLMQGSTLPRRSGA
CSLMQMSTMPRRSAA

SEQ ID NO: 53633 - protein, 15 aa, Artificial Sequence
  Description of Artificial Sequence: Synthetic peptide
  Seed: CSLMQGSTLPRRSGA
CSLMQMSTMPRRSGA

SEQ ID NO: 53634 - protein, 15 aa, Artificial Sequence
  Description of Artificial Sequence: Synthetic peptide
  Seed: CSLMQGSTLPRRSGA
CSLMQMSTMPRRSQA

SEQ ID NO: 53635 - protein, 15 aa, Artificial Sequence
  Description of Artificial Sequence: Synthetic peptide
  Seed: CSLMQGSTLPRRSGA
CSLMQMSTMPRRSSA

SEQ ID NO: 53636 - protein, 15 aa, Artificial Sequence
  Description of Artificial Sequence: Synthetic peptide
  Seed: CSLMQGSTLPRRSGA
CSLMQMSTMPRRSTA

SEQ ID NO: 53637 - protein, 15 aa, Artificial Sequence
  Description of Artificial Sequence: Synthetic peptide
  Seed: CSLMQGSTLPRRSGA
CSLMQMSTMPRRSVA

SEQ ID NO: 53638 - protein, 15 aa, Artificial Sequence
  Description of Artificial Sequence: Synthetic peptide
  Seed: CSLMQGSTLPRRSGA
CSLMQMSTVPRRSAA

SEQ ID NO: 53639 - protein, 15 aa, Artificial Sequence
  Description of Artificial Sequence: Synthetic peptide
  Seed: CSLMQGSTLPRRSGA
CSLMQVSTIPRRSAA

SEQ ID NO: 53640 - protein, 15 aa, Artificial Sequence
  Description of Artificial Sequence: Synthetic peptide
  Seed: CSLMQGSTLPRRSGA
CSLMQVSTIPRRSQA

SEQ ID NO: 53641 - protein, 15 aa, Artificial Sequence
  Description of Artificial Sequence: Synthetic peptide
  Seed: CSLMQGSTLPRRSGA
CSLMQVSTIPRRSSA

SEQ ID NO: 53642 - protein, 15 aa, Artificial Sequence
  Description of Artificial Sequence: Synthetic peptide
  Seed: CSLMQGSTLPRRSGA
CSLMQVSTLPKRSAA

SEQ ID NO: 53643 - protein, 15 aa, Artificial Sequence
  Description of Artificial Sequence: Synthetic peptide
  Seed: CSLMQGSTLPRRSGA
CSLMQVSTLPKRSSA

SEQ ID NO: 53644 - protein, 15 aa, Artificial Sequence
  Description of Artificial Sequence: Synthetic peptide
  Seed: CSLMQGSTLPRRSGA
CSLMQVSTLPRRSAA

SEQ ID NO: 53645 - protein, 15 aa, Artificial Sequence
  Description of Artificial Sequence: Synthetic peptide
  Seed: CSLMQGSTLPRRSGA
CSLMQVSTLPRRSGA

SEQ ID NO: 53646 - protein, 15 aa, Artificial Sequence
  Description of Artificial Sequence: Synthetic peptide
  Seed: CSLMQGSTLPRRSGA
CSLMQVSTLPRRSKA

SEQ ID NO: 53647 - protein, 15 aa, Artificial Sequence
  Description of Artificial Sequence: Synthetic peptide
  Seed: CSLMQGSTLPRRSGA
CSLMQVSTLPRRSQA

SEQ ID NO: 53648 - protein, 15 aa, Artificial Sequence
  Description of Artificial Sequence: Synthetic peptide
  Seed: CSLMQGSTLPRRSGA
CSLMQVSTLPRRSSA

SEQ ID NO: 53649 - protein, 15 aa, Artificial Sequence
  Description of Artificial Sequence: Synthetic peptide
  Seed: CSLMQGSTLPRRSGA
CSLMQVSTLPRRSTA

SEQ ID NO: 53650 - protein, 15 aa, Artificial Sequence
  Description of Artificial Sequence: Synthetic peptide
  Seed: CSLMQGSTLPRRSGA
CSLMQVSTLPRRSVA

SEQ ID NO: 53651 - protein, 15 aa, Artificial Sequence
  Description of Artificial Sequence: Synthetic peptide
  Seed: CSLMQGSTLPRRSGA
CSLMQVSTMPKRSAA

SEQ ID NO: 53652 - protein, 15 aa, Artificial Sequence
  Description of Artificial Sequence: Synthetic peptide
  Seed: CSLMQGSTLPRRSGA
CSLMQVSTMPKRSSA

SEQ ID NO: 53653 - protein, 15 aa, Artificial Sequence
  Description of Artificial Sequence: Synthetic peptide
  Seed: CSLMQGSTLPRRSGA
CSLMQVSTMPRRSAA

SEQ ID NO: 53654 - protein, 15 aa, Artificial Sequence
  Description of Artificial Sequence: Synthetic peptide
  Seed: CSLMQGSTLPRRSGA
CSLMQVSTMPRRSGA

SEQ ID NO: 53655 - protein, 15 aa, Artificial Sequence
  Description of Artificial Sequence: Synthetic peptide
  Seed: CSLMQGSTLPRRSGA
CSLMQVSTMPRRSHA

SEQ ID NO: 53656 - protein, 15 aa, Artificial Sequence
  Description of Artificial Sequence: Synthetic peptide
  Seed: CSLMQGSTLPRRSGA
CSLMQVSTMPRRSQA

SEQ ID NO: 53657 - protein, 15 aa, Artificial Sequence
  Description of Artificial Sequence: Synthetic peptide
  Seed: CSLMQGSTLPRRSGA
CSLMQVSTMPRRSSA

SEQ ID NO: 53658 - protein, 15 aa, Artificial Sequence
  Description of Artificial Sequence: Synthetic peptide
  Seed: CSLMQGSTLPRRSGA
CSLMQVSTMPRRSTA

SEQ ID NO: 53659 - protein, 15 aa, Artificial Sequence
  Description of Artificial Sequence: Synthetic peptide
  Seed: CSLMQGSTLPRRSGA
CSLMQVSTMPRRSVA

SEQ ID NO: 53660 - protein, 15 aa, Artificial Sequence
  Description of Artificial Sequence: Synthetic peptide
  Seed: CSLMQGSTLPRRSGA
CSLMQVSTVPRRSAA

SEQ ID NO: 53661 - protein, 15 aa, Artificial Sequence
  Description of Artificial Sequence: Synthetic peptide
  Seed: CSLMQGSTLPRRSGA
CSLMQYSTIPRRSAA

SEQ ID NO: 53662 - protein, 15 aa, Artificial Sequence
  Description of Artificial Sequence: Synthetic peptide
  Seed: CSLMQGSTLPRRSGA
CSLMQYSTLPRRSAA

SEQ ID NO: 53663 - protein, 15 aa, Artificial Sequence
  Description of Artificial Sequence: Synthetic peptide
  Seed: CSLMQGSTLPRRSGA
CSLMQYSTLPRRSSA

SEQ ID NO: 53664 - protein, 15 aa, Artificial Sequence
  Description of Artificial Sequence: Synthetic peptide
  Seed: CSLMQGSTLPRRSGA
CSLMQYSTMPRRSAA

SEQ ID NO: 53665 - protein, 15 aa, Artificial Sequence
  Description of Artificial Sequence: Synthetic peptide
  Seed: CSLMQGSTLPRRSGA
CSLMQYSTMPRRSSA

SEQ ID NO: 53666 - protein, 15 aa, Artificial Sequence
  Description of Artificial Sequence: Synthetic peptide
  Seed: CSLMQGSTLPRRSGA
CSIMQISRLPYRSGA

SEQ ID NO: 53667 - protein, 15 aa, Artificial Sequence
  Description of Artificial Sequence: Synthetic peptide
  Seed: CSLMQGSTLPRRSGA
CSLIQGFTRPRASGA

SEQ ID NO: 53668 - protein, 15 aa, Artificial Sequence
  Description of Artificial Sequence: Synthetic peptide
  Seed: CSLMQGSTLPRRSGA
CSLIQGFTRPRFSGA

SEQ ID NO: 53669 - protein, 15 aa, Artificial Sequence
  Description of Artificial Sequence: Synthetic peptide
  Seed: CSLMQGSTLPRRSGA
CSLIQGFTRPRHSGA

SEQ ID NO: 53670 - protein, 15 aa, Artificial Sequence
  Description of Artificial Sequence: Synthetic peptide
  Seed: CSLMQGSTLPRRSGA
CSLIQGFTRPRISGA

SEQ ID NO: 53671 - protein, 15 aa, Artificial Sequence
  Description of Artificial Sequence: Synthetic peptide
  Seed: CSLMQGSTLPRRSGA
CSLIQGFTRPRKSGA

SEQ ID NO: 53672 - protein, 15 aa, Artificial Sequence
  Description of Artificial Sequence: Synthetic peptide
  Seed: CSLMQGSTLPRRSGA
CSLIQGFTRPRLSGA

SEQ ID NO: 53673 - protein, 15 aa, Artificial Sequence
  Description of Artificial Sequence: Synthetic peptide
  Seed: CSLMQGSTLPRRSGA
CSLIQGFTRPRMSGA

SEQ ID NO: 53674 - protein, 15 aa, Artificial Sequence
  Description of Artificial Sequence: Synthetic peptide
  Seed: CSLMQGSTLPRRSGA
CSLIQGFTRPRRSGA

SEQ ID NO: 53675 - protein, 15 aa, Artificial Sequence
  Description of Artificial Sequence: Synthetic peptide
  Seed: CSLMQGSTLPRRSGA
CSLIQGFTRPRSSGA

SEQ ID NO: 53676 - protein, 15 aa, Artificial Sequence
  Description of Artificial Sequence: Synthetic peptide
  Seed: CSLMQGSTLPRRSGA
CSLIQGFTRPRVSGA

SEQ ID NO: 53677 - protein, 15 aa, Artificial Sequence
  Description of Artificial Sequence: Synthetic peptide
  Seed: CSLMQGSTLPRRSGA
CSLIQGITRPRASGA

SEQ ID NO: 53678 - protein, 15 aa, Artificial Sequence
  Description of Artificial Sequence: Synthetic peptide
  Seed: CSLMQGSTLPRRSGA
CSLIQGITRPRFSGA

SEQ ID NO: 53679 - protein, 15 aa, Artificial Sequence
  Description of Artificial Sequence: Synthetic peptide
  Seed: CSLMQGSTLPRRSGA
CSLIQGITRPRHSGA

SEQ ID NO: 53680 - protein, 15 aa, Artificial Sequence
  Description of Artificial Sequence: Synthetic peptide
  Seed: CSLMQGSTLPRRSGA
CSLIQGITRPRISGA

SEQ ID NO: 53681 - protein, 15 aa, Artificial Sequence
  Description of Artificial Sequence: Synthetic peptide
  Seed: CSLMQGSTLPRRSGA
CSLIQGITRPRKSGA

SEQ ID NO: 53682 - protein, 15 aa, Artificial Sequence
  Description of Artificial Sequence: Synthetic peptide
  Seed: CSLMQGSTLPRRSGA
CSLIQGITRPRLSGA

SEQ ID NO: 53683 - protein, 15 aa, Artificial Sequence
  Description of Artificial Sequence: Synthetic peptide
  Seed: CSLMQGSTLPRRSGA
CSLIQGITRPRMSGA

SEQ ID NO: 53684 - protein, 15 aa, Artificial Sequence
  Description of Artificial Sequence: Synthetic peptide
  Seed: CSLMQGSTLPRRSGA
CSLIQGITRPRRSGA

SEQ ID NO: 53685 - protein, 15 aa, Artificial Sequence
  Description of Artificial Sequence: Synthetic peptide
  Seed: CSLMQGSTLPRRSGA
CSLIQGITRPRSSGA

SEQ ID NO: 53686 - protein, 15 aa, Artificial Sequence
  Description of Artificial Sequence: Synthetic peptide
  Seed: CSLMQGSTLPRRSGA
CSLIQGITRPRVSGA

SEQ ID NO: 53687 - protein, 15 aa, Artificial Sequence
  Description of Artificial Sequence: Synthetic peptide
  Seed: CSLMQGSTLPRRSGA
CSLIQGITRPRYSGA

SEQ ID NO: 53688 - protein, 15 aa, Artificial Sequence
  Description of Artificial Sequence: Synthetic peptide
  Seed: CSLMQGSTLPRRSGA
CSLIQGLTRPRASGA

SEQ ID NO: 53689 - protein, 15 aa, Artificial Sequence
  Description of Artificial Sequence: Synthetic peptide
  Seed: CSLMQGSTLPRRSGA
CSLIQGLTRPRFSGA

SEQ ID NO: 53690 - protein, 15 aa, Artificial Sequence
  Description of Artificial Sequence: Synthetic peptide
  Seed: CSLMQGSTLPRRSGA
CSLIQGLTRPRHSGA

SEQ ID NO: 53691 - protein, 15 aa, Artificial Sequence
  Description of Artificial Sequence: Synthetic peptide
  Seed: CSLMQGSTLPRRSGA
CSLIQGLTRPRISGA

SEQ ID NO: 53692 - protein, 15 aa, Artificial Sequence
  Description of Artificial Sequence: Synthetic peptide
  Seed: CSLMQGSTLPRRSGA
CSLIQGLTRPRKSGA

SEQ ID NO: 53693 - protein, 15 aa, Artificial Sequence
  Description of Artificial Sequence: Synthetic peptide
  Seed: CSLMQGSTLPRRSGA
CSLIQGLTRPRLSGA

SEQ ID NO: 53694 - protein, 15 aa, Artificial Sequence
  Description of Artificial Sequence: Synthetic peptide
  Seed: CSLMQGSTLPRRSGA
CSLIQGLTRPRMSGA

SEQ ID NO: 53695 - protein, 15 aa, Artificial Sequence
  Description of Artificial Sequence: Synthetic peptide
  Seed: CSLMQGSTLPRRSGA
CSLIQGLTRPRRSGA

SEQ ID NO: 53696 - protein, 15 aa, Artificial Sequence
  Description of Artificial Sequence: Synthetic peptide
  Seed: CSLMQGSTLPRRSGA
CSLIQGLTRPRSSGA

SEQ ID NO: 53697 - protein, 15 aa, Artificial Sequence
  Description of Artificial Sequence: Synthetic peptide
  Seed: CSLMQGSTLPRRSGA
CSLIQGLTRPRVSGA

SEQ ID NO: 53698 - protein, 15 aa, Artificial Sequence
  Description of Artificial Sequence: Synthetic peptide
  Seed: CSLMQGSTLPRRSGA
CSLIQGLTRPRYSGA

SEQ ID NO: 53699 - protein, 15 aa, Artificial Sequence
  Description of Artificial Sequence: Synthetic peptide
  Seed: CSLMQGSTLPRRSGA
CSLIQGMTRPRASGA

SEQ ID NO: 53700 - protein, 15 aa, Artificial Sequence
  Description of Artificial Sequence: Synthetic peptide
  Seed: CSLMQGSTLPRRSGA
CSLIQGMTRPRFSGA

SEQ ID NO: 53701 - protein, 15 aa, Artificial Sequence
  Description of Artificial Sequence: Synthetic peptide
  Seed: CSLMQGSTLPRRSGA
CSLIQGMTRPRHSGA

SEQ ID NO: 53702 - protein, 15 aa, Artificial Sequence
  Description of Artificial Sequence: Synthetic peptide
  Seed: CSLMQGSTLPRRSGA
CSLIQGMTRPRISGA

SEQ ID NO: 53703 - protein, 15 aa, Artificial Sequence
  Description of Artificial Sequence: Synthetic peptide
  Seed: CSLMQGSTLPRRSGA
CSLIQGMTRPRKSGA

SEQ ID NO: 53704 - protein, 15 aa, Artificial Sequence
  Description of Artificial Sequence: Synthetic peptide
  Seed: CSLMQGSTLPRRSGA
CSLIQGMTRPRLSGA

SEQ ID NO: 53705 - protein, 15 aa, Artificial Sequence
  Description of Artificial Sequence: Synthetic peptide
  Seed: CSLMQGSTLPRRSGA
CSLIQGMTRPRMSGA

SEQ ID NO: 53706 - protein, 15 aa, Artificial Sequence
  Description of Artificial Sequence: Synthetic peptide
  Seed: CSLMQGSTLPRRSGA
CSLIQGMTRPRRSGA

SEQ ID NO: 53707 - protein, 15 aa, Artificial Sequence
  Description of Artificial Sequence: Synthetic peptide
  Seed: CSLMQGSTLPRRSGA
CSLIQGMTRPRSSGA

SEQ ID NO: 53708 - protein, 15 aa, Artificial Sequence
  Description of Artificial Sequence: Synthetic peptide
  Seed: CSLMQGSTLPRRSGA
CSLIQGMTRPRVSGA

SEQ ID NO: 53709 - protein, 15 aa, Artificial Sequence
  Description of Artificial Sequence: Synthetic peptide
  Seed: CSLMQGSTLPRRSGA
CSLIQGMTRPRYSGA

SEQ ID NO: 53710 - protein, 15 aa, Artificial Sequence
  Description of Artificial Sequence: Synthetic peptide
  Seed: CSLMQGSTLPRRSGA
CSLIQGVTRPRISGA

SEQ ID NO: 53711 - protein, 15 aa, Artificial Sequence
  Description of Artificial Sequence: Synthetic peptide
  Seed: CSLMQGSTLPRRSGA
CSLIQGVTRPRLSGA

SEQ ID NO: 53712 - protein, 15 aa, Artificial Sequence
  Description of Artificial Sequence: Synthetic peptide
  Seed: CSLMQGSTLPRRSGA
CSLIQGVTRPRRSGA

SEQ ID NO: 53713 - protein, 15 aa, Artificial Sequence
  Description of Artificial Sequence: Synthetic peptide
  Seed: CSLMQGSTLPRRSGA
CSLIQGVTRPRVSGA

SEQ ID NO: 53714 - protein, 15 aa, Artificial Sequence
  Description of Artificial Sequence: Synthetic peptide
  Seed: CSLMQGSTLPRRSGA
CSLLQGFTRPRRSGA

SEQ ID NO: 53715 - protein, 15 aa, Artificial Sequence
  Description of Artificial Sequence: Synthetic peptide
  Seed: CSLMQGSTLPRRSGA
CSLLQGLTRPRASGA

SEQ ID NO: 53716 - protein, 15 aa, Artificial Sequence
  Description of Artificial Sequence: Synthetic peptide
  Seed: CSLMQGSTLPRRSGA
CSLLQGMTRPRRSGA

SEQ ID NO: 53717 - protein, 15 aa, Artificial Sequence
  Description of Artificial Sequence: Synthetic peptide
  Seed: CSLMQGSTLPRRSGA
CSLMAGSALARRAGA

SEQ ID NO: 53718 - protein, 15 aa, Artificial Sequence
  Description of Artificial Sequence: Synthetic peptide
  Seed: CSLMQGSTLPRRSGA
CSLMAGSALARRIGA

SEQ ID NO: 53719 - protein, 15 aa, Artificial Sequence
  Description of Artificial Sequence: Synthetic peptide
  Seed: CSLMQGSTLPRRSGA
CSLMAGSALARRSGA

SEQ ID NO: 53720 - protein, 15 aa, Artificial Sequence
  Description of Artificial Sequence: Synthetic peptide
  Seed: CSLMQGSTLPRRSGA
CSLMAGSALARRTGA

SEQ ID NO: 53721 - protein, 15 aa, Artificial Sequence
  Description of Artificial Sequence: Synthetic peptide
  Seed: CSLMQGSTLPRRSGA
CSLMAGSALARRVGA

SEQ ID NO: 53722 - protein, 15 aa, Artificial Sequence
  Description of Artificial Sequence: Synthetic peptide
  Seed: CSLMQGSTLPRRSGA
CSLMAGSALVRRAGA

SEQ ID NO: 53723 - protein, 15 aa, Artificial Sequence
  Description of Artificial Sequence: Synthetic peptide
  Seed: CSLMQGSTLPRRSGA
CSLMAGSALVRRVGA

SEQ ID NO: 53724 - protein, 15 aa, Artificial Sequence
  Description of Artificial Sequence: Synthetic peptide
  Seed: CSLMQGSTLPRRSGA
CSLMAGSGLARRAGA

SEQ ID NO: 53725 - protein, 15 aa, Artificial Sequence
  Description of Artificial Sequence: Synthetic peptide
  Seed: CSLMQGSTLPRRSGA
CSLMAGSGLARRIGA

SEQ ID NO: 53726 - protein, 15 aa, Artificial Sequence
  Description of Artificial Sequence: Synthetic peptide
  Seed: CSLMQGSTLPRRSGA
CSLMAGSGLARRSGA

SEQ ID NO: 53727 - protein, 15 aa, Artificial Sequence
  Description of Artificial Sequence: Synthetic peptide
  Seed: CSLMQGSTLPRRSGA
CSLMAGSGLARRTGA

SEQ ID NO: 53728 - protein, 15 aa, Artificial Sequence
  Description of Artificial Sequence: Synthetic peptide
  Seed: CSLMQGSTLPRRSGA
CSLMAGSGLARRVGA

SEQ ID NO: 53729 - protein, 15 aa, Artificial Sequence
  Description of Artificial Sequence: Synthetic peptide
  Seed: CSLMQGSTLPRRSGA
CSLMAGSMLARRIGA

SEQ ID NO: 53730 - protein, 15 aa, Artificial Sequence
  Description of Artificial Sequence: Synthetic peptide
  Seed: CSLMQGSTLPRRSGA
CSLMAGSMLARRVGA

SEQ ID NO: 53731 - protein, 15 aa, Artificial Sequence
  Description of Artificial Sequence: Synthetic peptide
  Seed: CSLMQGSTLPRRSGA
CSLMCGSILARRVGA

SEQ ID NO: 53732 - protein, 15 aa, Artificial Sequence
  Description of Artificial Sequence: Synthetic peptide
  Seed: CSLMQGSTLPRRSGA
CSLMCGSLLARRIGA

SEQ ID NO: 53733 - protein, 15 aa, Artificial Sequence
  Description of Artificial Sequence: Synthetic peptide
  Seed: CSLMQGSTLPRRSGA
CSLMCGSLLARRLGA

SEQ ID NO: 53734 - protein, 15 aa, Artificial Sequence
  Description of Artificial Sequence: Synthetic peptide
  Seed: CSLMQGSTLPRRSGA
CSLMCGSLLARRVGA

SEQ ID NO: 53735 - protein, 15 aa, Artificial Sequence
  Description of Artificial Sequence: Synthetic peptide
  Seed: CSLMQGSTLPRRSGA
CSLMCGSLLGRRIGA

SEQ ID NO: 53736 - protein, 15 aa, Artificial Sequence
  Description of Artificial Sequence: Synthetic peptide
  Seed: CSLMQGSTLPRRSGA
CSLMCGSLLGRRVGA

SEQ ID NO: 53737 - protein, 15 aa, Artificial Sequence
  Description of Artificial Sequence: Synthetic peptide
  Seed: CSLMQGSTLPRRSGA
CSLMCGSLLSRRIGA

SEQ ID NO: 53738 - protein, 15 aa, Artificial Sequence
  Description of Artificial Sequence: Synthetic peptide
  Seed: CSLMQGSTLPRRSGA
CSLMCGSLLSRRLGA

SEQ ID NO: 53739 - protein, 15 aa, Artificial Sequence
  Description of Artificial Sequence: Synthetic peptide
  Seed: CSLMQGSTLPRRSGA
CSLMCGSLLSRRVGA

SEQ ID NO: 53740 - protein, 15 aa, Artificial Sequence
  Description of Artificial Sequence: Synthetic peptide
  Seed: CSLMQGSTLPRRSGA
CSLMCGSMLARRIGA

SEQ ID NO: 53741 - protein, 15 aa, Artificial Sequence
  Description of Artificial Sequence: Synthetic peptide
  Seed: CSLMQGSTLPRRSGA
CSLMCGSMLARRLGA

SEQ ID NO: 53742 - protein, 15 aa, Artificial Sequence
  Description of Artificial Sequence: Synthetic peptide
  Seed: CSLMQGSTLPRRSGA
CSLMCGSMLARRVGA

SEQ ID NO: 53743 - protein, 15 aa, Artificial Sequence
  Description of Artificial Sequence: Synthetic peptide
  Seed: CSLMQGSTLPRRSGA
CSLMCGSMLGRRIGA

SEQ ID NO: 53744 - protein, 15 aa, Artificial Sequence
  Description of Artificial Sequence: Synthetic peptide
  Seed: CSLMQGSTLPRRSGA
CSLMCGSMLGRRLGA

SEQ ID NO: 53745 - protein, 15 aa, Artificial Sequence
  Description of Artificial Sequence: Synthetic peptide
  Seed: CSLMQGSTLPRRSGA
CSLMCGSMLGRRVGA

SEQ ID NO: 53746 - protein, 15 aa, Artificial Sequence
  Description of Artificial Sequence: Synthetic peptide
  Seed: CSLMQGSTLPRRSGA
CSLMCGSMLSRRIGA

SEQ ID NO: 53747 - protein, 15 aa, Artificial Sequence
  Description of Artificial Sequence: Synthetic peptide
  Seed: CSLMQGSTLPRRSGA
CSLMCGSMLSRRLGA

SEQ ID NO: 53748 - protein, 15 aa, Artificial Sequence
  Description of Artificial Sequence: Synthetic peptide
  Seed: CSLMQGSTLPRRSGA
CSLMCGSMLSRRVGA

SEQ ID NO: 53749 - protein, 15 aa, Artificial Sequence
  Description of Artificial Sequence: Synthetic peptide
  Seed: CSLMQGSTLPRRSGA
CSLMFGSALARRAGA

SEQ ID NO: 53750 - protein, 15 aa, Artificial Sequence
  Description of Artificial Sequence: Synthetic peptide
  Seed: CSLMQGSTLPRRSGA
CSLMFGSALARRCGA

SEQ ID NO: 53751 - protein, 15 aa, Artificial Sequence
  Description of Artificial Sequence: Synthetic peptide
  Seed: CSLMQGSTLPRRSGA
CSLMFGSALARRDGA

SEQ ID NO: 53752 - protein, 15 aa, Artificial Sequence
  Description of Artificial Sequence: Synthetic peptide
  Seed: CSLMQGSTLPRRSGA
CSLMFGSALARRFGA

SEQ ID NO: 53753 - protein, 15 aa, Artificial Sequence
  Description of Artificial Sequence: Synthetic peptide
  Seed: CSLMQGSTLPRRSGA
CSLMFGSALARRGGA

SEQ ID NO: 53754 - protein, 15 aa, Artificial Sequence
  Description of Artificial Sequence: Synthetic peptide
  Seed: CSLMQGSTLPRRSGA
CSLMFGSALARRHGA

SEQ ID NO: 53755 - protein, 15 aa, Artificial Sequence
  Description of Artificial Sequence: Synthetic peptide
  Seed: CSLMQGSTLPRRSGA
CSLMFGSALARRIGA

SEQ ID NO: 53756 - protein, 15 aa, Artificial Sequence
  Description of Artificial Sequence: Synthetic peptide
  Seed: CSLMQGSTLPRRSGA
CSLMFGSALARRLGA

SEQ ID NO: 53757 - protein, 15 aa, Artificial Sequence
  Description of Artificial Sequence: Synthetic peptide
  Seed: CSLMQGSTLPRRSGA
CSLMFGSALARRMGA

SEQ ID NO: 53758 - protein, 15 aa, Artificial Sequence
  Description of Artificial Sequence: Synthetic peptide
  Seed: CSLMQGSTLPRRSGA
CSLMFGSALARRNGA

SEQ ID NO: 53759 - protein, 15 aa, Artificial Sequence
  Description of Artificial Sequence: Synthetic peptide
  Seed: CSLMQGSTLPRRSGA
CSLMFGSALARRPGA

SEQ ID NO: 53760 - protein, 15 aa, Artificial Sequence
  Description of Artificial Sequence: Synthetic peptide
  Seed: CSLMQGSTLPRRSGA
CSLMFGSALARRQGA

SEQ ID NO: 53761 - protein, 15 aa, Artificial Sequence
  Description of Artificial Sequence: Synthetic peptide
  Seed: CSLMQGSTLPRRSGA
CSLMFGSALARRRGA

SEQ ID NO: 53762 - protein, 15 aa, Artificial Sequence
  Description of Artificial Sequence: Synthetic peptide
  Seed: CSLMQGSTLPRRSGA
CSLMFGSALARRSGA

SEQ ID NO: 53763 - protein, 15 aa, Artificial Sequence
  Description of Artificial Sequence: Synthetic peptide
  Seed: CSLMQGSTLPRRSGA
CSLMFGSALARRTGA

SEQ ID NO: 53764 - protein, 15 aa, Artificial Sequence
  Description of Artificial Sequence: Synthetic peptide
  Seed: CSLMQGSTLPRRSGA
CSLMFGSALARRVGA

SEQ ID NO: 53765 - protein, 15 aa, Artificial Sequence
  Description of Artificial Sequence: Synthetic peptide
  Seed: CSLMQGSTLPRRSGA
CSLMFGSALARRWGA

SEQ ID NO: 53766 - protein, 15 aa, Artificial Sequence
  Description of Artificial Sequence: Synthetic peptide
  Seed: CSLMQGSTLPRRSGA
CSLMFGSALARRYGA

SEQ ID NO: 53767 - protein, 15 aa, Artificial Sequence
  Description of Artificial Sequence: Synthetic peptide
  Seed: CSLMQGSTLPRRSGA
CSLMFGSALGRRAGA

SEQ ID NO: 53768 - protein, 15 aa, Artificial Sequence
  Description of Artificial Sequence: Synthetic peptide
  Seed: CSLMQGSTLPRRSGA
CSLMFGSALGRRCGA

SEQ ID NO: 53769 - protein, 15 aa, Artificial Sequence
  Description of Artificial Sequence: Synthetic peptide
  Seed: CSLMQGSTLPRRSGA
CSLMFGSALGRRFGA

SEQ ID NO: 53770 - protein, 15 aa, Artificial Sequence
  Description of Artificial Sequence: Synthetic peptide
  Seed: CSLMQGSTLPRRSGA
CSLMFGSALGRRGGA

SEQ ID NO: 53771 - protein, 15 aa, Artificial Sequence
  Description of Artificial Sequence: Synthetic peptide
  Seed: CSLMQGSTLPRRSGA
CSLMFGSALGRRIGA

SEQ ID NO: 53772 - protein, 15 aa, Artificial Sequence
  Description of Artificial Sequence: Synthetic peptide
  Seed: CSLMQGSTLPRRSGA
CSLMFGSALGRRLGA

SEQ ID NO: 53773 - protein, 15 aa, Artificial Sequence
  Description of Artificial Sequence: Synthetic peptide
  Seed: CSLMQGSTLPRRSGA
CSLMFGSALGRRMGA

SEQ ID NO: 53774 - protein, 15 aa, Artificial Sequence
  Description of Artificial Sequence: Synthetic peptide
  Seed: CSLMQGSTLPRRSGA
CSLMFGSALGRRSGA

SEQ ID NO: 53775 - protein, 15 aa, Artificial Sequence
  Description of Artificial Sequence: Synthetic peptide
  Seed: CSLMQGSTLPRRSGA
CSLMFGSALGRRTGA

SEQ ID NO: 53776 - protein, 15 aa, Artificial Sequence
  Description of Artificial Sequence: Synthetic peptide
  Seed: CSLMQGSTLPRRSGA
CSLMFGSALGRRVGA

SEQ ID NO: 53777 - protein, 15 aa, Artificial Sequence
  Description of Artificial Sequence: Synthetic peptide
  Seed: CSLMQGSTLPRRSGA
CSLMFGSALGRRYGA

SEQ ID NO: 53778 - protein, 15 aa, Artificial Sequence
  Description of Artificial Sequence: Synthetic peptide
  Seed: CSLMQGSTLPRRSGA
CSLMFGSALIRRAGA

SEQ ID NO: 53779 - protein, 15 aa, Artificial Sequence
  Description of Artificial Sequence: Synthetic peptide
  Seed: CSLMQGSTLPRRSGA
CSLMFGSALIRRIGA

SEQ ID NO: 53780 - protein, 15 aa, Artificial Sequence
  Description of Artificial Sequence: Synthetic peptide
  Seed: CSLMQGSTLPRRSGA
CSLMFGSALIRRLGA

SEQ ID NO: 53781 - protein, 15 aa, Artificial Sequence
  Description of Artificial Sequence: Synthetic peptide
  Seed: CSLMQGSTLPRRSGA
CSLMFGSALIRRMGA

SEQ ID NO: 53782 - protein, 15 aa, Artificial Sequence
  Description of Artificial Sequence: Synthetic peptide
  Seed: CSLMQGSTLPRRSGA
CSLMFGSALIRRNGA

SEQ ID NO: 53783 - protein, 15 aa, Artificial Sequence
  Description of Artificial Sequence: Synthetic peptide
  Seed: CSLMQGSTLPRRSGA
CSLMFGSALIRRSGA

SEQ ID NO: 53784 - protein, 15 aa, Artificial Sequence
  Description of Artificial Sequence: Synthetic peptide
  Seed: CSLMQGSTLPRRSGA
CSLMFGSALIRRTGA

SEQ ID NO: 53785 - protein, 15 aa, Artificial Sequence
  Description of Artificial Sequence: Synthetic peptide
  Seed: CSLMQGSTLPRRSGA
CSLMFGSALIRRVGA

SEQ ID NO: 53786 - protein, 15 aa, Artificial Sequence
  Description of Artificial Sequence: Synthetic peptide
  Seed: CSLMQGSTLPRRSGA
CSLMFGSALLRRIGA

SEQ ID NO: 53787 - protein, 15 aa, Artificial Sequence
  Description of Artificial Sequence: Synthetic peptide
  Seed: CSLMQGSTLPRRSGA
CSLMFGSALLRRLGA

SEQ ID NO: 53788 - protein, 15 aa, Artificial Sequence
  Description of Artificial Sequence: Synthetic peptide
  Seed: CSLMQGSTLPRRSGA
CSLMFGSALLRRVGA

SEQ ID NO: 53789 - protein, 15 aa, Artificial Sequence
  Description of Artificial Sequence: Synthetic peptide
  Seed: CSLMQGSTLPRRSGA
CSLMFGSALMRRAGA

SEQ ID NO: 53790 - protein, 15 aa, Artificial Sequence
  Description of Artificial Sequence: Synthetic peptide
  Seed: CSLMQGSTLPRRSGA
CSLMFGSALMRRIGA

SEQ ID NO: 53791 - protein, 15 aa, Artificial Sequence
  Description of Artificial Sequence: Synthetic peptide
  Seed: CSLMQGSTLPRRSGA
CSLMFGSALMRRLGA

SEQ ID NO: 53792 - protein, 15 aa, Artificial Sequence
  Description of Artificial Sequence: Synthetic peptide
  Seed: CSLMQGSTLPRRSGA
CSLMFGSALMRRVGA

SEQ ID NO: 53793 - protein, 15 aa, Artificial Sequence
  Description of Artificial Sequence: Synthetic peptide
  Seed: CSLMQGSTLPRRSGA
CSLMFGSALNRRAGA

SEQ ID NO: 53794 - protein, 15 aa, Artificial Sequence
  Description of Artificial Sequence: Synthetic peptide
  Seed: CSLMQGSTLPRRSGA
CSLMFGSALNRRIGA

SEQ ID NO: 53795 - protein, 15 aa, Artificial Sequence
  Description of Artificial Sequence: Synthetic peptide
  Seed: CSLMQGSTLPRRSGA
CSLMFGSALNRRLGA

SEQ ID NO: 53796 - protein, 15 aa, Artificial Sequence
  Description of Artificial Sequence: Synthetic peptide
  Seed: CSLMQGSTLPRRSGA
CSLMFGSALNRRMGA

SEQ ID NO: 53797 - protein, 15 aa, Artificial Sequence
  Description of Artificial Sequence: Synthetic peptide
  Seed: CSLMQGSTLPRRSGA
CSLMFGSALNRRNGA

SEQ ID NO: 53798 - protein, 15 aa, Artificial Sequence
  Description of Artificial Sequence: Synthetic peptide
  Seed: CSLMQGSTLPRRSGA
CSLMFGSALNRRSGA

SEQ ID NO: 53799 - protein, 15 aa, Artificial Sequence
  Description of Artificial Sequence: Synthetic peptide
  Seed: CSLMQGSTLPRRSGA
CSLMFGSALNRRTGA

SEQ ID NO: 53800 - protein, 15 aa, Artificial Sequence
  Description of Artificial Sequence: Synthetic peptide
  Seed: CSLMQGSTLPRRSGA
CSLMFGSALNRRVGA

SEQ ID NO: 53801 - protein, 15 aa, Artificial Sequence
  Description of Artificial Sequence: Synthetic peptide
  Seed: CSLMQGSTLPRRSGA
CSLMFGSALPRRAGA

SEQ ID NO: 53802 - protein, 15 aa, Artificial Sequence
  Description of Artificial Sequence: Synthetic peptide
  Seed: CSLMQGSTLPRRSGA
CSLMFGSALPRRFGA

SEQ ID NO: 53803 - protein, 15 aa, Artificial Sequence
  Description of Artificial Sequence: Synthetic peptide
  Seed: CSLMQGSTLPRRSGA
CSLMFGSALPRRIGA

SEQ ID NO: 53804 - protein, 15 aa, Artificial Sequence
  Description of Artificial Sequence: Synthetic peptide
  Seed: CSLMQGSTLPRRSGA
CSLMFGSALPRRLGA

SEQ ID NO: 53805 - protein, 15 aa, Artificial Sequence
  Description of Artificial Sequence: Synthetic peptide
  Seed: CSLMQGSTLPRRSGA
CSLMFGSALPRRMGA

SEQ ID NO: 53806 - protein, 15 aa, Artificial Sequence
  Description of Artificial Sequence: Synthetic peptide
  Seed: CSLMQGSTLPRRSGA
CSLMFGSALPRRNGA

SEQ ID NO: 53807 - protein, 15 aa, Artificial Sequence
  Description of Artificial Sequence: Synthetic peptide
  Seed: CSLMQGSTLPRRSGA
CSLMFGSALPRRSGA

SEQ ID NO: 53808 - protein, 15 aa, Artificial Sequence
  Description of Artificial Sequence: Synthetic peptide
  Seed: CSLMQGSTLPRRSGA
CSLMFGSALPRRTGA

SEQ ID NO: 53809 - protein, 15 aa, Artificial Sequence
  Description of Artificial Sequence: Synthetic peptide
  Seed: CSLMQGSTLPRRSGA
CSLMFGSALPRRVGA

SEQ ID NO: 53810 - protein, 15 aa, Artificial Sequence
  Description of Artificial Sequence: Synthetic peptide
  Seed: CSLMQGSTLPRRSGA
CSLMFGSALQRRIGA

SEQ ID NO: 53811 - protein, 15 aa, Artificial Sequence
  Description of Artificial Sequence: Synthetic peptide
  Seed: CSLMQGSTLPRRSGA
CSLMFGSALQRRVGA

SEQ ID NO: 53812 - protein, 15 aa, Artificial Sequence
  Description of Artificial Sequence: Synthetic peptide
  Seed: CSLMQGSTLPRRSGA
CSLMFGSALSRRAGA

SEQ ID NO: 53813 - protein, 15 aa, Artificial Sequence
  Description of Artificial Sequence: Synthetic peptide
  Seed: CSLMQGSTLPRRSGA
CSLMFGSALSRRCGA

SEQ ID NO: 53814 - protein, 15 aa, Artificial Sequence
  Description of Artificial Sequence: Synthetic peptide
  Seed: CSLMQGSTLPRRSGA
CSLMFGSALSRRFGA

SEQ ID NO: 53815 - protein, 15 aa, Artificial Sequence
  Description of Artificial Sequence: Synthetic peptide
  Seed: CSLMQGSTLPRRSGA
CSLMFGSALSRRGGA

SEQ ID NO: 53816 - protein, 15 aa, Artificial Sequence
  Description of Artificial Sequence: Synthetic peptide
  Seed: CSLMQGSTLPRRSGA
CSLMFGSALSRRIGA

SEQ ID NO: 53817 - protein, 15 aa, Artificial Sequence
  Description of Artificial Sequence: Synthetic peptide
  Seed: CSLMQGSTLPRRSGA
CSLMFGSALSRRLGA

SEQ ID NO: 53818 - protein, 15 aa, Artificial Sequence
  Description of Artificial Sequence: Synthetic peptide
  Seed: CSLMQGSTLPRRSGA
CSLMFGSALSRRMGA

SEQ ID NO: 53819 - protein, 15 aa, Artificial Sequence
  Description of Artificial Sequence: Synthetic peptide
  Seed: CSLMQGSTLPRRSGA
CSLMFGSALSRRNGA

SEQ ID NO: 53820 - protein, 15 aa, Artificial Sequence
  Description of Artificial Sequence: Synthetic peptide
  Seed: CSLMQGSTLPRRSGA
CSLMFGSALSRRPGA

SEQ ID NO: 53821 - protein, 15 aa, Artificial Sequence
  Description of Artificial Sequence: Synthetic peptide
  Seed: CSLMQGSTLPRRSGA
CSLMFGSALSRRSGA

SEQ ID NO: 53822 - protein, 15 aa, Artificial Sequence
  Description of Artificial Sequence: Synthetic peptide
  Seed: CSLMQGSTLPRRSGA
CSLMFGSALSRRTGA

SEQ ID NO: 53823 - protein, 15 aa, Artificial Sequence
  Description of Artificial Sequence: Synthetic peptide
  Seed: CSLMQGSTLPRRSGA
CSLMFGSALSRRVGA

SEQ ID NO: 53824 - protein, 15 aa, Artificial Sequence
  Description of Artificial Sequence: Synthetic peptide
  Seed: CSLMQGSTLPRRSGA
CSLMFGSALSRRWGA

SEQ ID NO: 53825 - protein, 15 aa, Artificial Sequence
  Description of Artificial Sequence: Synthetic peptide
  Seed: CSLMQGSTLPRRSGA
CSLMFGSALSRRYGA

SEQ ID NO: 53826 - protein, 15 aa, Artificial Sequence
  Description of Artificial Sequence: Synthetic peptide
  Seed: CSLMQGSTLPRRSGA
CSLMFGSALTRRAGA

SEQ ID NO: 53827 - protein, 15 aa, Artificial Sequence
  Description of Artificial Sequence: Synthetic peptide
  Seed: CSLMQGSTLPRRSGA
CSLMFGSALTRRFGA

SEQ ID NO: 53828 - protein, 15 aa, Artificial Sequence
  Description of Artificial Sequence: Synthetic peptide
  Seed: CSLMQGSTLPRRSGA
CSLMFGSALTRRGGA

SEQ ID NO: 53829 - protein, 15 aa, Artificial Sequence
  Description of Artificial Sequence: Synthetic peptide
  Seed: CSLMQGSTLPRRSGA
CSLMFGSALTRRIGA

SEQ ID NO: 53830 - protein, 15 aa, Artificial Sequence
  Description of Artificial Sequence: Synthetic peptide
  Seed: CSLMQGSTLPRRSGA
CSLMFGSALTRRLGA

SEQ ID NO: 53831 - protein, 15 aa, Artificial Sequence
  Description of Artificial Sequence: Synthetic peptide
  Seed: CSLMQGSTLPRRSGA
CSLMFGSALTRRMGA

SEQ ID NO: 53832 - protein, 15 aa, Artificial Sequence
  Description of Artificial Sequence: Synthetic peptide
  Seed: CSLMQGSTLPRRSGA
CSLMFGSALTRRNGA

SEQ ID NO: 53833 - protein, 15 aa, Artificial Sequence
  Description of Artificial Sequence: Synthetic peptide
  Seed: CSLMQGSTLPRRSGA
CSLMFGSALTRRSGA

SEQ ID NO: 53834 - protein, 15 aa, Artificial Sequence
  Description of Artificial Sequence: Synthetic peptide
  Seed: CSLMQGSTLPRRSGA
CSLMFGSALTRRTGA

SEQ ID NO: 53835 - protein, 15 aa, Artificial Sequence
  Description of Artificial Sequence: Synthetic peptide
  Seed: CSLMQGSTLPRRSGA
CSLMFGSALTRRVGA

SEQ ID NO: 53836 - protein, 15 aa, Artificial Sequence
  Description of Artificial Sequence: Synthetic peptide
  Seed: CSLMQGSTLPRRSGA
CSLMFGSALVRRAGA

SEQ ID NO: 53837 - protein, 15 aa, Artificial Sequence
  Description of Artificial Sequence: Synthetic peptide
  Seed: CSLMQGSTLPRRSGA
CSLMFGSALVRRFGA

SEQ ID NO: 53838 - protein, 15 aa, Artificial Sequence
  Description of Artificial Sequence: Synthetic peptide
  Seed: CSLMQGSTLPRRSGA
CSLMFGSALVRRIGA

SEQ ID NO: 53839 - protein, 15 aa, Artificial Sequence
  Description of Artificial Sequence: Synthetic peptide
  Seed: CSLMQGSTLPRRSGA
CSLMFGSALVRRLGA

SEQ ID NO: 53840 - protein, 15 aa, Artificial Sequence
  Description of Artificial Sequence: Synthetic peptide
  Seed: CSLMQGSTLPRRSGA
CSLMFGSALVRRMGA

SEQ ID NO: 53841 - protein, 15 aa, Artificial Sequence
  Description of Artificial Sequence: Synthetic peptide
  Seed: CSLMQGSTLPRRSGA
CSLMFGSALVRRNGA

SEQ ID NO: 53842 - protein, 15 aa, Artificial Sequence
  Description of Artificial Sequence: Synthetic peptide
  Seed: CSLMQGSTLPRRSGA
CSLMFGSALVRRSGA

SEQ ID NO: 53843 - protein, 15 aa, Artificial Sequence
  Description of Artificial Sequence: Synthetic peptide
  Seed: CSLMQGSTLPRRSGA
CSLMFGSALVRRTGA

SEQ ID NO: 53844 - protein, 15 aa, Artificial Sequence
  Description of Artificial Sequence: Synthetic peptide
  Seed: CSLMQGSTLPRRSGA
CSLMFGSALVRRVGA

SEQ ID NO: 53845 - protein, 15 aa, Artificial Sequence
  Description of Artificial Sequence: Synthetic peptide
  Seed: CSLMQGSTLPRRSGA
CSLMFGSCLARRAGA

SEQ ID NO: 53846 - protein, 15 aa, Artificial Sequence
  Description of Artificial Sequence: Synthetic peptide
  Seed: CSLMQGSTLPRRSGA
CSLMFGSCLARRIGA

SEQ ID NO: 53847 - protein, 15 aa, Artificial Sequence
  Description of Artificial Sequence: Synthetic peptide
  Seed: CSLMQGSTLPRRSGA
CSLMFGSCLARRLGA

SEQ ID NO: 53848 - protein, 15 aa, Artificial Sequence
  Description of Artificial Sequence: Synthetic peptide
  Seed: CSLMQGSTLPRRSGA
CSLMFGSCLARRVGA

SEQ ID NO: 53849 - protein, 15 aa, Artificial Sequence
  Description of Artificial Sequence: Synthetic peptide
  Seed: CSLMQGSTLPRRSGA
CSLMFGSCLGRRIGA

SEQ ID NO: 53850 - protein, 15 aa, Artificial Sequence
  Description of Artificial Sequence: Synthetic peptide
  Seed: CSLMQGSTLPRRSGA
CSLMFGSCLGRRLGA

SEQ ID NO: 53851 - protein, 15 aa, Artificial Sequence
  Description of Artificial Sequence: Synthetic peptide
  Seed: CSLMQGSTLPRRSGA
CSLMFGSCLGRRVGA

SEQ ID NO: 53852 - protein, 15 aa, Artificial Sequence
  Description of Artificial Sequence: Synthetic peptide
  Seed: CSLMQGSTLPRRSGA
CSLMFGSCLSRRIGA

SEQ ID NO: 53853 - protein, 15 aa, Artificial Sequence
  Description of Artificial Sequence: Synthetic peptide
  Seed: CSLMQGSTLPRRSGA
CSLMFGSCLSRRLGA

SEQ ID NO: 53854 - protein, 15 aa, Artificial Sequence
  Description of Artificial Sequence: Synthetic peptide
  Seed: CSLMQGSTLPRRSGA
CSLMFGSCLSRRVGA

SEQ ID NO: 53855 - protein, 15 aa, Artificial Sequence
  Description of Artificial Sequence: Synthetic peptide
  Seed: CSLMQGSTLPRRSGA
CSLMFGSDLARRIGA

SEQ ID NO: 53856 - protein, 15 aa, Artificial Sequence
  Description of Artificial Sequence: Synthetic peptide
  Seed: CSLMQGSTLPRRSGA
CSLMFGSDLARRLGA

SEQ ID NO: 53857 - protein, 15 aa, Artificial Sequence
  Description of Artificial Sequence: Synthetic peptide
  Seed: CSLMQGSTLPRRSGA
CSLMFGSDLARRVGA

SEQ ID NO: 53858 - protein, 15 aa, Artificial Sequence
  Description of Artificial Sequence: Synthetic peptide
  Seed: CSLMQGSTLPRRSGA
CSLMFGSELARRAGA

SEQ ID NO: 53859 - protein, 15 aa, Artificial Sequence
  Description of Artificial Sequence: Synthetic peptide
  Seed: CSLMQGSTLPRRSGA
CSLMFGSELARRFGA

SEQ ID NO: 53860 - protein, 15 aa, Artificial Sequence
  Description of Artificial Sequence: Synthetic peptide
  Seed: CSLMQGSTLPRRSGA
CSLMFGSELARRIGA

SEQ ID NO: 53861 - protein, 15 aa, Artificial Sequence
  Description of Artificial Sequence: Synthetic peptide
  Seed: CSLMQGSTLPRRSGA
CSLMFGSELARRLGA

SEQ ID NO: 53862 - protein, 15 aa, Artificial Sequence
  Description of Artificial Sequence: Synthetic peptide
  Seed: CSLMQGSTLPRRSGA
CSLMFGSELARRMGA

SEQ ID NO: 53863 - protein, 15 aa, Artificial Sequence
  Description of Artificial Sequence: Synthetic peptide
  Seed: CSLMQGSTLPRRSGA
CSLMFGSELARRSGA

SEQ ID NO: 53864 - protein, 15 aa, Artificial Sequence
  Description of Artificial Sequence: Synthetic peptide
  Seed: CSLMQGSTLPRRSGA
CSLMFGSELARRTGA

SEQ ID NO: 53865 - protein, 15 aa, Artificial Sequence
  Description of Artificial Sequence: Synthetic peptide
  Seed: CSLMQGSTLPRRSGA
CSLMFGSELARRVGA

SEQ ID NO: 53866 - protein, 15 aa, Artificial Sequence
  Description of Artificial Sequence: Synthetic peptide
  Seed: CSLMQGSTLPRRSGA
CSLMFGSELGRRAGA

SEQ ID NO: 53867 - protein, 15 aa, Artificial Sequence
  Description of Artificial Sequence: Synthetic peptide
  Seed: CSLMQGSTLPRRSGA
CSLMFGSELGRRIGA

SEQ ID NO: 53868 - protein, 15 aa, Artificial Sequence
  Description of Artificial Sequence: Synthetic peptide
  Seed: CSLMQGSTLPRRSGA
CSLMFGSELGRRLGA

SEQ ID NO: 53869 - protein, 15 aa, Artificial Sequence
  Description of Artificial Sequence: Synthetic peptide
  Seed: CSLMQGSTLPRRSGA
CSLMFGSELGRRMGA

SEQ ID NO: 53870 - protein, 15 aa, Artificial Sequence
  Description of Artificial Sequence: Synthetic peptide
  Seed: CSLMQGSTLPRRSGA
CSLMFGSELGRRTGA

SEQ ID NO: 53871 - protein, 15 aa, Artificial Sequence
  Description of Artificial Sequence: Synthetic peptide
  Seed: CSLMQGSTLPRRSGA
CSLMFGSELGRRVGA

SEQ ID NO: 53872 - protein, 15 aa, Artificial Sequence
  Description of Artificial Sequence: Synthetic peptide
  Seed: CSLMQGSTLPRRSGA
CSLMFGSELNRRIGA

SEQ ID NO: 53873 - protein, 15 aa, Artificial Sequence
  Description of Artificial Sequence: Synthetic peptide
  Seed: CSLMQGSTLPRRSGA
CSLMFGSELNRRLGA

SEQ ID NO: 53874 - protein, 15 aa, Artificial Sequence
  Description of Artificial Sequence: Synthetic peptide
  Seed: CSLMQGSTLPRRSGA
CSLMFGSELNRRVGA

SEQ ID NO: 53875 - protein, 15 aa, Artificial Sequence
  Description of Artificial Sequence: Synthetic peptide
  Seed: CSLMQGSTLPRRSGA
CSLMFGSELPRRIGA

SEQ ID NO: 53876 - protein, 15 aa, Artificial Sequence
  Description of Artificial Sequence: Synthetic peptide
  Seed: CSLMQGSTLPRRSGA
CSLMFGSELPRRLGA

SEQ ID NO: 53877 - protein, 15 aa, Artificial Sequence
  Description of Artificial Sequence: Synthetic peptide
  Seed: CSLMQGSTLPRRSGA
CSLMFGSELPRRVGA

SEQ ID NO: 53878 - protein, 15 aa, Artificial Sequence
  Description of Artificial Sequence: Synthetic peptide
  Seed: CSLMQGSTLPRRSGA
CSLMFGSELSRRAGA

SEQ ID NO: 53879 - protein, 15 aa, Artificial Sequence
  Description of Artificial Sequence: Synthetic peptide
  Seed: CSLMQGSTLPRRSGA
CSLMFGSELSRRIGA

SEQ ID NO: 53880 - protein, 15 aa, Artificial Sequence
  Description of Artificial Sequence: Synthetic peptide
  Seed: CSLMQGSTLPRRSGA
CSLMFGSELSRRLGA

SEQ ID NO: 53881 - protein, 15 aa, Artificial Sequence
  Description of Artificial Sequence: Synthetic peptide
  Seed: CSLMQGSTLPRRSGA
CSLMFGSELSRRMGA

SEQ ID NO: 53882 - protein, 15 aa, Artificial Sequence
  Description of Artificial Sequence: Synthetic peptide
  Seed: CSLMQGSTLPRRSGA
CSLMFGSELSRRTGA

SEQ ID NO: 53883 - protein, 15 aa, Artificial Sequence
  Description of Artificial Sequence: Synthetic peptide
  Seed: CSLMQGSTLPRRSGA
CSLMFGSELSRRVGA

SEQ ID NO: 53884 - protein, 15 aa, Artificial Sequence
  Description of Artificial Sequence: Synthetic peptide
  Seed: CSLMQGSTLPRRSGA
CSLMFGSELTRRIGA

SEQ ID NO: 53885 - protein, 15 aa, Artificial Sequence
  Description of Artificial Sequence: Synthetic peptide
  Seed: CSLMQGSTLPRRSGA
CSLMFGSELTRRLGA

SEQ ID NO: 53886 - protein, 15 aa, Artificial Sequence
  Description of Artificial Sequence: Synthetic peptide
  Seed: CSLMQGSTLPRRSGA
CSLMFGSELTRRVGA

SEQ ID NO: 53887 - protein, 15 aa, Artificial Sequence
  Description of Artificial Sequence: Synthetic peptide
  Seed: CSLMQGSTLPRRSGA
CSLMFGSFLARRAGA

SEQ ID NO: 53888 - protein, 15 aa, Artificial Sequence
  Description of Artificial Sequence: Synthetic peptide
  Seed: CSLMQGSTLPRRSGA
CSLMFGSFLARRIGA

SEQ ID NO: 53889 - protein, 15 aa, Artificial Sequence
  Description of Artificial Sequence: Synthetic peptide
  Seed: CSLMQGSTLPRRSGA
CSLMFGSFLARRLGA

SEQ ID NO: 53890 - protein, 15 aa, Artificial Sequence
  Description of Artificial Sequence: Synthetic peptide
  Seed: CSLMQGSTLPRRSGA
CSLMFGSFLARRMGA

SEQ ID NO: 53891 - protein, 15 aa, Artificial Sequence
  Description of Artificial Sequence: Synthetic peptide
  Seed: CSLMQGSTLPRRSGA
CSLMFGSFLARRSGA

SEQ ID NO: 53892 - protein, 15 aa, Artificial Sequence
  Description of Artificial Sequence: Synthetic peptide
  Seed: CSLMQGSTLPRRSGA
CSLMFGSFLARRTGA

SEQ ID NO: 53893 - protein, 15 aa, Artificial Sequence
  Description of Artificial Sequence: Synthetic peptide
  Seed: CSLMQGSTLPRRSGA
CSLMFGSFLARRVGA

SEQ ID NO: 53894 - protein, 15 aa, Artificial Sequence
  Description of Artificial Sequence: Synthetic peptide
  Seed: CSLMQGSTLPRRSGA
CSLMFGSFLGRRAGA

SEQ ID NO: 53895 - protein, 15 aa, Artificial Sequence
  Description of Artificial Sequence: Synthetic peptide
  Seed: CSLMQGSTLPRRSGA
CSLMFGSFLGRRIGA

SEQ ID NO: 53896 - protein, 15 aa, Artificial Sequence
  Description of Artificial Sequence: Synthetic peptide
  Seed: CSLMQGSTLPRRSGA
CSLMFGSFLGRRLGA

SEQ ID NO: 53897 - protein, 15 aa, Artificial Sequence
  Description of Artificial Sequence: Synthetic peptide
  Seed: CSLMQGSTLPRRSGA
CSLMFGSFLGRRMGA

SEQ ID NO: 53898 - protein, 15 aa, Artificial Sequence
  Description of Artificial Sequence: Synthetic peptide
  Seed: CSLMQGSTLPRRSGA
CSLMFGSFLGRRVGA

SEQ ID NO: 53899 - protein, 15 aa, Artificial Sequence
  Description of Artificial Sequence: Synthetic peptide
  Seed: CSLMQGSTLPRRSGA
CSLMFGSFLPRRAGA

SEQ ID NO: 53900 - protein, 15 aa, Artificial Sequence
  Description of Artificial Sequence: Synthetic peptide
  Seed: CSLMQGSTLPRRSGA
CSLMFGSFLPRRIGA

SEQ ID NO: 53901 - protein, 15 aa, Artificial Sequence
  Description of Artificial Sequence: Synthetic peptide
  Seed: CSLMQGSTLPRRSGA
CSLMFGSFLPRRLGA

SEQ ID NO: 53902 - protein, 15 aa, Artificial Sequence
  Description of Artificial Sequence: Synthetic peptide
  Seed: CSLMQGSTLPRRSGA
CSLMFGSFLPRRVGA

SEQ ID NO: 53903 - protein, 15 aa, Artificial Sequence
  Description of Artificial Sequence: Synthetic peptide
  Seed: CSLMQGSTLPRRSGA
CSLMFGSFLSRRAGA

SEQ ID NO: 53904 - protein, 15 aa, Artificial Sequence
  Description of Artificial Sequence: Synthetic peptide
  Seed: CSLMQGSTLPRRSGA
CSLMFGSFLSRRIGA

SEQ ID NO: 53905 - protein, 15 aa, Artificial Sequence
  Description of Artificial Sequence: Synthetic peptide
  Seed: CSLMQGSTLPRRSGA
CSLMFGSFLSRRLGA

SEQ ID NO: 53906 - protein, 15 aa, Artificial Sequence
  Description of Artificial Sequence: Synthetic peptide
  Seed: CSLMQGSTLPRRSGA
CSLMFGSFLSRRMGA

SEQ ID NO: 53907 - protein, 15 aa, Artificial Sequence
  Description of Artificial Sequence: Synthetic peptide
  Seed: CSLMQGSTLPRRSGA
CSLMFGSFLSRRVGA

SEQ ID NO: 53908 - protein, 15 aa, Artificial Sequence
  Description of Artificial Sequence: Synthetic peptide
  Seed: CSLMQGSTLPRRSGA
CSLMFGSFLTRRIGA

SEQ ID NO: 53909 - protein, 15 aa, Artificial Sequence
  Description of Artificial Sequence: Synthetic peptide
  Seed: CSLMQGSTLPRRSGA
CSLMFGSFLTRRLGA

SEQ ID NO: 53910 - protein, 15 aa, Artificial Sequence
  Description of Artificial Sequence: Synthetic peptide
  Seed: CSLMQGSTLPRRSGA
CSLMFGSFLTRRVGA

SEQ ID NO: 53911 - protein, 15 aa, Artificial Sequence
  Description of Artificial Sequence: Synthetic peptide
  Seed: CSLMQGSTLPRRSGA
CSLMFGSGLARRAGA

SEQ ID NO: 53912 - protein, 15 aa, Artificial Sequence
  Description of Artificial Sequence: Synthetic peptide
  Seed: CSLMQGSTLPRRSGA
CSLMFGSGLARRFGA

SEQ ID NO: 53913 - protein, 15 aa, Artificial Sequence
  Description of Artificial Sequence: Synthetic peptide
  Seed: CSLMQGSTLPRRSGA
CSLMFGSGLARRIGA

SEQ ID NO: 53914 - protein, 15 aa, Artificial Sequence
  Description of Artificial Sequence: Synthetic peptide
  Seed: CSLMQGSTLPRRSGA
CSLMFGSGLARRLGA

SEQ ID NO: 53915 - protein, 15 aa, Artificial Sequence
  Description of Artificial Sequence: Synthetic peptide
  Seed: CSLMQGSTLPRRSGA
CSLMFGSGLARRMGA

SEQ ID NO: 53916 - protein, 15 aa, Artificial Sequence
  Description of Artificial Sequence: Synthetic peptide
  Seed: CSLMQGSTLPRRSGA
CSLMFGSGLARRSGA

SEQ ID NO: 53917 - protein, 15 aa, Artificial Sequence
  Description of Artificial Sequence: Synthetic peptide
  Seed: CSLMQGSTLPRRSGA
CSLMFGSGLARRTGA

SEQ ID NO: 53918 - protein, 15 aa, Artificial Sequence
  Description of Artificial Sequence: Synthetic peptide
  Seed: CSLMQGSTLPRRSGA
CSLMFGSGLARRVGA

SEQ ID NO: 53919 - protein, 15 aa, Artificial Sequence
  Description of Artificial Sequence: Synthetic peptide
  Seed: CSLMQGSTLPRRSGA
CSLMFGSGLGRRIGA

SEQ ID NO: 53920 - protein, 15 aa, Artificial Sequence
  Description of Artificial Sequence: Synthetic peptide
  Seed: CSLMQGSTLPRRSGA
CSLMFGSGLGRRLGA

SEQ ID NO: 53921 - protein, 15 aa, Artificial Sequence
  Description of Artificial Sequence: Synthetic peptide
  Seed: CSLMQGSTLPRRSGA
CSLMFGSGLGRRVGA

SEQ ID NO: 53922 - protein, 15 aa, Artificial Sequence
  Description of Artificial Sequence: Synthetic peptide
  Seed: CSLMQGSTLPRRSGA
CSLMFGSGLIRRAGA

SEQ ID NO: 53923 - protein, 15 aa, Artificial Sequence
  Description of Artificial Sequence: Synthetic peptide
  Seed: CSLMQGSTLPRRSGA
CSLMFGSGLIRRSGA

SEQ ID NO: 53924 - protein, 15 aa, Artificial Sequence
  Description of Artificial Sequence: Synthetic peptide
  Seed: CSLMQGSTLPRRSGA
CSLMFGSGLIRRVGA

SEQ ID NO: 53925 - protein, 15 aa, Artificial Sequence
  Description of Artificial Sequence: Synthetic peptide
  Seed: CSLMQGSTLPRRSGA
CSLMFGSGLNRRIGA

SEQ ID NO: 53926 - protein, 15 aa, Artificial Sequence
  Description of Artificial Sequence: Synthetic peptide
  Seed: CSLMQGSTLPRRSGA
CSLMFGSGLNRRLGA

SEQ ID NO: 53927 - protein, 15 aa, Artificial Sequence
  Description of Artificial Sequence: Synthetic peptide
  Seed: CSLMQGSTLPRRSGA
CSLMFGSGLNRRVGA

SEQ ID NO: 53928 - protein, 15 aa, Artificial Sequence
  Description of Artificial Sequence: Synthetic peptide
  Seed: CSLMQGSTLPRRSGA
CSLMFGSGLPRRIGA

SEQ ID NO: 53929 - protein, 15 aa, Artificial Sequence
  Description of Artificial Sequence: Synthetic peptide
  Seed: CSLMQGSTLPRRSGA
CSLMFGSGLPRRLGA

SEQ ID NO: 53930 - protein, 15 aa, Artificial Sequence
  Description of Artificial Sequence: Synthetic peptide
  Seed: CSLMQGSTLPRRSGA
CSLMFGSGLPRRVGA

SEQ ID NO: 53931 - protein, 15 aa, Artificial Sequence
  Description of Artificial Sequence: Synthetic peptide
  Seed: CSLMQGSTLPRRSGA
CSLMFGSGLSRRAGA

SEQ ID NO: 53932 - protein, 15 aa, Artificial Sequence
  Description of Artificial Sequence: Synthetic peptide
  Seed: CSLMQGSTLPRRSGA
CSLMFGSGLSRRIGA

SEQ ID NO: 53933 - protein, 15 aa, Artificial Sequence
  Description of Artificial Sequence: Synthetic peptide
  Seed: CSLMQGSTLPRRSGA
CSLMFGSGLSRRLGA

SEQ ID NO: 53934 - protein, 15 aa, Artificial Sequence
  Description of Artificial Sequence: Synthetic peptide
  Seed: CSLMQGSTLPRRSGA
CSLMFGSGLSRRMGA

SEQ ID NO: 53935 - protein, 15 aa, Artificial Sequence
  Description of Artificial Sequence: Synthetic peptide
  Seed: CSLMQGSTLPRRSGA
CSLMFGSGLSRRVGA

SEQ ID NO: 53936 - protein, 15 aa, Artificial Sequence
  Description of Artificial Sequence: Synthetic peptide
  Seed: CSLMQGSTLPRRSGA
CSLMFGSGLTRRIGA

SEQ ID NO: 53937 - protein, 15 aa, Artificial Sequence
  Description of Artificial Sequence: Synthetic peptide
  Seed: CSLMQGSTLPRRSGA
CSLMFGSGLTRRLGA

SEQ ID NO: 53938 - protein, 15 aa, Artificial Sequence
  Description of Artificial Sequence: Synthetic peptide
  Seed: CSLMQGSTLPRRSGA
CSLMFGSGLTRRVGA

SEQ ID NO: 53939 - protein, 15 aa, Artificial Sequence
  Description of Artificial Sequence: Synthetic peptide
  Seed: CSLMQGSTLPRRSGA
CSLMFGSGLVRRAGA

SEQ ID NO: 53940 - protein, 15 aa, Artificial Sequence
  Description of Artificial Sequence: Synthetic peptide
  Seed: CSLMQGSTLPRRSGA
CSLMFGSGLVRRIGA

SEQ ID NO: 53941 - protein, 15 aa, Artificial Sequence
  Description of Artificial Sequence: Synthetic peptide
  Seed: CSLMQGSTLPRRSGA
CSLMFGSGLVRRLGA

SEQ ID NO: 53942 - protein, 15 aa, Artificial Sequence
  Description of Artificial Sequence: Synthetic peptide
  Seed: CSLMQGSTLPRRSGA
CSLMFGSGLVRRSGA

SEQ ID NO: 53943 - protein, 15 aa, Artificial Sequence
  Description of Artificial Sequence: Synthetic peptide
  Seed: CSLMQGSTLPRRSGA
CSLMFGSGLVRRTGA

SEQ ID NO: 53944 - protein, 15 aa, Artificial Sequence
  Description of Artificial Sequence: Synthetic peptide
  Seed: CSLMQGSTLPRRSGA
CSLMFGSGLVRRVGA

SEQ ID NO: 53945 - protein, 15 aa, Artificial Sequence
  Description of Artificial Sequence: Synthetic peptide
  Seed: CSLMQGSTLPRRSGA
CSLMFGSHLARRAGA

SEQ ID NO: 53946 - protein, 15 aa, Artificial Sequence
  Description of Artificial Sequence: Synthetic peptide
  Seed: CSLMQGSTLPRRSGA
CSLMFGSHLARRIGA

SEQ ID NO: 53947 - protein, 15 aa, Artificial Sequence
  Description of Artificial Sequence: Synthetic peptide
  Seed: CSLMQGSTLPRRSGA
CSLMFGSHLARRLGA

SEQ ID NO: 53948 - protein, 15 aa, Artificial Sequence
  Description of Artificial Sequence: Synthetic peptide
  Seed: CSLMQGSTLPRRSGA
CSLMFGSHLARRMGA

SEQ ID NO: 53949 - protein, 15 aa, Artificial Sequence
  Description of Artificial Sequence: Synthetic peptide
  Seed: CSLMQGSTLPRRSGA
CSLMFGSHLARRVGA

SEQ ID NO: 53950 - protein, 15 aa, Artificial Sequence
  Description of Artificial Sequence: Synthetic peptide
  Seed: CSLMQGSTLPRRSGA
CSLMFGSHLGRRIGA

SEQ ID NO: 53951 - protein, 15 aa, Artificial Sequence
  Description of Artificial Sequence: Synthetic peptide
  Seed: CSLMQGSTLPRRSGA
CSLMFGSHLGRRLGA

SEQ ID NO: 53952 - protein, 15 aa, Artificial Sequence
  Description of Artificial Sequence: Synthetic peptide
  Seed: CSLMQGSTLPRRSGA
CSLMFGSHLGRRVGA

SEQ ID NO: 53953 - protein, 15 aa, Artificial Sequence
  Description of Artificial Sequence: Synthetic peptide
  Seed: CSLMQGSTLPRRSGA
CSLMFGSHLSRRIGA

SEQ ID NO: 53954 - protein, 15 aa, Artificial Sequence
  Description of Artificial Sequence: Synthetic peptide
  Seed: CSLMQGSTLPRRSGA
CSLMFGSHLSRRLGA

SEQ ID NO: 53955 - protein, 15 aa, Artificial Sequence
  Description of Artificial Sequence: Synthetic peptide
  Seed: CSLMQGSTLPRRSGA
CSLMFGSHLSRRVGA

SEQ ID NO: 53956 - protein, 15 aa, Artificial Sequence
  Description of Artificial Sequence: Synthetic peptide
  Seed: CSLMQGSTLPRRSGA
CSLMFGSILARRAGA

SEQ ID NO: 53957 - protein, 15 aa, Artificial Sequence
  Description of Artificial Sequence: Synthetic peptide
  Seed: CSLMQGSTLPRRSGA
CSLMFGSILARRCGA

SEQ ID NO: 53958 - protein, 15 aa, Artificial Sequence
  Description of Artificial Sequence: Synthetic peptide
  Seed: CSLMQGSTLPRRSGA
CSLMFGSILARRDGA

SEQ ID NO: 53959 - protein, 15 aa, Artificial Sequence
  Description of Artificial Sequence: Synthetic peptide
  Seed: CSLMQGSTLPRRSGA
CSLMFGSILARRFGA

SEQ ID NO: 53960 - protein, 15 aa, Artificial Sequence
  Description of Artificial Sequence: Synthetic peptide
  Seed: CSLMQGSTLPRRSGA
CSLMFGSILARRGGA

SEQ ID NO: 53961 - protein, 15 aa, Artificial Sequence
  Description of Artificial Sequence: Synthetic peptide
  Seed: CSLMQGSTLPRRSGA
CSLMFGSILARRHGA

SEQ ID NO: 53962 - protein, 15 aa, Artificial Sequence
  Description of Artificial Sequence: Synthetic peptide
  Seed: CSLMQGSTLPRRSGA
CSLMFGSILARRIGA

SEQ ID NO: 53963 - protein, 15 aa, Artificial Sequence
  Description of Artificial Sequence: Synthetic peptide
  Seed: CSLMQGSTLPRRSGA
CSLMFGSILARRLGA

SEQ ID NO: 53964 - protein, 15 aa, Artificial Sequence
  Description of Artificial Sequence: Synthetic peptide
  Seed: CSLMQGSTLPRRSGA
CSLMFGSILARRMGA

SEQ ID NO: 53965 - protein, 15 aa, Artificial Sequence
  Description of Artificial Sequence: Synthetic peptide
  Seed: CSLMQGSTLPRRSGA
CSLMFGSILARRNGA

SEQ ID NO: 53966 - protein, 15 aa, Artificial Sequence
  Description of Artificial Sequence: Synthetic peptide
  Seed: CSLMQGSTLPRRSGA
CSLMFGSILARRPGA

SEQ ID NO: 53967 - protein, 15 aa, Artificial Sequence
  Description of Artificial Sequence: Synthetic peptide
  Seed: CSLMQGSTLPRRSGA
CSLMFGSILARRQGA

SEQ ID NO: 53968 - protein, 15 aa, Artificial Sequence
  Description of Artificial Sequence: Synthetic peptide
  Seed: CSLMQGSTLPRRSGA
CSLMFGSILARRSGA

SEQ ID NO: 53969 - protein, 15 aa, Artificial Sequence
  Description of Artificial Sequence: Synthetic peptide
  Seed: CSLMQGSTLPRRSGA
CSLMFGSILARRTGA

SEQ ID NO: 53970 - protein, 15 aa, Artificial Sequence
  Description of Artificial Sequence: Synthetic peptide
  Seed: CSLMQGSTLPRRSGA
CSLMFGSILARRVGA

SEQ ID NO: 53971 - protein, 15 aa, Artificial Sequence
  Description of Artificial Sequence: Synthetic peptide
  Seed: CSLMQGSTLPRRSGA
CSLMFGSILARRWGA

SEQ ID NO: 53972 - protein, 15 aa, Artificial Sequence
  Description of Artificial Sequence: Synthetic peptide
  Seed: CSLMQGSTLPRRSGA
CSLMFGSILARRYGA

SEQ ID NO: 53973 - protein, 15 aa, Artificial Sequence
  Description of Artificial Sequence: Synthetic peptide
  Seed: CSLMQGSTLPRRSGA
CSLMFGSILGRRAGA

SEQ ID NO: 53974 - protein, 15 aa, Artificial Sequence
  Description of Artificial Sequence: Synthetic peptide
  Seed: CSLMQGSTLPRRSGA
CSLMFGSILGRRCGA

SEQ ID NO: 53975 - protein, 15 aa, Artificial Sequence
  Description of Artificial Sequence: Synthetic peptide
  Seed: CSLMQGSTLPRRSGA
CSLMFGSILGRRFGA

SEQ ID NO: 53976 - protein, 15 aa, Artificial Sequence
  Description of Artificial Sequence: Synthetic peptide
  Seed: CSLMQGSTLPRRSGA
CSLMFGSILGRRGGA

SEQ ID NO: 53977 - protein, 15 aa, Artificial Sequence
  Description of Artificial Sequence: Synthetic peptide
  Seed: CSLMQGSTLPRRSGA
CSLMFGSILGRRIGA

SEQ ID NO: 53978 - protein, 15 aa, Artificial Sequence
  Description of Artificial Sequence: Synthetic peptide
  Seed: CSLMQGSTLPRRSGA
CSLMFGSILGRRLGA

SEQ ID NO: 53979 - protein, 15 aa, Artificial Sequence
  Description of Artificial Sequence: Synthetic peptide
  Seed: CSLMQGSTLPRRSGA
CSLMFGSILGRRMGA

SEQ ID NO: 53980 - protein, 15 aa, Artificial Sequence
  Description of Artificial Sequence: Synthetic peptide
  Seed: CSLMQGSTLPRRSGA
CSLMFGSILGRRNGA

SEQ ID NO: 53981 - protein, 15 aa, Artificial Sequence
  Description of Artificial Sequence: Synthetic peptide
  Seed: CSLMQGSTLPRRSGA
CSLMFGSILGRRPGA

SEQ ID NO: 53982 - protein, 15 aa, Artificial Sequence
  Description of Artificial Sequence: Synthetic peptide
  Seed: CSLMQGSTLPRRSGA
CSLMFGSILGRRSGA

SEQ ID NO: 53983 - protein, 15 aa, Artificial Sequence
  Description of Artificial Sequence: Synthetic peptide
  Seed: CSLMQGSTLPRRSGA
CSLMFGSILGRRTGA

SEQ ID NO: 53984 - protein, 15 aa, Artificial Sequence
  Description of Artificial Sequence: Synthetic peptide
  Seed: CSLMQGSTLPRRSGA
CSLMFGSILGRRVGA

SEQ ID NO: 53985 - protein, 15 aa, Artificial Sequence
  Description of Artificial Sequence: Synthetic peptide
  Seed: CSLMQGSTLPRRSGA
CSLMFGSILGRRYGA

SEQ ID NO: 53986 - protein, 15 aa, Artificial Sequence
  Description of Artificial Sequence: Synthetic peptide
  Seed: CSLMQGSTLPRRSGA
CSLMFGSILIRRAGA

SEQ ID NO: 53987 - protein, 15 aa, Artificial Sequence
  Description of Artificial Sequence: Synthetic peptide
  Seed: CSLMQGSTLPRRSGA
CSLMFGSILIRRIGA

SEQ ID NO: 53988 - protein, 15 aa, Artificial Sequence
  Description of Artificial Sequence: Synthetic peptide
  Seed: CSLMQGSTLPRRSGA
CSLMFGSILIRRLGA

SEQ ID NO: 53989 - protein, 15 aa, Artificial Sequence
  Description of Artificial Sequence: Synthetic peptide
  Seed: CSLMQGSTLPRRSGA
CSLMFGSILIRRNGA

SEQ ID NO: 53990 - protein, 15 aa, Artificial Sequence
  Description of Artificial Sequence: Synthetic peptide
  Seed: CSLMQGSTLPRRSGA
CSLMFGSILIRRSGA

SEQ ID NO: 53991 - protein, 15 aa, Artificial Sequence
  Description of Artificial Sequence: Synthetic peptide
  Seed: CSLMQGSTLPRRSGA
CSLMFGSILIRRTGA

SEQ ID NO: 53992 - protein, 15 aa, Artificial Sequence
  Description of Artificial Sequence: Synthetic peptide
  Seed: CSLMQGSTLPRRSGA
CSLMFGSILIRRVGA

SEQ ID NO: 53993 - protein, 15 aa, Artificial Sequence
  Description of Artificial Sequence: Synthetic peptide
  Seed: CSLMQGSTLPRRSGA
CSLMFGSILMRRIGA

SEQ ID NO: 53994 - protein, 15 aa, Artificial Sequence
  Description of Artificial Sequence: Synthetic peptide
  Seed: CSLMQGSTLPRRSGA
CSLMFGSILMRRLGA

SEQ ID NO: 53995 - protein, 15 aa, Artificial Sequence
  Description of Artificial Sequence: Synthetic peptide
  Seed: CSLMQGSTLPRRSGA
CSLMFGSILMRRVGA

SEQ ID NO: 53996 - protein, 15 aa, Artificial Sequence
  Description of Artificial Sequence: Synthetic peptide
  Seed: CSLMQGSTLPRRSGA
CSLMFGSILNRRAGA

SEQ ID NO: 53997 - protein, 15 aa, Artificial Sequence
  Description of Artificial Sequence: Synthetic peptide
  Seed: CSLMQGSTLPRRSGA
CSLMFGSILNRRGGA

SEQ ID NO: 53998 - protein, 15 aa, Artificial Sequence
  Description of Artificial Sequence: Synthetic peptide
  Seed: CSLMQGSTLPRRSGA
CSLMFGSILNRRIGA

SEQ ID NO: 53999 - protein, 15 aa, Artificial Sequence
  Description of Artificial Sequence: Synthetic peptide
  Seed: CSLMQGSTLPRRSGA
CSLMFGSILNRRLGA

SEQ ID NO: 54000 - protein, 15 aa, Artificial Sequence
  Description of Artificial Sequence: Synthetic peptide
  Seed: CSLMQGSTLPRRSGA
CSLMFGSILNRRMGA

SEQ ID NO: 54001 - protein, 15 aa, Artificial Sequence
  Description of Artificial Sequence: Synthetic peptide
  Seed: CSLMQGSTLPRRSGA
CSLMFGSILNRRNGA

SEQ ID NO: 54002 - protein, 15 aa, Artificial Sequence
  Description of Artificial Sequence: Synthetic peptide
  Seed: CSLMQGSTLPRRSGA
CSLMFGSILNRRSGA

SEQ ID NO: 54003 - protein, 15 aa, Artificial Sequence
  Description of Artificial Sequence: Synthetic peptide
  Seed: CSLMQGSTLPRRSGA
CSLMFGSILNRRTGA

SEQ ID NO: 54004 - protein, 15 aa, Artificial Sequence
  Description of Artificial Sequence: Synthetic peptide
  Seed: CSLMQGSTLPRRSGA
CSLMFGSILNRRVGA

SEQ ID NO: 54005 - protein, 15 aa, Artificial Sequence
  Description of Artificial Sequence: Synthetic peptide
  Seed: CSLMQGSTLPRRSGA
CSLMFGSILPRRAGA

SEQ ID NO: 54006 - protein, 15 aa, Artificial Sequence
  Description of Artificial Sequence: Synthetic peptide
  Seed: CSLMQGSTLPRRSGA
CSLMFGSILPRRCGA

SEQ ID NO: 54007 - protein, 15 aa, Artificial Sequence
  Description of Artificial Sequence: Synthetic peptide
  Seed: CSLMQGSTLPRRSGA
CSLMFGSILPRRFGA

SEQ ID NO: 54008 - protein, 15 aa, Artificial Sequence
  Description of Artificial Sequence: Synthetic peptide
  Seed: CSLMQGSTLPRRSGA
CSLMFGSILPRRGGA

SEQ ID NO: 54009 - protein, 15 aa, Artificial Sequence
  Description of Artificial Sequence: Synthetic peptide
  Seed: CSLMQGSTLPRRSGA
CSLMFGSILPRRIGA

SEQ ID NO: 54010 - protein, 15 aa, Artificial Sequence
  Description of Artificial Sequence: Synthetic peptide
  Seed: CSLMQGSTLPRRSGA
CSLMFGSILPRRLGA

SEQ ID NO: 54011 - protein, 15 aa, Artificial Sequence
  Description of Artificial Sequence: Synthetic peptide
  Seed: CSLMQGSTLPRRSGA
CSLMFGSILPRRMGA

SEQ ID NO: 54012 - protein, 15 aa, Artificial Sequence
  Description of Artificial Sequence: Synthetic peptide
  Seed: CSLMQGSTLPRRSGA
CSLMFGSILPRRNGA

SEQ ID NO: 54013 - protein, 15 aa, Artificial Sequence
  Description of Artificial Sequence: Synthetic peptide
  Seed: CSLMQGSTLPRRSGA
CSLMFGSILPRRSGA

SEQ ID NO: 54014 - protein, 15 aa, Artificial Sequence
  Description of Artificial Sequence: Synthetic peptide
  Seed: CSLMQGSTLPRRSGA
CSLMFGSILPRRTGA

SEQ ID NO: 54015 - protein, 15 aa, Artificial Sequence
  Description of Artificial Sequence: Synthetic peptide
  Seed: CSLMQGSTLPRRSGA
CSLMFGSILPRRVGA

SEQ ID NO: 54016 - protein, 15 aa, Artificial Sequence
  Description of Artificial Sequence: Synthetic peptide
  Seed: CSLMQGSTLPRRSGA
CSLMFGSILQRRVGA

SEQ ID NO: 54017 - protein, 15 aa, Artificial Sequence
  Description of Artificial Sequence: Synthetic peptide
  Seed: CSLMQGSTLPRRSGA
CSLMFGSILSRRAGA

SEQ ID NO: 54018 - protein, 15 aa, Artificial Sequence
  Description of Artificial Sequence: Synthetic peptide
  Seed: CSLMQGSTLPRRSGA
CSLMFGSILSRRCGA

SEQ ID NO: 54019 - protein, 15 aa, Artificial Sequence
  Description of Artificial Sequence: Synthetic peptide
  Seed: CSLMQGSTLPRRSGA
CSLMFGSILSRRDGA

SEQ ID NO: 54020 - protein, 15 aa, Artificial Sequence
  Description of Artificial Sequence: Synthetic peptide
  Seed: CSLMQGSTLPRRSGA
CSLMFGSILSRRFGA

SEQ ID NO: 54021 - protein, 15 aa, Artificial Sequence
  Description of Artificial Sequence: Synthetic peptide
  Seed: CSLMQGSTLPRRSGA
CSLMFGSILSRRGGA

SEQ ID NO: 54022 - protein, 15 aa, Artificial Sequence
  Description of Artificial Sequence: Synthetic peptide
  Seed: CSLMQGSTLPRRSGA
CSLMFGSILSRRIGA

SEQ ID NO: 54023 - protein, 15 aa, Artificial Sequence
  Description of Artificial Sequence: Synthetic peptide
  Seed: CSLMQGSTLPRRSGA
CSLMFGSILSRRLGA

SEQ ID NO: 54024 - protein, 15 aa, Artificial Sequence
  Description of Artificial Sequence: Synthetic peptide
  Seed: CSLMQGSTLPRRSGA
CSLMFGSILSRRMGA

SEQ ID NO: 54025 - protein, 15 aa, Artificial Sequence
  Description of Artificial Sequence: Synthetic peptide
  Seed: CSLMQGSTLPRRSGA
CSLMFGSILSRRNGA

SEQ ID NO: 54026 - protein, 15 aa, Artificial Sequence
  Description of Artificial Sequence: Synthetic peptide
  Seed: CSLMQGSTLPRRSGA
CSLMFGSILSRRPGA

SEQ ID NO: 54027 - protein, 15 aa, Artificial Sequence
  Description of Artificial Sequence: Synthetic peptide
  Seed: CSLMQGSTLPRRSGA
CSLMFGSILSRRSGA

SEQ ID NO: 54028 - protein, 15 aa, Artificial Sequence
  Description of Artificial Sequence: Synthetic peptide
  Seed: CSLMQGSTLPRRSGA
CSLMFGSILSRRTGA

SEQ ID NO: 54029 - protein, 15 aa, Artificial Sequence
  Description of Artificial Sequence: Synthetic peptide
  Seed: CSLMQGSTLPRRSGA
CSLMFGSILSRRVGA

SEQ ID NO: 54030 - protein, 15 aa, Artificial Sequence
  Description of Artificial Sequence: Synthetic peptide
  Seed: CSLMQGSTLPRRSGA
CSLMFGSILSRRYGA

SEQ ID NO: 54031 - protein, 15 aa, Artificial Sequence
  Description of Artificial Sequence: Synthetic peptide
  Seed: CSLMQGSTLPRRSGA
CSLMFGSILTRRAGA

SEQ ID NO: 54032 - protein, 15 aa, Artificial Sequence
  Description of Artificial Sequence: Synthetic peptide
  Seed: CSLMQGSTLPRRSGA
CSLMFGSILTRRCGA

SEQ ID NO: 54033 - protein, 15 aa, Artificial Sequence
  Description of Artificial Sequence: Synthetic peptide
  Seed: CSLMQGSTLPRRSGA
CSLMFGSILTRRFGA

SEQ ID NO: 54034 - protein, 15 aa, Artificial Sequence
  Description of Artificial Sequence: Synthetic peptide
  Seed: CSLMQGSTLPRRSGA
CSLMFGSILTRRGGA

SEQ ID NO: 54035 - protein, 15 aa, Artificial Sequence
  Description of Artificial Sequence: Synthetic peptide
  Seed: CSLMQGSTLPRRSGA
CSLMFGSILTRRIGA

SEQ ID NO: 54036 - protein, 15 aa, Artificial Sequence
  Description of Artificial Sequence: Synthetic peptide
  Seed: CSLMQGSTLPRRSGA
CSLMFGSILTRRLGA

SEQ ID NO: 54037 - protein, 15 aa, Artificial Sequence
  Description of Artificial Sequence: Synthetic peptide
  Seed: CSLMQGSTLPRRSGA
CSLMFGSILTRRMGA

SEQ ID NO: 54038 - protein, 15 aa, Artificial Sequence
  Description of Artificial Sequence: Synthetic peptide
  Seed: CSLMQGSTLPRRSGA
CSLMFGSILTRRNGA

SEQ ID NO: 54039 - protein, 15 aa, Artificial Sequence
  Description of Artificial Sequence: Synthetic peptide
  Seed: CSLMQGSTLPRRSGA
CSLMFGSILTRRSGA

SEQ ID NO: 54040 - protein, 15 aa, Artificial Sequence
  Description of Artificial Sequence: Synthetic peptide
  Seed: CSLMQGSTLPRRSGA
CSLMFGSILTRRTGA

SEQ ID NO: 54041 - protein, 15 aa, Artificial Sequence
  Description of Artificial Sequence: Synthetic peptide
  Seed: CSLMQGSTLPRRSGA
CSLMFGSILTRRVGA

SEQ ID NO: 54042 - protein, 15 aa, Artificial Sequence
  Description of Artificial Sequence: Synthetic peptide
  Seed: CSLMQGSTLPRRSGA
CSLMFGSILVRRAGA

SEQ ID NO: 54043 - protein, 15 aa, Artificial Sequence
  Description of Artificial Sequence: Synthetic peptide
  Seed: CSLMQGSTLPRRSGA
CSLMFGSILVRRGGA

SEQ ID NO: 54044 - protein, 15 aa, Artificial Sequence
  Description of Artificial Sequence: Synthetic peptide
  Seed: CSLMQGSTLPRRSGA
CSLMFGSILVRRIGA

SEQ ID NO: 54045 - protein, 15 aa, Artificial Sequence
  Description of Artificial Sequence: Synthetic peptide
  Seed: CSLMQGSTLPRRSGA
CSLMFGSILVRRLGA

SEQ ID NO: 54046 - protein, 15 aa, Artificial Sequence
  Description of Artificial Sequence: Synthetic peptide
  Seed: CSLMQGSTLPRRSGA
CSLMFGSILVRRMGA

SEQ ID NO: 54047 - protein, 15 aa, Artificial Sequence
  Description of Artificial Sequence: Synthetic peptide
  Seed: CSLMQGSTLPRRSGA
CSLMFGSILVRRNGA

SEQ ID NO: 54048 - protein, 15 aa, Artificial Sequence
  Description of Artificial Sequence: Synthetic peptide
  Seed: CSLMQGSTLPRRSGA
CSLMFGSILVRRSGA

SEQ ID NO: 54049 - protein, 15 aa, Artificial Sequence
  Description of Artificial Sequence: Synthetic peptide
  Seed: CSLMQGSTLPRRSGA
CSLMFGSILVRRTGA

SEQ ID NO: 54050 - protein, 15 aa, Artificial Sequence
  Description of Artificial Sequence: Synthetic peptide
  Seed: CSLMQGSTLPRRSGA
CSLMFGSILVRRVGA

SEQ ID NO: 54051 - protein, 15 aa, Artificial Sequence
  Description of Artificial Sequence: Synthetic peptide
  Seed: CSLMQGSTLPRRSGA
CSLMFGSKLARRIGA

SEQ ID NO: 54052 - protein, 15 aa, Artificial Sequence
  Description of Artificial Sequence: Synthetic peptide
  Seed: CSLMQGSTLPRRSGA
CSLMFGSKLARRLGA

SEQ ID NO: 54053 - protein, 15 aa, Artificial Sequence
  Description of Artificial Sequence: Synthetic peptide
  Seed: CSLMQGSTLPRRSGA
CSLMFGSKLARRVGA

SEQ ID NO: 54054 - protein, 15 aa, Artificial Sequence
  Description of Artificial Sequence: Synthetic peptide
  Seed: CSLMQGSTLPRRSGA
CSLMFGSKLSRRIGA

SEQ ID NO: 54055 - protein, 15 aa, Artificial Sequence
  Description of Artificial Sequence: Synthetic peptide
  Seed: CSLMQGSTLPRRSGA
CSLMFGSKLSRRLGA

SEQ ID NO: 54056 - protein, 15 aa, Artificial Sequence
  Description of Artificial Sequence: Synthetic peptide
  Seed: CSLMQGSTLPRRSGA
CSLMFGSKLSRRVGA

SEQ ID NO: 54057 - protein, 15 aa, Artificial Sequence
  Description of Artificial Sequence: Synthetic peptide
  Seed: CSLMQGSTLPRRSGA
CSLMFGSLLARRAGA

SEQ ID NO: 54058 - protein, 15 aa, Artificial Sequence
  Description of Artificial Sequence: Synthetic peptide
  Seed: CSLMQGSTLPRRSGA
CSLMFGSLLARRCGA

SEQ ID NO: 54059 - protein, 15 aa, Artificial Sequence
  Description of Artificial Sequence: Synthetic peptide
  Seed: CSLMQGSTLPRRSGA
CSLMFGSLLARRDGA

SEQ ID NO: 54060 - protein, 15 aa, Artificial Sequence
  Description of Artificial Sequence: Synthetic peptide
  Seed: CSLMQGSTLPRRSGA
CSLMFGSLLARREGA

SEQ ID NO: 54061 - protein, 15 aa, Artificial Sequence
  Description of Artificial Sequence: Synthetic peptide
  Seed: CSLMQGSTLPRRSGA
CSLMFGSLLARRFGA

SEQ ID NO: 54062 - protein, 15 aa, Artificial Sequence
  Description of Artificial Sequence: Synthetic peptide
  Seed: CSLMQGSTLPRRSGA
CSLMFGSLLARRGGA

SEQ ID NO: 54063 - protein, 15 aa, Artificial Sequence
  Description of Artificial Sequence: Synthetic peptide
  Seed: CSLMQGSTLPRRSGA
CSLMFGSLLARRHGA

SEQ ID NO: 54064 - protein, 15 aa, Artificial Sequence
  Description of Artificial Sequence: Synthetic peptide
  Seed: CSLMQGSTLPRRSGA
CSLMFGSLLARRIGA

SEQ ID NO: 54065 - protein, 15 aa, Artificial Sequence
  Description of Artificial Sequence: Synthetic peptide
  Seed: CSLMQGSTLPRRSGA
CSLMFGSLLARRKGA

SEQ ID NO: 54066 - protein, 15 aa, Artificial Sequence
  Description of Artificial Sequence: Synthetic peptide
  Seed: CSLMQGSTLPRRSGA
CSLMFGSLLARRLGA

SEQ ID NO: 54067 - protein, 15 aa, Artificial Sequence
  Description of Artificial Sequence: Synthetic peptide
  Seed: CSLMQGSTLPRRSGA
CSLMFGSLLARRMGA

SEQ ID NO: 54068 - protein, 15 aa, Artificial Sequence
  Description of Artificial Sequence: Synthetic peptide
  Seed: CSLMQGSTLPRRSGA
CSLMFGSLLARRNGA

SEQ ID NO: 54069 - protein, 15 aa, Artificial Sequence
  Description of Artificial Sequence: Synthetic peptide
  Seed: CSLMQGSTLPRRSGA
CSLMFGSLLARRPGA

SEQ ID NO: 54070 - protein, 15 aa, Artificial Sequence
  Description of Artificial Sequence: Synthetic peptide
  Seed: CSLMQGSTLPRRSGA
CSLMFGSLLARRQGA

SEQ ID NO: 54071 - protein, 15 aa, Artificial Sequence
  Description of Artificial Sequence: Synthetic peptide
  Seed: CSLMQGSTLPRRSGA
CSLMFGSLLARRRGA

SEQ ID NO: 54072 - protein, 15 aa, Artificial Sequence
  Description of Artificial Sequence: Synthetic peptide
  Seed: CSLMQGSTLPRRSGA
CSLMFGSLLARRSGA

SEQ ID NO: 54073 - protein, 15 aa, Artificial Sequence
  Description of Artificial Sequence: Synthetic peptide
  Seed: CSLMQGSTLPRRSGA
CSLMFGSLLARRTGA

SEQ ID NO: 54074 - protein, 15 aa, Artificial Sequence
  Description of Artificial Sequence: Synthetic peptide
  Seed: CSLMQGSTLPRRSGA
CSLMFGSLLARRVGA

SEQ ID NO: 54075 - protein, 15 aa, Artificial Sequence
  Description of Artificial Sequence: Synthetic peptide
  Seed: CSLMQGSTLPRRSGA
CSLMFGSLLARRWGA

SEQ ID NO: 54076 - protein, 15 aa, Artificial Sequence
  Description of Artificial Sequence: Synthetic peptide
  Seed: CSLMQGSTLPRRSGA
CSLMFGSLLARRYGA

SEQ ID NO: 54077 - protein, 15 aa, Artificial Sequence
  Description of Artificial Sequence: Synthetic peptide
  Seed: CSLMQGSTLPRRSGA
CSLMFGSLLCRRIGA

SEQ ID NO: 54078 - protein, 15 aa, Artificial Sequence
  Description of Artificial Sequence: Synthetic peptide
  Seed: CSLMQGSTLPRRSGA
CSLMFGSLLCRRLGA

SEQ ID NO: 54079 - protein, 15 aa, Artificial Sequence
  Description of Artificial Sequence: Synthetic peptide
  Seed: CSLMQGSTLPRRSGA
CSLMFGSLLCRRVGA

SEQ ID NO: 54080 - protein, 15 aa, Artificial Sequence
  Description of Artificial Sequence: Synthetic peptide
  Seed: CSLMQGSTLPRRSGA
CSLMFGSLLDRRIGA

SEQ ID NO: 54081 - protein, 15 aa, Artificial Sequence
  Description of Artificial Sequence: Synthetic peptide
  Seed: CSLMQGSTLPRRSGA
CSLMFGSLLDRRLGA

SEQ ID NO: 54082 - protein, 15 aa, Artificial Sequence
  Description of Artificial Sequence: Synthetic peptide
  Seed: CSLMQGSTLPRRSGA
CSLMFGSLLDRRVGA

SEQ ID NO: 54083 - protein, 15 aa, Artificial Sequence
  Description of Artificial Sequence: Synthetic peptide
  Seed: CSLMQGSTLPRRSGA
CSLMFGSLLERRIGA

SEQ ID NO: 54084 - protein, 15 aa, Artificial Sequence
  Description of Artificial Sequence: Synthetic peptide
  Seed: CSLMQGSTLPRRSGA
CSLMFGSLLERRLGA

SEQ ID NO: 54085 - protein, 15 aa, Artificial Sequence
  Description of Artificial Sequence: Synthetic peptide
  Seed: CSLMQGSTLPRRSGA
CSLMFGSLLERRVGA

SEQ ID NO: 54086 - protein, 15 aa, Artificial Sequence
  Description of Artificial Sequence: Synthetic peptide
  Seed: CSLMQGSTLPRRSGA
CSLMFGSLLGRRAGA

SEQ ID NO: 54087 - protein, 15 aa, Artificial Sequence
  Description of Artificial Sequence: Synthetic peptide
  Seed: CSLMQGSTLPRRSGA
CSLMFGSLLGRRCGA

SEQ ID NO: 54088 - protein, 15 aa, Artificial Sequence
  Description of Artificial Sequence: Synthetic peptide
  Seed: CSLMQGSTLPRRSGA
CSLMFGSLLGRRFGA

SEQ ID NO: 54089 - protein, 15 aa, Artificial Sequence
  Description of Artificial Sequence: Synthetic peptide
  Seed: CSLMQGSTLPRRSGA
CSLMFGSLLGRRGGA

SEQ ID NO: 54090 - protein, 15 aa, Artificial Sequence
  Description of Artificial Sequence: Synthetic peptide
  Seed: CSLMQGSTLPRRSGA
CSLMFGSLLGRRHGA

SEQ ID NO: 54091 - protein, 15 aa, Artificial Sequence
  Description of Artificial Sequence: Synthetic peptide
  Seed: CSLMQGSTLPRRSGA
CSLMFGSLLGRRIGA

SEQ ID NO: 54092 - protein, 15 aa, Artificial Sequence
  Description of Artificial Sequence: Synthetic peptide
  Seed: CSLMQGSTLPRRSGA
CSLMFGSLLGRRLGA

SEQ ID NO: 54093 - protein, 15 aa, Artificial Sequence
  Description of Artificial Sequence: Synthetic peptide
  Seed: CSLMQGSTLPRRSGA
CSLMFGSLLGRRMGA

SEQ ID NO: 54094 - protein, 15 aa, Artificial Sequence
  Description of Artificial Sequence: Synthetic peptide
  Seed: CSLMQGSTLPRRSGA
CSLMFGSLLGRRNGA

SEQ ID NO: 54095 - protein, 15 aa, Artificial Sequence
  Description of Artificial Sequence: Synthetic peptide
  Seed: CSLMQGSTLPRRSGA
CSLMFGSLLGRRPGA

SEQ ID NO: 54096 - protein, 15 aa, Artificial Sequence
  Description of Artificial Sequence: Synthetic peptide
  Seed: CSLMQGSTLPRRSGA
CSLMFGSLLGRRQGA

SEQ ID NO: 54097 - protein, 15 aa, Artificial Sequence
  Description of Artificial Sequence: Synthetic peptide
  Seed: CSLMQGSTLPRRSGA
CSLMFGSLLGRRSGA

SEQ ID NO: 54098 - protein, 15 aa, Artificial Sequence
  Description of Artificial Sequence: Synthetic peptide
  Seed: CSLMQGSTLPRRSGA
CSLMFGSLLGRRTGA

SEQ ID NO: 54099 - protein, 15 aa, Artificial Sequence
  Description of Artificial Sequence: Synthetic peptide
  Seed: CSLMQGSTLPRRSGA
CSLMFGSLLGRRVGA

SEQ ID NO: 54100 - protein, 15 aa, Artificial Sequence
  Description of Artificial Sequence: Synthetic peptide
  Seed: CSLMQGSTLPRRSGA
CSLMFGSLLGRRWGA

SEQ ID NO: 54101 - protein, 15 aa, Artificial Sequence
  Description of Artificial Sequence: Synthetic peptide
  Seed: CSLMQGSTLPRRSGA
CSLMFGSLLGRRYGA

SEQ ID NO: 54102 - protein, 15 aa, Artificial Sequence
  Description of Artificial Sequence: Synthetic peptide
  Seed: CSLMQGSTLPRRSGA
CSLMFGSLLHRRIGA

SEQ ID NO: 54103 - protein, 15 aa, Artificial Sequence
  Description of Artificial Sequence: Synthetic peptide
  Seed: CSLMQGSTLPRRSGA
CSLMFGSLLHRRLGA

SEQ ID NO: 54104 - protein, 15 aa, Artificial Sequence
  Description of Artificial Sequence: Synthetic peptide
  Seed: CSLMQGSTLPRRSGA
CSLMFGSLLHRRVGA

SEQ ID NO: 54105 - protein, 15 aa, Artificial Sequence
  Description of Artificial Sequence: Synthetic peptide
  Seed: CSLMQGSTLPRRSGA
CSLMFGSLLIRRAGA

SEQ ID NO: 54106 - protein, 15 aa, Artificial Sequence
  Description of Artificial Sequence: Synthetic peptide
  Seed: CSLMQGSTLPRRSGA
CSLMFGSLLIRRIGA

SEQ ID NO: 54107 - protein, 15 aa, Artificial Sequence
  Description of Artificial Sequence: Synthetic peptide
  Seed: CSLMQGSTLPRRSGA
CSLMFGSLLIRRLGA

SEQ ID NO: 54108 - protein, 15 aa, Artificial Sequence
  Description of Artificial Sequence: Synthetic peptide
  Seed: CSLMQGSTLPRRSGA
CSLMFGSLLIRRMGA

SEQ ID NO: 54109 - protein, 15 aa, Artificial Sequence
  Description of Artificial Sequence: Synthetic peptide
  Seed: CSLMQGSTLPRRSGA
CSLMFGSLLIRRNGA

SEQ ID NO: 54110 - protein, 15 aa, Artificial Sequence
  Description of Artificial Sequence: Synthetic peptide
  Seed: CSLMQGSTLPRRSGA
CSLMFGSLLIRRSGA

SEQ ID NO: 54111 - protein, 15 aa, Artificial Sequence
  Description of Artificial Sequence: Synthetic peptide
  Seed: CSLMQGSTLPRRSGA
CSLMFGSLLIRRTGA

SEQ ID NO: 54112 - protein, 15 aa, Artificial Sequence
  Description of Artificial Sequence: Synthetic peptide
  Seed: CSLMQGSTLPRRSGA
CSLMFGSLLIRRVGA

SEQ ID NO: 54113 - protein, 15 aa, Artificial Sequence
  Description of Artificial Sequence: Synthetic peptide
  Seed: CSLMQGSTLPRRSGA
CSLMFGSLLLRRAGA

SEQ ID NO: 54114 - protein, 15 aa, Artificial Sequence
  Description of Artificial Sequence: Synthetic peptide
  Seed: CSLMQGSTLPRRSGA
CSLMFGSLLLRRIGA

SEQ ID NO: 54115 - protein, 15 aa, Artificial Sequence
  Description of Artificial Sequence: Synthetic peptide
  Seed: CSLMQGSTLPRRSGA
CSLMFGSLLLRRLGA

SEQ ID NO: 54116 - protein, 15 aa, Artificial Sequence
  Description of Artificial Sequence: Synthetic peptide
  Seed: CSLMQGSTLPRRSGA
CSLMFGSLLLRRVGA

SEQ ID NO: 54117 - protein, 15 aa, Artificial Sequence
  Description of Artificial Sequence: Synthetic peptide
  Seed: CSLMQGSTLPRRSGA
CSLMFGSLLMRRAGA

SEQ ID NO: 54118 - protein, 15 aa, Artificial Sequence
  Description of Artificial Sequence: Synthetic peptide
  Seed: CSLMQGSTLPRRSGA
CSLMFGSLLMRRIGA

SEQ ID NO: 54119 - protein, 15 aa, Artificial Sequence
  Description of Artificial Sequence: Synthetic peptide
  Seed: CSLMQGSTLPRRSGA
CSLMFGSLLMRRLGA

SEQ ID NO: 54120 - protein, 15 aa, Artificial Sequence
  Description of Artificial Sequence: Synthetic peptide
  Seed: CSLMQGSTLPRRSGA
CSLMFGSLLMRRVGA

SEQ ID NO: 54121 - protein, 15 aa, Artificial Sequence
  Description of Artificial Sequence: Synthetic peptide
  Seed: CSLMQGSTLPRRSGA
CSLMFGSLLNRRAGA

SEQ ID NO: 54122 - protein, 15 aa, Artificial Sequence
  Description of Artificial Sequence: Synthetic peptide
  Seed: CSLMQGSTLPRRSGA
CSLMFGSLLNRRCGA

SEQ ID NO: 54123 - protein, 15 aa, Artificial Sequence
  Description of Artificial Sequence: Synthetic peptide
  Seed: CSLMQGSTLPRRSGA
CSLMFGSLLNRRFGA

SEQ ID NO: 54124 - protein, 15 aa, Artificial Sequence
  Description of Artificial Sequence: Synthetic peptide
  Seed: CSLMQGSTLPRRSGA
CSLMFGSLLNRRGGA

SEQ ID NO: 54125 - protein, 15 aa, Artificial Sequence
  Description of Artificial Sequence: Synthetic peptide
  Seed: CSLMQGSTLPRRSGA
CSLMFGSLLNRRIGA

SEQ ID NO: 54126 - protein, 15 aa, Artificial Sequence
  Description of Artificial Sequence: Synthetic peptide
  Seed: CSLMQGSTLPRRSGA
CSLMFGSLLNRRLGA

SEQ ID NO: 54127 - protein, 15 aa, Artificial Sequence
  Description of Artificial Sequence: Synthetic peptide
  Seed: CSLMQGSTLPRRSGA
CSLMFGSLLNRRMGA

SEQ ID NO: 54128 - protein, 15 aa, Artificial Sequence
  Description of Artificial Sequence: Synthetic peptide
  Seed: CSLMQGSTLPRRSGA
CSLMFGSLLNRRNGA

SEQ ID NO: 54129 - protein, 15 aa, Artificial Sequence
  Description of Artificial Sequence: Synthetic peptide
  Seed: CSLMQGSTLPRRSGA
CSLMFGSLLNRRSGA

SEQ ID NO: 54130 - protein, 15 aa, Artificial Sequence
  Description of Artificial Sequence: Synthetic peptide
  Seed: CSLMQGSTLPRRSGA
CSLMFGSLLNRRTGA

SEQ ID NO: 54131 - protein, 15 aa, Artificial Sequence
  Description of Artificial Sequence: Synthetic peptide
  Seed: CSLMQGSTLPRRSGA
CSLMFGSLLNRRVGA

SEQ ID NO: 54132 - protein, 15 aa, Artificial Sequence
  Description of Artificial Sequence: Synthetic peptide
  Seed: CSLMQGSTLPRRSGA
CSLMFGSLLPRRAGA

SEQ ID NO: 54133 - protein, 15 aa, Artificial Sequence
  Description of Artificial Sequence: Synthetic peptide
  Seed: CSLMQGSTLPRRSGA
CSLMFGSLLPRRCGA

SEQ ID NO: 54134 - protein, 15 aa, Artificial Sequence
  Description of Artificial Sequence: Synthetic peptide
  Seed: CSLMQGSTLPRRSGA
CSLMFGSLLPRRDGA

SEQ ID NO: 54135 - protein, 15 aa, Artificial Sequence
  Description of Artificial Sequence: Synthetic peptide
  Seed: CSLMQGSTLPRRSGA
CSLMFGSLLPRRFGA

SEQ ID NO: 54136 - protein, 15 aa, Artificial Sequence
  Description of Artificial Sequence: Synthetic peptide
  Seed: CSLMQGSTLPRRSGA
CSLMFGSLLPRRGGA

SEQ ID NO: 54137 - protein, 15 aa, Artificial Sequence
  Description of Artificial Sequence: Synthetic peptide
  Seed: CSLMQGSTLPRRSGA
CSLMFGSLLPRRHGA

SEQ ID NO: 54138 - protein, 15 aa, Artificial Sequence
  Description of Artificial Sequence: Synthetic peptide
  Seed: CSLMQGSTLPRRSGA
CSLMFGSLLPRRIGA

SEQ ID NO: 54139 - protein, 15 aa, Artificial Sequence
  Description of Artificial Sequence: Synthetic peptide
  Seed: CSLMQGSTLPRRSGA
CSLMFGSLLPRRLGA

SEQ ID NO: 54140 - protein, 15 aa, Artificial Sequence
  Description of Artificial Sequence: Synthetic peptide
  Seed: CSLMQGSTLPRRSGA
CSLMFGSLLPRRMGA

SEQ ID NO: 54141 - protein, 15 aa, Artificial Sequence
  Description of Artificial Sequence: Synthetic peptide
  Seed: CSLMQGSTLPRRSGA
CSLMFGSLLPRRNGA

SEQ ID NO: 54142 - protein, 15 aa, Artificial Sequence
  Description of Artificial Sequence: Synthetic peptide
  Seed: CSLMQGSTLPRRSGA
CSLMFGSLLPRRPGA

SEQ ID NO: 54143 - protein, 15 aa, Artificial Sequence
  Description of Artificial Sequence: Synthetic peptide
  Seed: CSLMQGSTLPRRSGA
CSLMFGSLLPRRQGA

SEQ ID NO: 54144 - protein, 15 aa, Artificial Sequence
  Description of Artificial Sequence: Synthetic peptide
  Seed: CSLMQGSTLPRRSGA
CSLMFGSLLPRRSGA

SEQ ID NO: 54145 - protein, 15 aa, Artificial Sequence
  Description of Artificial Sequence: Synthetic peptide
  Seed: CSLMQGSTLPRRSGA
CSLMFGSLLPRRTGA

SEQ ID NO: 54146 - protein, 15 aa, Artificial Sequence
  Description of Artificial Sequence: Synthetic peptide
  Seed: CSLMQGSTLPRRSGA
CSLMFGSLLPRRVGA

SEQ ID NO: 54147 - protein, 15 aa, Artificial Sequence
  Description of Artificial Sequence: Synthetic peptide
  Seed: CSLMQGSTLPRRSGA
CSLMFGSLLPRRWGA

SEQ ID NO: 54148 - protein, 15 aa, Artificial Sequence
  Description of Artificial Sequence: Synthetic peptide
  Seed: CSLMQGSTLPRRSGA
CSLMFGSLLPRRYGA

SEQ ID NO: 54149 - protein, 15 aa, Artificial Sequence
  Description of Artificial Sequence: Synthetic peptide
  Seed: CSLMQGSTLPRRSGA
CSLMFGSLLQRRAGA

SEQ ID NO: 54150 - protein, 15 aa, Artificial Sequence
  Description of Artificial Sequence: Synthetic peptide
  Seed: CSLMQGSTLPRRSGA
CSLMFGSLLQRRIGA

SEQ ID NO: 54151 - protein, 15 aa, Artificial Sequence
  Description of Artificial Sequence: Synthetic peptide
  Seed: CSLMQGSTLPRRSGA
CSLMFGSLLQRRLGA

SEQ ID NO: 54152 - protein, 15 aa, Artificial Sequence
  Description of Artificial Sequence: Synthetic peptide
  Seed: CSLMQGSTLPRRSGA
CSLMFGSLLQRRVGA

SEQ ID NO: 54153 - protein, 15 aa, Artificial Sequence
  Description of Artificial Sequence: Synthetic peptide
  Seed: CSLMQGSTLPRRSGA
CSLMFGSLLSRRAGA

SEQ ID NO: 54154 - protein, 15 aa, Artificial Sequence
  Description of Artificial Sequence: Synthetic peptide
  Seed: CSLMQGSTLPRRSGA
CSLMFGSLLSRRCGA

SEQ ID NO: 54155 - protein, 15 aa, Artificial Sequence
  Description of Artificial Sequence: Synthetic peptide
  Seed: CSLMQGSTLPRRSGA
CSLMFGSLLSRRDGA

SEQ ID NO: 54156 - protein, 15 aa, Artificial Sequence
  Description of Artificial Sequence: Synthetic peptide
  Seed: CSLMQGSTLPRRSGA
CSLMFGSLLSRREGA

SEQ ID NO: 54157 - protein, 15 aa, Artificial Sequence
  Description of Artificial Sequence: Synthetic peptide
  Seed: CSLMQGSTLPRRSGA
CSLMFGSLLSRRFGA

SEQ ID NO: 54158 - protein, 15 aa, Artificial Sequence
  Description of Artificial Sequence: Synthetic peptide
  Seed: CSLMQGSTLPRRSGA
CSLMFGSLLSRRGGA

SEQ ID NO: 54159 - protein, 15 aa, Artificial Sequence
  Description of Artificial Sequence: Synthetic peptide
  Seed: CSLMQGSTLPRRSGA
CSLMFGSLLSRRHGA

SEQ ID NO: 54160 - protein, 15 aa, Artificial Sequence
  Description of Artificial Sequence: Synthetic peptide
  Seed: CSLMQGSTLPRRSGA
CSLMFGSLLSRRIGA

SEQ ID NO: 54161 - protein, 15 aa, Artificial Sequence
  Description of Artificial Sequence: Synthetic peptide
  Seed: CSLMQGSTLPRRSGA
CSLMFGSLLSRRLGA

SEQ ID NO: 54162 - protein, 15 aa, Artificial Sequence
  Description of Artificial Sequence: Synthetic peptide
  Seed: CSLMQGSTLPRRSGA
CSLMFGSLLSRRMGA

SEQ ID NO: 54163 - protein, 15 aa, Artificial Sequence
  Description of Artificial Sequence: Synthetic peptide
  Seed: CSLMQGSTLPRRSGA
CSLMFGSLLSRRNGA

SEQ ID NO: 54164 - protein, 15 aa, Artificial Sequence
  Description of Artificial Sequence: Synthetic peptide
  Seed: CSLMQGSTLPRRSGA
CSLMFGSLLSRRPGA

SEQ ID NO: 54165 - protein, 15 aa, Artificial Sequence
  Description of Artificial Sequence: Synthetic peptide
  Seed: CSLMQGSTLPRRSGA
CSLMFGSLLSRRQGA

SEQ ID NO: 54166 - protein, 15 aa, Artificial Sequence
  Description of Artificial Sequence: Synthetic peptide
  Seed: CSLMQGSTLPRRSGA
CSLMFGSLLSRRSGA

SEQ ID NO: 54167 - protein, 15 aa, Artificial Sequence
  Description of Artificial Sequence: Synthetic peptide
  Seed: CSLMQGSTLPRRSGA
CSLMFGSLLSRRTGA

SEQ ID NO: 54168 - protein, 15 aa, Artificial Sequence
  Description of Artificial Sequence: Synthetic peptide
  Seed: CSLMQGSTLPRRSGA
CSLMFGSLLSRRVGA

SEQ ID NO: 54169 - protein, 15 aa, Artificial Sequence
  Description of Artificial Sequence: Synthetic peptide
  Seed: CSLMQGSTLPRRSGA
CSLMFGSLLSRRWGA

SEQ ID NO: 54170 - protein, 15 aa, Artificial Sequence
  Description of Artificial Sequence: Synthetic peptide
  Seed: CSLMQGSTLPRRSGA
CSLMFGSLLSRRYGA

SEQ ID NO: 54171 - protein, 15 aa, Artificial Sequence
  Description of Artificial Sequence: Synthetic peptide
  Seed: CSLMQGSTLPRRSGA
CSLMFGSLLTRRAGA

SEQ ID NO: 54172 - protein, 15 aa, Artificial Sequence
  Description of Artificial Sequence: Synthetic peptide
  Seed: CSLMQGSTLPRRSGA
CSLMFGSLLTRRCGA

SEQ ID NO: 54173 - protein, 15 aa, Artificial Sequence
  Description of Artificial Sequence: Synthetic peptide
  Seed: CSLMQGSTLPRRSGA
CSLMFGSLLTRRDGA

SEQ ID NO: 54174 - protein, 15 aa, Artificial Sequence
  Description of Artificial Sequence: Synthetic peptide
  Seed: CSLMQGSTLPRRSGA
CSLMFGSLLTRRFGA

SEQ ID NO: 54175 - protein, 15 aa, Artificial Sequence
  Description of Artificial Sequence: Synthetic peptide
  Seed: CSLMQGSTLPRRSGA
CSLMFGSLLTRRGGA

SEQ ID NO: 54176 - protein, 15 aa, Artificial Sequence
  Description of Artificial Sequence: Synthetic peptide
  Seed: CSLMQGSTLPRRSGA
CSLMFGSLLTRRHGA

SEQ ID NO: 54177 - protein, 15 aa, Artificial Sequence
  Description of Artificial Sequence: Synthetic peptide
  Seed: CSLMQGSTLPRRSGA
CSLMFGSLLTRRIGA

SEQ ID NO: 54178 - protein, 15 aa, Artificial Sequence
  Description of Artificial Sequence: Synthetic peptide
  Seed: CSLMQGSTLPRRSGA
CSLMFGSLLTRRLGA

SEQ ID NO: 54179 - protein, 15 aa, Artificial Sequence
  Description of Artificial Sequence: Synthetic peptide
  Seed: CSLMQGSTLPRRSGA
CSLMFGSLLTRRMGA

SEQ ID NO: 54180 - protein, 15 aa, Artificial Sequence
  Description of Artificial Sequence: Synthetic peptide
  Seed: CSLMQGSTLPRRSGA
CSLMFGSLLTRRNGA

SEQ ID NO: 54181 - protein, 15 aa, Artificial Sequence
  Description of Artificial Sequence: Synthetic peptide
  Seed: CSLMQGSTLPRRSGA
CSLMFGSLLTRRPGA

SEQ ID NO: 54182 - protein, 15 aa, Artificial Sequence
  Description of Artificial Sequence: Synthetic peptide
  Seed: CSLMQGSTLPRRSGA
CSLMFGSLLTRRQGA

SEQ ID NO: 54183 - protein, 15 aa, Artificial Sequence
  Description of Artificial Sequence: Synthetic peptide
  Seed: CSLMQGSTLPRRSGA
CSLMFGSLLTRRSGA

SEQ ID NO: 54184 - protein, 15 aa, Artificial Sequence
  Description of Artificial Sequence: Synthetic peptide
  Seed: CSLMQGSTLPRRSGA
CSLMFGSLLTRRTGA

SEQ ID NO: 54185 - protein, 15 aa, Artificial Sequence
  Description of Artificial Sequence: Synthetic peptide
  Seed: CSLMQGSTLPRRSGA
CSLMFGSLLTRRVGA

SEQ ID NO: 54186 - protein, 15 aa, Artificial Sequence
  Description of Artificial Sequence: Synthetic peptide
  Seed: CSLMQGSTLPRRSGA
CSLMFGSLLTRRYGA

SEQ ID NO: 54187 - protein, 15 aa, Artificial Sequence
  Description of Artificial Sequence: Synthetic peptide
  Seed: CSLMQGSTLPRRSGA
CSLMFGSLLVRRAGA

SEQ ID NO: 54188 - protein, 15 aa, Artificial Sequence
  Description of Artificial Sequence: Synthetic peptide
  Seed: CSLMQGSTLPRRSGA
CSLMFGSLLVRRCGA

SEQ ID NO: 54189 - protein, 15 aa, Artificial Sequence
  Description of Artificial Sequence: Synthetic peptide
  Seed: CSLMQGSTLPRRSGA
CSLMFGSLLVRRDGA

SEQ ID NO: 54190 - protein, 15 aa, Artificial Sequence
  Description of Artificial Sequence: Synthetic peptide
  Seed: CSLMQGSTLPRRSGA
CSLMFGSLLVRRFGA

SEQ ID NO: 54191 - protein, 15 aa, Artificial Sequence
  Description of Artificial Sequence: Synthetic peptide
  Seed: CSLMQGSTLPRRSGA
CSLMFGSLLVRRGGA

SEQ ID NO: 54192 - protein, 15 aa, Artificial Sequence
  Description of Artificial Sequence: Synthetic peptide
  Seed: CSLMQGSTLPRRSGA
CSLMFGSLLVRRHGA

SEQ ID NO: 54193 - protein, 15 aa, Artificial Sequence
  Description of Artificial Sequence: Synthetic peptide
  Seed: CSLMQGSTLPRRSGA
CSLMFGSLLVRRIGA

SEQ ID NO: 54194 - protein, 15 aa, Artificial Sequence
  Description of Artificial Sequence: Synthetic peptide
  Seed: CSLMQGSTLPRRSGA
CSLMFGSLLVRRLGA

SEQ ID NO: 54195 - protein, 15 aa, Artificial Sequence
  Description of Artificial Sequence: Synthetic peptide
  Seed: CSLMQGSTLPRRSGA
CSLMFGSLLVRRMGA

SEQ ID NO: 54196 - protein, 15 aa, Artificial Sequence
  Description of Artificial Sequence: Synthetic peptide
  Seed: CSLMQGSTLPRRSGA
CSLMFGSLLVRRNGA

SEQ ID NO: 54197 - protein, 15 aa, Artificial Sequence
  Description of Artificial Sequence: Synthetic peptide
  Seed: CSLMQGSTLPRRSGA
CSLMFGSLLVRRSGA

SEQ ID NO: 54198 - protein, 15 aa, Artificial Sequence
  Description of Artificial Sequence: Synthetic peptide
  Seed: CSLMQGSTLPRRSGA
CSLMFGSLLVRRTGA

SEQ ID NO: 54199 - protein, 15 aa, Artificial Sequence
  Description of Artificial Sequence: Synthetic peptide
  Seed: CSLMQGSTLPRRSGA
CSLMFGSLLVRRVGA

SEQ ID NO: 54200 - protein, 15 aa, Artificial Sequence
  Description of Artificial Sequence: Synthetic peptide
  Seed: CSLMQGSTLPRRSGA
CSLMFGSMLARRAGA

SEQ ID NO: 54201 - protein, 15 aa, Artificial Sequence
  Description of Artificial Sequence: Synthetic peptide
  Seed: CSLMQGSTLPRRSGA
CSLMFGSMLARRCGA

SEQ ID NO: 54202 - protein, 15 aa, Artificial Sequence
  Description of Artificial Sequence: Synthetic peptide
  Seed: CSLMQGSTLPRRSGA
CSLMFGSMLARRDGA

SEQ ID NO: 54203 - protein, 15 aa, Artificial Sequence
  Description of Artificial Sequence: Synthetic peptide
  Seed: CSLMQGSTLPRRSGA
CSLMFGSMLARREGA

SEQ ID NO: 54204 - protein, 15 aa, Artificial Sequence
  Description of Artificial Sequence: Synthetic peptide
  Seed: CSLMQGSTLPRRSGA
CSLMFGSMLARRFGA

SEQ ID NO: 54205 - protein, 15 aa, Artificial Sequence
  Description of Artificial Sequence: Synthetic peptide
  Seed: CSLMQGSTLPRRSGA
CSLMFGSMLARRGGA

SEQ ID NO: 54206 - protein, 15 aa, Artificial Sequence
  Description of Artificial Sequence: Synthetic peptide
  Seed: CSLMQGSTLPRRSGA
CSLMFGSMLARRHGA

SEQ ID NO: 54207 - protein, 15 aa, Artificial Sequence
  Description of Artificial Sequence: Synthetic peptide
  Seed: CSLMQGSTLPRRSGA
CSLMFGSMLARRIGA

SEQ ID NO: 54208 - protein, 15 aa, Artificial Sequence
  Description of Artificial Sequence: Synthetic peptide
  Seed: CSLMQGSTLPRRSGA
CSLMFGSMLARRKGA

SEQ ID NO: 54209 - protein, 15 aa, Artificial Sequence
  Description of Artificial Sequence: Synthetic peptide
  Seed: CSLMQGSTLPRRSGA
CSLMFGSMLARRLGA

SEQ ID NO: 54210 - protein, 15 aa, Artificial Sequence
  Description of Artificial Sequence: Synthetic peptide
  Seed: CSLMQGSTLPRRSGA
CSLMFGSMLARRMGA

SEQ ID NO: 54211 - protein, 15 aa, Artificial Sequence
  Description of Artificial Sequence: Synthetic peptide
  Seed: CSLMQGSTLPRRSGA
CSLMFGSMLARRNGA

SEQ ID NO: 54212 - protein, 15 aa, Artificial Sequence
  Description of Artificial Sequence: Synthetic peptide
  Seed: CSLMQGSTLPRRSGA
CSLMFGSMLARRPGA

SEQ ID NO: 54213 - protein, 15 aa, Artificial Sequence
  Description of Artificial Sequence: Synthetic peptide
  Seed: CSLMQGSTLPRRSGA
CSLMFGSMLARRQGA

SEQ ID NO: 54214 - protein, 15 aa, Artificial Sequence
  Description of Artificial Sequence: Synthetic peptide
  Seed: CSLMQGSTLPRRSGA
CSLMFGSMLARRRGA

SEQ ID NO: 54215 - protein, 15 aa, Artificial Sequence
  Description of Artificial Sequence: Synthetic peptide
  Seed: CSLMQGSTLPRRSGA
CSLMFGSMLARRSGA

SEQ ID NO: 54216 - protein, 15 aa, Artificial Sequence
  Description of Artificial Sequence: Synthetic peptide
  Seed: CSLMQGSTLPRRSGA
CSLMFGSMLARRTGA

SEQ ID NO: 54217 - protein, 15 aa, Artificial Sequence
  Description of Artificial Sequence: Synthetic peptide
  Seed: CSLMQGSTLPRRSGA
CSLMFGSMLARRVGA

SEQ ID NO: 54218 - protein, 15 aa, Artificial Sequence
  Description of Artificial Sequence: Synthetic peptide
  Seed: CSLMQGSTLPRRSGA
CSLMFGSMLARRWGA

SEQ ID NO: 54219 - protein, 15 aa, Artificial Sequence
  Description of Artificial Sequence: Synthetic peptide
  Seed: CSLMQGSTLPRRSGA
CSLMFGSMLARRYGA

SEQ ID NO: 54220 - protein, 15 aa, Artificial Sequence
  Description of Artificial Sequence: Synthetic peptide
  Seed: CSLMQGSTLPRRSGA
CSLMFGSMLCRRIGA

SEQ ID NO: 54221 - protein, 15 aa, Artificial Sequence
  Description of Artificial Sequence: Synthetic peptide
  Seed: CSLMQGSTLPRRSGA
CSLMFGSMLCRRLGA

SEQ ID NO: 54222 - protein, 15 aa, Artificial Sequence
  Description of Artificial Sequence: Synthetic peptide
  Seed: CSLMQGSTLPRRSGA
CSLMFGSMLCRRVGA

SEQ ID NO: 54223 - protein, 15 aa, Artificial Sequence
  Description of Artificial Sequence: Synthetic peptide
  Seed: CSLMQGSTLPRRSGA
CSLMFGSMLDRRIGA

SEQ ID NO: 54224 - protein, 15 aa, Artificial Sequence
  Description of Artificial Sequence: Synthetic peptide
  Seed: CSLMQGSTLPRRSGA
CSLMFGSMLDRRLGA

SEQ ID NO: 54225 - protein, 15 aa, Artificial Sequence
  Description of Artificial Sequence: Synthetic peptide
  Seed: CSLMQGSTLPRRSGA
CSLMFGSMLDRRVGA

SEQ ID NO: 54226 - protein, 15 aa, Artificial Sequence
  Description of Artificial Sequence: Synthetic peptide
  Seed: CSLMQGSTLPRRSGA
CSLMFGSMLERRIGA

SEQ ID NO: 54227 - protein, 15 aa, Artificial Sequence
  Description of Artificial Sequence: Synthetic peptide
  Seed: CSLMQGSTLPRRSGA
CSLMFGSMLERRLGA

SEQ ID NO: 54228 - protein, 15 aa, Artificial Sequence
  Description of Artificial Sequence: Synthetic peptide
  Seed: CSLMQGSTLPRRSGA
CSLMFGSMLERRVGA

SEQ ID NO: 54229 - protein, 15 aa, Artificial Sequence
  Description of Artificial Sequence: Synthetic peptide
  Seed: CSLMQGSTLPRRSGA
CSLMFGSMLGRRAGA

SEQ ID NO: 54230 - protein, 15 aa, Artificial Sequence
  Description of Artificial Sequence: Synthetic peptide
  Seed: CSLMQGSTLPRRSGA
CSLMFGSMLGRRCGA

SEQ ID NO: 54231 - protein, 15 aa, Artificial Sequence
  Description of Artificial Sequence: Synthetic peptide
  Seed: CSLMQGSTLPRRSGA
CSLMFGSMLGRRFGA

SEQ ID NO: 54232 - protein, 15 aa, Artificial Sequence
  Description of Artificial Sequence: Synthetic peptide
  Seed: CSLMQGSTLPRRSGA
CSLMFGSMLGRRGGA

SEQ ID NO: 54233 - protein, 15 aa, Artificial Sequence
  Description of Artificial Sequence: Synthetic peptide
  Seed: CSLMQGSTLPRRSGA
CSLMFGSMLGRRHGA

SEQ ID NO: 54234 - protein, 15 aa, Artificial Sequence
  Description of Artificial Sequence: Synthetic peptide
  Seed: CSLMQGSTLPRRSGA
CSLMFGSMLGRRIGA

SEQ ID NO: 54235 - protein, 15 aa, Artificial Sequence
  Description of Artificial Sequence: Synthetic peptide
  Seed: CSLMQGSTLPRRSGA
CSLMFGSMLGRRLGA

SEQ ID NO: 54236 - protein, 15 aa, Artificial Sequence
  Description of Artificial Sequence: Synthetic peptide
  Seed: CSLMQGSTLPRRSGA
CSLMFGSMLGRRMGA

SEQ ID NO: 54237 - protein, 15 aa, Artificial Sequence
  Description of Artificial Sequence: Synthetic peptide
  Seed: CSLMQGSTLPRRSGA
CSLMFGSMLGRRNGA

SEQ ID NO: 54238 - protein, 15 aa, Artificial Sequence
  Description of Artificial Sequence: Synthetic peptide
  Seed: CSLMQGSTLPRRSGA
CSLMFGSMLGRRPGA

SEQ ID NO: 54239 - protein, 15 aa, Artificial Sequence
  Description of Artificial Sequence: Synthetic peptide
  Seed: CSLMQGSTLPRRSGA
CSLMFGSMLGRRQGA

SEQ ID NO: 54240 - protein, 15 aa, Artificial Sequence
  Description of Artificial Sequence: Synthetic peptide
  Seed: CSLMQGSTLPRRSGA
CSLMFGSMLGRRSGA

SEQ ID NO: 54241 - protein, 15 aa, Artificial Sequence
  Description of Artificial Sequence: Synthetic peptide
  Seed: CSLMQGSTLPRRSGA
CSLMFGSMLGRRTGA

SEQ ID NO: 54242 - protein, 15 aa, Artificial Sequence
  Description of Artificial Sequence: Synthetic peptide
  Seed: CSLMQGSTLPRRSGA
CSLMFGSMLGRRVGA

SEQ ID NO: 54243 - protein, 15 aa, Artificial Sequence
  Description of Artificial Sequence: Synthetic peptide
  Seed: CSLMQGSTLPRRSGA
CSLMFGSMLGRRWGA

SEQ ID NO: 54244 - protein, 15 aa, Artificial Sequence
  Description of Artificial Sequence: Synthetic peptide
  Seed: CSLMQGSTLPRRSGA
CSLMFGSMLGRRYGA

SEQ ID NO: 54245 - protein, 15 aa, Artificial Sequence
  Description of Artificial Sequence: Synthetic peptide
  Seed: CSLMQGSTLPRRSGA
CSLMFGSMLHRRAGA

SEQ ID NO: 54246 - protein, 15 aa, Artificial Sequence
  Description of Artificial Sequence: Synthetic peptide
  Seed: CSLMQGSTLPRRSGA
CSLMFGSMLHRRIGA

SEQ ID NO: 54247 - protein, 15 aa, Artificial Sequence
  Description of Artificial Sequence: Synthetic peptide
  Seed: CSLMQGSTLPRRSGA
CSLMFGSMLHRRLGA

SEQ ID NO: 54248 - protein, 15 aa, Artificial Sequence
  Description of Artificial Sequence: Synthetic peptide
  Seed: CSLMQGSTLPRRSGA
CSLMFGSMLHRRVGA

SEQ ID NO: 54249 - protein, 15 aa, Artificial Sequence
  Description of Artificial Sequence: Synthetic peptide
  Seed: CSLMQGSTLPRRSGA
CSLMFGSMLIRRAGA

SEQ ID NO: 54250 - protein, 15 aa, Artificial Sequence
  Description of Artificial Sequence: Synthetic peptide
  Seed: CSLMQGSTLPRRSGA
CSLMFGSMLIRRGGA

SEQ ID NO: 54251 - protein, 15 aa, Artificial Sequence
  Description of Artificial Sequence: Synthetic peptide
  Seed: CSLMQGSTLPRRSGA
CSLMFGSMLIRRIGA

SEQ ID NO: 54252 - protein, 15 aa, Artificial Sequence
  Description of Artificial Sequence: Synthetic peptide
  Seed: CSLMQGSTLPRRSGA
CSLMFGSMLIRRLGA

SEQ ID NO: 54253 - protein, 15 aa, Artificial Sequence
  Description of Artificial Sequence: Synthetic peptide
  Seed: CSLMQGSTLPRRSGA
CSLMFGSMLIRRMGA

SEQ ID NO: 54254 - protein, 15 aa, Artificial Sequence
  Description of Artificial Sequence: Synthetic peptide
  Seed: CSLMQGSTLPRRSGA
CSLMFGSMLIRRNGA

SEQ ID NO: 54255 - protein, 15 aa, Artificial Sequence
  Description of Artificial Sequence: Synthetic peptide
  Seed: CSLMQGSTLPRRSGA
CSLMFGSMLIRRSGA

SEQ ID NO: 54256 - protein, 15 aa, Artificial Sequence
  Description of Artificial Sequence: Synthetic peptide
  Seed: CSLMQGSTLPRRSGA
CSLMFGSMLIRRTGA

SEQ ID NO: 54257 - protein, 15 aa, Artificial Sequence
  Description of Artificial Sequence: Synthetic peptide
  Seed: CSLMQGSTLPRRSGA
CSLMFGSMLIRRVGA

SEQ ID NO: 54258 - protein, 15 aa, Artificial Sequence
  Description of Artificial Sequence: Synthetic peptide
  Seed: CSLMQGSTLPRRSGA
CSLMFGSMLLRRAGA

SEQ ID NO: 54259 - protein, 15 aa, Artificial Sequence
  Description of Artificial Sequence: Synthetic peptide
  Seed: CSLMQGSTLPRRSGA
CSLMFGSMLLRRIGA

SEQ ID NO: 54260 - protein, 15 aa, Artificial Sequence
  Description of Artificial Sequence: Synthetic peptide
  Seed: CSLMQGSTLPRRSGA
CSLMFGSMLLRRLGA

SEQ ID NO: 54261 - protein, 15 aa, Artificial Sequence
  Description of Artificial Sequence: Synthetic peptide
  Seed: CSLMQGSTLPRRSGA
CSLMFGSMLLRRNGA

SEQ ID NO: 54262 - protein, 15 aa, Artificial Sequence
  Description of Artificial Sequence: Synthetic peptide
  Seed: CSLMQGSTLPRRSGA
CSLMFGSMLLRRSGA

SEQ ID NO: 54263 - protein, 15 aa, Artificial Sequence
  Description of Artificial Sequence: Synthetic peptide
  Seed: CSLMQGSTLPRRSGA
CSLMFGSMLLRRVGA

SEQ ID NO: 54264 - protein, 15 aa, Artificial Sequence
  Description of Artificial Sequence: Synthetic peptide
  Seed: CSLMQGSTLPRRSGA
CSLMFGSMLMRRAGA

SEQ ID NO: 54265 - protein, 15 aa, Artificial Sequence
  Description of Artificial Sequence: Synthetic peptide
  Seed: CSLMQGSTLPRRSGA
CSLMFGSMLMRRIGA

SEQ ID NO: 54266 - protein, 15 aa, Artificial Sequence
  Description of Artificial Sequence: Synthetic peptide
  Seed: CSLMQGSTLPRRSGA
CSLMFGSMLMRRLGA

SEQ ID NO: 54267 - protein, 15 aa, Artificial Sequence
  Description of Artificial Sequence: Synthetic peptide
  Seed: CSLMQGSTLPRRSGA
CSLMFGSMLMRRNGA

SEQ ID NO: 54268 - protein, 15 aa, Artificial Sequence
  Description of Artificial Sequence: Synthetic peptide
  Seed: CSLMQGSTLPRRSGA
CSLMFGSMLMRRSGA

SEQ ID NO: 54269 - protein, 15 aa, Artificial Sequence
  Description of Artificial Sequence: Synthetic peptide
  Seed: CSLMQGSTLPRRSGA
CSLMFGSMLMRRVGA

SEQ ID NO: 54270 - protein, 15 aa, Artificial Sequence
  Description of Artificial Sequence: Synthetic peptide
  Seed: CSLMQGSTLPRRSGA
CSLMFGSMLNRRAGA

SEQ ID NO: 54271 - protein, 15 aa, Artificial Sequence
  Description of Artificial Sequence: Synthetic peptide
  Seed: CSLMQGSTLPRRSGA
CSLMFGSMLNRRCGA

SEQ ID NO: 54272 - protein, 15 aa, Artificial Sequence
  Description of Artificial Sequence: Synthetic peptide
  Seed: CSLMQGSTLPRRSGA
CSLMFGSMLNRRFGA

SEQ ID NO: 54273 - protein, 15 aa, Artificial Sequence
  Description of Artificial Sequence: Synthetic peptide
  Seed: CSLMQGSTLPRRSGA
CSLMFGSMLNRRGGA

SEQ ID NO: 54274 - protein, 15 aa, Artificial Sequence
  Description of Artificial Sequence: Synthetic peptide
  Seed: CSLMQGSTLPRRSGA
CSLMFGSMLNRRIGA

SEQ ID NO: 54275 - protein, 15 aa, Artificial Sequence
  Description of Artificial Sequence: Synthetic peptide
  Seed: CSLMQGSTLPRRSGA
CSLMFGSMLNRRLGA

SEQ ID NO: 54276 - protein, 15 aa, Artificial Sequence
  Description of Artificial Sequence: Synthetic peptide
  Seed: CSLMQGSTLPRRSGA
CSLMFGSMLNRRMGA

SEQ ID NO: 54277 - protein, 15 aa, Artificial Sequence
  Description of Artificial Sequence: Synthetic peptide
  Seed: CSLMQGSTLPRRSGA
CSLMFGSMLNRRNGA

SEQ ID NO: 54278 - protein, 15 aa, Artificial Sequence
  Description of Artificial Sequence: Synthetic peptide
  Seed: CSLMQGSTLPRRSGA
CSLMFGSMLNRRSGA

SEQ ID NO: 54279 - protein, 15 aa, Artificial Sequence
  Description of Artificial Sequence: Synthetic peptide
  Seed: CSLMQGSTLPRRSGA
CSLMFGSMLNRRTGA

SEQ ID NO: 54280 - protein, 15 aa, Artificial Sequence
  Description of Artificial Sequence: Synthetic peptide
  Seed: CSLMQGSTLPRRSGA
CSLMFGSMLNRRVGA

SEQ ID NO: 54281 - protein, 15 aa, Artificial Sequence
  Description of Artificial Sequence: Synthetic peptide
  Seed: CSLMQGSTLPRRSGA
CSLMFGSMLPRRAGA

SEQ ID NO: 54282 - protein, 15 aa, Artificial Sequence
  Description of Artificial Sequence: Synthetic peptide
  Seed: CSLMQGSTLPRRSGA
CSLMFGSMLPRRCGA

SEQ ID NO: 54283 - protein, 15 aa, Artificial Sequence
  Description of Artificial Sequence: Synthetic peptide
  Seed: CSLMQGSTLPRRSGA
CSLMFGSMLPRRDGA

SEQ ID NO: 54284 - protein, 15 aa, Artificial Sequence
  Description of Artificial Sequence: Synthetic peptide
  Seed: CSLMQGSTLPRRSGA
CSLMFGSMLPRREGA

SEQ ID NO: 54285 - protein, 15 aa, Artificial Sequence
  Description of Artificial Sequence: Synthetic peptide
  Seed: CSLMQGSTLPRRSGA
CSLMFGSMLPRRFGA

SEQ ID NO: 54286 - protein, 15 aa, Artificial Sequence
  Description of Artificial Sequence: Synthetic peptide
  Seed: CSLMQGSTLPRRSGA
CSLMFGSMLPRRGGA

SEQ ID NO: 54287 - protein, 15 aa, Artificial Sequence
  Description of Artificial Sequence: Synthetic peptide
  Seed: CSLMQGSTLPRRSGA
CSLMFGSMLPRRHGA

SEQ ID NO: 54288 - protein, 15 aa, Artificial Sequence
  Description of Artificial Sequence: Synthetic peptide
  Seed: CSLMQGSTLPRRSGA
CSLMFGSMLPRRIGA

SEQ ID NO: 54289 - protein, 15 aa, Artificial Sequence
  Description of Artificial Sequence: Synthetic peptide
  Seed: CSLMQGSTLPRRSGA
CSLMFGSMLPRRLGA

SEQ ID NO: 54290 - protein, 15 aa, Artificial Sequence
  Description of Artificial Sequence: Synthetic peptide
  Seed: CSLMQGSTLPRRSGA
CSLMFGSMLPRRMGA

SEQ ID NO: 54291 - protein, 15 aa, Artificial Sequence
  Description of Artificial Sequence: Synthetic peptide
  Seed: CSLMQGSTLPRRSGA
CSLMFGSMLPRRNGA

SEQ ID NO: 54292 - protein, 15 aa, Artificial Sequence
  Description of Artificial Sequence: Synthetic peptide
  Seed: CSLMQGSTLPRRSGA
CSLMFGSMLPRRPGA

SEQ ID NO: 54293 - protein, 15 aa, Artificial Sequence
  Description of Artificial Sequence: Synthetic peptide
  Seed: CSLMQGSTLPRRSGA
CSLMFGSMLPRRQGA

SEQ ID NO: 54294 - protein, 15 aa, Artificial Sequence
  Description of Artificial Sequence: Synthetic peptide
  Seed: CSLMQGSTLPRRSGA
CSLMFGSMLPRRSGA

SEQ ID NO: 54295 - protein, 15 aa, Artificial Sequence
  Description of Artificial Sequence: Synthetic peptide
  Seed: CSLMQGSTLPRRSGA
CSLMFGSMLPRRTGA

SEQ ID NO: 54296 - protein, 15 aa, Artificial Sequence
  Description of Artificial Sequence: Synthetic peptide
  Seed: CSLMQGSTLPRRSGA
CSLMFGSMLPRRVGA

SEQ ID NO: 54297 - protein, 15 aa, Artificial Sequence
  Description of Artificial Sequence: Synthetic peptide
  Seed: CSLMQGSTLPRRSGA
CSLMFGSMLPRRWGA

SEQ ID NO: 54298 - protein, 15 aa, Artificial Sequence
  Description of Artificial Sequence: Synthetic peptide
  Seed: CSLMQGSTLPRRSGA
CSLMFGSMLPRRYGA

SEQ ID NO: 54299 - protein, 15 aa, Artificial Sequence
  Description of Artificial Sequence: Synthetic peptide
  Seed: CSLMQGSTLPRRSGA
CSLMFGSMLQRRAGA

SEQ ID NO: 54300 - protein, 15 aa, Artificial Sequence
  Description of Artificial Sequence: Synthetic peptide
  Seed: CSLMQGSTLPRRSGA
CSLMFGSMLQRRIGA

SEQ ID NO: 54301 - protein, 15 aa, Artificial Sequence
  Description of Artificial Sequence: Synthetic peptide
  Seed: CSLMQGSTLPRRSGA
CSLMFGSMLQRRLGA

SEQ ID NO: 54302 - protein, 15 aa, Artificial Sequence
  Description of Artificial Sequence: Synthetic peptide
  Seed: CSLMQGSTLPRRSGA
CSLMFGSMLQRRVGA

SEQ ID NO: 54303 - protein, 15 aa, Artificial Sequence
  Description of Artificial Sequence: Synthetic peptide
  Seed: CSLMQGSTLPRRSGA
CSLMFGSMLSRRAGA

SEQ ID NO: 54304 - protein, 15 aa, Artificial Sequence
  Description of Artificial Sequence: Synthetic peptide
  Seed: CSLMQGSTLPRRSGA
CSLMFGSMLSRRCGA

SEQ ID NO: 54305 - protein, 15 aa, Artificial Sequence
  Description of Artificial Sequence: Synthetic peptide
  Seed: CSLMQGSTLPRRSGA
CSLMFGSMLSRRDGA

SEQ ID NO: 54306 - protein, 15 aa, Artificial Sequence
  Description of Artificial Sequence: Synthetic peptide
  Seed: CSLMQGSTLPRRSGA
CSLMFGSMLSRREGA

SEQ ID NO: 54307 - protein, 15 aa, Artificial Sequence
  Description of Artificial Sequence: Synthetic peptide
  Seed: CSLMQGSTLPRRSGA
CSLMFGSMLSRRFGA

SEQ ID NO: 54308 - protein, 15 aa, Artificial Sequence
  Description of Artificial Sequence: Synthetic peptide
  Seed: CSLMQGSTLPRRSGA
CSLMFGSMLSRRGGA

SEQ ID NO: 54309 - protein, 15 aa, Artificial Sequence
  Description of Artificial Sequence: Synthetic peptide
  Seed: CSLMQGSTLPRRSGA
CSLMFGSMLSRRHGA

SEQ ID NO: 54310 - protein, 15 aa, Artificial Sequence
  Description of Artificial Sequence: Synthetic peptide
  Seed: CSLMQGSTLPRRSGA
CSLMFGSMLSRRIGA

SEQ ID NO: 54311 - protein, 15 aa, Artificial Sequence
  Description of Artificial Sequence: Synthetic peptide
  Seed: CSLMQGSTLPRRSGA
CSLMFGSMLSRRLGA

SEQ ID NO: 54312 - protein, 15 aa, Artificial Sequence
  Description of Artificial Sequence: Synthetic peptide
  Seed: CSLMQGSTLPRRSGA
CSLMFGSMLSRRMGA

SEQ ID NO: 54313 - protein, 15 aa, Artificial Sequence
  Description of Artificial Sequence: Synthetic peptide
  Seed: CSLMQGSTLPRRSGA
CSLMFGSMLSRRNGA

SEQ ID NO: 54314 - protein, 15 aa, Artificial Sequence
  Description of Artificial Sequence: Synthetic peptide
  Seed: CSLMQGSTLPRRSGA
CSLMFGSMLSRRPGA

SEQ ID NO: 54315 - protein, 15 aa, Artificial Sequence
  Description of Artificial Sequence: Synthetic peptide
  Seed: CSLMQGSTLPRRSGA
CSLMFGSMLSRRQGA

SEQ ID NO: 54316 - protein, 15 aa, Artificial Sequence
  Description of Artificial Sequence: Synthetic peptide
  Seed: CSLMQGSTLPRRSGA
CSLMFGSMLSRRRGA

SEQ ID NO: 54317 - protein, 15 aa, Artificial Sequence
  Description of Artificial Sequence: Synthetic peptide
  Seed: CSLMQGSTLPRRSGA
CSLMFGSMLSRRSGA

SEQ ID NO: 54318 - protein, 15 aa, Artificial Sequence
  Description of Artificial Sequence: Synthetic peptide
  Seed: CSLMQGSTLPRRSGA
CSLMFGSMLSRRTGA

SEQ ID NO: 54319 - protein, 15 aa, Artificial Sequence
  Description of Artificial Sequence: Synthetic peptide
  Seed: CSLMQGSTLPRRSGA
CSLMFGSMLSRRVGA

SEQ ID NO: 54320 - protein, 15 aa, Artificial Sequence
  Description of Artificial Sequence: Synthetic peptide
  Seed: CSLMQGSTLPRRSGA
CSLMFGSMLSRRWGA

SEQ ID NO: 54321 - protein, 15 aa, Artificial Sequence
  Description of Artificial Sequence: Synthetic peptide
  Seed: CSLMQGSTLPRRSGA
CSLMFGSMLSRRYGA

SEQ ID NO: 54322 - protein, 15 aa, Artificial Sequence
  Description of Artificial Sequence: Synthetic peptide
  Seed: CSLMQGSTLPRRSGA
CSLMFGSMLTRRAGA

SEQ ID NO: 54323 - protein, 15 aa, Artificial Sequence
  Description of Artificial Sequence: Synthetic peptide
  Seed: CSLMQGSTLPRRSGA
CSLMFGSMLTRRCGA

SEQ ID NO: 54324 - protein, 15 aa, Artificial Sequence
  Description of Artificial Sequence: Synthetic peptide
  Seed: CSLMQGSTLPRRSGA
CSLMFGSMLTRRDGA

SEQ ID NO: 54325 - protein, 15 aa, Artificial Sequence
  Description of Artificial Sequence: Synthetic peptide
  Seed: CSLMQGSTLPRRSGA
CSLMFGSMLTRREGA

SEQ ID NO: 54326 - protein, 15 aa, Artificial Sequence
  Description of Artificial Sequence: Synthetic peptide
  Seed: CSLMQGSTLPRRSGA
CSLMFGSMLTRRFGA

SEQ ID NO: 54327 - protein, 15 aa, Artificial Sequence
  Description of Artificial Sequence: Synthetic peptide
  Seed: CSLMQGSTLPRRSGA
CSLMFGSMLTRRGGA

SEQ ID NO: 54328 - protein, 15 aa, Artificial Sequence
  Description of Artificial Sequence: Synthetic peptide
  Seed: CSLMQGSTLPRRSGA
CSLMFGSMLTRRHGA

SEQ ID NO: 54329 - protein, 15 aa, Artificial Sequence
  Description of Artificial Sequence: Synthetic peptide
  Seed: CSLMQGSTLPRRSGA
CSLMFGSMLTRRIGA

SEQ ID NO: 54330 - protein, 15 aa, Artificial Sequence
  Description of Artificial Sequence: Synthetic peptide
  Seed: CSLMQGSTLPRRSGA
CSLMFGSMLTRRLGA

SEQ ID NO: 54331 - protein, 15 aa, Artificial Sequence
  Description of Artificial Sequence: Synthetic peptide
  Seed: CSLMQGSTLPRRSGA
CSLMFGSMLTRRMGA

SEQ ID NO: 54332 - protein, 15 aa, Artificial Sequence
  Description of Artificial Sequence: Synthetic peptide
  Seed: CSLMQGSTLPRRSGA
CSLMFGSMLTRRNGA

SEQ ID NO: 54333 - protein, 15 aa, Artificial Sequence
  Description of Artificial Sequence: Synthetic peptide
  Seed: CSLMQGSTLPRRSGA
CSLMFGSMLTRRPGA

SEQ ID NO: 54334 - protein, 15 aa, Artificial Sequence
  Description of Artificial Sequence: Synthetic peptide
  Seed: CSLMQGSTLPRRSGA
CSLMFGSMLTRRQGA

SEQ ID NO: 54335 - protein, 15 aa, Artificial Sequence
  Description of Artificial Sequence: Synthetic peptide
  Seed: CSLMQGSTLPRRSGA
CSLMFGSMLTRRSGA

SEQ ID NO: 54336 - protein, 15 aa, Artificial Sequence
  Description of Artificial Sequence: Synthetic peptide
  Seed: CSLMQGSTLPRRSGA
CSLMFGSMLTRRTGA

SEQ ID NO: 54337 - protein, 15 aa, Artificial Sequence
  Description of Artificial Sequence: Synthetic peptide
  Seed: CSLMQGSTLPRRSGA
CSLMFGSMLTRRVGA

SEQ ID NO: 54338 - protein, 15 aa, Artificial Sequence
  Description of Artificial Sequence: Synthetic peptide
  Seed: CSLMQGSTLPRRSGA
CSLMFGSMLTRRWGA

SEQ ID NO: 54339 - protein, 15 aa, Artificial Sequence
  Description of Artificial Sequence: Synthetic peptide
  Seed: CSLMQGSTLPRRSGA
CSLMFGSMLTRRYGA

SEQ ID NO: 54340 - protein, 15 aa, Artificial Sequence
  Description of Artificial Sequence: Synthetic peptide
  Seed: CSLMQGSTLPRRSGA
CSLMFGSMLVRRAGA

SEQ ID NO: 54341 - protein, 15 aa, Artificial Sequence
  Description of Artificial Sequence: Synthetic peptide
  Seed: CSLMQGSTLPRRSGA
CSLMFGSMLVRRCGA

SEQ ID NO: 54342 - protein, 15 aa, Artificial Sequence
  Description of Artificial Sequence: Synthetic peptide
  Seed: CSLMQGSTLPRRSGA
CSLMFGSMLVRRDGA

SEQ ID NO: 54343 - protein, 15 aa, Artificial Sequence
  Description of Artificial Sequence: Synthetic peptide
  Seed: CSLMQGSTLPRRSGA
CSLMFGSMLVRRFGA

SEQ ID NO: 54344 - protein, 15 aa, Artificial Sequence
  Description of Artificial Sequence: Synthetic peptide
  Seed: CSLMQGSTLPRRSGA
CSLMFGSMLVRRGGA

SEQ ID NO: 54345 - protein, 15 aa, Artificial Sequence
  Description of Artificial Sequence: Synthetic peptide
  Seed: CSLMQGSTLPRRSGA
CSLMFGSMLVRRHGA

SEQ ID NO: 54346 - protein, 15 aa, Artificial Sequence
  Description of Artificial Sequence: Synthetic peptide
  Seed: CSLMQGSTLPRRSGA
CSLMFGSMLVRRIGA

SEQ ID NO: 54347 - protein, 15 aa, Artificial Sequence
  Description of Artificial Sequence: Synthetic peptide
  Seed: CSLMQGSTLPRRSGA
CSLMFGSMLVRRLGA

SEQ ID NO: 54348 - protein, 15 aa, Artificial Sequence
  Description of Artificial Sequence: Synthetic peptide
  Seed: CSLMQGSTLPRRSGA
CSLMFGSMLVRRMGA

SEQ ID NO: 54349 - protein, 15 aa, Artificial Sequence
  Description of Artificial Sequence: Synthetic peptide
  Seed: CSLMQGSTLPRRSGA
CSLMFGSMLVRRNGA

SEQ ID NO: 54350 - protein, 15 aa, Artificial Sequence
  Description of Artificial Sequence: Synthetic peptide
  Seed: CSLMQGSTLPRRSGA
CSLMFGSMLVRRPGA

SEQ ID NO: 54351 - protein, 15 aa, Artificial Sequence
  Description of Artificial Sequence: Synthetic peptide
  Seed: CSLMQGSTLPRRSGA
CSLMFGSMLVRRQGA

SEQ ID NO: 54352 - protein, 15 aa, Artificial Sequence
  Description of Artificial Sequence: Synthetic peptide
  Seed: CSLMQGSTLPRRSGA
CSLMFGSMLVRRSGA

SEQ ID NO: 54353 - protein, 15 aa, Artificial Sequence
  Description of Artificial Sequence: Synthetic peptide
  Seed: CSLMQGSTLPRRSGA
CSLMFGSMLVRRTGA

SEQ ID NO: 54354 - protein, 15 aa, Artificial Sequence
  Description of Artificial Sequence: Synthetic peptide
  Seed: CSLMQGSTLPRRSGA
CSLMFGSMLVRRVGA

SEQ ID NO: 54355 - protein, 15 aa, Artificial Sequence
  Description of Artificial Sequence: Synthetic peptide
  Seed: CSLMQGSTLPRRSGA
CSLMFGSNLARRAGA

SEQ ID NO: 54356 - protein, 15 aa, Artificial Sequence
  Description of Artificial Sequence: Synthetic peptide
  Seed: CSLMQGSTLPRRSGA
CSLMFGSNLARRIGA

SEQ ID NO: 54357 - protein, 15 aa, Artificial Sequence
  Description of Artificial Sequence: Synthetic peptide
  Seed: CSLMQGSTLPRRSGA
CSLMFGSNLARRLGA

SEQ ID NO: 54358 - protein, 15 aa, Artificial Sequence
  Description of Artificial Sequence: Synthetic peptide
  Seed: CSLMQGSTLPRRSGA
CSLMFGSNLARRMGA

SEQ ID NO: 54359 - protein, 15 aa, Artificial Sequence
  Description of Artificial Sequence: Synthetic peptide
  Seed: CSLMQGSTLPRRSGA
CSLMFGSNLARRSGA

SEQ ID NO: 54360 - protein, 15 aa, Artificial Sequence
  Description of Artificial Sequence: Synthetic peptide
  Seed: CSLMQGSTLPRRSGA
CSLMFGSNLARRTGA

SEQ ID NO: 54361 - protein, 15 aa, Artificial Sequence
  Description of Artificial Sequence: Synthetic peptide
  Seed: CSLMQGSTLPRRSGA
CSLMFGSNLARRVGA

SEQ ID NO: 54362 - protein, 15 aa, Artificial Sequence
  Description of Artificial Sequence: Synthetic peptide
  Seed: CSLMQGSTLPRRSGA
CSLMFGSNLGRRAGA

SEQ ID NO: 54363 - protein, 15 aa, Artificial Sequence
  Description of Artificial Sequence: Synthetic peptide
  Seed: CSLMQGSTLPRRSGA
CSLMFGSNLGRRIGA

SEQ ID NO: 54364 - protein, 15 aa, Artificial Sequence
  Description of Artificial Sequence: Synthetic peptide
  Seed: CSLMQGSTLPRRSGA
CSLMFGSNLGRRLGA

SEQ ID NO: 54365 - protein, 15 aa, Artificial Sequence
  Description of Artificial Sequence: Synthetic peptide
  Seed: CSLMQGSTLPRRSGA
CSLMFGSNLGRRVGA

SEQ ID NO: 54366 - protein, 15 aa, Artificial Sequence
  Description of Artificial Sequence: Synthetic peptide
  Seed: CSLMQGSTLPRRSGA
CSLMFGSNLPRRIGA

SEQ ID NO: 54367 - protein, 15 aa, Artificial Sequence
  Description of Artificial Sequence: Synthetic peptide
  Seed: CSLMQGSTLPRRSGA
CSLMFGSNLPRRLGA

SEQ ID NO: 54368 - protein, 15 aa, Artificial Sequence
  Description of Artificial Sequence: Synthetic peptide
  Seed: CSLMQGSTLPRRSGA
CSLMFGSNLPRRVGA

SEQ ID NO: 54369 - protein, 15 aa, Artificial Sequence
  Description of Artificial Sequence: Synthetic peptide
  Seed: CSLMQGSTLPRRSGA
CSLMFGSNLSRRAGA

SEQ ID NO: 54370 - protein, 15 aa, Artificial Sequence
  Description of Artificial Sequence: Synthetic peptide
  Seed: CSLMQGSTLPRRSGA
CSLMFGSNLSRRIGA

SEQ ID NO: 54371 - protein, 15 aa, Artificial Sequence
  Description of Artificial Sequence: Synthetic peptide
  Seed: CSLMQGSTLPRRSGA
CSLMFGSNLSRRLGA

SEQ ID NO: 54372 - protein, 15 aa, Artificial Sequence
  Description of Artificial Sequence: Synthetic peptide
  Seed: CSLMQGSTLPRRSGA
CSLMFGSNLSRRVGA

SEQ ID NO: 54373 - protein, 15 aa, Artificial Sequence
  Description of Artificial Sequence: Synthetic peptide
  Seed: CSLMQGSTLPRRSGA
CSLMFGSQLARRAGA

SEQ ID NO: 54374 - protein, 15 aa, Artificial Sequence
  Description of Artificial Sequence: Synthetic peptide
  Seed: CSLMQGSTLPRRSGA
CSLMFGSQLARRCGA

SEQ ID NO: 54375 - protein, 15 aa, Artificial Sequence
  Description of Artificial Sequence: Synthetic peptide
  Seed: CSLMQGSTLPRRSGA
CSLMFGSQLARRFGA

SEQ ID NO: 54376 - protein, 15 aa, Artificial Sequence
  Description of Artificial Sequence: Synthetic peptide
  Seed: CSLMQGSTLPRRSGA
CSLMFGSQLARRGGA

SEQ ID NO: 54377 - protein, 15 aa, Artificial Sequence
  Description of Artificial Sequence: Synthetic peptide
  Seed: CSLMQGSTLPRRSGA
CSLMFGSQLARRIGA

SEQ ID NO: 54378 - protein, 15 aa, Artificial Sequence
  Description of Artificial Sequence: Synthetic peptide
  Seed: CSLMQGSTLPRRSGA
CSLMFGSQLARRLGA

SEQ ID NO: 54379 - protein, 15 aa, Artificial Sequence
  Description of Artificial Sequence: Synthetic peptide
  Seed: CSLMQGSTLPRRSGA
CSLMFGSQLARRMGA

SEQ ID NO: 54380 - protein, 15 aa, Artificial Sequence
  Description of Artificial Sequence: Synthetic peptide
  Seed: CSLMQGSTLPRRSGA
CSLMFGSQLARRNGA

SEQ ID NO: 54381 - protein, 15 aa, Artificial Sequence
  Description of Artificial Sequence: Synthetic peptide
  Seed: CSLMQGSTLPRRSGA
CSLMFGSQLARRSGA

SEQ ID NO: 54382 - protein, 15 aa, Artificial Sequence
  Description of Artificial Sequence: Synthetic peptide
  Seed: CSLMQGSTLPRRSGA
CSLMFGSQLARRTGA

SEQ ID NO: 54383 - protein, 15 aa, Artificial Sequence
  Description of Artificial Sequence: Synthetic peptide
  Seed: CSLMQGSTLPRRSGA
CSLMFGSQLARRVGA

SEQ ID NO: 54384 - protein, 15 aa, Artificial Sequence
  Description of Artificial Sequence: Synthetic peptide
  Seed: CSLMQGSTLPRRSGA
CSLMFGSQLGRRAGA

SEQ ID NO: 54385 - protein, 15 aa, Artificial Sequence
  Description of Artificial Sequence: Synthetic peptide
  Seed: CSLMQGSTLPRRSGA
CSLMFGSQLGRRFGA

SEQ ID NO: 54386 - protein, 15 aa, Artificial Sequence
  Description of Artificial Sequence: Synthetic peptide
  Seed: CSLMQGSTLPRRSGA
CSLMFGSQLGRRIGA

SEQ ID NO: 54387 - protein, 15 aa, Artificial Sequence
  Description of Artificial Sequence: Synthetic peptide
  Seed: CSLMQGSTLPRRSGA
CSLMFGSQLGRRLGA

SEQ ID NO: 54388 - protein, 15 aa, Artificial Sequence
  Description of Artificial Sequence: Synthetic peptide
  Seed: CSLMQGSTLPRRSGA
CSLMFGSQLGRRMGA

SEQ ID NO: 54389 - protein, 15 aa, Artificial Sequence
  Description of Artificial Sequence: Synthetic peptide
  Seed: CSLMQGSTLPRRSGA
CSLMFGSQLGRRSGA

SEQ ID NO: 54390 - protein, 15 aa, Artificial Sequence
  Description of Artificial Sequence: Synthetic peptide
  Seed: CSLMQGSTLPRRSGA
CSLMFGSQLGRRTGA

SEQ ID NO: 54391 - protein, 15 aa, Artificial Sequence
  Description of Artificial Sequence: Synthetic peptide
  Seed: CSLMQGSTLPRRSGA
CSLMFGSQLGRRVGA

SEQ ID NO: 54392 - protein, 15 aa, Artificial Sequence
  Description of Artificial Sequence: Synthetic peptide
  Seed: CSLMQGSTLPRRSGA
CSLMFGSQLNRRAGA

SEQ ID NO: 54393 - protein, 15 aa, Artificial Sequence
  Description of Artificial Sequence: Synthetic peptide
  Seed: CSLMQGSTLPRRSGA
CSLMFGSQLNRRIGA

SEQ ID NO: 54394 - protein, 15 aa, Artificial Sequence
  Description of Artificial Sequence: Synthetic peptide
  Seed: CSLMQGSTLPRRSGA
CSLMFGSQLNRRLGA

SEQ ID NO: 54395 - protein, 15 aa, Artificial Sequence
  Description of Artificial Sequence: Synthetic peptide
  Seed: CSLMQGSTLPRRSGA
CSLMFGSQLNRRVGA

SEQ ID NO: 54396 - protein, 15 aa, Artificial Sequence
  Description of Artificial Sequence: Synthetic peptide
  Seed: CSLMQGSTLPRRSGA
CSLMFGSQLPRRAGA

SEQ ID NO: 54397 - protein, 15 aa, Artificial Sequence
  Description of Artificial Sequence: Synthetic peptide
  Seed: CSLMQGSTLPRRSGA
CSLMFGSQLPRRIGA

SEQ ID NO: 54398 - protein, 15 aa, Artificial Sequence
  Description of Artificial Sequence: Synthetic peptide
  Seed: CSLMQGSTLPRRSGA
CSLMFGSQLPRRLGA

SEQ ID NO: 54399 - protein, 15 aa, Artificial Sequence
  Description of Artificial Sequence: Synthetic peptide
  Seed: CSLMQGSTLPRRSGA
CSLMFGSQLPRRMGA

SEQ ID NO: 54400 - protein, 15 aa, Artificial Sequence
  Description of Artificial Sequence: Synthetic peptide
  Seed: CSLMQGSTLPRRSGA
CSLMFGSQLPRRVGA

SEQ ID NO: 54401 - protein, 15 aa, Artificial Sequence
  Description of Artificial Sequence: Synthetic peptide
  Seed: CSLMQGSTLPRRSGA
CSLMFGSQLSRRAGA

SEQ ID NO: 54402 - protein, 15 aa, Artificial Sequence
  Description of Artificial Sequence: Synthetic peptide
  Seed: CSLMQGSTLPRRSGA
CSLMFGSQLSRRFGA

SEQ ID NO: 54403 - protein, 15 aa, Artificial Sequence
  Description of Artificial Sequence: Synthetic peptide
  Seed: CSLMQGSTLPRRSGA
CSLMFGSQLSRRIGA

SEQ ID NO: 54404 - protein, 15 aa, Artificial Sequence
  Description of Artificial Sequence: Synthetic peptide
  Seed: CSLMQGSTLPRRSGA
CSLMFGSQLSRRLGA

SEQ ID NO: 54405 - protein, 15 aa, Artificial Sequence
  Description of Artificial Sequence: Synthetic peptide
  Seed: CSLMQGSTLPRRSGA
CSLMFGSQLSRRMGA

SEQ ID NO: 54406 - protein, 15 aa, Artificial Sequence
  Description of Artificial Sequence: Synthetic peptide
  Seed: CSLMQGSTLPRRSGA
CSLMFGSQLSRRSGA

SEQ ID NO: 54407 - protein, 15 aa, Artificial Sequence
  Description of Artificial Sequence: Synthetic peptide
  Seed: CSLMQGSTLPRRSGA
CSLMFGSQLSRRTGA

SEQ ID NO: 54408 - protein, 15 aa, Artificial Sequence
  Description of Artificial Sequence: Synthetic peptide
  Seed: CSLMQGSTLPRRSGA
CSLMFGSQLSRRVGA

SEQ ID NO: 54409 - protein, 15 aa, Artificial Sequence
  Description of Artificial Sequence: Synthetic peptide
  Seed: CSLMQGSTLPRRSGA
CSLMFGSQLTRRAGA

SEQ ID NO: 54410 - protein, 15 aa, Artificial Sequence
  Description of Artificial Sequence: Synthetic peptide
  Seed: CSLMQGSTLPRRSGA
CSLMFGSQLTRRIGA

SEQ ID NO: 54411 - protein, 15 aa, Artificial Sequence
  Description of Artificial Sequence: Synthetic peptide
  Seed: CSLMQGSTLPRRSGA
CSLMFGSQLTRRLGA

SEQ ID NO: 54412 - protein, 15 aa, Artificial Sequence
  Description of Artificial Sequence: Synthetic peptide
  Seed: CSLMQGSTLPRRSGA
CSLMFGSQLTRRMGA

SEQ ID NO: 54413 - protein, 15 aa, Artificial Sequence
  Description of Artificial Sequence: Synthetic peptide
  Seed: CSLMQGSTLPRRSGA
CSLMFGSQLTRRVGA

SEQ ID NO: 54414 - protein, 15 aa, Artificial Sequence
  Description of Artificial Sequence: Synthetic peptide
  Seed: CSLMQGSTLPRRSGA
CSLMFGSQLVRRAGA

SEQ ID NO: 54415 - protein, 15 aa, Artificial Sequence
  Description of Artificial Sequence: Synthetic peptide
  Seed: CSLMQGSTLPRRSGA
CSLMFGSQLVRRIGA

SEQ ID NO: 54416 - protein, 15 aa, Artificial Sequence
  Description of Artificial Sequence: Synthetic peptide
  Seed: CSLMQGSTLPRRSGA
CSLMFGSQLVRRLGA

SEQ ID NO: 54417 - protein, 15 aa, Artificial Sequence
  Description of Artificial Sequence: Synthetic peptide
  Seed: CSLMQGSTLPRRSGA
CSLMFGSQLVRRVGA

SEQ ID NO: 54418 - protein, 15 aa, Artificial Sequence
  Description of Artificial Sequence: Synthetic peptide
  Seed: CSLMQGSTLPRRSGA
CSLMFGSRLARRIGA

SEQ ID NO: 54419 - protein, 15 aa, Artificial Sequence
  Description of Artificial Sequence: Synthetic peptide
  Seed: CSLMQGSTLPRRSGA
CSLMFGSRLARRLGA

SEQ ID NO: 54420 - protein, 15 aa, Artificial Sequence
  Description of Artificial Sequence: Synthetic peptide
  Seed: CSLMQGSTLPRRSGA
CSLMFGSRLARRVGA

SEQ ID NO: 54421 - protein, 15 aa, Artificial Sequence
  Description of Artificial Sequence: Synthetic peptide
  Seed: CSLMQGSTLPRRSGA
CSLMFGSSLARRAGA

SEQ ID NO: 54422 - protein, 15 aa, Artificial Sequence
  Description of Artificial Sequence: Synthetic peptide
  Seed: CSLMQGSTLPRRSGA
CSLMFGSSLARRCGA

SEQ ID NO: 54423 - protein, 15 aa, Artificial Sequence
  Description of Artificial Sequence: Synthetic peptide
  Seed: CSLMQGSTLPRRSGA
CSLMFGSSLARRFGA

SEQ ID NO: 54424 - protein, 15 aa, Artificial Sequence
  Description of Artificial Sequence: Synthetic peptide
  Seed: CSLMQGSTLPRRSGA
CSLMFGSSLARRGGA

SEQ ID NO: 54425 - protein, 15 aa, Artificial Sequence
  Description of Artificial Sequence: Synthetic peptide
  Seed: CSLMQGSTLPRRSGA
CSLMFGSSLARRIGA

SEQ ID NO: 54426 - protein, 15 aa, Artificial Sequence
  Description of Artificial Sequence: Synthetic peptide
  Seed: CSLMQGSTLPRRSGA
CSLMFGSSLARRLGA

SEQ ID NO: 54427 - protein, 15 aa, Artificial Sequence
  Description of Artificial Sequence: Synthetic peptide
  Seed: CSLMQGSTLPRRSGA
CSLMFGSSLARRMGA

SEQ ID NO: 54428 - protein, 15 aa, Artificial Sequence
  Description of Artificial Sequence: Synthetic peptide
  Seed: CSLMQGSTLPRRSGA
CSLMFGSSLARRNGA

SEQ ID NO: 54429 - protein, 15 aa, Artificial Sequence
  Description of Artificial Sequence: Synthetic peptide
  Seed: CSLMQGSTLPRRSGA
CSLMFGSSLARRSGA

SEQ ID NO: 54430 - protein, 15 aa, Artificial Sequence
  Description of Artificial Sequence: Synthetic peptide
  Seed: CSLMQGSTLPRRSGA
CSLMFGSSLARRTGA

SEQ ID NO: 54431 - protein, 15 aa, Artificial Sequence
  Description of Artificial Sequence: Synthetic peptide
  Seed: CSLMQGSTLPRRSGA
CSLMFGSSLARRVGA

SEQ ID NO: 54432 - protein, 15 aa, Artificial Sequence
  Description of Artificial Sequence: Synthetic peptide
  Seed: CSLMQGSTLPRRSGA
CSLMFGSSLGRRAGA

SEQ ID NO: 54433 - protein, 15 aa, Artificial Sequence
  Description of Artificial Sequence: Synthetic peptide
  Seed: CSLMQGSTLPRRSGA
CSLMFGSSLGRRIGA

SEQ ID NO: 54434 - protein, 15 aa, Artificial Sequence
  Description of Artificial Sequence: Synthetic peptide
  Seed: CSLMQGSTLPRRSGA
CSLMFGSSLGRRLGA

SEQ ID NO: 54435 - protein, 15 aa, Artificial Sequence
  Description of Artificial Sequence: Synthetic peptide
  Seed: CSLMQGSTLPRRSGA
CSLMFGSSLGRRMGA

SEQ ID NO: 54436 - protein, 15 aa, Artificial Sequence
  Description of Artificial Sequence: Synthetic peptide
  Seed: CSLMQGSTLPRRSGA
CSLMFGSSLGRRTGA

SEQ ID NO: 54437 - protein, 15 aa, Artificial Sequence
  Description of Artificial Sequence: Synthetic peptide
  Seed: CSLMQGSTLPRRSGA
CSLMFGSSLGRRVGA

SEQ ID NO: 54438 - protein, 15 aa, Artificial Sequence
  Description of Artificial Sequence: Synthetic peptide
  Seed: CSLMQGSTLPRRSGA
CSLMFGSSLNRRIGA

SEQ ID NO: 54439 - protein, 15 aa, Artificial Sequence
  Description of Artificial Sequence: Synthetic peptide
  Seed: CSLMQGSTLPRRSGA
CSLMFGSSLNRRLGA

SEQ ID NO: 54440 - protein, 15 aa, Artificial Sequence
  Description of Artificial Sequence: Synthetic peptide
  Seed: CSLMQGSTLPRRSGA
CSLMFGSSLNRRVGA

SEQ ID NO: 54441 - protein, 15 aa, Artificial Sequence
  Description of Artificial Sequence: Synthetic peptide
  Seed: CSLMQGSTLPRRSGA
CSLMFGSSLPRRAGA

SEQ ID NO: 54442 - protein, 15 aa, Artificial Sequence
  Description of Artificial Sequence: Synthetic peptide
  Seed: CSLMQGSTLPRRSGA
CSLMFGSSLPRRIGA

SEQ ID NO: 54443 - protein, 15 aa, Artificial Sequence
  Description of Artificial Sequence: Synthetic peptide
  Seed: CSLMQGSTLPRRSGA
CSLMFGSSLPRRLGA

SEQ ID NO: 54444 - protein, 15 aa, Artificial Sequence
  Description of Artificial Sequence: Synthetic peptide
  Seed: CSLMQGSTLPRRSGA
CSLMFGSSLPRRMGA

SEQ ID NO: 54445 - protein, 15 aa, Artificial Sequence
  Description of Artificial Sequence: Synthetic peptide
  Seed: CSLMQGSTLPRRSGA
CSLMFGSSLPRRVGA

SEQ ID NO: 54446 - protein, 15 aa, Artificial Sequence
  Description of Artificial Sequence: Synthetic peptide
  Seed: CSLMQGSTLPRRSGA
CSLMFGSSLSRRAGA

SEQ ID NO: 54447 - protein, 15 aa, Artificial Sequence
  Description of Artificial Sequence: Synthetic peptide
  Seed: CSLMQGSTLPRRSGA
CSLMFGSSLSRRFGA

SEQ ID NO: 54448 - protein, 15 aa, Artificial Sequence
  Description of Artificial Sequence: Synthetic peptide
  Seed: CSLMQGSTLPRRSGA
CSLMFGSSLSRRIGA

SEQ ID NO: 54449 - protein, 15 aa, Artificial Sequence
  Description of Artificial Sequence: Synthetic peptide
  Seed: CSLMQGSTLPRRSGA
CSLMFGSSLSRRLGA

SEQ ID NO: 54450 - protein, 15 aa, Artificial Sequence
  Description of Artificial Sequence: Synthetic peptide
  Seed: CSLMQGSTLPRRSGA
CSLMFGSSLSRRMGA

SEQ ID NO: 54451 - protein, 15 aa, Artificial Sequence
  Description of Artificial Sequence: Synthetic peptide
  Seed: CSLMQGSTLPRRSGA
CSLMFGSSLSRRSGA

SEQ ID NO: 54452 - protein, 15 aa, Artificial Sequence
  Description of Artificial Sequence: Synthetic peptide
  Seed: CSLMQGSTLPRRSGA
CSLMFGSSLSRRTGA

SEQ ID NO: 54453 - protein, 15 aa, Artificial Sequence
  Description of Artificial Sequence: Synthetic peptide
  Seed: CSLMQGSTLPRRSGA
CSLMFGSSLSRRVGA

SEQ ID NO: 54454 - protein, 15 aa, Artificial Sequence
  Description of Artificial Sequence: Synthetic peptide
  Seed: CSLMQGSTLPRRSGA
CSLMFGSSLTRRAGA

SEQ ID NO: 54455 - protein, 15 aa, Artificial Sequence
  Description of Artificial Sequence: Synthetic peptide
  Seed: CSLMQGSTLPRRSGA
CSLMFGSSLTRRIGA

SEQ ID NO: 54456 - protein, 15 aa, Artificial Sequence
  Description of Artificial Sequence: Synthetic peptide
  Seed: CSLMQGSTLPRRSGA
CSLMFGSSLTRRLGA

SEQ ID NO: 54457 - protein, 15 aa, Artificial Sequence
  Description of Artificial Sequence: Synthetic peptide
  Seed: CSLMQGSTLPRRSGA
CSLMFGSSLTRRMGA

SEQ ID NO: 54458 - protein, 15 aa, Artificial Sequence
  Description of Artificial Sequence: Synthetic peptide
  Seed: CSLMQGSTLPRRSGA
CSLMFGSSLTRRVGA

SEQ ID NO: 54459 - protein, 15 aa, Artificial Sequence
  Description of Artificial Sequence: Synthetic peptide
  Seed: CSLMQGSTLPRRSGA
CSLMFGSSLVRRAGA

SEQ ID NO: 54460 - protein, 15 aa, Artificial Sequence
  Description of Artificial Sequence: Synthetic peptide
  Seed: CSLMQGSTLPRRSGA
CSLMFGSSLVRRIGA

SEQ ID NO: 54461 - protein, 15 aa, Artificial Sequence
  Description of Artificial Sequence: Synthetic peptide
  Seed: CSLMQGSTLPRRSGA
CSLMFGSSLVRRLGA

SEQ ID NO: 54462 - protein, 15 aa, Artificial Sequence
  Description of Artificial Sequence: Synthetic peptide
  Seed: CSLMQGSTLPRRSGA
CSLMFGSSLVRRVGA

SEQ ID NO: 54463 - protein, 15 aa, Artificial Sequence
  Description of Artificial Sequence: Synthetic peptide
  Seed: CSLMQGSTLPRRSGA
CSLMFGSTLARRAGA

SEQ ID NO: 54464 - protein, 15 aa, Artificial Sequence
  Description of Artificial Sequence: Synthetic peptide
  Seed: CSLMQGSTLPRRSGA
CSLMFGSTLARRFGA

SEQ ID NO: 54465 - protein, 15 aa, Artificial Sequence
  Description of Artificial Sequence: Synthetic peptide
  Seed: CSLMQGSTLPRRSGA
CSLMFGSTLARRGGA

SEQ ID NO: 54466 - protein, 15 aa, Artificial Sequence
  Description of Artificial Sequence: Synthetic peptide
  Seed: CSLMQGSTLPRRSGA
CSLMFGSTLARRIGA

SEQ ID NO: 54467 - protein, 15 aa, Artificial Sequence
  Description of Artificial Sequence: Synthetic peptide
  Seed: CSLMQGSTLPRRSGA
CSLMFGSTLARRLGA

SEQ ID NO: 54468 - protein, 15 aa, Artificial Sequence
  Description of Artificial Sequence: Synthetic peptide
  Seed: CSLMQGSTLPRRSGA
CSLMFGSTLARRMGA

SEQ ID NO: 54469 - protein, 15 aa, Artificial Sequence
  Description of Artificial Sequence: Synthetic peptide
  Seed: CSLMQGSTLPRRSGA
CSLMFGSTLARRSGA

SEQ ID NO: 54470 - protein, 15 aa, Artificial Sequence
  Description of Artificial Sequence: Synthetic peptide
  Seed: CSLMQGSTLPRRSGA
CSLMFGSTLARRTGA

SEQ ID NO: 54471 - protein, 15 aa, Artificial Sequence
  Description of Artificial Sequence: Synthetic peptide
  Seed: CSLMQGSTLPRRSGA
CSLMFGSTLARRVGA

SEQ ID NO: 54472 - protein, 15 aa, Artificial Sequence
  Description of Artificial Sequence: Synthetic peptide
  Seed: CSLMQGSTLPRRSGA
CSLMFGSTLGRRAGA

SEQ ID NO: 54473 - protein, 15 aa, Artificial Sequence
  Description of Artificial Sequence: Synthetic peptide
  Seed: CSLMQGSTLPRRSGA
CSLMFGSTLGRRIGA

SEQ ID NO: 54474 - protein, 15 aa, Artificial Sequence
  Description of Artificial Sequence: Synthetic peptide
  Seed: CSLMQGSTLPRRSGA
CSLMFGSTLGRRLGA

SEQ ID NO: 54475 - protein, 15 aa, Artificial Sequence
  Description of Artificial Sequence: Synthetic peptide
  Seed: CSLMQGSTLPRRSGA
CSLMFGSTLGRRMGA

SEQ ID NO: 54476 - protein, 15 aa, Artificial Sequence
  Description of Artificial Sequence: Synthetic peptide
  Seed: CSLMQGSTLPRRSGA
CSLMFGSTLGRRTGA

SEQ ID NO: 54477 - protein, 15 aa, Artificial Sequence
  Description of Artificial Sequence: Synthetic peptide
  Seed: CSLMQGSTLPRRSGA
CSLMFGSTLGRRVGA

SEQ ID NO: 54478 - protein, 15 aa, Artificial Sequence
  Description of Artificial Sequence: Synthetic peptide
  Seed: CSLMQGSTLPRRSGA
CSLMFGSTLNRRIGA

SEQ ID NO: 54479 - protein, 15 aa, Artificial Sequence
  Description of Artificial Sequence: Synthetic peptide
  Seed: CSLMQGSTLPRRSGA
CSLMFGSTLNRRLGA

SEQ ID NO: 54480 - protein, 15 aa, Artificial Sequence
  Description of Artificial Sequence: Synthetic peptide
  Seed: CSLMQGSTLPRRSGA
CSLMFGSTLNRRVGA

SEQ ID NO: 54481 - protein, 15 aa, Artificial Sequence
  Description of Artificial Sequence: Synthetic peptide
  Seed: CSLMQGSTLPRRSGA
CSLMFGSTLPRRAGA

SEQ ID NO: 54482 - protein, 15 aa, Artificial Sequence
  Description of Artificial Sequence: Synthetic peptide
  Seed: CSLMQGSTLPRRSGA
CSLMFGSTLPRRIGA

SEQ ID NO: 54483 - protein, 15 aa, Artificial Sequence
  Description of Artificial Sequence: Synthetic peptide
  Seed: CSLMQGSTLPRRSGA
CSLMFGSTLPRRLGA

SEQ ID NO: 54484 - protein, 15 aa, Artificial Sequence
  Description of Artificial Sequence: Synthetic peptide
  Seed: CSLMQGSTLPRRSGA
CSLMFGSTLPRRVGA

SEQ ID NO: 54485 - protein, 15 aa, Artificial Sequence
  Description of Artificial Sequence: Synthetic peptide
  Seed: CSLMQGSTLPRRSGA
CSLMFGSTLSRRAGA

SEQ ID NO: 54486 - protein, 15 aa, Artificial Sequence
  Description of Artificial Sequence: Synthetic peptide
  Seed: CSLMQGSTLPRRSGA
CSLMFGSTLSRRIGA

SEQ ID NO: 54487 - protein, 15 aa, Artificial Sequence
  Description of Artificial Sequence: Synthetic peptide
  Seed: CSLMQGSTLPRRSGA
CSLMFGSTLSRRLGA

SEQ ID NO: 54488 - protein, 15 aa, Artificial Sequence
  Description of Artificial Sequence: Synthetic peptide
  Seed: CSLMQGSTLPRRSGA
CSLMFGSTLSRRMGA

SEQ ID NO: 54489 - protein, 15 aa, Artificial Sequence
  Description of Artificial Sequence: Synthetic peptide
  Seed: CSLMQGSTLPRRSGA
CSLMFGSTLSRRSGA

SEQ ID NO: 54490 - protein, 15 aa, Artificial Sequence
  Description of Artificial Sequence: Synthetic peptide
  Seed: CSLMQGSTLPRRSGA
CSLMFGSTLSRRTGA

SEQ ID NO: 54491 - protein, 15 aa, Artificial Sequence
  Description of Artificial Sequence: Synthetic peptide
  Seed: CSLMQGSTLPRRSGA
CSLMFGSTLSRRVGA

SEQ ID NO: 54492 - protein, 15 aa, Artificial Sequence
  Description of Artificial Sequence: Synthetic peptide
  Seed: CSLMQGSTLPRRSGA
CSLMFGSTLTRRAGA

SEQ ID NO: 54493 - protein, 15 aa, Artificial Sequence
  Description of Artificial Sequence: Synthetic peptide
  Seed: CSLMQGSTLPRRSGA
CSLMFGSTLTRRIGA

SEQ ID NO: 54494 - protein, 15 aa, Artificial Sequence
  Description of Artificial Sequence: Synthetic peptide
  Seed: CSLMQGSTLPRRSGA
CSLMFGSTLTRRLGA

SEQ ID NO: 54495 - protein, 15 aa, Artificial Sequence
  Description of Artificial Sequence: Synthetic peptide
  Seed: CSLMQGSTLPRRSGA
CSLMFGSTLTRRVGA

SEQ ID NO: 54496 - protein, 15 aa, Artificial Sequence
  Description of Artificial Sequence: Synthetic peptide
  Seed: CSLMQGSTLPRRSGA
CSLMFGSTLVRRIGA

SEQ ID NO: 54497 - protein, 15 aa, Artificial Sequence
  Description of Artificial Sequence: Synthetic peptide
  Seed: CSLMQGSTLPRRSGA
CSLMFGSTLVRRLGA

SEQ ID NO: 54498 - protein, 15 aa, Artificial Sequence
  Description of Artificial Sequence: Synthetic peptide
  Seed: CSLMQGSTLPRRSGA
CSLMFGSTLVRRVGA

SEQ ID NO: 54499 - protein, 15 aa, Artificial Sequence
  Description of Artificial Sequence: Synthetic peptide
  Seed: CSLMQGSTLPRRSGA
CSLMFGSVLARRAGA

SEQ ID NO: 54500 - protein, 15 aa, Artificial Sequence
  Description of Artificial Sequence: Synthetic peptide
  Seed: CSLMQGSTLPRRSGA
CSLMFGSVLARRCGA

SEQ ID NO: 54501 - protein, 15 aa, Artificial Sequence
  Description of Artificial Sequence: Synthetic peptide
  Seed: CSLMQGSTLPRRSGA
CSLMFGSVLARRFGA

SEQ ID NO: 54502 - protein, 15 aa, Artificial Sequence
  Description of Artificial Sequence: Synthetic peptide
  Seed: CSLMQGSTLPRRSGA
CSLMFGSVLARRGGA

SEQ ID NO: 54503 - protein, 15 aa, Artificial Sequence
  Description of Artificial Sequence: Synthetic peptide
  Seed: CSLMQGSTLPRRSGA
CSLMFGSVLARRIGA

SEQ ID NO: 54504 - protein, 15 aa, Artificial Sequence
  Description of Artificial Sequence: Synthetic peptide
  Seed: CSLMQGSTLPRRSGA
CSLMFGSVLARRLGA

SEQ ID NO: 54505 - protein, 15 aa, Artificial Sequence
  Description of Artificial Sequence: Synthetic peptide
  Seed: CSLMQGSTLPRRSGA
CSLMFGSVLARRMGA

SEQ ID NO: 54506 - protein, 15 aa, Artificial Sequence
  Description of Artificial Sequence: Synthetic peptide
  Seed: CSLMQGSTLPRRSGA
CSLMFGSVLARRNGA

SEQ ID NO: 54507 - protein, 15 aa, Artificial Sequence
  Description of Artificial Sequence: Synthetic peptide
  Seed: CSLMQGSTLPRRSGA
CSLMFGSVLARRPGA

SEQ ID NO: 54508 - protein, 15 aa, Artificial Sequence
  Description of Artificial Sequence: Synthetic peptide
  Seed: CSLMQGSTLPRRSGA
CSLMFGSVLARRSGA

SEQ ID NO: 54509 - protein, 15 aa, Artificial Sequence
  Description of Artificial Sequence: Synthetic peptide
  Seed: CSLMQGSTLPRRSGA
CSLMFGSVLARRTGA

SEQ ID NO: 54510 - protein, 15 aa, Artificial Sequence
  Description of Artificial Sequence: Synthetic peptide
  Seed: CSLMQGSTLPRRSGA
CSLMFGSVLARRVGA

SEQ ID NO: 54511 - protein, 15 aa, Artificial Sequence
  Description of Artificial Sequence: Synthetic peptide
  Seed: CSLMQGSTLPRRSGA
CSLMFGSVLARRWGA

SEQ ID NO: 54512 - protein, 15 aa, Artificial Sequence
  Description of Artificial Sequence: Synthetic peptide
  Seed: CSLMQGSTLPRRSGA
CSLMFGSVLARRYGA

SEQ ID NO: 54513 - protein, 15 aa, Artificial Sequence
  Description of Artificial Sequence: Synthetic peptide
  Seed: CSLMQGSTLPRRSGA
CSLMFGSVLGRRAGA

SEQ ID NO: 54514 - protein, 15 aa, Artificial Sequence
  Description of Artificial Sequence: Synthetic peptide
  Seed: CSLMQGSTLPRRSGA
CSLMFGSVLGRRCGA

SEQ ID NO: 54515 - protein, 15 aa, Artificial Sequence
  Description of Artificial Sequence: Synthetic peptide
  Seed: CSLMQGSTLPRRSGA
CSLMFGSVLGRRFGA

SEQ ID NO: 54516 - protein, 15 aa, Artificial Sequence
  Description of Artificial Sequence: Synthetic peptide
  Seed: CSLMQGSTLPRRSGA
CSLMFGSVLGRRGGA

SEQ ID NO: 54517 - protein, 15 aa, Artificial Sequence
  Description of Artificial Sequence: Synthetic peptide
  Seed: CSLMQGSTLPRRSGA
CSLMFGSVLGRRIGA

SEQ ID NO: 54518 - protein, 15 aa, Artificial Sequence
  Description of Artificial Sequence: Synthetic peptide
  Seed: CSLMQGSTLPRRSGA
CSLMFGSVLGRRLGA

SEQ ID NO: 54519 - protein, 15 aa, Artificial Sequence
  Description of Artificial Sequence: Synthetic peptide
  Seed: CSLMQGSTLPRRSGA
CSLMFGSVLGRRMGA

SEQ ID NO: 54520 - protein, 15 aa, Artificial Sequence
  Description of Artificial Sequence: Synthetic peptide
  Seed: CSLMQGSTLPRRSGA
CSLMFGSVLGRRSGA

SEQ ID NO: 54521 - protein, 15 aa, Artificial Sequence
  Description of Artificial Sequence: Synthetic peptide
  Seed: CSLMQGSTLPRRSGA
CSLMFGSVLGRRTGA

SEQ ID NO: 54522 - protein, 15 aa, Artificial Sequence
  Description of Artificial Sequence: Synthetic peptide
  Seed: CSLMQGSTLPRRSGA
CSLMFGSVLGRRVGA

SEQ ID NO: 54523 - protein, 15 aa, Artificial Sequence
  Description of Artificial Sequence: Synthetic peptide
  Seed: CSLMQGSTLPRRSGA
CSLMFGSVLIRRVGA

SEQ ID NO: 54524 - protein, 15 aa, Artificial Sequence
  Description of Artificial Sequence: Synthetic peptide
  Seed: CSLMQGSTLPRRSGA
CSLMFGSVLNRRAGA

SEQ ID NO: 54525 - protein, 15 aa, Artificial Sequence
  Description of Artificial Sequence: Synthetic peptide
  Seed: CSLMQGSTLPRRSGA
CSLMFGSVLNRRIGA

SEQ ID NO: 54526 - protein, 15 aa, Artificial Sequence
  Description of Artificial Sequence: Synthetic peptide
  Seed: CSLMQGSTLPRRSGA
CSLMFGSVLNRRLGA

SEQ ID NO: 54527 - protein, 15 aa, Artificial Sequence
  Description of Artificial Sequence: Synthetic peptide
  Seed: CSLMQGSTLPRRSGA
CSLMFGSVLNRRMGA

SEQ ID NO: 54528 - protein, 15 aa, Artificial Sequence
  Description of Artificial Sequence: Synthetic peptide
  Seed: CSLMQGSTLPRRSGA
CSLMFGSVLNRRTGA

SEQ ID NO: 54529 - protein, 15 aa, Artificial Sequence
  Description of Artificial Sequence: Synthetic peptide
  Seed: CSLMQGSTLPRRSGA
CSLMFGSVLNRRVGA

SEQ ID NO: 54530 - protein, 15 aa, Artificial Sequence
  Description of Artificial Sequence: Synthetic peptide
  Seed: CSLMQGSTLPRRSGA
CSLMFGSVLPRRAGA

SEQ ID NO: 54531 - protein, 15 aa, Artificial Sequence
  Description of Artificial Sequence: Synthetic peptide
  Seed: CSLMQGSTLPRRSGA
CSLMFGSVLPRRIGA

SEQ ID NO: 54532 - protein, 15 aa, Artificial Sequence
  Description of Artificial Sequence: Synthetic peptide
  Seed: CSLMQGSTLPRRSGA
CSLMFGSVLPRRLGA

SEQ ID NO: 54533 - protein, 15 aa, Artificial Sequence
  Description of Artificial Sequence: Synthetic peptide
  Seed: CSLMQGSTLPRRSGA
CSLMFGSVLPRRMGA

SEQ ID NO: 54534 - protein, 15 aa, Artificial Sequence
  Description of Artificial Sequence: Synthetic peptide
  Seed: CSLMQGSTLPRRSGA
CSLMFGSVLPRRNGA

SEQ ID NO: 54535 - protein, 15 aa, Artificial Sequence
  Description of Artificial Sequence: Synthetic peptide
  Seed: CSLMQGSTLPRRSGA
CSLMFGSVLPRRSGA

SEQ ID NO: 54536 - protein, 15 aa, Artificial Sequence
  Description of Artificial Sequence: Synthetic peptide
  Seed: CSLMQGSTLPRRSGA
CSLMFGSVLPRRTGA

SEQ ID NO: 54537 - protein, 15 aa, Artificial Sequence
  Description of Artificial Sequence: Synthetic peptide
  Seed: CSLMQGSTLPRRSGA
CSLMFGSVLPRRVGA

SEQ ID NO: 54538 - protein, 15 aa, Artificial Sequence
  Description of Artificial Sequence: Synthetic peptide
  Seed: CSLMQGSTLPRRSGA
CSLMFGSVLSRRAGA

SEQ ID NO: 54539 - protein, 15 aa, Artificial Sequence
  Description of Artificial Sequence: Synthetic peptide
  Seed: CSLMQGSTLPRRSGA
CSLMFGSVLSRRCGA

SEQ ID NO: 54540 - protein, 15 aa, Artificial Sequence
  Description of Artificial Sequence: Synthetic peptide
  Seed: CSLMQGSTLPRRSGA
CSLMFGSVLSRRFGA

SEQ ID NO: 54541 - protein, 15 aa, Artificial Sequence
  Description of Artificial Sequence: Synthetic peptide
  Seed: CSLMQGSTLPRRSGA
CSLMFGSVLSRRGGA

SEQ ID NO: 54542 - protein, 15 aa, Artificial Sequence
  Description of Artificial Sequence: Synthetic peptide
  Seed: CSLMQGSTLPRRSGA
CSLMFGSVLSRRIGA

SEQ ID NO: 54543 - protein, 15 aa, Artificial Sequence
  Description of Artificial Sequence: Synthetic peptide
  Seed: CSLMQGSTLPRRSGA
CSLMFGSVLSRRLGA

SEQ ID NO: 54544 - protein, 15 aa, Artificial Sequence
  Description of Artificial Sequence: Synthetic peptide
  Seed: CSLMQGSTLPRRSGA
CSLMFGSVLSRRMGA

SEQ ID NO: 54545 - protein, 15 aa, Artificial Sequence
  Description of Artificial Sequence: Synthetic peptide
  Seed: CSLMQGSTLPRRSGA
CSLMFGSVLSRRNGA

SEQ ID NO: 54546 - protein, 15 aa, Artificial Sequence
  Description of Artificial Sequence: Synthetic peptide
  Seed: CSLMQGSTLPRRSGA
CSLMFGSVLSRRSGA

SEQ ID NO: 54547 - protein, 15 aa, Artificial Sequence
  Description of Artificial Sequence: Synthetic peptide
  Seed: CSLMQGSTLPRRSGA
CSLMFGSVLSRRTGA

SEQ ID NO: 54548 - protein, 15 aa, Artificial Sequence
  Description of Artificial Sequence: Synthetic peptide
  Seed: CSLMQGSTLPRRSGA
CSLMFGSVLSRRVGA

SEQ ID NO: 54549 - protein, 15 aa, Artificial Sequence
  Description of Artificial Sequence: Synthetic peptide
  Seed: CSLMQGSTLPRRSGA
CSLMFGSVLTRRAGA

SEQ ID NO: 54550 - protein, 15 aa, Artificial Sequence
  Description of Artificial Sequence: Synthetic peptide
  Seed: CSLMQGSTLPRRSGA
CSLMFGSVLTRRIGA

SEQ ID NO: 54551 - protein, 15 aa, Artificial Sequence
  Description of Artificial Sequence: Synthetic peptide
  Seed: CSLMQGSTLPRRSGA
CSLMFGSVLTRRLGA

SEQ ID NO: 54552 - protein, 15 aa, Artificial Sequence
  Description of Artificial Sequence: Synthetic peptide
  Seed: CSLMQGSTLPRRSGA
CSLMFGSVLTRRMGA

SEQ ID NO: 54553 - protein, 15 aa, Artificial Sequence
  Description of Artificial Sequence: Synthetic peptide
  Seed: CSLMQGSTLPRRSGA
CSLMFGSVLTRRNGA

SEQ ID NO: 54554 - protein, 15 aa, Artificial Sequence
  Description of Artificial Sequence: Synthetic peptide
  Seed: CSLMQGSTLPRRSGA
CSLMFGSVLTRRSGA

SEQ ID NO: 54555 - protein, 15 aa, Artificial Sequence
  Description of Artificial Sequence: Synthetic peptide
  Seed: CSLMQGSTLPRRSGA
CSLMFGSVLTRRTGA

SEQ ID NO: 54556 - protein, 15 aa, Artificial Sequence
  Description of Artificial Sequence: Synthetic peptide
  Seed: CSLMQGSTLPRRSGA
CSLMFGSVLTRRVGA

SEQ ID NO: 54557 - protein, 15 aa, Artificial Sequence
  Description of Artificial Sequence: Synthetic peptide
  Seed: CSLMQGSTLPRRSGA
CSLMFGSVLVRRAGA

SEQ ID NO: 54558 - protein, 15 aa, Artificial Sequence
  Description of Artificial Sequence: Synthetic peptide
  Seed: CSLMQGSTLPRRSGA
CSLMFGSVLVRRIGA

SEQ ID NO: 54559 - protein, 15 aa, Artificial Sequence
  Description of Artificial Sequence: Synthetic peptide
  Seed: CSLMQGSTLPRRSGA
CSLMFGSVLVRRLGA

SEQ ID NO: 54560 - protein, 15 aa, Artificial Sequence
  Description of Artificial Sequence: Synthetic peptide
  Seed: CSLMQGSTLPRRSGA
CSLMFGSVLVRRNGA

SEQ ID NO: 54561 - protein, 15 aa, Artificial Sequence
  Description of Artificial Sequence: Synthetic peptide
  Seed: CSLMQGSTLPRRSGA
CSLMFGSVLVRRSGA

SEQ ID NO: 54562 - protein, 15 aa, Artificial Sequence
  Description of Artificial Sequence: Synthetic peptide
  Seed: CSLMQGSTLPRRSGA
CSLMFGSVLVRRTGA

SEQ ID NO: 54563 - protein, 15 aa, Artificial Sequence
  Description of Artificial Sequence: Synthetic peptide
  Seed: CSLMQGSTLPRRSGA
CSLMFGSVLVRRVGA

SEQ ID NO: 54564 - protein, 15 aa, Artificial Sequence
  Description of Artificial Sequence: Synthetic peptide
  Seed: CSLMQGSTLPRRSGA
CSLMFGSWLARRIGA

SEQ ID NO: 54565 - protein, 15 aa, Artificial Sequence
  Description of Artificial Sequence: Synthetic peptide
  Seed: CSLMQGSTLPRRSGA
CSLMFGSWLARRLGA

SEQ ID NO: 54566 - protein, 15 aa, Artificial Sequence
  Description of Artificial Sequence: Synthetic peptide
  Seed: CSLMQGSTLPRRSGA
CSLMFGSWLARRVGA

SEQ ID NO: 54567 - protein, 15 aa, Artificial Sequence
  Description of Artificial Sequence: Synthetic peptide
  Seed: CSLMQGSTLPRRSGA
CSLMIGSALARRAGA

SEQ ID NO: 54568 - protein, 15 aa, Artificial Sequence
  Description of Artificial Sequence: Synthetic peptide
  Seed: CSLMQGSTLPRRSGA
CSLMIGSALARRCGA

SEQ ID NO: 54569 - protein, 15 aa, Artificial Sequence
  Description of Artificial Sequence: Synthetic peptide
  Seed: CSLMQGSTLPRRSGA
CSLMIGSALARRFGA

SEQ ID NO: 54570 - protein, 15 aa, Artificial Sequence
  Description of Artificial Sequence: Synthetic peptide
  Seed: CSLMQGSTLPRRSGA
CSLMIGSALARRGGA

SEQ ID NO: 54571 - protein, 15 aa, Artificial Sequence
  Description of Artificial Sequence: Synthetic peptide
  Seed: CSLMQGSTLPRRSGA
CSLMIGSALARRIGA

SEQ ID NO: 54572 - protein, 15 aa, Artificial Sequence
  Description of Artificial Sequence: Synthetic peptide
  Seed: CSLMQGSTLPRRSGA
CSLMIGSALARRLGA

SEQ ID NO: 54573 - protein, 15 aa, Artificial Sequence
  Description of Artificial Sequence: Synthetic peptide
  Seed: CSLMQGSTLPRRSGA
CSLMIGSALARRMGA

SEQ ID NO: 54574 - protein, 15 aa, Artificial Sequence
  Description of Artificial Sequence: Synthetic peptide
  Seed: CSLMQGSTLPRRSGA
CSLMIGSALARRNGA

SEQ ID NO: 54575 - protein, 15 aa, Artificial Sequence
  Description of Artificial Sequence: Synthetic peptide
  Seed: CSLMQGSTLPRRSGA
CSLMIGSALARRSGA

SEQ ID NO: 54576 - protein, 15 aa, Artificial Sequence
  Description of Artificial Sequence: Synthetic peptide
  Seed: CSLMQGSTLPRRSGA
CSLMIGSALARRTGA

SEQ ID NO: 54577 - protein, 15 aa, Artificial Sequence
  Description of Artificial Sequence: Synthetic peptide
  Seed: CSLMQGSTLPRRSGA
CSLMIGSALARRVGA

SEQ ID NO: 54578 - protein, 15 aa, Artificial Sequence
  Description of Artificial Sequence: Synthetic peptide
  Seed: CSLMQGSTLPRRSGA
CSLMIGSALARRYGA

SEQ ID NO: 54579 - protein, 15 aa, Artificial Sequence
  Description of Artificial Sequence: Synthetic peptide
  Seed: CSLMQGSTLPRRSGA
CSLMIGSALGRRAGA

SEQ ID NO: 54580 - protein, 15 aa, Artificial Sequence
  Description of Artificial Sequence: Synthetic peptide
  Seed: CSLMQGSTLPRRSGA
CSLMIGSALGRRIGA

SEQ ID NO: 54581 - protein, 15 aa, Artificial Sequence
  Description of Artificial Sequence: Synthetic peptide
  Seed: CSLMQGSTLPRRSGA
CSLMIGSALGRRLGA

SEQ ID NO: 54582 - protein, 15 aa, Artificial Sequence
  Description of Artificial Sequence: Synthetic peptide
  Seed: CSLMQGSTLPRRSGA
CSLMIGSALGRRMGA

SEQ ID NO: 54583 - protein, 15 aa, Artificial Sequence
  Description of Artificial Sequence: Synthetic peptide
  Seed: CSLMQGSTLPRRSGA
CSLMIGSALGRRTGA

SEQ ID NO: 54584 - protein, 15 aa, Artificial Sequence
  Description of Artificial Sequence: Synthetic peptide
  Seed: CSLMQGSTLPRRSGA
CSLMIGSALGRRVGA

SEQ ID NO: 54585 - protein, 15 aa, Artificial Sequence
  Description of Artificial Sequence: Synthetic peptide
  Seed: CSLMQGSTLPRRSGA
CSLMIGSALIRRAGA

SEQ ID NO: 54586 - protein, 15 aa, Artificial Sequence
  Description of Artificial Sequence: Synthetic peptide
  Seed: CSLMQGSTLPRRSGA
CSLMIGSALIRRSGA

SEQ ID NO: 54587 - protein, 15 aa, Artificial Sequence
  Description of Artificial Sequence: Synthetic peptide
  Seed: CSLMQGSTLPRRSGA
CSLMIGSALIRRVGA

SEQ ID NO: 54588 - protein, 15 aa, Artificial Sequence
  Description of Artificial Sequence: Synthetic peptide
  Seed: CSLMQGSTLPRRSGA
CSLMIGSALNRRAGA

SEQ ID NO: 54589 - protein, 15 aa, Artificial Sequence
  Description of Artificial Sequence: Synthetic peptide
  Seed: CSLMQGSTLPRRSGA
CSLMIGSALNRRIGA

SEQ ID NO: 54590 - protein, 15 aa, Artificial Sequence
  Description of Artificial Sequence: Synthetic peptide
  Seed: CSLMQGSTLPRRSGA
CSLMIGSALNRRLGA

SEQ ID NO: 54591 - protein, 15 aa, Artificial Sequence
  Description of Artificial Sequence: Synthetic peptide
  Seed: CSLMQGSTLPRRSGA
CSLMIGSALNRRVGA

SEQ ID NO: 54592 - protein, 15 aa, Artificial Sequence
  Description of Artificial Sequence: Synthetic peptide
  Seed: CSLMQGSTLPRRSGA
CSLMIGSALPRRAGA

SEQ ID NO: 54593 - protein, 15 aa, Artificial Sequence
  Description of Artificial Sequence: Synthetic peptide
  Seed: CSLMQGSTLPRRSGA
CSLMIGSALPRRIGA

SEQ ID NO: 54594 - protein, 15 aa, Artificial Sequence
  Description of Artificial Sequence: Synthetic peptide
  Seed: CSLMQGSTLPRRSGA
CSLMIGSALPRRLGA

SEQ ID NO: 54595 - protein, 15 aa, Artificial Sequence
  Description of Artificial Sequence: Synthetic peptide
  Seed: CSLMQGSTLPRRSGA
CSLMIGSALPRRMGA

SEQ ID NO: 54596 - protein, 15 aa, Artificial Sequence
  Description of Artificial Sequence: Synthetic peptide
  Seed: CSLMQGSTLPRRSGA
CSLMIGSALPRRSGA

SEQ ID NO: 54597 - protein, 15 aa, Artificial Sequence
  Description of Artificial Sequence: Synthetic peptide
  Seed: CSLMQGSTLPRRSGA
CSLMIGSALPRRTGA

SEQ ID NO: 54598 - protein, 15 aa, Artificial Sequence
  Description of Artificial Sequence: Synthetic peptide
  Seed: CSLMQGSTLPRRSGA
CSLMIGSALPRRVGA

SEQ ID NO: 54599 - protein, 15 aa, Artificial Sequence
  Description of Artificial Sequence: Synthetic peptide
  Seed: CSLMQGSTLPRRSGA
CSLMIGSALSRRAGA

SEQ ID NO: 54600 - protein, 15 aa, Artificial Sequence
  Description of Artificial Sequence: Synthetic peptide
  Seed: CSLMQGSTLPRRSGA
CSLMIGSALSRRIGA

SEQ ID NO: 54601 - protein, 15 aa, Artificial Sequence
  Description of Artificial Sequence: Synthetic peptide
  Seed: CSLMQGSTLPRRSGA
CSLMIGSALSRRLGA

SEQ ID NO: 54602 - protein, 15 aa, Artificial Sequence
  Description of Artificial Sequence: Synthetic peptide
  Seed: CSLMQGSTLPRRSGA
CSLMIGSALSRRMGA

SEQ ID NO: 54603 - protein, 15 aa, Artificial Sequence
  Description of Artificial Sequence: Synthetic peptide
  Seed: CSLMQGSTLPRRSGA
CSLMIGSALSRRSGA

SEQ ID NO: 54604 - protein, 15 aa, Artificial Sequence
  Description of Artificial Sequence: Synthetic peptide
  Seed: CSLMQGSTLPRRSGA
CSLMIGSALSRRTGA

SEQ ID NO: 54605 - protein, 15 aa, Artificial Sequence
  Description of Artificial Sequence: Synthetic peptide
  Seed: CSLMQGSTLPRRSGA
CSLMIGSALSRRVGA

SEQ ID NO: 54606 - protein, 15 aa, Artificial Sequence
  Description of Artificial Sequence: Synthetic peptide
  Seed: CSLMQGSTLPRRSGA
CSLMIGSALTRRAGA

SEQ ID NO: 54607 - protein, 15 aa, Artificial Sequence
  Description of Artificial Sequence: Synthetic peptide
  Seed: CSLMQGSTLPRRSGA
CSLMIGSALTRRIGA

SEQ ID NO: 54608 - protein, 15 aa, Artificial Sequence
  Description of Artificial Sequence: Synthetic peptide
  Seed: CSLMQGSTLPRRSGA
CSLMIGSALTRRLGA

SEQ ID NO: 54609 - protein, 15 aa, Artificial Sequence
  Description of Artificial Sequence: Synthetic peptide
  Seed: CSLMQGSTLPRRSGA
CSLMIGSALTRRVGA

SEQ ID NO: 54610 - protein, 15 aa, Artificial Sequence
  Description of Artificial Sequence: Synthetic peptide
  Seed: CSLMQGSTLPRRSGA
CSLMIGSALVRRAGA

SEQ ID NO: 54611 - protein, 15 aa, Artificial Sequence
  Description of Artificial Sequence: Synthetic peptide
  Seed: CSLMQGSTLPRRSGA
CSLMIGSALVRRIGA

SEQ ID NO: 54612 - protein, 15 aa, Artificial Sequence
  Description of Artificial Sequence: Synthetic peptide
  Seed: CSLMQGSTLPRRSGA
CSLMIGSALVRRLGA

SEQ ID NO: 54613 - protein, 15 aa, Artificial Sequence
  Description of Artificial Sequence: Synthetic peptide
  Seed: CSLMQGSTLPRRSGA
CSLMIGSALVRRSGA

SEQ ID NO: 54614 - protein, 15 aa, Artificial Sequence
  Description of Artificial Sequence: Synthetic peptide
  Seed: CSLMQGSTLPRRSGA
CSLMIGSALVRRTGA

SEQ ID NO: 54615 - protein, 15 aa, Artificial Sequence
  Description of Artificial Sequence: Synthetic peptide
  Seed: CSLMQGSTLPRRSGA
CSLMIGSALVRRVGA

SEQ ID NO: 54616 - protein, 15 aa, Artificial Sequence
  Description of Artificial Sequence: Synthetic peptide
  Seed: CSLMQGSTLPRRSGA
CSLMIGSELARRAGA

SEQ ID NO: 54617 - protein, 15 aa, Artificial Sequence
  Description of Artificial Sequence: Synthetic peptide
  Seed: CSLMQGSTLPRRSGA
CSLMIGSELARRIGA

SEQ ID NO: 54618 - protein, 15 aa, Artificial Sequence
  Description of Artificial Sequence: Synthetic peptide
  Seed: CSLMQGSTLPRRSGA
CSLMIGSELARRLGA

SEQ ID NO: 54619 - protein, 15 aa, Artificial Sequence
  Description of Artificial Sequence: Synthetic peptide
  Seed: CSLMQGSTLPRRSGA
CSLMIGSELARRVGA

SEQ ID NO: 54620 - protein, 15 aa, Artificial Sequence
  Description of Artificial Sequence: Synthetic peptide
  Seed: CSLMQGSTLPRRSGA
CSLMIGSELGRRIGA

SEQ ID NO: 54621 - protein, 15 aa, Artificial Sequence
  Description of Artificial Sequence: Synthetic peptide
  Seed: CSLMQGSTLPRRSGA
CSLMIGSELGRRLGA

SEQ ID NO: 54622 - protein, 15 aa, Artificial Sequence
  Description of Artificial Sequence: Synthetic peptide
  Seed: CSLMQGSTLPRRSGA
CSLMIGSELGRRVGA

SEQ ID NO: 54623 - protein, 15 aa, Artificial Sequence
  Description of Artificial Sequence: Synthetic peptide
  Seed: CSLMQGSTLPRRSGA
CSLMIGSELSRRIGA

SEQ ID NO: 54624 - protein, 15 aa, Artificial Sequence
  Description of Artificial Sequence: Synthetic peptide
  Seed: CSLMQGSTLPRRSGA
CSLMIGSELSRRLGA

SEQ ID NO: 54625 - protein, 15 aa, Artificial Sequence
  Description of Artificial Sequence: Synthetic peptide
  Seed: CSLMQGSTLPRRSGA
CSLMIGSELSRRVGA

SEQ ID NO: 54626 - protein, 15 aa, Artificial Sequence
  Description of Artificial Sequence: Synthetic peptide
  Seed: CSLMQGSTLPRRSGA
CSLMIGSFLARRAGA

SEQ ID NO: 54627 - protein, 15 aa, Artificial Sequence
  Description of Artificial Sequence: Synthetic peptide
  Seed: CSLMQGSTLPRRSGA
CSLMIGSFLARRIGA

SEQ ID NO: 54628 - protein, 15 aa, Artificial Sequence
  Description of Artificial Sequence: Synthetic peptide
  Seed: CSLMQGSTLPRRSGA
CSLMIGSFLARRLGA

SEQ ID NO: 54629 - protein, 15 aa, Artificial Sequence
  Description of Artificial Sequence: Synthetic peptide
  Seed: CSLMQGSTLPRRSGA
CSLMIGSFLARRVGA

SEQ ID NO: 54630 - protein, 15 aa, Artificial Sequence
  Description of Artificial Sequence: Synthetic peptide
  Seed: CSLMQGSTLPRRSGA
CSLMIGSGLARRAGA

SEQ ID NO: 54631 - protein, 15 aa, Artificial Sequence
  Description of Artificial Sequence: Synthetic peptide
  Seed: CSLMQGSTLPRRSGA
CSLMIGSGLARRFGA

SEQ ID NO: 54632 - protein, 15 aa, Artificial Sequence
  Description of Artificial Sequence: Synthetic peptide
  Seed: CSLMQGSTLPRRSGA
CSLMIGSGLARRGGA

SEQ ID NO: 54633 - protein, 15 aa, Artificial Sequence
  Description of Artificial Sequence: Synthetic peptide
  Seed: CSLMQGSTLPRRSGA
CSLMIGSGLARRIGA

SEQ ID NO: 54634 - protein, 15 aa, Artificial Sequence
  Description of Artificial Sequence: Synthetic peptide
  Seed: CSLMQGSTLPRRSGA
CSLMIGSGLARRLGA

SEQ ID NO: 54635 - protein, 15 aa, Artificial Sequence
  Description of Artificial Sequence: Synthetic peptide
  Seed: CSLMQGSTLPRRSGA
CSLMIGSGLARRMGA

SEQ ID NO: 54636 - protein, 15 aa, Artificial Sequence
  Description of Artificial Sequence: Synthetic peptide
  Seed: CSLMQGSTLPRRSGA
CSLMIGSGLARRNGA

SEQ ID NO: 54637 - protein, 15 aa, Artificial Sequence
  Description of Artificial Sequence: Synthetic peptide
  Seed: CSLMQGSTLPRRSGA
CSLMIGSGLARRSGA

SEQ ID NO: 54638 - protein, 15 aa, Artificial Sequence
  Description of Artificial Sequence: Synthetic peptide
  Seed: CSLMQGSTLPRRSGA
CSLMIGSGLARRTGA

SEQ ID NO: 54639 - protein, 15 aa, Artificial Sequence
  Description of Artificial Sequence: Synthetic peptide
  Seed: CSLMQGSTLPRRSGA
CSLMIGSGLARRVGA

SEQ ID NO: 54640 - protein, 15 aa, Artificial Sequence
  Description of Artificial Sequence: Synthetic peptide
  Seed: CSLMQGSTLPRRSGA
CSLMIGSGLIRRAGA

SEQ ID NO: 54641 - protein, 15 aa, Artificial Sequence
  Description of Artificial Sequence: Synthetic peptide
  Seed: CSLMQGSTLPRRSGA
CSLMIGSGLIRRSGA

SEQ ID NO: 54642 - protein, 15 aa, Artificial Sequence
  Description of Artificial Sequence: Synthetic peptide
  Seed: CSLMQGSTLPRRSGA
CSLMIGSGLIRRTGA

SEQ ID NO: 54643 - protein, 15 aa, Artificial Sequence
  Description of Artificial Sequence: Synthetic peptide
  Seed: CSLMQGSTLPRRSGA
CSLMIGSGLIRRVGA

SEQ ID NO: 54644 - protein, 15 aa, Artificial Sequence
  Description of Artificial Sequence: Synthetic peptide
  Seed: CSLMQGSTLPRRSGA
CSLMIGSGLPRRAGA

SEQ ID NO: 54645 - protein, 15 aa, Artificial Sequence
  Description of Artificial Sequence: Synthetic peptide
  Seed: CSLMQGSTLPRRSGA
CSLMIGSGLPRRIGA

SEQ ID NO: 54646 - protein, 15 aa, Artificial Sequence
  Description of Artificial Sequence: Synthetic peptide
  Seed: CSLMQGSTLPRRSGA
CSLMIGSGLPRRSGA

SEQ ID NO: 54647 - protein, 15 aa, Artificial Sequence
  Description of Artificial Sequence: Synthetic peptide
  Seed: CSLMQGSTLPRRSGA
CSLMIGSGLPRRTGA

SEQ ID NO: 54648 - protein, 15 aa, Artificial Sequence
  Description of Artificial Sequence: Synthetic peptide
  Seed: CSLMQGSTLPRRSGA
CSLMIGSGLPRRVGA

SEQ ID NO: 54649 - protein, 15 aa, Artificial Sequence
  Description of Artificial Sequence: Synthetic peptide
  Seed: CSLMQGSTLPRRSGA
CSLMIGSGLSRRAGA

SEQ ID NO: 54650 - protein, 15 aa, Artificial Sequence
  Description of Artificial Sequence: Synthetic peptide
  Seed: CSLMQGSTLPRRSGA
CSLMIGSGLSRRIGA

SEQ ID NO: 54651 - protein, 15 aa, Artificial Sequence
  Description of Artificial Sequence: Synthetic peptide
  Seed: CSLMQGSTLPRRSGA
CSLMIGSGLSRRVGA

SEQ ID NO: 54652 - protein, 15 aa, Artificial Sequence
  Description of Artificial Sequence: Synthetic peptide
  Seed: CSLMQGSTLPRRSGA
CSLMIGSGLTRRVGA

SEQ ID NO: 54653 - protein, 15 aa, Artificial Sequence
  Description of Artificial Sequence: Synthetic peptide
  Seed: CSLMQGSTLPRRSGA
CSLMIGSGLVRRAGA

SEQ ID NO: 54654 - protein, 15 aa, Artificial Sequence
  Description of Artificial Sequence: Synthetic peptide
  Seed: CSLMQGSTLPRRSGA
CSLMIGSGLVRRIGA

SEQ ID NO: 54655 - protein, 15 aa, Artificial Sequence
  Description of Artificial Sequence: Synthetic peptide
  Seed: CSLMQGSTLPRRSGA
CSLMIGSGLVRRMGA

SEQ ID NO: 54656 - protein, 15 aa, Artificial Sequence
  Description of Artificial Sequence: Synthetic peptide
  Seed: CSLMQGSTLPRRSGA
CSLMIGSGLVRRSGA

SEQ ID NO: 54657 - protein, 15 aa, Artificial Sequence
  Description of Artificial Sequence: Synthetic peptide
  Seed: CSLMQGSTLPRRSGA
CSLMIGSGLVRRTGA

SEQ ID NO: 54658 - protein, 15 aa, Artificial Sequence
  Description of Artificial Sequence: Synthetic peptide
  Seed: CSLMQGSTLPRRSGA
CSLMIGSGLVRRVGA

SEQ ID NO: 54659 - protein, 15 aa, Artificial Sequence
  Description of Artificial Sequence: Synthetic peptide
  Seed: CSLMQGSTLPRRSGA
CSLMIGSHLARRIGA

SEQ ID NO: 54660 - protein, 15 aa, Artificial Sequence
  Description of Artificial Sequence: Synthetic peptide
  Seed: CSLMQGSTLPRRSGA
CSLMIGSHLARRLGA

SEQ ID NO: 54661 - protein, 15 aa, Artificial Sequence
  Description of Artificial Sequence: Synthetic peptide
  Seed: CSLMQGSTLPRRSGA
CSLMIGSHLARRVGA

SEQ ID NO: 54662 - protein, 15 aa, Artificial Sequence
  Description of Artificial Sequence: Synthetic peptide
  Seed: CSLMQGSTLPRRSGA
CSLMIGSILARRAGA

SEQ ID NO: 54663 - protein, 15 aa, Artificial Sequence
  Description of Artificial Sequence: Synthetic peptide
  Seed: CSLMQGSTLPRRSGA
CSLMIGSILARRCGA

SEQ ID NO: 54664 - protein, 15 aa, Artificial Sequence
  Description of Artificial Sequence: Synthetic peptide
  Seed: CSLMQGSTLPRRSGA
CSLMIGSILARRFGA

SEQ ID NO: 54665 - protein, 15 aa, Artificial Sequence
  Description of Artificial Sequence: Synthetic peptide
  Seed: CSLMQGSTLPRRSGA
CSLMIGSILARRGGA

SEQ ID NO: 54666 - protein, 15 aa, Artificial Sequence
  Description of Artificial Sequence: Synthetic peptide
  Seed: CSLMQGSTLPRRSGA
CSLMIGSILARRIGA

SEQ ID NO: 54667 - protein, 15 aa, Artificial Sequence
  Description of Artificial Sequence: Synthetic peptide
  Seed: CSLMQGSTLPRRSGA
CSLMIGSILARRLGA

SEQ ID NO: 54668 - protein, 15 aa, Artificial Sequence
  Description of Artificial Sequence: Synthetic peptide
  Seed: CSLMQGSTLPRRSGA
CSLMIGSILARRMGA

SEQ ID NO: 54669 - protein, 15 aa, Artificial Sequence
  Description of Artificial Sequence: Synthetic peptide
  Seed: CSLMQGSTLPRRSGA
CSLMIGSILARRSGA

SEQ ID NO: 54670 - protein, 15 aa, Artificial Sequence
  Description of Artificial Sequence: Synthetic peptide
  Seed: CSLMQGSTLPRRSGA
CSLMIGSILARRTGA

SEQ ID NO: 54671 - protein, 15 aa, Artificial Sequence
  Description of Artificial Sequence: Synthetic peptide
  Seed: CSLMQGSTLPRRSGA
CSLMIGSILARRVGA

SEQ ID NO: 54672 - protein, 15 aa, Artificial Sequence
  Description of Artificial Sequence: Synthetic peptide
  Seed: CSLMQGSTLPRRSGA
CSLMIGSILGRRAGA

SEQ ID NO: 54673 - protein, 15 aa, Artificial Sequence
  Description of Artificial Sequence: Synthetic peptide
  Seed: CSLMQGSTLPRRSGA
CSLMIGSILGRRIGA

SEQ ID NO: 54674 - protein, 15 aa, Artificial Sequence
  Description of Artificial Sequence: Synthetic peptide
  Seed: CSLMQGSTLPRRSGA
CSLMIGSILGRRLGA

SEQ ID NO: 54675 - protein, 15 aa, Artificial Sequence
  Description of Artificial Sequence: Synthetic peptide
  Seed: CSLMQGSTLPRRSGA
CSLMIGSILGRRMGA

SEQ ID NO: 54676 - protein, 15 aa, Artificial Sequence
  Description of Artificial Sequence: Synthetic peptide
  Seed: CSLMQGSTLPRRSGA
CSLMIGSILGRRSGA

SEQ ID NO: 54677 - protein, 15 aa, Artificial Sequence
  Description of Artificial Sequence: Synthetic peptide
  Seed: CSLMQGSTLPRRSGA
CSLMIGSILGRRTGA

SEQ ID NO: 54678 - protein, 15 aa, Artificial Sequence
  Description of Artificial Sequence: Synthetic peptide
  Seed: CSLMQGSTLPRRSGA
CSLMIGSILGRRVGA

SEQ ID NO: 54679 - protein, 15 aa, Artificial Sequence
  Description of Artificial Sequence: Synthetic peptide
  Seed: CSLMQGSTLPRRSGA
CSLMIGSILNRRIGA

SEQ ID NO: 54680 - protein, 15 aa, Artificial Sequence
  Description of Artificial Sequence: Synthetic peptide
  Seed: CSLMQGSTLPRRSGA
CSLMIGSILNRRLGA

SEQ ID NO: 54681 - protein, 15 aa, Artificial Sequence
  Description of Artificial Sequence: Synthetic peptide
  Seed: CSLMQGSTLPRRSGA
CSLMIGSILNRRVGA

SEQ ID NO: 54682 - protein, 15 aa, Artificial Sequence
  Description of Artificial Sequence: Synthetic peptide
  Seed: CSLMQGSTLPRRSGA
CSLMIGSILPRRAGA

SEQ ID NO: 54683 - protein, 15 aa, Artificial Sequence
  Description of Artificial Sequence: Synthetic peptide
  Seed: CSLMQGSTLPRRSGA
CSLMIGSILPRRIGA

SEQ ID NO: 54684 - protein, 15 aa, Artificial Sequence
  Description of Artificial Sequence: Synthetic peptide
  Seed: CSLMQGSTLPRRSGA
CSLMIGSILPRRLGA

SEQ ID NO: 54685 - protein, 15 aa, Artificial Sequence
  Description of Artificial Sequence: Synthetic peptide
  Seed: CSLMQGSTLPRRSGA
CSLMIGSILPRRMGA

SEQ ID NO: 54686 - protein, 15 aa, Artificial Sequence
  Description of Artificial Sequence: Synthetic peptide
  Seed: CSLMQGSTLPRRSGA
CSLMIGSILPRRVGA

SEQ ID NO: 54687 - protein, 15 aa, Artificial Sequence
  Description of Artificial Sequence: Synthetic peptide
  Seed: CSLMQGSTLPRRSGA
CSLMIGSILSRRAGA

SEQ ID NO: 54688 - protein, 15 aa, Artificial Sequence
  Description of Artificial Sequence: Synthetic peptide
  Seed: CSLMQGSTLPRRSGA
CSLMIGSILSRRIGA

SEQ ID NO: 54689 - protein, 15 aa, Artificial Sequence
  Description of Artificial Sequence: Synthetic peptide
  Seed: CSLMQGSTLPRRSGA
CSLMIGSILSRRLGA

SEQ ID NO: 54690 - protein, 15 aa, Artificial Sequence
  Description of Artificial Sequence: Synthetic peptide
  Seed: CSLMQGSTLPRRSGA
CSLMIGSILSRRMGA

SEQ ID NO: 54691 - protein, 15 aa, Artificial Sequence
  Description of Artificial Sequence: Synthetic peptide
  Seed: CSLMQGSTLPRRSGA
CSLMIGSILSRRSGA

SEQ ID NO: 54692 - protein, 15 aa, Artificial Sequence
  Description of Artificial Sequence: Synthetic peptide
  Seed: CSLMQGSTLPRRSGA
CSLMIGSILSRRTGA

SEQ ID NO: 54693 - protein, 15 aa, Artificial Sequence
  Description of Artificial Sequence: Synthetic peptide
  Seed: CSLMQGSTLPRRSGA
CSLMIGSILSRRVGA

SEQ ID NO: 54694 - protein, 15 aa, Artificial Sequence
  Description of Artificial Sequence: Synthetic peptide
  Seed: CSLMQGSTLPRRSGA
CSLMIGSILTRRAGA

SEQ ID NO: 54695 - protein, 15 aa, Artificial Sequence
  Description of Artificial Sequence: Synthetic peptide
  Seed: CSLMQGSTLPRRSGA
CSLMIGSILTRRIGA

SEQ ID NO: 54696 - protein, 15 aa, Artificial Sequence
  Description of Artificial Sequence: Synthetic peptide
  Seed: CSLMQGSTLPRRSGA
CSLMIGSILTRRLGA

SEQ ID NO: 54697 - protein, 15 aa, Artificial Sequence
  Description of Artificial Sequence: Synthetic peptide
  Seed: CSLMQGSTLPRRSGA
CSLMIGSILTRRVGA

SEQ ID NO: 54698 - protein, 15 aa, Artificial Sequence
  Description of Artificial Sequence: Synthetic peptide
  Seed: CSLMQGSTLPRRSGA
CSLMIGSILVRRVGA

SEQ ID NO: 54699 - protein, 15 aa, Artificial Sequence
  Description of Artificial Sequence: Synthetic peptide
  Seed: CSLMQGSTLPRRSGA
CSLMIGSLLARRAGA

SEQ ID NO: 54700 - protein, 15 aa, Artificial Sequence
  Description of Artificial Sequence: Synthetic peptide
  Seed: CSLMQGSTLPRRSGA
CSLMIGSLLARRCGA

SEQ ID NO: 54701 - protein, 15 aa, Artificial Sequence
  Description of Artificial Sequence: Synthetic peptide
  Seed: CSLMQGSTLPRRSGA
CSLMIGSLLARRFGA

SEQ ID NO: 54702 - protein, 15 aa, Artificial Sequence
  Description of Artificial Sequence: Synthetic peptide
  Seed: CSLMQGSTLPRRSGA
CSLMIGSLLARRGGA

SEQ ID NO: 54703 - protein, 15 aa, Artificial Sequence
  Description of Artificial Sequence: Synthetic peptide
  Seed: CSLMQGSTLPRRSGA
CSLMIGSLLARRIGA

SEQ ID NO: 54704 - protein, 15 aa, Artificial Sequence
  Description of Artificial Sequence: Synthetic peptide
  Seed: CSLMQGSTLPRRSGA
CSLMIGSLLARRLGA

SEQ ID NO: 54705 - protein, 15 aa, Artificial Sequence
  Description of Artificial Sequence: Synthetic peptide
  Seed: CSLMQGSTLPRRSGA
CSLMIGSLLARRMGA

SEQ ID NO: 54706 - protein, 15 aa, Artificial Sequence
  Description of Artificial Sequence: Synthetic peptide
  Seed: CSLMQGSTLPRRSGA
CSLMIGSLLARRNGA

SEQ ID NO: 54707 - protein, 15 aa, Artificial Sequence
  Description of Artificial Sequence: Synthetic peptide
  Seed: CSLMQGSTLPRRSGA
CSLMIGSLLARRPGA

SEQ ID NO: 54708 - protein, 15 aa, Artificial Sequence
  Description of Artificial Sequence: Synthetic peptide
  Seed: CSLMQGSTLPRRSGA
CSLMIGSLLARRSGA

SEQ ID NO: 54709 - protein, 15 aa, Artificial Sequence
  Description of Artificial Sequence: Synthetic peptide
  Seed: CSLMQGSTLPRRSGA
CSLMIGSLLARRTGA

SEQ ID NO: 54710 - protein, 15 aa, Artificial Sequence
  Description of Artificial Sequence: Synthetic peptide
  Seed: CSLMQGSTLPRRSGA
CSLMIGSLLARRVGA

SEQ ID NO: 54711 - protein, 15 aa, Artificial Sequence
  Description of Artificial Sequence: Synthetic peptide
  Seed: CSLMQGSTLPRRSGA
CSLMIGSLLARRYGA

SEQ ID NO: 54712 - protein, 15 aa, Artificial Sequence
  Description of Artificial Sequence: Synthetic peptide
  Seed: CSLMQGSTLPRRSGA
CSLMIGSLLGRRAGA

SEQ ID NO: 54713 - protein, 15 aa, Artificial Sequence
  Description of Artificial Sequence: Synthetic peptide
  Seed: CSLMQGSTLPRRSGA
CSLMIGSLLGRRCGA

SEQ ID NO: 54714 - protein, 15 aa, Artificial Sequence
  Description of Artificial Sequence: Synthetic peptide
  Seed: CSLMQGSTLPRRSGA
CSLMIGSLLGRRFGA

SEQ ID NO: 54715 - protein, 15 aa, Artificial Sequence
  Description of Artificial Sequence: Synthetic peptide
  Seed: CSLMQGSTLPRRSGA
CSLMIGSLLGRRGGA

SEQ ID NO: 54716 - protein, 15 aa, Artificial Sequence
  Description of Artificial Sequence: Synthetic peptide
  Seed: CSLMQGSTLPRRSGA
CSLMIGSLLGRRIGA

SEQ ID NO: 54717 - protein, 15 aa, Artificial Sequence
  Description of Artificial Sequence: Synthetic peptide
  Seed: CSLMQGSTLPRRSGA
CSLMIGSLLGRRLGA

SEQ ID NO: 54718 - protein, 15 aa, Artificial Sequence
  Description of Artificial Sequence: Synthetic peptide
  Seed: CSLMQGSTLPRRSGA
CSLMIGSLLGRRMGA

SEQ ID NO: 54719 - protein, 15 aa, Artificial Sequence
  Description of Artificial Sequence: Synthetic peptide
  Seed: CSLMQGSTLPRRSGA
CSLMIGSLLGRRSGA

SEQ ID NO: 54720 - protein, 15 aa, Artificial Sequence
  Description of Artificial Sequence: Synthetic peptide
  Seed: CSLMQGSTLPRRSGA
CSLMIGSLLGRRTGA

SEQ ID NO: 54721 - protein, 15 aa, Artificial Sequence
  Description of Artificial Sequence: Synthetic peptide
  Seed: CSLMQGSTLPRRSGA
CSLMIGSLLGRRVGA

SEQ ID NO: 54722 - protein, 15 aa, Artificial Sequence
  Description of Artificial Sequence: Synthetic peptide
  Seed: CSLMQGSTLPRRSGA
CSLMIGSLLIRRAGA

SEQ ID NO: 54723 - protein, 15 aa, Artificial Sequence
  Description of Artificial Sequence: Synthetic peptide
  Seed: CSLMQGSTLPRRSGA
CSLMIGSLLIRRIGA

SEQ ID NO: 54724 - protein, 15 aa, Artificial Sequence
  Description of Artificial Sequence: Synthetic peptide
  Seed: CSLMQGSTLPRRSGA
CSLMIGSLLIRRVGA

SEQ ID NO: 54725 - protein, 15 aa, Artificial Sequence
  Description of Artificial Sequence: Synthetic peptide
  Seed: CSLMQGSTLPRRSGA
CSLMIGSLLNRRAGA

SEQ ID NO: 54726 - protein, 15 aa, Artificial Sequence
  Description of Artificial Sequence: Synthetic peptide
  Seed: CSLMQGSTLPRRSGA
CSLMIGSLLNRRIGA

SEQ ID NO: 54727 - protein, 15 aa, Artificial Sequence
  Description of Artificial Sequence: Synthetic peptide
  Seed: CSLMQGSTLPRRSGA
CSLMIGSLLNRRLGA

SEQ ID NO: 54728 - protein, 15 aa, Artificial Sequence
  Description of Artificial Sequence: Synthetic peptide
  Seed: CSLMQGSTLPRRSGA
CSLMIGSLLNRRMGA

SEQ ID NO: 54729 - protein, 15 aa, Artificial Sequence
  Description of Artificial Sequence: Synthetic peptide
  Seed: CSLMQGSTLPRRSGA
CSLMIGSLLNRRTGA

SEQ ID NO: 54730 - protein, 15 aa, Artificial Sequence
  Description of Artificial Sequence: Synthetic peptide
  Seed: CSLMQGSTLPRRSGA
CSLMIGSLLNRRVGA

SEQ ID NO: 54731 - protein, 15 aa, Artificial Sequence
  Description of Artificial Sequence: Synthetic peptide
  Seed: CSLMQGSTLPRRSGA
CSLMIGSLLPRRAGA

SEQ ID NO: 54732 - protein, 15 aa, Artificial Sequence
  Description of Artificial Sequence: Synthetic peptide
  Seed: CSLMQGSTLPRRSGA
CSLMIGSLLPRRIGA

SEQ ID NO: 54733 - protein, 15 aa, Artificial Sequence
  Description of Artificial Sequence: Synthetic peptide
  Seed: CSLMQGSTLPRRSGA
CSLMIGSLLPRRLGA

SEQ ID NO: 54734 - protein, 15 aa, Artificial Sequence
  Description of Artificial Sequence: Synthetic peptide
  Seed: CSLMQGSTLPRRSGA
CSLMIGSLLPRRMGA

SEQ ID NO: 54735 - protein, 15 aa, Artificial Sequence
  Description of Artificial Sequence: Synthetic peptide
  Seed: CSLMQGSTLPRRSGA
CSLMIGSLLPRRSGA

SEQ ID NO: 54736 - protein, 15 aa, Artificial Sequence
  Description of Artificial Sequence: Synthetic peptide
  Seed: CSLMQGSTLPRRSGA
CSLMIGSLLPRRTGA

SEQ ID NO: 54737 - protein, 15 aa, Artificial Sequence
  Description of Artificial Sequence: Synthetic peptide
  Seed: CSLMQGSTLPRRSGA
CSLMIGSLLPRRVGA

SEQ ID NO: 54738 - protein, 15 aa, Artificial Sequence
  Description of Artificial Sequence: Synthetic peptide
  Seed: CSLMQGSTLPRRSGA
CSLMIGSLLSRRAGA

SEQ ID NO: 54739 - protein, 15 aa, Artificial Sequence
  Description of Artificial Sequence: Synthetic peptide
  Seed: CSLMQGSTLPRRSGA
CSLMIGSLLSRRCGA

SEQ ID NO: 54740 - protein, 15 aa, Artificial Sequence
  Description of Artificial Sequence: Synthetic peptide
  Seed: CSLMQGSTLPRRSGA
CSLMIGSLLSRRFGA

SEQ ID NO: 54741 - protein, 15 aa, Artificial Sequence
  Description of Artificial Sequence: Synthetic peptide
  Seed: CSLMQGSTLPRRSGA
CSLMIGSLLSRRGGA

SEQ ID NO: 54742 - protein, 15 aa, Artificial Sequence
  Description of Artificial Sequence: Synthetic peptide
  Seed: CSLMQGSTLPRRSGA
CSLMIGSLLSRRIGA

SEQ ID NO: 54743 - protein, 15 aa, Artificial Sequence
  Description of Artificial Sequence: Synthetic peptide
  Seed: CSLMQGSTLPRRSGA
CSLMIGSLLSRRLGA

SEQ ID NO: 54744 - protein, 15 aa, Artificial Sequence
  Description of Artificial Sequence: Synthetic peptide
  Seed: CSLMQGSTLPRRSGA
CSLMIGSLLSRRMGA

SEQ ID NO: 54745 - protein, 15 aa, Artificial Sequence
  Description of Artificial Sequence: Synthetic peptide
  Seed: CSLMQGSTLPRRSGA
CSLMIGSLLSRRSGA

SEQ ID NO: 54746 - protein, 15 aa, Artificial Sequence
  Description of Artificial Sequence: Synthetic peptide
  Seed: CSLMQGSTLPRRSGA
CSLMIGSLLSRRTGA

SEQ ID NO: 54747 - protein, 15 aa, Artificial Sequence
  Description of Artificial Sequence: Synthetic peptide
  Seed: CSLMQGSTLPRRSGA
CSLMIGSLLSRRVGA

SEQ ID NO: 54748 - protein, 15 aa, Artificial Sequence
  Description of Artificial Sequence: Synthetic peptide
  Seed: CSLMQGSTLPRRSGA
CSLMIGSLLTRRAGA

SEQ ID NO: 54749 - protein, 15 aa, Artificial Sequence
  Description of Artificial Sequence: Synthetic peptide
  Seed: CSLMQGSTLPRRSGA
CSLMIGSLLTRRIGA

SEQ ID NO: 54750 - protein, 15 aa, Artificial Sequence
  Description of Artificial Sequence: Synthetic peptide
  Seed: CSLMQGSTLPRRSGA
CSLMIGSLLTRRLGA

SEQ ID NO: 54751 - protein, 15 aa, Artificial Sequence
  Description of Artificial Sequence: Synthetic peptide
  Seed: CSLMQGSTLPRRSGA
CSLMIGSLLTRRMGA

SEQ ID NO: 54752 - protein, 15 aa, Artificial Sequence
  Description of Artificial Sequence: Synthetic peptide
  Seed: CSLMQGSTLPRRSGA
CSLMIGSLLTRRSGA

SEQ ID NO: 54753 - protein, 15 aa, Artificial Sequence
  Description of Artificial Sequence: Synthetic peptide
  Seed: CSLMQGSTLPRRSGA
CSLMIGSLLTRRTGA

SEQ ID NO: 54754 - protein, 15 aa, Artificial Sequence
  Description of Artificial Sequence: Synthetic peptide
  Seed: CSLMQGSTLPRRSGA
CSLMIGSLLTRRVGA

SEQ ID NO: 54755 - protein, 15 aa, Artificial Sequence
  Description of Artificial Sequence: Synthetic peptide
  Seed: CSLMQGSTLPRRSGA
CSLMIGSLLVRRAGA

SEQ ID NO: 54756 - protein, 15 aa, Artificial Sequence
  Description of Artificial Sequence: Synthetic peptide
  Seed: CSLMQGSTLPRRSGA
CSLMIGSLLVRRIGA

SEQ ID NO: 54757 - protein, 15 aa, Artificial Sequence
  Description of Artificial Sequence: Synthetic peptide
  Seed: CSLMQGSTLPRRSGA
CSLMIGSLLVRRLGA

SEQ ID NO: 54758 - protein, 15 aa, Artificial Sequence
  Description of Artificial Sequence: Synthetic peptide
  Seed: CSLMQGSTLPRRSGA
CSLMIGSLLVRRMGA

SEQ ID NO: 54759 - protein, 15 aa, Artificial Sequence
  Description of Artificial Sequence: Synthetic peptide
  Seed: CSLMQGSTLPRRSGA
CSLMIGSLLVRRSGA

SEQ ID NO: 54760 - protein, 15 aa, Artificial Sequence
  Description of Artificial Sequence: Synthetic peptide
  Seed: CSLMQGSTLPRRSGA
CSLMIGSLLVRRTGA

SEQ ID NO: 54761 - protein, 15 aa, Artificial Sequence
  Description of Artificial Sequence: Synthetic peptide
  Seed: CSLMQGSTLPRRSGA
CSLMIGSLLVRRVGA

SEQ ID NO: 54762 - protein, 15 aa, Artificial Sequence
  Description of Artificial Sequence: Synthetic peptide
  Seed: CSLMQGSTLPRRSGA
CSLMIGSMLARRAGA

SEQ ID NO: 54763 - protein, 15 aa, Artificial Sequence
  Description of Artificial Sequence: Synthetic peptide
  Seed: CSLMQGSTLPRRSGA
CSLMIGSMLARRCGA

SEQ ID NO: 54764 - protein, 15 aa, Artificial Sequence
  Description of Artificial Sequence: Synthetic peptide
  Seed: CSLMQGSTLPRRSGA
CSLMIGSMLARRFGA

SEQ ID NO: 54765 - protein, 15 aa, Artificial Sequence
  Description of Artificial Sequence: Synthetic peptide
  Seed: CSLMQGSTLPRRSGA
CSLMIGSMLARRGGA

SEQ ID NO: 54766 - protein, 15 aa, Artificial Sequence
  Description of Artificial Sequence: Synthetic peptide
  Seed: CSLMQGSTLPRRSGA
CSLMIGSMLARRHGA

SEQ ID NO: 54767 - protein, 15 aa, Artificial Sequence
  Description of Artificial Sequence: Synthetic peptide
  Seed: CSLMQGSTLPRRSGA
CSLMIGSMLARRIGA

SEQ ID NO: 54768 - protein, 15 aa, Artificial Sequence
  Description of Artificial Sequence: Synthetic peptide
  Seed: CSLMQGSTLPRRSGA
CSLMIGSMLARRLGA

SEQ ID NO: 54769 - protein, 15 aa, Artificial Sequence
  Description of Artificial Sequence: Synthetic peptide
  Seed: CSLMQGSTLPRRSGA
CSLMIGSMLARRMGA

SEQ ID NO: 54770 - protein, 15 aa, Artificial Sequence
  Description of Artificial Sequence: Synthetic peptide
  Seed: CSLMQGSTLPRRSGA
CSLMIGSMLARRNGA

SEQ ID NO: 54771 - protein, 15 aa, Artificial Sequence
  Description of Artificial Sequence: Synthetic peptide
  Seed: CSLMQGSTLPRRSGA
CSLMIGSMLARRPGA

SEQ ID NO: 54772 - protein, 15 aa, Artificial Sequence
  Description of Artificial Sequence: Synthetic peptide
  Seed: CSLMQGSTLPRRSGA
CSLMIGSMLARRSGA

SEQ ID NO: 54773 - protein, 15 aa, Artificial Sequence
  Description of Artificial Sequence: Synthetic peptide
  Seed: CSLMQGSTLPRRSGA
CSLMIGSMLARRTGA

SEQ ID NO: 54774 - protein, 15 aa, Artificial Sequence
  Description of Artificial Sequence: Synthetic peptide
  Seed: CSLMQGSTLPRRSGA
CSLMIGSMLARRVGA

SEQ ID NO: 54775 - protein, 15 aa, Artificial Sequence
  Description of Artificial Sequence: Synthetic peptide
  Seed: CSLMQGSTLPRRSGA
CSLMIGSMLARRWGA

SEQ ID NO: 54776 - protein, 15 aa, Artificial Sequence
  Description of Artificial Sequence: Synthetic peptide
  Seed: CSLMQGSTLPRRSGA
CSLMIGSMLARRYGA

SEQ ID NO: 54777 - protein, 15 aa, Artificial Sequence
  Description of Artificial Sequence: Synthetic peptide
  Seed: CSLMQGSTLPRRSGA
CSLMIGSMLGRRAGA

SEQ ID NO: 54778 - protein, 15 aa, Artificial Sequence
  Description of Artificial Sequence: Synthetic peptide
  Seed: CSLMQGSTLPRRSGA
CSLMIGSMLGRRCGA

SEQ ID NO: 54779 - protein, 15 aa, Artificial Sequence
  Description of Artificial Sequence: Synthetic peptide
  Seed: CSLMQGSTLPRRSGA
CSLMIGSMLGRRFGA

SEQ ID NO: 54780 - protein, 15 aa, Artificial Sequence
  Description of Artificial Sequence: Synthetic peptide
  Seed: CSLMQGSTLPRRSGA
CSLMIGSMLGRRGGA

SEQ ID NO: 54781 - protein, 15 aa, Artificial Sequence
  Description of Artificial Sequence: Synthetic peptide
  Seed: CSLMQGSTLPRRSGA
CSLMIGSMLGRRIGA

SEQ ID NO: 54782 - protein, 15 aa, Artificial Sequence
  Description of Artificial Sequence: Synthetic peptide
  Seed: CSLMQGSTLPRRSGA
CSLMIGSMLGRRLGA

SEQ ID NO: 54783 - protein, 15 aa, Artificial Sequence
  Description of Artificial Sequence: Synthetic peptide
  Seed: CSLMQGSTLPRRSGA
CSLMIGSMLGRRMGA

SEQ ID NO: 54784 - protein, 15 aa, Artificial Sequence
  Description of Artificial Sequence: Synthetic peptide
  Seed: CSLMQGSTLPRRSGA
CSLMIGSMLGRRSGA

SEQ ID NO: 54785 - protein, 15 aa, Artificial Sequence
  Description of Artificial Sequence: Synthetic peptide
  Seed: CSLMQGSTLPRRSGA
CSLMIGSMLGRRTGA

SEQ ID NO: 54786 - protein, 15 aa, Artificial Sequence
  Description of Artificial Sequence: Synthetic peptide
  Seed: CSLMQGSTLPRRSGA
CSLMIGSMLGRRVGA

SEQ ID NO: 54787 - protein, 15 aa, Artificial Sequence
  Description of Artificial Sequence: Synthetic peptide
  Seed: CSLMQGSTLPRRSGA
CSLMIGSMLIRRAGA

SEQ ID NO: 54788 - protein, 15 aa, Artificial Sequence
  Description of Artificial Sequence: Synthetic peptide
  Seed: CSLMQGSTLPRRSGA
CSLMIGSMLIRRIGA

SEQ ID NO: 54789 - protein, 15 aa, Artificial Sequence
  Description of Artificial Sequence: Synthetic peptide
  Seed: CSLMQGSTLPRRSGA
CSLMIGSMLIRRLGA

SEQ ID NO: 54790 - protein, 15 aa, Artificial Sequence
  Description of Artificial Sequence: Synthetic peptide
  Seed: CSLMQGSTLPRRSGA
CSLMIGSMLIRRVGA

SEQ ID NO: 54791 - protein, 15 aa, Artificial Sequence
  Description of Artificial Sequence: Synthetic peptide
  Seed: CSLMQGSTLPRRSGA
CSLMIGSMLNRRAGA

SEQ ID NO: 54792 - protein, 15 aa, Artificial Sequence
  Description of Artificial Sequence: Synthetic peptide
  Seed: CSLMQGSTLPRRSGA
CSLMIGSMLNRRIGA

SEQ ID NO: 54793 - protein, 15 aa, Artificial Sequence
  Description of Artificial Sequence: Synthetic peptide
  Seed: CSLMQGSTLPRRSGA
CSLMIGSMLNRRLGA

SEQ ID NO: 54794 - protein, 15 aa, Artificial Sequence
  Description of Artificial Sequence: Synthetic peptide
  Seed: CSLMQGSTLPRRSGA
CSLMIGSMLNRRMGA

SEQ ID NO: 54795 - protein, 15 aa, Artificial Sequence
  Description of Artificial Sequence: Synthetic peptide
  Seed: CSLMQGSTLPRRSGA
CSLMIGSMLNRRTGA

SEQ ID NO: 54796 - protein, 15 aa, Artificial Sequence
  Description of Artificial Sequence: Synthetic peptide
  Seed: CSLMQGSTLPRRSGA
CSLMIGSMLNRRVGA

SEQ ID NO: 54797 - protein, 15 aa, Artificial Sequence
  Description of Artificial Sequence: Synthetic peptide
  Seed: CSLMQGSTLPRRSGA
CSLMIGSMLPRRAGA

SEQ ID NO: 54798 - protein, 15 aa, Artificial Sequence
  Description of Artificial Sequence: Synthetic peptide
  Seed: CSLMQGSTLPRRSGA
CSLMIGSMLPRRFGA

SEQ ID NO: 54799 - protein, 15 aa, Artificial Sequence
  Description of Artificial Sequence: Synthetic peptide
  Seed: CSLMQGSTLPRRSGA
CSLMIGSMLPRRIGA

SEQ ID NO: 54800 - protein, 15 aa, Artificial Sequence
  Description of Artificial Sequence: Synthetic peptide
  Seed: CSLMQGSTLPRRSGA
CSLMIGSMLPRRLGA

SEQ ID NO: 54801 - protein, 15 aa, Artificial Sequence
  Description of Artificial Sequence: Synthetic peptide
  Seed: CSLMQGSTLPRRSGA
CSLMIGSMLPRRMGA

SEQ ID NO: 54802 - protein, 15 aa, Artificial Sequence
  Description of Artificial Sequence: Synthetic peptide
  Seed: CSLMQGSTLPRRSGA
CSLMIGSMLPRRSGA

SEQ ID NO: 54803 - protein, 15 aa, Artificial Sequence
  Description of Artificial Sequence: Synthetic peptide
  Seed: CSLMQGSTLPRRSGA
CSLMIGSMLPRRTGA

SEQ ID NO: 54804 - protein, 15 aa, Artificial Sequence
  Description of Artificial Sequence: Synthetic peptide
  Seed: CSLMQGSTLPRRSGA
CSLMIGSMLPRRVGA

SEQ ID NO: 54805 - protein, 15 aa, Artificial Sequence
  Description of Artificial Sequence: Synthetic peptide
  Seed: CSLMQGSTLPRRSGA
CSLMIGSMLSRRAGA

SEQ ID NO: 54806 - protein, 15 aa, Artificial Sequence
  Description of Artificial Sequence: Synthetic peptide
  Seed: CSLMQGSTLPRRSGA
CSLMIGSMLSRRCGA

SEQ ID NO: 54807 - protein, 15 aa, Artificial Sequence
  Description of Artificial Sequence: Synthetic peptide
  Seed: CSLMQGSTLPRRSGA
CSLMIGSMLSRRFGA

SEQ ID NO: 54808 - protein, 15 aa, Artificial Sequence
  Description of Artificial Sequence: Synthetic peptide
  Seed: CSLMQGSTLPRRSGA
CSLMIGSMLSRRGGA

SEQ ID NO: 54809 - protein, 15 aa, Artificial Sequence
  Description of Artificial Sequence: Synthetic peptide
  Seed: CSLMQGSTLPRRSGA
CSLMIGSMLSRRIGA

SEQ ID NO: 54810 - protein, 15 aa, Artificial Sequence
  Description of Artificial Sequence: Synthetic peptide
  Seed: CSLMQGSTLPRRSGA
CSLMIGSMLSRRLGA

SEQ ID NO: 54811 - protein, 15 aa, Artificial Sequence
  Description of Artificial Sequence: Synthetic peptide
  Seed: CSLMQGSTLPRRSGA
CSLMIGSMLSRRMGA

SEQ ID NO: 54812 - protein, 15 aa, Artificial Sequence
  Description of Artificial Sequence: Synthetic peptide
  Seed: CSLMQGSTLPRRSGA
CSLMIGSMLSRRNGA

SEQ ID NO: 54813 - protein, 15 aa, Artificial Sequence
  Description of Artificial Sequence: Synthetic peptide
  Seed: CSLMQGSTLPRRSGA
CSLMIGSMLSRRSGA

SEQ ID NO: 54814 - protein, 15 aa, Artificial Sequence
  Description of Artificial Sequence: Synthetic peptide
  Seed: CSLMQGSTLPRRSGA
CSLMIGSMLSRRTGA

SEQ ID NO: 54815 - protein, 15 aa, Artificial Sequence
  Description of Artificial Sequence: Synthetic peptide
  Seed: CSLMQGSTLPRRSGA
CSLMIGSMLSRRVGA

SEQ ID NO: 54816 - protein, 15 aa, Artificial Sequence
  Description of Artificial Sequence: Synthetic peptide
  Seed: CSLMQGSTLPRRSGA
CSLMIGSMLTRRAGA

SEQ ID NO: 54817 - protein, 15 aa, Artificial Sequence
  Description of Artificial Sequence: Synthetic peptide
  Seed: CSLMQGSTLPRRSGA
CSLMIGSMLTRRIGA

SEQ ID NO: 54818 - protein, 15 aa, Artificial Sequence
  Description of Artificial Sequence: Synthetic peptide
  Seed: CSLMQGSTLPRRSGA
CSLMIGSMLTRRLGA

SEQ ID NO: 54819 - protein, 15 aa, Artificial Sequence
  Description of Artificial Sequence: Synthetic peptide
  Seed: CSLMQGSTLPRRSGA
CSLMIGSMLTRRMGA

SEQ ID NO: 54820 - protein, 15 aa, Artificial Sequence
  Description of Artificial Sequence: Synthetic peptide
  Seed: CSLMQGSTLPRRSGA
CSLMIGSMLTRRSGA

SEQ ID NO: 54821 - protein, 15 aa, Artificial Sequence
  Description of Artificial Sequence: Synthetic peptide
  Seed: CSLMQGSTLPRRSGA
CSLMIGSMLTRRTGA

SEQ ID NO: 54822 - protein, 15 aa, Artificial Sequence
  Description of Artificial Sequence: Synthetic peptide
  Seed: CSLMQGSTLPRRSGA
CSLMIGSMLTRRVGA

SEQ ID NO: 54823 - protein, 15 aa, Artificial Sequence
  Description of Artificial Sequence: Synthetic peptide
  Seed: CSLMQGSTLPRRSGA
CSLMIGSMLVRRAGA

SEQ ID NO: 54824 - protein, 15 aa, Artificial Sequence
  Description of Artificial Sequence: Synthetic peptide
  Seed: CSLMQGSTLPRRSGA
CSLMIGSMLVRRIGA

SEQ ID NO: 54825 - protein, 15 aa, Artificial Sequence
  Description of Artificial Sequence: Synthetic peptide
  Seed: CSLMQGSTLPRRSGA
CSLMIGSMLVRRLGA

SEQ ID NO: 54826 - protein, 15 aa, Artificial Sequence
  Description of Artificial Sequence: Synthetic peptide
  Seed: CSLMQGSTLPRRSGA
CSLMIGSMLVRRMGA

SEQ ID NO: 54827 - protein, 15 aa, Artificial Sequence
  Description of Artificial Sequence: Synthetic peptide
  Seed: CSLMQGSTLPRRSGA
CSLMIGSMLVRRSGA

SEQ ID NO: 54828 - protein, 15 aa, Artificial Sequence
  Description of Artificial Sequence: Synthetic peptide
  Seed: CSLMQGSTLPRRSGA
CSLMIGSMLVRRTGA

SEQ ID NO: 54829 - protein, 15 aa, Artificial Sequence
  Description of Artificial Sequence: Synthetic peptide
  Seed: CSLMQGSTLPRRSGA
CSLMIGSMLVRRVGA

SEQ ID NO: 54830 - protein, 15 aa, Artificial Sequence
  Description of Artificial Sequence: Synthetic peptide
  Seed: CSLMQGSTLPRRSGA
CSLMIGSNLARRIGA

SEQ ID NO: 54831 - protein, 15 aa, Artificial Sequence
  Description of Artificial Sequence: Synthetic peptide
  Seed: CSLMQGSTLPRRSGA
CSLMIGSNLARRLGA

SEQ ID NO: 54832 - protein, 15 aa, Artificial Sequence
  Description of Artificial Sequence: Synthetic peptide
  Seed: CSLMQGSTLPRRSGA
CSLMIGSNLARRVGA

SEQ ID NO: 54833 - protein, 15 aa, Artificial Sequence
  Description of Artificial Sequence: Synthetic peptide
  Seed: CSLMQGSTLPRRSGA
CSLMIGSQLARRAGA

SEQ ID NO: 54834 - protein, 15 aa, Artificial Sequence
  Description of Artificial Sequence: Synthetic peptide
  Seed: CSLMQGSTLPRRSGA
CSLMIGSQLARRIGA

SEQ ID NO: 54835 - protein, 15 aa, Artificial Sequence
  Description of Artificial Sequence: Synthetic peptide
  Seed: CSLMQGSTLPRRSGA
CSLMIGSQLARRLGA

SEQ ID NO: 54836 - protein, 15 aa, Artificial Sequence
  Description of Artificial Sequence: Synthetic peptide
  Seed: CSLMQGSTLPRRSGA
CSLMIGSQLARRMGA

SEQ ID NO: 54837 - protein, 15 aa, Artificial Sequence
  Description of Artificial Sequence: Synthetic peptide
  Seed: CSLMQGSTLPRRSGA
CSLMIGSQLARRSGA

SEQ ID NO: 54838 - protein, 15 aa, Artificial Sequence
  Description of Artificial Sequence: Synthetic peptide
  Seed: CSLMQGSTLPRRSGA
CSLMIGSQLARRTGA

SEQ ID NO: 54839 - protein, 15 aa, Artificial Sequence
  Description of Artificial Sequence: Synthetic peptide
  Seed: CSLMQGSTLPRRSGA
CSLMIGSQLARRVGA

SEQ ID NO: 54840 - protein, 15 aa, Artificial Sequence
  Description of Artificial Sequence: Synthetic peptide
  Seed: CSLMQGSTLPRRSGA
CSLMIGSQLGRRAGA

SEQ ID NO: 54841 - protein, 15 aa, Artificial Sequence
  Description of Artificial Sequence: Synthetic peptide
  Seed: CSLMQGSTLPRRSGA
CSLMIGSQLGRRIGA

SEQ ID NO: 54842 - protein, 15 aa, Artificial Sequence
  Description of Artificial Sequence: Synthetic peptide
  Seed: CSLMQGSTLPRRSGA
CSLMIGSQLGRRLGA

SEQ ID NO: 54843 - protein, 15 aa, Artificial Sequence
  Description of Artificial Sequence: Synthetic peptide
  Seed: CSLMQGSTLPRRSGA
CSLMIGSQLGRRVGA

SEQ ID NO: 54844 - protein, 15 aa, Artificial Sequence
  Description of Artificial Sequence: Synthetic peptide
  Seed: CSLMQGSTLPRRSGA
CSLMIGSQLPRRIGA

SEQ ID NO: 54845 - protein, 15 aa, Artificial Sequence
  Description of Artificial Sequence: Synthetic peptide
  Seed: CSLMQGSTLPRRSGA
CSLMIGSQLPRRVGA

SEQ ID NO: 54846 - protein, 15 aa, Artificial Sequence
  Description of Artificial Sequence: Synthetic peptide
  Seed: CSLMQGSTLPRRSGA
CSLMIGSQLSRRAGA

SEQ ID NO: 54847 - protein, 15 aa, Artificial Sequence
  Description of Artificial Sequence: Synthetic peptide
  Seed: CSLMQGSTLPRRSGA
CSLMIGSQLSRRIGA

SEQ ID NO: 54848 - protein, 15 aa, Artificial Sequence
  Description of Artificial Sequence: Synthetic peptide
  Seed: CSLMQGSTLPRRSGA
CSLMIGSQLSRRLGA

SEQ ID NO: 54849 - protein, 15 aa, Artificial Sequence
  Description of Artificial Sequence: Synthetic peptide
  Seed: CSLMQGSTLPRRSGA
CSLMIGSQLSRRVGA

SEQ ID NO: 54850 - protein, 15 aa, Artificial Sequence
  Description of Artificial Sequence: Synthetic peptide
  Seed: CSLMQGSTLPRRSGA
CSLMIGSSLARRAGA

SEQ ID NO: 54851 - protein, 15 aa, Artificial Sequence
  Description of Artificial Sequence: Synthetic peptide
  Seed: CSLMQGSTLPRRSGA
CSLMIGSSLARRIGA

SEQ ID NO: 54852 - protein, 15 aa, Artificial Sequence
  Description of Artificial Sequence: Synthetic peptide
  Seed: CSLMQGSTLPRRSGA
CSLMIGSSLARRLGA

SEQ ID NO: 54853 - protein, 15 aa, Artificial Sequence
  Description of Artificial Sequence: Synthetic peptide
  Seed: CSLMQGSTLPRRSGA
CSLMIGSSLARRMGA

SEQ ID NO: 54854 - protein, 15 aa, Artificial Sequence
  Description of Artificial Sequence: Synthetic peptide
  Seed: CSLMQGSTLPRRSGA
CSLMIGSSLARRSGA

SEQ ID NO: 54855 - protein, 15 aa, Artificial Sequence
  Description of Artificial Sequence: Synthetic peptide
  Seed: CSLMQGSTLPRRSGA
CSLMIGSSLARRTGA

SEQ ID NO: 54856 - protein, 15 aa, Artificial Sequence
  Description of Artificial Sequence: Synthetic peptide
  Seed: CSLMQGSTLPRRSGA
CSLMIGSSLARRVGA

SEQ ID NO: 54857 - protein, 15 aa, Artificial Sequence
  Description of Artificial Sequence: Synthetic peptide
  Seed: CSLMQGSTLPRRSGA
CSLMIGSSLGRRIGA

SEQ ID NO: 54858 - protein, 15 aa, Artificial Sequence
  Description of Artificial Sequence: Synthetic peptide
  Seed: CSLMQGSTLPRRSGA
CSLMIGSSLGRRLGA

SEQ ID NO: 54859 - protein, 15 aa, Artificial Sequence
  Description of Artificial Sequence: Synthetic peptide
  Seed: CSLMQGSTLPRRSGA
CSLMIGSSLGRRVGA

SEQ ID NO: 54860 - protein, 15 aa, Artificial Sequence
  Description of Artificial Sequence: Synthetic peptide
  Seed: CSLMQGSTLPRRSGA
CSLMIGSSLPRRAGA

SEQ ID NO: 54861 - protein, 15 aa, Artificial Sequence
  Description of Artificial Sequence: Synthetic peptide
  Seed: CSLMQGSTLPRRSGA
CSLMIGSSLSRRAGA

SEQ ID NO: 54862 - protein, 15 aa, Artificial Sequence
  Description of Artificial Sequence: Synthetic peptide
  Seed: CSLMQGSTLPRRSGA
CSLMIGSSLSRRIGA

SEQ ID NO: 54863 - protein, 15 aa, Artificial Sequence
  Description of Artificial Sequence: Synthetic peptide
  Seed: CSLMQGSTLPRRSGA
CSLMIGSSLSRRLGA

SEQ ID NO: 54864 - protein, 15 aa, Artificial Sequence
  Description of Artificial Sequence: Synthetic peptide
  Seed: CSLMQGSTLPRRSGA
CSLMIGSSLSRRVGA

SEQ ID NO: 54865 - protein, 15 aa, Artificial Sequence
  Description of Artificial Sequence: Synthetic peptide
  Seed: CSLMQGSTLPRRSGA
CSLMIGSSLVRRAGA

SEQ ID NO: 54866 - protein, 15 aa, Artificial Sequence
  Description of Artificial Sequence: Synthetic peptide
  Seed: CSLMQGSTLPRRSGA
CSLMIGSTLARRAGA

SEQ ID NO: 54867 - protein, 15 aa, Artificial Sequence
  Description of Artificial Sequence: Synthetic peptide
  Seed: CSLMQGSTLPRRSGA
CSLMIGSTLARRIGA

SEQ ID NO: 54868 - protein, 15 aa, Artificial Sequence
  Description of Artificial Sequence: Synthetic peptide
  Seed: CSLMQGSTLPRRSGA
CSLMIGSTLARRLGA

SEQ ID NO: 54869 - protein, 15 aa, Artificial Sequence
  Description of Artificial Sequence: Synthetic peptide
  Seed: CSLMQGSTLPRRSGA
CSLMIGSTLARRMGA

SEQ ID NO: 54870 - protein, 15 aa, Artificial Sequence
  Description of Artificial Sequence: Synthetic peptide
  Seed: CSLMQGSTLPRRSGA
CSLMIGSTLARRVGA

SEQ ID NO: 54871 - protein, 15 aa, Artificial Sequence
  Description of Artificial Sequence: Synthetic peptide
  Seed: CSLMQGSTLPRRSGA
CSLMIGSTLGRRIGA

SEQ ID NO: 54872 - protein, 15 aa, Artificial Sequence
  Description of Artificial Sequence: Synthetic peptide
  Seed: CSLMQGSTLPRRSGA
CSLMIGSTLGRRLGA

SEQ ID NO: 54873 - protein, 15 aa, Artificial Sequence
  Description of Artificial Sequence: Synthetic peptide
  Seed: CSLMQGSTLPRRSGA
CSLMIGSTLGRRVGA

SEQ ID NO: 54874 - protein, 15 aa, Artificial Sequence
  Description of Artificial Sequence: Synthetic peptide
  Seed: CSLMQGSTLPRRSGA
CSLMIGSTLSRRIGA

SEQ ID NO: 54875 - protein, 15 aa, Artificial Sequence
  Description of Artificial Sequence: Synthetic peptide
  Seed: CSLMQGSTLPRRSGA
CSLMIGSTLSRRLGA

SEQ ID NO: 54876 - protein, 15 aa, Artificial Sequence
  Description of Artificial Sequence: Synthetic peptide
  Seed: CSLMQGSTLPRRSGA
CSLMIGSTLSRRVGA

SEQ ID NO: 54877 - protein, 15 aa, Artificial Sequence
  Description of Artificial Sequence: Synthetic peptide
  Seed: CSLMQGSTLPRRSGA
CSLMIGSVLARRAGA

SEQ ID NO: 54878 - protein, 15 aa, Artificial Sequence
  Description of Artificial Sequence: Synthetic peptide
  Seed: CSLMQGSTLPRRSGA
CSLMIGSVLARRIGA

SEQ ID NO: 54879 - protein, 15 aa, Artificial Sequence
  Description of Artificial Sequence: Synthetic peptide
  Seed: CSLMQGSTLPRRSGA
CSLMIGSVLARRLGA

SEQ ID NO: 54880 - protein, 15 aa, Artificial Sequence
  Description of Artificial Sequence: Synthetic peptide
  Seed: CSLMQGSTLPRRSGA
CSLMIGSVLARRMGA

SEQ ID NO: 54881 - protein, 15 aa, Artificial Sequence
  Description of Artificial Sequence: Synthetic peptide
  Seed: CSLMQGSTLPRRSGA
CSLMIGSVLARRSGA

SEQ ID NO: 54882 - protein, 15 aa, Artificial Sequence
  Description of Artificial Sequence: Synthetic peptide
  Seed: CSLMQGSTLPRRSGA
CSLMIGSVLARRTGA

SEQ ID NO: 54883 - protein, 15 aa, Artificial Sequence
  Description of Artificial Sequence: Synthetic peptide
  Seed: CSLMQGSTLPRRSGA
CSLMIGSVLARRVGA

SEQ ID NO: 54884 - protein, 15 aa, Artificial Sequence
  Description of Artificial Sequence: Synthetic peptide
  Seed: CSLMQGSTLPRRSGA
CSLMIGSVLGRRAGA

SEQ ID NO: 54885 - protein, 15 aa, Artificial Sequence
  Description of Artificial Sequence: Synthetic peptide
  Seed: CSLMQGSTLPRRSGA
CSLMIGSVLGRRIGA

SEQ ID NO: 54886 - protein, 15 aa, Artificial Sequence
  Description of Artificial Sequence: Synthetic peptide
  Seed: CSLMQGSTLPRRSGA
CSLMIGSVLGRRLGA

SEQ ID NO: 54887 - protein, 15 aa, Artificial Sequence
  Description of Artificial Sequence: Synthetic peptide
  Seed: CSLMQGSTLPRRSGA
CSLMIGSVLGRRMGA

SEQ ID NO: 54888 - protein, 15 aa, Artificial Sequence
  Description of Artificial Sequence: Synthetic peptide
  Seed: CSLMQGSTLPRRSGA
CSLMIGSVLGRRTGA

SEQ ID NO: 54889 - protein, 15 aa, Artificial Sequence
  Description of Artificial Sequence: Synthetic peptide
  Seed: CSLMQGSTLPRRSGA
CSLMIGSVLGRRVGA

SEQ ID NO: 54890 - protein, 15 aa, Artificial Sequence
  Description of Artificial Sequence: Synthetic peptide
  Seed: CSLMQGSTLPRRSGA
CSLMIGSVLNRRVGA

SEQ ID NO: 54891 - protein, 15 aa, Artificial Sequence
  Description of Artificial Sequence: Synthetic peptide
  Seed: CSLMQGSTLPRRSGA
CSLMIGSVLPRRIGA

SEQ ID NO: 54892 - protein, 15 aa, Artificial Sequence
  Description of Artificial Sequence: Synthetic peptide
  Seed: CSLMQGSTLPRRSGA
CSLMIGSVLPRRLGA

SEQ ID NO: 54893 - protein, 15 aa, Artificial Sequence
  Description of Artificial Sequence: Synthetic peptide
  Seed: CSLMQGSTLPRRSGA
CSLMIGSVLPRRVGA

SEQ ID NO: 54894 - protein, 15 aa, Artificial Sequence
  Description of Artificial Sequence: Synthetic peptide
  Seed: CSLMQGSTLPRRSGA
CSLMIGSVLSRRAGA

SEQ ID NO: 54895 - protein, 15 aa, Artificial Sequence
  Description of Artificial Sequence: Synthetic peptide
  Seed: CSLMQGSTLPRRSGA
CSLMIGSVLSRRIGA

SEQ ID NO: 54896 - protein, 15 aa, Artificial Sequence
  Description of Artificial Sequence: Synthetic peptide
  Seed: CSLMQGSTLPRRSGA
CSLMIGSVLSRRLGA

SEQ ID NO: 54897 - protein, 15 aa, Artificial Sequence
  Description of Artificial Sequence: Synthetic peptide
  Seed: CSLMQGSTLPRRSGA
CSLMIGSVLSRRMGA

SEQ ID NO: 54898 - protein, 15 aa, Artificial Sequence
  Description of Artificial Sequence: Synthetic peptide
  Seed: CSLMQGSTLPRRSGA
CSLMIGSVLSRRTGA

SEQ ID NO: 54899 - protein, 15 aa, Artificial Sequence
  Description of Artificial Sequence: Synthetic peptide
  Seed: CSLMQGSTLPRRSGA
CSLMIGSVLSRRVGA

SEQ ID NO: 54900 - protein, 15 aa, Artificial Sequence
  Description of Artificial Sequence: Synthetic peptide
  Seed: CSLMQGSTLPRRSGA
CSLMIGSVLTRRIGA

SEQ ID NO: 54901 - protein, 15 aa, Artificial Sequence
  Description of Artificial Sequence: Synthetic peptide
  Seed: CSLMQGSTLPRRSGA
CSLMIGSVLTRRVGA

SEQ ID NO: 54902 - protein, 15 aa, Artificial Sequence
  Description of Artificial Sequence: Synthetic peptide
  Seed: CSLMQGSTLPRRSGA
CSLMKGSLLARRIGA

SEQ ID NO: 54903 - protein, 15 aa, Artificial Sequence
  Description of Artificial Sequence: Synthetic peptide
  Seed: CSLMQGSTLPRRSGA
CSLMKGSLLARRLGA

SEQ ID NO: 54904 - protein, 15 aa, Artificial Sequence
  Description of Artificial Sequence: Synthetic peptide
  Seed: CSLMQGSTLPRRSGA
CSLMKGSLLARRVGA

SEQ ID NO: 54905 - protein, 15 aa, Artificial Sequence
  Description of Artificial Sequence: Synthetic peptide
  Seed: CSLMQGSTLPRRSGA
CSLMLGSALARRAGA

SEQ ID NO: 54906 - protein, 15 aa, Artificial Sequence
  Description of Artificial Sequence: Synthetic peptide
  Seed: CSLMQGSTLPRRSGA
CSLMLGSALARRFGA

SEQ ID NO: 54907 - protein, 15 aa, Artificial Sequence
  Description of Artificial Sequence: Synthetic peptide
  Seed: CSLMQGSTLPRRSGA
CSLMLGSALARRGGA

SEQ ID NO: 54908 - protein, 15 aa, Artificial Sequence
  Description of Artificial Sequence: Synthetic peptide
  Seed: CSLMQGSTLPRRSGA
CSLMLGSALARRIGA

SEQ ID NO: 54909 - protein, 15 aa, Artificial Sequence
  Description of Artificial Sequence: Synthetic peptide
  Seed: CSLMQGSTLPRRSGA
CSLMLGSALARRKGA

SEQ ID NO: 54910 - protein, 15 aa, Artificial Sequence
  Description of Artificial Sequence: Synthetic peptide
  Seed: CSLMQGSTLPRRSGA
CSLMLGSALARRLGA

SEQ ID NO: 54911 - protein, 15 aa, Artificial Sequence
  Description of Artificial Sequence: Synthetic peptide
  Seed: CSLMQGSTLPRRSGA
CSLMLGSALARRMGA

SEQ ID NO: 54912 - protein, 15 aa, Artificial Sequence
  Description of Artificial Sequence: Synthetic peptide
  Seed: CSLMQGSTLPRRSGA
CSLMLGSALARRNGA

SEQ ID NO: 54913 - protein, 15 aa, Artificial Sequence
  Description of Artificial Sequence: Synthetic peptide
  Seed: CSLMQGSTLPRRSGA
CSLMLGSALARRRGA

SEQ ID NO: 54914 - protein, 15 aa, Artificial Sequence
  Description of Artificial Sequence: Synthetic peptide
  Seed: CSLMQGSTLPRRSGA
CSLMLGSALARRSGA

SEQ ID NO: 54915 - protein, 15 aa, Artificial Sequence
  Description of Artificial Sequence: Synthetic peptide
  Seed: CSLMQGSTLPRRSGA
CSLMLGSALARRTGA

SEQ ID NO: 54916 - protein, 15 aa, Artificial Sequence
  Description of Artificial Sequence: Synthetic peptide
  Seed: CSLMQGSTLPRRSGA
CSLMLGSALARRVGA

SEQ ID NO: 54917 - protein, 15 aa, Artificial Sequence
  Description of Artificial Sequence: Synthetic peptide
  Seed: CSLMQGSTLPRRSGA
CSLMLGSALARRWGA

SEQ ID NO: 54918 - protein, 15 aa, Artificial Sequence
  Description of Artificial Sequence: Synthetic peptide
  Seed: CSLMQGSTLPRRSGA
CSLMLGSALARRYGA

SEQ ID NO: 54919 - protein, 15 aa, Artificial Sequence
  Description of Artificial Sequence: Synthetic peptide
  Seed: CSLMQGSTLPRRSGA
CSLMLGSALGRRAGA

SEQ ID NO: 54920 - protein, 15 aa, Artificial Sequence
  Description of Artificial Sequence: Synthetic peptide
  Seed: CSLMQGSTLPRRSGA
CSLMLGSALGRRIGA

SEQ ID NO: 54921 - protein, 15 aa, Artificial Sequence
  Description of Artificial Sequence: Synthetic peptide
  Seed: CSLMQGSTLPRRSGA
CSLMLGSALGRRLGA

SEQ ID NO: 54922 - protein, 15 aa, Artificial Sequence
  Description of Artificial Sequence: Synthetic peptide
  Seed: CSLMQGSTLPRRSGA
CSLMLGSALGRRMGA

SEQ ID NO: 54923 - protein, 15 aa, Artificial Sequence
  Description of Artificial Sequence: Synthetic peptide
  Seed: CSLMQGSTLPRRSGA
CSLMLGSALGRRVGA

SEQ ID NO: 54924 - protein, 15 aa, Artificial Sequence
  Description of Artificial Sequence: Synthetic peptide
  Seed: CSLMQGSTLPRRSGA
CSLMLGSALIRRAGA

SEQ ID NO: 54925 - protein, 15 aa, Artificial Sequence
  Description of Artificial Sequence: Synthetic peptide
  Seed: CSLMQGSTLPRRSGA
CSLMLGSALIRRIGA

SEQ ID NO: 54926 - protein, 15 aa, Artificial Sequence
  Description of Artificial Sequence: Synthetic peptide
  Seed: CSLMQGSTLPRRSGA
CSLMLGSALIRRLGA

SEQ ID NO: 54927 - protein, 15 aa, Artificial Sequence
  Description of Artificial Sequence: Synthetic peptide
  Seed: CSLMQGSTLPRRSGA
CSLMLGSALIRRSGA

SEQ ID NO: 54928 - protein, 15 aa, Artificial Sequence
  Description of Artificial Sequence: Synthetic peptide
  Seed: CSLMQGSTLPRRSGA
CSLMLGSALIRRTGA

SEQ ID NO: 54929 - protein, 15 aa, Artificial Sequence
  Description of Artificial Sequence: Synthetic peptide
  Seed: CSLMQGSTLPRRSGA
CSLMLGSALIRRVGA

SEQ ID NO: 54930 - protein, 15 aa, Artificial Sequence
  Description of Artificial Sequence: Synthetic peptide
  Seed: CSLMQGSTLPRRSGA
CSLMLGSALLRRAGA

SEQ ID NO: 54931 - protein, 15 aa, Artificial Sequence
  Description of Artificial Sequence: Synthetic peptide
  Seed: CSLMQGSTLPRRSGA
CSLMLGSALLRRVGA

SEQ ID NO: 54932 - protein, 15 aa, Artificial Sequence
  Description of Artificial Sequence: Synthetic peptide
  Seed: CSLMQGSTLPRRSGA
CSLMLGSALMRRIGA

SEQ ID NO: 54933 - protein, 15 aa, Artificial Sequence
  Description of Artificial Sequence: Synthetic peptide
  Seed: CSLMQGSTLPRRSGA
CSLMLGSALMRRVGA

SEQ ID NO: 54934 - protein, 15 aa, Artificial Sequence
  Description of Artificial Sequence: Synthetic peptide
  Seed: CSLMQGSTLPRRSGA
CSLMLGSALNRRIGA

SEQ ID NO: 54935 - protein, 15 aa, Artificial Sequence
  Description of Artificial Sequence: Synthetic peptide
  Seed: CSLMQGSTLPRRSGA
CSLMLGSALNRRLGA

SEQ ID NO: 54936 - protein, 15 aa, Artificial Sequence
  Description of Artificial Sequence: Synthetic peptide
  Seed: CSLMQGSTLPRRSGA
CSLMLGSALNRRVGA

SEQ ID NO: 54937 - protein, 15 aa, Artificial Sequence
  Description of Artificial Sequence: Synthetic peptide
  Seed: CSLMQGSTLPRRSGA
CSLMLGSALPRRAGA

SEQ ID NO: 54938 - protein, 15 aa, Artificial Sequence
  Description of Artificial Sequence: Synthetic peptide
  Seed: CSLMQGSTLPRRSGA
CSLMLGSALPRRIGA

SEQ ID NO: 54939 - protein, 15 aa, Artificial Sequence
  Description of Artificial Sequence: Synthetic peptide
  Seed: CSLMQGSTLPRRSGA
CSLMLGSALPRRLGA

SEQ ID NO: 54940 - protein, 15 aa, Artificial Sequence
  Description of Artificial Sequence: Synthetic peptide
  Seed: CSLMQGSTLPRRSGA
CSLMLGSALPRRVGA

SEQ ID NO: 54941 - protein, 15 aa, Artificial Sequence
  Description of Artificial Sequence: Synthetic peptide
  Seed: CSLMQGSTLPRRSGA
CSLMLGSALSRRAGA

SEQ ID NO: 54942 - protein, 15 aa, Artificial Sequence
  Description of Artificial Sequence: Synthetic peptide
  Seed: CSLMQGSTLPRRSGA
CSLMLGSALSRRIGA

SEQ ID NO: 54943 - protein, 15 aa, Artificial Sequence
  Description of Artificial Sequence: Synthetic peptide
  Seed: CSLMQGSTLPRRSGA
CSLMLGSALSRRLGA

SEQ ID NO: 54944 - protein, 15 aa, Artificial Sequence
  Description of Artificial Sequence: Synthetic peptide
  Seed: CSLMQGSTLPRRSGA
CSLMLGSALSRRMGA

SEQ ID NO: 54945 - protein, 15 aa, Artificial Sequence
  Description of Artificial Sequence: Synthetic peptide
  Seed: CSLMQGSTLPRRSGA
CSLMLGSALSRRSGA

SEQ ID NO: 54946 - protein, 15 aa, Artificial Sequence
  Description of Artificial Sequence: Synthetic peptide
  Seed: CSLMQGSTLPRRSGA
CSLMLGSALSRRTGA

SEQ ID NO: 54947 - protein, 15 aa, Artificial Sequence
  Description of Artificial Sequence: Synthetic peptide
  Seed: CSLMQGSTLPRRSGA
CSLMLGSALSRRVGA

SEQ ID NO: 54948 - protein, 15 aa, Artificial Sequence
  Description of Artificial Sequence: Synthetic peptide
  Seed: CSLMQGSTLPRRSGA
CSLMLGSALTRRAGA

SEQ ID NO: 54949 - protein, 15 aa, Artificial Sequence
  Description of Artificial Sequence: Synthetic peptide
  Seed: CSLMQGSTLPRRSGA
CSLMLGSALTRRIGA

SEQ ID NO: 54950 - protein, 15 aa, Artificial Sequence
  Description of Artificial Sequence: Synthetic peptide
  Seed: CSLMQGSTLPRRSGA
CSLMLGSALTRRLGA

SEQ ID NO: 54951 - protein, 15 aa, Artificial Sequence
  Description of Artificial Sequence: Synthetic peptide
  Seed: CSLMQGSTLPRRSGA
CSLMLGSALTRRVGA

SEQ ID NO: 54952 - protein, 15 aa, Artificial Sequence
  Description of Artificial Sequence: Synthetic peptide
  Seed: CSLMQGSTLPRRSGA
CSLMLGSALVRRAGA

SEQ ID NO: 54953 - protein, 15 aa, Artificial Sequence
  Description of Artificial Sequence: Synthetic peptide
  Seed: CSLMQGSTLPRRSGA
CSLMLGSALVRRHGA

SEQ ID NO: 54954 - protein, 15 aa, Artificial Sequence
  Description of Artificial Sequence: Synthetic peptide
  Seed: CSLMQGSTLPRRSGA
CSLMLGSALVRRIGA

SEQ ID NO: 54955 - protein, 15 aa, Artificial Sequence
  Description of Artificial Sequence: Synthetic peptide
  Seed: CSLMQGSTLPRRSGA
CSLMLGSALVRRLGA

SEQ ID NO: 54956 - protein, 15 aa, Artificial Sequence
  Description of Artificial Sequence: Synthetic peptide
  Seed: CSLMQGSTLPRRSGA
CSLMLGSALVRRMGA

SEQ ID NO: 54957 - protein, 15 aa, Artificial Sequence
  Description of Artificial Sequence: Synthetic peptide
  Seed: CSLMQGSTLPRRSGA
CSLMLGSALVRRSGA

SEQ ID NO: 54958 - protein, 15 aa, Artificial Sequence
  Description of Artificial Sequence: Synthetic peptide
  Seed: CSLMQGSTLPRRSGA
CSLMLGSALVRRTGA

SEQ ID NO: 54959 - protein, 15 aa, Artificial Sequence
  Description of Artificial Sequence: Synthetic peptide
  Seed: CSLMQGSTLPRRSGA
CSLMLGSALVRRVGA

SEQ ID NO: 54960 - protein, 15 aa, Artificial Sequence
  Description of Artificial Sequence: Synthetic peptide
  Seed: CSLMQGSTLPRRSGA
CSLMLGSELARRIGA

SEQ ID NO: 54961 - protein, 15 aa, Artificial Sequence
  Description of Artificial Sequence: Synthetic peptide
  Seed: CSLMQGSTLPRRSGA
CSLMLGSELARRLGA

SEQ ID NO: 54962 - protein, 15 aa, Artificial Sequence
  Description of Artificial Sequence: Synthetic peptide
  Seed: CSLMQGSTLPRRSGA
CSLMLGSELARRVGA

SEQ ID NO: 54963 - protein, 15 aa, Artificial Sequence
  Description of Artificial Sequence: Synthetic peptide
  Seed: CSLMQGSTLPRRSGA
CSLMLGSFLARRAGA

SEQ ID NO: 54964 - protein, 15 aa, Artificial Sequence
  Description of Artificial Sequence: Synthetic peptide
  Seed: CSLMQGSTLPRRSGA
CSLMLGSFLARRIGA

SEQ ID NO: 54965 - protein, 15 aa, Artificial Sequence
  Description of Artificial Sequence: Synthetic peptide
  Seed: CSLMQGSTLPRRSGA
CSLMLGSFLARRLGA

SEQ ID NO: 54966 - protein, 15 aa, Artificial Sequence
  Description of Artificial Sequence: Synthetic peptide
  Seed: CSLMQGSTLPRRSGA
CSLMLGSFLARRVGA

SEQ ID NO: 54967 - protein, 15 aa, Artificial Sequence
  Description of Artificial Sequence: Synthetic peptide
  Seed: CSLMQGSTLPRRSGA
CSLMLGSGLARRAGA

SEQ ID NO: 54968 - protein, 15 aa, Artificial Sequence
  Description of Artificial Sequence: Synthetic peptide
  Seed: CSLMQGSTLPRRSGA
CSLMLGSGLARRIGA

SEQ ID NO: 54969 - protein, 15 aa, Artificial Sequence
  Description of Artificial Sequence: Synthetic peptide
  Seed: CSLMQGSTLPRRSGA
CSLMLGSGLARRLGA

SEQ ID NO: 54970 - protein, 15 aa, Artificial Sequence
  Description of Artificial Sequence: Synthetic peptide
  Seed: CSLMQGSTLPRRSGA
CSLMLGSGLARRSGA

SEQ ID NO: 54971 - protein, 15 aa, Artificial Sequence
  Description of Artificial Sequence: Synthetic peptide
  Seed: CSLMQGSTLPRRSGA
CSLMLGSGLARRTGA

SEQ ID NO: 54972 - protein, 15 aa, Artificial Sequence
  Description of Artificial Sequence: Synthetic peptide
  Seed: CSLMQGSTLPRRSGA
CSLMLGSGLARRVGA

SEQ ID NO: 54973 - protein, 15 aa, Artificial Sequence
  Description of Artificial Sequence: Synthetic peptide
  Seed: CSLMQGSTLPRRSGA
CSLMLGSGLVRRAGA

SEQ ID NO: 54974 - protein, 15 aa, Artificial Sequence
  Description of Artificial Sequence: Synthetic peptide
  Seed: CSLMQGSTLPRRSGA
CSLMLGSHLARRIGA

SEQ ID NO: 54975 - protein, 15 aa, Artificial Sequence
  Description of Artificial Sequence: Synthetic peptide
  Seed: CSLMQGSTLPRRSGA
CSLMLGSHLARRLGA

SEQ ID NO: 54976 - protein, 15 aa, Artificial Sequence
  Description of Artificial Sequence: Synthetic peptide
  Seed: CSLMQGSTLPRRSGA
CSLMLGSHLARRVGA

SEQ ID NO: 54977 - protein, 15 aa, Artificial Sequence
  Description of Artificial Sequence: Synthetic peptide
  Seed: CSLMQGSTLPRRSGA
CSLMLGSILARRAGA

SEQ ID NO: 54978 - protein, 15 aa, Artificial Sequence
  Description of Artificial Sequence: Synthetic peptide
  Seed: CSLMQGSTLPRRSGA
CSLMLGSILARRFGA

SEQ ID NO: 54979 - protein, 15 aa, Artificial Sequence
  Description of Artificial Sequence: Synthetic peptide
  Seed: CSLMQGSTLPRRSGA
CSLMLGSILARRGGA

SEQ ID NO: 54980 - protein, 15 aa, Artificial Sequence
  Description of Artificial Sequence: Synthetic peptide
  Seed: CSLMQGSTLPRRSGA
CSLMLGSILARRIGA

SEQ ID NO: 54981 - protein, 15 aa, Artificial Sequence
  Description of Artificial Sequence: Synthetic peptide
  Seed: CSLMQGSTLPRRSGA
CSLMLGSILARRLGA

SEQ ID NO: 54982 - protein, 15 aa, Artificial Sequence
  Description of Artificial Sequence: Synthetic peptide
  Seed: CSLMQGSTLPRRSGA
CSLMLGSILARRMGA

SEQ ID NO: 54983 - protein, 15 aa, Artificial Sequence
  Description of Artificial Sequence: Synthetic peptide
  Seed: CSLMQGSTLPRRSGA
CSLMLGSILARRSGA

SEQ ID NO: 54984 - protein, 15 aa, Artificial Sequence
  Description of Artificial Sequence: Synthetic peptide
  Seed: CSLMQGSTLPRRSGA
CSLMLGSILARRTGA

SEQ ID NO: 54985 - protein, 15 aa, Artificial Sequence
  Description of Artificial Sequence: Synthetic peptide
  Seed: CSLMQGSTLPRRSGA
CSLMLGSILARRVGA

SEQ ID NO: 54986 - protein, 15 aa, Artificial Sequence
  Description of Artificial Sequence: Synthetic peptide
  Seed: CSLMQGSTLPRRSGA
CSLMLGSILGRRAGA

SEQ ID NO: 54987 - protein, 15 aa, Artificial Sequence
  Description of Artificial Sequence: Synthetic peptide
  Seed: CSLMQGSTLPRRSGA
CSLMLGSILGRRIGA

SEQ ID NO: 54988 - protein, 15 aa, Artificial Sequence
  Description of Artificial Sequence: Synthetic peptide
  Seed: CSLMQGSTLPRRSGA
CSLMLGSILGRRLGA

SEQ ID NO: 54989 - protein, 15 aa, Artificial Sequence
  Description of Artificial Sequence: Synthetic peptide
  Seed: CSLMQGSTLPRRSGA
CSLMLGSILGRRMGA

SEQ ID NO: 54990 - protein, 15 aa, Artificial Sequence
  Description of Artificial Sequence: Synthetic peptide
  Seed: CSLMQGSTLPRRSGA
CSLMLGSILGRRSGA

SEQ ID NO: 54991 - protein, 15 aa, Artificial Sequence
  Description of Artificial Sequence: Synthetic peptide
  Seed: CSLMQGSTLPRRSGA
CSLMLGSILGRRTGA

SEQ ID NO: 54992 - protein, 15 aa, Artificial Sequence
  Description of Artificial Sequence: Synthetic peptide
  Seed: CSLMQGSTLPRRSGA
CSLMLGSILGRRVGA

SEQ ID NO: 54993 - protein, 15 aa, Artificial Sequence
  Description of Artificial Sequence: Synthetic peptide
  Seed: CSLMQGSTLPRRSGA
CSLMLGSILNRRLGA

SEQ ID NO: 54994 - protein, 15 aa, Artificial Sequence
  Description of Artificial Sequence: Synthetic peptide
  Seed: CSLMQGSTLPRRSGA
CSLMLGSILNRRVGA

SEQ ID NO: 54995 - protein, 15 aa, Artificial Sequence
  Description of Artificial Sequence: Synthetic peptide
  Seed: CSLMQGSTLPRRSGA
CSLMLGSILPRRAGA

SEQ ID NO: 54996 - protein, 15 aa, Artificial Sequence
  Description of Artificial Sequence: Synthetic peptide
  Seed: CSLMQGSTLPRRSGA
CSLMLGSILPRRIGA

SEQ ID NO: 54997 - protein, 15 aa, Artificial Sequence
  Description of Artificial Sequence: Synthetic peptide
  Seed: CSLMQGSTLPRRSGA
CSLMLGSILPRRLGA

SEQ ID NO: 54998 - protein, 15 aa, Artificial Sequence
  Description of Artificial Sequence: Synthetic peptide
  Seed: CSLMQGSTLPRRSGA
CSLMLGSILPRRVGA

SEQ ID NO: 54999 - protein, 15 aa, Artificial Sequence
  Description of Artificial Sequence: Synthetic peptide
  Seed: CSLMQGSTLPRRSGA
CSLMLGSILSRRAGA

SEQ ID NO: 55000 - protein, 15 aa, Artificial Sequence
  Description of Artificial Sequence: Synthetic peptide
  Seed: CSLMQGSTLPRRSGA
CSLMLGSILSRRIGA

SEQ ID NO: 55001 - protein, 15 aa, Artificial Sequence
  Description of Artificial Sequence: Synthetic peptide
  Seed: CSLMQGSTLPRRSGA
CSLMLGSILSRRLGA

SEQ ID NO: 55002 - protein, 15 aa, Artificial Sequence
  Description of Artificial Sequence: Synthetic peptide
  Seed: CSLMQGSTLPRRSGA
CSLMLGSILSRRMGA

SEQ ID NO: 55003 - protein, 15 aa, Artificial Sequence
  Description of Artificial Sequence: Synthetic peptide
  Seed: CSLMQGSTLPRRSGA
CSLMLGSILSRRSGA

SEQ ID NO: 55004 - protein, 15 aa, Artificial Sequence
  Description of Artificial Sequence: Synthetic peptide
  Seed: CSLMQGSTLPRRSGA
CSLMLGSILSRRTGA

SEQ ID NO: 55005 - protein, 15 aa, Artificial Sequence
  Description of Artificial Sequence: Synthetic peptide
  Seed: CSLMQGSTLPRRSGA
CSLMLGSILSRRVGA

SEQ ID NO: 55006 - protein, 15 aa, Artificial Sequence
  Description of Artificial Sequence: Synthetic peptide
  Seed: CSLMQGSTLPRRSGA
CSLMLGSILTRRAGA

SEQ ID NO: 55007 - protein, 15 aa, Artificial Sequence
  Description of Artificial Sequence: Synthetic peptide
  Seed: CSLMQGSTLPRRSGA
CSLMLGSILTRRIGA

SEQ ID NO: 55008 - protein, 15 aa, Artificial Sequence
  Description of Artificial Sequence: Synthetic peptide
  Seed: CSLMQGSTLPRRSGA
CSLMLGSILTRRLGA

SEQ ID NO: 55009 - protein, 15 aa, Artificial Sequence
  Description of Artificial Sequence: Synthetic peptide
  Seed: CSLMQGSTLPRRSGA
CSLMLGSILTRRVGA

SEQ ID NO: 55010 - protein, 15 aa, Artificial Sequence
  Description of Artificial Sequence: Synthetic peptide
  Seed: CSLMQGSTLPRRSGA
CSLMLGSILVRRVGA

SEQ ID NO: 55011 - protein, 15 aa, Artificial Sequence
  Description of Artificial Sequence: Synthetic peptide
  Seed: CSLMQGSTLPRRSGA
CSLMLGSLLARRAGA

SEQ ID NO: 55012 - protein, 15 aa, Artificial Sequence
  Description of Artificial Sequence: Synthetic peptide
  Seed: CSLMQGSTLPRRSGA
CSLMLGSLLARRCGA

SEQ ID NO: 55013 - protein, 15 aa, Artificial Sequence
  Description of Artificial Sequence: Synthetic peptide
  Seed: CSLMQGSTLPRRSGA
CSLMLGSLLARRFGA

SEQ ID NO: 55014 - protein, 15 aa, Artificial Sequence
  Description of Artificial Sequence: Synthetic peptide
  Seed: CSLMQGSTLPRRSGA
CSLMLGSLLARRGGA

SEQ ID NO: 55015 - protein, 15 aa, Artificial Sequence
  Description of Artificial Sequence: Synthetic peptide
  Seed: CSLMQGSTLPRRSGA
CSLMLGSLLARRIGA

SEQ ID NO: 55016 - protein, 15 aa, Artificial Sequence
  Description of Artificial Sequence: Synthetic peptide
  Seed: CSLMQGSTLPRRSGA
CSLMLGSLLARRLGA

SEQ ID NO: 55017 - protein, 15 aa, Artificial Sequence
  Description of Artificial Sequence: Synthetic peptide
  Seed: CSLMQGSTLPRRSGA
CSLMLGSLLARRMGA

SEQ ID NO: 55018 - protein, 15 aa, Artificial Sequence
  Description of Artificial Sequence: Synthetic peptide
  Seed: CSLMQGSTLPRRSGA
CSLMLGSLLARRNGA

SEQ ID NO: 55019 - protein, 15 aa, Artificial Sequence
  Description of Artificial Sequence: Synthetic peptide
  Seed: CSLMQGSTLPRRSGA
CSLMLGSLLARRSGA

SEQ ID NO: 55020 - protein, 15 aa, Artificial Sequence
  Description of Artificial Sequence: Synthetic peptide
  Seed: CSLMQGSTLPRRSGA
CSLMLGSLLARRTGA

SEQ ID NO: 55021 - protein, 15 aa, Artificial Sequence
  Description of Artificial Sequence: Synthetic peptide
  Seed: CSLMQGSTLPRRSGA
CSLMLGSLLARRVGA

SEQ ID NO: 55022 - protein, 15 aa, Artificial Sequence
  Description of Artificial Sequence: Synthetic peptide
  Seed: CSLMQGSTLPRRSGA
CSLMLGSLLARRYGA

SEQ ID NO: 55023 - protein, 15 aa, Artificial Sequence
  Description of Artificial Sequence: Synthetic peptide
  Seed: CSLMQGSTLPRRSGA
CSLMLGSLLGRRAGA

SEQ ID NO: 55024 - protein, 15 aa, Artificial Sequence
  Description of Artificial Sequence: Synthetic peptide
  Seed: CSLMQGSTLPRRSGA
CSLMLGSLLGRRCGA

SEQ ID NO: 55025 - protein, 15 aa, Artificial Sequence
  Description of Artificial Sequence: Synthetic peptide
  Seed: CSLMQGSTLPRRSGA
CSLMLGSLLGRRFGA

SEQ ID NO: 55026 - protein, 15 aa, Artificial Sequence
  Description of Artificial Sequence: Synthetic peptide
  Seed: CSLMQGSTLPRRSGA
CSLMLGSLLGRRGGA

SEQ ID NO: 55027 - protein, 15 aa, Artificial Sequence
  Description of Artificial Sequence: Synthetic peptide
  Seed: CSLMQGSTLPRRSGA
CSLMLGSLLGRRIGA

SEQ ID NO: 55028 - protein, 15 aa, Artificial Sequence
  Description of Artificial Sequence: Synthetic peptide
  Seed: CSLMQGSTLPRRSGA
CSLMLGSLLGRRLGA

SEQ ID NO: 55029 - protein, 15 aa, Artificial Sequence
  Description of Artificial Sequence: Synthetic peptide
  Seed: CSLMQGSTLPRRSGA
CSLMLGSLLGRRMGA

SEQ ID NO: 55030 - protein, 15 aa, Artificial Sequence
  Description of Artificial Sequence: Synthetic peptide
  Seed: CSLMQGSTLPRRSGA
CSLMLGSLLGRRSGA

SEQ ID NO: 55031 - protein, 15 aa, Artificial Sequence
  Description of Artificial Sequence: Synthetic peptide
  Seed: CSLMQGSTLPRRSGA
CSLMLGSLLGRRTGA

SEQ ID NO: 55032 - protein, 15 aa, Artificial Sequence
  Description of Artificial Sequence: Synthetic peptide
  Seed: CSLMQGSTLPRRSGA
CSLMLGSLLGRRVGA

SEQ ID NO: 55033 - protein, 15 aa, Artificial Sequence
  Description of Artificial Sequence: Synthetic peptide
  Seed: CSLMQGSTLPRRSGA
CSLMLGSLLIRRVGA

SEQ ID NO: 55034 - protein, 15 aa, Artificial Sequence
  Description of Artificial Sequence: Synthetic peptide
  Seed: CSLMQGSTLPRRSGA
CSLMLGSLLNRRAGA

SEQ ID NO: 55035 - protein, 15 aa, Artificial Sequence
  Description of Artificial Sequence: Synthetic peptide
  Seed: CSLMQGSTLPRRSGA
CSLMLGSLLNRRIGA

SEQ ID NO: 55036 - protein, 15 aa, Artificial Sequence
  Description of Artificial Sequence: Synthetic peptide
  Seed: CSLMQGSTLPRRSGA
CSLMLGSLLNRRLGA

SEQ ID NO: 55037 - protein, 15 aa, Artificial Sequence
  Description of Artificial Sequence: Synthetic peptide
  Seed: CSLMQGSTLPRRSGA
CSLMLGSLLNRRMGA

SEQ ID NO: 55038 - protein, 15 aa, Artificial Sequence
  Description of Artificial Sequence: Synthetic peptide
  Seed: CSLMQGSTLPRRSGA
CSLMLGSLLNRRVGA

SEQ ID NO: 55039 - protein, 15 aa, Artificial Sequence
  Description of Artificial Sequence: Synthetic peptide
  Seed: CSLMQGSTLPRRSGA
CSLMLGSLLPRRAGA

SEQ ID NO: 55040 - protein, 15 aa, Artificial Sequence
  Description of Artificial Sequence: Synthetic peptide
  Seed: CSLMQGSTLPRRSGA
CSLMLGSLLPRRIGA

SEQ ID NO: 55041 - protein, 15 aa, Artificial Sequence
  Description of Artificial Sequence: Synthetic peptide
  Seed: CSLMQGSTLPRRSGA
CSLMLGSLLPRRLGA

SEQ ID NO: 55042 - protein, 15 aa, Artificial Sequence
  Description of Artificial Sequence: Synthetic peptide
  Seed: CSLMQGSTLPRRSGA
CSLMLGSLLPRRMGA

SEQ ID NO: 55043 - protein, 15 aa, Artificial Sequence
  Description of Artificial Sequence: Synthetic peptide
  Seed: CSLMQGSTLPRRSGA
CSLMLGSLLPRRSGA

SEQ ID NO: 55044 - protein, 15 aa, Artificial Sequence
  Description of Artificial Sequence: Synthetic peptide
  Seed: CSLMQGSTLPRRSGA
CSLMLGSLLPRRTGA

SEQ ID NO: 55045 - protein, 15 aa, Artificial Sequence
  Description of Artificial Sequence: Synthetic peptide
  Seed: CSLMQGSTLPRRSGA
CSLMLGSLLPRRVGA

SEQ ID NO: 55046 - protein, 15 aa, Artificial Sequence
  Description of Artificial Sequence: Synthetic peptide
  Seed: CSLMQGSTLPRRSGA
CSLMLGSLLSRRAGA

SEQ ID NO: 55047 - protein, 15 aa, Artificial Sequence
  Description of Artificial Sequence: Synthetic peptide
  Seed: CSLMQGSTLPRRSGA
CSLMLGSLLSRRCGA

SEQ ID NO: 55048 - protein, 15 aa, Artificial Sequence
  Description of Artificial Sequence: Synthetic peptide
  Seed: CSLMQGSTLPRRSGA
CSLMLGSLLSRRFGA

SEQ ID NO: 55049 - protein, 15 aa, Artificial Sequence
  Description of Artificial Sequence: Synthetic peptide
  Seed: CSLMQGSTLPRRSGA
CSLMLGSLLSRRGGA

SEQ ID NO: 55050 - protein, 15 aa, Artificial Sequence
  Description of Artificial Sequence: Synthetic peptide
  Seed: CSLMQGSTLPRRSGA
CSLMLGSLLSRRIGA

SEQ ID NO: 55051 - protein, 15 aa, Artificial Sequence
  Description of Artificial Sequence: Synthetic peptide
  Seed: CSLMQGSTLPRRSGA
CSLMLGSLLSRRLGA

SEQ ID NO: 55052 - protein, 15 aa, Artificial Sequence
  Description of Artificial Sequence: Synthetic peptide
  Seed: CSLMQGSTLPRRSGA
CSLMLGSLLSRRMGA

SEQ ID NO: 55053 - protein, 15 aa, Artificial Sequence
  Description of Artificial Sequence: Synthetic peptide
  Seed: CSLMQGSTLPRRSGA
CSLMLGSLLSRRSGA

SEQ ID NO: 55054 - protein, 15 aa, Artificial Sequence
  Description of Artificial Sequence: Synthetic peptide
  Seed: CSLMQGSTLPRRSGA
CSLMLGSLLSRRTGA

SEQ ID NO: 55055 - protein, 15 aa, Artificial Sequence
  Description of Artificial Sequence: Synthetic peptide
  Seed: CSLMQGSTLPRRSGA
CSLMLGSLLSRRVGA

SEQ ID NO: 55056 - protein, 15 aa, Artificial Sequence
  Description of Artificial Sequence: Synthetic peptide
  Seed: CSLMQGSTLPRRSGA
CSLMLGSLLTRRAGA

SEQ ID NO: 55057 - protein, 15 aa, Artificial Sequence
  Description of Artificial Sequence: Synthetic peptide
  Seed: CSLMQGSTLPRRSGA
CSLMLGSLLTRRIGA

SEQ ID NO: 55058 - protein, 15 aa, Artificial Sequence
  Description of Artificial Sequence: Synthetic peptide
  Seed: CSLMQGSTLPRRSGA
CSLMLGSLLTRRLGA

SEQ ID NO: 55059 - protein, 15 aa, Artificial Sequence
  Description of Artificial Sequence: Synthetic peptide
  Seed: CSLMQGSTLPRRSGA
CSLMLGSLLTRRMGA

SEQ ID NO: 55060 - protein, 15 aa, Artificial Sequence
  Description of Artificial Sequence: Synthetic peptide
  Seed: CSLMQGSTLPRRSGA
CSLMLGSLLTRRSGA

SEQ ID NO: 55061 - protein, 15 aa, Artificial Sequence
  Description of Artificial Sequence: Synthetic peptide
  Seed: CSLMQGSTLPRRSGA
CSLMLGSLLTRRTGA

SEQ ID NO: 55062 - protein, 15 aa, Artificial Sequence
  Description of Artificial Sequence: Synthetic peptide
  Seed: CSLMQGSTLPRRSGA
CSLMLGSLLTRRVGA

SEQ ID NO: 55063 - protein, 15 aa, Artificial Sequence
  Description of Artificial Sequence: Synthetic peptide
  Seed: CSLMQGSTLPRRSGA
CSLMLGSLLVRRAGA

SEQ ID NO: 55064 - protein, 15 aa, Artificial Sequence
  Description of Artificial Sequence: Synthetic peptide
  Seed: CSLMQGSTLPRRSGA
CSLMLGSLLVRRIGA

SEQ ID NO: 55065 - protein, 15 aa, Artificial Sequence
  Description of Artificial Sequence: Synthetic peptide
  Seed: CSLMQGSTLPRRSGA
CSLMLGSLLVRRLGA

SEQ ID NO: 55066 - protein, 15 aa, Artificial Sequence
  Description of Artificial Sequence: Synthetic peptide
  Seed: CSLMQGSTLPRRSGA
CSLMLGSLLVRRMGA

SEQ ID NO: 55067 - protein, 15 aa, Artificial Sequence
  Description of Artificial Sequence: Synthetic peptide
  Seed: CSLMQGSTLPRRSGA
CSLMLGSLLVRRSGA

SEQ ID NO: 55068 - protein, 15 aa, Artificial Sequence
  Description of Artificial Sequence: Synthetic peptide
  Seed: CSLMQGSTLPRRSGA
CSLMLGSLLVRRTGA

SEQ ID NO: 55069 - protein, 15 aa, Artificial Sequence
  Description of Artificial Sequence: Synthetic peptide
  Seed: CSLMQGSTLPRRSGA
CSLMLGSLLVRRVGA

SEQ ID NO: 55070 - protein, 15 aa, Artificial Sequence
  Description of Artificial Sequence: Synthetic peptide
  Seed: CSLMQGSTLPRRSGA
CSLMLGSMLARRAGA

SEQ ID NO: 55071 - protein, 15 aa, Artificial Sequence
  Description of Artificial Sequence: Synthetic peptide
  Seed: CSLMQGSTLPRRSGA
CSLMLGSMLARRCGA

SEQ ID NO: 55072 - protein, 15 aa, Artificial Sequence
  Description of Artificial Sequence: Synthetic peptide
  Seed: CSLMQGSTLPRRSGA
CSLMLGSMLARRFGA

SEQ ID NO: 55073 - protein, 15 aa, Artificial Sequence
  Description of Artificial Sequence: Synthetic peptide
  Seed: CSLMQGSTLPRRSGA
CSLMLGSMLARRGGA

SEQ ID NO: 55074 - protein, 15 aa, Artificial Sequence
  Description of Artificial Sequence: Synthetic peptide
  Seed: CSLMQGSTLPRRSGA
CSLMLGSMLARRHGA

SEQ ID NO: 55075 - protein, 15 aa, Artificial Sequence
  Description of Artificial Sequence: Synthetic peptide
  Seed: CSLMQGSTLPRRSGA
CSLMLGSMLARRIGA

SEQ ID NO: 55076 - protein, 15 aa, Artificial Sequence
  Description of Artificial Sequence: Synthetic peptide
  Seed: CSLMQGSTLPRRSGA
CSLMLGSMLARRLGA

SEQ ID NO: 55077 - protein, 15 aa, Artificial Sequence
  Description of Artificial Sequence: Synthetic peptide
  Seed: CSLMQGSTLPRRSGA
CSLMLGSMLARRMGA

SEQ ID NO: 55078 - protein, 15 aa, Artificial Sequence
  Description of Artificial Sequence: Synthetic peptide
  Seed: CSLMQGSTLPRRSGA
CSLMLGSMLARRNGA

SEQ ID NO: 55079 - protein, 15 aa, Artificial Sequence
  Description of Artificial Sequence: Synthetic peptide
  Seed: CSLMQGSTLPRRSGA
CSLMLGSMLARRSGA

SEQ ID NO: 55080 - protein, 15 aa, Artificial Sequence
  Description of Artificial Sequence: Synthetic peptide
  Seed: CSLMQGSTLPRRSGA
CSLMLGSMLARRTGA

SEQ ID NO: 55081 - protein, 15 aa, Artificial Sequence
  Description of Artificial Sequence: Synthetic peptide
  Seed: CSLMQGSTLPRRSGA
CSLMLGSMLARRVGA

SEQ ID NO: 55082 - protein, 15 aa, Artificial Sequence
  Description of Artificial Sequence: Synthetic peptide
  Seed: CSLMQGSTLPRRSGA
CSLMLGSMLARRYGA

SEQ ID NO: 55083 - protein, 15 aa, Artificial Sequence
  Description of Artificial Sequence: Synthetic peptide
  Seed: CSLMQGSTLPRRSGA
CSLMLGSMLGRRAGA

SEQ ID NO: 55084 - protein, 15 aa, Artificial Sequence
  Description of Artificial Sequence: Synthetic peptide
  Seed: CSLMQGSTLPRRSGA
CSLMLGSMLGRRCGA

SEQ ID NO: 55085 - protein, 15 aa, Artificial Sequence
  Description of Artificial Sequence: Synthetic peptide
  Seed: CSLMQGSTLPRRSGA
CSLMLGSMLGRRFGA

SEQ ID NO: 55086 - protein, 15 aa, Artificial Sequence
  Description of Artificial Sequence: Synthetic peptide
  Seed: CSLMQGSTLPRRSGA
CSLMLGSMLGRRGGA

SEQ ID NO: 55087 - protein, 15 aa, Artificial Sequence
  Description of Artificial Sequence: Synthetic peptide
  Seed: CSLMQGSTLPRRSGA
CSLMLGSMLGRRIGA

SEQ ID NO: 55088 - protein, 15 aa, Artificial Sequence
  Description of Artificial Sequence: Synthetic peptide
  Seed: CSLMQGSTLPRRSGA
CSLMLGSMLGRRLGA

SEQ ID NO: 55089 - protein, 15 aa, Artificial Sequence
  Description of Artificial Sequence: Synthetic peptide
  Seed: CSLMQGSTLPRRSGA
CSLMLGSMLGRRMGA

SEQ ID NO: 55090 - protein, 15 aa, Artificial Sequence
  Description of Artificial Sequence: Synthetic peptide
  Seed: CSLMQGSTLPRRSGA
CSLMLGSMLGRRSGA

SEQ ID NO: 55091 - protein, 15 aa, Artificial Sequence
  Description of Artificial Sequence: Synthetic peptide
  Seed: CSLMQGSTLPRRSGA
CSLMLGSMLGRRTGA

SEQ ID NO: 55092 - protein, 15 aa, Artificial Sequence
  Description of Artificial Sequence: Synthetic peptide
  Seed: CSLMQGSTLPRRSGA
CSLMLGSMLGRRVGA

SEQ ID NO: 55093 - protein, 15 aa, Artificial Sequence
  Description of Artificial Sequence: Synthetic peptide
  Seed: CSLMQGSTLPRRSGA
CSLMLGSMLIRRAGA

SEQ ID NO: 55094 - protein, 15 aa, Artificial Sequence
  Description of Artificial Sequence: Synthetic peptide
  Seed: CSLMQGSTLPRRSGA
CSLMLGSMLIRRVGA

SEQ ID NO: 55095 - protein, 15 aa, Artificial Sequence
  Description of Artificial Sequence: Synthetic peptide
  Seed: CSLMQGSTLPRRSGA
CSLMLGSMLNRRAGA

SEQ ID NO: 55096 - protein, 15 aa, Artificial Sequence
  Description of Artificial Sequence: Synthetic peptide
  Seed: CSLMQGSTLPRRSGA
CSLMLGSMLNRRIGA

SEQ ID NO: 55097 - protein, 15 aa, Artificial Sequence
  Description of Artificial Sequence: Synthetic peptide
  Seed: CSLMQGSTLPRRSGA
CSLMLGSMLNRRLGA

SEQ ID NO: 55098 - protein, 15 aa, Artificial Sequence
  Description of Artificial Sequence: Synthetic peptide
  Seed: CSLMQGSTLPRRSGA
CSLMLGSMLNRRMGA

SEQ ID NO: 55099 - protein, 15 aa, Artificial Sequence
  Description of Artificial Sequence: Synthetic peptide
  Seed: CSLMQGSTLPRRSGA
CSLMLGSMLNRRTGA

SEQ ID NO: 55100 - protein, 15 aa, Artificial Sequence
  Description of Artificial Sequence: Synthetic peptide
  Seed: CSLMQGSTLPRRSGA
CSLMLGSMLNRRVGA

SEQ ID NO: 55101 - protein, 15 aa, Artificial Sequence
  Description of Artificial Sequence: Synthetic peptide
  Seed: CSLMQGSTLPRRSGA
CSLMLGSMLPRRAGA

SEQ ID NO: 55102 - protein, 15 aa, Artificial Sequence
  Description of Artificial Sequence: Synthetic peptide
  Seed: CSLMQGSTLPRRSGA
CSLMLGSMLPRRIGA

SEQ ID NO: 55103 - protein, 15 aa, Artificial Sequence
  Description of Artificial Sequence: Synthetic peptide
  Seed: CSLMQGSTLPRRSGA
CSLMLGSMLPRRLGA

SEQ ID NO: 55104 - protein, 15 aa, Artificial Sequence
  Description of Artificial Sequence: Synthetic peptide
  Seed: CSLMQGSTLPRRSGA
CSLMLGSMLPRRMGA

SEQ ID NO: 55105 - protein, 15 aa, Artificial Sequence
  Description of Artificial Sequence: Synthetic peptide
  Seed: CSLMQGSTLPRRSGA
CSLMLGSMLPRRTGA

SEQ ID NO: 55106 - protein, 15 aa, Artificial Sequence
  Description of Artificial Sequence: Synthetic peptide
  Seed: CSLMQGSTLPRRSGA
CSLMLGSMLPRRVGA

SEQ ID NO: 55107 - protein, 15 aa, Artificial Sequence
  Description of Artificial Sequence: Synthetic peptide
  Seed: CSLMQGSTLPRRSGA
CSLMLGSMLSRRAGA

SEQ ID NO: 55108 - protein, 15 aa, Artificial Sequence
  Description of Artificial Sequence: Synthetic peptide
  Seed: CSLMQGSTLPRRSGA
CSLMLGSMLSRRCGA

SEQ ID NO: 55109 - protein, 15 aa, Artificial Sequence
  Description of Artificial Sequence: Synthetic peptide
  Seed: CSLMQGSTLPRRSGA
CSLMLGSMLSRRFGA

SEQ ID NO: 55110 - protein, 15 aa, Artificial Sequence
  Description of Artificial Sequence: Synthetic peptide
  Seed: CSLMQGSTLPRRSGA
CSLMLGSMLSRRGGA

SEQ ID NO: 55111 - protein, 15 aa, Artificial Sequence
  Description of Artificial Sequence: Synthetic peptide
  Seed: CSLMQGSTLPRRSGA
CSLMLGSMLSRRIGA

SEQ ID NO: 55112 - protein, 15 aa, Artificial Sequence
  Description of Artificial Sequence: Synthetic peptide
  Seed: CSLMQGSTLPRRSGA
CSLMLGSMLSRRLGA

SEQ ID NO: 55113 - protein, 15 aa, Artificial Sequence
  Description of Artificial Sequence: Synthetic peptide
  Seed: CSLMQGSTLPRRSGA
CSLMLGSMLSRRMGA

SEQ ID NO: 55114 - protein, 15 aa, Artificial Sequence
  Description of Artificial Sequence: Synthetic peptide
  Seed: CSLMQGSTLPRRSGA
CSLMLGSMLSRRSGA

SEQ ID NO: 55115 - protein, 15 aa, Artificial Sequence
  Description of Artificial Sequence: Synthetic peptide
  Seed: CSLMQGSTLPRRSGA
CSLMLGSMLSRRTGA

SEQ ID NO: 55116 - protein, 15 aa, Artificial Sequence
  Description of Artificial Sequence: Synthetic peptide
  Seed: CSLMQGSTLPRRSGA
CSLMLGSMLSRRVGA

SEQ ID NO: 55117 - protein, 15 aa, Artificial Sequence
  Description of Artificial Sequence: Synthetic peptide
  Seed: CSLMQGSTLPRRSGA
CSLMLGSMLTRRAGA

SEQ ID NO: 55118 - protein, 15 aa, Artificial Sequence
  Description of Artificial Sequence: Synthetic peptide
  Seed: CSLMQGSTLPRRSGA
CSLMLGSMLTRRIGA

SEQ ID NO: 55119 - protein, 15 aa, Artificial Sequence
  Description of Artificial Sequence: Synthetic peptide
  Seed: CSLMQGSTLPRRSGA
CSLMLGSMLTRRLGA

SEQ ID NO: 55120 - protein, 15 aa, Artificial Sequence
  Description of Artificial Sequence: Synthetic peptide
  Seed: CSLMQGSTLPRRSGA
CSLMLGSMLTRRMGA

SEQ ID NO: 55121 - protein, 15 aa, Artificial Sequence
  Description of Artificial Sequence: Synthetic peptide
  Seed: CSLMQGSTLPRRSGA
CSLMLGSMLTRRSGA

SEQ ID NO: 55122 - protein, 15 aa, Artificial Sequence
  Description of Artificial Sequence: Synthetic peptide
  Seed: CSLMQGSTLPRRSGA
CSLMLGSMLTRRTGA

SEQ ID NO: 55123 - protein, 15 aa, Artificial Sequence
  Description of Artificial Sequence: Synthetic peptide
  Seed: CSLMQGSTLPRRSGA
CSLMLGSMLTRRVGA

SEQ ID NO: 55124 - protein, 15 aa, Artificial Sequence
  Description of Artificial Sequence: Synthetic peptide
  Seed: CSLMQGSTLPRRSGA
CSLMLGSMLVRRAGA

SEQ ID NO: 55125 - protein, 15 aa, Artificial Sequence
  Description of Artificial Sequence: Synthetic peptide
  Seed: CSLMQGSTLPRRSGA
CSLMLGSMLVRRIGA

SEQ ID NO: 55126 - protein, 15 aa, Artificial Sequence
  Description of Artificial Sequence: Synthetic peptide
  Seed: CSLMQGSTLPRRSGA
CSLMLGSMLVRRLGA

SEQ ID NO: 55127 - protein, 15 aa, Artificial Sequence
  Description of Artificial Sequence: Synthetic peptide
  Seed: CSLMQGSTLPRRSGA
CSLMLGSMLVRRMGA

SEQ ID NO: 55128 - protein, 15 aa, Artificial Sequence
  Description of Artificial Sequence: Synthetic peptide
  Seed: CSLMQGSTLPRRSGA
CSLMLGSMLVRRSGA

SEQ ID NO: 55129 - protein, 15 aa, Artificial Sequence
  Description of Artificial Sequence: Synthetic peptide
  Seed: CSLMQGSTLPRRSGA
CSLMLGSMLVRRTGA

SEQ ID NO: 55130 - protein, 15 aa, Artificial Sequence
  Description of Artificial Sequence: Synthetic peptide
  Seed: CSLMQGSTLPRRSGA
CSLMLGSMLVRRVGA

SEQ ID NO: 55131 - protein, 15 aa, Artificial Sequence
  Description of Artificial Sequence: Synthetic peptide
  Seed: CSLMQGSTLPRRSGA
CSLMLGSNLARRIGA

SEQ ID NO: 55132 - protein, 15 aa, Artificial Sequence
  Description of Artificial Sequence: Synthetic peptide
  Seed: CSLMQGSTLPRRSGA
CSLMLGSNLARRLGA

SEQ ID NO: 55133 - protein, 15 aa, Artificial Sequence
  Description of Artificial Sequence: Synthetic peptide
  Seed: CSLMQGSTLPRRSGA
CSLMLGSNLARRVGA

SEQ ID NO: 55134 - protein, 15 aa, Artificial Sequence
  Description of Artificial Sequence: Synthetic peptide
  Seed: CSLMQGSTLPRRSGA
CSLMLGSQLARRAGA

SEQ ID NO: 55135 - protein, 15 aa, Artificial Sequence
  Description of Artificial Sequence: Synthetic peptide
  Seed: CSLMQGSTLPRRSGA
CSLMLGSQLARRIGA

SEQ ID NO: 55136 - protein, 15 aa, Artificial Sequence
  Description of Artificial Sequence: Synthetic peptide
  Seed: CSLMQGSTLPRRSGA
CSLMLGSQLARRLGA

SEQ ID NO: 55137 - protein, 15 aa, Artificial Sequence
  Description of Artificial Sequence: Synthetic peptide
  Seed: CSLMQGSTLPRRSGA
CSLMLGSQLARRMGA

SEQ ID NO: 55138 - protein, 15 aa, Artificial Sequence
  Description of Artificial Sequence: Synthetic peptide
  Seed: CSLMQGSTLPRRSGA
CSLMLGSQLARRTGA

SEQ ID NO: 55139 - protein, 15 aa, Artificial Sequence
  Description of Artificial Sequence: Synthetic peptide
  Seed: CSLMQGSTLPRRSGA
CSLMLGSQLARRVGA

SEQ ID NO: 55140 - protein, 15 aa, Artificial Sequence
  Description of Artificial Sequence: Synthetic peptide
  Seed: CSLMQGSTLPRRSGA
CSLMLGSQLGRRAGA

SEQ ID NO: 55141 - protein, 15 aa, Artificial Sequence
  Description of Artificial Sequence: Synthetic peptide
  Seed: CSLMQGSTLPRRSGA
CSLMLGSQLGRRIGA

SEQ ID NO: 55142 - protein, 15 aa, Artificial Sequence
  Description of Artificial Sequence: Synthetic peptide
  Seed: CSLMQGSTLPRRSGA
CSLMLGSQLGRRLGA

SEQ ID NO: 55143 - protein, 15 aa, Artificial Sequence
  Description of Artificial Sequence: Synthetic peptide
  Seed: CSLMQGSTLPRRSGA
CSLMLGSQLGRRVGA

SEQ ID NO: 55144 - protein, 15 aa, Artificial Sequence
  Description of Artificial Sequence: Synthetic peptide
  Seed: CSLMQGSTLPRRSGA
CSLMLGSQLSRRAGA

SEQ ID NO: 55145 - protein, 15 aa, Artificial Sequence
  Description of Artificial Sequence: Synthetic peptide
  Seed: CSLMQGSTLPRRSGA
CSLMLGSQLSRRIGA

SEQ ID NO: 55146 - protein, 15 aa, Artificial Sequence
  Description of Artificial Sequence: Synthetic peptide
  Seed: CSLMQGSTLPRRSGA
CSLMLGSQLSRRLGA

SEQ ID NO: 55147 - protein, 15 aa, Artificial Sequence
  Description of Artificial Sequence: Synthetic peptide
  Seed: CSLMQGSTLPRRSGA
CSLMLGSQLSRRVGA

SEQ ID NO: 55148 - protein, 15 aa, Artificial Sequence
  Description of Artificial Sequence: Synthetic peptide
  Seed: CSLMQGSTLPRRSGA
CSLMLGSQLVRRVGA

SEQ ID NO: 55149 - protein, 15 aa, Artificial Sequence
  Description of Artificial Sequence: Synthetic peptide
  Seed: CSLMQGSTLPRRSGA
CSLMLGSSLARRAGA

SEQ ID NO: 55150 - protein, 15 aa, Artificial Sequence
  Description of Artificial Sequence: Synthetic peptide
  Seed: CSLMQGSTLPRRSGA
CSLMLGSSLARRIGA

SEQ ID NO: 55151 - protein, 15 aa, Artificial Sequence
  Description of Artificial Sequence: Synthetic peptide
  Seed: CSLMQGSTLPRRSGA
CSLMLGSSLARRLGA

SEQ ID NO: 55152 - protein, 15 aa, Artificial Sequence
  Description of Artificial Sequence: Synthetic peptide
  Seed: CSLMQGSTLPRRSGA
CSLMLGSSLARRMGA

SEQ ID NO: 55153 - protein, 15 aa, Artificial Sequence
  Description of Artificial Sequence: Synthetic peptide
  Seed: CSLMQGSTLPRRSGA
CSLMLGSSLARRTGA

SEQ ID NO: 55154 - protein, 15 aa, Artificial Sequence
  Description of Artificial Sequence: Synthetic peptide
  Seed: CSLMQGSTLPRRSGA
CSLMLGSSLARRVGA

SEQ ID NO: 55155 - protein, 15 aa, Artificial Sequence
  Description of Artificial Sequence: Synthetic peptide
  Seed: CSLMQGSTLPRRSGA
CSLMLGSSLGRRIGA

SEQ ID NO: 55156 - protein, 15 aa, Artificial Sequence
  Description of Artificial Sequence: Synthetic peptide
  Seed: CSLMQGSTLPRRSGA
CSLMLGSSLGRRLGA

SEQ ID NO: 55157 - protein, 15 aa, Artificial Sequence
  Description of Artificial Sequence: Synthetic peptide
  Seed: CSLMQGSTLPRRSGA
CSLMLGSSLGRRVGA

SEQ ID NO: 55158 - protein, 15 aa, Artificial Sequence
  Description of Artificial Sequence: Synthetic peptide
  Seed: CSLMQGSTLPRRSGA
CSLMLGSSLSRRIGA

SEQ ID NO: 55159 - protein, 15 aa, Artificial Sequence
  Description of Artificial Sequence: Synthetic peptide
  Seed: CSLMQGSTLPRRSGA
CSLMLGSSLSRRLGA

SEQ ID NO: 55160 - protein, 15 aa, Artificial Sequence
  Description of Artificial Sequence: Synthetic peptide
  Seed: CSLMQGSTLPRRSGA
CSLMLGSSLSRRVGA

SEQ ID NO: 55161 - protein, 15 aa, Artificial Sequence
  Description of Artificial Sequence: Synthetic peptide
  Seed: CSLMQGSTLPRRSGA
CSLMLGSTLARRAGA

SEQ ID NO: 55162 - protein, 15 aa, Artificial Sequence
  Description of Artificial Sequence: Synthetic peptide
  Seed: CSLMQGSTLPRRSGA
CSLMLGSTLARRIGA

SEQ ID NO: 55163 - protein, 15 aa, Artificial Sequence
  Description of Artificial Sequence: Synthetic peptide
  Seed: CSLMQGSTLPRRSGA
CSLMLGSTLARRLGA

SEQ ID NO: 55164 - protein, 15 aa, Artificial Sequence
  Description of Artificial Sequence: Synthetic peptide
  Seed: CSLMQGSTLPRRSGA
CSLMLGSTLARRMGA

SEQ ID NO: 55165 - protein, 15 aa, Artificial Sequence
  Description of Artificial Sequence: Synthetic peptide
  Seed: CSLMQGSTLPRRSGA
CSLMLGSTLARRVGA

SEQ ID NO: 55166 - protein, 15 aa, Artificial Sequence
  Description of Artificial Sequence: Synthetic peptide
  Seed: CSLMQGSTLPRRSGA
CSLMLGSTLSRRIGA

SEQ ID NO: 55167 - protein, 15 aa, Artificial Sequence
  Description of Artificial Sequence: Synthetic peptide
  Seed: CSLMQGSTLPRRSGA
CSLMLGSTLSRRLGA

SEQ ID NO: 55168 - protein, 15 aa, Artificial Sequence
  Description of Artificial Sequence: Synthetic peptide
  Seed: CSLMQGSTLPRRSGA
CSLMLGSTLSRRVGA

SEQ ID NO: 55169 - protein, 15 aa, Artificial Sequence
  Description of Artificial Sequence: Synthetic peptide
  Seed: CSLMQGSTLPRRSGA
CSLMLGSVLARRAGA

SEQ ID NO: 55170 - protein, 15 aa, Artificial Sequence
  Description of Artificial Sequence: Synthetic peptide
  Seed: CSLMQGSTLPRRSGA
CSLMLGSVLARRIGA

SEQ ID NO: 55171 - protein, 15 aa, Artificial Sequence
  Description of Artificial Sequence: Synthetic peptide
  Seed: CSLMQGSTLPRRSGA
CSLMLGSVLARRLGA

SEQ ID NO: 55172 - protein, 15 aa, Artificial Sequence
  Description of Artificial Sequence: Synthetic peptide
  Seed: CSLMQGSTLPRRSGA
CSLMLGSVLARRMGA

SEQ ID NO: 55173 - protein, 15 aa, Artificial Sequence
  Description of Artificial Sequence: Synthetic peptide
  Seed: CSLMQGSTLPRRSGA
CSLMLGSVLARRSGA

SEQ ID NO: 55174 - protein, 15 aa, Artificial Sequence
  Description of Artificial Sequence: Synthetic peptide
  Seed: CSLMQGSTLPRRSGA
CSLMLGSVLARRTGA

SEQ ID NO: 55175 - protein, 15 aa, Artificial Sequence
  Description of Artificial Sequence: Synthetic peptide
  Seed: CSLMQGSTLPRRSGA
CSLMLGSVLARRVGA

SEQ ID NO: 55176 - protein, 15 aa, Artificial Sequence
  Description of Artificial Sequence: Synthetic peptide
  Seed: CSLMQGSTLPRRSGA
CSLMLGSVLGRRAGA

SEQ ID NO: 55177 - protein, 15 aa, Artificial Sequence
  Description of Artificial Sequence: Synthetic peptide
  Seed: CSLMQGSTLPRRSGA
CSLMLGSVLGRRIGA

SEQ ID NO: 55178 - protein, 15 aa, Artificial Sequence
  Description of Artificial Sequence: Synthetic peptide
  Seed: CSLMQGSTLPRRSGA
CSLMLGSVLGRRLGA

SEQ ID NO: 55179 - protein, 15 aa, Artificial Sequence
  Description of Artificial Sequence: Synthetic peptide
  Seed: CSLMQGSTLPRRSGA
CSLMLGSVLGRRVGA

SEQ ID NO: 55180 - protein, 15 aa, Artificial Sequence
  Description of Artificial Sequence: Synthetic peptide
  Seed: CSLMQGSTLPRRSGA
CSLMLGSVLPRRIGA

SEQ ID NO: 55181 - protein, 15 aa, Artificial Sequence
  Description of Artificial Sequence: Synthetic peptide
  Seed: CSLMQGSTLPRRSGA
CSLMLGSVLPRRLGA

SEQ ID NO: 55182 - protein, 15 aa, Artificial Sequence
  Description of Artificial Sequence: Synthetic peptide
  Seed: CSLMQGSTLPRRSGA
CSLMLGSVLPRRVGA

SEQ ID NO: 55183 - protein, 15 aa, Artificial Sequence
  Description of Artificial Sequence: Synthetic peptide
  Seed: CSLMQGSTLPRRSGA
CSLMLGSVLSRRAGA

SEQ ID NO: 55184 - protein, 15 aa, Artificial Sequence
  Description of Artificial Sequence: Synthetic peptide
  Seed: CSLMQGSTLPRRSGA
CSLMLGSVLSRRIGA

SEQ ID NO: 55185 - protein, 15 aa, Artificial Sequence
  Description of Artificial Sequence: Synthetic peptide
  Seed: CSLMQGSTLPRRSGA
CSLMLGSVLSRRLGA

SEQ ID NO: 55186 - protein, 15 aa, Artificial Sequence
  Description of Artificial Sequence: Synthetic peptide
  Seed: CSLMQGSTLPRRSGA
CSLMLGSVLSRRVGA

SEQ ID NO: 55187 - protein, 15 aa, Artificial Sequence
  Description of Artificial Sequence: Synthetic peptide
  Seed: CSLMQGSTLPRRSGA
CSLMLGSVLTRRVGA

SEQ ID NO: 55188 - protein, 15 aa, Artificial Sequence
  Description of Artificial Sequence: Synthetic peptide
  Seed: CSLMQGSTLPRRSGA
CSLMMGSALARRAGA

SEQ ID NO: 55189 - protein, 15 aa, Artificial Sequence
  Description of Artificial Sequence: Synthetic peptide
  Seed: CSLMQGSTLPRRSGA
CSLMMGSALARRFGA

SEQ ID NO: 55190 - protein, 15 aa, Artificial Sequence
  Description of Artificial Sequence: Synthetic peptide
  Seed: CSLMQGSTLPRRSGA
CSLMMGSALARRIGA

SEQ ID NO: 55191 - protein, 15 aa, Artificial Sequence
  Description of Artificial Sequence: Synthetic peptide
  Seed: CSLMQGSTLPRRSGA
CSLMMGSALARRKGA

SEQ ID NO: 55192 - protein, 15 aa, Artificial Sequence
  Description of Artificial Sequence: Synthetic peptide
  Seed: CSLMQGSTLPRRSGA
CSLMMGSALARRLGA

SEQ ID NO: 55193 - protein, 15 aa, Artificial Sequence
  Description of Artificial Sequence: Synthetic peptide
  Seed: CSLMQGSTLPRRSGA
CSLMMGSALARRMGA

SEQ ID NO: 55194 - protein, 15 aa, Artificial Sequence
  Description of Artificial Sequence: Synthetic peptide
  Seed: CSLMQGSTLPRRSGA
CSLMMGSALARRRGA

SEQ ID NO: 55195 - protein, 15 aa, Artificial Sequence
  Description of Artificial Sequence: Synthetic peptide
  Seed: CSLMQGSTLPRRSGA
CSLMMGSALARRSGA

SEQ ID NO: 55196 - protein, 15 aa, Artificial Sequence
  Description of Artificial Sequence: Synthetic peptide
  Seed: CSLMQGSTLPRRSGA
CSLMMGSALARRTGA

SEQ ID NO: 55197 - protein, 15 aa, Artificial Sequence
  Description of Artificial Sequence: Synthetic peptide
  Seed: CSLMQGSTLPRRSGA
CSLMMGSALARRVGA

SEQ ID NO: 55198 - protein, 15 aa, Artificial Sequence
  Description of Artificial Sequence: Synthetic peptide
  Seed: CSLMQGSTLPRRSGA
CSLMMGSALARRWGA

SEQ ID NO: 55199 - protein, 15 aa, Artificial Sequence
  Description of Artificial Sequence: Synthetic peptide
  Seed: CSLMQGSTLPRRSGA
CSLMMGSALARRYGA

SEQ ID NO: 55200 - protein, 15 aa, Artificial Sequence
  Description of Artificial Sequence: Synthetic peptide
  Seed: CSLMQGSTLPRRSGA
CSLMMGSALGRRIGA

SEQ ID NO: 55201 - protein, 15 aa, Artificial Sequence
  Description of Artificial Sequence: Synthetic peptide
  Seed: CSLMQGSTLPRRSGA
CSLMMGSALGRRLGA

SEQ ID NO: 55202 - protein, 15 aa, Artificial Sequence
  Description of Artificial Sequence: Synthetic peptide
  Seed: CSLMQGSTLPRRSGA
CSLMMGSALGRRVGA

SEQ ID NO: 55203 - protein, 15 aa, Artificial Sequence
  Description of Artificial Sequence: Synthetic peptide
  Seed: CSLMQGSTLPRRSGA
CSLMMGSALIRRAGA

SEQ ID NO: 55204 - protein, 15 aa, Artificial Sequence
  Description of Artificial Sequence: Synthetic peptide
  Seed: CSLMQGSTLPRRSGA
CSLMMGSALIRRIGA

SEQ ID NO: 55205 - protein, 15 aa, Artificial Sequence
  Description of Artificial Sequence: Synthetic peptide
  Seed: CSLMQGSTLPRRSGA
CSLMMGSALIRRLGA

SEQ ID NO: 55206 - protein, 15 aa, Artificial Sequence
  Description of Artificial Sequence: Synthetic peptide
  Seed: CSLMQGSTLPRRSGA
CSLMMGSALIRRMGA

SEQ ID NO: 55207 - protein, 15 aa, Artificial Sequence
  Description of Artificial Sequence: Synthetic peptide
  Seed: CSLMQGSTLPRRSGA
CSLMMGSALIRRSGA

SEQ ID NO: 55208 - protein, 15 aa, Artificial Sequence
  Description of Artificial Sequence: Synthetic peptide
  Seed: CSLMQGSTLPRRSGA
CSLMMGSALIRRTGA

SEQ ID NO: 55209 - protein, 15 aa, Artificial Sequence
  Description of Artificial Sequence: Synthetic peptide
  Seed: CSLMQGSTLPRRSGA
CSLMMGSALIRRVGA

SEQ ID NO: 55210 - protein, 15 aa, Artificial Sequence
  Description of Artificial Sequence: Synthetic peptide
  Seed: CSLMQGSTLPRRSGA
CSLMMGSALLRRIGA

SEQ ID NO: 55211 - protein, 15 aa, Artificial Sequence
  Description of Artificial Sequence: Synthetic peptide
  Seed: CSLMQGSTLPRRSGA
CSLMMGSALLRRVGA

SEQ ID NO: 55212 - protein, 15 aa, Artificial Sequence
  Description of Artificial Sequence: Synthetic peptide
  Seed: CSLMQGSTLPRRSGA
CSLMMGSALMRRIGA

SEQ ID NO: 55213 - protein, 15 aa, Artificial Sequence
  Description of Artificial Sequence: Synthetic peptide
  Seed: CSLMQGSTLPRRSGA
CSLMMGSALMRRLGA

SEQ ID NO: 55214 - protein, 15 aa, Artificial Sequence
  Description of Artificial Sequence: Synthetic peptide
  Seed: CSLMQGSTLPRRSGA
CSLMMGSALMRRVGA

SEQ ID NO: 55215 - protein, 15 aa, Artificial Sequence
  Description of Artificial Sequence: Synthetic peptide
  Seed: CSLMQGSTLPRRSGA
CSLMMGSALPRRIGA

SEQ ID NO: 55216 - protein, 15 aa, Artificial Sequence
  Description of Artificial Sequence: Synthetic peptide
  Seed: CSLMQGSTLPRRSGA
CSLMMGSALPRRLGA

SEQ ID NO: 55217 - protein, 15 aa, Artificial Sequence
  Description of Artificial Sequence: Synthetic peptide
  Seed: CSLMQGSTLPRRSGA
CSLMMGSALPRRVGA

SEQ ID NO: 55218 - protein, 15 aa, Artificial Sequence
  Description of Artificial Sequence: Synthetic peptide
  Seed: CSLMQGSTLPRRSGA
CSLMMGSALSRRAGA

SEQ ID NO: 55219 - protein, 15 aa, Artificial Sequence
  Description of Artificial Sequence: Synthetic peptide
  Seed: CSLMQGSTLPRRSGA
CSLMMGSALSRRIGA

SEQ ID NO: 55220 - protein, 15 aa, Artificial Sequence
  Description of Artificial Sequence: Synthetic peptide
  Seed: CSLMQGSTLPRRSGA
CSLMMGSALSRRLGA

SEQ ID NO: 55221 - protein, 15 aa, Artificial Sequence
  Description of Artificial Sequence: Synthetic peptide
  Seed: CSLMQGSTLPRRSGA
CSLMMGSALSRRMGA

SEQ ID NO: 55222 - protein, 15 aa, Artificial Sequence
  Description of Artificial Sequence: Synthetic peptide
  Seed: CSLMQGSTLPRRSGA
CSLMMGSALSRRTGA

SEQ ID NO: 55223 - protein, 15 aa, Artificial Sequence
  Description of Artificial Sequence: Synthetic peptide
  Seed: CSLMQGSTLPRRSGA
CSLMMGSALSRRVGA

SEQ ID NO: 55224 - protein, 15 aa, Artificial Sequence
  Description of Artificial Sequence: Synthetic peptide
  Seed: CSLMQGSTLPRRSGA
CSLMMGSALTRRIGA

SEQ ID NO: 55225 - protein, 15 aa, Artificial Sequence
  Description of Artificial Sequence: Synthetic peptide
  Seed: CSLMQGSTLPRRSGA
CSLMMGSALTRRLGA

SEQ ID NO: 55226 - protein, 15 aa, Artificial Sequence
  Description of Artificial Sequence: Synthetic peptide
  Seed: CSLMQGSTLPRRSGA
CSLMMGSALTRRVGA

SEQ ID NO: 55227 - protein, 15 aa, Artificial Sequence
  Description of Artificial Sequence: Synthetic peptide
  Seed: CSLMQGSTLPRRSGA
CSLMMGSALVRRAGA

SEQ ID NO: 55228 - protein, 15 aa, Artificial Sequence
  Description of Artificial Sequence: Synthetic peptide
  Seed: CSLMQGSTLPRRSGA
CSLMMGSALVRRIGA

SEQ ID NO: 55229 - protein, 15 aa, Artificial Sequence
  Description of Artificial Sequence: Synthetic peptide
  Seed: CSLMQGSTLPRRSGA
CSLMMGSALVRRLGA

SEQ ID NO: 55230 - protein, 15 aa, Artificial Sequence
  Description of Artificial Sequence: Synthetic peptide
  Seed: CSLMQGSTLPRRSGA
CSLMMGSALVRRMGA

SEQ ID NO: 55231 - protein, 15 aa, Artificial Sequence
  Description of Artificial Sequence: Synthetic peptide
  Seed: CSLMQGSTLPRRSGA
CSLMMGSALVRRNGA

SEQ ID NO: 55232 - protein, 15 aa, Artificial Sequence
  Description of Artificial Sequence: Synthetic peptide
  Seed: CSLMQGSTLPRRSGA
CSLMMGSALVRRSGA

SEQ ID NO: 55233 - protein, 15 aa, Artificial Sequence
  Description of Artificial Sequence: Synthetic peptide
  Seed: CSLMQGSTLPRRSGA
CSLMMGSALVRRTGA

SEQ ID NO: 55234 - protein, 15 aa, Artificial Sequence
  Description of Artificial Sequence: Synthetic peptide
  Seed: CSLMQGSTLPRRSGA
CSLMMGSALVRRVGA

SEQ ID NO: 55235 - protein, 15 aa, Artificial Sequence
  Description of Artificial Sequence: Synthetic peptide
  Seed: CSLMQGSTLPRRSGA
CSLMMGSELARRLGA

SEQ ID NO: 55236 - protein, 15 aa, Artificial Sequence
  Description of Artificial Sequence: Synthetic peptide
  Seed: CSLMQGSTLPRRSGA
CSLMMGSELARRVGA

SEQ ID NO: 55237 - protein, 15 aa, Artificial Sequence
  Description of Artificial Sequence: Synthetic peptide
  Seed: CSLMQGSTLPRRSGA
CSLMMGSFLARRVGA

SEQ ID NO: 55238 - protein, 15 aa, Artificial Sequence
  Description of Artificial Sequence: Synthetic peptide
  Seed: CSLMQGSTLPRRSGA
CSLMMGSGLARRAGA

SEQ ID NO: 55239 - protein, 15 aa, Artificial Sequence
  Description of Artificial Sequence: Synthetic peptide
  Seed: CSLMQGSTLPRRSGA
CSLMMGSGLARRIGA

SEQ ID NO: 55240 - protein, 15 aa, Artificial Sequence
  Description of Artificial Sequence: Synthetic peptide
  Seed: CSLMQGSTLPRRSGA
CSLMMGSGLARRSGA

SEQ ID NO: 55241 - protein, 15 aa, Artificial Sequence
  Description of Artificial Sequence: Synthetic peptide
  Seed: CSLMQGSTLPRRSGA
CSLMMGSGLARRTGA

SEQ ID NO: 55242 - protein, 15 aa, Artificial Sequence
  Description of Artificial Sequence: Synthetic peptide
  Seed: CSLMQGSTLPRRSGA
CSLMMGSGLARRVGA

SEQ ID NO: 55243 - protein, 15 aa, Artificial Sequence
  Description of Artificial Sequence: Synthetic peptide
  Seed: CSLMQGSTLPRRSGA
CSLMMGSGLVRRAGA

SEQ ID NO: 55244 - protein, 15 aa, Artificial Sequence
  Description of Artificial Sequence: Synthetic peptide
  Seed: CSLMQGSTLPRRSGA
CSLMMGSGLVRRIGA

SEQ ID NO: 55245 - protein, 15 aa, Artificial Sequence
  Description of Artificial Sequence: Synthetic peptide
  Seed: CSLMQGSTLPRRSGA
CSLMMGSGLVRRVGA

SEQ ID NO: 55246 - protein, 15 aa, Artificial Sequence
  Description of Artificial Sequence: Synthetic peptide
  Seed: CSLMQGSTLPRRSGA
CSLMMGSILARRAGA

SEQ ID NO: 55247 - protein, 15 aa, Artificial Sequence
  Description of Artificial Sequence: Synthetic peptide
  Seed: CSLMQGSTLPRRSGA
CSLMMGSILARRIGA

SEQ ID NO: 55248 - protein, 15 aa, Artificial Sequence
  Description of Artificial Sequence: Synthetic peptide
  Seed: CSLMQGSTLPRRSGA
CSLMMGSILARRLGA

SEQ ID NO: 55249 - protein, 15 aa, Artificial Sequence
  Description of Artificial Sequence: Synthetic peptide
  Seed: CSLMQGSTLPRRSGA
CSLMMGSILARRMGA

SEQ ID NO: 55250 - protein, 15 aa, Artificial Sequence
  Description of Artificial Sequence: Synthetic peptide
  Seed: CSLMQGSTLPRRSGA
CSLMMGSILARRSGA

SEQ ID NO: 55251 - protein, 15 aa, Artificial Sequence
  Description of Artificial Sequence: Synthetic peptide
  Seed: CSLMQGSTLPRRSGA
CSLMMGSILARRTGA

SEQ ID NO: 55252 - protein, 15 aa, Artificial Sequence
  Description of Artificial Sequence: Synthetic peptide
  Seed: CSLMQGSTLPRRSGA
CSLMMGSILARRVGA

SEQ ID NO: 55253 - protein, 15 aa, Artificial Sequence
  Description of Artificial Sequence: Synthetic peptide
  Seed: CSLMQGSTLPRRSGA
CSLMMGSILGRRAGA

SEQ ID NO: 55254 - protein, 15 aa, Artificial Sequence
  Description of Artificial Sequence: Synthetic peptide
  Seed: CSLMQGSTLPRRSGA
CSLMMGSILGRRIGA

SEQ ID NO: 55255 - protein, 15 aa, Artificial Sequence
  Description of Artificial Sequence: Synthetic peptide
  Seed: CSLMQGSTLPRRSGA
CSLMMGSILGRRLGA

SEQ ID NO: 55256 - protein, 15 aa, Artificial Sequence
  Description of Artificial Sequence: Synthetic peptide
  Seed: CSLMQGSTLPRRSGA
CSLMMGSILGRRVGA

SEQ ID NO: 55257 - protein, 15 aa, Artificial Sequence
  Description of Artificial Sequence: Synthetic peptide
  Seed: CSLMQGSTLPRRSGA
CSLMMGSILPRRIGA

SEQ ID NO: 55258 - protein, 15 aa, Artificial Sequence
  Description of Artificial Sequence: Synthetic peptide
  Seed: CSLMQGSTLPRRSGA
CSLMMGSILPRRLGA

SEQ ID NO: 55259 - protein, 15 aa, Artificial Sequence
  Description of Artificial Sequence: Synthetic peptide
  Seed: CSLMQGSTLPRRSGA
CSLMMGSILPRRVGA

SEQ ID NO: 55260 - protein, 15 aa, Artificial Sequence
  Description of Artificial Sequence: Synthetic peptide
  Seed: CSLMQGSTLPRRSGA
CSLMMGSILSRRAGA

SEQ ID NO: 55261 - protein, 15 aa, Artificial Sequence
  Description of Artificial Sequence: Synthetic peptide
  Seed: CSLMQGSTLPRRSGA
CSLMMGSILSRRIGA

SEQ ID NO: 55262 - protein, 15 aa, Artificial Sequence
  Description of Artificial Sequence: Synthetic peptide
  Seed: CSLMQGSTLPRRSGA
CSLMMGSILSRRLGA

SEQ ID NO: 55263 - protein, 15 aa, Artificial Sequence
  Description of Artificial Sequence: Synthetic peptide
  Seed: CSLMQGSTLPRRSGA
CSLMMGSILSRRVGA

SEQ ID NO: 55264 - protein, 15 aa, Artificial Sequence
  Description of Artificial Sequence: Synthetic peptide
  Seed: CSLMQGSTLPRRSGA
CSLMMGSILTRRVGA

SEQ ID NO: 55265 - protein, 15 aa, Artificial Sequence
  Description of Artificial Sequence: Synthetic peptide
  Seed: CSLMQGSTLPRRSGA
CSLMMGSLLARRAGA

SEQ ID NO: 55266 - protein, 15 aa, Artificial Sequence
  Description of Artificial Sequence: Synthetic peptide
  Seed: CSLMQGSTLPRRSGA
CSLMMGSLLARRCGA

SEQ ID NO: 55267 - protein, 15 aa, Artificial Sequence
  Description of Artificial Sequence: Synthetic peptide
  Seed: CSLMQGSTLPRRSGA
CSLMMGSLLARRFGA

SEQ ID NO: 55268 - protein, 15 aa, Artificial Sequence
  Description of Artificial Sequence: Synthetic peptide
  Seed: CSLMQGSTLPRRSGA
CSLMMGSLLARRGGA

SEQ ID NO: 55269 - protein, 15 aa, Artificial Sequence
  Description of Artificial Sequence: Synthetic peptide
  Seed: CSLMQGSTLPRRSGA
CSLMMGSLLARRIGA

SEQ ID NO: 55270 - protein, 15 aa, Artificial Sequence
  Description of Artificial Sequence: Synthetic peptide
  Seed: CSLMQGSTLPRRSGA
CSLMMGSLLARRLGA

SEQ ID NO: 55271 - protein, 15 aa, Artificial Sequence
  Description of Artificial Sequence: Synthetic peptide
  Seed: CSLMQGSTLPRRSGA
CSLMMGSLLARRMGA

SEQ ID NO: 55272 - protein, 15 aa, Artificial Sequence
  Description of Artificial Sequence: Synthetic peptide
  Seed: CSLMQGSTLPRRSGA
CSLMMGSLLARRNGA

SEQ ID NO: 55273 - protein, 15 aa, Artificial Sequence
  Description of Artificial Sequence: Synthetic peptide
  Seed: CSLMQGSTLPRRSGA
CSLMMGSLLARRSGA

SEQ ID NO: 55274 - protein, 15 aa, Artificial Sequence
  Description of Artificial Sequence: Synthetic peptide
  Seed: CSLMQGSTLPRRSGA
CSLMMGSLLARRTGA

SEQ ID NO: 55275 - protein, 15 aa, Artificial Sequence
  Description of Artificial Sequence: Synthetic peptide
  Seed: CSLMQGSTLPRRSGA
CSLMMGSLLARRVGA

SEQ ID NO: 55276 - protein, 15 aa, Artificial Sequence
  Description of Artificial Sequence: Synthetic peptide
  Seed: CSLMQGSTLPRRSGA
CSLMMGSLLGRRAGA

SEQ ID NO: 55277 - protein, 15 aa, Artificial Sequence
  Description of Artificial Sequence: Synthetic peptide
  Seed: CSLMQGSTLPRRSGA
CSLMMGSLLGRRIGA

SEQ ID NO: 55278 - protein, 15 aa, Artificial Sequence
  Description of Artificial Sequence: Synthetic peptide
  Seed: CSLMQGSTLPRRSGA
CSLMMGSLLGRRLGA

SEQ ID NO: 55279 - protein, 15 aa, Artificial Sequence
  Description of Artificial Sequence: Synthetic peptide
  Seed: CSLMQGSTLPRRSGA
CSLMMGSLLGRRMGA

SEQ ID NO: 55280 - protein, 15 aa, Artificial Sequence
  Description of Artificial Sequence: Synthetic peptide
  Seed: CSLMQGSTLPRRSGA
CSLMMGSLLGRRSGA

SEQ ID NO: 55281 - protein, 15 aa, Artificial Sequence
  Description of Artificial Sequence: Synthetic peptide
  Seed: CSLMQGSTLPRRSGA
CSLMMGSLLGRRTGA

SEQ ID NO: 55282 - protein, 15 aa, Artificial Sequence
  Description of Artificial Sequence: Synthetic peptide
  Seed: CSLMQGSTLPRRSGA
CSLMMGSLLGRRVGA

SEQ ID NO: 55283 - protein, 15 aa, Artificial Sequence
  Description of Artificial Sequence: Synthetic peptide
  Seed: CSLMQGSTLPRRSGA
CSLMMGSLLNRRIGA

SEQ ID NO: 55284 - protein, 15 aa, Artificial Sequence
  Description of Artificial Sequence: Synthetic peptide
  Seed: CSLMQGSTLPRRSGA
CSLMMGSLLNRRLGA

SEQ ID NO: 55285 - protein, 15 aa, Artificial Sequence
  Description of Artificial Sequence: Synthetic peptide
  Seed: CSLMQGSTLPRRSGA
CSLMMGSLLNRRVGA

SEQ ID NO: 55286 - protein, 15 aa, Artificial Sequence
  Description of Artificial Sequence: Synthetic peptide
  Seed: CSLMQGSTLPRRSGA
CSLMMGSLLPRRAGA

SEQ ID NO: 55287 - protein, 15 aa, Artificial Sequence
  Description of Artificial Sequence: Synthetic peptide
  Seed: CSLMQGSTLPRRSGA
CSLMMGSLLPRRIGA

SEQ ID NO: 55288 - protein, 15 aa, Artificial Sequence
  Description of Artificial Sequence: Synthetic peptide
  Seed: CSLMQGSTLPRRSGA
CSLMMGSLLPRRLGA

SEQ ID NO: 55289 - protein, 15 aa, Artificial Sequence
  Description of Artificial Sequence: Synthetic peptide
  Seed: CSLMQGSTLPRRSGA
CSLMMGSLLPRRMGA

SEQ ID NO: 55290 - protein, 15 aa, Artificial Sequence
  Description of Artificial Sequence: Synthetic peptide
  Seed: CSLMQGSTLPRRSGA
CSLMMGSLLPRRVGA

SEQ ID NO: 55291 - protein, 15 aa, Artificial Sequence
  Description of Artificial Sequence: Synthetic peptide
  Seed: CSLMQGSTLPRRSGA
CSLMMGSLLSRRAGA

SEQ ID NO: 55292 - protein, 15 aa, Artificial Sequence
  Description of Artificial Sequence: Synthetic peptide
  Seed: CSLMQGSTLPRRSGA
CSLMMGSLLSRRIGA

SEQ ID NO: 55293 - protein, 15 aa, Artificial Sequence
  Description of Artificial Sequence: Synthetic peptide
  Seed: CSLMQGSTLPRRSGA
CSLMMGSLLSRRLGA

SEQ ID NO: 55294 - protein, 15 aa, Artificial Sequence
  Description of Artificial Sequence: Synthetic peptide
  Seed: CSLMQGSTLPRRSGA
CSLMMGSLLSRRMGA

SEQ ID NO: 55295 - protein, 15 aa, Artificial Sequence
  Description of Artificial Sequence: Synthetic peptide
  Seed: CSLMQGSTLPRRSGA
CSLMMGSLLSRRSGA

SEQ ID NO: 55296 - protein, 15 aa, Artificial Sequence
  Description of Artificial Sequence: Synthetic peptide
  Seed: CSLMQGSTLPRRSGA
CSLMMGSLLSRRTGA

SEQ ID NO: 55297 - protein, 15 aa, Artificial Sequence
  Description of Artificial Sequence: Synthetic peptide
  Seed: CSLMQGSTLPRRSGA
CSLMMGSLLSRRVGA

SEQ ID NO: 55298 - protein, 15 aa, Artificial Sequence
  Description of Artificial Sequence: Synthetic peptide
  Seed: CSLMQGSTLPRRSGA
CSLMMGSLLTRRAGA

SEQ ID NO: 55299 - protein, 15 aa, Artificial Sequence
  Description of Artificial Sequence: Synthetic peptide
  Seed: CSLMQGSTLPRRSGA
CSLMMGSLLTRRIGA

SEQ ID NO: 55300 - protein, 15 aa, Artificial Sequence
  Description of Artificial Sequence: Synthetic peptide
  Seed: CSLMQGSTLPRRSGA
CSLMMGSLLTRRLGA

SEQ ID NO: 55301 - protein, 15 aa, Artificial Sequence
  Description of Artificial Sequence: Synthetic peptide
  Seed: CSLMQGSTLPRRSGA
CSLMMGSLLTRRVGA

SEQ ID NO: 55302 - protein, 15 aa, Artificial Sequence
  Description of Artificial Sequence: Synthetic peptide
  Seed: CSLMQGSTLPRRSGA
CSLMMGSLLVRRAGA

SEQ ID NO: 55303 - protein, 15 aa, Artificial Sequence
  Description of Artificial Sequence: Synthetic peptide
  Seed: CSLMQGSTLPRRSGA
CSLMMGSLLVRRIGA

SEQ ID NO: 55304 - protein, 15 aa, Artificial Sequence
  Description of Artificial Sequence: Synthetic peptide
  Seed: CSLMQGSTLPRRSGA
CSLMMGSLLVRRLGA

SEQ ID NO: 55305 - protein, 15 aa, Artificial Sequence
  Description of Artificial Sequence: Synthetic peptide
  Seed: CSLMQGSTLPRRSGA
CSLMMGSLLVRRMGA

SEQ ID NO: 55306 - protein, 15 aa, Artificial Sequence
  Description of Artificial Sequence: Synthetic peptide
  Seed: CSLMQGSTLPRRSGA
CSLMMGSLLVRRTGA

SEQ ID NO: 55307 - protein, 15 aa, Artificial Sequence
  Description of Artificial Sequence: Synthetic peptide
  Seed: CSLMQGSTLPRRSGA
CSLMMGSLLVRRVGA

SEQ ID NO: 55308 - protein, 15 aa, Artificial Sequence
  Description of Artificial Sequence: Synthetic peptide
  Seed: CSLMQGSTLPRRSGA
CSLMMGSMLARRAGA

SEQ ID NO: 55309 - protein, 15 aa, Artificial Sequence
  Description of Artificial Sequence: Synthetic peptide
  Seed: CSLMQGSTLPRRSGA
CSLMMGSMLARRCGA

SEQ ID NO: 55310 - protein, 15 aa, Artificial Sequence
  Description of Artificial Sequence: Synthetic peptide
  Seed: CSLMQGSTLPRRSGA
CSLMMGSMLARRFGA

SEQ ID NO: 55311 - protein, 15 aa, Artificial Sequence
  Description of Artificial Sequence: Synthetic peptide
  Seed: CSLMQGSTLPRRSGA
CSLMMGSMLARRGGA

SEQ ID NO: 55312 - protein, 15 aa, Artificial Sequence
  Description of Artificial Sequence: Synthetic peptide
  Seed: CSLMQGSTLPRRSGA
CSLMMGSMLARRIGA

SEQ ID NO: 55313 - protein, 15 aa, Artificial Sequence
  Description of Artificial Sequence: Synthetic peptide
  Seed: CSLMQGSTLPRRSGA
CSLMMGSMLARRLGA

SEQ ID NO: 55314 - protein, 15 aa, Artificial Sequence
  Description of Artificial Sequence: Synthetic peptide
  Seed: CSLMQGSTLPRRSGA
CSLMMGSMLARRMGA

SEQ ID NO: 55315 - protein, 15 aa, Artificial Sequence
  Description of Artificial Sequence: Synthetic peptide
  Seed: CSLMQGSTLPRRSGA
CSLMMGSMLARRNGA

SEQ ID NO: 55316 - protein, 15 aa, Artificial Sequence
  Description of Artificial Sequence: Synthetic peptide
  Seed: CSLMQGSTLPRRSGA
CSLMMGSMLARRSGA

SEQ ID NO: 55317 - protein, 15 aa, Artificial Sequence
  Description of Artificial Sequence: Synthetic peptide
  Seed: CSLMQGSTLPRRSGA
CSLMMGSMLARRTGA

SEQ ID NO: 55318 - protein, 15 aa, Artificial Sequence
  Description of Artificial Sequence: Synthetic peptide
  Seed: CSLMQGSTLPRRSGA
CSLMMGSMLARRVGA

SEQ ID NO: 55319 - protein, 15 aa, Artificial Sequence
  Description of Artificial Sequence: Synthetic peptide
  Seed: CSLMQGSTLPRRSGA
CSLMMGSMLARRWGA

SEQ ID NO: 55320 - protein, 15 aa, Artificial Sequence
  Description of Artificial Sequence: Synthetic peptide
  Seed: CSLMQGSTLPRRSGA
CSLMMGSMLARRYGA

SEQ ID NO: 55321 - protein, 15 aa, Artificial Sequence
  Description of Artificial Sequence: Synthetic peptide
  Seed: CSLMQGSTLPRRSGA
CSLMMGSMLGRRAGA

SEQ ID NO: 55322 - protein, 15 aa, Artificial Sequence
  Description of Artificial Sequence: Synthetic peptide
  Seed: CSLMQGSTLPRRSGA
CSLMMGSMLGRRFGA

SEQ ID NO: 55323 - protein, 15 aa, Artificial Sequence
  Description of Artificial Sequence: Synthetic peptide
  Seed: CSLMQGSTLPRRSGA
CSLMMGSMLGRRIGA

SEQ ID NO: 55324 - protein, 15 aa, Artificial Sequence
  Description of Artificial Sequence: Synthetic peptide
  Seed: CSLMQGSTLPRRSGA
CSLMMGSMLGRRLGA

SEQ ID NO: 55325 - protein, 15 aa, Artificial Sequence
  Description of Artificial Sequence: Synthetic peptide
  Seed: CSLMQGSTLPRRSGA
CSLMMGSMLGRRMGA

SEQ ID NO: 55326 - protein, 15 aa, Artificial Sequence
  Description of Artificial Sequence: Synthetic peptide
  Seed: CSLMQGSTLPRRSGA
CSLMMGSMLGRRSGA

SEQ ID NO: 55327 - protein, 15 aa, Artificial Sequence
  Description of Artificial Sequence: Synthetic peptide
  Seed: CSLMQGSTLPRRSGA
CSLMMGSMLGRRTGA

SEQ ID NO: 55328 - protein, 15 aa, Artificial Sequence
  Description of Artificial Sequence: Synthetic peptide
  Seed: CSLMQGSTLPRRSGA
CSLMMGSMLGRRVGA

SEQ ID NO: 55329 - protein, 15 aa, Artificial Sequence
  Description of Artificial Sequence: Synthetic peptide
  Seed: CSLMQGSTLPRRSGA
CSLMMGSMLIRRVGA

SEQ ID NO: 55330 - protein, 15 aa, Artificial Sequence
  Description of Artificial Sequence: Synthetic peptide
  Seed: CSLMQGSTLPRRSGA
CSLMMGSMLNRRAGA

SEQ ID NO: 55331 - protein, 15 aa, Artificial Sequence
  Description of Artificial Sequence: Synthetic peptide
  Seed: CSLMQGSTLPRRSGA
CSLMMGSMLNRRIGA

SEQ ID NO: 55332 - protein, 15 aa, Artificial Sequence
  Description of Artificial Sequence: Synthetic peptide
  Seed: CSLMQGSTLPRRSGA
CSLMMGSMLNRRLGA

SEQ ID NO: 55333 - protein, 15 aa, Artificial Sequence
  Description of Artificial Sequence: Synthetic peptide
  Seed: CSLMQGSTLPRRSGA
CSLMMGSMLNRRVGA

SEQ ID NO: 55334 - protein, 15 aa, Artificial Sequence
  Description of Artificial Sequence: Synthetic peptide
  Seed: CSLMQGSTLPRRSGA
CSLMMGSMLPRRAGA

SEQ ID NO: 55335 - protein, 15 aa, Artificial Sequence
  Description of Artificial Sequence: Synthetic peptide
  Seed: CSLMQGSTLPRRSGA
CSLMMGSMLPRRIGA

SEQ ID NO: 55336 - protein, 15 aa, Artificial Sequence
  Description of Artificial Sequence: Synthetic peptide
  Seed: CSLMQGSTLPRRSGA
CSLMMGSMLPRRLGA

SEQ ID NO: 55337 - protein, 15 aa, Artificial Sequence
  Description of Artificial Sequence: Synthetic peptide
  Seed: CSLMQGSTLPRRSGA
CSLMMGSMLPRRMGA

SEQ ID NO: 55338 - protein, 15 aa, Artificial Sequence
  Description of Artificial Sequence: Synthetic peptide
  Seed: CSLMQGSTLPRRSGA
CSLMMGSMLPRRVGA

SEQ ID NO: 55339 - protein, 15 aa, Artificial Sequence
  Description of Artificial Sequence: Synthetic peptide
  Seed: CSLMQGSTLPRRSGA
CSLMMGSMLSRRAGA

SEQ ID NO: 55340 - protein, 15 aa, Artificial Sequence
  Description of Artificial Sequence: Synthetic peptide
  Seed: CSLMQGSTLPRRSGA
CSLMMGSMLSRRIGA

SEQ ID NO: 55341 - protein, 15 aa, Artificial Sequence
  Description of Artificial Sequence: Synthetic peptide
  Seed: CSLMQGSTLPRRSGA
CSLMMGSMLSRRLGA

SEQ ID NO: 55342 - protein, 15 aa, Artificial Sequence
  Description of Artificial Sequence: Synthetic peptide
  Seed: CSLMQGSTLPRRSGA
CSLMMGSMLSRRMGA

SEQ ID NO: 55343 - protein, 15 aa, Artificial Sequence
  Description of Artificial Sequence: Synthetic peptide
  Seed: CSLMQGSTLPRRSGA
CSLMMGSMLSRRSGA

SEQ ID NO: 55344 - protein, 15 aa, Artificial Sequence
  Description of Artificial Sequence: Synthetic peptide
  Seed: CSLMQGSTLPRRSGA
CSLMMGSMLSRRTGA

SEQ ID NO: 55345 - protein, 15 aa, Artificial Sequence
  Description of Artificial Sequence: Synthetic peptide
  Seed: CSLMQGSTLPRRSGA
CSLMMGSMLSRRVGA

SEQ ID NO: 55346 - protein, 15 aa, Artificial Sequence
  Description of Artificial Sequence: Synthetic peptide
  Seed: CSLMQGSTLPRRSGA
CSLMMGSMLTRRAGA

SEQ ID NO: 55347 - protein, 15 aa, Artificial Sequence
  Description of Artificial Sequence: Synthetic peptide
  Seed: CSLMQGSTLPRRSGA
CSLMMGSMLTRRIGA

SEQ ID NO: 55348 - protein, 15 aa, Artificial Sequence
  Description of Artificial Sequence: Synthetic peptide
  Seed: CSLMQGSTLPRRSGA
CSLMMGSMLTRRLGA

SEQ ID NO: 55349 - protein, 15 aa, Artificial Sequence
  Description of Artificial Sequence: Synthetic peptide
  Seed: CSLMQGSTLPRRSGA
CSLMMGSMLTRRMGA

SEQ ID NO: 55350 - protein, 15 aa, Artificial Sequence
  Description of Artificial Sequence: Synthetic peptide
  Seed: CSLMQGSTLPRRSGA
CSLMMGSMLTRRVGA

SEQ ID NO: 55351 - protein, 15 aa, Artificial Sequence
  Description of Artificial Sequence: Synthetic peptide
  Seed: CSLMQGSTLPRRSGA
CSLMMGSMLVRRAGA

SEQ ID NO: 55352 - protein, 15 aa, Artificial Sequence
  Description of Artificial Sequence: Synthetic peptide
  Seed: CSLMQGSTLPRRSGA
CSLMMGSMLVRRIGA

SEQ ID NO: 55353 - protein, 15 aa, Artificial Sequence
  Description of Artificial Sequence: Synthetic peptide
  Seed: CSLMQGSTLPRRSGA
CSLMMGSMLVRRLGA

SEQ ID NO: 55354 - protein, 15 aa, Artificial Sequence
  Description of Artificial Sequence: Synthetic peptide
  Seed: CSLMQGSTLPRRSGA
CSLMMGSMLVRRMGA

SEQ ID NO: 55355 - protein, 15 aa, Artificial Sequence
  Description of Artificial Sequence: Synthetic peptide
  Seed: CSLMQGSTLPRRSGA
CSLMMGSMLVRRTGA

SEQ ID NO: 55356 - protein, 15 aa, Artificial Sequence
  Description of Artificial Sequence: Synthetic peptide
  Seed: CSLMQGSTLPRRSGA
CSLMMGSMLVRRVGA

SEQ ID NO: 55357 - protein, 15 aa, Artificial Sequence
  Description of Artificial Sequence: Synthetic peptide
  Seed: CSLMQGSTLPRRSGA
CSLMMGSQLARRAGA

SEQ ID NO: 55358 - protein, 15 aa, Artificial Sequence
  Description of Artificial Sequence: Synthetic peptide
  Seed: CSLMQGSTLPRRSGA
CSLMMGSQLARRIGA

SEQ ID NO: 55359 - protein, 15 aa, Artificial Sequence
  Description of Artificial Sequence: Synthetic peptide
  Seed: CSLMQGSTLPRRSGA
CSLMMGSQLARRLGA

SEQ ID NO: 55360 - protein, 15 aa, Artificial Sequence
  Description of Artificial Sequence: Synthetic peptide
  Seed: CSLMQGSTLPRRSGA
CSLMMGSQLARRVGA

SEQ ID NO: 55361 - protein, 15 aa, Artificial Sequence
  Description of Artificial Sequence: Synthetic peptide
  Seed: CSLMQGSTLPRRSGA
CSLMMGSQLGRRIGA

SEQ ID NO: 55362 - protein, 15 aa, Artificial Sequence
  Description of Artificial Sequence: Synthetic peptide
  Seed: CSLMQGSTLPRRSGA
CSLMMGSQLGRRLGA

SEQ ID NO: 55363 - protein, 15 aa, Artificial Sequence
  Description of Artificial Sequence: Synthetic peptide
  Seed: CSLMQGSTLPRRSGA
CSLMMGSQLGRRVGA

SEQ ID NO: 55364 - protein, 15 aa, Artificial Sequence
  Description of Artificial Sequence: Synthetic peptide
  Seed: CSLMQGSTLPRRSGA
CSLMMGSQLSRRIGA

SEQ ID NO: 55365 - protein, 15 aa, Artificial Sequence
  Description of Artificial Sequence: Synthetic peptide
  Seed: CSLMQGSTLPRRSGA
CSLMMGSQLSRRLGA

SEQ ID NO: 55366 - protein, 15 aa, Artificial Sequence
  Description of Artificial Sequence: Synthetic peptide
  Seed: CSLMQGSTLPRRSGA
CSLMMGSQLSRRVGA

SEQ ID NO: 55367 - protein, 15 aa, Artificial Sequence
  Description of Artificial Sequence: Synthetic peptide
  Seed: CSLMQGSTLPRRSGA
CSLMMGSSLARRAGA

SEQ ID NO: 55368 - protein, 15 aa, Artificial Sequence
  Description of Artificial Sequence: Synthetic peptide
  Seed: CSLMQGSTLPRRSGA
CSLMMGSSLARRIGA

SEQ ID NO: 55369 - protein, 15 aa, Artificial Sequence
  Description of Artificial Sequence: Synthetic peptide
  Seed: CSLMQGSTLPRRSGA
CSLMMGSSLARRLGA

SEQ ID NO: 55370 - protein, 15 aa, Artificial Sequence
  Description of Artificial Sequence: Synthetic peptide
  Seed: CSLMQGSTLPRRSGA
CSLMMGSSLARRMGA

SEQ ID NO: 55371 - protein, 15 aa, Artificial Sequence
  Description of Artificial Sequence: Synthetic peptide
  Seed: CSLMQGSTLPRRSGA
CSLMMGSSLARRVGA

SEQ ID NO: 55372 - protein, 15 aa, Artificial Sequence
  Description of Artificial Sequence: Synthetic peptide
  Seed: CSLMQGSTLPRRSGA
CSLMMGSSLSRRVGA

SEQ ID NO: 55373 - protein, 15 aa, Artificial Sequence
  Description of Artificial Sequence: Synthetic peptide
  Seed: CSLMQGSTLPRRSGA
CSLMMGSTLARRIGA

SEQ ID NO: 55374 - protein, 15 aa, Artificial Sequence
  Description of Artificial Sequence: Synthetic peptide
  Seed: CSLMQGSTLPRRSGA
CSLMMGSTLARRLGA

SEQ ID NO: 55375 - protein, 15 aa, Artificial Sequence
  Description of Artificial Sequence: Synthetic peptide
  Seed: CSLMQGSTLPRRSGA
CSLMMGSTLARRVGA

SEQ ID NO: 55376 - protein, 15 aa, Artificial Sequence
  Description of Artificial Sequence: Synthetic peptide
  Seed: CSLMQGSTLPRRSGA
CSLMMGSVLARRAGA

SEQ ID NO: 55377 - protein, 15 aa, Artificial Sequence
  Description of Artificial Sequence: Synthetic peptide
  Seed: CSLMQGSTLPRRSGA
CSLMMGSVLARRIGA

SEQ ID NO: 55378 - protein, 15 aa, Artificial Sequence
  Description of Artificial Sequence: Synthetic peptide
  Seed: CSLMQGSTLPRRSGA
CSLMMGSVLARRLGA

SEQ ID NO: 55379 - protein, 15 aa, Artificial Sequence
  Description of Artificial Sequence: Synthetic peptide
  Seed: CSLMQGSTLPRRSGA
CSLMMGSVLARRMGA

SEQ ID NO: 55380 - protein, 15 aa, Artificial Sequence
  Description of Artificial Sequence: Synthetic peptide
  Seed: CSLMQGSTLPRRSGA
CSLMMGSVLARRTGA

SEQ ID NO: 55381 - protein, 15 aa, Artificial Sequence
  Description of Artificial Sequence: Synthetic peptide
  Seed: CSLMQGSTLPRRSGA
CSLMMGSVLARRVGA

SEQ ID NO: 55382 - protein, 15 aa, Artificial Sequence
  Description of Artificial Sequence: Synthetic peptide
  Seed: CSLMQGSTLPRRSGA
CSLMMGSVLGRRIGA

SEQ ID NO: 55383 - protein, 15 aa, Artificial Sequence
  Description of Artificial Sequence: Synthetic peptide
  Seed: CSLMQGSTLPRRSGA
CSLMMGSVLGRRLGA

SEQ ID NO: 55384 - protein, 15 aa, Artificial Sequence
  Description of Artificial Sequence: Synthetic peptide
  Seed: CSLMQGSTLPRRSGA
CSLMMGSVLGRRVGA

SEQ ID NO: 55385 - protein, 15 aa, Artificial Sequence
  Description of Artificial Sequence: Synthetic peptide
  Seed: CSLMQGSTLPRRSGA
CSLMMGSVLSRRAGA

SEQ ID NO: 55386 - protein, 15 aa, Artificial Sequence
  Description of Artificial Sequence: Synthetic peptide
  Seed: CSLMQGSTLPRRSGA
CSLMMGSVLSRRIGA

SEQ ID NO: 55387 - protein, 15 aa, Artificial Sequence
  Description of Artificial Sequence: Synthetic peptide
  Seed: CSLMQGSTLPRRSGA
CSLMMGSVLSRRLGA

SEQ ID NO: 55388 - protein, 15 aa, Artificial Sequence
  Description of Artificial Sequence: Synthetic peptide
  Seed: CSLMQGSTLPRRSGA
CSLMMGSVLSRRVGA

SEQ ID NO: 55389 - protein, 15 aa, Artificial Sequence
  Description of Artificial Sequence: Synthetic peptide
  Seed: CSLMQGSTLPRRSGA
CSLMPGSALARRAGA

SEQ ID NO: 55390 - protein, 15 aa, Artificial Sequence
  Description of Artificial Sequence: Synthetic peptide
  Seed: CSLMQGSTLPRRSGA
CSLMPGSALARRIGA

SEQ ID NO: 55391 - protein, 15 aa, Artificial Sequence
  Description of Artificial Sequence: Synthetic peptide
  Seed: CSLMQGSTLPRRSGA
CSLMPGSALARRSGA

SEQ ID NO: 55392 - protein, 15 aa, Artificial Sequence
  Description of Artificial Sequence: Synthetic peptide
  Seed: CSLMQGSTLPRRSGA
CSLMPGSALARRTGA

SEQ ID NO: 55393 - protein, 15 aa, Artificial Sequence
  Description of Artificial Sequence: Synthetic peptide
  Seed: CSLMQGSTLPRRSGA
CSLMPGSALARRVGA

SEQ ID NO: 55394 - protein, 15 aa, Artificial Sequence
  Description of Artificial Sequence: Synthetic peptide
  Seed: CSLMQGSTLPRRSGA
CSLMPGSALIRRAGA

SEQ ID NO: 55395 - protein, 15 aa, Artificial Sequence
  Description of Artificial Sequence: Synthetic peptide
  Seed: CSLMQGSTLPRRSGA
CSLMPGSALPRRAGA

SEQ ID NO: 55396 - protein, 15 aa, Artificial Sequence
  Description of Artificial Sequence: Synthetic peptide
  Seed: CSLMQGSTLPRRSGA
CSLMPGSALVRRAGA

SEQ ID NO: 55397 - protein, 15 aa, Artificial Sequence
  Description of Artificial Sequence: Synthetic peptide
  Seed: CSLMQGSTLPRRSGA
CSLMPGSALVRRSGA

SEQ ID NO: 55398 - protein, 15 aa, Artificial Sequence
  Description of Artificial Sequence: Synthetic peptide
  Seed: CSLMQGSTLPRRSGA
CSLMPGSALVRRTGA

SEQ ID NO: 55399 - protein, 15 aa, Artificial Sequence
  Description of Artificial Sequence: Synthetic peptide
  Seed: CSLMQGSTLPRRSGA
CSLMPGSALVRRVGA

SEQ ID NO: 55400 - protein, 15 aa, Artificial Sequence
  Description of Artificial Sequence: Synthetic peptide
  Seed: CSLMQGSTLPRRSGA
CSLMPGSGLARRAGA

SEQ ID NO: 55401 - protein, 15 aa, Artificial Sequence
  Description of Artificial Sequence: Synthetic peptide
  Seed: CSLMQGSTLPRRSGA
CSLMPGSGLARRIGA

SEQ ID NO: 55402 - protein, 15 aa, Artificial Sequence
  Description of Artificial Sequence: Synthetic peptide
  Seed: CSLMQGSTLPRRSGA
CSLMPGSGLARRSGA

SEQ ID NO: 55403 - protein, 15 aa, Artificial Sequence
  Description of Artificial Sequence: Synthetic peptide
  Seed: CSLMQGSTLPRRSGA
CSLMPGSGLARRTGA

SEQ ID NO: 55404 - protein, 15 aa, Artificial Sequence
  Description of Artificial Sequence: Synthetic peptide
  Seed: CSLMQGSTLPRRSGA
CSLMPGSGLARRVGA

SEQ ID NO: 55405 - protein, 15 aa, Artificial Sequence
  Description of Artificial Sequence: Synthetic peptide
  Seed: CSLMQGSTLPRRSGA
CSLMPGSGLIRRAGA

SEQ ID NO: 55406 - protein, 15 aa, Artificial Sequence
  Description of Artificial Sequence: Synthetic peptide
  Seed: CSLMQGSTLPRRSGA
CSLMPGSGLIRRVGA

SEQ ID NO: 55407 - protein, 15 aa, Artificial Sequence
  Description of Artificial Sequence: Synthetic peptide
  Seed: CSLMQGSTLPRRSGA
CSLMPGSGLVRRAGA

SEQ ID NO: 55408 - protein, 15 aa, Artificial Sequence
  Description of Artificial Sequence: Synthetic peptide
  Seed: CSLMQGSTLPRRSGA
CSLMPGSGLVRRIGA

SEQ ID NO: 55409 - protein, 15 aa, Artificial Sequence
  Description of Artificial Sequence: Synthetic peptide
  Seed: CSLMQGSTLPRRSGA
CSLMPGSGLVRRSGA

SEQ ID NO: 55410 - protein, 15 aa, Artificial Sequence
  Description of Artificial Sequence: Synthetic peptide
  Seed: CSLMQGSTLPRRSGA
CSLMPGSGLVRRTGA

SEQ ID NO: 55411 - protein, 15 aa, Artificial Sequence
  Description of Artificial Sequence: Synthetic peptide
  Seed: CSLMQGSTLPRRSGA
CSLMPGSGLVRRVGA

SEQ ID NO: 55412 - protein, 15 aa, Artificial Sequence
  Description of Artificial Sequence: Synthetic peptide
  Seed: CSLMQGSTLPRRSGA
CSLMPGSSLARRAGA

SEQ ID NO: 55413 - protein, 15 aa, Artificial Sequence
  Description of Artificial Sequence: Synthetic peptide
  Seed: CSLMQGSTLPRRSGA
CSLMTGSALARRAGA

SEQ ID NO: 55414 - protein, 15 aa, Artificial Sequence
  Description of Artificial Sequence: Synthetic peptide
  Seed: CSLMQGSTLPRRSGA
CSLMTGSALARRIGA

SEQ ID NO: 55415 - protein, 15 aa, Artificial Sequence
  Description of Artificial Sequence: Synthetic peptide
  Seed: CSLMQGSTLPRRSGA
CSLMTGSALARRTGA

SEQ ID NO: 55416 - protein, 15 aa, Artificial Sequence
  Description of Artificial Sequence: Synthetic peptide
  Seed: CSLMQGSTLPRRSGA
CSLMTGSALARRVGA

SEQ ID NO: 55417 - protein, 15 aa, Artificial Sequence
  Description of Artificial Sequence: Synthetic peptide
  Seed: CSLMQGSTLPRRSGA
CSLMTGSGLARRAGA

SEQ ID NO: 55418 - protein, 15 aa, Artificial Sequence
  Description of Artificial Sequence: Synthetic peptide
  Seed: CSLMQGSTLPRRSGA
CSLMTGSGLARRIGA

SEQ ID NO: 55419 - protein, 15 aa, Artificial Sequence
  Description of Artificial Sequence: Synthetic peptide
  Seed: CSLMQGSTLPRRSGA
CSLMTGSGLARRVGA

SEQ ID NO: 55420 - protein, 15 aa, Artificial Sequence
  Description of Artificial Sequence: Synthetic peptide
  Seed: CSLMQGSTLPRRSGA
CSLMVGSALARRAGA

SEQ ID NO: 55421 - protein, 15 aa, Artificial Sequence
  Description of Artificial Sequence: Synthetic peptide
  Seed: CSLMQGSTLPRRSGA
CSLMVGSALARRGGA

SEQ ID NO: 55422 - protein, 15 aa, Artificial Sequence
  Description of Artificial Sequence: Synthetic peptide
  Seed: CSLMQGSTLPRRSGA
CSLMVGSALARRIGA

SEQ ID NO: 55423 - protein, 15 aa, Artificial Sequence
  Description of Artificial Sequence: Synthetic peptide
  Seed: CSLMQGSTLPRRSGA
CSLMVGSALARRLGA

SEQ ID NO: 55424 - protein, 15 aa, Artificial Sequence
  Description of Artificial Sequence: Synthetic peptide
  Seed: CSLMQGSTLPRRSGA
CSLMVGSALARRMGA

SEQ ID NO: 55425 - protein, 15 aa, Artificial Sequence
  Description of Artificial Sequence: Synthetic peptide
  Seed: CSLMQGSTLPRRSGA
CSLMVGSALARRSGA

SEQ ID NO: 55426 - protein, 15 aa, Artificial Sequence
  Description of Artificial Sequence: Synthetic peptide
  Seed: CSLMQGSTLPRRSGA
CSLMVGSALARRTGA

SEQ ID NO: 55427 - protein, 15 aa, Artificial Sequence
  Description of Artificial Sequence: Synthetic peptide
  Seed: CSLMQGSTLPRRSGA
CSLMVGSALARRVGA

SEQ ID NO: 55428 - protein, 15 aa, Artificial Sequence
  Description of Artificial Sequence: Synthetic peptide
  Seed: CSLMQGSTLPRRSGA
CSLMVGSALGRRIGA

SEQ ID NO: 55429 - protein, 15 aa, Artificial Sequence
  Description of Artificial Sequence: Synthetic peptide
  Seed: CSLMQGSTLPRRSGA
CSLMVGSALGRRLGA

SEQ ID NO: 55430 - protein, 15 aa, Artificial Sequence
  Description of Artificial Sequence: Synthetic peptide
  Seed: CSLMQGSTLPRRSGA
CSLMVGSALGRRVGA

SEQ ID NO: 55431 - protein, 15 aa, Artificial Sequence
  Description of Artificial Sequence: Synthetic peptide
  Seed: CSLMQGSTLPRRSGA
CSLMVGSALIRRAGA

SEQ ID NO: 55432 - protein, 15 aa, Artificial Sequence
  Description of Artificial Sequence: Synthetic peptide
  Seed: CSLMQGSTLPRRSGA
CSLMVGSALPRRAGA

SEQ ID NO: 55433 - protein, 15 aa, Artificial Sequence
  Description of Artificial Sequence: Synthetic peptide
  Seed: CSLMQGSTLPRRSGA
CSLMVGSALPRRIGA

SEQ ID NO: 55434 - protein, 15 aa, Artificial Sequence
  Description of Artificial Sequence: Synthetic peptide
  Seed: CSLMQGSTLPRRSGA
CSLMVGSALPRRVGA

SEQ ID NO: 55435 - protein, 15 aa, Artificial Sequence
  Description of Artificial Sequence: Synthetic peptide
  Seed: CSLMQGSTLPRRSGA
CSLMVGSALSRRIGA

SEQ ID NO: 55436 - protein, 15 aa, Artificial Sequence
  Description of Artificial Sequence: Synthetic peptide
  Seed: CSLMQGSTLPRRSGA
CSLMVGSALSRRLGA

SEQ ID NO: 55437 - protein, 15 aa, Artificial Sequence
  Description of Artificial Sequence: Synthetic peptide
  Seed: CSLMQGSTLPRRSGA
CSLMVGSALSRRVGA

SEQ ID NO: 55438 - protein, 15 aa, Artificial Sequence
  Description of Artificial Sequence: Synthetic peptide
  Seed: CSLMQGSTLPRRSGA
CSLMVGSALVRRAGA

SEQ ID NO: 55439 - protein, 15 aa, Artificial Sequence
  Description of Artificial Sequence: Synthetic peptide
  Seed: CSLMQGSTLPRRSGA
CSLMVGSALVRRIGA

SEQ ID NO: 55440 - protein, 15 aa, Artificial Sequence
  Description of Artificial Sequence: Synthetic peptide
  Seed: CSLMQGSTLPRRSGA
CSLMVGSALVRRSGA

SEQ ID NO: 55441 - protein, 15 aa, Artificial Sequence
  Description of Artificial Sequence: Synthetic peptide
  Seed: CSLMQGSTLPRRSGA
CSLMVGSALVRRTGA

SEQ ID NO: 55442 - protein, 15 aa, Artificial Sequence
  Description of Artificial Sequence: Synthetic peptide
  Seed: CSLMQGSTLPRRSGA
CSLMVGSALVRRVGA

SEQ ID NO: 55443 - protein, 15 aa, Artificial Sequence
  Description of Artificial Sequence: Synthetic peptide
  Seed: CSLMQGSTLPRRSGA
CSLMVGSGLARRAGA

SEQ ID NO: 55444 - protein, 15 aa, Artificial Sequence
  Description of Artificial Sequence: Synthetic peptide
  Seed: CSLMQGSTLPRRSGA
CSLMVGSGLARRIGA

SEQ ID NO: 55445 - protein, 15 aa, Artificial Sequence
  Description of Artificial Sequence: Synthetic peptide
  Seed: CSLMQGSTLPRRSGA
CSLMVGSGLARRLGA

SEQ ID NO: 55446 - protein, 15 aa, Artificial Sequence
  Description of Artificial Sequence: Synthetic peptide
  Seed: CSLMQGSTLPRRSGA
CSLMVGSGLARRMGA

SEQ ID NO: 55447 - protein, 15 aa, Artificial Sequence
  Description of Artificial Sequence: Synthetic peptide
  Seed: CSLMQGSTLPRRSGA
CSLMVGSGLARRSGA

SEQ ID NO: 55448 - protein, 15 aa, Artificial Sequence
  Description of Artificial Sequence: Synthetic peptide
  Seed: CSLMQGSTLPRRSGA
CSLMVGSGLARRTGA

SEQ ID NO: 55449 - protein, 15 aa, Artificial Sequence
  Description of Artificial Sequence: Synthetic peptide
  Seed: CSLMQGSTLPRRSGA
CSLMVGSGLARRVGA

SEQ ID NO: 55450 - protein, 15 aa, Artificial Sequence
  Description of Artificial Sequence: Synthetic peptide
  Seed: CSLMQGSTLPRRSGA
CSLMVGSGLIRRAGA

SEQ ID NO: 55451 - protein, 15 aa, Artificial Sequence
  Description of Artificial Sequence: Synthetic peptide
  Seed: CSLMQGSTLPRRSGA
CSLMVGSGLIRRVGA

SEQ ID NO: 55452 - protein, 15 aa, Artificial Sequence
  Description of Artificial Sequence: Synthetic peptide
  Seed: CSLMQGSTLPRRSGA
CSLMVGSGLPRRAGA

SEQ ID NO: 55453 - protein, 15 aa, Artificial Sequence
  Description of Artificial Sequence: Synthetic peptide
  Seed: CSLMQGSTLPRRSGA
CSLMVGSGLPRRIGA

SEQ ID NO: 55454 - protein, 15 aa, Artificial Sequence
  Description of Artificial Sequence: Synthetic peptide
  Seed: CSLMQGSTLPRRSGA
CSLMVGSGLPRRVGA

SEQ ID NO: 55455 - protein, 15 aa, Artificial Sequence
  Description of Artificial Sequence: Synthetic peptide
  Seed: CSLMQGSTLPRRSGA
CSLMVGSGLVRRAGA

SEQ ID NO: 55456 - protein, 15 aa, Artificial Sequence
  Description of Artificial Sequence: Synthetic peptide
  Seed: CSLMQGSTLPRRSGA
CSLMVGSGLVRRIGA

SEQ ID NO: 55457 - protein, 15 aa, Artificial Sequence
  Description of Artificial Sequence: Synthetic peptide
  Seed: CSLMQGSTLPRRSGA
CSLMVGSGLVRRSGA

SEQ ID NO: 55458 - protein, 15 aa, Artificial Sequence
  Description of Artificial Sequence: Synthetic peptide
  Seed: CSLMQGSTLPRRSGA
CSLMVGSGLVRRTGA

SEQ ID NO: 55459 - protein, 15 aa, Artificial Sequence
  Description of Artificial Sequence: Synthetic peptide
  Seed: CSLMQGSTLPRRSGA
CSLMVGSGLVRRVGA

SEQ ID NO: 55460 - protein, 15 aa, Artificial Sequence
  Description of Artificial Sequence: Synthetic peptide
  Seed: CSLMQGSTLPRRSGA
CSLMVGSILARRAGA

SEQ ID NO: 55461 - protein, 15 aa, Artificial Sequence
  Description of Artificial Sequence: Synthetic peptide
  Seed: CSLMQGSTLPRRSGA
CSLMVGSILARRIGA

SEQ ID NO: 55462 - protein, 15 aa, Artificial Sequence
  Description of Artificial Sequence: Synthetic peptide
  Seed: CSLMQGSTLPRRSGA
CSLMVGSILARRLGA

SEQ ID NO: 55463 - protein, 15 aa, Artificial Sequence
  Description of Artificial Sequence: Synthetic peptide
  Seed: CSLMQGSTLPRRSGA
CSLMVGSILARRMGA

SEQ ID NO: 55464 - protein, 15 aa, Artificial Sequence
  Description of Artificial Sequence: Synthetic peptide
  Seed: CSLMQGSTLPRRSGA
CSLMVGSILARRVGA

SEQ ID NO: 55465 - protein, 15 aa, Artificial Sequence
  Description of Artificial Sequence: Synthetic peptide
  Seed: CSLMQGSTLPRRSGA
CSLMVGSILGRRAGA

SEQ ID NO: 55466 - protein, 15 aa, Artificial Sequence
  Description of Artificial Sequence: Synthetic peptide
  Seed: CSLMQGSTLPRRSGA
CSLMVGSILGRRIGA

SEQ ID NO: 55467 - protein, 15 aa, Artificial Sequence
  Description of Artificial Sequence: Synthetic peptide
  Seed: CSLMQGSTLPRRSGA
CSLMVGSILGRRLGA

SEQ ID NO: 55468 - protein, 15 aa, Artificial Sequence
  Description of Artificial Sequence: Synthetic peptide
  Seed: CSLMQGSTLPRRSGA
CSLMVGSILGRRVGA

SEQ ID NO: 55469 - protein, 15 aa, Artificial Sequence
  Description of Artificial Sequence: Synthetic peptide
  Seed: CSLMQGSTLPRRSGA
CSLMVGSILPRRIGA

SEQ ID NO: 55470 - protein, 15 aa, Artificial Sequence
  Description of Artificial Sequence: Synthetic peptide
  Seed: CSLMQGSTLPRRSGA
CSLMVGSILPRRVGA

SEQ ID NO: 55471 - protein, 15 aa, Artificial Sequence
  Description of Artificial Sequence: Synthetic peptide
  Seed: CSLMQGSTLPRRSGA
CSLMVGSILSRRAGA

SEQ ID NO: 55472 - protein, 15 aa, Artificial Sequence
  Description of Artificial Sequence: Synthetic peptide
  Seed: CSLMQGSTLPRRSGA
CSLMVGSILSRRIGA

SEQ ID NO: 55473 - protein, 15 aa, Artificial Sequence
  Description of Artificial Sequence: Synthetic peptide
  Seed: CSLMQGSTLPRRSGA
CSLMVGSILSRRLGA

SEQ ID NO: 55474 - protein, 15 aa, Artificial Sequence
  Description of Artificial Sequence: Synthetic peptide
  Seed: CSLMQGSTLPRRSGA
CSLMVGSILSRRVGA

SEQ ID NO: 55475 - protein, 15 aa, Artificial Sequence
  Description of Artificial Sequence: Synthetic peptide
  Seed: CSLMQGSTLPRRSGA
CSLMVGSLLARRAGA

SEQ ID NO: 55476 - protein, 15 aa, Artificial Sequence
  Description of Artificial Sequence: Synthetic peptide
  Seed: CSLMQGSTLPRRSGA
CSLMVGSLLARRFGA

SEQ ID NO: 55477 - protein, 15 aa, Artificial Sequence
  Description of Artificial Sequence: Synthetic peptide
  Seed: CSLMQGSTLPRRSGA
CSLMVGSLLARRIGA

SEQ ID NO: 55478 - protein, 15 aa, Artificial Sequence
  Description of Artificial Sequence: Synthetic peptide
  Seed: CSLMQGSTLPRRSGA
CSLMVGSLLARRLGA

SEQ ID NO: 55479 - protein, 15 aa, Artificial Sequence
  Description of Artificial Sequence: Synthetic peptide
  Seed: CSLMQGSTLPRRSGA
CSLMVGSLLARRMGA

SEQ ID NO: 55480 - protein, 15 aa, Artificial Sequence
  Description of Artificial Sequence: Synthetic peptide
  Seed: CSLMQGSTLPRRSGA
CSLMVGSLLARRSGA

SEQ ID NO: 55481 - protein, 15 aa, Artificial Sequence
  Description of Artificial Sequence: Synthetic peptide
  Seed: CSLMQGSTLPRRSGA
CSLMVGSLLARRTGA

SEQ ID NO: 55482 - protein, 15 aa, Artificial Sequence
  Description of Artificial Sequence: Synthetic peptide
  Seed: CSLMQGSTLPRRSGA
CSLMVGSLLARRVGA

SEQ ID NO: 55483 - protein, 15 aa, Artificial Sequence
  Description of Artificial Sequence: Synthetic peptide
  Seed: CSLMQGSTLPRRSGA
CSLMVGSLLGRRAGA

SEQ ID NO: 55484 - protein, 15 aa, Artificial Sequence
  Description of Artificial Sequence: Synthetic peptide
  Seed: CSLMQGSTLPRRSGA
CSLMVGSLLGRRIGA

SEQ ID NO: 55485 - protein, 15 aa, Artificial Sequence
  Description of Artificial Sequence: Synthetic peptide
  Seed: CSLMQGSTLPRRSGA
CSLMVGSLLGRRLGA

SEQ ID NO: 55486 - protein, 15 aa, Artificial Sequence
  Description of Artificial Sequence: Synthetic peptide
  Seed: CSLMQGSTLPRRSGA
CSLMVGSLLGRRMGA

SEQ ID NO: 55487 - protein, 15 aa, Artificial Sequence
  Description of Artificial Sequence: Synthetic peptide
  Seed: CSLMQGSTLPRRSGA
CSLMVGSLLGRRSGA

SEQ ID NO: 55488 - protein, 15 aa, Artificial Sequence
  Description of Artificial Sequence: Synthetic peptide
  Seed: CSLMQGSTLPRRSGA
CSLMVGSLLGRRTGA

SEQ ID NO: 55489 - protein, 15 aa, Artificial Sequence
  Description of Artificial Sequence: Synthetic peptide
  Seed: CSLMQGSTLPRRSGA
CSLMVGSLLGRRVGA

SEQ ID NO: 55490 - protein, 15 aa, Artificial Sequence
  Description of Artificial Sequence: Synthetic peptide
  Seed: CSLMQGSTLPRRSGA
CSLMVGSLLNRRIGA

SEQ ID NO: 55491 - protein, 15 aa, Artificial Sequence
  Description of Artificial Sequence: Synthetic peptide
  Seed: CSLMQGSTLPRRSGA
CSLMVGSLLNRRLGA

SEQ ID NO: 55492 - protein, 15 aa, Artificial Sequence
  Description of Artificial Sequence: Synthetic peptide
  Seed: CSLMQGSTLPRRSGA
CSLMVGSLLNRRVGA

SEQ ID NO: 55493 - protein, 15 aa, Artificial Sequence
  Description of Artificial Sequence: Synthetic peptide
  Seed: CSLMQGSTLPRRSGA
CSLMVGSLLPRRAGA

SEQ ID NO: 55494 - protein, 15 aa, Artificial Sequence
  Description of Artificial Sequence: Synthetic peptide
  Seed: CSLMQGSTLPRRSGA
CSLMVGSLLPRRIGA

SEQ ID NO: 55495 - protein, 15 aa, Artificial Sequence
  Description of Artificial Sequence: Synthetic peptide
  Seed: CSLMQGSTLPRRSGA
CSLMVGSLLPRRLGA

SEQ ID NO: 55496 - protein, 15 aa, Artificial Sequence
  Description of Artificial Sequence: Synthetic peptide
  Seed: CSLMQGSTLPRRSGA
CSLMVGSLLPRRVGA

SEQ ID NO: 55497 - protein, 15 aa, Artificial Sequence
  Description of Artificial Sequence: Synthetic peptide
  Seed: CSLMQGSTLPRRSGA
CSLMVGSLLSRRAGA

SEQ ID NO: 55498 - protein, 15 aa, Artificial Sequence
  Description of Artificial Sequence: Synthetic peptide
  Seed: CSLMQGSTLPRRSGA
CSLMVGSLLSRRIGA

SEQ ID NO: 55499 - protein, 15 aa, Artificial Sequence
  Description of Artificial Sequence: Synthetic peptide
  Seed: CSLMQGSTLPRRSGA
CSLMVGSLLSRRLGA

SEQ ID NO: 55500 - protein, 15 aa, Artificial Sequence
  Description of Artificial Sequence: Synthetic peptide
  Seed: CSLMQGSTLPRRSGA
CSLMVGSLLSRRMGA

SEQ ID NO: 55501 - protein, 15 aa, Artificial Sequence
  Description of Artificial Sequence: Synthetic peptide
  Seed: CSLMQGSTLPRRSGA
CSLMVGSLLSRRSGA

SEQ ID NO: 55502 - protein, 15 aa, Artificial Sequence
  Description of Artificial Sequence: Synthetic peptide
  Seed: CSLMQGSTLPRRSGA
CSLMVGSLLSRRTGA

SEQ ID NO: 55503 - protein, 15 aa, Artificial Sequence
  Description of Artificial Sequence: Synthetic peptide
  Seed: CSLMQGSTLPRRSGA
CSLMVGSLLSRRVGA

SEQ ID NO: 55504 - protein, 15 aa, Artificial Sequence
  Description of Artificial Sequence: Synthetic peptide
  Seed: CSLMQGSTLPRRSGA
CSLMVGSLLTRRIGA

SEQ ID NO: 55505 - protein, 15 aa, Artificial Sequence
  Description of Artificial Sequence: Synthetic peptide
  Seed: CSLMQGSTLPRRSGA
CSLMVGSLLTRRLGA

SEQ ID NO: 55506 - protein, 15 aa, Artificial Sequence
  Description of Artificial Sequence: Synthetic peptide
  Seed: CSLMQGSTLPRRSGA
CSLMVGSLLTRRVGA

SEQ ID NO: 55507 - protein, 15 aa, Artificial Sequence
  Description of Artificial Sequence: Synthetic peptide
  Seed: CSLMQGSTLPRRSGA
CSLMVGSLLVRRIGA

SEQ ID NO: 55508 - protein, 15 aa, Artificial Sequence
  Description of Artificial Sequence: Synthetic peptide
  Seed: CSLMQGSTLPRRSGA
CSLMVGSLLVRRVGA

SEQ ID NO: 55509 - protein, 15 aa, Artificial Sequence
  Description of Artificial Sequence: Synthetic peptide
  Seed: CSLMQGSTLPRRSGA
CSLMVGSMLARRAGA

SEQ ID NO: 55510 - protein, 15 aa, Artificial Sequence
  Description of Artificial Sequence: Synthetic peptide
  Seed: CSLMQGSTLPRRSGA
CSLMVGSMLARRFGA

SEQ ID NO: 55511 - protein, 15 aa, Artificial Sequence
  Description of Artificial Sequence: Synthetic peptide
  Seed: CSLMQGSTLPRRSGA
CSLMVGSMLARRIGA

SEQ ID NO: 55512 - protein, 15 aa, Artificial Sequence
  Description of Artificial Sequence: Synthetic peptide
  Seed: CSLMQGSTLPRRSGA
CSLMVGSMLARRLGA

SEQ ID NO: 55513 - protein, 15 aa, Artificial Sequence
  Description of Artificial Sequence: Synthetic peptide
  Seed: CSLMQGSTLPRRSGA
CSLMVGSMLARRMGA

SEQ ID NO: 55514 - protein, 15 aa, Artificial Sequence
  Description of Artificial Sequence: Synthetic peptide
  Seed: CSLMQGSTLPRRSGA
CSLMVGSMLARRSGA

SEQ ID NO: 55515 - protein, 15 aa, Artificial Sequence
  Description of Artificial Sequence: Synthetic peptide
  Seed: CSLMQGSTLPRRSGA
CSLMVGSMLARRTGA

SEQ ID NO: 55516 - protein, 15 aa, Artificial Sequence
  Description of Artificial Sequence: Synthetic peptide
  Seed: CSLMQGSTLPRRSGA
CSLMVGSMLARRVGA

SEQ ID NO: 55517 - protein, 15 aa, Artificial Sequence
  Description of Artificial Sequence: Synthetic peptide
  Seed: CSLMQGSTLPRRSGA
CSLMVGSMLGRRAGA

SEQ ID NO: 55518 - protein, 15 aa, Artificial Sequence
  Description of Artificial Sequence: Synthetic peptide
  Seed: CSLMQGSTLPRRSGA
CSLMVGSMLGRRIGA

SEQ ID NO: 55519 - protein, 15 aa, Artificial Sequence
  Description of Artificial Sequence: Synthetic peptide
  Seed: CSLMQGSTLPRRSGA
CSLMVGSMLGRRLGA

SEQ ID NO: 55520 - protein, 15 aa, Artificial Sequence
  Description of Artificial Sequence: Synthetic peptide
  Seed: CSLMQGSTLPRRSGA
CSLMVGSMLGRRMGA

SEQ ID NO: 55521 - protein, 15 aa, Artificial Sequence
  Description of Artificial Sequence: Synthetic peptide
  Seed: CSLMQGSTLPRRSGA
CSLMVGSMLGRRTGA

SEQ ID NO: 55522 - protein, 15 aa, Artificial Sequence
  Description of Artificial Sequence: Synthetic peptide
  Seed: CSLMQGSTLPRRSGA
CSLMVGSMLGRRVGA

SEQ ID NO: 55523 - protein, 15 aa, Artificial Sequence
  Description of Artificial Sequence: Synthetic peptide
  Seed: CSLMQGSTLPRRSGA
CSLMVGSMLNRRIGA

SEQ ID NO: 55524 - protein, 15 aa, Artificial Sequence
  Description of Artificial Sequence: Synthetic peptide
  Seed: CSLMQGSTLPRRSGA
CSLMVGSMLNRRLGA

SEQ ID NO: 55525 - protein, 15 aa, Artificial Sequence
  Description of Artificial Sequence: Synthetic peptide
  Seed: CSLMQGSTLPRRSGA
CSLMVGSMLNRRVGA

SEQ ID NO: 55526 - protein, 15 aa, Artificial Sequence
  Description of Artificial Sequence: Synthetic peptide
  Seed: CSLMQGSTLPRRSGA
CSLMVGSMLPRRAGA

SEQ ID NO: 55527 - protein, 15 aa, Artificial Sequence
  Description of Artificial Sequence: Synthetic peptide
  Seed: CSLMQGSTLPRRSGA
CSLMVGSMLPRRIGA

SEQ ID NO: 55528 - protein, 15 aa, Artificial Sequence
  Description of Artificial Sequence: Synthetic peptide
  Seed: CSLMQGSTLPRRSGA
CSLMVGSMLPRRLGA

SEQ ID NO: 55529 - protein, 15 aa, Artificial Sequence
  Description of Artificial Sequence: Synthetic peptide
  Seed: CSLMQGSTLPRRSGA
CSLMVGSMLPRRVGA

SEQ ID NO: 55530 - protein, 15 aa, Artificial Sequence
  Description of Artificial Sequence: Synthetic peptide
  Seed: CSLMQGSTLPRRSGA
CSLMVGSMLSRRAGA

SEQ ID NO: 55531 - protein, 15 aa, Artificial Sequence
  Description of Artificial Sequence: Synthetic peptide
  Seed: CSLMQGSTLPRRSGA
CSLMVGSMLSRRIGA

SEQ ID NO: 55532 - protein, 15 aa, Artificial Sequence
  Description of Artificial Sequence: Synthetic peptide
  Seed: CSLMQGSTLPRRSGA
CSLMVGSMLSRRLGA

SEQ ID NO: 55533 - protein, 15 aa, Artificial Sequence
  Description of Artificial Sequence: Synthetic peptide
  Seed: CSLMQGSTLPRRSGA
CSLMVGSMLSRRMGA

SEQ ID NO: 55534 - protein, 15 aa, Artificial Sequence
  Description of Artificial Sequence: Synthetic peptide
  Seed: CSLMQGSTLPRRSGA
CSLMVGSMLSRRSGA

SEQ ID NO: 55535 - protein, 15 aa, Artificial Sequence
  Description of Artificial Sequence: Synthetic peptide
  Seed: CSLMQGSTLPRRSGA
CSLMVGSMLSRRTGA

SEQ ID NO: 55536 - protein, 15 aa, Artificial Sequence
  Description of Artificial Sequence: Synthetic peptide
  Seed: CSLMQGSTLPRRSGA
CSLMVGSMLSRRVGA

SEQ ID NO: 55537 - protein, 15 aa, Artificial Sequence
  Description of Artificial Sequence: Synthetic peptide
  Seed: CSLMQGSTLPRRSGA
CSLMVGSMLTRRIGA

SEQ ID NO: 55538 - protein, 15 aa, Artificial Sequence
  Description of Artificial Sequence: Synthetic peptide
  Seed: CSLMQGSTLPRRSGA
CSLMVGSMLTRRLGA

SEQ ID NO: 55539 - protein, 15 aa, Artificial Sequence
  Description of Artificial Sequence: Synthetic peptide
  Seed: CSLMQGSTLPRRSGA
CSLMVGSMLTRRVGA

SEQ ID NO: 55540 - protein, 15 aa, Artificial Sequence
  Description of Artificial Sequence: Synthetic peptide
  Seed: CSLMQGSTLPRRSGA
CSLMVGSMLVRRIGA

SEQ ID NO: 55541 - protein, 15 aa, Artificial Sequence
  Description of Artificial Sequence: Synthetic peptide
  Seed: CSLMQGSTLPRRSGA
CSLMVGSMLVRRLGA

SEQ ID NO: 55542 - protein, 15 aa, Artificial Sequence
  Description of Artificial Sequence: Synthetic peptide
  Seed: CSLMQGSTLPRRSGA
CSLMVGSMLVRRVGA

SEQ ID NO: 55543 - protein, 15 aa, Artificial Sequence
  Description of Artificial Sequence: Synthetic peptide
  Seed: CSLMQGSTLPRRSGA
CSLMVGSQLARRIGA

SEQ ID NO: 55544 - protein, 15 aa, Artificial Sequence
  Description of Artificial Sequence: Synthetic peptide
  Seed: CSLMQGSTLPRRSGA
CSLMVGSQLARRLGA

SEQ ID NO: 55545 - protein, 15 aa, Artificial Sequence
  Description of Artificial Sequence: Synthetic peptide
  Seed: CSLMQGSTLPRRSGA
CSLMVGSQLARRVGA

SEQ ID NO: 55546 - protein, 15 aa, Artificial Sequence
  Description of Artificial Sequence: Synthetic peptide
  Seed: CSLMQGSTLPRRSGA
CSLMVGSQLGRRIGA

SEQ ID NO: 55547 - protein, 15 aa, Artificial Sequence
  Description of Artificial Sequence: Synthetic peptide
  Seed: CSLMQGSTLPRRSGA
CSLMVGSQLGRRLGA

SEQ ID NO: 55548 - protein, 15 aa, Artificial Sequence
  Description of Artificial Sequence: Synthetic peptide
  Seed: CSLMQGSTLPRRSGA
CSLMVGSQLGRRVGA

SEQ ID NO: 55549 - protein, 15 aa, Artificial Sequence
  Description of Artificial Sequence: Synthetic peptide
  Seed: CSLMQGSTLPRRSGA
CSLMVGSQLSRRLGA

SEQ ID NO: 55550 - protein, 15 aa, Artificial Sequence
  Description of Artificial Sequence: Synthetic peptide
  Seed: CSLMQGSTLPRRSGA
CSLMVGSQLSRRVGA

SEQ ID NO: 55551 - protein, 15 aa, Artificial Sequence
  Description of Artificial Sequence: Synthetic peptide
  Seed: CSLMQGSTLPRRSGA
CSLMVGSSLARRAGA

SEQ ID NO: 55552 - protein, 15 aa, Artificial Sequence
  Description of Artificial Sequence: Synthetic peptide
  Seed: CSLMQGSTLPRRSGA
CSLMVGSSLARRIGA

SEQ ID NO: 55553 - protein, 15 aa, Artificial Sequence
  Description of Artificial Sequence: Synthetic peptide
  Seed: CSLMQGSTLPRRSGA
CSLMVGSSLARRLGA

SEQ ID NO: 55554 - protein, 15 aa, Artificial Sequence
  Description of Artificial Sequence: Synthetic peptide
  Seed: CSLMQGSTLPRRSGA
CSLMVGSSLARRSGA

SEQ ID NO: 55555 - protein, 15 aa, Artificial Sequence
  Description of Artificial Sequence: Synthetic peptide
  Seed: CSLMQGSTLPRRSGA
CSLMVGSSLARRTGA

SEQ ID NO: 55556 - protein, 15 aa, Artificial Sequence
  Description of Artificial Sequence: Synthetic peptide
  Seed: CSLMQGSTLPRRSGA
CSLMVGSSLARRVGA

SEQ ID NO: 55557 - protein, 15 aa, Artificial Sequence
  Description of Artificial Sequence: Synthetic peptide
  Seed: CSLMQGSTLPRRSGA
CSLMVGSVLARRAGA

SEQ ID NO: 55558 - protein, 15 aa, Artificial Sequence
  Description of Artificial Sequence: Synthetic peptide
  Seed: CSLMQGSTLPRRSGA
CSLMVGSVLARRIGA

SEQ ID NO: 55559 - protein, 15 aa, Artificial Sequence
  Description of Artificial Sequence: Synthetic peptide
  Seed: CSLMQGSTLPRRSGA
CSLMVGSVLARRLGA

SEQ ID NO: 55560 - protein, 15 aa, Artificial Sequence
  Description of Artificial Sequence: Synthetic peptide
  Seed: CSLMQGSTLPRRSGA
CSLMVGSVLARRVGA

SEQ ID NO: 55561 - protein, 15 aa, Artificial Sequence
  Description of Artificial Sequence: Synthetic peptide
  Seed: CSLMQGSTLPRRSGA
CSLMVGSVLGRRIGA

SEQ ID NO: 55562 - protein, 15 aa, Artificial Sequence
  Description of Artificial Sequence: Synthetic peptide
  Seed: CSLMQGSTLPRRSGA
CSLMVGSVLGRRLGA

SEQ ID NO: 55563 - protein, 15 aa, Artificial Sequence
  Description of Artificial Sequence: Synthetic peptide
  Seed: CSLMQGSTLPRRSGA
CSLMVGSVLGRRVGA

SEQ ID NO: 55564 - protein, 15 aa, Artificial Sequence
  Description of Artificial Sequence: Synthetic peptide
  Seed: CSLMQGSTLPRRSGA
CSLMVGSVLSRRIGA

SEQ ID NO: 55565 - protein, 15 aa, Artificial Sequence
  Description of Artificial Sequence: Synthetic peptide
  Seed: CSLMQGSTLPRRSGA
CSLMVGSVLSRRLGA

SEQ ID NO: 55566 - protein, 15 aa, Artificial Sequence
  Description of Artificial Sequence: Synthetic peptide
  Seed: CSLMQGSTLPRRSGA
CSLMVGSVLSRRVGA

SEQ ID NO: 55567 - protein, 15 aa, Artificial Sequence
  Description of Artificial Sequence: Synthetic peptide
  Seed: CSLMQGSTLPRRSGA
CSLMWGSALARRAGA

SEQ ID NO: 55568 - protein, 15 aa, Artificial Sequence
  Description of Artificial Sequence: Synthetic peptide
  Seed: CSLMQGSTLPRRSGA
CSLMWGSALARRFGA

SEQ ID NO: 55569 - protein, 15 aa, Artificial Sequence
  Description of Artificial Sequence: Synthetic peptide
  Seed: CSLMQGSTLPRRSGA
CSLMWGSALARRIGA

SEQ ID NO: 55570 - protein, 15 aa, Artificial Sequence
  Description of Artificial Sequence: Synthetic peptide
  Seed: CSLMQGSTLPRRSGA
CSLMWGSALARRLGA

SEQ ID NO: 55571 - protein, 15 aa, Artificial Sequence
  Description of Artificial Sequence: Synthetic peptide
  Seed: CSLMQGSTLPRRSGA
CSLMWGSALARRMGA

SEQ ID NO: 55572 - protein, 15 aa, Artificial Sequence
  Description of Artificial Sequence: Synthetic peptide
  Seed: CSLMQGSTLPRRSGA
CSLMWGSALARRSGA

SEQ ID NO: 55573 - protein, 15 aa, Artificial Sequence
  Description of Artificial Sequence: Synthetic peptide
  Seed: CSLMQGSTLPRRSGA
CSLMWGSALARRTGA

SEQ ID NO: 55574 - protein, 15 aa, Artificial Sequence
  Description of Artificial Sequence: Synthetic peptide
  Seed: CSLMQGSTLPRRSGA
CSLMWGSALARRVGA

SEQ ID NO: 55575 - protein, 15 aa, Artificial Sequence
  Description of Artificial Sequence: Synthetic peptide
  Seed: CSLMQGSTLPRRSGA
CSLMWGSALGRRAGA

SEQ ID NO: 55576 - protein, 15 aa, Artificial Sequence
  Description of Artificial Sequence: Synthetic peptide
  Seed: CSLMQGSTLPRRSGA
CSLMWGSALGRRIGA

SEQ ID NO: 55577 - protein, 15 aa, Artificial Sequence
  Description of Artificial Sequence: Synthetic peptide
  Seed: CSLMQGSTLPRRSGA
CSLMWGSALGRRLGA

SEQ ID NO: 55578 - protein, 15 aa, Artificial Sequence
  Description of Artificial Sequence: Synthetic peptide
  Seed: CSLMQGSTLPRRSGA
CSLMWGSALGRRMGA

SEQ ID NO: 55579 - protein, 15 aa, Artificial Sequence
  Description of Artificial Sequence: Synthetic peptide
  Seed: CSLMQGSTLPRRSGA
CSLMWGSALGRRVGA

SEQ ID NO: 55580 - protein, 15 aa, Artificial Sequence
  Description of Artificial Sequence: Synthetic peptide
  Seed: CSLMQGSTLPRRSGA
CSLMWGSALNRRIGA

SEQ ID NO: 55581 - protein, 15 aa, Artificial Sequence
  Description of Artificial Sequence: Synthetic peptide
  Seed: CSLMQGSTLPRRSGA
CSLMWGSALNRRLGA

SEQ ID NO: 55582 - protein, 15 aa, Artificial Sequence
  Description of Artificial Sequence: Synthetic peptide
  Seed: CSLMQGSTLPRRSGA
CSLMWGSALNRRVGA

SEQ ID NO: 55583 - protein, 15 aa, Artificial Sequence
  Description of Artificial Sequence: Synthetic peptide
  Seed: CSLMQGSTLPRRSGA
CSLMWGSALPRRIGA

SEQ ID NO: 55584 - protein, 15 aa, Artificial Sequence
  Description of Artificial Sequence: Synthetic peptide
  Seed: CSLMQGSTLPRRSGA
CSLMWGSALPRRLGA

SEQ ID NO: 55585 - protein, 15 aa, Artificial Sequence
  Description of Artificial Sequence: Synthetic peptide
  Seed: CSLMQGSTLPRRSGA
CSLMWGSALPRRVGA

SEQ ID NO: 55586 - protein, 15 aa, Artificial Sequence
  Description of Artificial Sequence: Synthetic peptide
  Seed: CSLMQGSTLPRRSGA
CSLMWGSALSRRAGA

SEQ ID NO: 55587 - protein, 15 aa, Artificial Sequence
  Description of Artificial Sequence: Synthetic peptide
  Seed: CSLMQGSTLPRRSGA
CSLMWGSALSRRIGA

SEQ ID NO: 55588 - protein, 15 aa, Artificial Sequence
  Description of Artificial Sequence: Synthetic peptide
  Seed: CSLMQGSTLPRRSGA
CSLMWGSALSRRLGA

SEQ ID NO: 55589 - protein, 15 aa, Artificial Sequence
  Description of Artificial Sequence: Synthetic peptide
  Seed: CSLMQGSTLPRRSGA
CSLMWGSALSRRMGA

SEQ ID NO: 55590 - protein, 15 aa, Artificial Sequence
  Description of Artificial Sequence: Synthetic peptide
  Seed: CSLMQGSTLPRRSGA
CSLMWGSALSRRTGA

SEQ ID NO: 55591 - protein, 15 aa, Artificial Sequence
  Description of Artificial Sequence: Synthetic peptide
  Seed: CSLMQGSTLPRRSGA
CSLMWGSALSRRVGA

SEQ ID NO: 55592 - protein, 15 aa, Artificial Sequence
  Description of Artificial Sequence: Synthetic peptide
  Seed: CSLMQGSTLPRRSGA
CSLMWGSALTRRIGA

SEQ ID NO: 55593 - protein, 15 aa, Artificial Sequence
  Description of Artificial Sequence: Synthetic peptide
  Seed: CSLMQGSTLPRRSGA
CSLMWGSALTRRLGA

SEQ ID NO: 55594 - protein, 15 aa, Artificial Sequence
  Description of Artificial Sequence: Synthetic peptide
  Seed: CSLMQGSTLPRRSGA
CSLMWGSALTRRVGA

SEQ ID NO: 55595 - protein, 15 aa, Artificial Sequence
  Description of Artificial Sequence: Synthetic peptide
  Seed: CSLMQGSTLPRRSGA
CSLMWGSALVRRAGA

SEQ ID NO: 55596 - protein, 15 aa, Artificial Sequence
  Description of Artificial Sequence: Synthetic peptide
  Seed: CSLMQGSTLPRRSGA
CSLMWGSALVRRIGA

SEQ ID NO: 55597 - protein, 15 aa, Artificial Sequence
  Description of Artificial Sequence: Synthetic peptide
  Seed: CSLMQGSTLPRRSGA
CSLMWGSALVRRLGA

SEQ ID NO: 55598 - protein, 15 aa, Artificial Sequence
  Description of Artificial Sequence: Synthetic peptide
  Seed: CSLMQGSTLPRRSGA
CSLMWGSALVRRVGA

SEQ ID NO: 55599 - protein, 15 aa, Artificial Sequence
  Description of Artificial Sequence: Synthetic peptide
  Seed: CSLMQGSTLPRRSGA
CSLMWGSELARRIGA

SEQ ID NO: 55600 - protein, 15 aa, Artificial Sequence
  Description of Artificial Sequence: Synthetic peptide
  Seed: CSLMQGSTLPRRSGA
CSLMWGSELARRLGA

SEQ ID NO: 55601 - protein, 15 aa, Artificial Sequence
  Description of Artificial Sequence: Synthetic peptide
  Seed: CSLMQGSTLPRRSGA
CSLMWGSELARRVGA

SEQ ID NO: 55602 - protein, 15 aa, Artificial Sequence
  Description of Artificial Sequence: Synthetic peptide
  Seed: CSLMQGSTLPRRSGA
CSLMWGSELGRRLGA

SEQ ID NO: 55603 - protein, 15 aa, Artificial Sequence
  Description of Artificial Sequence: Synthetic peptide
  Seed: CSLMQGSTLPRRSGA
CSLMWGSELSRRLGA

SEQ ID NO: 55604 - protein, 15 aa, Artificial Sequence
  Description of Artificial Sequence: Synthetic peptide
  Seed: CSLMQGSTLPRRSGA
CSLMWGSELSRRVGA

SEQ ID NO: 55605 - protein, 15 aa, Artificial Sequence
  Description of Artificial Sequence: Synthetic peptide
  Seed: CSLMQGSTLPRRSGA
CSLMWGSFLARRVGA

SEQ ID NO: 55606 - protein, 15 aa, Artificial Sequence
  Description of Artificial Sequence: Synthetic peptide
  Seed: CSLMQGSTLPRRSGA
CSLMWGSGLARRAGA

SEQ ID NO: 55607 - protein, 15 aa, Artificial Sequence
  Description of Artificial Sequence: Synthetic peptide
  Seed: CSLMQGSTLPRRSGA
CSLMWGSGLARRIGA

SEQ ID NO: 55608 - protein, 15 aa, Artificial Sequence
  Description of Artificial Sequence: Synthetic peptide
  Seed: CSLMQGSTLPRRSGA
CSLMWGSGLARRLGA

SEQ ID NO: 55609 - protein, 15 aa, Artificial Sequence
  Description of Artificial Sequence: Synthetic peptide
  Seed: CSLMQGSTLPRRSGA
CSLMWGSGLARRSGA

SEQ ID NO: 55610 - protein, 15 aa, Artificial Sequence
  Description of Artificial Sequence: Synthetic peptide
  Seed: CSLMQGSTLPRRSGA
CSLMWGSGLARRVGA

SEQ ID NO: 55611 - protein, 15 aa, Artificial Sequence
  Description of Artificial Sequence: Synthetic peptide
  Seed: CSLMQGSTLPRRSGA
CSLMWGSGLVRRAGA

SEQ ID NO: 55612 - protein, 15 aa, Artificial Sequence
  Description of Artificial Sequence: Synthetic peptide
  Seed: CSLMQGSTLPRRSGA
CSLMWGSGLVRRSGA

SEQ ID NO: 55613 - protein, 15 aa, Artificial Sequence
  Description of Artificial Sequence: Synthetic peptide
  Seed: CSLMQGSTLPRRSGA
CSLMWGSGLVRRVGA

SEQ ID NO: 55614 - protein, 15 aa, Artificial Sequence
  Description of Artificial Sequence: Synthetic peptide
  Seed: CSLMQGSTLPRRSGA
CSLMWGSILARRAGA

SEQ ID NO: 55615 - protein, 15 aa, Artificial Sequence
  Description of Artificial Sequence: Synthetic peptide
  Seed: CSLMQGSTLPRRSGA
CSLMWGSILARRIGA

SEQ ID NO: 55616 - protein, 15 aa, Artificial Sequence
  Description of Artificial Sequence: Synthetic peptide
  Seed: CSLMQGSTLPRRSGA
CSLMWGSILARRLGA

SEQ ID NO: 55617 - protein, 15 aa, Artificial Sequence
  Description of Artificial Sequence: Synthetic peptide
  Seed: CSLMQGSTLPRRSGA
CSLMWGSILARRMGA

SEQ ID NO: 55618 - protein, 15 aa, Artificial Sequence
  Description of Artificial Sequence: Synthetic peptide
  Seed: CSLMQGSTLPRRSGA
CSLMWGSILARRSGA

SEQ ID NO: 55619 - protein, 15 aa, Artificial Sequence
  Description of Artificial Sequence: Synthetic peptide
  Seed: CSLMQGSTLPRRSGA
CSLMWGSILARRTGA

SEQ ID NO: 55620 - protein, 15 aa, Artificial Sequence
  Description of Artificial Sequence: Synthetic peptide
  Seed: CSLMQGSTLPRRSGA
CSLMWGSILARRVGA

SEQ ID NO: 55621 - protein, 15 aa, Artificial Sequence
  Description of Artificial Sequence: Synthetic peptide
  Seed: CSLMQGSTLPRRSGA
CSLMWGSILGRRAGA

SEQ ID NO: 55622 - protein, 15 aa, Artificial Sequence
  Description of Artificial Sequence: Synthetic peptide
  Seed: CSLMQGSTLPRRSGA
CSLMWGSILGRRIGA

SEQ ID NO: 55623 - protein, 15 aa, Artificial Sequence
  Description of Artificial Sequence: Synthetic peptide
  Seed: CSLMQGSTLPRRSGA
CSLMWGSILGRRLGA

SEQ ID NO: 55624 - protein, 15 aa, Artificial Sequence
  Description of Artificial Sequence: Synthetic peptide
  Seed: CSLMQGSTLPRRSGA
CSLMWGSILGRRMGA

SEQ ID NO: 55625 - protein, 15 aa, Artificial Sequence
  Description of Artificial Sequence: Synthetic peptide
  Seed: CSLMQGSTLPRRSGA
CSLMWGSILGRRSGA

SEQ ID NO: 55626 - protein, 15 aa, Artificial Sequence
  Description of Artificial Sequence: Synthetic peptide
  Seed: CSLMQGSTLPRRSGA
CSLMWGSILGRRTGA

SEQ ID NO: 55627 - protein, 15 aa, Artificial Sequence
  Description of Artificial Sequence: Synthetic peptide
  Seed: CSLMQGSTLPRRSGA
CSLMWGSILGRRVGA

SEQ ID NO: 55628 - protein, 15 aa, Artificial Sequence
  Description of Artificial Sequence: Synthetic peptide
  Seed: CSLMQGSTLPRRSGA
CSLMWGSILNRRIGA

SEQ ID NO: 55629 - protein, 15 aa, Artificial Sequence
  Description of Artificial Sequence: Synthetic peptide
  Seed: CSLMQGSTLPRRSGA
CSLMWGSILNRRLGA

SEQ ID NO: 55630 - protein, 15 aa, Artificial Sequence
  Description of Artificial Sequence: Synthetic peptide
  Seed: CSLMQGSTLPRRSGA
CSLMWGSILNRRVGA

SEQ ID NO: 55631 - protein, 15 aa, Artificial Sequence
  Description of Artificial Sequence: Synthetic peptide
  Seed: CSLMQGSTLPRRSGA
CSLMWGSILPRRAGA

SEQ ID NO: 55632 - protein, 15 aa, Artificial Sequence
  Description of Artificial Sequence: Synthetic peptide
  Seed: CSLMQGSTLPRRSGA
CSLMWGSILPRRIGA

SEQ ID NO: 55633 - protein, 15 aa, Artificial Sequence
  Description of Artificial Sequence: Synthetic peptide
  Seed: CSLMQGSTLPRRSGA
CSLMWGSILPRRLGA

SEQ ID NO: 55634 - protein, 15 aa, Artificial Sequence
  Description of Artificial Sequence: Synthetic peptide
  Seed: CSLMQGSTLPRRSGA
CSLMWGSILPRRVGA

SEQ ID NO: 55635 - protein, 15 aa, Artificial Sequence
  Description of Artificial Sequence: Synthetic peptide
  Seed: CSLMQGSTLPRRSGA
CSLMWGSILSRRAGA

SEQ ID NO: 55636 - protein, 15 aa, Artificial Sequence
  Description of Artificial Sequence: Synthetic peptide
  Seed: CSLMQGSTLPRRSGA
CSLMWGSILSRRIGA

SEQ ID NO: 55637 - protein, 15 aa, Artificial Sequence
  Description of Artificial Sequence: Synthetic peptide
  Seed: CSLMQGSTLPRRSGA
CSLMWGSILSRRLGA

SEQ ID NO: 55638 - protein, 15 aa, Artificial Sequence
  Description of Artificial Sequence: Synthetic peptide
  Seed: CSLMQGSTLPRRSGA
CSLMWGSILSRRMGA

SEQ ID NO: 55639 - protein, 15 aa, Artificial Sequence
  Description of Artificial Sequence: Synthetic peptide
  Seed: CSLMQGSTLPRRSGA
CSLMWGSILSRRSGA

SEQ ID NO: 55640 - protein, 15 aa, Artificial Sequence
  Description of Artificial Sequence: Synthetic peptide
  Seed: CSLMQGSTLPRRSGA
CSLMWGSILSRRTGA

SEQ ID NO: 55641 - protein, 15 aa, Artificial Sequence
  Description of Artificial Sequence: Synthetic peptide
  Seed: CSLMQGSTLPRRSGA
CSLMWGSILSRRVGA

SEQ ID NO: 55642 - protein, 15 aa, Artificial Sequence
  Description of Artificial Sequence: Synthetic peptide
  Seed: CSLMQGSTLPRRSGA
CSLMWGSILTRRAGA

SEQ ID NO: 55643 - protein, 15 aa, Artificial Sequence
  Description of Artificial Sequence: Synthetic peptide
  Seed: CSLMQGSTLPRRSGA
CSLMWGSILTRRIGA

SEQ ID NO: 55644 - protein, 15 aa, Artificial Sequence
  Description of Artificial Sequence: Synthetic peptide
  Seed: CSLMQGSTLPRRSGA
CSLMWGSILTRRLGA

SEQ ID NO: 55645 - protein, 15 aa, Artificial Sequence
  Description of Artificial Sequence: Synthetic peptide
  Seed: CSLMQGSTLPRRSGA
CSLMWGSILTRRVGA

SEQ ID NO: 55646 - protein, 15 aa, Artificial Sequence
  Description of Artificial Sequence: Synthetic peptide
  Seed: CSLMQGSTLPRRSGA
CSLMWGSILVRRVGA

SEQ ID NO: 55647 - protein, 15 aa, Artificial Sequence
  Description of Artificial Sequence: Synthetic peptide
  Seed: CSLMQGSTLPRRSGA
CSLMWGSLLARRAGA

SEQ ID NO: 55648 - protein, 15 aa, Artificial Sequence
  Description of Artificial Sequence: Synthetic peptide
  Seed: CSLMQGSTLPRRSGA
CSLMWGSLLARRCGA

SEQ ID NO: 55649 - protein, 15 aa, Artificial Sequence
  Description of Artificial Sequence: Synthetic peptide
  Seed: CSLMQGSTLPRRSGA
CSLMWGSLLARRFGA

SEQ ID NO: 55650 - protein, 15 aa, Artificial Sequence
  Description of Artificial Sequence: Synthetic peptide
  Seed: CSLMQGSTLPRRSGA
CSLMWGSLLARRGGA

SEQ ID NO: 55651 - protein, 15 aa, Artificial Sequence
  Description of Artificial Sequence: Synthetic peptide
  Seed: CSLMQGSTLPRRSGA
CSLMWGSLLARRIGA

SEQ ID NO: 55652 - protein, 15 aa, Artificial Sequence
  Description of Artificial Sequence: Synthetic peptide
  Seed: CSLMQGSTLPRRSGA
CSLMWGSLLARRLGA

SEQ ID NO: 55653 - protein, 15 aa, Artificial Sequence
  Description of Artificial Sequence: Synthetic peptide
  Seed: CSLMQGSTLPRRSGA
CSLMWGSLLARRMGA

SEQ ID NO: 55654 - protein, 15 aa, Artificial Sequence
  Description of Artificial Sequence: Synthetic peptide
  Seed: CSLMQGSTLPRRSGA
CSLMWGSLLARRNGA

SEQ ID NO: 55655 - protein, 15 aa, Artificial Sequence
  Description of Artificial Sequence: Synthetic peptide
  Seed: CSLMQGSTLPRRSGA
CSLMWGSLLARRSGA

SEQ ID NO: 55656 - protein, 15 aa, Artificial Sequence
  Description of Artificial Sequence: Synthetic peptide
  Seed: CSLMQGSTLPRRSGA
CSLMWGSLLARRTGA

SEQ ID NO: 55657 - protein, 15 aa, Artificial Sequence
  Description of Artificial Sequence: Synthetic peptide
  Seed: CSLMQGSTLPRRSGA
CSLMWGSLLARRVGA

SEQ ID NO: 55658 - protein, 15 aa, Artificial Sequence
  Description of Artificial Sequence: Synthetic peptide
  Seed: CSLMQGSTLPRRSGA
CSLMWGSLLGRRAGA

SEQ ID NO: 55659 - protein, 15 aa, Artificial Sequence
  Description of Artificial Sequence: Synthetic peptide
  Seed: CSLMQGSTLPRRSGA
CSLMWGSLLGRRFGA

SEQ ID NO: 55660 - protein, 15 aa, Artificial Sequence
  Description of Artificial Sequence: Synthetic peptide
  Seed: CSLMQGSTLPRRSGA
CSLMWGSLLGRRGGA

SEQ ID NO: 55661 - protein, 15 aa, Artificial Sequence
  Description of Artificial Sequence: Synthetic peptide
  Seed: CSLMQGSTLPRRSGA
CSLMWGSLLGRRIGA

SEQ ID NO: 55662 - protein, 15 aa, Artificial Sequence
  Description of Artificial Sequence: Synthetic peptide
  Seed: CSLMQGSTLPRRSGA
CSLMWGSLLGRRLGA

SEQ ID NO: 55663 - protein, 15 aa, Artificial Sequence
  Description of Artificial Sequence: Synthetic peptide
  Seed: CSLMQGSTLPRRSGA
CSLMWGSLLGRRMGA

SEQ ID NO: 55664 - protein, 15 aa, Artificial Sequence
  Description of Artificial Sequence: Synthetic peptide
  Seed: CSLMQGSTLPRRSGA
CSLMWGSLLGRRSGA

SEQ ID NO: 55665 - protein, 15 aa, Artificial Sequence
  Description of Artificial Sequence: Synthetic peptide
  Seed: CSLMQGSTLPRRSGA
CSLMWGSLLGRRTGA

SEQ ID NO: 55666 - protein, 15 aa, Artificial Sequence
  Description of Artificial Sequence: Synthetic peptide
  Seed: CSLMQGSTLPRRSGA
CSLMWGSLLGRRVGA

SEQ ID NO: 55667 - protein, 15 aa, Artificial Sequence
  Description of Artificial Sequence: Synthetic peptide
  Seed: CSLMQGSTLPRRSGA
CSLMWGSLLNRRAGA

SEQ ID NO: 55668 - protein, 15 aa, Artificial Sequence
  Description of Artificial Sequence: Synthetic peptide
  Seed: CSLMQGSTLPRRSGA
CSLMWGSLLNRRIGA

SEQ ID NO: 55669 - protein, 15 aa, Artificial Sequence
  Description of Artificial Sequence: Synthetic peptide
  Seed: CSLMQGSTLPRRSGA
CSLMWGSLLNRRLGA

SEQ ID NO: 55670 - protein, 15 aa, Artificial Sequence
  Description of Artificial Sequence: Synthetic peptide
  Seed: CSLMQGSTLPRRSGA
CSLMWGSLLNRRMGA

SEQ ID NO: 55671 - protein, 15 aa, Artificial Sequence
  Description of Artificial Sequence: Synthetic peptide
  Seed: CSLMQGSTLPRRSGA
CSLMWGSLLNRRTGA

SEQ ID NO: 55672 - protein, 15 aa, Artificial Sequence
  Description of Artificial Sequence: Synthetic peptide
  Seed: CSLMQGSTLPRRSGA
CSLMWGSLLNRRVGA

SEQ ID NO: 55673 - protein, 15 aa, Artificial Sequence
  Description of Artificial Sequence: Synthetic peptide
  Seed: CSLMQGSTLPRRSGA
CSLMWGSLLPRRAGA

SEQ ID NO: 55674 - protein, 15 aa, Artificial Sequence
  Description of Artificial Sequence: Synthetic peptide
  Seed: CSLMQGSTLPRRSGA
CSLMWGSLLPRRIGA

SEQ ID NO: 55675 - protein, 15 aa, Artificial Sequence
  Description of Artificial Sequence: Synthetic peptide
  Seed: CSLMQGSTLPRRSGA
CSLMWGSLLPRRLGA

SEQ ID NO: 55676 - protein, 15 aa, Artificial Sequence
  Description of Artificial Sequence: Synthetic peptide
  Seed: CSLMQGSTLPRRSGA
CSLMWGSLLPRRMGA

SEQ ID NO: 55677 - protein, 15 aa, Artificial Sequence
  Description of Artificial Sequence: Synthetic peptide
  Seed: CSLMQGSTLPRRSGA
CSLMWGSLLPRRTGA

SEQ ID NO: 55678 - protein, 15 aa, Artificial Sequence
  Description of Artificial Sequence: Synthetic peptide
  Seed: CSLMQGSTLPRRSGA
CSLMWGSLLPRRVGA

SEQ ID NO: 55679 - protein, 15 aa, Artificial Sequence
  Description of Artificial Sequence: Synthetic peptide
  Seed: CSLMQGSTLPRRSGA
CSLMWGSLLSRRAGA

SEQ ID NO: 55680 - protein, 15 aa, Artificial Sequence
  Description of Artificial Sequence: Synthetic peptide
  Seed: CSLMQGSTLPRRSGA
CSLMWGSLLSRRCGA

SEQ ID NO: 55681 - protein, 15 aa, Artificial Sequence
  Description of Artificial Sequence: Synthetic peptide
  Seed: CSLMQGSTLPRRSGA
CSLMWGSLLSRRFGA

SEQ ID NO: 55682 - protein, 15 aa, Artificial Sequence
  Description of Artificial Sequence: Synthetic peptide
  Seed: CSLMQGSTLPRRSGA
CSLMWGSLLSRRGGA

SEQ ID NO: 55683 - protein, 15 aa, Artificial Sequence
  Description of Artificial Sequence: Synthetic peptide
  Seed: CSLMQGSTLPRRSGA
CSLMWGSLLSRRIGA

SEQ ID NO: 55684 - protein, 15 aa, Artificial Sequence
  Description of Artificial Sequence: Synthetic peptide
  Seed: CSLMQGSTLPRRSGA
CSLMWGSLLSRRLGA

SEQ ID NO: 55685 - protein, 15 aa, Artificial Sequence
  Description of Artificial Sequence: Synthetic peptide
  Seed: CSLMQGSTLPRRSGA
CSLMWGSLLSRRMGA

SEQ ID NO: 55686 - protein, 15 aa, Artificial Sequence
  Description of Artificial Sequence: Synthetic peptide
  Seed: CSLMQGSTLPRRSGA
CSLMWGSLLSRRNGA

SEQ ID NO: 55687 - protein, 15 aa, Artificial Sequence
  Description of Artificial Sequence: Synthetic peptide
  Seed: CSLMQGSTLPRRSGA
CSLMWGSLLSRRSGA

SEQ ID NO: 55688 - protein, 15 aa, Artificial Sequence
  Description of Artificial Sequence: Synthetic peptide
  Seed: CSLMQGSTLPRRSGA
CSLMWGSLLSRRTGA

SEQ ID NO: 55689 - protein, 15 aa, Artificial Sequence
  Description of Artificial Sequence: Synthetic peptide
  Seed: CSLMQGSTLPRRSGA
CSLMWGSLLSRRVGA

SEQ ID NO: 55690 - protein, 15 aa, Artificial Sequence
  Description of Artificial Sequence: Synthetic peptide
  Seed: CSLMQGSTLPRRSGA
CSLMWGSLLTRRAGA

SEQ ID NO: 55691 - protein, 15 aa, Artificial Sequence
  Description of Artificial Sequence: Synthetic peptide
  Seed: CSLMQGSTLPRRSGA
CSLMWGSLLTRRIGA

SEQ ID NO: 55692 - protein, 15 aa, Artificial Sequence
  Description of Artificial Sequence: Synthetic peptide
  Seed: CSLMQGSTLPRRSGA
CSLMWGSLLTRRLGA

SEQ ID NO: 55693 - protein, 15 aa, Artificial Sequence
  Description of Artificial Sequence: Synthetic peptide
  Seed: CSLMQGSTLPRRSGA
CSLMWGSLLTRRMGA

SEQ ID NO: 55694 - protein, 15 aa, Artificial Sequence
  Description of Artificial Sequence: Synthetic peptide
  Seed: CSLMQGSTLPRRSGA
CSLMWGSLLTRRNGA

SEQ ID NO: 55695 - protein, 15 aa, Artificial Sequence
  Description of Artificial Sequence: Synthetic peptide
  Seed: CSLMQGSTLPRRSGA
CSLMWGSLLTRRTGA

SEQ ID NO: 55696 - protein, 15 aa, Artificial Sequence
  Description of Artificial Sequence: Synthetic peptide
  Seed: CSLMQGSTLPRRSGA
CSLMWGSLLTRRVGA

SEQ ID NO: 55697 - protein, 15 aa, Artificial Sequence
  Description of Artificial Sequence: Synthetic peptide
  Seed: CSLMQGSTLPRRSGA
CSLMWGSLLVRRAGA

SEQ ID NO: 55698 - protein, 15 aa, Artificial Sequence
  Description of Artificial Sequence: Synthetic peptide
  Seed: CSLMQGSTLPRRSGA
CSLMWGSLLVRRIGA

SEQ ID NO: 55699 - protein, 15 aa, Artificial Sequence
  Description of Artificial Sequence: Synthetic peptide
  Seed: CSLMQGSTLPRRSGA
CSLMWGSLLVRRLGA

SEQ ID NO: 55700 - protein, 15 aa, Artificial Sequence
  Description of Artificial Sequence: Synthetic peptide
  Seed: CSLMQGSTLPRRSGA
CSLMWGSLLVRRVGA

SEQ ID NO: 55701 - protein, 15 aa, Artificial Sequence
  Description of Artificial Sequence: Synthetic peptide
  Seed: CSLMQGSTLPRRSGA
CSLMWGSMLARRAGA

SEQ ID NO: 55702 - protein, 15 aa, Artificial Sequence
  Description of Artificial Sequence: Synthetic peptide
  Seed: CSLMQGSTLPRRSGA
CSLMWGSMLARRCGA

SEQ ID NO: 55703 - protein, 15 aa, Artificial Sequence
  Description of Artificial Sequence: Synthetic peptide
  Seed: CSLMQGSTLPRRSGA
CSLMWGSMLARRFGA

SEQ ID NO: 55704 - protein, 15 aa, Artificial Sequence
  Description of Artificial Sequence: Synthetic peptide
  Seed: CSLMQGSTLPRRSGA
CSLMWGSMLARRGGA

SEQ ID NO: 55705 - protein, 15 aa, Artificial Sequence
  Description of Artificial Sequence: Synthetic peptide
  Seed: CSLMQGSTLPRRSGA
CSLMWGSMLARRIGA

SEQ ID NO: 55706 - protein, 15 aa, Artificial Sequence
  Description of Artificial Sequence: Synthetic peptide
  Seed: CSLMQGSTLPRRSGA
CSLMWGSMLARRLGA

SEQ ID NO: 55707 - protein, 15 aa, Artificial Sequence
  Description of Artificial Sequence: Synthetic peptide
  Seed: CSLMQGSTLPRRSGA
CSLMWGSMLARRMGA

SEQ ID NO: 55708 - protein, 15 aa, Artificial Sequence
  Description of Artificial Sequence: Synthetic peptide
  Seed: CSLMQGSTLPRRSGA
CSLMWGSMLARRNGA

SEQ ID NO: 55709 - protein, 15 aa, Artificial Sequence
  Description of Artificial Sequence: Synthetic peptide
  Seed: CSLMQGSTLPRRSGA
CSLMWGSMLARRSGA

SEQ ID NO: 55710 - protein, 15 aa, Artificial Sequence
  Description of Artificial Sequence: Synthetic peptide
  Seed: CSLMQGSTLPRRSGA
CSLMWGSMLARRTGA

SEQ ID NO: 55711 - protein, 15 aa, Artificial Sequence
  Description of Artificial Sequence: Synthetic peptide
  Seed: CSLMQGSTLPRRSGA
CSLMWGSMLARRVGA

SEQ ID NO: 55712 - protein, 15 aa, Artificial Sequence
  Description of Artificial Sequence: Synthetic peptide
  Seed: CSLMQGSTLPRRSGA
CSLMWGSMLGRRAGA

SEQ ID NO: 55713 - protein, 15 aa, Artificial Sequence
  Description of Artificial Sequence: Synthetic peptide
  Seed: CSLMQGSTLPRRSGA
CSLMWGSMLGRRFGA

SEQ ID NO: 55714 - protein, 15 aa, Artificial Sequence
  Description of Artificial Sequence: Synthetic peptide
  Seed: CSLMQGSTLPRRSGA
CSLMWGSMLGRRGGA

SEQ ID NO: 55715 - protein, 15 aa, Artificial Sequence
  Description of Artificial Sequence: Synthetic peptide
  Seed: CSLMQGSTLPRRSGA
CSLMWGSMLGRRIGA

SEQ ID NO: 55716 - protein, 15 aa, Artificial Sequence
  Description of Artificial Sequence: Synthetic peptide
  Seed: CSLMQGSTLPRRSGA
CSLMWGSMLGRRLGA

SEQ ID NO: 55717 - protein, 15 aa, Artificial Sequence
  Description of Artificial Sequence: Synthetic peptide
  Seed: CSLMQGSTLPRRSGA
CSLMWGSMLGRRMGA

SEQ ID NO: 55718 - protein, 15 aa, Artificial Sequence
  Description of Artificial Sequence: Synthetic peptide
  Seed: CSLMQGSTLPRRSGA
CSLMWGSMLGRRSGA

SEQ ID NO: 55719 - protein, 15 aa, Artificial Sequence
  Description of Artificial Sequence: Synthetic peptide
  Seed: CSLMQGSTLPRRSGA
CSLMWGSMLGRRTGA

SEQ ID NO: 55720 - protein, 15 aa, Artificial Sequence
  Description of Artificial Sequence: Synthetic peptide
  Seed: CSLMQGSTLPRRSGA
CSLMWGSMLGRRVGA

SEQ ID NO: 55721 - protein, 15 aa, Artificial Sequence
  Description of Artificial Sequence: Synthetic peptide
  Seed: CSLMQGSTLPRRSGA
CSLMWGSMLNRRAGA

SEQ ID NO: 55722 - protein, 15 aa, Artificial Sequence
  Description of Artificial Sequence: Synthetic peptide
  Seed: CSLMQGSTLPRRSGA
CSLMWGSMLNRRIGA

SEQ ID NO: 55723 - protein, 15 aa, Artificial Sequence
  Description of Artificial Sequence: Synthetic peptide
  Seed: CSLMQGSTLPRRSGA
CSLMWGSMLNRRLGA

SEQ ID NO: 55724 - protein, 15 aa, Artificial Sequence
  Description of Artificial Sequence: Synthetic peptide
  Seed: CSLMQGSTLPRRSGA
CSLMWGSMLNRRMGA

SEQ ID NO: 55725 - protein, 15 aa, Artificial Sequence
  Description of Artificial Sequence: Synthetic peptide
  Seed: CSLMQGSTLPRRSGA
CSLMWGSMLNRRTGA

SEQ ID NO: 55726 - protein, 15 aa, Artificial Sequence
  Description of Artificial Sequence: Synthetic peptide
  Seed: CSLMQGSTLPRRSGA
CSLMWGSMLNRRVGA

SEQ ID NO: 55727 - protein, 15 aa, Artificial Sequence
  Description of Artificial Sequence: Synthetic peptide
  Seed: CSLMQGSTLPRRSGA
CSLMWGSMLPRRAGA

SEQ ID NO: 55728 - protein, 15 aa, Artificial Sequence
  Description of Artificial Sequence: Synthetic peptide
  Seed: CSLMQGSTLPRRSGA
CSLMWGSMLPRRIGA

SEQ ID NO: 55729 - protein, 15 aa, Artificial Sequence
  Description of Artificial Sequence: Synthetic peptide
  Seed: CSLMQGSTLPRRSGA
CSLMWGSMLPRRLGA

SEQ ID NO: 55730 - protein, 15 aa, Artificial Sequence
  Description of Artificial Sequence: Synthetic peptide
  Seed: CSLMQGSTLPRRSGA
CSLMWGSMLPRRMGA

SEQ ID NO: 55731 - protein, 15 aa, Artificial Sequence
  Description of Artificial Sequence: Synthetic peptide
  Seed: CSLMQGSTLPRRSGA
CSLMWGSMLPRRTGA

SEQ ID NO: 55732 - protein, 15 aa, Artificial Sequence
  Description of Artificial Sequence: Synthetic peptide
  Seed: CSLMQGSTLPRRSGA
CSLMWGSMLPRRVGA

SEQ ID NO: 55733 - protein, 15 aa, Artificial Sequence
  Description of Artificial Sequence: Synthetic peptide
  Seed: CSLMQGSTLPRRSGA
CSLMWGSMLSRRAGA

SEQ ID NO: 55734 - protein, 15 aa, Artificial Sequence
  Description of Artificial Sequence: Synthetic peptide
  Seed: CSLMQGSTLPRRSGA
CSLMWGSMLSRRCGA

SEQ ID NO: 55735 - protein, 15 aa, Artificial Sequence
  Description of Artificial Sequence: Synthetic peptide
  Seed: CSLMQGSTLPRRSGA
CSLMWGSMLSRRFGA

SEQ ID NO: 55736 - protein, 15 aa, Artificial Sequence
  Description of Artificial Sequence: Synthetic peptide
  Seed: CSLMQGSTLPRRSGA
CSLMWGSMLSRRGGA

SEQ ID NO: 55737 - protein, 15 aa, Artificial Sequence
  Description of Artificial Sequence: Synthetic peptide
  Seed: CSLMQGSTLPRRSGA
CSLMWGSMLSRRIGA

SEQ ID NO: 55738 - protein, 15 aa, Artificial Sequence
  Description of Artificial Sequence: Synthetic peptide
  Seed: CSLMQGSTLPRRSGA
CSLMWGSMLSRRLGA

SEQ ID NO: 55739 - protein, 15 aa, Artificial Sequence
  Description of Artificial Sequence: Synthetic peptide
  Seed: CSLMQGSTLPRRSGA
CSLMWGSMLSRRMGA

SEQ ID NO: 55740 - protein, 15 aa, Artificial Sequence
  Description of Artificial Sequence: Synthetic peptide
  Seed: CSLMQGSTLPRRSGA
CSLMWGSMLSRRNGA

SEQ ID NO: 55741 - protein, 15 aa, Artificial Sequence
  Description of Artificial Sequence: Synthetic peptide
  Seed: CSLMQGSTLPRRSGA
CSLMWGSMLSRRSGA

SEQ ID NO: 55742 - protein, 15 aa, Artificial Sequence
  Description of Artificial Sequence: Synthetic peptide
  Seed: CSLMQGSTLPRRSGA
CSLMWGSMLSRRTGA

SEQ ID NO: 55743 - protein, 15 aa, Artificial Sequence
  Description of Artificial Sequence: Synthetic peptide
  Seed: CSLMQGSTLPRRSGA
CSLMWGSMLSRRVGA

SEQ ID NO: 55744 - protein, 15 aa, Artificial Sequence
  Description of Artificial Sequence: Synthetic peptide
  Seed: CSLMQGSTLPRRSGA
CSLMWGSMLTRRAGA

SEQ ID NO: 55745 - protein, 15 aa, Artificial Sequence
  Description of Artificial Sequence: Synthetic peptide
  Seed: CSLMQGSTLPRRSGA
CSLMWGSMLTRRIGA

SEQ ID NO: 55746 - protein, 15 aa, Artificial Sequence
  Description of Artificial Sequence: Synthetic peptide
  Seed: CSLMQGSTLPRRSGA
CSLMWGSMLTRRLGA

SEQ ID NO: 55747 - protein, 15 aa, Artificial Sequence
  Description of Artificial Sequence: Synthetic peptide
  Seed: CSLMQGSTLPRRSGA
CSLMWGSMLTRRMGA

SEQ ID NO: 55748 - protein, 15 aa, Artificial Sequence
  Description of Artificial Sequence: Synthetic peptide
  Seed: CSLMQGSTLPRRSGA
CSLMWGSMLTRRNGA

SEQ ID NO: 55749 - protein, 15 aa, Artificial Sequence
  Description of Artificial Sequence: Synthetic peptide
  Seed: CSLMQGSTLPRRSGA
CSLMWGSMLTRRTGA

SEQ ID NO: 55750 - protein, 15 aa, Artificial Sequence
  Description of Artificial Sequence: Synthetic peptide
  Seed: CSLMQGSTLPRRSGA
CSLMWGSMLTRRVGA

SEQ ID NO: 55751 - protein, 15 aa, Artificial Sequence
  Description of Artificial Sequence: Synthetic peptide
  Seed: CSLMQGSTLPRRSGA
CSLMWGSMLVRRAGA

SEQ ID NO: 55752 - protein, 15 aa, Artificial Sequence
  Description of Artificial Sequence: Synthetic peptide
  Seed: CSLMQGSTLPRRSGA
CSLMWGSMLVRRIGA

SEQ ID NO: 55753 - protein, 15 aa, Artificial Sequence
  Description of Artificial Sequence: Synthetic peptide
  Seed: CSLMQGSTLPRRSGA
CSLMWGSMLVRRLGA

SEQ ID NO: 55754 - protein, 15 aa, Artificial Sequence
  Description of Artificial Sequence: Synthetic peptide
  Seed: CSLMQGSTLPRRSGA
CSLMWGSMLVRRVGA

SEQ ID NO: 55755 - protein, 15 aa, Artificial Sequence
  Description of Artificial Sequence: Synthetic peptide
  Seed: CSLMQGSTLPRRSGA
CSLMWGSQLARRAGA

SEQ ID NO: 55756 - protein, 15 aa, Artificial Sequence
  Description of Artificial Sequence: Synthetic peptide
  Seed: CSLMQGSTLPRRSGA
CSLMWGSQLARRIGA

SEQ ID NO: 55757 - protein, 15 aa, Artificial Sequence
  Description of Artificial Sequence: Synthetic peptide
  Seed: CSLMQGSTLPRRSGA
CSLMWGSQLARRLGA

SEQ ID NO: 55758 - protein, 15 aa, Artificial Sequence
  Description of Artificial Sequence: Synthetic peptide
  Seed: CSLMQGSTLPRRSGA
CSLMWGSQLARRMGA

SEQ ID NO: 55759 - protein, 15 aa, Artificial Sequence
  Description of Artificial Sequence: Synthetic peptide
  Seed: CSLMQGSTLPRRSGA
CSLMWGSQLARRVGA

SEQ ID NO: 55760 - protein, 15 aa, Artificial Sequence
  Description of Artificial Sequence: Synthetic peptide
  Seed: CSLMQGSTLPRRSGA
CSLMWGSQLGRRAGA

SEQ ID NO: 55761 - protein, 15 aa, Artificial Sequence
  Description of Artificial Sequence: Synthetic peptide
  Seed: CSLMQGSTLPRRSGA
CSLMWGSQLGRRIGA

SEQ ID NO: 55762 - protein, 15 aa, Artificial Sequence
  Description of Artificial Sequence: Synthetic peptide
  Seed: CSLMQGSTLPRRSGA
CSLMWGSQLGRRLGA

SEQ ID NO: 55763 - protein, 15 aa, Artificial Sequence
  Description of Artificial Sequence: Synthetic peptide
  Seed: CSLMQGSTLPRRSGA
CSLMWGSQLGRRVGA

SEQ ID NO: 55764 - protein, 15 aa, Artificial Sequence
  Description of Artificial Sequence: Synthetic peptide
  Seed: CSLMQGSTLPRRSGA
CSLMWGSQLSRRAGA

SEQ ID NO: 55765 - protein, 15 aa, Artificial Sequence
  Description of Artificial Sequence: Synthetic peptide
  Seed: CSLMQGSTLPRRSGA
CSLMWGSQLSRRIGA

SEQ ID NO: 55766 - protein, 15 aa, Artificial Sequence
  Description of Artificial Sequence: Synthetic peptide
  Seed: CSLMQGSTLPRRSGA
CSLMWGSQLSRRLGA

SEQ ID NO: 55767 - protein, 15 aa, Artificial Sequence
  Description of Artificial Sequence: Synthetic peptide
  Seed: CSLMQGSTLPRRSGA
CSLMWGSQLSRRVGA

SEQ ID NO: 55768 - protein, 15 aa, Artificial Sequence
  Description of Artificial Sequence: Synthetic peptide
  Seed: CSLMQGSTLPRRSGA
CSLMWGSSLARRAGA

SEQ ID NO: 55769 - protein, 15 aa, Artificial Sequence
  Description of Artificial Sequence: Synthetic peptide
  Seed: CSLMQGSTLPRRSGA
CSLMWGSSLARRIGA

SEQ ID NO: 55770 - protein, 15 aa, Artificial Sequence
  Description of Artificial Sequence: Synthetic peptide
  Seed: CSLMQGSTLPRRSGA
CSLMWGSSLARRLGA

SEQ ID NO: 55771 - protein, 15 aa, Artificial Sequence
  Description of Artificial Sequence: Synthetic peptide
  Seed: CSLMQGSTLPRRSGA
CSLMWGSSLARRMGA

SEQ ID NO: 55772 - protein, 15 aa, Artificial Sequence
  Description of Artificial Sequence: Synthetic peptide
  Seed: CSLMQGSTLPRRSGA
CSLMWGSSLARRVGA

SEQ ID NO: 55773 - protein, 15 aa, Artificial Sequence
  Description of Artificial Sequence: Synthetic peptide
  Seed: CSLMQGSTLPRRSGA
CSLMWGSSLGRRIGA

SEQ ID NO: 55774 - protein, 15 aa, Artificial Sequence
  Description of Artificial Sequence: Synthetic peptide
  Seed: CSLMQGSTLPRRSGA
CSLMWGSSLGRRLGA

SEQ ID NO: 55775 - protein, 15 aa, Artificial Sequence
  Description of Artificial Sequence: Synthetic peptide
  Seed: CSLMQGSTLPRRSGA
CSLMWGSSLGRRVGA

SEQ ID NO: 55776 - protein, 15 aa, Artificial Sequence
  Description of Artificial Sequence: Synthetic peptide
  Seed: CSLMQGSTLPRRSGA
CSLMWGSSLSRRIGA

SEQ ID NO: 55777 - protein, 15 aa, Artificial Sequence
  Description of Artificial Sequence: Synthetic peptide
  Seed: CSLMQGSTLPRRSGA
CSLMWGSSLSRRLGA

SEQ ID NO: 55778 - protein, 15 aa, Artificial Sequence
  Description of Artificial Sequence: Synthetic peptide
  Seed: CSLMQGSTLPRRSGA
CSLMWGSSLSRRVGA

SEQ ID NO: 55779 - protein, 15 aa, Artificial Sequence
  Description of Artificial Sequence: Synthetic peptide
  Seed: CSLMQGSTLPRRSGA
CSLMWGSTLARRIGA

SEQ ID NO: 55780 - protein, 15 aa, Artificial Sequence
  Description of Artificial Sequence: Synthetic peptide
  Seed: CSLMQGSTLPRRSGA
CSLMWGSTLARRLGA

SEQ ID NO: 55781 - protein, 15 aa, Artificial Sequence
  Description of Artificial Sequence: Synthetic peptide
  Seed: CSLMQGSTLPRRSGA
CSLMWGSTLARRVGA

SEQ ID NO: 55782 - protein, 15 aa, Artificial Sequence
  Description of Artificial Sequence: Synthetic peptide
  Seed: CSLMQGSTLPRRSGA
CSLMWGSTLSRRIGA

SEQ ID NO: 55783 - protein, 15 aa, Artificial Sequence
  Description of Artificial Sequence: Synthetic peptide
  Seed: CSLMQGSTLPRRSGA
CSLMWGSTLSRRLGA

SEQ ID NO: 55784 - protein, 15 aa, Artificial Sequence
  Description of Artificial Sequence: Synthetic peptide
  Seed: CSLMQGSTLPRRSGA
CSLMWGSTLSRRVGA

SEQ ID NO: 55785 - protein, 15 aa, Artificial Sequence
  Description of Artificial Sequence: Synthetic peptide
  Seed: CSLMQGSTLPRRSGA
CSLMWGSVLARRAGA

SEQ ID NO: 55786 - protein, 15 aa, Artificial Sequence
  Description of Artificial Sequence: Synthetic peptide
  Seed: CSLMQGSTLPRRSGA
CSLMWGSVLARRIGA

SEQ ID NO: 55787 - protein, 15 aa, Artificial Sequence
  Description of Artificial Sequence: Synthetic peptide
  Seed: CSLMQGSTLPRRSGA
CSLMWGSVLARRLGA

SEQ ID NO: 55788 - protein, 15 aa, Artificial Sequence
  Description of Artificial Sequence: Synthetic peptide
  Seed: CSLMQGSTLPRRSGA
CSLMWGSVLARRMGA

SEQ ID NO: 55789 - protein, 15 aa, Artificial Sequence
  Description of Artificial Sequence: Synthetic peptide
  Seed: CSLMQGSTLPRRSGA
CSLMWGSVLARRTGA

SEQ ID NO: 55790 - protein, 15 aa, Artificial Sequence
  Description of Artificial Sequence: Synthetic peptide
  Seed: CSLMQGSTLPRRSGA
CSLMWGSVLARRVGA

SEQ ID NO: 55791 - protein, 15 aa, Artificial Sequence
  Description of Artificial Sequence: Synthetic peptide
  Seed: CSLMQGSTLPRRSGA
CSLMWGSVLGRRAGA

SEQ ID NO: 55792 - protein, 15 aa, Artificial Sequence
  Description of Artificial Sequence: Synthetic peptide
  Seed: CSLMQGSTLPRRSGA
CSLMWGSVLGRRIGA

SEQ ID NO: 55793 - protein, 15 aa, Artificial Sequence
  Description of Artificial Sequence: Synthetic peptide
  Seed: CSLMQGSTLPRRSGA
CSLMWGSVLGRRLGA

SEQ ID NO: 55794 - protein, 15 aa, Artificial Sequence
  Description of Artificial Sequence: Synthetic peptide
  Seed: CSLMQGSTLPRRSGA
CSLMWGSVLGRRMGA

SEQ ID NO: 55795 - protein, 15 aa, Artificial Sequence
  Description of Artificial Sequence: Synthetic peptide
  Seed: CSLMQGSTLPRRSGA
CSLMWGSVLGRRVGA

SEQ ID NO: 55796 - protein, 15 aa, Artificial Sequence
  Description of Artificial Sequence: Synthetic peptide
  Seed: CSLMQGSTLPRRSGA
CSLMWGSVLPRRIGA

SEQ ID NO: 55797 - protein, 15 aa, Artificial Sequence
  Description of Artificial Sequence: Synthetic peptide
  Seed: CSLMQGSTLPRRSGA
CSLMWGSVLPRRLGA

SEQ ID NO: 55798 - protein, 15 aa, Artificial Sequence
  Description of Artificial Sequence: Synthetic peptide
  Seed: CSLMQGSTLPRRSGA
CSLMWGSVLPRRVGA

SEQ ID NO: 55799 - protein, 15 aa, Artificial Sequence
  Description of Artificial Sequence: Synthetic peptide
  Seed: CSLMQGSTLPRRSGA
CSLMWGSVLSRRAGA

SEQ ID NO: 55800 - protein, 15 aa, Artificial Sequence
  Description of Artificial Sequence: Synthetic peptide
  Seed: CSLMQGSTLPRRSGA
CSLMWGSVLSRRIGA

SEQ ID NO: 55801 - protein, 15 aa, Artificial Sequence
  Description of Artificial Sequence: Synthetic peptide
  Seed: CSLMQGSTLPRRSGA
CSLMWGSVLSRRLGA

SEQ ID NO: 55802 - protein, 15 aa, Artificial Sequence
  Description of Artificial Sequence: Synthetic peptide
  Seed: CSLMQGSTLPRRSGA
CSLMWGSVLSRRMGA

SEQ ID NO: 55803 - protein, 15 aa, Artificial Sequence
  Description of Artificial Sequence: Synthetic peptide
  Seed: CSLMQGSTLPRRSGA
CSLMWGSVLSRRTGA

SEQ ID NO: 55804 - protein, 15 aa, Artificial Sequence
  Description of Artificial Sequence: Synthetic peptide
  Seed: CSLMQGSTLPRRSGA
CSLMWGSVLSRRVGA

SEQ ID NO: 55805 - protein, 15 aa, Artificial Sequence
  Description of Artificial Sequence: Synthetic peptide
  Seed: CSLMQGSTLPRRSGA
CSLMWGSVLTRRIGA

SEQ ID NO: 55806 - protein, 15 aa, Artificial Sequence
  Description of Artificial Sequence: Synthetic peptide
  Seed: CSLMQGSTLPRRSGA
CSLMWGSVLTRRVGA

SEQ ID NO: 55807 - protein, 15 aa, Artificial Sequence
  Description of Artificial Sequence: Synthetic peptide
  Seed: CSLMQGSTLPRRSGA
CSLMYGSALARRAGA

SEQ ID NO: 55808 - protein, 15 aa, Artificial Sequence
  Description of Artificial Sequence: Synthetic peptide
  Seed: CSLMQGSTLPRRSGA
CSLMYGSALARRCGA

SEQ ID NO: 55809 - protein, 15 aa, Artificial Sequence
  Description of Artificial Sequence: Synthetic peptide
  Seed: CSLMQGSTLPRRSGA
CSLMYGSALARRFGA

SEQ ID NO: 55810 - protein, 15 aa, Artificial Sequence
  Description of Artificial Sequence: Synthetic peptide
  Seed: CSLMQGSTLPRRSGA
CSLMYGSALARRGGA

SEQ ID NO: 55811 - protein, 15 aa, Artificial Sequence
  Description of Artificial Sequence: Synthetic peptide
  Seed: CSLMQGSTLPRRSGA
CSLMYGSALARRIGA

SEQ ID NO: 55812 - protein, 15 aa, Artificial Sequence
  Description of Artificial Sequence: Synthetic peptide
  Seed: CSLMQGSTLPRRSGA
CSLMYGSALARRLGA

SEQ ID NO: 55813 - protein, 15 aa, Artificial Sequence
  Description of Artificial Sequence: Synthetic peptide
  Seed: CSLMQGSTLPRRSGA
CSLMYGSALARRMGA

SEQ ID NO: 55814 - protein, 15 aa, Artificial Sequence
  Description of Artificial Sequence: Synthetic peptide
  Seed: CSLMQGSTLPRRSGA
CSLMYGSALARRNGA

SEQ ID NO: 55815 - protein, 15 aa, Artificial Sequence
  Description of Artificial Sequence: Synthetic peptide
  Seed: CSLMQGSTLPRRSGA
CSLMYGSALARRPGA

SEQ ID NO: 55816 - protein, 15 aa, Artificial Sequence
  Description of Artificial Sequence: Synthetic peptide
  Seed: CSLMQGSTLPRRSGA
CSLMYGSALARRQGA

SEQ ID NO: 55817 - protein, 15 aa, Artificial Sequence
  Description of Artificial Sequence: Synthetic peptide
  Seed: CSLMQGSTLPRRSGA
CSLMYGSALARRSGA

SEQ ID NO: 55818 - protein, 15 aa, Artificial Sequence
  Description of Artificial Sequence: Synthetic peptide
  Seed: CSLMQGSTLPRRSGA
CSLMYGSALARRTGA

SEQ ID NO: 55819 - protein, 15 aa, Artificial Sequence
  Description of Artificial Sequence: Synthetic peptide
  Seed: CSLMQGSTLPRRSGA
CSLMYGSALARRVGA

SEQ ID NO: 55820 - protein, 15 aa, Artificial Sequence
  Description of Artificial Sequence: Synthetic peptide
  Seed: CSLMQGSTLPRRSGA
CSLMYGSALARRWGA

SEQ ID NO: 55821 - protein, 15 aa, Artificial Sequence
  Description of Artificial Sequence: Synthetic peptide
  Seed: CSLMQGSTLPRRSGA
CSLMYGSALARRYGA

SEQ ID NO: 55822 - protein, 15 aa, Artificial Sequence
  Description of Artificial Sequence: Synthetic peptide
  Seed: CSLMQGSTLPRRSGA
CSLMYGSALGRRAGA

SEQ ID NO: 55823 - protein, 15 aa, Artificial Sequence
  Description of Artificial Sequence: Synthetic peptide
  Seed: CSLMQGSTLPRRSGA
CSLMYGSALGRRFGA

SEQ ID NO: 55824 - protein, 15 aa, Artificial Sequence
  Description of Artificial Sequence: Synthetic peptide
  Seed: CSLMQGSTLPRRSGA
CSLMYGSALGRRIGA

SEQ ID NO: 55825 - protein, 15 aa, Artificial Sequence
  Description of Artificial Sequence: Synthetic peptide
  Seed: CSLMQGSTLPRRSGA
CSLMYGSALGRRLGA

SEQ ID NO: 55826 - protein, 15 aa, Artificial Sequence
  Description of Artificial Sequence: Synthetic peptide
  Seed: CSLMQGSTLPRRSGA
CSLMYGSALGRRMGA

SEQ ID NO: 55827 - protein, 15 aa, Artificial Sequence
  Description of Artificial Sequence: Synthetic peptide
  Seed: CSLMQGSTLPRRSGA
CSLMYGSALGRRSGA

SEQ ID NO: 55828 - protein, 15 aa, Artificial Sequence
  Description of Artificial Sequence: Synthetic peptide
  Seed: CSLMQGSTLPRRSGA
CSLMYGSALGRRTGA

SEQ ID NO: 55829 - protein, 15 aa, Artificial Sequence
  Description of Artificial Sequence: Synthetic peptide
  Seed: CSLMQGSTLPRRSGA
CSLMYGSALGRRVGA

SEQ ID NO: 55830 - protein, 15 aa, Artificial Sequence
  Description of Artificial Sequence: Synthetic peptide
  Seed: CSLMQGSTLPRRSGA
CSLMYGSALIRRAGA

SEQ ID NO: 55831 - protein, 15 aa, Artificial Sequence
  Description of Artificial Sequence: Synthetic peptide
  Seed: CSLMQGSTLPRRSGA
CSLMYGSALIRRIGA

SEQ ID NO: 55832 - protein, 15 aa, Artificial Sequence
  Description of Artificial Sequence: Synthetic peptide
  Seed: CSLMQGSTLPRRSGA
CSLMYGSALIRRLGA

SEQ ID NO: 55833 - protein, 15 aa, Artificial Sequence
  Description of Artificial Sequence: Synthetic peptide
  Seed: CSLMQGSTLPRRSGA
CSLMYGSALIRRVGA

SEQ ID NO: 55834 - protein, 15 aa, Artificial Sequence
  Description of Artificial Sequence: Synthetic peptide
  Seed: CSLMQGSTLPRRSGA
CSLMYGSALLRRIGA

SEQ ID NO: 55835 - protein, 15 aa, Artificial Sequence
  Description of Artificial Sequence: Synthetic peptide
  Seed: CSLMQGSTLPRRSGA
CSLMYGSALLRRVGA

SEQ ID NO: 55836 - protein, 15 aa, Artificial Sequence
  Description of Artificial Sequence: Synthetic peptide
  Seed: CSLMQGSTLPRRSGA
CSLMYGSALMRRIGA

SEQ ID NO: 55837 - protein, 15 aa, Artificial Sequence
  Description of Artificial Sequence: Synthetic peptide
  Seed: CSLMQGSTLPRRSGA
CSLMYGSALMRRLGA

SEQ ID NO: 55838 - protein, 15 aa, Artificial Sequence
  Description of Artificial Sequence: Synthetic peptide
  Seed: CSLMQGSTLPRRSGA
CSLMYGSALMRRVGA

SEQ ID NO: 55839 - protein, 15 aa, Artificial Sequence
  Description of Artificial Sequence: Synthetic peptide
  Seed: CSLMQGSTLPRRSGA
CSLMYGSALNRRAGA

SEQ ID NO: 55840 - protein, 15 aa, Artificial Sequence
  Description of Artificial Sequence: Synthetic peptide
  Seed: CSLMQGSTLPRRSGA
CSLMYGSALNRRIGA

SEQ ID NO: 55841 - protein, 15 aa, Artificial Sequence
  Description of Artificial Sequence: Synthetic peptide
  Seed: CSLMQGSTLPRRSGA
CSLMYGSALNRRLGA

SEQ ID NO: 55842 - protein, 15 aa, Artificial Sequence
  Description of Artificial Sequence: Synthetic peptide
  Seed: CSLMQGSTLPRRSGA
CSLMYGSALNRRMGA

SEQ ID NO: 55843 - protein, 15 aa, Artificial Sequence
  Description of Artificial Sequence: Synthetic peptide
  Seed: CSLMQGSTLPRRSGA
CSLMYGSALNRRTGA

SEQ ID NO: 55844 - protein, 15 aa, Artificial Sequence
  Description of Artificial Sequence: Synthetic peptide
  Seed: CSLMQGSTLPRRSGA
CSLMYGSALNRRVGA

SEQ ID NO: 55845 - protein, 15 aa, Artificial Sequence
  Description of Artificial Sequence: Synthetic peptide
  Seed: CSLMQGSTLPRRSGA
CSLMYGSALPRRAGA

SEQ ID NO: 55846 - protein, 15 aa, Artificial Sequence
  Description of Artificial Sequence: Synthetic peptide
  Seed: CSLMQGSTLPRRSGA
CSLMYGSALPRRIGA

SEQ ID NO: 55847 - protein, 15 aa, Artificial Sequence
  Description of Artificial Sequence: Synthetic peptide
  Seed: CSLMQGSTLPRRSGA
CSLMYGSALPRRLGA

SEQ ID NO: 55848 - protein, 15 aa, Artificial Sequence
  Description of Artificial Sequence: Synthetic peptide
  Seed: CSLMQGSTLPRRSGA
CSLMYGSALPRRMGA

SEQ ID NO: 55849 - protein, 15 aa, Artificial Sequence
  Description of Artificial Sequence: Synthetic peptide
  Seed: CSLMQGSTLPRRSGA
CSLMYGSALPRRSGA

SEQ ID NO: 55850 - protein, 15 aa, Artificial Sequence
  Description of Artificial Sequence: Synthetic peptide
  Seed: CSLMQGSTLPRRSGA
CSLMYGSALPRRTGA

SEQ ID NO: 55851 - protein, 15 aa, Artificial Sequence
  Description of Artificial Sequence: Synthetic peptide
  Seed: CSLMQGSTLPRRSGA
CSLMYGSALPRRVGA

SEQ ID NO: 55852 - protein, 15 aa, Artificial Sequence
  Description of Artificial Sequence: Synthetic peptide
  Seed: CSLMQGSTLPRRSGA
CSLMYGSALSRRAGA

SEQ ID NO: 55853 - protein, 15 aa, Artificial Sequence
  Description of Artificial Sequence: Synthetic peptide
  Seed: CSLMQGSTLPRRSGA
CSLMYGSALSRRCGA

SEQ ID NO: 55854 - protein, 15 aa, Artificial Sequence
  Description of Artificial Sequence: Synthetic peptide
  Seed: CSLMQGSTLPRRSGA
CSLMYGSALSRRFGA

SEQ ID NO: 55855 - protein, 15 aa, Artificial Sequence
  Description of Artificial Sequence: Synthetic peptide
  Seed: CSLMQGSTLPRRSGA
CSLMYGSALSRRGGA

SEQ ID NO: 55856 - protein, 15 aa, Artificial Sequence
  Description of Artificial Sequence: Synthetic peptide
  Seed: CSLMQGSTLPRRSGA
CSLMYGSALSRRIGA

SEQ ID NO: 55857 - protein, 15 aa, Artificial Sequence
  Description of Artificial Sequence: Synthetic peptide
  Seed: CSLMQGSTLPRRSGA
CSLMYGSALSRRLGA

SEQ ID NO: 55858 - protein, 15 aa, Artificial Sequence
  Description of Artificial Sequence: Synthetic peptide
  Seed: CSLMQGSTLPRRSGA
CSLMYGSALSRRMGA

SEQ ID NO: 55859 - protein, 15 aa, Artificial Sequence
  Description of Artificial Sequence: Synthetic peptide
  Seed: CSLMQGSTLPRRSGA
CSLMYGSALSRRNGA

SEQ ID NO: 55860 - protein, 15 aa, Artificial Sequence
  Description of Artificial Sequence: Synthetic peptide
  Seed: CSLMQGSTLPRRSGA
CSLMYGSALSRRSGA

SEQ ID NO: 55861 - protein, 15 aa, Artificial Sequence
  Description of Artificial Sequence: Synthetic peptide
  Seed: CSLMQGSTLPRRSGA
CSLMYGSALSRRTGA

SEQ ID NO: 55862 - protein, 15 aa, Artificial Sequence
  Description of Artificial Sequence: Synthetic peptide
  Seed: CSLMQGSTLPRRSGA
CSLMYGSALSRRVGA

SEQ ID NO: 55863 - protein, 15 aa, Artificial Sequence
  Description of Artificial Sequence: Synthetic peptide
  Seed: CSLMQGSTLPRRSGA
CSLMYGSALTRRAGA

SEQ ID NO: 55864 - protein, 15 aa, Artificial Sequence
  Description of Artificial Sequence: Synthetic peptide
  Seed: CSLMQGSTLPRRSGA
CSLMYGSALTRRIGA

SEQ ID NO: 55865 - protein, 15 aa, Artificial Sequence
  Description of Artificial Sequence: Synthetic peptide
  Seed: CSLMQGSTLPRRSGA
CSLMYGSALTRRLGA

SEQ ID NO: 55866 - protein, 15 aa, Artificial Sequence
  Description of Artificial Sequence: Synthetic peptide
  Seed: CSLMQGSTLPRRSGA
CSLMYGSALTRRMGA

SEQ ID NO: 55867 - protein, 15 aa, Artificial Sequence
  Description of Artificial Sequence: Synthetic peptide
  Seed: CSLMQGSTLPRRSGA
CSLMYGSALTRRNGA

SEQ ID NO: 55868 - protein, 15 aa, Artificial Sequence
  Description of Artificial Sequence: Synthetic peptide
  Seed: CSLMQGSTLPRRSGA
CSLMYGSALTRRSGA

SEQ ID NO: 55869 - protein, 15 aa, Artificial Sequence
  Description of Artificial Sequence: Synthetic peptide
  Seed: CSLMQGSTLPRRSGA
CSLMYGSALTRRTGA

SEQ ID NO: 55870 - protein, 15 aa, Artificial Sequence
  Description of Artificial Sequence: Synthetic peptide
  Seed: CSLMQGSTLPRRSGA
CSLMYGSALTRRVGA

SEQ ID NO: 55871 - protein, 15 aa, Artificial Sequence
  Description of Artificial Sequence: Synthetic peptide
  Seed: CSLMQGSTLPRRSGA
CSLMYGSALVRRAGA

SEQ ID NO: 55872 - protein, 15 aa, Artificial Sequence
  Description of Artificial Sequence: Synthetic peptide
  Seed: CSLMQGSTLPRRSGA
CSLMYGSALVRRIGA

SEQ ID NO: 55873 - protein, 15 aa, Artificial Sequence
  Description of Artificial Sequence: Synthetic peptide
  Seed: CSLMQGSTLPRRSGA
CSLMYGSALVRRLGA

SEQ ID NO: 55874 - protein, 15 aa, Artificial Sequence
  Description of Artificial Sequence: Synthetic peptide
  Seed: CSLMQGSTLPRRSGA
CSLMYGSALVRRMGA

SEQ ID NO: 55875 - protein, 15 aa, Artificial Sequence
  Description of Artificial Sequence: Synthetic peptide
  Seed: CSLMQGSTLPRRSGA
CSLMYGSALVRRNGA

SEQ ID NO: 55876 - protein, 15 aa, Artificial Sequence
  Description of Artificial Sequence: Synthetic peptide
  Seed: CSLMQGSTLPRRSGA
CSLMYGSALVRRSGA

SEQ ID NO: 55877 - protein, 15 aa, Artificial Sequence
  Description of Artificial Sequence: Synthetic peptide
  Seed: CSLMQGSTLPRRSGA
CSLMYGSALVRRTGA

SEQ ID NO: 55878 - protein, 15 aa, Artificial Sequence
  Description of Artificial Sequence: Synthetic peptide
  Seed: CSLMQGSTLPRRSGA
CSLMYGSALVRRVGA

SEQ ID NO: 55879 - protein, 15 aa, Artificial Sequence
  Description of Artificial Sequence: Synthetic peptide
  Seed: CSLMQGSTLPRRSGA
CSLMYGSCLARRIGA

SEQ ID NO: 55880 - protein, 15 aa, Artificial Sequence
  Description of Artificial Sequence: Synthetic peptide
  Seed: CSLMQGSTLPRRSGA
CSLMYGSCLARRLGA

SEQ ID NO: 55881 - protein, 15 aa, Artificial Sequence
  Description of Artificial Sequence: Synthetic peptide
  Seed: CSLMQGSTLPRRSGA
CSLMYGSCLARRVGA

SEQ ID NO: 55882 - protein, 15 aa, Artificial Sequence
  Description of Artificial Sequence: Synthetic peptide
  Seed: CSLMQGSTLPRRSGA
CSLMYGSELARRAGA

SEQ ID NO: 55883 - protein, 15 aa, Artificial Sequence
  Description of Artificial Sequence: Synthetic peptide
  Seed: CSLMQGSTLPRRSGA
CSLMYGSELARRIGA

SEQ ID NO: 55884 - protein, 15 aa, Artificial Sequence
  Description of Artificial Sequence: Synthetic peptide
  Seed: CSLMQGSTLPRRSGA
CSLMYGSELARRLGA

SEQ ID NO: 55885 - protein, 15 aa, Artificial Sequence
  Description of Artificial Sequence: Synthetic peptide
  Seed: CSLMQGSTLPRRSGA
CSLMYGSELARRMGA

SEQ ID NO: 55886 - protein, 15 aa, Artificial Sequence
  Description of Artificial Sequence: Synthetic peptide
  Seed: CSLMQGSTLPRRSGA
CSLMYGSELARRTGA

SEQ ID NO: 55887 - protein, 15 aa, Artificial Sequence
  Description of Artificial Sequence: Synthetic peptide
  Seed: CSLMQGSTLPRRSGA
CSLMYGSELARRVGA

SEQ ID NO: 55888 - protein, 15 aa, Artificial Sequence
  Description of Artificial Sequence: Synthetic peptide
  Seed: CSLMQGSTLPRRSGA
CSLMYGSELGRRAGA

SEQ ID NO: 55889 - protein, 15 aa, Artificial Sequence
  Description of Artificial Sequence: Synthetic peptide
  Seed: CSLMQGSTLPRRSGA
CSLMYGSELGRRIGA

SEQ ID NO: 55890 - protein, 15 aa, Artificial Sequence
  Description of Artificial Sequence: Synthetic peptide
  Seed: CSLMQGSTLPRRSGA
CSLMYGSELGRRLGA

SEQ ID NO: 55891 - protein, 15 aa, Artificial Sequence
  Description of Artificial Sequence: Synthetic peptide
  Seed: CSLMQGSTLPRRSGA
CSLMYGSELGRRVGA

SEQ ID NO: 55892 - protein, 15 aa, Artificial Sequence
  Description of Artificial Sequence: Synthetic peptide
  Seed: CSLMQGSTLPRRSGA
CSLMYGSELPRRLGA

SEQ ID NO: 55893 - protein, 15 aa, Artificial Sequence
  Description of Artificial Sequence: Synthetic peptide
  Seed: CSLMQGSTLPRRSGA
CSLMYGSELSRRAGA

SEQ ID NO: 55894 - protein, 15 aa, Artificial Sequence
  Description of Artificial Sequence: Synthetic peptide
  Seed: CSLMQGSTLPRRSGA
CSLMYGSELSRRIGA

SEQ ID NO: 55895 - protein, 15 aa, Artificial Sequence
  Description of Artificial Sequence: Synthetic peptide
  Seed: CSLMQGSTLPRRSGA
CSLMYGSELSRRLGA

SEQ ID NO: 55896 - protein, 15 aa, Artificial Sequence
  Description of Artificial Sequence: Synthetic peptide
  Seed: CSLMQGSTLPRRSGA
CSLMYGSELSRRVGA

SEQ ID NO: 55897 - protein, 15 aa, Artificial Sequence
  Description of Artificial Sequence: Synthetic peptide
  Seed: CSLMQGSTLPRRSGA
CSLMYGSELTRRLGA

SEQ ID NO: 55898 - protein, 15 aa, Artificial Sequence
  Description of Artificial Sequence: Synthetic peptide
  Seed: CSLMQGSTLPRRSGA
CSLMYGSELTRRVGA

SEQ ID NO: 55899 - protein, 15 aa, Artificial Sequence
  Description of Artificial Sequence: Synthetic peptide
  Seed: CSLMQGSTLPRRSGA
CSLMYGSFLARRAGA

SEQ ID NO: 55900 - protein, 15 aa, Artificial Sequence
  Description of Artificial Sequence: Synthetic peptide
  Seed: CSLMQGSTLPRRSGA
CSLMYGSFLARRIGA

SEQ ID NO: 55901 - protein, 15 aa, Artificial Sequence
  Description of Artificial Sequence: Synthetic peptide
  Seed: CSLMQGSTLPRRSGA
CSLMYGSFLARRLGA

SEQ ID NO: 55902 - protein, 15 aa, Artificial Sequence
  Description of Artificial Sequence: Synthetic peptide
  Seed: CSLMQGSTLPRRSGA
CSLMYGSFLARRMGA

SEQ ID NO: 55903 - protein, 15 aa, Artificial Sequence
  Description of Artificial Sequence: Synthetic peptide
  Seed: CSLMQGSTLPRRSGA
CSLMYGSFLARRTGA

SEQ ID NO: 55904 - protein, 15 aa, Artificial Sequence
  Description of Artificial Sequence: Synthetic peptide
  Seed: CSLMQGSTLPRRSGA
CSLMYGSFLARRVGA

SEQ ID NO: 55905 - protein, 15 aa, Artificial Sequence
  Description of Artificial Sequence: Synthetic peptide
  Seed: CSLMQGSTLPRRSGA
CSLMYGSFLGRRAGA

SEQ ID NO: 55906 - protein, 15 aa, Artificial Sequence
  Description of Artificial Sequence: Synthetic peptide
  Seed: CSLMQGSTLPRRSGA
CSLMYGSFLGRRIGA

SEQ ID NO: 55907 - protein, 15 aa, Artificial Sequence
  Description of Artificial Sequence: Synthetic peptide
  Seed: CSLMQGSTLPRRSGA
CSLMYGSFLGRRLGA

SEQ ID NO: 55908 - protein, 15 aa, Artificial Sequence
  Description of Artificial Sequence: Synthetic peptide
  Seed: CSLMQGSTLPRRSGA
CSLMYGSFLGRRVGA

SEQ ID NO: 55909 - protein, 15 aa, Artificial Sequence
  Description of Artificial Sequence: Synthetic peptide
  Seed: CSLMQGSTLPRRSGA
CSLMYGSFLPRRIGA

SEQ ID NO: 55910 - protein, 15 aa, Artificial Sequence
  Description of Artificial Sequence: Synthetic peptide
  Seed: CSLMQGSTLPRRSGA
CSLMYGSFLPRRLGA

SEQ ID NO: 55911 - protein, 15 aa, Artificial Sequence
  Description of Artificial Sequence: Synthetic peptide
  Seed: CSLMQGSTLPRRSGA
CSLMYGSFLPRRVGA

SEQ ID NO: 55912 - protein, 15 aa, Artificial Sequence
  Description of Artificial Sequence: Synthetic peptide
  Seed: CSLMQGSTLPRRSGA
CSLMYGSFLSRRAGA

SEQ ID NO: 55913 - protein, 15 aa, Artificial Sequence
  Description of Artificial Sequence: Synthetic peptide
  Seed: CSLMQGSTLPRRSGA
CSLMYGSFLSRRIGA

SEQ ID NO: 55914 - protein, 15 aa, Artificial Sequence
  Description of Artificial Sequence: Synthetic peptide
  Seed: CSLMQGSTLPRRSGA
CSLMYGSFLSRRLGA

SEQ ID NO: 55915 - protein, 15 aa, Artificial Sequence
  Description of Artificial Sequence: Synthetic peptide
  Seed: CSLMQGSTLPRRSGA
CSLMYGSFLSRRVGA

SEQ ID NO: 55916 - protein, 15 aa, Artificial Sequence
  Description of Artificial Sequence: Synthetic peptide
  Seed: CSLMQGSTLPRRSGA
CSLMYGSFLTRRIGA

SEQ ID NO: 55917 - protein, 15 aa, Artificial Sequence
  Description of Artificial Sequence: Synthetic peptide
  Seed: CSLMQGSTLPRRSGA
CSLMYGSFLTRRLGA

SEQ ID NO: 55918 - protein, 15 aa, Artificial Sequence
  Description of Artificial Sequence: Synthetic peptide
  Seed: CSLMQGSTLPRRSGA
CSLMYGSFLTRRVGA

SEQ ID NO: 55919 - protein, 15 aa, Artificial Sequence
  Description of Artificial Sequence: Synthetic peptide
  Seed: CSLMQGSTLPRRSGA
CSLMYGSGLARRAGA

SEQ ID NO: 55920 - protein, 15 aa, Artificial Sequence
  Description of Artificial Sequence: Synthetic peptide
  Seed: CSLMQGSTLPRRSGA
CSLMYGSGLARRIGA

SEQ ID NO: 55921 - protein, 15 aa, Artificial Sequence
  Description of Artificial Sequence: Synthetic peptide
  Seed: CSLMQGSTLPRRSGA
CSLMYGSGLARRLGA

SEQ ID NO: 55922 - protein, 15 aa, Artificial Sequence
  Description of Artificial Sequence: Synthetic peptide
  Seed: CSLMQGSTLPRRSGA
CSLMYGSGLARRMGA

SEQ ID NO: 55923 - protein, 15 aa, Artificial Sequence
  Description of Artificial Sequence: Synthetic peptide
  Seed: CSLMQGSTLPRRSGA
CSLMYGSGLARRVGA

SEQ ID NO: 55924 - protein, 15 aa, Artificial Sequence
  Description of Artificial Sequence: Synthetic peptide
  Seed: CSLMQGSTLPRRSGA
CSLMYGSGLGRRIGA

SEQ ID NO: 55925 - protein, 15 aa, Artificial Sequence
  Description of Artificial Sequence: Synthetic peptide
  Seed: CSLMQGSTLPRRSGA
CSLMYGSGLGRRLGA

SEQ ID NO: 55926 - protein, 15 aa, Artificial Sequence
  Description of Artificial Sequence: Synthetic peptide
  Seed: CSLMQGSTLPRRSGA
CSLMYGSGLGRRVGA

SEQ ID NO: 55927 - protein, 15 aa, Artificial Sequence
  Description of Artificial Sequence: Synthetic peptide
  Seed: CSLMQGSTLPRRSGA
CSLMYGSGLNRRLGA

SEQ ID NO: 55928 - protein, 15 aa, Artificial Sequence
  Description of Artificial Sequence: Synthetic peptide
  Seed: CSLMQGSTLPRRSGA
CSLMYGSGLSRRIGA

SEQ ID NO: 55929 - protein, 15 aa, Artificial Sequence
  Description of Artificial Sequence: Synthetic peptide
  Seed: CSLMQGSTLPRRSGA
CSLMYGSGLSRRLGA

SEQ ID NO: 55930 - protein, 15 aa, Artificial Sequence
  Description of Artificial Sequence: Synthetic peptide
  Seed: CSLMQGSTLPRRSGA
CSLMYGSGLSRRVGA

SEQ ID NO: 55931 - protein, 15 aa, Artificial Sequence
  Description of Artificial Sequence: Synthetic peptide
  Seed: CSLMQGSTLPRRSGA
CSLMYGSGLTRRIGA

SEQ ID NO: 55932 - protein, 15 aa, Artificial Sequence
  Description of Artificial Sequence: Synthetic peptide
  Seed: CSLMQGSTLPRRSGA
CSLMYGSGLTRRLGA

SEQ ID NO: 55933 - protein, 15 aa, Artificial Sequence
  Description of Artificial Sequence: Synthetic peptide
  Seed: CSLMQGSTLPRRSGA
CSLMYGSGLTRRVGA

SEQ ID NO: 55934 - protein, 15 aa, Artificial Sequence
  Description of Artificial Sequence: Synthetic peptide
  Seed: CSLMQGSTLPRRSGA
CSLMYGSGLVRRAGA

SEQ ID NO: 55935 - protein, 15 aa, Artificial Sequence
  Description of Artificial Sequence: Synthetic peptide
  Seed: CSLMQGSTLPRRSGA
CSLMYGSGLVRRVGA

SEQ ID NO: 55936 - protein, 15 aa, Artificial Sequence
  Description of Artificial Sequence: Synthetic peptide
  Seed: CSLMQGSTLPRRSGA
CSLMYGSHLARRAGA

SEQ ID NO: 55937 - protein, 15 aa, Artificial Sequence
  Description of Artificial Sequence: Synthetic peptide
  Seed: CSLMQGSTLPRRSGA
CSLMYGSHLARRIGA

SEQ ID NO: 55938 - protein, 15 aa, Artificial Sequence
  Description of Artificial Sequence: Synthetic peptide
  Seed: CSLMQGSTLPRRSGA
CSLMYGSHLARRLGA

SEQ ID NO: 55939 - protein, 15 aa, Artificial Sequence
  Description of Artificial Sequence: Synthetic peptide
  Seed: CSLMQGSTLPRRSGA
CSLMYGSHLARRVGA

SEQ ID NO: 55940 - protein, 15 aa, Artificial Sequence
  Description of Artificial Sequence: Synthetic peptide
  Seed: CSLMQGSTLPRRSGA
CSLMYGSHLGRRIGA

SEQ ID NO: 55941 - protein, 15 aa, Artificial Sequence
  Description of Artificial Sequence: Synthetic peptide
  Seed: CSLMQGSTLPRRSGA
CSLMYGSHLGRRLGA

SEQ ID NO: 55942 - protein, 15 aa, Artificial Sequence
  Description of Artificial Sequence: Synthetic peptide
  Seed: CSLMQGSTLPRRSGA
CSLMYGSHLGRRVGA

SEQ ID NO: 55943 - protein, 15 aa, Artificial Sequence
  Description of Artificial Sequence: Synthetic peptide
  Seed: CSLMQGSTLPRRSGA
CSLMYGSHLSRRIGA

SEQ ID NO: 55944 - protein, 15 aa, Artificial Sequence
  Description of Artificial Sequence: Synthetic peptide
  Seed: CSLMQGSTLPRRSGA
CSLMYGSHLSRRLGA

SEQ ID NO: 55945 - protein, 15 aa, Artificial Sequence
  Description of Artificial Sequence: Synthetic peptide
  Seed: CSLMQGSTLPRRSGA
CSLMYGSHLSRRVGA

SEQ ID NO: 55946 - protein, 15 aa, Artificial Sequence
  Description of Artificial Sequence: Synthetic peptide
  Seed: CSLMQGSTLPRRSGA
CSLMYGSILARRAGA

SEQ ID NO: 55947 - protein, 15 aa, Artificial Sequence
  Description of Artificial Sequence: Synthetic peptide
  Seed: CSLMQGSTLPRRSGA
CSLMYGSILARRCGA

SEQ ID NO: 55948 - protein, 15 aa, Artificial Sequence
  Description of Artificial Sequence: Synthetic peptide
  Seed: CSLMQGSTLPRRSGA
CSLMYGSILARRFGA

SEQ ID NO: 55949 - protein, 15 aa, Artificial Sequence
  Description of Artificial Sequence: Synthetic peptide
  Seed: CSLMQGSTLPRRSGA
CSLMYGSILARRGGA

SEQ ID NO: 55950 - protein, 15 aa, Artificial Sequence
  Description of Artificial Sequence: Synthetic peptide
  Seed: CSLMQGSTLPRRSGA
CSLMYGSILARRIGA

SEQ ID NO: 55951 - protein, 15 aa, Artificial Sequence
  Description of Artificial Sequence: Synthetic peptide
  Seed: CSLMQGSTLPRRSGA
CSLMYGSILARRLGA

SEQ ID NO: 55952 - protein, 15 aa, Artificial Sequence
  Description of Artificial Sequence: Synthetic peptide
  Seed: CSLMQGSTLPRRSGA
CSLMYGSILARRMGA

SEQ ID NO: 55953 - protein, 15 aa, Artificial Sequence
  Description of Artificial Sequence: Synthetic peptide
  Seed: CSLMQGSTLPRRSGA
CSLMYGSILARRNGA

SEQ ID NO: 55954 - protein, 15 aa, Artificial Sequence
  Description of Artificial Sequence: Synthetic peptide
  Seed: CSLMQGSTLPRRSGA
CSLMYGSILARRPGA

SEQ ID NO: 55955 - protein, 15 aa, Artificial Sequence
  Description of Artificial Sequence: Synthetic peptide
  Seed: CSLMQGSTLPRRSGA
CSLMYGSILARRSGA

SEQ ID NO: 55956 - protein, 15 aa, Artificial Sequence
  Description of Artificial Sequence: Synthetic peptide
  Seed: CSLMQGSTLPRRSGA
CSLMYGSILARRTGA

SEQ ID NO: 55957 - protein, 15 aa, Artificial Sequence
  Description of Artificial Sequence: Synthetic peptide
  Seed: CSLMQGSTLPRRSGA
CSLMYGSILARRVGA

SEQ ID NO: 55958 - protein, 15 aa, Artificial Sequence
  Description of Artificial Sequence: Synthetic peptide
  Seed: CSLMQGSTLPRRSGA
CSLMYGSILARRWGA

SEQ ID NO: 55959 - protein, 15 aa, Artificial Sequence
  Description of Artificial Sequence: Synthetic peptide
  Seed: CSLMQGSTLPRRSGA
CSLMYGSILARRYGA

SEQ ID NO: 55960 - protein, 15 aa, Artificial Sequence
  Description of Artificial Sequence: Synthetic peptide
  Seed: CSLMQGSTLPRRSGA
CSLMYGSILGRRAGA

SEQ ID NO: 55961 - protein, 15 aa, Artificial Sequence
  Description of Artificial Sequence: Synthetic peptide
  Seed: CSLMQGSTLPRRSGA
CSLMYGSILGRRCGA

SEQ ID NO: 55962 - protein, 15 aa, Artificial Sequence
  Description of Artificial Sequence: Synthetic peptide
  Seed: CSLMQGSTLPRRSGA
CSLMYGSILGRRFGA

SEQ ID NO: 55963 - protein, 15 aa, Artificial Sequence
  Description of Artificial Sequence: Synthetic peptide
  Seed: CSLMQGSTLPRRSGA
CSLMYGSILGRRGGA

SEQ ID NO: 55964 - protein, 15 aa, Artificial Sequence
  Description of Artificial Sequence: Synthetic peptide
  Seed: CSLMQGSTLPRRSGA
CSLMYGSILGRRIGA

SEQ ID NO: 55965 - protein, 15 aa, Artificial Sequence
  Description of Artificial Sequence: Synthetic peptide
  Seed: CSLMQGSTLPRRSGA
CSLMYGSILGRRLGA

SEQ ID NO: 55966 - protein, 15 aa, Artificial Sequence
  Description of Artificial Sequence: Synthetic peptide
  Seed: CSLMQGSTLPRRSGA
CSLMYGSILGRRMGA

SEQ ID NO: 55967 - protein, 15 aa, Artificial Sequence
  Description of Artificial Sequence: Synthetic peptide
  Seed: CSLMQGSTLPRRSGA
CSLMYGSILGRRNGA

SEQ ID NO: 55968 - protein, 15 aa, Artificial Sequence
  Description of Artificial Sequence: Synthetic peptide
  Seed: CSLMQGSTLPRRSGA
CSLMYGSILGRRSGA

SEQ ID NO: 55969 - protein, 15 aa, Artificial Sequence
  Description of Artificial Sequence: Synthetic peptide
  Seed: CSLMQGSTLPRRSGA
CSLMYGSILGRRTGA

SEQ ID NO: 55970 - protein, 15 aa, Artificial Sequence
  Description of Artificial Sequence: Synthetic peptide
  Seed: CSLMQGSTLPRRSGA
CSLMYGSILGRRVGA

SEQ ID NO: 55971 - protein, 15 aa, Artificial Sequence
  Description of Artificial Sequence: Synthetic peptide
  Seed: CSLMQGSTLPRRSGA
CSLMYGSILIRRAGA

SEQ ID NO: 55972 - protein, 15 aa, Artificial Sequence
  Description of Artificial Sequence: Synthetic peptide
  Seed: CSLMQGSTLPRRSGA
CSLMYGSILIRRIGA

SEQ ID NO: 55973 - protein, 15 aa, Artificial Sequence
  Description of Artificial Sequence: Synthetic peptide
  Seed: CSLMQGSTLPRRSGA
CSLMYGSILIRRLGA

SEQ ID NO: 55974 - protein, 15 aa, Artificial Sequence
  Description of Artificial Sequence: Synthetic peptide
  Seed: CSLMQGSTLPRRSGA
CSLMYGSILIRRNGA

SEQ ID NO: 55975 - protein, 15 aa, Artificial Sequence
  Description of Artificial Sequence: Synthetic peptide
  Seed: CSLMQGSTLPRRSGA
CSLMYGSILIRRSGA

SEQ ID NO: 55976 - protein, 15 aa, Artificial Sequence
  Description of Artificial Sequence: Synthetic peptide
  Seed: CSLMQGSTLPRRSGA
CSLMYGSILIRRVGA

SEQ ID NO: 55977 - protein, 15 aa, Artificial Sequence
  Description of Artificial Sequence: Synthetic peptide
  Seed: CSLMQGSTLPRRSGA
CSLMYGSILMRRVGA

SEQ ID NO: 55978 - protein, 15 aa, Artificial Sequence
  Description of Artificial Sequence: Synthetic peptide
  Seed: CSLMQGSTLPRRSGA
CSLMYGSILNRRAGA

SEQ ID NO: 55979 - protein, 15 aa, Artificial Sequence
  Description of Artificial Sequence: Synthetic peptide
  Seed: CSLMQGSTLPRRSGA
CSLMYGSILNRRIGA

SEQ ID NO: 55980 - protein, 15 aa, Artificial Sequence
  Description of Artificial Sequence: Synthetic peptide
  Seed: CSLMQGSTLPRRSGA
CSLMYGSILNRRLGA

SEQ ID NO: 55981 - protein, 15 aa, Artificial Sequence
  Description of Artificial Sequence: Synthetic peptide
  Seed: CSLMQGSTLPRRSGA
CSLMYGSILNRRMGA

SEQ ID NO: 55982 - protein, 15 aa, Artificial Sequence
  Description of Artificial Sequence: Synthetic peptide
  Seed: CSLMQGSTLPRRSGA
CSLMYGSILNRRSGA

SEQ ID NO: 55983 - protein, 15 aa, Artificial Sequence
  Description of Artificial Sequence: Synthetic peptide
  Seed: CSLMQGSTLPRRSGA
CSLMYGSILNRRTGA

SEQ ID NO: 55984 - protein, 15 aa, Artificial Sequence
  Description of Artificial Sequence: Synthetic peptide
  Seed: CSLMQGSTLPRRSGA
CSLMYGSILNRRVGA

SEQ ID NO: 55985 - protein, 15 aa, Artificial Sequence
  Description of Artificial Sequence: Synthetic peptide
  Seed: CSLMQGSTLPRRSGA
CSLMYGSILPRRAGA

SEQ ID NO: 55986 - protein, 15 aa, Artificial Sequence
  Description of Artificial Sequence: Synthetic peptide
  Seed: CSLMQGSTLPRRSGA
CSLMYGSILPRRFGA

SEQ ID NO: 55987 - protein, 15 aa, Artificial Sequence
  Description of Artificial Sequence: Synthetic peptide
  Seed: CSLMQGSTLPRRSGA
CSLMYGSILPRRIGA

SEQ ID NO: 55988 - protein, 15 aa, Artificial Sequence
  Description of Artificial Sequence: Synthetic peptide
  Seed: CSLMQGSTLPRRSGA
CSLMYGSILPRRLGA

SEQ ID NO: 55989 - protein, 15 aa, Artificial Sequence
  Description of Artificial Sequence: Synthetic peptide
  Seed: CSLMQGSTLPRRSGA
CSLMYGSILPRRMGA

SEQ ID NO: 55990 - protein, 15 aa, Artificial Sequence
  Description of Artificial Sequence: Synthetic peptide
  Seed: CSLMQGSTLPRRSGA
CSLMYGSILPRRNGA

SEQ ID NO: 55991 - protein, 15 aa, Artificial Sequence
  Description of Artificial Sequence: Synthetic peptide
  Seed: CSLMQGSTLPRRSGA
CSLMYGSILPRRSGA

SEQ ID NO: 55992 - protein, 15 aa, Artificial Sequence
  Description of Artificial Sequence: Synthetic peptide
  Seed: CSLMQGSTLPRRSGA
CSLMYGSILPRRTGA

SEQ ID NO: 55993 - protein, 15 aa, Artificial Sequence
  Description of Artificial Sequence: Synthetic peptide
  Seed: CSLMQGSTLPRRSGA
CSLMYGSILPRRVGA

SEQ ID NO: 55994 - protein, 15 aa, Artificial Sequence
  Description of Artificial Sequence: Synthetic peptide
  Seed: CSLMQGSTLPRRSGA
CSLMYGSILSRRAGA

SEQ ID NO: 55995 - protein, 15 aa, Artificial Sequence
  Description of Artificial Sequence: Synthetic peptide
  Seed: CSLMQGSTLPRRSGA
CSLMYGSILSRRCGA

SEQ ID NO: 55996 - protein, 15 aa, Artificial Sequence
  Description of Artificial Sequence: Synthetic peptide
  Seed: CSLMQGSTLPRRSGA
CSLMYGSILSRRFGA

SEQ ID NO: 55997 - protein, 15 aa, Artificial Sequence
  Description of Artificial Sequence: Synthetic peptide
  Seed: CSLMQGSTLPRRSGA
CSLMYGSILSRRGGA

SEQ ID NO: 55998 - protein, 15 aa, Artificial Sequence
  Description of Artificial Sequence: Synthetic peptide
  Seed: CSLMQGSTLPRRSGA
CSLMYGSILSRRIGA

SEQ ID NO: 55999 - protein, 15 aa, Artificial Sequence
  Description of Artificial Sequence: Synthetic peptide
  Seed: CSLMQGSTLPRRSGA
CSLMYGSILSRRLGA

SEQ ID NO: 56000 - protein, 15 aa, Artificial Sequence
  Description of Artificial Sequence: Synthetic peptide
  Seed: CSLMQGSTLPRRSGA
CSLMYGSILSRRMGA

SEQ ID NO: 56001 - protein, 15 aa, Artificial Sequence
  Description of Artificial Sequence: Synthetic peptide
  Seed: CSLMQGSTLPRRSGA
CSLMYGSILSRRNGA

SEQ ID NO: 56002 - protein, 15 aa, Artificial Sequence
  Description of Artificial Sequence: Synthetic peptide
  Seed: CSLMQGSTLPRRSGA
CSLMYGSILSRRSGA

SEQ ID NO: 56003 - protein, 15 aa, Artificial Sequence
  Description of Artificial Sequence: Synthetic peptide
  Seed: CSLMQGSTLPRRSGA
CSLMYGSILSRRTGA

SEQ ID NO: 56004 - protein, 15 aa, Artificial Sequence
  Description of Artificial Sequence: Synthetic peptide
  Seed: CSLMQGSTLPRRSGA
CSLMYGSILSRRVGA

SEQ ID NO: 56005 - protein, 15 aa, Artificial Sequence
  Description of Artificial Sequence: Synthetic peptide
  Seed: CSLMQGSTLPRRSGA
CSLMYGSILTRRAGA

SEQ ID NO: 56006 - protein, 15 aa, Artificial Sequence
  Description of Artificial Sequence: Synthetic peptide
  Seed: CSLMQGSTLPRRSGA
CSLMYGSILTRRIGA

SEQ ID NO: 56007 - protein, 15 aa, Artificial Sequence
  Description of Artificial Sequence: Synthetic peptide
  Seed: CSLMQGSTLPRRSGA
CSLMYGSILTRRLGA

SEQ ID NO: 56008 - protein, 15 aa, Artificial Sequence
  Description of Artificial Sequence: Synthetic peptide
  Seed: CSLMQGSTLPRRSGA
CSLMYGSILTRRMGA

SEQ ID NO: 56009 - protein, 15 aa, Artificial Sequence
  Description of Artificial Sequence: Synthetic peptide
  Seed: CSLMQGSTLPRRSGA
CSLMYGSILTRRNGA

SEQ ID NO: 56010 - protein, 15 aa, Artificial Sequence
  Description of Artificial Sequence: Synthetic peptide
  Seed: CSLMQGSTLPRRSGA
CSLMYGSILTRRSGA

SEQ ID NO: 56011 - protein, 15 aa, Artificial Sequence
  Description of Artificial Sequence: Synthetic peptide
  Seed: CSLMQGSTLPRRSGA
CSLMYGSILTRRTGA

SEQ ID NO: 56012 - protein, 15 aa, Artificial Sequence
  Description of Artificial Sequence: Synthetic peptide
  Seed: CSLMQGSTLPRRSGA
CSLMYGSILTRRVGA

SEQ ID NO: 56013 - protein, 15 aa, Artificial Sequence
  Description of Artificial Sequence: Synthetic peptide
  Seed: CSLMQGSTLPRRSGA
CSLMYGSILVRRAGA

SEQ ID NO: 56014 - protein, 15 aa, Artificial Sequence
  Description of Artificial Sequence: Synthetic peptide
  Seed: CSLMQGSTLPRRSGA
CSLMYGSILVRRIGA

SEQ ID NO: 56015 - protein, 15 aa, Artificial Sequence
  Description of Artificial Sequence: Synthetic peptide
  Seed: CSLMQGSTLPRRSGA
CSLMYGSILVRRLGA

SEQ ID NO: 56016 - protein, 15 aa, Artificial Sequence
  Description of Artificial Sequence: Synthetic peptide
  Seed: CSLMQGSTLPRRSGA
CSLMYGSILVRRMGA

SEQ ID NO: 56017 - protein, 15 aa, Artificial Sequence
  Description of Artificial Sequence: Synthetic peptide
  Seed: CSLMQGSTLPRRSGA
CSLMYGSILVRRNGA

SEQ ID NO: 56018 - protein, 15 aa, Artificial Sequence
  Description of Artificial Sequence: Synthetic peptide
  Seed: CSLMQGSTLPRRSGA
CSLMYGSILVRRSGA

SEQ ID NO: 56019 - protein, 15 aa, Artificial Sequence
  Description of Artificial Sequence: Synthetic peptide
  Seed: CSLMQGSTLPRRSGA
CSLMYGSILVRRTGA

SEQ ID NO: 56020 - protein, 15 aa, Artificial Sequence
  Description of Artificial Sequence: Synthetic peptide
  Seed: CSLMQGSTLPRRSGA
CSLMYGSILVRRVGA

SEQ ID NO: 56021 - protein, 15 aa, Artificial Sequence
  Description of Artificial Sequence: Synthetic peptide
  Seed: CSLMQGSTLPRRSGA
CSLMYGSKLARRLGA

SEQ ID NO: 56022 - protein, 15 aa, Artificial Sequence
  Description of Artificial Sequence: Synthetic peptide
  Seed: CSLMQGSTLPRRSGA
CSLMYGSLLARRAGA

SEQ ID NO: 56023 - protein, 15 aa, Artificial Sequence
  Description of Artificial Sequence: Synthetic peptide
  Seed: CSLMQGSTLPRRSGA
CSLMYGSLLARRCGA

SEQ ID NO: 56024 - protein, 15 aa, Artificial Sequence
  Description of Artificial Sequence: Synthetic peptide
  Seed: CSLMQGSTLPRRSGA
CSLMYGSLLARRDGA

SEQ ID NO: 56025 - protein, 15 aa, Artificial Sequence
  Description of Artificial Sequence: Synthetic peptide
  Seed: CSLMQGSTLPRRSGA
CSLMYGSLLARRFGA

SEQ ID NO: 56026 - protein, 15 aa, Artificial Sequence
  Description of Artificial Sequence: Synthetic peptide
  Seed: CSLMQGSTLPRRSGA
CSLMYGSLLARRGGA

SEQ ID NO: 56027 - protein, 15 aa, Artificial Sequence
  Description of Artificial Sequence: Synthetic peptide
  Seed: CSLMQGSTLPRRSGA
CSLMYGSLLARRHGA

SEQ ID NO: 56028 - protein, 15 aa, Artificial Sequence
  Description of Artificial Sequence: Synthetic peptide
  Seed: CSLMQGSTLPRRSGA
CSLMYGSLLARRIGA

SEQ ID NO: 56029 - protein, 15 aa, Artificial Sequence
  Description of Artificial Sequence: Synthetic peptide
  Seed: CSLMQGSTLPRRSGA
CSLMYGSLLARRLGA

SEQ ID NO: 56030 - protein, 15 aa, Artificial Sequence
  Description of Artificial Sequence: Synthetic peptide
  Seed: CSLMQGSTLPRRSGA
CSLMYGSLLARRMGA

SEQ ID NO: 56031 - protein, 15 aa, Artificial Sequence
  Description of Artificial Sequence: Synthetic peptide
  Seed: CSLMQGSTLPRRSGA
CSLMYGSLLARRNGA

SEQ ID NO: 56032 - protein, 15 aa, Artificial Sequence
  Description of Artificial Sequence: Synthetic peptide
  Seed: CSLMQGSTLPRRSGA
CSLMYGSLLARRPGA

SEQ ID NO: 56033 - protein, 15 aa, Artificial Sequence
  Description of Artificial Sequence: Synthetic peptide
  Seed: CSLMQGSTLPRRSGA
CSLMYGSLLARRQGA

SEQ ID NO: 56034 - protein, 15 aa, Artificial Sequence
  Description of Artificial Sequence: Synthetic peptide
  Seed: CSLMQGSTLPRRSGA
CSLMYGSLLARRSGA

SEQ ID NO: 56035 - protein, 15 aa, Artificial Sequence
  Description of Artificial Sequence: Synthetic peptide
  Seed: CSLMQGSTLPRRSGA
CSLMYGSLLARRTGA

SEQ ID NO: 56036 - protein, 15 aa, Artificial Sequence
  Description of Artificial Sequence: Synthetic peptide
  Seed: CSLMQGSTLPRRSGA
CSLMYGSLLARRVGA

SEQ ID NO: 56037 - protein, 15 aa, Artificial Sequence
  Description of Artificial Sequence: Synthetic peptide
  Seed: CSLMQGSTLPRRSGA
CSLMYGSLLARRWGA

SEQ ID NO: 56038 - protein, 15 aa, Artificial Sequence
  Description of Artificial Sequence: Synthetic peptide
  Seed: CSLMQGSTLPRRSGA
CSLMYGSLLARRYGA

SEQ ID NO: 56039 - protein, 15 aa, Artificial Sequence
  Description of Artificial Sequence: Synthetic peptide
  Seed: CSLMQGSTLPRRSGA
CSLMYGSLLCRRVGA

SEQ ID NO: 56040 - protein, 15 aa, Artificial Sequence
  Description of Artificial Sequence: Synthetic peptide
  Seed: CSLMQGSTLPRRSGA
CSLMYGSLLGRRAGA

SEQ ID NO: 56041 - protein, 15 aa, Artificial Sequence
  Description of Artificial Sequence: Synthetic peptide
  Seed: CSLMQGSTLPRRSGA
CSLMYGSLLGRRCGA

SEQ ID NO: 56042 - protein, 15 aa, Artificial Sequence
  Description of Artificial Sequence: Synthetic peptide
  Seed: CSLMQGSTLPRRSGA
CSLMYGSLLGRRFGA

SEQ ID NO: 56043 - protein, 15 aa, Artificial Sequence
  Description of Artificial Sequence: Synthetic peptide
  Seed: CSLMQGSTLPRRSGA
CSLMYGSLLGRRGGA

SEQ ID NO: 56044 - protein, 15 aa, Artificial Sequence
  Description of Artificial Sequence: Synthetic peptide
  Seed: CSLMQGSTLPRRSGA
CSLMYGSLLGRRIGA

SEQ ID NO: 56045 - protein, 15 aa, Artificial Sequence
  Description of Artificial Sequence: Synthetic peptide
  Seed: CSLMQGSTLPRRSGA
CSLMYGSLLGRRLGA

SEQ ID NO: 56046 - protein, 15 aa, Artificial Sequence
  Description of Artificial Sequence: Synthetic peptide
  Seed: CSLMQGSTLPRRSGA
CSLMYGSLLGRRMGA

SEQ ID NO: 56047 - protein, 15 aa, Artificial Sequence
  Description of Artificial Sequence: Synthetic peptide
  Seed: CSLMQGSTLPRRSGA
CSLMYGSLLGRRNGA

SEQ ID NO: 56048 - protein, 15 aa, Artificial Sequence
  Description of Artificial Sequence: Synthetic peptide
  Seed: CSLMQGSTLPRRSGA
CSLMYGSLLGRRPGA

SEQ ID NO: 56049 - protein, 15 aa, Artificial Sequence
  Description of Artificial Sequence: Synthetic peptide
  Seed: CSLMQGSTLPRRSGA
CSLMYGSLLGRRSGA

SEQ ID NO: 56050 - protein, 15 aa, Artificial Sequence
  Description of Artificial Sequence: Synthetic peptide
  Seed: CSLMQGSTLPRRSGA
CSLMYGSLLGRRTGA

SEQ ID NO: 56051 - protein, 15 aa, Artificial Sequence
  Description of Artificial Sequence: Synthetic peptide
  Seed: CSLMQGSTLPRRSGA
CSLMYGSLLGRRVGA

SEQ ID NO: 56052 - protein, 15 aa, Artificial Sequence
  Description of Artificial Sequence: Synthetic peptide
  Seed: CSLMQGSTLPRRSGA
CSLMYGSLLGRRWGA

SEQ ID NO: 56053 - protein, 15 aa, Artificial Sequence
  Description of Artificial Sequence: Synthetic peptide
  Seed: CSLMQGSTLPRRSGA
CSLMYGSLLGRRYGA

SEQ ID NO: 56054 - protein, 15 aa, Artificial Sequence
  Description of Artificial Sequence: Synthetic peptide
  Seed: CSLMQGSTLPRRSGA
CSLMYGSLLHRRIGA

SEQ ID NO: 56055 - protein, 15 aa, Artificial Sequence
  Description of Artificial Sequence: Synthetic peptide
  Seed: CSLMQGSTLPRRSGA
CSLMYGSLLHRRLGA

SEQ ID NO: 56056 - protein, 15 aa, Artificial Sequence
  Description of Artificial Sequence: Synthetic peptide
  Seed: CSLMQGSTLPRRSGA
CSLMYGSLLHRRVGA

SEQ ID NO: 56057 - protein, 15 aa, Artificial Sequence
  Description of Artificial Sequence: Synthetic peptide
  Seed: CSLMQGSTLPRRSGA
CSLMYGSLLIRRAGA

SEQ ID NO: 56058 - protein, 15 aa, Artificial Sequence
  Description of Artificial Sequence: Synthetic peptide
  Seed: CSLMQGSTLPRRSGA
CSLMYGSLLIRRIGA

SEQ ID NO: 56059 - protein, 15 aa, Artificial Sequence
  Description of Artificial Sequence: Synthetic peptide
  Seed: CSLMQGSTLPRRSGA
CSLMYGSLLIRRLGA

SEQ ID NO: 56060 - protein, 15 aa, Artificial Sequence
  Description of Artificial Sequence: Synthetic peptide
  Seed: CSLMQGSTLPRRSGA
CSLMYGSLLIRRMGA

SEQ ID NO: 56061 - protein, 15 aa, Artificial Sequence
  Description of Artificial Sequence: Synthetic peptide
  Seed: CSLMQGSTLPRRSGA
CSLMYGSLLIRRNGA

SEQ ID NO: 56062 - protein, 15 aa, Artificial Sequence
  Description of Artificial Sequence: Synthetic peptide
  Seed: CSLMQGSTLPRRSGA
CSLMYGSLLIRRSGA

SEQ ID NO: 56063 - protein, 15 aa, Artificial Sequence
  Description of Artificial Sequence: Synthetic peptide
  Seed: CSLMQGSTLPRRSGA
CSLMYGSLLIRRTGA

SEQ ID NO: 56064 - protein, 15 aa, Artificial Sequence
  Description of Artificial Sequence: Synthetic peptide
  Seed: CSLMQGSTLPRRSGA
CSLMYGSLLIRRVGA

SEQ ID NO: 56065 - protein, 15 aa, Artificial Sequence
  Description of Artificial Sequence: Synthetic peptide
  Seed: CSLMQGSTLPRRSGA
CSLMYGSLLLRRVGA

SEQ ID NO: 56066 - protein, 15 aa, Artificial Sequence
  Description of Artificial Sequence: Synthetic peptide
  Seed: CSLMQGSTLPRRSGA
CSLMYGSLLMRRIGA

SEQ ID NO: 56067 - protein, 15 aa, Artificial Sequence
  Description of Artificial Sequence: Synthetic peptide
  Seed: CSLMQGSTLPRRSGA
CSLMYGSLLMRRLGA

SEQ ID NO: 56068 - protein, 15 aa, Artificial Sequence
  Description of Artificial Sequence: Synthetic peptide
  Seed: CSLMQGSTLPRRSGA
CSLMYGSLLMRRVGA

SEQ ID NO: 56069 - protein, 15 aa, Artificial Sequence
  Description of Artificial Sequence: Synthetic peptide
  Seed: CSLMQGSTLPRRSGA
CSLMYGSLLNRRAGA

SEQ ID NO: 56070 - protein, 15 aa, Artificial Sequence
  Description of Artificial Sequence: Synthetic peptide
  Seed: CSLMQGSTLPRRSGA
CSLMYGSLLNRRCGA

SEQ ID NO: 56071 - protein, 15 aa, Artificial Sequence
  Description of Artificial Sequence: Synthetic peptide
  Seed: CSLMQGSTLPRRSGA
CSLMYGSLLNRRFGA

SEQ ID NO: 56072 - protein, 15 aa, Artificial Sequence
  Description of Artificial Sequence: Synthetic peptide
  Seed: CSLMQGSTLPRRSGA
CSLMYGSLLNRRGGA

SEQ ID NO: 56073 - protein, 15 aa, Artificial Sequence
  Description of Artificial Sequence: Synthetic peptide
  Seed: CSLMQGSTLPRRSGA
CSLMYGSLLNRRIGA

SEQ ID NO: 56074 - protein, 15 aa, Artificial Sequence
  Description of Artificial Sequence: Synthetic peptide
  Seed: CSLMQGSTLPRRSGA
CSLMYGSLLNRRLGA

SEQ ID NO: 56075 - protein, 15 aa, Artificial Sequence
  Description of Artificial Sequence: Synthetic peptide
  Seed: CSLMQGSTLPRRSGA
CSLMYGSLLNRRMGA

SEQ ID NO: 56076 - protein, 15 aa, Artificial Sequence
  Description of Artificial Sequence: Synthetic peptide
  Seed: CSLMQGSTLPRRSGA
CSLMYGSLLNRRNGA

SEQ ID NO: 56077 - protein, 15 aa, Artificial Sequence
  Description of Artificial Sequence: Synthetic peptide
  Seed: CSLMQGSTLPRRSGA
CSLMYGSLLNRRSGA

SEQ ID NO: 56078 - protein, 15 aa, Artificial Sequence
  Description of Artificial Sequence: Synthetic peptide
  Seed: CSLMQGSTLPRRSGA
CSLMYGSLLNRRTGA

SEQ ID NO: 56079 - protein, 15 aa, Artificial Sequence
  Description of Artificial Sequence: Synthetic peptide
  Seed: CSLMQGSTLPRRSGA
CSLMYGSLLNRRVGA

SEQ ID NO: 56080 - protein, 15 aa, Artificial Sequence
  Description of Artificial Sequence: Synthetic peptide
  Seed: CSLMQGSTLPRRSGA
CSLMYGSLLPRRAGA

SEQ ID NO: 56081 - protein, 15 aa, Artificial Sequence
  Description of Artificial Sequence: Synthetic peptide
  Seed: CSLMQGSTLPRRSGA
CSLMYGSLLPRRCGA

SEQ ID NO: 56082 - protein, 15 aa, Artificial Sequence
  Description of Artificial Sequence: Synthetic peptide
  Seed: CSLMQGSTLPRRSGA
CSLMYGSLLPRRFGA

SEQ ID NO: 56083 - protein, 15 aa, Artificial Sequence
  Description of Artificial Sequence: Synthetic peptide
  Seed: CSLMQGSTLPRRSGA
CSLMYGSLLPRRGGA

SEQ ID NO: 56084 - protein, 15 aa, Artificial Sequence
  Description of Artificial Sequence: Synthetic peptide
  Seed: CSLMQGSTLPRRSGA
CSLMYGSLLPRRIGA

SEQ ID NO: 56085 - protein, 15 aa, Artificial Sequence
  Description of Artificial Sequence: Synthetic peptide
  Seed: CSLMQGSTLPRRSGA
CSLMYGSLLPRRLGA

SEQ ID NO: 56086 - protein, 15 aa, Artificial Sequence
  Description of Artificial Sequence: Synthetic peptide
  Seed: CSLMQGSTLPRRSGA
CSLMYGSLLPRRMGA

SEQ ID NO: 56087 - protein, 15 aa, Artificial Sequence
  Description of Artificial Sequence: Synthetic peptide
  Seed: CSLMQGSTLPRRSGA
CSLMYGSLLPRRNGA

SEQ ID NO: 56088 - protein, 15 aa, Artificial Sequence
  Description of Artificial Sequence: Synthetic peptide
  Seed: CSLMQGSTLPRRSGA
CSLMYGSLLPRRSGA

SEQ ID NO: 56089 - protein, 15 aa, Artificial Sequence
  Description of Artificial Sequence: Synthetic peptide
  Seed: CSLMQGSTLPRRSGA
CSLMYGSLLPRRTGA

SEQ ID NO: 56090 - protein, 15 aa, Artificial Sequence
  Description of Artificial Sequence: Synthetic peptide
  Seed: CSLMQGSTLPRRSGA
CSLMYGSLLPRRVGA

SEQ ID NO: 56091 - protein, 15 aa, Artificial Sequence
  Description of Artificial Sequence: Synthetic peptide
  Seed: CSLMQGSTLPRRSGA
CSLMYGSLLQRRIGA

SEQ ID NO: 56092 - protein, 15 aa, Artificial Sequence
  Description of Artificial Sequence: Synthetic peptide
  Seed: CSLMQGSTLPRRSGA
CSLMYGSLLQRRLGA

SEQ ID NO: 56093 - protein, 15 aa, Artificial Sequence
  Description of Artificial Sequence: Synthetic peptide
  Seed: CSLMQGSTLPRRSGA
CSLMYGSLLQRRVGA

SEQ ID NO: 56094 - protein, 15 aa, Artificial Sequence
  Description of Artificial Sequence: Synthetic peptide
  Seed: CSLMQGSTLPRRSGA
CSLMYGSLLSRRAGA

SEQ ID NO: 56095 - protein, 15 aa, Artificial Sequence
  Description of Artificial Sequence: Synthetic peptide
  Seed: CSLMQGSTLPRRSGA
CSLMYGSLLSRRCGA

SEQ ID NO: 56096 - protein, 15 aa, Artificial Sequence
  Description of Artificial Sequence: Synthetic peptide
  Seed: CSLMQGSTLPRRSGA
CSLMYGSLLSRRFGA

SEQ ID NO: 56097 - protein, 15 aa, Artificial Sequence
  Description of Artificial Sequence: Synthetic peptide
  Seed: CSLMQGSTLPRRSGA
CSLMYGSLLSRRGGA

SEQ ID NO: 56098 - protein, 15 aa, Artificial Sequence
  Description of Artificial Sequence: Synthetic peptide
  Seed: CSLMQGSTLPRRSGA
CSLMYGSLLSRRIGA

SEQ ID NO: 56099 - protein, 15 aa, Artificial Sequence
  Description of Artificial Sequence: Synthetic peptide
  Seed: CSLMQGSTLPRRSGA
CSLMYGSLLSRRLGA

SEQ ID NO: 56100 - protein, 15 aa, Artificial Sequence
  Description of Artificial Sequence: Synthetic peptide
  Seed: CSLMQGSTLPRRSGA
CSLMYGSLLSRRMGA

SEQ ID NO: 56101 - protein, 15 aa, Artificial Sequence
  Description of Artificial Sequence: Synthetic peptide
  Seed: CSLMQGSTLPRRSGA
CSLMYGSLLSRRNGA

SEQ ID NO: 56102 - protein, 15 aa, Artificial Sequence
  Description of Artificial Sequence: Synthetic peptide
  Seed: CSLMQGSTLPRRSGA
CSLMYGSLLSRRPGA

SEQ ID NO: 56103 - protein, 15 aa, Artificial Sequence
  Description of Artificial Sequence: Synthetic peptide
  Seed: CSLMQGSTLPRRSGA
CSLMYGSLLSRRSGA

SEQ ID NO: 56104 - protein, 15 aa, Artificial Sequence
  Description of Artificial Sequence: Synthetic peptide
  Seed: CSLMQGSTLPRRSGA
CSLMYGSLLSRRTGA

SEQ ID NO: 56105 - protein, 15 aa, Artificial Sequence
  Description of Artificial Sequence: Synthetic peptide
  Seed: CSLMQGSTLPRRSGA
CSLMYGSLLSRRVGA

SEQ ID NO: 56106 - protein, 15 aa, Artificial Sequence
  Description of Artificial Sequence: Synthetic peptide
  Seed: CSLMQGSTLPRRSGA
CSLMYGSLLSRRWGA

SEQ ID NO: 56107 - protein, 15 aa, Artificial Sequence
  Description of Artificial Sequence: Synthetic peptide
  Seed: CSLMQGSTLPRRSGA
CSLMYGSLLSRRYGA

SEQ ID NO: 56108 - protein, 15 aa, Artificial Sequence
  Description of Artificial Sequence: Synthetic peptide
  Seed: CSLMQGSTLPRRSGA
CSLMYGSLLTRRAGA

SEQ ID NO: 56109 - protein, 15 aa, Artificial Sequence
  Description of Artificial Sequence: Synthetic peptide
  Seed: CSLMQGSTLPRRSGA
CSLMYGSLLTRRCGA

SEQ ID NO: 56110 - protein, 15 aa, Artificial Sequence
  Description of Artificial Sequence: Synthetic peptide
  Seed: CSLMQGSTLPRRSGA
CSLMYGSLLTRRFGA

SEQ ID NO: 56111 - protein, 15 aa, Artificial Sequence
  Description of Artificial Sequence: Synthetic peptide
  Seed: CSLMQGSTLPRRSGA
CSLMYGSLLTRRGGA

SEQ ID NO: 56112 - protein, 15 aa, Artificial Sequence
  Description of Artificial Sequence: Synthetic peptide
  Seed: CSLMQGSTLPRRSGA
CSLMYGSLLTRRIGA

SEQ ID NO: 56113 - protein, 15 aa, Artificial Sequence
  Description of Artificial Sequence: Synthetic peptide
  Seed: CSLMQGSTLPRRSGA
CSLMYGSLLTRRLGA

SEQ ID NO: 56114 - protein, 15 aa, Artificial Sequence
  Description of Artificial Sequence: Synthetic peptide
  Seed: CSLMQGSTLPRRSGA
CSLMYGSLLTRRMGA

SEQ ID NO: 56115 - protein, 15 aa, Artificial Sequence
  Description of Artificial Sequence: Synthetic peptide
  Seed: CSLMQGSTLPRRSGA
CSLMYGSLLTRRNGA

SEQ ID NO: 56116 - protein, 15 aa, Artificial Sequence
  Description of Artificial Sequence: Synthetic peptide
  Seed: CSLMQGSTLPRRSGA
CSLMYGSLLTRRSGA

SEQ ID NO: 56117 - protein, 15 aa, Artificial Sequence
  Description of Artificial Sequence: Synthetic peptide
  Seed: CSLMQGSTLPRRSGA
CSLMYGSLLTRRTGA

SEQ ID NO: 56118 - protein, 15 aa, Artificial Sequence
  Description of Artificial Sequence: Synthetic peptide
  Seed: CSLMQGSTLPRRSGA
CSLMYGSLLTRRVGA

SEQ ID NO: 56119 - protein, 15 aa, Artificial Sequence
  Description of Artificial Sequence: Synthetic peptide
  Seed: CSLMQGSTLPRRSGA
CSLMYGSLLVRRAGA

SEQ ID NO: 56120 - protein, 15 aa, Artificial Sequence
  Description of Artificial Sequence: Synthetic peptide
  Seed: CSLMQGSTLPRRSGA
CSLMYGSLLVRRFGA

SEQ ID NO: 56121 - protein, 15 aa, Artificial Sequence
  Description of Artificial Sequence: Synthetic peptide
  Seed: CSLMQGSTLPRRSGA
CSLMYGSLLVRRGGA

SEQ ID NO: 56122 - protein, 15 aa, Artificial Sequence
  Description of Artificial Sequence: Synthetic peptide
  Seed: CSLMQGSTLPRRSGA
CSLMYGSLLVRRIGA

SEQ ID NO: 56123 - protein, 15 aa, Artificial Sequence
  Description of Artificial Sequence: Synthetic peptide
  Seed: CSLMQGSTLPRRSGA
CSLMYGSLLVRRLGA

SEQ ID NO: 56124 - protein, 15 aa, Artificial Sequence
  Description of Artificial Sequence: Synthetic peptide
  Seed: CSLMQGSTLPRRSGA
CSLMYGSLLVRRMGA

SEQ ID NO: 56125 - protein, 15 aa, Artificial Sequence
  Description of Artificial Sequence: Synthetic peptide
  Seed: CSLMQGSTLPRRSGA
CSLMYGSLLVRRNGA

SEQ ID NO: 56126 - protein, 15 aa, Artificial Sequence
  Description of Artificial Sequence: Synthetic peptide
  Seed: CSLMQGSTLPRRSGA
CSLMYGSLLVRRSGA

SEQ ID NO: 56127 - protein, 15 aa, Artificial Sequence
  Description of Artificial Sequence: Synthetic peptide
  Seed: CSLMQGSTLPRRSGA
CSLMYGSLLVRRTGA

SEQ ID NO: 56128 - protein, 15 aa, Artificial Sequence
  Description of Artificial Sequence: Synthetic peptide
  Seed: CSLMQGSTLPRRSGA
CSLMYGSLLVRRVGA

SEQ ID NO: 56129 - protein, 15 aa, Artificial Sequence
  Description of Artificial Sequence: Synthetic peptide
  Seed: CSLMQGSTLPRRSGA
CSLMYGSMLARRAGA

SEQ ID NO: 56130 - protein, 15 aa, Artificial Sequence
  Description of Artificial Sequence: Synthetic peptide
  Seed: CSLMQGSTLPRRSGA
CSLMYGSMLARRCGA

SEQ ID NO: 56131 - protein, 15 aa, Artificial Sequence
  Description of Artificial Sequence: Synthetic peptide
  Seed: CSLMQGSTLPRRSGA
CSLMYGSMLARRDGA

SEQ ID NO: 56132 - protein, 15 aa, Artificial Sequence
  Description of Artificial Sequence: Synthetic peptide
  Seed: CSLMQGSTLPRRSGA
CSLMYGSMLARREGA

SEQ ID NO: 56133 - protein, 15 aa, Artificial Sequence
  Description of Artificial Sequence: Synthetic peptide
  Seed: CSLMQGSTLPRRSGA
CSLMYGSMLARRFGA

SEQ ID NO: 56134 - protein, 15 aa, Artificial Sequence
  Description of Artificial Sequence: Synthetic peptide
  Seed: CSLMQGSTLPRRSGA
CSLMYGSMLARRGGA

SEQ ID NO: 56135 - protein, 15 aa, Artificial Sequence
  Description of Artificial Sequence: Synthetic peptide
  Seed: CSLMQGSTLPRRSGA
CSLMYGSMLARRHGA

SEQ ID NO: 56136 - protein, 15 aa, Artificial Sequence
  Description of Artificial Sequence: Synthetic peptide
  Seed: CSLMQGSTLPRRSGA
CSLMYGSMLARRIGA

SEQ ID NO: 56137 - protein, 15 aa, Artificial Sequence
  Description of Artificial Sequence: Synthetic peptide
  Seed: CSLMQGSTLPRRSGA
CSLMYGSMLARRLGA

SEQ ID NO: 56138 - protein, 15 aa, Artificial Sequence
  Description of Artificial Sequence: Synthetic peptide
  Seed: CSLMQGSTLPRRSGA
CSLMYGSMLARRMGA

SEQ ID NO: 56139 - protein, 15 aa, Artificial Sequence
  Description of Artificial Sequence: Synthetic peptide
  Seed: CSLMQGSTLPRRSGA
CSLMYGSMLARRNGA

SEQ ID NO: 56140 - protein, 15 aa, Artificial Sequence
  Description of Artificial Sequence: Synthetic peptide
  Seed: CSLMQGSTLPRRSGA
CSLMYGSMLARRPGA

SEQ ID NO: 56141 - protein, 15 aa, Artificial Sequence
  Description of Artificial Sequence: Synthetic peptide
  Seed: CSLMQGSTLPRRSGA
CSLMYGSMLARRQGA

SEQ ID NO: 56142 - protein, 15 aa, Artificial Sequence
  Description of Artificial Sequence: Synthetic peptide
  Seed: CSLMQGSTLPRRSGA
CSLMYGSMLARRRGA

SEQ ID NO: 56143 - protein, 15 aa, Artificial Sequence
  Description of Artificial Sequence: Synthetic peptide
  Seed: CSLMQGSTLPRRSGA
CSLMYGSMLARRSGA

SEQ ID NO: 56144 - protein, 15 aa, Artificial Sequence
  Description of Artificial Sequence: Synthetic peptide
  Seed: CSLMQGSTLPRRSGA
CSLMYGSMLARRTGA

SEQ ID NO: 56145 - protein, 15 aa, Artificial Sequence
  Description of Artificial Sequence: Synthetic peptide
  Seed: CSLMQGSTLPRRSGA
CSLMYGSMLARRVGA

SEQ ID NO: 56146 - protein, 15 aa, Artificial Sequence
  Description of Artificial Sequence: Synthetic peptide
  Seed: CSLMQGSTLPRRSGA
CSLMYGSMLARRWGA

SEQ ID NO: 56147 - protein, 15 aa, Artificial Sequence
  Description of Artificial Sequence: Synthetic peptide
  Seed: CSLMQGSTLPRRSGA
CSLMYGSMLARRYGA

SEQ ID NO: 56148 - protein, 15 aa, Artificial Sequence
  Description of Artificial Sequence: Synthetic peptide
  Seed: CSLMQGSTLPRRSGA
CSLMYGSMLCRRVGA

SEQ ID NO: 56149 - protein, 15 aa, Artificial Sequence
  Description of Artificial Sequence: Synthetic peptide
  Seed: CSLMQGSTLPRRSGA
CSLMYGSMLGRRAGA

SEQ ID NO: 56150 - protein, 15 aa, Artificial Sequence
  Description of Artificial Sequence: Synthetic peptide
  Seed: CSLMQGSTLPRRSGA
CSLMYGSMLGRRCGA

SEQ ID NO: 56151 - protein, 15 aa, Artificial Sequence
  Description of Artificial Sequence: Synthetic peptide
  Seed: CSLMQGSTLPRRSGA
CSLMYGSMLGRRFGA

SEQ ID NO: 56152 - protein, 15 aa, Artificial Sequence
  Description of Artificial Sequence: Synthetic peptide
  Seed: CSLMQGSTLPRRSGA
CSLMYGSMLGRRGGA

SEQ ID NO: 56153 - protein, 15 aa, Artificial Sequence
  Description of Artificial Sequence: Synthetic peptide
  Seed: CSLMQGSTLPRRSGA
CSLMYGSMLGRRIGA

SEQ ID NO: 56154 - protein, 15 aa, Artificial Sequence
  Description of Artificial Sequence: Synthetic peptide
  Seed: CSLMQGSTLPRRSGA
CSLMYGSMLGRRLGA

SEQ ID NO: 56155 - protein, 15 aa, Artificial Sequence
  Description of Artificial Sequence: Synthetic peptide
  Seed: CSLMQGSTLPRRSGA
CSLMYGSMLGRRMGA

SEQ ID NO: 56156 - protein, 15 aa, Artificial Sequence
  Description of Artificial Sequence: Synthetic peptide
  Seed: CSLMQGSTLPRRSGA
CSLMYGSMLGRRNGA

SEQ ID NO: 56157 - protein, 15 aa, Artificial Sequence
  Description of Artificial Sequence: Synthetic peptide
  Seed: CSLMQGSTLPRRSGA
CSLMYGSMLGRRPGA

SEQ ID NO: 56158 - protein, 15 aa, Artificial Sequence
  Description of Artificial Sequence: Synthetic peptide
  Seed: CSLMQGSTLPRRSGA
CSLMYGSMLGRRSGA

SEQ ID NO: 56159 - protein, 15 aa, Artificial Sequence
  Description of Artificial Sequence: Synthetic peptide
  Seed: CSLMQGSTLPRRSGA
CSLMYGSMLGRRTGA

SEQ ID NO: 56160 - protein, 15 aa, Artificial Sequence
  Description of Artificial Sequence: Synthetic peptide
  Seed: CSLMQGSTLPRRSGA
CSLMYGSMLGRRVGA

SEQ ID NO: 56161 - protein, 15 aa, Artificial Sequence
  Description of Artificial Sequence: Synthetic peptide
  Seed: CSLMQGSTLPRRSGA
CSLMYGSMLGRRWGA

SEQ ID NO: 56162 - protein, 15 aa, Artificial Sequence
  Description of Artificial Sequence: Synthetic peptide
  Seed: CSLMQGSTLPRRSGA
CSLMYGSMLGRRYGA

SEQ ID NO: 56163 - protein, 15 aa, Artificial Sequence
  Description of Artificial Sequence: Synthetic peptide
  Seed: CSLMQGSTLPRRSGA
CSLMYGSMLHRRIGA

SEQ ID NO: 56164 - protein, 15 aa, Artificial Sequence
  Description of Artificial Sequence: Synthetic peptide
  Seed: CSLMQGSTLPRRSGA
CSLMYGSMLHRRLGA

SEQ ID NO: 56165 - protein, 15 aa, Artificial Sequence
  Description of Artificial Sequence: Synthetic peptide
  Seed: CSLMQGSTLPRRSGA
CSLMYGSMLHRRVGA

SEQ ID NO: 56166 - protein, 15 aa, Artificial Sequence
  Description of Artificial Sequence: Synthetic peptide
  Seed: CSLMQGSTLPRRSGA
CSLMYGSMLIRRAGA

SEQ ID NO: 56167 - protein, 15 aa, Artificial Sequence
  Description of Artificial Sequence: Synthetic peptide
  Seed: CSLMQGSTLPRRSGA
CSLMYGSMLIRRIGA

SEQ ID NO: 56168 - protein, 15 aa, Artificial Sequence
  Description of Artificial Sequence: Synthetic peptide
  Seed: CSLMQGSTLPRRSGA
CSLMYGSMLIRRLGA

SEQ ID NO: 56169 - protein, 15 aa, Artificial Sequence
  Description of Artificial Sequence: Synthetic peptide
  Seed: CSLMQGSTLPRRSGA
CSLMYGSMLIRRMGA

SEQ ID NO: 56170 - protein, 15 aa, Artificial Sequence
  Description of Artificial Sequence: Synthetic peptide
  Seed: CSLMQGSTLPRRSGA
CSLMYGSMLIRRNGA

SEQ ID NO: 56171 - protein, 15 aa, Artificial Sequence
  Description of Artificial Sequence: Synthetic peptide
  Seed: CSLMQGSTLPRRSGA
CSLMYGSMLIRRSGA

SEQ ID NO: 56172 - protein, 15 aa, Artificial Sequence
  Description of Artificial Sequence: Synthetic peptide
  Seed: CSLMQGSTLPRRSGA
CSLMYGSMLIRRTGA

SEQ ID NO: 56173 - protein, 15 aa, Artificial Sequence
  Description of Artificial Sequence: Synthetic peptide
  Seed: CSLMQGSTLPRRSGA
CSLMYGSMLIRRVGA

SEQ ID NO: 56174 - protein, 15 aa, Artificial Sequence
  Description of Artificial Sequence: Synthetic peptide
  Seed: CSLMQGSTLPRRSGA
CSLMYGSMLLRRAGA

SEQ ID NO: 56175 - protein, 15 aa, Artificial Sequence
  Description of Artificial Sequence: Synthetic peptide
  Seed: CSLMQGSTLPRRSGA
CSLMYGSMLLRRIGA

SEQ ID NO: 56176 - protein, 15 aa, Artificial Sequence
  Description of Artificial Sequence: Synthetic peptide
  Seed: CSLMQGSTLPRRSGA
CSLMYGSMLLRRLGA

SEQ ID NO: 56177 - protein, 15 aa, Artificial Sequence
  Description of Artificial Sequence: Synthetic peptide
  Seed: CSLMQGSTLPRRSGA
CSLMYGSMLLRRVGA

SEQ ID NO: 56178 - protein, 15 aa, Artificial Sequence
  Description of Artificial Sequence: Synthetic peptide
  Seed: CSLMQGSTLPRRSGA
CSLMYGSMLMRRAGA

SEQ ID NO: 56179 - protein, 15 aa, Artificial Sequence
  Description of Artificial Sequence: Synthetic peptide
  Seed: CSLMQGSTLPRRSGA
CSLMYGSMLMRRIGA

SEQ ID NO: 56180 - protein, 15 aa, Artificial Sequence
  Description of Artificial Sequence: Synthetic peptide
  Seed: CSLMQGSTLPRRSGA
CSLMYGSMLMRRLGA

SEQ ID NO: 56181 - protein, 15 aa, Artificial Sequence
  Description of Artificial Sequence: Synthetic peptide
  Seed: CSLMQGSTLPRRSGA
CSLMYGSMLMRRVGA

SEQ ID NO: 56182 - protein, 15 aa, Artificial Sequence
  Description of Artificial Sequence: Synthetic peptide
  Seed: CSLMQGSTLPRRSGA
CSLMYGSMLNRRAGA

SEQ ID NO: 56183 - protein, 15 aa, Artificial Sequence
  Description of Artificial Sequence: Synthetic peptide
  Seed: CSLMQGSTLPRRSGA
CSLMYGSMLNRRFGA

SEQ ID NO: 56184 - protein, 15 aa, Artificial Sequence
  Description of Artificial Sequence: Synthetic peptide
  Seed: CSLMQGSTLPRRSGA
CSLMYGSMLNRRIGA

SEQ ID NO: 56185 - protein, 15 aa, Artificial Sequence
  Description of Artificial Sequence: Synthetic peptide
  Seed: CSLMQGSTLPRRSGA
CSLMYGSMLNRRLGA

SEQ ID NO: 56186 - protein, 15 aa, Artificial Sequence
  Description of Artificial Sequence: Synthetic peptide
  Seed: CSLMQGSTLPRRSGA
CSLMYGSMLNRRMGA

SEQ ID NO: 56187 - protein, 15 aa, Artificial Sequence
  Description of Artificial Sequence: Synthetic peptide
  Seed: CSLMQGSTLPRRSGA
CSLMYGSMLNRRNGA

SEQ ID NO: 56188 - protein, 15 aa, Artificial Sequence
  Description of Artificial Sequence: Synthetic peptide
  Seed: CSLMQGSTLPRRSGA
CSLMYGSMLNRRSGA

SEQ ID NO: 56189 - protein, 15 aa, Artificial Sequence
  Description of Artificial Sequence: Synthetic peptide
  Seed: CSLMQGSTLPRRSGA
CSLMYGSMLNRRTGA

SEQ ID NO: 56190 - protein, 15 aa, Artificial Sequence
  Description of Artificial Sequence: Synthetic peptide
  Seed: CSLMQGSTLPRRSGA
CSLMYGSMLNRRVGA

SEQ ID NO: 56191 - protein, 15 aa, Artificial Sequence
  Description of Artificial Sequence: Synthetic peptide
  Seed: CSLMQGSTLPRRSGA
CSLMYGSMLPRRAGA

SEQ ID NO: 56192 - protein, 15 aa, Artificial Sequence
  Description of Artificial Sequence: Synthetic peptide
  Seed: CSLMQGSTLPRRSGA
CSLMYGSMLPRRCGA

SEQ ID NO: 56193 - protein, 15 aa, Artificial Sequence
  Description of Artificial Sequence: Synthetic peptide
  Seed: CSLMQGSTLPRRSGA
CSLMYGSMLPRRFGA

SEQ ID NO: 56194 - protein, 15 aa, Artificial Sequence
  Description of Artificial Sequence: Synthetic peptide
  Seed: CSLMQGSTLPRRSGA
CSLMYGSMLPRRGGA

SEQ ID NO: 56195 - protein, 15 aa, Artificial Sequence
  Description of Artificial Sequence: Synthetic peptide
  Seed: CSLMQGSTLPRRSGA
CSLMYGSMLPRRIGA

SEQ ID NO: 56196 - protein, 15 aa, Artificial Sequence
  Description of Artificial Sequence: Synthetic peptide
  Seed: CSLMQGSTLPRRSGA
CSLMYGSMLPRRLGA

SEQ ID NO: 56197 - protein, 15 aa, Artificial Sequence
  Description of Artificial Sequence: Synthetic peptide
  Seed: CSLMQGSTLPRRSGA
CSLMYGSMLPRRMGA

SEQ ID NO: 56198 - protein, 15 aa, Artificial Sequence
  Description of Artificial Sequence: Synthetic peptide
  Seed: CSLMQGSTLPRRSGA
CSLMYGSMLPRRNGA

SEQ ID NO: 56199 - protein, 15 aa, Artificial Sequence
  Description of Artificial Sequence: Synthetic peptide
  Seed: CSLMQGSTLPRRSGA
CSLMYGSMLPRRSGA

SEQ ID NO: 56200 - protein, 15 aa, Artificial Sequence
  Description of Artificial Sequence: Synthetic peptide
  Seed: CSLMQGSTLPRRSGA
CSLMYGSMLPRRTGA

SEQ ID NO: 56201 - protein, 15 aa, Artificial Sequence
  Description of Artificial Sequence: Synthetic peptide
  Seed: CSLMQGSTLPRRSGA
CSLMYGSMLPRRVGA

SEQ ID NO: 56202 - protein, 15 aa, Artificial Sequence
  Description of Artificial Sequence: Synthetic peptide
  Seed: CSLMQGSTLPRRSGA
CSLMYGSMLQRRIGA

SEQ ID NO: 56203 - protein, 15 aa, Artificial Sequence
  Description of Artificial Sequence: Synthetic peptide
  Seed: CSLMQGSTLPRRSGA
CSLMYGSMLQRRLGA

SEQ ID NO: 56204 - protein, 15 aa, Artificial Sequence
  Description of Artificial Sequence: Synthetic peptide
  Seed: CSLMQGSTLPRRSGA
CSLMYGSMLQRRVGA

SEQ ID NO: 56205 - protein, 15 aa, Artificial Sequence
  Description of Artificial Sequence: Synthetic peptide
  Seed: CSLMQGSTLPRRSGA
CSLMYGSMLSRRAGA

SEQ ID NO: 56206 - protein, 15 aa, Artificial Sequence
  Description of Artificial Sequence: Synthetic peptide
  Seed: CSLMQGSTLPRRSGA
CSLMYGSMLSRRCGA

SEQ ID NO: 56207 - protein, 15 aa, Artificial Sequence
  Description of Artificial Sequence: Synthetic peptide
  Seed: CSLMQGSTLPRRSGA
CSLMYGSMLSRRFGA

SEQ ID NO: 56208 - protein, 15 aa, Artificial Sequence
  Description of Artificial Sequence: Synthetic peptide
  Seed: CSLMQGSTLPRRSGA
CSLMYGSMLSRRGGA

SEQ ID NO: 56209 - protein, 15 aa, Artificial Sequence
  Description of Artificial Sequence: Synthetic peptide
  Seed: CSLMQGSTLPRRSGA
CSLMYGSMLSRRIGA

SEQ ID NO: 56210 - protein, 15 aa, Artificial Sequence
  Description of Artificial Sequence: Synthetic peptide
  Seed: CSLMQGSTLPRRSGA
CSLMYGSMLSRRLGA

SEQ ID NO: 56211 - protein, 15 aa, Artificial Sequence
  Description of Artificial Sequence: Synthetic peptide
  Seed: CSLMQGSTLPRRSGA
CSLMYGSMLSRRMGA

SEQ ID NO: 56212 - protein, 15 aa, Artificial Sequence
  Description of Artificial Sequence: Synthetic peptide
  Seed: CSLMQGSTLPRRSGA
CSLMYGSMLSRRNGA

SEQ ID NO: 56213 - protein, 15 aa, Artificial Sequence
  Description of Artificial Sequence: Synthetic peptide
  Seed: CSLMQGSTLPRRSGA
CSLMYGSMLSRRPGA

SEQ ID NO: 56214 - protein, 15 aa, Artificial Sequence
  Description of Artificial Sequence: Synthetic peptide
  Seed: CSLMQGSTLPRRSGA
CSLMYGSMLSRRSGA

SEQ ID NO: 56215 - protein, 15 aa, Artificial Sequence
  Description of Artificial Sequence: Synthetic peptide
  Seed: CSLMQGSTLPRRSGA
CSLMYGSMLSRRTGA

SEQ ID NO: 56216 - protein, 15 aa, Artificial Sequence
  Description of Artificial Sequence: Synthetic peptide
  Seed: CSLMQGSTLPRRSGA
CSLMYGSMLSRRVGA

SEQ ID NO: 56217 - protein, 15 aa, Artificial Sequence
  Description of Artificial Sequence: Synthetic peptide
  Seed: CSLMQGSTLPRRSGA
CSLMYGSMLSRRWGA

SEQ ID NO: 56218 - protein, 15 aa, Artificial Sequence
  Description of Artificial Sequence: Synthetic peptide
  Seed: CSLMQGSTLPRRSGA
CSLMYGSMLSRRYGA

SEQ ID NO: 56219 - protein, 15 aa, Artificial Sequence
  Description of Artificial Sequence: Synthetic peptide
  Seed: CSLMQGSTLPRRSGA
CSLMYGSMLTRRAGA

SEQ ID NO: 56220 - protein, 15 aa, Artificial Sequence
  Description of Artificial Sequence: Synthetic peptide
  Seed: CSLMQGSTLPRRSGA
CSLMYGSMLTRRCGA

SEQ ID NO: 56221 - protein, 15 aa, Artificial Sequence
  Description of Artificial Sequence: Synthetic peptide
  Seed: CSLMQGSTLPRRSGA
CSLMYGSMLTRRFGA

SEQ ID NO: 56222 - protein, 15 aa, Artificial Sequence
  Description of Artificial Sequence: Synthetic peptide
  Seed: CSLMQGSTLPRRSGA
CSLMYGSMLTRRGGA

SEQ ID NO: 56223 - protein, 15 aa, Artificial Sequence
  Description of Artificial Sequence: Synthetic peptide
  Seed: CSLMQGSTLPRRSGA
CSLMYGSMLTRRIGA

SEQ ID NO: 56224 - protein, 15 aa, Artificial Sequence
  Description of Artificial Sequence: Synthetic peptide
  Seed: CSLMQGSTLPRRSGA
CSLMYGSMLTRRLGA

SEQ ID NO: 56225 - protein, 15 aa, Artificial Sequence
  Description of Artificial Sequence: Synthetic peptide
  Seed: CSLMQGSTLPRRSGA
CSLMYGSMLTRRMGA

SEQ ID NO: 56226 - protein, 15 aa, Artificial Sequence
  Description of Artificial Sequence: Synthetic peptide
  Seed: CSLMQGSTLPRRSGA
CSLMYGSMLTRRNGA

SEQ ID NO: 56227 - protein, 15 aa, Artificial Sequence
  Description of Artificial Sequence: Synthetic peptide
  Seed: CSLMQGSTLPRRSGA
CSLMYGSMLTRRSGA

SEQ ID NO: 56228 - protein, 15 aa, Artificial Sequence
  Description of Artificial Sequence: Synthetic peptide
  Seed: CSLMQGSTLPRRSGA
CSLMYGSMLTRRTGA

SEQ ID NO: 56229 - protein, 15 aa, Artificial Sequence
  Description of Artificial Sequence: Synthetic peptide
  Seed: CSLMQGSTLPRRSGA
CSLMYGSMLTRRVGA

SEQ ID NO: 56230 - protein, 15 aa, Artificial Sequence
  Description of Artificial Sequence: Synthetic peptide
  Seed: CSLMQGSTLPRRSGA
CSLMYGSMLVRRAGA

SEQ ID NO: 56231 - protein, 15 aa, Artificial Sequence
  Description of Artificial Sequence: Synthetic peptide
  Seed: CSLMQGSTLPRRSGA
CSLMYGSMLVRRFGA

SEQ ID NO: 56232 - protein, 15 aa, Artificial Sequence
  Description of Artificial Sequence: Synthetic peptide
  Seed: CSLMQGSTLPRRSGA
CSLMYGSMLVRRGGA

SEQ ID NO: 56233 - protein, 15 aa, Artificial Sequence
  Description of Artificial Sequence: Synthetic peptide
  Seed: CSLMQGSTLPRRSGA
CSLMYGSMLVRRHGA

SEQ ID NO: 56234 - protein, 15 aa, Artificial Sequence
  Description of Artificial Sequence: Synthetic peptide
  Seed: CSLMQGSTLPRRSGA
CSLMYGSMLVRRIGA

SEQ ID NO: 56235 - protein, 15 aa, Artificial Sequence
  Description of Artificial Sequence: Synthetic peptide
  Seed: CSLMQGSTLPRRSGA
CSLMYGSMLVRRLGA

SEQ ID NO: 56236 - protein, 15 aa, Artificial Sequence
  Description of Artificial Sequence: Synthetic peptide
  Seed: CSLMQGSTLPRRSGA
CSLMYGSMLVRRMGA

SEQ ID NO: 56237 - protein, 15 aa, Artificial Sequence
  Description of Artificial Sequence: Synthetic peptide
  Seed: CSLMQGSTLPRRSGA
CSLMYGSMLVRRNGA

SEQ ID NO: 56238 - protein, 15 aa, Artificial Sequence
  Description of Artificial Sequence: Synthetic peptide
  Seed: CSLMQGSTLPRRSGA
CSLMYGSMLVRRSGA

SEQ ID NO: 56239 - protein, 15 aa, Artificial Sequence
  Description of Artificial Sequence: Synthetic peptide
  Seed: CSLMQGSTLPRRSGA
CSLMYGSMLVRRTGA

SEQ ID NO: 56240 - protein, 15 aa, Artificial Sequence
  Description of Artificial Sequence: Synthetic peptide
  Seed: CSLMQGSTLPRRSGA
CSLMYGSMLVRRVGA

SEQ ID NO: 56241 - protein, 15 aa, Artificial Sequence
  Description of Artificial Sequence: Synthetic peptide
  Seed: CSLMQGSTLPRRSGA
CSLMYGSNLARRAGA

SEQ ID NO: 56242 - protein, 15 aa, Artificial Sequence
  Description of Artificial Sequence: Synthetic peptide
  Seed: CSLMQGSTLPRRSGA
CSLMYGSNLARRIGA

SEQ ID NO: 56243 - protein, 15 aa, Artificial Sequence
  Description of Artificial Sequence: Synthetic peptide
  Seed: CSLMQGSTLPRRSGA
CSLMYGSNLARRLGA

SEQ ID NO: 56244 - protein, 15 aa, Artificial Sequence
  Description of Artificial Sequence: Synthetic peptide
  Seed: CSLMQGSTLPRRSGA
CSLMYGSNLARRMGA

SEQ ID NO: 56245 - protein, 15 aa, Artificial Sequence
  Description of Artificial Sequence: Synthetic peptide
  Seed: CSLMQGSTLPRRSGA
CSLMYGSNLARRVGA

SEQ ID NO: 56246 - protein, 15 aa, Artificial Sequence
  Description of Artificial Sequence: Synthetic peptide
  Seed: CSLMQGSTLPRRSGA
CSLMYGSNLGRRIGA

SEQ ID NO: 56247 - protein, 15 aa, Artificial Sequence
  Description of Artificial Sequence: Synthetic peptide
  Seed: CSLMQGSTLPRRSGA
CSLMYGSNLGRRLGA

SEQ ID NO: 56248 - protein, 15 aa, Artificial Sequence
  Description of Artificial Sequence: Synthetic peptide
  Seed: CSLMQGSTLPRRSGA
CSLMYGSNLGRRVGA

SEQ ID NO: 56249 - protein, 15 aa, Artificial Sequence
  Description of Artificial Sequence: Synthetic peptide
  Seed: CSLMQGSTLPRRSGA
CSLMYGSNLSRRIGA

SEQ ID NO: 56250 - protein, 15 aa, Artificial Sequence
  Description of Artificial Sequence: Synthetic peptide
  Seed: CSLMQGSTLPRRSGA
CSLMYGSNLSRRLGA

SEQ ID NO: 56251 - protein, 15 aa, Artificial Sequence
  Description of Artificial Sequence: Synthetic peptide
  Seed: CSLMQGSTLPRRSGA
CSLMYGSNLSRRVGA

SEQ ID NO: 56252 - protein, 15 aa, Artificial Sequence
  Description of Artificial Sequence: Synthetic peptide
  Seed: CSLMQGSTLPRRSGA
CSLMYGSQLARRAGA

SEQ ID NO: 56253 - protein, 15 aa, Artificial Sequence
  Description of Artificial Sequence: Synthetic peptide
  Seed: CSLMQGSTLPRRSGA
CSLMYGSQLARRFGA

SEQ ID NO: 56254 - protein, 15 aa, Artificial Sequence
  Description of Artificial Sequence: Synthetic peptide
  Seed: CSLMQGSTLPRRSGA
CSLMYGSQLARRIGA

SEQ ID NO: 56255 - protein, 15 aa, Artificial Sequence
  Description of Artificial Sequence: Synthetic peptide
  Seed: CSLMQGSTLPRRSGA
CSLMYGSQLARRLGA

SEQ ID NO: 56256 - protein, 15 aa, Artificial Sequence
  Description of Artificial Sequence: Synthetic peptide
  Seed: CSLMQGSTLPRRSGA
CSLMYGSQLARRMGA

SEQ ID NO: 56257 - protein, 15 aa, Artificial Sequence
  Description of Artificial Sequence: Synthetic peptide
  Seed: CSLMQGSTLPRRSGA
CSLMYGSQLARRSGA

SEQ ID NO: 56258 - protein, 15 aa, Artificial Sequence
  Description of Artificial Sequence: Synthetic peptide
  Seed: CSLMQGSTLPRRSGA
CSLMYGSQLARRTGA

SEQ ID NO: 56259 - protein, 15 aa, Artificial Sequence
  Description of Artificial Sequence: Synthetic peptide
  Seed: CSLMQGSTLPRRSGA
CSLMYGSQLARRVGA

SEQ ID NO: 56260 - protein, 15 aa, Artificial Sequence
  Description of Artificial Sequence: Synthetic peptide
  Seed: CSLMQGSTLPRRSGA
CSLMYGSQLGRRAGA

SEQ ID NO: 56261 - protein, 15 aa, Artificial Sequence
  Description of Artificial Sequence: Synthetic peptide
  Seed: CSLMQGSTLPRRSGA
CSLMYGSQLGRRIGA

SEQ ID NO: 56262 - protein, 15 aa, Artificial Sequence
  Description of Artificial Sequence: Synthetic peptide
  Seed: CSLMQGSTLPRRSGA
CSLMYGSQLGRRLGA

SEQ ID NO: 56263 - protein, 15 aa, Artificial Sequence
  Description of Artificial Sequence: Synthetic peptide
  Seed: CSLMQGSTLPRRSGA
CSLMYGSQLGRRMGA

SEQ ID NO: 56264 - protein, 15 aa, Artificial Sequence
  Description of Artificial Sequence: Synthetic peptide
  Seed: CSLMQGSTLPRRSGA
CSLMYGSQLGRRTGA

SEQ ID NO: 56265 - protein, 15 aa, Artificial Sequence
  Description of Artificial Sequence: Synthetic peptide
  Seed: CSLMQGSTLPRRSGA
CSLMYGSQLGRRVGA

SEQ ID NO: 56266 - protein, 15 aa, Artificial Sequence
  Description of Artificial Sequence: Synthetic peptide
  Seed: CSLMQGSTLPRRSGA
CSLMYGSQLNRRIGA

SEQ ID NO: 56267 - protein, 15 aa, Artificial Sequence
  Description of Artificial Sequence: Synthetic peptide
  Seed: CSLMQGSTLPRRSGA
CSLMYGSQLNRRLGA

SEQ ID NO: 56268 - protein, 15 aa, Artificial Sequence
  Description of Artificial Sequence: Synthetic peptide
  Seed: CSLMQGSTLPRRSGA
CSLMYGSQLNRRVGA

SEQ ID NO: 56269 - protein, 15 aa, Artificial Sequence
  Description of Artificial Sequence: Synthetic peptide
  Seed: CSLMQGSTLPRRSGA
CSLMYGSQLPRRAGA

SEQ ID NO: 56270 - protein, 15 aa, Artificial Sequence
  Description of Artificial Sequence: Synthetic peptide
  Seed: CSLMQGSTLPRRSGA
CSLMYGSQLPRRIGA

SEQ ID NO: 56271 - protein, 15 aa, Artificial Sequence
  Description of Artificial Sequence: Synthetic peptide
  Seed: CSLMQGSTLPRRSGA
CSLMYGSQLPRRLGA

SEQ ID NO: 56272 - protein, 15 aa, Artificial Sequence
  Description of Artificial Sequence: Synthetic peptide
  Seed: CSLMQGSTLPRRSGA
CSLMYGSQLPRRVGA

SEQ ID NO: 56273 - protein, 15 aa, Artificial Sequence
  Description of Artificial Sequence: Synthetic peptide
  Seed: CSLMQGSTLPRRSGA
CSLMYGSQLSRRAGA

SEQ ID NO: 56274 - protein, 15 aa, Artificial Sequence
  Description of Artificial Sequence: Synthetic peptide
  Seed: CSLMQGSTLPRRSGA
CSLMYGSQLSRRIGA

SEQ ID NO: 56275 - protein, 15 aa, Artificial Sequence
  Description of Artificial Sequence: Synthetic peptide
  Seed: CSLMQGSTLPRRSGA
CSLMYGSQLSRRLGA

SEQ ID NO: 56276 - protein, 15 aa, Artificial Sequence
  Description of Artificial Sequence: Synthetic peptide
  Seed: CSLMQGSTLPRRSGA
CSLMYGSQLSRRMGA

SEQ ID NO: 56277 - protein, 15 aa, Artificial Sequence
  Description of Artificial Sequence: Synthetic peptide
  Seed: CSLMQGSTLPRRSGA
CSLMYGSQLSRRSGA

SEQ ID NO: 56278 - protein, 15 aa, Artificial Sequence
  Description of Artificial Sequence: Synthetic peptide
  Seed: CSLMQGSTLPRRSGA
CSLMYGSQLSRRTGA

SEQ ID NO: 56279 - protein, 15 aa, Artificial Sequence
  Description of Artificial Sequence: Synthetic peptide
  Seed: CSLMQGSTLPRRSGA
CSLMYGSQLSRRVGA

SEQ ID NO: 56280 - protein, 15 aa, Artificial Sequence
  Description of Artificial Sequence: Synthetic peptide
  Seed: CSLMQGSTLPRRSGA
CSLMYGSQLTRRAGA

SEQ ID NO: 56281 - protein, 15 aa, Artificial Sequence
  Description of Artificial Sequence: Synthetic peptide
  Seed: CSLMQGSTLPRRSGA
CSLMYGSQLTRRIGA

SEQ ID NO: 56282 - protein, 15 aa, Artificial Sequence
  Description of Artificial Sequence: Synthetic peptide
  Seed: CSLMQGSTLPRRSGA
CSLMYGSQLTRRLGA

SEQ ID NO: 56283 - protein, 15 aa, Artificial Sequence
  Description of Artificial Sequence: Synthetic peptide
  Seed: CSLMQGSTLPRRSGA
CSLMYGSQLTRRVGA

SEQ ID NO: 56284 - protein, 15 aa, Artificial Sequence
  Description of Artificial Sequence: Synthetic peptide
  Seed: CSLMQGSTLPRRSGA
CSLMYGSQLVRRIGA

SEQ ID NO: 56285 - protein, 15 aa, Artificial Sequence
  Description of Artificial Sequence: Synthetic peptide
  Seed: CSLMQGSTLPRRSGA
CSLMYGSQLVRRLGA

SEQ ID NO: 56286 - protein, 15 aa, Artificial Sequence
  Description of Artificial Sequence: Synthetic peptide
  Seed: CSLMQGSTLPRRSGA
CSLMYGSQLVRRVGA

SEQ ID NO: 56287 - protein, 15 aa, Artificial Sequence
  Description of Artificial Sequence: Synthetic peptide
  Seed: CSLMQGSTLPRRSGA
CSLMYGSSLARRAGA

SEQ ID NO: 56288 - protein, 15 aa, Artificial Sequence
  Description of Artificial Sequence: Synthetic peptide
  Seed: CSLMQGSTLPRRSGA
CSLMYGSSLARRFGA

SEQ ID NO: 56289 - protein, 15 aa, Artificial Sequence
  Description of Artificial Sequence: Synthetic peptide
  Seed: CSLMQGSTLPRRSGA
CSLMYGSSLARRIGA

SEQ ID NO: 56290 - protein, 15 aa, Artificial Sequence
  Description of Artificial Sequence: Synthetic peptide
  Seed: CSLMQGSTLPRRSGA
CSLMYGSSLARRLGA

SEQ ID NO: 56291 - protein, 15 aa, Artificial Sequence
  Description of Artificial Sequence: Synthetic peptide
  Seed: CSLMQGSTLPRRSGA
CSLMYGSSLARRMGA

SEQ ID NO: 56292 - protein, 15 aa, Artificial Sequence
  Description of Artificial Sequence: Synthetic peptide
  Seed: CSLMQGSTLPRRSGA
CSLMYGSSLARRSGA

SEQ ID NO: 56293 - protein, 15 aa, Artificial Sequence
  Description of Artificial Sequence: Synthetic peptide
  Seed: CSLMQGSTLPRRSGA
CSLMYGSSLARRTGA

SEQ ID NO: 56294 - protein, 15 aa, Artificial Sequence
  Description of Artificial Sequence: Synthetic peptide
  Seed: CSLMQGSTLPRRSGA
CSLMYGSSLARRVGA

SEQ ID NO: 56295 - protein, 15 aa, Artificial Sequence
  Description of Artificial Sequence: Synthetic peptide
  Seed: CSLMQGSTLPRRSGA
CSLMYGSSLGRRAGA

SEQ ID NO: 56296 - protein, 15 aa, Artificial Sequence
  Description of Artificial Sequence: Synthetic peptide
  Seed: CSLMQGSTLPRRSGA
CSLMYGSSLGRRIGA

SEQ ID NO: 56297 - protein, 15 aa, Artificial Sequence
  Description of Artificial Sequence: Synthetic peptide
  Seed: CSLMQGSTLPRRSGA
CSLMYGSSLGRRLGA

SEQ ID NO: 56298 - protein, 15 aa, Artificial Sequence
  Description of Artificial Sequence: Synthetic peptide
  Seed: CSLMQGSTLPRRSGA
CSLMYGSSLGRRMGA

SEQ ID NO: 56299 - protein, 15 aa, Artificial Sequence
  Description of Artificial Sequence: Synthetic peptide
  Seed: CSLMQGSTLPRRSGA
CSLMYGSSLGRRVGA

SEQ ID NO: 56300 - protein, 15 aa, Artificial Sequence
  Description of Artificial Sequence: Synthetic peptide
  Seed: CSLMQGSTLPRRSGA
CSLMYGSSLNRRIGA

SEQ ID NO: 56301 - protein, 15 aa, Artificial Sequence
  Description of Artificial Sequence: Synthetic peptide
  Seed: CSLMQGSTLPRRSGA
CSLMYGSSLNRRLGA

SEQ ID NO: 56302 - protein, 15 aa, Artificial Sequence
  Description of Artificial Sequence: Synthetic peptide
  Seed: CSLMQGSTLPRRSGA
CSLMYGSSLNRRVGA

SEQ ID NO: 56303 - protein, 15 aa, Artificial Sequence
  Description of Artificial Sequence: Synthetic peptide
  Seed: CSLMQGSTLPRRSGA
CSLMYGSSLPRRIGA

SEQ ID NO: 56304 - protein, 15 aa, Artificial Sequence
  Description of Artificial Sequence: Synthetic peptide
  Seed: CSLMQGSTLPRRSGA
CSLMYGSSLPRRLGA

SEQ ID NO: 56305 - protein, 15 aa, Artificial Sequence
  Description of Artificial Sequence: Synthetic peptide
  Seed: CSLMQGSTLPRRSGA
CSLMYGSSLPRRVGA

SEQ ID NO: 56306 - protein, 15 aa, Artificial Sequence
  Description of Artificial Sequence: Synthetic peptide
  Seed: CSLMQGSTLPRRSGA
CSLMYGSSLSRRAGA

SEQ ID NO: 56307 - protein, 15 aa, Artificial Sequence
  Description of Artificial Sequence: Synthetic peptide
  Seed: CSLMQGSTLPRRSGA
CSLMYGSSLSRRIGA

SEQ ID NO: 56308 - protein, 15 aa, Artificial Sequence
  Description of Artificial Sequence: Synthetic peptide
  Seed: CSLMQGSTLPRRSGA
CSLMYGSSLSRRLGA

SEQ ID NO: 56309 - protein, 15 aa, Artificial Sequence
  Description of Artificial Sequence: Synthetic peptide
  Seed: CSLMQGSTLPRRSGA
CSLMYGSSLSRRMGA

SEQ ID NO: 56310 - protein, 15 aa, Artificial Sequence
  Description of Artificial Sequence: Synthetic peptide
  Seed: CSLMQGSTLPRRSGA
CSLMYGSSLSRRTGA

SEQ ID NO: 56311 - protein, 15 aa, Artificial Sequence
  Description of Artificial Sequence: Synthetic peptide
  Seed: CSLMQGSTLPRRSGA
CSLMYGSSLSRRVGA

SEQ ID NO: 56312 - protein, 15 aa, Artificial Sequence
  Description of Artificial Sequence: Synthetic peptide
  Seed: CSLMQGSTLPRRSGA
CSLMYGSSLTRRIGA

SEQ ID NO: 56313 - protein, 15 aa, Artificial Sequence
  Description of Artificial Sequence: Synthetic peptide
  Seed: CSLMQGSTLPRRSGA
CSLMYGSSLTRRLGA

SEQ ID NO: 56314 - protein, 15 aa, Artificial Sequence
  Description of Artificial Sequence: Synthetic peptide
  Seed: CSLMQGSTLPRRSGA
CSLMYGSSLTRRVGA

SEQ ID NO: 56315 - protein, 15 aa, Artificial Sequence
  Description of Artificial Sequence: Synthetic peptide
  Seed: CSLMQGSTLPRRSGA
CSLMYGSSLVRRIGA

SEQ ID NO: 56316 - protein, 15 aa, Artificial Sequence
  Description of Artificial Sequence: Synthetic peptide
  Seed: CSLMQGSTLPRRSGA
CSLMYGSSLVRRLGA

SEQ ID NO: 56317 - protein, 15 aa, Artificial Sequence
  Description of Artificial Sequence: Synthetic peptide
  Seed: CSLMQGSTLPRRSGA
CSLMYGSSLVRRVGA

SEQ ID NO: 56318 - protein, 15 aa, Artificial Sequence
  Description of Artificial Sequence: Synthetic peptide
  Seed: CSLMQGSTLPRRSGA
CSLMYGSTLARRAGA

SEQ ID NO: 56319 - protein, 15 aa, Artificial Sequence
  Description of Artificial Sequence: Synthetic peptide
  Seed: CSLMQGSTLPRRSGA
CSLMYGSTLARRFGA

SEQ ID NO: 56320 - protein, 15 aa, Artificial Sequence
  Description of Artificial Sequence: Synthetic peptide
  Seed: CSLMQGSTLPRRSGA
CSLMYGSTLARRIGA

SEQ ID NO: 56321 - protein, 15 aa, Artificial Sequence
  Description of Artificial Sequence: Synthetic peptide
  Seed: CSLMQGSTLPRRSGA
CSLMYGSTLARRLGA

SEQ ID NO: 56322 - protein, 15 aa, Artificial Sequence
  Description of Artificial Sequence: Synthetic peptide
  Seed: CSLMQGSTLPRRSGA
CSLMYGSTLARRMGA

SEQ ID NO: 56323 - protein, 15 aa, Artificial Sequence
  Description of Artificial Sequence: Synthetic peptide
  Seed: CSLMQGSTLPRRSGA
CSLMYGSTLARRSGA

SEQ ID NO: 56324 - protein, 15 aa, Artificial Sequence
  Description of Artificial Sequence: Synthetic peptide
  Seed: CSLMQGSTLPRRSGA
CSLMYGSTLARRTGA

SEQ ID NO: 56325 - protein, 15 aa, Artificial Sequence
  Description of Artificial Sequence: Synthetic peptide
  Seed: CSLMQGSTLPRRSGA
CSLMYGSTLARRVGA

SEQ ID NO: 56326 - protein, 15 aa, Artificial Sequence
  Description of Artificial Sequence: Synthetic peptide
  Seed: CSLMQGSTLPRRSGA
CSLMYGSTLGRRAGA

SEQ ID NO: 56327 - protein, 15 aa, Artificial Sequence
  Description of Artificial Sequence: Synthetic peptide
  Seed: CSLMQGSTLPRRSGA
CSLMYGSTLGRRIGA

SEQ ID NO: 56328 - protein, 15 aa, Artificial Sequence
  Description of Artificial Sequence: Synthetic peptide
  Seed: CSLMQGSTLPRRSGA
CSLMYGSTLGRRLGA

SEQ ID NO: 56329 - protein, 15 aa, Artificial Sequence
  Description of Artificial Sequence: Synthetic peptide
  Seed: CSLMQGSTLPRRSGA
CSLMYGSTLGRRMGA

SEQ ID NO: 56330 - protein, 15 aa, Artificial Sequence
  Description of Artificial Sequence: Synthetic peptide
  Seed: CSLMQGSTLPRRSGA
CSLMYGSTLGRRVGA

SEQ ID NO: 56331 - protein, 15 aa, Artificial Sequence
  Description of Artificial Sequence: Synthetic peptide
  Seed: CSLMQGSTLPRRSGA
CSLMYGSTLPRRIGA

SEQ ID NO: 56332 - protein, 15 aa, Artificial Sequence
  Description of Artificial Sequence: Synthetic peptide
  Seed: CSLMQGSTLPRRSGA
CSLMYGSTLPRRLGA

SEQ ID NO: 56333 - protein, 15 aa, Artificial Sequence
  Description of Artificial Sequence: Synthetic peptide
  Seed: CSLMQGSTLPRRSGA
CSLMYGSTLPRRVGA

SEQ ID NO: 56334 - protein, 15 aa, Artificial Sequence
  Description of Artificial Sequence: Synthetic peptide
  Seed: CSLMQGSTLPRRSGA
CSLMYGSTLSRRAGA

SEQ ID NO: 56335 - protein, 15 aa, Artificial Sequence
  Description of Artificial Sequence: Synthetic peptide
  Seed: CSLMQGSTLPRRSGA
CSLMYGSTLSRRIGA

SEQ ID NO: 56336 - protein, 15 aa, Artificial Sequence
  Description of Artificial Sequence: Synthetic peptide
  Seed: CSLMQGSTLPRRSGA
CSLMYGSTLSRRLGA

SEQ ID NO: 56337 - protein, 15 aa, Artificial Sequence
  Description of Artificial Sequence: Synthetic peptide
  Seed: CSLMQGSTLPRRSGA
CSLMYGSTLSRRMGA

SEQ ID NO: 56338 - protein, 15 aa, Artificial Sequence
  Description of Artificial Sequence: Synthetic peptide
  Seed: CSLMQGSTLPRRSGA
CSLMYGSTLSRRVGA

SEQ ID NO: 56339 - protein, 15 aa, Artificial Sequence
  Description of Artificial Sequence: Synthetic peptide
  Seed: CSLMQGSTLPRRSGA
CSLMYGSTLTRRIGA

SEQ ID NO: 56340 - protein, 15 aa, Artificial Sequence
  Description of Artificial Sequence: Synthetic peptide
  Seed: CSLMQGSTLPRRSGA
CSLMYGSTLTRRLGA

SEQ ID NO: 56341 - protein, 15 aa, Artificial Sequence
  Description of Artificial Sequence: Synthetic peptide
  Seed: CSLMQGSTLPRRSGA
CSLMYGSTLTRRVGA

SEQ ID NO: 56342 - protein, 15 aa, Artificial Sequence
  Description of Artificial Sequence: Synthetic peptide
  Seed: CSLMQGSTLPRRSGA
CSLMYGSVLARRAGA

SEQ ID NO: 56343 - protein, 15 aa, Artificial Sequence
  Description of Artificial Sequence: Synthetic peptide
  Seed: CSLMQGSTLPRRSGA
CSLMYGSVLARRCGA

SEQ ID NO: 56344 - protein, 15 aa, Artificial Sequence
  Description of Artificial Sequence: Synthetic peptide
  Seed: CSLMQGSTLPRRSGA
CSLMYGSVLARRFGA

SEQ ID NO: 56345 - protein, 15 aa, Artificial Sequence
  Description of Artificial Sequence: Synthetic peptide
  Seed: CSLMQGSTLPRRSGA
CSLMYGSVLARRGGA

SEQ ID NO: 56346 - protein, 15 aa, Artificial Sequence
  Description of Artificial Sequence: Synthetic peptide
  Seed: CSLMQGSTLPRRSGA
CSLMYGSVLARRIGA

SEQ ID NO: 56347 - protein, 15 aa, Artificial Sequence
  Description of Artificial Sequence: Synthetic peptide
  Seed: CSLMQGSTLPRRSGA
CSLMYGSVLARRLGA

SEQ ID NO: 56348 - protein, 15 aa, Artificial Sequence
  Description of Artificial Sequence: Synthetic peptide
  Seed: CSLMQGSTLPRRSGA
CSLMYGSVLARRMGA

SEQ ID NO: 56349 - protein, 15 aa, Artificial Sequence
  Description of Artificial Sequence: Synthetic peptide
  Seed: CSLMQGSTLPRRSGA
CSLMYGSVLARRNGA

SEQ ID NO: 56350 - protein, 15 aa, Artificial Sequence
  Description of Artificial Sequence: Synthetic peptide
  Seed: CSLMQGSTLPRRSGA
CSLMYGSVLARRSGA

SEQ ID NO: 56351 - protein, 15 aa, Artificial Sequence
  Description of Artificial Sequence: Synthetic peptide
  Seed: CSLMQGSTLPRRSGA
CSLMYGSVLARRTGA

SEQ ID NO: 56352 - protein, 15 aa, Artificial Sequence
  Description of Artificial Sequence: Synthetic peptide
  Seed: CSLMQGSTLPRRSGA
CSLMYGSVLARRVGA

SEQ ID NO: 56353 - protein, 15 aa, Artificial Sequence
  Description of Artificial Sequence: Synthetic peptide
  Seed: CSLMQGSTLPRRSGA
CSLMYGSVLGRRAGA

SEQ ID NO: 56354 - protein, 15 aa, Artificial Sequence
  Description of Artificial Sequence: Synthetic peptide
  Seed: CSLMQGSTLPRRSGA
CSLMYGSVLGRRFGA

SEQ ID NO: 56355 - protein, 15 aa, Artificial Sequence
  Description of Artificial Sequence: Synthetic peptide
  Seed: CSLMQGSTLPRRSGA
CSLMYGSVLGRRGGA

SEQ ID NO: 56356 - protein, 15 aa, Artificial Sequence
  Description of Artificial Sequence: Synthetic peptide
  Seed: CSLMQGSTLPRRSGA
CSLMYGSVLGRRIGA

SEQ ID NO: 56357 - protein, 15 aa, Artificial Sequence
  Description of Artificial Sequence: Synthetic peptide
  Seed: CSLMQGSTLPRRSGA
CSLMYGSVLGRRLGA

SEQ ID NO: 56358 - protein, 15 aa, Artificial Sequence
  Description of Artificial Sequence: Synthetic peptide
  Seed: CSLMQGSTLPRRSGA
CSLMYGSVLGRRMGA

SEQ ID NO: 56359 - protein, 15 aa, Artificial Sequence
  Description of Artificial Sequence: Synthetic peptide
  Seed: CSLMQGSTLPRRSGA
CSLMYGSVLGRRSGA

SEQ ID NO: 56360 - protein, 15 aa, Artificial Sequence
  Description of Artificial Sequence: Synthetic peptide
  Seed: CSLMQGSTLPRRSGA
CSLMYGSVLGRRTGA

SEQ ID NO: 56361 - protein, 15 aa, Artificial Sequence
  Description of Artificial Sequence: Synthetic peptide
  Seed: CSLMQGSTLPRRSGA
CSLMYGSVLGRRVGA

SEQ ID NO: 56362 - protein, 15 aa, Artificial Sequence
  Description of Artificial Sequence: Synthetic peptide
  Seed: CSLMQGSTLPRRSGA
CSLMYGSVLNRRAGA

SEQ ID NO: 56363 - protein, 15 aa, Artificial Sequence
  Description of Artificial Sequence: Synthetic peptide
  Seed: CSLMQGSTLPRRSGA
CSLMYGSVLNRRIGA

SEQ ID NO: 56364 - protein, 15 aa, Artificial Sequence
  Description of Artificial Sequence: Synthetic peptide
  Seed: CSLMQGSTLPRRSGA
CSLMYGSVLNRRLGA

SEQ ID NO: 56365 - protein, 15 aa, Artificial Sequence
  Description of Artificial Sequence: Synthetic peptide
  Seed: CSLMQGSTLPRRSGA
CSLMYGSVLNRRVGA

SEQ ID NO: 56366 - protein, 15 aa, Artificial Sequence
  Description of Artificial Sequence: Synthetic peptide
  Seed: CSLMQGSTLPRRSGA
CSLMYGSVLPRRAGA

SEQ ID NO: 56367 - protein, 15 aa, Artificial Sequence
  Description of Artificial Sequence: Synthetic peptide
  Seed: CSLMQGSTLPRRSGA
CSLMYGSVLPRRIGA

SEQ ID NO: 56368 - protein, 15 aa, Artificial Sequence
  Description of Artificial Sequence: Synthetic peptide
  Seed: CSLMQGSTLPRRSGA
CSLMYGSVLPRRLGA

SEQ ID NO: 56369 - protein, 15 aa, Artificial Sequence
  Description of Artificial Sequence: Synthetic peptide
  Seed: CSLMQGSTLPRRSGA
CSLMYGSVLPRRMGA

SEQ ID NO: 56370 - protein, 15 aa, Artificial Sequence
  Description of Artificial Sequence: Synthetic peptide
  Seed: CSLMQGSTLPRRSGA
CSLMYGSVLPRRTGA

SEQ ID NO: 56371 - protein, 15 aa, Artificial Sequence
  Description of Artificial Sequence: Synthetic peptide
  Seed: CSLMQGSTLPRRSGA
CSLMYGSVLPRRVGA

SEQ ID NO: 56372 - protein, 15 aa, Artificial Sequence
  Description of Artificial Sequence: Synthetic peptide
  Seed: CSLMQGSTLPRRSGA
CSLMYGSVLSRRAGA

SEQ ID NO: 56373 - protein, 15 aa, Artificial Sequence
  Description of Artificial Sequence: Synthetic peptide
  Seed: CSLMQGSTLPRRSGA
CSLMYGSVLSRRFGA

SEQ ID NO: 56374 - protein, 15 aa, Artificial Sequence
  Description of Artificial Sequence: Synthetic peptide
  Seed: CSLMQGSTLPRRSGA
CSLMYGSVLSRRGGA

SEQ ID NO: 56375 - protein, 15 aa, Artificial Sequence
  Description of Artificial Sequence: Synthetic peptide
  Seed: CSLMQGSTLPRRSGA
CSLMYGSVLSRRIGA

SEQ ID NO: 56376 - protein, 15 aa, Artificial Sequence
  Description of Artificial Sequence: Synthetic peptide
  Seed: CSLMQGSTLPRRSGA
CSLMYGSVLSRRLGA

SEQ ID NO: 56377 - protein, 15 aa, Artificial Sequence
  Description of Artificial Sequence: Synthetic peptide
  Seed: CSLMQGSTLPRRSGA
CSLMYGSVLSRRMGA

SEQ ID NO: 56378 - protein, 15 aa, Artificial Sequence
  Description of Artificial Sequence: Synthetic peptide
  Seed: CSLMQGSTLPRRSGA
CSLMYGSVLSRRNGA

SEQ ID NO: 56379 - protein, 15 aa, Artificial Sequence
  Description of Artificial Sequence: Synthetic peptide
  Seed: CSLMQGSTLPRRSGA
CSLMYGSVLSRRSGA

SEQ ID NO: 56380 - protein, 15 aa, Artificial Sequence
  Description of Artificial Sequence: Synthetic peptide
  Seed: CSLMQGSTLPRRSGA
CSLMYGSVLSRRTGA

SEQ ID NO: 56381 - protein, 15 aa, Artificial Sequence
  Description of Artificial Sequence: Synthetic peptide
  Seed: CSLMQGSTLPRRSGA
CSLMYGSVLSRRVGA

SEQ ID NO: 56382 - protein, 15 aa, Artificial Sequence
  Description of Artificial Sequence: Synthetic peptide
  Seed: CSLMQGSTLPRRSGA
CSLMYGSVLTRRAGA

SEQ ID NO: 56383 - protein, 15 aa, Artificial Sequence
  Description of Artificial Sequence: Synthetic peptide
  Seed: CSLMQGSTLPRRSGA
CSLMYGSVLTRRIGA

SEQ ID NO: 56384 - protein, 15 aa, Artificial Sequence
  Description of Artificial Sequence: Synthetic peptide
  Seed: CSLMQGSTLPRRSGA
CSLMYGSVLTRRLGA

SEQ ID NO: 56385 - protein, 15 aa, Artificial Sequence
  Description of Artificial Sequence: Synthetic peptide
  Seed: CSLMQGSTLPRRSGA
CSLMYGSVLTRRMGA

SEQ ID NO: 56386 - protein, 15 aa, Artificial Sequence
  Description of Artificial Sequence: Synthetic peptide
  Seed: CSLMQGSTLPRRSGA
CSLMYGSVLTRRNGA

SEQ ID NO: 56387 - protein, 15 aa, Artificial Sequence
  Description of Artificial Sequence: Synthetic peptide
  Seed: CSLMQGSTLPRRSGA
CSLMYGSVLTRRTGA

SEQ ID NO: 56388 - protein, 15 aa, Artificial Sequence
  Description of Artificial Sequence: Synthetic peptide
  Seed: CSLMQGSTLPRRSGA
CSLMYGSVLTRRVGA

SEQ ID NO: 56389 - protein, 15 aa, Artificial Sequence
  Description of Artificial Sequence: Synthetic peptide
  Seed: CSLMQGSTLPRRSGA
CSLMYGSVLVRRAGA

SEQ ID NO: 56390 - protein, 15 aa, Artificial Sequence
  Description of Artificial Sequence: Synthetic peptide
  Seed: CSLMQGSTLPRRSGA
CSLMYGSVLVRRIGA

SEQ ID NO: 56391 - protein, 15 aa, Artificial Sequence
  Description of Artificial Sequence: Synthetic peptide
  Seed: CSLMQGSTLPRRSGA
CSLMYGSVLVRRLGA

SEQ ID NO: 56392 - protein, 15 aa, Artificial Sequence
  Description of Artificial Sequence: Synthetic peptide
  Seed: CSLMQGSTLPRRSGA
CSLMYGSVLVRRNGA

SEQ ID NO: 56393 - protein, 15 aa, Artificial Sequence
  Description of Artificial Sequence: Synthetic peptide
  Seed: CSLMQGSTLPRRSGA
CSLMYGSVLVRRVGA

SEQ ID NO: 56394 - protein, 15 aa, Artificial Sequence
  Description of Artificial Sequence: Synthetic peptide
  Seed: CSLMQGSTLPRRSGA
CSLMYGSWLARRVGA

SEQ ID NO: 56395 - protein, 16 aa, Artificial Sequence
  Description of Artificial Sequence: Synthetic peptide
  Seed: CSLMQGSTLPRRSGAA
CSLMAGSALARRAGAA

SEQ ID NO: 56396 - protein, 16 aa, Artificial Sequence
  Description of Artificial Sequence: Synthetic peptide
  Seed: CSLMQGSTLPRRSGAA
CSLMAGSALARRIGAA

SEQ ID NO: 56397 - protein, 16 aa, Artificial Sequence
  Description of Artificial Sequence: Synthetic peptide
  Seed: CSLMQGSTLPRRSGAA
CSLMAGSALARRTGAA

SEQ ID NO: 56398 - protein, 16 aa, Artificial Sequence
  Description of Artificial Sequence: Synthetic peptide
  Seed: CSLMQGSTLPRRSGAA
CSLMAGSALARRVGAA

SEQ ID NO: 56399 - protein, 16 aa, Artificial Sequence
  Description of Artificial Sequence: Synthetic peptide
  Seed: CSLMQGSTLPRRSGAA
CSLMAGSGLARRAGAA

SEQ ID NO: 56400 - protein, 16 aa, Artificial Sequence
  Description of Artificial Sequence: Synthetic peptide
  Seed: CSLMQGSTLPRRSGAA
CSLMAGSGLARRVGAA

SEQ ID NO: 56401 - protein, 16 aa, Artificial Sequence
  Description of Artificial Sequence: Synthetic peptide
  Seed: CSLMQGSTLPRRSGAA
CSLMFGSALARRAGAA

SEQ ID NO: 56402 - protein, 16 aa, Artificial Sequence
  Description of Artificial Sequence: Synthetic peptide
  Seed: CSLMQGSTLPRRSGAA
CSLMFGSALARRIGAA

SEQ ID NO: 56403 - protein, 16 aa, Artificial Sequence
  Description of Artificial Sequence: Synthetic peptide
  Seed: CSLMQGSTLPRRSGAA
CSLMFGSALARRSGAA

SEQ ID NO: 56404 - protein, 16 aa, Artificial Sequence
  Description of Artificial Sequence: Synthetic peptide
  Seed: CSLMQGSTLPRRSGAA
CSLMFGSALARRTGAA

SEQ ID NO: 56405 - protein, 16 aa, Artificial Sequence
  Description of Artificial Sequence: Synthetic peptide
  Seed: CSLMQGSTLPRRSGAA
CSLMFGSALARRVGAA

SEQ ID NO: 56406 - protein, 16 aa, Artificial Sequence
  Description of Artificial Sequence: Synthetic peptide
  Seed: CSLMQGSTLPRRSGAA
CSLMFGSALPRRVGAA

SEQ ID NO: 56407 - protein, 16 aa, Artificial Sequence
  Description of Artificial Sequence: Synthetic peptide
  Seed: CSLMQGSTLPRRSGAA
CSLMFGSALVRRAGAA

SEQ ID NO: 56408 - protein, 16 aa, Artificial Sequence
  Description of Artificial Sequence: Synthetic peptide
  Seed: CSLMQGSTLPRRSGAA
CSLMFGSALVRRIGAA

SEQ ID NO: 56409 - protein, 16 aa, Artificial Sequence
  Description of Artificial Sequence: Synthetic peptide
  Seed: CSLMQGSTLPRRSGAA
CSLMFGSALVRRSGAA

SEQ ID NO: 56410 - protein, 16 aa, Artificial Sequence
  Description of Artificial Sequence: Synthetic peptide
  Seed: CSLMQGSTLPRRSGAA
CSLMFGSALVRRTGAA

SEQ ID NO: 56411 - protein, 16 aa, Artificial Sequence
  Description of Artificial Sequence: Synthetic peptide
  Seed: CSLMQGSTLPRRSGAA
CSLMFGSALVRRVGAA

SEQ ID NO: 56412 - protein, 16 aa, Artificial Sequence
  Description of Artificial Sequence: Synthetic peptide
  Seed: CSLMQGSTLPRRSGAA
CSLMFGSGLARRAGAA

SEQ ID NO: 56413 - protein, 16 aa, Artificial Sequence
  Description of Artificial Sequence: Synthetic peptide
  Seed: CSLMQGSTLPRRSGAA
CSLMFGSGLARRIGAA

SEQ ID NO: 56414 - protein, 16 aa, Artificial Sequence
  Description of Artificial Sequence: Synthetic peptide
  Seed: CSLMQGSTLPRRSGAA
CSLMFGSGLARRSGAA

SEQ ID NO: 56415 - protein, 16 aa, Artificial Sequence
  Description of Artificial Sequence: Synthetic peptide
  Seed: CSLMQGSTLPRRSGAA
CSLMFGSGLARRTGAA

SEQ ID NO: 56416 - protein, 16 aa, Artificial Sequence
  Description of Artificial Sequence: Synthetic peptide
  Seed: CSLMQGSTLPRRSGAA
CSLMFGSGLARRVGAA

SEQ ID NO: 56417 - protein, 16 aa, Artificial Sequence
  Description of Artificial Sequence: Synthetic peptide
  Seed: CSLMQGSTLPRRSGAA
CSLMFGSGLIRRAGAA

SEQ ID NO: 56418 - protein, 16 aa, Artificial Sequence
  Description of Artificial Sequence: Synthetic peptide
  Seed: CSLMQGSTLPRRSGAA
CSLMFGSGLIRRVGAA

SEQ ID NO: 56419 - protein, 16 aa, Artificial Sequence
  Description of Artificial Sequence: Synthetic peptide
  Seed: CSLMQGSTLPRRSGAA
CSLMFGSGLPRRVGAA

SEQ ID NO: 56420 - protein, 16 aa, Artificial Sequence
  Description of Artificial Sequence: Synthetic peptide
  Seed: CSLMQGSTLPRRSGAA
CSLMFGSGLVRRAGAA

SEQ ID NO: 56421 - protein, 16 aa, Artificial Sequence
  Description of Artificial Sequence: Synthetic peptide
  Seed: CSLMQGSTLPRRSGAA
CSLMFGSGLVRRIGAA

SEQ ID NO: 56422 - protein, 16 aa, Artificial Sequence
  Description of Artificial Sequence: Synthetic peptide
  Seed: CSLMQGSTLPRRSGAA
CSLMFGSGLVRRSGAA

SEQ ID NO: 56423 - protein, 16 aa, Artificial Sequence
  Description of Artificial Sequence: Synthetic peptide
  Seed: CSLMQGSTLPRRSGAA
CSLMFGSGLVRRTGAA

SEQ ID NO: 56424 - protein, 16 aa, Artificial Sequence
  Description of Artificial Sequence: Synthetic peptide
  Seed: CSLMQGSTLPRRSGAA
CSLMFGSGLVRRVGAA

SEQ ID NO: 56425 - protein, 16 aa, Artificial Sequence
  Description of Artificial Sequence: Synthetic peptide
  Seed: CSLMQGSTLPRRSGAA
CSLMFGSSLARRAGAA

SEQ ID NO: 56426 - protein, 16 aa, Artificial Sequence
  Description of Artificial Sequence: Synthetic peptide
  Seed: CSLMQGSTLPRRSGAA
CSLMFGSSLARRVGAA

SEQ ID NO: 56427 - protein, 16 aa, Artificial Sequence
  Description of Artificial Sequence: Synthetic peptide
  Seed: CSLMQGSTLPRRSGAA
CSLMIGSALARRGGAA

SEQ ID NO: 56428 - protein, 16 aa, Artificial Sequence
  Description of Artificial Sequence: Synthetic peptide
  Seed: CSLMQGSTLPRRSGAA
CSLMIGSALARRIGAA

SEQ ID NO: 56429 - protein, 16 aa, Artificial Sequence
  Description of Artificial Sequence: Synthetic peptide
  Seed: CSLMQGSTLPRRSGAA
CSLMIGSALARRLGAA

SEQ ID NO: 56430 - protein, 16 aa, Artificial Sequence
  Description of Artificial Sequence: Synthetic peptide
  Seed: CSLMQGSTLPRRSGAA
CSLMIGSALARRMGAA

SEQ ID NO: 56431 - protein, 16 aa, Artificial Sequence
  Description of Artificial Sequence: Synthetic peptide
  Seed: CSLMQGSTLPRRSGAA
CSLMIGSALARRNGAA

SEQ ID NO: 56432 - protein, 16 aa, Artificial Sequence
  Description of Artificial Sequence: Synthetic peptide
  Seed: CSLMQGSTLPRRSGAA
CSLMIGSALARRSGAA

SEQ ID NO: 56433 - protein, 16 aa, Artificial Sequence
  Description of Artificial Sequence: Synthetic peptide
  Seed: CSLMQGSTLPRRSGAA
CSLMIGSALARRTGAA

SEQ ID NO: 56434 - protein, 16 aa, Artificial Sequence
  Description of Artificial Sequence: Synthetic peptide
  Seed: CSLMQGSTLPRRSGAA
CSLMIGSALARRVGAA

SEQ ID NO: 56435 - protein, 16 aa, Artificial Sequence
  Description of Artificial Sequence: Synthetic peptide
  Seed: CSLMQGSTLPRRSGAA
CSLMIGSALIRRAGAA

SEQ ID NO: 56436 - protein, 16 aa, Artificial Sequence
  Description of Artificial Sequence: Synthetic peptide
  Seed: CSLMQGSTLPRRSGAA
CSLMIGSALIRRVGAA

SEQ ID NO: 56437 - protein, 16 aa, Artificial Sequence
  Description of Artificial Sequence: Synthetic peptide
  Seed: CSLMQGSTLPRRSGAA
CSLMIGSALPRRAGAA

SEQ ID NO: 56438 - protein, 16 aa, Artificial Sequence
  Description of Artificial Sequence: Synthetic peptide
  Seed: CSLMQGSTLPRRSGAA
CSLMIGSALPRRIGAA

SEQ ID NO: 56439 - protein, 16 aa, Artificial Sequence
  Description of Artificial Sequence: Synthetic peptide
  Seed: CSLMQGSTLPRRSGAA
CSLMIGSALPRRSGAA

SEQ ID NO: 56440 - protein, 16 aa, Artificial Sequence
  Description of Artificial Sequence: Synthetic peptide
  Seed: CSLMQGSTLPRRSGAA
CSLMIGSALPRRTGAA

SEQ ID NO: 56441 - protein, 16 aa, Artificial Sequence
  Description of Artificial Sequence: Synthetic peptide
  Seed: CSLMQGSTLPRRSGAA
CSLMIGSALPRRVGAA

SEQ ID NO: 56442 - protein, 16 aa, Artificial Sequence
  Description of Artificial Sequence: Synthetic peptide
  Seed: CSLMQGSTLPRRSGAA
CSLMIGSALVRRAGAA

SEQ ID NO: 56443 - protein, 16 aa, Artificial Sequence
  Description of Artificial Sequence: Synthetic peptide
  Seed: CSLMQGSTLPRRSGAA
CSLMIGSALVRRIGAA

SEQ ID NO: 56444 - protein, 16 aa, Artificial Sequence
  Description of Artificial Sequence: Synthetic peptide
  Seed: CSLMQGSTLPRRSGAA
CSLMIGSALVRRSGAA

SEQ ID NO: 56445 - protein, 16 aa, Artificial Sequence
  Description of Artificial Sequence: Synthetic peptide
  Seed: CSLMQGSTLPRRSGAA
CSLMIGSALVRRTGAA

SEQ ID NO: 56446 - protein, 16 aa, Artificial Sequence
  Description of Artificial Sequence: Synthetic peptide
  Seed: CSLMQGSTLPRRSGAA
CSLMIGSALVRRVGAA

SEQ ID NO: 56447 - protein, 16 aa, Artificial Sequence
  Description of Artificial Sequence: Synthetic peptide
  Seed: CSLMQGSTLPRRSGAA
CSLMIGSGLARRAGAA

SEQ ID NO: 56448 - protein, 16 aa, Artificial Sequence
  Description of Artificial Sequence: Synthetic peptide
  Seed: CSLMQGSTLPRRSGAA
CSLMIGSGLARRGGAA

SEQ ID NO: 56449 - protein, 16 aa, Artificial Sequence
  Description of Artificial Sequence: Synthetic peptide
  Seed: CSLMQGSTLPRRSGAA
CSLMIGSGLARRIGAA

SEQ ID NO: 56450 - protein, 16 aa, Artificial Sequence
  Description of Artificial Sequence: Synthetic peptide
  Seed: CSLMQGSTLPRRSGAA
CSLMIGSGLARRLGAA

SEQ ID NO: 56451 - protein, 16 aa, Artificial Sequence
  Description of Artificial Sequence: Synthetic peptide
  Seed: CSLMQGSTLPRRSGAA
CSLMIGSGLARRMGAA

SEQ ID NO: 56452 - protein, 16 aa, Artificial Sequence
  Description of Artificial Sequence: Synthetic peptide
  Seed: CSLMQGSTLPRRSGAA
CSLMIGSGLARRSGAA

SEQ ID NO: 56453 - protein, 16 aa, Artificial Sequence
  Description of Artificial Sequence: Synthetic peptide
  Seed: CSLMQGSTLPRRSGAA
CSLMIGSGLARRTGAA

SEQ ID NO: 56454 - protein, 16 aa, Artificial Sequence
  Description of Artificial Sequence: Synthetic peptide
  Seed: CSLMQGSTLPRRSGAA
CSLMIGSGLARRVGAA

SEQ ID NO: 56455 - protein, 16 aa, Artificial Sequence
  Description of Artificial Sequence: Synthetic peptide
  Seed: CSLMQGSTLPRRSGAA
CSLMIGSGLIRRAGAA

SEQ ID NO: 56456 - protein, 16 aa, Artificial Sequence
  Description of Artificial Sequence: Synthetic peptide
  Seed: CSLMQGSTLPRRSGAA
CSLMIGSGLIRRSGAA

SEQ ID NO: 56457 - protein, 16 aa, Artificial Sequence
  Description of Artificial Sequence: Synthetic peptide
  Seed: CSLMQGSTLPRRSGAA
CSLMIGSGLIRRVGAA

SEQ ID NO: 56458 - protein, 16 aa, Artificial Sequence
  Description of Artificial Sequence: Synthetic peptide
  Seed: CSLMQGSTLPRRSGAA
CSLMIGSGLPRRAGAA

SEQ ID NO: 56459 - protein, 16 aa, Artificial Sequence
  Description of Artificial Sequence: Synthetic peptide
  Seed: CSLMQGSTLPRRSGAA
CSLMIGSGLPRRIGAA

SEQ ID NO: 56460 - protein, 16 aa, Artificial Sequence
  Description of Artificial Sequence: Synthetic peptide
  Seed: CSLMQGSTLPRRSGAA
CSLMIGSGLPRRVGAA

SEQ ID NO: 56461 - protein, 16 aa, Artificial Sequence
  Description of Artificial Sequence: Synthetic peptide
  Seed: CSLMQGSTLPRRSGAA
CSLMIGSGLVRRAGAA

SEQ ID NO: 56462 - protein, 16 aa, Artificial Sequence
  Description of Artificial Sequence: Synthetic peptide
  Seed: CSLMQGSTLPRRSGAA
CSLMIGSGLVRRIGAA

SEQ ID NO: 56463 - protein, 16 aa, Artificial Sequence
  Description of Artificial Sequence: Synthetic peptide
  Seed: CSLMQGSTLPRRSGAA
CSLMIGSGLVRRSGAA

SEQ ID NO: 56464 - protein, 16 aa, Artificial Sequence
  Description of Artificial Sequence: Synthetic peptide
  Seed: CSLMQGSTLPRRSGAA
CSLMIGSGLVRRTGAA

SEQ ID NO: 56465 - protein, 16 aa, Artificial Sequence
  Description of Artificial Sequence: Synthetic peptide
  Seed: CSLMQGSTLPRRSGAA
CSLMIGSGLVRRVGAA

SEQ ID NO: 56466 - protein, 16 aa, Artificial Sequence
  Description of Artificial Sequence: Synthetic peptide
  Seed: CSLMQGSTLPRRSGAA
CSLMIGSSLARRAGAA

SEQ ID NO: 56467 - protein, 16 aa, Artificial Sequence
  Description of Artificial Sequence: Synthetic peptide
  Seed: CSLMQGSTLPRRSGAA
CSLMIGSSLARRIGAA

SEQ ID NO: 56468 - protein, 16 aa, Artificial Sequence
  Description of Artificial Sequence: Synthetic peptide
  Seed: CSLMQGSTLPRRSGAA
CSLMIGSSLARRSGAA

SEQ ID NO: 56469 - protein, 16 aa, Artificial Sequence
  Description of Artificial Sequence: Synthetic peptide
  Seed: CSLMQGSTLPRRSGAA
CSLMIGSSLARRTGAA

SEQ ID NO: 56470 - protein, 16 aa, Artificial Sequence
  Description of Artificial Sequence: Synthetic peptide
  Seed: CSLMQGSTLPRRSGAA
CSLMIGSSLARRVGAA

SEQ ID NO: 56471 - protein, 16 aa, Artificial Sequence
  Description of Artificial Sequence: Synthetic peptide
  Seed: CSLMQGSTLPRRSGAA
CSLMIGSSLVRRAGAA

SEQ ID NO: 56472 - protein, 16 aa, Artificial Sequence
  Description of Artificial Sequence: Synthetic peptide
  Seed: CSLMQGSTLPRRSGAA
CSLMLGSALARRAGAA

SEQ ID NO: 56473 - protein, 16 aa, Artificial Sequence
  Description of Artificial Sequence: Synthetic peptide
  Seed: CSLMQGSTLPRRSGAA
CSLMLGSALARRIGAA

SEQ ID NO: 56474 - protein, 16 aa, Artificial Sequence
  Description of Artificial Sequence: Synthetic peptide
  Seed: CSLMQGSTLPRRSGAA
CSLMLGSALARRSGAA

SEQ ID NO: 56475 - protein, 16 aa, Artificial Sequence
  Description of Artificial Sequence: Synthetic peptide
  Seed: CSLMQGSTLPRRSGAA
CSLMLGSALARRTGAA

SEQ ID NO: 56476 - protein, 16 aa, Artificial Sequence
  Description of Artificial Sequence: Synthetic peptide
  Seed: CSLMQGSTLPRRSGAA
CSLMLGSALARRVGAA

SEQ ID NO: 56477 - protein, 16 aa, Artificial Sequence
  Description of Artificial Sequence: Synthetic peptide
  Seed: CSLMQGSTLPRRSGAA
CSLMLGSGLARRAGAA

SEQ ID NO: 56478 - protein, 16 aa, Artificial Sequence
  Description of Artificial Sequence: Synthetic peptide
  Seed: CSLMQGSTLPRRSGAA
CSLMLGSGLARRIGAA

SEQ ID NO: 56479 - protein, 16 aa, Artificial Sequence
  Description of Artificial Sequence: Synthetic peptide
  Seed: CSLMQGSTLPRRSGAA
CSLMLGSGLARRVGAA

SEQ ID NO: 56480 - protein, 16 aa, Artificial Sequence
  Description of Artificial Sequence: Synthetic peptide
  Seed: CSLMQGSTLPRRSGAA
CSLMLGSGLVRRAGAA

SEQ ID NO: 56481 - protein, 16 aa, Artificial Sequence
  Description of Artificial Sequence: Synthetic peptide
  Seed: CSLMQGSTLPRRSGAA
CSLMMGSALARRAGAA

SEQ ID NO: 56482 - protein, 16 aa, Artificial Sequence
  Description of Artificial Sequence: Synthetic peptide
  Seed: CSLMQGSTLPRRSGAA
CSLMMGSALARRIGAA

SEQ ID NO: 56483 - protein, 16 aa, Artificial Sequence
  Description of Artificial Sequence: Synthetic peptide
  Seed: CSLMQGSTLPRRSGAA
CSLMMGSALARRSGAA

SEQ ID NO: 56484 - protein, 16 aa, Artificial Sequence
  Description of Artificial Sequence: Synthetic peptide
  Seed: CSLMQGSTLPRRSGAA
CSLMMGSALARRTGAA

SEQ ID NO: 56485 - protein, 16 aa, Artificial Sequence
  Description of Artificial Sequence: Synthetic peptide
  Seed: CSLMQGSTLPRRSGAA
CSLMMGSALARRVGAA

SEQ ID NO: 56486 - protein, 16 aa, Artificial Sequence
  Description of Artificial Sequence: Synthetic peptide
  Seed: CSLMQGSTLPRRSGAA
CSLMMGSALVRRAGAA

SEQ ID NO: 56487 - protein, 16 aa, Artificial Sequence
  Description of Artificial Sequence: Synthetic peptide
  Seed: CSLMQGSTLPRRSGAA
CSLMMGSALVRRSGAA

SEQ ID NO: 56488 - protein, 16 aa, Artificial Sequence
  Description of Artificial Sequence: Synthetic peptide
  Seed: CSLMQGSTLPRRSGAA
CSLMMGSALVRRTGAA

SEQ ID NO: 56489 - protein, 16 aa, Artificial Sequence
  Description of Artificial Sequence: Synthetic peptide
  Seed: CSLMQGSTLPRRSGAA
CSLMMGSALVRRVGAA

SEQ ID NO: 56490 - protein, 16 aa, Artificial Sequence
  Description of Artificial Sequence: Synthetic peptide
  Seed: CSLMQGSTLPRRSGAA
CSLMMGSGLARRAGAA

SEQ ID NO: 56491 - protein, 16 aa, Artificial Sequence
  Description of Artificial Sequence: Synthetic peptide
  Seed: CSLMQGSTLPRRSGAA
CSLMMGSGLARRIGAA

SEQ ID NO: 56492 - protein, 16 aa, Artificial Sequence
  Description of Artificial Sequence: Synthetic peptide
  Seed: CSLMQGSTLPRRSGAA
CSLMMGSGLARRSGAA

SEQ ID NO: 56493 - protein, 16 aa, Artificial Sequence
  Description of Artificial Sequence: Synthetic peptide
  Seed: CSLMQGSTLPRRSGAA
CSLMMGSGLARRTGAA

SEQ ID NO: 56494 - protein, 16 aa, Artificial Sequence
  Description of Artificial Sequence: Synthetic peptide
  Seed: CSLMQGSTLPRRSGAA
CSLMMGSGLARRVGAA

SEQ ID NO: 56495 - protein, 16 aa, Artificial Sequence
  Description of Artificial Sequence: Synthetic peptide
  Seed: CSLMQGSTLPRRSGAA
CSLMMGSGLVRRAGAA

SEQ ID NO: 56496 - protein, 16 aa, Artificial Sequence
  Description of Artificial Sequence: Synthetic peptide
  Seed: CSLMQGSTLPRRSGAA
CSLMMGSGLVRRVGAA

SEQ ID NO: 56497 - protein, 16 aa, Artificial Sequence
  Description of Artificial Sequence: Synthetic peptide
  Seed: CSLMQGSTLPRRSGAA
CSLMPGSALARRAGAA

SEQ ID NO: 56498 - protein, 16 aa, Artificial Sequence
  Description of Artificial Sequence: Synthetic peptide
  Seed: CSLMQGSTLPRRSGAA
CSLMPGSALARRIGAA

SEQ ID NO: 56499 - protein, 16 aa, Artificial Sequence
  Description of Artificial Sequence: Synthetic peptide
  Seed: CSLMQGSTLPRRSGAA
CSLMPGSALARRSGAA

SEQ ID NO: 56500 - protein, 16 aa, Artificial Sequence
  Description of Artificial Sequence: Synthetic peptide
  Seed: CSLMQGSTLPRRSGAA
CSLMPGSALARRTGAA

SEQ ID NO: 56501 - protein, 16 aa, Artificial Sequence
  Description of Artificial Sequence: Synthetic peptide
  Seed: CSLMQGSTLPRRSGAA
CSLMPGSALARRVGAA

SEQ ID NO: 56502 - protein, 16 aa, Artificial Sequence
  Description of Artificial Sequence: Synthetic peptide
  Seed: CSLMQGSTLPRRSGAA
CSLMPGSALIRRAGAA

SEQ ID NO: 56503 - protein, 16 aa, Artificial Sequence
  Description of Artificial Sequence: Synthetic peptide
  Seed: CSLMQGSTLPRRSGAA
CSLMPGSALVRRAGAA

SEQ ID NO: 56504 - protein, 16 aa, Artificial Sequence
  Description of Artificial Sequence: Synthetic peptide
  Seed: CSLMQGSTLPRRSGAA
CSLMPGSALVRRSGAA

SEQ ID NO: 56505 - protein, 16 aa, Artificial Sequence
  Description of Artificial Sequence: Synthetic peptide
  Seed: CSLMQGSTLPRRSGAA
CSLMPGSALVRRTGAA

SEQ ID NO: 56506 - protein, 16 aa, Artificial Sequence
  Description of Artificial Sequence: Synthetic peptide
  Seed: CSLMQGSTLPRRSGAA
CSLMPGSALVRRVGAA

SEQ ID NO: 56507 - protein, 16 aa, Artificial Sequence
  Description of Artificial Sequence: Synthetic peptide
  Seed: CSLMQGSTLPRRSGAA
CSLMPGSGLARRAGAA

SEQ ID NO: 56508 - protein, 16 aa, Artificial Sequence
  Description of Artificial Sequence: Synthetic peptide
  Seed: CSLMQGSTLPRRSGAA
CSLMPGSGLARRIGAA

SEQ ID NO: 56509 - protein, 16 aa, Artificial Sequence
  Description of Artificial Sequence: Synthetic peptide
  Seed: CSLMQGSTLPRRSGAA
CSLMPGSGLARRVGAA

SEQ ID NO: 56510 - protein, 16 aa, Artificial Sequence
  Description of Artificial Sequence: Synthetic peptide
  Seed: CSLMQGSTLPRRSGAA
CSLMPGSGLVRRAGAA

SEQ ID NO: 56511 - protein, 16 aa, Artificial Sequence
  Description of Artificial Sequence: Synthetic peptide
  Seed: CSLMQGSTLPRRSGAA
CSLMPGSGLVRRIGAA

SEQ ID NO: 56512 - protein, 16 aa, Artificial Sequence
  Description of Artificial Sequence: Synthetic peptide
  Seed: CSLMQGSTLPRRSGAA
CSLMPGSGLVRRVGAA

SEQ ID NO: 56513 - protein, 16 aa, Artificial Sequence
  Description of Artificial Sequence: Synthetic peptide
  Seed: CSLMQGSTLPRRSGAA
CSLMTGSALARRAGAA

SEQ ID NO: 56514 - protein, 16 aa, Artificial Sequence
  Description of Artificial Sequence: Synthetic peptide
  Seed: CSLMQGSTLPRRSGAA
CSLMTGSALARRVGAA

SEQ ID NO: 56515 - protein, 16 aa, Artificial Sequence
  Description of Artificial Sequence: Synthetic peptide
  Seed: CSLMQGSTLPRRSGAA
CSLMTGSGLARRVGAA

SEQ ID NO: 56516 - protein, 16 aa, Artificial Sequence
  Description of Artificial Sequence: Synthetic peptide
  Seed: CSLMQGSTLPRRSGAA
CSLMVGSALARRAGAA

SEQ ID NO: 56517 - protein, 16 aa, Artificial Sequence
  Description of Artificial Sequence: Synthetic peptide
  Seed: CSLMQGSTLPRRSGAA
CSLMVGSALARRIGAA

SEQ ID NO: 56518 - protein, 16 aa, Artificial Sequence
  Description of Artificial Sequence: Synthetic peptide
  Seed: CSLMQGSTLPRRSGAA
CSLMVGSALARRLGAA

SEQ ID NO: 56519 - protein, 16 aa, Artificial Sequence
  Description of Artificial Sequence: Synthetic peptide
  Seed: CSLMQGSTLPRRSGAA
CSLMVGSALARRMGAA

SEQ ID NO: 56520 - protein, 16 aa, Artificial Sequence
  Description of Artificial Sequence: Synthetic peptide
  Seed: CSLMQGSTLPRRSGAA
CSLMVGSALARRSGAA

SEQ ID NO: 56521 - protein, 16 aa, Artificial Sequence
  Description of Artificial Sequence: Synthetic peptide
  Seed: CSLMQGSTLPRRSGAA
CSLMVGSALARRTGAA

SEQ ID NO: 56522 - protein, 16 aa, Artificial Sequence
  Description of Artificial Sequence: Synthetic peptide
  Seed: CSLMQGSTLPRRSGAA
CSLMVGSALARRVGAA

SEQ ID NO: 56523 - protein, 16 aa, Artificial Sequence
  Description of Artificial Sequence: Synthetic peptide
  Seed: CSLMQGSTLPRRSGAA
CSLMVGSALPRRAGAA

SEQ ID NO: 56524 - protein, 16 aa, Artificial Sequence
  Description of Artificial Sequence: Synthetic peptide
  Seed: CSLMQGSTLPRRSGAA
CSLMVGSALPRRVGAA

SEQ ID NO: 56525 - protein, 16 aa, Artificial Sequence
  Description of Artificial Sequence: Synthetic peptide
  Seed: CSLMQGSTLPRRSGAA
CSLMVGSALVRRAGAA

SEQ ID NO: 56526 - protein, 16 aa, Artificial Sequence
  Description of Artificial Sequence: Synthetic peptide
  Seed: CSLMQGSTLPRRSGAA
CSLMVGSALVRRIGAA

SEQ ID NO: 56527 - protein, 16 aa, Artificial Sequence
  Description of Artificial Sequence: Synthetic peptide
  Seed: CSLMQGSTLPRRSGAA
CSLMVGSALVRRSGAA

SEQ ID NO: 56528 - protein, 16 aa, Artificial Sequence
  Description of Artificial Sequence: Synthetic peptide
  Seed: CSLMQGSTLPRRSGAA
CSLMVGSALVRRTGAA

SEQ ID NO: 56529 - protein, 16 aa, Artificial Sequence
  Description of Artificial Sequence: Synthetic peptide
  Seed: CSLMQGSTLPRRSGAA
CSLMVGSALVRRVGAA

SEQ ID NO: 56530 - protein, 16 aa, Artificial Sequence
  Description of Artificial Sequence: Synthetic peptide
  Seed: CSLMQGSTLPRRSGAA
CSLMVGSGLARRAGAA

SEQ ID NO: 56531 - protein, 16 aa, Artificial Sequence
  Description of Artificial Sequence: Synthetic peptide
  Seed: CSLMQGSTLPRRSGAA
CSLMVGSGLARRIGAA

SEQ ID NO: 56532 - protein, 16 aa, Artificial Sequence
  Description of Artificial Sequence: Synthetic peptide
  Seed: CSLMQGSTLPRRSGAA
CSLMVGSGLARRLGAA

SEQ ID NO: 56533 - protein, 16 aa, Artificial Sequence
  Description of Artificial Sequence: Synthetic peptide
  Seed: CSLMQGSTLPRRSGAA
CSLMVGSGLARRMGAA

SEQ ID NO: 56534 - protein, 16 aa, Artificial Sequence
  Description of Artificial Sequence: Synthetic peptide
  Seed: CSLMQGSTLPRRSGAA
CSLMVGSGLARRSGAA

SEQ ID NO: 56535 - protein, 16 aa, Artificial Sequence
  Description of Artificial Sequence: Synthetic peptide
  Seed: CSLMQGSTLPRRSGAA
CSLMVGSGLARRTGAA

SEQ ID NO: 56536 - protein, 16 aa, Artificial Sequence
  Description of Artificial Sequence: Synthetic peptide
  Seed: CSLMQGSTLPRRSGAA
CSLMVGSGLARRVGAA

SEQ ID NO: 56537 - protein, 16 aa, Artificial Sequence
  Description of Artificial Sequence: Synthetic peptide
  Seed: CSLMQGSTLPRRSGAA
CSLMVGSGLIRRAGAA

SEQ ID NO: 56538 - protein, 16 aa, Artificial Sequence
  Description of Artificial Sequence: Synthetic peptide
  Seed: CSLMQGSTLPRRSGAA
CSLMVGSGLPRRVGAA

SEQ ID NO: 56539 - protein, 16 aa, Artificial Sequence
  Description of Artificial Sequence: Synthetic peptide
  Seed: CSLMQGSTLPRRSGAA
CSLMVGSGLVRRAGAA

SEQ ID NO: 56540 - protein, 16 aa, Artificial Sequence
  Description of Artificial Sequence: Synthetic peptide
  Seed: CSLMQGSTLPRRSGAA
CSLMVGSGLVRRIGAA

SEQ ID NO: 56541 - protein, 16 aa, Artificial Sequence
  Description of Artificial Sequence: Synthetic peptide
  Seed: CSLMQGSTLPRRSGAA
CSLMVGSGLVRRSGAA

SEQ ID NO: 56542 - protein, 16 aa, Artificial Sequence
  Description of Artificial Sequence: Synthetic peptide
  Seed: CSLMQGSTLPRRSGAA
CSLMVGSGLVRRTGAA

SEQ ID NO: 56543 - protein, 16 aa, Artificial Sequence
  Description of Artificial Sequence: Synthetic peptide
  Seed: CSLMQGSTLPRRSGAA
CSLMVGSGLVRRVGAA

SEQ ID NO: 56544 - protein, 16 aa, Artificial Sequence
  Description of Artificial Sequence: Synthetic peptide
  Seed: CSLMQGSTLPRRSGAA
CSLMVGSSLARRAGAA

SEQ ID NO: 56545 - protein, 16 aa, Artificial Sequence
  Description of Artificial Sequence: Synthetic peptide
  Seed: CSLMQGSTLPRRSGAA
CSLMVGSSLARRVGAA

SEQ ID NO: 56546 - protein, 16 aa, Artificial Sequence
  Description of Artificial Sequence: Synthetic peptide
  Seed: CSLMQGSTLPRRSGAA
CSLMWGSALARRAGAA

SEQ ID NO: 56547 - protein, 16 aa, Artificial Sequence
  Description of Artificial Sequence: Synthetic peptide
  Seed: CSLMQGSTLPRRSGAA
CSLMWGSALARRVGAA

SEQ ID NO: 56548 - protein, 16 aa, Artificial Sequence
  Description of Artificial Sequence: Synthetic peptide
  Seed: CSLMQGSTLPRRSGAA
CSLMWGSALVRRAGAA

SEQ ID NO: 56549 - protein, 16 aa, Artificial Sequence
  Description of Artificial Sequence: Synthetic peptide
  Seed: CSLMQGSTLPRRSGAA
CSLMWGSALVRRVGAA

SEQ ID NO: 56550 - protein, 16 aa, Artificial Sequence
  Description of Artificial Sequence: Synthetic peptide
  Seed: CSLMQGSTLPRRSGAA
CSLMWGSGLARRAGAA

SEQ ID NO: 56551 - protein, 16 aa, Artificial Sequence
  Description of Artificial Sequence: Synthetic peptide
  Seed: CSLMQGSTLPRRSGAA
CSLMWGSGLARRIGAA

SEQ ID NO: 56552 - protein, 16 aa, Artificial Sequence
  Description of Artificial Sequence: Synthetic peptide
  Seed: CSLMQGSTLPRRSGAA
CSLMWGSGLARRVGAA

SEQ ID NO: 56553 - protein, 16 aa, Artificial Sequence
  Description of Artificial Sequence: Synthetic peptide
  Seed: CSLMQGSTLPRRSGAA
CSLMWGSGLVRRAGAA

SEQ ID NO: 56554 - protein, 16 aa, Artificial Sequence
  Description of Artificial Sequence: Synthetic peptide
  Seed: CSLMQGSTLPRRSGAA
CSLMWGSGLVRRVGAA

SEQ ID NO: 56555 - protein, 16 aa, Artificial Sequence
  Description of Artificial Sequence: Synthetic peptide
  Seed: CSLMQGSTLPRRSGAA
CSLMYGSALARRAGAA

SEQ ID NO: 56556 - protein, 16 aa, Artificial Sequence
  Description of Artificial Sequence: Synthetic peptide
  Seed: CSLMQGSTLPRRSGAA
CSLMYGSALARRIGAA

SEQ ID NO: 56557 - protein, 16 aa, Artificial Sequence
  Description of Artificial Sequence: Synthetic peptide
  Seed: CSLMQGSTLPRRSGAA
CSLMYGSALARRVGAA

SEQ ID NO: 56558 - protein, 16 aa, Artificial Sequence
  Description of Artificial Sequence: Synthetic peptide
  Seed: CSLMQGSTLPRRSGAA
CSLMYGSALVRRVGAA

SEQ ID NO: 56559 - protein, 16 aa, Artificial Sequence
  Description of Artificial Sequence: Synthetic peptide
  Seed: CSLMQGSTLPRRSGAA
CSLMYGSGLARRAGAA

SEQ ID NO: 56560 - protein, 16 aa, Artificial Sequence
  Description of Artificial Sequence: Synthetic peptide
  Seed: CSLMQGSTLPRRSGAA
CSLMYGSGLARRVGAA

SEQ ID NO: 56561 - protein, 16 aa, Artificial Sequence
  Description of Artificial Sequence: Synthetic peptide
  Seed: CSLMQGSTLPRRSGAA
CSLMYGSGLVRRAGAA

SEQ ID NO: 56562 - protein, 16 aa, Artificial Sequence
  Description of Artificial Sequence: Synthetic peptide
  Seed: CSLMQGSTLPRRSGAA
CSLMYGSGLVRRVGAA

SEQ ID NO: 56563 - protein, 17 aa, Artificial Sequence
  Description of Artificial Sequence: Synthetic peptide
  Seed: CSLMQGSTLPRRSGAAG
CSLMFGSALARRAGAAG

SEQ ID NO: 56564 - protein, 17 aa, Artificial Sequence
  Description of Artificial Sequence: Synthetic peptide
  Seed: CSLMQGSTLPRRSGAAG
CSLMFGSALARRFGAAG

SEQ ID NO: 56565 - protein, 17 aa, Artificial Sequence
  Description of Artificial Sequence: Synthetic peptide
  Seed: CSLMQGSTLPRRSGAAG
CSLMFGSALARRGGAAG

SEQ ID NO: 56566 - protein, 17 aa, Artificial Sequence
  Description of Artificial Sequence: Synthetic peptide
  Seed: CSLMQGSTLPRRSGAAG
CSLMFGSALARRIGAAG

SEQ ID NO: 56567 - protein, 17 aa, Artificial Sequence
  Description of Artificial Sequence: Synthetic peptide
  Seed: CSLMQGSTLPRRSGAAG
CSLMFGSALARRLGAAG

SEQ ID NO: 56568 - protein, 17 aa, Artificial Sequence
  Description of Artificial Sequence: Synthetic peptide
  Seed: CSLMQGSTLPRRSGAAG
CSLMFGSALARRMGAAG

SEQ ID NO: 56569 - protein, 17 aa, Artificial Sequence
  Description of Artificial Sequence: Synthetic peptide
  Seed: CSLMQGSTLPRRSGAAG
CSLMFGSALARRSGAAG

SEQ ID NO: 56570 - protein, 17 aa, Artificial Sequence
  Description of Artificial Sequence: Synthetic peptide
  Seed: CSLMQGSTLPRRSGAAG
CSLMFGSALARRTGAAG

SEQ ID NO: 56571 - protein, 17 aa, Artificial Sequence
  Description of Artificial Sequence: Synthetic peptide
  Seed: CSLMQGSTLPRRSGAAG
CSLMFGSALARRVGAAG

SEQ ID NO: 56572 - protein, 17 aa, Artificial Sequence
  Description of Artificial Sequence: Synthetic peptide
  Seed: CSLMQGSTLPRRSGAAG
CSLMFGSALGRRAGAAG

SEQ ID NO: 56573 - protein, 17 aa, Artificial Sequence
  Description of Artificial Sequence: Synthetic peptide
  Seed: CSLMQGSTLPRRSGAAG
CSLMFGSALGRRIGAAG

SEQ ID NO: 56574 - protein, 17 aa, Artificial Sequence
  Description of Artificial Sequence: Synthetic peptide
  Seed: CSLMQGSTLPRRSGAAG
CSLMFGSALGRRLGAAG

SEQ ID NO: 56575 - protein, 17 aa, Artificial Sequence
  Description of Artificial Sequence: Synthetic peptide
  Seed: CSLMQGSTLPRRSGAAG
CSLMFGSALGRRMGAAG

SEQ ID NO: 56576 - protein, 17 aa, Artificial Sequence
  Description of Artificial Sequence: Synthetic peptide
  Seed: CSLMQGSTLPRRSGAAG
CSLMFGSALGRRSGAAG

SEQ ID NO: 56577 - protein, 17 aa, Artificial Sequence
  Description of Artificial Sequence: Synthetic peptide
  Seed: CSLMQGSTLPRRSGAAG
CSLMFGSALGRRTGAAG

SEQ ID NO: 56578 - protein, 17 aa, Artificial Sequence
  Description of Artificial Sequence: Synthetic peptide
  Seed: CSLMQGSTLPRRSGAAG
CSLMFGSALGRRVGAAG

SEQ ID NO: 56579 - protein, 17 aa, Artificial Sequence
  Description of Artificial Sequence: Synthetic peptide
  Seed: CSLMQGSTLPRRSGAAG
CSLMFGSALNRRAGAAG

SEQ ID NO: 56580 - protein, 17 aa, Artificial Sequence
  Description of Artificial Sequence: Synthetic peptide
  Seed: CSLMQGSTLPRRSGAAG
CSLMFGSALNRRIGAAG

SEQ ID NO: 56581 - protein, 17 aa, Artificial Sequence
  Description of Artificial Sequence: Synthetic peptide
  Seed: CSLMQGSTLPRRSGAAG
CSLMFGSALNRRLGAAG

SEQ ID NO: 56582 - protein, 17 aa, Artificial Sequence
  Description of Artificial Sequence: Synthetic peptide
  Seed: CSLMQGSTLPRRSGAAG
CSLMFGSALNRRVGAAG

SEQ ID NO: 56583 - protein, 17 aa, Artificial Sequence
  Description of Artificial Sequence: Synthetic peptide
  Seed: CSLMQGSTLPRRSGAAG
CSLMFGSALPRRAGAAG

SEQ ID NO: 56584 - protein, 17 aa, Artificial Sequence
  Description of Artificial Sequence: Synthetic peptide
  Seed: CSLMQGSTLPRRSGAAG
CSLMFGSALPRRIGAAG

SEQ ID NO: 56585 - protein, 17 aa, Artificial Sequence
  Description of Artificial Sequence: Synthetic peptide
  Seed: CSLMQGSTLPRRSGAAG
CSLMFGSALPRRLGAAG

SEQ ID NO: 56586 - protein, 17 aa, Artificial Sequence
  Description of Artificial Sequence: Synthetic peptide
  Seed: CSLMQGSTLPRRSGAAG
CSLMFGSALPRRMGAAG

SEQ ID NO: 56587 - protein, 17 aa, Artificial Sequence
  Description of Artificial Sequence: Synthetic peptide
  Seed: CSLMQGSTLPRRSGAAG
CSLMFGSALPRRVGAAG

SEQ ID NO: 56588 - protein, 17 aa, Artificial Sequence
  Description of Artificial Sequence: Synthetic peptide
  Seed: CSLMQGSTLPRRSGAAG
CSLMFGSALSRRAGAAG

SEQ ID NO: 56589 - protein, 17 aa, Artificial Sequence
  Description of Artificial Sequence: Synthetic peptide
  Seed: CSLMQGSTLPRRSGAAG
CSLMFGSALSRRIGAAG

SEQ ID NO: 56590 - protein, 17 aa, Artificial Sequence
  Description of Artificial Sequence: Synthetic peptide
  Seed: CSLMQGSTLPRRSGAAG
CSLMFGSALSRRLGAAG

SEQ ID NO: 56591 - protein, 17 aa, Artificial Sequence
  Description of Artificial Sequence: Synthetic peptide
  Seed: CSLMQGSTLPRRSGAAG
CSLMFGSALSRRMGAAG

SEQ ID NO: 56592 - protein, 17 aa, Artificial Sequence
  Description of Artificial Sequence: Synthetic peptide
  Seed: CSLMQGSTLPRRSGAAG
CSLMFGSALSRRSGAAG

SEQ ID NO: 56593 - protein, 17 aa, Artificial Sequence
  Description of Artificial Sequence: Synthetic peptide
  Seed: CSLMQGSTLPRRSGAAG
CSLMFGSALSRRTGAAG

SEQ ID NO: 56594 - protein, 17 aa, Artificial Sequence
  Description of Artificial Sequence: Synthetic peptide
  Seed: CSLMQGSTLPRRSGAAG
CSLMFGSALSRRVGAAG

SEQ ID NO: 56595 - protein, 17 aa, Artificial Sequence
  Description of Artificial Sequence: Synthetic peptide
  Seed: CSLMQGSTLPRRSGAAG
CSLMFGSALTRRAGAAG

SEQ ID NO: 56596 - protein, 17 aa, Artificial Sequence
  Description of Artificial Sequence: Synthetic peptide
  Seed: CSLMQGSTLPRRSGAAG
CSLMFGSALTRRIGAAG

SEQ ID NO: 56597 - protein, 17 aa, Artificial Sequence
  Description of Artificial Sequence: Synthetic peptide
  Seed: CSLMQGSTLPRRSGAAG
CSLMFGSALTRRLGAAG

SEQ ID NO: 56598 - protein, 17 aa, Artificial Sequence
  Description of Artificial Sequence: Synthetic peptide
  Seed: CSLMQGSTLPRRSGAAG
CSLMFGSALTRRMGAAG

SEQ ID NO: 56599 - protein, 17 aa, Artificial Sequence
  Description of Artificial Sequence: Synthetic peptide
  Seed: CSLMQGSTLPRRSGAAG
CSLMFGSALTRRVGAAG

SEQ ID NO: 56600 - protein, 17 aa, Artificial Sequence
  Description of Artificial Sequence: Synthetic peptide
  Seed: CSLMQGSTLPRRSGAAG
CSLMFGSALVRRAGAAG

SEQ ID NO: 56601 - protein, 17 aa, Artificial Sequence
  Description of Artificial Sequence: Synthetic peptide
  Seed: CSLMQGSTLPRRSGAAG
CSLMFGSALVRRIGAAG

SEQ ID NO: 56602 - protein, 17 aa, Artificial Sequence
  Description of Artificial Sequence: Synthetic peptide
  Seed: CSLMQGSTLPRRSGAAG
CSLMFGSALVRRLGAAG

SEQ ID NO: 56603 - protein, 17 aa, Artificial Sequence
  Description of Artificial Sequence: Synthetic peptide
  Seed: CSLMQGSTLPRRSGAAG
CSLMFGSALVRRVGAAG

SEQ ID NO: 56604 - protein, 17 aa, Artificial Sequence
  Description of Artificial Sequence: Synthetic peptide
  Seed: CSLMQGSTLPRRSGAAG
CSLMFGSELARRAGAAG

SEQ ID NO: 56605 - protein, 17 aa, Artificial Sequence
  Description of Artificial Sequence: Synthetic peptide
  Seed: CSLMQGSTLPRRSGAAG
CSLMFGSELARRIGAAG

SEQ ID NO: 56606 - protein, 17 aa, Artificial Sequence
  Description of Artificial Sequence: Synthetic peptide
  Seed: CSLMQGSTLPRRSGAAG
CSLMFGSELARRLGAAG

SEQ ID NO: 56607 - protein, 17 aa, Artificial Sequence
  Description of Artificial Sequence: Synthetic peptide
  Seed: CSLMQGSTLPRRSGAAG
CSLMFGSELARRVGAAG

SEQ ID NO: 56608 - protein, 17 aa, Artificial Sequence
  Description of Artificial Sequence: Synthetic peptide
  Seed: CSLMQGSTLPRRSGAAG
CSLMFGSELGRRIGAAG

SEQ ID NO: 56609 - protein, 17 aa, Artificial Sequence
  Description of Artificial Sequence: Synthetic peptide
  Seed: CSLMQGSTLPRRSGAAG
CSLMFGSELGRRLGAAG

SEQ ID NO: 56610 - protein, 17 aa, Artificial Sequence
  Description of Artificial Sequence: Synthetic peptide
  Seed: CSLMQGSTLPRRSGAAG
CSLMFGSELGRRVGAAG

SEQ ID NO: 56611 - protein, 17 aa, Artificial Sequence
  Description of Artificial Sequence: Synthetic peptide
  Seed: CSLMQGSTLPRRSGAAG
CSLMFGSELSRRAGAAG

SEQ ID NO: 56612 - protein, 17 aa, Artificial Sequence
  Description of Artificial Sequence: Synthetic peptide
  Seed: CSLMQGSTLPRRSGAAG
CSLMFGSELSRRIGAAG

SEQ ID NO: 56613 - protein, 17 aa, Artificial Sequence
  Description of Artificial Sequence: Synthetic peptide
  Seed: CSLMQGSTLPRRSGAAG
CSLMFGSELSRRLGAAG

SEQ ID NO: 56614 - protein, 17 aa, Artificial Sequence
  Description of Artificial Sequence: Synthetic peptide
  Seed: CSLMQGSTLPRRSGAAG
CSLMFGSELSRRVGAAG

SEQ ID NO: 56615 - protein, 17 aa, Artificial Sequence
  Description of Artificial Sequence: Synthetic peptide
  Seed: CSLMQGSTLPRRSGAAG
CSLMFGSFLARRAGAAG

SEQ ID NO: 56616 - protein, 17 aa, Artificial Sequence
  Description of Artificial Sequence: Synthetic peptide
  Seed: CSLMQGSTLPRRSGAAG
CSLMFGSFLARRIGAAG

SEQ ID NO: 56617 - protein, 17 aa, Artificial Sequence
  Description of Artificial Sequence: Synthetic peptide
  Seed: CSLMQGSTLPRRSGAAG
CSLMFGSFLARRLGAAG

SEQ ID NO: 56618 - protein, 17 aa, Artificial Sequence
  Description of Artificial Sequence: Synthetic peptide
  Seed: CSLMQGSTLPRRSGAAG
CSLMFGSFLARRVGAAG

SEQ ID NO: 56619 - protein, 17 aa, Artificial Sequence
  Description of Artificial Sequence: Synthetic peptide
  Seed: CSLMQGSTLPRRSGAAG
CSLMFGSFLSRRVGAAG

SEQ ID NO: 56620 - protein, 17 aa, Artificial Sequence
  Description of Artificial Sequence: Synthetic peptide
  Seed: CSLMQGSTLPRRSGAAG
CSLMFGSGLARRIGAAG

SEQ ID NO: 56621 - protein, 17 aa, Artificial Sequence
  Description of Artificial Sequence: Synthetic peptide
  Seed: CSLMQGSTLPRRSGAAG
CSLMFGSGLARRLGAAG

SEQ ID NO: 56622 - protein, 17 aa, Artificial Sequence
  Description of Artificial Sequence: Synthetic peptide
  Seed: CSLMQGSTLPRRSGAAG
CSLMFGSGLARRVGAAG

SEQ ID NO: 56623 - protein, 17 aa, Artificial Sequence
  Description of Artificial Sequence: Synthetic peptide
  Seed: CSLMQGSTLPRRSGAAG
CSLMFGSGLGRRIGAAG

SEQ ID NO: 56624 - protein, 17 aa, Artificial Sequence
  Description of Artificial Sequence: Synthetic peptide
  Seed: CSLMQGSTLPRRSGAAG
CSLMFGSGLGRRLGAAG

SEQ ID NO: 56625 - protein, 17 aa, Artificial Sequence
  Description of Artificial Sequence: Synthetic peptide
  Seed: CSLMQGSTLPRRSGAAG
CSLMFGSGLGRRVGAAG

SEQ ID NO: 56626 - protein, 17 aa, Artificial Sequence
  Description of Artificial Sequence: Synthetic peptide
  Seed: CSLMQGSTLPRRSGAAG
CSLMFGSGLSRRIGAAG

SEQ ID NO: 56627 - protein, 17 aa, Artificial Sequence
  Description of Artificial Sequence: Synthetic peptide
  Seed: CSLMQGSTLPRRSGAAG
CSLMFGSGLSRRLGAAG

SEQ ID NO: 56628 - protein, 17 aa, Artificial Sequence
  Description of Artificial Sequence: Synthetic peptide
  Seed: CSLMQGSTLPRRSGAAG
CSLMFGSGLSRRVGAAG

SEQ ID NO: 56629 - protein, 17 aa, Artificial Sequence
  Description of Artificial Sequence: Synthetic peptide
  Seed: CSLMQGSTLPRRSGAAG
CSLMFGSILARRAGAAG

SEQ ID NO: 56630 - protein, 17 aa, Artificial Sequence
  Description of Artificial Sequence: Synthetic peptide
  Seed: CSLMQGSTLPRRSGAAG
CSLMFGSILARRCGAAG

SEQ ID NO: 56631 - protein, 17 aa, Artificial Sequence
  Description of Artificial Sequence: Synthetic peptide
  Seed: CSLMQGSTLPRRSGAAG
CSLMFGSILARRFGAAG

SEQ ID NO: 56632 - protein, 17 aa, Artificial Sequence
  Description of Artificial Sequence: Synthetic peptide
  Seed: CSLMQGSTLPRRSGAAG
CSLMFGSILARRGGAAG

SEQ ID NO: 56633 - protein, 17 aa, Artificial Sequence
  Description of Artificial Sequence: Synthetic peptide
  Seed: CSLMQGSTLPRRSGAAG
CSLMFGSILARRIGAAG

SEQ ID NO: 56634 - protein, 17 aa, Artificial Sequence
  Description of Artificial Sequence: Synthetic peptide
  Seed: CSLMQGSTLPRRSGAAG
CSLMFGSILARRLGAAG

SEQ ID NO: 56635 - protein, 17 aa, Artificial Sequence
  Description of Artificial Sequence: Synthetic peptide
  Seed: CSLMQGSTLPRRSGAAG
CSLMFGSILARRMGAAG

SEQ ID NO: 56636 - protein, 17 aa, Artificial Sequence
  Description of Artificial Sequence: Synthetic peptide
  Seed: CSLMQGSTLPRRSGAAG
CSLMFGSILARRSGAAG

SEQ ID NO: 56637 - protein, 17 aa, Artificial Sequence
  Description of Artificial Sequence: Synthetic peptide
  Seed: CSLMQGSTLPRRSGAAG
CSLMFGSILARRTGAAG

SEQ ID NO: 56638 - protein, 17 aa, Artificial Sequence
  Description of Artificial Sequence: Synthetic peptide
  Seed: CSLMQGSTLPRRSGAAG
CSLMFGSILARRVGAAG

SEQ ID NO: 56639 - protein, 17 aa, Artificial Sequence
  Description of Artificial Sequence: Synthetic peptide
  Seed: CSLMQGSTLPRRSGAAG
CSLMFGSILGRRAGAAG

SEQ ID NO: 56640 - protein, 17 aa, Artificial Sequence
  Description of Artificial Sequence: Synthetic peptide
  Seed: CSLMQGSTLPRRSGAAG
CSLMFGSILGRRFGAAG

SEQ ID NO: 56641 - protein, 17 aa, Artificial Sequence
  Description of Artificial Sequence: Synthetic peptide
  Seed: CSLMQGSTLPRRSGAAG
CSLMFGSILGRRGGAAG

SEQ ID NO: 56642 - protein, 17 aa, Artificial Sequence
  Description of Artificial Sequence: Synthetic peptide
  Seed: CSLMQGSTLPRRSGAAG
CSLMFGSILGRRIGAAG

SEQ ID NO: 56643 - protein, 17 aa, Artificial Sequence
  Description of Artificial Sequence: Synthetic peptide
  Seed: CSLMQGSTLPRRSGAAG
CSLMFGSILGRRLGAAG

SEQ ID NO: 56644 - protein, 17 aa, Artificial Sequence
  Description of Artificial Sequence: Synthetic peptide
  Seed: CSLMQGSTLPRRSGAAG
CSLMFGSILGRRMGAAG

SEQ ID NO: 56645 - protein, 17 aa, Artificial Sequence
  Description of Artificial Sequence: Synthetic peptide
  Seed: CSLMQGSTLPRRSGAAG
CSLMFGSILGRRSGAAG

SEQ ID NO: 56646 - protein, 17 aa, Artificial Sequence
  Description of Artificial Sequence: Synthetic peptide
  Seed: CSLMQGSTLPRRSGAAG
CSLMFGSILGRRTGAAG

SEQ ID NO: 56647 - protein, 17 aa, Artificial Sequence
  Description of Artificial Sequence: Synthetic peptide
  Seed: CSLMQGSTLPRRSGAAG
CSLMFGSILGRRVGAAG

SEQ ID NO: 56648 - protein, 17 aa, Artificial Sequence
  Description of Artificial Sequence: Synthetic peptide
  Seed: CSLMQGSTLPRRSGAAG
CSLMFGSILNRRAGAAG

SEQ ID NO: 56649 - protein, 17 aa, Artificial Sequence
  Description of Artificial Sequence: Synthetic peptide
  Seed: CSLMQGSTLPRRSGAAG
CSLMFGSILNRRIGAAG

SEQ ID NO: 56650 - protein, 17 aa, Artificial Sequence
  Description of Artificial Sequence: Synthetic peptide
  Seed: CSLMQGSTLPRRSGAAG
CSLMFGSILNRRLGAAG

SEQ ID NO: 56651 - protein, 17 aa, Artificial Sequence
  Description of Artificial Sequence: Synthetic peptide
  Seed: CSLMQGSTLPRRSGAAG
CSLMFGSILNRRVGAAG

SEQ ID NO: 56652 - protein, 17 aa, Artificial Sequence
  Description of Artificial Sequence: Synthetic peptide
  Seed: CSLMQGSTLPRRSGAAG
CSLMFGSILPRRAGAAG

SEQ ID NO: 56653 - protein, 17 aa, Artificial Sequence
  Description of Artificial Sequence: Synthetic peptide
  Seed: CSLMQGSTLPRRSGAAG
CSLMFGSILPRRIGAAG

SEQ ID NO: 56654 - protein, 17 aa, Artificial Sequence
  Description of Artificial Sequence: Synthetic peptide
  Seed: CSLMQGSTLPRRSGAAG
CSLMFGSILPRRLGAAG

SEQ ID NO: 56655 - protein, 17 aa, Artificial Sequence
  Description of Artificial Sequence: Synthetic peptide
  Seed: CSLMQGSTLPRRSGAAG
CSLMFGSILPRRMGAAG

SEQ ID NO: 56656 - protein, 17 aa, Artificial Sequence
  Description of Artificial Sequence: Synthetic peptide
  Seed: CSLMQGSTLPRRSGAAG
CSLMFGSILPRRTGAAG

SEQ ID NO: 56657 - protein, 17 aa, Artificial Sequence
  Description of Artificial Sequence: Synthetic peptide
  Seed: CSLMQGSTLPRRSGAAG
CSLMFGSILPRRVGAAG

SEQ ID NO: 56658 - protein, 17 aa, Artificial Sequence
  Description of Artificial Sequence: Synthetic peptide
  Seed: CSLMQGSTLPRRSGAAG
CSLMFGSILSRRAGAAG

SEQ ID NO: 56659 - protein, 17 aa, Artificial Sequence
  Description of Artificial Sequence: Synthetic peptide
  Seed: CSLMQGSTLPRRSGAAG
CSLMFGSILSRRGGAAG

SEQ ID NO: 56660 - protein, 17 aa, Artificial Sequence
  Description of Artificial Sequence: Synthetic peptide
  Seed: CSLMQGSTLPRRSGAAG
CSLMFGSILSRRIGAAG

SEQ ID NO: 56661 - protein, 17 aa, Artificial Sequence
  Description of Artificial Sequence: Synthetic peptide
  Seed: CSLMQGSTLPRRSGAAG
CSLMFGSILSRRLGAAG

SEQ ID NO: 56662 - protein, 17 aa, Artificial Sequence
  Description of Artificial Sequence: Synthetic peptide
  Seed: CSLMQGSTLPRRSGAAG
CSLMFGSILSRRMGAAG

SEQ ID NO: 56663 - protein, 17 aa, Artificial Sequence
  Description of Artificial Sequence: Synthetic peptide
  Seed: CSLMQGSTLPRRSGAAG
CSLMFGSILSRRSGAAG

SEQ ID NO: 56664 - protein, 17 aa, Artificial Sequence
  Description of Artificial Sequence: Synthetic peptide
  Seed: CSLMQGSTLPRRSGAAG
CSLMFGSILSRRTGAAG

SEQ ID NO: 56665 - protein, 17 aa, Artificial Sequence
  Description of Artificial Sequence: Synthetic peptide
  Seed: CSLMQGSTLPRRSGAAG
CSLMFGSILSRRVGAAG

SEQ ID NO: 56666 - protein, 17 aa, Artificial Sequence
  Description of Artificial Sequence: Synthetic peptide
  Seed: CSLMQGSTLPRRSGAAG
CSLMFGSILTRRAGAAG

SEQ ID NO: 56667 - protein, 17 aa, Artificial Sequence
  Description of Artificial Sequence: Synthetic peptide
  Seed: CSLMQGSTLPRRSGAAG
CSLMFGSILTRRIGAAG

SEQ ID NO: 56668 - protein, 17 aa, Artificial Sequence
  Description of Artificial Sequence: Synthetic peptide
  Seed: CSLMQGSTLPRRSGAAG
CSLMFGSILTRRLGAAG

SEQ ID NO: 56669 - protein, 17 aa, Artificial Sequence
  Description of Artificial Sequence: Synthetic peptide
  Seed: CSLMQGSTLPRRSGAAG
CSLMFGSILTRRMGAAG

SEQ ID NO: 56670 - protein, 17 aa, Artificial Sequence
  Description of Artificial Sequence: Synthetic peptide
  Seed: CSLMQGSTLPRRSGAAG
CSLMFGSILTRRTGAAG

SEQ ID NO: 56671 - protein, 17 aa, Artificial Sequence
  Description of Artificial Sequence: Synthetic peptide
  Seed: CSLMQGSTLPRRSGAAG
CSLMFGSILTRRVGAAG

SEQ ID NO: 56672 - protein, 17 aa, Artificial Sequence
  Description of Artificial Sequence: Synthetic peptide
  Seed: CSLMQGSTLPRRSGAAG
CSLMFGSILVRRAGAAG

SEQ ID NO: 56673 - protein, 17 aa, Artificial Sequence
  Description of Artificial Sequence: Synthetic peptide
  Seed: CSLMQGSTLPRRSGAAG
CSLMFGSILVRRIGAAG

SEQ ID NO: 56674 - protein, 17 aa, Artificial Sequence
  Description of Artificial Sequence: Synthetic peptide
  Seed: CSLMQGSTLPRRSGAAG
CSLMFGSILVRRLGAAG

SEQ ID NO: 56675 - protein, 17 aa, Artificial Sequence
  Description of Artificial Sequence: Synthetic peptide
  Seed: CSLMQGSTLPRRSGAAG
CSLMFGSILVRRVGAAG

SEQ ID NO: 56676 - protein, 17 aa, Artificial Sequence
  Description of Artificial Sequence: Synthetic peptide
  Seed: CSLMQGSTLPRRSGAAG
CSLMFGSLLARRAGAAG

SEQ ID NO: 56677 - protein, 17 aa, Artificial Sequence
  Description of Artificial Sequence: Synthetic peptide
  Seed: CSLMQGSTLPRRSGAAG
CSLMFGSLLARRCGAAG

SEQ ID NO: 56678 - protein, 17 aa, Artificial Sequence
  Description of Artificial Sequence: Synthetic peptide
  Seed: CSLMQGSTLPRRSGAAG
CSLMFGSLLARRFGAAG

SEQ ID NO: 56679 - protein, 17 aa, Artificial Sequence
  Description of Artificial Sequence: Synthetic peptide
  Seed: CSLMQGSTLPRRSGAAG
CSLMFGSLLARRGGAAG

SEQ ID NO: 56680 - protein, 17 aa, Artificial Sequence
  Description of Artificial Sequence: Synthetic peptide
  Seed: CSLMQGSTLPRRSGAAG
CSLMFGSLLARRIGAAG

SEQ ID NO: 56681 - protein, 17 aa, Artificial Sequence
  Description of Artificial Sequence: Synthetic peptide
  Seed: CSLMQGSTLPRRSGAAG
CSLMFGSLLARRLGAAG

SEQ ID NO: 56682 - protein, 17 aa, Artificial Sequence
  Description of Artificial Sequence: Synthetic peptide
  Seed: CSLMQGSTLPRRSGAAG
CSLMFGSLLARRMGAAG

SEQ ID NO: 56683 - protein, 17 aa, Artificial Sequence
  Description of Artificial Sequence: Synthetic peptide
  Seed: CSLMQGSTLPRRSGAAG
CSLMFGSLLARRNGAAG

SEQ ID NO: 56684 - protein, 17 aa, Artificial Sequence
  Description of Artificial Sequence: Synthetic peptide
  Seed: CSLMQGSTLPRRSGAAG
CSLMFGSLLARRPGAAG

SEQ ID NO: 56685 - protein, 17 aa, Artificial Sequence
  Description of Artificial Sequence: Synthetic peptide
  Seed: CSLMQGSTLPRRSGAAG
CSLMFGSLLARRSGAAG

SEQ ID NO: 56686 - protein, 17 aa, Artificial Sequence
  Description of Artificial Sequence: Synthetic peptide
  Seed: CSLMQGSTLPRRSGAAG
CSLMFGSLLARRTGAAG

SEQ ID NO: 56687 - protein, 17 aa, Artificial Sequence
  Description of Artificial Sequence: Synthetic peptide
  Seed: CSLMQGSTLPRRSGAAG
CSLMFGSLLARRVGAAG

SEQ ID NO: 56688 - protein, 17 aa, Artificial Sequence
  Description of Artificial Sequence: Synthetic peptide
  Seed: CSLMQGSTLPRRSGAAG
CSLMFGSLLGRRAGAAG

SEQ ID NO: 56689 - protein, 17 aa, Artificial Sequence
  Description of Artificial Sequence: Synthetic peptide
  Seed: CSLMQGSTLPRRSGAAG
CSLMFGSLLGRRCGAAG

SEQ ID NO: 56690 - protein, 17 aa, Artificial Sequence
  Description of Artificial Sequence: Synthetic peptide
  Seed: CSLMQGSTLPRRSGAAG
CSLMFGSLLGRRFGAAG

SEQ ID NO: 56691 - protein, 17 aa, Artificial Sequence
  Description of Artificial Sequence: Synthetic peptide
  Seed: CSLMQGSTLPRRSGAAG
CSLMFGSLLGRRGGAAG

SEQ ID NO: 56692 - protein, 17 aa, Artificial Sequence
  Description of Artificial Sequence: Synthetic peptide
  Seed: CSLMQGSTLPRRSGAAG
CSLMFGSLLGRRIGAAG

SEQ ID NO: 56693 - protein, 17 aa, Artificial Sequence
  Description of Artificial Sequence: Synthetic peptide
  Seed: CSLMQGSTLPRRSGAAG
CSLMFGSLLGRRLGAAG

SEQ ID NO: 56694 - protein, 17 aa, Artificial Sequence
  Description of Artificial Sequence: Synthetic peptide
  Seed: CSLMQGSTLPRRSGAAG
CSLMFGSLLGRRMGAAG

SEQ ID NO: 56695 - protein, 17 aa, Artificial Sequence
  Description of Artificial Sequence: Synthetic peptide
  Seed: CSLMQGSTLPRRSGAAG
CSLMFGSLLGRRSGAAG

SEQ ID NO: 56696 - protein, 17 aa, Artificial Sequence
  Description of Artificial Sequence: Synthetic peptide
  Seed: CSLMQGSTLPRRSGAAG
CSLMFGSLLGRRTGAAG

SEQ ID NO: 56697 - protein, 17 aa, Artificial Sequence
  Description of Artificial Sequence: Synthetic peptide
  Seed: CSLMQGSTLPRRSGAAG
CSLMFGSLLGRRVGAAG

SEQ ID NO: 56698 - protein, 17 aa, Artificial Sequence
  Description of Artificial Sequence: Synthetic peptide
  Seed: CSLMQGSTLPRRSGAAG
CSLMFGSLLIRRIGAAG

SEQ ID NO: 56699 - protein, 17 aa, Artificial Sequence
  Description of Artificial Sequence: Synthetic peptide
  Seed: CSLMQGSTLPRRSGAAG
CSLMFGSLLIRRLGAAG

SEQ ID NO: 56700 - protein, 17 aa, Artificial Sequence
  Description of Artificial Sequence: Synthetic peptide
  Seed: CSLMQGSTLPRRSGAAG
CSLMFGSLLIRRVGAAG

SEQ ID NO: 56701 - protein, 17 aa, Artificial Sequence
  Description of Artificial Sequence: Synthetic peptide
  Seed: CSLMQGSTLPRRSGAAG
CSLMFGSLLNRRAGAAG

SEQ ID NO: 56702 - protein, 17 aa, Artificial Sequence
  Description of Artificial Sequence: Synthetic peptide
  Seed: CSLMQGSTLPRRSGAAG
CSLMFGSLLNRRIGAAG

SEQ ID NO: 56703 - protein, 17 aa, Artificial Sequence
  Description of Artificial Sequence: Synthetic peptide
  Seed: CSLMQGSTLPRRSGAAG
CSLMFGSLLNRRLGAAG

SEQ ID NO: 56704 - protein, 17 aa, Artificial Sequence
  Description of Artificial Sequence: Synthetic peptide
  Seed: CSLMQGSTLPRRSGAAG
CSLMFGSLLNRRMGAAG

SEQ ID NO: 56705 - protein, 17 aa, Artificial Sequence
  Description of Artificial Sequence: Synthetic peptide
  Seed: CSLMQGSTLPRRSGAAG
CSLMFGSLLNRRTGAAG

SEQ ID NO: 56706 - protein, 17 aa, Artificial Sequence
  Description of Artificial Sequence: Synthetic peptide
  Seed: CSLMQGSTLPRRSGAAG
CSLMFGSLLNRRVGAAG

SEQ ID NO: 56707 - protein, 17 aa, Artificial Sequence
  Description of Artificial Sequence: Synthetic peptide
  Seed: CSLMQGSTLPRRSGAAG
CSLMFGSLLPRRAGAAG

SEQ ID NO: 56708 - protein, 17 aa, Artificial Sequence
  Description of Artificial Sequence: Synthetic peptide
  Seed: CSLMQGSTLPRRSGAAG
CSLMFGSLLPRRFGAAG

SEQ ID NO: 56709 - protein, 17 aa, Artificial Sequence
  Description of Artificial Sequence: Synthetic peptide
  Seed: CSLMQGSTLPRRSGAAG
CSLMFGSLLPRRIGAAG

SEQ ID NO: 56710 - protein, 17 aa, Artificial Sequence
  Description of Artificial Sequence: Synthetic peptide
  Seed: CSLMQGSTLPRRSGAAG
CSLMFGSLLPRRLGAAG

SEQ ID NO: 56711 - protein, 17 aa, Artificial Sequence
  Description of Artificial Sequence: Synthetic peptide
  Seed: CSLMQGSTLPRRSGAAG
CSLMFGSLLPRRMGAAG

SEQ ID NO: 56712 - protein, 17 aa, Artificial Sequence
  Description of Artificial Sequence: Synthetic peptide
  Seed: CSLMQGSTLPRRSGAAG
CSLMFGSLLPRRSGAAG

SEQ ID NO: 56713 - protein, 17 aa, Artificial Sequence
  Description of Artificial Sequence: Synthetic peptide
  Seed: CSLMQGSTLPRRSGAAG
CSLMFGSLLPRRTGAAG

SEQ ID NO: 56714 - protein, 17 aa, Artificial Sequence
  Description of Artificial Sequence: Synthetic peptide
  Seed: CSLMQGSTLPRRSGAAG
CSLMFGSLLPRRVGAAG

SEQ ID NO: 56715 - protein, 17 aa, Artificial Sequence
  Description of Artificial Sequence: Synthetic peptide
  Seed: CSLMQGSTLPRRSGAAG
CSLMFGSLLSRRAGAAG

SEQ ID NO: 56716 - protein, 17 aa, Artificial Sequence
  Description of Artificial Sequence: Synthetic peptide
  Seed: CSLMQGSTLPRRSGAAG
CSLMFGSLLSRRCGAAG

SEQ ID NO: 56717 - protein, 17 aa, Artificial Sequence
  Description of Artificial Sequence: Synthetic peptide
  Seed: CSLMQGSTLPRRSGAAG
CSLMFGSLLSRRFGAAG

SEQ ID NO: 56718 - protein, 17 aa, Artificial Sequence
  Description of Artificial Sequence: Synthetic peptide
  Seed: CSLMQGSTLPRRSGAAG
CSLMFGSLLSRRGGAAG

SEQ ID NO: 56719 - protein, 17 aa, Artificial Sequence
  Description of Artificial Sequence: Synthetic peptide
  Seed: CSLMQGSTLPRRSGAAG
CSLMFGSLLSRRIGAAG

SEQ ID NO: 56720 - protein, 17 aa, Artificial Sequence
  Description of Artificial Sequence: Synthetic peptide
  Seed: CSLMQGSTLPRRSGAAG
CSLMFGSLLSRRLGAAG

SEQ ID NO: 56721 - protein, 17 aa, Artificial Sequence
  Description of Artificial Sequence: Synthetic peptide
  Seed: CSLMQGSTLPRRSGAAG
CSLMFGSLLSRRMGAAG

SEQ ID NO: 56722 - protein, 17 aa, Artificial Sequence
  Description of Artificial Sequence: Synthetic peptide
  Seed: CSLMQGSTLPRRSGAAG
CSLMFGSLLSRRNGAAG

SEQ ID NO: 56723 - protein, 17 aa, Artificial Sequence
  Description of Artificial Sequence: Synthetic peptide
  Seed: CSLMQGSTLPRRSGAAG
CSLMFGSLLSRRSGAAG

SEQ ID NO: 56724 - protein, 17 aa, Artificial Sequence
  Description of Artificial Sequence: Synthetic peptide
  Seed: CSLMQGSTLPRRSGAAG
CSLMFGSLLSRRTGAAG

SEQ ID NO: 56725 - protein, 17 aa, Artificial Sequence
  Description of Artificial Sequence: Synthetic peptide
  Seed: CSLMQGSTLPRRSGAAG
CSLMFGSLLSRRVGAAG

SEQ ID NO: 56726 - protein, 17 aa, Artificial Sequence
  Description of Artificial Sequence: Synthetic peptide
  Seed: CSLMQGSTLPRRSGAAG
CSLMFGSLLTRRAGAAG

SEQ ID NO: 56727 - protein, 17 aa, Artificial Sequence
  Description of Artificial Sequence: Synthetic peptide
  Seed: CSLMQGSTLPRRSGAAG
CSLMFGSLLTRRIGAAG

SEQ ID NO: 56728 - protein, 17 aa, Artificial Sequence
  Description of Artificial Sequence: Synthetic peptide
  Seed: CSLMQGSTLPRRSGAAG
CSLMFGSLLTRRLGAAG

SEQ ID NO: 56729 - protein, 17 aa, Artificial Sequence
  Description of Artificial Sequence: Synthetic peptide
  Seed: CSLMQGSTLPRRSGAAG
CSLMFGSLLTRRMGAAG

SEQ ID NO: 56730 - protein, 17 aa, Artificial Sequence
  Description of Artificial Sequence: Synthetic peptide
  Seed: CSLMQGSTLPRRSGAAG
CSLMFGSLLTRRSGAAG

SEQ ID NO: 56731 - protein, 17 aa, Artificial Sequence
  Description of Artificial Sequence: Synthetic peptide
  Seed: CSLMQGSTLPRRSGAAG
CSLMFGSLLTRRTGAAG

SEQ ID NO: 56732 - protein, 17 aa, Artificial Sequence
  Description of Artificial Sequence: Synthetic peptide
  Seed: CSLMQGSTLPRRSGAAG
CSLMFGSLLTRRVGAAG

SEQ ID NO: 56733 - protein, 17 aa, Artificial Sequence
  Description of Artificial Sequence: Synthetic peptide
  Seed: CSLMQGSTLPRRSGAAG
CSLMFGSLLVRRAGAAG

SEQ ID NO: 56734 - protein, 17 aa, Artificial Sequence
  Description of Artificial Sequence: Synthetic peptide
  Seed: CSLMQGSTLPRRSGAAG
CSLMFGSLLVRRIGAAG

SEQ ID NO: 56735 - protein, 17 aa, Artificial Sequence
  Description of Artificial Sequence: Synthetic peptide
  Seed: CSLMQGSTLPRRSGAAG
CSLMFGSLLVRRLGAAG

SEQ ID NO: 56736 - protein, 17 aa, Artificial Sequence
  Description of Artificial Sequence: Synthetic peptide
  Seed: CSLMQGSTLPRRSGAAG
CSLMFGSLLVRRMGAAG

SEQ ID NO: 56737 - protein, 17 aa, Artificial Sequence
  Description of Artificial Sequence: Synthetic peptide
  Seed: CSLMQGSTLPRRSGAAG
CSLMFGSLLVRRTGAAG

SEQ ID NO: 56738 - protein, 17 aa, Artificial Sequence
  Description of Artificial Sequence: Synthetic peptide
  Seed: CSLMQGSTLPRRSGAAG
CSLMFGSLLVRRVGAAG

SEQ ID NO: 56739 - protein, 17 aa, Artificial Sequence
  Description of Artificial Sequence: Synthetic peptide
  Seed: CSLMQGSTLPRRSGAAG
CSLMFGSMLARRAGAAG

SEQ ID NO: 56740 - protein, 17 aa, Artificial Sequence
  Description of Artificial Sequence: Synthetic peptide
  Seed: CSLMQGSTLPRRSGAAG
CSLMFGSMLARRCGAAG

SEQ ID NO: 56741 - protein, 17 aa, Artificial Sequence
  Description of Artificial Sequence: Synthetic peptide
  Seed: CSLMQGSTLPRRSGAAG
CSLMFGSMLARRFGAAG

SEQ ID NO: 56742 - protein, 17 aa, Artificial Sequence
  Description of Artificial Sequence: Synthetic peptide
  Seed: CSLMQGSTLPRRSGAAG
CSLMFGSMLARRGGAAG

SEQ ID NO: 56743 - protein, 17 aa, Artificial Sequence
  Description of Artificial Sequence: Synthetic peptide
  Seed: CSLMQGSTLPRRSGAAG
CSLMFGSMLARRIGAAG

SEQ ID NO: 56744 - protein, 17 aa, Artificial Sequence
  Description of Artificial Sequence: Synthetic peptide
  Seed: CSLMQGSTLPRRSGAAG
CSLMFGSMLARRLGAAG

SEQ ID NO: 56745 - protein, 17 aa, Artificial Sequence
  Description of Artificial Sequence: Synthetic peptide
  Seed: CSLMQGSTLPRRSGAAG
CSLMFGSMLARRMGAAG

SEQ ID NO: 56746 - protein, 17 aa, Artificial Sequence
  Description of Artificial Sequence: Synthetic peptide
  Seed: CSLMQGSTLPRRSGAAG
CSLMFGSMLARRNGAAG

SEQ ID NO: 56747 - protein, 17 aa, Artificial Sequence
  Description of Artificial Sequence: Synthetic peptide
  Seed: CSLMQGSTLPRRSGAAG
CSLMFGSMLARRPGAAG

SEQ ID NO: 56748 - protein, 17 aa, Artificial Sequence
  Description of Artificial Sequence: Synthetic peptide
  Seed: CSLMQGSTLPRRSGAAG
CSLMFGSMLARRSGAAG

SEQ ID NO: 56749 - protein, 17 aa, Artificial Sequence
  Description of Artificial Sequence: Synthetic peptide
  Seed: CSLMQGSTLPRRSGAAG
CSLMFGSMLARRTGAAG

SEQ ID NO: 56750 - protein, 17 aa, Artificial Sequence
  Description of Artificial Sequence: Synthetic peptide
  Seed: CSLMQGSTLPRRSGAAG
CSLMFGSMLARRVGAAG

SEQ ID NO: 56751 - protein, 17 aa, Artificial Sequence
  Description of Artificial Sequence: Synthetic peptide
  Seed: CSLMQGSTLPRRSGAAG
CSLMFGSMLARRWGAAG

SEQ ID NO: 56752 - protein, 17 aa, Artificial Sequence
  Description of Artificial Sequence: Synthetic peptide
  Seed: CSLMQGSTLPRRSGAAG
CSLMFGSMLARRYGAAG

SEQ ID NO: 56753 - protein, 17 aa, Artificial Sequence
  Description of Artificial Sequence: Synthetic peptide
  Seed: CSLMQGSTLPRRSGAAG
CSLMFGSMLGRRAGAAG

SEQ ID NO: 56754 - protein, 17 aa, Artificial Sequence
  Description of Artificial Sequence: Synthetic peptide
  Seed: CSLMQGSTLPRRSGAAG
CSLMFGSMLGRRCGAAG

SEQ ID NO: 56755 - protein, 17 aa, Artificial Sequence
  Description of Artificial Sequence: Synthetic peptide
  Seed: CSLMQGSTLPRRSGAAG
CSLMFGSMLGRRFGAAG

SEQ ID NO: 56756 - protein, 17 aa, Artificial Sequence
  Description of Artificial Sequence: Synthetic peptide
  Seed: CSLMQGSTLPRRSGAAG
CSLMFGSMLGRRGGAAG

SEQ ID NO: 56757 - protein, 17 aa, Artificial Sequence
  Description of Artificial Sequence: Synthetic peptide
  Seed: CSLMQGSTLPRRSGAAG
CSLMFGSMLGRRIGAAG

SEQ ID NO: 56758 - protein, 17 aa, Artificial Sequence
  Description of Artificial Sequence: Synthetic peptide
  Seed: CSLMQGSTLPRRSGAAG
CSLMFGSMLGRRLGAAG

SEQ ID NO: 56759 - protein, 17 aa, Artificial Sequence
  Description of Artificial Sequence: Synthetic peptide
  Seed: CSLMQGSTLPRRSGAAG
CSLMFGSMLGRRMGAAG

SEQ ID NO: 56760 - protein, 17 aa, Artificial Sequence
  Description of Artificial Sequence: Synthetic peptide
  Seed: CSLMQGSTLPRRSGAAG
CSLMFGSMLGRRSGAAG

SEQ ID NO: 56761 - protein, 17 aa, Artificial Sequence
  Description of Artificial Sequence: Synthetic peptide
  Seed: CSLMQGSTLPRRSGAAG
CSLMFGSMLGRRTGAAG

SEQ ID NO: 56762 - protein, 17 aa, Artificial Sequence
  Description of Artificial Sequence: Synthetic peptide
  Seed: CSLMQGSTLPRRSGAAG
CSLMFGSMLGRRVGAAG

SEQ ID NO: 56763 - protein, 17 aa, Artificial Sequence
  Description of Artificial Sequence: Synthetic peptide
  Seed: CSLMQGSTLPRRSGAAG
CSLMFGSMLIRRAGAAG

SEQ ID NO: 56764 - protein, 17 aa, Artificial Sequence
  Description of Artificial Sequence: Synthetic peptide
  Seed: CSLMQGSTLPRRSGAAG
CSLMFGSMLIRRIGAAG

SEQ ID NO: 56765 - protein, 17 aa, Artificial Sequence
  Description of Artificial Sequence: Synthetic peptide
  Seed: CSLMQGSTLPRRSGAAG
CSLMFGSMLIRRLGAAG

SEQ ID NO: 56766 - protein, 17 aa, Artificial Sequence
  Description of Artificial Sequence: Synthetic peptide
  Seed: CSLMQGSTLPRRSGAAG
CSLMFGSMLIRRVGAAG

SEQ ID NO: 56767 - protein, 17 aa, Artificial Sequence
  Description of Artificial Sequence: Synthetic peptide
  Seed: CSLMQGSTLPRRSGAAG
CSLMFGSMLNRRAGAAG

SEQ ID NO: 56768 - protein, 17 aa, Artificial Sequence
  Description of Artificial Sequence: Synthetic peptide
  Seed: CSLMQGSTLPRRSGAAG
CSLMFGSMLNRRIGAAG

SEQ ID NO: 56769 - protein, 17 aa, Artificial Sequence
  Description of Artificial Sequence: Synthetic peptide
  Seed: CSLMQGSTLPRRSGAAG
CSLMFGSMLNRRLGAAG

SEQ ID NO: 56770 - protein, 17 aa, Artificial Sequence
  Description of Artificial Sequence: Synthetic peptide
  Seed: CSLMQGSTLPRRSGAAG
CSLMFGSMLNRRMGAAG

SEQ ID NO: 56771 - protein, 17 aa, Artificial Sequence
  Description of Artificial Sequence: Synthetic peptide
  Seed: CSLMQGSTLPRRSGAAG
CSLMFGSMLNRRSGAAG

SEQ ID NO: 56772 - protein, 17 aa, Artificial Sequence
  Description of Artificial Sequence: Synthetic peptide
  Seed: CSLMQGSTLPRRSGAAG
CSLMFGSMLNRRTGAAG

SEQ ID NO: 56773 - protein, 17 aa, Artificial Sequence
  Description of Artificial Sequence: Synthetic peptide
  Seed: CSLMQGSTLPRRSGAAG
CSLMFGSMLNRRVGAAG

SEQ ID NO: 56774 - protein, 17 aa, Artificial Sequence
  Description of Artificial Sequence: Synthetic peptide
  Seed: CSLMQGSTLPRRSGAAG
CSLMFGSMLPRRAGAAG

SEQ ID NO: 56775 - protein, 17 aa, Artificial Sequence
  Description of Artificial Sequence: Synthetic peptide
  Seed: CSLMQGSTLPRRSGAAG
CSLMFGSMLPRRFGAAG

SEQ ID NO: 56776 - protein, 17 aa, Artificial Sequence
  Description of Artificial Sequence: Synthetic peptide
  Seed: CSLMQGSTLPRRSGAAG
CSLMFGSMLPRRIGAAG

SEQ ID NO: 56777 - protein, 17 aa, Artificial Sequence
  Description of Artificial Sequence: Synthetic peptide
  Seed: CSLMQGSTLPRRSGAAG
CSLMFGSMLPRRLGAAG

SEQ ID NO: 56778 - protein, 17 aa, Artificial Sequence
  Description of Artificial Sequence: Synthetic peptide
  Seed: CSLMQGSTLPRRSGAAG
CSLMFGSMLPRRMGAAG

SEQ ID NO: 56779 - protein, 17 aa, Artificial Sequence
  Description of Artificial Sequence: Synthetic peptide
  Seed: CSLMQGSTLPRRSGAAG
CSLMFGSMLPRRSGAAG

SEQ ID NO: 56780 - protein, 17 aa, Artificial Sequence
  Description of Artificial Sequence: Synthetic peptide
  Seed: CSLMQGSTLPRRSGAAG
CSLMFGSMLPRRTGAAG

SEQ ID NO: 56781 - protein, 17 aa, Artificial Sequence
  Description of Artificial Sequence: Synthetic peptide
  Seed: CSLMQGSTLPRRSGAAG
CSLMFGSMLPRRVGAAG

SEQ ID NO: 56782 - protein, 17 aa, Artificial Sequence
  Description of Artificial Sequence: Synthetic peptide
  Seed: CSLMQGSTLPRRSGAAG
CSLMFGSMLSRRAGAAG

SEQ ID NO: 56783 - protein, 17 aa, Artificial Sequence
  Description of Artificial Sequence: Synthetic peptide
  Seed: CSLMQGSTLPRRSGAAG
CSLMFGSMLSRRCGAAG

SEQ ID NO: 56784 - protein, 17 aa, Artificial Sequence
  Description of Artificial Sequence: Synthetic peptide
  Seed: CSLMQGSTLPRRSGAAG
CSLMFGSMLSRRFGAAG

SEQ ID NO: 56785 - protein, 17 aa, Artificial Sequence
  Description of Artificial Sequence: Synthetic peptide
  Seed: CSLMQGSTLPRRSGAAG
CSLMFGSMLSRRGGAAG

SEQ ID NO: 56786 - protein, 17 aa, Artificial Sequence
  Description of Artificial Sequence: Synthetic peptide
  Seed: CSLMQGSTLPRRSGAAG
CSLMFGSMLSRRIGAAG

SEQ ID NO: 56787 - protein, 17 aa, Artificial Sequence
  Description of Artificial Sequence: Synthetic peptide
  Seed: CSLMQGSTLPRRSGAAG
CSLMFGSMLSRRLGAAG

SEQ ID NO: 56788 - protein, 17 aa, Artificial Sequence
  Description of Artificial Sequence: Synthetic peptide
  Seed: CSLMQGSTLPRRSGAAG
CSLMFGSMLSRRMGAAG

SEQ ID NO: 56789 - protein, 17 aa, Artificial Sequence
  Description of Artificial Sequence: Synthetic peptide
  Seed: CSLMQGSTLPRRSGAAG
CSLMFGSMLSRRNGAAG

SEQ ID NO: 56790 - protein, 17 aa, Artificial Sequence
  Description of Artificial Sequence: Synthetic peptide
  Seed: CSLMQGSTLPRRSGAAG
CSLMFGSMLSRRSGAAG

SEQ ID NO: 56791 - protein, 17 aa, Artificial Sequence
  Description of Artificial Sequence: Synthetic peptide
  Seed: CSLMQGSTLPRRSGAAG
CSLMFGSMLSRRTGAAG

SEQ ID NO: 56792 - protein, 17 aa, Artificial Sequence
  Description of Artificial Sequence: Synthetic peptide
  Seed: CSLMQGSTLPRRSGAAG
CSLMFGSMLSRRVGAAG

SEQ ID NO: 56793 - protein, 17 aa, Artificial Sequence
  Description of Artificial Sequence: Synthetic peptide
  Seed: CSLMQGSTLPRRSGAAG
CSLMFGSMLTRRAGAAG

SEQ ID NO: 56794 - protein, 17 aa, Artificial Sequence
  Description of Artificial Sequence: Synthetic peptide
  Seed: CSLMQGSTLPRRSGAAG
CSLMFGSMLTRRIGAAG

SEQ ID NO: 56795 - protein, 17 aa, Artificial Sequence
  Description of Artificial Sequence: Synthetic peptide
  Seed: CSLMQGSTLPRRSGAAG
CSLMFGSMLTRRLGAAG

SEQ ID NO: 56796 - protein, 17 aa, Artificial Sequence
  Description of Artificial Sequence: Synthetic peptide
  Seed: CSLMQGSTLPRRSGAAG
CSLMFGSMLTRRMGAAG

SEQ ID NO: 56797 - protein, 17 aa, Artificial Sequence
  Description of Artificial Sequence: Synthetic peptide
  Seed: CSLMQGSTLPRRSGAAG
CSLMFGSMLTRRSGAAG

SEQ ID NO: 56798 - protein, 17 aa, Artificial Sequence
  Description of Artificial Sequence: Synthetic peptide
  Seed: CSLMQGSTLPRRSGAAG
CSLMFGSMLTRRTGAAG

SEQ ID NO: 56799 - protein, 17 aa, Artificial Sequence
  Description of Artificial Sequence: Synthetic peptide
  Seed: CSLMQGSTLPRRSGAAG
CSLMFGSMLTRRVGAAG

SEQ ID NO: 56800 - protein, 17 aa, Artificial Sequence
  Description of Artificial Sequence: Synthetic peptide
  Seed: CSLMQGSTLPRRSGAAG
CSLMFGSMLVRRAGAAG

SEQ ID NO: 56801 - protein, 17 aa, Artificial Sequence
  Description of Artificial Sequence: Synthetic peptide
  Seed: CSLMQGSTLPRRSGAAG
CSLMFGSMLVRRIGAAG

SEQ ID NO: 56802 - protein, 17 aa, Artificial Sequence
  Description of Artificial Sequence: Synthetic peptide
  Seed: CSLMQGSTLPRRSGAAG
CSLMFGSMLVRRLGAAG

SEQ ID NO: 56803 - protein, 17 aa, Artificial Sequence
  Description of Artificial Sequence: Synthetic peptide
  Seed: CSLMQGSTLPRRSGAAG
CSLMFGSMLVRRMGAAG

SEQ ID NO: 56804 - protein, 17 aa, Artificial Sequence
  Description of Artificial Sequence: Synthetic peptide
  Seed: CSLMQGSTLPRRSGAAG
CSLMFGSMLVRRSGAAG

SEQ ID NO: 56805 - protein, 17 aa, Artificial Sequence
  Description of Artificial Sequence: Synthetic peptide
  Seed: CSLMQGSTLPRRSGAAG
CSLMFGSMLVRRTGAAG

SEQ ID NO: 56806 - protein, 17 aa, Artificial Sequence
  Description of Artificial Sequence: Synthetic peptide
  Seed: CSLMQGSTLPRRSGAAG
CSLMFGSMLVRRVGAAG

SEQ ID NO: 56807 - protein, 17 aa, Artificial Sequence
  Description of Artificial Sequence: Synthetic peptide
  Seed: CSLMQGSTLPRRSGAAG
CSLMFGSNLARRIGAAG

SEQ ID NO: 56808 - protein, 17 aa, Artificial Sequence
  Description of Artificial Sequence: Synthetic peptide
  Seed: CSLMQGSTLPRRSGAAG
CSLMFGSNLARRLGAAG

SEQ ID NO: 56809 - protein, 17 aa, Artificial Sequence
  Description of Artificial Sequence: Synthetic peptide
  Seed: CSLMQGSTLPRRSGAAG
CSLMFGSNLARRVGAAG

SEQ ID NO: 56810 - protein, 17 aa, Artificial Sequence
  Description of Artificial Sequence: Synthetic peptide
  Seed: CSLMQGSTLPRRSGAAG
CSLMFGSQLARRAGAAG

SEQ ID NO: 56811 - protein, 17 aa, Artificial Sequence
  Description of Artificial Sequence: Synthetic peptide
  Seed: CSLMQGSTLPRRSGAAG
CSLMFGSQLARRIGAAG

SEQ ID NO: 56812 - protein, 17 aa, Artificial Sequence
  Description of Artificial Sequence: Synthetic peptide
  Seed: CSLMQGSTLPRRSGAAG
CSLMFGSQLARRLGAAG

SEQ ID NO: 56813 - protein, 17 aa, Artificial Sequence
  Description of Artificial Sequence: Synthetic peptide
  Seed: CSLMQGSTLPRRSGAAG
CSLMFGSQLARRMGAAG

SEQ ID NO: 56814 - protein, 17 aa, Artificial Sequence
  Description of Artificial Sequence: Synthetic peptide
  Seed: CSLMQGSTLPRRSGAAG
CSLMFGSQLARRSGAAG

SEQ ID NO: 56815 - protein, 17 aa, Artificial Sequence
  Description of Artificial Sequence: Synthetic peptide
  Seed: CSLMQGSTLPRRSGAAG
CSLMFGSQLARRTGAAG

SEQ ID NO: 56816 - protein, 17 aa, Artificial Sequence
  Description of Artificial Sequence: Synthetic peptide
  Seed: CSLMQGSTLPRRSGAAG
CSLMFGSQLARRVGAAG

SEQ ID NO: 56817 - protein, 17 aa, Artificial Sequence
  Description of Artificial Sequence: Synthetic peptide
  Seed: CSLMQGSTLPRRSGAAG
CSLMFGSQLGRRAGAAG

SEQ ID NO: 56818 - protein, 17 aa, Artificial Sequence
  Description of Artificial Sequence: Synthetic peptide
  Seed: CSLMQGSTLPRRSGAAG
CSLMFGSQLGRRIGAAG

SEQ ID NO: 56819 - protein, 17 aa, Artificial Sequence
  Description of Artificial Sequence: Synthetic peptide
  Seed: CSLMQGSTLPRRSGAAG
CSLMFGSQLGRRLGAAG

SEQ ID NO: 56820 - protein, 17 aa, Artificial Sequence
  Description of Artificial Sequence: Synthetic peptide
  Seed: CSLMQGSTLPRRSGAAG
CSLMFGSQLGRRMGAAG

SEQ ID NO: 56821 - protein, 17 aa, Artificial Sequence
  Description of Artificial Sequence: Synthetic peptide
  Seed: CSLMQGSTLPRRSGAAG
CSLMFGSQLGRRVGAAG

SEQ ID NO: 56822 - protein, 17 aa, Artificial Sequence
  Description of Artificial Sequence: Synthetic peptide
  Seed: CSLMQGSTLPRRSGAAG
CSLMFGSQLPRRIGAAG

SEQ ID NO: 56823 - protein, 17 aa, Artificial Sequence
  Description of Artificial Sequence: Synthetic peptide
  Seed: CSLMQGSTLPRRSGAAG
CSLMFGSQLPRRLGAAG

SEQ ID NO: 56824 - protein, 17 aa, Artificial Sequence
  Description of Artificial Sequence: Synthetic peptide
  Seed: CSLMQGSTLPRRSGAAG
CSLMFGSQLPRRVGAAG

SEQ ID NO: 56825 - protein, 17 aa, Artificial Sequence
  Description of Artificial Sequence: Synthetic peptide
  Seed: CSLMQGSTLPRRSGAAG
CSLMFGSQLSRRAGAAG

SEQ ID NO: 56826 - protein, 17 aa, Artificial Sequence
  Description of Artificial Sequence: Synthetic peptide
  Seed: CSLMQGSTLPRRSGAAG
CSLMFGSQLSRRIGAAG

SEQ ID NO: 56827 - protein, 17 aa, Artificial Sequence
  Description of Artificial Sequence: Synthetic peptide
  Seed: CSLMQGSTLPRRSGAAG
CSLMFGSQLSRRLGAAG

SEQ ID NO: 56828 - protein, 17 aa, Artificial Sequence
  Description of Artificial Sequence: Synthetic peptide
  Seed: CSLMQGSTLPRRSGAAG
CSLMFGSQLSRRVGAAG

SEQ ID NO: 56829 - protein, 17 aa, Artificial Sequence
  Description of Artificial Sequence: Synthetic peptide
  Seed: CSLMQGSTLPRRSGAAG
CSLMFGSQLTRRIGAAG

SEQ ID NO: 56830 - protein, 17 aa, Artificial Sequence
  Description of Artificial Sequence: Synthetic peptide
  Seed: CSLMQGSTLPRRSGAAG
CSLMFGSQLTRRLGAAG

SEQ ID NO: 56831 - protein, 17 aa, Artificial Sequence
  Description of Artificial Sequence: Synthetic peptide
  Seed: CSLMQGSTLPRRSGAAG
CSLMFGSQLTRRVGAAG

SEQ ID NO: 56832 - protein, 17 aa, Artificial Sequence
  Description of Artificial Sequence: Synthetic peptide
  Seed: CSLMQGSTLPRRSGAAG
CSLMFGSSLARRAGAAG

SEQ ID NO: 56833 - protein, 17 aa, Artificial Sequence
  Description of Artificial Sequence: Synthetic peptide
  Seed: CSLMQGSTLPRRSGAAG
CSLMFGSSLARRIGAAG

SEQ ID NO: 56834 - protein, 17 aa, Artificial Sequence
  Description of Artificial Sequence: Synthetic peptide
  Seed: CSLMQGSTLPRRSGAAG
CSLMFGSSLARRLGAAG

SEQ ID NO: 56835 - protein, 17 aa, Artificial Sequence
  Description of Artificial Sequence: Synthetic peptide
  Seed: CSLMQGSTLPRRSGAAG
CSLMFGSSLARRMGAAG

SEQ ID NO: 56836 - protein, 17 aa, Artificial Sequence
  Description of Artificial Sequence: Synthetic peptide
  Seed: CSLMQGSTLPRRSGAAG
CSLMFGSSLARRTGAAG

SEQ ID NO: 56837 - protein, 17 aa, Artificial Sequence
  Description of Artificial Sequence: Synthetic peptide
  Seed: CSLMQGSTLPRRSGAAG
CSLMFGSSLARRVGAAG

SEQ ID NO: 56838 - protein, 17 aa, Artificial Sequence
  Description of Artificial Sequence: Synthetic peptide
  Seed: CSLMQGSTLPRRSGAAG
CSLMFGSSLGRRAGAAG

SEQ ID NO: 56839 - protein, 17 aa, Artificial Sequence
  Description of Artificial Sequence: Synthetic peptide
  Seed: CSLMQGSTLPRRSGAAG
CSLMFGSSLGRRIGAAG

SEQ ID NO: 56840 - protein, 17 aa, Artificial Sequence
  Description of Artificial Sequence: Synthetic peptide
  Seed: CSLMQGSTLPRRSGAAG
CSLMFGSSLGRRLGAAG

SEQ ID NO: 56841 - protein, 17 aa, Artificial Sequence
  Description of Artificial Sequence: Synthetic peptide
  Seed: CSLMQGSTLPRRSGAAG
CSLMFGSSLGRRVGAAG

SEQ ID NO: 56842 - protein, 17 aa, Artificial Sequence
  Description of Artificial Sequence: Synthetic peptide
  Seed: CSLMQGSTLPRRSGAAG
CSLMFGSSLPRRIGAAG

SEQ ID NO: 56843 - protein, 17 aa, Artificial Sequence
  Description of Artificial Sequence: Synthetic peptide
  Seed: CSLMQGSTLPRRSGAAG
CSLMFGSSLPRRLGAAG

SEQ ID NO: 56844 - protein, 17 aa, Artificial Sequence
  Description of Artificial Sequence: Synthetic peptide
  Seed: CSLMQGSTLPRRSGAAG
CSLMFGSSLPRRVGAAG

SEQ ID NO: 56845 - protein, 17 aa, Artificial Sequence
  Description of Artificial Sequence: Synthetic peptide
  Seed: CSLMQGSTLPRRSGAAG
CSLMFGSSLSRRAGAAG

SEQ ID NO: 56846 - protein, 17 aa, Artificial Sequence
  Description of Artificial Sequence: Synthetic peptide
  Seed: CSLMQGSTLPRRSGAAG
CSLMFGSSLSRRIGAAG

SEQ ID NO: 56847 - protein, 17 aa, Artificial Sequence
  Description of Artificial Sequence: Synthetic peptide
  Seed: CSLMQGSTLPRRSGAAG
CSLMFGSSLSRRLGAAG

SEQ ID NO: 56848 - protein, 17 aa, Artificial Sequence
  Description of Artificial Sequence: Synthetic peptide
  Seed: CSLMQGSTLPRRSGAAG
CSLMFGSSLSRRVGAAG

SEQ ID NO: 56849 - protein, 17 aa, Artificial Sequence
  Description of Artificial Sequence: Synthetic peptide
  Seed: CSLMQGSTLPRRSGAAG
CSLMFGSSLTRRIGAAG

SEQ ID NO: 56850 - protein, 17 aa, Artificial Sequence
  Description of Artificial Sequence: Synthetic peptide
  Seed: CSLMQGSTLPRRSGAAG
CSLMFGSSLTRRVGAAG

SEQ ID NO: 56851 - protein, 17 aa, Artificial Sequence
  Description of Artificial Sequence: Synthetic peptide
  Seed: CSLMQGSTLPRRSGAAG
CSLMFGSTLARRAGAAG

SEQ ID NO: 56852 - protein, 17 aa, Artificial Sequence
  Description of Artificial Sequence: Synthetic peptide
  Seed: CSLMQGSTLPRRSGAAG
CSLMFGSTLARRIGAAG

SEQ ID NO: 56853 - protein, 17 aa, Artificial Sequence
  Description of Artificial Sequence: Synthetic peptide
  Seed: CSLMQGSTLPRRSGAAG
CSLMFGSTLARRLGAAG

SEQ ID NO: 56854 - protein, 17 aa, Artificial Sequence
  Description of Artificial Sequence: Synthetic peptide
  Seed: CSLMQGSTLPRRSGAAG
CSLMFGSTLARRMGAAG

SEQ ID NO: 56855 - protein, 17 aa, Artificial Sequence
  Description of Artificial Sequence: Synthetic peptide
  Seed: CSLMQGSTLPRRSGAAG
CSLMFGSTLARRVGAAG

SEQ ID NO: 56856 - protein, 17 aa, Artificial Sequence
  Description of Artificial Sequence: Synthetic peptide
  Seed: CSLMQGSTLPRRSGAAG
CSLMFGSTLGRRIGAAG

SEQ ID NO: 56857 - protein, 17 aa, Artificial Sequence
  Description of Artificial Sequence: Synthetic peptide
  Seed: CSLMQGSTLPRRSGAAG
CSLMFGSTLGRRLGAAG

SEQ ID NO: 56858 - protein, 17 aa, Artificial Sequence
  Description of Artificial Sequence: Synthetic peptide
  Seed: CSLMQGSTLPRRSGAAG
CSLMFGSTLGRRVGAAG

SEQ ID NO: 56859 - protein, 17 aa, Artificial Sequence
  Description of Artificial Sequence: Synthetic peptide
  Seed: CSLMQGSTLPRRSGAAG
CSLMFGSTLSRRAGAAG

SEQ ID NO: 56860 - protein, 17 aa, Artificial Sequence
  Description of Artificial Sequence: Synthetic peptide
  Seed: CSLMQGSTLPRRSGAAG
CSLMFGSTLSRRIGAAG

SEQ ID NO: 56861 - protein, 17 aa, Artificial Sequence
  Description of Artificial Sequence: Synthetic peptide
  Seed: CSLMQGSTLPRRSGAAG
CSLMFGSTLSRRLGAAG

SEQ ID NO: 56862 - protein, 17 aa, Artificial Sequence
  Description of Artificial Sequence: Synthetic peptide
  Seed: CSLMQGSTLPRRSGAAG
CSLMFGSTLSRRVGAAG

SEQ ID NO: 56863 - protein, 17 aa, Artificial Sequence
  Description of Artificial Sequence: Synthetic peptide
  Seed: CSLMQGSTLPRRSGAAG
CSLMFGSVLARRAGAAG

SEQ ID NO: 56864 - protein, 17 aa, Artificial Sequence
  Description of Artificial Sequence: Synthetic peptide
  Seed: CSLMQGSTLPRRSGAAG
CSLMFGSVLARRIGAAG

SEQ ID NO: 56865 - protein, 17 aa, Artificial Sequence
  Description of Artificial Sequence: Synthetic peptide
  Seed: CSLMQGSTLPRRSGAAG
CSLMFGSVLARRLGAAG

SEQ ID NO: 56866 - protein, 17 aa, Artificial Sequence
  Description of Artificial Sequence: Synthetic peptide
  Seed: CSLMQGSTLPRRSGAAG
CSLMFGSVLARRMGAAG

SEQ ID NO: 56867 - protein, 17 aa, Artificial Sequence
  Description of Artificial Sequence: Synthetic peptide
  Seed: CSLMQGSTLPRRSGAAG
CSLMFGSVLARRSGAAG

SEQ ID NO: 56868 - protein, 17 aa, Artificial Sequence
  Description of Artificial Sequence: Synthetic peptide
  Seed: CSLMQGSTLPRRSGAAG
CSLMFGSVLARRTGAAG

SEQ ID NO: 56869 - protein, 17 aa, Artificial Sequence
  Description of Artificial Sequence: Synthetic peptide
  Seed: CSLMQGSTLPRRSGAAG
CSLMFGSVLARRVGAAG

SEQ ID NO: 56870 - protein, 17 aa, Artificial Sequence
  Description of Artificial Sequence: Synthetic peptide
  Seed: CSLMQGSTLPRRSGAAG
CSLMFGSVLGRRAGAAG

SEQ ID NO: 56871 - protein, 17 aa, Artificial Sequence
  Description of Artificial Sequence: Synthetic peptide
  Seed: CSLMQGSTLPRRSGAAG
CSLMFGSVLGRRIGAAG

SEQ ID NO: 56872 - protein, 17 aa, Artificial Sequence
  Description of Artificial Sequence: Synthetic peptide
  Seed: CSLMQGSTLPRRSGAAG
CSLMFGSVLGRRLGAAG

SEQ ID NO: 56873 - protein, 17 aa, Artificial Sequence
  Description of Artificial Sequence: Synthetic peptide
  Seed: CSLMQGSTLPRRSGAAG
CSLMFGSVLGRRMGAAG

SEQ ID NO: 56874 - protein, 17 aa, Artificial Sequence
  Description of Artificial Sequence: Synthetic peptide
  Seed: CSLMQGSTLPRRSGAAG
CSLMFGSVLGRRTGAAG

SEQ ID NO: 56875 - protein, 17 aa, Artificial Sequence
  Description of Artificial Sequence: Synthetic peptide
  Seed: CSLMQGSTLPRRSGAAG
CSLMFGSVLGRRVGAAG

SEQ ID NO: 56876 - protein, 17 aa, Artificial Sequence
  Description of Artificial Sequence: Synthetic peptide
  Seed: CSLMQGSTLPRRSGAAG
CSLMFGSVLNRRIGAAG

SEQ ID NO: 56877 - protein, 17 aa, Artificial Sequence
  Description of Artificial Sequence: Synthetic peptide
  Seed: CSLMQGSTLPRRSGAAG
CSLMFGSVLNRRLGAAG

SEQ ID NO: 56878 - protein, 17 aa, Artificial Sequence
  Description of Artificial Sequence: Synthetic peptide
  Seed: CSLMQGSTLPRRSGAAG
CSLMFGSVLNRRVGAAG

SEQ ID NO: 56879 - protein, 17 aa, Artificial Sequence
  Description of Artificial Sequence: Synthetic peptide
  Seed: CSLMQGSTLPRRSGAAG
CSLMFGSVLPRRAGAAG

SEQ ID NO: 56880 - protein, 17 aa, Artificial Sequence
  Description of Artificial Sequence: Synthetic peptide
  Seed: CSLMQGSTLPRRSGAAG
CSLMFGSVLPRRIGAAG

SEQ ID NO: 56881 - protein, 17 aa, Artificial Sequence
  Description of Artificial Sequence: Synthetic peptide
  Seed: CSLMQGSTLPRRSGAAG
CSLMFGSVLPRRLGAAG

SEQ ID NO: 56882 - protein, 17 aa, Artificial Sequence
  Description of Artificial Sequence: Synthetic peptide
  Seed: CSLMQGSTLPRRSGAAG
CSLMFGSVLPRRVGAAG

SEQ ID NO: 56883 - protein, 17 aa, Artificial Sequence
  Description of Artificial Sequence: Synthetic peptide
  Seed: CSLMQGSTLPRRSGAAG
CSLMFGSVLSRRAGAAG

SEQ ID NO: 56884 - protein, 17 aa, Artificial Sequence
  Description of Artificial Sequence: Synthetic peptide
  Seed: CSLMQGSTLPRRSGAAG
CSLMFGSVLSRRIGAAG

SEQ ID NO: 56885 - protein, 17 aa, Artificial Sequence
  Description of Artificial Sequence: Synthetic peptide
  Seed: CSLMQGSTLPRRSGAAG
CSLMFGSVLSRRLGAAG

SEQ ID NO: 56886 - protein, 17 aa, Artificial Sequence
  Description of Artificial Sequence: Synthetic peptide
  Seed: CSLMQGSTLPRRSGAAG
CSLMFGSVLSRRMGAAG

SEQ ID NO: 56887 - protein, 17 aa, Artificial Sequence
  Description of Artificial Sequence: Synthetic peptide
  Seed: CSLMQGSTLPRRSGAAG
CSLMFGSVLSRRTGAAG

SEQ ID NO: 56888 - protein, 17 aa, Artificial Sequence
  Description of Artificial Sequence: Synthetic peptide
  Seed: CSLMQGSTLPRRSGAAG
CSLMFGSVLSRRVGAAG

SEQ ID NO: 56889 - protein, 17 aa, Artificial Sequence
  Description of Artificial Sequence: Synthetic peptide
  Seed: CSLMQGSTLPRRSGAAG
CSLMFGSVLTRRAGAAG

SEQ ID NO: 56890 - protein, 17 aa, Artificial Sequence
  Description of Artificial Sequence: Synthetic peptide
  Seed: CSLMQGSTLPRRSGAAG
CSLMFGSVLTRRIGAAG

SEQ ID NO: 56891 - protein, 17 aa, Artificial Sequence
  Description of Artificial Sequence: Synthetic peptide
  Seed: CSLMQGSTLPRRSGAAG
CSLMFGSVLTRRLGAAG

SEQ ID NO: 56892 - protein, 17 aa, Artificial Sequence
  Description of Artificial Sequence: Synthetic peptide
  Seed: CSLMQGSTLPRRSGAAG
CSLMFGSVLTRRVGAAG

SEQ ID NO: 56893 - protein, 17 aa, Artificial Sequence
  Description of Artificial Sequence: Synthetic peptide
  Seed: CSLMQGSTLPRRSGAAG
CSLMIGSALARRAGAAG

SEQ ID NO: 56894 - protein, 17 aa, Artificial Sequence
  Description of Artificial Sequence: Synthetic peptide
  Seed: CSLMQGSTLPRRSGAAG
CSLMIGSALARRIGAAG

SEQ ID NO: 56895 - protein, 17 aa, Artificial Sequence
  Description of Artificial Sequence: Synthetic peptide
  Seed: CSLMQGSTLPRRSGAAG
CSLMIGSALARRLGAAG

SEQ ID NO: 56896 - protein, 17 aa, Artificial Sequence
  Description of Artificial Sequence: Synthetic peptide
  Seed: CSLMQGSTLPRRSGAAG
CSLMIGSALARRMGAAG

SEQ ID NO: 56897 - protein, 17 aa, Artificial Sequence
  Description of Artificial Sequence: Synthetic peptide
  Seed: CSLMQGSTLPRRSGAAG
CSLMIGSALARRVGAAG

SEQ ID NO: 56898 - protein, 17 aa, Artificial Sequence
  Description of Artificial Sequence: Synthetic peptide
  Seed: CSLMQGSTLPRRSGAAG
CSLMIGSALGRRIGAAG

SEQ ID NO: 56899 - protein, 17 aa, Artificial Sequence
  Description of Artificial Sequence: Synthetic peptide
  Seed: CSLMQGSTLPRRSGAAG
CSLMIGSALGRRLGAAG

SEQ ID NO: 56900 - protein, 17 aa, Artificial Sequence
  Description of Artificial Sequence: Synthetic peptide
  Seed: CSLMQGSTLPRRSGAAG
CSLMIGSALGRRVGAAG

SEQ ID NO: 56901 - protein, 17 aa, Artificial Sequence
  Description of Artificial Sequence: Synthetic peptide
  Seed: CSLMQGSTLPRRSGAAG
CSLMIGSALSRRAGAAG

SEQ ID NO: 56902 - protein, 17 aa, Artificial Sequence
  Description of Artificial Sequence: Synthetic peptide
  Seed: CSLMQGSTLPRRSGAAG
CSLMIGSALSRRIGAAG

SEQ ID NO: 56903 - protein, 17 aa, Artificial Sequence
  Description of Artificial Sequence: Synthetic peptide
  Seed: CSLMQGSTLPRRSGAAG
CSLMIGSALSRRLGAAG

SEQ ID NO: 56904 - protein, 17 aa, Artificial Sequence
  Description of Artificial Sequence: Synthetic peptide
  Seed: CSLMQGSTLPRRSGAAG
CSLMIGSALSRRVGAAG

SEQ ID NO: 56905 - protein, 17 aa, Artificial Sequence
  Description of Artificial Sequence: Synthetic peptide
  Seed: CSLMQGSTLPRRSGAAG
CSLMIGSILARRAGAAG

SEQ ID NO: 56906 - protein, 17 aa, Artificial Sequence
  Description of Artificial Sequence: Synthetic peptide
  Seed: CSLMQGSTLPRRSGAAG
CSLMIGSILARRIGAAG

SEQ ID NO: 56907 - protein, 17 aa, Artificial Sequence
  Description of Artificial Sequence: Synthetic peptide
  Seed: CSLMQGSTLPRRSGAAG
CSLMIGSILARRLGAAG

SEQ ID NO: 56908 - protein, 17 aa, Artificial Sequence
  Description of Artificial Sequence: Synthetic peptide
  Seed: CSLMQGSTLPRRSGAAG
CSLMIGSILARRVGAAG

SEQ ID NO: 56909 - protein, 17 aa, Artificial Sequence
  Description of Artificial Sequence: Synthetic peptide
  Seed: CSLMQGSTLPRRSGAAG
CSLMIGSILGRRAGAAG

SEQ ID NO: 56910 - protein, 17 aa, Artificial Sequence
  Description of Artificial Sequence: Synthetic peptide
  Seed: CSLMQGSTLPRRSGAAG
CSLMIGSILGRRIGAAG

SEQ ID NO: 56911 - protein, 17 aa, Artificial Sequence
  Description of Artificial Sequence: Synthetic peptide
  Seed: CSLMQGSTLPRRSGAAG
CSLMIGSILGRRLGAAG

SEQ ID NO: 56912 - protein, 17 aa, Artificial Sequence
  Description of Artificial Sequence: Synthetic peptide
  Seed: CSLMQGSTLPRRSGAAG
CSLMIGSILGRRVGAAG

SEQ ID NO: 56913 - protein, 17 aa, Artificial Sequence
  Description of Artificial Sequence: Synthetic peptide
  Seed: CSLMQGSTLPRRSGAAG
CSLMIGSILPRRVGAAG

SEQ ID NO: 56914 - protein, 17 aa, Artificial Sequence
  Description of Artificial Sequence: Synthetic peptide
  Seed: CSLMQGSTLPRRSGAAG
CSLMIGSILSRRAGAAG

SEQ ID NO: 56915 - protein, 17 aa, Artificial Sequence
  Description of Artificial Sequence: Synthetic peptide
  Seed: CSLMQGSTLPRRSGAAG
CSLMIGSILSRRIGAAG

SEQ ID NO: 56916 - protein, 17 aa, Artificial Sequence
  Description of Artificial Sequence: Synthetic peptide
  Seed: CSLMQGSTLPRRSGAAG
CSLMIGSILSRRLGAAG

SEQ ID NO: 56917 - protein, 17 aa, Artificial Sequence
  Description of Artificial Sequence: Synthetic peptide
  Seed: CSLMQGSTLPRRSGAAG
CSLMIGSILSRRVGAAG

SEQ ID NO: 56918 - protein, 17 aa, Artificial Sequence
  Description of Artificial Sequence: Synthetic peptide
  Seed: CSLMQGSTLPRRSGAAG
CSLMIGSLLARRAGAAG

SEQ ID NO: 56919 - protein, 17 aa, Artificial Sequence
  Description of Artificial Sequence: Synthetic peptide
  Seed: CSLMQGSTLPRRSGAAG
CSLMIGSLLARRIGAAG

SEQ ID NO: 56920 - protein, 17 aa, Artificial Sequence
  Description of Artificial Sequence: Synthetic peptide
  Seed: CSLMQGSTLPRRSGAAG
CSLMIGSLLARRLGAAG

SEQ ID NO: 56921 - protein, 17 aa, Artificial Sequence
  Description of Artificial Sequence: Synthetic peptide
  Seed: CSLMQGSTLPRRSGAAG
CSLMIGSLLARRMGAAG

SEQ ID NO: 56922 - protein, 17 aa, Artificial Sequence
  Description of Artificial Sequence: Synthetic peptide
  Seed: CSLMQGSTLPRRSGAAG
CSLMIGSLLARRSGAAG

SEQ ID NO: 56923 - protein, 17 aa, Artificial Sequence
  Description of Artificial Sequence: Synthetic peptide
  Seed: CSLMQGSTLPRRSGAAG
CSLMIGSLLARRTGAAG

SEQ ID NO: 56924 - protein, 17 aa, Artificial Sequence
  Description of Artificial Sequence: Synthetic peptide
  Seed: CSLMQGSTLPRRSGAAG
CSLMIGSLLARRVGAAG

SEQ ID NO: 56925 - protein, 17 aa, Artificial Sequence
  Description of Artificial Sequence: Synthetic peptide
  Seed: CSLMQGSTLPRRSGAAG
CSLMIGSLLGRRAGAAG

SEQ ID NO: 56926 - protein, 17 aa, Artificial Sequence
  Description of Artificial Sequence: Synthetic peptide
  Seed: CSLMQGSTLPRRSGAAG
CSLMIGSLLGRRIGAAG

SEQ ID NO: 56927 - protein, 17 aa, Artificial Sequence
  Description of Artificial Sequence: Synthetic peptide
  Seed: CSLMQGSTLPRRSGAAG
CSLMIGSLLGRRLGAAG

SEQ ID NO: 56928 - protein, 17 aa, Artificial Sequence
  Description of Artificial Sequence: Synthetic peptide
  Seed: CSLMQGSTLPRRSGAAG
CSLMIGSLLGRRMGAAG

SEQ ID NO: 56929 - protein, 17 aa, Artificial Sequence
  Description of Artificial Sequence: Synthetic peptide
  Seed: CSLMQGSTLPRRSGAAG
CSLMIGSLLGRRSGAAG

SEQ ID NO: 56930 - protein, 17 aa, Artificial Sequence
  Description of Artificial Sequence: Synthetic peptide
  Seed: CSLMQGSTLPRRSGAAG
CSLMIGSLLGRRTGAAG

SEQ ID NO: 56931 - protein, 17 aa, Artificial Sequence
  Description of Artificial Sequence: Synthetic peptide
  Seed: CSLMQGSTLPRRSGAAG
CSLMIGSLLGRRVGAAG

SEQ ID NO: 56932 - protein, 17 aa, Artificial Sequence
  Description of Artificial Sequence: Synthetic peptide
  Seed: CSLMQGSTLPRRSGAAG
CSLMIGSLLNRRLGAAG

SEQ ID NO: 56933 - protein, 17 aa, Artificial Sequence
  Description of Artificial Sequence: Synthetic peptide
  Seed: CSLMQGSTLPRRSGAAG
CSLMIGSLLNRRVGAAG

SEQ ID NO: 56934 - protein, 17 aa, Artificial Sequence
  Description of Artificial Sequence: Synthetic peptide
  Seed: CSLMQGSTLPRRSGAAG
CSLMIGSLLPRRAGAAG

SEQ ID NO: 56935 - protein, 17 aa, Artificial Sequence
  Description of Artificial Sequence: Synthetic peptide
  Seed: CSLMQGSTLPRRSGAAG
CSLMIGSLLPRRIGAAG

SEQ ID NO: 56936 - protein, 17 aa, Artificial Sequence
  Description of Artificial Sequence: Synthetic peptide
  Seed: CSLMQGSTLPRRSGAAG
CSLMIGSLLPRRLGAAG

SEQ ID NO: 56937 - protein, 17 aa, Artificial Sequence
  Description of Artificial Sequence: Synthetic peptide
  Seed: CSLMQGSTLPRRSGAAG
CSLMIGSLLPRRVGAAG

SEQ ID NO: 56938 - protein, 17 aa, Artificial Sequence
  Description of Artificial Sequence: Synthetic peptide
  Seed: CSLMQGSTLPRRSGAAG
CSLMIGSLLSRRAGAAG

SEQ ID NO: 56939 - protein, 17 aa, Artificial Sequence
  Description of Artificial Sequence: Synthetic peptide
  Seed: CSLMQGSTLPRRSGAAG
CSLMIGSLLSRRIGAAG

SEQ ID NO: 56940 - protein, 17 aa, Artificial Sequence
  Description of Artificial Sequence: Synthetic peptide
  Seed: CSLMQGSTLPRRSGAAG
CSLMIGSLLSRRLGAAG

SEQ ID NO: 56941 - protein, 17 aa, Artificial Sequence
  Description of Artificial Sequence: Synthetic peptide
  Seed: CSLMQGSTLPRRSGAAG
CSLMIGSLLSRRMGAAG

SEQ ID NO: 56942 - protein, 17 aa, Artificial Sequence
  Description of Artificial Sequence: Synthetic peptide
  Seed: CSLMQGSTLPRRSGAAG
CSLMIGSLLSRRTGAAG

SEQ ID NO: 56943 - protein, 17 aa, Artificial Sequence
  Description of Artificial Sequence: Synthetic peptide
  Seed: CSLMQGSTLPRRSGAAG
CSLMIGSLLSRRVGAAG

SEQ ID NO: 56944 - protein, 17 aa, Artificial Sequence
  Description of Artificial Sequence: Synthetic peptide
  Seed: CSLMQGSTLPRRSGAAG
CSLMIGSLLTRRIGAAG

SEQ ID NO: 56945 - protein, 17 aa, Artificial Sequence
  Description of Artificial Sequence: Synthetic peptide
  Seed: CSLMQGSTLPRRSGAAG
CSLMIGSLLTRRLGAAG

SEQ ID NO: 56946 - protein, 17 aa, Artificial Sequence
  Description of Artificial Sequence: Synthetic peptide
  Seed: CSLMQGSTLPRRSGAAG
CSLMIGSLLTRRVGAAG

SEQ ID NO: 56947 - protein, 17 aa, Artificial Sequence
  Description of Artificial Sequence: Synthetic peptide
  Seed: CSLMQGSTLPRRSGAAG
CSLMIGSMLARRAGAAG

SEQ ID NO: 56948 - protein, 17 aa, Artificial Sequence
  Description of Artificial Sequence: Synthetic peptide
  Seed: CSLMQGSTLPRRSGAAG
CSLMIGSMLARRIGAAG

SEQ ID NO: 56949 - protein, 17 aa, Artificial Sequence
  Description of Artificial Sequence: Synthetic peptide
  Seed: CSLMQGSTLPRRSGAAG
CSLMIGSMLARRLGAAG

SEQ ID NO: 56950 - protein, 17 aa, Artificial Sequence
  Description of Artificial Sequence: Synthetic peptide
  Seed: CSLMQGSTLPRRSGAAG
CSLMIGSMLARRMGAAG

SEQ ID NO: 56951 - protein, 17 aa, Artificial Sequence
  Description of Artificial Sequence: Synthetic peptide
  Seed: CSLMQGSTLPRRSGAAG
CSLMIGSMLARRSGAAG

SEQ ID NO: 56952 - protein, 17 aa, Artificial Sequence
  Description of Artificial Sequence: Synthetic peptide
  Seed: CSLMQGSTLPRRSGAAG
CSLMIGSMLARRTGAAG

SEQ ID NO: 56953 - protein, 17 aa, Artificial Sequence
  Description of Artificial Sequence: Synthetic peptide
  Seed: CSLMQGSTLPRRSGAAG
CSLMIGSMLARRVGAAG

SEQ ID NO: 56954 - protein, 17 aa, Artificial Sequence
  Description of Artificial Sequence: Synthetic peptide
  Seed: CSLMQGSTLPRRSGAAG
CSLMIGSMLGRRAGAAG

SEQ ID NO: 56955 - protein, 17 aa, Artificial Sequence
  Description of Artificial Sequence: Synthetic peptide
  Seed: CSLMQGSTLPRRSGAAG
CSLMIGSMLGRRIGAAG

SEQ ID NO: 56956 - protein, 17 aa, Artificial Sequence
  Description of Artificial Sequence: Synthetic peptide
  Seed: CSLMQGSTLPRRSGAAG
CSLMIGSMLGRRLGAAG

SEQ ID NO: 56957 - protein, 17 aa, Artificial Sequence
  Description of Artificial Sequence: Synthetic peptide
  Seed: CSLMQGSTLPRRSGAAG
CSLMIGSMLGRRMGAAG

SEQ ID NO: 56958 - protein, 17 aa, Artificial Sequence
  Description of Artificial Sequence: Synthetic peptide
  Seed: CSLMQGSTLPRRSGAAG
CSLMIGSMLGRRSGAAG

SEQ ID NO: 56959 - protein, 17 aa, Artificial Sequence
  Description of Artificial Sequence: Synthetic peptide
  Seed: CSLMQGSTLPRRSGAAG
CSLMIGSMLGRRTGAAG

SEQ ID NO: 56960 - protein, 17 aa, Artificial Sequence
  Description of Artificial Sequence: Synthetic peptide
  Seed: CSLMQGSTLPRRSGAAG
CSLMIGSMLGRRVGAAG

SEQ ID NO: 56961 - protein, 17 aa, Artificial Sequence
  Description of Artificial Sequence: Synthetic peptide
  Seed: CSLMQGSTLPRRSGAAG
CSLMIGSMLNRRIGAAG

SEQ ID NO: 56962 - protein, 17 aa, Artificial Sequence
  Description of Artificial Sequence: Synthetic peptide
  Seed: CSLMQGSTLPRRSGAAG
CSLMIGSMLNRRLGAAG

SEQ ID NO: 56963 - protein, 17 aa, Artificial Sequence
  Description of Artificial Sequence: Synthetic peptide
  Seed: CSLMQGSTLPRRSGAAG
CSLMIGSMLNRRVGAAG

SEQ ID NO: 56964 - protein, 17 aa, Artificial Sequence
  Description of Artificial Sequence: Synthetic peptide
  Seed: CSLMQGSTLPRRSGAAG
CSLMIGSMLPRRAGAAG

SEQ ID NO: 56965 - protein, 17 aa, Artificial Sequence
  Description of Artificial Sequence: Synthetic peptide
  Seed: CSLMQGSTLPRRSGAAG
CSLMIGSMLPRRIGAAG

SEQ ID NO: 56966 - protein, 17 aa, Artificial Sequence
  Description of Artificial Sequence: Synthetic peptide
  Seed: CSLMQGSTLPRRSGAAG
CSLMIGSMLPRRLGAAG

SEQ ID NO: 56967 - protein, 17 aa, Artificial Sequence
  Description of Artificial Sequence: Synthetic peptide
  Seed: CSLMQGSTLPRRSGAAG
CSLMIGSMLPRRVGAAG

SEQ ID NO: 56968 - protein, 17 aa, Artificial Sequence
  Description of Artificial Sequence: Synthetic peptide
  Seed: CSLMQGSTLPRRSGAAG
CSLMIGSMLSRRAGAAG

SEQ ID NO: 56969 - protein, 17 aa, Artificial Sequence
  Description of Artificial Sequence: Synthetic peptide
  Seed: CSLMQGSTLPRRSGAAG
CSLMIGSMLSRRIGAAG

SEQ ID NO: 56970 - protein, 17 aa, Artificial Sequence
  Description of Artificial Sequence: Synthetic peptide
  Seed: CSLMQGSTLPRRSGAAG
CSLMIGSMLSRRLGAAG

SEQ ID NO: 56971 - protein, 17 aa, Artificial Sequence
  Description of Artificial Sequence: Synthetic peptide
  Seed: CSLMQGSTLPRRSGAAG
CSLMIGSMLSRRMGAAG

SEQ ID NO: 56972 - protein, 17 aa, Artificial Sequence
  Description of Artificial Sequence: Synthetic peptide
  Seed: CSLMQGSTLPRRSGAAG
CSLMIGSMLSRRSGAAG

SEQ ID NO: 56973 - protein, 17 aa, Artificial Sequence
  Description of Artificial Sequence: Synthetic peptide
  Seed: CSLMQGSTLPRRSGAAG
CSLMIGSMLSRRTGAAG

SEQ ID NO: 56974 - protein, 17 aa, Artificial Sequence
  Description of Artificial Sequence: Synthetic peptide
  Seed: CSLMQGSTLPRRSGAAG
CSLMIGSMLSRRVGAAG

SEQ ID NO: 56975 - protein, 17 aa, Artificial Sequence
  Description of Artificial Sequence: Synthetic peptide
  Seed: CSLMQGSTLPRRSGAAG
CSLMIGSMLTRRAGAAG

SEQ ID NO: 56976 - protein, 17 aa, Artificial Sequence
  Description of Artificial Sequence: Synthetic peptide
  Seed: CSLMQGSTLPRRSGAAG
CSLMIGSMLTRRIGAAG

SEQ ID NO: 56977 - protein, 17 aa, Artificial Sequence
  Description of Artificial Sequence: Synthetic peptide
  Seed: CSLMQGSTLPRRSGAAG
CSLMIGSMLTRRLGAAG

SEQ ID NO: 56978 - protein, 17 aa, Artificial Sequence
  Description of Artificial Sequence: Synthetic peptide
  Seed: CSLMQGSTLPRRSGAAG
CSLMIGSMLTRRVGAAG

SEQ ID NO: 56979 - protein, 17 aa, Artificial Sequence
  Description of Artificial Sequence: Synthetic peptide
  Seed: CSLMQGSTLPRRSGAAG
CSLMIGSQLARRAGAAG

SEQ ID NO: 56980 - protein, 17 aa, Artificial Sequence
  Description of Artificial Sequence: Synthetic peptide
  Seed: CSLMQGSTLPRRSGAAG
CSLMIGSQLARRIGAAG

SEQ ID NO: 56981 - protein, 17 aa, Artificial Sequence
  Description of Artificial Sequence: Synthetic peptide
  Seed: CSLMQGSTLPRRSGAAG
CSLMIGSQLARRLGAAG

SEQ ID NO: 56982 - protein, 17 aa, Artificial Sequence
  Description of Artificial Sequence: Synthetic peptide
  Seed: CSLMQGSTLPRRSGAAG
CSLMIGSQLARRVGAAG

SEQ ID NO: 56983 - protein, 17 aa, Artificial Sequence
  Description of Artificial Sequence: Synthetic peptide
  Seed: CSLMQGSTLPRRSGAAG
CSLMIGSQLGRRIGAAG

SEQ ID NO: 56984 - protein, 17 aa, Artificial Sequence
  Description of Artificial Sequence: Synthetic peptide
  Seed: CSLMQGSTLPRRSGAAG
CSLMIGSQLGRRLGAAG

SEQ ID NO: 56985 - protein, 17 aa, Artificial Sequence
  Description of Artificial Sequence: Synthetic peptide
  Seed: CSLMQGSTLPRRSGAAG
CSLMIGSQLGRRVGAAG

SEQ ID NO: 56986 - protein, 17 aa, Artificial Sequence
  Description of Artificial Sequence: Synthetic peptide
  Seed: CSLMQGSTLPRRSGAAG
CSLMIGSQLSRRVGAAG

SEQ ID NO: 56987 - protein, 17 aa, Artificial Sequence
  Description of Artificial Sequence: Synthetic peptide
  Seed: CSLMQGSTLPRRSGAAG
CSLMIGSSLARRIGAAG

SEQ ID NO: 56988 - protein, 17 aa, Artificial Sequence
  Description of Artificial Sequence: Synthetic peptide
  Seed: CSLMQGSTLPRRSGAAG
CSLMIGSSLARRLGAAG

SEQ ID NO: 56989 - protein, 17 aa, Artificial Sequence
  Description of Artificial Sequence: Synthetic peptide
  Seed: CSLMQGSTLPRRSGAAG
CSLMIGSSLARRVGAAG

SEQ ID NO: 56990 - protein, 17 aa, Artificial Sequence
  Description of Artificial Sequence: Synthetic peptide
  Seed: CSLMQGSTLPRRSGAAG
CSLMIGSVLARRAGAAG

SEQ ID NO: 56991 - protein, 17 aa, Artificial Sequence
  Description of Artificial Sequence: Synthetic peptide
  Seed: CSLMQGSTLPRRSGAAG
CSLMIGSVLARRIGAAG

SEQ ID NO: 56992 - protein, 17 aa, Artificial Sequence
  Description of Artificial Sequence: Synthetic peptide
  Seed: CSLMQGSTLPRRSGAAG
CSLMIGSVLARRLGAAG

SEQ ID NO: 56993 - protein, 17 aa, Artificial Sequence
  Description of Artificial Sequence: Synthetic peptide
  Seed: CSLMQGSTLPRRSGAAG
CSLMIGSVLARRVGAAG

SEQ ID NO: 56994 - protein, 17 aa, Artificial Sequence
  Description of Artificial Sequence: Synthetic peptide
  Seed: CSLMQGSTLPRRSGAAG
CSLMIGSVLGRRIGAAG

SEQ ID NO: 56995 - protein, 17 aa, Artificial Sequence
  Description of Artificial Sequence: Synthetic peptide
  Seed: CSLMQGSTLPRRSGAAG
CSLMIGSVLGRRLGAAG

SEQ ID NO: 56996 - protein, 17 aa, Artificial Sequence
  Description of Artificial Sequence: Synthetic peptide
  Seed: CSLMQGSTLPRRSGAAG
CSLMIGSVLGRRVGAAG

SEQ ID NO: 56997 - protein, 17 aa, Artificial Sequence
  Description of Artificial Sequence: Synthetic peptide
  Seed: CSLMQGSTLPRRSGAAG
CSLMIGSVLSRRIGAAG

SEQ ID NO: 56998 - protein, 17 aa, Artificial Sequence
  Description of Artificial Sequence: Synthetic peptide
  Seed: CSLMQGSTLPRRSGAAG
CSLMIGSVLSRRVGAAG

SEQ ID NO: 56999 - protein, 17 aa, Artificial Sequence
  Description of Artificial Sequence: Synthetic peptide
  Seed: CSLMQGSTLPRRSGAAG
CSLMLGSALARRAGAAG

SEQ ID NO: 57000 - protein, 17 aa, Artificial Sequence
  Description of Artificial Sequence: Synthetic peptide
  Seed: CSLMQGSTLPRRSGAAG
CSLMLGSALARRIGAAG

SEQ ID NO: 57001 - protein, 17 aa, Artificial Sequence
  Description of Artificial Sequence: Synthetic peptide
  Seed: CSLMQGSTLPRRSGAAG
CSLMLGSALARRLGAAG

SEQ ID NO: 57002 - protein, 17 aa, Artificial Sequence
  Description of Artificial Sequence: Synthetic peptide
  Seed: CSLMQGSTLPRRSGAAG
CSLMLGSALARRMGAAG

SEQ ID NO: 57003 - protein, 17 aa, Artificial Sequence
  Description of Artificial Sequence: Synthetic peptide
  Seed: CSLMQGSTLPRRSGAAG
CSLMLGSALARRVGAAG

SEQ ID NO: 57004 - protein, 17 aa, Artificial Sequence
  Description of Artificial Sequence: Synthetic peptide
  Seed: CSLMQGSTLPRRSGAAG
CSLMLGSALGRRIGAAG

SEQ ID NO: 57005 - protein, 17 aa, Artificial Sequence
  Description of Artificial Sequence: Synthetic peptide
  Seed: CSLMQGSTLPRRSGAAG
CSLMLGSALGRRLGAAG

SEQ ID NO: 57006 - protein, 17 aa, Artificial Sequence
  Description of Artificial Sequence: Synthetic peptide
  Seed: CSLMQGSTLPRRSGAAG
CSLMLGSALGRRVGAAG

SEQ ID NO: 57007 - protein, 17 aa, Artificial Sequence
  Description of Artificial Sequence: Synthetic peptide
  Seed: CSLMQGSTLPRRSGAAG
CSLMLGSALSRRIGAAG

SEQ ID NO: 57008 - protein, 17 aa, Artificial Sequence
  Description of Artificial Sequence: Synthetic peptide
  Seed: CSLMQGSTLPRRSGAAG
CSLMLGSALSRRLGAAG

SEQ ID NO: 57009 - protein, 17 aa, Artificial Sequence
  Description of Artificial Sequence: Synthetic peptide
  Seed: CSLMQGSTLPRRSGAAG
CSLMLGSALSRRVGAAG

SEQ ID NO: 57010 - protein, 17 aa, Artificial Sequence
  Description of Artificial Sequence: Synthetic peptide
  Seed: CSLMQGSTLPRRSGAAG
CSLMLGSILARRAGAAG

SEQ ID NO: 57011 - protein, 17 aa, Artificial Sequence
  Description of Artificial Sequence: Synthetic peptide
  Seed: CSLMQGSTLPRRSGAAG
CSLMLGSILARRIGAAG

SEQ ID NO: 57012 - protein, 17 aa, Artificial Sequence
  Description of Artificial Sequence: Synthetic peptide
  Seed: CSLMQGSTLPRRSGAAG
CSLMLGSILARRLGAAG

SEQ ID NO: 57013 - protein, 17 aa, Artificial Sequence
  Description of Artificial Sequence: Synthetic peptide
  Seed: CSLMQGSTLPRRSGAAG
CSLMLGSILARRVGAAG

SEQ ID NO: 57014 - protein, 17 aa, Artificial Sequence
  Description of Artificial Sequence: Synthetic peptide
  Seed: CSLMQGSTLPRRSGAAG
CSLMLGSILGRRIGAAG

SEQ ID NO: 57015 - protein, 17 aa, Artificial Sequence
  Description of Artificial Sequence: Synthetic peptide
  Seed: CSLMQGSTLPRRSGAAG
CSLMLGSILGRRLGAAG

SEQ ID NO: 57016 - protein, 17 aa, Artificial Sequence
  Description of Artificial Sequence: Synthetic peptide
  Seed: CSLMQGSTLPRRSGAAG
CSLMLGSILGRRVGAAG

SEQ ID NO: 57017 - protein, 17 aa, Artificial Sequence
  Description of Artificial Sequence: Synthetic peptide
  Seed: CSLMQGSTLPRRSGAAG
CSLMLGSILSRRIGAAG

SEQ ID NO: 57018 - protein, 17 aa, Artificial Sequence
  Description of Artificial Sequence: Synthetic peptide
  Seed: CSLMQGSTLPRRSGAAG
CSLMLGSILSRRLGAAG

SEQ ID NO: 57019 - protein, 17 aa, Artificial Sequence
  Description of Artificial Sequence: Synthetic peptide
  Seed: CSLMQGSTLPRRSGAAG
CSLMLGSILSRRVGAAG

SEQ ID NO: 57020 - protein, 17 aa, Artificial Sequence
  Description of Artificial Sequence: Synthetic peptide
  Seed: CSLMQGSTLPRRSGAAG
CSLMLGSLLARRAGAAG

SEQ ID NO: 57021 - protein, 17 aa, Artificial Sequence
  Description of Artificial Sequence: Synthetic peptide
  Seed: CSLMQGSTLPRRSGAAG
CSLMLGSLLARRIGAAG

SEQ ID NO: 57022 - protein, 17 aa, Artificial Sequence
  Description of Artificial Sequence: Synthetic peptide
  Seed: CSLMQGSTLPRRSGAAG
CSLMLGSLLARRLGAAG

SEQ ID NO: 57023 - protein, 17 aa, Artificial Sequence
  Description of Artificial Sequence: Synthetic peptide
  Seed: CSLMQGSTLPRRSGAAG
CSLMLGSLLARRMGAAG

SEQ ID NO: 57024 - protein, 17 aa, Artificial Sequence
  Description of Artificial Sequence: Synthetic peptide
  Seed: CSLMQGSTLPRRSGAAG
CSLMLGSLLARRSGAAG

SEQ ID NO: 57025 - protein, 17 aa, Artificial Sequence
  Description of Artificial Sequence: Synthetic peptide
  Seed: CSLMQGSTLPRRSGAAG
CSLMLGSLLARRTGAAG

SEQ ID NO: 57026 - protein, 17 aa, Artificial Sequence
  Description of Artificial Sequence: Synthetic peptide
  Seed: CSLMQGSTLPRRSGAAG
CSLMLGSLLARRVGAAG

SEQ ID NO: 57027 - protein, 17 aa, Artificial Sequence
  Description of Artificial Sequence: Synthetic peptide
  Seed: CSLMQGSTLPRRSGAAG
CSLMLGSLLGRRAGAAG

SEQ ID NO: 57028 - protein, 17 aa, Artificial Sequence
  Description of Artificial Sequence: Synthetic peptide
  Seed: CSLMQGSTLPRRSGAAG
CSLMLGSLLGRRIGAAG

SEQ ID NO: 57029 - protein, 17 aa, Artificial Sequence
  Description of Artificial Sequence: Synthetic peptide
  Seed: CSLMQGSTLPRRSGAAG
CSLMLGSLLGRRLGAAG

SEQ ID NO: 57030 - protein, 17 aa, Artificial Sequence
  Description of Artificial Sequence: Synthetic peptide
  Seed: CSLMQGSTLPRRSGAAG
CSLMLGSLLGRRMGAAG

SEQ ID NO: 57031 - protein, 17 aa, Artificial Sequence
  Description of Artificial Sequence: Synthetic peptide
  Seed: CSLMQGSTLPRRSGAAG
CSLMLGSLLGRRTGAAG

SEQ ID NO: 57032 - protein, 17 aa, Artificial Sequence
  Description of Artificial Sequence: Synthetic peptide
  Seed: CSLMQGSTLPRRSGAAG
CSLMLGSLLGRRVGAAG

SEQ ID NO: 57033 - protein, 17 aa, Artificial Sequence
  Description of Artificial Sequence: Synthetic peptide
  Seed: CSLMQGSTLPRRSGAAG
CSLMLGSLLPRRIGAAG

SEQ ID NO: 57034 - protein, 17 aa, Artificial Sequence
  Description of Artificial Sequence: Synthetic peptide
  Seed: CSLMQGSTLPRRSGAAG
CSLMLGSLLPRRLGAAG

SEQ ID NO: 57035 - protein, 17 aa, Artificial Sequence
  Description of Artificial Sequence: Synthetic peptide
  Seed: CSLMQGSTLPRRSGAAG
CSLMLGSLLPRRVGAAG

SEQ ID NO: 57036 - protein, 17 aa, Artificial Sequence
  Description of Artificial Sequence: Synthetic peptide
  Seed: CSLMQGSTLPRRSGAAG
CSLMLGSLLSRRAGAAG

SEQ ID NO: 57037 - protein, 17 aa, Artificial Sequence
  Description of Artificial Sequence: Synthetic peptide
  Seed: CSLMQGSTLPRRSGAAG
CSLMLGSLLSRRIGAAG

SEQ ID NO: 57038 - protein, 17 aa, Artificial Sequence
  Description of Artificial Sequence: Synthetic peptide
  Seed: CSLMQGSTLPRRSGAAG
CSLMLGSLLSRRLGAAG

SEQ ID NO: 57039 - protein, 17 aa, Artificial Sequence
  Description of Artificial Sequence: Synthetic peptide
  Seed: CSLMQGSTLPRRSGAAG
CSLMLGSLLSRRVGAAG

SEQ ID NO: 57040 - protein, 17 aa, Artificial Sequence
  Description of Artificial Sequence: Synthetic peptide
  Seed: CSLMQGSTLPRRSGAAG
CSLMLGSLLTRRVGAAG

SEQ ID NO: 57041 - protein, 17 aa, Artificial Sequence
  Description of Artificial Sequence: Synthetic peptide
  Seed: CSLMQGSTLPRRSGAAG
CSLMLGSMLARRAGAAG

SEQ ID NO: 57042 - protein, 17 aa, Artificial Sequence
  Description of Artificial Sequence: Synthetic peptide
  Seed: CSLMQGSTLPRRSGAAG
CSLMLGSMLARRIGAAG

SEQ ID NO: 57043 - protein, 17 aa, Artificial Sequence
  Description of Artificial Sequence: Synthetic peptide
  Seed: CSLMQGSTLPRRSGAAG
CSLMLGSMLARRLGAAG

SEQ ID NO: 57044 - protein, 17 aa, Artificial Sequence
  Description of Artificial Sequence: Synthetic peptide
  Seed: CSLMQGSTLPRRSGAAG
CSLMLGSMLARRMGAAG

SEQ ID NO: 57045 - protein, 17 aa, Artificial Sequence
  Description of Artificial Sequence: Synthetic peptide
  Seed: CSLMQGSTLPRRSGAAG
CSLMLGSMLARRSGAAG

SEQ ID NO: 57046 - protein, 17 aa, Artificial Sequence
  Description of Artificial Sequence: Synthetic peptide
  Seed: CSLMQGSTLPRRSGAAG
CSLMLGSMLARRTGAAG

SEQ ID NO: 57047 - protein, 17 aa, Artificial Sequence
  Description of Artificial Sequence: Synthetic peptide
  Seed: CSLMQGSTLPRRSGAAG
CSLMLGSMLARRVGAAG

SEQ ID NO: 57048 - protein, 17 aa, Artificial Sequence
  Description of Artificial Sequence: Synthetic peptide
  Seed: CSLMQGSTLPRRSGAAG
CSLMLGSMLGRRAGAAG

SEQ ID NO: 57049 - protein, 17 aa, Artificial Sequence
  Description of Artificial Sequence: Synthetic peptide
  Seed: CSLMQGSTLPRRSGAAG
CSLMLGSMLGRRIGAAG

SEQ ID NO: 57050 - protein, 17 aa, Artificial Sequence
  Description of Artificial Sequence: Synthetic peptide
  Seed: CSLMQGSTLPRRSGAAG
CSLMLGSMLGRRLGAAG

SEQ ID NO: 57051 - protein, 17 aa, Artificial Sequence
  Description of Artificial Sequence: Synthetic peptide
  Seed: CSLMQGSTLPRRSGAAG
CSLMLGSMLGRRMGAAG

SEQ ID NO: 57052 - protein, 17 aa, Artificial Sequence
  Description of Artificial Sequence: Synthetic peptide
  Seed: CSLMQGSTLPRRSGAAG
CSLMLGSMLGRRTGAAG

SEQ ID NO: 57053 - protein, 17 aa, Artificial Sequence
  Description of Artificial Sequence: Synthetic peptide
  Seed: CSLMQGSTLPRRSGAAG
CSLMLGSMLGRRVGAAG

SEQ ID NO: 57054 - protein, 17 aa, Artificial Sequence
  Description of Artificial Sequence: Synthetic peptide
  Seed: CSLMQGSTLPRRSGAAG
CSLMLGSMLNRRVGAAG

SEQ ID NO: 57055 - protein, 17 aa, Artificial Sequence
  Description of Artificial Sequence: Synthetic peptide
  Seed: CSLMQGSTLPRRSGAAG
CSLMLGSMLPRRIGAAG

SEQ ID NO: 57056 - protein, 17 aa, Artificial Sequence
  Description of Artificial Sequence: Synthetic peptide
  Seed: CSLMQGSTLPRRSGAAG
CSLMLGSMLPRRLGAAG

SEQ ID NO: 57057 - protein, 17 aa, Artificial Sequence
  Description of Artificial Sequence: Synthetic peptide
  Seed: CSLMQGSTLPRRSGAAG
CSLMLGSMLPRRVGAAG

SEQ ID NO: 57058 - protein, 17 aa, Artificial Sequence
  Description of Artificial Sequence: Synthetic peptide
  Seed: CSLMQGSTLPRRSGAAG
CSLMLGSMLSRRAGAAG

SEQ ID NO: 57059 - protein, 17 aa, Artificial Sequence
  Description of Artificial Sequence: Synthetic peptide
  Seed: CSLMQGSTLPRRSGAAG
CSLMLGSMLSRRIGAAG

SEQ ID NO: 57060 - protein, 17 aa, Artificial Sequence
  Description of Artificial Sequence: Synthetic peptide
  Seed: CSLMQGSTLPRRSGAAG
CSLMLGSMLSRRLGAAG

SEQ ID NO: 57061 - protein, 17 aa, Artificial Sequence
  Description of Artificial Sequence: Synthetic peptide
  Seed: CSLMQGSTLPRRSGAAG
CSLMLGSMLSRRMGAAG

SEQ ID NO: 57062 - protein, 17 aa, Artificial Sequence
  Description of Artificial Sequence: Synthetic peptide
  Seed: CSLMQGSTLPRRSGAAG
CSLMLGSMLSRRTGAAG

SEQ ID NO: 57063 - protein, 17 aa, Artificial Sequence
  Description of Artificial Sequence: Synthetic peptide
  Seed: CSLMQGSTLPRRSGAAG
CSLMLGSMLSRRVGAAG

SEQ ID NO: 57064 - protein, 17 aa, Artificial Sequence
  Description of Artificial Sequence: Synthetic peptide
  Seed: CSLMQGSTLPRRSGAAG
CSLMLGSMLTRRIGAAG

SEQ ID NO: 57065 - protein, 17 aa, Artificial Sequence
  Description of Artificial Sequence: Synthetic peptide
  Seed: CSLMQGSTLPRRSGAAG
CSLMLGSMLTRRLGAAG

SEQ ID NO: 57066 - protein, 17 aa, Artificial Sequence
  Description of Artificial Sequence: Synthetic peptide
  Seed: CSLMQGSTLPRRSGAAG
CSLMLGSMLTRRVGAAG

SEQ ID NO: 57067 - protein, 17 aa, Artificial Sequence
  Description of Artificial Sequence: Synthetic peptide
  Seed: CSLMQGSTLPRRSGAAG
CSLMLGSQLARRIGAAG

SEQ ID NO: 57068 - protein, 17 aa, Artificial Sequence
  Description of Artificial Sequence: Synthetic peptide
  Seed: CSLMQGSTLPRRSGAAG
CSLMLGSQLARRLGAAG

SEQ ID NO: 57069 - protein, 17 aa, Artificial Sequence
  Description of Artificial Sequence: Synthetic peptide
  Seed: CSLMQGSTLPRRSGAAG
CSLMLGSQLARRVGAAG

SEQ ID NO: 57070 - protein, 17 aa, Artificial Sequence
  Description of Artificial Sequence: Synthetic peptide
  Seed: CSLMQGSTLPRRSGAAG
CSLMLGSSLARRVGAAG

SEQ ID NO: 57071 - protein, 17 aa, Artificial Sequence
  Description of Artificial Sequence: Synthetic peptide
  Seed: CSLMQGSTLPRRSGAAG
CSLMLGSVLARRIGAAG

SEQ ID NO: 57072 - protein, 17 aa, Artificial Sequence
  Description of Artificial Sequence: Synthetic peptide
  Seed: CSLMQGSTLPRRSGAAG
CSLMLGSVLARRLGAAG

SEQ ID NO: 57073 - protein, 17 aa, Artificial Sequence
  Description of Artificial Sequence: Synthetic peptide
  Seed: CSLMQGSTLPRRSGAAG
CSLMLGSVLARRVGAAG

SEQ ID NO: 57074 - protein, 17 aa, Artificial Sequence
  Description of Artificial Sequence: Synthetic peptide
  Seed: CSLMQGSTLPRRSGAAG
CSLMLGSVLGRRVGAAG

SEQ ID NO: 57075 - protein, 17 aa, Artificial Sequence
  Description of Artificial Sequence: Synthetic peptide
  Seed: CSLMQGSTLPRRSGAAG
CSLMMGSALARRIGAAG

SEQ ID NO: 57076 - protein, 17 aa, Artificial Sequence
  Description of Artificial Sequence: Synthetic peptide
  Seed: CSLMQGSTLPRRSGAAG
CSLMMGSALARRLGAAG

SEQ ID NO: 57077 - protein, 17 aa, Artificial Sequence
  Description of Artificial Sequence: Synthetic peptide
  Seed: CSLMQGSTLPRRSGAAG
CSLMMGSALARRVGAAG

SEQ ID NO: 57078 - protein, 17 aa, Artificial Sequence
  Description of Artificial Sequence: Synthetic peptide
  Seed: CSLMQGSTLPRRSGAAG
CSLMMGSILARRIGAAG

SEQ ID NO: 57079 - protein, 17 aa, Artificial Sequence
  Description of Artificial Sequence: Synthetic peptide
  Seed: CSLMQGSTLPRRSGAAG
CSLMMGSILARRLGAAG

SEQ ID NO: 57080 - protein, 17 aa, Artificial Sequence
  Description of Artificial Sequence: Synthetic peptide
  Seed: CSLMQGSTLPRRSGAAG
CSLMMGSILARRVGAAG

SEQ ID NO: 57081 - protein, 17 aa, Artificial Sequence
  Description of Artificial Sequence: Synthetic peptide
  Seed: CSLMQGSTLPRRSGAAG
CSLMMGSILGRRVGAAG

SEQ ID NO: 57082 - protein, 17 aa, Artificial Sequence
  Description of Artificial Sequence: Synthetic peptide
  Seed: CSLMQGSTLPRRSGAAG
CSLMMGSLLARRAGAAG

SEQ ID NO: 57083 - protein, 17 aa, Artificial Sequence
  Description of Artificial Sequence: Synthetic peptide
  Seed: CSLMQGSTLPRRSGAAG
CSLMMGSLLARRIGAAG

SEQ ID NO: 57084 - protein, 17 aa, Artificial Sequence
  Description of Artificial Sequence: Synthetic peptide
  Seed: CSLMQGSTLPRRSGAAG
CSLMMGSLLARRLGAAG

SEQ ID NO: 57085 - protein, 17 aa, Artificial Sequence
  Description of Artificial Sequence: Synthetic peptide
  Seed: CSLMQGSTLPRRSGAAG
CSLMMGSLLARRVGAAG

SEQ ID NO: 57086 - protein, 17 aa, Artificial Sequence
  Description of Artificial Sequence: Synthetic peptide
  Seed: CSLMQGSTLPRRSGAAG
CSLMMGSLLGRRAGAAG

SEQ ID NO: 57087 - protein, 17 aa, Artificial Sequence
  Description of Artificial Sequence: Synthetic peptide
  Seed: CSLMQGSTLPRRSGAAG
CSLMMGSLLGRRIGAAG

SEQ ID NO: 57088 - protein, 17 aa, Artificial Sequence
  Description of Artificial Sequence: Synthetic peptide
  Seed: CSLMQGSTLPRRSGAAG
CSLMMGSLLGRRLGAAG

SEQ ID NO: 57089 - protein, 17 aa, Artificial Sequence
  Description of Artificial Sequence: Synthetic peptide
  Seed: CSLMQGSTLPRRSGAAG
CSLMMGSLLGRRVGAAG

SEQ ID NO: 57090 - protein, 17 aa, Artificial Sequence
  Description of Artificial Sequence: Synthetic peptide
  Seed: CSLMQGSTLPRRSGAAG
CSLMMGSLLSRRIGAAG

SEQ ID NO: 57091 - protein, 17 aa, Artificial Sequence
  Description of Artificial Sequence: Synthetic peptide
  Seed: CSLMQGSTLPRRSGAAG
CSLMMGSLLSRRLGAAG

SEQ ID NO: 57092 - protein, 17 aa, Artificial Sequence
  Description of Artificial Sequence: Synthetic peptide
  Seed: CSLMQGSTLPRRSGAAG
CSLMMGSLLSRRVGAAG

SEQ ID NO: 57093 - protein, 17 aa, Artificial Sequence
  Description of Artificial Sequence: Synthetic peptide
  Seed: CSLMQGSTLPRRSGAAG
CSLMMGSMLARRAGAAG

SEQ ID NO: 57094 - protein, 17 aa, Artificial Sequence
  Description of Artificial Sequence: Synthetic peptide
  Seed: CSLMQGSTLPRRSGAAG
CSLMMGSMLARRIGAAG

SEQ ID NO: 57095 - protein, 17 aa, Artificial Sequence
  Description of Artificial Sequence: Synthetic peptide
  Seed: CSLMQGSTLPRRSGAAG
CSLMMGSMLARRLGAAG

SEQ ID NO: 57096 - protein, 17 aa, Artificial Sequence
  Description of Artificial Sequence: Synthetic peptide
  Seed: CSLMQGSTLPRRSGAAG
CSLMMGSMLARRMGAAG

SEQ ID NO: 57097 - protein, 17 aa, Artificial Sequence
  Description of Artificial Sequence: Synthetic peptide
  Seed: CSLMQGSTLPRRSGAAG
CSLMMGSMLARRVGAAG

SEQ ID NO: 57098 - protein, 17 aa, Artificial Sequence
  Description of Artificial Sequence: Synthetic peptide
  Seed: CSLMQGSTLPRRSGAAG
CSLMMGSMLGRRAGAAG

SEQ ID NO: 57099 - protein, 17 aa, Artificial Sequence
  Description of Artificial Sequence: Synthetic peptide
  Seed: CSLMQGSTLPRRSGAAG
CSLMMGSMLGRRIGAAG

SEQ ID NO: 57100 - protein, 17 aa, Artificial Sequence
  Description of Artificial Sequence: Synthetic peptide
  Seed: CSLMQGSTLPRRSGAAG
CSLMMGSMLGRRLGAAG

SEQ ID NO: 57101 - protein, 17 aa, Artificial Sequence
  Description of Artificial Sequence: Synthetic peptide
  Seed: CSLMQGSTLPRRSGAAG
CSLMMGSMLGRRVGAAG

SEQ ID NO: 57102 - protein, 17 aa, Artificial Sequence
  Description of Artificial Sequence: Synthetic peptide
  Seed: CSLMQGSTLPRRSGAAG
CSLMMGSMLPRRIGAAG

SEQ ID NO: 57103 - protein, 17 aa, Artificial Sequence
  Description of Artificial Sequence: Synthetic peptide
  Seed: CSLMQGSTLPRRSGAAG
CSLMMGSMLPRRVGAAG

SEQ ID NO: 57104 - protein, 17 aa, Artificial Sequence
  Description of Artificial Sequence: Synthetic peptide
  Seed: CSLMQGSTLPRRSGAAG
CSLMMGSMLSRRAGAAG

SEQ ID NO: 57105 - protein, 17 aa, Artificial Sequence
  Description of Artificial Sequence: Synthetic peptide
  Seed: CSLMQGSTLPRRSGAAG
CSLMMGSMLSRRIGAAG

SEQ ID NO: 57106 - protein, 17 aa, Artificial Sequence
  Description of Artificial Sequence: Synthetic peptide
  Seed: CSLMQGSTLPRRSGAAG
CSLMMGSMLSRRLGAAG

SEQ ID NO: 57107 - protein, 17 aa, Artificial Sequence
  Description of Artificial Sequence: Synthetic peptide
  Seed: CSLMQGSTLPRRSGAAG
CSLMMGSMLSRRVGAAG

SEQ ID NO: 57108 - protein, 17 aa, Artificial Sequence
  Description of Artificial Sequence: Synthetic peptide
  Seed: CSLMQGSTLPRRSGAAG
CSLMVGSALARRVGAAG

SEQ ID NO: 57109 - protein, 17 aa, Artificial Sequence
  Description of Artificial Sequence: Synthetic peptide
  Seed: CSLMQGSTLPRRSGAAG
CSLMVGSILARRIGAAG

SEQ ID NO: 57110 - protein, 17 aa, Artificial Sequence
  Description of Artificial Sequence: Synthetic peptide
  Seed: CSLMQGSTLPRRSGAAG
CSLMVGSILARRVGAAG

SEQ ID NO: 57111 - protein, 17 aa, Artificial Sequence
  Description of Artificial Sequence: Synthetic peptide
  Seed: CSLMQGSTLPRRSGAAG
CSLMVGSLLARRAGAAG

SEQ ID NO: 57112 - protein, 17 aa, Artificial Sequence
  Description of Artificial Sequence: Synthetic peptide
  Seed: CSLMQGSTLPRRSGAAG
CSLMVGSLLARRIGAAG

SEQ ID NO: 57113 - protein, 17 aa, Artificial Sequence
  Description of Artificial Sequence: Synthetic peptide
  Seed: CSLMQGSTLPRRSGAAG
CSLMVGSLLARRLGAAG

SEQ ID NO: 57114 - protein, 17 aa, Artificial Sequence
  Description of Artificial Sequence: Synthetic peptide
  Seed: CSLMQGSTLPRRSGAAG
CSLMVGSLLARRVGAAG

SEQ ID NO: 57115 - protein, 17 aa, Artificial Sequence
  Description of Artificial Sequence: Synthetic peptide
  Seed: CSLMQGSTLPRRSGAAG
CSLMVGSLLGRRIGAAG

SEQ ID NO: 57116 - protein, 17 aa, Artificial Sequence
  Description of Artificial Sequence: Synthetic peptide
  Seed: CSLMQGSTLPRRSGAAG
CSLMVGSLLGRRLGAAG

SEQ ID NO: 57117 - protein, 17 aa, Artificial Sequence
  Description of Artificial Sequence: Synthetic peptide
  Seed: CSLMQGSTLPRRSGAAG
CSLMVGSLLGRRVGAAG

SEQ ID NO: 57118 - protein, 17 aa, Artificial Sequence
  Description of Artificial Sequence: Synthetic peptide
  Seed: CSLMQGSTLPRRSGAAG
CSLMVGSLLSRRIGAAG

SEQ ID NO: 57119 - protein, 17 aa, Artificial Sequence
  Description of Artificial Sequence: Synthetic peptide
  Seed: CSLMQGSTLPRRSGAAG
CSLMVGSLLSRRLGAAG

SEQ ID NO: 57120 - protein, 17 aa, Artificial Sequence
  Description of Artificial Sequence: Synthetic peptide
  Seed: CSLMQGSTLPRRSGAAG
CSLMVGSLLSRRVGAAG

SEQ ID NO: 57121 - protein, 17 aa, Artificial Sequence
  Description of Artificial Sequence: Synthetic peptide
  Seed: CSLMQGSTLPRRSGAAG
CSLMVGSMLARRAGAAG

SEQ ID NO: 57122 - protein, 17 aa, Artificial Sequence
  Description of Artificial Sequence: Synthetic peptide
  Seed: CSLMQGSTLPRRSGAAG
CSLMVGSMLARRIGAAG

SEQ ID NO: 57123 - protein, 17 aa, Artificial Sequence
  Description of Artificial Sequence: Synthetic peptide
  Seed: CSLMQGSTLPRRSGAAG
CSLMVGSMLARRLGAAG

SEQ ID NO: 57124 - protein, 17 aa, Artificial Sequence
  Description of Artificial Sequence: Synthetic peptide
  Seed: CSLMQGSTLPRRSGAAG
CSLMVGSMLARRVGAAG

SEQ ID NO: 57125 - protein, 17 aa, Artificial Sequence
  Description of Artificial Sequence: Synthetic peptide
  Seed: CSLMQGSTLPRRSGAAG
CSLMVGSMLGRRAGAAG

SEQ ID NO: 57126 - protein, 17 aa, Artificial Sequence
  Description of Artificial Sequence: Synthetic peptide
  Seed: CSLMQGSTLPRRSGAAG
CSLMVGSMLGRRIGAAG

SEQ ID NO: 57127 - protein, 17 aa, Artificial Sequence
  Description of Artificial Sequence: Synthetic peptide
  Seed: CSLMQGSTLPRRSGAAG
CSLMVGSMLGRRLGAAG

SEQ ID NO: 57128 - protein, 17 aa, Artificial Sequence
  Description of Artificial Sequence: Synthetic peptide
  Seed: CSLMQGSTLPRRSGAAG
CSLMVGSMLGRRVGAAG

SEQ ID NO: 57129 - protein, 17 aa, Artificial Sequence
  Description of Artificial Sequence: Synthetic peptide
  Seed: CSLMQGSTLPRRSGAAG
CSLMVGSMLSRRAGAAG

SEQ ID NO: 57130 - protein, 17 aa, Artificial Sequence
  Description of Artificial Sequence: Synthetic peptide
  Seed: CSLMQGSTLPRRSGAAG
CSLMVGSMLSRRIGAAG

SEQ ID NO: 57131 - protein, 17 aa, Artificial Sequence
  Description of Artificial Sequence: Synthetic peptide
  Seed: CSLMQGSTLPRRSGAAG
CSLMVGSMLSRRLGAAG

SEQ ID NO: 57132 - protein, 17 aa, Artificial Sequence
  Description of Artificial Sequence: Synthetic peptide
  Seed: CSLMQGSTLPRRSGAAG
CSLMVGSMLSRRVGAAG

SEQ ID NO: 57133 - protein, 17 aa, Artificial Sequence
  Description of Artificial Sequence: Synthetic peptide
  Seed: CSLMQGSTLPRRSGAAG
CSLMWGSALARRAGAAG

SEQ ID NO: 57134 - protein, 17 aa, Artificial Sequence
  Description of Artificial Sequence: Synthetic peptide
  Seed: CSLMQGSTLPRRSGAAG
CSLMWGSALARRIGAAG

SEQ ID NO: 57135 - protein, 17 aa, Artificial Sequence
  Description of Artificial Sequence: Synthetic peptide
  Seed: CSLMQGSTLPRRSGAAG
CSLMWGSALARRLGAAG

SEQ ID NO: 57136 - protein, 17 aa, Artificial Sequence
  Description of Artificial Sequence: Synthetic peptide
  Seed: CSLMQGSTLPRRSGAAG
CSLMWGSALARRVGAAG

SEQ ID NO: 57137 - protein, 17 aa, Artificial Sequence
  Description of Artificial Sequence: Synthetic peptide
  Seed: CSLMQGSTLPRRSGAAG
CSLMWGSALGRRIGAAG

SEQ ID NO: 57138 - protein, 17 aa, Artificial Sequence
  Description of Artificial Sequence: Synthetic peptide
  Seed: CSLMQGSTLPRRSGAAG
CSLMWGSALGRRLGAAG

SEQ ID NO: 57139 - protein, 17 aa, Artificial Sequence
  Description of Artificial Sequence: Synthetic peptide
  Seed: CSLMQGSTLPRRSGAAG
CSLMWGSALGRRVGAAG

SEQ ID NO: 57140 - protein, 17 aa, Artificial Sequence
  Description of Artificial Sequence: Synthetic peptide
  Seed: CSLMQGSTLPRRSGAAG
CSLMWGSALSRRAGAAG

SEQ ID NO: 57141 - protein, 17 aa, Artificial Sequence
  Description of Artificial Sequence: Synthetic peptide
  Seed: CSLMQGSTLPRRSGAAG
CSLMWGSALSRRIGAAG

SEQ ID NO: 57142 - protein, 17 aa, Artificial Sequence
  Description of Artificial Sequence: Synthetic peptide
  Seed: CSLMQGSTLPRRSGAAG
CSLMWGSALSRRLGAAG

SEQ ID NO: 57143 - protein, 17 aa, Artificial Sequence
  Description of Artificial Sequence: Synthetic peptide
  Seed: CSLMQGSTLPRRSGAAG
CSLMWGSALSRRVGAAG

SEQ ID NO: 57144 - protein, 17 aa, Artificial Sequence
  Description of Artificial Sequence: Synthetic peptide
  Seed: CSLMQGSTLPRRSGAAG
CSLMWGSILARRAGAAG

SEQ ID NO: 57145 - protein, 17 aa, Artificial Sequence
  Description of Artificial Sequence: Synthetic peptide
  Seed: CSLMQGSTLPRRSGAAG
CSLMWGSILARRIGAAG

SEQ ID NO: 57146 - protein, 17 aa, Artificial Sequence
  Description of Artificial Sequence: Synthetic peptide
  Seed: CSLMQGSTLPRRSGAAG
CSLMWGSILARRLGAAG

SEQ ID NO: 57147 - protein, 17 aa, Artificial Sequence
  Description of Artificial Sequence: Synthetic peptide
  Seed: CSLMQGSTLPRRSGAAG
CSLMWGSILARRVGAAG

SEQ ID NO: 57148 - protein, 17 aa, Artificial Sequence
  Description of Artificial Sequence: Synthetic peptide
  Seed: CSLMQGSTLPRRSGAAG
CSLMWGSILGRRAGAAG

SEQ ID NO: 57149 - protein, 17 aa, Artificial Sequence
  Description of Artificial Sequence: Synthetic peptide
  Seed: CSLMQGSTLPRRSGAAG
CSLMWGSILGRRIGAAG

SEQ ID NO: 57150 - protein, 17 aa, Artificial Sequence
  Description of Artificial Sequence: Synthetic peptide
  Seed: CSLMQGSTLPRRSGAAG
CSLMWGSILGRRLGAAG

SEQ ID NO: 57151 - protein, 17 aa, Artificial Sequence
  Description of Artificial Sequence: Synthetic peptide
  Seed: CSLMQGSTLPRRSGAAG
CSLMWGSILGRRVGAAG

SEQ ID NO: 57152 - protein, 17 aa, Artificial Sequence
  Description of Artificial Sequence: Synthetic peptide
  Seed: CSLMQGSTLPRRSGAAG
CSLMWGSILPRRVGAAG

SEQ ID NO: 57153 - protein, 17 aa, Artificial Sequence
  Description of Artificial Sequence: Synthetic peptide
  Seed: CSLMQGSTLPRRSGAAG
CSLMWGSILSRRAGAAG

SEQ ID NO: 57154 - protein, 17 aa, Artificial Sequence
  Description of Artificial Sequence: Synthetic peptide
  Seed: CSLMQGSTLPRRSGAAG
CSLMWGSILSRRIGAAG

SEQ ID NO: 57155 - protein, 17 aa, Artificial Sequence
  Description of Artificial Sequence: Synthetic peptide
  Seed: CSLMQGSTLPRRSGAAG
CSLMWGSILSRRLGAAG

SEQ ID NO: 57156 - protein, 17 aa, Artificial Sequence
  Description of Artificial Sequence: Synthetic peptide
  Seed: CSLMQGSTLPRRSGAAG
CSLMWGSILSRRVGAAG

SEQ ID NO: 57157 - protein, 17 aa, Artificial Sequence
  Description of Artificial Sequence: Synthetic peptide
  Seed: CSLMQGSTLPRRSGAAG
CSLMWGSLLARRAGAAG

SEQ ID NO: 57158 - protein, 17 aa, Artificial Sequence
  Description of Artificial Sequence: Synthetic peptide
  Seed: CSLMQGSTLPRRSGAAG
CSLMWGSLLARRIGAAG

SEQ ID NO: 57159 - protein, 17 aa, Artificial Sequence
  Description of Artificial Sequence: Synthetic peptide
  Seed: CSLMQGSTLPRRSGAAG
CSLMWGSLLARRLGAAG

SEQ ID NO: 57160 - protein, 17 aa, Artificial Sequence
  Description of Artificial Sequence: Synthetic peptide
  Seed: CSLMQGSTLPRRSGAAG
CSLMWGSLLARRMGAAG

SEQ ID NO: 57161 - protein, 17 aa, Artificial Sequence
  Description of Artificial Sequence: Synthetic peptide
  Seed: CSLMQGSTLPRRSGAAG
CSLMWGSLLARRSGAAG

SEQ ID NO: 57162 - protein, 17 aa, Artificial Sequence
  Description of Artificial Sequence: Synthetic peptide
  Seed: CSLMQGSTLPRRSGAAG
CSLMWGSLLARRTGAAG

SEQ ID NO: 57163 - protein, 17 aa, Artificial Sequence
  Description of Artificial Sequence: Synthetic peptide
  Seed: CSLMQGSTLPRRSGAAG
CSLMWGSLLARRVGAAG

SEQ ID NO: 57164 - protein, 17 aa, Artificial Sequence
  Description of Artificial Sequence: Synthetic peptide
  Seed: CSLMQGSTLPRRSGAAG
CSLMWGSLLGRRAGAAG

SEQ ID NO: 57165 - protein, 17 aa, Artificial Sequence
  Description of Artificial Sequence: Synthetic peptide
  Seed: CSLMQGSTLPRRSGAAG
CSLMWGSLLGRRIGAAG

SEQ ID NO: 57166 - protein, 17 aa, Artificial Sequence
  Description of Artificial Sequence: Synthetic peptide
  Seed: CSLMQGSTLPRRSGAAG
CSLMWGSLLGRRLGAAG

SEQ ID NO: 57167 - protein, 17 aa, Artificial Sequence
  Description of Artificial Sequence: Synthetic peptide
  Seed: CSLMQGSTLPRRSGAAG
CSLMWGSLLGRRMGAAG

SEQ ID NO: 57168 - protein, 17 aa, Artificial Sequence
  Description of Artificial Sequence: Synthetic peptide
  Seed: CSLMQGSTLPRRSGAAG
CSLMWGSLLGRRTGAAG

SEQ ID NO: 57169 - protein, 17 aa, Artificial Sequence
  Description of Artificial Sequence: Synthetic peptide
  Seed: CSLMQGSTLPRRSGAAG
CSLMWGSLLGRRVGAAG

SEQ ID NO: 57170 - protein, 17 aa, Artificial Sequence
  Description of Artificial Sequence: Synthetic peptide
  Seed: CSLMQGSTLPRRSGAAG
CSLMWGSLLNRRIGAAG

SEQ ID NO: 57171 - protein, 17 aa, Artificial Sequence
  Description of Artificial Sequence: Synthetic peptide
  Seed: CSLMQGSTLPRRSGAAG
CSLMWGSLLNRRLGAAG

SEQ ID NO: 57172 - protein, 17 aa, Artificial Sequence
  Description of Artificial Sequence: Synthetic peptide
  Seed: CSLMQGSTLPRRSGAAG
CSLMWGSLLNRRVGAAG

SEQ ID NO: 57173 - protein, 17 aa, Artificial Sequence
  Description of Artificial Sequence: Synthetic peptide
  Seed: CSLMQGSTLPRRSGAAG
CSLMWGSLLPRRAGAAG

SEQ ID NO: 57174 - protein, 17 aa, Artificial Sequence
  Description of Artificial Sequence: Synthetic peptide
  Seed: CSLMQGSTLPRRSGAAG
CSLMWGSLLPRRIGAAG

SEQ ID NO: 57175 - protein, 17 aa, Artificial Sequence
  Description of Artificial Sequence: Synthetic peptide
  Seed: CSLMQGSTLPRRSGAAG
CSLMWGSLLPRRLGAAG

SEQ ID NO: 57176 - protein, 17 aa, Artificial Sequence
  Description of Artificial Sequence: Synthetic peptide
  Seed: CSLMQGSTLPRRSGAAG
CSLMWGSLLPRRVGAAG

SEQ ID NO: 57177 - protein, 17 aa, Artificial Sequence
  Description of Artificial Sequence: Synthetic peptide
  Seed: CSLMQGSTLPRRSGAAG
CSLMWGSLLSRRAGAAG

SEQ ID NO: 57178 - protein, 17 aa, Artificial Sequence
  Description of Artificial Sequence: Synthetic peptide
  Seed: CSLMQGSTLPRRSGAAG
CSLMWGSLLSRRIGAAG

SEQ ID NO: 57179 - protein, 17 aa, Artificial Sequence
  Description of Artificial Sequence: Synthetic peptide
  Seed: CSLMQGSTLPRRSGAAG
CSLMWGSLLSRRLGAAG

SEQ ID NO: 57180 - protein, 17 aa, Artificial Sequence
  Description of Artificial Sequence: Synthetic peptide
  Seed: CSLMQGSTLPRRSGAAG
CSLMWGSLLSRRMGAAG

SEQ ID NO: 57181 - protein, 17 aa, Artificial Sequence
  Description of Artificial Sequence: Synthetic peptide
  Seed: CSLMQGSTLPRRSGAAG
CSLMWGSLLSRRTGAAG

SEQ ID NO: 57182 - protein, 17 aa, Artificial Sequence
  Description of Artificial Sequence: Synthetic peptide
  Seed: CSLMQGSTLPRRSGAAG
CSLMWGSLLSRRVGAAG

SEQ ID NO: 57183 - protein, 17 aa, Artificial Sequence
  Description of Artificial Sequence: Synthetic peptide
  Seed: CSLMQGSTLPRRSGAAG
CSLMWGSLLTRRIGAAG

SEQ ID NO: 57184 - protein, 17 aa, Artificial Sequence
  Description of Artificial Sequence: Synthetic peptide
  Seed: CSLMQGSTLPRRSGAAG
CSLMWGSLLTRRLGAAG

SEQ ID NO: 57185 - protein, 17 aa, Artificial Sequence
  Description of Artificial Sequence: Synthetic peptide
  Seed: CSLMQGSTLPRRSGAAG
CSLMWGSLLTRRVGAAG

SEQ ID NO: 57186 - protein, 17 aa, Artificial Sequence
  Description of Artificial Sequence: Synthetic peptide
  Seed: CSLMQGSTLPRRSGAAG
CSLMWGSMLARRAGAAG

SEQ ID NO: 57187 - protein, 17 aa, Artificial Sequence
  Description of Artificial Sequence: Synthetic peptide
  Seed: CSLMQGSTLPRRSGAAG
CSLMWGSMLARRIGAAG

SEQ ID NO: 57188 - protein, 17 aa, Artificial Sequence
  Description of Artificial Sequence: Synthetic peptide
  Seed: CSLMQGSTLPRRSGAAG
CSLMWGSMLARRLGAAG

SEQ ID NO: 57189 - protein, 17 aa, Artificial Sequence
  Description of Artificial Sequence: Synthetic peptide
  Seed: CSLMQGSTLPRRSGAAG
CSLMWGSMLARRMGAAG

SEQ ID NO: 57190 - protein, 17 aa, Artificial Sequence
  Description of Artificial Sequence: Synthetic peptide
  Seed: CSLMQGSTLPRRSGAAG
CSLMWGSMLARRSGAAG

SEQ ID NO: 57191 - protein, 17 aa, Artificial Sequence
  Description of Artificial Sequence: Synthetic peptide
  Seed: CSLMQGSTLPRRSGAAG
CSLMWGSMLARRTGAAG

SEQ ID NO: 57192 - protein, 17 aa, Artificial Sequence
  Description of Artificial Sequence: Synthetic peptide
  Seed: CSLMQGSTLPRRSGAAG
CSLMWGSMLARRVGAAG

SEQ ID NO: 57193 - protein, 17 aa, Artificial Sequence
  Description of Artificial Sequence: Synthetic peptide
  Seed: CSLMQGSTLPRRSGAAG
CSLMWGSMLGRRAGAAG

SEQ ID NO: 57194 - protein, 17 aa, Artificial Sequence
  Description of Artificial Sequence: Synthetic peptide
  Seed: CSLMQGSTLPRRSGAAG
CSLMWGSMLGRRIGAAG

SEQ ID NO: 57195 - protein, 17 aa, Artificial Sequence
  Description of Artificial Sequence: Synthetic peptide
  Seed: CSLMQGSTLPRRSGAAG
CSLMWGSMLGRRLGAAG

SEQ ID NO: 57196 - protein, 17 aa, Artificial Sequence
  Description of Artificial Sequence: Synthetic peptide
  Seed: CSLMQGSTLPRRSGAAG
CSLMWGSMLGRRMGAAG

SEQ ID NO: 57197 - protein, 17 aa, Artificial Sequence
  Description of Artificial Sequence: Synthetic peptide
  Seed: CSLMQGSTLPRRSGAAG
CSLMWGSMLGRRTGAAG

SEQ ID NO: 57198 - protein, 17 aa, Artificial Sequence
  Description of Artificial Sequence: Synthetic peptide
  Seed: CSLMQGSTLPRRSGAAG
CSLMWGSMLGRRVGAAG

SEQ ID NO: 57199 - protein, 17 aa, Artificial Sequence
  Description of Artificial Sequence: Synthetic peptide
  Seed: CSLMQGSTLPRRSGAAG
CSLMWGSMLNRRIGAAG

SEQ ID NO: 57200 - protein, 17 aa, Artificial Sequence
  Description of Artificial Sequence: Synthetic peptide
  Seed: CSLMQGSTLPRRSGAAG
CSLMWGSMLNRRLGAAG

SEQ ID NO: 57201 - protein, 17 aa, Artificial Sequence
  Description of Artificial Sequence: Synthetic peptide
  Seed: CSLMQGSTLPRRSGAAG
CSLMWGSMLNRRVGAAG

SEQ ID NO: 57202 - protein, 17 aa, Artificial Sequence
  Description of Artificial Sequence: Synthetic peptide
  Seed: CSLMQGSTLPRRSGAAG
CSLMWGSMLPRRIGAAG

SEQ ID NO: 57203 - protein, 17 aa, Artificial Sequence
  Description of Artificial Sequence: Synthetic peptide
  Seed: CSLMQGSTLPRRSGAAG
CSLMWGSMLPRRLGAAG

SEQ ID NO: 57204 - protein, 17 aa, Artificial Sequence
  Description of Artificial Sequence: Synthetic peptide
  Seed: CSLMQGSTLPRRSGAAG
CSLMWGSMLPRRVGAAG

SEQ ID NO: 57205 - protein, 17 aa, Artificial Sequence
  Description of Artificial Sequence: Synthetic peptide
  Seed: CSLMQGSTLPRRSGAAG
CSLMWGSMLSRRAGAAG

SEQ ID NO: 57206 - protein, 17 aa, Artificial Sequence
  Description of Artificial Sequence: Synthetic peptide
  Seed: CSLMQGSTLPRRSGAAG
CSLMWGSMLSRRIGAAG

SEQ ID NO: 57207 - protein, 17 aa, Artificial Sequence
  Description of Artificial Sequence: Synthetic peptide
  Seed: CSLMQGSTLPRRSGAAG
CSLMWGSMLSRRLGAAG

SEQ ID NO: 57208 - protein, 17 aa, Artificial Sequence
  Description of Artificial Sequence: Synthetic peptide
  Seed: CSLMQGSTLPRRSGAAG
CSLMWGSMLSRRMGAAG

SEQ ID NO: 57209 - protein, 17 aa, Artificial Sequence
  Description of Artificial Sequence: Synthetic peptide
  Seed: CSLMQGSTLPRRSGAAG
CSLMWGSMLSRRTGAAG

SEQ ID NO: 57210 - protein, 17 aa, Artificial Sequence
  Description of Artificial Sequence: Synthetic peptide
  Seed: CSLMQGSTLPRRSGAAG
CSLMWGSMLSRRVGAAG

SEQ ID NO: 57211 - protein, 17 aa, Artificial Sequence
  Description of Artificial Sequence: Synthetic peptide
  Seed: CSLMQGSTLPRRSGAAG
CSLMWGSMLTRRIGAAG

SEQ ID NO: 57212 - protein, 17 aa, Artificial Sequence
  Description of Artificial Sequence: Synthetic peptide
  Seed: CSLMQGSTLPRRSGAAG
CSLMWGSMLTRRLGAAG

SEQ ID NO: 57213 - protein, 17 aa, Artificial Sequence
  Description of Artificial Sequence: Synthetic peptide
  Seed: CSLMQGSTLPRRSGAAG
CSLMWGSMLTRRVGAAG

SEQ ID NO: 57214 - protein, 17 aa, Artificial Sequence
  Description of Artificial Sequence: Synthetic peptide
  Seed: CSLMQGSTLPRRSGAAG
CSLMWGSQLARRIGAAG

SEQ ID NO: 57215 - protein, 17 aa, Artificial Sequence
  Description of Artificial Sequence: Synthetic peptide
  Seed: CSLMQGSTLPRRSGAAG
CSLMWGSQLARRLGAAG

SEQ ID NO: 57216 - protein, 17 aa, Artificial Sequence
  Description of Artificial Sequence: Synthetic peptide
  Seed: CSLMQGSTLPRRSGAAG
CSLMWGSQLARRVGAAG

SEQ ID NO: 57217 - protein, 17 aa, Artificial Sequence
  Description of Artificial Sequence: Synthetic peptide
  Seed: CSLMQGSTLPRRSGAAG
CSLMWGSVLARRIGAAG

SEQ ID NO: 57218 - protein, 17 aa, Artificial Sequence
  Description of Artificial Sequence: Synthetic peptide
  Seed: CSLMQGSTLPRRSGAAG
CSLMWGSVLARRLGAAG

SEQ ID NO: 57219 - protein, 17 aa, Artificial Sequence
  Description of Artificial Sequence: Synthetic peptide
  Seed: CSLMQGSTLPRRSGAAG
CSLMWGSVLARRVGAAG

SEQ ID NO: 57220 - protein, 17 aa, Artificial Sequence
  Description of Artificial Sequence: Synthetic peptide
  Seed: CSLMQGSTLPRRSGAAG
CSLMWGSVLGRRIGAAG

SEQ ID NO: 57221 - protein, 17 aa, Artificial Sequence
  Description of Artificial Sequence: Synthetic peptide
  Seed: CSLMQGSTLPRRSGAAG
CSLMWGSVLGRRLGAAG

SEQ ID NO: 57222 - protein, 17 aa, Artificial Sequence
  Description of Artificial Sequence: Synthetic peptide
  Seed: CSLMQGSTLPRRSGAAG
CSLMWGSVLGRRVGAAG

SEQ ID NO: 57223 - protein, 17 aa, Artificial Sequence
  Description of Artificial Sequence: Synthetic peptide
  Seed: CSLMQGSTLPRRSGAAG
CSLMWGSVLSRRIGAAG

SEQ ID NO: 57224 - protein, 17 aa, Artificial Sequence
  Description of Artificial Sequence: Synthetic peptide
  Seed: CSLMQGSTLPRRSGAAG
CSLMWGSVLSRRVGAAG

SEQ ID NO: 57225 - protein, 17 aa, Artificial Sequence
  Description of Artificial Sequence: Synthetic peptide
  Seed: CSLMQGSTLPRRSGAAG
CSLMYGSALARRAGAAG

SEQ ID NO: 57226 - protein, 17 aa, Artificial Sequence
  Description of Artificial Sequence: Synthetic peptide
  Seed: CSLMQGSTLPRRSGAAG
CSLMYGSALARRFGAAG

SEQ ID NO: 57227 - protein, 17 aa, Artificial Sequence
  Description of Artificial Sequence: Synthetic peptide
  Seed: CSLMQGSTLPRRSGAAG
CSLMYGSALARRIGAAG

SEQ ID NO: 57228 - protein, 17 aa, Artificial Sequence
  Description of Artificial Sequence: Synthetic peptide
  Seed: CSLMQGSTLPRRSGAAG
CSLMYGSALARRLGAAG

SEQ ID NO: 57229 - protein, 17 aa, Artificial Sequence
  Description of Artificial Sequence: Synthetic peptide
  Seed: CSLMQGSTLPRRSGAAG
CSLMYGSALARRMGAAG

SEQ ID NO: 57230 - protein, 17 aa, Artificial Sequence
  Description of Artificial Sequence: Synthetic peptide
  Seed: CSLMQGSTLPRRSGAAG
CSLMYGSALARRSGAAG

SEQ ID NO: 57231 - protein, 17 aa, Artificial Sequence
  Description of Artificial Sequence: Synthetic peptide
  Seed: CSLMQGSTLPRRSGAAG
CSLMYGSALARRTGAAG

SEQ ID NO: 57232 - protein, 17 aa, Artificial Sequence
  Description of Artificial Sequence: Synthetic peptide
  Seed: CSLMQGSTLPRRSGAAG
CSLMYGSALARRVGAAG

SEQ ID NO: 57233 - protein, 17 aa, Artificial Sequence
  Description of Artificial Sequence: Synthetic peptide
  Seed: CSLMQGSTLPRRSGAAG
CSLMYGSALGRRAGAAG

SEQ ID NO: 57234 - protein, 17 aa, Artificial Sequence
  Description of Artificial Sequence: Synthetic peptide
  Seed: CSLMQGSTLPRRSGAAG
CSLMYGSALGRRIGAAG

SEQ ID NO: 57235 - protein, 17 aa, Artificial Sequence
  Description of Artificial Sequence: Synthetic peptide
  Seed: CSLMQGSTLPRRSGAAG
CSLMYGSALGRRLGAAG

SEQ ID NO: 57236 - protein, 17 aa, Artificial Sequence
  Description of Artificial Sequence: Synthetic peptide
  Seed: CSLMQGSTLPRRSGAAG
CSLMYGSALGRRMGAAG

SEQ ID NO: 57237 - protein, 17 aa, Artificial Sequence
  Description of Artificial Sequence: Synthetic peptide
  Seed: CSLMQGSTLPRRSGAAG
CSLMYGSALGRRVGAAG

SEQ ID NO: 57238 - protein, 17 aa, Artificial Sequence
  Description of Artificial Sequence: Synthetic peptide
  Seed: CSLMQGSTLPRRSGAAG
CSLMYGSALNRRIGAAG

SEQ ID NO: 57239 - protein, 17 aa, Artificial Sequence
  Description of Artificial Sequence: Synthetic peptide
  Seed: CSLMQGSTLPRRSGAAG
CSLMYGSALNRRLGAAG

SEQ ID NO: 57240 - protein, 17 aa, Artificial Sequence
  Description of Artificial Sequence: Synthetic peptide
  Seed: CSLMQGSTLPRRSGAAG
CSLMYGSALNRRVGAAG

SEQ ID NO: 57241 - protein, 17 aa, Artificial Sequence
  Description of Artificial Sequence: Synthetic peptide
  Seed: CSLMQGSTLPRRSGAAG
CSLMYGSALPRRAGAAG

SEQ ID NO: 57242 - protein, 17 aa, Artificial Sequence
  Description of Artificial Sequence: Synthetic peptide
  Seed: CSLMQGSTLPRRSGAAG
CSLMYGSALPRRIGAAG

SEQ ID NO: 57243 - protein, 17 aa, Artificial Sequence
  Description of Artificial Sequence: Synthetic peptide
  Seed: CSLMQGSTLPRRSGAAG
CSLMYGSALPRRLGAAG

SEQ ID NO: 57244 - protein, 17 aa, Artificial Sequence
  Description of Artificial Sequence: Synthetic peptide
  Seed: CSLMQGSTLPRRSGAAG
CSLMYGSALPRRVGAAG

SEQ ID NO: 57245 - protein, 17 aa, Artificial Sequence
  Description of Artificial Sequence: Synthetic peptide
  Seed: CSLMQGSTLPRRSGAAG
CSLMYGSALSRRAGAAG

SEQ ID NO: 57246 - protein, 17 aa, Artificial Sequence
  Description of Artificial Sequence: Synthetic peptide
  Seed: CSLMQGSTLPRRSGAAG
CSLMYGSALSRRIGAAG

SEQ ID NO: 57247 - protein, 17 aa, Artificial Sequence
  Description of Artificial Sequence: Synthetic peptide
  Seed: CSLMQGSTLPRRSGAAG
CSLMYGSALSRRLGAAG

SEQ ID NO: 57248 - protein, 17 aa, Artificial Sequence
  Description of Artificial Sequence: Synthetic peptide
  Seed: CSLMQGSTLPRRSGAAG
CSLMYGSALSRRMGAAG

SEQ ID NO: 57249 - protein, 17 aa, Artificial Sequence
  Description of Artificial Sequence: Synthetic peptide
  Seed: CSLMQGSTLPRRSGAAG
CSLMYGSALSRRSGAAG

SEQ ID NO: 57250 - protein, 17 aa, Artificial Sequence
  Description of Artificial Sequence: Synthetic peptide
  Seed: CSLMQGSTLPRRSGAAG
CSLMYGSALSRRTGAAG

SEQ ID NO: 57251 - protein, 17 aa, Artificial Sequence
  Description of Artificial Sequence: Synthetic peptide
  Seed: CSLMQGSTLPRRSGAAG
CSLMYGSALSRRVGAAG

SEQ ID NO: 57252 - protein, 17 aa, Artificial Sequence
  Description of Artificial Sequence: Synthetic peptide
  Seed: CSLMQGSTLPRRSGAAG
CSLMYGSALTRRAGAAG

SEQ ID NO: 57253 - protein, 17 aa, Artificial Sequence
  Description of Artificial Sequence: Synthetic peptide
  Seed: CSLMQGSTLPRRSGAAG
CSLMYGSALTRRIGAAG

SEQ ID NO: 57254 - protein, 17 aa, Artificial Sequence
  Description of Artificial Sequence: Synthetic peptide
  Seed: CSLMQGSTLPRRSGAAG
CSLMYGSALTRRLGAAG

SEQ ID NO: 57255 - protein, 17 aa, Artificial Sequence
  Description of Artificial Sequence: Synthetic peptide
  Seed: CSLMQGSTLPRRSGAAG
CSLMYGSALTRRVGAAG

SEQ ID NO: 57256 - protein, 17 aa, Artificial Sequence
  Description of Artificial Sequence: Synthetic peptide
  Seed: CSLMQGSTLPRRSGAAG
CSLMYGSALVRRIGAAG

SEQ ID NO: 57257 - protein, 17 aa, Artificial Sequence
  Description of Artificial Sequence: Synthetic peptide
  Seed: CSLMQGSTLPRRSGAAG
CSLMYGSALVRRLGAAG

SEQ ID NO: 57258 - protein, 17 aa, Artificial Sequence
  Description of Artificial Sequence: Synthetic peptide
  Seed: CSLMQGSTLPRRSGAAG
CSLMYGSALVRRVGAAG

SEQ ID NO: 57259 - protein, 17 aa, Artificial Sequence
  Description of Artificial Sequence: Synthetic peptide
  Seed: CSLMQGSTLPRRSGAAG
CSLMYGSELARRIGAAG

SEQ ID NO: 57260 - protein, 17 aa, Artificial Sequence
  Description of Artificial Sequence: Synthetic peptide
  Seed: CSLMQGSTLPRRSGAAG
CSLMYGSELARRLGAAG

SEQ ID NO: 57261 - protein, 17 aa, Artificial Sequence
  Description of Artificial Sequence: Synthetic peptide
  Seed: CSLMQGSTLPRRSGAAG
CSLMYGSELARRVGAAG

SEQ ID NO: 57262 - protein, 17 aa, Artificial Sequence
  Description of Artificial Sequence: Synthetic peptide
  Seed: CSLMQGSTLPRRSGAAG
CSLMYGSELSRRLGAAG

SEQ ID NO: 57263 - protein, 17 aa, Artificial Sequence
  Description of Artificial Sequence: Synthetic peptide
  Seed: CSLMQGSTLPRRSGAAG
CSLMYGSELSRRVGAAG

SEQ ID NO: 57264 - protein, 17 aa, Artificial Sequence
  Description of Artificial Sequence: Synthetic peptide
  Seed: CSLMQGSTLPRRSGAAG
CSLMYGSFLARRIGAAG

SEQ ID NO: 57265 - protein, 17 aa, Artificial Sequence
  Description of Artificial Sequence: Synthetic peptide
  Seed: CSLMQGSTLPRRSGAAG
CSLMYGSFLARRLGAAG

SEQ ID NO: 57266 - protein, 17 aa, Artificial Sequence
  Description of Artificial Sequence: Synthetic peptide
  Seed: CSLMQGSTLPRRSGAAG
CSLMYGSFLARRVGAAG

SEQ ID NO: 57267 - protein, 17 aa, Artificial Sequence
  Description of Artificial Sequence: Synthetic peptide
  Seed: CSLMQGSTLPRRSGAAG
CSLMYGSGLARRIGAAG

SEQ ID NO: 57268 - protein, 17 aa, Artificial Sequence
  Description of Artificial Sequence: Synthetic peptide
  Seed: CSLMQGSTLPRRSGAAG
CSLMYGSGLARRLGAAG

SEQ ID NO: 57269 - protein, 17 aa, Artificial Sequence
  Description of Artificial Sequence: Synthetic peptide
  Seed: CSLMQGSTLPRRSGAAG
CSLMYGSGLARRVGAAG

SEQ ID NO: 57270 - protein, 17 aa, Artificial Sequence
  Description of Artificial Sequence: Synthetic peptide
  Seed: CSLMQGSTLPRRSGAAG
CSLMYGSILARRAGAAG

SEQ ID NO: 57271 - protein, 17 aa, Artificial Sequence
  Description of Artificial Sequence: Synthetic peptide
  Seed: CSLMQGSTLPRRSGAAG
CSLMYGSILARRFGAAG

SEQ ID NO: 57272 - protein, 17 aa, Artificial Sequence
  Description of Artificial Sequence: Synthetic peptide
  Seed: CSLMQGSTLPRRSGAAG
CSLMYGSILARRGGAAG

SEQ ID NO: 57273 - protein, 17 aa, Artificial Sequence
  Description of Artificial Sequence: Synthetic peptide
  Seed: CSLMQGSTLPRRSGAAG
CSLMYGSILARRIGAAG

SEQ ID NO: 57274 - protein, 17 aa, Artificial Sequence
  Description of Artificial Sequence: Synthetic peptide
  Seed: CSLMQGSTLPRRSGAAG
CSLMYGSILARRLGAAG

SEQ ID NO: 57275 - protein, 17 aa, Artificial Sequence
  Description of Artificial Sequence: Synthetic peptide
  Seed: CSLMQGSTLPRRSGAAG
CSLMYGSILARRMGAAG

SEQ ID NO: 57276 - protein, 17 aa, Artificial Sequence
  Description of Artificial Sequence: Synthetic peptide
  Seed: CSLMQGSTLPRRSGAAG
CSLMYGSILARRSGAAG

SEQ ID NO: 57277 - protein, 17 aa, Artificial Sequence
  Description of Artificial Sequence: Synthetic peptide
  Seed: CSLMQGSTLPRRSGAAG
CSLMYGSILARRTGAAG

SEQ ID NO: 57278 - protein, 17 aa, Artificial Sequence
  Description of Artificial Sequence: Synthetic peptide
  Seed: CSLMQGSTLPRRSGAAG
CSLMYGSILARRVGAAG

SEQ ID NO: 57279 - protein, 17 aa, Artificial Sequence
  Description of Artificial Sequence: Synthetic peptide
  Seed: CSLMQGSTLPRRSGAAG
CSLMYGSILGRRAGAAG

SEQ ID NO: 57280 - protein, 17 aa, Artificial Sequence
  Description of Artificial Sequence: Synthetic peptide
  Seed: CSLMQGSTLPRRSGAAG
CSLMYGSILGRRIGAAG

SEQ ID NO: 57281 - protein, 17 aa, Artificial Sequence
  Description of Artificial Sequence: Synthetic peptide
  Seed: CSLMQGSTLPRRSGAAG
CSLMYGSILGRRLGAAG

SEQ ID NO: 57282 - protein, 17 aa, Artificial Sequence
  Description of Artificial Sequence: Synthetic peptide
  Seed: CSLMQGSTLPRRSGAAG
CSLMYGSILGRRMGAAG

SEQ ID NO: 57283 - protein, 17 aa, Artificial Sequence
  Description of Artificial Sequence: Synthetic peptide
  Seed: CSLMQGSTLPRRSGAAG
CSLMYGSILGRRSGAAG

SEQ ID NO: 57284 - protein, 17 aa, Artificial Sequence
  Description of Artificial Sequence: Synthetic peptide
  Seed: CSLMQGSTLPRRSGAAG
CSLMYGSILGRRTGAAG

SEQ ID NO: 57285 - protein, 17 aa, Artificial Sequence
  Description of Artificial Sequence: Synthetic peptide
  Seed: CSLMQGSTLPRRSGAAG
CSLMYGSILGRRVGAAG

SEQ ID NO: 57286 - protein, 17 aa, Artificial Sequence
  Description of Artificial Sequence: Synthetic peptide
  Seed: CSLMQGSTLPRRSGAAG
CSLMYGSILNRRIGAAG

SEQ ID NO: 57287 - protein, 17 aa, Artificial Sequence
  Description of Artificial Sequence: Synthetic peptide
  Seed: CSLMQGSTLPRRSGAAG
CSLMYGSILNRRLGAAG

SEQ ID NO: 57288 - protein, 17 aa, Artificial Sequence
  Description of Artificial Sequence: Synthetic peptide
  Seed: CSLMQGSTLPRRSGAAG
CSLMYGSILNRRVGAAG

SEQ ID NO: 57289 - protein, 17 aa, Artificial Sequence
  Description of Artificial Sequence: Synthetic peptide
  Seed: CSLMQGSTLPRRSGAAG
CSLMYGSILPRRAGAAG

SEQ ID NO: 57290 - protein, 17 aa, Artificial Sequence
  Description of Artificial Sequence: Synthetic peptide
  Seed: CSLMQGSTLPRRSGAAG
CSLMYGSILPRRIGAAG

SEQ ID NO: 57291 - protein, 17 aa, Artificial Sequence
  Description of Artificial Sequence: Synthetic peptide
  Seed: CSLMQGSTLPRRSGAAG
CSLMYGSILPRRLGAAG

SEQ ID NO: 57292 - protein, 17 aa, Artificial Sequence
  Description of Artificial Sequence: Synthetic peptide
  Seed: CSLMQGSTLPRRSGAAG
CSLMYGSILPRRVGAAG

SEQ ID NO: 57293 - protein, 17 aa, Artificial Sequence
  Description of Artificial Sequence: Synthetic peptide
  Seed: CSLMQGSTLPRRSGAAG
CSLMYGSILSRRAGAAG

SEQ ID NO: 57294 - protein, 17 aa, Artificial Sequence
  Description of Artificial Sequence: Synthetic peptide
  Seed: CSLMQGSTLPRRSGAAG
CSLMYGSILSRRIGAAG

SEQ ID NO: 57295 - protein, 17 aa, Artificial Sequence
  Description of Artificial Sequence: Synthetic peptide
  Seed: CSLMQGSTLPRRSGAAG
CSLMYGSILSRRLGAAG

SEQ ID NO: 57296 - protein, 17 aa, Artificial Sequence
  Description of Artificial Sequence: Synthetic peptide
  Seed: CSLMQGSTLPRRSGAAG
CSLMYGSILSRRMGAAG

SEQ ID NO: 57297 - protein, 17 aa, Artificial Sequence
  Description of Artificial Sequence: Synthetic peptide
  Seed: CSLMQGSTLPRRSGAAG
CSLMYGSILSRRSGAAG

SEQ ID NO: 57298 - protein, 17 aa, Artificial Sequence
  Description of Artificial Sequence: Synthetic peptide
  Seed: CSLMQGSTLPRRSGAAG
CSLMYGSILSRRTGAAG

SEQ ID NO: 57299 - protein, 17 aa, Artificial Sequence
  Description of Artificial Sequence: Synthetic peptide
  Seed: CSLMQGSTLPRRSGAAG
CSLMYGSILSRRVGAAG

SEQ ID NO: 57300 - protein, 17 aa, Artificial Sequence
  Description of Artificial Sequence: Synthetic peptide
  Seed: CSLMQGSTLPRRSGAAG
CSLMYGSILTRRAGAAG

SEQ ID NO: 57301 - protein, 17 aa, Artificial Sequence
  Description of Artificial Sequence: Synthetic peptide
  Seed: CSLMQGSTLPRRSGAAG
CSLMYGSILTRRIGAAG

SEQ ID NO: 57302 - protein, 17 aa, Artificial Sequence
  Description of Artificial Sequence: Synthetic peptide
  Seed: CSLMQGSTLPRRSGAAG
CSLMYGSILTRRLGAAG

SEQ ID NO: 57303 - protein, 17 aa, Artificial Sequence
  Description of Artificial Sequence: Synthetic peptide
  Seed: CSLMQGSTLPRRSGAAG
CSLMYGSILTRRVGAAG

SEQ ID NO: 57304 - protein, 17 aa, Artificial Sequence
  Description of Artificial Sequence: Synthetic peptide
  Seed: CSLMQGSTLPRRSGAAG
CSLMYGSILVRRIGAAG

SEQ ID NO: 57305 - protein, 17 aa, Artificial Sequence
  Description of Artificial Sequence: Synthetic peptide
  Seed: CSLMQGSTLPRRSGAAG
CSLMYGSILVRRLGAAG

SEQ ID NO: 57306 - protein, 17 aa, Artificial Sequence
  Description of Artificial Sequence: Synthetic peptide
  Seed: CSLMQGSTLPRRSGAAG
CSLMYGSILVRRVGAAG

SEQ ID NO: 57307 - protein, 17 aa, Artificial Sequence
  Description of Artificial Sequence: Synthetic peptide
  Seed: CSLMQGSTLPRRSGAAG
CSLMYGSLLARRAGAAG

SEQ ID NO: 57308 - protein, 17 aa, Artificial Sequence
  Description of Artificial Sequence: Synthetic peptide
  Seed: CSLMQGSTLPRRSGAAG
CSLMYGSLLARRCGAAG

SEQ ID NO: 57309 - protein, 17 aa, Artificial Sequence
  Description of Artificial Sequence: Synthetic peptide
  Seed: CSLMQGSTLPRRSGAAG
CSLMYGSLLARRFGAAG

SEQ ID NO: 57310 - protein, 17 aa, Artificial Sequence
  Description of Artificial Sequence: Synthetic peptide
  Seed: CSLMQGSTLPRRSGAAG
CSLMYGSLLARRGGAAG

SEQ ID NO: 57311 - protein, 17 aa, Artificial Sequence
  Description of Artificial Sequence: Synthetic peptide
  Seed: CSLMQGSTLPRRSGAAG
CSLMYGSLLARRIGAAG

SEQ ID NO: 57312 - protein, 17 aa, Artificial Sequence
  Description of Artificial Sequence: Synthetic peptide
  Seed: CSLMQGSTLPRRSGAAG
CSLMYGSLLARRLGAAG

SEQ ID NO: 57313 - protein, 17 aa, Artificial Sequence
  Description of Artificial Sequence: Synthetic peptide
  Seed: CSLMQGSTLPRRSGAAG
CSLMYGSLLARRMGAAG

SEQ ID NO: 57314 - protein, 17 aa, Artificial Sequence
  Description of Artificial Sequence: Synthetic peptide
  Seed: CSLMQGSTLPRRSGAAG
CSLMYGSLLARRSGAAG

SEQ ID NO: 57315 - protein, 17 aa, Artificial Sequence
  Description of Artificial Sequence: Synthetic peptide
  Seed: CSLMQGSTLPRRSGAAG
CSLMYGSLLARRTGAAG

SEQ ID NO: 57316 - protein, 17 aa, Artificial Sequence
  Description of Artificial Sequence: Synthetic peptide
  Seed: CSLMQGSTLPRRSGAAG
CSLMYGSLLARRVGAAG

SEQ ID NO: 57317 - protein, 17 aa, Artificial Sequence
  Description of Artificial Sequence: Synthetic peptide
  Seed: CSLMQGSTLPRRSGAAG
CSLMYGSLLGRRAGAAG

SEQ ID NO: 57318 - protein, 17 aa, Artificial Sequence
  Description of Artificial Sequence: Synthetic peptide
  Seed: CSLMQGSTLPRRSGAAG
CSLMYGSLLGRRFGAAG

SEQ ID NO: 57319 - protein, 17 aa, Artificial Sequence
  Description of Artificial Sequence: Synthetic peptide
  Seed: CSLMQGSTLPRRSGAAG
CSLMYGSLLGRRGGAAG

SEQ ID NO: 57320 - protein, 17 aa, Artificial Sequence
  Description of Artificial Sequence: Synthetic peptide
  Seed: CSLMQGSTLPRRSGAAG
CSLMYGSLLGRRIGAAG

SEQ ID NO: 57321 - protein, 17 aa, Artificial Sequence
  Description of Artificial Sequence: Synthetic peptide
  Seed: CSLMQGSTLPRRSGAAG
CSLMYGSLLGRRLGAAG

SEQ ID NO: 57322 - protein, 17 aa, Artificial Sequence
  Description of Artificial Sequence: Synthetic peptide
  Seed: CSLMQGSTLPRRSGAAG
CSLMYGSLLGRRMGAAG

SEQ ID NO: 57323 - protein, 17 aa, Artificial Sequence
  Description of Artificial Sequence: Synthetic peptide
  Seed: CSLMQGSTLPRRSGAAG
CSLMYGSLLGRRSGAAG

SEQ ID NO: 57324 - protein, 17 aa, Artificial Sequence
  Description of Artificial Sequence: Synthetic peptide
  Seed: CSLMQGSTLPRRSGAAG
CSLMYGSLLGRRTGAAG

SEQ ID NO: 57325 - protein, 17 aa, Artificial Sequence
  Description of Artificial Sequence: Synthetic peptide
  Seed: CSLMQGSTLPRRSGAAG
CSLMYGSLLGRRVGAAG

SEQ ID NO: 57326 - protein, 17 aa, Artificial Sequence
  Description of Artificial Sequence: Synthetic peptide
  Seed: CSLMQGSTLPRRSGAAG
CSLMYGSLLIRRVGAAG

SEQ ID NO: 57327 - protein, 17 aa, Artificial Sequence
  Description of Artificial Sequence: Synthetic peptide
  Seed: CSLMQGSTLPRRSGAAG
CSLMYGSLLNRRAGAAG

SEQ ID NO: 57328 - protein, 17 aa, Artificial Sequence
  Description of Artificial Sequence: Synthetic peptide
  Seed: CSLMQGSTLPRRSGAAG
CSLMYGSLLNRRIGAAG

SEQ ID NO: 57329 - protein, 17 aa, Artificial Sequence
  Description of Artificial Sequence: Synthetic peptide
  Seed: CSLMQGSTLPRRSGAAG
CSLMYGSLLNRRLGAAG

SEQ ID NO: 57330 - protein, 17 aa, Artificial Sequence
  Description of Artificial Sequence: Synthetic peptide
  Seed: CSLMQGSTLPRRSGAAG
CSLMYGSLLNRRVGAAG

SEQ ID NO: 57331 - protein, 17 aa, Artificial Sequence
  Description of Artificial Sequence: Synthetic peptide
  Seed: CSLMQGSTLPRRSGAAG
CSLMYGSLLPRRAGAAG

SEQ ID NO: 57332 - protein, 17 aa, Artificial Sequence
  Description of Artificial Sequence: Synthetic peptide
  Seed: CSLMQGSTLPRRSGAAG
CSLMYGSLLPRRIGAAG

SEQ ID NO: 57333 - protein, 17 aa, Artificial Sequence
  Description of Artificial Sequence: Synthetic peptide
  Seed: CSLMQGSTLPRRSGAAG
CSLMYGSLLPRRLGAAG

SEQ ID NO: 57334 - protein, 17 aa, Artificial Sequence
  Description of Artificial Sequence: Synthetic peptide
  Seed: CSLMQGSTLPRRSGAAG
CSLMYGSLLPRRMGAAG

SEQ ID NO: 57335 - protein, 17 aa, Artificial Sequence
  Description of Artificial Sequence: Synthetic peptide
  Seed: CSLMQGSTLPRRSGAAG
CSLMYGSLLPRRTGAAG

SEQ ID NO: 57336 - protein, 17 aa, Artificial Sequence
  Description of Artificial Sequence: Synthetic peptide
  Seed: CSLMQGSTLPRRSGAAG
CSLMYGSLLPRRVGAAG

SEQ ID NO: 57337 - protein, 17 aa, Artificial Sequence
  Description of Artificial Sequence: Synthetic peptide
  Seed: CSLMQGSTLPRRSGAAG
CSLMYGSLLSRRAGAAG

SEQ ID NO: 57338 - protein, 17 aa, Artificial Sequence
  Description of Artificial Sequence: Synthetic peptide
  Seed: CSLMQGSTLPRRSGAAG
CSLMYGSLLSRRFGAAG

SEQ ID NO: 57339 - protein, 17 aa, Artificial Sequence
  Description of Artificial Sequence: Synthetic peptide
  Seed: CSLMQGSTLPRRSGAAG
CSLMYGSLLSRRGGAAG

SEQ ID NO: 57340 - protein, 17 aa, Artificial Sequence
  Description of Artificial Sequence: Synthetic peptide
  Seed: CSLMQGSTLPRRSGAAG
CSLMYGSLLSRRIGAAG

SEQ ID NO: 57341 - protein, 17 aa, Artificial Sequence
  Description of Artificial Sequence: Synthetic peptide
  Seed: CSLMQGSTLPRRSGAAG
CSLMYGSLLSRRLGAAG

SEQ ID NO: 57342 - protein, 17 aa, Artificial Sequence
  Description of Artificial Sequence: Synthetic peptide
  Seed: CSLMQGSTLPRRSGAAG
CSLMYGSLLSRRMGAAG

SEQ ID NO: 57343 - protein, 17 aa, Artificial Sequence
  Description of Artificial Sequence: Synthetic peptide
  Seed: CSLMQGSTLPRRSGAAG
CSLMYGSLLSRRSGAAG

SEQ ID NO: 57344 - protein, 17 aa, Artificial Sequence
  Description of Artificial Sequence: Synthetic peptide
  Seed: CSLMQGSTLPRRSGAAG
CSLMYGSLLSRRTGAAG

SEQ ID NO: 57345 - protein, 17 aa, Artificial Sequence
  Description of Artificial Sequence: Synthetic peptide
  Seed: CSLMQGSTLPRRSGAAG
CSLMYGSLLSRRVGAAG

SEQ ID NO: 57346 - protein, 17 aa, Artificial Sequence
  Description of Artificial Sequence: Synthetic peptide
  Seed: CSLMQGSTLPRRSGAAG
CSLMYGSLLTRRAGAAG

SEQ ID NO: 57347 - protein, 17 aa, Artificial Sequence
  Description of Artificial Sequence: Synthetic peptide
  Seed: CSLMQGSTLPRRSGAAG
CSLMYGSLLTRRIGAAG

SEQ ID NO: 57348 - protein, 17 aa, Artificial Sequence
  Description of Artificial Sequence: Synthetic peptide
  Seed: CSLMQGSTLPRRSGAAG
CSLMYGSLLTRRLGAAG

SEQ ID NO: 57349 - protein, 17 aa, Artificial Sequence
  Description of Artificial Sequence: Synthetic peptide
  Seed: CSLMQGSTLPRRSGAAG
CSLMYGSLLTRRMGAAG

SEQ ID NO: 57350 - protein, 17 aa, Artificial Sequence
  Description of Artificial Sequence: Synthetic peptide
  Seed: CSLMQGSTLPRRSGAAG
CSLMYGSLLTRRTGAAG

SEQ ID NO: 57351 - protein, 17 aa, Artificial Sequence
  Description of Artificial Sequence: Synthetic peptide
  Seed: CSLMQGSTLPRRSGAAG
CSLMYGSLLTRRVGAAG

SEQ ID NO: 57352 - protein, 17 aa, Artificial Sequence
  Description of Artificial Sequence: Synthetic peptide
  Seed: CSLMQGSTLPRRSGAAG
CSLMYGSLLVRRAGAAG

SEQ ID NO: 57353 - protein, 17 aa, Artificial Sequence
  Description of Artificial Sequence: Synthetic peptide
  Seed: CSLMQGSTLPRRSGAAG
CSLMYGSLLVRRIGAAG

SEQ ID NO: 57354 - protein, 17 aa, Artificial Sequence
  Description of Artificial Sequence: Synthetic peptide
  Seed: CSLMQGSTLPRRSGAAG
CSLMYGSLLVRRLGAAG

SEQ ID NO: 57355 - protein, 17 aa, Artificial Sequence
  Description of Artificial Sequence: Synthetic peptide
  Seed: CSLMQGSTLPRRSGAAG
CSLMYGSLLVRRVGAAG

SEQ ID NO: 57356 - protein, 17 aa, Artificial Sequence
  Description of Artificial Sequence: Synthetic peptide
  Seed: CSLMQGSTLPRRSGAAG
CSLMYGSMLARRAGAAG

SEQ ID NO: 57357 - protein, 17 aa, Artificial Sequence
  Description of Artificial Sequence: Synthetic peptide
  Seed: CSLMQGSTLPRRSGAAG
CSLMYGSMLARRCGAAG

SEQ ID NO: 57358 - protein, 17 aa, Artificial Sequence
  Description of Artificial Sequence: Synthetic peptide
  Seed: CSLMQGSTLPRRSGAAG
CSLMYGSMLARRFGAAG

SEQ ID NO: 57359 - protein, 17 aa, Artificial Sequence
  Description of Artificial Sequence: Synthetic peptide
  Seed: CSLMQGSTLPRRSGAAG
CSLMYGSMLARRGGAAG

SEQ ID NO: 57360 - protein, 17 aa, Artificial Sequence
  Description of Artificial Sequence: Synthetic peptide
  Seed: CSLMQGSTLPRRSGAAG
CSLMYGSMLARRIGAAG

SEQ ID NO: 57361 - protein, 17 aa, Artificial Sequence
  Description of Artificial Sequence: Synthetic peptide
  Seed: CSLMQGSTLPRRSGAAG
CSLMYGSMLARRLGAAG

SEQ ID NO: 57362 - protein, 17 aa, Artificial Sequence
  Description of Artificial Sequence: Synthetic peptide
  Seed: CSLMQGSTLPRRSGAAG
CSLMYGSMLARRMGAAG

SEQ ID NO: 57363 - protein, 17 aa, Artificial Sequence
  Description of Artificial Sequence: Synthetic peptide
  Seed: CSLMQGSTLPRRSGAAG
CSLMYGSMLARRSGAAG

SEQ ID NO: 57364 - protein, 17 aa, Artificial Sequence
  Description of Artificial Sequence: Synthetic peptide
  Seed: CSLMQGSTLPRRSGAAG
CSLMYGSMLARRTGAAG

SEQ ID NO: 57365 - protein, 17 aa, Artificial Sequence
  Description of Artificial Sequence: Synthetic peptide
  Seed: CSLMQGSTLPRRSGAAG
CSLMYGSMLARRVGAAG

SEQ ID NO: 57366 - protein, 17 aa, Artificial Sequence
  Description of Artificial Sequence: Synthetic peptide
  Seed: CSLMQGSTLPRRSGAAG
CSLMYGSMLGRRAGAAG

SEQ ID NO: 57367 - protein, 17 aa, Artificial Sequence
  Description of Artificial Sequence: Synthetic peptide
  Seed: CSLMQGSTLPRRSGAAG
CSLMYGSMLGRRFGAAG

SEQ ID NO: 57368 - protein, 17 aa, Artificial Sequence
  Description of Artificial Sequence: Synthetic peptide
  Seed: CSLMQGSTLPRRSGAAG
CSLMYGSMLGRRGGAAG

SEQ ID NO: 57369 - protein, 17 aa, Artificial Sequence
  Description of Artificial Sequence: Synthetic peptide
  Seed: CSLMQGSTLPRRSGAAG
CSLMYGSMLGRRIGAAG

SEQ ID NO: 57370 - protein, 17 aa, Artificial Sequence
  Description of Artificial Sequence: Synthetic peptide
  Seed: CSLMQGSTLPRRSGAAG
CSLMYGSMLGRRLGAAG

SEQ ID NO: 57371 - protein, 17 aa, Artificial Sequence
  Description of Artificial Sequence: Synthetic peptide
  Seed: CSLMQGSTLPRRSGAAG
CSLMYGSMLGRRMGAAG

SEQ ID NO: 57372 - protein, 17 aa, Artificial Sequence
  Description of Artificial Sequence: Synthetic peptide
  Seed: CSLMQGSTLPRRSGAAG
CSLMYGSMLGRRSGAAG

SEQ ID NO: 57373 - protein, 17 aa, Artificial Sequence
  Description of Artificial Sequence: Synthetic peptide
  Seed: CSLMQGSTLPRRSGAAG
CSLMYGSMLGRRTGAAG

SEQ ID NO: 57374 - protein, 17 aa, Artificial Sequence
  Description of Artificial Sequence: Synthetic peptide
  Seed: CSLMQGSTLPRRSGAAG
CSLMYGSMLGRRVGAAG

SEQ ID NO: 57375 - protein, 17 aa, Artificial Sequence
  Description of Artificial Sequence: Synthetic peptide
  Seed: CSLMQGSTLPRRSGAAG
CSLMYGSMLIRRVGAAG

SEQ ID NO: 57376 - protein, 17 aa, Artificial Sequence
  Description of Artificial Sequence: Synthetic peptide
  Seed: CSLMQGSTLPRRSGAAG
CSLMYGSMLNRRAGAAG

SEQ ID NO: 57377 - protein, 17 aa, Artificial Sequence
  Description of Artificial Sequence: Synthetic peptide
  Seed: CSLMQGSTLPRRSGAAG
CSLMYGSMLNRRIGAAG

SEQ ID NO: 57378 - protein, 17 aa, Artificial Sequence
  Description of Artificial Sequence: Synthetic peptide
  Seed: CSLMQGSTLPRRSGAAG
CSLMYGSMLNRRLGAAG

SEQ ID NO: 57379 - protein, 17 aa, Artificial Sequence
  Description of Artificial Sequence: Synthetic peptide
  Seed: CSLMQGSTLPRRSGAAG
CSLMYGSMLNRRMGAAG

SEQ ID NO: 57380 - protein, 17 aa, Artificial Sequence
  Description of Artificial Sequence: Synthetic peptide
  Seed: CSLMQGSTLPRRSGAAG
CSLMYGSMLNRRVGAAG

SEQ ID NO: 57381 - protein, 17 aa, Artificial Sequence
  Description of Artificial Sequence: Synthetic peptide
  Seed: CSLMQGSTLPRRSGAAG
CSLMYGSMLPRRAGAAG

SEQ ID NO: 57382 - protein, 17 aa, Artificial Sequence
  Description of Artificial Sequence: Synthetic peptide
  Seed: CSLMQGSTLPRRSGAAG
CSLMYGSMLPRRIGAAG

SEQ ID NO: 57383 - protein, 17 aa, Artificial Sequence
  Description of Artificial Sequence: Synthetic peptide
  Seed: CSLMQGSTLPRRSGAAG
CSLMYGSMLPRRLGAAG

SEQ ID NO: 57384 - protein, 17 aa, Artificial Sequence
  Description of Artificial Sequence: Synthetic peptide
  Seed: CSLMQGSTLPRRSGAAG
CSLMYGSMLPRRMGAAG

SEQ ID NO: 57385 - protein, 17 aa, Artificial Sequence
  Description of Artificial Sequence: Synthetic peptide
  Seed: CSLMQGSTLPRRSGAAG
CSLMYGSMLPRRTGAAG

SEQ ID NO: 57386 - protein, 17 aa, Artificial Sequence
  Description of Artificial Sequence: Synthetic peptide
  Seed: CSLMQGSTLPRRSGAAG
CSLMYGSMLPRRVGAAG

SEQ ID NO: 57387 - protein, 17 aa, Artificial Sequence
  Description of Artificial Sequence: Synthetic peptide
  Seed: CSLMQGSTLPRRSGAAG
CSLMYGSMLSRRAGAAG

SEQ ID NO: 57388 - protein, 17 aa, Artificial Sequence
  Description of Artificial Sequence: Synthetic peptide
  Seed: CSLMQGSTLPRRSGAAG
CSLMYGSMLSRRFGAAG

SEQ ID NO: 57389 - protein, 17 aa, Artificial Sequence
  Description of Artificial Sequence: Synthetic peptide
  Seed: CSLMQGSTLPRRSGAAG
CSLMYGSMLSRRGGAAG

SEQ ID NO: 57390 - protein, 17 aa, Artificial Sequence
  Description of Artificial Sequence: Synthetic peptide
  Seed: CSLMQGSTLPRRSGAAG
CSLMYGSMLSRRIGAAG

SEQ ID NO: 57391 - protein, 17 aa, Artificial Sequence
  Description of Artificial Sequence: Synthetic peptide
  Seed: CSLMQGSTLPRRSGAAG
CSLMYGSMLSRRLGAAG

SEQ ID NO: 57392 - protein, 17 aa, Artificial Sequence
  Description of Artificial Sequence: Synthetic peptide
  Seed: CSLMQGSTLPRRSGAAG
CSLMYGSMLSRRMGAAG

SEQ ID NO: 57393 - protein, 17 aa, Artificial Sequence
  Description of Artificial Sequence: Synthetic peptide
  Seed: CSLMQGSTLPRRSGAAG
CSLMYGSMLSRRSGAAG

SEQ ID NO: 57394 - protein, 17 aa, Artificial Sequence
  Description of Artificial Sequence: Synthetic peptide
  Seed: CSLMQGSTLPRRSGAAG
CSLMYGSMLSRRTGAAG

SEQ ID NO: 57395 - protein, 17 aa, Artificial Sequence
  Description of Artificial Sequence: Synthetic peptide
  Seed: CSLMQGSTLPRRSGAAG
CSLMYGSMLSRRVGAAG

SEQ ID NO: 57396 - protein, 17 aa, Artificial Sequence
  Description of Artificial Sequence: Synthetic peptide
  Seed: CSLMQGSTLPRRSGAAG
CSLMYGSMLTRRAGAAG

SEQ ID NO: 57397 - protein, 17 aa, Artificial Sequence
  Description of Artificial Sequence: Synthetic peptide
  Seed: CSLMQGSTLPRRSGAAG
CSLMYGSMLTRRIGAAG

SEQ ID NO: 57398 - protein, 17 aa, Artificial Sequence
  Description of Artificial Sequence: Synthetic peptide
  Seed: CSLMQGSTLPRRSGAAG
CSLMYGSMLTRRLGAAG

SEQ ID NO: 57399 - protein, 17 aa, Artificial Sequence
  Description of Artificial Sequence: Synthetic peptide
  Seed: CSLMQGSTLPRRSGAAG
CSLMYGSMLTRRMGAAG

SEQ ID NO: 57400 - protein, 17 aa, Artificial Sequence
  Description of Artificial Sequence: Synthetic peptide
  Seed: CSLMQGSTLPRRSGAAG
CSLMYGSMLTRRTGAAG

SEQ ID NO: 57401 - protein, 17 aa, Artificial Sequence
  Description of Artificial Sequence: Synthetic peptide
  Seed: CSLMQGSTLPRRSGAAG
CSLMYGSMLTRRVGAAG

SEQ ID NO: 57402 - protein, 17 aa, Artificial Sequence
  Description of Artificial Sequence: Synthetic peptide
  Seed: CSLMQGSTLPRRSGAAG
CSLMYGSMLVRRAGAAG

SEQ ID NO: 57403 - protein, 17 aa, Artificial Sequence
  Description of Artificial Sequence: Synthetic peptide
  Seed: CSLMQGSTLPRRSGAAG
CSLMYGSMLVRRIGAAG

SEQ ID NO: 57404 - protein, 17 aa, Artificial Sequence
  Description of Artificial Sequence: Synthetic peptide
  Seed: CSLMQGSTLPRRSGAAG
CSLMYGSMLVRRLGAAG

SEQ ID NO: 57405 - protein, 17 aa, Artificial Sequence
  Description of Artificial Sequence: Synthetic peptide
  Seed: CSLMQGSTLPRRSGAAG
CSLMYGSMLVRRVGAAG

SEQ ID NO: 57406 - protein, 17 aa, Artificial Sequence
  Description of Artificial Sequence: Synthetic peptide
  Seed: CSLMQGSTLPRRSGAAG
CSLMYGSNLARRIGAAG

SEQ ID NO: 57407 - protein, 17 aa, Artificial Sequence
  Description of Artificial Sequence: Synthetic peptide
  Seed: CSLMQGSTLPRRSGAAG
CSLMYGSNLARRLGAAG

SEQ ID NO: 57408 - protein, 17 aa, Artificial Sequence
  Description of Artificial Sequence: Synthetic peptide
  Seed: CSLMQGSTLPRRSGAAG
CSLMYGSNLARRVGAAG

SEQ ID NO: 57409 - protein, 17 aa, Artificial Sequence
  Description of Artificial Sequence: Synthetic peptide
  Seed: CSLMQGSTLPRRSGAAG
CSLMYGSQLARRAGAAG

SEQ ID NO: 57410 - protein, 17 aa, Artificial Sequence
  Description of Artificial Sequence: Synthetic peptide
  Seed: CSLMQGSTLPRRSGAAG
CSLMYGSQLARRIGAAG

SEQ ID NO: 57411 - protein, 17 aa, Artificial Sequence
  Description of Artificial Sequence: Synthetic peptide
  Seed: CSLMQGSTLPRRSGAAG
CSLMYGSQLARRLGAAG

SEQ ID NO: 57412 - protein, 17 aa, Artificial Sequence
  Description of Artificial Sequence: Synthetic peptide
  Seed: CSLMQGSTLPRRSGAAG
CSLMYGSQLARRMGAAG

SEQ ID NO: 57413 - protein, 17 aa, Artificial Sequence
  Description of Artificial Sequence: Synthetic peptide
  Seed: CSLMQGSTLPRRSGAAG
CSLMYGSQLARRVGAAG

SEQ ID NO: 57414 - protein, 17 aa, Artificial Sequence
  Description of Artificial Sequence: Synthetic peptide
  Seed: CSLMQGSTLPRRSGAAG
CSLMYGSQLGRRAGAAG

SEQ ID NO: 57415 - protein, 17 aa, Artificial Sequence
  Description of Artificial Sequence: Synthetic peptide
  Seed: CSLMQGSTLPRRSGAAG
CSLMYGSQLGRRIGAAG

SEQ ID NO: 57416 - protein, 17 aa, Artificial Sequence
  Description of Artificial Sequence: Synthetic peptide
  Seed: CSLMQGSTLPRRSGAAG
CSLMYGSQLGRRLGAAG

SEQ ID NO: 57417 - protein, 17 aa, Artificial Sequence
  Description of Artificial Sequence: Synthetic peptide
  Seed: CSLMQGSTLPRRSGAAG
CSLMYGSQLGRRVGAAG

SEQ ID NO: 57418 - protein, 17 aa, Artificial Sequence
  Description of Artificial Sequence: Synthetic peptide
  Seed: CSLMQGSTLPRRSGAAG
CSLMYGSQLPRRVGAAG

SEQ ID NO: 57419 - protein, 17 aa, Artificial Sequence
  Description of Artificial Sequence: Synthetic peptide
  Seed: CSLMQGSTLPRRSGAAG
CSLMYGSQLSRRAGAAG

SEQ ID NO: 57420 - protein, 17 aa, Artificial Sequence
  Description of Artificial Sequence: Synthetic peptide
  Seed: CSLMQGSTLPRRSGAAG
CSLMYGSQLSRRIGAAG

SEQ ID NO: 57421 - protein, 17 aa, Artificial Sequence
  Description of Artificial Sequence: Synthetic peptide
  Seed: CSLMQGSTLPRRSGAAG
CSLMYGSQLSRRLGAAG

SEQ ID NO: 57422 - protein, 17 aa, Artificial Sequence
  Description of Artificial Sequence: Synthetic peptide
  Seed: CSLMQGSTLPRRSGAAG
CSLMYGSQLSRRVGAAG

SEQ ID NO: 57423 - protein, 17 aa, Artificial Sequence
  Description of Artificial Sequence: Synthetic peptide
  Seed: CSLMQGSTLPRRSGAAG
CSLMYGSSLARRAGAAG

SEQ ID NO: 57424 - protein, 17 aa, Artificial Sequence
  Description of Artificial Sequence: Synthetic peptide
  Seed: CSLMQGSTLPRRSGAAG
CSLMYGSSLARRIGAAG

SEQ ID NO: 57425 - protein, 17 aa, Artificial Sequence
  Description of Artificial Sequence: Synthetic peptide
  Seed: CSLMQGSTLPRRSGAAG
CSLMYGSSLARRLGAAG

SEQ ID NO: 57426 - protein, 17 aa, Artificial Sequence
  Description of Artificial Sequence: Synthetic peptide
  Seed: CSLMQGSTLPRRSGAAG
CSLMYGSSLARRVGAAG

SEQ ID NO: 57427 - protein, 17 aa, Artificial Sequence
  Description of Artificial Sequence: Synthetic peptide
  Seed: CSLMQGSTLPRRSGAAG
CSLMYGSSLGRRIGAAG

SEQ ID NO: 57428 - protein, 17 aa, Artificial Sequence
  Description of Artificial Sequence: Synthetic peptide
  Seed: CSLMQGSTLPRRSGAAG
CSLMYGSSLGRRLGAAG

SEQ ID NO: 57429 - protein, 17 aa, Artificial Sequence
  Description of Artificial Sequence: Synthetic peptide
  Seed: CSLMQGSTLPRRSGAAG
CSLMYGSSLGRRVGAAG

SEQ ID NO: 57430 - protein, 17 aa, Artificial Sequence
  Description of Artificial Sequence: Synthetic peptide
  Seed: CSLMQGSTLPRRSGAAG
CSLMYGSSLSRRIGAAG

SEQ ID NO: 57431 - protein, 17 aa, Artificial Sequence
  Description of Artificial Sequence: Synthetic peptide
  Seed: CSLMQGSTLPRRSGAAG
CSLMYGSSLSRRLGAAG

SEQ ID NO: 57432 - protein, 17 aa, Artificial Sequence
  Description of Artificial Sequence: Synthetic peptide
  Seed: CSLMQGSTLPRRSGAAG
CSLMYGSSLSRRVGAAG

SEQ ID NO: 57433 - protein, 17 aa, Artificial Sequence
  Description of Artificial Sequence: Synthetic peptide
  Seed: CSLMQGSTLPRRSGAAG
CSLMYGSTLARRIGAAG

SEQ ID NO: 57434 - protein, 17 aa, Artificial Sequence
  Description of Artificial Sequence: Synthetic peptide
  Seed: CSLMQGSTLPRRSGAAG
CSLMYGSTLARRLGAAG

SEQ ID NO: 57435 - protein, 17 aa, Artificial Sequence
  Description of Artificial Sequence: Synthetic peptide
  Seed: CSLMQGSTLPRRSGAAG
CSLMYGSTLARRVGAAG

SEQ ID NO: 57436 - protein, 17 aa, Artificial Sequence
  Description of Artificial Sequence: Synthetic peptide
  Seed: CSLMQGSTLPRRSGAAG
CSLMYGSTLSRRVGAAG

SEQ ID NO: 57437 - protein, 17 aa, Artificial Sequence
  Description of Artificial Sequence: Synthetic peptide
  Seed: CSLMQGSTLPRRSGAAG
CSLMYGSVLARRAGAAG

SEQ ID NO: 57438 - protein, 17 aa, Artificial Sequence
  Description of Artificial Sequence: Synthetic peptide
  Seed: CSLMQGSTLPRRSGAAG
CSLMYGSVLARRIGAAG

SEQ ID NO: 57439 - protein, 17 aa, Artificial Sequence
  Description of Artificial Sequence: Synthetic peptide
  Seed: CSLMQGSTLPRRSGAAG
CSLMYGSVLARRLGAAG

SEQ ID NO: 57440 - protein, 17 aa, Artificial Sequence
  Description of Artificial Sequence: Synthetic peptide
  Seed: CSLMQGSTLPRRSGAAG
CSLMYGSVLARRMGAAG

SEQ ID NO: 57441 - protein, 17 aa, Artificial Sequence
  Description of Artificial Sequence: Synthetic peptide
  Seed: CSLMQGSTLPRRSGAAG
CSLMYGSVLARRTGAAG

SEQ ID NO: 57442 - protein, 17 aa, Artificial Sequence
  Description of Artificial Sequence: Synthetic peptide
  Seed: CSLMQGSTLPRRSGAAG
CSLMYGSVLARRVGAAG

SEQ ID NO: 57443 - protein, 17 aa, Artificial Sequence
  Description of Artificial Sequence: Synthetic peptide
  Seed: CSLMQGSTLPRRSGAAG
CSLMYGSVLGRRAGAAG

SEQ ID NO: 57444 - protein, 17 aa, Artificial Sequence
  Description of Artificial Sequence: Synthetic peptide
  Seed: CSLMQGSTLPRRSGAAG
CSLMYGSVLGRRIGAAG

SEQ ID NO: 57445 - protein, 17 aa, Artificial Sequence
  Description of Artificial Sequence: Synthetic peptide
  Seed: CSLMQGSTLPRRSGAAG
CSLMYGSVLGRRLGAAG

SEQ ID NO: 57446 - protein, 17 aa, Artificial Sequence
  Description of Artificial Sequence: Synthetic peptide
  Seed: CSLMQGSTLPRRSGAAG
CSLMYGSVLGRRMGAAG

SEQ ID NO: 57447 - protein, 17 aa, Artificial Sequence
  Description of Artificial Sequence: Synthetic peptide
  Seed: CSLMQGSTLPRRSGAAG
CSLMYGSVLGRRVGAAG

SEQ ID NO: 57448 - protein, 17 aa, Artificial Sequence
  Description of Artificial Sequence: Synthetic peptide
  Seed: CSLMQGSTLPRRSGAAG
CSLMYGSVLPRRIGAAG

SEQ ID NO: 57449 - protein, 17 aa, Artificial Sequence
  Description of Artificial Sequence: Synthetic peptide
  Seed: CSLMQGSTLPRRSGAAG
CSLMYGSVLPRRLGAAG

SEQ ID NO: 57450 - protein, 17 aa, Artificial Sequence
  Description of Artificial Sequence: Synthetic peptide
  Seed: CSLMQGSTLPRRSGAAG
CSLMYGSVLPRRVGAAG

SEQ ID NO: 57451 - protein, 17 aa, Artificial Sequence
  Description of Artificial Sequence: Synthetic peptide
  Seed: CSLMQGSTLPRRSGAAG
CSLMYGSVLSRRAGAAG

SEQ ID NO: 57452 - protein, 17 aa, Artificial Sequence
  Description of Artificial Sequence: Synthetic peptide
  Seed: CSLMQGSTLPRRSGAAG
CSLMYGSVLSRRIGAAG

SEQ ID NO: 57453 - protein, 17 aa, Artificial Sequence
  Description of Artificial Sequence: Synthetic peptide
  Seed: CSLMQGSTLPRRSGAAG
CSLMYGSVLSRRLGAAG

SEQ ID NO: 57454 - protein, 17 aa, Artificial Sequence
  Description of Artificial Sequence: Synthetic peptide
  Seed: CSLMQGSTLPRRSGAAG
CSLMYGSVLSRRMGAAG

SEQ ID NO: 57455 - protein, 17 aa, Artificial Sequence
  Description of Artificial Sequence: Synthetic peptide
  Seed: CSLMQGSTLPRRSGAAG
CSLMYGSVLSRRTGAAG

SEQ ID NO: 57456 - protein, 17 aa, Artificial Sequence
  Description of Artificial Sequence: Synthetic peptide
  Seed: CSLMQGSTLPRRSGAAG
CSLMYGSVLSRRVGAAG

SEQ ID NO: 57457 - protein, 17 aa, Artificial Sequence
  Description of Artificial Sequence: Synthetic peptide
  Seed: CSLMQGSTLPRRSGAAG
CSLMYGSVLTRRIGAAG

SEQ ID NO: 57458 - protein, 17 aa, Artificial Sequence
  Description of Artificial Sequence: Synthetic peptide
  Seed: CSLMQGSTLPRRSGAAG
CSLMYGSVLTRRLGAAG

SEQ ID NO: 57459 - protein, 17 aa, Artificial Sequence
  Description of Artificial Sequence: Synthetic peptide
  Seed: CSLMQGSTLPRRSGAAG
CSLMYGSVLTRRVGAAG

SEQ ID NO: 57460 - protein, 14 aa, Artificial Sequence
  Description of Artificial Sequence: Synthetic peptide
  Seed: DPRMCSLMQGSTLP
DPRMFSLAQASTAP

SEQ ID NO: 57461 - protein, 14 aa, Artificial Sequence
  Description of Artificial Sequence: Synthetic peptide
  Seed: DPRMCSLMQGSTLP
DPRMFSLAQASTIP

SEQ ID NO: 57462 - protein, 14 aa, Artificial Sequence
  Description of Artificial Sequence: Synthetic peptide
  Seed: DPRMCSLMQGSTLP
DPRMFSLAQASTLP

SEQ ID NO: 57463 - protein, 14 aa, Artificial Sequence
  Description of Artificial Sequence: Synthetic peptide
  Seed: DPRMCSLMQGSTLP
DPRMFSLAQASTMP

SEQ ID NO: 57464 - protein, 14 aa, Artificial Sequence
  Description of Artificial Sequence: Synthetic peptide
  Seed: DPRMCSLMQGSTLP
DPRMFSLAQASTNP

SEQ ID NO: 57465 - protein, 14 aa, Artificial Sequence
  Description of Artificial Sequence: Synthetic peptide
  Seed: DPRMCSLMQGSTLP
DPRMFSLAQASTSP

SEQ ID NO: 57466 - protein, 14 aa, Artificial Sequence
  Description of Artificial Sequence: Synthetic peptide
  Seed: DPRMCSLMQGSTLP
DPRMFSLAQASTVP

SEQ ID NO: 57467 - protein, 14 aa, Artificial Sequence
  Description of Artificial Sequence: Synthetic peptide
  Seed: DPRMCSLMQGSTLP
DPRMFSLAQGSTAP

SEQ ID NO: 57468 - protein, 14 aa, Artificial Sequence
  Description of Artificial Sequence: Synthetic peptide
  Seed: DPRMCSLMQGSTLP
DPRMFSLAQGSTIP

SEQ ID NO: 57469 - protein, 14 aa, Artificial Sequence
  Description of Artificial Sequence: Synthetic peptide
  Seed: DPRMCSLMQGSTLP
DPRMFSLAQGSTLP

SEQ ID NO: 57470 - protein, 14 aa, Artificial Sequence
  Description of Artificial Sequence: Synthetic peptide
  Seed: DPRMCSLMQGSTLP
DPRMFSLAQGSTVP

SEQ ID NO: 57471 - protein, 14 aa, Artificial Sequence
  Description of Artificial Sequence: Synthetic peptide
  Seed: DPRMCSLMQGSTLP
DPRMFSLAQSSTIP

SEQ ID NO: 57472 - protein, 14 aa, Artificial Sequence
  Description of Artificial Sequence: Synthetic peptide
  Seed: DPRMCSLMQGSTLP
DPRMFSLAQSSTLP

SEQ ID NO: 57473 - protein, 14 aa, Artificial Sequence
  Description of Artificial Sequence: Synthetic peptide
  Seed: DPRMCSLMQGSTLP
DPRMFSLAQSSTVP

SEQ ID NO: 57474 - protein, 14 aa, Artificial Sequence
  Description of Artificial Sequence: Synthetic peptide
  Seed: DPRMCSLMQGSTLP
DPRMFSLAQVSTAP

SEQ ID NO: 57475 - protein, 14 aa, Artificial Sequence
  Description of Artificial Sequence: Synthetic peptide
  Seed: DPRMCSLMQGSTLP
DPRMFSLIQASTAP

SEQ ID NO: 57476 - protein, 14 aa, Artificial Sequence
  Description of Artificial Sequence: Synthetic peptide
  Seed: DPRMCSLMQGSTLP
DPRMFSLIQASTGP

SEQ ID NO: 57477 - protein, 14 aa, Artificial Sequence
  Description of Artificial Sequence: Synthetic peptide
  Seed: DPRMCSLMQGSTLP
DPRMFSLIQASTIP

SEQ ID NO: 57478 - protein, 14 aa, Artificial Sequence
  Description of Artificial Sequence: Synthetic peptide
  Seed: DPRMCSLMQGSTLP
DPRMFSLIQASTLP

SEQ ID NO: 57479 - protein, 14 aa, Artificial Sequence
  Description of Artificial Sequence: Synthetic peptide
  Seed: DPRMCSLMQGSTLP
DPRMFSLIQASTMP

SEQ ID NO: 57480 - protein, 14 aa, Artificial Sequence
  Description of Artificial Sequence: Synthetic peptide
  Seed: DPRMCSLMQGSTLP
DPRMFSLIQASTNP

SEQ ID NO: 57481 - protein, 14 aa, Artificial Sequence
  Description of Artificial Sequence: Synthetic peptide
  Seed: DPRMCSLMQGSTLP
DPRMFSLIQASTSP

SEQ ID NO: 57482 - protein, 14 aa, Artificial Sequence
  Description of Artificial Sequence: Synthetic peptide
  Seed: DPRMCSLMQGSTLP
DPRMFSLIQASTTP

SEQ ID NO: 57483 - protein, 14 aa, Artificial Sequence
  Description of Artificial Sequence: Synthetic peptide
  Seed: DPRMCSLMQGSTLP
DPRMFSLIQASTVP

SEQ ID NO: 57484 - protein, 14 aa, Artificial Sequence
  Description of Artificial Sequence: Synthetic peptide
  Seed: DPRMCSLMQGSTLP
DPRMFSLIQGSTAP

SEQ ID NO: 57485 - protein, 14 aa, Artificial Sequence
  Description of Artificial Sequence: Synthetic peptide
  Seed: DPRMCSLMQGSTLP
DPRMFSLIQGSTIP

SEQ ID NO: 57486 - protein, 14 aa, Artificial Sequence
  Description of Artificial Sequence: Synthetic peptide
  Seed: DPRMCSLMQGSTLP
DPRMFSLIQGSTLP

SEQ ID NO: 57487 - protein, 14 aa, Artificial Sequence
  Description of Artificial Sequence: Synthetic peptide
  Seed: DPRMCSLMQGSTLP
DPRMFSLIQGSTMP

SEQ ID NO: 57488 - protein, 14 aa, Artificial Sequence
  Description of Artificial Sequence: Synthetic peptide
  Seed: DPRMCSLMQGSTLP
DPRMFSLIQGSTSP

SEQ ID NO: 57489 - protein, 14 aa, Artificial Sequence
  Description of Artificial Sequence: Synthetic peptide
  Seed: DPRMCSLMQGSTLP
DPRMFSLIQGSTTP

SEQ ID NO: 57490 - protein, 14 aa, Artificial Sequence
  Description of Artificial Sequence: Synthetic peptide
  Seed: DPRMCSLMQGSTLP
DPRMFSLIQGSTVP

SEQ ID NO: 57491 - protein, 14 aa, Artificial Sequence
  Description of Artificial Sequence: Synthetic peptide
  Seed: DPRMCSLMQGSTLP
DPRMFSLIQISTAP

SEQ ID NO: 57492 - protein, 14 aa, Artificial Sequence
  Description of Artificial Sequence: Synthetic peptide
  Seed: DPRMCSLMQGSTLP
DPRMFSLIQISTNP

SEQ ID NO: 57493 - protein, 14 aa, Artificial Sequence
  Description of Artificial Sequence: Synthetic peptide
  Seed: DPRMCSLMQGSTLP
DPRMFSLIQISTSP

SEQ ID NO: 57494 - protein, 14 aa, Artificial Sequence
  Description of Artificial Sequence: Synthetic peptide
  Seed: DPRMCSLMQGSTLP
DPRMFSLIQNSTAP

SEQ ID NO: 57495 - protein, 14 aa, Artificial Sequence
  Description of Artificial Sequence: Synthetic peptide
  Seed: DPRMCSLMQGSTLP
DPRMFSLIQNSTLP

SEQ ID NO: 57496 - protein, 14 aa, Artificial Sequence
  Description of Artificial Sequence: Synthetic peptide
  Seed: DPRMCSLMQGSTLP
DPRMFSLIQNSTVP

SEQ ID NO: 57497 - protein, 14 aa, Artificial Sequence
  Description of Artificial Sequence: Synthetic peptide
  Seed: DPRMCSLMQGSTLP
DPRMFSLIQPSTAP

SEQ ID NO: 57498 - protein, 14 aa, Artificial Sequence
  Description of Artificial Sequence: Synthetic peptide
  Seed: DPRMCSLMQGSTLP
DPRMFSLIQPSTIP

SEQ ID NO: 57499 - protein, 14 aa, Artificial Sequence
  Description of Artificial Sequence: Synthetic peptide
  Seed: DPRMCSLMQGSTLP
DPRMFSLIQPSTLP

SEQ ID NO: 57500 - protein, 14 aa, Artificial Sequence
  Description of Artificial Sequence: Synthetic peptide
  Seed: DPRMCSLMQGSTLP
DPRMFSLIQPSTNP

SEQ ID NO: 57501 - protein, 14 aa, Artificial Sequence
  Description of Artificial Sequence: Synthetic peptide
  Seed: DPRMCSLMQGSTLP
DPRMFSLIQPSTSP

SEQ ID NO: 57502 - protein, 14 aa, Artificial Sequence
  Description of Artificial Sequence: Synthetic peptide
  Seed: DPRMCSLMQGSTLP
DPRMFSLIQPSTTP

SEQ ID NO: 57503 - protein, 14 aa, Artificial Sequence
  Description of Artificial Sequence: Synthetic peptide
  Seed: DPRMCSLMQGSTLP
DPRMFSLIQPSTVP

SEQ ID NO: 57504 - protein, 14 aa, Artificial Sequence
  Description of Artificial Sequence: Synthetic peptide
  Seed: DPRMCSLMQGSTLP
DPRMFSLIQSSTAP

SEQ ID NO: 57505 - protein, 14 aa, Artificial Sequence
  Description of Artificial Sequence: Synthetic peptide
  Seed: DPRMCSLMQGSTLP
DPRMFSLIQSSTIP

SEQ ID NO: 57506 - protein, 14 aa, Artificial Sequence
  Description of Artificial Sequence: Synthetic peptide
  Seed: DPRMCSLMQGSTLP
DPRMFSLIQSSTLP

SEQ ID NO: 57507 - protein, 14 aa, Artificial Sequence
  Description of Artificial Sequence: Synthetic peptide
  Seed: DPRMCSLMQGSTLP
DPRMFSLIQSSTNP

SEQ ID NO: 57508 - protein, 14 aa, Artificial Sequence
  Description of Artificial Sequence: Synthetic peptide
  Seed: DPRMCSLMQGSTLP
DPRMFSLIQSSTSP

SEQ ID NO: 57509 - protein, 14 aa, Artificial Sequence
  Description of Artificial Sequence: Synthetic peptide
  Seed: DPRMCSLMQGSTLP
DPRMFSLIQSSTTP

SEQ ID NO: 57510 - protein, 14 aa, Artificial Sequence
  Description of Artificial Sequence: Synthetic peptide
  Seed: DPRMCSLMQGSTLP
DPRMFSLIQSSTVP

SEQ ID NO: 57511 - protein, 14 aa, Artificial Sequence
  Description of Artificial Sequence: Synthetic peptide
  Seed: DPRMCSLMQGSTLP
DPRMFSLIQTSTAP

SEQ ID NO: 57512 - protein, 14 aa, Artificial Sequence
  Description of Artificial Sequence: Synthetic peptide
  Seed: DPRMCSLMQGSTLP
DPRMFSLIQTSTNP

SEQ ID NO: 57513 - protein, 14 aa, Artificial Sequence
  Description of Artificial Sequence: Synthetic peptide
  Seed: DPRMCSLMQGSTLP
DPRMFSLIQTSTSP

SEQ ID NO: 57514 - protein, 14 aa, Artificial Sequence
  Description of Artificial Sequence: Synthetic peptide
  Seed: DPRMCSLMQGSTLP
DPRMFSLIQTSTTP

SEQ ID NO: 57515 - protein, 14 aa, Artificial Sequence
  Description of Artificial Sequence: Synthetic peptide
  Seed: DPRMCSLMQGSTLP
DPRMFSLIQTSTVP

SEQ ID NO: 57516 - protein, 14 aa, Artificial Sequence
  Description of Artificial Sequence: Synthetic peptide
  Seed: DPRMCSLMQGSTLP
DPRMFSLIQVSTAP

SEQ ID NO: 57517 - protein, 14 aa, Artificial Sequence
  Description of Artificial Sequence: Synthetic peptide
  Seed: DPRMCSLMQGSTLP
DPRMFSLIQVSTNP

SEQ ID NO: 57518 - protein, 14 aa, Artificial Sequence
  Description of Artificial Sequence: Synthetic peptide
  Seed: DPRMCSLMQGSTLP
DPRMFSLIQVSTSP

SEQ ID NO: 57519 - protein, 14 aa, Artificial Sequence
  Description of Artificial Sequence: Synthetic peptide
  Seed: DPRMCSLMQGSTLP
DPRMFSLIQVSTTP

SEQ ID NO: 57520 - protein, 14 aa, Artificial Sequence
  Description of Artificial Sequence: Synthetic peptide
  Seed: DPRMCSLMQGSTLP
DPRMFSLIQVSTVP

SEQ ID NO: 57521 - protein, 14 aa, Artificial Sequence
  Description of Artificial Sequence: Synthetic peptide
  Seed: DPRMCSLMQGSTLP
DPRMFSLLQASTAP

SEQ ID NO: 57522 - protein, 14 aa, Artificial Sequence
  Description of Artificial Sequence: Synthetic peptide
  Seed: DPRMCSLMQGSTLP
DPRMFSLLQASTGP

SEQ ID NO: 57523 - protein, 14 aa, Artificial Sequence
  Description of Artificial Sequence: Synthetic peptide
  Seed: DPRMCSLMQGSTLP
DPRMFSLLQASTHP

SEQ ID NO: 57524 - protein, 14 aa, Artificial Sequence
  Description of Artificial Sequence: Synthetic peptide
  Seed: DPRMCSLMQGSTLP
DPRMFSLLQASTIP

SEQ ID NO: 57525 - protein, 14 aa, Artificial Sequence
  Description of Artificial Sequence: Synthetic peptide
  Seed: DPRMCSLMQGSTLP
DPRMFSLLQASTLP

SEQ ID NO: 57526 - protein, 14 aa, Artificial Sequence
  Description of Artificial Sequence: Synthetic peptide
  Seed: DPRMCSLMQGSTLP
DPRMFSLLQASTMP

SEQ ID NO: 57527 - protein, 14 aa, Artificial Sequence
  Description of Artificial Sequence: Synthetic peptide
  Seed: DPRMCSLMQGSTLP
DPRMFSLLQASTNP

SEQ ID NO: 57528 - protein, 14 aa, Artificial Sequence
  Description of Artificial Sequence: Synthetic peptide
  Seed: DPRMCSLMQGSTLP
DPRMFSLLQASTSP

SEQ ID NO: 57529 - protein, 14 aa, Artificial Sequence
  Description of Artificial Sequence: Synthetic peptide
  Seed: DPRMCSLMQGSTLP
DPRMFSLLQASTTP

SEQ ID NO: 57530 - protein, 14 aa, Artificial Sequence
  Description of Artificial Sequence: Synthetic peptide
  Seed: DPRMCSLMQGSTLP
DPRMFSLLQASTVP

SEQ ID NO: 57531 - protein, 14 aa, Artificial Sequence
  Description of Artificial Sequence: Synthetic peptide
  Seed: DPRMCSLMQGSTLP
DPRMFSLLQGSTAP

SEQ ID NO: 57532 - protein, 14 aa, Artificial Sequence
  Description of Artificial Sequence: Synthetic peptide
  Seed: DPRMCSLMQGSTLP
DPRMFSLLQGSTGP

SEQ ID NO: 57533 - protein, 14 aa, Artificial Sequence
  Description of Artificial Sequence: Synthetic peptide
  Seed: DPRMCSLMQGSTLP
DPRMFSLLQGSTIP

SEQ ID NO: 57534 - protein, 14 aa, Artificial Sequence
  Description of Artificial Sequence: Synthetic peptide
  Seed: DPRMCSLMQGSTLP
DPRMFSLLQGSTLP

SEQ ID NO: 57535 - protein, 14 aa, Artificial Sequence
  Description of Artificial Sequence: Synthetic peptide
  Seed: DPRMCSLMQGSTLP
DPRMFSLLQGSTMP

SEQ ID NO: 57536 - protein, 14 aa, Artificial Sequence
  Description of Artificial Sequence: Synthetic peptide
  Seed: DPRMCSLMQGSTLP
DPRMFSLLQGSTNP

SEQ ID NO: 57537 - protein, 14 aa, Artificial Sequence
  Description of Artificial Sequence: Synthetic peptide
  Seed: DPRMCSLMQGSTLP
DPRMFSLLQGSTSP

SEQ ID NO: 57538 - protein, 14 aa, Artificial Sequence
  Description of Artificial Sequence: Synthetic peptide
  Seed: DPRMCSLMQGSTLP
DPRMFSLLQGSTTP

SEQ ID NO: 57539 - protein, 14 aa, Artificial Sequence
  Description of Artificial Sequence: Synthetic peptide
  Seed: DPRMCSLMQGSTLP
DPRMFSLLQGSTVP

SEQ ID NO: 57540 - protein, 14 aa, Artificial Sequence
  Description of Artificial Sequence: Synthetic peptide
  Seed: DPRMCSLMQGSTLP
DPRMFSLLQISTAP

SEQ ID NO: 57541 - protein, 14 aa, Artificial Sequence
  Description of Artificial Sequence: Synthetic peptide
  Seed: DPRMCSLMQGSTLP
DPRMFSLLQISTNP

SEQ ID NO: 57542 - protein, 14 aa, Artificial Sequence
  Description of Artificial Sequence: Synthetic peptide
  Seed: DPRMCSLMQGSTLP
DPRMFSLLQISTSP

SEQ ID NO: 57543 - protein, 14 aa, Artificial Sequence
  Description of Artificial Sequence: Synthetic peptide
  Seed: DPRMCSLMQGSTLP
DPRMFSLLQISTTP

SEQ ID NO: 57544 - protein, 14 aa, Artificial Sequence
  Description of Artificial Sequence: Synthetic peptide
  Seed: DPRMCSLMQGSTLP
DPRMFSLLQISTVP

SEQ ID NO: 57545 - protein, 14 aa, Artificial Sequence
  Description of Artificial Sequence: Synthetic peptide
  Seed: DPRMCSLMQGSTLP
DPRMFSLLQNSTAP

SEQ ID NO: 57546 - protein, 14 aa, Artificial Sequence
  Description of Artificial Sequence: Synthetic peptide
  Seed: DPRMCSLMQGSTLP
DPRMFSLLQNSTIP

SEQ ID NO: 57547 - protein, 14 aa, Artificial Sequence
  Description of Artificial Sequence: Synthetic peptide
  Seed: DPRMCSLMQGSTLP
DPRMFSLLQNSTLP

SEQ ID NO: 57548 - protein, 14 aa, Artificial Sequence
  Description of Artificial Sequence: Synthetic peptide
  Seed: DPRMCSLMQGSTLP
DPRMFSLLQNSTMP

SEQ ID NO: 57549 - protein, 14 aa, Artificial Sequence
  Description of Artificial Sequence: Synthetic peptide
  Seed: DPRMCSLMQGSTLP
DPRMFSLLQNSTNP

SEQ ID NO: 57550 - protein, 14 aa, Artificial Sequence
  Description of Artificial Sequence: Synthetic peptide
  Seed: DPRMCSLMQGSTLP
DPRMFSLLQNSTSP

SEQ ID NO: 57551 - protein, 14 aa, Artificial Sequence
  Description of Artificial Sequence: Synthetic peptide
  Seed: DPRMCSLMQGSTLP
DPRMFSLLQNSTTP

SEQ ID NO: 57552 - protein, 14 aa, Artificial Sequence
  Description of Artificial Sequence: Synthetic peptide
  Seed: DPRMCSLMQGSTLP
DPRMFSLLQNSTVP

SEQ ID NO: 57553 - protein, 14 aa, Artificial Sequence
  Description of Artificial Sequence: Synthetic peptide
  Seed: DPRMCSLMQGSTLP
DPRMFSLLQPSTAP

SEQ ID NO: 57554 - protein, 14 aa, Artificial Sequence
  Description of Artificial Sequence: Synthetic peptide
  Seed: DPRMCSLMQGSTLP
DPRMFSLLQPSTGP

SEQ ID NO: 57555 - protein, 14 aa, Artificial Sequence
  Description of Artificial Sequence: Synthetic peptide
  Seed: DPRMCSLMQGSTLP
DPRMFSLLQPSTHP

SEQ ID NO: 57556 - protein, 14 aa, Artificial Sequence
  Description of Artificial Sequence: Synthetic peptide
  Seed: DPRMCSLMQGSTLP
DPRMFSLLQPSTIP

SEQ ID NO: 57557 - protein, 14 aa, Artificial Sequence
  Description of Artificial Sequence: Synthetic peptide
  Seed: DPRMCSLMQGSTLP
DPRMFSLLQPSTLP

SEQ ID NO: 57558 - protein, 14 aa, Artificial Sequence
  Description of Artificial Sequence: Synthetic peptide
  Seed: DPRMCSLMQGSTLP
DPRMFSLLQPSTMP

SEQ ID NO: 57559 - protein, 14 aa, Artificial Sequence
  Description of Artificial Sequence: Synthetic peptide
  Seed: DPRMCSLMQGSTLP
DPRMFSLLQPSTNP

SEQ ID NO: 57560 - protein, 14 aa, Artificial Sequence
  Description of Artificial Sequence: Synthetic peptide
  Seed: DPRMCSLMQGSTLP
DPRMFSLLQPSTSP

SEQ ID NO: 57561 - protein, 14 aa, Artificial Sequence
  Description of Artificial Sequence: Synthetic peptide
  Seed: DPRMCSLMQGSTLP
DPRMFSLLQPSTTP

SEQ ID NO: 57562 - protein, 14 aa, Artificial Sequence
  Description of Artificial Sequence: Synthetic peptide
  Seed: DPRMCSLMQGSTLP
DPRMFSLLQPSTVP

SEQ ID NO: 57563 - protein, 14 aa, Artificial Sequence
  Description of Artificial Sequence: Synthetic peptide
  Seed: DPRMCSLMQGSTLP
DPRMFSLLQSSTAP

SEQ ID NO: 57564 - protein, 14 aa, Artificial Sequence
  Description of Artificial Sequence: Synthetic peptide
  Seed: DPRMCSLMQGSTLP
DPRMFSLLQSSTGP

SEQ ID NO: 57565 - protein, 14 aa, Artificial Sequence
  Description of Artificial Sequence: Synthetic peptide
  Seed: DPRMCSLMQGSTLP
DPRMFSLLQSSTIP

SEQ ID NO: 57566 - protein, 14 aa, Artificial Sequence
  Description of Artificial Sequence: Synthetic peptide
  Seed: DPRMCSLMQGSTLP
DPRMFSLLQSSTLP

SEQ ID NO: 57567 - protein, 14 aa, Artificial Sequence
  Description of Artificial Sequence: Synthetic peptide
  Seed: DPRMCSLMQGSTLP
DPRMFSLLQSSTMP

SEQ ID NO: 57568 - protein, 14 aa, Artificial Sequence
  Description of Artificial Sequence: Synthetic peptide
  Seed: DPRMCSLMQGSTLP
DPRMFSLLQSSTNP

SEQ ID NO: 57569 - protein, 14 aa, Artificial Sequence
  Description of Artificial Sequence: Synthetic peptide
  Seed: DPRMCSLMQGSTLP
DPRMFSLLQSSTSP

SEQ ID NO: 57570 - protein, 14 aa, Artificial Sequence
  Description of Artificial Sequence: Synthetic peptide
  Seed: DPRMCSLMQGSTLP
DPRMFSLLQSSTTP

SEQ ID NO: 57571 - protein, 14 aa, Artificial Sequence
  Description of Artificial Sequence: Synthetic peptide
  Seed: DPRMCSLMQGSTLP
DPRMFSLLQSSTVP

SEQ ID NO: 57572 - protein, 14 aa, Artificial Sequence
  Description of Artificial Sequence: Synthetic peptide
  Seed: DPRMCSLMQGSTLP
DPRMFSLLQTSTAP

SEQ ID NO: 57573 - protein, 14 aa, Artificial Sequence
  Description of Artificial Sequence: Synthetic peptide
  Seed: DPRMCSLMQGSTLP
DPRMFSLLQTSTIP

SEQ ID NO: 57574 - protein, 14 aa, Artificial Sequence
  Description of Artificial Sequence: Synthetic peptide
  Seed: DPRMCSLMQGSTLP
DPRMFSLLQTSTLP

SEQ ID NO: 57575 - protein, 14 aa, Artificial Sequence
  Description of Artificial Sequence: Synthetic peptide
  Seed: DPRMCSLMQGSTLP
DPRMFSLLQTSTMP

SEQ ID NO: 57576 - protein, 14 aa, Artificial Sequence
  Description of Artificial Sequence: Synthetic peptide
  Seed: DPRMCSLMQGSTLP
DPRMFSLLQTSTNP

SEQ ID NO: 57577 - protein, 14 aa, Artificial Sequence
  Description of Artificial Sequence: Synthetic peptide
  Seed: DPRMCSLMQGSTLP
DPRMFSLLQTSTSP

SEQ ID NO: 57578 - protein, 14 aa, Artificial Sequence
  Description of Artificial Sequence: Synthetic peptide
  Seed: DPRMCSLMQGSTLP
DPRMFSLLQTSTTP

SEQ ID NO: 57579 - protein, 14 aa, Artificial Sequence
  Description of Artificial Sequence: Synthetic peptide
  Seed: DPRMCSLMQGSTLP
DPRMFSLLQTSTVP

SEQ ID NO: 57580 - protein, 14 aa, Artificial Sequence
  Description of Artificial Sequence: Synthetic peptide
  Seed: DPRMCSLMQGSTLP
DPRMFSLLQVSTAP

SEQ ID NO: 57581 - protein, 14 aa, Artificial Sequence
  Description of Artificial Sequence: Synthetic peptide
  Seed: DPRMCSLMQGSTLP
DPRMFSLLQVSTGP

SEQ ID NO: 57582 - protein, 14 aa, Artificial Sequence
  Description of Artificial Sequence: Synthetic peptide
  Seed: DPRMCSLMQGSTLP
DPRMFSLLQVSTHP

SEQ ID NO: 57583 - protein, 14 aa, Artificial Sequence
  Description of Artificial Sequence: Synthetic peptide
  Seed: DPRMCSLMQGSTLP
DPRMFSLLQVSTIP

SEQ ID NO: 57584 - protein, 14 aa, Artificial Sequence
  Description of Artificial Sequence: Synthetic peptide
  Seed: DPRMCSLMQGSTLP
DPRMFSLLQVSTLP

SEQ ID NO: 57585 - protein, 14 aa, Artificial Sequence
  Description of Artificial Sequence: Synthetic peptide
  Seed: DPRMCSLMQGSTLP
DPRMFSLLQVSTMP

SEQ ID NO: 57586 - protein, 14 aa, Artificial Sequence
  Description of Artificial Sequence: Synthetic peptide
  Seed: DPRMCSLMQGSTLP
DPRMFSLLQVSTNP

SEQ ID NO: 57587 - protein, 14 aa, Artificial Sequence
  Description of Artificial Sequence: Synthetic peptide
  Seed: DPRMCSLMQGSTLP
DPRMFSLLQVSTSP

SEQ ID NO: 57588 - protein, 14 aa, Artificial Sequence
  Description of Artificial Sequence: Synthetic peptide
  Seed: DPRMCSLMQGSTLP
DPRMFSLLQVSTTP

SEQ ID NO: 57589 - protein, 14 aa, Artificial Sequence
  Description of Artificial Sequence: Synthetic peptide
  Seed: DPRMCSLMQGSTLP
DPRMFSLLQVSTVP

SEQ ID NO: 57590 - protein, 14 aa, Artificial Sequence
  Description of Artificial Sequence: Synthetic peptide
  Seed: DPRMCSLMQGSTLP
DPRMFSLMQASTAP

SEQ ID NO: 57591 - protein, 14 aa, Artificial Sequence
  Description of Artificial Sequence: Synthetic peptide
  Seed: DPRMCSLMQGSTLP
DPRMFSLMQASTGP

SEQ ID NO: 57592 - protein, 14 aa, Artificial Sequence
  Description of Artificial Sequence: Synthetic peptide
  Seed: DPRMCSLMQGSTLP
DPRMFSLMQASTHP

SEQ ID NO: 57593 - protein, 14 aa, Artificial Sequence
  Description of Artificial Sequence: Synthetic peptide
  Seed: DPRMCSLMQGSTLP
DPRMFSLMQASTIP

SEQ ID NO: 57594 - protein, 14 aa, Artificial Sequence
  Description of Artificial Sequence: Synthetic peptide
  Seed: DPRMCSLMQGSTLP
DPRMFSLMQASTLP

SEQ ID NO: 57595 - protein, 14 aa, Artificial Sequence
  Description of Artificial Sequence: Synthetic peptide
  Seed: DPRMCSLMQGSTLP
DPRMFSLMQASTMP

SEQ ID NO: 57596 - protein, 14 aa, Artificial Sequence
  Description of Artificial Sequence: Synthetic peptide
  Seed: DPRMCSLMQGSTLP
DPRMFSLMQASTNP

SEQ ID NO: 57597 - protein, 14 aa, Artificial Sequence
  Description of Artificial Sequence: Synthetic peptide
  Seed: DPRMCSLMQGSTLP
DPRMFSLMQASTQP

SEQ ID NO: 57598 - protein, 14 aa, Artificial Sequence
  Description of Artificial Sequence: Synthetic peptide
  Seed: DPRMCSLMQGSTLP
DPRMFSLMQASTSP

SEQ ID NO: 57599 - protein, 14 aa, Artificial Sequence
  Description of Artificial Sequence: Synthetic peptide
  Seed: DPRMCSLMQGSTLP
DPRMFSLMQASTTP

SEQ ID NO: 57600 - protein, 14 aa, Artificial Sequence
  Description of Artificial Sequence: Synthetic peptide
  Seed: DPRMCSLMQGSTLP
DPRMFSLMQASTVP

SEQ ID NO: 57601 - protein, 14 aa, Artificial Sequence
  Description of Artificial Sequence: Synthetic peptide
  Seed: DPRMCSLMQGSTLP
DPRMFSLMQGSTAP

SEQ ID NO: 57602 - protein, 14 aa, Artificial Sequence
  Description of Artificial Sequence: Synthetic peptide
  Seed: DPRMCSLMQGSTLP
DPRMFSLMQGSTGP

SEQ ID NO: 57603 - protein, 14 aa, Artificial Sequence
  Description of Artificial Sequence: Synthetic peptide
  Seed: DPRMCSLMQGSTLP
DPRMFSLMQGSTIP

SEQ ID NO: 57604 - protein, 14 aa, Artificial Sequence
  Description of Artificial Sequence: Synthetic peptide
  Seed: DPRMCSLMQGSTLP
DPRMFSLMQGSTLP

SEQ ID NO: 57605 - protein, 14 aa, Artificial Sequence
  Description of Artificial Sequence: Synthetic peptide
  Seed: DPRMCSLMQGSTLP
DPRMFSLMQGSTMP

SEQ ID NO: 57606 - protein, 14 aa, Artificial Sequence
  Description of Artificial Sequence: Synthetic peptide
  Seed: DPRMCSLMQGSTLP
DPRMFSLMQGSTNP

SEQ ID NO: 57607 - protein, 14 aa, Artificial Sequence
  Description of Artificial Sequence: Synthetic peptide
  Seed: DPRMCSLMQGSTLP
DPRMFSLMQGSTSP

SEQ ID NO: 57608 - protein, 14 aa, Artificial Sequence
  Description of Artificial Sequence: Synthetic peptide
  Seed: DPRMCSLMQGSTLP
DPRMFSLMQGSTTP

SEQ ID NO: 57609 - protein, 14 aa, Artificial Sequence
  Description of Artificial Sequence: Synthetic peptide
  Seed: DPRMCSLMQGSTLP
DPRMFSLMQGSTVP

SEQ ID NO: 57610 - protein, 14 aa, Artificial Sequence
  Description of Artificial Sequence: Synthetic peptide
  Seed: DPRMCSLMQGSTLP
DPRMFSLMQISTAP

SEQ ID NO: 57611 - protein, 14 aa, Artificial Sequence
  Description of Artificial Sequence: Synthetic peptide
  Seed: DPRMCSLMQGSTLP
DPRMFSLMQISTIP

SEQ ID NO: 57612 - protein, 14 aa, Artificial Sequence
  Description of Artificial Sequence: Synthetic peptide
  Seed: DPRMCSLMQGSTLP
DPRMFSLMQISTLP

SEQ ID NO: 57613 - protein, 14 aa, Artificial Sequence
  Description of Artificial Sequence: Synthetic peptide
  Seed: DPRMCSLMQGSTLP
DPRMFSLMQISTNP

SEQ ID NO: 57614 - protein, 14 aa, Artificial Sequence
  Description of Artificial Sequence: Synthetic peptide
  Seed: DPRMCSLMQGSTLP
DPRMFSLMQISTSP

SEQ ID NO: 57615 - protein, 14 aa, Artificial Sequence
  Description of Artificial Sequence: Synthetic peptide
  Seed: DPRMCSLMQGSTLP
DPRMFSLMQISTTP

SEQ ID NO: 57616 - protein, 14 aa, Artificial Sequence
  Description of Artificial Sequence: Synthetic peptide
  Seed: DPRMCSLMQGSTLP
DPRMFSLMQISTVP

SEQ ID NO: 57617 - protein, 14 aa, Artificial Sequence
  Description of Artificial Sequence: Synthetic peptide
  Seed: DPRMCSLMQGSTLP
DPRMFSLMQLSTAP

SEQ ID NO: 57618 - protein, 14 aa, Artificial Sequence
  Description of Artificial Sequence: Synthetic peptide
  Seed: DPRMCSLMQGSTLP
DPRMFSLMQNSTAP

SEQ ID NO: 57619 - protein, 14 aa, Artificial Sequence
  Description of Artificial Sequence: Synthetic peptide
  Seed: DPRMCSLMQGSTLP
DPRMFSLMQNSTIP

SEQ ID NO: 57620 - protein, 14 aa, Artificial Sequence
  Description of Artificial Sequence: Synthetic peptide
  Seed: DPRMCSLMQGSTLP
DPRMFSLMQNSTLP

SEQ ID NO: 57621 - protein, 14 aa, Artificial Sequence
  Description of Artificial Sequence: Synthetic peptide
  Seed: DPRMCSLMQGSTLP
DPRMFSLMQNSTMP

SEQ ID NO: 57622 - protein, 14 aa, Artificial Sequence
  Description of Artificial Sequence: Synthetic peptide
  Seed: DPRMCSLMQGSTLP
DPRMFSLMQNSTNP

SEQ ID NO: 57623 - protein, 14 aa, Artificial Sequence
  Description of Artificial Sequence: Synthetic peptide
  Seed: DPRMCSLMQGSTLP
DPRMFSLMQNSTSP

SEQ ID NO: 57624 - protein, 14 aa, Artificial Sequence
  Description of Artificial Sequence: Synthetic peptide
  Seed: DPRMCSLMQGSTLP
DPRMFSLMQNSTTP

SEQ ID NO: 57625 - protein, 14 aa, Artificial Sequence
  Description of Artificial Sequence: Synthetic peptide
  Seed: DPRMCSLMQGSTLP
DPRMFSLMQNSTVP

SEQ ID NO: 57626 - protein, 14 aa, Artificial Sequence
  Description of Artificial Sequence: Synthetic peptide
  Seed: DPRMCSLMQGSTLP
DPRMFSLMQPSTAP

SEQ ID NO: 57627 - protein, 14 aa, Artificial Sequence
  Description of Artificial Sequence: Synthetic peptide
  Seed: DPRMCSLMQGSTLP
DPRMFSLMQPSTHP

SEQ ID NO: 57628 - protein, 14 aa, Artificial Sequence
  Description of Artificial Sequence: Synthetic peptide
  Seed: DPRMCSLMQGSTLP
DPRMFSLMQPSTIP

SEQ ID NO: 57629 - protein, 14 aa, Artificial Sequence
  Description of Artificial Sequence: Synthetic peptide
  Seed: DPRMCSLMQGSTLP
DPRMFSLMQPSTLP

SEQ ID NO: 57630 - protein, 14 aa, Artificial Sequence
  Description of Artificial Sequence: Synthetic peptide
  Seed: DPRMCSLMQGSTLP
DPRMFSLMQPSTMP

SEQ ID NO: 57631 - protein, 14 aa, Artificial Sequence
  Description of Artificial Sequence: Synthetic peptide
  Seed: DPRMCSLMQGSTLP
DPRMFSLMQPSTNP

SEQ ID NO: 57632 - protein, 14 aa, Artificial Sequence
  Description of Artificial Sequence: Synthetic peptide
  Seed: DPRMCSLMQGSTLP
DPRMFSLMQPSTSP

SEQ ID NO: 57633 - protein, 14 aa, Artificial Sequence
  Description of Artificial Sequence: Synthetic peptide
  Seed: DPRMCSLMQGSTLP
DPRMFSLMQPSTTP

SEQ ID NO: 57634 - protein, 14 aa, Artificial Sequence
  Description of Artificial Sequence: Synthetic peptide
  Seed: DPRMCSLMQGSTLP
DPRMFSLMQPSTVP

SEQ ID NO: 57635 - protein, 14 aa, Artificial Sequence
  Description of Artificial Sequence: Synthetic peptide
  Seed: DPRMCSLMQGSTLP
DPRMFSLMQSSTAP

SEQ ID NO: 57636 - protein, 14 aa, Artificial Sequence
  Description of Artificial Sequence: Synthetic peptide
  Seed: DPRMCSLMQGSTLP
DPRMFSLMQSSTIP

SEQ ID NO: 57637 - protein, 14 aa, Artificial Sequence
  Description of Artificial Sequence: Synthetic peptide
  Seed: DPRMCSLMQGSTLP
DPRMFSLMQSSTLP

SEQ ID NO: 57638 - protein, 14 aa, Artificial Sequence
  Description of Artificial Sequence: Synthetic peptide
  Seed: DPRMCSLMQGSTLP
DPRMFSLMQSSTMP

SEQ ID NO: 57639 - protein, 14 aa, Artificial Sequence
  Description of Artificial Sequence: Synthetic peptide
  Seed: DPRMCSLMQGSTLP
DPRMFSLMQSSTNP

SEQ ID NO: 57640 - protein, 14 aa, Artificial Sequence
  Description of Artificial Sequence: Synthetic peptide
  Seed: DPRMCSLMQGSTLP
DPRMFSLMQSSTSP

SEQ ID NO: 57641 - protein, 14 aa, Artificial Sequence
  Description of Artificial Sequence: Synthetic peptide
  Seed: DPRMCSLMQGSTLP
DPRMFSLMQSSTTP

SEQ ID NO: 57642 - protein, 14 aa, Artificial Sequence
  Description of Artificial Sequence: Synthetic peptide
  Seed: DPRMCSLMQGSTLP
DPRMFSLMQSSTVP

SEQ ID NO: 57643 - protein, 14 aa, Artificial Sequence
  Description of Artificial Sequence: Synthetic peptide
  Seed: DPRMCSLMQGSTLP
DPRMFSLMQTSTAP

SEQ ID NO: 57644 - protein, 14 aa, Artificial Sequence
  Description of Artificial Sequence: Synthetic peptide
  Seed: DPRMCSLMQGSTLP
DPRMFSLMQTSTIP

SEQ ID NO: 57645 - protein, 14 aa, Artificial Sequence
  Description of Artificial Sequence: Synthetic peptide
  Seed: DPRMCSLMQGSTLP
DPRMFSLMQTSTLP

SEQ ID NO: 57646 - protein, 14 aa, Artificial Sequence
  Description of Artificial Sequence: Synthetic peptide
  Seed: DPRMCSLMQGSTLP
DPRMFSLMQTSTMP

SEQ ID NO: 57647 - protein, 14 aa, Artificial Sequence
  Description of Artificial Sequence: Synthetic peptide
  Seed: DPRMCSLMQGSTLP
DPRMFSLMQTSTNP

SEQ ID NO: 57648 - protein, 14 aa, Artificial Sequence
  Description of Artificial Sequence: Synthetic peptide
  Seed: DPRMCSLMQGSTLP
DPRMFSLMQTSTSP

SEQ ID NO: 57649 - protein, 14 aa, Artificial Sequence
  Description of Artificial Sequence: Synthetic peptide
  Seed: DPRMCSLMQGSTLP
DPRMFSLMQTSTTP

SEQ ID NO: 57650 - protein, 14 aa, Artificial Sequence
  Description of Artificial Sequence: Synthetic peptide
  Seed: DPRMCSLMQGSTLP
DPRMFSLMQTSTVP

SEQ ID NO: 57651 - protein, 14 aa, Artificial Sequence
  Description of Artificial Sequence: Synthetic peptide
  Seed: DPRMCSLMQGSTLP
DPRMFSLMQVSTAP

SEQ ID NO: 57652 - protein, 14 aa, Artificial Sequence
  Description of Artificial Sequence: Synthetic peptide
  Seed: DPRMCSLMQGSTLP
DPRMFSLMQVSTGP

SEQ ID NO: 57653 - protein, 14 aa, Artificial Sequence
  Description of Artificial Sequence: Synthetic peptide
  Seed: DPRMCSLMQGSTLP
DPRMFSLMQVSTHP

SEQ ID NO: 57654 - protein, 14 aa, Artificial Sequence
  Description of Artificial Sequence: Synthetic peptide
  Seed: DPRMCSLMQGSTLP
DPRMFSLMQVSTIP

SEQ ID NO: 57655 - protein, 14 aa, Artificial Sequence
  Description of Artificial Sequence: Synthetic peptide
  Seed: DPRMCSLMQGSTLP
DPRMFSLMQVSTLP

SEQ ID NO: 57656 - protein, 14 aa, Artificial Sequence
  Description of Artificial Sequence: Synthetic peptide
  Seed: DPRMCSLMQGSTLP
DPRMFSLMQVSTMP

SEQ ID NO: 57657 - protein, 14 aa, Artificial Sequence
  Description of Artificial Sequence: Synthetic peptide
  Seed: DPRMCSLMQGSTLP
DPRMFSLMQVSTNP

SEQ ID NO: 57658 - protein, 14 aa, Artificial Sequence
  Description of Artificial Sequence: Synthetic peptide
  Seed: DPRMCSLMQGSTLP
DPRMFSLMQVSTSP

SEQ ID NO: 57659 - protein, 14 aa, Artificial Sequence
  Description of Artificial Sequence: Synthetic peptide
  Seed: DPRMCSLMQGSTLP
DPRMFSLMQVSTTP

SEQ ID NO: 57660 - protein, 14 aa, Artificial Sequence
  Description of Artificial Sequence: Synthetic peptide
  Seed: DPRMCSLMQGSTLP
DPRMFSLMQVSTVP

SEQ ID NO: 57661 - protein, 14 aa, Artificial Sequence
  Description of Artificial Sequence: Synthetic peptide
  Seed: DPRMCSLMQGSTLP
DPRMFSLQQASTAP

SEQ ID NO: 57662 - protein, 14 aa, Artificial Sequence
  Description of Artificial Sequence: Synthetic peptide
  Seed: DPRMCSLMQGSTLP
DPRMFSLQQASTIP

SEQ ID NO: 57663 - protein, 14 aa, Artificial Sequence
  Description of Artificial Sequence: Synthetic peptide
  Seed: DPRMCSLMQGSTLP
DPRMFSLQQASTLP

SEQ ID NO: 57664 - protein, 14 aa, Artificial Sequence
  Description of Artificial Sequence: Synthetic peptide
  Seed: DPRMCSLMQGSTLP
DPRMFSLQQASTVP

SEQ ID NO: 57665 - protein, 14 aa, Artificial Sequence
  Description of Artificial Sequence: Synthetic peptide
  Seed: DPRMCSLMQGSTLP
DPRMFSLQQGSTAP

SEQ ID NO: 57666 - protein, 14 aa, Artificial Sequence
  Description of Artificial Sequence: Synthetic peptide
  Seed: DPRMCSLMQGSTLP
DPRMFSLQQGSTIP

SEQ ID NO: 57667 - protein, 14 aa, Artificial Sequence
  Description of Artificial Sequence: Synthetic peptide
  Seed: DPRMCSLMQGSTLP
DPRMFSLQQGSTLP

SEQ ID NO: 57668 - protein, 14 aa, Artificial Sequence
  Description of Artificial Sequence: Synthetic peptide
  Seed: DPRMCSLMQGSTLP
DPRMFSLQQGSTVP

SEQ ID NO: 57669 - protein, 14 aa, Artificial Sequence
  Description of Artificial Sequence: Synthetic peptide
  Seed: DPRMCSLMQGSTLP
DPRMFSLQQSSTIP

SEQ ID NO: 57670 - protein, 14 aa, Artificial Sequence
  Description of Artificial Sequence: Synthetic peptide
  Seed: DPRMCSLMQGSTLP
DPRMFSLQQSSTLP

SEQ ID NO: 57671 - protein, 14 aa, Artificial Sequence
  Description of Artificial Sequence: Synthetic peptide
  Seed: DPRMCSLMQGSTLP
DPRMFSLQQSSTVP

SEQ ID NO: 57672 - protein, 14 aa, Artificial Sequence
  Description of Artificial Sequence: Synthetic peptide
  Seed: DPRMCSLMQGSTLP
DPRMFSLVQASTAP

SEQ ID NO: 57673 - protein, 14 aa, Artificial Sequence
  Description of Artificial Sequence: Synthetic peptide
  Seed: DPRMCSLMQGSTLP
DPRMFSLVQASTIP

SEQ ID NO: 57674 - protein, 14 aa, Artificial Sequence
  Description of Artificial Sequence: Synthetic peptide
  Seed: DPRMCSLMQGSTLP
DPRMFSLVQASTLP

SEQ ID NO: 57675 - protein, 14 aa, Artificial Sequence
  Description of Artificial Sequence: Synthetic peptide
  Seed: DPRMCSLMQGSTLP
DPRMFSLVQASTSP

SEQ ID NO: 57676 - protein, 14 aa, Artificial Sequence
  Description of Artificial Sequence: Synthetic peptide
  Seed: DPRMCSLMQGSTLP
DPRMFSLVQASTVP

SEQ ID NO: 57677 - protein, 14 aa, Artificial Sequence
  Description of Artificial Sequence: Synthetic peptide
  Seed: DPRMCSLMQGSTLP
DPRMFSLVQGSTAP

SEQ ID NO: 57678 - protein, 14 aa, Artificial Sequence
  Description of Artificial Sequence: Synthetic peptide
  Seed: DPRMCSLMQGSTLP
DPRMFSLVQGSTIP

SEQ ID NO: 57679 - protein, 14 aa, Artificial Sequence
  Description of Artificial Sequence: Synthetic peptide
  Seed: DPRMCSLMQGSTLP
DPRMFSLVQGSTLP

SEQ ID NO: 57680 - protein, 14 aa, Artificial Sequence
  Description of Artificial Sequence: Synthetic peptide
  Seed: DPRMCSLMQGSTLP
DPRMFSLVQGSTVP

SEQ ID NO: 57681 - protein, 14 aa, Artificial Sequence
  Description of Artificial Sequence: Synthetic peptide
  Seed: DPRMCSLMQGSTLP
DPRMFSLVQPSTAP

SEQ ID NO: 57682 - protein, 14 aa, Artificial Sequence
  Description of Artificial Sequence: Synthetic peptide
  Seed: DPRMCSLMQGSTLP
DPRMFSLVQSSTAP

SEQ ID NO: 57683 - protein, 14 aa, Artificial Sequence
  Description of Artificial Sequence: Synthetic peptide
  Seed: DPRMCSLMQGSTLP
DPRMFSLVQSSTLP

SEQ ID NO: 57684 - protein, 14 aa, Artificial Sequence
  Description of Artificial Sequence: Synthetic peptide
  Seed: DPRMCSLMQGSTLP
DPRMFSLVQSSTVP

SEQ ID NO: 57685 - protein, 14 aa, Artificial Sequence
  Description of Artificial Sequence: Synthetic peptide
  Seed: DPRMCSLMQGSTLP
DPRMISLLQASTAP

SEQ ID NO: 57686 - protein, 14 aa, Artificial Sequence
  Description of Artificial Sequence: Synthetic peptide
  Seed: DPRMCSLMQGSTLP
DPRMISLLQASTIP

SEQ ID NO: 57687 - protein, 14 aa, Artificial Sequence
  Description of Artificial Sequence: Synthetic peptide
  Seed: DPRMCSLMQGSTLP
DPRMISLLQASTLP

SEQ ID NO: 57688 - protein, 14 aa, Artificial Sequence
  Description of Artificial Sequence: Synthetic peptide
  Seed: DPRMCSLMQGSTLP
DPRMISLLQASTVP

SEQ ID NO: 57689 - protein, 14 aa, Artificial Sequence
  Description of Artificial Sequence: Synthetic peptide
  Seed: DPRMCSLMQGSTLP
DPRMISLLQGSTAP

SEQ ID NO: 57690 - protein, 14 aa, Artificial Sequence
  Description of Artificial Sequence: Synthetic peptide
  Seed: DPRMCSLMQGSTLP
DPRMISLLQGSTIP

SEQ ID NO: 57691 - protein, 14 aa, Artificial Sequence
  Description of Artificial Sequence: Synthetic peptide
  Seed: DPRMCSLMQGSTLP
DPRMISLLQGSTLP

SEQ ID NO: 57692 - protein, 14 aa, Artificial Sequence
  Description of Artificial Sequence: Synthetic peptide
  Seed: DPRMCSLMQGSTLP
DPRMISLLQGSTVP

SEQ ID NO: 57693 - protein, 14 aa, Artificial Sequence
  Description of Artificial Sequence: Synthetic peptide
  Seed: DPRMCSLMQGSTLP
DPRMISLLQSSTIP

SEQ ID NO: 57694 - protein, 14 aa, Artificial Sequence
  Description of Artificial Sequence: Synthetic peptide
  Seed: DPRMCSLMQGSTLP
DPRMISLLQSSTLP

SEQ ID NO: 57695 - protein, 14 aa, Artificial Sequence
  Description of Artificial Sequence: Synthetic peptide
  Seed: DPRMCSLMQGSTLP
DPRMISLLQSSTVP

SEQ ID NO: 57696 - protein, 14 aa, Artificial Sequence
  Description of Artificial Sequence: Synthetic peptide
  Seed: DPRMCSLMQGSTLP
DPRMISLMQASTAP

SEQ ID NO: 57697 - protein, 14 aa, Artificial Sequence
  Description of Artificial Sequence: Synthetic peptide
  Seed: DPRMCSLMQGSTLP
DPRMISLMQASTIP

SEQ ID NO: 57698 - protein, 14 aa, Artificial Sequence
  Description of Artificial Sequence: Synthetic peptide
  Seed: DPRMCSLMQGSTLP
DPRMISLMQASTLP

SEQ ID NO: 57699 - protein, 14 aa, Artificial Sequence
  Description of Artificial Sequence: Synthetic peptide
  Seed: DPRMCSLMQGSTLP
DPRMISLMQASTVP

SEQ ID NO: 57700 - protein, 14 aa, Artificial Sequence
  Description of Artificial Sequence: Synthetic peptide
  Seed: DPRMCSLMQGSTLP
DPRMISLMQGSTAP

SEQ ID NO: 57701 - protein, 14 aa, Artificial Sequence
  Description of Artificial Sequence: Synthetic peptide
  Seed: DPRMCSLMQGSTLP
DPRMISLMQGSTIP

SEQ ID NO: 57702 - protein, 14 aa, Artificial Sequence
  Description of Artificial Sequence: Synthetic peptide
  Seed: DPRMCSLMQGSTLP
DPRMISLMQGSTLP

SEQ ID NO: 57703 - protein, 14 aa, Artificial Sequence
  Description of Artificial Sequence: Synthetic peptide
  Seed: DPRMCSLMQGSTLP
DPRMISLMQGSTVP

SEQ ID NO: 57704 - protein, 14 aa, Artificial Sequence
  Description of Artificial Sequence: Synthetic peptide
  Seed: DPRMCSLMQGSTLP
DPRMISLMQSSTLP

SEQ ID NO: 57705 - protein, 14 aa, Artificial Sequence
  Description of Artificial Sequence: Synthetic peptide
  Seed: DPRMCSLMQGSTLP
DPRMISLMQSSTVP

SEQ ID NO: 57706 - protein, 14 aa, Artificial Sequence
  Description of Artificial Sequence: Synthetic peptide
  Seed: DPRMCSLMQGSTLP
DPRMLSLLQASTAP

SEQ ID NO: 57707 - protein, 14 aa, Artificial Sequence
  Description of Artificial Sequence: Synthetic peptide
  Seed: DPRMCSLMQGSTLP
DPRMLSLLQASTIP

SEQ ID NO: 57708 - protein, 14 aa, Artificial Sequence
  Description of Artificial Sequence: Synthetic peptide
  Seed: DPRMCSLMQGSTLP
DPRMLSLLQASTLP

SEQ ID NO: 57709 - protein, 14 aa, Artificial Sequence
  Description of Artificial Sequence: Synthetic peptide
  Seed: DPRMCSLMQGSTLP
DPRMLSLLQASTVP

SEQ ID NO: 57710 - protein, 14 aa, Artificial Sequence
  Description of Artificial Sequence: Synthetic peptide
  Seed: DPRMCSLMQGSTLP
DPRMLSLLQGSTAP

SEQ ID NO: 57711 - protein, 14 aa, Artificial Sequence
  Description of Artificial Sequence: Synthetic peptide
  Seed: DPRMCSLMQGSTLP
DPRMLSLLQGSTIP

SEQ ID NO: 57712 - protein, 14 aa, Artificial Sequence
  Description of Artificial Sequence: Synthetic peptide
  Seed: DPRMCSLMQGSTLP
DPRMLSLLQGSTLP

SEQ ID NO: 57713 - protein, 14 aa, Artificial Sequence
  Description of Artificial Sequence: Synthetic peptide
  Seed: DPRMCSLMQGSTLP
DPRMLSLLQGSTVP

SEQ ID NO: 57714 - protein, 14 aa, Artificial Sequence
  Description of Artificial Sequence: Synthetic peptide
  Seed: DPRMCSLMQGSTLP
DPRMLSLMQASTAP

SEQ ID NO: 57715 - protein, 14 aa, Artificial Sequence
  Description of Artificial Sequence: Synthetic peptide
  Seed: DPRMCSLMQGSTLP
DPRMLSLMQASTIP

SEQ ID NO: 57716 - protein, 14 aa, Artificial Sequence
  Description of Artificial Sequence: Synthetic peptide
  Seed: DPRMCSLMQGSTLP
DPRMLSLMQASTLP

SEQ ID NO: 57717 - protein, 14 aa, Artificial Sequence
  Description of Artificial Sequence: Synthetic peptide
  Seed: DPRMCSLMQGSTLP
DPRMLSLMQASTVP

SEQ ID NO: 57718 - protein, 14 aa, Artificial Sequence
  Description of Artificial Sequence: Synthetic peptide
  Seed: DPRMCSLMQGSTLP
DPRMLSLMQGSTAP

SEQ ID NO: 57719 - protein, 14 aa, Artificial Sequence
  Description of Artificial Sequence: Synthetic peptide
  Seed: DPRMCSLMQGSTLP
DPRMLSLMQGSTIP

SEQ ID NO: 57720 - protein, 14 aa, Artificial Sequence
  Description of Artificial Sequence: Synthetic peptide
  Seed: DPRMCSLMQGSTLP
DPRMLSLMQGSTLP

SEQ ID NO: 57721 - protein, 14 aa, Artificial Sequence
  Description of Artificial Sequence: Synthetic peptide
  Seed: DPRMCSLMQGSTLP
DPRMLSLMQGSTVP

SEQ ID NO: 57722 - protein, 14 aa, Artificial Sequence
  Description of Artificial Sequence: Synthetic peptide
  Seed: DPRMCSLMQGSTLP
DPRMWSLLQASTAP

SEQ ID NO: 57723 - protein, 14 aa, Artificial Sequence
  Description of Artificial Sequence: Synthetic peptide
  Seed: DPRMCSLMQGSTLP
DPRMWSLLQASTIP

SEQ ID NO: 57724 - protein, 14 aa, Artificial Sequence
  Description of Artificial Sequence: Synthetic peptide
  Seed: DPRMCSLMQGSTLP
DPRMWSLLQASTLP

SEQ ID NO: 57725 - protein, 14 aa, Artificial Sequence
  Description of Artificial Sequence: Synthetic peptide
  Seed: DPRMCSLMQGSTLP
DPRMWSLLQASTTP

SEQ ID NO: 57726 - protein, 14 aa, Artificial Sequence
  Description of Artificial Sequence: Synthetic peptide
  Seed: DPRMCSLMQGSTLP
DPRMWSLLQASTVP

SEQ ID NO: 57727 - protein, 14 aa, Artificial Sequence
  Description of Artificial Sequence: Synthetic peptide
  Seed: DPRMCSLMQGSTLP
DPRMWSLLQGSTAP

SEQ ID NO: 57728 - protein, 14 aa, Artificial Sequence
  Description of Artificial Sequence: Synthetic peptide
  Seed: DPRMCSLMQGSTLP
DPRMWSLLQGSTIP

SEQ ID NO: 57729 - protein, 14 aa, Artificial Sequence
  Description of Artificial Sequence: Synthetic peptide
  Seed: DPRMCSLMQGSTLP
DPRMWSLLQGSTLP

SEQ ID NO: 57730 - protein, 14 aa, Artificial Sequence
  Description of Artificial Sequence: Synthetic peptide
  Seed: DPRMCSLMQGSTLP
DPRMWSLLQGSTTP

SEQ ID NO: 57731 - protein, 14 aa, Artificial Sequence
  Description of Artificial Sequence: Synthetic peptide
  Seed: DPRMCSLMQGSTLP
DPRMWSLLQGSTVP

SEQ ID NO: 57732 - protein, 14 aa, Artificial Sequence
  Description of Artificial Sequence: Synthetic peptide
  Seed: DPRMCSLMQGSTLP
DPRMWSLLQPSTLP

SEQ ID NO: 57733 - protein, 14 aa, Artificial Sequence
  Description of Artificial Sequence: Synthetic peptide
  Seed: DPRMCSLMQGSTLP
DPRMWSLLQPSTVP

SEQ ID NO: 57734 - protein, 14 aa, Artificial Sequence
  Description of Artificial Sequence: Synthetic peptide
  Seed: DPRMCSLMQGSTLP
DPRMWSLLQSSTAP

SEQ ID NO: 57735 - protein, 14 aa, Artificial Sequence
  Description of Artificial Sequence: Synthetic peptide
  Seed: DPRMCSLMQGSTLP
DPRMWSLLQSSTIP

SEQ ID NO: 57736 - protein, 14 aa, Artificial Sequence
  Description of Artificial Sequence: Synthetic peptide
  Seed: DPRMCSLMQGSTLP
DPRMWSLLQSSTLP

SEQ ID NO: 57737 - protein, 14 aa, Artificial Sequence
  Description of Artificial Sequence: Synthetic peptide
  Seed: DPRMCSLMQGSTLP
DPRMWSLLQSSTVP

SEQ ID NO: 57738 - protein, 14 aa, Artificial Sequence
  Description of Artificial Sequence: Synthetic peptide
  Seed: DPRMCSLMQGSTLP
DPRMWSLMQASTAP

SEQ ID NO: 57739 - protein, 14 aa, Artificial Sequence
  Description of Artificial Sequence: Synthetic peptide
  Seed: DPRMCSLMQGSTLP
DPRMWSLMQASTIP

SEQ ID NO: 57740 - protein, 14 aa, Artificial Sequence
  Description of Artificial Sequence: Synthetic peptide
  Seed: DPRMCSLMQGSTLP
DPRMWSLMQASTLP

SEQ ID NO: 57741 - protein, 14 aa, Artificial Sequence
  Description of Artificial Sequence: Synthetic peptide
  Seed: DPRMCSLMQGSTLP
DPRMWSLMQASTVP

SEQ ID NO: 57742 - protein, 14 aa, Artificial Sequence
  Description of Artificial Sequence: Synthetic peptide
  Seed: DPRMCSLMQGSTLP
DPRMWSLMQGSTAP

SEQ ID NO: 57743 - protein, 14 aa, Artificial Sequence
  Description of Artificial Sequence: Synthetic peptide
  Seed: DPRMCSLMQGSTLP
DPRMWSLMQGSTIP

SEQ ID NO: 57744 - protein, 14 aa, Artificial Sequence
  Description of Artificial Sequence: Synthetic peptide
  Seed: DPRMCSLMQGSTLP
DPRMWSLMQGSTLP

SEQ ID NO: 57745 - protein, 14 aa, Artificial Sequence
  Description of Artificial Sequence: Synthetic peptide
  Seed: DPRMCSLMQGSTLP
DPRMWSLMQGSTVP

SEQ ID NO: 57746 - protein, 14 aa, Artificial Sequence
  Description of Artificial Sequence: Synthetic peptide
  Seed: DPRMCSLMQGSTLP
DPRMWSLMQSSTAP

SEQ ID NO: 57747 - protein, 14 aa, Artificial Sequence
  Description of Artificial Sequence: Synthetic peptide
  Seed: DPRMCSLMQGSTLP
DPRMWSLMQSSTIP

SEQ ID NO: 57748 - protein, 14 aa, Artificial Sequence
  Description of Artificial Sequence: Synthetic peptide
  Seed: DPRMCSLMQGSTLP
DPRMWSLMQSSTLP

SEQ ID NO: 57749 - protein, 14 aa, Artificial Sequence
  Description of Artificial Sequence: Synthetic peptide
  Seed: DPRMCSLMQGSTLP
DPRMWSLMQSSTVP

SEQ ID NO: 57750 - protein, 14 aa, Artificial Sequence
  Description of Artificial Sequence: Synthetic peptide
  Seed: DPRMCSLMQGSTLP
DPRMYSLAQASTIP

SEQ ID NO: 57751 - protein, 14 aa, Artificial Sequence
  Description of Artificial Sequence: Synthetic peptide
  Seed: DPRMCSLMQGSTLP
DPRMYSLAQASTLP

SEQ ID NO: 57752 - protein, 14 aa, Artificial Sequence
  Description of Artificial Sequence: Synthetic peptide
  Seed: DPRMCSLMQGSTLP
DPRMYSLAQASTVP

SEQ ID NO: 57753 - protein, 14 aa, Artificial Sequence
  Description of Artificial Sequence: Synthetic peptide
  Seed: DPRMCSLMQGSTLP
DPRMYSLAQGSTLP

SEQ ID NO: 57754 - protein, 14 aa, Artificial Sequence
  Description of Artificial Sequence: Synthetic peptide
  Seed: DPRMCSLMQGSTLP
DPRMYSLAQSSTLP

SEQ ID NO: 57755 - protein, 14 aa, Artificial Sequence
  Description of Artificial Sequence: Synthetic peptide
  Seed: DPRMCSLMQGSTLP
DPRMYSLIQASTAP

SEQ ID NO: 57756 - protein, 14 aa, Artificial Sequence
  Description of Artificial Sequence: Synthetic peptide
  Seed: DPRMCSLMQGSTLP
DPRMYSLIQASTIP

SEQ ID NO: 57757 - protein, 14 aa, Artificial Sequence
  Description of Artificial Sequence: Synthetic peptide
  Seed: DPRMCSLMQGSTLP
DPRMYSLIQASTLP

SEQ ID NO: 57758 - protein, 14 aa, Artificial Sequence
  Description of Artificial Sequence: Synthetic peptide
  Seed: DPRMCSLMQGSTLP
DPRMYSLIQASTSP

SEQ ID NO: 57759 - protein, 14 aa, Artificial Sequence
  Description of Artificial Sequence: Synthetic peptide
  Seed: DPRMCSLMQGSTLP
DPRMYSLIQASTTP

SEQ ID NO: 57760 - protein, 14 aa, Artificial Sequence
  Description of Artificial Sequence: Synthetic peptide
  Seed: DPRMCSLMQGSTLP
DPRMYSLIQASTVP

SEQ ID NO: 57761 - protein, 14 aa, Artificial Sequence
  Description of Artificial Sequence: Synthetic peptide
  Seed: DPRMCSLMQGSTLP
DPRMYSLIQGSTAP

SEQ ID NO: 57762 - protein, 14 aa, Artificial Sequence
  Description of Artificial Sequence: Synthetic peptide
  Seed: DPRMCSLMQGSTLP
DPRMYSLIQGSTIP

SEQ ID NO: 57763 - protein, 14 aa, Artificial Sequence
  Description of Artificial Sequence: Synthetic peptide
  Seed: DPRMCSLMQGSTLP
DPRMYSLIQGSTLP

SEQ ID NO: 57764 - protein, 14 aa, Artificial Sequence
  Description of Artificial Sequence: Synthetic peptide
  Seed: DPRMCSLMQGSTLP
DPRMYSLIQGSTVP

SEQ ID NO: 57765 - protein, 14 aa, Artificial Sequence
  Description of Artificial Sequence: Synthetic peptide
  Seed: DPRMCSLMQGSTLP
DPRMYSLIQISTAP

SEQ ID NO: 57766 - protein, 14 aa, Artificial Sequence
  Description of Artificial Sequence: Synthetic peptide
  Seed: DPRMCSLMQGSTLP
DPRMYSLIQPSTAP

SEQ ID NO: 57767 - protein, 14 aa, Artificial Sequence
  Description of Artificial Sequence: Synthetic peptide
  Seed: DPRMCSLMQGSTLP
DPRMYSLIQPSTIP

SEQ ID NO: 57768 - protein, 14 aa, Artificial Sequence
  Description of Artificial Sequence: Synthetic peptide
  Seed: DPRMCSLMQGSTLP
DPRMYSLIQPSTLP

SEQ ID NO: 57769 - protein, 14 aa, Artificial Sequence
  Description of Artificial Sequence: Synthetic peptide
  Seed: DPRMCSLMQGSTLP
DPRMYSLIQPSTSP

SEQ ID NO: 57770 - protein, 14 aa, Artificial Sequence
  Description of Artificial Sequence: Synthetic peptide
  Seed: DPRMCSLMQGSTLP
DPRMYSLIQPSTVP

SEQ ID NO: 57771 - protein, 14 aa, Artificial Sequence
  Description of Artificial Sequence: Synthetic peptide
  Seed: DPRMCSLMQGSTLP
DPRMYSLIQSSTAP

SEQ ID NO: 57772 - protein, 14 aa, Artificial Sequence
  Description of Artificial Sequence: Synthetic peptide
  Seed: DPRMCSLMQGSTLP
DPRMYSLIQSSTIP

SEQ ID NO: 57773 - protein, 14 aa, Artificial Sequence
  Description of Artificial Sequence: Synthetic peptide
  Seed: DPRMCSLMQGSTLP
DPRMYSLIQSSTLP

SEQ ID NO: 57774 - protein, 14 aa, Artificial Sequence
  Description of Artificial Sequence: Synthetic peptide
  Seed: DPRMCSLMQGSTLP
DPRMYSLIQSSTSP

SEQ ID NO: 57775 - protein, 14 aa, Artificial Sequence
  Description of Artificial Sequence: Synthetic peptide
  Seed: DPRMCSLMQGSTLP
DPRMYSLIQSSTVP

SEQ ID NO: 57776 - protein, 14 aa, Artificial Sequence
  Description of Artificial Sequence: Synthetic peptide
  Seed: DPRMCSLMQGSTLP
DPRMYSLIQTSTAP

SEQ ID NO: 57777 - protein, 14 aa, Artificial Sequence
  Description of Artificial Sequence: Synthetic peptide
  Seed: DPRMCSLMQGSTLP
DPRMYSLIQVSTAP

SEQ ID NO: 57778 - protein, 14 aa, Artificial Sequence
  Description of Artificial Sequence: Synthetic peptide
  Seed: DPRMCSLMQGSTLP
DPRMYSLIQVSTSP

SEQ ID NO: 57779 - protein, 14 aa, Artificial Sequence
  Description of Artificial Sequence: Synthetic peptide
  Seed: DPRMCSLMQGSTLP
DPRMYSLLQASTAP

SEQ ID NO: 57780 - protein, 14 aa, Artificial Sequence
  Description of Artificial Sequence: Synthetic peptide
  Seed: DPRMCSLMQGSTLP
DPRMYSLLQASTIP

SEQ ID NO: 57781 - protein, 14 aa, Artificial Sequence
  Description of Artificial Sequence: Synthetic peptide
  Seed: DPRMCSLMQGSTLP
DPRMYSLLQASTLP

SEQ ID NO: 57782 - protein, 14 aa, Artificial Sequence
  Description of Artificial Sequence: Synthetic peptide
  Seed: DPRMCSLMQGSTLP
DPRMYSLLQASTMP

SEQ ID NO: 57783 - protein, 14 aa, Artificial Sequence
  Description of Artificial Sequence: Synthetic peptide
  Seed: DPRMCSLMQGSTLP
DPRMYSLLQASTNP

SEQ ID NO: 57784 - protein, 14 aa, Artificial Sequence
  Description of Artificial Sequence: Synthetic peptide
  Seed: DPRMCSLMQGSTLP
DPRMYSLLQASTSP

SEQ ID NO: 57785 - protein, 14 aa, Artificial Sequence
  Description of Artificial Sequence: Synthetic peptide
  Seed: DPRMCSLMQGSTLP
DPRMYSLLQASTTP

SEQ ID NO: 57786 - protein, 14 aa, Artificial Sequence
  Description of Artificial Sequence: Synthetic peptide
  Seed: DPRMCSLMQGSTLP
DPRMYSLLQASTVP

SEQ ID NO: 57787 - protein, 14 aa, Artificial Sequence
  Description of Artificial Sequence: Synthetic peptide
  Seed: DPRMCSLMQGSTLP
DPRMYSLLQGSTAP

SEQ ID NO: 57788 - protein, 14 aa, Artificial Sequence
  Description of Artificial Sequence: Synthetic peptide
  Seed: DPRMCSLMQGSTLP
DPRMYSLLQGSTIP

SEQ ID NO: 57789 - protein, 14 aa, Artificial Sequence
  Description of Artificial Sequence: Synthetic peptide
  Seed: DPRMCSLMQGSTLP
DPRMYSLLQGSTLP

SEQ ID NO: 57790 - protein, 14 aa, Artificial Sequence
  Description of Artificial Sequence: Synthetic peptide
  Seed: DPRMCSLMQGSTLP
DPRMYSLLQGSTMP

SEQ ID NO: 57791 - protein, 14 aa, Artificial Sequence
  Description of Artificial Sequence: Synthetic peptide
  Seed: DPRMCSLMQGSTLP
DPRMYSLLQGSTSP

SEQ ID NO: 57792 - protein, 14 aa, Artificial Sequence
  Description of Artificial Sequence: Synthetic peptide
  Seed: DPRMCSLMQGSTLP
DPRMYSLLQGSTTP

SEQ ID NO: 57793 - protein, 14 aa, Artificial Sequence
  Description of Artificial Sequence: Synthetic peptide
  Seed: DPRMCSLMQGSTLP
DPRMYSLLQGSTVP

SEQ ID NO: 57794 - protein, 14 aa, Artificial Sequence
  Description of Artificial Sequence: Synthetic peptide
  Seed: DPRMCSLMQGSTLP
DPRMYSLLQISTAP

SEQ ID NO: 57795 - protein, 14 aa, Artificial Sequence
  Description of Artificial Sequence: Synthetic peptide
  Seed: DPRMCSLMQGSTLP
DPRMYSLLQISTNP

SEQ ID NO: 57796 - protein, 14 aa, Artificial Sequence
  Description of Artificial Sequence: Synthetic peptide
  Seed: DPRMCSLMQGSTLP
DPRMYSLLQISTSP

SEQ ID NO: 57797 - protein, 14 aa, Artificial Sequence
  Description of Artificial Sequence: Synthetic peptide
  Seed: DPRMCSLMQGSTLP
DPRMYSLLQNSTAP

SEQ ID NO: 57798 - protein, 14 aa, Artificial Sequence
  Description of Artificial Sequence: Synthetic peptide
  Seed: DPRMCSLMQGSTLP
DPRMYSLLQNSTIP

SEQ ID NO: 57799 - protein, 14 aa, Artificial Sequence
  Description of Artificial Sequence: Synthetic peptide
  Seed: DPRMCSLMQGSTLP
DPRMYSLLQNSTLP

SEQ ID NO: 57800 - protein, 14 aa, Artificial Sequence
  Description of Artificial Sequence: Synthetic peptide
  Seed: DPRMCSLMQGSTLP
DPRMYSLLQNSTVP

SEQ ID NO: 57801 - protein, 14 aa, Artificial Sequence
  Description of Artificial Sequence: Synthetic peptide
  Seed: DPRMCSLMQGSTLP
DPRMYSLLQPSTAP

SEQ ID NO: 57802 - protein, 14 aa, Artificial Sequence
  Description of Artificial Sequence: Synthetic peptide
  Seed: DPRMCSLMQGSTLP
DPRMYSLLQPSTIP

SEQ ID NO: 57803 - protein, 14 aa, Artificial Sequence
  Description of Artificial Sequence: Synthetic peptide
  Seed: DPRMCSLMQGSTLP
DPRMYSLLQPSTLP

SEQ ID NO: 57804 - protein, 14 aa, Artificial Sequence
  Description of Artificial Sequence: Synthetic peptide
  Seed: DPRMCSLMQGSTLP
DPRMYSLLQPSTMP

SEQ ID NO: 57805 - protein, 14 aa, Artificial Sequence
  Description of Artificial Sequence: Synthetic peptide
  Seed: DPRMCSLMQGSTLP
DPRMYSLLQPSTNP

SEQ ID NO: 57806 - protein, 14 aa, Artificial Sequence
  Description of Artificial Sequence: Synthetic peptide
  Seed: DPRMCSLMQGSTLP
DPRMYSLLQPSTSP

SEQ ID NO: 57807 - protein, 14 aa, Artificial Sequence
  Description of Artificial Sequence: Synthetic peptide
  Seed: DPRMCSLMQGSTLP
DPRMYSLLQPSTTP

SEQ ID NO: 57808 - protein, 14 aa, Artificial Sequence
  Description of Artificial Sequence: Synthetic peptide
  Seed: DPRMCSLMQGSTLP
DPRMYSLLQPSTVP

SEQ ID NO: 57809 - protein, 14 aa, Artificial Sequence
  Description of Artificial Sequence: Synthetic peptide
  Seed: DPRMCSLMQGSTLP
DPRMYSLLQSSTAP

SEQ ID NO: 57810 - protein, 14 aa, Artificial Sequence
  Description of Artificial Sequence: Synthetic peptide
  Seed: DPRMCSLMQGSTLP
DPRMYSLLQSSTIP

SEQ ID NO: 57811 - protein, 14 aa, Artificial Sequence
  Description of Artificial Sequence: Synthetic peptide
  Seed: DPRMCSLMQGSTLP
DPRMYSLLQSSTLP

SEQ ID NO: 57812 - protein, 14 aa, Artificial Sequence
  Description of Artificial Sequence: Synthetic peptide
  Seed: DPRMCSLMQGSTLP
DPRMYSLLQSSTMP

SEQ ID NO: 57813 - protein, 14 aa, Artificial Sequence
  Description of Artificial Sequence: Synthetic peptide
  Seed: DPRMCSLMQGSTLP
DPRMYSLLQSSTNP

SEQ ID NO: 57814 - protein, 14 aa, Artificial Sequence
  Description of Artificial Sequence: Synthetic peptide
  Seed: DPRMCSLMQGSTLP
DPRMYSLLQSSTSP

SEQ ID NO: 57815 - protein, 14 aa, Artificial Sequence
  Description of Artificial Sequence: Synthetic peptide
  Seed: DPRMCSLMQGSTLP
DPRMYSLLQSSTTP

SEQ ID NO: 57816 - protein, 14 aa, Artificial Sequence
  Description of Artificial Sequence: Synthetic peptide
  Seed: DPRMCSLMQGSTLP
DPRMYSLLQSSTVP

SEQ ID NO: 57817 - protein, 14 aa, Artificial Sequence
  Description of Artificial Sequence: Synthetic peptide
  Seed: DPRMCSLMQGSTLP
DPRMYSLLQTSTAP

SEQ ID NO: 57818 - protein, 14 aa, Artificial Sequence
  Description of Artificial Sequence: Synthetic peptide
  Seed: DPRMCSLMQGSTLP
DPRMYSLLQTSTIP

SEQ ID NO: 57819 - protein, 14 aa, Artificial Sequence
  Description of Artificial Sequence: Synthetic peptide
  Seed: DPRMCSLMQGSTLP
DPRMYSLLQTSTLP

SEQ ID NO: 57820 - protein, 14 aa, Artificial Sequence
  Description of Artificial Sequence: Synthetic peptide
  Seed: DPRMCSLMQGSTLP
DPRMYSLLQTSTNP

SEQ ID NO: 57821 - protein, 14 aa, Artificial Sequence
  Description of Artificial Sequence: Synthetic peptide
  Seed: DPRMCSLMQGSTLP
DPRMYSLLQTSTSP

SEQ ID NO: 57822 - protein, 14 aa, Artificial Sequence
  Description of Artificial Sequence: Synthetic peptide
  Seed: DPRMCSLMQGSTLP
DPRMYSLLQTSTTP

SEQ ID NO: 57823 - protein, 14 aa, Artificial Sequence
  Description of Artificial Sequence: Synthetic peptide
  Seed: DPRMCSLMQGSTLP
DPRMYSLLQTSTVP

SEQ ID NO: 57824 - protein, 14 aa, Artificial Sequence
  Description of Artificial Sequence: Synthetic peptide
  Seed: DPRMCSLMQGSTLP
DPRMYSLLQVSTAP

SEQ ID NO: 57825 - protein, 14 aa, Artificial Sequence
  Description of Artificial Sequence: Synthetic peptide
  Seed: DPRMCSLMQGSTLP
DPRMYSLLQVSTNP

SEQ ID NO: 57826 - protein, 14 aa, Artificial Sequence
  Description of Artificial Sequence: Synthetic peptide
  Seed: DPRMCSLMQGSTLP
DPRMYSLLQVSTSP

SEQ ID NO: 57827 - protein, 14 aa, Artificial Sequence
  Description of Artificial Sequence: Synthetic peptide
  Seed: DPRMCSLMQGSTLP
DPRMYSLLQVSTTP

SEQ ID NO: 57828 - protein, 14 aa, Artificial Sequence
  Description of Artificial Sequence: Synthetic peptide
  Seed: DPRMCSLMQGSTLP
DPRMYSLLQVSTVP

SEQ ID NO: 57829 - protein, 14 aa, Artificial Sequence
  Description of Artificial Sequence: Synthetic peptide
  Seed: DPRMCSLMQGSTLP
DPRMYSLMQASTAP

SEQ ID NO: 57830 - protein, 14 aa, Artificial Sequence
  Description of Artificial Sequence: Synthetic peptide
  Seed: DPRMCSLMQGSTLP
DPRMYSLMQASTIP

SEQ ID NO: 57831 - protein, 14 aa, Artificial Sequence
  Description of Artificial Sequence: Synthetic peptide
  Seed: DPRMCSLMQGSTLP
DPRMYSLMQASTLP

SEQ ID NO: 57832 - protein, 14 aa, Artificial Sequence
  Description of Artificial Sequence: Synthetic peptide
  Seed: DPRMCSLMQGSTLP
DPRMYSLMQASTMP

SEQ ID NO: 57833 - protein, 14 aa, Artificial Sequence
  Description of Artificial Sequence: Synthetic peptide
  Seed: DPRMCSLMQGSTLP
DPRMYSLMQASTNP

SEQ ID NO: 57834 - protein, 14 aa, Artificial Sequence
  Description of Artificial Sequence: Synthetic peptide
  Seed: DPRMCSLMQGSTLP
DPRMYSLMQASTSP

SEQ ID NO: 57835 - protein, 14 aa, Artificial Sequence
  Description of Artificial Sequence: Synthetic peptide
  Seed: DPRMCSLMQGSTLP
DPRMYSLMQASTTP

SEQ ID NO: 57836 - protein, 14 aa, Artificial Sequence
  Description of Artificial Sequence: Synthetic peptide
  Seed: DPRMCSLMQGSTLP
DPRMYSLMQASTVP

SEQ ID NO: 57837 - protein, 14 aa, Artificial Sequence
  Description of Artificial Sequence: Synthetic peptide
  Seed: DPRMCSLMQGSTLP
DPRMYSLMQGSTAP

SEQ ID NO: 57838 - protein, 14 aa, Artificial Sequence
  Description of Artificial Sequence: Synthetic peptide
  Seed: DPRMCSLMQGSTLP
DPRMYSLMQGSTIP

SEQ ID NO: 57839 - protein, 14 aa, Artificial Sequence
  Description of Artificial Sequence: Synthetic peptide
  Seed: DPRMCSLMQGSTLP
DPRMYSLMQGSTLP

SEQ ID NO: 57840 - protein, 14 aa, Artificial Sequence
  Description of Artificial Sequence: Synthetic peptide
  Seed: DPRMCSLMQGSTLP
DPRMYSLMQGSTMP

SEQ ID NO: 57841 - protein, 14 aa, Artificial Sequence
  Description of Artificial Sequence: Synthetic peptide
  Seed: DPRMCSLMQGSTLP
DPRMYSLMQGSTSP

SEQ ID NO: 57842 - protein, 14 aa, Artificial Sequence
  Description of Artificial Sequence: Synthetic peptide
  Seed: DPRMCSLMQGSTLP
DPRMYSLMQGSTTP

SEQ ID NO: 57843 - protein, 14 aa, Artificial Sequence
  Description of Artificial Sequence: Synthetic peptide
  Seed: DPRMCSLMQGSTLP
DPRMYSLMQGSTVP

SEQ ID NO: 57844 - protein, 14 aa, Artificial Sequence
  Description of Artificial Sequence: Synthetic peptide
  Seed: DPRMCSLMQGSTLP
DPRMYSLMQISTAP

SEQ ID NO: 57845 - protein, 14 aa, Artificial Sequence
  Description of Artificial Sequence: Synthetic peptide
  Seed: DPRMCSLMQGSTLP
DPRMYSLMQISTNP

SEQ ID NO: 57846 - protein, 14 aa, Artificial Sequence
  Description of Artificial Sequence: Synthetic peptide
  Seed: DPRMCSLMQGSTLP
DPRMYSLMQISTSP

SEQ ID NO: 57847 - protein, 14 aa, Artificial Sequence
  Description of Artificial Sequence: Synthetic peptide
  Seed: DPRMCSLMQGSTLP
DPRMYSLMQNSTIP

SEQ ID NO: 57848 - protein, 14 aa, Artificial Sequence
  Description of Artificial Sequence: Synthetic peptide
  Seed: DPRMCSLMQGSTLP
DPRMYSLMQNSTLP

SEQ ID NO: 57849 - protein, 14 aa, Artificial Sequence
  Description of Artificial Sequence: Synthetic peptide
  Seed: DPRMCSLMQGSTLP
DPRMYSLMQNSTVP

SEQ ID NO: 57850 - protein, 14 aa, Artificial Sequence
  Description of Artificial Sequence: Synthetic peptide
  Seed: DPRMCSLMQGSTLP
DPRMYSLMQPSTAP

SEQ ID NO: 57851 - protein, 14 aa, Artificial Sequence
  Description of Artificial Sequence: Synthetic peptide
  Seed: DPRMCSLMQGSTLP
DPRMYSLMQPSTIP

SEQ ID NO: 57852 - protein, 14 aa, Artificial Sequence
  Description of Artificial Sequence: Synthetic peptide
  Seed: DPRMCSLMQGSTLP
DPRMYSLMQPSTLP

SEQ ID NO: 57853 - protein, 14 aa, Artificial Sequence
  Description of Artificial Sequence: Synthetic peptide
  Seed: DPRMCSLMQGSTLP
DPRMYSLMQPSTNP

SEQ ID NO: 57854 - protein, 14 aa, Artificial Sequence
  Description of Artificial Sequence: Synthetic peptide
  Seed: DPRMCSLMQGSTLP
DPRMYSLMQPSTSP

SEQ ID NO: 57855 - protein, 14 aa, Artificial Sequence
  Description of Artificial Sequence: Synthetic peptide
  Seed: DPRMCSLMQGSTLP
DPRMYSLMQPSTTP

SEQ ID NO: 57856 - protein, 14 aa, Artificial Sequence
  Description of Artificial Sequence: Synthetic peptide
  Seed: DPRMCSLMQGSTLP
DPRMYSLMQPSTVP

SEQ ID NO: 57857 - protein, 14 aa, Artificial Sequence
  Description of Artificial Sequence: Synthetic peptide
  Seed: DPRMCSLMQGSTLP
DPRMYSLMQSSTAP

SEQ ID NO: 57858 - protein, 14 aa, Artificial Sequence
  Description of Artificial Sequence: Synthetic peptide
  Seed: DPRMCSLMQGSTLP
DPRMYSLMQSSTIP

SEQ ID NO: 57859 - protein, 14 aa, Artificial Sequence
  Description of Artificial Sequence: Synthetic peptide
  Seed: DPRMCSLMQGSTLP
DPRMYSLMQSSTLP

SEQ ID NO: 57860 - protein, 14 aa, Artificial Sequence
  Description of Artificial Sequence: Synthetic peptide
  Seed: DPRMCSLMQGSTLP
DPRMYSLMQSSTMP

SEQ ID NO: 57861 - protein, 14 aa, Artificial Sequence
  Description of Artificial Sequence: Synthetic peptide
  Seed: DPRMCSLMQGSTLP
DPRMYSLMQSSTSP

SEQ ID NO: 57862 - protein, 14 aa, Artificial Sequence
  Description of Artificial Sequence: Synthetic peptide
  Seed: DPRMCSLMQGSTLP
DPRMYSLMQSSTTP

SEQ ID NO: 57863 - protein, 14 aa, Artificial Sequence
  Description of Artificial Sequence: Synthetic peptide
  Seed: DPRMCSLMQGSTLP
DPRMYSLMQSSTVP

SEQ ID NO: 57864 - protein, 14 aa, Artificial Sequence
  Description of Artificial Sequence: Synthetic peptide
  Seed: DPRMCSLMQGSTLP
DPRMYSLMQTSTAP

SEQ ID NO: 57865 - protein, 14 aa, Artificial Sequence
  Description of Artificial Sequence: Synthetic peptide
  Seed: DPRMCSLMQGSTLP
DPRMYSLMQTSTIP

SEQ ID NO: 57866 - protein, 14 aa, Artificial Sequence
  Description of Artificial Sequence: Synthetic peptide
  Seed: DPRMCSLMQGSTLP
DPRMYSLMQTSTLP

SEQ ID NO: 57867 - protein, 14 aa, Artificial Sequence
  Description of Artificial Sequence: Synthetic peptide
  Seed: DPRMCSLMQGSTLP
DPRMYSLMQTSTSP

SEQ ID NO: 57868 - protein, 14 aa, Artificial Sequence
  Description of Artificial Sequence: Synthetic peptide
  Seed: DPRMCSLMQGSTLP
DPRMYSLMQTSTVP

SEQ ID NO: 57869 - protein, 14 aa, Artificial Sequence
  Description of Artificial Sequence: Synthetic peptide
  Seed: DPRMCSLMQGSTLP
DPRMYSLMQVSTAP

SEQ ID NO: 57870 - protein, 14 aa, Artificial Sequence
  Description of Artificial Sequence: Synthetic peptide
  Seed: DPRMCSLMQGSTLP
DPRMYSLMQVSTLP

SEQ ID NO: 57871 - protein, 14 aa, Artificial Sequence
  Description of Artificial Sequence: Synthetic peptide
  Seed: DPRMCSLMQGSTLP
DPRMYSLMQVSTNP

SEQ ID NO: 57872 - protein, 14 aa, Artificial Sequence
  Description of Artificial Sequence: Synthetic peptide
  Seed: DPRMCSLMQGSTLP
DPRMYSLMQVSTSP

SEQ ID NO: 57873 - protein, 14 aa, Artificial Sequence
  Description of Artificial Sequence: Synthetic peptide
  Seed: DPRMCSLMQGSTLP
DPRMYSLMQVSTTP

SEQ ID NO: 57874 - protein, 14 aa, Artificial Sequence
  Description of Artificial Sequence: Synthetic peptide
  Seed: DPRMCSLMQGSTLP
DPRMYSLMQVSTVP

SEQ ID NO: 57875 - protein, 14 aa, Artificial Sequence
  Description of Artificial Sequence: Synthetic peptide
  Seed: DPRMCSLMQGSTLP
DPRMYSLQQASTIP

SEQ ID NO: 57876 - protein, 14 aa, Artificial Sequence
  Description of Artificial Sequence: Synthetic peptide
  Seed: DPRMCSLMQGSTLP
DPRMYSLQQASTLP

SEQ ID NO: 57877 - protein, 14 aa, Artificial Sequence
  Description of Artificial Sequence: Synthetic peptide
  Seed: DPRMCSLMQGSTLP
DPRMYSLQQASTVP

SEQ ID NO: 57878 - protein, 14 aa, Artificial Sequence
  Description of Artificial Sequence: Synthetic peptide
  Seed: DPRMCSLMQGSTLP
DPRMYSLVQASTLP

SEQ ID NO: 57879 - protein, 14 aa, Artificial Sequence
  Description of Artificial Sequence: Synthetic peptide
  Seed: DPRMCSLMQGSTLP
DPRMYSLVQASTVP

SEQ ID NO: 57880 - protein, 15 aa, Artificial Sequence
  Description of Artificial Sequence: Synthetic peptide
  Seed: DPRMCSLMQGSTLPR
DPRMCSLIQASTLPR

SEQ ID NO: 57881 - protein, 15 aa, Artificial Sequence
  Description of Artificial Sequence: Synthetic peptide
  Seed: DPRMCSLMQGSTLPR
DPRMCSLIQASTVPR

SEQ ID NO: 57882 - protein, 15 aa, Artificial Sequence
  Description of Artificial Sequence: Synthetic peptide
  Seed: DPRMCSLMQGSTLPR
DPRMCSLLQASTAPR

SEQ ID NO: 57883 - protein, 15 aa, Artificial Sequence
  Description of Artificial Sequence: Synthetic peptide
  Seed: DPRMCSLMQGSTLPR
DPRMCSLLQASTIPR

SEQ ID NO: 57884 - protein, 15 aa, Artificial Sequence
  Description of Artificial Sequence: Synthetic peptide
  Seed: DPRMCSLMQGSTLPR
DPRMCSLLQASTLPR

SEQ ID NO: 57885 - protein, 15 aa, Artificial Sequence
  Description of Artificial Sequence: Synthetic peptide
  Seed: DPRMCSLMQGSTLPR
DPRMCSLLQASTMPR

SEQ ID NO: 57886 - protein, 15 aa, Artificial Sequence
  Description of Artificial Sequence: Synthetic peptide
  Seed: DPRMCSLMQGSTLPR
DPRMCSLLQASTVPR

SEQ ID NO: 57887 - protein, 15 aa, Artificial Sequence
  Description of Artificial Sequence: Synthetic peptide
  Seed: DPRMCSLMQGSTLPR
DPRMCSLLQGSTAPR

SEQ ID NO: 57888 - protein, 15 aa, Artificial Sequence
  Description of Artificial Sequence: Synthetic peptide
  Seed: DPRMCSLMQGSTLPR
DPRMCSLLQGSTIPR

SEQ ID NO: 57889 - protein, 15 aa, Artificial Sequence
  Description of Artificial Sequence: Synthetic peptide
  Seed: DPRMCSLMQGSTLPR
DPRMCSLLQGSTLPR

SEQ ID NO: 57890 - protein, 15 aa, Artificial Sequence
  Description of Artificial Sequence: Synthetic peptide
  Seed: DPRMCSLMQGSTLPR
DPRMCSLLQGSTVPR

SEQ ID NO: 57891 - protein, 15 aa, Artificial Sequence
  Description of Artificial Sequence: Synthetic peptide
  Seed: DPRMCSLMQGSTLPR
DPRMCSLLQSSTIPR

SEQ ID NO: 57892 - protein, 15 aa, Artificial Sequence
  Description of Artificial Sequence: Synthetic peptide
  Seed: DPRMCSLMQGSTLPR
DPRMCSLLQSSTLPR

SEQ ID NO: 57893 - protein, 15 aa, Artificial Sequence
  Description of Artificial Sequence: Synthetic peptide
  Seed: DPRMCSLMQGSTLPR
DPRMCSLLQSSTVPR

SEQ ID NO: 57894 - protein, 15 aa, Artificial Sequence
  Description of Artificial Sequence: Synthetic peptide
  Seed: DPRMCSLMQGSTLPR
DPRMCSLMQASTAPR

SEQ ID NO: 57895 - protein, 15 aa, Artificial Sequence
  Description of Artificial Sequence: Synthetic peptide
  Seed: DPRMCSLMQGSTLPR
DPRMCSLMQASTIPR

SEQ ID NO: 57896 - protein, 15 aa, Artificial Sequence
  Description of Artificial Sequence: Synthetic peptide
  Seed: DPRMCSLMQGSTLPR
DPRMCSLMQASTLPR

SEQ ID NO: 57897 - protein, 15 aa, Artificial Sequence
  Description of Artificial Sequence: Synthetic peptide
  Seed: DPRMCSLMQGSTLPR
DPRMCSLMQASTMPR

SEQ ID NO: 57898 - protein, 15 aa, Artificial Sequence
  Description of Artificial Sequence: Synthetic peptide
  Seed: DPRMCSLMQGSTLPR
DPRMCSLMQASTVPR

SEQ ID NO: 57899 - protein, 15 aa, Artificial Sequence
  Description of Artificial Sequence: Synthetic peptide
  Seed: DPRMCSLMQGSTLPR
DPRMCSLMQGSTIPR

SEQ ID NO: 57900 - protein, 15 aa, Artificial Sequence
  Description of Artificial Sequence: Synthetic peptide
  Seed: DPRMCSLMQGSTLPR
DPRMCSLMQGSTVPR

SEQ ID NO: 57901 - protein, 15 aa, Artificial Sequence
  Description of Artificial Sequence: Synthetic peptide
  Seed: DPRMCSLMQGSTLPR
DPRMCSLMQSSTIPR

SEQ ID NO: 57902 - protein, 15 aa, Artificial Sequence
  Description of Artificial Sequence: Synthetic peptide
  Seed: DPRMCSLMQGSTLPR
DPRMCSLMQSSTLPR

SEQ ID NO: 57903 - protein, 15 aa, Artificial Sequence
  Description of Artificial Sequence: Synthetic peptide
  Seed: DPRMCSLMQGSTLPR
DPRMCSLMQSSTVPR

SEQ ID NO: 57904 - protein, 15 aa, Artificial Sequence
  Description of Artificial Sequence: Synthetic peptide
  Seed: DPRMCSLMQGSTLPR
DPRMFSLAQASTAPR

SEQ ID NO: 57905 - protein, 15 aa, Artificial Sequence
  Description of Artificial Sequence: Synthetic peptide
  Seed: DPRMCSLMQGSTLPR
DPRMFSLAQASTCPR

SEQ ID NO: 57906 - protein, 15 aa, Artificial Sequence
  Description of Artificial Sequence: Synthetic peptide
  Seed: DPRMCSLMQGSTLPR
DPRMFSLAQASTDPR

SEQ ID NO: 57907 - protein, 15 aa, Artificial Sequence
  Description of Artificial Sequence: Synthetic peptide
  Seed: DPRMCSLMQGSTLPR
DPRMFSLAQASTEPR

SEQ ID NO: 57908 - protein, 15 aa, Artificial Sequence
  Description of Artificial Sequence: Synthetic peptide
  Seed: DPRMCSLMQGSTLPR
DPRMFSLAQASTFPR

SEQ ID NO: 57909 - protein, 15 aa, Artificial Sequence
  Description of Artificial Sequence: Synthetic peptide
  Seed: DPRMCSLMQGSTLPR
DPRMFSLAQASTGPR

SEQ ID NO: 57910 - protein, 15 aa, Artificial Sequence
  Description of Artificial Sequence: Synthetic peptide
  Seed: DPRMCSLMQGSTLPR
DPRMFSLAQASTHPR

SEQ ID NO: 57911 - protein, 15 aa, Artificial Sequence
  Description of Artificial Sequence: Synthetic peptide
  Seed: DPRMCSLMQGSTLPR
DPRMFSLAQASTIPR

SEQ ID NO: 57912 - protein, 15 aa, Artificial Sequence
  Description of Artificial Sequence: Synthetic peptide
  Seed: DPRMCSLMQGSTLPR
DPRMFSLAQASTKPR

SEQ ID NO: 57913 - protein, 15 aa, Artificial Sequence
  Description of Artificial Sequence: Synthetic peptide
  Seed: DPRMCSLMQGSTLPR
DPRMFSLAQASTLPR

SEQ ID NO: 57914 - protein, 15 aa, Artificial Sequence
  Description of Artificial Sequence: Synthetic peptide
  Seed: DPRMCSLMQGSTLPR
DPRMFSLAQASTMPR

SEQ ID NO: 57915 - protein, 15 aa, Artificial Sequence
  Description of Artificial Sequence: Synthetic peptide
  Seed: DPRMCSLMQGSTLPR
DPRMFSLAQASTNPR

SEQ ID NO: 57916 - protein, 15 aa, Artificial Sequence
  Description of Artificial Sequence: Synthetic peptide
  Seed: DPRMCSLMQGSTLPR
DPRMFSLAQASTPPR

SEQ ID NO: 57917 - protein, 15 aa, Artificial Sequence
  Description of Artificial Sequence: Synthetic peptide
  Seed: DPRMCSLMQGSTLPR
DPRMFSLAQASTQPR

SEQ ID NO: 57918 - protein, 15 aa, Artificial Sequence
  Description of Artificial Sequence: Synthetic peptide
  Seed: DPRMCSLMQGSTLPR
DPRMFSLAQASTRPR

SEQ ID NO: 57919 - protein, 15 aa, Artificial Sequence
  Description of Artificial Sequence: Synthetic peptide
  Seed: DPRMCSLMQGSTLPR
DPRMFSLAQASTSPR

SEQ ID NO: 57920 - protein, 15 aa, Artificial Sequence
  Description of Artificial Sequence: Synthetic peptide
  Seed: DPRMCSLMQGSTLPR
DPRMFSLAQASTTPR

SEQ ID NO: 57921 - protein, 15 aa, Artificial Sequence
  Description of Artificial Sequence: Synthetic peptide
  Seed: DPRMCSLMQGSTLPR
DPRMFSLAQASTVPR

SEQ ID NO: 57922 - protein, 15 aa, Artificial Sequence
  Description of Artificial Sequence: Synthetic peptide
  Seed: DPRMCSLMQGSTLPR
DPRMFSLAQASTWPR

SEQ ID NO: 57923 - protein, 15 aa, Artificial Sequence
  Description of Artificial Sequence: Synthetic peptide
  Seed: DPRMCSLMQGSTLPR
DPRMFSLAQASTYPR

SEQ ID NO: 57924 - protein, 15 aa, Artificial Sequence
  Description of Artificial Sequence: Synthetic peptide
  Seed: DPRMCSLMQGSTLPR
DPRMFSLAQCSTIPR

SEQ ID NO: 57925 - protein, 15 aa, Artificial Sequence
  Description of Artificial Sequence: Synthetic peptide
  Seed: DPRMCSLMQGSTLPR
DPRMFSLAQCSTLPR

SEQ ID NO: 57926 - protein, 15 aa, Artificial Sequence
  Description of Artificial Sequence: Synthetic peptide
  Seed: DPRMCSLMQGSTLPR
DPRMFSLAQCSTVPR

SEQ ID NO: 57927 - protein, 15 aa, Artificial Sequence
  Description of Artificial Sequence: Synthetic peptide
  Seed: DPRMCSLMQGSTLPR
DPRMFSLAQGSTAPR

SEQ ID NO: 57928 - protein, 15 aa, Artificial Sequence
  Description of Artificial Sequence: Synthetic peptide
  Seed: DPRMCSLMQGSTLPR
DPRMFSLAQGSTCPR

SEQ ID NO: 57929 - protein, 15 aa, Artificial Sequence
  Description of Artificial Sequence: Synthetic peptide
  Seed: DPRMCSLMQGSTLPR
DPRMFSLAQGSTFPR

SEQ ID NO: 57930 - protein, 15 aa, Artificial Sequence
  Description of Artificial Sequence: Synthetic peptide
  Seed: DPRMCSLMQGSTLPR
DPRMFSLAQGSTGPR

SEQ ID NO: 57931 - protein, 15 aa, Artificial Sequence
  Description of Artificial Sequence: Synthetic peptide
  Seed: DPRMCSLMQGSTLPR
DPRMFSLAQGSTIPR

SEQ ID NO: 57932 - protein, 15 aa, Artificial Sequence
  Description of Artificial Sequence: Synthetic peptide
  Seed: DPRMCSLMQGSTLPR
DPRMFSLAQGSTLPR

SEQ ID NO: 57933 - protein, 15 aa, Artificial Sequence
  Description of Artificial Sequence: Synthetic peptide
  Seed: DPRMCSLMQGSTLPR
DPRMFSLAQGSTMPR

SEQ ID NO: 57934 - protein, 15 aa, Artificial Sequence
  Description of Artificial Sequence: Synthetic peptide
  Seed: DPRMCSLMQGSTLPR
DPRMFSLAQGSTNPR

SEQ ID NO: 57935 - protein, 15 aa, Artificial Sequence
  Description of Artificial Sequence: Synthetic peptide
  Seed: DPRMCSLMQGSTLPR
DPRMFSLAQGSTQPR

SEQ ID NO: 57936 - protein, 15 aa, Artificial Sequence
  Description of Artificial Sequence: Synthetic peptide
  Seed: DPRMCSLMQGSTLPR
DPRMFSLAQGSTSPR

SEQ ID NO: 57937 - protein, 15 aa, Artificial Sequence
  Description of Artificial Sequence: Synthetic peptide
  Seed: DPRMCSLMQGSTLPR
DPRMFSLAQGSTTPR

SEQ ID NO: 57938 - protein, 15 aa, Artificial Sequence
  Description of Artificial Sequence: Synthetic peptide
  Seed: DPRMCSLMQGSTLPR
DPRMFSLAQGSTVPR

SEQ ID NO: 57939 - protein, 15 aa, Artificial Sequence
  Description of Artificial Sequence: Synthetic peptide
  Seed: DPRMCSLMQGSTLPR
DPRMFSLAQGSTYPR

SEQ ID NO: 57940 - protein, 15 aa, Artificial Sequence
  Description of Artificial Sequence: Synthetic peptide
  Seed: DPRMCSLMQGSTLPR
DPRMFSLAQHSTIPR

SEQ ID NO: 57941 - protein, 15 aa, Artificial Sequence
  Description of Artificial Sequence: Synthetic peptide
  Seed: DPRMCSLMQGSTLPR
DPRMFSLAQHSTLPR

SEQ ID NO: 57942 - protein, 15 aa, Artificial Sequence
  Description of Artificial Sequence: Synthetic peptide
  Seed: DPRMCSLMQGSTLPR
DPRMFSLAQHSTVPR

SEQ ID NO: 57943 - protein, 15 aa, Artificial Sequence
  Description of Artificial Sequence: Synthetic peptide
  Seed: DPRMCSLMQGSTLPR
DPRMFSLAQISTAPR

SEQ ID NO: 57944 - protein, 15 aa, Artificial Sequence
  Description of Artificial Sequence: Synthetic peptide
  Seed: DPRMCSLMQGSTLPR
DPRMFSLAQISTGPR

SEQ ID NO: 57945 - protein, 15 aa, Artificial Sequence
  Description of Artificial Sequence: Synthetic peptide
  Seed: DPRMCSLMQGSTLPR
DPRMFSLAQISTHPR

SEQ ID NO: 57946 - protein, 15 aa, Artificial Sequence
  Description of Artificial Sequence: Synthetic peptide
  Seed: DPRMCSLMQGSTLPR
DPRMFSLAQISTIPR

SEQ ID NO: 57947 - protein, 15 aa, Artificial Sequence
  Description of Artificial Sequence: Synthetic peptide
  Seed: DPRMCSLMQGSTLPR
DPRMFSLAQISTLPR

SEQ ID NO: 57948 - protein, 15 aa, Artificial Sequence
  Description of Artificial Sequence: Synthetic peptide
  Seed: DPRMCSLMQGSTLPR
DPRMFSLAQISTMPR

SEQ ID NO: 57949 - protein, 15 aa, Artificial Sequence
  Description of Artificial Sequence: Synthetic peptide
  Seed: DPRMCSLMQGSTLPR
DPRMFSLAQISTNPR

SEQ ID NO: 57950 - protein, 15 aa, Artificial Sequence
  Description of Artificial Sequence: Synthetic peptide
  Seed: DPRMCSLMQGSTLPR
DPRMFSLAQISTQPR

SEQ ID NO: 57951 - protein, 15 aa, Artificial Sequence
  Description of Artificial Sequence: Synthetic peptide
  Seed: DPRMCSLMQGSTLPR
DPRMFSLAQISTSPR

SEQ ID NO: 57952 - protein, 15 aa, Artificial Sequence
  Description of Artificial Sequence: Synthetic peptide
  Seed: DPRMCSLMQGSTLPR
DPRMFSLAQISTTPR

SEQ ID NO: 57953 - protein, 15 aa, Artificial Sequence
  Description of Artificial Sequence: Synthetic peptide
  Seed: DPRMCSLMQGSTLPR
DPRMFSLAQISTVPR

SEQ ID NO: 57954 - protein, 15 aa, Artificial Sequence
  Description of Artificial Sequence: Synthetic peptide
  Seed: DPRMCSLMQGSTLPR
DPRMFSLAQLSTAPR

SEQ ID NO: 57955 - protein, 15 aa, Artificial Sequence
  Description of Artificial Sequence: Synthetic peptide
  Seed: DPRMCSLMQGSTLPR
DPRMFSLAQLSTIPR

SEQ ID NO: 57956 - protein, 15 aa, Artificial Sequence
  Description of Artificial Sequence: Synthetic peptide
  Seed: DPRMCSLMQGSTLPR
DPRMFSLAQLSTLPR

SEQ ID NO: 57957 - protein, 15 aa, Artificial Sequence
  Description of Artificial Sequence: Synthetic peptide
  Seed: DPRMCSLMQGSTLPR
DPRMFSLAQLSTMPR

SEQ ID NO: 57958 - protein, 15 aa, Artificial Sequence
  Description of Artificial Sequence: Synthetic peptide
  Seed: DPRMCSLMQGSTLPR
DPRMFSLAQLSTNPR

SEQ ID NO: 57959 - protein, 15 aa, Artificial Sequence
  Description of Artificial Sequence: Synthetic peptide
  Seed: DPRMCSLMQGSTLPR
DPRMFSLAQLSTSPR

SEQ ID NO: 57960 - protein, 15 aa, Artificial Sequence
  Description of Artificial Sequence: Synthetic peptide
  Seed: DPRMCSLMQGSTLPR
DPRMFSLAQLSTTPR

SEQ ID NO: 57961 - protein, 15 aa, Artificial Sequence
  Description of Artificial Sequence: Synthetic peptide
  Seed: DPRMCSLMQGSTLPR
DPRMFSLAQLSTVPR

SEQ ID NO: 57962 - protein, 15 aa, Artificial Sequence
  Description of Artificial Sequence: Synthetic peptide
  Seed: DPRMCSLMQGSTLPR
DPRMFSLAQMSTAPR

SEQ ID NO: 57963 - protein, 15 aa, Artificial Sequence
  Description of Artificial Sequence: Synthetic peptide
  Seed: DPRMCSLMQGSTLPR
DPRMFSLAQMSTIPR

SEQ ID NO: 57964 - protein, 15 aa, Artificial Sequence
  Description of Artificial Sequence: Synthetic peptide
  Seed: DPRMCSLMQGSTLPR
DPRMFSLAQMSTLPR

SEQ ID NO: 57965 - protein, 15 aa, Artificial Sequence
  Description of Artificial Sequence: Synthetic peptide
  Seed: DPRMCSLMQGSTLPR
DPRMFSLAQMSTMPR

SEQ ID NO: 57966 - protein, 15 aa, Artificial Sequence
  Description of Artificial Sequence: Synthetic peptide
  Seed: DPRMCSLMQGSTLPR
DPRMFSLAQMSTNPR

SEQ ID NO: 57967 - protein, 15 aa, Artificial Sequence
  Description of Artificial Sequence: Synthetic peptide
  Seed: DPRMCSLMQGSTLPR
DPRMFSLAQMSTSPR

SEQ ID NO: 57968 - protein, 15 aa, Artificial Sequence
  Description of Artificial Sequence: Synthetic peptide
  Seed: DPRMCSLMQGSTLPR
DPRMFSLAQMSTTPR

SEQ ID NO: 57969 - protein, 15 aa, Artificial Sequence
  Description of Artificial Sequence: Synthetic peptide
  Seed: DPRMCSLMQGSTLPR
DPRMFSLAQMSTVPR

SEQ ID NO: 57970 - protein, 15 aa, Artificial Sequence
  Description of Artificial Sequence: Synthetic peptide
  Seed: DPRMCSLMQGSTLPR
DPRMFSLAQNSTAPR

SEQ ID NO: 57971 - protein, 15 aa, Artificial Sequence
  Description of Artificial Sequence: Synthetic peptide
  Seed: DPRMCSLMQGSTLPR
DPRMFSLAQNSTGPR

SEQ ID NO: 57972 - protein, 15 aa, Artificial Sequence
  Description of Artificial Sequence: Synthetic peptide
  Seed: DPRMCSLMQGSTLPR
DPRMFSLAQNSTIPR

SEQ ID NO: 57973 - protein, 15 aa, Artificial Sequence
  Description of Artificial Sequence: Synthetic peptide
  Seed: DPRMCSLMQGSTLPR
DPRMFSLAQNSTLPR

SEQ ID NO: 57974 - protein, 15 aa, Artificial Sequence
  Description of Artificial Sequence: Synthetic peptide
  Seed: DPRMCSLMQGSTLPR
DPRMFSLAQNSTMPR

SEQ ID NO: 57975 - protein, 15 aa, Artificial Sequence
  Description of Artificial Sequence: Synthetic peptide
  Seed: DPRMCSLMQGSTLPR
DPRMFSLAQNSTNPR

SEQ ID NO: 57976 - protein, 15 aa, Artificial Sequence
  Description of Artificial Sequence: Synthetic peptide
  Seed: DPRMCSLMQGSTLPR
DPRMFSLAQNSTSPR

SEQ ID NO: 57977 - protein, 15 aa, Artificial Sequence
  Description of Artificial Sequence: Synthetic peptide
  Seed: DPRMCSLMQGSTLPR
DPRMFSLAQNSTTPR

SEQ ID NO: 57978 - protein, 15 aa, Artificial Sequence
  Description of Artificial Sequence: Synthetic peptide
  Seed: DPRMCSLMQGSTLPR
DPRMFSLAQNSTVPR

SEQ ID NO: 57979 - protein, 15 aa, Artificial Sequence
  Description of Artificial Sequence: Synthetic peptide
  Seed: DPRMCSLMQGSTLPR
DPRMFSLAQPSTAPR

SEQ ID NO: 57980 - protein, 15 aa, Artificial Sequence
  Description of Artificial Sequence: Synthetic peptide
  Seed: DPRMCSLMQGSTLPR
DPRMFSLAQPSTCPR

SEQ ID NO: 57981 - protein, 15 aa, Artificial Sequence
  Description of Artificial Sequence: Synthetic peptide
  Seed: DPRMCSLMQGSTLPR
DPRMFSLAQPSTFPR

SEQ ID NO: 57982 - protein, 15 aa, Artificial Sequence
  Description of Artificial Sequence: Synthetic peptide
  Seed: DPRMCSLMQGSTLPR
DPRMFSLAQPSTGPR

SEQ ID NO: 57983 - protein, 15 aa, Artificial Sequence
  Description of Artificial Sequence: Synthetic peptide
  Seed: DPRMCSLMQGSTLPR
DPRMFSLAQPSTHPR

SEQ ID NO: 57984 - protein, 15 aa, Artificial Sequence
  Description of Artificial Sequence: Synthetic peptide
  Seed: DPRMCSLMQGSTLPR
DPRMFSLAQPSTIPR

SEQ ID NO: 57985 - protein, 15 aa, Artificial Sequence
  Description of Artificial Sequence: Synthetic peptide
  Seed: DPRMCSLMQGSTLPR
DPRMFSLAQPSTLPR

SEQ ID NO: 57986 - protein, 15 aa, Artificial Sequence
  Description of Artificial Sequence: Synthetic peptide
  Seed: DPRMCSLMQGSTLPR
DPRMFSLAQPSTMPR

SEQ ID NO: 57987 - protein, 15 aa, Artificial Sequence
  Description of Artificial Sequence: Synthetic peptide
  Seed: DPRMCSLMQGSTLPR
DPRMFSLAQPSTNPR

SEQ ID NO: 57988 - protein, 15 aa, Artificial Sequence
  Description of Artificial Sequence: Synthetic peptide
  Seed: DPRMCSLMQGSTLPR
DPRMFSLAQPSTQPR

SEQ ID NO: 57989 - protein, 15 aa, Artificial Sequence
  Description of Artificial Sequence: Synthetic peptide
  Seed: DPRMCSLMQGSTLPR
DPRMFSLAQPSTSPR

SEQ ID NO: 57990 - protein, 15 aa, Artificial Sequence
  Description of Artificial Sequence: Synthetic peptide
  Seed: DPRMCSLMQGSTLPR
DPRMFSLAQPSTTPR

SEQ ID NO: 57991 - protein, 15 aa, Artificial Sequence
  Description of Artificial Sequence: Synthetic peptide
  Seed: DPRMCSLMQGSTLPR
DPRMFSLAQPSTVPR

SEQ ID NO: 57992 - protein, 15 aa, Artificial Sequence
  Description of Artificial Sequence: Synthetic peptide
  Seed: DPRMCSLMQGSTLPR
DPRMFSLAQPSTYPR

SEQ ID NO: 57993 - protein, 15 aa, Artificial Sequence
  Description of Artificial Sequence: Synthetic peptide
  Seed: DPRMCSLMQGSTLPR
DPRMFSLAQQSTLPR

SEQ ID NO: 57994 - protein, 15 aa, Artificial Sequence
  Description of Artificial Sequence: Synthetic peptide
  Seed: DPRMCSLMQGSTLPR
DPRMFSLAQSSTAPR

SEQ ID NO: 57995 - protein, 15 aa, Artificial Sequence
  Description of Artificial Sequence: Synthetic peptide
  Seed: DPRMCSLMQGSTLPR
DPRMFSLAQSSTCPR

SEQ ID NO: 57996 - protein, 15 aa, Artificial Sequence
  Description of Artificial Sequence: Synthetic peptide
  Seed: DPRMCSLMQGSTLPR
DPRMFSLAQSSTFPR

SEQ ID NO: 57997 - protein, 15 aa, Artificial Sequence
  Description of Artificial Sequence: Synthetic peptide
  Seed: DPRMCSLMQGSTLPR
DPRMFSLAQSSTGPR

SEQ ID NO: 57998 - protein, 15 aa, Artificial Sequence
  Description of Artificial Sequence: Synthetic peptide
  Seed: DPRMCSLMQGSTLPR
DPRMFSLAQSSTHPR

SEQ ID NO: 57999 - protein, 15 aa, Artificial Sequence
  Description of Artificial Sequence: Synthetic peptide
  Seed: DPRMCSLMQGSTLPR
DPRMFSLAQSSTIPR

SEQ ID NO: 58000 - protein, 15 aa, Artificial Sequence
  Description of Artificial Sequence: Synthetic peptide
  Seed: DPRMCSLMQGSTLPR
DPRMFSLAQSSTLPR

SEQ ID NO: 58001 - protein, 15 aa, Artificial Sequence
  Description of Artificial Sequence: Synthetic peptide
  Seed: DPRMCSLMQGSTLPR
DPRMFSLAQSSTMPR

SEQ ID NO: 58002 - protein, 15 aa, Artificial Sequence
  Description of Artificial Sequence: Synthetic peptide
  Seed: DPRMCSLMQGSTLPR
DPRMFSLAQSSTNPR

SEQ ID NO: 58003 - protein, 15 aa, Artificial Sequence
  Description of Artificial Sequence: Synthetic peptide
  Seed: DPRMCSLMQGSTLPR
DPRMFSLAQSSTQPR

SEQ ID NO: 58004 - protein, 15 aa, Artificial Sequence
  Description of Artificial Sequence: Synthetic peptide
  Seed: DPRMCSLMQGSTLPR
DPRMFSLAQSSTSPR

SEQ ID NO: 58005 - protein, 15 aa, Artificial Sequence
  Description of Artificial Sequence: Synthetic peptide
  Seed: DPRMCSLMQGSTLPR
DPRMFSLAQSSTTPR

SEQ ID NO: 58006 - protein, 15 aa, Artificial Sequence
  Description of Artificial Sequence: Synthetic peptide
  Seed: DPRMCSLMQGSTLPR
DPRMFSLAQSSTVPR

SEQ ID NO: 58007 - protein, 15 aa, Artificial Sequence
  Description of Artificial Sequence: Synthetic peptide
  Seed: DPRMCSLMQGSTLPR
DPRMFSLAQSSTYPR

SEQ ID NO: 58008 - protein, 15 aa, Artificial Sequence
  Description of Artificial Sequence: Synthetic peptide
  Seed: DPRMCSLMQGSTLPR
DPRMFSLAQTSTAPR

SEQ ID NO: 58009 - protein, 15 aa, Artificial Sequence
  Description of Artificial Sequence: Synthetic peptide
  Seed: DPRMCSLMQGSTLPR
DPRMFSLAQTSTGPR

SEQ ID NO: 58010 - protein, 15 aa, Artificial Sequence
  Description of Artificial Sequence: Synthetic peptide
  Seed: DPRMCSLMQGSTLPR
DPRMFSLAQTSTHPR

SEQ ID NO: 58011 - protein, 15 aa, Artificial Sequence
  Description of Artificial Sequence: Synthetic peptide
  Seed: DPRMCSLMQGSTLPR
DPRMFSLAQTSTIPR

SEQ ID NO: 58012 - protein, 15 aa, Artificial Sequence
  Description of Artificial Sequence: Synthetic peptide
  Seed: DPRMCSLMQGSTLPR
DPRMFSLAQTSTLPR

SEQ ID NO: 58013 - protein, 15 aa, Artificial Sequence
  Description of Artificial Sequence: Synthetic peptide
  Seed: DPRMCSLMQGSTLPR
DPRMFSLAQTSTMPR

SEQ ID NO: 58014 - protein, 15 aa, Artificial Sequence
  Description of Artificial Sequence: Synthetic peptide
  Seed: DPRMCSLMQGSTLPR
DPRMFSLAQTSTNPR

SEQ ID NO: 58015 - protein, 15 aa, Artificial Sequence
  Description of Artificial Sequence: Synthetic peptide
  Seed: DPRMCSLMQGSTLPR
DPRMFSLAQTSTQPR

SEQ ID NO: 58016 - protein, 15 aa, Artificial Sequence
  Description of Artificial Sequence: Synthetic peptide
  Seed: DPRMCSLMQGSTLPR
DPRMFSLAQTSTSPR

SEQ ID NO: 58017 - protein, 15 aa, Artificial Sequence
  Description of Artificial Sequence: Synthetic peptide
  Seed: DPRMCSLMQGSTLPR
DPRMFSLAQTSTTPR

SEQ ID NO: 58018 - protein, 15 aa, Artificial Sequence
  Description of Artificial Sequence: Synthetic peptide
  Seed: DPRMCSLMQGSTLPR
DPRMFSLAQTSTVPR

SEQ ID NO: 58019 - protein, 15 aa, Artificial Sequence
  Description of Artificial Sequence: Synthetic peptide
  Seed: DPRMCSLMQGSTLPR
DPRMFSLAQVSTAPR

SEQ ID NO: 58020 - protein, 15 aa, Artificial Sequence
  Description of Artificial Sequence: Synthetic peptide
  Seed: DPRMCSLMQGSTLPR
DPRMFSLAQVSTGPR

SEQ ID NO: 58021 - protein, 15 aa, Artificial Sequence
  Description of Artificial Sequence: Synthetic peptide
  Seed: DPRMCSLMQGSTLPR
DPRMFSLAQVSTHPR

SEQ ID NO: 58022 - protein, 15 aa, Artificial Sequence
  Description of Artificial Sequence: Synthetic peptide
  Seed: DPRMCSLMQGSTLPR
DPRMFSLAQVSTIPR

SEQ ID NO: 58023 - protein, 15 aa, Artificial Sequence
  Description of Artificial Sequence: Synthetic peptide
  Seed: DPRMCSLMQGSTLPR
DPRMFSLAQVSTLPR

SEQ ID NO: 58024 - protein, 15 aa, Artificial Sequence
  Description of Artificial Sequence: Synthetic peptide
  Seed: DPRMCSLMQGSTLPR
DPRMFSLAQVSTMPR

SEQ ID NO: 58025 - protein, 15 aa, Artificial Sequence
  Description of Artificial Sequence: Synthetic peptide
  Seed: DPRMCSLMQGSTLPR
DPRMFSLAQVSTNPR

SEQ ID NO: 58026 - protein, 15 aa, Artificial Sequence
  Description of Artificial Sequence: Synthetic peptide
  Seed: DPRMCSLMQGSTLPR
DPRMFSLAQVSTQPR

SEQ ID NO: 58027 - protein, 15 aa, Artificial Sequence
  Description of Artificial Sequence: Synthetic peptide
  Seed: DPRMCSLMQGSTLPR
DPRMFSLAQVSTSPR

SEQ ID NO: 58028 - protein, 15 aa, Artificial Sequence
  Description of Artificial Sequence: Synthetic peptide
  Seed: DPRMCSLMQGSTLPR
DPRMFSLAQVSTTPR

SEQ ID NO: 58029 - protein, 15 aa, Artificial Sequence
  Description of Artificial Sequence: Synthetic peptide
  Seed: DPRMCSLMQGSTLPR
DPRMFSLAQVSTVPR

SEQ ID NO: 58030 - protein, 15 aa, Artificial Sequence
  Description of Artificial Sequence: Synthetic peptide
  Seed: DPRMCSLMQGSTLPR
DPRMFSLCQASTAPR

SEQ ID NO: 58031 - protein, 15 aa, Artificial Sequence
  Description of Artificial Sequence: Synthetic peptide
  Seed: DPRMCSLMQGSTLPR
DPRMFSLCQASTIPR

SEQ ID NO: 58032 - protein, 15 aa, Artificial Sequence
  Description of Artificial Sequence: Synthetic peptide
  Seed: DPRMCSLMQGSTLPR
DPRMFSLCQASTLPR

SEQ ID NO: 58033 - protein, 15 aa, Artificial Sequence
  Description of Artificial Sequence: Synthetic peptide
  Seed: DPRMCSLMQGSTLPR
DPRMFSLCQASTMPR

SEQ ID NO: 58034 - protein, 15 aa, Artificial Sequence
  Description of Artificial Sequence: Synthetic peptide
  Seed: DPRMCSLMQGSTLPR
DPRMFSLCQASTSPR

SEQ ID NO: 58035 - protein, 15 aa, Artificial Sequence
  Description of Artificial Sequence: Synthetic peptide
  Seed: DPRMCSLMQGSTLPR
DPRMFSLCQASTTPR

SEQ ID NO: 58036 - protein, 15 aa, Artificial Sequence
  Description of Artificial Sequence: Synthetic peptide
  Seed: DPRMCSLMQGSTLPR
DPRMFSLCQASTVPR

SEQ ID NO: 58037 - protein, 15 aa, Artificial Sequence
  Description of Artificial Sequence: Synthetic peptide
  Seed: DPRMCSLMQGSTLPR
DPRMFSLCQGSTAPR

SEQ ID NO: 58038 - protein, 15 aa, Artificial Sequence
  Description of Artificial Sequence: Synthetic peptide
  Seed: DPRMCSLMQGSTLPR
DPRMFSLCQGSTIPR

SEQ ID NO: 58039 - protein, 15 aa, Artificial Sequence
  Description of Artificial Sequence: Synthetic peptide
  Seed: DPRMCSLMQGSTLPR
DPRMFSLCQGSTLPR

SEQ ID NO: 58040 - protein, 15 aa, Artificial Sequence
  Description of Artificial Sequence: Synthetic peptide
  Seed: DPRMCSLMQGSTLPR
DPRMFSLCQGSTVPR

SEQ ID NO: 58041 - protein, 15 aa, Artificial Sequence
  Description of Artificial Sequence: Synthetic peptide
  Seed: DPRMCSLMQGSTLPR
DPRMFSLCQPSTIPR

SEQ ID NO: 58042 - protein, 15 aa, Artificial Sequence
  Description of Artificial Sequence: Synthetic peptide
  Seed: DPRMCSLMQGSTLPR
DPRMFSLCQPSTLPR

SEQ ID NO: 58043 - protein, 15 aa, Artificial Sequence
  Description of Artificial Sequence: Synthetic peptide
  Seed: DPRMCSLMQGSTLPR
DPRMFSLCQPSTVPR

SEQ ID NO: 58044 - protein, 15 aa, Artificial Sequence
  Description of Artificial Sequence: Synthetic peptide
  Seed: DPRMCSLMQGSTLPR
DPRMFSLCQSSTAPR

SEQ ID NO: 58045 - protein, 15 aa, Artificial Sequence
  Description of Artificial Sequence: Synthetic peptide
  Seed: DPRMCSLMQGSTLPR
DPRMFSLCQSSTIPR

SEQ ID NO: 58046 - protein, 15 aa, Artificial Sequence
  Description of Artificial Sequence: Synthetic peptide
  Seed: DPRMCSLMQGSTLPR
DPRMFSLCQSSTLPR

SEQ ID NO: 58047 - protein, 15 aa, Artificial Sequence
  Description of Artificial Sequence: Synthetic peptide
  Seed: DPRMCSLMQGSTLPR
DPRMFSLCQSSTVPR

SEQ ID NO: 58048 - protein, 15 aa, Artificial Sequence
  Description of Artificial Sequence: Synthetic peptide
  Seed: DPRMCSLMQGSTLPR
DPRMFSLEQASTAPR

SEQ ID NO: 58049 - protein, 15 aa, Artificial Sequence
  Description of Artificial Sequence: Synthetic peptide
  Seed: DPRMCSLMQGSTLPR
DPRMFSLEQASTGPR

SEQ ID NO: 58050 - protein, 15 aa, Artificial Sequence
  Description of Artificial Sequence: Synthetic peptide
  Seed: DPRMCSLMQGSTLPR
DPRMFSLEQASTIPR

SEQ ID NO: 58051 - protein, 15 aa, Artificial Sequence
  Description of Artificial Sequence: Synthetic peptide
  Seed: DPRMCSLMQGSTLPR
DPRMFSLEQASTLPR

SEQ ID NO: 58052 - protein, 15 aa, Artificial Sequence
  Description of Artificial Sequence: Synthetic peptide
  Seed: DPRMCSLMQGSTLPR
DPRMFSLEQASTMPR

SEQ ID NO: 58053 - protein, 15 aa, Artificial Sequence
  Description of Artificial Sequence: Synthetic peptide
  Seed: DPRMCSLMQGSTLPR
DPRMFSLEQASTSPR

SEQ ID NO: 58054 - protein, 15 aa, Artificial Sequence
  Description of Artificial Sequence: Synthetic peptide
  Seed: DPRMCSLMQGSTLPR
DPRMFSLEQASTTPR

SEQ ID NO: 58055 - protein, 15 aa, Artificial Sequence
  Description of Artificial Sequence: Synthetic peptide
  Seed: DPRMCSLMQGSTLPR
DPRMFSLEQASTVPR

SEQ ID NO: 58056 - protein, 15 aa, Artificial Sequence
  Description of Artificial Sequence: Synthetic peptide
  Seed: DPRMCSLMQGSTLPR
DPRMFSLEQGSTAPR

SEQ ID NO: 58057 - protein, 15 aa, Artificial Sequence
  Description of Artificial Sequence: Synthetic peptide
  Seed: DPRMCSLMQGSTLPR
DPRMFSLEQGSTIPR

SEQ ID NO: 58058 - protein, 15 aa, Artificial Sequence
  Description of Artificial Sequence: Synthetic peptide
  Seed: DPRMCSLMQGSTLPR
DPRMFSLEQGSTLPR

SEQ ID NO: 58059 - protein, 15 aa, Artificial Sequence
  Description of Artificial Sequence: Synthetic peptide
  Seed: DPRMCSLMQGSTLPR
DPRMFSLEQGSTMPR

SEQ ID NO: 58060 - protein, 15 aa, Artificial Sequence
  Description of Artificial Sequence: Synthetic peptide
  Seed: DPRMCSLMQGSTLPR
DPRMFSLEQGSTSPR

SEQ ID NO: 58061 - protein, 15 aa, Artificial Sequence
  Description of Artificial Sequence: Synthetic peptide
  Seed: DPRMCSLMQGSTLPR
DPRMFSLEQGSTTPR

SEQ ID NO: 58062 - protein, 15 aa, Artificial Sequence
  Description of Artificial Sequence: Synthetic peptide
  Seed: DPRMCSLMQGSTLPR
DPRMFSLEQGSTVPR

SEQ ID NO: 58063 - protein, 15 aa, Artificial Sequence
  Description of Artificial Sequence: Synthetic peptide
  Seed: DPRMCSLMQGSTLPR
DPRMFSLEQNSTAPR

SEQ ID NO: 58064 - protein, 15 aa, Artificial Sequence
  Description of Artificial Sequence: Synthetic peptide
  Seed: DPRMCSLMQGSTLPR
DPRMFSLEQNSTIPR

SEQ ID NO: 58065 - protein, 15 aa, Artificial Sequence
  Description of Artificial Sequence: Synthetic peptide
  Seed: DPRMCSLMQGSTLPR
DPRMFSLEQNSTLPR

SEQ ID NO: 58066 - protein, 15 aa, Artificial Sequence
  Description of Artificial Sequence: Synthetic peptide
  Seed: DPRMCSLMQGSTLPR
DPRMFSLEQNSTVPR

SEQ ID NO: 58067 - protein, 15 aa, Artificial Sequence
  Description of Artificial Sequence: Synthetic peptide
  Seed: DPRMCSLMQGSTLPR
DPRMFSLEQPSTAPR

SEQ ID NO: 58068 - protein, 15 aa, Artificial Sequence
  Description of Artificial Sequence: Synthetic peptide
  Seed: DPRMCSLMQGSTLPR
DPRMFSLEQPSTIPR

SEQ ID NO: 58069 - protein, 15 aa, Artificial Sequence
  Description of Artificial Sequence: Synthetic peptide
  Seed: DPRMCSLMQGSTLPR
DPRMFSLEQPSTLPR

SEQ ID NO: 58070 - protein, 15 aa, Artificial Sequence
  Description of Artificial Sequence: Synthetic peptide
  Seed: DPRMCSLMQGSTLPR
DPRMFSLEQPSTVPR

SEQ ID NO: 58071 - protein, 15 aa, Artificial Sequence
  Description of Artificial Sequence: Synthetic peptide
  Seed: DPRMCSLMQGSTLPR
DPRMFSLEQSSTAPR

SEQ ID NO: 58072 - protein, 15 aa, Artificial Sequence
  Description of Artificial Sequence: Synthetic peptide
  Seed: DPRMCSLMQGSTLPR
DPRMFSLEQSSTIPR

SEQ ID NO: 58073 - protein, 15 aa, Artificial Sequence
  Description of Artificial Sequence: Synthetic peptide
  Seed: DPRMCSLMQGSTLPR
DPRMFSLEQSSTLPR

SEQ ID NO: 58074 - protein, 15 aa, Artificial Sequence
  Description of Artificial Sequence: Synthetic peptide
  Seed: DPRMCSLMQGSTLPR
DPRMFSLEQSSTMPR

SEQ ID NO: 58075 - protein, 15 aa, Artificial Sequence
  Description of Artificial Sequence: Synthetic peptide
  Seed: DPRMCSLMQGSTLPR
DPRMFSLEQSSTSPR

SEQ ID NO: 58076 - protein, 15 aa, Artificial Sequence
  Description of Artificial Sequence: Synthetic peptide
  Seed: DPRMCSLMQGSTLPR
DPRMFSLEQSSTTPR

SEQ ID NO: 58077 - protein, 15 aa, Artificial Sequence
  Description of Artificial Sequence: Synthetic peptide
  Seed: DPRMCSLMQGSTLPR
DPRMFSLEQSSTVPR

SEQ ID NO: 58078 - protein, 15 aa, Artificial Sequence
  Description of Artificial Sequence: Synthetic peptide
  Seed: DPRMCSLMQGSTLPR
DPRMFSLEQTSTIPR

SEQ ID NO: 58079 - protein, 15 aa, Artificial Sequence
  Description of Artificial Sequence: Synthetic peptide
  Seed: DPRMCSLMQGSTLPR
DPRMFSLEQTSTLPR

SEQ ID NO: 58080 - protein, 15 aa, Artificial Sequence
  Description of Artificial Sequence: Synthetic peptide
  Seed: DPRMCSLMQGSTLPR
DPRMFSLEQTSTVPR

SEQ ID NO: 58081 - protein, 15 aa, Artificial Sequence
  Description of Artificial Sequence: Synthetic peptide
  Seed: DPRMCSLMQGSTLPR
DPRMFSLEQVSTAPR

SEQ ID NO: 58082 - protein, 15 aa, Artificial Sequence
  Description of Artificial Sequence: Synthetic peptide
  Seed: DPRMCSLMQGSTLPR
DPRMFSLEQVSTLPR

SEQ ID NO: 58083 - protein, 15 aa, Artificial Sequence
  Description of Artificial Sequence: Synthetic peptide
  Seed: DPRMCSLMQGSTLPR
DPRMFSLEQVSTSPR

SEQ ID NO: 58084 - protein, 15 aa, Artificial Sequence
  Description of Artificial Sequence: Synthetic peptide
  Seed: DPRMCSLMQGSTLPR
DPRMFSLFQASTAPR

SEQ ID NO: 58085 - protein, 15 aa, Artificial Sequence
  Description of Artificial Sequence: Synthetic peptide
  Seed: DPRMCSLMQGSTLPR
DPRMFSLFQASTFPR

SEQ ID NO: 58086 - protein, 15 aa, Artificial Sequence
  Description of Artificial Sequence: Synthetic peptide
  Seed: DPRMCSLMQGSTLPR
DPRMFSLFQASTGPR

SEQ ID NO: 58087 - protein, 15 aa, Artificial Sequence
  Description of Artificial Sequence: Synthetic peptide
  Seed: DPRMCSLMQGSTLPR
DPRMFSLFQASTHPR

SEQ ID NO: 58088 - protein, 15 aa, Artificial Sequence
  Description of Artificial Sequence: Synthetic peptide
  Seed: DPRMCSLMQGSTLPR
DPRMFSLFQASTIPR

SEQ ID NO: 58089 - protein, 15 aa, Artificial Sequence
  Description of Artificial Sequence: Synthetic peptide
  Seed: DPRMCSLMQGSTLPR
DPRMFSLFQASTLPR

SEQ ID NO: 58090 - protein, 15 aa, Artificial Sequence
  Description of Artificial Sequence: Synthetic peptide
  Seed: DPRMCSLMQGSTLPR
DPRMFSLFQASTMPR

SEQ ID NO: 58091 - protein, 15 aa, Artificial Sequence
  Description of Artificial Sequence: Synthetic peptide
  Seed: DPRMCSLMQGSTLPR
DPRMFSLFQASTNPR

SEQ ID NO: 58092 - protein, 15 aa, Artificial Sequence
  Description of Artificial Sequence: Synthetic peptide
  Seed: DPRMCSLMQGSTLPR
DPRMFSLFQASTQPR

SEQ ID NO: 58093 - protein, 15 aa, Artificial Sequence
  Description of Artificial Sequence: Synthetic peptide
  Seed: DPRMCSLMQGSTLPR
DPRMFSLFQASTSPR

SEQ ID NO: 58094 - protein, 15 aa, Artificial Sequence
  Description of Artificial Sequence: Synthetic peptide
  Seed: DPRMCSLMQGSTLPR
DPRMFSLFQASTTPR

SEQ ID NO: 58095 - protein, 15 aa, Artificial Sequence
  Description of Artificial Sequence: Synthetic peptide
  Seed: DPRMCSLMQGSTLPR
DPRMFSLFQASTVPR

SEQ ID NO: 58096 - protein, 15 aa, Artificial Sequence
  Description of Artificial Sequence: Synthetic peptide
  Seed: DPRMCSLMQGSTLPR
DPRMFSLFQGSTAPR

SEQ ID NO: 58097 - protein, 15 aa, Artificial Sequence
  Description of Artificial Sequence: Synthetic peptide
  Seed: DPRMCSLMQGSTLPR
DPRMFSLFQGSTGPR

SEQ ID NO: 58098 - protein, 15 aa, Artificial Sequence
  Description of Artificial Sequence: Synthetic peptide
  Seed: DPRMCSLMQGSTLPR
DPRMFSLFQGSTIPR

SEQ ID NO: 58099 - protein, 15 aa, Artificial Sequence
  Description of Artificial Sequence: Synthetic peptide
  Seed: DPRMCSLMQGSTLPR
DPRMFSLFQGSTLPR

SEQ ID NO: 58100 - protein, 15 aa, Artificial Sequence
  Description of Artificial Sequence: Synthetic peptide
  Seed: DPRMCSLMQGSTLPR
DPRMFSLFQGSTMPR

SEQ ID NO: 58101 - protein, 15 aa, Artificial Sequence
  Description of Artificial Sequence: Synthetic peptide
  Seed: DPRMCSLMQGSTLPR
DPRMFSLFQGSTSPR

SEQ ID NO: 58102 - protein, 15 aa, Artificial Sequence
  Description of Artificial Sequence: Synthetic peptide
  Seed: DPRMCSLMQGSTLPR
DPRMFSLFQGSTTPR

SEQ ID NO: 58103 - protein, 15 aa, Artificial Sequence
  Description of Artificial Sequence: Synthetic peptide
  Seed: DPRMCSLMQGSTLPR
DPRMFSLFQGSTVPR

SEQ ID NO: 58104 - protein, 15 aa, Artificial Sequence
  Description of Artificial Sequence: Synthetic peptide
  Seed: DPRMCSLMQGSTLPR
DPRMFSLFQISTAPR

SEQ ID NO: 58105 - protein, 15 aa, Artificial Sequence
  Description of Artificial Sequence: Synthetic peptide
  Seed: DPRMCSLMQGSTLPR
DPRMFSLFQISTNPR

SEQ ID NO: 58106 - protein, 15 aa, Artificial Sequence
  Description of Artificial Sequence: Synthetic peptide
  Seed: DPRMCSLMQGSTLPR
DPRMFSLFQISTSPR

SEQ ID NO: 58107 - protein, 15 aa, Artificial Sequence
  Description of Artificial Sequence: Synthetic peptide
  Seed: DPRMCSLMQGSTLPR
DPRMFSLFQNSTAPR

SEQ ID NO: 58108 - protein, 15 aa, Artificial Sequence
  Description of Artificial Sequence: Synthetic peptide
  Seed: DPRMCSLMQGSTLPR
DPRMFSLFQNSTIPR

SEQ ID NO: 58109 - protein, 15 aa, Artificial Sequence
  Description of Artificial Sequence: Synthetic peptide
  Seed: DPRMCSLMQGSTLPR
DPRMFSLFQNSTLPR

SEQ ID NO: 58110 - protein, 15 aa, Artificial Sequence
  Description of Artificial Sequence: Synthetic peptide
  Seed: DPRMCSLMQGSTLPR
DPRMFSLFQNSTVPR

SEQ ID NO: 58111 - protein, 15 aa, Artificial Sequence
  Description of Artificial Sequence: Synthetic peptide
  Seed: DPRMCSLMQGSTLPR
DPRMFSLFQPSTAPR

SEQ ID NO: 58112 - protein, 15 aa, Artificial Sequence
  Description of Artificial Sequence: Synthetic peptide
  Seed: DPRMCSLMQGSTLPR
DPRMFSLFQPSTGPR

SEQ ID NO: 58113 - protein, 15 aa, Artificial Sequence
  Description of Artificial Sequence: Synthetic peptide
  Seed: DPRMCSLMQGSTLPR
DPRMFSLFQPSTHPR

SEQ ID NO: 58114 - protein, 15 aa, Artificial Sequence
  Description of Artificial Sequence: Synthetic peptide
  Seed: DPRMCSLMQGSTLPR
DPRMFSLFQPSTIPR

SEQ ID NO: 58115 - protein, 15 aa, Artificial Sequence
  Description of Artificial Sequence: Synthetic peptide
  Seed: DPRMCSLMQGSTLPR
DPRMFSLFQPSTLPR

SEQ ID NO: 58116 - protein, 15 aa, Artificial Sequence
  Description of Artificial Sequence: Synthetic peptide
  Seed: DPRMCSLMQGSTLPR
DPRMFSLFQPSTMPR

SEQ ID NO: 58117 - protein, 15 aa, Artificial Sequence
  Description of Artificial Sequence: Synthetic peptide
  Seed: DPRMCSLMQGSTLPR
DPRMFSLFQPSTNPR

SEQ ID NO: 58118 - protein, 15 aa, Artificial Sequence
  Description of Artificial Sequence: Synthetic peptide
  Seed: DPRMCSLMQGSTLPR
DPRMFSLFQPSTSPR

SEQ ID NO: 58119 - protein, 15 aa, Artificial Sequence
  Description of Artificial Sequence: Synthetic peptide
  Seed: DPRMCSLMQGSTLPR
DPRMFSLFQPSTTPR

SEQ ID NO: 58120 - protein, 15 aa, Artificial Sequence
  Description of Artificial Sequence: Synthetic peptide
  Seed: DPRMCSLMQGSTLPR
DPRMFSLFQPSTVPR

SEQ ID NO: 58121 - protein, 15 aa, Artificial Sequence
  Description of Artificial Sequence: Synthetic peptide
  Seed: DPRMCSLMQGSTLPR
DPRMFSLFQSSTGPR

SEQ ID NO: 58122 - protein, 15 aa, Artificial Sequence
  Description of Artificial Sequence: Synthetic peptide
  Seed: DPRMCSLMQGSTLPR
DPRMFSLFQSSTIPR

SEQ ID NO: 58123 - protein, 15 aa, Artificial Sequence
  Description of Artificial Sequence: Synthetic peptide
  Seed: DPRMCSLMQGSTLPR
DPRMFSLFQSSTLPR

SEQ ID NO: 58124 - protein, 15 aa, Artificial Sequence
  Description of Artificial Sequence: Synthetic peptide
  Seed: DPRMCSLMQGSTLPR
DPRMFSLFQSSTMPR

SEQ ID NO: 58125 - protein, 15 aa, Artificial Sequence
  Description of Artificial Sequence: Synthetic peptide
  Seed: DPRMCSLMQGSTLPR
DPRMFSLFQSSTNPR

SEQ ID NO: 58126 - protein, 15 aa, Artificial Sequence
  Description of Artificial Sequence: Synthetic peptide
  Seed: DPRMCSLMQGSTLPR
DPRMFSLFQSSTSPR

SEQ ID NO: 58127 - protein, 15 aa, Artificial Sequence
  Description of Artificial Sequence: Synthetic peptide
  Seed: DPRMCSLMQGSTLPR
DPRMFSLFQSSTTPR

SEQ ID NO: 58128 - protein, 15 aa, Artificial Sequence
  Description of Artificial Sequence: Synthetic peptide
  Seed: DPRMCSLMQGSTLPR
DPRMFSLFQSSTVPR

SEQ ID NO: 58129 - protein, 15 aa, Artificial Sequence
  Description of Artificial Sequence: Synthetic peptide
  Seed: DPRMCSLMQGSTLPR
DPRMFSLFQTSTAPR

SEQ ID NO: 58130 - protein, 15 aa, Artificial Sequence
  Description of Artificial Sequence: Synthetic peptide
  Seed: DPRMCSLMQGSTLPR
DPRMFSLFQTSTIPR

SEQ ID NO: 58131 - protein, 15 aa, Artificial Sequence
  Description of Artificial Sequence: Synthetic peptide
  Seed: DPRMCSLMQGSTLPR
DPRMFSLFQTSTLPR

SEQ ID NO: 58132 - protein, 15 aa, Artificial Sequence
  Description of Artificial Sequence: Synthetic peptide
  Seed: DPRMCSLMQGSTLPR
DPRMFSLFQTSTMPR

SEQ ID NO: 58133 - protein, 15 aa, Artificial Sequence
  Description of Artificial Sequence: Synthetic peptide
  Seed: DPRMCSLMQGSTLPR
DPRMFSLFQTSTNPR

SEQ ID NO: 58134 - protein, 15 aa, Artificial Sequence
  Description of Artificial Sequence: Synthetic peptide
  Seed: DPRMCSLMQGSTLPR
DPRMFSLFQTSTSPR

SEQ ID NO: 58135 - protein, 15 aa, Artificial Sequence
  Description of Artificial Sequence: Synthetic peptide
  Seed: DPRMCSLMQGSTLPR
DPRMFSLFQTSTTPR

SEQ ID NO: 58136 - protein, 15 aa, Artificial Sequence
  Description of Artificial Sequence: Synthetic peptide
  Seed: DPRMCSLMQGSTLPR
DPRMFSLFQTSTVPR

SEQ ID NO: 58137 - protein, 15 aa, Artificial Sequence
  Description of Artificial Sequence: Synthetic peptide
  Seed: DPRMCSLMQGSTLPR
DPRMFSLFQVSTAPR

SEQ ID NO: 58138 - protein, 15 aa, Artificial Sequence
  Description of Artificial Sequence: Synthetic peptide
  Seed: DPRMCSLMQGSTLPR
DPRMFSLFQVSTLPR

SEQ ID NO: 58139 - protein, 15 aa, Artificial Sequence
  Description of Artificial Sequence: Synthetic peptide
  Seed: DPRMCSLMQGSTLPR
DPRMFSLFQVSTNPR

SEQ ID NO: 58140 - protein, 15 aa, Artificial Sequence
  Description of Artificial Sequence: Synthetic peptide
  Seed: DPRMCSLMQGSTLPR
DPRMFSLFQVSTSPR

SEQ ID NO: 58141 - protein, 15 aa, Artificial Sequence
  Description of Artificial Sequence: Synthetic peptide
  Seed: DPRMCSLMQGSTLPR
DPRMFSLFQVSTTPR

SEQ ID NO: 58142 - protein, 15 aa, Artificial Sequence
  Description of Artificial Sequence: Synthetic peptide
  Seed: DPRMCSLMQGSTLPR
DPRMFSLFQVSTVPR

SEQ ID NO: 58143 - protein, 15 aa, Artificial Sequence
  Description of Artificial Sequence: Synthetic peptide
  Seed: DPRMCSLMQGSTLPR
DPRMFSLGQASTAPR

SEQ ID NO: 58144 - protein, 15 aa, Artificial Sequence
  Description of Artificial Sequence: Synthetic peptide
  Seed: DPRMCSLMQGSTLPR
DPRMFSLGQASTFPR

SEQ ID NO: 58145 - protein, 15 aa, Artificial Sequence
  Description of Artificial Sequence: Synthetic peptide
  Seed: DPRMCSLMQGSTLPR
DPRMFSLGQASTIPR

SEQ ID NO: 58146 - protein, 15 aa, Artificial Sequence
  Description of Artificial Sequence: Synthetic peptide
  Seed: DPRMCSLMQGSTLPR
DPRMFSLGQASTLPR

SEQ ID NO: 58147 - protein, 15 aa, Artificial Sequence
  Description of Artificial Sequence: Synthetic peptide
  Seed: DPRMCSLMQGSTLPR
DPRMFSLGQASTMPR

SEQ ID NO: 58148 - protein, 15 aa, Artificial Sequence
  Description of Artificial Sequence: Synthetic peptide
  Seed: DPRMCSLMQGSTLPR
DPRMFSLGQASTSPR

SEQ ID NO: 58149 - protein, 15 aa, Artificial Sequence
  Description of Artificial Sequence: Synthetic peptide
  Seed: DPRMCSLMQGSTLPR
DPRMFSLGQASTTPR

SEQ ID NO: 58150 - protein, 15 aa, Artificial Sequence
  Description of Artificial Sequence: Synthetic peptide
  Seed: DPRMCSLMQGSTLPR
DPRMFSLGQASTVPR

SEQ ID NO: 58151 - protein, 15 aa, Artificial Sequence
  Description of Artificial Sequence: Synthetic peptide
  Seed: DPRMCSLMQGSTLPR
DPRMFSLGQGSTAPR

SEQ ID NO: 58152 - protein, 15 aa, Artificial Sequence
  Description of Artificial Sequence: Synthetic peptide
  Seed: DPRMCSLMQGSTLPR
DPRMFSLGQGSTIPR

SEQ ID NO: 58153 - protein, 15 aa, Artificial Sequence
  Description of Artificial Sequence: Synthetic peptide
  Seed: DPRMCSLMQGSTLPR
DPRMFSLGQGSTLPR

SEQ ID NO: 58154 - protein, 15 aa, Artificial Sequence
  Description of Artificial Sequence: Synthetic peptide
  Seed: DPRMCSLMQGSTLPR
DPRMFSLGQGSTMPR

SEQ ID NO: 58155 - protein, 15 aa, Artificial Sequence
  Description of Artificial Sequence: Synthetic peptide
  Seed: DPRMCSLMQGSTLPR
DPRMFSLGQGSTVPR

SEQ ID NO: 58156 - protein, 15 aa, Artificial Sequence
  Description of Artificial Sequence: Synthetic peptide
  Seed: DPRMCSLMQGSTLPR
DPRMFSLGQNSTIPR

SEQ ID NO: 58157 - protein, 15 aa, Artificial Sequence
  Description of Artificial Sequence: Synthetic peptide
  Seed: DPRMCSLMQGSTLPR
DPRMFSLGQNSTLPR

SEQ ID NO: 58158 - protein, 15 aa, Artificial Sequence
  Description of Artificial Sequence: Synthetic peptide
  Seed: DPRMCSLMQGSTLPR
DPRMFSLGQNSTVPR

SEQ ID NO: 58159 - protein, 15 aa, Artificial Sequence
  Description of Artificial Sequence: Synthetic peptide
  Seed: DPRMCSLMQGSTLPR
DPRMFSLGQPSTIPR

SEQ ID NO: 58160 - protein, 15 aa, Artificial Sequence
  Description of Artificial Sequence: Synthetic peptide
  Seed: DPRMCSLMQGSTLPR
DPRMFSLGQPSTLPR

SEQ ID NO: 58161 - protein, 15 aa, Artificial Sequence
  Description of Artificial Sequence: Synthetic peptide
  Seed: DPRMCSLMQGSTLPR
DPRMFSLGQPSTMPR

SEQ ID NO: 58162 - protein, 15 aa, Artificial Sequence
  Description of Artificial Sequence: Synthetic peptide
  Seed: DPRMCSLMQGSTLPR
DPRMFSLGQPSTVPR

SEQ ID NO: 58163 - protein, 15 aa, Artificial Sequence
  Description of Artificial Sequence: Synthetic peptide
  Seed: DPRMCSLMQGSTLPR
DPRMFSLGQSSTAPR

SEQ ID NO: 58164 - protein, 15 aa, Artificial Sequence
  Description of Artificial Sequence: Synthetic peptide
  Seed: DPRMCSLMQGSTLPR
DPRMFSLGQSSTIPR

SEQ ID NO: 58165 - protein, 15 aa, Artificial Sequence
  Description of Artificial Sequence: Synthetic peptide
  Seed: DPRMCSLMQGSTLPR
DPRMFSLGQSSTLPR

SEQ ID NO: 58166 - protein, 15 aa, Artificial Sequence
  Description of Artificial Sequence: Synthetic peptide
  Seed: DPRMCSLMQGSTLPR
DPRMFSLGQSSTMPR

SEQ ID NO: 58167 - protein, 15 aa, Artificial Sequence
  Description of Artificial Sequence: Synthetic peptide
  Seed: DPRMCSLMQGSTLPR
DPRMFSLGQSSTVPR

SEQ ID NO: 58168 - protein, 15 aa, Artificial Sequence
  Description of Artificial Sequence: Synthetic peptide
  Seed: DPRMCSLMQGSTLPR
DPRMFSLGQTSTIPR

SEQ ID NO: 58169 - protein, 15 aa, Artificial Sequence
  Description of Artificial Sequence: Synthetic peptide
  Seed: DPRMCSLMQGSTLPR
DPRMFSLGQTSTLPR

SEQ ID NO: 58170 - protein, 15 aa, Artificial Sequence
  Description of Artificial Sequence: Synthetic peptide
  Seed: DPRMCSLMQGSTLPR
DPRMFSLGQTSTVPR

SEQ ID NO: 58171 - protein, 15 aa, Artificial Sequence
  Description of Artificial Sequence: Synthetic peptide
  Seed: DPRMCSLMQGSTLPR
DPRMFSLGQVSTIPR

SEQ ID NO: 58172 - protein, 15 aa, Artificial Sequence
  Description of Artificial Sequence: Synthetic peptide
  Seed: DPRMCSLMQGSTLPR
DPRMFSLGQVSTLPR

SEQ ID NO: 58173 - protein, 15 aa, Artificial Sequence
  Description of Artificial Sequence: Synthetic peptide
  Seed: DPRMCSLMQGSTLPR
DPRMFSLGQVSTVPR

SEQ ID NO: 58174 - protein, 15 aa, Artificial Sequence
  Description of Artificial Sequence: Synthetic peptide
  Seed: DPRMCSLMQGSTLPR
DPRMFSLHQASTAPR

SEQ ID NO: 58175 - protein, 15 aa, Artificial Sequence
  Description of Artificial Sequence: Synthetic peptide
  Seed: DPRMCSLMQGSTLPR
DPRMFSLHQASTIPR

SEQ ID NO: 58176 - protein, 15 aa, Artificial Sequence
  Description of Artificial Sequence: Synthetic peptide
  Seed: DPRMCSLMQGSTLPR
DPRMFSLHQASTLPR

SEQ ID NO: 58177 - protein, 15 aa, Artificial Sequence
  Description of Artificial Sequence: Synthetic peptide
  Seed: DPRMCSLMQGSTLPR
DPRMFSLHQASTMPR

SEQ ID NO: 58178 - protein, 15 aa, Artificial Sequence
  Description of Artificial Sequence: Synthetic peptide
  Seed: DPRMCSLMQGSTLPR
DPRMFSLHQASTVPR

SEQ ID NO: 58179 - protein, 15 aa, Artificial Sequence
  Description of Artificial Sequence: Synthetic peptide
  Seed: DPRMCSLMQGSTLPR
DPRMFSLHQGSTAPR

SEQ ID NO: 58180 - protein, 15 aa, Artificial Sequence
  Description of Artificial Sequence: Synthetic peptide
  Seed: DPRMCSLMQGSTLPR
DPRMFSLHQGSTIPR

SEQ ID NO: 58181 - protein, 15 aa, Artificial Sequence
  Description of Artificial Sequence: Synthetic peptide
  Seed: DPRMCSLMQGSTLPR
DPRMFSLHQGSTLPR

SEQ ID NO: 58182 - protein, 15 aa, Artificial Sequence
  Description of Artificial Sequence: Synthetic peptide
  Seed: DPRMCSLMQGSTLPR
DPRMFSLHQGSTVPR

SEQ ID NO: 58183 - protein, 15 aa, Artificial Sequence
  Description of Artificial Sequence: Synthetic peptide
  Seed: DPRMCSLMQGSTLPR
DPRMFSLHQPSTLPR

SEQ ID NO: 58184 - protein, 15 aa, Artificial Sequence
  Description of Artificial Sequence: Synthetic peptide
  Seed: DPRMCSLMQGSTLPR
DPRMFSLHQPSTVPR

SEQ ID NO: 58185 - protein, 15 aa, Artificial Sequence
  Description of Artificial Sequence: Synthetic peptide
  Seed: DPRMCSLMQGSTLPR
DPRMFSLHQSSTAPR

SEQ ID NO: 58186 - protein, 15 aa, Artificial Sequence
  Description of Artificial Sequence: Synthetic peptide
  Seed: DPRMCSLMQGSTLPR
DPRMFSLHQSSTIPR

SEQ ID NO: 58187 - protein, 15 aa, Artificial Sequence
  Description of Artificial Sequence: Synthetic peptide
  Seed: DPRMCSLMQGSTLPR
DPRMFSLHQSSTLPR

SEQ ID NO: 58188 - protein, 15 aa, Artificial Sequence
  Description of Artificial Sequence: Synthetic peptide
  Seed: DPRMCSLMQGSTLPR
DPRMFSLHQSSTMPR

SEQ ID NO: 58189 - protein, 15 aa, Artificial Sequence
  Description of Artificial Sequence: Synthetic peptide
  Seed: DPRMCSLMQGSTLPR
DPRMFSLHQSSTVPR

SEQ ID NO: 58190 - protein, 15 aa, Artificial Sequence
  Description of Artificial Sequence: Synthetic peptide
  Seed: DPRMCSLMQGSTLPR
DPRMFSLHQTSTIPR

SEQ ID NO: 58191 - protein, 15 aa, Artificial Sequence
  Description of Artificial Sequence: Synthetic peptide
  Seed: DPRMCSLMQGSTLPR
DPRMFSLIQASTAPR

SEQ ID NO: 58192 - protein, 15 aa, Artificial Sequence
  Description of Artificial Sequence: Synthetic peptide
  Seed: DPRMCSLMQGSTLPR
DPRMFSLIQASTCPR

SEQ ID NO: 58193 - protein, 15 aa, Artificial Sequence
  Description of Artificial Sequence: Synthetic peptide
  Seed: DPRMCSLMQGSTLPR
DPRMFSLIQASTDPR

SEQ ID NO: 58194 - protein, 15 aa, Artificial Sequence
  Description of Artificial Sequence: Synthetic peptide
  Seed: DPRMCSLMQGSTLPR
DPRMFSLIQASTEPR

SEQ ID NO: 58195 - protein, 15 aa, Artificial Sequence
  Description of Artificial Sequence: Synthetic peptide
  Seed: DPRMCSLMQGSTLPR
DPRMFSLIQASTFPR

SEQ ID NO: 58196 - protein, 15 aa, Artificial Sequence
  Description of Artificial Sequence: Synthetic peptide
  Seed: DPRMCSLMQGSTLPR
DPRMFSLIQASTGPR

SEQ ID NO: 58197 - protein, 15 aa, Artificial Sequence
  Description of Artificial Sequence: Synthetic peptide
  Seed: DPRMCSLMQGSTLPR
DPRMFSLIQASTHPR

SEQ ID NO: 58198 - protein, 15 aa, Artificial Sequence
  Description of Artificial Sequence: Synthetic peptide
  Seed: DPRMCSLMQGSTLPR
DPRMFSLIQASTIPR

SEQ ID NO: 58199 - protein, 15 aa, Artificial Sequence
  Description of Artificial Sequence: Synthetic peptide
  Seed: DPRMCSLMQGSTLPR
DPRMFSLIQASTKPR

SEQ ID NO: 58200 - protein, 15 aa, Artificial Sequence
  Description of Artificial Sequence: Synthetic peptide
  Seed: DPRMCSLMQGSTLPR
DPRMFSLIQASTLPR

SEQ ID NO: 58201 - protein, 15 aa, Artificial Sequence
  Description of Artificial Sequence: Synthetic peptide
  Seed: DPRMCSLMQGSTLPR
DPRMFSLIQASTMPR

SEQ ID NO: 58202 - protein, 15 aa, Artificial Sequence
  Description of Artificial Sequence: Synthetic peptide
  Seed: DPRMCSLMQGSTLPR
DPRMFSLIQASTNPR

SEQ ID NO: 58203 - protein, 15 aa, Artificial Sequence
  Description of Artificial Sequence: Synthetic peptide
  Seed: DPRMCSLMQGSTLPR
DPRMFSLIQASTPPR

SEQ ID NO: 58204 - protein, 15 aa, Artificial Sequence
  Description of Artificial Sequence: Synthetic peptide
  Seed: DPRMCSLMQGSTLPR
DPRMFSLIQASTQPR

SEQ ID NO: 58205 - protein, 15 aa, Artificial Sequence
  Description of Artificial Sequence: Synthetic peptide
  Seed: DPRMCSLMQGSTLPR
DPRMFSLIQASTRPR

SEQ ID NO: 58206 - protein, 15 aa, Artificial Sequence
  Description of Artificial Sequence: Synthetic peptide
  Seed: DPRMCSLMQGSTLPR
DPRMFSLIQASTSPR

SEQ ID NO: 58207 - protein, 15 aa, Artificial Sequence
  Description of Artificial Sequence: Synthetic peptide
  Seed: DPRMCSLMQGSTLPR
DPRMFSLIQASTTPR

SEQ ID NO: 58208 - protein, 15 aa, Artificial Sequence
  Description of Artificial Sequence: Synthetic peptide
  Seed: DPRMCSLMQGSTLPR
DPRMFSLIQASTVPR

SEQ ID NO: 58209 - protein, 15 aa, Artificial Sequence
  Description of Artificial Sequence: Synthetic peptide
  Seed: DPRMCSLMQGSTLPR
DPRMFSLIQASTWPR

SEQ ID NO: 58210 - protein, 15 aa, Artificial Sequence
  Description of Artificial Sequence: Synthetic peptide
  Seed: DPRMCSLMQGSTLPR
DPRMFSLIQASTYPR

SEQ ID NO: 58211 - protein, 15 aa, Artificial Sequence
  Description of Artificial Sequence: Synthetic peptide
  Seed: DPRMCSLMQGSTLPR
DPRMFSLIQCSTAPR

SEQ ID NO: 58212 - protein, 15 aa, Artificial Sequence
  Description of Artificial Sequence: Synthetic peptide
  Seed: DPRMCSLMQGSTLPR
DPRMFSLIQCSTIPR

SEQ ID NO: 58213 - protein, 15 aa, Artificial Sequence
  Description of Artificial Sequence: Synthetic peptide
  Seed: DPRMCSLMQGSTLPR
DPRMFSLIQCSTLPR

SEQ ID NO: 58214 - protein, 15 aa, Artificial Sequence
  Description of Artificial Sequence: Synthetic peptide
  Seed: DPRMCSLMQGSTLPR
DPRMFSLIQCSTSPR

SEQ ID NO: 58215 - protein, 15 aa, Artificial Sequence
  Description of Artificial Sequence: Synthetic peptide
  Seed: DPRMCSLMQGSTLPR
DPRMFSLIQCSTVPR

SEQ ID NO: 58216 - protein, 15 aa, Artificial Sequence
  Description of Artificial Sequence: Synthetic peptide
  Seed: DPRMCSLMQGSTLPR
DPRMFSLIQESTAPR

SEQ ID NO: 58217 - protein, 15 aa, Artificial Sequence
  Description of Artificial Sequence: Synthetic peptide
  Seed: DPRMCSLMQGSTLPR
DPRMFSLIQESTLPR

SEQ ID NO: 58218 - protein, 15 aa, Artificial Sequence
  Description of Artificial Sequence: Synthetic peptide
  Seed: DPRMCSLMQGSTLPR
DPRMFSLIQGSTAPR

SEQ ID NO: 58219 - protein, 15 aa, Artificial Sequence
  Description of Artificial Sequence: Synthetic peptide
  Seed: DPRMCSLMQGSTLPR
DPRMFSLIQGSTCPR

SEQ ID NO: 58220 - protein, 15 aa, Artificial Sequence
  Description of Artificial Sequence: Synthetic peptide
  Seed: DPRMCSLMQGSTLPR
DPRMFSLIQGSTDPR

SEQ ID NO: 58221 - protein, 15 aa, Artificial Sequence
  Description of Artificial Sequence: Synthetic peptide
  Seed: DPRMCSLMQGSTLPR
DPRMFSLIQGSTFPR

SEQ ID NO: 58222 - protein, 15 aa, Artificial Sequence
  Description of Artificial Sequence: Synthetic peptide
  Seed: DPRMCSLMQGSTLPR
DPRMFSLIQGSTGPR

SEQ ID NO: 58223 - protein, 15 aa, Artificial Sequence
  Description of Artificial Sequence: Synthetic peptide
  Seed: DPRMCSLMQGSTLPR
DPRMFSLIQGSTHPR

SEQ ID NO: 58224 - protein, 15 aa, Artificial Sequence
  Description of Artificial Sequence: Synthetic peptide
  Seed: DPRMCSLMQGSTLPR
DPRMFSLIQGSTIPR

SEQ ID NO: 58225 - protein, 15 aa, Artificial Sequence
  Description of Artificial Sequence: Synthetic peptide
  Seed: DPRMCSLMQGSTLPR
DPRMFSLIQGSTLPR

SEQ ID NO: 58226 - protein, 15 aa, Artificial Sequence
  Description of Artificial Sequence: Synthetic peptide
  Seed: DPRMCSLMQGSTLPR
DPRMFSLIQGSTMPR

SEQ ID NO: 58227 - protein, 15 aa, Artificial Sequence
  Description of Artificial Sequence: Synthetic peptide
  Seed: DPRMCSLMQGSTLPR
DPRMFSLIQGSTNPR

SEQ ID NO: 58228 - protein, 15 aa, Artificial Sequence
  Description of Artificial Sequence: Synthetic peptide
  Seed: DPRMCSLMQGSTLPR
DPRMFSLIQGSTPPR

SEQ ID NO: 58229 - protein, 15 aa, Artificial Sequence
  Description of Artificial Sequence: Synthetic peptide
  Seed: DPRMCSLMQGSTLPR
DPRMFSLIQGSTQPR

SEQ ID NO: 58230 - protein, 15 aa, Artificial Sequence
  Description of Artificial Sequence: Synthetic peptide
  Seed: DPRMCSLMQGSTLPR
DPRMFSLIQGSTSPR

SEQ ID NO: 58231 - protein, 15 aa, Artificial Sequence
  Description of Artificial Sequence: Synthetic peptide
  Seed: DPRMCSLMQGSTLPR
DPRMFSLIQGSTTPR

SEQ ID NO: 58232 - protein, 15 aa, Artificial Sequence
  Description of Artificial Sequence: Synthetic peptide
  Seed: DPRMCSLMQGSTLPR
DPRMFSLIQGSTVPR

SEQ ID NO: 58233 - protein, 15 aa, Artificial Sequence
  Description of Artificial Sequence: Synthetic peptide
  Seed: DPRMCSLMQGSTLPR
DPRMFSLIQGSTWPR

SEQ ID NO: 58234 - protein, 15 aa, Artificial Sequence
  Description of Artificial Sequence: Synthetic peptide
  Seed: DPRMCSLMQGSTLPR
DPRMFSLIQGSTYPR

SEQ ID NO: 58235 - protein, 15 aa, Artificial Sequence
  Description of Artificial Sequence: Synthetic peptide
  Seed: DPRMCSLMQGSTLPR
DPRMFSLIQHSTAPR

SEQ ID NO: 58236 - protein, 15 aa, Artificial Sequence
  Description of Artificial Sequence: Synthetic peptide
  Seed: DPRMCSLMQGSTLPR
DPRMFSLIQHSTIPR

SEQ ID NO: 58237 - protein, 15 aa, Artificial Sequence
  Description of Artificial Sequence: Synthetic peptide
  Seed: DPRMCSLMQGSTLPR
DPRMFSLIQHSTLPR

SEQ ID NO: 58238 - protein, 15 aa, Artificial Sequence
  Description of Artificial Sequence: Synthetic peptide
  Seed: DPRMCSLMQGSTLPR
DPRMFSLIQHSTMPR

SEQ ID NO: 58239 - protein, 15 aa, Artificial Sequence
  Description of Artificial Sequence: Synthetic peptide
  Seed: DPRMCSLMQGSTLPR
DPRMFSLIQHSTSPR

SEQ ID NO: 58240 - protein, 15 aa, Artificial Sequence
  Description of Artificial Sequence: Synthetic peptide
  Seed: DPRMCSLMQGSTLPR
DPRMFSLIQHSTVPR

SEQ ID NO: 58241 - protein, 15 aa, Artificial Sequence
  Description of Artificial Sequence: Synthetic peptide
  Seed: DPRMCSLMQGSTLPR
DPRMFSLIQISTAPR

SEQ ID NO: 58242 - protein, 15 aa, Artificial Sequence
  Description of Artificial Sequence: Synthetic peptide
  Seed: DPRMCSLMQGSTLPR
DPRMFSLIQISTCPR

SEQ ID NO: 58243 - protein, 15 aa, Artificial Sequence
  Description of Artificial Sequence: Synthetic peptide
  Seed: DPRMCSLMQGSTLPR
DPRMFSLIQISTDPR

SEQ ID NO: 58244 - protein, 15 aa, Artificial Sequence
  Description of Artificial Sequence: Synthetic peptide
  Seed: DPRMCSLMQGSTLPR
DPRMFSLIQISTEPR

SEQ ID NO: 58245 - protein, 15 aa, Artificial Sequence
  Description of Artificial Sequence: Synthetic peptide
  Seed: DPRMCSLMQGSTLPR
DPRMFSLIQISTGPR

SEQ ID NO: 58246 - protein, 15 aa, Artificial Sequence
  Description of Artificial Sequence: Synthetic peptide
  Seed: DPRMCSLMQGSTLPR
DPRMFSLIQISTHPR

SEQ ID NO: 58247 - protein, 15 aa, Artificial Sequence
  Description of Artificial Sequence: Synthetic peptide
  Seed: DPRMCSLMQGSTLPR
DPRMFSLIQISTIPR

SEQ ID NO: 58248 - protein, 15 aa, Artificial Sequence
  Description of Artificial Sequence: Synthetic peptide
  Seed: DPRMCSLMQGSTLPR
DPRMFSLIQISTLPR

SEQ ID NO: 58249 - protein, 15 aa, Artificial Sequence
  Description of Artificial Sequence: Synthetic peptide
  Seed: DPRMCSLMQGSTLPR
DPRMFSLIQISTMPR

SEQ ID NO: 58250 - protein, 15 aa, Artificial Sequence
  Description of Artificial Sequence: Synthetic peptide
  Seed: DPRMCSLMQGSTLPR
DPRMFSLIQISTNPR

SEQ ID NO: 58251 - protein, 15 aa, Artificial Sequence
  Description of Artificial Sequence: Synthetic peptide
  Seed: DPRMCSLMQGSTLPR
DPRMFSLIQISTPPR

SEQ ID NO: 58252 - protein, 15 aa, Artificial Sequence
  Description of Artificial Sequence: Synthetic peptide
  Seed: DPRMCSLMQGSTLPR
DPRMFSLIQISTQPR

SEQ ID NO: 58253 - protein, 15 aa, Artificial Sequence
  Description of Artificial Sequence: Synthetic peptide
  Seed: DPRMCSLMQGSTLPR
DPRMFSLIQISTSPR

SEQ ID NO: 58254 - protein, 15 aa, Artificial Sequence
  Description of Artificial Sequence: Synthetic peptide
  Seed: DPRMCSLMQGSTLPR
DPRMFSLIQISTTPR

SEQ ID NO: 58255 - protein, 15 aa, Artificial Sequence
  Description of Artificial Sequence: Synthetic peptide
  Seed: DPRMCSLMQGSTLPR
DPRMFSLIQISTVPR

SEQ ID NO: 58256 - protein, 15 aa, Artificial Sequence
  Description of Artificial Sequence: Synthetic peptide
  Seed: DPRMCSLMQGSTLPR
DPRMFSLIQLSTAPR

SEQ ID NO: 58257 - protein, 15 aa, Artificial Sequence
  Description of Artificial Sequence: Synthetic peptide
  Seed: DPRMCSLMQGSTLPR
DPRMFSLIQLSTGPR

SEQ ID NO: 58258 - protein, 15 aa, Artificial Sequence
  Description of Artificial Sequence: Synthetic peptide
  Seed: DPRMCSLMQGSTLPR
DPRMFSLIQLSTHPR

SEQ ID NO: 58259 - protein, 15 aa, Artificial Sequence
  Description of Artificial Sequence: Synthetic peptide
  Seed: DPRMCSLMQGSTLPR
DPRMFSLIQLSTIPR

SEQ ID NO: 58260 - protein, 15 aa, Artificial Sequence
  Description of Artificial Sequence: Synthetic peptide
  Seed: DPRMCSLMQGSTLPR
DPRMFSLIQLSTLPR

SEQ ID NO: 58261 - protein, 15 aa, Artificial Sequence
  Description of Artificial Sequence: Synthetic peptide
  Seed: DPRMCSLMQGSTLPR
DPRMFSLIQLSTMPR

SEQ ID NO: 58262 - protein, 15 aa, Artificial Sequence
  Description of Artificial Sequence: Synthetic peptide
  Seed: DPRMCSLMQGSTLPR
DPRMFSLIQLSTNPR

SEQ ID NO: 58263 - protein, 15 aa, Artificial Sequence
  Description of Artificial Sequence: Synthetic peptide
  Seed: DPRMCSLMQGSTLPR
DPRMFSLIQLSTSPR

SEQ ID NO: 58264 - protein, 15 aa, Artificial Sequence
  Description of Artificial Sequence: Synthetic peptide
  Seed: DPRMCSLMQGSTLPR
DPRMFSLIQLSTTPR

SEQ ID NO: 58265 - protein, 15 aa, Artificial Sequence
  Description of Artificial Sequence: Synthetic peptide
  Seed: DPRMCSLMQGSTLPR
DPRMFSLIQLSTVPR

SEQ ID NO: 58266 - protein, 15 aa, Artificial Sequence
  Description of Artificial Sequence: Synthetic peptide
  Seed: DPRMCSLMQGSTLPR
DPRMFSLIQMSTAPR

SEQ ID NO: 58267 - protein, 15 aa, Artificial Sequence
  Description of Artificial Sequence: Synthetic peptide
  Seed: DPRMCSLMQGSTLPR
DPRMFSLIQMSTGPR

SEQ ID NO: 58268 - protein, 15 aa, Artificial Sequence
  Description of Artificial Sequence: Synthetic peptide
  Seed: DPRMCSLMQGSTLPR
DPRMFSLIQMSTHPR

SEQ ID NO: 58269 - protein, 15 aa, Artificial Sequence
  Description of Artificial Sequence: Synthetic peptide
  Seed: DPRMCSLMQGSTLPR
DPRMFSLIQMSTIPR

SEQ ID NO: 58270 - protein, 15 aa, Artificial Sequence
  Description of Artificial Sequence: Synthetic peptide
  Seed: DPRMCSLMQGSTLPR
DPRMFSLIQMSTLPR

SEQ ID NO: 58271 - protein, 15 aa, Artificial Sequence
  Description of Artificial Sequence: Synthetic peptide
  Seed: DPRMCSLMQGSTLPR
DPRMFSLIQMSTMPR

SEQ ID NO: 58272 - protein, 15 aa, Artificial Sequence
  Description of Artificial Sequence: Synthetic peptide
  Seed: DPRMCSLMQGSTLPR
DPRMFSLIQMSTNPR

SEQ ID NO: 58273 - protein, 15 aa, Artificial Sequence
  Description of Artificial Sequence: Synthetic peptide
  Seed: DPRMCSLMQGSTLPR
DPRMFSLIQMSTSPR

SEQ ID NO: 58274 - protein, 15 aa, Artificial Sequence
  Description of Artificial Sequence: Synthetic peptide
  Seed: DPRMCSLMQGSTLPR
DPRMFSLIQMSTTPR

SEQ ID NO: 58275 - protein, 15 aa, Artificial Sequence
  Description of Artificial Sequence: Synthetic peptide
  Seed: DPRMCSLMQGSTLPR
DPRMFSLIQMSTVPR

SEQ ID NO: 58276 - protein, 15 aa, Artificial Sequence
  Description of Artificial Sequence: Synthetic peptide
  Seed: DPRMCSLMQGSTLPR
DPRMFSLIQNSTAPR

SEQ ID NO: 58277 - protein, 15 aa, Artificial Sequence
  Description of Artificial Sequence: Synthetic peptide
  Seed: DPRMCSLMQGSTLPR
DPRMFSLIQNSTCPR

SEQ ID NO: 58278 - protein, 15 aa, Artificial Sequence
  Description of Artificial Sequence: Synthetic peptide
  Seed: DPRMCSLMQGSTLPR
DPRMFSLIQNSTFPR

SEQ ID NO: 58279 - protein, 15 aa, Artificial Sequence
  Description of Artificial Sequence: Synthetic peptide
  Seed: DPRMCSLMQGSTLPR
DPRMFSLIQNSTGPR

SEQ ID NO: 58280 - protein, 15 aa, Artificial Sequence
  Description of Artificial Sequence: Synthetic peptide
  Seed: DPRMCSLMQGSTLPR
DPRMFSLIQNSTHPR

SEQ ID NO: 58281 - protein, 15 aa, Artificial Sequence
  Description of Artificial Sequence: Synthetic peptide
  Seed: DPRMCSLMQGSTLPR
DPRMFSLIQNSTIPR

SEQ ID NO: 58282 - protein, 15 aa, Artificial Sequence
  Description of Artificial Sequence: Synthetic peptide
  Seed: DPRMCSLMQGSTLPR
DPRMFSLIQNSTLPR

SEQ ID NO: 58283 - protein, 15 aa, Artificial Sequence
  Description of Artificial Sequence: Synthetic peptide
  Seed: DPRMCSLMQGSTLPR
DPRMFSLIQNSTMPR

SEQ ID NO: 58284 - protein, 15 aa, Artificial Sequence
  Description of Artificial Sequence: Synthetic peptide
  Seed: DPRMCSLMQGSTLPR
DPRMFSLIQNSTNPR

SEQ ID NO: 58285 - protein, 15 aa, Artificial Sequence
  Description of Artificial Sequence: Synthetic peptide
  Seed: DPRMCSLMQGSTLPR
DPRMFSLIQNSTQPR

SEQ ID NO: 58286 - protein, 15 aa, Artificial Sequence
  Description of Artificial Sequence: Synthetic peptide
  Seed: DPRMCSLMQGSTLPR
DPRMFSLIQNSTSPR

SEQ ID NO: 58287 - protein, 15 aa, Artificial Sequence
  Description of Artificial Sequence: Synthetic peptide
  Seed: DPRMCSLMQGSTLPR
DPRMFSLIQNSTTPR

SEQ ID NO: 58288 - protein, 15 aa, Artificial Sequence
  Description of Artificial Sequence: Synthetic peptide
  Seed: DPRMCSLMQGSTLPR
DPRMFSLIQNSTVPR

SEQ ID NO: 58289 - protein, 15 aa, Artificial Sequence
  Description of Artificial Sequence: Synthetic peptide
  Seed: DPRMCSLMQGSTLPR
DPRMFSLIQPSTAPR

SEQ ID NO: 58290 - protein, 15 aa, Artificial Sequence
  Description of Artificial Sequence: Synthetic peptide
  Seed: DPRMCSLMQGSTLPR
DPRMFSLIQPSTCPR

SEQ ID NO: 58291 - protein, 15 aa, Artificial Sequence
  Description of Artificial Sequence: Synthetic peptide
  Seed: DPRMCSLMQGSTLPR
DPRMFSLIQPSTDPR

SEQ ID NO: 58292 - protein, 15 aa, Artificial Sequence
  Description of Artificial Sequence: Synthetic peptide
  Seed: DPRMCSLMQGSTLPR
DPRMFSLIQPSTEPR

SEQ ID NO: 58293 - protein, 15 aa, Artificial Sequence
  Description of Artificial Sequence: Synthetic peptide
  Seed: DPRMCSLMQGSTLPR
DPRMFSLIQPSTFPR

SEQ ID NO: 58294 - protein, 15 aa, Artificial Sequence
  Description of Artificial Sequence: Synthetic peptide
  Seed: DPRMCSLMQGSTLPR
DPRMFSLIQPSTGPR

SEQ ID NO: 58295 - protein, 15 aa, Artificial Sequence
  Description of Artificial Sequence: Synthetic peptide
  Seed: DPRMCSLMQGSTLPR
DPRMFSLIQPSTHPR

SEQ ID NO: 58296 - protein, 15 aa, Artificial Sequence
  Description of Artificial Sequence: Synthetic peptide
  Seed: DPRMCSLMQGSTLPR
DPRMFSLIQPSTIPR

SEQ ID NO: 58297 - protein, 15 aa, Artificial Sequence
  Description of Artificial Sequence: Synthetic peptide
  Seed: DPRMCSLMQGSTLPR
DPRMFSLIQPSTLPR

SEQ ID NO: 58298 - protein, 15 aa, Artificial Sequence
  Description of Artificial Sequence: Synthetic peptide
  Seed: DPRMCSLMQGSTLPR
DPRMFSLIQPSTMPR

SEQ ID NO: 58299 - protein, 15 aa, Artificial Sequence
  Description of Artificial Sequence: Synthetic peptide
  Seed: DPRMCSLMQGSTLPR
DPRMFSLIQPSTNPR

SEQ ID NO: 58300 - protein, 15 aa, Artificial Sequence
  Description of Artificial Sequence: Synthetic peptide
  Seed: DPRMCSLMQGSTLPR
DPRMFSLIQPSTPPR

SEQ ID NO: 58301 - protein, 15 aa, Artificial Sequence
  Description of Artificial Sequence: Synthetic peptide
  Seed: DPRMCSLMQGSTLPR
DPRMFSLIQPSTQPR

SEQ ID NO: 58302 - protein, 15 aa, Artificial Sequence
  Description of Artificial Sequence: Synthetic peptide
  Seed: DPRMCSLMQGSTLPR
DPRMFSLIQPSTSPR

SEQ ID NO: 58303 - protein, 15 aa, Artificial Sequence
  Description of Artificial Sequence: Synthetic peptide
  Seed: DPRMCSLMQGSTLPR
DPRMFSLIQPSTTPR

SEQ ID NO: 58304 - protein, 15 aa, Artificial Sequence
  Description of Artificial Sequence: Synthetic peptide
  Seed: DPRMCSLMQGSTLPR
DPRMFSLIQPSTVPR

SEQ ID NO: 58305 - protein, 15 aa, Artificial Sequence
  Description of Artificial Sequence: Synthetic peptide
  Seed: DPRMCSLMQGSTLPR
DPRMFSLIQPSTWPR

SEQ ID NO: 58306 - protein, 15 aa, Artificial Sequence
  Description of Artificial Sequence: Synthetic peptide
  Seed: DPRMCSLMQGSTLPR
DPRMFSLIQPSTYPR

SEQ ID NO: 58307 - protein, 15 aa, Artificial Sequence
  Description of Artificial Sequence: Synthetic peptide
  Seed: DPRMCSLMQGSTLPR
DPRMFSLIQQSTAPR

SEQ ID NO: 58308 - protein, 15 aa, Artificial Sequence
  Description of Artificial Sequence: Synthetic peptide
  Seed: DPRMCSLMQGSTLPR
DPRMFSLIQQSTIPR

SEQ ID NO: 58309 - protein, 15 aa, Artificial Sequence
  Description of Artificial Sequence: Synthetic peptide
  Seed: DPRMCSLMQGSTLPR
DPRMFSLIQQSTLPR

SEQ ID NO: 58310 - protein, 15 aa, Artificial Sequence
  Description of Artificial Sequence: Synthetic peptide
  Seed: DPRMCSLMQGSTLPR
DPRMFSLIQQSTSPR

SEQ ID NO: 58311 - protein, 15 aa, Artificial Sequence
  Description of Artificial Sequence: Synthetic peptide
  Seed: DPRMCSLMQGSTLPR
DPRMFSLIQQSTVPR

SEQ ID NO: 58312 - protein, 15 aa, Artificial Sequence
  Description of Artificial Sequence: Synthetic peptide
  Seed: DPRMCSLMQGSTLPR
DPRMFSLIQSSTAPR

SEQ ID NO: 58313 - protein, 15 aa, Artificial Sequence
  Description of Artificial Sequence: Synthetic peptide
  Seed: DPRMCSLMQGSTLPR
DPRMFSLIQSSTCPR

SEQ ID NO: 58314 - protein, 15 aa, Artificial Sequence
  Description of Artificial Sequence: Synthetic peptide
  Seed: DPRMCSLMQGSTLPR
DPRMFSLIQSSTDPR

SEQ ID NO: 58315 - protein, 15 aa, Artificial Sequence
  Description of Artificial Sequence: Synthetic peptide
  Seed: DPRMCSLMQGSTLPR
DPRMFSLIQSSTEPR

SEQ ID NO: 58316 - protein, 15 aa, Artificial Sequence
  Description of Artificial Sequence: Synthetic peptide
  Seed: DPRMCSLMQGSTLPR
DPRMFSLIQSSTFPR

SEQ ID NO: 58317 - protein, 15 aa, Artificial Sequence
  Description of Artificial Sequence: Synthetic peptide
  Seed: DPRMCSLMQGSTLPR
DPRMFSLIQSSTGPR

SEQ ID NO: 58318 - protein, 15 aa, Artificial Sequence
  Description of Artificial Sequence: Synthetic peptide
  Seed: DPRMCSLMQGSTLPR
DPRMFSLIQSSTHPR

SEQ ID NO: 58319 - protein, 15 aa, Artificial Sequence
  Description of Artificial Sequence: Synthetic peptide
  Seed: DPRMCSLMQGSTLPR
DPRMFSLIQSSTIPR

SEQ ID NO: 58320 - protein, 15 aa, Artificial Sequence
  Description of Artificial Sequence: Synthetic peptide
  Seed: DPRMCSLMQGSTLPR
DPRMFSLIQSSTKPR

SEQ ID NO: 58321 - protein, 15 aa, Artificial Sequence
  Description of Artificial Sequence: Synthetic peptide
  Seed: DPRMCSLMQGSTLPR
DPRMFSLIQSSTLPR

SEQ ID NO: 58322 - protein, 15 aa, Artificial Sequence
  Description of Artificial Sequence: Synthetic peptide
  Seed: DPRMCSLMQGSTLPR
DPRMFSLIQSSTMPR

SEQ ID NO: 58323 - protein, 15 aa, Artificial Sequence
  Description of Artificial Sequence: Synthetic peptide
  Seed: DPRMCSLMQGSTLPR
DPRMFSLIQSSTNPR

SEQ ID NO: 58324 - protein, 15 aa, Artificial Sequence
  Description of Artificial Sequence: Synthetic peptide
  Seed: DPRMCSLMQGSTLPR
DPRMFSLIQSSTPPR

SEQ ID NO: 58325 - protein, 15 aa, Artificial Sequence
  Description of Artificial Sequence: Synthetic peptide
  Seed: DPRMCSLMQGSTLPR
DPRMFSLIQSSTQPR

SEQ ID NO: 58326 - protein, 15 aa, Artificial Sequence
  Description of Artificial Sequence: Synthetic peptide
  Seed: DPRMCSLMQGSTLPR
DPRMFSLIQSSTRPR

SEQ ID NO: 58327 - protein, 15 aa, Artificial Sequence
  Description of Artificial Sequence: Synthetic peptide
  Seed: DPRMCSLMQGSTLPR
DPRMFSLIQSSTSPR

SEQ ID NO: 58328 - protein, 15 aa, Artificial Sequence
  Description of Artificial Sequence: Synthetic peptide
  Seed: DPRMCSLMQGSTLPR
DPRMFSLIQSSTTPR

SEQ ID NO: 58329 - protein, 15 aa, Artificial Sequence
  Description of Artificial Sequence: Synthetic peptide
  Seed: DPRMCSLMQGSTLPR
DPRMFSLIQSSTVPR

SEQ ID NO: 58330 - protein, 15 aa, Artificial Sequence
  Description of Artificial Sequence: Synthetic peptide
  Seed: DPRMCSLMQGSTLPR
DPRMFSLIQSSTYPR

SEQ ID NO: 58331 - protein, 15 aa, Artificial Sequence
  Description of Artificial Sequence: Synthetic peptide
  Seed: DPRMCSLMQGSTLPR
DPRMFSLIQTSTAPR

SEQ ID NO: 58332 - protein, 15 aa, Artificial Sequence
  Description of Artificial Sequence: Synthetic peptide
  Seed: DPRMCSLMQGSTLPR
DPRMFSLIQTSTCPR

SEQ ID NO: 58333 - protein, 15 aa, Artificial Sequence
  Description of Artificial Sequence: Synthetic peptide
  Seed: DPRMCSLMQGSTLPR
DPRMFSLIQTSTDPR

SEQ ID NO: 58334 - protein, 15 aa, Artificial Sequence
  Description of Artificial Sequence: Synthetic peptide
  Seed: DPRMCSLMQGSTLPR
DPRMFSLIQTSTEPR

SEQ ID NO: 58335 - protein, 15 aa, Artificial Sequence
  Description of Artificial Sequence: Synthetic peptide
  Seed: DPRMCSLMQGSTLPR
DPRMFSLIQTSTFPR

SEQ ID NO: 58336 - protein, 15 aa, Artificial Sequence
  Description of Artificial Sequence: Synthetic peptide
  Seed: DPRMCSLMQGSTLPR
DPRMFSLIQTSTGPR

SEQ ID NO: 58337 - protein, 15 aa, Artificial Sequence
  Description of Artificial Sequence: Synthetic peptide
  Seed: DPRMCSLMQGSTLPR
DPRMFSLIQTSTHPR

SEQ ID NO: 58338 - protein, 15 aa, Artificial Sequence
  Description of Artificial Sequence: Synthetic peptide
  Seed: DPRMCSLMQGSTLPR
DPRMFSLIQTSTIPR

SEQ ID NO: 58339 - protein, 15 aa, Artificial Sequence
  Description of Artificial Sequence: Synthetic peptide
  Seed: DPRMCSLMQGSTLPR
DPRMFSLIQTSTLPR

SEQ ID NO: 58340 - protein, 15 aa, Artificial Sequence
  Description of Artificial Sequence: Synthetic peptide
  Seed: DPRMCSLMQGSTLPR
DPRMFSLIQTSTMPR

SEQ ID NO: 58341 - protein, 15 aa, Artificial Sequence
  Description of Artificial Sequence: Synthetic peptide
  Seed: DPRMCSLMQGSTLPR
DPRMFSLIQTSTNPR

SEQ ID NO: 58342 - protein, 15 aa, Artificial Sequence
  Description of Artificial Sequence: Synthetic peptide
  Seed: DPRMCSLMQGSTLPR
DPRMFSLIQTSTPPR

SEQ ID NO: 58343 - protein, 15 aa, Artificial Sequence
  Description of Artificial Sequence: Synthetic peptide
  Seed: DPRMCSLMQGSTLPR
DPRMFSLIQTSTQPR

SEQ ID NO: 58344 - protein, 15 aa, Artificial Sequence
  Description of Artificial Sequence: Synthetic peptide
  Seed: DPRMCSLMQGSTLPR
DPRMFSLIQTSTSPR

SEQ ID NO: 58345 - protein, 15 aa, Artificial Sequence
  Description of Artificial Sequence: Synthetic peptide
  Seed: DPRMCSLMQGSTLPR
DPRMFSLIQTSTTPR

SEQ ID NO: 58346 - protein, 15 aa, Artificial Sequence
  Description of Artificial Sequence: Synthetic peptide
  Seed: DPRMCSLMQGSTLPR
DPRMFSLIQTSTVPR

SEQ ID NO: 58347 - protein, 15 aa, Artificial Sequence
  Description of Artificial Sequence: Synthetic peptide
  Seed: DPRMCSLMQGSTLPR
DPRMFSLIQVSTAPR

SEQ ID NO: 58348 - protein, 15 aa, Artificial Sequence
  Description of Artificial Sequence: Synthetic peptide
  Seed: DPRMCSLMQGSTLPR
DPRMFSLIQVSTCPR

SEQ ID NO: 58349 - protein, 15 aa, Artificial Sequence
  Description of Artificial Sequence: Synthetic peptide
  Seed: DPRMCSLMQGSTLPR
DPRMFSLIQVSTDPR

SEQ ID NO: 58350 - protein, 15 aa, Artificial Sequence
  Description of Artificial Sequence: Synthetic peptide
  Seed: DPRMCSLMQGSTLPR
DPRMFSLIQVSTEPR

SEQ ID NO: 58351 - protein, 15 aa, Artificial Sequence
  Description of Artificial Sequence: Synthetic peptide
  Seed: DPRMCSLMQGSTLPR
DPRMFSLIQVSTGPR

SEQ ID NO: 58352 - protein, 15 aa, Artificial Sequence
  Description of Artificial Sequence: Synthetic peptide
  Seed: DPRMCSLMQGSTLPR
DPRMFSLIQVSTHPR

SEQ ID NO: 58353 - protein, 15 aa, Artificial Sequence
  Description of Artificial Sequence: Synthetic peptide
  Seed: DPRMCSLMQGSTLPR
DPRMFSLIQVSTIPR

SEQ ID NO: 58354 - protein, 15 aa, Artificial Sequence
  Description of Artificial Sequence: Synthetic peptide
  Seed: DPRMCSLMQGSTLPR
DPRMFSLIQVSTLPR

SEQ ID NO: 58355 - protein, 15 aa, Artificial Sequence
  Description of Artificial Sequence: Synthetic peptide
  Seed: DPRMCSLMQGSTLPR
DPRMFSLIQVSTMPR

SEQ ID NO: 58356 - protein, 15 aa, Artificial Sequence
  Description of Artificial Sequence: Synthetic peptide
  Seed: DPRMCSLMQGSTLPR
DPRMFSLIQVSTNPR

SEQ ID NO: 58357 - protein, 15 aa, Artificial Sequence
  Description of Artificial Sequence: Synthetic peptide
  Seed: DPRMCSLMQGSTLPR
DPRMFSLIQVSTPPR

SEQ ID NO: 58358 - protein, 15 aa, Artificial Sequence
  Description of Artificial Sequence: Synthetic peptide
  Seed: DPRMCSLMQGSTLPR
DPRMFSLIQVSTQPR

SEQ ID NO: 58359 - protein, 15 aa, Artificial Sequence
  Description of Artificial Sequence: Synthetic peptide
  Seed: DPRMCSLMQGSTLPR
DPRMFSLIQVSTSPR

SEQ ID NO: 58360 - protein, 15 aa, Artificial Sequence
  Description of Artificial Sequence: Synthetic peptide
  Seed: DPRMCSLMQGSTLPR
DPRMFSLIQVSTTPR

SEQ ID NO: 58361 - protein, 15 aa, Artificial Sequence
  Description of Artificial Sequence: Synthetic peptide
  Seed: DPRMCSLMQGSTLPR
DPRMFSLIQVSTVPR

SEQ ID NO: 58362 - protein, 15 aa, Artificial Sequence
  Description of Artificial Sequence: Synthetic peptide
  Seed: DPRMCSLMQGSTLPR
DPRMFSLIQWSTAPR

SEQ ID NO: 58363 - protein, 15 aa, Artificial Sequence
  Description of Artificial Sequence: Synthetic peptide
  Seed: DPRMCSLMQGSTLPR
DPRMFSLIQWSTVPR

SEQ ID NO: 58364 - protein, 15 aa, Artificial Sequence
  Description of Artificial Sequence: Synthetic peptide
  Seed: DPRMCSLMQGSTLPR
DPRMFSLKQASTIPR

SEQ ID NO: 58365 - protein, 15 aa, Artificial Sequence
  Description of Artificial Sequence: Synthetic peptide
  Seed: DPRMCSLMQGSTLPR
DPRMFSLKQASTLPR

SEQ ID NO: 58366 - protein, 15 aa, Artificial Sequence
  Description of Artificial Sequence: Synthetic peptide
  Seed: DPRMCSLMQGSTLPR
DPRMFSLKQASTVPR

SEQ ID NO: 58367 - protein, 15 aa, Artificial Sequence
  Description of Artificial Sequence: Synthetic peptide
  Seed: DPRMCSLMQGSTLPR
DPRMFSLKQGSTLPR

SEQ ID NO: 58368 - protein, 15 aa, Artificial Sequence
  Description of Artificial Sequence: Synthetic peptide
  Seed: DPRMCSLMQGSTLPR
DPRMFSLKQSSTIPR

SEQ ID NO: 58369 - protein, 15 aa, Artificial Sequence
  Description of Artificial Sequence: Synthetic peptide
  Seed: DPRMCSLMQGSTLPR
DPRMFSLKQSSTLPR

SEQ ID NO: 58370 - protein, 15 aa, Artificial Sequence
  Description of Artificial Sequence: Synthetic peptide
  Seed: DPRMCSLMQGSTLPR
DPRMFSLKQSSTVPR

SEQ ID NO: 58371 - protein, 15 aa, Artificial Sequence
  Description of Artificial Sequence: Synthetic peptide
  Seed: DPRMCSLMQGSTLPR
DPRMFSLLQASTAPR

SEQ ID NO: 58372 - protein, 15 aa, Artificial Sequence
  Description of Artificial Sequence: Synthetic peptide
  Seed: DPRMCSLMQGSTLPR
DPRMFSLLQASTCPR

SEQ ID NO: 58373 - protein, 15 aa, Artificial Sequence
  Description of Artificial Sequence: Synthetic peptide
  Seed: DPRMCSLMQGSTLPR
DPRMFSLLQASTDPR

SEQ ID NO: 58374 - protein, 15 aa, Artificial Sequence
  Description of Artificial Sequence: Synthetic peptide
  Seed: DPRMCSLMQGSTLPR
DPRMFSLLQASTEPR

SEQ ID NO: 58375 - protein, 15 aa, Artificial Sequence
  Description of Artificial Sequence: Synthetic peptide
  Seed: DPRMCSLMQGSTLPR
DPRMFSLLQASTFPR

SEQ ID NO: 58376 - protein, 15 aa, Artificial Sequence
  Description of Artificial Sequence: Synthetic peptide
  Seed: DPRMCSLMQGSTLPR
DPRMFSLLQASTGPR

SEQ ID NO: 58377 - protein, 15 aa, Artificial Sequence
  Description of Artificial Sequence: Synthetic peptide
  Seed: DPRMCSLMQGSTLPR
DPRMFSLLQASTHPR

SEQ ID NO: 58378 - protein, 15 aa, Artificial Sequence
  Description of Artificial Sequence: Synthetic peptide
  Seed: DPRMCSLMQGSTLPR
DPRMFSLLQASTIPR

SEQ ID NO: 58379 - protein, 15 aa, Artificial Sequence
  Description of Artificial Sequence: Synthetic peptide
  Seed: DPRMCSLMQGSTLPR
DPRMFSLLQASTKPR

SEQ ID NO: 58380 - protein, 15 aa, Artificial Sequence
  Description of Artificial Sequence: Synthetic peptide
  Seed: DPRMCSLMQGSTLPR
DPRMFSLLQASTLPR

SEQ ID NO: 58381 - protein, 15 aa, Artificial Sequence
  Description of Artificial Sequence: Synthetic peptide
  Seed: DPRMCSLMQGSTLPR
DPRMFSLLQASTMPR

SEQ ID NO: 58382 - protein, 15 aa, Artificial Sequence
  Description of Artificial Sequence: Synthetic peptide
  Seed: DPRMCSLMQGSTLPR
DPRMFSLLQASTNPR

SEQ ID NO: 58383 - protein, 15 aa, Artificial Sequence
  Description of Artificial Sequence: Synthetic peptide
  Seed: DPRMCSLMQGSTLPR
DPRMFSLLQASTPPR

SEQ ID NO: 58384 - protein, 15 aa, Artificial Sequence
  Description of Artificial Sequence: Synthetic peptide
  Seed: DPRMCSLMQGSTLPR
DPRMFSLLQASTQPR

SEQ ID NO: 58385 - protein, 15 aa, Artificial Sequence
  Description of Artificial Sequence: Synthetic peptide
  Seed: DPRMCSLMQGSTLPR
DPRMFSLLQASTRPR

SEQ ID NO: 58386 - protein, 15 aa, Artificial Sequence
  Description of Artificial Sequence: Synthetic peptide
  Seed: DPRMCSLMQGSTLPR
DPRMFSLLQASTSPR

SEQ ID NO: 58387 - protein, 15 aa, Artificial Sequence
  Description of Artificial Sequence: Synthetic peptide
  Seed: DPRMCSLMQGSTLPR
DPRMFSLLQASTTPR

SEQ ID NO: 58388 - protein, 15 aa, Artificial Sequence
  Description of Artificial Sequence: Synthetic peptide
  Seed: DPRMCSLMQGSTLPR
DPRMFSLLQASTVPR

SEQ ID NO: 58389 - protein, 15 aa, Artificial Sequence
  Description of Artificial Sequence: Synthetic peptide
  Seed: DPRMCSLMQGSTLPR
DPRMFSLLQASTWPR

SEQ ID NO: 58390 - protein, 15 aa, Artificial Sequence
  Description of Artificial Sequence: Synthetic peptide
  Seed: DPRMCSLMQGSTLPR
DPRMFSLLQASTYPR

SEQ ID NO: 58391 - protein, 15 aa, Artificial Sequence
  Description of Artificial Sequence: Synthetic peptide
  Seed: DPRMCSLMQGSTLPR
DPRMFSLLQCSTAPR

SEQ ID NO: 58392 - protein, 15 aa, Artificial Sequence
  Description of Artificial Sequence: Synthetic peptide
  Seed: DPRMCSLMQGSTLPR
DPRMFSLLQCSTIPR

SEQ ID NO: 58393 - protein, 15 aa, Artificial Sequence
  Description of Artificial Sequence: Synthetic peptide
  Seed: DPRMCSLMQGSTLPR
DPRMFSLLQCSTLPR

SEQ ID NO: 58394 - protein, 15 aa, Artificial Sequence
  Description of Artificial Sequence: Synthetic peptide
  Seed: DPRMCSLMQGSTLPR
DPRMFSLLQCSTMPR

SEQ ID NO: 58395 - protein, 15 aa, Artificial Sequence
  Description of Artificial Sequence: Synthetic peptide
  Seed: DPRMCSLMQGSTLPR
DPRMFSLLQCSTNPR

SEQ ID NO: 58396 - protein, 15 aa, Artificial Sequence
  Description of Artificial Sequence: Synthetic peptide
  Seed: DPRMCSLMQGSTLPR
DPRMFSLLQCSTSPR

SEQ ID NO: 58397 - protein, 15 aa, Artificial Sequence
  Description of Artificial Sequence: Synthetic peptide
  Seed: DPRMCSLMQGSTLPR
DPRMFSLLQCSTTPR

SEQ ID NO: 58398 - protein, 15 aa, Artificial Sequence
  Description of Artificial Sequence: Synthetic peptide
  Seed: DPRMCSLMQGSTLPR
DPRMFSLLQCSTVPR

SEQ ID NO: 58399 - protein, 15 aa, Artificial Sequence
  Description of Artificial Sequence: Synthetic peptide
  Seed: DPRMCSLMQGSTLPR
DPRMFSLLQDSTIPR

SEQ ID NO: 58400 - protein, 15 aa, Artificial Sequence
  Description of Artificial Sequence: Synthetic peptide
  Seed: DPRMCSLMQGSTLPR
DPRMFSLLQDSTLPR

SEQ ID NO: 58401 - protein, 15 aa, Artificial Sequence
  Description of Artificial Sequence: Synthetic peptide
  Seed: DPRMCSLMQGSTLPR
DPRMFSLLQDSTVPR

SEQ ID NO: 58402 - protein, 15 aa, Artificial Sequence
  Description of Artificial Sequence: Synthetic peptide
  Seed: DPRMCSLMQGSTLPR
DPRMFSLLQESTAPR

SEQ ID NO: 58403 - protein, 15 aa, Artificial Sequence
  Description of Artificial Sequence: Synthetic peptide
  Seed: DPRMCSLMQGSTLPR
DPRMFSLLQESTIPR

SEQ ID NO: 58404 - protein, 15 aa, Artificial Sequence
  Description of Artificial Sequence: Synthetic peptide
  Seed: DPRMCSLMQGSTLPR
DPRMFSLLQESTLPR

SEQ ID NO: 58405 - protein, 15 aa, Artificial Sequence
  Description of Artificial Sequence: Synthetic peptide
  Seed: DPRMCSLMQGSTLPR
DPRMFSLLQESTSPR

SEQ ID NO: 58406 - protein, 15 aa, Artificial Sequence
  Description of Artificial Sequence: Synthetic peptide
  Seed: DPRMCSLMQGSTLPR
DPRMFSLLQESTVPR

SEQ ID NO: 58407 - protein, 15 aa, Artificial Sequence
  Description of Artificial Sequence: Synthetic peptide
  Seed: DPRMCSLMQGSTLPR
DPRMFSLLQFSTAPR

SEQ ID NO: 58408 - protein, 15 aa, Artificial Sequence
  Description of Artificial Sequence: Synthetic peptide
  Seed: DPRMCSLMQGSTLPR
DPRMFSLLQFSTSPR

SEQ ID NO: 58409 - protein, 15 aa, Artificial Sequence
  Description of Artificial Sequence: Synthetic peptide
  Seed: DPRMCSLMQGSTLPR
DPRMFSLLQFSTVPR

SEQ ID NO: 58410 - protein, 15 aa, Artificial Sequence
  Description of Artificial Sequence: Synthetic peptide
  Seed: DPRMCSLMQGSTLPR
DPRMFSLLQGSTAPR

SEQ ID NO: 58411 - protein, 15 aa, Artificial Sequence
  Description of Artificial Sequence: Synthetic peptide
  Seed: DPRMCSLMQGSTLPR
DPRMFSLLQGSTCPR

SEQ ID NO: 58412 - protein, 15 aa, Artificial Sequence
  Description of Artificial Sequence: Synthetic peptide
  Seed: DPRMCSLMQGSTLPR
DPRMFSLLQGSTDPR

SEQ ID NO: 58413 - protein, 15 aa, Artificial Sequence
  Description of Artificial Sequence: Synthetic peptide
  Seed: DPRMCSLMQGSTLPR
DPRMFSLLQGSTEPR

SEQ ID NO: 58414 - protein, 15 aa, Artificial Sequence
  Description of Artificial Sequence: Synthetic peptide
  Seed: DPRMCSLMQGSTLPR
DPRMFSLLQGSTFPR

SEQ ID NO: 58415 - protein, 15 aa, Artificial Sequence
  Description of Artificial Sequence: Synthetic peptide
  Seed: DPRMCSLMQGSTLPR
DPRMFSLLQGSTGPR

SEQ ID NO: 58416 - protein, 15 aa, Artificial Sequence
  Description of Artificial Sequence: Synthetic peptide
  Seed: DPRMCSLMQGSTLPR
DPRMFSLLQGSTHPR

SEQ ID NO: 58417 - protein, 15 aa, Artificial Sequence
  Description of Artificial Sequence: Synthetic peptide
  Seed: DPRMCSLMQGSTLPR
DPRMFSLLQGSTIPR

SEQ ID NO: 58418 - protein, 15 aa, Artificial Sequence
  Description of Artificial Sequence: Synthetic peptide
  Seed: DPRMCSLMQGSTLPR
DPRMFSLLQGSTKPR

SEQ ID NO: 58419 - protein, 15 aa, Artificial Sequence
  Description of Artificial Sequence: Synthetic peptide
  Seed: DPRMCSLMQGSTLPR
DPRMFSLLQGSTLPR

SEQ ID NO: 58420 - protein, 15 aa, Artificial Sequence
  Description of Artificial Sequence: Synthetic peptide
  Seed: DPRMCSLMQGSTLPR
DPRMFSLLQGSTMPR

SEQ ID NO: 58421 - protein, 15 aa, Artificial Sequence
  Description of Artificial Sequence: Synthetic peptide
  Seed: DPRMCSLMQGSTLPR
DPRMFSLLQGSTNPR

SEQ ID NO: 58422 - protein, 15 aa, Artificial Sequence
  Description of Artificial Sequence: Synthetic peptide
  Seed: DPRMCSLMQGSTLPR
DPRMFSLLQGSTPPR

SEQ ID NO: 58423 - protein, 15 aa, Artificial Sequence
  Description of Artificial Sequence: Synthetic peptide
  Seed: DPRMCSLMQGSTLPR
DPRMFSLLQGSTQPR

SEQ ID NO: 58424 - protein, 15 aa, Artificial Sequence
  Description of Artificial Sequence: Synthetic peptide
  Seed: DPRMCSLMQGSTLPR
DPRMFSLLQGSTRPR

SEQ ID NO: 58425 - protein, 15 aa, Artificial Sequence
  Description of Artificial Sequence: Synthetic peptide
  Seed: DPRMCSLMQGSTLPR
DPRMFSLLQGSTSPR

SEQ ID NO: 58426 - protein, 15 aa, Artificial Sequence
  Description of Artificial Sequence: Synthetic peptide
  Seed: DPRMCSLMQGSTLPR
DPRMFSLLQGSTTPR

SEQ ID NO: 58427 - protein, 15 aa, Artificial Sequence
  Description of Artificial Sequence: Synthetic peptide
  Seed: DPRMCSLMQGSTLPR
DPRMFSLLQGSTVPR

SEQ ID NO: 58428 - protein, 15 aa, Artificial Sequence
  Description of Artificial Sequence: Synthetic peptide
  Seed: DPRMCSLMQGSTLPR
DPRMFSLLQGSTWPR

SEQ ID NO: 58429 - protein, 15 aa, Artificial Sequence
  Description of Artificial Sequence: Synthetic peptide
  Seed: DPRMCSLMQGSTLPR
DPRMFSLLQGSTYPR

SEQ ID NO: 58430 - protein, 15 aa, Artificial Sequence
  Description of Artificial Sequence: Synthetic peptide
  Seed: DPRMCSLMQGSTLPR
DPRMFSLLQHSTAPR

SEQ ID NO: 58431 - protein, 15 aa, Artificial Sequence
  Description of Artificial Sequence: Synthetic peptide
  Seed: DPRMCSLMQGSTLPR
DPRMFSLLQHSTIPR

SEQ ID NO: 58432 - protein, 15 aa, Artificial Sequence
  Description of Artificial Sequence: Synthetic peptide
  Seed: DPRMCSLMQGSTLPR
DPRMFSLLQHSTLPR

SEQ ID NO: 58433 - protein, 15 aa, Artificial Sequence
  Description of Artificial Sequence: Synthetic peptide
  Seed: DPRMCSLMQGSTLPR
DPRMFSLLQHSTMPR

SEQ ID NO: 58434 - protein, 15 aa, Artificial Sequence
  Description of Artificial Sequence: Synthetic peptide
  Seed: DPRMCSLMQGSTLPR
DPRMFSLLQHSTNPR

SEQ ID NO: 58435 - protein, 15 aa, Artificial Sequence
  Description of Artificial Sequence: Synthetic peptide
  Seed: DPRMCSLMQGSTLPR
DPRMFSLLQHSTSPR

SEQ ID NO: 58436 - protein, 15 aa, Artificial Sequence
  Description of Artificial Sequence: Synthetic peptide
  Seed: DPRMCSLMQGSTLPR
DPRMFSLLQHSTTPR

SEQ ID NO: 58437 - protein, 15 aa, Artificial Sequence
  Description of Artificial Sequence: Synthetic peptide
  Seed: DPRMCSLMQGSTLPR
DPRMFSLLQHSTVPR

SEQ ID NO: 58438 - protein, 15 aa, Artificial Sequence
  Description of Artificial Sequence: Synthetic peptide
  Seed: DPRMCSLMQGSTLPR
DPRMFSLLQISTAPR

SEQ ID NO: 58439 - protein, 15 aa, Artificial Sequence
  Description of Artificial Sequence: Synthetic peptide
  Seed: DPRMCSLMQGSTLPR
DPRMFSLLQISTCPR

SEQ ID NO: 58440 - protein, 15 aa, Artificial Sequence
  Description of Artificial Sequence: Synthetic peptide
  Seed: DPRMCSLMQGSTLPR
DPRMFSLLQISTDPR

SEQ ID NO: 58441 - protein, 15 aa, Artificial Sequence
  Description of Artificial Sequence: Synthetic peptide
  Seed: DPRMCSLMQGSTLPR
DPRMFSLLQISTEPR

SEQ ID NO: 58442 - protein, 15 aa, Artificial Sequence
  Description of Artificial Sequence: Synthetic peptide
  Seed: DPRMCSLMQGSTLPR
DPRMFSLLQISTGPR

SEQ ID NO: 58443 - protein, 15 aa, Artificial Sequence
  Description of Artificial Sequence: Synthetic peptide
  Seed: DPRMCSLMQGSTLPR
DPRMFSLLQISTHPR

SEQ ID NO: 58444 - protein, 15 aa, Artificial Sequence
  Description of Artificial Sequence: Synthetic peptide
  Seed: DPRMCSLMQGSTLPR
DPRMFSLLQISTIPR

SEQ ID NO: 58445 - protein, 15 aa, Artificial Sequence
  Description of Artificial Sequence: Synthetic peptide
  Seed: DPRMCSLMQGSTLPR
DPRMFSLLQISTLPR

SEQ ID NO: 58446 - protein, 15 aa, Artificial Sequence
  Description of Artificial Sequence: Synthetic peptide
  Seed: DPRMCSLMQGSTLPR
DPRMFSLLQISTMPR

SEQ ID NO: 58447 - protein, 15 aa, Artificial Sequence
  Description of Artificial Sequence: Synthetic peptide
  Seed: DPRMCSLMQGSTLPR
DPRMFSLLQISTNPR

SEQ ID NO: 58448 - protein, 15 aa, Artificial Sequence
  Description of Artificial Sequence: Synthetic peptide
  Seed: DPRMCSLMQGSTLPR
DPRMFSLLQISTPPR

SEQ ID NO: 58449 - protein, 15 aa, Artificial Sequence
  Description of Artificial Sequence: Synthetic peptide
  Seed: DPRMCSLMQGSTLPR
DPRMFSLLQISTQPR

SEQ ID NO: 58450 - protein, 15 aa, Artificial Sequence
  Description of Artificial Sequence: Synthetic peptide
  Seed: DPRMCSLMQGSTLPR
DPRMFSLLQISTSPR

SEQ ID NO: 58451 - protein, 15 aa, Artificial Sequence
  Description of Artificial Sequence: Synthetic peptide
  Seed: DPRMCSLMQGSTLPR
DPRMFSLLQISTTPR

SEQ ID NO: 58452 - protein, 15 aa, Artificial Sequence
  Description of Artificial Sequence: Synthetic peptide
  Seed: DPRMCSLMQGSTLPR
DPRMFSLLQISTVPR

SEQ ID NO: 58453 - protein, 15 aa, Artificial Sequence
  Description of Artificial Sequence: Synthetic peptide
  Seed: DPRMCSLMQGSTLPR
DPRMFSLLQLSTAPR

SEQ ID NO: 58454 - protein, 15 aa, Artificial Sequence
  Description of Artificial Sequence: Synthetic peptide
  Seed: DPRMCSLMQGSTLPR
DPRMFSLLQLSTGPR

SEQ ID NO: 58455 - protein, 15 aa, Artificial Sequence
  Description of Artificial Sequence: Synthetic peptide
  Seed: DPRMCSLMQGSTLPR
DPRMFSLLQLSTHPR

SEQ ID NO: 58456 - protein, 15 aa, Artificial Sequence
  Description of Artificial Sequence: Synthetic peptide
  Seed: DPRMCSLMQGSTLPR
DPRMFSLLQLSTIPR

SEQ ID NO: 58457 - protein, 15 aa, Artificial Sequence
  Description of Artificial Sequence: Synthetic peptide
  Seed: DPRMCSLMQGSTLPR
DPRMFSLLQLSTLPR

SEQ ID NO: 58458 - protein, 15 aa, Artificial Sequence
  Description of Artificial Sequence: Synthetic peptide
  Seed: DPRMCSLMQGSTLPR
DPRMFSLLQLSTMPR

SEQ ID NO: 58459 - protein, 15 aa, Artificial Sequence
  Description of Artificial Sequence: Synthetic peptide
  Seed: DPRMCSLMQGSTLPR
DPRMFSLLQLSTNPR

SEQ ID NO: 58460 - protein, 15 aa, Artificial Sequence
  Description of Artificial Sequence: Synthetic peptide
  Seed: DPRMCSLMQGSTLPR
DPRMFSLLQLSTQPR

SEQ ID NO: 58461 - protein, 15 aa, Artificial Sequence
  Description of Artificial Sequence: Synthetic peptide
  Seed: DPRMCSLMQGSTLPR
DPRMFSLLQLSTSPR

SEQ ID NO: 58462 - protein, 15 aa, Artificial Sequence
  Description of Artificial Sequence: Synthetic peptide
  Seed: DPRMCSLMQGSTLPR
DPRMFSLLQLSTTPR

SEQ ID NO: 58463 - protein, 15 aa, Artificial Sequence
  Description of Artificial Sequence: Synthetic peptide
  Seed: DPRMCSLMQGSTLPR
DPRMFSLLQLSTVPR

SEQ ID NO: 58464 - protein, 15 aa, Artificial Sequence
  Description of Artificial Sequence: Synthetic peptide
  Seed: DPRMCSLMQGSTLPR
DPRMFSLLQMSTAPR

SEQ ID NO: 58465 - protein, 15 aa, Artificial Sequence
  Description of Artificial Sequence: Synthetic peptide
  Seed: DPRMCSLMQGSTLPR
DPRMFSLLQMSTGPR

SEQ ID NO: 58466 - protein, 15 aa, Artificial Sequence
  Description of Artificial Sequence: Synthetic peptide
  Seed: DPRMCSLMQGSTLPR
DPRMFSLLQMSTHPR

SEQ ID NO: 58467 - protein, 15 aa, Artificial Sequence
  Description of Artificial Sequence: Synthetic peptide
  Seed: DPRMCSLMQGSTLPR
DPRMFSLLQMSTIPR

SEQ ID NO: 58468 - protein, 15 aa, Artificial Sequence
  Description of Artificial Sequence: Synthetic peptide
  Seed: DPRMCSLMQGSTLPR
DPRMFSLLQMSTLPR

SEQ ID NO: 58469 - protein, 15 aa, Artificial Sequence
  Description of Artificial Sequence: Synthetic peptide
  Seed: DPRMCSLMQGSTLPR
DPRMFSLLQMSTMPR

SEQ ID NO: 58470 - protein, 15 aa, Artificial Sequence
  Description of Artificial Sequence: Synthetic peptide
  Seed: DPRMCSLMQGSTLPR
DPRMFSLLQMSTNPR

SEQ ID NO: 58471 - protein, 15 aa, Artificial Sequence
  Description of Artificial Sequence: Synthetic peptide
  Seed: DPRMCSLMQGSTLPR
DPRMFSLLQMSTQPR

SEQ ID NO: 58472 - protein, 15 aa, Artificial Sequence
  Description of Artificial Sequence: Synthetic peptide
  Seed: DPRMCSLMQGSTLPR
DPRMFSLLQMSTSPR

SEQ ID NO: 58473 - protein, 15 aa, Artificial Sequence
  Description of Artificial Sequence: Synthetic peptide
  Seed: DPRMCSLMQGSTLPR
DPRMFSLLQMSTTPR

SEQ ID NO: 58474 - protein, 15 aa, Artificial Sequence
  Description of Artificial Sequence: Synthetic peptide
  Seed: DPRMCSLMQGSTLPR
DPRMFSLLQMSTVPR

SEQ ID NO: 58475 - protein, 15 aa, Artificial Sequence
  Description of Artificial Sequence: Synthetic peptide
  Seed: DPRMCSLMQGSTLPR
DPRMFSLLQNSTAPR

SEQ ID NO: 58476 - protein, 15 aa, Artificial Sequence
  Description of Artificial Sequence: Synthetic peptide
  Seed: DPRMCSLMQGSTLPR
DPRMFSLLQNSTCPR

SEQ ID NO: 58477 - protein, 15 aa, Artificial Sequence
  Description of Artificial Sequence: Synthetic peptide
  Seed: DPRMCSLMQGSTLPR
DPRMFSLLQNSTDPR

SEQ ID NO: 58478 - protein, 15 aa, Artificial Sequence
  Description of Artificial Sequence: Synthetic peptide
  Seed: DPRMCSLMQGSTLPR
DPRMFSLLQNSTEPR

SEQ ID NO: 58479 - protein, 15 aa, Artificial Sequence
  Description of Artificial Sequence: Synthetic peptide
  Seed: DPRMCSLMQGSTLPR
DPRMFSLLQNSTFPR

SEQ ID NO: 58480 - protein, 15 aa, Artificial Sequence
  Description of Artificial Sequence: Synthetic peptide
  Seed: DPRMCSLMQGSTLPR
DPRMFSLLQNSTGPR

SEQ ID NO: 58481 - protein, 15 aa, Artificial Sequence
  Description of Artificial Sequence: Synthetic peptide
  Seed: DPRMCSLMQGSTLPR
DPRMFSLLQNSTHPR

SEQ ID NO: 58482 - protein, 15 aa, Artificial Sequence
  Description of Artificial Sequence: Synthetic peptide
  Seed: DPRMCSLMQGSTLPR
DPRMFSLLQNSTIPR

SEQ ID NO: 58483 - protein, 15 aa, Artificial Sequence
  Description of Artificial Sequence: Synthetic peptide
  Seed: DPRMCSLMQGSTLPR
DPRMFSLLQNSTLPR

SEQ ID NO: 58484 - protein, 15 aa, Artificial Sequence
  Description of Artificial Sequence: Synthetic peptide
  Seed: DPRMCSLMQGSTLPR
DPRMFSLLQNSTMPR

SEQ ID NO: 58485 - protein, 15 aa, Artificial Sequence
  Description of Artificial Sequence: Synthetic peptide
  Seed: DPRMCSLMQGSTLPR
DPRMFSLLQNSTNPR

SEQ ID NO: 58486 - protein, 15 aa, Artificial Sequence
  Description of Artificial Sequence: Synthetic peptide
  Seed: DPRMCSLMQGSTLPR
DPRMFSLLQNSTPPR

SEQ ID NO: 58487 - protein, 15 aa, Artificial Sequence
  Description of Artificial Sequence: Synthetic peptide
  Seed: DPRMCSLMQGSTLPR
DPRMFSLLQNSTQPR

SEQ ID NO: 58488 - protein, 15 aa, Artificial Sequence
  Description of Artificial Sequence: Synthetic peptide
  Seed: DPRMCSLMQGSTLPR
DPRMFSLLQNSTRPR

SEQ ID NO: 58489 - protein, 15 aa, Artificial Sequence
  Description of Artificial Sequence: Synthetic peptide
  Seed: DPRMCSLMQGSTLPR
DPRMFSLLQNSTSPR

SEQ ID NO: 58490 - protein, 15 aa, Artificial Sequence
  Description of Artificial Sequence: Synthetic peptide
  Seed: DPRMCSLMQGSTLPR
DPRMFSLLQNSTTPR

SEQ ID NO: 58491 - protein, 15 aa, Artificial Sequence
  Description of Artificial Sequence: Synthetic peptide
  Seed: DPRMCSLMQGSTLPR
DPRMFSLLQNSTVPR

SEQ ID NO: 58492 - protein, 15 aa, Artificial Sequence
  Description of Artificial Sequence: Synthetic peptide
  Seed: DPRMCSLMQGSTLPR
DPRMFSLLQNSTWPR

SEQ ID NO: 58493 - protein, 15 aa, Artificial Sequence
  Description of Artificial Sequence: Synthetic peptide
  Seed: DPRMCSLMQGSTLPR
DPRMFSLLQNSTYPR

SEQ ID NO: 58494 - protein, 15 aa, Artificial Sequence
  Description of Artificial Sequence: Synthetic peptide
  Seed: DPRMCSLMQGSTLPR
DPRMFSLLQPSTAPR

SEQ ID NO: 58495 - protein, 15 aa, Artificial Sequence
  Description of Artificial Sequence: Synthetic peptide
  Seed: DPRMCSLMQGSTLPR
DPRMFSLLQPSTCPR

SEQ ID NO: 58496 - protein, 15 aa, Artificial Sequence
  Description of Artificial Sequence: Synthetic peptide
  Seed: DPRMCSLMQGSTLPR
DPRMFSLLQPSTDPR

SEQ ID NO: 58497 - protein, 15 aa, Artificial Sequence
  Description of Artificial Sequence: Synthetic peptide
  Seed: DPRMCSLMQGSTLPR
DPRMFSLLQPSTEPR

SEQ ID NO: 58498 - protein, 15 aa, Artificial Sequence
  Description of Artificial Sequence: Synthetic peptide
  Seed: DPRMCSLMQGSTLPR
DPRMFSLLQPSTFPR

SEQ ID NO: 58499 - protein, 15 aa, Artificial Sequence
  Description of Artificial Sequence: Synthetic peptide
  Seed: DPRMCSLMQGSTLPR
DPRMFSLLQPSTGPR

SEQ ID NO: 58500 - protein, 15 aa, Artificial Sequence
  Description of Artificial Sequence: Synthetic peptide
  Seed: DPRMCSLMQGSTLPR
DPRMFSLLQPSTHPR

SEQ ID NO: 58501 - protein, 15 aa, Artificial Sequence
  Description of Artificial Sequence: Synthetic peptide
  Seed: DPRMCSLMQGSTLPR
DPRMFSLLQPSTIPR

SEQ ID NO: 58502 - protein, 15 aa, Artificial Sequence
  Description of Artificial Sequence: Synthetic peptide
  Seed: DPRMCSLMQGSTLPR
DPRMFSLLQPSTKPR

SEQ ID NO: 58503 - protein, 15 aa, Artificial Sequence
  Description of Artificial Sequence: Synthetic peptide
  Seed: DPRMCSLMQGSTLPR
DPRMFSLLQPSTLPR

SEQ ID NO: 58504 - protein, 15 aa, Artificial Sequence
  Description of Artificial Sequence: Synthetic peptide
  Seed: DPRMCSLMQGSTLPR
DPRMFSLLQPSTMPR

SEQ ID NO: 58505 - protein, 15 aa, Artificial Sequence
  Description of Artificial Sequence: Synthetic peptide
  Seed: DPRMCSLMQGSTLPR
DPRMFSLLQPSTNPR

SEQ ID NO: 58506 - protein, 15 aa, Artificial Sequence
  Description of Artificial Sequence: Synthetic peptide
  Seed: DPRMCSLMQGSTLPR
DPRMFSLLQPSTPPR

SEQ ID NO: 58507 - protein, 15 aa, Artificial Sequence
  Description of Artificial Sequence: Synthetic peptide
  Seed: DPRMCSLMQGSTLPR
DPRMFSLLQPSTQPR

SEQ ID NO: 58508 - protein, 15 aa, Artificial Sequence
  Description of Artificial Sequence: Synthetic peptide
  Seed: DPRMCSLMQGSTLPR
DPRMFSLLQPSTRPR

SEQ ID NO: 58509 - protein, 15 aa, Artificial Sequence
  Description of Artificial Sequence: Synthetic peptide
  Seed: DPRMCSLMQGSTLPR
DPRMFSLLQPSTSPR

SEQ ID NO: 58510 - protein, 15 aa, Artificial Sequence
  Description of Artificial Sequence: Synthetic peptide
  Seed: DPRMCSLMQGSTLPR
DPRMFSLLQPSTTPR

SEQ ID NO: 58511 - protein, 15 aa, Artificial Sequence
  Description of Artificial Sequence: Synthetic peptide
  Seed: DPRMCSLMQGSTLPR
DPRMFSLLQPSTVPR

SEQ ID NO: 58512 - protein, 15 aa, Artificial Sequence
  Description of Artificial Sequence: Synthetic peptide
  Seed: DPRMCSLMQGSTLPR
DPRMFSLLQPSTWPR

SEQ ID NO: 58513 - protein, 15 aa, Artificial Sequence
  Description of Artificial Sequence: Synthetic peptide
  Seed: DPRMCSLMQGSTLPR
DPRMFSLLQPSTYPR

SEQ ID NO: 58514 - protein, 15 aa, Artificial Sequence
  Description of Artificial Sequence: Synthetic peptide
  Seed: DPRMCSLMQGSTLPR
DPRMFSLLQQSTAPR

SEQ ID NO: 58515 - protein, 15 aa, Artificial Sequence
  Description of Artificial Sequence: Synthetic peptide
  Seed: DPRMCSLMQGSTLPR
DPRMFSLLQQSTIPR

SEQ ID NO: 58516 - protein, 15 aa, Artificial Sequence
  Description of Artificial Sequence: Synthetic peptide
  Seed: DPRMCSLMQGSTLPR
DPRMFSLLQQSTLPR

SEQ ID NO: 58517 - protein, 15 aa, Artificial Sequence
  Description of Artificial Sequence: Synthetic peptide
  Seed: DPRMCSLMQGSTLPR
DPRMFSLLQQSTMPR

SEQ ID NO: 58518 - protein, 15 aa, Artificial Sequence
  Description of Artificial Sequence: Synthetic peptide
  Seed: DPRMCSLMQGSTLPR
DPRMFSLLQQSTNPR

SEQ ID NO: 58519 - protein, 15 aa, Artificial Sequence
  Description of Artificial Sequence: Synthetic peptide
  Seed: DPRMCSLMQGSTLPR
DPRMFSLLQQSTSPR

SEQ ID NO: 58520 - protein, 15 aa, Artificial Sequence
  Description of Artificial Sequence: Synthetic peptide
  Seed: DPRMCSLMQGSTLPR
DPRMFSLLQQSTTPR

SEQ ID NO: 58521 - protein, 15 aa, Artificial Sequence
  Description of Artificial Sequence: Synthetic peptide
  Seed: DPRMCSLMQGSTLPR
DPRMFSLLQQSTVPR

SEQ ID NO: 58522 - protein, 15 aa, Artificial Sequence
  Description of Artificial Sequence: Synthetic peptide
  Seed: DPRMCSLMQGSTLPR
DPRMFSLLQSSTAPR

SEQ ID NO: 58523 - protein, 15 aa, Artificial Sequence
  Description of Artificial Sequence: Synthetic peptide
  Seed: DPRMCSLMQGSTLPR
DPRMFSLLQSSTCPR

SEQ ID NO: 58524 - protein, 15 aa, Artificial Sequence
  Description of Artificial Sequence: Synthetic peptide
  Seed: DPRMCSLMQGSTLPR
DPRMFSLLQSSTDPR

SEQ ID NO: 58525 - protein, 15 aa, Artificial Sequence
  Description of Artificial Sequence: Synthetic peptide
  Seed: DPRMCSLMQGSTLPR
DPRMFSLLQSSTEPR

SEQ ID NO: 58526 - protein, 15 aa, Artificial Sequence
  Description of Artificial Sequence: Synthetic peptide
  Seed: DPRMCSLMQGSTLPR
DPRMFSLLQSSTFPR

SEQ ID NO: 58527 - protein, 15 aa, Artificial Sequence
  Description of Artificial Sequence: Synthetic peptide
  Seed: DPRMCSLMQGSTLPR
DPRMFSLLQSSTGPR

SEQ ID NO: 58528 - protein, 15 aa, Artificial Sequence
  Description of Artificial Sequence: Synthetic peptide
  Seed: DPRMCSLMQGSTLPR
DPRMFSLLQSSTHPR

SEQ ID NO: 58529 - protein, 15 aa, Artificial Sequence
  Description of Artificial Sequence: Synthetic peptide
  Seed: DPRMCSLMQGSTLPR
DPRMFSLLQSSTIPR

SEQ ID NO: 58530 - protein, 15 aa, Artificial Sequence
  Description of Artificial Sequence: Synthetic peptide
  Seed: DPRMCSLMQGSTLPR
DPRMFSLLQSSTKPR

SEQ ID NO: 58531 - protein, 15 aa, Artificial Sequence
  Description of Artificial Sequence: Synthetic peptide
  Seed: DPRMCSLMQGSTLPR
DPRMFSLLQSSTLPR

SEQ ID NO: 58532 - protein, 15 aa, Artificial Sequence
  Description of Artificial Sequence: Synthetic peptide
  Seed: DPRMCSLMQGSTLPR
DPRMFSLLQSSTMPR

SEQ ID NO: 58533 - protein, 15 aa, Artificial Sequence
  Description of Artificial Sequence: Synthetic peptide
  Seed: DPRMCSLMQGSTLPR
DPRMFSLLQSSTNPR

SEQ ID NO: 58534 - protein, 15 aa, Artificial Sequence
  Description of Artificial Sequence: Synthetic peptide
  Seed: DPRMCSLMQGSTLPR
DPRMFSLLQSSTPPR

SEQ ID NO: 58535 - protein, 15 aa, Artificial Sequence
  Description of Artificial Sequence: Synthetic peptide
  Seed: DPRMCSLMQGSTLPR
DPRMFSLLQSSTQPR

SEQ ID NO: 58536 - protein, 15 aa, Artificial Sequence
  Description of Artificial Sequence: Synthetic peptide
  Seed: DPRMCSLMQGSTLPR
DPRMFSLLQSSTRPR

SEQ ID NO: 58537 - protein, 15 aa, Artificial Sequence
  Description of Artificial Sequence: Synthetic peptide
  Seed: DPRMCSLMQGSTLPR
DPRMFSLLQSSTSPR

SEQ ID NO: 58538 - protein, 15 aa, Artificial Sequence
  Description of Artificial Sequence: Synthetic peptide
  Seed: DPRMCSLMQGSTLPR
DPRMFSLLQSSTTPR

SEQ ID NO: 58539 - protein, 15 aa, Artificial Sequence
  Description of Artificial Sequence: Synthetic peptide
  Seed: DPRMCSLMQGSTLPR
DPRMFSLLQSSTVPR

SEQ ID NO: 58540 - protein, 15 aa, Artificial Sequence
  Description of Artificial Sequence: Synthetic peptide
  Seed: DPRMCSLMQGSTLPR
DPRMFSLLQSSTWPR

SEQ ID NO: 58541 - protein, 15 aa, Artificial Sequence
  Description of Artificial Sequence: Synthetic peptide
  Seed: DPRMCSLMQGSTLPR
DPRMFSLLQSSTYPR

SEQ ID NO: 58542 - protein, 15 aa, Artificial Sequence
  Description of Artificial Sequence: Synthetic peptide
  Seed: DPRMCSLMQGSTLPR
DPRMFSLLQTSTAPR

SEQ ID NO: 58543 - protein, 15 aa, Artificial Sequence
  Description of Artificial Sequence: Synthetic peptide
  Seed: DPRMCSLMQGSTLPR
DPRMFSLLQTSTCPR

SEQ ID NO: 58544 - protein, 15 aa, Artificial Sequence
  Description of Artificial Sequence: Synthetic peptide
  Seed: DPRMCSLMQGSTLPR
DPRMFSLLQTSTDPR

SEQ ID NO: 58545 - protein, 15 aa, Artificial Sequence
  Description of Artificial Sequence: Synthetic peptide
  Seed: DPRMCSLMQGSTLPR
DPRMFSLLQTSTEPR

SEQ ID NO: 58546 - protein, 15 aa, Artificial Sequence
  Description of Artificial Sequence: Synthetic peptide
  Seed: DPRMCSLMQGSTLPR
DPRMFSLLQTSTFPR

SEQ ID NO: 58547 - protein, 15 aa, Artificial Sequence
  Description of Artificial Sequence: Synthetic peptide
  Seed: DPRMCSLMQGSTLPR
DPRMFSLLQTSTGPR

SEQ ID NO: 58548 - protein, 15 aa, Artificial Sequence
  Description of Artificial Sequence: Synthetic peptide
  Seed: DPRMCSLMQGSTLPR
DPRMFSLLQTSTHPR

SEQ ID NO: 58549 - protein, 15 aa, Artificial Sequence
  Description of Artificial Sequence: Synthetic peptide
  Seed: DPRMCSLMQGSTLPR
DPRMFSLLQTSTIPR

SEQ ID NO: 58550 - protein, 15 aa, Artificial Sequence
  Description of Artificial Sequence: Synthetic peptide
  Seed: DPRMCSLMQGSTLPR
DPRMFSLLQTSTKPR

SEQ ID NO: 58551 - protein, 15 aa, Artificial Sequence
  Description of Artificial Sequence: Synthetic peptide
  Seed: DPRMCSLMQGSTLPR
DPRMFSLLQTSTLPR

SEQ ID NO: 58552 - protein, 15 aa, Artificial Sequence
  Description of Artificial Sequence: Synthetic peptide
  Seed: DPRMCSLMQGSTLPR
DPRMFSLLQTSTMPR

SEQ ID NO: 58553 - protein, 15 aa, Artificial Sequence
  Description of Artificial Sequence: Synthetic peptide
  Seed: DPRMCSLMQGSTLPR
DPRMFSLLQTSTNPR

SEQ ID NO: 58554 - protein, 15 aa, Artificial Sequence
  Description of Artificial Sequence: Synthetic peptide
  Seed: DPRMCSLMQGSTLPR
DPRMFSLLQTSTPPR

SEQ ID NO: 58555 - protein, 15 aa, Artificial Sequence
  Description of Artificial Sequence: Synthetic peptide
  Seed: DPRMCSLMQGSTLPR
DPRMFSLLQTSTQPR

SEQ ID NO: 58556 - protein, 15 aa, Artificial Sequence
  Description of Artificial Sequence: Synthetic peptide
  Seed: DPRMCSLMQGSTLPR
DPRMFSLLQTSTRPR

SEQ ID NO: 58557 - protein, 15 aa, Artificial Sequence
  Description of Artificial Sequence: Synthetic peptide
  Seed: DPRMCSLMQGSTLPR
DPRMFSLLQTSTSPR

SEQ ID NO: 58558 - protein, 15 aa, Artificial Sequence
  Description of Artificial Sequence: Synthetic peptide
  Seed: DPRMCSLMQGSTLPR
DPRMFSLLQTSTTPR

SEQ ID NO: 58559 - protein, 15 aa, Artificial Sequence
  Description of Artificial Sequence: Synthetic peptide
  Seed: DPRMCSLMQGSTLPR
DPRMFSLLQTSTVPR

SEQ ID NO: 58560 - protein, 15 aa, Artificial Sequence
  Description of Artificial Sequence: Synthetic peptide
  Seed: DPRMCSLMQGSTLPR
DPRMFSLLQTSTWPR

SEQ ID NO: 58561 - protein, 15 aa, Artificial Sequence
  Description of Artificial Sequence: Synthetic peptide
  Seed: DPRMCSLMQGSTLPR
DPRMFSLLQTSTYPR

SEQ ID NO: 58562 - protein, 15 aa, Artificial Sequence
  Description of Artificial Sequence: Synthetic peptide
  Seed: DPRMCSLMQGSTLPR
DPRMFSLLQVSTAPR

SEQ ID NO: 58563 - protein, 15 aa, Artificial Sequence
  Description of Artificial Sequence: Synthetic peptide
  Seed: DPRMCSLMQGSTLPR
DPRMFSLLQVSTCPR

SEQ ID NO: 58564 - protein, 15 aa, Artificial Sequence
  Description of Artificial Sequence: Synthetic peptide
  Seed: DPRMCSLMQGSTLPR
DPRMFSLLQVSTDPR

SEQ ID NO: 58565 - protein, 15 aa, Artificial Sequence
  Description of Artificial Sequence: Synthetic peptide
  Seed: DPRMCSLMQGSTLPR
DPRMFSLLQVSTEPR

SEQ ID NO: 58566 - protein, 15 aa, Artificial Sequence
  Description of Artificial Sequence: Synthetic peptide
  Seed: DPRMCSLMQGSTLPR
DPRMFSLLQVSTFPR

SEQ ID NO: 58567 - protein, 15 aa, Artificial Sequence
  Description of Artificial Sequence: Synthetic peptide
  Seed: DPRMCSLMQGSTLPR
DPRMFSLLQVSTGPR

SEQ ID NO: 58568 - protein, 15 aa, Artificial Sequence
  Description of Artificial Sequence: Synthetic peptide
  Seed: DPRMCSLMQGSTLPR
DPRMFSLLQVSTHPR

SEQ ID NO: 58569 - protein, 15 aa, Artificial Sequence
  Description of Artificial Sequence: Synthetic peptide
  Seed: DPRMCSLMQGSTLPR
DPRMFSLLQVSTIPR

SEQ ID NO: 58570 - protein, 15 aa, Artificial Sequence
  Description of Artificial Sequence: Synthetic peptide
  Seed: DPRMCSLMQGSTLPR
DPRMFSLLQVSTKPR

SEQ ID NO: 58571 - protein, 15 aa, Artificial Sequence
  Description of Artificial Sequence: Synthetic peptide
  Seed: DPRMCSLMQGSTLPR
DPRMFSLLQVSTLPR

SEQ ID NO: 58572 - protein, 15 aa, Artificial Sequence
  Description of Artificial Sequence: Synthetic peptide
  Seed: DPRMCSLMQGSTLPR
DPRMFSLLQVSTMPR

SEQ ID NO: 58573 - protein, 15 aa, Artificial Sequence
  Description of Artificial Sequence: Synthetic peptide
  Seed: DPRMCSLMQGSTLPR
DPRMFSLLQVSTNPR

SEQ ID NO: 58574 - protein, 15 aa, Artificial Sequence
  Description of Artificial Sequence: Synthetic peptide
  Seed: DPRMCSLMQGSTLPR
DPRMFSLLQVSTPPR

SEQ ID NO: 58575 - protein, 15 aa, Artificial Sequence
  Description of Artificial Sequence: Synthetic peptide
  Seed: DPRMCSLMQGSTLPR
DPRMFSLLQVSTQPR

SEQ ID NO: 58576 - protein, 15 aa, Artificial Sequence
  Description of Artificial Sequence: Synthetic peptide
  Seed: DPRMCSLMQGSTLPR
DPRMFSLLQVSTSPR

SEQ ID NO: 58577 - protein, 15 aa, Artificial Sequence
  Description of Artificial Sequence: Synthetic peptide
  Seed: DPRMCSLMQGSTLPR
DPRMFSLLQVSTTPR

SEQ ID NO: 58578 - protein, 15 aa, Artificial Sequence
  Description of Artificial Sequence: Synthetic peptide
  Seed: DPRMCSLMQGSTLPR
DPRMFSLLQVSTVPR

SEQ ID NO: 58579 - protein, 15 aa, Artificial Sequence
  Description of Artificial Sequence: Synthetic peptide
  Seed: DPRMCSLMQGSTLPR
DPRMFSLLQVSTYPR

SEQ ID NO: 58580 - protein, 15 aa, Artificial Sequence
  Description of Artificial Sequence: Synthetic peptide
  Seed: DPRMCSLMQGSTLPR
DPRMFSLLQWSTAPR

SEQ ID NO: 58581 - protein, 15 aa, Artificial Sequence
  Description of Artificial Sequence: Synthetic peptide
  Seed: DPRMCSLMQGSTLPR
DPRMFSLLQWSTIPR

SEQ ID NO: 58582 - protein, 15 aa, Artificial Sequence
  Description of Artificial Sequence: Synthetic peptide
  Seed: DPRMCSLMQGSTLPR
DPRMFSLLQWSTLPR

SEQ ID NO: 58583 - protein, 15 aa, Artificial Sequence
  Description of Artificial Sequence: Synthetic peptide
  Seed: DPRMCSLMQGSTLPR
DPRMFSLLQWSTVPR

SEQ ID NO: 58584 - protein, 15 aa, Artificial Sequence
  Description of Artificial Sequence: Synthetic peptide
  Seed: DPRMCSLMQGSTLPR
DPRMFSLLQYSTVPR

SEQ ID NO: 58585 - protein, 15 aa, Artificial Sequence
  Description of Artificial Sequence: Synthetic peptide
  Seed: DPRMCSLMQGSTLPR
DPRMFSLMQASTAPR

SEQ ID NO: 58586 - protein, 15 aa, Artificial Sequence
  Description of Artificial Sequence: Synthetic peptide
  Seed: DPRMCSLMQGSTLPR
DPRMFSLMQASTCPR

SEQ ID NO: 58587 - protein, 15 aa, Artificial Sequence
  Description of Artificial Sequence: Synthetic peptide
  Seed: DPRMCSLMQGSTLPR
DPRMFSLMQASTDPR

SEQ ID NO: 58588 - protein, 15 aa, Artificial Sequence
  Description of Artificial Sequence: Synthetic peptide
  Seed: DPRMCSLMQGSTLPR
DPRMFSLMQASTEPR

SEQ ID NO: 58589 - protein, 15 aa, Artificial Sequence
  Description of Artificial Sequence: Synthetic peptide
  Seed: DPRMCSLMQGSTLPR
DPRMFSLMQASTFPR

SEQ ID NO: 58590 - protein, 15 aa, Artificial Sequence
  Description of Artificial Sequence: Synthetic peptide
  Seed: DPRMCSLMQGSTLPR
DPRMFSLMQASTGPR

SEQ ID NO: 58591 - protein, 15 aa, Artificial Sequence
  Description of Artificial Sequence: Synthetic peptide
  Seed: DPRMCSLMQGSTLPR
DPRMFSLMQASTHPR

SEQ ID NO: 58592 - protein, 15 aa, Artificial Sequence
  Description of Artificial Sequence: Synthetic peptide
  Seed: DPRMCSLMQGSTLPR
DPRMFSLMQASTIPR

SEQ ID NO: 58593 - protein, 15 aa, Artificial Sequence
  Description of Artificial Sequence: Synthetic peptide
  Seed: DPRMCSLMQGSTLPR
DPRMFSLMQASTKPR

SEQ ID NO: 58594 - protein, 15 aa, Artificial Sequence
  Description of Artificial Sequence: Synthetic peptide
  Seed: DPRMCSLMQGSTLPR
DPRMFSLMQASTLPR

SEQ ID NO: 58595 - protein, 15 aa, Artificial Sequence
  Description of Artificial Sequence: Synthetic peptide
  Seed: DPRMCSLMQGSTLPR
DPRMFSLMQASTMPR

SEQ ID NO: 58596 - protein, 15 aa, Artificial Sequence
  Description of Artificial Sequence: Synthetic peptide
  Seed: DPRMCSLMQGSTLPR
DPRMFSLMQASTNPR

SEQ ID NO: 58597 - protein, 15 aa, Artificial Sequence
  Description of Artificial Sequence: Synthetic peptide
  Seed: DPRMCSLMQGSTLPR
DPRMFSLMQASTPPR

SEQ ID NO: 58598 - protein, 15 aa, Artificial Sequence
  Description of Artificial Sequence: Synthetic peptide
  Seed: DPRMCSLMQGSTLPR
DPRMFSLMQASTQPR

SEQ ID NO: 58599 - protein, 15 aa, Artificial Sequence
  Description of Artificial Sequence: Synthetic peptide
  Seed: DPRMCSLMQGSTLPR
DPRMFSLMQASTRPR

SEQ ID NO: 58600 - protein, 15 aa, Artificial Sequence
  Description of Artificial Sequence: Synthetic peptide
  Seed: DPRMCSLMQGSTLPR
DPRMFSLMQASTSPR

SEQ ID NO: 58601 - protein, 15 aa, Artificial Sequence
  Description of Artificial Sequence: Synthetic peptide
  Seed: DPRMCSLMQGSTLPR
DPRMFSLMQASTTPR

SEQ ID NO: 58602 - protein, 15 aa, Artificial Sequence
  Description of Artificial Sequence: Synthetic peptide
  Seed: DPRMCSLMQGSTLPR
DPRMFSLMQASTVPR

SEQ ID NO: 58603 - protein, 15 aa, Artificial Sequence
  Description of Artificial Sequence: Synthetic peptide
  Seed: DPRMCSLMQGSTLPR
DPRMFSLMQASTWPR

SEQ ID NO: 58604 - protein, 15 aa, Artificial Sequence
  Description of Artificial Sequence: Synthetic peptide
  Seed: DPRMCSLMQGSTLPR
DPRMFSLMQASTYPR

SEQ ID NO: 58605 - protein, 15 aa, Artificial Sequence
  Description of Artificial Sequence: Synthetic peptide
  Seed: DPRMCSLMQGSTLPR
DPRMFSLMQCSTAPR

SEQ ID NO: 58606 - protein, 15 aa, Artificial Sequence
  Description of Artificial Sequence: Synthetic peptide
  Seed: DPRMCSLMQGSTLPR
DPRMFSLMQCSTIPR

SEQ ID NO: 58607 - protein, 15 aa, Artificial Sequence
  Description of Artificial Sequence: Synthetic peptide
  Seed: DPRMCSLMQGSTLPR
DPRMFSLMQCSTLPR

SEQ ID NO: 58608 - protein, 15 aa, Artificial Sequence
  Description of Artificial Sequence: Synthetic peptide
  Seed: DPRMCSLMQGSTLPR
DPRMFSLMQCSTMPR

SEQ ID NO: 58609 - protein, 15 aa, Artificial Sequence
  Description of Artificial Sequence: Synthetic peptide
  Seed: DPRMCSLMQGSTLPR
DPRMFSLMQCSTNPR

SEQ ID NO: 58610 - protein, 15 aa, Artificial Sequence
  Description of Artificial Sequence: Synthetic peptide
  Seed: DPRMCSLMQGSTLPR
DPRMFSLMQCSTSPR

SEQ ID NO: 58611 - protein, 15 aa, Artificial Sequence
  Description of Artificial Sequence: Synthetic peptide
  Seed: DPRMCSLMQGSTLPR
DPRMFSLMQCSTTPR

SEQ ID NO: 58612 - protein, 15 aa, Artificial Sequence
  Description of Artificial Sequence: Synthetic peptide
  Seed: DPRMCSLMQGSTLPR
DPRMFSLMQCSTVPR

SEQ ID NO: 58613 - protein, 15 aa, Artificial Sequence
  Description of Artificial Sequence: Synthetic peptide
  Seed: DPRMCSLMQGSTLPR
DPRMFSLMQDSTIPR

SEQ ID NO: 58614 - protein, 15 aa, Artificial Sequence
  Description of Artificial Sequence: Synthetic peptide
  Seed: DPRMCSLMQGSTLPR
DPRMFSLMQDSTLPR

SEQ ID NO: 58615 - protein, 15 aa, Artificial Sequence
  Description of Artificial Sequence: Synthetic peptide
  Seed: DPRMCSLMQGSTLPR
DPRMFSLMQDSTVPR

SEQ ID NO: 58616 - protein, 15 aa, Artificial Sequence
  Description of Artificial Sequence: Synthetic peptide
  Seed: DPRMCSLMQGSTLPR
DPRMFSLMQESTAPR

SEQ ID NO: 58617 - protein, 15 aa, Artificial Sequence
  Description of Artificial Sequence: Synthetic peptide
  Seed: DPRMCSLMQGSTLPR
DPRMFSLMQESTIPR

SEQ ID NO: 58618 - protein, 15 aa, Artificial Sequence
  Description of Artificial Sequence: Synthetic peptide
  Seed: DPRMCSLMQGSTLPR
DPRMFSLMQESTLPR

SEQ ID NO: 58619 - protein, 15 aa, Artificial Sequence
  Description of Artificial Sequence: Synthetic peptide
  Seed: DPRMCSLMQGSTLPR
DPRMFSLMQESTNPR

SEQ ID NO: 58620 - protein, 15 aa, Artificial Sequence
  Description of Artificial Sequence: Synthetic peptide
  Seed: DPRMCSLMQGSTLPR
DPRMFSLMQESTSPR

SEQ ID NO: 58621 - protein, 15 aa, Artificial Sequence
  Description of Artificial Sequence: Synthetic peptide
  Seed: DPRMCSLMQGSTLPR
DPRMFSLMQESTTPR

SEQ ID NO: 58622 - protein, 15 aa, Artificial Sequence
  Description of Artificial Sequence: Synthetic peptide
  Seed: DPRMCSLMQGSTLPR
DPRMFSLMQESTVPR

SEQ ID NO: 58623 - protein, 15 aa, Artificial Sequence
  Description of Artificial Sequence: Synthetic peptide
  Seed: DPRMCSLMQGSTLPR
DPRMFSLMQFSTAPR

SEQ ID NO: 58624 - protein, 15 aa, Artificial Sequence
  Description of Artificial Sequence: Synthetic peptide
  Seed: DPRMCSLMQGSTLPR
DPRMFSLMQFSTIPR

SEQ ID NO: 58625 - protein, 15 aa, Artificial Sequence
  Description of Artificial Sequence: Synthetic peptide
  Seed: DPRMCSLMQGSTLPR
DPRMFSLMQFSTLPR

SEQ ID NO: 58626 - protein, 15 aa, Artificial Sequence
  Description of Artificial Sequence: Synthetic peptide
  Seed: DPRMCSLMQGSTLPR
DPRMFSLMQFSTSPR

SEQ ID NO: 58627 - protein, 15 aa, Artificial Sequence
  Description of Artificial Sequence: Synthetic peptide
  Seed: DPRMCSLMQGSTLPR
DPRMFSLMQFSTVPR

SEQ ID NO: 58628 - protein, 15 aa, Artificial Sequence
  Description of Artificial Sequence: Synthetic peptide
  Seed: DPRMCSLMQGSTLPR
DPRMFSLMQGSTAPR

SEQ ID NO: 58629 - protein, 15 aa, Artificial Sequence
  Description of Artificial Sequence: Synthetic peptide
  Seed: DPRMCSLMQGSTLPR
DPRMFSLMQGSTCPR

SEQ ID NO: 58630 - protein, 15 aa, Artificial Sequence
  Description of Artificial Sequence: Synthetic peptide
  Seed: DPRMCSLMQGSTLPR
DPRMFSLMQGSTDPR

SEQ ID NO: 58631 - protein, 15 aa, Artificial Sequence
  Description of Artificial Sequence: Synthetic peptide
  Seed: DPRMCSLMQGSTLPR
DPRMFSLMQGSTEPR

SEQ ID NO: 58632 - protein, 15 aa, Artificial Sequence
  Description of Artificial Sequence: Synthetic peptide
  Seed: DPRMCSLMQGSTLPR
DPRMFSLMQGSTFPR

SEQ ID NO: 58633 - protein, 15 aa, Artificial Sequence
  Description of Artificial Sequence: Synthetic peptide
  Seed: DPRMCSLMQGSTLPR
DPRMFSLMQGSTGPR

SEQ ID NO: 58634 - protein, 15 aa, Artificial Sequence
  Description of Artificial Sequence: Synthetic peptide
  Seed: DPRMCSLMQGSTLPR
DPRMFSLMQGSTHPR

SEQ ID NO: 58635 - protein, 15 aa, Artificial Sequence
  Description of Artificial Sequence: Synthetic peptide
  Seed: DPRMCSLMQGSTLPR
DPRMFSLMQGSTIPR

SEQ ID NO: 58636 - protein, 15 aa, Artificial Sequence
  Description of Artificial Sequence: Synthetic peptide
  Seed: DPRMCSLMQGSTLPR
DPRMFSLMQGSTKPR

SEQ ID NO: 58637 - protein, 15 aa, Artificial Sequence
  Description of Artificial Sequence: Synthetic peptide
  Seed: DPRMCSLMQGSTLPR
DPRMFSLMQGSTLPR

SEQ ID NO: 58638 - protein, 15 aa, Artificial Sequence
  Description of Artificial Sequence: Synthetic peptide
  Seed: DPRMCSLMQGSTLPR
DPRMFSLMQGSTMPR

SEQ ID NO: 58639 - protein, 15 aa, Artificial Sequence
  Description of Artificial Sequence: Synthetic peptide
  Seed: DPRMCSLMQGSTLPR
DPRMFSLMQGSTNPR

SEQ ID NO: 58640 - protein, 15 aa, Artificial Sequence
  Description of Artificial Sequence: Synthetic peptide
  Seed: DPRMCSLMQGSTLPR
DPRMFSLMQGSTPPR

SEQ ID NO: 58641 - protein, 15 aa, Artificial Sequence
  Description of Artificial Sequence: Synthetic peptide
  Seed: DPRMCSLMQGSTLPR
DPRMFSLMQGSTQPR

SEQ ID NO: 58642 - protein, 15 aa, Artificial Sequence
  Description of Artificial Sequence: Synthetic peptide
  Seed: DPRMCSLMQGSTLPR
DPRMFSLMQGSTRPR

SEQ ID NO: 58643 - protein, 15 aa, Artificial Sequence
  Description of Artificial Sequence: Synthetic peptide
  Seed: DPRMCSLMQGSTLPR
DPRMFSLMQGSTSPR

SEQ ID NO: 58644 - protein, 15 aa, Artificial Sequence
  Description of Artificial Sequence: Synthetic peptide
  Seed: DPRMCSLMQGSTLPR
DPRMFSLMQGSTTPR

SEQ ID NO: 58645 - protein, 15 aa, Artificial Sequence
  Description of Artificial Sequence: Synthetic peptide
  Seed: DPRMCSLMQGSTLPR
DPRMFSLMQGSTVPR

SEQ ID NO: 58646 - protein, 15 aa, Artificial Sequence
  Description of Artificial Sequence: Synthetic peptide
  Seed: DPRMCSLMQGSTLPR
DPRMFSLMQGSTWPR

SEQ ID NO: 58647 - protein, 15 aa, Artificial Sequence
  Description of Artificial Sequence: Synthetic peptide
  Seed: DPRMCSLMQGSTLPR
DPRMFSLMQGSTYPR

SEQ ID NO: 58648 - protein, 15 aa, Artificial Sequence
  Description of Artificial Sequence: Synthetic peptide
  Seed: DPRMCSLMQGSTLPR
DPRMFSLMQHSTAPR

SEQ ID NO: 58649 - protein, 15 aa, Artificial Sequence
  Description of Artificial Sequence: Synthetic peptide
  Seed: DPRMCSLMQGSTLPR
DPRMFSLMQHSTIPR

SEQ ID NO: 58650 - protein, 15 aa, Artificial Sequence
  Description of Artificial Sequence: Synthetic peptide
  Seed: DPRMCSLMQGSTLPR
DPRMFSLMQHSTLPR

SEQ ID NO: 58651 - protein, 15 aa, Artificial Sequence
  Description of Artificial Sequence: Synthetic peptide
  Seed: DPRMCSLMQGSTLPR
DPRMFSLMQHSTMPR

SEQ ID NO: 58652 - protein, 15 aa, Artificial Sequence
  Description of Artificial Sequence: Synthetic peptide
  Seed: DPRMCSLMQGSTLPR
DPRMFSLMQHSTNPR

SEQ ID NO: 58653 - protein, 15 aa, Artificial Sequence
  Description of Artificial Sequence: Synthetic peptide
  Seed: DPRMCSLMQGSTLPR
DPRMFSLMQHSTSPR

SEQ ID NO: 58654 - protein, 15 aa, Artificial Sequence
  Description of Artificial Sequence: Synthetic peptide
  Seed: DPRMCSLMQGSTLPR
DPRMFSLMQHSTTPR

SEQ ID NO: 58655 - protein, 15 aa, Artificial Sequence
  Description of Artificial Sequence: Synthetic peptide
  Seed: DPRMCSLMQGSTLPR
DPRMFSLMQHSTVPR

SEQ ID NO: 58656 - protein, 15 aa, Artificial Sequence
  Description of Artificial Sequence: Synthetic peptide
  Seed: DPRMCSLMQGSTLPR
DPRMFSLMQISTAPR

SEQ ID NO: 58657 - protein, 15 aa, Artificial Sequence
  Description of Artificial Sequence: Synthetic peptide
  Seed: DPRMCSLMQGSTLPR
DPRMFSLMQISTCPR

SEQ ID NO: 58658 - protein, 15 aa, Artificial Sequence
  Description of Artificial Sequence: Synthetic peptide
  Seed: DPRMCSLMQGSTLPR
DPRMFSLMQISTDPR

SEQ ID NO: 58659 - protein, 15 aa, Artificial Sequence
  Description of Artificial Sequence: Synthetic peptide
  Seed: DPRMCSLMQGSTLPR
DPRMFSLMQISTEPR

SEQ ID NO: 58660 - protein, 15 aa, Artificial Sequence
  Description of Artificial Sequence: Synthetic peptide
  Seed: DPRMCSLMQGSTLPR
DPRMFSLMQISTFPR

SEQ ID NO: 58661 - protein, 15 aa, Artificial Sequence
  Description of Artificial Sequence: Synthetic peptide
  Seed: DPRMCSLMQGSTLPR
DPRMFSLMQISTGPR

SEQ ID NO: 58662 - protein, 15 aa, Artificial Sequence
  Description of Artificial Sequence: Synthetic peptide
  Seed: DPRMCSLMQGSTLPR
DPRMFSLMQISTHPR

SEQ ID NO: 58663 - protein, 15 aa, Artificial Sequence
  Description of Artificial Sequence: Synthetic peptide
  Seed: DPRMCSLMQGSTLPR
DPRMFSLMQISTIPR

SEQ ID NO: 58664 - protein, 15 aa, Artificial Sequence
  Description of Artificial Sequence: Synthetic peptide
  Seed: DPRMCSLMQGSTLPR
DPRMFSLMQISTKPR

SEQ ID NO: 58665 - protein, 15 aa, Artificial Sequence
  Description of Artificial Sequence: Synthetic peptide
  Seed: DPRMCSLMQGSTLPR
DPRMFSLMQISTLPR

SEQ ID NO: 58666 - protein, 15 aa, Artificial Sequence
  Description of Artificial Sequence: Synthetic peptide
  Seed: DPRMCSLMQGSTLPR
DPRMFSLMQISTMPR

SEQ ID NO: 58667 - protein, 15 aa, Artificial Sequence
  Description of Artificial Sequence: Synthetic peptide
  Seed: DPRMCSLMQGSTLPR
DPRMFSLMQISTNPR

SEQ ID NO: 58668 - protein, 15 aa, Artificial Sequence
  Description of Artificial Sequence: Synthetic peptide
  Seed: DPRMCSLMQGSTLPR
DPRMFSLMQISTPPR

SEQ ID NO: 58669 - protein, 15 aa, Artificial Sequence
  Description of Artificial Sequence: Synthetic peptide
  Seed: DPRMCSLMQGSTLPR
DPRMFSLMQISTQPR

SEQ ID NO: 58670 - protein, 15 aa, Artificial Sequence
  Description of Artificial Sequence: Synthetic peptide
  Seed: DPRMCSLMQGSTLPR
DPRMFSLMQISTRPR

SEQ ID NO: 58671 - protein, 15 aa, Artificial Sequence
  Description of Artificial Sequence: Synthetic peptide
  Seed: DPRMCSLMQGSTLPR
DPRMFSLMQISTSPR

SEQ ID NO: 58672 - protein, 15 aa, Artificial Sequence
  Description of Artificial Sequence: Synthetic peptide
  Seed: DPRMCSLMQGSTLPR
DPRMFSLMQISTTPR

SEQ ID NO: 58673 - protein, 15 aa, Artificial Sequence
  Description of Artificial Sequence: Synthetic peptide
  Seed: DPRMCSLMQGSTLPR
DPRMFSLMQISTVPR

SEQ ID NO: 58674 - protein, 15 aa, Artificial Sequence
  Description of Artificial Sequence: Synthetic peptide
  Seed: DPRMCSLMQGSTLPR
DPRMFSLMQLSTAPR

SEQ ID NO: 58675 - protein, 15 aa, Artificial Sequence
  Description of Artificial Sequence: Synthetic peptide
  Seed: DPRMCSLMQGSTLPR
DPRMFSLMQLSTDPR

SEQ ID NO: 58676 - protein, 15 aa, Artificial Sequence
  Description of Artificial Sequence: Synthetic peptide
  Seed: DPRMCSLMQGSTLPR
DPRMFSLMQLSTGPR

SEQ ID NO: 58677 - protein, 15 aa, Artificial Sequence
  Description of Artificial Sequence: Synthetic peptide
  Seed: DPRMCSLMQGSTLPR
DPRMFSLMQLSTHPR

SEQ ID NO: 58678 - protein, 15 aa, Artificial Sequence
  Description of Artificial Sequence: Synthetic peptide
  Seed: DPRMCSLMQGSTLPR
DPRMFSLMQLSTIPR

SEQ ID NO: 58679 - protein, 15 aa, Artificial Sequence
  Description of Artificial Sequence: Synthetic peptide
  Seed: DPRMCSLMQGSTLPR
DPRMFSLMQLSTLPR

SEQ ID NO: 58680 - protein, 15 aa, Artificial Sequence
  Description of Artificial Sequence: Synthetic peptide
  Seed: DPRMCSLMQGSTLPR
DPRMFSLMQLSTMPR

SEQ ID NO: 58681 - protein, 15 aa, Artificial Sequence
  Description of Artificial Sequence: Synthetic peptide
  Seed: DPRMCSLMQGSTLPR
DPRMFSLMQLSTNPR

SEQ ID NO: 58682 - protein, 15 aa, Artificial Sequence
  Description of Artificial Sequence: Synthetic peptide
  Seed: DPRMCSLMQGSTLPR
DPRMFSLMQLSTQPR

SEQ ID NO: 58683 - protein, 15 aa, Artificial Sequence
  Description of Artificial Sequence: Synthetic peptide
  Seed: DPRMCSLMQGSTLPR
DPRMFSLMQLSTSPR

SEQ ID NO: 58684 - protein, 15 aa, Artificial Sequence
  Description of Artificial Sequence: Synthetic peptide
  Seed: DPRMCSLMQGSTLPR
DPRMFSLMQLSTTPR

SEQ ID NO: 58685 - protein, 15 aa, Artificial Sequence
  Description of Artificial Sequence: Synthetic peptide
  Seed: DPRMCSLMQGSTLPR
DPRMFSLMQLSTVPR

SEQ ID NO: 58686 - protein, 15 aa, Artificial Sequence
  Description of Artificial Sequence: Synthetic peptide
  Seed: DPRMCSLMQGSTLPR
DPRMFSLMQMSTAPR

SEQ ID NO: 58687 - protein, 15 aa, Artificial Sequence
  Description of Artificial Sequence: Synthetic peptide
  Seed: DPRMCSLMQGSTLPR
DPRMFSLMQMSTGPR

SEQ ID NO: 58688 - protein, 15 aa, Artificial Sequence
  Description of Artificial Sequence: Synthetic peptide
  Seed: DPRMCSLMQGSTLPR
DPRMFSLMQMSTHPR

SEQ ID NO: 58689 - protein, 15 aa, Artificial Sequence
  Description of Artificial Sequence: Synthetic peptide
  Seed: DPRMCSLMQGSTLPR
DPRMFSLMQMSTIPR

SEQ ID NO: 58690 - protein, 15 aa, Artificial Sequence
  Description of Artificial Sequence: Synthetic peptide
  Seed: DPRMCSLMQGSTLPR
DPRMFSLMQMSTLPR

SEQ ID NO: 58691 - protein, 15 aa, Artificial Sequence
  Description of Artificial Sequence: Synthetic peptide
  Seed: DPRMCSLMQGSTLPR
DPRMFSLMQMSTMPR

SEQ ID NO: 58692 - protein, 15 aa, Artificial Sequence
  Description of Artificial Sequence: Synthetic peptide
  Seed: DPRMCSLMQGSTLPR
DPRMFSLMQMSTNPR

SEQ ID NO: 58693 - protein, 15 aa, Artificial Sequence
  Description of Artificial Sequence: Synthetic peptide
  Seed: DPRMCSLMQGSTLPR
DPRMFSLMQMSTQPR

SEQ ID NO: 58694 - protein, 15 aa, Artificial Sequence
  Description of Artificial Sequence: Synthetic peptide
  Seed: DPRMCSLMQGSTLPR
DPRMFSLMQMSTSPR

SEQ ID NO: 58695 - protein, 15 aa, Artificial Sequence
  Description of Artificial Sequence: Synthetic peptide
  Seed: DPRMCSLMQGSTLPR
DPRMFSLMQMSTTPR

SEQ ID NO: 58696 - protein, 15 aa, Artificial Sequence
  Description of Artificial Sequence: Synthetic peptide
  Seed: DPRMCSLMQGSTLPR
DPRMFSLMQMSTVPR

SEQ ID NO: 58697 - protein, 15 aa, Artificial Sequence
  Description of Artificial Sequence: Synthetic peptide
  Seed: DPRMCSLMQGSTLPR
DPRMFSLMQNSTAPR

SEQ ID NO: 58698 - protein, 15 aa, Artificial Sequence
  Description of Artificial Sequence: Synthetic peptide
  Seed: DPRMCSLMQGSTLPR
DPRMFSLMQNSTCPR

SEQ ID NO: 58699 - protein, 15 aa, Artificial Sequence
  Description of Artificial Sequence: Synthetic peptide
  Seed: DPRMCSLMQGSTLPR
DPRMFSLMQNSTDPR

SEQ ID NO: 58700 - protein, 15 aa, Artificial Sequence
  Description of Artificial Sequence: Synthetic peptide
  Seed: DPRMCSLMQGSTLPR
DPRMFSLMQNSTEPR

SEQ ID NO: 58701 - protein, 15 aa, Artificial Sequence
  Description of Artificial Sequence: Synthetic peptide
  Seed: DPRMCSLMQGSTLPR
DPRMFSLMQNSTFPR

SEQ ID NO: 58702 - protein, 15 aa, Artificial Sequence
  Description of Artificial Sequence: Synthetic peptide
  Seed: DPRMCSLMQGSTLPR
DPRMFSLMQNSTGPR

SEQ ID NO: 58703 - protein, 15 aa, Artificial Sequence
  Description of Artificial Sequence: Synthetic peptide
  Seed: DPRMCSLMQGSTLPR
DPRMFSLMQNSTHPR

SEQ ID NO: 58704 - protein, 15 aa, Artificial Sequence
  Description of Artificial Sequence: Synthetic peptide
  Seed: DPRMCSLMQGSTLPR
DPRMFSLMQNSTIPR

SEQ ID NO: 58705 - protein, 15 aa, Artificial Sequence
  Description of Artificial Sequence: Synthetic peptide
  Seed: DPRMCSLMQGSTLPR
DPRMFSLMQNSTKPR

SEQ ID NO: 58706 - protein, 15 aa, Artificial Sequence
  Description of Artificial Sequence: Synthetic peptide
  Seed: DPRMCSLMQGSTLPR
DPRMFSLMQNSTLPR

SEQ ID NO: 58707 - protein, 15 aa, Artificial Sequence
  Description of Artificial Sequence: Synthetic peptide
  Seed: DPRMCSLMQGSTLPR
DPRMFSLMQNSTMPR

SEQ ID NO: 58708 - protein, 15 aa, Artificial Sequence
  Description of Artificial Sequence: Synthetic peptide
  Seed: DPRMCSLMQGSTLPR
DPRMFSLMQNSTNPR

SEQ ID NO: 58709 - protein, 15 aa, Artificial Sequence
  Description of Artificial Sequence: Synthetic peptide
  Seed: DPRMCSLMQGSTLPR
DPRMFSLMQNSTPPR

SEQ ID NO: 58710 - protein, 15 aa, Artificial Sequence
  Description of Artificial Sequence: Synthetic peptide
  Seed: DPRMCSLMQGSTLPR
DPRMFSLMQNSTQPR

SEQ ID NO: 58711 - protein, 15 aa, Artificial Sequence
  Description of Artificial Sequence: Synthetic peptide
  Seed: DPRMCSLMQGSTLPR
DPRMFSLMQNSTRPR

SEQ ID NO: 58712 - protein, 15 aa, Artificial Sequence
  Description of Artificial Sequence: Synthetic peptide
  Seed: DPRMCSLMQGSTLPR
DPRMFSLMQNSTSPR

SEQ ID NO: 58713 - protein, 15 aa, Artificial Sequence
  Description of Artificial Sequence: Synthetic peptide
  Seed: DPRMCSLMQGSTLPR
DPRMFSLMQNSTTPR

SEQ ID NO: 58714 - protein, 15 aa, Artificial Sequence
  Description of Artificial Sequence: Synthetic peptide
  Seed: DPRMCSLMQGSTLPR
DPRMFSLMQNSTVPR

SEQ ID NO: 58715 - protein, 15 aa, Artificial Sequence
  Description of Artificial Sequence: Synthetic peptide
  Seed: DPRMCSLMQGSTLPR
DPRMFSLMQNSTWPR

SEQ ID NO: 58716 - protein, 15 aa, Artificial Sequence
  Description of Artificial Sequence: Synthetic peptide
  Seed: DPRMCSLMQGSTLPR
DPRMFSLMQNSTYPR

SEQ ID NO: 58717 - protein, 15 aa, Artificial Sequence
  Description of Artificial Sequence: Synthetic peptide
  Seed: DPRMCSLMQGSTLPR
DPRMFSLMQPSTAPR

SEQ ID NO: 58718 - protein, 15 aa, Artificial Sequence
  Description of Artificial Sequence: Synthetic peptide
  Seed: DPRMCSLMQGSTLPR
DPRMFSLMQPSTCPR

SEQ ID NO: 58719 - protein, 15 aa, Artificial Sequence
  Description of Artificial Sequence: Synthetic peptide
  Seed: DPRMCSLMQGSTLPR
DPRMFSLMQPSTDPR

SEQ ID NO: 58720 - protein, 15 aa, Artificial Sequence
  Description of Artificial Sequence: Synthetic peptide
  Seed: DPRMCSLMQGSTLPR
DPRMFSLMQPSTEPR

SEQ ID NO: 58721 - protein, 15 aa, Artificial Sequence
  Description of Artificial Sequence: Synthetic peptide
  Seed: DPRMCSLMQGSTLPR
DPRMFSLMQPSTFPR

SEQ ID NO: 58722 - protein, 15 aa, Artificial Sequence
  Description of Artificial Sequence: Synthetic peptide
  Seed: DPRMCSLMQGSTLPR
DPRMFSLMQPSTGPR

SEQ ID NO: 58723 - protein, 15 aa, Artificial Sequence
  Description of Artificial Sequence: Synthetic peptide
  Seed: DPRMCSLMQGSTLPR
DPRMFSLMQPSTHPR

SEQ ID NO: 58724 - protein, 15 aa, Artificial Sequence
  Description of Artificial Sequence: Synthetic peptide
  Seed: DPRMCSLMQGSTLPR
DPRMFSLMQPSTIPR

SEQ ID NO: 58725 - protein, 15 aa, Artificial Sequence
  Description of Artificial Sequence: Synthetic peptide
  Seed: DPRMCSLMQGSTLPR
DPRMFSLMQPSTKPR

SEQ ID NO: 58726 - protein, 15 aa, Artificial Sequence
  Description of Artificial Sequence: Synthetic peptide
  Seed: DPRMCSLMQGSTLPR
DPRMFSLMQPSTLPR

SEQ ID NO: 58727 - protein, 15 aa, Artificial Sequence
  Description of Artificial Sequence: Synthetic peptide
  Seed: DPRMCSLMQGSTLPR
DPRMFSLMQPSTMPR

SEQ ID NO: 58728 - protein, 15 aa, Artificial Sequence
  Description of Artificial Sequence: Synthetic peptide
  Seed: DPRMCSLMQGSTLPR
DPRMFSLMQPSTNPR

SEQ ID NO: 58729 - protein, 15 aa, Artificial Sequence
  Description of Artificial Sequence: Synthetic peptide
  Seed: DPRMCSLMQGSTLPR
DPRMFSLMQPSTPPR

SEQ ID NO: 58730 - protein, 15 aa, Artificial Sequence
  Description of Artificial Sequence: Synthetic peptide
  Seed: DPRMCSLMQGSTLPR
DPRMFSLMQPSTQPR

SEQ ID NO: 58731 - protein, 15 aa, Artificial Sequence
  Description of Artificial Sequence: Synthetic peptide
  Seed: DPRMCSLMQGSTLPR
DPRMFSLMQPSTRPR

SEQ ID NO: 58732 - protein, 15 aa, Artificial Sequence
  Description of Artificial Sequence: Synthetic peptide
  Seed: DPRMCSLMQGSTLPR
DPRMFSLMQPSTSPR

SEQ ID NO: 58733 - protein, 15 aa, Artificial Sequence
  Description of Artificial Sequence: Synthetic peptide
  Seed: DPRMCSLMQGSTLPR
DPRMFSLMQPSTTPR

SEQ ID NO: 58734 - protein, 15 aa, Artificial Sequence
  Description of Artificial Sequence: Synthetic peptide
  Seed: DPRMCSLMQGSTLPR
DPRMFSLMQPSTVPR

SEQ ID NO: 58735 - protein, 15 aa, Artificial Sequence
  Description of Artificial Sequence: Synthetic peptide
  Seed: DPRMCSLMQGSTLPR
DPRMFSLMQPSTWPR

SEQ ID NO: 58736 - protein, 15 aa, Artificial Sequence
  Description of Artificial Sequence: Synthetic peptide
  Seed: DPRMCSLMQGSTLPR
DPRMFSLMQPSTYPR

SEQ ID NO: 58737 - protein, 15 aa, Artificial Sequence
  Description of Artificial Sequence: Synthetic peptide
  Seed: DPRMCSLMQGSTLPR
DPRMFSLMQQSTAPR

SEQ ID NO: 58738 - protein, 15 aa, Artificial Sequence
  Description of Artificial Sequence: Synthetic peptide
  Seed: DPRMCSLMQGSTLPR
DPRMFSLMQQSTIPR

SEQ ID NO: 58739 - protein, 15 aa, Artificial Sequence
  Description of Artificial Sequence: Synthetic peptide
  Seed: DPRMCSLMQGSTLPR
DPRMFSLMQQSTLPR

SEQ ID NO: 58740 - protein, 15 aa, Artificial Sequence
  Description of Artificial Sequence: Synthetic peptide
  Seed: DPRMCSLMQGSTLPR
DPRMFSLMQQSTMPR

SEQ ID NO: 58741 - protein, 15 aa, Artificial Sequence
  Description of Artificial Sequence: Synthetic peptide
  Seed: DPRMCSLMQGSTLPR
DPRMFSLMQQSTNPR

SEQ ID NO: 58742 - protein, 15 aa, Artificial Sequence
  Description of Artificial Sequence: Synthetic peptide
  Seed: DPRMCSLMQGSTLPR
DPRMFSLMQQSTSPR

SEQ ID NO: 58743 - protein, 15 aa, Artificial Sequence
  Description of Artificial Sequence: Synthetic peptide
  Seed: DPRMCSLMQGSTLPR
DPRMFSLMQQSTTPR

SEQ ID NO: 58744 - protein, 15 aa, Artificial Sequence
  Description of Artificial Sequence: Synthetic peptide
  Seed: DPRMCSLMQGSTLPR
DPRMFSLMQQSTVPR

SEQ ID NO: 58745 - protein, 15 aa, Artificial Sequence
  Description of Artificial Sequence: Synthetic peptide
  Seed: DPRMCSLMQGSTLPR
DPRMFSLMQSSTAPR

SEQ ID NO: 58746 - protein, 15 aa, Artificial Sequence
  Description of Artificial Sequence: Synthetic peptide
  Seed: DPRMCSLMQGSTLPR
DPRMFSLMQSSTCPR

SEQ ID NO: 58747 - protein, 15 aa, Artificial Sequence
  Description of Artificial Sequence: Synthetic peptide
  Seed: DPRMCSLMQGSTLPR
DPRMFSLMQSSTDPR

SEQ ID NO: 58748 - protein, 15 aa, Artificial Sequence
  Description of Artificial Sequence: Synthetic peptide
  Seed: DPRMCSLMQGSTLPR
DPRMFSLMQSSTEPR

SEQ ID NO: 58749 - protein, 15 aa, Artificial Sequence
  Description of Artificial Sequence: Synthetic peptide
  Seed: DPRMCSLMQGSTLPR
DPRMFSLMQSSTFPR

SEQ ID NO: 58750 - protein, 15 aa, Artificial Sequence
  Description of Artificial Sequence: Synthetic peptide
  Seed: DPRMCSLMQGSTLPR
DPRMFSLMQSSTGPR

SEQ ID NO: 58751 - protein, 15 aa, Artificial Sequence
  Description of Artificial Sequence: Synthetic peptide
  Seed: DPRMCSLMQGSTLPR
DPRMFSLMQSSTHPR

SEQ ID NO: 58752 - protein, 15 aa, Artificial Sequence
  Description of Artificial Sequence: Synthetic peptide
  Seed: DPRMCSLMQGSTLPR
DPRMFSLMQSSTIPR

SEQ ID NO: 58753 - protein, 15 aa, Artificial Sequence
  Description of Artificial Sequence: Synthetic peptide
  Seed: DPRMCSLMQGSTLPR
DPRMFSLMQSSTKPR

SEQ ID NO: 58754 - protein, 15 aa, Artificial Sequence
  Description of Artificial Sequence: Synthetic peptide
  Seed: DPRMCSLMQGSTLPR
DPRMFSLMQSSTLPR

SEQ ID NO: 58755 - protein, 15 aa, Artificial Sequence
  Description of Artificial Sequence: Synthetic peptide
  Seed: DPRMCSLMQGSTLPR
DPRMFSLMQSSTMPR

SEQ ID NO: 58756 - protein, 15 aa, Artificial Sequence
  Description of Artificial Sequence: Synthetic peptide
  Seed: DPRMCSLMQGSTLPR
DPRMFSLMQSSTNPR

SEQ ID NO: 58757 - protein, 15 aa, Artificial Sequence
  Description of Artificial Sequence: Synthetic peptide
  Seed: DPRMCSLMQGSTLPR
DPRMFSLMQSSTPPR

SEQ ID NO: 58758 - protein, 15 aa, Artificial Sequence
  Description of Artificial Sequence: Synthetic peptide
  Seed: DPRMCSLMQGSTLPR
DPRMFSLMQSSTQPR

SEQ ID NO: 58759 - protein, 15 aa, Artificial Sequence
  Description of Artificial Sequence: Synthetic peptide
  Seed: DPRMCSLMQGSTLPR
DPRMFSLMQSSTRPR

SEQ ID NO: 58760 - protein, 15 aa, Artificial Sequence
  Description of Artificial Sequence: Synthetic peptide
  Seed: DPRMCSLMQGSTLPR
DPRMFSLMQSSTSPR

SEQ ID NO: 58761 - protein, 15 aa, Artificial Sequence
  Description of Artificial Sequence: Synthetic peptide
  Seed: DPRMCSLMQGSTLPR
DPRMFSLMQSSTTPR

SEQ ID NO: 58762 - protein, 15 aa, Artificial Sequence
  Description of Artificial Sequence: Synthetic peptide
  Seed: DPRMCSLMQGSTLPR
DPRMFSLMQSSTWPR

SEQ ID NO: 58763 - protein, 15 aa, Artificial Sequence
  Description of Artificial Sequence: Synthetic peptide
  Seed: DPRMCSLMQGSTLPR
DPRMFSLMQSSTYPR

SEQ ID NO: 58764 - protein, 15 aa, Artificial Sequence
  Description of Artificial Sequence: Synthetic peptide
  Seed: DPRMCSLMQGSTLPR
DPRMFSLMQTSTAPR

SEQ ID NO: 58765 - protein, 15 aa, Artificial Sequence
  Description of Artificial Sequence: Synthetic peptide
  Seed: DPRMCSLMQGSTLPR
DPRMFSLMQTSTCPR

SEQ ID NO: 58766 - protein, 15 aa, Artificial Sequence
  Description of Artificial Sequence: Synthetic peptide
  Seed: DPRMCSLMQGSTLPR
DPRMFSLMQTSTDPR

SEQ ID NO: 58767 - protein, 15 aa, Artificial Sequence
  Description of Artificial Sequence: Synthetic peptide
  Seed: DPRMCSLMQGSTLPR
DPRMFSLMQTSTEPR

SEQ ID NO: 58768 - protein, 15 aa, Artificial Sequence
  Description of Artificial Sequence: Synthetic peptide
  Seed: DPRMCSLMQGSTLPR
DPRMFSLMQTSTFPR

SEQ ID NO: 58769 - protein, 15 aa, Artificial Sequence
  Description of Artificial Sequence: Synthetic peptide
  Seed: DPRMCSLMQGSTLPR
DPRMFSLMQTSTGPR

SEQ ID NO: 58770 - protein, 15 aa, Artificial Sequence
  Description of Artificial Sequence: Synthetic peptide
  Seed: DPRMCSLMQGSTLPR
DPRMFSLMQTSTHPR

SEQ ID NO: 58771 - protein, 15 aa, Artificial Sequence
  Description of Artificial Sequence: Synthetic peptide
  Seed: DPRMCSLMQGSTLPR
DPRMFSLMQTSTIPR

SEQ ID NO: 58772 - protein, 15 aa, Artificial Sequence
  Description of Artificial Sequence: Synthetic peptide
  Seed: DPRMCSLMQGSTLPR
DPRMFSLMQTSTKPR

SEQ ID NO: 58773 - protein, 15 aa, Artificial Sequence
  Description of Artificial Sequence: Synthetic peptide
  Seed: DPRMCSLMQGSTLPR
DPRMFSLMQTSTLPR

SEQ ID NO: 58774 - protein, 15 aa, Artificial Sequence
  Description of Artificial Sequence: Synthetic peptide
  Seed: DPRMCSLMQGSTLPR
DPRMFSLMQTSTMPR

SEQ ID NO: 58775 - protein, 15 aa, Artificial Sequence
  Description of Artificial Sequence: Synthetic peptide
  Seed: DPRMCSLMQGSTLPR
DPRMFSLMQTSTNPR

SEQ ID NO: 58776 - protein, 15 aa, Artificial Sequence
  Description of Artificial Sequence: Synthetic peptide
  Seed: DPRMCSLMQGSTLPR
DPRMFSLMQTSTPPR

SEQ ID NO: 58777 - protein, 15 aa, Artificial Sequence
  Description of Artificial Sequence: Synthetic peptide
  Seed: DPRMCSLMQGSTLPR
DPRMFSLMQTSTQPR

SEQ ID NO: 58778 - protein, 15 aa, Artificial Sequence
  Description of Artificial Sequence: Synthetic peptide
  Seed: DPRMCSLMQGSTLPR
DPRMFSLMQTSTRPR

SEQ ID NO: 58779 - protein, 15 aa, Artificial Sequence
  Description of Artificial Sequence: Synthetic peptide
  Seed: DPRMCSLMQGSTLPR
DPRMFSLMQTSTSPR

SEQ ID NO: 58780 - protein, 15 aa, Artificial Sequence
  Description of Artificial Sequence: Synthetic peptide
  Seed: DPRMCSLMQGSTLPR
DPRMFSLMQTSTTPR

SEQ ID NO: 58781 - protein, 15 aa, Artificial Sequence
  Description of Artificial Sequence: Synthetic peptide
  Seed: DPRMCSLMQGSTLPR
DPRMFSLMQTSTVPR

SEQ ID NO: 58782 - protein, 15 aa, Artificial Sequence
  Description of Artificial Sequence: Synthetic peptide
  Seed: DPRMCSLMQGSTLPR
DPRMFSLMQTSTWPR

SEQ ID NO: 58783 - protein, 15 aa, Artificial Sequence
  Description of Artificial Sequence: Synthetic peptide
  Seed: DPRMCSLMQGSTLPR
DPRMFSLMQTSTYPR

SEQ ID NO: 58784 - protein, 15 aa, Artificial Sequence
  Description of Artificial Sequence: Synthetic peptide
  Seed: DPRMCSLMQGSTLPR
DPRMFSLMQVSTAPR

SEQ ID NO: 58785 - protein, 15 aa, Artificial Sequence
  Description of Artificial Sequence: Synthetic peptide
  Seed: DPRMCSLMQGSTLPR
DPRMFSLMQVSTCPR

SEQ ID NO: 58786 - protein, 15 aa, Artificial Sequence
  Description of Artificial Sequence: Synthetic peptide
  Seed: DPRMCSLMQGSTLPR
DPRMFSLMQVSTDPR

SEQ ID NO: 58787 - protein, 15 aa, Artificial Sequence
  Description of Artificial Sequence: Synthetic peptide
  Seed: DPRMCSLMQGSTLPR
DPRMFSLMQVSTEPR

SEQ ID NO: 58788 - protein, 15 aa, Artificial Sequence
  Description of Artificial Sequence: Synthetic peptide
  Seed: DPRMCSLMQGSTLPR
DPRMFSLMQVSTFPR

SEQ ID NO: 58789 - protein, 15 aa, Artificial Sequence
  Description of Artificial Sequence: Synthetic peptide
  Seed: DPRMCSLMQGSTLPR
DPRMFSLMQVSTGPR

SEQ ID NO: 58790 - protein, 15 aa, Artificial Sequence
  Description of Artificial Sequence: Synthetic peptide
  Seed: DPRMCSLMQGSTLPR
DPRMFSLMQVSTHPR

SEQ ID NO: 58791 - protein, 15 aa, Artificial Sequence
  Description of Artificial Sequence: Synthetic peptide
  Seed: DPRMCSLMQGSTLPR
DPRMFSLMQVSTIPR

SEQ ID NO: 58792 - protein, 15 aa, Artificial Sequence
  Description of Artificial Sequence: Synthetic peptide
  Seed: DPRMCSLMQGSTLPR
DPRMFSLMQVSTKPR

SEQ ID NO: 58793 - protein, 15 aa, Artificial Sequence
  Description of Artificial Sequence: Synthetic peptide
  Seed: DPRMCSLMQGSTLPR
DPRMFSLMQVSTLPR

SEQ ID NO: 58794 - protein, 15 aa, Artificial Sequence
  Description of Artificial Sequence: Synthetic peptide
  Seed: DPRMCSLMQGSTLPR
DPRMFSLMQVSTMPR

SEQ ID NO: 58795 - protein, 15 aa, Artificial Sequence
  Description of Artificial Sequence: Synthetic peptide
  Seed: DPRMCSLMQGSTLPR
DPRMFSLMQVSTNPR

SEQ ID NO: 58796 - protein, 15 aa, Artificial Sequence
  Description of Artificial Sequence: Synthetic peptide
  Seed: DPRMCSLMQGSTLPR
DPRMFSLMQVSTPPR

SEQ ID NO: 58797 - protein, 15 aa, Artificial Sequence
  Description of Artificial Sequence: Synthetic peptide
  Seed: DPRMCSLMQGSTLPR
DPRMFSLMQVSTQPR

SEQ ID NO: 58798 - protein, 15 aa, Artificial Sequence
  Description of Artificial Sequence: Synthetic peptide
  Seed: DPRMCSLMQGSTLPR
DPRMFSLMQVSTRPR

SEQ ID NO: 58799 - protein, 15 aa, Artificial Sequence
  Description of Artificial Sequence: Synthetic peptide
  Seed: DPRMCSLMQGSTLPR
DPRMFSLMQVSTSPR

SEQ ID NO: 58800 - protein, 15 aa, Artificial Sequence
  Description of Artificial Sequence: Synthetic peptide
  Seed: DPRMCSLMQGSTLPR
DPRMFSLMQVSTTPR

SEQ ID NO: 58801 - protein, 15 aa, Artificial Sequence
  Description of Artificial Sequence: Synthetic peptide
  Seed: DPRMCSLMQGSTLPR
DPRMFSLMQVSTVPR

SEQ ID NO: 58802 - protein, 15 aa, Artificial Sequence
  Description of Artificial Sequence: Synthetic peptide
  Seed: DPRMCSLMQGSTLPR
DPRMFSLMQVSTWPR

SEQ ID NO: 58803 - protein, 15 aa, Artificial Sequence
  Description of Artificial Sequence: Synthetic peptide
  Seed: DPRMCSLMQGSTLPR
DPRMFSLMQVSTYPR

SEQ ID NO: 58804 - protein, 15 aa, Artificial Sequence
  Description of Artificial Sequence: Synthetic peptide
  Seed: DPRMCSLMQGSTLPR
DPRMFSLMQWSTAPR

SEQ ID NO: 58805 - protein, 15 aa, Artificial Sequence
  Description of Artificial Sequence: Synthetic peptide
  Seed: DPRMCSLMQGSTLPR
DPRMFSLMQWSTIPR

SEQ ID NO: 58806 - protein, 15 aa, Artificial Sequence
  Description of Artificial Sequence: Synthetic peptide
  Seed: DPRMCSLMQGSTLPR
DPRMFSLMQWSTLPR

SEQ ID NO: 58807 - protein, 15 aa, Artificial Sequence
  Description of Artificial Sequence: Synthetic peptide
  Seed: DPRMCSLMQGSTLPR
DPRMFSLMQWSTVPR

SEQ ID NO: 58808 - protein, 15 aa, Artificial Sequence
  Description of Artificial Sequence: Synthetic peptide
  Seed: DPRMCSLMQGSTLPR
DPRMFSLMQYSTAPR

SEQ ID NO: 58809 - protein, 15 aa, Artificial Sequence
  Description of Artificial Sequence: Synthetic peptide
  Seed: DPRMCSLMQGSTLPR
DPRMFSLMQYSTLPR

SEQ ID NO: 58810 - protein, 15 aa, Artificial Sequence
  Description of Artificial Sequence: Synthetic peptide
  Seed: DPRMCSLMQGSTLPR
DPRMFSLMQYSTVPR

SEQ ID NO: 58811 - protein, 15 aa, Artificial Sequence
  Description of Artificial Sequence: Synthetic peptide
  Seed: DPRMCSLMQGSTLPR
DPRMFSLNQASTAPR

SEQ ID NO: 58812 - protein, 15 aa, Artificial Sequence
  Description of Artificial Sequence: Synthetic peptide
  Seed: DPRMCSLMQGSTLPR
DPRMFSLNQASTIPR

SEQ ID NO: 58813 - protein, 15 aa, Artificial Sequence
  Description of Artificial Sequence: Synthetic peptide
  Seed: DPRMCSLMQGSTLPR
DPRMFSLNQASTLPR

SEQ ID NO: 58814 - protein, 15 aa, Artificial Sequence
  Description of Artificial Sequence: Synthetic peptide
  Seed: DPRMCSLMQGSTLPR
DPRMFSLNQASTMPR

SEQ ID NO: 58815 - protein, 15 aa, Artificial Sequence
  Description of Artificial Sequence: Synthetic peptide
  Seed: DPRMCSLMQGSTLPR
DPRMFSLNQASTSPR

SEQ ID NO: 58816 - protein, 15 aa, Artificial Sequence
  Description of Artificial Sequence: Synthetic peptide
  Seed: DPRMCSLMQGSTLPR
DPRMFSLNQASTTPR

SEQ ID NO: 58817 - protein, 15 aa, Artificial Sequence
  Description of Artificial Sequence: Synthetic peptide
  Seed: DPRMCSLMQGSTLPR
DPRMFSLNQASTVPR

SEQ ID NO: 58818 - protein, 15 aa, Artificial Sequence
  Description of Artificial Sequence: Synthetic peptide
  Seed: DPRMCSLMQGSTLPR
DPRMFSLNQGSTAPR

SEQ ID NO: 58819 - protein, 15 aa, Artificial Sequence
  Description of Artificial Sequence: Synthetic peptide
  Seed: DPRMCSLMQGSTLPR
DPRMFSLNQGSTIPR

SEQ ID NO: 58820 - protein, 15 aa, Artificial Sequence
  Description of Artificial Sequence: Synthetic peptide
  Seed: DPRMCSLMQGSTLPR
DPRMFSLNQGSTLPR

SEQ ID NO: 58821 - protein, 15 aa, Artificial Sequence
  Description of Artificial Sequence: Synthetic peptide
  Seed: DPRMCSLMQGSTLPR
DPRMFSLNQGSTMPR

SEQ ID NO: 58822 - protein, 15 aa, Artificial Sequence
  Description of Artificial Sequence: Synthetic peptide
  Seed: DPRMCSLMQGSTLPR
DPRMFSLNQGSTVPR

SEQ ID NO: 58823 - protein, 15 aa, Artificial Sequence
  Description of Artificial Sequence: Synthetic peptide
  Seed: DPRMCSLMQGSTLPR
DPRMFSLNQPSTIPR

SEQ ID NO: 58824 - protein, 15 aa, Artificial Sequence
  Description of Artificial Sequence: Synthetic peptide
  Seed: DPRMCSLMQGSTLPR
DPRMFSLNQPSTLPR

SEQ ID NO: 58825 - protein, 15 aa, Artificial Sequence
  Description of Artificial Sequence: Synthetic peptide
  Seed: DPRMCSLMQGSTLPR
DPRMFSLNQPSTVPR

SEQ ID NO: 58826 - protein, 15 aa, Artificial Sequence
  Description of Artificial Sequence: Synthetic peptide
  Seed: DPRMCSLMQGSTLPR
DPRMFSLNQSSTAPR

SEQ ID NO: 58827 - protein, 15 aa, Artificial Sequence
  Description of Artificial Sequence: Synthetic peptide
  Seed: DPRMCSLMQGSTLPR
DPRMFSLNQSSTIPR

SEQ ID NO: 58828 - protein, 15 aa, Artificial Sequence
  Description of Artificial Sequence: Synthetic peptide
  Seed: DPRMCSLMQGSTLPR
DPRMFSLNQSSTLPR

SEQ ID NO: 58829 - protein, 15 aa, Artificial Sequence
  Description of Artificial Sequence: Synthetic peptide
  Seed: DPRMCSLMQGSTLPR
DPRMFSLNQSSTVPR

SEQ ID NO: 58830 - protein, 15 aa, Artificial Sequence
  Description of Artificial Sequence: Synthetic peptide
  Seed: DPRMCSLMQGSTLPR
DPRMFSLNQVSTLPR

SEQ ID NO: 58831 - protein, 15 aa, Artificial Sequence
  Description of Artificial Sequence: Synthetic peptide
  Seed: DPRMCSLMQGSTLPR
DPRMFSLQQASTAPR

SEQ ID NO: 58832 - protein, 15 aa, Artificial Sequence
  Description of Artificial Sequence: Synthetic peptide
  Seed: DPRMCSLMQGSTLPR
DPRMFSLQQASTCPR

SEQ ID NO: 58833 - protein, 15 aa, Artificial Sequence
  Description of Artificial Sequence: Synthetic peptide
  Seed: DPRMCSLMQGSTLPR
DPRMFSLQQASTFPR

SEQ ID NO: 58834 - protein, 15 aa, Artificial Sequence
  Description of Artificial Sequence: Synthetic peptide
  Seed: DPRMCSLMQGSTLPR
DPRMFSLQQASTGPR

SEQ ID NO: 58835 - protein, 15 aa, Artificial Sequence
  Description of Artificial Sequence: Synthetic peptide
  Seed: DPRMCSLMQGSTLPR
DPRMFSLQQASTHPR

SEQ ID NO: 58836 - protein, 15 aa, Artificial Sequence
  Description of Artificial Sequence: Synthetic peptide
  Seed: DPRMCSLMQGSTLPR
DPRMFSLQQASTIPR

SEQ ID NO: 58837 - protein, 15 aa, Artificial Sequence
  Description of Artificial Sequence: Synthetic peptide
  Seed: DPRMCSLMQGSTLPR
DPRMFSLQQASTLPR

SEQ ID NO: 58838 - protein, 15 aa, Artificial Sequence
  Description of Artificial Sequence: Synthetic peptide
  Seed: DPRMCSLMQGSTLPR
DPRMFSLQQASTMPR

SEQ ID NO: 58839 - protein, 15 aa, Artificial Sequence
  Description of Artificial Sequence: Synthetic peptide
  Seed: DPRMCSLMQGSTLPR
DPRMFSLQQASTNPR

SEQ ID NO: 58840 - protein, 15 aa, Artificial Sequence
  Description of Artificial Sequence: Synthetic peptide
  Seed: DPRMCSLMQGSTLPR
DPRMFSLQQASTQPR

SEQ ID NO: 58841 - protein, 15 aa, Artificial Sequence
  Description of Artificial Sequence: Synthetic peptide
  Seed: DPRMCSLMQGSTLPR
DPRMFSLQQASTSPR

SEQ ID NO: 58842 - protein, 15 aa, Artificial Sequence
  Description of Artificial Sequence: Synthetic peptide
  Seed: DPRMCSLMQGSTLPR
DPRMFSLQQASTTPR

SEQ ID NO: 58843 - protein, 15 aa, Artificial Sequence
  Description of Artificial Sequence: Synthetic peptide
  Seed: DPRMCSLMQGSTLPR
DPRMFSLQQASTVPR

SEQ ID NO: 58844 - protein, 15 aa, Artificial Sequence
  Description of Artificial Sequence: Synthetic peptide
  Seed: DPRMCSLMQGSTLPR
DPRMFSLQQASTWPR

SEQ ID NO: 58845 - protein, 15 aa, Artificial Sequence
  Description of Artificial Sequence: Synthetic peptide
  Seed: DPRMCSLMQGSTLPR
DPRMFSLQQASTYPR

SEQ ID NO: 58846 - protein, 15 aa, Artificial Sequence
  Description of Artificial Sequence: Synthetic peptide
  Seed: DPRMCSLMQGSTLPR
DPRMFSLQQGSTAPR

SEQ ID NO: 58847 - protein, 15 aa, Artificial Sequence
  Description of Artificial Sequence: Synthetic peptide
  Seed: DPRMCSLMQGSTLPR
DPRMFSLQQGSTCPR

SEQ ID NO: 58848 - protein, 15 aa, Artificial Sequence
  Description of Artificial Sequence: Synthetic peptide
  Seed: DPRMCSLMQGSTLPR
DPRMFSLQQGSTFPR

SEQ ID NO: 58849 - protein, 15 aa, Artificial Sequence
  Description of Artificial Sequence: Synthetic peptide
  Seed: DPRMCSLMQGSTLPR
DPRMFSLQQGSTGPR

SEQ ID NO: 58850 - protein, 15 aa, Artificial Sequence
  Description of Artificial Sequence: Synthetic peptide
  Seed: DPRMCSLMQGSTLPR
DPRMFSLQQGSTIPR

SEQ ID NO: 58851 - protein, 15 aa, Artificial Sequence
  Description of Artificial Sequence: Synthetic peptide
  Seed: DPRMCSLMQGSTLPR
DPRMFSLQQGSTLPR

SEQ ID NO: 58852 - protein, 15 aa, Artificial Sequence
  Description of Artificial Sequence: Synthetic peptide
  Seed: DPRMCSLMQGSTLPR
DPRMFSLQQGSTMPR

SEQ ID NO: 58853 - protein, 15 aa, Artificial Sequence
  Description of Artificial Sequence: Synthetic peptide
  Seed: DPRMCSLMQGSTLPR
DPRMFSLQQGSTSPR

SEQ ID NO: 58854 - protein, 15 aa, Artificial Sequence
  Description of Artificial Sequence: Synthetic peptide
  Seed: DPRMCSLMQGSTLPR
DPRMFSLQQGSTTPR

SEQ ID NO: 58855 - protein, 15 aa, Artificial Sequence
  Description of Artificial Sequence: Synthetic peptide
  Seed: DPRMCSLMQGSTLPR
DPRMFSLQQGSTVPR

SEQ ID NO: 58856 - protein, 15 aa, Artificial Sequence
  Description of Artificial Sequence: Synthetic peptide
  Seed: DPRMCSLMQGSTLPR
DPRMFSLQQISTAPR

SEQ ID NO: 58857 - protein, 15 aa, Artificial Sequence
  Description of Artificial Sequence: Synthetic peptide
  Seed: DPRMCSLMQGSTLPR
DPRMFSLQQISTIPR

SEQ ID NO: 58858 - protein, 15 aa, Artificial Sequence
  Description of Artificial Sequence: Synthetic peptide
  Seed: DPRMCSLMQGSTLPR
DPRMFSLQQISTLPR

SEQ ID NO: 58859 - protein, 15 aa, Artificial Sequence
  Description of Artificial Sequence: Synthetic peptide
  Seed: DPRMCSLMQGSTLPR
DPRMFSLQQISTMPR

SEQ ID NO: 58860 - protein, 15 aa, Artificial Sequence
  Description of Artificial Sequence: Synthetic peptide
  Seed: DPRMCSLMQGSTLPR
DPRMFSLQQISTNPR

SEQ ID NO: 58861 - protein, 15 aa, Artificial Sequence
  Description of Artificial Sequence: Synthetic peptide
  Seed: DPRMCSLMQGSTLPR
DPRMFSLQQISTSPR

SEQ ID NO: 58862 - protein, 15 aa, Artificial Sequence
  Description of Artificial Sequence: Synthetic peptide
  Seed: DPRMCSLMQGSTLPR
DPRMFSLQQISTTPR

SEQ ID NO: 58863 - protein, 15 aa, Artificial Sequence
  Description of Artificial Sequence: Synthetic peptide
  Seed: DPRMCSLMQGSTLPR
DPRMFSLQQISTVPR

SEQ ID NO: 58864 - protein, 15 aa, Artificial Sequence
  Description of Artificial Sequence: Synthetic peptide
  Seed: DPRMCSLMQGSTLPR
DPRMFSLQQLSTAPR

SEQ ID NO: 58865 - protein, 15 aa, Artificial Sequence
  Description of Artificial Sequence: Synthetic peptide
  Seed: DPRMCSLMQGSTLPR
DPRMFSLQQNSTAPR

SEQ ID NO: 58866 - protein, 15 aa, Artificial Sequence
  Description of Artificial Sequence: Synthetic peptide
  Seed: DPRMCSLMQGSTLPR
DPRMFSLQQNSTIPR

SEQ ID NO: 58867 - protein, 15 aa, Artificial Sequence
  Description of Artificial Sequence: Synthetic peptide
  Seed: DPRMCSLMQGSTLPR
DPRMFSLQQNSTLPR

SEQ ID NO: 58868 - protein, 15 aa, Artificial Sequence
  Description of Artificial Sequence: Synthetic peptide
  Seed: DPRMCSLMQGSTLPR
DPRMFSLQQNSTMPR

SEQ ID NO: 58869 - protein, 15 aa, Artificial Sequence
  Description of Artificial Sequence: Synthetic peptide
  Seed: DPRMCSLMQGSTLPR
DPRMFSLQQNSTSPR

SEQ ID NO: 58870 - protein, 15 aa, Artificial Sequence
  Description of Artificial Sequence: Synthetic peptide
  Seed: DPRMCSLMQGSTLPR
DPRMFSLQQNSTTPR

SEQ ID NO: 58871 - protein, 15 aa, Artificial Sequence
  Description of Artificial Sequence: Synthetic peptide
  Seed: DPRMCSLMQGSTLPR
DPRMFSLQQNSTVPR

SEQ ID NO: 58872 - protein, 15 aa, Artificial Sequence
  Description of Artificial Sequence: Synthetic peptide
  Seed: DPRMCSLMQGSTLPR
DPRMFSLQQPSTAPR

SEQ ID NO: 58873 - protein, 15 aa, Artificial Sequence
  Description of Artificial Sequence: Synthetic peptide
  Seed: DPRMCSLMQGSTLPR
DPRMFSLQQPSTIPR

SEQ ID NO: 58874 - protein, 15 aa, Artificial Sequence
  Description of Artificial Sequence: Synthetic peptide
  Seed: DPRMCSLMQGSTLPR
DPRMFSLQQPSTLPR

SEQ ID NO: 58875 - protein, 15 aa, Artificial Sequence
  Description of Artificial Sequence: Synthetic peptide
  Seed: DPRMCSLMQGSTLPR
DPRMFSLQQPSTMPR

SEQ ID NO: 58876 - protein, 15 aa, Artificial Sequence
  Description of Artificial Sequence: Synthetic peptide
  Seed: DPRMCSLMQGSTLPR
DPRMFSLQQPSTNPR

SEQ ID NO: 58877 - protein, 15 aa, Artificial Sequence
  Description of Artificial Sequence: Synthetic peptide
  Seed: DPRMCSLMQGSTLPR
DPRMFSLQQPSTSPR

SEQ ID NO: 58878 - protein, 15 aa, Artificial Sequence
  Description of Artificial Sequence: Synthetic peptide
  Seed: DPRMCSLMQGSTLPR
DPRMFSLQQPSTTPR

SEQ ID NO: 58879 - protein, 15 aa, Artificial Sequence
  Description of Artificial Sequence: Synthetic peptide
  Seed: DPRMCSLMQGSTLPR
DPRMFSLQQPSTVPR

SEQ ID NO: 58880 - protein, 15 aa, Artificial Sequence
  Description of Artificial Sequence: Synthetic peptide
  Seed: DPRMCSLMQGSTLPR
DPRMFSLQQSSTAPR

SEQ ID NO: 58881 - protein, 15 aa, Artificial Sequence
  Description of Artificial Sequence: Synthetic peptide
  Seed: DPRMCSLMQGSTLPR
DPRMFSLQQSSTCPR

SEQ ID NO: 58882 - protein, 15 aa, Artificial Sequence
  Description of Artificial Sequence: Synthetic peptide
  Seed: DPRMCSLMQGSTLPR
DPRMFSLQQSSTFPR

SEQ ID NO: 58883 - protein, 15 aa, Artificial Sequence
  Description of Artificial Sequence: Synthetic peptide
  Seed: DPRMCSLMQGSTLPR
DPRMFSLQQSSTGPR

SEQ ID NO: 58884 - protein, 15 aa, Artificial Sequence
  Description of Artificial Sequence: Synthetic peptide
  Seed: DPRMCSLMQGSTLPR
DPRMFSLQQSSTIPR

SEQ ID NO: 58885 - protein, 15 aa, Artificial Sequence
  Description of Artificial Sequence: Synthetic peptide
  Seed: DPRMCSLMQGSTLPR
DPRMFSLQQSSTLPR

SEQ ID NO: 58886 - protein, 15 aa, Artificial Sequence
  Description of Artificial Sequence: Synthetic peptide
  Seed: DPRMCSLMQGSTLPR
DPRMFSLQQSSTMPR

SEQ ID NO: 58887 - protein, 15 aa, Artificial Sequence
  Description of Artificial Sequence: Synthetic peptide
  Seed: DPRMCSLMQGSTLPR
DPRMFSLQQSSTNPR

SEQ ID NO: 58888 - protein, 15 aa, Artificial Sequence
  Description of Artificial Sequence: Synthetic peptide
  Seed: DPRMCSLMQGSTLPR
DPRMFSLQQSSTSPR

SEQ ID NO: 58889 - protein, 15 aa, Artificial Sequence
  Description of Artificial Sequence: Synthetic peptide
  Seed: DPRMCSLMQGSTLPR
DPRMFSLQQSSTTPR

SEQ ID NO: 58890 - protein, 15 aa, Artificial Sequence
  Description of Artificial Sequence: Synthetic peptide
  Seed: DPRMCSLMQGSTLPR
DPRMFSLQQSSTVPR

SEQ ID NO: 58891 - protein, 15 aa, Artificial Sequence
  Description of Artificial Sequence: Synthetic peptide
  Seed: DPRMCSLMQGSTLPR
DPRMFSLQQTSTAPR

SEQ ID NO: 58892 - protein, 15 aa, Artificial Sequence
  Description of Artificial Sequence: Synthetic peptide
  Seed: DPRMCSLMQGSTLPR
DPRMFSLQQTSTIPR

SEQ ID NO: 58893 - protein, 15 aa, Artificial Sequence
  Description of Artificial Sequence: Synthetic peptide
  Seed: DPRMCSLMQGSTLPR
DPRMFSLQQTSTLPR

SEQ ID NO: 58894 - protein, 15 aa, Artificial Sequence
  Description of Artificial Sequence: Synthetic peptide
  Seed: DPRMCSLMQGSTLPR
DPRMFSLQQTSTMPR

SEQ ID NO: 58895 - protein, 15 aa, Artificial Sequence
  Description of Artificial Sequence: Synthetic peptide
  Seed: DPRMCSLMQGSTLPR
DPRMFSLQQTSTNPR

SEQ ID NO: 58896 - protein, 15 aa, Artificial Sequence
  Description of Artificial Sequence: Synthetic peptide
  Seed: DPRMCSLMQGSTLPR
DPRMFSLQQTSTSPR

SEQ ID NO: 58897 - protein, 15 aa, Artificial Sequence
  Description of Artificial Sequence: Synthetic peptide
  Seed: DPRMCSLMQGSTLPR
DPRMFSLQQTSTTPR

SEQ ID NO: 58898 - protein, 15 aa, Artificial Sequence
  Description of Artificial Sequence: Synthetic peptide
  Seed: DPRMCSLMQGSTLPR
DPRMFSLQQTSTVPR

SEQ ID NO: 58899 - protein, 15 aa, Artificial Sequence
  Description of Artificial Sequence: Synthetic peptide
  Seed: DPRMCSLMQGSTLPR
DPRMFSLQQVSTAPR

SEQ ID NO: 58900 - protein, 15 aa, Artificial Sequence
  Description of Artificial Sequence: Synthetic peptide
  Seed: DPRMCSLMQGSTLPR
DPRMFSLQQVSTIPR

SEQ ID NO: 58901 - protein, 15 aa, Artificial Sequence
  Description of Artificial Sequence: Synthetic peptide
  Seed: DPRMCSLMQGSTLPR
DPRMFSLQQVSTLPR

SEQ ID NO: 58902 - protein, 15 aa, Artificial Sequence
  Description of Artificial Sequence: Synthetic peptide
  Seed: DPRMCSLMQGSTLPR
DPRMFSLQQVSTMPR

SEQ ID NO: 58903 - protein, 15 aa, Artificial Sequence
  Description of Artificial Sequence: Synthetic peptide
  Seed: DPRMCSLMQGSTLPR
DPRMFSLQQVSTNPR

SEQ ID NO: 58904 - protein, 15 aa, Artificial Sequence
  Description of Artificial Sequence: Synthetic peptide
  Seed: DPRMCSLMQGSTLPR
DPRMFSLQQVSTSPR

SEQ ID NO: 58905 - protein, 15 aa, Artificial Sequence
  Description of Artificial Sequence: Synthetic peptide
  Seed: DPRMCSLMQGSTLPR
DPRMFSLQQVSTTPR

SEQ ID NO: 58906 - protein, 15 aa, Artificial Sequence
  Description of Artificial Sequence: Synthetic peptide
  Seed: DPRMCSLMQGSTLPR
DPRMFSLQQVSTVPR

SEQ ID NO: 58907 - protein, 15 aa, Artificial Sequence
  Description of Artificial Sequence: Synthetic peptide
  Seed: DPRMCSLMQGSTLPR
DPRMFSLRQASTLPR

SEQ ID NO: 58908 - protein, 15 aa, Artificial Sequence
  Description of Artificial Sequence: Synthetic peptide
  Seed: DPRMCSLMQGSTLPR
DPRMFSLSQASTAPR

SEQ ID NO: 58909 - protein, 15 aa, Artificial Sequence
  Description of Artificial Sequence: Synthetic peptide
  Seed: DPRMCSLMQGSTLPR
DPRMFSLSQASTCPR

SEQ ID NO: 58910 - protein, 15 aa, Artificial Sequence
  Description of Artificial Sequence: Synthetic peptide
  Seed: DPRMCSLMQGSTLPR
DPRMFSLSQASTFPR

SEQ ID NO: 58911 - protein, 15 aa, Artificial Sequence
  Description of Artificial Sequence: Synthetic peptide
  Seed: DPRMCSLMQGSTLPR
DPRMFSLSQASTGPR

SEQ ID NO: 58912 - protein, 15 aa, Artificial Sequence
  Description of Artificial Sequence: Synthetic peptide
  Seed: DPRMCSLMQGSTLPR
DPRMFSLSQASTIPR

SEQ ID NO: 58913 - protein, 15 aa, Artificial Sequence
  Description of Artificial Sequence: Synthetic peptide
  Seed: DPRMCSLMQGSTLPR
DPRMFSLSQASTLPR

SEQ ID NO: 58914 - protein, 15 aa, Artificial Sequence
  Description of Artificial Sequence: Synthetic peptide
  Seed: DPRMCSLMQGSTLPR
DPRMFSLSQASTMPR

SEQ ID NO: 58915 - protein, 15 aa, Artificial Sequence
  Description of Artificial Sequence: Synthetic peptide
  Seed: DPRMCSLMQGSTLPR
DPRMFSLSQASTNPR

SEQ ID NO: 58916 - protein, 15 aa, Artificial Sequence
  Description of Artificial Sequence: Synthetic peptide
  Seed: DPRMCSLMQGSTLPR
DPRMFSLSQASTQPR

SEQ ID NO: 58917 - protein, 15 aa, Artificial Sequence
  Description of Artificial Sequence: Synthetic peptide
  Seed: DPRMCSLMQGSTLPR
DPRMFSLSQASTSPR

SEQ ID NO: 58918 - protein, 15 aa, Artificial Sequence
  Description of Artificial Sequence: Synthetic peptide
  Seed: DPRMCSLMQGSTLPR
DPRMFSLSQASTTPR

SEQ ID NO: 58919 - protein, 15 aa, Artificial Sequence
  Description of Artificial Sequence: Synthetic peptide
  Seed: DPRMCSLMQGSTLPR
DPRMFSLSQASTVPR

SEQ ID NO: 58920 - protein, 15 aa, Artificial Sequence
  Description of Artificial Sequence: Synthetic peptide
  Seed: DPRMCSLMQGSTLPR
DPRMFSLSQASTYPR

SEQ ID NO: 58921 - protein, 15 aa, Artificial Sequence
  Description of Artificial Sequence: Synthetic peptide
  Seed: DPRMCSLMQGSTLPR
DPRMFSLSQGSTAPR

SEQ ID NO: 58922 - protein, 15 aa, Artificial Sequence
  Description of Artificial Sequence: Synthetic peptide
  Seed: DPRMCSLMQGSTLPR
DPRMFSLSQGSTFPR

SEQ ID NO: 58923 - protein, 15 aa, Artificial Sequence
  Description of Artificial Sequence: Synthetic peptide
  Seed: DPRMCSLMQGSTLPR
DPRMFSLSQGSTIPR

SEQ ID NO: 58924 - protein, 15 aa, Artificial Sequence
  Description of Artificial Sequence: Synthetic peptide
  Seed: DPRMCSLMQGSTLPR
DPRMFSLSQGSTLPR

SEQ ID NO: 58925 - protein, 15 aa, Artificial Sequence
  Description of Artificial Sequence: Synthetic peptide
  Seed: DPRMCSLMQGSTLPR
DPRMFSLSQGSTMPR

SEQ ID NO: 58926 - protein, 15 aa, Artificial Sequence
  Description of Artificial Sequence: Synthetic peptide
  Seed: DPRMCSLMQGSTLPR
DPRMFSLSQGSTSPR

SEQ ID NO: 58927 - protein, 15 aa, Artificial Sequence
  Description of Artificial Sequence: Synthetic peptide
  Seed: DPRMCSLMQGSTLPR
DPRMFSLSQGSTTPR

SEQ ID NO: 58928 - protein, 15 aa, Artificial Sequence
  Description of Artificial Sequence: Synthetic peptide
  Seed: DPRMCSLMQGSTLPR
DPRMFSLSQGSTVPR

SEQ ID NO: 58929 - protein, 15 aa, Artificial Sequence
  Description of Artificial Sequence: Synthetic peptide
  Seed: DPRMCSLMQGSTLPR
DPRMFSLSQISTAPR

SEQ ID NO: 58930 - protein, 15 aa, Artificial Sequence
  Description of Artificial Sequence: Synthetic peptide
  Seed: DPRMCSLMQGSTLPR
DPRMFSLSQISTIPR

SEQ ID NO: 58931 - protein, 15 aa, Artificial Sequence
  Description of Artificial Sequence: Synthetic peptide
  Seed: DPRMCSLMQGSTLPR
DPRMFSLSQISTLPR

SEQ ID NO: 58932 - protein, 15 aa, Artificial Sequence
  Description of Artificial Sequence: Synthetic peptide
  Seed: DPRMCSLMQGSTLPR
DPRMFSLSQISTVPR

SEQ ID NO: 58933 - protein, 15 aa, Artificial Sequence
  Description of Artificial Sequence: Synthetic peptide
  Seed: DPRMCSLMQGSTLPR
DPRMFSLSQMSTIPR

SEQ ID NO: 58934 - protein, 15 aa, Artificial Sequence
  Description of Artificial Sequence: Synthetic peptide
  Seed: DPRMCSLMQGSTLPR
DPRMFSLSQNSTAPR

SEQ ID NO: 58935 - protein, 15 aa, Artificial Sequence
  Description of Artificial Sequence: Synthetic peptide
  Seed: DPRMCSLMQGSTLPR
DPRMFSLSQNSTIPR

SEQ ID NO: 58936 - protein, 15 aa, Artificial Sequence
  Description of Artificial Sequence: Synthetic peptide
  Seed: DPRMCSLMQGSTLPR
DPRMFSLSQNSTLPR

SEQ ID NO: 58937 - protein, 15 aa, Artificial Sequence
  Description of Artificial Sequence: Synthetic peptide
  Seed: DPRMCSLMQGSTLPR
DPRMFSLSQNSTVPR

SEQ ID NO: 58938 - protein, 15 aa, Artificial Sequence
  Description of Artificial Sequence: Synthetic peptide
  Seed: DPRMCSLMQGSTLPR
DPRMFSLSQPSTAPR

SEQ ID NO: 58939 - protein, 15 aa, Artificial Sequence
  Description of Artificial Sequence: Synthetic peptide
  Seed: DPRMCSLMQGSTLPR
DPRMFSLSQPSTFPR

SEQ ID NO: 58940 - protein, 15 aa, Artificial Sequence
  Description of Artificial Sequence: Synthetic peptide
  Seed: DPRMCSLMQGSTLPR
DPRMFSLSQPSTIPR

SEQ ID NO: 58941 - protein, 15 aa, Artificial Sequence
  Description of Artificial Sequence: Synthetic peptide
  Seed: DPRMCSLMQGSTLPR
DPRMFSLSQPSTLPR

SEQ ID NO: 58942 - protein, 15 aa, Artificial Sequence
  Description of Artificial Sequence: Synthetic peptide
  Seed: DPRMCSLMQGSTLPR
DPRMFSLSQPSTMPR

SEQ ID NO: 58943 - protein, 15 aa, Artificial Sequence
  Description of Artificial Sequence: Synthetic peptide
  Seed: DPRMCSLMQGSTLPR
DPRMFSLSQPSTNPR

SEQ ID NO: 58944 - protein, 15 aa, Artificial Sequence
  Description of Artificial Sequence: Synthetic peptide
  Seed: DPRMCSLMQGSTLPR
DPRMFSLSQPSTSPR

SEQ ID NO: 58945 - protein, 15 aa, Artificial Sequence
  Description of Artificial Sequence: Synthetic peptide
  Seed: DPRMCSLMQGSTLPR
DPRMFSLSQPSTTPR

SEQ ID NO: 58946 - protein, 15 aa, Artificial Sequence
  Description of Artificial Sequence: Synthetic peptide
  Seed: DPRMCSLMQGSTLPR
DPRMFSLSQPSTVPR

SEQ ID NO: 58947 - protein, 15 aa, Artificial Sequence
  Description of Artificial Sequence: Synthetic peptide
  Seed: DPRMCSLMQGSTLPR
DPRMFSLSQSSTAPR

SEQ ID NO: 58948 - protein, 15 aa, Artificial Sequence
  Description of Artificial Sequence: Synthetic peptide
  Seed: DPRMCSLMQGSTLPR
DPRMFSLSQSSTFPR

SEQ ID NO: 58949 - protein, 15 aa, Artificial Sequence
  Description of Artificial Sequence: Synthetic peptide
  Seed: DPRMCSLMQGSTLPR
DPRMFSLSQSSTIPR

SEQ ID NO: 58950 - protein, 15 aa, Artificial Sequence
  Description of Artificial Sequence: Synthetic peptide
  Seed: DPRMCSLMQGSTLPR
DPRMFSLSQSSTLPR

SEQ ID NO: 58951 - protein, 15 aa, Artificial Sequence
  Description of Artificial Sequence: Synthetic peptide
  Seed: DPRMCSLMQGSTLPR
DPRMFSLSQSSTMPR

SEQ ID NO: 58952 - protein, 15 aa, Artificial Sequence
  Description of Artificial Sequence: Synthetic peptide
  Seed: DPRMCSLMQGSTLPR
DPRMFSLSQSSTNPR

SEQ ID NO: 58953 - protein, 15 aa, Artificial Sequence
  Description of Artificial Sequence: Synthetic peptide
  Seed: DPRMCSLMQGSTLPR
DPRMFSLSQSSTSPR

SEQ ID NO: 58954 - protein, 15 aa, Artificial Sequence
  Description of Artificial Sequence: Synthetic peptide
  Seed: DPRMCSLMQGSTLPR
DPRMFSLSQSSTTPR

SEQ ID NO: 58955 - protein, 15 aa, Artificial Sequence
  Description of Artificial Sequence: Synthetic peptide
  Seed: DPRMCSLMQGSTLPR
DPRMFSLSQSSTVPR

SEQ ID NO: 58956 - protein, 15 aa, Artificial Sequence
  Description of Artificial Sequence: Synthetic peptide
  Seed: DPRMCSLMQGSTLPR
DPRMFSLSQSSTYPR

SEQ ID NO: 58957 - protein, 15 aa, Artificial Sequence
  Description of Artificial Sequence: Synthetic peptide
  Seed: DPRMCSLMQGSTLPR
DPRMFSLSQTSTAPR

SEQ ID NO: 58958 - protein, 15 aa, Artificial Sequence
  Description of Artificial Sequence: Synthetic peptide
  Seed: DPRMCSLMQGSTLPR
DPRMFSLSQTSTFPR

SEQ ID NO: 58959 - protein, 15 aa, Artificial Sequence
  Description of Artificial Sequence: Synthetic peptide
  Seed: DPRMCSLMQGSTLPR
DPRMFSLSQTSTIPR

SEQ ID NO: 58960 - protein, 15 aa, Artificial Sequence
  Description of Artificial Sequence: Synthetic peptide
  Seed: DPRMCSLMQGSTLPR
DPRMFSLSQTSTLPR

SEQ ID NO: 58961 - protein, 15 aa, Artificial Sequence
  Description of Artificial Sequence: Synthetic peptide
  Seed: DPRMCSLMQGSTLPR
DPRMFSLSQTSTMPR

SEQ ID NO: 58962 - protein, 15 aa, Artificial Sequence
  Description of Artificial Sequence: Synthetic peptide
  Seed: DPRMCSLMQGSTLPR
DPRMFSLSQTSTSPR

SEQ ID NO: 58963 - protein, 15 aa, Artificial Sequence
  Description of Artificial Sequence: Synthetic peptide
  Seed: DPRMCSLMQGSTLPR
DPRMFSLSQTSTVPR

SEQ ID NO: 58964 - protein, 15 aa, Artificial Sequence
  Description of Artificial Sequence: Synthetic peptide
  Seed: DPRMCSLMQGSTLPR
DPRMFSLSQVSTAPR

SEQ ID NO: 58965 - protein, 15 aa, Artificial Sequence
  Description of Artificial Sequence: Synthetic peptide
  Seed: DPRMCSLMQGSTLPR
DPRMFSLSQVSTIPR

SEQ ID NO: 58966 - protein, 15 aa, Artificial Sequence
  Description of Artificial Sequence: Synthetic peptide
  Seed: DPRMCSLMQGSTLPR
DPRMFSLSQVSTLPR

SEQ ID NO: 58967 - protein, 15 aa, Artificial Sequence
  Description of Artificial Sequence: Synthetic peptide
  Seed: DPRMCSLMQGSTLPR
DPRMFSLSQVSTMPR

SEQ ID NO: 58968 - protein, 15 aa, Artificial Sequence
  Description of Artificial Sequence: Synthetic peptide
  Seed: DPRMCSLMQGSTLPR
DPRMFSLSQVSTNPR

SEQ ID NO: 58969 - protein, 15 aa, Artificial Sequence
  Description of Artificial Sequence: Synthetic peptide
  Seed: DPRMCSLMQGSTLPR
DPRMFSLSQVSTSPR

SEQ ID NO: 58970 - protein, 15 aa, Artificial Sequence
  Description of Artificial Sequence: Synthetic peptide
  Seed: DPRMCSLMQGSTLPR
DPRMFSLSQVSTVPR

SEQ ID NO: 58971 - protein, 15 aa, Artificial Sequence
  Description of Artificial Sequence: Synthetic peptide
  Seed: DPRMCSLMQGSTLPR
DPRMFSLTQASTAPR

SEQ ID NO: 58972 - protein, 15 aa, Artificial Sequence
  Description of Artificial Sequence: Synthetic peptide
  Seed: DPRMCSLMQGSTLPR
DPRMFSLTQASTFPR

SEQ ID NO: 58973 - protein, 15 aa, Artificial Sequence
  Description of Artificial Sequence: Synthetic peptide
  Seed: DPRMCSLMQGSTLPR
DPRMFSLTQASTGPR

SEQ ID NO: 58974 - protein, 15 aa, Artificial Sequence
  Description of Artificial Sequence: Synthetic peptide
  Seed: DPRMCSLMQGSTLPR
DPRMFSLTQASTIPR

SEQ ID NO: 58975 - protein, 15 aa, Artificial Sequence
  Description of Artificial Sequence: Synthetic peptide
  Seed: DPRMCSLMQGSTLPR
DPRMFSLTQASTLPR

SEQ ID NO: 58976 - protein, 15 aa, Artificial Sequence
  Description of Artificial Sequence: Synthetic peptide
  Seed: DPRMCSLMQGSTLPR
DPRMFSLTQASTMPR

SEQ ID NO: 58977 - protein, 15 aa, Artificial Sequence
  Description of Artificial Sequence: Synthetic peptide
  Seed: DPRMCSLMQGSTLPR
DPRMFSLTQASTNPR

SEQ ID NO: 58978 - protein, 15 aa, Artificial Sequence
  Description of Artificial Sequence: Synthetic peptide
  Seed: DPRMCSLMQGSTLPR
DPRMFSLTQASTSPR

SEQ ID NO: 58979 - protein, 15 aa, Artificial Sequence
  Description of Artificial Sequence: Synthetic peptide
  Seed: DPRMCSLMQGSTLPR
DPRMFSLTQASTTPR

SEQ ID NO: 58980 - protein, 15 aa, Artificial Sequence
  Description of Artificial Sequence: Synthetic peptide
  Seed: DPRMCSLMQGSTLPR
DPRMFSLTQASTVPR

SEQ ID NO: 58981 - protein, 15 aa, Artificial Sequence
  Description of Artificial Sequence: Synthetic peptide
  Seed: DPRMCSLMQGSTLPR
DPRMFSLTQASTYPR

SEQ ID NO: 58982 - protein, 15 aa, Artificial Sequence
  Description of Artificial Sequence: Synthetic peptide
  Seed: DPRMCSLMQGSTLPR
DPRMFSLTQGSTAPR

SEQ ID NO: 58983 - protein, 15 aa, Artificial Sequence
  Description of Artificial Sequence: Synthetic peptide
  Seed: DPRMCSLMQGSTLPR
DPRMFSLTQGSTFPR

SEQ ID NO: 58984 - protein, 15 aa, Artificial Sequence
  Description of Artificial Sequence: Synthetic peptide
  Seed: DPRMCSLMQGSTLPR
DPRMFSLTQGSTIPR

SEQ ID NO: 58985 - protein, 15 aa, Artificial Sequence
  Description of Artificial Sequence: Synthetic peptide
  Seed: DPRMCSLMQGSTLPR
DPRMFSLTQGSTLPR

SEQ ID NO: 58986 - protein, 15 aa, Artificial Sequence
  Description of Artificial Sequence: Synthetic peptide
  Seed: DPRMCSLMQGSTLPR
DPRMFSLTQGSTMPR

SEQ ID NO: 58987 - protein, 15 aa, Artificial Sequence
  Description of Artificial Sequence: Synthetic peptide
  Seed: DPRMCSLMQGSTLPR
DPRMFSLTQGSTSPR

SEQ ID NO: 58988 - protein, 15 aa, Artificial Sequence
  Description of Artificial Sequence: Synthetic peptide
  Seed: DPRMCSLMQGSTLPR
DPRMFSLTQGSTTPR

SEQ ID NO: 58989 - protein, 15 aa, Artificial Sequence
  Description of Artificial Sequence: Synthetic peptide
  Seed: DPRMCSLMQGSTLPR
DPRMFSLTQGSTVPR

SEQ ID NO: 58990 - protein, 15 aa, Artificial Sequence
  Description of Artificial Sequence: Synthetic peptide
  Seed: DPRMCSLMQGSTLPR
DPRMFSLTQISTAPR

SEQ ID NO: 58991 - protein, 15 aa, Artificial Sequence
  Description of Artificial Sequence: Synthetic peptide
  Seed: DPRMCSLMQGSTLPR
DPRMFSLTQISTIPR

SEQ ID NO: 58992 - protein, 15 aa, Artificial Sequence
  Description of Artificial Sequence: Synthetic peptide
  Seed: DPRMCSLMQGSTLPR
DPRMFSLTQISTLPR

SEQ ID NO: 58993 - protein, 15 aa, Artificial Sequence
  Description of Artificial Sequence: Synthetic peptide
  Seed: DPRMCSLMQGSTLPR
DPRMFSLTQISTVPR

SEQ ID NO: 58994 - protein, 15 aa, Artificial Sequence
  Description of Artificial Sequence: Synthetic peptide
  Seed: DPRMCSLMQGSTLPR
DPRMFSLTQLSTIPR

SEQ ID NO: 58995 - protein, 15 aa, Artificial Sequence
  Description of Artificial Sequence: Synthetic peptide
  Seed: DPRMCSLMQGSTLPR
DPRMFSLTQMSTIPR

SEQ ID NO: 58996 - protein, 15 aa, Artificial Sequence
  Description of Artificial Sequence: Synthetic peptide
  Seed: DPRMCSLMQGSTLPR
DPRMFSLTQMSTLPR

SEQ ID NO: 58997 - protein, 15 aa, Artificial Sequence
  Description of Artificial Sequence: Synthetic peptide
  Seed: DPRMCSLMQGSTLPR
DPRMFSLTQNSTFPR

SEQ ID NO: 58998 - protein, 15 aa, Artificial Sequence
  Description of Artificial Sequence: Synthetic peptide
  Seed: DPRMCSLMQGSTLPR
DPRMFSLTQNSTIPR

SEQ ID NO: 58999 - protein, 15 aa, Artificial Sequence
  Description of Artificial Sequence: Synthetic peptide
  Seed: DPRMCSLMQGSTLPR
DPRMFSLTQNSTLPR

SEQ ID NO: 59000 - protein, 15 aa, Artificial Sequence
  Description of Artificial Sequence: Synthetic peptide
  Seed: DPRMCSLMQGSTLPR
DPRMFSLTQNSTMPR

SEQ ID NO: 59001 - protein, 15 aa, Artificial Sequence
  Description of Artificial Sequence: Synthetic peptide
  Seed: DPRMCSLMQGSTLPR
DPRMFSLTQNSTVPR

SEQ ID NO: 59002 - protein, 15 aa, Artificial Sequence
  Description of Artificial Sequence: Synthetic peptide
  Seed: DPRMCSLMQGSTLPR
DPRMFSLTQPSTAPR

SEQ ID NO: 59003 - protein, 15 aa, Artificial Sequence
  Description of Artificial Sequence: Synthetic peptide
  Seed: DPRMCSLMQGSTLPR
DPRMFSLTQPSTFPR

SEQ ID NO: 59004 - protein, 15 aa, Artificial Sequence
  Description of Artificial Sequence: Synthetic peptide
  Seed: DPRMCSLMQGSTLPR
DPRMFSLTQPSTIPR

SEQ ID NO: 59005 - protein, 15 aa, Artificial Sequence
  Description of Artificial Sequence: Synthetic peptide
  Seed: DPRMCSLMQGSTLPR
DPRMFSLTQPSTLPR

SEQ ID NO: 59006 - protein, 15 aa, Artificial Sequence
  Description of Artificial Sequence: Synthetic peptide
  Seed: DPRMCSLMQGSTLPR
DPRMFSLTQPSTMPR

SEQ ID NO: 59007 - protein, 15 aa, Artificial Sequence
  Description of Artificial Sequence: Synthetic peptide
  Seed: DPRMCSLMQGSTLPR
DPRMFSLTQPSTNPR

SEQ ID NO: 59008 - protein, 15 aa, Artificial Sequence
  Description of Artificial Sequence: Synthetic peptide
  Seed: DPRMCSLMQGSTLPR
DPRMFSLTQPSTSPR

SEQ ID NO: 59009 - protein, 15 aa, Artificial Sequence
  Description of Artificial Sequence: Synthetic peptide
  Seed: DPRMCSLMQGSTLPR
DPRMFSLTQPSTVPR

SEQ ID NO: 59010 - protein, 15 aa, Artificial Sequence
  Description of Artificial Sequence: Synthetic peptide
  Seed: DPRMCSLMQGSTLPR
DPRMFSLTQQSTIPR

SEQ ID NO: 59011 - protein, 15 aa, Artificial Sequence
  Description of Artificial Sequence: Synthetic peptide
  Seed: DPRMCSLMQGSTLPR
DPRMFSLTQSSTAPR

SEQ ID NO: 59012 - protein, 15 aa, Artificial Sequence
  Description of Artificial Sequence: Synthetic peptide
  Seed: DPRMCSLMQGSTLPR
DPRMFSLTQSSTFPR

SEQ ID NO: 59013 - protein, 15 aa, Artificial Sequence
  Description of Artificial Sequence: Synthetic peptide
  Seed: DPRMCSLMQGSTLPR
DPRMFSLTQSSTIPR

SEQ ID NO: 59014 - protein, 15 aa, Artificial Sequence
  Description of Artificial Sequence: Synthetic peptide
  Seed: DPRMCSLMQGSTLPR
DPRMFSLTQSSTLPR

SEQ ID NO: 59015 - protein, 15 aa, Artificial Sequence
  Description of Artificial Sequence: Synthetic peptide
  Seed: DPRMCSLMQGSTLPR
DPRMFSLTQSSTMPR

SEQ ID NO: 59016 - protein, 15 aa, Artificial Sequence
  Description of Artificial Sequence: Synthetic peptide
  Seed: DPRMCSLMQGSTLPR
DPRMFSLTQSSTNPR

SEQ ID NO: 59017 - protein, 15 aa, Artificial Sequence
  Description of Artificial Sequence: Synthetic peptide
  Seed: DPRMCSLMQGSTLPR
DPRMFSLTQSSTSPR

SEQ ID NO: 59018 - protein, 15 aa, Artificial Sequence
  Description of Artificial Sequence: Synthetic peptide
  Seed: DPRMCSLMQGSTLPR
DPRMFSLTQSSTTPR

SEQ ID NO: 59019 - protein, 15 aa, Artificial Sequence
  Description of Artificial Sequence: Synthetic peptide
  Seed: DPRMCSLMQGSTLPR
DPRMFSLTQSSTVPR

SEQ ID NO: 59020 - protein, 15 aa, Artificial Sequence
  Description of Artificial Sequence: Synthetic peptide
  Seed: DPRMCSLMQGSTLPR
DPRMFSLTQSSTWPR

SEQ ID NO: 59021 - protein, 15 aa, Artificial Sequence
  Description of Artificial Sequence: Synthetic peptide
  Seed: DPRMCSLMQGSTLPR
DPRMFSLTQSSTYPR

SEQ ID NO: 59022 - protein, 15 aa, Artificial Sequence
  Description of Artificial Sequence: Synthetic peptide
  Seed: DPRMCSLMQGSTLPR
DPRMFSLTQTSTAPR

SEQ ID NO: 59023 - protein, 15 aa, Artificial Sequence
  Description of Artificial Sequence: Synthetic peptide
  Seed: DPRMCSLMQGSTLPR
DPRMFSLTQTSTFPR

SEQ ID NO: 59024 - protein, 15 aa, Artificial Sequence
  Description of Artificial Sequence: Synthetic peptide
  Seed: DPRMCSLMQGSTLPR
DPRMFSLTQTSTIPR

SEQ ID NO: 59025 - protein, 15 aa, Artificial Sequence
  Description of Artificial Sequence: Synthetic peptide
  Seed: DPRMCSLMQGSTLPR
DPRMFSLTQTSTLPR

SEQ ID NO: 59026 - protein, 15 aa, Artificial Sequence
  Description of Artificial Sequence: Synthetic peptide
  Seed: DPRMCSLMQGSTLPR
DPRMFSLTQTSTMPR

SEQ ID NO: 59027 - protein, 15 aa, Artificial Sequence
  Description of Artificial Sequence: Synthetic peptide
  Seed: DPRMCSLMQGSTLPR
DPRMFSLTQTSTSPR

SEQ ID NO: 59028 - protein, 15 aa, Artificial Sequence
  Description of Artificial Sequence: Synthetic peptide
  Seed: DPRMCSLMQGSTLPR
DPRMFSLTQTSTVPR

SEQ ID NO: 59029 - protein, 15 aa, Artificial Sequence
  Description of Artificial Sequence: Synthetic peptide
  Seed: DPRMCSLMQGSTLPR
DPRMFSLTQVSTAPR

SEQ ID NO: 59030 - protein, 15 aa, Artificial Sequence
  Description of Artificial Sequence: Synthetic peptide
  Seed: DPRMCSLMQGSTLPR
DPRMFSLTQVSTFPR

SEQ ID NO: 59031 - protein, 15 aa, Artificial Sequence
  Description of Artificial Sequence: Synthetic peptide
  Seed: DPRMCSLMQGSTLPR
DPRMFSLTQVSTIPR

SEQ ID NO: 59032 - protein, 15 aa, Artificial Sequence
  Description of Artificial Sequence: Synthetic peptide
  Seed: DPRMCSLMQGSTLPR
DPRMFSLTQVSTLPR

SEQ ID NO: 59033 - protein, 15 aa, Artificial Sequence
  Description of Artificial Sequence: Synthetic peptide
  Seed: DPRMCSLMQGSTLPR
DPRMFSLTQVSTMPR

SEQ ID NO: 59034 - protein, 15 aa, Artificial Sequence
  Description of Artificial Sequence: Synthetic peptide
  Seed: DPRMCSLMQGSTLPR
DPRMFSLTQVSTNPR

SEQ ID NO: 59035 - protein, 15 aa, Artificial Sequence
  Description of Artificial Sequence: Synthetic peptide
  Seed: DPRMCSLMQGSTLPR
DPRMFSLTQVSTSPR

SEQ ID NO: 59036 - protein, 15 aa, Artificial Sequence
  Description of Artificial Sequence: Synthetic peptide
  Seed: DPRMCSLMQGSTLPR
DPRMFSLTQVSTVPR

SEQ ID NO: 59037 - protein, 15 aa, Artificial Sequence
  Description of Artificial Sequence: Synthetic peptide
  Seed: DPRMCSLMQGSTLPR
DPRMFSLVQASTAPR

SEQ ID NO: 59038 - protein, 15 aa, Artificial Sequence
  Description of Artificial Sequence: Synthetic peptide
  Seed: DPRMCSLMQGSTLPR
DPRMFSLVQASTCPR

SEQ ID NO: 59039 - protein, 15 aa, Artificial Sequence
  Description of Artificial Sequence: Synthetic peptide
  Seed: DPRMCSLMQGSTLPR
DPRMFSLVQASTDPR

SEQ ID NO: 59040 - protein, 15 aa, Artificial Sequence
  Description of Artificial Sequence: Synthetic peptide
  Seed: DPRMCSLMQGSTLPR
DPRMFSLVQASTEPR

SEQ ID NO: 59041 - protein, 15 aa, Artificial Sequence
  Description of Artificial Sequence: Synthetic peptide
  Seed: DPRMCSLMQGSTLPR
DPRMFSLVQASTFPR

SEQ ID NO: 59042 - protein, 15 aa, Artificial Sequence
  Description of Artificial Sequence: Synthetic peptide
  Seed: DPRMCSLMQGSTLPR
DPRMFSLVQASTGPR

SEQ ID NO: 59043 - protein, 15 aa, Artificial Sequence
  Description of Artificial Sequence: Synthetic peptide
  Seed: DPRMCSLMQGSTLPR
DPRMFSLVQASTHPR

SEQ ID NO: 59044 - protein, 15 aa, Artificial Sequence
  Description of Artificial Sequence: Synthetic peptide
  Seed: DPRMCSLMQGSTLPR
DPRMFSLVQASTIPR

SEQ ID NO: 59045 - protein, 15 aa, Artificial Sequence
  Description of Artificial Sequence: Synthetic peptide
  Seed: DPRMCSLMQGSTLPR
DPRMFSLVQASTKPR

SEQ ID NO: 59046 - protein, 15 aa, Artificial Sequence
  Description of Artificial Sequence: Synthetic peptide
  Seed: DPRMCSLMQGSTLPR
DPRMFSLVQASTLPR

SEQ ID NO: 59047 - protein, 15 aa, Artificial Sequence
  Description of Artificial Sequence: Synthetic peptide
  Seed: DPRMCSLMQGSTLPR
DPRMFSLVQASTMPR

SEQ ID NO: 59048 - protein, 15 aa, Artificial Sequence
  Description of Artificial Sequence: Synthetic peptide
  Seed: DPRMCSLMQGSTLPR
DPRMFSLVQASTNPR

SEQ ID NO: 59049 - protein, 15 aa, Artificial Sequence
  Description of Artificial Sequence: Synthetic peptide
  Seed: DPRMCSLMQGSTLPR
DPRMFSLVQASTPPR

SEQ ID NO: 59050 - protein, 15 aa, Artificial Sequence
  Description of Artificial Sequence: Synthetic peptide
  Seed: DPRMCSLMQGSTLPR
DPRMFSLVQASTQPR

SEQ ID NO: 59051 - protein, 15 aa, Artificial Sequence
  Description of Artificial Sequence: Synthetic peptide
  Seed: DPRMCSLMQGSTLPR
DPRMFSLVQASTRPR

SEQ ID NO: 59052 - protein, 15 aa, Artificial Sequence
  Description of Artificial Sequence: Synthetic peptide
  Seed: DPRMCSLMQGSTLPR
DPRMFSLVQASTSPR

SEQ ID NO: 59053 - protein, 15 aa, Artificial Sequence
  Description of Artificial Sequence: Synthetic peptide
  Seed: DPRMCSLMQGSTLPR
DPRMFSLVQASTTPR

SEQ ID NO: 59054 - protein, 15 aa, Artificial Sequence
  Description of Artificial Sequence: Synthetic peptide
  Seed: DPRMCSLMQGSTLPR
DPRMFSLVQASTVPR

SEQ ID NO: 59055 - protein, 15 aa, Artificial Sequence
  Description of Artificial Sequence: Synthetic peptide
  Seed: DPRMCSLMQGSTLPR
DPRMFSLVQASTWPR

SEQ ID NO: 59056 - protein, 15 aa, Artificial Sequence
  Description of Artificial Sequence: Synthetic peptide
  Seed: DPRMCSLMQGSTLPR
DPRMFSLVQASTYPR

SEQ ID NO: 59057 - protein, 15 aa, Artificial Sequence
  Description of Artificial Sequence: Synthetic peptide
  Seed: DPRMCSLMQGSTLPR
DPRMFSLVQGSTAPR

SEQ ID NO: 59058 - protein, 15 aa, Artificial Sequence
  Description of Artificial Sequence: Synthetic peptide
  Seed: DPRMCSLMQGSTLPR
DPRMFSLVQGSTCPR

SEQ ID NO: 59059 - protein, 15 aa, Artificial Sequence
  Description of Artificial Sequence: Synthetic peptide
  Seed: DPRMCSLMQGSTLPR
DPRMFSLVQGSTFPR

SEQ ID NO: 59060 - protein, 15 aa, Artificial Sequence
  Description of Artificial Sequence: Synthetic peptide
  Seed: DPRMCSLMQGSTLPR
DPRMFSLVQGSTGPR

SEQ ID NO: 59061 - protein, 15 aa, Artificial Sequence
  Description of Artificial Sequence: Synthetic peptide
  Seed: DPRMCSLMQGSTLPR
DPRMFSLVQGSTIPR

SEQ ID NO: 59062 - protein, 15 aa, Artificial Sequence
  Description of Artificial Sequence: Synthetic peptide
  Seed: DPRMCSLMQGSTLPR
DPRMFSLVQGSTLPR

SEQ ID NO: 59063 - protein, 15 aa, Artificial Sequence
  Description of Artificial Sequence: Synthetic peptide
  Seed: DPRMCSLMQGSTLPR
DPRMFSLVQGSTMPR

SEQ ID NO: 59064 - protein, 15 aa, Artificial Sequence
  Description of Artificial Sequence: Synthetic peptide
  Seed: DPRMCSLMQGSTLPR
DPRMFSLVQGSTNPR

SEQ ID NO: 59065 - protein, 15 aa, Artificial Sequence
  Description of Artificial Sequence: Synthetic peptide
  Seed: DPRMCSLMQGSTLPR
DPRMFSLVQGSTSPR

SEQ ID NO: 59066 - protein, 15 aa, Artificial Sequence
  Description of Artificial Sequence: Synthetic peptide
  Seed: DPRMCSLMQGSTLPR
DPRMFSLVQGSTTPR

SEQ ID NO: 59067 - protein, 15 aa, Artificial Sequence
  Description of Artificial Sequence: Synthetic peptide
  Seed: DPRMCSLMQGSTLPR
DPRMFSLVQGSTVPR

SEQ ID NO: 59068 - protein, 15 aa, Artificial Sequence
  Description of Artificial Sequence: Synthetic peptide
  Seed: DPRMCSLMQGSTLPR
DPRMFSLVQHSTIPR

SEQ ID NO: 59069 - protein, 15 aa, Artificial Sequence
  Description of Artificial Sequence: Synthetic peptide
  Seed: DPRMCSLMQGSTLPR
DPRMFSLVQHSTLPR

SEQ ID NO: 59070 - protein, 15 aa, Artificial Sequence
  Description of Artificial Sequence: Synthetic peptide
  Seed: DPRMCSLMQGSTLPR
DPRMFSLVQHSTVPR

SEQ ID NO: 59071 - protein, 15 aa, Artificial Sequence
  Description of Artificial Sequence: Synthetic peptide
  Seed: DPRMCSLMQGSTLPR
DPRMFSLVQISTAPR

SEQ ID NO: 59072 - protein, 15 aa, Artificial Sequence
  Description of Artificial Sequence: Synthetic peptide
  Seed: DPRMCSLMQGSTLPR
DPRMFSLVQISTGPR

SEQ ID NO: 59073 - protein, 15 aa, Artificial Sequence
  Description of Artificial Sequence: Synthetic peptide
  Seed: DPRMCSLMQGSTLPR
DPRMFSLVQISTHPR

SEQ ID NO: 59074 - protein, 15 aa, Artificial Sequence
  Description of Artificial Sequence: Synthetic peptide
  Seed: DPRMCSLMQGSTLPR
DPRMFSLVQISTIPR

SEQ ID NO: 59075 - protein, 15 aa, Artificial Sequence
  Description of Artificial Sequence: Synthetic peptide
  Seed: DPRMCSLMQGSTLPR
DPRMFSLVQISTLPR

SEQ ID NO: 59076 - protein, 15 aa, Artificial Sequence
  Description of Artificial Sequence: Synthetic peptide
  Seed: DPRMCSLMQGSTLPR
DPRMFSLVQISTMPR

SEQ ID NO: 59077 - protein, 15 aa, Artificial Sequence
  Description of Artificial Sequence: Synthetic peptide
  Seed: DPRMCSLMQGSTLPR
DPRMFSLVQISTNPR

SEQ ID NO: 59078 - protein, 15 aa, Artificial Sequence
  Description of Artificial Sequence: Synthetic peptide
  Seed: DPRMCSLMQGSTLPR
DPRMFSLVQISTSPR

SEQ ID NO: 59079 - protein, 15 aa, Artificial Sequence
  Description of Artificial Sequence: Synthetic peptide
  Seed: DPRMCSLMQGSTLPR
DPRMFSLVQISTTPR

SEQ ID NO: 59080 - protein, 15 aa, Artificial Sequence
  Description of Artificial Sequence: Synthetic peptide
  Seed: DPRMCSLMQGSTLPR
DPRMFSLVQISTVPR

SEQ ID NO: 59081 - protein, 15 aa, Artificial Sequence
  Description of Artificial Sequence: Synthetic peptide
  Seed: DPRMCSLMQGSTLPR
DPRMFSLVQLSTAPR

SEQ ID NO: 59082 - protein, 15 aa, Artificial Sequence
  Description of Artificial Sequence: Synthetic peptide
  Seed: DPRMCSLMQGSTLPR
DPRMFSLVQLSTIPR

SEQ ID NO: 59083 - protein, 15 aa, Artificial Sequence
  Description of Artificial Sequence: Synthetic peptide
  Seed: DPRMCSLMQGSTLPR
DPRMFSLVQLSTLPR

SEQ ID NO: 59084 - protein, 15 aa, Artificial Sequence
  Description of Artificial Sequence: Synthetic peptide
  Seed: DPRMCSLMQGSTLPR
DPRMFSLVQLSTMPR

SEQ ID NO: 59085 - protein, 15 aa, Artificial Sequence
  Description of Artificial Sequence: Synthetic peptide
  Seed: DPRMCSLMQGSTLPR
DPRMFSLVQLSTNPR

SEQ ID NO: 59086 - protein, 15 aa, Artificial Sequence
  Description of Artificial Sequence: Synthetic peptide
  Seed: DPRMCSLMQGSTLPR
DPRMFSLVQLSTSPR

SEQ ID NO: 59087 - protein, 15 aa, Artificial Sequence
  Description of Artificial Sequence: Synthetic peptide
  Seed: DPRMCSLMQGSTLPR
DPRMFSLVQLSTTPR

SEQ ID NO: 59088 - protein, 15 aa, Artificial Sequence
  Description of Artificial Sequence: Synthetic peptide
  Seed: DPRMCSLMQGSTLPR
DPRMFSLVQLSTVPR

SEQ ID NO: 59089 - protein, 15 aa, Artificial Sequence
  Description of Artificial Sequence: Synthetic peptide
  Seed: DPRMCSLMQGSTLPR
DPRMFSLVQMSTAPR

SEQ ID NO: 59090 - protein, 15 aa, Artificial Sequence
  Description of Artificial Sequence: Synthetic peptide
  Seed: DPRMCSLMQGSTLPR
DPRMFSLVQMSTIPR

SEQ ID NO: 59091 - protein, 15 aa, Artificial Sequence
  Description of Artificial Sequence: Synthetic peptide
  Seed: DPRMCSLMQGSTLPR
DPRMFSLVQMSTLPR

SEQ ID NO: 59092 - protein, 15 aa, Artificial Sequence
  Description of Artificial Sequence: Synthetic peptide
  Seed: DPRMCSLMQGSTLPR
DPRMFSLVQMSTNPR

SEQ ID NO: 59093 - protein, 15 aa, Artificial Sequence
  Description of Artificial Sequence: Synthetic peptide
  Seed: DPRMCSLMQGSTLPR
DPRMFSLVQMSTSPR

SEQ ID NO: 59094 - protein, 15 aa, Artificial Sequence
  Description of Artificial Sequence: Synthetic peptide
  Seed: DPRMCSLMQGSTLPR
DPRMFSLVQMSTTPR

SEQ ID NO: 59095 - protein, 15 aa, Artificial Sequence
  Description of Artificial Sequence: Synthetic peptide
  Seed: DPRMCSLMQGSTLPR
DPRMFSLVQMSTVPR

SEQ ID NO: 59096 - protein, 15 aa, Artificial Sequence
  Description of Artificial Sequence: Synthetic peptide
  Seed: DPRMCSLMQGSTLPR
DPRMFSLVQNSTAPR

SEQ ID NO: 59097 - protein, 15 aa, Artificial Sequence
  Description of Artificial Sequence: Synthetic peptide
  Seed: DPRMCSLMQGSTLPR
DPRMFSLVQNSTGPR

SEQ ID NO: 59098 - protein, 15 aa, Artificial Sequence
  Description of Artificial Sequence: Synthetic peptide
  Seed: DPRMCSLMQGSTLPR
DPRMFSLVQNSTIPR

SEQ ID NO: 59099 - protein, 15 aa, Artificial Sequence
  Description of Artificial Sequence: Synthetic peptide
  Seed: DPRMCSLMQGSTLPR
DPRMFSLVQNSTLPR

SEQ ID NO: 59100 - protein, 15 aa, Artificial Sequence
  Description of Artificial Sequence: Synthetic peptide
  Seed: DPRMCSLMQGSTLPR
DPRMFSLVQNSTMPR

SEQ ID NO: 59101 - protein, 15 aa, Artificial Sequence
  Description of Artificial Sequence: Synthetic peptide
  Seed: DPRMCSLMQGSTLPR
DPRMFSLVQNSTNPR

SEQ ID NO: 59102 - protein, 15 aa, Artificial Sequence
  Description of Artificial Sequence: Synthetic peptide
  Seed: DPRMCSLMQGSTLPR
DPRMFSLVQNSTSPR

SEQ ID NO: 59103 - protein, 15 aa, Artificial Sequence
  Description of Artificial Sequence: Synthetic peptide
  Seed: DPRMCSLMQGSTLPR
DPRMFSLVQNSTTPR

SEQ ID NO: 59104 - protein, 15 aa, Artificial Sequence
  Description of Artificial Sequence: Synthetic peptide
  Seed: DPRMCSLMQGSTLPR
DPRMFSLVQNSTVPR

SEQ ID NO: 59105 - protein, 15 aa, Artificial Sequence
  Description of Artificial Sequence: Synthetic peptide
  Seed: DPRMCSLMQGSTLPR
DPRMFSLVQPSTAPR

SEQ ID NO: 59106 - protein, 15 aa, Artificial Sequence
  Description of Artificial Sequence: Synthetic peptide
  Seed: DPRMCSLMQGSTLPR
DPRMFSLVQPSTCPR

SEQ ID NO: 59107 - protein, 15 aa, Artificial Sequence
  Description of Artificial Sequence: Synthetic peptide
  Seed: DPRMCSLMQGSTLPR
DPRMFSLVQPSTFPR

SEQ ID NO: 59108 - protein, 15 aa, Artificial Sequence
  Description of Artificial Sequence: Synthetic peptide
  Seed: DPRMCSLMQGSTLPR
DPRMFSLVQPSTGPR

SEQ ID NO: 59109 - protein, 15 aa, Artificial Sequence
  Description of Artificial Sequence: Synthetic peptide
  Seed: DPRMCSLMQGSTLPR
DPRMFSLVQPSTHPR

SEQ ID NO: 59110 - protein, 15 aa, Artificial Sequence
  Description of Artificial Sequence: Synthetic peptide
  Seed: DPRMCSLMQGSTLPR
DPRMFSLVQPSTIPR

SEQ ID NO: 59111 - protein, 15 aa, Artificial Sequence
  Description of Artificial Sequence: Synthetic peptide
  Seed: DPRMCSLMQGSTLPR
DPRMFSLVQPSTLPR

SEQ ID NO: 59112 - protein, 15 aa, Artificial Sequence
  Description of Artificial Sequence: Synthetic peptide
  Seed: DPRMCSLMQGSTLPR
DPRMFSLVQPSTMPR

SEQ ID NO: 59113 - protein, 15 aa, Artificial Sequence
  Description of Artificial Sequence: Synthetic peptide
  Seed: DPRMCSLMQGSTLPR
DPRMFSLVQPSTNPR

SEQ ID NO: 59114 - protein, 15 aa, Artificial Sequence
  Description of Artificial Sequence: Synthetic peptide
  Seed: DPRMCSLMQGSTLPR
DPRMFSLVQPSTPPR

SEQ ID NO: 59115 - protein, 15 aa, Artificial Sequence
  Description of Artificial Sequence: Synthetic peptide
  Seed: DPRMCSLMQGSTLPR
DPRMFSLVQPSTQPR

SEQ ID NO: 59116 - protein, 15 aa, Artificial Sequence
  Description of Artificial Sequence: Synthetic peptide
  Seed: DPRMCSLMQGSTLPR
DPRMFSLVQPSTSPR

SEQ ID NO: 59117 - protein, 15 aa, Artificial Sequence
  Description of Artificial Sequence: Synthetic peptide
  Seed: DPRMCSLMQGSTLPR
DPRMFSLVQPSTTPR

SEQ ID NO: 59118 - protein, 15 aa, Artificial Sequence
  Description of Artificial Sequence: Synthetic peptide
  Seed: DPRMCSLMQGSTLPR
DPRMFSLVQPSTVPR

SEQ ID NO: 59119 - protein, 15 aa, Artificial Sequence
  Description of Artificial Sequence: Synthetic peptide
  Seed: DPRMCSLMQGSTLPR
DPRMFSLVQSSTAPR

SEQ ID NO: 59120 - protein, 15 aa, Artificial Sequence
  Description of Artificial Sequence: Synthetic peptide
  Seed: DPRMCSLMQGSTLPR
DPRMFSLVQSSTCPR

SEQ ID NO: 59121 - protein, 15 aa, Artificial Sequence
  Description of Artificial Sequence: Synthetic peptide
  Seed: DPRMCSLMQGSTLPR
DPRMFSLVQSSTFPR

SEQ ID NO: 59122 - protein, 15 aa, Artificial Sequence
  Description of Artificial Sequence: Synthetic peptide
  Seed: DPRMCSLMQGSTLPR
DPRMFSLVQSSTGPR

SEQ ID NO: 59123 - protein, 15 aa, Artificial Sequence
  Description of Artificial Sequence: Synthetic peptide
  Seed: DPRMCSLMQGSTLPR
DPRMFSLVQSSTHPR

SEQ ID NO: 59124 - protein, 15 aa, Artificial Sequence
  Description of Artificial Sequence: Synthetic peptide
  Seed: DPRMCSLMQGSTLPR
DPRMFSLVQSSTIPR

SEQ ID NO: 59125 - protein, 15 aa, Artificial Sequence
  Description of Artificial Sequence: Synthetic peptide
  Seed: DPRMCSLMQGSTLPR
DPRMFSLVQSSTLPR

SEQ ID NO: 59126 - protein, 15 aa, Artificial Sequence
  Description of Artificial Sequence: Synthetic peptide
  Seed: DPRMCSLMQGSTLPR
DPRMFSLVQSSTMPR

SEQ ID NO: 59127 - protein, 15 aa, Artificial Sequence
  Description of Artificial Sequence: Synthetic peptide
  Seed: DPRMCSLMQGSTLPR
DPRMFSLVQSSTNPR

SEQ ID NO: 59128 - protein, 15 aa, Artificial Sequence
  Description of Artificial Sequence: Synthetic peptide
  Seed: DPRMCSLMQGSTLPR
DPRMFSLVQSSTQPR

SEQ ID NO: 59129 - protein, 15 aa, Artificial Sequence
  Description of Artificial Sequence: Synthetic peptide
  Seed: DPRMCSLMQGSTLPR
DPRMFSLVQSSTSPR

SEQ ID NO: 59130 - protein, 15 aa, Artificial Sequence
  Description of Artificial Sequence: Synthetic peptide
  Seed: DPRMCSLMQGSTLPR
DPRMFSLVQSSTTPR

SEQ ID NO: 59131 - protein, 15 aa, Artificial Sequence
  Description of Artificial Sequence: Synthetic peptide
  Seed: DPRMCSLMQGSTLPR
DPRMFSLVQSSTVPR

SEQ ID NO: 59132 - protein, 15 aa, Artificial Sequence
  Description of Artificial Sequence: Synthetic peptide
  Seed: DPRMCSLMQGSTLPR
DPRMFSLVQSSTYPR

SEQ ID NO: 59133 - protein, 15 aa, Artificial Sequence
  Description of Artificial Sequence: Synthetic peptide
  Seed: DPRMCSLMQGSTLPR
DPRMFSLVQTSTAPR

SEQ ID NO: 59134 - protein, 15 aa, Artificial Sequence
  Description of Artificial Sequence: Synthetic peptide
  Seed: DPRMCSLMQGSTLPR
DPRMFSLVQTSTFPR

SEQ ID NO: 59135 - protein, 15 aa, Artificial Sequence
  Description of Artificial Sequence: Synthetic peptide
  Seed: DPRMCSLMQGSTLPR
DPRMFSLVQTSTGPR

SEQ ID NO: 59136 - protein, 15 aa, Artificial Sequence
  Description of Artificial Sequence: Synthetic peptide
  Seed: DPRMCSLMQGSTLPR
DPRMFSLVQTSTHPR

SEQ ID NO: 59137 - protein, 15 aa, Artificial Sequence
  Description of Artificial Sequence: Synthetic peptide
  Seed: DPRMCSLMQGSTLPR
DPRMFSLVQTSTIPR

SEQ ID NO: 59138 - protein, 15 aa, Artificial Sequence
  Description of Artificial Sequence: Synthetic peptide
  Seed: DPRMCSLMQGSTLPR
DPRMFSLVQTSTLPR

SEQ ID NO: 59139 - protein, 15 aa, Artificial Sequence
  Description of Artificial Sequence: Synthetic peptide
  Seed: DPRMCSLMQGSTLPR
DPRMFSLVQTSTMPR

SEQ ID NO: 59140 - protein, 15 aa, Artificial Sequence
  Description of Artificial Sequence: Synthetic peptide
  Seed: DPRMCSLMQGSTLPR
DPRMFSLVQTSTNPR

SEQ ID NO: 59141 - protein, 15 aa, Artificial Sequence
  Description of Artificial Sequence: Synthetic peptide
  Seed: DPRMCSLMQGSTLPR
DPRMFSLVQTSTQPR

SEQ ID NO: 59142 - protein, 15 aa, Artificial Sequence
  Description of Artificial Sequence: Synthetic peptide
  Seed: DPRMCSLMQGSTLPR
DPRMFSLVQTSTSPR

SEQ ID NO: 59143 - protein, 15 aa, Artificial Sequence
  Description of Artificial Sequence: Synthetic peptide
  Seed: DPRMCSLMQGSTLPR
DPRMFSLVQTSTTPR

SEQ ID NO: 59144 - protein, 15 aa, Artificial Sequence
  Description of Artificial Sequence: Synthetic peptide
  Seed: DPRMCSLMQGSTLPR
DPRMFSLVQTSTVPR

SEQ ID NO: 59145 - protein, 15 aa, Artificial Sequence
  Description of Artificial Sequence: Synthetic peptide
  Seed: DPRMCSLMQGSTLPR
DPRMFSLVQVSTAPR

SEQ ID NO: 59146 - protein, 15 aa, Artificial Sequence
  Description of Artificial Sequence: Synthetic peptide
  Seed: DPRMCSLMQGSTLPR
DPRMFSLVQVSTGPR

SEQ ID NO: 59147 - protein, 15 aa, Artificial Sequence
  Description of Artificial Sequence: Synthetic peptide
  Seed: DPRMCSLMQGSTLPR
DPRMFSLVQVSTHPR

SEQ ID NO: 59148 - protein, 15 aa, Artificial Sequence
  Description of Artificial Sequence: Synthetic peptide
  Seed: DPRMCSLMQGSTLPR
DPRMFSLVQVSTIPR

SEQ ID NO: 59149 - protein, 15 aa, Artificial Sequence
  Description of Artificial Sequence: Synthetic peptide
  Seed: DPRMCSLMQGSTLPR
DPRMFSLVQVSTLPR

SEQ ID NO: 59150 - protein, 15 aa, Artificial Sequence
  Description of Artificial Sequence: Synthetic peptide
  Seed: DPRMCSLMQGSTLPR
DPRMFSLVQVSTMPR

SEQ ID NO: 59151 - protein, 15 aa, Artificial Sequence
  Description of Artificial Sequence: Synthetic peptide
  Seed: DPRMCSLMQGSTLPR
DPRMFSLVQVSTNPR

SEQ ID NO: 59152 - protein, 15 aa, Artificial Sequence
  Description of Artificial Sequence: Synthetic peptide
  Seed: DPRMCSLMQGSTLPR
DPRMFSLVQVSTQPR

SEQ ID NO: 59153 - protein, 15 aa, Artificial Sequence
  Description of Artificial Sequence: Synthetic peptide
  Seed: DPRMCSLMQGSTLPR
DPRMFSLVQVSTSPR

SEQ ID NO: 59154 - protein, 15 aa, Artificial Sequence
  Description of Artificial Sequence: Synthetic peptide
  Seed: DPRMCSLMQGSTLPR
DPRMFSLVQVSTTPR

SEQ ID NO: 59155 - protein, 15 aa, Artificial Sequence
  Description of Artificial Sequence: Synthetic peptide
  Seed: DPRMCSLMQGSTLPR
DPRMFSLVQVSTVPR

SEQ ID NO: 59156 - protein, 15 aa, Artificial Sequence
  Description of Artificial Sequence: Synthetic peptide
  Seed: DPRMCSLMQGSTLPR
DPRMFSLWQASTAPR

SEQ ID NO: 59157 - protein, 15 aa, Artificial Sequence
  Description of Artificial Sequence: Synthetic peptide
  Seed: DPRMCSLMQGSTLPR
DPRMFSLWQASTIPR

SEQ ID NO: 59158 - protein, 15 aa, Artificial Sequence
  Description of Artificial Sequence: Synthetic peptide
  Seed: DPRMCSLMQGSTLPR
DPRMFSLWQASTLPR

SEQ ID NO: 59159 - protein, 15 aa, Artificial Sequence
  Description of Artificial Sequence: Synthetic peptide
  Seed: DPRMCSLMQGSTLPR
DPRMFSLWQASTMPR

SEQ ID NO: 59160 - protein, 15 aa, Artificial Sequence
  Description of Artificial Sequence: Synthetic peptide
  Seed: DPRMCSLMQGSTLPR
DPRMFSLWQASTVPR

SEQ ID NO: 59161 - protein, 15 aa, Artificial Sequence
  Description of Artificial Sequence: Synthetic peptide
  Seed: DPRMCSLMQGSTLPR
DPRMFSLWQGSTLPR

SEQ ID NO: 59162 - protein, 15 aa, Artificial Sequence
  Description of Artificial Sequence: Synthetic peptide
  Seed: DPRMCSLMQGSTLPR
DPRMFSLWQGSTVPR

SEQ ID NO: 59163 - protein, 15 aa, Artificial Sequence
  Description of Artificial Sequence: Synthetic peptide
  Seed: DPRMCSLMQGSTLPR
DPRMFSLWQSSTIPR

SEQ ID NO: 59164 - protein, 15 aa, Artificial Sequence
  Description of Artificial Sequence: Synthetic peptide
  Seed: DPRMCSLMQGSTLPR
DPRMFSLWQSSTLPR

SEQ ID NO: 59165 - protein, 15 aa, Artificial Sequence
  Description of Artificial Sequence: Synthetic peptide
  Seed: DPRMCSLMQGSTLPR
DPRMFSLWQSSTVPR

SEQ ID NO: 59166 - protein, 15 aa, Artificial Sequence
  Description of Artificial Sequence: Synthetic peptide
  Seed: DPRMCSLMQGSTLPR
DPRMFSLYQASTLPR

SEQ ID NO: 59167 - protein, 15 aa, Artificial Sequence
  Description of Artificial Sequence: Synthetic peptide
  Seed: DPRMCSLMQGSTLPR
DPRMFSLYQASTVPR

SEQ ID NO: 59168 - protein, 15 aa, Artificial Sequence
  Description of Artificial Sequence: Synthetic peptide
  Seed: DPRMCSLMQGSTLPR
DPRMFSLYQNSTIPR

SEQ ID NO: 59169 - protein, 15 aa, Artificial Sequence
  Description of Artificial Sequence: Synthetic peptide
  Seed: DPRMCSLMQGSTLPR
DPRMFSLYQNSTLPR

SEQ ID NO: 59170 - protein, 15 aa, Artificial Sequence
  Description of Artificial Sequence: Synthetic peptide
  Seed: DPRMCSLMQGSTLPR
DPRMFSLYQNSTVPR

SEQ ID NO: 59171 - protein, 15 aa, Artificial Sequence
  Description of Artificial Sequence: Synthetic peptide
  Seed: DPRMCSLMQGSTLPR
DPRMFSLYQSSTAPR

SEQ ID NO: 59172 - protein, 15 aa, Artificial Sequence
  Description of Artificial Sequence: Synthetic peptide
  Seed: DPRMCSLMQGSTLPR
DPRMFSLYQSSTIPR

SEQ ID NO: 59173 - protein, 15 aa, Artificial Sequence
  Description of Artificial Sequence: Synthetic peptide
  Seed: DPRMCSLMQGSTLPR
DPRMFSLYQSSTLPR

SEQ ID NO: 59174 - protein, 15 aa, Artificial Sequence
  Description of Artificial Sequence: Synthetic peptide
  Seed: DPRMCSLMQGSTLPR
DPRMFSLYQSSTVPR

SEQ ID NO: 59175 - protein, 15 aa, Artificial Sequence
  Description of Artificial Sequence: Synthetic peptide
  Seed: DPRMCSLMQGSTLPR
DPRMISLAQASTAPR

SEQ ID NO: 59176 - protein, 15 aa, Artificial Sequence
  Description of Artificial Sequence: Synthetic peptide
  Seed: DPRMCSLMQGSTLPR
DPRMISLAQASTIPR

SEQ ID NO: 59177 - protein, 15 aa, Artificial Sequence
  Description of Artificial Sequence: Synthetic peptide
  Seed: DPRMCSLMQGSTLPR
DPRMISLAQASTLPR

SEQ ID NO: 59178 - protein, 15 aa, Artificial Sequence
  Description of Artificial Sequence: Synthetic peptide
  Seed: DPRMCSLMQGSTLPR
DPRMISLAQASTMPR

SEQ ID NO: 59179 - protein, 15 aa, Artificial Sequence
  Description of Artificial Sequence: Synthetic peptide
  Seed: DPRMCSLMQGSTLPR
DPRMISLAQASTSPR

SEQ ID NO: 59180 - protein, 15 aa, Artificial Sequence
  Description of Artificial Sequence: Synthetic peptide
  Seed: DPRMCSLMQGSTLPR
DPRMISLAQASTTPR

SEQ ID NO: 59181 - protein, 15 aa, Artificial Sequence
  Description of Artificial Sequence: Synthetic peptide
  Seed: DPRMCSLMQGSTLPR
DPRMISLAQASTVPR

SEQ ID NO: 59182 - protein, 15 aa, Artificial Sequence
  Description of Artificial Sequence: Synthetic peptide
  Seed: DPRMCSLMQGSTLPR
DPRMISLAQGSTAPR

SEQ ID NO: 59183 - protein, 15 aa, Artificial Sequence
  Description of Artificial Sequence: Synthetic peptide
  Seed: DPRMCSLMQGSTLPR
DPRMISLAQGSTIPR

SEQ ID NO: 59184 - protein, 15 aa, Artificial Sequence
  Description of Artificial Sequence: Synthetic peptide
  Seed: DPRMCSLMQGSTLPR
DPRMISLAQGSTLPR

SEQ ID NO: 59185 - protein, 15 aa, Artificial Sequence
  Description of Artificial Sequence: Synthetic peptide
  Seed: DPRMCSLMQGSTLPR
DPRMISLAQGSTMPR

SEQ ID NO: 59186 - protein, 15 aa, Artificial Sequence
  Description of Artificial Sequence: Synthetic peptide
  Seed: DPRMCSLMQGSTLPR
DPRMISLAQGSTSPR

SEQ ID NO: 59187 - protein, 15 aa, Artificial Sequence
  Description of Artificial Sequence: Synthetic peptide
  Seed: DPRMCSLMQGSTLPR
DPRMISLAQGSTTPR

SEQ ID NO: 59188 - protein, 15 aa, Artificial Sequence
  Description of Artificial Sequence: Synthetic peptide
  Seed: DPRMCSLMQGSTLPR
DPRMISLAQGSTVPR

SEQ ID NO: 59189 - protein, 15 aa, Artificial Sequence
  Description of Artificial Sequence: Synthetic peptide
  Seed: DPRMCSLMQGSTLPR
DPRMISLAQNSTAPR

SEQ ID NO: 59190 - protein, 15 aa, Artificial Sequence
  Description of Artificial Sequence: Synthetic peptide
  Seed: DPRMCSLMQGSTLPR
DPRMISLAQNSTIPR

SEQ ID NO: 59191 - protein, 15 aa, Artificial Sequence
  Description of Artificial Sequence: Synthetic peptide
  Seed: DPRMCSLMQGSTLPR
DPRMISLAQNSTLPR

SEQ ID NO: 59192 - protein, 15 aa, Artificial Sequence
  Description of Artificial Sequence: Synthetic peptide
  Seed: DPRMCSLMQGSTLPR
DPRMISLAQNSTSPR

SEQ ID NO: 59193 - protein, 15 aa, Artificial Sequence
  Description of Artificial Sequence: Synthetic peptide
  Seed: DPRMCSLMQGSTLPR
DPRMISLAQNSTVPR

SEQ ID NO: 59194 - protein, 15 aa, Artificial Sequence
  Description of Artificial Sequence: Synthetic peptide
  Seed: DPRMCSLMQGSTLPR
DPRMISLAQPSTAPR

SEQ ID NO: 59195 - protein, 15 aa, Artificial Sequence
  Description of Artificial Sequence: Synthetic peptide
  Seed: DPRMCSLMQGSTLPR
DPRMISLAQPSTIPR

SEQ ID NO: 59196 - protein, 15 aa, Artificial Sequence
  Description of Artificial Sequence: Synthetic peptide
  Seed: DPRMCSLMQGSTLPR
DPRMISLAQPSTLPR

SEQ ID NO: 59197 - protein, 15 aa, Artificial Sequence
  Description of Artificial Sequence: Synthetic peptide
  Seed: DPRMCSLMQGSTLPR
DPRMISLAQPSTMPR

SEQ ID NO: 59198 - protein, 15 aa, Artificial Sequence
  Description of Artificial Sequence: Synthetic peptide
  Seed: DPRMCSLMQGSTLPR
DPRMISLAQPSTVPR

SEQ ID NO: 59199 - protein, 15 aa, Artificial Sequence
  Description of Artificial Sequence: Synthetic peptide
  Seed: DPRMCSLMQGSTLPR
DPRMISLAQSSTAPR

SEQ ID NO: 59200 - protein, 15 aa, Artificial Sequence
  Description of Artificial Sequence: Synthetic peptide
  Seed: DPRMCSLMQGSTLPR
DPRMISLAQSSTIPR

SEQ ID NO: 59201 - protein, 15 aa, Artificial Sequence
  Description of Artificial Sequence: Synthetic peptide
  Seed: DPRMCSLMQGSTLPR
DPRMISLAQSSTLPR

SEQ ID NO: 59202 - protein, 15 aa, Artificial Sequence
  Description of Artificial Sequence: Synthetic peptide
  Seed: DPRMCSLMQGSTLPR
DPRMISLAQSSTMPR

SEQ ID NO: 59203 - protein, 15 aa, Artificial Sequence
  Description of Artificial Sequence: Synthetic peptide
  Seed: DPRMCSLMQGSTLPR
DPRMISLAQSSTTPR

SEQ ID NO: 59204 - protein, 15 aa, Artificial Sequence
  Description of Artificial Sequence: Synthetic peptide
  Seed: DPRMCSLMQGSTLPR
DPRMISLAQSSTVPR

SEQ ID NO: 59205 - protein, 15 aa, Artificial Sequence
  Description of Artificial Sequence: Synthetic peptide
  Seed: DPRMCSLMQGSTLPR
DPRMISLAQTSTIPR

SEQ ID NO: 59206 - protein, 15 aa, Artificial Sequence
  Description of Artificial Sequence: Synthetic peptide
  Seed: DPRMCSLMQGSTLPR
DPRMISLAQTSTLPR

SEQ ID NO: 59207 - protein, 15 aa, Artificial Sequence
  Description of Artificial Sequence: Synthetic peptide
  Seed: DPRMCSLMQGSTLPR
DPRMISLAQTSTVPR

SEQ ID NO: 59208 - protein, 15 aa, Artificial Sequence
  Description of Artificial Sequence: Synthetic peptide
  Seed: DPRMCSLMQGSTLPR
DPRMISLCQASTLPR

SEQ ID NO: 59209 - protein, 15 aa, Artificial Sequence
  Description of Artificial Sequence: Synthetic peptide
  Seed: DPRMCSLMQGSTLPR
DPRMISLEQASTAPR

SEQ ID NO: 59210 - protein, 15 aa, Artificial Sequence
  Description of Artificial Sequence: Synthetic peptide
  Seed: DPRMCSLMQGSTLPR
DPRMISLEQASTIPR

SEQ ID NO: 59211 - protein, 15 aa, Artificial Sequence
  Description of Artificial Sequence: Synthetic peptide
  Seed: DPRMCSLMQGSTLPR
DPRMISLEQASTLPR

SEQ ID NO: 59212 - protein, 15 aa, Artificial Sequence
  Description of Artificial Sequence: Synthetic peptide
  Seed: DPRMCSLMQGSTLPR
DPRMISLEQASTVPR

SEQ ID NO: 59213 - protein, 15 aa, Artificial Sequence
  Description of Artificial Sequence: Synthetic peptide
  Seed: DPRMCSLMQGSTLPR
DPRMISLEQGSTLPR

SEQ ID NO: 59214 - protein, 15 aa, Artificial Sequence
  Description of Artificial Sequence: Synthetic peptide
  Seed: DPRMCSLMQGSTLPR
DPRMISLFQASTAPR

SEQ ID NO: 59215 - protein, 15 aa, Artificial Sequence
  Description of Artificial Sequence: Synthetic peptide
  Seed: DPRMCSLMQGSTLPR
DPRMISLFQASTIPR

SEQ ID NO: 59216 - protein, 15 aa, Artificial Sequence
  Description of Artificial Sequence: Synthetic peptide
  Seed: DPRMCSLMQGSTLPR
DPRMISLFQASTLPR

SEQ ID NO: 59217 - protein, 15 aa, Artificial Sequence
  Description of Artificial Sequence: Synthetic peptide
  Seed: DPRMCSLMQGSTLPR
DPRMISLFQASTMPR

SEQ ID NO: 59218 - protein, 15 aa, Artificial Sequence
  Description of Artificial Sequence: Synthetic peptide
  Seed: DPRMCSLMQGSTLPR
DPRMISLFQASTTPR

SEQ ID NO: 59219 - protein, 15 aa, Artificial Sequence
  Description of Artificial Sequence: Synthetic peptide
  Seed: DPRMCSLMQGSTLPR
DPRMISLFQASTVPR

SEQ ID NO: 59220 - protein, 15 aa, Artificial Sequence
  Description of Artificial Sequence: Synthetic peptide
  Seed: DPRMCSLMQGSTLPR
DPRMISLFQGSTAPR

SEQ ID NO: 59221 - protein, 15 aa, Artificial Sequence
  Description of Artificial Sequence: Synthetic peptide
  Seed: DPRMCSLMQGSTLPR
DPRMISLFQGSTIPR

SEQ ID NO: 59222 - protein, 15 aa, Artificial Sequence
  Description of Artificial Sequence: Synthetic peptide
  Seed: DPRMCSLMQGSTLPR
DPRMISLFQGSTLPR

SEQ ID NO: 59223 - protein, 15 aa, Artificial Sequence
  Description of Artificial Sequence: Synthetic peptide
  Seed: DPRMCSLMQGSTLPR
DPRMISLFQGSTMPR

SEQ ID NO: 59224 - protein, 15 aa, Artificial Sequence
  Description of Artificial Sequence: Synthetic peptide
  Seed: DPRMCSLMQGSTLPR
DPRMISLFQGSTSPR

SEQ ID NO: 59225 - protein, 15 aa, Artificial Sequence
  Description of Artificial Sequence: Synthetic peptide
  Seed: DPRMCSLMQGSTLPR
DPRMISLFQGSTTPR

SEQ ID NO: 59226 - protein, 15 aa, Artificial Sequence
  Description of Artificial Sequence: Synthetic peptide
  Seed: DPRMCSLMQGSTLPR
DPRMISLFQGSTVPR

SEQ ID NO: 59227 - protein, 15 aa, Artificial Sequence
  Description of Artificial Sequence: Synthetic peptide
  Seed: DPRMCSLMQGSTLPR
DPRMISLFQNSTAPR

SEQ ID NO: 59228 - protein, 15 aa, Artificial Sequence
  Description of Artificial Sequence: Synthetic peptide
  Seed: DPRMCSLMQGSTLPR
DPRMISLFQNSTFPR

SEQ ID NO: 59229 - protein, 15 aa, Artificial Sequence
  Description of Artificial Sequence: Synthetic peptide
  Seed: DPRMCSLMQGSTLPR
DPRMISLFQNSTIPR

SEQ ID NO: 59230 - protein, 15 aa, Artificial Sequence
  Description of Artificial Sequence: Synthetic peptide
  Seed: DPRMCSLMQGSTLPR
DPRMISLFQNSTLPR

SEQ ID NO: 59231 - protein, 15 aa, Artificial Sequence
  Description of Artificial Sequence: Synthetic peptide
  Seed: DPRMCSLMQGSTLPR
DPRMISLFQNSTMPR

SEQ ID NO: 59232 - protein, 15 aa, Artificial Sequence
  Description of Artificial Sequence: Synthetic peptide
  Seed: DPRMCSLMQGSTLPR
DPRMISLFQNSTSPR

SEQ ID NO: 59233 - protein, 15 aa, Artificial Sequence
  Description of Artificial Sequence: Synthetic peptide
  Seed: DPRMCSLMQGSTLPR
DPRMISLFQNSTTPR

SEQ ID NO: 59234 - protein, 15 aa, Artificial Sequence
  Description of Artificial Sequence: Synthetic peptide
  Seed: DPRMCSLMQGSTLPR
DPRMISLFQNSTVPR

SEQ ID NO: 59235 - protein, 15 aa, Artificial Sequence
  Description of Artificial Sequence: Synthetic peptide
  Seed: DPRMCSLMQGSTLPR
DPRMISLFQPSTLPR

SEQ ID NO: 59236 - protein, 15 aa, Artificial Sequence
  Description of Artificial Sequence: Synthetic peptide
  Seed: DPRMCSLMQGSTLPR
DPRMISLFQSSTAPR

SEQ ID NO: 59237 - protein, 15 aa, Artificial Sequence
  Description of Artificial Sequence: Synthetic peptide
  Seed: DPRMCSLMQGSTLPR
DPRMISLFQSSTFPR

SEQ ID NO: 59238 - protein, 15 aa, Artificial Sequence
  Description of Artificial Sequence: Synthetic peptide
  Seed: DPRMCSLMQGSTLPR
DPRMISLFQSSTGPR

SEQ ID NO: 59239 - protein, 15 aa, Artificial Sequence
  Description of Artificial Sequence: Synthetic peptide
  Seed: DPRMCSLMQGSTLPR
DPRMISLFQSSTIPR

SEQ ID NO: 59240 - protein, 15 aa, Artificial Sequence
  Description of Artificial Sequence: Synthetic peptide
  Seed: DPRMCSLMQGSTLPR
DPRMISLFQSSTLPR

SEQ ID NO: 59241 - protein, 15 aa, Artificial Sequence
  Description of Artificial Sequence: Synthetic peptide
  Seed: DPRMCSLMQGSTLPR
DPRMISLFQSSTMPR

SEQ ID NO: 59242 - protein, 15 aa, Artificial Sequence
  Description of Artificial Sequence: Synthetic peptide
  Seed: DPRMCSLMQGSTLPR
DPRMISLFQSSTSPR

SEQ ID NO: 59243 - protein, 15 aa, Artificial Sequence
  Description of Artificial Sequence: Synthetic peptide
  Seed: DPRMCSLMQGSTLPR
DPRMISLFQSSTTPR

SEQ ID NO: 59244 - protein, 15 aa, Artificial Sequence
  Description of Artificial Sequence: Synthetic peptide
  Seed: DPRMCSLMQGSTLPR
DPRMISLFQSSTVPR

SEQ ID NO: 59245 - protein, 15 aa, Artificial Sequence
  Description of Artificial Sequence: Synthetic peptide
  Seed: DPRMCSLMQGSTLPR
DPRMISLFQTSTAPR

SEQ ID NO: 59246 - protein, 15 aa, Artificial Sequence
  Description of Artificial Sequence: Synthetic peptide
  Seed: DPRMCSLMQGSTLPR
DPRMISLFQTSTIPR

SEQ ID NO: 59247 - protein, 15 aa, Artificial Sequence
  Description of Artificial Sequence: Synthetic peptide
  Seed: DPRMCSLMQGSTLPR
DPRMISLFQTSTLPR

SEQ ID NO: 59248 - protein, 15 aa, Artificial Sequence
  Description of Artificial Sequence: Synthetic peptide
  Seed: DPRMCSLMQGSTLPR
DPRMISLFQTSTMPR

SEQ ID NO: 59249 - protein, 15 aa, Artificial Sequence
  Description of Artificial Sequence: Synthetic peptide
  Seed: DPRMCSLMQGSTLPR
DPRMISLFQTSTSPR

SEQ ID NO: 59250 - protein, 15 aa, Artificial Sequence
  Description of Artificial Sequence: Synthetic peptide
  Seed: DPRMCSLMQGSTLPR
DPRMISLFQTSTVPR

SEQ ID NO: 59251 - protein, 15 aa, Artificial Sequence
  Description of Artificial Sequence: Synthetic peptide
  Seed: DPRMCSLMQGSTLPR
DPRMISLGQASTIPR

SEQ ID NO: 59252 - protein, 15 aa, Artificial Sequence
  Description of Artificial Sequence: Synthetic peptide
  Seed: DPRMCSLMQGSTLPR
DPRMISLGQASTLPR

SEQ ID NO: 59253 - protein, 15 aa, Artificial Sequence
  Description of Artificial Sequence: Synthetic peptide
  Seed: DPRMCSLMQGSTLPR
DPRMISLGQASTVPR

SEQ ID NO: 59254 - protein, 15 aa, Artificial Sequence
  Description of Artificial Sequence: Synthetic peptide
  Seed: DPRMCSLMQGSTLPR
DPRMISLHQASTLPR

SEQ ID NO: 59255 - protein, 15 aa, Artificial Sequence
  Description of Artificial Sequence: Synthetic peptide
  Seed: DPRMCSLMQGSTLPR
DPRMISLIQASTAPR

SEQ ID NO: 59256 - protein, 15 aa, Artificial Sequence
  Description of Artificial Sequence: Synthetic peptide
  Seed: DPRMCSLMQGSTLPR
DPRMISLIQASTCPR

SEQ ID NO: 59257 - protein, 15 aa, Artificial Sequence
  Description of Artificial Sequence: Synthetic peptide
  Seed: DPRMCSLMQGSTLPR
DPRMISLIQASTGPR

SEQ ID NO: 59258 - protein, 15 aa, Artificial Sequence
  Description of Artificial Sequence: Synthetic peptide
  Seed: DPRMCSLMQGSTLPR
DPRMISLIQASTIPR

SEQ ID NO: 59259 - protein, 15 aa, Artificial Sequence
  Description of Artificial Sequence: Synthetic peptide
  Seed: DPRMCSLMQGSTLPR
DPRMISLIQASTLPR

SEQ ID NO: 59260 - protein, 15 aa, Artificial Sequence
  Description of Artificial Sequence: Synthetic peptide
  Seed: DPRMCSLMQGSTLPR
DPRMISLIQASTMPR

SEQ ID NO: 59261 - protein, 15 aa, Artificial Sequence
  Description of Artificial Sequence: Synthetic peptide
  Seed: DPRMCSLMQGSTLPR
DPRMISLIQASTNPR

SEQ ID NO: 59262 - protein, 15 aa, Artificial Sequence
  Description of Artificial Sequence: Synthetic peptide
  Seed: DPRMCSLMQGSTLPR
DPRMISLIQASTSPR

SEQ ID NO: 59263 - protein, 15 aa, Artificial Sequence
  Description of Artificial Sequence: Synthetic peptide
  Seed: DPRMCSLMQGSTLPR
DPRMISLIQASTTPR

SEQ ID NO: 59264 - protein, 15 aa, Artificial Sequence
  Description of Artificial Sequence: Synthetic peptide
  Seed: DPRMCSLMQGSTLPR
DPRMISLIQASTVPR

SEQ ID NO: 59265 - protein, 15 aa, Artificial Sequence
  Description of Artificial Sequence: Synthetic peptide
  Seed: DPRMCSLMQGSTLPR
DPRMISLIQGSTAPR

SEQ ID NO: 59266 - protein, 15 aa, Artificial Sequence
  Description of Artificial Sequence: Synthetic peptide
  Seed: DPRMCSLMQGSTLPR
DPRMISLIQGSTGPR

SEQ ID NO: 59267 - protein, 15 aa, Artificial Sequence
  Description of Artificial Sequence: Synthetic peptide
  Seed: DPRMCSLMQGSTLPR
DPRMISLIQGSTIPR

SEQ ID NO: 59268 - protein, 15 aa, Artificial Sequence
  Description of Artificial Sequence: Synthetic peptide
  Seed: DPRMCSLMQGSTLPR
DPRMISLIQGSTLPR

SEQ ID NO: 59269 - protein, 15 aa, Artificial Sequence
  Description of Artificial Sequence: Synthetic peptide
  Seed: DPRMCSLMQGSTLPR
DPRMISLIQGSTMPR

SEQ ID NO: 59270 - protein, 15 aa, Artificial Sequence
  Description of Artificial Sequence: Synthetic peptide
  Seed: DPRMCSLMQGSTLPR
DPRMISLIQGSTSPR

SEQ ID NO: 59271 - protein, 15 aa, Artificial Sequence
  Description of Artificial Sequence: Synthetic peptide
  Seed: DPRMCSLMQGSTLPR
DPRMISLIQGSTTPR

SEQ ID NO: 59272 - protein, 15 aa, Artificial Sequence
  Description of Artificial Sequence: Synthetic peptide
  Seed: DPRMCSLMQGSTLPR
DPRMISLIQGSTVPR

SEQ ID NO: 59273 - protein, 15 aa, Artificial Sequence
  Description of Artificial Sequence: Synthetic peptide
  Seed: DPRMCSLMQGSTLPR
DPRMISLIQISTAPR

SEQ ID NO: 59274 - protein, 15 aa, Artificial Sequence
  Description of Artificial Sequence: Synthetic peptide
  Seed: DPRMCSLMQGSTLPR
DPRMISLIQNSTAPR

SEQ ID NO: 59275 - protein, 15 aa, Artificial Sequence
  Description of Artificial Sequence: Synthetic peptide
  Seed: DPRMCSLMQGSTLPR
DPRMISLIQNSTGPR

SEQ ID NO: 59276 - protein, 15 aa, Artificial Sequence
  Description of Artificial Sequence: Synthetic peptide
  Seed: DPRMCSLMQGSTLPR
DPRMISLIQNSTHPR

SEQ ID NO: 59277 - protein, 15 aa, Artificial Sequence
  Description of Artificial Sequence: Synthetic peptide
  Seed: DPRMCSLMQGSTLPR
DPRMISLIQNSTIPR

SEQ ID NO: 59278 - protein, 15 aa, Artificial Sequence
  Description of Artificial Sequence: Synthetic peptide
  Seed: DPRMCSLMQGSTLPR
DPRMISLIQNSTLPR

SEQ ID NO: 59279 - protein, 15 aa, Artificial Sequence
  Description of Artificial Sequence: Synthetic peptide
  Seed: DPRMCSLMQGSTLPR
DPRMISLIQNSTQPR

SEQ ID NO: 59280 - protein, 15 aa, Artificial Sequence
  Description of Artificial Sequence: Synthetic peptide
  Seed: DPRMCSLMQGSTLPR
DPRMISLIQNSTSPR

SEQ ID NO: 59281 - protein, 15 aa, Artificial Sequence
  Description of Artificial Sequence: Synthetic peptide
  Seed: DPRMCSLMQGSTLPR
DPRMISLIQNSTTPR

SEQ ID NO: 59282 - protein, 15 aa, Artificial Sequence
  Description of Artificial Sequence: Synthetic peptide
  Seed: DPRMCSLMQGSTLPR
DPRMISLIQNSTVPR

SEQ ID NO: 59283 - protein, 15 aa, Artificial Sequence
  Description of Artificial Sequence: Synthetic peptide
  Seed: DPRMCSLMQGSTLPR
DPRMISLIQPSTAPR

SEQ ID NO: 59284 - protein, 15 aa, Artificial Sequence
  Description of Artificial Sequence: Synthetic peptide
  Seed: DPRMCSLMQGSTLPR
DPRMISLIQPSTIPR

SEQ ID NO: 59285 - protein, 15 aa, Artificial Sequence
  Description of Artificial Sequence: Synthetic peptide
  Seed: DPRMCSLMQGSTLPR
DPRMISLIQPSTLPR

SEQ ID NO: 59286 - protein, 15 aa, Artificial Sequence
  Description of Artificial Sequence: Synthetic peptide
  Seed: DPRMCSLMQGSTLPR
DPRMISLIQPSTMPR

SEQ ID NO: 59287 - protein, 15 aa, Artificial Sequence
  Description of Artificial Sequence: Synthetic peptide
  Seed: DPRMCSLMQGSTLPR
DPRMISLIQPSTNPR

SEQ ID NO: 59288 - protein, 15 aa, Artificial Sequence
  Description of Artificial Sequence: Synthetic peptide
  Seed: DPRMCSLMQGSTLPR
DPRMISLIQPSTSPR

SEQ ID NO: 59289 - protein, 15 aa, Artificial Sequence
  Description of Artificial Sequence: Synthetic peptide
  Seed: DPRMCSLMQGSTLPR
DPRMISLIQPSTTPR

SEQ ID NO: 59290 - protein, 15 aa, Artificial Sequence
  Description of Artificial Sequence: Synthetic peptide
  Seed: DPRMCSLMQGSTLPR
DPRMISLIQPSTVPR

SEQ ID NO: 59291 - protein, 15 aa, Artificial Sequence
  Description of Artificial Sequence: Synthetic peptide
  Seed: DPRMCSLMQGSTLPR
DPRMISLIQSSTAPR

SEQ ID NO: 59292 - protein, 15 aa, Artificial Sequence
  Description of Artificial Sequence: Synthetic peptide
  Seed: DPRMCSLMQGSTLPR
DPRMISLIQSSTLPR

SEQ ID NO: 59293 - protein, 15 aa, Artificial Sequence
  Description of Artificial Sequence: Synthetic peptide
  Seed: DPRMCSLMQGSTLPR
DPRMISLIQSSTMPR

SEQ ID NO: 59294 - protein, 15 aa, Artificial Sequence
  Description of Artificial Sequence: Synthetic peptide
  Seed: DPRMCSLMQGSTLPR
DPRMISLIQSSTNPR

SEQ ID NO: 59295 - protein, 15 aa, Artificial Sequence
  Description of Artificial Sequence: Synthetic peptide
  Seed: DPRMCSLMQGSTLPR
DPRMISLIQSSTSPR

SEQ ID NO: 59296 - protein, 15 aa, Artificial Sequence
  Description of Artificial Sequence: Synthetic peptide
  Seed: DPRMCSLMQGSTLPR
DPRMISLIQSSTTPR

SEQ ID NO: 59297 - protein, 15 aa, Artificial Sequence
  Description of Artificial Sequence: Synthetic peptide
  Seed: DPRMCSLMQGSTLPR
DPRMISLIQSSTVPR

SEQ ID NO: 59298 - protein, 15 aa, Artificial Sequence
  Description of Artificial Sequence: Synthetic peptide
  Seed: DPRMCSLMQGSTLPR
DPRMISLIQTSTAPR

SEQ ID NO: 59299 - protein, 15 aa, Artificial Sequence
  Description of Artificial Sequence: Synthetic peptide
  Seed: DPRMCSLMQGSTLPR
DPRMISLIQTSTGPR

SEQ ID NO: 59300 - protein, 15 aa, Artificial Sequence
  Description of Artificial Sequence: Synthetic peptide
  Seed: DPRMCSLMQGSTLPR
DPRMISLIQTSTIPR

SEQ ID NO: 59301 - protein, 15 aa, Artificial Sequence
  Description of Artificial Sequence: Synthetic peptide
  Seed: DPRMCSLMQGSTLPR
DPRMISLIQTSTLPR

SEQ ID NO: 59302 - protein, 15 aa, Artificial Sequence
  Description of Artificial Sequence: Synthetic peptide
  Seed: DPRMCSLMQGSTLPR
DPRMISLIQTSTNPR

SEQ ID NO: 59303 - protein, 15 aa, Artificial Sequence
  Description of Artificial Sequence: Synthetic peptide
  Seed: DPRMCSLMQGSTLPR
DPRMISLIQTSTSPR

SEQ ID NO: 59304 - protein, 15 aa, Artificial Sequence
  Description of Artificial Sequence: Synthetic peptide
  Seed: DPRMCSLMQGSTLPR
DPRMISLIQTSTTPR

SEQ ID NO: 59305 - protein, 15 aa, Artificial Sequence
  Description of Artificial Sequence: Synthetic peptide
  Seed: DPRMCSLMQGSTLPR
DPRMISLIQTSTVPR

SEQ ID NO: 59306 - protein, 15 aa, Artificial Sequence
  Description of Artificial Sequence: Synthetic peptide
  Seed: DPRMCSLMQGSTLPR
DPRMISLIQVSTAPR

SEQ ID NO: 59307 - protein, 15 aa, Artificial Sequence
  Description of Artificial Sequence: Synthetic peptide
  Seed: DPRMCSLMQGSTLPR
DPRMISLIQVSTLPR

SEQ ID NO: 59308 - protein, 15 aa, Artificial Sequence
  Description of Artificial Sequence: Synthetic peptide
  Seed: DPRMCSLMQGSTLPR
DPRMISLIQVSTNPR

SEQ ID NO: 59309 - protein, 15 aa, Artificial Sequence
  Description of Artificial Sequence: Synthetic peptide
  Seed: DPRMCSLMQGSTLPR
DPRMISLIQVSTSPR

SEQ ID NO: 59310 - protein, 15 aa, Artificial Sequence
  Description of Artificial Sequence: Synthetic peptide
  Seed: DPRMCSLMQGSTLPR
DPRMISLIQVSTVPR

SEQ ID NO: 59311 - protein, 15 aa, Artificial Sequence
  Description of Artificial Sequence: Synthetic peptide
  Seed: DPRMCSLMQGSTLPR
DPRMISLLQASTAPR

SEQ ID NO: 59312 - protein, 15 aa, Artificial Sequence
  Description of Artificial Sequence: Synthetic peptide
  Seed: DPRMCSLMQGSTLPR
DPRMISLLQASTCPR

SEQ ID NO: 59313 - protein, 15 aa, Artificial Sequence
  Description of Artificial Sequence: Synthetic peptide
  Seed: DPRMCSLMQGSTLPR
DPRMISLLQASTFPR

SEQ ID NO: 59314 - protein, 15 aa, Artificial Sequence
  Description of Artificial Sequence: Synthetic peptide
  Seed: DPRMCSLMQGSTLPR
DPRMISLLQASTGPR

SEQ ID NO: 59315 - protein, 15 aa, Artificial Sequence
  Description of Artificial Sequence: Synthetic peptide
  Seed: DPRMCSLMQGSTLPR
DPRMISLLQASTHPR

SEQ ID NO: 59316 - protein, 15 aa, Artificial Sequence
  Description of Artificial Sequence: Synthetic peptide
  Seed: DPRMCSLMQGSTLPR
DPRMISLLQASTIPR

SEQ ID NO: 59317 - protein, 15 aa, Artificial Sequence
  Description of Artificial Sequence: Synthetic peptide
  Seed: DPRMCSLMQGSTLPR
DPRMISLLQASTLPR

SEQ ID NO: 59318 - protein, 15 aa, Artificial Sequence
  Description of Artificial Sequence: Synthetic peptide
  Seed: DPRMCSLMQGSTLPR
DPRMISLLQASTMPR

SEQ ID NO: 59319 - protein, 15 aa, Artificial Sequence
  Description of Artificial Sequence: Synthetic peptide
  Seed: DPRMCSLMQGSTLPR
DPRMISLLQASTNPR

SEQ ID NO: 59320 - protein, 15 aa, Artificial Sequence
  Description of Artificial Sequence: Synthetic peptide
  Seed: DPRMCSLMQGSTLPR
DPRMISLLQASTPPR

SEQ ID NO: 59321 - protein, 15 aa, Artificial Sequence
  Description of Artificial Sequence: Synthetic peptide
  Seed: DPRMCSLMQGSTLPR
DPRMISLLQASTQPR

SEQ ID NO: 59322 - protein, 15 aa, Artificial Sequence
  Description of Artificial Sequence: Synthetic peptide
  Seed: DPRMCSLMQGSTLPR
DPRMISLLQASTSPR

SEQ ID NO: 59323 - protein, 15 aa, Artificial Sequence
  Description of Artificial Sequence: Synthetic peptide
  Seed: DPRMCSLMQGSTLPR
DPRMISLLQASTTPR

SEQ ID NO: 59324 - protein, 15 aa, Artificial Sequence
  Description of Artificial Sequence: Synthetic peptide
  Seed: DPRMCSLMQGSTLPR
DPRMISLLQASTVPR

SEQ ID NO: 59325 - protein, 15 aa, Artificial Sequence
  Description of Artificial Sequence: Synthetic peptide
  Seed: DPRMCSLMQGSTLPR
DPRMISLLQASTYPR

SEQ ID NO: 59326 - protein, 15 aa, Artificial Sequence
  Description of Artificial Sequence: Synthetic peptide
  Seed: DPRMCSLMQGSTLPR
DPRMISLLQGSTAPR

SEQ ID NO: 59327 - protein, 15 aa, Artificial Sequence
  Description of Artificial Sequence: Synthetic peptide
  Seed: DPRMCSLMQGSTLPR
DPRMISLLQGSTCPR

SEQ ID NO: 59328 - protein, 15 aa, Artificial Sequence
  Description of Artificial Sequence: Synthetic peptide
  Seed: DPRMCSLMQGSTLPR
DPRMISLLQGSTFPR

SEQ ID NO: 59329 - protein, 15 aa, Artificial Sequence
  Description of Artificial Sequence: Synthetic peptide
  Seed: DPRMCSLMQGSTLPR
DPRMISLLQGSTGPR

SEQ ID NO: 59330 - protein, 15 aa, Artificial Sequence
  Description of Artificial Sequence: Synthetic peptide
  Seed: DPRMCSLMQGSTLPR
DPRMISLLQGSTHPR

SEQ ID NO: 59331 - protein, 15 aa, Artificial Sequence
  Description of Artificial Sequence: Synthetic peptide
  Seed: DPRMCSLMQGSTLPR
DPRMISLLQGSTIPR

SEQ ID NO: 59332 - protein, 15 aa, Artificial Sequence
  Description of Artificial Sequence: Synthetic peptide
  Seed: DPRMCSLMQGSTLPR
DPRMISLLQGSTLPR

SEQ ID NO: 59333 - protein, 15 aa, Artificial Sequence
  Description of Artificial Sequence: Synthetic peptide
  Seed: DPRMCSLMQGSTLPR
DPRMISLLQGSTMPR

SEQ ID NO: 59334 - protein, 15 aa, Artificial Sequence
  Description of Artificial Sequence: Synthetic peptide
  Seed: DPRMCSLMQGSTLPR
DPRMISLLQGSTNPR

SEQ ID NO: 59335 - protein, 15 aa, Artificial Sequence
  Description of Artificial Sequence: Synthetic peptide
  Seed: DPRMCSLMQGSTLPR
DPRMISLLQGSTSPR

SEQ ID NO: 59336 - protein, 15 aa, Artificial Sequence
  Description of Artificial Sequence: Synthetic peptide
  Seed: DPRMCSLMQGSTLPR
DPRMISLLQGSTTPR

SEQ ID NO: 59337 - protein, 15 aa, Artificial Sequence
  Description of Artificial Sequence: Synthetic peptide
  Seed: DPRMCSLMQGSTLPR
DPRMISLLQGSTVPR

SEQ ID NO: 59338 - protein, 15 aa, Artificial Sequence
  Description of Artificial Sequence: Synthetic peptide
  Seed: DPRMCSLMQGSTLPR
DPRMISLLQISTAPR

SEQ ID NO: 59339 - protein, 15 aa, Artificial Sequence
  Description of Artificial Sequence: Synthetic peptide
  Seed: DPRMCSLMQGSTLPR
DPRMISLLQISTIPR

SEQ ID NO: 59340 - protein, 15 aa, Artificial Sequence
  Description of Artificial Sequence: Synthetic peptide
  Seed: DPRMCSLMQGSTLPR
DPRMISLLQISTLPR

SEQ ID NO: 59341 - protein, 15 aa, Artificial Sequence
  Description of Artificial Sequence: Synthetic peptide
  Seed: DPRMCSLMQGSTLPR
DPRMISLLQISTMPR

SEQ ID NO: 59342 - protein, 15 aa, Artificial Sequence
  Description of Artificial Sequence: Synthetic peptide
  Seed: DPRMCSLMQGSTLPR
DPRMISLLQISTNPR

SEQ ID NO: 59343 - protein, 15 aa, Artificial Sequence
  Description of Artificial Sequence: Synthetic peptide
  Seed: DPRMCSLMQGSTLPR
DPRMISLLQISTSPR

SEQ ID NO: 59344 - protein, 15 aa, Artificial Sequence
  Description of Artificial Sequence: Synthetic peptide
  Seed: DPRMCSLMQGSTLPR
DPRMISLLQISTTPR

SEQ ID NO: 59345 - protein, 15 aa, Artificial Sequence
  Description of Artificial Sequence: Synthetic peptide
  Seed: DPRMCSLMQGSTLPR
DPRMISLLQISTVPR

SEQ ID NO: 59346 - protein, 15 aa, Artificial Sequence
  Description of Artificial Sequence: Synthetic peptide
  Seed: DPRMCSLMQGSTLPR
DPRMISLLQLSTAPR

SEQ ID NO: 59347 - protein, 15 aa, Artificial Sequence
  Description of Artificial Sequence: Synthetic peptide
  Seed: DPRMCSLMQGSTLPR
DPRMISLLQLSTSPR

SEQ ID NO: 59348 - protein, 15 aa, Artificial Sequence
  Description of Artificial Sequence: Synthetic peptide
  Seed: DPRMCSLMQGSTLPR
DPRMISLLQNSTAPR

SEQ ID NO: 59349 - protein, 15 aa, Artificial Sequence
  Description of Artificial Sequence: Synthetic peptide
  Seed: DPRMCSLMQGSTLPR
DPRMISLLQNSTGPR

SEQ ID NO: 59350 - protein, 15 aa, Artificial Sequence
  Description of Artificial Sequence: Synthetic peptide
  Seed: DPRMCSLMQGSTLPR
DPRMISLLQNSTHPR

SEQ ID NO: 59351 - protein, 15 aa, Artificial Sequence
  Description of Artificial Sequence: Synthetic peptide
  Seed: DPRMCSLMQGSTLPR
DPRMISLLQNSTIPR

SEQ ID NO: 59352 - protein, 15 aa, Artificial Sequence
  Description of Artificial Sequence: Synthetic peptide
  Seed: DPRMCSLMQGSTLPR
DPRMISLLQNSTLPR

SEQ ID NO: 59353 - protein, 15 aa, Artificial Sequence
  Description of Artificial Sequence: Synthetic peptide
  Seed: DPRMCSLMQGSTLPR
DPRMISLLQNSTMPR

SEQ ID NO: 59354 - protein, 15 aa, Artificial Sequence
  Description of Artificial Sequence: Synthetic peptide
  Seed: DPRMCSLMQGSTLPR
DPRMISLLQNSTQPR

SEQ ID NO: 59355 - protein, 15 aa, Artificial Sequence
  Description of Artificial Sequence: Synthetic peptide
  Seed: DPRMCSLMQGSTLPR
DPRMISLLQNSTSPR

SEQ ID NO: 59356 - protein, 15 aa, Artificial Sequence
  Description of Artificial Sequence: Synthetic peptide
  Seed: DPRMCSLMQGSTLPR
DPRMISLLQNSTTPR

SEQ ID NO: 59357 - protein, 15 aa, Artificial Sequence
  Description of Artificial Sequence: Synthetic peptide
  Seed: DPRMCSLMQGSTLPR
DPRMISLLQNSTVPR

SEQ ID NO: 59358 - protein, 15 aa, Artificial Sequence
  Description of Artificial Sequence: Synthetic peptide
  Seed: DPRMCSLMQGSTLPR
DPRMISLLQPSTAPR

SEQ ID NO: 59359 - protein, 15 aa, Artificial Sequence
  Description of Artificial Sequence: Synthetic peptide
  Seed: DPRMCSLMQGSTLPR
DPRMISLLQPSTCPR

SEQ ID NO: 59360 - protein, 15 aa, Artificial Sequence
  Description of Artificial Sequence: Synthetic peptide
  Seed: DPRMCSLMQGSTLPR
DPRMISLLQPSTFPR

SEQ ID NO: 59361 - protein, 15 aa, Artificial Sequence
  Description of Artificial Sequence: Synthetic peptide
  Seed: DPRMCSLMQGSTLPR
DPRMISLLQPSTGPR

SEQ ID NO: 59362 - protein, 15 aa, Artificial Sequence
  Description of Artificial Sequence: Synthetic peptide
  Seed: DPRMCSLMQGSTLPR
DPRMISLLQPSTIPR

SEQ ID NO: 59363 - protein, 15 aa, Artificial Sequence
  Description of Artificial Sequence: Synthetic peptide
  Seed: DPRMCSLMQGSTLPR
DPRMISLLQPSTLPR

SEQ ID NO: 59364 - protein, 15 aa, Artificial Sequence
  Description of Artificial Sequence: Synthetic peptide
  Seed: DPRMCSLMQGSTLPR
DPRMISLLQPSTMPR

SEQ ID NO: 59365 - protein, 15 aa, Artificial Sequence
  Description of Artificial Sequence: Synthetic peptide
  Seed: DPRMCSLMQGSTLPR
DPRMISLLQPSTNPR

SEQ ID NO: 59366 - protein, 15 aa, Artificial Sequence
  Description of Artificial Sequence: Synthetic peptide
  Seed: DPRMCSLMQGSTLPR
DPRMISLLQPSTSPR

SEQ ID NO: 59367 - protein, 15 aa, Artificial Sequence
  Description of Artificial Sequence: Synthetic peptide
  Seed: DPRMCSLMQGSTLPR
DPRMISLLQPSTTPR

SEQ ID NO: 59368 - protein, 15 aa, Artificial Sequence
  Description of Artificial Sequence: Synthetic peptide
  Seed: DPRMCSLMQGSTLPR
DPRMISLLQPSTVPR

SEQ ID NO: 59369 - protein, 15 aa, Artificial Sequence
  Description of Artificial Sequence: Synthetic peptide
  Seed: DPRMCSLMQGSTLPR
DPRMISLLQSSTAPR

SEQ ID NO: 59370 - protein, 15 aa, Artificial Sequence
  Description of Artificial Sequence: Synthetic peptide
  Seed: DPRMCSLMQGSTLPR
DPRMISLLQSSTCPR

SEQ ID NO: 59371 - protein, 15 aa, Artificial Sequence
  Description of Artificial Sequence: Synthetic peptide
  Seed: DPRMCSLMQGSTLPR
DPRMISLLQSSTFPR

SEQ ID NO: 59372 - protein, 15 aa, Artificial Sequence
  Description of Artificial Sequence: Synthetic peptide
  Seed: DPRMCSLMQGSTLPR
DPRMISLLQSSTGPR

SEQ ID NO: 59373 - protein, 15 aa, Artificial Sequence
  Description of Artificial Sequence: Synthetic peptide
  Seed: DPRMCSLMQGSTLPR
DPRMISLLQSSTIPR

SEQ ID NO: 59374 - protein, 15 aa, Artificial Sequence
  Description of Artificial Sequence: Synthetic peptide
  Seed: DPRMCSLMQGSTLPR
DPRMISLLQSSTLPR

SEQ ID NO: 59375 - protein, 15 aa, Artificial Sequence
  Description of Artificial Sequence: Synthetic peptide
  Seed: DPRMCSLMQGSTLPR
DPRMISLLQSSTMPR

SEQ ID NO: 59376 - protein, 15 aa, Artificial Sequence
  Description of Artificial Sequence: Synthetic peptide
  Seed: DPRMCSLMQGSTLPR
DPRMISLLQSSTNPR

SEQ ID NO: 59377 - protein, 15 aa, Artificial Sequence
  Description of Artificial Sequence: Synthetic peptide
  Seed: DPRMCSLMQGSTLPR
DPRMISLLQSSTSPR

SEQ ID NO: 59378 - protein, 15 aa, Artificial Sequence
  Description of Artificial Sequence: Synthetic peptide
  Seed: DPRMCSLMQGSTLPR
DPRMISLLQSSTTPR

SEQ ID NO: 59379 - protein, 15 aa, Artificial Sequence
  Description of Artificial Sequence: Synthetic peptide
  Seed: DPRMCSLMQGSTLPR
DPRMISLLQSSTVPR

SEQ ID NO: 59380 - protein, 15 aa, Artificial Sequence
  Description of Artificial Sequence: Synthetic peptide
  Seed: DPRMCSLMQGSTLPR
DPRMISLLQTSTAPR

SEQ ID NO: 59381 - protein, 15 aa, Artificial Sequence
  Description of Artificial Sequence: Synthetic peptide
  Seed: DPRMCSLMQGSTLPR
DPRMISLLQTSTGPR

SEQ ID NO: 59382 - protein, 15 aa, Artificial Sequence
  Description of Artificial Sequence: Synthetic peptide
  Seed: DPRMCSLMQGSTLPR
DPRMISLLQTSTIPR

SEQ ID NO: 59383 - protein, 15 aa, Artificial Sequence
  Description of Artificial Sequence: Synthetic peptide
  Seed: DPRMCSLMQGSTLPR
DPRMISLLQTSTLPR

SEQ ID NO: 59384 - protein, 15 aa, Artificial Sequence
  Description of Artificial Sequence: Synthetic peptide
  Seed: DPRMCSLMQGSTLPR
DPRMISLLQTSTMPR

SEQ ID NO: 59385 - protein, 15 aa, Artificial Sequence
  Description of Artificial Sequence: Synthetic peptide
  Seed: DPRMCSLMQGSTLPR
DPRMISLLQTSTNPR

SEQ ID NO: 59386 - protein, 15 aa, Artificial Sequence
  Description of Artificial Sequence: Synthetic peptide
  Seed: DPRMCSLMQGSTLPR
DPRMISLLQTSTSPR

SEQ ID NO: 59387 - protein, 15 aa, Artificial Sequence
  Description of Artificial Sequence: Synthetic peptide
  Seed: DPRMCSLMQGSTLPR
DPRMISLLQTSTTPR

SEQ ID NO: 59388 - protein, 15 aa, Artificial Sequence
  Description of Artificial Sequence: Synthetic peptide
  Seed: DPRMCSLMQGSTLPR
DPRMISLLQTSTVPR

SEQ ID NO: 59389 - protein, 15 aa, Artificial Sequence
  Description of Artificial Sequence: Synthetic peptide
  Seed: DPRMCSLMQGSTLPR
DPRMISLLQVSTAPR

SEQ ID NO: 59390 - protein, 15 aa, Artificial Sequence
  Description of Artificial Sequence: Synthetic peptide
  Seed: DPRMCSLMQGSTLPR
DPRMISLLQVSTIPR

SEQ ID NO: 59391 - protein, 15 aa, Artificial Sequence
  Description of Artificial Sequence: Synthetic peptide
  Seed: DPRMCSLMQGSTLPR
DPRMISLLQVSTLPR

SEQ ID NO: 59392 - protein, 15 aa, Artificial Sequence
  Description of Artificial Sequence: Synthetic peptide
  Seed: DPRMCSLMQGSTLPR
DPRMISLLQVSTMPR

SEQ ID NO: 59393 - protein, 15 aa, Artificial Sequence
  Description of Artificial Sequence: Synthetic peptide
  Seed: DPRMCSLMQGSTLPR
DPRMISLLQVSTNPR

SEQ ID NO: 59394 - protein, 15 aa, Artificial Sequence
  Description of Artificial Sequence: Synthetic peptide
  Seed: DPRMCSLMQGSTLPR
DPRMISLLQVSTSPR

SEQ ID NO: 59395 - protein, 15 aa, Artificial Sequence
  Description of Artificial Sequence: Synthetic peptide
  Seed: DPRMCSLMQGSTLPR
DPRMISLLQVSTTPR

SEQ ID NO: 59396 - protein, 15 aa, Artificial Sequence
  Description of Artificial Sequence: Synthetic peptide
  Seed: DPRMCSLMQGSTLPR
DPRMISLLQVSTVPR

SEQ ID NO: 59397 - protein, 15 aa, Artificial Sequence
  Description of Artificial Sequence: Synthetic peptide
  Seed: DPRMCSLMQGSTLPR
DPRMISLMQASTAPR

SEQ ID NO: 59398 - protein, 15 aa, Artificial Sequence
  Description of Artificial Sequence: Synthetic peptide
  Seed: DPRMCSLMQGSTLPR
DPRMISLMQASTCPR

SEQ ID NO: 59399 - protein, 15 aa, Artificial Sequence
  Description of Artificial Sequence: Synthetic peptide
  Seed: DPRMCSLMQGSTLPR
DPRMISLMQASTFPR

SEQ ID NO: 59400 - protein, 15 aa, Artificial Sequence
  Description of Artificial Sequence: Synthetic peptide
  Seed: DPRMCSLMQGSTLPR
DPRMISLMQASTGPR

SEQ ID NO: 59401 - protein, 15 aa, Artificial Sequence
  Description of Artificial Sequence: Synthetic peptide
  Seed: DPRMCSLMQGSTLPR
DPRMISLMQASTHPR

SEQ ID NO: 59402 - protein, 15 aa, Artificial Sequence
  Description of Artificial Sequence: Synthetic peptide
  Seed: DPRMCSLMQGSTLPR
DPRMISLMQASTIPR

SEQ ID NO: 59403 - protein, 15 aa, Artificial Sequence
  Description of Artificial Sequence: Synthetic peptide
  Seed: DPRMCSLMQGSTLPR
DPRMISLMQASTKPR

SEQ ID NO: 59404 - protein, 15 aa, Artificial Sequence
  Description of Artificial Sequence: Synthetic peptide
  Seed: DPRMCSLMQGSTLPR
DPRMISLMQASTLPR

SEQ ID NO: 59405 - protein, 15 aa, Artificial Sequence
  Description of Artificial Sequence: Synthetic peptide
  Seed: DPRMCSLMQGSTLPR
DPRMISLMQASTMPR

SEQ ID NO: 59406 - protein, 15 aa, Artificial Sequence
  Description of Artificial Sequence: Synthetic peptide
  Seed: DPRMCSLMQGSTLPR
DPRMISLMQASTNPR

SEQ ID NO: 59407 - protein, 15 aa, Artificial Sequence
  Description of Artificial Sequence: Synthetic peptide
  Seed: DPRMCSLMQGSTLPR
DPRMISLMQASTQPR

SEQ ID NO: 59408 - protein, 15 aa, Artificial Sequence
  Description of Artificial Sequence: Synthetic peptide
  Seed: DPRMCSLMQGSTLPR
DPRMISLMQASTRPR

SEQ ID NO: 59409 - protein, 15 aa, Artificial Sequence
  Description of Artificial Sequence: Synthetic peptide
  Seed: DPRMCSLMQGSTLPR
DPRMISLMQASTSPR

SEQ ID NO: 59410 - protein, 15 aa, Artificial Sequence
  Description of Artificial Sequence: Synthetic peptide
  Seed: DPRMCSLMQGSTLPR
DPRMISLMQASTTPR

SEQ ID NO: 59411 - protein, 15 aa, Artificial Sequence
  Description of Artificial Sequence: Synthetic peptide
  Seed: DPRMCSLMQGSTLPR
DPRMISLMQASTVPR

SEQ ID NO: 59412 - protein, 15 aa, Artificial Sequence
  Description of Artificial Sequence: Synthetic peptide
  Seed: DPRMCSLMQGSTLPR
DPRMISLMQASTYPR

SEQ ID NO: 59413 - protein, 15 aa, Artificial Sequence
  Description of Artificial Sequence: Synthetic peptide
  Seed: DPRMCSLMQGSTLPR
DPRMISLMQGSTAPR

SEQ ID NO: 59414 - protein, 15 aa, Artificial Sequence
  Description of Artificial Sequence: Synthetic peptide
  Seed: DPRMCSLMQGSTLPR
DPRMISLMQGSTCPR

SEQ ID NO: 59415 - protein, 15 aa, Artificial Sequence
  Description of Artificial Sequence: Synthetic peptide
  Seed: DPRMCSLMQGSTLPR
DPRMISLMQGSTFPR

SEQ ID NO: 59416 - protein, 15 aa, Artificial Sequence
  Description of Artificial Sequence: Synthetic peptide
  Seed: DPRMCSLMQGSTLPR
DPRMISLMQGSTGPR

SEQ ID NO: 59417 - protein, 15 aa, Artificial Sequence
  Description of Artificial Sequence: Synthetic peptide
  Seed: DPRMCSLMQGSTLPR
DPRMISLMQGSTHPR

SEQ ID NO: 59418 - protein, 15 aa, Artificial Sequence
  Description of Artificial Sequence: Synthetic peptide
  Seed: DPRMCSLMQGSTLPR
DPRMISLMQGSTIPR

SEQ ID NO: 59419 - protein, 15 aa, Artificial Sequence
  Description of Artificial Sequence: Synthetic peptide
  Seed: DPRMCSLMQGSTLPR
DPRMISLMQGSTLPR

SEQ ID NO: 59420 - protein, 15 aa, Artificial Sequence
  Description of Artificial Sequence: Synthetic peptide
  Seed: DPRMCSLMQGSTLPR
DPRMISLMQGSTMPR

SEQ ID NO: 59421 - protein, 15 aa, Artificial Sequence
  Description of Artificial Sequence: Synthetic peptide
  Seed: DPRMCSLMQGSTLPR
DPRMISLMQGSTNPR

SEQ ID NO: 59422 - protein, 15 aa, Artificial Sequence
  Description of Artificial Sequence: Synthetic peptide
  Seed: DPRMCSLMQGSTLPR
DPRMISLMQGSTSPR

SEQ ID NO: 59423 - protein, 15 aa, Artificial Sequence
  Description of Artificial Sequence: Synthetic peptide
  Seed: DPRMCSLMQGSTLPR
DPRMISLMQGSTTPR

SEQ ID NO: 59424 - protein, 15 aa, Artificial Sequence
  Description of Artificial Sequence: Synthetic peptide
  Seed: DPRMCSLMQGSTLPR
DPRMISLMQGSTVPR

SEQ ID NO: 59425 - protein, 15 aa, Artificial Sequence
  Description of Artificial Sequence: Synthetic peptide
  Seed: DPRMCSLMQGSTLPR
DPRMISLMQHSTLPR

SEQ ID NO: 59426 - protein, 15 aa, Artificial Sequence
  Description of Artificial Sequence: Synthetic peptide
  Seed: DPRMCSLMQGSTLPR
DPRMISLMQISTAPR

SEQ ID NO: 59427 - protein, 15 aa, Artificial Sequence
  Description of Artificial Sequence: Synthetic peptide
  Seed: DPRMCSLMQGSTLPR
DPRMISLMQISTIPR

SEQ ID NO: 59428 - protein, 15 aa, Artificial Sequence
  Description of Artificial Sequence: Synthetic peptide
  Seed: DPRMCSLMQGSTLPR
DPRMISLMQISTLPR

SEQ ID NO: 59429 - protein, 15 aa, Artificial Sequence
  Description of Artificial Sequence: Synthetic peptide
  Seed: DPRMCSLMQGSTLPR
DPRMISLMQISTMPR

SEQ ID NO: 59430 - protein, 15 aa, Artificial Sequence
  Description of Artificial Sequence: Synthetic peptide
  Seed: DPRMCSLMQGSTLPR
DPRMISLMQISTNPR

SEQ ID NO: 59431 - protein, 15 aa, Artificial Sequence
  Description of Artificial Sequence: Synthetic peptide
  Seed: DPRMCSLMQGSTLPR
DPRMISLMQISTSPR

SEQ ID NO: 59432 - protein, 15 aa, Artificial Sequence
  Description of Artificial Sequence: Synthetic peptide
  Seed: DPRMCSLMQGSTLPR
DPRMISLMQISTTPR

SEQ ID NO: 59433 - protein, 15 aa, Artificial Sequence
  Description of Artificial Sequence: Synthetic peptide
  Seed: DPRMCSLMQGSTLPR
DPRMISLMQISTVPR

SEQ ID NO: 59434 - protein, 15 aa, Artificial Sequence
  Description of Artificial Sequence: Synthetic peptide
  Seed: DPRMCSLMQGSTLPR
DPRMISLMQLSTAPR

SEQ ID NO: 59435 - protein, 15 aa, Artificial Sequence
  Description of Artificial Sequence: Synthetic peptide
  Seed: DPRMCSLMQGSTLPR
DPRMISLMQLSTNPR

SEQ ID NO: 59436 - protein, 15 aa, Artificial Sequence
  Description of Artificial Sequence: Synthetic peptide
  Seed: DPRMCSLMQGSTLPR
DPRMISLMQLSTSPR

SEQ ID NO: 59437 - protein, 15 aa, Artificial Sequence
  Description of Artificial Sequence: Synthetic peptide
  Seed: DPRMCSLMQGSTLPR
DPRMISLMQMSTAPR

SEQ ID NO: 59438 - protein, 15 aa, Artificial Sequence
  Description of Artificial Sequence: Synthetic peptide
  Seed: DPRMCSLMQGSTLPR
DPRMISLMQNSTAPR

SEQ ID NO: 59439 - protein, 15 aa, Artificial Sequence
  Description of Artificial Sequence: Synthetic peptide
  Seed: DPRMCSLMQGSTLPR
DPRMISLMQNSTGPR

SEQ ID NO: 59440 - protein, 15 aa, Artificial Sequence
  Description of Artificial Sequence: Synthetic peptide
  Seed: DPRMCSLMQGSTLPR
DPRMISLMQNSTHPR

SEQ ID NO: 59441 - protein, 15 aa, Artificial Sequence
  Description of Artificial Sequence: Synthetic peptide
  Seed: DPRMCSLMQGSTLPR
DPRMISLMQNSTIPR

SEQ ID NO: 59442 - protein, 15 aa, Artificial Sequence
  Description of Artificial Sequence: Synthetic peptide
  Seed: DPRMCSLMQGSTLPR
DPRMISLMQNSTLPR

SEQ ID NO: 59443 - protein, 15 aa, Artificial Sequence
  Description of Artificial Sequence: Synthetic peptide
  Seed: DPRMCSLMQGSTLPR
DPRMISLMQNSTMPR

SEQ ID NO: 59444 - protein, 15 aa, Artificial Sequence
  Description of Artificial Sequence: Synthetic peptide
  Seed: DPRMCSLMQGSTLPR
DPRMISLMQNSTQPR

SEQ ID NO: 59445 - protein, 15 aa, Artificial Sequence
  Description of Artificial Sequence: Synthetic peptide
  Seed: DPRMCSLMQGSTLPR
DPRMISLMQNSTSPR

SEQ ID NO: 59446 - protein, 15 aa, Artificial Sequence
  Description of Artificial Sequence: Synthetic peptide
  Seed: DPRMCSLMQGSTLPR
DPRMISLMQNSTTPR

SEQ ID NO: 59447 - protein, 15 aa, Artificial Sequence
  Description of Artificial Sequence: Synthetic peptide
  Seed: DPRMCSLMQGSTLPR
DPRMISLMQNSTVPR

SEQ ID NO: 59448 - protein, 15 aa, Artificial Sequence
  Description of Artificial Sequence: Synthetic peptide
  Seed: DPRMCSLMQGSTLPR
DPRMISLMQPSTAPR

SEQ ID NO: 59449 - protein, 15 aa, Artificial Sequence
  Description of Artificial Sequence: Synthetic peptide
  Seed: DPRMCSLMQGSTLPR
DPRMISLMQPSTFPR

SEQ ID NO: 59450 - protein, 15 aa, Artificial Sequence
  Description of Artificial Sequence: Synthetic peptide
  Seed: DPRMCSLMQGSTLPR
DPRMISLMQPSTIPR

SEQ ID NO: 59451 - protein, 15 aa, Artificial Sequence
  Description of Artificial Sequence: Synthetic peptide
  Seed: DPRMCSLMQGSTLPR
DPRMISLMQPSTLPR

SEQ ID NO: 59452 - protein, 15 aa, Artificial Sequence
  Description of Artificial Sequence: Synthetic peptide
  Seed: DPRMCSLMQGSTLPR
DPRMISLMQPSTMPR

SEQ ID NO: 59453 - protein, 15 aa, Artificial Sequence
  Description of Artificial Sequence: Synthetic peptide
  Seed: DPRMCSLMQGSTLPR
DPRMISLMQPSTNPR

SEQ ID NO: 59454 - protein, 15 aa, Artificial Sequence
  Description of Artificial Sequence: Synthetic peptide
  Seed: DPRMCSLMQGSTLPR
DPRMISLMQPSTSPR

SEQ ID NO: 59455 - protein, 15 aa, Artificial Sequence
  Description of Artificial Sequence: Synthetic peptide
  Seed: DPRMCSLMQGSTLPR
DPRMISLMQPSTTPR

SEQ ID NO: 59456 - protein, 15 aa, Artificial Sequence
  Description of Artificial Sequence: Synthetic peptide
  Seed: DPRMCSLMQGSTLPR
DPRMISLMQPSTVPR

SEQ ID NO: 59457 - protein, 15 aa, Artificial Sequence
  Description of Artificial Sequence: Synthetic peptide
  Seed: DPRMCSLMQGSTLPR
DPRMISLMQSSTAPR

SEQ ID NO: 59458 - protein, 15 aa, Artificial Sequence
  Description of Artificial Sequence: Synthetic peptide
  Seed: DPRMCSLMQGSTLPR
DPRMISLMQSSTCPR

SEQ ID NO: 59459 - protein, 15 aa, Artificial Sequence
  Description of Artificial Sequence: Synthetic peptide
  Seed: DPRMCSLMQGSTLPR
DPRMISLMQSSTFPR

SEQ ID NO: 59460 - protein, 15 aa, Artificial Sequence
  Description of Artificial Sequence: Synthetic peptide
  Seed: DPRMCSLMQGSTLPR
DPRMISLMQSSTGPR

SEQ ID NO: 59461 - protein, 15 aa, Artificial Sequence
  Description of Artificial Sequence: Synthetic peptide
  Seed: DPRMCSLMQGSTLPR
DPRMISLMQSSTHPR

SEQ ID NO: 59462 - protein, 15 aa, Artificial Sequence
  Description of Artificial Sequence: Synthetic peptide
  Seed: DPRMCSLMQGSTLPR
DPRMISLMQSSTIPR

SEQ ID NO: 59463 - protein, 15 aa, Artificial Sequence
  Description of Artificial Sequence: Synthetic peptide
  Seed: DPRMCSLMQGSTLPR
DPRMISLMQSSTLPR

SEQ ID NO: 59464 - protein, 15 aa, Artificial Sequence
  Description of Artificial Sequence: Synthetic peptide
  Seed: DPRMCSLMQGSTLPR
DPRMISLMQSSTMPR

SEQ ID NO: 59465 - protein, 15 aa, Artificial Sequence
  Description of Artificial Sequence: Synthetic peptide
  Seed: DPRMCSLMQGSTLPR
DPRMISLMQSSTNPR

SEQ ID NO: 59466 - protein, 15 aa, Artificial Sequence
  Description of Artificial Sequence: Synthetic peptide
  Seed: DPRMCSLMQGSTLPR
DPRMISLMQSSTSPR

SEQ ID NO: 59467 - protein, 15 aa, Artificial Sequence
  Description of Artificial Sequence: Synthetic peptide
  Seed: DPRMCSLMQGSTLPR
DPRMISLMQSSTTPR

SEQ ID NO: 59468 - protein, 15 aa, Artificial Sequence
  Description of Artificial Sequence: Synthetic peptide
  Seed: DPRMCSLMQGSTLPR
DPRMISLMQSSTVPR

SEQ ID NO: 59469 - protein, 15 aa, Artificial Sequence
  Description of Artificial Sequence: Synthetic peptide
  Seed: DPRMCSLMQGSTLPR
DPRMISLMQTSTAPR

SEQ ID NO: 59470 - protein, 15 aa, Artificial Sequence
  Description of Artificial Sequence: Synthetic peptide
  Seed: DPRMCSLMQGSTLPR
DPRMISLMQTSTGPR

SEQ ID NO: 59471 - protein, 15 aa, Artificial Sequence
  Description of Artificial Sequence: Synthetic peptide
  Seed: DPRMCSLMQGSTLPR
DPRMISLMQTSTHPR

SEQ ID NO: 59472 - protein, 15 aa, Artificial Sequence
  Description of Artificial Sequence: Synthetic peptide
  Seed: DPRMCSLMQGSTLPR
DPRMISLMQTSTIPR

SEQ ID NO: 59473 - protein, 15 aa, Artificial Sequence
  Description of Artificial Sequence: Synthetic peptide
  Seed: DPRMCSLMQGSTLPR
DPRMISLMQTSTLPR

SEQ ID NO: 59474 - protein, 15 aa, Artificial Sequence
  Description of Artificial Sequence: Synthetic peptide
  Seed: DPRMCSLMQGSTLPR
DPRMISLMQTSTMPR

SEQ ID NO: 59475 - protein, 15 aa, Artificial Sequence
  Description of Artificial Sequence: Synthetic peptide
  Seed: DPRMCSLMQGSTLPR
DPRMISLMQTSTNPR

SEQ ID NO: 59476 - protein, 15 aa, Artificial Sequence
  Description of Artificial Sequence: Synthetic peptide
  Seed: DPRMCSLMQGSTLPR
DPRMISLMQTSTQPR

SEQ ID NO: 59477 - protein, 15 aa, Artificial Sequence
  Description of Artificial Sequence: Synthetic peptide
  Seed: DPRMCSLMQGSTLPR
DPRMISLMQTSTSPR

SEQ ID NO: 59478 - protein, 15 aa, Artificial Sequence
  Description of Artificial Sequence: Synthetic peptide
  Seed: DPRMCSLMQGSTLPR
DPRMISLMQTSTTPR

SEQ ID NO: 59479 - protein, 15 aa, Artificial Sequence
  Description of Artificial Sequence: Synthetic peptide
  Seed: DPRMCSLMQGSTLPR
DPRMISLMQTSTVPR

SEQ ID NO: 59480 - protein, 15 aa, Artificial Sequence
  Description of Artificial Sequence: Synthetic peptide
  Seed: DPRMCSLMQGSTLPR
DPRMISLMQVSTAPR

SEQ ID NO: 59481 - protein, 15 aa, Artificial Sequence
  Description of Artificial Sequence: Synthetic peptide
  Seed: DPRMCSLMQGSTLPR
DPRMISLMQVSTHPR

SEQ ID NO: 59482 - protein, 15 aa, Artificial Sequence
  Description of Artificial Sequence: Synthetic peptide
  Seed: DPRMCSLMQGSTLPR
DPRMISLMQVSTIPR

SEQ ID NO: 59483 - protein, 15 aa, Artificial Sequence
  Description of Artificial Sequence: Synthetic peptide
  Seed: DPRMCSLMQGSTLPR
DPRMISLMQVSTLPR

SEQ ID NO: 59484 - protein, 15 aa, Artificial Sequence
  Description of Artificial Sequence: Synthetic peptide
  Seed: DPRMCSLMQGSTLPR
DPRMISLMQVSTMPR

SEQ ID NO: 59485 - protein, 15 aa, Artificial Sequence
  Description of Artificial Sequence: Synthetic peptide
  Seed: DPRMCSLMQGSTLPR
DPRMISLMQVSTNPR

SEQ ID NO: 59486 - protein, 15 aa, Artificial Sequence
  Description of Artificial Sequence: Synthetic peptide
  Seed: DPRMCSLMQGSTLPR
DPRMISLMQVSTSPR

SEQ ID NO: 59487 - protein, 15 aa, Artificial Sequence
  Description of Artificial Sequence: Synthetic peptide
  Seed: DPRMCSLMQGSTLPR
DPRMISLMQVSTTPR

SEQ ID NO: 59488 - protein, 15 aa, Artificial Sequence
  Description of Artificial Sequence: Synthetic peptide
  Seed: DPRMCSLMQGSTLPR
DPRMISLMQVSTVPR

SEQ ID NO: 59489 - protein, 15 aa, Artificial Sequence
  Description of Artificial Sequence: Synthetic peptide
  Seed: DPRMCSLMQGSTLPR
DPRMISLQQASTAPR

SEQ ID NO: 59490 - protein, 15 aa, Artificial Sequence
  Description of Artificial Sequence: Synthetic peptide
  Seed: DPRMCSLMQGSTLPR
DPRMISLQQASTIPR

SEQ ID NO: 59491 - protein, 15 aa, Artificial Sequence
  Description of Artificial Sequence: Synthetic peptide
  Seed: DPRMCSLMQGSTLPR
DPRMISLQQASTLPR

SEQ ID NO: 59492 - protein, 15 aa, Artificial Sequence
  Description of Artificial Sequence: Synthetic peptide
  Seed: DPRMCSLMQGSTLPR
DPRMISLQQASTMPR

SEQ ID NO: 59493 - protein, 15 aa, Artificial Sequence
  Description of Artificial Sequence: Synthetic peptide
  Seed: DPRMCSLMQGSTLPR
DPRMISLQQASTSPR

SEQ ID NO: 59494 - protein, 15 aa, Artificial Sequence
  Description of Artificial Sequence: Synthetic peptide
  Seed: DPRMCSLMQGSTLPR
DPRMISLQQASTTPR

SEQ ID NO: 59495 - protein, 15 aa, Artificial Sequence
  Description of Artificial Sequence: Synthetic peptide
  Seed: DPRMCSLMQGSTLPR
DPRMISLQQASTVPR

SEQ ID NO: 59496 - protein, 15 aa, Artificial Sequence
  Description of Artificial Sequence: Synthetic peptide
  Seed: DPRMCSLMQGSTLPR
DPRMISLQQGSTAPR

SEQ ID NO: 59497 - protein, 15 aa, Artificial Sequence
  Description of Artificial Sequence: Synthetic peptide
  Seed: DPRMCSLMQGSTLPR
DPRMISLQQGSTIPR

SEQ ID NO: 59498 - protein, 15 aa, Artificial Sequence
  Description of Artificial Sequence: Synthetic peptide
  Seed: DPRMCSLMQGSTLPR
DPRMISLQQGSTLPR

SEQ ID NO: 59499 - protein, 15 aa, Artificial Sequence
  Description of Artificial Sequence: Synthetic peptide
  Seed: DPRMCSLMQGSTLPR
DPRMISLQQGSTMPR

SEQ ID NO: 59500 - protein, 15 aa, Artificial Sequence
  Description of Artificial Sequence: Synthetic peptide
  Seed: DPRMCSLMQGSTLPR
DPRMISLQQGSTVPR

SEQ ID NO: 59501 - protein, 15 aa, Artificial Sequence
  Description of Artificial Sequence: Synthetic peptide
  Seed: DPRMCSLMQGSTLPR
DPRMISLQQNSTLPR

SEQ ID NO: 59502 - protein, 15 aa, Artificial Sequence
  Description of Artificial Sequence: Synthetic peptide
  Seed: DPRMCSLMQGSTLPR
DPRMISLQQPSTIPR

SEQ ID NO: 59503 - protein, 15 aa, Artificial Sequence
  Description of Artificial Sequence: Synthetic peptide
  Seed: DPRMCSLMQGSTLPR
DPRMISLQQPSTLPR

SEQ ID NO: 59504 - protein, 15 aa, Artificial Sequence
  Description of Artificial Sequence: Synthetic peptide
  Seed: DPRMCSLMQGSTLPR
DPRMISLQQPSTVPR

SEQ ID NO: 59505 - protein, 15 aa, Artificial Sequence
  Description of Artificial Sequence: Synthetic peptide
  Seed: DPRMCSLMQGSTLPR
DPRMISLQQSSTAPR

SEQ ID NO: 59506 - protein, 15 aa, Artificial Sequence
  Description of Artificial Sequence: Synthetic peptide
  Seed: DPRMCSLMQGSTLPR
DPRMISLQQSSTIPR

SEQ ID NO: 59507 - protein, 15 aa, Artificial Sequence
  Description of Artificial Sequence: Synthetic peptide
  Seed: DPRMCSLMQGSTLPR
DPRMISLQQSSTLPR

SEQ ID NO: 59508 - protein, 15 aa, Artificial Sequence
  Description of Artificial Sequence: Synthetic peptide
  Seed: DPRMCSLMQGSTLPR
DPRMISLQQSSTVPR

SEQ ID NO: 59509 - protein, 15 aa, Artificial Sequence
  Description of Artificial Sequence: Synthetic peptide
  Seed: DPRMCSLMQGSTLPR
DPRMISLSQASTAPR

SEQ ID NO: 59510 - protein, 15 aa, Artificial Sequence
  Description of Artificial Sequence: Synthetic peptide
  Seed: DPRMCSLMQGSTLPR
DPRMISLSQASTIPR

SEQ ID NO: 59511 - protein, 15 aa, Artificial Sequence
  Description of Artificial Sequence: Synthetic peptide
  Seed: DPRMCSLMQGSTLPR
DPRMISLSQASTLPR

SEQ ID NO: 59512 - protein, 15 aa, Artificial Sequence
  Description of Artificial Sequence: Synthetic peptide
  Seed: DPRMCSLMQGSTLPR
DPRMISLSQASTMPR

SEQ ID NO: 59513 - protein, 15 aa, Artificial Sequence
  Description of Artificial Sequence: Synthetic peptide
  Seed: DPRMCSLMQGSTLPR
DPRMISLSQASTVPR

SEQ ID NO: 59514 - protein, 15 aa, Artificial Sequence
  Description of Artificial Sequence: Synthetic peptide
  Seed: DPRMCSLMQGSTLPR
DPRMISLSQGSTIPR

SEQ ID NO: 59515 - protein, 15 aa, Artificial Sequence
  Description of Artificial Sequence: Synthetic peptide
  Seed: DPRMCSLMQGSTLPR
DPRMISLSQGSTLPR

SEQ ID NO: 59516 - protein, 15 aa, Artificial Sequence
  Description of Artificial Sequence: Synthetic peptide
  Seed: DPRMCSLMQGSTLPR
DPRMISLSQSSTIPR

SEQ ID NO: 59517 - protein, 15 aa, Artificial Sequence
  Description of Artificial Sequence: Synthetic peptide
  Seed: DPRMCSLMQGSTLPR
DPRMISLSQSSTLPR

SEQ ID NO: 59518 - protein, 15 aa, Artificial Sequence
  Description of Artificial Sequence: Synthetic peptide
  Seed: DPRMCSLMQGSTLPR
DPRMISLSQSSTMPR

SEQ ID NO: 59519 - protein, 15 aa, Artificial Sequence
  Description of Artificial Sequence: Synthetic peptide
  Seed: DPRMCSLMQGSTLPR
DPRMISLSQSSTVPR

SEQ ID NO: 59520 - protein, 15 aa, Artificial Sequence
  Description of Artificial Sequence: Synthetic peptide
  Seed: DPRMCSLMQGSTLPR
DPRMISLTQASTFPR

SEQ ID NO: 59521 - protein, 15 aa, Artificial Sequence
  Description of Artificial Sequence: Synthetic peptide
  Seed: DPRMCSLMQGSTLPR
DPRMISLTQASTIPR

SEQ ID NO: 59522 - protein, 15 aa, Artificial Sequence
  Description of Artificial Sequence: Synthetic peptide
  Seed: DPRMCSLMQGSTLPR
DPRMISLTQASTLPR

SEQ ID NO: 59523 - protein, 15 aa, Artificial Sequence
  Description of Artificial Sequence: Synthetic peptide
  Seed: DPRMCSLMQGSTLPR
DPRMISLTQASTMPR

SEQ ID NO: 59524 - protein, 15 aa, Artificial Sequence
  Description of Artificial Sequence: Synthetic peptide
  Seed: DPRMCSLMQGSTLPR
DPRMISLTQASTVPR

SEQ ID NO: 59525 - protein, 15 aa, Artificial Sequence
  Description of Artificial Sequence: Synthetic peptide
  Seed: DPRMCSLMQGSTLPR
DPRMISLTQGSTIPR

SEQ ID NO: 59526 - protein, 15 aa, Artificial Sequence
  Description of Artificial Sequence: Synthetic peptide
  Seed: DPRMCSLMQGSTLPR
DPRMISLTQGSTLPR

SEQ ID NO: 59527 - protein, 15 aa, Artificial Sequence
  Description of Artificial Sequence: Synthetic peptide
  Seed: DPRMCSLMQGSTLPR
DPRMISLTQGSTVPR

SEQ ID NO: 59528 - protein, 15 aa, Artificial Sequence
  Description of Artificial Sequence: Synthetic peptide
  Seed: DPRMCSLMQGSTLPR
DPRMISLTQPSTIPR

SEQ ID NO: 59529 - protein, 15 aa, Artificial Sequence
  Description of Artificial Sequence: Synthetic peptide
  Seed: DPRMCSLMQGSTLPR
DPRMISLTQPSTLPR

SEQ ID NO: 59530 - protein, 15 aa, Artificial Sequence
  Description of Artificial Sequence: Synthetic peptide
  Seed: DPRMCSLMQGSTLPR
DPRMISLTQSSTFPR

SEQ ID NO: 59531 - protein, 15 aa, Artificial Sequence
  Description of Artificial Sequence: Synthetic peptide
  Seed: DPRMCSLMQGSTLPR
DPRMISLTQSSTIPR

SEQ ID NO: 59532 - protein, 15 aa, Artificial Sequence
  Description of Artificial Sequence: Synthetic peptide
  Seed: DPRMCSLMQGSTLPR
DPRMISLTQSSTLPR

SEQ ID NO: 59533 - protein, 15 aa, Artificial Sequence
  Description of Artificial Sequence: Synthetic peptide
  Seed: DPRMCSLMQGSTLPR
DPRMISLTQSSTMPR

SEQ ID NO: 59534 - protein, 15 aa, Artificial Sequence
  Description of Artificial Sequence: Synthetic peptide
  Seed: DPRMCSLMQGSTLPR
DPRMISLTQSSTVPR

SEQ ID NO: 59535 - protein, 15 aa, Artificial Sequence
  Description of Artificial Sequence: Synthetic peptide
  Seed: DPRMCSLMQGSTLPR
DPRMISLTQTSTIPR

SEQ ID NO: 59536 - protein, 15 aa, Artificial Sequence
  Description of Artificial Sequence: Synthetic peptide
  Seed: DPRMCSLMQGSTLPR
DPRMISLTQTSTLPR

SEQ ID NO: 59537 - protein, 15 aa, Artificial Sequence
  Description of Artificial Sequence: Synthetic peptide
  Seed: DPRMCSLMQGSTLPR
DPRMISLVQASTAPR

SEQ ID NO: 59538 - protein, 15 aa, Artificial Sequence
  Description of Artificial Sequence: Synthetic peptide
  Seed: DPRMCSLMQGSTLPR
DPRMISLVQASTIPR

SEQ ID NO: 59539 - protein, 15 aa, Artificial Sequence
  Description of Artificial Sequence: Synthetic peptide
  Seed: DPRMCSLMQGSTLPR
DPRMISLVQASTLPR

SEQ ID NO: 59540 - protein, 15 aa, Artificial Sequence
  Description of Artificial Sequence: Synthetic peptide
  Seed: DPRMCSLMQGSTLPR
DPRMISLVQASTMPR

SEQ ID NO: 59541 - protein, 15 aa, Artificial Sequence
  Description of Artificial Sequence: Synthetic peptide
  Seed: DPRMCSLMQGSTLPR
DPRMISLVQASTSPR

SEQ ID NO: 59542 - protein, 15 aa, Artificial Sequence
  Description of Artificial Sequence: Synthetic peptide
  Seed: DPRMCSLMQGSTLPR
DPRMISLVQASTTPR

SEQ ID NO: 59543 - protein, 15 aa, Artificial Sequence
  Description of Artificial Sequence: Synthetic peptide
  Seed: DPRMCSLMQGSTLPR
DPRMISLVQASTVPR

SEQ ID NO: 59544 - protein, 15 aa, Artificial Sequence
  Description of Artificial Sequence: Synthetic peptide
  Seed: DPRMCSLMQGSTLPR
DPRMISLVQGSTAPR

SEQ ID NO: 59545 - protein, 15 aa, Artificial Sequence
  Description of Artificial Sequence: Synthetic peptide
  Seed: DPRMCSLMQGSTLPR
DPRMISLVQGSTIPR

SEQ ID NO: 59546 - protein, 15 aa, Artificial Sequence
  Description of Artificial Sequence: Synthetic peptide
  Seed: DPRMCSLMQGSTLPR
DPRMISLVQGSTLPR

SEQ ID NO: 59547 - protein, 15 aa, Artificial Sequence
  Description of Artificial Sequence: Synthetic peptide
  Seed: DPRMCSLMQGSTLPR
DPRMISLVQGSTMPR

SEQ ID NO: 59548 - protein, 15 aa, Artificial Sequence
  Description of Artificial Sequence: Synthetic peptide
  Seed: DPRMCSLMQGSTLPR
DPRMISLVQGSTSPR

SEQ ID NO: 59549 - protein, 15 aa, Artificial Sequence
  Description of Artificial Sequence: Synthetic peptide
  Seed: DPRMCSLMQGSTLPR
DPRMISLVQGSTTPR

SEQ ID NO: 59550 - protein, 15 aa, Artificial Sequence
  Description of Artificial Sequence: Synthetic peptide
  Seed: DPRMCSLMQGSTLPR
DPRMISLVQGSTVPR

SEQ ID NO: 59551 - protein, 15 aa, Artificial Sequence
  Description of Artificial Sequence: Synthetic peptide
  Seed: DPRMCSLMQGSTLPR
DPRMISLVQNSTAPR

SEQ ID NO: 59552 - protein, 15 aa, Artificial Sequence
  Description of Artificial Sequence: Synthetic peptide
  Seed: DPRMCSLMQGSTLPR
DPRMISLVQNSTSPR

SEQ ID NO: 59553 - protein, 15 aa, Artificial Sequence
  Description of Artificial Sequence: Synthetic peptide
  Seed: DPRMCSLMQGSTLPR
DPRMISLVQPSTAPR

SEQ ID NO: 59554 - protein, 15 aa, Artificial Sequence
  Description of Artificial Sequence: Synthetic peptide
  Seed: DPRMCSLMQGSTLPR
DPRMISLVQPSTIPR

SEQ ID NO: 59555 - protein, 15 aa, Artificial Sequence
  Description of Artificial Sequence: Synthetic peptide
  Seed: DPRMCSLMQGSTLPR
DPRMISLVQPSTLPR

SEQ ID NO: 59556 - protein, 15 aa, Artificial Sequence
  Description of Artificial Sequence: Synthetic peptide
  Seed: DPRMCSLMQGSTLPR
DPRMISLVQPSTVPR

SEQ ID NO: 59557 - protein, 15 aa, Artificial Sequence
  Description of Artificial Sequence: Synthetic peptide
  Seed: DPRMCSLMQGSTLPR
DPRMISLVQSSTAPR

SEQ ID NO: 59558 - protein, 15 aa, Artificial Sequence
  Description of Artificial Sequence: Synthetic peptide
  Seed: DPRMCSLMQGSTLPR
DPRMISLVQSSTIPR

SEQ ID NO: 59559 - protein, 15 aa, Artificial Sequence
  Description of Artificial Sequence: Synthetic peptide
  Seed: DPRMCSLMQGSTLPR
DPRMISLVQSSTLPR

SEQ ID NO: 59560 - protein, 15 aa, Artificial Sequence
  Description of Artificial Sequence: Synthetic peptide
  Seed: DPRMCSLMQGSTLPR
DPRMISLVQSSTSPR

SEQ ID NO: 59561 - protein, 15 aa, Artificial Sequence
  Description of Artificial Sequence: Synthetic peptide
  Seed: DPRMCSLMQGSTLPR
DPRMISLVQSSTTPR

SEQ ID NO: 59562 - protein, 15 aa, Artificial Sequence
  Description of Artificial Sequence: Synthetic peptide
  Seed: DPRMCSLMQGSTLPR
DPRMISLVQSSTVPR

SEQ ID NO: 59563 - protein, 15 aa, Artificial Sequence
  Description of Artificial Sequence: Synthetic peptide
  Seed: DPRMCSLMQGSTLPR
DPRMISLVQTSTAPR

SEQ ID NO: 59564 - protein, 15 aa, Artificial Sequence
  Description of Artificial Sequence: Synthetic peptide
  Seed: DPRMCSLMQGSTLPR
DPRMISLVQTSTSPR

SEQ ID NO: 59565 - protein, 15 aa, Artificial Sequence
  Description of Artificial Sequence: Synthetic peptide
  Seed: DPRMCSLMQGSTLPR
DPRMISLWQASTIPR

SEQ ID NO: 59566 - protein, 15 aa, Artificial Sequence
  Description of Artificial Sequence: Synthetic peptide
  Seed: DPRMCSLMQGSTLPR
DPRMISLWQASTLPR

SEQ ID NO: 59567 - protein, 15 aa, Artificial Sequence
  Description of Artificial Sequence: Synthetic peptide
  Seed: DPRMCSLMQGSTLPR
DPRMISLWQASTVPR

SEQ ID NO: 59568 - protein, 15 aa, Artificial Sequence
  Description of Artificial Sequence: Synthetic peptide
  Seed: DPRMCSLMQGSTLPR
DPRMISLWQGSTLPR

SEQ ID NO: 59569 - protein, 15 aa, Artificial Sequence
  Description of Artificial Sequence: Synthetic peptide
  Seed: DPRMCSLMQGSTLPR
DPRMISLWQNSTAPR

SEQ ID NO: 59570 - protein, 15 aa, Artificial Sequence
  Description of Artificial Sequence: Synthetic peptide
  Seed: DPRMCSLMQGSTLPR
DPRMISLWQNSTIPR

SEQ ID NO: 59571 - protein, 15 aa, Artificial Sequence
  Description of Artificial Sequence: Synthetic peptide
  Seed: DPRMCSLMQGSTLPR
DPRMISLWQNSTLPR

SEQ ID NO: 59572 - protein, 15 aa, Artificial Sequence
  Description of Artificial Sequence: Synthetic peptide
  Seed: DPRMCSLMQGSTLPR
DPRMISLWQNSTVPR

SEQ ID NO: 59573 - protein, 15 aa, Artificial Sequence
  Description of Artificial Sequence: Synthetic peptide
  Seed: DPRMCSLMQGSTLPR
DPRMISLWQSSTAPR

SEQ ID NO: 59574 - protein, 15 aa, Artificial Sequence
  Description of Artificial Sequence: Synthetic peptide
  Seed: DPRMCSLMQGSTLPR
DPRMISLWQSSTIPR

SEQ ID NO: 59575 - protein, 15 aa, Artificial Sequence
  Description of Artificial Sequence: Synthetic peptide
  Seed: DPRMCSLMQGSTLPR
DPRMISLWQSSTLPR

SEQ ID NO: 59576 - protein, 15 aa, Artificial Sequence
  Description of Artificial Sequence: Synthetic peptide
  Seed: DPRMCSLMQGSTLPR
DPRMISLWQSSTMPR

SEQ ID NO: 59577 - protein, 15 aa, Artificial Sequence
  Description of Artificial Sequence: Synthetic peptide
  Seed: DPRMCSLMQGSTLPR
DPRMISLWQSSTVPR

SEQ ID NO: 59578 - protein, 15 aa, Artificial Sequence
  Description of Artificial Sequence: Synthetic peptide
  Seed: DPRMCSLMQGSTLPR
DPRMISLWQTSTLPR

SEQ ID NO: 59579 - protein, 15 aa, Artificial Sequence
  Description of Artificial Sequence: Synthetic peptide
  Seed: DPRMCSLMQGSTLPR
DPRMISLYQASTAPR

SEQ ID NO: 59580 - protein, 15 aa, Artificial Sequence
  Description of Artificial Sequence: Synthetic peptide
  Seed: DPRMCSLMQGSTLPR
DPRMISLYQASTIPR

SEQ ID NO: 59581 - protein, 15 aa, Artificial Sequence
  Description of Artificial Sequence: Synthetic peptide
  Seed: DPRMCSLMQGSTLPR
DPRMISLYQASTLPR

SEQ ID NO: 59582 - protein, 15 aa, Artificial Sequence
  Description of Artificial Sequence: Synthetic peptide
  Seed: DPRMCSLMQGSTLPR
DPRMISLYQASTMPR

SEQ ID NO: 59583 - protein, 15 aa, Artificial Sequence
  Description of Artificial Sequence: Synthetic peptide
  Seed: DPRMCSLMQGSTLPR
DPRMISLYQASTTPR

SEQ ID NO: 59584 - protein, 15 aa, Artificial Sequence
  Description of Artificial Sequence: Synthetic peptide
  Seed: DPRMCSLMQGSTLPR
DPRMISLYQASTVPR

SEQ ID NO: 59585 - protein, 15 aa, Artificial Sequence
  Description of Artificial Sequence: Synthetic peptide
  Seed: DPRMCSLMQGSTLPR
DPRMISLYQGSTAPR

SEQ ID NO: 59586 - protein, 15 aa, Artificial Sequence
  Description of Artificial Sequence: Synthetic peptide
  Seed: DPRMCSLMQGSTLPR
DPRMISLYQGSTIPR

SEQ ID NO: 59587 - protein, 15 aa, Artificial Sequence
  Description of Artificial Sequence: Synthetic peptide
  Seed: DPRMCSLMQGSTLPR
DPRMISLYQGSTLPR

SEQ ID NO: 59588 - protein, 15 aa, Artificial Sequence
  Description of Artificial Sequence: Synthetic peptide
  Seed: DPRMCSLMQGSTLPR
DPRMISLYQGSTMPR

SEQ ID NO: 59589 - protein, 15 aa, Artificial Sequence
  Description of Artificial Sequence: Synthetic peptide
  Seed: DPRMCSLMQGSTLPR
DPRMISLYQGSTSPR

SEQ ID NO: 59590 - protein, 15 aa, Artificial Sequence
  Description of Artificial Sequence: Synthetic peptide
  Seed: DPRMCSLMQGSTLPR
DPRMISLYQGSTTPR

SEQ ID NO: 59591 - protein, 15 aa, Artificial Sequence
  Description of Artificial Sequence: Synthetic peptide
  Seed: DPRMCSLMQGSTLPR
DPRMISLYQGSTVPR

SEQ ID NO: 59592 - protein, 15 aa, Artificial Sequence
  Description of Artificial Sequence: Synthetic peptide
  Seed: DPRMCSLMQGSTLPR
DPRMISLYQNSTAPR

SEQ ID NO: 59593 - protein, 15 aa, Artificial Sequence
  Description of Artificial Sequence: Synthetic peptide
  Seed: DPRMCSLMQGSTLPR
DPRMISLYQNSTFPR

SEQ ID NO: 59594 - protein, 15 aa, Artificial Sequence
  Description of Artificial Sequence: Synthetic peptide
  Seed: DPRMCSLMQGSTLPR
DPRMISLYQNSTIPR

SEQ ID NO: 59595 - protein, 15 aa, Artificial Sequence
  Description of Artificial Sequence: Synthetic peptide
  Seed: DPRMCSLMQGSTLPR
DPRMISLYQNSTLPR

SEQ ID NO: 59596 - protein, 15 aa, Artificial Sequence
  Description of Artificial Sequence: Synthetic peptide
  Seed: DPRMCSLMQGSTLPR
DPRMISLYQNSTMPR

SEQ ID NO: 59597 - protein, 15 aa, Artificial Sequence
  Description of Artificial Sequence: Synthetic peptide
  Seed: DPRMCSLMQGSTLPR
DPRMISLYQNSTSPR

SEQ ID NO: 59598 - protein, 15 aa, Artificial Sequence
  Description of Artificial Sequence: Synthetic peptide
  Seed: DPRMCSLMQGSTLPR
DPRMISLYQNSTTPR

SEQ ID NO: 59599 - protein, 15 aa, Artificial Sequence
  Description of Artificial Sequence: Synthetic peptide
  Seed: DPRMCSLMQGSTLPR
DPRMISLYQNSTVPR

SEQ ID NO: 59600 - protein, 15 aa, Artificial Sequence
  Description of Artificial Sequence: Synthetic peptide
  Seed: DPRMCSLMQGSTLPR
DPRMISLYQSSTAPR

SEQ ID NO: 59601 - protein, 15 aa, Artificial Sequence
  Description of Artificial Sequence: Synthetic peptide
  Seed: DPRMCSLMQGSTLPR
DPRMISLYQSSTFPR

SEQ ID NO: 59602 - protein, 15 aa, Artificial Sequence
  Description of Artificial Sequence: Synthetic peptide
  Seed: DPRMCSLMQGSTLPR
DPRMISLYQSSTGPR

SEQ ID NO: 59603 - protein, 15 aa, Artificial Sequence
  Description of Artificial Sequence: Synthetic peptide
  Seed: DPRMCSLMQGSTLPR
DPRMISLYQSSTIPR

SEQ ID NO: 59604 - protein, 15 aa, Artificial Sequence
  Description of Artificial Sequence: Synthetic peptide
  Seed: DPRMCSLMQGSTLPR
DPRMISLYQSSTLPR

SEQ ID NO: 59605 - protein, 15 aa, Artificial Sequence
  Description of Artificial Sequence: Synthetic peptide
  Seed: DPRMCSLMQGSTLPR
DPRMISLYQSSTMPR

SEQ ID NO: 59606 - protein, 15 aa, Artificial Sequence
  Description of Artificial Sequence: Synthetic peptide
  Seed: DPRMCSLMQGSTLPR
DPRMISLYQSSTSPR

SEQ ID NO: 59607 - protein, 15 aa, Artificial Sequence
  Description of Artificial Sequence: Synthetic peptide
  Seed: DPRMCSLMQGSTLPR
DPRMISLYQSSTTPR

SEQ ID NO: 59608 - protein, 15 aa, Artificial Sequence
  Description of Artificial Sequence: Synthetic peptide
  Seed: DPRMCSLMQGSTLPR
DPRMISLYQSSTVPR

SEQ ID NO: 59609 - protein, 15 aa, Artificial Sequence
  Description of Artificial Sequence: Synthetic peptide
  Seed: DPRMCSLMQGSTLPR
DPRMISLYQTSTAPR

SEQ ID NO: 59610 - protein, 15 aa, Artificial Sequence
  Description of Artificial Sequence: Synthetic peptide
  Seed: DPRMCSLMQGSTLPR
DPRMISLYQTSTIPR

SEQ ID NO: 59611 - protein, 15 aa, Artificial Sequence
  Description of Artificial Sequence: Synthetic peptide
  Seed: DPRMCSLMQGSTLPR
DPRMISLYQTSTLPR

SEQ ID NO: 59612 - protein, 15 aa, Artificial Sequence
  Description of Artificial Sequence: Synthetic peptide
  Seed: DPRMCSLMQGSTLPR
DPRMISLYQTSTVPR

SEQ ID NO: 59613 - protein, 15 aa, Artificial Sequence
  Description of Artificial Sequence: Synthetic peptide
  Seed: DPRMCSLMQGSTLPR
DPRMLSLAQASTAPR

SEQ ID NO: 59614 - protein, 15 aa, Artificial Sequence
  Description of Artificial Sequence: Synthetic peptide
  Seed: DPRMCSLMQGSTLPR
DPRMLSLAQASTIPR

SEQ ID NO: 59615 - protein, 15 aa, Artificial Sequence
  Description of Artificial Sequence: Synthetic peptide
  Seed: DPRMCSLMQGSTLPR
DPRMLSLAQASTLPR

SEQ ID NO: 59616 - protein, 15 aa, Artificial Sequence
  Description of Artificial Sequence: Synthetic peptide
  Seed: DPRMCSLMQGSTLPR
DPRMLSLAQASTMPR

SEQ ID NO: 59617 - protein, 15 aa, Artificial Sequence
  Description of Artificial Sequence: Synthetic peptide
  Seed: DPRMCSLMQGSTLPR
DPRMLSLAQASTSPR

SEQ ID NO: 59618 - protein, 15 aa, Artificial Sequence
  Description of Artificial Sequence: Synthetic peptide
  Seed: DPRMCSLMQGSTLPR
DPRMLSLAQASTTPR

SEQ ID NO: 59619 - protein, 15 aa, Artificial Sequence
  Description of Artificial Sequence: Synthetic peptide
  Seed: DPRMCSLMQGSTLPR
DPRMLSLAQASTVPR

SEQ ID NO: 59620 - protein, 15 aa, Artificial Sequence
  Description of Artificial Sequence: Synthetic peptide
  Seed: DPRMCSLMQGSTLPR
DPRMLSLAQGSTAPR

SEQ ID NO: 59621 - protein, 15 aa, Artificial Sequence
  Description of Artificial Sequence: Synthetic peptide
  Seed: DPRMCSLMQGSTLPR
DPRMLSLAQGSTIPR

SEQ ID NO: 59622 - protein, 15 aa, Artificial Sequence
  Description of Artificial Sequence: Synthetic peptide
  Seed: DPRMCSLMQGSTLPR
DPRMLSLAQGSTLPR

SEQ ID NO: 59623 - protein, 15 aa, Artificial Sequence
  Description of Artificial Sequence: Synthetic peptide
  Seed: DPRMCSLMQGSTLPR
DPRMLSLAQGSTMPR

SEQ ID NO: 59624 - protein, 15 aa, Artificial Sequence
  Description of Artificial Sequence: Synthetic peptide
  Seed: DPRMCSLMQGSTLPR
DPRMLSLAQGSTVPR

SEQ ID NO: 59625 - protein, 15 aa, Artificial Sequence
  Description of Artificial Sequence: Synthetic peptide
  Seed: DPRMCSLMQGSTLPR
DPRMLSLAQNSTLPR

SEQ ID NO: 59626 - protein, 15 aa, Artificial Sequence
  Description of Artificial Sequence: Synthetic peptide
  Seed: DPRMCSLMQGSTLPR
DPRMLSLAQPSTIPR

SEQ ID NO: 59627 - protein, 15 aa, Artificial Sequence
  Description of Artificial Sequence: Synthetic peptide
  Seed: DPRMCSLMQGSTLPR
DPRMLSLAQPSTLPR

SEQ ID NO: 59628 - protein, 15 aa, Artificial Sequence
  Description of Artificial Sequence: Synthetic peptide
  Seed: DPRMCSLMQGSTLPR
DPRMLSLAQPSTVPR

SEQ ID NO: 59629 - protein, 15 aa, Artificial Sequence
  Description of Artificial Sequence: Synthetic peptide
  Seed: DPRMCSLMQGSTLPR
DPRMLSLAQSSTAPR

SEQ ID NO: 59630 - protein, 15 aa, Artificial Sequence
  Description of Artificial Sequence: Synthetic peptide
  Seed: DPRMCSLMQGSTLPR
DPRMLSLAQSSTIPR

SEQ ID NO: 59631 - protein, 15 aa, Artificial Sequence
  Description of Artificial Sequence: Synthetic peptide
  Seed: DPRMCSLMQGSTLPR
DPRMLSLAQSSTLPR

SEQ ID NO: 59632 - protein, 15 aa, Artificial Sequence
  Description of Artificial Sequence: Synthetic peptide
  Seed: DPRMCSLMQGSTLPR
DPRMLSLAQSSTMPR

SEQ ID NO: 59633 - protein, 15 aa, Artificial Sequence
  Description of Artificial Sequence: Synthetic peptide
  Seed: DPRMCSLMQGSTLPR
DPRMLSLAQSSTVPR

SEQ ID NO: 59634 - protein, 15 aa, Artificial Sequence
  Description of Artificial Sequence: Synthetic peptide
  Seed: DPRMCSLMQGSTLPR
DPRMLSLEQASTIPR

SEQ ID NO: 59635 - protein, 15 aa, Artificial Sequence
  Description of Artificial Sequence: Synthetic peptide
  Seed: DPRMCSLMQGSTLPR
DPRMLSLEQASTLPR

SEQ ID NO: 59636 - protein, 15 aa, Artificial Sequence
  Description of Artificial Sequence: Synthetic peptide
  Seed: DPRMCSLMQGSTLPR
DPRMLSLEQASTVPR

SEQ ID NO: 59637 - protein, 15 aa, Artificial Sequence
  Description of Artificial Sequence: Synthetic peptide
  Seed: DPRMCSLMQGSTLPR
DPRMLSLFQASTAPR

SEQ ID NO: 59638 - protein, 15 aa, Artificial Sequence
  Description of Artificial Sequence: Synthetic peptide
  Seed: DPRMCSLMQGSTLPR
DPRMLSLFQASTIPR

SEQ ID NO: 59639 - protein, 15 aa, Artificial Sequence
  Description of Artificial Sequence: Synthetic peptide
  Seed: DPRMCSLMQGSTLPR
DPRMLSLFQASTLPR

SEQ ID NO: 59640 - protein, 15 aa, Artificial Sequence
  Description of Artificial Sequence: Synthetic peptide
  Seed: DPRMCSLMQGSTLPR
DPRMLSLFQASTVPR

SEQ ID NO: 59641 - protein, 15 aa, Artificial Sequence
  Description of Artificial Sequence: Synthetic peptide
  Seed: DPRMCSLMQGSTLPR
DPRMLSLFQGSTIPR

SEQ ID NO: 59642 - protein, 15 aa, Artificial Sequence
  Description of Artificial Sequence: Synthetic peptide
  Seed: DPRMCSLMQGSTLPR
DPRMLSLFQGSTLPR

SEQ ID NO: 59643 - protein, 15 aa, Artificial Sequence
  Description of Artificial Sequence: Synthetic peptide
  Seed: DPRMCSLMQGSTLPR
DPRMLSLFQGSTVPR

SEQ ID NO: 59644 - protein, 15 aa, Artificial Sequence
  Description of Artificial Sequence: Synthetic peptide
  Seed: DPRMCSLMQGSTLPR
DPRMLSLFQNSTAPR

SEQ ID NO: 59645 - protein, 15 aa, Artificial Sequence
  Description of Artificial Sequence: Synthetic peptide
  Seed: DPRMCSLMQGSTLPR
DPRMLSLFQNSTIPR

SEQ ID NO: 59646 - protein, 15 aa, Artificial Sequence
  Description of Artificial Sequence: Synthetic peptide
  Seed: DPRMCSLMQGSTLPR
DPRMLSLFQNSTLPR

SEQ ID NO: 59647 - protein, 15 aa, Artificial Sequence
  Description of Artificial Sequence: Synthetic peptide
  Seed: DPRMCSLMQGSTLPR
DPRMLSLFQNSTMPR

SEQ ID NO: 59648 - protein, 15 aa, Artificial Sequence
  Description of Artificial Sequence: Synthetic peptide
  Seed: DPRMCSLMQGSTLPR
DPRMLSLFQNSTTPR

SEQ ID NO: 59649 - protein, 15 aa, Artificial Sequence
  Description of Artificial Sequence: Synthetic peptide
  Seed: DPRMCSLMQGSTLPR
DPRMLSLFQNSTVPR

SEQ ID NO: 59650 - protein, 15 aa, Artificial Sequence
  Description of Artificial Sequence: Synthetic peptide
  Seed: DPRMCSLMQGSTLPR
DPRMLSLFQSSTAPR

SEQ ID NO: 59651 - protein, 15 aa, Artificial Sequence
  Description of Artificial Sequence: Synthetic peptide
  Seed: DPRMCSLMQGSTLPR
DPRMLSLFQSSTIPR

SEQ ID NO: 59652 - protein, 15 aa, Artificial Sequence
  Description of Artificial Sequence: Synthetic peptide
  Seed: DPRMCSLMQGSTLPR
DPRMLSLFQSSTLPR

SEQ ID NO: 59653 - protein, 15 aa, Artificial Sequence
  Description of Artificial Sequence: Synthetic peptide
  Seed: DPRMCSLMQGSTLPR
DPRMLSLFQSSTMPR

SEQ ID NO: 59654 - protein, 15 aa, Artificial Sequence
  Description of Artificial Sequence: Synthetic peptide
  Seed: DPRMCSLMQGSTLPR
DPRMLSLFQSSTTPR

SEQ ID NO: 59655 - protein, 15 aa, Artificial Sequence
  Description of Artificial Sequence: Synthetic peptide
  Seed: DPRMCSLMQGSTLPR
DPRMLSLFQSSTVPR

SEQ ID NO: 59656 - protein, 15 aa, Artificial Sequence
  Description of Artificial Sequence: Synthetic peptide
  Seed: DPRMCSLMQGSTLPR
DPRMLSLFQTSTIPR

SEQ ID NO: 59657 - protein, 15 aa, Artificial Sequence
  Description of Artificial Sequence: Synthetic peptide
  Seed: DPRMCSLMQGSTLPR
DPRMLSLFQTSTLPR

SEQ ID NO: 59658 - protein, 15 aa, Artificial Sequence
  Description of Artificial Sequence: Synthetic peptide
  Seed: DPRMCSLMQGSTLPR
DPRMLSLFQTSTVPR

SEQ ID NO: 59659 - protein, 15 aa, Artificial Sequence
  Description of Artificial Sequence: Synthetic peptide
  Seed: DPRMCSLMQGSTLPR
DPRMLSLGQASTIPR

SEQ ID NO: 59660 - protein, 15 aa, Artificial Sequence
  Description of Artificial Sequence: Synthetic peptide
  Seed: DPRMCSLMQGSTLPR
DPRMLSLGQASTLPR

SEQ ID NO: 59661 - protein, 15 aa, Artificial Sequence
  Description of Artificial Sequence: Synthetic peptide
  Seed: DPRMCSLMQGSTLPR
DPRMLSLIQASTAPR

SEQ ID NO: 59662 - protein, 15 aa, Artificial Sequence
  Description of Artificial Sequence: Synthetic peptide
  Seed: DPRMCSLMQGSTLPR
DPRMLSLIQASTGPR

SEQ ID NO: 59663 - protein, 15 aa, Artificial Sequence
  Description of Artificial Sequence: Synthetic peptide
  Seed: DPRMCSLMQGSTLPR
DPRMLSLIQASTIPR

SEQ ID NO: 59664 - protein, 15 aa, Artificial Sequence
  Description of Artificial Sequence: Synthetic peptide
  Seed: DPRMCSLMQGSTLPR
DPRMLSLIQASTLPR

SEQ ID NO: 59665 - protein, 15 aa, Artificial Sequence
  Description of Artificial Sequence: Synthetic peptide
  Seed: DPRMCSLMQGSTLPR
DPRMLSLIQASTMPR

SEQ ID NO: 59666 - protein, 15 aa, Artificial Sequence
  Description of Artificial Sequence: Synthetic peptide
  Seed: DPRMCSLMQGSTLPR
DPRMLSLIQASTNPR

SEQ ID NO: 59667 - protein, 15 aa, Artificial Sequence
  Description of Artificial Sequence: Synthetic peptide
  Seed: DPRMCSLMQGSTLPR
DPRMLSLIQASTSPR

SEQ ID NO: 59668 - protein, 15 aa, Artificial Sequence
  Description of Artificial Sequence: Synthetic peptide
  Seed: DPRMCSLMQGSTLPR
DPRMLSLIQASTTPR

SEQ ID NO: 59669 - protein, 15 aa, Artificial Sequence
  Description of Artificial Sequence: Synthetic peptide
  Seed: DPRMCSLMQGSTLPR
DPRMLSLIQASTVPR

SEQ ID NO: 59670 - protein, 15 aa, Artificial Sequence
  Description of Artificial Sequence: Synthetic peptide
  Seed: DPRMCSLMQGSTLPR
DPRMLSLIQGSTAPR

SEQ ID NO: 59671 - protein, 15 aa, Artificial Sequence
  Description of Artificial Sequence: Synthetic peptide
  Seed: DPRMCSLMQGSTLPR
DPRMLSLIQGSTIPR

SEQ ID NO: 59672 - protein, 15 aa, Artificial Sequence
  Description of Artificial Sequence: Synthetic peptide
  Seed: DPRMCSLMQGSTLPR
DPRMLSLIQGSTLPR

SEQ ID NO: 59673 - protein, 15 aa, Artificial Sequence
  Description of Artificial Sequence: Synthetic peptide
  Seed: DPRMCSLMQGSTLPR
DPRMLSLIQGSTMPR

SEQ ID NO: 59674 - protein, 15 aa, Artificial Sequence
  Description of Artificial Sequence: Synthetic peptide
  Seed: DPRMCSLMQGSTLPR
DPRMLSLIQGSTSPR

SEQ ID NO: 59675 - protein, 15 aa, Artificial Sequence
  Description of Artificial Sequence: Synthetic peptide
  Seed: DPRMCSLMQGSTLPR
DPRMLSLIQGSTTPR

SEQ ID NO: 59676 - protein, 15 aa, Artificial Sequence
  Description of Artificial Sequence: Synthetic peptide
  Seed: DPRMCSLMQGSTLPR
DPRMLSLIQGSTVPR

SEQ ID NO: 59677 - protein, 15 aa, Artificial Sequence
  Description of Artificial Sequence: Synthetic peptide
  Seed: DPRMCSLMQGSTLPR
DPRMLSLIQNSTAPR

SEQ ID NO: 59678 - protein, 15 aa, Artificial Sequence
  Description of Artificial Sequence: Synthetic peptide
  Seed: DPRMCSLMQGSTLPR
DPRMLSLIQNSTIPR

SEQ ID NO: 59679 - protein, 15 aa, Artificial Sequence
  Description of Artificial Sequence: Synthetic peptide
  Seed: DPRMCSLMQGSTLPR
DPRMLSLIQNSTLPR

SEQ ID NO: 59680 - protein, 15 aa, Artificial Sequence
  Description of Artificial Sequence: Synthetic peptide
  Seed: DPRMCSLMQGSTLPR
DPRMLSLIQNSTSPR

SEQ ID NO: 59681 - protein, 15 aa, Artificial Sequence
  Description of Artificial Sequence: Synthetic peptide
  Seed: DPRMCSLMQGSTLPR
DPRMLSLIQNSTVPR

SEQ ID NO: 59682 - protein, 15 aa, Artificial Sequence
  Description of Artificial Sequence: Synthetic peptide
  Seed: DPRMCSLMQGSTLPR
DPRMLSLIQPSTAPR

SEQ ID NO: 59683 - protein, 15 aa, Artificial Sequence
  Description of Artificial Sequence: Synthetic peptide
  Seed: DPRMCSLMQGSTLPR
DPRMLSLIQPSTIPR

SEQ ID NO: 59684 - protein, 15 aa, Artificial Sequence
  Description of Artificial Sequence: Synthetic peptide
  Seed: DPRMCSLMQGSTLPR
DPRMLSLIQPSTLPR

SEQ ID NO: 59685 - protein, 15 aa, Artificial Sequence
  Description of Artificial Sequence: Synthetic peptide
  Seed: DPRMCSLMQGSTLPR
DPRMLSLIQPSTMPR

SEQ ID NO: 59686 - protein, 15 aa, Artificial Sequence
  Description of Artificial Sequence: Synthetic peptide
  Seed: DPRMCSLMQGSTLPR
DPRMLSLIQPSTNPR

SEQ ID NO: 59687 - protein, 15 aa, Artificial Sequence
  Description of Artificial Sequence: Synthetic peptide
  Seed: DPRMCSLMQGSTLPR
DPRMLSLIQPSTSPR

SEQ ID NO: 59688 - protein, 15 aa, Artificial Sequence
  Description of Artificial Sequence: Synthetic peptide
  Seed: DPRMCSLMQGSTLPR
DPRMLSLIQPSTTPR

SEQ ID NO: 59689 - protein, 15 aa, Artificial Sequence
  Description of Artificial Sequence: Synthetic peptide
  Seed: DPRMCSLMQGSTLPR
DPRMLSLIQPSTVPR

SEQ ID NO: 59690 - protein, 15 aa, Artificial Sequence
  Description of Artificial Sequence: Synthetic peptide
  Seed: DPRMCSLMQGSTLPR
DPRMLSLIQSSTAPR

SEQ ID NO: 59691 - protein, 15 aa, Artificial Sequence
  Description of Artificial Sequence: Synthetic peptide
  Seed: DPRMCSLMQGSTLPR
DPRMLSLIQSSTIPR

SEQ ID NO: 59692 - protein, 15 aa, Artificial Sequence
  Description of Artificial Sequence: Synthetic peptide
  Seed: DPRMCSLMQGSTLPR
DPRMLSLIQSSTLPR

SEQ ID NO: 59693 - protein, 15 aa, Artificial Sequence
  Description of Artificial Sequence: Synthetic peptide
  Seed: DPRMCSLMQGSTLPR
DPRMLSLIQSSTMPR

SEQ ID NO: 59694 - protein, 15 aa, Artificial Sequence
  Description of Artificial Sequence: Synthetic peptide
  Seed: DPRMCSLMQGSTLPR
DPRMLSLIQSSTNPR

SEQ ID NO: 59695 - protein, 15 aa, Artificial Sequence
  Description of Artificial Sequence: Synthetic peptide
  Seed: DPRMCSLMQGSTLPR
DPRMLSLIQSSTSPR

SEQ ID NO: 59696 - protein, 15 aa, Artificial Sequence
  Description of Artificial Sequence: Synthetic peptide
  Seed: DPRMCSLMQGSTLPR
DPRMLSLIQSSTTPR

SEQ ID NO: 59697 - protein, 15 aa, Artificial Sequence
  Description of Artificial Sequence: Synthetic peptide
  Seed: DPRMCSLMQGSTLPR
DPRMLSLIQSSTVPR

SEQ ID NO: 59698 - protein, 15 aa, Artificial Sequence
  Description of Artificial Sequence: Synthetic peptide
  Seed: DPRMCSLMQGSTLPR
DPRMLSLIQTSTAPR

SEQ ID NO: 59699 - protein, 15 aa, Artificial Sequence
  Description of Artificial Sequence: Synthetic peptide
  Seed: DPRMCSLMQGSTLPR
DPRMLSLIQTSTIPR

SEQ ID NO: 59700 - protein, 15 aa, Artificial Sequence
  Description of Artificial Sequence: Synthetic peptide
  Seed: DPRMCSLMQGSTLPR
DPRMLSLIQTSTLPR

SEQ ID NO: 59701 - protein, 15 aa, Artificial Sequence
  Description of Artificial Sequence: Synthetic peptide
  Seed: DPRMCSLMQGSTLPR
DPRMLSLIQTSTNPR

SEQ ID NO: 59702 - protein, 15 aa, Artificial Sequence
  Description of Artificial Sequence: Synthetic peptide
  Seed: DPRMCSLMQGSTLPR
DPRMLSLIQTSTSPR

SEQ ID NO: 59703 - protein, 15 aa, Artificial Sequence
  Description of Artificial Sequence: Synthetic peptide
  Seed: DPRMCSLMQGSTLPR
DPRMLSLIQTSTVPR

SEQ ID NO: 59704 - protein, 15 aa, Artificial Sequence
  Description of Artificial Sequence: Synthetic peptide
  Seed: DPRMCSLMQGSTLPR
DPRMLSLIQVSTAPR

SEQ ID NO: 59705 - protein, 15 aa, Artificial Sequence
  Description of Artificial Sequence: Synthetic peptide
  Seed: DPRMCSLMQGSTLPR
DPRMLSLIQVSTNPR

SEQ ID NO: 59706 - protein, 15 aa, Artificial Sequence
  Description of Artificial Sequence: Synthetic peptide
  Seed: DPRMCSLMQGSTLPR
DPRMLSLIQVSTSPR

SEQ ID NO: 59707 - protein, 15 aa, Artificial Sequence
  Description of Artificial Sequence: Synthetic peptide
  Seed: DPRMCSLMQGSTLPR
DPRMLSLLQASTAPR

SEQ ID NO: 59708 - protein, 15 aa, Artificial Sequence
  Description of Artificial Sequence: Synthetic peptide
  Seed: DPRMCSLMQGSTLPR
DPRMLSLLQASTCPR

SEQ ID NO: 59709 - protein, 15 aa, Artificial Sequence
  Description of Artificial Sequence: Synthetic peptide
  Seed: DPRMCSLMQGSTLPR
DPRMLSLLQASTFPR

SEQ ID NO: 59710 - protein, 15 aa, Artificial Sequence
  Description of Artificial Sequence: Synthetic peptide
  Seed: DPRMCSLMQGSTLPR
DPRMLSLLQASTGPR

SEQ ID NO: 59711 - protein, 15 aa, Artificial Sequence
  Description of Artificial Sequence: Synthetic peptide
  Seed: DPRMCSLMQGSTLPR
DPRMLSLLQASTHPR

SEQ ID NO: 59712 - protein, 15 aa, Artificial Sequence
  Description of Artificial Sequence: Synthetic peptide
  Seed: DPRMCSLMQGSTLPR
DPRMLSLLQASTIPR

SEQ ID NO: 59713 - protein, 15 aa, Artificial Sequence
  Description of Artificial Sequence: Synthetic peptide
  Seed: DPRMCSLMQGSTLPR
DPRMLSLLQASTLPR

SEQ ID NO: 59714 - protein, 15 aa, Artificial Sequence
  Description of Artificial Sequence: Synthetic peptide
  Seed: DPRMCSLMQGSTLPR
DPRMLSLLQASTMPR

SEQ ID NO: 59715 - protein, 15 aa, Artificial Sequence
  Description of Artificial Sequence: Synthetic peptide
  Seed: DPRMCSLMQGSTLPR
DPRMLSLLQASTNPR

SEQ ID NO: 59716 - protein, 15 aa, Artificial Sequence
  Description of Artificial Sequence: Synthetic peptide
  Seed: DPRMCSLMQGSTLPR
DPRMLSLLQASTQPR

SEQ ID NO: 59717 - protein, 15 aa, Artificial Sequence
  Description of Artificial Sequence: Synthetic peptide
  Seed: DPRMCSLMQGSTLPR
DPRMLSLLQASTSPR

SEQ ID NO: 59718 - protein, 15 aa, Artificial Sequence
  Description of Artificial Sequence: Synthetic peptide
  Seed: DPRMCSLMQGSTLPR
DPRMLSLLQASTTPR

SEQ ID NO: 59719 - protein, 15 aa, Artificial Sequence
  Description of Artificial Sequence: Synthetic peptide
  Seed: DPRMCSLMQGSTLPR
DPRMLSLLQASTVPR

SEQ ID NO: 59720 - protein, 15 aa, Artificial Sequence
  Description of Artificial Sequence: Synthetic peptide
  Seed: DPRMCSLMQGSTLPR
DPRMLSLLQGSTAPR

SEQ ID NO: 59721 - protein, 15 aa, Artificial Sequence
  Description of Artificial Sequence: Synthetic peptide
  Seed: DPRMCSLMQGSTLPR
DPRMLSLLQGSTCPR

SEQ ID NO: 59722 - protein, 15 aa, Artificial Sequence
  Description of Artificial Sequence: Synthetic peptide
  Seed: DPRMCSLMQGSTLPR
DPRMLSLLQGSTFPR

SEQ ID NO: 59723 - protein, 15 aa, Artificial Sequence
  Description of Artificial Sequence: Synthetic peptide
  Seed: DPRMCSLMQGSTLPR
DPRMLSLLQGSTGPR

SEQ ID NO: 59724 - protein, 15 aa, Artificial Sequence
  Description of Artificial Sequence: Synthetic peptide
  Seed: DPRMCSLMQGSTLPR
DPRMLSLLQGSTIPR

SEQ ID NO: 59725 - protein, 15 aa, Artificial Sequence
  Description of Artificial Sequence: Synthetic peptide
  Seed: DPRMCSLMQGSTLPR
DPRMLSLLQGSTLPR

SEQ ID NO: 59726 - protein, 15 aa, Artificial Sequence
  Description of Artificial Sequence: Synthetic peptide
  Seed: DPRMCSLMQGSTLPR
DPRMLSLLQGSTMPR

SEQ ID NO: 59727 - protein, 15 aa, Artificial Sequence
  Description of Artificial Sequence: Synthetic peptide
  Seed: DPRMCSLMQGSTLPR
DPRMLSLLQGSTNPR

SEQ ID NO: 59728 - protein, 15 aa, Artificial Sequence
  Description of Artificial Sequence: Synthetic peptide
  Seed: DPRMCSLMQGSTLPR
DPRMLSLLQGSTSPR

SEQ ID NO: 59729 - protein, 15 aa, Artificial Sequence
  Description of Artificial Sequence: Synthetic peptide
  Seed: DPRMCSLMQGSTLPR
DPRMLSLLQGSTTPR

SEQ ID NO: 59730 - protein, 15 aa, Artificial Sequence
  Description of Artificial Sequence: Synthetic peptide
  Seed: DPRMCSLMQGSTLPR
DPRMLSLLQGSTVPR

SEQ ID NO: 59731 - protein, 15 aa, Artificial Sequence
  Description of Artificial Sequence: Synthetic peptide
  Seed: DPRMCSLMQGSTLPR
DPRMLSLLQISTAPR

SEQ ID NO: 59732 - protein, 15 aa, Artificial Sequence
  Description of Artificial Sequence: Synthetic peptide
  Seed: DPRMCSLMQGSTLPR
DPRMLSLLQISTIPR

SEQ ID NO: 59733 - protein, 15 aa, Artificial Sequence
  Description of Artificial Sequence: Synthetic peptide
  Seed: DPRMCSLMQGSTLPR
DPRMLSLLQISTLPR

SEQ ID NO: 59734 - protein, 15 aa, Artificial Sequence
  Description of Artificial Sequence: Synthetic peptide
  Seed: DPRMCSLMQGSTLPR
DPRMLSLLQISTNPR

SEQ ID NO: 59735 - protein, 15 aa, Artificial Sequence
  Description of Artificial Sequence: Synthetic peptide
  Seed: DPRMCSLMQGSTLPR
DPRMLSLLQISTSPR

SEQ ID NO: 59736 - protein, 15 aa, Artificial Sequence
  Description of Artificial Sequence: Synthetic peptide
  Seed: DPRMCSLMQGSTLPR
DPRMLSLLQISTTPR

SEQ ID NO: 59737 - protein, 15 aa, Artificial Sequence
  Description of Artificial Sequence: Synthetic peptide
  Seed: DPRMCSLMQGSTLPR
DPRMLSLLQISTVPR

SEQ ID NO: 59738 - protein, 15 aa, Artificial Sequence
  Description of Artificial Sequence: Synthetic peptide
  Seed: DPRMCSLMQGSTLPR
DPRMLSLLQLSTAPR

SEQ ID NO: 59739 - protein, 15 aa, Artificial Sequence
  Description of Artificial Sequence: Synthetic peptide
  Seed: DPRMCSLMQGSTLPR
DPRMLSLLQNSTAPR

SEQ ID NO: 59740 - protein, 15 aa, Artificial Sequence
  Description of Artificial Sequence: Synthetic peptide
  Seed: DPRMCSLMQGSTLPR
DPRMLSLLQNSTIPR

SEQ ID NO: 59741 - protein, 15 aa, Artificial Sequence
  Description of Artificial Sequence: Synthetic peptide
  Seed: DPRMCSLMQGSTLPR
DPRMLSLLQNSTLPR

SEQ ID NO: 59742 - protein, 15 aa, Artificial Sequence
  Description of Artificial Sequence: Synthetic peptide
  Seed: DPRMCSLMQGSTLPR
DPRMLSLLQNSTMPR

SEQ ID NO: 59743 - protein, 15 aa, Artificial Sequence
  Description of Artificial Sequence: Synthetic peptide
  Seed: DPRMCSLMQGSTLPR
DPRMLSLLQNSTSPR

SEQ ID NO: 59744 - protein, 15 aa, Artificial Sequence
  Description of Artificial Sequence: Synthetic peptide
  Seed: DPRMCSLMQGSTLPR
DPRMLSLLQNSTTPR

SEQ ID NO: 59745 - protein, 15 aa, Artificial Sequence
  Description of Artificial Sequence: Synthetic peptide
  Seed: DPRMCSLMQGSTLPR
DPRMLSLLQNSTVPR

SEQ ID NO: 59746 - protein, 15 aa, Artificial Sequence
  Description of Artificial Sequence: Synthetic peptide
  Seed: DPRMCSLMQGSTLPR
DPRMLSLLQPSTAPR

SEQ ID NO: 59747 - protein, 15 aa, Artificial Sequence
  Description of Artificial Sequence: Synthetic peptide
  Seed: DPRMCSLMQGSTLPR
DPRMLSLLQPSTGPR

SEQ ID NO: 59748 - protein, 15 aa, Artificial Sequence
  Description of Artificial Sequence: Synthetic peptide
  Seed: DPRMCSLMQGSTLPR
DPRMLSLLQPSTIPR

SEQ ID NO: 59749 - protein, 15 aa, Artificial Sequence
  Description of Artificial Sequence: Synthetic peptide
  Seed: DPRMCSLMQGSTLPR
DPRMLSLLQPSTLPR

SEQ ID NO: 59750 - protein, 15 aa, Artificial Sequence
  Description of Artificial Sequence: Synthetic peptide
  Seed: DPRMCSLMQGSTLPR
DPRMLSLLQPSTMPR

SEQ ID NO: 59751 - protein, 15 aa, Artificial Sequence
  Description of Artificial Sequence: Synthetic peptide
  Seed: DPRMCSLMQGSTLPR
DPRMLSLLQPSTNPR

SEQ ID NO: 59752 - protein, 15 aa, Artificial Sequence
  Description of Artificial Sequence: Synthetic peptide
  Seed: DPRMCSLMQGSTLPR
DPRMLSLLQPSTSPR

SEQ ID NO: 59753 - protein, 15 aa, Artificial Sequence
  Description of Artificial Sequence: Synthetic peptide
  Seed: DPRMCSLMQGSTLPR
DPRMLSLLQPSTTPR

SEQ ID NO: 59754 - protein, 15 aa, Artificial Sequence
  Description of Artificial Sequence: Synthetic peptide
  Seed: DPRMCSLMQGSTLPR
DPRMLSLLQPSTVPR

SEQ ID NO: 59755 - protein, 15 aa, Artificial Sequence
  Description of Artificial Sequence: Synthetic peptide
  Seed: DPRMCSLMQGSTLPR
DPRMLSLLQSSTAPR

SEQ ID NO: 59756 - protein, 15 aa, Artificial Sequence
  Description of Artificial Sequence: Synthetic peptide
  Seed: DPRMCSLMQGSTLPR
DPRMLSLLQSSTCPR

SEQ ID NO: 59757 - protein, 15 aa, Artificial Sequence
  Description of Artificial Sequence: Synthetic peptide
  Seed: DPRMCSLMQGSTLPR
DPRMLSLLQSSTGPR

SEQ ID NO: 59758 - protein, 15 aa, Artificial Sequence
  Description of Artificial Sequence: Synthetic peptide
  Seed: DPRMCSLMQGSTLPR
DPRMLSLLQSSTIPR

SEQ ID NO: 59759 - protein, 15 aa, Artificial Sequence
  Description of Artificial Sequence: Synthetic peptide
  Seed: DPRMCSLMQGSTLPR
DPRMLSLLQSSTLPR

SEQ ID NO: 59760 - protein, 15 aa, Artificial Sequence
  Description of Artificial Sequence: Synthetic peptide
  Seed: DPRMCSLMQGSTLPR
DPRMLSLLQSSTMPR

SEQ ID NO: 59761 - protein, 15 aa, Artificial Sequence
  Description of Artificial Sequence: Synthetic peptide
  Seed: DPRMCSLMQGSTLPR
DPRMLSLLQSSTNPR

SEQ ID NO: 59762 - protein, 15 aa, Artificial Sequence
  Description of Artificial Sequence: Synthetic peptide
  Seed: DPRMCSLMQGSTLPR
DPRMLSLLQSSTSPR

SEQ ID NO: 59763 - protein, 15 aa, Artificial Sequence
  Description of Artificial Sequence: Synthetic peptide
  Seed: DPRMCSLMQGSTLPR
DPRMLSLLQSSTTPR

SEQ ID NO: 59764 - protein, 15 aa, Artificial Sequence
  Description of Artificial Sequence: Synthetic peptide
  Seed: DPRMCSLMQGSTLPR
DPRMLSLLQSSTVPR

SEQ ID NO: 59765 - protein, 15 aa, Artificial Sequence
  Description of Artificial Sequence: Synthetic peptide
  Seed: DPRMCSLMQGSTLPR
DPRMLSLLQTSTAPR

SEQ ID NO: 59766 - protein, 15 aa, Artificial Sequence
  Description of Artificial Sequence: Synthetic peptide
  Seed: DPRMCSLMQGSTLPR
DPRMLSLLQTSTIPR

SEQ ID NO: 59767 - protein, 15 aa, Artificial Sequence
  Description of Artificial Sequence: Synthetic peptide
  Seed: DPRMCSLMQGSTLPR
DPRMLSLLQTSTLPR

SEQ ID NO: 59768 - protein, 15 aa, Artificial Sequence
  Description of Artificial Sequence: Synthetic peptide
  Seed: DPRMCSLMQGSTLPR
DPRMLSLLQTSTMPR

SEQ ID NO: 59769 - protein, 15 aa, Artificial Sequence
  Description of Artificial Sequence: Synthetic peptide
  Seed: DPRMCSLMQGSTLPR
DPRMLSLLQTSTNPR

SEQ ID NO: 59770 - protein, 15 aa, Artificial Sequence
  Description of Artificial Sequence: Synthetic peptide
  Seed: DPRMCSLMQGSTLPR
DPRMLSLLQTSTSPR

SEQ ID NO: 59771 - protein, 15 aa, Artificial Sequence
  Description of Artificial Sequence: Synthetic peptide
  Seed: DPRMCSLMQGSTLPR
DPRMLSLLQTSTTPR

SEQ ID NO: 59772 - protein, 15 aa, Artificial Sequence
  Description of Artificial Sequence: Synthetic peptide
  Seed: DPRMCSLMQGSTLPR
DPRMLSLLQTSTVPR

SEQ ID NO: 59773 - protein, 15 aa, Artificial Sequence
  Description of Artificial Sequence: Synthetic peptide
  Seed: DPRMCSLMQGSTLPR
DPRMLSLLQVSTAPR

SEQ ID NO: 59774 - protein, 15 aa, Artificial Sequence
  Description of Artificial Sequence: Synthetic peptide
  Seed: DPRMCSLMQGSTLPR
DPRMLSLLQVSTIPR

SEQ ID NO: 59775 - protein, 15 aa, Artificial Sequence
  Description of Artificial Sequence: Synthetic peptide
  Seed: DPRMCSLMQGSTLPR
DPRMLSLLQVSTLPR

SEQ ID NO: 59776 - protein, 15 aa, Artificial Sequence
  Description of Artificial Sequence: Synthetic peptide
  Seed: DPRMCSLMQGSTLPR
DPRMLSLLQVSTMPR

SEQ ID NO: 59777 - protein, 15 aa, Artificial Sequence
  Description of Artificial Sequence: Synthetic peptide
  Seed: DPRMCSLMQGSTLPR
DPRMLSLLQVSTNPR

SEQ ID NO: 59778 - protein, 15 aa, Artificial Sequence
  Description of Artificial Sequence: Synthetic peptide
  Seed: DPRMCSLMQGSTLPR
DPRMLSLLQVSTSPR

SEQ ID NO: 59779 - protein, 15 aa, Artificial Sequence
  Description of Artificial Sequence: Synthetic peptide
  Seed: DPRMCSLMQGSTLPR
DPRMLSLLQVSTTPR

SEQ ID NO: 59780 - protein, 15 aa, Artificial Sequence
  Description of Artificial Sequence: Synthetic peptide
  Seed: DPRMCSLMQGSTLPR
DPRMLSLLQVSTVPR

SEQ ID NO: 59781 - protein, 15 aa, Artificial Sequence
  Description of Artificial Sequence: Synthetic peptide
  Seed: DPRMCSLMQGSTLPR
DPRMLSLMQASTAPR

SEQ ID NO: 59782 - protein, 15 aa, Artificial Sequence
  Description of Artificial Sequence: Synthetic peptide
  Seed: DPRMCSLMQGSTLPR
DPRMLSLMQASTCPR

SEQ ID NO: 59783 - protein, 15 aa, Artificial Sequence
  Description of Artificial Sequence: Synthetic peptide
  Seed: DPRMCSLMQGSTLPR
DPRMLSLMQASTFPR

SEQ ID NO: 59784 - protein, 15 aa, Artificial Sequence
  Description of Artificial Sequence: Synthetic peptide
  Seed: DPRMCSLMQGSTLPR
DPRMLSLMQASTGPR

SEQ ID NO: 59785 - protein, 15 aa, Artificial Sequence
  Description of Artificial Sequence: Synthetic peptide
  Seed: DPRMCSLMQGSTLPR
DPRMLSLMQASTHPR

SEQ ID NO: 59786 - protein, 15 aa, Artificial Sequence
  Description of Artificial Sequence: Synthetic peptide
  Seed: DPRMCSLMQGSTLPR
DPRMLSLMQASTIPR

SEQ ID NO: 59787 - protein, 15 aa, Artificial Sequence
  Description of Artificial Sequence: Synthetic peptide
  Seed: DPRMCSLMQGSTLPR
DPRMLSLMQASTLPR

SEQ ID NO: 59788 - protein, 15 aa, Artificial Sequence
  Description of Artificial Sequence: Synthetic peptide
  Seed: DPRMCSLMQGSTLPR
DPRMLSLMQASTMPR

SEQ ID NO: 59789 - protein, 15 aa, Artificial Sequence
  Description of Artificial Sequence: Synthetic peptide
  Seed: DPRMCSLMQGSTLPR
DPRMLSLMQASTNPR

SEQ ID NO: 59790 - protein, 15 aa, Artificial Sequence
  Description of Artificial Sequence: Synthetic peptide
  Seed: DPRMCSLMQGSTLPR
DPRMLSLMQASTQPR

SEQ ID NO: 59791 - protein, 15 aa, Artificial Sequence
  Description of Artificial Sequence: Synthetic peptide
  Seed: DPRMCSLMQGSTLPR
DPRMLSLMQASTRPR

SEQ ID NO: 59792 - protein, 15 aa, Artificial Sequence
  Description of Artificial Sequence: Synthetic peptide
  Seed: DPRMCSLMQGSTLPR
DPRMLSLMQASTSPR

SEQ ID NO: 59793 - protein, 15 aa, Artificial Sequence
  Description of Artificial Sequence: Synthetic peptide
  Seed: DPRMCSLMQGSTLPR
DPRMLSLMQASTTPR

SEQ ID NO: 59794 - protein, 15 aa, Artificial Sequence
  Description of Artificial Sequence: Synthetic peptide
  Seed: DPRMCSLMQGSTLPR
DPRMLSLMQASTVPR

SEQ ID NO: 59795 - protein, 15 aa, Artificial Sequence
  Description of Artificial Sequence: Synthetic peptide
  Seed: DPRMCSLMQGSTLPR
DPRMLSLMQASTYPR

SEQ ID NO: 59796 - protein, 15 aa, Artificial Sequence
  Description of Artificial Sequence: Synthetic peptide
  Seed: DPRMCSLMQGSTLPR
DPRMLSLMQGSTAPR

SEQ ID NO: 59797 - protein, 15 aa, Artificial Sequence
  Description of Artificial Sequence: Synthetic peptide
  Seed: DPRMCSLMQGSTLPR
DPRMLSLMQGSTCPR

SEQ ID NO: 59798 - protein, 15 aa, Artificial Sequence
  Description of Artificial Sequence: Synthetic peptide
  Seed: DPRMCSLMQGSTLPR
DPRMLSLMQGSTFPR

SEQ ID NO: 59799 - protein, 15 aa, Artificial Sequence
  Description of Artificial Sequence: Synthetic peptide
  Seed: DPRMCSLMQGSTLPR
DPRMLSLMQGSTGPR

SEQ ID NO: 59800 - protein, 15 aa, Artificial Sequence
  Description of Artificial Sequence: Synthetic peptide
  Seed: DPRMCSLMQGSTLPR
DPRMLSLMQGSTIPR

SEQ ID NO: 59801 - protein, 15 aa, Artificial Sequence
  Description of Artificial Sequence: Synthetic peptide
  Seed: DPRMCSLMQGSTLPR
DPRMLSLMQGSTLPR

SEQ ID NO: 59802 - protein, 15 aa, Artificial Sequence
  Description of Artificial Sequence: Synthetic peptide
  Seed: DPRMCSLMQGSTLPR
DPRMLSLMQGSTMPR

SEQ ID NO: 59803 - protein, 15 aa, Artificial Sequence
  Description of Artificial Sequence: Synthetic peptide
  Seed: DPRMCSLMQGSTLPR
DPRMLSLMQGSTNPR

SEQ ID NO: 59804 - protein, 15 aa, Artificial Sequence
  Description of Artificial Sequence: Synthetic peptide
  Seed: DPRMCSLMQGSTLPR
DPRMLSLMQGSTSPR

SEQ ID NO: 59805 - protein, 15 aa, Artificial Sequence
  Description of Artificial Sequence: Synthetic peptide
  Seed: DPRMCSLMQGSTLPR
DPRMLSLMQGSTTPR

SEQ ID NO: 59806 - protein, 15 aa, Artificial Sequence
  Description of Artificial Sequence: Synthetic peptide
  Seed: DPRMCSLMQGSTLPR
DPRMLSLMQGSTVPR

SEQ ID NO: 59807 - protein, 15 aa, Artificial Sequence
  Description of Artificial Sequence: Synthetic peptide
  Seed: DPRMCSLMQGSTLPR
DPRMLSLMQISTAPR

SEQ ID NO: 59808 - protein, 15 aa, Artificial Sequence
  Description of Artificial Sequence: Synthetic peptide
  Seed: DPRMCSLMQGSTLPR
DPRMLSLMQISTIPR

SEQ ID NO: 59809 - protein, 15 aa, Artificial Sequence
  Description of Artificial Sequence: Synthetic peptide
  Seed: DPRMCSLMQGSTLPR
DPRMLSLMQISTLPR

SEQ ID NO: 59810 - protein, 15 aa, Artificial Sequence
  Description of Artificial Sequence: Synthetic peptide
  Seed: DPRMCSLMQGSTLPR
DPRMLSLMQISTMPR

SEQ ID NO: 59811 - protein, 15 aa, Artificial Sequence
  Description of Artificial Sequence: Synthetic peptide
  Seed: DPRMCSLMQGSTLPR
DPRMLSLMQISTNPR

SEQ ID NO: 59812 - protein, 15 aa, Artificial Sequence
  Description of Artificial Sequence: Synthetic peptide
  Seed: DPRMCSLMQGSTLPR
DPRMLSLMQISTSPR

SEQ ID NO: 59813 - protein, 15 aa, Artificial Sequence
  Description of Artificial Sequence: Synthetic peptide
  Seed: DPRMCSLMQGSTLPR
DPRMLSLMQISTTPR

SEQ ID NO: 59814 - protein, 15 aa, Artificial Sequence
  Description of Artificial Sequence: Synthetic peptide
  Seed: DPRMCSLMQGSTLPR
DPRMLSLMQISTVPR

SEQ ID NO: 59815 - protein, 15 aa, Artificial Sequence
  Description of Artificial Sequence: Synthetic peptide
  Seed: DPRMCSLMQGSTLPR
DPRMLSLMQLSTAPR

SEQ ID NO: 59816 - protein, 15 aa, Artificial Sequence
  Description of Artificial Sequence: Synthetic peptide
  Seed: DPRMCSLMQGSTLPR
DPRMLSLMQLSTNPR

SEQ ID NO: 59817 - protein, 15 aa, Artificial Sequence
  Description of Artificial Sequence: Synthetic peptide
  Seed: DPRMCSLMQGSTLPR
DPRMLSLMQLSTSPR

SEQ ID NO: 59818 - protein, 15 aa, Artificial Sequence
  Description of Artificial Sequence: Synthetic peptide
  Seed: DPRMCSLMQGSTLPR
DPRMLSLMQMSTAPR

SEQ ID NO: 59819 - protein, 15 aa, Artificial Sequence
  Description of Artificial Sequence: Synthetic peptide
  Seed: DPRMCSLMQGSTLPR
DPRMLSLMQNSTAPR

SEQ ID NO: 59820 - protein, 15 aa, Artificial Sequence
  Description of Artificial Sequence: Synthetic peptide
  Seed: DPRMCSLMQGSTLPR
DPRMLSLMQNSTGPR

SEQ ID NO: 59821 - protein, 15 aa, Artificial Sequence
  Description of Artificial Sequence: Synthetic peptide
  Seed: DPRMCSLMQGSTLPR
DPRMLSLMQNSTIPR

SEQ ID NO: 59822 - protein, 15 aa, Artificial Sequence
  Description of Artificial Sequence: Synthetic peptide
  Seed: DPRMCSLMQGSTLPR
DPRMLSLMQNSTLPR

SEQ ID NO: 59823 - protein, 15 aa, Artificial Sequence
  Description of Artificial Sequence: Synthetic peptide
  Seed: DPRMCSLMQGSTLPR
DPRMLSLMQNSTMPR

SEQ ID NO: 59824 - protein, 15 aa, Artificial Sequence
  Description of Artificial Sequence: Synthetic peptide
  Seed: DPRMCSLMQGSTLPR
DPRMLSLMQNSTSPR

SEQ ID NO: 59825 - protein, 15 aa, Artificial Sequence
  Description of Artificial Sequence: Synthetic peptide
  Seed: DPRMCSLMQGSTLPR
DPRMLSLMQNSTTPR

SEQ ID NO: 59826 - protein, 15 aa, Artificial Sequence
  Description of Artificial Sequence: Synthetic peptide
  Seed: DPRMCSLMQGSTLPR
DPRMLSLMQNSTVPR

SEQ ID NO: 59827 - protein, 15 aa, Artificial Sequence
  Description of Artificial Sequence: Synthetic peptide
  Seed: DPRMCSLMQGSTLPR
DPRMLSLMQPSTAPR

SEQ ID NO: 59828 - protein, 15 aa, Artificial Sequence
  Description of Artificial Sequence: Synthetic peptide
  Seed: DPRMCSLMQGSTLPR
DPRMLSLMQPSTIPR

SEQ ID NO: 59829 - protein, 15 aa, Artificial Sequence
  Description of Artificial Sequence: Synthetic peptide
  Seed: DPRMCSLMQGSTLPR
DPRMLSLMQPSTLPR

SEQ ID NO: 59830 - protein, 15 aa, Artificial Sequence
  Description of Artificial Sequence: Synthetic peptide
  Seed: DPRMCSLMQGSTLPR
DPRMLSLMQPSTMPR

SEQ ID NO: 59831 - protein, 15 aa, Artificial Sequence
  Description of Artificial Sequence: Synthetic peptide
  Seed: DPRMCSLMQGSTLPR
DPRMLSLMQPSTNPR

SEQ ID NO: 59832 - protein, 15 aa, Artificial Sequence
  Description of Artificial Sequence: Synthetic peptide
  Seed: DPRMCSLMQGSTLPR
DPRMLSLMQPSTSPR

SEQ ID NO: 59833 - protein, 15 aa, Artificial Sequence
  Description of Artificial Sequence: Synthetic peptide
  Seed: DPRMCSLMQGSTLPR
DPRMLSLMQPSTTPR

SEQ ID NO: 59834 - protein, 15 aa, Artificial Sequence
  Description of Artificial Sequence: Synthetic peptide
  Seed: DPRMCSLMQGSTLPR
DPRMLSLMQPSTVPR

SEQ ID NO: 59835 - protein, 15 aa, Artificial Sequence
  Description of Artificial Sequence: Synthetic peptide
  Seed: DPRMCSLMQGSTLPR
DPRMLSLMQSSTAPR

SEQ ID NO: 59836 - protein, 15 aa, Artificial Sequence
  Description of Artificial Sequence: Synthetic peptide
  Seed: DPRMCSLMQGSTLPR
DPRMLSLMQSSTCPR

SEQ ID NO: 59837 - protein, 15 aa, Artificial Sequence
  Description of Artificial Sequence: Synthetic peptide
  Seed: DPRMCSLMQGSTLPR
DPRMLSLMQSSTGPR

SEQ ID NO: 59838 - protein, 15 aa, Artificial Sequence
  Description of Artificial Sequence: Synthetic peptide
  Seed: DPRMCSLMQGSTLPR
DPRMLSLMQSSTIPR

SEQ ID NO: 59839 - protein, 15 aa, Artificial Sequence
  Description of Artificial Sequence: Synthetic peptide
  Seed: DPRMCSLMQGSTLPR
DPRMLSLMQSSTLPR

SEQ ID NO: 59840 - protein, 15 aa, Artificial Sequence
  Description of Artificial Sequence: Synthetic peptide
  Seed: DPRMCSLMQGSTLPR
DPRMLSLMQSSTMPR

SEQ ID NO: 59841 - protein, 15 aa, Artificial Sequence
  Description of Artificial Sequence: Synthetic peptide
  Seed: DPRMCSLMQGSTLPR
DPRMLSLMQSSTNPR

SEQ ID NO: 59842 - protein, 15 aa, Artificial Sequence
  Description of Artificial Sequence: Synthetic peptide
  Seed: DPRMCSLMQGSTLPR
DPRMLSLMQSSTSPR

SEQ ID NO: 59843 - protein, 15 aa, Artificial Sequence
  Description of Artificial Sequence: Synthetic peptide
  Seed: DPRMCSLMQGSTLPR
DPRMLSLMQSSTTPR

SEQ ID NO: 59844 - protein, 15 aa, Artificial Sequence
  Description of Artificial Sequence: Synthetic peptide
  Seed: DPRMCSLMQGSTLPR
DPRMLSLMQSSTVPR

SEQ ID NO: 59845 - protein, 15 aa, Artificial Sequence
  Description of Artificial Sequence: Synthetic peptide
  Seed: DPRMCSLMQGSTLPR
DPRMLSLMQTSTAPR

SEQ ID NO: 59846 - protein, 15 aa, Artificial Sequence
  Description of Artificial Sequence: Synthetic peptide
  Seed: DPRMCSLMQGSTLPR
DPRMLSLMQTSTIPR

SEQ ID NO: 59847 - protein, 15 aa, Artificial Sequence
  Description of Artificial Sequence: Synthetic peptide
  Seed: DPRMCSLMQGSTLPR
DPRMLSLMQTSTLPR

SEQ ID NO: 59848 - protein, 15 aa, Artificial Sequence
  Description of Artificial Sequence: Synthetic peptide
  Seed: DPRMCSLMQGSTLPR
DPRMLSLMQTSTMPR

SEQ ID NO: 59849 - protein, 15 aa, Artificial Sequence
  Description of Artificial Sequence: Synthetic peptide
  Seed: DPRMCSLMQGSTLPR
DPRMLSLMQTSTNPR

SEQ ID NO: 59850 - protein, 15 aa, Artificial Sequence
  Description of Artificial Sequence: Synthetic peptide
  Seed: DPRMCSLMQGSTLPR
DPRMLSLMQTSTSPR

SEQ ID NO: 59851 - protein, 15 aa, Artificial Sequence
  Description of Artificial Sequence: Synthetic peptide
  Seed: DPRMCSLMQGSTLPR
DPRMLSLMQTSTTPR

SEQ ID NO: 59852 - protein, 15 aa, Artificial Sequence
  Description of Artificial Sequence: Synthetic peptide
  Seed: DPRMCSLMQGSTLPR
DPRMLSLMQTSTVPR

SEQ ID NO: 59853 - protein, 15 aa, Artificial Sequence
  Description of Artificial Sequence: Synthetic peptide
  Seed: DPRMCSLMQGSTLPR
DPRMLSLMQVSTAPR

SEQ ID NO: 59854 - protein, 15 aa, Artificial Sequence
  Description of Artificial Sequence: Synthetic peptide
  Seed: DPRMCSLMQGSTLPR
DPRMLSLMQVSTHPR

SEQ ID NO: 59855 - protein, 15 aa, Artificial Sequence
  Description of Artificial Sequence: Synthetic peptide
  Seed: DPRMCSLMQGSTLPR
DPRMLSLMQVSTIPR

SEQ ID NO: 59856 - protein, 15 aa, Artificial Sequence
  Description of Artificial Sequence: Synthetic peptide
  Seed: DPRMCSLMQGSTLPR
DPRMLSLMQVSTLPR

SEQ ID NO: 59857 - protein, 15 aa, Artificial Sequence
  Description of Artificial Sequence: Synthetic peptide
  Seed: DPRMCSLMQGSTLPR
DPRMLSLMQVSTMPR

SEQ ID NO: 59858 - protein, 15 aa, Artificial Sequence
  Description of Artificial Sequence: Synthetic peptide
  Seed: DPRMCSLMQGSTLPR
DPRMLSLMQVSTNPR

SEQ ID NO: 59859 - protein, 15 aa, Artificial Sequence
  Description of Artificial Sequence: Synthetic peptide
  Seed: DPRMCSLMQGSTLPR
DPRMLSLMQVSTSPR

SEQ ID NO: 59860 - protein, 15 aa, Artificial Sequence
  Description of Artificial Sequence: Synthetic peptide
  Seed: DPRMCSLMQGSTLPR
DPRMLSLMQVSTTPR

SEQ ID NO: 59861 - protein, 15 aa, Artificial Sequence
  Description of Artificial Sequence: Synthetic peptide
  Seed: DPRMCSLMQGSTLPR
DPRMLSLMQVSTVPR

SEQ ID NO: 59862 - protein, 15 aa, Artificial Sequence
  Description of Artificial Sequence: Synthetic peptide
  Seed: DPRMCSLMQGSTLPR
DPRMLSLQQASTAPR

SEQ ID NO: 59863 - protein, 15 aa, Artificial Sequence
  Description of Artificial Sequence: Synthetic peptide
  Seed: DPRMCSLMQGSTLPR
DPRMLSLQQASTIPR

SEQ ID NO: 59864 - protein, 15 aa, Artificial Sequence
  Description of Artificial Sequence: Synthetic peptide
  Seed: DPRMCSLMQGSTLPR
DPRMLSLQQASTLPR

SEQ ID NO: 59865 - protein, 15 aa, Artificial Sequence
  Description of Artificial Sequence: Synthetic peptide
  Seed: DPRMCSLMQGSTLPR
DPRMLSLQQASTMPR

SEQ ID NO: 59866 - protein, 15 aa, Artificial Sequence
  Description of Artificial Sequence: Synthetic peptide
  Seed: DPRMCSLMQGSTLPR
DPRMLSLQQASTTPR

SEQ ID NO: 59867 - protein, 15 aa, Artificial Sequence
  Description of Artificial Sequence: Synthetic peptide
  Seed: DPRMCSLMQGSTLPR
DPRMLSLQQASTVPR

SEQ ID NO: 59868 - protein, 15 aa, Artificial Sequence
  Description of Artificial Sequence: Synthetic peptide
  Seed: DPRMCSLMQGSTLPR
DPRMLSLQQGSTAPR

SEQ ID NO: 59869 - protein, 15 aa, Artificial Sequence
  Description of Artificial Sequence: Synthetic peptide
  Seed: DPRMCSLMQGSTLPR
DPRMLSLQQGSTIPR

SEQ ID NO: 59870 - protein, 15 aa, Artificial Sequence
  Description of Artificial Sequence: Synthetic peptide
  Seed: DPRMCSLMQGSTLPR
DPRMLSLQQGSTLPR

SEQ ID NO: 59871 - protein, 15 aa, Artificial Sequence
  Description of Artificial Sequence: Synthetic peptide
  Seed: DPRMCSLMQGSTLPR
DPRMLSLQQGSTVPR

SEQ ID NO: 59872 - protein, 15 aa, Artificial Sequence
  Description of Artificial Sequence: Synthetic peptide
  Seed: DPRMCSLMQGSTLPR
DPRMLSLQQPSTLPR

SEQ ID NO: 59873 - protein, 15 aa, Artificial Sequence
  Description of Artificial Sequence: Synthetic peptide
  Seed: DPRMCSLMQGSTLPR
DPRMLSLQQSSTAPR

SEQ ID NO: 59874 - protein, 15 aa, Artificial Sequence
  Description of Artificial Sequence: Synthetic peptide
  Seed: DPRMCSLMQGSTLPR
DPRMLSLQQSSTIPR

SEQ ID NO: 59875 - protein, 15 aa, Artificial Sequence
  Description of Artificial Sequence: Synthetic peptide
  Seed: DPRMCSLMQGSTLPR
DPRMLSLQQSSTLPR

SEQ ID NO: 59876 - protein, 15 aa, Artificial Sequence
  Description of Artificial Sequence: Synthetic peptide
  Seed: DPRMCSLMQGSTLPR
DPRMLSLQQSSTVPR

SEQ ID NO: 59877 - protein, 15 aa, Artificial Sequence
  Description of Artificial Sequence: Synthetic peptide
  Seed: DPRMCSLMQGSTLPR
DPRMLSLSQASTIPR

SEQ ID NO: 59878 - protein, 15 aa, Artificial Sequence
  Description of Artificial Sequence: Synthetic peptide
  Seed: DPRMCSLMQGSTLPR
DPRMLSLSQASTLPR

SEQ ID NO: 59879 - protein, 15 aa, Artificial Sequence
  Description of Artificial Sequence: Synthetic peptide
  Seed: DPRMCSLMQGSTLPR
DPRMLSLSQASTVPR

SEQ ID NO: 59880 - protein, 15 aa, Artificial Sequence
  Description of Artificial Sequence: Synthetic peptide
  Seed: DPRMCSLMQGSTLPR
DPRMLSLSQGSTIPR

SEQ ID NO: 59881 - protein, 15 aa, Artificial Sequence
  Description of Artificial Sequence: Synthetic peptide
  Seed: DPRMCSLMQGSTLPR
DPRMLSLSQSSTIPR

SEQ ID NO: 59882 - protein, 15 aa, Artificial Sequence
  Description of Artificial Sequence: Synthetic peptide
  Seed: DPRMCSLMQGSTLPR
DPRMLSLSQSSTLPR

SEQ ID NO: 59883 - protein, 15 aa, Artificial Sequence
  Description of Artificial Sequence: Synthetic peptide
  Seed: DPRMCSLMQGSTLPR
DPRMLSLSQSSTVPR

SEQ ID NO: 59884 - protein, 15 aa, Artificial Sequence
  Description of Artificial Sequence: Synthetic peptide
  Seed: DPRMCSLMQGSTLPR
DPRMLSLTQASTIPR

SEQ ID NO: 59885 - protein, 15 aa, Artificial Sequence
  Description of Artificial Sequence: Synthetic peptide
  Seed: DPRMCSLMQGSTLPR
DPRMLSLTQASTLPR

SEQ ID NO: 59886 - protein, 15 aa, Artificial Sequence
  Description of Artificial Sequence: Synthetic peptide
  Seed: DPRMCSLMQGSTLPR
DPRMLSLTQASTVPR

SEQ ID NO: 59887 - protein, 15 aa, Artificial Sequence
  Description of Artificial Sequence: Synthetic peptide
  Seed: DPRMCSLMQGSTLPR
DPRMLSLTQGSTIPR

SEQ ID NO: 59888 - protein, 15 aa, Artificial Sequence
  Description of Artificial Sequence: Synthetic peptide
  Seed: DPRMCSLMQGSTLPR
DPRMLSLTQGSTLPR

SEQ ID NO: 59889 - protein, 15 aa, Artificial Sequence
  Description of Artificial Sequence: Synthetic peptide
  Seed: DPRMCSLMQGSTLPR
DPRMLSLTQGSTVPR

SEQ ID NO: 59890 - protein, 15 aa, Artificial Sequence
  Description of Artificial Sequence: Synthetic peptide
  Seed: DPRMCSLMQGSTLPR
DPRMLSLTQPSTIPR

SEQ ID NO: 59891 - protein, 15 aa, Artificial Sequence
  Description of Artificial Sequence: Synthetic peptide
  Seed: DPRMCSLMQGSTLPR
DPRMLSLTQSSTIPR

SEQ ID NO: 59892 - protein, 15 aa, Artificial Sequence
  Description of Artificial Sequence: Synthetic peptide
  Seed: DPRMCSLMQGSTLPR
DPRMLSLTQSSTLPR

SEQ ID NO: 59893 - protein, 15 aa, Artificial Sequence
  Description of Artificial Sequence: Synthetic peptide
  Seed: DPRMCSLMQGSTLPR
DPRMLSLTQSSTMPR

SEQ ID NO: 59894 - protein, 15 aa, Artificial Sequence
  Description of Artificial Sequence: Synthetic peptide
  Seed: DPRMCSLMQGSTLPR
DPRMLSLTQSSTVPR

SEQ ID NO: 59895 - protein, 15 aa, Artificial Sequence
  Description of Artificial Sequence: Synthetic peptide
  Seed: DPRMCSLMQGSTLPR
DPRMLSLTQTSTIPR

SEQ ID NO: 59896 - protein, 15 aa, Artificial Sequence
  Description of Artificial Sequence: Synthetic peptide
  Seed: DPRMCSLMQGSTLPR
DPRMLSLVQASTAPR

SEQ ID NO: 59897 - protein, 15 aa, Artificial Sequence
  Description of Artificial Sequence: Synthetic peptide
  Seed: DPRMCSLMQGSTLPR
DPRMLSLVQASTIPR

SEQ ID NO: 59898 - protein, 15 aa, Artificial Sequence
  Description of Artificial Sequence: Synthetic peptide
  Seed: DPRMCSLMQGSTLPR
DPRMLSLVQASTLPR

SEQ ID NO: 59899 - protein, 15 aa, Artificial Sequence
  Description of Artificial Sequence: Synthetic peptide
  Seed: DPRMCSLMQGSTLPR
DPRMLSLVQASTMPR

SEQ ID NO: 59900 - protein, 15 aa, Artificial Sequence
  Description of Artificial Sequence: Synthetic peptide
  Seed: DPRMCSLMQGSTLPR
DPRMLSLVQASTSPR

SEQ ID NO: 59901 - protein, 15 aa, Artificial Sequence
  Description of Artificial Sequence: Synthetic peptide
  Seed: DPRMCSLMQGSTLPR
DPRMLSLVQASTTPR

SEQ ID NO: 59902 - protein, 15 aa, Artificial Sequence
  Description of Artificial Sequence: Synthetic peptide
  Seed: DPRMCSLMQGSTLPR
DPRMLSLVQASTVPR

SEQ ID NO: 59903 - protein, 15 aa, Artificial Sequence
  Description of Artificial Sequence: Synthetic peptide
  Seed: DPRMCSLMQGSTLPR
DPRMLSLVQGSTAPR

SEQ ID NO: 59904 - protein, 15 aa, Artificial Sequence
  Description of Artificial Sequence: Synthetic peptide
  Seed: DPRMCSLMQGSTLPR
DPRMLSLVQGSTIPR

SEQ ID NO: 59905 - protein, 15 aa, Artificial Sequence
  Description of Artificial Sequence: Synthetic peptide
  Seed: DPRMCSLMQGSTLPR
DPRMLSLVQGSTLPR

SEQ ID NO: 59906 - protein, 15 aa, Artificial Sequence
  Description of Artificial Sequence: Synthetic peptide
  Seed: DPRMCSLMQGSTLPR
DPRMLSLVQGSTVPR

SEQ ID NO: 59907 - protein, 15 aa, Artificial Sequence
  Description of Artificial Sequence: Synthetic peptide
  Seed: DPRMCSLMQGSTLPR
DPRMLSLVQPSTIPR

SEQ ID NO: 59908 - protein, 15 aa, Artificial Sequence
  Description of Artificial Sequence: Synthetic peptide
  Seed: DPRMCSLMQGSTLPR
DPRMLSLVQPSTLPR

SEQ ID NO: 59909 - protein, 15 aa, Artificial Sequence
  Description of Artificial Sequence: Synthetic peptide
  Seed: DPRMCSLMQGSTLPR
DPRMLSLVQPSTVPR

SEQ ID NO: 59910 - protein, 15 aa, Artificial Sequence
  Description of Artificial Sequence: Synthetic peptide
  Seed: DPRMCSLMQGSTLPR
DPRMLSLVQSSTAPR

SEQ ID NO: 59911 - protein, 15 aa, Artificial Sequence
  Description of Artificial Sequence: Synthetic peptide
  Seed: DPRMCSLMQGSTLPR
DPRMLSLVQSSTIPR

SEQ ID NO: 59912 - protein, 15 aa, Artificial Sequence
  Description of Artificial Sequence: Synthetic peptide
  Seed: DPRMCSLMQGSTLPR
DPRMLSLVQSSTLPR

SEQ ID NO: 59913 - protein, 15 aa, Artificial Sequence
  Description of Artificial Sequence: Synthetic peptide
  Seed: DPRMCSLMQGSTLPR
DPRMLSLVQSSTVPR

SEQ ID NO: 59914 - protein, 15 aa, Artificial Sequence
  Description of Artificial Sequence: Synthetic peptide
  Seed: DPRMCSLMQGSTLPR
DPRMLSLWQNSTIPR

SEQ ID NO: 59915 - protein, 15 aa, Artificial Sequence
  Description of Artificial Sequence: Synthetic peptide
  Seed: DPRMCSLMQGSTLPR
DPRMLSLWQNSTLPR

SEQ ID NO: 59916 - protein, 15 aa, Artificial Sequence
  Description of Artificial Sequence: Synthetic peptide
  Seed: DPRMCSLMQGSTLPR
DPRMLSLWQNSTVPR

SEQ ID NO: 59917 - protein, 15 aa, Artificial Sequence
  Description of Artificial Sequence: Synthetic peptide
  Seed: DPRMCSLMQGSTLPR
DPRMLSLWQSSTIPR

SEQ ID NO: 59918 - protein, 15 aa, Artificial Sequence
  Description of Artificial Sequence: Synthetic peptide
  Seed: DPRMCSLMQGSTLPR
DPRMLSLWQSSTLPR

SEQ ID NO: 59919 - protein, 15 aa, Artificial Sequence
  Description of Artificial Sequence: Synthetic peptide
  Seed: DPRMCSLMQGSTLPR
DPRMLSLWQSSTVPR

SEQ ID NO: 59920 - protein, 15 aa, Artificial Sequence
  Description of Artificial Sequence: Synthetic peptide
  Seed: DPRMCSLMQGSTLPR
DPRMLSLYQASTAPR

SEQ ID NO: 59921 - protein, 15 aa, Artificial Sequence
  Description of Artificial Sequence: Synthetic peptide
  Seed: DPRMCSLMQGSTLPR
DPRMLSLYQASTLPR

SEQ ID NO: 59922 - protein, 15 aa, Artificial Sequence
  Description of Artificial Sequence: Synthetic peptide
  Seed: DPRMCSLMQGSTLPR
DPRMLSLYQASTVPR

SEQ ID NO: 59923 - protein, 15 aa, Artificial Sequence
  Description of Artificial Sequence: Synthetic peptide
  Seed: DPRMCSLMQGSTLPR
DPRMLSLYQGSTAPR

SEQ ID NO: 59924 - protein, 15 aa, Artificial Sequence
  Description of Artificial Sequence: Synthetic peptide
  Seed: DPRMCSLMQGSTLPR
DPRMLSLYQGSTIPR

SEQ ID NO: 59925 - protein, 15 aa, Artificial Sequence
  Description of Artificial Sequence: Synthetic peptide
  Seed: DPRMCSLMQGSTLPR
DPRMLSLYQGSTLPR

SEQ ID NO: 59926 - protein, 15 aa, Artificial Sequence
  Description of Artificial Sequence: Synthetic peptide
  Seed: DPRMCSLMQGSTLPR
DPRMLSLYQGSTVPR

SEQ ID NO: 59927 - protein, 15 aa, Artificial Sequence
  Description of Artificial Sequence: Synthetic peptide
  Seed: DPRMCSLMQGSTLPR
DPRMLSLYQNSTAPR

SEQ ID NO: 59928 - protein, 15 aa, Artificial Sequence
  Description of Artificial Sequence: Synthetic peptide
  Seed: DPRMCSLMQGSTLPR
DPRMLSLYQNSTIPR

SEQ ID NO: 59929 - protein, 15 aa, Artificial Sequence
  Description of Artificial Sequence: Synthetic peptide
  Seed: DPRMCSLMQGSTLPR
DPRMLSLYQNSTLPR

SEQ ID NO: 59930 - protein, 15 aa, Artificial Sequence
  Description of Artificial Sequence: Synthetic peptide
  Seed: DPRMCSLMQGSTLPR
DPRMLSLYQNSTMPR

SEQ ID NO: 59931 - protein, 15 aa, Artificial Sequence
  Description of Artificial Sequence: Synthetic peptide
  Seed: DPRMCSLMQGSTLPR
DPRMLSLYQNSTTPR

SEQ ID NO: 59932 - protein, 15 aa, Artificial Sequence
  Description of Artificial Sequence: Synthetic peptide
  Seed: DPRMCSLMQGSTLPR
DPRMLSLYQNSTVPR

SEQ ID NO: 59933 - protein, 15 aa, Artificial Sequence
  Description of Artificial Sequence: Synthetic peptide
  Seed: DPRMCSLMQGSTLPR
DPRMLSLYQSSTAPR

SEQ ID NO: 59934 - protein, 15 aa, Artificial Sequence
  Description of Artificial Sequence: Synthetic peptide
  Seed: DPRMCSLMQGSTLPR
DPRMLSLYQSSTIPR

SEQ ID NO: 59935 - protein, 15 aa, Artificial Sequence
  Description of Artificial Sequence: Synthetic peptide
  Seed: DPRMCSLMQGSTLPR
DPRMLSLYQSSTLPR

SEQ ID NO: 59936 - protein, 15 aa, Artificial Sequence
  Description of Artificial Sequence: Synthetic peptide
  Seed: DPRMCSLMQGSTLPR
DPRMLSLYQSSTMPR

SEQ ID NO: 59937 - protein, 15 aa, Artificial Sequence
  Description of Artificial Sequence: Synthetic peptide
  Seed: DPRMCSLMQGSTLPR
DPRMLSLYQSSTSPR

SEQ ID NO: 59938 - protein, 15 aa, Artificial Sequence
  Description of Artificial Sequence: Synthetic peptide
  Seed: DPRMCSLMQGSTLPR
DPRMLSLYQSSTTPR

SEQ ID NO: 59939 - protein, 15 aa, Artificial Sequence
  Description of Artificial Sequence: Synthetic peptide
  Seed: DPRMCSLMQGSTLPR
DPRMLSLYQSSTVPR

SEQ ID NO: 59940 - protein, 15 aa, Artificial Sequence
  Description of Artificial Sequence: Synthetic peptide
  Seed: DPRMCSLMQGSTLPR
DPRMLSLYQTSTLPR

SEQ ID NO: 59941 - protein, 15 aa, Artificial Sequence
  Description of Artificial Sequence: Synthetic peptide
  Seed: DPRMCSLMQGSTLPR
DPRMLSLYQTSTVPR

SEQ ID NO: 59942 - protein, 15 aa, Artificial Sequence
  Description of Artificial Sequence: Synthetic peptide
  Seed: DPRMCSLMQGSTLPR
DPRMMSLAQASTAPR

SEQ ID NO: 59943 - protein, 15 aa, Artificial Sequence
  Description of Artificial Sequence: Synthetic peptide
  Seed: DPRMCSLMQGSTLPR
DPRMMSLAQASTIPR

SEQ ID NO: 59944 - protein, 15 aa, Artificial Sequence
  Description of Artificial Sequence: Synthetic peptide
  Seed: DPRMCSLMQGSTLPR
DPRMMSLAQASTLPR

SEQ ID NO: 59945 - protein, 15 aa, Artificial Sequence
  Description of Artificial Sequence: Synthetic peptide
  Seed: DPRMCSLMQGSTLPR
DPRMMSLAQASTMPR

SEQ ID NO: 59946 - protein, 15 aa, Artificial Sequence
  Description of Artificial Sequence: Synthetic peptide
  Seed: DPRMCSLMQGSTLPR
DPRMMSLAQASTVPR

SEQ ID NO: 59947 - protein, 15 aa, Artificial Sequence
  Description of Artificial Sequence: Synthetic peptide
  Seed: DPRMCSLMQGSTLPR
DPRMMSLAQGSTIPR

SEQ ID NO: 59948 - protein, 15 aa, Artificial Sequence
  Description of Artificial Sequence: Synthetic peptide
  Seed: DPRMCSLMQGSTLPR
DPRMMSLAQGSTLPR

SEQ ID NO: 59949 - protein, 15 aa, Artificial Sequence
  Description of Artificial Sequence: Synthetic peptide
  Seed: DPRMCSLMQGSTLPR
DPRMMSLAQGSTVPR

SEQ ID NO: 59950 - protein, 15 aa, Artificial Sequence
  Description of Artificial Sequence: Synthetic peptide
  Seed: DPRMCSLMQGSTLPR
DPRMMSLAQSSTIPR

SEQ ID NO: 59951 - protein, 15 aa, Artificial Sequence
  Description of Artificial Sequence: Synthetic peptide
  Seed: DPRMCSLMQGSTLPR
DPRMMSLAQSSTLPR

SEQ ID NO: 59952 - protein, 15 aa, Artificial Sequence
  Description of Artificial Sequence: Synthetic peptide
  Seed: DPRMCSLMQGSTLPR
DPRMMSLAQSSTVPR

SEQ ID NO: 59953 - protein, 15 aa, Artificial Sequence
  Description of Artificial Sequence: Synthetic peptide
  Seed: DPRMCSLMQGSTLPR
DPRMMSLFQNSTLPR

SEQ ID NO: 59954 - protein, 15 aa, Artificial Sequence
  Description of Artificial Sequence: Synthetic peptide
  Seed: DPRMCSLMQGSTLPR
DPRMMSLFQNSTVPR

SEQ ID NO: 59955 - protein, 15 aa, Artificial Sequence
  Description of Artificial Sequence: Synthetic peptide
  Seed: DPRMCSLMQGSTLPR
DPRMMSLFQSSTIPR

SEQ ID NO: 59956 - protein, 15 aa, Artificial Sequence
  Description of Artificial Sequence: Synthetic peptide
  Seed: DPRMCSLMQGSTLPR
DPRMMSLFQSSTLPR

SEQ ID NO: 59957 - protein, 15 aa, Artificial Sequence
  Description of Artificial Sequence: Synthetic peptide
  Seed: DPRMCSLMQGSTLPR
DPRMMSLFQSSTVPR

SEQ ID NO: 59958 - protein, 15 aa, Artificial Sequence
  Description of Artificial Sequence: Synthetic peptide
  Seed: DPRMCSLMQGSTLPR
DPRMMSLIQASTAPR

SEQ ID NO: 59959 - protein, 15 aa, Artificial Sequence
  Description of Artificial Sequence: Synthetic peptide
  Seed: DPRMCSLMQGSTLPR
DPRMMSLIQASTIPR

SEQ ID NO: 59960 - protein, 15 aa, Artificial Sequence
  Description of Artificial Sequence: Synthetic peptide
  Seed: DPRMCSLMQGSTLPR
DPRMMSLIQASTLPR

SEQ ID NO: 59961 - protein, 15 aa, Artificial Sequence
  Description of Artificial Sequence: Synthetic peptide
  Seed: DPRMCSLMQGSTLPR
DPRMMSLIQASTMPR

SEQ ID NO: 59962 - protein, 15 aa, Artificial Sequence
  Description of Artificial Sequence: Synthetic peptide
  Seed: DPRMCSLMQGSTLPR
DPRMMSLIQASTNPR

SEQ ID NO: 59963 - protein, 15 aa, Artificial Sequence
  Description of Artificial Sequence: Synthetic peptide
  Seed: DPRMCSLMQGSTLPR
DPRMMSLIQASTSPR

SEQ ID NO: 59964 - protein, 15 aa, Artificial Sequence
  Description of Artificial Sequence: Synthetic peptide
  Seed: DPRMCSLMQGSTLPR
DPRMMSLIQASTTPR

SEQ ID NO: 59965 - protein, 15 aa, Artificial Sequence
  Description of Artificial Sequence: Synthetic peptide
  Seed: DPRMCSLMQGSTLPR
DPRMMSLIQASTVPR

SEQ ID NO: 59966 - protein, 15 aa, Artificial Sequence
  Description of Artificial Sequence: Synthetic peptide
  Seed: DPRMCSLMQGSTLPR
DPRMMSLIQGSTAPR

SEQ ID NO: 59967 - protein, 15 aa, Artificial Sequence
  Description of Artificial Sequence: Synthetic peptide
  Seed: DPRMCSLMQGSTLPR
DPRMMSLIQGSTIPR

SEQ ID NO: 59968 - protein, 15 aa, Artificial Sequence
  Description of Artificial Sequence: Synthetic peptide
  Seed: DPRMCSLMQGSTLPR
DPRMMSLIQGSTLPR

SEQ ID NO: 59969 - protein, 15 aa, Artificial Sequence
  Description of Artificial Sequence: Synthetic peptide
  Seed: DPRMCSLMQGSTLPR
DPRMMSLIQGSTMPR

SEQ ID NO: 59970 - protein, 15 aa, Artificial Sequence
  Description of Artificial Sequence: Synthetic peptide
  Seed: DPRMCSLMQGSTLPR
DPRMMSLIQGSTVPR

SEQ ID NO: 59971 - protein, 15 aa, Artificial Sequence
  Description of Artificial Sequence: Synthetic peptide
  Seed: DPRMCSLMQGSTLPR
DPRMMSLIQPSTAPR

SEQ ID NO: 59972 - protein, 15 aa, Artificial Sequence
  Description of Artificial Sequence: Synthetic peptide
  Seed: DPRMCSLMQGSTLPR
DPRMMSLIQPSTIPR

SEQ ID NO: 59973 - protein, 15 aa, Artificial Sequence
  Description of Artificial Sequence: Synthetic peptide
  Seed: DPRMCSLMQGSTLPR
DPRMMSLIQPSTLPR

SEQ ID NO: 59974 - protein, 15 aa, Artificial Sequence
  Description of Artificial Sequence: Synthetic peptide
  Seed: DPRMCSLMQGSTLPR
DPRMMSLIQPSTVPR

SEQ ID NO: 59975 - protein, 15 aa, Artificial Sequence
  Description of Artificial Sequence: Synthetic peptide
  Seed: DPRMCSLMQGSTLPR
DPRMMSLIQSSTAPR

SEQ ID NO: 59976 - protein, 15 aa, Artificial Sequence
  Description of Artificial Sequence: Synthetic peptide
  Seed: DPRMCSLMQGSTLPR
DPRMMSLIQSSTIPR

SEQ ID NO: 59977 - protein, 15 aa, Artificial Sequence
  Description of Artificial Sequence: Synthetic peptide
  Seed: DPRMCSLMQGSTLPR
DPRMMSLIQSSTLPR

SEQ ID NO: 59978 - protein, 15 aa, Artificial Sequence
  Description of Artificial Sequence: Synthetic peptide
  Seed: DPRMCSLMQGSTLPR
DPRMMSLIQSSTVPR

SEQ ID NO: 59979 - protein, 15 aa, Artificial Sequence
  Description of Artificial Sequence: Synthetic peptide
  Seed: DPRMCSLMQGSTLPR
DPRMMSLLQASTAPR

SEQ ID NO: 59980 - protein, 15 aa, Artificial Sequence
  Description of Artificial Sequence: Synthetic peptide
  Seed: DPRMCSLMQGSTLPR
DPRMMSLLQASTCPR

SEQ ID NO: 59981 - protein, 15 aa, Artificial Sequence
  Description of Artificial Sequence: Synthetic peptide
  Seed: DPRMCSLMQGSTLPR
DPRMMSLLQASTFPR

SEQ ID NO: 59982 - protein, 15 aa, Artificial Sequence
  Description of Artificial Sequence: Synthetic peptide
  Seed: DPRMCSLMQGSTLPR
DPRMMSLLQASTGPR

SEQ ID NO: 59983 - protein, 15 aa, Artificial Sequence
  Description of Artificial Sequence: Synthetic peptide
  Seed: DPRMCSLMQGSTLPR
DPRMMSLLQASTIPR

SEQ ID NO: 59984 - protein, 15 aa, Artificial Sequence
  Description of Artificial Sequence: Synthetic peptide
  Seed: DPRMCSLMQGSTLPR
DPRMMSLLQASTLPR

SEQ ID NO: 59985 - protein, 15 aa, Artificial Sequence
  Description of Artificial Sequence: Synthetic peptide
  Seed: DPRMCSLMQGSTLPR
DPRMMSLLQASTMPR

SEQ ID NO: 59986 - protein, 15 aa, Artificial Sequence
  Description of Artificial Sequence: Synthetic peptide
  Seed: DPRMCSLMQGSTLPR
DPRMMSLLQASTNPR

SEQ ID NO: 59987 - protein, 15 aa, Artificial Sequence
  Description of Artificial Sequence: Synthetic peptide
  Seed: DPRMCSLMQGSTLPR
DPRMMSLLQASTSPR

SEQ ID NO: 59988 - protein, 15 aa, Artificial Sequence
  Description of Artificial Sequence: Synthetic peptide
  Seed: DPRMCSLMQGSTLPR
DPRMMSLLQASTTPR

SEQ ID NO: 59989 - protein, 15 aa, Artificial Sequence
  Description of Artificial Sequence: Synthetic peptide
  Seed: DPRMCSLMQGSTLPR
DPRMMSLLQASTVPR

SEQ ID NO: 59990 - protein, 15 aa, Artificial Sequence
  Description of Artificial Sequence: Synthetic peptide
  Seed: DPRMCSLMQGSTLPR
DPRMMSLLQGSTAPR

SEQ ID NO: 59991 - protein, 15 aa, Artificial Sequence
  Description of Artificial Sequence: Synthetic peptide
  Seed: DPRMCSLMQGSTLPR
DPRMMSLLQGSTGPR

SEQ ID NO: 59992 - protein, 15 aa, Artificial Sequence
  Description of Artificial Sequence: Synthetic peptide
  Seed: DPRMCSLMQGSTLPR
DPRMMSLLQGSTIPR

SEQ ID NO: 59993 - protein, 15 aa, Artificial Sequence
  Description of Artificial Sequence: Synthetic peptide
  Seed: DPRMCSLMQGSTLPR
DPRMMSLLQGSTLPR

SEQ ID NO: 59994 - protein, 15 aa, Artificial Sequence
  Description of Artificial Sequence: Synthetic peptide
  Seed: DPRMCSLMQGSTLPR
DPRMMSLLQGSTMPR

SEQ ID NO: 59995 - protein, 15 aa, Artificial Sequence
  Description of Artificial Sequence: Synthetic peptide
  Seed: DPRMCSLMQGSTLPR
DPRMMSLLQGSTSPR

SEQ ID NO: 59996 - protein, 15 aa, Artificial Sequence
  Description of Artificial Sequence: Synthetic peptide
  Seed: DPRMCSLMQGSTLPR
DPRMMSLLQGSTTPR

SEQ ID NO: 59997 - protein, 15 aa, Artificial Sequence
  Description of Artificial Sequence: Synthetic peptide
  Seed: DPRMCSLMQGSTLPR
DPRMMSLLQGSTVPR

SEQ ID NO: 59998 - protein, 15 aa, Artificial Sequence
  Description of Artificial Sequence: Synthetic peptide
  Seed: DPRMCSLMQGSTLPR
DPRMMSLLQISTAPR

SEQ ID NO: 59999 - protein, 15 aa, Artificial Sequence
  Description of Artificial Sequence: Synthetic peptide
  Seed: DPRMCSLMQGSTLPR
DPRMMSLLQISTNPR

SEQ ID NO: 60000 - protein, 15 aa, Artificial Sequence
  Description of Artificial Sequence: Synthetic peptide
  Seed: DPRMCSLMQGSTLPR
DPRMMSLLQISTSPR

SEQ ID NO: 60001 - protein, 15 aa, Artificial Sequence
  Description of Artificial Sequence: Synthetic peptide
  Seed: DPRMCSLMQGSTLPR
DPRMMSLLQNSTAPR

SEQ ID NO: 60002 - protein, 15 aa, Artificial Sequence
  Description of Artificial Sequence: Synthetic peptide
  Seed: DPRMCSLMQGSTLPR
DPRMMSLLQNSTIPR

SEQ ID NO: 60003 - protein, 15 aa, Artificial Sequence
  Description of Artificial Sequence: Synthetic peptide
  Seed: DPRMCSLMQGSTLPR
DPRMMSLLQNSTLPR

SEQ ID NO: 60004 - protein, 15 aa, Artificial Sequence
  Description of Artificial Sequence: Synthetic peptide
  Seed: DPRMCSLMQGSTLPR
DPRMMSLLQNSTVPR

SEQ ID NO: 60005 - protein, 15 aa, Artificial Sequence
  Description of Artificial Sequence: Synthetic peptide
  Seed: DPRMCSLMQGSTLPR
DPRMMSLLQPSTAPR

SEQ ID NO: 60006 - protein, 15 aa, Artificial Sequence
  Description of Artificial Sequence: Synthetic peptide
  Seed: DPRMCSLMQGSTLPR
DPRMMSLLQPSTIPR

SEQ ID NO: 60007 - protein, 15 aa, Artificial Sequence
  Description of Artificial Sequence: Synthetic peptide
  Seed: DPRMCSLMQGSTLPR
DPRMMSLLQPSTLPR

SEQ ID NO: 60008 - protein, 15 aa, Artificial Sequence
  Description of Artificial Sequence: Synthetic peptide
  Seed: DPRMCSLMQGSTLPR
DPRMMSLLQPSTMPR

SEQ ID NO: 60009 - protein, 15 aa, Artificial Sequence
  Description of Artificial Sequence: Synthetic peptide
  Seed: DPRMCSLMQGSTLPR
DPRMMSLLQPSTNPR

SEQ ID NO: 60010 - protein, 15 aa, Artificial Sequence
  Description of Artificial Sequence: Synthetic peptide
  Seed: DPRMCSLMQGSTLPR
DPRMMSLLQPSTSPR

SEQ ID NO: 60011 - protein, 15 aa, Artificial Sequence
  Description of Artificial Sequence: Synthetic peptide
  Seed: DPRMCSLMQGSTLPR
DPRMMSLLQPSTTPR

SEQ ID NO: 60012 - protein, 15 aa, Artificial Sequence
  Description of Artificial Sequence: Synthetic peptide
  Seed: DPRMCSLMQGSTLPR
DPRMMSLLQPSTVPR

SEQ ID NO: 60013 - protein, 15 aa, Artificial Sequence
  Description of Artificial Sequence: Synthetic peptide
  Seed: DPRMCSLMQGSTLPR
DPRMMSLLQSSTAPR

SEQ ID NO: 60014 - protein, 15 aa, Artificial Sequence
  Description of Artificial Sequence: Synthetic peptide
  Seed: DPRMCSLMQGSTLPR
DPRMMSLLQSSTIPR

SEQ ID NO: 60015 - protein, 15 aa, Artificial Sequence
  Description of Artificial Sequence: Synthetic peptide
  Seed: DPRMCSLMQGSTLPR
DPRMMSLLQSSTLPR

SEQ ID NO: 60016 - protein, 15 aa, Artificial Sequence
  Description of Artificial Sequence: Synthetic peptide
  Seed: DPRMCSLMQGSTLPR
DPRMMSLLQSSTMPR

SEQ ID NO: 60017 - protein, 15 aa, Artificial Sequence
  Description of Artificial Sequence: Synthetic peptide
  Seed: DPRMCSLMQGSTLPR
DPRMMSLLQSSTNPR

SEQ ID NO: 60018 - protein, 15 aa, Artificial Sequence
  Description of Artificial Sequence: Synthetic peptide
  Seed: DPRMCSLMQGSTLPR
DPRMMSLLQSSTSPR

SEQ ID NO: 60019 - protein, 15 aa, Artificial Sequence
  Description of Artificial Sequence: Synthetic peptide
  Seed: DPRMCSLMQGSTLPR
DPRMMSLLQSSTTPR

SEQ ID NO: 60020 - protein, 15 aa, Artificial Sequence
  Description of Artificial Sequence: Synthetic peptide
  Seed: DPRMCSLMQGSTLPR
DPRMMSLLQSSTVPR

SEQ ID NO: 60021 - protein, 15 aa, Artificial Sequence
  Description of Artificial Sequence: Synthetic peptide
  Seed: DPRMCSLMQGSTLPR
DPRMMSLLQTSTAPR

SEQ ID NO: 60022 - protein, 15 aa, Artificial Sequence
  Description of Artificial Sequence: Synthetic peptide
  Seed: DPRMCSLMQGSTLPR
DPRMMSLLQTSTIPR

SEQ ID NO: 60023 - protein, 15 aa, Artificial Sequence
  Description of Artificial Sequence: Synthetic peptide
  Seed: DPRMCSLMQGSTLPR
DPRMMSLLQTSTLPR

SEQ ID NO: 60024 - protein, 15 aa, Artificial Sequence
  Description of Artificial Sequence: Synthetic peptide
  Seed: DPRMCSLMQGSTLPR
DPRMMSLLQTSTMPR

SEQ ID NO: 60025 - protein, 15 aa, Artificial Sequence
  Description of Artificial Sequence: Synthetic peptide
  Seed: DPRMCSLMQGSTLPR
DPRMMSLLQTSTNPR

SEQ ID NO: 60026 - protein, 15 aa, Artificial Sequence
  Description of Artificial Sequence: Synthetic peptide
  Seed: DPRMCSLMQGSTLPR
DPRMMSLLQTSTSPR

SEQ ID NO: 60027 - protein, 15 aa, Artificial Sequence
  Description of Artificial Sequence: Synthetic peptide
  Seed: DPRMCSLMQGSTLPR
DPRMMSLLQTSTTPR

SEQ ID NO: 60028 - protein, 15 aa, Artificial Sequence
  Description of Artificial Sequence: Synthetic peptide
  Seed: DPRMCSLMQGSTLPR
DPRMMSLLQTSTVPR

SEQ ID NO: 60029 - protein, 15 aa, Artificial Sequence
  Description of Artificial Sequence: Synthetic peptide
  Seed: DPRMCSLMQGSTLPR
DPRMMSLLQVSTAPR

SEQ ID NO: 60030 - protein, 15 aa, Artificial Sequence
  Description of Artificial Sequence: Synthetic peptide
  Seed: DPRMCSLMQGSTLPR
DPRMMSLLQVSTIPR

SEQ ID NO: 60031 - protein, 15 aa, Artificial Sequence
  Description of Artificial Sequence: Synthetic peptide
  Seed: DPRMCSLMQGSTLPR
DPRMMSLLQVSTLPR

SEQ ID NO: 60032 - protein, 15 aa, Artificial Sequence
  Description of Artificial Sequence: Synthetic peptide
  Seed: DPRMCSLMQGSTLPR
DPRMMSLLQVSTNPR

SEQ ID NO: 60033 - protein, 15 aa, Artificial Sequence
  Description of Artificial Sequence: Synthetic peptide
  Seed: DPRMCSLMQGSTLPR
DPRMMSLLQVSTSPR

SEQ ID NO: 60034 - protein, 15 aa, Artificial Sequence
  Description of Artificial Sequence: Synthetic peptide
  Seed: DPRMCSLMQGSTLPR
DPRMMSLLQVSTTPR

SEQ ID NO: 60035 - protein, 15 aa, Artificial Sequence
  Description of Artificial Sequence: Synthetic peptide
  Seed: DPRMCSLMQGSTLPR
DPRMMSLLQVSTVPR

SEQ ID NO: 60036 - protein, 15 aa, Artificial Sequence
  Description of Artificial Sequence: Synthetic peptide
  Seed: DPRMCSLMQGSTLPR
DPRMMSLMQASTAPR

SEQ ID NO: 60037 - protein, 15 aa, Artificial Sequence
  Description of Artificial Sequence: Synthetic peptide
  Seed: DPRMCSLMQGSTLPR
DPRMMSLMQASTGPR

SEQ ID NO: 60038 - protein, 15 aa, Artificial Sequence
  Description of Artificial Sequence: Synthetic peptide
  Seed: DPRMCSLMQGSTLPR
DPRMMSLMQASTIPR

SEQ ID NO: 60039 - protein, 15 aa, Artificial Sequence
  Description of Artificial Sequence: Synthetic peptide
  Seed: DPRMCSLMQGSTLPR
DPRMMSLMQASTLPR

SEQ ID NO: 60040 - protein, 15 aa, Artificial Sequence
  Description of Artificial Sequence: Synthetic peptide
  Seed: DPRMCSLMQGSTLPR
DPRMMSLMQASTMPR

SEQ ID NO: 60041 - protein, 15 aa, Artificial Sequence
  Description of Artificial Sequence: Synthetic peptide
  Seed: DPRMCSLMQGSTLPR
DPRMMSLMQASTNPR

SEQ ID NO: 60042 - protein, 15 aa, Artificial Sequence
  Description of Artificial Sequence: Synthetic peptide
  Seed: DPRMCSLMQGSTLPR
DPRMMSLMQASTSPR

SEQ ID NO: 60043 - protein, 15 aa, Artificial Sequence
  Description of Artificial Sequence: Synthetic peptide
  Seed: DPRMCSLMQGSTLPR
DPRMMSLMQASTTPR

SEQ ID NO: 60044 - protein, 15 aa, Artificial Sequence
  Description of Artificial Sequence: Synthetic peptide
  Seed: DPRMCSLMQGSTLPR
DPRMMSLMQASTVPR

SEQ ID NO: 60045 - protein, 15 aa, Artificial Sequence
  Description of Artificial Sequence: Synthetic peptide
  Seed: DPRMCSLMQGSTLPR
DPRMMSLMQGSTAPR

SEQ ID NO: 60046 - protein, 15 aa, Artificial Sequence
  Description of Artificial Sequence: Synthetic peptide
  Seed: DPRMCSLMQGSTLPR
DPRMMSLMQGSTIPR

SEQ ID NO: 60047 - protein, 15 aa, Artificial Sequence
  Description of Artificial Sequence: Synthetic peptide
  Seed: DPRMCSLMQGSTLPR
DPRMMSLMQGSTLPR

SEQ ID NO: 60048 - protein, 15 aa, Artificial Sequence
  Description of Artificial Sequence: Synthetic peptide
  Seed: DPRMCSLMQGSTLPR
DPRMMSLMQGSTMPR

SEQ ID NO: 60049 - protein, 15 aa, Artificial Sequence
  Description of Artificial Sequence: Synthetic peptide
  Seed: DPRMCSLMQGSTLPR
DPRMMSLMQGSTSPR

SEQ ID NO: 60050 - protein, 15 aa, Artificial Sequence
  Description of Artificial Sequence: Synthetic peptide
  Seed: DPRMCSLMQGSTLPR
DPRMMSLMQGSTTPR

SEQ ID NO: 60051 - protein, 15 aa, Artificial Sequence
  Description of Artificial Sequence: Synthetic peptide
  Seed: DPRMCSLMQGSTLPR
DPRMMSLMQGSTVPR

SEQ ID NO: 60052 - protein, 15 aa, Artificial Sequence
  Description of Artificial Sequence: Synthetic peptide
  Seed: DPRMCSLMQGSTLPR
DPRMMSLMQISTAPR

SEQ ID NO: 60053 - protein, 15 aa, Artificial Sequence
  Description of Artificial Sequence: Synthetic peptide
  Seed: DPRMCSLMQGSTLPR
DPRMMSLMQISTNPR

SEQ ID NO: 60054 - protein, 15 aa, Artificial Sequence
  Description of Artificial Sequence: Synthetic peptide
  Seed: DPRMCSLMQGSTLPR
DPRMMSLMQISTSPR

SEQ ID NO: 60055 - protein, 15 aa, Artificial Sequence
  Description of Artificial Sequence: Synthetic peptide
  Seed: DPRMCSLMQGSTLPR
DPRMMSLMQISTTPR

SEQ ID NO: 60056 - protein, 15 aa, Artificial Sequence
  Description of Artificial Sequence: Synthetic peptide
  Seed: DPRMCSLMQGSTLPR
DPRMMSLMQNSTAPR

SEQ ID NO: 60057 - protein, 15 aa, Artificial Sequence
  Description of Artificial Sequence: Synthetic peptide
  Seed: DPRMCSLMQGSTLPR
DPRMMSLMQNSTIPR

SEQ ID NO: 60058 - protein, 15 aa, Artificial Sequence
  Description of Artificial Sequence: Synthetic peptide
  Seed: DPRMCSLMQGSTLPR
DPRMMSLMQNSTLPR

SEQ ID NO: 60059 - protein, 15 aa, Artificial Sequence
  Description of Artificial Sequence: Synthetic peptide
  Seed: DPRMCSLMQGSTLPR
DPRMMSLMQNSTSPR

SEQ ID NO: 60060 - protein, 15 aa, Artificial Sequence
  Description of Artificial Sequence: Synthetic peptide
  Seed: DPRMCSLMQGSTLPR
DPRMMSLMQNSTVPR

SEQ ID NO: 60061 - protein, 15 aa, Artificial Sequence
  Description of Artificial Sequence: Synthetic peptide
  Seed: DPRMCSLMQGSTLPR
DPRMMSLMQPSTAPR

SEQ ID NO: 60062 - protein, 15 aa, Artificial Sequence
  Description of Artificial Sequence: Synthetic peptide
  Seed: DPRMCSLMQGSTLPR
DPRMMSLMQPSTIPR

SEQ ID NO: 60063 - protein, 15 aa, Artificial Sequence
  Description of Artificial Sequence: Synthetic peptide
  Seed: DPRMCSLMQGSTLPR
DPRMMSLMQPSTLPR

SEQ ID NO: 60064 - protein, 15 aa, Artificial Sequence
  Description of Artificial Sequence: Synthetic peptide
  Seed: DPRMCSLMQGSTLPR
DPRMMSLMQPSTMPR

SEQ ID NO: 60065 - protein, 15 aa, Artificial Sequence
  Description of Artificial Sequence: Synthetic peptide
  Seed: DPRMCSLMQGSTLPR
DPRMMSLMQPSTNPR

SEQ ID NO: 60066 - protein, 15 aa, Artificial Sequence
  Description of Artificial Sequence: Synthetic peptide
  Seed: DPRMCSLMQGSTLPR
DPRMMSLMQPSTSPR

SEQ ID NO: 60067 - protein, 15 aa, Artificial Sequence
  Description of Artificial Sequence: Synthetic peptide
  Seed: DPRMCSLMQGSTLPR
DPRMMSLMQPSTTPR

SEQ ID NO: 60068 - protein, 15 aa, Artificial Sequence
  Description of Artificial Sequence: Synthetic peptide
  Seed: DPRMCSLMQGSTLPR
DPRMMSLMQPSTVPR

SEQ ID NO: 60069 - protein, 15 aa, Artificial Sequence
  Description of Artificial Sequence: Synthetic peptide
  Seed: DPRMCSLMQGSTLPR
DPRMMSLMQSSTAPR

SEQ ID NO: 60070 - protein, 15 aa, Artificial Sequence
  Description of Artificial Sequence: Synthetic peptide
  Seed: DPRMCSLMQGSTLPR
DPRMMSLMQSSTIPR

SEQ ID NO: 60071 - protein, 15 aa, Artificial Sequence
  Description of Artificial Sequence: Synthetic peptide
  Seed: DPRMCSLMQGSTLPR
DPRMMSLMQSSTLPR

SEQ ID NO: 60072 - protein, 15 aa, Artificial Sequence
  Description of Artificial Sequence: Synthetic peptide
  Seed: DPRMCSLMQGSTLPR
DPRMMSLMQSSTMPR

SEQ ID NO: 60073 - protein, 15 aa, Artificial Sequence
  Description of Artificial Sequence: Synthetic peptide
  Seed: DPRMCSLMQGSTLPR
DPRMMSLMQSSTNPR

SEQ ID NO: 60074 - protein, 15 aa, Artificial Sequence
  Description of Artificial Sequence: Synthetic peptide
  Seed: DPRMCSLMQGSTLPR
DPRMMSLMQSSTSPR

SEQ ID NO: 60075 - protein, 15 aa, Artificial Sequence
  Description of Artificial Sequence: Synthetic peptide
  Seed: DPRMCSLMQGSTLPR
DPRMMSLMQSSTTPR

SEQ ID NO: 60076 - protein, 15 aa, Artificial Sequence
  Description of Artificial Sequence: Synthetic peptide
  Seed: DPRMCSLMQGSTLPR
DPRMMSLMQSSTVPR

SEQ ID NO: 60077 - protein, 15 aa, Artificial Sequence
  Description of Artificial Sequence: Synthetic peptide
  Seed: DPRMCSLMQGSTLPR
DPRMMSLMQTSTAPR

SEQ ID NO: 60078 - protein, 15 aa, Artificial Sequence
  Description of Artificial Sequence: Synthetic peptide
  Seed: DPRMCSLMQGSTLPR
DPRMMSLMQTSTIPR

SEQ ID NO: 60079 - protein, 15 aa, Artificial Sequence
  Description of Artificial Sequence: Synthetic peptide
  Seed: DPRMCSLMQGSTLPR
DPRMMSLMQTSTLPR

SEQ ID NO: 60080 - protein, 15 aa, Artificial Sequence
  Description of Artificial Sequence: Synthetic peptide
  Seed: DPRMCSLMQGSTLPR
DPRMMSLMQTSTNPR

SEQ ID NO: 60081 - protein, 15 aa, Artificial Sequence
  Description of Artificial Sequence: Synthetic peptide
  Seed: DPRMCSLMQGSTLPR
DPRMMSLMQTSTSPR

SEQ ID NO: 60082 - protein, 15 aa, Artificial Sequence
  Description of Artificial Sequence: Synthetic peptide
  Seed: DPRMCSLMQGSTLPR
DPRMMSLMQTSTVPR

SEQ ID NO: 60083 - protein, 15 aa, Artificial Sequence
  Description of Artificial Sequence: Synthetic peptide
  Seed: DPRMCSLMQGSTLPR
DPRMMSLMQVSTAPR

SEQ ID NO: 60084 - protein, 15 aa, Artificial Sequence
  Description of Artificial Sequence: Synthetic peptide
  Seed: DPRMCSLMQGSTLPR
DPRMMSLMQVSTIPR

SEQ ID NO: 60085 - protein, 15 aa, Artificial Sequence
  Description of Artificial Sequence: Synthetic peptide
  Seed: DPRMCSLMQGSTLPR
DPRMMSLMQVSTLPR

SEQ ID NO: 60086 - protein, 15 aa, Artificial Sequence
  Description of Artificial Sequence: Synthetic peptide
  Seed: DPRMCSLMQGSTLPR
DPRMMSLMQVSTNPR

SEQ ID NO: 60087 - protein, 15 aa, Artificial Sequence
  Description of Artificial Sequence: Synthetic peptide
  Seed: DPRMCSLMQGSTLPR
DPRMMSLMQVSTSPR

SEQ ID NO: 60088 - protein, 15 aa, Artificial Sequence
  Description of Artificial Sequence: Synthetic peptide
  Seed: DPRMCSLMQGSTLPR
DPRMMSLMQVSTTPR

SEQ ID NO: 60089 - protein, 15 aa, Artificial Sequence
  Description of Artificial Sequence: Synthetic peptide
  Seed: DPRMCSLMQGSTLPR
DPRMMSLMQVSTVPR

SEQ ID NO: 60090 - protein, 15 aa, Artificial Sequence
  Description of Artificial Sequence: Synthetic peptide
  Seed: DPRMCSLMQGSTLPR
DPRMMSLQQASTAPR

SEQ ID NO: 60091 - protein, 15 aa, Artificial Sequence
  Description of Artificial Sequence: Synthetic peptide
  Seed: DPRMCSLMQGSTLPR
DPRMMSLQQASTIPR

SEQ ID NO: 60092 - protein, 15 aa, Artificial Sequence
  Description of Artificial Sequence: Synthetic peptide
  Seed: DPRMCSLMQGSTLPR
DPRMMSLQQASTLPR

SEQ ID NO: 60093 - protein, 15 aa, Artificial Sequence
  Description of Artificial Sequence: Synthetic peptide
  Seed: DPRMCSLMQGSTLPR
DPRMMSLQQASTVPR

SEQ ID NO: 60094 - protein, 15 aa, Artificial Sequence
  Description of Artificial Sequence: Synthetic peptide
  Seed: DPRMCSLMQGSTLPR
DPRMMSLQQGSTLPR

SEQ ID NO: 60095 - protein, 15 aa, Artificial Sequence
  Description of Artificial Sequence: Synthetic peptide
  Seed: DPRMCSLMQGSTLPR
DPRMMSLQQGSTVPR

SEQ ID NO: 60096 - protein, 15 aa, Artificial Sequence
  Description of Artificial Sequence: Synthetic peptide
  Seed: DPRMCSLMQGSTLPR
DPRMMSLSQASTIPR

SEQ ID NO: 60097 - protein, 15 aa, Artificial Sequence
  Description of Artificial Sequence: Synthetic peptide
  Seed: DPRMCSLMQGSTLPR
DPRMMSLSQASTLPR

SEQ ID NO: 60098 - protein, 15 aa, Artificial Sequence
  Description of Artificial Sequence: Synthetic peptide
  Seed: DPRMCSLMQGSTLPR
DPRMMSLSQSSTIPR

SEQ ID NO: 60099 - protein, 15 aa, Artificial Sequence
  Description of Artificial Sequence: Synthetic peptide
  Seed: DPRMCSLMQGSTLPR
DPRMMSLSQSSTLPR

SEQ ID NO: 60100 - protein, 15 aa, Artificial Sequence
  Description of Artificial Sequence: Synthetic peptide
  Seed: DPRMCSLMQGSTLPR
DPRMMSLTQASTIPR

SEQ ID NO: 60101 - protein, 15 aa, Artificial Sequence
  Description of Artificial Sequence: Synthetic peptide
  Seed: DPRMCSLMQGSTLPR
DPRMMSLTQASTLPR

SEQ ID NO: 60102 - protein, 15 aa, Artificial Sequence
  Description of Artificial Sequence: Synthetic peptide
  Seed: DPRMCSLMQGSTLPR
DPRMMSLTQSSTIPR

SEQ ID NO: 60103 - protein, 15 aa, Artificial Sequence
  Description of Artificial Sequence: Synthetic peptide
  Seed: DPRMCSLMQGSTLPR
DPRMMSLTQSSTLPR

SEQ ID NO: 60104 - protein, 15 aa, Artificial Sequence
  Description of Artificial Sequence: Synthetic peptide
  Seed: DPRMCSLMQGSTLPR
DPRMMSLTQSSTVPR

SEQ ID NO: 60105 - protein, 15 aa, Artificial Sequence
  Description of Artificial Sequence: Synthetic peptide
  Seed: DPRMCSLMQGSTLPR
DPRMMSLVQASTIPR

SEQ ID NO: 60106 - protein, 15 aa, Artificial Sequence
  Description of Artificial Sequence: Synthetic peptide
  Seed: DPRMCSLMQGSTLPR
DPRMMSLVQASTLPR

SEQ ID NO: 60107 - protein, 15 aa, Artificial Sequence
  Description of Artificial Sequence: Synthetic peptide
  Seed: DPRMCSLMQGSTLPR
DPRMMSLVQASTVPR

SEQ ID NO: 60108 - protein, 15 aa, Artificial Sequence
  Description of Artificial Sequence: Synthetic peptide
  Seed: DPRMCSLMQGSTLPR
DPRMMSLVQGSTLPR

SEQ ID NO: 60109 - protein, 15 aa, Artificial Sequence
  Description of Artificial Sequence: Synthetic peptide
  Seed: DPRMCSLMQGSTLPR
DPRMMSLVQGSTVPR

SEQ ID NO: 60110 - protein, 15 aa, Artificial Sequence
  Description of Artificial Sequence: Synthetic peptide
  Seed: DPRMCSLMQGSTLPR
DPRMMSLVQSSTIPR

SEQ ID NO: 60111 - protein, 15 aa, Artificial Sequence
  Description of Artificial Sequence: Synthetic peptide
  Seed: DPRMCSLMQGSTLPR
DPRMMSLVQSSTLPR

SEQ ID NO: 60112 - protein, 15 aa, Artificial Sequence
  Description of Artificial Sequence: Synthetic peptide
  Seed: DPRMCSLMQGSTLPR
DPRMMSLVQSSTVPR

SEQ ID NO: 60113 - protein, 15 aa, Artificial Sequence
  Description of Artificial Sequence: Synthetic peptide
  Seed: DPRMCSLMQGSTLPR
DPRMMSLYQNSTLPR

SEQ ID NO: 60114 - protein, 15 aa, Artificial Sequence
  Description of Artificial Sequence: Synthetic peptide
  Seed: DPRMCSLMQGSTLPR
DPRMMSLYQSSTLPR

SEQ ID NO: 60115 - protein, 15 aa, Artificial Sequence
  Description of Artificial Sequence: Synthetic peptide
  Seed: DPRMCSLMQGSTLPR
DPRMMSLYQSSTVPR

SEQ ID NO: 60116 - protein, 15 aa, Artificial Sequence
  Description of Artificial Sequence: Synthetic peptide
  Seed: DPRMCSLMQGSTLPR
DPRMVSLAQASTAPR

SEQ ID NO: 60117 - protein, 15 aa, Artificial Sequence
  Description of Artificial Sequence: Synthetic peptide
  Seed: DPRMCSLMQGSTLPR
DPRMVSLAQASTIPR

SEQ ID NO: 60118 - protein, 15 aa, Artificial Sequence
  Description of Artificial Sequence: Synthetic peptide
  Seed: DPRMCSLMQGSTLPR
DPRMVSLAQASTLPR

SEQ ID NO: 60119 - protein, 15 aa, Artificial Sequence
  Description of Artificial Sequence: Synthetic peptide
  Seed: DPRMCSLMQGSTLPR
DPRMVSLAQASTVPR

SEQ ID NO: 60120 - protein, 15 aa, Artificial Sequence
  Description of Artificial Sequence: Synthetic peptide
  Seed: DPRMCSLMQGSTLPR
DPRMVSLAQGSTLPR

SEQ ID NO: 60121 - protein, 15 aa, Artificial Sequence
  Description of Artificial Sequence: Synthetic peptide
  Seed: DPRMCSLMQGSTLPR
DPRMVSLAQSSTLPR

SEQ ID NO: 60122 - protein, 15 aa, Artificial Sequence
  Description of Artificial Sequence: Synthetic peptide
  Seed: DPRMCSLMQGSTLPR
DPRMVSLFQASTLPR

SEQ ID NO: 60123 - protein, 15 aa, Artificial Sequence
  Description of Artificial Sequence: Synthetic peptide
  Seed: DPRMCSLMQGSTLPR
DPRMVSLFQGSTIPR

SEQ ID NO: 60124 - protein, 15 aa, Artificial Sequence
  Description of Artificial Sequence: Synthetic peptide
  Seed: DPRMCSLMQGSTLPR
DPRMVSLFQGSTLPR

SEQ ID NO: 60125 - protein, 15 aa, Artificial Sequence
  Description of Artificial Sequence: Synthetic peptide
  Seed: DPRMCSLMQGSTLPR
DPRMVSLFQNSTAPR

SEQ ID NO: 60126 - protein, 15 aa, Artificial Sequence
  Description of Artificial Sequence: Synthetic peptide
  Seed: DPRMCSLMQGSTLPR
DPRMVSLFQNSTIPR

SEQ ID NO: 60127 - protein, 15 aa, Artificial Sequence
  Description of Artificial Sequence: Synthetic peptide
  Seed: DPRMCSLMQGSTLPR
DPRMVSLFQNSTLPR

SEQ ID NO: 60128 - protein, 15 aa, Artificial Sequence
  Description of Artificial Sequence: Synthetic peptide
  Seed: DPRMCSLMQGSTLPR
DPRMVSLFQNSTVPR

SEQ ID NO: 60129 - protein, 15 aa, Artificial Sequence
  Description of Artificial Sequence: Synthetic peptide
  Seed: DPRMCSLMQGSTLPR
DPRMVSLFQSSTAPR

SEQ ID NO: 60130 - protein, 15 aa, Artificial Sequence
  Description of Artificial Sequence: Synthetic peptide
  Seed: DPRMCSLMQGSTLPR
DPRMVSLFQSSTIPR

SEQ ID NO: 60131 - protein, 15 aa, Artificial Sequence
  Description of Artificial Sequence: Synthetic peptide
  Seed: DPRMCSLMQGSTLPR
DPRMVSLFQSSTLPR

SEQ ID NO: 60132 - protein, 15 aa, Artificial Sequence
  Description of Artificial Sequence: Synthetic peptide
  Seed: DPRMCSLMQGSTLPR
DPRMVSLFQSSTMPR

SEQ ID NO: 60133 - protein, 15 aa, Artificial Sequence
  Description of Artificial Sequence: Synthetic peptide
  Seed: DPRMCSLMQGSTLPR
DPRMVSLFQSSTVPR

SEQ ID NO: 60134 - protein, 15 aa, Artificial Sequence
  Description of Artificial Sequence: Synthetic peptide
  Seed: DPRMCSLMQGSTLPR
DPRMVSLFQTSTLPR

SEQ ID NO: 60135 - protein, 15 aa, Artificial Sequence
  Description of Artificial Sequence: Synthetic peptide
  Seed: DPRMCSLMQGSTLPR
DPRMVSLIQASTAPR

SEQ ID NO: 60136 - protein, 15 aa, Artificial Sequence
  Description of Artificial Sequence: Synthetic peptide
  Seed: DPRMCSLMQGSTLPR
DPRMVSLIQASTIPR

SEQ ID NO: 60137 - protein, 15 aa, Artificial Sequence
  Description of Artificial Sequence: Synthetic peptide
  Seed: DPRMCSLMQGSTLPR
DPRMVSLIQASTLPR

SEQ ID NO: 60138 - protein, 15 aa, Artificial Sequence
  Description of Artificial Sequence: Synthetic peptide
  Seed: DPRMCSLMQGSTLPR
DPRMVSLIQASTMPR

SEQ ID NO: 60139 - protein, 15 aa, Artificial Sequence
  Description of Artificial Sequence: Synthetic peptide
  Seed: DPRMCSLMQGSTLPR
DPRMVSLIQASTTPR

SEQ ID NO: 60140 - protein, 15 aa, Artificial Sequence
  Description of Artificial Sequence: Synthetic peptide
  Seed: DPRMCSLMQGSTLPR
DPRMVSLIQASTVPR

SEQ ID NO: 60141 - protein, 15 aa, Artificial Sequence
  Description of Artificial Sequence: Synthetic peptide
  Seed: DPRMCSLMQGSTLPR
DPRMVSLIQGSTAPR

SEQ ID NO: 60142 - protein, 15 aa, Artificial Sequence
  Description of Artificial Sequence: Synthetic peptide
  Seed: DPRMCSLMQGSTLPR
DPRMVSLIQGSTIPR

SEQ ID NO: 60143 - protein, 15 aa, Artificial Sequence
  Description of Artificial Sequence: Synthetic peptide
  Seed: DPRMCSLMQGSTLPR
DPRMVSLIQGSTLPR

SEQ ID NO: 60144 - protein, 15 aa, Artificial Sequence
  Description of Artificial Sequence: Synthetic peptide
  Seed: DPRMCSLMQGSTLPR
DPRMVSLIQGSTMPR

SEQ ID NO: 60145 - protein, 15 aa, Artificial Sequence
  Description of Artificial Sequence: Synthetic peptide
  Seed: DPRMCSLMQGSTLPR
DPRMVSLIQGSTVPR

SEQ ID NO: 60146 - protein, 15 aa, Artificial Sequence
  Description of Artificial Sequence: Synthetic peptide
  Seed: DPRMCSLMQGSTLPR
DPRMVSLIQNSTAPR

SEQ ID NO: 60147 - protein, 15 aa, Artificial Sequence
  Description of Artificial Sequence: Synthetic peptide
  Seed: DPRMCSLMQGSTLPR
DPRMVSLIQNSTSPR

SEQ ID NO: 60148 - protein, 15 aa, Artificial Sequence
  Description of Artificial Sequence: Synthetic peptide
  Seed: DPRMCSLMQGSTLPR
DPRMVSLIQPSTIPR

SEQ ID NO: 60149 - protein, 15 aa, Artificial Sequence
  Description of Artificial Sequence: Synthetic peptide
  Seed: DPRMCSLMQGSTLPR
DPRMVSLIQPSTLPR

SEQ ID NO: 60150 - protein, 15 aa, Artificial Sequence
  Description of Artificial Sequence: Synthetic peptide
  Seed: DPRMCSLMQGSTLPR
DPRMVSLIQPSTVPR

SEQ ID NO: 60151 - protein, 15 aa, Artificial Sequence
  Description of Artificial Sequence: Synthetic peptide
  Seed: DPRMCSLMQGSTLPR
DPRMVSLIQSSTAPR

SEQ ID NO: 60152 - protein, 15 aa, Artificial Sequence
  Description of Artificial Sequence: Synthetic peptide
  Seed: DPRMCSLMQGSTLPR
DPRMVSLIQSSTIPR

SEQ ID NO: 60153 - protein, 15 aa, Artificial Sequence
  Description of Artificial Sequence: Synthetic peptide
  Seed: DPRMCSLMQGSTLPR
DPRMVSLIQSSTLPR

SEQ ID NO: 60154 - protein, 15 aa, Artificial Sequence
  Description of Artificial Sequence: Synthetic peptide
  Seed: DPRMCSLMQGSTLPR
DPRMVSLIQSSTVPR

SEQ ID NO: 60155 - protein, 15 aa, Artificial Sequence
  Description of Artificial Sequence: Synthetic peptide
  Seed: DPRMCSLMQGSTLPR
DPRMVSLLQASTAPR

SEQ ID NO: 60156 - protein, 15 aa, Artificial Sequence
  Description of Artificial Sequence: Synthetic peptide
  Seed: DPRMCSLMQGSTLPR
DPRMVSLLQASTGPR

SEQ ID NO: 60157 - protein, 15 aa, Artificial Sequence
  Description of Artificial Sequence: Synthetic peptide
  Seed: DPRMCSLMQGSTLPR
DPRMVSLLQASTIPR

SEQ ID NO: 60158 - protein, 15 aa, Artificial Sequence
  Description of Artificial Sequence: Synthetic peptide
  Seed: DPRMCSLMQGSTLPR
DPRMVSLLQASTLPR

SEQ ID NO: 60159 - protein, 15 aa, Artificial Sequence
  Description of Artificial Sequence: Synthetic peptide
  Seed: DPRMCSLMQGSTLPR
DPRMVSLLQASTMPR

SEQ ID NO: 60160 - protein, 15 aa, Artificial Sequence
  Description of Artificial Sequence: Synthetic peptide
  Seed: DPRMCSLMQGSTLPR
DPRMVSLLQASTNPR

SEQ ID NO: 60161 - protein, 15 aa, Artificial Sequence
  Description of Artificial Sequence: Synthetic peptide
  Seed: DPRMCSLMQGSTLPR
DPRMVSLLQASTSPR

SEQ ID NO: 60162 - protein, 15 aa, Artificial Sequence
  Description of Artificial Sequence: Synthetic peptide
  Seed: DPRMCSLMQGSTLPR
DPRMVSLLQASTTPR

SEQ ID NO: 60163 - protein, 15 aa, Artificial Sequence
  Description of Artificial Sequence: Synthetic peptide
  Seed: DPRMCSLMQGSTLPR
DPRMVSLLQASTVPR

SEQ ID NO: 60164 - protein, 15 aa, Artificial Sequence
  Description of Artificial Sequence: Synthetic peptide
  Seed: DPRMCSLMQGSTLPR
DPRMVSLLQGSTAPR

SEQ ID NO: 60165 - protein, 15 aa, Artificial Sequence
  Description of Artificial Sequence: Synthetic peptide
  Seed: DPRMCSLMQGSTLPR
DPRMVSLLQGSTGPR

SEQ ID NO: 60166 - protein, 15 aa, Artificial Sequence
  Description of Artificial Sequence: Synthetic peptide
  Seed: DPRMCSLMQGSTLPR
DPRMVSLLQGSTIPR

SEQ ID NO: 60167 - protein, 15 aa, Artificial Sequence
  Description of Artificial Sequence: Synthetic peptide
  Seed: DPRMCSLMQGSTLPR
DPRMVSLLQGSTLPR

SEQ ID NO: 60168 - protein, 15 aa, Artificial Sequence
  Description of Artificial Sequence: Synthetic peptide
  Seed: DPRMCSLMQGSTLPR
DPRMVSLLQGSTMPR

SEQ ID NO: 60169 - protein, 15 aa, Artificial Sequence
  Description of Artificial Sequence: Synthetic peptide
  Seed: DPRMCSLMQGSTLPR
DPRMVSLLQGSTSPR

SEQ ID NO: 60170 - protein, 15 aa, Artificial Sequence
  Description of Artificial Sequence: Synthetic peptide
  Seed: DPRMCSLMQGSTLPR
DPRMVSLLQGSTTPR

SEQ ID NO: 60171 - protein, 15 aa, Artificial Sequence
  Description of Artificial Sequence: Synthetic peptide
  Seed: DPRMCSLMQGSTLPR
DPRMVSLLQGSTVPR

SEQ ID NO: 60172 - protein, 15 aa, Artificial Sequence
  Description of Artificial Sequence: Synthetic peptide
  Seed: DPRMCSLMQGSTLPR
DPRMVSLLQNSTAPR

SEQ ID NO: 60173 - protein, 15 aa, Artificial Sequence
  Description of Artificial Sequence: Synthetic peptide
  Seed: DPRMCSLMQGSTLPR
DPRMVSLLQNSTIPR

SEQ ID NO: 60174 - protein, 15 aa, Artificial Sequence
  Description of Artificial Sequence: Synthetic peptide
  Seed: DPRMCSLMQGSTLPR
DPRMVSLLQNSTLPR

SEQ ID NO: 60175 - protein, 15 aa, Artificial Sequence
  Description of Artificial Sequence: Synthetic peptide
  Seed: DPRMCSLMQGSTLPR
DPRMVSLLQNSTSPR

SEQ ID NO: 60176 - protein, 15 aa, Artificial Sequence
  Description of Artificial Sequence: Synthetic peptide
  Seed: DPRMCSLMQGSTLPR
DPRMVSLLQNSTVPR

SEQ ID NO: 60177 - protein, 15 aa, Artificial Sequence
  Description of Artificial Sequence: Synthetic peptide
  Seed: DPRMCSLMQGSTLPR
DPRMVSLLQPSTAPR

SEQ ID NO: 60178 - protein, 15 aa, Artificial Sequence
  Description of Artificial Sequence: Synthetic peptide
  Seed: DPRMCSLMQGSTLPR
DPRMVSLLQPSTIPR

SEQ ID NO: 60179 - protein, 15 aa, Artificial Sequence
  Description of Artificial Sequence: Synthetic peptide
  Seed: DPRMCSLMQGSTLPR
DPRMVSLLQPSTLPR

SEQ ID NO: 60180 - protein, 15 aa, Artificial Sequence
  Description of Artificial Sequence: Synthetic peptide
  Seed: DPRMCSLMQGSTLPR
DPRMVSLLQPSTMPR

SEQ ID NO: 60181 - protein, 15 aa, Artificial Sequence
  Description of Artificial Sequence: Synthetic peptide
  Seed: DPRMCSLMQGSTLPR
DPRMVSLLQPSTSPR

SEQ ID NO: 60182 - protein, 15 aa, Artificial Sequence
  Description of Artificial Sequence: Synthetic peptide
  Seed: DPRMCSLMQGSTLPR
DPRMVSLLQPSTTPR

SEQ ID NO: 60183 - protein, 15 aa, Artificial Sequence
  Description of Artificial Sequence: Synthetic peptide
  Seed: DPRMCSLMQGSTLPR
DPRMVSLLQPSTVPR

SEQ ID NO: 60184 - protein, 15 aa, Artificial Sequence
  Description of Artificial Sequence: Synthetic peptide
  Seed: DPRMCSLMQGSTLPR
DPRMVSLLQSSTAPR

SEQ ID NO: 60185 - protein, 15 aa, Artificial Sequence
  Description of Artificial Sequence: Synthetic peptide
  Seed: DPRMCSLMQGSTLPR
DPRMVSLLQSSTIPR

SEQ ID NO: 60186 - protein, 15 aa, Artificial Sequence
  Description of Artificial Sequence: Synthetic peptide
  Seed: DPRMCSLMQGSTLPR
DPRMVSLLQSSTLPR

SEQ ID NO: 60187 - protein, 15 aa, Artificial Sequence
  Description of Artificial Sequence: Synthetic peptide
  Seed: DPRMCSLMQGSTLPR
DPRMVSLLQSSTMPR

SEQ ID NO: 60188 - protein, 15 aa, Artificial Sequence
  Description of Artificial Sequence: Synthetic peptide
  Seed: DPRMCSLMQGSTLPR
DPRMVSLLQSSTSPR

SEQ ID NO: 60189 - protein, 15 aa, Artificial Sequence
  Description of Artificial Sequence: Synthetic peptide
  Seed: DPRMCSLMQGSTLPR
DPRMVSLLQSSTTPR

SEQ ID NO: 60190 - protein, 15 aa, Artificial Sequence
  Description of Artificial Sequence: Synthetic peptide
  Seed: DPRMCSLMQGSTLPR
DPRMVSLLQSSTVPR

SEQ ID NO: 60191 - protein, 15 aa, Artificial Sequence
  Description of Artificial Sequence: Synthetic peptide
  Seed: DPRMCSLMQGSTLPR
DPRMVSLLQTSTAPR

SEQ ID NO: 60192 - protein, 15 aa, Artificial Sequence
  Description of Artificial Sequence: Synthetic peptide
  Seed: DPRMCSLMQGSTLPR
DPRMVSLLQTSTIPR

SEQ ID NO: 60193 - protein, 15 aa, Artificial Sequence
  Description of Artificial Sequence: Synthetic peptide
  Seed: DPRMCSLMQGSTLPR
DPRMVSLLQTSTLPR

SEQ ID NO: 60194 - protein, 15 aa, Artificial Sequence
  Description of Artificial Sequence: Synthetic peptide
  Seed: DPRMCSLMQGSTLPR
DPRMVSLLQTSTVPR

SEQ ID NO: 60195 - protein, 15 aa, Artificial Sequence
  Description of Artificial Sequence: Synthetic peptide
  Seed: DPRMCSLMQGSTLPR
DPRMVSLLQVSTAPR

SEQ ID NO: 60196 - protein, 15 aa, Artificial Sequence
  Description of Artificial Sequence: Synthetic peptide
  Seed: DPRMCSLMQGSTLPR
DPRMVSLLQVSTIPR

SEQ ID NO: 60197 - protein, 15 aa, Artificial Sequence
  Description of Artificial Sequence: Synthetic peptide
  Seed: DPRMCSLMQGSTLPR
DPRMVSLLQVSTLPR

SEQ ID NO: 60198 - protein, 15 aa, Artificial Sequence
  Description of Artificial Sequence: Synthetic peptide
  Seed: DPRMCSLMQGSTLPR
DPRMVSLLQVSTVPR

SEQ ID NO: 60199 - protein, 15 aa, Artificial Sequence
  Description of Artificial Sequence: Synthetic peptide
  Seed: DPRMCSLMQGSTLPR
DPRMVSLMQASTAPR

SEQ ID NO: 60200 - protein, 15 aa, Artificial Sequence
  Description of Artificial Sequence: Synthetic peptide
  Seed: DPRMCSLMQGSTLPR
DPRMVSLMQASTIPR

SEQ ID NO: 60201 - protein, 15 aa, Artificial Sequence
  Description of Artificial Sequence: Synthetic peptide
  Seed: DPRMCSLMQGSTLPR
DPRMVSLMQASTLPR

SEQ ID NO: 60202 - protein, 15 aa, Artificial Sequence
  Description of Artificial Sequence: Synthetic peptide
  Seed: DPRMCSLMQGSTLPR
DPRMVSLMQASTMPR

SEQ ID NO: 60203 - protein, 15 aa, Artificial Sequence
  Description of Artificial Sequence: Synthetic peptide
  Seed: DPRMCSLMQGSTLPR
DPRMVSLMQASTSPR

SEQ ID NO: 60204 - protein, 15 aa, Artificial Sequence
  Description of Artificial Sequence: Synthetic peptide
  Seed: DPRMCSLMQGSTLPR
DPRMVSLMQASTTPR

SEQ ID NO: 60205 - protein, 15 aa, Artificial Sequence
  Description of Artificial Sequence: Synthetic peptide
  Seed: DPRMCSLMQGSTLPR
DPRMVSLMQASTVPR

SEQ ID NO: 60206 - protein, 15 aa, Artificial Sequence
  Description of Artificial Sequence: Synthetic peptide
  Seed: DPRMCSLMQGSTLPR
DPRMVSLMQGSTAPR

SEQ ID NO: 60207 - protein, 15 aa, Artificial Sequence
  Description of Artificial Sequence: Synthetic peptide
  Seed: DPRMCSLMQGSTLPR
DPRMVSLMQGSTIPR

SEQ ID NO: 60208 - protein, 15 aa, Artificial Sequence
  Description of Artificial Sequence: Synthetic peptide
  Seed: DPRMCSLMQGSTLPR
DPRMVSLMQGSTLPR

SEQ ID NO: 60209 - protein, 15 aa, Artificial Sequence
  Description of Artificial Sequence: Synthetic peptide
  Seed: DPRMCSLMQGSTLPR
DPRMVSLMQGSTMPR

SEQ ID NO: 60210 - protein, 15 aa, Artificial Sequence
  Description of Artificial Sequence: Synthetic peptide
  Seed: DPRMCSLMQGSTLPR
DPRMVSLMQGSTSPR

SEQ ID NO: 60211 - protein, 15 aa, Artificial Sequence
  Description of Artificial Sequence: Synthetic peptide
  Seed: DPRMCSLMQGSTLPR
DPRMVSLMQGSTTPR

SEQ ID NO: 60212 - protein, 15 aa, Artificial Sequence
  Description of Artificial Sequence: Synthetic peptide
  Seed: DPRMCSLMQGSTLPR
DPRMVSLMQGSTVPR

SEQ ID NO: 60213 - protein, 15 aa, Artificial Sequence
  Description of Artificial Sequence: Synthetic peptide
  Seed: DPRMCSLMQGSTLPR
DPRMVSLMQNSTAPR

SEQ ID NO: 60214 - protein, 15 aa, Artificial Sequence
  Description of Artificial Sequence: Synthetic peptide
  Seed: DPRMCSLMQGSTLPR
DPRMVSLMQNSTIPR

SEQ ID NO: 60215 - protein, 15 aa, Artificial Sequence
  Description of Artificial Sequence: Synthetic peptide
  Seed: DPRMCSLMQGSTLPR
DPRMVSLMQNSTLPR

SEQ ID NO: 60216 - protein, 15 aa, Artificial Sequence
  Description of Artificial Sequence: Synthetic peptide
  Seed: DPRMCSLMQGSTLPR
DPRMVSLMQNSTSPR

SEQ ID NO: 60217 - protein, 15 aa, Artificial Sequence
  Description of Artificial Sequence: Synthetic peptide
  Seed: DPRMCSLMQGSTLPR
DPRMVSLMQNSTVPR

SEQ ID NO: 60218 - protein, 15 aa, Artificial Sequence
  Description of Artificial Sequence: Synthetic peptide
  Seed: DPRMCSLMQGSTLPR
DPRMVSLMQPSTAPR

SEQ ID NO: 60219 - protein, 15 aa, Artificial Sequence
  Description of Artificial Sequence: Synthetic peptide
  Seed: DPRMCSLMQGSTLPR
DPRMVSLMQPSTIPR

SEQ ID NO: 60220 - protein, 15 aa, Artificial Sequence
  Description of Artificial Sequence: Synthetic peptide
  Seed: DPRMCSLMQGSTLPR
DPRMVSLMQPSTLPR

SEQ ID NO: 60221 - protein, 15 aa, Artificial Sequence
  Description of Artificial Sequence: Synthetic peptide
  Seed: DPRMCSLMQGSTLPR
DPRMVSLMQPSTMPR

SEQ ID NO: 60222 - protein, 15 aa, Artificial Sequence
  Description of Artificial Sequence: Synthetic peptide
  Seed: DPRMCSLMQGSTLPR
DPRMVSLMQPSTVPR

SEQ ID NO: 60223 - protein, 15 aa, Artificial Sequence
  Description of Artificial Sequence: Synthetic peptide
  Seed: DPRMCSLMQGSTLPR
DPRMVSLMQSSTAPR

SEQ ID NO: 60224 - protein, 15 aa, Artificial Sequence
  Description of Artificial Sequence: Synthetic peptide
  Seed: DPRMCSLMQGSTLPR
DPRMVSLMQSSTIPR

SEQ ID NO: 60225 - protein, 15 aa, Artificial Sequence
  Description of Artificial Sequence: Synthetic peptide
  Seed: DPRMCSLMQGSTLPR
DPRMVSLMQSSTLPR

SEQ ID NO: 60226 - protein, 15 aa, Artificial Sequence
  Description of Artificial Sequence: Synthetic peptide
  Seed: DPRMCSLMQGSTLPR
DPRMVSLMQSSTMPR

SEQ ID NO: 60227 - protein, 15 aa, Artificial Sequence
  Description of Artificial Sequence: Synthetic peptide
  Seed: DPRMCSLMQGSTLPR
DPRMVSLMQSSTSPR

SEQ ID NO: 60228 - protein, 15 aa, Artificial Sequence
  Description of Artificial Sequence: Synthetic peptide
  Seed: DPRMCSLMQGSTLPR
DPRMVSLMQSSTTPR

SEQ ID NO: 60229 - protein, 15 aa, Artificial Sequence
  Description of Artificial Sequence: Synthetic peptide
  Seed: DPRMCSLMQGSTLPR
DPRMVSLMQSSTVPR

SEQ ID NO: 60230 - protein, 15 aa, Artificial Sequence
  Description of Artificial Sequence: Synthetic peptide
  Seed: DPRMCSLMQGSTLPR
DPRMVSLMQTSTAPR

SEQ ID NO: 60231 - protein, 15 aa, Artificial Sequence
  Description of Artificial Sequence: Synthetic peptide
  Seed: DPRMCSLMQGSTLPR
DPRMVSLMQTSTIPR

SEQ ID NO: 60232 - protein, 15 aa, Artificial Sequence
  Description of Artificial Sequence: Synthetic peptide
  Seed: DPRMCSLMQGSTLPR
DPRMVSLMQTSTLPR

SEQ ID NO: 60233 - protein, 15 aa, Artificial Sequence
  Description of Artificial Sequence: Synthetic peptide
  Seed: DPRMCSLMQGSTLPR
DPRMVSLMQTSTVPR

SEQ ID NO: 60234 - protein, 15 aa, Artificial Sequence
  Description of Artificial Sequence: Synthetic peptide
  Seed: DPRMCSLMQGSTLPR
DPRMVSLMQVSTAPR

SEQ ID NO: 60235 - protein, 15 aa, Artificial Sequence
  Description of Artificial Sequence: Synthetic peptide
  Seed: DPRMCSLMQGSTLPR
DPRMVSLMQVSTIPR

SEQ ID NO: 60236 - protein, 15 aa, Artificial Sequence
  Description of Artificial Sequence: Synthetic peptide
  Seed: DPRMCSLMQGSTLPR
DPRMVSLMQVSTLPR

SEQ ID NO: 60237 - protein, 15 aa, Artificial Sequence
  Description of Artificial Sequence: Synthetic peptide
  Seed: DPRMCSLMQGSTLPR
DPRMVSLMQVSTVPR

SEQ ID NO: 60238 - protein, 15 aa, Artificial Sequence
  Description of Artificial Sequence: Synthetic peptide
  Seed: DPRMCSLMQGSTLPR
DPRMVSLQQASTIPR

SEQ ID NO: 60239 - protein, 15 aa, Artificial Sequence
  Description of Artificial Sequence: Synthetic peptide
  Seed: DPRMCSLMQGSTLPR
DPRMVSLQQASTLPR

SEQ ID NO: 60240 - protein, 15 aa, Artificial Sequence
  Description of Artificial Sequence: Synthetic peptide
  Seed: DPRMCSLMQGSTLPR
DPRMVSLQQASTVPR

SEQ ID NO: 60241 - protein, 15 aa, Artificial Sequence
  Description of Artificial Sequence: Synthetic peptide
  Seed: DPRMCSLMQGSTLPR
DPRMVSLQQGSTLPR

SEQ ID NO: 60242 - protein, 15 aa, Artificial Sequence
  Description of Artificial Sequence: Synthetic peptide
  Seed: DPRMCSLMQGSTLPR
DPRMVSLSQSSTIPR

SEQ ID NO: 60243 - protein, 15 aa, Artificial Sequence
  Description of Artificial Sequence: Synthetic peptide
  Seed: DPRMCSLMQGSTLPR
DPRMVSLSQSSTLPR

SEQ ID NO: 60244 - protein, 15 aa, Artificial Sequence
  Description of Artificial Sequence: Synthetic peptide
  Seed: DPRMCSLMQGSTLPR
DPRMVSLTQASTIPR

SEQ ID NO: 60245 - protein, 15 aa, Artificial Sequence
  Description of Artificial Sequence: Synthetic peptide
  Seed: DPRMCSLMQGSTLPR
DPRMVSLTQASTLPR

SEQ ID NO: 60246 - protein, 15 aa, Artificial Sequence
  Description of Artificial Sequence: Synthetic peptide
  Seed: DPRMCSLMQGSTLPR
DPRMVSLTQSSTIPR

SEQ ID NO: 60247 - protein, 15 aa, Artificial Sequence
  Description of Artificial Sequence: Synthetic peptide
  Seed: DPRMCSLMQGSTLPR
DPRMVSLTQSSTLPR

SEQ ID NO: 60248 - protein, 15 aa, Artificial Sequence
  Description of Artificial Sequence: Synthetic peptide
  Seed: DPRMCSLMQGSTLPR
DPRMVSLTQSSTVPR

SEQ ID NO: 60249 - protein, 15 aa, Artificial Sequence
  Description of Artificial Sequence: Synthetic peptide
  Seed: DPRMCSLMQGSTLPR
DPRMVSLVQASTIPR

SEQ ID NO: 60250 - protein, 15 aa, Artificial Sequence
  Description of Artificial Sequence: Synthetic peptide
  Seed: DPRMCSLMQGSTLPR
DPRMVSLVQASTLPR

SEQ ID NO: 60251 - protein, 15 aa, Artificial Sequence
  Description of Artificial Sequence: Synthetic peptide
  Seed: DPRMCSLMQGSTLPR
DPRMVSLVQASTVPR

SEQ ID NO: 60252 - protein, 15 aa, Artificial Sequence
  Description of Artificial Sequence: Synthetic peptide
  Seed: DPRMCSLMQGSTLPR
DPRMVSLVQGSTLPR

SEQ ID NO: 60253 - protein, 15 aa, Artificial Sequence
  Description of Artificial Sequence: Synthetic peptide
  Seed: DPRMCSLMQGSTLPR
DPRMVSLVQGSTVPR

SEQ ID NO: 60254 - protein, 15 aa, Artificial Sequence
  Description of Artificial Sequence: Synthetic peptide
  Seed: DPRMCSLMQGSTLPR
DPRMVSLVQSSTIPR

SEQ ID NO: 60255 - protein, 15 aa, Artificial Sequence
  Description of Artificial Sequence: Synthetic peptide
  Seed: DPRMCSLMQGSTLPR
DPRMVSLVQSSTLPR

SEQ ID NO: 60256 - protein, 15 aa, Artificial Sequence
  Description of Artificial Sequence: Synthetic peptide
  Seed: DPRMCSLMQGSTLPR
DPRMVSLYQASTLPR

SEQ ID NO: 60257 - protein, 15 aa, Artificial Sequence
  Description of Artificial Sequence: Synthetic peptide
  Seed: DPRMCSLMQGSTLPR
DPRMVSLYQGSTLPR

SEQ ID NO: 60258 - protein, 15 aa, Artificial Sequence
  Description of Artificial Sequence: Synthetic peptide
  Seed: DPRMCSLMQGSTLPR
DPRMVSLYQNSTAPR

SEQ ID NO: 60259 - protein, 15 aa, Artificial Sequence
  Description of Artificial Sequence: Synthetic peptide
  Seed: DPRMCSLMQGSTLPR
DPRMVSLYQNSTIPR

SEQ ID NO: 60260 - protein, 15 aa, Artificial Sequence
  Description of Artificial Sequence: Synthetic peptide
  Seed: DPRMCSLMQGSTLPR
DPRMVSLYQNSTLPR

SEQ ID NO: 60261 - protein, 15 aa, Artificial Sequence
  Description of Artificial Sequence: Synthetic peptide
  Seed: DPRMCSLMQGSTLPR
DPRMVSLYQNSTVPR

SEQ ID NO: 60262 - protein, 15 aa, Artificial Sequence
  Description of Artificial Sequence: Synthetic peptide
  Seed: DPRMCSLMQGSTLPR
DPRMVSLYQSSTAPR

SEQ ID NO: 60263 - protein, 15 aa, Artificial Sequence
  Description of Artificial Sequence: Synthetic peptide
  Seed: DPRMCSLMQGSTLPR
DPRMVSLYQSSTIPR

SEQ ID NO: 60264 - protein, 15 aa, Artificial Sequence
  Description of Artificial Sequence: Synthetic peptide
  Seed: DPRMCSLMQGSTLPR
DPRMVSLYQSSTLPR

SEQ ID NO: 60265 - protein, 15 aa, Artificial Sequence
  Description of Artificial Sequence: Synthetic peptide
  Seed: DPRMCSLMQGSTLPR
DPRMVSLYQSSTMPR

SEQ ID NO: 60266 - protein, 15 aa, Artificial Sequence
  Description of Artificial Sequence: Synthetic peptide
  Seed: DPRMCSLMQGSTLPR
DPRMVSLYQSSTVPR

SEQ ID NO: 60267 - protein, 15 aa, Artificial Sequence
  Description of Artificial Sequence: Synthetic peptide
  Seed: DPRMCSLMQGSTLPR
DPRMWSLAQASTAPR

SEQ ID NO: 60268 - protein, 15 aa, Artificial Sequence
  Description of Artificial Sequence: Synthetic peptide
  Seed: DPRMCSLMQGSTLPR
DPRMWSLAQASTGPR

SEQ ID NO: 60269 - protein, 15 aa, Artificial Sequence
  Description of Artificial Sequence: Synthetic peptide
  Seed: DPRMCSLMQGSTLPR
DPRMWSLAQASTIPR

SEQ ID NO: 60270 - protein, 15 aa, Artificial Sequence
  Description of Artificial Sequence: Synthetic peptide
  Seed: DPRMCSLMQGSTLPR
DPRMWSLAQASTLPR

SEQ ID NO: 60271 - protein, 15 aa, Artificial Sequence
  Description of Artificial Sequence: Synthetic peptide
  Seed: DPRMCSLMQGSTLPR
DPRMWSLAQASTMPR

SEQ ID NO: 60272 - protein, 15 aa, Artificial Sequence
  Description of Artificial Sequence: Synthetic peptide
  Seed: DPRMCSLMQGSTLPR
DPRMWSLAQASTNPR

SEQ ID NO: 60273 - protein, 15 aa, Artificial Sequence
  Description of Artificial Sequence: Synthetic peptide
  Seed: DPRMCSLMQGSTLPR
DPRMWSLAQASTSPR

SEQ ID NO: 60274 - protein, 15 aa, Artificial Sequence
  Description of Artificial Sequence: Synthetic peptide
  Seed: DPRMCSLMQGSTLPR
DPRMWSLAQASTTPR

SEQ ID NO: 60275 - protein, 15 aa, Artificial Sequence
  Description of Artificial Sequence: Synthetic peptide
  Seed: DPRMCSLMQGSTLPR
DPRMWSLAQASTVPR

SEQ ID NO: 60276 - protein, 15 aa, Artificial Sequence
  Description of Artificial Sequence: Synthetic peptide
  Seed: DPRMCSLMQGSTLPR
DPRMWSLAQGSTAPR

SEQ ID NO: 60277 - protein, 15 aa, Artificial Sequence
  Description of Artificial Sequence: Synthetic peptide
  Seed: DPRMCSLMQGSTLPR
DPRMWSLAQGSTIPR

SEQ ID NO: 60278 - protein, 15 aa, Artificial Sequence
  Description of Artificial Sequence: Synthetic peptide
  Seed: DPRMCSLMQGSTLPR
DPRMWSLAQGSTLPR

SEQ ID NO: 60279 - protein, 15 aa, Artificial Sequence
  Description of Artificial Sequence: Synthetic peptide
  Seed: DPRMCSLMQGSTLPR
DPRMWSLAQGSTMPR

SEQ ID NO: 60280 - protein, 15 aa, Artificial Sequence
  Description of Artificial Sequence: Synthetic peptide
  Seed: DPRMCSLMQGSTLPR
DPRMWSLAQGSTSPR

SEQ ID NO: 60281 - protein, 15 aa, Artificial Sequence
  Description of Artificial Sequence: Synthetic peptide
  Seed: DPRMCSLMQGSTLPR
DPRMWSLAQGSTTPR

SEQ ID NO: 60282 - protein, 15 aa, Artificial Sequence
  Description of Artificial Sequence: Synthetic peptide
  Seed: DPRMCSLMQGSTLPR
DPRMWSLAQGSTVPR

SEQ ID NO: 60283 - protein, 15 aa, Artificial Sequence
  Description of Artificial Sequence: Synthetic peptide
  Seed: DPRMCSLMQGSTLPR
DPRMWSLAQISTAPR

SEQ ID NO: 60284 - protein, 15 aa, Artificial Sequence
  Description of Artificial Sequence: Synthetic peptide
  Seed: DPRMCSLMQGSTLPR
DPRMWSLAQISTNPR

SEQ ID NO: 60285 - protein, 15 aa, Artificial Sequence
  Description of Artificial Sequence: Synthetic peptide
  Seed: DPRMCSLMQGSTLPR
DPRMWSLAQISTSPR

SEQ ID NO: 60286 - protein, 15 aa, Artificial Sequence
  Description of Artificial Sequence: Synthetic peptide
  Seed: DPRMCSLMQGSTLPR
DPRMWSLAQNSTAPR

SEQ ID NO: 60287 - protein, 15 aa, Artificial Sequence
  Description of Artificial Sequence: Synthetic peptide
  Seed: DPRMCSLMQGSTLPR
DPRMWSLAQNSTIPR

SEQ ID NO: 60288 - protein, 15 aa, Artificial Sequence
  Description of Artificial Sequence: Synthetic peptide
  Seed: DPRMCSLMQGSTLPR
DPRMWSLAQNSTLPR

SEQ ID NO: 60289 - protein, 15 aa, Artificial Sequence
  Description of Artificial Sequence: Synthetic peptide
  Seed: DPRMCSLMQGSTLPR
DPRMWSLAQNSTVPR

SEQ ID NO: 60290 - protein, 15 aa, Artificial Sequence
  Description of Artificial Sequence: Synthetic peptide
  Seed: DPRMCSLMQGSTLPR
DPRMWSLAQPSTAPR

SEQ ID NO: 60291 - protein, 15 aa, Artificial Sequence
  Description of Artificial Sequence: Synthetic peptide
  Seed: DPRMCSLMQGSTLPR
DPRMWSLAQPSTIPR

SEQ ID NO: 60292 - protein, 15 aa, Artificial Sequence
  Description of Artificial Sequence: Synthetic peptide
  Seed: DPRMCSLMQGSTLPR
DPRMWSLAQPSTLPR

SEQ ID NO: 60293 - protein, 15 aa, Artificial Sequence
  Description of Artificial Sequence: Synthetic peptide
  Seed: DPRMCSLMQGSTLPR
DPRMWSLAQPSTMPR

SEQ ID NO: 60294 - protein, 15 aa, Artificial Sequence
  Description of Artificial Sequence: Synthetic peptide
  Seed: DPRMCSLMQGSTLPR
DPRMWSLAQPSTVPR

SEQ ID NO: 60295 - protein, 15 aa, Artificial Sequence
  Description of Artificial Sequence: Synthetic peptide
  Seed: DPRMCSLMQGSTLPR
DPRMWSLAQSSTAPR

SEQ ID NO: 60296 - protein, 15 aa, Artificial Sequence
  Description of Artificial Sequence: Synthetic peptide
  Seed: DPRMCSLMQGSTLPR
DPRMWSLAQSSTIPR

SEQ ID NO: 60297 - protein, 15 aa, Artificial Sequence
  Description of Artificial Sequence: Synthetic peptide
  Seed: DPRMCSLMQGSTLPR
DPRMWSLAQSSTLPR

SEQ ID NO: 60298 - protein, 15 aa, Artificial Sequence
  Description of Artificial Sequence: Synthetic peptide
  Seed: DPRMCSLMQGSTLPR
DPRMWSLAQSSTMPR

SEQ ID NO: 60299 - protein, 15 aa, Artificial Sequence
  Description of Artificial Sequence: Synthetic peptide
  Seed: DPRMCSLMQGSTLPR
DPRMWSLAQSSTSPR

SEQ ID NO: 60300 - protein, 15 aa, Artificial Sequence
  Description of Artificial Sequence: Synthetic peptide
  Seed: DPRMCSLMQGSTLPR
DPRMWSLAQSSTTPR

SEQ ID NO: 60301 - protein, 15 aa, Artificial Sequence
  Description of Artificial Sequence: Synthetic peptide
  Seed: DPRMCSLMQGSTLPR
DPRMWSLAQSSTVPR

SEQ ID NO: 60302 - protein, 15 aa, Artificial Sequence
  Description of Artificial Sequence: Synthetic peptide
  Seed: DPRMCSLMQGSTLPR
DPRMWSLAQTSTAPR

SEQ ID NO: 60303 - protein, 15 aa, Artificial Sequence
  Description of Artificial Sequence: Synthetic peptide
  Seed: DPRMCSLMQGSTLPR
DPRMWSLAQTSTIPR

SEQ ID NO: 60304 - protein, 15 aa, Artificial Sequence
  Description of Artificial Sequence: Synthetic peptide
  Seed: DPRMCSLMQGSTLPR
DPRMWSLAQTSTLPR

SEQ ID NO: 60305 - protein, 15 aa, Artificial Sequence
  Description of Artificial Sequence: Synthetic peptide
  Seed: DPRMCSLMQGSTLPR
DPRMWSLAQTSTVPR

SEQ ID NO: 60306 - protein, 15 aa, Artificial Sequence
  Description of Artificial Sequence: Synthetic peptide
  Seed: DPRMCSLMQGSTLPR
DPRMWSLAQVSTAPR

SEQ ID NO: 60307 - protein, 15 aa, Artificial Sequence
  Description of Artificial Sequence: Synthetic peptide
  Seed: DPRMCSLMQGSTLPR
DPRMWSLAQVSTIPR

SEQ ID NO: 60308 - protein, 15 aa, Artificial Sequence
  Description of Artificial Sequence: Synthetic peptide
  Seed: DPRMCSLMQGSTLPR
DPRMWSLAQVSTLPR

SEQ ID NO: 60309 - protein, 15 aa, Artificial Sequence
  Description of Artificial Sequence: Synthetic peptide
  Seed: DPRMCSLMQGSTLPR
DPRMWSLAQVSTNPR

SEQ ID NO: 60310 - protein, 15 aa, Artificial Sequence
  Description of Artificial Sequence: Synthetic peptide
  Seed: DPRMCSLMQGSTLPR
DPRMWSLAQVSTSPR

SEQ ID NO: 60311 - protein, 15 aa, Artificial Sequence
  Description of Artificial Sequence: Synthetic peptide
  Seed: DPRMCSLMQGSTLPR
DPRMWSLAQVSTVPR

SEQ ID NO: 60312 - protein, 15 aa, Artificial Sequence
  Description of Artificial Sequence: Synthetic peptide
  Seed: DPRMCSLMQGSTLPR
DPRMWSLCQASTLPR

SEQ ID NO: 60313 - protein, 15 aa, Artificial Sequence
  Description of Artificial Sequence: Synthetic peptide
  Seed: DPRMCSLMQGSTLPR
DPRMWSLEQASTAPR

SEQ ID NO: 60314 - protein, 15 aa, Artificial Sequence
  Description of Artificial Sequence: Synthetic peptide
  Seed: DPRMCSLMQGSTLPR
DPRMWSLEQASTIPR

SEQ ID NO: 60315 - protein, 15 aa, Artificial Sequence
  Description of Artificial Sequence: Synthetic peptide
  Seed: DPRMCSLMQGSTLPR
DPRMWSLEQASTLPR

SEQ ID NO: 60316 - protein, 15 aa, Artificial Sequence
  Description of Artificial Sequence: Synthetic peptide
  Seed: DPRMCSLMQGSTLPR
DPRMWSLEQASTVPR

SEQ ID NO: 60317 - protein, 15 aa, Artificial Sequence
  Description of Artificial Sequence: Synthetic peptide
  Seed: DPRMCSLMQGSTLPR
DPRMWSLEQGSTIPR

SEQ ID NO: 60318 - protein, 15 aa, Artificial Sequence
  Description of Artificial Sequence: Synthetic peptide
  Seed: DPRMCSLMQGSTLPR
DPRMWSLEQGSTLPR

SEQ ID NO: 60319 - protein, 15 aa, Artificial Sequence
  Description of Artificial Sequence: Synthetic peptide
  Seed: DPRMCSLMQGSTLPR
DPRMWSLEQGSTVPR

SEQ ID NO: 60320 - protein, 15 aa, Artificial Sequence
  Description of Artificial Sequence: Synthetic peptide
  Seed: DPRMCSLMQGSTLPR
DPRMWSLEQSSTLPR

SEQ ID NO: 60321 - protein, 15 aa, Artificial Sequence
  Description of Artificial Sequence: Synthetic peptide
  Seed: DPRMCSLMQGSTLPR
DPRMWSLEQSSTVPR

SEQ ID NO: 60322 - protein, 15 aa, Artificial Sequence
  Description of Artificial Sequence: Synthetic peptide
  Seed: DPRMCSLMQGSTLPR
DPRMWSLFQASTAPR

SEQ ID NO: 60323 - protein, 15 aa, Artificial Sequence
  Description of Artificial Sequence: Synthetic peptide
  Seed: DPRMCSLMQGSTLPR
DPRMWSLFQASTIPR

SEQ ID NO: 60324 - protein, 15 aa, Artificial Sequence
  Description of Artificial Sequence: Synthetic peptide
  Seed: DPRMCSLMQGSTLPR
DPRMWSLFQASTLPR

SEQ ID NO: 60325 - protein, 15 aa, Artificial Sequence
  Description of Artificial Sequence: Synthetic peptide
  Seed: DPRMCSLMQGSTLPR
DPRMWSLFQASTVPR

SEQ ID NO: 60326 - protein, 15 aa, Artificial Sequence
  Description of Artificial Sequence: Synthetic peptide
  Seed: DPRMCSLMQGSTLPR
DPRMWSLFQGSTAPR

SEQ ID NO: 60327 - protein, 15 aa, Artificial Sequence
  Description of Artificial Sequence: Synthetic peptide
  Seed: DPRMCSLMQGSTLPR
DPRMWSLFQGSTIPR

SEQ ID NO: 60328 - protein, 15 aa, Artificial Sequence
  Description of Artificial Sequence: Synthetic peptide
  Seed: DPRMCSLMQGSTLPR
DPRMWSLFQGSTLPR

SEQ ID NO: 60329 - protein, 15 aa, Artificial Sequence
  Description of Artificial Sequence: Synthetic peptide
  Seed: DPRMCSLMQGSTLPR
DPRMWSLFQGSTVPR

SEQ ID NO: 60330 - protein, 15 aa, Artificial Sequence
  Description of Artificial Sequence: Synthetic peptide
  Seed: DPRMCSLMQGSTLPR
DPRMWSLFQSSTIPR

SEQ ID NO: 60331 - protein, 15 aa, Artificial Sequence
  Description of Artificial Sequence: Synthetic peptide
  Seed: DPRMCSLMQGSTLPR
DPRMWSLFQSSTLPR

SEQ ID NO: 60332 - protein, 15 aa, Artificial Sequence
  Description of Artificial Sequence: Synthetic peptide
  Seed: DPRMCSLMQGSTLPR
DPRMWSLFQSSTVPR

SEQ ID NO: 60333 - protein, 15 aa, Artificial Sequence
  Description of Artificial Sequence: Synthetic peptide
  Seed: DPRMCSLMQGSTLPR
DPRMWSLGQASTIPR

SEQ ID NO: 60334 - protein, 15 aa, Artificial Sequence
  Description of Artificial Sequence: Synthetic peptide
  Seed: DPRMCSLMQGSTLPR
DPRMWSLGQASTLPR

SEQ ID NO: 60335 - protein, 15 aa, Artificial Sequence
  Description of Artificial Sequence: Synthetic peptide
  Seed: DPRMCSLMQGSTLPR
DPRMWSLGQASTVPR

SEQ ID NO: 60336 - protein, 15 aa, Artificial Sequence
  Description of Artificial Sequence: Synthetic peptide
  Seed: DPRMCSLMQGSTLPR
DPRMWSLGQSSTLPR

SEQ ID NO: 60337 - protein, 15 aa, Artificial Sequence
  Description of Artificial Sequence: Synthetic peptide
  Seed: DPRMCSLMQGSTLPR
DPRMWSLHQASTLPR

SEQ ID NO: 60338 - protein, 15 aa, Artificial Sequence
  Description of Artificial Sequence: Synthetic peptide
  Seed: DPRMCSLMQGSTLPR
DPRMWSLIQASTAPR

SEQ ID NO: 60339 - protein, 15 aa, Artificial Sequence
  Description of Artificial Sequence: Synthetic peptide
  Seed: DPRMCSLMQGSTLPR
DPRMWSLIQASTCPR

SEQ ID NO: 60340 - protein, 15 aa, Artificial Sequence
  Description of Artificial Sequence: Synthetic peptide
  Seed: DPRMCSLMQGSTLPR
DPRMWSLIQASTFPR

SEQ ID NO: 60341 - protein, 15 aa, Artificial Sequence
  Description of Artificial Sequence: Synthetic peptide
  Seed: DPRMCSLMQGSTLPR
DPRMWSLIQASTGPR

SEQ ID NO: 60342 - protein, 15 aa, Artificial Sequence
  Description of Artificial Sequence: Synthetic peptide
  Seed: DPRMCSLMQGSTLPR
DPRMWSLIQASTHPR

SEQ ID NO: 60343 - protein, 15 aa, Artificial Sequence
  Description of Artificial Sequence: Synthetic peptide
  Seed: DPRMCSLMQGSTLPR
DPRMWSLIQASTIPR

SEQ ID NO: 60344 - protein, 15 aa, Artificial Sequence
  Description of Artificial Sequence: Synthetic peptide
  Seed: DPRMCSLMQGSTLPR
DPRMWSLIQASTLPR

SEQ ID NO: 60345 - protein, 15 aa, Artificial Sequence
  Description of Artificial Sequence: Synthetic peptide
  Seed: DPRMCSLMQGSTLPR
DPRMWSLIQASTMPR

SEQ ID NO: 60346 - protein, 15 aa, Artificial Sequence
  Description of Artificial Sequence: Synthetic peptide
  Seed: DPRMCSLMQGSTLPR
DPRMWSLIQASTNPR

SEQ ID NO: 60347 - protein, 15 aa, Artificial Sequence
  Description of Artificial Sequence: Synthetic peptide
  Seed: DPRMCSLMQGSTLPR
DPRMWSLIQASTQPR

SEQ ID NO: 60348 - protein, 15 aa, Artificial Sequence
  Description of Artificial Sequence: Synthetic peptide
  Seed: DPRMCSLMQGSTLPR
DPRMWSLIQASTSPR

SEQ ID NO: 60349 - protein, 15 aa, Artificial Sequence
  Description of Artificial Sequence: Synthetic peptide
  Seed: DPRMCSLMQGSTLPR
DPRMWSLIQASTTPR

SEQ ID NO: 60350 - protein, 15 aa, Artificial Sequence
  Description of Artificial Sequence: Synthetic peptide
  Seed: DPRMCSLMQGSTLPR
DPRMWSLIQASTVPR

SEQ ID NO: 60351 - protein, 15 aa, Artificial Sequence
  Description of Artificial Sequence: Synthetic peptide
  Seed: DPRMCSLMQGSTLPR
DPRMWSLIQGSTAPR

SEQ ID NO: 60352 - protein, 15 aa, Artificial Sequence
  Description of Artificial Sequence: Synthetic peptide
  Seed: DPRMCSLMQGSTLPR
DPRMWSLIQGSTCPR

SEQ ID NO: 60353 - protein, 15 aa, Artificial Sequence
  Description of Artificial Sequence: Synthetic peptide
  Seed: DPRMCSLMQGSTLPR
DPRMWSLIQGSTGPR

SEQ ID NO: 60354 - protein, 15 aa, Artificial Sequence
  Description of Artificial Sequence: Synthetic peptide
  Seed: DPRMCSLMQGSTLPR
DPRMWSLIQGSTIPR

SEQ ID NO: 60355 - protein, 15 aa, Artificial Sequence
  Description of Artificial Sequence: Synthetic peptide
  Seed: DPRMCSLMQGSTLPR
DPRMWSLIQGSTLPR

SEQ ID NO: 60356 - protein, 15 aa, Artificial Sequence
  Description of Artificial Sequence: Synthetic peptide
  Seed: DPRMCSLMQGSTLPR
DPRMWSLIQGSTMPR

SEQ ID NO: 60357 - protein, 15 aa, Artificial Sequence
  Description of Artificial Sequence: Synthetic peptide
  Seed: DPRMCSLMQGSTLPR
DPRMWSLIQGSTNPR

SEQ ID NO: 60358 - protein, 15 aa, Artificial Sequence
  Description of Artificial Sequence: Synthetic peptide
  Seed: DPRMCSLMQGSTLPR
DPRMWSLIQGSTSPR

SEQ ID NO: 60359 - protein, 15 aa, Artificial Sequence
  Description of Artificial Sequence: Synthetic peptide
  Seed: DPRMCSLMQGSTLPR
DPRMWSLIQGSTTPR

SEQ ID NO: 60360 - protein, 15 aa, Artificial Sequence
  Description of Artificial Sequence: Synthetic peptide
  Seed: DPRMCSLMQGSTLPR
DPRMWSLIQGSTVPR

SEQ ID NO: 60361 - protein, 15 aa, Artificial Sequence
  Description of Artificial Sequence: Synthetic peptide
  Seed: DPRMCSLMQGSTLPR
DPRMWSLIQISTAPR

SEQ ID NO: 60362 - protein, 15 aa, Artificial Sequence
  Description of Artificial Sequence: Synthetic peptide
  Seed: DPRMCSLMQGSTLPR
DPRMWSLIQISTNPR

SEQ ID NO: 60363 - protein, 15 aa, Artificial Sequence
  Description of Artificial Sequence: Synthetic peptide
  Seed: DPRMCSLMQGSTLPR
DPRMWSLIQISTSPR

SEQ ID NO: 60364 - protein, 15 aa, Artificial Sequence
  Description of Artificial Sequence: Synthetic peptide
  Seed: DPRMCSLMQGSTLPR
DPRMWSLIQISTTPR

SEQ ID NO: 60365 - protein, 15 aa, Artificial Sequence
  Description of Artificial Sequence: Synthetic peptide
  Seed: DPRMCSLMQGSTLPR
DPRMWSLIQLSTAPR

SEQ ID NO: 60366 - protein, 15 aa, Artificial Sequence
  Description of Artificial Sequence: Synthetic peptide
  Seed: DPRMCSLMQGSTLPR
DPRMWSLIQNSTAPR

SEQ ID NO: 60367 - protein, 15 aa, Artificial Sequence
  Description of Artificial Sequence: Synthetic peptide
  Seed: DPRMCSLMQGSTLPR
DPRMWSLIQNSTIPR

SEQ ID NO: 60368 - protein, 15 aa, Artificial Sequence
  Description of Artificial Sequence: Synthetic peptide
  Seed: DPRMCSLMQGSTLPR
DPRMWSLIQNSTLPR

SEQ ID NO: 60369 - protein, 15 aa, Artificial Sequence
  Description of Artificial Sequence: Synthetic peptide
  Seed: DPRMCSLMQGSTLPR
DPRMWSLIQNSTMPR

SEQ ID NO: 60370 - protein, 15 aa, Artificial Sequence
  Description of Artificial Sequence: Synthetic peptide
  Seed: DPRMCSLMQGSTLPR
DPRMWSLIQNSTNPR

SEQ ID NO: 60371 - protein, 15 aa, Artificial Sequence
  Description of Artificial Sequence: Synthetic peptide
  Seed: DPRMCSLMQGSTLPR
DPRMWSLIQNSTSPR

SEQ ID NO: 60372 - protein, 15 aa, Artificial Sequence
  Description of Artificial Sequence: Synthetic peptide
  Seed: DPRMCSLMQGSTLPR
DPRMWSLIQNSTTPR

SEQ ID NO: 60373 - protein, 15 aa, Artificial Sequence
  Description of Artificial Sequence: Synthetic peptide
  Seed: DPRMCSLMQGSTLPR
DPRMWSLIQNSTVPR

SEQ ID NO: 60374 - protein, 15 aa, Artificial Sequence
  Description of Artificial Sequence: Synthetic peptide
  Seed: DPRMCSLMQGSTLPR
DPRMWSLIQPSTAPR

SEQ ID NO: 60375 - protein, 15 aa, Artificial Sequence
  Description of Artificial Sequence: Synthetic peptide
  Seed: DPRMCSLMQGSTLPR
DPRMWSLIQPSTIPR

SEQ ID NO: 60376 - protein, 15 aa, Artificial Sequence
  Description of Artificial Sequence: Synthetic peptide
  Seed: DPRMCSLMQGSTLPR
DPRMWSLIQPSTLPR

SEQ ID NO: 60377 - protein, 15 aa, Artificial Sequence
  Description of Artificial Sequence: Synthetic peptide
  Seed: DPRMCSLMQGSTLPR
DPRMWSLIQPSTMPR

SEQ ID NO: 60378 - protein, 15 aa, Artificial Sequence
  Description of Artificial Sequence: Synthetic peptide
  Seed: DPRMCSLMQGSTLPR
DPRMWSLIQPSTNPR

SEQ ID NO: 60379 - protein, 15 aa, Artificial Sequence
  Description of Artificial Sequence: Synthetic peptide
  Seed: DPRMCSLMQGSTLPR
DPRMWSLIQPSTSPR

SEQ ID NO: 60380 - protein, 15 aa, Artificial Sequence
  Description of Artificial Sequence: Synthetic peptide
  Seed: DPRMCSLMQGSTLPR
DPRMWSLIQPSTTPR

SEQ ID NO: 60381 - protein, 15 aa, Artificial Sequence
  Description of Artificial Sequence: Synthetic peptide
  Seed: DPRMCSLMQGSTLPR
DPRMWSLIQPSTVPR

SEQ ID NO: 60382 - protein, 15 aa, Artificial Sequence
  Description of Artificial Sequence: Synthetic peptide
  Seed: DPRMCSLMQGSTLPR
DPRMWSLIQSSTAPR

SEQ ID NO: 60383 - protein, 15 aa, Artificial Sequence
  Description of Artificial Sequence: Synthetic peptide
  Seed: DPRMCSLMQGSTLPR
DPRMWSLIQSSTGPR

SEQ ID NO: 60384 - protein, 15 aa, Artificial Sequence
  Description of Artificial Sequence: Synthetic peptide
  Seed: DPRMCSLMQGSTLPR
DPRMWSLIQSSTIPR

SEQ ID NO: 60385 - protein, 15 aa, Artificial Sequence
  Description of Artificial Sequence: Synthetic peptide
  Seed: DPRMCSLMQGSTLPR
DPRMWSLIQSSTLPR

SEQ ID NO: 60386 - protein, 15 aa, Artificial Sequence
  Description of Artificial Sequence: Synthetic peptide
  Seed: DPRMCSLMQGSTLPR
DPRMWSLIQSSTMPR

SEQ ID NO: 60387 - protein, 15 aa, Artificial Sequence
  Description of Artificial Sequence: Synthetic peptide
  Seed: DPRMCSLMQGSTLPR
DPRMWSLIQSSTNPR

SEQ ID NO: 60388 - protein, 15 aa, Artificial Sequence
  Description of Artificial Sequence: Synthetic peptide
  Seed: DPRMCSLMQGSTLPR
DPRMWSLIQSSTSPR

SEQ ID NO: 60389 - protein, 15 aa, Artificial Sequence
  Description of Artificial Sequence: Synthetic peptide
  Seed: DPRMCSLMQGSTLPR
DPRMWSLIQSSTTPR

SEQ ID NO: 60390 - protein, 15 aa, Artificial Sequence
  Description of Artificial Sequence: Synthetic peptide
  Seed: DPRMCSLMQGSTLPR
DPRMWSLIQSSTVPR

SEQ ID NO: 60391 - protein, 15 aa, Artificial Sequence
  Description of Artificial Sequence: Synthetic peptide
  Seed: DPRMCSLMQGSTLPR
DPRMWSLIQTSTAPR

SEQ ID NO: 60392 - protein, 15 aa, Artificial Sequence
  Description of Artificial Sequence: Synthetic peptide
  Seed: DPRMCSLMQGSTLPR
DPRMWSLIQTSTIPR

SEQ ID NO: 60393 - protein, 15 aa, Artificial Sequence
  Description of Artificial Sequence: Synthetic peptide
  Seed: DPRMCSLMQGSTLPR
DPRMWSLIQTSTLPR

SEQ ID NO: 60394 - protein, 15 aa, Artificial Sequence
  Description of Artificial Sequence: Synthetic peptide
  Seed: DPRMCSLMQGSTLPR
DPRMWSLIQTSTMPR

SEQ ID NO: 60395 - protein, 15 aa, Artificial Sequence
  Description of Artificial Sequence: Synthetic peptide
  Seed: DPRMCSLMQGSTLPR
DPRMWSLIQTSTNPR

SEQ ID NO: 60396 - protein, 15 aa, Artificial Sequence
  Description of Artificial Sequence: Synthetic peptide
  Seed: DPRMCSLMQGSTLPR
DPRMWSLIQTSTSPR

SEQ ID NO: 60397 - protein, 15 aa, Artificial Sequence
  Description of Artificial Sequence: Synthetic peptide
  Seed: DPRMCSLMQGSTLPR
DPRMWSLIQTSTTPR

SEQ ID NO: 60398 - protein, 15 aa, Artificial Sequence
  Description of Artificial Sequence: Synthetic peptide
  Seed: DPRMCSLMQGSTLPR
DPRMWSLIQTSTVPR

SEQ ID NO: 60399 - protein, 15 aa, Artificial Sequence
  Description of Artificial Sequence: Synthetic peptide
  Seed: DPRMCSLMQGSTLPR
DPRMWSLIQVSTAPR

SEQ ID NO: 60400 - protein, 15 aa, Artificial Sequence
  Description of Artificial Sequence: Synthetic peptide
  Seed: DPRMCSLMQGSTLPR
DPRMWSLIQVSTGPR

SEQ ID NO: 60401 - protein, 15 aa, Artificial Sequence
  Description of Artificial Sequence: Synthetic peptide
  Seed: DPRMCSLMQGSTLPR
DPRMWSLIQVSTHPR

SEQ ID NO: 60402 - protein, 15 aa, Artificial Sequence
  Description of Artificial Sequence: Synthetic peptide
  Seed: DPRMCSLMQGSTLPR
DPRMWSLIQVSTIPR

SEQ ID NO: 60403 - protein, 15 aa, Artificial Sequence
  Description of Artificial Sequence: Synthetic peptide
  Seed: DPRMCSLMQGSTLPR
DPRMWSLIQVSTLPR

SEQ ID NO: 60404 - protein, 15 aa, Artificial Sequence
  Description of Artificial Sequence: Synthetic peptide
  Seed: DPRMCSLMQGSTLPR
DPRMWSLIQVSTMPR

SEQ ID NO: 60405 - protein, 15 aa, Artificial Sequence
  Description of Artificial Sequence: Synthetic peptide
  Seed: DPRMCSLMQGSTLPR
DPRMWSLIQVSTNPR

SEQ ID NO: 60406 - protein, 15 aa, Artificial Sequence
  Description of Artificial Sequence: Synthetic peptide
  Seed: DPRMCSLMQGSTLPR
DPRMWSLIQVSTSPR

SEQ ID NO: 60407 - protein, 15 aa, Artificial Sequence
  Description of Artificial Sequence: Synthetic peptide
  Seed: DPRMCSLMQGSTLPR
DPRMWSLIQVSTTPR

SEQ ID NO: 60408 - protein, 15 aa, Artificial Sequence
  Description of Artificial Sequence: Synthetic peptide
  Seed: DPRMCSLMQGSTLPR
DPRMWSLIQVSTVPR

SEQ ID NO: 60409 - protein, 15 aa, Artificial Sequence
  Description of Artificial Sequence: Synthetic peptide
  Seed: DPRMCSLMQGSTLPR
DPRMWSLLQASTAPR

SEQ ID NO: 60410 - protein, 15 aa, Artificial Sequence
  Description of Artificial Sequence: Synthetic peptide
  Seed: DPRMCSLMQGSTLPR
DPRMWSLLQASTCPR

SEQ ID NO: 60411 - protein, 15 aa, Artificial Sequence
  Description of Artificial Sequence: Synthetic peptide
  Seed: DPRMCSLMQGSTLPR
DPRMWSLLQASTFPR

SEQ ID NO: 60412 - protein, 15 aa, Artificial Sequence
  Description of Artificial Sequence: Synthetic peptide
  Seed: DPRMCSLMQGSTLPR
DPRMWSLLQASTGPR

SEQ ID NO: 60413 - protein, 15 aa, Artificial Sequence
  Description of Artificial Sequence: Synthetic peptide
  Seed: DPRMCSLMQGSTLPR
DPRMWSLLQASTHPR

SEQ ID NO: 60414 - protein, 15 aa, Artificial Sequence
  Description of Artificial Sequence: Synthetic peptide
  Seed: DPRMCSLMQGSTLPR
DPRMWSLLQASTIPR

SEQ ID NO: 60415 - protein, 15 aa, Artificial Sequence
  Description of Artificial Sequence: Synthetic peptide
  Seed: DPRMCSLMQGSTLPR
DPRMWSLLQASTKPR

SEQ ID NO: 60416 - protein, 15 aa, Artificial Sequence
  Description of Artificial Sequence: Synthetic peptide
  Seed: DPRMCSLMQGSTLPR
DPRMWSLLQASTLPR

SEQ ID NO: 60417 - protein, 15 aa, Artificial Sequence
  Description of Artificial Sequence: Synthetic peptide
  Seed: DPRMCSLMQGSTLPR
DPRMWSLLQASTMPR

SEQ ID NO: 60418 - protein, 15 aa, Artificial Sequence
  Description of Artificial Sequence: Synthetic peptide
  Seed: DPRMCSLMQGSTLPR
DPRMWSLLQASTNPR

SEQ ID NO: 60419 - protein, 15 aa, Artificial Sequence
  Description of Artificial Sequence: Synthetic peptide
  Seed: DPRMCSLMQGSTLPR
DPRMWSLLQASTPPR

SEQ ID NO: 60420 - protein, 15 aa, Artificial Sequence
  Description of Artificial Sequence: Synthetic peptide
  Seed: DPRMCSLMQGSTLPR
DPRMWSLLQASTQPR

SEQ ID NO: 60421 - protein, 15 aa, Artificial Sequence
  Description of Artificial Sequence: Synthetic peptide
  Seed: DPRMCSLMQGSTLPR
DPRMWSLLQASTRPR

SEQ ID NO: 60422 - protein, 15 aa, Artificial Sequence
  Description of Artificial Sequence: Synthetic peptide
  Seed: DPRMCSLMQGSTLPR
DPRMWSLLQASTSPR

SEQ ID NO: 60423 - protein, 15 aa, Artificial Sequence
  Description of Artificial Sequence: Synthetic peptide
  Seed: DPRMCSLMQGSTLPR
DPRMWSLLQASTTPR

SEQ ID NO: 60424 - protein, 15 aa, Artificial Sequence
  Description of Artificial Sequence: Synthetic peptide
  Seed: DPRMCSLMQGSTLPR
DPRMWSLLQASTVPR

SEQ ID NO: 60425 - protein, 15 aa, Artificial Sequence
  Description of Artificial Sequence: Synthetic peptide
  Seed: DPRMCSLMQGSTLPR
DPRMWSLLQASTYPR

SEQ ID NO: 60426 - protein, 15 aa, Artificial Sequence
  Description of Artificial Sequence: Synthetic peptide
  Seed: DPRMCSLMQGSTLPR
DPRMWSLLQGSTAPR

SEQ ID NO: 60427 - protein, 15 aa, Artificial Sequence
  Description of Artificial Sequence: Synthetic peptide
  Seed: DPRMCSLMQGSTLPR
DPRMWSLLQGSTCPR

SEQ ID NO: 60428 - protein, 15 aa, Artificial Sequence
  Description of Artificial Sequence: Synthetic peptide
  Seed: DPRMCSLMQGSTLPR
DPRMWSLLQGSTFPR

SEQ ID NO: 60429 - protein, 15 aa, Artificial Sequence
  Description of Artificial Sequence: Synthetic peptide
  Seed: DPRMCSLMQGSTLPR
DPRMWSLLQGSTGPR

SEQ ID NO: 60430 - protein, 15 aa, Artificial Sequence
  Description of Artificial Sequence: Synthetic peptide
  Seed: DPRMCSLMQGSTLPR
DPRMWSLLQGSTHPR

SEQ ID NO: 60431 - protein, 15 aa, Artificial Sequence
  Description of Artificial Sequence: Synthetic peptide
  Seed: DPRMCSLMQGSTLPR
DPRMWSLLQGSTIPR

SEQ ID NO: 60432 - protein, 15 aa, Artificial Sequence
  Description of Artificial Sequence: Synthetic peptide
  Seed: DPRMCSLMQGSTLPR
DPRMWSLLQGSTLPR

SEQ ID NO: 60433 - protein, 15 aa, Artificial Sequence
  Description of Artificial Sequence: Synthetic peptide
  Seed: DPRMCSLMQGSTLPR
DPRMWSLLQGSTMPR

SEQ ID NO: 60434 - protein, 15 aa, Artificial Sequence
  Description of Artificial Sequence: Synthetic peptide
  Seed: DPRMCSLMQGSTLPR
DPRMWSLLQGSTNPR

SEQ ID NO: 60435 - protein, 15 aa, Artificial Sequence
  Description of Artificial Sequence: Synthetic peptide
  Seed: DPRMCSLMQGSTLPR
DPRMWSLLQGSTPPR

SEQ ID NO: 60436 - protein, 15 aa, Artificial Sequence
  Description of Artificial Sequence: Synthetic peptide
  Seed: DPRMCSLMQGSTLPR
DPRMWSLLQGSTQPR

SEQ ID NO: 60437 - protein, 15 aa, Artificial Sequence
  Description of Artificial Sequence: Synthetic peptide
  Seed: DPRMCSLMQGSTLPR
DPRMWSLLQGSTSPR

SEQ ID NO: 60438 - protein, 15 aa, Artificial Sequence
  Description of Artificial Sequence: Synthetic peptide
  Seed: DPRMCSLMQGSTLPR
DPRMWSLLQGSTTPR

SEQ ID NO: 60439 - protein, 15 aa, Artificial Sequence
  Description of Artificial Sequence: Synthetic peptide
  Seed: DPRMCSLMQGSTLPR
DPRMWSLLQGSTVPR

SEQ ID NO: 60440 - protein, 15 aa, Artificial Sequence
  Description of Artificial Sequence: Synthetic peptide
  Seed: DPRMCSLMQGSTLPR
DPRMWSLLQGSTYPR

SEQ ID NO: 60441 - protein, 15 aa, Artificial Sequence
  Description of Artificial Sequence: Synthetic peptide
  Seed: DPRMCSLMQGSTLPR
DPRMWSLLQHSTLPR

SEQ ID NO: 60442 - protein, 15 aa, Artificial Sequence
  Description of Artificial Sequence: Synthetic peptide
  Seed: DPRMCSLMQGSTLPR
DPRMWSLLQISTAPR

SEQ ID NO: 60443 - protein, 15 aa, Artificial Sequence
  Description of Artificial Sequence: Synthetic peptide
  Seed: DPRMCSLMQGSTLPR
DPRMWSLLQISTGPR

SEQ ID NO: 60444 - protein, 15 aa, Artificial Sequence
  Description of Artificial Sequence: Synthetic peptide
  Seed: DPRMCSLMQGSTLPR
DPRMWSLLQISTHPR

SEQ ID NO: 60445 - protein, 15 aa, Artificial Sequence
  Description of Artificial Sequence: Synthetic peptide
  Seed: DPRMCSLMQGSTLPR
DPRMWSLLQISTIPR

SEQ ID NO: 60446 - protein, 15 aa, Artificial Sequence
  Description of Artificial Sequence: Synthetic peptide
  Seed: DPRMCSLMQGSTLPR
DPRMWSLLQISTLPR

SEQ ID NO: 60447 - protein, 15 aa, Artificial Sequence
  Description of Artificial Sequence: Synthetic peptide
  Seed: DPRMCSLMQGSTLPR
DPRMWSLLQISTMPR

SEQ ID NO: 60448 - protein, 15 aa, Artificial Sequence
  Description of Artificial Sequence: Synthetic peptide
  Seed: DPRMCSLMQGSTLPR
DPRMWSLLQISTNPR

SEQ ID NO: 60449 - protein, 15 aa, Artificial Sequence
  Description of Artificial Sequence: Synthetic peptide
  Seed: DPRMCSLMQGSTLPR
DPRMWSLLQISTSPR

SEQ ID NO: 60450 - protein, 15 aa, Artificial Sequence
  Description of Artificial Sequence: Synthetic peptide
  Seed: DPRMCSLMQGSTLPR
DPRMWSLLQISTTPR

SEQ ID NO: 60451 - protein, 15 aa, Artificial Sequence
  Description of Artificial Sequence: Synthetic peptide
  Seed: DPRMCSLMQGSTLPR
DPRMWSLLQISTVPR

SEQ ID NO: 60452 - protein, 15 aa, Artificial Sequence
  Description of Artificial Sequence: Synthetic peptide
  Seed: DPRMCSLMQGSTLPR
DPRMWSLLQLSTAPR

SEQ ID NO: 60453 - protein, 15 aa, Artificial Sequence
  Description of Artificial Sequence: Synthetic peptide
  Seed: DPRMCSLMQGSTLPR
DPRMWSLLQLSTNPR

SEQ ID NO: 60454 - protein, 15 aa, Artificial Sequence
  Description of Artificial Sequence: Synthetic peptide
  Seed: DPRMCSLMQGSTLPR
DPRMWSLLQLSTSPR

SEQ ID NO: 60455 - protein, 15 aa, Artificial Sequence
  Description of Artificial Sequence: Synthetic peptide
  Seed: DPRMCSLMQGSTLPR
DPRMWSLLQMSTAPR

SEQ ID NO: 60456 - protein, 15 aa, Artificial Sequence
  Description of Artificial Sequence: Synthetic peptide
  Seed: DPRMCSLMQGSTLPR
DPRMWSLLQMSTSPR

SEQ ID NO: 60457 - protein, 15 aa, Artificial Sequence
  Description of Artificial Sequence: Synthetic peptide
  Seed: DPRMCSLMQGSTLPR
DPRMWSLLQNSTAPR

SEQ ID NO: 60458 - protein, 15 aa, Artificial Sequence
  Description of Artificial Sequence: Synthetic peptide
  Seed: DPRMCSLMQGSTLPR
DPRMWSLLQNSTGPR

SEQ ID NO: 60459 - protein, 15 aa, Artificial Sequence
  Description of Artificial Sequence: Synthetic peptide
  Seed: DPRMCSLMQGSTLPR
DPRMWSLLQNSTIPR

SEQ ID NO: 60460 - protein, 15 aa, Artificial Sequence
  Description of Artificial Sequence: Synthetic peptide
  Seed: DPRMCSLMQGSTLPR
DPRMWSLLQNSTLPR

SEQ ID NO: 60461 - protein, 15 aa, Artificial Sequence
  Description of Artificial Sequence: Synthetic peptide
  Seed: DPRMCSLMQGSTLPR
DPRMWSLLQNSTMPR

SEQ ID NO: 60462 - protein, 15 aa, Artificial Sequence
  Description of Artificial Sequence: Synthetic peptide
  Seed: DPRMCSLMQGSTLPR
DPRMWSLLQNSTNPR

SEQ ID NO: 60463 - protein, 15 aa, Artificial Sequence
  Description of Artificial Sequence: Synthetic peptide
  Seed: DPRMCSLMQGSTLPR
DPRMWSLLQNSTSPR

SEQ ID NO: 60464 - protein, 15 aa, Artificial Sequence
  Description of Artificial Sequence: Synthetic peptide
  Seed: DPRMCSLMQGSTLPR
DPRMWSLLQNSTTPR

SEQ ID NO: 60465 - protein, 15 aa, Artificial Sequence
  Description of Artificial Sequence: Synthetic peptide
  Seed: DPRMCSLMQGSTLPR
DPRMWSLLQNSTVPR

SEQ ID NO: 60466 - protein, 15 aa, Artificial Sequence
  Description of Artificial Sequence: Synthetic peptide
  Seed: DPRMCSLMQGSTLPR
DPRMWSLLQPSTAPR

SEQ ID NO: 60467 - protein, 15 aa, Artificial Sequence
  Description of Artificial Sequence: Synthetic peptide
  Seed: DPRMCSLMQGSTLPR
DPRMWSLLQPSTCPR

SEQ ID NO: 60468 - protein, 15 aa, Artificial Sequence
  Description of Artificial Sequence: Synthetic peptide
  Seed: DPRMCSLMQGSTLPR
DPRMWSLLQPSTFPR

SEQ ID NO: 60469 - protein, 15 aa, Artificial Sequence
  Description of Artificial Sequence: Synthetic peptide
  Seed: DPRMCSLMQGSTLPR
DPRMWSLLQPSTGPR

SEQ ID NO: 60470 - protein, 15 aa, Artificial Sequence
  Description of Artificial Sequence: Synthetic peptide
  Seed: DPRMCSLMQGSTLPR
DPRMWSLLQPSTHPR

SEQ ID NO: 60471 - protein, 15 aa, Artificial Sequence
  Description of Artificial Sequence: Synthetic peptide
  Seed: DPRMCSLMQGSTLPR
DPRMWSLLQPSTIPR

SEQ ID NO: 60472 - protein, 15 aa, Artificial Sequence
  Description of Artificial Sequence: Synthetic peptide
  Seed: DPRMCSLMQGSTLPR
DPRMWSLLQPSTLPR

SEQ ID NO: 60473 - protein, 15 aa, Artificial Sequence
  Description of Artificial Sequence: Synthetic peptide
  Seed: DPRMCSLMQGSTLPR
DPRMWSLLQPSTMPR

SEQ ID NO: 60474 - protein, 15 aa, Artificial Sequence
  Description of Artificial Sequence: Synthetic peptide
  Seed: DPRMCSLMQGSTLPR
DPRMWSLLQPSTNPR

SEQ ID NO: 60475 - protein, 15 aa, Artificial Sequence
  Description of Artificial Sequence: Synthetic peptide
  Seed: DPRMCSLMQGSTLPR
DPRMWSLLQPSTQPR

SEQ ID NO: 60476 - protein, 15 aa, Artificial Sequence
  Description of Artificial Sequence: Synthetic peptide
  Seed: DPRMCSLMQGSTLPR
DPRMWSLLQPSTSPR

SEQ ID NO: 60477 - protein, 15 aa, Artificial Sequence
  Description of Artificial Sequence: Synthetic peptide
  Seed: DPRMCSLMQGSTLPR
DPRMWSLLQPSTTPR

SEQ ID NO: 60478 - protein, 15 aa, Artificial Sequence
  Description of Artificial Sequence: Synthetic peptide
  Seed: DPRMCSLMQGSTLPR
DPRMWSLLQPSTVPR

SEQ ID NO: 60479 - protein, 15 aa, Artificial Sequence
  Description of Artificial Sequence: Synthetic peptide
  Seed: DPRMCSLMQGSTLPR
DPRMWSLLQSSTAPR

SEQ ID NO: 60480 - protein, 15 aa, Artificial Sequence
  Description of Artificial Sequence: Synthetic peptide
  Seed: DPRMCSLMQGSTLPR
DPRMWSLLQSSTCPR

SEQ ID NO: 60481 - protein, 15 aa, Artificial Sequence
  Description of Artificial Sequence: Synthetic peptide
  Seed: DPRMCSLMQGSTLPR
DPRMWSLLQSSTFPR

SEQ ID NO: 60482 - protein, 15 aa, Artificial Sequence
  Description of Artificial Sequence: Synthetic peptide
  Seed: DPRMCSLMQGSTLPR
DPRMWSLLQSSTGPR

SEQ ID NO: 60483 - protein, 15 aa, Artificial Sequence
  Description of Artificial Sequence: Synthetic peptide
  Seed: DPRMCSLMQGSTLPR
DPRMWSLLQSSTHPR

SEQ ID NO: 60484 - protein, 15 aa, Artificial Sequence
  Description of Artificial Sequence: Synthetic peptide
  Seed: DPRMCSLMQGSTLPR
DPRMWSLLQSSTIPR

SEQ ID NO: 60485 - protein, 15 aa, Artificial Sequence
  Description of Artificial Sequence: Synthetic peptide
  Seed: DPRMCSLMQGSTLPR
DPRMWSLLQSSTLPR

SEQ ID NO: 60486 - protein, 15 aa, Artificial Sequence
  Description of Artificial Sequence: Synthetic peptide
  Seed: DPRMCSLMQGSTLPR
DPRMWSLLQSSTMPR

SEQ ID NO: 60487 - protein, 15 aa, Artificial Sequence
  Description of Artificial Sequence: Synthetic peptide
  Seed: DPRMCSLMQGSTLPR
DPRMWSLLQSSTNPR

SEQ ID NO: 60488 - protein, 15 aa, Artificial Sequence
  Description of Artificial Sequence: Synthetic peptide
  Seed: DPRMCSLMQGSTLPR
DPRMWSLLQSSTQPR

SEQ ID NO: 60489 - protein, 15 aa, Artificial Sequence
  Description of Artificial Sequence: Synthetic peptide
  Seed: DPRMCSLMQGSTLPR
DPRMWSLLQSSTSPR

SEQ ID NO: 60490 - protein, 15 aa, Artificial Sequence
  Description of Artificial Sequence: Synthetic peptide
  Seed: DPRMCSLMQGSTLPR
DPRMWSLLQSSTTPR

SEQ ID NO: 60491 - protein, 15 aa, Artificial Sequence
  Description of Artificial Sequence: Synthetic peptide
  Seed: DPRMCSLMQGSTLPR
DPRMWSLLQSSTVPR

SEQ ID NO: 60492 - protein, 15 aa, Artificial Sequence
  Description of Artificial Sequence: Synthetic peptide
  Seed: DPRMCSLMQGSTLPR
DPRMWSLLQTSTAPR

SEQ ID NO: 60493 - protein, 15 aa, Artificial Sequence
  Description of Artificial Sequence: Synthetic peptide
  Seed: DPRMCSLMQGSTLPR
DPRMWSLLQTSTGPR

SEQ ID NO: 60494 - protein, 15 aa, Artificial Sequence
  Description of Artificial Sequence: Synthetic peptide
  Seed: DPRMCSLMQGSTLPR
DPRMWSLLQTSTHPR

SEQ ID NO: 60495 - protein, 15 aa, Artificial Sequence
  Description of Artificial Sequence: Synthetic peptide
  Seed: DPRMCSLMQGSTLPR
DPRMWSLLQTSTIPR

SEQ ID NO: 60496 - protein, 15 aa, Artificial Sequence
  Description of Artificial Sequence: Synthetic peptide
  Seed: DPRMCSLMQGSTLPR
DPRMWSLLQTSTLPR

SEQ ID NO: 60497 - protein, 15 aa, Artificial Sequence
  Description of Artificial Sequence: Synthetic peptide
  Seed: DPRMCSLMQGSTLPR
DPRMWSLLQTSTMPR

SEQ ID NO: 60498 - protein, 15 aa, Artificial Sequence
  Description of Artificial Sequence: Synthetic peptide
  Seed: DPRMCSLMQGSTLPR
DPRMWSLLQTSTNPR

SEQ ID NO: 60499 - protein, 15 aa, Artificial Sequence
  Description of Artificial Sequence: Synthetic peptide
  Seed: DPRMCSLMQGSTLPR
DPRMWSLLQTSTQPR

SEQ ID NO: 60500 - protein, 15 aa, Artificial Sequence
  Description of Artificial Sequence: Synthetic peptide
  Seed: DPRMCSLMQGSTLPR
DPRMWSLLQTSTSPR

SEQ ID NO: 60501 - protein, 15 aa, Artificial Sequence
  Description of Artificial Sequence: Synthetic peptide
  Seed: DPRMCSLMQGSTLPR
DPRMWSLLQTSTTPR

SEQ ID NO: 60502 - protein, 15 aa, Artificial Sequence
  Description of Artificial Sequence: Synthetic peptide
  Seed: DPRMCSLMQGSTLPR
DPRMWSLLQTSTVPR

SEQ ID NO: 60503 - protein, 15 aa, Artificial Sequence
  Description of Artificial Sequence: Synthetic peptide
  Seed: DPRMCSLMQGSTLPR
DPRMWSLLQVSTAPR

SEQ ID NO: 60504 - protein, 15 aa, Artificial Sequence
  Description of Artificial Sequence: Synthetic peptide
  Seed: DPRMCSLMQGSTLPR
DPRMWSLLQVSTGPR

SEQ ID NO: 60505 - protein, 15 aa, Artificial Sequence
  Description of Artificial Sequence: Synthetic peptide
  Seed: DPRMCSLMQGSTLPR
DPRMWSLLQVSTHPR

SEQ ID NO: 60506 - protein, 15 aa, Artificial Sequence
  Description of Artificial Sequence: Synthetic peptide
  Seed: DPRMCSLMQGSTLPR
DPRMWSLLQVSTIPR

SEQ ID NO: 60507 - protein, 15 aa, Artificial Sequence
  Description of Artificial Sequence: Synthetic peptide
  Seed: DPRMCSLMQGSTLPR
DPRMWSLLQVSTLPR

SEQ ID NO: 60508 - protein, 15 aa, Artificial Sequence
  Description of Artificial Sequence: Synthetic peptide
  Seed: DPRMCSLMQGSTLPR
DPRMWSLLQVSTMPR

SEQ ID NO: 60509 - protein, 15 aa, Artificial Sequence
  Description of Artificial Sequence: Synthetic peptide
  Seed: DPRMCSLMQGSTLPR
DPRMWSLLQVSTNPR

SEQ ID NO: 60510 - protein, 15 aa, Artificial Sequence
  Description of Artificial Sequence: Synthetic peptide
  Seed: DPRMCSLMQGSTLPR
DPRMWSLLQVSTQPR

SEQ ID NO: 60511 - protein, 15 aa, Artificial Sequence
  Description of Artificial Sequence: Synthetic peptide
  Seed: DPRMCSLMQGSTLPR
DPRMWSLLQVSTSPR

SEQ ID NO: 60512 - protein, 15 aa, Artificial Sequence
  Description of Artificial Sequence: Synthetic peptide
  Seed: DPRMCSLMQGSTLPR
DPRMWSLLQVSTTPR

SEQ ID NO: 60513 - protein, 15 aa, Artificial Sequence
  Description of Artificial Sequence: Synthetic peptide
  Seed: DPRMCSLMQGSTLPR
DPRMWSLLQVSTVPR

SEQ ID NO: 60514 - protein, 15 aa, Artificial Sequence
  Description of Artificial Sequence: Synthetic peptide
  Seed: DPRMCSLMQGSTLPR
DPRMWSLMQASTAPR

SEQ ID NO: 60515 - protein, 15 aa, Artificial Sequence
  Description of Artificial Sequence: Synthetic peptide
  Seed: DPRMCSLMQGSTLPR
DPRMWSLMQASTCPR

SEQ ID NO: 60516 - protein, 15 aa, Artificial Sequence
  Description of Artificial Sequence: Synthetic peptide
  Seed: DPRMCSLMQGSTLPR
DPRMWSLMQASTFPR

SEQ ID NO: 60517 - protein, 15 aa, Artificial Sequence
  Description of Artificial Sequence: Synthetic peptide
  Seed: DPRMCSLMQGSTLPR
DPRMWSLMQASTGPR

SEQ ID NO: 60518 - protein, 15 aa, Artificial Sequence
  Description of Artificial Sequence: Synthetic peptide
  Seed: DPRMCSLMQGSTLPR
DPRMWSLMQASTHPR

SEQ ID NO: 60519 - protein, 15 aa, Artificial Sequence
  Description of Artificial Sequence: Synthetic peptide
  Seed: DPRMCSLMQGSTLPR
DPRMWSLMQASTIPR

SEQ ID NO: 60520 - protein, 15 aa, Artificial Sequence
  Description of Artificial Sequence: Synthetic peptide
  Seed: DPRMCSLMQGSTLPR
DPRMWSLMQASTKPR

SEQ ID NO: 60521 - protein, 15 aa, Artificial Sequence
  Description of Artificial Sequence: Synthetic peptide
  Seed: DPRMCSLMQGSTLPR
DPRMWSLMQASTLPR

SEQ ID NO: 60522 - protein, 15 aa, Artificial Sequence
  Description of Artificial Sequence: Synthetic peptide
  Seed: DPRMCSLMQGSTLPR
DPRMWSLMQASTMPR

SEQ ID NO: 60523 - protein, 15 aa, Artificial Sequence
  Description of Artificial Sequence: Synthetic peptide
  Seed: DPRMCSLMQGSTLPR
DPRMWSLMQASTNPR

SEQ ID NO: 60524 - protein, 15 aa, Artificial Sequence
  Description of Artificial Sequence: Synthetic peptide
  Seed: DPRMCSLMQGSTLPR
DPRMWSLMQASTPPR

SEQ ID NO: 60525 - protein, 15 aa, Artificial Sequence
  Description of Artificial Sequence: Synthetic peptide
  Seed: DPRMCSLMQGSTLPR
DPRMWSLMQASTQPR

SEQ ID NO: 60526 - protein, 15 aa, Artificial Sequence
  Description of Artificial Sequence: Synthetic peptide
  Seed: DPRMCSLMQGSTLPR
DPRMWSLMQASTRPR

SEQ ID NO: 60527 - protein, 15 aa, Artificial Sequence
  Description of Artificial Sequence: Synthetic peptide
  Seed: DPRMCSLMQGSTLPR
DPRMWSLMQASTSPR

SEQ ID NO: 60528 - protein, 15 aa, Artificial Sequence
  Description of Artificial Sequence: Synthetic peptide
  Seed: DPRMCSLMQGSTLPR
DPRMWSLMQASTTPR

SEQ ID NO: 60529 - protein, 15 aa, Artificial Sequence
  Description of Artificial Sequence: Synthetic peptide
  Seed: DPRMCSLMQGSTLPR
DPRMWSLMQASTVPR

SEQ ID NO: 60530 - protein, 15 aa, Artificial Sequence
  Description of Artificial Sequence: Synthetic peptide
  Seed: DPRMCSLMQGSTLPR
DPRMWSLMQASTYPR

SEQ ID NO: 60531 - protein, 15 aa, Artificial Sequence
  Description of Artificial Sequence: Synthetic peptide
  Seed: DPRMCSLMQGSTLPR
DPRMWSLMQGSTAPR

SEQ ID NO: 60532 - protein, 15 aa, Artificial Sequence
  Description of Artificial Sequence: Synthetic peptide
  Seed: DPRMCSLMQGSTLPR
DPRMWSLMQGSTCPR

SEQ ID NO: 60533 - protein, 15 aa, Artificial Sequence
  Description of Artificial Sequence: Synthetic peptide
  Seed: DPRMCSLMQGSTLPR
DPRMWSLMQGSTFPR

SEQ ID NO: 60534 - protein, 15 aa, Artificial Sequence
  Description of Artificial Sequence: Synthetic peptide
  Seed: DPRMCSLMQGSTLPR
DPRMWSLMQGSTGPR

SEQ ID NO: 60535 - protein, 15 aa, Artificial Sequence
  Description of Artificial Sequence: Synthetic peptide
  Seed: DPRMCSLMQGSTLPR
DPRMWSLMQGSTHPR

SEQ ID NO: 60536 - protein, 15 aa, Artificial Sequence
  Description of Artificial Sequence: Synthetic peptide
  Seed: DPRMCSLMQGSTLPR
DPRMWSLMQGSTIPR

SEQ ID NO: 60537 - protein, 15 aa, Artificial Sequence
  Description of Artificial Sequence: Synthetic peptide
  Seed: DPRMCSLMQGSTLPR
DPRMWSLMQGSTLPR

SEQ ID NO: 60538 - protein, 15 aa, Artificial Sequence
  Description of Artificial Sequence: Synthetic peptide
  Seed: DPRMCSLMQGSTLPR
DPRMWSLMQGSTMPR

SEQ ID NO: 60539 - protein, 15 aa, Artificial Sequence
  Description of Artificial Sequence: Synthetic peptide
  Seed: DPRMCSLMQGSTLPR
DPRMWSLMQGSTNPR

SEQ ID NO: 60540 - protein, 15 aa, Artificial Sequence
  Description of Artificial Sequence: Synthetic peptide
  Seed: DPRMCSLMQGSTLPR
DPRMWSLMQGSTQPR

SEQ ID NO: 60541 - protein, 15 aa, Artificial Sequence
  Description of Artificial Sequence: Synthetic peptide
  Seed: DPRMCSLMQGSTLPR
DPRMWSLMQGSTSPR

SEQ ID NO: 60542 - protein, 15 aa, Artificial Sequence
  Description of Artificial Sequence: Synthetic peptide
  Seed: DPRMCSLMQGSTLPR
DPRMWSLMQGSTTPR

SEQ ID NO: 60543 - protein, 15 aa, Artificial Sequence
  Description of Artificial Sequence: Synthetic peptide
  Seed: DPRMCSLMQGSTLPR
DPRMWSLMQGSTVPR

SEQ ID NO: 60544 - protein, 15 aa, Artificial Sequence
  Description of Artificial Sequence: Synthetic peptide
  Seed: DPRMCSLMQGSTLPR
DPRMWSLMQGSTYPR

SEQ ID NO: 60545 - protein, 15 aa, Artificial Sequence
  Description of Artificial Sequence: Synthetic peptide
  Seed: DPRMCSLMQGSTLPR
DPRMWSLMQHSTIPR

SEQ ID NO: 60546 - protein, 15 aa, Artificial Sequence
  Description of Artificial Sequence: Synthetic peptide
  Seed: DPRMCSLMQGSTLPR
DPRMWSLMQHSTLPR

SEQ ID NO: 60547 - protein, 15 aa, Artificial Sequence
  Description of Artificial Sequence: Synthetic peptide
  Seed: DPRMCSLMQGSTLPR
DPRMWSLMQHSTVPR

SEQ ID NO: 60548 - protein, 15 aa, Artificial Sequence
  Description of Artificial Sequence: Synthetic peptide
  Seed: DPRMCSLMQGSTLPR
DPRMWSLMQISTAPR

SEQ ID NO: 60549 - protein, 15 aa, Artificial Sequence
  Description of Artificial Sequence: Synthetic peptide
  Seed: DPRMCSLMQGSTLPR
DPRMWSLMQISTGPR

SEQ ID NO: 60550 - protein, 15 aa, Artificial Sequence
  Description of Artificial Sequence: Synthetic peptide
  Seed: DPRMCSLMQGSTLPR
DPRMWSLMQISTHPR

SEQ ID NO: 60551 - protein, 15 aa, Artificial Sequence
  Description of Artificial Sequence: Synthetic peptide
  Seed: DPRMCSLMQGSTLPR
DPRMWSLMQISTIPR

SEQ ID NO: 60552 - protein, 15 aa, Artificial Sequence
  Description of Artificial Sequence: Synthetic peptide
  Seed: DPRMCSLMQGSTLPR
DPRMWSLMQISTLPR

SEQ ID NO: 60553 - protein, 15 aa, Artificial Sequence
  Description of Artificial Sequence: Synthetic peptide
  Seed: DPRMCSLMQGSTLPR
DPRMWSLMQISTMPR

SEQ ID NO: 60554 - protein, 15 aa, Artificial Sequence
  Description of Artificial Sequence: Synthetic peptide
  Seed: DPRMCSLMQGSTLPR
DPRMWSLMQISTNPR

SEQ ID NO: 60555 - protein, 15 aa, Artificial Sequence
  Description of Artificial Sequence: Synthetic peptide
  Seed: DPRMCSLMQGSTLPR
DPRMWSLMQISTSPR

SEQ ID NO: 60556 - protein, 15 aa, Artificial Sequence
  Description of Artificial Sequence: Synthetic peptide
  Seed: DPRMCSLMQGSTLPR
DPRMWSLMQISTTPR

SEQ ID NO: 60557 - protein, 15 aa, Artificial Sequence
  Description of Artificial Sequence: Synthetic peptide
  Seed: DPRMCSLMQGSTLPR
DPRMWSLMQISTVPR

SEQ ID NO: 60558 - protein, 15 aa, Artificial Sequence
  Description of Artificial Sequence: Synthetic peptide
  Seed: DPRMCSLMQGSTLPR
DPRMWSLMQLSTAPR

SEQ ID NO: 60559 - protein, 15 aa, Artificial Sequence
  Description of Artificial Sequence: Synthetic peptide
  Seed: DPRMCSLMQGSTLPR
DPRMWSLMQLSTNPR

SEQ ID NO: 60560 - protein, 15 aa, Artificial Sequence
  Description of Artificial Sequence: Synthetic peptide
  Seed: DPRMCSLMQGSTLPR
DPRMWSLMQLSTSPR

SEQ ID NO: 60561 - protein, 15 aa, Artificial Sequence
  Description of Artificial Sequence: Synthetic peptide
  Seed: DPRMCSLMQGSTLPR
DPRMWSLMQLSTTPR

SEQ ID NO: 60562 - protein, 15 aa, Artificial Sequence
  Description of Artificial Sequence: Synthetic peptide
  Seed: DPRMCSLMQGSTLPR
DPRMWSLMQMSTAPR

SEQ ID NO: 60563 - protein, 15 aa, Artificial Sequence
  Description of Artificial Sequence: Synthetic peptide
  Seed: DPRMCSLMQGSTLPR
DPRMWSLMQMSTNPR

SEQ ID NO: 60564 - protein, 15 aa, Artificial Sequence
  Description of Artificial Sequence: Synthetic peptide
  Seed: DPRMCSLMQGSTLPR
DPRMWSLMQMSTSPR

SEQ ID NO: 60565 - protein, 15 aa, Artificial Sequence
  Description of Artificial Sequence: Synthetic peptide
  Seed: DPRMCSLMQGSTLPR
DPRMWSLMQNSTAPR

SEQ ID NO: 60566 - protein, 15 aa, Artificial Sequence
  Description of Artificial Sequence: Synthetic peptide
  Seed: DPRMCSLMQGSTLPR
DPRMWSLMQNSTGPR

SEQ ID NO: 60567 - protein, 15 aa, Artificial Sequence
  Description of Artificial Sequence: Synthetic peptide
  Seed: DPRMCSLMQGSTLPR
DPRMWSLMQNSTIPR

SEQ ID NO: 60568 - protein, 15 aa, Artificial Sequence
  Description of Artificial Sequence: Synthetic peptide
  Seed: DPRMCSLMQGSTLPR
DPRMWSLMQNSTLPR

SEQ ID NO: 60569 - protein, 15 aa, Artificial Sequence
  Description of Artificial Sequence: Synthetic peptide
  Seed: DPRMCSLMQGSTLPR
DPRMWSLMQNSTMPR

SEQ ID NO: 60570 - protein, 15 aa, Artificial Sequence
  Description of Artificial Sequence: Synthetic peptide
  Seed: DPRMCSLMQGSTLPR
DPRMWSLMQNSTNPR

SEQ ID NO: 60571 - protein, 15 aa, Artificial Sequence
  Description of Artificial Sequence: Synthetic peptide
  Seed: DPRMCSLMQGSTLPR
DPRMWSLMQNSTSPR

SEQ ID NO: 60572 - protein, 15 aa, Artificial Sequence
  Description of Artificial Sequence: Synthetic peptide
  Seed: DPRMCSLMQGSTLPR
DPRMWSLMQNSTTPR

SEQ ID NO: 60573 - protein, 15 aa, Artificial Sequence
  Description of Artificial Sequence: Synthetic peptide
  Seed: DPRMCSLMQGSTLPR
DPRMWSLMQNSTVPR

SEQ ID NO: 60574 - protein, 15 aa, Artificial Sequence
  Description of Artificial Sequence: Synthetic peptide
  Seed: DPRMCSLMQGSTLPR
DPRMWSLMQPSTAPR

SEQ ID NO: 60575 - protein, 15 aa, Artificial Sequence
  Description of Artificial Sequence: Synthetic peptide
  Seed: DPRMCSLMQGSTLPR
DPRMWSLMQPSTFPR

SEQ ID NO: 60576 - protein, 15 aa, Artificial Sequence
  Description of Artificial Sequence: Synthetic peptide
  Seed: DPRMCSLMQGSTLPR
DPRMWSLMQPSTGPR

SEQ ID NO: 60577 - protein, 15 aa, Artificial Sequence
  Description of Artificial Sequence: Synthetic peptide
  Seed: DPRMCSLMQGSTLPR
DPRMWSLMQPSTHPR

SEQ ID NO: 60578 - protein, 15 aa, Artificial Sequence
  Description of Artificial Sequence: Synthetic peptide
  Seed: DPRMCSLMQGSTLPR
DPRMWSLMQPSTIPR

SEQ ID NO: 60579 - protein, 15 aa, Artificial Sequence
  Description of Artificial Sequence: Synthetic peptide
  Seed: DPRMCSLMQGSTLPR
DPRMWSLMQPSTLPR

SEQ ID NO: 60580 - protein, 15 aa, Artificial Sequence
  Description of Artificial Sequence: Synthetic peptide
  Seed: DPRMCSLMQGSTLPR
DPRMWSLMQPSTMPR

SEQ ID NO: 60581 - protein, 15 aa, Artificial Sequence
  Description of Artificial Sequence: Synthetic peptide
  Seed: DPRMCSLMQGSTLPR
DPRMWSLMQPSTNPR

SEQ ID NO: 60582 - protein, 15 aa, Artificial Sequence
  Description of Artificial Sequence: Synthetic peptide
  Seed: DPRMCSLMQGSTLPR
DPRMWSLMQPSTQPR

SEQ ID NO: 60583 - protein, 15 aa, Artificial Sequence
  Description of Artificial Sequence: Synthetic peptide
  Seed: DPRMCSLMQGSTLPR
DPRMWSLMQPSTSPR

SEQ ID NO: 60584 - protein, 15 aa, Artificial Sequence
  Description of Artificial Sequence: Synthetic peptide
  Seed: DPRMCSLMQGSTLPR
DPRMWSLMQPSTTPR

SEQ ID NO: 60585 - protein, 15 aa, Artificial Sequence
  Description of Artificial Sequence: Synthetic peptide
  Seed: DPRMCSLMQGSTLPR
DPRMWSLMQPSTVPR

SEQ ID NO: 60586 - protein, 15 aa, Artificial Sequence
  Description of Artificial Sequence: Synthetic peptide
  Seed: DPRMCSLMQGSTLPR
DPRMWSLMQSSTAPR

SEQ ID NO: 60587 - protein, 15 aa, Artificial Sequence
  Description of Artificial Sequence: Synthetic peptide
  Seed: DPRMCSLMQGSTLPR
DPRMWSLMQSSTCPR

SEQ ID NO: 60588 - protein, 15 aa, Artificial Sequence
  Description of Artificial Sequence: Synthetic peptide
  Seed: DPRMCSLMQGSTLPR
DPRMWSLMQSSTFPR

SEQ ID NO: 60589 - protein, 15 aa, Artificial Sequence
  Description of Artificial Sequence: Synthetic peptide
  Seed: DPRMCSLMQGSTLPR
DPRMWSLMQSSTGPR

SEQ ID NO: 60590 - protein, 15 aa, Artificial Sequence
  Description of Artificial Sequence: Synthetic peptide
  Seed: DPRMCSLMQGSTLPR
DPRMWSLMQSSTHPR

SEQ ID NO: 60591 - protein, 15 aa, Artificial Sequence
  Description of Artificial Sequence: Synthetic peptide
  Seed: DPRMCSLMQGSTLPR
DPRMWSLMQSSTIPR

SEQ ID NO: 60592 - protein, 15 aa, Artificial Sequence
  Description of Artificial Sequence: Synthetic peptide
  Seed: DPRMCSLMQGSTLPR
DPRMWSLMQSSTLPR

SEQ ID NO: 60593 - protein, 15 aa, Artificial Sequence
  Description of Artificial Sequence: Synthetic peptide
  Seed: DPRMCSLMQGSTLPR
DPRMWSLMQSSTMPR

SEQ ID NO: 60594 - protein, 15 aa, Artificial Sequence
  Description of Artificial Sequence: Synthetic peptide
  Seed: DPRMCSLMQGSTLPR
DPRMWSLMQSSTNPR

SEQ ID NO: 60595 - protein, 15 aa, Artificial Sequence
  Description of Artificial Sequence: Synthetic peptide
  Seed: DPRMCSLMQGSTLPR
DPRMWSLMQSSTQPR

SEQ ID NO: 60596 - protein, 15 aa, Artificial Sequence
  Description of Artificial Sequence: Synthetic peptide
  Seed: DPRMCSLMQGSTLPR
DPRMWSLMQSSTSPR

SEQ ID NO: 60597 - protein, 15 aa, Artificial Sequence
  Description of Artificial Sequence: Synthetic peptide
  Seed: DPRMCSLMQGSTLPR
DPRMWSLMQSSTTPR

SEQ ID NO: 60598 - protein, 15 aa, Artificial Sequence
  Description of Artificial Sequence: Synthetic peptide
  Seed: DPRMCSLMQGSTLPR
DPRMWSLMQSSTVPR

SEQ ID NO: 60599 - protein, 15 aa, Artificial Sequence
  Description of Artificial Sequence: Synthetic peptide
  Seed: DPRMCSLMQGSTLPR
DPRMWSLMQTSTAPR

SEQ ID NO: 60600 - protein, 15 aa, Artificial Sequence
  Description of Artificial Sequence: Synthetic peptide
  Seed: DPRMCSLMQGSTLPR
DPRMWSLMQTSTHPR

SEQ ID NO: 60601 - protein, 15 aa, Artificial Sequence
  Description of Artificial Sequence: Synthetic peptide
  Seed: DPRMCSLMQGSTLPR
DPRMWSLMQTSTIPR

SEQ ID NO: 60602 - protein, 15 aa, Artificial Sequence
  Description of Artificial Sequence: Synthetic peptide
  Seed: DPRMCSLMQGSTLPR
DPRMWSLMQTSTLPR

SEQ ID NO: 60603 - protein, 15 aa, Artificial Sequence
  Description of Artificial Sequence: Synthetic peptide
  Seed: DPRMCSLMQGSTLPR
DPRMWSLMQTSTMPR

SEQ ID NO: 60604 - protein, 15 aa, Artificial Sequence
  Description of Artificial Sequence: Synthetic peptide
  Seed: DPRMCSLMQGSTLPR
DPRMWSLMQTSTNPR

SEQ ID NO: 60605 - protein, 15 aa, Artificial Sequence
  Description of Artificial Sequence: Synthetic peptide
  Seed: DPRMCSLMQGSTLPR
DPRMWSLMQTSTQPR

SEQ ID NO: 60606 - protein, 15 aa, Artificial Sequence
  Description of Artificial Sequence: Synthetic peptide
  Seed: DPRMCSLMQGSTLPR
DPRMWSLMQTSTSPR

SEQ ID NO: 60607 - protein, 15 aa, Artificial Sequence
  Description of Artificial Sequence: Synthetic peptide
  Seed: DPRMCSLMQGSTLPR
DPRMWSLMQTSTTPR

SEQ ID NO: 60608 - protein, 15 aa, Artificial Sequence
  Description of Artificial Sequence: Synthetic peptide
  Seed: DPRMCSLMQGSTLPR
DPRMWSLMQTSTVPR

SEQ ID NO: 60609 - protein, 15 aa, Artificial Sequence
  Description of Artificial Sequence: Synthetic peptide
  Seed: DPRMCSLMQGSTLPR
DPRMWSLMQVSTAPR

SEQ ID NO: 60610 - protein, 15 aa, Artificial Sequence
  Description of Artificial Sequence: Synthetic peptide
  Seed: DPRMCSLMQGSTLPR
DPRMWSLMQVSTGPR

SEQ ID NO: 60611 - protein, 15 aa, Artificial Sequence
  Description of Artificial Sequence: Synthetic peptide
  Seed: DPRMCSLMQGSTLPR
DPRMWSLMQVSTHPR

SEQ ID NO: 60612 - protein, 15 aa, Artificial Sequence
  Description of Artificial Sequence: Synthetic peptide
  Seed: DPRMCSLMQGSTLPR
DPRMWSLMQVSTIPR

SEQ ID NO: 60613 - protein, 15 aa, Artificial Sequence
  Description of Artificial Sequence: Synthetic peptide
  Seed: DPRMCSLMQGSTLPR
DPRMWSLMQVSTLPR

SEQ ID NO: 60614 - protein, 15 aa, Artificial Sequence
  Description of Artificial Sequence: Synthetic peptide
  Seed: DPRMCSLMQGSTLPR
DPRMWSLMQVSTMPR

SEQ ID NO: 60615 - protein, 15 aa, Artificial Sequence
  Description of Artificial Sequence: Synthetic peptide
  Seed: DPRMCSLMQGSTLPR
DPRMWSLMQVSTNPR

SEQ ID NO: 60616 - protein, 15 aa, Artificial Sequence
  Description of Artificial Sequence: Synthetic peptide
  Seed: DPRMCSLMQGSTLPR
DPRMWSLMQVSTQPR

SEQ ID NO: 60617 - protein, 15 aa, Artificial Sequence
  Description of Artificial Sequence: Synthetic peptide
  Seed: DPRMCSLMQGSTLPR
DPRMWSLMQVSTSPR

SEQ ID NO: 60618 - protein, 15 aa, Artificial Sequence
  Description of Artificial Sequence: Synthetic peptide
  Seed: DPRMCSLMQGSTLPR
DPRMWSLMQVSTTPR

SEQ ID NO: 60619 - protein, 15 aa, Artificial Sequence
  Description of Artificial Sequence: Synthetic peptide
  Seed: DPRMCSLMQGSTLPR
DPRMWSLMQVSTVPR

SEQ ID NO: 60620 - protein, 15 aa, Artificial Sequence
  Description of Artificial Sequence: Synthetic peptide
  Seed: DPRMCSLMQGSTLPR
DPRMWSLNQASTIPR

SEQ ID NO: 60621 - protein, 15 aa, Artificial Sequence
  Description of Artificial Sequence: Synthetic peptide
  Seed: DPRMCSLMQGSTLPR
DPRMWSLNQASTLPR

SEQ ID NO: 60622 - protein, 15 aa, Artificial Sequence
  Description of Artificial Sequence: Synthetic peptide
  Seed: DPRMCSLMQGSTLPR
DPRMWSLNQASTVPR

SEQ ID NO: 60623 - protein, 15 aa, Artificial Sequence
  Description of Artificial Sequence: Synthetic peptide
  Seed: DPRMCSLMQGSTLPR
DPRMWSLQQASTAPR

SEQ ID NO: 60624 - protein, 15 aa, Artificial Sequence
  Description of Artificial Sequence: Synthetic peptide
  Seed: DPRMCSLMQGSTLPR
DPRMWSLQQASTIPR

SEQ ID NO: 60625 - protein, 15 aa, Artificial Sequence
  Description of Artificial Sequence: Synthetic peptide
  Seed: DPRMCSLMQGSTLPR
DPRMWSLQQASTLPR

SEQ ID NO: 60626 - protein, 15 aa, Artificial Sequence
  Description of Artificial Sequence: Synthetic peptide
  Seed: DPRMCSLMQGSTLPR
DPRMWSLQQASTMPR

SEQ ID NO: 60627 - protein, 15 aa, Artificial Sequence
  Description of Artificial Sequence: Synthetic peptide
  Seed: DPRMCSLMQGSTLPR
DPRMWSLQQASTSPR

SEQ ID NO: 60628 - protein, 15 aa, Artificial Sequence
  Description of Artificial Sequence: Synthetic peptide
  Seed: DPRMCSLMQGSTLPR
DPRMWSLQQASTTPR

SEQ ID NO: 60629 - protein, 15 aa, Artificial Sequence
  Description of Artificial Sequence: Synthetic peptide
  Seed: DPRMCSLMQGSTLPR
DPRMWSLQQASTVPR

SEQ ID NO: 60630 - protein, 15 aa, Artificial Sequence
  Description of Artificial Sequence: Synthetic peptide
  Seed: DPRMCSLMQGSTLPR
DPRMWSLQQGSTAPR

SEQ ID NO: 60631 - protein, 15 aa, Artificial Sequence
  Description of Artificial Sequence: Synthetic peptide
  Seed: DPRMCSLMQGSTLPR
DPRMWSLQQGSTIPR

SEQ ID NO: 60632 - protein, 15 aa, Artificial Sequence
  Description of Artificial Sequence: Synthetic peptide
  Seed: DPRMCSLMQGSTLPR
DPRMWSLQQGSTLPR

SEQ ID NO: 60633 - protein, 15 aa, Artificial Sequence
  Description of Artificial Sequence: Synthetic peptide
  Seed: DPRMCSLMQGSTLPR
DPRMWSLQQGSTMPR

SEQ ID NO: 60634 - protein, 15 aa, Artificial Sequence
  Description of Artificial Sequence: Synthetic peptide
  Seed: DPRMCSLMQGSTLPR
DPRMWSLQQGSTTPR

SEQ ID NO: 60635 - protein, 15 aa, Artificial Sequence
  Description of Artificial Sequence: Synthetic peptide
  Seed: DPRMCSLMQGSTLPR
DPRMWSLQQGSTVPR

SEQ ID NO: 60636 - protein, 15 aa, Artificial Sequence
  Description of Artificial Sequence: Synthetic peptide
  Seed: DPRMCSLMQGSTLPR
DPRMWSLQQNSTLPR

SEQ ID NO: 60637 - protein, 15 aa, Artificial Sequence
  Description of Artificial Sequence: Synthetic peptide
  Seed: DPRMCSLMQGSTLPR
DPRMWSLQQNSTVPR

SEQ ID NO: 60638 - protein, 15 aa, Artificial Sequence
  Description of Artificial Sequence: Synthetic peptide
  Seed: DPRMCSLMQGSTLPR
DPRMWSLQQPSTIPR

SEQ ID NO: 60639 - protein, 15 aa, Artificial Sequence
  Description of Artificial Sequence: Synthetic peptide
  Seed: DPRMCSLMQGSTLPR
DPRMWSLQQPSTLPR

SEQ ID NO: 60640 - protein, 15 aa, Artificial Sequence
  Description of Artificial Sequence: Synthetic peptide
  Seed: DPRMCSLMQGSTLPR
DPRMWSLQQPSTVPR

SEQ ID NO: 60641 - protein, 15 aa, Artificial Sequence
  Description of Artificial Sequence: Synthetic peptide
  Seed: DPRMCSLMQGSTLPR
DPRMWSLQQSSTAPR

SEQ ID NO: 60642 - protein, 15 aa, Artificial Sequence
  Description of Artificial Sequence: Synthetic peptide
  Seed: DPRMCSLMQGSTLPR
DPRMWSLQQSSTIPR

SEQ ID NO: 60643 - protein, 15 aa, Artificial Sequence
  Description of Artificial Sequence: Synthetic peptide
  Seed: DPRMCSLMQGSTLPR
DPRMWSLQQSSTLPR

SEQ ID NO: 60644 - protein, 15 aa, Artificial Sequence
  Description of Artificial Sequence: Synthetic peptide
  Seed: DPRMCSLMQGSTLPR
DPRMWSLQQSSTMPR

SEQ ID NO: 60645 - protein, 15 aa, Artificial Sequence
  Description of Artificial Sequence: Synthetic peptide
  Seed: DPRMCSLMQGSTLPR
DPRMWSLQQSSTTPR

SEQ ID NO: 60646 - protein, 15 aa, Artificial Sequence
  Description of Artificial Sequence: Synthetic peptide
  Seed: DPRMCSLMQGSTLPR
DPRMWSLQQSSTVPR

SEQ ID NO: 60647 - protein, 15 aa, Artificial Sequence
  Description of Artificial Sequence: Synthetic peptide
  Seed: DPRMCSLMQGSTLPR
DPRMWSLQQTSTLPR

SEQ ID NO: 60648 - protein, 15 aa, Artificial Sequence
  Description of Artificial Sequence: Synthetic peptide
  Seed: DPRMCSLMQGSTLPR
DPRMWSLQQTSTVPR

SEQ ID NO: 60649 - protein, 15 aa, Artificial Sequence
  Description of Artificial Sequence: Synthetic peptide
  Seed: DPRMCSLMQGSTLPR
DPRMWSLSQASTAPR

SEQ ID NO: 60650 - protein, 15 aa, Artificial Sequence
  Description of Artificial Sequence: Synthetic peptide
  Seed: DPRMCSLMQGSTLPR
DPRMWSLSQASTIPR

SEQ ID NO: 60651 - protein, 15 aa, Artificial Sequence
  Description of Artificial Sequence: Synthetic peptide
  Seed: DPRMCSLMQGSTLPR
DPRMWSLSQASTLPR

SEQ ID NO: 60652 - protein, 15 aa, Artificial Sequence
  Description of Artificial Sequence: Synthetic peptide
  Seed: DPRMCSLMQGSTLPR
DPRMWSLSQASTMPR

SEQ ID NO: 60653 - protein, 15 aa, Artificial Sequence
  Description of Artificial Sequence: Synthetic peptide
  Seed: DPRMCSLMQGSTLPR
DPRMWSLSQASTVPR

SEQ ID NO: 60654 - protein, 15 aa, Artificial Sequence
  Description of Artificial Sequence: Synthetic peptide
  Seed: DPRMCSLMQGSTLPR
DPRMWSLSQGSTAPR

SEQ ID NO: 60655 - protein, 15 aa, Artificial Sequence
  Description of Artificial Sequence: Synthetic peptide
  Seed: DPRMCSLMQGSTLPR
DPRMWSLSQGSTIPR

SEQ ID NO: 60656 - protein, 15 aa, Artificial Sequence
  Description of Artificial Sequence: Synthetic peptide
  Seed: DPRMCSLMQGSTLPR
DPRMWSLSQGSTLPR

SEQ ID NO: 60657 - protein, 15 aa, Artificial Sequence
  Description of Artificial Sequence: Synthetic peptide
  Seed: DPRMCSLMQGSTLPR
DPRMWSLSQGSTVPR

SEQ ID NO: 60658 - protein, 15 aa, Artificial Sequence
  Description of Artificial Sequence: Synthetic peptide
  Seed: DPRMCSLMQGSTLPR
DPRMWSLSQSSTIPR

SEQ ID NO: 60659 - protein, 15 aa, Artificial Sequence
  Description of Artificial Sequence: Synthetic peptide
  Seed: DPRMCSLMQGSTLPR
DPRMWSLSQSSTLPR

SEQ ID NO: 60660 - protein, 15 aa, Artificial Sequence
  Description of Artificial Sequence: Synthetic peptide
  Seed: DPRMCSLMQGSTLPR
DPRMWSLSQSSTMPR

SEQ ID NO: 60661 - protein, 15 aa, Artificial Sequence
  Description of Artificial Sequence: Synthetic peptide
  Seed: DPRMCSLMQGSTLPR
DPRMWSLSQSSTVPR

SEQ ID NO: 60662 - protein, 15 aa, Artificial Sequence
  Description of Artificial Sequence: Synthetic peptide
  Seed: DPRMCSLMQGSTLPR
DPRMWSLSQTSTIPR

SEQ ID NO: 60663 - protein, 15 aa, Artificial Sequence
  Description of Artificial Sequence: Synthetic peptide
  Seed: DPRMCSLMQGSTLPR
DPRMWSLTQASTAPR

SEQ ID NO: 60664 - protein, 15 aa, Artificial Sequence
  Description of Artificial Sequence: Synthetic peptide
  Seed: DPRMCSLMQGSTLPR
DPRMWSLTQASTFPR

SEQ ID NO: 60665 - protein, 15 aa, Artificial Sequence
  Description of Artificial Sequence: Synthetic peptide
  Seed: DPRMCSLMQGSTLPR
DPRMWSLTQASTIPR

SEQ ID NO: 60666 - protein, 15 aa, Artificial Sequence
  Description of Artificial Sequence: Synthetic peptide
  Seed: DPRMCSLMQGSTLPR
DPRMWSLTQASTLPR

SEQ ID NO: 60667 - protein, 15 aa, Artificial Sequence
  Description of Artificial Sequence: Synthetic peptide
  Seed: DPRMCSLMQGSTLPR
DPRMWSLTQASTMPR

SEQ ID NO: 60668 - protein, 15 aa, Artificial Sequence
  Description of Artificial Sequence: Synthetic peptide
  Seed: DPRMCSLMQGSTLPR
DPRMWSLTQASTVPR

SEQ ID NO: 60669 - protein, 15 aa, Artificial Sequence
  Description of Artificial Sequence: Synthetic peptide
  Seed: DPRMCSLMQGSTLPR
DPRMWSLTQGSTIPR

SEQ ID NO: 60670 - protein, 15 aa, Artificial Sequence
  Description of Artificial Sequence: Synthetic peptide
  Seed: DPRMCSLMQGSTLPR
DPRMWSLTQGSTLPR

SEQ ID NO: 60671 - protein, 15 aa, Artificial Sequence
  Description of Artificial Sequence: Synthetic peptide
  Seed: DPRMCSLMQGSTLPR
DPRMWSLTQGSTVPR

SEQ ID NO: 60672 - protein, 15 aa, Artificial Sequence
  Description of Artificial Sequence: Synthetic peptide
  Seed: DPRMCSLMQGSTLPR
DPRMWSLTQNSTIPR

SEQ ID NO: 60673 - protein, 15 aa, Artificial Sequence
  Description of Artificial Sequence: Synthetic peptide
  Seed: DPRMCSLMQGSTLPR
DPRMWSLTQPSTIPR

SEQ ID NO: 60674 - protein, 15 aa, Artificial Sequence
  Description of Artificial Sequence: Synthetic peptide
  Seed: DPRMCSLMQGSTLPR
DPRMWSLTQSSTFPR

SEQ ID NO: 60675 - protein, 15 aa, Artificial Sequence
  Description of Artificial Sequence: Synthetic peptide
  Seed: DPRMCSLMQGSTLPR
DPRMWSLTQSSTIPR

SEQ ID NO: 60676 - protein, 15 aa, Artificial Sequence
  Description of Artificial Sequence: Synthetic peptide
  Seed: DPRMCSLMQGSTLPR
DPRMWSLTQSSTLPR

SEQ ID NO: 60677 - protein, 15 aa, Artificial Sequence
  Description of Artificial Sequence: Synthetic peptide
  Seed: DPRMCSLMQGSTLPR
DPRMWSLTQSSTMPR

SEQ ID NO: 60678 - protein, 15 aa, Artificial Sequence
  Description of Artificial Sequence: Synthetic peptide
  Seed: DPRMCSLMQGSTLPR
DPRMWSLTQSSTVPR

SEQ ID NO: 60679 - protein, 15 aa, Artificial Sequence
  Description of Artificial Sequence: Synthetic peptide
  Seed: DPRMCSLMQGSTLPR
DPRMWSLTQTSTIPR

SEQ ID NO: 60680 - protein, 15 aa, Artificial Sequence
  Description of Artificial Sequence: Synthetic peptide
  Seed: DPRMCSLMQGSTLPR
DPRMWSLTQTSTLPR

SEQ ID NO: 60681 - protein, 15 aa, Artificial Sequence
  Description of Artificial Sequence: Synthetic peptide
  Seed: DPRMCSLMQGSTLPR
DPRMWSLVQASTAPR

SEQ ID NO: 60682 - protein, 15 aa, Artificial Sequence
  Description of Artificial Sequence: Synthetic peptide
  Seed: DPRMCSLMQGSTLPR
DPRMWSLVQASTIPR

SEQ ID NO: 60683 - protein, 15 aa, Artificial Sequence
  Description of Artificial Sequence: Synthetic peptide
  Seed: DPRMCSLMQGSTLPR
DPRMWSLVQASTLPR

SEQ ID NO: 60684 - protein, 15 aa, Artificial Sequence
  Description of Artificial Sequence: Synthetic peptide
  Seed: DPRMCSLMQGSTLPR
DPRMWSLVQASTMPR

SEQ ID NO: 60685 - protein, 15 aa, Artificial Sequence
  Description of Artificial Sequence: Synthetic peptide
  Seed: DPRMCSLMQGSTLPR
DPRMWSLVQASTNPR

SEQ ID NO: 60686 - protein, 15 aa, Artificial Sequence
  Description of Artificial Sequence: Synthetic peptide
  Seed: DPRMCSLMQGSTLPR
DPRMWSLVQASTSPR

SEQ ID NO: 60687 - protein, 15 aa, Artificial Sequence
  Description of Artificial Sequence: Synthetic peptide
  Seed: DPRMCSLMQGSTLPR
DPRMWSLVQASTTPR

SEQ ID NO: 60688 - protein, 15 aa, Artificial Sequence
  Description of Artificial Sequence: Synthetic peptide
  Seed: DPRMCSLMQGSTLPR
DPRMWSLVQASTVPR

SEQ ID NO: 60689 - protein, 15 aa, Artificial Sequence
  Description of Artificial Sequence: Synthetic peptide
  Seed: DPRMCSLMQGSTLPR
DPRMWSLVQGSTAPR

SEQ ID NO: 60690 - protein, 15 aa, Artificial Sequence
  Description of Artificial Sequence: Synthetic peptide
  Seed: DPRMCSLMQGSTLPR
DPRMWSLVQGSTIPR

SEQ ID NO: 60691 - protein, 15 aa, Artificial Sequence
  Description of Artificial Sequence: Synthetic peptide
  Seed: DPRMCSLMQGSTLPR
DPRMWSLVQGSTLPR

SEQ ID NO: 60692 - protein, 15 aa, Artificial Sequence
  Description of Artificial Sequence: Synthetic peptide
  Seed: DPRMCSLMQGSTLPR
DPRMWSLVQGSTMPR

SEQ ID NO: 60693 - protein, 15 aa, Artificial Sequence
  Description of Artificial Sequence: Synthetic peptide
  Seed: DPRMCSLMQGSTLPR
DPRMWSLVQGSTSPR

SEQ ID NO: 60694 - protein, 15 aa, Artificial Sequence
  Description of Artificial Sequence: Synthetic peptide
  Seed: DPRMCSLMQGSTLPR
DPRMWSLVQGSTTPR

SEQ ID NO: 60695 - protein, 15 aa, Artificial Sequence
  Description of Artificial Sequence: Synthetic peptide
  Seed: DPRMCSLMQGSTLPR
DPRMWSLVQGSTVPR

SEQ ID NO: 60696 - protein, 15 aa, Artificial Sequence
  Description of Artificial Sequence: Synthetic peptide
  Seed: DPRMCSLMQGSTLPR
DPRMWSLVQISTAPR

SEQ ID NO: 60697 - protein, 15 aa, Artificial Sequence
  Description of Artificial Sequence: Synthetic peptide
  Seed: DPRMCSLMQGSTLPR
DPRMWSLVQNSTAPR

SEQ ID NO: 60698 - protein, 15 aa, Artificial Sequence
  Description of Artificial Sequence: Synthetic peptide
  Seed: DPRMCSLMQGSTLPR
DPRMWSLVQNSTIPR

SEQ ID NO: 60699 - protein, 15 aa, Artificial Sequence
  Description of Artificial Sequence: Synthetic peptide
  Seed: DPRMCSLMQGSTLPR
DPRMWSLVQNSTLPR

SEQ ID NO: 60700 - protein, 15 aa, Artificial Sequence
  Description of Artificial Sequence: Synthetic peptide
  Seed: DPRMCSLMQGSTLPR
DPRMWSLVQNSTVPR

SEQ ID NO: 60701 - protein, 15 aa, Artificial Sequence
  Description of Artificial Sequence: Synthetic peptide
  Seed: DPRMCSLMQGSTLPR
DPRMWSLVQPSTAPR

SEQ ID NO: 60702 - protein, 15 aa, Artificial Sequence
  Description of Artificial Sequence: Synthetic peptide
  Seed: DPRMCSLMQGSTLPR
DPRMWSLVQPSTIPR

SEQ ID NO: 60703 - protein, 15 aa, Artificial Sequence
  Description of Artificial Sequence: Synthetic peptide
  Seed: DPRMCSLMQGSTLPR
DPRMWSLVQPSTLPR

SEQ ID NO: 60704 - protein, 15 aa, Artificial Sequence
  Description of Artificial Sequence: Synthetic peptide
  Seed: DPRMCSLMQGSTLPR
DPRMWSLVQPSTNPR

SEQ ID NO: 60705 - protein, 15 aa, Artificial Sequence
  Description of Artificial Sequence: Synthetic peptide
  Seed: DPRMCSLMQGSTLPR
DPRMWSLVQPSTSPR

SEQ ID NO: 60706 - protein, 15 aa, Artificial Sequence
  Description of Artificial Sequence: Synthetic peptide
  Seed: DPRMCSLMQGSTLPR
DPRMWSLVQPSTVPR

SEQ ID NO: 60707 - protein, 15 aa, Artificial Sequence
  Description of Artificial Sequence: Synthetic peptide
  Seed: DPRMCSLMQGSTLPR
DPRMWSLVQSSTAPR

SEQ ID NO: 60708 - protein, 15 aa, Artificial Sequence
  Description of Artificial Sequence: Synthetic peptide
  Seed: DPRMCSLMQGSTLPR
DPRMWSLVQSSTIPR

SEQ ID NO: 60709 - protein, 15 aa, Artificial Sequence
  Description of Artificial Sequence: Synthetic peptide
  Seed: DPRMCSLMQGSTLPR
DPRMWSLVQSSTLPR

SEQ ID NO: 60710 - protein, 15 aa, Artificial Sequence
  Description of Artificial Sequence: Synthetic peptide
  Seed: DPRMCSLMQGSTLPR
DPRMWSLVQSSTMPR

SEQ ID NO: 60711 - protein, 15 aa, Artificial Sequence
  Description of Artificial Sequence: Synthetic peptide
  Seed: DPRMCSLMQGSTLPR
DPRMWSLVQSSTNPR

SEQ ID NO: 60712 - protein, 15 aa, Artificial Sequence
  Description of Artificial Sequence: Synthetic peptide
  Seed: DPRMCSLMQGSTLPR
DPRMWSLVQSSTSPR

SEQ ID NO: 60713 - protein, 15 aa, Artificial Sequence
  Description of Artificial Sequence: Synthetic peptide
  Seed: DPRMCSLMQGSTLPR
DPRMWSLVQSSTTPR

SEQ ID NO: 60714 - protein, 15 aa, Artificial Sequence
  Description of Artificial Sequence: Synthetic peptide
  Seed: DPRMCSLMQGSTLPR
DPRMWSLVQSSTVPR

SEQ ID NO: 60715 - protein, 15 aa, Artificial Sequence
  Description of Artificial Sequence: Synthetic peptide
  Seed: DPRMCSLMQGSTLPR
DPRMWSLVQTSTAPR

SEQ ID NO: 60716 - protein, 15 aa, Artificial Sequence
  Description of Artificial Sequence: Synthetic peptide
  Seed: DPRMCSLMQGSTLPR
DPRMWSLVQTSTIPR

SEQ ID NO: 60717 - protein, 15 aa, Artificial Sequence
  Description of Artificial Sequence: Synthetic peptide
  Seed: DPRMCSLMQGSTLPR
DPRMWSLVQTSTLPR

SEQ ID NO: 60718 - protein, 15 aa, Artificial Sequence
  Description of Artificial Sequence: Synthetic peptide
  Seed: DPRMCSLMQGSTLPR
DPRMWSLVQTSTNPR

SEQ ID NO: 60719 - protein, 15 aa, Artificial Sequence
  Description of Artificial Sequence: Synthetic peptide
  Seed: DPRMCSLMQGSTLPR
DPRMWSLVQTSTSPR

SEQ ID NO: 60720 - protein, 15 aa, Artificial Sequence
  Description of Artificial Sequence: Synthetic peptide
  Seed: DPRMCSLMQGSTLPR
DPRMWSLVQTSTVPR

SEQ ID NO: 60721 - protein, 15 aa, Artificial Sequence
  Description of Artificial Sequence: Synthetic peptide
  Seed: DPRMCSLMQGSTLPR
DPRMWSLVQVSTAPR

SEQ ID NO: 60722 - protein, 15 aa, Artificial Sequence
  Description of Artificial Sequence: Synthetic peptide
  Seed: DPRMCSLMQGSTLPR
DPRMWSLVQVSTNPR

SEQ ID NO: 60723 - protein, 15 aa, Artificial Sequence
  Description of Artificial Sequence: Synthetic peptide
  Seed: DPRMCSLMQGSTLPR
DPRMWSLVQVSTSPR

SEQ ID NO: 60724 - protein, 15 aa, Artificial Sequence
  Description of Artificial Sequence: Synthetic peptide
  Seed: DPRMCSLMQGSTLPR
DPRMYSLAQASTAPR

SEQ ID NO: 60725 - protein, 15 aa, Artificial Sequence
  Description of Artificial Sequence: Synthetic peptide
  Seed: DPRMCSLMQGSTLPR
DPRMYSLAQASTCPR

SEQ ID NO: 60726 - protein, 15 aa, Artificial Sequence
  Description of Artificial Sequence: Synthetic peptide
  Seed: DPRMCSLMQGSTLPR
DPRMYSLAQASTFPR

SEQ ID NO: 60727 - protein, 15 aa, Artificial Sequence
  Description of Artificial Sequence: Synthetic peptide
  Seed: DPRMCSLMQGSTLPR
DPRMYSLAQASTGPR

SEQ ID NO: 60728 - protein, 15 aa, Artificial Sequence
  Description of Artificial Sequence: Synthetic peptide
  Seed: DPRMCSLMQGSTLPR
DPRMYSLAQASTHPR

SEQ ID NO: 60729 - protein, 15 aa, Artificial Sequence
  Description of Artificial Sequence: Synthetic peptide
  Seed: DPRMCSLMQGSTLPR
DPRMYSLAQASTIPR

SEQ ID NO: 60730 - protein, 15 aa, Artificial Sequence
  Description of Artificial Sequence: Synthetic peptide
  Seed: DPRMCSLMQGSTLPR
DPRMYSLAQASTKPR

SEQ ID NO: 60731 - protein, 15 aa, Artificial Sequence
  Description of Artificial Sequence: Synthetic peptide
  Seed: DPRMCSLMQGSTLPR
DPRMYSLAQASTLPR

SEQ ID NO: 60732 - protein, 15 aa, Artificial Sequence
  Description of Artificial Sequence: Synthetic peptide
  Seed: DPRMCSLMQGSTLPR
DPRMYSLAQASTMPR

SEQ ID NO: 60733 - protein, 15 aa, Artificial Sequence
  Description of Artificial Sequence: Synthetic peptide
  Seed: DPRMCSLMQGSTLPR
DPRMYSLAQASTNPR

SEQ ID NO: 60734 - protein, 15 aa, Artificial Sequence
  Description of Artificial Sequence: Synthetic peptide
  Seed: DPRMCSLMQGSTLPR
DPRMYSLAQASTQPR

SEQ ID NO: 60735 - protein, 15 aa, Artificial Sequence
  Description of Artificial Sequence: Synthetic peptide
  Seed: DPRMCSLMQGSTLPR
DPRMYSLAQASTRPR

SEQ ID NO: 60736 - protein, 15 aa, Artificial Sequence
  Description of Artificial Sequence: Synthetic peptide
  Seed: DPRMCSLMQGSTLPR
DPRMYSLAQASTSPR

SEQ ID NO: 60737 - protein, 15 aa, Artificial Sequence
  Description of Artificial Sequence: Synthetic peptide
  Seed: DPRMCSLMQGSTLPR
DPRMYSLAQASTTPR

SEQ ID NO: 60738 - protein, 15 aa, Artificial Sequence
  Description of Artificial Sequence: Synthetic peptide
  Seed: DPRMCSLMQGSTLPR
DPRMYSLAQASTVPR

SEQ ID NO: 60739 - protein, 15 aa, Artificial Sequence
  Description of Artificial Sequence: Synthetic peptide
  Seed: DPRMCSLMQGSTLPR
DPRMYSLAQASTWPR

SEQ ID NO: 60740 - protein, 15 aa, Artificial Sequence
  Description of Artificial Sequence: Synthetic peptide
  Seed: DPRMCSLMQGSTLPR
DPRMYSLAQASTYPR

SEQ ID NO: 60741 - protein, 15 aa, Artificial Sequence
  Description of Artificial Sequence: Synthetic peptide
  Seed: DPRMCSLMQGSTLPR
DPRMYSLAQGSTAPR

SEQ ID NO: 60742 - protein, 15 aa, Artificial Sequence
  Description of Artificial Sequence: Synthetic peptide
  Seed: DPRMCSLMQGSTLPR
DPRMYSLAQGSTFPR

SEQ ID NO: 60743 - protein, 15 aa, Artificial Sequence
  Description of Artificial Sequence: Synthetic peptide
  Seed: DPRMCSLMQGSTLPR
DPRMYSLAQGSTGPR

SEQ ID NO: 60744 - protein, 15 aa, Artificial Sequence
  Description of Artificial Sequence: Synthetic peptide
  Seed: DPRMCSLMQGSTLPR
DPRMYSLAQGSTIPR

SEQ ID NO: 60745 - protein, 15 aa, Artificial Sequence
  Description of Artificial Sequence: Synthetic peptide
  Seed: DPRMCSLMQGSTLPR
DPRMYSLAQGSTLPR

SEQ ID NO: 60746 - protein, 15 aa, Artificial Sequence
  Description of Artificial Sequence: Synthetic peptide
  Seed: DPRMCSLMQGSTLPR
DPRMYSLAQGSTMPR

SEQ ID NO: 60747 - protein, 15 aa, Artificial Sequence
  Description of Artificial Sequence: Synthetic peptide
  Seed: DPRMCSLMQGSTLPR
DPRMYSLAQGSTSPR

SEQ ID NO: 60748 - protein, 15 aa, Artificial Sequence
  Description of Artificial Sequence: Synthetic peptide
  Seed: DPRMCSLMQGSTLPR
DPRMYSLAQGSTTPR

SEQ ID NO: 60749 - protein, 15 aa, Artificial Sequence
  Description of Artificial Sequence: Synthetic peptide
  Seed: DPRMCSLMQGSTLPR
DPRMYSLAQGSTVPR

SEQ ID NO: 60750 - protein, 15 aa, Artificial Sequence
  Description of Artificial Sequence: Synthetic peptide
  Seed: DPRMCSLMQGSTLPR
DPRMYSLAQHSTLPR

SEQ ID NO: 60751 - protein, 15 aa, Artificial Sequence
  Description of Artificial Sequence: Synthetic peptide
  Seed: DPRMCSLMQGSTLPR
DPRMYSLAQISTAPR

SEQ ID NO: 60752 - protein, 15 aa, Artificial Sequence
  Description of Artificial Sequence: Synthetic peptide
  Seed: DPRMCSLMQGSTLPR
DPRMYSLAQISTIPR

SEQ ID NO: 60753 - protein, 15 aa, Artificial Sequence
  Description of Artificial Sequence: Synthetic peptide
  Seed: DPRMCSLMQGSTLPR
DPRMYSLAQISTLPR

SEQ ID NO: 60754 - protein, 15 aa, Artificial Sequence
  Description of Artificial Sequence: Synthetic peptide
  Seed: DPRMCSLMQGSTLPR
DPRMYSLAQISTMPR

SEQ ID NO: 60755 - protein, 15 aa, Artificial Sequence
  Description of Artificial Sequence: Synthetic peptide
  Seed: DPRMCSLMQGSTLPR
DPRMYSLAQISTNPR

SEQ ID NO: 60756 - protein, 15 aa, Artificial Sequence
  Description of Artificial Sequence: Synthetic peptide
  Seed: DPRMCSLMQGSTLPR
DPRMYSLAQISTQPR

SEQ ID NO: 60757 - protein, 15 aa, Artificial Sequence
  Description of Artificial Sequence: Synthetic peptide
  Seed: DPRMCSLMQGSTLPR
DPRMYSLAQISTSPR

SEQ ID NO: 60758 - protein, 15 aa, Artificial Sequence
  Description of Artificial Sequence: Synthetic peptide
  Seed: DPRMCSLMQGSTLPR
DPRMYSLAQISTTPR

SEQ ID NO: 60759 - protein, 15 aa, Artificial Sequence
  Description of Artificial Sequence: Synthetic peptide
  Seed: DPRMCSLMQGSTLPR
DPRMYSLAQISTVPR

SEQ ID NO: 60760 - protein, 15 aa, Artificial Sequence
  Description of Artificial Sequence: Synthetic peptide
  Seed: DPRMCSLMQGSTLPR
DPRMYSLAQLSTAPR

SEQ ID NO: 60761 - protein, 15 aa, Artificial Sequence
  Description of Artificial Sequence: Synthetic peptide
  Seed: DPRMCSLMQGSTLPR
DPRMYSLAQLSTIPR

SEQ ID NO: 60762 - protein, 15 aa, Artificial Sequence
  Description of Artificial Sequence: Synthetic peptide
  Seed: DPRMCSLMQGSTLPR
DPRMYSLAQLSTLPR

SEQ ID NO: 60763 - protein, 15 aa, Artificial Sequence
  Description of Artificial Sequence: Synthetic peptide
  Seed: DPRMCSLMQGSTLPR
DPRMYSLAQLSTNPR

SEQ ID NO: 60764 - protein, 15 aa, Artificial Sequence
  Description of Artificial Sequence: Synthetic peptide
  Seed: DPRMCSLMQGSTLPR
DPRMYSLAQLSTSPR

SEQ ID NO: 60765 - protein, 15 aa, Artificial Sequence
  Description of Artificial Sequence: Synthetic peptide
  Seed: DPRMCSLMQGSTLPR
DPRMYSLAQLSTVPR

SEQ ID NO: 60766 - protein, 15 aa, Artificial Sequence
  Description of Artificial Sequence: Synthetic peptide
  Seed: DPRMCSLMQGSTLPR
DPRMYSLAQMSTAPR

SEQ ID NO: 60767 - protein, 15 aa, Artificial Sequence
  Description of Artificial Sequence: Synthetic peptide
  Seed: DPRMCSLMQGSTLPR
DPRMYSLAQMSTIPR

SEQ ID NO: 60768 - protein, 15 aa, Artificial Sequence
  Description of Artificial Sequence: Synthetic peptide
  Seed: DPRMCSLMQGSTLPR
DPRMYSLAQMSTLPR

SEQ ID NO: 60769 - protein, 15 aa, Artificial Sequence
  Description of Artificial Sequence: Synthetic peptide
  Seed: DPRMCSLMQGSTLPR
DPRMYSLAQMSTSPR

SEQ ID NO: 60770 - protein, 15 aa, Artificial Sequence
  Description of Artificial Sequence: Synthetic peptide
  Seed: DPRMCSLMQGSTLPR
DPRMYSLAQMSTVPR

SEQ ID NO: 60771 - protein, 15 aa, Artificial Sequence
  Description of Artificial Sequence: Synthetic peptide
  Seed: DPRMCSLMQGSTLPR
DPRMYSLAQNSTAPR

SEQ ID NO: 60772 - protein, 15 aa, Artificial Sequence
  Description of Artificial Sequence: Synthetic peptide
  Seed: DPRMCSLMQGSTLPR
DPRMYSLAQNSTIPR

SEQ ID NO: 60773 - protein, 15 aa, Artificial Sequence
  Description of Artificial Sequence: Synthetic peptide
  Seed: DPRMCSLMQGSTLPR
DPRMYSLAQNSTLPR

SEQ ID NO: 60774 - protein, 15 aa, Artificial Sequence
  Description of Artificial Sequence: Synthetic peptide
  Seed: DPRMCSLMQGSTLPR
DPRMYSLAQNSTMPR

SEQ ID NO: 60775 - protein, 15 aa, Artificial Sequence
  Description of Artificial Sequence: Synthetic peptide
  Seed: DPRMCSLMQGSTLPR
DPRMYSLAQNSTNPR

SEQ ID NO: 60776 - protein, 15 aa, Artificial Sequence
  Description of Artificial Sequence: Synthetic peptide
  Seed: DPRMCSLMQGSTLPR
DPRMYSLAQNSTSPR

SEQ ID NO: 60777 - protein, 15 aa, Artificial Sequence
  Description of Artificial Sequence: Synthetic peptide
  Seed: DPRMCSLMQGSTLPR
DPRMYSLAQNSTTPR

SEQ ID NO: 60778 - protein, 15 aa, Artificial Sequence
  Description of Artificial Sequence: Synthetic peptide
  Seed: DPRMCSLMQGSTLPR
DPRMYSLAQNSTVPR

SEQ ID NO: 60779 - protein, 15 aa, Artificial Sequence
  Description of Artificial Sequence: Synthetic peptide
  Seed: DPRMCSLMQGSTLPR
DPRMYSLAQPSTAPR

SEQ ID NO: 60780 - protein, 15 aa, Artificial Sequence
  Description of Artificial Sequence: Synthetic peptide
  Seed: DPRMCSLMQGSTLPR
DPRMYSLAQPSTFPR

SEQ ID NO: 60781 - protein, 15 aa, Artificial Sequence
  Description of Artificial Sequence: Synthetic peptide
  Seed: DPRMCSLMQGSTLPR
DPRMYSLAQPSTIPR

SEQ ID NO: 60782 - protein, 15 aa, Artificial Sequence
  Description of Artificial Sequence: Synthetic peptide
  Seed: DPRMCSLMQGSTLPR
DPRMYSLAQPSTLPR

SEQ ID NO: 60783 - protein, 15 aa, Artificial Sequence
  Description of Artificial Sequence: Synthetic peptide
  Seed: DPRMCSLMQGSTLPR
DPRMYSLAQPSTMPR

SEQ ID NO: 60784 - protein, 15 aa, Artificial Sequence
  Description of Artificial Sequence: Synthetic peptide
  Seed: DPRMCSLMQGSTLPR
DPRMYSLAQPSTNPR

SEQ ID NO: 60785 - protein, 15 aa, Artificial Sequence
  Description of Artificial Sequence: Synthetic peptide
  Seed: DPRMCSLMQGSTLPR
DPRMYSLAQPSTQPR

SEQ ID NO: 60786 - protein, 15 aa, Artificial Sequence
  Description of Artificial Sequence: Synthetic peptide
  Seed: DPRMCSLMQGSTLPR
DPRMYSLAQPSTSPR

SEQ ID NO: 60787 - protein, 15 aa, Artificial Sequence
  Description of Artificial Sequence: Synthetic peptide
  Seed: DPRMCSLMQGSTLPR
DPRMYSLAQPSTTPR

SEQ ID NO: 60788 - protein, 15 aa, Artificial Sequence
  Description of Artificial Sequence: Synthetic peptide
  Seed: DPRMCSLMQGSTLPR
DPRMYSLAQPSTVPR

SEQ ID NO: 60789 - protein, 15 aa, Artificial Sequence
  Description of Artificial Sequence: Synthetic peptide
  Seed: DPRMCSLMQGSTLPR
DPRMYSLAQSSTAPR

SEQ ID NO: 60790 - protein, 15 aa, Artificial Sequence
  Description of Artificial Sequence: Synthetic peptide
  Seed: DPRMCSLMQGSTLPR
DPRMYSLAQSSTCPR

SEQ ID NO: 60791 - protein, 15 aa, Artificial Sequence
  Description of Artificial Sequence: Synthetic peptide
  Seed: DPRMCSLMQGSTLPR
DPRMYSLAQSSTFPR

SEQ ID NO: 60792 - protein, 15 aa, Artificial Sequence
  Description of Artificial Sequence: Synthetic peptide
  Seed: DPRMCSLMQGSTLPR
DPRMYSLAQSSTGPR

SEQ ID NO: 60793 - protein, 15 aa, Artificial Sequence
  Description of Artificial Sequence: Synthetic peptide
  Seed: DPRMCSLMQGSTLPR
DPRMYSLAQSSTIPR

SEQ ID NO: 60794 - protein, 15 aa, Artificial Sequence
  Description of Artificial Sequence: Synthetic peptide
  Seed: DPRMCSLMQGSTLPR
DPRMYSLAQSSTLPR

SEQ ID NO: 60795 - protein, 15 aa, Artificial Sequence
  Description of Artificial Sequence: Synthetic peptide
  Seed: DPRMCSLMQGSTLPR
DPRMYSLAQSSTMPR

SEQ ID NO: 60796 - protein, 15 aa, Artificial Sequence
  Description of Artificial Sequence: Synthetic peptide
  Seed: DPRMCSLMQGSTLPR
DPRMYSLAQSSTNPR

SEQ ID NO: 60797 - protein, 15 aa, Artificial Sequence
  Description of Artificial Sequence: Synthetic peptide
  Seed: DPRMCSLMQGSTLPR
DPRMYSLAQSSTQPR

SEQ ID NO: 60798 - protein, 15 aa, Artificial Sequence
  Description of Artificial Sequence: Synthetic peptide
  Seed: DPRMCSLMQGSTLPR
DPRMYSLAQSSTSPR

SEQ ID NO: 60799 - protein, 15 aa, Artificial Sequence
  Description of Artificial Sequence: Synthetic peptide
  Seed: DPRMCSLMQGSTLPR
DPRMYSLAQSSTTPR

SEQ ID NO: 60800 - protein, 15 aa, Artificial Sequence
  Description of Artificial Sequence: Synthetic peptide
  Seed: DPRMCSLMQGSTLPR
DPRMYSLAQSSTVPR

SEQ ID NO: 60801 - protein, 15 aa, Artificial Sequence
  Description of Artificial Sequence: Synthetic peptide
  Seed: DPRMCSLMQGSTLPR
DPRMYSLAQTSTAPR

SEQ ID NO: 60802 - protein, 15 aa, Artificial Sequence
  Description of Artificial Sequence: Synthetic peptide
  Seed: DPRMCSLMQGSTLPR
DPRMYSLAQTSTIPR

SEQ ID NO: 60803 - protein, 15 aa, Artificial Sequence
  Description of Artificial Sequence: Synthetic peptide
  Seed: DPRMCSLMQGSTLPR
DPRMYSLAQTSTLPR

SEQ ID NO: 60804 - protein, 15 aa, Artificial Sequence
  Description of Artificial Sequence: Synthetic peptide
  Seed: DPRMCSLMQGSTLPR
DPRMYSLAQTSTMPR

SEQ ID NO: 60805 - protein, 15 aa, Artificial Sequence
  Description of Artificial Sequence: Synthetic peptide
  Seed: DPRMCSLMQGSTLPR
DPRMYSLAQTSTNPR

SEQ ID NO: 60806 - protein, 15 aa, Artificial Sequence
  Description of Artificial Sequence: Synthetic peptide
  Seed: DPRMCSLMQGSTLPR
DPRMYSLAQTSTSPR

SEQ ID NO: 60807 - protein, 15 aa, Artificial Sequence
  Description of Artificial Sequence: Synthetic peptide
  Seed: DPRMCSLMQGSTLPR
DPRMYSLAQTSTTPR

SEQ ID NO: 60808 - protein, 15 aa, Artificial Sequence
  Description of Artificial Sequence: Synthetic peptide
  Seed: DPRMCSLMQGSTLPR
DPRMYSLAQTSTVPR

SEQ ID NO: 60809 - protein, 15 aa, Artificial Sequence
  Description of Artificial Sequence: Synthetic peptide
  Seed: DPRMCSLMQGSTLPR
DPRMYSLAQVSTAPR

SEQ ID NO: 60810 - protein, 15 aa, Artificial Sequence
  Description of Artificial Sequence: Synthetic peptide
  Seed: DPRMCSLMQGSTLPR
DPRMYSLAQVSTGPR

SEQ ID NO: 60811 - protein, 15 aa, Artificial Sequence
  Description of Artificial Sequence: Synthetic peptide
  Seed: DPRMCSLMQGSTLPR
DPRMYSLAQVSTHPR

SEQ ID NO: 60812 - protein, 15 aa, Artificial Sequence
  Description of Artificial Sequence: Synthetic peptide
  Seed: DPRMCSLMQGSTLPR
DPRMYSLAQVSTIPR

SEQ ID NO: 60813 - protein, 15 aa, Artificial Sequence
  Description of Artificial Sequence: Synthetic peptide
  Seed: DPRMCSLMQGSTLPR
DPRMYSLAQVSTLPR

SEQ ID NO: 60814 - protein, 15 aa, Artificial Sequence
  Description of Artificial Sequence: Synthetic peptide
  Seed: DPRMCSLMQGSTLPR
DPRMYSLAQVSTMPR

SEQ ID NO: 60815 - protein, 15 aa, Artificial Sequence
  Description of Artificial Sequence: Synthetic peptide
  Seed: DPRMCSLMQGSTLPR
DPRMYSLAQVSTNPR

SEQ ID NO: 60816 - protein, 15 aa, Artificial Sequence
  Description of Artificial Sequence: Synthetic peptide
  Seed: DPRMCSLMQGSTLPR
DPRMYSLAQVSTQPR

SEQ ID NO: 60817 - protein, 15 aa, Artificial Sequence
  Description of Artificial Sequence: Synthetic peptide
  Seed: DPRMCSLMQGSTLPR
DPRMYSLAQVSTSPR

SEQ ID NO: 60818 - protein, 15 aa, Artificial Sequence
  Description of Artificial Sequence: Synthetic peptide
  Seed: DPRMCSLMQGSTLPR
DPRMYSLAQVSTTPR

SEQ ID NO: 60819 - protein, 15 aa, Artificial Sequence
  Description of Artificial Sequence: Synthetic peptide
  Seed: DPRMCSLMQGSTLPR
DPRMYSLAQVSTVPR

SEQ ID NO: 60820 - protein, 15 aa, Artificial Sequence
  Description of Artificial Sequence: Synthetic peptide
  Seed: DPRMCSLMQGSTLPR
DPRMYSLCQASTAPR

SEQ ID NO: 60821 - protein, 15 aa, Artificial Sequence
  Description of Artificial Sequence: Synthetic peptide
  Seed: DPRMCSLMQGSTLPR
DPRMYSLCQASTIPR

SEQ ID NO: 60822 - protein, 15 aa, Artificial Sequence
  Description of Artificial Sequence: Synthetic peptide
  Seed: DPRMCSLMQGSTLPR
DPRMYSLCQASTLPR

SEQ ID NO: 60823 - protein, 15 aa, Artificial Sequence
  Description of Artificial Sequence: Synthetic peptide
  Seed: DPRMCSLMQGSTLPR
DPRMYSLCQASTVPR

SEQ ID NO: 60824 - protein, 15 aa, Artificial Sequence
  Description of Artificial Sequence: Synthetic peptide
  Seed: DPRMCSLMQGSTLPR
DPRMYSLCQGSTIPR

SEQ ID NO: 60825 - protein, 15 aa, Artificial Sequence
  Description of Artificial Sequence: Synthetic peptide
  Seed: DPRMCSLMQGSTLPR
DPRMYSLCQGSTLPR

SEQ ID NO: 60826 - protein, 15 aa, Artificial Sequence
  Description of Artificial Sequence: Synthetic peptide
  Seed: DPRMCSLMQGSTLPR
DPRMYSLCQGSTVPR

SEQ ID NO: 60827 - protein, 15 aa, Artificial Sequence
  Description of Artificial Sequence: Synthetic peptide
  Seed: DPRMCSLMQGSTLPR
DPRMYSLCQSSTIPR

SEQ ID NO: 60828 - protein, 15 aa, Artificial Sequence
  Description of Artificial Sequence: Synthetic peptide
  Seed: DPRMCSLMQGSTLPR
DPRMYSLCQSSTLPR

SEQ ID NO: 60829 - protein, 15 aa, Artificial Sequence
  Description of Artificial Sequence: Synthetic peptide
  Seed: DPRMCSLMQGSTLPR
DPRMYSLCQSSTVPR

SEQ ID NO: 60830 - protein, 15 aa, Artificial Sequence
  Description of Artificial Sequence: Synthetic peptide
  Seed: DPRMCSLMQGSTLPR
DPRMYSLEQASTAPR

SEQ ID NO: 60831 - protein, 15 aa, Artificial Sequence
  Description of Artificial Sequence: Synthetic peptide
  Seed: DPRMCSLMQGSTLPR
DPRMYSLEQASTIPR

SEQ ID NO: 60832 - protein, 15 aa, Artificial Sequence
  Description of Artificial Sequence: Synthetic peptide
  Seed: DPRMCSLMQGSTLPR
DPRMYSLEQASTLPR

SEQ ID NO: 60833 - protein, 15 aa, Artificial Sequence
  Description of Artificial Sequence: Synthetic peptide
  Seed: DPRMCSLMQGSTLPR
DPRMYSLEQASTMPR

SEQ ID NO: 60834 - protein, 15 aa, Artificial Sequence
  Description of Artificial Sequence: Synthetic peptide
  Seed: DPRMCSLMQGSTLPR
DPRMYSLEQASTTPR

SEQ ID NO: 60835 - protein, 15 aa, Artificial Sequence
  Description of Artificial Sequence: Synthetic peptide
  Seed: DPRMCSLMQGSTLPR
DPRMYSLEQASTVPR

SEQ ID NO: 60836 - protein, 15 aa, Artificial Sequence
  Description of Artificial Sequence: Synthetic peptide
  Seed: DPRMCSLMQGSTLPR
DPRMYSLEQGSTAPR

SEQ ID NO: 60837 - protein, 15 aa, Artificial Sequence
  Description of Artificial Sequence: Synthetic peptide
  Seed: DPRMCSLMQGSTLPR
DPRMYSLEQGSTIPR

SEQ ID NO: 60838 - protein, 15 aa, Artificial Sequence
  Description of Artificial Sequence: Synthetic peptide
  Seed: DPRMCSLMQGSTLPR
DPRMYSLEQGSTLPR

SEQ ID NO: 60839 - protein, 15 aa, Artificial Sequence
  Description of Artificial Sequence: Synthetic peptide
  Seed: DPRMCSLMQGSTLPR
DPRMYSLEQGSTMPR

SEQ ID NO: 60840 - protein, 15 aa, Artificial Sequence
  Description of Artificial Sequence: Synthetic peptide
  Seed: DPRMCSLMQGSTLPR
DPRMYSLEQGSTVPR

SEQ ID NO: 60841 - protein, 15 aa, Artificial Sequence
  Description of Artificial Sequence: Synthetic peptide
  Seed: DPRMCSLMQGSTLPR
DPRMYSLEQPSTIPR

SEQ ID NO: 60842 - protein, 15 aa, Artificial Sequence
  Description of Artificial Sequence: Synthetic peptide
  Seed: DPRMCSLMQGSTLPR
DPRMYSLEQPSTLPR

SEQ ID NO: 60843 - protein, 15 aa, Artificial Sequence
  Description of Artificial Sequence: Synthetic peptide
  Seed: DPRMCSLMQGSTLPR
DPRMYSLEQPSTVPR

SEQ ID NO: 60844 - protein, 15 aa, Artificial Sequence
  Description of Artificial Sequence: Synthetic peptide
  Seed: DPRMCSLMQGSTLPR
DPRMYSLEQSSTAPR

SEQ ID NO: 60845 - protein, 15 aa, Artificial Sequence
  Description of Artificial Sequence: Synthetic peptide
  Seed: DPRMCSLMQGSTLPR
DPRMYSLEQSSTIPR

SEQ ID NO: 60846 - protein, 15 aa, Artificial Sequence
  Description of Artificial Sequence: Synthetic peptide
  Seed: DPRMCSLMQGSTLPR
DPRMYSLEQSSTLPR

SEQ ID NO: 60847 - protein, 15 aa, Artificial Sequence
  Description of Artificial Sequence: Synthetic peptide
  Seed: DPRMCSLMQGSTLPR
DPRMYSLEQSSTVPR

SEQ ID NO: 60848 - protein, 15 aa, Artificial Sequence
  Description of Artificial Sequence: Synthetic peptide
  Seed: DPRMCSLMQGSTLPR
DPRMYSLFQASTAPR

SEQ ID NO: 60849 - protein, 15 aa, Artificial Sequence
  Description of Artificial Sequence: Synthetic peptide
  Seed: DPRMCSLMQGSTLPR
DPRMYSLFQASTGPR

SEQ ID NO: 60850 - protein, 15 aa, Artificial Sequence
  Description of Artificial Sequence: Synthetic peptide
  Seed: DPRMCSLMQGSTLPR
DPRMYSLFQASTHPR

SEQ ID NO: 60851 - protein, 15 aa, Artificial Sequence
  Description of Artificial Sequence: Synthetic peptide
  Seed: DPRMCSLMQGSTLPR
DPRMYSLFQASTIPR

SEQ ID NO: 60852 - protein, 15 aa, Artificial Sequence
  Description of Artificial Sequence: Synthetic peptide
  Seed: DPRMCSLMQGSTLPR
DPRMYSLFQASTLPR

SEQ ID NO: 60853 - protein, 15 aa, Artificial Sequence
  Description of Artificial Sequence: Synthetic peptide
  Seed: DPRMCSLMQGSTLPR
DPRMYSLFQASTMPR

SEQ ID NO: 60854 - protein, 15 aa, Artificial Sequence
  Description of Artificial Sequence: Synthetic peptide
  Seed: DPRMCSLMQGSTLPR
DPRMYSLFQASTNPR

SEQ ID NO: 60855 - protein, 15 aa, Artificial Sequence
  Description of Artificial Sequence: Synthetic peptide
  Seed: DPRMCSLMQGSTLPR
DPRMYSLFQASTSPR

SEQ ID NO: 60856 - protein, 15 aa, Artificial Sequence
  Description of Artificial Sequence: Synthetic peptide
  Seed: DPRMCSLMQGSTLPR
DPRMYSLFQASTTPR

SEQ ID NO: 60857 - protein, 15 aa, Artificial Sequence
  Description of Artificial Sequence: Synthetic peptide
  Seed: DPRMCSLMQGSTLPR
DPRMYSLFQASTVPR

SEQ ID NO: 60858 - protein, 15 aa, Artificial Sequence
  Description of Artificial Sequence: Synthetic peptide
  Seed: DPRMCSLMQGSTLPR
DPRMYSLFQGSTAPR

SEQ ID NO: 60859 - protein, 15 aa, Artificial Sequence
  Description of Artificial Sequence: Synthetic peptide
  Seed: DPRMCSLMQGSTLPR
DPRMYSLFQGSTIPR

SEQ ID NO: 60860 - protein, 15 aa, Artificial Sequence
  Description of Artificial Sequence: Synthetic peptide
  Seed: DPRMCSLMQGSTLPR
DPRMYSLFQGSTLPR

SEQ ID NO: 60861 - protein, 15 aa, Artificial Sequence
  Description of Artificial Sequence: Synthetic peptide
  Seed: DPRMCSLMQGSTLPR
DPRMYSLFQGSTMPR

SEQ ID NO: 60862 - protein, 15 aa, Artificial Sequence
  Description of Artificial Sequence: Synthetic peptide
  Seed: DPRMCSLMQGSTLPR
DPRMYSLFQGSTSPR

SEQ ID NO: 60863 - protein, 15 aa, Artificial Sequence
  Description of Artificial Sequence: Synthetic peptide
  Seed: DPRMCSLMQGSTLPR
DPRMYSLFQGSTTPR

SEQ ID NO: 60864 - protein, 15 aa, Artificial Sequence
  Description of Artificial Sequence: Synthetic peptide
  Seed: DPRMCSLMQGSTLPR
DPRMYSLFQGSTVPR

SEQ ID NO: 60865 - protein, 15 aa, Artificial Sequence
  Description of Artificial Sequence: Synthetic peptide
  Seed: DPRMCSLMQGSTLPR
DPRMYSLFQISTAPR

SEQ ID NO: 60866 - protein, 15 aa, Artificial Sequence
  Description of Artificial Sequence: Synthetic peptide
  Seed: DPRMCSLMQGSTLPR
DPRMYSLFQNSTIPR

SEQ ID NO: 60867 - protein, 15 aa, Artificial Sequence
  Description of Artificial Sequence: Synthetic peptide
  Seed: DPRMCSLMQGSTLPR
DPRMYSLFQNSTLPR

SEQ ID NO: 60868 - protein, 15 aa, Artificial Sequence
  Description of Artificial Sequence: Synthetic peptide
  Seed: DPRMCSLMQGSTLPR
DPRMYSLFQNSTVPR

SEQ ID NO: 60869 - protein, 15 aa, Artificial Sequence
  Description of Artificial Sequence: Synthetic peptide
  Seed: DPRMCSLMQGSTLPR
DPRMYSLFQPSTAPR

SEQ ID NO: 60870 - protein, 15 aa, Artificial Sequence
  Description of Artificial Sequence: Synthetic peptide
  Seed: DPRMCSLMQGSTLPR
DPRMYSLFQPSTIPR

SEQ ID NO: 60871 - protein, 15 aa, Artificial Sequence
  Description of Artificial Sequence: Synthetic peptide
  Seed: DPRMCSLMQGSTLPR
DPRMYSLFQPSTLPR

SEQ ID NO: 60872 - protein, 15 aa, Artificial Sequence
  Description of Artificial Sequence: Synthetic peptide
  Seed: DPRMCSLMQGSTLPR
DPRMYSLFQPSTMPR

SEQ ID NO: 60873 - protein, 15 aa, Artificial Sequence
  Description of Artificial Sequence: Synthetic peptide
  Seed: DPRMCSLMQGSTLPR
DPRMYSLFQPSTNPR

SEQ ID NO: 60874 - protein, 15 aa, Artificial Sequence
  Description of Artificial Sequence: Synthetic peptide
  Seed: DPRMCSLMQGSTLPR
DPRMYSLFQPSTSPR

SEQ ID NO: 60875 - protein, 15 aa, Artificial Sequence
  Description of Artificial Sequence: Synthetic peptide
  Seed: DPRMCSLMQGSTLPR
DPRMYSLFQPSTTPR

SEQ ID NO: 60876 - protein, 15 aa, Artificial Sequence
  Description of Artificial Sequence: Synthetic peptide
  Seed: DPRMCSLMQGSTLPR
DPRMYSLFQPSTVPR

SEQ ID NO: 60877 - protein, 15 aa, Artificial Sequence
  Description of Artificial Sequence: Synthetic peptide
  Seed: DPRMCSLMQGSTLPR
DPRMYSLFQSSTAPR

SEQ ID NO: 60878 - protein, 15 aa, Artificial Sequence
  Description of Artificial Sequence: Synthetic peptide
  Seed: DPRMCSLMQGSTLPR
DPRMYSLFQSSTIPR

SEQ ID NO: 60879 - protein, 15 aa, Artificial Sequence
  Description of Artificial Sequence: Synthetic peptide
  Seed: DPRMCSLMQGSTLPR
DPRMYSLFQSSTLPR

SEQ ID NO: 60880 - protein, 15 aa, Artificial Sequence
  Description of Artificial Sequence: Synthetic peptide
  Seed: DPRMCSLMQGSTLPR
DPRMYSLFQSSTMPR

SEQ ID NO: 60881 - protein, 15 aa, Artificial Sequence
  Description of Artificial Sequence: Synthetic peptide
  Seed: DPRMCSLMQGSTLPR
DPRMYSLFQSSTNPR

SEQ ID NO: 60882 - protein, 15 aa, Artificial Sequence
  Description of Artificial Sequence: Synthetic peptide
  Seed: DPRMCSLMQGSTLPR
DPRMYSLFQSSTSPR

SEQ ID NO: 60883 - protein, 15 aa, Artificial Sequence
  Description of Artificial Sequence: Synthetic peptide
  Seed: DPRMCSLMQGSTLPR
DPRMYSLFQSSTTPR

SEQ ID NO: 60884 - protein, 15 aa, Artificial Sequence
  Description of Artificial Sequence: Synthetic peptide
  Seed: DPRMCSLMQGSTLPR
DPRMYSLFQSSTVPR

SEQ ID NO: 60885 - protein, 15 aa, Artificial Sequence
  Description of Artificial Sequence: Synthetic peptide
  Seed: DPRMCSLMQGSTLPR
DPRMYSLFQTSTAPR

SEQ ID NO: 60886 - protein, 15 aa, Artificial Sequence
  Description of Artificial Sequence: Synthetic peptide
  Seed: DPRMCSLMQGSTLPR
DPRMYSLFQTSTIPR

SEQ ID NO: 60887 - protein, 15 aa, Artificial Sequence
  Description of Artificial Sequence: Synthetic peptide
  Seed: DPRMCSLMQGSTLPR
DPRMYSLFQTSTLPR

SEQ ID NO: 60888 - protein, 15 aa, Artificial Sequence
  Description of Artificial Sequence: Synthetic peptide
  Seed: DPRMCSLMQGSTLPR
DPRMYSLFQTSTNPR

SEQ ID NO: 60889 - protein, 15 aa, Artificial Sequence
  Description of Artificial Sequence: Synthetic peptide
  Seed: DPRMCSLMQGSTLPR
DPRMYSLFQTSTSPR

SEQ ID NO: 60890 - protein, 15 aa, Artificial Sequence
  Description of Artificial Sequence: Synthetic peptide
  Seed: DPRMCSLMQGSTLPR
DPRMYSLFQTSTTPR

SEQ ID NO: 60891 - protein, 15 aa, Artificial Sequence
  Description of Artificial Sequence: Synthetic peptide
  Seed: DPRMCSLMQGSTLPR
DPRMYSLFQTSTVPR

SEQ ID NO: 60892 - protein, 15 aa, Artificial Sequence
  Description of Artificial Sequence: Synthetic peptide
  Seed: DPRMCSLMQGSTLPR
DPRMYSLFQVSTAPR

SEQ ID NO: 60893 - protein, 15 aa, Artificial Sequence
  Description of Artificial Sequence: Synthetic peptide
  Seed: DPRMCSLMQGSTLPR
DPRMYSLFQVSTNPR

SEQ ID NO: 60894 - protein, 15 aa, Artificial Sequence
  Description of Artificial Sequence: Synthetic peptide
  Seed: DPRMCSLMQGSTLPR
DPRMYSLFQVSTSPR

SEQ ID NO: 60895 - protein, 15 aa, Artificial Sequence
  Description of Artificial Sequence: Synthetic peptide
  Seed: DPRMCSLMQGSTLPR
DPRMYSLFQVSTTPR

SEQ ID NO: 60896 - protein, 15 aa, Artificial Sequence
  Description of Artificial Sequence: Synthetic peptide
  Seed: DPRMCSLMQGSTLPR
DPRMYSLFQVSTVPR

SEQ ID NO: 60897 - protein, 15 aa, Artificial Sequence
  Description of Artificial Sequence: Synthetic peptide
  Seed: DPRMCSLMQGSTLPR
DPRMYSLGQASTAPR

SEQ ID NO: 60898 - protein, 15 aa, Artificial Sequence
  Description of Artificial Sequence: Synthetic peptide
  Seed: DPRMCSLMQGSTLPR
DPRMYSLGQASTIPR

SEQ ID NO: 60899 - protein, 15 aa, Artificial Sequence
  Description of Artificial Sequence: Synthetic peptide
  Seed: DPRMCSLMQGSTLPR
DPRMYSLGQASTLPR

SEQ ID NO: 60900 - protein, 15 aa, Artificial Sequence
  Description of Artificial Sequence: Synthetic peptide
  Seed: DPRMCSLMQGSTLPR
DPRMYSLGQASTMPR

SEQ ID NO: 60901 - protein, 15 aa, Artificial Sequence
  Description of Artificial Sequence: Synthetic peptide
  Seed: DPRMCSLMQGSTLPR
DPRMYSLGQASTVPR

SEQ ID NO: 60902 - protein, 15 aa, Artificial Sequence
  Description of Artificial Sequence: Synthetic peptide
  Seed: DPRMCSLMQGSTLPR
DPRMYSLGQGSTIPR

SEQ ID NO: 60903 - protein, 15 aa, Artificial Sequence
  Description of Artificial Sequence: Synthetic peptide
  Seed: DPRMCSLMQGSTLPR
DPRMYSLGQGSTLPR

SEQ ID NO: 60904 - protein, 15 aa, Artificial Sequence
  Description of Artificial Sequence: Synthetic peptide
  Seed: DPRMCSLMQGSTLPR
DPRMYSLGQGSTVPR

SEQ ID NO: 60905 - protein, 15 aa, Artificial Sequence
  Description of Artificial Sequence: Synthetic peptide
  Seed: DPRMCSLMQGSTLPR
DPRMYSLGQNSTLPR

SEQ ID NO: 60906 - protein, 15 aa, Artificial Sequence
  Description of Artificial Sequence: Synthetic peptide
  Seed: DPRMCSLMQGSTLPR
DPRMYSLGQPSTIPR

SEQ ID NO: 60907 - protein, 15 aa, Artificial Sequence
  Description of Artificial Sequence: Synthetic peptide
  Seed: DPRMCSLMQGSTLPR
DPRMYSLGQPSTLPR

SEQ ID NO: 60908 - protein, 15 aa, Artificial Sequence
  Description of Artificial Sequence: Synthetic peptide
  Seed: DPRMCSLMQGSTLPR
DPRMYSLGQSSTAPR

SEQ ID NO: 60909 - protein, 15 aa, Artificial Sequence
  Description of Artificial Sequence: Synthetic peptide
  Seed: DPRMCSLMQGSTLPR
DPRMYSLGQSSTIPR

SEQ ID NO: 60910 - protein, 15 aa, Artificial Sequence
  Description of Artificial Sequence: Synthetic peptide
  Seed: DPRMCSLMQGSTLPR
DPRMYSLGQSSTLPR

SEQ ID NO: 60911 - protein, 15 aa, Artificial Sequence
  Description of Artificial Sequence: Synthetic peptide
  Seed: DPRMCSLMQGSTLPR
DPRMYSLGQSSTVPR

SEQ ID NO: 60912 - protein, 15 aa, Artificial Sequence
  Description of Artificial Sequence: Synthetic peptide
  Seed: DPRMCSLMQGSTLPR
DPRMYSLGQTSTLPR

SEQ ID NO: 60913 - protein, 15 aa, Artificial Sequence
  Description of Artificial Sequence: Synthetic peptide
  Seed: DPRMCSLMQGSTLPR
DPRMYSLHQASTAPR

SEQ ID NO: 60914 - protein, 15 aa, Artificial Sequence
  Description of Artificial Sequence: Synthetic peptide
  Seed: DPRMCSLMQGSTLPR
DPRMYSLHQASTIPR

SEQ ID NO: 60915 - protein, 15 aa, Artificial Sequence
  Description of Artificial Sequence: Synthetic peptide
  Seed: DPRMCSLMQGSTLPR
DPRMYSLHQASTLPR

SEQ ID NO: 60916 - protein, 15 aa, Artificial Sequence
  Description of Artificial Sequence: Synthetic peptide
  Seed: DPRMCSLMQGSTLPR
DPRMYSLHQASTVPR

SEQ ID NO: 60917 - protein, 15 aa, Artificial Sequence
  Description of Artificial Sequence: Synthetic peptide
  Seed: DPRMCSLMQGSTLPR
DPRMYSLHQGSTIPR

SEQ ID NO: 60918 - protein, 15 aa, Artificial Sequence
  Description of Artificial Sequence: Synthetic peptide
  Seed: DPRMCSLMQGSTLPR
DPRMYSLHQGSTLPR

SEQ ID NO: 60919 - protein, 15 aa, Artificial Sequence
  Description of Artificial Sequence: Synthetic peptide
  Seed: DPRMCSLMQGSTLPR
DPRMYSLHQGSTVPR

SEQ ID NO: 60920 - protein, 15 aa, Artificial Sequence
  Description of Artificial Sequence: Synthetic peptide
  Seed: DPRMCSLMQGSTLPR
DPRMYSLHQSSTIPR

SEQ ID NO: 60921 - protein, 15 aa, Artificial Sequence
  Description of Artificial Sequence: Synthetic peptide
  Seed: DPRMCSLMQGSTLPR
DPRMYSLHQSSTLPR

SEQ ID NO: 60922 - protein, 15 aa, Artificial Sequence
  Description of Artificial Sequence: Synthetic peptide
  Seed: DPRMCSLMQGSTLPR
DPRMYSLHQSSTVPR

SEQ ID NO: 60923 - protein, 15 aa, Artificial Sequence
  Description of Artificial Sequence: Synthetic peptide
  Seed: DPRMCSLMQGSTLPR
DPRMYSLIQASTAPR

SEQ ID NO: 60924 - protein, 15 aa, Artificial Sequence
  Description of Artificial Sequence: Synthetic peptide
  Seed: DPRMCSLMQGSTLPR
DPRMYSLIQASTCPR

SEQ ID NO: 60925 - protein, 15 aa, Artificial Sequence
  Description of Artificial Sequence: Synthetic peptide
  Seed: DPRMCSLMQGSTLPR
DPRMYSLIQASTDPR

SEQ ID NO: 60926 - protein, 15 aa, Artificial Sequence
  Description of Artificial Sequence: Synthetic peptide
  Seed: DPRMCSLMQGSTLPR
DPRMYSLIQASTEPR

SEQ ID NO: 60927 - protein, 15 aa, Artificial Sequence
  Description of Artificial Sequence: Synthetic peptide
  Seed: DPRMCSLMQGSTLPR
DPRMYSLIQASTFPR

SEQ ID NO: 60928 - protein, 15 aa, Artificial Sequence
  Description of Artificial Sequence: Synthetic peptide
  Seed: DPRMCSLMQGSTLPR
DPRMYSLIQASTGPR

SEQ ID NO: 60929 - protein, 15 aa, Artificial Sequence
  Description of Artificial Sequence: Synthetic peptide
  Seed: DPRMCSLMQGSTLPR
DPRMYSLIQASTHPR

SEQ ID NO: 60930 - protein, 15 aa, Artificial Sequence
  Description of Artificial Sequence: Synthetic peptide
  Seed: DPRMCSLMQGSTLPR
DPRMYSLIQASTIPR

SEQ ID NO: 60931 - protein, 15 aa, Artificial Sequence
  Description of Artificial Sequence: Synthetic peptide
  Seed: DPRMCSLMQGSTLPR
DPRMYSLIQASTKPR

SEQ ID NO: 60932 - protein, 15 aa, Artificial Sequence
  Description of Artificial Sequence: Synthetic peptide
  Seed: DPRMCSLMQGSTLPR
DPRMYSLIQASTLPR

SEQ ID NO: 60933 - protein, 15 aa, Artificial Sequence
  Description of Artificial Sequence: Synthetic peptide
  Seed: DPRMCSLMQGSTLPR
DPRMYSLIQASTMPR

SEQ ID NO: 60934 - protein, 15 aa, Artificial Sequence
  Description of Artificial Sequence: Synthetic peptide
  Seed: DPRMCSLMQGSTLPR
DPRMYSLIQASTNPR

SEQ ID NO: 60935 - protein, 15 aa, Artificial Sequence
  Description of Artificial Sequence: Synthetic peptide
  Seed: DPRMCSLMQGSTLPR
DPRMYSLIQASTPPR

SEQ ID NO: 60936 - protein, 15 aa, Artificial Sequence
  Description of Artificial Sequence: Synthetic peptide
  Seed: DPRMCSLMQGSTLPR
DPRMYSLIQASTQPR

SEQ ID NO: 60937 - protein, 15 aa, Artificial Sequence
  Description of Artificial Sequence: Synthetic peptide
  Seed: DPRMCSLMQGSTLPR
DPRMYSLIQASTRPR

SEQ ID NO: 60938 - protein, 15 aa, Artificial Sequence
  Description of Artificial Sequence: Synthetic peptide
  Seed: DPRMCSLMQGSTLPR
DPRMYSLIQASTSPR

SEQ ID NO: 60939 - protein, 15 aa, Artificial Sequence
  Description of Artificial Sequence: Synthetic peptide
  Seed: DPRMCSLMQGSTLPR
DPRMYSLIQASTTPR

SEQ ID NO: 60940 - protein, 15 aa, Artificial Sequence
  Description of Artificial Sequence: Synthetic peptide
  Seed: DPRMCSLMQGSTLPR
DPRMYSLIQASTVPR

SEQ ID NO: 60941 - protein, 15 aa, Artificial Sequence
  Description of Artificial Sequence: Synthetic peptide
  Seed: DPRMCSLMQGSTLPR
DPRMYSLIQASTWPR

SEQ ID NO: 60942 - protein, 15 aa, Artificial Sequence
  Description of Artificial Sequence: Synthetic peptide
  Seed: DPRMCSLMQGSTLPR
DPRMYSLIQASTYPR

SEQ ID NO: 60943 - protein, 15 aa, Artificial Sequence
  Description of Artificial Sequence: Synthetic peptide
  Seed: DPRMCSLMQGSTLPR
DPRMYSLIQGSTAPR

SEQ ID NO: 60944 - protein, 15 aa, Artificial Sequence
  Description of Artificial Sequence: Synthetic peptide
  Seed: DPRMCSLMQGSTLPR
DPRMYSLIQGSTCPR

SEQ ID NO: 60945 - protein, 15 aa, Artificial Sequence
  Description of Artificial Sequence: Synthetic peptide
  Seed: DPRMCSLMQGSTLPR
DPRMYSLIQGSTFPR

SEQ ID NO: 60946 - protein, 15 aa, Artificial Sequence
  Description of Artificial Sequence: Synthetic peptide
  Seed: DPRMCSLMQGSTLPR
DPRMYSLIQGSTGPR

SEQ ID NO: 60947 - protein, 15 aa, Artificial Sequence
  Description of Artificial Sequence: Synthetic peptide
  Seed: DPRMCSLMQGSTLPR
DPRMYSLIQGSTIPR

SEQ ID NO: 60948 - protein, 15 aa, Artificial Sequence
  Description of Artificial Sequence: Synthetic peptide
  Seed: DPRMCSLMQGSTLPR
DPRMYSLIQGSTLPR

SEQ ID NO: 60949 - protein, 15 aa, Artificial Sequence
  Description of Artificial Sequence: Synthetic peptide
  Seed: DPRMCSLMQGSTLPR
DPRMYSLIQGSTMPR

SEQ ID NO: 60950 - protein, 15 aa, Artificial Sequence
  Description of Artificial Sequence: Synthetic peptide
  Seed: DPRMCSLMQGSTLPR
DPRMYSLIQGSTNPR

SEQ ID NO: 60951 - protein, 15 aa, Artificial Sequence
  Description of Artificial Sequence: Synthetic peptide
  Seed: DPRMCSLMQGSTLPR
DPRMYSLIQGSTQPR

SEQ ID NO: 60952 - protein, 15 aa, Artificial Sequence
  Description of Artificial Sequence: Synthetic peptide
  Seed: DPRMCSLMQGSTLPR
DPRMYSLIQGSTSPR

SEQ ID NO: 60953 - protein, 15 aa, Artificial Sequence
  Description of Artificial Sequence: Synthetic peptide
  Seed: DPRMCSLMQGSTLPR
DPRMYSLIQGSTTPR

SEQ ID NO: 60954 - protein, 15 aa, Artificial Sequence
  Description of Artificial Sequence: Synthetic peptide
  Seed: DPRMCSLMQGSTLPR
DPRMYSLIQGSTVPR

SEQ ID NO: 60955 - protein, 15 aa, Artificial Sequence
  Description of Artificial Sequence: Synthetic peptide
  Seed: DPRMCSLMQGSTLPR
DPRMYSLIQHSTIPR

SEQ ID NO: 60956 - protein, 15 aa, Artificial Sequence
  Description of Artificial Sequence: Synthetic peptide
  Seed: DPRMCSLMQGSTLPR
DPRMYSLIQHSTLPR

SEQ ID NO: 60957 - protein, 15 aa, Artificial Sequence
  Description of Artificial Sequence: Synthetic peptide
  Seed: DPRMCSLMQGSTLPR
DPRMYSLIQHSTVPR

SEQ ID NO: 60958 - protein, 15 aa, Artificial Sequence
  Description of Artificial Sequence: Synthetic peptide
  Seed: DPRMCSLMQGSTLPR
DPRMYSLIQISTAPR

SEQ ID NO: 60959 - protein, 15 aa, Artificial Sequence
  Description of Artificial Sequence: Synthetic peptide
  Seed: DPRMCSLMQGSTLPR
DPRMYSLIQISTGPR

SEQ ID NO: 60960 - protein, 15 aa, Artificial Sequence
  Description of Artificial Sequence: Synthetic peptide
  Seed: DPRMCSLMQGSTLPR
DPRMYSLIQISTHPR

SEQ ID NO: 60961 - protein, 15 aa, Artificial Sequence
  Description of Artificial Sequence: Synthetic peptide
  Seed: DPRMCSLMQGSTLPR
DPRMYSLIQISTIPR

SEQ ID NO: 60962 - protein, 15 aa, Artificial Sequence
  Description of Artificial Sequence: Synthetic peptide
  Seed: DPRMCSLMQGSTLPR
DPRMYSLIQISTLPR

SEQ ID NO: 60963 - protein, 15 aa, Artificial Sequence
  Description of Artificial Sequence: Synthetic peptide
  Seed: DPRMCSLMQGSTLPR
DPRMYSLIQISTMPR

SEQ ID NO: 60964 - protein, 15 aa, Artificial Sequence
  Description of Artificial Sequence: Synthetic peptide
  Seed: DPRMCSLMQGSTLPR
DPRMYSLIQISTNPR

SEQ ID NO: 60965 - protein, 15 aa, Artificial Sequence
  Description of Artificial Sequence: Synthetic peptide
  Seed: DPRMCSLMQGSTLPR
DPRMYSLIQISTQPR

SEQ ID NO: 60966 - protein, 15 aa, Artificial Sequence
  Description of Artificial Sequence: Synthetic peptide
  Seed: DPRMCSLMQGSTLPR
DPRMYSLIQISTSPR

SEQ ID NO: 60967 - protein, 15 aa, Artificial Sequence
  Description of Artificial Sequence: Synthetic peptide
  Seed: DPRMCSLMQGSTLPR
DPRMYSLIQISTTPR

SEQ ID NO: 60968 - protein, 15 aa, Artificial Sequence
  Description of Artificial Sequence: Synthetic peptide
  Seed: DPRMCSLMQGSTLPR
DPRMYSLIQISTVPR

SEQ ID NO: 60969 - protein, 15 aa, Artificial Sequence
  Description of Artificial Sequence: Synthetic peptide
  Seed: DPRMCSLMQGSTLPR
DPRMYSLIQLSTAPR

SEQ ID NO: 60970 - protein, 15 aa, Artificial Sequence
  Description of Artificial Sequence: Synthetic peptide
  Seed: DPRMCSLMQGSTLPR
DPRMYSLIQLSTIPR

SEQ ID NO: 60971 - protein, 15 aa, Artificial Sequence
  Description of Artificial Sequence: Synthetic peptide
  Seed: DPRMCSLMQGSTLPR
DPRMYSLIQLSTLPR

SEQ ID NO: 60972 - protein, 15 aa, Artificial Sequence
  Description of Artificial Sequence: Synthetic peptide
  Seed: DPRMCSLMQGSTLPR
DPRMYSLIQLSTMPR

SEQ ID NO: 60973 - protein, 15 aa, Artificial Sequence
  Description of Artificial Sequence: Synthetic peptide
  Seed: DPRMCSLMQGSTLPR
DPRMYSLIQLSTNPR

SEQ ID NO: 60974 - protein, 15 aa, Artificial Sequence
  Description of Artificial Sequence: Synthetic peptide
  Seed: DPRMCSLMQGSTLPR
DPRMYSLIQLSTSPR

SEQ ID NO: 60975 - protein, 15 aa, Artificial Sequence
  Description of Artificial Sequence: Synthetic peptide
  Seed: DPRMCSLMQGSTLPR
DPRMYSLIQLSTTPR

SEQ ID NO: 60976 - protein, 15 aa, Artificial Sequence
  Description of Artificial Sequence: Synthetic peptide
  Seed: DPRMCSLMQGSTLPR
DPRMYSLIQLSTVPR

SEQ ID NO: 60977 - protein, 15 aa, Artificial Sequence
  Description of Artificial Sequence: Synthetic peptide
  Seed: DPRMCSLMQGSTLPR
DPRMYSLIQMSTAPR

SEQ ID NO: 60978 - protein, 15 aa, Artificial Sequence
  Description of Artificial Sequence: Synthetic peptide
  Seed: DPRMCSLMQGSTLPR
DPRMYSLIQMSTIPR

SEQ ID NO: 60979 - protein, 15 aa, Artificial Sequence
  Description of Artificial Sequence: Synthetic peptide
  Seed: DPRMCSLMQGSTLPR
DPRMYSLIQMSTLPR

SEQ ID NO: 60980 - protein, 15 aa, Artificial Sequence
  Description of Artificial Sequence: Synthetic peptide
  Seed: DPRMCSLMQGSTLPR
DPRMYSLIQMSTMPR

SEQ ID NO: 60981 - protein, 15 aa, Artificial Sequence
  Description of Artificial Sequence: Synthetic peptide
  Seed: DPRMCSLMQGSTLPR
DPRMYSLIQMSTNPR

SEQ ID NO: 60982 - protein, 15 aa, Artificial Sequence
  Description of Artificial Sequence: Synthetic peptide
  Seed: DPRMCSLMQGSTLPR
DPRMYSLIQMSTSPR

SEQ ID NO: 60983 - protein, 15 aa, Artificial Sequence
  Description of Artificial Sequence: Synthetic peptide
  Seed: DPRMCSLMQGSTLPR
DPRMYSLIQMSTTPR

SEQ ID NO: 60984 - protein, 15 aa, Artificial Sequence
  Description of Artificial Sequence: Synthetic peptide
  Seed: DPRMCSLMQGSTLPR
DPRMYSLIQMSTVPR

SEQ ID NO: 60985 - protein, 15 aa, Artificial Sequence
  Description of Artificial Sequence: Synthetic peptide
  Seed: DPRMCSLMQGSTLPR
DPRMYSLIQNSTAPR

SEQ ID NO: 60986 - protein, 15 aa, Artificial Sequence
  Description of Artificial Sequence: Synthetic peptide
  Seed: DPRMCSLMQGSTLPR
DPRMYSLIQNSTGPR

SEQ ID NO: 60987 - protein, 15 aa, Artificial Sequence
  Description of Artificial Sequence: Synthetic peptide
  Seed: DPRMCSLMQGSTLPR
DPRMYSLIQNSTIPR

SEQ ID NO: 60988 - protein, 15 aa, Artificial Sequence
  Description of Artificial Sequence: Synthetic peptide
  Seed: DPRMCSLMQGSTLPR
DPRMYSLIQNSTLPR

SEQ ID NO: 60989 - protein, 15 aa, Artificial Sequence
  Description of Artificial Sequence: Synthetic peptide
  Seed: DPRMCSLMQGSTLPR
DPRMYSLIQNSTMPR

SEQ ID NO: 60990 - protein, 15 aa, Artificial Sequence
  Description of Artificial Sequence: Synthetic peptide
  Seed: DPRMCSLMQGSTLPR
DPRMYSLIQNSTNPR

SEQ ID NO: 60991 - protein, 15 aa, Artificial Sequence
  Description of Artificial Sequence: Synthetic peptide
  Seed: DPRMCSLMQGSTLPR
DPRMYSLIQNSTSPR

SEQ ID NO: 60992 - protein, 15 aa, Artificial Sequence
  Description of Artificial Sequence: Synthetic peptide
  Seed: DPRMCSLMQGSTLPR
DPRMYSLIQNSTTPR

SEQ ID NO: 60993 - protein, 15 aa, Artificial Sequence
  Description of Artificial Sequence: Synthetic peptide
  Seed: DPRMCSLMQGSTLPR
DPRMYSLIQNSTVPR

SEQ ID NO: 60994 - protein, 15 aa, Artificial Sequence
  Description of Artificial Sequence: Synthetic peptide
  Seed: DPRMCSLMQGSTLPR
DPRMYSLIQPSTAPR

SEQ ID NO: 60995 - protein, 15 aa, Artificial Sequence
  Description of Artificial Sequence: Synthetic peptide
  Seed: DPRMCSLMQGSTLPR
DPRMYSLIQPSTCPR

SEQ ID NO: 60996 - protein, 15 aa, Artificial Sequence
  Description of Artificial Sequence: Synthetic peptide
  Seed: DPRMCSLMQGSTLPR
DPRMYSLIQPSTFPR

SEQ ID NO: 60997 - protein, 15 aa, Artificial Sequence
  Description of Artificial Sequence: Synthetic peptide
  Seed: DPRMCSLMQGSTLPR
DPRMYSLIQPSTGPR

SEQ ID NO: 60998 - protein, 15 aa, Artificial Sequence
  Description of Artificial Sequence: Synthetic peptide
  Seed: DPRMCSLMQGSTLPR
DPRMYSLIQPSTHPR

SEQ ID NO: 60999 - protein, 15 aa, Artificial Sequence
  Description of Artificial Sequence: Synthetic peptide
  Seed: DPRMCSLMQGSTLPR
DPRMYSLIQPSTIPR

SEQ ID NO: 61000 - protein, 15 aa, Artificial Sequence
  Description of Artificial Sequence: Synthetic peptide
  Seed: DPRMCSLMQGSTLPR
DPRMYSLIQPSTLPR

SEQ ID NO: 61001 - protein, 15 aa, Artificial Sequence
  Description of Artificial Sequence: Synthetic peptide
  Seed: DPRMCSLMQGSTLPR
DPRMYSLIQPSTMPR

SEQ ID NO: 61002 - protein, 15 aa, Artificial Sequence
  Description of Artificial Sequence: Synthetic peptide
  Seed: DPRMCSLMQGSTLPR
DPRMYSLIQPSTNPR

SEQ ID NO: 61003 - protein, 15 aa, Artificial Sequence
  Description of Artificial Sequence: Synthetic peptide
  Seed: DPRMCSLMQGSTLPR
DPRMYSLIQPSTPPR

SEQ ID NO: 61004 - protein, 15 aa, Artificial Sequence
  Description of Artificial Sequence: Synthetic peptide
  Seed: DPRMCSLMQGSTLPR
DPRMYSLIQPSTQPR

SEQ ID NO: 61005 - protein, 15 aa, Artificial Sequence
  Description of Artificial Sequence: Synthetic peptide
  Seed: DPRMCSLMQGSTLPR
DPRMYSLIQPSTSPR

SEQ ID NO: 61006 - protein, 15 aa, Artificial Sequence
  Description of Artificial Sequence: Synthetic peptide
  Seed: DPRMCSLMQGSTLPR
DPRMYSLIQPSTTPR

SEQ ID NO: 61007 - protein, 15 aa, Artificial Sequence
  Description of Artificial Sequence: Synthetic peptide
  Seed: DPRMCSLMQGSTLPR
DPRMYSLIQPSTVPR

SEQ ID NO: 61008 - protein, 15 aa, Artificial Sequence
  Description of Artificial Sequence: Synthetic peptide
  Seed: DPRMCSLMQGSTLPR
DPRMYSLIQQSTLPR

SEQ ID NO: 61009 - protein, 15 aa, Artificial Sequence
  Description of Artificial Sequence: Synthetic peptide
  Seed: DPRMCSLMQGSTLPR
DPRMYSLIQSSTAPR

SEQ ID NO: 61010 - protein, 15 aa, Artificial Sequence
  Description of Artificial Sequence: Synthetic peptide
  Seed: DPRMCSLMQGSTLPR
DPRMYSLIQSSTCPR

SEQ ID NO: 61011 - protein, 15 aa, Artificial Sequence
  Description of Artificial Sequence: Synthetic peptide
  Seed: DPRMCSLMQGSTLPR
DPRMYSLIQSSTFPR

SEQ ID NO: 61012 - protein, 15 aa, Artificial Sequence
  Description of Artificial Sequence: Synthetic peptide
  Seed: DPRMCSLMQGSTLPR
DPRMYSLIQSSTGPR

SEQ ID NO: 61013 - protein, 15 aa, Artificial Sequence
  Description of Artificial Sequence: Synthetic peptide
  Seed: DPRMCSLMQGSTLPR
DPRMYSLIQSSTHPR

SEQ ID NO: 61014 - protein, 15 aa, Artificial Sequence
  Description of Artificial Sequence: Synthetic peptide
  Seed: DPRMCSLMQGSTLPR
DPRMYSLIQSSTIPR

SEQ ID NO: 61015 - protein, 15 aa, Artificial Sequence
  Description of Artificial Sequence: Synthetic peptide
  Seed: DPRMCSLMQGSTLPR
DPRMYSLIQSSTLPR

SEQ ID NO: 61016 - protein, 15 aa, Artificial Sequence
  Description of Artificial Sequence: Synthetic peptide
  Seed: DPRMCSLMQGSTLPR
DPRMYSLIQSSTMPR

SEQ ID NO: 61017 - protein, 15 aa, Artificial Sequence
  Description of Artificial Sequence: Synthetic peptide
  Seed: DPRMCSLMQGSTLPR
DPRMYSLIQSSTNPR

SEQ ID NO: 61018 - protein, 15 aa, Artificial Sequence
  Description of Artificial Sequence: Synthetic peptide
  Seed: DPRMCSLMQGSTLPR
DPRMYSLIQSSTPPR

SEQ ID NO: 61019 - protein, 15 aa, Artificial Sequence
  Description of Artificial Sequence: Synthetic peptide
  Seed: DPRMCSLMQGSTLPR
DPRMYSLIQSSTQPR

SEQ ID NO: 61020 - protein, 15 aa, Artificial Sequence
  Description of Artificial Sequence: Synthetic peptide
  Seed: DPRMCSLMQGSTLPR
DPRMYSLIQSSTSPR

SEQ ID NO: 61021 - protein, 15 aa, Artificial Sequence
  Description of Artificial Sequence: Synthetic peptide
  Seed: DPRMCSLMQGSTLPR
DPRMYSLIQSSTTPR

SEQ ID NO: 61022 - protein, 15 aa, Artificial Sequence
  Description of Artificial Sequence: Synthetic peptide
  Seed: DPRMCSLMQGSTLPR
DPRMYSLIQSSTVPR

SEQ ID NO: 61023 - protein, 15 aa, Artificial Sequence
  Description of Artificial Sequence: Synthetic peptide
  Seed: DPRMCSLMQGSTLPR
DPRMYSLIQTSTAPR

SEQ ID NO: 61024 - protein, 15 aa, Artificial Sequence
  Description of Artificial Sequence: Synthetic peptide
  Seed: DPRMCSLMQGSTLPR
DPRMYSLIQTSTGPR

SEQ ID NO: 61025 - protein, 15 aa, Artificial Sequence
  Description of Artificial Sequence: Synthetic peptide
  Seed: DPRMCSLMQGSTLPR
DPRMYSLIQTSTHPR

SEQ ID NO: 61026 - protein, 15 aa, Artificial Sequence
  Description of Artificial Sequence: Synthetic peptide
  Seed: DPRMCSLMQGSTLPR
DPRMYSLIQTSTIPR

SEQ ID NO: 61027 - protein, 15 aa, Artificial Sequence
  Description of Artificial Sequence: Synthetic peptide
  Seed: DPRMCSLMQGSTLPR
DPRMYSLIQTSTLPR

SEQ ID NO: 61028 - protein, 15 aa, Artificial Sequence
  Description of Artificial Sequence: Synthetic peptide
  Seed: DPRMCSLMQGSTLPR
DPRMYSLIQTSTMPR

SEQ ID NO: 61029 - protein, 15 aa, Artificial Sequence
  Description of Artificial Sequence: Synthetic peptide
  Seed: DPRMCSLMQGSTLPR
DPRMYSLIQTSTNPR

SEQ ID NO: 61030 - protein, 15 aa, Artificial Sequence
  Description of Artificial Sequence: Synthetic peptide
  Seed: DPRMCSLMQGSTLPR
DPRMYSLIQTSTQPR

SEQ ID NO: 61031 - protein, 15 aa, Artificial Sequence
  Description of Artificial Sequence: Synthetic peptide
  Seed: DPRMCSLMQGSTLPR
DPRMYSLIQTSTSPR

SEQ ID NO: 61032 - protein, 15 aa, Artificial Sequence
  Description of Artificial Sequence: Synthetic peptide
  Seed: DPRMCSLMQGSTLPR
DPRMYSLIQTSTTPR

SEQ ID NO: 61033 - protein, 15 aa, Artificial Sequence
  Description of Artificial Sequence: Synthetic peptide
  Seed: DPRMCSLMQGSTLPR
DPRMYSLIQTSTVPR

SEQ ID NO: 61034 - protein, 15 aa, Artificial Sequence
  Description of Artificial Sequence: Synthetic peptide
  Seed: DPRMCSLMQGSTLPR
DPRMYSLIQVSTAPR

SEQ ID NO: 61035 - protein, 15 aa, Artificial Sequence
  Description of Artificial Sequence: Synthetic peptide
  Seed: DPRMCSLMQGSTLPR
DPRMYSLIQVSTCPR

SEQ ID NO: 61036 - protein, 15 aa, Artificial Sequence
  Description of Artificial Sequence: Synthetic peptide
  Seed: DPRMCSLMQGSTLPR
DPRMYSLIQVSTGPR

SEQ ID NO: 61037 - protein, 15 aa, Artificial Sequence
  Description of Artificial Sequence: Synthetic peptide
  Seed: DPRMCSLMQGSTLPR
DPRMYSLIQVSTHPR

SEQ ID NO: 61038 - protein, 15 aa, Artificial Sequence
  Description of Artificial Sequence: Synthetic peptide
  Seed: DPRMCSLMQGSTLPR
DPRMYSLIQVSTIPR

SEQ ID NO: 61039 - protein, 15 aa, Artificial Sequence
  Description of Artificial Sequence: Synthetic peptide
  Seed: DPRMCSLMQGSTLPR
DPRMYSLIQVSTLPR

SEQ ID NO: 61040 - protein, 15 aa, Artificial Sequence
  Description of Artificial Sequence: Synthetic peptide
  Seed: DPRMCSLMQGSTLPR
DPRMYSLIQVSTMPR

SEQ ID NO: 61041 - protein, 15 aa, Artificial Sequence
  Description of Artificial Sequence: Synthetic peptide
  Seed: DPRMCSLMQGSTLPR
DPRMYSLIQVSTNPR

SEQ ID NO: 61042 - protein, 15 aa, Artificial Sequence
  Description of Artificial Sequence: Synthetic peptide
  Seed: DPRMCSLMQGSTLPR
DPRMYSLIQVSTPPR

SEQ ID NO: 61043 - protein, 15 aa, Artificial Sequence
  Description of Artificial Sequence: Synthetic peptide
  Seed: DPRMCSLMQGSTLPR
DPRMYSLIQVSTQPR

SEQ ID NO: 61044 - protein, 15 aa, Artificial Sequence
  Description of Artificial Sequence: Synthetic peptide
  Seed: DPRMCSLMQGSTLPR
DPRMYSLIQVSTSPR

SEQ ID NO: 61045 - protein, 15 aa, Artificial Sequence
  Description of Artificial Sequence: Synthetic peptide
  Seed: DPRMCSLMQGSTLPR
DPRMYSLIQVSTTPR

SEQ ID NO: 61046 - protein, 15 aa, Artificial Sequence
  Description of Artificial Sequence: Synthetic peptide
  Seed: DPRMCSLMQGSTLPR
DPRMYSLIQVSTVPR

SEQ ID NO: 61047 - protein, 15 aa, Artificial Sequence
  Description of Artificial Sequence: Synthetic peptide
  Seed: DPRMCSLMQGSTLPR
DPRMYSLKQASTLPR

SEQ ID NO: 61048 - protein, 15 aa, Artificial Sequence
  Description of Artificial Sequence: Synthetic peptide
  Seed: DPRMCSLMQGSTLPR
DPRMYSLLQASTAPR

SEQ ID NO: 61049 - protein, 15 aa, Artificial Sequence
  Description of Artificial Sequence: Synthetic peptide
  Seed: DPRMCSLMQGSTLPR
DPRMYSLLQASTCPR

SEQ ID NO: 61050 - protein, 15 aa, Artificial Sequence
  Description of Artificial Sequence: Synthetic peptide
  Seed: DPRMCSLMQGSTLPR
DPRMYSLLQASTDPR

SEQ ID NO: 61051 - protein, 15 aa, Artificial Sequence
  Description of Artificial Sequence: Synthetic peptide
  Seed: DPRMCSLMQGSTLPR
DPRMYSLLQASTEPR

SEQ ID NO: 61052 - protein, 15 aa, Artificial Sequence
  Description of Artificial Sequence: Synthetic peptide
  Seed: DPRMCSLMQGSTLPR
DPRMYSLLQASTFPR

SEQ ID NO: 61053 - protein, 15 aa, Artificial Sequence
  Description of Artificial Sequence: Synthetic peptide
  Seed: DPRMCSLMQGSTLPR
DPRMYSLLQASTGPR

SEQ ID NO: 61054 - protein, 15 aa, Artificial Sequence
  Description of Artificial Sequence: Synthetic peptide
  Seed: DPRMCSLMQGSTLPR
DPRMYSLLQASTHPR

SEQ ID NO: 61055 - protein, 15 aa, Artificial Sequence
  Description of Artificial Sequence: Synthetic peptide
  Seed: DPRMCSLMQGSTLPR
DPRMYSLLQASTIPR

SEQ ID NO: 61056 - protein, 15 aa, Artificial Sequence
  Description of Artificial Sequence: Synthetic peptide
  Seed: DPRMCSLMQGSTLPR
DPRMYSLLQASTKPR

SEQ ID NO: 61057 - protein, 15 aa, Artificial Sequence
  Description of Artificial Sequence: Synthetic peptide
  Seed: DPRMCSLMQGSTLPR
DPRMYSLLQASTLPR

SEQ ID NO: 61058 - protein, 15 aa, Artificial Sequence
  Description of Artificial Sequence: Synthetic peptide
  Seed: DPRMCSLMQGSTLPR
DPRMYSLLQASTMPR

SEQ ID NO: 61059 - protein, 15 aa, Artificial Sequence
  Description of Artificial Sequence: Synthetic peptide
  Seed: DPRMCSLMQGSTLPR
DPRMYSLLQASTNPR

SEQ ID NO: 61060 - protein, 15 aa, Artificial Sequence
  Description of Artificial Sequence: Synthetic peptide
  Seed: DPRMCSLMQGSTLPR
DPRMYSLLQASTPPR

SEQ ID NO: 61061 - protein, 15 aa, Artificial Sequence
  Description of Artificial Sequence: Synthetic peptide
  Seed: DPRMCSLMQGSTLPR
DPRMYSLLQASTQPR

SEQ ID NO: 61062 - protein, 15 aa, Artificial Sequence
  Description of Artificial Sequence: Synthetic peptide
  Seed: DPRMCSLMQGSTLPR
DPRMYSLLQASTRPR

SEQ ID NO: 61063 - protein, 15 aa, Artificial Sequence
  Description of Artificial Sequence: Synthetic peptide
  Seed: DPRMCSLMQGSTLPR
DPRMYSLLQASTSPR

SEQ ID NO: 61064 - protein, 15 aa, Artificial Sequence
  Description of Artificial Sequence: Synthetic peptide
  Seed: DPRMCSLMQGSTLPR
DPRMYSLLQASTTPR

SEQ ID NO: 61065 - protein, 15 aa, Artificial Sequence
  Description of Artificial Sequence: Synthetic peptide
  Seed: DPRMCSLMQGSTLPR
DPRMYSLLQASTVPR

SEQ ID NO: 61066 - protein, 15 aa, Artificial Sequence
  Description of Artificial Sequence: Synthetic peptide
  Seed: DPRMCSLMQGSTLPR
DPRMYSLLQASTWPR

SEQ ID NO: 61067 - protein, 15 aa, Artificial Sequence
  Description of Artificial Sequence: Synthetic peptide
  Seed: DPRMCSLMQGSTLPR
DPRMYSLLQASTYPR

SEQ ID NO: 61068 - protein, 15 aa, Artificial Sequence
  Description of Artificial Sequence: Synthetic peptide
  Seed: DPRMCSLMQGSTLPR
DPRMYSLLQCSTAPR

SEQ ID NO: 61069 - protein, 15 aa, Artificial Sequence
  Description of Artificial Sequence: Synthetic peptide
  Seed: DPRMCSLMQGSTLPR
DPRMYSLLQCSTIPR

SEQ ID NO: 61070 - protein, 15 aa, Artificial Sequence
  Description of Artificial Sequence: Synthetic peptide
  Seed: DPRMCSLMQGSTLPR
DPRMYSLLQCSTLPR

SEQ ID NO: 61071 - protein, 15 aa, Artificial Sequence
  Description of Artificial Sequence: Synthetic peptide
  Seed: DPRMCSLMQGSTLPR
DPRMYSLLQCSTVPR

SEQ ID NO: 61072 - protein, 15 aa, Artificial Sequence
  Description of Artificial Sequence: Synthetic peptide
  Seed: DPRMCSLMQGSTLPR
DPRMYSLLQESTIPR

SEQ ID NO: 61073 - protein, 15 aa, Artificial Sequence
  Description of Artificial Sequence: Synthetic peptide
  Seed: DPRMCSLMQGSTLPR
DPRMYSLLQESTLPR

SEQ ID NO: 61074 - protein, 15 aa, Artificial Sequence
  Description of Artificial Sequence: Synthetic peptide
  Seed: DPRMCSLMQGSTLPR
DPRMYSLLQESTVPR

SEQ ID NO: 61075 - protein, 15 aa, Artificial Sequence
  Description of Artificial Sequence: Synthetic peptide
  Seed: DPRMCSLMQGSTLPR
DPRMYSLLQGSTAPR

SEQ ID NO: 61076 - protein, 15 aa, Artificial Sequence
  Description of Artificial Sequence: Synthetic peptide
  Seed: DPRMCSLMQGSTLPR
DPRMYSLLQGSTCPR

SEQ ID NO: 61077 - protein, 15 aa, Artificial Sequence
  Description of Artificial Sequence: Synthetic peptide
  Seed: DPRMCSLMQGSTLPR
DPRMYSLLQGSTFPR

SEQ ID NO: 61078 - protein, 15 aa, Artificial Sequence
  Description of Artificial Sequence: Synthetic peptide
  Seed: DPRMCSLMQGSTLPR
DPRMYSLLQGSTGPR

SEQ ID NO: 61079 - protein, 15 aa, Artificial Sequence
  Description of Artificial Sequence: Synthetic peptide
  Seed: DPRMCSLMQGSTLPR
DPRMYSLLQGSTHPR

SEQ ID NO: 61080 - protein, 15 aa, Artificial Sequence
  Description of Artificial Sequence: Synthetic peptide
  Seed: DPRMCSLMQGSTLPR
DPRMYSLLQGSTIPR

SEQ ID NO: 61081 - protein, 15 aa, Artificial Sequence
  Description of Artificial Sequence: Synthetic peptide
  Seed: DPRMCSLMQGSTLPR
DPRMYSLLQGSTKPR

SEQ ID NO: 61082 - protein, 15 aa, Artificial Sequence
  Description of Artificial Sequence: Synthetic peptide
  Seed: DPRMCSLMQGSTLPR
DPRMYSLLQGSTLPR

SEQ ID NO: 61083 - protein, 15 aa, Artificial Sequence
  Description of Artificial Sequence: Synthetic peptide
  Seed: DPRMCSLMQGSTLPR
DPRMYSLLQGSTMPR

SEQ ID NO: 61084 - protein, 15 aa, Artificial Sequence
  Description of Artificial Sequence: Synthetic peptide
  Seed: DPRMCSLMQGSTLPR
DPRMYSLLQGSTNPR

SEQ ID NO: 61085 - protein, 15 aa, Artificial Sequence
  Description of Artificial Sequence: Synthetic peptide
  Seed: DPRMCSLMQGSTLPR
DPRMYSLLQGSTPPR

SEQ ID NO: 61086 - protein, 15 aa, Artificial Sequence
  Description of Artificial Sequence: Synthetic peptide
  Seed: DPRMCSLMQGSTLPR
DPRMYSLLQGSTQPR

SEQ ID NO: 61087 - protein, 15 aa, Artificial Sequence
  Description of Artificial Sequence: Synthetic peptide
  Seed: DPRMCSLMQGSTLPR
DPRMYSLLQGSTRPR

SEQ ID NO: 61088 - protein, 15 aa, Artificial Sequence
  Description of Artificial Sequence: Synthetic peptide
  Seed: DPRMCSLMQGSTLPR
DPRMYSLLQGSTSPR

SEQ ID NO: 61089 - protein, 15 aa, Artificial Sequence
  Description of Artificial Sequence: Synthetic peptide
  Seed: DPRMCSLMQGSTLPR
DPRMYSLLQGSTTPR

SEQ ID NO: 61090 - protein, 15 aa, Artificial Sequence
  Description of Artificial Sequence: Synthetic peptide
  Seed: DPRMCSLMQGSTLPR
DPRMYSLLQGSTVPR

SEQ ID NO: 61091 - protein, 15 aa, Artificial Sequence
  Description of Artificial Sequence: Synthetic peptide
  Seed: DPRMCSLMQGSTLPR
DPRMYSLLQGSTWPR

SEQ ID NO: 61092 - protein, 15 aa, Artificial Sequence
  Description of Artificial Sequence: Synthetic peptide
  Seed: DPRMCSLMQGSTLPR
DPRMYSLLQGSTYPR

SEQ ID NO: 61093 - protein, 15 aa, Artificial Sequence
  Description of Artificial Sequence: Synthetic peptide
  Seed: DPRMCSLMQGSTLPR
DPRMYSLLQHSTAPR

SEQ ID NO: 61094 - protein, 15 aa, Artificial Sequence
  Description of Artificial Sequence: Synthetic peptide
  Seed: DPRMCSLMQGSTLPR
DPRMYSLLQHSTIPR

SEQ ID NO: 61095 - protein, 15 aa, Artificial Sequence
  Description of Artificial Sequence: Synthetic peptide
  Seed: DPRMCSLMQGSTLPR
DPRMYSLLQHSTLPR

SEQ ID NO: 61096 - protein, 15 aa, Artificial Sequence
  Description of Artificial Sequence: Synthetic peptide
  Seed: DPRMCSLMQGSTLPR
DPRMYSLLQHSTMPR

SEQ ID NO: 61097 - protein, 15 aa, Artificial Sequence
  Description of Artificial Sequence: Synthetic peptide
  Seed: DPRMCSLMQGSTLPR
DPRMYSLLQHSTVPR

SEQ ID NO: 61098 - protein, 15 aa, Artificial Sequence
  Description of Artificial Sequence: Synthetic peptide
  Seed: DPRMCSLMQGSTLPR
DPRMYSLLQISTAPR

SEQ ID NO: 61099 - protein, 15 aa, Artificial Sequence
  Description of Artificial Sequence: Synthetic peptide
  Seed: DPRMCSLMQGSTLPR
DPRMYSLLQISTDPR

SEQ ID NO: 61100 - protein, 15 aa, Artificial Sequence
  Description of Artificial Sequence: Synthetic peptide
  Seed: DPRMCSLMQGSTLPR
DPRMYSLLQISTEPR

SEQ ID NO: 61101 - protein, 15 aa, Artificial Sequence
  Description of Artificial Sequence: Synthetic peptide
  Seed: DPRMCSLMQGSTLPR
DPRMYSLLQISTGPR

SEQ ID NO: 61102 - protein, 15 aa, Artificial Sequence
  Description of Artificial Sequence: Synthetic peptide
  Seed: DPRMCSLMQGSTLPR
DPRMYSLLQISTHPR

SEQ ID NO: 61103 - protein, 15 aa, Artificial Sequence
  Description of Artificial Sequence: Synthetic peptide
  Seed: DPRMCSLMQGSTLPR
DPRMYSLLQISTIPR

SEQ ID NO: 61104 - protein, 15 aa, Artificial Sequence
  Description of Artificial Sequence: Synthetic peptide
  Seed: DPRMCSLMQGSTLPR
DPRMYSLLQISTLPR

SEQ ID NO: 61105 - protein, 15 aa, Artificial Sequence
  Description of Artificial Sequence: Synthetic peptide
  Seed: DPRMCSLMQGSTLPR
DPRMYSLLQISTMPR

SEQ ID NO: 61106 - protein, 15 aa, Artificial Sequence
  Description of Artificial Sequence: Synthetic peptide
  Seed: DPRMCSLMQGSTLPR
DPRMYSLLQISTNPR

SEQ ID NO: 61107 - protein, 15 aa, Artificial Sequence
  Description of Artificial Sequence: Synthetic peptide
  Seed: DPRMCSLMQGSTLPR
DPRMYSLLQISTPPR

SEQ ID NO: 61108 - protein, 15 aa, Artificial Sequence
  Description of Artificial Sequence: Synthetic peptide
  Seed: DPRMCSLMQGSTLPR
DPRMYSLLQISTQPR

SEQ ID NO: 61109 - protein, 15 aa, Artificial Sequence
  Description of Artificial Sequence: Synthetic peptide
  Seed: DPRMCSLMQGSTLPR
DPRMYSLLQISTSPR

SEQ ID NO: 61110 - protein, 15 aa, Artificial Sequence
  Description of Artificial Sequence: Synthetic peptide
  Seed: DPRMCSLMQGSTLPR
DPRMYSLLQISTTPR

SEQ ID NO: 61111 - protein, 15 aa, Artificial Sequence
  Description of Artificial Sequence: Synthetic peptide
  Seed: DPRMCSLMQGSTLPR
DPRMYSLLQISTVPR

SEQ ID NO: 61112 - protein, 15 aa, Artificial Sequence
  Description of Artificial Sequence: Synthetic peptide
  Seed: DPRMCSLMQGSTLPR
DPRMYSLLQLSTAPR

SEQ ID NO: 61113 - protein, 15 aa, Artificial Sequence
  Description of Artificial Sequence: Synthetic peptide
  Seed: DPRMCSLMQGSTLPR
DPRMYSLLQLSTGPR

SEQ ID NO: 61114 - protein, 15 aa, Artificial Sequence
  Description of Artificial Sequence: Synthetic peptide
  Seed: DPRMCSLMQGSTLPR
DPRMYSLLQLSTHPR

SEQ ID NO: 61115 - protein, 15 aa, Artificial Sequence
  Description of Artificial Sequence: Synthetic peptide
  Seed: DPRMCSLMQGSTLPR
DPRMYSLLQLSTIPR

SEQ ID NO: 61116 - protein, 15 aa, Artificial Sequence
  Description of Artificial Sequence: Synthetic peptide
  Seed: DPRMCSLMQGSTLPR
DPRMYSLLQLSTLPR

SEQ ID NO: 61117 - protein, 15 aa, Artificial Sequence
  Description of Artificial Sequence: Synthetic peptide
  Seed: DPRMCSLMQGSTLPR
DPRMYSLLQLSTMPR

SEQ ID NO: 61118 - protein, 15 aa, Artificial Sequence
  Description of Artificial Sequence: Synthetic peptide
  Seed: DPRMCSLMQGSTLPR
DPRMYSLLQLSTNPR

SEQ ID NO: 61119 - protein, 15 aa, Artificial Sequence
  Description of Artificial Sequence: Synthetic peptide
  Seed: DPRMCSLMQGSTLPR
DPRMYSLLQLSTSPR

SEQ ID NO: 61120 - protein, 15 aa, Artificial Sequence
  Description of Artificial Sequence: Synthetic peptide
  Seed: DPRMCSLMQGSTLPR
DPRMYSLLQLSTTPR

SEQ ID NO: 61121 - protein, 15 aa, Artificial Sequence
  Description of Artificial Sequence: Synthetic peptide
  Seed: DPRMCSLMQGSTLPR
DPRMYSLLQLSTVPR

SEQ ID NO: 61122 - protein, 15 aa, Artificial Sequence
  Description of Artificial Sequence: Synthetic peptide
  Seed: DPRMCSLMQGSTLPR
DPRMYSLLQMSTAPR

SEQ ID NO: 61123 - protein, 15 aa, Artificial Sequence
  Description of Artificial Sequence: Synthetic peptide
  Seed: DPRMCSLMQGSTLPR
DPRMYSLLQMSTHPR

SEQ ID NO: 61124 - protein, 15 aa, Artificial Sequence
  Description of Artificial Sequence: Synthetic peptide
  Seed: DPRMCSLMQGSTLPR
DPRMYSLLQMSTIPR

SEQ ID NO: 61125 - protein, 15 aa, Artificial Sequence
  Description of Artificial Sequence: Synthetic peptide
  Seed: DPRMCSLMQGSTLPR
DPRMYSLLQMSTLPR

SEQ ID NO: 61126 - protein, 15 aa, Artificial Sequence
  Description of Artificial Sequence: Synthetic peptide
  Seed: DPRMCSLMQGSTLPR
DPRMYSLLQMSTMPR

SEQ ID NO: 61127 - protein, 15 aa, Artificial Sequence
  Description of Artificial Sequence: Synthetic peptide
  Seed: DPRMCSLMQGSTLPR
DPRMYSLLQMSTNPR

SEQ ID NO: 61128 - protein, 15 aa, Artificial Sequence
  Description of Artificial Sequence: Synthetic peptide
  Seed: DPRMCSLMQGSTLPR
DPRMYSLLQMSTSPR

SEQ ID NO: 61129 - protein, 15 aa, Artificial Sequence
  Description of Artificial Sequence: Synthetic peptide
  Seed: DPRMCSLMQGSTLPR
DPRMYSLLQMSTTPR

SEQ ID NO: 61130 - protein, 15 aa, Artificial Sequence
  Description of Artificial Sequence: Synthetic peptide
  Seed: DPRMCSLMQGSTLPR
DPRMYSLLQMSTVPR

SEQ ID NO: 61131 - protein, 15 aa, Artificial Sequence
  Description of Artificial Sequence: Synthetic peptide
  Seed: DPRMCSLMQGSTLPR
DPRMYSLLQNSTAPR

SEQ ID NO: 61132 - protein, 15 aa, Artificial Sequence
  Description of Artificial Sequence: Synthetic peptide
  Seed: DPRMCSLMQGSTLPR
DPRMYSLLQNSTCPR

SEQ ID NO: 61133 - protein, 15 aa, Artificial Sequence
  Description of Artificial Sequence: Synthetic peptide
  Seed: DPRMCSLMQGSTLPR
DPRMYSLLQNSTFPR

SEQ ID NO: 61134 - protein, 15 aa, Artificial Sequence
  Description of Artificial Sequence: Synthetic peptide
  Seed: DPRMCSLMQGSTLPR
DPRMYSLLQNSTGPR

SEQ ID NO: 61135 - protein, 15 aa, Artificial Sequence
  Description of Artificial Sequence: Synthetic peptide
  Seed: DPRMCSLMQGSTLPR
DPRMYSLLQNSTHPR

SEQ ID NO: 61136 - protein, 15 aa, Artificial Sequence
  Description of Artificial Sequence: Synthetic peptide
  Seed: DPRMCSLMQGSTLPR
DPRMYSLLQNSTIPR

SEQ ID NO: 61137 - protein, 15 aa, Artificial Sequence
  Description of Artificial Sequence: Synthetic peptide
  Seed: DPRMCSLMQGSTLPR
DPRMYSLLQNSTLPR

SEQ ID NO: 61138 - protein, 15 aa, Artificial Sequence
  Description of Artificial Sequence: Synthetic peptide
  Seed: DPRMCSLMQGSTLPR
DPRMYSLLQNSTMPR

SEQ ID NO: 61139 - protein, 15 aa, Artificial Sequence
  Description of Artificial Sequence: Synthetic peptide
  Seed: DPRMCSLMQGSTLPR
DPRMYSLLQNSTNPR

SEQ ID NO: 61140 - protein, 15 aa, Artificial Sequence
  Description of Artificial Sequence: Synthetic peptide
  Seed: DPRMCSLMQGSTLPR
DPRMYSLLQNSTQPR

SEQ ID NO: 61141 - protein, 15 aa, Artificial Sequence
  Description of Artificial Sequence: Synthetic peptide
  Seed: DPRMCSLMQGSTLPR
DPRMYSLLQNSTSPR

SEQ ID NO: 61142 - protein, 15 aa, Artificial Sequence
  Description of Artificial Sequence: Synthetic peptide
  Seed: DPRMCSLMQGSTLPR
DPRMYSLLQNSTTPR

SEQ ID NO: 61143 - protein, 15 aa, Artificial Sequence
  Description of Artificial Sequence: Synthetic peptide
  Seed: DPRMCSLMQGSTLPR
DPRMYSLLQNSTVPR

SEQ ID NO: 61144 - protein, 15 aa, Artificial Sequence
  Description of Artificial Sequence: Synthetic peptide
  Seed: DPRMCSLMQGSTLPR
DPRMYSLLQPSTAPR

SEQ ID NO: 61145 - protein, 15 aa, Artificial Sequence
  Description of Artificial Sequence: Synthetic peptide
  Seed: DPRMCSLMQGSTLPR
DPRMYSLLQPSTCPR

SEQ ID NO: 61146 - protein, 15 aa, Artificial Sequence
  Description of Artificial Sequence: Synthetic peptide
  Seed: DPRMCSLMQGSTLPR
DPRMYSLLQPSTDPR

SEQ ID NO: 61147 - protein, 15 aa, Artificial Sequence
  Description of Artificial Sequence: Synthetic peptide
  Seed: DPRMCSLMQGSTLPR
DPRMYSLLQPSTEPR

SEQ ID NO: 61148 - protein, 15 aa, Artificial Sequence
  Description of Artificial Sequence: Synthetic peptide
  Seed: DPRMCSLMQGSTLPR
DPRMYSLLQPSTFPR

SEQ ID NO: 61149 - protein, 15 aa, Artificial Sequence
  Description of Artificial Sequence: Synthetic peptide
  Seed: DPRMCSLMQGSTLPR
DPRMYSLLQPSTGPR

SEQ ID NO: 61150 - protein, 15 aa, Artificial Sequence
  Description of Artificial Sequence: Synthetic peptide
  Seed: DPRMCSLMQGSTLPR
DPRMYSLLQPSTHPR

SEQ ID NO: 61151 - protein, 15 aa, Artificial Sequence
  Description of Artificial Sequence: Synthetic peptide
  Seed: DPRMCSLMQGSTLPR
DPRMYSLLQPSTIPR

SEQ ID NO: 61152 - protein, 15 aa, Artificial Sequence
  Description of Artificial Sequence: Synthetic peptide
  Seed: DPRMCSLMQGSTLPR
DPRMYSLLQPSTLPR

SEQ ID NO: 61153 - protein, 15 aa, Artificial Sequence
  Description of Artificial Sequence: Synthetic peptide
  Seed: DPRMCSLMQGSTLPR
DPRMYSLLQPSTMPR

SEQ ID NO: 61154 - protein, 15 aa, Artificial Sequence
  Description of Artificial Sequence: Synthetic peptide
  Seed: DPRMCSLMQGSTLPR
DPRMYSLLQPSTNPR

SEQ ID NO: 61155 - protein, 15 aa, Artificial Sequence
  Description of Artificial Sequence: Synthetic peptide
  Seed: DPRMCSLMQGSTLPR
DPRMYSLLQPSTPPR

SEQ ID NO: 61156 - protein, 15 aa, Artificial Sequence
  Description of Artificial Sequence: Synthetic peptide
  Seed: DPRMCSLMQGSTLPR
DPRMYSLLQPSTQPR

SEQ ID NO: 61157 - protein, 15 aa, Artificial Sequence
  Description of Artificial Sequence: Synthetic peptide
  Seed: DPRMCSLMQGSTLPR
DPRMYSLLQPSTSPR

SEQ ID NO: 61158 - protein, 15 aa, Artificial Sequence
  Description of Artificial Sequence: Synthetic peptide
  Seed: DPRMCSLMQGSTLPR
DPRMYSLLQPSTTPR

SEQ ID NO: 61159 - protein, 15 aa, Artificial Sequence
  Description of Artificial Sequence: Synthetic peptide
  Seed: DPRMCSLMQGSTLPR
DPRMYSLLQPSTVPR

SEQ ID NO: 61160 - protein, 15 aa, Artificial Sequence
  Description of Artificial Sequence: Synthetic peptide
  Seed: DPRMCSLMQGSTLPR
DPRMYSLLQPSTWPR

SEQ ID NO: 61161 - protein, 15 aa, Artificial Sequence
  Description of Artificial Sequence: Synthetic peptide
  Seed: DPRMCSLMQGSTLPR
DPRMYSLLQPSTYPR

SEQ ID NO: 61162 - protein, 15 aa, Artificial Sequence
  Description of Artificial Sequence: Synthetic peptide
  Seed: DPRMCSLMQGSTLPR
DPRMYSLLQQSTAPR

SEQ ID NO: 61163 - protein, 15 aa, Artificial Sequence
  Description of Artificial Sequence: Synthetic peptide
  Seed: DPRMCSLMQGSTLPR
DPRMYSLLQQSTIPR

SEQ ID NO: 61164 - protein, 15 aa, Artificial Sequence
  Description of Artificial Sequence: Synthetic peptide
  Seed: DPRMCSLMQGSTLPR
DPRMYSLLQQSTLPR

SEQ ID NO: 61165 - protein, 15 aa, Artificial Sequence
  Description of Artificial Sequence: Synthetic peptide
  Seed: DPRMCSLMQGSTLPR
DPRMYSLLQQSTVPR

SEQ ID NO: 61166 - protein, 15 aa, Artificial Sequence
  Description of Artificial Sequence: Synthetic peptide
  Seed: DPRMCSLMQGSTLPR
DPRMYSLLQSSTAPR

SEQ ID NO: 61167 - protein, 15 aa, Artificial Sequence
  Description of Artificial Sequence: Synthetic peptide
  Seed: DPRMCSLMQGSTLPR
DPRMYSLLQSSTCPR

SEQ ID NO: 61168 - protein, 15 aa, Artificial Sequence
  Description of Artificial Sequence: Synthetic peptide
  Seed: DPRMCSLMQGSTLPR
DPRMYSLLQSSTDPR

SEQ ID NO: 61169 - protein, 15 aa, Artificial Sequence
  Description of Artificial Sequence: Synthetic peptide
  Seed: DPRMCSLMQGSTLPR
DPRMYSLLQSSTEPR

SEQ ID NO: 61170 - protein, 15 aa, Artificial Sequence
  Description of Artificial Sequence: Synthetic peptide
  Seed: DPRMCSLMQGSTLPR
DPRMYSLLQSSTFPR

SEQ ID NO: 61171 - protein, 15 aa, Artificial Sequence
  Description of Artificial Sequence: Synthetic peptide
  Seed: DPRMCSLMQGSTLPR
DPRMYSLLQSSTGPR

SEQ ID NO: 61172 - protein, 15 aa, Artificial Sequence
  Description of Artificial Sequence: Synthetic peptide
  Seed: DPRMCSLMQGSTLPR
DPRMYSLLQSSTHPR

SEQ ID NO: 61173 - protein, 15 aa, Artificial Sequence
  Description of Artificial Sequence: Synthetic peptide
  Seed: DPRMCSLMQGSTLPR
DPRMYSLLQSSTIPR

SEQ ID NO: 61174 - protein, 15 aa, Artificial Sequence
  Description of Artificial Sequence: Synthetic peptide
  Seed: DPRMCSLMQGSTLPR
DPRMYSLLQSSTKPR

SEQ ID NO: 61175 - protein, 15 aa, Artificial Sequence
  Description of Artificial Sequence: Synthetic peptide
  Seed: DPRMCSLMQGSTLPR
DPRMYSLLQSSTLPR

SEQ ID NO: 61176 - protein, 15 aa, Artificial Sequence
  Description of Artificial Sequence: Synthetic peptide
  Seed: DPRMCSLMQGSTLPR
DPRMYSLLQSSTMPR

SEQ ID NO: 61177 - protein, 15 aa, Artificial Sequence
  Description of Artificial Sequence: Synthetic peptide
  Seed: DPRMCSLMQGSTLPR
DPRMYSLLQSSTNPR

SEQ ID NO: 61178 - protein, 15 aa, Artificial Sequence
  Description of Artificial Sequence: Synthetic peptide
  Seed: DPRMCSLMQGSTLPR
DPRMYSLLQSSTPPR

SEQ ID NO: 61179 - protein, 15 aa, Artificial Sequence
  Description of Artificial Sequence: Synthetic peptide
  Seed: DPRMCSLMQGSTLPR
DPRMYSLLQSSTQPR

SEQ ID NO: 61180 - protein, 15 aa, Artificial Sequence
  Description of Artificial Sequence: Synthetic peptide
  Seed: DPRMCSLMQGSTLPR
DPRMYSLLQSSTRPR

SEQ ID NO: 61181 - protein, 15 aa, Artificial Sequence
  Description of Artificial Sequence: Synthetic peptide
  Seed: DPRMCSLMQGSTLPR
DPRMYSLLQSSTSPR

SEQ ID NO: 61182 - protein, 15 aa, Artificial Sequence
  Description of Artificial Sequence: Synthetic peptide
  Seed: DPRMCSLMQGSTLPR
DPRMYSLLQSSTTPR

SEQ ID NO: 61183 - protein, 15 aa, Artificial Sequence
  Description of Artificial Sequence: Synthetic peptide
  Seed: DPRMCSLMQGSTLPR
DPRMYSLLQSSTVPR

SEQ ID NO: 61184 - protein, 15 aa, Artificial Sequence
  Description of Artificial Sequence: Synthetic peptide
  Seed: DPRMCSLMQGSTLPR
DPRMYSLLQSSTWPR

SEQ ID NO: 61185 - protein, 15 aa, Artificial Sequence
  Description of Artificial Sequence: Synthetic peptide
  Seed: DPRMCSLMQGSTLPR
DPRMYSLLQSSTYPR

SEQ ID NO: 61186 - protein, 15 aa, Artificial Sequence
  Description of Artificial Sequence: Synthetic peptide
  Seed: DPRMCSLMQGSTLPR
DPRMYSLLQTSTAPR

SEQ ID NO: 61187 - protein, 15 aa, Artificial Sequence
  Description of Artificial Sequence: Synthetic peptide
  Seed: DPRMCSLMQGSTLPR
DPRMYSLLQTSTCPR

SEQ ID NO: 61188 - protein, 15 aa, Artificial Sequence
  Description of Artificial Sequence: Synthetic peptide
  Seed: DPRMCSLMQGSTLPR
DPRMYSLLQTSTFPR

SEQ ID NO: 61189 - protein, 15 aa, Artificial Sequence
  Description of Artificial Sequence: Synthetic peptide
  Seed: DPRMCSLMQGSTLPR
DPRMYSLLQTSTGPR

SEQ ID NO: 61190 - protein, 15 aa, Artificial Sequence
  Description of Artificial Sequence: Synthetic peptide
  Seed: DPRMCSLMQGSTLPR
DPRMYSLLQTSTHPR

SEQ ID NO: 61191 - protein, 15 aa, Artificial Sequence
  Description of Artificial Sequence: Synthetic peptide
  Seed: DPRMCSLMQGSTLPR
DPRMYSLLQTSTIPR

SEQ ID NO: 61192 - protein, 15 aa, Artificial Sequence
  Description of Artificial Sequence: Synthetic peptide
  Seed: DPRMCSLMQGSTLPR
DPRMYSLLQTSTLPR

SEQ ID NO: 61193 - protein, 15 aa, Artificial Sequence
  Description of Artificial Sequence: Synthetic peptide
  Seed: DPRMCSLMQGSTLPR
DPRMYSLLQTSTMPR

SEQ ID NO: 61194 - protein, 15 aa, Artificial Sequence
  Description of Artificial Sequence: Synthetic peptide
  Seed: DPRMCSLMQGSTLPR
DPRMYSLLQTSTNPR

SEQ ID NO: 61195 - protein, 15 aa, Artificial Sequence
  Description of Artificial Sequence: Synthetic peptide
  Seed: DPRMCSLMQGSTLPR
DPRMYSLLQTSTPPR

SEQ ID NO: 61196 - protein, 15 aa, Artificial Sequence
  Description of Artificial Sequence: Synthetic peptide
  Seed: DPRMCSLMQGSTLPR
DPRMYSLLQTSTQPR

SEQ ID NO: 61197 - protein, 15 aa, Artificial Sequence
  Description of Artificial Sequence: Synthetic peptide
  Seed: DPRMCSLMQGSTLPR
DPRMYSLLQTSTSPR

SEQ ID NO: 61198 - protein, 15 aa, Artificial Sequence
  Description of Artificial Sequence: Synthetic peptide
  Seed: DPRMCSLMQGSTLPR
DPRMYSLLQTSTTPR

SEQ ID NO: 61199 - protein, 15 aa, Artificial Sequence
  Description of Artificial Sequence: Synthetic peptide
  Seed: DPRMCSLMQGSTLPR
DPRMYSLLQTSTVPR

SEQ ID NO: 61200 - protein, 15 aa, Artificial Sequence
  Description of Artificial Sequence: Synthetic peptide
  Seed: DPRMCSLMQGSTLPR
DPRMYSLLQVSTAPR

SEQ ID NO: 61201 - protein, 15 aa, Artificial Sequence
  Description of Artificial Sequence: Synthetic peptide
  Seed: DPRMCSLMQGSTLPR
DPRMYSLLQVSTCPR

SEQ ID NO: 61202 - protein, 15 aa, Artificial Sequence
  Description of Artificial Sequence: Synthetic peptide
  Seed: DPRMCSLMQGSTLPR
DPRMYSLLQVSTDPR

SEQ ID NO: 61203 - protein, 15 aa, Artificial Sequence
  Description of Artificial Sequence: Synthetic peptide
  Seed: DPRMCSLMQGSTLPR
DPRMYSLLQVSTEPR

SEQ ID NO: 61204 - protein, 15 aa, Artificial Sequence
  Description of Artificial Sequence: Synthetic peptide
  Seed: DPRMCSLMQGSTLPR
DPRMYSLLQVSTFPR

SEQ ID NO: 61205 - protein, 15 aa, Artificial Sequence
  Description of Artificial Sequence: Synthetic peptide
  Seed: DPRMCSLMQGSTLPR
DPRMYSLLQVSTGPR

SEQ ID NO: 61206 - protein, 15 aa, Artificial Sequence
  Description of Artificial Sequence: Synthetic peptide
  Seed: DPRMCSLMQGSTLPR
DPRMYSLLQVSTHPR

SEQ ID NO: 61207 - protein, 15 aa, Artificial Sequence
  Description of Artificial Sequence: Synthetic peptide
  Seed: DPRMCSLMQGSTLPR
DPRMYSLLQVSTIPR

SEQ ID NO: 61208 - protein, 15 aa, Artificial Sequence
  Description of Artificial Sequence: Synthetic peptide
  Seed: DPRMCSLMQGSTLPR
DPRMYSLLQVSTLPR

SEQ ID NO: 61209 - protein, 15 aa, Artificial Sequence
  Description of Artificial Sequence: Synthetic peptide
  Seed: DPRMCSLMQGSTLPR
DPRMYSLLQVSTMPR

SEQ ID NO: 61210 - protein, 15 aa, Artificial Sequence
  Description of Artificial Sequence: Synthetic peptide
  Seed: DPRMCSLMQGSTLPR
DPRMYSLLQVSTNPR

SEQ ID NO: 61211 - protein, 15 aa, Artificial Sequence
  Description of Artificial Sequence: Synthetic peptide
  Seed: DPRMCSLMQGSTLPR
DPRMYSLLQVSTPPR

SEQ ID NO: 61212 - protein, 15 aa, Artificial Sequence
  Description of Artificial Sequence: Synthetic peptide
  Seed: DPRMCSLMQGSTLPR
DPRMYSLLQVSTQPR

SEQ ID NO: 61213 - protein, 15 aa, Artificial Sequence
  Description of Artificial Sequence: Synthetic peptide
  Seed: DPRMCSLMQGSTLPR
DPRMYSLLQVSTSPR

SEQ ID NO: 61214 - protein, 15 aa, Artificial Sequence
  Description of Artificial Sequence: Synthetic peptide
  Seed: DPRMCSLMQGSTLPR
DPRMYSLLQVSTTPR

SEQ ID NO: 61215 - protein, 15 aa, Artificial Sequence
  Description of Artificial Sequence: Synthetic peptide
  Seed: DPRMCSLMQGSTLPR
DPRMYSLLQVSTVPR

SEQ ID NO: 61216 - protein, 15 aa, Artificial Sequence
  Description of Artificial Sequence: Synthetic peptide
  Seed: DPRMCSLMQGSTLPR
DPRMYSLLQWSTLPR

SEQ ID NO: 61217 - protein, 15 aa, Artificial Sequence
  Description of Artificial Sequence: Synthetic peptide
  Seed: DPRMCSLMQGSTLPR
DPRMYSLMQASTAPR

SEQ ID NO: 61218 - protein, 15 aa, Artificial Sequence
  Description of Artificial Sequence: Synthetic peptide
  Seed: DPRMCSLMQGSTLPR
DPRMYSLMQASTCPR

SEQ ID NO: 61219 - protein, 15 aa, Artificial Sequence
  Description of Artificial Sequence: Synthetic peptide
  Seed: DPRMCSLMQGSTLPR
DPRMYSLMQASTDPR

SEQ ID NO: 61220 - protein, 15 aa, Artificial Sequence
  Description of Artificial Sequence: Synthetic peptide
  Seed: DPRMCSLMQGSTLPR
DPRMYSLMQASTEPR

SEQ ID NO: 61221 - protein, 15 aa, Artificial Sequence
  Description of Artificial Sequence: Synthetic peptide
  Seed: DPRMCSLMQGSTLPR
DPRMYSLMQASTFPR

SEQ ID NO: 61222 - protein, 15 aa, Artificial Sequence
  Description of Artificial Sequence: Synthetic peptide
  Seed: DPRMCSLMQGSTLPR
DPRMYSLMQASTGPR

SEQ ID NO: 61223 - protein, 15 aa, Artificial Sequence
  Description of Artificial Sequence: Synthetic peptide
  Seed: DPRMCSLMQGSTLPR
DPRMYSLMQASTHPR

SEQ ID NO: 61224 - protein, 15 aa, Artificial Sequence
  Description of Artificial Sequence: Synthetic peptide
  Seed: DPRMCSLMQGSTLPR
DPRMYSLMQASTIPR

SEQ ID NO: 61225 - protein, 15 aa, Artificial Sequence
  Description of Artificial Sequence: Synthetic peptide
  Seed: DPRMCSLMQGSTLPR
DPRMYSLMQASTKPR

SEQ ID NO: 61226 - protein, 15 aa, Artificial Sequence
  Description of Artificial Sequence: Synthetic peptide
  Seed: DPRMCSLMQGSTLPR
DPRMYSLMQASTLPR

SEQ ID NO: 61227 - protein, 15 aa, Artificial Sequence
  Description of Artificial Sequence: Synthetic peptide
  Seed: DPRMCSLMQGSTLPR
DPRMYSLMQASTMPR

SEQ ID NO: 61228 - protein, 15 aa, Artificial Sequence
  Description of Artificial Sequence: Synthetic peptide
  Seed: DPRMCSLMQGSTLPR
DPRMYSLMQASTNPR

SEQ ID NO: 61229 - protein, 15 aa, Artificial Sequence
  Description of Artificial Sequence: Synthetic peptide
  Seed: DPRMCSLMQGSTLPR
DPRMYSLMQASTPPR

SEQ ID NO: 61230 - protein, 15 aa, Artificial Sequence
  Description of Artificial Sequence: Synthetic peptide
  Seed: DPRMCSLMQGSTLPR
DPRMYSLMQASTQPR

SEQ ID NO: 61231 - protein, 15 aa, Artificial Sequence
  Description of Artificial Sequence: Synthetic peptide
  Seed: DPRMCSLMQGSTLPR
DPRMYSLMQASTRPR

SEQ ID NO: 61232 - protein, 15 aa, Artificial Sequence
  Description of Artificial Sequence: Synthetic peptide
  Seed: DPRMCSLMQGSTLPR
DPRMYSLMQASTSPR

SEQ ID NO: 61233 - protein, 15 aa, Artificial Sequence
  Description of Artificial Sequence: Synthetic peptide
  Seed: DPRMCSLMQGSTLPR
DPRMYSLMQASTTPR

SEQ ID NO: 61234 - protein, 15 aa, Artificial Sequence
  Description of Artificial Sequence: Synthetic peptide
  Seed: DPRMCSLMQGSTLPR
DPRMYSLMQASTVPR

SEQ ID NO: 61235 - protein, 15 aa, Artificial Sequence
  Description of Artificial Sequence: Synthetic peptide
  Seed: DPRMCSLMQGSTLPR
DPRMYSLMQASTWPR

SEQ ID NO: 61236 - protein, 15 aa, Artificial Sequence
  Description of Artificial Sequence: Synthetic peptide
  Seed: DPRMCSLMQGSTLPR
DPRMYSLMQASTYPR

SEQ ID NO: 61237 - protein, 15 aa, Artificial Sequence
  Description of Artificial Sequence: Synthetic peptide
  Seed: DPRMCSLMQGSTLPR
DPRMYSLMQCSTAPR

SEQ ID NO: 61238 - protein, 15 aa, Artificial Sequence
  Description of Artificial Sequence: Synthetic peptide
  Seed: DPRMCSLMQGSTLPR
DPRMYSLMQCSTIPR

SEQ ID NO: 61239 - protein, 15 aa, Artificial Sequence
  Description of Artificial Sequence: Synthetic peptide
  Seed: DPRMCSLMQGSTLPR
DPRMYSLMQCSTLPR

SEQ ID NO: 61240 - protein, 15 aa, Artificial Sequence
  Description of Artificial Sequence: Synthetic peptide
  Seed: DPRMCSLMQGSTLPR
DPRMYSLMQCSTVPR

SEQ ID NO: 61241 - protein, 15 aa, Artificial Sequence
  Description of Artificial Sequence: Synthetic peptide
  Seed: DPRMCSLMQGSTLPR
DPRMYSLMQESTIPR

SEQ ID NO: 61242 - protein, 15 aa, Artificial Sequence
  Description of Artificial Sequence: Synthetic peptide
  Seed: DPRMCSLMQGSTLPR
DPRMYSLMQESTLPR

SEQ ID NO: 61243 - protein, 15 aa, Artificial Sequence
  Description of Artificial Sequence: Synthetic peptide
  Seed: DPRMCSLMQGSTLPR
DPRMYSLMQESTVPR

SEQ ID NO: 61244 - protein, 15 aa, Artificial Sequence
  Description of Artificial Sequence: Synthetic peptide
  Seed: DPRMCSLMQGSTLPR
DPRMYSLMQGSTAPR

SEQ ID NO: 61245 - protein, 15 aa, Artificial Sequence
  Description of Artificial Sequence: Synthetic peptide
  Seed: DPRMCSLMQGSTLPR
DPRMYSLMQGSTCPR

SEQ ID NO: 61246 - protein, 15 aa, Artificial Sequence
  Description of Artificial Sequence: Synthetic peptide
  Seed: DPRMCSLMQGSTLPR
DPRMYSLMQGSTFPR

SEQ ID NO: 61247 - protein, 15 aa, Artificial Sequence
  Description of Artificial Sequence: Synthetic peptide
  Seed: DPRMCSLMQGSTLPR
DPRMYSLMQGSTGPR

SEQ ID NO: 61248 - protein, 15 aa, Artificial Sequence
  Description of Artificial Sequence: Synthetic peptide
  Seed: DPRMCSLMQGSTLPR
DPRMYSLMQGSTHPR

SEQ ID NO: 61249 - protein, 15 aa, Artificial Sequence
  Description of Artificial Sequence: Synthetic peptide
  Seed: DPRMCSLMQGSTLPR
DPRMYSLMQGSTIPR

SEQ ID NO: 61250 - protein, 15 aa, Artificial Sequence
  Description of Artificial Sequence: Synthetic peptide
  Seed: DPRMCSLMQGSTLPR
DPRMYSLMQGSTKPR

SEQ ID NO: 61251 - protein, 15 aa, Artificial Sequence
  Description of Artificial Sequence: Synthetic peptide
  Seed: DPRMCSLMQGSTLPR
DPRMYSLMQGSTLPR

SEQ ID NO: 61252 - protein, 15 aa, Artificial Sequence
  Description of Artificial Sequence: Synthetic peptide
  Seed: DPRMCSLMQGSTLPR
DPRMYSLMQGSTMPR

SEQ ID NO: 61253 - protein, 15 aa, Artificial Sequence
  Description of Artificial Sequence: Synthetic peptide
  Seed: DPRMCSLMQGSTLPR
DPRMYSLMQGSTNPR

SEQ ID NO: 61254 - protein, 15 aa, Artificial Sequence
  Description of Artificial Sequence: Synthetic peptide
  Seed: DPRMCSLMQGSTLPR
DPRMYSLMQGSTPPR

SEQ ID NO: 61255 - protein, 15 aa, Artificial Sequence
  Description of Artificial Sequence: Synthetic peptide
  Seed: DPRMCSLMQGSTLPR
DPRMYSLMQGSTQPR

SEQ ID NO: 61256 - protein, 15 aa, Artificial Sequence
  Description of Artificial Sequence: Synthetic peptide
  Seed: DPRMCSLMQGSTLPR
DPRMYSLMQGSTRPR

SEQ ID NO: 61257 - protein, 15 aa, Artificial Sequence
  Description of Artificial Sequence: Synthetic peptide
  Seed: DPRMCSLMQGSTLPR
DPRMYSLMQGSTSPR

SEQ ID NO: 61258 - protein, 15 aa, Artificial Sequence
  Description of Artificial Sequence: Synthetic peptide
  Seed: DPRMCSLMQGSTLPR
DPRMYSLMQGSTTPR

SEQ ID NO: 61259 - protein, 15 aa, Artificial Sequence
  Description of Artificial Sequence: Synthetic peptide
  Seed: DPRMCSLMQGSTLPR
DPRMYSLMQGSTVPR

SEQ ID NO: 61260 - protein, 15 aa, Artificial Sequence
  Description of Artificial Sequence: Synthetic peptide
  Seed: DPRMCSLMQGSTLPR
DPRMYSLMQGSTWPR

SEQ ID NO: 61261 - protein, 15 aa, Artificial Sequence
  Description of Artificial Sequence: Synthetic peptide
  Seed: DPRMCSLMQGSTLPR
DPRMYSLMQGSTYPR

SEQ ID NO: 61262 - protein, 15 aa, Artificial Sequence
  Description of Artificial Sequence: Synthetic peptide
  Seed: DPRMCSLMQGSTLPR
DPRMYSLMQHSTAPR

SEQ ID NO: 61263 - protein, 15 aa, Artificial Sequence
  Description of Artificial Sequence: Synthetic peptide
  Seed: DPRMCSLMQGSTLPR
DPRMYSLMQHSTIPR

SEQ ID NO: 61264 - protein, 15 aa, Artificial Sequence
  Description of Artificial Sequence: Synthetic peptide
  Seed: DPRMCSLMQGSTLPR
DPRMYSLMQHSTLPR

SEQ ID NO: 61265 - protein, 15 aa, Artificial Sequence
  Description of Artificial Sequence: Synthetic peptide
  Seed: DPRMCSLMQGSTLPR
DPRMYSLMQHSTMPR

SEQ ID NO: 61266 - protein, 15 aa, Artificial Sequence
  Description of Artificial Sequence: Synthetic peptide
  Seed: DPRMCSLMQGSTLPR
DPRMYSLMQHSTVPR

SEQ ID NO: 61267 - protein, 15 aa, Artificial Sequence
  Description of Artificial Sequence: Synthetic peptide
  Seed: DPRMCSLMQGSTLPR
DPRMYSLMQISTAPR

SEQ ID NO: 61268 - protein, 15 aa, Artificial Sequence
  Description of Artificial Sequence: Synthetic peptide
  Seed: DPRMCSLMQGSTLPR
DPRMYSLMQISTCPR

SEQ ID NO: 61269 - protein, 15 aa, Artificial Sequence
  Description of Artificial Sequence: Synthetic peptide
  Seed: DPRMCSLMQGSTLPR
DPRMYSLMQISTDPR

SEQ ID NO: 61270 - protein, 15 aa, Artificial Sequence
  Description of Artificial Sequence: Synthetic peptide
  Seed: DPRMCSLMQGSTLPR
DPRMYSLMQISTEPR

SEQ ID NO: 61271 - protein, 15 aa, Artificial Sequence
  Description of Artificial Sequence: Synthetic peptide
  Seed: DPRMCSLMQGSTLPR
DPRMYSLMQISTGPR

SEQ ID NO: 61272 - protein, 15 aa, Artificial Sequence
  Description of Artificial Sequence: Synthetic peptide
  Seed: DPRMCSLMQGSTLPR
DPRMYSLMQISTHPR

SEQ ID NO: 61273 - protein, 15 aa, Artificial Sequence
  Description of Artificial Sequence: Synthetic peptide
  Seed: DPRMCSLMQGSTLPR
DPRMYSLMQISTIPR

SEQ ID NO: 61274 - protein, 15 aa, Artificial Sequence
  Description of Artificial Sequence: Synthetic peptide
  Seed: DPRMCSLMQGSTLPR
DPRMYSLMQISTLPR

SEQ ID NO: 61275 - protein, 15 aa, Artificial Sequence
  Description of Artificial Sequence: Synthetic peptide
  Seed: DPRMCSLMQGSTLPR
DPRMYSLMQISTMPR

SEQ ID NO: 61276 - protein, 15 aa, Artificial Sequence
  Description of Artificial Sequence: Synthetic peptide
  Seed: DPRMCSLMQGSTLPR
DPRMYSLMQISTNPR

SEQ ID NO: 61277 - protein, 15 aa, Artificial Sequence
  Description of Artificial Sequence: Synthetic peptide
  Seed: DPRMCSLMQGSTLPR
DPRMYSLMQISTPPR

SEQ ID NO: 61278 - protein, 15 aa, Artificial Sequence
  Description of Artificial Sequence: Synthetic peptide
  Seed: DPRMCSLMQGSTLPR
DPRMYSLMQISTQPR

SEQ ID NO: 61279 - protein, 15 aa, Artificial Sequence
  Description of Artificial Sequence: Synthetic peptide
  Seed: DPRMCSLMQGSTLPR
DPRMYSLMQISTSPR

SEQ ID NO: 61280 - protein, 15 aa, Artificial Sequence
  Description of Artificial Sequence: Synthetic peptide
  Seed: DPRMCSLMQGSTLPR
DPRMYSLMQISTTPR

SEQ ID NO: 61281 - protein, 15 aa, Artificial Sequence
  Description of Artificial Sequence: Synthetic peptide
  Seed: DPRMCSLMQGSTLPR
DPRMYSLMQISTVPR

SEQ ID NO: 61282 - protein, 15 aa, Artificial Sequence
  Description of Artificial Sequence: Synthetic peptide
  Seed: DPRMCSLMQGSTLPR
DPRMYSLMQLSTAPR

SEQ ID NO: 61283 - protein, 15 aa, Artificial Sequence
  Description of Artificial Sequence: Synthetic peptide
  Seed: DPRMCSLMQGSTLPR
DPRMYSLMQLSTGPR

SEQ ID NO: 61284 - protein, 15 aa, Artificial Sequence
  Description of Artificial Sequence: Synthetic peptide
  Seed: DPRMCSLMQGSTLPR
DPRMYSLMQLSTHPR

SEQ ID NO: 61285 - protein, 15 aa, Artificial Sequence
  Description of Artificial Sequence: Synthetic peptide
  Seed: DPRMCSLMQGSTLPR
DPRMYSLMQLSTIPR

SEQ ID NO: 61286 - protein, 15 aa, Artificial Sequence
  Description of Artificial Sequence: Synthetic peptide
  Seed: DPRMCSLMQGSTLPR
DPRMYSLMQLSTLPR

SEQ ID NO: 61287 - protein, 15 aa, Artificial Sequence
  Description of Artificial Sequence: Synthetic peptide
  Seed: DPRMCSLMQGSTLPR
DPRMYSLMQLSTMPR

SEQ ID NO: 61288 - protein, 15 aa, Artificial Sequence
  Description of Artificial Sequence: Synthetic peptide
  Seed: DPRMCSLMQGSTLPR
DPRMYSLMQLSTNPR

SEQ ID NO: 61289 - protein, 15 aa, Artificial Sequence
  Description of Artificial Sequence: Synthetic peptide
  Seed: DPRMCSLMQGSTLPR
DPRMYSLMQLSTSPR

SEQ ID NO: 61290 - protein, 15 aa, Artificial Sequence
  Description of Artificial Sequence: Synthetic peptide
  Seed: DPRMCSLMQGSTLPR
DPRMYSLMQLSTTPR

SEQ ID NO: 61291 - protein, 15 aa, Artificial Sequence
  Description of Artificial Sequence: Synthetic peptide
  Seed: DPRMCSLMQGSTLPR
DPRMYSLMQLSTVPR

SEQ ID NO: 61292 - protein, 15 aa, Artificial Sequence
  Description of Artificial Sequence: Synthetic peptide
  Seed: DPRMCSLMQGSTLPR
DPRMYSLMQMSTAPR

SEQ ID NO: 61293 - protein, 15 aa, Artificial Sequence
  Description of Artificial Sequence: Synthetic peptide
  Seed: DPRMCSLMQGSTLPR
DPRMYSLMQMSTHPR

SEQ ID NO: 61294 - protein, 15 aa, Artificial Sequence
  Description of Artificial Sequence: Synthetic peptide
  Seed: DPRMCSLMQGSTLPR
DPRMYSLMQMSTIPR

SEQ ID NO: 61295 - protein, 15 aa, Artificial Sequence
  Description of Artificial Sequence: Synthetic peptide
  Seed: DPRMCSLMQGSTLPR
DPRMYSLMQMSTLPR

SEQ ID NO: 61296 - protein, 15 aa, Artificial Sequence
  Description of Artificial Sequence: Synthetic peptide
  Seed: DPRMCSLMQGSTLPR
DPRMYSLMQMSTMPR

SEQ ID NO: 61297 - protein, 15 aa, Artificial Sequence
  Description of Artificial Sequence: Synthetic peptide
  Seed: DPRMCSLMQGSTLPR
DPRMYSLMQMSTNPR

SEQ ID NO: 61298 - protein, 15 aa, Artificial Sequence
  Description of Artificial Sequence: Synthetic peptide
  Seed: DPRMCSLMQGSTLPR
DPRMYSLMQMSTSPR

SEQ ID NO: 61299 - protein, 15 aa, Artificial Sequence
  Description of Artificial Sequence: Synthetic peptide
  Seed: DPRMCSLMQGSTLPR
DPRMYSLMQMSTTPR

SEQ ID NO: 61300 - protein, 15 aa, Artificial Sequence
  Description of Artificial Sequence: Synthetic peptide
  Seed: DPRMCSLMQGSTLPR
DPRMYSLMQMSTVPR

SEQ ID NO: 61301 - protein, 15 aa, Artificial Sequence
  Description of Artificial Sequence: Synthetic peptide
  Seed: DPRMCSLMQGSTLPR
DPRMYSLMQNSTAPR

SEQ ID NO: 61302 - protein, 15 aa, Artificial Sequence
  Description of Artificial Sequence: Synthetic peptide
  Seed: DPRMCSLMQGSTLPR
DPRMYSLMQNSTCPR

SEQ ID NO: 61303 - protein, 15 aa, Artificial Sequence
  Description of Artificial Sequence: Synthetic peptide
  Seed: DPRMCSLMQGSTLPR
DPRMYSLMQNSTFPR

SEQ ID NO: 61304 - protein, 15 aa, Artificial Sequence
  Description of Artificial Sequence: Synthetic peptide
  Seed: DPRMCSLMQGSTLPR
DPRMYSLMQNSTGPR

SEQ ID NO: 61305 - protein, 15 aa, Artificial Sequence
  Description of Artificial Sequence: Synthetic peptide
  Seed: DPRMCSLMQGSTLPR
DPRMYSLMQNSTHPR

SEQ ID NO: 61306 - protein, 15 aa, Artificial Sequence
  Description of Artificial Sequence: Synthetic peptide
  Seed: DPRMCSLMQGSTLPR
DPRMYSLMQNSTIPR

SEQ ID NO: 61307 - protein, 15 aa, Artificial Sequence
  Description of Artificial Sequence: Synthetic peptide
  Seed: DPRMCSLMQGSTLPR
DPRMYSLMQNSTLPR

SEQ ID NO: 61308 - protein, 15 aa, Artificial Sequence
  Description of Artificial Sequence: Synthetic peptide
  Seed: DPRMCSLMQGSTLPR
DPRMYSLMQNSTMPR

SEQ ID NO: 61309 - protein, 15 aa, Artificial Sequence
  Description of Artificial Sequence: Synthetic peptide
  Seed: DPRMCSLMQGSTLPR
DPRMYSLMQNSTNPR

SEQ ID NO: 61310 - protein, 15 aa, Artificial Sequence
  Description of Artificial Sequence: Synthetic peptide
  Seed: DPRMCSLMQGSTLPR
DPRMYSLMQNSTQPR

SEQ ID NO: 61311 - protein, 15 aa, Artificial Sequence
  Description of Artificial Sequence: Synthetic peptide
  Seed: DPRMCSLMQGSTLPR
DPRMYSLMQNSTSPR

SEQ ID NO: 61312 - protein, 15 aa, Artificial Sequence
  Description of Artificial Sequence: Synthetic peptide
  Seed: DPRMCSLMQGSTLPR
DPRMYSLMQNSTTPR

SEQ ID NO: 61313 - protein, 15 aa, Artificial Sequence
  Description of Artificial Sequence: Synthetic peptide
  Seed: DPRMCSLMQGSTLPR
DPRMYSLMQNSTVPR

SEQ ID NO: 61314 - protein, 15 aa, Artificial Sequence
  Description of Artificial Sequence: Synthetic peptide
  Seed: DPRMCSLMQGSTLPR
DPRMYSLMQPSTAPR

SEQ ID NO: 61315 - protein, 15 aa, Artificial Sequence
  Description of Artificial Sequence: Synthetic peptide
  Seed: DPRMCSLMQGSTLPR
DPRMYSLMQPSTCPR

SEQ ID NO: 61316 - protein, 15 aa, Artificial Sequence
  Description of Artificial Sequence: Synthetic peptide
  Seed: DPRMCSLMQGSTLPR
DPRMYSLMQPSTEPR

SEQ ID NO: 61317 - protein, 15 aa, Artificial Sequence
  Description of Artificial Sequence: Synthetic peptide
  Seed: DPRMCSLMQGSTLPR
DPRMYSLMQPSTFPR

SEQ ID NO: 61318 - protein, 15 aa, Artificial Sequence
  Description of Artificial Sequence: Synthetic peptide
  Seed: DPRMCSLMQGSTLPR
DPRMYSLMQPSTGPR

SEQ ID NO: 61319 - protein, 15 aa, Artificial Sequence
  Description of Artificial Sequence: Synthetic peptide
  Seed: DPRMCSLMQGSTLPR
DPRMYSLMQPSTHPR

SEQ ID NO: 61320 - protein, 15 aa, Artificial Sequence
  Description of Artificial Sequence: Synthetic peptide
  Seed: DPRMCSLMQGSTLPR
DPRMYSLMQPSTIPR

SEQ ID NO: 61321 - protein, 15 aa, Artificial Sequence
  Description of Artificial Sequence: Synthetic peptide
  Seed: DPRMCSLMQGSTLPR
DPRMYSLMQPSTLPR

SEQ ID NO: 61322 - protein, 15 aa, Artificial Sequence
  Description of Artificial Sequence: Synthetic peptide
  Seed: DPRMCSLMQGSTLPR
DPRMYSLMQPSTMPR

SEQ ID NO: 61323 - protein, 15 aa, Artificial Sequence
  Description of Artificial Sequence: Synthetic peptide
  Seed: DPRMCSLMQGSTLPR
DPRMYSLMQPSTNPR

SEQ ID NO: 61324 - protein, 15 aa, Artificial Sequence
  Description of Artificial Sequence: Synthetic peptide
  Seed: DPRMCSLMQGSTLPR
DPRMYSLMQPSTPPR

SEQ ID NO: 61325 - protein, 15 aa, Artificial Sequence
  Description of Artificial Sequence: Synthetic peptide
  Seed: DPRMCSLMQGSTLPR
DPRMYSLMQPSTQPR

SEQ ID NO: 61326 - protein, 15 aa, Artificial Sequence
  Description of Artificial Sequence: Synthetic peptide
  Seed: DPRMCSLMQGSTLPR
DPRMYSLMQPSTSPR

SEQ ID NO: 61327 - protein, 15 aa, Artificial Sequence
  Description of Artificial Sequence: Synthetic peptide
  Seed: DPRMCSLMQGSTLPR
DPRMYSLMQPSTTPR

SEQ ID NO: 61328 - protein, 15 aa, Artificial Sequence
  Description of Artificial Sequence: Synthetic peptide
  Seed: DPRMCSLMQGSTLPR
DPRMYSLMQPSTVPR

SEQ ID NO: 61329 - protein, 15 aa, Artificial Sequence
  Description of Artificial Sequence: Synthetic peptide
  Seed: DPRMCSLMQGSTLPR
DPRMYSLMQPSTWPR

SEQ ID NO: 61330 - protein, 15 aa, Artificial Sequence
  Description of Artificial Sequence: Synthetic peptide
  Seed: DPRMCSLMQGSTLPR
DPRMYSLMQPSTYPR

SEQ ID NO: 61331 - protein, 15 aa, Artificial Sequence
  Description of Artificial Sequence: Synthetic peptide
  Seed: DPRMCSLMQGSTLPR
DPRMYSLMQQSTAPR

SEQ ID NO: 61332 - protein, 15 aa, Artificial Sequence
  Description of Artificial Sequence: Synthetic peptide
  Seed: DPRMCSLMQGSTLPR
DPRMYSLMQQSTIPR

SEQ ID NO: 61333 - protein, 15 aa, Artificial Sequence
  Description of Artificial Sequence: Synthetic peptide
  Seed: DPRMCSLMQGSTLPR
DPRMYSLMQQSTLPR

SEQ ID NO: 61334 - protein, 15 aa, Artificial Sequence
  Description of Artificial Sequence: Synthetic peptide
  Seed: DPRMCSLMQGSTLPR
DPRMYSLMQQSTVPR

SEQ ID NO: 61335 - protein, 15 aa, Artificial Sequence
  Description of Artificial Sequence: Synthetic peptide
  Seed: DPRMCSLMQGSTLPR
DPRMYSLMQSSTAPR

SEQ ID NO: 61336 - protein, 15 aa, Artificial Sequence
  Description of Artificial Sequence: Synthetic peptide
  Seed: DPRMCSLMQGSTLPR
DPRMYSLMQSSTCPR

SEQ ID NO: 61337 - protein, 15 aa, Artificial Sequence
  Description of Artificial Sequence: Synthetic peptide
  Seed: DPRMCSLMQGSTLPR
DPRMYSLMQSSTEPR

SEQ ID NO: 61338 - protein, 15 aa, Artificial Sequence
  Description of Artificial Sequence: Synthetic peptide
  Seed: DPRMCSLMQGSTLPR
DPRMYSLMQSSTFPR

SEQ ID NO: 61339 - protein, 15 aa, Artificial Sequence
  Description of Artificial Sequence: Synthetic peptide
  Seed: DPRMCSLMQGSTLPR
DPRMYSLMQSSTGPR

SEQ ID NO: 61340 - protein, 15 aa, Artificial Sequence
  Description of Artificial Sequence: Synthetic peptide
  Seed: DPRMCSLMQGSTLPR
DPRMYSLMQSSTHPR

SEQ ID NO: 61341 - protein, 15 aa, Artificial Sequence
  Description of Artificial Sequence: Synthetic peptide
  Seed: DPRMCSLMQGSTLPR
DPRMYSLMQSSTIPR

SEQ ID NO: 61342 - protein, 15 aa, Artificial Sequence
  Description of Artificial Sequence: Synthetic peptide
  Seed: DPRMCSLMQGSTLPR
DPRMYSLMQSSTKPR

SEQ ID NO: 61343 - protein, 15 aa, Artificial Sequence
  Description of Artificial Sequence: Synthetic peptide
  Seed: DPRMCSLMQGSTLPR
DPRMYSLMQSSTLPR

SEQ ID NO: 61344 - protein, 15 aa, Artificial Sequence
  Description of Artificial Sequence: Synthetic peptide
  Seed: DPRMCSLMQGSTLPR
DPRMYSLMQSSTMPR

SEQ ID NO: 61345 - protein, 15 aa, Artificial Sequence
  Description of Artificial Sequence: Synthetic peptide
  Seed: DPRMCSLMQGSTLPR
DPRMYSLMQSSTNPR

SEQ ID NO: 61346 - protein, 15 aa, Artificial Sequence
  Description of Artificial Sequence: Synthetic peptide
  Seed: DPRMCSLMQGSTLPR
DPRMYSLMQSSTPPR

SEQ ID NO: 61347 - protein, 15 aa, Artificial Sequence
  Description of Artificial Sequence: Synthetic peptide
  Seed: DPRMCSLMQGSTLPR
DPRMYSLMQSSTQPR

SEQ ID NO: 61348 - protein, 15 aa, Artificial Sequence
  Description of Artificial Sequence: Synthetic peptide
  Seed: DPRMCSLMQGSTLPR
DPRMYSLMQSSTRPR

SEQ ID NO: 61349 - protein, 15 aa, Artificial Sequence
  Description of Artificial Sequence: Synthetic peptide
  Seed: DPRMCSLMQGSTLPR
DPRMYSLMQSSTSPR

SEQ ID NO: 61350 - protein, 15 aa, Artificial Sequence
  Description of Artificial Sequence: Synthetic peptide
  Seed: DPRMCSLMQGSTLPR
DPRMYSLMQSSTTPR

SEQ ID NO: 61351 - protein, 15 aa, Artificial Sequence
  Description of Artificial Sequence: Synthetic peptide
  Seed: DPRMCSLMQGSTLPR
DPRMYSLMQSSTVPR

SEQ ID NO: 61352 - protein, 15 aa, Artificial Sequence
  Description of Artificial Sequence: Synthetic peptide
  Seed: DPRMCSLMQGSTLPR
DPRMYSLMQSSTWPR

SEQ ID NO: 61353 - protein, 15 aa, Artificial Sequence
  Description of Artificial Sequence: Synthetic peptide
  Seed: DPRMCSLMQGSTLPR
DPRMYSLMQSSTYPR

SEQ ID NO: 61354 - protein, 15 aa, Artificial Sequence
  Description of Artificial Sequence: Synthetic peptide
  Seed: DPRMCSLMQGSTLPR
DPRMYSLMQTSTAPR

SEQ ID NO: 61355 - protein, 15 aa, Artificial Sequence
  Description of Artificial Sequence: Synthetic peptide
  Seed: DPRMCSLMQGSTLPR
DPRMYSLMQTSTCPR

SEQ ID NO: 61356 - protein, 15 aa, Artificial Sequence
  Description of Artificial Sequence: Synthetic peptide
  Seed: DPRMCSLMQGSTLPR
DPRMYSLMQTSTFPR

SEQ ID NO: 61357 - protein, 15 aa, Artificial Sequence
  Description of Artificial Sequence: Synthetic peptide
  Seed: DPRMCSLMQGSTLPR
DPRMYSLMQTSTGPR

SEQ ID NO: 61358 - protein, 15 aa, Artificial Sequence
  Description of Artificial Sequence: Synthetic peptide
  Seed: DPRMCSLMQGSTLPR
DPRMYSLMQTSTHPR

SEQ ID NO: 61359 - protein, 15 aa, Artificial Sequence
  Description of Artificial Sequence: Synthetic peptide
  Seed: DPRMCSLMQGSTLPR
DPRMYSLMQTSTIPR

SEQ ID NO: 61360 - protein, 15 aa, Artificial Sequence
  Description of Artificial Sequence: Synthetic peptide
  Seed: DPRMCSLMQGSTLPR
DPRMYSLMQTSTLPR

SEQ ID NO: 61361 - protein, 15 aa, Artificial Sequence
  Description of Artificial Sequence: Synthetic peptide
  Seed: DPRMCSLMQGSTLPR
DPRMYSLMQTSTMPR

SEQ ID NO: 61362 - protein, 15 aa, Artificial Sequence
  Description of Artificial Sequence: Synthetic peptide
  Seed: DPRMCSLMQGSTLPR
DPRMYSLMQTSTNPR

SEQ ID NO: 61363 - protein, 15 aa, Artificial Sequence
  Description of Artificial Sequence: Synthetic peptide
  Seed: DPRMCSLMQGSTLPR
DPRMYSLMQTSTPPR

SEQ ID NO: 61364 - protein, 15 aa, Artificial Sequence
  Description of Artificial Sequence: Synthetic peptide
  Seed: DPRMCSLMQGSTLPR
DPRMYSLMQTSTQPR

SEQ ID NO: 61365 - protein, 15 aa, Artificial Sequence
  Description of Artificial Sequence: Synthetic peptide
  Seed: DPRMCSLMQGSTLPR
DPRMYSLMQTSTSPR

SEQ ID NO: 61366 - protein, 15 aa, Artificial Sequence
  Description of Artificial Sequence: Synthetic peptide
  Seed: DPRMCSLMQGSTLPR
DPRMYSLMQTSTTPR

SEQ ID NO: 61367 - protein, 15 aa, Artificial Sequence
  Description of Artificial Sequence: Synthetic peptide
  Seed: DPRMCSLMQGSTLPR
DPRMYSLMQTSTVPR

SEQ ID NO: 61368 - protein, 15 aa, Artificial Sequence
  Description of Artificial Sequence: Synthetic peptide
  Seed: DPRMCSLMQGSTLPR
DPRMYSLMQVSTAPR

SEQ ID NO: 61369 - protein, 15 aa, Artificial Sequence
  Description of Artificial Sequence: Synthetic peptide
  Seed: DPRMCSLMQGSTLPR
DPRMYSLMQVSTCPR

SEQ ID NO: 61370 - protein, 15 aa, Artificial Sequence
  Description of Artificial Sequence: Synthetic peptide
  Seed: DPRMCSLMQGSTLPR
DPRMYSLMQVSTDPR

SEQ ID NO: 61371 - protein, 15 aa, Artificial Sequence
  Description of Artificial Sequence: Synthetic peptide
  Seed: DPRMCSLMQGSTLPR
DPRMYSLMQVSTEPR

SEQ ID NO: 61372 - protein, 15 aa, Artificial Sequence
  Description of Artificial Sequence: Synthetic peptide
  Seed: DPRMCSLMQGSTLPR
DPRMYSLMQVSTFPR

SEQ ID NO: 61373 - protein, 15 aa, Artificial Sequence
  Description of Artificial Sequence: Synthetic peptide
  Seed: DPRMCSLMQGSTLPR
DPRMYSLMQVSTGPR

SEQ ID NO: 61374 - protein, 15 aa, Artificial Sequence
  Description of Artificial Sequence: Synthetic peptide
  Seed: DPRMCSLMQGSTLPR
DPRMYSLMQVSTHPR

SEQ ID NO: 61375 - protein, 15 aa, Artificial Sequence
  Description of Artificial Sequence: Synthetic peptide
  Seed: DPRMCSLMQGSTLPR
DPRMYSLMQVSTIPR

SEQ ID NO: 61376 - protein, 15 aa, Artificial Sequence
  Description of Artificial Sequence: Synthetic peptide
  Seed: DPRMCSLMQGSTLPR
DPRMYSLMQVSTKPR

SEQ ID NO: 61377 - protein, 15 aa, Artificial Sequence
  Description of Artificial Sequence: Synthetic peptide
  Seed: DPRMCSLMQGSTLPR
DPRMYSLMQVSTLPR

SEQ ID NO: 61378 - protein, 15 aa, Artificial Sequence
  Description of Artificial Sequence: Synthetic peptide
  Seed: DPRMCSLMQGSTLPR
DPRMYSLMQVSTMPR

SEQ ID NO: 61379 - protein, 15 aa, Artificial Sequence
  Description of Artificial Sequence: Synthetic peptide
  Seed: DPRMCSLMQGSTLPR
DPRMYSLMQVSTNPR

SEQ ID NO: 61380 - protein, 15 aa, Artificial Sequence
  Description of Artificial Sequence: Synthetic peptide
  Seed: DPRMCSLMQGSTLPR
DPRMYSLMQVSTPPR

SEQ ID NO: 61381 - protein, 15 aa, Artificial Sequence
  Description of Artificial Sequence: Synthetic peptide
  Seed: DPRMCSLMQGSTLPR
DPRMYSLMQVSTQPR

SEQ ID NO: 61382 - protein, 15 aa, Artificial Sequence
  Description of Artificial Sequence: Synthetic peptide
  Seed: DPRMCSLMQGSTLPR
DPRMYSLMQVSTSPR

SEQ ID NO: 61383 - protein, 15 aa, Artificial Sequence
  Description of Artificial Sequence: Synthetic peptide
  Seed: DPRMCSLMQGSTLPR
DPRMYSLMQVSTTPR

SEQ ID NO: 61384 - protein, 15 aa, Artificial Sequence
  Description of Artificial Sequence: Synthetic peptide
  Seed: DPRMCSLMQGSTLPR
DPRMYSLMQVSTVPR

SEQ ID NO: 61385 - protein, 15 aa, Artificial Sequence
  Description of Artificial Sequence: Synthetic peptide
  Seed: DPRMCSLMQGSTLPR
DPRMYSLMQWSTLPR

SEQ ID NO: 61386 - protein, 15 aa, Artificial Sequence
  Description of Artificial Sequence: Synthetic peptide
  Seed: DPRMCSLMQGSTLPR
DPRMYSLNQASTAPR

SEQ ID NO: 61387 - protein, 15 aa, Artificial Sequence
  Description of Artificial Sequence: Synthetic peptide
  Seed: DPRMCSLMQGSTLPR
DPRMYSLNQASTIPR

SEQ ID NO: 61388 - protein, 15 aa, Artificial Sequence
  Description of Artificial Sequence: Synthetic peptide
  Seed: DPRMCSLMQGSTLPR
DPRMYSLNQASTLPR

SEQ ID NO: 61389 - protein, 15 aa, Artificial Sequence
  Description of Artificial Sequence: Synthetic peptide
  Seed: DPRMCSLMQGSTLPR
DPRMYSLNQASTMPR

SEQ ID NO: 61390 - protein, 15 aa, Artificial Sequence
  Description of Artificial Sequence: Synthetic peptide
  Seed: DPRMCSLMQGSTLPR
DPRMYSLNQASTVPR

SEQ ID NO: 61391 - protein, 15 aa, Artificial Sequence
  Description of Artificial Sequence: Synthetic peptide
  Seed: DPRMCSLMQGSTLPR
DPRMYSLNQGSTIPR

SEQ ID NO: 61392 - protein, 15 aa, Artificial Sequence
  Description of Artificial Sequence: Synthetic peptide
  Seed: DPRMCSLMQGSTLPR
DPRMYSLNQGSTLPR

SEQ ID NO: 61393 - protein, 15 aa, Artificial Sequence
  Description of Artificial Sequence: Synthetic peptide
  Seed: DPRMCSLMQGSTLPR
DPRMYSLNQGSTVPR

SEQ ID NO: 61394 - protein, 15 aa, Artificial Sequence
  Description of Artificial Sequence: Synthetic peptide
  Seed: DPRMCSLMQGSTLPR
DPRMYSLNQPSTLPR

SEQ ID NO: 61395 - protein, 15 aa, Artificial Sequence
  Description of Artificial Sequence: Synthetic peptide
  Seed: DPRMCSLMQGSTLPR
DPRMYSLNQSSTIPR

SEQ ID NO: 61396 - protein, 15 aa, Artificial Sequence
  Description of Artificial Sequence: Synthetic peptide
  Seed: DPRMCSLMQGSTLPR
DPRMYSLNQSSTLPR

SEQ ID NO: 61397 - protein, 15 aa, Artificial Sequence
  Description of Artificial Sequence: Synthetic peptide
  Seed: DPRMCSLMQGSTLPR
DPRMYSLNQSSTVPR

SEQ ID NO: 61398 - protein, 15 aa, Artificial Sequence
  Description of Artificial Sequence: Synthetic peptide
  Seed: DPRMCSLMQGSTLPR
DPRMYSLQQASTAPR

SEQ ID NO: 61399 - protein, 15 aa, Artificial Sequence
  Description of Artificial Sequence: Synthetic peptide
  Seed: DPRMCSLMQGSTLPR
DPRMYSLQQASTFPR

SEQ ID NO: 61400 - protein, 15 aa, Artificial Sequence
  Description of Artificial Sequence: Synthetic peptide
  Seed: DPRMCSLMQGSTLPR
DPRMYSLQQASTGPR

SEQ ID NO: 61401 - protein, 15 aa, Artificial Sequence
  Description of Artificial Sequence: Synthetic peptide
  Seed: DPRMCSLMQGSTLPR
DPRMYSLQQASTIPR

SEQ ID NO: 61402 - protein, 15 aa, Artificial Sequence
  Description of Artificial Sequence: Synthetic peptide
  Seed: DPRMCSLMQGSTLPR
DPRMYSLQQASTLPR

SEQ ID NO: 61403 - protein, 15 aa, Artificial Sequence
  Description of Artificial Sequence: Synthetic peptide
  Seed: DPRMCSLMQGSTLPR
DPRMYSLQQASTMPR

SEQ ID NO: 61404 - protein, 15 aa, Artificial Sequence
  Description of Artificial Sequence: Synthetic peptide
  Seed: DPRMCSLMQGSTLPR
DPRMYSLQQASTNPR

SEQ ID NO: 61405 - protein, 15 aa, Artificial Sequence
  Description of Artificial Sequence: Synthetic peptide
  Seed: DPRMCSLMQGSTLPR
DPRMYSLQQASTSPR

SEQ ID NO: 61406 - protein, 15 aa, Artificial Sequence
  Description of Artificial Sequence: Synthetic peptide
  Seed: DPRMCSLMQGSTLPR
DPRMYSLQQASTTPR

SEQ ID NO: 61407 - protein, 15 aa, Artificial Sequence
  Description of Artificial Sequence: Synthetic peptide
  Seed: DPRMCSLMQGSTLPR
DPRMYSLQQASTVPR

SEQ ID NO: 61408 - protein, 15 aa, Artificial Sequence
  Description of Artificial Sequence: Synthetic peptide
  Seed: DPRMCSLMQGSTLPR
DPRMYSLQQGSTAPR

SEQ ID NO: 61409 - protein, 15 aa, Artificial Sequence
  Description of Artificial Sequence: Synthetic peptide
  Seed: DPRMCSLMQGSTLPR
DPRMYSLQQGSTGPR

SEQ ID NO: 61410 - protein, 15 aa, Artificial Sequence
  Description of Artificial Sequence: Synthetic peptide
  Seed: DPRMCSLMQGSTLPR
DPRMYSLQQGSTIPR

SEQ ID NO: 61411 - protein, 15 aa, Artificial Sequence
  Description of Artificial Sequence: Synthetic peptide
  Seed: DPRMCSLMQGSTLPR
DPRMYSLQQGSTLPR

SEQ ID NO: 61412 - protein, 15 aa, Artificial Sequence
  Description of Artificial Sequence: Synthetic peptide
  Seed: DPRMCSLMQGSTLPR
DPRMYSLQQGSTMPR

SEQ ID NO: 61413 - protein, 15 aa, Artificial Sequence
  Description of Artificial Sequence: Synthetic peptide
  Seed: DPRMCSLMQGSTLPR
DPRMYSLQQGSTSPR

SEQ ID NO: 61414 - protein, 15 aa, Artificial Sequence
  Description of Artificial Sequence: Synthetic peptide
  Seed: DPRMCSLMQGSTLPR
DPRMYSLQQGSTTPR

SEQ ID NO: 61415 - protein, 15 aa, Artificial Sequence
  Description of Artificial Sequence: Synthetic peptide
  Seed: DPRMCSLMQGSTLPR
DPRMYSLQQGSTVPR

SEQ ID NO: 61416 - protein, 15 aa, Artificial Sequence
  Description of Artificial Sequence: Synthetic peptide
  Seed: DPRMCSLMQGSTLPR
DPRMYSLQQISTAPR

SEQ ID NO: 61417 - protein, 15 aa, Artificial Sequence
  Description of Artificial Sequence: Synthetic peptide
  Seed: DPRMCSLMQGSTLPR
DPRMYSLQQISTLPR

SEQ ID NO: 61418 - protein, 15 aa, Artificial Sequence
  Description of Artificial Sequence: Synthetic peptide
  Seed: DPRMCSLMQGSTLPR
DPRMYSLQQISTSPR

SEQ ID NO: 61419 - protein, 15 aa, Artificial Sequence
  Description of Artificial Sequence: Synthetic peptide
  Seed: DPRMCSLMQGSTLPR
DPRMYSLQQISTVPR

SEQ ID NO: 61420 - protein, 15 aa, Artificial Sequence
  Description of Artificial Sequence: Synthetic peptide
  Seed: DPRMCSLMQGSTLPR
DPRMYSLQQNSTAPR

SEQ ID NO: 61421 - protein, 15 aa, Artificial Sequence
  Description of Artificial Sequence: Synthetic peptide
  Seed: DPRMCSLMQGSTLPR
DPRMYSLQQNSTIPR

SEQ ID NO: 61422 - protein, 15 aa, Artificial Sequence
  Description of Artificial Sequence: Synthetic peptide
  Seed: DPRMCSLMQGSTLPR
DPRMYSLQQNSTLPR

SEQ ID NO: 61423 - protein, 15 aa, Artificial Sequence
  Description of Artificial Sequence: Synthetic peptide
  Seed: DPRMCSLMQGSTLPR
DPRMYSLQQNSTMPR

SEQ ID NO: 61424 - protein, 15 aa, Artificial Sequence
  Description of Artificial Sequence: Synthetic peptide
  Seed: DPRMCSLMQGSTLPR
DPRMYSLQQNSTVPR

SEQ ID NO: 61425 - protein, 15 aa, Artificial Sequence
  Description of Artificial Sequence: Synthetic peptide
  Seed: DPRMCSLMQGSTLPR
DPRMYSLQQPSTAPR

SEQ ID NO: 61426 - protein, 15 aa, Artificial Sequence
  Description of Artificial Sequence: Synthetic peptide
  Seed: DPRMCSLMQGSTLPR
DPRMYSLQQPSTIPR

SEQ ID NO: 61427 - protein, 15 aa, Artificial Sequence
  Description of Artificial Sequence: Synthetic peptide
  Seed: DPRMCSLMQGSTLPR
DPRMYSLQQPSTLPR

SEQ ID NO: 61428 - protein, 15 aa, Artificial Sequence
  Description of Artificial Sequence: Synthetic peptide
  Seed: DPRMCSLMQGSTLPR
DPRMYSLQQPSTMPR

SEQ ID NO: 61429 - protein, 15 aa, Artificial Sequence
  Description of Artificial Sequence: Synthetic peptide
  Seed: DPRMCSLMQGSTLPR
DPRMYSLQQPSTTPR

SEQ ID NO: 61430 - protein, 15 aa, Artificial Sequence
  Description of Artificial Sequence: Synthetic peptide
  Seed: DPRMCSLMQGSTLPR
DPRMYSLQQPSTVPR

SEQ ID NO: 61431 - protein, 15 aa, Artificial Sequence
  Description of Artificial Sequence: Synthetic peptide
  Seed: DPRMCSLMQGSTLPR
DPRMYSLQQSSTAPR

SEQ ID NO: 61432 - protein, 15 aa, Artificial Sequence
  Description of Artificial Sequence: Synthetic peptide
  Seed: DPRMCSLMQGSTLPR
DPRMYSLQQSSTIPR

SEQ ID NO: 61433 - protein, 15 aa, Artificial Sequence
  Description of Artificial Sequence: Synthetic peptide
  Seed: DPRMCSLMQGSTLPR
DPRMYSLQQSSTLPR

SEQ ID NO: 61434 - protein, 15 aa, Artificial Sequence
  Description of Artificial Sequence: Synthetic peptide
  Seed: DPRMCSLMQGSTLPR
DPRMYSLQQSSTMPR

SEQ ID NO: 61435 - protein, 15 aa, Artificial Sequence
  Description of Artificial Sequence: Synthetic peptide
  Seed: DPRMCSLMQGSTLPR
DPRMYSLQQSSTSPR

SEQ ID NO: 61436 - protein, 15 aa, Artificial Sequence
  Description of Artificial Sequence: Synthetic peptide
  Seed: DPRMCSLMQGSTLPR
DPRMYSLQQSSTTPR

SEQ ID NO: 61437 - protein, 15 aa, Artificial Sequence
  Description of Artificial Sequence: Synthetic peptide
  Seed: DPRMCSLMQGSTLPR
DPRMYSLQQSSTVPR

SEQ ID NO: 61438 - protein, 15 aa, Artificial Sequence
  Description of Artificial Sequence: Synthetic peptide
  Seed: DPRMCSLMQGSTLPR
DPRMYSLQQTSTAPR

SEQ ID NO: 61439 - protein, 15 aa, Artificial Sequence
  Description of Artificial Sequence: Synthetic peptide
  Seed: DPRMCSLMQGSTLPR
DPRMYSLQQTSTIPR

SEQ ID NO: 61440 - protein, 15 aa, Artificial Sequence
  Description of Artificial Sequence: Synthetic peptide
  Seed: DPRMCSLMQGSTLPR
DPRMYSLQQTSTLPR

SEQ ID NO: 61441 - protein, 15 aa, Artificial Sequence
  Description of Artificial Sequence: Synthetic peptide
  Seed: DPRMCSLMQGSTLPR
DPRMYSLQQTSTMPR

SEQ ID NO: 61442 - protein, 15 aa, Artificial Sequence
  Description of Artificial Sequence: Synthetic peptide
  Seed: DPRMCSLMQGSTLPR
DPRMYSLQQTSTVPR

SEQ ID NO: 61443 - protein, 15 aa, Artificial Sequence
  Description of Artificial Sequence: Synthetic peptide
  Seed: DPRMCSLMQGSTLPR
DPRMYSLQQVSTAPR

SEQ ID NO: 61444 - protein, 15 aa, Artificial Sequence
  Description of Artificial Sequence: Synthetic peptide
  Seed: DPRMCSLMQGSTLPR
DPRMYSLQQVSTIPR

SEQ ID NO: 61445 - protein, 15 aa, Artificial Sequence
  Description of Artificial Sequence: Synthetic peptide
  Seed: DPRMCSLMQGSTLPR
DPRMYSLQQVSTLPR

SEQ ID NO: 61446 - protein, 15 aa, Artificial Sequence
  Description of Artificial Sequence: Synthetic peptide
  Seed: DPRMCSLMQGSTLPR
DPRMYSLQQVSTNPR

SEQ ID NO: 61447 - protein, 15 aa, Artificial Sequence
  Description of Artificial Sequence: Synthetic peptide
  Seed: DPRMCSLMQGSTLPR
DPRMYSLQQVSTSPR

SEQ ID NO: 61448 - protein, 15 aa, Artificial Sequence
  Description of Artificial Sequence: Synthetic peptide
  Seed: DPRMCSLMQGSTLPR
DPRMYSLQQVSTVPR

SEQ ID NO: 61449 - protein, 15 aa, Artificial Sequence
  Description of Artificial Sequence: Synthetic peptide
  Seed: DPRMCSLMQGSTLPR
DPRMYSLSQASTAPR

SEQ ID NO: 61450 - protein, 15 aa, Artificial Sequence
  Description of Artificial Sequence: Synthetic peptide
  Seed: DPRMCSLMQGSTLPR
DPRMYSLSQASTFPR

SEQ ID NO: 61451 - protein, 15 aa, Artificial Sequence
  Description of Artificial Sequence: Synthetic peptide
  Seed: DPRMCSLMQGSTLPR
DPRMYSLSQASTIPR

SEQ ID NO: 61452 - protein, 15 aa, Artificial Sequence
  Description of Artificial Sequence: Synthetic peptide
  Seed: DPRMCSLMQGSTLPR
DPRMYSLSQASTLPR

SEQ ID NO: 61453 - protein, 15 aa, Artificial Sequence
  Description of Artificial Sequence: Synthetic peptide
  Seed: DPRMCSLMQGSTLPR
DPRMYSLSQASTMPR

SEQ ID NO: 61454 - protein, 15 aa, Artificial Sequence
  Description of Artificial Sequence: Synthetic peptide
  Seed: DPRMCSLMQGSTLPR
DPRMYSLSQASTNPR

SEQ ID NO: 61455 - protein, 15 aa, Artificial Sequence
  Description of Artificial Sequence: Synthetic peptide
  Seed: DPRMCSLMQGSTLPR
DPRMYSLSQASTSPR

SEQ ID NO: 61456 - protein, 15 aa, Artificial Sequence
  Description of Artificial Sequence: Synthetic peptide
  Seed: DPRMCSLMQGSTLPR
DPRMYSLSQASTTPR

SEQ ID NO: 61457 - protein, 15 aa, Artificial Sequence
  Description of Artificial Sequence: Synthetic peptide
  Seed: DPRMCSLMQGSTLPR
DPRMYSLSQASTVPR

SEQ ID NO: 61458 - protein, 15 aa, Artificial Sequence
  Description of Artificial Sequence: Synthetic peptide
  Seed: DPRMCSLMQGSTLPR
DPRMYSLSQGSTAPR

SEQ ID NO: 61459 - protein, 15 aa, Artificial Sequence
  Description of Artificial Sequence: Synthetic peptide
  Seed: DPRMCSLMQGSTLPR
DPRMYSLSQGSTIPR

SEQ ID NO: 61460 - protein, 15 aa, Artificial Sequence
  Description of Artificial Sequence: Synthetic peptide
  Seed: DPRMCSLMQGSTLPR
DPRMYSLSQGSTLPR

SEQ ID NO: 61461 - protein, 15 aa, Artificial Sequence
  Description of Artificial Sequence: Synthetic peptide
  Seed: DPRMCSLMQGSTLPR
DPRMYSLSQGSTMPR

SEQ ID NO: 61462 - protein, 15 aa, Artificial Sequence
  Description of Artificial Sequence: Synthetic peptide
  Seed: DPRMCSLMQGSTLPR
DPRMYSLSQGSTTPR

SEQ ID NO: 61463 - protein, 15 aa, Artificial Sequence
  Description of Artificial Sequence: Synthetic peptide
  Seed: DPRMCSLMQGSTLPR
DPRMYSLSQGSTVPR

SEQ ID NO: 61464 - protein, 15 aa, Artificial Sequence
  Description of Artificial Sequence: Synthetic peptide
  Seed: DPRMCSLMQGSTLPR
DPRMYSLSQNSTIPR

SEQ ID NO: 61465 - protein, 15 aa, Artificial Sequence
  Description of Artificial Sequence: Synthetic peptide
  Seed: DPRMCSLMQGSTLPR
DPRMYSLSQNSTLPR

SEQ ID NO: 61466 - protein, 15 aa, Artificial Sequence
  Description of Artificial Sequence: Synthetic peptide
  Seed: DPRMCSLMQGSTLPR
DPRMYSLSQNSTVPR

SEQ ID NO: 61467 - protein, 15 aa, Artificial Sequence
  Description of Artificial Sequence: Synthetic peptide
  Seed: DPRMCSLMQGSTLPR
DPRMYSLSQPSTAPR

SEQ ID NO: 61468 - protein, 15 aa, Artificial Sequence
  Description of Artificial Sequence: Synthetic peptide
  Seed: DPRMCSLMQGSTLPR
DPRMYSLSQPSTIPR

SEQ ID NO: 61469 - protein, 15 aa, Artificial Sequence
  Description of Artificial Sequence: Synthetic peptide
  Seed: DPRMCSLMQGSTLPR
DPRMYSLSQPSTLPR

SEQ ID NO: 61470 - protein, 15 aa, Artificial Sequence
  Description of Artificial Sequence: Synthetic peptide
  Seed: DPRMCSLMQGSTLPR
DPRMYSLSQPSTMPR

SEQ ID NO: 61471 - protein, 15 aa, Artificial Sequence
  Description of Artificial Sequence: Synthetic peptide
  Seed: DPRMCSLMQGSTLPR
DPRMYSLSQPSTVPR

SEQ ID NO: 61472 - protein, 15 aa, Artificial Sequence
  Description of Artificial Sequence: Synthetic peptide
  Seed: DPRMCSLMQGSTLPR
DPRMYSLSQSSTAPR

SEQ ID NO: 61473 - protein, 15 aa, Artificial Sequence
  Description of Artificial Sequence: Synthetic peptide
  Seed: DPRMCSLMQGSTLPR
DPRMYSLSQSSTFPR

SEQ ID NO: 61474 - protein, 15 aa, Artificial Sequence
  Description of Artificial Sequence: Synthetic peptide
  Seed: DPRMCSLMQGSTLPR
DPRMYSLSQSSTIPR

SEQ ID NO: 61475 - protein, 15 aa, Artificial Sequence
  Description of Artificial Sequence: Synthetic peptide
  Seed: DPRMCSLMQGSTLPR
DPRMYSLSQSSTLPR

SEQ ID NO: 61476 - protein, 15 aa, Artificial Sequence
  Description of Artificial Sequence: Synthetic peptide
  Seed: DPRMCSLMQGSTLPR
DPRMYSLSQSSTMPR

SEQ ID NO: 61477 - protein, 15 aa, Artificial Sequence
  Description of Artificial Sequence: Synthetic peptide
  Seed: DPRMCSLMQGSTLPR
DPRMYSLSQSSTTPR

SEQ ID NO: 61478 - protein, 15 aa, Artificial Sequence
  Description of Artificial Sequence: Synthetic peptide
  Seed: DPRMCSLMQGSTLPR
DPRMYSLSQSSTVPR

SEQ ID NO: 61479 - protein, 15 aa, Artificial Sequence
  Description of Artificial Sequence: Synthetic peptide
  Seed: DPRMCSLMQGSTLPR
DPRMYSLSQTSTIPR

SEQ ID NO: 61480 - protein, 15 aa, Artificial Sequence
  Description of Artificial Sequence: Synthetic peptide
  Seed: DPRMCSLMQGSTLPR
DPRMYSLSQTSTLPR

SEQ ID NO: 61481 - protein, 15 aa, Artificial Sequence
  Description of Artificial Sequence: Synthetic peptide
  Seed: DPRMCSLMQGSTLPR
DPRMYSLSQTSTVPR

SEQ ID NO: 61482 - protein, 15 aa, Artificial Sequence
  Description of Artificial Sequence: Synthetic peptide
  Seed: DPRMCSLMQGSTLPR
DPRMYSLSQVSTAPR

SEQ ID NO: 61483 - protein, 15 aa, Artificial Sequence
  Description of Artificial Sequence: Synthetic peptide
  Seed: DPRMCSLMQGSTLPR
DPRMYSLSQVSTIPR

SEQ ID NO: 61484 - protein, 15 aa, Artificial Sequence
  Description of Artificial Sequence: Synthetic peptide
  Seed: DPRMCSLMQGSTLPR
DPRMYSLSQVSTLPR

SEQ ID NO: 61485 - protein, 15 aa, Artificial Sequence
  Description of Artificial Sequence: Synthetic peptide
  Seed: DPRMCSLMQGSTLPR
DPRMYSLSQVSTVPR

SEQ ID NO: 61486 - protein, 15 aa, Artificial Sequence
  Description of Artificial Sequence: Synthetic peptide
  Seed: DPRMCSLMQGSTLPR
DPRMYSLTQASTAPR

SEQ ID NO: 61487 - protein, 15 aa, Artificial Sequence
  Description of Artificial Sequence: Synthetic peptide
  Seed: DPRMCSLMQGSTLPR
DPRMYSLTQASTFPR

SEQ ID NO: 61488 - protein, 15 aa, Artificial Sequence
  Description of Artificial Sequence: Synthetic peptide
  Seed: DPRMCSLMQGSTLPR
DPRMYSLTQASTIPR

SEQ ID NO: 61489 - protein, 15 aa, Artificial Sequence
  Description of Artificial Sequence: Synthetic peptide
  Seed: DPRMCSLMQGSTLPR
DPRMYSLTQASTLPR

SEQ ID NO: 61490 - protein, 15 aa, Artificial Sequence
  Description of Artificial Sequence: Synthetic peptide
  Seed: DPRMCSLMQGSTLPR
DPRMYSLTQASTMPR

SEQ ID NO: 61491 - protein, 15 aa, Artificial Sequence
  Description of Artificial Sequence: Synthetic peptide
  Seed: DPRMCSLMQGSTLPR
DPRMYSLTQASTSPR

SEQ ID NO: 61492 - protein, 15 aa, Artificial Sequence
  Description of Artificial Sequence: Synthetic peptide
  Seed: DPRMCSLMQGSTLPR
DPRMYSLTQASTTPR

SEQ ID NO: 61493 - protein, 15 aa, Artificial Sequence
  Description of Artificial Sequence: Synthetic peptide
  Seed: DPRMCSLMQGSTLPR
DPRMYSLTQASTVPR

SEQ ID NO: 61494 - protein, 15 aa, Artificial Sequence
  Description of Artificial Sequence: Synthetic peptide
  Seed: DPRMCSLMQGSTLPR
DPRMYSLTQGSTAPR

SEQ ID NO: 61495 - protein, 15 aa, Artificial Sequence
  Description of Artificial Sequence: Synthetic peptide
  Seed: DPRMCSLMQGSTLPR
DPRMYSLTQGSTIPR

SEQ ID NO: 61496 - protein, 15 aa, Artificial Sequence
  Description of Artificial Sequence: Synthetic peptide
  Seed: DPRMCSLMQGSTLPR
DPRMYSLTQGSTLPR

SEQ ID NO: 61497 - protein, 15 aa, Artificial Sequence
  Description of Artificial Sequence: Synthetic peptide
  Seed: DPRMCSLMQGSTLPR
DPRMYSLTQGSTMPR

SEQ ID NO: 61498 - protein, 15 aa, Artificial Sequence
  Description of Artificial Sequence: Synthetic peptide
  Seed: DPRMCSLMQGSTLPR
DPRMYSLTQGSTVPR

SEQ ID NO: 61499 - protein, 15 aa, Artificial Sequence
  Description of Artificial Sequence: Synthetic peptide
  Seed: DPRMCSLMQGSTLPR
DPRMYSLTQISTIPR

SEQ ID NO: 61500 - protein, 15 aa, Artificial Sequence
  Description of Artificial Sequence: Synthetic peptide
  Seed: DPRMCSLMQGSTLPR
DPRMYSLTQISTLPR

SEQ ID NO: 61501 - protein, 15 aa, Artificial Sequence
  Description of Artificial Sequence: Synthetic peptide
  Seed: DPRMCSLMQGSTLPR
DPRMYSLTQNSTIPR

SEQ ID NO: 61502 - protein, 15 aa, Artificial Sequence
  Description of Artificial Sequence: Synthetic peptide
  Seed: DPRMCSLMQGSTLPR
DPRMYSLTQNSTLPR

SEQ ID NO: 61503 - protein, 15 aa, Artificial Sequence
  Description of Artificial Sequence: Synthetic peptide
  Seed: DPRMCSLMQGSTLPR
DPRMYSLTQPSTAPR

SEQ ID NO: 61504 - protein, 15 aa, Artificial Sequence
  Description of Artificial Sequence: Synthetic peptide
  Seed: DPRMCSLMQGSTLPR
DPRMYSLTQPSTIPR

SEQ ID NO: 61505 - protein, 15 aa, Artificial Sequence
  Description of Artificial Sequence: Synthetic peptide
  Seed: DPRMCSLMQGSTLPR
DPRMYSLTQPSTLPR

SEQ ID NO: 61506 - protein, 15 aa, Artificial Sequence
  Description of Artificial Sequence: Synthetic peptide
  Seed: DPRMCSLMQGSTLPR
DPRMYSLTQPSTVPR

SEQ ID NO: 61507 - protein, 15 aa, Artificial Sequence
  Description of Artificial Sequence: Synthetic peptide
  Seed: DPRMCSLMQGSTLPR
DPRMYSLTQSSTAPR

SEQ ID NO: 61508 - protein, 15 aa, Artificial Sequence
  Description of Artificial Sequence: Synthetic peptide
  Seed: DPRMCSLMQGSTLPR
DPRMYSLTQSSTFPR

SEQ ID NO: 61509 - protein, 15 aa, Artificial Sequence
  Description of Artificial Sequence: Synthetic peptide
  Seed: DPRMCSLMQGSTLPR
DPRMYSLTQSSTIPR

SEQ ID NO: 61510 - protein, 15 aa, Artificial Sequence
  Description of Artificial Sequence: Synthetic peptide
  Seed: DPRMCSLMQGSTLPR
DPRMYSLTQSSTLPR

SEQ ID NO: 61511 - protein, 15 aa, Artificial Sequence
  Description of Artificial Sequence: Synthetic peptide
  Seed: DPRMCSLMQGSTLPR
DPRMYSLTQSSTMPR

SEQ ID NO: 61512 - protein, 15 aa, Artificial Sequence
  Description of Artificial Sequence: Synthetic peptide
  Seed: DPRMCSLMQGSTLPR
DPRMYSLTQSSTVPR

SEQ ID NO: 61513 - protein, 15 aa, Artificial Sequence
  Description of Artificial Sequence: Synthetic peptide
  Seed: DPRMCSLMQGSTLPR
DPRMYSLTQTSTIPR

SEQ ID NO: 61514 - protein, 15 aa, Artificial Sequence
  Description of Artificial Sequence: Synthetic peptide
  Seed: DPRMCSLMQGSTLPR
DPRMYSLTQTSTLPR

SEQ ID NO: 61515 - protein, 15 aa, Artificial Sequence
  Description of Artificial Sequence: Synthetic peptide
  Seed: DPRMCSLMQGSTLPR
DPRMYSLTQTSTVPR

SEQ ID NO: 61516 - protein, 15 aa, Artificial Sequence
  Description of Artificial Sequence: Synthetic peptide
  Seed: DPRMCSLMQGSTLPR
DPRMYSLTQVSTAPR

SEQ ID NO: 61517 - protein, 15 aa, Artificial Sequence
  Description of Artificial Sequence: Synthetic peptide
  Seed: DPRMCSLMQGSTLPR
DPRMYSLTQVSTIPR

SEQ ID NO: 61518 - protein, 15 aa, Artificial Sequence
  Description of Artificial Sequence: Synthetic peptide
  Seed: DPRMCSLMQGSTLPR
DPRMYSLTQVSTLPR

SEQ ID NO: 61519 - protein, 15 aa, Artificial Sequence
  Description of Artificial Sequence: Synthetic peptide
  Seed: DPRMCSLMQGSTLPR
DPRMYSLTQVSTVPR

SEQ ID NO: 61520 - protein, 15 aa, Artificial Sequence
  Description of Artificial Sequence: Synthetic peptide
  Seed: DPRMCSLMQGSTLPR
DPRMYSLVQASTAPR

SEQ ID NO: 61521 - protein, 15 aa, Artificial Sequence
  Description of Artificial Sequence: Synthetic peptide
  Seed: DPRMCSLMQGSTLPR
DPRMYSLVQASTCPR

SEQ ID NO: 61522 - protein, 15 aa, Artificial Sequence
  Description of Artificial Sequence: Synthetic peptide
  Seed: DPRMCSLMQGSTLPR
DPRMYSLVQASTFPR

SEQ ID NO: 61523 - protein, 15 aa, Artificial Sequence
  Description of Artificial Sequence: Synthetic peptide
  Seed: DPRMCSLMQGSTLPR
DPRMYSLVQASTGPR

SEQ ID NO: 61524 - protein, 15 aa, Artificial Sequence
  Description of Artificial Sequence: Synthetic peptide
  Seed: DPRMCSLMQGSTLPR
DPRMYSLVQASTHPR

SEQ ID NO: 61525 - protein, 15 aa, Artificial Sequence
  Description of Artificial Sequence: Synthetic peptide
  Seed: DPRMCSLMQGSTLPR
DPRMYSLVQASTIPR

SEQ ID NO: 61526 - protein, 15 aa, Artificial Sequence
  Description of Artificial Sequence: Synthetic peptide
  Seed: DPRMCSLMQGSTLPR
DPRMYSLVQASTLPR

SEQ ID NO: 61527 - protein, 15 aa, Artificial Sequence
  Description of Artificial Sequence: Synthetic peptide
  Seed: DPRMCSLMQGSTLPR
DPRMYSLVQASTMPR

SEQ ID NO: 61528 - protein, 15 aa, Artificial Sequence
  Description of Artificial Sequence: Synthetic peptide
  Seed: DPRMCSLMQGSTLPR
DPRMYSLVQASTNPR

SEQ ID NO: 61529 - protein, 15 aa, Artificial Sequence
  Description of Artificial Sequence: Synthetic peptide
  Seed: DPRMCSLMQGSTLPR
DPRMYSLVQASTQPR

SEQ ID NO: 61530 - protein, 15 aa, Artificial Sequence
  Description of Artificial Sequence: Synthetic peptide
  Seed: DPRMCSLMQGSTLPR
DPRMYSLVQASTSPR

SEQ ID NO: 61531 - protein, 15 aa, Artificial Sequence
  Description of Artificial Sequence: Synthetic peptide
  Seed: DPRMCSLMQGSTLPR
DPRMYSLVQASTTPR

SEQ ID NO: 61532 - protein, 15 aa, Artificial Sequence
  Description of Artificial Sequence: Synthetic peptide
  Seed: DPRMCSLMQGSTLPR
DPRMYSLVQASTVPR

SEQ ID NO: 61533 - protein, 15 aa, Artificial Sequence
  Description of Artificial Sequence: Synthetic peptide
  Seed: DPRMCSLMQGSTLPR
DPRMYSLVQGSTAPR

SEQ ID NO: 61534 - protein, 15 aa, Artificial Sequence
  Description of Artificial Sequence: Synthetic peptide
  Seed: DPRMCSLMQGSTLPR
DPRMYSLVQGSTCPR

SEQ ID NO: 61535 - protein, 15 aa, Artificial Sequence
  Description of Artificial Sequence: Synthetic peptide
  Seed: DPRMCSLMQGSTLPR
DPRMYSLVQGSTGPR

SEQ ID NO: 61536 - protein, 15 aa, Artificial Sequence
  Description of Artificial Sequence: Synthetic peptide
  Seed: DPRMCSLMQGSTLPR
DPRMYSLVQGSTIPR

SEQ ID NO: 61537 - protein, 15 aa, Artificial Sequence
  Description of Artificial Sequence: Synthetic peptide
  Seed: DPRMCSLMQGSTLPR
DPRMYSLVQGSTLPR

SEQ ID NO: 61538 - protein, 15 aa, Artificial Sequence
  Description of Artificial Sequence: Synthetic peptide
  Seed: DPRMCSLMQGSTLPR
DPRMYSLVQGSTMPR

SEQ ID NO: 61539 - protein, 15 aa, Artificial Sequence
  Description of Artificial Sequence: Synthetic peptide
  Seed: DPRMCSLMQGSTLPR
DPRMYSLVQGSTNPR

SEQ ID NO: 61540 - protein, 15 aa, Artificial Sequence
  Description of Artificial Sequence: Synthetic peptide
  Seed: DPRMCSLMQGSTLPR
DPRMYSLVQGSTSPR

SEQ ID NO: 61541 - protein, 15 aa, Artificial Sequence
  Description of Artificial Sequence: Synthetic peptide
  Seed: DPRMCSLMQGSTLPR
DPRMYSLVQGSTTPR

SEQ ID NO: 61542 - protein, 15 aa, Artificial Sequence
  Description of Artificial Sequence: Synthetic peptide
  Seed: DPRMCSLMQGSTLPR
DPRMYSLVQGSTVPR

SEQ ID NO: 61543 - protein, 15 aa, Artificial Sequence
  Description of Artificial Sequence: Synthetic peptide
  Seed: DPRMCSLMQGSTLPR
DPRMYSLVQISTAPR

SEQ ID NO: 61544 - protein, 15 aa, Artificial Sequence
  Description of Artificial Sequence: Synthetic peptide
  Seed: DPRMCSLMQGSTLPR
DPRMYSLVQISTIPR

SEQ ID NO: 61545 - protein, 15 aa, Artificial Sequence
  Description of Artificial Sequence: Synthetic peptide
  Seed: DPRMCSLMQGSTLPR
DPRMYSLVQISTLPR

SEQ ID NO: 61546 - protein, 15 aa, Artificial Sequence
  Description of Artificial Sequence: Synthetic peptide
  Seed: DPRMCSLMQGSTLPR
DPRMYSLVQISTMPR

SEQ ID NO: 61547 - protein, 15 aa, Artificial Sequence
  Description of Artificial Sequence: Synthetic peptide
  Seed: DPRMCSLMQGSTLPR
DPRMYSLVQISTNPR

SEQ ID NO: 61548 - protein, 15 aa, Artificial Sequence
  Description of Artificial Sequence: Synthetic peptide
  Seed: DPRMCSLMQGSTLPR
DPRMYSLVQISTSPR

SEQ ID NO: 61549 - protein, 15 aa, Artificial Sequence
  Description of Artificial Sequence: Synthetic peptide
  Seed: DPRMCSLMQGSTLPR
DPRMYSLVQISTTPR

SEQ ID NO: 61550 - protein, 15 aa, Artificial Sequence
  Description of Artificial Sequence: Synthetic peptide
  Seed: DPRMCSLMQGSTLPR
DPRMYSLVQISTVPR

SEQ ID NO: 61551 - protein, 15 aa, Artificial Sequence
  Description of Artificial Sequence: Synthetic peptide
  Seed: DPRMCSLMQGSTLPR
DPRMYSLVQLSTAPR

SEQ ID NO: 61552 - protein, 15 aa, Artificial Sequence
  Description of Artificial Sequence: Synthetic peptide
  Seed: DPRMCSLMQGSTLPR
DPRMYSLVQLSTSPR

SEQ ID NO: 61553 - protein, 15 aa, Artificial Sequence
  Description of Artificial Sequence: Synthetic peptide
  Seed: DPRMCSLMQGSTLPR
DPRMYSLVQMSTAPR

SEQ ID NO: 61554 - protein, 15 aa, Artificial Sequence
  Description of Artificial Sequence: Synthetic peptide
  Seed: DPRMCSLMQGSTLPR
DPRMYSLVQNSTAPR

SEQ ID NO: 61555 - protein, 15 aa, Artificial Sequence
  Description of Artificial Sequence: Synthetic peptide
  Seed: DPRMCSLMQGSTLPR
DPRMYSLVQNSTIPR

SEQ ID NO: 61556 - protein, 15 aa, Artificial Sequence
  Description of Artificial Sequence: Synthetic peptide
  Seed: DPRMCSLMQGSTLPR
DPRMYSLVQNSTLPR

SEQ ID NO: 61557 - protein, 15 aa, Artificial Sequence
  Description of Artificial Sequence: Synthetic peptide
  Seed: DPRMCSLMQGSTLPR
DPRMYSLVQNSTMPR

SEQ ID NO: 61558 - protein, 15 aa, Artificial Sequence
  Description of Artificial Sequence: Synthetic peptide
  Seed: DPRMCSLMQGSTLPR
DPRMYSLVQNSTNPR

SEQ ID NO: 61559 - protein, 15 aa, Artificial Sequence
  Description of Artificial Sequence: Synthetic peptide
  Seed: DPRMCSLMQGSTLPR
DPRMYSLVQNSTSPR

SEQ ID NO: 61560 - protein, 15 aa, Artificial Sequence
  Description of Artificial Sequence: Synthetic peptide
  Seed: DPRMCSLMQGSTLPR
DPRMYSLVQNSTTPR

SEQ ID NO: 61561 - protein, 15 aa, Artificial Sequence
  Description of Artificial Sequence: Synthetic peptide
  Seed: DPRMCSLMQGSTLPR
DPRMYSLVQNSTVPR

SEQ ID NO: 61562 - protein, 15 aa, Artificial Sequence
  Description of Artificial Sequence: Synthetic peptide
  Seed: DPRMCSLMQGSTLPR
DPRMYSLVQPSTAPR

SEQ ID NO: 61563 - protein, 15 aa, Artificial Sequence
  Description of Artificial Sequence: Synthetic peptide
  Seed: DPRMCSLMQGSTLPR
DPRMYSLVQPSTGPR

SEQ ID NO: 61564 - protein, 15 aa, Artificial Sequence
  Description of Artificial Sequence: Synthetic peptide
  Seed: DPRMCSLMQGSTLPR
DPRMYSLVQPSTIPR

SEQ ID NO: 61565 - protein, 15 aa, Artificial Sequence
  Description of Artificial Sequence: Synthetic peptide
  Seed: DPRMCSLMQGSTLPR
DPRMYSLVQPSTLPR

SEQ ID NO: 61566 - protein, 15 aa, Artificial Sequence
  Description of Artificial Sequence: Synthetic peptide
  Seed: DPRMCSLMQGSTLPR
DPRMYSLVQPSTMPR

SEQ ID NO: 61567 - protein, 15 aa, Artificial Sequence
  Description of Artificial Sequence: Synthetic peptide
  Seed: DPRMCSLMQGSTLPR
DPRMYSLVQPSTNPR

SEQ ID NO: 61568 - protein, 15 aa, Artificial Sequence
  Description of Artificial Sequence: Synthetic peptide
  Seed: DPRMCSLMQGSTLPR
DPRMYSLVQPSTQPR

SEQ ID NO: 61569 - protein, 15 aa, Artificial Sequence
  Description of Artificial Sequence: Synthetic peptide
  Seed: DPRMCSLMQGSTLPR
DPRMYSLVQPSTSPR

SEQ ID NO: 61570 - protein, 15 aa, Artificial Sequence
  Description of Artificial Sequence: Synthetic peptide
  Seed: DPRMCSLMQGSTLPR
DPRMYSLVQPSTTPR

SEQ ID NO: 61571 - protein, 15 aa, Artificial Sequence
  Description of Artificial Sequence: Synthetic peptide
  Seed: DPRMCSLMQGSTLPR
DPRMYSLVQPSTVPR

SEQ ID NO: 61572 - protein, 15 aa, Artificial Sequence
  Description of Artificial Sequence: Synthetic peptide
  Seed: DPRMCSLMQGSTLPR
DPRMYSLVQSSTAPR

SEQ ID NO: 61573 - protein, 15 aa, Artificial Sequence
  Description of Artificial Sequence: Synthetic peptide
  Seed: DPRMCSLMQGSTLPR
DPRMYSLVQSSTFPR

SEQ ID NO: 61574 - protein, 15 aa, Artificial Sequence
  Description of Artificial Sequence: Synthetic peptide
  Seed: DPRMCSLMQGSTLPR
DPRMYSLVQSSTGPR

SEQ ID NO: 61575 - protein, 15 aa, Artificial Sequence
  Description of Artificial Sequence: Synthetic peptide
  Seed: DPRMCSLMQGSTLPR
DPRMYSLVQSSTIPR

SEQ ID NO: 61576 - protein, 15 aa, Artificial Sequence
  Description of Artificial Sequence: Synthetic peptide
  Seed: DPRMCSLMQGSTLPR
DPRMYSLVQSSTLPR

SEQ ID NO: 61577 - protein, 15 aa, Artificial Sequence
  Description of Artificial Sequence: Synthetic peptide
  Seed: DPRMCSLMQGSTLPR
DPRMYSLVQSSTMPR

SEQ ID NO: 61578 - protein, 15 aa, Artificial Sequence
  Description of Artificial Sequence: Synthetic peptide
  Seed: DPRMCSLMQGSTLPR
DPRMYSLVQSSTNPR

SEQ ID NO: 61579 - protein, 15 aa, Artificial Sequence
  Description of Artificial Sequence: Synthetic peptide
  Seed: DPRMCSLMQGSTLPR
DPRMYSLVQSSTSPR

SEQ ID NO: 61580 - protein, 15 aa, Artificial Sequence
  Description of Artificial Sequence: Synthetic peptide
  Seed: DPRMCSLMQGSTLPR
DPRMYSLVQSSTTPR

SEQ ID NO: 61581 - protein, 15 aa, Artificial Sequence
  Description of Artificial Sequence: Synthetic peptide
  Seed: DPRMCSLMQGSTLPR
DPRMYSLVQSSTVPR

SEQ ID NO: 61582 - protein, 15 aa, Artificial Sequence
  Description of Artificial Sequence: Synthetic peptide
  Seed: DPRMCSLMQGSTLPR
DPRMYSLVQTSTAPR

SEQ ID NO: 61583 - protein, 15 aa, Artificial Sequence
  Description of Artificial Sequence: Synthetic peptide
  Seed: DPRMCSLMQGSTLPR
DPRMYSLVQTSTIPR

SEQ ID NO: 61584 - protein, 15 aa, Artificial Sequence
  Description of Artificial Sequence: Synthetic peptide
  Seed: DPRMCSLMQGSTLPR
DPRMYSLVQTSTLPR

SEQ ID NO: 61585 - protein, 15 aa, Artificial Sequence
  Description of Artificial Sequence: Synthetic peptide
  Seed: DPRMCSLMQGSTLPR
DPRMYSLVQTSTMPR

SEQ ID NO: 61586 - protein, 15 aa, Artificial Sequence
  Description of Artificial Sequence: Synthetic peptide
  Seed: DPRMCSLMQGSTLPR
DPRMYSLVQTSTNPR

SEQ ID NO: 61587 - protein, 15 aa, Artificial Sequence
  Description of Artificial Sequence: Synthetic peptide
  Seed: DPRMCSLMQGSTLPR
DPRMYSLVQTSTSPR

SEQ ID NO: 61588 - protein, 15 aa, Artificial Sequence
  Description of Artificial Sequence: Synthetic peptide
  Seed: DPRMCSLMQGSTLPR
DPRMYSLVQTSTTPR

SEQ ID NO: 61589 - protein, 15 aa, Artificial Sequence
  Description of Artificial Sequence: Synthetic peptide
  Seed: DPRMCSLMQGSTLPR
DPRMYSLVQTSTVPR

SEQ ID NO: 61590 - protein, 15 aa, Artificial Sequence
  Description of Artificial Sequence: Synthetic peptide
  Seed: DPRMCSLMQGSTLPR
DPRMYSLVQVSTAPR

SEQ ID NO: 61591 - protein, 15 aa, Artificial Sequence
  Description of Artificial Sequence: Synthetic peptide
  Seed: DPRMCSLMQGSTLPR
DPRMYSLVQVSTGPR

SEQ ID NO: 61592 - protein, 15 aa, Artificial Sequence
  Description of Artificial Sequence: Synthetic peptide
  Seed: DPRMCSLMQGSTLPR
DPRMYSLVQVSTHPR

SEQ ID NO: 61593 - protein, 15 aa, Artificial Sequence
  Description of Artificial Sequence: Synthetic peptide
  Seed: DPRMCSLMQGSTLPR
DPRMYSLVQVSTIPR

SEQ ID NO: 61594 - protein, 15 aa, Artificial Sequence
  Description of Artificial Sequence: Synthetic peptide
  Seed: DPRMCSLMQGSTLPR
DPRMYSLVQVSTLPR

SEQ ID NO: 61595 - protein, 15 aa, Artificial Sequence
  Description of Artificial Sequence: Synthetic peptide
  Seed: DPRMCSLMQGSTLPR
DPRMYSLVQVSTMPR

SEQ ID NO: 61596 - protein, 15 aa, Artificial Sequence
  Description of Artificial Sequence: Synthetic peptide
  Seed: DPRMCSLMQGSTLPR
DPRMYSLVQVSTNPR

SEQ ID NO: 61597 - protein, 15 aa, Artificial Sequence
  Description of Artificial Sequence: Synthetic peptide
  Seed: DPRMCSLMQGSTLPR
DPRMYSLVQVSTSPR

SEQ ID NO: 61598 - protein, 15 aa, Artificial Sequence
  Description of Artificial Sequence: Synthetic peptide
  Seed: DPRMCSLMQGSTLPR
DPRMYSLVQVSTTPR

SEQ ID NO: 61599 - protein, 15 aa, Artificial Sequence
  Description of Artificial Sequence: Synthetic peptide
  Seed: DPRMCSLMQGSTLPR
DPRMYSLVQVSTVPR

SEQ ID NO: 61600 - protein, 15 aa, Artificial Sequence
  Description of Artificial Sequence: Synthetic peptide
  Seed: DPRMCSLMQGSTLPR
DPRMYSLWQASTIPR

SEQ ID NO: 61601 - protein, 15 aa, Artificial Sequence
  Description of Artificial Sequence: Synthetic peptide
  Seed: DPRMCSLMQGSTLPR
DPRMYSLWQASTLPR

SEQ ID NO: 61602 - protein, 15 aa, Artificial Sequence
  Description of Artificial Sequence: Synthetic peptide
  Seed: DPRMCSLMQGSTLPR
DPRMYSLWQASTVPR

SEQ ID NO: 61603 - protein, 16 aa, Artificial Sequence
  Description of Artificial Sequence: Synthetic peptide
  Seed: DPRMCSLMQGSTLPRR
DPRMFSLAQASTAPRR

SEQ ID NO: 61604 - protein, 16 aa, Artificial Sequence
  Description of Artificial Sequence: Synthetic peptide
  Seed: DPRMCSLMQGSTLPRR
DPRMFSLAQASTCPRR

SEQ ID NO: 61605 - protein, 16 aa, Artificial Sequence
  Description of Artificial Sequence: Synthetic peptide
  Seed: DPRMCSLMQGSTLPRR
DPRMFSLAQASTFPRR

SEQ ID NO: 61606 - protein, 16 aa, Artificial Sequence
  Description of Artificial Sequence: Synthetic peptide
  Seed: DPRMCSLMQGSTLPRR
DPRMFSLAQASTGPRR

SEQ ID NO: 61607 - protein, 16 aa, Artificial Sequence
  Description of Artificial Sequence: Synthetic peptide
  Seed: DPRMCSLMQGSTLPRR
DPRMFSLAQASTHPRR

SEQ ID NO: 61608 - protein, 16 aa, Artificial Sequence
  Description of Artificial Sequence: Synthetic peptide
  Seed: DPRMCSLMQGSTLPRR
DPRMFSLAQASTIPRR

SEQ ID NO: 61609 - protein, 16 aa, Artificial Sequence
  Description of Artificial Sequence: Synthetic peptide
  Seed: DPRMCSLMQGSTLPRR
DPRMFSLAQASTLPRR

SEQ ID NO: 61610 - protein, 16 aa, Artificial Sequence
  Description of Artificial Sequence: Synthetic peptide
  Seed: DPRMCSLMQGSTLPRR
DPRMFSLAQASTMPRR

SEQ ID NO: 61611 - protein, 16 aa, Artificial Sequence
  Description of Artificial Sequence: Synthetic peptide
  Seed: DPRMCSLMQGSTLPRR
DPRMFSLAQASTNPRR

SEQ ID NO: 61612 - protein, 16 aa, Artificial Sequence
  Description of Artificial Sequence: Synthetic peptide
  Seed: DPRMCSLMQGSTLPRR
DPRMFSLAQASTQPRR

SEQ ID NO: 61613 - protein, 16 aa, Artificial Sequence
  Description of Artificial Sequence: Synthetic peptide
  Seed: DPRMCSLMQGSTLPRR
DPRMFSLAQASTSPRR

SEQ ID NO: 61614 - protein, 16 aa, Artificial Sequence
  Description of Artificial Sequence: Synthetic peptide
  Seed: DPRMCSLMQGSTLPRR
DPRMFSLAQASTTPRR

SEQ ID NO: 61615 - protein, 16 aa, Artificial Sequence
  Description of Artificial Sequence: Synthetic peptide
  Seed: DPRMCSLMQGSTLPRR
DPRMFSLAQASTVPRR

SEQ ID NO: 61616 - protein, 16 aa, Artificial Sequence
  Description of Artificial Sequence: Synthetic peptide
  Seed: DPRMCSLMQGSTLPRR
DPRMFSLAQFSTLPRR

SEQ ID NO: 61617 - protein, 16 aa, Artificial Sequence
  Description of Artificial Sequence: Synthetic peptide
  Seed: DPRMCSLMQGSTLPRR
DPRMFSLAQGSTAPRR

SEQ ID NO: 61618 - protein, 16 aa, Artificial Sequence
  Description of Artificial Sequence: Synthetic peptide
  Seed: DPRMCSLMQGSTLPRR
DPRMFSLAQGSTGPRR

SEQ ID NO: 61619 - protein, 16 aa, Artificial Sequence
  Description of Artificial Sequence: Synthetic peptide
  Seed: DPRMCSLMQGSTLPRR
DPRMFSLAQGSTIPRR

SEQ ID NO: 61620 - protein, 16 aa, Artificial Sequence
  Description of Artificial Sequence: Synthetic peptide
  Seed: DPRMCSLMQGSTLPRR
DPRMFSLAQGSTLPRR

SEQ ID NO: 61621 - protein, 16 aa, Artificial Sequence
  Description of Artificial Sequence: Synthetic peptide
  Seed: DPRMCSLMQGSTLPRR
DPRMFSLAQGSTMPRR

SEQ ID NO: 61622 - protein, 16 aa, Artificial Sequence
  Description of Artificial Sequence: Synthetic peptide
  Seed: DPRMCSLMQGSTLPRR
DPRMFSLAQGSTNPRR

SEQ ID NO: 61623 - protein, 16 aa, Artificial Sequence
  Description of Artificial Sequence: Synthetic peptide
  Seed: DPRMCSLMQGSTLPRR
DPRMFSLAQGSTSPRR

SEQ ID NO: 61624 - protein, 16 aa, Artificial Sequence
  Description of Artificial Sequence: Synthetic peptide
  Seed: DPRMCSLMQGSTLPRR
DPRMFSLAQGSTTPRR

SEQ ID NO: 61625 - protein, 16 aa, Artificial Sequence
  Description of Artificial Sequence: Synthetic peptide
  Seed: DPRMCSLMQGSTLPRR
DPRMFSLAQGSTVPRR

SEQ ID NO: 61626 - protein, 16 aa, Artificial Sequence
  Description of Artificial Sequence: Synthetic peptide
  Seed: DPRMCSLMQGSTLPRR
DPRMFSLAQISTAPRR

SEQ ID NO: 61627 - protein, 16 aa, Artificial Sequence
  Description of Artificial Sequence: Synthetic peptide
  Seed: DPRMCSLMQGSTLPRR
DPRMFSLAQISTIPRR

SEQ ID NO: 61628 - protein, 16 aa, Artificial Sequence
  Description of Artificial Sequence: Synthetic peptide
  Seed: DPRMCSLMQGSTLPRR
DPRMFSLAQISTLPRR

SEQ ID NO: 61629 - protein, 16 aa, Artificial Sequence
  Description of Artificial Sequence: Synthetic peptide
  Seed: DPRMCSLMQGSTLPRR
DPRMFSLAQISTMPRR

SEQ ID NO: 61630 - protein, 16 aa, Artificial Sequence
  Description of Artificial Sequence: Synthetic peptide
  Seed: DPRMCSLMQGSTLPRR
DPRMFSLAQISTNPRR

SEQ ID NO: 61631 - protein, 16 aa, Artificial Sequence
  Description of Artificial Sequence: Synthetic peptide
  Seed: DPRMCSLMQGSTLPRR
DPRMFSLAQISTSPRR

SEQ ID NO: 61632 - protein, 16 aa, Artificial Sequence
  Description of Artificial Sequence: Synthetic peptide
  Seed: DPRMCSLMQGSTLPRR
DPRMFSLAQISTTPRR

SEQ ID NO: 61633 - protein, 16 aa, Artificial Sequence
  Description of Artificial Sequence: Synthetic peptide
  Seed: DPRMCSLMQGSTLPRR
DPRMFSLAQISTVPRR

SEQ ID NO: 61634 - protein, 16 aa, Artificial Sequence
  Description of Artificial Sequence: Synthetic peptide
  Seed: DPRMCSLMQGSTLPRR
DPRMFSLAQLSTAPRR

SEQ ID NO: 61635 - protein, 16 aa, Artificial Sequence
  Description of Artificial Sequence: Synthetic peptide
  Seed: DPRMCSLMQGSTLPRR
DPRMFSLAQMSTAPRR

SEQ ID NO: 61636 - protein, 16 aa, Artificial Sequence
  Description of Artificial Sequence: Synthetic peptide
  Seed: DPRMCSLMQGSTLPRR
DPRMFSLAQNSTAPRR

SEQ ID NO: 61637 - protein, 16 aa, Artificial Sequence
  Description of Artificial Sequence: Synthetic peptide
  Seed: DPRMCSLMQGSTLPRR
DPRMFSLAQNSTIPRR

SEQ ID NO: 61638 - protein, 16 aa, Artificial Sequence
  Description of Artificial Sequence: Synthetic peptide
  Seed: DPRMCSLMQGSTLPRR
DPRMFSLAQNSTLPRR

SEQ ID NO: 61639 - protein, 16 aa, Artificial Sequence
  Description of Artificial Sequence: Synthetic peptide
  Seed: DPRMCSLMQGSTLPRR
DPRMFSLAQNSTMPRR

SEQ ID NO: 61640 - protein, 16 aa, Artificial Sequence
  Description of Artificial Sequence: Synthetic peptide
  Seed: DPRMCSLMQGSTLPRR
DPRMFSLAQNSTNPRR

SEQ ID NO: 61641 - protein, 16 aa, Artificial Sequence
  Description of Artificial Sequence: Synthetic peptide
  Seed: DPRMCSLMQGSTLPRR
DPRMFSLAQNSTSPRR

SEQ ID NO: 61642 - protein, 16 aa, Artificial Sequence
  Description of Artificial Sequence: Synthetic peptide
  Seed: DPRMCSLMQGSTLPRR
DPRMFSLAQNSTVPRR

SEQ ID NO: 61643 - protein, 16 aa, Artificial Sequence
  Description of Artificial Sequence: Synthetic peptide
  Seed: DPRMCSLMQGSTLPRR
DPRMFSLAQPSTAPRR

SEQ ID NO: 61644 - protein, 16 aa, Artificial Sequence
  Description of Artificial Sequence: Synthetic peptide
  Seed: DPRMCSLMQGSTLPRR
DPRMFSLAQPSTGPRR

SEQ ID NO: 61645 - protein, 16 aa, Artificial Sequence
  Description of Artificial Sequence: Synthetic peptide
  Seed: DPRMCSLMQGSTLPRR
DPRMFSLAQPSTIPRR

SEQ ID NO: 61646 - protein, 16 aa, Artificial Sequence
  Description of Artificial Sequence: Synthetic peptide
  Seed: DPRMCSLMQGSTLPRR
DPRMFSLAQPSTLPRR

SEQ ID NO: 61647 - protein, 16 aa, Artificial Sequence
  Description of Artificial Sequence: Synthetic peptide
  Seed: DPRMCSLMQGSTLPRR
DPRMFSLAQPSTMPRR

SEQ ID NO: 61648 - protein, 16 aa, Artificial Sequence
  Description of Artificial Sequence: Synthetic peptide
  Seed: DPRMCSLMQGSTLPRR
DPRMFSLAQPSTNPRR

SEQ ID NO: 61649 - protein, 16 aa, Artificial Sequence
  Description of Artificial Sequence: Synthetic peptide
  Seed: DPRMCSLMQGSTLPRR
DPRMFSLAQPSTQPRR

SEQ ID NO: 61650 - protein, 16 aa, Artificial Sequence
  Description of Artificial Sequence: Synthetic peptide
  Seed: DPRMCSLMQGSTLPRR
DPRMFSLAQPSTSPRR

SEQ ID NO: 61651 - protein, 16 aa, Artificial Sequence
  Description of Artificial Sequence: Synthetic peptide
  Seed: DPRMCSLMQGSTLPRR
DPRMFSLAQPSTTPRR

SEQ ID NO: 61652 - protein, 16 aa, Artificial Sequence
  Description of Artificial Sequence: Synthetic peptide
  Seed: DPRMCSLMQGSTLPRR
DPRMFSLAQPSTVPRR

SEQ ID NO: 61653 - protein, 16 aa, Artificial Sequence
  Description of Artificial Sequence: Synthetic peptide
  Seed: DPRMCSLMQGSTLPRR
DPRMFSLAQSSTAPRR

SEQ ID NO: 61654 - protein, 16 aa, Artificial Sequence
  Description of Artificial Sequence: Synthetic peptide
  Seed: DPRMCSLMQGSTLPRR
DPRMFSLAQSSTIPRR

SEQ ID NO: 61655 - protein, 16 aa, Artificial Sequence
  Description of Artificial Sequence: Synthetic peptide
  Seed: DPRMCSLMQGSTLPRR
DPRMFSLAQSSTLPRR

SEQ ID NO: 61656 - protein, 16 aa, Artificial Sequence
  Description of Artificial Sequence: Synthetic peptide
  Seed: DPRMCSLMQGSTLPRR
DPRMFSLAQSSTMPRR

SEQ ID NO: 61657 - protein, 16 aa, Artificial Sequence
  Description of Artificial Sequence: Synthetic peptide
  Seed: DPRMCSLMQGSTLPRR
DPRMFSLAQSSTNPRR

SEQ ID NO: 61658 - protein, 16 aa, Artificial Sequence
  Description of Artificial Sequence: Synthetic peptide
  Seed: DPRMCSLMQGSTLPRR
DPRMFSLAQSSTSPRR

SEQ ID NO: 61659 - protein, 16 aa, Artificial Sequence
  Description of Artificial Sequence: Synthetic peptide
  Seed: DPRMCSLMQGSTLPRR
DPRMFSLAQSSTTPRR

SEQ ID NO: 61660 - protein, 16 aa, Artificial Sequence
  Description of Artificial Sequence: Synthetic peptide
  Seed: DPRMCSLMQGSTLPRR
DPRMFSLAQSSTVPRR

SEQ ID NO: 61661 - protein, 16 aa, Artificial Sequence
  Description of Artificial Sequence: Synthetic peptide
  Seed: DPRMCSLMQGSTLPRR
DPRMFSLAQTSTAPRR

SEQ ID NO: 61662 - protein, 16 aa, Artificial Sequence
  Description of Artificial Sequence: Synthetic peptide
  Seed: DPRMCSLMQGSTLPRR
DPRMFSLAQTSTIPRR

SEQ ID NO: 61663 - protein, 16 aa, Artificial Sequence
  Description of Artificial Sequence: Synthetic peptide
  Seed: DPRMCSLMQGSTLPRR
DPRMFSLAQTSTLPRR

SEQ ID NO: 61664 - protein, 16 aa, Artificial Sequence
  Description of Artificial Sequence: Synthetic peptide
  Seed: DPRMCSLMQGSTLPRR
DPRMFSLAQTSTMPRR

SEQ ID NO: 61665 - protein, 16 aa, Artificial Sequence
  Description of Artificial Sequence: Synthetic peptide
  Seed: DPRMCSLMQGSTLPRR
DPRMFSLAQTSTNPRR

SEQ ID NO: 61666 - protein, 16 aa, Artificial Sequence
  Description of Artificial Sequence: Synthetic peptide
  Seed: DPRMCSLMQGSTLPRR
DPRMFSLAQTSTSPRR

SEQ ID NO: 61667 - protein, 16 aa, Artificial Sequence
  Description of Artificial Sequence: Synthetic peptide
  Seed: DPRMCSLMQGSTLPRR
DPRMFSLAQTSTTPRR

SEQ ID NO: 61668 - protein, 16 aa, Artificial Sequence
  Description of Artificial Sequence: Synthetic peptide
  Seed: DPRMCSLMQGSTLPRR
DPRMFSLAQTSTVPRR

SEQ ID NO: 61669 - protein, 16 aa, Artificial Sequence
  Description of Artificial Sequence: Synthetic peptide
  Seed: DPRMCSLMQGSTLPRR
DPRMFSLAQVSTAPRR

SEQ ID NO: 61670 - protein, 16 aa, Artificial Sequence
  Description of Artificial Sequence: Synthetic peptide
  Seed: DPRMCSLMQGSTLPRR
DPRMFSLAQVSTGPRR

SEQ ID NO: 61671 - protein, 16 aa, Artificial Sequence
  Description of Artificial Sequence: Synthetic peptide
  Seed: DPRMCSLMQGSTLPRR
DPRMFSLAQVSTHPRR

SEQ ID NO: 61672 - protein, 16 aa, Artificial Sequence
  Description of Artificial Sequence: Synthetic peptide
  Seed: DPRMCSLMQGSTLPRR
DPRMFSLAQVSTIPRR

SEQ ID NO: 61673 - protein, 16 aa, Artificial Sequence
  Description of Artificial Sequence: Synthetic peptide
  Seed: DPRMCSLMQGSTLPRR
DPRMFSLAQVSTLPRR

SEQ ID NO: 61674 - protein, 16 aa, Artificial Sequence
  Description of Artificial Sequence: Synthetic peptide
  Seed: DPRMCSLMQGSTLPRR
DPRMFSLAQVSTMPRR

SEQ ID NO: 61675 - protein, 16 aa, Artificial Sequence
  Description of Artificial Sequence: Synthetic peptide
  Seed: DPRMCSLMQGSTLPRR
DPRMFSLAQVSTNPRR

SEQ ID NO: 61676 - protein, 16 aa, Artificial Sequence
  Description of Artificial Sequence: Synthetic peptide
  Seed: DPRMCSLMQGSTLPRR
DPRMFSLAQVSTSPRR

SEQ ID NO: 61677 - protein, 16 aa, Artificial Sequence
  Description of Artificial Sequence: Synthetic peptide
  Seed: DPRMCSLMQGSTLPRR
DPRMFSLAQVSTTPRR

SEQ ID NO: 61678 - protein, 16 aa, Artificial Sequence
  Description of Artificial Sequence: Synthetic peptide
  Seed: DPRMCSLMQGSTLPRR
DPRMFSLAQVSTVPRR

SEQ ID NO: 61679 - protein, 16 aa, Artificial Sequence
  Description of Artificial Sequence: Synthetic peptide
  Seed: DPRMCSLMQGSTLPRR
DPRMFSLCQASTAPRR

SEQ ID NO: 61680 - protein, 16 aa, Artificial Sequence
  Description of Artificial Sequence: Synthetic peptide
  Seed: DPRMCSLMQGSTLPRR
DPRMFSLCQASTIPRR

SEQ ID NO: 61681 - protein, 16 aa, Artificial Sequence
  Description of Artificial Sequence: Synthetic peptide
  Seed: DPRMCSLMQGSTLPRR
DPRMFSLCQASTLPRR

SEQ ID NO: 61682 - protein, 16 aa, Artificial Sequence
  Description of Artificial Sequence: Synthetic peptide
  Seed: DPRMCSLMQGSTLPRR
DPRMFSLCQASTVPRR

SEQ ID NO: 61683 - protein, 16 aa, Artificial Sequence
  Description of Artificial Sequence: Synthetic peptide
  Seed: DPRMCSLMQGSTLPRR
DPRMFSLCQGSTLPRR

SEQ ID NO: 61684 - protein, 16 aa, Artificial Sequence
  Description of Artificial Sequence: Synthetic peptide
  Seed: DPRMCSLMQGSTLPRR
DPRMFSLEQASTAPRR

SEQ ID NO: 61685 - protein, 16 aa, Artificial Sequence
  Description of Artificial Sequence: Synthetic peptide
  Seed: DPRMCSLMQGSTLPRR
DPRMFSLEQASTIPRR

SEQ ID NO: 61686 - protein, 16 aa, Artificial Sequence
  Description of Artificial Sequence: Synthetic peptide
  Seed: DPRMCSLMQGSTLPRR
DPRMFSLEQASTLPRR

SEQ ID NO: 61687 - protein, 16 aa, Artificial Sequence
  Description of Artificial Sequence: Synthetic peptide
  Seed: DPRMCSLMQGSTLPRR
DPRMFSLEQASTVPRR

SEQ ID NO: 61688 - protein, 16 aa, Artificial Sequence
  Description of Artificial Sequence: Synthetic peptide
  Seed: DPRMCSLMQGSTLPRR
DPRMFSLEQGSTAPRR

SEQ ID NO: 61689 - protein, 16 aa, Artificial Sequence
  Description of Artificial Sequence: Synthetic peptide
  Seed: DPRMCSLMQGSTLPRR
DPRMFSLEQGSTIPRR

SEQ ID NO: 61690 - protein, 16 aa, Artificial Sequence
  Description of Artificial Sequence: Synthetic peptide
  Seed: DPRMCSLMQGSTLPRR
DPRMFSLEQGSTLPRR

SEQ ID NO: 61691 - protein, 16 aa, Artificial Sequence
  Description of Artificial Sequence: Synthetic peptide
  Seed: DPRMCSLMQGSTLPRR
DPRMFSLEQGSTVPRR

SEQ ID NO: 61692 - protein, 16 aa, Artificial Sequence
  Description of Artificial Sequence: Synthetic peptide
  Seed: DPRMCSLMQGSTLPRR
DPRMFSLEQSSTAPRR

SEQ ID NO: 61693 - protein, 16 aa, Artificial Sequence
  Description of Artificial Sequence: Synthetic peptide
  Seed: DPRMCSLMQGSTLPRR
DPRMFSLEQSSTIPRR

SEQ ID NO: 61694 - protein, 16 aa, Artificial Sequence
  Description of Artificial Sequence: Synthetic peptide
  Seed: DPRMCSLMQGSTLPRR
DPRMFSLEQSSTLPRR

SEQ ID NO: 61695 - protein, 16 aa, Artificial Sequence
  Description of Artificial Sequence: Synthetic peptide
  Seed: DPRMCSLMQGSTLPRR
DPRMFSLEQSSTVPRR

SEQ ID NO: 61696 - protein, 16 aa, Artificial Sequence
  Description of Artificial Sequence: Synthetic peptide
  Seed: DPRMCSLMQGSTLPRR
DPRMFSLFQASTAPRR

SEQ ID NO: 61697 - protein, 16 aa, Artificial Sequence
  Description of Artificial Sequence: Synthetic peptide
  Seed: DPRMCSLMQGSTLPRR
DPRMFSLFQASTIPRR

SEQ ID NO: 61698 - protein, 16 aa, Artificial Sequence
  Description of Artificial Sequence: Synthetic peptide
  Seed: DPRMCSLMQGSTLPRR
DPRMFSLFQASTLPRR

SEQ ID NO: 61699 - protein, 16 aa, Artificial Sequence
  Description of Artificial Sequence: Synthetic peptide
  Seed: DPRMCSLMQGSTLPRR
DPRMFSLFQASTMPRR

SEQ ID NO: 61700 - protein, 16 aa, Artificial Sequence
  Description of Artificial Sequence: Synthetic peptide
  Seed: DPRMCSLMQGSTLPRR
DPRMFSLFQASTNPRR

SEQ ID NO: 61701 - protein, 16 aa, Artificial Sequence
  Description of Artificial Sequence: Synthetic peptide
  Seed: DPRMCSLMQGSTLPRR
DPRMFSLFQASTSPRR

SEQ ID NO: 61702 - protein, 16 aa, Artificial Sequence
  Description of Artificial Sequence: Synthetic peptide
  Seed: DPRMCSLMQGSTLPRR
DPRMFSLFQASTTPRR

SEQ ID NO: 61703 - protein, 16 aa, Artificial Sequence
  Description of Artificial Sequence: Synthetic peptide
  Seed: DPRMCSLMQGSTLPRR
DPRMFSLFQASTVPRR

SEQ ID NO: 61704 - protein, 16 aa, Artificial Sequence
  Description of Artificial Sequence: Synthetic peptide
  Seed: DPRMCSLMQGSTLPRR
DPRMFSLFQFSTLPRR

SEQ ID NO: 61705 - protein, 16 aa, Artificial Sequence
  Description of Artificial Sequence: Synthetic peptide
  Seed: DPRMCSLMQGSTLPRR
DPRMFSLFQGSTAPRR

SEQ ID NO: 61706 - protein, 16 aa, Artificial Sequence
  Description of Artificial Sequence: Synthetic peptide
  Seed: DPRMCSLMQGSTLPRR
DPRMFSLFQGSTIPRR

SEQ ID NO: 61707 - protein, 16 aa, Artificial Sequence
  Description of Artificial Sequence: Synthetic peptide
  Seed: DPRMCSLMQGSTLPRR
DPRMFSLFQGSTLPRR

SEQ ID NO: 61708 - protein, 16 aa, Artificial Sequence
  Description of Artificial Sequence: Synthetic peptide
  Seed: DPRMCSLMQGSTLPRR
DPRMFSLFQGSTVPRR

SEQ ID NO: 61709 - protein, 16 aa, Artificial Sequence
  Description of Artificial Sequence: Synthetic peptide
  Seed: DPRMCSLMQGSTLPRR
DPRMFSLFQISTAPRR

SEQ ID NO: 61710 - protein, 16 aa, Artificial Sequence
  Description of Artificial Sequence: Synthetic peptide
  Seed: DPRMCSLMQGSTLPRR
DPRMFSLFQNSTLPRR

SEQ ID NO: 61711 - protein, 16 aa, Artificial Sequence
  Description of Artificial Sequence: Synthetic peptide
  Seed: DPRMCSLMQGSTLPRR
DPRMFSLFQPSTAPRR

SEQ ID NO: 61712 - protein, 16 aa, Artificial Sequence
  Description of Artificial Sequence: Synthetic peptide
  Seed: DPRMCSLMQGSTLPRR
DPRMFSLFQPSTIPRR

SEQ ID NO: 61713 - protein, 16 aa, Artificial Sequence
  Description of Artificial Sequence: Synthetic peptide
  Seed: DPRMCSLMQGSTLPRR
DPRMFSLFQPSTLPRR

SEQ ID NO: 61714 - protein, 16 aa, Artificial Sequence
  Description of Artificial Sequence: Synthetic peptide
  Seed: DPRMCSLMQGSTLPRR
DPRMFSLFQPSTNPRR

SEQ ID NO: 61715 - protein, 16 aa, Artificial Sequence
  Description of Artificial Sequence: Synthetic peptide
  Seed: DPRMCSLMQGSTLPRR
DPRMFSLFQPSTSPRR

SEQ ID NO: 61716 - protein, 16 aa, Artificial Sequence
  Description of Artificial Sequence: Synthetic peptide
  Seed: DPRMCSLMQGSTLPRR
DPRMFSLFQPSTVPRR

SEQ ID NO: 61717 - protein, 16 aa, Artificial Sequence
  Description of Artificial Sequence: Synthetic peptide
  Seed: DPRMCSLMQGSTLPRR
DPRMFSLFQSSTAPRR

SEQ ID NO: 61718 - protein, 16 aa, Artificial Sequence
  Description of Artificial Sequence: Synthetic peptide
  Seed: DPRMCSLMQGSTLPRR
DPRMFSLFQSSTIPRR

SEQ ID NO: 61719 - protein, 16 aa, Artificial Sequence
  Description of Artificial Sequence: Synthetic peptide
  Seed: DPRMCSLMQGSTLPRR
DPRMFSLFQSSTLPRR

SEQ ID NO: 61720 - protein, 16 aa, Artificial Sequence
  Description of Artificial Sequence: Synthetic peptide
  Seed: DPRMCSLMQGSTLPRR
DPRMFSLFQSSTSPRR

SEQ ID NO: 61721 - protein, 16 aa, Artificial Sequence
  Description of Artificial Sequence: Synthetic peptide
  Seed: DPRMCSLMQGSTLPRR
DPRMFSLFQSSTVPRR

SEQ ID NO: 61722 - protein, 16 aa, Artificial Sequence
  Description of Artificial Sequence: Synthetic peptide
  Seed: DPRMCSLMQGSTLPRR
DPRMFSLFQTSTAPRR

SEQ ID NO: 61723 - protein, 16 aa, Artificial Sequence
  Description of Artificial Sequence: Synthetic peptide
  Seed: DPRMCSLMQGSTLPRR
DPRMFSLFQVSTAPRR

SEQ ID NO: 61724 - protein, 16 aa, Artificial Sequence
  Description of Artificial Sequence: Synthetic peptide
  Seed: DPRMCSLMQGSTLPRR
DPRMFSLFQVSTNPRR

SEQ ID NO: 61725 - protein, 16 aa, Artificial Sequence
  Description of Artificial Sequence: Synthetic peptide
  Seed: DPRMCSLMQGSTLPRR
DPRMFSLFQVSTSPRR

SEQ ID NO: 61726 - protein, 16 aa, Artificial Sequence
  Description of Artificial Sequence: Synthetic peptide
  Seed: DPRMCSLMQGSTLPRR
DPRMFSLGQASTAPRR

SEQ ID NO: 61727 - protein, 16 aa, Artificial Sequence
  Description of Artificial Sequence: Synthetic peptide
  Seed: DPRMCSLMQGSTLPRR
DPRMFSLGQASTIPRR

SEQ ID NO: 61728 - protein, 16 aa, Artificial Sequence
  Description of Artificial Sequence: Synthetic peptide
  Seed: DPRMCSLMQGSTLPRR
DPRMFSLGQASTLPRR

SEQ ID NO: 61729 - protein, 16 aa, Artificial Sequence
  Description of Artificial Sequence: Synthetic peptide
  Seed: DPRMCSLMQGSTLPRR
DPRMFSLGQASTMPRR

SEQ ID NO: 61730 - protein, 16 aa, Artificial Sequence
  Description of Artificial Sequence: Synthetic peptide
  Seed: DPRMCSLMQGSTLPRR
DPRMFSLGQASTVPRR

SEQ ID NO: 61731 - protein, 16 aa, Artificial Sequence
  Description of Artificial Sequence: Synthetic peptide
  Seed: DPRMCSLMQGSTLPRR
DPRMFSLGQGSTIPRR

SEQ ID NO: 61732 - protein, 16 aa, Artificial Sequence
  Description of Artificial Sequence: Synthetic peptide
  Seed: DPRMCSLMQGSTLPRR
DPRMFSLGQGSTLPRR

SEQ ID NO: 61733 - protein, 16 aa, Artificial Sequence
  Description of Artificial Sequence: Synthetic peptide
  Seed: DPRMCSLMQGSTLPRR
DPRMFSLGQGSTVPRR

SEQ ID NO: 61734 - protein, 16 aa, Artificial Sequence
  Description of Artificial Sequence: Synthetic peptide
  Seed: DPRMCSLMQGSTLPRR
DPRMFSLGQSSTIPRR

SEQ ID NO: 61735 - protein, 16 aa, Artificial Sequence
  Description of Artificial Sequence: Synthetic peptide
  Seed: DPRMCSLMQGSTLPRR
DPRMFSLGQSSTLPRR

SEQ ID NO: 61736 - protein, 16 aa, Artificial Sequence
  Description of Artificial Sequence: Synthetic peptide
  Seed: DPRMCSLMQGSTLPRR
DPRMFSLGQSSTVPRR

SEQ ID NO: 61737 - protein, 16 aa, Artificial Sequence
  Description of Artificial Sequence: Synthetic peptide
  Seed: DPRMCSLMQGSTLPRR
DPRMFSLHQASTIPRR

SEQ ID NO: 61738 - protein, 16 aa, Artificial Sequence
  Description of Artificial Sequence: Synthetic peptide
  Seed: DPRMCSLMQGSTLPRR
DPRMFSLHQASTLPRR

SEQ ID NO: 61739 - protein, 16 aa, Artificial Sequence
  Description of Artificial Sequence: Synthetic peptide
  Seed: DPRMCSLMQGSTLPRR
DPRMFSLHQASTVPRR

SEQ ID NO: 61740 - protein, 16 aa, Artificial Sequence
  Description of Artificial Sequence: Synthetic peptide
  Seed: DPRMCSLMQGSTLPRR
DPRMFSLHQGSTLPRR

SEQ ID NO: 61741 - protein, 16 aa, Artificial Sequence
  Description of Artificial Sequence: Synthetic peptide
  Seed: DPRMCSLMQGSTLPRR
DPRMFSLIQASTAPRR

SEQ ID NO: 61742 - protein, 16 aa, Artificial Sequence
  Description of Artificial Sequence: Synthetic peptide
  Seed: DPRMCSLMQGSTLPRR
DPRMFSLIQASTCPRR

SEQ ID NO: 61743 - protein, 16 aa, Artificial Sequence
  Description of Artificial Sequence: Synthetic peptide
  Seed: DPRMCSLMQGSTLPRR
DPRMFSLIQASTDPRR

SEQ ID NO: 61744 - protein, 16 aa, Artificial Sequence
  Description of Artificial Sequence: Synthetic peptide
  Seed: DPRMCSLMQGSTLPRR
DPRMFSLIQASTEPRR

SEQ ID NO: 61745 - protein, 16 aa, Artificial Sequence
  Description of Artificial Sequence: Synthetic peptide
  Seed: DPRMCSLMQGSTLPRR
DPRMFSLIQASTFPRR

SEQ ID NO: 61746 - protein, 16 aa, Artificial Sequence
  Description of Artificial Sequence: Synthetic peptide
  Seed: DPRMCSLMQGSTLPRR
DPRMFSLIQASTGPRR

SEQ ID NO: 61747 - protein, 16 aa, Artificial Sequence
  Description of Artificial Sequence: Synthetic peptide
  Seed: DPRMCSLMQGSTLPRR
DPRMFSLIQASTHPRR

SEQ ID NO: 61748 - protein, 16 aa, Artificial Sequence
  Description of Artificial Sequence: Synthetic peptide
  Seed: DPRMCSLMQGSTLPRR
DPRMFSLIQASTIPRR

SEQ ID NO: 61749 - protein, 16 aa, Artificial Sequence
  Description of Artificial Sequence: Synthetic peptide
  Seed: DPRMCSLMQGSTLPRR
DPRMFSLIQASTLPRR

SEQ ID NO: 61750 - protein, 16 aa, Artificial Sequence
  Description of Artificial Sequence: Synthetic peptide
  Seed: DPRMCSLMQGSTLPRR
DPRMFSLIQASTMPRR

SEQ ID NO: 61751 - protein, 16 aa, Artificial Sequence
  Description of Artificial Sequence: Synthetic peptide
  Seed: DPRMCSLMQGSTLPRR
DPRMFSLIQASTNPRR

SEQ ID NO: 61752 - protein, 16 aa, Artificial Sequence
  Description of Artificial Sequence: Synthetic peptide
  Seed: DPRMCSLMQGSTLPRR
DPRMFSLIQASTPPRR

SEQ ID NO: 61753 - protein, 16 aa, Artificial Sequence
  Description of Artificial Sequence: Synthetic peptide
  Seed: DPRMCSLMQGSTLPRR
DPRMFSLIQASTQPRR

SEQ ID NO: 61754 - protein, 16 aa, Artificial Sequence
  Description of Artificial Sequence: Synthetic peptide
  Seed: DPRMCSLMQGSTLPRR
DPRMFSLIQASTSPRR

SEQ ID NO: 61755 - protein, 16 aa, Artificial Sequence
  Description of Artificial Sequence: Synthetic peptide
  Seed: DPRMCSLMQGSTLPRR
DPRMFSLIQASTTPRR

SEQ ID NO: 61756 - protein, 16 aa, Artificial Sequence
  Description of Artificial Sequence: Synthetic peptide
  Seed: DPRMCSLMQGSTLPRR
DPRMFSLIQASTVPRR

SEQ ID NO: 61757 - protein, 16 aa, Artificial Sequence
  Description of Artificial Sequence: Synthetic peptide
  Seed: DPRMCSLMQGSTLPRR
DPRMFSLIQFSTFPRR

SEQ ID NO: 61758 - protein, 16 aa, Artificial Sequence
  Description of Artificial Sequence: Synthetic peptide
  Seed: DPRMCSLMQGSTLPRR
DPRMFSLIQFSTIPRR

SEQ ID NO: 61759 - protein, 16 aa, Artificial Sequence
  Description of Artificial Sequence: Synthetic peptide
  Seed: DPRMCSLMQGSTLPRR
DPRMFSLIQFSTLPRR

SEQ ID NO: 61760 - protein, 16 aa, Artificial Sequence
  Description of Artificial Sequence: Synthetic peptide
  Seed: DPRMCSLMQGSTLPRR
DPRMFSLIQFSTMPRR

SEQ ID NO: 61761 - protein, 16 aa, Artificial Sequence
  Description of Artificial Sequence: Synthetic peptide
  Seed: DPRMCSLMQGSTLPRR
DPRMFSLIQFSTVPRR

SEQ ID NO: 61762 - protein, 16 aa, Artificial Sequence
  Description of Artificial Sequence: Synthetic peptide
  Seed: DPRMCSLMQGSTLPRR
DPRMFSLIQGSTAPRR

SEQ ID NO: 61763 - protein, 16 aa, Artificial Sequence
  Description of Artificial Sequence: Synthetic peptide
  Seed: DPRMCSLMQGSTLPRR
DPRMFSLIQGSTCPRR

SEQ ID NO: 61764 - protein, 16 aa, Artificial Sequence
  Description of Artificial Sequence: Synthetic peptide
  Seed: DPRMCSLMQGSTLPRR
DPRMFSLIQGSTFPRR

SEQ ID NO: 61765 - protein, 16 aa, Artificial Sequence
  Description of Artificial Sequence: Synthetic peptide
  Seed: DPRMCSLMQGSTLPRR
DPRMFSLIQGSTGPRR

SEQ ID NO: 61766 - protein, 16 aa, Artificial Sequence
  Description of Artificial Sequence: Synthetic peptide
  Seed: DPRMCSLMQGSTLPRR
DPRMFSLIQGSTIPRR

SEQ ID NO: 61767 - protein, 16 aa, Artificial Sequence
  Description of Artificial Sequence: Synthetic peptide
  Seed: DPRMCSLMQGSTLPRR
DPRMFSLIQGSTLPRR

SEQ ID NO: 61768 - protein, 16 aa, Artificial Sequence
  Description of Artificial Sequence: Synthetic peptide
  Seed: DPRMCSLMQGSTLPRR
DPRMFSLIQGSTMPRR

SEQ ID NO: 61769 - protein, 16 aa, Artificial Sequence
  Description of Artificial Sequence: Synthetic peptide
  Seed: DPRMCSLMQGSTLPRR
DPRMFSLIQGSTNPRR

SEQ ID NO: 61770 - protein, 16 aa, Artificial Sequence
  Description of Artificial Sequence: Synthetic peptide
  Seed: DPRMCSLMQGSTLPRR
DPRMFSLIQGSTSPRR

SEQ ID NO: 61771 - protein, 16 aa, Artificial Sequence
  Description of Artificial Sequence: Synthetic peptide
  Seed: DPRMCSLMQGSTLPRR
DPRMFSLIQGSTTPRR

SEQ ID NO: 61772 - protein, 16 aa, Artificial Sequence
  Description of Artificial Sequence: Synthetic peptide
  Seed: DPRMCSLMQGSTLPRR
DPRMFSLIQGSTVPRR

SEQ ID NO: 61773 - protein, 16 aa, Artificial Sequence
  Description of Artificial Sequence: Synthetic peptide
  Seed: DPRMCSLMQGSTLPRR
DPRMFSLIQISTAPRR

SEQ ID NO: 61774 - protein, 16 aa, Artificial Sequence
  Description of Artificial Sequence: Synthetic peptide
  Seed: DPRMCSLMQGSTLPRR
DPRMFSLIQISTGPRR

SEQ ID NO: 61775 - protein, 16 aa, Artificial Sequence
  Description of Artificial Sequence: Synthetic peptide
  Seed: DPRMCSLMQGSTLPRR
DPRMFSLIQISTHPRR

SEQ ID NO: 61776 - protein, 16 aa, Artificial Sequence
  Description of Artificial Sequence: Synthetic peptide
  Seed: DPRMCSLMQGSTLPRR
DPRMFSLIQISTIPRR

SEQ ID NO: 61777 - protein, 16 aa, Artificial Sequence
  Description of Artificial Sequence: Synthetic peptide
  Seed: DPRMCSLMQGSTLPRR
DPRMFSLIQISTLPRR

SEQ ID NO: 61778 - protein, 16 aa, Artificial Sequence
  Description of Artificial Sequence: Synthetic peptide
  Seed: DPRMCSLMQGSTLPRR
DPRMFSLIQISTMPRR

SEQ ID NO: 61779 - protein, 16 aa, Artificial Sequence
  Description of Artificial Sequence: Synthetic peptide
  Seed: DPRMCSLMQGSTLPRR
DPRMFSLIQISTNPRR

SEQ ID NO: 61780 - protein, 16 aa, Artificial Sequence
  Description of Artificial Sequence: Synthetic peptide
  Seed: DPRMCSLMQGSTLPRR
DPRMFSLIQISTSPRR

SEQ ID NO: 61781 - protein, 16 aa, Artificial Sequence
  Description of Artificial Sequence: Synthetic peptide
  Seed: DPRMCSLMQGSTLPRR
DPRMFSLIQISTTPRR

SEQ ID NO: 61782 - protein, 16 aa, Artificial Sequence
  Description of Artificial Sequence: Synthetic peptide
  Seed: DPRMCSLMQGSTLPRR
DPRMFSLIQISTVPRR

SEQ ID NO: 61783 - protein, 16 aa, Artificial Sequence
  Description of Artificial Sequence: Synthetic peptide
  Seed: DPRMCSLMQGSTLPRR
DPRMFSLIQLSTAPRR

SEQ ID NO: 61784 - protein, 16 aa, Artificial Sequence
  Description of Artificial Sequence: Synthetic peptide
  Seed: DPRMCSLMQGSTLPRR
DPRMFSLIQLSTNPRR

SEQ ID NO: 61785 - protein, 16 aa, Artificial Sequence
  Description of Artificial Sequence: Synthetic peptide
  Seed: DPRMCSLMQGSTLPRR
DPRMFSLIQLSTSPRR

SEQ ID NO: 61786 - protein, 16 aa, Artificial Sequence
  Description of Artificial Sequence: Synthetic peptide
  Seed: DPRMCSLMQGSTLPRR
DPRMFSLIQLSTTPRR

SEQ ID NO: 61787 - protein, 16 aa, Artificial Sequence
  Description of Artificial Sequence: Synthetic peptide
  Seed: DPRMCSLMQGSTLPRR
DPRMFSLIQLSTVPRR

SEQ ID NO: 61788 - protein, 16 aa, Artificial Sequence
  Description of Artificial Sequence: Synthetic peptide
  Seed: DPRMCSLMQGSTLPRR
DPRMFSLIQMSTAPRR

SEQ ID NO: 61789 - protein, 16 aa, Artificial Sequence
  Description of Artificial Sequence: Synthetic peptide
  Seed: DPRMCSLMQGSTLPRR
DPRMFSLIQMSTNPRR

SEQ ID NO: 61790 - protein, 16 aa, Artificial Sequence
  Description of Artificial Sequence: Synthetic peptide
  Seed: DPRMCSLMQGSTLPRR
DPRMFSLIQMSTSPRR

SEQ ID NO: 61791 - protein, 16 aa, Artificial Sequence
  Description of Artificial Sequence: Synthetic peptide
  Seed: DPRMCSLMQGSTLPRR
DPRMFSLIQMSTVPRR

SEQ ID NO: 61792 - protein, 16 aa, Artificial Sequence
  Description of Artificial Sequence: Synthetic peptide
  Seed: DPRMCSLMQGSTLPRR
DPRMFSLIQNSTAPRR

SEQ ID NO: 61793 - protein, 16 aa, Artificial Sequence
  Description of Artificial Sequence: Synthetic peptide
  Seed: DPRMCSLMQGSTLPRR
DPRMFSLIQNSTIPRR

SEQ ID NO: 61794 - protein, 16 aa, Artificial Sequence
  Description of Artificial Sequence: Synthetic peptide
  Seed: DPRMCSLMQGSTLPRR
DPRMFSLIQNSTLPRR

SEQ ID NO: 61795 - protein, 16 aa, Artificial Sequence
  Description of Artificial Sequence: Synthetic peptide
  Seed: DPRMCSLMQGSTLPRR
DPRMFSLIQNSTMPRR

SEQ ID NO: 61796 - protein, 16 aa, Artificial Sequence
  Description of Artificial Sequence: Synthetic peptide
  Seed: DPRMCSLMQGSTLPRR
DPRMFSLIQNSTNPRR

SEQ ID NO: 61797 - protein, 16 aa, Artificial Sequence
  Description of Artificial Sequence: Synthetic peptide
  Seed: DPRMCSLMQGSTLPRR
DPRMFSLIQNSTSPRR

SEQ ID NO: 61798 - protein, 16 aa, Artificial Sequence
  Description of Artificial Sequence: Synthetic peptide
  Seed: DPRMCSLMQGSTLPRR
DPRMFSLIQNSTTPRR

SEQ ID NO: 61799 - protein, 16 aa, Artificial Sequence
  Description of Artificial Sequence: Synthetic peptide
  Seed: DPRMCSLMQGSTLPRR
DPRMFSLIQNSTVPRR

SEQ ID NO: 61800 - protein, 16 aa, Artificial Sequence
  Description of Artificial Sequence: Synthetic peptide
  Seed: DPRMCSLMQGSTLPRR
DPRMFSLIQPSTAPRR

SEQ ID NO: 61801 - protein, 16 aa, Artificial Sequence
  Description of Artificial Sequence: Synthetic peptide
  Seed: DPRMCSLMQGSTLPRR
DPRMFSLIQPSTGPRR

SEQ ID NO: 61802 - protein, 16 aa, Artificial Sequence
  Description of Artificial Sequence: Synthetic peptide
  Seed: DPRMCSLMQGSTLPRR
DPRMFSLIQPSTHPRR

SEQ ID NO: 61803 - protein, 16 aa, Artificial Sequence
  Description of Artificial Sequence: Synthetic peptide
  Seed: DPRMCSLMQGSTLPRR
DPRMFSLIQPSTIPRR

SEQ ID NO: 61804 - protein, 16 aa, Artificial Sequence
  Description of Artificial Sequence: Synthetic peptide
  Seed: DPRMCSLMQGSTLPRR
DPRMFSLIQPSTLPRR

SEQ ID NO: 61805 - protein, 16 aa, Artificial Sequence
  Description of Artificial Sequence: Synthetic peptide
  Seed: DPRMCSLMQGSTLPRR
DPRMFSLIQPSTMPRR

SEQ ID NO: 61806 - protein, 16 aa, Artificial Sequence
  Description of Artificial Sequence: Synthetic peptide
  Seed: DPRMCSLMQGSTLPRR
DPRMFSLIQPSTNPRR

SEQ ID NO: 61807 - protein, 16 aa, Artificial Sequence
  Description of Artificial Sequence: Synthetic peptide
  Seed: DPRMCSLMQGSTLPRR
DPRMFSLIQPSTPPRR

SEQ ID NO: 61808 - protein, 16 aa, Artificial Sequence
  Description of Artificial Sequence: Synthetic peptide
  Seed: DPRMCSLMQGSTLPRR
DPRMFSLIQPSTQPRR

SEQ ID NO: 61809 - protein, 16 aa, Artificial Sequence
  Description of Artificial Sequence: Synthetic peptide
  Seed: DPRMCSLMQGSTLPRR
DPRMFSLIQPSTSPRR

SEQ ID NO: 61810 - protein, 16 aa, Artificial Sequence
  Description of Artificial Sequence: Synthetic peptide
  Seed: DPRMCSLMQGSTLPRR
DPRMFSLIQPSTTPRR

SEQ ID NO: 61811 - protein, 16 aa, Artificial Sequence
  Description of Artificial Sequence: Synthetic peptide
  Seed: DPRMCSLMQGSTLPRR
DPRMFSLIQPSTVPRR

SEQ ID NO: 61812 - protein, 16 aa, Artificial Sequence
  Description of Artificial Sequence: Synthetic peptide
  Seed: DPRMCSLMQGSTLPRR
DPRMFSLIQSSTAPRR

SEQ ID NO: 61813 - protein, 16 aa, Artificial Sequence
  Description of Artificial Sequence: Synthetic peptide
  Seed: DPRMCSLMQGSTLPRR
DPRMFSLIQSSTCPRR

SEQ ID NO: 61814 - protein, 16 aa, Artificial Sequence
  Description of Artificial Sequence: Synthetic peptide
  Seed: DPRMCSLMQGSTLPRR
DPRMFSLIQSSTGPRR

SEQ ID NO: 61815 - protein, 16 aa, Artificial Sequence
  Description of Artificial Sequence: Synthetic peptide
  Seed: DPRMCSLMQGSTLPRR
DPRMFSLIQSSTHPRR

SEQ ID NO: 61816 - protein, 16 aa, Artificial Sequence
  Description of Artificial Sequence: Synthetic peptide
  Seed: DPRMCSLMQGSTLPRR
DPRMFSLIQSSTIPRR

SEQ ID NO: 61817 - protein, 16 aa, Artificial Sequence
  Description of Artificial Sequence: Synthetic peptide
  Seed: DPRMCSLMQGSTLPRR
DPRMFSLIQSSTLPRR

SEQ ID NO: 61818 - protein, 16 aa, Artificial Sequence
  Description of Artificial Sequence: Synthetic peptide
  Seed: DPRMCSLMQGSTLPRR
DPRMFSLIQSSTMPRR

SEQ ID NO: 61819 - protein, 16 aa, Artificial Sequence
  Description of Artificial Sequence: Synthetic peptide
  Seed: DPRMCSLMQGSTLPRR
DPRMFSLIQSSTNPRR

SEQ ID NO: 61820 - protein, 16 aa, Artificial Sequence
  Description of Artificial Sequence: Synthetic peptide
  Seed: DPRMCSLMQGSTLPRR
DPRMFSLIQSSTQPRR

SEQ ID NO: 61821 - protein, 16 aa, Artificial Sequence
  Description of Artificial Sequence: Synthetic peptide
  Seed: DPRMCSLMQGSTLPRR
DPRMFSLIQSSTSPRR

SEQ ID NO: 61822 - protein, 16 aa, Artificial Sequence
  Description of Artificial Sequence: Synthetic peptide
  Seed: DPRMCSLMQGSTLPRR
DPRMFSLIQSSTTPRR

SEQ ID NO: 61823 - protein, 16 aa, Artificial Sequence
  Description of Artificial Sequence: Synthetic peptide
  Seed: DPRMCSLMQGSTLPRR
DPRMFSLIQSSTVPRR

SEQ ID NO: 61824 - protein, 16 aa, Artificial Sequence
  Description of Artificial Sequence: Synthetic peptide
  Seed: DPRMCSLMQGSTLPRR
DPRMFSLIQTSTAPRR

SEQ ID NO: 61825 - protein, 16 aa, Artificial Sequence
  Description of Artificial Sequence: Synthetic peptide
  Seed: DPRMCSLMQGSTLPRR
DPRMFSLIQTSTGPRR

SEQ ID NO: 61826 - protein, 16 aa, Artificial Sequence
  Description of Artificial Sequence: Synthetic peptide
  Seed: DPRMCSLMQGSTLPRR
DPRMFSLIQTSTHPRR

SEQ ID NO: 61827 - protein, 16 aa, Artificial Sequence
  Description of Artificial Sequence: Synthetic peptide
  Seed: DPRMCSLMQGSTLPRR
DPRMFSLIQTSTIPRR

SEQ ID NO: 61828 - protein, 16 aa, Artificial Sequence
  Description of Artificial Sequence: Synthetic peptide
  Seed: DPRMCSLMQGSTLPRR
DPRMFSLIQTSTLPRR

SEQ ID NO: 61829 - protein, 16 aa, Artificial Sequence
  Description of Artificial Sequence: Synthetic peptide
  Seed: DPRMCSLMQGSTLPRR
DPRMFSLIQTSTMPRR

SEQ ID NO: 61830 - protein, 16 aa, Artificial Sequence
  Description of Artificial Sequence: Synthetic peptide
  Seed: DPRMCSLMQGSTLPRR
DPRMFSLIQTSTNPRR

SEQ ID NO: 61831 - protein, 16 aa, Artificial Sequence
  Description of Artificial Sequence: Synthetic peptide
  Seed: DPRMCSLMQGSTLPRR
DPRMFSLIQTSTQPRR

SEQ ID NO: 61832 - protein, 16 aa, Artificial Sequence
  Description of Artificial Sequence: Synthetic peptide
  Seed: DPRMCSLMQGSTLPRR
DPRMFSLIQTSTSPRR

SEQ ID NO: 61833 - protein, 16 aa, Artificial Sequence
  Description of Artificial Sequence: Synthetic peptide
  Seed: DPRMCSLMQGSTLPRR
DPRMFSLIQTSTTPRR

SEQ ID NO: 61834 - protein, 16 aa, Artificial Sequence
  Description of Artificial Sequence: Synthetic peptide
  Seed: DPRMCSLMQGSTLPRR
DPRMFSLIQTSTVPRR

SEQ ID NO: 61835 - protein, 16 aa, Artificial Sequence
  Description of Artificial Sequence: Synthetic peptide
  Seed: DPRMCSLMQGSTLPRR
DPRMFSLIQVSTAPRR

SEQ ID NO: 61836 - protein, 16 aa, Artificial Sequence
  Description of Artificial Sequence: Synthetic peptide
  Seed: DPRMCSLMQGSTLPRR
DPRMFSLIQVSTGPRR

SEQ ID NO: 61837 - protein, 16 aa, Artificial Sequence
  Description of Artificial Sequence: Synthetic peptide
  Seed: DPRMCSLMQGSTLPRR
DPRMFSLIQVSTHPRR

SEQ ID NO: 61838 - protein, 16 aa, Artificial Sequence
  Description of Artificial Sequence: Synthetic peptide
  Seed: DPRMCSLMQGSTLPRR
DPRMFSLIQVSTIPRR

SEQ ID NO: 61839 - protein, 16 aa, Artificial Sequence
  Description of Artificial Sequence: Synthetic peptide
  Seed: DPRMCSLMQGSTLPRR
DPRMFSLIQVSTLPRR

SEQ ID NO: 61840 - protein, 16 aa, Artificial Sequence
  Description of Artificial Sequence: Synthetic peptide
  Seed: DPRMCSLMQGSTLPRR
DPRMFSLIQVSTMPRR

SEQ ID NO: 61841 - protein, 16 aa, Artificial Sequence
  Description of Artificial Sequence: Synthetic peptide
  Seed: DPRMCSLMQGSTLPRR
DPRMFSLIQVSTNPRR

SEQ ID NO: 61842 - protein, 16 aa, Artificial Sequence
  Description of Artificial Sequence: Synthetic peptide
  Seed: DPRMCSLMQGSTLPRR
DPRMFSLIQVSTPPRR

SEQ ID NO: 61843 - protein, 16 aa, Artificial Sequence
  Description of Artificial Sequence: Synthetic peptide
  Seed: DPRMCSLMQGSTLPRR
DPRMFSLIQVSTQPRR

SEQ ID NO: 61844 - protein, 16 aa, Artificial Sequence
  Description of Artificial Sequence: Synthetic peptide
  Seed: DPRMCSLMQGSTLPRR
DPRMFSLIQVSTSPRR

SEQ ID NO: 61845 - protein, 16 aa, Artificial Sequence
  Description of Artificial Sequence: Synthetic peptide
  Seed: DPRMCSLMQGSTLPRR
DPRMFSLIQVSTTPRR

SEQ ID NO: 61846 - protein, 16 aa, Artificial Sequence
  Description of Artificial Sequence: Synthetic peptide
  Seed: DPRMCSLMQGSTLPRR
DPRMFSLIQVSTVPRR

SEQ ID NO: 61847 - protein, 16 aa, Artificial Sequence
  Description of Artificial Sequence: Synthetic peptide
  Seed: DPRMCSLMQGSTLPRR
DPRMFSLLQASTAPRR

SEQ ID NO: 61848 - protein, 16 aa, Artificial Sequence
  Description of Artificial Sequence: Synthetic peptide
  Seed: DPRMCSLMQGSTLPRR
DPRMFSLLQASTCPRR

SEQ ID NO: 61849 - protein, 16 aa, Artificial Sequence
  Description of Artificial Sequence: Synthetic peptide
  Seed: DPRMCSLMQGSTLPRR
DPRMFSLLQASTDPRR

SEQ ID NO: 61850 - protein, 16 aa, Artificial Sequence
  Description of Artificial Sequence: Synthetic peptide
  Seed: DPRMCSLMQGSTLPRR
DPRMFSLLQASTEPRR

SEQ ID NO: 61851 - protein, 16 aa, Artificial Sequence
  Description of Artificial Sequence: Synthetic peptide
  Seed: DPRMCSLMQGSTLPRR
DPRMFSLLQASTFPRR

SEQ ID NO: 61852 - protein, 16 aa, Artificial Sequence
  Description of Artificial Sequence: Synthetic peptide
  Seed: DPRMCSLMQGSTLPRR
DPRMFSLLQASTGPRR

SEQ ID NO: 61853 - protein, 16 aa, Artificial Sequence
  Description of Artificial Sequence: Synthetic peptide
  Seed: DPRMCSLMQGSTLPRR
DPRMFSLLQASTHPRR

SEQ ID NO: 61854 - protein, 16 aa, Artificial Sequence
  Description of Artificial Sequence: Synthetic peptide
  Seed: DPRMCSLMQGSTLPRR
DPRMFSLLQASTIPRR

SEQ ID NO: 61855 - protein, 16 aa, Artificial Sequence
  Description of Artificial Sequence: Synthetic peptide
  Seed: DPRMCSLMQGSTLPRR
DPRMFSLLQASTKPRR

SEQ ID NO: 61856 - protein, 16 aa, Artificial Sequence
  Description of Artificial Sequence: Synthetic peptide
  Seed: DPRMCSLMQGSTLPRR
DPRMFSLLQASTLPRR

SEQ ID NO: 61857 - protein, 16 aa, Artificial Sequence
  Description of Artificial Sequence: Synthetic peptide
  Seed: DPRMCSLMQGSTLPRR
DPRMFSLLQASTMPRR

SEQ ID NO: 61858 - protein, 16 aa, Artificial Sequence
  Description of Artificial Sequence: Synthetic peptide
  Seed: DPRMCSLMQGSTLPRR
DPRMFSLLQASTNPRR

SEQ ID NO: 61859 - protein, 16 aa, Artificial Sequence
  Description of Artificial Sequence: Synthetic peptide
  Seed: DPRMCSLMQGSTLPRR
DPRMFSLLQASTPPRR

SEQ ID NO: 61860 - protein, 16 aa, Artificial Sequence
  Description of Artificial Sequence: Synthetic peptide
  Seed: DPRMCSLMQGSTLPRR
DPRMFSLLQASTQPRR

SEQ ID NO: 61861 - protein, 16 aa, Artificial Sequence
  Description of Artificial Sequence: Synthetic peptide
  Seed: DPRMCSLMQGSTLPRR
DPRMFSLLQASTSPRR

SEQ ID NO: 61862 - protein, 16 aa, Artificial Sequence
  Description of Artificial Sequence: Synthetic peptide
  Seed: DPRMCSLMQGSTLPRR
DPRMFSLLQASTTPRR

SEQ ID NO: 61863 - protein, 16 aa, Artificial Sequence
  Description of Artificial Sequence: Synthetic peptide
  Seed: DPRMCSLMQGSTLPRR
DPRMFSLLQASTVPRR

SEQ ID NO: 61864 - protein, 16 aa, Artificial Sequence
  Description of Artificial Sequence: Synthetic peptide
  Seed: DPRMCSLMQGSTLPRR
DPRMFSLLQASTWPRR

SEQ ID NO: 61865 - protein, 16 aa, Artificial Sequence
  Description of Artificial Sequence: Synthetic peptide
  Seed: DPRMCSLMQGSTLPRR
DPRMFSLLQASTYPRR

SEQ ID NO: 61866 - protein, 16 aa, Artificial Sequence
  Description of Artificial Sequence: Synthetic peptide
  Seed: DPRMCSLMQGSTLPRR
DPRMFSLLQCSTVPRR

SEQ ID NO: 61867 - protein, 16 aa, Artificial Sequence
  Description of Artificial Sequence: Synthetic peptide
  Seed: DPRMCSLMQGSTLPRR
DPRMFSLLQFSTFPRR

SEQ ID NO: 61868 - protein, 16 aa, Artificial Sequence
  Description of Artificial Sequence: Synthetic peptide
  Seed: DPRMCSLMQGSTLPRR
DPRMFSLLQFSTIPRR

SEQ ID NO: 61869 - protein, 16 aa, Artificial Sequence
  Description of Artificial Sequence: Synthetic peptide
  Seed: DPRMCSLMQGSTLPRR
DPRMFSLLQFSTLPRR

SEQ ID NO: 61870 - protein, 16 aa, Artificial Sequence
  Description of Artificial Sequence: Synthetic peptide
  Seed: DPRMCSLMQGSTLPRR
DPRMFSLLQFSTMPRR

SEQ ID NO: 61871 - protein, 16 aa, Artificial Sequence
  Description of Artificial Sequence: Synthetic peptide
  Seed: DPRMCSLMQGSTLPRR
DPRMFSLLQFSTVPRR

SEQ ID NO: 61872 - protein, 16 aa, Artificial Sequence
  Description of Artificial Sequence: Synthetic peptide
  Seed: DPRMCSLMQGSTLPRR
DPRMFSLLQGSTAPRR

SEQ ID NO: 61873 - protein, 16 aa, Artificial Sequence
  Description of Artificial Sequence: Synthetic peptide
  Seed: DPRMCSLMQGSTLPRR
DPRMFSLLQGSTCPRR

SEQ ID NO: 61874 - protein, 16 aa, Artificial Sequence
  Description of Artificial Sequence: Synthetic peptide
  Seed: DPRMCSLMQGSTLPRR
DPRMFSLLQGSTFPRR

SEQ ID NO: 61875 - protein, 16 aa, Artificial Sequence
  Description of Artificial Sequence: Synthetic peptide
  Seed: DPRMCSLMQGSTLPRR
DPRMFSLLQGSTGPRR

SEQ ID NO: 61876 - protein, 16 aa, Artificial Sequence
  Description of Artificial Sequence: Synthetic peptide
  Seed: DPRMCSLMQGSTLPRR
DPRMFSLLQGSTHPRR

SEQ ID NO: 61877 - protein, 16 aa, Artificial Sequence
  Description of Artificial Sequence: Synthetic peptide
  Seed: DPRMCSLMQGSTLPRR
DPRMFSLLQGSTIPRR

SEQ ID NO: 61878 - protein, 16 aa, Artificial Sequence
  Description of Artificial Sequence: Synthetic peptide
  Seed: DPRMCSLMQGSTLPRR
DPRMFSLLQGSTLPRR

SEQ ID NO: 61879 - protein, 16 aa, Artificial Sequence
  Description of Artificial Sequence: Synthetic peptide
  Seed: DPRMCSLMQGSTLPRR
DPRMFSLLQGSTMPRR

SEQ ID NO: 61880 - protein, 16 aa, Artificial Sequence
  Description of Artificial Sequence: Synthetic peptide
  Seed: DPRMCSLMQGSTLPRR
DPRMFSLLQGSTNPRR

SEQ ID NO: 61881 - protein, 16 aa, Artificial Sequence
  Description of Artificial Sequence: Synthetic peptide
  Seed: DPRMCSLMQGSTLPRR
DPRMFSLLQGSTPPRR

SEQ ID NO: 61882 - protein, 16 aa, Artificial Sequence
  Description of Artificial Sequence: Synthetic peptide
  Seed: DPRMCSLMQGSTLPRR
DPRMFSLLQGSTQPRR

SEQ ID NO: 61883 - protein, 16 aa, Artificial Sequence
  Description of Artificial Sequence: Synthetic peptide
  Seed: DPRMCSLMQGSTLPRR
DPRMFSLLQGSTSPRR

SEQ ID NO: 61884 - protein, 16 aa, Artificial Sequence
  Description of Artificial Sequence: Synthetic peptide
  Seed: DPRMCSLMQGSTLPRR
DPRMFSLLQGSTTPRR

SEQ ID NO: 61885 - protein, 16 aa, Artificial Sequence
  Description of Artificial Sequence: Synthetic peptide
  Seed: DPRMCSLMQGSTLPRR
DPRMFSLLQGSTVPRR

SEQ ID NO: 61886 - protein, 16 aa, Artificial Sequence
  Description of Artificial Sequence: Synthetic peptide
  Seed: DPRMCSLMQGSTLPRR
DPRMFSLLQGSTYPRR

SEQ ID NO: 61887 - protein, 16 aa, Artificial Sequence
  Description of Artificial Sequence: Synthetic peptide
  Seed: DPRMCSLMQGSTLPRR
DPRMFSLLQHSTIPRR

SEQ ID NO: 61888 - protein, 16 aa, Artificial Sequence
  Description of Artificial Sequence: Synthetic peptide
  Seed: DPRMCSLMQGSTLPRR
DPRMFSLLQHSTLPRR

SEQ ID NO: 61889 - protein, 16 aa, Artificial Sequence
  Description of Artificial Sequence: Synthetic peptide
  Seed: DPRMCSLMQGSTLPRR
DPRMFSLLQHSTVPRR

SEQ ID NO: 61890 - protein, 16 aa, Artificial Sequence
  Description of Artificial Sequence: Synthetic peptide
  Seed: DPRMCSLMQGSTLPRR
DPRMFSLLQISTAPRR

SEQ ID NO: 61891 - protein, 16 aa, Artificial Sequence
  Description of Artificial Sequence: Synthetic peptide
  Seed: DPRMCSLMQGSTLPRR
DPRMFSLLQISTGPRR

SEQ ID NO: 61892 - protein, 16 aa, Artificial Sequence
  Description of Artificial Sequence: Synthetic peptide
  Seed: DPRMCSLMQGSTLPRR
DPRMFSLLQISTHPRR

SEQ ID NO: 61893 - protein, 16 aa, Artificial Sequence
  Description of Artificial Sequence: Synthetic peptide
  Seed: DPRMCSLMQGSTLPRR
DPRMFSLLQISTIPRR

SEQ ID NO: 61894 - protein, 16 aa, Artificial Sequence
  Description of Artificial Sequence: Synthetic peptide
  Seed: DPRMCSLMQGSTLPRR
DPRMFSLLQISTLPRR

SEQ ID NO: 61895 - protein, 16 aa, Artificial Sequence
  Description of Artificial Sequence: Synthetic peptide
  Seed: DPRMCSLMQGSTLPRR
DPRMFSLLQISTMPRR

SEQ ID NO: 61896 - protein, 16 aa, Artificial Sequence
  Description of Artificial Sequence: Synthetic peptide
  Seed: DPRMCSLMQGSTLPRR
DPRMFSLLQISTNPRR

SEQ ID NO: 61897 - protein, 16 aa, Artificial Sequence
  Description of Artificial Sequence: Synthetic peptide
  Seed: DPRMCSLMQGSTLPRR
DPRMFSLLQISTPPRR

SEQ ID NO: 61898 - protein, 16 aa, Artificial Sequence
  Description of Artificial Sequence: Synthetic peptide
  Seed: DPRMCSLMQGSTLPRR
DPRMFSLLQISTQPRR

SEQ ID NO: 61899 - protein, 16 aa, Artificial Sequence
  Description of Artificial Sequence: Synthetic peptide
  Seed: DPRMCSLMQGSTLPRR
DPRMFSLLQISTSPRR

SEQ ID NO: 61900 - protein, 16 aa, Artificial Sequence
  Description of Artificial Sequence: Synthetic peptide
  Seed: DPRMCSLMQGSTLPRR
DPRMFSLLQISTTPRR

SEQ ID NO: 61901 - protein, 16 aa, Artificial Sequence
  Description of Artificial Sequence: Synthetic peptide
  Seed: DPRMCSLMQGSTLPRR
DPRMFSLLQISTVPRR

SEQ ID NO: 61902 - protein, 16 aa, Artificial Sequence
  Description of Artificial Sequence: Synthetic peptide
  Seed: DPRMCSLMQGSTLPRR
DPRMFSLLQLSTAPRR

SEQ ID NO: 61903 - protein, 16 aa, Artificial Sequence
  Description of Artificial Sequence: Synthetic peptide
  Seed: DPRMCSLMQGSTLPRR
DPRMFSLLQLSTIPRR

SEQ ID NO: 61904 - protein, 16 aa, Artificial Sequence
  Description of Artificial Sequence: Synthetic peptide
  Seed: DPRMCSLMQGSTLPRR
DPRMFSLLQLSTLPRR

SEQ ID NO: 61905 - protein, 16 aa, Artificial Sequence
  Description of Artificial Sequence: Synthetic peptide
  Seed: DPRMCSLMQGSTLPRR
DPRMFSLLQLSTMPRR

SEQ ID NO: 61906 - protein, 16 aa, Artificial Sequence
  Description of Artificial Sequence: Synthetic peptide
  Seed: DPRMCSLMQGSTLPRR
DPRMFSLLQLSTNPRR

SEQ ID NO: 61907 - protein, 16 aa, Artificial Sequence
  Description of Artificial Sequence: Synthetic peptide
  Seed: DPRMCSLMQGSTLPRR
DPRMFSLLQLSTSPRR

SEQ ID NO: 61908 - protein, 16 aa, Artificial Sequence
  Description of Artificial Sequence: Synthetic peptide
  Seed: DPRMCSLMQGSTLPRR
DPRMFSLLQLSTTPRR

SEQ ID NO: 61909 - protein, 16 aa, Artificial Sequence
  Description of Artificial Sequence: Synthetic peptide
  Seed: DPRMCSLMQGSTLPRR
DPRMFSLLQLSTVPRR

SEQ ID NO: 61910 - protein, 16 aa, Artificial Sequence
  Description of Artificial Sequence: Synthetic peptide
  Seed: DPRMCSLMQGSTLPRR
DPRMFSLLQMSTAPRR

SEQ ID NO: 61911 - protein, 16 aa, Artificial Sequence
  Description of Artificial Sequence: Synthetic peptide
  Seed: DPRMCSLMQGSTLPRR
DPRMFSLLQMSTIPRR

SEQ ID NO: 61912 - protein, 16 aa, Artificial Sequence
  Description of Artificial Sequence: Synthetic peptide
  Seed: DPRMCSLMQGSTLPRR
DPRMFSLLQMSTLPRR

SEQ ID NO: 61913 - protein, 16 aa, Artificial Sequence
  Description of Artificial Sequence: Synthetic peptide
  Seed: DPRMCSLMQGSTLPRR
DPRMFSLLQMSTMPRR

SEQ ID NO: 61914 - protein, 16 aa, Artificial Sequence
  Description of Artificial Sequence: Synthetic peptide
  Seed: DPRMCSLMQGSTLPRR
DPRMFSLLQMSTNPRR

SEQ ID NO: 61915 - protein, 16 aa, Artificial Sequence
  Description of Artificial Sequence: Synthetic peptide
  Seed: DPRMCSLMQGSTLPRR
DPRMFSLLQMSTSPRR

SEQ ID NO: 61916 - protein, 16 aa, Artificial Sequence
  Description of Artificial Sequence: Synthetic peptide
  Seed: DPRMCSLMQGSTLPRR
DPRMFSLLQMSTTPRR

SEQ ID NO: 61917 - protein, 16 aa, Artificial Sequence
  Description of Artificial Sequence: Synthetic peptide
  Seed: DPRMCSLMQGSTLPRR
DPRMFSLLQMSTVPRR

SEQ ID NO: 61918 - protein, 16 aa, Artificial Sequence
  Description of Artificial Sequence: Synthetic peptide
  Seed: DPRMCSLMQGSTLPRR
DPRMFSLLQNSTAPRR

SEQ ID NO: 61919 - protein, 16 aa, Artificial Sequence
  Description of Artificial Sequence: Synthetic peptide
  Seed: DPRMCSLMQGSTLPRR
DPRMFSLLQNSTFPRR

SEQ ID NO: 61920 - protein, 16 aa, Artificial Sequence
  Description of Artificial Sequence: Synthetic peptide
  Seed: DPRMCSLMQGSTLPRR
DPRMFSLLQNSTGPRR

SEQ ID NO: 61921 - protein, 16 aa, Artificial Sequence
  Description of Artificial Sequence: Synthetic peptide
  Seed: DPRMCSLMQGSTLPRR
DPRMFSLLQNSTIPRR

SEQ ID NO: 61922 - protein, 16 aa, Artificial Sequence
  Description of Artificial Sequence: Synthetic peptide
  Seed: DPRMCSLMQGSTLPRR
DPRMFSLLQNSTLPRR

SEQ ID NO: 61923 - protein, 16 aa, Artificial Sequence
  Description of Artificial Sequence: Synthetic peptide
  Seed: DPRMCSLMQGSTLPRR
DPRMFSLLQNSTMPRR

SEQ ID NO: 61924 - protein, 16 aa, Artificial Sequence
  Description of Artificial Sequence: Synthetic peptide
  Seed: DPRMCSLMQGSTLPRR
DPRMFSLLQNSTNPRR

SEQ ID NO: 61925 - protein, 16 aa, Artificial Sequence
  Description of Artificial Sequence: Synthetic peptide
  Seed: DPRMCSLMQGSTLPRR
DPRMFSLLQNSTSPRR

SEQ ID NO: 61926 - protein, 16 aa, Artificial Sequence
  Description of Artificial Sequence: Synthetic peptide
  Seed: DPRMCSLMQGSTLPRR
DPRMFSLLQNSTTPRR

SEQ ID NO: 61927 - protein, 16 aa, Artificial Sequence
  Description of Artificial Sequence: Synthetic peptide
  Seed: DPRMCSLMQGSTLPRR
DPRMFSLLQNSTVPRR

SEQ ID NO: 61928 - protein, 16 aa, Artificial Sequence
  Description of Artificial Sequence: Synthetic peptide
  Seed: DPRMCSLMQGSTLPRR
DPRMFSLLQPSTAPRR

SEQ ID NO: 61929 - protein, 16 aa, Artificial Sequence
  Description of Artificial Sequence: Synthetic peptide
  Seed: DPRMCSLMQGSTLPRR
DPRMFSLLQPSTCPRR

SEQ ID NO: 61930 - protein, 16 aa, Artificial Sequence
  Description of Artificial Sequence: Synthetic peptide
  Seed: DPRMCSLMQGSTLPRR
DPRMFSLLQPSTDPRR

SEQ ID NO: 61931 - protein, 16 aa, Artificial Sequence
  Description of Artificial Sequence: Synthetic peptide
  Seed: DPRMCSLMQGSTLPRR
DPRMFSLLQPSTEPRR

SEQ ID NO: 61932 - protein, 16 aa, Artificial Sequence
  Description of Artificial Sequence: Synthetic peptide
  Seed: DPRMCSLMQGSTLPRR
DPRMFSLLQPSTFPRR

SEQ ID NO: 61933 - protein, 16 aa, Artificial Sequence
  Description of Artificial Sequence: Synthetic peptide
  Seed: DPRMCSLMQGSTLPRR
DPRMFSLLQPSTGPRR

SEQ ID NO: 61934 - protein, 16 aa, Artificial Sequence
  Description of Artificial Sequence: Synthetic peptide
  Seed: DPRMCSLMQGSTLPRR
DPRMFSLLQPSTHPRR

SEQ ID NO: 61935 - protein, 16 aa, Artificial Sequence
  Description of Artificial Sequence: Synthetic peptide
  Seed: DPRMCSLMQGSTLPRR
DPRMFSLLQPSTIPRR

SEQ ID NO: 61936 - protein, 16 aa, Artificial Sequence
  Description of Artificial Sequence: Synthetic peptide
  Seed: DPRMCSLMQGSTLPRR
DPRMFSLLQPSTLPRR

SEQ ID NO: 61937 - protein, 16 aa, Artificial Sequence
  Description of Artificial Sequence: Synthetic peptide
  Seed: DPRMCSLMQGSTLPRR
DPRMFSLLQPSTMPRR

SEQ ID NO: 61938 - protein, 16 aa, Artificial Sequence
  Description of Artificial Sequence: Synthetic peptide
  Seed: DPRMCSLMQGSTLPRR
DPRMFSLLQPSTNPRR

SEQ ID NO: 61939 - protein, 16 aa, Artificial Sequence
  Description of Artificial Sequence: Synthetic peptide
  Seed: DPRMCSLMQGSTLPRR
DPRMFSLLQPSTPPRR

SEQ ID NO: 61940 - protein, 16 aa, Artificial Sequence
  Description of Artificial Sequence: Synthetic peptide
  Seed: DPRMCSLMQGSTLPRR
DPRMFSLLQPSTQPRR

SEQ ID NO: 61941 - protein, 16 aa, Artificial Sequence
  Description of Artificial Sequence: Synthetic peptide
  Seed: DPRMCSLMQGSTLPRR
DPRMFSLLQPSTSPRR

SEQ ID NO: 61942 - protein, 16 aa, Artificial Sequence
  Description of Artificial Sequence: Synthetic peptide
  Seed: DPRMCSLMQGSTLPRR
DPRMFSLLQPSTTPRR

SEQ ID NO: 61943 - protein, 16 aa, Artificial Sequence
  Description of Artificial Sequence: Synthetic peptide
  Seed: DPRMCSLMQGSTLPRR
DPRMFSLLQPSTVPRR

SEQ ID NO: 61944 - protein, 16 aa, Artificial Sequence
  Description of Artificial Sequence: Synthetic peptide
  Seed: DPRMCSLMQGSTLPRR
DPRMFSLLQPSTWPRR

SEQ ID NO: 61945 - protein, 16 aa, Artificial Sequence
  Description of Artificial Sequence: Synthetic peptide
  Seed: DPRMCSLMQGSTLPRR
DPRMFSLLQSSTAPRR

SEQ ID NO: 61946 - protein, 16 aa, Artificial Sequence
  Description of Artificial Sequence: Synthetic peptide
  Seed: DPRMCSLMQGSTLPRR
DPRMFSLLQSSTCPRR

SEQ ID NO: 61947 - protein, 16 aa, Artificial Sequence
  Description of Artificial Sequence: Synthetic peptide
  Seed: DPRMCSLMQGSTLPRR
DPRMFSLLQSSTFPRR

SEQ ID NO: 61948 - protein, 16 aa, Artificial Sequence
  Description of Artificial Sequence: Synthetic peptide
  Seed: DPRMCSLMQGSTLPRR
DPRMFSLLQSSTGPRR

SEQ ID NO: 61949 - protein, 16 aa, Artificial Sequence
  Description of Artificial Sequence: Synthetic peptide
  Seed: DPRMCSLMQGSTLPRR
DPRMFSLLQSSTHPRR

SEQ ID NO: 61950 - protein, 16 aa, Artificial Sequence
  Description of Artificial Sequence: Synthetic peptide
  Seed: DPRMCSLMQGSTLPRR
DPRMFSLLQSSTIPRR

SEQ ID NO: 61951 - protein, 16 aa, Artificial Sequence
  Description of Artificial Sequence: Synthetic peptide
  Seed: DPRMCSLMQGSTLPRR
DPRMFSLLQSSTLPRR

SEQ ID NO: 61952 - protein, 16 aa, Artificial Sequence
  Description of Artificial Sequence: Synthetic peptide
  Seed: DPRMCSLMQGSTLPRR
DPRMFSLLQSSTMPRR

SEQ ID NO: 61953 - protein, 16 aa, Artificial Sequence
  Description of Artificial Sequence: Synthetic peptide
  Seed: DPRMCSLMQGSTLPRR
DPRMFSLLQSSTNPRR

SEQ ID NO: 61954 - protein, 16 aa, Artificial Sequence
  Description of Artificial Sequence: Synthetic peptide
  Seed: DPRMCSLMQGSTLPRR
DPRMFSLLQSSTPPRR

SEQ ID NO: 61955 - protein, 16 aa, Artificial Sequence
  Description of Artificial Sequence: Synthetic peptide
  Seed: DPRMCSLMQGSTLPRR
DPRMFSLLQSSTQPRR

SEQ ID NO: 61956 - protein, 16 aa, Artificial Sequence
  Description of Artificial Sequence: Synthetic peptide
  Seed: DPRMCSLMQGSTLPRR
DPRMFSLLQSSTSPRR

SEQ ID NO: 61957 - protein, 16 aa, Artificial Sequence
  Description of Artificial Sequence: Synthetic peptide
  Seed: DPRMCSLMQGSTLPRR
DPRMFSLLQSSTTPRR

SEQ ID NO: 61958 - protein, 16 aa, Artificial Sequence
  Description of Artificial Sequence: Synthetic peptide
  Seed: DPRMCSLMQGSTLPRR
DPRMFSLLQSSTVPRR

SEQ ID NO: 61959 - protein, 16 aa, Artificial Sequence
  Description of Artificial Sequence: Synthetic peptide
  Seed: DPRMCSLMQGSTLPRR
DPRMFSLLQTSTAPRR

SEQ ID NO: 61960 - protein, 16 aa, Artificial Sequence
  Description of Artificial Sequence: Synthetic peptide
  Seed: DPRMCSLMQGSTLPRR
DPRMFSLLQTSTCPRR

SEQ ID NO: 61961 - protein, 16 aa, Artificial Sequence
  Description of Artificial Sequence: Synthetic peptide
  Seed: DPRMCSLMQGSTLPRR
DPRMFSLLQTSTGPRR

SEQ ID NO: 61962 - protein, 16 aa, Artificial Sequence
  Description of Artificial Sequence: Synthetic peptide
  Seed: DPRMCSLMQGSTLPRR
DPRMFSLLQTSTHPRR

SEQ ID NO: 61963 - protein, 16 aa, Artificial Sequence
  Description of Artificial Sequence: Synthetic peptide
  Seed: DPRMCSLMQGSTLPRR
DPRMFSLLQTSTIPRR

SEQ ID NO: 61964 - protein, 16 aa, Artificial Sequence
  Description of Artificial Sequence: Synthetic peptide
  Seed: DPRMCSLMQGSTLPRR
DPRMFSLLQTSTLPRR

SEQ ID NO: 61965 - protein, 16 aa, Artificial Sequence
  Description of Artificial Sequence: Synthetic peptide
  Seed: DPRMCSLMQGSTLPRR
DPRMFSLLQTSTMPRR

SEQ ID NO: 61966 - protein, 16 aa, Artificial Sequence
  Description of Artificial Sequence: Synthetic peptide
  Seed: DPRMCSLMQGSTLPRR
DPRMFSLLQTSTNPRR

SEQ ID NO: 61967 - protein, 16 aa, Artificial Sequence
  Description of Artificial Sequence: Synthetic peptide
  Seed: DPRMCSLMQGSTLPRR
DPRMFSLLQTSTPPRR

SEQ ID NO: 61968 - protein, 16 aa, Artificial Sequence
  Description of Artificial Sequence: Synthetic peptide
  Seed: DPRMCSLMQGSTLPRR
DPRMFSLLQTSTQPRR

SEQ ID NO: 61969 - protein, 16 aa, Artificial Sequence
  Description of Artificial Sequence: Synthetic peptide
  Seed: DPRMCSLMQGSTLPRR
DPRMFSLLQTSTSPRR

SEQ ID NO: 61970 - protein, 16 aa, Artificial Sequence
  Description of Artificial Sequence: Synthetic peptide
  Seed: DPRMCSLMQGSTLPRR
DPRMFSLLQTSTTPRR

SEQ ID NO: 61971 - protein, 16 aa, Artificial Sequence
  Description of Artificial Sequence: Synthetic peptide
  Seed: DPRMCSLMQGSTLPRR
DPRMFSLLQTSTVPRR

SEQ ID NO: 61972 - protein, 16 aa, Artificial Sequence
  Description of Artificial Sequence: Synthetic peptide
  Seed: DPRMCSLMQGSTLPRR
DPRMFSLLQVSTAPRR

SEQ ID NO: 61973 - protein, 16 aa, Artificial Sequence
  Description of Artificial Sequence: Synthetic peptide
  Seed: DPRMCSLMQGSTLPRR
DPRMFSLLQVSTDPRR

SEQ ID NO: 61974 - protein, 16 aa, Artificial Sequence
  Description of Artificial Sequence: Synthetic peptide
  Seed: DPRMCSLMQGSTLPRR
DPRMFSLLQVSTEPRR

SEQ ID NO: 61975 - protein, 16 aa, Artificial Sequence
  Description of Artificial Sequence: Synthetic peptide
  Seed: DPRMCSLMQGSTLPRR
DPRMFSLLQVSTGPRR

SEQ ID NO: 61976 - protein, 16 aa, Artificial Sequence
  Description of Artificial Sequence: Synthetic peptide
  Seed: DPRMCSLMQGSTLPRR
DPRMFSLLQVSTHPRR

SEQ ID NO: 61977 - protein, 16 aa, Artificial Sequence
  Description of Artificial Sequence: Synthetic peptide
  Seed: DPRMCSLMQGSTLPRR
DPRMFSLLQVSTIPRR

SEQ ID NO: 61978 - protein, 16 aa, Artificial Sequence
  Description of Artificial Sequence: Synthetic peptide
  Seed: DPRMCSLMQGSTLPRR
DPRMFSLLQVSTLPRR

SEQ ID NO: 61979 - protein, 16 aa, Artificial Sequence
  Description of Artificial Sequence: Synthetic peptide
  Seed: DPRMCSLMQGSTLPRR
DPRMFSLLQVSTMPRR

SEQ ID NO: 61980 - protein, 16 aa, Artificial Sequence
  Description of Artificial Sequence: Synthetic peptide
  Seed: DPRMCSLMQGSTLPRR
DPRMFSLLQVSTNPRR

SEQ ID NO: 61981 - protein, 16 aa, Artificial Sequence
  Description of Artificial Sequence: Synthetic peptide
  Seed: DPRMCSLMQGSTLPRR
DPRMFSLLQVSTPPRR

SEQ ID NO: 61982 - protein, 16 aa, Artificial Sequence
  Description of Artificial Sequence: Synthetic peptide
  Seed: DPRMCSLMQGSTLPRR
DPRMFSLLQVSTQPRR

SEQ ID NO: 61983 - protein, 16 aa, Artificial Sequence
  Description of Artificial Sequence: Synthetic peptide
  Seed: DPRMCSLMQGSTLPRR
DPRMFSLLQVSTSPRR

SEQ ID NO: 61984 - protein, 16 aa, Artificial Sequence
  Description of Artificial Sequence: Synthetic peptide
  Seed: DPRMCSLMQGSTLPRR
DPRMFSLLQVSTTPRR

SEQ ID NO: 61985 - protein, 16 aa, Artificial Sequence
  Description of Artificial Sequence: Synthetic peptide
  Seed: DPRMCSLMQGSTLPRR
DPRMFSLLQVSTVPRR

SEQ ID NO: 61986 - protein, 16 aa, Artificial Sequence
  Description of Artificial Sequence: Synthetic peptide
  Seed: DPRMCSLMQGSTLPRR
DPRMFSLMQASTAPRR

SEQ ID NO: 61987 - protein, 16 aa, Artificial Sequence
  Description of Artificial Sequence: Synthetic peptide
  Seed: DPRMCSLMQGSTLPRR
DPRMFSLMQASTCPRR

SEQ ID NO: 61988 - protein, 16 aa, Artificial Sequence
  Description of Artificial Sequence: Synthetic peptide
  Seed: DPRMCSLMQGSTLPRR
DPRMFSLMQASTDPRR

SEQ ID NO: 61989 - protein, 16 aa, Artificial Sequence
  Description of Artificial Sequence: Synthetic peptide
  Seed: DPRMCSLMQGSTLPRR
DPRMFSLMQASTEPRR

SEQ ID NO: 61990 - protein, 16 aa, Artificial Sequence
  Description of Artificial Sequence: Synthetic peptide
  Seed: DPRMCSLMQGSTLPRR
DPRMFSLMQASTFPRR

SEQ ID NO: 61991 - protein, 16 aa, Artificial Sequence
  Description of Artificial Sequence: Synthetic peptide
  Seed: DPRMCSLMQGSTLPRR
DPRMFSLMQASTGPRR

SEQ ID NO: 61992 - protein, 16 aa, Artificial Sequence
  Description of Artificial Sequence: Synthetic peptide
  Seed: DPRMCSLMQGSTLPRR
DPRMFSLMQASTHPRR

SEQ ID NO: 61993 - protein, 16 aa, Artificial Sequence
  Description of Artificial Sequence: Synthetic peptide
  Seed: DPRMCSLMQGSTLPRR
DPRMFSLMQASTIPRR

SEQ ID NO: 61994 - protein, 16 aa, Artificial Sequence
  Description of Artificial Sequence: Synthetic peptide
  Seed: DPRMCSLMQGSTLPRR
DPRMFSLMQASTKPRR

SEQ ID NO: 61995 - protein, 16 aa, Artificial Sequence
  Description of Artificial Sequence: Synthetic peptide
  Seed: DPRMCSLMQGSTLPRR
DPRMFSLMQASTLPRR

SEQ ID NO: 61996 - protein, 16 aa, Artificial Sequence
  Description of Artificial Sequence: Synthetic peptide
  Seed: DPRMCSLMQGSTLPRR
DPRMFSLMQASTMPRR

SEQ ID NO: 61997 - protein, 16 aa, Artificial Sequence
  Description of Artificial Sequence: Synthetic peptide
  Seed: DPRMCSLMQGSTLPRR
DPRMFSLMQASTNPRR

SEQ ID NO: 61998 - protein, 16 aa, Artificial Sequence
  Description of Artificial Sequence: Synthetic peptide
  Seed: DPRMCSLMQGSTLPRR
DPRMFSLMQASTPPRR

SEQ ID NO: 61999 - protein, 16 aa, Artificial Sequence
  Description of Artificial Sequence: Synthetic peptide
  Seed: DPRMCSLMQGSTLPRR
DPRMFSLMQASTQPRR

SEQ ID NO: 62000 - protein, 16 aa, Artificial Sequence
  Description of Artificial Sequence: Synthetic peptide
  Seed: DPRMCSLMQGSTLPRR
DPRMFSLMQASTRPRR

SEQ ID NO: 62001 - protein, 16 aa, Artificial Sequence
  Description of Artificial Sequence: Synthetic peptide
  Seed: DPRMCSLMQGSTLPRR
DPRMFSLMQASTSPRR

SEQ ID NO: 62002 - protein, 16 aa, Artificial Sequence
  Description of Artificial Sequence: Synthetic peptide
  Seed: DPRMCSLMQGSTLPRR
DPRMFSLMQASTTPRR

SEQ ID NO: 62003 - protein, 16 aa, Artificial Sequence
  Description of Artificial Sequence: Synthetic peptide
  Seed: DPRMCSLMQGSTLPRR
DPRMFSLMQASTVPRR

SEQ ID NO: 62004 - protein, 16 aa, Artificial Sequence
  Description of Artificial Sequence: Synthetic peptide
  Seed: DPRMCSLMQGSTLPRR
DPRMFSLMQASTWPRR

SEQ ID NO: 62005 - protein, 16 aa, Artificial Sequence
  Description of Artificial Sequence: Synthetic peptide
  Seed: DPRMCSLMQGSTLPRR
DPRMFSLMQASTYPRR

SEQ ID NO: 62006 - protein, 16 aa, Artificial Sequence
  Description of Artificial Sequence: Synthetic peptide
  Seed: DPRMCSLMQGSTLPRR
DPRMFSLMQCSTAPRR

SEQ ID NO: 62007 - protein, 16 aa, Artificial Sequence
  Description of Artificial Sequence: Synthetic peptide
  Seed: DPRMCSLMQGSTLPRR
DPRMFSLMQCSTIPRR

SEQ ID NO: 62008 - protein, 16 aa, Artificial Sequence
  Description of Artificial Sequence: Synthetic peptide
  Seed: DPRMCSLMQGSTLPRR
DPRMFSLMQCSTLPRR

SEQ ID NO: 62009 - protein, 16 aa, Artificial Sequence
  Description of Artificial Sequence: Synthetic peptide
  Seed: DPRMCSLMQGSTLPRR
DPRMFSLMQCSTVPRR

SEQ ID NO: 62010 - protein, 16 aa, Artificial Sequence
  Description of Artificial Sequence: Synthetic peptide
  Seed: DPRMCSLMQGSTLPRR
DPRMFSLMQFSTLPRR

SEQ ID NO: 62011 - protein, 16 aa, Artificial Sequence
  Description of Artificial Sequence: Synthetic peptide
  Seed: DPRMCSLMQGSTLPRR
DPRMFSLMQGSTAPRR

SEQ ID NO: 62012 - protein, 16 aa, Artificial Sequence
  Description of Artificial Sequence: Synthetic peptide
  Seed: DPRMCSLMQGSTLPRR
DPRMFSLMQGSTCPRR

SEQ ID NO: 62013 - protein, 16 aa, Artificial Sequence
  Description of Artificial Sequence: Synthetic peptide
  Seed: DPRMCSLMQGSTLPRR
DPRMFSLMQGSTFPRR

SEQ ID NO: 62014 - protein, 16 aa, Artificial Sequence
  Description of Artificial Sequence: Synthetic peptide
  Seed: DPRMCSLMQGSTLPRR
DPRMFSLMQGSTGPRR

SEQ ID NO: 62015 - protein, 16 aa, Artificial Sequence
  Description of Artificial Sequence: Synthetic peptide
  Seed: DPRMCSLMQGSTLPRR
DPRMFSLMQGSTHPRR

SEQ ID NO: 62016 - protein, 16 aa, Artificial Sequence
  Description of Artificial Sequence: Synthetic peptide
  Seed: DPRMCSLMQGSTLPRR
DPRMFSLMQGSTIPRR

SEQ ID NO: 62017 - protein, 16 aa, Artificial Sequence
  Description of Artificial Sequence: Synthetic peptide
  Seed: DPRMCSLMQGSTLPRR
DPRMFSLMQGSTLPRR

SEQ ID NO: 62018 - protein, 16 aa, Artificial Sequence
  Description of Artificial Sequence: Synthetic peptide
  Seed: DPRMCSLMQGSTLPRR
DPRMFSLMQGSTMPRR

SEQ ID NO: 62019 - protein, 16 aa, Artificial Sequence
  Description of Artificial Sequence: Synthetic peptide
  Seed: DPRMCSLMQGSTLPRR
DPRMFSLMQGSTNPRR

SEQ ID NO: 62020 - protein, 16 aa, Artificial Sequence
  Description of Artificial Sequence: Synthetic peptide
  Seed: DPRMCSLMQGSTLPRR
DPRMFSLMQGSTPPRR

SEQ ID NO: 62021 - protein, 16 aa, Artificial Sequence
  Description of Artificial Sequence: Synthetic peptide
  Seed: DPRMCSLMQGSTLPRR
DPRMFSLMQGSTQPRR

SEQ ID NO: 62022 - protein, 16 aa, Artificial Sequence
  Description of Artificial Sequence: Synthetic peptide
  Seed: DPRMCSLMQGSTLPRR
DPRMFSLMQGSTSPRR

SEQ ID NO: 62023 - protein, 16 aa, Artificial Sequence
  Description of Artificial Sequence: Synthetic peptide
  Seed: DPRMCSLMQGSTLPRR
DPRMFSLMQGSTTPRR

SEQ ID NO: 62024 - protein, 16 aa, Artificial Sequence
  Description of Artificial Sequence: Synthetic peptide
  Seed: DPRMCSLMQGSTLPRR
DPRMFSLMQGSTVPRR

SEQ ID NO: 62025 - protein, 16 aa, Artificial Sequence
  Description of Artificial Sequence: Synthetic peptide
  Seed: DPRMCSLMQGSTLPRR
DPRMFSLMQGSTYPRR

SEQ ID NO: 62026 - protein, 16 aa, Artificial Sequence
  Description of Artificial Sequence: Synthetic peptide
  Seed: DPRMCSLMQGSTLPRR
DPRMFSLMQHSTAPRR

SEQ ID NO: 62027 - protein, 16 aa, Artificial Sequence
  Description of Artificial Sequence: Synthetic peptide
  Seed: DPRMCSLMQGSTLPRR
DPRMFSLMQHSTIPRR

SEQ ID NO: 62028 - protein, 16 aa, Artificial Sequence
  Description of Artificial Sequence: Synthetic peptide
  Seed: DPRMCSLMQGSTLPRR
DPRMFSLMQHSTLPRR

SEQ ID NO: 62029 - protein, 16 aa, Artificial Sequence
  Description of Artificial Sequence: Synthetic peptide
  Seed: DPRMCSLMQGSTLPRR
DPRMFSLMQHSTVPRR

SEQ ID NO: 62030 - protein, 16 aa, Artificial Sequence
  Description of Artificial Sequence: Synthetic peptide
  Seed: DPRMCSLMQGSTLPRR
DPRMFSLMQISTAPRR

SEQ ID NO: 62031 - protein, 16 aa, Artificial Sequence
  Description of Artificial Sequence: Synthetic peptide
  Seed: DPRMCSLMQGSTLPRR
DPRMFSLMQISTGPRR

SEQ ID NO: 62032 - protein, 16 aa, Artificial Sequence
  Description of Artificial Sequence: Synthetic peptide
  Seed: DPRMCSLMQGSTLPRR
DPRMFSLMQISTHPRR

SEQ ID NO: 62033 - protein, 16 aa, Artificial Sequence
  Description of Artificial Sequence: Synthetic peptide
  Seed: DPRMCSLMQGSTLPRR
DPRMFSLMQISTIPRR

SEQ ID NO: 62034 - protein, 16 aa, Artificial Sequence
  Description of Artificial Sequence: Synthetic peptide
  Seed: DPRMCSLMQGSTLPRR
DPRMFSLMQISTLPRR

SEQ ID NO: 62035 - protein, 16 aa, Artificial Sequence
  Description of Artificial Sequence: Synthetic peptide
  Seed: DPRMCSLMQGSTLPRR
DPRMFSLMQISTMPRR

SEQ ID NO: 62036 - protein, 16 aa, Artificial Sequence
  Description of Artificial Sequence: Synthetic peptide
  Seed: DPRMCSLMQGSTLPRR
DPRMFSLMQISTNPRR

SEQ ID NO: 62037 - protein, 16 aa, Artificial Sequence
  Description of Artificial Sequence: Synthetic peptide
  Seed: DPRMCSLMQGSTLPRR
DPRMFSLMQISTPPRR

SEQ ID NO: 62038 - protein, 16 aa, Artificial Sequence
  Description of Artificial Sequence: Synthetic peptide
  Seed: DPRMCSLMQGSTLPRR
DPRMFSLMQISTQPRR

SEQ ID NO: 62039 - protein, 16 aa, Artificial Sequence
  Description of Artificial Sequence: Synthetic peptide
  Seed: DPRMCSLMQGSTLPRR
DPRMFSLMQISTSPRR

SEQ ID NO: 62040 - protein, 16 aa, Artificial Sequence
  Description of Artificial Sequence: Synthetic peptide
  Seed: DPRMCSLMQGSTLPRR
DPRMFSLMQISTTPRR

SEQ ID NO: 62041 - protein, 16 aa, Artificial Sequence
  Description of Artificial Sequence: Synthetic peptide
  Seed: DPRMCSLMQGSTLPRR
DPRMFSLMQISTVPRR

SEQ ID NO: 62042 - protein, 16 aa, Artificial Sequence
  Description of Artificial Sequence: Synthetic peptide
  Seed: DPRMCSLMQGSTLPRR
DPRMFSLMQLSTAPRR

SEQ ID NO: 62043 - protein, 16 aa, Artificial Sequence
  Description of Artificial Sequence: Synthetic peptide
  Seed: DPRMCSLMQGSTLPRR
DPRMFSLMQLSTHPRR

SEQ ID NO: 62044 - protein, 16 aa, Artificial Sequence
  Description of Artificial Sequence: Synthetic peptide
  Seed: DPRMCSLMQGSTLPRR
DPRMFSLMQLSTIPRR

SEQ ID NO: 62045 - protein, 16 aa, Artificial Sequence
  Description of Artificial Sequence: Synthetic peptide
  Seed: DPRMCSLMQGSTLPRR
DPRMFSLMQLSTLPRR

SEQ ID NO: 62046 - protein, 16 aa, Artificial Sequence
  Description of Artificial Sequence: Synthetic peptide
  Seed: DPRMCSLMQGSTLPRR
DPRMFSLMQLSTMPRR

SEQ ID NO: 62047 - protein, 16 aa, Artificial Sequence
  Description of Artificial Sequence: Synthetic peptide
  Seed: DPRMCSLMQGSTLPRR
DPRMFSLMQLSTNPRR

SEQ ID NO: 62048 - protein, 16 aa, Artificial Sequence
  Description of Artificial Sequence: Synthetic peptide
  Seed: DPRMCSLMQGSTLPRR
DPRMFSLMQLSTSPRR

SEQ ID NO: 62049 - protein, 16 aa, Artificial Sequence
  Description of Artificial Sequence: Synthetic peptide
  Seed: DPRMCSLMQGSTLPRR
DPRMFSLMQLSTTPRR

SEQ ID NO: 62050 - protein, 16 aa, Artificial Sequence
  Description of Artificial Sequence: Synthetic peptide
  Seed: DPRMCSLMQGSTLPRR
DPRMFSLMQLSTVPRR

SEQ ID NO: 62051 - protein, 16 aa, Artificial Sequence
  Description of Artificial Sequence: Synthetic peptide
  Seed: DPRMCSLMQGSTLPRR
DPRMFSLMQMSTAPRR

SEQ ID NO: 62052 - protein, 16 aa, Artificial Sequence
  Description of Artificial Sequence: Synthetic peptide
  Seed: DPRMCSLMQGSTLPRR
DPRMFSLMQMSTHPRR

SEQ ID NO: 62053 - protein, 16 aa, Artificial Sequence
  Description of Artificial Sequence: Synthetic peptide
  Seed: DPRMCSLMQGSTLPRR
DPRMFSLMQMSTIPRR

SEQ ID NO: 62054 - protein, 16 aa, Artificial Sequence
  Description of Artificial Sequence: Synthetic peptide
  Seed: DPRMCSLMQGSTLPRR
DPRMFSLMQMSTLPRR

SEQ ID NO: 62055 - protein, 16 aa, Artificial Sequence
  Description of Artificial Sequence: Synthetic peptide
  Seed: DPRMCSLMQGSTLPRR
DPRMFSLMQMSTMPRR

SEQ ID NO: 62056 - protein, 16 aa, Artificial Sequence
  Description of Artificial Sequence: Synthetic peptide
  Seed: DPRMCSLMQGSTLPRR
DPRMFSLMQMSTNPRR

SEQ ID NO: 62057 - protein, 16 aa, Artificial Sequence
  Description of Artificial Sequence: Synthetic peptide
  Seed: DPRMCSLMQGSTLPRR
DPRMFSLMQMSTSPRR

SEQ ID NO: 62058 - protein, 16 aa, Artificial Sequence
  Description of Artificial Sequence: Synthetic peptide
  Seed: DPRMCSLMQGSTLPRR
DPRMFSLMQMSTTPRR

SEQ ID NO: 62059 - protein, 16 aa, Artificial Sequence
  Description of Artificial Sequence: Synthetic peptide
  Seed: DPRMCSLMQGSTLPRR
DPRMFSLMQMSTVPRR

SEQ ID NO: 62060 - protein, 16 aa, Artificial Sequence
  Description of Artificial Sequence: Synthetic peptide
  Seed: DPRMCSLMQGSTLPRR
DPRMFSLMQNSTAPRR

SEQ ID NO: 62061 - protein, 16 aa, Artificial Sequence
  Description of Artificial Sequence: Synthetic peptide
  Seed: DPRMCSLMQGSTLPRR
DPRMFSLMQNSTFPRR

SEQ ID NO: 62062 - protein, 16 aa, Artificial Sequence
  Description of Artificial Sequence: Synthetic peptide
  Seed: DPRMCSLMQGSTLPRR
DPRMFSLMQNSTGPRR

SEQ ID NO: 62063 - protein, 16 aa, Artificial Sequence
  Description of Artificial Sequence: Synthetic peptide
  Seed: DPRMCSLMQGSTLPRR
DPRMFSLMQNSTHPRR

SEQ ID NO: 62064 - protein, 16 aa, Artificial Sequence
  Description of Artificial Sequence: Synthetic peptide
  Seed: DPRMCSLMQGSTLPRR
DPRMFSLMQNSTIPRR

SEQ ID NO: 62065 - protein, 16 aa, Artificial Sequence
  Description of Artificial Sequence: Synthetic peptide
  Seed: DPRMCSLMQGSTLPRR
DPRMFSLMQNSTLPRR

SEQ ID NO: 62066 - protein, 16 aa, Artificial Sequence
  Description of Artificial Sequence: Synthetic peptide
  Seed: DPRMCSLMQGSTLPRR
DPRMFSLMQNSTMPRR

SEQ ID NO: 62067 - protein, 16 aa, Artificial Sequence
  Description of Artificial Sequence: Synthetic peptide
  Seed: DPRMCSLMQGSTLPRR
DPRMFSLMQNSTNPRR

SEQ ID NO: 62068 - protein, 16 aa, Artificial Sequence
  Description of Artificial Sequence: Synthetic peptide
  Seed: DPRMCSLMQGSTLPRR
DPRMFSLMQNSTSPRR

SEQ ID NO: 62069 - protein, 16 aa, Artificial Sequence
  Description of Artificial Sequence: Synthetic peptide
  Seed: DPRMCSLMQGSTLPRR
DPRMFSLMQNSTTPRR

SEQ ID NO: 62070 - protein, 16 aa, Artificial Sequence
  Description of Artificial Sequence: Synthetic peptide
  Seed: DPRMCSLMQGSTLPRR
DPRMFSLMQNSTVPRR

SEQ ID NO: 62071 - protein, 16 aa, Artificial Sequence
  Description of Artificial Sequence: Synthetic peptide
  Seed: DPRMCSLMQGSTLPRR
DPRMFSLMQPSTAPRR

SEQ ID NO: 62072 - protein, 16 aa, Artificial Sequence
  Description of Artificial Sequence: Synthetic peptide
  Seed: DPRMCSLMQGSTLPRR
DPRMFSLMQPSTCPRR

SEQ ID NO: 62073 - protein, 16 aa, Artificial Sequence
  Description of Artificial Sequence: Synthetic peptide
  Seed: DPRMCSLMQGSTLPRR
DPRMFSLMQPSTDPRR

SEQ ID NO: 62074 - protein, 16 aa, Artificial Sequence
  Description of Artificial Sequence: Synthetic peptide
  Seed: DPRMCSLMQGSTLPRR
DPRMFSLMQPSTEPRR

SEQ ID NO: 62075 - protein, 16 aa, Artificial Sequence
  Description of Artificial Sequence: Synthetic peptide
  Seed: DPRMCSLMQGSTLPRR
DPRMFSLMQPSTFPRR

SEQ ID NO: 62076 - protein, 16 aa, Artificial Sequence
  Description of Artificial Sequence: Synthetic peptide
  Seed: DPRMCSLMQGSTLPRR
DPRMFSLMQPSTGPRR

SEQ ID NO: 62077 - protein, 16 aa, Artificial Sequence
  Description of Artificial Sequence: Synthetic peptide
  Seed: DPRMCSLMQGSTLPRR
DPRMFSLMQPSTHPRR

SEQ ID NO: 62078 - protein, 16 aa, Artificial Sequence
  Description of Artificial Sequence: Synthetic peptide
  Seed: DPRMCSLMQGSTLPRR
DPRMFSLMQPSTIPRR

SEQ ID NO: 62079 - protein, 16 aa, Artificial Sequence
  Description of Artificial Sequence: Synthetic peptide
  Seed: DPRMCSLMQGSTLPRR
DPRMFSLMQPSTLPRR

SEQ ID NO: 62080 - protein, 16 aa, Artificial Sequence
  Description of Artificial Sequence: Synthetic peptide
  Seed: DPRMCSLMQGSTLPRR
DPRMFSLMQPSTMPRR

SEQ ID NO: 62081 - protein, 16 aa, Artificial Sequence
  Description of Artificial Sequence: Synthetic peptide
  Seed: DPRMCSLMQGSTLPRR
DPRMFSLMQPSTNPRR

SEQ ID NO: 62082 - protein, 16 aa, Artificial Sequence
  Description of Artificial Sequence: Synthetic peptide
  Seed: DPRMCSLMQGSTLPRR
DPRMFSLMQPSTPPRR

SEQ ID NO: 62083 - protein, 16 aa, Artificial Sequence
  Description of Artificial Sequence: Synthetic peptide
  Seed: DPRMCSLMQGSTLPRR
DPRMFSLMQPSTQPRR

SEQ ID NO: 62084 - protein, 16 aa, Artificial Sequence
  Description of Artificial Sequence: Synthetic peptide
  Seed: DPRMCSLMQGSTLPRR
DPRMFSLMQPSTSPRR

SEQ ID NO: 62085 - protein, 16 aa, Artificial Sequence
  Description of Artificial Sequence: Synthetic peptide
  Seed: DPRMCSLMQGSTLPRR
DPRMFSLMQPSTTPRR

SEQ ID NO: 62086 - protein, 16 aa, Artificial Sequence
  Description of Artificial Sequence: Synthetic peptide
  Seed: DPRMCSLMQGSTLPRR
DPRMFSLMQPSTVPRR

SEQ ID NO: 62087 - protein, 16 aa, Artificial Sequence
  Description of Artificial Sequence: Synthetic peptide
  Seed: DPRMCSLMQGSTLPRR
DPRMFSLMQPSTWPRR

SEQ ID NO: 62088 - protein, 16 aa, Artificial Sequence
  Description of Artificial Sequence: Synthetic peptide
  Seed: DPRMCSLMQGSTLPRR
DPRMFSLMQQSTLPRR

SEQ ID NO: 62089 - protein, 16 aa, Artificial Sequence
  Description of Artificial Sequence: Synthetic peptide
  Seed: DPRMCSLMQGSTLPRR
DPRMFSLMQQSTVPRR

SEQ ID NO: 62090 - protein, 16 aa, Artificial Sequence
  Description of Artificial Sequence: Synthetic peptide
  Seed: DPRMCSLMQGSTLPRR
DPRMFSLMQSSTAPRR

SEQ ID NO: 62091 - protein, 16 aa, Artificial Sequence
  Description of Artificial Sequence: Synthetic peptide
  Seed: DPRMCSLMQGSTLPRR
DPRMFSLMQSSTCPRR

SEQ ID NO: 62092 - protein, 16 aa, Artificial Sequence
  Description of Artificial Sequence: Synthetic peptide
  Seed: DPRMCSLMQGSTLPRR
DPRMFSLMQSSTFPRR

SEQ ID NO: 62093 - protein, 16 aa, Artificial Sequence
  Description of Artificial Sequence: Synthetic peptide
  Seed: DPRMCSLMQGSTLPRR
DPRMFSLMQSSTGPRR

SEQ ID NO: 62094 - protein, 16 aa, Artificial Sequence
  Description of Artificial Sequence: Synthetic peptide
  Seed: DPRMCSLMQGSTLPRR
DPRMFSLMQSSTHPRR

SEQ ID NO: 62095 - protein, 16 aa, Artificial Sequence
  Description of Artificial Sequence: Synthetic peptide
  Seed: DPRMCSLMQGSTLPRR
DPRMFSLMQSSTIPRR

SEQ ID NO: 62096 - protein, 16 aa, Artificial Sequence
  Description of Artificial Sequence: Synthetic peptide
  Seed: DPRMCSLMQGSTLPRR
DPRMFSLMQSSTLPRR

SEQ ID NO: 62097 - protein, 16 aa, Artificial Sequence
  Description of Artificial Sequence: Synthetic peptide
  Seed: DPRMCSLMQGSTLPRR
DPRMFSLMQSSTMPRR

SEQ ID NO: 62098 - protein, 16 aa, Artificial Sequence
  Description of Artificial Sequence: Synthetic peptide
  Seed: DPRMCSLMQGSTLPRR
DPRMFSLMQSSTNPRR

SEQ ID NO: 62099 - protein, 16 aa, Artificial Sequence
  Description of Artificial Sequence: Synthetic peptide
  Seed: DPRMCSLMQGSTLPRR
DPRMFSLMQSSTPPRR

SEQ ID NO: 62100 - protein, 16 aa, Artificial Sequence
  Description of Artificial Sequence: Synthetic peptide
  Seed: DPRMCSLMQGSTLPRR
DPRMFSLMQSSTQPRR

SEQ ID NO: 62101 - protein, 16 aa, Artificial Sequence
  Description of Artificial Sequence: Synthetic peptide
  Seed: DPRMCSLMQGSTLPRR
DPRMFSLMQSSTSPRR

SEQ ID NO: 62102 - protein, 16 aa, Artificial Sequence
  Description of Artificial Sequence: Synthetic peptide
  Seed: DPRMCSLMQGSTLPRR
DPRMFSLMQSSTTPRR

SEQ ID NO: 62103 - protein, 16 aa, Artificial Sequence
  Description of Artificial Sequence: Synthetic peptide
  Seed: DPRMCSLMQGSTLPRR
DPRMFSLMQSSTVPRR

SEQ ID NO: 62104 - protein, 16 aa, Artificial Sequence
  Description of Artificial Sequence: Synthetic peptide
  Seed: DPRMCSLMQGSTLPRR
DPRMFSLMQTSTAPRR

SEQ ID NO: 62105 - protein, 16 aa, Artificial Sequence
  Description of Artificial Sequence: Synthetic peptide
  Seed: DPRMCSLMQGSTLPRR
DPRMFSLMQTSTGPRR

SEQ ID NO: 62106 - protein, 16 aa, Artificial Sequence
  Description of Artificial Sequence: Synthetic peptide
  Seed: DPRMCSLMQGSTLPRR
DPRMFSLMQTSTHPRR

SEQ ID NO: 62107 - protein, 16 aa, Artificial Sequence
  Description of Artificial Sequence: Synthetic peptide
  Seed: DPRMCSLMQGSTLPRR
DPRMFSLMQTSTIPRR

SEQ ID NO: 62108 - protein, 16 aa, Artificial Sequence
  Description of Artificial Sequence: Synthetic peptide
  Seed: DPRMCSLMQGSTLPRR
DPRMFSLMQTSTLPRR

SEQ ID NO: 62109 - protein, 16 aa, Artificial Sequence
  Description of Artificial Sequence: Synthetic peptide
  Seed: DPRMCSLMQGSTLPRR
DPRMFSLMQTSTMPRR

SEQ ID NO: 62110 - protein, 16 aa, Artificial Sequence
  Description of Artificial Sequence: Synthetic peptide
  Seed: DPRMCSLMQGSTLPRR
DPRMFSLMQTSTNPRR

SEQ ID NO: 62111 - protein, 16 aa, Artificial Sequence
  Description of Artificial Sequence: Synthetic peptide
  Seed: DPRMCSLMQGSTLPRR
DPRMFSLMQTSTPPRR

SEQ ID NO: 62112 - protein, 16 aa, Artificial Sequence
  Description of Artificial Sequence: Synthetic peptide
  Seed: DPRMCSLMQGSTLPRR
DPRMFSLMQTSTQPRR

SEQ ID NO: 62113 - protein, 16 aa, Artificial Sequence
  Description of Artificial Sequence: Synthetic peptide
  Seed: DPRMCSLMQGSTLPRR
DPRMFSLMQTSTSPRR

SEQ ID NO: 62114 - protein, 16 aa, Artificial Sequence
  Description of Artificial Sequence: Synthetic peptide
  Seed: DPRMCSLMQGSTLPRR
DPRMFSLMQTSTTPRR

SEQ ID NO: 62115 - protein, 16 aa, Artificial Sequence
  Description of Artificial Sequence: Synthetic peptide
  Seed: DPRMCSLMQGSTLPRR
DPRMFSLMQTSTVPRR

SEQ ID NO: 62116 - protein, 16 aa, Artificial Sequence
  Description of Artificial Sequence: Synthetic peptide
  Seed: DPRMCSLMQGSTLPRR
DPRMFSLMQVSTAPRR

SEQ ID NO: 62117 - protein, 16 aa, Artificial Sequence
  Description of Artificial Sequence: Synthetic peptide
  Seed: DPRMCSLMQGSTLPRR
DPRMFSLMQVSTCPRR

SEQ ID NO: 62118 - protein, 16 aa, Artificial Sequence
  Description of Artificial Sequence: Synthetic peptide
  Seed: DPRMCSLMQGSTLPRR
DPRMFSLMQVSTDPRR

SEQ ID NO: 62119 - protein, 16 aa, Artificial Sequence
  Description of Artificial Sequence: Synthetic peptide
  Seed: DPRMCSLMQGSTLPRR
DPRMFSLMQVSTEPRR

SEQ ID NO: 62120 - protein, 16 aa, Artificial Sequence
  Description of Artificial Sequence: Synthetic peptide
  Seed: DPRMCSLMQGSTLPRR
DPRMFSLMQVSTGPRR

SEQ ID NO: 62121 - protein, 16 aa, Artificial Sequence
  Description of Artificial Sequence: Synthetic peptide
  Seed: DPRMCSLMQGSTLPRR
DPRMFSLMQVSTHPRR

SEQ ID NO: 62122 - protein, 16 aa, Artificial Sequence
  Description of Artificial Sequence: Synthetic peptide
  Seed: DPRMCSLMQGSTLPRR
DPRMFSLMQVSTIPRR

SEQ ID NO: 62123 - protein, 16 aa, Artificial Sequence
  Description of Artificial Sequence: Synthetic peptide
  Seed: DPRMCSLMQGSTLPRR
DPRMFSLMQVSTLPRR

SEQ ID NO: 62124 - protein, 16 aa, Artificial Sequence
  Description of Artificial Sequence: Synthetic peptide
  Seed: DPRMCSLMQGSTLPRR
DPRMFSLMQVSTMPRR

SEQ ID NO: 62125 - protein, 16 aa, Artificial Sequence
  Description of Artificial Sequence: Synthetic peptide
  Seed: DPRMCSLMQGSTLPRR
DPRMFSLMQVSTNPRR

SEQ ID NO: 62126 - protein, 16 aa, Artificial Sequence
  Description of Artificial Sequence: Synthetic peptide
  Seed: DPRMCSLMQGSTLPRR
DPRMFSLMQVSTPPRR

SEQ ID NO: 62127 - protein, 16 aa, Artificial Sequence
  Description of Artificial Sequence: Synthetic peptide
  Seed: DPRMCSLMQGSTLPRR
DPRMFSLMQVSTQPRR

SEQ ID NO: 62128 - protein, 16 aa, Artificial Sequence
  Description of Artificial Sequence: Synthetic peptide
  Seed: DPRMCSLMQGSTLPRR
DPRMFSLMQVSTSPRR

SEQ ID NO: 62129 - protein, 16 aa, Artificial Sequence
  Description of Artificial Sequence: Synthetic peptide
  Seed: DPRMCSLMQGSTLPRR
DPRMFSLMQVSTTPRR

SEQ ID NO: 62130 - protein, 16 aa, Artificial Sequence
  Description of Artificial Sequence: Synthetic peptide
  Seed: DPRMCSLMQGSTLPRR
DPRMFSLMQVSTVPRR

SEQ ID NO: 62131 - protein, 16 aa, Artificial Sequence
  Description of Artificial Sequence: Synthetic peptide
  Seed: DPRMCSLMQGSTLPRR
DPRMFSLNQASTAPRR

SEQ ID NO: 62132 - protein, 16 aa, Artificial Sequence
  Description of Artificial Sequence: Synthetic peptide
  Seed: DPRMCSLMQGSTLPRR
DPRMFSLNQASTIPRR

SEQ ID NO: 62133 - protein, 16 aa, Artificial Sequence
  Description of Artificial Sequence: Synthetic peptide
  Seed: DPRMCSLMQGSTLPRR
DPRMFSLNQASTLPRR

SEQ ID NO: 62134 - protein, 16 aa, Artificial Sequence
  Description of Artificial Sequence: Synthetic peptide
  Seed: DPRMCSLMQGSTLPRR
DPRMFSLNQASTVPRR

SEQ ID NO: 62135 - protein, 16 aa, Artificial Sequence
  Description of Artificial Sequence: Synthetic peptide
  Seed: DPRMCSLMQGSTLPRR
DPRMFSLNQGSTIPRR

SEQ ID NO: 62136 - protein, 16 aa, Artificial Sequence
  Description of Artificial Sequence: Synthetic peptide
  Seed: DPRMCSLMQGSTLPRR
DPRMFSLNQGSTLPRR

SEQ ID NO: 62137 - protein, 16 aa, Artificial Sequence
  Description of Artificial Sequence: Synthetic peptide
  Seed: DPRMCSLMQGSTLPRR
DPRMFSLNQGSTVPRR

SEQ ID NO: 62138 - protein, 16 aa, Artificial Sequence
  Description of Artificial Sequence: Synthetic peptide
  Seed: DPRMCSLMQGSTLPRR
DPRMFSLNQSSTLPRR

SEQ ID NO: 62139 - protein, 16 aa, Artificial Sequence
  Description of Artificial Sequence: Synthetic peptide
  Seed: DPRMCSLMQGSTLPRR
DPRMFSLQQASTAPRR

SEQ ID NO: 62140 - protein, 16 aa, Artificial Sequence
  Description of Artificial Sequence: Synthetic peptide
  Seed: DPRMCSLMQGSTLPRR
DPRMFSLQQASTGPRR

SEQ ID NO: 62141 - protein, 16 aa, Artificial Sequence
  Description of Artificial Sequence: Synthetic peptide
  Seed: DPRMCSLMQGSTLPRR
DPRMFSLQQASTIPRR

SEQ ID NO: 62142 - protein, 16 aa, Artificial Sequence
  Description of Artificial Sequence: Synthetic peptide
  Seed: DPRMCSLMQGSTLPRR
DPRMFSLQQASTLPRR

SEQ ID NO: 62143 - protein, 16 aa, Artificial Sequence
  Description of Artificial Sequence: Synthetic peptide
  Seed: DPRMCSLMQGSTLPRR
DPRMFSLQQASTMPRR

SEQ ID NO: 62144 - protein, 16 aa, Artificial Sequence
  Description of Artificial Sequence: Synthetic peptide
  Seed: DPRMCSLMQGSTLPRR
DPRMFSLQQASTNPRR

SEQ ID NO: 62145 - protein, 16 aa, Artificial Sequence
  Description of Artificial Sequence: Synthetic peptide
  Seed: DPRMCSLMQGSTLPRR
DPRMFSLQQASTSPRR

SEQ ID NO: 62146 - protein, 16 aa, Artificial Sequence
  Description of Artificial Sequence: Synthetic peptide
  Seed: DPRMCSLMQGSTLPRR
DPRMFSLQQASTTPRR

SEQ ID NO: 62147 - protein, 16 aa, Artificial Sequence
  Description of Artificial Sequence: Synthetic peptide
  Seed: DPRMCSLMQGSTLPRR
DPRMFSLQQASTVPRR

SEQ ID NO: 62148 - protein, 16 aa, Artificial Sequence
  Description of Artificial Sequence: Synthetic peptide
  Seed: DPRMCSLMQGSTLPRR
DPRMFSLQQGSTAPRR

SEQ ID NO: 62149 - protein, 16 aa, Artificial Sequence
  Description of Artificial Sequence: Synthetic peptide
  Seed: DPRMCSLMQGSTLPRR
DPRMFSLQQGSTIPRR

SEQ ID NO: 62150 - protein, 16 aa, Artificial Sequence
  Description of Artificial Sequence: Synthetic peptide
  Seed: DPRMCSLMQGSTLPRR
DPRMFSLQQGSTLPRR

SEQ ID NO: 62151 - protein, 16 aa, Artificial Sequence
  Description of Artificial Sequence: Synthetic peptide
  Seed: DPRMCSLMQGSTLPRR
DPRMFSLQQGSTMPRR

SEQ ID NO: 62152 - protein, 16 aa, Artificial Sequence
  Description of Artificial Sequence: Synthetic peptide
  Seed: DPRMCSLMQGSTLPRR
DPRMFSLQQGSTSPRR

SEQ ID NO: 62153 - protein, 16 aa, Artificial Sequence
  Description of Artificial Sequence: Synthetic peptide
  Seed: DPRMCSLMQGSTLPRR
DPRMFSLQQGSTTPRR

SEQ ID NO: 62154 - protein, 16 aa, Artificial Sequence
  Description of Artificial Sequence: Synthetic peptide
  Seed: DPRMCSLMQGSTLPRR
DPRMFSLQQGSTVPRR

SEQ ID NO: 62155 - protein, 16 aa, Artificial Sequence
  Description of Artificial Sequence: Synthetic peptide
  Seed: DPRMCSLMQGSTLPRR
DPRMFSLQQISTAPRR

SEQ ID NO: 62156 - protein, 16 aa, Artificial Sequence
  Description of Artificial Sequence: Synthetic peptide
  Seed: DPRMCSLMQGSTLPRR
DPRMFSLQQISTNPRR

SEQ ID NO: 62157 - protein, 16 aa, Artificial Sequence
  Description of Artificial Sequence: Synthetic peptide
  Seed: DPRMCSLMQGSTLPRR
DPRMFSLQQISTSPRR

SEQ ID NO: 62158 - protein, 16 aa, Artificial Sequence
  Description of Artificial Sequence: Synthetic peptide
  Seed: DPRMCSLMQGSTLPRR
DPRMFSLQQNSTAPRR

SEQ ID NO: 62159 - protein, 16 aa, Artificial Sequence
  Description of Artificial Sequence: Synthetic peptide
  Seed: DPRMCSLMQGSTLPRR
DPRMFSLQQNSTIPRR

SEQ ID NO: 62160 - protein, 16 aa, Artificial Sequence
  Description of Artificial Sequence: Synthetic peptide
  Seed: DPRMCSLMQGSTLPRR
DPRMFSLQQNSTLPRR

SEQ ID NO: 62161 - protein, 16 aa, Artificial Sequence
  Description of Artificial Sequence: Synthetic peptide
  Seed: DPRMCSLMQGSTLPRR
DPRMFSLQQNSTVPRR

SEQ ID NO: 62162 - protein, 16 aa, Artificial Sequence
  Description of Artificial Sequence: Synthetic peptide
  Seed: DPRMCSLMQGSTLPRR
DPRMFSLQQPSTAPRR

SEQ ID NO: 62163 - protein, 16 aa, Artificial Sequence
  Description of Artificial Sequence: Synthetic peptide
  Seed: DPRMCSLMQGSTLPRR
DPRMFSLQQPSTIPRR

SEQ ID NO: 62164 - protein, 16 aa, Artificial Sequence
  Description of Artificial Sequence: Synthetic peptide
  Seed: DPRMCSLMQGSTLPRR
DPRMFSLQQPSTLPRR

SEQ ID NO: 62165 - protein, 16 aa, Artificial Sequence
  Description of Artificial Sequence: Synthetic peptide
  Seed: DPRMCSLMQGSTLPRR
DPRMFSLQQPSTMPRR

SEQ ID NO: 62166 - protein, 16 aa, Artificial Sequence
  Description of Artificial Sequence: Synthetic peptide
  Seed: DPRMCSLMQGSTLPRR
DPRMFSLQQPSTSPRR

SEQ ID NO: 62167 - protein, 16 aa, Artificial Sequence
  Description of Artificial Sequence: Synthetic peptide
  Seed: DPRMCSLMQGSTLPRR
DPRMFSLQQPSTVPRR

SEQ ID NO: 62168 - protein, 16 aa, Artificial Sequence
  Description of Artificial Sequence: Synthetic peptide
  Seed: DPRMCSLMQGSTLPRR
DPRMFSLQQSSTAPRR

SEQ ID NO: 62169 - protein, 16 aa, Artificial Sequence
  Description of Artificial Sequence: Synthetic peptide
  Seed: DPRMCSLMQGSTLPRR
DPRMFSLQQSSTIPRR

SEQ ID NO: 62170 - protein, 16 aa, Artificial Sequence
  Description of Artificial Sequence: Synthetic peptide
  Seed: DPRMCSLMQGSTLPRR
DPRMFSLQQSSTLPRR

SEQ ID NO: 62171 - protein, 16 aa, Artificial Sequence
  Description of Artificial Sequence: Synthetic peptide
  Seed: DPRMCSLMQGSTLPRR
DPRMFSLQQSSTMPRR

SEQ ID NO: 62172 - protein, 16 aa, Artificial Sequence
  Description of Artificial Sequence: Synthetic peptide
  Seed: DPRMCSLMQGSTLPRR
DPRMFSLQQSSTNPRR

SEQ ID NO: 62173 - protein, 16 aa, Artificial Sequence
  Description of Artificial Sequence: Synthetic peptide
  Seed: DPRMCSLMQGSTLPRR
DPRMFSLQQSSTSPRR

SEQ ID NO: 62174 - protein, 16 aa, Artificial Sequence
  Description of Artificial Sequence: Synthetic peptide
  Seed: DPRMCSLMQGSTLPRR
DPRMFSLQQSSTTPRR

SEQ ID NO: 62175 - protein, 16 aa, Artificial Sequence
  Description of Artificial Sequence: Synthetic peptide
  Seed: DPRMCSLMQGSTLPRR
DPRMFSLQQSSTVPRR

SEQ ID NO: 62176 - protein, 16 aa, Artificial Sequence
  Description of Artificial Sequence: Synthetic peptide
  Seed: DPRMCSLMQGSTLPRR
DPRMFSLQQTSTAPRR

SEQ ID NO: 62177 - protein, 16 aa, Artificial Sequence
  Description of Artificial Sequence: Synthetic peptide
  Seed: DPRMCSLMQGSTLPRR
DPRMFSLQQTSTIPRR

SEQ ID NO: 62178 - protein, 16 aa, Artificial Sequence
  Description of Artificial Sequence: Synthetic peptide
  Seed: DPRMCSLMQGSTLPRR
DPRMFSLQQTSTLPRR

SEQ ID NO: 62179 - protein, 16 aa, Artificial Sequence
  Description of Artificial Sequence: Synthetic peptide
  Seed: DPRMCSLMQGSTLPRR
DPRMFSLQQTSTSPRR

SEQ ID NO: 62180 - protein, 16 aa, Artificial Sequence
  Description of Artificial Sequence: Synthetic peptide
  Seed: DPRMCSLMQGSTLPRR
DPRMFSLQQTSTVPRR

SEQ ID NO: 62181 - protein, 16 aa, Artificial Sequence
  Description of Artificial Sequence: Synthetic peptide
  Seed: DPRMCSLMQGSTLPRR
DPRMFSLQQVSTAPRR

SEQ ID NO: 62182 - protein, 16 aa, Artificial Sequence
  Description of Artificial Sequence: Synthetic peptide
  Seed: DPRMCSLMQGSTLPRR
DPRMFSLQQVSTLPRR

SEQ ID NO: 62183 - protein, 16 aa, Artificial Sequence
  Description of Artificial Sequence: Synthetic peptide
  Seed: DPRMCSLMQGSTLPRR
DPRMFSLQQVSTNPRR

SEQ ID NO: 62184 - protein, 16 aa, Artificial Sequence
  Description of Artificial Sequence: Synthetic peptide
  Seed: DPRMCSLMQGSTLPRR
DPRMFSLQQVSTSPRR

SEQ ID NO: 62185 - protein, 16 aa, Artificial Sequence
  Description of Artificial Sequence: Synthetic peptide
  Seed: DPRMCSLMQGSTLPRR
DPRMFSLQQVSTVPRR

SEQ ID NO: 62186 - protein, 16 aa, Artificial Sequence
  Description of Artificial Sequence: Synthetic peptide
  Seed: DPRMCSLMQGSTLPRR
DPRMFSLSQASTAPRR

SEQ ID NO: 62187 - protein, 16 aa, Artificial Sequence
  Description of Artificial Sequence: Synthetic peptide
  Seed: DPRMCSLMQGSTLPRR
DPRMFSLSQASTIPRR

SEQ ID NO: 62188 - protein, 16 aa, Artificial Sequence
  Description of Artificial Sequence: Synthetic peptide
  Seed: DPRMCSLMQGSTLPRR
DPRMFSLSQASTLPRR

SEQ ID NO: 62189 - protein, 16 aa, Artificial Sequence
  Description of Artificial Sequence: Synthetic peptide
  Seed: DPRMCSLMQGSTLPRR
DPRMFSLSQASTMPRR

SEQ ID NO: 62190 - protein, 16 aa, Artificial Sequence
  Description of Artificial Sequence: Synthetic peptide
  Seed: DPRMCSLMQGSTLPRR
DPRMFSLSQASTNPRR

SEQ ID NO: 62191 - protein, 16 aa, Artificial Sequence
  Description of Artificial Sequence: Synthetic peptide
  Seed: DPRMCSLMQGSTLPRR
DPRMFSLSQASTSPRR

SEQ ID NO: 62192 - protein, 16 aa, Artificial Sequence
  Description of Artificial Sequence: Synthetic peptide
  Seed: DPRMCSLMQGSTLPRR
DPRMFSLSQASTTPRR

SEQ ID NO: 62193 - protein, 16 aa, Artificial Sequence
  Description of Artificial Sequence: Synthetic peptide
  Seed: DPRMCSLMQGSTLPRR
DPRMFSLSQASTVPRR

SEQ ID NO: 62194 - protein, 16 aa, Artificial Sequence
  Description of Artificial Sequence: Synthetic peptide
  Seed: DPRMCSLMQGSTLPRR
DPRMFSLSQFSTLPRR

SEQ ID NO: 62195 - protein, 16 aa, Artificial Sequence
  Description of Artificial Sequence: Synthetic peptide
  Seed: DPRMCSLMQGSTLPRR
DPRMFSLSQGSTAPRR

SEQ ID NO: 62196 - protein, 16 aa, Artificial Sequence
  Description of Artificial Sequence: Synthetic peptide
  Seed: DPRMCSLMQGSTLPRR
DPRMFSLSQGSTIPRR

SEQ ID NO: 62197 - protein, 16 aa, Artificial Sequence
  Description of Artificial Sequence: Synthetic peptide
  Seed: DPRMCSLMQGSTLPRR
DPRMFSLSQGSTLPRR

SEQ ID NO: 62198 - protein, 16 aa, Artificial Sequence
  Description of Artificial Sequence: Synthetic peptide
  Seed: DPRMCSLMQGSTLPRR
DPRMFSLSQGSTVPRR

SEQ ID NO: 62199 - protein, 16 aa, Artificial Sequence
  Description of Artificial Sequence: Synthetic peptide
  Seed: DPRMCSLMQGSTLPRR
DPRMFSLSQPSTAPRR

SEQ ID NO: 62200 - protein, 16 aa, Artificial Sequence
  Description of Artificial Sequence: Synthetic peptide
  Seed: DPRMCSLMQGSTLPRR
DPRMFSLSQPSTIPRR

SEQ ID NO: 62201 - protein, 16 aa, Artificial Sequence
  Description of Artificial Sequence: Synthetic peptide
  Seed: DPRMCSLMQGSTLPRR
DPRMFSLSQPSTLPRR

SEQ ID NO: 62202 - protein, 16 aa, Artificial Sequence
  Description of Artificial Sequence: Synthetic peptide
  Seed: DPRMCSLMQGSTLPRR
DPRMFSLSQPSTVPRR

SEQ ID NO: 62203 - protein, 16 aa, Artificial Sequence
  Description of Artificial Sequence: Synthetic peptide
  Seed: DPRMCSLMQGSTLPRR
DPRMFSLSQSSTAPRR

SEQ ID NO: 62204 - protein, 16 aa, Artificial Sequence
  Description of Artificial Sequence: Synthetic peptide
  Seed: DPRMCSLMQGSTLPRR
DPRMFSLSQSSTIPRR

SEQ ID NO: 62205 - protein, 16 aa, Artificial Sequence
  Description of Artificial Sequence: Synthetic peptide
  Seed: DPRMCSLMQGSTLPRR
DPRMFSLSQSSTLPRR

SEQ ID NO: 62206 - protein, 16 aa, Artificial Sequence
  Description of Artificial Sequence: Synthetic peptide
  Seed: DPRMCSLMQGSTLPRR
DPRMFSLSQSSTVPRR

SEQ ID NO: 62207 - protein, 16 aa, Artificial Sequence
  Description of Artificial Sequence: Synthetic peptide
  Seed: DPRMCSLMQGSTLPRR
DPRMFSLSQVSTAPRR

SEQ ID NO: 62208 - protein, 16 aa, Artificial Sequence
  Description of Artificial Sequence: Synthetic peptide
  Seed: DPRMCSLMQGSTLPRR
DPRMFSLTQASTAPRR

SEQ ID NO: 62209 - protein, 16 aa, Artificial Sequence
  Description of Artificial Sequence: Synthetic peptide
  Seed: DPRMCSLMQGSTLPRR
DPRMFSLTQASTIPRR

SEQ ID NO: 62210 - protein, 16 aa, Artificial Sequence
  Description of Artificial Sequence: Synthetic peptide
  Seed: DPRMCSLMQGSTLPRR
DPRMFSLTQASTLPRR

SEQ ID NO: 62211 - protein, 16 aa, Artificial Sequence
  Description of Artificial Sequence: Synthetic peptide
  Seed: DPRMCSLMQGSTLPRR
DPRMFSLTQASTSPRR

SEQ ID NO: 62212 - protein, 16 aa, Artificial Sequence
  Description of Artificial Sequence: Synthetic peptide
  Seed: DPRMCSLMQGSTLPRR
DPRMFSLTQASTVPRR

SEQ ID NO: 62213 - protein, 16 aa, Artificial Sequence
  Description of Artificial Sequence: Synthetic peptide
  Seed: DPRMCSLMQGSTLPRR
DPRMFSLTQFSTIPRR

SEQ ID NO: 62214 - protein, 16 aa, Artificial Sequence
  Description of Artificial Sequence: Synthetic peptide
  Seed: DPRMCSLMQGSTLPRR
DPRMFSLTQFSTLPRR

SEQ ID NO: 62215 - protein, 16 aa, Artificial Sequence
  Description of Artificial Sequence: Synthetic peptide
  Seed: DPRMCSLMQGSTLPRR
DPRMFSLTQFSTVPRR

SEQ ID NO: 62216 - protein, 16 aa, Artificial Sequence
  Description of Artificial Sequence: Synthetic peptide
  Seed: DPRMCSLMQGSTLPRR
DPRMFSLTQGSTIPRR

SEQ ID NO: 62217 - protein, 16 aa, Artificial Sequence
  Description of Artificial Sequence: Synthetic peptide
  Seed: DPRMCSLMQGSTLPRR
DPRMFSLTQGSTLPRR

SEQ ID NO: 62218 - protein, 16 aa, Artificial Sequence
  Description of Artificial Sequence: Synthetic peptide
  Seed: DPRMCSLMQGSTLPRR
DPRMFSLTQGSTVPRR

SEQ ID NO: 62219 - protein, 16 aa, Artificial Sequence
  Description of Artificial Sequence: Synthetic peptide
  Seed: DPRMCSLMQGSTLPRR
DPRMFSLTQPSTAPRR

SEQ ID NO: 62220 - protein, 16 aa, Artificial Sequence
  Description of Artificial Sequence: Synthetic peptide
  Seed: DPRMCSLMQGSTLPRR
DPRMFSLTQSSTLPRR

SEQ ID NO: 62221 - protein, 16 aa, Artificial Sequence
  Description of Artificial Sequence: Synthetic peptide
  Seed: DPRMCSLMQGSTLPRR
DPRMFSLTQSSTVPRR

SEQ ID NO: 62222 - protein, 16 aa, Artificial Sequence
  Description of Artificial Sequence: Synthetic peptide
  Seed: DPRMCSLMQGSTLPRR
DPRMFSLVQASTAPRR

SEQ ID NO: 62223 - protein, 16 aa, Artificial Sequence
  Description of Artificial Sequence: Synthetic peptide
  Seed: DPRMCSLMQGSTLPRR
DPRMFSLVQASTGPRR

SEQ ID NO: 62224 - protein, 16 aa, Artificial Sequence
  Description of Artificial Sequence: Synthetic peptide
  Seed: DPRMCSLMQGSTLPRR
DPRMFSLVQASTHPRR

SEQ ID NO: 62225 - protein, 16 aa, Artificial Sequence
  Description of Artificial Sequence: Synthetic peptide
  Seed: DPRMCSLMQGSTLPRR
DPRMFSLVQASTIPRR

SEQ ID NO: 62226 - protein, 16 aa, Artificial Sequence
  Description of Artificial Sequence: Synthetic peptide
  Seed: DPRMCSLMQGSTLPRR
DPRMFSLVQASTLPRR

SEQ ID NO: 62227 - protein, 16 aa, Artificial Sequence
  Description of Artificial Sequence: Synthetic peptide
  Seed: DPRMCSLMQGSTLPRR
DPRMFSLVQASTMPRR

SEQ ID NO: 62228 - protein, 16 aa, Artificial Sequence
  Description of Artificial Sequence: Synthetic peptide
  Seed: DPRMCSLMQGSTLPRR
DPRMFSLVQASTNPRR

SEQ ID NO: 62229 - protein, 16 aa, Artificial Sequence
  Description of Artificial Sequence: Synthetic peptide
  Seed: DPRMCSLMQGSTLPRR
DPRMFSLVQASTQPRR

SEQ ID NO: 62230 - protein, 16 aa, Artificial Sequence
  Description of Artificial Sequence: Synthetic peptide
  Seed: DPRMCSLMQGSTLPRR
DPRMFSLVQASTSPRR

SEQ ID NO: 62231 - protein, 16 aa, Artificial Sequence
  Description of Artificial Sequence: Synthetic peptide
  Seed: DPRMCSLMQGSTLPRR
DPRMFSLVQASTTPRR

SEQ ID NO: 62232 - protein, 16 aa, Artificial Sequence
  Description of Artificial Sequence: Synthetic peptide
  Seed: DPRMCSLMQGSTLPRR
DPRMFSLVQASTVPRR

SEQ ID NO: 62233 - protein, 16 aa, Artificial Sequence
  Description of Artificial Sequence: Synthetic peptide
  Seed: DPRMCSLMQGSTLPRR
DPRMFSLVQFSTFPRR

SEQ ID NO: 62234 - protein, 16 aa, Artificial Sequence
  Description of Artificial Sequence: Synthetic peptide
  Seed: DPRMCSLMQGSTLPRR
DPRMFSLVQFSTIPRR

SEQ ID NO: 62235 - protein, 16 aa, Artificial Sequence
  Description of Artificial Sequence: Synthetic peptide
  Seed: DPRMCSLMQGSTLPRR
DPRMFSLVQFSTLPRR

SEQ ID NO: 62236 - protein, 16 aa, Artificial Sequence
  Description of Artificial Sequence: Synthetic peptide
  Seed: DPRMCSLMQGSTLPRR
DPRMFSLVQFSTMPRR

SEQ ID NO: 62237 - protein, 16 aa, Artificial Sequence
  Description of Artificial Sequence: Synthetic peptide
  Seed: DPRMCSLMQGSTLPRR
DPRMFSLVQFSTVPRR

SEQ ID NO: 62238 - protein, 16 aa, Artificial Sequence
  Description of Artificial Sequence: Synthetic peptide
  Seed: DPRMCSLMQGSTLPRR
DPRMFSLVQGSTAPRR

SEQ ID NO: 62239 - protein, 16 aa, Artificial Sequence
  Description of Artificial Sequence: Synthetic peptide
  Seed: DPRMCSLMQGSTLPRR
DPRMFSLVQGSTGPRR

SEQ ID NO: 62240 - protein, 16 aa, Artificial Sequence
  Description of Artificial Sequence: Synthetic peptide
  Seed: DPRMCSLMQGSTLPRR
DPRMFSLVQGSTIPRR

SEQ ID NO: 62241 - protein, 16 aa, Artificial Sequence
  Description of Artificial Sequence: Synthetic peptide
  Seed: DPRMCSLMQGSTLPRR
DPRMFSLVQGSTLPRR

SEQ ID NO: 62242 - protein, 16 aa, Artificial Sequence
  Description of Artificial Sequence: Synthetic peptide
  Seed: DPRMCSLMQGSTLPRR
DPRMFSLVQGSTMPRR

SEQ ID NO: 62243 - protein, 16 aa, Artificial Sequence
  Description of Artificial Sequence: Synthetic peptide
  Seed: DPRMCSLMQGSTLPRR
DPRMFSLVQGSTNPRR

SEQ ID NO: 62244 - protein, 16 aa, Artificial Sequence
  Description of Artificial Sequence: Synthetic peptide
  Seed: DPRMCSLMQGSTLPRR
DPRMFSLVQGSTSPRR

SEQ ID NO: 62245 - protein, 16 aa, Artificial Sequence
  Description of Artificial Sequence: Synthetic peptide
  Seed: DPRMCSLMQGSTLPRR
DPRMFSLVQGSTTPRR

SEQ ID NO: 62246 - protein, 16 aa, Artificial Sequence
  Description of Artificial Sequence: Synthetic peptide
  Seed: DPRMCSLMQGSTLPRR
DPRMFSLVQGSTVPRR

SEQ ID NO: 62247 - protein, 16 aa, Artificial Sequence
  Description of Artificial Sequence: Synthetic peptide
  Seed: DPRMCSLMQGSTLPRR
DPRMFSLVQISTAPRR

SEQ ID NO: 62248 - protein, 16 aa, Artificial Sequence
  Description of Artificial Sequence: Synthetic peptide
  Seed: DPRMCSLMQGSTLPRR
DPRMFSLVQISTNPRR

SEQ ID NO: 62249 - protein, 16 aa, Artificial Sequence
  Description of Artificial Sequence: Synthetic peptide
  Seed: DPRMCSLMQGSTLPRR
DPRMFSLVQISTSPRR

SEQ ID NO: 62250 - protein, 16 aa, Artificial Sequence
  Description of Artificial Sequence: Synthetic peptide
  Seed: DPRMCSLMQGSTLPRR
DPRMFSLVQISTTPRR

SEQ ID NO: 62251 - protein, 16 aa, Artificial Sequence
  Description of Artificial Sequence: Synthetic peptide
  Seed: DPRMCSLMQGSTLPRR
DPRMFSLVQISTVPRR

SEQ ID NO: 62252 - protein, 16 aa, Artificial Sequence
  Description of Artificial Sequence: Synthetic peptide
  Seed: DPRMCSLMQGSTLPRR
DPRMFSLVQNSTAPRR

SEQ ID NO: 62253 - protein, 16 aa, Artificial Sequence
  Description of Artificial Sequence: Synthetic peptide
  Seed: DPRMCSLMQGSTLPRR
DPRMFSLVQNSTIPRR

SEQ ID NO: 62254 - protein, 16 aa, Artificial Sequence
  Description of Artificial Sequence: Synthetic peptide
  Seed: DPRMCSLMQGSTLPRR
DPRMFSLVQNSTLPRR

SEQ ID NO: 62255 - protein, 16 aa, Artificial Sequence
  Description of Artificial Sequence: Synthetic peptide
  Seed: DPRMCSLMQGSTLPRR
DPRMFSLVQNSTSPRR

SEQ ID NO: 62256 - protein, 16 aa, Artificial Sequence
  Description of Artificial Sequence: Synthetic peptide
  Seed: DPRMCSLMQGSTLPRR
DPRMFSLVQNSTVPRR

SEQ ID NO: 62257 - protein, 16 aa, Artificial Sequence
  Description of Artificial Sequence: Synthetic peptide
  Seed: DPRMCSLMQGSTLPRR
DPRMFSLVQPSTAPRR

SEQ ID NO: 62258 - protein, 16 aa, Artificial Sequence
  Description of Artificial Sequence: Synthetic peptide
  Seed: DPRMCSLMQGSTLPRR
DPRMFSLVQPSTGPRR

SEQ ID NO: 62259 - protein, 16 aa, Artificial Sequence
  Description of Artificial Sequence: Synthetic peptide
  Seed: DPRMCSLMQGSTLPRR
DPRMFSLVQPSTIPRR

SEQ ID NO: 62260 - protein, 16 aa, Artificial Sequence
  Description of Artificial Sequence: Synthetic peptide
  Seed: DPRMCSLMQGSTLPRR
DPRMFSLVQPSTLPRR

SEQ ID NO: 62261 - protein, 16 aa, Artificial Sequence
  Description of Artificial Sequence: Synthetic peptide
  Seed: DPRMCSLMQGSTLPRR
DPRMFSLVQPSTMPRR

SEQ ID NO: 62262 - protein, 16 aa, Artificial Sequence
  Description of Artificial Sequence: Synthetic peptide
  Seed: DPRMCSLMQGSTLPRR
DPRMFSLVQPSTNPRR

SEQ ID NO: 62263 - protein, 16 aa, Artificial Sequence
  Description of Artificial Sequence: Synthetic peptide
  Seed: DPRMCSLMQGSTLPRR
DPRMFSLVQPSTSPRR

SEQ ID NO: 62264 - protein, 16 aa, Artificial Sequence
  Description of Artificial Sequence: Synthetic peptide
  Seed: DPRMCSLMQGSTLPRR
DPRMFSLVQPSTTPRR

SEQ ID NO: 62265 - protein, 16 aa, Artificial Sequence
  Description of Artificial Sequence: Synthetic peptide
  Seed: DPRMCSLMQGSTLPRR
DPRMFSLVQPSTVPRR

SEQ ID NO: 62266 - protein, 16 aa, Artificial Sequence
  Description of Artificial Sequence: Synthetic peptide
  Seed: DPRMCSLMQGSTLPRR
DPRMFSLVQSSTAPRR

SEQ ID NO: 62267 - protein, 16 aa, Artificial Sequence
  Description of Artificial Sequence: Synthetic peptide
  Seed: DPRMCSLMQGSTLPRR
DPRMFSLVQSSTIPRR

SEQ ID NO: 62268 - protein, 16 aa, Artificial Sequence
  Description of Artificial Sequence: Synthetic peptide
  Seed: DPRMCSLMQGSTLPRR
DPRMFSLVQSSTLPRR

SEQ ID NO: 62269 - protein, 16 aa, Artificial Sequence
  Description of Artificial Sequence: Synthetic peptide
  Seed: DPRMCSLMQGSTLPRR
DPRMFSLVQSSTMPRR

SEQ ID NO: 62270 - protein, 16 aa, Artificial Sequence
  Description of Artificial Sequence: Synthetic peptide
  Seed: DPRMCSLMQGSTLPRR
DPRMFSLVQSSTNPRR

SEQ ID NO: 62271 - protein, 16 aa, Artificial Sequence
  Description of Artificial Sequence: Synthetic peptide
  Seed: DPRMCSLMQGSTLPRR
DPRMFSLVQSSTSPRR

SEQ ID NO: 62272 - protein, 16 aa, Artificial Sequence
  Description of Artificial Sequence: Synthetic peptide
  Seed: DPRMCSLMQGSTLPRR
DPRMFSLVQSSTTPRR

SEQ ID NO: 62273 - protein, 16 aa, Artificial Sequence
  Description of Artificial Sequence: Synthetic peptide
  Seed: DPRMCSLMQGSTLPRR
DPRMFSLVQSSTVPRR

SEQ ID NO: 62274 - protein, 16 aa, Artificial Sequence
  Description of Artificial Sequence: Synthetic peptide
  Seed: DPRMCSLMQGSTLPRR
DPRMFSLVQTSTAPRR

SEQ ID NO: 62275 - protein, 16 aa, Artificial Sequence
  Description of Artificial Sequence: Synthetic peptide
  Seed: DPRMCSLMQGSTLPRR
DPRMFSLVQTSTIPRR

SEQ ID NO: 62276 - protein, 16 aa, Artificial Sequence
  Description of Artificial Sequence: Synthetic peptide
  Seed: DPRMCSLMQGSTLPRR
DPRMFSLVQTSTLPRR

SEQ ID NO: 62277 - protein, 16 aa, Artificial Sequence
  Description of Artificial Sequence: Synthetic peptide
  Seed: DPRMCSLMQGSTLPRR
DPRMFSLVQTSTMPRR

SEQ ID NO: 62278 - protein, 16 aa, Artificial Sequence
  Description of Artificial Sequence: Synthetic peptide
  Seed: DPRMCSLMQGSTLPRR
DPRMFSLVQTSTNPRR

SEQ ID NO: 62279 - protein, 16 aa, Artificial Sequence
  Description of Artificial Sequence: Synthetic peptide
  Seed: DPRMCSLMQGSTLPRR
DPRMFSLVQTSTSPRR

SEQ ID NO: 62280 - protein, 16 aa, Artificial Sequence
  Description of Artificial Sequence: Synthetic peptide
  Seed: DPRMCSLMQGSTLPRR
DPRMFSLVQTSTTPRR

SEQ ID NO: 62281 - protein, 16 aa, Artificial Sequence
  Description of Artificial Sequence: Synthetic peptide
  Seed: DPRMCSLMQGSTLPRR
DPRMFSLVQTSTVPRR

SEQ ID NO: 62282 - protein, 16 aa, Artificial Sequence
  Description of Artificial Sequence: Synthetic peptide
  Seed: DPRMCSLMQGSTLPRR
DPRMFSLVQVSTAPRR

SEQ ID NO: 62283 - protein, 16 aa, Artificial Sequence
  Description of Artificial Sequence: Synthetic peptide
  Seed: DPRMCSLMQGSTLPRR
DPRMFSLVQVSTIPRR

SEQ ID NO: 62284 - protein, 16 aa, Artificial Sequence
  Description of Artificial Sequence: Synthetic peptide
  Seed: DPRMCSLMQGSTLPRR
DPRMFSLVQVSTLPRR

SEQ ID NO: 62285 - protein, 16 aa, Artificial Sequence
  Description of Artificial Sequence: Synthetic peptide
  Seed: DPRMCSLMQGSTLPRR
DPRMFSLVQVSTMPRR

SEQ ID NO: 62286 - protein, 16 aa, Artificial Sequence
  Description of Artificial Sequence: Synthetic peptide
  Seed: DPRMCSLMQGSTLPRR
DPRMFSLVQVSTNPRR

SEQ ID NO: 62287 - protein, 16 aa, Artificial Sequence
  Description of Artificial Sequence: Synthetic peptide
  Seed: DPRMCSLMQGSTLPRR
DPRMFSLVQVSTSPRR

SEQ ID NO: 62288 - protein, 16 aa, Artificial Sequence
  Description of Artificial Sequence: Synthetic peptide
  Seed: DPRMCSLMQGSTLPRR
DPRMFSLVQVSTTPRR

SEQ ID NO: 62289 - protein, 16 aa, Artificial Sequence
  Description of Artificial Sequence: Synthetic peptide
  Seed: DPRMCSLMQGSTLPRR
DPRMFSLVQVSTVPRR

SEQ ID NO: 62290 - protein, 16 aa, Artificial Sequence
  Description of Artificial Sequence: Synthetic peptide
  Seed: DPRMCSLMQGSTLPRR
DPRMISLAQASTAPRR

SEQ ID NO: 62291 - protein, 16 aa, Artificial Sequence
  Description of Artificial Sequence: Synthetic peptide
  Seed: DPRMCSLMQGSTLPRR
DPRMISLAQASTIPRR

SEQ ID NO: 62292 - protein, 16 aa, Artificial Sequence
  Description of Artificial Sequence: Synthetic peptide
  Seed: DPRMCSLMQGSTLPRR
DPRMISLAQASTLPRR

SEQ ID NO: 62293 - protein, 16 aa, Artificial Sequence
  Description of Artificial Sequence: Synthetic peptide
  Seed: DPRMCSLMQGSTLPRR
DPRMISLAQASTVPRR

SEQ ID NO: 62294 - protein, 16 aa, Artificial Sequence
  Description of Artificial Sequence: Synthetic peptide
  Seed: DPRMCSLMQGSTLPRR
DPRMISLAQGSTAPRR

SEQ ID NO: 62295 - protein, 16 aa, Artificial Sequence
  Description of Artificial Sequence: Synthetic peptide
  Seed: DPRMCSLMQGSTLPRR
DPRMISLAQGSTIPRR

SEQ ID NO: 62296 - protein, 16 aa, Artificial Sequence
  Description of Artificial Sequence: Synthetic peptide
  Seed: DPRMCSLMQGSTLPRR
DPRMISLAQGSTLPRR

SEQ ID NO: 62297 - protein, 16 aa, Artificial Sequence
  Description of Artificial Sequence: Synthetic peptide
  Seed: DPRMCSLMQGSTLPRR
DPRMISLAQGSTVPRR

SEQ ID NO: 62298 - protein, 16 aa, Artificial Sequence
  Description of Artificial Sequence: Synthetic peptide
  Seed: DPRMCSLMQGSTLPRR
DPRMISLAQSSTIPRR

SEQ ID NO: 62299 - protein, 16 aa, Artificial Sequence
  Description of Artificial Sequence: Synthetic peptide
  Seed: DPRMCSLMQGSTLPRR
DPRMISLAQSSTLPRR

SEQ ID NO: 62300 - protein, 16 aa, Artificial Sequence
  Description of Artificial Sequence: Synthetic peptide
  Seed: DPRMCSLMQGSTLPRR
DPRMISLAQSSTVPRR

SEQ ID NO: 62301 - protein, 16 aa, Artificial Sequence
  Description of Artificial Sequence: Synthetic peptide
  Seed: DPRMCSLMQGSTLPRR
DPRMISLIQASTAPRR

SEQ ID NO: 62302 - protein, 16 aa, Artificial Sequence
  Description of Artificial Sequence: Synthetic peptide
  Seed: DPRMCSLMQGSTLPRR
DPRMISLIQASTIPRR

SEQ ID NO: 62303 - protein, 16 aa, Artificial Sequence
  Description of Artificial Sequence: Synthetic peptide
  Seed: DPRMCSLMQGSTLPRR
DPRMISLIQASTLPRR

SEQ ID NO: 62304 - protein, 16 aa, Artificial Sequence
  Description of Artificial Sequence: Synthetic peptide
  Seed: DPRMCSLMQGSTLPRR
DPRMISLIQASTMPRR

SEQ ID NO: 62305 - protein, 16 aa, Artificial Sequence
  Description of Artificial Sequence: Synthetic peptide
  Seed: DPRMCSLMQGSTLPRR
DPRMISLIQASTTPRR

SEQ ID NO: 62306 - protein, 16 aa, Artificial Sequence
  Description of Artificial Sequence: Synthetic peptide
  Seed: DPRMCSLMQGSTLPRR
DPRMISLIQASTVPRR

SEQ ID NO: 62307 - protein, 16 aa, Artificial Sequence
  Description of Artificial Sequence: Synthetic peptide
  Seed: DPRMCSLMQGSTLPRR
DPRMISLIQGSTAPRR

SEQ ID NO: 62308 - protein, 16 aa, Artificial Sequence
  Description of Artificial Sequence: Synthetic peptide
  Seed: DPRMCSLMQGSTLPRR
DPRMISLIQGSTIPRR

SEQ ID NO: 62309 - protein, 16 aa, Artificial Sequence
  Description of Artificial Sequence: Synthetic peptide
  Seed: DPRMCSLMQGSTLPRR
DPRMISLIQGSTLPRR

SEQ ID NO: 62310 - protein, 16 aa, Artificial Sequence
  Description of Artificial Sequence: Synthetic peptide
  Seed: DPRMCSLMQGSTLPRR
DPRMISLIQGSTMPRR

SEQ ID NO: 62311 - protein, 16 aa, Artificial Sequence
  Description of Artificial Sequence: Synthetic peptide
  Seed: DPRMCSLMQGSTLPRR
DPRMISLIQGSTTPRR

SEQ ID NO: 62312 - protein, 16 aa, Artificial Sequence
  Description of Artificial Sequence: Synthetic peptide
  Seed: DPRMCSLMQGSTLPRR
DPRMISLIQGSTVPRR

SEQ ID NO: 62313 - protein, 16 aa, Artificial Sequence
  Description of Artificial Sequence: Synthetic peptide
  Seed: DPRMCSLMQGSTLPRR
DPRMISLIQPSTAPRR

SEQ ID NO: 62314 - protein, 16 aa, Artificial Sequence
  Description of Artificial Sequence: Synthetic peptide
  Seed: DPRMCSLMQGSTLPRR
DPRMISLIQPSTIPRR

SEQ ID NO: 62315 - protein, 16 aa, Artificial Sequence
  Description of Artificial Sequence: Synthetic peptide
  Seed: DPRMCSLMQGSTLPRR
DPRMISLIQPSTLPRR

SEQ ID NO: 62316 - protein, 16 aa, Artificial Sequence
  Description of Artificial Sequence: Synthetic peptide
  Seed: DPRMCSLMQGSTLPRR
DPRMISLIQPSTVPRR

SEQ ID NO: 62317 - protein, 16 aa, Artificial Sequence
  Description of Artificial Sequence: Synthetic peptide
  Seed: DPRMCSLMQGSTLPRR
DPRMISLIQSSTAPRR

SEQ ID NO: 62318 - protein, 16 aa, Artificial Sequence
  Description of Artificial Sequence: Synthetic peptide
  Seed: DPRMCSLMQGSTLPRR
DPRMISLIQSSTIPRR

SEQ ID NO: 62319 - protein, 16 aa, Artificial Sequence
  Description of Artificial Sequence: Synthetic peptide
  Seed: DPRMCSLMQGSTLPRR
DPRMISLIQSSTLPRR

SEQ ID NO: 62320 - protein, 16 aa, Artificial Sequence
  Description of Artificial Sequence: Synthetic peptide
  Seed: DPRMCSLMQGSTLPRR
DPRMISLIQSSTVPRR

SEQ ID NO: 62321 - protein, 16 aa, Artificial Sequence
  Description of Artificial Sequence: Synthetic peptide
  Seed: DPRMCSLMQGSTLPRR
DPRMISLLQASTAPRR

SEQ ID NO: 62322 - protein, 16 aa, Artificial Sequence
  Description of Artificial Sequence: Synthetic peptide
  Seed: DPRMCSLMQGSTLPRR
DPRMISLLQASTGPRR

SEQ ID NO: 62323 - protein, 16 aa, Artificial Sequence
  Description of Artificial Sequence: Synthetic peptide
  Seed: DPRMCSLMQGSTLPRR
DPRMISLLQASTIPRR

SEQ ID NO: 62324 - protein, 16 aa, Artificial Sequence
  Description of Artificial Sequence: Synthetic peptide
  Seed: DPRMCSLMQGSTLPRR
DPRMISLLQASTLPRR

SEQ ID NO: 62325 - protein, 16 aa, Artificial Sequence
  Description of Artificial Sequence: Synthetic peptide
  Seed: DPRMCSLMQGSTLPRR
DPRMISLLQASTMPRR

SEQ ID NO: 62326 - protein, 16 aa, Artificial Sequence
  Description of Artificial Sequence: Synthetic peptide
  Seed: DPRMCSLMQGSTLPRR
DPRMISLLQASTNPRR

SEQ ID NO: 62327 - protein, 16 aa, Artificial Sequence
  Description of Artificial Sequence: Synthetic peptide
  Seed: DPRMCSLMQGSTLPRR
DPRMISLLQASTSPRR

SEQ ID NO: 62328 - protein, 16 aa, Artificial Sequence
  Description of Artificial Sequence: Synthetic peptide
  Seed: DPRMCSLMQGSTLPRR
DPRMISLLQASTTPRR

SEQ ID NO: 62329 - protein, 16 aa, Artificial Sequence
  Description of Artificial Sequence: Synthetic peptide
  Seed: DPRMCSLMQGSTLPRR
DPRMISLLQASTVPRR

SEQ ID NO: 62330 - protein, 16 aa, Artificial Sequence
  Description of Artificial Sequence: Synthetic peptide
  Seed: DPRMCSLMQGSTLPRR
DPRMISLLQFSTLPRR

SEQ ID NO: 62331 - protein, 16 aa, Artificial Sequence
  Description of Artificial Sequence: Synthetic peptide
  Seed: DPRMCSLMQGSTLPRR
DPRMISLLQGSTAPRR

SEQ ID NO: 62332 - protein, 16 aa, Artificial Sequence
  Description of Artificial Sequence: Synthetic peptide
  Seed: DPRMCSLMQGSTLPRR
DPRMISLLQGSTGPRR

SEQ ID NO: 62333 - protein, 16 aa, Artificial Sequence
  Description of Artificial Sequence: Synthetic peptide
  Seed: DPRMCSLMQGSTLPRR
DPRMISLLQGSTIPRR

SEQ ID NO: 62334 - protein, 16 aa, Artificial Sequence
  Description of Artificial Sequence: Synthetic peptide
  Seed: DPRMCSLMQGSTLPRR
DPRMISLLQGSTLPRR

SEQ ID NO: 62335 - protein, 16 aa, Artificial Sequence
  Description of Artificial Sequence: Synthetic peptide
  Seed: DPRMCSLMQGSTLPRR
DPRMISLLQGSTMPRR

SEQ ID NO: 62336 - protein, 16 aa, Artificial Sequence
  Description of Artificial Sequence: Synthetic peptide
  Seed: DPRMCSLMQGSTLPRR
DPRMISLLQGSTSPRR

SEQ ID NO: 62337 - protein, 16 aa, Artificial Sequence
  Description of Artificial Sequence: Synthetic peptide
  Seed: DPRMCSLMQGSTLPRR
DPRMISLLQGSTTPRR

SEQ ID NO: 62338 - protein, 16 aa, Artificial Sequence
  Description of Artificial Sequence: Synthetic peptide
  Seed: DPRMCSLMQGSTLPRR
DPRMISLLQGSTVPRR

SEQ ID NO: 62339 - protein, 16 aa, Artificial Sequence
  Description of Artificial Sequence: Synthetic peptide
  Seed: DPRMCSLMQGSTLPRR
DPRMISLLQISTAPRR

SEQ ID NO: 62340 - protein, 16 aa, Artificial Sequence
  Description of Artificial Sequence: Synthetic peptide
  Seed: DPRMCSLMQGSTLPRR
DPRMISLLQNSTAPRR

SEQ ID NO: 62341 - protein, 16 aa, Artificial Sequence
  Description of Artificial Sequence: Synthetic peptide
  Seed: DPRMCSLMQGSTLPRR
DPRMISLLQNSTIPRR

SEQ ID NO: 62342 - protein, 16 aa, Artificial Sequence
  Description of Artificial Sequence: Synthetic peptide
  Seed: DPRMCSLMQGSTLPRR
DPRMISLLQNSTLPRR

SEQ ID NO: 62343 - protein, 16 aa, Artificial Sequence
  Description of Artificial Sequence: Synthetic peptide
  Seed: DPRMCSLMQGSTLPRR
DPRMISLLQNSTVPRR

SEQ ID NO: 62344 - protein, 16 aa, Artificial Sequence
  Description of Artificial Sequence: Synthetic peptide
  Seed: DPRMCSLMQGSTLPRR
DPRMISLLQPSTAPRR

SEQ ID NO: 62345 - protein, 16 aa, Artificial Sequence
  Description of Artificial Sequence: Synthetic peptide
  Seed: DPRMCSLMQGSTLPRR
DPRMISLLQPSTIPRR

SEQ ID NO: 62346 - protein, 16 aa, Artificial Sequence
  Description of Artificial Sequence: Synthetic peptide
  Seed: DPRMCSLMQGSTLPRR
DPRMISLLQPSTLPRR

SEQ ID NO: 62347 - protein, 16 aa, Artificial Sequence
  Description of Artificial Sequence: Synthetic peptide
  Seed: DPRMCSLMQGSTLPRR
DPRMISLLQPSTMPRR

SEQ ID NO: 62348 - protein, 16 aa, Artificial Sequence
  Description of Artificial Sequence: Synthetic peptide
  Seed: DPRMCSLMQGSTLPRR
DPRMISLLQPSTNPRR

SEQ ID NO: 62349 - protein, 16 aa, Artificial Sequence
  Description of Artificial Sequence: Synthetic peptide
  Seed: DPRMCSLMQGSTLPRR
DPRMISLLQPSTSPRR

SEQ ID NO: 62350 - protein, 16 aa, Artificial Sequence
  Description of Artificial Sequence: Synthetic peptide
  Seed: DPRMCSLMQGSTLPRR
DPRMISLLQPSTTPRR

SEQ ID NO: 62351 - protein, 16 aa, Artificial Sequence
  Description of Artificial Sequence: Synthetic peptide
  Seed: DPRMCSLMQGSTLPRR
DPRMISLLQPSTVPRR

SEQ ID NO: 62352 - protein, 16 aa, Artificial Sequence
  Description of Artificial Sequence: Synthetic peptide
  Seed: DPRMCSLMQGSTLPRR
DPRMISLLQSSTAPRR

SEQ ID NO: 62353 - protein, 16 aa, Artificial Sequence
  Description of Artificial Sequence: Synthetic peptide
  Seed: DPRMCSLMQGSTLPRR
DPRMISLLQSSTIPRR

SEQ ID NO: 62354 - protein, 16 aa, Artificial Sequence
  Description of Artificial Sequence: Synthetic peptide
  Seed: DPRMCSLMQGSTLPRR
DPRMISLLQSSTLPRR

SEQ ID NO: 62355 - protein, 16 aa, Artificial Sequence
  Description of Artificial Sequence: Synthetic peptide
  Seed: DPRMCSLMQGSTLPRR
DPRMISLLQSSTMPRR

SEQ ID NO: 62356 - protein, 16 aa, Artificial Sequence
  Description of Artificial Sequence: Synthetic peptide
  Seed: DPRMCSLMQGSTLPRR
DPRMISLLQSSTNPRR

SEQ ID NO: 62357 - protein, 16 aa, Artificial Sequence
  Description of Artificial Sequence: Synthetic peptide
  Seed: DPRMCSLMQGSTLPRR
DPRMISLLQSSTSPRR

SEQ ID NO: 62358 - protein, 16 aa, Artificial Sequence
  Description of Artificial Sequence: Synthetic peptide
  Seed: DPRMCSLMQGSTLPRR
DPRMISLLQSSTTPRR

SEQ ID NO: 62359 - protein, 16 aa, Artificial Sequence
  Description of Artificial Sequence: Synthetic peptide
  Seed: DPRMCSLMQGSTLPRR
DPRMISLLQSSTVPRR

SEQ ID NO: 62360 - protein, 16 aa, Artificial Sequence
  Description of Artificial Sequence: Synthetic peptide
  Seed: DPRMCSLMQGSTLPRR
DPRMISLLQTSTAPRR

SEQ ID NO: 62361 - protein, 16 aa, Artificial Sequence
  Description of Artificial Sequence: Synthetic peptide
  Seed: DPRMCSLMQGSTLPRR
DPRMISLLQTSTIPRR

SEQ ID NO: 62362 - protein, 16 aa, Artificial Sequence
  Description of Artificial Sequence: Synthetic peptide
  Seed: DPRMCSLMQGSTLPRR
DPRMISLLQTSTLPRR

SEQ ID NO: 62363 - protein, 16 aa, Artificial Sequence
  Description of Artificial Sequence: Synthetic peptide
  Seed: DPRMCSLMQGSTLPRR
DPRMISLLQTSTVPRR

SEQ ID NO: 62364 - protein, 16 aa, Artificial Sequence
  Description of Artificial Sequence: Synthetic peptide
  Seed: DPRMCSLMQGSTLPRR
DPRMISLLQVSTAPRR

SEQ ID NO: 62365 - protein, 16 aa, Artificial Sequence
  Description of Artificial Sequence: Synthetic peptide
  Seed: DPRMCSLMQGSTLPRR
DPRMISLLQVSTLPRR

SEQ ID NO: 62366 - protein, 16 aa, Artificial Sequence
  Description of Artificial Sequence: Synthetic peptide
  Seed: DPRMCSLMQGSTLPRR
DPRMISLLQVSTSPRR

SEQ ID NO: 62367 - protein, 16 aa, Artificial Sequence
  Description of Artificial Sequence: Synthetic peptide
  Seed: DPRMCSLMQGSTLPRR
DPRMISLLQVSTVPRR

SEQ ID NO: 62368 - protein, 16 aa, Artificial Sequence
  Description of Artificial Sequence: Synthetic peptide
  Seed: DPRMCSLMQGSTLPRR
DPRMISLMQASTAPRR

SEQ ID NO: 62369 - protein, 16 aa, Artificial Sequence
  Description of Artificial Sequence: Synthetic peptide
  Seed: DPRMCSLMQGSTLPRR
DPRMISLMQASTGPRR

SEQ ID NO: 62370 - protein, 16 aa, Artificial Sequence
  Description of Artificial Sequence: Synthetic peptide
  Seed: DPRMCSLMQGSTLPRR
DPRMISLMQASTIPRR

SEQ ID NO: 62371 - protein, 16 aa, Artificial Sequence
  Description of Artificial Sequence: Synthetic peptide
  Seed: DPRMCSLMQGSTLPRR
DPRMISLMQASTLPRR

SEQ ID NO: 62372 - protein, 16 aa, Artificial Sequence
  Description of Artificial Sequence: Synthetic peptide
  Seed: DPRMCSLMQGSTLPRR
DPRMISLMQASTMPRR

SEQ ID NO: 62373 - protein, 16 aa, Artificial Sequence
  Description of Artificial Sequence: Synthetic peptide
  Seed: DPRMCSLMQGSTLPRR
DPRMISLMQASTNPRR

SEQ ID NO: 62374 - protein, 16 aa, Artificial Sequence
  Description of Artificial Sequence: Synthetic peptide
  Seed: DPRMCSLMQGSTLPRR
DPRMISLMQASTSPRR

SEQ ID NO: 62375 - protein, 16 aa, Artificial Sequence
  Description of Artificial Sequence: Synthetic peptide
  Seed: DPRMCSLMQGSTLPRR
DPRMISLMQASTTPRR

SEQ ID NO: 62376 - protein, 16 aa, Artificial Sequence
  Description of Artificial Sequence: Synthetic peptide
  Seed: DPRMCSLMQGSTLPRR
DPRMISLMQASTVPRR

SEQ ID NO: 62377 - protein, 16 aa, Artificial Sequence
  Description of Artificial Sequence: Synthetic peptide
  Seed: DPRMCSLMQGSTLPRR
DPRMISLMQGSTAPRR

SEQ ID NO: 62378 - protein, 16 aa, Artificial Sequence
  Description of Artificial Sequence: Synthetic peptide
  Seed: DPRMCSLMQGSTLPRR
DPRMISLMQGSTGPRR

SEQ ID NO: 62379 - protein, 16 aa, Artificial Sequence
  Description of Artificial Sequence: Synthetic peptide
  Seed: DPRMCSLMQGSTLPRR
DPRMISLMQGSTIPRR

SEQ ID NO: 62380 - protein, 16 aa, Artificial Sequence
  Description of Artificial Sequence: Synthetic peptide
  Seed: DPRMCSLMQGSTLPRR
DPRMISLMQGSTLPRR

SEQ ID NO: 62381 - protein, 16 aa, Artificial Sequence
  Description of Artificial Sequence: Synthetic peptide
  Seed: DPRMCSLMQGSTLPRR
DPRMISLMQGSTMPRR

SEQ ID NO: 62382 - protein, 16 aa, Artificial Sequence
  Description of Artificial Sequence: Synthetic peptide
  Seed: DPRMCSLMQGSTLPRR
DPRMISLMQGSTSPRR

SEQ ID NO: 62383 - protein, 16 aa, Artificial Sequence
  Description of Artificial Sequence: Synthetic peptide
  Seed: DPRMCSLMQGSTLPRR
DPRMISLMQGSTTPRR

SEQ ID NO: 62384 - protein, 16 aa, Artificial Sequence
  Description of Artificial Sequence: Synthetic peptide
  Seed: DPRMCSLMQGSTLPRR
DPRMISLMQGSTVPRR

SEQ ID NO: 62385 - protein, 16 aa, Artificial Sequence
  Description of Artificial Sequence: Synthetic peptide
  Seed: DPRMCSLMQGSTLPRR
DPRMISLMQISTAPRR

SEQ ID NO: 62386 - protein, 16 aa, Artificial Sequence
  Description of Artificial Sequence: Synthetic peptide
  Seed: DPRMCSLMQGSTLPRR
DPRMISLMQISTSPRR

SEQ ID NO: 62387 - protein, 16 aa, Artificial Sequence
  Description of Artificial Sequence: Synthetic peptide
  Seed: DPRMCSLMQGSTLPRR
DPRMISLMQNSTAPRR

SEQ ID NO: 62388 - protein, 16 aa, Artificial Sequence
  Description of Artificial Sequence: Synthetic peptide
  Seed: DPRMCSLMQGSTLPRR
DPRMISLMQNSTIPRR

SEQ ID NO: 62389 - protein, 16 aa, Artificial Sequence
  Description of Artificial Sequence: Synthetic peptide
  Seed: DPRMCSLMQGSTLPRR
DPRMISLMQNSTLPRR

SEQ ID NO: 62390 - protein, 16 aa, Artificial Sequence
  Description of Artificial Sequence: Synthetic peptide
  Seed: DPRMCSLMQGSTLPRR
DPRMISLMQNSTVPRR

SEQ ID NO: 62391 - protein, 16 aa, Artificial Sequence
  Description of Artificial Sequence: Synthetic peptide
  Seed: DPRMCSLMQGSTLPRR
DPRMISLMQPSTAPRR

SEQ ID NO: 62392 - protein, 16 aa, Artificial Sequence
  Description of Artificial Sequence: Synthetic peptide
  Seed: DPRMCSLMQGSTLPRR
DPRMISLMQPSTIPRR

SEQ ID NO: 62393 - protein, 16 aa, Artificial Sequence
  Description of Artificial Sequence: Synthetic peptide
  Seed: DPRMCSLMQGSTLPRR
DPRMISLMQPSTLPRR

SEQ ID NO: 62394 - protein, 16 aa, Artificial Sequence
  Description of Artificial Sequence: Synthetic peptide
  Seed: DPRMCSLMQGSTLPRR
DPRMISLMQPSTMPRR

SEQ ID NO: 62395 - protein, 16 aa, Artificial Sequence
  Description of Artificial Sequence: Synthetic peptide
  Seed: DPRMCSLMQGSTLPRR
DPRMISLMQPSTSPRR

SEQ ID NO: 62396 - protein, 16 aa, Artificial Sequence
  Description of Artificial Sequence: Synthetic peptide
  Seed: DPRMCSLMQGSTLPRR
DPRMISLMQPSTTPRR

SEQ ID NO: 62397 - protein, 16 aa, Artificial Sequence
  Description of Artificial Sequence: Synthetic peptide
  Seed: DPRMCSLMQGSTLPRR
DPRMISLMQPSTVPRR

SEQ ID NO: 62398 - protein, 16 aa, Artificial Sequence
  Description of Artificial Sequence: Synthetic peptide
  Seed: DPRMCSLMQGSTLPRR
DPRMISLMQSSTAPRR

SEQ ID NO: 62399 - protein, 16 aa, Artificial Sequence
  Description of Artificial Sequence: Synthetic peptide
  Seed: DPRMCSLMQGSTLPRR
DPRMISLMQSSTIPRR

SEQ ID NO: 62400 - protein, 16 aa, Artificial Sequence
  Description of Artificial Sequence: Synthetic peptide
  Seed: DPRMCSLMQGSTLPRR
DPRMISLMQSSTLPRR

SEQ ID NO: 62401 - protein, 16 aa, Artificial Sequence
  Description of Artificial Sequence: Synthetic peptide
  Seed: DPRMCSLMQGSTLPRR
DPRMISLMQSSTMPRR

SEQ ID NO: 62402 - protein, 16 aa, Artificial Sequence
  Description of Artificial Sequence: Synthetic peptide
  Seed: DPRMCSLMQGSTLPRR
DPRMISLMQSSTSPRR

SEQ ID NO: 62403 - protein, 16 aa, Artificial Sequence
  Description of Artificial Sequence: Synthetic peptide
  Seed: DPRMCSLMQGSTLPRR
DPRMISLMQSSTTPRR

SEQ ID NO: 62404 - protein, 16 aa, Artificial Sequence
  Description of Artificial Sequence: Synthetic peptide
  Seed: DPRMCSLMQGSTLPRR
DPRMISLMQSSTVPRR

SEQ ID NO: 62405 - protein, 16 aa, Artificial Sequence
  Description of Artificial Sequence: Synthetic peptide
  Seed: DPRMCSLMQGSTLPRR
DPRMISLMQTSTAPRR

SEQ ID NO: 62406 - protein, 16 aa, Artificial Sequence
  Description of Artificial Sequence: Synthetic peptide
  Seed: DPRMCSLMQGSTLPRR
DPRMISLMQTSTIPRR

SEQ ID NO: 62407 - protein, 16 aa, Artificial Sequence
  Description of Artificial Sequence: Synthetic peptide
  Seed: DPRMCSLMQGSTLPRR
DPRMISLMQTSTLPRR

SEQ ID NO: 62408 - protein, 16 aa, Artificial Sequence
  Description of Artificial Sequence: Synthetic peptide
  Seed: DPRMCSLMQGSTLPRR
DPRMISLMQTSTVPRR

SEQ ID NO: 62409 - protein, 16 aa, Artificial Sequence
  Description of Artificial Sequence: Synthetic peptide
  Seed: DPRMCSLMQGSTLPRR
DPRMISLMQVSTAPRR

SEQ ID NO: 62410 - protein, 16 aa, Artificial Sequence
  Description of Artificial Sequence: Synthetic peptide
  Seed: DPRMCSLMQGSTLPRR
DPRMISLMQVSTLPRR

SEQ ID NO: 62411 - protein, 16 aa, Artificial Sequence
  Description of Artificial Sequence: Synthetic peptide
  Seed: DPRMCSLMQGSTLPRR
DPRMISLMQVSTSPRR

SEQ ID NO: 62412 - protein, 16 aa, Artificial Sequence
  Description of Artificial Sequence: Synthetic peptide
  Seed: DPRMCSLMQGSTLPRR
DPRMISLMQVSTVPRR

SEQ ID NO: 62413 - protein, 16 aa, Artificial Sequence
  Description of Artificial Sequence: Synthetic peptide
  Seed: DPRMCSLMQGSTLPRR
DPRMISLQQASTAPRR

SEQ ID NO: 62414 - protein, 16 aa, Artificial Sequence
  Description of Artificial Sequence: Synthetic peptide
  Seed: DPRMCSLMQGSTLPRR
DPRMISLQQASTIPRR

SEQ ID NO: 62415 - protein, 16 aa, Artificial Sequence
  Description of Artificial Sequence: Synthetic peptide
  Seed: DPRMCSLMQGSTLPRR
DPRMISLQQASTLPRR

SEQ ID NO: 62416 - protein, 16 aa, Artificial Sequence
  Description of Artificial Sequence: Synthetic peptide
  Seed: DPRMCSLMQGSTLPRR
DPRMISLQQASTVPRR

SEQ ID NO: 62417 - protein, 16 aa, Artificial Sequence
  Description of Artificial Sequence: Synthetic peptide
  Seed: DPRMCSLMQGSTLPRR
DPRMISLQQGSTAPRR

SEQ ID NO: 62418 - protein, 16 aa, Artificial Sequence
  Description of Artificial Sequence: Synthetic peptide
  Seed: DPRMCSLMQGSTLPRR
DPRMISLQQGSTIPRR

SEQ ID NO: 62419 - protein, 16 aa, Artificial Sequence
  Description of Artificial Sequence: Synthetic peptide
  Seed: DPRMCSLMQGSTLPRR
DPRMISLQQGSTLPRR

SEQ ID NO: 62420 - protein, 16 aa, Artificial Sequence
  Description of Artificial Sequence: Synthetic peptide
  Seed: DPRMCSLMQGSTLPRR
DPRMISLQQGSTVPRR

SEQ ID NO: 62421 - protein, 16 aa, Artificial Sequence
  Description of Artificial Sequence: Synthetic peptide
  Seed: DPRMCSLMQGSTLPRR
DPRMISLQQSSTLPRR

SEQ ID NO: 62422 - protein, 16 aa, Artificial Sequence
  Description of Artificial Sequence: Synthetic peptide
  Seed: DPRMCSLMQGSTLPRR
DPRMISLTQFSTLPRR

SEQ ID NO: 62423 - protein, 16 aa, Artificial Sequence
  Description of Artificial Sequence: Synthetic peptide
  Seed: DPRMCSLMQGSTLPRR
DPRMISLVQASTAPRR

SEQ ID NO: 62424 - protein, 16 aa, Artificial Sequence
  Description of Artificial Sequence: Synthetic peptide
  Seed: DPRMCSLMQGSTLPRR
DPRMISLVQASTIPRR

SEQ ID NO: 62425 - protein, 16 aa, Artificial Sequence
  Description of Artificial Sequence: Synthetic peptide
  Seed: DPRMCSLMQGSTLPRR
DPRMISLVQASTLPRR

SEQ ID NO: 62426 - protein, 16 aa, Artificial Sequence
  Description of Artificial Sequence: Synthetic peptide
  Seed: DPRMCSLMQGSTLPRR
DPRMISLVQASTVPRR

SEQ ID NO: 62427 - protein, 16 aa, Artificial Sequence
  Description of Artificial Sequence: Synthetic peptide
  Seed: DPRMCSLMQGSTLPRR
DPRMISLVQGSTAPRR

SEQ ID NO: 62428 - protein, 16 aa, Artificial Sequence
  Description of Artificial Sequence: Synthetic peptide
  Seed: DPRMCSLMQGSTLPRR
DPRMISLVQGSTIPRR

SEQ ID NO: 62429 - protein, 16 aa, Artificial Sequence
  Description of Artificial Sequence: Synthetic peptide
  Seed: DPRMCSLMQGSTLPRR
DPRMISLVQGSTLPRR

SEQ ID NO: 62430 - protein, 16 aa, Artificial Sequence
  Description of Artificial Sequence: Synthetic peptide
  Seed: DPRMCSLMQGSTLPRR
DPRMISLVQGSTVPRR

SEQ ID NO: 62431 - protein, 16 aa, Artificial Sequence
  Description of Artificial Sequence: Synthetic peptide
  Seed: DPRMCSLMQGSTLPRR
DPRMLSLAQASTAPRR

SEQ ID NO: 62432 - protein, 16 aa, Artificial Sequence
  Description of Artificial Sequence: Synthetic peptide
  Seed: DPRMCSLMQGSTLPRR
DPRMLSLAQASTIPRR

SEQ ID NO: 62433 - protein, 16 aa, Artificial Sequence
  Description of Artificial Sequence: Synthetic peptide
  Seed: DPRMCSLMQGSTLPRR
DPRMLSLAQASTLPRR

SEQ ID NO: 62434 - protein, 16 aa, Artificial Sequence
  Description of Artificial Sequence: Synthetic peptide
  Seed: DPRMCSLMQGSTLPRR
DPRMLSLAQASTVPRR

SEQ ID NO: 62435 - protein, 16 aa, Artificial Sequence
  Description of Artificial Sequence: Synthetic peptide
  Seed: DPRMCSLMQGSTLPRR
DPRMLSLAQGSTIPRR

SEQ ID NO: 62436 - protein, 16 aa, Artificial Sequence
  Description of Artificial Sequence: Synthetic peptide
  Seed: DPRMCSLMQGSTLPRR
DPRMLSLAQGSTLPRR

SEQ ID NO: 62437 - protein, 16 aa, Artificial Sequence
  Description of Artificial Sequence: Synthetic peptide
  Seed: DPRMCSLMQGSTLPRR
DPRMLSLAQGSTVPRR

SEQ ID NO: 62438 - protein, 16 aa, Artificial Sequence
  Description of Artificial Sequence: Synthetic peptide
  Seed: DPRMCSLMQGSTLPRR
DPRMLSLIQASTAPRR

SEQ ID NO: 62439 - protein, 16 aa, Artificial Sequence
  Description of Artificial Sequence: Synthetic peptide
  Seed: DPRMCSLMQGSTLPRR
DPRMLSLIQASTIPRR

SEQ ID NO: 62440 - protein, 16 aa, Artificial Sequence
  Description of Artificial Sequence: Synthetic peptide
  Seed: DPRMCSLMQGSTLPRR
DPRMLSLIQASTLPRR

SEQ ID NO: 62441 - protein, 16 aa, Artificial Sequence
  Description of Artificial Sequence: Synthetic peptide
  Seed: DPRMCSLMQGSTLPRR
DPRMLSLIQASTSPRR

SEQ ID NO: 62442 - protein, 16 aa, Artificial Sequence
  Description of Artificial Sequence: Synthetic peptide
  Seed: DPRMCSLMQGSTLPRR
DPRMLSLIQASTVPRR

SEQ ID NO: 62443 - protein, 16 aa, Artificial Sequence
  Description of Artificial Sequence: Synthetic peptide
  Seed: DPRMCSLMQGSTLPRR
DPRMLSLIQFSTLPRR

SEQ ID NO: 62444 - protein, 16 aa, Artificial Sequence
  Description of Artificial Sequence: Synthetic peptide
  Seed: DPRMCSLMQGSTLPRR
DPRMLSLIQGSTAPRR

SEQ ID NO: 62445 - protein, 16 aa, Artificial Sequence
  Description of Artificial Sequence: Synthetic peptide
  Seed: DPRMCSLMQGSTLPRR
DPRMLSLIQGSTIPRR

SEQ ID NO: 62446 - protein, 16 aa, Artificial Sequence
  Description of Artificial Sequence: Synthetic peptide
  Seed: DPRMCSLMQGSTLPRR
DPRMLSLIQGSTLPRR

SEQ ID NO: 62447 - protein, 16 aa, Artificial Sequence
  Description of Artificial Sequence: Synthetic peptide
  Seed: DPRMCSLMQGSTLPRR
DPRMLSLIQGSTVPRR

SEQ ID NO: 62448 - protein, 16 aa, Artificial Sequence
  Description of Artificial Sequence: Synthetic peptide
  Seed: DPRMCSLMQGSTLPRR
DPRMLSLIQSSTAPRR

SEQ ID NO: 62449 - protein, 16 aa, Artificial Sequence
  Description of Artificial Sequence: Synthetic peptide
  Seed: DPRMCSLMQGSTLPRR
DPRMLSLIQSSTIPRR

SEQ ID NO: 62450 - protein, 16 aa, Artificial Sequence
  Description of Artificial Sequence: Synthetic peptide
  Seed: DPRMCSLMQGSTLPRR
DPRMLSLIQSSTLPRR

SEQ ID NO: 62451 - protein, 16 aa, Artificial Sequence
  Description of Artificial Sequence: Synthetic peptide
  Seed: DPRMCSLMQGSTLPRR
DPRMLSLIQSSTVPRR

SEQ ID NO: 62452 - protein, 16 aa, Artificial Sequence
  Description of Artificial Sequence: Synthetic peptide
  Seed: DPRMCSLMQGSTLPRR
DPRMLSLLQASTAPRR

SEQ ID NO: 62453 - protein, 16 aa, Artificial Sequence
  Description of Artificial Sequence: Synthetic peptide
  Seed: DPRMCSLMQGSTLPRR
DPRMLSLLQASTGPRR

SEQ ID NO: 62454 - protein, 16 aa, Artificial Sequence
  Description of Artificial Sequence: Synthetic peptide
  Seed: DPRMCSLMQGSTLPRR
DPRMLSLLQASTIPRR

SEQ ID NO: 62455 - protein, 16 aa, Artificial Sequence
  Description of Artificial Sequence: Synthetic peptide
  Seed: DPRMCSLMQGSTLPRR
DPRMLSLLQASTLPRR

SEQ ID NO: 62456 - protein, 16 aa, Artificial Sequence
  Description of Artificial Sequence: Synthetic peptide
  Seed: DPRMCSLMQGSTLPRR
DPRMLSLLQASTMPRR

SEQ ID NO: 62457 - protein, 16 aa, Artificial Sequence
  Description of Artificial Sequence: Synthetic peptide
  Seed: DPRMCSLMQGSTLPRR
DPRMLSLLQASTNPRR

SEQ ID NO: 62458 - protein, 16 aa, Artificial Sequence
  Description of Artificial Sequence: Synthetic peptide
  Seed: DPRMCSLMQGSTLPRR
DPRMLSLLQASTSPRR

SEQ ID NO: 62459 - protein, 16 aa, Artificial Sequence
  Description of Artificial Sequence: Synthetic peptide
  Seed: DPRMCSLMQGSTLPRR
DPRMLSLLQASTTPRR

SEQ ID NO: 62460 - protein, 16 aa, Artificial Sequence
  Description of Artificial Sequence: Synthetic peptide
  Seed: DPRMCSLMQGSTLPRR
DPRMLSLLQASTVPRR

SEQ ID NO: 62461 - protein, 16 aa, Artificial Sequence
  Description of Artificial Sequence: Synthetic peptide
  Seed: DPRMCSLMQGSTLPRR
DPRMLSLLQFSTLPRR

SEQ ID NO: 62462 - protein, 16 aa, Artificial Sequence
  Description of Artificial Sequence: Synthetic peptide
  Seed: DPRMCSLMQGSTLPRR
DPRMLSLLQGSTAPRR

SEQ ID NO: 62463 - protein, 16 aa, Artificial Sequence
  Description of Artificial Sequence: Synthetic peptide
  Seed: DPRMCSLMQGSTLPRR
DPRMLSLLQGSTGPRR

SEQ ID NO: 62464 - protein, 16 aa, Artificial Sequence
  Description of Artificial Sequence: Synthetic peptide
  Seed: DPRMCSLMQGSTLPRR
DPRMLSLLQGSTIPRR

SEQ ID NO: 62465 - protein, 16 aa, Artificial Sequence
  Description of Artificial Sequence: Synthetic peptide
  Seed: DPRMCSLMQGSTLPRR
DPRMLSLLQGSTLPRR

SEQ ID NO: 62466 - protein, 16 aa, Artificial Sequence
  Description of Artificial Sequence: Synthetic peptide
  Seed: DPRMCSLMQGSTLPRR
DPRMLSLLQGSTMPRR

SEQ ID NO: 62467 - protein, 16 aa, Artificial Sequence
  Description of Artificial Sequence: Synthetic peptide
  Seed: DPRMCSLMQGSTLPRR
DPRMLSLLQGSTSPRR

SEQ ID NO: 62468 - protein, 16 aa, Artificial Sequence
  Description of Artificial Sequence: Synthetic peptide
  Seed: DPRMCSLMQGSTLPRR
DPRMLSLLQGSTTPRR

SEQ ID NO: 62469 - protein, 16 aa, Artificial Sequence
  Description of Artificial Sequence: Synthetic peptide
  Seed: DPRMCSLMQGSTLPRR
DPRMLSLLQGSTVPRR

SEQ ID NO: 62470 - protein, 16 aa, Artificial Sequence
  Description of Artificial Sequence: Synthetic peptide
  Seed: DPRMCSLMQGSTLPRR
DPRMLSLLQISTAPRR

SEQ ID NO: 62471 - protein, 16 aa, Artificial Sequence
  Description of Artificial Sequence: Synthetic peptide
  Seed: DPRMCSLMQGSTLPRR
DPRMLSLLQNSTAPRR

SEQ ID NO: 62472 - protein, 16 aa, Artificial Sequence
  Description of Artificial Sequence: Synthetic peptide
  Seed: DPRMCSLMQGSTLPRR
DPRMLSLLQNSTIPRR

SEQ ID NO: 62473 - protein, 16 aa, Artificial Sequence
  Description of Artificial Sequence: Synthetic peptide
  Seed: DPRMCSLMQGSTLPRR
DPRMLSLLQNSTLPRR

SEQ ID NO: 62474 - protein, 16 aa, Artificial Sequence
  Description of Artificial Sequence: Synthetic peptide
  Seed: DPRMCSLMQGSTLPRR
DPRMLSLLQNSTVPRR

SEQ ID NO: 62475 - protein, 16 aa, Artificial Sequence
  Description of Artificial Sequence: Synthetic peptide
  Seed: DPRMCSLMQGSTLPRR
DPRMLSLLQPSTAPRR

SEQ ID NO: 62476 - protein, 16 aa, Artificial Sequence
  Description of Artificial Sequence: Synthetic peptide
  Seed: DPRMCSLMQGSTLPRR
DPRMLSLLQPSTIPRR

SEQ ID NO: 62477 - protein, 16 aa, Artificial Sequence
  Description of Artificial Sequence: Synthetic peptide
  Seed: DPRMCSLMQGSTLPRR
DPRMLSLLQPSTLPRR

SEQ ID NO: 62478 - protein, 16 aa, Artificial Sequence
  Description of Artificial Sequence: Synthetic peptide
  Seed: DPRMCSLMQGSTLPRR
DPRMLSLLQPSTMPRR

SEQ ID NO: 62479 - protein, 16 aa, Artificial Sequence
  Description of Artificial Sequence: Synthetic peptide
  Seed: DPRMCSLMQGSTLPRR
DPRMLSLLQPSTNPRR

SEQ ID NO: 62480 - protein, 16 aa, Artificial Sequence
  Description of Artificial Sequence: Synthetic peptide
  Seed: DPRMCSLMQGSTLPRR
DPRMLSLLQPSTSPRR

SEQ ID NO: 62481 - protein, 16 aa, Artificial Sequence
  Description of Artificial Sequence: Synthetic peptide
  Seed: DPRMCSLMQGSTLPRR
DPRMLSLLQPSTVPRR

SEQ ID NO: 62482 - protein, 16 aa, Artificial Sequence
  Description of Artificial Sequence: Synthetic peptide
  Seed: DPRMCSLMQGSTLPRR
DPRMLSLLQSSTAPRR

SEQ ID NO: 62483 - protein, 16 aa, Artificial Sequence
  Description of Artificial Sequence: Synthetic peptide
  Seed: DPRMCSLMQGSTLPRR
DPRMLSLLQSSTIPRR

SEQ ID NO: 62484 - protein, 16 aa, Artificial Sequence
  Description of Artificial Sequence: Synthetic peptide
  Seed: DPRMCSLMQGSTLPRR
DPRMLSLLQSSTLPRR

SEQ ID NO: 62485 - protein, 16 aa, Artificial Sequence
  Description of Artificial Sequence: Synthetic peptide
  Seed: DPRMCSLMQGSTLPRR
DPRMLSLLQSSTMPRR

SEQ ID NO: 62486 - protein, 16 aa, Artificial Sequence
  Description of Artificial Sequence: Synthetic peptide
  Seed: DPRMCSLMQGSTLPRR
DPRMLSLLQSSTNPRR

SEQ ID NO: 62487 - protein, 16 aa, Artificial Sequence
  Description of Artificial Sequence: Synthetic peptide
  Seed: DPRMCSLMQGSTLPRR
DPRMLSLLQSSTSPRR

SEQ ID NO: 62488 - protein, 16 aa, Artificial Sequence
  Description of Artificial Sequence: Synthetic peptide
  Seed: DPRMCSLMQGSTLPRR
DPRMLSLLQSSTTPRR

SEQ ID NO: 62489 - protein, 16 aa, Artificial Sequence
  Description of Artificial Sequence: Synthetic peptide
  Seed: DPRMCSLMQGSTLPRR
DPRMLSLLQSSTVPRR

SEQ ID NO: 62490 - protein, 16 aa, Artificial Sequence
  Description of Artificial Sequence: Synthetic peptide
  Seed: DPRMCSLMQGSTLPRR
DPRMLSLLQTSTAPRR

SEQ ID NO: 62491 - protein, 16 aa, Artificial Sequence
  Description of Artificial Sequence: Synthetic peptide
  Seed: DPRMCSLMQGSTLPRR
DPRMLSLLQTSTIPRR

SEQ ID NO: 62492 - protein, 16 aa, Artificial Sequence
  Description of Artificial Sequence: Synthetic peptide
  Seed: DPRMCSLMQGSTLPRR
DPRMLSLLQTSTLPRR

SEQ ID NO: 62493 - protein, 16 aa, Artificial Sequence
  Description of Artificial Sequence: Synthetic peptide
  Seed: DPRMCSLMQGSTLPRR
DPRMLSLLQTSTSPRR

SEQ ID NO: 62494 - protein, 16 aa, Artificial Sequence
  Description of Artificial Sequence: Synthetic peptide
  Seed: DPRMCSLMQGSTLPRR
DPRMLSLLQTSTVPRR

SEQ ID NO: 62495 - protein, 16 aa, Artificial Sequence
  Description of Artificial Sequence: Synthetic peptide
  Seed: DPRMCSLMQGSTLPRR
DPRMLSLLQVSTAPRR

SEQ ID NO: 62496 - protein, 16 aa, Artificial Sequence
  Description of Artificial Sequence: Synthetic peptide
  Seed: DPRMCSLMQGSTLPRR
DPRMLSLLQVSTNPRR

SEQ ID NO: 62497 - protein, 16 aa, Artificial Sequence
  Description of Artificial Sequence: Synthetic peptide
  Seed: DPRMCSLMQGSTLPRR
DPRMLSLLQVSTSPRR

SEQ ID NO: 62498 - protein, 16 aa, Artificial Sequence
  Description of Artificial Sequence: Synthetic peptide
  Seed: DPRMCSLMQGSTLPRR
DPRMLSLMQASTAPRR

SEQ ID NO: 62499 - protein, 16 aa, Artificial Sequence
  Description of Artificial Sequence: Synthetic peptide
  Seed: DPRMCSLMQGSTLPRR
DPRMLSLMQASTIPRR

SEQ ID NO: 62500 - protein, 16 aa, Artificial Sequence
  Description of Artificial Sequence: Synthetic peptide
  Seed: DPRMCSLMQGSTLPRR
DPRMLSLMQASTLPRR

SEQ ID NO: 62501 - protein, 16 aa, Artificial Sequence
  Description of Artificial Sequence: Synthetic peptide
  Seed: DPRMCSLMQGSTLPRR
DPRMLSLMQASTMPRR

SEQ ID NO: 62502 - protein, 16 aa, Artificial Sequence
  Description of Artificial Sequence: Synthetic peptide
  Seed: DPRMCSLMQGSTLPRR
DPRMLSLMQASTNPRR

SEQ ID NO: 62503 - protein, 16 aa, Artificial Sequence
  Description of Artificial Sequence: Synthetic peptide
  Seed: DPRMCSLMQGSTLPRR
DPRMLSLMQASTSPRR

SEQ ID NO: 62504 - protein, 16 aa, Artificial Sequence
  Description of Artificial Sequence: Synthetic peptide
  Seed: DPRMCSLMQGSTLPRR
DPRMLSLMQASTTPRR

SEQ ID NO: 62505 - protein, 16 aa, Artificial Sequence
  Description of Artificial Sequence: Synthetic peptide
  Seed: DPRMCSLMQGSTLPRR
DPRMLSLMQASTVPRR

SEQ ID NO: 62506 - protein, 16 aa, Artificial Sequence
  Description of Artificial Sequence: Synthetic peptide
  Seed: DPRMCSLMQGSTLPRR
DPRMLSLMQGSTAPRR

SEQ ID NO: 62507 - protein, 16 aa, Artificial Sequence
  Description of Artificial Sequence: Synthetic peptide
  Seed: DPRMCSLMQGSTLPRR
DPRMLSLMQGSTIPRR

SEQ ID NO: 62508 - protein, 16 aa, Artificial Sequence
  Description of Artificial Sequence: Synthetic peptide
  Seed: DPRMCSLMQGSTLPRR
DPRMLSLMQGSTLPRR

SEQ ID NO: 62509 - protein, 16 aa, Artificial Sequence
  Description of Artificial Sequence: Synthetic peptide
  Seed: DPRMCSLMQGSTLPRR
DPRMLSLMQGSTMPRR

SEQ ID NO: 62510 - protein, 16 aa, Artificial Sequence
  Description of Artificial Sequence: Synthetic peptide
  Seed: DPRMCSLMQGSTLPRR
DPRMLSLMQGSTSPRR

SEQ ID NO: 62511 - protein, 16 aa, Artificial Sequence
  Description of Artificial Sequence: Synthetic peptide
  Seed: DPRMCSLMQGSTLPRR
DPRMLSLMQGSTTPRR

SEQ ID NO: 62512 - protein, 16 aa, Artificial Sequence
  Description of Artificial Sequence: Synthetic peptide
  Seed: DPRMCSLMQGSTLPRR
DPRMLSLMQGSTVPRR

SEQ ID NO: 62513 - protein, 16 aa, Artificial Sequence
  Description of Artificial Sequence: Synthetic peptide
  Seed: DPRMCSLMQGSTLPRR
DPRMLSLMQISTAPRR

SEQ ID NO: 62514 - protein, 16 aa, Artificial Sequence
  Description of Artificial Sequence: Synthetic peptide
  Seed: DPRMCSLMQGSTLPRR
DPRMLSLMQISTSPRR

SEQ ID NO: 62515 - protein, 16 aa, Artificial Sequence
  Description of Artificial Sequence: Synthetic peptide
  Seed: DPRMCSLMQGSTLPRR
DPRMLSLMQNSTIPRR

SEQ ID NO: 62516 - protein, 16 aa, Artificial Sequence
  Description of Artificial Sequence: Synthetic peptide
  Seed: DPRMCSLMQGSTLPRR
DPRMLSLMQNSTLPRR

SEQ ID NO: 62517 - protein, 16 aa, Artificial Sequence
  Description of Artificial Sequence: Synthetic peptide
  Seed: DPRMCSLMQGSTLPRR
DPRMLSLMQNSTVPRR

SEQ ID NO: 62518 - protein, 16 aa, Artificial Sequence
  Description of Artificial Sequence: Synthetic peptide
  Seed: DPRMCSLMQGSTLPRR
DPRMLSLMQPSTAPRR

SEQ ID NO: 62519 - protein, 16 aa, Artificial Sequence
  Description of Artificial Sequence: Synthetic peptide
  Seed: DPRMCSLMQGSTLPRR
DPRMLSLMQPSTIPRR

SEQ ID NO: 62520 - protein, 16 aa, Artificial Sequence
  Description of Artificial Sequence: Synthetic peptide
  Seed: DPRMCSLMQGSTLPRR
DPRMLSLMQPSTLPRR

SEQ ID NO: 62521 - protein, 16 aa, Artificial Sequence
  Description of Artificial Sequence: Synthetic peptide
  Seed: DPRMCSLMQGSTLPRR
DPRMLSLMQPSTMPRR

SEQ ID NO: 62522 - protein, 16 aa, Artificial Sequence
  Description of Artificial Sequence: Synthetic peptide
  Seed: DPRMCSLMQGSTLPRR
DPRMLSLMQPSTNPRR

SEQ ID NO: 62523 - protein, 16 aa, Artificial Sequence
  Description of Artificial Sequence: Synthetic peptide
  Seed: DPRMCSLMQGSTLPRR
DPRMLSLMQPSTSPRR

SEQ ID NO: 62524 - protein, 16 aa, Artificial Sequence
  Description of Artificial Sequence: Synthetic peptide
  Seed: DPRMCSLMQGSTLPRR
DPRMLSLMQPSTVPRR

SEQ ID NO: 62525 - protein, 16 aa, Artificial Sequence
  Description of Artificial Sequence: Synthetic peptide
  Seed: DPRMCSLMQGSTLPRR
DPRMLSLMQSSTAPRR

SEQ ID NO: 62526 - protein, 16 aa, Artificial Sequence
  Description of Artificial Sequence: Synthetic peptide
  Seed: DPRMCSLMQGSTLPRR
DPRMLSLMQSSTIPRR

SEQ ID NO: 62527 - protein, 16 aa, Artificial Sequence
  Description of Artificial Sequence: Synthetic peptide
  Seed: DPRMCSLMQGSTLPRR
DPRMLSLMQSSTLPRR

SEQ ID NO: 62528 - protein, 16 aa, Artificial Sequence
  Description of Artificial Sequence: Synthetic peptide
  Seed: DPRMCSLMQGSTLPRR
DPRMLSLMQSSTMPRR

SEQ ID NO: 62529 - protein, 16 aa, Artificial Sequence
  Description of Artificial Sequence: Synthetic peptide
  Seed: DPRMCSLMQGSTLPRR
DPRMLSLMQSSTNPRR

SEQ ID NO: 62530 - protein, 16 aa, Artificial Sequence
  Description of Artificial Sequence: Synthetic peptide
  Seed: DPRMCSLMQGSTLPRR
DPRMLSLMQSSTSPRR

SEQ ID NO: 62531 - protein, 16 aa, Artificial Sequence
  Description of Artificial Sequence: Synthetic peptide
  Seed: DPRMCSLMQGSTLPRR
DPRMLSLMQSSTTPRR

SEQ ID NO: 62532 - protein, 16 aa, Artificial Sequence
  Description of Artificial Sequence: Synthetic peptide
  Seed: DPRMCSLMQGSTLPRR
DPRMLSLMQSSTVPRR

SEQ ID NO: 62533 - protein, 16 aa, Artificial Sequence
  Description of Artificial Sequence: Synthetic peptide
  Seed: DPRMCSLMQGSTLPRR
DPRMLSLMQTSTAPRR

SEQ ID NO: 62534 - protein, 16 aa, Artificial Sequence
  Description of Artificial Sequence: Synthetic peptide
  Seed: DPRMCSLMQGSTLPRR
DPRMLSLMQTSTIPRR

SEQ ID NO: 62535 - protein, 16 aa, Artificial Sequence
  Description of Artificial Sequence: Synthetic peptide
  Seed: DPRMCSLMQGSTLPRR
DPRMLSLMQTSTLPRR

SEQ ID NO: 62536 - protein, 16 aa, Artificial Sequence
  Description of Artificial Sequence: Synthetic peptide
  Seed: DPRMCSLMQGSTLPRR
DPRMLSLMQTSTSPRR

SEQ ID NO: 62537 - protein, 16 aa, Artificial Sequence
  Description of Artificial Sequence: Synthetic peptide
  Seed: DPRMCSLMQGSTLPRR
DPRMLSLMQTSTVPRR

SEQ ID NO: 62538 - protein, 16 aa, Artificial Sequence
  Description of Artificial Sequence: Synthetic peptide
  Seed: DPRMCSLMQGSTLPRR
DPRMLSLMQVSTAPRR

SEQ ID NO: 62539 - protein, 16 aa, Artificial Sequence
  Description of Artificial Sequence: Synthetic peptide
  Seed: DPRMCSLMQGSTLPRR
DPRMLSLMQVSTNPRR

SEQ ID NO: 62540 - protein, 16 aa, Artificial Sequence
  Description of Artificial Sequence: Synthetic peptide
  Seed: DPRMCSLMQGSTLPRR
DPRMLSLMQVSTSPRR

SEQ ID NO: 62541 - protein, 16 aa, Artificial Sequence
  Description of Artificial Sequence: Synthetic peptide
  Seed: DPRMCSLMQGSTLPRR
DPRMLSLQQASTIPRR

SEQ ID NO: 62542 - protein, 16 aa, Artificial Sequence
  Description of Artificial Sequence: Synthetic peptide
  Seed: DPRMCSLMQGSTLPRR
DPRMLSLQQASTLPRR

SEQ ID NO: 62543 - protein, 16 aa, Artificial Sequence
  Description of Artificial Sequence: Synthetic peptide
  Seed: DPRMCSLMQGSTLPRR
DPRMLSLQQASTVPRR

SEQ ID NO: 62544 - protein, 16 aa, Artificial Sequence
  Description of Artificial Sequence: Synthetic peptide
  Seed: DPRMCSLMQGSTLPRR
DPRMLSLQQGSTLPRR

SEQ ID NO: 62545 - protein, 16 aa, Artificial Sequence
  Description of Artificial Sequence: Synthetic peptide
  Seed: DPRMCSLMQGSTLPRR
DPRMLSLVQASTLPRR

SEQ ID NO: 62546 - protein, 16 aa, Artificial Sequence
  Description of Artificial Sequence: Synthetic peptide
  Seed: DPRMCSLMQGSTLPRR
DPRMMSLIQASTLPRR

SEQ ID NO: 62547 - protein, 16 aa, Artificial Sequence
  Description of Artificial Sequence: Synthetic peptide
  Seed: DPRMCSLMQGSTLPRR
DPRMMSLIQASTVPRR

SEQ ID NO: 62548 - protein, 16 aa, Artificial Sequence
  Description of Artificial Sequence: Synthetic peptide
  Seed: DPRMCSLMQGSTLPRR
DPRMMSLIQGSTLPRR

SEQ ID NO: 62549 - protein, 16 aa, Artificial Sequence
  Description of Artificial Sequence: Synthetic peptide
  Seed: DPRMCSLMQGSTLPRR
DPRMMSLIQGSTVPRR

SEQ ID NO: 62550 - protein, 16 aa, Artificial Sequence
  Description of Artificial Sequence: Synthetic peptide
  Seed: DPRMCSLMQGSTLPRR
DPRMMSLLQASTAPRR

SEQ ID NO: 62551 - protein, 16 aa, Artificial Sequence
  Description of Artificial Sequence: Synthetic peptide
  Seed: DPRMCSLMQGSTLPRR
DPRMMSLLQASTIPRR

SEQ ID NO: 62552 - protein, 16 aa, Artificial Sequence
  Description of Artificial Sequence: Synthetic peptide
  Seed: DPRMCSLMQGSTLPRR
DPRMMSLLQASTLPRR

SEQ ID NO: 62553 - protein, 16 aa, Artificial Sequence
  Description of Artificial Sequence: Synthetic peptide
  Seed: DPRMCSLMQGSTLPRR
DPRMMSLLQASTMPRR

SEQ ID NO: 62554 - protein, 16 aa, Artificial Sequence
  Description of Artificial Sequence: Synthetic peptide
  Seed: DPRMCSLMQGSTLPRR
DPRMMSLLQASTSPRR

SEQ ID NO: 62555 - protein, 16 aa, Artificial Sequence
  Description of Artificial Sequence: Synthetic peptide
  Seed: DPRMCSLMQGSTLPRR
DPRMMSLLQASTTPRR

SEQ ID NO: 62556 - protein, 16 aa, Artificial Sequence
  Description of Artificial Sequence: Synthetic peptide
  Seed: DPRMCSLMQGSTLPRR
DPRMMSLLQASTVPRR

SEQ ID NO: 62557 - protein, 16 aa, Artificial Sequence
  Description of Artificial Sequence: Synthetic peptide
  Seed: DPRMCSLMQGSTLPRR
DPRMMSLLQGSTAPRR

SEQ ID NO: 62558 - protein, 16 aa, Artificial Sequence
  Description of Artificial Sequence: Synthetic peptide
  Seed: DPRMCSLMQGSTLPRR
DPRMMSLLQGSTIPRR

SEQ ID NO: 62559 - protein, 16 aa, Artificial Sequence
  Description of Artificial Sequence: Synthetic peptide
  Seed: DPRMCSLMQGSTLPRR
DPRMMSLLQGSTLPRR

SEQ ID NO: 62560 - protein, 16 aa, Artificial Sequence
  Description of Artificial Sequence: Synthetic peptide
  Seed: DPRMCSLMQGSTLPRR
DPRMMSLLQGSTMPRR

SEQ ID NO: 62561 - protein, 16 aa, Artificial Sequence
  Description of Artificial Sequence: Synthetic peptide
  Seed: DPRMCSLMQGSTLPRR
DPRMMSLLQGSTTPRR

SEQ ID NO: 62562 - protein, 16 aa, Artificial Sequence
  Description of Artificial Sequence: Synthetic peptide
  Seed: DPRMCSLMQGSTLPRR
DPRMMSLLQGSTVPRR

SEQ ID NO: 62563 - protein, 16 aa, Artificial Sequence
  Description of Artificial Sequence: Synthetic peptide
  Seed: DPRMCSLMQGSTLPRR
DPRMMSLLQPSTAPRR

SEQ ID NO: 62564 - protein, 16 aa, Artificial Sequence
  Description of Artificial Sequence: Synthetic peptide
  Seed: DPRMCSLMQGSTLPRR
DPRMMSLLQPSTIPRR

SEQ ID NO: 62565 - protein, 16 aa, Artificial Sequence
  Description of Artificial Sequence: Synthetic peptide
  Seed: DPRMCSLMQGSTLPRR
DPRMMSLLQPSTLPRR

SEQ ID NO: 62566 - protein, 16 aa, Artificial Sequence
  Description of Artificial Sequence: Synthetic peptide
  Seed: DPRMCSLMQGSTLPRR
DPRMMSLLQPSTVPRR

SEQ ID NO: 62567 - protein, 16 aa, Artificial Sequence
  Description of Artificial Sequence: Synthetic peptide
  Seed: DPRMCSLMQGSTLPRR
DPRMMSLLQSSTAPRR

SEQ ID NO: 62568 - protein, 16 aa, Artificial Sequence
  Description of Artificial Sequence: Synthetic peptide
  Seed: DPRMCSLMQGSTLPRR
DPRMMSLLQSSTIPRR

SEQ ID NO: 62569 - protein, 16 aa, Artificial Sequence
  Description of Artificial Sequence: Synthetic peptide
  Seed: DPRMCSLMQGSTLPRR
DPRMMSLLQSSTLPRR

SEQ ID NO: 62570 - protein, 16 aa, Artificial Sequence
  Description of Artificial Sequence: Synthetic peptide
  Seed: DPRMCSLMQGSTLPRR
DPRMMSLLQSSTVPRR

SEQ ID NO: 62571 - protein, 16 aa, Artificial Sequence
  Description of Artificial Sequence: Synthetic peptide
  Seed: DPRMCSLMQGSTLPRR
DPRMMSLLQVSTAPRR

SEQ ID NO: 62572 - protein, 16 aa, Artificial Sequence
  Description of Artificial Sequence: Synthetic peptide
  Seed: DPRMCSLMQGSTLPRR
DPRMMSLMQASTAPRR

SEQ ID NO: 62573 - protein, 16 aa, Artificial Sequence
  Description of Artificial Sequence: Synthetic peptide
  Seed: DPRMCSLMQGSTLPRR
DPRMMSLMQASTIPRR

SEQ ID NO: 62574 - protein, 16 aa, Artificial Sequence
  Description of Artificial Sequence: Synthetic peptide
  Seed: DPRMCSLMQGSTLPRR
DPRMMSLMQASTLPRR

SEQ ID NO: 62575 - protein, 16 aa, Artificial Sequence
  Description of Artificial Sequence: Synthetic peptide
  Seed: DPRMCSLMQGSTLPRR
DPRMMSLMQASTMPRR

SEQ ID NO: 62576 - protein, 16 aa, Artificial Sequence
  Description of Artificial Sequence: Synthetic peptide
  Seed: DPRMCSLMQGSTLPRR
DPRMMSLMQASTSPRR

SEQ ID NO: 62577 - protein, 16 aa, Artificial Sequence
  Description of Artificial Sequence: Synthetic peptide
  Seed: DPRMCSLMQGSTLPRR
DPRMMSLMQASTTPRR

SEQ ID NO: 62578 - protein, 16 aa, Artificial Sequence
  Description of Artificial Sequence: Synthetic peptide
  Seed: DPRMCSLMQGSTLPRR
DPRMMSLMQASTVPRR

SEQ ID NO: 62579 - protein, 16 aa, Artificial Sequence
  Description of Artificial Sequence: Synthetic peptide
  Seed: DPRMCSLMQGSTLPRR
DPRMMSLMQGSTAPRR

SEQ ID NO: 62580 - protein, 16 aa, Artificial Sequence
  Description of Artificial Sequence: Synthetic peptide
  Seed: DPRMCSLMQGSTLPRR
DPRMMSLMQGSTIPRR

SEQ ID NO: 62581 - protein, 16 aa, Artificial Sequence
  Description of Artificial Sequence: Synthetic peptide
  Seed: DPRMCSLMQGSTLPRR
DPRMMSLMQGSTLPRR

SEQ ID NO: 62582 - protein, 16 aa, Artificial Sequence
  Description of Artificial Sequence: Synthetic peptide
  Seed: DPRMCSLMQGSTLPRR
DPRMMSLMQGSTMPRR

SEQ ID NO: 62583 - protein, 16 aa, Artificial Sequence
  Description of Artificial Sequence: Synthetic peptide
  Seed: DPRMCSLMQGSTLPRR
DPRMMSLMQGSTTPRR

SEQ ID NO: 62584 - protein, 16 aa, Artificial Sequence
  Description of Artificial Sequence: Synthetic peptide
  Seed: DPRMCSLMQGSTLPRR
DPRMMSLMQGSTVPRR

SEQ ID NO: 62585 - protein, 16 aa, Artificial Sequence
  Description of Artificial Sequence: Synthetic peptide
  Seed: DPRMCSLMQGSTLPRR
DPRMMSLMQISTAPRR

SEQ ID NO: 62586 - protein, 16 aa, Artificial Sequence
  Description of Artificial Sequence: Synthetic peptide
  Seed: DPRMCSLMQGSTLPRR
DPRMMSLMQPSTAPRR

SEQ ID NO: 62587 - protein, 16 aa, Artificial Sequence
  Description of Artificial Sequence: Synthetic peptide
  Seed: DPRMCSLMQGSTLPRR
DPRMMSLMQPSTIPRR

SEQ ID NO: 62588 - protein, 16 aa, Artificial Sequence
  Description of Artificial Sequence: Synthetic peptide
  Seed: DPRMCSLMQGSTLPRR
DPRMMSLMQPSTLPRR

SEQ ID NO: 62589 - protein, 16 aa, Artificial Sequence
  Description of Artificial Sequence: Synthetic peptide
  Seed: DPRMCSLMQGSTLPRR
DPRMMSLMQPSTVPRR

SEQ ID NO: 62590 - protein, 16 aa, Artificial Sequence
  Description of Artificial Sequence: Synthetic peptide
  Seed: DPRMCSLMQGSTLPRR
DPRMMSLMQSSTAPRR

SEQ ID NO: 62591 - protein, 16 aa, Artificial Sequence
  Description of Artificial Sequence: Synthetic peptide
  Seed: DPRMCSLMQGSTLPRR
DPRMMSLMQSSTIPRR

SEQ ID NO: 62592 - protein, 16 aa, Artificial Sequence
  Description of Artificial Sequence: Synthetic peptide
  Seed: DPRMCSLMQGSTLPRR
DPRMMSLMQSSTLPRR

SEQ ID NO: 62593 - protein, 16 aa, Artificial Sequence
  Description of Artificial Sequence: Synthetic peptide
  Seed: DPRMCSLMQGSTLPRR
DPRMMSLMQSSTVPRR

SEQ ID NO: 62594 - protein, 16 aa, Artificial Sequence
  Description of Artificial Sequence: Synthetic peptide
  Seed: DPRMCSLMQGSTLPRR
DPRMMSLMQVSTAPRR

SEQ ID NO: 62595 - protein, 16 aa, Artificial Sequence
  Description of Artificial Sequence: Synthetic peptide
  Seed: DPRMCSLMQGSTLPRR
DPRMVSLIQASTLPRR

SEQ ID NO: 62596 - protein, 16 aa, Artificial Sequence
  Description of Artificial Sequence: Synthetic peptide
  Seed: DPRMCSLMQGSTLPRR
DPRMVSLLQASTAPRR

SEQ ID NO: 62597 - protein, 16 aa, Artificial Sequence
  Description of Artificial Sequence: Synthetic peptide
  Seed: DPRMCSLMQGSTLPRR
DPRMVSLLQASTIPRR

SEQ ID NO: 62598 - protein, 16 aa, Artificial Sequence
  Description of Artificial Sequence: Synthetic peptide
  Seed: DPRMCSLMQGSTLPRR
DPRMVSLLQASTLPRR

SEQ ID NO: 62599 - protein, 16 aa, Artificial Sequence
  Description of Artificial Sequence: Synthetic peptide
  Seed: DPRMCSLMQGSTLPRR
DPRMVSLLQASTMPRR

SEQ ID NO: 62600 - protein, 16 aa, Artificial Sequence
  Description of Artificial Sequence: Synthetic peptide
  Seed: DPRMCSLMQGSTLPRR
DPRMVSLLQASTTPRR

SEQ ID NO: 62601 - protein, 16 aa, Artificial Sequence
  Description of Artificial Sequence: Synthetic peptide
  Seed: DPRMCSLMQGSTLPRR
DPRMVSLLQASTVPRR

SEQ ID NO: 62602 - protein, 16 aa, Artificial Sequence
  Description of Artificial Sequence: Synthetic peptide
  Seed: DPRMCSLMQGSTLPRR
DPRMVSLLQGSTAPRR

SEQ ID NO: 62603 - protein, 16 aa, Artificial Sequence
  Description of Artificial Sequence: Synthetic peptide
  Seed: DPRMCSLMQGSTLPRR
DPRMVSLLQGSTIPRR

SEQ ID NO: 62604 - protein, 16 aa, Artificial Sequence
  Description of Artificial Sequence: Synthetic peptide
  Seed: DPRMCSLMQGSTLPRR
DPRMVSLLQGSTLPRR

SEQ ID NO: 62605 - protein, 16 aa, Artificial Sequence
  Description of Artificial Sequence: Synthetic peptide
  Seed: DPRMCSLMQGSTLPRR
DPRMVSLLQGSTMPRR

SEQ ID NO: 62606 - protein, 16 aa, Artificial Sequence
  Description of Artificial Sequence: Synthetic peptide
  Seed: DPRMCSLMQGSTLPRR
DPRMVSLLQGSTTPRR

SEQ ID NO: 62607 - protein, 16 aa, Artificial Sequence
  Description of Artificial Sequence: Synthetic peptide
  Seed: DPRMCSLMQGSTLPRR
DPRMVSLLQGSTVPRR

SEQ ID NO: 62608 - protein, 16 aa, Artificial Sequence
  Description of Artificial Sequence: Synthetic peptide
  Seed: DPRMCSLMQGSTLPRR
DPRMVSLLQPSTIPRR

SEQ ID NO: 62609 - protein, 16 aa, Artificial Sequence
  Description of Artificial Sequence: Synthetic peptide
  Seed: DPRMCSLMQGSTLPRR
DPRMVSLLQPSTLPRR

SEQ ID NO: 62610 - protein, 16 aa, Artificial Sequence
  Description of Artificial Sequence: Synthetic peptide
  Seed: DPRMCSLMQGSTLPRR
DPRMVSLLQPSTVPRR

SEQ ID NO: 62611 - protein, 16 aa, Artificial Sequence
  Description of Artificial Sequence: Synthetic peptide
  Seed: DPRMCSLMQGSTLPRR
DPRMVSLLQSSTAPRR

SEQ ID NO: 62612 - protein, 16 aa, Artificial Sequence
  Description of Artificial Sequence: Synthetic peptide
  Seed: DPRMCSLMQGSTLPRR
DPRMVSLLQSSTIPRR

SEQ ID NO: 62613 - protein, 16 aa, Artificial Sequence
  Description of Artificial Sequence: Synthetic peptide
  Seed: DPRMCSLMQGSTLPRR
DPRMVSLLQSSTLPRR

SEQ ID NO: 62614 - protein, 16 aa, Artificial Sequence
  Description of Artificial Sequence: Synthetic peptide
  Seed: DPRMCSLMQGSTLPRR
DPRMVSLLQSSTVPRR

SEQ ID NO: 62615 - protein, 16 aa, Artificial Sequence
  Description of Artificial Sequence: Synthetic peptide
  Seed: DPRMCSLMQGSTLPRR
DPRMVSLMQASTAPRR

SEQ ID NO: 62616 - protein, 16 aa, Artificial Sequence
  Description of Artificial Sequence: Synthetic peptide
  Seed: DPRMCSLMQGSTLPRR
DPRMVSLMQASTIPRR

SEQ ID NO: 62617 - protein, 16 aa, Artificial Sequence
  Description of Artificial Sequence: Synthetic peptide
  Seed: DPRMCSLMQGSTLPRR
DPRMVSLMQASTLPRR

SEQ ID NO: 62618 - protein, 16 aa, Artificial Sequence
  Description of Artificial Sequence: Synthetic peptide
  Seed: DPRMCSLMQGSTLPRR
DPRMVSLMQASTMPRR

SEQ ID NO: 62619 - protein, 16 aa, Artificial Sequence
  Description of Artificial Sequence: Synthetic peptide
  Seed: DPRMCSLMQGSTLPRR
DPRMVSLMQASTVPRR

SEQ ID NO: 62620 - protein, 16 aa, Artificial Sequence
  Description of Artificial Sequence: Synthetic peptide
  Seed: DPRMCSLMQGSTLPRR
DPRMVSLMQGSTAPRR

SEQ ID NO: 62621 - protein, 16 aa, Artificial Sequence
  Description of Artificial Sequence: Synthetic peptide
  Seed: DPRMCSLMQGSTLPRR
DPRMVSLMQGSTIPRR

SEQ ID NO: 62622 - protein, 16 aa, Artificial Sequence
  Description of Artificial Sequence: Synthetic peptide
  Seed: DPRMCSLMQGSTLPRR
DPRMVSLMQGSTLPRR

SEQ ID NO: 62623 - protein, 16 aa, Artificial Sequence
  Description of Artificial Sequence: Synthetic peptide
  Seed: DPRMCSLMQGSTLPRR
DPRMVSLMQGSTMPRR

SEQ ID NO: 62624 - protein, 16 aa, Artificial Sequence
  Description of Artificial Sequence: Synthetic peptide
  Seed: DPRMCSLMQGSTLPRR
DPRMVSLMQGSTVPRR

SEQ ID NO: 62625 - protein, 16 aa, Artificial Sequence
  Description of Artificial Sequence: Synthetic peptide
  Seed: DPRMCSLMQGSTLPRR
DPRMVSLMQPSTIPRR

SEQ ID NO: 62626 - protein, 16 aa, Artificial Sequence
  Description of Artificial Sequence: Synthetic peptide
  Seed: DPRMCSLMQGSTLPRR
DPRMVSLMQPSTLPRR

SEQ ID NO: 62627 - protein, 16 aa, Artificial Sequence
  Description of Artificial Sequence: Synthetic peptide
  Seed: DPRMCSLMQGSTLPRR
DPRMVSLMQPSTVPRR

SEQ ID NO: 62628 - protein, 16 aa, Artificial Sequence
  Description of Artificial Sequence: Synthetic peptide
  Seed: DPRMCSLMQGSTLPRR
DPRMVSLMQSSTAPRR

SEQ ID NO: 62629 - protein, 16 aa, Artificial Sequence
  Description of Artificial Sequence: Synthetic peptide
  Seed: DPRMCSLMQGSTLPRR
DPRMVSLMQSSTIPRR

SEQ ID NO: 62630 - protein, 16 aa, Artificial Sequence
  Description of Artificial Sequence: Synthetic peptide
  Seed: DPRMCSLMQGSTLPRR
DPRMVSLMQSSTLPRR

SEQ ID NO: 62631 - protein, 16 aa, Artificial Sequence
  Description of Artificial Sequence: Synthetic peptide
  Seed: DPRMCSLMQGSTLPRR
DPRMVSLMQSSTVPRR

SEQ ID NO: 62632 - protein, 16 aa, Artificial Sequence
  Description of Artificial Sequence: Synthetic peptide
  Seed: DPRMCSLMQGSTLPRR
DPRMWSLAQASTAPRR

SEQ ID NO: 62633 - protein, 16 aa, Artificial Sequence
  Description of Artificial Sequence: Synthetic peptide
  Seed: DPRMCSLMQGSTLPRR
DPRMWSLAQASTIPRR

SEQ ID NO: 62634 - protein, 16 aa, Artificial Sequence
  Description of Artificial Sequence: Synthetic peptide
  Seed: DPRMCSLMQGSTLPRR
DPRMWSLAQASTLPRR

SEQ ID NO: 62635 - protein, 16 aa, Artificial Sequence
  Description of Artificial Sequence: Synthetic peptide
  Seed: DPRMCSLMQGSTLPRR
DPRMWSLAQASTMPRR

SEQ ID NO: 62636 - protein, 16 aa, Artificial Sequence
  Description of Artificial Sequence: Synthetic peptide
  Seed: DPRMCSLMQGSTLPRR
DPRMWSLAQASTSPRR

SEQ ID NO: 62637 - protein, 16 aa, Artificial Sequence
  Description of Artificial Sequence: Synthetic peptide
  Seed: DPRMCSLMQGSTLPRR
DPRMWSLAQASTTPRR

SEQ ID NO: 62638 - protein, 16 aa, Artificial Sequence
  Description of Artificial Sequence: Synthetic peptide
  Seed: DPRMCSLMQGSTLPRR
DPRMWSLAQASTVPRR

SEQ ID NO: 62639 - protein, 16 aa, Artificial Sequence
  Description of Artificial Sequence: Synthetic peptide
  Seed: DPRMCSLMQGSTLPRR
DPRMWSLAQGSTAPRR

SEQ ID NO: 62640 - protein, 16 aa, Artificial Sequence
  Description of Artificial Sequence: Synthetic peptide
  Seed: DPRMCSLMQGSTLPRR
DPRMWSLAQGSTIPRR

SEQ ID NO: 62641 - protein, 16 aa, Artificial Sequence
  Description of Artificial Sequence: Synthetic peptide
  Seed: DPRMCSLMQGSTLPRR
DPRMWSLAQGSTLPRR

SEQ ID NO: 62642 - protein, 16 aa, Artificial Sequence
  Description of Artificial Sequence: Synthetic peptide
  Seed: DPRMCSLMQGSTLPRR
DPRMWSLAQGSTVPRR

SEQ ID NO: 62643 - protein, 16 aa, Artificial Sequence
  Description of Artificial Sequence: Synthetic peptide
  Seed: DPRMCSLMQGSTLPRR
DPRMWSLAQPSTIPRR

SEQ ID NO: 62644 - protein, 16 aa, Artificial Sequence
  Description of Artificial Sequence: Synthetic peptide
  Seed: DPRMCSLMQGSTLPRR
DPRMWSLAQPSTLPRR

SEQ ID NO: 62645 - protein, 16 aa, Artificial Sequence
  Description of Artificial Sequence: Synthetic peptide
  Seed: DPRMCSLMQGSTLPRR
DPRMWSLAQPSTVPRR

SEQ ID NO: 62646 - protein, 16 aa, Artificial Sequence
  Description of Artificial Sequence: Synthetic peptide
  Seed: DPRMCSLMQGSTLPRR
DPRMWSLAQSSTAPRR

SEQ ID NO: 62647 - protein, 16 aa, Artificial Sequence
  Description of Artificial Sequence: Synthetic peptide
  Seed: DPRMCSLMQGSTLPRR
DPRMWSLAQSSTIPRR

SEQ ID NO: 62648 - protein, 16 aa, Artificial Sequence
  Description of Artificial Sequence: Synthetic peptide
  Seed: DPRMCSLMQGSTLPRR
DPRMWSLAQSSTLPRR

SEQ ID NO: 62649 - protein, 16 aa, Artificial Sequence
  Description of Artificial Sequence: Synthetic peptide
  Seed: DPRMCSLMQGSTLPRR
DPRMWSLAQSSTVPRR

SEQ ID NO: 62650 - protein, 16 aa, Artificial Sequence
  Description of Artificial Sequence: Synthetic peptide
  Seed: DPRMCSLMQGSTLPRR
DPRMWSLAQVSTAPRR

SEQ ID NO: 62651 - protein, 16 aa, Artificial Sequence
  Description of Artificial Sequence: Synthetic peptide
  Seed: DPRMCSLMQGSTLPRR
DPRMWSLIQASTAPRR

SEQ ID NO: 62652 - protein, 16 aa, Artificial Sequence
  Description of Artificial Sequence: Synthetic peptide
  Seed: DPRMCSLMQGSTLPRR
DPRMWSLIQASTIPRR

SEQ ID NO: 62653 - protein, 16 aa, Artificial Sequence
  Description of Artificial Sequence: Synthetic peptide
  Seed: DPRMCSLMQGSTLPRR
DPRMWSLIQASTLPRR

SEQ ID NO: 62654 - protein, 16 aa, Artificial Sequence
  Description of Artificial Sequence: Synthetic peptide
  Seed: DPRMCSLMQGSTLPRR
DPRMWSLIQASTMPRR

SEQ ID NO: 62655 - protein, 16 aa, Artificial Sequence
  Description of Artificial Sequence: Synthetic peptide
  Seed: DPRMCSLMQGSTLPRR
DPRMWSLIQASTNPRR

SEQ ID NO: 62656 - protein, 16 aa, Artificial Sequence
  Description of Artificial Sequence: Synthetic peptide
  Seed: DPRMCSLMQGSTLPRR
DPRMWSLIQASTSPRR

SEQ ID NO: 62657 - protein, 16 aa, Artificial Sequence
  Description of Artificial Sequence: Synthetic peptide
  Seed: DPRMCSLMQGSTLPRR
DPRMWSLIQASTTPRR

SEQ ID NO: 62658 - protein, 16 aa, Artificial Sequence
  Description of Artificial Sequence: Synthetic peptide
  Seed: DPRMCSLMQGSTLPRR
DPRMWSLIQASTVPRR

SEQ ID NO: 62659 - protein, 16 aa, Artificial Sequence
  Description of Artificial Sequence: Synthetic peptide
  Seed: DPRMCSLMQGSTLPRR
DPRMWSLIQGSTAPRR

SEQ ID NO: 62660 - protein, 16 aa, Artificial Sequence
  Description of Artificial Sequence: Synthetic peptide
  Seed: DPRMCSLMQGSTLPRR
DPRMWSLIQGSTIPRR

SEQ ID NO: 62661 - protein, 16 aa, Artificial Sequence
  Description of Artificial Sequence: Synthetic peptide
  Seed: DPRMCSLMQGSTLPRR
DPRMWSLIQGSTLPRR

SEQ ID NO: 62662 - protein, 16 aa, Artificial Sequence
  Description of Artificial Sequence: Synthetic peptide
  Seed: DPRMCSLMQGSTLPRR
DPRMWSLIQGSTMPRR

SEQ ID NO: 62663 - protein, 16 aa, Artificial Sequence
  Description of Artificial Sequence: Synthetic peptide
  Seed: DPRMCSLMQGSTLPRR
DPRMWSLIQGSTSPRR

SEQ ID NO: 62664 - protein, 16 aa, Artificial Sequence
  Description of Artificial Sequence: Synthetic peptide
  Seed: DPRMCSLMQGSTLPRR
DPRMWSLIQGSTTPRR

SEQ ID NO: 62665 - protein, 16 aa, Artificial Sequence
  Description of Artificial Sequence: Synthetic peptide
  Seed: DPRMCSLMQGSTLPRR
DPRMWSLIQGSTVPRR

SEQ ID NO: 62666 - protein, 16 aa, Artificial Sequence
  Description of Artificial Sequence: Synthetic peptide
  Seed: DPRMCSLMQGSTLPRR
DPRMWSLIQISTAPRR

SEQ ID NO: 62667 - protein, 16 aa, Artificial Sequence
  Description of Artificial Sequence: Synthetic peptide
  Seed: DPRMCSLMQGSTLPRR
DPRMWSLIQISTSPRR

SEQ ID NO: 62668 - protein, 16 aa, Artificial Sequence
  Description of Artificial Sequence: Synthetic peptide
  Seed: DPRMCSLMQGSTLPRR
DPRMWSLIQNSTAPRR

SEQ ID NO: 62669 - protein, 16 aa, Artificial Sequence
  Description of Artificial Sequence: Synthetic peptide
  Seed: DPRMCSLMQGSTLPRR
DPRMWSLIQNSTLPRR

SEQ ID NO: 62670 - protein, 16 aa, Artificial Sequence
  Description of Artificial Sequence: Synthetic peptide
  Seed: DPRMCSLMQGSTLPRR
DPRMWSLIQNSTVPRR

SEQ ID NO: 62671 - protein, 16 aa, Artificial Sequence
  Description of Artificial Sequence: Synthetic peptide
  Seed: DPRMCSLMQGSTLPRR
DPRMWSLIQPSTAPRR

SEQ ID NO: 62672 - protein, 16 aa, Artificial Sequence
  Description of Artificial Sequence: Synthetic peptide
  Seed: DPRMCSLMQGSTLPRR
DPRMWSLIQPSTIPRR

SEQ ID NO: 62673 - protein, 16 aa, Artificial Sequence
  Description of Artificial Sequence: Synthetic peptide
  Seed: DPRMCSLMQGSTLPRR
DPRMWSLIQPSTLPRR

SEQ ID NO: 62674 - protein, 16 aa, Artificial Sequence
  Description of Artificial Sequence: Synthetic peptide
  Seed: DPRMCSLMQGSTLPRR
DPRMWSLIQPSTNPRR

SEQ ID NO: 62675 - protein, 16 aa, Artificial Sequence
  Description of Artificial Sequence: Synthetic peptide
  Seed: DPRMCSLMQGSTLPRR
DPRMWSLIQPSTSPRR

SEQ ID NO: 62676 - protein, 16 aa, Artificial Sequence
  Description of Artificial Sequence: Synthetic peptide
  Seed: DPRMCSLMQGSTLPRR
DPRMWSLIQPSTTPRR

SEQ ID NO: 62677 - protein, 16 aa, Artificial Sequence
  Description of Artificial Sequence: Synthetic peptide
  Seed: DPRMCSLMQGSTLPRR
DPRMWSLIQPSTVPRR

SEQ ID NO: 62678 - protein, 16 aa, Artificial Sequence
  Description of Artificial Sequence: Synthetic peptide
  Seed: DPRMCSLMQGSTLPRR
DPRMWSLIQSSTAPRR

SEQ ID NO: 62679 - protein, 16 aa, Artificial Sequence
  Description of Artificial Sequence: Synthetic peptide
  Seed: DPRMCSLMQGSTLPRR
DPRMWSLIQSSTIPRR

SEQ ID NO: 62680 - protein, 16 aa, Artificial Sequence
  Description of Artificial Sequence: Synthetic peptide
  Seed: DPRMCSLMQGSTLPRR
DPRMWSLIQSSTLPRR

SEQ ID NO: 62681 - protein, 16 aa, Artificial Sequence
  Description of Artificial Sequence: Synthetic peptide
  Seed: DPRMCSLMQGSTLPRR
DPRMWSLIQSSTMPRR

SEQ ID NO: 62682 - protein, 16 aa, Artificial Sequence
  Description of Artificial Sequence: Synthetic peptide
  Seed: DPRMCSLMQGSTLPRR
DPRMWSLIQSSTNPRR

SEQ ID NO: 62683 - protein, 16 aa, Artificial Sequence
  Description of Artificial Sequence: Synthetic peptide
  Seed: DPRMCSLMQGSTLPRR
DPRMWSLIQSSTSPRR

SEQ ID NO: 62684 - protein, 16 aa, Artificial Sequence
  Description of Artificial Sequence: Synthetic peptide
  Seed: DPRMCSLMQGSTLPRR
DPRMWSLIQSSTTPRR

SEQ ID NO: 62685 - protein, 16 aa, Artificial Sequence
  Description of Artificial Sequence: Synthetic peptide
  Seed: DPRMCSLMQGSTLPRR
DPRMWSLIQSSTVPRR

SEQ ID NO: 62686 - protein, 16 aa, Artificial Sequence
  Description of Artificial Sequence: Synthetic peptide
  Seed: DPRMCSLMQGSTLPRR
DPRMWSLIQTSTAPRR

SEQ ID NO: 62687 - protein, 16 aa, Artificial Sequence
  Description of Artificial Sequence: Synthetic peptide
  Seed: DPRMCSLMQGSTLPRR
DPRMWSLIQTSTLPRR

SEQ ID NO: 62688 - protein, 16 aa, Artificial Sequence
  Description of Artificial Sequence: Synthetic peptide
  Seed: DPRMCSLMQGSTLPRR
DPRMWSLIQTSTNPRR

SEQ ID NO: 62689 - protein, 16 aa, Artificial Sequence
  Description of Artificial Sequence: Synthetic peptide
  Seed: DPRMCSLMQGSTLPRR
DPRMWSLIQTSTSPRR

SEQ ID NO: 62690 - protein, 16 aa, Artificial Sequence
  Description of Artificial Sequence: Synthetic peptide
  Seed: DPRMCSLMQGSTLPRR
DPRMWSLIQTSTTPRR

SEQ ID NO: 62691 - protein, 16 aa, Artificial Sequence
  Description of Artificial Sequence: Synthetic peptide
  Seed: DPRMCSLMQGSTLPRR
DPRMWSLIQTSTVPRR

SEQ ID NO: 62692 - protein, 16 aa, Artificial Sequence
  Description of Artificial Sequence: Synthetic peptide
  Seed: DPRMCSLMQGSTLPRR
DPRMWSLIQVSTAPRR

SEQ ID NO: 62693 - protein, 16 aa, Artificial Sequence
  Description of Artificial Sequence: Synthetic peptide
  Seed: DPRMCSLMQGSTLPRR
DPRMWSLIQVSTNPRR

SEQ ID NO: 62694 - protein, 16 aa, Artificial Sequence
  Description of Artificial Sequence: Synthetic peptide
  Seed: DPRMCSLMQGSTLPRR
DPRMWSLIQVSTSPRR

SEQ ID NO: 62695 - protein, 16 aa, Artificial Sequence
  Description of Artificial Sequence: Synthetic peptide
  Seed: DPRMCSLMQGSTLPRR
DPRMWSLIQVSTTPRR

SEQ ID NO: 62696 - protein, 16 aa, Artificial Sequence
  Description of Artificial Sequence: Synthetic peptide
  Seed: DPRMCSLMQGSTLPRR
DPRMWSLLQASTAPRR

SEQ ID NO: 62697 - protein, 16 aa, Artificial Sequence
  Description of Artificial Sequence: Synthetic peptide
  Seed: DPRMCSLMQGSTLPRR
DPRMWSLLQASTGPRR

SEQ ID NO: 62698 - protein, 16 aa, Artificial Sequence
  Description of Artificial Sequence: Synthetic peptide
  Seed: DPRMCSLMQGSTLPRR
DPRMWSLLQASTIPRR

SEQ ID NO: 62699 - protein, 16 aa, Artificial Sequence
  Description of Artificial Sequence: Synthetic peptide
  Seed: DPRMCSLMQGSTLPRR
DPRMWSLLQASTLPRR

SEQ ID NO: 62700 - protein, 16 aa, Artificial Sequence
  Description of Artificial Sequence: Synthetic peptide
  Seed: DPRMCSLMQGSTLPRR
DPRMWSLLQASTMPRR

SEQ ID NO: 62701 - protein, 16 aa, Artificial Sequence
  Description of Artificial Sequence: Synthetic peptide
  Seed: DPRMCSLMQGSTLPRR
DPRMWSLLQASTNPRR

SEQ ID NO: 62702 - protein, 16 aa, Artificial Sequence
  Description of Artificial Sequence: Synthetic peptide
  Seed: DPRMCSLMQGSTLPRR
DPRMWSLLQASTSPRR

SEQ ID NO: 62703 - protein, 16 aa, Artificial Sequence
  Description of Artificial Sequence: Synthetic peptide
  Seed: DPRMCSLMQGSTLPRR
DPRMWSLLQASTTPRR

SEQ ID NO: 62704 - protein, 16 aa, Artificial Sequence
  Description of Artificial Sequence: Synthetic peptide
  Seed: DPRMCSLMQGSTLPRR
DPRMWSLLQASTVPRR

SEQ ID NO: 62705 - protein, 16 aa, Artificial Sequence
  Description of Artificial Sequence: Synthetic peptide
  Seed: DPRMCSLMQGSTLPRR
DPRMWSLLQGSTAPRR

SEQ ID NO: 62706 - protein, 16 aa, Artificial Sequence
  Description of Artificial Sequence: Synthetic peptide
  Seed: DPRMCSLMQGSTLPRR
DPRMWSLLQGSTGPRR

SEQ ID NO: 62707 - protein, 16 aa, Artificial Sequence
  Description of Artificial Sequence: Synthetic peptide
  Seed: DPRMCSLMQGSTLPRR
DPRMWSLLQGSTIPRR

SEQ ID NO: 62708 - protein, 16 aa, Artificial Sequence
  Description of Artificial Sequence: Synthetic peptide
  Seed: DPRMCSLMQGSTLPRR
DPRMWSLLQGSTLPRR

SEQ ID NO: 62709 - protein, 16 aa, Artificial Sequence
  Description of Artificial Sequence: Synthetic peptide
  Seed: DPRMCSLMQGSTLPRR
DPRMWSLLQGSTMPRR

SEQ ID NO: 62710 - protein, 16 aa, Artificial Sequence
  Description of Artificial Sequence: Synthetic peptide
  Seed: DPRMCSLMQGSTLPRR
DPRMWSLLQGSTSPRR

SEQ ID NO: 62711 - protein, 16 aa, Artificial Sequence
  Description of Artificial Sequence: Synthetic peptide
  Seed: DPRMCSLMQGSTLPRR
DPRMWSLLQGSTTPRR

SEQ ID NO: 62712 - protein, 16 aa, Artificial Sequence
  Description of Artificial Sequence: Synthetic peptide
  Seed: DPRMCSLMQGSTLPRR
DPRMWSLLQGSTVPRR

SEQ ID NO: 62713 - protein, 16 aa, Artificial Sequence
  Description of Artificial Sequence: Synthetic peptide
  Seed: DPRMCSLMQGSTLPRR
DPRMWSLLQISTAPRR

SEQ ID NO: 62714 - protein, 16 aa, Artificial Sequence
  Description of Artificial Sequence: Synthetic peptide
  Seed: DPRMCSLMQGSTLPRR
DPRMWSLLQISTNPRR

SEQ ID NO: 62715 - protein, 16 aa, Artificial Sequence
  Description of Artificial Sequence: Synthetic peptide
  Seed: DPRMCSLMQGSTLPRR
DPRMWSLLQISTSPRR

SEQ ID NO: 62716 - protein, 16 aa, Artificial Sequence
  Description of Artificial Sequence: Synthetic peptide
  Seed: DPRMCSLMQGSTLPRR
DPRMWSLLQISTTPRR

SEQ ID NO: 62717 - protein, 16 aa, Artificial Sequence
  Description of Artificial Sequence: Synthetic peptide
  Seed: DPRMCSLMQGSTLPRR
DPRMWSLLQNSTAPRR

SEQ ID NO: 62718 - protein, 16 aa, Artificial Sequence
  Description of Artificial Sequence: Synthetic peptide
  Seed: DPRMCSLMQGSTLPRR
DPRMWSLLQNSTIPRR

SEQ ID NO: 62719 - protein, 16 aa, Artificial Sequence
  Description of Artificial Sequence: Synthetic peptide
  Seed: DPRMCSLMQGSTLPRR
DPRMWSLLQNSTLPRR

SEQ ID NO: 62720 - protein, 16 aa, Artificial Sequence
  Description of Artificial Sequence: Synthetic peptide
  Seed: DPRMCSLMQGSTLPRR
DPRMWSLLQNSTMPRR

SEQ ID NO: 62721 - protein, 16 aa, Artificial Sequence
  Description of Artificial Sequence: Synthetic peptide
  Seed: DPRMCSLMQGSTLPRR
DPRMWSLLQNSTSPRR

SEQ ID NO: 62722 - protein, 16 aa, Artificial Sequence
  Description of Artificial Sequence: Synthetic peptide
  Seed: DPRMCSLMQGSTLPRR
DPRMWSLLQNSTTPRR

SEQ ID NO: 62723 - protein, 16 aa, Artificial Sequence
  Description of Artificial Sequence: Synthetic peptide
  Seed: DPRMCSLMQGSTLPRR
DPRMWSLLQNSTVPRR

SEQ ID NO: 62724 - protein, 16 aa, Artificial Sequence
  Description of Artificial Sequence: Synthetic peptide
  Seed: DPRMCSLMQGSTLPRR
DPRMWSLLQPSTAPRR

SEQ ID NO: 62725 - protein, 16 aa, Artificial Sequence
  Description of Artificial Sequence: Synthetic peptide
  Seed: DPRMCSLMQGSTLPRR
DPRMWSLLQPSTIPRR

SEQ ID NO: 62726 - protein, 16 aa, Artificial Sequence
  Description of Artificial Sequence: Synthetic peptide
  Seed: DPRMCSLMQGSTLPRR
DPRMWSLLQPSTLPRR

SEQ ID NO: 62727 - protein, 16 aa, Artificial Sequence
  Description of Artificial Sequence: Synthetic peptide
  Seed: DPRMCSLMQGSTLPRR
DPRMWSLLQPSTMPRR

SEQ ID NO: 62728 - protein, 16 aa, Artificial Sequence
  Description of Artificial Sequence: Synthetic peptide
  Seed: DPRMCSLMQGSTLPRR
DPRMWSLLQPSTNPRR

SEQ ID NO: 62729 - protein, 16 aa, Artificial Sequence
  Description of Artificial Sequence: Synthetic peptide
  Seed: DPRMCSLMQGSTLPRR
DPRMWSLLQPSTSPRR

SEQ ID NO: 62730 - protein, 16 aa, Artificial Sequence
  Description of Artificial Sequence: Synthetic peptide
  Seed: DPRMCSLMQGSTLPRR
DPRMWSLLQPSTTPRR

SEQ ID NO: 62731 - protein, 16 aa, Artificial Sequence
  Description of Artificial Sequence: Synthetic peptide
  Seed: DPRMCSLMQGSTLPRR
DPRMWSLLQPSTVPRR

SEQ ID NO: 62732 - protein, 16 aa, Artificial Sequence
  Description of Artificial Sequence: Synthetic peptide
  Seed: DPRMCSLMQGSTLPRR
DPRMWSLLQSSTAPRR

SEQ ID NO: 62733 - protein, 16 aa, Artificial Sequence
  Description of Artificial Sequence: Synthetic peptide
  Seed: DPRMCSLMQGSTLPRR
DPRMWSLLQSSTGPRR

SEQ ID NO: 62734 - protein, 16 aa, Artificial Sequence
  Description of Artificial Sequence: Synthetic peptide
  Seed: DPRMCSLMQGSTLPRR
DPRMWSLLQSSTIPRR

SEQ ID NO: 62735 - protein, 16 aa, Artificial Sequence
  Description of Artificial Sequence: Synthetic peptide
  Seed: DPRMCSLMQGSTLPRR
DPRMWSLLQSSTLPRR

SEQ ID NO: 62736 - protein, 16 aa, Artificial Sequence
  Description of Artificial Sequence: Synthetic peptide
  Seed: DPRMCSLMQGSTLPRR
DPRMWSLLQSSTMPRR

SEQ ID NO: 62737 - protein, 16 aa, Artificial Sequence
  Description of Artificial Sequence: Synthetic peptide
  Seed: DPRMCSLMQGSTLPRR
DPRMWSLLQSSTNPRR

SEQ ID NO: 62738 - protein, 16 aa, Artificial Sequence
  Description of Artificial Sequence: Synthetic peptide
  Seed: DPRMCSLMQGSTLPRR
DPRMWSLLQSSTSPRR

SEQ ID NO: 62739 - protein, 16 aa, Artificial Sequence
  Description of Artificial Sequence: Synthetic peptide
  Seed: DPRMCSLMQGSTLPRR
DPRMWSLLQSSTTPRR

SEQ ID NO: 62740 - protein, 16 aa, Artificial Sequence
  Description of Artificial Sequence: Synthetic peptide
  Seed: DPRMCSLMQGSTLPRR
DPRMWSLLQSSTVPRR

SEQ ID NO: 62741 - protein, 16 aa, Artificial Sequence
  Description of Artificial Sequence: Synthetic peptide
  Seed: DPRMCSLMQGSTLPRR
DPRMWSLLQTSTAPRR

SEQ ID NO: 62742 - protein, 16 aa, Artificial Sequence
  Description of Artificial Sequence: Synthetic peptide
  Seed: DPRMCSLMQGSTLPRR
DPRMWSLLQTSTIPRR

SEQ ID NO: 62743 - protein, 16 aa, Artificial Sequence
  Description of Artificial Sequence: Synthetic peptide
  Seed: DPRMCSLMQGSTLPRR
DPRMWSLLQTSTLPRR

SEQ ID NO: 62744 - protein, 16 aa, Artificial Sequence
  Description of Artificial Sequence: Synthetic peptide
  Seed: DPRMCSLMQGSTLPRR
DPRMWSLLQTSTMPRR

SEQ ID NO: 62745 - protein, 16 aa, Artificial Sequence
  Description of Artificial Sequence: Synthetic peptide
  Seed: DPRMCSLMQGSTLPRR
DPRMWSLLQTSTNPRR

SEQ ID NO: 62746 - protein, 16 aa, Artificial Sequence
  Description of Artificial Sequence: Synthetic peptide
  Seed: DPRMCSLMQGSTLPRR
DPRMWSLLQTSTSPRR

SEQ ID NO: 62747 - protein, 16 aa, Artificial Sequence
  Description of Artificial Sequence: Synthetic peptide
  Seed: DPRMCSLMQGSTLPRR
DPRMWSLLQTSTTPRR

SEQ ID NO: 62748 - protein, 16 aa, Artificial Sequence
  Description of Artificial Sequence: Synthetic peptide
  Seed: DPRMCSLMQGSTLPRR
DPRMWSLLQTSTVPRR

SEQ ID NO: 62749 - protein, 16 aa, Artificial Sequence
  Description of Artificial Sequence: Synthetic peptide
  Seed: DPRMCSLMQGSTLPRR
DPRMWSLLQVSTAPRR

SEQ ID NO: 62750 - protein, 16 aa, Artificial Sequence
  Description of Artificial Sequence: Synthetic peptide
  Seed: DPRMCSLMQGSTLPRR
DPRMWSLLQVSTIPRR

SEQ ID NO: 62751 - protein, 16 aa, Artificial Sequence
  Description of Artificial Sequence: Synthetic peptide
  Seed: DPRMCSLMQGSTLPRR
DPRMWSLLQVSTLPRR

SEQ ID NO: 62752 - protein, 16 aa, Artificial Sequence
  Description of Artificial Sequence: Synthetic peptide
  Seed: DPRMCSLMQGSTLPRR
DPRMWSLLQVSTNPRR

SEQ ID NO: 62753 - protein, 16 aa, Artificial Sequence
  Description of Artificial Sequence: Synthetic peptide
  Seed: DPRMCSLMQGSTLPRR
DPRMWSLLQVSTSPRR

SEQ ID NO: 62754 - protein, 16 aa, Artificial Sequence
  Description of Artificial Sequence: Synthetic peptide
  Seed: DPRMCSLMQGSTLPRR
DPRMWSLLQVSTTPRR

SEQ ID NO: 62755 - protein, 16 aa, Artificial Sequence
  Description of Artificial Sequence: Synthetic peptide
  Seed: DPRMCSLMQGSTLPRR
DPRMWSLLQVSTVPRR

SEQ ID NO: 62756 - protein, 16 aa, Artificial Sequence
  Description of Artificial Sequence: Synthetic peptide
  Seed: DPRMCSLMQGSTLPRR
DPRMWSLMQASTAPRR

SEQ ID NO: 62757 - protein, 16 aa, Artificial Sequence
  Description of Artificial Sequence: Synthetic peptide
  Seed: DPRMCSLMQGSTLPRR
DPRMWSLMQASTGPRR

SEQ ID NO: 62758 - protein, 16 aa, Artificial Sequence
  Description of Artificial Sequence: Synthetic peptide
  Seed: DPRMCSLMQGSTLPRR
DPRMWSLMQASTHPRR

SEQ ID NO: 62759 - protein, 16 aa, Artificial Sequence
  Description of Artificial Sequence: Synthetic peptide
  Seed: DPRMCSLMQGSTLPRR
DPRMWSLMQASTIPRR

SEQ ID NO: 62760 - protein, 16 aa, Artificial Sequence
  Description of Artificial Sequence: Synthetic peptide
  Seed: DPRMCSLMQGSTLPRR
DPRMWSLMQASTLPRR

SEQ ID NO: 62761 - protein, 16 aa, Artificial Sequence
  Description of Artificial Sequence: Synthetic peptide
  Seed: DPRMCSLMQGSTLPRR
DPRMWSLMQASTMPRR

SEQ ID NO: 62762 - protein, 16 aa, Artificial Sequence
  Description of Artificial Sequence: Synthetic peptide
  Seed: DPRMCSLMQGSTLPRR
DPRMWSLMQASTNPRR

SEQ ID NO: 62763 - protein, 16 aa, Artificial Sequence
  Description of Artificial Sequence: Synthetic peptide
  Seed: DPRMCSLMQGSTLPRR
DPRMWSLMQASTSPRR

SEQ ID NO: 62764 - protein, 16 aa, Artificial Sequence
  Description of Artificial Sequence: Synthetic peptide
  Seed: DPRMCSLMQGSTLPRR
DPRMWSLMQASTTPRR

SEQ ID NO: 62765 - protein, 16 aa, Artificial Sequence
  Description of Artificial Sequence: Synthetic peptide
  Seed: DPRMCSLMQGSTLPRR
DPRMWSLMQASTVPRR

SEQ ID NO: 62766 - protein, 16 aa, Artificial Sequence
  Description of Artificial Sequence: Synthetic peptide
  Seed: DPRMCSLMQGSTLPRR
DPRMWSLMQGSTAPRR

SEQ ID NO: 62767 - protein, 16 aa, Artificial Sequence
  Description of Artificial Sequence: Synthetic peptide
  Seed: DPRMCSLMQGSTLPRR
DPRMWSLMQGSTGPRR

SEQ ID NO: 62768 - protein, 16 aa, Artificial Sequence
  Description of Artificial Sequence: Synthetic peptide
  Seed: DPRMCSLMQGSTLPRR
DPRMWSLMQGSTIPRR

SEQ ID NO: 62769 - protein, 16 aa, Artificial Sequence
  Description of Artificial Sequence: Synthetic peptide
  Seed: DPRMCSLMQGSTLPRR
DPRMWSLMQGSTLPRR

SEQ ID NO: 62770 - protein, 16 aa, Artificial Sequence
  Description of Artificial Sequence: Synthetic peptide
  Seed: DPRMCSLMQGSTLPRR
DPRMWSLMQGSTMPRR

SEQ ID NO: 62771 - protein, 16 aa, Artificial Sequence
  Description of Artificial Sequence: Synthetic peptide
  Seed: DPRMCSLMQGSTLPRR
DPRMWSLMQGSTSPRR

SEQ ID NO: 62772 - protein, 16 aa, Artificial Sequence
  Description of Artificial Sequence: Synthetic peptide
  Seed: DPRMCSLMQGSTLPRR
DPRMWSLMQGSTTPRR

SEQ ID NO: 62773 - protein, 16 aa, Artificial Sequence
  Description of Artificial Sequence: Synthetic peptide
  Seed: DPRMCSLMQGSTLPRR
DPRMWSLMQGSTVPRR

SEQ ID NO: 62774 - protein, 16 aa, Artificial Sequence
  Description of Artificial Sequence: Synthetic peptide
  Seed: DPRMCSLMQGSTLPRR
DPRMWSLMQISTAPRR

SEQ ID NO: 62775 - protein, 16 aa, Artificial Sequence
  Description of Artificial Sequence: Synthetic peptide
  Seed: DPRMCSLMQGSTLPRR
DPRMWSLMQISTNPRR

SEQ ID NO: 62776 - protein, 16 aa, Artificial Sequence
  Description of Artificial Sequence: Synthetic peptide
  Seed: DPRMCSLMQGSTLPRR
DPRMWSLMQISTSPRR

SEQ ID NO: 62777 - protein, 16 aa, Artificial Sequence
  Description of Artificial Sequence: Synthetic peptide
  Seed: DPRMCSLMQGSTLPRR
DPRMWSLMQISTTPRR

SEQ ID NO: 62778 - protein, 16 aa, Artificial Sequence
  Description of Artificial Sequence: Synthetic peptide
  Seed: DPRMCSLMQGSTLPRR
DPRMWSLMQNSTAPRR

SEQ ID NO: 62779 - protein, 16 aa, Artificial Sequence
  Description of Artificial Sequence: Synthetic peptide
  Seed: DPRMCSLMQGSTLPRR
DPRMWSLMQNSTIPRR

SEQ ID NO: 62780 - protein, 16 aa, Artificial Sequence
  Description of Artificial Sequence: Synthetic peptide
  Seed: DPRMCSLMQGSTLPRR
DPRMWSLMQNSTLPRR

SEQ ID NO: 62781 - protein, 16 aa, Artificial Sequence
  Description of Artificial Sequence: Synthetic peptide
  Seed: DPRMCSLMQGSTLPRR
DPRMWSLMQNSTMPRR

SEQ ID NO: 62782 - protein, 16 aa, Artificial Sequence
  Description of Artificial Sequence: Synthetic peptide
  Seed: DPRMCSLMQGSTLPRR
DPRMWSLMQNSTSPRR

SEQ ID NO: 62783 - protein, 16 aa, Artificial Sequence
  Description of Artificial Sequence: Synthetic peptide
  Seed: DPRMCSLMQGSTLPRR
DPRMWSLMQNSTTPRR

SEQ ID NO: 62784 - protein, 16 aa, Artificial Sequence
  Description of Artificial Sequence: Synthetic peptide
  Seed: DPRMCSLMQGSTLPRR
DPRMWSLMQNSTVPRR

SEQ ID NO: 62785 - protein, 16 aa, Artificial Sequence
  Description of Artificial Sequence: Synthetic peptide
  Seed: DPRMCSLMQGSTLPRR
DPRMWSLMQPSTAPRR

SEQ ID NO: 62786 - protein, 16 aa, Artificial Sequence
  Description of Artificial Sequence: Synthetic peptide
  Seed: DPRMCSLMQGSTLPRR
DPRMWSLMQPSTIPRR

SEQ ID NO: 62787 - protein, 16 aa, Artificial Sequence
  Description of Artificial Sequence: Synthetic peptide
  Seed: DPRMCSLMQGSTLPRR
DPRMWSLMQPSTLPRR

SEQ ID NO: 62788 - protein, 16 aa, Artificial Sequence
  Description of Artificial Sequence: Synthetic peptide
  Seed: DPRMCSLMQGSTLPRR
DPRMWSLMQPSTMPRR

SEQ ID NO: 62789 - protein, 16 aa, Artificial Sequence
  Description of Artificial Sequence: Synthetic peptide
  Seed: DPRMCSLMQGSTLPRR
DPRMWSLMQPSTNPRR

SEQ ID NO: 62790 - protein, 16 aa, Artificial Sequence
  Description of Artificial Sequence: Synthetic peptide
  Seed: DPRMCSLMQGSTLPRR
DPRMWSLMQPSTSPRR

SEQ ID NO: 62791 - protein, 16 aa, Artificial Sequence
  Description of Artificial Sequence: Synthetic peptide
  Seed: DPRMCSLMQGSTLPRR
DPRMWSLMQPSTTPRR

SEQ ID NO: 62792 - protein, 16 aa, Artificial Sequence
  Description of Artificial Sequence: Synthetic peptide
  Seed: DPRMCSLMQGSTLPRR
DPRMWSLMQPSTVPRR

SEQ ID NO: 62793 - protein, 16 aa, Artificial Sequence
  Description of Artificial Sequence: Synthetic peptide
  Seed: DPRMCSLMQGSTLPRR
DPRMWSLMQSSTAPRR

SEQ ID NO: 62794 - protein, 16 aa, Artificial Sequence
  Description of Artificial Sequence: Synthetic peptide
  Seed: DPRMCSLMQGSTLPRR
DPRMWSLMQSSTGPRR

SEQ ID NO: 62795 - protein, 16 aa, Artificial Sequence
  Description of Artificial Sequence: Synthetic peptide
  Seed: DPRMCSLMQGSTLPRR
DPRMWSLMQSSTIPRR

SEQ ID NO: 62796 - protein, 16 aa, Artificial Sequence
  Description of Artificial Sequence: Synthetic peptide
  Seed: DPRMCSLMQGSTLPRR
DPRMWSLMQSSTLPRR

SEQ ID NO: 62797 - protein, 16 aa, Artificial Sequence
  Description of Artificial Sequence: Synthetic peptide
  Seed: DPRMCSLMQGSTLPRR
DPRMWSLMQSSTMPRR

SEQ ID NO: 62798 - protein, 16 aa, Artificial Sequence
  Description of Artificial Sequence: Synthetic peptide
  Seed: DPRMCSLMQGSTLPRR
DPRMWSLMQSSTNPRR

SEQ ID NO: 62799 - protein, 16 aa, Artificial Sequence
  Description of Artificial Sequence: Synthetic peptide
  Seed: DPRMCSLMQGSTLPRR
DPRMWSLMQSSTSPRR

SEQ ID NO: 62800 - protein, 16 aa, Artificial Sequence
  Description of Artificial Sequence: Synthetic peptide
  Seed: DPRMCSLMQGSTLPRR
DPRMWSLMQSSTTPRR

SEQ ID NO: 62801 - protein, 16 aa, Artificial Sequence
  Description of Artificial Sequence: Synthetic peptide
  Seed: DPRMCSLMQGSTLPRR
DPRMWSLMQSSTVPRR

SEQ ID NO: 62802 - protein, 16 aa, Artificial Sequence
  Description of Artificial Sequence: Synthetic peptide
  Seed: DPRMCSLMQGSTLPRR
DPRMWSLMQTSTAPRR

SEQ ID NO: 62803 - protein, 16 aa, Artificial Sequence
  Description of Artificial Sequence: Synthetic peptide
  Seed: DPRMCSLMQGSTLPRR
DPRMWSLMQTSTIPRR

SEQ ID NO: 62804 - protein, 16 aa, Artificial Sequence
  Description of Artificial Sequence: Synthetic peptide
  Seed: DPRMCSLMQGSTLPRR
DPRMWSLMQTSTLPRR

SEQ ID NO: 62805 - protein, 16 aa, Artificial Sequence
  Description of Artificial Sequence: Synthetic peptide
  Seed: DPRMCSLMQGSTLPRR
DPRMWSLMQTSTMPRR

SEQ ID NO: 62806 - protein, 16 aa, Artificial Sequence
  Description of Artificial Sequence: Synthetic peptide
  Seed: DPRMCSLMQGSTLPRR
DPRMWSLMQTSTNPRR

SEQ ID NO: 62807 - protein, 16 aa, Artificial Sequence
  Description of Artificial Sequence: Synthetic peptide
  Seed: DPRMCSLMQGSTLPRR
DPRMWSLMQTSTSPRR

SEQ ID NO: 62808 - protein, 16 aa, Artificial Sequence
  Description of Artificial Sequence: Synthetic peptide
  Seed: DPRMCSLMQGSTLPRR
DPRMWSLMQTSTTPRR

SEQ ID NO: 62809 - protein, 16 aa, Artificial Sequence
  Description of Artificial Sequence: Synthetic peptide
  Seed: DPRMCSLMQGSTLPRR
DPRMWSLMQTSTVPRR

SEQ ID NO: 62810 - protein, 16 aa, Artificial Sequence
  Description of Artificial Sequence: Synthetic peptide
  Seed: DPRMCSLMQGSTLPRR
DPRMWSLMQVSTAPRR

SEQ ID NO: 62811 - protein, 16 aa, Artificial Sequence
  Description of Artificial Sequence: Synthetic peptide
  Seed: DPRMCSLMQGSTLPRR
DPRMWSLMQVSTIPRR

SEQ ID NO: 62812 - protein, 16 aa, Artificial Sequence
  Description of Artificial Sequence: Synthetic peptide
  Seed: DPRMCSLMQGSTLPRR
DPRMWSLMQVSTLPRR

SEQ ID NO: 62813 - protein, 16 aa, Artificial Sequence
  Description of Artificial Sequence: Synthetic peptide
  Seed: DPRMCSLMQGSTLPRR
DPRMWSLMQVSTMPRR

SEQ ID NO: 62814 - protein, 16 aa, Artificial Sequence
  Description of Artificial Sequence: Synthetic peptide
  Seed: DPRMCSLMQGSTLPRR
DPRMWSLMQVSTNPRR

SEQ ID NO: 62815 - protein, 16 aa, Artificial Sequence
  Description of Artificial Sequence: Synthetic peptide
  Seed: DPRMCSLMQGSTLPRR
DPRMWSLMQVSTSPRR

SEQ ID NO: 62816 - protein, 16 aa, Artificial Sequence
  Description of Artificial Sequence: Synthetic peptide
  Seed: DPRMCSLMQGSTLPRR
DPRMWSLMQVSTTPRR

SEQ ID NO: 62817 - protein, 16 aa, Artificial Sequence
  Description of Artificial Sequence: Synthetic peptide
  Seed: DPRMCSLMQGSTLPRR
DPRMWSLMQVSTVPRR

SEQ ID NO: 62818 - protein, 16 aa, Artificial Sequence
  Description of Artificial Sequence: Synthetic peptide
  Seed: DPRMCSLMQGSTLPRR
DPRMWSLQQASTAPRR

SEQ ID NO: 62819 - protein, 16 aa, Artificial Sequence
  Description of Artificial Sequence: Synthetic peptide
  Seed: DPRMCSLMQGSTLPRR
DPRMWSLQQASTIPRR

SEQ ID NO: 62820 - protein, 16 aa, Artificial Sequence
  Description of Artificial Sequence: Synthetic peptide
  Seed: DPRMCSLMQGSTLPRR
DPRMWSLQQASTLPRR

SEQ ID NO: 62821 - protein, 16 aa, Artificial Sequence
  Description of Artificial Sequence: Synthetic peptide
  Seed: DPRMCSLMQGSTLPRR
DPRMWSLQQASTVPRR

SEQ ID NO: 62822 - protein, 16 aa, Artificial Sequence
  Description of Artificial Sequence: Synthetic peptide
  Seed: DPRMCSLMQGSTLPRR
DPRMWSLQQGSTAPRR

SEQ ID NO: 62823 - protein, 16 aa, Artificial Sequence
  Description of Artificial Sequence: Synthetic peptide
  Seed: DPRMCSLMQGSTLPRR
DPRMWSLQQGSTIPRR

SEQ ID NO: 62824 - protein, 16 aa, Artificial Sequence
  Description of Artificial Sequence: Synthetic peptide
  Seed: DPRMCSLMQGSTLPRR
DPRMWSLQQGSTLPRR

SEQ ID NO: 62825 - protein, 16 aa, Artificial Sequence
  Description of Artificial Sequence: Synthetic peptide
  Seed: DPRMCSLMQGSTLPRR
DPRMWSLQQGSTVPRR

SEQ ID NO: 62826 - protein, 16 aa, Artificial Sequence
  Description of Artificial Sequence: Synthetic peptide
  Seed: DPRMCSLMQGSTLPRR
DPRMWSLQQSSTAPRR

SEQ ID NO: 62827 - protein, 16 aa, Artificial Sequence
  Description of Artificial Sequence: Synthetic peptide
  Seed: DPRMCSLMQGSTLPRR
DPRMWSLQQSSTIPRR

SEQ ID NO: 62828 - protein, 16 aa, Artificial Sequence
  Description of Artificial Sequence: Synthetic peptide
  Seed: DPRMCSLMQGSTLPRR
DPRMWSLQQSSTLPRR

SEQ ID NO: 62829 - protein, 16 aa, Artificial Sequence
  Description of Artificial Sequence: Synthetic peptide
  Seed: DPRMCSLMQGSTLPRR
DPRMWSLQQSSTVPRR

SEQ ID NO: 62830 - protein, 16 aa, Artificial Sequence
  Description of Artificial Sequence: Synthetic peptide
  Seed: DPRMCSLMQGSTLPRR
DPRMWSLSQASTIPRR

SEQ ID NO: 62831 - protein, 16 aa, Artificial Sequence
  Description of Artificial Sequence: Synthetic peptide
  Seed: DPRMCSLMQGSTLPRR
DPRMWSLSQASTLPRR

SEQ ID NO: 62832 - protein, 16 aa, Artificial Sequence
  Description of Artificial Sequence: Synthetic peptide
  Seed: DPRMCSLMQGSTLPRR
DPRMWSLSQASTVPRR

SEQ ID NO: 62833 - protein, 16 aa, Artificial Sequence
  Description of Artificial Sequence: Synthetic peptide
  Seed: DPRMCSLMQGSTLPRR
DPRMWSLVQASTAPRR

SEQ ID NO: 62834 - protein, 16 aa, Artificial Sequence
  Description of Artificial Sequence: Synthetic peptide
  Seed: DPRMCSLMQGSTLPRR
DPRMWSLVQASTIPRR

SEQ ID NO: 62835 - protein, 16 aa, Artificial Sequence
  Description of Artificial Sequence: Synthetic peptide
  Seed: DPRMCSLMQGSTLPRR
DPRMWSLVQASTLPRR

SEQ ID NO: 62836 - protein, 16 aa, Artificial Sequence
  Description of Artificial Sequence: Synthetic peptide
  Seed: DPRMCSLMQGSTLPRR
DPRMWSLVQASTSPRR

SEQ ID NO: 62837 - protein, 16 aa, Artificial Sequence
  Description of Artificial Sequence: Synthetic peptide
  Seed: DPRMCSLMQGSTLPRR
DPRMWSLVQASTVPRR

SEQ ID NO: 62838 - protein, 16 aa, Artificial Sequence
  Description of Artificial Sequence: Synthetic peptide
  Seed: DPRMCSLMQGSTLPRR
DPRMWSLVQGSTAPRR

SEQ ID NO: 62839 - protein, 16 aa, Artificial Sequence
  Description of Artificial Sequence: Synthetic peptide
  Seed: DPRMCSLMQGSTLPRR
DPRMWSLVQGSTIPRR

SEQ ID NO: 62840 - protein, 16 aa, Artificial Sequence
  Description of Artificial Sequence: Synthetic peptide
  Seed: DPRMCSLMQGSTLPRR
DPRMWSLVQGSTLPRR

SEQ ID NO: 62841 - protein, 16 aa, Artificial Sequence
  Description of Artificial Sequence: Synthetic peptide
  Seed: DPRMCSLMQGSTLPRR
DPRMWSLVQGSTVPRR

SEQ ID NO: 62842 - protein, 16 aa, Artificial Sequence
  Description of Artificial Sequence: Synthetic peptide
  Seed: DPRMCSLMQGSTLPRR
DPRMWSLVQPSTAPRR

SEQ ID NO: 62843 - protein, 16 aa, Artificial Sequence
  Description of Artificial Sequence: Synthetic peptide
  Seed: DPRMCSLMQGSTLPRR
DPRMWSLVQSSTAPRR

SEQ ID NO: 62844 - protein, 16 aa, Artificial Sequence
  Description of Artificial Sequence: Synthetic peptide
  Seed: DPRMCSLMQGSTLPRR
DPRMWSLVQSSTIPRR

SEQ ID NO: 62845 - protein, 16 aa, Artificial Sequence
  Description of Artificial Sequence: Synthetic peptide
  Seed: DPRMCSLMQGSTLPRR
DPRMWSLVQSSTLPRR

SEQ ID NO: 62846 - protein, 16 aa, Artificial Sequence
  Description of Artificial Sequence: Synthetic peptide
  Seed: DPRMCSLMQGSTLPRR
DPRMWSLVQSSTVPRR

SEQ ID NO: 62847 - protein, 16 aa, Artificial Sequence
  Description of Artificial Sequence: Synthetic peptide
  Seed: DPRMCSLMQGSTLPRR
DPRMYSLAQASTAPRR

SEQ ID NO: 62848 - protein, 16 aa, Artificial Sequence
  Description of Artificial Sequence: Synthetic peptide
  Seed: DPRMCSLMQGSTLPRR
DPRMYSLAQASTIPRR

SEQ ID NO: 62849 - protein, 16 aa, Artificial Sequence
  Description of Artificial Sequence: Synthetic peptide
  Seed: DPRMCSLMQGSTLPRR
DPRMYSLAQASTLPRR

SEQ ID NO: 62850 - protein, 16 aa, Artificial Sequence
  Description of Artificial Sequence: Synthetic peptide
  Seed: DPRMCSLMQGSTLPRR
DPRMYSLAQASTMPRR

SEQ ID NO: 62851 - protein, 16 aa, Artificial Sequence
  Description of Artificial Sequence: Synthetic peptide
  Seed: DPRMCSLMQGSTLPRR
DPRMYSLAQASTNPRR

SEQ ID NO: 62852 - protein, 16 aa, Artificial Sequence
  Description of Artificial Sequence: Synthetic peptide
  Seed: DPRMCSLMQGSTLPRR
DPRMYSLAQASTSPRR

SEQ ID NO: 62853 - protein, 16 aa, Artificial Sequence
  Description of Artificial Sequence: Synthetic peptide
  Seed: DPRMCSLMQGSTLPRR
DPRMYSLAQASTTPRR

SEQ ID NO: 62854 - protein, 16 aa, Artificial Sequence
  Description of Artificial Sequence: Synthetic peptide
  Seed: DPRMCSLMQGSTLPRR
DPRMYSLAQASTVPRR

SEQ ID NO: 62855 - protein, 16 aa, Artificial Sequence
  Description of Artificial Sequence: Synthetic peptide
  Seed: DPRMCSLMQGSTLPRR
DPRMYSLAQGSTAPRR

SEQ ID NO: 62856 - protein, 16 aa, Artificial Sequence
  Description of Artificial Sequence: Synthetic peptide
  Seed: DPRMCSLMQGSTLPRR
DPRMYSLAQGSTIPRR

SEQ ID NO: 62857 - protein, 16 aa, Artificial Sequence
  Description of Artificial Sequence: Synthetic peptide
  Seed: DPRMCSLMQGSTLPRR
DPRMYSLAQGSTLPRR

SEQ ID NO: 62858 - protein, 16 aa, Artificial Sequence
  Description of Artificial Sequence: Synthetic peptide
  Seed: DPRMCSLMQGSTLPRR
DPRMYSLAQGSTMPRR

SEQ ID NO: 62859 - protein, 16 aa, Artificial Sequence
  Description of Artificial Sequence: Synthetic peptide
  Seed: DPRMCSLMQGSTLPRR
DPRMYSLAQGSTSPRR

SEQ ID NO: 62860 - protein, 16 aa, Artificial Sequence
  Description of Artificial Sequence: Synthetic peptide
  Seed: DPRMCSLMQGSTLPRR
DPRMYSLAQGSTTPRR

SEQ ID NO: 62861 - protein, 16 aa, Artificial Sequence
  Description of Artificial Sequence: Synthetic peptide
  Seed: DPRMCSLMQGSTLPRR
DPRMYSLAQGSTVPRR

SEQ ID NO: 62862 - protein, 16 aa, Artificial Sequence
  Description of Artificial Sequence: Synthetic peptide
  Seed: DPRMCSLMQGSTLPRR
DPRMYSLAQISTAPRR

SEQ ID NO: 62863 - protein, 16 aa, Artificial Sequence
  Description of Artificial Sequence: Synthetic peptide
  Seed: DPRMCSLMQGSTLPRR
DPRMYSLAQISTIPRR

SEQ ID NO: 62864 - protein, 16 aa, Artificial Sequence
  Description of Artificial Sequence: Synthetic peptide
  Seed: DPRMCSLMQGSTLPRR
DPRMYSLAQISTLPRR

SEQ ID NO: 62865 - protein, 16 aa, Artificial Sequence
  Description of Artificial Sequence: Synthetic peptide
  Seed: DPRMCSLMQGSTLPRR
DPRMYSLAQISTNPRR

SEQ ID NO: 62866 - protein, 16 aa, Artificial Sequence
  Description of Artificial Sequence: Synthetic peptide
  Seed: DPRMCSLMQGSTLPRR
DPRMYSLAQISTSPRR

SEQ ID NO: 62867 - protein, 16 aa, Artificial Sequence
  Description of Artificial Sequence: Synthetic peptide
  Seed: DPRMCSLMQGSTLPRR
DPRMYSLAQISTVPRR

SEQ ID NO: 62868 - protein, 16 aa, Artificial Sequence
  Description of Artificial Sequence: Synthetic peptide
  Seed: DPRMCSLMQGSTLPRR
DPRMYSLAQNSTAPRR

SEQ ID NO: 62869 - protein, 16 aa, Artificial Sequence
  Description of Artificial Sequence: Synthetic peptide
  Seed: DPRMCSLMQGSTLPRR
DPRMYSLAQNSTIPRR

SEQ ID NO: 62870 - protein, 16 aa, Artificial Sequence
  Description of Artificial Sequence: Synthetic peptide
  Seed: DPRMCSLMQGSTLPRR
DPRMYSLAQNSTLPRR

SEQ ID NO: 62871 - protein, 16 aa, Artificial Sequence
  Description of Artificial Sequence: Synthetic peptide
  Seed: DPRMCSLMQGSTLPRR
DPRMYSLAQNSTVPRR

SEQ ID NO: 62872 - protein, 16 aa, Artificial Sequence
  Description of Artificial Sequence: Synthetic peptide
  Seed: DPRMCSLMQGSTLPRR
DPRMYSLAQPSTAPRR

SEQ ID NO: 62873 - protein, 16 aa, Artificial Sequence
  Description of Artificial Sequence: Synthetic peptide
  Seed: DPRMCSLMQGSTLPRR
DPRMYSLAQPSTIPRR

SEQ ID NO: 62874 - protein, 16 aa, Artificial Sequence
  Description of Artificial Sequence: Synthetic peptide
  Seed: DPRMCSLMQGSTLPRR
DPRMYSLAQPSTLPRR

SEQ ID NO: 62875 - protein, 16 aa, Artificial Sequence
  Description of Artificial Sequence: Synthetic peptide
  Seed: DPRMCSLMQGSTLPRR
DPRMYSLAQPSTMPRR

SEQ ID NO: 62876 - protein, 16 aa, Artificial Sequence
  Description of Artificial Sequence: Synthetic peptide
  Seed: DPRMCSLMQGSTLPRR
DPRMYSLAQPSTNPRR

SEQ ID NO: 62877 - protein, 16 aa, Artificial Sequence
  Description of Artificial Sequence: Synthetic peptide
  Seed: DPRMCSLMQGSTLPRR
DPRMYSLAQPSTSPRR

SEQ ID NO: 62878 - protein, 16 aa, Artificial Sequence
  Description of Artificial Sequence: Synthetic peptide
  Seed: DPRMCSLMQGSTLPRR
DPRMYSLAQPSTVPRR

SEQ ID NO: 62879 - protein, 16 aa, Artificial Sequence
  Description of Artificial Sequence: Synthetic peptide
  Seed: DPRMCSLMQGSTLPRR
DPRMYSLAQSSTAPRR

SEQ ID NO: 62880 - protein, 16 aa, Artificial Sequence
  Description of Artificial Sequence: Synthetic peptide
  Seed: DPRMCSLMQGSTLPRR
DPRMYSLAQSSTIPRR

SEQ ID NO: 62881 - protein, 16 aa, Artificial Sequence
  Description of Artificial Sequence: Synthetic peptide
  Seed: DPRMCSLMQGSTLPRR
DPRMYSLAQSSTLPRR

SEQ ID NO: 62882 - protein, 16 aa, Artificial Sequence
  Description of Artificial Sequence: Synthetic peptide
  Seed: DPRMCSLMQGSTLPRR
DPRMYSLAQSSTMPRR

SEQ ID NO: 62883 - protein, 16 aa, Artificial Sequence
  Description of Artificial Sequence: Synthetic peptide
  Seed: DPRMCSLMQGSTLPRR
DPRMYSLAQSSTNPRR

SEQ ID NO: 62884 - protein, 16 aa, Artificial Sequence
  Description of Artificial Sequence: Synthetic peptide
  Seed: DPRMCSLMQGSTLPRR
DPRMYSLAQSSTSPRR

SEQ ID NO: 62885 - protein, 16 aa, Artificial Sequence
  Description of Artificial Sequence: Synthetic peptide
  Seed: DPRMCSLMQGSTLPRR
DPRMYSLAQSSTTPRR

SEQ ID NO: 62886 - protein, 16 aa, Artificial Sequence
  Description of Artificial Sequence: Synthetic peptide
  Seed: DPRMCSLMQGSTLPRR
DPRMYSLAQSSTVPRR

SEQ ID NO: 62887 - protein, 16 aa, Artificial Sequence
  Description of Artificial Sequence: Synthetic peptide
  Seed: DPRMCSLMQGSTLPRR
DPRMYSLAQTSTAPRR

SEQ ID NO: 62888 - protein, 16 aa, Artificial Sequence
  Description of Artificial Sequence: Synthetic peptide
  Seed: DPRMCSLMQGSTLPRR
DPRMYSLAQTSTIPRR

SEQ ID NO: 62889 - protein, 16 aa, Artificial Sequence
  Description of Artificial Sequence: Synthetic peptide
  Seed: DPRMCSLMQGSTLPRR
DPRMYSLAQTSTLPRR

SEQ ID NO: 62890 - protein, 16 aa, Artificial Sequence
  Description of Artificial Sequence: Synthetic peptide
  Seed: DPRMCSLMQGSTLPRR
DPRMYSLAQTSTMPRR

SEQ ID NO: 62891 - protein, 16 aa, Artificial Sequence
  Description of Artificial Sequence: Synthetic peptide
  Seed: DPRMCSLMQGSTLPRR
DPRMYSLAQTSTSPRR

SEQ ID NO: 62892 - protein, 16 aa, Artificial Sequence
  Description of Artificial Sequence: Synthetic peptide
  Seed: DPRMCSLMQGSTLPRR
DPRMYSLAQTSTVPRR

SEQ ID NO: 62893 - protein, 16 aa, Artificial Sequence
  Description of Artificial Sequence: Synthetic peptide
  Seed: DPRMCSLMQGSTLPRR
DPRMYSLAQVSTAPRR

SEQ ID NO: 62894 - protein, 16 aa, Artificial Sequence
  Description of Artificial Sequence: Synthetic peptide
  Seed: DPRMCSLMQGSTLPRR
DPRMYSLAQVSTIPRR

SEQ ID NO: 62895 - protein, 16 aa, Artificial Sequence
  Description of Artificial Sequence: Synthetic peptide
  Seed: DPRMCSLMQGSTLPRR
DPRMYSLAQVSTLPRR

SEQ ID NO: 62896 - protein, 16 aa, Artificial Sequence
  Description of Artificial Sequence: Synthetic peptide
  Seed: DPRMCSLMQGSTLPRR
DPRMYSLAQVSTMPRR

SEQ ID NO: 62897 - protein, 16 aa, Artificial Sequence
  Description of Artificial Sequence: Synthetic peptide
  Seed: DPRMCSLMQGSTLPRR
DPRMYSLAQVSTNPRR

SEQ ID NO: 62898 - protein, 16 aa, Artificial Sequence
  Description of Artificial Sequence: Synthetic peptide
  Seed: DPRMCSLMQGSTLPRR
DPRMYSLAQVSTSPRR

SEQ ID NO: 62899 - protein, 16 aa, Artificial Sequence
  Description of Artificial Sequence: Synthetic peptide
  Seed: DPRMCSLMQGSTLPRR
DPRMYSLAQVSTTPRR

SEQ ID NO: 62900 - protein, 16 aa, Artificial Sequence
  Description of Artificial Sequence: Synthetic peptide
  Seed: DPRMCSLMQGSTLPRR
DPRMYSLAQVSTVPRR

SEQ ID NO: 62901 - protein, 16 aa, Artificial Sequence
  Description of Artificial Sequence: Synthetic peptide
  Seed: DPRMCSLMQGSTLPRR
DPRMYSLEQASTAPRR

SEQ ID NO: 62902 - protein, 16 aa, Artificial Sequence
  Description of Artificial Sequence: Synthetic peptide
  Seed: DPRMCSLMQGSTLPRR
DPRMYSLEQASTIPRR

SEQ ID NO: 62903 - protein, 16 aa, Artificial Sequence
  Description of Artificial Sequence: Synthetic peptide
  Seed: DPRMCSLMQGSTLPRR
DPRMYSLEQASTLPRR

SEQ ID NO: 62904 - protein, 16 aa, Artificial Sequence
  Description of Artificial Sequence: Synthetic peptide
  Seed: DPRMCSLMQGSTLPRR
DPRMYSLEQASTVPRR

SEQ ID NO: 62905 - protein, 16 aa, Artificial Sequence
  Description of Artificial Sequence: Synthetic peptide
  Seed: DPRMCSLMQGSTLPRR
DPRMYSLEQGSTLPRR

SEQ ID NO: 62906 - protein, 16 aa, Artificial Sequence
  Description of Artificial Sequence: Synthetic peptide
  Seed: DPRMCSLMQGSTLPRR
DPRMYSLFQASTAPRR

SEQ ID NO: 62907 - protein, 16 aa, Artificial Sequence
  Description of Artificial Sequence: Synthetic peptide
  Seed: DPRMCSLMQGSTLPRR
DPRMYSLFQASTIPRR

SEQ ID NO: 62908 - protein, 16 aa, Artificial Sequence
  Description of Artificial Sequence: Synthetic peptide
  Seed: DPRMCSLMQGSTLPRR
DPRMYSLFQASTLPRR

SEQ ID NO: 62909 - protein, 16 aa, Artificial Sequence
  Description of Artificial Sequence: Synthetic peptide
  Seed: DPRMCSLMQGSTLPRR
DPRMYSLFQASTSPRR

SEQ ID NO: 62910 - protein, 16 aa, Artificial Sequence
  Description of Artificial Sequence: Synthetic peptide
  Seed: DPRMCSLMQGSTLPRR
DPRMYSLFQASTVPRR

SEQ ID NO: 62911 - protein, 16 aa, Artificial Sequence
  Description of Artificial Sequence: Synthetic peptide
  Seed: DPRMCSLMQGSTLPRR
DPRMYSLFQGSTIPRR

SEQ ID NO: 62912 - protein, 16 aa, Artificial Sequence
  Description of Artificial Sequence: Synthetic peptide
  Seed: DPRMCSLMQGSTLPRR
DPRMYSLFQGSTLPRR

SEQ ID NO: 62913 - protein, 16 aa, Artificial Sequence
  Description of Artificial Sequence: Synthetic peptide
  Seed: DPRMCSLMQGSTLPRR
DPRMYSLFQGSTVPRR

SEQ ID NO: 62914 - protein, 16 aa, Artificial Sequence
  Description of Artificial Sequence: Synthetic peptide
  Seed: DPRMCSLMQGSTLPRR
DPRMYSLFQPSTAPRR

SEQ ID NO: 62915 - protein, 16 aa, Artificial Sequence
  Description of Artificial Sequence: Synthetic peptide
  Seed: DPRMCSLMQGSTLPRR
DPRMYSLFQSSTAPRR

SEQ ID NO: 62916 - protein, 16 aa, Artificial Sequence
  Description of Artificial Sequence: Synthetic peptide
  Seed: DPRMCSLMQGSTLPRR
DPRMYSLFQSSTLPRR

SEQ ID NO: 62917 - protein, 16 aa, Artificial Sequence
  Description of Artificial Sequence: Synthetic peptide
  Seed: DPRMCSLMQGSTLPRR
DPRMYSLFQSSTVPRR

SEQ ID NO: 62918 - protein, 16 aa, Artificial Sequence
  Description of Artificial Sequence: Synthetic peptide
  Seed: DPRMCSLMQGSTLPRR
DPRMYSLFQVSTAPRR

SEQ ID NO: 62919 - protein, 16 aa, Artificial Sequence
  Description of Artificial Sequence: Synthetic peptide
  Seed: DPRMCSLMQGSTLPRR
DPRMYSLGQASTIPRR

SEQ ID NO: 62920 - protein, 16 aa, Artificial Sequence
  Description of Artificial Sequence: Synthetic peptide
  Seed: DPRMCSLMQGSTLPRR
DPRMYSLGQASTLPRR

SEQ ID NO: 62921 - protein, 16 aa, Artificial Sequence
  Description of Artificial Sequence: Synthetic peptide
  Seed: DPRMCSLMQGSTLPRR
DPRMYSLGQASTVPRR

SEQ ID NO: 62922 - protein, 16 aa, Artificial Sequence
  Description of Artificial Sequence: Synthetic peptide
  Seed: DPRMCSLMQGSTLPRR
DPRMYSLGQSSTLPRR

SEQ ID NO: 62923 - protein, 16 aa, Artificial Sequence
  Description of Artificial Sequence: Synthetic peptide
  Seed: DPRMCSLMQGSTLPRR
DPRMYSLIQASTAPRR

SEQ ID NO: 62924 - protein, 16 aa, Artificial Sequence
  Description of Artificial Sequence: Synthetic peptide
  Seed: DPRMCSLMQGSTLPRR
DPRMYSLIQASTCPRR

SEQ ID NO: 62925 - protein, 16 aa, Artificial Sequence
  Description of Artificial Sequence: Synthetic peptide
  Seed: DPRMCSLMQGSTLPRR
DPRMYSLIQASTGPRR

SEQ ID NO: 62926 - protein, 16 aa, Artificial Sequence
  Description of Artificial Sequence: Synthetic peptide
  Seed: DPRMCSLMQGSTLPRR
DPRMYSLIQASTHPRR

SEQ ID NO: 62927 - protein, 16 aa, Artificial Sequence
  Description of Artificial Sequence: Synthetic peptide
  Seed: DPRMCSLMQGSTLPRR
DPRMYSLIQASTIPRR

SEQ ID NO: 62928 - protein, 16 aa, Artificial Sequence
  Description of Artificial Sequence: Synthetic peptide
  Seed: DPRMCSLMQGSTLPRR
DPRMYSLIQASTLPRR

SEQ ID NO: 62929 - protein, 16 aa, Artificial Sequence
  Description of Artificial Sequence: Synthetic peptide
  Seed: DPRMCSLMQGSTLPRR
DPRMYSLIQASTMPRR

SEQ ID NO: 62930 - protein, 16 aa, Artificial Sequence
  Description of Artificial Sequence: Synthetic peptide
  Seed: DPRMCSLMQGSTLPRR
DPRMYSLIQASTNPRR

SEQ ID NO: 62931 - protein, 16 aa, Artificial Sequence
  Description of Artificial Sequence: Synthetic peptide
  Seed: DPRMCSLMQGSTLPRR
DPRMYSLIQASTQPRR

SEQ ID NO: 62932 - protein, 16 aa, Artificial Sequence
  Description of Artificial Sequence: Synthetic peptide
  Seed: DPRMCSLMQGSTLPRR
DPRMYSLIQASTSPRR

SEQ ID NO: 62933 - protein, 16 aa, Artificial Sequence
  Description of Artificial Sequence: Synthetic peptide
  Seed: DPRMCSLMQGSTLPRR
DPRMYSLIQASTTPRR

SEQ ID NO: 62934 - protein, 16 aa, Artificial Sequence
  Description of Artificial Sequence: Synthetic peptide
  Seed: DPRMCSLMQGSTLPRR
DPRMYSLIQASTVPRR

SEQ ID NO: 62935 - protein, 16 aa, Artificial Sequence
  Description of Artificial Sequence: Synthetic peptide
  Seed: DPRMCSLMQGSTLPRR
DPRMYSLIQGSTAPRR

SEQ ID NO: 62936 - protein, 16 aa, Artificial Sequence
  Description of Artificial Sequence: Synthetic peptide
  Seed: DPRMCSLMQGSTLPRR
DPRMYSLIQGSTGPRR

SEQ ID NO: 62937 - protein, 16 aa, Artificial Sequence
  Description of Artificial Sequence: Synthetic peptide
  Seed: DPRMCSLMQGSTLPRR
DPRMYSLIQGSTIPRR

SEQ ID NO: 62938 - protein, 16 aa, Artificial Sequence
  Description of Artificial Sequence: Synthetic peptide
  Seed: DPRMCSLMQGSTLPRR
DPRMYSLIQGSTLPRR

SEQ ID NO: 62939 - protein, 16 aa, Artificial Sequence
  Description of Artificial Sequence: Synthetic peptide
  Seed: DPRMCSLMQGSTLPRR
DPRMYSLIQGSTMPRR

SEQ ID NO: 62940 - protein, 16 aa, Artificial Sequence
  Description of Artificial Sequence: Synthetic peptide
  Seed: DPRMCSLMQGSTLPRR
DPRMYSLIQGSTNPRR

SEQ ID NO: 62941 - protein, 16 aa, Artificial Sequence
  Description of Artificial Sequence: Synthetic peptide
  Seed: DPRMCSLMQGSTLPRR
DPRMYSLIQGSTSPRR

SEQ ID NO: 62942 - protein, 16 aa, Artificial Sequence
  Description of Artificial Sequence: Synthetic peptide
  Seed: DPRMCSLMQGSTLPRR
DPRMYSLIQGSTTPRR

SEQ ID NO: 62943 - protein, 16 aa, Artificial Sequence
  Description of Artificial Sequence: Synthetic peptide
  Seed: DPRMCSLMQGSTLPRR
DPRMYSLIQGSTVPRR

SEQ ID NO: 62944 - protein, 16 aa, Artificial Sequence
  Description of Artificial Sequence: Synthetic peptide
  Seed: DPRMCSLMQGSTLPRR
DPRMYSLIQISTAPRR

SEQ ID NO: 62945 - protein, 16 aa, Artificial Sequence
  Description of Artificial Sequence: Synthetic peptide
  Seed: DPRMCSLMQGSTLPRR
DPRMYSLIQISTIPRR

SEQ ID NO: 62946 - protein, 16 aa, Artificial Sequence
  Description of Artificial Sequence: Synthetic peptide
  Seed: DPRMCSLMQGSTLPRR
DPRMYSLIQISTLPRR

SEQ ID NO: 62947 - protein, 16 aa, Artificial Sequence
  Description of Artificial Sequence: Synthetic peptide
  Seed: DPRMCSLMQGSTLPRR
DPRMYSLIQISTMPRR

SEQ ID NO: 62948 - protein, 16 aa, Artificial Sequence
  Description of Artificial Sequence: Synthetic peptide
  Seed: DPRMCSLMQGSTLPRR
DPRMYSLIQISTNPRR

SEQ ID NO: 62949 - protein, 16 aa, Artificial Sequence
  Description of Artificial Sequence: Synthetic peptide
  Seed: DPRMCSLMQGSTLPRR
DPRMYSLIQISTSPRR

SEQ ID NO: 62950 - protein, 16 aa, Artificial Sequence
  Description of Artificial Sequence: Synthetic peptide
  Seed: DPRMCSLMQGSTLPRR
DPRMYSLIQISTTPRR

SEQ ID NO: 62951 - protein, 16 aa, Artificial Sequence
  Description of Artificial Sequence: Synthetic peptide
  Seed: DPRMCSLMQGSTLPRR
DPRMYSLIQISTVPRR

SEQ ID NO: 62952 - protein, 16 aa, Artificial Sequence
  Description of Artificial Sequence: Synthetic peptide
  Seed: DPRMCSLMQGSTLPRR
DPRMYSLIQLSTAPRR

SEQ ID NO: 62953 - protein, 16 aa, Artificial Sequence
  Description of Artificial Sequence: Synthetic peptide
  Seed: DPRMCSLMQGSTLPRR
DPRMYSLIQMSTAPRR

SEQ ID NO: 62954 - protein, 16 aa, Artificial Sequence
  Description of Artificial Sequence: Synthetic peptide
  Seed: DPRMCSLMQGSTLPRR
DPRMYSLIQNSTAPRR

SEQ ID NO: 62955 - protein, 16 aa, Artificial Sequence
  Description of Artificial Sequence: Synthetic peptide
  Seed: DPRMCSLMQGSTLPRR
DPRMYSLIQNSTIPRR

SEQ ID NO: 62956 - protein, 16 aa, Artificial Sequence
  Description of Artificial Sequence: Synthetic peptide
  Seed: DPRMCSLMQGSTLPRR
DPRMYSLIQNSTLPRR

SEQ ID NO: 62957 - protein, 16 aa, Artificial Sequence
  Description of Artificial Sequence: Synthetic peptide
  Seed: DPRMCSLMQGSTLPRR
DPRMYSLIQNSTSPRR

SEQ ID NO: 62958 - protein, 16 aa, Artificial Sequence
  Description of Artificial Sequence: Synthetic peptide
  Seed: DPRMCSLMQGSTLPRR
DPRMYSLIQNSTTPRR

SEQ ID NO: 62959 - protein, 16 aa, Artificial Sequence
  Description of Artificial Sequence: Synthetic peptide
  Seed: DPRMCSLMQGSTLPRR
DPRMYSLIQNSTVPRR

SEQ ID NO: 62960 - protein, 16 aa, Artificial Sequence
  Description of Artificial Sequence: Synthetic peptide
  Seed: DPRMCSLMQGSTLPRR
DPRMYSLIQPSTAPRR

SEQ ID NO: 62961 - protein, 16 aa, Artificial Sequence
  Description of Artificial Sequence: Synthetic peptide
  Seed: DPRMCSLMQGSTLPRR
DPRMYSLIQPSTGPRR

SEQ ID NO: 62962 - protein, 16 aa, Artificial Sequence
  Description of Artificial Sequence: Synthetic peptide
  Seed: DPRMCSLMQGSTLPRR
DPRMYSLIQPSTHPRR

SEQ ID NO: 62963 - protein, 16 aa, Artificial Sequence
  Description of Artificial Sequence: Synthetic peptide
  Seed: DPRMCSLMQGSTLPRR
DPRMYSLIQPSTIPRR

SEQ ID NO: 62964 - protein, 16 aa, Artificial Sequence
  Description of Artificial Sequence: Synthetic peptide
  Seed: DPRMCSLMQGSTLPRR
DPRMYSLIQPSTLPRR

SEQ ID NO: 62965 - protein, 16 aa, Artificial Sequence
  Description of Artificial Sequence: Synthetic peptide
  Seed: DPRMCSLMQGSTLPRR
DPRMYSLIQPSTMPRR

SEQ ID NO: 62966 - protein, 16 aa, Artificial Sequence
  Description of Artificial Sequence: Synthetic peptide
  Seed: DPRMCSLMQGSTLPRR
DPRMYSLIQPSTNPRR

SEQ ID NO: 62967 - protein, 16 aa, Artificial Sequence
  Description of Artificial Sequence: Synthetic peptide
  Seed: DPRMCSLMQGSTLPRR
DPRMYSLIQPSTSPRR

SEQ ID NO: 62968 - protein, 16 aa, Artificial Sequence
  Description of Artificial Sequence: Synthetic peptide
  Seed: DPRMCSLMQGSTLPRR
DPRMYSLIQPSTTPRR

SEQ ID NO: 62969 - protein, 16 aa, Artificial Sequence
  Description of Artificial Sequence: Synthetic peptide
  Seed: DPRMCSLMQGSTLPRR
DPRMYSLIQPSTVPRR

SEQ ID NO: 62970 - protein, 16 aa, Artificial Sequence
  Description of Artificial Sequence: Synthetic peptide
  Seed: DPRMCSLMQGSTLPRR
DPRMYSLIQSSTAPRR

SEQ ID NO: 62971 - protein, 16 aa, Artificial Sequence
  Description of Artificial Sequence: Synthetic peptide
  Seed: DPRMCSLMQGSTLPRR
DPRMYSLIQSSTGPRR

SEQ ID NO: 62972 - protein, 16 aa, Artificial Sequence
  Description of Artificial Sequence: Synthetic peptide
  Seed: DPRMCSLMQGSTLPRR
DPRMYSLIQSSTIPRR

SEQ ID NO: 62973 - protein, 16 aa, Artificial Sequence
  Description of Artificial Sequence: Synthetic peptide
  Seed: DPRMCSLMQGSTLPRR
DPRMYSLIQSSTLPRR

SEQ ID NO: 62974 - protein, 16 aa, Artificial Sequence
  Description of Artificial Sequence: Synthetic peptide
  Seed: DPRMCSLMQGSTLPRR
DPRMYSLIQSSTMPRR

SEQ ID NO: 62975 - protein, 16 aa, Artificial Sequence
  Description of Artificial Sequence: Synthetic peptide
  Seed: DPRMCSLMQGSTLPRR
DPRMYSLIQSSTNPRR

SEQ ID NO: 62976 - protein, 16 aa, Artificial Sequence
  Description of Artificial Sequence: Synthetic peptide
  Seed: DPRMCSLMQGSTLPRR
DPRMYSLIQSSTSPRR

SEQ ID NO: 62977 - protein, 16 aa, Artificial Sequence
  Description of Artificial Sequence: Synthetic peptide
  Seed: DPRMCSLMQGSTLPRR
DPRMYSLIQSSTTPRR

SEQ ID NO: 62978 - protein, 16 aa, Artificial Sequence
  Description of Artificial Sequence: Synthetic peptide
  Seed: DPRMCSLMQGSTLPRR
DPRMYSLIQSSTVPRR

SEQ ID NO: 62979 - protein, 16 aa, Artificial Sequence
  Description of Artificial Sequence: Synthetic peptide
  Seed: DPRMCSLMQGSTLPRR
DPRMYSLIQTSTAPRR

SEQ ID NO: 62980 - protein, 16 aa, Artificial Sequence
  Description of Artificial Sequence: Synthetic peptide
  Seed: DPRMCSLMQGSTLPRR
DPRMYSLIQTSTIPRR

SEQ ID NO: 62981 - protein, 16 aa, Artificial Sequence
  Description of Artificial Sequence: Synthetic peptide
  Seed: DPRMCSLMQGSTLPRR
DPRMYSLIQTSTLPRR

SEQ ID NO: 62982 - protein, 16 aa, Artificial Sequence
  Description of Artificial Sequence: Synthetic peptide
  Seed: DPRMCSLMQGSTLPRR
DPRMYSLIQTSTMPRR

SEQ ID NO: 62983 - protein, 16 aa, Artificial Sequence
  Description of Artificial Sequence: Synthetic peptide
  Seed: DPRMCSLMQGSTLPRR
DPRMYSLIQTSTNPRR

SEQ ID NO: 62984 - protein, 16 aa, Artificial Sequence
  Description of Artificial Sequence: Synthetic peptide
  Seed: DPRMCSLMQGSTLPRR
DPRMYSLIQTSTSPRR

SEQ ID NO: 62985 - protein, 16 aa, Artificial Sequence
  Description of Artificial Sequence: Synthetic peptide
  Seed: DPRMCSLMQGSTLPRR
DPRMYSLIQTSTTPRR

SEQ ID NO: 62986 - protein, 16 aa, Artificial Sequence
  Description of Artificial Sequence: Synthetic peptide
  Seed: DPRMCSLMQGSTLPRR
DPRMYSLIQTSTVPRR

SEQ ID NO: 62987 - protein, 16 aa, Artificial Sequence
  Description of Artificial Sequence: Synthetic peptide
  Seed: DPRMCSLMQGSTLPRR
DPRMYSLIQVSTAPRR

SEQ ID NO: 62988 - protein, 16 aa, Artificial Sequence
  Description of Artificial Sequence: Synthetic peptide
  Seed: DPRMCSLMQGSTLPRR
DPRMYSLIQVSTGPRR

SEQ ID NO: 62989 - protein, 16 aa, Artificial Sequence
  Description of Artificial Sequence: Synthetic peptide
  Seed: DPRMCSLMQGSTLPRR
DPRMYSLIQVSTHPRR

SEQ ID NO: 62990 - protein, 16 aa, Artificial Sequence
  Description of Artificial Sequence: Synthetic peptide
  Seed: DPRMCSLMQGSTLPRR
DPRMYSLIQVSTIPRR

SEQ ID NO: 62991 - protein, 16 aa, Artificial Sequence
  Description of Artificial Sequence: Synthetic peptide
  Seed: DPRMCSLMQGSTLPRR
DPRMYSLIQVSTLPRR

SEQ ID NO: 62992 - protein, 16 aa, Artificial Sequence
  Description of Artificial Sequence: Synthetic peptide
  Seed: DPRMCSLMQGSTLPRR
DPRMYSLIQVSTMPRR

SEQ ID NO: 62993 - protein, 16 aa, Artificial Sequence
  Description of Artificial Sequence: Synthetic peptide
  Seed: DPRMCSLMQGSTLPRR
DPRMYSLIQVSTNPRR

SEQ ID NO: 62994 - protein, 16 aa, Artificial Sequence
  Description of Artificial Sequence: Synthetic peptide
  Seed: DPRMCSLMQGSTLPRR
DPRMYSLIQVSTSPRR

SEQ ID NO: 62995 - protein, 16 aa, Artificial Sequence
  Description of Artificial Sequence: Synthetic peptide
  Seed: DPRMCSLMQGSTLPRR
DPRMYSLIQVSTTPRR

SEQ ID NO: 62996 - protein, 16 aa, Artificial Sequence
  Description of Artificial Sequence: Synthetic peptide
  Seed: DPRMCSLMQGSTLPRR
DPRMYSLIQVSTVPRR

SEQ ID NO: 62997 - protein, 16 aa, Artificial Sequence
  Description of Artificial Sequence: Synthetic peptide
  Seed: DPRMCSLMQGSTLPRR
DPRMYSLLQASTAPRR

SEQ ID NO: 62998 - protein, 16 aa, Artificial Sequence
  Description of Artificial Sequence: Synthetic peptide
  Seed: DPRMCSLMQGSTLPRR
DPRMYSLLQASTCPRR

SEQ ID NO: 62999 - protein, 16 aa, Artificial Sequence
  Description of Artificial Sequence: Synthetic peptide
  Seed: DPRMCSLMQGSTLPRR
DPRMYSLLQASTFPRR

SEQ ID NO: 63000 - protein, 16 aa, Artificial Sequence
  Description of Artificial Sequence: Synthetic peptide
  Seed: DPRMCSLMQGSTLPRR
DPRMYSLLQASTGPRR

SEQ ID NO: 63001 - protein, 16 aa, Artificial Sequence
  Description of Artificial Sequence: Synthetic peptide
  Seed: DPRMCSLMQGSTLPRR
DPRMYSLLQASTHPRR

SEQ ID NO: 63002 - protein, 16 aa, Artificial Sequence
  Description of Artificial Sequence: Synthetic peptide
  Seed: DPRMCSLMQGSTLPRR
DPRMYSLLQASTIPRR

SEQ ID NO: 63003 - protein, 16 aa, Artificial Sequence
  Description of Artificial Sequence: Synthetic peptide
  Seed: DPRMCSLMQGSTLPRR
DPRMYSLLQASTLPRR

SEQ ID NO: 63004 - protein, 16 aa, Artificial Sequence
  Description of Artificial Sequence: Synthetic peptide
  Seed: DPRMCSLMQGSTLPRR
DPRMYSLLQASTMPRR

SEQ ID NO: 63005 - protein, 16 aa, Artificial Sequence
  Description of Artificial Sequence: Synthetic peptide
  Seed: DPRMCSLMQGSTLPRR
DPRMYSLLQASTNPRR

SEQ ID NO: 63006 - protein, 16 aa, Artificial Sequence
  Description of Artificial Sequence: Synthetic peptide
  Seed: DPRMCSLMQGSTLPRR
DPRMYSLLQASTPPRR

SEQ ID NO: 63007 - protein, 16 aa, Artificial Sequence
  Description of Artificial Sequence: Synthetic peptide
  Seed: DPRMCSLMQGSTLPRR
DPRMYSLLQASTQPRR

SEQ ID NO: 63008 - protein, 16 aa, Artificial Sequence
  Description of Artificial Sequence: Synthetic peptide
  Seed: DPRMCSLMQGSTLPRR
DPRMYSLLQASTSPRR

SEQ ID NO: 63009 - protein, 16 aa, Artificial Sequence
  Description of Artificial Sequence: Synthetic peptide
  Seed: DPRMCSLMQGSTLPRR
DPRMYSLLQASTTPRR

SEQ ID NO: 63010 - protein, 16 aa, Artificial Sequence
  Description of Artificial Sequence: Synthetic peptide
  Seed: DPRMCSLMQGSTLPRR
DPRMYSLLQASTVPRR

SEQ ID NO: 63011 - protein, 16 aa, Artificial Sequence
  Description of Artificial Sequence: Synthetic peptide
  Seed: DPRMCSLMQGSTLPRR
DPRMYSLLQGSTAPRR

SEQ ID NO: 63012 - protein, 16 aa, Artificial Sequence
  Description of Artificial Sequence: Synthetic peptide
  Seed: DPRMCSLMQGSTLPRR
DPRMYSLLQGSTCPRR

SEQ ID NO: 63013 - protein, 16 aa, Artificial Sequence
  Description of Artificial Sequence: Synthetic peptide
  Seed: DPRMCSLMQGSTLPRR
DPRMYSLLQGSTFPRR

SEQ ID NO: 63014 - protein, 16 aa, Artificial Sequence
  Description of Artificial Sequence: Synthetic peptide
  Seed: DPRMCSLMQGSTLPRR
DPRMYSLLQGSTGPRR

SEQ ID NO: 63015 - protein, 16 aa, Artificial Sequence
  Description of Artificial Sequence: Synthetic peptide
  Seed: DPRMCSLMQGSTLPRR
DPRMYSLLQGSTIPRR

SEQ ID NO: 63016 - protein, 16 aa, Artificial Sequence
  Description of Artificial Sequence: Synthetic peptide
  Seed: DPRMCSLMQGSTLPRR
DPRMYSLLQGSTLPRR

SEQ ID NO: 63017 - protein, 16 aa, Artificial Sequence
  Description of Artificial Sequence: Synthetic peptide
  Seed: DPRMCSLMQGSTLPRR
DPRMYSLLQGSTMPRR

SEQ ID NO: 63018 - protein, 16 aa, Artificial Sequence
  Description of Artificial Sequence: Synthetic peptide
  Seed: DPRMCSLMQGSTLPRR
DPRMYSLLQGSTNPRR

SEQ ID NO: 63019 - protein, 16 aa, Artificial Sequence
  Description of Artificial Sequence: Synthetic peptide
  Seed: DPRMCSLMQGSTLPRR
DPRMYSLLQGSTPPRR

SEQ ID NO: 63020 - protein, 16 aa, Artificial Sequence
  Description of Artificial Sequence: Synthetic peptide
  Seed: DPRMCSLMQGSTLPRR
DPRMYSLLQGSTSPRR

SEQ ID NO: 63021 - protein, 16 aa, Artificial Sequence
  Description of Artificial Sequence: Synthetic peptide
  Seed: DPRMCSLMQGSTLPRR
DPRMYSLLQGSTTPRR

SEQ ID NO: 63022 - protein, 16 aa, Artificial Sequence
  Description of Artificial Sequence: Synthetic peptide
  Seed: DPRMCSLMQGSTLPRR
DPRMYSLLQGSTVPRR

SEQ ID NO: 63023 - protein, 16 aa, Artificial Sequence
  Description of Artificial Sequence: Synthetic peptide
  Seed: DPRMCSLMQGSTLPRR
DPRMYSLLQISTAPRR

SEQ ID NO: 63024 - protein, 16 aa, Artificial Sequence
  Description of Artificial Sequence: Synthetic peptide
  Seed: DPRMCSLMQGSTLPRR
DPRMYSLLQISTGPRR

SEQ ID NO: 63025 - protein, 16 aa, Artificial Sequence
  Description of Artificial Sequence: Synthetic peptide
  Seed: DPRMCSLMQGSTLPRR
DPRMYSLLQISTHPRR

SEQ ID NO: 63026 - protein, 16 aa, Artificial Sequence
  Description of Artificial Sequence: Synthetic peptide
  Seed: DPRMCSLMQGSTLPRR
DPRMYSLLQISTIPRR

SEQ ID NO: 63027 - protein, 16 aa, Artificial Sequence
  Description of Artificial Sequence: Synthetic peptide
  Seed: DPRMCSLMQGSTLPRR
DPRMYSLLQISTLPRR

SEQ ID NO: 63028 - protein, 16 aa, Artificial Sequence
  Description of Artificial Sequence: Synthetic peptide
  Seed: DPRMCSLMQGSTLPRR
DPRMYSLLQISTMPRR

SEQ ID NO: 63029 - protein, 16 aa, Artificial Sequence
  Description of Artificial Sequence: Synthetic peptide
  Seed: DPRMCSLMQGSTLPRR
DPRMYSLLQISTNPRR

SEQ ID NO: 63030 - protein, 16 aa, Artificial Sequence
  Description of Artificial Sequence: Synthetic peptide
  Seed: DPRMCSLMQGSTLPRR
DPRMYSLLQISTSPRR

SEQ ID NO: 63031 - protein, 16 aa, Artificial Sequence
  Description of Artificial Sequence: Synthetic peptide
  Seed: DPRMCSLMQGSTLPRR
DPRMYSLLQISTTPRR

SEQ ID NO: 63032 - protein, 16 aa, Artificial Sequence
  Description of Artificial Sequence: Synthetic peptide
  Seed: DPRMCSLMQGSTLPRR
DPRMYSLLQISTVPRR

SEQ ID NO: 63033 - protein, 16 aa, Artificial Sequence
  Description of Artificial Sequence: Synthetic peptide
  Seed: DPRMCSLMQGSTLPRR
DPRMYSLLQLSTAPRR

SEQ ID NO: 63034 - protein, 16 aa, Artificial Sequence
  Description of Artificial Sequence: Synthetic peptide
  Seed: DPRMCSLMQGSTLPRR
DPRMYSLLQLSTNPRR

SEQ ID NO: 63035 - protein, 16 aa, Artificial Sequence
  Description of Artificial Sequence: Synthetic peptide
  Seed: DPRMCSLMQGSTLPRR
DPRMYSLLQLSTSPRR

SEQ ID NO: 63036 - protein, 16 aa, Artificial Sequence
  Description of Artificial Sequence: Synthetic peptide
  Seed: DPRMCSLMQGSTLPRR
DPRMYSLLQLSTVPRR

SEQ ID NO: 63037 - protein, 16 aa, Artificial Sequence
  Description of Artificial Sequence: Synthetic peptide
  Seed: DPRMCSLMQGSTLPRR
DPRMYSLLQMSTAPRR

SEQ ID NO: 63038 - protein, 16 aa, Artificial Sequence
  Description of Artificial Sequence: Synthetic peptide
  Seed: DPRMCSLMQGSTLPRR
DPRMYSLLQMSTSPRR

SEQ ID NO: 63039 - protein, 16 aa, Artificial Sequence
  Description of Artificial Sequence: Synthetic peptide
  Seed: DPRMCSLMQGSTLPRR
DPRMYSLLQNSTAPRR

SEQ ID NO: 63040 - protein, 16 aa, Artificial Sequence
  Description of Artificial Sequence: Synthetic peptide
  Seed: DPRMCSLMQGSTLPRR
DPRMYSLLQNSTIPRR

SEQ ID NO: 63041 - protein, 16 aa, Artificial Sequence
  Description of Artificial Sequence: Synthetic peptide
  Seed: DPRMCSLMQGSTLPRR
DPRMYSLLQNSTLPRR

SEQ ID NO: 63042 - protein, 16 aa, Artificial Sequence
  Description of Artificial Sequence: Synthetic peptide
  Seed: DPRMCSLMQGSTLPRR
DPRMYSLLQNSTMPRR

SEQ ID NO: 63043 - protein, 16 aa, Artificial Sequence
  Description of Artificial Sequence: Synthetic peptide
  Seed: DPRMCSLMQGSTLPRR
DPRMYSLLQNSTNPRR

SEQ ID NO: 63044 - protein, 16 aa, Artificial Sequence
  Description of Artificial Sequence: Synthetic peptide
  Seed: DPRMCSLMQGSTLPRR
DPRMYSLLQNSTSPRR

SEQ ID NO: 63045 - protein, 16 aa, Artificial Sequence
  Description of Artificial Sequence: Synthetic peptide
  Seed: DPRMCSLMQGSTLPRR
DPRMYSLLQNSTTPRR

SEQ ID NO: 63046 - protein, 16 aa, Artificial Sequence
  Description of Artificial Sequence: Synthetic peptide
  Seed: DPRMCSLMQGSTLPRR
DPRMYSLLQNSTVPRR

SEQ ID NO: 63047 - protein, 16 aa, Artificial Sequence
  Description of Artificial Sequence: Synthetic peptide
  Seed: DPRMCSLMQGSTLPRR
DPRMYSLLQPSTAPRR

SEQ ID NO: 63048 - protein, 16 aa, Artificial Sequence
  Description of Artificial Sequence: Synthetic peptide
  Seed: DPRMCSLMQGSTLPRR
DPRMYSLLQPSTFPRR

SEQ ID NO: 63049 - protein, 16 aa, Artificial Sequence
  Description of Artificial Sequence: Synthetic peptide
  Seed: DPRMCSLMQGSTLPRR
DPRMYSLLQPSTGPRR

SEQ ID NO: 63050 - protein, 16 aa, Artificial Sequence
  Description of Artificial Sequence: Synthetic peptide
  Seed: DPRMCSLMQGSTLPRR
DPRMYSLLQPSTHPRR

SEQ ID NO: 63051 - protein, 16 aa, Artificial Sequence
  Description of Artificial Sequence: Synthetic peptide
  Seed: DPRMCSLMQGSTLPRR
DPRMYSLLQPSTIPRR

SEQ ID NO: 63052 - protein, 16 aa, Artificial Sequence
  Description of Artificial Sequence: Synthetic peptide
  Seed: DPRMCSLMQGSTLPRR
DPRMYSLLQPSTLPRR

SEQ ID NO: 63053 - protein, 16 aa, Artificial Sequence
  Description of Artificial Sequence: Synthetic peptide
  Seed: DPRMCSLMQGSTLPRR
DPRMYSLLQPSTMPRR

SEQ ID NO: 63054 - protein, 16 aa, Artificial Sequence
  Description of Artificial Sequence: Synthetic peptide
  Seed: DPRMCSLMQGSTLPRR
DPRMYSLLQPSTNPRR

SEQ ID NO: 63055 - protein, 16 aa, Artificial Sequence
  Description of Artificial Sequence: Synthetic peptide
  Seed: DPRMCSLMQGSTLPRR
DPRMYSLLQPSTPPRR

SEQ ID NO: 63056 - protein, 16 aa, Artificial Sequence
  Description of Artificial Sequence: Synthetic peptide
  Seed: DPRMCSLMQGSTLPRR
DPRMYSLLQPSTQPRR

SEQ ID NO: 63057 - protein, 16 aa, Artificial Sequence
  Description of Artificial Sequence: Synthetic peptide
  Seed: DPRMCSLMQGSTLPRR
DPRMYSLLQPSTSPRR

SEQ ID NO: 63058 - protein, 16 aa, Artificial Sequence
  Description of Artificial Sequence: Synthetic peptide
  Seed: DPRMCSLMQGSTLPRR
DPRMYSLLQPSTTPRR

SEQ ID NO: 63059 - protein, 16 aa, Artificial Sequence
  Description of Artificial Sequence: Synthetic peptide
  Seed: DPRMCSLMQGSTLPRR
DPRMYSLLQPSTVPRR

SEQ ID NO: 63060 - protein, 16 aa, Artificial Sequence
  Description of Artificial Sequence: Synthetic peptide
  Seed: DPRMCSLMQGSTLPRR
DPRMYSLLQSSTAPRR

SEQ ID NO: 63061 - protein, 16 aa, Artificial Sequence
  Description of Artificial Sequence: Synthetic peptide
  Seed: DPRMCSLMQGSTLPRR
DPRMYSLLQSSTCPRR

SEQ ID NO: 63062 - protein, 16 aa, Artificial Sequence
  Description of Artificial Sequence: Synthetic peptide
  Seed: DPRMCSLMQGSTLPRR
DPRMYSLLQSSTFPRR

SEQ ID NO: 63063 - protein, 16 aa, Artificial Sequence
  Description of Artificial Sequence: Synthetic peptide
  Seed: DPRMCSLMQGSTLPRR
DPRMYSLLQSSTGPRR

SEQ ID NO: 63064 - protein, 16 aa, Artificial Sequence
  Description of Artificial Sequence: Synthetic peptide
  Seed: DPRMCSLMQGSTLPRR
DPRMYSLLQSSTHPRR

SEQ ID NO: 63065 - protein, 16 aa, Artificial Sequence
  Description of Artificial Sequence: Synthetic peptide
  Seed: DPRMCSLMQGSTLPRR
DPRMYSLLQSSTIPRR

SEQ ID NO: 63066 - protein, 16 aa, Artificial Sequence
  Description of Artificial Sequence: Synthetic peptide
  Seed: DPRMCSLMQGSTLPRR
DPRMYSLLQSSTLPRR

SEQ ID NO: 63067 - protein, 16 aa, Artificial Sequence
  Description of Artificial Sequence: Synthetic peptide
  Seed: DPRMCSLMQGSTLPRR
DPRMYSLLQSSTMPRR

SEQ ID NO: 63068 - protein, 16 aa, Artificial Sequence
  Description of Artificial Sequence: Synthetic peptide
  Seed: DPRMCSLMQGSTLPRR
DPRMYSLLQSSTNPRR

SEQ ID NO: 63069 - protein, 16 aa, Artificial Sequence
  Description of Artificial Sequence: Synthetic peptide
  Seed: DPRMCSLMQGSTLPRR
DPRMYSLLQSSTSPRR

SEQ ID NO: 63070 - protein, 16 aa, Artificial Sequence
  Description of Artificial Sequence: Synthetic peptide
  Seed: DPRMCSLMQGSTLPRR
DPRMYSLLQSSTTPRR

SEQ ID NO: 63071 - protein, 16 aa, Artificial Sequence
  Description of Artificial Sequence: Synthetic peptide
  Seed: DPRMCSLMQGSTLPRR
DPRMYSLLQSSTVPRR

SEQ ID NO: 63072 - protein, 16 aa, Artificial Sequence
  Description of Artificial Sequence: Synthetic peptide
  Seed: DPRMCSLMQGSTLPRR
DPRMYSLLQTSTAPRR

SEQ ID NO: 63073 - protein, 16 aa, Artificial Sequence
  Description of Artificial Sequence: Synthetic peptide
  Seed: DPRMCSLMQGSTLPRR
DPRMYSLLQTSTHPRR

SEQ ID NO: 63074 - protein, 16 aa, Artificial Sequence
  Description of Artificial Sequence: Synthetic peptide
  Seed: DPRMCSLMQGSTLPRR
DPRMYSLLQTSTIPRR

SEQ ID NO: 63075 - protein, 16 aa, Artificial Sequence
  Description of Artificial Sequence: Synthetic peptide
  Seed: DPRMCSLMQGSTLPRR
DPRMYSLLQTSTLPRR

SEQ ID NO: 63076 - protein, 16 aa, Artificial Sequence
  Description of Artificial Sequence: Synthetic peptide
  Seed: DPRMCSLMQGSTLPRR
DPRMYSLLQTSTMPRR

SEQ ID NO: 63077 - protein, 16 aa, Artificial Sequence
  Description of Artificial Sequence: Synthetic peptide
  Seed: DPRMCSLMQGSTLPRR
DPRMYSLLQTSTNPRR

SEQ ID NO: 63078 - protein, 16 aa, Artificial Sequence
  Description of Artificial Sequence: Synthetic peptide
  Seed: DPRMCSLMQGSTLPRR
DPRMYSLLQTSTSPRR

SEQ ID NO: 63079 - protein, 16 aa, Artificial Sequence
  Description of Artificial Sequence: Synthetic peptide
  Seed: DPRMCSLMQGSTLPRR
DPRMYSLLQTSTTPRR

SEQ ID NO: 63080 - protein, 16 aa, Artificial Sequence
  Description of Artificial Sequence: Synthetic peptide
  Seed: DPRMCSLMQGSTLPRR
DPRMYSLLQTSTVPRR

SEQ ID NO: 63081 - protein, 16 aa, Artificial Sequence
  Description of Artificial Sequence: Synthetic peptide
  Seed: DPRMCSLMQGSTLPRR
DPRMYSLLQVSTAPRR

SEQ ID NO: 63082 - protein, 16 aa, Artificial Sequence
  Description of Artificial Sequence: Synthetic peptide
  Seed: DPRMCSLMQGSTLPRR
DPRMYSLLQVSTGPRR

SEQ ID NO: 63083 - protein, 16 aa, Artificial Sequence
  Description of Artificial Sequence: Synthetic peptide
  Seed: DPRMCSLMQGSTLPRR
DPRMYSLLQVSTHPRR

SEQ ID NO: 63084 - protein, 16 aa, Artificial Sequence
  Description of Artificial Sequence: Synthetic peptide
  Seed: DPRMCSLMQGSTLPRR
DPRMYSLLQVSTIPRR

SEQ ID NO: 63085 - protein, 16 aa, Artificial Sequence
  Description of Artificial Sequence: Synthetic peptide
  Seed: DPRMCSLMQGSTLPRR
DPRMYSLLQVSTLPRR

SEQ ID NO: 63086 - protein, 16 aa, Artificial Sequence
  Description of Artificial Sequence: Synthetic peptide
  Seed: DPRMCSLMQGSTLPRR
DPRMYSLLQVSTMPRR

SEQ ID NO: 63087 - protein, 16 aa, Artificial Sequence
  Description of Artificial Sequence: Synthetic peptide
  Seed: DPRMCSLMQGSTLPRR
DPRMYSLLQVSTNPRR

SEQ ID NO: 63088 - protein, 16 aa, Artificial Sequence
  Description of Artificial Sequence: Synthetic peptide
  Seed: DPRMCSLMQGSTLPRR
DPRMYSLLQVSTPPRR

SEQ ID NO: 63089 - protein, 16 aa, Artificial Sequence
  Description of Artificial Sequence: Synthetic peptide
  Seed: DPRMCSLMQGSTLPRR
DPRMYSLLQVSTQPRR

SEQ ID NO: 63090 - protein, 16 aa, Artificial Sequence
  Description of Artificial Sequence: Synthetic peptide
  Seed: DPRMCSLMQGSTLPRR
DPRMYSLLQVSTSPRR

SEQ ID NO: 63091 - protein, 16 aa, Artificial Sequence
  Description of Artificial Sequence: Synthetic peptide
  Seed: DPRMCSLMQGSTLPRR
DPRMYSLLQVSTTPRR

SEQ ID NO: 63092 - protein, 16 aa, Artificial Sequence
  Description of Artificial Sequence: Synthetic peptide
  Seed: DPRMCSLMQGSTLPRR
DPRMYSLLQVSTVPRR

SEQ ID NO: 63093 - protein, 16 aa, Artificial Sequence
  Description of Artificial Sequence: Synthetic peptide
  Seed: DPRMCSLMQGSTLPRR
DPRMYSLMQASTAPRR

SEQ ID NO: 63094 - protein, 16 aa, Artificial Sequence
  Description of Artificial Sequence: Synthetic peptide
  Seed: DPRMCSLMQGSTLPRR
DPRMYSLMQASTCPRR

SEQ ID NO: 63095 - protein, 16 aa, Artificial Sequence
  Description of Artificial Sequence: Synthetic peptide
  Seed: DPRMCSLMQGSTLPRR
DPRMYSLMQASTFPRR

SEQ ID NO: 63096 - protein, 16 aa, Artificial Sequence
  Description of Artificial Sequence: Synthetic peptide
  Seed: DPRMCSLMQGSTLPRR
DPRMYSLMQASTGPRR

SEQ ID NO: 63097 - protein, 16 aa, Artificial Sequence
  Description of Artificial Sequence: Synthetic peptide
  Seed: DPRMCSLMQGSTLPRR
DPRMYSLMQASTHPRR

SEQ ID NO: 63098 - protein, 16 aa, Artificial Sequence
  Description of Artificial Sequence: Synthetic peptide
  Seed: DPRMCSLMQGSTLPRR
DPRMYSLMQASTIPRR

SEQ ID NO: 63099 - protein, 16 aa, Artificial Sequence
  Description of Artificial Sequence: Synthetic peptide
  Seed: DPRMCSLMQGSTLPRR
DPRMYSLMQASTLPRR

SEQ ID NO: 63100 - protein, 16 aa, Artificial Sequence
  Description of Artificial Sequence: Synthetic peptide
  Seed: DPRMCSLMQGSTLPRR
DPRMYSLMQASTMPRR

SEQ ID NO: 63101 - protein, 16 aa, Artificial Sequence
  Description of Artificial Sequence: Synthetic peptide
  Seed: DPRMCSLMQGSTLPRR
DPRMYSLMQASTNPRR

SEQ ID NO: 63102 - protein, 16 aa, Artificial Sequence
  Description of Artificial Sequence: Synthetic peptide
  Seed: DPRMCSLMQGSTLPRR
DPRMYSLMQASTPPRR

SEQ ID NO: 63103 - protein, 16 aa, Artificial Sequence
  Description of Artificial Sequence: Synthetic peptide
  Seed: DPRMCSLMQGSTLPRR
DPRMYSLMQASTQPRR

SEQ ID NO: 63104 - protein, 16 aa, Artificial Sequence
  Description of Artificial Sequence: Synthetic peptide
  Seed: DPRMCSLMQGSTLPRR
DPRMYSLMQASTSPRR

SEQ ID NO: 63105 - protein, 16 aa, Artificial Sequence
  Description of Artificial Sequence: Synthetic peptide
  Seed: DPRMCSLMQGSTLPRR
DPRMYSLMQASTTPRR

SEQ ID NO: 63106 - protein, 16 aa, Artificial Sequence
  Description of Artificial Sequence: Synthetic peptide
  Seed: DPRMCSLMQGSTLPRR
DPRMYSLMQASTVPRR

SEQ ID NO: 63107 - protein, 16 aa, Artificial Sequence
  Description of Artificial Sequence: Synthetic peptide
  Seed: DPRMCSLMQGSTLPRR
DPRMYSLMQGSTAPRR

SEQ ID NO: 63108 - protein, 16 aa, Artificial Sequence
  Description of Artificial Sequence: Synthetic peptide
  Seed: DPRMCSLMQGSTLPRR
DPRMYSLMQGSTCPRR

SEQ ID NO: 63109 - protein, 16 aa, Artificial Sequence
  Description of Artificial Sequence: Synthetic peptide
  Seed: DPRMCSLMQGSTLPRR
DPRMYSLMQGSTFPRR

SEQ ID NO: 63110 - protein, 16 aa, Artificial Sequence
  Description of Artificial Sequence: Synthetic peptide
  Seed: DPRMCSLMQGSTLPRR
DPRMYSLMQGSTGPRR

SEQ ID NO: 63111 - protein, 16 aa, Artificial Sequence
  Description of Artificial Sequence: Synthetic peptide
  Seed: DPRMCSLMQGSTLPRR
DPRMYSLMQGSTIPRR

SEQ ID NO: 63112 - protein, 16 aa, Artificial Sequence
  Description of Artificial Sequence: Synthetic peptide
  Seed: DPRMCSLMQGSTLPRR
DPRMYSLMQGSTLPRR

SEQ ID NO: 63113 - protein, 16 aa, Artificial Sequence
  Description of Artificial Sequence: Synthetic peptide
  Seed: DPRMCSLMQGSTLPRR
DPRMYSLMQGSTMPRR

SEQ ID NO: 63114 - protein, 16 aa, Artificial Sequence
  Description of Artificial Sequence: Synthetic peptide
  Seed: DPRMCSLMQGSTLPRR
DPRMYSLMQGSTNPRR

SEQ ID NO: 63115 - protein, 16 aa, Artificial Sequence
  Description of Artificial Sequence: Synthetic peptide
  Seed: DPRMCSLMQGSTLPRR
DPRMYSLMQGSTSPRR

SEQ ID NO: 63116 - protein, 16 aa, Artificial Sequence
  Description of Artificial Sequence: Synthetic peptide
  Seed: DPRMCSLMQGSTLPRR
DPRMYSLMQGSTTPRR

SEQ ID NO: 63117 - protein, 16 aa, Artificial Sequence
  Description of Artificial Sequence: Synthetic peptide
  Seed: DPRMCSLMQGSTLPRR
DPRMYSLMQGSTVPRR

SEQ ID NO: 63118 - protein, 16 aa, Artificial Sequence
  Description of Artificial Sequence: Synthetic peptide
  Seed: DPRMCSLMQGSTLPRR
DPRMYSLMQISTAPRR

SEQ ID NO: 63119 - protein, 16 aa, Artificial Sequence
  Description of Artificial Sequence: Synthetic peptide
  Seed: DPRMCSLMQGSTLPRR
DPRMYSLMQISTGPRR

SEQ ID NO: 63120 - protein, 16 aa, Artificial Sequence
  Description of Artificial Sequence: Synthetic peptide
  Seed: DPRMCSLMQGSTLPRR
DPRMYSLMQISTHPRR

SEQ ID NO: 63121 - protein, 16 aa, Artificial Sequence
  Description of Artificial Sequence: Synthetic peptide
  Seed: DPRMCSLMQGSTLPRR
DPRMYSLMQISTIPRR

SEQ ID NO: 63122 - protein, 16 aa, Artificial Sequence
  Description of Artificial Sequence: Synthetic peptide
  Seed: DPRMCSLMQGSTLPRR
DPRMYSLMQISTLPRR

SEQ ID NO: 63123 - protein, 16 aa, Artificial Sequence
  Description of Artificial Sequence: Synthetic peptide
  Seed: DPRMCSLMQGSTLPRR
DPRMYSLMQISTMPRR

SEQ ID NO: 63124 - protein, 16 aa, Artificial Sequence
  Description of Artificial Sequence: Synthetic peptide
  Seed: DPRMCSLMQGSTLPRR
DPRMYSLMQISTNPRR

SEQ ID NO: 63125 - protein, 16 aa, Artificial Sequence
  Description of Artificial Sequence: Synthetic peptide
  Seed: DPRMCSLMQGSTLPRR
DPRMYSLMQISTSPRR

SEQ ID NO: 63126 - protein, 16 aa, Artificial Sequence
  Description of Artificial Sequence: Synthetic peptide
  Seed: DPRMCSLMQGSTLPRR
DPRMYSLMQISTTPRR

SEQ ID NO: 63127 - protein, 16 aa, Artificial Sequence
  Description of Artificial Sequence: Synthetic peptide
  Seed: DPRMCSLMQGSTLPRR
DPRMYSLMQISTVPRR

SEQ ID NO: 63128 - protein, 16 aa, Artificial Sequence
  Description of Artificial Sequence: Synthetic peptide
  Seed: DPRMCSLMQGSTLPRR
DPRMYSLMQLSTAPRR

SEQ ID NO: 63129 - protein, 16 aa, Artificial Sequence
  Description of Artificial Sequence: Synthetic peptide
  Seed: DPRMCSLMQGSTLPRR
DPRMYSLMQLSTLPRR

SEQ ID NO: 63130 - protein, 16 aa, Artificial Sequence
  Description of Artificial Sequence: Synthetic peptide
  Seed: DPRMCSLMQGSTLPRR
DPRMYSLMQLSTNPRR

SEQ ID NO: 63131 - protein, 16 aa, Artificial Sequence
  Description of Artificial Sequence: Synthetic peptide
  Seed: DPRMCSLMQGSTLPRR
DPRMYSLMQLSTSPRR

SEQ ID NO: 63132 - protein, 16 aa, Artificial Sequence
  Description of Artificial Sequence: Synthetic peptide
  Seed: DPRMCSLMQGSTLPRR
DPRMYSLMQLSTTPRR

SEQ ID NO: 63133 - protein, 16 aa, Artificial Sequence
  Description of Artificial Sequence: Synthetic peptide
  Seed: DPRMCSLMQGSTLPRR
DPRMYSLMQLSTVPRR

SEQ ID NO: 63134 - protein, 16 aa, Artificial Sequence
  Description of Artificial Sequence: Synthetic peptide
  Seed: DPRMCSLMQGSTLPRR
DPRMYSLMQMSTAPRR

SEQ ID NO: 63135 - protein, 16 aa, Artificial Sequence
  Description of Artificial Sequence: Synthetic peptide
  Seed: DPRMCSLMQGSTLPRR
DPRMYSLMQMSTLPRR

SEQ ID NO: 63136 - protein, 16 aa, Artificial Sequence
  Description of Artificial Sequence: Synthetic peptide
  Seed: DPRMCSLMQGSTLPRR
DPRMYSLMQMSTSPRR

SEQ ID NO: 63137 - protein, 16 aa, Artificial Sequence
  Description of Artificial Sequence: Synthetic peptide
  Seed: DPRMCSLMQGSTLPRR
DPRMYSLMQMSTVPRR

SEQ ID NO: 63138 - protein, 16 aa, Artificial Sequence
  Description of Artificial Sequence: Synthetic peptide
  Seed: DPRMCSLMQGSTLPRR
DPRMYSLMQNSTAPRR

SEQ ID NO: 63139 - protein, 16 aa, Artificial Sequence
  Description of Artificial Sequence: Synthetic peptide
  Seed: DPRMCSLMQGSTLPRR
DPRMYSLMQNSTIPRR

SEQ ID NO: 63140 - protein, 16 aa, Artificial Sequence
  Description of Artificial Sequence: Synthetic peptide
  Seed: DPRMCSLMQGSTLPRR
DPRMYSLMQNSTLPRR

SEQ ID NO: 63141 - protein, 16 aa, Artificial Sequence
  Description of Artificial Sequence: Synthetic peptide
  Seed: DPRMCSLMQGSTLPRR
DPRMYSLMQNSTMPRR

SEQ ID NO: 63142 - protein, 16 aa, Artificial Sequence
  Description of Artificial Sequence: Synthetic peptide
  Seed: DPRMCSLMQGSTLPRR
DPRMYSLMQNSTNPRR

SEQ ID NO: 63143 - protein, 16 aa, Artificial Sequence
  Description of Artificial Sequence: Synthetic peptide
  Seed: DPRMCSLMQGSTLPRR
DPRMYSLMQNSTSPRR

SEQ ID NO: 63144 - protein, 16 aa, Artificial Sequence
  Description of Artificial Sequence: Synthetic peptide
  Seed: DPRMCSLMQGSTLPRR
DPRMYSLMQNSTTPRR

SEQ ID NO: 63145 - protein, 16 aa, Artificial Sequence
  Description of Artificial Sequence: Synthetic peptide
  Seed: DPRMCSLMQGSTLPRR
DPRMYSLMQNSTVPRR

SEQ ID NO: 63146 - protein, 16 aa, Artificial Sequence
  Description of Artificial Sequence: Synthetic peptide
  Seed: DPRMCSLMQGSTLPRR
DPRMYSLMQPSTAPRR

SEQ ID NO: 63147 - protein, 16 aa, Artificial Sequence
  Description of Artificial Sequence: Synthetic peptide
  Seed: DPRMCSLMQGSTLPRR
DPRMYSLMQPSTFPRR

SEQ ID NO: 63148 - protein, 16 aa, Artificial Sequence
  Description of Artificial Sequence: Synthetic peptide
  Seed: DPRMCSLMQGSTLPRR
DPRMYSLMQPSTGPRR

SEQ ID NO: 63149 - protein, 16 aa, Artificial Sequence
  Description of Artificial Sequence: Synthetic peptide
  Seed: DPRMCSLMQGSTLPRR
DPRMYSLMQPSTHPRR

SEQ ID NO: 63150 - protein, 16 aa, Artificial Sequence
  Description of Artificial Sequence: Synthetic peptide
  Seed: DPRMCSLMQGSTLPRR
DPRMYSLMQPSTIPRR

SEQ ID NO: 63151 - protein, 16 aa, Artificial Sequence
  Description of Artificial Sequence: Synthetic peptide
  Seed: DPRMCSLMQGSTLPRR
DPRMYSLMQPSTLPRR

SEQ ID NO: 63152 - protein, 16 aa, Artificial Sequence
  Description of Artificial Sequence: Synthetic peptide
  Seed: DPRMCSLMQGSTLPRR
DPRMYSLMQPSTMPRR

SEQ ID NO: 63153 - protein, 16 aa, Artificial Sequence
  Description of Artificial Sequence: Synthetic peptide
  Seed: DPRMCSLMQGSTLPRR
DPRMYSLMQPSTNPRR

SEQ ID NO: 63154 - protein, 16 aa, Artificial Sequence
  Description of Artificial Sequence: Synthetic peptide
  Seed: DPRMCSLMQGSTLPRR
DPRMYSLMQPSTPPRR

SEQ ID NO: 63155 - protein, 16 aa, Artificial Sequence
  Description of Artificial Sequence: Synthetic peptide
  Seed: DPRMCSLMQGSTLPRR
DPRMYSLMQPSTQPRR

SEQ ID NO: 63156 - protein, 16 aa, Artificial Sequence
  Description of Artificial Sequence: Synthetic peptide
  Seed: DPRMCSLMQGSTLPRR
DPRMYSLMQPSTSPRR

SEQ ID NO: 63157 - protein, 16 aa, Artificial Sequence
  Description of Artificial Sequence: Synthetic peptide
  Seed: DPRMCSLMQGSTLPRR
DPRMYSLMQPSTTPRR

SEQ ID NO: 63158 - protein, 16 aa, Artificial Sequence
  Description of Artificial Sequence: Synthetic peptide
  Seed: DPRMCSLMQGSTLPRR
DPRMYSLMQPSTVPRR

SEQ ID NO: 63159 - protein, 16 aa, Artificial Sequence
  Description of Artificial Sequence: Synthetic peptide
  Seed: DPRMCSLMQGSTLPRR
DPRMYSLMQSSTAPRR

SEQ ID NO: 63160 - protein, 16 aa, Artificial Sequence
  Description of Artificial Sequence: Synthetic peptide
  Seed: DPRMCSLMQGSTLPRR
DPRMYSLMQSSTCPRR

SEQ ID NO: 63161 - protein, 16 aa, Artificial Sequence
  Description of Artificial Sequence: Synthetic peptide
  Seed: DPRMCSLMQGSTLPRR
DPRMYSLMQSSTFPRR

SEQ ID NO: 63162 - protein, 16 aa, Artificial Sequence
  Description of Artificial Sequence: Synthetic peptide
  Seed: DPRMCSLMQGSTLPRR
DPRMYSLMQSSTGPRR

SEQ ID NO: 63163 - protein, 16 aa, Artificial Sequence
  Description of Artificial Sequence: Synthetic peptide
  Seed: DPRMCSLMQGSTLPRR
DPRMYSLMQSSTHPRR

SEQ ID NO: 63164 - protein, 16 aa, Artificial Sequence
  Description of Artificial Sequence: Synthetic peptide
  Seed: DPRMCSLMQGSTLPRR
DPRMYSLMQSSTIPRR

SEQ ID NO: 63165 - protein, 16 aa, Artificial Sequence
  Description of Artificial Sequence: Synthetic peptide
  Seed: DPRMCSLMQGSTLPRR
DPRMYSLMQSSTLPRR

SEQ ID NO: 63166 - protein, 16 aa, Artificial Sequence
  Description of Artificial Sequence: Synthetic peptide
  Seed: DPRMCSLMQGSTLPRR
DPRMYSLMQSSTMPRR

SEQ ID NO: 63167 - protein, 16 aa, Artificial Sequence
  Description of Artificial Sequence: Synthetic peptide
  Seed: DPRMCSLMQGSTLPRR
DPRMYSLMQSSTNPRR

SEQ ID NO: 63168 - protein, 16 aa, Artificial Sequence
  Description of Artificial Sequence: Synthetic peptide
  Seed: DPRMCSLMQGSTLPRR
DPRMYSLMQSSTSPRR

SEQ ID NO: 63169 - protein, 16 aa, Artificial Sequence
  Description of Artificial Sequence: Synthetic peptide
  Seed: DPRMCSLMQGSTLPRR
DPRMYSLMQSSTTPRR

SEQ ID NO: 63170 - protein, 16 aa, Artificial Sequence
  Description of Artificial Sequence: Synthetic peptide
  Seed: DPRMCSLMQGSTLPRR
DPRMYSLMQSSTVPRR

SEQ ID NO: 63171 - protein, 16 aa, Artificial Sequence
  Description of Artificial Sequence: Synthetic peptide
  Seed: DPRMCSLMQGSTLPRR
DPRMYSLMQTSTAPRR

SEQ ID NO: 63172 - protein, 16 aa, Artificial Sequence
  Description of Artificial Sequence: Synthetic peptide
  Seed: DPRMCSLMQGSTLPRR
DPRMYSLMQTSTHPRR

SEQ ID NO: 63173 - protein, 16 aa, Artificial Sequence
  Description of Artificial Sequence: Synthetic peptide
  Seed: DPRMCSLMQGSTLPRR
DPRMYSLMQTSTIPRR

SEQ ID NO: 63174 - protein, 16 aa, Artificial Sequence
  Description of Artificial Sequence: Synthetic peptide
  Seed: DPRMCSLMQGSTLPRR
DPRMYSLMQTSTLPRR

SEQ ID NO: 63175 - protein, 16 aa, Artificial Sequence
  Description of Artificial Sequence: Synthetic peptide
  Seed: DPRMCSLMQGSTLPRR
DPRMYSLMQTSTMPRR

SEQ ID NO: 63176 - protein, 16 aa, Artificial Sequence
  Description of Artificial Sequence: Synthetic peptide
  Seed: DPRMCSLMQGSTLPRR
DPRMYSLMQTSTNPRR

SEQ ID NO: 63177 - protein, 16 aa, Artificial Sequence
  Description of Artificial Sequence: Synthetic peptide
  Seed: DPRMCSLMQGSTLPRR
DPRMYSLMQTSTSPRR

SEQ ID NO: 63178 - protein, 16 aa, Artificial Sequence
  Description of Artificial Sequence: Synthetic peptide
  Seed: DPRMCSLMQGSTLPRR
DPRMYSLMQTSTTPRR

SEQ ID NO: 63179 - protein, 16 aa, Artificial Sequence
  Description of Artificial Sequence: Synthetic peptide
  Seed: DPRMCSLMQGSTLPRR
DPRMYSLMQTSTVPRR

SEQ ID NO: 63180 - protein, 16 aa, Artificial Sequence
  Description of Artificial Sequence: Synthetic peptide
  Seed: DPRMCSLMQGSTLPRR
DPRMYSLMQVSTAPRR

SEQ ID NO: 63181 - protein, 16 aa, Artificial Sequence
  Description of Artificial Sequence: Synthetic peptide
  Seed: DPRMCSLMQGSTLPRR
DPRMYSLMQVSTGPRR

SEQ ID NO: 63182 - protein, 16 aa, Artificial Sequence
  Description of Artificial Sequence: Synthetic peptide
  Seed: DPRMCSLMQGSTLPRR
DPRMYSLMQVSTHPRR

SEQ ID NO: 63183 - protein, 16 aa, Artificial Sequence
  Description of Artificial Sequence: Synthetic peptide
  Seed: DPRMCSLMQGSTLPRR
DPRMYSLMQVSTIPRR

SEQ ID NO: 63184 - protein, 16 aa, Artificial Sequence
  Description of Artificial Sequence: Synthetic peptide
  Seed: DPRMCSLMQGSTLPRR
DPRMYSLMQVSTLPRR

SEQ ID NO: 63185 - protein, 16 aa, Artificial Sequence
  Description of Artificial Sequence: Synthetic peptide
  Seed: DPRMCSLMQGSTLPRR
DPRMYSLMQVSTMPRR

SEQ ID NO: 63186 - protein, 16 aa, Artificial Sequence
  Description of Artificial Sequence: Synthetic peptide
  Seed: DPRMCSLMQGSTLPRR
DPRMYSLMQVSTNPRR

SEQ ID NO: 63187 - protein, 16 aa, Artificial Sequence
  Description of Artificial Sequence: Synthetic peptide
  Seed: DPRMCSLMQGSTLPRR
DPRMYSLMQVSTPPRR

SEQ ID NO: 63188 - protein, 16 aa, Artificial Sequence
  Description of Artificial Sequence: Synthetic peptide
  Seed: DPRMCSLMQGSTLPRR
DPRMYSLMQVSTQPRR

SEQ ID NO: 63189 - protein, 16 aa, Artificial Sequence
  Description of Artificial Sequence: Synthetic peptide
  Seed: DPRMCSLMQGSTLPRR
DPRMYSLMQVSTSPRR

SEQ ID NO: 63190 - protein, 16 aa, Artificial Sequence
  Description of Artificial Sequence: Synthetic peptide
  Seed: DPRMCSLMQGSTLPRR
DPRMYSLMQVSTTPRR

SEQ ID NO: 63191 - protein, 16 aa, Artificial Sequence
  Description of Artificial Sequence: Synthetic peptide
  Seed: DPRMCSLMQGSTLPRR
DPRMYSLMQVSTVPRR

SEQ ID NO: 63192 - protein, 16 aa, Artificial Sequence
  Description of Artificial Sequence: Synthetic peptide
  Seed: DPRMCSLMQGSTLPRR
DPRMYSLNQASTIPRR

SEQ ID NO: 63193 - protein, 16 aa, Artificial Sequence
  Description of Artificial Sequence: Synthetic peptide
  Seed: DPRMCSLMQGSTLPRR
DPRMYSLNQASTLPRR

SEQ ID NO: 63194 - protein, 16 aa, Artificial Sequence
  Description of Artificial Sequence: Synthetic peptide
  Seed: DPRMCSLMQGSTLPRR
DPRMYSLNQASTVPRR

SEQ ID NO: 63195 - protein, 16 aa, Artificial Sequence
  Description of Artificial Sequence: Synthetic peptide
  Seed: DPRMCSLMQGSTLPRR
DPRMYSLQQASTAPRR

SEQ ID NO: 63196 - protein, 16 aa, Artificial Sequence
  Description of Artificial Sequence: Synthetic peptide
  Seed: DPRMCSLMQGSTLPRR
DPRMYSLQQASTIPRR

SEQ ID NO: 63197 - protein, 16 aa, Artificial Sequence
  Description of Artificial Sequence: Synthetic peptide
  Seed: DPRMCSLMQGSTLPRR
DPRMYSLQQASTLPRR

SEQ ID NO: 63198 - protein, 16 aa, Artificial Sequence
  Description of Artificial Sequence: Synthetic peptide
  Seed: DPRMCSLMQGSTLPRR
DPRMYSLQQASTMPRR

SEQ ID NO: 63199 - protein, 16 aa, Artificial Sequence
  Description of Artificial Sequence: Synthetic peptide
  Seed: DPRMCSLMQGSTLPRR
DPRMYSLQQASTSPRR

SEQ ID NO: 63200 - protein, 16 aa, Artificial Sequence
  Description of Artificial Sequence: Synthetic peptide
  Seed: DPRMCSLMQGSTLPRR
DPRMYSLQQASTTPRR

SEQ ID NO: 63201 - protein, 16 aa, Artificial Sequence
  Description of Artificial Sequence: Synthetic peptide
  Seed: DPRMCSLMQGSTLPRR
DPRMYSLQQASTVPRR

SEQ ID NO: 63202 - protein, 16 aa, Artificial Sequence
  Description of Artificial Sequence: Synthetic peptide
  Seed: DPRMCSLMQGSTLPRR
DPRMYSLQQGSTAPRR

SEQ ID NO: 63203 - protein, 16 aa, Artificial Sequence
  Description of Artificial Sequence: Synthetic peptide
  Seed: DPRMCSLMQGSTLPRR
DPRMYSLQQGSTIPRR

SEQ ID NO: 63204 - protein, 16 aa, Artificial Sequence
  Description of Artificial Sequence: Synthetic peptide
  Seed: DPRMCSLMQGSTLPRR
DPRMYSLQQGSTLPRR

SEQ ID NO: 63205 - protein, 16 aa, Artificial Sequence
  Description of Artificial Sequence: Synthetic peptide
  Seed: DPRMCSLMQGSTLPRR
DPRMYSLQQGSTMPRR

SEQ ID NO: 63206 - protein, 16 aa, Artificial Sequence
  Description of Artificial Sequence: Synthetic peptide
  Seed: DPRMCSLMQGSTLPRR
DPRMYSLQQGSTVPRR

SEQ ID NO: 63207 - protein, 16 aa, Artificial Sequence
  Description of Artificial Sequence: Synthetic peptide
  Seed: DPRMCSLMQGSTLPRR
DPRMYSLQQNSTLPRR

SEQ ID NO: 63208 - protein, 16 aa, Artificial Sequence
  Description of Artificial Sequence: Synthetic peptide
  Seed: DPRMCSLMQGSTLPRR
DPRMYSLQQNSTVPRR

SEQ ID NO: 63209 - protein, 16 aa, Artificial Sequence
  Description of Artificial Sequence: Synthetic peptide
  Seed: DPRMCSLMQGSTLPRR
DPRMYSLQQPSTAPRR

SEQ ID NO: 63210 - protein, 16 aa, Artificial Sequence
  Description of Artificial Sequence: Synthetic peptide
  Seed: DPRMCSLMQGSTLPRR
DPRMYSLQQPSTIPRR

SEQ ID NO: 63211 - protein, 16 aa, Artificial Sequence
  Description of Artificial Sequence: Synthetic peptide
  Seed: DPRMCSLMQGSTLPRR
DPRMYSLQQPSTLPRR

SEQ ID NO: 63212 - protein, 16 aa, Artificial Sequence
  Description of Artificial Sequence: Synthetic peptide
  Seed: DPRMCSLMQGSTLPRR
DPRMYSLQQPSTVPRR

SEQ ID NO: 63213 - protein, 16 aa, Artificial Sequence
  Description of Artificial Sequence: Synthetic peptide
  Seed: DPRMCSLMQGSTLPRR
DPRMYSLQQSSTAPRR

SEQ ID NO: 63214 - protein, 16 aa, Artificial Sequence
  Description of Artificial Sequence: Synthetic peptide
  Seed: DPRMCSLMQGSTLPRR
DPRMYSLQQSSTIPRR

SEQ ID NO: 63215 - protein, 16 aa, Artificial Sequence
  Description of Artificial Sequence: Synthetic peptide
  Seed: DPRMCSLMQGSTLPRR
DPRMYSLQQSSTLPRR

SEQ ID NO: 63216 - protein, 16 aa, Artificial Sequence
  Description of Artificial Sequence: Synthetic peptide
  Seed: DPRMCSLMQGSTLPRR
DPRMYSLQQSSTMPRR

SEQ ID NO: 63217 - protein, 16 aa, Artificial Sequence
  Description of Artificial Sequence: Synthetic peptide
  Seed: DPRMCSLMQGSTLPRR
DPRMYSLQQSSTTPRR

SEQ ID NO: 63218 - protein, 16 aa, Artificial Sequence
  Description of Artificial Sequence: Synthetic peptide
  Seed: DPRMCSLMQGSTLPRR
DPRMYSLQQSSTVPRR

SEQ ID NO: 63219 - protein, 16 aa, Artificial Sequence
  Description of Artificial Sequence: Synthetic peptide
  Seed: DPRMCSLMQGSTLPRR
DPRMYSLQQTSTLPRR

SEQ ID NO: 63220 - protein, 16 aa, Artificial Sequence
  Description of Artificial Sequence: Synthetic peptide
  Seed: DPRMCSLMQGSTLPRR
DPRMYSLQQTSTVPRR

SEQ ID NO: 63221 - protein, 16 aa, Artificial Sequence
  Description of Artificial Sequence: Synthetic peptide
  Seed: DPRMCSLMQGSTLPRR
DPRMYSLQQVSTAPRR

SEQ ID NO: 63222 - protein, 16 aa, Artificial Sequence
  Description of Artificial Sequence: Synthetic peptide
  Seed: DPRMCSLMQGSTLPRR
DPRMYSLSQASTAPRR

SEQ ID NO: 63223 - protein, 16 aa, Artificial Sequence
  Description of Artificial Sequence: Synthetic peptide
  Seed: DPRMCSLMQGSTLPRR
DPRMYSLSQASTIPRR

SEQ ID NO: 63224 - protein, 16 aa, Artificial Sequence
  Description of Artificial Sequence: Synthetic peptide
  Seed: DPRMCSLMQGSTLPRR
DPRMYSLSQASTLPRR

SEQ ID NO: 63225 - protein, 16 aa, Artificial Sequence
  Description of Artificial Sequence: Synthetic peptide
  Seed: DPRMCSLMQGSTLPRR
DPRMYSLSQASTMPRR

SEQ ID NO: 63226 - protein, 16 aa, Artificial Sequence
  Description of Artificial Sequence: Synthetic peptide
  Seed: DPRMCSLMQGSTLPRR
DPRMYSLSQASTVPRR

SEQ ID NO: 63227 - protein, 16 aa, Artificial Sequence
  Description of Artificial Sequence: Synthetic peptide
  Seed: DPRMCSLMQGSTLPRR
DPRMYSLSQGSTIPRR

SEQ ID NO: 63228 - protein, 16 aa, Artificial Sequence
  Description of Artificial Sequence: Synthetic peptide
  Seed: DPRMCSLMQGSTLPRR
DPRMYSLSQGSTLPRR

SEQ ID NO: 63229 - protein, 16 aa, Artificial Sequence
  Description of Artificial Sequence: Synthetic peptide
  Seed: DPRMCSLMQGSTLPRR
DPRMYSLSQGSTVPRR

SEQ ID NO: 63230 - protein, 16 aa, Artificial Sequence
  Description of Artificial Sequence: Synthetic peptide
  Seed: DPRMCSLMQGSTLPRR
DPRMYSLSQPSTLPRR

SEQ ID NO: 63231 - protein, 16 aa, Artificial Sequence
  Description of Artificial Sequence: Synthetic peptide
  Seed: DPRMCSLMQGSTLPRR
DPRMYSLSQSSTIPRR

SEQ ID NO: 63232 - protein, 16 aa, Artificial Sequence
  Description of Artificial Sequence: Synthetic peptide
  Seed: DPRMCSLMQGSTLPRR
DPRMYSLSQSSTLPRR

SEQ ID NO: 63233 - protein, 16 aa, Artificial Sequence
  Description of Artificial Sequence: Synthetic peptide
  Seed: DPRMCSLMQGSTLPRR
DPRMYSLSQSSTVPRR

SEQ ID NO: 63234 - protein, 16 aa, Artificial Sequence
  Description of Artificial Sequence: Synthetic peptide
  Seed: DPRMCSLMQGSTLPRR
DPRMYSLTQASTIPRR

SEQ ID NO: 63235 - protein, 16 aa, Artificial Sequence
  Description of Artificial Sequence: Synthetic peptide
  Seed: DPRMCSLMQGSTLPRR
DPRMYSLTQASTLPRR

SEQ ID NO: 63236 - protein, 16 aa, Artificial Sequence
  Description of Artificial Sequence: Synthetic peptide
  Seed: DPRMCSLMQGSTLPRR
DPRMYSLTQASTVPRR

SEQ ID NO: 63237 - protein, 16 aa, Artificial Sequence
  Description of Artificial Sequence: Synthetic peptide
  Seed: DPRMCSLMQGSTLPRR
DPRMYSLVQASTAPRR

SEQ ID NO: 63238 - protein, 16 aa, Artificial Sequence
  Description of Artificial Sequence: Synthetic peptide
  Seed: DPRMCSLMQGSTLPRR
DPRMYSLVQASTIPRR

SEQ ID NO: 63239 - protein, 16 aa, Artificial Sequence
  Description of Artificial Sequence: Synthetic peptide
  Seed: DPRMCSLMQGSTLPRR
DPRMYSLVQASTLPRR

SEQ ID NO: 63240 - protein, 16 aa, Artificial Sequence
  Description of Artificial Sequence: Synthetic peptide
  Seed: DPRMCSLMQGSTLPRR
DPRMYSLVQASTMPRR

SEQ ID NO: 63241 - protein, 16 aa, Artificial Sequence
  Description of Artificial Sequence: Synthetic peptide
  Seed: DPRMCSLMQGSTLPRR
DPRMYSLVQASTNPRR

SEQ ID NO: 63242 - protein, 16 aa, Artificial Sequence
  Description of Artificial Sequence: Synthetic peptide
  Seed: DPRMCSLMQGSTLPRR
DPRMYSLVQASTSPRR

SEQ ID NO: 63243 - protein, 16 aa, Artificial Sequence
  Description of Artificial Sequence: Synthetic peptide
  Seed: DPRMCSLMQGSTLPRR
DPRMYSLVQASTTPRR

SEQ ID NO: 63244 - protein, 16 aa, Artificial Sequence
  Description of Artificial Sequence: Synthetic peptide
  Seed: DPRMCSLMQGSTLPRR
DPRMYSLVQASTVPRR

SEQ ID NO: 63245 - protein, 16 aa, Artificial Sequence
  Description of Artificial Sequence: Synthetic peptide
  Seed: DPRMCSLMQGSTLPRR
DPRMYSLVQGSTAPRR

SEQ ID NO: 63246 - protein, 16 aa, Artificial Sequence
  Description of Artificial Sequence: Synthetic peptide
  Seed: DPRMCSLMQGSTLPRR
DPRMYSLVQGSTIPRR

SEQ ID NO: 63247 - protein, 16 aa, Artificial Sequence
  Description of Artificial Sequence: Synthetic peptide
  Seed: DPRMCSLMQGSTLPRR
DPRMYSLVQGSTLPRR

SEQ ID NO: 63248 - protein, 16 aa, Artificial Sequence
  Description of Artificial Sequence: Synthetic peptide
  Seed: DPRMCSLMQGSTLPRR
DPRMYSLVQGSTMPRR

SEQ ID NO: 63249 - protein, 16 aa, Artificial Sequence
  Description of Artificial Sequence: Synthetic peptide
  Seed: DPRMCSLMQGSTLPRR
DPRMYSLVQGSTSPRR

SEQ ID NO: 63250 - protein, 16 aa, Artificial Sequence
  Description of Artificial Sequence: Synthetic peptide
  Seed: DPRMCSLMQGSTLPRR
DPRMYSLVQGSTTPRR

SEQ ID NO: 63251 - protein, 16 aa, Artificial Sequence
  Description of Artificial Sequence: Synthetic peptide
  Seed: DPRMCSLMQGSTLPRR
DPRMYSLVQGSTVPRR

SEQ ID NO: 63252 - protein, 16 aa, Artificial Sequence
  Description of Artificial Sequence: Synthetic peptide
  Seed: DPRMCSLMQGSTLPRR
DPRMYSLVQISTAPRR

SEQ ID NO: 63253 - protein, 16 aa, Artificial Sequence
  Description of Artificial Sequence: Synthetic peptide
  Seed: DPRMCSLMQGSTLPRR
DPRMYSLVQISTSPRR

SEQ ID NO: 63254 - protein, 16 aa, Artificial Sequence
  Description of Artificial Sequence: Synthetic peptide
  Seed: DPRMCSLMQGSTLPRR
DPRMYSLVQNSTLPRR

SEQ ID NO: 63255 - protein, 16 aa, Artificial Sequence
  Description of Artificial Sequence: Synthetic peptide
  Seed: DPRMCSLMQGSTLPRR
DPRMYSLVQNSTVPRR

SEQ ID NO: 63256 - protein, 16 aa, Artificial Sequence
  Description of Artificial Sequence: Synthetic peptide
  Seed: DPRMCSLMQGSTLPRR
DPRMYSLVQPSTAPRR

SEQ ID NO: 63257 - protein, 16 aa, Artificial Sequence
  Description of Artificial Sequence: Synthetic peptide
  Seed: DPRMCSLMQGSTLPRR
DPRMYSLVQPSTIPRR

SEQ ID NO: 63258 - protein, 16 aa, Artificial Sequence
  Description of Artificial Sequence: Synthetic peptide
  Seed: DPRMCSLMQGSTLPRR
DPRMYSLVQPSTLPRR

SEQ ID NO: 63259 - protein, 16 aa, Artificial Sequence
  Description of Artificial Sequence: Synthetic peptide
  Seed: DPRMCSLMQGSTLPRR
DPRMYSLVQPSTNPRR

SEQ ID NO: 63260 - protein, 16 aa, Artificial Sequence
  Description of Artificial Sequence: Synthetic peptide
  Seed: DPRMCSLMQGSTLPRR
DPRMYSLVQPSTSPRR

SEQ ID NO: 63261 - protein, 16 aa, Artificial Sequence
  Description of Artificial Sequence: Synthetic peptide
  Seed: DPRMCSLMQGSTLPRR
DPRMYSLVQPSTTPRR

SEQ ID NO: 63262 - protein, 16 aa, Artificial Sequence
  Description of Artificial Sequence: Synthetic peptide
  Seed: DPRMCSLMQGSTLPRR
DPRMYSLVQPSTVPRR

SEQ ID NO: 63263 - protein, 16 aa, Artificial Sequence
  Description of Artificial Sequence: Synthetic peptide
  Seed: DPRMCSLMQGSTLPRR
DPRMYSLVQSSTAPRR

SEQ ID NO: 63264 - protein, 16 aa, Artificial Sequence
  Description of Artificial Sequence: Synthetic peptide
  Seed: DPRMCSLMQGSTLPRR
DPRMYSLVQSSTIPRR

SEQ ID NO: 63265 - protein, 16 aa, Artificial Sequence
  Description of Artificial Sequence: Synthetic peptide
  Seed: DPRMCSLMQGSTLPRR
DPRMYSLVQSSTLPRR

SEQ ID NO: 63266 - protein, 16 aa, Artificial Sequence
  Description of Artificial Sequence: Synthetic peptide
  Seed: DPRMCSLMQGSTLPRR
DPRMYSLVQSSTMPRR

SEQ ID NO: 63267 - protein, 16 aa, Artificial Sequence
  Description of Artificial Sequence: Synthetic peptide
  Seed: DPRMCSLMQGSTLPRR
DPRMYSLVQSSTNPRR

SEQ ID NO: 63268 - protein, 16 aa, Artificial Sequence
  Description of Artificial Sequence: Synthetic peptide
  Seed: DPRMCSLMQGSTLPRR
DPRMYSLVQSSTSPRR

SEQ ID NO: 63269 - protein, 16 aa, Artificial Sequence
  Description of Artificial Sequence: Synthetic peptide
  Seed: DPRMCSLMQGSTLPRR
DPRMYSLVQSSTTPRR

SEQ ID NO: 63270 - protein, 16 aa, Artificial Sequence
  Description of Artificial Sequence: Synthetic peptide
  Seed: DPRMCSLMQGSTLPRR
DPRMYSLVQSSTVPRR

SEQ ID NO: 63271 - protein, 16 aa, Artificial Sequence
  Description of Artificial Sequence: Synthetic peptide
  Seed: DPRMCSLMQGSTLPRR
DPRMYSLVQTSTAPRR

SEQ ID NO: 63272 - protein, 16 aa, Artificial Sequence
  Description of Artificial Sequence: Synthetic peptide
  Seed: DPRMCSLMQGSTLPRR
DPRMYSLVQTSTIPRR

SEQ ID NO: 63273 - protein, 16 aa, Artificial Sequence
  Description of Artificial Sequence: Synthetic peptide
  Seed: DPRMCSLMQGSTLPRR
DPRMYSLVQTSTLPRR

SEQ ID NO: 63274 - protein, 16 aa, Artificial Sequence
  Description of Artificial Sequence: Synthetic peptide
  Seed: DPRMCSLMQGSTLPRR
DPRMYSLVQTSTSPRR

SEQ ID NO: 63275 - protein, 16 aa, Artificial Sequence
  Description of Artificial Sequence: Synthetic peptide
  Seed: DPRMCSLMQGSTLPRR
DPRMYSLVQTSTTPRR

SEQ ID NO: 63276 - protein, 16 aa, Artificial Sequence
  Description of Artificial Sequence: Synthetic peptide
  Seed: DPRMCSLMQGSTLPRR
DPRMYSLVQTSTVPRR

SEQ ID NO: 63277 - protein, 16 aa, Artificial Sequence
  Description of Artificial Sequence: Synthetic peptide
  Seed: DPRMCSLMQGSTLPRR
DPRMYSLVQVSTAPRR

SEQ ID NO: 63278 - protein, 16 aa, Artificial Sequence
  Description of Artificial Sequence: Synthetic peptide
  Seed: DPRMCSLMQGSTLPRR
DPRMYSLVQVSTNPRR

SEQ ID NO: 63279 - protein, 16 aa, Artificial Sequence
  Description of Artificial Sequence: Synthetic peptide
  Seed: DPRMCSLMQGSTLPRR
DPRMYSLVQVSTSPRR

SEQ ID NO: 63280 - protein, 16 aa, Artificial Sequence
  Description of Artificial Sequence: Synthetic peptide
  Seed: DPRMCSLMQGSTLPRR
DPRMYSLVQVSTTPRR

SEQ ID NO: 63281 - protein, 16 aa, Artificial Sequence
  Description of Artificial Sequence: Synthetic peptide
  Seed: DPRMCSLMQGSTLPRR
DPRMYSLVQVSTVPRR

SEQ ID NO: 63282 - protein, 17 aa, Artificial Sequence
  Description of Artificial Sequence: Synthetic peptide
  Seed: DPRMCSLMQGSTLPRRS
DPRMCSLLQASTVPRRS

SEQ ID NO: 63283 - protein, 17 aa, Artificial Sequence
  Description of Artificial Sequence: Synthetic peptide
  Seed: DPRMCSLMQGSTLPRRS
DPRMFSLAQASTAPRRS

SEQ ID NO: 63284 - protein, 17 aa, Artificial Sequence
  Description of Artificial Sequence: Synthetic peptide
  Seed: DPRMCSLMQGSTLPRRS
DPRMFSLAQASTCPRRS

SEQ ID NO: 63285 - protein, 17 aa, Artificial Sequence
  Description of Artificial Sequence: Synthetic peptide
  Seed: DPRMCSLMQGSTLPRRS
DPRMFSLAQASTEPRRS

SEQ ID NO: 63286 - protein, 17 aa, Artificial Sequence
  Description of Artificial Sequence: Synthetic peptide
  Seed: DPRMCSLMQGSTLPRRS
DPRMFSLAQASTFPRRS

SEQ ID NO: 63287 - protein, 17 aa, Artificial Sequence
  Description of Artificial Sequence: Synthetic peptide
  Seed: DPRMCSLMQGSTLPRRS
DPRMFSLAQASTGPRRS

SEQ ID NO: 63288 - protein, 17 aa, Artificial Sequence
  Description of Artificial Sequence: Synthetic peptide
  Seed: DPRMCSLMQGSTLPRRS
DPRMFSLAQASTHPRRS

SEQ ID NO: 63289 - protein, 17 aa, Artificial Sequence
  Description of Artificial Sequence: Synthetic peptide
  Seed: DPRMCSLMQGSTLPRRS
DPRMFSLAQASTIPRRS

SEQ ID NO: 63290 - protein, 17 aa, Artificial Sequence
  Description of Artificial Sequence: Synthetic peptide
  Seed: DPRMCSLMQGSTLPRRS
DPRMFSLAQASTLPRRS

SEQ ID NO: 63291 - protein, 17 aa, Artificial Sequence
  Description of Artificial Sequence: Synthetic peptide
  Seed: DPRMCSLMQGSTLPRRS
DPRMFSLAQASTMPRRS

SEQ ID NO: 63292 - protein, 17 aa, Artificial Sequence
  Description of Artificial Sequence: Synthetic peptide
  Seed: DPRMCSLMQGSTLPRRS
DPRMFSLAQASTNPRRS

SEQ ID NO: 63293 - protein, 17 aa, Artificial Sequence
  Description of Artificial Sequence: Synthetic peptide
  Seed: DPRMCSLMQGSTLPRRS
DPRMFSLAQASTPPRRS

SEQ ID NO: 63294 - protein, 17 aa, Artificial Sequence
  Description of Artificial Sequence: Synthetic peptide
  Seed: DPRMCSLMQGSTLPRRS
DPRMFSLAQASTQPRRS

SEQ ID NO: 63295 - protein, 17 aa, Artificial Sequence
  Description of Artificial Sequence: Synthetic peptide
  Seed: DPRMCSLMQGSTLPRRS
DPRMFSLAQASTSPRRS

SEQ ID NO: 63296 - protein, 17 aa, Artificial Sequence
  Description of Artificial Sequence: Synthetic peptide
  Seed: DPRMCSLMQGSTLPRRS
DPRMFSLAQASTTPRRS

SEQ ID NO: 63297 - protein, 17 aa, Artificial Sequence
  Description of Artificial Sequence: Synthetic peptide
  Seed: DPRMCSLMQGSTLPRRS
DPRMFSLAQASTVPRRS

SEQ ID NO: 63298 - protein, 17 aa, Artificial Sequence
  Description of Artificial Sequence: Synthetic peptide
  Seed: DPRMCSLMQGSTLPRRS
DPRMFSLAQASTWPRRS

SEQ ID NO: 63299 - protein, 17 aa, Artificial Sequence
  Description of Artificial Sequence: Synthetic peptide
  Seed: DPRMCSLMQGSTLPRRS
DPRMFSLAQASTYPRRS

SEQ ID NO: 63300 - protein, 17 aa, Artificial Sequence
  Description of Artificial Sequence: Synthetic peptide
  Seed: DPRMCSLMQGSTLPRRS
DPRMFSLAQGSTAPRRS

SEQ ID NO: 63301 - protein, 17 aa, Artificial Sequence
  Description of Artificial Sequence: Synthetic peptide
  Seed: DPRMCSLMQGSTLPRRS
DPRMFSLAQGSTFPRRS

SEQ ID NO: 63302 - protein, 17 aa, Artificial Sequence
  Description of Artificial Sequence: Synthetic peptide
  Seed: DPRMCSLMQGSTLPRRS
DPRMFSLAQGSTGPRRS

SEQ ID NO: 63303 - protein, 17 aa, Artificial Sequence
  Description of Artificial Sequence: Synthetic peptide
  Seed: DPRMCSLMQGSTLPRRS
DPRMFSLAQGSTIPRRS

SEQ ID NO: 63304 - protein, 17 aa, Artificial Sequence
  Description of Artificial Sequence: Synthetic peptide
  Seed: DPRMCSLMQGSTLPRRS
DPRMFSLAQGSTLPRRS

SEQ ID NO: 63305 - protein, 17 aa, Artificial Sequence
  Description of Artificial Sequence: Synthetic peptide
  Seed: DPRMCSLMQGSTLPRRS
DPRMFSLAQGSTMPRRS

SEQ ID NO: 63306 - protein, 17 aa, Artificial Sequence
  Description of Artificial Sequence: Synthetic peptide
  Seed: DPRMCSLMQGSTLPRRS
DPRMFSLAQGSTNPRRS

SEQ ID NO: 63307 - protein, 17 aa, Artificial Sequence
  Description of Artificial Sequence: Synthetic peptide
  Seed: DPRMCSLMQGSTLPRRS
DPRMFSLAQGSTSPRRS

SEQ ID NO: 63308 - protein, 17 aa, Artificial Sequence
  Description of Artificial Sequence: Synthetic peptide
  Seed: DPRMCSLMQGSTLPRRS
DPRMFSLAQGSTTPRRS

SEQ ID NO: 63309 - protein, 17 aa, Artificial Sequence
  Description of Artificial Sequence: Synthetic peptide
  Seed: DPRMCSLMQGSTLPRRS
DPRMFSLAQGSTVPRRS

SEQ ID NO: 63310 - protein, 17 aa, Artificial Sequence
  Description of Artificial Sequence: Synthetic peptide
  Seed: DPRMCSLMQGSTLPRRS
DPRMFSLAQISTAPRRS

SEQ ID NO: 63311 - protein, 17 aa, Artificial Sequence
  Description of Artificial Sequence: Synthetic peptide
  Seed: DPRMCSLMQGSTLPRRS
DPRMFSLAQISTGPRRS

SEQ ID NO: 63312 - protein, 17 aa, Artificial Sequence
  Description of Artificial Sequence: Synthetic peptide
  Seed: DPRMCSLMQGSTLPRRS
DPRMFSLAQISTHPRRS

SEQ ID NO: 63313 - protein, 17 aa, Artificial Sequence
  Description of Artificial Sequence: Synthetic peptide
  Seed: DPRMCSLMQGSTLPRRS
DPRMFSLAQISTIPRRS

SEQ ID NO: 63314 - protein, 17 aa, Artificial Sequence
  Description of Artificial Sequence: Synthetic peptide
  Seed: DPRMCSLMQGSTLPRRS
DPRMFSLAQISTLPRRS

SEQ ID NO: 63315 - protein, 17 aa, Artificial Sequence
  Description of Artificial Sequence: Synthetic peptide
  Seed: DPRMCSLMQGSTLPRRS
DPRMFSLAQISTMPRRS

SEQ ID NO: 63316 - protein, 17 aa, Artificial Sequence
  Description of Artificial Sequence: Synthetic peptide
  Seed: DPRMCSLMQGSTLPRRS
DPRMFSLAQISTNPRRS

SEQ ID NO: 63317 - protein, 17 aa, Artificial Sequence
  Description of Artificial Sequence: Synthetic peptide
  Seed: DPRMCSLMQGSTLPRRS
DPRMFSLAQISTQPRRS

SEQ ID NO: 63318 - protein, 17 aa, Artificial Sequence
  Description of Artificial Sequence: Synthetic peptide
  Seed: DPRMCSLMQGSTLPRRS
DPRMFSLAQISTSPRRS

SEQ ID NO: 63319 - protein, 17 aa, Artificial Sequence
  Description of Artificial Sequence: Synthetic peptide
  Seed: DPRMCSLMQGSTLPRRS
DPRMFSLAQISTTPRRS

SEQ ID NO: 63320 - protein, 17 aa, Artificial Sequence
  Description of Artificial Sequence: Synthetic peptide
  Seed: DPRMCSLMQGSTLPRRS
DPRMFSLAQISTVPRRS

SEQ ID NO: 63321 - protein, 17 aa, Artificial Sequence
  Description of Artificial Sequence: Synthetic peptide
  Seed: DPRMCSLMQGSTLPRRS
DPRMFSLAQLSTAPRRS

SEQ ID NO: 63322 - protein, 17 aa, Artificial Sequence
  Description of Artificial Sequence: Synthetic peptide
  Seed: DPRMCSLMQGSTLPRRS
DPRMFSLAQLSTLPRRS

SEQ ID NO: 63323 - protein, 17 aa, Artificial Sequence
  Description of Artificial Sequence: Synthetic peptide
  Seed: DPRMCSLMQGSTLPRRS
DPRMFSLAQLSTNPRRS

SEQ ID NO: 63324 - protein, 17 aa, Artificial Sequence
  Description of Artificial Sequence: Synthetic peptide
  Seed: DPRMCSLMQGSTLPRRS
DPRMFSLAQLSTSPRRS

SEQ ID NO: 63325 - protein, 17 aa, Artificial Sequence
  Description of Artificial Sequence: Synthetic peptide
  Seed: DPRMCSLMQGSTLPRRS
DPRMFSLAQLSTVPRRS

SEQ ID NO: 63326 - protein, 17 aa, Artificial Sequence
  Description of Artificial Sequence: Synthetic peptide
  Seed: DPRMCSLMQGSTLPRRS
DPRMFSLAQMSTAPRRS

SEQ ID NO: 63327 - protein, 17 aa, Artificial Sequence
  Description of Artificial Sequence: Synthetic peptide
  Seed: DPRMCSLMQGSTLPRRS
DPRMFSLAQMSTNPRRS

SEQ ID NO: 63328 - protein, 17 aa, Artificial Sequence
  Description of Artificial Sequence: Synthetic peptide
  Seed: DPRMCSLMQGSTLPRRS
DPRMFSLAQMSTSPRRS

SEQ ID NO: 63329 - protein, 17 aa, Artificial Sequence
  Description of Artificial Sequence: Synthetic peptide
  Seed: DPRMCSLMQGSTLPRRS
DPRMFSLAQMSTVPRRS

SEQ ID NO: 63330 - protein, 17 aa, Artificial Sequence
  Description of Artificial Sequence: Synthetic peptide
  Seed: DPRMCSLMQGSTLPRRS
DPRMFSLAQNSTAPRRS

SEQ ID NO: 63331 - protein, 17 aa, Artificial Sequence
  Description of Artificial Sequence: Synthetic peptide
  Seed: DPRMCSLMQGSTLPRRS
DPRMFSLAQNSTIPRRS

SEQ ID NO: 63332 - protein, 17 aa, Artificial Sequence
  Description of Artificial Sequence: Synthetic peptide
  Seed: DPRMCSLMQGSTLPRRS
DPRMFSLAQNSTLPRRS

SEQ ID NO: 63333 - protein, 17 aa, Artificial Sequence
  Description of Artificial Sequence: Synthetic peptide
  Seed: DPRMCSLMQGSTLPRRS
DPRMFSLAQNSTMPRRS

SEQ ID NO: 63334 - protein, 17 aa, Artificial Sequence
  Description of Artificial Sequence: Synthetic peptide
  Seed: DPRMCSLMQGSTLPRRS
DPRMFSLAQNSTNPRRS

SEQ ID NO: 63335 - protein, 17 aa, Artificial Sequence
  Description of Artificial Sequence: Synthetic peptide
  Seed: DPRMCSLMQGSTLPRRS
DPRMFSLAQNSTSPRRS

SEQ ID NO: 63336 - protein, 17 aa, Artificial Sequence
  Description of Artificial Sequence: Synthetic peptide
  Seed: DPRMCSLMQGSTLPRRS
DPRMFSLAQNSTTPRRS

SEQ ID NO: 63337 - protein, 17 aa, Artificial Sequence
  Description of Artificial Sequence: Synthetic peptide
  Seed: DPRMCSLMQGSTLPRRS
DPRMFSLAQNSTVPRRS

SEQ ID NO: 63338 - protein, 17 aa, Artificial Sequence
  Description of Artificial Sequence: Synthetic peptide
  Seed: DPRMCSLMQGSTLPRRS
DPRMFSLAQPSTAPRRS

SEQ ID NO: 63339 - protein, 17 aa, Artificial Sequence
  Description of Artificial Sequence: Synthetic peptide
  Seed: DPRMCSLMQGSTLPRRS
DPRMFSLAQPSTGPRRS

SEQ ID NO: 63340 - protein, 17 aa, Artificial Sequence
  Description of Artificial Sequence: Synthetic peptide
  Seed: DPRMCSLMQGSTLPRRS
DPRMFSLAQPSTHPRRS

SEQ ID NO: 63341 - protein, 17 aa, Artificial Sequence
  Description of Artificial Sequence: Synthetic peptide
  Seed: DPRMCSLMQGSTLPRRS
DPRMFSLAQPSTIPRRS

SEQ ID NO: 63342 - protein, 17 aa, Artificial Sequence
  Description of Artificial Sequence: Synthetic peptide
  Seed: DPRMCSLMQGSTLPRRS
DPRMFSLAQPSTLPRRS

SEQ ID NO: 63343 - protein, 17 aa, Artificial Sequence
  Description of Artificial Sequence: Synthetic peptide
  Seed: DPRMCSLMQGSTLPRRS
DPRMFSLAQPSTMPRRS

SEQ ID NO: 63344 - protein, 17 aa, Artificial Sequence
  Description of Artificial Sequence: Synthetic peptide
  Seed: DPRMCSLMQGSTLPRRS
DPRMFSLAQPSTNPRRS

SEQ ID NO: 63345 - protein, 17 aa, Artificial Sequence
  Description of Artificial Sequence: Synthetic peptide
  Seed: DPRMCSLMQGSTLPRRS
DPRMFSLAQPSTQPRRS

SEQ ID NO: 63346 - protein, 17 aa, Artificial Sequence
  Description of Artificial Sequence: Synthetic peptide
  Seed: DPRMCSLMQGSTLPRRS
DPRMFSLAQPSTSPRRS

SEQ ID NO: 63347 - protein, 17 aa, Artificial Sequence
  Description of Artificial Sequence: Synthetic peptide
  Seed: DPRMCSLMQGSTLPRRS
DPRMFSLAQPSTTPRRS

SEQ ID NO: 63348 - protein, 17 aa, Artificial Sequence
  Description of Artificial Sequence: Synthetic peptide
  Seed: DPRMCSLMQGSTLPRRS
DPRMFSLAQPSTVPRRS

SEQ ID NO: 63349 - protein, 17 aa, Artificial Sequence
  Description of Artificial Sequence: Synthetic peptide
  Seed: DPRMCSLMQGSTLPRRS
DPRMFSLAQSSTAPRRS

SEQ ID NO: 63350 - protein, 17 aa, Artificial Sequence
  Description of Artificial Sequence: Synthetic peptide
  Seed: DPRMCSLMQGSTLPRRS
DPRMFSLAQSSTFPRRS

SEQ ID NO: 63351 - protein, 17 aa, Artificial Sequence
  Description of Artificial Sequence: Synthetic peptide
  Seed: DPRMCSLMQGSTLPRRS
DPRMFSLAQSSTGPRRS

SEQ ID NO: 63352 - protein, 17 aa, Artificial Sequence
  Description of Artificial Sequence: Synthetic peptide
  Seed: DPRMCSLMQGSTLPRRS
DPRMFSLAQSSTHPRRS

SEQ ID NO: 63353 - protein, 17 aa, Artificial Sequence
  Description of Artificial Sequence: Synthetic peptide
  Seed: DPRMCSLMQGSTLPRRS
DPRMFSLAQSSTIPRRS

SEQ ID NO: 63354 - protein, 17 aa, Artificial Sequence
  Description of Artificial Sequence: Synthetic peptide
  Seed: DPRMCSLMQGSTLPRRS
DPRMFSLAQSSTLPRRS

SEQ ID NO: 63355 - protein, 17 aa, Artificial Sequence
  Description of Artificial Sequence: Synthetic peptide
  Seed: DPRMCSLMQGSTLPRRS
DPRMFSLAQSSTMPRRS

SEQ ID NO: 63356 - protein, 17 aa, Artificial Sequence
  Description of Artificial Sequence: Synthetic peptide
  Seed: DPRMCSLMQGSTLPRRS
DPRMFSLAQSSTNPRRS

SEQ ID NO: 63357 - protein, 17 aa, Artificial Sequence
  Description of Artificial Sequence: Synthetic peptide
  Seed: DPRMCSLMQGSTLPRRS
DPRMFSLAQSSTQPRRS

SEQ ID NO: 63358 - protein, 17 aa, Artificial Sequence
  Description of Artificial Sequence: Synthetic peptide
  Seed: DPRMCSLMQGSTLPRRS
DPRMFSLAQSSTSPRRS

SEQ ID NO: 63359 - protein, 17 aa, Artificial Sequence
  Description of Artificial Sequence: Synthetic peptide
  Seed: DPRMCSLMQGSTLPRRS
DPRMFSLAQSSTTPRRS

SEQ ID NO: 63360 - protein, 17 aa, Artificial Sequence
  Description of Artificial Sequence: Synthetic peptide
  Seed: DPRMCSLMQGSTLPRRS
DPRMFSLAQSSTVPRRS

SEQ ID NO: 63361 - protein, 17 aa, Artificial Sequence
  Description of Artificial Sequence: Synthetic peptide
  Seed: DPRMCSLMQGSTLPRRS
DPRMFSLAQTSTAPRRS

SEQ ID NO: 63362 - protein, 17 aa, Artificial Sequence
  Description of Artificial Sequence: Synthetic peptide
  Seed: DPRMCSLMQGSTLPRRS
DPRMFSLAQTSTHPRRS

SEQ ID NO: 63363 - protein, 17 aa, Artificial Sequence
  Description of Artificial Sequence: Synthetic peptide
  Seed: DPRMCSLMQGSTLPRRS
DPRMFSLAQTSTIPRRS

SEQ ID NO: 63364 - protein, 17 aa, Artificial Sequence
  Description of Artificial Sequence: Synthetic peptide
  Seed: DPRMCSLMQGSTLPRRS
DPRMFSLAQTSTLPRRS

SEQ ID NO: 63365 - protein, 17 aa, Artificial Sequence
  Description of Artificial Sequence: Synthetic peptide
  Seed: DPRMCSLMQGSTLPRRS
DPRMFSLAQTSTMPRRS

SEQ ID NO: 63366 - protein, 17 aa, Artificial Sequence
  Description of Artificial Sequence: Synthetic peptide
  Seed: DPRMCSLMQGSTLPRRS
DPRMFSLAQTSTNPRRS

SEQ ID NO: 63367 - protein, 17 aa, Artificial Sequence
  Description of Artificial Sequence: Synthetic peptide
  Seed: DPRMCSLMQGSTLPRRS
DPRMFSLAQTSTQPRRS

SEQ ID NO: 63368 - protein, 17 aa, Artificial Sequence
  Description of Artificial Sequence: Synthetic peptide
  Seed: DPRMCSLMQGSTLPRRS
DPRMFSLAQTSTSPRRS

SEQ ID NO: 63369 - protein, 17 aa, Artificial Sequence
  Description of Artificial Sequence: Synthetic peptide
  Seed: DPRMCSLMQGSTLPRRS
DPRMFSLAQTSTTPRRS

SEQ ID NO: 63370 - protein, 17 aa, Artificial Sequence
  Description of Artificial Sequence: Synthetic peptide
  Seed: DPRMCSLMQGSTLPRRS
DPRMFSLAQTSTVPRRS

SEQ ID NO: 63371 - protein, 17 aa, Artificial Sequence
  Description of Artificial Sequence: Synthetic peptide
  Seed: DPRMCSLMQGSTLPRRS
DPRMFSLAQVSTAPRRS

SEQ ID NO: 63372 - protein, 17 aa, Artificial Sequence
  Description of Artificial Sequence: Synthetic peptide
  Seed: DPRMCSLMQGSTLPRRS
DPRMFSLAQVSTGPRRS

SEQ ID NO: 63373 - protein, 17 aa, Artificial Sequence
  Description of Artificial Sequence: Synthetic peptide
  Seed: DPRMCSLMQGSTLPRRS
DPRMFSLAQVSTHPRRS

SEQ ID NO: 63374 - protein, 17 aa, Artificial Sequence
  Description of Artificial Sequence: Synthetic peptide
  Seed: DPRMCSLMQGSTLPRRS
DPRMFSLAQVSTIPRRS

SEQ ID NO: 63375 - protein, 17 aa, Artificial Sequence
  Description of Artificial Sequence: Synthetic peptide
  Seed: DPRMCSLMQGSTLPRRS
DPRMFSLAQVSTLPRRS

SEQ ID NO: 63376 - protein, 17 aa, Artificial Sequence
  Description of Artificial Sequence: Synthetic peptide
  Seed: DPRMCSLMQGSTLPRRS
DPRMFSLAQVSTMPRRS

SEQ ID NO: 63377 - protein, 17 aa, Artificial Sequence
  Description of Artificial Sequence: Synthetic peptide
  Seed: DPRMCSLMQGSTLPRRS
DPRMFSLAQVSTNPRRS

SEQ ID NO: 63378 - protein, 17 aa, Artificial Sequence
  Description of Artificial Sequence: Synthetic peptide
  Seed: DPRMCSLMQGSTLPRRS
DPRMFSLAQVSTQPRRS

SEQ ID NO: 63379 - protein, 17 aa, Artificial Sequence
  Description of Artificial Sequence: Synthetic peptide
  Seed: DPRMCSLMQGSTLPRRS
DPRMFSLAQVSTSPRRS

SEQ ID NO: 63380 - protein, 17 aa, Artificial Sequence
  Description of Artificial Sequence: Synthetic peptide
  Seed: DPRMCSLMQGSTLPRRS
DPRMFSLAQVSTTPRRS

SEQ ID NO: 63381 - protein, 17 aa, Artificial Sequence
  Description of Artificial Sequence: Synthetic peptide
  Seed: DPRMCSLMQGSTLPRRS
DPRMFSLAQVSTVPRRS

SEQ ID NO: 63382 - protein, 17 aa, Artificial Sequence
  Description of Artificial Sequence: Synthetic peptide
  Seed: DPRMCSLMQGSTLPRRS
DPRMFSLCQASTAPRRS

SEQ ID NO: 63383 - protein, 17 aa, Artificial Sequence
  Description of Artificial Sequence: Synthetic peptide
  Seed: DPRMCSLMQGSTLPRRS
DPRMFSLCQASTIPRRS

SEQ ID NO: 63384 - protein, 17 aa, Artificial Sequence
  Description of Artificial Sequence: Synthetic peptide
  Seed: DPRMCSLMQGSTLPRRS
DPRMFSLCQASTLPRRS

SEQ ID NO: 63385 - protein, 17 aa, Artificial Sequence
  Description of Artificial Sequence: Synthetic peptide
  Seed: DPRMCSLMQGSTLPRRS
DPRMFSLCQASTVPRRS

SEQ ID NO: 63386 - protein, 17 aa, Artificial Sequence
  Description of Artificial Sequence: Synthetic peptide
  Seed: DPRMCSLMQGSTLPRRS
DPRMFSLEQASTAPRRS

SEQ ID NO: 63387 - protein, 17 aa, Artificial Sequence
  Description of Artificial Sequence: Synthetic peptide
  Seed: DPRMCSLMQGSTLPRRS
DPRMFSLEQASTIPRRS

SEQ ID NO: 63388 - protein, 17 aa, Artificial Sequence
  Description of Artificial Sequence: Synthetic peptide
  Seed: DPRMCSLMQGSTLPRRS
DPRMFSLEQASTLPRRS

SEQ ID NO: 63389 - protein, 17 aa, Artificial Sequence
  Description of Artificial Sequence: Synthetic peptide
  Seed: DPRMCSLMQGSTLPRRS
DPRMFSLEQASTMPRRS

SEQ ID NO: 63390 - protein, 17 aa, Artificial Sequence
  Description of Artificial Sequence: Synthetic peptide
  Seed: DPRMCSLMQGSTLPRRS
DPRMFSLEQASTVPRRS

SEQ ID NO: 63391 - protein, 17 aa, Artificial Sequence
  Description of Artificial Sequence: Synthetic peptide
  Seed: DPRMCSLMQGSTLPRRS
DPRMFSLEQGSTAPRRS

SEQ ID NO: 63392 - protein, 17 aa, Artificial Sequence
  Description of Artificial Sequence: Synthetic peptide
  Seed: DPRMCSLMQGSTLPRRS
DPRMFSLEQGSTIPRRS

SEQ ID NO: 63393 - protein, 17 aa, Artificial Sequence
  Description of Artificial Sequence: Synthetic peptide
  Seed: DPRMCSLMQGSTLPRRS
DPRMFSLEQGSTLPRRS

SEQ ID NO: 63394 - protein, 17 aa, Artificial Sequence
  Description of Artificial Sequence: Synthetic peptide
  Seed: DPRMCSLMQGSTLPRRS
DPRMFSLEQGSTVPRRS

SEQ ID NO: 63395 - protein, 17 aa, Artificial Sequence
  Description of Artificial Sequence: Synthetic peptide
  Seed: DPRMCSLMQGSTLPRRS
DPRMFSLEQSSTAPRRS

SEQ ID NO: 63396 - protein, 17 aa, Artificial Sequence
  Description of Artificial Sequence: Synthetic peptide
  Seed: DPRMCSLMQGSTLPRRS
DPRMFSLEQSSTIPRRS

SEQ ID NO: 63397 - protein, 17 aa, Artificial Sequence
  Description of Artificial Sequence: Synthetic peptide
  Seed: DPRMCSLMQGSTLPRRS
DPRMFSLEQSSTLPRRS

SEQ ID NO: 63398 - protein, 17 aa, Artificial Sequence
  Description of Artificial Sequence: Synthetic peptide
  Seed: DPRMCSLMQGSTLPRRS
DPRMFSLEQSSTVPRRS

SEQ ID NO: 63399 - protein, 17 aa, Artificial Sequence
  Description of Artificial Sequence: Synthetic peptide
  Seed: DPRMCSLMQGSTLPRRS
DPRMFSLFQASTAPRRS

SEQ ID NO: 63400 - protein, 17 aa, Artificial Sequence
  Description of Artificial Sequence: Synthetic peptide
  Seed: DPRMCSLMQGSTLPRRS
DPRMFSLFQASTGPRRS

SEQ ID NO: 63401 - protein, 17 aa, Artificial Sequence
  Description of Artificial Sequence: Synthetic peptide
  Seed: DPRMCSLMQGSTLPRRS
DPRMFSLFQASTIPRRS

SEQ ID NO: 63402 - protein, 17 aa, Artificial Sequence
  Description of Artificial Sequence: Synthetic peptide
  Seed: DPRMCSLMQGSTLPRRS
DPRMFSLFQASTLPRRS

SEQ ID NO: 63403 - protein, 17 aa, Artificial Sequence
  Description of Artificial Sequence: Synthetic peptide
  Seed: DPRMCSLMQGSTLPRRS
DPRMFSLFQASTMPRRS

SEQ ID NO: 63404 - protein, 17 aa, Artificial Sequence
  Description of Artificial Sequence: Synthetic peptide
  Seed: DPRMCSLMQGSTLPRRS
DPRMFSLFQASTNPRRS

SEQ ID NO: 63405 - protein, 17 aa, Artificial Sequence
  Description of Artificial Sequence: Synthetic peptide
  Seed: DPRMCSLMQGSTLPRRS
DPRMFSLFQASTSPRRS

SEQ ID NO: 63406 - protein, 17 aa, Artificial Sequence
  Description of Artificial Sequence: Synthetic peptide
  Seed: DPRMCSLMQGSTLPRRS
DPRMFSLFQASTTPRRS

SEQ ID NO: 63407 - protein, 17 aa, Artificial Sequence
  Description of Artificial Sequence: Synthetic peptide
  Seed: DPRMCSLMQGSTLPRRS
DPRMFSLFQASTVPRRS

SEQ ID NO: 63408 - protein, 17 aa, Artificial Sequence
  Description of Artificial Sequence: Synthetic peptide
  Seed: DPRMCSLMQGSTLPRRS
DPRMFSLFQGSTAPRRS

SEQ ID NO: 63409 - protein, 17 aa, Artificial Sequence
  Description of Artificial Sequence: Synthetic peptide
  Seed: DPRMCSLMQGSTLPRRS
DPRMFSLFQGSTIPRRS

SEQ ID NO: 63410 - protein, 17 aa, Artificial Sequence
  Description of Artificial Sequence: Synthetic peptide
  Seed: DPRMCSLMQGSTLPRRS
DPRMFSLFQGSTLPRRS

SEQ ID NO: 63411 - protein, 17 aa, Artificial Sequence
  Description of Artificial Sequence: Synthetic peptide
  Seed: DPRMCSLMQGSTLPRRS
DPRMFSLFQGSTMPRRS

SEQ ID NO: 63412 - protein, 17 aa, Artificial Sequence
  Description of Artificial Sequence: Synthetic peptide
  Seed: DPRMCSLMQGSTLPRRS
DPRMFSLFQGSTVPRRS

SEQ ID NO: 63413 - protein, 17 aa, Artificial Sequence
  Description of Artificial Sequence: Synthetic peptide
  Seed: DPRMCSLMQGSTLPRRS
DPRMFSLFQISTAPRRS

SEQ ID NO: 63414 - protein, 17 aa, Artificial Sequence
  Description of Artificial Sequence: Synthetic peptide
  Seed: DPRMCSLMQGSTLPRRS
DPRMFSLFQISTNPRRS

SEQ ID NO: 63415 - protein, 17 aa, Artificial Sequence
  Description of Artificial Sequence: Synthetic peptide
  Seed: DPRMCSLMQGSTLPRRS
DPRMFSLFQISTSPRRS

SEQ ID NO: 63416 - protein, 17 aa, Artificial Sequence
  Description of Artificial Sequence: Synthetic peptide
  Seed: DPRMCSLMQGSTLPRRS
DPRMFSLFQLSTAPRRS

SEQ ID NO: 63417 - protein, 17 aa, Artificial Sequence
  Description of Artificial Sequence: Synthetic peptide
  Seed: DPRMCSLMQGSTLPRRS
DPRMFSLFQMSTAPRRS

SEQ ID NO: 63418 - protein, 17 aa, Artificial Sequence
  Description of Artificial Sequence: Synthetic peptide
  Seed: DPRMCSLMQGSTLPRRS
DPRMFSLFQNSTLPRRS

SEQ ID NO: 63419 - protein, 17 aa, Artificial Sequence
  Description of Artificial Sequence: Synthetic peptide
  Seed: DPRMCSLMQGSTLPRRS
DPRMFSLFQPSTAPRRS

SEQ ID NO: 63420 - protein, 17 aa, Artificial Sequence
  Description of Artificial Sequence: Synthetic peptide
  Seed: DPRMCSLMQGSTLPRRS
DPRMFSLFQPSTIPRRS

SEQ ID NO: 63421 - protein, 17 aa, Artificial Sequence
  Description of Artificial Sequence: Synthetic peptide
  Seed: DPRMCSLMQGSTLPRRS
DPRMFSLFQPSTLPRRS

SEQ ID NO: 63422 - protein, 17 aa, Artificial Sequence
  Description of Artificial Sequence: Synthetic peptide
  Seed: DPRMCSLMQGSTLPRRS
DPRMFSLFQPSTNPRRS

SEQ ID NO: 63423 - protein, 17 aa, Artificial Sequence
  Description of Artificial Sequence: Synthetic peptide
  Seed: DPRMCSLMQGSTLPRRS
DPRMFSLFQPSTSPRRS

SEQ ID NO: 63424 - protein, 17 aa, Artificial Sequence
  Description of Artificial Sequence: Synthetic peptide
  Seed: DPRMCSLMQGSTLPRRS
DPRMFSLFQPSTTPRRS

SEQ ID NO: 63425 - protein, 17 aa, Artificial Sequence
  Description of Artificial Sequence: Synthetic peptide
  Seed: DPRMCSLMQGSTLPRRS
DPRMFSLFQPSTVPRRS

SEQ ID NO: 63426 - protein, 17 aa, Artificial Sequence
  Description of Artificial Sequence: Synthetic peptide
  Seed: DPRMCSLMQGSTLPRRS
DPRMFSLFQSSTAPRRS

SEQ ID NO: 63427 - protein, 17 aa, Artificial Sequence
  Description of Artificial Sequence: Synthetic peptide
  Seed: DPRMCSLMQGSTLPRRS
DPRMFSLFQSSTIPRRS

SEQ ID NO: 63428 - protein, 17 aa, Artificial Sequence
  Description of Artificial Sequence: Synthetic peptide
  Seed: DPRMCSLMQGSTLPRRS
DPRMFSLFQSSTLPRRS

SEQ ID NO: 63429 - protein, 17 aa, Artificial Sequence
  Description of Artificial Sequence: Synthetic peptide
  Seed: DPRMCSLMQGSTLPRRS
DPRMFSLFQSSTNPRRS

SEQ ID NO: 63430 - protein, 17 aa, Artificial Sequence
  Description of Artificial Sequence: Synthetic peptide
  Seed: DPRMCSLMQGSTLPRRS
DPRMFSLFQSSTSPRRS

SEQ ID NO: 63431 - protein, 17 aa, Artificial Sequence
  Description of Artificial Sequence: Synthetic peptide
  Seed: DPRMCSLMQGSTLPRRS
DPRMFSLFQSSTVPRRS

SEQ ID NO: 63432 - protein, 17 aa, Artificial Sequence
  Description of Artificial Sequence: Synthetic peptide
  Seed: DPRMCSLMQGSTLPRRS
DPRMFSLFQTSTAPRRS

SEQ ID NO: 63433 - protein, 17 aa, Artificial Sequence
  Description of Artificial Sequence: Synthetic peptide
  Seed: DPRMCSLMQGSTLPRRS
DPRMFSLFQTSTNPRRS

SEQ ID NO: 63434 - protein, 17 aa, Artificial Sequence
  Description of Artificial Sequence: Synthetic peptide
  Seed: DPRMCSLMQGSTLPRRS
DPRMFSLFQTSTSPRRS

SEQ ID NO: 63435 - protein, 17 aa, Artificial Sequence
  Description of Artificial Sequence: Synthetic peptide
  Seed: DPRMCSLMQGSTLPRRS
DPRMFSLFQTSTVPRRS

SEQ ID NO: 63436 - protein, 17 aa, Artificial Sequence
  Description of Artificial Sequence: Synthetic peptide
  Seed: DPRMCSLMQGSTLPRRS
DPRMFSLFQVSTAPRRS

SEQ ID NO: 63437 - protein, 17 aa, Artificial Sequence
  Description of Artificial Sequence: Synthetic peptide
  Seed: DPRMCSLMQGSTLPRRS
DPRMFSLFQVSTNPRRS

SEQ ID NO: 63438 - protein, 17 aa, Artificial Sequence
  Description of Artificial Sequence: Synthetic peptide
  Seed: DPRMCSLMQGSTLPRRS
DPRMFSLFQVSTSPRRS

SEQ ID NO: 63439 - protein, 17 aa, Artificial Sequence
  Description of Artificial Sequence: Synthetic peptide
  Seed: DPRMCSLMQGSTLPRRS
DPRMFSLFQVSTTPRRS

SEQ ID NO: 63440 - protein, 17 aa, Artificial Sequence
  Description of Artificial Sequence: Synthetic peptide
  Seed: DPRMCSLMQGSTLPRRS
DPRMFSLFQVSTVPRRS

SEQ ID NO: 63441 - protein, 17 aa, Artificial Sequence
  Description of Artificial Sequence: Synthetic peptide
  Seed: DPRMCSLMQGSTLPRRS
DPRMFSLGQASTAPRRS

SEQ ID NO: 63442 - protein, 17 aa, Artificial Sequence
  Description of Artificial Sequence: Synthetic peptide
  Seed: DPRMCSLMQGSTLPRRS
DPRMFSLGQASTIPRRS

SEQ ID NO: 63443 - protein, 17 aa, Artificial Sequence
  Description of Artificial Sequence: Synthetic peptide
  Seed: DPRMCSLMQGSTLPRRS
DPRMFSLGQASTLPRRS

SEQ ID NO: 63444 - protein, 17 aa, Artificial Sequence
  Description of Artificial Sequence: Synthetic peptide
  Seed: DPRMCSLMQGSTLPRRS
DPRMFSLGQASTMPRRS

SEQ ID NO: 63445 - protein, 17 aa, Artificial Sequence
  Description of Artificial Sequence: Synthetic peptide
  Seed: DPRMCSLMQGSTLPRRS
DPRMFSLGQASTVPRRS

SEQ ID NO: 63446 - protein, 17 aa, Artificial Sequence
  Description of Artificial Sequence: Synthetic peptide
  Seed: DPRMCSLMQGSTLPRRS
DPRMFSLGQGSTIPRRS

SEQ ID NO: 63447 - protein, 17 aa, Artificial Sequence
  Description of Artificial Sequence: Synthetic peptide
  Seed: DPRMCSLMQGSTLPRRS
DPRMFSLGQGSTLPRRS

SEQ ID NO: 63448 - protein, 17 aa, Artificial Sequence
  Description of Artificial Sequence: Synthetic peptide
  Seed: DPRMCSLMQGSTLPRRS
DPRMFSLGQGSTVPRRS

SEQ ID NO: 63449 - protein, 17 aa, Artificial Sequence
  Description of Artificial Sequence: Synthetic peptide
  Seed: DPRMCSLMQGSTLPRRS
DPRMFSLGQPSTLPRRS

SEQ ID NO: 63450 - protein, 17 aa, Artificial Sequence
  Description of Artificial Sequence: Synthetic peptide
  Seed: DPRMCSLMQGSTLPRRS
DPRMFSLGQSSTIPRRS

SEQ ID NO: 63451 - protein, 17 aa, Artificial Sequence
  Description of Artificial Sequence: Synthetic peptide
  Seed: DPRMCSLMQGSTLPRRS
DPRMFSLGQSSTLPRRS

SEQ ID NO: 63452 - protein, 17 aa, Artificial Sequence
  Description of Artificial Sequence: Synthetic peptide
  Seed: DPRMCSLMQGSTLPRRS
DPRMFSLGQSSTVPRRS

SEQ ID NO: 63453 - protein, 17 aa, Artificial Sequence
  Description of Artificial Sequence: Synthetic peptide
  Seed: DPRMCSLMQGSTLPRRS
DPRMFSLHQASTIPRRS

SEQ ID NO: 63454 - protein, 17 aa, Artificial Sequence
  Description of Artificial Sequence: Synthetic peptide
  Seed: DPRMCSLMQGSTLPRRS
DPRMFSLHQASTLPRRS

SEQ ID NO: 63455 - protein, 17 aa, Artificial Sequence
  Description of Artificial Sequence: Synthetic peptide
  Seed: DPRMCSLMQGSTLPRRS
DPRMFSLHQASTVPRRS

SEQ ID NO: 63456 - protein, 17 aa, Artificial Sequence
  Description of Artificial Sequence: Synthetic peptide
  Seed: DPRMCSLMQGSTLPRRS
DPRMFSLHQGSTLPRRS

SEQ ID NO: 63457 - protein, 17 aa, Artificial Sequence
  Description of Artificial Sequence: Synthetic peptide
  Seed: DPRMCSLMQGSTLPRRS
DPRMFSLIQASTAPRRS

SEQ ID NO: 63458 - protein, 17 aa, Artificial Sequence
  Description of Artificial Sequence: Synthetic peptide
  Seed: DPRMCSLMQGSTLPRRS
DPRMFSLIQASTCPRRS

SEQ ID NO: 63459 - protein, 17 aa, Artificial Sequence
  Description of Artificial Sequence: Synthetic peptide
  Seed: DPRMCSLMQGSTLPRRS
DPRMFSLIQASTDPRRS

SEQ ID NO: 63460 - protein, 17 aa, Artificial Sequence
  Description of Artificial Sequence: Synthetic peptide
  Seed: DPRMCSLMQGSTLPRRS
DPRMFSLIQASTEPRRS

SEQ ID NO: 63461 - protein, 17 aa, Artificial Sequence
  Description of Artificial Sequence: Synthetic peptide
  Seed: DPRMCSLMQGSTLPRRS
DPRMFSLIQASTFPRRS

SEQ ID NO: 63462 - protein, 17 aa, Artificial Sequence
  Description of Artificial Sequence: Synthetic peptide
  Seed: DPRMCSLMQGSTLPRRS
DPRMFSLIQASTGPRRS

SEQ ID NO: 63463 - protein, 17 aa, Artificial Sequence
  Description of Artificial Sequence: Synthetic peptide
  Seed: DPRMCSLMQGSTLPRRS
DPRMFSLIQASTHPRRS

SEQ ID NO: 63464 - protein, 17 aa, Artificial Sequence
  Description of Artificial Sequence: Synthetic peptide
  Seed: DPRMCSLMQGSTLPRRS
DPRMFSLIQASTIPRRS

SEQ ID NO: 63465 - protein, 17 aa, Artificial Sequence
  Description of Artificial Sequence: Synthetic peptide
  Seed: DPRMCSLMQGSTLPRRS
DPRMFSLIQASTLPRRS

SEQ ID NO: 63466 - protein, 17 aa, Artificial Sequence
  Description of Artificial Sequence: Synthetic peptide
  Seed: DPRMCSLMQGSTLPRRS
DPRMFSLIQASTMPRRS

SEQ ID NO: 63467 - protein, 17 aa, Artificial Sequence
  Description of Artificial Sequence: Synthetic peptide
  Seed: DPRMCSLMQGSTLPRRS
DPRMFSLIQASTNPRRS

SEQ ID NO: 63468 - protein, 17 aa, Artificial Sequence
  Description of Artificial Sequence: Synthetic peptide
  Seed: DPRMCSLMQGSTLPRRS
DPRMFSLIQASTPPRRS

SEQ ID NO: 63469 - protein, 17 aa, Artificial Sequence
  Description of Artificial Sequence: Synthetic peptide
  Seed: DPRMCSLMQGSTLPRRS
DPRMFSLIQASTQPRRS

SEQ ID NO: 63470 - protein, 17 aa, Artificial Sequence
  Description of Artificial Sequence: Synthetic peptide
  Seed: DPRMCSLMQGSTLPRRS
DPRMFSLIQASTSPRRS

SEQ ID NO: 63471 - protein, 17 aa, Artificial Sequence
  Description of Artificial Sequence: Synthetic peptide
  Seed: DPRMCSLMQGSTLPRRS
DPRMFSLIQASTTPRRS

SEQ ID NO: 63472 - protein, 17 aa, Artificial Sequence
  Description of Artificial Sequence: Synthetic peptide
  Seed: DPRMCSLMQGSTLPRRS
DPRMFSLIQASTVPRRS

SEQ ID NO: 63473 - protein, 17 aa, Artificial Sequence
  Description of Artificial Sequence: Synthetic peptide
  Seed: DPRMCSLMQGSTLPRRS
DPRMFSLIQASTWPRRS

SEQ ID NO: 63474 - protein, 17 aa, Artificial Sequence
  Description of Artificial Sequence: Synthetic peptide
  Seed: DPRMCSLMQGSTLPRRS
DPRMFSLIQGSTAPRRS

SEQ ID NO: 63475 - protein, 17 aa, Artificial Sequence
  Description of Artificial Sequence: Synthetic peptide
  Seed: DPRMCSLMQGSTLPRRS
DPRMFSLIQGSTCPRRS

SEQ ID NO: 63476 - protein, 17 aa, Artificial Sequence
  Description of Artificial Sequence: Synthetic peptide
  Seed: DPRMCSLMQGSTLPRRS
DPRMFSLIQGSTFPRRS

SEQ ID NO: 63477 - protein, 17 aa, Artificial Sequence
  Description of Artificial Sequence: Synthetic peptide
  Seed: DPRMCSLMQGSTLPRRS
DPRMFSLIQGSTGPRRS

SEQ ID NO: 63478 - protein, 17 aa, Artificial Sequence
  Description of Artificial Sequence: Synthetic peptide
  Seed: DPRMCSLMQGSTLPRRS
DPRMFSLIQGSTHPRRS

SEQ ID NO: 63479 - protein, 17 aa, Artificial Sequence
  Description of Artificial Sequence: Synthetic peptide
  Seed: DPRMCSLMQGSTLPRRS
DPRMFSLIQGSTIPRRS

SEQ ID NO: 63480 - protein, 17 aa, Artificial Sequence
  Description of Artificial Sequence: Synthetic peptide
  Seed: DPRMCSLMQGSTLPRRS
DPRMFSLIQGSTLPRRS

SEQ ID NO: 63481 - protein, 17 aa, Artificial Sequence
  Description of Artificial Sequence: Synthetic peptide
  Seed: DPRMCSLMQGSTLPRRS
DPRMFSLIQGSTMPRRS

SEQ ID NO: 63482 - protein, 17 aa, Artificial Sequence
  Description of Artificial Sequence: Synthetic peptide
  Seed: DPRMCSLMQGSTLPRRS
DPRMFSLIQGSTNPRRS

SEQ ID NO: 63483 - protein, 17 aa, Artificial Sequence
  Description of Artificial Sequence: Synthetic peptide
  Seed: DPRMCSLMQGSTLPRRS
DPRMFSLIQGSTQPRRS

SEQ ID NO: 63484 - protein, 17 aa, Artificial Sequence
  Description of Artificial Sequence: Synthetic peptide
  Seed: DPRMCSLMQGSTLPRRS
DPRMFSLIQGSTSPRRS

SEQ ID NO: 63485 - protein, 17 aa, Artificial Sequence
  Description of Artificial Sequence: Synthetic peptide
  Seed: DPRMCSLMQGSTLPRRS
DPRMFSLIQGSTTPRRS

SEQ ID NO: 63486 - protein, 17 aa, Artificial Sequence
  Description of Artificial Sequence: Synthetic peptide
  Seed: DPRMCSLMQGSTLPRRS
DPRMFSLIQGSTVPRRS

SEQ ID NO: 63487 - protein, 17 aa, Artificial Sequence
  Description of Artificial Sequence: Synthetic peptide
  Seed: DPRMCSLMQGSTLPRRS
DPRMFSLIQISTAPRRS

SEQ ID NO: 63488 - protein, 17 aa, Artificial Sequence
  Description of Artificial Sequence: Synthetic peptide
  Seed: DPRMCSLMQGSTLPRRS
DPRMFSLIQISTGPRRS

SEQ ID NO: 63489 - protein, 17 aa, Artificial Sequence
  Description of Artificial Sequence: Synthetic peptide
  Seed: DPRMCSLMQGSTLPRRS
DPRMFSLIQISTHPRRS

SEQ ID NO: 63490 - protein, 17 aa, Artificial Sequence
  Description of Artificial Sequence: Synthetic peptide
  Seed: DPRMCSLMQGSTLPRRS
DPRMFSLIQISTIPRRS

SEQ ID NO: 63491 - protein, 17 aa, Artificial Sequence
  Description of Artificial Sequence: Synthetic peptide
  Seed: DPRMCSLMQGSTLPRRS
DPRMFSLIQISTLPRRS

SEQ ID NO: 63492 - protein, 17 aa, Artificial Sequence
  Description of Artificial Sequence: Synthetic peptide
  Seed: DPRMCSLMQGSTLPRRS
DPRMFSLIQISTMPRRS

SEQ ID NO: 63493 - protein, 17 aa, Artificial Sequence
  Description of Artificial Sequence: Synthetic peptide
  Seed: DPRMCSLMQGSTLPRRS
DPRMFSLIQISTNPRRS

SEQ ID NO: 63494 - protein, 17 aa, Artificial Sequence
  Description of Artificial Sequence: Synthetic peptide
  Seed: DPRMCSLMQGSTLPRRS
DPRMFSLIQISTQPRRS

SEQ ID NO: 63495 - protein, 17 aa, Artificial Sequence
  Description of Artificial Sequence: Synthetic peptide
  Seed: DPRMCSLMQGSTLPRRS
DPRMFSLIQISTSPRRS

SEQ ID NO: 63496 - protein, 17 aa, Artificial Sequence
  Description of Artificial Sequence: Synthetic peptide
  Seed: DPRMCSLMQGSTLPRRS
DPRMFSLIQISTTPRRS

SEQ ID NO: 63497 - protein, 17 aa, Artificial Sequence
  Description of Artificial Sequence: Synthetic peptide
  Seed: DPRMCSLMQGSTLPRRS
DPRMFSLIQISTVPRRS

SEQ ID NO: 63498 - protein, 17 aa, Artificial Sequence
  Description of Artificial Sequence: Synthetic peptide
  Seed: DPRMCSLMQGSTLPRRS
DPRMFSLIQLSTAPRRS

SEQ ID NO: 63499 - protein, 17 aa, Artificial Sequence
  Description of Artificial Sequence: Synthetic peptide
  Seed: DPRMCSLMQGSTLPRRS
DPRMFSLIQLSTIPRRS

SEQ ID NO: 63500 - protein, 17 aa, Artificial Sequence
  Description of Artificial Sequence: Synthetic peptide
  Seed: DPRMCSLMQGSTLPRRS
DPRMFSLIQLSTLPRRS

SEQ ID NO: 63501 - protein, 17 aa, Artificial Sequence
  Description of Artificial Sequence: Synthetic peptide
  Seed: DPRMCSLMQGSTLPRRS
DPRMFSLIQLSTMPRRS

SEQ ID NO: 63502 - protein, 17 aa, Artificial Sequence
  Description of Artificial Sequence: Synthetic peptide
  Seed: DPRMCSLMQGSTLPRRS
DPRMFSLIQLSTNPRRS

SEQ ID NO: 63503 - protein, 17 aa, Artificial Sequence
  Description of Artificial Sequence: Synthetic peptide
  Seed: DPRMCSLMQGSTLPRRS
DPRMFSLIQLSTSPRRS

SEQ ID NO: 63504 - protein, 17 aa, Artificial Sequence
  Description of Artificial Sequence: Synthetic peptide
  Seed: DPRMCSLMQGSTLPRRS
DPRMFSLIQLSTTPRRS

SEQ ID NO: 63505 - protein, 17 aa, Artificial Sequence
  Description of Artificial Sequence: Synthetic peptide
  Seed: DPRMCSLMQGSTLPRRS
DPRMFSLIQLSTVPRRS

SEQ ID NO: 63506 - protein, 17 aa, Artificial Sequence
  Description of Artificial Sequence: Synthetic peptide
  Seed: DPRMCSLMQGSTLPRRS
DPRMFSLIQMSTAPRRS

SEQ ID NO: 63507 - protein, 17 aa, Artificial Sequence
  Description of Artificial Sequence: Synthetic peptide
  Seed: DPRMCSLMQGSTLPRRS
DPRMFSLIQMSTIPRRS

SEQ ID NO: 63508 - protein, 17 aa, Artificial Sequence
  Description of Artificial Sequence: Synthetic peptide
  Seed: DPRMCSLMQGSTLPRRS
DPRMFSLIQMSTLPRRS

SEQ ID NO: 63509 - protein, 17 aa, Artificial Sequence
  Description of Artificial Sequence: Synthetic peptide
  Seed: DPRMCSLMQGSTLPRRS
DPRMFSLIQMSTMPRRS

SEQ ID NO: 63510 - protein, 17 aa, Artificial Sequence
  Description of Artificial Sequence: Synthetic peptide
  Seed: DPRMCSLMQGSTLPRRS
DPRMFSLIQMSTNPRRS

SEQ ID NO: 63511 - protein, 17 aa, Artificial Sequence
  Description of Artificial Sequence: Synthetic peptide
  Seed: DPRMCSLMQGSTLPRRS
DPRMFSLIQMSTSPRRS

SEQ ID NO: 63512 - protein, 17 aa, Artificial Sequence
  Description of Artificial Sequence: Synthetic peptide
  Seed: DPRMCSLMQGSTLPRRS
DPRMFSLIQMSTTPRRS

SEQ ID NO: 63513 - protein, 17 aa, Artificial Sequence
  Description of Artificial Sequence: Synthetic peptide
  Seed: DPRMCSLMQGSTLPRRS
DPRMFSLIQMSTVPRRS

SEQ ID NO: 63514 - protein, 17 aa, Artificial Sequence
  Description of Artificial Sequence: Synthetic peptide
  Seed: DPRMCSLMQGSTLPRRS
DPRMFSLIQNSTAPRRS

SEQ ID NO: 63515 - protein, 17 aa, Artificial Sequence
  Description of Artificial Sequence: Synthetic peptide
  Seed: DPRMCSLMQGSTLPRRS
DPRMFSLIQNSTGPRRS

SEQ ID NO: 63516 - protein, 17 aa, Artificial Sequence
  Description of Artificial Sequence: Synthetic peptide
  Seed: DPRMCSLMQGSTLPRRS
DPRMFSLIQNSTIPRRS

SEQ ID NO: 63517 - protein, 17 aa, Artificial Sequence
  Description of Artificial Sequence: Synthetic peptide
  Seed: DPRMCSLMQGSTLPRRS
DPRMFSLIQNSTLPRRS

SEQ ID NO: 63518 - protein, 17 aa, Artificial Sequence
  Description of Artificial Sequence: Synthetic peptide
  Seed: DPRMCSLMQGSTLPRRS
DPRMFSLIQNSTMPRRS

SEQ ID NO: 63519 - protein, 17 aa, Artificial Sequence
  Description of Artificial Sequence: Synthetic peptide
  Seed: DPRMCSLMQGSTLPRRS
DPRMFSLIQNSTNPRRS

SEQ ID NO: 63520 - protein, 17 aa, Artificial Sequence
  Description of Artificial Sequence: Synthetic peptide
  Seed: DPRMCSLMQGSTLPRRS
DPRMFSLIQNSTSPRRS

SEQ ID NO: 63521 - protein, 17 aa, Artificial Sequence
  Description of Artificial Sequence: Synthetic peptide
  Seed: DPRMCSLMQGSTLPRRS
DPRMFSLIQNSTTPRRS

SEQ ID NO: 63522 - protein, 17 aa, Artificial Sequence
  Description of Artificial Sequence: Synthetic peptide
  Seed: DPRMCSLMQGSTLPRRS
DPRMFSLIQNSTVPRRS

SEQ ID NO: 63523 - protein, 17 aa, Artificial Sequence
  Description of Artificial Sequence: Synthetic peptide
  Seed: DPRMCSLMQGSTLPRRS
DPRMFSLIQPSTAPRRS

SEQ ID NO: 63524 - protein, 17 aa, Artificial Sequence
  Description of Artificial Sequence: Synthetic peptide
  Seed: DPRMCSLMQGSTLPRRS
DPRMFSLIQPSTCPRRS

SEQ ID NO: 63525 - protein, 17 aa, Artificial Sequence
  Description of Artificial Sequence: Synthetic peptide
  Seed: DPRMCSLMQGSTLPRRS
DPRMFSLIQPSTEPRRS

SEQ ID NO: 63526 - protein, 17 aa, Artificial Sequence
  Description of Artificial Sequence: Synthetic peptide
  Seed: DPRMCSLMQGSTLPRRS
DPRMFSLIQPSTGPRRS

SEQ ID NO: 63527 - protein, 17 aa, Artificial Sequence
  Description of Artificial Sequence: Synthetic peptide
  Seed: DPRMCSLMQGSTLPRRS
DPRMFSLIQPSTHPRRS

SEQ ID NO: 63528 - protein, 17 aa, Artificial Sequence
  Description of Artificial Sequence: Synthetic peptide
  Seed: DPRMCSLMQGSTLPRRS
DPRMFSLIQPSTIPRRS

SEQ ID NO: 63529 - protein, 17 aa, Artificial Sequence
  Description of Artificial Sequence: Synthetic peptide
  Seed: DPRMCSLMQGSTLPRRS
DPRMFSLIQPSTLPRRS

SEQ ID NO: 63530 - protein, 17 aa, Artificial Sequence
  Description of Artificial Sequence: Synthetic peptide
  Seed: DPRMCSLMQGSTLPRRS
DPRMFSLIQPSTMPRRS

SEQ ID NO: 63531 - protein, 17 aa, Artificial Sequence
  Description of Artificial Sequence: Synthetic peptide
  Seed: DPRMCSLMQGSTLPRRS
DPRMFSLIQPSTNPRRS

SEQ ID NO: 63532 - protein, 17 aa, Artificial Sequence
  Description of Artificial Sequence: Synthetic peptide
  Seed: DPRMCSLMQGSTLPRRS
DPRMFSLIQPSTPPRRS

SEQ ID NO: 63533 - protein, 17 aa, Artificial Sequence
  Description of Artificial Sequence: Synthetic peptide
  Seed: DPRMCSLMQGSTLPRRS
DPRMFSLIQPSTQPRRS

SEQ ID NO: 63534 - protein, 17 aa, Artificial Sequence
  Description of Artificial Sequence: Synthetic peptide
  Seed: DPRMCSLMQGSTLPRRS
DPRMFSLIQPSTSPRRS

SEQ ID NO: 63535 - protein, 17 aa, Artificial Sequence
  Description of Artificial Sequence: Synthetic peptide
  Seed: DPRMCSLMQGSTLPRRS
DPRMFSLIQPSTTPRRS

SEQ ID NO: 63536 - protein, 17 aa, Artificial Sequence
  Description of Artificial Sequence: Synthetic peptide
  Seed: DPRMCSLMQGSTLPRRS
DPRMFSLIQPSTVPRRS

SEQ ID NO: 63537 - protein, 17 aa, Artificial Sequence
  Description of Artificial Sequence: Synthetic peptide
  Seed: DPRMCSLMQGSTLPRRS
DPRMFSLIQPSTWPRRS

SEQ ID NO: 63538 - protein, 17 aa, Artificial Sequence
  Description of Artificial Sequence: Synthetic peptide
  Seed: DPRMCSLMQGSTLPRRS
DPRMFSLIQSSTAPRRS

SEQ ID NO: 63539 - protein, 17 aa, Artificial Sequence
  Description of Artificial Sequence: Synthetic peptide
  Seed: DPRMCSLMQGSTLPRRS
DPRMFSLIQSSTCPRRS

SEQ ID NO: 63540 - protein, 17 aa, Artificial Sequence
  Description of Artificial Sequence: Synthetic peptide
  Seed: DPRMCSLMQGSTLPRRS
DPRMFSLIQSSTFPRRS

SEQ ID NO: 63541 - protein, 17 aa, Artificial Sequence
  Description of Artificial Sequence: Synthetic peptide
  Seed: DPRMCSLMQGSTLPRRS
DPRMFSLIQSSTGPRRS

SEQ ID NO: 63542 - protein, 17 aa, Artificial Sequence
  Description of Artificial Sequence: Synthetic peptide
  Seed: DPRMCSLMQGSTLPRRS
DPRMFSLIQSSTHPRRS

SEQ ID NO: 63543 - protein, 17 aa, Artificial Sequence
  Description of Artificial Sequence: Synthetic peptide
  Seed: DPRMCSLMQGSTLPRRS
DPRMFSLIQSSTIPRRS

SEQ ID NO: 63544 - protein, 17 aa, Artificial Sequence
  Description of Artificial Sequence: Synthetic peptide
  Seed: DPRMCSLMQGSTLPRRS
DPRMFSLIQSSTLPRRS

SEQ ID NO: 63545 - protein, 17 aa, Artificial Sequence
  Description of Artificial Sequence: Synthetic peptide
  Seed: DPRMCSLMQGSTLPRRS
DPRMFSLIQSSTMPRRS

SEQ ID NO: 63546 - protein, 17 aa, Artificial Sequence
  Description of Artificial Sequence: Synthetic peptide
  Seed: DPRMCSLMQGSTLPRRS
DPRMFSLIQSSTNPRRS

SEQ ID NO: 63547 - protein, 17 aa, Artificial Sequence
  Description of Artificial Sequence: Synthetic peptide
  Seed: DPRMCSLMQGSTLPRRS
DPRMFSLIQSSTPPRRS

SEQ ID NO: 63548 - protein, 17 aa, Artificial Sequence
  Description of Artificial Sequence: Synthetic peptide
  Seed: DPRMCSLMQGSTLPRRS
DPRMFSLIQSSTQPRRS

SEQ ID NO: 63549 - protein, 17 aa, Artificial Sequence
  Description of Artificial Sequence: Synthetic peptide
  Seed: DPRMCSLMQGSTLPRRS
DPRMFSLIQSSTSPRRS

SEQ ID NO: 63550 - protein, 17 aa, Artificial Sequence
  Description of Artificial Sequence: Synthetic peptide
  Seed: DPRMCSLMQGSTLPRRS
DPRMFSLIQSSTTPRRS

SEQ ID NO: 63551 - protein, 17 aa, Artificial Sequence
  Description of Artificial Sequence: Synthetic peptide
  Seed: DPRMCSLMQGSTLPRRS
DPRMFSLIQSSTVPRRS

SEQ ID NO: 63552 - protein, 17 aa, Artificial Sequence
  Description of Artificial Sequence: Synthetic peptide
  Seed: DPRMCSLMQGSTLPRRS
DPRMFSLIQTSTAPRRS

SEQ ID NO: 63553 - protein, 17 aa, Artificial Sequence
  Description of Artificial Sequence: Synthetic peptide
  Seed: DPRMCSLMQGSTLPRRS
DPRMFSLIQTSTCPRRS

SEQ ID NO: 63554 - protein, 17 aa, Artificial Sequence
  Description of Artificial Sequence: Synthetic peptide
  Seed: DPRMCSLMQGSTLPRRS
DPRMFSLIQTSTGPRRS

SEQ ID NO: 63555 - protein, 17 aa, Artificial Sequence
  Description of Artificial Sequence: Synthetic peptide
  Seed: DPRMCSLMQGSTLPRRS
DPRMFSLIQTSTHPRRS

SEQ ID NO: 63556 - protein, 17 aa, Artificial Sequence
  Description of Artificial Sequence: Synthetic peptide
  Seed: DPRMCSLMQGSTLPRRS
DPRMFSLIQTSTIPRRS

SEQ ID NO: 63557 - protein, 17 aa, Artificial Sequence
  Description of Artificial Sequence: Synthetic peptide
  Seed: DPRMCSLMQGSTLPRRS
DPRMFSLIQTSTLPRRS

SEQ ID NO: 63558 - protein, 17 aa, Artificial Sequence
  Description of Artificial Sequence: Synthetic peptide
  Seed: DPRMCSLMQGSTLPRRS
DPRMFSLIQTSTMPRRS

SEQ ID NO: 63559 - protein, 17 aa, Artificial Sequence
  Description of Artificial Sequence: Synthetic peptide
  Seed: DPRMCSLMQGSTLPRRS
DPRMFSLIQTSTNPRRS

SEQ ID NO: 63560 - protein, 17 aa, Artificial Sequence
  Description of Artificial Sequence: Synthetic peptide
  Seed: DPRMCSLMQGSTLPRRS
DPRMFSLIQTSTPPRRS

SEQ ID NO: 63561 - protein, 17 aa, Artificial Sequence
  Description of Artificial Sequence: Synthetic peptide
  Seed: DPRMCSLMQGSTLPRRS
DPRMFSLIQTSTQPRRS

SEQ ID NO: 63562 - protein, 17 aa, Artificial Sequence
  Description of Artificial Sequence: Synthetic peptide
  Seed: DPRMCSLMQGSTLPRRS
DPRMFSLIQTSTSPRRS

SEQ ID NO: 63563 - protein, 17 aa, Artificial Sequence
  Description of Artificial Sequence: Synthetic peptide
  Seed: DPRMCSLMQGSTLPRRS
DPRMFSLIQTSTTPRRS

SEQ ID NO: 63564 - protein, 17 aa, Artificial Sequence
  Description of Artificial Sequence: Synthetic peptide
  Seed: DPRMCSLMQGSTLPRRS
DPRMFSLIQTSTVPRRS

SEQ ID NO: 63565 - protein, 17 aa, Artificial Sequence
  Description of Artificial Sequence: Synthetic peptide
  Seed: DPRMCSLMQGSTLPRRS
DPRMFSLIQVSTAPRRS

SEQ ID NO: 63566 - protein, 17 aa, Artificial Sequence
  Description of Artificial Sequence: Synthetic peptide
  Seed: DPRMCSLMQGSTLPRRS
DPRMFSLIQVSTCPRRS

SEQ ID NO: 63567 - protein, 17 aa, Artificial Sequence
  Description of Artificial Sequence: Synthetic peptide
  Seed: DPRMCSLMQGSTLPRRS
DPRMFSLIQVSTGPRRS

SEQ ID NO: 63568 - protein, 17 aa, Artificial Sequence
  Description of Artificial Sequence: Synthetic peptide
  Seed: DPRMCSLMQGSTLPRRS
DPRMFSLIQVSTHPRRS

SEQ ID NO: 63569 - protein, 17 aa, Artificial Sequence
  Description of Artificial Sequence: Synthetic peptide
  Seed: DPRMCSLMQGSTLPRRS
DPRMFSLIQVSTIPRRS

SEQ ID NO: 63570 - protein, 17 aa, Artificial Sequence
  Description of Artificial Sequence: Synthetic peptide
  Seed: DPRMCSLMQGSTLPRRS
DPRMFSLIQVSTLPRRS

SEQ ID NO: 63571 - protein, 17 aa, Artificial Sequence
  Description of Artificial Sequence: Synthetic peptide
  Seed: DPRMCSLMQGSTLPRRS
DPRMFSLIQVSTMPRRS

SEQ ID NO: 63572 - protein, 17 aa, Artificial Sequence
  Description of Artificial Sequence: Synthetic peptide
  Seed: DPRMCSLMQGSTLPRRS
DPRMFSLIQVSTNPRRS

SEQ ID NO: 63573 - protein, 17 aa, Artificial Sequence
  Description of Artificial Sequence: Synthetic peptide
  Seed: DPRMCSLMQGSTLPRRS
DPRMFSLIQVSTPPRRS

SEQ ID NO: 63574 - protein, 17 aa, Artificial Sequence
  Description of Artificial Sequence: Synthetic peptide
  Seed: DPRMCSLMQGSTLPRRS
DPRMFSLIQVSTQPRRS

SEQ ID NO: 63575 - protein, 17 aa, Artificial Sequence
  Description of Artificial Sequence: Synthetic peptide
  Seed: DPRMCSLMQGSTLPRRS
DPRMFSLIQVSTSPRRS

SEQ ID NO: 63576 - protein, 17 aa, Artificial Sequence
  Description of Artificial Sequence: Synthetic peptide
  Seed: DPRMCSLMQGSTLPRRS
DPRMFSLIQVSTTPRRS

SEQ ID NO: 63577 - protein, 17 aa, Artificial Sequence
  Description of Artificial Sequence: Synthetic peptide
  Seed: DPRMCSLMQGSTLPRRS
DPRMFSLIQVSTVPRRS

SEQ ID NO: 63578 - protein, 17 aa, Artificial Sequence
  Description of Artificial Sequence: Synthetic peptide
  Seed: DPRMCSLMQGSTLPRRS
DPRMFSLLQASTAPRRS

SEQ ID NO: 63579 - protein, 17 aa, Artificial Sequence
  Description of Artificial Sequence: Synthetic peptide
  Seed: DPRMCSLMQGSTLPRRS
DPRMFSLLQASTCPRRS

SEQ ID NO: 63580 - protein, 17 aa, Artificial Sequence
  Description of Artificial Sequence: Synthetic peptide
  Seed: DPRMCSLMQGSTLPRRS
DPRMFSLLQASTDPRRS

SEQ ID NO: 63581 - protein, 17 aa, Artificial Sequence
  Description of Artificial Sequence: Synthetic peptide
  Seed: DPRMCSLMQGSTLPRRS
DPRMFSLLQASTEPRRS

SEQ ID NO: 63582 - protein, 17 aa, Artificial Sequence
  Description of Artificial Sequence: Synthetic peptide
  Seed: DPRMCSLMQGSTLPRRS
DPRMFSLLQASTFPRRS

SEQ ID NO: 63583 - protein, 17 aa, Artificial Sequence
  Description of Artificial Sequence: Synthetic peptide
  Seed: DPRMCSLMQGSTLPRRS
DPRMFSLLQASTGPRRS

SEQ ID NO: 63584 - protein, 17 aa, Artificial Sequence
  Description of Artificial Sequence: Synthetic peptide
  Seed: DPRMCSLMQGSTLPRRS
DPRMFSLLQASTHPRRS

SEQ ID NO: 63585 - protein, 17 aa, Artificial Sequence
  Description of Artificial Sequence: Synthetic peptide
  Seed: DPRMCSLMQGSTLPRRS
DPRMFSLLQASTIPRRS

SEQ ID NO: 63586 - protein, 17 aa, Artificial Sequence
  Description of Artificial Sequence: Synthetic peptide
  Seed: DPRMCSLMQGSTLPRRS
DPRMFSLLQASTKPRRS

SEQ ID NO: 63587 - protein, 17 aa, Artificial Sequence
  Description of Artificial Sequence: Synthetic peptide
  Seed: DPRMCSLMQGSTLPRRS
DPRMFSLLQASTLPRRS

SEQ ID NO: 63588 - protein, 17 aa, Artificial Sequence
  Description of Artificial Sequence: Synthetic peptide
  Seed: DPRMCSLMQGSTLPRRS
DPRMFSLLQASTMPRRS

SEQ ID NO: 63589 - protein, 17 aa, Artificial Sequence
  Description of Artificial Sequence: Synthetic peptide
  Seed: DPRMCSLMQGSTLPRRS
DPRMFSLLQASTNPRRS

SEQ ID NO: 63590 - protein, 17 aa, Artificial Sequence
  Description of Artificial Sequence: Synthetic peptide
  Seed: DPRMCSLMQGSTLPRRS
DPRMFSLLQASTPPRRS

SEQ ID NO: 63591 - protein, 17 aa, Artificial Sequence
  Description of Artificial Sequence: Synthetic peptide
  Seed: DPRMCSLMQGSTLPRRS
DPRMFSLLQASTQPRRS

SEQ ID NO: 63592 - protein, 17 aa, Artificial Sequence
  Description of Artificial Sequence: Synthetic peptide
  Seed: DPRMCSLMQGSTLPRRS
DPRMFSLLQASTRPRRS

SEQ ID NO: 63593 - protein, 17 aa, Artificial Sequence
  Description of Artificial Sequence: Synthetic peptide
  Seed: DPRMCSLMQGSTLPRRS
DPRMFSLLQASTSPRRS

SEQ ID NO: 63594 - protein, 17 aa, Artificial Sequence
  Description of Artificial Sequence: Synthetic peptide
  Seed: DPRMCSLMQGSTLPRRS
DPRMFSLLQASTTPRRS

SEQ ID NO: 63595 - protein, 17 aa, Artificial Sequence
  Description of Artificial Sequence: Synthetic peptide
  Seed: DPRMCSLMQGSTLPRRS
DPRMFSLLQASTVPRRS

SEQ ID NO: 63596 - protein, 17 aa, Artificial Sequence
  Description of Artificial Sequence: Synthetic peptide
  Seed: DPRMCSLMQGSTLPRRS
DPRMFSLLQASTWPRRS

SEQ ID NO: 63597 - protein, 17 aa, Artificial Sequence
  Description of Artificial Sequence: Synthetic peptide
  Seed: DPRMCSLMQGSTLPRRS
DPRMFSLLQASTYPRRS

SEQ ID NO: 63598 - protein, 17 aa, Artificial Sequence
  Description of Artificial Sequence: Synthetic peptide
  Seed: DPRMCSLMQGSTLPRRS
DPRMFSLLQCSTAPRRS

SEQ ID NO: 63599 - protein, 17 aa, Artificial Sequence
  Description of Artificial Sequence: Synthetic peptide
  Seed: DPRMCSLMQGSTLPRRS
DPRMFSLLQCSTIPRRS

SEQ ID NO: 63600 - protein, 17 aa, Artificial Sequence
  Description of Artificial Sequence: Synthetic peptide
  Seed: DPRMCSLMQGSTLPRRS
DPRMFSLLQCSTLPRRS

SEQ ID NO: 63601 - protein, 17 aa, Artificial Sequence
  Description of Artificial Sequence: Synthetic peptide
  Seed: DPRMCSLMQGSTLPRRS
DPRMFSLLQCSTVPRRS

SEQ ID NO: 63602 - protein, 17 aa, Artificial Sequence
  Description of Artificial Sequence: Synthetic peptide
  Seed: DPRMCSLMQGSTLPRRS
DPRMFSLLQGSTAPRRS

SEQ ID NO: 63603 - protein, 17 aa, Artificial Sequence
  Description of Artificial Sequence: Synthetic peptide
  Seed: DPRMCSLMQGSTLPRRS
DPRMFSLLQGSTCPRRS

SEQ ID NO: 63604 - protein, 17 aa, Artificial Sequence
  Description of Artificial Sequence: Synthetic peptide
  Seed: DPRMCSLMQGSTLPRRS
DPRMFSLLQGSTFPRRS

SEQ ID NO: 63605 - protein, 17 aa, Artificial Sequence
  Description of Artificial Sequence: Synthetic peptide
  Seed: DPRMCSLMQGSTLPRRS
DPRMFSLLQGSTGPRRS

SEQ ID NO: 63606 - protein, 17 aa, Artificial Sequence
  Description of Artificial Sequence: Synthetic peptide
  Seed: DPRMCSLMQGSTLPRRS
DPRMFSLLQGSTHPRRS

SEQ ID NO: 63607 - protein, 17 aa, Artificial Sequence
  Description of Artificial Sequence: Synthetic peptide
  Seed: DPRMCSLMQGSTLPRRS
DPRMFSLLQGSTIPRRS

SEQ ID NO: 63608 - protein, 17 aa, Artificial Sequence
  Description of Artificial Sequence: Synthetic peptide
  Seed: DPRMCSLMQGSTLPRRS
DPRMFSLLQGSTLPRRS

SEQ ID NO: 63609 - protein, 17 aa, Artificial Sequence
  Description of Artificial Sequence: Synthetic peptide
  Seed: DPRMCSLMQGSTLPRRS
DPRMFSLLQGSTMPRRS

SEQ ID NO: 63610 - protein, 17 aa, Artificial Sequence
  Description of Artificial Sequence: Synthetic peptide
  Seed: DPRMCSLMQGSTLPRRS
DPRMFSLLQGSTNPRRS

SEQ ID NO: 63611 - protein, 17 aa, Artificial Sequence
  Description of Artificial Sequence: Synthetic peptide
  Seed: DPRMCSLMQGSTLPRRS
DPRMFSLLQGSTPPRRS

SEQ ID NO: 63612 - protein, 17 aa, Artificial Sequence
  Description of Artificial Sequence: Synthetic peptide
  Seed: DPRMCSLMQGSTLPRRS
DPRMFSLLQGSTQPRRS

SEQ ID NO: 63613 - protein, 17 aa, Artificial Sequence
  Description of Artificial Sequence: Synthetic peptide
  Seed: DPRMCSLMQGSTLPRRS
DPRMFSLLQGSTSPRRS

SEQ ID NO: 63614 - protein, 17 aa, Artificial Sequence
  Description of Artificial Sequence: Synthetic peptide
  Seed: DPRMCSLMQGSTLPRRS
DPRMFSLLQGSTTPRRS

SEQ ID NO: 63615 - protein, 17 aa, Artificial Sequence
  Description of Artificial Sequence: Synthetic peptide
  Seed: DPRMCSLMQGSTLPRRS
DPRMFSLLQGSTVPRRS

SEQ ID NO: 63616 - protein, 17 aa, Artificial Sequence
  Description of Artificial Sequence: Synthetic peptide
  Seed: DPRMCSLMQGSTLPRRS
DPRMFSLLQGSTYPRRS

SEQ ID NO: 63617 - protein, 17 aa, Artificial Sequence
  Description of Artificial Sequence: Synthetic peptide
  Seed: DPRMCSLMQGSTLPRRS
DPRMFSLLQHSTIPRRS

SEQ ID NO: 63618 - protein, 17 aa, Artificial Sequence
  Description of Artificial Sequence: Synthetic peptide
  Seed: DPRMCSLMQGSTLPRRS
DPRMFSLLQHSTLPRRS

SEQ ID NO: 63619 - protein, 17 aa, Artificial Sequence
  Description of Artificial Sequence: Synthetic peptide
  Seed: DPRMCSLMQGSTLPRRS
DPRMFSLLQHSTVPRRS

SEQ ID NO: 63620 - protein, 17 aa, Artificial Sequence
  Description of Artificial Sequence: Synthetic peptide
  Seed: DPRMCSLMQGSTLPRRS
DPRMFSLLQISTAPRRS

SEQ ID NO: 63621 - protein, 17 aa, Artificial Sequence
  Description of Artificial Sequence: Synthetic peptide
  Seed: DPRMCSLMQGSTLPRRS
DPRMFSLLQISTDPRRS

SEQ ID NO: 63622 - protein, 17 aa, Artificial Sequence
  Description of Artificial Sequence: Synthetic peptide
  Seed: DPRMCSLMQGSTLPRRS
DPRMFSLLQISTEPRRS

SEQ ID NO: 63623 - protein, 17 aa, Artificial Sequence
  Description of Artificial Sequence: Synthetic peptide
  Seed: DPRMCSLMQGSTLPRRS
DPRMFSLLQISTGPRRS

SEQ ID NO: 63624 - protein, 17 aa, Artificial Sequence
  Description of Artificial Sequence: Synthetic peptide
  Seed: DPRMCSLMQGSTLPRRS
DPRMFSLLQISTHPRRS

SEQ ID NO: 63625 - protein, 17 aa, Artificial Sequence
  Description of Artificial Sequence: Synthetic peptide
  Seed: DPRMCSLMQGSTLPRRS
DPRMFSLLQISTIPRRS

SEQ ID NO: 63626 - protein, 17 aa, Artificial Sequence
  Description of Artificial Sequence: Synthetic peptide
  Seed: DPRMCSLMQGSTLPRRS
DPRMFSLLQISTLPRRS

SEQ ID NO: 63627 - protein, 17 aa, Artificial Sequence
  Description of Artificial Sequence: Synthetic peptide
  Seed: DPRMCSLMQGSTLPRRS
DPRMFSLLQISTMPRRS

SEQ ID NO: 63628 - protein, 17 aa, Artificial Sequence
  Description of Artificial Sequence: Synthetic peptide
  Seed: DPRMCSLMQGSTLPRRS
DPRMFSLLQISTNPRRS

SEQ ID NO: 63629 - protein, 17 aa, Artificial Sequence
  Description of Artificial Sequence: Synthetic peptide
  Seed: DPRMCSLMQGSTLPRRS
DPRMFSLLQISTPPRRS

SEQ ID NO: 63630 - protein, 17 aa, Artificial Sequence
  Description of Artificial Sequence: Synthetic peptide
  Seed: DPRMCSLMQGSTLPRRS
DPRMFSLLQISTQPRRS

SEQ ID NO: 63631 - protein, 17 aa, Artificial Sequence
  Description of Artificial Sequence: Synthetic peptide
  Seed: DPRMCSLMQGSTLPRRS
DPRMFSLLQISTSPRRS

SEQ ID NO: 63632 - protein, 17 aa, Artificial Sequence
  Description of Artificial Sequence: Synthetic peptide
  Seed: DPRMCSLMQGSTLPRRS
DPRMFSLLQISTTPRRS

SEQ ID NO: 63633 - protein, 17 aa, Artificial Sequence
  Description of Artificial Sequence: Synthetic peptide
  Seed: DPRMCSLMQGSTLPRRS
DPRMFSLLQISTVPRRS

SEQ ID NO: 63634 - protein, 17 aa, Artificial Sequence
  Description of Artificial Sequence: Synthetic peptide
  Seed: DPRMCSLMQGSTLPRRS
DPRMFSLLQLSTAPRRS

SEQ ID NO: 63635 - protein, 17 aa, Artificial Sequence
  Description of Artificial Sequence: Synthetic peptide
  Seed: DPRMCSLMQGSTLPRRS
DPRMFSLLQLSTGPRRS

SEQ ID NO: 63636 - protein, 17 aa, Artificial Sequence
  Description of Artificial Sequence: Synthetic peptide
  Seed: DPRMCSLMQGSTLPRRS
DPRMFSLLQLSTIPRRS

SEQ ID NO: 63637 - protein, 17 aa, Artificial Sequence
  Description of Artificial Sequence: Synthetic peptide
  Seed: DPRMCSLMQGSTLPRRS
DPRMFSLLQLSTLPRRS

SEQ ID NO: 63638 - protein, 17 aa, Artificial Sequence
  Description of Artificial Sequence: Synthetic peptide
  Seed: DPRMCSLMQGSTLPRRS
DPRMFSLLQLSTMPRRS

SEQ ID NO: 63639 - protein, 17 aa, Artificial Sequence
  Description of Artificial Sequence: Synthetic peptide
  Seed: DPRMCSLMQGSTLPRRS
DPRMFSLLQLSTNPRRS

SEQ ID NO: 63640 - protein, 17 aa, Artificial Sequence
  Description of Artificial Sequence: Synthetic peptide
  Seed: DPRMCSLMQGSTLPRRS
DPRMFSLLQLSTSPRRS

SEQ ID NO: 63641 - protein, 17 aa, Artificial Sequence
  Description of Artificial Sequence: Synthetic peptide
  Seed: DPRMCSLMQGSTLPRRS
DPRMFSLLQLSTTPRRS

SEQ ID NO: 63642 - protein, 17 aa, Artificial Sequence
  Description of Artificial Sequence: Synthetic peptide
  Seed: DPRMCSLMQGSTLPRRS
DPRMFSLLQLSTVPRRS

SEQ ID NO: 63643 - protein, 17 aa, Artificial Sequence
  Description of Artificial Sequence: Synthetic peptide
  Seed: DPRMCSLMQGSTLPRRS
DPRMFSLLQMSTAPRRS

SEQ ID NO: 63644 - protein, 17 aa, Artificial Sequence
  Description of Artificial Sequence: Synthetic peptide
  Seed: DPRMCSLMQGSTLPRRS
DPRMFSLLQMSTGPRRS

SEQ ID NO: 63645 - protein, 17 aa, Artificial Sequence
  Description of Artificial Sequence: Synthetic peptide
  Seed: DPRMCSLMQGSTLPRRS
DPRMFSLLQMSTHPRRS

SEQ ID NO: 63646 - protein, 17 aa, Artificial Sequence
  Description of Artificial Sequence: Synthetic peptide
  Seed: DPRMCSLMQGSTLPRRS
DPRMFSLLQMSTIPRRS

SEQ ID NO: 63647 - protein, 17 aa, Artificial Sequence
  Description of Artificial Sequence: Synthetic peptide
  Seed: DPRMCSLMQGSTLPRRS
DPRMFSLLQMSTLPRRS

SEQ ID NO: 63648 - protein, 17 aa, Artificial Sequence
  Description of Artificial Sequence: Synthetic peptide
  Seed: DPRMCSLMQGSTLPRRS
DPRMFSLLQMSTMPRRS

SEQ ID NO: 63649 - protein, 17 aa, Artificial Sequence
  Description of Artificial Sequence: Synthetic peptide
  Seed: DPRMCSLMQGSTLPRRS
DPRMFSLLQMSTNPRRS

SEQ ID NO: 63650 - protein, 17 aa, Artificial Sequence
  Description of Artificial Sequence: Synthetic peptide
  Seed: DPRMCSLMQGSTLPRRS
DPRMFSLLQMSTSPRRS

SEQ ID NO: 63651 - protein, 17 aa, Artificial Sequence
  Description of Artificial Sequence: Synthetic peptide
  Seed: DPRMCSLMQGSTLPRRS
DPRMFSLLQMSTTPRRS

SEQ ID NO: 63652 - protein, 17 aa, Artificial Sequence
  Description of Artificial Sequence: Synthetic peptide
  Seed: DPRMCSLMQGSTLPRRS
DPRMFSLLQMSTVPRRS

SEQ ID NO: 63653 - protein, 17 aa, Artificial Sequence
  Description of Artificial Sequence: Synthetic peptide
  Seed: DPRMCSLMQGSTLPRRS
DPRMFSLLQNSTAPRRS

SEQ ID NO: 63654 - protein, 17 aa, Artificial Sequence
  Description of Artificial Sequence: Synthetic peptide
  Seed: DPRMCSLMQGSTLPRRS
DPRMFSLLQNSTCPRRS

SEQ ID NO: 63655 - protein, 17 aa, Artificial Sequence
  Description of Artificial Sequence: Synthetic peptide
  Seed: DPRMCSLMQGSTLPRRS
DPRMFSLLQNSTFPRRS

SEQ ID NO: 63656 - protein, 17 aa, Artificial Sequence
  Description of Artificial Sequence: Synthetic peptide
  Seed: DPRMCSLMQGSTLPRRS
DPRMFSLLQNSTGPRRS

SEQ ID NO: 63657 - protein, 17 aa, Artificial Sequence
  Description of Artificial Sequence: Synthetic peptide
  Seed: DPRMCSLMQGSTLPRRS
DPRMFSLLQNSTHPRRS

SEQ ID NO: 63658 - protein, 17 aa, Artificial Sequence
  Description of Artificial Sequence: Synthetic peptide
  Seed: DPRMCSLMQGSTLPRRS
DPRMFSLLQNSTIPRRS

SEQ ID NO: 63659 - protein, 17 aa, Artificial Sequence
  Description of Artificial Sequence: Synthetic peptide
  Seed: DPRMCSLMQGSTLPRRS
DPRMFSLLQNSTLPRRS

SEQ ID NO: 63660 - protein, 17 aa, Artificial Sequence
  Description of Artificial Sequence: Synthetic peptide
  Seed: DPRMCSLMQGSTLPRRS
DPRMFSLLQNSTMPRRS

SEQ ID NO: 63661 - protein, 17 aa, Artificial Sequence
  Description of Artificial Sequence: Synthetic peptide
  Seed: DPRMCSLMQGSTLPRRS
DPRMFSLLQNSTNPRRS

SEQ ID NO: 63662 - protein, 17 aa, Artificial Sequence
  Description of Artificial Sequence: Synthetic peptide
  Seed: DPRMCSLMQGSTLPRRS
DPRMFSLLQNSTSPRRS

SEQ ID NO: 63663 - protein, 17 aa, Artificial Sequence
  Description of Artificial Sequence: Synthetic peptide
  Seed: DPRMCSLMQGSTLPRRS
DPRMFSLLQNSTTPRRS

SEQ ID NO: 63664 - protein, 17 aa, Artificial Sequence
  Description of Artificial Sequence: Synthetic peptide
  Seed: DPRMCSLMQGSTLPRRS
DPRMFSLLQNSTVPRRS

SEQ ID NO: 63665 - protein, 17 aa, Artificial Sequence
  Description of Artificial Sequence: Synthetic peptide
  Seed: DPRMCSLMQGSTLPRRS
DPRMFSLLQPSTAPRRS

SEQ ID NO: 63666 - protein, 17 aa, Artificial Sequence
  Description of Artificial Sequence: Synthetic peptide
  Seed: DPRMCSLMQGSTLPRRS
DPRMFSLLQPSTCPRRS

SEQ ID NO: 63667 - protein, 17 aa, Artificial Sequence
  Description of Artificial Sequence: Synthetic peptide
  Seed: DPRMCSLMQGSTLPRRS
DPRMFSLLQPSTDPRRS

SEQ ID NO: 63668 - protein, 17 aa, Artificial Sequence
  Description of Artificial Sequence: Synthetic peptide
  Seed: DPRMCSLMQGSTLPRRS
DPRMFSLLQPSTEPRRS

SEQ ID NO: 63669 - protein, 17 aa, Artificial Sequence
  Description of Artificial Sequence: Synthetic peptide
  Seed: DPRMCSLMQGSTLPRRS
DPRMFSLLQPSTFPRRS

SEQ ID NO: 63670 - protein, 17 aa, Artificial Sequence
  Description of Artificial Sequence: Synthetic peptide
  Seed: DPRMCSLMQGSTLPRRS
DPRMFSLLQPSTGPRRS

SEQ ID NO: 63671 - protein, 17 aa, Artificial Sequence
  Description of Artificial Sequence: Synthetic peptide
  Seed: DPRMCSLMQGSTLPRRS
DPRMFSLLQPSTHPRRS

SEQ ID NO: 63672 - protein, 17 aa, Artificial Sequence
  Description of Artificial Sequence: Synthetic peptide
  Seed: DPRMCSLMQGSTLPRRS
DPRMFSLLQPSTIPRRS

SEQ ID NO: 63673 - protein, 17 aa, Artificial Sequence
  Description of Artificial Sequence: Synthetic peptide
  Seed: DPRMCSLMQGSTLPRRS
DPRMFSLLQPSTLPRRS

SEQ ID NO: 63674 - protein, 17 aa, Artificial Sequence
  Description of Artificial Sequence: Synthetic peptide
  Seed: DPRMCSLMQGSTLPRRS
DPRMFSLLQPSTMPRRS

SEQ ID NO: 63675 - protein, 17 aa, Artificial Sequence
  Description of Artificial Sequence: Synthetic peptide
  Seed: DPRMCSLMQGSTLPRRS
DPRMFSLLQPSTNPRRS

SEQ ID NO: 63676 - protein, 17 aa, Artificial Sequence
  Description of Artificial Sequence: Synthetic peptide
  Seed: DPRMCSLMQGSTLPRRS
DPRMFSLLQPSTPPRRS

SEQ ID NO: 63677 - protein, 17 aa, Artificial Sequence
  Description of Artificial Sequence: Synthetic peptide
  Seed: DPRMCSLMQGSTLPRRS
DPRMFSLLQPSTQPRRS

SEQ ID NO: 63678 - protein, 17 aa, Artificial Sequence
  Description of Artificial Sequence: Synthetic peptide
  Seed: DPRMCSLMQGSTLPRRS
DPRMFSLLQPSTSPRRS

SEQ ID NO: 63679 - protein, 17 aa, Artificial Sequence
  Description of Artificial Sequence: Synthetic peptide
  Seed: DPRMCSLMQGSTLPRRS
DPRMFSLLQPSTTPRRS

SEQ ID NO: 63680 - protein, 17 aa, Artificial Sequence
  Description of Artificial Sequence: Synthetic peptide
  Seed: DPRMCSLMQGSTLPRRS
DPRMFSLLQPSTVPRRS

SEQ ID NO: 63681 - protein, 17 aa, Artificial Sequence
  Description of Artificial Sequence: Synthetic peptide
  Seed: DPRMCSLMQGSTLPRRS
DPRMFSLLQPSTWPRRS

SEQ ID NO: 63682 - protein, 17 aa, Artificial Sequence
  Description of Artificial Sequence: Synthetic peptide
  Seed: DPRMCSLMQGSTLPRRS
DPRMFSLLQPSTYPRRS

SEQ ID NO: 63683 - protein, 17 aa, Artificial Sequence
  Description of Artificial Sequence: Synthetic peptide
  Seed: DPRMCSLMQGSTLPRRS
DPRMFSLLQQSTLPRRS

SEQ ID NO: 63684 - protein, 17 aa, Artificial Sequence
  Description of Artificial Sequence: Synthetic peptide
  Seed: DPRMCSLMQGSTLPRRS
DPRMFSLLQQSTVPRRS

SEQ ID NO: 63685 - protein, 17 aa, Artificial Sequence
  Description of Artificial Sequence: Synthetic peptide
  Seed: DPRMCSLMQGSTLPRRS
DPRMFSLLQSSTAPRRS

SEQ ID NO: 63686 - protein, 17 aa, Artificial Sequence
  Description of Artificial Sequence: Synthetic peptide
  Seed: DPRMCSLMQGSTLPRRS
DPRMFSLLQSSTCPRRS

SEQ ID NO: 63687 - protein, 17 aa, Artificial Sequence
  Description of Artificial Sequence: Synthetic peptide
  Seed: DPRMCSLMQGSTLPRRS
DPRMFSLLQSSTDPRRS

SEQ ID NO: 63688 - protein, 17 aa, Artificial Sequence
  Description of Artificial Sequence: Synthetic peptide
  Seed: DPRMCSLMQGSTLPRRS
DPRMFSLLQSSTEPRRS

SEQ ID NO: 63689 - protein, 17 aa, Artificial Sequence
  Description of Artificial Sequence: Synthetic peptide
  Seed: DPRMCSLMQGSTLPRRS
DPRMFSLLQSSTFPRRS

SEQ ID NO: 63690 - protein, 17 aa, Artificial Sequence
  Description of Artificial Sequence: Synthetic peptide
  Seed: DPRMCSLMQGSTLPRRS
DPRMFSLLQSSTGPRRS

SEQ ID NO: 63691 - protein, 17 aa, Artificial Sequence
  Description of Artificial Sequence: Synthetic peptide
  Seed: DPRMCSLMQGSTLPRRS
DPRMFSLLQSSTHPRRS

SEQ ID NO: 63692 - protein, 17 aa, Artificial Sequence
  Description of Artificial Sequence: Synthetic peptide
  Seed: DPRMCSLMQGSTLPRRS
DPRMFSLLQSSTIPRRS

SEQ ID NO: 63693 - protein, 17 aa, Artificial Sequence
  Description of Artificial Sequence: Synthetic peptide
  Seed: DPRMCSLMQGSTLPRRS
DPRMFSLLQSSTLPRRS

SEQ ID NO: 63694 - protein, 17 aa, Artificial Sequence
  Description of Artificial Sequence: Synthetic peptide
  Seed: DPRMCSLMQGSTLPRRS
DPRMFSLLQSSTMPRRS

SEQ ID NO: 63695 - protein, 17 aa, Artificial Sequence
  Description of Artificial Sequence: Synthetic peptide
  Seed: DPRMCSLMQGSTLPRRS
DPRMFSLLQSSTNPRRS

SEQ ID NO: 63696 - protein, 17 aa, Artificial Sequence
  Description of Artificial Sequence: Synthetic peptide
  Seed: DPRMCSLMQGSTLPRRS
DPRMFSLLQSSTPPRRS

SEQ ID NO: 63697 - protein, 17 aa, Artificial Sequence
  Description of Artificial Sequence: Synthetic peptide
  Seed: DPRMCSLMQGSTLPRRS
DPRMFSLLQSSTQPRRS

SEQ ID NO: 63698 - protein, 17 aa, Artificial Sequence
  Description of Artificial Sequence: Synthetic peptide
  Seed: DPRMCSLMQGSTLPRRS
DPRMFSLLQSSTSPRRS

SEQ ID NO: 63699 - protein, 17 aa, Artificial Sequence
  Description of Artificial Sequence: Synthetic peptide
  Seed: DPRMCSLMQGSTLPRRS
DPRMFSLLQSSTTPRRS

SEQ ID NO: 63700 - protein, 17 aa, Artificial Sequence
  Description of Artificial Sequence: Synthetic peptide
  Seed: DPRMCSLMQGSTLPRRS
DPRMFSLLQSSTVPRRS

SEQ ID NO: 63701 - protein, 17 aa, Artificial Sequence
  Description of Artificial Sequence: Synthetic peptide
  Seed: DPRMCSLMQGSTLPRRS
DPRMFSLLQSSTWPRRS

SEQ ID NO: 63702 - protein, 17 aa, Artificial Sequence
  Description of Artificial Sequence: Synthetic peptide
  Seed: DPRMCSLMQGSTLPRRS
DPRMFSLLQSSTYPRRS

SEQ ID NO: 63703 - protein, 17 aa, Artificial Sequence
  Description of Artificial Sequence: Synthetic peptide
  Seed: DPRMCSLMQGSTLPRRS
DPRMFSLLQTSTAPRRS

SEQ ID NO: 63704 - protein, 17 aa, Artificial Sequence
  Description of Artificial Sequence: Synthetic peptide
  Seed: DPRMCSLMQGSTLPRRS
DPRMFSLLQTSTCPRRS

SEQ ID NO: 63705 - protein, 17 aa, Artificial Sequence
  Description of Artificial Sequence: Synthetic peptide
  Seed: DPRMCSLMQGSTLPRRS
DPRMFSLLQTSTDPRRS

SEQ ID NO: 63706 - protein, 17 aa, Artificial Sequence
  Description of Artificial Sequence: Synthetic peptide
  Seed: DPRMCSLMQGSTLPRRS
DPRMFSLLQTSTEPRRS

SEQ ID NO: 63707 - protein, 17 aa, Artificial Sequence
  Description of Artificial Sequence: Synthetic peptide
  Seed: DPRMCSLMQGSTLPRRS
DPRMFSLLQTSTFPRRS

SEQ ID NO: 63708 - protein, 17 aa, Artificial Sequence
  Description of Artificial Sequence: Synthetic peptide
  Seed: DPRMCSLMQGSTLPRRS
DPRMFSLLQTSTGPRRS

SEQ ID NO: 63709 - protein, 17 aa, Artificial Sequence
  Description of Artificial Sequence: Synthetic peptide
  Seed: DPRMCSLMQGSTLPRRS
DPRMFSLLQTSTHPRRS

SEQ ID NO: 63710 - protein, 17 aa, Artificial Sequence
  Description of Artificial Sequence: Synthetic peptide
  Seed: DPRMCSLMQGSTLPRRS
DPRMFSLLQTSTIPRRS

SEQ ID NO: 63711 - protein, 17 aa, Artificial Sequence
  Description of Artificial Sequence: Synthetic peptide
  Seed: DPRMCSLMQGSTLPRRS
DPRMFSLLQTSTLPRRS

SEQ ID NO: 63712 - protein, 17 aa, Artificial Sequence
  Description of Artificial Sequence: Synthetic peptide
  Seed: DPRMCSLMQGSTLPRRS
DPRMFSLLQTSTMPRRS

SEQ ID NO: 63713 - protein, 17 aa, Artificial Sequence
  Description of Artificial Sequence: Synthetic peptide
  Seed: DPRMCSLMQGSTLPRRS
DPRMFSLLQTSTNPRRS

SEQ ID NO: 63714 - protein, 17 aa, Artificial Sequence
  Description of Artificial Sequence: Synthetic peptide
  Seed: DPRMCSLMQGSTLPRRS
DPRMFSLLQTSTPPRRS

SEQ ID NO: 63715 - protein, 17 aa, Artificial Sequence
  Description of Artificial Sequence: Synthetic peptide
  Seed: DPRMCSLMQGSTLPRRS
DPRMFSLLQTSTQPRRS

SEQ ID NO: 63716 - protein, 17 aa, Artificial Sequence
  Description of Artificial Sequence: Synthetic peptide
  Seed: DPRMCSLMQGSTLPRRS
DPRMFSLLQTSTSPRRS

SEQ ID NO: 63717 - protein, 17 aa, Artificial Sequence
  Description of Artificial Sequence: Synthetic peptide
  Seed: DPRMCSLMQGSTLPRRS
DPRMFSLLQTSTTPRRS

SEQ ID NO: 63718 - protein, 17 aa, Artificial Sequence
  Description of Artificial Sequence: Synthetic peptide
  Seed: DPRMCSLMQGSTLPRRS
DPRMFSLLQTSTVPRRS

SEQ ID NO: 63719 - protein, 17 aa, Artificial Sequence
  Description of Artificial Sequence: Synthetic peptide
  Seed: DPRMCSLMQGSTLPRRS
DPRMFSLLQVSTAPRRS

SEQ ID NO: 63720 - protein, 17 aa, Artificial Sequence
  Description of Artificial Sequence: Synthetic peptide
  Seed: DPRMCSLMQGSTLPRRS
DPRMFSLLQVSTCPRRS

SEQ ID NO: 63721 - protein, 17 aa, Artificial Sequence
  Description of Artificial Sequence: Synthetic peptide
  Seed: DPRMCSLMQGSTLPRRS
DPRMFSLLQVSTDPRRS

SEQ ID NO: 63722 - protein, 17 aa, Artificial Sequence
  Description of Artificial Sequence: Synthetic peptide
  Seed: DPRMCSLMQGSTLPRRS
DPRMFSLLQVSTEPRRS

SEQ ID NO: 63723 - protein, 17 aa, Artificial Sequence
  Description of Artificial Sequence: Synthetic peptide
  Seed: DPRMCSLMQGSTLPRRS
DPRMFSLLQVSTGPRRS

SEQ ID NO: 63724 - protein, 17 aa, Artificial Sequence
  Description of Artificial Sequence: Synthetic peptide
  Seed: DPRMCSLMQGSTLPRRS
DPRMFSLLQVSTHPRRS

SEQ ID NO: 63725 - protein, 17 aa, Artificial Sequence
  Description of Artificial Sequence: Synthetic peptide
  Seed: DPRMCSLMQGSTLPRRS
DPRMFSLLQVSTIPRRS

SEQ ID NO: 63726 - protein, 17 aa, Artificial Sequence
  Description of Artificial Sequence: Synthetic peptide
  Seed: DPRMCSLMQGSTLPRRS
DPRMFSLLQVSTLPRRS

SEQ ID NO: 63727 - protein, 17 aa, Artificial Sequence
  Description of Artificial Sequence: Synthetic peptide
  Seed: DPRMCSLMQGSTLPRRS
DPRMFSLLQVSTMPRRS

SEQ ID NO: 63728 - protein, 17 aa, Artificial Sequence
  Description of Artificial Sequence: Synthetic peptide
  Seed: DPRMCSLMQGSTLPRRS
DPRMFSLLQVSTNPRRS

SEQ ID NO: 63729 - protein, 17 aa, Artificial Sequence
  Description of Artificial Sequence: Synthetic peptide
  Seed: DPRMCSLMQGSTLPRRS
DPRMFSLLQVSTPPRRS

SEQ ID NO: 63730 - protein, 17 aa, Artificial Sequence
  Description of Artificial Sequence: Synthetic peptide
  Seed: DPRMCSLMQGSTLPRRS
DPRMFSLLQVSTQPRRS

SEQ ID NO: 63731 - protein, 17 aa, Artificial Sequence
  Description of Artificial Sequence: Synthetic peptide
  Seed: DPRMCSLMQGSTLPRRS
DPRMFSLLQVSTSPRRS

SEQ ID NO: 63732 - protein, 17 aa, Artificial Sequence
  Description of Artificial Sequence: Synthetic peptide
  Seed: DPRMCSLMQGSTLPRRS
DPRMFSLLQVSTTPRRS

SEQ ID NO: 63733 - protein, 17 aa, Artificial Sequence
  Description of Artificial Sequence: Synthetic peptide
  Seed: DPRMCSLMQGSTLPRRS
DPRMFSLLQVSTVPRRS

SEQ ID NO: 63734 - protein, 17 aa, Artificial Sequence
  Description of Artificial Sequence: Synthetic peptide
  Seed: DPRMCSLMQGSTLPRRS
DPRMFSLMQASTAPRRS

SEQ ID NO: 63735 - protein, 17 aa, Artificial Sequence
  Description of Artificial Sequence: Synthetic peptide
  Seed: DPRMCSLMQGSTLPRRS
DPRMFSLMQASTCPRRS

SEQ ID NO: 63736 - protein, 17 aa, Artificial Sequence
  Description of Artificial Sequence: Synthetic peptide
  Seed: DPRMCSLMQGSTLPRRS
DPRMFSLMQASTDPRRS

SEQ ID NO: 63737 - protein, 17 aa, Artificial Sequence
  Description of Artificial Sequence: Synthetic peptide
  Seed: DPRMCSLMQGSTLPRRS
DPRMFSLMQASTEPRRS

SEQ ID NO: 63738 - protein, 17 aa, Artificial Sequence
  Description of Artificial Sequence: Synthetic peptide
  Seed: DPRMCSLMQGSTLPRRS
DPRMFSLMQASTFPRRS

SEQ ID NO: 63739 - protein, 17 aa, Artificial Sequence
  Description of Artificial Sequence: Synthetic peptide
  Seed: DPRMCSLMQGSTLPRRS
DPRMFSLMQASTGPRRS

SEQ ID NO: 63740 - protein, 17 aa, Artificial Sequence
  Description of Artificial Sequence: Synthetic peptide
  Seed: DPRMCSLMQGSTLPRRS
DPRMFSLMQASTHPRRS

SEQ ID NO: 63741 - protein, 17 aa, Artificial Sequence
  Description of Artificial Sequence: Synthetic peptide
  Seed: DPRMCSLMQGSTLPRRS
DPRMFSLMQASTIPRRS

SEQ ID NO: 63742 - protein, 17 aa, Artificial Sequence
  Description of Artificial Sequence: Synthetic peptide
  Seed: DPRMCSLMQGSTLPRRS
DPRMFSLMQASTKPRRS

SEQ ID NO: 63743 - protein, 17 aa, Artificial Sequence
  Description of Artificial Sequence: Synthetic peptide
  Seed: DPRMCSLMQGSTLPRRS
DPRMFSLMQASTLPRRS

SEQ ID NO: 63744 - protein, 17 aa, Artificial Sequence
  Description of Artificial Sequence: Synthetic peptide
  Seed: DPRMCSLMQGSTLPRRS
DPRMFSLMQASTMPRRS

SEQ ID NO: 63745 - protein, 17 aa, Artificial Sequence
  Description of Artificial Sequence: Synthetic peptide
  Seed: DPRMCSLMQGSTLPRRS
DPRMFSLMQASTNPRRS

SEQ ID NO: 63746 - protein, 17 aa, Artificial Sequence
  Description of Artificial Sequence: Synthetic peptide
  Seed: DPRMCSLMQGSTLPRRS
DPRMFSLMQASTPPRRS

SEQ ID NO: 63747 - protein, 17 aa, Artificial Sequence
  Description of Artificial Sequence: Synthetic peptide
  Seed: DPRMCSLMQGSTLPRRS
DPRMFSLMQASTQPRRS

SEQ ID NO: 63748 - protein, 17 aa, Artificial Sequence
  Description of Artificial Sequence: Synthetic peptide
  Seed: DPRMCSLMQGSTLPRRS
DPRMFSLMQASTRPRRS

SEQ ID NO: 63749 - protein, 17 aa, Artificial Sequence
  Description of Artificial Sequence: Synthetic peptide
  Seed: DPRMCSLMQGSTLPRRS
DPRMFSLMQASTSPRRS

SEQ ID NO: 63750 - protein, 17 aa, Artificial Sequence
  Description of Artificial Sequence: Synthetic peptide
  Seed: DPRMCSLMQGSTLPRRS
DPRMFSLMQASTTPRRS

SEQ ID NO: 63751 - protein, 17 aa, Artificial Sequence
  Description of Artificial Sequence: Synthetic peptide
  Seed: DPRMCSLMQGSTLPRRS
DPRMFSLMQASTVPRRS

SEQ ID NO: 63752 - protein, 17 aa, Artificial Sequence
  Description of Artificial Sequence: Synthetic peptide
  Seed: DPRMCSLMQGSTLPRRS
DPRMFSLMQASTWPRRS

SEQ ID NO: 63753 - protein, 17 aa, Artificial Sequence
  Description of Artificial Sequence: Synthetic peptide
  Seed: DPRMCSLMQGSTLPRRS
DPRMFSLMQASTYPRRS

SEQ ID NO: 63754 - protein, 17 aa, Artificial Sequence
  Description of Artificial Sequence: Synthetic peptide
  Seed: DPRMCSLMQGSTLPRRS
DPRMFSLMQCSTAPRRS

SEQ ID NO: 63755 - protein, 17 aa, Artificial Sequence
  Description of Artificial Sequence: Synthetic peptide
  Seed: DPRMCSLMQGSTLPRRS
DPRMFSLMQCSTIPRRS

SEQ ID NO: 63756 - protein, 17 aa, Artificial Sequence
  Description of Artificial Sequence: Synthetic peptide
  Seed: DPRMCSLMQGSTLPRRS
DPRMFSLMQCSTLPRRS

SEQ ID NO: 63757 - protein, 17 aa, Artificial Sequence
  Description of Artificial Sequence: Synthetic peptide
  Seed: DPRMCSLMQGSTLPRRS
DPRMFSLMQCSTSPRRS

SEQ ID NO: 63758 - protein, 17 aa, Artificial Sequence
  Description of Artificial Sequence: Synthetic peptide
  Seed: DPRMCSLMQGSTLPRRS
DPRMFSLMQCSTVPRRS

SEQ ID NO: 63759 - protein, 17 aa, Artificial Sequence
  Description of Artificial Sequence: Synthetic peptide
  Seed: DPRMCSLMQGSTLPRRS
DPRMFSLMQESTAPRRS

SEQ ID NO: 63760 - protein, 17 aa, Artificial Sequence
  Description of Artificial Sequence: Synthetic peptide
  Seed: DPRMCSLMQGSTLPRRS
DPRMFSLMQFSTAPRRS

SEQ ID NO: 63761 - protein, 17 aa, Artificial Sequence
  Description of Artificial Sequence: Synthetic peptide
  Seed: DPRMCSLMQGSTLPRRS
DPRMFSLMQGSTAPRRS

SEQ ID NO: 63762 - protein, 17 aa, Artificial Sequence
  Description of Artificial Sequence: Synthetic peptide
  Seed: DPRMCSLMQGSTLPRRS
DPRMFSLMQGSTCPRRS

SEQ ID NO: 63763 - protein, 17 aa, Artificial Sequence
  Description of Artificial Sequence: Synthetic peptide
  Seed: DPRMCSLMQGSTLPRRS
DPRMFSLMQGSTFPRRS

SEQ ID NO: 63764 - protein, 17 aa, Artificial Sequence
  Description of Artificial Sequence: Synthetic peptide
  Seed: DPRMCSLMQGSTLPRRS
DPRMFSLMQGSTGPRRS

SEQ ID NO: 63765 - protein, 17 aa, Artificial Sequence
  Description of Artificial Sequence: Synthetic peptide
  Seed: DPRMCSLMQGSTLPRRS
DPRMFSLMQGSTHPRRS

SEQ ID NO: 63766 - protein, 17 aa, Artificial Sequence
  Description of Artificial Sequence: Synthetic peptide
  Seed: DPRMCSLMQGSTLPRRS
DPRMFSLMQGSTIPRRS

SEQ ID NO: 63767 - protein, 17 aa, Artificial Sequence
  Description of Artificial Sequence: Synthetic peptide
  Seed: DPRMCSLMQGSTLPRRS
DPRMFSLMQGSTLPRRS

SEQ ID NO: 63768 - protein, 17 aa, Artificial Sequence
  Description of Artificial Sequence: Synthetic peptide
  Seed: DPRMCSLMQGSTLPRRS
DPRMFSLMQGSTMPRRS

SEQ ID NO: 63769 - protein, 17 aa, Artificial Sequence
  Description of Artificial Sequence: Synthetic peptide
  Seed: DPRMCSLMQGSTLPRRS
DPRMFSLMQGSTNPRRS

SEQ ID NO: 63770 - protein, 17 aa, Artificial Sequence
  Description of Artificial Sequence: Synthetic peptide
  Seed: DPRMCSLMQGSTLPRRS
DPRMFSLMQGSTPPRRS

SEQ ID NO: 63771 - protein, 17 aa, Artificial Sequence
  Description of Artificial Sequence: Synthetic peptide
  Seed: DPRMCSLMQGSTLPRRS
DPRMFSLMQGSTQPRRS

SEQ ID NO: 63772 - protein, 17 aa, Artificial Sequence
  Description of Artificial Sequence: Synthetic peptide
  Seed: DPRMCSLMQGSTLPRRS
DPRMFSLMQGSTSPRRS

SEQ ID NO: 63773 - protein, 17 aa, Artificial Sequence
  Description of Artificial Sequence: Synthetic peptide
  Seed: DPRMCSLMQGSTLPRRS
DPRMFSLMQGSTTPRRS

SEQ ID NO: 63774 - protein, 17 aa, Artificial Sequence
  Description of Artificial Sequence: Synthetic peptide
  Seed: DPRMCSLMQGSTLPRRS
DPRMFSLMQGSTVPRRS

SEQ ID NO: 63775 - protein, 17 aa, Artificial Sequence
  Description of Artificial Sequence: Synthetic peptide
  Seed: DPRMCSLMQGSTLPRRS
DPRMFSLMQGSTWPRRS

SEQ ID NO: 63776 - protein, 17 aa, Artificial Sequence
  Description of Artificial Sequence: Synthetic peptide
  Seed: DPRMCSLMQGSTLPRRS
DPRMFSLMQGSTYPRRS

SEQ ID NO: 63777 - protein, 17 aa, Artificial Sequence
  Description of Artificial Sequence: Synthetic peptide
  Seed: DPRMCSLMQGSTLPRRS
DPRMFSLMQHSTAPRRS

SEQ ID NO: 63778 - protein, 17 aa, Artificial Sequence
  Description of Artificial Sequence: Synthetic peptide
  Seed: DPRMCSLMQGSTLPRRS
DPRMFSLMQHSTIPRRS

SEQ ID NO: 63779 - protein, 17 aa, Artificial Sequence
  Description of Artificial Sequence: Synthetic peptide
  Seed: DPRMCSLMQGSTLPRRS
DPRMFSLMQHSTLPRRS

SEQ ID NO: 63780 - protein, 17 aa, Artificial Sequence
  Description of Artificial Sequence: Synthetic peptide
  Seed: DPRMCSLMQGSTLPRRS
DPRMFSLMQHSTVPRRS

SEQ ID NO: 63781 - protein, 17 aa, Artificial Sequence
  Description of Artificial Sequence: Synthetic peptide
  Seed: DPRMCSLMQGSTLPRRS
DPRMFSLMQISTAPRRS

SEQ ID NO: 63782 - protein, 17 aa, Artificial Sequence
  Description of Artificial Sequence: Synthetic peptide
  Seed: DPRMCSLMQGSTLPRRS
DPRMFSLMQISTCPRRS

SEQ ID NO: 63783 - protein, 17 aa, Artificial Sequence
  Description of Artificial Sequence: Synthetic peptide
  Seed: DPRMCSLMQGSTLPRRS
DPRMFSLMQISTDPRRS

SEQ ID NO: 63784 - protein, 17 aa, Artificial Sequence
  Description of Artificial Sequence: Synthetic peptide
  Seed: DPRMCSLMQGSTLPRRS
DPRMFSLMQISTEPRRS

SEQ ID NO: 63785 - protein, 17 aa, Artificial Sequence
  Description of Artificial Sequence: Synthetic peptide
  Seed: DPRMCSLMQGSTLPRRS
DPRMFSLMQISTGPRRS

SEQ ID NO: 63786 - protein, 17 aa, Artificial Sequence
  Description of Artificial Sequence: Synthetic peptide
  Seed: DPRMCSLMQGSTLPRRS
DPRMFSLMQISTHPRRS

SEQ ID NO: 63787 - protein, 17 aa, Artificial Sequence
  Description of Artificial Sequence: Synthetic peptide
  Seed: DPRMCSLMQGSTLPRRS
DPRMFSLMQISTIPRRS

SEQ ID NO: 63788 - protein, 17 aa, Artificial Sequence
  Description of Artificial Sequence: Synthetic peptide
  Seed: DPRMCSLMQGSTLPRRS
DPRMFSLMQISTLPRRS

SEQ ID NO: 63789 - protein, 17 aa, Artificial Sequence
  Description of Artificial Sequence: Synthetic peptide
  Seed: DPRMCSLMQGSTLPRRS
DPRMFSLMQISTMPRRS

SEQ ID NO: 63790 - protein, 17 aa, Artificial Sequence
  Description of Artificial Sequence: Synthetic peptide
  Seed: DPRMCSLMQGSTLPRRS
DPRMFSLMQISTNPRRS

SEQ ID NO: 63791 - protein, 17 aa, Artificial Sequence
  Description of Artificial Sequence: Synthetic peptide
  Seed: DPRMCSLMQGSTLPRRS
DPRMFSLMQISTPPRRS

SEQ ID NO: 63792 - protein, 17 aa, Artificial Sequence
  Description of Artificial Sequence: Synthetic peptide
  Seed: DPRMCSLMQGSTLPRRS
DPRMFSLMQISTQPRRS

SEQ ID NO: 63793 - protein, 17 aa, Artificial Sequence
  Description of Artificial Sequence: Synthetic peptide
  Seed: DPRMCSLMQGSTLPRRS
DPRMFSLMQISTSPRRS

SEQ ID NO: 63794 - protein, 17 aa, Artificial Sequence
  Description of Artificial Sequence: Synthetic peptide
  Seed: DPRMCSLMQGSTLPRRS
DPRMFSLMQISTTPRRS

SEQ ID NO: 63795 - protein, 17 aa, Artificial Sequence
  Description of Artificial Sequence: Synthetic peptide
  Seed: DPRMCSLMQGSTLPRRS
DPRMFSLMQISTVPRRS

SEQ ID NO: 63796 - protein, 17 aa, Artificial Sequence
  Description of Artificial Sequence: Synthetic peptide
  Seed: DPRMCSLMQGSTLPRRS
DPRMFSLMQLSTAPRRS

SEQ ID NO: 63797 - protein, 17 aa, Artificial Sequence
  Description of Artificial Sequence: Synthetic peptide
  Seed: DPRMCSLMQGSTLPRRS
DPRMFSLMQLSTGPRRS

SEQ ID NO: 63798 - protein, 17 aa, Artificial Sequence
  Description of Artificial Sequence: Synthetic peptide
  Seed: DPRMCSLMQGSTLPRRS
DPRMFSLMQLSTHPRRS

SEQ ID NO: 63799 - protein, 17 aa, Artificial Sequence
  Description of Artificial Sequence: Synthetic peptide
  Seed: DPRMCSLMQGSTLPRRS
DPRMFSLMQLSTIPRRS

SEQ ID NO: 63800 - protein, 17 aa, Artificial Sequence
  Description of Artificial Sequence: Synthetic peptide
  Seed: DPRMCSLMQGSTLPRRS
DPRMFSLMQLSTLPRRS

SEQ ID NO: 63801 - protein, 17 aa, Artificial Sequence
  Description of Artificial Sequence: Synthetic peptide
  Seed: DPRMCSLMQGSTLPRRS
DPRMFSLMQLSTMPRRS

SEQ ID NO: 63802 - protein, 17 aa, Artificial Sequence
  Description of Artificial Sequence: Synthetic peptide
  Seed: DPRMCSLMQGSTLPRRS
DPRMFSLMQLSTNPRRS

SEQ ID NO: 63803 - protein, 17 aa, Artificial Sequence
  Description of Artificial Sequence: Synthetic peptide
  Seed: DPRMCSLMQGSTLPRRS
DPRMFSLMQLSTSPRRS

SEQ ID NO: 63804 - protein, 17 aa, Artificial Sequence
  Description of Artificial Sequence: Synthetic peptide
  Seed: DPRMCSLMQGSTLPRRS
DPRMFSLMQLSTTPRRS

SEQ ID NO: 63805 - protein, 17 aa, Artificial Sequence
  Description of Artificial Sequence: Synthetic peptide
  Seed: DPRMCSLMQGSTLPRRS
DPRMFSLMQLSTVPRRS

SEQ ID NO: 63806 - protein, 17 aa, Artificial Sequence
  Description of Artificial Sequence: Synthetic peptide
  Seed: DPRMCSLMQGSTLPRRS
DPRMFSLMQMSTAPRRS

SEQ ID NO: 63807 - protein, 17 aa, Artificial Sequence
  Description of Artificial Sequence: Synthetic peptide
  Seed: DPRMCSLMQGSTLPRRS
DPRMFSLMQMSTGPRRS

SEQ ID NO: 63808 - protein, 17 aa, Artificial Sequence
  Description of Artificial Sequence: Synthetic peptide
  Seed: DPRMCSLMQGSTLPRRS
DPRMFSLMQMSTHPRRS

SEQ ID NO: 63809 - protein, 17 aa, Artificial Sequence
  Description of Artificial Sequence: Synthetic peptide
  Seed: DPRMCSLMQGSTLPRRS
DPRMFSLMQMSTIPRRS

SEQ ID NO: 63810 - protein, 17 aa, Artificial Sequence
  Description of Artificial Sequence: Synthetic peptide
  Seed: DPRMCSLMQGSTLPRRS
DPRMFSLMQMSTLPRRS

SEQ ID NO: 63811 - protein, 17 aa, Artificial Sequence
  Description of Artificial Sequence: Synthetic peptide
  Seed: DPRMCSLMQGSTLPRRS
DPRMFSLMQMSTMPRRS

SEQ ID NO: 63812 - protein, 17 aa, Artificial Sequence
  Description of Artificial Sequence: Synthetic peptide
  Seed: DPRMCSLMQGSTLPRRS
DPRMFSLMQMSTNPRRS

SEQ ID NO: 63813 - protein, 17 aa, Artificial Sequence
  Description of Artificial Sequence: Synthetic peptide
  Seed: DPRMCSLMQGSTLPRRS
DPRMFSLMQMSTSPRRS

SEQ ID NO: 63814 - protein, 17 aa, Artificial Sequence
  Description of Artificial Sequence: Synthetic peptide
  Seed: DPRMCSLMQGSTLPRRS
DPRMFSLMQMSTTPRRS

SEQ ID NO: 63815 - protein, 17 aa, Artificial Sequence
  Description of Artificial Sequence: Synthetic peptide
  Seed: DPRMCSLMQGSTLPRRS
DPRMFSLMQMSTVPRRS

SEQ ID NO: 63816 - protein, 17 aa, Artificial Sequence
  Description of Artificial Sequence: Synthetic peptide
  Seed: DPRMCSLMQGSTLPRRS
DPRMFSLMQNSTAPRRS

SEQ ID NO: 63817 - protein, 17 aa, Artificial Sequence
  Description of Artificial Sequence: Synthetic peptide
  Seed: DPRMCSLMQGSTLPRRS
DPRMFSLMQNSTCPRRS

SEQ ID NO: 63818 - protein, 17 aa, Artificial Sequence
  Description of Artificial Sequence: Synthetic peptide
  Seed: DPRMCSLMQGSTLPRRS
DPRMFSLMQNSTFPRRS

SEQ ID NO: 63819 - protein, 17 aa, Artificial Sequence
  Description of Artificial Sequence: Synthetic peptide
  Seed: DPRMCSLMQGSTLPRRS
DPRMFSLMQNSTGPRRS

SEQ ID NO: 63820 - protein, 17 aa, Artificial Sequence
  Description of Artificial Sequence: Synthetic peptide
  Seed: DPRMCSLMQGSTLPRRS
DPRMFSLMQNSTHPRRS

SEQ ID NO: 63821 - protein, 17 aa, Artificial Sequence
  Description of Artificial Sequence: Synthetic peptide
  Seed: DPRMCSLMQGSTLPRRS
DPRMFSLMQNSTIPRRS

SEQ ID NO: 63822 - protein, 17 aa, Artificial Sequence
  Description of Artificial Sequence: Synthetic peptide
  Seed: DPRMCSLMQGSTLPRRS
DPRMFSLMQNSTLPRRS

SEQ ID NO: 63823 - protein, 17 aa, Artificial Sequence
  Description of Artificial Sequence: Synthetic peptide
  Seed: DPRMCSLMQGSTLPRRS
DPRMFSLMQNSTMPRRS

SEQ ID NO: 63824 - protein, 17 aa, Artificial Sequence
  Description of Artificial Sequence: Synthetic peptide
  Seed: DPRMCSLMQGSTLPRRS
DPRMFSLMQNSTNPRRS

SEQ ID NO: 63825 - protein, 17 aa, Artificial Sequence
  Description of Artificial Sequence: Synthetic peptide
  Seed: DPRMCSLMQGSTLPRRS
DPRMFSLMQNSTQPRRS

SEQ ID NO: 63826 - protein, 17 aa, Artificial Sequence
  Description of Artificial Sequence: Synthetic peptide
  Seed: DPRMCSLMQGSTLPRRS
DPRMFSLMQNSTSPRRS

SEQ ID NO: 63827 - protein, 17 aa, Artificial Sequence
  Description of Artificial Sequence: Synthetic peptide
  Seed: DPRMCSLMQGSTLPRRS
DPRMFSLMQNSTTPRRS

SEQ ID NO: 63828 - protein, 17 aa, Artificial Sequence
  Description of Artificial Sequence: Synthetic peptide
  Seed: DPRMCSLMQGSTLPRRS
DPRMFSLMQNSTVPRRS

SEQ ID NO: 63829 - protein, 17 aa, Artificial Sequence
  Description of Artificial Sequence: Synthetic peptide
  Seed: DPRMCSLMQGSTLPRRS
DPRMFSLMQPSTAPRRS

SEQ ID NO: 63830 - protein, 17 aa, Artificial Sequence
  Description of Artificial Sequence: Synthetic peptide
  Seed: DPRMCSLMQGSTLPRRS
DPRMFSLMQPSTCPRRS

SEQ ID NO: 63831 - protein, 17 aa, Artificial Sequence
  Description of Artificial Sequence: Synthetic peptide
  Seed: DPRMCSLMQGSTLPRRS
DPRMFSLMQPSTDPRRS

SEQ ID NO: 63832 - protein, 17 aa, Artificial Sequence
  Description of Artificial Sequence: Synthetic peptide
  Seed: DPRMCSLMQGSTLPRRS
DPRMFSLMQPSTEPRRS

SEQ ID NO: 63833 - protein, 17 aa, Artificial Sequence
  Description of Artificial Sequence: Synthetic peptide
  Seed: DPRMCSLMQGSTLPRRS
DPRMFSLMQPSTFPRRS

SEQ ID NO: 63834 - protein, 17 aa, Artificial Sequence
  Description of Artificial Sequence: Synthetic peptide
  Seed: DPRMCSLMQGSTLPRRS
DPRMFSLMQPSTGPRRS

SEQ ID NO: 63835 - protein, 17 aa, Artificial Sequence
  Description of Artificial Sequence: Synthetic peptide
  Seed: DPRMCSLMQGSTLPRRS
DPRMFSLMQPSTHPRRS

SEQ ID NO: 63836 - protein, 17 aa, Artificial Sequence
  Description of Artificial Sequence: Synthetic peptide
  Seed: DPRMCSLMQGSTLPRRS
DPRMFSLMQPSTIPRRS

SEQ ID NO: 63837 - protein, 17 aa, Artificial Sequence
  Description of Artificial Sequence: Synthetic peptide
  Seed: DPRMCSLMQGSTLPRRS
DPRMFSLMQPSTLPRRS

SEQ ID NO: 63838 - protein, 17 aa, Artificial Sequence
  Description of Artificial Sequence: Synthetic peptide
  Seed: DPRMCSLMQGSTLPRRS
DPRMFSLMQPSTMPRRS

SEQ ID NO: 63839 - protein, 17 aa, Artificial Sequence
  Description of Artificial Sequence: Synthetic peptide
  Seed: DPRMCSLMQGSTLPRRS
DPRMFSLMQPSTNPRRS

SEQ ID NO: 63840 - protein, 17 aa, Artificial Sequence
  Description of Artificial Sequence: Synthetic peptide
  Seed: DPRMCSLMQGSTLPRRS
DPRMFSLMQPSTPPRRS

SEQ ID NO: 63841 - protein, 17 aa, Artificial Sequence
  Description of Artificial Sequence: Synthetic peptide
  Seed: DPRMCSLMQGSTLPRRS
DPRMFSLMQPSTQPRRS

SEQ ID NO: 63842 - protein, 17 aa, Artificial Sequence
  Description of Artificial Sequence: Synthetic peptide
  Seed: DPRMCSLMQGSTLPRRS
DPRMFSLMQPSTSPRRS

SEQ ID NO: 63843 - protein, 17 aa, Artificial Sequence
  Description of Artificial Sequence: Synthetic peptide
  Seed: DPRMCSLMQGSTLPRRS
DPRMFSLMQPSTTPRRS

SEQ ID NO: 63844 - protein, 17 aa, Artificial Sequence
  Description of Artificial Sequence: Synthetic peptide
  Seed: DPRMCSLMQGSTLPRRS
DPRMFSLMQPSTVPRRS

SEQ ID NO: 63845 - protein, 17 aa, Artificial Sequence
  Description of Artificial Sequence: Synthetic peptide
  Seed: DPRMCSLMQGSTLPRRS
DPRMFSLMQPSTWPRRS

SEQ ID NO: 63846 - protein, 17 aa, Artificial Sequence
  Description of Artificial Sequence: Synthetic peptide
  Seed: DPRMCSLMQGSTLPRRS
DPRMFSLMQPSTYPRRS

SEQ ID NO: 63847 - protein, 17 aa, Artificial Sequence
  Description of Artificial Sequence: Synthetic peptide
  Seed: DPRMCSLMQGSTLPRRS
DPRMFSLMQQSTAPRRS

SEQ ID NO: 63848 - protein, 17 aa, Artificial Sequence
  Description of Artificial Sequence: Synthetic peptide
  Seed: DPRMCSLMQGSTLPRRS
DPRMFSLMQQSTIPRRS

SEQ ID NO: 63849 - protein, 17 aa, Artificial Sequence
  Description of Artificial Sequence: Synthetic peptide
  Seed: DPRMCSLMQGSTLPRRS
DPRMFSLMQQSTLPRRS

SEQ ID NO: 63850 - protein, 17 aa, Artificial Sequence
  Description of Artificial Sequence: Synthetic peptide
  Seed: DPRMCSLMQGSTLPRRS
DPRMFSLMQQSTVPRRS

SEQ ID NO: 63851 - protein, 17 aa, Artificial Sequence
  Description of Artificial Sequence: Synthetic peptide
  Seed: DPRMCSLMQGSTLPRRS
DPRMFSLMQSSTAPRRS

SEQ ID NO: 63852 - protein, 17 aa, Artificial Sequence
  Description of Artificial Sequence: Synthetic peptide
  Seed: DPRMCSLMQGSTLPRRS
DPRMFSLMQSSTCPRRS

SEQ ID NO: 63853 - protein, 17 aa, Artificial Sequence
  Description of Artificial Sequence: Synthetic peptide
  Seed: DPRMCSLMQGSTLPRRS
DPRMFSLMQSSTDPRRS

SEQ ID NO: 63854 - protein, 17 aa, Artificial Sequence
  Description of Artificial Sequence: Synthetic peptide
  Seed: DPRMCSLMQGSTLPRRS
DPRMFSLMQSSTEPRRS

SEQ ID NO: 63855 - protein, 17 aa, Artificial Sequence
  Description of Artificial Sequence: Synthetic peptide
  Seed: DPRMCSLMQGSTLPRRS
DPRMFSLMQSSTFPRRS

SEQ ID NO: 63856 - protein, 17 aa, Artificial Sequence
  Description of Artificial Sequence: Synthetic peptide
  Seed: DPRMCSLMQGSTLPRRS
DPRMFSLMQSSTGPRRS

SEQ ID NO: 63857 - protein, 17 aa, Artificial Sequence
  Description of Artificial Sequence: Synthetic peptide
  Seed: DPRMCSLMQGSTLPRRS
DPRMFSLMQSSTHPRRS

SEQ ID NO: 63858 - protein, 17 aa, Artificial Sequence
  Description of Artificial Sequence: Synthetic peptide
  Seed: DPRMCSLMQGSTLPRRS
DPRMFSLMQSSTIPRRS

SEQ ID NO: 63859 - protein, 17 aa, Artificial Sequence
  Description of Artificial Sequence: Synthetic peptide
  Seed: DPRMCSLMQGSTLPRRS
DPRMFSLMQSSTLPRRS

SEQ ID NO: 63860 - protein, 17 aa, Artificial Sequence
  Description of Artificial Sequence: Synthetic peptide
  Seed: DPRMCSLMQGSTLPRRS
DPRMFSLMQSSTMPRRS

SEQ ID NO: 63861 - protein, 17 aa, Artificial Sequence
  Description of Artificial Sequence: Synthetic peptide
  Seed: DPRMCSLMQGSTLPRRS
DPRMFSLMQSSTNPRRS

SEQ ID NO: 63862 - protein, 17 aa, Artificial Sequence
  Description of Artificial Sequence: Synthetic peptide
  Seed: DPRMCSLMQGSTLPRRS
DPRMFSLMQSSTPPRRS

SEQ ID NO: 63863 - protein, 17 aa, Artificial Sequence
  Description of Artificial Sequence: Synthetic peptide
  Seed: DPRMCSLMQGSTLPRRS
DPRMFSLMQSSTQPRRS

SEQ ID NO: 63864 - protein, 17 aa, Artificial Sequence
  Description of Artificial Sequence: Synthetic peptide
  Seed: DPRMCSLMQGSTLPRRS
DPRMFSLMQSSTSPRRS

SEQ ID NO: 63865 - protein, 17 aa, Artificial Sequence
  Description of Artificial Sequence: Synthetic peptide
  Seed: DPRMCSLMQGSTLPRRS
DPRMFSLMQSSTTPRRS

SEQ ID NO: 63866 - protein, 17 aa, Artificial Sequence
  Description of Artificial Sequence: Synthetic peptide
  Seed: DPRMCSLMQGSTLPRRS
DPRMFSLMQSSTVPRRS

SEQ ID NO: 63867 - protein, 17 aa, Artificial Sequence
  Description of Artificial Sequence: Synthetic peptide
  Seed: DPRMCSLMQGSTLPRRS
DPRMFSLMQSSTWPRRS

SEQ ID NO: 63868 - protein, 17 aa, Artificial Sequence
  Description of Artificial Sequence: Synthetic peptide
  Seed: DPRMCSLMQGSTLPRRS
DPRMFSLMQSSTYPRRS

SEQ ID NO: 63869 - protein, 17 aa, Artificial Sequence
  Description of Artificial Sequence: Synthetic peptide
  Seed: DPRMCSLMQGSTLPRRS
DPRMFSLMQTSTAPRRS

SEQ ID NO: 63870 - protein, 17 aa, Artificial Sequence
  Description of Artificial Sequence: Synthetic peptide
  Seed: DPRMCSLMQGSTLPRRS
DPRMFSLMQTSTCPRRS

SEQ ID NO: 63871 - protein, 17 aa, Artificial Sequence
  Description of Artificial Sequence: Synthetic peptide
  Seed: DPRMCSLMQGSTLPRRS
DPRMFSLMQTSTDPRRS

SEQ ID NO: 63872 - protein, 17 aa, Artificial Sequence
  Description of Artificial Sequence: Synthetic peptide
  Seed: DPRMCSLMQGSTLPRRS
DPRMFSLMQTSTEPRRS

SEQ ID NO: 63873 - protein, 17 aa, Artificial Sequence
  Description of Artificial Sequence: Synthetic peptide
  Seed: DPRMCSLMQGSTLPRRS
DPRMFSLMQTSTFPRRS

SEQ ID NO: 63874 - protein, 17 aa, Artificial Sequence
  Description of Artificial Sequence: Synthetic peptide
  Seed: DPRMCSLMQGSTLPRRS
DPRMFSLMQTSTGPRRS

SEQ ID NO: 63875 - protein, 17 aa, Artificial Sequence
  Description of Artificial Sequence: Synthetic peptide
  Seed: DPRMCSLMQGSTLPRRS
DPRMFSLMQTSTHPRRS

SEQ ID NO: 63876 - protein, 17 aa, Artificial Sequence
  Description of Artificial Sequence: Synthetic peptide
  Seed: DPRMCSLMQGSTLPRRS
DPRMFSLMQTSTIPRRS

SEQ ID NO: 63877 - protein, 17 aa, Artificial Sequence
  Description of Artificial Sequence: Synthetic peptide
  Seed: DPRMCSLMQGSTLPRRS
DPRMFSLMQTSTLPRRS

SEQ ID NO: 63878 - protein, 17 aa, Artificial Sequence
  Description of Artificial Sequence: Synthetic peptide
  Seed: DPRMCSLMQGSTLPRRS
DPRMFSLMQTSTMPRRS

SEQ ID NO: 63879 - protein, 17 aa, Artificial Sequence
  Description of Artificial Sequence: Synthetic peptide
  Seed: DPRMCSLMQGSTLPRRS
DPRMFSLMQTSTNPRRS

SEQ ID NO: 63880 - protein, 17 aa, Artificial Sequence
  Description of Artificial Sequence: Synthetic peptide
  Seed: DPRMCSLMQGSTLPRRS
DPRMFSLMQTSTPPRRS

SEQ ID NO: 63881 - protein, 17 aa, Artificial Sequence
  Description of Artificial Sequence: Synthetic peptide
  Seed: DPRMCSLMQGSTLPRRS
DPRMFSLMQTSTQPRRS

SEQ ID NO: 63882 - protein, 17 aa, Artificial Sequence
  Description of Artificial Sequence: Synthetic peptide
  Seed: DPRMCSLMQGSTLPRRS
DPRMFSLMQTSTSPRRS

SEQ ID NO: 63883 - protein, 17 aa, Artificial Sequence
  Description of Artificial Sequence: Synthetic peptide
  Seed: DPRMCSLMQGSTLPRRS
DPRMFSLMQTSTTPRRS

SEQ ID NO: 63884 - protein, 17 aa, Artificial Sequence
  Description of Artificial Sequence: Synthetic peptide
  Seed: DPRMCSLMQGSTLPRRS
DPRMFSLMQTSTVPRRS

SEQ ID NO: 63885 - protein, 17 aa, Artificial Sequence
  Description of Artificial Sequence: Synthetic peptide
  Seed: DPRMCSLMQGSTLPRRS
DPRMFSLMQTSTWPRRS

SEQ ID NO: 63886 - protein, 17 aa, Artificial Sequence
  Description of Artificial Sequence: Synthetic peptide
  Seed: DPRMCSLMQGSTLPRRS
DPRMFSLMQVSTAPRRS

SEQ ID NO: 63887 - protein, 17 aa, Artificial Sequence
  Description of Artificial Sequence: Synthetic peptide
  Seed: DPRMCSLMQGSTLPRRS
DPRMFSLMQVSTCPRRS

SEQ ID NO: 63888 - protein, 17 aa, Artificial Sequence
  Description of Artificial Sequence: Synthetic peptide
  Seed: DPRMCSLMQGSTLPRRS
DPRMFSLMQVSTDPRRS

SEQ ID NO: 63889 - protein, 17 aa, Artificial Sequence
  Description of Artificial Sequence: Synthetic peptide
  Seed: DPRMCSLMQGSTLPRRS
DPRMFSLMQVSTEPRRS

SEQ ID NO: 63890 - protein, 17 aa, Artificial Sequence
  Description of Artificial Sequence: Synthetic peptide
  Seed: DPRMCSLMQGSTLPRRS
DPRMFSLMQVSTFPRRS

SEQ ID NO: 63891 - protein, 17 aa, Artificial Sequence
  Description of Artificial Sequence: Synthetic peptide
  Seed: DPRMCSLMQGSTLPRRS
DPRMFSLMQVSTGPRRS

SEQ ID NO: 63892 - protein, 17 aa, Artificial Sequence
  Description of Artificial Sequence: Synthetic peptide
  Seed: DPRMCSLMQGSTLPRRS
DPRMFSLMQVSTHPRRS

SEQ ID NO: 63893 - protein, 17 aa, Artificial Sequence
  Description of Artificial Sequence: Synthetic peptide
  Seed: DPRMCSLMQGSTLPRRS
DPRMFSLMQVSTIPRRS

SEQ ID NO: 63894 - protein, 17 aa, Artificial Sequence
  Description of Artificial Sequence: Synthetic peptide
  Seed: DPRMCSLMQGSTLPRRS
DPRMFSLMQVSTKPRRS

SEQ ID NO: 63895 - protein, 17 aa, Artificial Sequence
  Description of Artificial Sequence: Synthetic peptide
  Seed: DPRMCSLMQGSTLPRRS
DPRMFSLMQVSTLPRRS

SEQ ID NO: 63896 - protein, 17 aa, Artificial Sequence
  Description of Artificial Sequence: Synthetic peptide
  Seed: DPRMCSLMQGSTLPRRS
DPRMFSLMQVSTMPRRS

SEQ ID NO: 63897 - protein, 17 aa, Artificial Sequence
  Description of Artificial Sequence: Synthetic peptide
  Seed: DPRMCSLMQGSTLPRRS
DPRMFSLMQVSTNPRRS

SEQ ID NO: 63898 - protein, 17 aa, Artificial Sequence
  Description of Artificial Sequence: Synthetic peptide
  Seed: DPRMCSLMQGSTLPRRS
DPRMFSLMQVSTPPRRS

SEQ ID NO: 63899 - protein, 17 aa, Artificial Sequence
  Description of Artificial Sequence: Synthetic peptide
  Seed: DPRMCSLMQGSTLPRRS
DPRMFSLMQVSTQPRRS

SEQ ID NO: 63900 - protein, 17 aa, Artificial Sequence
  Description of Artificial Sequence: Synthetic peptide
  Seed: DPRMCSLMQGSTLPRRS
DPRMFSLMQVSTSPRRS

SEQ ID NO: 63901 - protein, 17 aa, Artificial Sequence
  Description of Artificial Sequence: Synthetic peptide
  Seed: DPRMCSLMQGSTLPRRS
DPRMFSLMQVSTTPRRS

SEQ ID NO: 63902 - protein, 17 aa, Artificial Sequence
  Description of Artificial Sequence: Synthetic peptide
  Seed: DPRMCSLMQGSTLPRRS
DPRMFSLMQVSTVPRRS

SEQ ID NO: 63903 - protein, 17 aa, Artificial Sequence
  Description of Artificial Sequence: Synthetic peptide
  Seed: DPRMCSLMQGSTLPRRS
DPRMFSLNQASTAPRRS

SEQ ID NO: 63904 - protein, 17 aa, Artificial Sequence
  Description of Artificial Sequence: Synthetic peptide
  Seed: DPRMCSLMQGSTLPRRS
DPRMFSLNQASTIPRRS

SEQ ID NO: 63905 - protein, 17 aa, Artificial Sequence
  Description of Artificial Sequence: Synthetic peptide
  Seed: DPRMCSLMQGSTLPRRS
DPRMFSLNQASTLPRRS

SEQ ID NO: 63906 - protein, 17 aa, Artificial Sequence
  Description of Artificial Sequence: Synthetic peptide
  Seed: DPRMCSLMQGSTLPRRS
DPRMFSLNQASTVPRRS

SEQ ID NO: 63907 - protein, 17 aa, Artificial Sequence
  Description of Artificial Sequence: Synthetic peptide
  Seed: DPRMCSLMQGSTLPRRS
DPRMFSLNQGSTLPRRS

SEQ ID NO: 63908 - protein, 17 aa, Artificial Sequence
  Description of Artificial Sequence: Synthetic peptide
  Seed: DPRMCSLMQGSTLPRRS
DPRMFSLNQGSTVPRRS

SEQ ID NO: 63909 - protein, 17 aa, Artificial Sequence
  Description of Artificial Sequence: Synthetic peptide
  Seed: DPRMCSLMQGSTLPRRS
DPRMFSLQQASTAPRRS

SEQ ID NO: 63910 - protein, 17 aa, Artificial Sequence
  Description of Artificial Sequence: Synthetic peptide
  Seed: DPRMCSLMQGSTLPRRS
DPRMFSLQQASTFPRRS

SEQ ID NO: 63911 - protein, 17 aa, Artificial Sequence
  Description of Artificial Sequence: Synthetic peptide
  Seed: DPRMCSLMQGSTLPRRS
DPRMFSLQQASTGPRRS

SEQ ID NO: 63912 - protein, 17 aa, Artificial Sequence
  Description of Artificial Sequence: Synthetic peptide
  Seed: DPRMCSLMQGSTLPRRS
DPRMFSLQQASTIPRRS

SEQ ID NO: 63913 - protein, 17 aa, Artificial Sequence
  Description of Artificial Sequence: Synthetic peptide
  Seed: DPRMCSLMQGSTLPRRS
DPRMFSLQQASTLPRRS

SEQ ID NO: 63914 - protein, 17 aa, Artificial Sequence
  Description of Artificial Sequence: Synthetic peptide
  Seed: DPRMCSLMQGSTLPRRS
DPRMFSLQQASTMPRRS

SEQ ID NO: 63915 - protein, 17 aa, Artificial Sequence
  Description of Artificial Sequence: Synthetic peptide
  Seed: DPRMCSLMQGSTLPRRS
DPRMFSLQQASTNPRRS

SEQ ID NO: 63916 - protein, 17 aa, Artificial Sequence
  Description of Artificial Sequence: Synthetic peptide
  Seed: DPRMCSLMQGSTLPRRS
DPRMFSLQQASTSPRRS

SEQ ID NO: 63917 - protein, 17 aa, Artificial Sequence
  Description of Artificial Sequence: Synthetic peptide
  Seed: DPRMCSLMQGSTLPRRS
DPRMFSLQQASTTPRRS

SEQ ID NO: 63918 - protein, 17 aa, Artificial Sequence
  Description of Artificial Sequence: Synthetic peptide
  Seed: DPRMCSLMQGSTLPRRS
DPRMFSLQQASTVPRRS

SEQ ID NO: 63919 - protein, 17 aa, Artificial Sequence
  Description of Artificial Sequence: Synthetic peptide
  Seed: DPRMCSLMQGSTLPRRS
DPRMFSLQQGSTAPRRS

SEQ ID NO: 63920 - protein, 17 aa, Artificial Sequence
  Description of Artificial Sequence: Synthetic peptide
  Seed: DPRMCSLMQGSTLPRRS
DPRMFSLQQGSTIPRRS

SEQ ID NO: 63921 - protein, 17 aa, Artificial Sequence
  Description of Artificial Sequence: Synthetic peptide
  Seed: DPRMCSLMQGSTLPRRS
DPRMFSLQQGSTLPRRS

SEQ ID NO: 63922 - protein, 17 aa, Artificial Sequence
  Description of Artificial Sequence: Synthetic peptide
  Seed: DPRMCSLMQGSTLPRRS
DPRMFSLQQGSTMPRRS

SEQ ID NO: 63923 - protein, 17 aa, Artificial Sequence
  Description of Artificial Sequence: Synthetic peptide
  Seed: DPRMCSLMQGSTLPRRS
DPRMFSLQQGSTSPRRS

SEQ ID NO: 63924 - protein, 17 aa, Artificial Sequence
  Description of Artificial Sequence: Synthetic peptide
  Seed: DPRMCSLMQGSTLPRRS
DPRMFSLQQGSTTPRRS

SEQ ID NO: 63925 - protein, 17 aa, Artificial Sequence
  Description of Artificial Sequence: Synthetic peptide
  Seed: DPRMCSLMQGSTLPRRS
DPRMFSLQQGSTVPRRS

SEQ ID NO: 63926 - protein, 17 aa, Artificial Sequence
  Description of Artificial Sequence: Synthetic peptide
  Seed: DPRMCSLMQGSTLPRRS
DPRMFSLQQISTAPRRS

SEQ ID NO: 63927 - protein, 17 aa, Artificial Sequence
  Description of Artificial Sequence: Synthetic peptide
  Seed: DPRMCSLMQGSTLPRRS
DPRMFSLQQISTNPRRS

SEQ ID NO: 63928 - protein, 17 aa, Artificial Sequence
  Description of Artificial Sequence: Synthetic peptide
  Seed: DPRMCSLMQGSTLPRRS
DPRMFSLQQISTSPRRS

SEQ ID NO: 63929 - protein, 17 aa, Artificial Sequence
  Description of Artificial Sequence: Synthetic peptide
  Seed: DPRMCSLMQGSTLPRRS
DPRMFSLQQISTVPRRS

SEQ ID NO: 63930 - protein, 17 aa, Artificial Sequence
  Description of Artificial Sequence: Synthetic peptide
  Seed: DPRMCSLMQGSTLPRRS
DPRMFSLQQNSTAPRRS

SEQ ID NO: 63931 - protein, 17 aa, Artificial Sequence
  Description of Artificial Sequence: Synthetic peptide
  Seed: DPRMCSLMQGSTLPRRS
DPRMFSLQQNSTIPRRS

SEQ ID NO: 63932 - protein, 17 aa, Artificial Sequence
  Description of Artificial Sequence: Synthetic peptide
  Seed: DPRMCSLMQGSTLPRRS
DPRMFSLQQNSTLPRRS

SEQ ID NO: 63933 - protein, 17 aa, Artificial Sequence
  Description of Artificial Sequence: Synthetic peptide
  Seed: DPRMCSLMQGSTLPRRS
DPRMFSLQQNSTVPRRS

SEQ ID NO: 63934 - protein, 17 aa, Artificial Sequence
  Description of Artificial Sequence: Synthetic peptide
  Seed: DPRMCSLMQGSTLPRRS
DPRMFSLQQPSTAPRRS

SEQ ID NO: 63935 - protein, 17 aa, Artificial Sequence
  Description of Artificial Sequence: Synthetic peptide
  Seed: DPRMCSLMQGSTLPRRS
DPRMFSLQQPSTIPRRS

SEQ ID NO: 63936 - protein, 17 aa, Artificial Sequence
  Description of Artificial Sequence: Synthetic peptide
  Seed: DPRMCSLMQGSTLPRRS
DPRMFSLQQPSTLPRRS

SEQ ID NO: 63937 - protein, 17 aa, Artificial Sequence
  Description of Artificial Sequence: Synthetic peptide
  Seed: DPRMCSLMQGSTLPRRS
DPRMFSLQQPSTMPRRS

SEQ ID NO: 63938 - protein, 17 aa, Artificial Sequence
  Description of Artificial Sequence: Synthetic peptide
  Seed: DPRMCSLMQGSTLPRRS
DPRMFSLQQPSTNPRRS

SEQ ID NO: 63939 - protein, 17 aa, Artificial Sequence
  Description of Artificial Sequence: Synthetic peptide
  Seed: DPRMCSLMQGSTLPRRS
DPRMFSLQQPSTSPRRS

SEQ ID NO: 63940 - protein, 17 aa, Artificial Sequence
  Description of Artificial Sequence: Synthetic peptide
  Seed: DPRMCSLMQGSTLPRRS
DPRMFSLQQPSTVPRRS

SEQ ID NO: 63941 - protein, 17 aa, Artificial Sequence
  Description of Artificial Sequence: Synthetic peptide
  Seed: DPRMCSLMQGSTLPRRS
DPRMFSLQQSSTAPRRS

SEQ ID NO: 63942 - protein, 17 aa, Artificial Sequence
  Description of Artificial Sequence: Synthetic peptide
  Seed: DPRMCSLMQGSTLPRRS
DPRMFSLQQSSTIPRRS

SEQ ID NO: 63943 - protein, 17 aa, Artificial Sequence
  Description of Artificial Sequence: Synthetic peptide
  Seed: DPRMCSLMQGSTLPRRS
DPRMFSLQQSSTLPRRS

SEQ ID NO: 63944 - protein, 17 aa, Artificial Sequence
  Description of Artificial Sequence: Synthetic peptide
  Seed: DPRMCSLMQGSTLPRRS
DPRMFSLQQSSTMPRRS

SEQ ID NO: 63945 - protein, 17 aa, Artificial Sequence
  Description of Artificial Sequence: Synthetic peptide
  Seed: DPRMCSLMQGSTLPRRS
DPRMFSLQQSSTNPRRS

SEQ ID NO: 63946 - protein, 17 aa, Artificial Sequence
  Description of Artificial Sequence: Synthetic peptide
  Seed: DPRMCSLMQGSTLPRRS
DPRMFSLQQSSTSPRRS

SEQ ID NO: 63947 - protein, 17 aa, Artificial Sequence
  Description of Artificial Sequence: Synthetic peptide
  Seed: DPRMCSLMQGSTLPRRS
DPRMFSLQQSSTTPRRS

SEQ ID NO: 63948 - protein, 17 aa, Artificial Sequence
  Description of Artificial Sequence: Synthetic peptide
  Seed: DPRMCSLMQGSTLPRRS
DPRMFSLQQSSTVPRRS

SEQ ID NO: 63949 - protein, 17 aa, Artificial Sequence
  Description of Artificial Sequence: Synthetic peptide
  Seed: DPRMCSLMQGSTLPRRS
DPRMFSLQQTSTAPRRS

SEQ ID NO: 63950 - protein, 17 aa, Artificial Sequence
  Description of Artificial Sequence: Synthetic peptide
  Seed: DPRMCSLMQGSTLPRRS
DPRMFSLQQTSTIPRRS

SEQ ID NO: 63951 - protein, 17 aa, Artificial Sequence
  Description of Artificial Sequence: Synthetic peptide
  Seed: DPRMCSLMQGSTLPRRS
DPRMFSLQQTSTLPRRS

SEQ ID NO: 63952 - protein, 17 aa, Artificial Sequence
  Description of Artificial Sequence: Synthetic peptide
  Seed: DPRMCSLMQGSTLPRRS
DPRMFSLQQTSTNPRRS

SEQ ID NO: 63953 - protein, 17 aa, Artificial Sequence
  Description of Artificial Sequence: Synthetic peptide
  Seed: DPRMCSLMQGSTLPRRS
DPRMFSLQQTSTSPRRS

SEQ ID NO: 63954 - protein, 17 aa, Artificial Sequence
  Description of Artificial Sequence: Synthetic peptide
  Seed: DPRMCSLMQGSTLPRRS
DPRMFSLQQTSTTPRRS

SEQ ID NO: 63955 - protein, 17 aa, Artificial Sequence
  Description of Artificial Sequence: Synthetic peptide
  Seed: DPRMCSLMQGSTLPRRS
DPRMFSLQQTSTVPRRS

SEQ ID NO: 63956 - protein, 17 aa, Artificial Sequence
  Description of Artificial Sequence: Synthetic peptide
  Seed: DPRMCSLMQGSTLPRRS
DPRMFSLQQVSTAPRRS

SEQ ID NO: 63957 - protein, 17 aa, Artificial Sequence
  Description of Artificial Sequence: Synthetic peptide
  Seed: DPRMCSLMQGSTLPRRS
DPRMFSLQQVSTIPRRS

SEQ ID NO: 63958 - protein, 17 aa, Artificial Sequence
  Description of Artificial Sequence: Synthetic peptide
  Seed: DPRMCSLMQGSTLPRRS
DPRMFSLQQVSTLPRRS

SEQ ID NO: 63959 - protein, 17 aa, Artificial Sequence
  Description of Artificial Sequence: Synthetic peptide
  Seed: DPRMCSLMQGSTLPRRS
DPRMFSLQQVSTMPRRS

SEQ ID NO: 63960 - protein, 17 aa, Artificial Sequence
  Description of Artificial Sequence: Synthetic peptide
  Seed: DPRMCSLMQGSTLPRRS
DPRMFSLQQVSTNPRRS

SEQ ID NO: 63961 - protein, 17 aa, Artificial Sequence
  Description of Artificial Sequence: Synthetic peptide
  Seed: DPRMCSLMQGSTLPRRS
DPRMFSLQQVSTSPRRS

SEQ ID NO: 63962 - protein, 17 aa, Artificial Sequence
  Description of Artificial Sequence: Synthetic peptide
  Seed: DPRMCSLMQGSTLPRRS
DPRMFSLQQVSTTPRRS

SEQ ID NO: 63963 - protein, 17 aa, Artificial Sequence
  Description of Artificial Sequence: Synthetic peptide
  Seed: DPRMCSLMQGSTLPRRS
DPRMFSLQQVSTVPRRS

SEQ ID NO: 63964 - protein, 17 aa, Artificial Sequence
  Description of Artificial Sequence: Synthetic peptide
  Seed: DPRMCSLMQGSTLPRRS
DPRMFSLSQASTAPRRS

SEQ ID NO: 63965 - protein, 17 aa, Artificial Sequence
  Description of Artificial Sequence: Synthetic peptide
  Seed: DPRMCSLMQGSTLPRRS
DPRMFSLSQASTIPRRS

SEQ ID NO: 63966 - protein, 17 aa, Artificial Sequence
  Description of Artificial Sequence: Synthetic peptide
  Seed: DPRMCSLMQGSTLPRRS
DPRMFSLSQASTLPRRS

SEQ ID NO: 63967 - protein, 17 aa, Artificial Sequence
  Description of Artificial Sequence: Synthetic peptide
  Seed: DPRMCSLMQGSTLPRRS
DPRMFSLSQASTMPRRS

SEQ ID NO: 63968 - protein, 17 aa, Artificial Sequence
  Description of Artificial Sequence: Synthetic peptide
  Seed: DPRMCSLMQGSTLPRRS
DPRMFSLSQASTNPRRS

SEQ ID NO: 63969 - protein, 17 aa, Artificial Sequence
  Description of Artificial Sequence: Synthetic peptide
  Seed: DPRMCSLMQGSTLPRRS
DPRMFSLSQASTSPRRS

SEQ ID NO: 63970 - protein, 17 aa, Artificial Sequence
  Description of Artificial Sequence: Synthetic peptide
  Seed: DPRMCSLMQGSTLPRRS
DPRMFSLSQASTTPRRS

SEQ ID NO: 63971 - protein, 17 aa, Artificial Sequence
  Description of Artificial Sequence: Synthetic peptide
  Seed: DPRMCSLMQGSTLPRRS
DPRMFSLSQASTVPRRS

SEQ ID NO: 63972 - protein, 17 aa, Artificial Sequence
  Description of Artificial Sequence: Synthetic peptide
  Seed: DPRMCSLMQGSTLPRRS
DPRMFSLSQGSTAPRRS

SEQ ID NO: 63973 - protein, 17 aa, Artificial Sequence
  Description of Artificial Sequence: Synthetic peptide
  Seed: DPRMCSLMQGSTLPRRS
DPRMFSLSQGSTIPRRS

SEQ ID NO: 63974 - protein, 17 aa, Artificial Sequence
  Description of Artificial Sequence: Synthetic peptide
  Seed: DPRMCSLMQGSTLPRRS
DPRMFSLSQGSTLPRRS

SEQ ID NO: 63975 - protein, 17 aa, Artificial Sequence
  Description of Artificial Sequence: Synthetic peptide
  Seed: DPRMCSLMQGSTLPRRS
DPRMFSLSQGSTMPRRS

SEQ ID NO: 63976 - protein, 17 aa, Artificial Sequence
  Description of Artificial Sequence: Synthetic peptide
  Seed: DPRMCSLMQGSTLPRRS
DPRMFSLSQGSTVPRRS

SEQ ID NO: 63977 - protein, 17 aa, Artificial Sequence
  Description of Artificial Sequence: Synthetic peptide
  Seed: DPRMCSLMQGSTLPRRS
DPRMFSLSQISTAPRRS

SEQ ID NO: 63978 - protein, 17 aa, Artificial Sequence
  Description of Artificial Sequence: Synthetic peptide
  Seed: DPRMCSLMQGSTLPRRS
DPRMFSLSQPSTAPRRS

SEQ ID NO: 63979 - protein, 17 aa, Artificial Sequence
  Description of Artificial Sequence: Synthetic peptide
  Seed: DPRMCSLMQGSTLPRRS
DPRMFSLSQPSTIPRRS

SEQ ID NO: 63980 - protein, 17 aa, Artificial Sequence
  Description of Artificial Sequence: Synthetic peptide
  Seed: DPRMCSLMQGSTLPRRS
DPRMFSLSQPSTLPRRS

SEQ ID NO: 63981 - protein, 17 aa, Artificial Sequence
  Description of Artificial Sequence: Synthetic peptide
  Seed: DPRMCSLMQGSTLPRRS
DPRMFSLSQPSTSPRRS

SEQ ID NO: 63982 - protein, 17 aa, Artificial Sequence
  Description of Artificial Sequence: Synthetic peptide
  Seed: DPRMCSLMQGSTLPRRS
DPRMFSLSQPSTVPRRS

SEQ ID NO: 63983 - protein, 17 aa, Artificial Sequence
  Description of Artificial Sequence: Synthetic peptide
  Seed: DPRMCSLMQGSTLPRRS
DPRMFSLSQSSTAPRRS

SEQ ID NO: 63984 - protein, 17 aa, Artificial Sequence
  Description of Artificial Sequence: Synthetic peptide
  Seed: DPRMCSLMQGSTLPRRS
DPRMFSLSQSSTIPRRS

SEQ ID NO: 63985 - protein, 17 aa, Artificial Sequence
  Description of Artificial Sequence: Synthetic peptide
  Seed: DPRMCSLMQGSTLPRRS
DPRMFSLSQSSTLPRRS

SEQ ID NO: 63986 - protein, 17 aa, Artificial Sequence
  Description of Artificial Sequence: Synthetic peptide
  Seed: DPRMCSLMQGSTLPRRS
DPRMFSLSQSSTMPRRS

SEQ ID NO: 63987 - protein, 17 aa, Artificial Sequence
  Description of Artificial Sequence: Synthetic peptide
  Seed: DPRMCSLMQGSTLPRRS
DPRMFSLSQSSTVPRRS

SEQ ID NO: 63988 - protein, 17 aa, Artificial Sequence
  Description of Artificial Sequence: Synthetic peptide
  Seed: DPRMCSLMQGSTLPRRS
DPRMFSLSQTSTAPRRS

SEQ ID NO: 63989 - protein, 17 aa, Artificial Sequence
  Description of Artificial Sequence: Synthetic peptide
  Seed: DPRMCSLMQGSTLPRRS
DPRMFSLSQVSTAPRRS

SEQ ID NO: 63990 - protein, 17 aa, Artificial Sequence
  Description of Artificial Sequence: Synthetic peptide
  Seed: DPRMCSLMQGSTLPRRS
DPRMFSLSQVSTNPRRS

SEQ ID NO: 63991 - protein, 17 aa, Artificial Sequence
  Description of Artificial Sequence: Synthetic peptide
  Seed: DPRMCSLMQGSTLPRRS
DPRMFSLSQVSTSPRRS

SEQ ID NO: 63992 - protein, 17 aa, Artificial Sequence
  Description of Artificial Sequence: Synthetic peptide
  Seed: DPRMCSLMQGSTLPRRS
DPRMFSLTQASTAPRRS

SEQ ID NO: 63993 - protein, 17 aa, Artificial Sequence
  Description of Artificial Sequence: Synthetic peptide
  Seed: DPRMCSLMQGSTLPRRS
DPRMFSLTQASTIPRRS

SEQ ID NO: 63994 - protein, 17 aa, Artificial Sequence
  Description of Artificial Sequence: Synthetic peptide
  Seed: DPRMCSLMQGSTLPRRS
DPRMFSLTQASTLPRRS

SEQ ID NO: 63995 - protein, 17 aa, Artificial Sequence
  Description of Artificial Sequence: Synthetic peptide
  Seed: DPRMCSLMQGSTLPRRS
DPRMFSLTQASTMPRRS

SEQ ID NO: 63996 - protein, 17 aa, Artificial Sequence
  Description of Artificial Sequence: Synthetic peptide
  Seed: DPRMCSLMQGSTLPRRS
DPRMFSLTQASTNPRRS

SEQ ID NO: 63997 - protein, 17 aa, Artificial Sequence
  Description of Artificial Sequence: Synthetic peptide
  Seed: DPRMCSLMQGSTLPRRS
DPRMFSLTQASTSPRRS

SEQ ID NO: 63998 - protein, 17 aa, Artificial Sequence
  Description of Artificial Sequence: Synthetic peptide
  Seed: DPRMCSLMQGSTLPRRS
DPRMFSLTQASTVPRRS

SEQ ID NO: 63999 - protein, 17 aa, Artificial Sequence
  Description of Artificial Sequence: Synthetic peptide
  Seed: DPRMCSLMQGSTLPRRS
DPRMFSLTQGSTAPRRS

SEQ ID NO: 64000 - protein, 17 aa, Artificial Sequence
  Description of Artificial Sequence: Synthetic peptide
  Seed: DPRMCSLMQGSTLPRRS
DPRMFSLTQGSTIPRRS

SEQ ID NO: 64001 - protein, 17 aa, Artificial Sequence
  Description of Artificial Sequence: Synthetic peptide
  Seed: DPRMCSLMQGSTLPRRS
DPRMFSLTQGSTLPRRS

SEQ ID NO: 64002 - protein, 17 aa, Artificial Sequence
  Description of Artificial Sequence: Synthetic peptide
  Seed: DPRMCSLMQGSTLPRRS
DPRMFSLTQGSTVPRRS

SEQ ID NO: 64003 - protein, 17 aa, Artificial Sequence
  Description of Artificial Sequence: Synthetic peptide
  Seed: DPRMCSLMQGSTLPRRS
DPRMFSLTQPSTAPRRS

SEQ ID NO: 64004 - protein, 17 aa, Artificial Sequence
  Description of Artificial Sequence: Synthetic peptide
  Seed: DPRMCSLMQGSTLPRRS
DPRMFSLTQPSTLPRRS

SEQ ID NO: 64005 - protein, 17 aa, Artificial Sequence
  Description of Artificial Sequence: Synthetic peptide
  Seed: DPRMCSLMQGSTLPRRS
DPRMFSLTQPSTSPRRS

SEQ ID NO: 64006 - protein, 17 aa, Artificial Sequence
  Description of Artificial Sequence: Synthetic peptide
  Seed: DPRMCSLMQGSTLPRRS
DPRMFSLTQPSTVPRRS

SEQ ID NO: 64007 - protein, 17 aa, Artificial Sequence
  Description of Artificial Sequence: Synthetic peptide
  Seed: DPRMCSLMQGSTLPRRS
DPRMFSLTQSSTAPRRS

SEQ ID NO: 64008 - protein, 17 aa, Artificial Sequence
  Description of Artificial Sequence: Synthetic peptide
  Seed: DPRMCSLMQGSTLPRRS
DPRMFSLTQSSTIPRRS

SEQ ID NO: 64009 - protein, 17 aa, Artificial Sequence
  Description of Artificial Sequence: Synthetic peptide
  Seed: DPRMCSLMQGSTLPRRS
DPRMFSLTQSSTLPRRS

SEQ ID NO: 64010 - protein, 17 aa, Artificial Sequence
  Description of Artificial Sequence: Synthetic peptide
  Seed: DPRMCSLMQGSTLPRRS
DPRMFSLTQSSTVPRRS

SEQ ID NO: 64011 - protein, 17 aa, Artificial Sequence
  Description of Artificial Sequence: Synthetic peptide
  Seed: DPRMCSLMQGSTLPRRS
DPRMFSLTQVSTAPRRS

SEQ ID NO: 64012 - protein, 17 aa, Artificial Sequence
  Description of Artificial Sequence: Synthetic peptide
  Seed: DPRMCSLMQGSTLPRRS
DPRMFSLVQASTAPRRS

SEQ ID NO: 64013 - protein, 17 aa, Artificial Sequence
  Description of Artificial Sequence: Synthetic peptide
  Seed: DPRMCSLMQGSTLPRRS
DPRMFSLVQASTCPRRS

SEQ ID NO: 64014 - protein, 17 aa, Artificial Sequence
  Description of Artificial Sequence: Synthetic peptide
  Seed: DPRMCSLMQGSTLPRRS
DPRMFSLVQASTFPRRS

SEQ ID NO: 64015 - protein, 17 aa, Artificial Sequence
  Description of Artificial Sequence: Synthetic peptide
  Seed: DPRMCSLMQGSTLPRRS
DPRMFSLVQASTGPRRS

SEQ ID NO: 64016 - protein, 17 aa, Artificial Sequence
  Description of Artificial Sequence: Synthetic peptide
  Seed: DPRMCSLMQGSTLPRRS
DPRMFSLVQASTHPRRS

SEQ ID NO: 64017 - protein, 17 aa, Artificial Sequence
  Description of Artificial Sequence: Synthetic peptide
  Seed: DPRMCSLMQGSTLPRRS
DPRMFSLVQASTIPRRS

SEQ ID NO: 64018 - protein, 17 aa, Artificial Sequence
  Description of Artificial Sequence: Synthetic peptide
  Seed: DPRMCSLMQGSTLPRRS
DPRMFSLVQASTLPRRS

SEQ ID NO: 64019 - protein, 17 aa, Artificial Sequence
  Description of Artificial Sequence: Synthetic peptide
  Seed: DPRMCSLMQGSTLPRRS
DPRMFSLVQASTMPRRS

SEQ ID NO: 64020 - protein, 17 aa, Artificial Sequence
  Description of Artificial Sequence: Synthetic peptide
  Seed: DPRMCSLMQGSTLPRRS
DPRMFSLVQASTNPRRS

SEQ ID NO: 64021 - protein, 17 aa, Artificial Sequence
  Description of Artificial Sequence: Synthetic peptide
  Seed: DPRMCSLMQGSTLPRRS
DPRMFSLVQASTPPRRS

SEQ ID NO: 64022 - protein, 17 aa, Artificial Sequence
  Description of Artificial Sequence: Synthetic peptide
  Seed: DPRMCSLMQGSTLPRRS
DPRMFSLVQASTQPRRS

SEQ ID NO: 64023 - protein, 17 aa, Artificial Sequence
  Description of Artificial Sequence: Synthetic peptide
  Seed: DPRMCSLMQGSTLPRRS
DPRMFSLVQASTSPRRS

SEQ ID NO: 64024 - protein, 17 aa, Artificial Sequence
  Description of Artificial Sequence: Synthetic peptide
  Seed: DPRMCSLMQGSTLPRRS
DPRMFSLVQASTTPRRS

SEQ ID NO: 64025 - protein, 17 aa, Artificial Sequence
  Description of Artificial Sequence: Synthetic peptide
  Seed: DPRMCSLMQGSTLPRRS
DPRMFSLVQASTVPRRS

SEQ ID NO: 64026 - protein, 17 aa, Artificial Sequence
  Description of Artificial Sequence: Synthetic peptide
  Seed: DPRMCSLMQGSTLPRRS
DPRMFSLVQGSTAPRRS

SEQ ID NO: 64027 - protein, 17 aa, Artificial Sequence
  Description of Artificial Sequence: Synthetic peptide
  Seed: DPRMCSLMQGSTLPRRS
DPRMFSLVQGSTGPRRS

SEQ ID NO: 64028 - protein, 17 aa, Artificial Sequence
  Description of Artificial Sequence: Synthetic peptide
  Seed: DPRMCSLMQGSTLPRRS
DPRMFSLVQGSTIPRRS

SEQ ID NO: 64029 - protein, 17 aa, Artificial Sequence
  Description of Artificial Sequence: Synthetic peptide
  Seed: DPRMCSLMQGSTLPRRS
DPRMFSLVQGSTLPRRS

SEQ ID NO: 64030 - protein, 17 aa, Artificial Sequence
  Description of Artificial Sequence: Synthetic peptide
  Seed: DPRMCSLMQGSTLPRRS
DPRMFSLVQGSTMPRRS

SEQ ID NO: 64031 - protein, 17 aa, Artificial Sequence
  Description of Artificial Sequence: Synthetic peptide
  Seed: DPRMCSLMQGSTLPRRS
DPRMFSLVQGSTNPRRS

SEQ ID NO: 64032 - protein, 17 aa, Artificial Sequence
  Description of Artificial Sequence: Synthetic peptide
  Seed: DPRMCSLMQGSTLPRRS
DPRMFSLVQGSTSPRRS

SEQ ID NO: 64033 - protein, 17 aa, Artificial Sequence
  Description of Artificial Sequence: Synthetic peptide
  Seed: DPRMCSLMQGSTLPRRS
DPRMFSLVQGSTTPRRS

SEQ ID NO: 64034 - protein, 17 aa, Artificial Sequence
  Description of Artificial Sequence: Synthetic peptide
  Seed: DPRMCSLMQGSTLPRRS
DPRMFSLVQGSTVPRRS

SEQ ID NO: 64035 - protein, 17 aa, Artificial Sequence
  Description of Artificial Sequence: Synthetic peptide
  Seed: DPRMCSLMQGSTLPRRS
DPRMFSLVQISTAPRRS

SEQ ID NO: 64036 - protein, 17 aa, Artificial Sequence
  Description of Artificial Sequence: Synthetic peptide
  Seed: DPRMCSLMQGSTLPRRS
DPRMFSLVQISTGPRRS

SEQ ID NO: 64037 - protein, 17 aa, Artificial Sequence
  Description of Artificial Sequence: Synthetic peptide
  Seed: DPRMCSLMQGSTLPRRS
DPRMFSLVQISTIPRRS

SEQ ID NO: 64038 - protein, 17 aa, Artificial Sequence
  Description of Artificial Sequence: Synthetic peptide
  Seed: DPRMCSLMQGSTLPRRS
DPRMFSLVQISTLPRRS

SEQ ID NO: 64039 - protein, 17 aa, Artificial Sequence
  Description of Artificial Sequence: Synthetic peptide
  Seed: DPRMCSLMQGSTLPRRS
DPRMFSLVQISTMPRRS

SEQ ID NO: 64040 - protein, 17 aa, Artificial Sequence
  Description of Artificial Sequence: Synthetic peptide
  Seed: DPRMCSLMQGSTLPRRS
DPRMFSLVQISTNPRRS

SEQ ID NO: 64041 - protein, 17 aa, Artificial Sequence
  Description of Artificial Sequence: Synthetic peptide
  Seed: DPRMCSLMQGSTLPRRS
DPRMFSLVQISTSPRRS

SEQ ID NO: 64042 - protein, 17 aa, Artificial Sequence
  Description of Artificial Sequence: Synthetic peptide
  Seed: DPRMCSLMQGSTLPRRS
DPRMFSLVQISTTPRRS

SEQ ID NO: 64043 - protein, 17 aa, Artificial Sequence
  Description of Artificial Sequence: Synthetic peptide
  Seed: DPRMCSLMQGSTLPRRS
DPRMFSLVQISTVPRRS

SEQ ID NO: 64044 - protein, 17 aa, Artificial Sequence
  Description of Artificial Sequence: Synthetic peptide
  Seed: DPRMCSLMQGSTLPRRS
DPRMFSLVQLSTAPRRS

SEQ ID NO: 64045 - protein, 17 aa, Artificial Sequence
  Description of Artificial Sequence: Synthetic peptide
  Seed: DPRMCSLMQGSTLPRRS
DPRMFSLVQLSTNPRRS

SEQ ID NO: 64046 - protein, 17 aa, Artificial Sequence
  Description of Artificial Sequence: Synthetic peptide
  Seed: DPRMCSLMQGSTLPRRS
DPRMFSLVQLSTSPRRS

SEQ ID NO: 64047 - protein, 17 aa, Artificial Sequence
  Description of Artificial Sequence: Synthetic peptide
  Seed: DPRMCSLMQGSTLPRRS
DPRMFSLVQMSTAPRRS

SEQ ID NO: 64048 - protein, 17 aa, Artificial Sequence
  Description of Artificial Sequence: Synthetic peptide
  Seed: DPRMCSLMQGSTLPRRS
DPRMFSLVQMSTSPRRS

SEQ ID NO: 64049 - protein, 17 aa, Artificial Sequence
  Description of Artificial Sequence: Synthetic peptide
  Seed: DPRMCSLMQGSTLPRRS
DPRMFSLVQNSTAPRRS

SEQ ID NO: 64050 - protein, 17 aa, Artificial Sequence
  Description of Artificial Sequence: Synthetic peptide
  Seed: DPRMCSLMQGSTLPRRS
DPRMFSLVQNSTIPRRS

SEQ ID NO: 64051 - protein, 17 aa, Artificial Sequence
  Description of Artificial Sequence: Synthetic peptide
  Seed: DPRMCSLMQGSTLPRRS
DPRMFSLVQNSTLPRRS

SEQ ID NO: 64052 - protein, 17 aa, Artificial Sequence
  Description of Artificial Sequence: Synthetic peptide
  Seed: DPRMCSLMQGSTLPRRS
DPRMFSLVQNSTNPRRS

SEQ ID NO: 64053 - protein, 17 aa, Artificial Sequence
  Description of Artificial Sequence: Synthetic peptide
  Seed: DPRMCSLMQGSTLPRRS
DPRMFSLVQNSTSPRRS

SEQ ID NO: 64054 - protein, 17 aa, Artificial Sequence
  Description of Artificial Sequence: Synthetic peptide
  Seed: DPRMCSLMQGSTLPRRS
DPRMFSLVQNSTTPRRS

SEQ ID NO: 64055 - protein, 17 aa, Artificial Sequence
  Description of Artificial Sequence: Synthetic peptide
  Seed: DPRMCSLMQGSTLPRRS
DPRMFSLVQNSTVPRRS

SEQ ID NO: 64056 - protein, 17 aa, Artificial Sequence
  Description of Artificial Sequence: Synthetic peptide
  Seed: DPRMCSLMQGSTLPRRS
DPRMFSLVQPSTAPRRS

SEQ ID NO: 64057 - protein, 17 aa, Artificial Sequence
  Description of Artificial Sequence: Synthetic peptide
  Seed: DPRMCSLMQGSTLPRRS
DPRMFSLVQPSTGPRRS

SEQ ID NO: 64058 - protein, 17 aa, Artificial Sequence
  Description of Artificial Sequence: Synthetic peptide
  Seed: DPRMCSLMQGSTLPRRS
DPRMFSLVQPSTHPRRS

SEQ ID NO: 64059 - protein, 17 aa, Artificial Sequence
  Description of Artificial Sequence: Synthetic peptide
  Seed: DPRMCSLMQGSTLPRRS
DPRMFSLVQPSTIPRRS

SEQ ID NO: 64060 - protein, 17 aa, Artificial Sequence
  Description of Artificial Sequence: Synthetic peptide
  Seed: DPRMCSLMQGSTLPRRS
DPRMFSLVQPSTLPRRS

SEQ ID NO: 64061 - protein, 17 aa, Artificial Sequence
  Description of Artificial Sequence: Synthetic peptide
  Seed: DPRMCSLMQGSTLPRRS
DPRMFSLVQPSTMPRRS

SEQ ID NO: 64062 - protein, 17 aa, Artificial Sequence
  Description of Artificial Sequence: Synthetic peptide
  Seed: DPRMCSLMQGSTLPRRS
DPRMFSLVQPSTNPRRS

SEQ ID NO: 64063 - protein, 17 aa, Artificial Sequence
  Description of Artificial Sequence: Synthetic peptide
  Seed: DPRMCSLMQGSTLPRRS
DPRMFSLVQPSTQPRRS

SEQ ID NO: 64064 - protein, 17 aa, Artificial Sequence
  Description of Artificial Sequence: Synthetic peptide
  Seed: DPRMCSLMQGSTLPRRS
DPRMFSLVQPSTSPRRS

SEQ ID NO: 64065 - protein, 17 aa, Artificial Sequence
  Description of Artificial Sequence: Synthetic peptide
  Seed: DPRMCSLMQGSTLPRRS
DPRMFSLVQPSTTPRRS

SEQ ID NO: 64066 - protein, 17 aa, Artificial Sequence
  Description of Artificial Sequence: Synthetic peptide
  Seed: DPRMCSLMQGSTLPRRS
DPRMFSLVQPSTVPRRS

SEQ ID NO: 64067 - protein, 17 aa, Artificial Sequence
  Description of Artificial Sequence: Synthetic peptide
  Seed: DPRMCSLMQGSTLPRRS
DPRMFSLVQSSTAPRRS

SEQ ID NO: 64068 - protein, 17 aa, Artificial Sequence
  Description of Artificial Sequence: Synthetic peptide
  Seed: DPRMCSLMQGSTLPRRS
DPRMFSLVQSSTGPRRS

SEQ ID NO: 64069 - protein, 17 aa, Artificial Sequence
  Description of Artificial Sequence: Synthetic peptide
  Seed: DPRMCSLMQGSTLPRRS
DPRMFSLVQSSTHPRRS

SEQ ID NO: 64070 - protein, 17 aa, Artificial Sequence
  Description of Artificial Sequence: Synthetic peptide
  Seed: DPRMCSLMQGSTLPRRS
DPRMFSLVQSSTIPRRS

SEQ ID NO: 64071 - protein, 17 aa, Artificial Sequence
  Description of Artificial Sequence: Synthetic peptide
  Seed: DPRMCSLMQGSTLPRRS
DPRMFSLVQSSTLPRRS

SEQ ID NO: 64072 - protein, 17 aa, Artificial Sequence
  Description of Artificial Sequence: Synthetic peptide
  Seed: DPRMCSLMQGSTLPRRS
DPRMFSLVQSSTMPRRS

SEQ ID NO: 64073 - protein, 17 aa, Artificial Sequence
  Description of Artificial Sequence: Synthetic peptide
  Seed: DPRMCSLMQGSTLPRRS
DPRMFSLVQSSTNPRRS

SEQ ID NO: 64074 - protein, 17 aa, Artificial Sequence
  Description of Artificial Sequence: Synthetic peptide
  Seed: DPRMCSLMQGSTLPRRS
DPRMFSLVQSSTSPRRS

SEQ ID NO: 64075 - protein, 17 aa, Artificial Sequence
  Description of Artificial Sequence: Synthetic peptide
  Seed: DPRMCSLMQGSTLPRRS
DPRMFSLVQSSTTPRRS

SEQ ID NO: 64076 - protein, 17 aa, Artificial Sequence
  Description of Artificial Sequence: Synthetic peptide
  Seed: DPRMCSLMQGSTLPRRS
DPRMFSLVQSSTVPRRS

SEQ ID NO: 64077 - protein, 17 aa, Artificial Sequence
  Description of Artificial Sequence: Synthetic peptide
  Seed: DPRMCSLMQGSTLPRRS
DPRMFSLVQTSTAPRRS

SEQ ID NO: 64078 - protein, 17 aa, Artificial Sequence
  Description of Artificial Sequence: Synthetic peptide
  Seed: DPRMCSLMQGSTLPRRS
DPRMFSLVQTSTGPRRS

SEQ ID NO: 64079 - protein, 17 aa, Artificial Sequence
  Description of Artificial Sequence: Synthetic peptide
  Seed: DPRMCSLMQGSTLPRRS
DPRMFSLVQTSTHPRRS

SEQ ID NO: 64080 - protein, 17 aa, Artificial Sequence
  Description of Artificial Sequence: Synthetic peptide
  Seed: DPRMCSLMQGSTLPRRS
DPRMFSLVQTSTIPRRS

SEQ ID NO: 64081 - protein, 17 aa, Artificial Sequence
  Description of Artificial Sequence: Synthetic peptide
  Seed: DPRMCSLMQGSTLPRRS
DPRMFSLVQTSTLPRRS

SEQ ID NO: 64082 - protein, 17 aa, Artificial Sequence
  Description of Artificial Sequence: Synthetic peptide
  Seed: DPRMCSLMQGSTLPRRS
DPRMFSLVQTSTMPRRS

SEQ ID NO: 64083 - protein, 17 aa, Artificial Sequence
  Description of Artificial Sequence: Synthetic peptide
  Seed: DPRMCSLMQGSTLPRRS
DPRMFSLVQTSTNPRRS

SEQ ID NO: 64084 - protein, 17 aa, Artificial Sequence
  Description of Artificial Sequence: Synthetic peptide
  Seed: DPRMCSLMQGSTLPRRS
DPRMFSLVQTSTSPRRS

SEQ ID NO: 64085 - protein, 17 aa, Artificial Sequence
  Description of Artificial Sequence: Synthetic peptide
  Seed: DPRMCSLMQGSTLPRRS
DPRMFSLVQTSTTPRRS

SEQ ID NO: 64086 - protein, 17 aa, Artificial Sequence
  Description of Artificial Sequence: Synthetic peptide
  Seed: DPRMCSLMQGSTLPRRS
DPRMFSLVQTSTVPRRS

SEQ ID NO: 64087 - protein, 17 aa, Artificial Sequence
  Description of Artificial Sequence: Synthetic peptide
  Seed: DPRMCSLMQGSTLPRRS
DPRMFSLVQVSTAPRRS

SEQ ID NO: 64088 - protein, 17 aa, Artificial Sequence
  Description of Artificial Sequence: Synthetic peptide
  Seed: DPRMCSLMQGSTLPRRS
DPRMFSLVQVSTGPRRS

SEQ ID NO: 64089 - protein, 17 aa, Artificial Sequence
  Description of Artificial Sequence: Synthetic peptide
  Seed: DPRMCSLMQGSTLPRRS
DPRMFSLVQVSTHPRRS

SEQ ID NO: 64090 - protein, 17 aa, Artificial Sequence
  Description of Artificial Sequence: Synthetic peptide
  Seed: DPRMCSLMQGSTLPRRS
DPRMFSLVQVSTIPRRS

SEQ ID NO: 64091 - protein, 17 aa, Artificial Sequence
  Description of Artificial Sequence: Synthetic peptide
  Seed: DPRMCSLMQGSTLPRRS
DPRMFSLVQVSTLPRRS

SEQ ID NO: 64092 - protein, 17 aa, Artificial Sequence
  Description of Artificial Sequence: Synthetic peptide
  Seed: DPRMCSLMQGSTLPRRS
DPRMFSLVQVSTMPRRS

SEQ ID NO: 64093 - protein, 17 aa, Artificial Sequence
  Description of Artificial Sequence: Synthetic peptide
  Seed: DPRMCSLMQGSTLPRRS
DPRMFSLVQVSTNPRRS

SEQ ID NO: 64094 - protein, 17 aa, Artificial Sequence
  Description of Artificial Sequence: Synthetic peptide
  Seed: DPRMCSLMQGSTLPRRS
DPRMFSLVQVSTSPRRS

SEQ ID NO: 64095 - protein, 17 aa, Artificial Sequence
  Description of Artificial Sequence: Synthetic peptide
  Seed: DPRMCSLMQGSTLPRRS
DPRMFSLVQVSTTPRRS

SEQ ID NO: 64096 - protein, 17 aa, Artificial Sequence
  Description of Artificial Sequence: Synthetic peptide
  Seed: DPRMCSLMQGSTLPRRS
DPRMFSLVQVSTVPRRS

SEQ ID NO: 64097 - protein, 17 aa, Artificial Sequence
  Description of Artificial Sequence: Synthetic peptide
  Seed: DPRMCSLMQGSTLPRRS
DPRMISLAQASTAPRRS

SEQ ID NO: 64098 - protein, 17 aa, Artificial Sequence
  Description of Artificial Sequence: Synthetic peptide
  Seed: DPRMCSLMQGSTLPRRS
DPRMISLAQASTIPRRS

SEQ ID NO: 64099 - protein, 17 aa, Artificial Sequence
  Description of Artificial Sequence: Synthetic peptide
  Seed: DPRMCSLMQGSTLPRRS
DPRMISLAQASTLPRRS

SEQ ID NO: 64100 - protein, 17 aa, Artificial Sequence
  Description of Artificial Sequence: Synthetic peptide
  Seed: DPRMCSLMQGSTLPRRS
DPRMISLAQASTMPRRS

SEQ ID NO: 64101 - protein, 17 aa, Artificial Sequence
  Description of Artificial Sequence: Synthetic peptide
  Seed: DPRMCSLMQGSTLPRRS
DPRMISLAQASTVPRRS

SEQ ID NO: 64102 - protein, 17 aa, Artificial Sequence
  Description of Artificial Sequence: Synthetic peptide
  Seed: DPRMCSLMQGSTLPRRS
DPRMISLAQGSTAPRRS

SEQ ID NO: 64103 - protein, 17 aa, Artificial Sequence
  Description of Artificial Sequence: Synthetic peptide
  Seed: DPRMCSLMQGSTLPRRS
DPRMISLAQGSTIPRRS

SEQ ID NO: 64104 - protein, 17 aa, Artificial Sequence
  Description of Artificial Sequence: Synthetic peptide
  Seed: DPRMCSLMQGSTLPRRS
DPRMISLAQGSTLPRRS

SEQ ID NO: 64105 - protein, 17 aa, Artificial Sequence
  Description of Artificial Sequence: Synthetic peptide
  Seed: DPRMCSLMQGSTLPRRS
DPRMISLAQGSTVPRRS

SEQ ID NO: 64106 - protein, 17 aa, Artificial Sequence
  Description of Artificial Sequence: Synthetic peptide
  Seed: DPRMCSLMQGSTLPRRS
DPRMISLAQPSTLPRRS

SEQ ID NO: 64107 - protein, 17 aa, Artificial Sequence
  Description of Artificial Sequence: Synthetic peptide
  Seed: DPRMCSLMQGSTLPRRS
DPRMISLAQSSTAPRRS

SEQ ID NO: 64108 - protein, 17 aa, Artificial Sequence
  Description of Artificial Sequence: Synthetic peptide
  Seed: DPRMCSLMQGSTLPRRS
DPRMISLAQSSTIPRRS

SEQ ID NO: 64109 - protein, 17 aa, Artificial Sequence
  Description of Artificial Sequence: Synthetic peptide
  Seed: DPRMCSLMQGSTLPRRS
DPRMISLAQSSTLPRRS

SEQ ID NO: 64110 - protein, 17 aa, Artificial Sequence
  Description of Artificial Sequence: Synthetic peptide
  Seed: DPRMCSLMQGSTLPRRS
DPRMISLAQSSTVPRRS

SEQ ID NO: 64111 - protein, 17 aa, Artificial Sequence
  Description of Artificial Sequence: Synthetic peptide
  Seed: DPRMCSLMQGSTLPRRS
DPRMISLFQASTAPRRS

SEQ ID NO: 64112 - protein, 17 aa, Artificial Sequence
  Description of Artificial Sequence: Synthetic peptide
  Seed: DPRMCSLMQGSTLPRRS
DPRMISLIQASTAPRRS

SEQ ID NO: 64113 - protein, 17 aa, Artificial Sequence
  Description of Artificial Sequence: Synthetic peptide
  Seed: DPRMCSLMQGSTLPRRS
DPRMISLIQASTIPRRS

SEQ ID NO: 64114 - protein, 17 aa, Artificial Sequence
  Description of Artificial Sequence: Synthetic peptide
  Seed: DPRMCSLMQGSTLPRRS
DPRMISLIQASTLPRRS

SEQ ID NO: 64115 - protein, 17 aa, Artificial Sequence
  Description of Artificial Sequence: Synthetic peptide
  Seed: DPRMCSLMQGSTLPRRS
DPRMISLIQASTMPRRS

SEQ ID NO: 64116 - protein, 17 aa, Artificial Sequence
  Description of Artificial Sequence: Synthetic peptide
  Seed: DPRMCSLMQGSTLPRRS
DPRMISLIQASTNPRRS

SEQ ID NO: 64117 - protein, 17 aa, Artificial Sequence
  Description of Artificial Sequence: Synthetic peptide
  Seed: DPRMCSLMQGSTLPRRS
DPRMISLIQASTSPRRS

SEQ ID NO: 64118 - protein, 17 aa, Artificial Sequence
  Description of Artificial Sequence: Synthetic peptide
  Seed: DPRMCSLMQGSTLPRRS
DPRMISLIQASTTPRRS

SEQ ID NO: 64119 - protein, 17 aa, Artificial Sequence
  Description of Artificial Sequence: Synthetic peptide
  Seed: DPRMCSLMQGSTLPRRS
DPRMISLIQASTVPRRS

SEQ ID NO: 64120 - protein, 17 aa, Artificial Sequence
  Description of Artificial Sequence: Synthetic peptide
  Seed: DPRMCSLMQGSTLPRRS
DPRMISLIQGSTAPRRS

SEQ ID NO: 64121 - protein, 17 aa, Artificial Sequence
  Description of Artificial Sequence: Synthetic peptide
  Seed: DPRMCSLMQGSTLPRRS
DPRMISLIQGSTIPRRS

SEQ ID NO: 64122 - protein, 17 aa, Artificial Sequence
  Description of Artificial Sequence: Synthetic peptide
  Seed: DPRMCSLMQGSTLPRRS
DPRMISLIQGSTLPRRS

SEQ ID NO: 64123 - protein, 17 aa, Artificial Sequence
  Description of Artificial Sequence: Synthetic peptide
  Seed: DPRMCSLMQGSTLPRRS
DPRMISLIQGSTMPRRS

SEQ ID NO: 64124 - protein, 17 aa, Artificial Sequence
  Description of Artificial Sequence: Synthetic peptide
  Seed: DPRMCSLMQGSTLPRRS
DPRMISLIQGSTTPRRS

SEQ ID NO: 64125 - protein, 17 aa, Artificial Sequence
  Description of Artificial Sequence: Synthetic peptide
  Seed: DPRMCSLMQGSTLPRRS
DPRMISLIQGSTVPRRS

SEQ ID NO: 64126 - protein, 17 aa, Artificial Sequence
  Description of Artificial Sequence: Synthetic peptide
  Seed: DPRMCSLMQGSTLPRRS
DPRMISLIQISTAPRRS

SEQ ID NO: 64127 - protein, 17 aa, Artificial Sequence
  Description of Artificial Sequence: Synthetic peptide
  Seed: DPRMCSLMQGSTLPRRS
DPRMISLIQPSTAPRRS

SEQ ID NO: 64128 - protein, 17 aa, Artificial Sequence
  Description of Artificial Sequence: Synthetic peptide
  Seed: DPRMCSLMQGSTLPRRS
DPRMISLIQPSTIPRRS

SEQ ID NO: 64129 - protein, 17 aa, Artificial Sequence
  Description of Artificial Sequence: Synthetic peptide
  Seed: DPRMCSLMQGSTLPRRS
DPRMISLIQPSTLPRRS

SEQ ID NO: 64130 - protein, 17 aa, Artificial Sequence
  Description of Artificial Sequence: Synthetic peptide
  Seed: DPRMCSLMQGSTLPRRS
DPRMISLIQPSTNPRRS

SEQ ID NO: 64131 - protein, 17 aa, Artificial Sequence
  Description of Artificial Sequence: Synthetic peptide
  Seed: DPRMCSLMQGSTLPRRS
DPRMISLIQPSTSPRRS

SEQ ID NO: 64132 - protein, 17 aa, Artificial Sequence
  Description of Artificial Sequence: Synthetic peptide
  Seed: DPRMCSLMQGSTLPRRS
DPRMISLIQPSTVPRRS

SEQ ID NO: 64133 - protein, 17 aa, Artificial Sequence
  Description of Artificial Sequence: Synthetic peptide
  Seed: DPRMCSLMQGSTLPRRS
DPRMISLIQSSTAPRRS

SEQ ID NO: 64134 - protein, 17 aa, Artificial Sequence
  Description of Artificial Sequence: Synthetic peptide
  Seed: DPRMCSLMQGSTLPRRS
DPRMISLIQSSTIPRRS

SEQ ID NO: 64135 - protein, 17 aa, Artificial Sequence
  Description of Artificial Sequence: Synthetic peptide
  Seed: DPRMCSLMQGSTLPRRS
DPRMISLIQSSTLPRRS

SEQ ID NO: 64136 - protein, 17 aa, Artificial Sequence
  Description of Artificial Sequence: Synthetic peptide
  Seed: DPRMCSLMQGSTLPRRS
DPRMISLIQSSTVPRRS

SEQ ID NO: 64137 - protein, 17 aa, Artificial Sequence
  Description of Artificial Sequence: Synthetic peptide
  Seed: DPRMCSLMQGSTLPRRS
DPRMISLIQTSTAPRRS

SEQ ID NO: 64138 - protein, 17 aa, Artificial Sequence
  Description of Artificial Sequence: Synthetic peptide
  Seed: DPRMCSLMQGSTLPRRS
DPRMISLIQVSTAPRRS

SEQ ID NO: 64139 - protein, 17 aa, Artificial Sequence
  Description of Artificial Sequence: Synthetic peptide
  Seed: DPRMCSLMQGSTLPRRS
DPRMISLLQASTAPRRS

SEQ ID NO: 64140 - protein, 17 aa, Artificial Sequence
  Description of Artificial Sequence: Synthetic peptide
  Seed: DPRMCSLMQGSTLPRRS
DPRMISLLQASTCPRRS

SEQ ID NO: 64141 - protein, 17 aa, Artificial Sequence
  Description of Artificial Sequence: Synthetic peptide
  Seed: DPRMCSLMQGSTLPRRS
DPRMISLLQASTGPRRS

SEQ ID NO: 64142 - protein, 17 aa, Artificial Sequence
  Description of Artificial Sequence: Synthetic peptide
  Seed: DPRMCSLMQGSTLPRRS
DPRMISLLQASTIPRRS

SEQ ID NO: 64143 - protein, 17 aa, Artificial Sequence
  Description of Artificial Sequence: Synthetic peptide
  Seed: DPRMCSLMQGSTLPRRS
DPRMISLLQASTLPRRS

SEQ ID NO: 64144 - protein, 17 aa, Artificial Sequence
  Description of Artificial Sequence: Synthetic peptide
  Seed: DPRMCSLMQGSTLPRRS
DPRMISLLQASTMPRRS

SEQ ID NO: 64145 - protein, 17 aa, Artificial Sequence
  Description of Artificial Sequence: Synthetic peptide
  Seed: DPRMCSLMQGSTLPRRS
DPRMISLLQASTNPRRS

SEQ ID NO: 64146 - protein, 17 aa, Artificial Sequence
  Description of Artificial Sequence: Synthetic peptide
  Seed: DPRMCSLMQGSTLPRRS
DPRMISLLQASTSPRRS

SEQ ID NO: 64147 - protein, 17 aa, Artificial Sequence
  Description of Artificial Sequence: Synthetic peptide
  Seed: DPRMCSLMQGSTLPRRS
DPRMISLLQASTTPRRS

SEQ ID NO: 64148 - protein, 17 aa, Artificial Sequence
  Description of Artificial Sequence: Synthetic peptide
  Seed: DPRMCSLMQGSTLPRRS
DPRMISLLQASTVPRRS

SEQ ID NO: 64149 - protein, 17 aa, Artificial Sequence
  Description of Artificial Sequence: Synthetic peptide
  Seed: DPRMCSLMQGSTLPRRS
DPRMISLLQGSTAPRRS

SEQ ID NO: 64150 - protein, 17 aa, Artificial Sequence
  Description of Artificial Sequence: Synthetic peptide
  Seed: DPRMCSLMQGSTLPRRS
DPRMISLLQGSTGPRRS

SEQ ID NO: 64151 - protein, 17 aa, Artificial Sequence
  Description of Artificial Sequence: Synthetic peptide
  Seed: DPRMCSLMQGSTLPRRS
DPRMISLLQGSTIPRRS

SEQ ID NO: 64152 - protein, 17 aa, Artificial Sequence
  Description of Artificial Sequence: Synthetic peptide
  Seed: DPRMCSLMQGSTLPRRS
DPRMISLLQGSTLPRRS

SEQ ID NO: 64153 - protein, 17 aa, Artificial Sequence
  Description of Artificial Sequence: Synthetic peptide
  Seed: DPRMCSLMQGSTLPRRS
DPRMISLLQGSTMPRRS

SEQ ID NO: 64154 - protein, 17 aa, Artificial Sequence
  Description of Artificial Sequence: Synthetic peptide
  Seed: DPRMCSLMQGSTLPRRS
DPRMISLLQGSTSPRRS

SEQ ID NO: 64155 - protein, 17 aa, Artificial Sequence
  Description of Artificial Sequence: Synthetic peptide
  Seed: DPRMCSLMQGSTLPRRS
DPRMISLLQGSTTPRRS

SEQ ID NO: 64156 - protein, 17 aa, Artificial Sequence
  Description of Artificial Sequence: Synthetic peptide
  Seed: DPRMCSLMQGSTLPRRS
DPRMISLLQGSTVPRRS

SEQ ID NO: 64157 - protein, 17 aa, Artificial Sequence
  Description of Artificial Sequence: Synthetic peptide
  Seed: DPRMCSLMQGSTLPRRS
DPRMISLLQISTAPRRS

SEQ ID NO: 64158 - protein, 17 aa, Artificial Sequence
  Description of Artificial Sequence: Synthetic peptide
  Seed: DPRMCSLMQGSTLPRRS
DPRMISLLQISTNPRRS

SEQ ID NO: 64159 - protein, 17 aa, Artificial Sequence
  Description of Artificial Sequence: Synthetic peptide
  Seed: DPRMCSLMQGSTLPRRS
DPRMISLLQISTSPRRS

SEQ ID NO: 64160 - protein, 17 aa, Artificial Sequence
  Description of Artificial Sequence: Synthetic peptide
  Seed: DPRMCSLMQGSTLPRRS
DPRMISLLQLSTAPRRS

SEQ ID NO: 64161 - protein, 17 aa, Artificial Sequence
  Description of Artificial Sequence: Synthetic peptide
  Seed: DPRMCSLMQGSTLPRRS
DPRMISLLQNSTAPRRS

SEQ ID NO: 64162 - protein, 17 aa, Artificial Sequence
  Description of Artificial Sequence: Synthetic peptide
  Seed: DPRMCSLMQGSTLPRRS
DPRMISLLQNSTIPRRS

SEQ ID NO: 64163 - protein, 17 aa, Artificial Sequence
  Description of Artificial Sequence: Synthetic peptide
  Seed: DPRMCSLMQGSTLPRRS
DPRMISLLQNSTLPRRS

SEQ ID NO: 64164 - protein, 17 aa, Artificial Sequence
  Description of Artificial Sequence: Synthetic peptide
  Seed: DPRMCSLMQGSTLPRRS
DPRMISLLQNSTTPRRS

SEQ ID NO: 64165 - protein, 17 aa, Artificial Sequence
  Description of Artificial Sequence: Synthetic peptide
  Seed: DPRMCSLMQGSTLPRRS
DPRMISLLQNSTVPRRS

SEQ ID NO: 64166 - protein, 17 aa, Artificial Sequence
  Description of Artificial Sequence: Synthetic peptide
  Seed: DPRMCSLMQGSTLPRRS
DPRMISLLQPSTAPRRS

SEQ ID NO: 64167 - protein, 17 aa, Artificial Sequence
  Description of Artificial Sequence: Synthetic peptide
  Seed: DPRMCSLMQGSTLPRRS
DPRMISLLQPSTIPRRS

SEQ ID NO: 64168 - protein, 17 aa, Artificial Sequence
  Description of Artificial Sequence: Synthetic peptide
  Seed: DPRMCSLMQGSTLPRRS
DPRMISLLQPSTLPRRS

SEQ ID NO: 64169 - protein, 17 aa, Artificial Sequence
  Description of Artificial Sequence: Synthetic peptide
  Seed: DPRMCSLMQGSTLPRRS
DPRMISLLQPSTMPRRS

SEQ ID NO: 64170 - protein, 17 aa, Artificial Sequence
  Description of Artificial Sequence: Synthetic peptide
  Seed: DPRMCSLMQGSTLPRRS
DPRMISLLQPSTNPRRS

SEQ ID NO: 64171 - protein, 17 aa, Artificial Sequence
  Description of Artificial Sequence: Synthetic peptide
  Seed: DPRMCSLMQGSTLPRRS
DPRMISLLQPSTSPRRS

SEQ ID NO: 64172 - protein, 17 aa, Artificial Sequence
  Description of Artificial Sequence: Synthetic peptide
  Seed: DPRMCSLMQGSTLPRRS
DPRMISLLQPSTTPRRS

SEQ ID NO: 64173 - protein, 17 aa, Artificial Sequence
  Description of Artificial Sequence: Synthetic peptide
  Seed: DPRMCSLMQGSTLPRRS
DPRMISLLQPSTVPRRS

SEQ ID NO: 64174 - protein, 17 aa, Artificial Sequence
  Description of Artificial Sequence: Synthetic peptide
  Seed: DPRMCSLMQGSTLPRRS
DPRMISLLQSSTAPRRS

SEQ ID NO: 64175 - protein, 17 aa, Artificial Sequence
  Description of Artificial Sequence: Synthetic peptide
  Seed: DPRMCSLMQGSTLPRRS
DPRMISLLQSSTGPRRS

SEQ ID NO: 64176 - protein, 17 aa, Artificial Sequence
  Description of Artificial Sequence: Synthetic peptide
  Seed: DPRMCSLMQGSTLPRRS
DPRMISLLQSSTIPRRS

SEQ ID NO: 64177 - protein, 17 aa, Artificial Sequence
  Description of Artificial Sequence: Synthetic peptide
  Seed: DPRMCSLMQGSTLPRRS
DPRMISLLQSSTLPRRS

SEQ ID NO: 64178 - protein, 17 aa, Artificial Sequence
  Description of Artificial Sequence: Synthetic peptide
  Seed: DPRMCSLMQGSTLPRRS
DPRMISLLQSSTMPRRS

SEQ ID NO: 64179 - protein, 17 aa, Artificial Sequence
  Description of Artificial Sequence: Synthetic peptide
  Seed: DPRMCSLMQGSTLPRRS
DPRMISLLQSSTNPRRS

SEQ ID NO: 64180 - protein, 17 aa, Artificial Sequence
  Description of Artificial Sequence: Synthetic peptide
  Seed: DPRMCSLMQGSTLPRRS
DPRMISLLQSSTSPRRS

SEQ ID NO: 64181 - protein, 17 aa, Artificial Sequence
  Description of Artificial Sequence: Synthetic peptide
  Seed: DPRMCSLMQGSTLPRRS
DPRMISLLQSSTTPRRS

SEQ ID NO: 64182 - protein, 17 aa, Artificial Sequence
  Description of Artificial Sequence: Synthetic peptide
  Seed: DPRMCSLMQGSTLPRRS
DPRMISLLQSSTVPRRS

SEQ ID NO: 64183 - protein, 17 aa, Artificial Sequence
  Description of Artificial Sequence: Synthetic peptide
  Seed: DPRMCSLMQGSTLPRRS
DPRMISLLQTSTAPRRS

SEQ ID NO: 64184 - protein, 17 aa, Artificial Sequence
  Description of Artificial Sequence: Synthetic peptide
  Seed: DPRMCSLMQGSTLPRRS
DPRMISLLQTSTIPRRS

SEQ ID NO: 64185 - protein, 17 aa, Artificial Sequence
  Description of Artificial Sequence: Synthetic peptide
  Seed: DPRMCSLMQGSTLPRRS
DPRMISLLQTSTLPRRS

SEQ ID NO: 64186 - protein, 17 aa, Artificial Sequence
  Description of Artificial Sequence: Synthetic peptide
  Seed: DPRMCSLMQGSTLPRRS
DPRMISLLQTSTMPRRS

SEQ ID NO: 64187 - protein, 17 aa, Artificial Sequence
  Description of Artificial Sequence: Synthetic peptide
  Seed: DPRMCSLMQGSTLPRRS
DPRMISLLQTSTNPRRS

SEQ ID NO: 64188 - protein, 17 aa, Artificial Sequence
  Description of Artificial Sequence: Synthetic peptide
  Seed: DPRMCSLMQGSTLPRRS
DPRMISLLQTSTSPRRS

SEQ ID NO: 64189 - protein, 17 aa, Artificial Sequence
  Description of Artificial Sequence: Synthetic peptide
  Seed: DPRMCSLMQGSTLPRRS
DPRMISLLQTSTTPRRS

SEQ ID NO: 64190 - protein, 17 aa, Artificial Sequence
  Description of Artificial Sequence: Synthetic peptide
  Seed: DPRMCSLMQGSTLPRRS
DPRMISLLQTSTVPRRS

SEQ ID NO: 64191 - protein, 17 aa, Artificial Sequence
  Description of Artificial Sequence: Synthetic peptide
  Seed: DPRMCSLMQGSTLPRRS
DPRMISLLQVSTAPRRS

SEQ ID NO: 64192 - protein, 17 aa, Artificial Sequence
  Description of Artificial Sequence: Synthetic peptide
  Seed: DPRMCSLMQGSTLPRRS
DPRMISLLQVSTIPRRS

SEQ ID NO: 64193 - protein, 17 aa, Artificial Sequence
  Description of Artificial Sequence: Synthetic peptide
  Seed: DPRMCSLMQGSTLPRRS
DPRMISLLQVSTLPRRS

SEQ ID NO: 64194 - protein, 17 aa, Artificial Sequence
  Description of Artificial Sequence: Synthetic peptide
  Seed: DPRMCSLMQGSTLPRRS
DPRMISLLQVSTNPRRS

SEQ ID NO: 64195 - protein, 17 aa, Artificial Sequence
  Description of Artificial Sequence: Synthetic peptide
  Seed: DPRMCSLMQGSTLPRRS
DPRMISLLQVSTSPRRS

SEQ ID NO: 64196 - protein, 17 aa, Artificial Sequence
  Description of Artificial Sequence: Synthetic peptide
  Seed: DPRMCSLMQGSTLPRRS
DPRMISLLQVSTTPRRS

SEQ ID NO: 64197 - protein, 17 aa, Artificial Sequence
  Description of Artificial Sequence: Synthetic peptide
  Seed: DPRMCSLMQGSTLPRRS
DPRMISLLQVSTVPRRS

SEQ ID NO: 64198 - protein, 17 aa, Artificial Sequence
  Description of Artificial Sequence: Synthetic peptide
  Seed: DPRMCSLMQGSTLPRRS
DPRMISLMQASTAPRRS

SEQ ID NO: 64199 - protein, 17 aa, Artificial Sequence
  Description of Artificial Sequence: Synthetic peptide
  Seed: DPRMCSLMQGSTLPRRS
DPRMISLMQASTCPRRS

SEQ ID NO: 64200 - protein, 17 aa, Artificial Sequence
  Description of Artificial Sequence: Synthetic peptide
  Seed: DPRMCSLMQGSTLPRRS
DPRMISLMQASTGPRRS

SEQ ID NO: 64201 - protein, 17 aa, Artificial Sequence
  Description of Artificial Sequence: Synthetic peptide
  Seed: DPRMCSLMQGSTLPRRS
DPRMISLMQASTHPRRS

SEQ ID NO: 64202 - protein, 17 aa, Artificial Sequence
  Description of Artificial Sequence: Synthetic peptide
  Seed: DPRMCSLMQGSTLPRRS
DPRMISLMQASTIPRRS

SEQ ID NO: 64203 - protein, 17 aa, Artificial Sequence
  Description of Artificial Sequence: Synthetic peptide
  Seed: DPRMCSLMQGSTLPRRS
DPRMISLMQASTLPRRS

SEQ ID NO: 64204 - protein, 17 aa, Artificial Sequence
  Description of Artificial Sequence: Synthetic peptide
  Seed: DPRMCSLMQGSTLPRRS
DPRMISLMQASTMPRRS

SEQ ID NO: 64205 - protein, 17 aa, Artificial Sequence
  Description of Artificial Sequence: Synthetic peptide
  Seed: DPRMCSLMQGSTLPRRS
DPRMISLMQASTNPRRS

SEQ ID NO: 64206 - protein, 17 aa, Artificial Sequence
  Description of Artificial Sequence: Synthetic peptide
  Seed: DPRMCSLMQGSTLPRRS
DPRMISLMQASTSPRRS

SEQ ID NO: 64207 - protein, 17 aa, Artificial Sequence
  Description of Artificial Sequence: Synthetic peptide
  Seed: DPRMCSLMQGSTLPRRS
DPRMISLMQASTTPRRS

SEQ ID NO: 64208 - protein, 17 aa, Artificial Sequence
  Description of Artificial Sequence: Synthetic peptide
  Seed: DPRMCSLMQGSTLPRRS
DPRMISLMQASTVPRRS

SEQ ID NO: 64209 - protein, 17 aa, Artificial Sequence
  Description of Artificial Sequence: Synthetic peptide
  Seed: DPRMCSLMQGSTLPRRS
DPRMISLMQGSTAPRRS

SEQ ID NO: 64210 - protein, 17 aa, Artificial Sequence
  Description of Artificial Sequence: Synthetic peptide
  Seed: DPRMCSLMQGSTLPRRS
DPRMISLMQGSTGPRRS

SEQ ID NO: 64211 - protein, 17 aa, Artificial Sequence
  Description of Artificial Sequence: Synthetic peptide
  Seed: DPRMCSLMQGSTLPRRS
DPRMISLMQGSTIPRRS

SEQ ID NO: 64212 - protein, 17 aa, Artificial Sequence
  Description of Artificial Sequence: Synthetic peptide
  Seed: DPRMCSLMQGSTLPRRS
DPRMISLMQGSTLPRRS

SEQ ID NO: 64213 - protein, 17 aa, Artificial Sequence
  Description of Artificial Sequence: Synthetic peptide
  Seed: DPRMCSLMQGSTLPRRS
DPRMISLMQGSTMPRRS

SEQ ID NO: 64214 - protein, 17 aa, Artificial Sequence
  Description of Artificial Sequence: Synthetic peptide
  Seed: DPRMCSLMQGSTLPRRS
DPRMISLMQGSTSPRRS

SEQ ID NO: 64215 - protein, 17 aa, Artificial Sequence
  Description of Artificial Sequence: Synthetic peptide
  Seed: DPRMCSLMQGSTLPRRS
DPRMISLMQGSTTPRRS

SEQ ID NO: 64216 - protein, 17 aa, Artificial Sequence
  Description of Artificial Sequence: Synthetic peptide
  Seed: DPRMCSLMQGSTLPRRS
DPRMISLMQGSTVPRRS

SEQ ID NO: 64217 - protein, 17 aa, Artificial Sequence
  Description of Artificial Sequence: Synthetic peptide
  Seed: DPRMCSLMQGSTLPRRS
DPRMISLMQISTAPRRS

SEQ ID NO: 64218 - protein, 17 aa, Artificial Sequence
  Description of Artificial Sequence: Synthetic peptide
  Seed: DPRMCSLMQGSTLPRRS
DPRMISLMQISTNPRRS

SEQ ID NO: 64219 - protein, 17 aa, Artificial Sequence
  Description of Artificial Sequence: Synthetic peptide
  Seed: DPRMCSLMQGSTLPRRS
DPRMISLMQISTSPRRS

SEQ ID NO: 64220 - protein, 17 aa, Artificial Sequence
  Description of Artificial Sequence: Synthetic peptide
  Seed: DPRMCSLMQGSTLPRRS
DPRMISLMQISTTPRRS

SEQ ID NO: 64221 - protein, 17 aa, Artificial Sequence
  Description of Artificial Sequence: Synthetic peptide
  Seed: DPRMCSLMQGSTLPRRS
DPRMISLMQISTVPRRS

SEQ ID NO: 64222 - protein, 17 aa, Artificial Sequence
  Description of Artificial Sequence: Synthetic peptide
  Seed: DPRMCSLMQGSTLPRRS
DPRMISLMQLSTAPRRS

SEQ ID NO: 64223 - protein, 17 aa, Artificial Sequence
  Description of Artificial Sequence: Synthetic peptide
  Seed: DPRMCSLMQGSTLPRRS
DPRMISLMQMSTAPRRS

SEQ ID NO: 64224 - protein, 17 aa, Artificial Sequence
  Description of Artificial Sequence: Synthetic peptide
  Seed: DPRMCSLMQGSTLPRRS
DPRMISLMQNSTAPRRS

SEQ ID NO: 64225 - protein, 17 aa, Artificial Sequence
  Description of Artificial Sequence: Synthetic peptide
  Seed: DPRMCSLMQGSTLPRRS
DPRMISLMQNSTIPRRS

SEQ ID NO: 64226 - protein, 17 aa, Artificial Sequence
  Description of Artificial Sequence: Synthetic peptide
  Seed: DPRMCSLMQGSTLPRRS
DPRMISLMQNSTLPRRS

SEQ ID NO: 64227 - protein, 17 aa, Artificial Sequence
  Description of Artificial Sequence: Synthetic peptide
  Seed: DPRMCSLMQGSTLPRRS
DPRMISLMQNSTVPRRS

SEQ ID NO: 64228 - protein, 17 aa, Artificial Sequence
  Description of Artificial Sequence: Synthetic peptide
  Seed: DPRMCSLMQGSTLPRRS
DPRMISLMQPSTAPRRS

SEQ ID NO: 64229 - protein, 17 aa, Artificial Sequence
  Description of Artificial Sequence: Synthetic peptide
  Seed: DPRMCSLMQGSTLPRRS
DPRMISLMQPSTIPRRS

SEQ ID NO: 64230 - protein, 17 aa, Artificial Sequence
  Description of Artificial Sequence: Synthetic peptide
  Seed: DPRMCSLMQGSTLPRRS
DPRMISLMQPSTLPRRS

SEQ ID NO: 64231 - protein, 17 aa, Artificial Sequence
  Description of Artificial Sequence: Synthetic peptide
  Seed: DPRMCSLMQGSTLPRRS
DPRMISLMQPSTMPRRS

SEQ ID NO: 64232 - protein, 17 aa, Artificial Sequence
  Description of Artificial Sequence: Synthetic peptide
  Seed: DPRMCSLMQGSTLPRRS
DPRMISLMQPSTNPRRS

SEQ ID NO: 64233 - protein, 17 aa, Artificial Sequence
  Description of Artificial Sequence: Synthetic peptide
  Seed: DPRMCSLMQGSTLPRRS
DPRMISLMQPSTSPRRS

SEQ ID NO: 64234 - protein, 17 aa, Artificial Sequence
  Description of Artificial Sequence: Synthetic peptide
  Seed: DPRMCSLMQGSTLPRRS
DPRMISLMQPSTTPRRS

SEQ ID NO: 64235 - protein, 17 aa, Artificial Sequence
  Description of Artificial Sequence: Synthetic peptide
  Seed: DPRMCSLMQGSTLPRRS
DPRMISLMQPSTVPRRS

SEQ ID NO: 64236 - protein, 17 aa, Artificial Sequence
  Description of Artificial Sequence: Synthetic peptide
  Seed: DPRMCSLMQGSTLPRRS
DPRMISLMQSSTAPRRS

SEQ ID NO: 64237 - protein, 17 aa, Artificial Sequence
  Description of Artificial Sequence: Synthetic peptide
  Seed: DPRMCSLMQGSTLPRRS
DPRMISLMQSSTIPRRS

SEQ ID NO: 64238 - protein, 17 aa, Artificial Sequence
  Description of Artificial Sequence: Synthetic peptide
  Seed: DPRMCSLMQGSTLPRRS
DPRMISLMQSSTLPRRS

SEQ ID NO: 64239 - protein, 17 aa, Artificial Sequence
  Description of Artificial Sequence: Synthetic peptide
  Seed: DPRMCSLMQGSTLPRRS
DPRMISLMQSSTMPRRS

SEQ ID NO: 64240 - protein, 17 aa, Artificial Sequence
  Description of Artificial Sequence: Synthetic peptide
  Seed: DPRMCSLMQGSTLPRRS
DPRMISLMQSSTNPRRS

SEQ ID NO: 64241 - protein, 17 aa, Artificial Sequence
  Description of Artificial Sequence: Synthetic peptide
  Seed: DPRMCSLMQGSTLPRRS
DPRMISLMQSSTSPRRS

SEQ ID NO: 64242 - protein, 17 aa, Artificial Sequence
  Description of Artificial Sequence: Synthetic peptide
  Seed: DPRMCSLMQGSTLPRRS
DPRMISLMQSSTTPRRS

SEQ ID NO: 64243 - protein, 17 aa, Artificial Sequence
  Description of Artificial Sequence: Synthetic peptide
  Seed: DPRMCSLMQGSTLPRRS
DPRMISLMQSSTVPRRS

SEQ ID NO: 64244 - protein, 17 aa, Artificial Sequence
  Description of Artificial Sequence: Synthetic peptide
  Seed: DPRMCSLMQGSTLPRRS
DPRMISLMQTSTAPRRS

SEQ ID NO: 64245 - protein, 17 aa, Artificial Sequence
  Description of Artificial Sequence: Synthetic peptide
  Seed: DPRMCSLMQGSTLPRRS
DPRMISLMQTSTIPRRS

SEQ ID NO: 64246 - protein, 17 aa, Artificial Sequence
  Description of Artificial Sequence: Synthetic peptide
  Seed: DPRMCSLMQGSTLPRRS
DPRMISLMQTSTLPRRS

SEQ ID NO: 64247 - protein, 17 aa, Artificial Sequence
  Description of Artificial Sequence: Synthetic peptide
  Seed: DPRMCSLMQGSTLPRRS
DPRMISLMQTSTNPRRS

SEQ ID NO: 64248 - protein, 17 aa, Artificial Sequence
  Description of Artificial Sequence: Synthetic peptide
  Seed: DPRMCSLMQGSTLPRRS
DPRMISLMQTSTSPRRS

SEQ ID NO: 64249 - protein, 17 aa, Artificial Sequence
  Description of Artificial Sequence: Synthetic peptide
  Seed: DPRMCSLMQGSTLPRRS
DPRMISLMQTSTTPRRS

SEQ ID NO: 64250 - protein, 17 aa, Artificial Sequence
  Description of Artificial Sequence: Synthetic peptide
  Seed: DPRMCSLMQGSTLPRRS
DPRMISLMQTSTVPRRS

SEQ ID NO: 64251 - protein, 17 aa, Artificial Sequence
  Description of Artificial Sequence: Synthetic peptide
  Seed: DPRMCSLMQGSTLPRRS
DPRMISLMQVSTAPRRS

SEQ ID NO: 64252 - protein, 17 aa, Artificial Sequence
  Description of Artificial Sequence: Synthetic peptide
  Seed: DPRMCSLMQGSTLPRRS
DPRMISLMQVSTIPRRS

SEQ ID NO: 64253 - protein, 17 aa, Artificial Sequence
  Description of Artificial Sequence: Synthetic peptide
  Seed: DPRMCSLMQGSTLPRRS
DPRMISLMQVSTLPRRS

SEQ ID NO: 64254 - protein, 17 aa, Artificial Sequence
  Description of Artificial Sequence: Synthetic peptide
  Seed: DPRMCSLMQGSTLPRRS
DPRMISLMQVSTMPRRS

SEQ ID NO: 64255 - protein, 17 aa, Artificial Sequence
  Description of Artificial Sequence: Synthetic peptide
  Seed: DPRMCSLMQGSTLPRRS
DPRMISLMQVSTNPRRS

SEQ ID NO: 64256 - protein, 17 aa, Artificial Sequence
  Description of Artificial Sequence: Synthetic peptide
  Seed: DPRMCSLMQGSTLPRRS
DPRMISLMQVSTSPRRS

SEQ ID NO: 64257 - protein, 17 aa, Artificial Sequence
  Description of Artificial Sequence: Synthetic peptide
  Seed: DPRMCSLMQGSTLPRRS
DPRMISLMQVSTTPRRS

SEQ ID NO: 64258 - protein, 17 aa, Artificial Sequence
  Description of Artificial Sequence: Synthetic peptide
  Seed: DPRMCSLMQGSTLPRRS
DPRMISLMQVSTVPRRS

SEQ ID NO: 64259 - protein, 17 aa, Artificial Sequence
  Description of Artificial Sequence: Synthetic peptide
  Seed: DPRMCSLMQGSTLPRRS
DPRMISLQQASTAPRRS

SEQ ID NO: 64260 - protein, 17 aa, Artificial Sequence
  Description of Artificial Sequence: Synthetic peptide
  Seed: DPRMCSLMQGSTLPRRS
DPRMISLQQASTIPRRS

SEQ ID NO: 64261 - protein, 17 aa, Artificial Sequence
  Description of Artificial Sequence: Synthetic peptide
  Seed: DPRMCSLMQGSTLPRRS
DPRMISLQQASTLPRRS

SEQ ID NO: 64262 - protein, 17 aa, Artificial Sequence
  Description of Artificial Sequence: Synthetic peptide
  Seed: DPRMCSLMQGSTLPRRS
DPRMISLQQASTVPRRS

SEQ ID NO: 64263 - protein, 17 aa, Artificial Sequence
  Description of Artificial Sequence: Synthetic peptide
  Seed: DPRMCSLMQGSTLPRRS
DPRMISLQQGSTAPRRS

SEQ ID NO: 64264 - protein, 17 aa, Artificial Sequence
  Description of Artificial Sequence: Synthetic peptide
  Seed: DPRMCSLMQGSTLPRRS
DPRMISLQQGSTIPRRS

SEQ ID NO: 64265 - protein, 17 aa, Artificial Sequence
  Description of Artificial Sequence: Synthetic peptide
  Seed: DPRMCSLMQGSTLPRRS
DPRMISLQQGSTLPRRS

SEQ ID NO: 64266 - protein, 17 aa, Artificial Sequence
  Description of Artificial Sequence: Synthetic peptide
  Seed: DPRMCSLMQGSTLPRRS
DPRMISLQQGSTVPRRS

SEQ ID NO: 64267 - protein, 17 aa, Artificial Sequence
  Description of Artificial Sequence: Synthetic peptide
  Seed: DPRMCSLMQGSTLPRRS
DPRMISLQQSSTLPRRS

SEQ ID NO: 64268 - protein, 17 aa, Artificial Sequence
  Description of Artificial Sequence: Synthetic peptide
  Seed: DPRMCSLMQGSTLPRRS
DPRMISLQQSSTVPRRS

SEQ ID NO: 64269 - protein, 17 aa, Artificial Sequence
  Description of Artificial Sequence: Synthetic peptide
  Seed: DPRMCSLMQGSTLPRRS
DPRMISLSQASTLPRRS

SEQ ID NO: 64270 - protein, 17 aa, Artificial Sequence
  Description of Artificial Sequence: Synthetic peptide
  Seed: DPRMCSLMQGSTLPRRS
DPRMISLVQASTAPRRS

SEQ ID NO: 64271 - protein, 17 aa, Artificial Sequence
  Description of Artificial Sequence: Synthetic peptide
  Seed: DPRMCSLMQGSTLPRRS
DPRMISLVQASTIPRRS

SEQ ID NO: 64272 - protein, 17 aa, Artificial Sequence
  Description of Artificial Sequence: Synthetic peptide
  Seed: DPRMCSLMQGSTLPRRS
DPRMISLVQASTLPRRS

SEQ ID NO: 64273 - protein, 17 aa, Artificial Sequence
  Description of Artificial Sequence: Synthetic peptide
  Seed: DPRMCSLMQGSTLPRRS
DPRMISLVQASTVPRRS

SEQ ID NO: 64274 - protein, 17 aa, Artificial Sequence
  Description of Artificial Sequence: Synthetic peptide
  Seed: DPRMCSLMQGSTLPRRS
DPRMISLVQGSTAPRRS

SEQ ID NO: 64275 - protein, 17 aa, Artificial Sequence
  Description of Artificial Sequence: Synthetic peptide
  Seed: DPRMCSLMQGSTLPRRS
DPRMISLVQGSTIPRRS

SEQ ID NO: 64276 - protein, 17 aa, Artificial Sequence
  Description of Artificial Sequence: Synthetic peptide
  Seed: DPRMCSLMQGSTLPRRS
DPRMISLVQGSTLPRRS

SEQ ID NO: 64277 - protein, 17 aa, Artificial Sequence
  Description of Artificial Sequence: Synthetic peptide
  Seed: DPRMCSLMQGSTLPRRS
DPRMISLVQGSTVPRRS

SEQ ID NO: 64278 - protein, 17 aa, Artificial Sequence
  Description of Artificial Sequence: Synthetic peptide
  Seed: DPRMCSLMQGSTLPRRS
DPRMISLVQSSTLPRRS

SEQ ID NO: 64279 - protein, 17 aa, Artificial Sequence
  Description of Artificial Sequence: Synthetic peptide
  Seed: DPRMCSLMQGSTLPRRS
DPRMISLVQSSTVPRRS

SEQ ID NO: 64280 - protein, 17 aa, Artificial Sequence
  Description of Artificial Sequence: Synthetic peptide
  Seed: DPRMCSLMQGSTLPRRS
DPRMLSLAQASTAPRRS

SEQ ID NO: 64281 - protein, 17 aa, Artificial Sequence
  Description of Artificial Sequence: Synthetic peptide
  Seed: DPRMCSLMQGSTLPRRS
DPRMLSLAQASTIPRRS

SEQ ID NO: 64282 - protein, 17 aa, Artificial Sequence
  Description of Artificial Sequence: Synthetic peptide
  Seed: DPRMCSLMQGSTLPRRS
DPRMLSLAQASTLPRRS

SEQ ID NO: 64283 - protein, 17 aa, Artificial Sequence
  Description of Artificial Sequence: Synthetic peptide
  Seed: DPRMCSLMQGSTLPRRS
DPRMLSLAQASTMPRRS

SEQ ID NO: 64284 - protein, 17 aa, Artificial Sequence
  Description of Artificial Sequence: Synthetic peptide
  Seed: DPRMCSLMQGSTLPRRS
DPRMLSLAQASTVPRRS

SEQ ID NO: 64285 - protein, 17 aa, Artificial Sequence
  Description of Artificial Sequence: Synthetic peptide
  Seed: DPRMCSLMQGSTLPRRS
DPRMLSLAQGSTAPRRS

SEQ ID NO: 64286 - protein, 17 aa, Artificial Sequence
  Description of Artificial Sequence: Synthetic peptide
  Seed: DPRMCSLMQGSTLPRRS
DPRMLSLAQGSTIPRRS

SEQ ID NO: 64287 - protein, 17 aa, Artificial Sequence
  Description of Artificial Sequence: Synthetic peptide
  Seed: DPRMCSLMQGSTLPRRS
DPRMLSLAQGSTLPRRS

SEQ ID NO: 64288 - protein, 17 aa, Artificial Sequence
  Description of Artificial Sequence: Synthetic peptide
  Seed: DPRMCSLMQGSTLPRRS
DPRMLSLAQGSTVPRRS

SEQ ID NO: 64289 - protein, 17 aa, Artificial Sequence
  Description of Artificial Sequence: Synthetic peptide
  Seed: DPRMCSLMQGSTLPRRS
DPRMLSLAQSSTLPRRS

SEQ ID NO: 64290 - protein, 17 aa, Artificial Sequence
  Description of Artificial Sequence: Synthetic peptide
  Seed: DPRMCSLMQGSTLPRRS
DPRMLSLAQSSTVPRRS

SEQ ID NO: 64291 - protein, 17 aa, Artificial Sequence
  Description of Artificial Sequence: Synthetic peptide
  Seed: DPRMCSLMQGSTLPRRS
DPRMLSLIQASTAPRRS

SEQ ID NO: 64292 - protein, 17 aa, Artificial Sequence
  Description of Artificial Sequence: Synthetic peptide
  Seed: DPRMCSLMQGSTLPRRS
DPRMLSLIQASTIPRRS

SEQ ID NO: 64293 - protein, 17 aa, Artificial Sequence
  Description of Artificial Sequence: Synthetic peptide
  Seed: DPRMCSLMQGSTLPRRS
DPRMLSLIQASTLPRRS

SEQ ID NO: 64294 - protein, 17 aa, Artificial Sequence
  Description of Artificial Sequence: Synthetic peptide
  Seed: DPRMCSLMQGSTLPRRS
DPRMLSLIQASTMPRRS

SEQ ID NO: 64295 - protein, 17 aa, Artificial Sequence
  Description of Artificial Sequence: Synthetic peptide
  Seed: DPRMCSLMQGSTLPRRS
DPRMLSLIQASTNPRRS

SEQ ID NO: 64296 - protein, 17 aa, Artificial Sequence
  Description of Artificial Sequence: Synthetic peptide
  Seed: DPRMCSLMQGSTLPRRS
DPRMLSLIQASTSPRRS

SEQ ID NO: 64297 - protein, 17 aa, Artificial Sequence
  Description of Artificial Sequence: Synthetic peptide
  Seed: DPRMCSLMQGSTLPRRS
DPRMLSLIQASTTPRRS

SEQ ID NO: 64298 - protein, 17 aa, Artificial Sequence
  Description of Artificial Sequence: Synthetic peptide
  Seed: DPRMCSLMQGSTLPRRS
DPRMLSLIQASTVPRRS

SEQ ID NO: 64299 - protein, 17 aa, Artificial Sequence
  Description of Artificial Sequence: Synthetic peptide
  Seed: DPRMCSLMQGSTLPRRS
DPRMLSLIQGSTAPRRS

SEQ ID NO: 64300 - protein, 17 aa, Artificial Sequence
  Description of Artificial Sequence: Synthetic peptide
  Seed: DPRMCSLMQGSTLPRRS
DPRMLSLIQGSTIPRRS

SEQ ID NO: 64301 - protein, 17 aa, Artificial Sequence
  Description of Artificial Sequence: Synthetic peptide
  Seed: DPRMCSLMQGSTLPRRS
DPRMLSLIQGSTLPRRS

SEQ ID NO: 64302 - protein, 17 aa, Artificial Sequence
  Description of Artificial Sequence: Synthetic peptide
  Seed: DPRMCSLMQGSTLPRRS
DPRMLSLIQGSTVPRRS

SEQ ID NO: 64303 - protein, 17 aa, Artificial Sequence
  Description of Artificial Sequence: Synthetic peptide
  Seed: DPRMCSLMQGSTLPRRS
DPRMLSLIQPSTAPRRS

SEQ ID NO: 64304 - protein, 17 aa, Artificial Sequence
  Description of Artificial Sequence: Synthetic peptide
  Seed: DPRMCSLMQGSTLPRRS
DPRMLSLIQPSTLPRRS

SEQ ID NO: 64305 - protein, 17 aa, Artificial Sequence
  Description of Artificial Sequence: Synthetic peptide
  Seed: DPRMCSLMQGSTLPRRS
DPRMLSLIQPSTNPRRS

SEQ ID NO: 64306 - protein, 17 aa, Artificial Sequence
  Description of Artificial Sequence: Synthetic peptide
  Seed: DPRMCSLMQGSTLPRRS
DPRMLSLIQPSTSPRRS

SEQ ID NO: 64307 - protein, 17 aa, Artificial Sequence
  Description of Artificial Sequence: Synthetic peptide
  Seed: DPRMCSLMQGSTLPRRS
DPRMLSLIQPSTVPRRS

SEQ ID NO: 64308 - protein, 17 aa, Artificial Sequence
  Description of Artificial Sequence: Synthetic peptide
  Seed: DPRMCSLMQGSTLPRRS
DPRMLSLIQSSTAPRRS

SEQ ID NO: 64309 - protein, 17 aa, Artificial Sequence
  Description of Artificial Sequence: Synthetic peptide
  Seed: DPRMCSLMQGSTLPRRS
DPRMLSLIQSSTIPRRS

SEQ ID NO: 64310 - protein, 17 aa, Artificial Sequence
  Description of Artificial Sequence: Synthetic peptide
  Seed: DPRMCSLMQGSTLPRRS
DPRMLSLIQSSTLPRRS

SEQ ID NO: 64311 - protein, 17 aa, Artificial Sequence
  Description of Artificial Sequence: Synthetic peptide
  Seed: DPRMCSLMQGSTLPRRS
DPRMLSLIQSSTSPRRS

SEQ ID NO: 64312 - protein, 17 aa, Artificial Sequence
  Description of Artificial Sequence: Synthetic peptide
  Seed: DPRMCSLMQGSTLPRRS
DPRMLSLIQSSTVPRRS

SEQ ID NO: 64313 - protein, 17 aa, Artificial Sequence
  Description of Artificial Sequence: Synthetic peptide
  Seed: DPRMCSLMQGSTLPRRS
DPRMLSLIQTSTAPRRS

SEQ ID NO: 64314 - protein, 17 aa, Artificial Sequence
  Description of Artificial Sequence: Synthetic peptide
  Seed: DPRMCSLMQGSTLPRRS
DPRMLSLIQVSTAPRRS

SEQ ID NO: 64315 - protein, 17 aa, Artificial Sequence
  Description of Artificial Sequence: Synthetic peptide
  Seed: DPRMCSLMQGSTLPRRS
DPRMLSLLQASTAPRRS

SEQ ID NO: 64316 - protein, 17 aa, Artificial Sequence
  Description of Artificial Sequence: Synthetic peptide
  Seed: DPRMCSLMQGSTLPRRS
DPRMLSLLQASTGPRRS

SEQ ID NO: 64317 - protein, 17 aa, Artificial Sequence
  Description of Artificial Sequence: Synthetic peptide
  Seed: DPRMCSLMQGSTLPRRS
DPRMLSLLQASTIPRRS

SEQ ID NO: 64318 - protein, 17 aa, Artificial Sequence
  Description of Artificial Sequence: Synthetic peptide
  Seed: DPRMCSLMQGSTLPRRS
DPRMLSLLQASTLPRRS

SEQ ID NO: 64319 - protein, 17 aa, Artificial Sequence
  Description of Artificial Sequence: Synthetic peptide
  Seed: DPRMCSLMQGSTLPRRS
DPRMLSLLQASTMPRRS

SEQ ID NO: 64320 - protein, 17 aa, Artificial Sequence
  Description of Artificial Sequence: Synthetic peptide
  Seed: DPRMCSLMQGSTLPRRS
DPRMLSLLQASTNPRRS

SEQ ID NO: 64321 - protein, 17 aa, Artificial Sequence
  Description of Artificial Sequence: Synthetic peptide
  Seed: DPRMCSLMQGSTLPRRS
DPRMLSLLQASTSPRRS

SEQ ID NO: 64322 - protein, 17 aa, Artificial Sequence
  Description of Artificial Sequence: Synthetic peptide
  Seed: DPRMCSLMQGSTLPRRS
DPRMLSLLQASTTPRRS

SEQ ID NO: 64323 - protein, 17 aa, Artificial Sequence
  Description of Artificial Sequence: Synthetic peptide
  Seed: DPRMCSLMQGSTLPRRS
DPRMLSLLQASTVPRRS

SEQ ID NO: 64324 - protein, 17 aa, Artificial Sequence
  Description of Artificial Sequence: Synthetic peptide
  Seed: DPRMCSLMQGSTLPRRS
DPRMLSLLQGSTAPRRS

SEQ ID NO: 64325 - protein, 17 aa, Artificial Sequence
  Description of Artificial Sequence: Synthetic peptide
  Seed: DPRMCSLMQGSTLPRRS
DPRMLSLLQGSTGPRRS

SEQ ID NO: 64326 - protein, 17 aa, Artificial Sequence
  Description of Artificial Sequence: Synthetic peptide
  Seed: DPRMCSLMQGSTLPRRS
DPRMLSLLQGSTIPRRS

SEQ ID NO: 64327 - protein, 17 aa, Artificial Sequence
  Description of Artificial Sequence: Synthetic peptide
  Seed: DPRMCSLMQGSTLPRRS
DPRMLSLLQGSTLPRRS

SEQ ID NO: 64328 - protein, 17 aa, Artificial Sequence
  Description of Artificial Sequence: Synthetic peptide
  Seed: DPRMCSLMQGSTLPRRS
DPRMLSLLQGSTMPRRS

SEQ ID NO: 64329 - protein, 17 aa, Artificial Sequence
  Description of Artificial Sequence: Synthetic peptide
  Seed: DPRMCSLMQGSTLPRRS
DPRMLSLLQGSTSPRRS

SEQ ID NO: 64330 - protein, 17 aa, Artificial Sequence
  Description of Artificial Sequence: Synthetic peptide
  Seed: DPRMCSLMQGSTLPRRS
DPRMLSLLQGSTTPRRS

SEQ ID NO: 64331 - protein, 17 aa, Artificial Sequence
  Description of Artificial Sequence: Synthetic peptide
  Seed: DPRMCSLMQGSTLPRRS
DPRMLSLLQGSTVPRRS

SEQ ID NO: 64332 - protein, 17 aa, Artificial Sequence
  Description of Artificial Sequence: Synthetic peptide
  Seed: DPRMCSLMQGSTLPRRS
DPRMLSLLQISTAPRRS

SEQ ID NO: 64333 - protein, 17 aa, Artificial Sequence
  Description of Artificial Sequence: Synthetic peptide
  Seed: DPRMCSLMQGSTLPRRS
DPRMLSLLQISTNPRRS

SEQ ID NO: 64334 - protein, 17 aa, Artificial Sequence
  Description of Artificial Sequence: Synthetic peptide
  Seed: DPRMCSLMQGSTLPRRS
DPRMLSLLQISTSPRRS

SEQ ID NO: 64335 - protein, 17 aa, Artificial Sequence
  Description of Artificial Sequence: Synthetic peptide
  Seed: DPRMCSLMQGSTLPRRS
DPRMLSLLQNSTAPRRS

SEQ ID NO: 64336 - protein, 17 aa, Artificial Sequence
  Description of Artificial Sequence: Synthetic peptide
  Seed: DPRMCSLMQGSTLPRRS
DPRMLSLLQNSTIPRRS

SEQ ID NO: 64337 - protein, 17 aa, Artificial Sequence
  Description of Artificial Sequence: Synthetic peptide
  Seed: DPRMCSLMQGSTLPRRS
DPRMLSLLQNSTLPRRS

SEQ ID NO: 64338 - protein, 17 aa, Artificial Sequence
  Description of Artificial Sequence: Synthetic peptide
  Seed: DPRMCSLMQGSTLPRRS
DPRMLSLLQNSTVPRRS

SEQ ID NO: 64339 - protein, 17 aa, Artificial Sequence
  Description of Artificial Sequence: Synthetic peptide
  Seed: DPRMCSLMQGSTLPRRS
DPRMLSLLQPSTAPRRS

SEQ ID NO: 64340 - protein, 17 aa, Artificial Sequence
  Description of Artificial Sequence: Synthetic peptide
  Seed: DPRMCSLMQGSTLPRRS
DPRMLSLLQPSTIPRRS

SEQ ID NO: 64341 - protein, 17 aa, Artificial Sequence
  Description of Artificial Sequence: Synthetic peptide
  Seed: DPRMCSLMQGSTLPRRS
DPRMLSLLQPSTLPRRS

SEQ ID NO: 64342 - protein, 17 aa, Artificial Sequence
  Description of Artificial Sequence: Synthetic peptide
  Seed: DPRMCSLMQGSTLPRRS
DPRMLSLLQPSTMPRRS

SEQ ID NO: 64343 - protein, 17 aa, Artificial Sequence
  Description of Artificial Sequence: Synthetic peptide
  Seed: DPRMCSLMQGSTLPRRS
DPRMLSLLQPSTNPRRS

SEQ ID NO: 64344 - protein, 17 aa, Artificial Sequence
  Description of Artificial Sequence: Synthetic peptide
  Seed: DPRMCSLMQGSTLPRRS
DPRMLSLLQPSTSPRRS

SEQ ID NO: 64345 - protein, 17 aa, Artificial Sequence
  Description of Artificial Sequence: Synthetic peptide
  Seed: DPRMCSLMQGSTLPRRS
DPRMLSLLQPSTTPRRS

SEQ ID NO: 64346 - protein, 17 aa, Artificial Sequence
  Description of Artificial Sequence: Synthetic peptide
  Seed: DPRMCSLMQGSTLPRRS
DPRMLSLLQPSTVPRRS

SEQ ID NO: 64347 - protein, 17 aa, Artificial Sequence
  Description of Artificial Sequence: Synthetic peptide
  Seed: DPRMCSLMQGSTLPRRS
DPRMLSLLQSSTAPRRS

SEQ ID NO: 64348 - protein, 17 aa, Artificial Sequence
  Description of Artificial Sequence: Synthetic peptide
  Seed: DPRMCSLMQGSTLPRRS
DPRMLSLLQSSTIPRRS

SEQ ID NO: 64349 - protein, 17 aa, Artificial Sequence
  Description of Artificial Sequence: Synthetic peptide
  Seed: DPRMCSLMQGSTLPRRS
DPRMLSLLQSSTLPRRS

SEQ ID NO: 64350 - protein, 17 aa, Artificial Sequence
  Description of Artificial Sequence: Synthetic peptide
  Seed: DPRMCSLMQGSTLPRRS
DPRMLSLLQSSTMPRRS

SEQ ID NO: 64351 - protein, 17 aa, Artificial Sequence
  Description of Artificial Sequence: Synthetic peptide
  Seed: DPRMCSLMQGSTLPRRS
DPRMLSLLQSSTNPRRS

SEQ ID NO: 64352 - protein, 17 aa, Artificial Sequence
  Description of Artificial Sequence: Synthetic peptide
  Seed: DPRMCSLMQGSTLPRRS
DPRMLSLLQSSTSPRRS

SEQ ID NO: 64353 - protein, 17 aa, Artificial Sequence
  Description of Artificial Sequence: Synthetic peptide
  Seed: DPRMCSLMQGSTLPRRS
DPRMLSLLQSSTTPRRS

SEQ ID NO: 64354 - protein, 17 aa, Artificial Sequence
  Description of Artificial Sequence: Synthetic peptide
  Seed: DPRMCSLMQGSTLPRRS
DPRMLSLLQSSTVPRRS

SEQ ID NO: 64355 - protein, 17 aa, Artificial Sequence
  Description of Artificial Sequence: Synthetic peptide
  Seed: DPRMCSLMQGSTLPRRS
DPRMLSLLQTSTAPRRS

SEQ ID NO: 64356 - protein, 17 aa, Artificial Sequence
  Description of Artificial Sequence: Synthetic peptide
  Seed: DPRMCSLMQGSTLPRRS
DPRMLSLLQTSTIPRRS

SEQ ID NO: 64357 - protein, 17 aa, Artificial Sequence
  Description of Artificial Sequence: Synthetic peptide
  Seed: DPRMCSLMQGSTLPRRS
DPRMLSLLQTSTLPRRS

SEQ ID NO: 64358 - protein, 17 aa, Artificial Sequence
  Description of Artificial Sequence: Synthetic peptide
  Seed: DPRMCSLMQGSTLPRRS
DPRMLSLLQTSTNPRRS

SEQ ID NO: 64359 - protein, 17 aa, Artificial Sequence
  Description of Artificial Sequence: Synthetic peptide
  Seed: DPRMCSLMQGSTLPRRS
DPRMLSLLQTSTSPRRS

SEQ ID NO: 64360 - protein, 17 aa, Artificial Sequence
  Description of Artificial Sequence: Synthetic peptide
  Seed: DPRMCSLMQGSTLPRRS
DPRMLSLLQTSTTPRRS

SEQ ID NO: 64361 - protein, 17 aa, Artificial Sequence
  Description of Artificial Sequence: Synthetic peptide
  Seed: DPRMCSLMQGSTLPRRS
DPRMLSLLQTSTVPRRS

SEQ ID NO: 64362 - protein, 17 aa, Artificial Sequence
  Description of Artificial Sequence: Synthetic peptide
  Seed: DPRMCSLMQGSTLPRRS
DPRMLSLLQVSTAPRRS

SEQ ID NO: 64363 - protein, 17 aa, Artificial Sequence
  Description of Artificial Sequence: Synthetic peptide
  Seed: DPRMCSLMQGSTLPRRS
DPRMLSLLQVSTLPRRS

SEQ ID NO: 64364 - protein, 17 aa, Artificial Sequence
  Description of Artificial Sequence: Synthetic peptide
  Seed: DPRMCSLMQGSTLPRRS
DPRMLSLLQVSTNPRRS

SEQ ID NO: 64365 - protein, 17 aa, Artificial Sequence
  Description of Artificial Sequence: Synthetic peptide
  Seed: DPRMCSLMQGSTLPRRS
DPRMLSLLQVSTSPRRS

SEQ ID NO: 64366 - protein, 17 aa, Artificial Sequence
  Description of Artificial Sequence: Synthetic peptide
  Seed: DPRMCSLMQGSTLPRRS
DPRMLSLLQVSTTPRRS

SEQ ID NO: 64367 - protein, 17 aa, Artificial Sequence
  Description of Artificial Sequence: Synthetic peptide
  Seed: DPRMCSLMQGSTLPRRS
DPRMLSLLQVSTVPRRS

SEQ ID NO: 64368 - protein, 17 aa, Artificial Sequence
  Description of Artificial Sequence: Synthetic peptide
  Seed: DPRMCSLMQGSTLPRRS
DPRMLSLMQASTAPRRS

SEQ ID NO: 64369 - protein, 17 aa, Artificial Sequence
  Description of Artificial Sequence: Synthetic peptide
  Seed: DPRMCSLMQGSTLPRRS
DPRMLSLMQASTGPRRS

SEQ ID NO: 64370 - protein, 17 aa, Artificial Sequence
  Description of Artificial Sequence: Synthetic peptide
  Seed: DPRMCSLMQGSTLPRRS
DPRMLSLMQASTIPRRS

SEQ ID NO: 64371 - protein, 17 aa, Artificial Sequence
  Description of Artificial Sequence: Synthetic peptide
  Seed: DPRMCSLMQGSTLPRRS
DPRMLSLMQASTLPRRS

SEQ ID NO: 64372 - protein, 17 aa, Artificial Sequence
  Description of Artificial Sequence: Synthetic peptide
  Seed: DPRMCSLMQGSTLPRRS
DPRMLSLMQASTMPRRS

SEQ ID NO: 64373 - protein, 17 aa, Artificial Sequence
  Description of Artificial Sequence: Synthetic peptide
  Seed: DPRMCSLMQGSTLPRRS
DPRMLSLMQASTNPRRS

SEQ ID NO: 64374 - protein, 17 aa, Artificial Sequence
  Description of Artificial Sequence: Synthetic peptide
  Seed: DPRMCSLMQGSTLPRRS
DPRMLSLMQASTSPRRS

SEQ ID NO: 64375 - protein, 17 aa, Artificial Sequence
  Description of Artificial Sequence: Synthetic peptide
  Seed: DPRMCSLMQGSTLPRRS
DPRMLSLMQASTTPRRS

SEQ ID NO: 64376 - protein, 17 aa, Artificial Sequence
  Description of Artificial Sequence: Synthetic peptide
  Seed: DPRMCSLMQGSTLPRRS
DPRMLSLMQASTVPRRS

SEQ ID NO: 64377 - protein, 17 aa, Artificial Sequence
  Description of Artificial Sequence: Synthetic peptide
  Seed: DPRMCSLMQGSTLPRRS
DPRMLSLMQGSTAPRRS

SEQ ID NO: 64378 - protein, 17 aa, Artificial Sequence
  Description of Artificial Sequence: Synthetic peptide
  Seed: DPRMCSLMQGSTLPRRS
DPRMLSLMQGSTIPRRS

SEQ ID NO: 64379 - protein, 17 aa, Artificial Sequence
  Description of Artificial Sequence: Synthetic peptide
  Seed: DPRMCSLMQGSTLPRRS
DPRMLSLMQGSTLPRRS

SEQ ID NO: 64380 - protein, 17 aa, Artificial Sequence
  Description of Artificial Sequence: Synthetic peptide
  Seed: DPRMCSLMQGSTLPRRS
DPRMLSLMQGSTMPRRS

SEQ ID NO: 64381 - protein, 17 aa, Artificial Sequence
  Description of Artificial Sequence: Synthetic peptide
  Seed: DPRMCSLMQGSTLPRRS
DPRMLSLMQGSTSPRRS

SEQ ID NO: 64382 - protein, 17 aa, Artificial Sequence
  Description of Artificial Sequence: Synthetic peptide
  Seed: DPRMCSLMQGSTLPRRS
DPRMLSLMQGSTTPRRS

SEQ ID NO: 64383 - protein, 17 aa, Artificial Sequence
  Description of Artificial Sequence: Synthetic peptide
  Seed: DPRMCSLMQGSTLPRRS
DPRMLSLMQGSTVPRRS

SEQ ID NO: 64384 - protein, 17 aa, Artificial Sequence
  Description of Artificial Sequence: Synthetic peptide
  Seed: DPRMCSLMQGSTLPRRS
DPRMLSLMQISTAPRRS

SEQ ID NO: 64385 - protein, 17 aa, Artificial Sequence
  Description of Artificial Sequence: Synthetic peptide
  Seed: DPRMCSLMQGSTLPRRS
DPRMLSLMQISTNPRRS

SEQ ID NO: 64386 - protein, 17 aa, Artificial Sequence
  Description of Artificial Sequence: Synthetic peptide
  Seed: DPRMCSLMQGSTLPRRS
DPRMLSLMQISTSPRRS

SEQ ID NO: 64387 - protein, 17 aa, Artificial Sequence
  Description of Artificial Sequence: Synthetic peptide
  Seed: DPRMCSLMQGSTLPRRS
DPRMLSLMQISTTPRRS

SEQ ID NO: 64388 - protein, 17 aa, Artificial Sequence
  Description of Artificial Sequence: Synthetic peptide
  Seed: DPRMCSLMQGSTLPRRS
DPRMLSLMQISTVPRRS

SEQ ID NO: 64389 - protein, 17 aa, Artificial Sequence
  Description of Artificial Sequence: Synthetic peptide
  Seed: DPRMCSLMQGSTLPRRS
DPRMLSLMQLSTAPRRS

SEQ ID NO: 64390 - protein, 17 aa, Artificial Sequence
  Description of Artificial Sequence: Synthetic peptide
  Seed: DPRMCSLMQGSTLPRRS
DPRMLSLMQMSTAPRRS

SEQ ID NO: 64391 - protein, 17 aa, Artificial Sequence
  Description of Artificial Sequence: Synthetic peptide
  Seed: DPRMCSLMQGSTLPRRS
DPRMLSLMQNSTAPRRS

SEQ ID NO: 64392 - protein, 17 aa, Artificial Sequence
  Description of Artificial Sequence: Synthetic peptide
  Seed: DPRMCSLMQGSTLPRRS
DPRMLSLMQNSTIPRRS

SEQ ID NO: 64393 - protein, 17 aa, Artificial Sequence
  Description of Artificial Sequence: Synthetic peptide
  Seed: DPRMCSLMQGSTLPRRS
DPRMLSLMQNSTLPRRS

SEQ ID NO: 64394 - protein, 17 aa, Artificial Sequence
  Description of Artificial Sequence: Synthetic peptide
  Seed: DPRMCSLMQGSTLPRRS
DPRMLSLMQNSTVPRRS

SEQ ID NO: 64395 - protein, 17 aa, Artificial Sequence
  Description of Artificial Sequence: Synthetic peptide
  Seed: DPRMCSLMQGSTLPRRS
DPRMLSLMQPSTAPRRS

SEQ ID NO: 64396 - protein, 17 aa, Artificial Sequence
  Description of Artificial Sequence: Synthetic peptide
  Seed: DPRMCSLMQGSTLPRRS
DPRMLSLMQPSTIPRRS

SEQ ID NO: 64397 - protein, 17 aa, Artificial Sequence
  Description of Artificial Sequence: Synthetic peptide
  Seed: DPRMCSLMQGSTLPRRS
DPRMLSLMQPSTLPRRS

SEQ ID NO: 64398 - protein, 17 aa, Artificial Sequence
  Description of Artificial Sequence: Synthetic peptide
  Seed: DPRMCSLMQGSTLPRRS
DPRMLSLMQPSTMPRRS

SEQ ID NO: 64399 - protein, 17 aa, Artificial Sequence
  Description of Artificial Sequence: Synthetic peptide
  Seed: DPRMCSLMQGSTLPRRS
DPRMLSLMQPSTNPRRS

SEQ ID NO: 64400 - protein, 17 aa, Artificial Sequence
  Description of Artificial Sequence: Synthetic peptide
  Seed: DPRMCSLMQGSTLPRRS
DPRMLSLMQPSTSPRRS

SEQ ID NO: 64401 - protein, 17 aa, Artificial Sequence
  Description of Artificial Sequence: Synthetic peptide
  Seed: DPRMCSLMQGSTLPRRS
DPRMLSLMQPSTTPRRS

SEQ ID NO: 64402 - protein, 17 aa, Artificial Sequence
  Description of Artificial Sequence: Synthetic peptide
  Seed: DPRMCSLMQGSTLPRRS
DPRMLSLMQPSTVPRRS

SEQ ID NO: 64403 - protein, 17 aa, Artificial Sequence
  Description of Artificial Sequence: Synthetic peptide
  Seed: DPRMCSLMQGSTLPRRS
DPRMLSLMQSSTAPRRS

SEQ ID NO: 64404 - protein, 17 aa, Artificial Sequence
  Description of Artificial Sequence: Synthetic peptide
  Seed: DPRMCSLMQGSTLPRRS
DPRMLSLMQSSTIPRRS

SEQ ID NO: 64405 - protein, 17 aa, Artificial Sequence
  Description of Artificial Sequence: Synthetic peptide
  Seed: DPRMCSLMQGSTLPRRS
DPRMLSLMQSSTLPRRS

SEQ ID NO: 64406 - protein, 17 aa, Artificial Sequence
  Description of Artificial Sequence: Synthetic peptide
  Seed: DPRMCSLMQGSTLPRRS
DPRMLSLMQSSTMPRRS

SEQ ID NO: 64407 - protein, 17 aa, Artificial Sequence
  Description of Artificial Sequence: Synthetic peptide
  Seed: DPRMCSLMQGSTLPRRS
DPRMLSLMQSSTNPRRS

SEQ ID NO: 64408 - protein, 17 aa, Artificial Sequence
  Description of Artificial Sequence: Synthetic peptide
  Seed: DPRMCSLMQGSTLPRRS
DPRMLSLMQSSTSPRRS

SEQ ID NO: 64409 - protein, 17 aa, Artificial Sequence
  Description of Artificial Sequence: Synthetic peptide
  Seed: DPRMCSLMQGSTLPRRS
DPRMLSLMQSSTTPRRS

SEQ ID NO: 64410 - protein, 17 aa, Artificial Sequence
  Description of Artificial Sequence: Synthetic peptide
  Seed: DPRMCSLMQGSTLPRRS
DPRMLSLMQSSTVPRRS

SEQ ID NO: 64411 - protein, 17 aa, Artificial Sequence
  Description of Artificial Sequence: Synthetic peptide
  Seed: DPRMCSLMQGSTLPRRS
DPRMLSLMQTSTAPRRS

SEQ ID NO: 64412 - protein, 17 aa, Artificial Sequence
  Description of Artificial Sequence: Synthetic peptide
  Seed: DPRMCSLMQGSTLPRRS
DPRMLSLMQTSTIPRRS

SEQ ID NO: 64413 - protein, 17 aa, Artificial Sequence
  Description of Artificial Sequence: Synthetic peptide
  Seed: DPRMCSLMQGSTLPRRS
DPRMLSLMQTSTLPRRS

SEQ ID NO: 64414 - protein, 17 aa, Artificial Sequence
  Description of Artificial Sequence: Synthetic peptide
  Seed: DPRMCSLMQGSTLPRRS
DPRMLSLMQTSTNPRRS

SEQ ID NO: 64415 - protein, 17 aa, Artificial Sequence
  Description of Artificial Sequence: Synthetic peptide
  Seed: DPRMCSLMQGSTLPRRS
DPRMLSLMQTSTSPRRS

SEQ ID NO: 64416 - protein, 17 aa, Artificial Sequence
  Description of Artificial Sequence: Synthetic peptide
  Seed: DPRMCSLMQGSTLPRRS
DPRMLSLMQTSTTPRRS

SEQ ID NO: 64417 - protein, 17 aa, Artificial Sequence
  Description of Artificial Sequence: Synthetic peptide
  Seed: DPRMCSLMQGSTLPRRS
DPRMLSLMQTSTVPRRS

SEQ ID NO: 64418 - protein, 17 aa, Artificial Sequence
  Description of Artificial Sequence: Synthetic peptide
  Seed: DPRMCSLMQGSTLPRRS
DPRMLSLMQVSTAPRRS

SEQ ID NO: 64419 - protein, 17 aa, Artificial Sequence
  Description of Artificial Sequence: Synthetic peptide
  Seed: DPRMCSLMQGSTLPRRS
DPRMLSLMQVSTLPRRS

SEQ ID NO: 64420 - protein, 17 aa, Artificial Sequence
  Description of Artificial Sequence: Synthetic peptide
  Seed: DPRMCSLMQGSTLPRRS
DPRMLSLMQVSTMPRRS

SEQ ID NO: 64421 - protein, 17 aa, Artificial Sequence
  Description of Artificial Sequence: Synthetic peptide
  Seed: DPRMCSLMQGSTLPRRS
DPRMLSLMQVSTNPRRS

SEQ ID NO: 64422 - protein, 17 aa, Artificial Sequence
  Description of Artificial Sequence: Synthetic peptide
  Seed: DPRMCSLMQGSTLPRRS
DPRMLSLMQVSTSPRRS

SEQ ID NO: 64423 - protein, 17 aa, Artificial Sequence
  Description of Artificial Sequence: Synthetic peptide
  Seed: DPRMCSLMQGSTLPRRS
DPRMLSLMQVSTTPRRS

SEQ ID NO: 64424 - protein, 17 aa, Artificial Sequence
  Description of Artificial Sequence: Synthetic peptide
  Seed: DPRMCSLMQGSTLPRRS
DPRMLSLMQVSTVPRRS

SEQ ID NO: 64425 - protein, 17 aa, Artificial Sequence
  Description of Artificial Sequence: Synthetic peptide
  Seed: DPRMCSLMQGSTLPRRS
DPRMLSLQQASTAPRRS

SEQ ID NO: 64426 - protein, 17 aa, Artificial Sequence
  Description of Artificial Sequence: Synthetic peptide
  Seed: DPRMCSLMQGSTLPRRS
DPRMLSLQQASTIPRRS

SEQ ID NO: 64427 - protein, 17 aa, Artificial Sequence
  Description of Artificial Sequence: Synthetic peptide
  Seed: DPRMCSLMQGSTLPRRS
DPRMLSLQQASTLPRRS

SEQ ID NO: 64428 - protein, 17 aa, Artificial Sequence
  Description of Artificial Sequence: Synthetic peptide
  Seed: DPRMCSLMQGSTLPRRS
DPRMLSLQQASTVPRRS

SEQ ID NO: 64429 - protein, 17 aa, Artificial Sequence
  Description of Artificial Sequence: Synthetic peptide
  Seed: DPRMCSLMQGSTLPRRS
DPRMLSLQQGSTIPRRS

SEQ ID NO: 64430 - protein, 17 aa, Artificial Sequence
  Description of Artificial Sequence: Synthetic peptide
  Seed: DPRMCSLMQGSTLPRRS
DPRMLSLQQGSTLPRRS

SEQ ID NO: 64431 - protein, 17 aa, Artificial Sequence
  Description of Artificial Sequence: Synthetic peptide
  Seed: DPRMCSLMQGSTLPRRS
DPRMLSLQQGSTVPRRS

SEQ ID NO: 64432 - protein, 17 aa, Artificial Sequence
  Description of Artificial Sequence: Synthetic peptide
  Seed: DPRMCSLMQGSTLPRRS
DPRMLSLVQASTAPRRS

SEQ ID NO: 64433 - protein, 17 aa, Artificial Sequence
  Description of Artificial Sequence: Synthetic peptide
  Seed: DPRMCSLMQGSTLPRRS
DPRMLSLVQASTIPRRS

SEQ ID NO: 64434 - protein, 17 aa, Artificial Sequence
  Description of Artificial Sequence: Synthetic peptide
  Seed: DPRMCSLMQGSTLPRRS
DPRMLSLVQASTLPRRS

SEQ ID NO: 64435 - protein, 17 aa, Artificial Sequence
  Description of Artificial Sequence: Synthetic peptide
  Seed: DPRMCSLMQGSTLPRRS
DPRMLSLVQASTVPRRS

SEQ ID NO: 64436 - protein, 17 aa, Artificial Sequence
  Description of Artificial Sequence: Synthetic peptide
  Seed: DPRMCSLMQGSTLPRRS
DPRMLSLVQGSTLPRRS

SEQ ID NO: 64437 - protein, 17 aa, Artificial Sequence
  Description of Artificial Sequence: Synthetic peptide
  Seed: DPRMCSLMQGSTLPRRS
DPRMLSLVQGSTVPRRS

SEQ ID NO: 64438 - protein, 17 aa, Artificial Sequence
  Description of Artificial Sequence: Synthetic peptide
  Seed: DPRMCSLMQGSTLPRRS
DPRMMSLAQASTIPRRS

SEQ ID NO: 64439 - protein, 17 aa, Artificial Sequence
  Description of Artificial Sequence: Synthetic peptide
  Seed: DPRMCSLMQGSTLPRRS
DPRMMSLAQASTLPRRS

SEQ ID NO: 64440 - protein, 17 aa, Artificial Sequence
  Description of Artificial Sequence: Synthetic peptide
  Seed: DPRMCSLMQGSTLPRRS
DPRMMSLAQASTVPRRS

SEQ ID NO: 64441 - protein, 17 aa, Artificial Sequence
  Description of Artificial Sequence: Synthetic peptide
  Seed: DPRMCSLMQGSTLPRRS
DPRMMSLIQASTAPRRS

SEQ ID NO: 64442 - protein, 17 aa, Artificial Sequence
  Description of Artificial Sequence: Synthetic peptide
  Seed: DPRMCSLMQGSTLPRRS
DPRMMSLIQASTIPRRS

SEQ ID NO: 64443 - protein, 17 aa, Artificial Sequence
  Description of Artificial Sequence: Synthetic peptide
  Seed: DPRMCSLMQGSTLPRRS
DPRMMSLIQASTLPRRS

SEQ ID NO: 64444 - protein, 17 aa, Artificial Sequence
  Description of Artificial Sequence: Synthetic peptide
  Seed: DPRMCSLMQGSTLPRRS
DPRMMSLIQASTNPRRS

SEQ ID NO: 64445 - protein, 17 aa, Artificial Sequence
  Description of Artificial Sequence: Synthetic peptide
  Seed: DPRMCSLMQGSTLPRRS
DPRMMSLIQASTSPRRS

SEQ ID NO: 64446 - protein, 17 aa, Artificial Sequence
  Description of Artificial Sequence: Synthetic peptide
  Seed: DPRMCSLMQGSTLPRRS
DPRMMSLIQASTVPRRS

SEQ ID NO: 64447 - protein, 17 aa, Artificial Sequence
  Description of Artificial Sequence: Synthetic peptide
  Seed: DPRMCSLMQGSTLPRRS
DPRMMSLIQGSTAPRRS

SEQ ID NO: 64448 - protein, 17 aa, Artificial Sequence
  Description of Artificial Sequence: Synthetic peptide
  Seed: DPRMCSLMQGSTLPRRS
DPRMMSLIQGSTIPRRS

SEQ ID NO: 64449 - protein, 17 aa, Artificial Sequence
  Description of Artificial Sequence: Synthetic peptide
  Seed: DPRMCSLMQGSTLPRRS
DPRMMSLIQGSTLPRRS

SEQ ID NO: 64450 - protein, 17 aa, Artificial Sequence
  Description of Artificial Sequence: Synthetic peptide
  Seed: DPRMCSLMQGSTLPRRS
DPRMMSLIQGSTVPRRS

SEQ ID NO: 64451 - protein, 17 aa, Artificial Sequence
  Description of Artificial Sequence: Synthetic peptide
  Seed: DPRMCSLMQGSTLPRRS
DPRMMSLIQVSTAPRRS

SEQ ID NO: 64452 - protein, 17 aa, Artificial Sequence
  Description of Artificial Sequence: Synthetic peptide
  Seed: DPRMCSLMQGSTLPRRS
DPRMMSLLQASTAPRRS

SEQ ID NO: 64453 - protein, 17 aa, Artificial Sequence
  Description of Artificial Sequence: Synthetic peptide
  Seed: DPRMCSLMQGSTLPRRS
DPRMMSLLQASTIPRRS

SEQ ID NO: 64454 - protein, 17 aa, Artificial Sequence
  Description of Artificial Sequence: Synthetic peptide
  Seed: DPRMCSLMQGSTLPRRS
DPRMMSLLQASTLPRRS

SEQ ID NO: 64455 - protein, 17 aa, Artificial Sequence
  Description of Artificial Sequence: Synthetic peptide
  Seed: DPRMCSLMQGSTLPRRS
DPRMMSLLQASTMPRRS

SEQ ID NO: 64456 - protein, 17 aa, Artificial Sequence
  Description of Artificial Sequence: Synthetic peptide
  Seed: DPRMCSLMQGSTLPRRS
DPRMMSLLQASTNPRRS

SEQ ID NO: 64457 - protein, 17 aa, Artificial Sequence
  Description of Artificial Sequence: Synthetic peptide
  Seed: DPRMCSLMQGSTLPRRS
DPRMMSLLQASTSPRRS

SEQ ID NO: 64458 - protein, 17 aa, Artificial Sequence
  Description of Artificial Sequence: Synthetic peptide
  Seed: DPRMCSLMQGSTLPRRS
DPRMMSLLQASTTPRRS

SEQ ID NO: 64459 - protein, 17 aa, Artificial Sequence
  Description of Artificial Sequence: Synthetic peptide
  Seed: DPRMCSLMQGSTLPRRS
DPRMMSLLQASTVPRRS

SEQ ID NO: 64460 - protein, 17 aa, Artificial Sequence
  Description of Artificial Sequence: Synthetic peptide
  Seed: DPRMCSLMQGSTLPRRS
DPRMMSLLQGSTAPRRS

SEQ ID NO: 64461 - protein, 17 aa, Artificial Sequence
  Description of Artificial Sequence: Synthetic peptide
  Seed: DPRMCSLMQGSTLPRRS
DPRMMSLLQGSTIPRRS

SEQ ID NO: 64462 - protein, 17 aa, Artificial Sequence
  Description of Artificial Sequence: Synthetic peptide
  Seed: DPRMCSLMQGSTLPRRS
DPRMMSLLQGSTLPRRS

SEQ ID NO: 64463 - protein, 17 aa, Artificial Sequence
  Description of Artificial Sequence: Synthetic peptide
  Seed: DPRMCSLMQGSTLPRRS
DPRMMSLLQGSTMPRRS

SEQ ID NO: 64464 - protein, 17 aa, Artificial Sequence
  Description of Artificial Sequence: Synthetic peptide
  Seed: DPRMCSLMQGSTLPRRS
DPRMMSLLQGSTSPRRS

SEQ ID NO: 64465 - protein, 17 aa, Artificial Sequence
  Description of Artificial Sequence: Synthetic peptide
  Seed: DPRMCSLMQGSTLPRRS
DPRMMSLLQGSTTPRRS

SEQ ID NO: 64466 - protein, 17 aa, Artificial Sequence
  Description of Artificial Sequence: Synthetic peptide
  Seed: DPRMCSLMQGSTLPRRS
DPRMMSLLQGSTVPRRS

SEQ ID NO: 64467 - protein, 17 aa, Artificial Sequence
  Description of Artificial Sequence: Synthetic peptide
  Seed: DPRMCSLMQGSTLPRRS
DPRMMSLLQISTAPRRS

SEQ ID NO: 64468 - protein, 17 aa, Artificial Sequence
  Description of Artificial Sequence: Synthetic peptide
  Seed: DPRMCSLMQGSTLPRRS
DPRMMSLLQISTSPRRS

SEQ ID NO: 64469 - protein, 17 aa, Artificial Sequence
  Description of Artificial Sequence: Synthetic peptide
  Seed: DPRMCSLMQGSTLPRRS
DPRMMSLLQPSTAPRRS

SEQ ID NO: 64470 - protein, 17 aa, Artificial Sequence
  Description of Artificial Sequence: Synthetic peptide
  Seed: DPRMCSLMQGSTLPRRS
DPRMMSLLQPSTIPRRS

SEQ ID NO: 64471 - protein, 17 aa, Artificial Sequence
  Description of Artificial Sequence: Synthetic peptide
  Seed: DPRMCSLMQGSTLPRRS
DPRMMSLLQPSTLPRRS

SEQ ID NO: 64472 - protein, 17 aa, Artificial Sequence
  Description of Artificial Sequence: Synthetic peptide
  Seed: DPRMCSLMQGSTLPRRS
DPRMMSLLQPSTSPRRS

SEQ ID NO: 64473 - protein, 17 aa, Artificial Sequence
  Description of Artificial Sequence: Synthetic peptide
  Seed: DPRMCSLMQGSTLPRRS
DPRMMSLLQPSTVPRRS

SEQ ID NO: 64474 - protein, 17 aa, Artificial Sequence
  Description of Artificial Sequence: Synthetic peptide
  Seed: DPRMCSLMQGSTLPRRS
DPRMMSLLQSSTAPRRS

SEQ ID NO: 64475 - protein, 17 aa, Artificial Sequence
  Description of Artificial Sequence: Synthetic peptide
  Seed: DPRMCSLMQGSTLPRRS
DPRMMSLLQSSTIPRRS

SEQ ID NO: 64476 - protein, 17 aa, Artificial Sequence
  Description of Artificial Sequence: Synthetic peptide
  Seed: DPRMCSLMQGSTLPRRS
DPRMMSLLQSSTLPRRS

SEQ ID NO: 64477 - protein, 17 aa, Artificial Sequence
  Description of Artificial Sequence: Synthetic peptide
  Seed: DPRMCSLMQGSTLPRRS
DPRMMSLLQSSTMPRRS

SEQ ID NO: 64478 - protein, 17 aa, Artificial Sequence
  Description of Artificial Sequence: Synthetic peptide
  Seed: DPRMCSLMQGSTLPRRS
DPRMMSLLQSSTNPRRS

SEQ ID NO: 64479 - protein, 17 aa, Artificial Sequence
  Description of Artificial Sequence: Synthetic peptide
  Seed: DPRMCSLMQGSTLPRRS
DPRMMSLLQSSTSPRRS

SEQ ID NO: 64480 - protein, 17 aa, Artificial Sequence
  Description of Artificial Sequence: Synthetic peptide
  Seed: DPRMCSLMQGSTLPRRS
DPRMMSLLQSSTTPRRS

SEQ ID NO: 64481 - protein, 17 aa, Artificial Sequence
  Description of Artificial Sequence: Synthetic peptide
  Seed: DPRMCSLMQGSTLPRRS
DPRMMSLLQSSTVPRRS

SEQ ID NO: 64482 - protein, 17 aa, Artificial Sequence
  Description of Artificial Sequence: Synthetic peptide
  Seed: DPRMCSLMQGSTLPRRS
DPRMMSLLQTSTAPRRS

SEQ ID NO: 64483 - protein, 17 aa, Artificial Sequence
  Description of Artificial Sequence: Synthetic peptide
  Seed: DPRMCSLMQGSTLPRRS
DPRMMSLLQTSTLPRRS

SEQ ID NO: 64484 - protein, 17 aa, Artificial Sequence
  Description of Artificial Sequence: Synthetic peptide
  Seed: DPRMCSLMQGSTLPRRS
DPRMMSLLQTSTNPRRS

SEQ ID NO: 64485 - protein, 17 aa, Artificial Sequence
  Description of Artificial Sequence: Synthetic peptide
  Seed: DPRMCSLMQGSTLPRRS
DPRMMSLLQTSTSPRRS

SEQ ID NO: 64486 - protein, 17 aa, Artificial Sequence
  Description of Artificial Sequence: Synthetic peptide
  Seed: DPRMCSLMQGSTLPRRS
DPRMMSLLQTSTVPRRS

SEQ ID NO: 64487 - protein, 17 aa, Artificial Sequence
  Description of Artificial Sequence: Synthetic peptide
  Seed: DPRMCSLMQGSTLPRRS
DPRMMSLLQVSTAPRRS

SEQ ID NO: 64488 - protein, 17 aa, Artificial Sequence
  Description of Artificial Sequence: Synthetic peptide
  Seed: DPRMCSLMQGSTLPRRS
DPRMMSLLQVSTNPRRS

SEQ ID NO: 64489 - protein, 17 aa, Artificial Sequence
  Description of Artificial Sequence: Synthetic peptide
  Seed: DPRMCSLMQGSTLPRRS
DPRMMSLLQVSTSPRRS

SEQ ID NO: 64490 - protein, 17 aa, Artificial Sequence
  Description of Artificial Sequence: Synthetic peptide
  Seed: DPRMCSLMQGSTLPRRS
DPRMMSLMQASTAPRRS

SEQ ID NO: 64491 - protein, 17 aa, Artificial Sequence
  Description of Artificial Sequence: Synthetic peptide
  Seed: DPRMCSLMQGSTLPRRS
DPRMMSLMQASTIPRRS

SEQ ID NO: 64492 - protein, 17 aa, Artificial Sequence
  Description of Artificial Sequence: Synthetic peptide
  Seed: DPRMCSLMQGSTLPRRS
DPRMMSLMQASTLPRRS

SEQ ID NO: 64493 - protein, 17 aa, Artificial Sequence
  Description of Artificial Sequence: Synthetic peptide
  Seed: DPRMCSLMQGSTLPRRS
DPRMMSLMQASTMPRRS

SEQ ID NO: 64494 - protein, 17 aa, Artificial Sequence
  Description of Artificial Sequence: Synthetic peptide
  Seed: DPRMCSLMQGSTLPRRS
DPRMMSLMQASTNPRRS

SEQ ID NO: 64495 - protein, 17 aa, Artificial Sequence
  Description of Artificial Sequence: Synthetic peptide
  Seed: DPRMCSLMQGSTLPRRS
DPRMMSLMQASTSPRRS

SEQ ID NO: 64496 - protein, 17 aa, Artificial Sequence
  Description of Artificial Sequence: Synthetic peptide
  Seed: DPRMCSLMQGSTLPRRS
DPRMMSLMQASTTPRRS

SEQ ID NO: 64497 - protein, 17 aa, Artificial Sequence
  Description of Artificial Sequence: Synthetic peptide
  Seed: DPRMCSLMQGSTLPRRS
DPRMMSLMQASTVPRRS

SEQ ID NO: 64498 - protein, 17 aa, Artificial Sequence
  Description of Artificial Sequence: Synthetic peptide
  Seed: DPRMCSLMQGSTLPRRS
DPRMMSLMQGSTAPRRS

SEQ ID NO: 64499 - protein, 17 aa, Artificial Sequence
  Description of Artificial Sequence: Synthetic peptide
  Seed: DPRMCSLMQGSTLPRRS
DPRMMSLMQGSTIPRRS

SEQ ID NO: 64500 - protein, 17 aa, Artificial Sequence
  Description of Artificial Sequence: Synthetic peptide
  Seed: DPRMCSLMQGSTLPRRS
DPRMMSLMQGSTLPRRS

SEQ ID NO: 64501 - protein, 17 aa, Artificial Sequence
  Description of Artificial Sequence: Synthetic peptide
  Seed: DPRMCSLMQGSTLPRRS
DPRMMSLMQGSTMPRRS

SEQ ID NO: 64502 - protein, 17 aa, Artificial Sequence
  Description of Artificial Sequence: Synthetic peptide
  Seed: DPRMCSLMQGSTLPRRS
DPRMMSLMQGSTTPRRS

SEQ ID NO: 64503 - protein, 17 aa, Artificial Sequence
  Description of Artificial Sequence: Synthetic peptide
  Seed: DPRMCSLMQGSTLPRRS
DPRMMSLMQGSTVPRRS

SEQ ID NO: 64504 - protein, 17 aa, Artificial Sequence
  Description of Artificial Sequence: Synthetic peptide
  Seed: DPRMCSLMQGSTLPRRS
DPRMMSLMQISTAPRRS

SEQ ID NO: 64505 - protein, 17 aa, Artificial Sequence
  Description of Artificial Sequence: Synthetic peptide
  Seed: DPRMCSLMQGSTLPRRS
DPRMMSLMQISTNPRRS

SEQ ID NO: 64506 - protein, 17 aa, Artificial Sequence
  Description of Artificial Sequence: Synthetic peptide
  Seed: DPRMCSLMQGSTLPRRS
DPRMMSLMQISTSPRRS

SEQ ID NO: 64507 - protein, 17 aa, Artificial Sequence
  Description of Artificial Sequence: Synthetic peptide
  Seed: DPRMCSLMQGSTLPRRS
DPRMMSLMQLSTAPRRS

SEQ ID NO: 64508 - protein, 17 aa, Artificial Sequence
  Description of Artificial Sequence: Synthetic peptide
  Seed: DPRMCSLMQGSTLPRRS
DPRMMSLMQPSTAPRRS

SEQ ID NO: 64509 - protein, 17 aa, Artificial Sequence
  Description of Artificial Sequence: Synthetic peptide
  Seed: DPRMCSLMQGSTLPRRS
DPRMMSLMQPSTIPRRS

SEQ ID NO: 64510 - protein, 17 aa, Artificial Sequence
  Description of Artificial Sequence: Synthetic peptide
  Seed: DPRMCSLMQGSTLPRRS
DPRMMSLMQPSTLPRRS

SEQ ID NO: 64511 - protein, 17 aa, Artificial Sequence
  Description of Artificial Sequence: Synthetic peptide
  Seed: DPRMCSLMQGSTLPRRS
DPRMMSLMQPSTSPRRS

SEQ ID NO: 64512 - protein, 17 aa, Artificial Sequence
  Description of Artificial Sequence: Synthetic peptide
  Seed: DPRMCSLMQGSTLPRRS
DPRMMSLMQPSTVPRRS

SEQ ID NO: 64513 - protein, 17 aa, Artificial Sequence
  Description of Artificial Sequence: Synthetic peptide
  Seed: DPRMCSLMQGSTLPRRS
DPRMMSLMQSSTAPRRS

SEQ ID NO: 64514 - protein, 17 aa, Artificial Sequence
  Description of Artificial Sequence: Synthetic peptide
  Seed: DPRMCSLMQGSTLPRRS
DPRMMSLMQSSTIPRRS

SEQ ID NO: 64515 - protein, 17 aa, Artificial Sequence
  Description of Artificial Sequence: Synthetic peptide
  Seed: DPRMCSLMQGSTLPRRS
DPRMMSLMQSSTLPRRS

SEQ ID NO: 64516 - protein, 17 aa, Artificial Sequence
  Description of Artificial Sequence: Synthetic peptide
  Seed: DPRMCSLMQGSTLPRRS
DPRMMSLMQSSTMPRRS

SEQ ID NO: 64517 - protein, 17 aa, Artificial Sequence
  Description of Artificial Sequence: Synthetic peptide
  Seed: DPRMCSLMQGSTLPRRS
DPRMMSLMQSSTNPRRS

SEQ ID NO: 64518 - protein, 17 aa, Artificial Sequence
  Description of Artificial Sequence: Synthetic peptide
  Seed: DPRMCSLMQGSTLPRRS
DPRMMSLMQSSTSPRRS

SEQ ID NO: 64519 - protein, 17 aa, Artificial Sequence
  Description of Artificial Sequence: Synthetic peptide
  Seed: DPRMCSLMQGSTLPRRS
DPRMMSLMQSSTVPRRS

SEQ ID NO: 64520 - protein, 17 aa, Artificial Sequence
  Description of Artificial Sequence: Synthetic peptide
  Seed: DPRMCSLMQGSTLPRRS
DPRMMSLMQTSTAPRRS

SEQ ID NO: 64521 - protein, 17 aa, Artificial Sequence
  Description of Artificial Sequence: Synthetic peptide
  Seed: DPRMCSLMQGSTLPRRS
DPRMMSLMQTSTLPRRS

SEQ ID NO: 64522 - protein, 17 aa, Artificial Sequence
  Description of Artificial Sequence: Synthetic peptide
  Seed: DPRMCSLMQGSTLPRRS
DPRMMSLMQTSTVPRRS

SEQ ID NO: 64523 - protein, 17 aa, Artificial Sequence
  Description of Artificial Sequence: Synthetic peptide
  Seed: DPRMCSLMQGSTLPRRS
DPRMMSLMQVSTAPRRS

SEQ ID NO: 64524 - protein, 17 aa, Artificial Sequence
  Description of Artificial Sequence: Synthetic peptide
  Seed: DPRMCSLMQGSTLPRRS
DPRMMSLMQVSTNPRRS

SEQ ID NO: 64525 - protein, 17 aa, Artificial Sequence
  Description of Artificial Sequence: Synthetic peptide
  Seed: DPRMCSLMQGSTLPRRS
DPRMMSLMQVSTSPRRS

SEQ ID NO: 64526 - protein, 17 aa, Artificial Sequence
  Description of Artificial Sequence: Synthetic peptide
  Seed: DPRMCSLMQGSTLPRRS
DPRMMSLMQVSTTPRRS

SEQ ID NO: 64527 - protein, 17 aa, Artificial Sequence
  Description of Artificial Sequence: Synthetic peptide
  Seed: DPRMCSLMQGSTLPRRS
DPRMMSLMQVSTVPRRS

SEQ ID NO: 64528 - protein, 17 aa, Artificial Sequence
  Description of Artificial Sequence: Synthetic peptide
  Seed: DPRMCSLMQGSTLPRRS
DPRMMSLQQASTLPRRS

SEQ ID NO: 64529 - protein, 17 aa, Artificial Sequence
  Description of Artificial Sequence: Synthetic peptide
  Seed: DPRMCSLMQGSTLPRRS
DPRMVSLIQASTAPRRS

SEQ ID NO: 64530 - protein, 17 aa, Artificial Sequence
  Description of Artificial Sequence: Synthetic peptide
  Seed: DPRMCSLMQGSTLPRRS
DPRMVSLIQASTIPRRS

SEQ ID NO: 64531 - protein, 17 aa, Artificial Sequence
  Description of Artificial Sequence: Synthetic peptide
  Seed: DPRMCSLMQGSTLPRRS
DPRMVSLIQASTLPRRS

SEQ ID NO: 64532 - protein, 17 aa, Artificial Sequence
  Description of Artificial Sequence: Synthetic peptide
  Seed: DPRMCSLMQGSTLPRRS
DPRMVSLIQASTVPRRS

SEQ ID NO: 64533 - protein, 17 aa, Artificial Sequence
  Description of Artificial Sequence: Synthetic peptide
  Seed: DPRMCSLMQGSTLPRRS
DPRMVSLIQGSTIPRRS

SEQ ID NO: 64534 - protein, 17 aa, Artificial Sequence
  Description of Artificial Sequence: Synthetic peptide
  Seed: DPRMCSLMQGSTLPRRS
DPRMVSLIQGSTLPRRS

SEQ ID NO: 64535 - protein, 17 aa, Artificial Sequence
  Description of Artificial Sequence: Synthetic peptide
  Seed: DPRMCSLMQGSTLPRRS
DPRMVSLIQGSTVPRRS

SEQ ID NO: 64536 - protein, 17 aa, Artificial Sequence
  Description of Artificial Sequence: Synthetic peptide
  Seed: DPRMCSLMQGSTLPRRS
DPRMVSLLQASTAPRRS

SEQ ID NO: 64537 - protein, 17 aa, Artificial Sequence
  Description of Artificial Sequence: Synthetic peptide
  Seed: DPRMCSLMQGSTLPRRS
DPRMVSLLQASTIPRRS

SEQ ID NO: 64538 - protein, 17 aa, Artificial Sequence
  Description of Artificial Sequence: Synthetic peptide
  Seed: DPRMCSLMQGSTLPRRS
DPRMVSLLQASTLPRRS

SEQ ID NO: 64539 - protein, 17 aa, Artificial Sequence
  Description of Artificial Sequence: Synthetic peptide
  Seed: DPRMCSLMQGSTLPRRS
DPRMVSLLQASTMPRRS

SEQ ID NO: 64540 - protein, 17 aa, Artificial Sequence
  Description of Artificial Sequence: Synthetic peptide
  Seed: DPRMCSLMQGSTLPRRS
DPRMVSLLQASTTPRRS

SEQ ID NO: 64541 - protein, 17 aa, Artificial Sequence
  Description of Artificial Sequence: Synthetic peptide
  Seed: DPRMCSLMQGSTLPRRS
DPRMVSLLQASTVPRRS

SEQ ID NO: 64542 - protein, 17 aa, Artificial Sequence
  Description of Artificial Sequence: Synthetic peptide
  Seed: DPRMCSLMQGSTLPRRS
DPRMVSLLQGSTAPRRS

SEQ ID NO: 64543 - protein, 17 aa, Artificial Sequence
  Description of Artificial Sequence: Synthetic peptide
  Seed: DPRMCSLMQGSTLPRRS
DPRMVSLLQGSTIPRRS

SEQ ID NO: 64544 - protein, 17 aa, Artificial Sequence
  Description of Artificial Sequence: Synthetic peptide
  Seed: DPRMCSLMQGSTLPRRS
DPRMVSLLQGSTLPRRS

SEQ ID NO: 64545 - protein, 17 aa, Artificial Sequence
  Description of Artificial Sequence: Synthetic peptide
  Seed: DPRMCSLMQGSTLPRRS
DPRMVSLLQGSTMPRRS

SEQ ID NO: 64546 - protein, 17 aa, Artificial Sequence
  Description of Artificial Sequence: Synthetic peptide
  Seed: DPRMCSLMQGSTLPRRS
DPRMVSLLQGSTTPRRS

SEQ ID NO: 64547 - protein, 17 aa, Artificial Sequence
  Description of Artificial Sequence: Synthetic peptide
  Seed: DPRMCSLMQGSTLPRRS
DPRMVSLLQGSTVPRRS

SEQ ID NO: 64548 - protein, 17 aa, Artificial Sequence
  Description of Artificial Sequence: Synthetic peptide
  Seed: DPRMCSLMQGSTLPRRS
DPRMVSLLQPSTAPRRS

SEQ ID NO: 64549 - protein, 17 aa, Artificial Sequence
  Description of Artificial Sequence: Synthetic peptide
  Seed: DPRMCSLMQGSTLPRRS
DPRMVSLLQPSTIPRRS

SEQ ID NO: 64550 - protein, 17 aa, Artificial Sequence
  Description of Artificial Sequence: Synthetic peptide
  Seed: DPRMCSLMQGSTLPRRS
DPRMVSLLQPSTLPRRS

SEQ ID NO: 64551 - protein, 17 aa, Artificial Sequence
  Description of Artificial Sequence: Synthetic peptide
  Seed: DPRMCSLMQGSTLPRRS
DPRMVSLLQPSTVPRRS

SEQ ID NO: 64552 - protein, 17 aa, Artificial Sequence
  Description of Artificial Sequence: Synthetic peptide
  Seed: DPRMCSLMQGSTLPRRS
DPRMVSLLQSSTAPRRS

SEQ ID NO: 64553 - protein, 17 aa, Artificial Sequence
  Description of Artificial Sequence: Synthetic peptide
  Seed: DPRMCSLMQGSTLPRRS
DPRMVSLLQSSTIPRRS

SEQ ID NO: 64554 - protein, 17 aa, Artificial Sequence
  Description of Artificial Sequence: Synthetic peptide
  Seed: DPRMCSLMQGSTLPRRS
DPRMVSLLQSSTLPRRS

SEQ ID NO: 64555 - protein, 17 aa, Artificial Sequence
  Description of Artificial Sequence: Synthetic peptide
  Seed: DPRMCSLMQGSTLPRRS
DPRMVSLLQSSTTPRRS

SEQ ID NO: 64556 - protein, 17 aa, Artificial Sequence
  Description of Artificial Sequence: Synthetic peptide
  Seed: DPRMCSLMQGSTLPRRS
DPRMVSLLQSSTVPRRS

SEQ ID NO: 64557 - protein, 17 aa, Artificial Sequence
  Description of Artificial Sequence: Synthetic peptide
  Seed: DPRMCSLMQGSTLPRRS
DPRMVSLLQTSTVPRRS

SEQ ID NO: 64558 - protein, 17 aa, Artificial Sequence
  Description of Artificial Sequence: Synthetic peptide
  Seed: DPRMCSLMQGSTLPRRS
DPRMVSLMQASTAPRRS

SEQ ID NO: 64559 - protein, 17 aa, Artificial Sequence
  Description of Artificial Sequence: Synthetic peptide
  Seed: DPRMCSLMQGSTLPRRS
DPRMVSLMQASTIPRRS

SEQ ID NO: 64560 - protein, 17 aa, Artificial Sequence
  Description of Artificial Sequence: Synthetic peptide
  Seed: DPRMCSLMQGSTLPRRS
DPRMVSLMQASTLPRRS

SEQ ID NO: 64561 - protein, 17 aa, Artificial Sequence
  Description of Artificial Sequence: Synthetic peptide
  Seed: DPRMCSLMQGSTLPRRS
DPRMVSLMQASTMPRRS

SEQ ID NO: 64562 - protein, 17 aa, Artificial Sequence
  Description of Artificial Sequence: Synthetic peptide
  Seed: DPRMCSLMQGSTLPRRS
DPRMVSLMQASTSPRRS

SEQ ID NO: 64563 - protein, 17 aa, Artificial Sequence
  Description of Artificial Sequence: Synthetic peptide
  Seed: DPRMCSLMQGSTLPRRS
DPRMVSLMQASTTPRRS

SEQ ID NO: 64564 - protein, 17 aa, Artificial Sequence
  Description of Artificial Sequence: Synthetic peptide
  Seed: DPRMCSLMQGSTLPRRS
DPRMVSLMQASTVPRRS

SEQ ID NO: 64565 - protein, 17 aa, Artificial Sequence
  Description of Artificial Sequence: Synthetic peptide
  Seed: DPRMCSLMQGSTLPRRS
DPRMVSLMQGSTAPRRS

SEQ ID NO: 64566 - protein, 17 aa, Artificial Sequence
  Description of Artificial Sequence: Synthetic peptide
  Seed: DPRMCSLMQGSTLPRRS
DPRMVSLMQGSTIPRRS

SEQ ID NO: 64567 - protein, 17 aa, Artificial Sequence
  Description of Artificial Sequence: Synthetic peptide
  Seed: DPRMCSLMQGSTLPRRS
DPRMVSLMQGSTLPRRS

SEQ ID NO: 64568 - protein, 17 aa, Artificial Sequence
  Description of Artificial Sequence: Synthetic peptide
  Seed: DPRMCSLMQGSTLPRRS
DPRMVSLMQGSTMPRRS

SEQ ID NO: 64569 - protein, 17 aa, Artificial Sequence
  Description of Artificial Sequence: Synthetic peptide
  Seed: DPRMCSLMQGSTLPRRS
DPRMVSLMQGSTTPRRS

SEQ ID NO: 64570 - protein, 17 aa, Artificial Sequence
  Description of Artificial Sequence: Synthetic peptide
  Seed: DPRMCSLMQGSTLPRRS
DPRMVSLMQGSTVPRRS

SEQ ID NO: 64571 - protein, 17 aa, Artificial Sequence
  Description of Artificial Sequence: Synthetic peptide
  Seed: DPRMCSLMQGSTLPRRS
DPRMVSLMQPSTIPRRS

SEQ ID NO: 64572 - protein, 17 aa, Artificial Sequence
  Description of Artificial Sequence: Synthetic peptide
  Seed: DPRMCSLMQGSTLPRRS
DPRMVSLMQPSTLPRRS

SEQ ID NO: 64573 - protein, 17 aa, Artificial Sequence
  Description of Artificial Sequence: Synthetic peptide
  Seed: DPRMCSLMQGSTLPRRS
DPRMVSLMQPSTVPRRS

SEQ ID NO: 64574 - protein, 17 aa, Artificial Sequence
  Description of Artificial Sequence: Synthetic peptide
  Seed: DPRMCSLMQGSTLPRRS
DPRMVSLMQSSTAPRRS

SEQ ID NO: 64575 - protein, 17 aa, Artificial Sequence
  Description of Artificial Sequence: Synthetic peptide
  Seed: DPRMCSLMQGSTLPRRS
DPRMVSLMQSSTIPRRS

SEQ ID NO: 64576 - protein, 17 aa, Artificial Sequence
  Description of Artificial Sequence: Synthetic peptide
  Seed: DPRMCSLMQGSTLPRRS
DPRMVSLMQSSTLPRRS

SEQ ID NO: 64577 - protein, 17 aa, Artificial Sequence
  Description of Artificial Sequence: Synthetic peptide
  Seed: DPRMCSLMQGSTLPRRS
DPRMVSLMQSSTVPRRS

SEQ ID NO: 64578 - protein, 17 aa, Artificial Sequence
  Description of Artificial Sequence: Synthetic peptide
  Seed: DPRMCSLMQGSTLPRRS
DPRMVSLMQVSTAPRRS

SEQ ID NO: 64579 - protein, 17 aa, Artificial Sequence
  Description of Artificial Sequence: Synthetic peptide
  Seed: DPRMCSLMQGSTLPRRS
DPRMWSLAQASTAPRRS

SEQ ID NO: 64580 - protein, 17 aa, Artificial Sequence
  Description of Artificial Sequence: Synthetic peptide
  Seed: DPRMCSLMQGSTLPRRS
DPRMWSLAQASTIPRRS

SEQ ID NO: 64581 - protein, 17 aa, Artificial Sequence
  Description of Artificial Sequence: Synthetic peptide
  Seed: DPRMCSLMQGSTLPRRS
DPRMWSLAQASTLPRRS

SEQ ID NO: 64582 - protein, 17 aa, Artificial Sequence
  Description of Artificial Sequence: Synthetic peptide
  Seed: DPRMCSLMQGSTLPRRS
DPRMWSLAQASTMPRRS

SEQ ID NO: 64583 - protein, 17 aa, Artificial Sequence
  Description of Artificial Sequence: Synthetic peptide
  Seed: DPRMCSLMQGSTLPRRS
DPRMWSLAQASTNPRRS

SEQ ID NO: 64584 - protein, 17 aa, Artificial Sequence
  Description of Artificial Sequence: Synthetic peptide
  Seed: DPRMCSLMQGSTLPRRS
DPRMWSLAQASTSPRRS

SEQ ID NO: 64585 - protein, 17 aa, Artificial Sequence
  Description of Artificial Sequence: Synthetic peptide
  Seed: DPRMCSLMQGSTLPRRS
DPRMWSLAQASTTPRRS

SEQ ID NO: 64586 - protein, 17 aa, Artificial Sequence
  Description of Artificial Sequence: Synthetic peptide
  Seed: DPRMCSLMQGSTLPRRS
DPRMWSLAQASTVPRRS

SEQ ID NO: 64587 - protein, 17 aa, Artificial Sequence
  Description of Artificial Sequence: Synthetic peptide
  Seed: DPRMCSLMQGSTLPRRS
DPRMWSLAQGSTAPRRS

SEQ ID NO: 64588 - protein, 17 aa, Artificial Sequence
  Description of Artificial Sequence: Synthetic peptide
  Seed: DPRMCSLMQGSTLPRRS
DPRMWSLAQGSTIPRRS

SEQ ID NO: 64589 - protein, 17 aa, Artificial Sequence
  Description of Artificial Sequence: Synthetic peptide
  Seed: DPRMCSLMQGSTLPRRS
DPRMWSLAQGSTLPRRS

SEQ ID NO: 64590 - protein, 17 aa, Artificial Sequence
  Description of Artificial Sequence: Synthetic peptide
  Seed: DPRMCSLMQGSTLPRRS
DPRMWSLAQGSTMPRRS

SEQ ID NO: 64591 - protein, 17 aa, Artificial Sequence
  Description of Artificial Sequence: Synthetic peptide
  Seed: DPRMCSLMQGSTLPRRS
DPRMWSLAQGSTVPRRS

SEQ ID NO: 64592 - protein, 17 aa, Artificial Sequence
  Description of Artificial Sequence: Synthetic peptide
  Seed: DPRMCSLMQGSTLPRRS
DPRMWSLAQISTAPRRS

SEQ ID NO: 64593 - protein, 17 aa, Artificial Sequence
  Description of Artificial Sequence: Synthetic peptide
  Seed: DPRMCSLMQGSTLPRRS
DPRMWSLAQPSTAPRRS

SEQ ID NO: 64594 - protein, 17 aa, Artificial Sequence
  Description of Artificial Sequence: Synthetic peptide
  Seed: DPRMCSLMQGSTLPRRS
DPRMWSLAQPSTIPRRS

SEQ ID NO: 64595 - protein, 17 aa, Artificial Sequence
  Description of Artificial Sequence: Synthetic peptide
  Seed: DPRMCSLMQGSTLPRRS
DPRMWSLAQPSTLPRRS

SEQ ID NO: 64596 - protein, 17 aa, Artificial Sequence
  Description of Artificial Sequence: Synthetic peptide
  Seed: DPRMCSLMQGSTLPRRS
DPRMWSLAQPSTVPRRS

SEQ ID NO: 64597 - protein, 17 aa, Artificial Sequence
  Description of Artificial Sequence: Synthetic peptide
  Seed: DPRMCSLMQGSTLPRRS
DPRMWSLAQSSTAPRRS

SEQ ID NO: 64598 - protein, 17 aa, Artificial Sequence
  Description of Artificial Sequence: Synthetic peptide
  Seed: DPRMCSLMQGSTLPRRS
DPRMWSLAQSSTIPRRS

SEQ ID NO: 64599 - protein, 17 aa, Artificial Sequence
  Description of Artificial Sequence: Synthetic peptide
  Seed: DPRMCSLMQGSTLPRRS
DPRMWSLAQSSTLPRRS

SEQ ID NO: 64600 - protein, 17 aa, Artificial Sequence
  Description of Artificial Sequence: Synthetic peptide
  Seed: DPRMCSLMQGSTLPRRS
DPRMWSLAQSSTMPRRS

SEQ ID NO: 64601 - protein, 17 aa, Artificial Sequence
  Description of Artificial Sequence: Synthetic peptide
  Seed: DPRMCSLMQGSTLPRRS
DPRMWSLAQSSTSPRRS

SEQ ID NO: 64602 - protein, 17 aa, Artificial Sequence
  Description of Artificial Sequence: Synthetic peptide
  Seed: DPRMCSLMQGSTLPRRS
DPRMWSLAQSSTVPRRS

SEQ ID NO: 64603 - protein, 17 aa, Artificial Sequence
  Description of Artificial Sequence: Synthetic peptide
  Seed: DPRMCSLMQGSTLPRRS
DPRMWSLAQTSTAPRRS

SEQ ID NO: 64604 - protein, 17 aa, Artificial Sequence
  Description of Artificial Sequence: Synthetic peptide
  Seed: DPRMCSLMQGSTLPRRS
DPRMWSLAQVSTAPRRS

SEQ ID NO: 64605 - protein, 17 aa, Artificial Sequence
  Description of Artificial Sequence: Synthetic peptide
  Seed: DPRMCSLMQGSTLPRRS
DPRMWSLAQVSTNPRRS

SEQ ID NO: 64606 - protein, 17 aa, Artificial Sequence
  Description of Artificial Sequence: Synthetic peptide
  Seed: DPRMCSLMQGSTLPRRS
DPRMWSLAQVSTSPRRS

SEQ ID NO: 64607 - protein, 17 aa, Artificial Sequence
  Description of Artificial Sequence: Synthetic peptide
  Seed: DPRMCSLMQGSTLPRRS
DPRMWSLFQASTAPRRS

SEQ ID NO: 64608 - protein, 17 aa, Artificial Sequence
  Description of Artificial Sequence: Synthetic peptide
  Seed: DPRMCSLMQGSTLPRRS
DPRMWSLGQASTLPRRS

SEQ ID NO: 64609 - protein, 17 aa, Artificial Sequence
  Description of Artificial Sequence: Synthetic peptide
  Seed: DPRMCSLMQGSTLPRRS
DPRMWSLIQASTAPRRS

SEQ ID NO: 64610 - protein, 17 aa, Artificial Sequence
  Description of Artificial Sequence: Synthetic peptide
  Seed: DPRMCSLMQGSTLPRRS
DPRMWSLIQASTGPRRS

SEQ ID NO: 64611 - protein, 17 aa, Artificial Sequence
  Description of Artificial Sequence: Synthetic peptide
  Seed: DPRMCSLMQGSTLPRRS
DPRMWSLIQASTHPRRS

SEQ ID NO: 64612 - protein, 17 aa, Artificial Sequence
  Description of Artificial Sequence: Synthetic peptide
  Seed: DPRMCSLMQGSTLPRRS
DPRMWSLIQASTIPRRS

SEQ ID NO: 64613 - protein, 17 aa, Artificial Sequence
  Description of Artificial Sequence: Synthetic peptide
  Seed: DPRMCSLMQGSTLPRRS
DPRMWSLIQASTLPRRS

SEQ ID NO: 64614 - protein, 17 aa, Artificial Sequence
  Description of Artificial Sequence: Synthetic peptide
  Seed: DPRMCSLMQGSTLPRRS
DPRMWSLIQASTMPRRS

SEQ ID NO: 64615 - protein, 17 aa, Artificial Sequence
  Description of Artificial Sequence: Synthetic peptide
  Seed: DPRMCSLMQGSTLPRRS
DPRMWSLIQASTNPRRS

SEQ ID NO: 64616 - protein, 17 aa, Artificial Sequence
  Description of Artificial Sequence: Synthetic peptide
  Seed: DPRMCSLMQGSTLPRRS
DPRMWSLIQASTSPRRS

SEQ ID NO: 64617 - protein, 17 aa, Artificial Sequence
  Description of Artificial Sequence: Synthetic peptide
  Seed: DPRMCSLMQGSTLPRRS
DPRMWSLIQASTTPRRS

SEQ ID NO: 64618 - protein, 17 aa, Artificial Sequence
  Description of Artificial Sequence: Synthetic peptide
  Seed: DPRMCSLMQGSTLPRRS
DPRMWSLIQASTVPRRS

SEQ ID NO: 64619 - protein, 17 aa, Artificial Sequence
  Description of Artificial Sequence: Synthetic peptide
  Seed: DPRMCSLMQGSTLPRRS
DPRMWSLIQGSTAPRRS

SEQ ID NO: 64620 - protein, 17 aa, Artificial Sequence
  Description of Artificial Sequence: Synthetic peptide
  Seed: DPRMCSLMQGSTLPRRS
DPRMWSLIQGSTIPRRS

SEQ ID NO: 64621 - protein, 17 aa, Artificial Sequence
  Description of Artificial Sequence: Synthetic peptide
  Seed: DPRMCSLMQGSTLPRRS
DPRMWSLIQGSTLPRRS

SEQ ID NO: 64622 - protein, 17 aa, Artificial Sequence
  Description of Artificial Sequence: Synthetic peptide
  Seed: DPRMCSLMQGSTLPRRS
DPRMWSLIQGSTMPRRS

SEQ ID NO: 64623 - protein, 17 aa, Artificial Sequence
  Description of Artificial Sequence: Synthetic peptide
  Seed: DPRMCSLMQGSTLPRRS
DPRMWSLIQGSTSPRRS

SEQ ID NO: 64624 - protein, 17 aa, Artificial Sequence
  Description of Artificial Sequence: Synthetic peptide
  Seed: DPRMCSLMQGSTLPRRS
DPRMWSLIQGSTTPRRS

SEQ ID NO: 64625 - protein, 17 aa, Artificial Sequence
  Description of Artificial Sequence: Synthetic peptide
  Seed: DPRMCSLMQGSTLPRRS
DPRMWSLIQGSTVPRRS

SEQ ID NO: 64626 - protein, 17 aa, Artificial Sequence
  Description of Artificial Sequence: Synthetic peptide
  Seed: DPRMCSLMQGSTLPRRS
DPRMWSLIQISTAPRRS

SEQ ID NO: 64627 - protein, 17 aa, Artificial Sequence
  Description of Artificial Sequence: Synthetic peptide
  Seed: DPRMCSLMQGSTLPRRS
DPRMWSLIQISTNPRRS

SEQ ID NO: 64628 - protein, 17 aa, Artificial Sequence
  Description of Artificial Sequence: Synthetic peptide
  Seed: DPRMCSLMQGSTLPRRS
DPRMWSLIQISTSPRRS

SEQ ID NO: 64629 - protein, 17 aa, Artificial Sequence
  Description of Artificial Sequence: Synthetic peptide
  Seed: DPRMCSLMQGSTLPRRS
DPRMWSLIQNSTAPRRS

SEQ ID NO: 64630 - protein, 17 aa, Artificial Sequence
  Description of Artificial Sequence: Synthetic peptide
  Seed: DPRMCSLMQGSTLPRRS
DPRMWSLIQNSTIPRRS

SEQ ID NO: 64631 - protein, 17 aa, Artificial Sequence
  Description of Artificial Sequence: Synthetic peptide
  Seed: DPRMCSLMQGSTLPRRS
DPRMWSLIQNSTLPRRS

SEQ ID NO: 64632 - protein, 17 aa, Artificial Sequence
  Description of Artificial Sequence: Synthetic peptide
  Seed: DPRMCSLMQGSTLPRRS
DPRMWSLIQNSTVPRRS

SEQ ID NO: 64633 - protein, 17 aa, Artificial Sequence
  Description of Artificial Sequence: Synthetic peptide
  Seed: DPRMCSLMQGSTLPRRS
DPRMWSLIQPSTAPRRS

SEQ ID NO: 64634 - protein, 17 aa, Artificial Sequence
  Description of Artificial Sequence: Synthetic peptide
  Seed: DPRMCSLMQGSTLPRRS
DPRMWSLIQPSTIPRRS

SEQ ID NO: 64635 - protein, 17 aa, Artificial Sequence
  Description of Artificial Sequence: Synthetic peptide
  Seed: DPRMCSLMQGSTLPRRS
DPRMWSLIQPSTLPRRS

SEQ ID NO: 64636 - protein, 17 aa, Artificial Sequence
  Description of Artificial Sequence: Synthetic peptide
  Seed: DPRMCSLMQGSTLPRRS
DPRMWSLIQPSTNPRRS

SEQ ID NO: 64637 - protein, 17 aa, Artificial Sequence
  Description of Artificial Sequence: Synthetic peptide
  Seed: DPRMCSLMQGSTLPRRS
DPRMWSLIQPSTSPRRS

SEQ ID NO: 64638 - protein, 17 aa, Artificial Sequence
  Description of Artificial Sequence: Synthetic peptide
  Seed: DPRMCSLMQGSTLPRRS
DPRMWSLIQPSTTPRRS

SEQ ID NO: 64639 - protein, 17 aa, Artificial Sequence
  Description of Artificial Sequence: Synthetic peptide
  Seed: DPRMCSLMQGSTLPRRS
DPRMWSLIQPSTVPRRS

SEQ ID NO: 64640 - protein, 17 aa, Artificial Sequence
  Description of Artificial Sequence: Synthetic peptide
  Seed: DPRMCSLMQGSTLPRRS
DPRMWSLIQSSTAPRRS

SEQ ID NO: 64641 - protein, 17 aa, Artificial Sequence
  Description of Artificial Sequence: Synthetic peptide
  Seed: DPRMCSLMQGSTLPRRS
DPRMWSLIQSSTIPRRS

SEQ ID NO: 64642 - protein, 17 aa, Artificial Sequence
  Description of Artificial Sequence: Synthetic peptide
  Seed: DPRMCSLMQGSTLPRRS
DPRMWSLIQSSTLPRRS

SEQ ID NO: 64643 - protein, 17 aa, Artificial Sequence
  Description of Artificial Sequence: Synthetic peptide
  Seed: DPRMCSLMQGSTLPRRS
DPRMWSLIQSSTMPRRS

SEQ ID NO: 64644 - protein, 17 aa, Artificial Sequence
  Description of Artificial Sequence: Synthetic peptide
  Seed: DPRMCSLMQGSTLPRRS
DPRMWSLIQSSTNPRRS

SEQ ID NO: 64645 - protein, 17 aa, Artificial Sequence
  Description of Artificial Sequence: Synthetic peptide
  Seed: DPRMCSLMQGSTLPRRS
DPRMWSLIQSSTSPRRS

SEQ ID NO: 64646 - protein, 17 aa, Artificial Sequence
  Description of Artificial Sequence: Synthetic peptide
  Seed: DPRMCSLMQGSTLPRRS
DPRMWSLIQSSTTPRRS

SEQ ID NO: 64647 - protein, 17 aa, Artificial Sequence
  Description of Artificial Sequence: Synthetic peptide
  Seed: DPRMCSLMQGSTLPRRS
DPRMWSLIQSSTVPRRS

SEQ ID NO: 64648 - protein, 17 aa, Artificial Sequence
  Description of Artificial Sequence: Synthetic peptide
  Seed: DPRMCSLMQGSTLPRRS
DPRMWSLIQTSTAPRRS

SEQ ID NO: 64649 - protein, 17 aa, Artificial Sequence
  Description of Artificial Sequence: Synthetic peptide
  Seed: DPRMCSLMQGSTLPRRS
DPRMWSLIQTSTIPRRS

SEQ ID NO: 64650 - protein, 17 aa, Artificial Sequence
  Description of Artificial Sequence: Synthetic peptide
  Seed: DPRMCSLMQGSTLPRRS
DPRMWSLIQTSTLPRRS

SEQ ID NO: 64651 - protein, 17 aa, Artificial Sequence
  Description of Artificial Sequence: Synthetic peptide
  Seed: DPRMCSLMQGSTLPRRS
DPRMWSLIQTSTNPRRS

SEQ ID NO: 64652 - protein, 17 aa, Artificial Sequence
  Description of Artificial Sequence: Synthetic peptide
  Seed: DPRMCSLMQGSTLPRRS
DPRMWSLIQTSTSPRRS

SEQ ID NO: 64653 - protein, 17 aa, Artificial Sequence
  Description of Artificial Sequence: Synthetic peptide
  Seed: DPRMCSLMQGSTLPRRS
DPRMWSLIQTSTTPRRS

SEQ ID NO: 64654 - protein, 17 aa, Artificial Sequence
  Description of Artificial Sequence: Synthetic peptide
  Seed: DPRMCSLMQGSTLPRRS
DPRMWSLIQTSTVPRRS

SEQ ID NO: 64655 - protein, 17 aa, Artificial Sequence
  Description of Artificial Sequence: Synthetic peptide
  Seed: DPRMCSLMQGSTLPRRS
DPRMWSLIQVSTAPRRS

SEQ ID NO: 64656 - protein, 17 aa, Artificial Sequence
  Description of Artificial Sequence: Synthetic peptide
  Seed: DPRMCSLMQGSTLPRRS
DPRMWSLIQVSTNPRRS

SEQ ID NO: 64657 - protein, 17 aa, Artificial Sequence
  Description of Artificial Sequence: Synthetic peptide
  Seed: DPRMCSLMQGSTLPRRS
DPRMWSLIQVSTSPRRS

SEQ ID NO: 64658 - protein, 17 aa, Artificial Sequence
  Description of Artificial Sequence: Synthetic peptide
  Seed: DPRMCSLMQGSTLPRRS
DPRMWSLIQVSTTPRRS

SEQ ID NO: 64659 - protein, 17 aa, Artificial Sequence
  Description of Artificial Sequence: Synthetic peptide
  Seed: DPRMCSLMQGSTLPRRS
DPRMWSLIQVSTVPRRS

SEQ ID NO: 64660 - protein, 17 aa, Artificial Sequence
  Description of Artificial Sequence: Synthetic peptide
  Seed: DPRMCSLMQGSTLPRRS
DPRMWSLLQASTAPRRS

SEQ ID NO: 64661 - protein, 17 aa, Artificial Sequence
  Description of Artificial Sequence: Synthetic peptide
  Seed: DPRMCSLMQGSTLPRRS
DPRMWSLLQASTFPRRS

SEQ ID NO: 64662 - protein, 17 aa, Artificial Sequence
  Description of Artificial Sequence: Synthetic peptide
  Seed: DPRMCSLMQGSTLPRRS
DPRMWSLLQASTGPRRS

SEQ ID NO: 64663 - protein, 17 aa, Artificial Sequence
  Description of Artificial Sequence: Synthetic peptide
  Seed: DPRMCSLMQGSTLPRRS
DPRMWSLLQASTHPRRS

SEQ ID NO: 64664 - protein, 17 aa, Artificial Sequence
  Description of Artificial Sequence: Synthetic peptide
  Seed: DPRMCSLMQGSTLPRRS
DPRMWSLLQASTIPRRS

SEQ ID NO: 64665 - protein, 17 aa, Artificial Sequence
  Description of Artificial Sequence: Synthetic peptide
  Seed: DPRMCSLMQGSTLPRRS
DPRMWSLLQASTLPRRS

SEQ ID NO: 64666 - protein, 17 aa, Artificial Sequence
  Description of Artificial Sequence: Synthetic peptide
  Seed: DPRMCSLMQGSTLPRRS
DPRMWSLLQASTMPRRS

SEQ ID NO: 64667 - protein, 17 aa, Artificial Sequence
  Description of Artificial Sequence: Synthetic peptide
  Seed: DPRMCSLMQGSTLPRRS
DPRMWSLLQASTNPRRS

SEQ ID NO: 64668 - protein, 17 aa, Artificial Sequence
  Description of Artificial Sequence: Synthetic peptide
  Seed: DPRMCSLMQGSTLPRRS
DPRMWSLLQASTSPRRS

SEQ ID NO: 64669 - protein, 17 aa, Artificial Sequence
  Description of Artificial Sequence: Synthetic peptide
  Seed: DPRMCSLMQGSTLPRRS
DPRMWSLLQASTTPRRS

SEQ ID NO: 64670 - protein, 17 aa, Artificial Sequence
  Description of Artificial Sequence: Synthetic peptide
  Seed: DPRMCSLMQGSTLPRRS
DPRMWSLLQASTVPRRS

SEQ ID NO: 64671 - protein, 17 aa, Artificial Sequence
  Description of Artificial Sequence: Synthetic peptide
  Seed: DPRMCSLMQGSTLPRRS
DPRMWSLLQGSTAPRRS

SEQ ID NO: 64672 - protein, 17 aa, Artificial Sequence
  Description of Artificial Sequence: Synthetic peptide
  Seed: DPRMCSLMQGSTLPRRS
DPRMWSLLQGSTGPRRS

SEQ ID NO: 64673 - protein, 17 aa, Artificial Sequence
  Description of Artificial Sequence: Synthetic peptide
  Seed: DPRMCSLMQGSTLPRRS
DPRMWSLLQGSTIPRRS

SEQ ID NO: 64674 - protein, 17 aa, Artificial Sequence
  Description of Artificial Sequence: Synthetic peptide
  Seed: DPRMCSLMQGSTLPRRS
DPRMWSLLQGSTLPRRS

SEQ ID NO: 64675 - protein, 17 aa, Artificial Sequence
  Description of Artificial Sequence: Synthetic peptide
  Seed: DPRMCSLMQGSTLPRRS
DPRMWSLLQGSTMPRRS

SEQ ID NO: 64676 - protein, 17 aa, Artificial Sequence
  Description of Artificial Sequence: Synthetic peptide
  Seed: DPRMCSLMQGSTLPRRS
DPRMWSLLQGSTNPRRS

SEQ ID NO: 64677 - protein, 17 aa, Artificial Sequence
  Description of Artificial Sequence: Synthetic peptide
  Seed: DPRMCSLMQGSTLPRRS
DPRMWSLLQGSTSPRRS

SEQ ID NO: 64678 - protein, 17 aa, Artificial Sequence
  Description of Artificial Sequence: Synthetic peptide
  Seed: DPRMCSLMQGSTLPRRS
DPRMWSLLQGSTTPRRS

SEQ ID NO: 64679 - protein, 17 aa, Artificial Sequence
  Description of Artificial Sequence: Synthetic peptide
  Seed: DPRMCSLMQGSTLPRRS
DPRMWSLLQGSTVPRRS

SEQ ID NO: 64680 - protein, 17 aa, Artificial Sequence
  Description of Artificial Sequence: Synthetic peptide
  Seed: DPRMCSLMQGSTLPRRS
DPRMWSLLQISTAPRRS

SEQ ID NO: 64681 - protein, 17 aa, Artificial Sequence
  Description of Artificial Sequence: Synthetic peptide
  Seed: DPRMCSLMQGSTLPRRS
DPRMWSLLQISTNPRRS

SEQ ID NO: 64682 - protein, 17 aa, Artificial Sequence
  Description of Artificial Sequence: Synthetic peptide
  Seed: DPRMCSLMQGSTLPRRS
DPRMWSLLQISTSPRRS

SEQ ID NO: 64683 - protein, 17 aa, Artificial Sequence
  Description of Artificial Sequence: Synthetic peptide
  Seed: DPRMCSLMQGSTLPRRS
DPRMWSLLQISTTPRRS

SEQ ID NO: 64684 - protein, 17 aa, Artificial Sequence
  Description of Artificial Sequence: Synthetic peptide
  Seed: DPRMCSLMQGSTLPRRS
DPRMWSLLQISTVPRRS

SEQ ID NO: 64685 - protein, 17 aa, Artificial Sequence
  Description of Artificial Sequence: Synthetic peptide
  Seed: DPRMCSLMQGSTLPRRS
DPRMWSLLQLSTAPRRS

SEQ ID NO: 64686 - protein, 17 aa, Artificial Sequence
  Description of Artificial Sequence: Synthetic peptide
  Seed: DPRMCSLMQGSTLPRRS
DPRMWSLLQMSTAPRRS

SEQ ID NO: 64687 - protein, 17 aa, Artificial Sequence
  Description of Artificial Sequence: Synthetic peptide
  Seed: DPRMCSLMQGSTLPRRS
DPRMWSLLQNSTAPRRS

SEQ ID NO: 64688 - protein, 17 aa, Artificial Sequence
  Description of Artificial Sequence: Synthetic peptide
  Seed: DPRMCSLMQGSTLPRRS
DPRMWSLLQNSTIPRRS

SEQ ID NO: 64689 - protein, 17 aa, Artificial Sequence
  Description of Artificial Sequence: Synthetic peptide
  Seed: DPRMCSLMQGSTLPRRS
DPRMWSLLQNSTLPRRS

SEQ ID NO: 64690 - protein, 17 aa, Artificial Sequence
  Description of Artificial Sequence: Synthetic peptide
  Seed: DPRMCSLMQGSTLPRRS
DPRMWSLLQNSTMPRRS

SEQ ID NO: 64691 - protein, 17 aa, Artificial Sequence
  Description of Artificial Sequence: Synthetic peptide
  Seed: DPRMCSLMQGSTLPRRS
DPRMWSLLQNSTNPRRS

SEQ ID NO: 64692 - protein, 17 aa, Artificial Sequence
  Description of Artificial Sequence: Synthetic peptide
  Seed: DPRMCSLMQGSTLPRRS
DPRMWSLLQNSTSPRRS

SEQ ID NO: 64693 - protein, 17 aa, Artificial Sequence
  Description of Artificial Sequence: Synthetic peptide
  Seed: DPRMCSLMQGSTLPRRS
DPRMWSLLQNSTTPRRS

SEQ ID NO: 64694 - protein, 17 aa, Artificial Sequence
  Description of Artificial Sequence: Synthetic peptide
  Seed: DPRMCSLMQGSTLPRRS
DPRMWSLLQNSTVPRRS

SEQ ID NO: 64695 - protein, 17 aa, Artificial Sequence
  Description of Artificial Sequence: Synthetic peptide
  Seed: DPRMCSLMQGSTLPRRS
DPRMWSLLQPSTAPRRS

SEQ ID NO: 64696 - protein, 17 aa, Artificial Sequence
  Description of Artificial Sequence: Synthetic peptide
  Seed: DPRMCSLMQGSTLPRRS
DPRMWSLLQPSTIPRRS

SEQ ID NO: 64697 - protein, 17 aa, Artificial Sequence
  Description of Artificial Sequence: Synthetic peptide
  Seed: DPRMCSLMQGSTLPRRS
DPRMWSLLQPSTLPRRS

SEQ ID NO: 64698 - protein, 17 aa, Artificial Sequence
  Description of Artificial Sequence: Synthetic peptide
  Seed: DPRMCSLMQGSTLPRRS
DPRMWSLLQPSTMPRRS

SEQ ID NO: 64699 - protein, 17 aa, Artificial Sequence
  Description of Artificial Sequence: Synthetic peptide
  Seed: DPRMCSLMQGSTLPRRS
DPRMWSLLQPSTNPRRS

SEQ ID NO: 64700 - protein, 17 aa, Artificial Sequence
  Description of Artificial Sequence: Synthetic peptide
  Seed: DPRMCSLMQGSTLPRRS
DPRMWSLLQPSTSPRRS

SEQ ID NO: 64701 - protein, 17 aa, Artificial Sequence
  Description of Artificial Sequence: Synthetic peptide
  Seed: DPRMCSLMQGSTLPRRS
DPRMWSLLQPSTTPRRS

SEQ ID NO: 64702 - protein, 17 aa, Artificial Sequence
  Description of Artificial Sequence: Synthetic peptide
  Seed: DPRMCSLMQGSTLPRRS
DPRMWSLLQPSTVPRRS

SEQ ID NO: 64703 - protein, 17 aa, Artificial Sequence
  Description of Artificial Sequence: Synthetic peptide
  Seed: DPRMCSLMQGSTLPRRS
DPRMWSLLQSSTAPRRS

SEQ ID NO: 64704 - protein, 17 aa, Artificial Sequence
  Description of Artificial Sequence: Synthetic peptide
  Seed: DPRMCSLMQGSTLPRRS
DPRMWSLLQSSTGPRRS

SEQ ID NO: 64705 - protein, 17 aa, Artificial Sequence
  Description of Artificial Sequence: Synthetic peptide
  Seed: DPRMCSLMQGSTLPRRS
DPRMWSLLQSSTIPRRS

SEQ ID NO: 64706 - protein, 17 aa, Artificial Sequence
  Description of Artificial Sequence: Synthetic peptide
  Seed: DPRMCSLMQGSTLPRRS
DPRMWSLLQSSTLPRRS

SEQ ID NO: 64707 - protein, 17 aa, Artificial Sequence
  Description of Artificial Sequence: Synthetic peptide
  Seed: DPRMCSLMQGSTLPRRS
DPRMWSLLQSSTMPRRS

SEQ ID NO: 64708 - protein, 17 aa, Artificial Sequence
  Description of Artificial Sequence: Synthetic peptide
  Seed: DPRMCSLMQGSTLPRRS
DPRMWSLLQSSTNPRRS

SEQ ID NO: 64709 - protein, 17 aa, Artificial Sequence
  Description of Artificial Sequence: Synthetic peptide
  Seed: DPRMCSLMQGSTLPRRS
DPRMWSLLQSSTSPRRS

SEQ ID NO: 64710 - protein, 17 aa, Artificial Sequence
  Description of Artificial Sequence: Synthetic peptide
  Seed: DPRMCSLMQGSTLPRRS
DPRMWSLLQSSTTPRRS

SEQ ID NO: 64711 - protein, 17 aa, Artificial Sequence
  Description of Artificial Sequence: Synthetic peptide
  Seed: DPRMCSLMQGSTLPRRS
DPRMWSLLQSSTVPRRS

SEQ ID NO: 64712 - protein, 17 aa, Artificial Sequence
  Description of Artificial Sequence: Synthetic peptide
  Seed: DPRMCSLMQGSTLPRRS
DPRMWSLLQTSTAPRRS

SEQ ID NO: 64713 - protein, 17 aa, Artificial Sequence
  Description of Artificial Sequence: Synthetic peptide
  Seed: DPRMCSLMQGSTLPRRS
DPRMWSLLQTSTIPRRS

SEQ ID NO: 64714 - protein, 17 aa, Artificial Sequence
  Description of Artificial Sequence: Synthetic peptide
  Seed: DPRMCSLMQGSTLPRRS
DPRMWSLLQTSTLPRRS

SEQ ID NO: 64715 - protein, 17 aa, Artificial Sequence
  Description of Artificial Sequence: Synthetic peptide
  Seed: DPRMCSLMQGSTLPRRS
DPRMWSLLQTSTMPRRS

SEQ ID NO: 64716 - protein, 17 aa, Artificial Sequence
  Description of Artificial Sequence: Synthetic peptide
  Seed: DPRMCSLMQGSTLPRRS
DPRMWSLLQTSTNPRRS

SEQ ID NO: 64717 - protein, 17 aa, Artificial Sequence
  Description of Artificial Sequence: Synthetic peptide
  Seed: DPRMCSLMQGSTLPRRS
DPRMWSLLQTSTSPRRS

SEQ ID NO: 64718 - protein, 17 aa, Artificial Sequence
  Description of Artificial Sequence: Synthetic peptide
  Seed: DPRMCSLMQGSTLPRRS
DPRMWSLLQTSTTPRRS

SEQ ID NO: 64719 - protein, 17 aa, Artificial Sequence
  Description of Artificial Sequence: Synthetic peptide
  Seed: DPRMCSLMQGSTLPRRS
DPRMWSLLQTSTVPRRS

SEQ ID NO: 64720 - protein, 17 aa, Artificial Sequence
  Description of Artificial Sequence: Synthetic peptide
  Seed: DPRMCSLMQGSTLPRRS
DPRMWSLLQVSTAPRRS

SEQ ID NO: 64721 - protein, 17 aa, Artificial Sequence
  Description of Artificial Sequence: Synthetic peptide
  Seed: DPRMCSLMQGSTLPRRS
DPRMWSLLQVSTGPRRS

SEQ ID NO: 64722 - protein, 17 aa, Artificial Sequence
  Description of Artificial Sequence: Synthetic peptide
  Seed: DPRMCSLMQGSTLPRRS
DPRMWSLLQVSTHPRRS

SEQ ID NO: 64723 - protein, 17 aa, Artificial Sequence
  Description of Artificial Sequence: Synthetic peptide
  Seed: DPRMCSLMQGSTLPRRS
DPRMWSLLQVSTIPRRS

SEQ ID NO: 64724 - protein, 17 aa, Artificial Sequence
  Description of Artificial Sequence: Synthetic peptide
  Seed: DPRMCSLMQGSTLPRRS
DPRMWSLLQVSTLPRRS

SEQ ID NO: 64725 - protein, 17 aa, Artificial Sequence
  Description of Artificial Sequence: Synthetic peptide
  Seed: DPRMCSLMQGSTLPRRS
DPRMWSLLQVSTMPRRS

SEQ ID NO: 64726 - protein, 17 aa, Artificial Sequence
  Description of Artificial Sequence: Synthetic peptide
  Seed: DPRMCSLMQGSTLPRRS
DPRMWSLLQVSTNPRRS

SEQ ID NO: 64727 - protein, 17 aa, Artificial Sequence
  Description of Artificial Sequence: Synthetic peptide
  Seed: DPRMCSLMQGSTLPRRS
DPRMWSLLQVSTSPRRS

SEQ ID NO: 64728 - protein, 17 aa, Artificial Sequence
  Description of Artificial Sequence: Synthetic peptide
  Seed: DPRMCSLMQGSTLPRRS
DPRMWSLLQVSTTPRRS

SEQ ID NO: 64729 - protein, 17 aa, Artificial Sequence
  Description of Artificial Sequence: Synthetic peptide
  Seed: DPRMCSLMQGSTLPRRS
DPRMWSLLQVSTVPRRS

SEQ ID NO: 64730 - protein, 17 aa, Artificial Sequence
  Description of Artificial Sequence: Synthetic peptide
  Seed: DPRMCSLMQGSTLPRRS
DPRMWSLMQASTAPRRS

SEQ ID NO: 64731 - protein, 17 aa, Artificial Sequence
  Description of Artificial Sequence: Synthetic peptide
  Seed: DPRMCSLMQGSTLPRRS
DPRMWSLMQASTFPRRS

SEQ ID NO: 64732 - protein, 17 aa, Artificial Sequence
  Description of Artificial Sequence: Synthetic peptide
  Seed: DPRMCSLMQGSTLPRRS
DPRMWSLMQASTGPRRS

SEQ ID NO: 64733 - protein, 17 aa, Artificial Sequence
  Description of Artificial Sequence: Synthetic peptide
  Seed: DPRMCSLMQGSTLPRRS
DPRMWSLMQASTHPRRS

SEQ ID NO: 64734 - protein, 17 aa, Artificial Sequence
  Description of Artificial Sequence: Synthetic peptide
  Seed: DPRMCSLMQGSTLPRRS
DPRMWSLMQASTIPRRS

SEQ ID NO: 64735 - protein, 17 aa, Artificial Sequence
  Description of Artificial Sequence: Synthetic peptide
  Seed: DPRMCSLMQGSTLPRRS
DPRMWSLMQASTLPRRS

SEQ ID NO: 64736 - protein, 17 aa, Artificial Sequence
  Description of Artificial Sequence: Synthetic peptide
  Seed: DPRMCSLMQGSTLPRRS
DPRMWSLMQASTMPRRS

SEQ ID NO: 64737 - protein, 17 aa, Artificial Sequence
  Description of Artificial Sequence: Synthetic peptide
  Seed: DPRMCSLMQGSTLPRRS
DPRMWSLMQASTNPRRS

SEQ ID NO: 64738 - protein, 17 aa, Artificial Sequence
  Description of Artificial Sequence: Synthetic peptide
  Seed: DPRMCSLMQGSTLPRRS
DPRMWSLMQASTQPRRS

SEQ ID NO: 64739 - protein, 17 aa, Artificial Sequence
  Description of Artificial Sequence: Synthetic peptide
  Seed: DPRMCSLMQGSTLPRRS
DPRMWSLMQASTSPRRS

SEQ ID NO: 64740 - protein, 17 aa, Artificial Sequence
  Description of Artificial Sequence: Synthetic peptide
  Seed: DPRMCSLMQGSTLPRRS
DPRMWSLMQASTTPRRS

SEQ ID NO: 64741 - protein, 17 aa, Artificial Sequence
  Description of Artificial Sequence: Synthetic peptide
  Seed: DPRMCSLMQGSTLPRRS
DPRMWSLMQASTVPRRS

SEQ ID NO: 64742 - protein, 17 aa, Artificial Sequence
  Description of Artificial Sequence: Synthetic peptide
  Seed: DPRMCSLMQGSTLPRRS
DPRMWSLMQGSTAPRRS

SEQ ID NO: 64743 - protein, 17 aa, Artificial Sequence
  Description of Artificial Sequence: Synthetic peptide
  Seed: DPRMCSLMQGSTLPRRS
DPRMWSLMQGSTGPRRS

SEQ ID NO: 64744 - protein, 17 aa, Artificial Sequence
  Description of Artificial Sequence: Synthetic peptide
  Seed: DPRMCSLMQGSTLPRRS
DPRMWSLMQGSTIPRRS

SEQ ID NO: 64745 - protein, 17 aa, Artificial Sequence
  Description of Artificial Sequence: Synthetic peptide
  Seed: DPRMCSLMQGSTLPRRS
DPRMWSLMQGSTLPRRS

SEQ ID NO: 64746 - protein, 17 aa, Artificial Sequence
  Description of Artificial Sequence: Synthetic peptide
  Seed: DPRMCSLMQGSTLPRRS
DPRMWSLMQGSTMPRRS

SEQ ID NO: 64747 - protein, 17 aa, Artificial Sequence
  Description of Artificial Sequence: Synthetic peptide
  Seed: DPRMCSLMQGSTLPRRS
DPRMWSLMQGSTNPRRS

SEQ ID NO: 64748 - protein, 17 aa, Artificial Sequence
  Description of Artificial Sequence: Synthetic peptide
  Seed: DPRMCSLMQGSTLPRRS
DPRMWSLMQGSTSPRRS

SEQ ID NO: 64749 - protein, 17 aa, Artificial Sequence
  Description of Artificial Sequence: Synthetic peptide
  Seed: DPRMCSLMQGSTLPRRS
DPRMWSLMQGSTTPRRS

SEQ ID NO: 64750 - protein, 17 aa, Artificial Sequence
  Description of Artificial Sequence: Synthetic peptide
  Seed: DPRMCSLMQGSTLPRRS
DPRMWSLMQGSTVPRRS

SEQ ID NO: 64751 - protein, 17 aa, Artificial Sequence
  Description of Artificial Sequence: Synthetic peptide
  Seed: DPRMCSLMQGSTLPRRS
DPRMWSLMQISTAPRRS

SEQ ID NO: 64752 - protein, 17 aa, Artificial Sequence
  Description of Artificial Sequence: Synthetic peptide
  Seed: DPRMCSLMQGSTLPRRS
DPRMWSLMQISTIPRRS

SEQ ID NO: 64753 - protein, 17 aa, Artificial Sequence
  Description of Artificial Sequence: Synthetic peptide
  Seed: DPRMCSLMQGSTLPRRS
DPRMWSLMQISTLPRRS

SEQ ID NO: 64754 - protein, 17 aa, Artificial Sequence
  Description of Artificial Sequence: Synthetic peptide
  Seed: DPRMCSLMQGSTLPRRS
DPRMWSLMQISTMPRRS

SEQ ID NO: 64755 - protein, 17 aa, Artificial Sequence
  Description of Artificial Sequence: Synthetic peptide
  Seed: DPRMCSLMQGSTLPRRS
DPRMWSLMQISTNPRRS

SEQ ID NO: 64756 - protein, 17 aa, Artificial Sequence
  Description of Artificial Sequence: Synthetic peptide
  Seed: DPRMCSLMQGSTLPRRS
DPRMWSLMQISTSPRRS

SEQ ID NO: 64757 - protein, 17 aa, Artificial Sequence
  Description of Artificial Sequence: Synthetic peptide
  Seed: DPRMCSLMQGSTLPRRS
DPRMWSLMQISTTPRRS

SEQ ID NO: 64758 - protein, 17 aa, Artificial Sequence
  Description of Artificial Sequence: Synthetic peptide
  Seed: DPRMCSLMQGSTLPRRS
DPRMWSLMQISTVPRRS

SEQ ID NO: 64759 - protein, 17 aa, Artificial Sequence
  Description of Artificial Sequence: Synthetic peptide
  Seed: DPRMCSLMQGSTLPRRS
DPRMWSLMQLSTAPRRS

SEQ ID NO: 64760 - protein, 17 aa, Artificial Sequence
  Description of Artificial Sequence: Synthetic peptide
  Seed: DPRMCSLMQGSTLPRRS
DPRMWSLMQLSTSPRRS

SEQ ID NO: 64761 - protein, 17 aa, Artificial Sequence
  Description of Artificial Sequence: Synthetic peptide
  Seed: DPRMCSLMQGSTLPRRS
DPRMWSLMQMSTAPRRS

SEQ ID NO: 64762 - protein, 17 aa, Artificial Sequence
  Description of Artificial Sequence: Synthetic peptide
  Seed: DPRMCSLMQGSTLPRRS
DPRMWSLMQMSTSPRRS

SEQ ID NO: 64763 - protein, 17 aa, Artificial Sequence
  Description of Artificial Sequence: Synthetic peptide
  Seed: DPRMCSLMQGSTLPRRS
DPRMWSLMQNSTAPRRS

SEQ ID NO: 64764 - protein, 17 aa, Artificial Sequence
  Description of Artificial Sequence: Synthetic peptide
  Seed: DPRMCSLMQGSTLPRRS
DPRMWSLMQNSTIPRRS

SEQ ID NO: 64765 - protein, 17 aa, Artificial Sequence
  Description of Artificial Sequence: Synthetic peptide
  Seed: DPRMCSLMQGSTLPRRS
DPRMWSLMQNSTLPRRS

SEQ ID NO: 64766 - protein, 17 aa, Artificial Sequence
  Description of Artificial Sequence: Synthetic peptide
  Seed: DPRMCSLMQGSTLPRRS
DPRMWSLMQNSTMPRRS

SEQ ID NO: 64767 - protein, 17 aa, Artificial Sequence
  Description of Artificial Sequence: Synthetic peptide
  Seed: DPRMCSLMQGSTLPRRS
DPRMWSLMQNSTNPRRS

SEQ ID NO: 64768 - protein, 17 aa, Artificial Sequence
  Description of Artificial Sequence: Synthetic peptide
  Seed: DPRMCSLMQGSTLPRRS
DPRMWSLMQNSTSPRRS

SEQ ID NO: 64769 - protein, 17 aa, Artificial Sequence
  Description of Artificial Sequence: Synthetic peptide
  Seed: DPRMCSLMQGSTLPRRS
DPRMWSLMQNSTTPRRS

SEQ ID NO: 64770 - protein, 17 aa, Artificial Sequence
  Description of Artificial Sequence: Synthetic peptide
  Seed: DPRMCSLMQGSTLPRRS
DPRMWSLMQNSTVPRRS

SEQ ID NO: 64771 - protein, 17 aa, Artificial Sequence
  Description of Artificial Sequence: Synthetic peptide
  Seed: DPRMCSLMQGSTLPRRS
DPRMWSLMQPSTAPRRS

SEQ ID NO: 64772 - protein, 17 aa, Artificial Sequence
  Description of Artificial Sequence: Synthetic peptide
  Seed: DPRMCSLMQGSTLPRRS
DPRMWSLMQPSTIPRRS

SEQ ID NO: 64773 - protein, 17 aa, Artificial Sequence
  Description of Artificial Sequence: Synthetic peptide
  Seed: DPRMCSLMQGSTLPRRS
DPRMWSLMQPSTLPRRS

SEQ ID NO: 64774 - protein, 17 aa, Artificial Sequence
  Description of Artificial Sequence: Synthetic peptide
  Seed: DPRMCSLMQGSTLPRRS
DPRMWSLMQPSTMPRRS

SEQ ID NO: 64775 - protein, 17 aa, Artificial Sequence
  Description of Artificial Sequence: Synthetic peptide
  Seed: DPRMCSLMQGSTLPRRS
DPRMWSLMQPSTNPRRS

SEQ ID NO: 64776 - protein, 17 aa, Artificial Sequence
  Description of Artificial Sequence: Synthetic peptide
  Seed: DPRMCSLMQGSTLPRRS
DPRMWSLMQPSTSPRRS

SEQ ID NO: 64777 - protein, 17 aa, Artificial Sequence
  Description of Artificial Sequence: Synthetic peptide
  Seed: DPRMCSLMQGSTLPRRS
DPRMWSLMQPSTTPRRS

SEQ ID NO: 64778 - protein, 17 aa, Artificial Sequence
  Description of Artificial Sequence: Synthetic peptide
  Seed: DPRMCSLMQGSTLPRRS
DPRMWSLMQPSTVPRRS

SEQ ID NO: 64779 - protein, 17 aa, Artificial Sequence
  Description of Artificial Sequence: Synthetic peptide
  Seed: DPRMCSLMQGSTLPRRS
DPRMWSLMQSSTAPRRS

SEQ ID NO: 64780 - protein, 17 aa, Artificial Sequence
  Description of Artificial Sequence: Synthetic peptide
  Seed: DPRMCSLMQGSTLPRRS
DPRMWSLMQSSTGPRRS

SEQ ID NO: 64781 - protein, 17 aa, Artificial Sequence
  Description of Artificial Sequence: Synthetic peptide
  Seed: DPRMCSLMQGSTLPRRS
DPRMWSLMQSSTIPRRS

SEQ ID NO: 64782 - protein, 17 aa, Artificial Sequence
  Description of Artificial Sequence: Synthetic peptide
  Seed: DPRMCSLMQGSTLPRRS
DPRMWSLMQSSTLPRRS

SEQ ID NO: 64783 - protein, 17 aa, Artificial Sequence
  Description of Artificial Sequence: Synthetic peptide
  Seed: DPRMCSLMQGSTLPRRS
DPRMWSLMQSSTMPRRS

SEQ ID NO: 64784 - protein, 17 aa, Artificial Sequence
  Description of Artificial Sequence: Synthetic peptide
  Seed: DPRMCSLMQGSTLPRRS
DPRMWSLMQSSTNPRRS

SEQ ID NO: 64785 - protein, 17 aa, Artificial Sequence
  Description of Artificial Sequence: Synthetic peptide
  Seed: DPRMCSLMQGSTLPRRS
DPRMWSLMQSSTSPRRS

SEQ ID NO: 64786 - protein, 17 aa, Artificial Sequence
  Description of Artificial Sequence: Synthetic peptide
  Seed: DPRMCSLMQGSTLPRRS
DPRMWSLMQSSTTPRRS

SEQ ID NO: 64787 - protein, 17 aa, Artificial Sequence
  Description of Artificial Sequence: Synthetic peptide
  Seed: DPRMCSLMQGSTLPRRS
DPRMWSLMQSSTVPRRS

SEQ ID NO: 64788 - protein, 17 aa, Artificial Sequence
  Description of Artificial Sequence: Synthetic peptide
  Seed: DPRMCSLMQGSTLPRRS
DPRMWSLMQTSTAPRRS

SEQ ID NO: 64789 - protein, 17 aa, Artificial Sequence
  Description of Artificial Sequence: Synthetic peptide
  Seed: DPRMCSLMQGSTLPRRS
DPRMWSLMQTSTIPRRS

SEQ ID NO: 64790 - protein, 17 aa, Artificial Sequence
  Description of Artificial Sequence: Synthetic peptide
  Seed: DPRMCSLMQGSTLPRRS
DPRMWSLMQTSTLPRRS

SEQ ID NO: 64791 - protein, 17 aa, Artificial Sequence
  Description of Artificial Sequence: Synthetic peptide
  Seed: DPRMCSLMQGSTLPRRS
DPRMWSLMQTSTMPRRS

SEQ ID NO: 64792 - protein, 17 aa, Artificial Sequence
  Description of Artificial Sequence: Synthetic peptide
  Seed: DPRMCSLMQGSTLPRRS
DPRMWSLMQTSTNPRRS

SEQ ID NO: 64793 - protein, 17 aa, Artificial Sequence
  Description of Artificial Sequence: Synthetic peptide
  Seed: DPRMCSLMQGSTLPRRS
DPRMWSLMQTSTSPRRS

SEQ ID NO: 64794 - protein, 17 aa, Artificial Sequence
  Description of Artificial Sequence: Synthetic peptide
  Seed: DPRMCSLMQGSTLPRRS
DPRMWSLMQTSTTPRRS

SEQ ID NO: 64795 - protein, 17 aa, Artificial Sequence
  Description of Artificial Sequence: Synthetic peptide
  Seed: DPRMCSLMQGSTLPRRS
DPRMWSLMQTSTVPRRS

SEQ ID NO: 64796 - protein, 17 aa, Artificial Sequence
  Description of Artificial Sequence: Synthetic peptide
  Seed: DPRMCSLMQGSTLPRRS
DPRMWSLMQVSTAPRRS

SEQ ID NO: 64797 - protein, 17 aa, Artificial Sequence
  Description of Artificial Sequence: Synthetic peptide
  Seed: DPRMCSLMQGSTLPRRS
DPRMWSLMQVSTGPRRS

SEQ ID NO: 64798 - protein, 17 aa, Artificial Sequence
  Description of Artificial Sequence: Synthetic peptide
  Seed: DPRMCSLMQGSTLPRRS
DPRMWSLMQVSTHPRRS

SEQ ID NO: 64799 - protein, 17 aa, Artificial Sequence
  Description of Artificial Sequence: Synthetic peptide
  Seed: DPRMCSLMQGSTLPRRS
DPRMWSLMQVSTIPRRS

SEQ ID NO: 64800 - protein, 17 aa, Artificial Sequence
  Description of Artificial Sequence: Synthetic peptide
  Seed: DPRMCSLMQGSTLPRRS
DPRMWSLMQVSTLPRRS

SEQ ID NO: 64801 - protein, 17 aa, Artificial Sequence
  Description of Artificial Sequence: Synthetic peptide
  Seed: DPRMCSLMQGSTLPRRS
DPRMWSLMQVSTMPRRS

SEQ ID NO: 64802 - protein, 17 aa, Artificial Sequence
  Description of Artificial Sequence: Synthetic peptide
  Seed: DPRMCSLMQGSTLPRRS
DPRMWSLMQVSTNPRRS

SEQ ID NO: 64803 - protein, 17 aa, Artificial Sequence
  Description of Artificial Sequence: Synthetic peptide
  Seed: DPRMCSLMQGSTLPRRS
DPRMWSLMQVSTSPRRS

SEQ ID NO: 64804 - protein, 17 aa, Artificial Sequence
  Description of Artificial Sequence: Synthetic peptide
  Seed: DPRMCSLMQGSTLPRRS
DPRMWSLMQVSTTPRRS

SEQ ID NO: 64805 - protein, 17 aa, Artificial Sequence
  Description of Artificial Sequence: Synthetic peptide
  Seed: DPRMCSLMQGSTLPRRS
DPRMWSLMQVSTVPRRS

SEQ ID NO: 64806 - protein, 17 aa, Artificial Sequence
  Description of Artificial Sequence: Synthetic peptide
  Seed: DPRMCSLMQGSTLPRRS
DPRMWSLQQASTAPRRS

SEQ ID NO: 64807 - protein, 17 aa, Artificial Sequence
  Description of Artificial Sequence: Synthetic peptide
  Seed: DPRMCSLMQGSTLPRRS
DPRMWSLQQASTIPRRS

SEQ ID NO: 64808 - protein, 17 aa, Artificial Sequence
  Description of Artificial Sequence: Synthetic peptide
  Seed: DPRMCSLMQGSTLPRRS
DPRMWSLQQASTLPRRS

SEQ ID NO: 64809 - protein, 17 aa, Artificial Sequence
  Description of Artificial Sequence: Synthetic peptide
  Seed: DPRMCSLMQGSTLPRRS
DPRMWSLQQASTVPRRS

SEQ ID NO: 64810 - protein, 17 aa, Artificial Sequence
  Description of Artificial Sequence: Synthetic peptide
  Seed: DPRMCSLMQGSTLPRRS
DPRMWSLQQGSTAPRRS

SEQ ID NO: 64811 - protein, 17 aa, Artificial Sequence
  Description of Artificial Sequence: Synthetic peptide
  Seed: DPRMCSLMQGSTLPRRS
DPRMWSLQQGSTIPRRS

SEQ ID NO: 64812 - protein, 17 aa, Artificial Sequence
  Description of Artificial Sequence: Synthetic peptide
  Seed: DPRMCSLMQGSTLPRRS
DPRMWSLQQGSTLPRRS

SEQ ID NO: 64813 - protein, 17 aa, Artificial Sequence
  Description of Artificial Sequence: Synthetic peptide
  Seed: DPRMCSLMQGSTLPRRS
DPRMWSLQQGSTVPRRS

SEQ ID NO: 64814 - protein, 17 aa, Artificial Sequence
  Description of Artificial Sequence: Synthetic peptide
  Seed: DPRMCSLMQGSTLPRRS
DPRMWSLQQSSTAPRRS

SEQ ID NO: 64815 - protein, 17 aa, Artificial Sequence
  Description of Artificial Sequence: Synthetic peptide
  Seed: DPRMCSLMQGSTLPRRS
DPRMWSLQQSSTIPRRS

SEQ ID NO: 64816 - protein, 17 aa, Artificial Sequence
  Description of Artificial Sequence: Synthetic peptide
  Seed: DPRMCSLMQGSTLPRRS
DPRMWSLQQSSTLPRRS

SEQ ID NO: 64817 - protein, 17 aa, Artificial Sequence
  Description of Artificial Sequence: Synthetic peptide
  Seed: DPRMCSLMQGSTLPRRS
DPRMWSLQQSSTVPRRS

SEQ ID NO: 64818 - protein, 17 aa, Artificial Sequence
  Description of Artificial Sequence: Synthetic peptide
  Seed: DPRMCSLMQGSTLPRRS
DPRMWSLSQASTIPRRS

SEQ ID NO: 64819 - protein, 17 aa, Artificial Sequence
  Description of Artificial Sequence: Synthetic peptide
  Seed: DPRMCSLMQGSTLPRRS
DPRMWSLSQASTLPRRS

SEQ ID NO: 64820 - protein, 17 aa, Artificial Sequence
  Description of Artificial Sequence: Synthetic peptide
  Seed: DPRMCSLMQGSTLPRRS
DPRMWSLSQASTVPRRS

SEQ ID NO: 64821 - protein, 17 aa, Artificial Sequence
  Description of Artificial Sequence: Synthetic peptide
  Seed: DPRMCSLMQGSTLPRRS
DPRMWSLVQASTAPRRS

SEQ ID NO: 64822 - protein, 17 aa, Artificial Sequence
  Description of Artificial Sequence: Synthetic peptide
  Seed: DPRMCSLMQGSTLPRRS
DPRMWSLVQASTIPRRS

SEQ ID NO: 64823 - protein, 17 aa, Artificial Sequence
  Description of Artificial Sequence: Synthetic peptide
  Seed: DPRMCSLMQGSTLPRRS
DPRMWSLVQASTLPRRS

SEQ ID NO: 64824 - protein, 17 aa, Artificial Sequence
  Description of Artificial Sequence: Synthetic peptide
  Seed: DPRMCSLMQGSTLPRRS
DPRMWSLVQASTMPRRS

SEQ ID NO: 64825 - protein, 17 aa, Artificial Sequence
  Description of Artificial Sequence: Synthetic peptide
  Seed: DPRMCSLMQGSTLPRRS
DPRMWSLVQASTNPRRS

SEQ ID NO: 64826 - protein, 17 aa, Artificial Sequence
  Description of Artificial Sequence: Synthetic peptide
  Seed: DPRMCSLMQGSTLPRRS
DPRMWSLVQASTSPRRS

SEQ ID NO: 64827 - protein, 17 aa, Artificial Sequence
  Description of Artificial Sequence: Synthetic peptide
  Seed: DPRMCSLMQGSTLPRRS
DPRMWSLVQASTTPRRS

SEQ ID NO: 64828 - protein, 17 aa, Artificial Sequence
  Description of Artificial Sequence: Synthetic peptide
  Seed: DPRMCSLMQGSTLPRRS
DPRMWSLVQASTVPRRS

SEQ ID NO: 64829 - protein, 17 aa, Artificial Sequence
  Description of Artificial Sequence: Synthetic peptide
  Seed: DPRMCSLMQGSTLPRRS
DPRMWSLVQGSTAPRRS

SEQ ID NO: 64830 - protein, 17 aa, Artificial Sequence
  Description of Artificial Sequence: Synthetic peptide
  Seed: DPRMCSLMQGSTLPRRS
DPRMWSLVQGSTIPRRS

SEQ ID NO: 64831 - protein, 17 aa, Artificial Sequence
  Description of Artificial Sequence: Synthetic peptide
  Seed: DPRMCSLMQGSTLPRRS
DPRMWSLVQGSTLPRRS

SEQ ID NO: 64832 - protein, 17 aa, Artificial Sequence
  Description of Artificial Sequence: Synthetic peptide
  Seed: DPRMCSLMQGSTLPRRS
DPRMWSLVQGSTVPRRS

SEQ ID NO: 64833 - protein, 17 aa, Artificial Sequence
  Description of Artificial Sequence: Synthetic peptide
  Seed: DPRMCSLMQGSTLPRRS
DPRMWSLVQPSTAPRRS

SEQ ID NO: 64834 - protein, 17 aa, Artificial Sequence
  Description of Artificial Sequence: Synthetic peptide
  Seed: DPRMCSLMQGSTLPRRS
DPRMWSLVQPSTLPRRS

SEQ ID NO: 64835 - protein, 17 aa, Artificial Sequence
  Description of Artificial Sequence: Synthetic peptide
  Seed: DPRMCSLMQGSTLPRRS
DPRMWSLVQPSTSPRRS

SEQ ID NO: 64836 - protein, 17 aa, Artificial Sequence
  Description of Artificial Sequence: Synthetic peptide
  Seed: DPRMCSLMQGSTLPRRS
DPRMWSLVQPSTVPRRS

SEQ ID NO: 64837 - protein, 17 aa, Artificial Sequence
  Description of Artificial Sequence: Synthetic peptide
  Seed: DPRMCSLMQGSTLPRRS
DPRMWSLVQSSTAPRRS

SEQ ID NO: 64838 - protein, 17 aa, Artificial Sequence
  Description of Artificial Sequence: Synthetic peptide
  Seed: DPRMCSLMQGSTLPRRS
DPRMWSLVQSSTIPRRS

SEQ ID NO: 64839 - protein, 17 aa, Artificial Sequence
  Description of Artificial Sequence: Synthetic peptide
  Seed: DPRMCSLMQGSTLPRRS
DPRMWSLVQSSTLPRRS

SEQ ID NO: 64840 - protein, 17 aa, Artificial Sequence
  Description of Artificial Sequence: Synthetic peptide
  Seed: DPRMCSLMQGSTLPRRS
DPRMWSLVQSSTSPRRS

SEQ ID NO: 64841 - protein, 17 aa, Artificial Sequence
  Description of Artificial Sequence: Synthetic peptide
  Seed: DPRMCSLMQGSTLPRRS
DPRMWSLVQSSTVPRRS

SEQ ID NO: 64842 - protein, 17 aa, Artificial Sequence
  Description of Artificial Sequence: Synthetic peptide
  Seed: DPRMCSLMQGSTLPRRS
DPRMWSLVQTSTAPRRS

SEQ ID NO: 64843 - protein, 17 aa, Artificial Sequence
  Description of Artificial Sequence: Synthetic peptide
  Seed: DPRMCSLMQGSTLPRRS
DPRMWSLVQTSTSPRRS

SEQ ID NO: 64844 - protein, 17 aa, Artificial Sequence
  Description of Artificial Sequence: Synthetic peptide
  Seed: DPRMCSLMQGSTLPRRS
DPRMWSLVQVSTAPRRS

SEQ ID NO: 64845 - protein, 17 aa, Artificial Sequence
  Description of Artificial Sequence: Synthetic peptide
  Seed: DPRMCSLMQGSTLPRRS
DPRMWSLVQVSTSPRRS

SEQ ID NO: 64846 - protein, 17 aa, Artificial Sequence
  Description of Artificial Sequence: Synthetic peptide
  Seed: DPRMCSLMQGSTLPRRS
DPRMYSLAQASTAPRRS

SEQ ID NO: 64847 - protein, 17 aa, Artificial Sequence
  Description of Artificial Sequence: Synthetic peptide
  Seed: DPRMCSLMQGSTLPRRS
DPRMYSLAQASTFPRRS

SEQ ID NO: 64848 - protein, 17 aa, Artificial Sequence
  Description of Artificial Sequence: Synthetic peptide
  Seed: DPRMCSLMQGSTLPRRS
DPRMYSLAQASTGPRRS

SEQ ID NO: 64849 - protein, 17 aa, Artificial Sequence
  Description of Artificial Sequence: Synthetic peptide
  Seed: DPRMCSLMQGSTLPRRS
DPRMYSLAQASTHPRRS

SEQ ID NO: 64850 - protein, 17 aa, Artificial Sequence
  Description of Artificial Sequence: Synthetic peptide
  Seed: DPRMCSLMQGSTLPRRS
DPRMYSLAQASTIPRRS

SEQ ID NO: 64851 - protein, 17 aa, Artificial Sequence
  Description of Artificial Sequence: Synthetic peptide
  Seed: DPRMCSLMQGSTLPRRS
DPRMYSLAQASTLPRRS

SEQ ID NO: 64852 - protein, 17 aa, Artificial Sequence
  Description of Artificial Sequence: Synthetic peptide
  Seed: DPRMCSLMQGSTLPRRS
DPRMYSLAQASTMPRRS

SEQ ID NO: 64853 - protein, 17 aa, Artificial Sequence
  Description of Artificial Sequence: Synthetic peptide
  Seed: DPRMCSLMQGSTLPRRS
DPRMYSLAQASTNPRRS

SEQ ID NO: 64854 - protein, 17 aa, Artificial Sequence
  Description of Artificial Sequence: Synthetic peptide
  Seed: DPRMCSLMQGSTLPRRS
DPRMYSLAQASTQPRRS

SEQ ID NO: 64855 - protein, 17 aa, Artificial Sequence
  Description of Artificial Sequence: Synthetic peptide
  Seed: DPRMCSLMQGSTLPRRS
DPRMYSLAQASTSPRRS

SEQ ID NO: 64856 - protein, 17 aa, Artificial Sequence
  Description of Artificial Sequence: Synthetic peptide
  Seed: DPRMCSLMQGSTLPRRS
DPRMYSLAQASTTPRRS

SEQ ID NO: 64857 - protein, 17 aa, Artificial Sequence
  Description of Artificial Sequence: Synthetic peptide
  Seed: DPRMCSLMQGSTLPRRS
DPRMYSLAQASTVPRRS

SEQ ID NO: 64858 - protein, 17 aa, Artificial Sequence
  Description of Artificial Sequence: Synthetic peptide
  Seed: DPRMCSLMQGSTLPRRS
DPRMYSLAQGSTAPRRS

SEQ ID NO: 64859 - protein, 17 aa, Artificial Sequence
  Description of Artificial Sequence: Synthetic peptide
  Seed: DPRMCSLMQGSTLPRRS
DPRMYSLAQGSTIPRRS

SEQ ID NO: 64860 - protein, 17 aa, Artificial Sequence
  Description of Artificial Sequence: Synthetic peptide
  Seed: DPRMCSLMQGSTLPRRS
DPRMYSLAQGSTLPRRS

SEQ ID NO: 64861 - protein, 17 aa, Artificial Sequence
  Description of Artificial Sequence: Synthetic peptide
  Seed: DPRMCSLMQGSTLPRRS
DPRMYSLAQGSTMPRRS

SEQ ID NO: 64862 - protein, 17 aa, Artificial Sequence
  Description of Artificial Sequence: Synthetic peptide
  Seed: DPRMCSLMQGSTLPRRS
DPRMYSLAQGSTSPRRS

SEQ ID NO: 64863 - protein, 17 aa, Artificial Sequence
  Description of Artificial Sequence: Synthetic peptide
  Seed: DPRMCSLMQGSTLPRRS
DPRMYSLAQGSTTPRRS

SEQ ID NO: 64864 - protein, 17 aa, Artificial Sequence
  Description of Artificial Sequence: Synthetic peptide
  Seed: DPRMCSLMQGSTLPRRS
DPRMYSLAQGSTVPRRS

SEQ ID NO: 64865 - protein, 17 aa, Artificial Sequence
  Description of Artificial Sequence: Synthetic peptide
  Seed: DPRMCSLMQGSTLPRRS
DPRMYSLAQISTAPRRS

SEQ ID NO: 64866 - protein, 17 aa, Artificial Sequence
  Description of Artificial Sequence: Synthetic peptide
  Seed: DPRMCSLMQGSTLPRRS
DPRMYSLAQISTIPRRS

SEQ ID NO: 64867 - protein, 17 aa, Artificial Sequence
  Description of Artificial Sequence: Synthetic peptide
  Seed: DPRMCSLMQGSTLPRRS
DPRMYSLAQISTLPRRS

SEQ ID NO: 64868 - protein, 17 aa, Artificial Sequence
  Description of Artificial Sequence: Synthetic peptide
  Seed: DPRMCSLMQGSTLPRRS
DPRMYSLAQISTMPRRS

SEQ ID NO: 64869 - protein, 17 aa, Artificial Sequence
  Description of Artificial Sequence: Synthetic peptide
  Seed: DPRMCSLMQGSTLPRRS
DPRMYSLAQISTNPRRS

SEQ ID NO: 64870 - protein, 17 aa, Artificial Sequence
  Description of Artificial Sequence: Synthetic peptide
  Seed: DPRMCSLMQGSTLPRRS
DPRMYSLAQISTSPRRS

SEQ ID NO: 64871 - protein, 17 aa, Artificial Sequence
  Description of Artificial Sequence: Synthetic peptide
  Seed: DPRMCSLMQGSTLPRRS
DPRMYSLAQISTTPRRS

SEQ ID NO: 64872 - protein, 17 aa, Artificial Sequence
  Description of Artificial Sequence: Synthetic peptide
  Seed: DPRMCSLMQGSTLPRRS
DPRMYSLAQISTVPRRS

SEQ ID NO: 64873 - protein, 17 aa, Artificial Sequence
  Description of Artificial Sequence: Synthetic peptide
  Seed: DPRMCSLMQGSTLPRRS
DPRMYSLAQLSTAPRRS

SEQ ID NO: 64874 - protein, 17 aa, Artificial Sequence
  Description of Artificial Sequence: Synthetic peptide
  Seed: DPRMCSLMQGSTLPRRS
DPRMYSLAQMSTAPRRS

SEQ ID NO: 64875 - protein, 17 aa, Artificial Sequence
  Description of Artificial Sequence: Synthetic peptide
  Seed: DPRMCSLMQGSTLPRRS
DPRMYSLAQNSTAPRRS

SEQ ID NO: 64876 - protein, 17 aa, Artificial Sequence
  Description of Artificial Sequence: Synthetic peptide
  Seed: DPRMCSLMQGSTLPRRS
DPRMYSLAQNSTIPRRS

SEQ ID NO: 64877 - protein, 17 aa, Artificial Sequence
  Description of Artificial Sequence: Synthetic peptide
  Seed: DPRMCSLMQGSTLPRRS
DPRMYSLAQNSTLPRRS

SEQ ID NO: 64878 - protein, 17 aa, Artificial Sequence
  Description of Artificial Sequence: Synthetic peptide
  Seed: DPRMCSLMQGSTLPRRS
DPRMYSLAQNSTVPRRS

SEQ ID NO: 64879 - protein, 17 aa, Artificial Sequence
  Description of Artificial Sequence: Synthetic peptide
  Seed: DPRMCSLMQGSTLPRRS
DPRMYSLAQPSTAPRRS

SEQ ID NO: 64880 - protein, 17 aa, Artificial Sequence
  Description of Artificial Sequence: Synthetic peptide
  Seed: DPRMCSLMQGSTLPRRS
DPRMYSLAQPSTIPRRS

SEQ ID NO: 64881 - protein, 17 aa, Artificial Sequence
  Description of Artificial Sequence: Synthetic peptide
  Seed: DPRMCSLMQGSTLPRRS
DPRMYSLAQPSTLPRRS

SEQ ID NO: 64882 - protein, 17 aa, Artificial Sequence
  Description of Artificial Sequence: Synthetic peptide
  Seed: DPRMCSLMQGSTLPRRS
DPRMYSLAQPSTMPRRS

SEQ ID NO: 64883 - protein, 17 aa, Artificial Sequence
  Description of Artificial Sequence: Synthetic peptide
  Seed: DPRMCSLMQGSTLPRRS
DPRMYSLAQPSTNPRRS

SEQ ID NO: 64884 - protein, 17 aa, Artificial Sequence
  Description of Artificial Sequence: Synthetic peptide
  Seed: DPRMCSLMQGSTLPRRS
DPRMYSLAQPSTSPRRS

SEQ ID NO: 64885 - protein, 17 aa, Artificial Sequence
  Description of Artificial Sequence: Synthetic peptide
  Seed: DPRMCSLMQGSTLPRRS
DPRMYSLAQPSTTPRRS

SEQ ID NO: 64886 - protein, 17 aa, Artificial Sequence
  Description of Artificial Sequence: Synthetic peptide
  Seed: DPRMCSLMQGSTLPRRS
DPRMYSLAQPSTVPRRS

SEQ ID NO: 64887 - protein, 17 aa, Artificial Sequence
  Description of Artificial Sequence: Synthetic peptide
  Seed: DPRMCSLMQGSTLPRRS
DPRMYSLAQSSTAPRRS

SEQ ID NO: 64888 - protein, 17 aa, Artificial Sequence
  Description of Artificial Sequence: Synthetic peptide
  Seed: DPRMCSLMQGSTLPRRS
DPRMYSLAQSSTIPRRS

SEQ ID NO: 64889 - protein, 17 aa, Artificial Sequence
  Description of Artificial Sequence: Synthetic peptide
  Seed: DPRMCSLMQGSTLPRRS
DPRMYSLAQSSTLPRRS

SEQ ID NO: 64890 - protein, 17 aa, Artificial Sequence
  Description of Artificial Sequence: Synthetic peptide
  Seed: DPRMCSLMQGSTLPRRS
DPRMYSLAQSSTMPRRS

SEQ ID NO: 64891 - protein, 17 aa, Artificial Sequence
  Description of Artificial Sequence: Synthetic peptide
  Seed: DPRMCSLMQGSTLPRRS
DPRMYSLAQSSTNPRRS

SEQ ID NO: 64892 - protein, 17 aa, Artificial Sequence
  Description of Artificial Sequence: Synthetic peptide
  Seed: DPRMCSLMQGSTLPRRS
DPRMYSLAQSSTSPRRS

SEQ ID NO: 64893 - protein, 17 aa, Artificial Sequence
  Description of Artificial Sequence: Synthetic peptide
  Seed: DPRMCSLMQGSTLPRRS
DPRMYSLAQSSTTPRRS

SEQ ID NO: 64894 - protein, 17 aa, Artificial Sequence
  Description of Artificial Sequence: Synthetic peptide
  Seed: DPRMCSLMQGSTLPRRS
DPRMYSLAQSSTVPRRS

SEQ ID NO: 64895 - protein, 17 aa, Artificial Sequence
  Description of Artificial Sequence: Synthetic peptide
  Seed: DPRMCSLMQGSTLPRRS
DPRMYSLAQTSTAPRRS

SEQ ID NO: 64896 - protein, 17 aa, Artificial Sequence
  Description of Artificial Sequence: Synthetic peptide
  Seed: DPRMCSLMQGSTLPRRS
DPRMYSLAQTSTIPRRS

SEQ ID NO: 64897 - protein, 17 aa, Artificial Sequence
  Description of Artificial Sequence: Synthetic peptide
  Seed: DPRMCSLMQGSTLPRRS
DPRMYSLAQTSTLPRRS

SEQ ID NO: 64898 - protein, 17 aa, Artificial Sequence
  Description of Artificial Sequence: Synthetic peptide
  Seed: DPRMCSLMQGSTLPRRS
DPRMYSLAQTSTMPRRS

SEQ ID NO: 64899 - protein, 17 aa, Artificial Sequence
  Description of Artificial Sequence: Synthetic peptide
  Seed: DPRMCSLMQGSTLPRRS
DPRMYSLAQTSTNPRRS

SEQ ID NO: 64900 - protein, 17 aa, Artificial Sequence
  Description of Artificial Sequence: Synthetic peptide
  Seed: DPRMCSLMQGSTLPRRS
DPRMYSLAQTSTSPRRS

SEQ ID NO: 64901 - protein, 17 aa, Artificial Sequence
  Description of Artificial Sequence: Synthetic peptide
  Seed: DPRMCSLMQGSTLPRRS
DPRMYSLAQTSTTPRRS

SEQ ID NO: 64902 - protein, 17 aa, Artificial Sequence
  Description of Artificial Sequence: Synthetic peptide
  Seed: DPRMCSLMQGSTLPRRS
DPRMYSLAQTSTVPRRS

SEQ ID NO: 64903 - protein, 17 aa, Artificial Sequence
  Description of Artificial Sequence: Synthetic peptide
  Seed: DPRMCSLMQGSTLPRRS
DPRMYSLAQVSTAPRRS

SEQ ID NO: 64904 - protein, 17 aa, Artificial Sequence
  Description of Artificial Sequence: Synthetic peptide
  Seed: DPRMCSLMQGSTLPRRS
DPRMYSLAQVSTIPRRS

SEQ ID NO: 64905 - protein, 17 aa, Artificial Sequence
  Description of Artificial Sequence: Synthetic peptide
  Seed: DPRMCSLMQGSTLPRRS
DPRMYSLAQVSTLPRRS

SEQ ID NO: 64906 - protein, 17 aa, Artificial Sequence
  Description of Artificial Sequence: Synthetic peptide
  Seed: DPRMCSLMQGSTLPRRS
DPRMYSLAQVSTMPRRS

SEQ ID NO: 64907 - protein, 17 aa, Artificial Sequence
  Description of Artificial Sequence: Synthetic peptide
  Seed: DPRMCSLMQGSTLPRRS
DPRMYSLAQVSTNPRRS

SEQ ID NO: 64908 - protein, 17 aa, Artificial Sequence
  Description of Artificial Sequence: Synthetic peptide
  Seed: DPRMCSLMQGSTLPRRS
DPRMYSLAQVSTSPRRS

SEQ ID NO: 64909 - protein, 17 aa, Artificial Sequence
  Description of Artificial Sequence: Synthetic peptide
  Seed: DPRMCSLMQGSTLPRRS
DPRMYSLAQVSTTPRRS

SEQ ID NO: 64910 - protein, 17 aa, Artificial Sequence
  Description of Artificial Sequence: Synthetic peptide
  Seed: DPRMCSLMQGSTLPRRS
DPRMYSLAQVSTVPRRS

SEQ ID NO: 64911 - protein, 17 aa, Artificial Sequence
  Description of Artificial Sequence: Synthetic peptide
  Seed: DPRMCSLMQGSTLPRRS
DPRMYSLEQASTAPRRS

SEQ ID NO: 64912 - protein, 17 aa, Artificial Sequence
  Description of Artificial Sequence: Synthetic peptide
  Seed: DPRMCSLMQGSTLPRRS
DPRMYSLEQASTIPRRS

SEQ ID NO: 64913 - protein, 17 aa, Artificial Sequence
  Description of Artificial Sequence: Synthetic peptide
  Seed: DPRMCSLMQGSTLPRRS
DPRMYSLEQASTLPRRS

SEQ ID NO: 64914 - protein, 17 aa, Artificial Sequence
  Description of Artificial Sequence: Synthetic peptide
  Seed: DPRMCSLMQGSTLPRRS
DPRMYSLEQASTVPRRS

SEQ ID NO: 64915 - protein, 17 aa, Artificial Sequence
  Description of Artificial Sequence: Synthetic peptide
  Seed: DPRMCSLMQGSTLPRRS
DPRMYSLEQGSTLPRRS

SEQ ID NO: 64916 - protein, 17 aa, Artificial Sequence
  Description of Artificial Sequence: Synthetic peptide
  Seed: DPRMCSLMQGSTLPRRS
DPRMYSLEQGSTVPRRS

SEQ ID NO: 64917 - protein, 17 aa, Artificial Sequence
  Description of Artificial Sequence: Synthetic peptide
  Seed: DPRMCSLMQGSTLPRRS
DPRMYSLEQSSTLPRRS

SEQ ID NO: 64918 - protein, 17 aa, Artificial Sequence
  Description of Artificial Sequence: Synthetic peptide
  Seed: DPRMCSLMQGSTLPRRS
DPRMYSLEQSSTVPRRS

SEQ ID NO: 64919 - protein, 17 aa, Artificial Sequence
  Description of Artificial Sequence: Synthetic peptide
  Seed: DPRMCSLMQGSTLPRRS
DPRMYSLFQASTAPRRS

SEQ ID NO: 64920 - protein, 17 aa, Artificial Sequence
  Description of Artificial Sequence: Synthetic peptide
  Seed: DPRMCSLMQGSTLPRRS
DPRMYSLFQASTIPRRS

SEQ ID NO: 64921 - protein, 17 aa, Artificial Sequence
  Description of Artificial Sequence: Synthetic peptide
  Seed: DPRMCSLMQGSTLPRRS
DPRMYSLFQASTLPRRS

SEQ ID NO: 64922 - protein, 17 aa, Artificial Sequence
  Description of Artificial Sequence: Synthetic peptide
  Seed: DPRMCSLMQGSTLPRRS
DPRMYSLFQASTMPRRS

SEQ ID NO: 64923 - protein, 17 aa, Artificial Sequence
  Description of Artificial Sequence: Synthetic peptide
  Seed: DPRMCSLMQGSTLPRRS
DPRMYSLFQASTNPRRS

SEQ ID NO: 64924 - protein, 17 aa, Artificial Sequence
  Description of Artificial Sequence: Synthetic peptide
  Seed: DPRMCSLMQGSTLPRRS
DPRMYSLFQASTSPRRS

SEQ ID NO: 64925 - protein, 17 aa, Artificial Sequence
  Description of Artificial Sequence: Synthetic peptide
  Seed: DPRMCSLMQGSTLPRRS
DPRMYSLFQASTTPRRS

SEQ ID NO: 64926 - protein, 17 aa, Artificial Sequence
  Description of Artificial Sequence: Synthetic peptide
  Seed: DPRMCSLMQGSTLPRRS
DPRMYSLFQASTVPRRS

SEQ ID NO: 64927 - protein, 17 aa, Artificial Sequence
  Description of Artificial Sequence: Synthetic peptide
  Seed: DPRMCSLMQGSTLPRRS
DPRMYSLFQGSTAPRRS

SEQ ID NO: 64928 - protein, 17 aa, Artificial Sequence
  Description of Artificial Sequence: Synthetic peptide
  Seed: DPRMCSLMQGSTLPRRS
DPRMYSLFQGSTIPRRS

SEQ ID NO: 64929 - protein, 17 aa, Artificial Sequence
  Description of Artificial Sequence: Synthetic peptide
  Seed: DPRMCSLMQGSTLPRRS
DPRMYSLFQGSTLPRRS

SEQ ID NO: 64930 - protein, 17 aa, Artificial Sequence
  Description of Artificial Sequence: Synthetic peptide
  Seed: DPRMCSLMQGSTLPRRS
DPRMYSLFQGSTVPRRS

SEQ ID NO: 64931 - protein, 17 aa, Artificial Sequence
  Description of Artificial Sequence: Synthetic peptide
  Seed: DPRMCSLMQGSTLPRRS
DPRMYSLFQISTAPRRS

SEQ ID NO: 64932 - protein, 17 aa, Artificial Sequence
  Description of Artificial Sequence: Synthetic peptide
  Seed: DPRMCSLMQGSTLPRRS
DPRMYSLFQMSTAPRRS

SEQ ID NO: 64933 - protein, 17 aa, Artificial Sequence
  Description of Artificial Sequence: Synthetic peptide
  Seed: DPRMCSLMQGSTLPRRS
DPRMYSLFQPSTAPRRS

SEQ ID NO: 64934 - protein, 17 aa, Artificial Sequence
  Description of Artificial Sequence: Synthetic peptide
  Seed: DPRMCSLMQGSTLPRRS
DPRMYSLFQPSTLPRRS

SEQ ID NO: 64935 - protein, 17 aa, Artificial Sequence
  Description of Artificial Sequence: Synthetic peptide
  Seed: DPRMCSLMQGSTLPRRS
DPRMYSLFQPSTSPRRS

SEQ ID NO: 64936 - protein, 17 aa, Artificial Sequence
  Description of Artificial Sequence: Synthetic peptide
  Seed: DPRMCSLMQGSTLPRRS
DPRMYSLFQPSTVPRRS

SEQ ID NO: 64937 - protein, 17 aa, Artificial Sequence
  Description of Artificial Sequence: Synthetic peptide
  Seed: DPRMCSLMQGSTLPRRS
DPRMYSLFQSSTAPRRS

SEQ ID NO: 64938 - protein, 17 aa, Artificial Sequence
  Description of Artificial Sequence: Synthetic peptide
  Seed: DPRMCSLMQGSTLPRRS
DPRMYSLFQSSTLPRRS

SEQ ID NO: 64939 - protein, 17 aa, Artificial Sequence
  Description of Artificial Sequence: Synthetic peptide
  Seed: DPRMCSLMQGSTLPRRS
DPRMYSLFQSSTVPRRS

SEQ ID NO: 64940 - protein, 17 aa, Artificial Sequence
  Description of Artificial Sequence: Synthetic peptide
  Seed: DPRMCSLMQGSTLPRRS
DPRMYSLFQTSTAPRRS

SEQ ID NO: 64941 - protein, 17 aa, Artificial Sequence
  Description of Artificial Sequence: Synthetic peptide
  Seed: DPRMCSLMQGSTLPRRS
DPRMYSLFQVSTAPRRS

SEQ ID NO: 64942 - protein, 17 aa, Artificial Sequence
  Description of Artificial Sequence: Synthetic peptide
  Seed: DPRMCSLMQGSTLPRRS
DPRMYSLFQVSTSPRRS

SEQ ID NO: 64943 - protein, 17 aa, Artificial Sequence
  Description of Artificial Sequence: Synthetic peptide
  Seed: DPRMCSLMQGSTLPRRS
DPRMYSLGQASTIPRRS

SEQ ID NO: 64944 - protein, 17 aa, Artificial Sequence
  Description of Artificial Sequence: Synthetic peptide
  Seed: DPRMCSLMQGSTLPRRS
DPRMYSLGQASTLPRRS

SEQ ID NO: 64945 - protein, 17 aa, Artificial Sequence
  Description of Artificial Sequence: Synthetic peptide
  Seed: DPRMCSLMQGSTLPRRS
DPRMYSLGQASTVPRRS

SEQ ID NO: 64946 - protein, 17 aa, Artificial Sequence
  Description of Artificial Sequence: Synthetic peptide
  Seed: DPRMCSLMQGSTLPRRS
DPRMYSLGQGSTLPRRS

SEQ ID NO: 64947 - protein, 17 aa, Artificial Sequence
  Description of Artificial Sequence: Synthetic peptide
  Seed: DPRMCSLMQGSTLPRRS
DPRMYSLGQSSTIPRRS

SEQ ID NO: 64948 - protein, 17 aa, Artificial Sequence
  Description of Artificial Sequence: Synthetic peptide
  Seed: DPRMCSLMQGSTLPRRS
DPRMYSLGQSSTLPRRS

SEQ ID NO: 64949 - protein, 17 aa, Artificial Sequence
  Description of Artificial Sequence: Synthetic peptide
  Seed: DPRMCSLMQGSTLPRRS
DPRMYSLIQASTAPRRS

SEQ ID NO: 64950 - protein, 17 aa, Artificial Sequence
  Description of Artificial Sequence: Synthetic peptide
  Seed: DPRMCSLMQGSTLPRRS
DPRMYSLIQASTCPRRS

SEQ ID NO: 64951 - protein, 17 aa, Artificial Sequence
  Description of Artificial Sequence: Synthetic peptide
  Seed: DPRMCSLMQGSTLPRRS
DPRMYSLIQASTFPRRS

SEQ ID NO: 64952 - protein, 17 aa, Artificial Sequence
  Description of Artificial Sequence: Synthetic peptide
  Seed: DPRMCSLMQGSTLPRRS
DPRMYSLIQASTGPRRS

SEQ ID NO: 64953 - protein, 17 aa, Artificial Sequence
  Description of Artificial Sequence: Synthetic peptide
  Seed: DPRMCSLMQGSTLPRRS
DPRMYSLIQASTHPRRS

SEQ ID NO: 64954 - protein, 17 aa, Artificial Sequence
  Description of Artificial Sequence: Synthetic peptide
  Seed: DPRMCSLMQGSTLPRRS
DPRMYSLIQASTIPRRS

SEQ ID NO: 64955 - protein, 17 aa, Artificial Sequence
  Description of Artificial Sequence: Synthetic peptide
  Seed: DPRMCSLMQGSTLPRRS
DPRMYSLIQASTLPRRS

SEQ ID NO: 64956 - protein, 17 aa, Artificial Sequence
  Description of Artificial Sequence: Synthetic peptide
  Seed: DPRMCSLMQGSTLPRRS
DPRMYSLIQASTMPRRS

SEQ ID NO: 64957 - protein, 17 aa, Artificial Sequence
  Description of Artificial Sequence: Synthetic peptide
  Seed: DPRMCSLMQGSTLPRRS
DPRMYSLIQASTNPRRS

SEQ ID NO: 64958 - protein, 17 aa, Artificial Sequence
  Description of Artificial Sequence: Synthetic peptide
  Seed: DPRMCSLMQGSTLPRRS
DPRMYSLIQASTPPRRS

SEQ ID NO: 64959 - protein, 17 aa, Artificial Sequence
  Description of Artificial Sequence: Synthetic peptide
  Seed: DPRMCSLMQGSTLPRRS
DPRMYSLIQASTQPRRS

SEQ ID NO: 64960 - protein, 17 aa, Artificial Sequence
  Description of Artificial Sequence: Synthetic peptide
  Seed: DPRMCSLMQGSTLPRRS
DPRMYSLIQASTSPRRS

SEQ ID NO: 64961 - protein, 17 aa, Artificial Sequence
  Description of Artificial Sequence: Synthetic peptide
  Seed: DPRMCSLMQGSTLPRRS
DPRMYSLIQASTTPRRS

SEQ ID NO: 64962 - protein, 17 aa, Artificial Sequence
  Description of Artificial Sequence: Synthetic peptide
  Seed: DPRMCSLMQGSTLPRRS
DPRMYSLIQASTVPRRS

SEQ ID NO: 64963 - protein, 17 aa, Artificial Sequence
  Description of Artificial Sequence: Synthetic peptide
  Seed: DPRMCSLMQGSTLPRRS
DPRMYSLIQGSTAPRRS

SEQ ID NO: 64964 - protein, 17 aa, Artificial Sequence
  Description of Artificial Sequence: Synthetic peptide
  Seed: DPRMCSLMQGSTLPRRS
DPRMYSLIQGSTCPRRS

SEQ ID NO: 64965 - protein, 17 aa, Artificial Sequence
  Description of Artificial Sequence: Synthetic peptide
  Seed: DPRMCSLMQGSTLPRRS
DPRMYSLIQGSTGPRRS

SEQ ID NO: 64966 - protein, 17 aa, Artificial Sequence
  Description of Artificial Sequence: Synthetic peptide
  Seed: DPRMCSLMQGSTLPRRS
DPRMYSLIQGSTIPRRS

SEQ ID NO: 64967 - protein, 17 aa, Artificial Sequence
  Description of Artificial Sequence: Synthetic peptide
  Seed: DPRMCSLMQGSTLPRRS
DPRMYSLIQGSTLPRRS

SEQ ID NO: 64968 - protein, 17 aa, Artificial Sequence
  Description of Artificial Sequence: Synthetic peptide
  Seed: DPRMCSLMQGSTLPRRS
DPRMYSLIQGSTMPRRS

SEQ ID NO: 64969 - protein, 17 aa, Artificial Sequence
  Description of Artificial Sequence: Synthetic peptide
  Seed: DPRMCSLMQGSTLPRRS
DPRMYSLIQGSTNPRRS

SEQ ID NO: 64970 - protein, 17 aa, Artificial Sequence
  Description of Artificial Sequence: Synthetic peptide
  Seed: DPRMCSLMQGSTLPRRS
DPRMYSLIQGSTSPRRS

SEQ ID NO: 64971 - protein, 17 aa, Artificial Sequence
  Description of Artificial Sequence: Synthetic peptide
  Seed: DPRMCSLMQGSTLPRRS
DPRMYSLIQGSTTPRRS

SEQ ID NO: 64972 - protein, 17 aa, Artificial Sequence
  Description of Artificial Sequence: Synthetic peptide
  Seed: DPRMCSLMQGSTLPRRS
DPRMYSLIQGSTVPRRS

SEQ ID NO: 64973 - protein, 17 aa, Artificial Sequence
  Description of Artificial Sequence: Synthetic peptide
  Seed: DPRMCSLMQGSTLPRRS
DPRMYSLIQISTAPRRS

SEQ ID NO: 64974 - protein, 17 aa, Artificial Sequence
  Description of Artificial Sequence: Synthetic peptide
  Seed: DPRMCSLMQGSTLPRRS
DPRMYSLIQISTGPRRS

SEQ ID NO: 64975 - protein, 17 aa, Artificial Sequence
  Description of Artificial Sequence: Synthetic peptide
  Seed: DPRMCSLMQGSTLPRRS
DPRMYSLIQISTHPRRS

SEQ ID NO: 64976 - protein, 17 aa, Artificial Sequence
  Description of Artificial Sequence: Synthetic peptide
  Seed: DPRMCSLMQGSTLPRRS
DPRMYSLIQISTIPRRS

SEQ ID NO: 64977 - protein, 17 aa, Artificial Sequence
  Description of Artificial Sequence: Synthetic peptide
  Seed: DPRMCSLMQGSTLPRRS
DPRMYSLIQISTLPRRS

SEQ ID NO: 64978 - protein, 17 aa, Artificial Sequence
  Description of Artificial Sequence: Synthetic peptide
  Seed: DPRMCSLMQGSTLPRRS
DPRMYSLIQISTMPRRS

SEQ ID NO: 64979 - protein, 17 aa, Artificial Sequence
  Description of Artificial Sequence: Synthetic peptide
  Seed: DPRMCSLMQGSTLPRRS
DPRMYSLIQISTNPRRS

SEQ ID NO: 64980 - protein, 17 aa, Artificial Sequence
  Description of Artificial Sequence: Synthetic peptide
  Seed: DPRMCSLMQGSTLPRRS
DPRMYSLIQISTSPRRS

SEQ ID NO: 64981 - protein, 17 aa, Artificial Sequence
  Description of Artificial Sequence: Synthetic peptide
  Seed: DPRMCSLMQGSTLPRRS
DPRMYSLIQISTTPRRS

SEQ ID NO: 64982 - protein, 17 aa, Artificial Sequence
  Description of Artificial Sequence: Synthetic peptide
  Seed: DPRMCSLMQGSTLPRRS
DPRMYSLIQISTVPRRS

SEQ ID NO: 64983 - protein, 17 aa, Artificial Sequence
  Description of Artificial Sequence: Synthetic peptide
  Seed: DPRMCSLMQGSTLPRRS
DPRMYSLIQLSTAPRRS

SEQ ID NO: 64984 - protein, 17 aa, Artificial Sequence
  Description of Artificial Sequence: Synthetic peptide
  Seed: DPRMCSLMQGSTLPRRS
DPRMYSLIQLSTLPRRS

SEQ ID NO: 64985 - protein, 17 aa, Artificial Sequence
  Description of Artificial Sequence: Synthetic peptide
  Seed: DPRMCSLMQGSTLPRRS
DPRMYSLIQLSTMPRRS

SEQ ID NO: 64986 - protein, 17 aa, Artificial Sequence
  Description of Artificial Sequence: Synthetic peptide
  Seed: DPRMCSLMQGSTLPRRS
DPRMYSLIQLSTNPRRS

SEQ ID NO: 64987 - protein, 17 aa, Artificial Sequence
  Description of Artificial Sequence: Synthetic peptide
  Seed: DPRMCSLMQGSTLPRRS
DPRMYSLIQLSTSPRRS

SEQ ID NO: 64988 - protein, 17 aa, Artificial Sequence
  Description of Artificial Sequence: Synthetic peptide
  Seed: DPRMCSLMQGSTLPRRS
DPRMYSLIQLSTTPRRS

SEQ ID NO: 64989 - protein, 17 aa, Artificial Sequence
  Description of Artificial Sequence: Synthetic peptide
  Seed: DPRMCSLMQGSTLPRRS
DPRMYSLIQLSTVPRRS

SEQ ID NO: 64990 - protein, 17 aa, Artificial Sequence
  Description of Artificial Sequence: Synthetic peptide
  Seed: DPRMCSLMQGSTLPRRS
DPRMYSLIQMSTAPRRS

SEQ ID NO: 64991 - protein, 17 aa, Artificial Sequence
  Description of Artificial Sequence: Synthetic peptide
  Seed: DPRMCSLMQGSTLPRRS
DPRMYSLIQMSTIPRRS

SEQ ID NO: 64992 - protein, 17 aa, Artificial Sequence
  Description of Artificial Sequence: Synthetic peptide
  Seed: DPRMCSLMQGSTLPRRS
DPRMYSLIQMSTLPRRS

SEQ ID NO: 64993 - protein, 17 aa, Artificial Sequence
  Description of Artificial Sequence: Synthetic peptide
  Seed: DPRMCSLMQGSTLPRRS
DPRMYSLIQMSTMPRRS

SEQ ID NO: 64994 - protein, 17 aa, Artificial Sequence
  Description of Artificial Sequence: Synthetic peptide
  Seed: DPRMCSLMQGSTLPRRS
DPRMYSLIQMSTNPRRS

SEQ ID NO: 64995 - protein, 17 aa, Artificial Sequence
  Description of Artificial Sequence: Synthetic peptide
  Seed: DPRMCSLMQGSTLPRRS
DPRMYSLIQMSTSPRRS

SEQ ID NO: 64996 - protein, 17 aa, Artificial Sequence
  Description of Artificial Sequence: Synthetic peptide
  Seed: DPRMCSLMQGSTLPRRS
DPRMYSLIQMSTTPRRS

SEQ ID NO: 64997 - protein, 17 aa, Artificial Sequence
  Description of Artificial Sequence: Synthetic peptide
  Seed: DPRMCSLMQGSTLPRRS
DPRMYSLIQMSTVPRRS

SEQ ID NO: 64998 - protein, 17 aa, Artificial Sequence
  Description of Artificial Sequence: Synthetic peptide
  Seed: DPRMCSLMQGSTLPRRS
DPRMYSLIQNSTAPRRS

SEQ ID NO: 64999 - protein, 17 aa, Artificial Sequence
  Description of Artificial Sequence: Synthetic peptide
  Seed: DPRMCSLMQGSTLPRRS
DPRMYSLIQNSTIPRRS

SEQ ID NO: 65000 - protein, 17 aa, Artificial Sequence
  Description of Artificial Sequence: Synthetic peptide
  Seed: DPRMCSLMQGSTLPRRS
DPRMYSLIQNSTLPRRS

SEQ ID NO: 65001 - protein, 17 aa, Artificial Sequence
  Description of Artificial Sequence: Synthetic peptide
  Seed: DPRMCSLMQGSTLPRRS
DPRMYSLIQNSTMPRRS

SEQ ID NO: 65002 - protein, 17 aa, Artificial Sequence
  Description of Artificial Sequence: Synthetic peptide
  Seed: DPRMCSLMQGSTLPRRS
DPRMYSLIQNSTNPRRS

SEQ ID NO: 65003 - protein, 17 aa, Artificial Sequence
  Description of Artificial Sequence: Synthetic peptide
  Seed: DPRMCSLMQGSTLPRRS
DPRMYSLIQNSTSPRRS

SEQ ID NO: 65004 - protein, 17 aa, Artificial Sequence
  Description of Artificial Sequence: Synthetic peptide
  Seed: DPRMCSLMQGSTLPRRS
DPRMYSLIQNSTTPRRS

SEQ ID NO: 65005 - protein, 17 aa, Artificial Sequence
  Description of Artificial Sequence: Synthetic peptide
  Seed: DPRMCSLMQGSTLPRRS
DPRMYSLIQNSTVPRRS

SEQ ID NO: 65006 - protein, 17 aa, Artificial Sequence
  Description of Artificial Sequence: Synthetic peptide
  Seed: DPRMCSLMQGSTLPRRS
DPRMYSLIQPSTAPRRS

SEQ ID NO: 65007 - protein, 17 aa, Artificial Sequence
  Description of Artificial Sequence: Synthetic peptide
  Seed: DPRMCSLMQGSTLPRRS
DPRMYSLIQPSTGPRRS

SEQ ID NO: 65008 - protein, 17 aa, Artificial Sequence
  Description of Artificial Sequence: Synthetic peptide
  Seed: DPRMCSLMQGSTLPRRS
DPRMYSLIQPSTHPRRS

SEQ ID NO: 65009 - protein, 17 aa, Artificial Sequence
  Description of Artificial Sequence: Synthetic peptide
  Seed: DPRMCSLMQGSTLPRRS
DPRMYSLIQPSTIPRRS

SEQ ID NO: 65010 - protein, 17 aa, Artificial Sequence
  Description of Artificial Sequence: Synthetic peptide
  Seed: DPRMCSLMQGSTLPRRS
DPRMYSLIQPSTLPRRS

SEQ ID NO: 65011 - protein, 17 aa, Artificial Sequence
  Description of Artificial Sequence: Synthetic peptide
  Seed: DPRMCSLMQGSTLPRRS
DPRMYSLIQPSTMPRRS

SEQ ID NO: 65012 - protein, 17 aa, Artificial Sequence
  Description of Artificial Sequence: Synthetic peptide
  Seed: DPRMCSLMQGSTLPRRS
DPRMYSLIQPSTNPRRS

SEQ ID NO: 65013 - protein, 17 aa, Artificial Sequence
  Description of Artificial Sequence: Synthetic peptide
  Seed: DPRMCSLMQGSTLPRRS
DPRMYSLIQPSTPPRRS

SEQ ID NO: 65014 - protein, 17 aa, Artificial Sequence
  Description of Artificial Sequence: Synthetic peptide
  Seed: DPRMCSLMQGSTLPRRS
DPRMYSLIQPSTQPRRS

SEQ ID NO: 65015 - protein, 17 aa, Artificial Sequence
  Description of Artificial Sequence: Synthetic peptide
  Seed: DPRMCSLMQGSTLPRRS
DPRMYSLIQPSTSPRRS

SEQ ID NO: 65016 - protein, 17 aa, Artificial Sequence
  Description of Artificial Sequence: Synthetic peptide
  Seed: DPRMCSLMQGSTLPRRS
DPRMYSLIQPSTTPRRS

SEQ ID NO: 65017 - protein, 17 aa, Artificial Sequence
  Description of Artificial Sequence: Synthetic peptide
  Seed: DPRMCSLMQGSTLPRRS
DPRMYSLIQPSTVPRRS

SEQ ID NO: 65018 - protein, 17 aa, Artificial Sequence
  Description of Artificial Sequence: Synthetic peptide
  Seed: DPRMCSLMQGSTLPRRS
DPRMYSLIQSSTAPRRS

SEQ ID NO: 65019 - protein, 17 aa, Artificial Sequence
  Description of Artificial Sequence: Synthetic peptide
  Seed: DPRMCSLMQGSTLPRRS
DPRMYSLIQSSTGPRRS

SEQ ID NO: 65020 - protein, 17 aa, Artificial Sequence
  Description of Artificial Sequence: Synthetic peptide
  Seed: DPRMCSLMQGSTLPRRS
DPRMYSLIQSSTHPRRS

SEQ ID NO: 65021 - protein, 17 aa, Artificial Sequence
  Description of Artificial Sequence: Synthetic peptide
  Seed: DPRMCSLMQGSTLPRRS
DPRMYSLIQSSTIPRRS

SEQ ID NO: 65022 - protein, 17 aa, Artificial Sequence
  Description of Artificial Sequence: Synthetic peptide
  Seed: DPRMCSLMQGSTLPRRS
DPRMYSLIQSSTLPRRS

SEQ ID NO: 65023 - protein, 17 aa, Artificial Sequence
  Description of Artificial Sequence: Synthetic peptide
  Seed: DPRMCSLMQGSTLPRRS
DPRMYSLIQSSTMPRRS

SEQ ID NO: 65024 - protein, 17 aa, Artificial Sequence
  Description of Artificial Sequence: Synthetic peptide
  Seed: DPRMCSLMQGSTLPRRS
DPRMYSLIQSSTNPRRS

SEQ ID NO: 65025 - protein, 17 aa, Artificial Sequence
  Description of Artificial Sequence: Synthetic peptide
  Seed: DPRMCSLMQGSTLPRRS
DPRMYSLIQSSTSPRRS

SEQ ID NO: 65026 - protein, 17 aa, Artificial Sequence
  Description of Artificial Sequence: Synthetic peptide
  Seed: DPRMCSLMQGSTLPRRS
DPRMYSLIQSSTTPRRS

SEQ ID NO: 65027 - protein, 17 aa, Artificial Sequence
  Description of Artificial Sequence: Synthetic peptide
  Seed: DPRMCSLMQGSTLPRRS
DPRMYSLIQSSTVPRRS

SEQ ID NO: 65028 - protein, 17 aa, Artificial Sequence
  Description of Artificial Sequence: Synthetic peptide
  Seed: DPRMCSLMQGSTLPRRS
DPRMYSLIQTSTAPRRS

SEQ ID NO: 65029 - protein, 17 aa, Artificial Sequence
  Description of Artificial Sequence: Synthetic peptide
  Seed: DPRMCSLMQGSTLPRRS
DPRMYSLIQTSTGPRRS

SEQ ID NO: 65030 - protein, 17 aa, Artificial Sequence
  Description of Artificial Sequence: Synthetic peptide
  Seed: DPRMCSLMQGSTLPRRS
DPRMYSLIQTSTHPRRS

SEQ ID NO: 65031 - protein, 17 aa, Artificial Sequence
  Description of Artificial Sequence: Synthetic peptide
  Seed: DPRMCSLMQGSTLPRRS
DPRMYSLIQTSTIPRRS

SEQ ID NO: 65032 - protein, 17 aa, Artificial Sequence
  Description of Artificial Sequence: Synthetic peptide
  Seed: DPRMCSLMQGSTLPRRS
DPRMYSLIQTSTLPRRS

SEQ ID NO: 65033 - protein, 17 aa, Artificial Sequence
  Description of Artificial Sequence: Synthetic peptide
  Seed: DPRMCSLMQGSTLPRRS
DPRMYSLIQTSTMPRRS

SEQ ID NO: 65034 - protein, 17 aa, Artificial Sequence
  Description of Artificial Sequence: Synthetic peptide
  Seed: DPRMCSLMQGSTLPRRS
DPRMYSLIQTSTNPRRS

SEQ ID NO: 65035 - protein, 17 aa, Artificial Sequence
  Description of Artificial Sequence: Synthetic peptide
  Seed: DPRMCSLMQGSTLPRRS
DPRMYSLIQTSTSPRRS

SEQ ID NO: 65036 - protein, 17 aa, Artificial Sequence
  Description of Artificial Sequence: Synthetic peptide
  Seed: DPRMCSLMQGSTLPRRS
DPRMYSLIQTSTTPRRS

SEQ ID NO: 65037 - protein, 17 aa, Artificial Sequence
  Description of Artificial Sequence: Synthetic peptide
  Seed: DPRMCSLMQGSTLPRRS
DPRMYSLIQTSTVPRRS

SEQ ID NO: 65038 - protein, 17 aa, Artificial Sequence
  Description of Artificial Sequence: Synthetic peptide
  Seed: DPRMCSLMQGSTLPRRS
DPRMYSLIQVSTAPRRS

SEQ ID NO: 65039 - protein, 17 aa, Artificial Sequence
  Description of Artificial Sequence: Synthetic peptide
  Seed: DPRMCSLMQGSTLPRRS
DPRMYSLIQVSTGPRRS

SEQ ID NO: 65040 - protein, 17 aa, Artificial Sequence
  Description of Artificial Sequence: Synthetic peptide
  Seed: DPRMCSLMQGSTLPRRS
DPRMYSLIQVSTHPRRS

SEQ ID NO: 65041 - protein, 17 aa, Artificial Sequence
  Description of Artificial Sequence: Synthetic peptide
  Seed: DPRMCSLMQGSTLPRRS
DPRMYSLIQVSTIPRRS

SEQ ID NO: 65042 - protein, 17 aa, Artificial Sequence
  Description of Artificial Sequence: Synthetic peptide
  Seed: DPRMCSLMQGSTLPRRS
DPRMYSLIQVSTLPRRS

SEQ ID NO: 65043 - protein, 17 aa, Artificial Sequence
  Description of Artificial Sequence: Synthetic peptide
  Seed: DPRMCSLMQGSTLPRRS
DPRMYSLIQVSTMPRRS

SEQ ID NO: 65044 - protein, 17 aa, Artificial Sequence
  Description of Artificial Sequence: Synthetic peptide
  Seed: DPRMCSLMQGSTLPRRS
DPRMYSLIQVSTNPRRS

SEQ ID NO: 65045 - protein, 17 aa, Artificial Sequence
  Description of Artificial Sequence: Synthetic peptide
  Seed: DPRMCSLMQGSTLPRRS
DPRMYSLIQVSTQPRRS

SEQ ID NO: 65046 - protein, 17 aa, Artificial Sequence
  Description of Artificial Sequence: Synthetic peptide
  Seed: DPRMCSLMQGSTLPRRS
DPRMYSLIQVSTSPRRS

SEQ ID NO: 65047 - protein, 17 aa, Artificial Sequence
  Description of Artificial Sequence: Synthetic peptide
  Seed: DPRMCSLMQGSTLPRRS
DPRMYSLIQVSTTPRRS

SEQ ID NO: 65048 - protein, 17 aa, Artificial Sequence
  Description of Artificial Sequence: Synthetic peptide
  Seed: DPRMCSLMQGSTLPRRS
DPRMYSLIQVSTVPRRS

SEQ ID NO: 65049 - protein, 17 aa, Artificial Sequence
  Description of Artificial Sequence: Synthetic peptide
  Seed: DPRMCSLMQGSTLPRRS
DPRMYSLLQASTAPRRS

SEQ ID NO: 65050 - protein, 17 aa, Artificial Sequence
  Description of Artificial Sequence: Synthetic peptide
  Seed: DPRMCSLMQGSTLPRRS
DPRMYSLLQASTCPRRS

SEQ ID NO: 65051 - protein, 17 aa, Artificial Sequence
  Description of Artificial Sequence: Synthetic peptide
  Seed: DPRMCSLMQGSTLPRRS
DPRMYSLLQASTDPRRS

SEQ ID NO: 65052 - protein, 17 aa, Artificial Sequence
  Description of Artificial Sequence: Synthetic peptide
  Seed: DPRMCSLMQGSTLPRRS
DPRMYSLLQASTEPRRS

SEQ ID NO: 65053 - protein, 17 aa, Artificial Sequence
  Description of Artificial Sequence: Synthetic peptide
  Seed: DPRMCSLMQGSTLPRRS
DPRMYSLLQASTFPRRS

SEQ ID NO: 65054 - protein, 17 aa, Artificial Sequence
  Description of Artificial Sequence: Synthetic peptide
  Seed: DPRMCSLMQGSTLPRRS
DPRMYSLLQASTGPRRS

SEQ ID NO: 65055 - protein, 17 aa, Artificial Sequence
  Description of Artificial Sequence: Synthetic peptide
  Seed: DPRMCSLMQGSTLPRRS
DPRMYSLLQASTHPRRS

SEQ ID NO: 65056 - protein, 17 aa, Artificial Sequence
  Description of Artificial Sequence: Synthetic peptide
  Seed: DPRMCSLMQGSTLPRRS
DPRMYSLLQASTIPRRS

SEQ ID NO: 65057 - protein, 17 aa, Artificial Sequence
  Description of Artificial Sequence: Synthetic peptide
  Seed: DPRMCSLMQGSTLPRRS
DPRMYSLLQASTLPRRS

SEQ ID NO: 65058 - protein, 17 aa, Artificial Sequence
  Description of Artificial Sequence: Synthetic peptide
  Seed: DPRMCSLMQGSTLPRRS
DPRMYSLLQASTMPRRS

SEQ ID NO: 65059 - protein, 17 aa, Artificial Sequence
  Description of Artificial Sequence: Synthetic peptide
  Seed: DPRMCSLMQGSTLPRRS
DPRMYSLLQASTNPRRS

SEQ ID NO: 65060 - protein, 17 aa, Artificial Sequence
  Description of Artificial Sequence: Synthetic peptide
  Seed: DPRMCSLMQGSTLPRRS
DPRMYSLLQASTPPRRS

SEQ ID NO: 65061 - protein, 17 aa, Artificial Sequence
  Description of Artificial Sequence: Synthetic peptide
  Seed: DPRMCSLMQGSTLPRRS
DPRMYSLLQASTQPRRS

SEQ ID NO: 65062 - protein, 17 aa, Artificial Sequence
  Description of Artificial Sequence: Synthetic peptide
  Seed: DPRMCSLMQGSTLPRRS
DPRMYSLLQASTSPRRS

SEQ ID NO: 65063 - protein, 17 aa, Artificial Sequence
  Description of Artificial Sequence: Synthetic peptide
  Seed: DPRMCSLMQGSTLPRRS
DPRMYSLLQASTTPRRS

SEQ ID NO: 65064 - protein, 17 aa, Artificial Sequence
  Description of Artificial Sequence: Synthetic peptide
  Seed: DPRMCSLMQGSTLPRRS
DPRMYSLLQASTVPRRS

SEQ ID NO: 65065 - protein, 17 aa, Artificial Sequence
  Description of Artificial Sequence: Synthetic peptide
  Seed: DPRMCSLMQGSTLPRRS
DPRMYSLLQASTWPRRS

SEQ ID NO: 65066 - protein, 17 aa, Artificial Sequence
  Description of Artificial Sequence: Synthetic peptide
  Seed: DPRMCSLMQGSTLPRRS
DPRMYSLLQASTYPRRS

SEQ ID NO: 65067 - protein, 17 aa, Artificial Sequence
  Description of Artificial Sequence: Synthetic peptide
  Seed: DPRMCSLMQGSTLPRRS
DPRMYSLLQGSTAPRRS

SEQ ID NO: 65068 - protein, 17 aa, Artificial Sequence
  Description of Artificial Sequence: Synthetic peptide
  Seed: DPRMCSLMQGSTLPRRS
DPRMYSLLQGSTCPRRS

SEQ ID NO: 65069 - protein, 17 aa, Artificial Sequence
  Description of Artificial Sequence: Synthetic peptide
  Seed: DPRMCSLMQGSTLPRRS
DPRMYSLLQGSTFPRRS

SEQ ID NO: 65070 - protein, 17 aa, Artificial Sequence
  Description of Artificial Sequence: Synthetic peptide
  Seed: DPRMCSLMQGSTLPRRS
DPRMYSLLQGSTGPRRS

SEQ ID NO: 65071 - protein, 17 aa, Artificial Sequence
  Description of Artificial Sequence: Synthetic peptide
  Seed: DPRMCSLMQGSTLPRRS
DPRMYSLLQGSTIPRRS

SEQ ID NO: 65072 - protein, 17 aa, Artificial Sequence
  Description of Artificial Sequence: Synthetic peptide
  Seed: DPRMCSLMQGSTLPRRS
DPRMYSLLQGSTLPRRS

SEQ ID NO: 65073 - protein, 17 aa, Artificial Sequence
  Description of Artificial Sequence: Synthetic peptide
  Seed: DPRMCSLMQGSTLPRRS
DPRMYSLLQGSTMPRRS

SEQ ID NO: 65074 - protein, 17 aa, Artificial Sequence
  Description of Artificial Sequence: Synthetic peptide
  Seed: DPRMCSLMQGSTLPRRS
DPRMYSLLQGSTNPRRS

SEQ ID NO: 65075 - protein, 17 aa, Artificial Sequence
  Description of Artificial Sequence: Synthetic peptide
  Seed: DPRMCSLMQGSTLPRRS
DPRMYSLLQGSTPPRRS

SEQ ID NO: 65076 - protein, 17 aa, Artificial Sequence
  Description of Artificial Sequence: Synthetic peptide
  Seed: DPRMCSLMQGSTLPRRS
DPRMYSLLQGSTSPRRS

SEQ ID NO: 65077 - protein, 17 aa, Artificial Sequence
  Description of Artificial Sequence: Synthetic peptide
  Seed: DPRMCSLMQGSTLPRRS
DPRMYSLLQGSTTPRRS

SEQ ID NO: 65078 - protein, 17 aa, Artificial Sequence
  Description of Artificial Sequence: Synthetic peptide
  Seed: DPRMCSLMQGSTLPRRS
DPRMYSLLQGSTVPRRS

SEQ ID NO: 65079 - protein, 17 aa, Artificial Sequence
  Description of Artificial Sequence: Synthetic peptide
  Seed: DPRMCSLMQGSTLPRRS
DPRMYSLLQISTAPRRS

SEQ ID NO: 65080 - protein, 17 aa, Artificial Sequence
  Description of Artificial Sequence: Synthetic peptide
  Seed: DPRMCSLMQGSTLPRRS
DPRMYSLLQISTGPRRS

SEQ ID NO: 65081 - protein, 17 aa, Artificial Sequence
  Description of Artificial Sequence: Synthetic peptide
  Seed: DPRMCSLMQGSTLPRRS
DPRMYSLLQISTHPRRS

SEQ ID NO: 65082 - protein, 17 aa, Artificial Sequence
  Description of Artificial Sequence: Synthetic peptide
  Seed: DPRMCSLMQGSTLPRRS
DPRMYSLLQISTIPRRS

SEQ ID NO: 65083 - protein, 17 aa, Artificial Sequence
  Description of Artificial Sequence: Synthetic peptide
  Seed: DPRMCSLMQGSTLPRRS
DPRMYSLLQISTLPRRS

SEQ ID NO: 65084 - protein, 17 aa, Artificial Sequence
  Description of Artificial Sequence: Synthetic peptide
  Seed: DPRMCSLMQGSTLPRRS
DPRMYSLLQISTMPRRS

SEQ ID NO: 65085 - protein, 17 aa, Artificial Sequence
  Description of Artificial Sequence: Synthetic peptide
  Seed: DPRMCSLMQGSTLPRRS
DPRMYSLLQISTNPRRS

SEQ ID NO: 65086 - protein, 17 aa, Artificial Sequence
  Description of Artificial Sequence: Synthetic peptide
  Seed: DPRMCSLMQGSTLPRRS
DPRMYSLLQISTPPRRS

SEQ ID NO: 65087 - protein, 17 aa, Artificial Sequence
  Description of Artificial Sequence: Synthetic peptide
  Seed: DPRMCSLMQGSTLPRRS
DPRMYSLLQISTQPRRS

SEQ ID NO: 65088 - protein, 17 aa, Artificial Sequence
  Description of Artificial Sequence: Synthetic peptide
  Seed: DPRMCSLMQGSTLPRRS
DPRMYSLLQISTSPRRS

SEQ ID NO: 65089 - protein, 17 aa, Artificial Sequence
  Description of Artificial Sequence: Synthetic peptide
  Seed: DPRMCSLMQGSTLPRRS
DPRMYSLLQISTTPRRS

SEQ ID NO: 65090 - protein, 17 aa, Artificial Sequence
  Description of Artificial Sequence: Synthetic peptide
  Seed: DPRMCSLMQGSTLPRRS
DPRMYSLLQISTVPRRS

SEQ ID NO: 65091 - protein, 17 aa, Artificial Sequence
  Description of Artificial Sequence: Synthetic peptide
  Seed: DPRMCSLMQGSTLPRRS
DPRMYSLLQLSTAPRRS

SEQ ID NO: 65092 - protein, 17 aa, Artificial Sequence
  Description of Artificial Sequence: Synthetic peptide
  Seed: DPRMCSLMQGSTLPRRS
DPRMYSLLQLSTIPRRS

SEQ ID NO: 65093 - protein, 17 aa, Artificial Sequence
  Description of Artificial Sequence: Synthetic peptide
  Seed: DPRMCSLMQGSTLPRRS
DPRMYSLLQLSTLPRRS

SEQ ID NO: 65094 - protein, 17 aa, Artificial Sequence
  Description of Artificial Sequence: Synthetic peptide
  Seed: DPRMCSLMQGSTLPRRS
DPRMYSLLQLSTMPRRS

SEQ ID NO: 65095 - protein, 17 aa, Artificial Sequence
  Description of Artificial Sequence: Synthetic peptide
  Seed: DPRMCSLMQGSTLPRRS
DPRMYSLLQLSTNPRRS

SEQ ID NO: 65096 - protein, 17 aa, Artificial Sequence
  Description of Artificial Sequence: Synthetic peptide
  Seed: DPRMCSLMQGSTLPRRS
DPRMYSLLQLSTSPRRS

SEQ ID NO: 65097 - protein, 17 aa, Artificial Sequence
  Description of Artificial Sequence: Synthetic peptide
  Seed: DPRMCSLMQGSTLPRRS
DPRMYSLLQLSTTPRRS

SEQ ID NO: 65098 - protein, 17 aa, Artificial Sequence
  Description of Artificial Sequence: Synthetic peptide
  Seed: DPRMCSLMQGSTLPRRS
DPRMYSLLQLSTVPRRS

SEQ ID NO: 65099 - protein, 17 aa, Artificial Sequence
  Description of Artificial Sequence: Synthetic peptide
  Seed: DPRMCSLMQGSTLPRRS
DPRMYSLLQMSTAPRRS

SEQ ID NO: 65100 - protein, 17 aa, Artificial Sequence
  Description of Artificial Sequence: Synthetic peptide
  Seed: DPRMCSLMQGSTLPRRS
DPRMYSLLQMSTIPRRS

SEQ ID NO: 65101 - protein, 17 aa, Artificial Sequence
  Description of Artificial Sequence: Synthetic peptide
  Seed: DPRMCSLMQGSTLPRRS
DPRMYSLLQMSTLPRRS

SEQ ID NO: 65102 - protein, 17 aa, Artificial Sequence
  Description of Artificial Sequence: Synthetic peptide
  Seed: DPRMCSLMQGSTLPRRS
DPRMYSLLQMSTMPRRS

SEQ ID NO: 65103 - protein, 17 aa, Artificial Sequence
  Description of Artificial Sequence: Synthetic peptide
  Seed: DPRMCSLMQGSTLPRRS
DPRMYSLLQMSTNPRRS

SEQ ID NO: 65104 - protein, 17 aa, Artificial Sequence
  Description of Artificial Sequence: Synthetic peptide
  Seed: DPRMCSLMQGSTLPRRS
DPRMYSLLQMSTSPRRS

SEQ ID NO: 65105 - protein, 17 aa, Artificial Sequence
  Description of Artificial Sequence: Synthetic peptide
  Seed: DPRMCSLMQGSTLPRRS
DPRMYSLLQMSTTPRRS

SEQ ID NO: 65106 - protein, 17 aa, Artificial Sequence
  Description of Artificial Sequence: Synthetic peptide
  Seed: DPRMCSLMQGSTLPRRS
DPRMYSLLQMSTVPRRS

SEQ ID NO: 65107 - protein, 17 aa, Artificial Sequence
  Description of Artificial Sequence: Synthetic peptide
  Seed: DPRMCSLMQGSTLPRRS
DPRMYSLLQNSTAPRRS

SEQ ID NO: 65108 - protein, 17 aa, Artificial Sequence
  Description of Artificial Sequence: Synthetic peptide
  Seed: DPRMCSLMQGSTLPRRS
DPRMYSLLQNSTIPRRS

SEQ ID NO: 65109 - protein, 17 aa, Artificial Sequence
  Description of Artificial Sequence: Synthetic peptide
  Seed: DPRMCSLMQGSTLPRRS
DPRMYSLLQNSTLPRRS

SEQ ID NO: 65110 - protein, 17 aa, Artificial Sequence
  Description of Artificial Sequence: Synthetic peptide
  Seed: DPRMCSLMQGSTLPRRS
DPRMYSLLQNSTMPRRS

SEQ ID NO: 65111 - protein, 17 aa, Artificial Sequence
  Description of Artificial Sequence: Synthetic peptide
  Seed: DPRMCSLMQGSTLPRRS
DPRMYSLLQNSTNPRRS

SEQ ID NO: 65112 - protein, 17 aa, Artificial Sequence
  Description of Artificial Sequence: Synthetic peptide
  Seed: DPRMCSLMQGSTLPRRS
DPRMYSLLQNSTSPRRS

SEQ ID NO: 65113 - protein, 17 aa, Artificial Sequence
  Description of Artificial Sequence: Synthetic peptide
  Seed: DPRMCSLMQGSTLPRRS
DPRMYSLLQNSTTPRRS

SEQ ID NO: 65114 - protein, 17 aa, Artificial Sequence
  Description of Artificial Sequence: Synthetic peptide
  Seed: DPRMCSLMQGSTLPRRS
DPRMYSLLQNSTVPRRS

SEQ ID NO: 65115 - protein, 17 aa, Artificial Sequence
  Description of Artificial Sequence: Synthetic peptide
  Seed: DPRMCSLMQGSTLPRRS
DPRMYSLLQPSTAPRRS

SEQ ID NO: 65116 - protein, 17 aa, Artificial Sequence
  Description of Artificial Sequence: Synthetic peptide
  Seed: DPRMCSLMQGSTLPRRS
DPRMYSLLQPSTFPRRS

SEQ ID NO: 65117 - protein, 17 aa, Artificial Sequence
  Description of Artificial Sequence: Synthetic peptide
  Seed: DPRMCSLMQGSTLPRRS
DPRMYSLLQPSTGPRRS

SEQ ID NO: 65118 - protein, 17 aa, Artificial Sequence
  Description of Artificial Sequence: Synthetic peptide
  Seed: DPRMCSLMQGSTLPRRS
DPRMYSLLQPSTHPRRS

SEQ ID NO: 65119 - protein, 17 aa, Artificial Sequence
  Description of Artificial Sequence: Synthetic peptide
  Seed: DPRMCSLMQGSTLPRRS
DPRMYSLLQPSTIPRRS

SEQ ID NO: 65120 - protein, 17 aa, Artificial Sequence
  Description of Artificial Sequence: Synthetic peptide
  Seed: DPRMCSLMQGSTLPRRS
DPRMYSLLQPSTLPRRS

SEQ ID NO: 65121 - protein, 17 aa, Artificial Sequence
  Description of Artificial Sequence: Synthetic peptide
  Seed: DPRMCSLMQGSTLPRRS
DPRMYSLLQPSTMPRRS

SEQ ID NO: 65122 - protein, 17 aa, Artificial Sequence
  Description of Artificial Sequence: Synthetic peptide
  Seed: DPRMCSLMQGSTLPRRS
DPRMYSLLQPSTNPRRS

SEQ ID NO: 65123 - protein, 17 aa, Artificial Sequence
  Description of Artificial Sequence: Synthetic peptide
  Seed: DPRMCSLMQGSTLPRRS
DPRMYSLLQPSTPPRRS

SEQ ID NO: 65124 - protein, 17 aa, Artificial Sequence
  Description of Artificial Sequence: Synthetic peptide
  Seed: DPRMCSLMQGSTLPRRS
DPRMYSLLQPSTQPRRS

SEQ ID NO: 65125 - protein, 17 aa, Artificial Sequence
  Description of Artificial Sequence: Synthetic peptide
  Seed: DPRMCSLMQGSTLPRRS
DPRMYSLLQPSTSPRRS

SEQ ID NO: 65126 - protein, 17 aa, Artificial Sequence
  Description of Artificial Sequence: Synthetic peptide
  Seed: DPRMCSLMQGSTLPRRS
DPRMYSLLQPSTTPRRS

SEQ ID NO: 65127 - protein, 17 aa, Artificial Sequence
  Description of Artificial Sequence: Synthetic peptide
  Seed: DPRMCSLMQGSTLPRRS
DPRMYSLLQPSTVPRRS

SEQ ID NO: 65128 - protein, 17 aa, Artificial Sequence
  Description of Artificial Sequence: Synthetic peptide
  Seed: DPRMCSLMQGSTLPRRS
DPRMYSLLQSSTAPRRS

SEQ ID NO: 65129 - protein, 17 aa, Artificial Sequence
  Description of Artificial Sequence: Synthetic peptide
  Seed: DPRMCSLMQGSTLPRRS
DPRMYSLLQSSTCPRRS

SEQ ID NO: 65130 - protein, 17 aa, Artificial Sequence
  Description of Artificial Sequence: Synthetic peptide
  Seed: DPRMCSLMQGSTLPRRS
DPRMYSLLQSSTFPRRS

SEQ ID NO: 65131 - protein, 17 aa, Artificial Sequence
  Description of Artificial Sequence: Synthetic peptide
  Seed: DPRMCSLMQGSTLPRRS
DPRMYSLLQSSTGPRRS

SEQ ID NO: 65132 - protein, 17 aa, Artificial Sequence
  Description of Artificial Sequence: Synthetic peptide
  Seed: DPRMCSLMQGSTLPRRS
DPRMYSLLQSSTHPRRS

SEQ ID NO: 65133 - protein, 17 aa, Artificial Sequence
  Description of Artificial Sequence: Synthetic peptide
  Seed: DPRMCSLMQGSTLPRRS
DPRMYSLLQSSTIPRRS

SEQ ID NO: 65134 - protein, 17 aa, Artificial Sequence
  Description of Artificial Sequence: Synthetic peptide
  Seed: DPRMCSLMQGSTLPRRS
DPRMYSLLQSSTLPRRS

SEQ ID NO: 65135 - protein, 17 aa, Artificial Sequence
  Description of Artificial Sequence: Synthetic peptide
  Seed: DPRMCSLMQGSTLPRRS
DPRMYSLLQSSTMPRRS

SEQ ID NO: 65136 - protein, 17 aa, Artificial Sequence
  Description of Artificial Sequence: Synthetic peptide
  Seed: DPRMCSLMQGSTLPRRS
DPRMYSLLQSSTNPRRS

SEQ ID NO: 65137 - protein, 17 aa, Artificial Sequence
  Description of Artificial Sequence: Synthetic peptide
  Seed: DPRMCSLMQGSTLPRRS
DPRMYSLLQSSTPPRRS

SEQ ID NO: 65138 - protein, 17 aa, Artificial Sequence
  Description of Artificial Sequence: Synthetic peptide
  Seed: DPRMCSLMQGSTLPRRS
DPRMYSLLQSSTQPRRS

SEQ ID NO: 65139 - protein, 17 aa, Artificial Sequence
  Description of Artificial Sequence: Synthetic peptide
  Seed: DPRMCSLMQGSTLPRRS
DPRMYSLLQSSTSPRRS

SEQ ID NO: 65140 - protein, 17 aa, Artificial Sequence
  Description of Artificial Sequence: Synthetic peptide
  Seed: DPRMCSLMQGSTLPRRS
DPRMYSLLQSSTTPRRS

SEQ ID NO: 65141 - protein, 17 aa, Artificial Sequence
  Description of Artificial Sequence: Synthetic peptide
  Seed: DPRMCSLMQGSTLPRRS
DPRMYSLLQSSTVPRRS

SEQ ID NO: 65142 - protein, 17 aa, Artificial Sequence
  Description of Artificial Sequence: Synthetic peptide
  Seed: DPRMCSLMQGSTLPRRS
DPRMYSLLQTSTAPRRS

SEQ ID NO: 65143 - protein, 17 aa, Artificial Sequence
  Description of Artificial Sequence: Synthetic peptide
  Seed: DPRMCSLMQGSTLPRRS
DPRMYSLLQTSTGPRRS

SEQ ID NO: 65144 - protein, 17 aa, Artificial Sequence
  Description of Artificial Sequence: Synthetic peptide
  Seed: DPRMCSLMQGSTLPRRS
DPRMYSLLQTSTHPRRS

SEQ ID NO: 65145 - protein, 17 aa, Artificial Sequence
  Description of Artificial Sequence: Synthetic peptide
  Seed: DPRMCSLMQGSTLPRRS
DPRMYSLLQTSTIPRRS

SEQ ID NO: 65146 - protein, 17 aa, Artificial Sequence
  Description of Artificial Sequence: Synthetic peptide
  Seed: DPRMCSLMQGSTLPRRS
DPRMYSLLQTSTLPRRS

SEQ ID NO: 65147 - protein, 17 aa, Artificial Sequence
  Description of Artificial Sequence: Synthetic peptide
  Seed: DPRMCSLMQGSTLPRRS
DPRMYSLLQTSTMPRRS

SEQ ID NO: 65148 - protein, 17 aa, Artificial Sequence
  Description of Artificial Sequence: Synthetic peptide
  Seed: DPRMCSLMQGSTLPRRS
DPRMYSLLQTSTNPRRS

SEQ ID NO: 65149 - protein, 17 aa, Artificial Sequence
  Description of Artificial Sequence: Synthetic peptide
  Seed: DPRMCSLMQGSTLPRRS
DPRMYSLLQTSTPPRRS

SEQ ID NO: 65150 - protein, 17 aa, Artificial Sequence
  Description of Artificial Sequence: Synthetic peptide
  Seed: DPRMCSLMQGSTLPRRS
DPRMYSLLQTSTQPRRS

SEQ ID NO: 65151 - protein, 17 aa, Artificial Sequence
  Description of Artificial Sequence: Synthetic peptide
  Seed: DPRMCSLMQGSTLPRRS
DPRMYSLLQTSTSPRRS

SEQ ID NO: 65152 - protein, 17 aa, Artificial Sequence
  Description of Artificial Sequence: Synthetic peptide
  Seed: DPRMCSLMQGSTLPRRS
DPRMYSLLQTSTTPRRS

SEQ ID NO: 65153 - protein, 17 aa, Artificial Sequence
  Description of Artificial Sequence: Synthetic peptide
  Seed: DPRMCSLMQGSTLPRRS
DPRMYSLLQTSTVPRRS

SEQ ID NO: 65154 - protein, 17 aa, Artificial Sequence
  Description of Artificial Sequence: Synthetic peptide
  Seed: DPRMCSLMQGSTLPRRS
DPRMYSLLQVSTAPRRS

SEQ ID NO: 65155 - protein, 17 aa, Artificial Sequence
  Description of Artificial Sequence: Synthetic peptide
  Seed: DPRMCSLMQGSTLPRRS
DPRMYSLLQVSTGPRRS

SEQ ID NO: 65156 - protein, 17 aa, Artificial Sequence
  Description of Artificial Sequence: Synthetic peptide
  Seed: DPRMCSLMQGSTLPRRS
DPRMYSLLQVSTHPRRS

SEQ ID NO: 65157 - protein, 17 aa, Artificial Sequence
  Description of Artificial Sequence: Synthetic peptide
  Seed: DPRMCSLMQGSTLPRRS
DPRMYSLLQVSTIPRRS

SEQ ID NO: 65158 - protein, 17 aa, Artificial Sequence
  Description of Artificial Sequence: Synthetic peptide
  Seed: DPRMCSLMQGSTLPRRS
DPRMYSLLQVSTLPRRS

SEQ ID NO: 65159 - protein, 17 aa, Artificial Sequence
  Description of Artificial Sequence: Synthetic peptide
  Seed: DPRMCSLMQGSTLPRRS
DPRMYSLLQVSTMPRRS

SEQ ID NO: 65160 - protein, 17 aa, Artificial Sequence
  Description of Artificial Sequence: Synthetic peptide
  Seed: DPRMCSLMQGSTLPRRS
DPRMYSLLQVSTNPRRS

SEQ ID NO: 65161 - protein, 17 aa, Artificial Sequence
  Description of Artificial Sequence: Synthetic peptide
  Seed: DPRMCSLMQGSTLPRRS
DPRMYSLLQVSTPPRRS

SEQ ID NO: 65162 - protein, 17 aa, Artificial Sequence
  Description of Artificial Sequence: Synthetic peptide
  Seed: DPRMCSLMQGSTLPRRS
DPRMYSLLQVSTQPRRS

SEQ ID NO: 65163 - protein, 17 aa, Artificial Sequence
  Description of Artificial Sequence: Synthetic peptide
  Seed: DPRMCSLMQGSTLPRRS
DPRMYSLLQVSTSPRRS

SEQ ID NO: 65164 - protein, 17 aa, Artificial Sequence
  Description of Artificial Sequence: Synthetic peptide
  Seed: DPRMCSLMQGSTLPRRS
DPRMYSLLQVSTTPRRS

SEQ ID NO: 65165 - protein, 17 aa, Artificial Sequence
  Description of Artificial Sequence: Synthetic peptide
  Seed: DPRMCSLMQGSTLPRRS
DPRMYSLLQVSTVPRRS

SEQ ID NO: 65166 - protein, 17 aa, Artificial Sequence
  Description of Artificial Sequence: Synthetic peptide
  Seed: DPRMCSLMQGSTLPRRS
DPRMYSLMQASTAPRRS

SEQ ID NO: 65167 - protein, 17 aa, Artificial Sequence
  Description of Artificial Sequence: Synthetic peptide
  Seed: DPRMCSLMQGSTLPRRS
DPRMYSLMQASTCPRRS

SEQ ID NO: 65168 - protein, 17 aa, Artificial Sequence
  Description of Artificial Sequence: Synthetic peptide
  Seed: DPRMCSLMQGSTLPRRS
DPRMYSLMQASTEPRRS

SEQ ID NO: 65169 - protein, 17 aa, Artificial Sequence
  Description of Artificial Sequence: Synthetic peptide
  Seed: DPRMCSLMQGSTLPRRS
DPRMYSLMQASTFPRRS

SEQ ID NO: 65170 - protein, 17 aa, Artificial Sequence
  Description of Artificial Sequence: Synthetic peptide
  Seed: DPRMCSLMQGSTLPRRS
DPRMYSLMQASTGPRRS

SEQ ID NO: 65171 - protein, 17 aa, Artificial Sequence
  Description of Artificial Sequence: Synthetic peptide
  Seed: DPRMCSLMQGSTLPRRS
DPRMYSLMQASTHPRRS

SEQ ID NO: 65172 - protein, 17 aa, Artificial Sequence
  Description of Artificial Sequence: Synthetic peptide
  Seed: DPRMCSLMQGSTLPRRS
DPRMYSLMQASTIPRRS

SEQ ID NO: 65173 - protein, 17 aa, Artificial Sequence
  Description of Artificial Sequence: Synthetic peptide
  Seed: DPRMCSLMQGSTLPRRS
DPRMYSLMQASTLPRRS

SEQ ID NO: 65174 - protein, 17 aa, Artificial Sequence
  Description of Artificial Sequence: Synthetic peptide
  Seed: DPRMCSLMQGSTLPRRS
DPRMYSLMQASTMPRRS

SEQ ID NO: 65175 - protein, 17 aa, Artificial Sequence
  Description of Artificial Sequence: Synthetic peptide
  Seed: DPRMCSLMQGSTLPRRS
DPRMYSLMQASTNPRRS

SEQ ID NO: 65176 - protein, 17 aa, Artificial Sequence
  Description of Artificial Sequence: Synthetic peptide
  Seed: DPRMCSLMQGSTLPRRS
DPRMYSLMQASTPPRRS

SEQ ID NO: 65177 - protein, 17 aa, Artificial Sequence
  Description of Artificial Sequence: Synthetic peptide
  Seed: DPRMCSLMQGSTLPRRS
DPRMYSLMQASTQPRRS

SEQ ID NO: 65178 - protein, 17 aa, Artificial Sequence
  Description of Artificial Sequence: Synthetic peptide
  Seed: DPRMCSLMQGSTLPRRS
DPRMYSLMQASTSPRRS

SEQ ID NO: 65179 - protein, 17 aa, Artificial Sequence
  Description of Artificial Sequence: Synthetic peptide
  Seed: DPRMCSLMQGSTLPRRS
DPRMYSLMQASTTPRRS

SEQ ID NO: 65180 - protein, 17 aa, Artificial Sequence
  Description of Artificial Sequence: Synthetic peptide
  Seed: DPRMCSLMQGSTLPRRS
DPRMYSLMQASTVPRRS

SEQ ID NO: 65181 - protein, 17 aa, Artificial Sequence
  Description of Artificial Sequence: Synthetic peptide
  Seed: DPRMCSLMQGSTLPRRS
DPRMYSLMQASTWPRRS

SEQ ID NO: 65182 - protein, 17 aa, Artificial Sequence
  Description of Artificial Sequence: Synthetic peptide
  Seed: DPRMCSLMQGSTLPRRS
DPRMYSLMQASTYPRRS

SEQ ID NO: 65183 - protein, 17 aa, Artificial Sequence
  Description of Artificial Sequence: Synthetic peptide
  Seed: DPRMCSLMQGSTLPRRS
DPRMYSLMQGSTAPRRS

SEQ ID NO: 65184 - protein, 17 aa, Artificial Sequence
  Description of Artificial Sequence: Synthetic peptide
  Seed: DPRMCSLMQGSTLPRRS
DPRMYSLMQGSTCPRRS

SEQ ID NO: 65185 - protein, 17 aa, Artificial Sequence
  Description of Artificial Sequence: Synthetic peptide
  Seed: DPRMCSLMQGSTLPRRS
DPRMYSLMQGSTFPRRS

SEQ ID NO: 65186 - protein, 17 aa, Artificial Sequence
  Description of Artificial Sequence: Synthetic peptide
  Seed: DPRMCSLMQGSTLPRRS
DPRMYSLMQGSTGPRRS

SEQ ID NO: 65187 - protein, 17 aa, Artificial Sequence
  Description of Artificial Sequence: Synthetic peptide
  Seed: DPRMCSLMQGSTLPRRS
DPRMYSLMQGSTIPRRS

SEQ ID NO: 65188 - protein, 17 aa, Artificial Sequence
  Description of Artificial Sequence: Synthetic peptide
  Seed: DPRMCSLMQGSTLPRRS
DPRMYSLMQGSTLPRRS

SEQ ID NO: 65189 - protein, 17 aa, Artificial Sequence
  Description of Artificial Sequence: Synthetic peptide
  Seed: DPRMCSLMQGSTLPRRS
DPRMYSLMQGSTMPRRS

SEQ ID NO: 65190 - protein, 17 aa, Artificial Sequence
  Description of Artificial Sequence: Synthetic peptide
  Seed: DPRMCSLMQGSTLPRRS
DPRMYSLMQGSTNPRRS

SEQ ID NO: 65191 - protein, 17 aa, Artificial Sequence
  Description of Artificial Sequence: Synthetic peptide
  Seed: DPRMCSLMQGSTLPRRS
DPRMYSLMQGSTSPRRS

SEQ ID NO: 65192 - protein, 17 aa, Artificial Sequence
  Description of Artificial Sequence: Synthetic peptide
  Seed: DPRMCSLMQGSTLPRRS
DPRMYSLMQGSTTPRRS

SEQ ID NO: 65193 - protein, 17 aa, Artificial Sequence
  Description of Artificial Sequence: Synthetic peptide
  Seed: DPRMCSLMQGSTLPRRS
DPRMYSLMQGSTVPRRS

SEQ ID NO: 65194 - protein, 17 aa, Artificial Sequence
  Description of Artificial Sequence: Synthetic peptide
  Seed: DPRMCSLMQGSTLPRRS
DPRMYSLMQISTAPRRS

SEQ ID NO: 65195 - protein, 17 aa, Artificial Sequence
  Description of Artificial Sequence: Synthetic peptide
  Seed: DPRMCSLMQGSTLPRRS
DPRMYSLMQISTGPRRS

SEQ ID NO: 65196 - protein, 17 aa, Artificial Sequence
  Description of Artificial Sequence: Synthetic peptide
  Seed: DPRMCSLMQGSTLPRRS
DPRMYSLMQISTHPRRS

SEQ ID NO: 65197 - protein, 17 aa, Artificial Sequence
  Description of Artificial Sequence: Synthetic peptide
  Seed: DPRMCSLMQGSTLPRRS
DPRMYSLMQISTIPRRS

SEQ ID NO: 65198 - protein, 17 aa, Artificial Sequence
  Description of Artificial Sequence: Synthetic peptide
  Seed: DPRMCSLMQGSTLPRRS
DPRMYSLMQISTLPRRS

SEQ ID NO: 65199 - protein, 17 aa, Artificial Sequence
  Description of Artificial Sequence: Synthetic peptide
  Seed: DPRMCSLMQGSTLPRRS
DPRMYSLMQISTMPRRS

SEQ ID NO: 65200 - protein, 17 aa, Artificial Sequence
  Description of Artificial Sequence: Synthetic peptide
  Seed: DPRMCSLMQGSTLPRRS
DPRMYSLMQISTNPRRS

SEQ ID NO: 65201 - protein, 17 aa, Artificial Sequence
  Description of Artificial Sequence: Synthetic peptide
  Seed: DPRMCSLMQGSTLPRRS
DPRMYSLMQISTPPRRS

SEQ ID NO: 65202 - protein, 17 aa, Artificial Sequence
  Description of Artificial Sequence: Synthetic peptide
  Seed: DPRMCSLMQGSTLPRRS
DPRMYSLMQISTQPRRS

SEQ ID NO: 65203 - protein, 17 aa, Artificial Sequence
  Description of Artificial Sequence: Synthetic peptide
  Seed: DPRMCSLMQGSTLPRRS
DPRMYSLMQISTSPRRS

SEQ ID NO: 65204 - protein, 17 aa, Artificial Sequence
  Description of Artificial Sequence: Synthetic peptide
  Seed: DPRMCSLMQGSTLPRRS
DPRMYSLMQISTTPRRS

SEQ ID NO: 65205 - protein, 17 aa, Artificial Sequence
  Description of Artificial Sequence: Synthetic peptide
  Seed: DPRMCSLMQGSTLPRRS
DPRMYSLMQISTVPRRS

SEQ ID NO: 65206 - protein, 17 aa, Artificial Sequence
  Description of Artificial Sequence: Synthetic peptide
  Seed: DPRMCSLMQGSTLPRRS
DPRMYSLMQLSTAPRRS

SEQ ID NO: 65207 - protein, 17 aa, Artificial Sequence
  Description of Artificial Sequence: Synthetic peptide
  Seed: DPRMCSLMQGSTLPRRS
DPRMYSLMQLSTIPRRS

SEQ ID NO: 65208 - protein, 17 aa, Artificial Sequence
  Description of Artificial Sequence: Synthetic peptide
  Seed: DPRMCSLMQGSTLPRRS
DPRMYSLMQLSTLPRRS

SEQ ID NO: 65209 - protein, 17 aa, Artificial Sequence
  Description of Artificial Sequence: Synthetic peptide
  Seed: DPRMCSLMQGSTLPRRS
DPRMYSLMQLSTMPRRS

SEQ ID NO: 65210 - protein, 17 aa, Artificial Sequence
  Description of Artificial Sequence: Synthetic peptide
  Seed: DPRMCSLMQGSTLPRRS
DPRMYSLMQLSTNPRRS

SEQ ID NO: 65211 - protein, 17 aa, Artificial Sequence
  Description of Artificial Sequence: Synthetic peptide
  Seed: DPRMCSLMQGSTLPRRS
DPRMYSLMQLSTSPRRS

SEQ ID NO: 65212 - protein, 17 aa, Artificial Sequence
  Description of Artificial Sequence: Synthetic peptide
  Seed: DPRMCSLMQGSTLPRRS
DPRMYSLMQLSTTPRRS

SEQ ID NO: 65213 - protein, 17 aa, Artificial Sequence
  Description of Artificial Sequence: Synthetic peptide
  Seed: DPRMCSLMQGSTLPRRS
DPRMYSLMQLSTVPRRS

SEQ ID NO: 65214 - protein, 17 aa, Artificial Sequence
  Description of Artificial Sequence: Synthetic peptide
  Seed: DPRMCSLMQGSTLPRRS
DPRMYSLMQMSTAPRRS

SEQ ID NO: 65215 - protein, 17 aa, Artificial Sequence
  Description of Artificial Sequence: Synthetic peptide
  Seed: DPRMCSLMQGSTLPRRS
DPRMYSLMQMSTIPRRS

SEQ ID NO: 65216 - protein, 17 aa, Artificial Sequence
  Description of Artificial Sequence: Synthetic peptide
  Seed: DPRMCSLMQGSTLPRRS
DPRMYSLMQMSTLPRRS

SEQ ID NO: 65217 - protein, 17 aa, Artificial Sequence
  Description of Artificial Sequence: Synthetic peptide
  Seed: DPRMCSLMQGSTLPRRS
DPRMYSLMQMSTMPRRS

SEQ ID NO: 65218 - protein, 17 aa, Artificial Sequence
  Description of Artificial Sequence: Synthetic peptide
  Seed: DPRMCSLMQGSTLPRRS
DPRMYSLMQMSTNPRRS

SEQ ID NO: 65219 - protein, 17 aa, Artificial Sequence
  Description of Artificial Sequence: Synthetic peptide
  Seed: DPRMCSLMQGSTLPRRS
DPRMYSLMQMSTSPRRS

SEQ ID NO: 65220 - protein, 17 aa, Artificial Sequence
  Description of Artificial Sequence: Synthetic peptide
  Seed: DPRMCSLMQGSTLPRRS
DPRMYSLMQMSTTPRRS

SEQ ID NO: 65221 - protein, 17 aa, Artificial Sequence
  Description of Artificial Sequence: Synthetic peptide
  Seed: DPRMCSLMQGSTLPRRS
DPRMYSLMQMSTVPRRS

SEQ ID NO: 65222 - protein, 17 aa, Artificial Sequence
  Description of Artificial Sequence: Synthetic peptide
  Seed: DPRMCSLMQGSTLPRRS
DPRMYSLMQNSTAPRRS

SEQ ID NO: 65223 - protein, 17 aa, Artificial Sequence
  Description of Artificial Sequence: Synthetic peptide
  Seed: DPRMCSLMQGSTLPRRS
DPRMYSLMQNSTIPRRS

SEQ ID NO: 65224 - protein, 17 aa, Artificial Sequence
  Description of Artificial Sequence: Synthetic peptide
  Seed: DPRMCSLMQGSTLPRRS
DPRMYSLMQNSTLPRRS

SEQ ID NO: 65225 - protein, 17 aa, Artificial Sequence
  Description of Artificial Sequence: Synthetic peptide
  Seed: DPRMCSLMQGSTLPRRS
DPRMYSLMQNSTMPRRS

SEQ ID NO: 65226 - protein, 17 aa, Artificial Sequence
  Description of Artificial Sequence: Synthetic peptide
  Seed: DPRMCSLMQGSTLPRRS
DPRMYSLMQNSTNPRRS

SEQ ID NO: 65227 - protein, 17 aa, Artificial Sequence
  Description of Artificial Sequence: Synthetic peptide
  Seed: DPRMCSLMQGSTLPRRS
DPRMYSLMQNSTSPRRS

SEQ ID NO: 65228 - protein, 17 aa, Artificial Sequence
  Description of Artificial Sequence: Synthetic peptide
  Seed: DPRMCSLMQGSTLPRRS
DPRMYSLMQNSTTPRRS

SEQ ID NO: 65229 - protein, 17 aa, Artificial Sequence
  Description of Artificial Sequence: Synthetic peptide
  Seed: DPRMCSLMQGSTLPRRS
DPRMYSLMQNSTVPRRS

SEQ ID NO: 65230 - protein, 17 aa, Artificial Sequence
  Description of Artificial Sequence: Synthetic peptide
  Seed: DPRMCSLMQGSTLPRRS
DPRMYSLMQPSTAPRRS

SEQ ID NO: 65231 - protein, 17 aa, Artificial Sequence
  Description of Artificial Sequence: Synthetic peptide
  Seed: DPRMCSLMQGSTLPRRS
DPRMYSLMQPSTFPRRS

SEQ ID NO: 65232 - protein, 17 aa, Artificial Sequence
  Description of Artificial Sequence: Synthetic peptide
  Seed: DPRMCSLMQGSTLPRRS
DPRMYSLMQPSTGPRRS

SEQ ID NO: 65233 - protein, 17 aa, Artificial Sequence
  Description of Artificial Sequence: Synthetic peptide
  Seed: DPRMCSLMQGSTLPRRS
DPRMYSLMQPSTHPRRS

SEQ ID NO: 65234 - protein, 17 aa, Artificial Sequence
  Description of Artificial Sequence: Synthetic peptide
  Seed: DPRMCSLMQGSTLPRRS
DPRMYSLMQPSTIPRRS

SEQ ID NO: 65235 - protein, 17 aa, Artificial Sequence
  Description of Artificial Sequence: Synthetic peptide
  Seed: DPRMCSLMQGSTLPRRS
DPRMYSLMQPSTLPRRS

SEQ ID NO: 65236 - protein, 17 aa, Artificial Sequence
  Description of Artificial Sequence: Synthetic peptide
  Seed: DPRMCSLMQGSTLPRRS
DPRMYSLMQPSTMPRRS

SEQ ID NO: 65237 - protein, 17 aa, Artificial Sequence
  Description of Artificial Sequence: Synthetic peptide
  Seed: DPRMCSLMQGSTLPRRS
DPRMYSLMQPSTNPRRS

SEQ ID NO: 65238 - protein, 17 aa, Artificial Sequence
  Description of Artificial Sequence: Synthetic peptide
  Seed: DPRMCSLMQGSTLPRRS
DPRMYSLMQPSTPPRRS

SEQ ID NO: 65239 - protein, 17 aa, Artificial Sequence
  Description of Artificial Sequence: Synthetic peptide
  Seed: DPRMCSLMQGSTLPRRS
DPRMYSLMQPSTQPRRS

SEQ ID NO: 65240 - protein, 17 aa, Artificial Sequence
  Description of Artificial Sequence: Synthetic peptide
  Seed: DPRMCSLMQGSTLPRRS
DPRMYSLMQPSTSPRRS

SEQ ID NO: 65241 - protein, 17 aa, Artificial Sequence
  Description of Artificial Sequence: Synthetic peptide
  Seed: DPRMCSLMQGSTLPRRS
DPRMYSLMQPSTTPRRS

SEQ ID NO: 65242 - protein, 17 aa, Artificial Sequence
  Description of Artificial Sequence: Synthetic peptide
  Seed: DPRMCSLMQGSTLPRRS
DPRMYSLMQPSTVPRRS

SEQ ID NO: 65243 - protein, 17 aa, Artificial Sequence
  Description of Artificial Sequence: Synthetic peptide
  Seed: DPRMCSLMQGSTLPRRS
DPRMYSLMQSSTAPRRS

SEQ ID NO: 65244 - protein, 17 aa, Artificial Sequence
  Description of Artificial Sequence: Synthetic peptide
  Seed: DPRMCSLMQGSTLPRRS
DPRMYSLMQSSTCPRRS

SEQ ID NO: 65245 - protein, 17 aa, Artificial Sequence
  Description of Artificial Sequence: Synthetic peptide
  Seed: DPRMCSLMQGSTLPRRS
DPRMYSLMQSSTFPRRS

SEQ ID NO: 65246 - protein, 17 aa, Artificial Sequence
  Description of Artificial Sequence: Synthetic peptide
  Seed: DPRMCSLMQGSTLPRRS
DPRMYSLMQSSTGPRRS

SEQ ID NO: 65247 - protein, 17 aa, Artificial Sequence
  Description of Artificial Sequence: Synthetic peptide
  Seed: DPRMCSLMQGSTLPRRS
DPRMYSLMQSSTHPRRS

SEQ ID NO: 65248 - protein, 17 aa, Artificial Sequence
  Description of Artificial Sequence: Synthetic peptide
  Seed: DPRMCSLMQGSTLPRRS
DPRMYSLMQSSTIPRRS

SEQ ID NO: 65249 - protein, 17 aa, Artificial Sequence
  Description of Artificial Sequence: Synthetic peptide
  Seed: DPRMCSLMQGSTLPRRS
DPRMYSLMQSSTLPRRS

SEQ ID NO: 65250 - protein, 17 aa, Artificial Sequence
  Description of Artificial Sequence: Synthetic peptide
  Seed: DPRMCSLMQGSTLPRRS
DPRMYSLMQSSTMPRRS

SEQ ID NO: 65251 - protein, 17 aa, Artificial Sequence
  Description of Artificial Sequence: Synthetic peptide
  Seed: DPRMCSLMQGSTLPRRS
DPRMYSLMQSSTNPRRS

SEQ ID NO: 65252 - protein, 17 aa, Artificial Sequence
  Description of Artificial Sequence: Synthetic peptide
  Seed: DPRMCSLMQGSTLPRRS
DPRMYSLMQSSTPPRRS

SEQ ID NO: 65253 - protein, 17 aa, Artificial Sequence
  Description of Artificial Sequence: Synthetic peptide
  Seed: DPRMCSLMQGSTLPRRS
DPRMYSLMQSSTQPRRS

SEQ ID NO: 65254 - protein, 17 aa, Artificial Sequence
  Description of Artificial Sequence: Synthetic peptide
  Seed: DPRMCSLMQGSTLPRRS
DPRMYSLMQSSTSPRRS

SEQ ID NO: 65255 - protein, 17 aa, Artificial Sequence
  Description of Artificial Sequence: Synthetic peptide
  Seed: DPRMCSLMQGSTLPRRS
DPRMYSLMQSSTTPRRS

SEQ ID NO: 65256 - protein, 17 aa, Artificial Sequence
  Description of Artificial Sequence: Synthetic peptide
  Seed: DPRMCSLMQGSTLPRRS
DPRMYSLMQSSTVPRRS

SEQ ID NO: 65257 - protein, 17 aa, Artificial Sequence
  Description of Artificial Sequence: Synthetic peptide
  Seed: DPRMCSLMQGSTLPRRS
DPRMYSLMQTSTAPRRS

SEQ ID NO: 65258 - protein, 17 aa, Artificial Sequence
  Description of Artificial Sequence: Synthetic peptide
  Seed: DPRMCSLMQGSTLPRRS
DPRMYSLMQTSTGPRRS

SEQ ID NO: 65259 - protein, 17 aa, Artificial Sequence
  Description of Artificial Sequence: Synthetic peptide
  Seed: DPRMCSLMQGSTLPRRS
DPRMYSLMQTSTHPRRS

SEQ ID NO: 65260 - protein, 17 aa, Artificial Sequence
  Description of Artificial Sequence: Synthetic peptide
  Seed: DPRMCSLMQGSTLPRRS
DPRMYSLMQTSTIPRRS

SEQ ID NO: 65261 - protein, 17 aa, Artificial Sequence
  Description of Artificial Sequence: Synthetic peptide
  Seed: DPRMCSLMQGSTLPRRS
DPRMYSLMQTSTLPRRS

SEQ ID NO: 65262 - protein, 17 aa, Artificial Sequence
  Description of Artificial Sequence: Synthetic peptide
  Seed: DPRMCSLMQGSTLPRRS
DPRMYSLMQTSTMPRRS

SEQ ID NO: 65263 - protein, 17 aa, Artificial Sequence
  Description of Artificial Sequence: Synthetic peptide
  Seed: DPRMCSLMQGSTLPRRS
DPRMYSLMQTSTNPRRS

SEQ ID NO: 65264 - protein, 17 aa, Artificial Sequence
  Description of Artificial Sequence: Synthetic peptide
  Seed: DPRMCSLMQGSTLPRRS
DPRMYSLMQTSTPPRRS

SEQ ID NO: 65265 - protein, 17 aa, Artificial Sequence
  Description of Artificial Sequence: Synthetic peptide
  Seed: DPRMCSLMQGSTLPRRS
DPRMYSLMQTSTQPRRS

SEQ ID NO: 65266 - protein, 17 aa, Artificial Sequence
  Description of Artificial Sequence: Synthetic peptide
  Seed: DPRMCSLMQGSTLPRRS
DPRMYSLMQTSTSPRRS

SEQ ID NO: 65267 - protein, 17 aa, Artificial Sequence
  Description of Artificial Sequence: Synthetic peptide
  Seed: DPRMCSLMQGSTLPRRS
DPRMYSLMQTSTTPRRS

SEQ ID NO: 65268 - protein, 17 aa, Artificial Sequence
  Description of Artificial Sequence: Synthetic peptide
  Seed: DPRMCSLMQGSTLPRRS
DPRMYSLMQTSTVPRRS

SEQ ID NO: 65269 - protein, 17 aa, Artificial Sequence
  Description of Artificial Sequence: Synthetic peptide
  Seed: DPRMCSLMQGSTLPRRS
DPRMYSLMQVSTAPRRS

SEQ ID NO: 65270 - protein, 17 aa, Artificial Sequence
  Description of Artificial Sequence: Synthetic peptide
  Seed: DPRMCSLMQGSTLPRRS
DPRMYSLMQVSTGPRRS

SEQ ID NO: 65271 - protein, 17 aa, Artificial Sequence
  Description of Artificial Sequence: Synthetic peptide
  Seed: DPRMCSLMQGSTLPRRS
DPRMYSLMQVSTHPRRS

SEQ ID NO: 65272 - protein, 17 aa, Artificial Sequence
  Description of Artificial Sequence: Synthetic peptide
  Seed: DPRMCSLMQGSTLPRRS
DPRMYSLMQVSTIPRRS

SEQ ID NO: 65273 - protein, 17 aa, Artificial Sequence
  Description of Artificial Sequence: Synthetic peptide
  Seed: DPRMCSLMQGSTLPRRS
DPRMYSLMQVSTLPRRS

SEQ ID NO: 65274 - protein, 17 aa, Artificial Sequence
  Description of Artificial Sequence: Synthetic peptide
  Seed: DPRMCSLMQGSTLPRRS
DPRMYSLMQVSTMPRRS

SEQ ID NO: 65275 - protein, 17 aa, Artificial Sequence
  Description of Artificial Sequence: Synthetic peptide
  Seed: DPRMCSLMQGSTLPRRS
DPRMYSLMQVSTNPRRS

SEQ ID NO: 65276 - protein, 17 aa, Artificial Sequence
  Description of Artificial Sequence: Synthetic peptide
  Seed: DPRMCSLMQGSTLPRRS
DPRMYSLMQVSTPPRRS

SEQ ID NO: 65277 - protein, 17 aa, Artificial Sequence
  Description of Artificial Sequence: Synthetic peptide
  Seed: DPRMCSLMQGSTLPRRS
DPRMYSLMQVSTQPRRS

SEQ ID NO: 65278 - protein, 17 aa, Artificial Sequence
  Description of Artificial Sequence: Synthetic peptide
  Seed: DPRMCSLMQGSTLPRRS
DPRMYSLMQVSTSPRRS

SEQ ID NO: 65279 - protein, 17 aa, Artificial Sequence
  Description of Artificial Sequence: Synthetic peptide
  Seed: DPRMCSLMQGSTLPRRS
DPRMYSLMQVSTTPRRS

SEQ ID NO: 65280 - protein, 17 aa, Artificial Sequence
  Description of Artificial Sequence: Synthetic peptide
  Seed: DPRMCSLMQGSTLPRRS
DPRMYSLMQVSTVPRRS

SEQ ID NO: 65281 - protein, 17 aa, Artificial Sequence
  Description of Artificial Sequence: Synthetic peptide
  Seed: DPRMCSLMQGSTLPRRS
DPRMYSLNQASTIPRRS

SEQ ID NO: 65282 - protein, 17 aa, Artificial Sequence
  Description of Artificial Sequence: Synthetic peptide
  Seed: DPRMCSLMQGSTLPRRS
DPRMYSLNQASTLPRRS

SEQ ID NO: 65283 - protein, 17 aa, Artificial Sequence
  Description of Artificial Sequence: Synthetic peptide
  Seed: DPRMCSLMQGSTLPRRS
DPRMYSLNQASTVPRRS

SEQ ID NO: 65284 - protein, 17 aa, Artificial Sequence
  Description of Artificial Sequence: Synthetic peptide
  Seed: DPRMCSLMQGSTLPRRS
DPRMYSLQQASTAPRRS

SEQ ID NO: 65285 - protein, 17 aa, Artificial Sequence
  Description of Artificial Sequence: Synthetic peptide
  Seed: DPRMCSLMQGSTLPRRS
DPRMYSLQQASTIPRRS

SEQ ID NO: 65286 - protein, 17 aa, Artificial Sequence
  Description of Artificial Sequence: Synthetic peptide
  Seed: DPRMCSLMQGSTLPRRS
DPRMYSLQQASTLPRRS

SEQ ID NO: 65287 - protein, 17 aa, Artificial Sequence
  Description of Artificial Sequence: Synthetic peptide
  Seed: DPRMCSLMQGSTLPRRS
DPRMYSLQQASTMPRRS

SEQ ID NO: 65288 - protein, 17 aa, Artificial Sequence
  Description of Artificial Sequence: Synthetic peptide
  Seed: DPRMCSLMQGSTLPRRS
DPRMYSLQQASTNPRRS

SEQ ID NO: 65289 - protein, 17 aa, Artificial Sequence
  Description of Artificial Sequence: Synthetic peptide
  Seed: DPRMCSLMQGSTLPRRS
DPRMYSLQQASTSPRRS

SEQ ID NO: 65290 - protein, 17 aa, Artificial Sequence
  Description of Artificial Sequence: Synthetic peptide
  Seed: DPRMCSLMQGSTLPRRS
DPRMYSLQQASTTPRRS

SEQ ID NO: 65291 - protein, 17 aa, Artificial Sequence
  Description of Artificial Sequence: Synthetic peptide
  Seed: DPRMCSLMQGSTLPRRS
DPRMYSLQQASTVPRRS

SEQ ID NO: 65292 - protein, 17 aa, Artificial Sequence
  Description of Artificial Sequence: Synthetic peptide
  Seed: DPRMCSLMQGSTLPRRS
DPRMYSLQQGSTAPRRS

SEQ ID NO: 65293 - protein, 17 aa, Artificial Sequence
  Description of Artificial Sequence: Synthetic peptide
  Seed: DPRMCSLMQGSTLPRRS
DPRMYSLQQGSTIPRRS

SEQ ID NO: 65294 - protein, 17 aa, Artificial Sequence
  Description of Artificial Sequence: Synthetic peptide
  Seed: DPRMCSLMQGSTLPRRS
DPRMYSLQQGSTLPRRS

SEQ ID NO: 65295 - protein, 17 aa, Artificial Sequence
  Description of Artificial Sequence: Synthetic peptide
  Seed: DPRMCSLMQGSTLPRRS
DPRMYSLQQGSTMPRRS

SEQ ID NO: 65296 - protein, 17 aa, Artificial Sequence
  Description of Artificial Sequence: Synthetic peptide
  Seed: DPRMCSLMQGSTLPRRS
DPRMYSLQQGSTTPRRS

SEQ ID NO: 65297 - protein, 17 aa, Artificial Sequence
  Description of Artificial Sequence: Synthetic peptide
  Seed: DPRMCSLMQGSTLPRRS
DPRMYSLQQGSTVPRRS

SEQ ID NO: 65298 - protein, 17 aa, Artificial Sequence
  Description of Artificial Sequence: Synthetic peptide
  Seed: DPRMCSLMQGSTLPRRS
DPRMYSLQQISTAPRRS

SEQ ID NO: 65299 - protein, 17 aa, Artificial Sequence
  Description of Artificial Sequence: Synthetic peptide
  Seed: DPRMCSLMQGSTLPRRS
DPRMYSLQQNSTIPRRS

SEQ ID NO: 65300 - protein, 17 aa, Artificial Sequence
  Description of Artificial Sequence: Synthetic peptide
  Seed: DPRMCSLMQGSTLPRRS
DPRMYSLQQNSTLPRRS

SEQ ID NO: 65301 - protein, 17 aa, Artificial Sequence
  Description of Artificial Sequence: Synthetic peptide
  Seed: DPRMCSLMQGSTLPRRS
DPRMYSLQQNSTVPRRS

SEQ ID NO: 65302 - protein, 17 aa, Artificial Sequence
  Description of Artificial Sequence: Synthetic peptide
  Seed: DPRMCSLMQGSTLPRRS
DPRMYSLQQPSTAPRRS

SEQ ID NO: 65303 - protein, 17 aa, Artificial Sequence
  Description of Artificial Sequence: Synthetic peptide
  Seed: DPRMCSLMQGSTLPRRS
DPRMYSLQQPSTIPRRS

SEQ ID NO: 65304 - protein, 17 aa, Artificial Sequence
  Description of Artificial Sequence: Synthetic peptide
  Seed: DPRMCSLMQGSTLPRRS
DPRMYSLQQPSTLPRRS

SEQ ID NO: 65305 - protein, 17 aa, Artificial Sequence
  Description of Artificial Sequence: Synthetic peptide
  Seed: DPRMCSLMQGSTLPRRS
DPRMYSLQQPSTVPRRS

SEQ ID NO: 65306 - protein, 17 aa, Artificial Sequence
  Description of Artificial Sequence: Synthetic peptide
  Seed: DPRMCSLMQGSTLPRRS
DPRMYSLQQSSTAPRRS

SEQ ID NO: 65307 - protein, 17 aa, Artificial Sequence
  Description of Artificial Sequence: Synthetic peptide
  Seed: DPRMCSLMQGSTLPRRS
DPRMYSLQQSSTIPRRS

SEQ ID NO: 65308 - protein, 17 aa, Artificial Sequence
  Description of Artificial Sequence: Synthetic peptide
  Seed: DPRMCSLMQGSTLPRRS
DPRMYSLQQSSTLPRRS

SEQ ID NO: 65309 - protein, 17 aa, Artificial Sequence
  Description of Artificial Sequence: Synthetic peptide
  Seed: DPRMCSLMQGSTLPRRS
DPRMYSLQQSSTMPRRS

SEQ ID NO: 65310 - protein, 17 aa, Artificial Sequence
  Description of Artificial Sequence: Synthetic peptide
  Seed: DPRMCSLMQGSTLPRRS
DPRMYSLQQSSTTPRRS

SEQ ID NO: 65311 - protein, 17 aa, Artificial Sequence
  Description of Artificial Sequence: Synthetic peptide
  Seed: DPRMCSLMQGSTLPRRS
DPRMYSLQQSSTVPRRS

SEQ ID NO: 65312 - protein, 17 aa, Artificial Sequence
  Description of Artificial Sequence: Synthetic peptide
  Seed: DPRMCSLMQGSTLPRRS
DPRMYSLQQTSTIPRRS

SEQ ID NO: 65313 - protein, 17 aa, Artificial Sequence
  Description of Artificial Sequence: Synthetic peptide
  Seed: DPRMCSLMQGSTLPRRS
DPRMYSLQQTSTLPRRS

SEQ ID NO: 65314 - protein, 17 aa, Artificial Sequence
  Description of Artificial Sequence: Synthetic peptide
  Seed: DPRMCSLMQGSTLPRRS
DPRMYSLQQTSTVPRRS

SEQ ID NO: 65315 - protein, 17 aa, Artificial Sequence
  Description of Artificial Sequence: Synthetic peptide
  Seed: DPRMCSLMQGSTLPRRS
DPRMYSLQQVSTAPRRS

SEQ ID NO: 65316 - protein, 17 aa, Artificial Sequence
  Description of Artificial Sequence: Synthetic peptide
  Seed: DPRMCSLMQGSTLPRRS
DPRMYSLSQASTAPRRS

SEQ ID NO: 65317 - protein, 17 aa, Artificial Sequence
  Description of Artificial Sequence: Synthetic peptide
  Seed: DPRMCSLMQGSTLPRRS
DPRMYSLSQASTIPRRS

SEQ ID NO: 65318 - protein, 17 aa, Artificial Sequence
  Description of Artificial Sequence: Synthetic peptide
  Seed: DPRMCSLMQGSTLPRRS
DPRMYSLSQASTLPRRS

SEQ ID NO: 65319 - protein, 17 aa, Artificial Sequence
  Description of Artificial Sequence: Synthetic peptide
  Seed: DPRMCSLMQGSTLPRRS
DPRMYSLSQASTMPRRS

SEQ ID NO: 65320 - protein, 17 aa, Artificial Sequence
  Description of Artificial Sequence: Synthetic peptide
  Seed: DPRMCSLMQGSTLPRRS
DPRMYSLSQASTSPRRS

SEQ ID NO: 65321 - protein, 17 aa, Artificial Sequence
  Description of Artificial Sequence: Synthetic peptide
  Seed: DPRMCSLMQGSTLPRRS
DPRMYSLSQASTVPRRS

SEQ ID NO: 65322 - protein, 17 aa, Artificial Sequence
  Description of Artificial Sequence: Synthetic peptide
  Seed: DPRMCSLMQGSTLPRRS
DPRMYSLSQGSTAPRRS

SEQ ID NO: 65323 - protein, 17 aa, Artificial Sequence
  Description of Artificial Sequence: Synthetic peptide
  Seed: DPRMCSLMQGSTLPRRS
DPRMYSLSQGSTIPRRS

SEQ ID NO: 65324 - protein, 17 aa, Artificial Sequence
  Description of Artificial Sequence: Synthetic peptide
  Seed: DPRMCSLMQGSTLPRRS
DPRMYSLSQGSTLPRRS

SEQ ID NO: 65325 - protein, 17 aa, Artificial Sequence
  Description of Artificial Sequence: Synthetic peptide
  Seed: DPRMCSLMQGSTLPRRS
DPRMYSLSQGSTVPRRS

SEQ ID NO: 65326 - protein, 17 aa, Artificial Sequence
  Description of Artificial Sequence: Synthetic peptide
  Seed: DPRMCSLMQGSTLPRRS
DPRMYSLSQPSTLPRRS

SEQ ID NO: 65327 - protein, 17 aa, Artificial Sequence
  Description of Artificial Sequence: Synthetic peptide
  Seed: DPRMCSLMQGSTLPRRS
DPRMYSLSQSSTAPRRS

SEQ ID NO: 65328 - protein, 17 aa, Artificial Sequence
  Description of Artificial Sequence: Synthetic peptide
  Seed: DPRMCSLMQGSTLPRRS
DPRMYSLSQSSTIPRRS

SEQ ID NO: 65329 - protein, 17 aa, Artificial Sequence
  Description of Artificial Sequence: Synthetic peptide
  Seed: DPRMCSLMQGSTLPRRS
DPRMYSLSQSSTLPRRS

SEQ ID NO: 65330 - protein, 17 aa, Artificial Sequence
  Description of Artificial Sequence: Synthetic peptide
  Seed: DPRMCSLMQGSTLPRRS
DPRMYSLSQSSTVPRRS

SEQ ID NO: 65331 - protein, 17 aa, Artificial Sequence
  Description of Artificial Sequence: Synthetic peptide
  Seed: DPRMCSLMQGSTLPRRS
DPRMYSLTQASTAPRRS

SEQ ID NO: 65332 - protein, 17 aa, Artificial Sequence
  Description of Artificial Sequence: Synthetic peptide
  Seed: DPRMCSLMQGSTLPRRS
DPRMYSLTQASTIPRRS

SEQ ID NO: 65333 - protein, 17 aa, Artificial Sequence
  Description of Artificial Sequence: Synthetic peptide
  Seed: DPRMCSLMQGSTLPRRS
DPRMYSLTQASTLPRRS

SEQ ID NO: 65334 - protein, 17 aa, Artificial Sequence
  Description of Artificial Sequence: Synthetic peptide
  Seed: DPRMCSLMQGSTLPRRS
DPRMYSLTQASTVPRRS

SEQ ID NO: 65335 - protein, 17 aa, Artificial Sequence
  Description of Artificial Sequence: Synthetic peptide
  Seed: DPRMCSLMQGSTLPRRS
DPRMYSLTQGSTLPRRS

SEQ ID NO: 65336 - protein, 17 aa, Artificial Sequence
  Description of Artificial Sequence: Synthetic peptide
  Seed: DPRMCSLMQGSTLPRRS
DPRMYSLVQASTAPRRS

SEQ ID NO: 65337 - protein, 17 aa, Artificial Sequence
  Description of Artificial Sequence: Synthetic peptide
  Seed: DPRMCSLMQGSTLPRRS
DPRMYSLVQASTGPRRS

SEQ ID NO: 65338 - protein, 17 aa, Artificial Sequence
  Description of Artificial Sequence: Synthetic peptide
  Seed: DPRMCSLMQGSTLPRRS
DPRMYSLVQASTHPRRS

SEQ ID NO: 65339 - protein, 17 aa, Artificial Sequence
  Description of Artificial Sequence: Synthetic peptide
  Seed: DPRMCSLMQGSTLPRRS
DPRMYSLVQASTIPRRS

SEQ ID NO: 65340 - protein, 17 aa, Artificial Sequence
  Description of Artificial Sequence: Synthetic peptide
  Seed: DPRMCSLMQGSTLPRRS
DPRMYSLVQASTLPRRS

SEQ ID NO: 65341 - protein, 17 aa, Artificial Sequence
  Description of Artificial Sequence: Synthetic peptide
  Seed: DPRMCSLMQGSTLPRRS
DPRMYSLVQASTMPRRS

SEQ ID NO: 65342 - protein, 17 aa, Artificial Sequence
  Description of Artificial Sequence: Synthetic peptide
  Seed: DPRMCSLMQGSTLPRRS
DPRMYSLVQASTNPRRS

SEQ ID NO: 65343 - protein, 17 aa, Artificial Sequence
  Description of Artificial Sequence: Synthetic peptide
  Seed: DPRMCSLMQGSTLPRRS
DPRMYSLVQASTSPRRS

SEQ ID NO: 65344 - protein, 17 aa, Artificial Sequence
  Description of Artificial Sequence: Synthetic peptide
  Seed: DPRMCSLMQGSTLPRRS
DPRMYSLVQASTTPRRS

SEQ ID NO: 65345 - protein, 17 aa, Artificial Sequence
  Description of Artificial Sequence: Synthetic peptide
  Seed: DPRMCSLMQGSTLPRRS
DPRMYSLVQASTVPRRS

SEQ ID NO: 65346 - protein, 17 aa, Artificial Sequence
  Description of Artificial Sequence: Synthetic peptide
  Seed: DPRMCSLMQGSTLPRRS
DPRMYSLVQGSTAPRRS

SEQ ID NO: 65347 - protein, 17 aa, Artificial Sequence
  Description of Artificial Sequence: Synthetic peptide
  Seed: DPRMCSLMQGSTLPRRS
DPRMYSLVQGSTIPRRS

SEQ ID NO: 65348 - protein, 17 aa, Artificial Sequence
  Description of Artificial Sequence: Synthetic peptide
  Seed: DPRMCSLMQGSTLPRRS
DPRMYSLVQGSTLPRRS

SEQ ID NO: 65349 - protein, 17 aa, Artificial Sequence
  Description of Artificial Sequence: Synthetic peptide
  Seed: DPRMCSLMQGSTLPRRS
DPRMYSLVQGSTMPRRS

SEQ ID NO: 65350 - protein, 17 aa, Artificial Sequence
  Description of Artificial Sequence: Synthetic peptide
  Seed: DPRMCSLMQGSTLPRRS
DPRMYSLVQGSTSPRRS

SEQ ID NO: 65351 - protein, 17 aa, Artificial Sequence
  Description of Artificial Sequence: Synthetic peptide
  Seed: DPRMCSLMQGSTLPRRS
DPRMYSLVQGSTTPRRS

SEQ ID NO: 65352 - protein, 17 aa, Artificial Sequence
  Description of Artificial Sequence: Synthetic peptide
  Seed: DPRMCSLMQGSTLPRRS
DPRMYSLVQGSTVPRRS

SEQ ID NO: 65353 - protein, 17 aa, Artificial Sequence
  Description of Artificial Sequence: Synthetic peptide
  Seed: DPRMCSLMQGSTLPRRS
DPRMYSLVQISTAPRRS

SEQ ID NO: 65354 - protein, 17 aa, Artificial Sequence
  Description of Artificial Sequence: Synthetic peptide
  Seed: DPRMCSLMQGSTLPRRS
DPRMYSLVQISTLPRRS

SEQ ID NO: 65355 - protein, 17 aa, Artificial Sequence
  Description of Artificial Sequence: Synthetic peptide
  Seed: DPRMCSLMQGSTLPRRS
DPRMYSLVQISTNPRRS

SEQ ID NO: 65356 - protein, 17 aa, Artificial Sequence
  Description of Artificial Sequence: Synthetic peptide
  Seed: DPRMCSLMQGSTLPRRS
DPRMYSLVQISTSPRRS

SEQ ID NO: 65357 - protein, 17 aa, Artificial Sequence
  Description of Artificial Sequence: Synthetic peptide
  Seed: DPRMCSLMQGSTLPRRS
DPRMYSLVQISTTPRRS

SEQ ID NO: 65358 - protein, 17 aa, Artificial Sequence
  Description of Artificial Sequence: Synthetic peptide
  Seed: DPRMCSLMQGSTLPRRS
DPRMYSLVQISTVPRRS

SEQ ID NO: 65359 - protein, 17 aa, Artificial Sequence
  Description of Artificial Sequence: Synthetic peptide
  Seed: DPRMCSLMQGSTLPRRS
DPRMYSLVQLSTAPRRS

SEQ ID NO: 65360 - protein, 17 aa, Artificial Sequence
  Description of Artificial Sequence: Synthetic peptide
  Seed: DPRMCSLMQGSTLPRRS
DPRMYSLVQMSTAPRRS

SEQ ID NO: 65361 - protein, 17 aa, Artificial Sequence
  Description of Artificial Sequence: Synthetic peptide
  Seed: DPRMCSLMQGSTLPRRS
DPRMYSLVQNSTAPRRS

SEQ ID NO: 65362 - protein, 17 aa, Artificial Sequence
  Description of Artificial Sequence: Synthetic peptide
  Seed: DPRMCSLMQGSTLPRRS
DPRMYSLVQNSTIPRRS

SEQ ID NO: 65363 - protein, 17 aa, Artificial Sequence
  Description of Artificial Sequence: Synthetic peptide
  Seed: DPRMCSLMQGSTLPRRS
DPRMYSLVQNSTLPRRS

SEQ ID NO: 65364 - protein, 17 aa, Artificial Sequence
  Description of Artificial Sequence: Synthetic peptide
  Seed: DPRMCSLMQGSTLPRRS
DPRMYSLVQNSTVPRRS

SEQ ID NO: 65365 - protein, 17 aa, Artificial Sequence
  Description of Artificial Sequence: Synthetic peptide
  Seed: DPRMCSLMQGSTLPRRS
DPRMYSLVQPSTAPRRS

SEQ ID NO: 65366 - protein, 17 aa, Artificial Sequence
  Description of Artificial Sequence: Synthetic peptide
  Seed: DPRMCSLMQGSTLPRRS
DPRMYSLVQPSTIPRRS

SEQ ID NO: 65367 - protein, 17 aa, Artificial Sequence
  Description of Artificial Sequence: Synthetic peptide
  Seed: DPRMCSLMQGSTLPRRS
DPRMYSLVQPSTLPRRS

SEQ ID NO: 65368 - protein, 17 aa, Artificial Sequence
  Description of Artificial Sequence: Synthetic peptide
  Seed: DPRMCSLMQGSTLPRRS
DPRMYSLVQPSTMPRRS

SEQ ID NO: 65369 - protein, 17 aa, Artificial Sequence
  Description of Artificial Sequence: Synthetic peptide
  Seed: DPRMCSLMQGSTLPRRS
DPRMYSLVQPSTNPRRS

SEQ ID NO: 65370 - protein, 17 aa, Artificial Sequence
  Description of Artificial Sequence: Synthetic peptide
  Seed: DPRMCSLMQGSTLPRRS
DPRMYSLVQPSTSPRRS

SEQ ID NO: 65371 - protein, 17 aa, Artificial Sequence
  Description of Artificial Sequence: Synthetic peptide
  Seed: DPRMCSLMQGSTLPRRS
DPRMYSLVQPSTTPRRS

SEQ ID NO: 65372 - protein, 17 aa, Artificial Sequence
  Description of Artificial Sequence: Synthetic peptide
  Seed: DPRMCSLMQGSTLPRRS
DPRMYSLVQPSTVPRRS

SEQ ID NO: 65373 - protein, 17 aa, Artificial Sequence
  Description of Artificial Sequence: Synthetic peptide
  Seed: DPRMCSLMQGSTLPRRS
DPRMYSLVQSSTAPRRS

SEQ ID NO: 65374 - protein, 17 aa, Artificial Sequence
  Description of Artificial Sequence: Synthetic peptide
  Seed: DPRMCSLMQGSTLPRRS
DPRMYSLVQSSTIPRRS

SEQ ID NO: 65375 - protein, 17 aa, Artificial Sequence
  Description of Artificial Sequence: Synthetic peptide
  Seed: DPRMCSLMQGSTLPRRS
DPRMYSLVQSSTLPRRS

SEQ ID NO: 65376 - protein, 17 aa, Artificial Sequence
  Description of Artificial Sequence: Synthetic peptide
  Seed: DPRMCSLMQGSTLPRRS
DPRMYSLVQSSTMPRRS

SEQ ID NO: 65377 - protein, 17 aa, Artificial Sequence
  Description of Artificial Sequence: Synthetic peptide
  Seed: DPRMCSLMQGSTLPRRS
DPRMYSLVQSSTNPRRS

SEQ ID NO: 65378 - protein, 17 aa, Artificial Sequence
  Description of Artificial Sequence: Synthetic peptide
  Seed: DPRMCSLMQGSTLPRRS
DPRMYSLVQSSTSPRRS

SEQ ID NO: 65379 - protein, 17 aa, Artificial Sequence
  Description of Artificial Sequence: Synthetic peptide
  Seed: DPRMCSLMQGSTLPRRS
DPRMYSLVQSSTTPRRS

SEQ ID NO: 65380 - protein, 17 aa, Artificial Sequence
  Description of Artificial Sequence: Synthetic peptide
  Seed: DPRMCSLMQGSTLPRRS
DPRMYSLVQSSTVPRRS

SEQ ID NO: 65381 - protein, 17 aa, Artificial Sequence
  Description of Artificial Sequence: Synthetic peptide
  Seed: DPRMCSLMQGSTLPRRS
DPRMYSLVQTSTAPRRS

SEQ ID NO: 65382 - protein, 17 aa, Artificial Sequence
  Description of Artificial Sequence: Synthetic peptide
  Seed: DPRMCSLMQGSTLPRRS
DPRMYSLVQTSTIPRRS

SEQ ID NO: 65383 - protein, 17 aa, Artificial Sequence
  Description of Artificial Sequence: Synthetic peptide
  Seed: DPRMCSLMQGSTLPRRS
DPRMYSLVQTSTLPRRS

SEQ ID NO: 65384 - protein, 17 aa, Artificial Sequence
  Description of Artificial Sequence: Synthetic peptide
  Seed: DPRMCSLMQGSTLPRRS
DPRMYSLVQTSTMPRRS

SEQ ID NO: 65385 - protein, 17 aa, Artificial Sequence
  Description of Artificial Sequence: Synthetic peptide
  Seed: DPRMCSLMQGSTLPRRS
DPRMYSLVQTSTNPRRS

SEQ ID NO: 65386 - protein, 17 aa, Artificial Sequence
  Description of Artificial Sequence: Synthetic peptide
  Seed: DPRMCSLMQGSTLPRRS
DPRMYSLVQTSTSPRRS

SEQ ID NO: 65387 - protein, 17 aa, Artificial Sequence
  Description of Artificial Sequence: Synthetic peptide
  Seed: DPRMCSLMQGSTLPRRS
DPRMYSLVQTSTTPRRS

SEQ ID NO: 65388 - protein, 17 aa, Artificial Sequence
  Description of Artificial Sequence: Synthetic peptide
  Seed: DPRMCSLMQGSTLPRRS
DPRMYSLVQTSTVPRRS

SEQ ID NO: 65389 - protein, 17 aa, Artificial Sequence
  Description of Artificial Sequence: Synthetic peptide
  Seed: DPRMCSLMQGSTLPRRS
DPRMYSLVQVSTAPRRS

SEQ ID NO: 65390 - protein, 17 aa, Artificial Sequence
  Description of Artificial Sequence: Synthetic peptide
  Seed: DPRMCSLMQGSTLPRRS
DPRMYSLVQVSTIPRRS

SEQ ID NO: 65391 - protein, 17 aa, Artificial Sequence
  Description of Artificial Sequence: Synthetic peptide
  Seed: DPRMCSLMQGSTLPRRS
DPRMYSLVQVSTLPRRS

SEQ ID NO: 65392 - protein, 17 aa, Artificial Sequence
  Description of Artificial Sequence: Synthetic peptide
  Seed: DPRMCSLMQGSTLPRRS
DPRMYSLVQVSTMPRRS

SEQ ID NO: 65393 - protein, 17 aa, Artificial Sequence
  Description of Artificial Sequence: Synthetic peptide
  Seed: DPRMCSLMQGSTLPRRS
DPRMYSLVQVSTNPRRS

SEQ ID NO: 65394 - protein, 17 aa, Artificial Sequence
  Description of Artificial Sequence: Synthetic peptide
  Seed: DPRMCSLMQGSTLPRRS
DPRMYSLVQVSTSPRRS

SEQ ID NO: 65395 - protein, 17 aa, Artificial Sequence
  Description of Artificial Sequence: Synthetic peptide
  Seed: DPRMCSLMQGSTLPRRS
DPRMYSLVQVSTTPRRS

SEQ ID NO: 65396 - protein, 17 aa, Artificial Sequence
  Description of Artificial Sequence: Synthetic peptide
  Seed: DPRMCSLMQGSTLPRRS
DPRMYSLVQVSTVPRRS

SEQ ID NO: 65397 - protein, 18 aa, Artificial Sequence
  Description of Artificial Sequence: Synthetic peptide
  Seed: DPRMCSLMQGSTLPRRSG
DPRMFSLAQASTIPRRSG

SEQ ID NO: 65398 - protein, 18 aa, Artificial Sequence
  Description of Artificial Sequence: Synthetic peptide
  Seed: DPRMCSLMQGSTLPRRSG
DPRMFSLAQASTLPRRSG

SEQ ID NO: 65399 - protein, 18 aa, Artificial Sequence
  Description of Artificial Sequence: Synthetic peptide
  Seed: DPRMCSLMQGSTLPRRSG
DPRMFSLAQASTVPRRSG

SEQ ID NO: 65400 - protein, 18 aa, Artificial Sequence
  Description of Artificial Sequence: Synthetic peptide
  Seed: DPRMCSLMQGSTLPRRSG
DPRMFSLAQGSTLPRRSG

SEQ ID NO: 65401 - protein, 18 aa, Artificial Sequence
  Description of Artificial Sequence: Synthetic peptide
  Seed: DPRMCSLMQGSTLPRRSG
DPRMFSLAQSSTLPRRSG

SEQ ID NO: 65402 - protein, 18 aa, Artificial Sequence
  Description of Artificial Sequence: Synthetic peptide
  Seed: DPRMCSLMQGSTLPRRSG
DPRMFSLIQASTAPRRSG

SEQ ID NO: 65403 - protein, 18 aa, Artificial Sequence
  Description of Artificial Sequence: Synthetic peptide
  Seed: DPRMCSLMQGSTLPRRSG
DPRMFSLIQASTIPRRSG

SEQ ID NO: 65404 - protein, 18 aa, Artificial Sequence
  Description of Artificial Sequence: Synthetic peptide
  Seed: DPRMCSLMQGSTLPRRSG
DPRMFSLIQASTLPRRSG

SEQ ID NO: 65405 - protein, 18 aa, Artificial Sequence
  Description of Artificial Sequence: Synthetic peptide
  Seed: DPRMCSLMQGSTLPRRSG
DPRMFSLIQASTVPRRSG

SEQ ID NO: 65406 - protein, 18 aa, Artificial Sequence
  Description of Artificial Sequence: Synthetic peptide
  Seed: DPRMCSLMQGSTLPRRSG
DPRMFSLIQGSTAPRRSG

SEQ ID NO: 65407 - protein, 18 aa, Artificial Sequence
  Description of Artificial Sequence: Synthetic peptide
  Seed: DPRMCSLMQGSTLPRRSG
DPRMFSLIQGSTIPRRSG

SEQ ID NO: 65408 - protein, 18 aa, Artificial Sequence
  Description of Artificial Sequence: Synthetic peptide
  Seed: DPRMCSLMQGSTLPRRSG
DPRMFSLIQGSTLPRRSG

SEQ ID NO: 65409 - protein, 18 aa, Artificial Sequence
  Description of Artificial Sequence: Synthetic peptide
  Seed: DPRMCSLMQGSTLPRRSG
DPRMFSLIQGSTVPRRSG

SEQ ID NO: 65410 - protein, 18 aa, Artificial Sequence
  Description of Artificial Sequence: Synthetic peptide
  Seed: DPRMCSLMQGSTLPRRSG
DPRMFSLIQPSTLPRRSG

SEQ ID NO: 65411 - protein, 18 aa, Artificial Sequence
  Description of Artificial Sequence: Synthetic peptide
  Seed: DPRMCSLMQGSTLPRRSG
DPRMFSLIQPSTVPRRSG

SEQ ID NO: 65412 - protein, 18 aa, Artificial Sequence
  Description of Artificial Sequence: Synthetic peptide
  Seed: DPRMCSLMQGSTLPRRSG
DPRMFSLIQSSTAPRRSG

SEQ ID NO: 65413 - protein, 18 aa, Artificial Sequence
  Description of Artificial Sequence: Synthetic peptide
  Seed: DPRMCSLMQGSTLPRRSG
DPRMFSLIQSSTIPRRSG

SEQ ID NO: 65414 - protein, 18 aa, Artificial Sequence
  Description of Artificial Sequence: Synthetic peptide
  Seed: DPRMCSLMQGSTLPRRSG
DPRMFSLIQSSTLPRRSG

SEQ ID NO: 65415 - protein, 18 aa, Artificial Sequence
  Description of Artificial Sequence: Synthetic peptide
  Seed: DPRMCSLMQGSTLPRRSG
DPRMFSLIQSSTVPRRSG

SEQ ID NO: 65416 - protein, 18 aa, Artificial Sequence
  Description of Artificial Sequence: Synthetic peptide
  Seed: DPRMCSLMQGSTLPRRSG
DPRMFSLLQASTAPRRSG

SEQ ID NO: 65417 - protein, 18 aa, Artificial Sequence
  Description of Artificial Sequence: Synthetic peptide
  Seed: DPRMCSLMQGSTLPRRSG
DPRMFSLLQASTIPRRSG

SEQ ID NO: 65418 - protein, 18 aa, Artificial Sequence
  Description of Artificial Sequence: Synthetic peptide
  Seed: DPRMCSLMQGSTLPRRSG
DPRMFSLLQASTLPRRSG

SEQ ID NO: 65419 - protein, 18 aa, Artificial Sequence
  Description of Artificial Sequence: Synthetic peptide
  Seed: DPRMCSLMQGSTLPRRSG
DPRMFSLLQASTMPRRSG

SEQ ID NO: 65420 - protein, 18 aa, Artificial Sequence
  Description of Artificial Sequence: Synthetic peptide
  Seed: DPRMCSLMQGSTLPRRSG
DPRMFSLLQASTSPRRSG

SEQ ID NO: 65421 - protein, 18 aa, Artificial Sequence
  Description of Artificial Sequence: Synthetic peptide
  Seed: DPRMCSLMQGSTLPRRSG
DPRMFSLLQASTTPRRSG

SEQ ID NO: 65422 - protein, 18 aa, Artificial Sequence
  Description of Artificial Sequence: Synthetic peptide
  Seed: DPRMCSLMQGSTLPRRSG
DPRMFSLLQASTVPRRSG

SEQ ID NO: 65423 - protein, 18 aa, Artificial Sequence
  Description of Artificial Sequence: Synthetic peptide
  Seed: DPRMCSLMQGSTLPRRSG
DPRMFSLLQGSTAPRRSG

SEQ ID NO: 65424 - protein, 18 aa, Artificial Sequence
  Description of Artificial Sequence: Synthetic peptide
  Seed: DPRMCSLMQGSTLPRRSG
DPRMFSLLQGSTIPRRSG

SEQ ID NO: 65425 - protein, 18 aa, Artificial Sequence
  Description of Artificial Sequence: Synthetic peptide
  Seed: DPRMCSLMQGSTLPRRSG
DPRMFSLLQGSTLPRRSG

SEQ ID NO: 65426 - protein, 18 aa, Artificial Sequence
  Description of Artificial Sequence: Synthetic peptide
  Seed: DPRMCSLMQGSTLPRRSG
DPRMFSLLQGSTMPRRSG

SEQ ID NO: 65427 - protein, 18 aa, Artificial Sequence
  Description of Artificial Sequence: Synthetic peptide
  Seed: DPRMCSLMQGSTLPRRSG
DPRMFSLLQGSTSPRRSG

SEQ ID NO: 65428 - protein, 18 aa, Artificial Sequence
  Description of Artificial Sequence: Synthetic peptide
  Seed: DPRMCSLMQGSTLPRRSG
DPRMFSLLQGSTTPRRSG

SEQ ID NO: 65429 - protein, 18 aa, Artificial Sequence
  Description of Artificial Sequence: Synthetic peptide
  Seed: DPRMCSLMQGSTLPRRSG
DPRMFSLLQGSTVPRRSG

SEQ ID NO: 65430 - protein, 18 aa, Artificial Sequence
  Description of Artificial Sequence: Synthetic peptide
  Seed: DPRMCSLMQGSTLPRRSG
DPRMFSLLQNSTAPRRSG

SEQ ID NO: 65431 - protein, 18 aa, Artificial Sequence
  Description of Artificial Sequence: Synthetic peptide
  Seed: DPRMCSLMQGSTLPRRSG
DPRMFSLLQNSTIPRRSG

SEQ ID NO: 65432 - protein, 18 aa, Artificial Sequence
  Description of Artificial Sequence: Synthetic peptide
  Seed: DPRMCSLMQGSTLPRRSG
DPRMFSLLQNSTLPRRSG

SEQ ID NO: 65433 - protein, 18 aa, Artificial Sequence
  Description of Artificial Sequence: Synthetic peptide
  Seed: DPRMCSLMQGSTLPRRSG
DPRMFSLLQNSTVPRRSG

SEQ ID NO: 65434 - protein, 18 aa, Artificial Sequence
  Description of Artificial Sequence: Synthetic peptide
  Seed: DPRMCSLMQGSTLPRRSG
DPRMFSLLQPSTAPRRSG

SEQ ID NO: 65435 - protein, 18 aa, Artificial Sequence
  Description of Artificial Sequence: Synthetic peptide
  Seed: DPRMCSLMQGSTLPRRSG
DPRMFSLLQPSTIPRRSG

SEQ ID NO: 65436 - protein, 18 aa, Artificial Sequence
  Description of Artificial Sequence: Synthetic peptide
  Seed: DPRMCSLMQGSTLPRRSG
DPRMFSLLQPSTLPRRSG

SEQ ID NO: 65437 - protein, 18 aa, Artificial Sequence
  Description of Artificial Sequence: Synthetic peptide
  Seed: DPRMCSLMQGSTLPRRSG
DPRMFSLLQPSTMPRRSG

SEQ ID NO: 65438 - protein, 18 aa, Artificial Sequence
  Description of Artificial Sequence: Synthetic peptide
  Seed: DPRMCSLMQGSTLPRRSG
DPRMFSLLQPSTVPRRSG

SEQ ID NO: 65439 - protein, 18 aa, Artificial Sequence
  Description of Artificial Sequence: Synthetic peptide
  Seed: DPRMCSLMQGSTLPRRSG
DPRMFSLLQSSTAPRRSG

SEQ ID NO: 65440 - protein, 18 aa, Artificial Sequence
  Description of Artificial Sequence: Synthetic peptide
  Seed: DPRMCSLMQGSTLPRRSG
DPRMFSLLQSSTIPRRSG

SEQ ID NO: 65441 - protein, 18 aa, Artificial Sequence
  Description of Artificial Sequence: Synthetic peptide
  Seed: DPRMCSLMQGSTLPRRSG
DPRMFSLLQSSTLPRRSG

SEQ ID NO: 65442 - protein, 18 aa, Artificial Sequence
  Description of Artificial Sequence: Synthetic peptide
  Seed: DPRMCSLMQGSTLPRRSG
DPRMFSLLQSSTMPRRSG

SEQ ID NO: 65443 - protein, 18 aa, Artificial Sequence
  Description of Artificial Sequence: Synthetic peptide
  Seed: DPRMCSLMQGSTLPRRSG
DPRMFSLLQSSTSPRRSG

SEQ ID NO: 65444 - protein, 18 aa, Artificial Sequence
  Description of Artificial Sequence: Synthetic peptide
  Seed: DPRMCSLMQGSTLPRRSG
DPRMFSLLQSSTTPRRSG

SEQ ID NO: 65445 - protein, 18 aa, Artificial Sequence
  Description of Artificial Sequence: Synthetic peptide
  Seed: DPRMCSLMQGSTLPRRSG
DPRMFSLLQSSTVPRRSG

SEQ ID NO: 65446 - protein, 18 aa, Artificial Sequence
  Description of Artificial Sequence: Synthetic peptide
  Seed: DPRMCSLMQGSTLPRRSG
DPRMFSLLQTSTAPRRSG

SEQ ID NO: 65447 - protein, 18 aa, Artificial Sequence
  Description of Artificial Sequence: Synthetic peptide
  Seed: DPRMCSLMQGSTLPRRSG
DPRMFSLLQTSTIPRRSG

SEQ ID NO: 65448 - protein, 18 aa, Artificial Sequence
  Description of Artificial Sequence: Synthetic peptide
  Seed: DPRMCSLMQGSTLPRRSG
DPRMFSLLQTSTLPRRSG

SEQ ID NO: 65449 - protein, 18 aa, Artificial Sequence
  Description of Artificial Sequence: Synthetic peptide
  Seed: DPRMCSLMQGSTLPRRSG
DPRMFSLLQTSTVPRRSG

SEQ ID NO: 65450 - protein, 18 aa, Artificial Sequence
  Description of Artificial Sequence: Synthetic peptide
  Seed: DPRMCSLMQGSTLPRRSG
DPRMFSLMQASTAPRRSG

SEQ ID NO: 65451 - protein, 18 aa, Artificial Sequence
  Description of Artificial Sequence: Synthetic peptide
  Seed: DPRMCSLMQGSTLPRRSG
DPRMFSLMQASTIPRRSG

SEQ ID NO: 65452 - protein, 18 aa, Artificial Sequence
  Description of Artificial Sequence: Synthetic peptide
  Seed: DPRMCSLMQGSTLPRRSG
DPRMFSLMQASTLPRRSG

SEQ ID NO: 65453 - protein, 18 aa, Artificial Sequence
  Description of Artificial Sequence: Synthetic peptide
  Seed: DPRMCSLMQGSTLPRRSG
DPRMFSLMQASTMPRRSG

SEQ ID NO: 65454 - protein, 18 aa, Artificial Sequence
  Description of Artificial Sequence: Synthetic peptide
  Seed: DPRMCSLMQGSTLPRRSG
DPRMFSLMQASTSPRRSG

SEQ ID NO: 65455 - protein, 18 aa, Artificial Sequence
  Description of Artificial Sequence: Synthetic peptide
  Seed: DPRMCSLMQGSTLPRRSG
DPRMFSLMQASTTPRRSG

SEQ ID NO: 65456 - protein, 18 aa, Artificial Sequence
  Description of Artificial Sequence: Synthetic peptide
  Seed: DPRMCSLMQGSTLPRRSG
DPRMFSLMQASTVPRRSG

SEQ ID NO: 65457 - protein, 18 aa, Artificial Sequence
  Description of Artificial Sequence: Synthetic peptide
  Seed: DPRMCSLMQGSTLPRRSG
DPRMFSLMQGSTAPRRSG

SEQ ID NO: 65458 - protein, 18 aa, Artificial Sequence
  Description of Artificial Sequence: Synthetic peptide
  Seed: DPRMCSLMQGSTLPRRSG
DPRMFSLMQGSTIPRRSG

SEQ ID NO: 65459 - protein, 18 aa, Artificial Sequence
  Description of Artificial Sequence: Synthetic peptide
  Seed: DPRMCSLMQGSTLPRRSG
DPRMFSLMQGSTLPRRSG

SEQ ID NO: 65460 - protein, 18 aa, Artificial Sequence
  Description of Artificial Sequence: Synthetic peptide
  Seed: DPRMCSLMQGSTLPRRSG
DPRMFSLMQGSTMPRRSG

SEQ ID NO: 65461 - protein, 18 aa, Artificial Sequence
  Description of Artificial Sequence: Synthetic peptide
  Seed: DPRMCSLMQGSTLPRRSG
DPRMFSLMQGSTSPRRSG

SEQ ID NO: 65462 - protein, 18 aa, Artificial Sequence
  Description of Artificial Sequence: Synthetic peptide
  Seed: DPRMCSLMQGSTLPRRSG
DPRMFSLMQGSTTPRRSG

SEQ ID NO: 65463 - protein, 18 aa, Artificial Sequence
  Description of Artificial Sequence: Synthetic peptide
  Seed: DPRMCSLMQGSTLPRRSG
DPRMFSLMQGSTVPRRSG

SEQ ID NO: 65464 - protein, 18 aa, Artificial Sequence
  Description of Artificial Sequence: Synthetic peptide
  Seed: DPRMCSLMQGSTLPRRSG
DPRMFSLMQNSTIPRRSG

SEQ ID NO: 65465 - protein, 18 aa, Artificial Sequence
  Description of Artificial Sequence: Synthetic peptide
  Seed: DPRMCSLMQGSTLPRRSG
DPRMFSLMQNSTLPRRSG

SEQ ID NO: 65466 - protein, 18 aa, Artificial Sequence
  Description of Artificial Sequence: Synthetic peptide
  Seed: DPRMCSLMQGSTLPRRSG
DPRMFSLMQNSTVPRRSG

SEQ ID NO: 65467 - protein, 18 aa, Artificial Sequence
  Description of Artificial Sequence: Synthetic peptide
  Seed: DPRMCSLMQGSTLPRRSG
DPRMFSLMQPSTAPRRSG

SEQ ID NO: 65468 - protein, 18 aa, Artificial Sequence
  Description of Artificial Sequence: Synthetic peptide
  Seed: DPRMCSLMQGSTLPRRSG
DPRMFSLMQPSTIPRRSG

SEQ ID NO: 65469 - protein, 18 aa, Artificial Sequence
  Description of Artificial Sequence: Synthetic peptide
  Seed: DPRMCSLMQGSTLPRRSG
DPRMFSLMQPSTLPRRSG

SEQ ID NO: 65470 - protein, 18 aa, Artificial Sequence
  Description of Artificial Sequence: Synthetic peptide
  Seed: DPRMCSLMQGSTLPRRSG
DPRMFSLMQPSTVPRRSG

SEQ ID NO: 65471 - protein, 18 aa, Artificial Sequence
  Description of Artificial Sequence: Synthetic peptide
  Seed: DPRMCSLMQGSTLPRRSG
DPRMFSLMQSSTAPRRSG

SEQ ID NO: 65472 - protein, 18 aa, Artificial Sequence
  Description of Artificial Sequence: Synthetic peptide
  Seed: DPRMCSLMQGSTLPRRSG
DPRMFSLMQSSTIPRRSG

SEQ ID NO: 65473 - protein, 18 aa, Artificial Sequence
  Description of Artificial Sequence: Synthetic peptide
  Seed: DPRMCSLMQGSTLPRRSG
DPRMFSLMQSSTLPRRSG

SEQ ID NO: 65474 - protein, 18 aa, Artificial Sequence
  Description of Artificial Sequence: Synthetic peptide
  Seed: DPRMCSLMQGSTLPRRSG
DPRMFSLMQSSTMPRRSG

SEQ ID NO: 65475 - protein, 18 aa, Artificial Sequence
  Description of Artificial Sequence: Synthetic peptide
  Seed: DPRMCSLMQGSTLPRRSG
DPRMFSLMQSSTTPRRSG

SEQ ID NO: 65476 - protein, 18 aa, Artificial Sequence
  Description of Artificial Sequence: Synthetic peptide
  Seed: DPRMCSLMQGSTLPRRSG
DPRMFSLMQSSTVPRRSG

SEQ ID NO: 65477 - protein, 18 aa, Artificial Sequence
  Description of Artificial Sequence: Synthetic peptide
  Seed: DPRMCSLMQGSTLPRRSG
DPRMFSLMQTSTIPRRSG

SEQ ID NO: 65478 - protein, 18 aa, Artificial Sequence
  Description of Artificial Sequence: Synthetic peptide
  Seed: DPRMCSLMQGSTLPRRSG
DPRMFSLMQTSTLPRRSG

SEQ ID NO: 65479 - protein, 18 aa, Artificial Sequence
  Description of Artificial Sequence: Synthetic peptide
  Seed: DPRMCSLMQGSTLPRRSG
DPRMFSLMQTSTVPRRSG

SEQ ID NO: 65480 - protein, 18 aa, Artificial Sequence
  Description of Artificial Sequence: Synthetic peptide
  Seed: DPRMCSLMQGSTLPRRSG
DPRMFSLQQASTLPRRSG

SEQ ID NO: 65481 - protein, 18 aa, Artificial Sequence
  Description of Artificial Sequence: Synthetic peptide
  Seed: DPRMCSLMQGSTLPRRSG
DPRMFSLVQASTLPRRSG

SEQ ID NO: 65482 - protein, 18 aa, Artificial Sequence
  Description of Artificial Sequence: Synthetic peptide
  Seed: DPRMCSLMQGSTLPRRSG
DPRMFSLVQASTVPRRSG

SEQ ID NO: 65483 - protein, 18 aa, Artificial Sequence
  Description of Artificial Sequence: Synthetic peptide
  Seed: DPRMCSLMQGSTLPRRSG
DPRMFSLVQGSTLPRRSG

SEQ ID NO: 65484 - protein, 18 aa, Artificial Sequence
  Description of Artificial Sequence: Synthetic peptide
  Seed: DPRMCSLMQGSTLPRRSG
DPRMISLLQASTLPRRSG

SEQ ID NO: 65485 - protein, 18 aa, Artificial Sequence
  Description of Artificial Sequence: Synthetic peptide
  Seed: DPRMCSLMQGSTLPRRSG
DPRMISLLQGSTLPRRSG

SEQ ID NO: 65486 - protein, 18 aa, Artificial Sequence
  Description of Artificial Sequence: Synthetic peptide
  Seed: DPRMCSLMQGSTLPRRSG
DPRMISLMQASTLPRRSG

SEQ ID NO: 65487 - protein, 18 aa, Artificial Sequence
  Description of Artificial Sequence: Synthetic peptide
  Seed: DPRMCSLMQGSTLPRRSG
DPRMISLMQGSTLPRRSG

SEQ ID NO: 65488 - protein, 18 aa, Artificial Sequence
  Description of Artificial Sequence: Synthetic peptide
  Seed: DPRMCSLMQGSTLPRRSG
DPRMWSLLQASTLPRRSG

SEQ ID NO: 65489 - protein, 18 aa, Artificial Sequence
  Description of Artificial Sequence: Synthetic peptide
  Seed: DPRMCSLMQGSTLPRRSG
DPRMWSLLQASTVPRRSG

SEQ ID NO: 65490 - protein, 18 aa, Artificial Sequence
  Description of Artificial Sequence: Synthetic peptide
  Seed: DPRMCSLMQGSTLPRRSG
DPRMWSLLQGSTAPRRSG

SEQ ID NO: 65491 - protein, 18 aa, Artificial Sequence
  Description of Artificial Sequence: Synthetic peptide
  Seed: DPRMCSLMQGSTLPRRSG
DPRMWSLLQGSTIPRRSG

SEQ ID NO: 65492 - protein, 18 aa, Artificial Sequence
  Description of Artificial Sequence: Synthetic peptide
  Seed: DPRMCSLMQGSTLPRRSG
DPRMWSLLQGSTLPRRSG

SEQ ID NO: 65493 - protein, 18 aa, Artificial Sequence
  Description of Artificial Sequence: Synthetic peptide
  Seed: DPRMCSLMQGSTLPRRSG
DPRMWSLLQGSTVPRRSG

SEQ ID NO: 65494 - protein, 18 aa, Artificial Sequence
  Description of Artificial Sequence: Synthetic peptide
  Seed: DPRMCSLMQGSTLPRRSG
DPRMWSLLQSSTLPRRSG

SEQ ID NO: 65495 - protein, 18 aa, Artificial Sequence
  Description of Artificial Sequence: Synthetic peptide
  Seed: DPRMCSLMQGSTLPRRSG
DPRMWSLLQSSTVPRRSG

SEQ ID NO: 65496 - protein, 18 aa, Artificial Sequence
  Description of Artificial Sequence: Synthetic peptide
  Seed: DPRMCSLMQGSTLPRRSG
DPRMWSLMQASTLPRRSG

SEQ ID NO: 65497 - protein, 18 aa, Artificial Sequence
  Description of Artificial Sequence: Synthetic peptide
  Seed: DPRMCSLMQGSTLPRRSG
DPRMWSLMQASTVPRRSG

SEQ ID NO: 65498 - protein, 18 aa, Artificial Sequence
  Description of Artificial Sequence: Synthetic peptide
  Seed: DPRMCSLMQGSTLPRRSG
DPRMWSLMQGSTIPRRSG

SEQ ID NO: 65499 - protein, 18 aa, Artificial Sequence
  Description of Artificial Sequence: Synthetic peptide
  Seed: DPRMCSLMQGSTLPRRSG
DPRMWSLMQGSTLPRRSG

SEQ ID NO: 65500 - protein, 18 aa, Artificial Sequence
  Description of Artificial Sequence: Synthetic peptide
  Seed: DPRMCSLMQGSTLPRRSG
DPRMWSLMQGSTVPRRSG

SEQ ID NO: 65501 - protein, 18 aa, Artificial Sequence
  Description of Artificial Sequence: Synthetic peptide
  Seed: DPRMCSLMQGSTLPRRSG
DPRMWSLMQSSTLPRRSG

SEQ ID NO: 65502 - protein, 18 aa, Artificial Sequence
  Description of Artificial Sequence: Synthetic peptide
  Seed: DPRMCSLMQGSTLPRRSG
DPRMWSLMQSSTVPRRSG

SEQ ID NO: 65503 - protein, 18 aa, Artificial Sequence
  Description of Artificial Sequence: Synthetic peptide
  Seed: DPRMCSLMQGSTLPRRSG
DPRMYSLIQASTAPRRSG

SEQ ID NO: 65504 - protein, 18 aa, Artificial Sequence
  Description of Artificial Sequence: Synthetic peptide
  Seed: DPRMCSLMQGSTLPRRSG
DPRMYSLIQASTIPRRSG

SEQ ID NO: 65505 - protein, 18 aa, Artificial Sequence
  Description of Artificial Sequence: Synthetic peptide
  Seed: DPRMCSLMQGSTLPRRSG
DPRMYSLIQASTLPRRSG

SEQ ID NO: 65506 - protein, 18 aa, Artificial Sequence
  Description of Artificial Sequence: Synthetic peptide
  Seed: DPRMCSLMQGSTLPRRSG
DPRMYSLIQASTVPRRSG

SEQ ID NO: 65507 - protein, 18 aa, Artificial Sequence
  Description of Artificial Sequence: Synthetic peptide
  Seed: DPRMCSLMQGSTLPRRSG
DPRMYSLIQGSTLPRRSG

SEQ ID NO: 65508 - protein, 18 aa, Artificial Sequence
  Description of Artificial Sequence: Synthetic peptide
  Seed: DPRMCSLMQGSTLPRRSG
DPRMYSLIQGSTVPRRSG

SEQ ID NO: 65509 - protein, 18 aa, Artificial Sequence
  Description of Artificial Sequence: Synthetic peptide
  Seed: DPRMCSLMQGSTLPRRSG
DPRMYSLLQASTAPRRSG

SEQ ID NO: 65510 - protein, 18 aa, Artificial Sequence
  Description of Artificial Sequence: Synthetic peptide
  Seed: DPRMCSLMQGSTLPRRSG
DPRMYSLLQASTIPRRSG

SEQ ID NO: 65511 - protein, 18 aa, Artificial Sequence
  Description of Artificial Sequence: Synthetic peptide
  Seed: DPRMCSLMQGSTLPRRSG
DPRMYSLLQASTLPRRSG

SEQ ID NO: 65512 - protein, 18 aa, Artificial Sequence
  Description of Artificial Sequence: Synthetic peptide
  Seed: DPRMCSLMQGSTLPRRSG
DPRMYSLLQASTMPRRSG

SEQ ID NO: 65513 - protein, 18 aa, Artificial Sequence
  Description of Artificial Sequence: Synthetic peptide
  Seed: DPRMCSLMQGSTLPRRSG
DPRMYSLLQASTTPRRSG

SEQ ID NO: 65514 - protein, 18 aa, Artificial Sequence
  Description of Artificial Sequence: Synthetic peptide
  Seed: DPRMCSLMQGSTLPRRSG
DPRMYSLLQASTVPRRSG

SEQ ID NO: 65515 - protein, 18 aa, Artificial Sequence
  Description of Artificial Sequence: Synthetic peptide
  Seed: DPRMCSLMQGSTLPRRSG
DPRMYSLLQGSTAPRRSG

SEQ ID NO: 65516 - protein, 18 aa, Artificial Sequence
  Description of Artificial Sequence: Synthetic peptide
  Seed: DPRMCSLMQGSTLPRRSG
DPRMYSLLQGSTIPRRSG

SEQ ID NO: 65517 - protein, 18 aa, Artificial Sequence
  Description of Artificial Sequence: Synthetic peptide
  Seed: DPRMCSLMQGSTLPRRSG
DPRMYSLLQGSTLPRRSG

SEQ ID NO: 65518 - protein, 18 aa, Artificial Sequence
  Description of Artificial Sequence: Synthetic peptide
  Seed: DPRMCSLMQGSTLPRRSG
DPRMYSLLQGSTMPRRSG

SEQ ID NO: 65519 - protein, 18 aa, Artificial Sequence
  Description of Artificial Sequence: Synthetic peptide
  Seed: DPRMCSLMQGSTLPRRSG
DPRMYSLLQGSTVPRRSG

SEQ ID NO: 65520 - protein, 18 aa, Artificial Sequence
  Description of Artificial Sequence: Synthetic peptide
  Seed: DPRMCSLMQGSTLPRRSG
DPRMYSLLQPSTIPRRSG

SEQ ID NO: 65521 - protein, 18 aa, Artificial Sequence
  Description of Artificial Sequence: Synthetic peptide
  Seed: DPRMCSLMQGSTLPRRSG
DPRMYSLLQPSTLPRRSG

SEQ ID NO: 65522 - protein, 18 aa, Artificial Sequence
  Description of Artificial Sequence: Synthetic peptide
  Seed: DPRMCSLMQGSTLPRRSG
DPRMYSLLQPSTVPRRSG

SEQ ID NO: 65523 - protein, 18 aa, Artificial Sequence
  Description of Artificial Sequence: Synthetic peptide
  Seed: DPRMCSLMQGSTLPRRSG
DPRMYSLLQSSTAPRRSG

SEQ ID NO: 65524 - protein, 18 aa, Artificial Sequence
  Description of Artificial Sequence: Synthetic peptide
  Seed: DPRMCSLMQGSTLPRRSG
DPRMYSLLQSSTIPRRSG

SEQ ID NO: 65525 - protein, 18 aa, Artificial Sequence
  Description of Artificial Sequence: Synthetic peptide
  Seed: DPRMCSLMQGSTLPRRSG
DPRMYSLLQSSTLPRRSG

SEQ ID NO: 65526 - protein, 18 aa, Artificial Sequence
  Description of Artificial Sequence: Synthetic peptide
  Seed: DPRMCSLMQGSTLPRRSG
DPRMYSLLQSSTVPRRSG

SEQ ID NO: 65527 - protein, 18 aa, Artificial Sequence
  Description of Artificial Sequence: Synthetic peptide
  Seed: DPRMCSLMQGSTLPRRSG
DPRMYSLMQASTAPRRSG

SEQ ID NO: 65528 - protein, 18 aa, Artificial Sequence
  Description of Artificial Sequence: Synthetic peptide
  Seed: DPRMCSLMQGSTLPRRSG
DPRMYSLMQASTIPRRSG

SEQ ID NO: 65529 - protein, 18 aa, Artificial Sequence
  Description of Artificial Sequence: Synthetic peptide
  Seed: DPRMCSLMQGSTLPRRSG
DPRMYSLMQASTLPRRSG

SEQ ID NO: 65530 - protein, 18 aa, Artificial Sequence
  Description of Artificial Sequence: Synthetic peptide
  Seed: DPRMCSLMQGSTLPRRSG
DPRMYSLMQASTMPRRSG

SEQ ID NO: 65531 - protein, 18 aa, Artificial Sequence
  Description of Artificial Sequence: Synthetic peptide
  Seed: DPRMCSLMQGSTLPRRSG
DPRMYSLMQASTVPRRSG

SEQ ID NO: 65532 - protein, 18 aa, Artificial Sequence
  Description of Artificial Sequence: Synthetic peptide
  Seed: DPRMCSLMQGSTLPRRSG
DPRMYSLMQGSTAPRRSG

SEQ ID NO: 65533 - protein, 18 aa, Artificial Sequence
  Description of Artificial Sequence: Synthetic peptide
  Seed: DPRMCSLMQGSTLPRRSG
DPRMYSLMQGSTIPRRSG

SEQ ID NO: 65534 - protein, 18 aa, Artificial Sequence
  Description of Artificial Sequence: Synthetic peptide
  Seed: DPRMCSLMQGSTLPRRSG
DPRMYSLMQGSTLPRRSG

SEQ ID NO: 65535 - protein, 18 aa, Artificial Sequence
  Description of Artificial Sequence: Synthetic peptide
  Seed: DPRMCSLMQGSTLPRRSG
DPRMYSLMQGSTMPRRSG

SEQ ID NO: 65536 - protein, 18 aa, Artificial Sequence
  Description of Artificial Sequence: Synthetic peptide
  Seed: DPRMCSLMQGSTLPRRSG
DPRMYSLMQGSTVPRRSG

SEQ ID NO: 65537 - protein, 18 aa, Artificial Sequence
  Description of Artificial Sequence: Synthetic peptide
  Seed: DPRMCSLMQGSTLPRRSG
DPRMYSLMQPSTIPRRSG

SEQ ID NO: 65538 - protein, 18 aa, Artificial Sequence
  Description of Artificial Sequence: Synthetic peptide
  Seed: DPRMCSLMQGSTLPRRSG
DPRMYSLMQPSTLPRRSG

SEQ ID NO: 65539 - protein, 18 aa, Artificial Sequence
  Description of Artificial Sequence: Synthetic peptide
  Seed: DPRMCSLMQGSTLPRRSG
DPRMYSLMQPSTVPRRSG

SEQ ID NO: 65540 - protein, 18 aa, Artificial Sequence
  Description of Artificial Sequence: Synthetic peptide
  Seed: DPRMCSLMQGSTLPRRSG
DPRMYSLMQSSTAPRRSG

SEQ ID NO: 65541 - protein, 18 aa, Artificial Sequence
  Description of Artificial Sequence: Synthetic peptide
  Seed: DPRMCSLMQGSTLPRRSG
DPRMYSLMQSSTIPRRSG

SEQ ID NO: 65542 - protein, 18 aa, Artificial Sequence
  Description of Artificial Sequence: Synthetic peptide
  Seed: DPRMCSLMQGSTLPRRSG
DPRMYSLMQSSTLPRRSG

SEQ ID NO: 65543 - protein, 18 aa, Artificial Sequence
  Description of Artificial Sequence: Synthetic peptide
  Seed: DPRMCSLMQGSTLPRRSG
DPRMYSLMQSSTVPRRSG

SEQ ID NO: 65544 - protein, 19 aa, Artificial Sequence
  Description of Artificial Sequence: Synthetic peptide
  Seed: DPRMCSLMQGSTLPRRSGA
DPRMFSLAQASTAPRRSGA

SEQ ID NO: 65545 - protein, 19 aa, Artificial Sequence
  Description of Artificial Sequence: Synthetic peptide
  Seed: DPRMCSLMQGSTLPRRSGA
DPRMFSLAQASTFPRRSGA

SEQ ID NO: 65546 - protein, 19 aa, Artificial Sequence
  Description of Artificial Sequence: Synthetic peptide
  Seed: DPRMCSLMQGSTLPRRSGA
DPRMFSLAQASTGPRRSGA

SEQ ID NO: 65547 - protein, 19 aa, Artificial Sequence
  Description of Artificial Sequence: Synthetic peptide
  Seed: DPRMCSLMQGSTLPRRSGA
DPRMFSLAQASTHPRRSGA

SEQ ID NO: 65548 - protein, 19 aa, Artificial Sequence
  Description of Artificial Sequence: Synthetic peptide
  Seed: DPRMCSLMQGSTLPRRSGA
DPRMFSLAQASTIPRRSGA

SEQ ID NO: 65549 - protein, 19 aa, Artificial Sequence
  Description of Artificial Sequence: Synthetic peptide
  Seed: DPRMCSLMQGSTLPRRSGA
DPRMFSLAQASTLPRRSGA

SEQ ID NO: 65550 - protein, 19 aa, Artificial Sequence
  Description of Artificial Sequence: Synthetic peptide
  Seed: DPRMCSLMQGSTLPRRSGA
DPRMFSLAQASTMPRRSGA

SEQ ID NO: 65551 - protein, 19 aa, Artificial Sequence
  Description of Artificial Sequence: Synthetic peptide
  Seed: DPRMCSLMQGSTLPRRSGA
DPRMFSLAQASTNPRRSGA

SEQ ID NO: 65552 - protein, 19 aa, Artificial Sequence
  Description of Artificial Sequence: Synthetic peptide
  Seed: DPRMCSLMQGSTLPRRSGA
DPRMFSLAQASTQPRRSGA

SEQ ID NO: 65553 - protein, 19 aa, Artificial Sequence
  Description of Artificial Sequence: Synthetic peptide
  Seed: DPRMCSLMQGSTLPRRSGA
DPRMFSLAQASTSPRRSGA

SEQ ID NO: 65554 - protein, 19 aa, Artificial Sequence
  Description of Artificial Sequence: Synthetic peptide
  Seed: DPRMCSLMQGSTLPRRSGA
DPRMFSLAQASTTPRRSGA

SEQ ID NO: 65555 - protein, 19 aa, Artificial Sequence
  Description of Artificial Sequence: Synthetic peptide
  Seed: DPRMCSLMQGSTLPRRSGA
DPRMFSLAQASTVPRRSGA

SEQ ID NO: 65556 - protein, 19 aa, Artificial Sequence
  Description of Artificial Sequence: Synthetic peptide
  Seed: DPRMCSLMQGSTLPRRSGA
DPRMFSLAQGSTAPRRSGA

SEQ ID NO: 65557 - protein, 19 aa, Artificial Sequence
  Description of Artificial Sequence: Synthetic peptide
  Seed: DPRMCSLMQGSTLPRRSGA
DPRMFSLAQGSTIPRRSGA

SEQ ID NO: 65558 - protein, 19 aa, Artificial Sequence
  Description of Artificial Sequence: Synthetic peptide
  Seed: DPRMCSLMQGSTLPRRSGA
DPRMFSLAQGSTLPRRSGA

SEQ ID NO: 65559 - protein, 19 aa, Artificial Sequence
  Description of Artificial Sequence: Synthetic peptide
  Seed: DPRMCSLMQGSTLPRRSGA
DPRMFSLAQGSTMPRRSGA

SEQ ID NO: 65560 - protein, 19 aa, Artificial Sequence
  Description of Artificial Sequence: Synthetic peptide
  Seed: DPRMCSLMQGSTLPRRSGA
DPRMFSLAQGSTSPRRSGA

SEQ ID NO: 65561 - protein, 19 aa, Artificial Sequence
  Description of Artificial Sequence: Synthetic peptide
  Seed: DPRMCSLMQGSTLPRRSGA
DPRMFSLAQGSTTPRRSGA

SEQ ID NO: 65562 - protein, 19 aa, Artificial Sequence
  Description of Artificial Sequence: Synthetic peptide
  Seed: DPRMCSLMQGSTLPRRSGA
DPRMFSLAQGSTVPRRSGA

SEQ ID NO: 65563 - protein, 19 aa, Artificial Sequence
  Description of Artificial Sequence: Synthetic peptide
  Seed: DPRMCSLMQGSTLPRRSGA
DPRMFSLAQISTAPRRSGA

SEQ ID NO: 65564 - protein, 19 aa, Artificial Sequence
  Description of Artificial Sequence: Synthetic peptide
  Seed: DPRMCSLMQGSTLPRRSGA
DPRMFSLAQISTIPRRSGA

SEQ ID NO: 65565 - protein, 19 aa, Artificial Sequence
  Description of Artificial Sequence: Synthetic peptide
  Seed: DPRMCSLMQGSTLPRRSGA
DPRMFSLAQISTLPRRSGA

SEQ ID NO: 65566 - protein, 19 aa, Artificial Sequence
  Description of Artificial Sequence: Synthetic peptide
  Seed: DPRMCSLMQGSTLPRRSGA
DPRMFSLAQISTMPRRSGA

SEQ ID NO: 65567 - protein, 19 aa, Artificial Sequence
  Description of Artificial Sequence: Synthetic peptide
  Seed: DPRMCSLMQGSTLPRRSGA
DPRMFSLAQISTNPRRSGA

SEQ ID NO: 65568 - protein, 19 aa, Artificial Sequence
  Description of Artificial Sequence: Synthetic peptide
  Seed: DPRMCSLMQGSTLPRRSGA
DPRMFSLAQISTSPRRSGA

SEQ ID NO: 65569 - protein, 19 aa, Artificial Sequence
  Description of Artificial Sequence: Synthetic peptide
  Seed: DPRMCSLMQGSTLPRRSGA
DPRMFSLAQISTTPRRSGA

SEQ ID NO: 65570 - protein, 19 aa, Artificial Sequence
  Description of Artificial Sequence: Synthetic peptide
  Seed: DPRMCSLMQGSTLPRRSGA
DPRMFSLAQISTVPRRSGA

SEQ ID NO: 65571 - protein, 19 aa, Artificial Sequence
  Description of Artificial Sequence: Synthetic peptide
  Seed: DPRMCSLMQGSTLPRRSGA
DPRMFSLAQLSTAPRRSGA

SEQ ID NO: 65572 - protein, 19 aa, Artificial Sequence
  Description of Artificial Sequence: Synthetic peptide
  Seed: DPRMCSLMQGSTLPRRSGA
DPRMFSLAQNSTAPRRSGA

SEQ ID NO: 65573 - protein, 19 aa, Artificial Sequence
  Description of Artificial Sequence: Synthetic peptide
  Seed: DPRMCSLMQGSTLPRRSGA
DPRMFSLAQNSTIPRRSGA

SEQ ID NO: 65574 - protein, 19 aa, Artificial Sequence
  Description of Artificial Sequence: Synthetic peptide
  Seed: DPRMCSLMQGSTLPRRSGA
DPRMFSLAQNSTLPRRSGA

SEQ ID NO: 65575 - protein, 19 aa, Artificial Sequence
  Description of Artificial Sequence: Synthetic peptide
  Seed: DPRMCSLMQGSTLPRRSGA
DPRMFSLAQNSTNPRRSGA

SEQ ID NO: 65576 - protein, 19 aa, Artificial Sequence
  Description of Artificial Sequence: Synthetic peptide
  Seed: DPRMCSLMQGSTLPRRSGA
DPRMFSLAQNSTSPRRSGA

SEQ ID NO: 65577 - protein, 19 aa, Artificial Sequence
  Description of Artificial Sequence: Synthetic peptide
  Seed: DPRMCSLMQGSTLPRRSGA
DPRMFSLAQNSTVPRRSGA

SEQ ID NO: 65578 - protein, 19 aa, Artificial Sequence
  Description of Artificial Sequence: Synthetic peptide
  Seed: DPRMCSLMQGSTLPRRSGA
DPRMFSLAQPSTAPRRSGA

SEQ ID NO: 65579 - protein, 19 aa, Artificial Sequence
  Description of Artificial Sequence: Synthetic peptide
  Seed: DPRMCSLMQGSTLPRRSGA
DPRMFSLAQPSTIPRRSGA

SEQ ID NO: 65580 - protein, 19 aa, Artificial Sequence
  Description of Artificial Sequence: Synthetic peptide
  Seed: DPRMCSLMQGSTLPRRSGA
DPRMFSLAQPSTLPRRSGA

SEQ ID NO: 65581 - protein, 19 aa, Artificial Sequence
  Description of Artificial Sequence: Synthetic peptide
  Seed: DPRMCSLMQGSTLPRRSGA
DPRMFSLAQPSTMPRRSGA

SEQ ID NO: 65582 - protein, 19 aa, Artificial Sequence
  Description of Artificial Sequence: Synthetic peptide
  Seed: DPRMCSLMQGSTLPRRSGA
DPRMFSLAQPSTNPRRSGA

SEQ ID NO: 65583 - protein, 19 aa, Artificial Sequence
  Description of Artificial Sequence: Synthetic peptide
  Seed: DPRMCSLMQGSTLPRRSGA
DPRMFSLAQPSTSPRRSGA

SEQ ID NO: 65584 - protein, 19 aa, Artificial Sequence
  Description of Artificial Sequence: Synthetic peptide
  Seed: DPRMCSLMQGSTLPRRSGA
DPRMFSLAQPSTTPRRSGA

SEQ ID NO: 65585 - protein, 19 aa, Artificial Sequence
  Description of Artificial Sequence: Synthetic peptide
  Seed: DPRMCSLMQGSTLPRRSGA
DPRMFSLAQPSTVPRRSGA

SEQ ID NO: 65586 - protein, 19 aa, Artificial Sequence
  Description of Artificial Sequence: Synthetic peptide
  Seed: DPRMCSLMQGSTLPRRSGA
DPRMFSLAQSSTAPRRSGA

SEQ ID NO: 65587 - protein, 19 aa, Artificial Sequence
  Description of Artificial Sequence: Synthetic peptide
  Seed: DPRMCSLMQGSTLPRRSGA
DPRMFSLAQSSTIPRRSGA

SEQ ID NO: 65588 - protein, 19 aa, Artificial Sequence
  Description of Artificial Sequence: Synthetic peptide
  Seed: DPRMCSLMQGSTLPRRSGA
DPRMFSLAQSSTLPRRSGA

SEQ ID NO: 65589 - protein, 19 aa, Artificial Sequence
  Description of Artificial Sequence: Synthetic peptide
  Seed: DPRMCSLMQGSTLPRRSGA
DPRMFSLAQSSTMPRRSGA

SEQ ID NO: 65590 - protein, 19 aa, Artificial Sequence
  Description of Artificial Sequence: Synthetic peptide
  Seed: DPRMCSLMQGSTLPRRSGA
DPRMFSLAQSSTNPRRSGA

SEQ ID NO: 65591 - protein, 19 aa, Artificial Sequence
  Description of Artificial Sequence: Synthetic peptide
  Seed: DPRMCSLMQGSTLPRRSGA
DPRMFSLAQSSTSPRRSGA

SEQ ID NO: 65592 - protein, 19 aa, Artificial Sequence
  Description of Artificial Sequence: Synthetic peptide
  Seed: DPRMCSLMQGSTLPRRSGA
DPRMFSLAQSSTTPRRSGA

SEQ ID NO: 65593 - protein, 19 aa, Artificial Sequence
  Description of Artificial Sequence: Synthetic peptide
  Seed: DPRMCSLMQGSTLPRRSGA
DPRMFSLAQSSTVPRRSGA

SEQ ID NO: 65594 - protein, 19 aa, Artificial Sequence
  Description of Artificial Sequence: Synthetic peptide
  Seed: DPRMCSLMQGSTLPRRSGA
DPRMFSLAQTSTAPRRSGA

SEQ ID NO: 65595 - protein, 19 aa, Artificial Sequence
  Description of Artificial Sequence: Synthetic peptide
  Seed: DPRMCSLMQGSTLPRRSGA
DPRMFSLAQTSTIPRRSGA

SEQ ID NO: 65596 - protein, 19 aa, Artificial Sequence
  Description of Artificial Sequence: Synthetic peptide
  Seed: DPRMCSLMQGSTLPRRSGA
DPRMFSLAQTSTLPRRSGA

SEQ ID NO: 65597 - protein, 19 aa, Artificial Sequence
  Description of Artificial Sequence: Synthetic peptide
  Seed: DPRMCSLMQGSTLPRRSGA
DPRMFSLAQTSTMPRRSGA

SEQ ID NO: 65598 - protein, 19 aa, Artificial Sequence
  Description of Artificial Sequence: Synthetic peptide
  Seed: DPRMCSLMQGSTLPRRSGA
DPRMFSLAQTSTNPRRSGA

SEQ ID NO: 65599 - protein, 19 aa, Artificial Sequence
  Description of Artificial Sequence: Synthetic peptide
  Seed: DPRMCSLMQGSTLPRRSGA
DPRMFSLAQTSTSPRRSGA

SEQ ID NO: 65600 - protein, 19 aa, Artificial Sequence
  Description of Artificial Sequence: Synthetic peptide
  Seed: DPRMCSLMQGSTLPRRSGA
DPRMFSLAQTSTTPRRSGA

SEQ ID NO: 65601 - protein, 19 aa, Artificial Sequence
  Description of Artificial Sequence: Synthetic peptide
  Seed: DPRMCSLMQGSTLPRRSGA
DPRMFSLAQTSTVPRRSGA

SEQ ID NO: 65602 - protein, 19 aa, Artificial Sequence
  Description of Artificial Sequence: Synthetic peptide
  Seed: DPRMCSLMQGSTLPRRSGA
DPRMFSLAQVSTAPRRSGA

SEQ ID NO: 65603 - protein, 19 aa, Artificial Sequence
  Description of Artificial Sequence: Synthetic peptide
  Seed: DPRMCSLMQGSTLPRRSGA
DPRMFSLAQVSTIPRRSGA

SEQ ID NO: 65604 - protein, 19 aa, Artificial Sequence
  Description of Artificial Sequence: Synthetic peptide
  Seed: DPRMCSLMQGSTLPRRSGA
DPRMFSLAQVSTLPRRSGA

SEQ ID NO: 65605 - protein, 19 aa, Artificial Sequence
  Description of Artificial Sequence: Synthetic peptide
  Seed: DPRMCSLMQGSTLPRRSGA
DPRMFSLAQVSTMPRRSGA

SEQ ID NO: 65606 - protein, 19 aa, Artificial Sequence
  Description of Artificial Sequence: Synthetic peptide
  Seed: DPRMCSLMQGSTLPRRSGA
DPRMFSLAQVSTNPRRSGA

SEQ ID NO: 65607 - protein, 19 aa, Artificial Sequence
  Description of Artificial Sequence: Synthetic peptide
  Seed: DPRMCSLMQGSTLPRRSGA
DPRMFSLAQVSTSPRRSGA

SEQ ID NO: 65608 - protein, 19 aa, Artificial Sequence
  Description of Artificial Sequence: Synthetic peptide
  Seed: DPRMCSLMQGSTLPRRSGA
DPRMFSLAQVSTTPRRSGA

SEQ ID NO: 65609 - protein, 19 aa, Artificial Sequence
  Description of Artificial Sequence: Synthetic peptide
  Seed: DPRMCSLMQGSTLPRRSGA
DPRMFSLAQVSTVPRRSGA

SEQ ID NO: 65610 - protein, 19 aa, Artificial Sequence
  Description of Artificial Sequence: Synthetic peptide
  Seed: DPRMCSLMQGSTLPRRSGA
DPRMFSLCQASTIPRRSGA

SEQ ID NO: 65611 - protein, 19 aa, Artificial Sequence
  Description of Artificial Sequence: Synthetic peptide
  Seed: DPRMCSLMQGSTLPRRSGA
DPRMFSLCQASTLPRRSGA

SEQ ID NO: 65612 - protein, 19 aa, Artificial Sequence
  Description of Artificial Sequence: Synthetic peptide
  Seed: DPRMCSLMQGSTLPRRSGA
DPRMFSLCQASTVPRRSGA

SEQ ID NO: 65613 - protein, 19 aa, Artificial Sequence
  Description of Artificial Sequence: Synthetic peptide
  Seed: DPRMCSLMQGSTLPRRSGA
DPRMFSLEQASTAPRRSGA

SEQ ID NO: 65614 - protein, 19 aa, Artificial Sequence
  Description of Artificial Sequence: Synthetic peptide
  Seed: DPRMCSLMQGSTLPRRSGA
DPRMFSLEQASTIPRRSGA

SEQ ID NO: 65615 - protein, 19 aa, Artificial Sequence
  Description of Artificial Sequence: Synthetic peptide
  Seed: DPRMCSLMQGSTLPRRSGA
DPRMFSLEQASTLPRRSGA

SEQ ID NO: 65616 - protein, 19 aa, Artificial Sequence
  Description of Artificial Sequence: Synthetic peptide
  Seed: DPRMCSLMQGSTLPRRSGA
DPRMFSLEQASTVPRRSGA

SEQ ID NO: 65617 - protein, 19 aa, Artificial Sequence
  Description of Artificial Sequence: Synthetic peptide
  Seed: DPRMCSLMQGSTLPRRSGA
DPRMFSLEQGSTIPRRSGA

SEQ ID NO: 65618 - protein, 19 aa, Artificial Sequence
  Description of Artificial Sequence: Synthetic peptide
  Seed: DPRMCSLMQGSTLPRRSGA
DPRMFSLEQGSTLPRRSGA

SEQ ID NO: 65619 - protein, 19 aa, Artificial Sequence
  Description of Artificial Sequence: Synthetic peptide
  Seed: DPRMCSLMQGSTLPRRSGA
DPRMFSLEQGSTVPRRSGA

SEQ ID NO: 65620 - protein, 19 aa, Artificial Sequence
  Description of Artificial Sequence: Synthetic peptide
  Seed: DPRMCSLMQGSTLPRRSGA
DPRMFSLEQSSTLPRRSGA

SEQ ID NO: 65621 - protein, 19 aa, Artificial Sequence
  Description of Artificial Sequence: Synthetic peptide
  Seed: DPRMCSLMQGSTLPRRSGA
DPRMFSLEQSSTVPRRSGA

SEQ ID NO: 65622 - protein, 19 aa, Artificial Sequence
  Description of Artificial Sequence: Synthetic peptide
  Seed: DPRMCSLMQGSTLPRRSGA
DPRMFSLFQASTAPRRSGA

SEQ ID NO: 65623 - protein, 19 aa, Artificial Sequence
  Description of Artificial Sequence: Synthetic peptide
  Seed: DPRMCSLMQGSTLPRRSGA
DPRMFSLFQASTIPRRSGA

SEQ ID NO: 65624 - protein, 19 aa, Artificial Sequence
  Description of Artificial Sequence: Synthetic peptide
  Seed: DPRMCSLMQGSTLPRRSGA
DPRMFSLFQASTLPRRSGA

SEQ ID NO: 65625 - protein, 19 aa, Artificial Sequence
  Description of Artificial Sequence: Synthetic peptide
  Seed: DPRMCSLMQGSTLPRRSGA
DPRMFSLFQASTNPRRSGA

SEQ ID NO: 65626 - protein, 19 aa, Artificial Sequence
  Description of Artificial Sequence: Synthetic peptide
  Seed: DPRMCSLMQGSTLPRRSGA
DPRMFSLFQASTSPRRSGA

SEQ ID NO: 65627 - protein, 19 aa, Artificial Sequence
  Description of Artificial Sequence: Synthetic peptide
  Seed: DPRMCSLMQGSTLPRRSGA
DPRMFSLFQASTTPRRSGA

SEQ ID NO: 65628 - protein, 19 aa, Artificial Sequence
  Description of Artificial Sequence: Synthetic peptide
  Seed: DPRMCSLMQGSTLPRRSGA
DPRMFSLFQASTVPRRSGA

SEQ ID NO: 65629 - protein, 19 aa, Artificial Sequence
  Description of Artificial Sequence: Synthetic peptide
  Seed: DPRMCSLMQGSTLPRRSGA
DPRMFSLFQGSTAPRRSGA

SEQ ID NO: 65630 - protein, 19 aa, Artificial Sequence
  Description of Artificial Sequence: Synthetic peptide
  Seed: DPRMCSLMQGSTLPRRSGA
DPRMFSLFQGSTIPRRSGA

SEQ ID NO: 65631 - protein, 19 aa, Artificial Sequence
  Description of Artificial Sequence: Synthetic peptide
  Seed: DPRMCSLMQGSTLPRRSGA
DPRMFSLFQGSTLPRRSGA

SEQ ID NO: 65632 - protein, 19 aa, Artificial Sequence
  Description of Artificial Sequence: Synthetic peptide
  Seed: DPRMCSLMQGSTLPRRSGA
DPRMFSLFQGSTVPRRSGA

SEQ ID NO: 65633 - protein, 19 aa, Artificial Sequence
  Description of Artificial Sequence: Synthetic peptide
  Seed: DPRMCSLMQGSTLPRRSGA
DPRMFSLFQPSTAPRRSGA

SEQ ID NO: 65634 - protein, 19 aa, Artificial Sequence
  Description of Artificial Sequence: Synthetic peptide
  Seed: DPRMCSLMQGSTLPRRSGA
DPRMFSLFQPSTNPRRSGA

SEQ ID NO: 65635 - protein, 19 aa, Artificial Sequence
  Description of Artificial Sequence: Synthetic peptide
  Seed: DPRMCSLMQGSTLPRRSGA
DPRMFSLFQPSTSPRRSGA

SEQ ID NO: 65636 - protein, 19 aa, Artificial Sequence
  Description of Artificial Sequence: Synthetic peptide
  Seed: DPRMCSLMQGSTLPRRSGA
DPRMFSLFQSSTAPRRSGA

SEQ ID NO: 65637 - protein, 19 aa, Artificial Sequence
  Description of Artificial Sequence: Synthetic peptide
  Seed: DPRMCSLMQGSTLPRRSGA
DPRMFSLFQSSTVPRRSGA

SEQ ID NO: 65638 - protein, 19 aa, Artificial Sequence
  Description of Artificial Sequence: Synthetic peptide
  Seed: DPRMCSLMQGSTLPRRSGA
DPRMFSLFQTSTAPRRSGA

SEQ ID NO: 65639 - protein, 19 aa, Artificial Sequence
  Description of Artificial Sequence: Synthetic peptide
  Seed: DPRMCSLMQGSTLPRRSGA
DPRMFSLFQVSTAPRRSGA

SEQ ID NO: 65640 - protein, 19 aa, Artificial Sequence
  Description of Artificial Sequence: Synthetic peptide
  Seed: DPRMCSLMQGSTLPRRSGA
DPRMFSLFQVSTNPRRSGA

SEQ ID NO: 65641 - protein, 19 aa, Artificial Sequence
  Description of Artificial Sequence: Synthetic peptide
  Seed: DPRMCSLMQGSTLPRRSGA
DPRMFSLFQVSTSPRRSGA

SEQ ID NO: 65642 - protein, 19 aa, Artificial Sequence
  Description of Artificial Sequence: Synthetic peptide
  Seed: DPRMCSLMQGSTLPRRSGA
DPRMFSLGQASTAPRRSGA

SEQ ID NO: 65643 - protein, 19 aa, Artificial Sequence
  Description of Artificial Sequence: Synthetic peptide
  Seed: DPRMCSLMQGSTLPRRSGA
DPRMFSLGQASTIPRRSGA

SEQ ID NO: 65644 - protein, 19 aa, Artificial Sequence
  Description of Artificial Sequence: Synthetic peptide
  Seed: DPRMCSLMQGSTLPRRSGA
DPRMFSLGQASTLPRRSGA

SEQ ID NO: 65645 - protein, 19 aa, Artificial Sequence
  Description of Artificial Sequence: Synthetic peptide
  Seed: DPRMCSLMQGSTLPRRSGA
DPRMFSLGQASTVPRRSGA

SEQ ID NO: 65646 - protein, 19 aa, Artificial Sequence
  Description of Artificial Sequence: Synthetic peptide
  Seed: DPRMCSLMQGSTLPRRSGA
DPRMFSLGQGSTLPRRSGA

SEQ ID NO: 65647 - protein, 19 aa, Artificial Sequence
  Description of Artificial Sequence: Synthetic peptide
  Seed: DPRMCSLMQGSTLPRRSGA
DPRMFSLGQSSTIPRRSGA

SEQ ID NO: 65648 - protein, 19 aa, Artificial Sequence
  Description of Artificial Sequence: Synthetic peptide
  Seed: DPRMCSLMQGSTLPRRSGA
DPRMFSLGQSSTLPRRSGA

SEQ ID NO: 65649 - protein, 19 aa, Artificial Sequence
  Description of Artificial Sequence: Synthetic peptide
  Seed: DPRMCSLMQGSTLPRRSGA
DPRMFSLGQSSTVPRRSGA

SEQ ID NO: 65650 - protein, 19 aa, Artificial Sequence
  Description of Artificial Sequence: Synthetic peptide
  Seed: DPRMCSLMQGSTLPRRSGA
DPRMFSLIQASTAPRRSGA

SEQ ID NO: 65651 - protein, 19 aa, Artificial Sequence
  Description of Artificial Sequence: Synthetic peptide
  Seed: DPRMCSLMQGSTLPRRSGA
DPRMFSLIQASTCPRRSGA

SEQ ID NO: 65652 - protein, 19 aa, Artificial Sequence
  Description of Artificial Sequence: Synthetic peptide
  Seed: DPRMCSLMQGSTLPRRSGA
DPRMFSLIQASTDPRRSGA

SEQ ID NO: 65653 - protein, 19 aa, Artificial Sequence
  Description of Artificial Sequence: Synthetic peptide
  Seed: DPRMCSLMQGSTLPRRSGA
DPRMFSLIQASTEPRRSGA

SEQ ID NO: 65654 - protein, 19 aa, Artificial Sequence
  Description of Artificial Sequence: Synthetic peptide
  Seed: DPRMCSLMQGSTLPRRSGA
DPRMFSLIQASTFPRRSGA

SEQ ID NO: 65655 - protein, 19 aa, Artificial Sequence
  Description of Artificial Sequence: Synthetic peptide
  Seed: DPRMCSLMQGSTLPRRSGA
DPRMFSLIQASTGPRRSGA

SEQ ID NO: 65656 - protein, 19 aa, Artificial Sequence
  Description of Artificial Sequence: Synthetic peptide
  Seed: DPRMCSLMQGSTLPRRSGA
DPRMFSLIQASTHPRRSGA

SEQ ID NO: 65657 - protein, 19 aa, Artificial Sequence
  Description of Artificial Sequence: Synthetic peptide
  Seed: DPRMCSLMQGSTLPRRSGA
DPRMFSLIQASTIPRRSGA

SEQ ID NO: 65658 - protein, 19 aa, Artificial Sequence
  Description of Artificial Sequence: Synthetic peptide
  Seed: DPRMCSLMQGSTLPRRSGA
DPRMFSLIQASTLPRRSGA

SEQ ID NO: 65659 - protein, 19 aa, Artificial Sequence
  Description of Artificial Sequence: Synthetic peptide
  Seed: DPRMCSLMQGSTLPRRSGA
DPRMFSLIQASTMPRRSGA

SEQ ID NO: 65660 - protein, 19 aa, Artificial Sequence
  Description of Artificial Sequence: Synthetic peptide
  Seed: DPRMCSLMQGSTLPRRSGA
DPRMFSLIQASTNPRRSGA

SEQ ID NO: 65661 - protein, 19 aa, Artificial Sequence
  Description of Artificial Sequence: Synthetic peptide
  Seed: DPRMCSLMQGSTLPRRSGA
DPRMFSLIQASTPPRRSGA

SEQ ID NO: 65662 - protein, 19 aa, Artificial Sequence
  Description of Artificial Sequence: Synthetic peptide
  Seed: DPRMCSLMQGSTLPRRSGA
DPRMFSLIQASTQPRRSGA

SEQ ID NO: 65663 - protein, 19 aa, Artificial Sequence
  Description of Artificial Sequence: Synthetic peptide
  Seed: DPRMCSLMQGSTLPRRSGA
DPRMFSLIQASTSPRRSGA

SEQ ID NO: 65664 - protein, 19 aa, Artificial Sequence
  Description of Artificial Sequence: Synthetic peptide
  Seed: DPRMCSLMQGSTLPRRSGA
DPRMFSLIQASTTPRRSGA

SEQ ID NO: 65665 - protein, 19 aa, Artificial Sequence
  Description of Artificial Sequence: Synthetic peptide
  Seed: DPRMCSLMQGSTLPRRSGA
DPRMFSLIQASTVPRRSGA

SEQ ID NO: 65666 - protein, 19 aa, Artificial Sequence
  Description of Artificial Sequence: Synthetic peptide
  Seed: DPRMCSLMQGSTLPRRSGA
DPRMFSLIQGSTAPRRSGA

SEQ ID NO: 65667 - protein, 19 aa, Artificial Sequence
  Description of Artificial Sequence: Synthetic peptide
  Seed: DPRMCSLMQGSTLPRRSGA
DPRMFSLIQGSTCPRRSGA

SEQ ID NO: 65668 - protein, 19 aa, Artificial Sequence
  Description of Artificial Sequence: Synthetic peptide
  Seed: DPRMCSLMQGSTLPRRSGA
DPRMFSLIQGSTGPRRSGA

SEQ ID NO: 65669 - protein, 19 aa, Artificial Sequence
  Description of Artificial Sequence: Synthetic peptide
  Seed: DPRMCSLMQGSTLPRRSGA
DPRMFSLIQGSTIPRRSGA

SEQ ID NO: 65670 - protein, 19 aa, Artificial Sequence
  Description of Artificial Sequence: Synthetic peptide
  Seed: DPRMCSLMQGSTLPRRSGA
DPRMFSLIQGSTLPRRSGA

SEQ ID NO: 65671 - protein, 19 aa, Artificial Sequence
  Description of Artificial Sequence: Synthetic peptide
  Seed: DPRMCSLMQGSTLPRRSGA
DPRMFSLIQGSTMPRRSGA

SEQ ID NO: 65672 - protein, 19 aa, Artificial Sequence
  Description of Artificial Sequence: Synthetic peptide
  Seed: DPRMCSLMQGSTLPRRSGA
DPRMFSLIQGSTNPRRSGA

SEQ ID NO: 65673 - protein, 19 aa, Artificial Sequence
  Description of Artificial Sequence: Synthetic peptide
  Seed: DPRMCSLMQGSTLPRRSGA
DPRMFSLIQGSTSPRRSGA

SEQ ID NO: 65674 - protein, 19 aa, Artificial Sequence
  Description of Artificial Sequence: Synthetic peptide
  Seed: DPRMCSLMQGSTLPRRSGA
DPRMFSLIQGSTTPRRSGA

SEQ ID NO: 65675 - protein, 19 aa, Artificial Sequence
  Description of Artificial Sequence: Synthetic peptide
  Seed: DPRMCSLMQGSTLPRRSGA
DPRMFSLIQGSTVPRRSGA

SEQ ID NO: 65676 - protein, 19 aa, Artificial Sequence
  Description of Artificial Sequence: Synthetic peptide
  Seed: DPRMCSLMQGSTLPRRSGA
DPRMFSLIQISTAPRRSGA

SEQ ID NO: 65677 - protein, 19 aa, Artificial Sequence
  Description of Artificial Sequence: Synthetic peptide
  Seed: DPRMCSLMQGSTLPRRSGA
DPRMFSLIQISTGPRRSGA

SEQ ID NO: 65678 - protein, 19 aa, Artificial Sequence
  Description of Artificial Sequence: Synthetic peptide
  Seed: DPRMCSLMQGSTLPRRSGA
DPRMFSLIQISTIPRRSGA

SEQ ID NO: 65679 - protein, 19 aa, Artificial Sequence
  Description of Artificial Sequence: Synthetic peptide
  Seed: DPRMCSLMQGSTLPRRSGA
DPRMFSLIQISTLPRRSGA

SEQ ID NO: 65680 - protein, 19 aa, Artificial Sequence
  Description of Artificial Sequence: Synthetic peptide
  Seed: DPRMCSLMQGSTLPRRSGA
DPRMFSLIQISTMPRRSGA

SEQ ID NO: 65681 - protein, 19 aa, Artificial Sequence
  Description of Artificial Sequence: Synthetic peptide
  Seed: DPRMCSLMQGSTLPRRSGA
DPRMFSLIQISTNPRRSGA

SEQ ID NO: 65682 - protein, 19 aa, Artificial Sequence
  Description of Artificial Sequence: Synthetic peptide
  Seed: DPRMCSLMQGSTLPRRSGA
DPRMFSLIQISTSPRRSGA

SEQ ID NO: 65683 - protein, 19 aa, Artificial Sequence
  Description of Artificial Sequence: Synthetic peptide
  Seed: DPRMCSLMQGSTLPRRSGA
DPRMFSLIQISTTPRRSGA

SEQ ID NO: 65684 - protein, 19 aa, Artificial Sequence
  Description of Artificial Sequence: Synthetic peptide
  Seed: DPRMCSLMQGSTLPRRSGA
DPRMFSLIQISTVPRRSGA

SEQ ID NO: 65685 - protein, 19 aa, Artificial Sequence
  Description of Artificial Sequence: Synthetic peptide
  Seed: DPRMCSLMQGSTLPRRSGA
DPRMFSLIQLSTAPRRSGA

SEQ ID NO: 65686 - protein, 19 aa, Artificial Sequence
  Description of Artificial Sequence: Synthetic peptide
  Seed: DPRMCSLMQGSTLPRRSGA
DPRMFSLIQLSTNPRRSGA

SEQ ID NO: 65687 - protein, 19 aa, Artificial Sequence
  Description of Artificial Sequence: Synthetic peptide
  Seed: DPRMCSLMQGSTLPRRSGA
DPRMFSLIQLSTSPRRSGA

SEQ ID NO: 65688 - protein, 19 aa, Artificial Sequence
  Description of Artificial Sequence: Synthetic peptide
  Seed: DPRMCSLMQGSTLPRRSGA
DPRMFSLIQMSTAPRRSGA

SEQ ID NO: 65689 - protein, 19 aa, Artificial Sequence
  Description of Artificial Sequence: Synthetic peptide
  Seed: DPRMCSLMQGSTLPRRSGA
DPRMFSLIQMSTNPRRSGA

SEQ ID NO: 65690 - protein, 19 aa, Artificial Sequence
  Description of Artificial Sequence: Synthetic peptide
  Seed: DPRMCSLMQGSTLPRRSGA
DPRMFSLIQMSTSPRRSGA

SEQ ID NO: 65691 - protein, 19 aa, Artificial Sequence
  Description of Artificial Sequence: Synthetic peptide
  Seed: DPRMCSLMQGSTLPRRSGA
DPRMFSLIQNSTAPRRSGA

SEQ ID NO: 65692 - protein, 19 aa, Artificial Sequence
  Description of Artificial Sequence: Synthetic peptide
  Seed: DPRMCSLMQGSTLPRRSGA
DPRMFSLIQNSTIPRRSGA

SEQ ID NO: 65693 - protein, 19 aa, Artificial Sequence
  Description of Artificial Sequence: Synthetic peptide
  Seed: DPRMCSLMQGSTLPRRSGA
DPRMFSLIQNSTLPRRSGA

SEQ ID NO: 65694 - protein, 19 aa, Artificial Sequence
  Description of Artificial Sequence: Synthetic peptide
  Seed: DPRMCSLMQGSTLPRRSGA
DPRMFSLIQNSTNPRRSGA

SEQ ID NO: 65695 - protein, 19 aa, Artificial Sequence
  Description of Artificial Sequence: Synthetic peptide
  Seed: DPRMCSLMQGSTLPRRSGA
DPRMFSLIQNSTSPRRSGA

SEQ ID NO: 65696 - protein, 19 aa, Artificial Sequence
  Description of Artificial Sequence: Synthetic peptide
  Seed: DPRMCSLMQGSTLPRRSGA
DPRMFSLIQNSTTPRRSGA

SEQ ID NO: 65697 - protein, 19 aa, Artificial Sequence
  Description of Artificial Sequence: Synthetic peptide
  Seed: DPRMCSLMQGSTLPRRSGA
DPRMFSLIQNSTVPRRSGA

SEQ ID NO: 65698 - protein, 19 aa, Artificial Sequence
  Description of Artificial Sequence: Synthetic peptide
  Seed: DPRMCSLMQGSTLPRRSGA
DPRMFSLIQPSTAPRRSGA

SEQ ID NO: 65699 - protein, 19 aa, Artificial Sequence
  Description of Artificial Sequence: Synthetic peptide
  Seed: DPRMCSLMQGSTLPRRSGA
DPRMFSLIQPSTGPRRSGA

SEQ ID NO: 65700 - protein, 19 aa, Artificial Sequence
  Description of Artificial Sequence: Synthetic peptide
  Seed: DPRMCSLMQGSTLPRRSGA
DPRMFSLIQPSTHPRRSGA

SEQ ID NO: 65701 - protein, 19 aa, Artificial Sequence
  Description of Artificial Sequence: Synthetic peptide
  Seed: DPRMCSLMQGSTLPRRSGA
DPRMFSLIQPSTIPRRSGA

SEQ ID NO: 65702 - protein, 19 aa, Artificial Sequence
  Description of Artificial Sequence: Synthetic peptide
  Seed: DPRMCSLMQGSTLPRRSGA
DPRMFSLIQPSTLPRRSGA

SEQ ID NO: 65703 - protein, 19 aa, Artificial Sequence
  Description of Artificial Sequence: Synthetic peptide
  Seed: DPRMCSLMQGSTLPRRSGA
DPRMFSLIQPSTMPRRSGA

SEQ ID NO: 65704 - protein, 19 aa, Artificial Sequence
  Description of Artificial Sequence: Synthetic peptide
  Seed: DPRMCSLMQGSTLPRRSGA
DPRMFSLIQPSTNPRRSGA

SEQ ID NO: 65705 - protein, 19 aa, Artificial Sequence
  Description of Artificial Sequence: Synthetic peptide
  Seed: DPRMCSLMQGSTLPRRSGA
DPRMFSLIQPSTPPRRSGA

SEQ ID NO: 65706 - protein, 19 aa, Artificial Sequence
  Description of Artificial Sequence: Synthetic peptide
  Seed: DPRMCSLMQGSTLPRRSGA
DPRMFSLIQPSTQPRRSGA

SEQ ID NO: 65707 - protein, 19 aa, Artificial Sequence
  Description of Artificial Sequence: Synthetic peptide
  Seed: DPRMCSLMQGSTLPRRSGA
DPRMFSLIQPSTSPRRSGA

SEQ ID NO: 65708 - protein, 19 aa, Artificial Sequence
  Description of Artificial Sequence: Synthetic peptide
  Seed: DPRMCSLMQGSTLPRRSGA
DPRMFSLIQPSTTPRRSGA

SEQ ID NO: 65709 - protein, 19 aa, Artificial Sequence
  Description of Artificial Sequence: Synthetic peptide
  Seed: DPRMCSLMQGSTLPRRSGA
DPRMFSLIQPSTVPRRSGA

SEQ ID NO: 65710 - protein, 19 aa, Artificial Sequence
  Description of Artificial Sequence: Synthetic peptide
  Seed: DPRMCSLMQGSTLPRRSGA
DPRMFSLIQSSTAPRRSGA

SEQ ID NO: 65711 - protein, 19 aa, Artificial Sequence
  Description of Artificial Sequence: Synthetic peptide
  Seed: DPRMCSLMQGSTLPRRSGA
DPRMFSLIQSSTGPRRSGA

SEQ ID NO: 65712 - protein, 19 aa, Artificial Sequence
  Description of Artificial Sequence: Synthetic peptide
  Seed: DPRMCSLMQGSTLPRRSGA
DPRMFSLIQSSTHPRRSGA

SEQ ID NO: 65713 - protein, 19 aa, Artificial Sequence
  Description of Artificial Sequence: Synthetic peptide
  Seed: DPRMCSLMQGSTLPRRSGA
DPRMFSLIQSSTIPRRSGA

SEQ ID NO: 65714 - protein, 19 aa, Artificial Sequence
  Description of Artificial Sequence: Synthetic peptide
  Seed: DPRMCSLMQGSTLPRRSGA
DPRMFSLIQSSTLPRRSGA

SEQ ID NO: 65715 - protein, 19 aa, Artificial Sequence
  Description of Artificial Sequence: Synthetic peptide
  Seed: DPRMCSLMQGSTLPRRSGA
DPRMFSLIQSSTMPRRSGA

SEQ ID NO: 65716 - protein, 19 aa, Artificial Sequence
  Description of Artificial Sequence: Synthetic peptide
  Seed: DPRMCSLMQGSTLPRRSGA
DPRMFSLIQSSTNPRRSGA

SEQ ID NO: 65717 - protein, 19 aa, Artificial Sequence
  Description of Artificial Sequence: Synthetic peptide
  Seed: DPRMCSLMQGSTLPRRSGA
DPRMFSLIQSSTQPRRSGA

SEQ ID NO: 65718 - protein, 19 aa, Artificial Sequence
  Description of Artificial Sequence: Synthetic peptide
  Seed: DPRMCSLMQGSTLPRRSGA
DPRMFSLIQSSTSPRRSGA

SEQ ID NO: 65719 - protein, 19 aa, Artificial Sequence
  Description of Artificial Sequence: Synthetic peptide
  Seed: DPRMCSLMQGSTLPRRSGA
DPRMFSLIQSSTTPRRSGA

SEQ ID NO: 65720 - protein, 19 aa, Artificial Sequence
  Description of Artificial Sequence: Synthetic peptide
  Seed: DPRMCSLMQGSTLPRRSGA
DPRMFSLIQSSTVPRRSGA

SEQ ID NO: 65721 - protein, 19 aa, Artificial Sequence
  Description of Artificial Sequence: Synthetic peptide
  Seed: DPRMCSLMQGSTLPRRSGA
DPRMFSLIQTSTAPRRSGA

SEQ ID NO: 65722 - protein, 19 aa, Artificial Sequence
  Description of Artificial Sequence: Synthetic peptide
  Seed: DPRMCSLMQGSTLPRRSGA
DPRMFSLIQTSTGPRRSGA

SEQ ID NO: 65723 - protein, 19 aa, Artificial Sequence
  Description of Artificial Sequence: Synthetic peptide
  Seed: DPRMCSLMQGSTLPRRSGA
DPRMFSLIQTSTHPRRSGA

SEQ ID NO: 65724 - protein, 19 aa, Artificial Sequence
  Description of Artificial Sequence: Synthetic peptide
  Seed: DPRMCSLMQGSTLPRRSGA
DPRMFSLIQTSTIPRRSGA

SEQ ID NO: 65725 - protein, 19 aa, Artificial Sequence
  Description of Artificial Sequence: Synthetic peptide
  Seed: DPRMCSLMQGSTLPRRSGA
DPRMFSLIQTSTLPRRSGA

SEQ ID NO: 65726 - protein, 19 aa, Artificial Sequence
  Description of Artificial Sequence: Synthetic peptide
  Seed: DPRMCSLMQGSTLPRRSGA
DPRMFSLIQTSTMPRRSGA

SEQ ID NO: 65727 - protein, 19 aa, Artificial Sequence
  Description of Artificial Sequence: Synthetic peptide
  Seed: DPRMCSLMQGSTLPRRSGA
DPRMFSLIQTSTNPRRSGA

SEQ ID NO: 65728 - protein, 19 aa, Artificial Sequence
  Description of Artificial Sequence: Synthetic peptide
  Seed: DPRMCSLMQGSTLPRRSGA
DPRMFSLIQTSTSPRRSGA

SEQ ID NO: 65729 - protein, 19 aa, Artificial Sequence
  Description of Artificial Sequence: Synthetic peptide
  Seed: DPRMCSLMQGSTLPRRSGA
DPRMFSLIQTSTTPRRSGA

SEQ ID NO: 65730 - protein, 19 aa, Artificial Sequence
  Description of Artificial Sequence: Synthetic peptide
  Seed: DPRMCSLMQGSTLPRRSGA
DPRMFSLIQTSTVPRRSGA

SEQ ID NO: 65731 - protein, 19 aa, Artificial Sequence
  Description of Artificial Sequence: Synthetic peptide
  Seed: DPRMCSLMQGSTLPRRSGA
DPRMFSLIQVSTAPRRSGA

SEQ ID NO: 65732 - protein, 19 aa, Artificial Sequence
  Description of Artificial Sequence: Synthetic peptide
  Seed: DPRMCSLMQGSTLPRRSGA
DPRMFSLIQVSTGPRRSGA

SEQ ID NO: 65733 - protein, 19 aa, Artificial Sequence
  Description of Artificial Sequence: Synthetic peptide
  Seed: DPRMCSLMQGSTLPRRSGA
DPRMFSLIQVSTHPRRSGA

SEQ ID NO: 65734 - protein, 19 aa, Artificial Sequence
  Description of Artificial Sequence: Synthetic peptide
  Seed: DPRMCSLMQGSTLPRRSGA
DPRMFSLIQVSTIPRRSGA

SEQ ID NO: 65735 - protein, 19 aa, Artificial Sequence
  Description of Artificial Sequence: Synthetic peptide
  Seed: DPRMCSLMQGSTLPRRSGA
DPRMFSLIQVSTLPRRSGA

SEQ ID NO: 65736 - protein, 19 aa, Artificial Sequence
  Description of Artificial Sequence: Synthetic peptide
  Seed: DPRMCSLMQGSTLPRRSGA
DPRMFSLIQVSTMPRRSGA

SEQ ID NO: 65737 - protein, 19 aa, Artificial Sequence
  Description of Artificial Sequence: Synthetic peptide
  Seed: DPRMCSLMQGSTLPRRSGA
DPRMFSLIQVSTNPRRSGA

SEQ ID NO: 65738 - protein, 19 aa, Artificial Sequence
  Description of Artificial Sequence: Synthetic peptide
  Seed: DPRMCSLMQGSTLPRRSGA
DPRMFSLIQVSTQPRRSGA

SEQ ID NO: 65739 - protein, 19 aa, Artificial Sequence
  Description of Artificial Sequence: Synthetic peptide
  Seed: DPRMCSLMQGSTLPRRSGA
DPRMFSLIQVSTSPRRSGA

SEQ ID NO: 65740 - protein, 19 aa, Artificial Sequence
  Description of Artificial Sequence: Synthetic peptide
  Seed: DPRMCSLMQGSTLPRRSGA
DPRMFSLIQVSTTPRRSGA

SEQ ID NO: 65741 - protein, 19 aa, Artificial Sequence
  Description of Artificial Sequence: Synthetic peptide
  Seed: DPRMCSLMQGSTLPRRSGA
DPRMFSLIQVSTVPRRSGA

SEQ ID NO: 65742 - protein, 19 aa, Artificial Sequence
  Description of Artificial Sequence: Synthetic peptide
  Seed: DPRMCSLMQGSTLPRRSGA
DPRMFSLLQASTAPRRSGA

SEQ ID NO: 65743 - protein, 19 aa, Artificial Sequence
  Description of Artificial Sequence: Synthetic peptide
  Seed: DPRMCSLMQGSTLPRRSGA
DPRMFSLLQASTCPRRSGA

SEQ ID NO: 65744 - protein, 19 aa, Artificial Sequence
  Description of Artificial Sequence: Synthetic peptide
  Seed: DPRMCSLMQGSTLPRRSGA
DPRMFSLLQASTDPRRSGA

SEQ ID NO: 65745 - protein, 19 aa, Artificial Sequence
  Description of Artificial Sequence: Synthetic peptide
  Seed: DPRMCSLMQGSTLPRRSGA
DPRMFSLLQASTEPRRSGA

SEQ ID NO: 65746 - protein, 19 aa, Artificial Sequence
  Description of Artificial Sequence: Synthetic peptide
  Seed: DPRMCSLMQGSTLPRRSGA
DPRMFSLLQASTFPRRSGA

SEQ ID NO: 65747 - protein, 19 aa, Artificial Sequence
  Description of Artificial Sequence: Synthetic peptide
  Seed: DPRMCSLMQGSTLPRRSGA
DPRMFSLLQASTGPRRSGA

SEQ ID NO: 65748 - protein, 19 aa, Artificial Sequence
  Description of Artificial Sequence: Synthetic peptide
  Seed: DPRMCSLMQGSTLPRRSGA
DPRMFSLLQASTHPRRSGA

SEQ ID NO: 65749 - protein, 19 aa, Artificial Sequence
  Description of Artificial Sequence: Synthetic peptide
  Seed: DPRMCSLMQGSTLPRRSGA
DPRMFSLLQASTIPRRSGA

SEQ ID NO: 65750 - protein, 19 aa, Artificial Sequence
  Description of Artificial Sequence: Synthetic peptide
  Seed: DPRMCSLMQGSTLPRRSGA
DPRMFSLLQASTLPRRSGA

SEQ ID NO: 65751 - protein, 19 aa, Artificial Sequence
  Description of Artificial Sequence: Synthetic peptide
  Seed: DPRMCSLMQGSTLPRRSGA
DPRMFSLLQASTMPRRSGA

SEQ ID NO: 65752 - protein, 19 aa, Artificial Sequence
  Description of Artificial Sequence: Synthetic peptide
  Seed: DPRMCSLMQGSTLPRRSGA
DPRMFSLLQASTNPRRSGA

SEQ ID NO: 65753 - protein, 19 aa, Artificial Sequence
  Description of Artificial Sequence: Synthetic peptide
  Seed: DPRMCSLMQGSTLPRRSGA
DPRMFSLLQASTPPRRSGA

SEQ ID NO: 65754 - protein, 19 aa, Artificial Sequence
  Description of Artificial Sequence: Synthetic peptide
  Seed: DPRMCSLMQGSTLPRRSGA
DPRMFSLLQASTQPRRSGA

SEQ ID NO: 65755 - protein, 19 aa, Artificial Sequence
  Description of Artificial Sequence: Synthetic peptide
  Seed: DPRMCSLMQGSTLPRRSGA
DPRMFSLLQASTSPRRSGA

SEQ ID NO: 65756 - protein, 19 aa, Artificial Sequence
  Description of Artificial Sequence: Synthetic peptide
  Seed: DPRMCSLMQGSTLPRRSGA
DPRMFSLLQASTTPRRSGA

SEQ ID NO: 65757 - protein, 19 aa, Artificial Sequence
  Description of Artificial Sequence: Synthetic peptide
  Seed: DPRMCSLMQGSTLPRRSGA
DPRMFSLLQASTVPRRSGA

SEQ ID NO: 65758 - protein, 19 aa, Artificial Sequence
  Description of Artificial Sequence: Synthetic peptide
  Seed: DPRMCSLMQGSTLPRRSGA
DPRMFSLLQASTYPRRSGA

SEQ ID NO: 65759 - protein, 19 aa, Artificial Sequence
  Description of Artificial Sequence: Synthetic peptide
  Seed: DPRMCSLMQGSTLPRRSGA
DPRMFSLLQGSTAPRRSGA

SEQ ID NO: 65760 - protein, 19 aa, Artificial Sequence
  Description of Artificial Sequence: Synthetic peptide
  Seed: DPRMCSLMQGSTLPRRSGA
DPRMFSLLQGSTCPRRSGA

SEQ ID NO: 65761 - protein, 19 aa, Artificial Sequence
  Description of Artificial Sequence: Synthetic peptide
  Seed: DPRMCSLMQGSTLPRRSGA
DPRMFSLLQGSTFPRRSGA

SEQ ID NO: 65762 - protein, 19 aa, Artificial Sequence
  Description of Artificial Sequence: Synthetic peptide
  Seed: DPRMCSLMQGSTLPRRSGA
DPRMFSLLQGSTGPRRSGA

SEQ ID NO: 65763 - protein, 19 aa, Artificial Sequence
  Description of Artificial Sequence: Synthetic peptide
  Seed: DPRMCSLMQGSTLPRRSGA
DPRMFSLLQGSTIPRRSGA

SEQ ID NO: 65764 - protein, 19 aa, Artificial Sequence
  Description of Artificial Sequence: Synthetic peptide
  Seed: DPRMCSLMQGSTLPRRSGA
DPRMFSLLQGSTLPRRSGA

SEQ ID NO: 65765 - protein, 19 aa, Artificial Sequence
  Description of Artificial Sequence: Synthetic peptide
  Seed: DPRMCSLMQGSTLPRRSGA
DPRMFSLLQGSTMPRRSGA

SEQ ID NO: 65766 - protein, 19 aa, Artificial Sequence
  Description of Artificial Sequence: Synthetic peptide
  Seed: DPRMCSLMQGSTLPRRSGA
DPRMFSLLQGSTNPRRSGA

SEQ ID NO: 65767 - protein, 19 aa, Artificial Sequence
  Description of Artificial Sequence: Synthetic peptide
  Seed: DPRMCSLMQGSTLPRRSGA
DPRMFSLLQGSTSPRRSGA

SEQ ID NO: 65768 - protein, 19 aa, Artificial Sequence
  Description of Artificial Sequence: Synthetic peptide
  Seed: DPRMCSLMQGSTLPRRSGA
DPRMFSLLQGSTTPRRSGA

SEQ ID NO: 65769 - protein, 19 aa, Artificial Sequence
  Description of Artificial Sequence: Synthetic peptide
  Seed: DPRMCSLMQGSTLPRRSGA
DPRMFSLLQGSTVPRRSGA

SEQ ID NO: 65770 - protein, 19 aa, Artificial Sequence
  Description of Artificial Sequence: Synthetic peptide
  Seed: DPRMCSLMQGSTLPRRSGA
DPRMFSLLQISTAPRRSGA

SEQ ID NO: 65771 - protein, 19 aa, Artificial Sequence
  Description of Artificial Sequence: Synthetic peptide
  Seed: DPRMCSLMQGSTLPRRSGA
DPRMFSLLQISTGPRRSGA

SEQ ID NO: 65772 - protein, 19 aa, Artificial Sequence
  Description of Artificial Sequence: Synthetic peptide
  Seed: DPRMCSLMQGSTLPRRSGA
DPRMFSLLQISTHPRRSGA

SEQ ID NO: 65773 - protein, 19 aa, Artificial Sequence
  Description of Artificial Sequence: Synthetic peptide
  Seed: DPRMCSLMQGSTLPRRSGA
DPRMFSLLQISTIPRRSGA

SEQ ID NO: 65774 - protein, 19 aa, Artificial Sequence
  Description of Artificial Sequence: Synthetic peptide
  Seed: DPRMCSLMQGSTLPRRSGA
DPRMFSLLQISTLPRRSGA

SEQ ID NO: 65775 - protein, 19 aa, Artificial Sequence
  Description of Artificial Sequence: Synthetic peptide
  Seed: DPRMCSLMQGSTLPRRSGA
DPRMFSLLQISTMPRRSGA

SEQ ID NO: 65776 - protein, 19 aa, Artificial Sequence
  Description of Artificial Sequence: Synthetic peptide
  Seed: DPRMCSLMQGSTLPRRSGA
DPRMFSLLQISTNPRRSGA

SEQ ID NO: 65777 - protein, 19 aa, Artificial Sequence
  Description of Artificial Sequence: Synthetic peptide
  Seed: DPRMCSLMQGSTLPRRSGA
DPRMFSLLQISTQPRRSGA

SEQ ID NO: 65778 - protein, 19 aa, Artificial Sequence
  Description of Artificial Sequence: Synthetic peptide
  Seed: DPRMCSLMQGSTLPRRSGA
DPRMFSLLQISTSPRRSGA

SEQ ID NO: 65779 - protein, 19 aa, Artificial Sequence
  Description of Artificial Sequence: Synthetic peptide
  Seed: DPRMCSLMQGSTLPRRSGA
DPRMFSLLQISTTPRRSGA

SEQ ID NO: 65780 - protein, 19 aa, Artificial Sequence
  Description of Artificial Sequence: Synthetic peptide
  Seed: DPRMCSLMQGSTLPRRSGA
DPRMFSLLQISTVPRRSGA

SEQ ID NO: 65781 - protein, 19 aa, Artificial Sequence
  Description of Artificial Sequence: Synthetic peptide
  Seed: DPRMCSLMQGSTLPRRSGA
DPRMFSLLQLSTAPRRSGA

SEQ ID NO: 65782 - protein, 19 aa, Artificial Sequence
  Description of Artificial Sequence: Synthetic peptide
  Seed: DPRMCSLMQGSTLPRRSGA
DPRMFSLLQLSTNPRRSGA

SEQ ID NO: 65783 - protein, 19 aa, Artificial Sequence
  Description of Artificial Sequence: Synthetic peptide
  Seed: DPRMCSLMQGSTLPRRSGA
DPRMFSLLQLSTSPRRSGA

SEQ ID NO: 65784 - protein, 19 aa, Artificial Sequence
  Description of Artificial Sequence: Synthetic peptide
  Seed: DPRMCSLMQGSTLPRRSGA
DPRMFSLLQLSTTPRRSGA

SEQ ID NO: 65785 - protein, 19 aa, Artificial Sequence
  Description of Artificial Sequence: Synthetic peptide
  Seed: DPRMCSLMQGSTLPRRSGA
DPRMFSLLQLSTVPRRSGA

SEQ ID NO: 65786 - protein, 19 aa, Artificial Sequence
  Description of Artificial Sequence: Synthetic peptide
  Seed: DPRMCSLMQGSTLPRRSGA
DPRMFSLLQMSTAPRRSGA

SEQ ID NO: 65787 - protein, 19 aa, Artificial Sequence
  Description of Artificial Sequence: Synthetic peptide
  Seed: DPRMCSLMQGSTLPRRSGA
DPRMFSLLQMSTNPRRSGA

SEQ ID NO: 65788 - protein, 19 aa, Artificial Sequence
  Description of Artificial Sequence: Synthetic peptide
  Seed: DPRMCSLMQGSTLPRRSGA
DPRMFSLLQMSTSPRRSGA

SEQ ID NO: 65789 - protein, 19 aa, Artificial Sequence
  Description of Artificial Sequence: Synthetic peptide
  Seed: DPRMCSLMQGSTLPRRSGA
DPRMFSLLQMSTVPRRSGA

SEQ ID NO: 65790 - protein, 19 aa, Artificial Sequence
  Description of Artificial Sequence: Synthetic peptide
  Seed: DPRMCSLMQGSTLPRRSGA
DPRMFSLLQNSTAPRRSGA

SEQ ID NO: 65791 - protein, 19 aa, Artificial Sequence
  Description of Artificial Sequence: Synthetic peptide
  Seed: DPRMCSLMQGSTLPRRSGA
DPRMFSLLQNSTGPRRSGA

SEQ ID NO: 65792 - protein, 19 aa, Artificial Sequence
  Description of Artificial Sequence: Synthetic peptide
  Seed: DPRMCSLMQGSTLPRRSGA
DPRMFSLLQNSTIPRRSGA

SEQ ID NO: 65793 - protein, 19 aa, Artificial Sequence
  Description of Artificial Sequence: Synthetic peptide
  Seed: DPRMCSLMQGSTLPRRSGA
DPRMFSLLQNSTLPRRSGA

SEQ ID NO: 65794 - protein, 19 aa, Artificial Sequence
  Description of Artificial Sequence: Synthetic peptide
  Seed: DPRMCSLMQGSTLPRRSGA
DPRMFSLLQNSTMPRRSGA

SEQ ID NO: 65795 - protein, 19 aa, Artificial Sequence
  Description of Artificial Sequence: Synthetic peptide
  Seed: DPRMCSLMQGSTLPRRSGA
DPRMFSLLQNSTNPRRSGA

SEQ ID NO: 65796 - protein, 19 aa, Artificial Sequence
  Description of Artificial Sequence: Synthetic peptide
  Seed: DPRMCSLMQGSTLPRRSGA
DPRMFSLLQNSTSPRRSGA

SEQ ID NO: 65797 - protein, 19 aa, Artificial Sequence
  Description of Artificial Sequence: Synthetic peptide
  Seed: DPRMCSLMQGSTLPRRSGA
DPRMFSLLQNSTTPRRSGA

SEQ ID NO: 65798 - protein, 19 aa, Artificial Sequence
  Description of Artificial Sequence: Synthetic peptide
  Seed: DPRMCSLMQGSTLPRRSGA
DPRMFSLLQNSTVPRRSGA

SEQ ID NO: 65799 - protein, 19 aa, Artificial Sequence
  Description of Artificial Sequence: Synthetic peptide
  Seed: DPRMCSLMQGSTLPRRSGA
DPRMFSLLQPSTAPRRSGA

SEQ ID NO: 65800 - protein, 19 aa, Artificial Sequence
  Description of Artificial Sequence: Synthetic peptide
  Seed: DPRMCSLMQGSTLPRRSGA
DPRMFSLLQPSTCPRRSGA

SEQ ID NO: 65801 - protein, 19 aa, Artificial Sequence
  Description of Artificial Sequence: Synthetic peptide
  Seed: DPRMCSLMQGSTLPRRSGA
DPRMFSLLQPSTDPRRSGA

SEQ ID NO: 65802 - protein, 19 aa, Artificial Sequence
  Description of Artificial Sequence: Synthetic peptide
  Seed: DPRMCSLMQGSTLPRRSGA
DPRMFSLLQPSTEPRRSGA

SEQ ID NO: 65803 - protein, 19 aa, Artificial Sequence
  Description of Artificial Sequence: Synthetic peptide
  Seed: DPRMCSLMQGSTLPRRSGA
DPRMFSLLQPSTFPRRSGA

SEQ ID NO: 65804 - protein, 19 aa, Artificial Sequence
  Description of Artificial Sequence: Synthetic peptide
  Seed: DPRMCSLMQGSTLPRRSGA
DPRMFSLLQPSTGPRRSGA

SEQ ID NO: 65805 - protein, 19 aa, Artificial Sequence
  Description of Artificial Sequence: Synthetic peptide
  Seed: DPRMCSLMQGSTLPRRSGA
DPRMFSLLQPSTHPRRSGA

SEQ ID NO: 65806 - protein, 19 aa, Artificial Sequence
  Description of Artificial Sequence: Synthetic peptide
  Seed: DPRMCSLMQGSTLPRRSGA
DPRMFSLLQPSTIPRRSGA

SEQ ID NO: 65807 - protein, 19 aa, Artificial Sequence
  Description of Artificial Sequence: Synthetic peptide
  Seed: DPRMCSLMQGSTLPRRSGA
DPRMFSLLQPSTLPRRSGA

SEQ ID NO: 65808 - protein, 19 aa, Artificial Sequence
  Description of Artificial Sequence: Synthetic peptide
  Seed: DPRMCSLMQGSTLPRRSGA
DPRMFSLLQPSTMPRRSGA

SEQ ID NO: 65809 - protein, 19 aa, Artificial Sequence
  Description of Artificial Sequence: Synthetic peptide
  Seed: DPRMCSLMQGSTLPRRSGA
DPRMFSLLQPSTNPRRSGA

SEQ ID NO: 65810 - protein, 19 aa, Artificial Sequence
  Description of Artificial Sequence: Synthetic peptide
  Seed: DPRMCSLMQGSTLPRRSGA
DPRMFSLLQPSTPPRRSGA

SEQ ID NO: 65811 - protein, 19 aa, Artificial Sequence
  Description of Artificial Sequence: Synthetic peptide
  Seed: DPRMCSLMQGSTLPRRSGA
DPRMFSLLQPSTQPRRSGA

SEQ ID NO: 65812 - protein, 19 aa, Artificial Sequence
  Description of Artificial Sequence: Synthetic peptide
  Seed: DPRMCSLMQGSTLPRRSGA
DPRMFSLLQPSTSPRRSGA

SEQ ID NO: 65813 - protein, 19 aa, Artificial Sequence
  Description of Artificial Sequence: Synthetic peptide
  Seed: DPRMCSLMQGSTLPRRSGA
DPRMFSLLQPSTTPRRSGA

SEQ ID NO: 65814 - protein, 19 aa, Artificial Sequence
  Description of Artificial Sequence: Synthetic peptide
  Seed: DPRMCSLMQGSTLPRRSGA
DPRMFSLLQPSTVPRRSGA

SEQ ID NO: 65815 - protein, 19 aa, Artificial Sequence
  Description of Artificial Sequence: Synthetic peptide
  Seed: DPRMCSLMQGSTLPRRSGA
DPRMFSLLQSSTAPRRSGA

SEQ ID NO: 65816 - protein, 19 aa, Artificial Sequence
  Description of Artificial Sequence: Synthetic peptide
  Seed: DPRMCSLMQGSTLPRRSGA
DPRMFSLLQSSTCPRRSGA

SEQ ID NO: 65817 - protein, 19 aa, Artificial Sequence
  Description of Artificial Sequence: Synthetic peptide
  Seed: DPRMCSLMQGSTLPRRSGA
DPRMFSLLQSSTFPRRSGA

SEQ ID NO: 65818 - protein, 19 aa, Artificial Sequence
  Description of Artificial Sequence: Synthetic peptide
  Seed: DPRMCSLMQGSTLPRRSGA
DPRMFSLLQSSTGPRRSGA

SEQ ID NO: 65819 - protein, 19 aa, Artificial Sequence
  Description of Artificial Sequence: Synthetic peptide
  Seed: DPRMCSLMQGSTLPRRSGA
DPRMFSLLQSSTHPRRSGA

SEQ ID NO: 65820 - protein, 19 aa, Artificial Sequence
  Description of Artificial Sequence: Synthetic peptide
  Seed: DPRMCSLMQGSTLPRRSGA
DPRMFSLLQSSTIPRRSGA

SEQ ID NO: 65821 - protein, 19 aa, Artificial Sequence
  Description of Artificial Sequence: Synthetic peptide
  Seed: DPRMCSLMQGSTLPRRSGA
DPRMFSLLQSSTLPRRSGA

SEQ ID NO: 65822 - protein, 19 aa, Artificial Sequence
  Description of Artificial Sequence: Synthetic peptide
  Seed: DPRMCSLMQGSTLPRRSGA
DPRMFSLLQSSTMPRRSGA

SEQ ID NO: 65823 - protein, 19 aa, Artificial Sequence
  Description of Artificial Sequence: Synthetic peptide
  Seed: DPRMCSLMQGSTLPRRSGA
DPRMFSLLQSSTNPRRSGA

SEQ ID NO: 65824 - protein, 19 aa, Artificial Sequence
  Description of Artificial Sequence: Synthetic peptide
  Seed: DPRMCSLMQGSTLPRRSGA
DPRMFSLLQSSTPPRRSGA

SEQ ID NO: 65825 - protein, 19 aa, Artificial Sequence
  Description of Artificial Sequence: Synthetic peptide
  Seed: DPRMCSLMQGSTLPRRSGA
DPRMFSLLQSSTQPRRSGA

SEQ ID NO: 65826 - protein, 19 aa, Artificial Sequence
  Description of Artificial Sequence: Synthetic peptide
  Seed: DPRMCSLMQGSTLPRRSGA
DPRMFSLLQSSTSPRRSGA

SEQ ID NO: 65827 - protein, 19 aa, Artificial Sequence
  Description of Artificial Sequence: Synthetic peptide
  Seed: DPRMCSLMQGSTLPRRSGA
DPRMFSLLQSSTTPRRSGA

SEQ ID NO: 65828 - protein, 19 aa, Artificial Sequence
  Description of Artificial Sequence: Synthetic peptide
  Seed: DPRMCSLMQGSTLPRRSGA
DPRMFSLLQSSTVPRRSGA

SEQ ID NO: 65829 - protein, 19 aa, Artificial Sequence
  Description of Artificial Sequence: Synthetic peptide
  Seed: DPRMCSLMQGSTLPRRSGA
DPRMFSLLQTSTAPRRSGA

SEQ ID NO: 65830 - protein, 19 aa, Artificial Sequence
  Description of Artificial Sequence: Synthetic peptide
  Seed: DPRMCSLMQGSTLPRRSGA
DPRMFSLLQTSTGPRRSGA

SEQ ID NO: 65831 - protein, 19 aa, Artificial Sequence
  Description of Artificial Sequence: Synthetic peptide
  Seed: DPRMCSLMQGSTLPRRSGA
DPRMFSLLQTSTHPRRSGA

SEQ ID NO: 65832 - protein, 19 aa, Artificial Sequence
  Description of Artificial Sequence: Synthetic peptide
  Seed: DPRMCSLMQGSTLPRRSGA
DPRMFSLLQTSTIPRRSGA

SEQ ID NO: 65833 - protein, 19 aa, Artificial Sequence
  Description of Artificial Sequence: Synthetic peptide
  Seed: DPRMCSLMQGSTLPRRSGA
DPRMFSLLQTSTLPRRSGA

SEQ ID NO: 65834 - protein, 19 aa, Artificial Sequence
  Description of Artificial Sequence: Synthetic peptide
  Seed: DPRMCSLMQGSTLPRRSGA
DPRMFSLLQTSTMPRRSGA

SEQ ID NO: 65835 - protein, 19 aa, Artificial Sequence
  Description of Artificial Sequence: Synthetic peptide
  Seed: DPRMCSLMQGSTLPRRSGA
DPRMFSLLQTSTNPRRSGA

SEQ ID NO: 65836 - protein, 19 aa, Artificial Sequence
  Description of Artificial Sequence: Synthetic peptide
  Seed: DPRMCSLMQGSTLPRRSGA
DPRMFSLLQTSTPPRRSGA

SEQ ID NO: 65837 - protein, 19 aa, Artificial Sequence
  Description of Artificial Sequence: Synthetic peptide
  Seed: DPRMCSLMQGSTLPRRSGA
DPRMFSLLQTSTQPRRSGA

SEQ ID NO: 65838 - protein, 19 aa, Artificial Sequence
  Description of Artificial Sequence: Synthetic peptide
  Seed: DPRMCSLMQGSTLPRRSGA
DPRMFSLLQTSTSPRRSGA

SEQ ID NO: 65839 - protein, 19 aa, Artificial Sequence
  Description of Artificial Sequence: Synthetic peptide
  Seed: DPRMCSLMQGSTLPRRSGA
DPRMFSLLQTSTTPRRSGA

SEQ ID NO: 65840 - protein, 19 aa, Artificial Sequence
  Description of Artificial Sequence: Synthetic peptide
  Seed: DPRMCSLMQGSTLPRRSGA
DPRMFSLLQTSTVPRRSGA

SEQ ID NO: 65841 - protein, 19 aa, Artificial Sequence
  Description of Artificial Sequence: Synthetic peptide
  Seed: DPRMCSLMQGSTLPRRSGA
DPRMFSLLQVSTAPRRSGA

SEQ ID NO: 65842 - protein, 19 aa, Artificial Sequence
  Description of Artificial Sequence: Synthetic peptide
  Seed: DPRMCSLMQGSTLPRRSGA
DPRMFSLLQVSTDPRRSGA

SEQ ID NO: 65843 - protein, 19 aa, Artificial Sequence
  Description of Artificial Sequence: Synthetic peptide
  Seed: DPRMCSLMQGSTLPRRSGA
DPRMFSLLQVSTGPRRSGA

SEQ ID NO: 65844 - protein, 19 aa, Artificial Sequence
  Description of Artificial Sequence: Synthetic peptide
  Seed: DPRMCSLMQGSTLPRRSGA
DPRMFSLLQVSTHPRRSGA

SEQ ID NO: 65845 - protein, 19 aa, Artificial Sequence
  Description of Artificial Sequence: Synthetic peptide
  Seed: DPRMCSLMQGSTLPRRSGA
DPRMFSLLQVSTIPRRSGA

SEQ ID NO: 65846 - protein, 19 aa, Artificial Sequence
  Description of Artificial Sequence: Synthetic peptide
  Seed: DPRMCSLMQGSTLPRRSGA
DPRMFSLLQVSTLPRRSGA

SEQ ID NO: 65847 - protein, 19 aa, Artificial Sequence
  Description of Artificial Sequence: Synthetic peptide
  Seed: DPRMCSLMQGSTLPRRSGA
DPRMFSLLQVSTMPRRSGA

SEQ ID NO: 65848 - protein, 19 aa, Artificial Sequence
  Description of Artificial Sequence: Synthetic peptide
  Seed: DPRMCSLMQGSTLPRRSGA
DPRMFSLLQVSTNPRRSGA

SEQ ID NO: 65849 - protein, 19 aa, Artificial Sequence
  Description of Artificial Sequence: Synthetic peptide
  Seed: DPRMCSLMQGSTLPRRSGA
DPRMFSLLQVSTPPRRSGA

SEQ ID NO: 65850 - protein, 19 aa, Artificial Sequence
  Description of Artificial Sequence: Synthetic peptide
  Seed: DPRMCSLMQGSTLPRRSGA
DPRMFSLLQVSTQPRRSGA

SEQ ID NO: 65851 - protein, 19 aa, Artificial Sequence
  Description of Artificial Sequence: Synthetic peptide
  Seed: DPRMCSLMQGSTLPRRSGA
DPRMFSLLQVSTSPRRSGA

SEQ ID NO: 65852 - protein, 19 aa, Artificial Sequence
  Description of Artificial Sequence: Synthetic peptide
  Seed: DPRMCSLMQGSTLPRRSGA
DPRMFSLLQVSTTPRRSGA

SEQ ID NO: 65853 - protein, 19 aa, Artificial Sequence
  Description of Artificial Sequence: Synthetic peptide
  Seed: DPRMCSLMQGSTLPRRSGA
DPRMFSLLQVSTVPRRSGA

SEQ ID NO: 65854 - protein, 19 aa, Artificial Sequence
  Description of Artificial Sequence: Synthetic peptide
  Seed: DPRMCSLMQGSTLPRRSGA
DPRMFSLMQASTAPRRSGA

SEQ ID NO: 65855 - protein, 19 aa, Artificial Sequence
  Description of Artificial Sequence: Synthetic peptide
  Seed: DPRMCSLMQGSTLPRRSGA
DPRMFSLMQASTCPRRSGA

SEQ ID NO: 65856 - protein, 19 aa, Artificial Sequence
  Description of Artificial Sequence: Synthetic peptide
  Seed: DPRMCSLMQGSTLPRRSGA
DPRMFSLMQASTDPRRSGA

SEQ ID NO: 65857 - protein, 19 aa, Artificial Sequence
  Description of Artificial Sequence: Synthetic peptide
  Seed: DPRMCSLMQGSTLPRRSGA
DPRMFSLMQASTEPRRSGA

SEQ ID NO: 65858 - protein, 19 aa, Artificial Sequence
  Description of Artificial Sequence: Synthetic peptide
  Seed: DPRMCSLMQGSTLPRRSGA
DPRMFSLMQASTFPRRSGA

SEQ ID NO: 65859 - protein, 19 aa, Artificial Sequence
  Description of Artificial Sequence: Synthetic peptide
  Seed: DPRMCSLMQGSTLPRRSGA
DPRMFSLMQASTGPRRSGA

SEQ ID NO: 65860 - protein, 19 aa, Artificial Sequence
  Description of Artificial Sequence: Synthetic peptide
  Seed: DPRMCSLMQGSTLPRRSGA
DPRMFSLMQASTHPRRSGA

SEQ ID NO: 65861 - protein, 19 aa, Artificial Sequence
  Description of Artificial Sequence: Synthetic peptide
  Seed: DPRMCSLMQGSTLPRRSGA
DPRMFSLMQASTIPRRSGA

SEQ ID NO: 65862 - protein, 19 aa, Artificial Sequence
  Description of Artificial Sequence: Synthetic peptide
  Seed: DPRMCSLMQGSTLPRRSGA
DPRMFSLMQASTLPRRSGA

SEQ ID NO: 65863 - protein, 19 aa, Artificial Sequence
  Description of Artificial Sequence: Synthetic peptide
  Seed: DPRMCSLMQGSTLPRRSGA
DPRMFSLMQASTMPRRSGA

SEQ ID NO: 65864 - protein, 19 aa, Artificial Sequence
  Description of Artificial Sequence: Synthetic peptide
  Seed: DPRMCSLMQGSTLPRRSGA
DPRMFSLMQASTNPRRSGA

SEQ ID NO: 65865 - protein, 19 aa, Artificial Sequence
  Description of Artificial Sequence: Synthetic peptide
  Seed: DPRMCSLMQGSTLPRRSGA
DPRMFSLMQASTPPRRSGA

SEQ ID NO: 65866 - protein, 19 aa, Artificial Sequence
  Description of Artificial Sequence: Synthetic peptide
  Seed: DPRMCSLMQGSTLPRRSGA
DPRMFSLMQASTQPRRSGA

SEQ ID NO: 65867 - protein, 19 aa, Artificial Sequence
  Description of Artificial Sequence: Synthetic peptide
  Seed: DPRMCSLMQGSTLPRRSGA
DPRMFSLMQASTSPRRSGA

SEQ ID NO: 65868 - protein, 19 aa, Artificial Sequence
  Description of Artificial Sequence: Synthetic peptide
  Seed: DPRMCSLMQGSTLPRRSGA
DPRMFSLMQASTTPRRSGA

SEQ ID NO: 65869 - protein, 19 aa, Artificial Sequence
  Description of Artificial Sequence: Synthetic peptide
  Seed: DPRMCSLMQGSTLPRRSGA
DPRMFSLMQASTVPRRSGA

SEQ ID NO: 65870 - protein, 19 aa, Artificial Sequence
  Description of Artificial Sequence: Synthetic peptide
  Seed: DPRMCSLMQGSTLPRRSGA
DPRMFSLMQASTYPRRSGA

SEQ ID NO: 65871 - protein, 19 aa, Artificial Sequence
  Description of Artificial Sequence: Synthetic peptide
  Seed: DPRMCSLMQGSTLPRRSGA
DPRMFSLMQGSTAPRRSGA

SEQ ID NO: 65872 - protein, 19 aa, Artificial Sequence
  Description of Artificial Sequence: Synthetic peptide
  Seed: DPRMCSLMQGSTLPRRSGA
DPRMFSLMQGSTCPRRSGA

SEQ ID NO: 65873 - protein, 19 aa, Artificial Sequence
  Description of Artificial Sequence: Synthetic peptide
  Seed: DPRMCSLMQGSTLPRRSGA
DPRMFSLMQGSTFPRRSGA

SEQ ID NO: 65874 - protein, 19 aa, Artificial Sequence
  Description of Artificial Sequence: Synthetic peptide
  Seed: DPRMCSLMQGSTLPRRSGA
DPRMFSLMQGSTGPRRSGA

SEQ ID NO: 65875 - protein, 19 aa, Artificial Sequence
  Description of Artificial Sequence: Synthetic peptide
  Seed: DPRMCSLMQGSTLPRRSGA
DPRMFSLMQGSTIPRRSGA

SEQ ID NO: 65876 - protein, 19 aa, Artificial Sequence
  Description of Artificial Sequence: Synthetic peptide
  Seed: DPRMCSLMQGSTLPRRSGA
DPRMFSLMQGSTLPRRSGA

SEQ ID NO: 65877 - protein, 19 aa, Artificial Sequence
  Description of Artificial Sequence: Synthetic peptide
  Seed: DPRMCSLMQGSTLPRRSGA
DPRMFSLMQGSTMPRRSGA

SEQ ID NO: 65878 - protein, 19 aa, Artificial Sequence
  Description of Artificial Sequence: Synthetic peptide
  Seed: DPRMCSLMQGSTLPRRSGA
DPRMFSLMQGSTNPRRSGA

SEQ ID NO: 65879 - protein, 19 aa, Artificial Sequence
  Description of Artificial Sequence: Synthetic peptide
  Seed: DPRMCSLMQGSTLPRRSGA
DPRMFSLMQGSTQPRRSGA

SEQ ID NO: 65880 - protein, 19 aa, Artificial Sequence
  Description of Artificial Sequence: Synthetic peptide
  Seed: DPRMCSLMQGSTLPRRSGA
DPRMFSLMQGSTSPRRSGA

SEQ ID NO: 65881 - protein, 19 aa, Artificial Sequence
  Description of Artificial Sequence: Synthetic peptide
  Seed: DPRMCSLMQGSTLPRRSGA
DPRMFSLMQGSTTPRRSGA

SEQ ID NO: 65882 - protein, 19 aa, Artificial Sequence
  Description of Artificial Sequence: Synthetic peptide
  Seed: DPRMCSLMQGSTLPRRSGA
DPRMFSLMQGSTVPRRSGA

SEQ ID NO: 65883 - protein, 19 aa, Artificial Sequence
  Description of Artificial Sequence: Synthetic peptide
  Seed: DPRMCSLMQGSTLPRRSGA
DPRMFSLMQHSTLPRRSGA

SEQ ID NO: 65884 - protein, 19 aa, Artificial Sequence
  Description of Artificial Sequence: Synthetic peptide
  Seed: DPRMCSLMQGSTLPRRSGA
DPRMFSLMQHSTVPRRSGA

SEQ ID NO: 65885 - protein, 19 aa, Artificial Sequence
  Description of Artificial Sequence: Synthetic peptide
  Seed: DPRMCSLMQGSTLPRRSGA
DPRMFSLMQISTAPRRSGA

SEQ ID NO: 65886 - protein, 19 aa, Artificial Sequence
  Description of Artificial Sequence: Synthetic peptide
  Seed: DPRMCSLMQGSTLPRRSGA
DPRMFSLMQISTGPRRSGA

SEQ ID NO: 65887 - protein, 19 aa, Artificial Sequence
  Description of Artificial Sequence: Synthetic peptide
  Seed: DPRMCSLMQGSTLPRRSGA
DPRMFSLMQISTHPRRSGA

SEQ ID NO: 65888 - protein, 19 aa, Artificial Sequence
  Description of Artificial Sequence: Synthetic peptide
  Seed: DPRMCSLMQGSTLPRRSGA
DPRMFSLMQISTIPRRSGA

SEQ ID NO: 65889 - protein, 19 aa, Artificial Sequence
  Description of Artificial Sequence: Synthetic peptide
  Seed: DPRMCSLMQGSTLPRRSGA
DPRMFSLMQISTLPRRSGA

SEQ ID NO: 65890 - protein, 19 aa, Artificial Sequence
  Description of Artificial Sequence: Synthetic peptide
  Seed: DPRMCSLMQGSTLPRRSGA
DPRMFSLMQISTMPRRSGA

SEQ ID NO: 65891 - protein, 19 aa, Artificial Sequence
  Description of Artificial Sequence: Synthetic peptide
  Seed: DPRMCSLMQGSTLPRRSGA
DPRMFSLMQISTNPRRSGA

SEQ ID NO: 65892 - protein, 19 aa, Artificial Sequence
  Description of Artificial Sequence: Synthetic peptide
  Seed: DPRMCSLMQGSTLPRRSGA
DPRMFSLMQISTQPRRSGA

SEQ ID NO: 65893 - protein, 19 aa, Artificial Sequence
  Description of Artificial Sequence: Synthetic peptide
  Seed: DPRMCSLMQGSTLPRRSGA
DPRMFSLMQISTSPRRSGA

SEQ ID NO: 65894 - protein, 19 aa, Artificial Sequence
  Description of Artificial Sequence: Synthetic peptide
  Seed: DPRMCSLMQGSTLPRRSGA
DPRMFSLMQISTTPRRSGA

SEQ ID NO: 65895 - protein, 19 aa, Artificial Sequence
  Description of Artificial Sequence: Synthetic peptide
  Seed: DPRMCSLMQGSTLPRRSGA
DPRMFSLMQISTVPRRSGA

SEQ ID NO: 65896 - protein, 19 aa, Artificial Sequence
  Description of Artificial Sequence: Synthetic peptide
  Seed: DPRMCSLMQGSTLPRRSGA
DPRMFSLMQLSTAPRRSGA

SEQ ID NO: 65897 - protein, 19 aa, Artificial Sequence
  Description of Artificial Sequence: Synthetic peptide
  Seed: DPRMCSLMQGSTLPRRSGA
DPRMFSLMQLSTIPRRSGA

SEQ ID NO: 65898 - protein, 19 aa, Artificial Sequence
  Description of Artificial Sequence: Synthetic peptide
  Seed: DPRMCSLMQGSTLPRRSGA
DPRMFSLMQLSTLPRRSGA

SEQ ID NO: 65899 - protein, 19 aa, Artificial Sequence
  Description of Artificial Sequence: Synthetic peptide
  Seed: DPRMCSLMQGSTLPRRSGA
DPRMFSLMQLSTMPRRSGA

SEQ ID NO: 65900 - protein, 19 aa, Artificial Sequence
  Description of Artificial Sequence: Synthetic peptide
  Seed: DPRMCSLMQGSTLPRRSGA
DPRMFSLMQLSTNPRRSGA

SEQ ID NO: 65901 - protein, 19 aa, Artificial Sequence
  Description of Artificial Sequence: Synthetic peptide
  Seed: DPRMCSLMQGSTLPRRSGA
DPRMFSLMQLSTSPRRSGA

SEQ ID NO: 65902 - protein, 19 aa, Artificial Sequence
  Description of Artificial Sequence: Synthetic peptide
  Seed: DPRMCSLMQGSTLPRRSGA
DPRMFSLMQLSTTPRRSGA

SEQ ID NO: 65903 - protein, 19 aa, Artificial Sequence
  Description of Artificial Sequence: Synthetic peptide
  Seed: DPRMCSLMQGSTLPRRSGA
DPRMFSLMQLSTVPRRSGA

SEQ ID NO: 65904 - protein, 19 aa, Artificial Sequence
  Description of Artificial Sequence: Synthetic peptide
  Seed: DPRMCSLMQGSTLPRRSGA
DPRMFSLMQMSTAPRRSGA

SEQ ID NO: 65905 - protein, 19 aa, Artificial Sequence
  Description of Artificial Sequence: Synthetic peptide
  Seed: DPRMCSLMQGSTLPRRSGA
DPRMFSLMQMSTIPRRSGA

SEQ ID NO: 65906 - protein, 19 aa, Artificial Sequence
  Description of Artificial Sequence: Synthetic peptide
  Seed: DPRMCSLMQGSTLPRRSGA
DPRMFSLMQMSTLPRRSGA

SEQ ID NO: 65907 - protein, 19 aa, Artificial Sequence
  Description of Artificial Sequence: Synthetic peptide
  Seed: DPRMCSLMQGSTLPRRSGA
DPRMFSLMQMSTMPRRSGA

SEQ ID NO: 65908 - protein, 19 aa, Artificial Sequence
  Description of Artificial Sequence: Synthetic peptide
  Seed: DPRMCSLMQGSTLPRRSGA
DPRMFSLMQMSTNPRRSGA

SEQ ID NO: 65909 - protein, 19 aa, Artificial Sequence
  Description of Artificial Sequence: Synthetic peptide
  Seed: DPRMCSLMQGSTLPRRSGA
DPRMFSLMQMSTSPRRSGA

SEQ ID NO: 65910 - protein, 19 aa, Artificial Sequence
  Description of Artificial Sequence: Synthetic peptide
  Seed: DPRMCSLMQGSTLPRRSGA
DPRMFSLMQMSTTPRRSGA

SEQ ID NO: 65911 - protein, 19 aa, Artificial Sequence
  Description of Artificial Sequence: Synthetic peptide
  Seed: DPRMCSLMQGSTLPRRSGA
DPRMFSLMQMSTVPRRSGA

SEQ ID NO: 65912 - protein, 19 aa, Artificial Sequence
  Description of Artificial Sequence: Synthetic peptide
  Seed: DPRMCSLMQGSTLPRRSGA
DPRMFSLMQNSTAPRRSGA

SEQ ID NO: 65913 - protein, 19 aa, Artificial Sequence
  Description of Artificial Sequence: Synthetic peptide
  Seed: DPRMCSLMQGSTLPRRSGA
DPRMFSLMQNSTGPRRSGA

SEQ ID NO: 65914 - protein, 19 aa, Artificial Sequence
  Description of Artificial Sequence: Synthetic peptide
  Seed: DPRMCSLMQGSTLPRRSGA
DPRMFSLMQNSTIPRRSGA

SEQ ID NO: 65915 - protein, 19 aa, Artificial Sequence
  Description of Artificial Sequence: Synthetic peptide
  Seed: DPRMCSLMQGSTLPRRSGA
DPRMFSLMQNSTLPRRSGA

SEQ ID NO: 65916 - protein, 19 aa, Artificial Sequence
  Description of Artificial Sequence: Synthetic peptide
  Seed: DPRMCSLMQGSTLPRRSGA
DPRMFSLMQNSTMPRRSGA

SEQ ID NO: 65917 - protein, 19 aa, Artificial Sequence
  Description of Artificial Sequence: Synthetic peptide
  Seed: DPRMCSLMQGSTLPRRSGA
DPRMFSLMQNSTNPRRSGA

SEQ ID NO: 65918 - protein, 19 aa, Artificial Sequence
  Description of Artificial Sequence: Synthetic peptide
  Seed: DPRMCSLMQGSTLPRRSGA
DPRMFSLMQNSTSPRRSGA

SEQ ID NO: 65919 - protein, 19 aa, Artificial Sequence
  Description of Artificial Sequence: Synthetic peptide
  Seed: DPRMCSLMQGSTLPRRSGA
DPRMFSLMQNSTTPRRSGA

SEQ ID NO: 65920 - protein, 19 aa, Artificial Sequence
  Description of Artificial Sequence: Synthetic peptide
  Seed: DPRMCSLMQGSTLPRRSGA
DPRMFSLMQNSTVPRRSGA

SEQ ID NO: 65921 - protein, 19 aa, Artificial Sequence
  Description of Artificial Sequence: Synthetic peptide
  Seed: DPRMCSLMQGSTLPRRSGA
DPRMFSLMQPSTAPRRSGA

SEQ ID NO: 65922 - protein, 19 aa, Artificial Sequence
  Description of Artificial Sequence: Synthetic peptide
  Seed: DPRMCSLMQGSTLPRRSGA
DPRMFSLMQPSTDPRRSGA

SEQ ID NO: 65923 - protein, 19 aa, Artificial Sequence
  Description of Artificial Sequence: Synthetic peptide
  Seed: DPRMCSLMQGSTLPRRSGA
DPRMFSLMQPSTEPRRSGA

SEQ ID NO: 65924 - protein, 19 aa, Artificial Sequence
  Description of Artificial Sequence: Synthetic peptide
  Seed: DPRMCSLMQGSTLPRRSGA
DPRMFSLMQPSTFPRRSGA

SEQ ID NO: 65925 - protein, 19 aa, Artificial Sequence
  Description of Artificial Sequence: Synthetic peptide
  Seed: DPRMCSLMQGSTLPRRSGA
DPRMFSLMQPSTGPRRSGA

SEQ ID NO: 65926 - protein, 19 aa, Artificial Sequence
  Description of Artificial Sequence: Synthetic peptide
  Seed: DPRMCSLMQGSTLPRRSGA
DPRMFSLMQPSTHPRRSGA

SEQ ID NO: 65927 - protein, 19 aa, Artificial Sequence
  Description of Artificial Sequence: Synthetic peptide
  Seed: DPRMCSLMQGSTLPRRSGA
DPRMFSLMQPSTIPRRSGA

SEQ ID NO: 65928 - protein, 19 aa, Artificial Sequence
  Description of Artificial Sequence: Synthetic peptide
  Seed: DPRMCSLMQGSTLPRRSGA
DPRMFSLMQPSTLPRRSGA

SEQ ID NO: 65929 - protein, 19 aa, Artificial Sequence
  Description of Artificial Sequence: Synthetic peptide
  Seed: DPRMCSLMQGSTLPRRSGA
DPRMFSLMQPSTMPRRSGA

SEQ ID NO: 65930 - protein, 19 aa, Artificial Sequence
  Description of Artificial Sequence: Synthetic peptide
  Seed: DPRMCSLMQGSTLPRRSGA
DPRMFSLMQPSTNPRRSGA

SEQ ID NO: 65931 - protein, 19 aa, Artificial Sequence
  Description of Artificial Sequence: Synthetic peptide
  Seed: DPRMCSLMQGSTLPRRSGA
DPRMFSLMQPSTPPRRSGA

SEQ ID NO: 65932 - protein, 19 aa, Artificial Sequence
  Description of Artificial Sequence: Synthetic peptide
  Seed: DPRMCSLMQGSTLPRRSGA
DPRMFSLMQPSTQPRRSGA

SEQ ID NO: 65933 - protein, 19 aa, Artificial Sequence
  Description of Artificial Sequence: Synthetic peptide
  Seed: DPRMCSLMQGSTLPRRSGA
DPRMFSLMQPSTSPRRSGA

SEQ ID NO: 65934 - protein, 19 aa, Artificial Sequence
  Description of Artificial Sequence: Synthetic peptide
  Seed: DPRMCSLMQGSTLPRRSGA
DPRMFSLMQPSTTPRRSGA

SEQ ID NO: 65935 - protein, 19 aa, Artificial Sequence
  Description of Artificial Sequence: Synthetic peptide
  Seed: DPRMCSLMQGSTLPRRSGA
DPRMFSLMQPSTVPRRSGA

SEQ ID NO: 65936 - protein, 19 aa, Artificial Sequence
  Description of Artificial Sequence: Synthetic peptide
  Seed: DPRMCSLMQGSTLPRRSGA
DPRMFSLMQSSTAPRRSGA

SEQ ID NO: 65937 - protein, 19 aa, Artificial Sequence
  Description of Artificial Sequence: Synthetic peptide
  Seed: DPRMCSLMQGSTLPRRSGA
DPRMFSLMQSSTCPRRSGA

SEQ ID NO: 65938 - protein, 19 aa, Artificial Sequence
  Description of Artificial Sequence: Synthetic peptide
  Seed: DPRMCSLMQGSTLPRRSGA
DPRMFSLMQSSTFPRRSGA

SEQ ID NO: 65939 - protein, 19 aa, Artificial Sequence
  Description of Artificial Sequence: Synthetic peptide
  Seed: DPRMCSLMQGSTLPRRSGA
DPRMFSLMQSSTGPRRSGA

SEQ ID NO: 65940 - protein, 19 aa, Artificial Sequence
  Description of Artificial Sequence: Synthetic peptide
  Seed: DPRMCSLMQGSTLPRRSGA
DPRMFSLMQSSTHPRRSGA

SEQ ID NO: 65941 - protein, 19 aa, Artificial Sequence
  Description of Artificial Sequence: Synthetic peptide
  Seed: DPRMCSLMQGSTLPRRSGA
DPRMFSLMQSSTIPRRSGA

SEQ ID NO: 65942 - protein, 19 aa, Artificial Sequence
  Description of Artificial Sequence: Synthetic peptide
  Seed: DPRMCSLMQGSTLPRRSGA
DPRMFSLMQSSTLPRRSGA

SEQ ID NO: 65943 - protein, 19 aa, Artificial Sequence
  Description of Artificial Sequence: Synthetic peptide
  Seed: DPRMCSLMQGSTLPRRSGA
DPRMFSLMQSSTMPRRSGA

SEQ ID NO: 65944 - protein, 19 aa, Artificial Sequence
  Description of Artificial Sequence: Synthetic peptide
  Seed: DPRMCSLMQGSTLPRRSGA
DPRMFSLMQSSTNPRRSGA

SEQ ID NO: 65945 - protein, 19 aa, Artificial Sequence
  Description of Artificial Sequence: Synthetic peptide
  Seed: DPRMCSLMQGSTLPRRSGA
DPRMFSLMQSSTPPRRSGA

SEQ ID NO: 65946 - protein, 19 aa, Artificial Sequence
  Description of Artificial Sequence: Synthetic peptide
  Seed: DPRMCSLMQGSTLPRRSGA
DPRMFSLMQSSTQPRRSGA

SEQ ID NO: 65947 - protein, 19 aa, Artificial Sequence
  Description of Artificial Sequence: Synthetic peptide
  Seed: DPRMCSLMQGSTLPRRSGA
DPRMFSLMQSSTSPRRSGA

SEQ ID NO: 65948 - protein, 19 aa, Artificial Sequence
  Description of Artificial Sequence: Synthetic peptide
  Seed: DPRMCSLMQGSTLPRRSGA
DPRMFSLMQSSTTPRRSGA

SEQ ID NO: 65949 - protein, 19 aa, Artificial Sequence
  Description of Artificial Sequence: Synthetic peptide
  Seed: DPRMCSLMQGSTLPRRSGA
DPRMFSLMQSSTVPRRSGA

SEQ ID NO: 65950 - protein, 19 aa, Artificial Sequence
  Description of Artificial Sequence: Synthetic peptide
  Seed: DPRMCSLMQGSTLPRRSGA
DPRMFSLMQTSTAPRRSGA

SEQ ID NO: 65951 - protein, 19 aa, Artificial Sequence
  Description of Artificial Sequence: Synthetic peptide
  Seed: DPRMCSLMQGSTLPRRSGA
DPRMFSLMQTSTGPRRSGA

SEQ ID NO: 65952 - protein, 19 aa, Artificial Sequence
  Description of Artificial Sequence: Synthetic peptide
  Seed: DPRMCSLMQGSTLPRRSGA
DPRMFSLMQTSTHPRRSGA

SEQ ID NO: 65953 - protein, 19 aa, Artificial Sequence
  Description of Artificial Sequence: Synthetic peptide
  Seed: DPRMCSLMQGSTLPRRSGA
DPRMFSLMQTSTIPRRSGA

SEQ ID NO: 65954 - protein, 19 aa, Artificial Sequence
  Description of Artificial Sequence: Synthetic peptide
  Seed: DPRMCSLMQGSTLPRRSGA
DPRMFSLMQTSTLPRRSGA

SEQ ID NO: 65955 - protein, 19 aa, Artificial Sequence
  Description of Artificial Sequence: Synthetic peptide
  Seed: DPRMCSLMQGSTLPRRSGA
DPRMFSLMQTSTMPRRSGA

SEQ ID NO: 65956 - protein, 19 aa, Artificial Sequence
  Description of Artificial Sequence: Synthetic peptide
  Seed: DPRMCSLMQGSTLPRRSGA
DPRMFSLMQTSTNPRRSGA

SEQ ID NO: 65957 - protein, 19 aa, Artificial Sequence
  Description of Artificial Sequence: Synthetic peptide
  Seed: DPRMCSLMQGSTLPRRSGA
DPRMFSLMQTSTPPRRSGA

SEQ ID NO: 65958 - protein, 19 aa, Artificial Sequence
  Description of Artificial Sequence: Synthetic peptide
  Seed: DPRMCSLMQGSTLPRRSGA
DPRMFSLMQTSTQPRRSGA

SEQ ID NO: 65959 - protein, 19 aa, Artificial Sequence
  Description of Artificial Sequence: Synthetic peptide
  Seed: DPRMCSLMQGSTLPRRSGA
DPRMFSLMQTSTSPRRSGA

SEQ ID NO: 65960 - protein, 19 aa, Artificial Sequence
  Description of Artificial Sequence: Synthetic peptide
  Seed: DPRMCSLMQGSTLPRRSGA
DPRMFSLMQTSTTPRRSGA

SEQ ID NO: 65961 - protein, 19 aa, Artificial Sequence
  Description of Artificial Sequence: Synthetic peptide
  Seed: DPRMCSLMQGSTLPRRSGA
DPRMFSLMQTSTVPRRSGA

SEQ ID NO: 65962 - protein, 19 aa, Artificial Sequence
  Description of Artificial Sequence: Synthetic peptide
  Seed: DPRMCSLMQGSTLPRRSGA
DPRMFSLMQVSTAPRRSGA

SEQ ID NO: 65963 - protein, 19 aa, Artificial Sequence
  Description of Artificial Sequence: Synthetic peptide
  Seed: DPRMCSLMQGSTLPRRSGA
DPRMFSLMQVSTCPRRSGA

SEQ ID NO: 65964 - protein, 19 aa, Artificial Sequence
  Description of Artificial Sequence: Synthetic peptide
  Seed: DPRMCSLMQGSTLPRRSGA
DPRMFSLMQVSTDPRRSGA

SEQ ID NO: 65965 - protein, 19 aa, Artificial Sequence
  Description of Artificial Sequence: Synthetic peptide
  Seed: DPRMCSLMQGSTLPRRSGA
DPRMFSLMQVSTEPRRSGA

SEQ ID NO: 65966 - protein, 19 aa, Artificial Sequence
  Description of Artificial Sequence: Synthetic peptide
  Seed: DPRMCSLMQGSTLPRRSGA
DPRMFSLMQVSTGPRRSGA

SEQ ID NO: 65967 - protein, 19 aa, Artificial Sequence
  Description of Artificial Sequence: Synthetic peptide
  Seed: DPRMCSLMQGSTLPRRSGA
DPRMFSLMQVSTHPRRSGA

SEQ ID NO: 65968 - protein, 19 aa, Artificial Sequence
  Description of Artificial Sequence: Synthetic peptide
  Seed: DPRMCSLMQGSTLPRRSGA
DPRMFSLMQVSTIPRRSGA

SEQ ID NO: 65969 - protein, 19 aa, Artificial Sequence
  Description of Artificial Sequence: Synthetic peptide
  Seed: DPRMCSLMQGSTLPRRSGA
DPRMFSLMQVSTLPRRSGA

SEQ ID NO: 65970 - protein, 19 aa, Artificial Sequence
  Description of Artificial Sequence: Synthetic peptide
  Seed: DPRMCSLMQGSTLPRRSGA
DPRMFSLMQVSTMPRRSGA

SEQ ID NO: 65971 - protein, 19 aa, Artificial Sequence
  Description of Artificial Sequence: Synthetic peptide
  Seed: DPRMCSLMQGSTLPRRSGA
DPRMFSLMQVSTNPRRSGA

SEQ ID NO: 65972 - protein, 19 aa, Artificial Sequence
  Description of Artificial Sequence: Synthetic peptide
  Seed: DPRMCSLMQGSTLPRRSGA
DPRMFSLMQVSTPPRRSGA

SEQ ID NO: 65973 - protein, 19 aa, Artificial Sequence
  Description of Artificial Sequence: Synthetic peptide
  Seed: DPRMCSLMQGSTLPRRSGA
DPRMFSLMQVSTQPRRSGA

SEQ ID NO: 65974 - protein, 19 aa, Artificial Sequence
  Description of Artificial Sequence: Synthetic peptide
  Seed: DPRMCSLMQGSTLPRRSGA
DPRMFSLMQVSTSPRRSGA

SEQ ID NO: 65975 - protein, 19 aa, Artificial Sequence
  Description of Artificial Sequence: Synthetic peptide
  Seed: DPRMCSLMQGSTLPRRSGA
DPRMFSLMQVSTTPRRSGA

SEQ ID NO: 65976 - protein, 19 aa, Artificial Sequence
  Description of Artificial Sequence: Synthetic peptide
  Seed: DPRMCSLMQGSTLPRRSGA
DPRMFSLMQVSTVPRRSGA

SEQ ID NO: 65977 - protein, 19 aa, Artificial Sequence
  Description of Artificial Sequence: Synthetic peptide
  Seed: DPRMCSLMQGSTLPRRSGA
DPRMFSLNQASTIPRRSGA

SEQ ID NO: 65978 - protein, 19 aa, Artificial Sequence
  Description of Artificial Sequence: Synthetic peptide
  Seed: DPRMCSLMQGSTLPRRSGA
DPRMFSLNQASTLPRRSGA

SEQ ID NO: 65979 - protein, 19 aa, Artificial Sequence
  Description of Artificial Sequence: Synthetic peptide
  Seed: DPRMCSLMQGSTLPRRSGA
DPRMFSLNQASTVPRRSGA

SEQ ID NO: 65980 - protein, 19 aa, Artificial Sequence
  Description of Artificial Sequence: Synthetic peptide
  Seed: DPRMCSLMQGSTLPRRSGA
DPRMFSLQQASTAPRRSGA

SEQ ID NO: 65981 - protein, 19 aa, Artificial Sequence
  Description of Artificial Sequence: Synthetic peptide
  Seed: DPRMCSLMQGSTLPRRSGA
DPRMFSLQQASTIPRRSGA

SEQ ID NO: 65982 - protein, 19 aa, Artificial Sequence
  Description of Artificial Sequence: Synthetic peptide
  Seed: DPRMCSLMQGSTLPRRSGA
DPRMFSLQQASTLPRRSGA

SEQ ID NO: 65983 - protein, 19 aa, Artificial Sequence
  Description of Artificial Sequence: Synthetic peptide
  Seed: DPRMCSLMQGSTLPRRSGA
DPRMFSLQQASTMPRRSGA

SEQ ID NO: 65984 - protein, 19 aa, Artificial Sequence
  Description of Artificial Sequence: Synthetic peptide
  Seed: DPRMCSLMQGSTLPRRSGA
DPRMFSLQQASTNPRRSGA

SEQ ID NO: 65985 - protein, 19 aa, Artificial Sequence
  Description of Artificial Sequence: Synthetic peptide
  Seed: DPRMCSLMQGSTLPRRSGA
DPRMFSLQQASTSPRRSGA

SEQ ID NO: 65986 - protein, 19 aa, Artificial Sequence
  Description of Artificial Sequence: Synthetic peptide
  Seed: DPRMCSLMQGSTLPRRSGA
DPRMFSLQQASTTPRRSGA

SEQ ID NO: 65987 - protein, 19 aa, Artificial Sequence
  Description of Artificial Sequence: Synthetic peptide
  Seed: DPRMCSLMQGSTLPRRSGA
DPRMFSLQQASTVPRRSGA

SEQ ID NO: 65988 - protein, 19 aa, Artificial Sequence
  Description of Artificial Sequence: Synthetic peptide
  Seed: DPRMCSLMQGSTLPRRSGA
DPRMFSLQQGSTAPRRSGA

SEQ ID NO: 65989 - protein, 19 aa, Artificial Sequence
  Description of Artificial Sequence: Synthetic peptide
  Seed: DPRMCSLMQGSTLPRRSGA
DPRMFSLQQGSTIPRRSGA

SEQ ID NO: 65990 - protein, 19 aa, Artificial Sequence
  Description of Artificial Sequence: Synthetic peptide
  Seed: DPRMCSLMQGSTLPRRSGA
DPRMFSLQQGSTLPRRSGA

SEQ ID NO: 65991 - protein, 19 aa, Artificial Sequence
  Description of Artificial Sequence: Synthetic peptide
  Seed: DPRMCSLMQGSTLPRRSGA
DPRMFSLQQGSTMPRRSGA

SEQ ID NO: 65992 - protein, 19 aa, Artificial Sequence
  Description of Artificial Sequence: Synthetic peptide
  Seed: DPRMCSLMQGSTLPRRSGA
DPRMFSLQQGSTTPRRSGA

SEQ ID NO: 65993 - protein, 19 aa, Artificial Sequence
  Description of Artificial Sequence: Synthetic peptide
  Seed: DPRMCSLMQGSTLPRRSGA
DPRMFSLQQGSTVPRRSGA

SEQ ID NO: 65994 - protein, 19 aa, Artificial Sequence
  Description of Artificial Sequence: Synthetic peptide
  Seed: DPRMCSLMQGSTLPRRSGA
DPRMFSLQQISTAPRRSGA

SEQ ID NO: 65995 - protein, 19 aa, Artificial Sequence
  Description of Artificial Sequence: Synthetic peptide
  Seed: DPRMCSLMQGSTLPRRSGA
DPRMFSLQQISTSPRRSGA

SEQ ID NO: 65996 - protein, 19 aa, Artificial Sequence
  Description of Artificial Sequence: Synthetic peptide
  Seed: DPRMCSLMQGSTLPRRSGA
DPRMFSLQQNSTIPRRSGA

SEQ ID NO: 65997 - protein, 19 aa, Artificial Sequence
  Description of Artificial Sequence: Synthetic peptide
  Seed: DPRMCSLMQGSTLPRRSGA
DPRMFSLQQNSTLPRRSGA

SEQ ID NO: 65998 - protein, 19 aa, Artificial Sequence
  Description of Artificial Sequence: Synthetic peptide
  Seed: DPRMCSLMQGSTLPRRSGA
DPRMFSLQQNSTVPRRSGA

SEQ ID NO: 65999 - protein, 19 aa, Artificial Sequence
  Description of Artificial Sequence: Synthetic peptide
  Seed: DPRMCSLMQGSTLPRRSGA
DPRMFSLQQPSTAPRRSGA

SEQ ID NO: 66000 - protein, 19 aa, Artificial Sequence
  Description of Artificial Sequence: Synthetic peptide
  Seed: DPRMCSLMQGSTLPRRSGA
DPRMFSLQQPSTIPRRSGA

SEQ ID NO: 66001 - protein, 19 aa, Artificial Sequence
  Description of Artificial Sequence: Synthetic peptide
  Seed: DPRMCSLMQGSTLPRRSGA
DPRMFSLQQPSTLPRRSGA

SEQ ID NO: 66002 - protein, 19 aa, Artificial Sequence
  Description of Artificial Sequence: Synthetic peptide
  Seed: DPRMCSLMQGSTLPRRSGA
DPRMFSLQQPSTSPRRSGA

SEQ ID NO: 66003 - protein, 19 aa, Artificial Sequence
  Description of Artificial Sequence: Synthetic peptide
  Seed: DPRMCSLMQGSTLPRRSGA
DPRMFSLQQPSTVPRRSGA

SEQ ID NO: 66004 - protein, 19 aa, Artificial Sequence
  Description of Artificial Sequence: Synthetic peptide
  Seed: DPRMCSLMQGSTLPRRSGA
DPRMFSLQQSSTAPRRSGA

SEQ ID NO: 66005 - protein, 19 aa, Artificial Sequence
  Description of Artificial Sequence: Synthetic peptide
  Seed: DPRMCSLMQGSTLPRRSGA
DPRMFSLQQSSTIPRRSGA

SEQ ID NO: 66006 - protein, 19 aa, Artificial Sequence
  Description of Artificial Sequence: Synthetic peptide
  Seed: DPRMCSLMQGSTLPRRSGA
DPRMFSLQQSSTLPRRSGA

SEQ ID NO: 66007 - protein, 19 aa, Artificial Sequence
  Description of Artificial Sequence: Synthetic peptide
  Seed: DPRMCSLMQGSTLPRRSGA
DPRMFSLQQSSTMPRRSGA

SEQ ID NO: 66008 - protein, 19 aa, Artificial Sequence
  Description of Artificial Sequence: Synthetic peptide
  Seed: DPRMCSLMQGSTLPRRSGA
DPRMFSLQQSSTNPRRSGA

SEQ ID NO: 66009 - protein, 19 aa, Artificial Sequence
  Description of Artificial Sequence: Synthetic peptide
  Seed: DPRMCSLMQGSTLPRRSGA
DPRMFSLQQSSTSPRRSGA

SEQ ID NO: 66010 - protein, 19 aa, Artificial Sequence
  Description of Artificial Sequence: Synthetic peptide
  Seed: DPRMCSLMQGSTLPRRSGA
DPRMFSLQQSSTTPRRSGA

SEQ ID NO: 66011 - protein, 19 aa, Artificial Sequence
  Description of Artificial Sequence: Synthetic peptide
  Seed: DPRMCSLMQGSTLPRRSGA
DPRMFSLQQSSTVPRRSGA

SEQ ID NO: 66012 - protein, 19 aa, Artificial Sequence
  Description of Artificial Sequence: Synthetic peptide
  Seed: DPRMCSLMQGSTLPRRSGA
DPRMFSLQQTSTAPRRSGA

SEQ ID NO: 66013 - protein, 19 aa, Artificial Sequence
  Description of Artificial Sequence: Synthetic peptide
  Seed: DPRMCSLMQGSTLPRRSGA
DPRMFSLQQTSTIPRRSGA

SEQ ID NO: 66014 - protein, 19 aa, Artificial Sequence
  Description of Artificial Sequence: Synthetic peptide
  Seed: DPRMCSLMQGSTLPRRSGA
DPRMFSLQQTSTLPRRSGA

SEQ ID NO: 66015 - protein, 19 aa, Artificial Sequence
  Description of Artificial Sequence: Synthetic peptide
  Seed: DPRMCSLMQGSTLPRRSGA
DPRMFSLQQTSTNPRRSGA

SEQ ID NO: 66016 - protein, 19 aa, Artificial Sequence
  Description of Artificial Sequence: Synthetic peptide
  Seed: DPRMCSLMQGSTLPRRSGA
DPRMFSLQQTSTSPRRSGA

SEQ ID NO: 66017 - protein, 19 aa, Artificial Sequence
  Description of Artificial Sequence: Synthetic peptide
  Seed: DPRMCSLMQGSTLPRRSGA
DPRMFSLQQTSTVPRRSGA

SEQ ID NO: 66018 - protein, 19 aa, Artificial Sequence
  Description of Artificial Sequence: Synthetic peptide
  Seed: DPRMCSLMQGSTLPRRSGA
DPRMFSLQQVSTAPRRSGA

SEQ ID NO: 66019 - protein, 19 aa, Artificial Sequence
  Description of Artificial Sequence: Synthetic peptide
  Seed: DPRMCSLMQGSTLPRRSGA
DPRMFSLQQVSTNPRRSGA

SEQ ID NO: 66020 - protein, 19 aa, Artificial Sequence
  Description of Artificial Sequence: Synthetic peptide
  Seed: DPRMCSLMQGSTLPRRSGA
DPRMFSLQQVSTSPRRSGA

SEQ ID NO: 66021 - protein, 19 aa, Artificial Sequence
  Description of Artificial Sequence: Synthetic peptide
  Seed: DPRMCSLMQGSTLPRRSGA
DPRMFSLSQASTAPRRSGA

SEQ ID NO: 66022 - protein, 19 aa, Artificial Sequence
  Description of Artificial Sequence: Synthetic peptide
  Seed: DPRMCSLMQGSTLPRRSGA
DPRMFSLSQASTIPRRSGA

SEQ ID NO: 66023 - protein, 19 aa, Artificial Sequence
  Description of Artificial Sequence: Synthetic peptide
  Seed: DPRMCSLMQGSTLPRRSGA
DPRMFSLSQASTLPRRSGA

SEQ ID NO: 66024 - protein, 19 aa, Artificial Sequence
  Description of Artificial Sequence: Synthetic peptide
  Seed: DPRMCSLMQGSTLPRRSGA
DPRMFSLSQASTMPRRSGA

SEQ ID NO: 66025 - protein, 19 aa, Artificial Sequence
  Description of Artificial Sequence: Synthetic peptide
  Seed: DPRMCSLMQGSTLPRRSGA
DPRMFSLSQASTNPRRSGA

SEQ ID NO: 66026 - protein, 19 aa, Artificial Sequence
  Description of Artificial Sequence: Synthetic peptide
  Seed: DPRMCSLMQGSTLPRRSGA
DPRMFSLSQASTSPRRSGA

SEQ ID NO: 66027 - protein, 19 aa, Artificial Sequence
  Description of Artificial Sequence: Synthetic peptide
  Seed: DPRMCSLMQGSTLPRRSGA
DPRMFSLSQASTVPRRSGA

SEQ ID NO: 66028 - protein, 19 aa, Artificial Sequence
  Description of Artificial Sequence: Synthetic peptide
  Seed: DPRMCSLMQGSTLPRRSGA
DPRMFSLSQGSTIPRRSGA

SEQ ID NO: 66029 - protein, 19 aa, Artificial Sequence
  Description of Artificial Sequence: Synthetic peptide
  Seed: DPRMCSLMQGSTLPRRSGA
DPRMFSLSQGSTLPRRSGA

SEQ ID NO: 66030 - protein, 19 aa, Artificial Sequence
  Description of Artificial Sequence: Synthetic peptide
  Seed: DPRMCSLMQGSTLPRRSGA
DPRMFSLSQGSTVPRRSGA

SEQ ID NO: 66031 - protein, 19 aa, Artificial Sequence
  Description of Artificial Sequence: Synthetic peptide
  Seed: DPRMCSLMQGSTLPRRSGA
DPRMFSLSQPSTIPRRSGA

SEQ ID NO: 66032 - protein, 19 aa, Artificial Sequence
  Description of Artificial Sequence: Synthetic peptide
  Seed: DPRMCSLMQGSTLPRRSGA
DPRMFSLSQPSTLPRRSGA

SEQ ID NO: 66033 - protein, 19 aa, Artificial Sequence
  Description of Artificial Sequence: Synthetic peptide
  Seed: DPRMCSLMQGSTLPRRSGA
DPRMFSLSQPSTVPRRSGA

SEQ ID NO: 66034 - protein, 19 aa, Artificial Sequence
  Description of Artificial Sequence: Synthetic peptide
  Seed: DPRMCSLMQGSTLPRRSGA
DPRMFSLSQSSTIPRRSGA

SEQ ID NO: 66035 - protein, 19 aa, Artificial Sequence
  Description of Artificial Sequence: Synthetic peptide
  Seed: DPRMCSLMQGSTLPRRSGA
DPRMFSLSQSSTLPRRSGA

SEQ ID NO: 66036 - protein, 19 aa, Artificial Sequence
  Description of Artificial Sequence: Synthetic peptide
  Seed: DPRMCSLMQGSTLPRRSGA
DPRMFSLSQSSTVPRRSGA

SEQ ID NO: 66037 - protein, 19 aa, Artificial Sequence
  Description of Artificial Sequence: Synthetic peptide
  Seed: DPRMCSLMQGSTLPRRSGA
DPRMFSLTQASTAPRRSGA

SEQ ID NO: 66038 - protein, 19 aa, Artificial Sequence
  Description of Artificial Sequence: Synthetic peptide
  Seed: DPRMCSLMQGSTLPRRSGA
DPRMFSLTQASTIPRRSGA

SEQ ID NO: 66039 - protein, 19 aa, Artificial Sequence
  Description of Artificial Sequence: Synthetic peptide
  Seed: DPRMCSLMQGSTLPRRSGA
DPRMFSLTQASTLPRRSGA

SEQ ID NO: 66040 - protein, 19 aa, Artificial Sequence
  Description of Artificial Sequence: Synthetic peptide
  Seed: DPRMCSLMQGSTLPRRSGA
DPRMFSLTQASTSPRRSGA

SEQ ID NO: 66041 - protein, 19 aa, Artificial Sequence
  Description of Artificial Sequence: Synthetic peptide
  Seed: DPRMCSLMQGSTLPRRSGA
DPRMFSLTQASTVPRRSGA

SEQ ID NO: 66042 - protein, 19 aa, Artificial Sequence
  Description of Artificial Sequence: Synthetic peptide
  Seed: DPRMCSLMQGSTLPRRSGA
DPRMFSLVQASTAPRRSGA

SEQ ID NO: 66043 - protein, 19 aa, Artificial Sequence
  Description of Artificial Sequence: Synthetic peptide
  Seed: DPRMCSLMQGSTLPRRSGA
DPRMFSLVQASTGPRRSGA

SEQ ID NO: 66044 - protein, 19 aa, Artificial Sequence
  Description of Artificial Sequence: Synthetic peptide
  Seed: DPRMCSLMQGSTLPRRSGA
DPRMFSLVQASTHPRRSGA

SEQ ID NO: 66045 - protein, 19 aa, Artificial Sequence
  Description of Artificial Sequence: Synthetic peptide
  Seed: DPRMCSLMQGSTLPRRSGA
DPRMFSLVQASTIPRRSGA

SEQ ID NO: 66046 - protein, 19 aa, Artificial Sequence
  Description of Artificial Sequence: Synthetic peptide
  Seed: DPRMCSLMQGSTLPRRSGA
DPRMFSLVQASTLPRRSGA

SEQ ID NO: 66047 - protein, 19 aa, Artificial Sequence
  Description of Artificial Sequence: Synthetic peptide
  Seed: DPRMCSLMQGSTLPRRSGA
DPRMFSLVQASTMPRRSGA

SEQ ID NO: 66048 - protein, 19 aa, Artificial Sequence
  Description of Artificial Sequence: Synthetic peptide
  Seed: DPRMCSLMQGSTLPRRSGA
DPRMFSLVQASTNPRRSGA

SEQ ID NO: 66049 - protein, 19 aa, Artificial Sequence
  Description of Artificial Sequence: Synthetic peptide
  Seed: DPRMCSLMQGSTLPRRSGA
DPRMFSLVQASTQPRRSGA

SEQ ID NO: 66050 - protein, 19 aa, Artificial Sequence
  Description of Artificial Sequence: Synthetic peptide
  Seed: DPRMCSLMQGSTLPRRSGA
DPRMFSLVQASTSPRRSGA

SEQ ID NO: 66051 - protein, 19 aa, Artificial Sequence
  Description of Artificial Sequence: Synthetic peptide
  Seed: DPRMCSLMQGSTLPRRSGA
DPRMFSLVQASTTPRRSGA

SEQ ID NO: 66052 - protein, 19 aa, Artificial Sequence
  Description of Artificial Sequence: Synthetic peptide
  Seed: DPRMCSLMQGSTLPRRSGA
DPRMFSLVQASTVPRRSGA

SEQ ID NO: 66053 - protein, 19 aa, Artificial Sequence
  Description of Artificial Sequence: Synthetic peptide
  Seed: DPRMCSLMQGSTLPRRSGA
DPRMFSLVQGSTAPRRSGA

SEQ ID NO: 66054 - protein, 19 aa, Artificial Sequence
  Description of Artificial Sequence: Synthetic peptide
  Seed: DPRMCSLMQGSTLPRRSGA
DPRMFSLVQGSTIPRRSGA

SEQ ID NO: 66055 - protein, 19 aa, Artificial Sequence
  Description of Artificial Sequence: Synthetic peptide
  Seed: DPRMCSLMQGSTLPRRSGA
DPRMFSLVQGSTLPRRSGA

SEQ ID NO: 66056 - protein, 19 aa, Artificial Sequence
  Description of Artificial Sequence: Synthetic peptide
  Seed: DPRMCSLMQGSTLPRRSGA
DPRMFSLVQGSTMPRRSGA

SEQ ID NO: 66057 - protein, 19 aa, Artificial Sequence
  Description of Artificial Sequence: Synthetic peptide
  Seed: DPRMCSLMQGSTLPRRSGA
DPRMFSLVQGSTNPRRSGA

SEQ ID NO: 66058 - protein, 19 aa, Artificial Sequence
  Description of Artificial Sequence: Synthetic peptide
  Seed: DPRMCSLMQGSTLPRRSGA
DPRMFSLVQGSTSPRRSGA

SEQ ID NO: 66059 - protein, 19 aa, Artificial Sequence
  Description of Artificial Sequence: Synthetic peptide
  Seed: DPRMCSLMQGSTLPRRSGA
DPRMFSLVQGSTTPRRSGA

SEQ ID NO: 66060 - protein, 19 aa, Artificial Sequence
  Description of Artificial Sequence: Synthetic peptide
  Seed: DPRMCSLMQGSTLPRRSGA
DPRMFSLVQGSTVPRRSGA

SEQ ID NO: 66061 - protein, 19 aa, Artificial Sequence
  Description of Artificial Sequence: Synthetic peptide
  Seed: DPRMCSLMQGSTLPRRSGA
DPRMFSLVQISTAPRRSGA

SEQ ID NO: 66062 - protein, 19 aa, Artificial Sequence
  Description of Artificial Sequence: Synthetic peptide
  Seed: DPRMCSLMQGSTLPRRSGA
DPRMFSLVQISTNPRRSGA

SEQ ID NO: 66063 - protein, 19 aa, Artificial Sequence
  Description of Artificial Sequence: Synthetic peptide
  Seed: DPRMCSLMQGSTLPRRSGA
DPRMFSLVQISTSPRRSGA

SEQ ID NO: 66064 - protein, 19 aa, Artificial Sequence
  Description of Artificial Sequence: Synthetic peptide
  Seed: DPRMCSLMQGSTLPRRSGA
DPRMFSLVQNSTAPRRSGA

SEQ ID NO: 66065 - protein, 19 aa, Artificial Sequence
  Description of Artificial Sequence: Synthetic peptide
  Seed: DPRMCSLMQGSTLPRRSGA
DPRMFSLVQNSTIPRRSGA

SEQ ID NO: 66066 - protein, 19 aa, Artificial Sequence
  Description of Artificial Sequence: Synthetic peptide
  Seed: DPRMCSLMQGSTLPRRSGA
DPRMFSLVQNSTLPRRSGA

SEQ ID NO: 66067 - protein, 19 aa, Artificial Sequence
  Description of Artificial Sequence: Synthetic peptide
  Seed: DPRMCSLMQGSTLPRRSGA
DPRMFSLVQNSTSPRRSGA

SEQ ID NO: 66068 - protein, 19 aa, Artificial Sequence
  Description of Artificial Sequence: Synthetic peptide
  Seed: DPRMCSLMQGSTLPRRSGA
DPRMFSLVQNSTVPRRSGA

SEQ ID NO: 66069 - protein, 19 aa, Artificial Sequence
  Description of Artificial Sequence: Synthetic peptide
  Seed: DPRMCSLMQGSTLPRRSGA
DPRMFSLVQPSTAPRRSGA

SEQ ID NO: 66070 - protein, 19 aa, Artificial Sequence
  Description of Artificial Sequence: Synthetic peptide
  Seed: DPRMCSLMQGSTLPRRSGA
DPRMFSLVQPSTGPRRSGA

SEQ ID NO: 66071 - protein, 19 aa, Artificial Sequence
  Description of Artificial Sequence: Synthetic peptide
  Seed: DPRMCSLMQGSTLPRRSGA
DPRMFSLVQPSTIPRRSGA

SEQ ID NO: 66072 - protein, 19 aa, Artificial Sequence
  Description of Artificial Sequence: Synthetic peptide
  Seed: DPRMCSLMQGSTLPRRSGA
DPRMFSLVQPSTLPRRSGA

SEQ ID NO: 66073 - protein, 19 aa, Artificial Sequence
  Description of Artificial Sequence: Synthetic peptide
  Seed: DPRMCSLMQGSTLPRRSGA
DPRMFSLVQPSTMPRRSGA

SEQ ID NO: 66074 - protein, 19 aa, Artificial Sequence
  Description of Artificial Sequence: Synthetic peptide
  Seed: DPRMCSLMQGSTLPRRSGA
DPRMFSLVQPSTNPRRSGA

SEQ ID NO: 66075 - protein, 19 aa, Artificial Sequence
  Description of Artificial Sequence: Synthetic peptide
  Seed: DPRMCSLMQGSTLPRRSGA
DPRMFSLVQPSTSPRRSGA

SEQ ID NO: 66076 - protein, 19 aa, Artificial Sequence
  Description of Artificial Sequence: Synthetic peptide
  Seed: DPRMCSLMQGSTLPRRSGA
DPRMFSLVQPSTTPRRSGA

SEQ ID NO: 66077 - protein, 19 aa, Artificial Sequence
  Description of Artificial Sequence: Synthetic peptide
  Seed: DPRMCSLMQGSTLPRRSGA
DPRMFSLVQPSTVPRRSGA

SEQ ID NO: 66078 - protein, 19 aa, Artificial Sequence
  Description of Artificial Sequence: Synthetic peptide
  Seed: DPRMCSLMQGSTLPRRSGA
DPRMFSLVQSSTAPRRSGA

SEQ ID NO: 66079 - protein, 19 aa, Artificial Sequence
  Description of Artificial Sequence: Synthetic peptide
  Seed: DPRMCSLMQGSTLPRRSGA
DPRMFSLVQSSTIPRRSGA

SEQ ID NO: 66080 - protein, 19 aa, Artificial Sequence
  Description of Artificial Sequence: Synthetic peptide
  Seed: DPRMCSLMQGSTLPRRSGA
DPRMFSLVQSSTLPRRSGA

SEQ ID NO: 66081 - protein, 19 aa, Artificial Sequence
  Description of Artificial Sequence: Synthetic peptide
  Seed: DPRMCSLMQGSTLPRRSGA
DPRMFSLVQSSTMPRRSGA

SEQ ID NO: 66082 - protein, 19 aa, Artificial Sequence
  Description of Artificial Sequence: Synthetic peptide
  Seed: DPRMCSLMQGSTLPRRSGA
DPRMFSLVQSSTNPRRSGA

SEQ ID NO: 66083 - protein, 19 aa, Artificial Sequence
  Description of Artificial Sequence: Synthetic peptide
  Seed: DPRMCSLMQGSTLPRRSGA
DPRMFSLVQSSTSPRRSGA

SEQ ID NO: 66084 - protein, 19 aa, Artificial Sequence
  Description of Artificial Sequence: Synthetic peptide
  Seed: DPRMCSLMQGSTLPRRSGA
DPRMFSLVQSSTTPRRSGA

SEQ ID NO: 66085 - protein, 19 aa, Artificial Sequence
  Description of Artificial Sequence: Synthetic peptide
  Seed: DPRMCSLMQGSTLPRRSGA
DPRMFSLVQSSTVPRRSGA

SEQ ID NO: 66086 - protein, 19 aa, Artificial Sequence
  Description of Artificial Sequence: Synthetic peptide
  Seed: DPRMCSLMQGSTLPRRSGA
DPRMFSLVQTSTAPRRSGA

SEQ ID NO: 66087 - protein, 19 aa, Artificial Sequence
  Description of Artificial Sequence: Synthetic peptide
  Seed: DPRMCSLMQGSTLPRRSGA
DPRMFSLVQTSTIPRRSGA

SEQ ID NO: 66088 - protein, 19 aa, Artificial Sequence
  Description of Artificial Sequence: Synthetic peptide
  Seed: DPRMCSLMQGSTLPRRSGA
DPRMFSLVQTSTLPRRSGA

SEQ ID NO: 66089 - protein, 19 aa, Artificial Sequence
  Description of Artificial Sequence: Synthetic peptide
  Seed: DPRMCSLMQGSTLPRRSGA
DPRMFSLVQTSTMPRRSGA

SEQ ID NO: 66090 - protein, 19 aa, Artificial Sequence
  Description of Artificial Sequence: Synthetic peptide
  Seed: DPRMCSLMQGSTLPRRSGA
DPRMFSLVQTSTNPRRSGA

SEQ ID NO: 66091 - protein, 19 aa, Artificial Sequence
  Description of Artificial Sequence: Synthetic peptide
  Seed: DPRMCSLMQGSTLPRRSGA
DPRMFSLVQTSTSPRRSGA

SEQ ID NO: 66092 - protein, 19 aa, Artificial Sequence
  Description of Artificial Sequence: Synthetic peptide
  Seed: DPRMCSLMQGSTLPRRSGA
DPRMFSLVQTSTTPRRSGA

SEQ ID NO: 66093 - protein, 19 aa, Artificial Sequence
  Description of Artificial Sequence: Synthetic peptide
  Seed: DPRMCSLMQGSTLPRRSGA
DPRMFSLVQTSTVPRRSGA

SEQ ID NO: 66094 - protein, 19 aa, Artificial Sequence
  Description of Artificial Sequence: Synthetic peptide
  Seed: DPRMCSLMQGSTLPRRSGA
DPRMFSLVQVSTAPRRSGA
